United States Patent Application Publication US 2007/0042381 A1 - sequence listing, part 85

SEQ ID NO: 3895418 - RNA, 16 nt, Human adenovirus A
acuaacaaugcuuucc

SEQ ID NO: 3895419 - RNA, 22 nt, Human adenovirus A
acuaccccuccuucgcuguccc

SEQ ID NO: 3895420 - RNA, 20 nt, Human adenovirus A
acuaccgcugcucagcucca

SEQ ID NO: 3895421 - RNA, 13 nt, Human adenovirus A
acuagguauugau

SEQ ID NO: 3895422 - RNA, 18 nt, Human adenovirus A
acuauggaccuacuuacu

SEQ ID NO: 3895423 - RNA, 16 nt, Human adenovirus A
acuauucggaaaccau

SEQ ID NO: 3895424 - RNA, 15 nt, Human adenovirus A
acucaaaugugggcu

SEQ ID NO: 3895425 - RNA, 21 nt, Human adenovirus A
acucaacguagcuuuugacug

SEQ ID NO: 3895426 - RNA, 14 nt, Human adenovirus A
acucacuggccuga

SEQ ID NO: 3895427 - RNA, 16 nt, Human adenovirus A
acuccaggaaacauaa

SEQ ID NO: 3895428 - RNA, 15 nt, Human adenovirus A
acuccaucuguuuac

SEQ ID NO: 3895429 - RNA, 15 nt, Human adenovirus A
acucuaacugcucag

SEQ ID NO: 3895430 - RNA, 18 nt, Human adenovirus A
acucuccaauuuguggag

SEQ ID NO: 3895431 - RNA, 19 nt, Human adenovirus A
acucuccaauuuguggagg

SEQ ID NO: 3895432 - RNA, 20 nt, Human adenovirus A
acucuccugagcgucaccca

SEQ ID NO: 3895433 - RNA, 17 nt, Human adenovirus A
acucuggcgaagggccu

SEQ ID NO: 3895434 - RNA, 18 nt, Human adenovirus A
acugaauauuuagacuau

SEQ ID NO: 3895435 - RNA, 16 nt, Human adenovirus A
acugaugaucuucccg

SEQ ID NO: 3895436 - RNA, 20 nt, Human adenovirus A
acugauuuugcagguuuaaa

SEQ ID NO: 3895437 - RNA, 18 nt, Human adenovirus A
acugcaaaauugaaaaac

SEQ ID NO: 3895438 - RNA, 21 nt, Human adenovirus A
acugcagccugucuuaaaauc

SEQ ID NO: 3895439 - RNA, 21 nt, Human adenovirus A
acugccggucgcgaaacuggg

SEQ ID NO: 3895440 - RNA, 19 nt, Human adenovirus A
acugggaguugcgagcugc

SEQ ID NO: 3895441 - RNA, 19 nt, Human adenovirus A
acugguaacggucuucaag

SEQ ID NO: 3895442 - RNA, 17 nt, Human adenovirus A
acuguaaaaccuacaca

SEQ ID NO: 3895443 - RNA, 22 nt, Human adenovirus A
acuguagacgauguuauugacu

SEQ ID NO: 3895444 - RNA, 14 nt, Human adenovirus A
acugucccccacca

SEQ ID NO: 3895445 - RNA, 15 nt, Human adenovirus A
acugugcgguuuaag

SEQ ID NO: 3895446 - RNA, 18 nt, Human adenovirus A
acugugcugcaaaguuuu

SEQ ID NO: 3895447 - RNA, 18 nt, Human adenovirus A
acuguugaugcaguaauu

SEQ ID NO: 3895448 - RNA, 22 nt, Human adenovirus A
acuguuguauuauuugaacaca

SEQ ID NO: 3895449 - RNA, 14 nt, Human adenovirus A
acuuaauuucuaga

SEQ ID NO: 3895450 - RNA, 20 nt, Human adenovirus A
acuuagaccggauggguaca

SEQ ID NO: 3895451 - RNA, 16 nt, Human adenovirus A
acuuaguuacuuugua

SEQ ID NO: 3895452 - RNA, 16 nt, Human adenovirus A
acuuaucagccagagc

SEQ ID NO: 3895453 - RNA, 15 nt, Human adenovirus A
acuugggaaauuugu

SEQ ID NO: 3895454 - RNA, 16 nt, Human adenovirus A
acuugggaaauuuguc

SEQ ID NO: 3895455 - RNA, 16 nt, Human adenovirus A
acuuguuuuuucugac

SEQ ID NO: 3895456 - RNA, 20 nt, Human adenovirus A
acuuguuuuuucugacaugg

SEQ ID NO: 3895457 - RNA, 19 nt, Human adenovirus A
acuuuagaaaggauguaaa

SEQ ID NO: 3895458 - RNA, 19 nt, Human adenovirus A
acuuuagccccagcggcag

SEQ ID NO: 3895459 - RNA, 21 nt, Human adenovirus A
acuuugagcuuccagaggagc

SEQ ID NO: 3895460 - RNA, 17 nt, Human adenovirus A
acuuuucaaacuuuaca

SEQ ID NO: 3895461 - RNA, 14 nt, Human adenovirus A
agaaacugugcccg

SEQ ID NO: 3895462 - RNA, 18 nt, Human adenovirus A
agaagacaaagagugacu

SEQ ID NO: 3895463 - RNA, 21 nt, Human adenovirus A
agaaggaaaggcauggaaaaa

SEQ ID NO: 3895464 - RNA, 23 nt, Human adenovirus A
agaauaggggaugguuuaacauu

SEQ ID NO: 3895465 - RNA, 16 nt, Human adenovirus A
agaaucgcaagcaggc

SEQ ID NO: 3895466 - RNA, 15 nt, Human adenovirus A
agaaugaucacagca

SEQ ID NO: 3895467 - RNA, 15 nt, Human adenovirus A
agacaauuccaacga

SEQ ID NO: 3895468 - RNA, 13 nt, Human adenovirus A
agacaguuucauc

SEQ ID NO: 3895469 - RNA, 24 nt, Human adenovirus A
agacauauggcaccaaggcgugga

SEQ ID NO: 3895470 - RNA, 16 nt, Human adenovirus A
agaccaaaauuuucaa

SEQ ID NO: 3895471 - RNA, 16 nt, Human adenovirus A
agaccaaccaccgcca

SEQ ID NO: 3895472 - RNA, 16 nt, Human adenovirus A
agacgagguccaucac

SEQ ID NO: 3895473 - RNA, 21 nt, Human adenovirus A
agagaacaaacagugccuguu

SEQ ID NO: 3895474 - RNA, 15 nt, Human adenovirus A
agagagcuaagcgac

SEQ ID NO: 3895475 - RNA, 17 nt, Human adenovirus A
agagcacacugggaaau

SEQ ID NO: 3895476 - RNA, 13 nt, Human adenovirus A
agagcaggcugga

SEQ ID NO: 3895477 - RNA, 13 nt, Human adenovirus A
agaggaaaagcug

SEQ ID NO: 3895478 - RNA, 23 nt, Human adenovirus A
agaggagaaggaggaggagcgga

SEQ ID NO: 3895479 - RNA, 15 nt, Human adenovirus A
agaggcauaaaaacu

SEQ ID NO: 3895480 - RNA, 20 nt, Human adenovirus A
agauaacgcuaagcuuaaua

SEQ ID NO: 3895481 - RNA, 23 nt, Human adenovirus A
agauaacggaggaggagguggcu

SEQ ID NO: 3895482 - RNA, 20 nt, Human adenovirus A
agauauaguacugcuuccag

SEQ ID NO: 3895483 - RNA, 14 nt, Human adenovirus A
agaucacagccaga

SEQ ID NO: 3895484 - RNA, 18 nt, Human adenovirus A
agaucuuaggguuugauu

SEQ ID NO: 3895485 - RNA, 16 nt, Human adenovirus A
agaugagccuguauau

SEQ ID NO: 3895486 - RNA, 16 nt, Human adenovirus A
agaugcauccuguccu

SEQ ID NO: 3895487 - RNA, 12 nt, Human adenovirus A
agaugccuggca

SEQ ID NO: 3895488 - RNA, 14 nt, Human adenovirus A
agauuaccacgccc

SEQ ID NO: 3895489 - RNA, 14 nt, Human adenovirus A
agauucuucuuccc

SEQ ID NO: 3895490 - RNA, 14 nt, Human adenovirus A
agauuguaauuuuu

SEQ ID NO: 3895491 - RNA, 20 nt, Human adenovirus A
agcaaaaauguuuucuggau

SEQ ID NO: 3895492 - RNA, 13 nt, Human adenovirus A
agcaaaaugaauu

SEQ ID NO: 3895493 - RNA, 12 nt, Human adenovirus A
agcaaacacugc

SEQ ID NO: 3895494 - RNA, 11 nt, Human adenovirus A
agcaaagccau

SEQ ID NO: 3895495 - RNA, 17 nt, Human adenovirus A
agcaaaugcccugcaaa

SEQ ID NO: 3895496 - RNA, 18 nt, Human adenovirus A
agcacaacuccaugugga

SEQ ID NO: 3895497 - RNA, 14 nt, Human adenovirus A
agcaccugccgcca

SEQ ID NO: 3895498 - RNA, 19 nt, Human adenovirus A
agcacgccaaagccacacc

SEQ ID NO: 3895499 - RNA, 12 nt, Human adenovirus A
agcacuggcaac

SEQ ID NO: 3895500 - RNA, 15 nt, Human adenovirus A
agcagagucgagguc

SEQ ID NO: 3895501 - RNA, 12 nt, Human adenovirus A
agcagcgguggc

SEQ ID NO: 3895502 - RNA, 15 nt, Human adenovirus A
agcagcuuggcuaua

SEQ ID NO: 3895503 - RNA, 19 nt, Human adenovirus A
agcagguguaaccagcugg

SEQ ID NO: 3895504 - RNA, 10 nt, Human adenovirus A
agcagugaaa

SEQ ID NO: 3895505 - RNA, 13 nt, Human adenovirus A
agcagugcggccu

SEQ ID NO: 3895506 - RNA, 18 nt, Human adenovirus A
agcagugcggccuguugc

SEQ ID NO: 3895507 - RNA, 17 nt, Human adenovirus A
agcauaaaagcuucaau

SEQ ID NO: 3895508 - RNA, 14 nt, Human adenovirus A
agcauuaaacgcuu

SEQ ID NO: 3895509 - RNA, 19 nt, Human adenovirus A
agcauuaguucuuuucuuu

SEQ ID NO: 3895510 - RNA, 23 nt, Human adenovirus A
agcauuaguucuuuucuuuaugu

SEQ ID NO: 3895511 - RNA, 19 nt, Human adenovirus A
agcauucucuaacaagcug

SEQ ID NO: 3895512 - RNA, 11 nt, Human adenovirus A
agccacaggaa

SEQ ID NO: 3895513 - RNA, 18 nt, Human adenovirus A
agccacaguagacauugu

SEQ ID NO: 3895514 - RNA, 20 nt, Human adenovirus A
agccagauguaaaaguacgu

SEQ ID NO: 3895515 - RNA, 18 nt, Human adenovirus A
agccagcagcaaagaaag

SEQ ID NO: 3895516 - RNA, 15 nt, Human adenovirus A
agccaugcaaauagu

SEQ ID NO: 3895517 - RNA, 20 nt, Human adenovirus A
agccaugcuaugcaggcagc

SEQ ID NO: 3895518 - RNA, 15 nt, Human adenovirus A
agccauggcgaccag

SEQ ID NO: 3895519 - RNA, 17 nt, Human adenovirus A
agccauggcgaccagug

SEQ ID NO: 3895520 - RNA, 19 nt, Human adenovirus A
agccauugguuuaaugcau

SEQ ID NO: 3895521 - RNA, 23 nt, Human adenovirus A
agcccaacccauugacaaagaug

SEQ ID NO: 3895522 - RNA, 13 nt, Human adenovirus A
agcccaacccuuc

SEQ ID NO: 3895523 - RNA, 14 nt, Human adenovirus A
agcccaacccuucc

SEQ ID NO: 3895524 - RNA, 12 nt, Human adenovirus A
agcccacaagga

SEQ ID NO: 3895525 - RNA, 18 nt, Human adenovirus A
agcccccgcguccuccuu

SEQ ID NO: 3895526 - RNA, 16 nt, Human adenovirus A
cagcccaacccuuccc

SEQ ID NO: 3895527 - RNA, 21 nt, Human adenovirus A
cagccgcgcagaugagcuucu

SEQ ID NO: 3895528 - RNA, 17 nt, Human adenovirus A
cagccgcuaccaucacu

SEQ ID NO: 3895529 - RNA, 15 nt, Human adenovirus A
cagccuacaaugcaa

SEQ ID NO: 3895530 - RNA, 21 nt, Human adenovirus A
cagccuuuauuuaucugugcu

SEQ ID NO: 3895531 - RNA, 12 nt, Human adenovirus A
cagcgcacuggc

SEQ ID NO: 3895532 - RNA, 21 nt, Human adenovirus A
cagcuaacaaugcagcaaaca

SEQ ID NO: 3895533 - RNA, 20 nt, Human adenovirus A
cagcuacuaauuaagcgagc

SEQ ID NO: 3895534 - RNA, 23 nt, Human adenovirus A
cagcuccaaccaugaaaacagca

SEQ ID NO: 3895535 - RNA, 14 nt, Human adenovirus A
cagcucuugcagua

SEQ ID NO: 3895536 - RNA, 21 nt, Human adenovirus A
cagcugaacgacgaagucaca

SEQ ID NO: 3895537 - RNA, 22 nt, Human adenovirus A
cagcugccgucuucguggagaa

SEQ ID NO: 3895538 - RNA, 15 nt, Human adenovirus A
cagcugguauuuggc

SEQ ID NO: 3895539 - RNA, 11 nt, Human adenovirus A
cagcuguggaa

SEQ ID NO: 3895540 - RNA, 20 nt, Human adenovirus A
cagcuugcgggcggugcacg

SEQ ID NO: 3895541 - RNA, 18 nt, Human adenovirus A
caggaaaaaaaagaaagu

SEQ ID NO: 3895542 - RNA, 21 nt, Human adenovirus A
caggaaaaaaaagaaaguuua

SEQ ID NO: 3895543 - RNA, 15 nt, Human adenovirus A
caggaagagccucaa

SEQ ID NO: 3895544 - RNA, 19 nt, Human adenovirus A
caggaagagccucaauguc

SEQ ID NO: 3895545 - RNA, 16 nt, Human adenovirus A
caggaggacacuggca

SEQ ID NO: 3895546 - RNA, 13 nt, Human adenovirus A
caggcaaagaaca

SEQ ID NO: 3895547 - RNA, 16 nt, Human adenovirus A
caggcggucugccauu

SEQ ID NO: 3895548 - RNA, 18 nt, Human adenovirus A
caggcggucugccauucc

SEQ ID NO: 3895549 - RNA, 12 nt, Human adenovirus A
caggcuggaggu

SEQ ID NO: 3895550 - RNA, 22 nt, Human adenovirus A
cagggaagauuaaucacaucaa

SEQ ID NO: 3895551 - RNA, 12 nt, Human adenovirus A
caggugcaagaa

SEQ ID NO: 3895552 - RNA, 13 nt, Human adenovirus A
cagguggcagcga

SEQ ID NO: 3895553 - RNA, 17 nt, Human adenovirus A
cagguguauuagcacuu

SEQ ID NO: 3895554 - RNA, 15 nt, Human adenovirus A
caguacaaagccagg

SEQ ID NO: 3895555 - RNA, 17 nt, Human adenovirus A
caguacacuugggaaau

SEQ ID NO: 3895556 - RNA, 17 nt, Human adenovirus A
caguacgaggacugauc

SEQ ID NO: 3895557 - RNA, 22 nt, Human adenovirus A
caguaggcgaucguucaacuuu

SEQ ID NO: 3895558 - RNA, 17 nt, Human adenovirus A
caguaucaguggaguuc

SEQ ID NO: 3895559 - RNA, 11 nt, Human adenovirus A
caguauuuugu

SEQ ID NO: 3895560 - RNA, 16 nt, Human adenovirus A
cagucuguuuaguccu

SEQ ID NO: 3895561 - RNA, 19 nt, Human adenovirus A
cagucuugaaugcucugga

SEQ ID NO: 3895562 - RNA, 22 nt, Human adenovirus A
caguguuagucgcgcacugggc

SEQ ID NO: 3895563 - RNA, 18 nt, Human adenovirus A
caguucaugcuaaaagcu

SEQ ID NO: 3895564 - RNA, 13 nt, Human adenovirus A
caguuucuggagc

SEQ ID NO: 3895565 - RNA, 18 nt, Human adenovirus A
caguuugggcuaguucuu

SEQ ID NO: 3895566 - RNA, 21 nt, Human adenovirus A
cauaaagagucucaaaagcag

SEQ ID NO: 3895567 - RNA, 13 nt, Human adenovirus A
cauaacauguuua

SEQ ID NO: 3895568 - RNA, 15 nt, Human adenovirus A
cauaacauguuuaug

SEQ ID NO: 3895569 - RNA, 18 nt, Human adenovirus A
cauaauacgguguucuca

SEQ ID NO: 3895570 - RNA, 18 nt, Human adenovirus A
cauacaaaucagaagcca

SEQ ID NO: 3895571 - RNA, 22 nt, Human adenovirus A
cauacacucauguauuuuuuca

SEQ ID NO: 3895572 - RNA, 16 nt, Human adenovirus A
cauacauaauuuuaaa

SEQ ID NO: 3895573 - RNA, 15 nt, Human adenovirus A
cauacaucaccucuu

SEQ ID NO: 3895574 - RNA, 18 nt, Human adenovirus A
cauaccugggucacuuag

SEQ ID NO: 3895575 - RNA, 22 nt, Human adenovirus A
cauacgcuugugcagccuuucu

SEQ ID NO: 3895576 - RNA, 18 nt, Human adenovirus A
cauagccaaucaggcugu

SEQ ID NO: 3895577 - RNA, 14 nt, Human adenovirus A
cauaggagcugcac

SEQ ID NO: 3895578 - RNA, 17 nt, Human adenovirus A
caucagccgcccaagga

SEQ ID NO: 3895579 - RNA, 15 nt, Human adenovirus A
caucaggagcagaaa

SEQ ID NO: 3895580 - RNA, 12 nt, Human adenovirus A
cauccaaaacca

SEQ ID NO: 3895581 - RNA, 14 nt, Human adenovirus A
cauccgcaggcagu

SEQ ID NO: 3895582 - RNA, 20 nt, Human adenovirus A
cauccggcgcgcccggcucc

SEQ ID NO: 3895583 - RNA, 19 nt, Human adenovirus A
caucguaaacaacagacuu

SEQ ID NO: 3895584 - RNA, 18 nt, Human adenovirus A
caucucaccacugaaacu

SEQ ID NO: 3895585 - RNA, 15 nt, Human adenovirus A
caucucauaaucagu

SEQ ID NO: 3895586 - RNA, 19 nt, Human adenovirus A
caugauguuuaauaaagcg

SEQ ID NO: 3895587 - RNA, 22 nt, Human adenovirus A
caugauguuuaauaaagcgcag

SEQ ID NO: 3895588 - RNA, 15 nt, Human adenovirus A
caugcaaagccagcc

SEQ ID NO: 3895589 - RNA, 14 nt, Human adenovirus A
caugcuaaaagcuu

SEQ ID NO: 3895590 - RNA, 17 nt, Human adenovirus A
cauggacucuacuaaca

SEQ ID NO: 3895591 - RNA, 22 nt, Human adenovirus A
cauggcuaguucuuacuuugac

SEQ ID NO: 3895592 - RNA, 17 nt, Human adenovirus A
cauggcugaagaggagg

SEQ ID NO: 3895593 - RNA, 21 nt, Human adenovirus A
caugguuugcuaacagcucuc

SEQ ID NO: 3895594 - RNA, 18 nt, Human adenovirus A
cauguauaauaaaacugg

SEQ ID NO: 3895595 - RNA, 22 nt, Human adenovirus A
cauguuauuuaaaauuccauaa

SEQ ID NO: 3895596 - RNA, 21 nt, Human adenovirus A
cauuaaaaucaaccuuucgau

SEQ ID NO: 3895597 - RNA, 16 nt, Human adenovirus A
cauuacaauuaacugc

SEQ ID NO: 3895598 - RNA, 14 nt, Human adenovirus A
cauuaccagcagcc

SEQ ID NO: 3895599 - RNA, 18 nt, Human adenovirus A
cauuaccagcagccaaaa

SEQ ID NO: 3895600 - RNA, 13 nt, Human adenovirus A
cauuaccucugua

SEQ ID NO: 3895601 - RNA, 14 nt, Human adenovirus A
cauuacgcagggaa

SEQ ID NO: 3895602 - RNA, 21 nt, Human adenovirus A
cauuccugcagcacuguaaaa

SEQ ID NO: 3895603 - RNA, 18 nt, Human adenovirus A
cauucucuaacaagcugc

SEQ ID NO: 3895604 - RNA, 22 nt, Human adenovirus A
cauugccgcacggccaaugccc

SEQ ID NO: 3895605 - RNA, 21 nt, Human adenovirus A
cauugcgauaaacuggauuug

SEQ ID NO: 3895606 - RNA, 18 nt, Human adenovirus A
cauuggaguacaagcuug

SEQ ID NO: 3895607 - RNA, 20 nt, Human adenovirus A
cauugugcuaaauguaacug

SEQ ID NO: 3895608 - RNA, 17 nt, Human adenovirus A
cauuuaagcaacauuaa

SEQ ID NO: 3895609 - RNA, 18 nt, Human adenovirus A
cauuuacugcagccuguc

SEQ ID NO: 3895610 - RNA, 17 nt, Human adenovirus A
cauuugaucagaaaaaa

SEQ ID NO: 3895611 - RNA, 20 nt, Human adenovirus A
cauuugaucagaaaaaacua

SEQ ID NO: 3895612 - RNA, 14 nt, Human adenovirus A
cauuuguauucaua

SEQ ID NO: 3895613 - RNA, 13 nt, Human adenovirus A
ccaaaaacaccuu

SEQ ID NO: 3895614 - RNA, 22 nt, Human adenovirus A
ccaaaguucgccuacacaacac

SEQ ID NO: 3895615 - RNA, 18 nt, Human adenovirus A
ccaaauuuaaggccaggg

SEQ ID NO: 3895616 - RNA, 16 nt, Human adenovirus A
ccaacaugccaaacgu

SEQ ID NO: 3895617 - RNA, 13 nt, Human adenovirus A
ccaacccuuccca

SEQ ID NO: 3895618 - RNA, 13 nt, Human adenovirus A
ccaaccucacugc

SEQ ID NO: 3895619 - RNA, 20 nt, Human adenovirus A
ccaagaauaaaaacacacac

SEQ ID NO: 3895620 - RNA, 20 nt, Human adenovirus A
ccaaucaggcuguacagaaa

SEQ ID NO: 3895621 - RNA, 20 nt, Human adenovirus A
ccaaugaaacccgcugugag

SEQ ID NO: 3895622 - RNA, 20 nt, Human adenovirus A
ccaauuuguggaggaauuua

SEQ ID NO: 3895623 - RNA, 13 nt, Human adenovirus A
ccacaaagcagua

SEQ ID NO: 3895624 - RNA, 14 nt, Human adenovirus A
ccacaggugguggg

SEQ ID NO: 3895625 - RNA, 13 nt, Human adenovirus A
ccaccaccaaacu

SEQ ID NO: 3895626 - RNA, 13 nt, Human adenovirus A
ccaccgaaacgca

SEQ ID NO: 3895627 - RNA, 18 nt, Human adenovirus A
ccaccgacgaagcgucag

SEQ ID NO: 3895628 - RNA, 19 nt, Human adenovirus A
ccacgccuggguaccgugg

SEQ ID NO: 3895629 - RNA, 15 nt, Human adenovirus A
ccacucucgcaggcu

SEQ ID NO: 3895630 - RNA, 19 nt, Human adenovirus A
ccacugcgucaguaacaaa

SEQ ID NO: 3895631 - RNA, 23 nt, Human adenovirus A
ccacuuuaagucugucuguugcc

SEQ ID NO: 3895632 - RNA, 17 nt, Human adenovirus A
ccagaaaaaggaguucg

SEQ ID NO: 3895633 - RNA, 16 nt, Human adenovirus A
ccagaagcacuggcaa

SEQ ID NO: 3895634 - RNA, 19 nt, Human adenovirus A
ccagagcaccccuucccac

SEQ ID NO: 3895635 - RNA, 22 nt, Human adenovirus A
ccagauuucagcacgagagggg

SEQ ID NO: 3895636 - RNA, 11 nt, Human adenovirus A
ccagcagccaa

SEQ ID NO: 3895637 - RNA, 21 nt, Human adenovirus A
ccagcccaaccuguaacccaa

SEQ ID NO: 3895638 - RNA, 17 nt, Human adenovirus A
ccagcgccaccugccau

SEQ ID NO: 3895639 - RNA, 13 nt, Human adenovirus A
ccagcucuuggaa

SEQ ID NO: 3895640 - RNA, 15 nt, Human adenovirus A
ccagcucuuggaaua

SEQ ID NO: 3895641 - RNA, 14 nt, Human adenovirus A
ccagcucuuuugga

SEQ ID NO: 3895642 - RNA, 11 nt, Human adenovirus A
ccagugccgcc

SEQ ID NO: 3895643 - RNA, 13 nt, Human adenovirus A
gaucacagccaga

SEQ ID NO: 3895644 - RNA, 16 nt, Human adenovirus A
gauccagaggaggagg

SEQ ID NO: 3895645 - RNA, 23 nt, Human adenovirus A
gaucccguagguuccguuccugu

SEQ ID NO: 3895646 - RNA, 17 nt, Human adenovirus A
gaucguguuauguggcg

SEQ ID NO: 3895647 - RNA, 15 nt, Human adenovirus A
gaucugucagugaaa

SEQ ID NO: 3895648 - RNA, 20 nt, Human adenovirus A
gaugaaggucccuugcuuga

SEQ ID NO: 3895649 - RNA, 12 nt, Human adenovirus A
gaugcagcgacc

SEQ ID NO: 3895650 - RNA, 13 nt, Human adenovirus A
gaugcuuugggag

SEQ ID NO: 3895651 - RNA, 19 nt, Human adenovirus A
gauggaucuggagccacag

SEQ ID NO: 3895652 - RNA, 14 nt, Human adenovirus A
gauggguacagaug

SEQ ID NO: 3895653 - RNA, 21 nt, Human adenovirus A
gauggguguuuggcagcaaug

SEQ ID NO: 3895654 - RNA, 17 nt, Human adenovirus A
gauguugggcccaagau

SEQ ID NO: 3895655 - RNA, 16 nt, Human adenovirus A
gauucaaacaauaaca

SEQ ID NO: 3895656 - RNA, 15 nt, Human adenovirus A
gauucuucuucccaa

SEQ ID NO: 3895657 - RNA, 16 nt, Human adenovirus A
gauuucgauaaacaaa

SEQ ID NO: 3895658 - RNA, 16 nt, Human adenovirus A
gcaaaccuagcugcuc

SEQ ID NO: 3895659 - RNA, 20 nt, Human adenovirus A
gcaaagaaacacaugaugga

SEQ ID NO: 3895660 - RNA, 21 nt, Human adenovirus A
gcaaauaguuccguaaagacu

SEQ ID NO: 3895661 - RNA, 18 nt, Human adenovirus A
gcaaaugcccugcaaaaa

SEQ ID NO: 3895662 - RNA, 12 nt, Human adenovirus A
gcaacagcuauu

SEQ ID NO: 3895663 - RNA, 13 nt, Human adenovirus A
gcaaguaggacca

SEQ ID NO: 3895664 - RNA, 15 nt, Human adenovirus A
gcaauauuccagcuc

SEQ ID NO: 3895665 - RNA, 18 nt, Human adenovirus A
gcaaucuaguuucuuaca

SEQ ID NO: 3895666 - RNA, 16 nt, Human adenovirus A
gcaauuagggccagca

SEQ ID NO: 3895667 - RNA, 22 nt, Human adenovirus A
gcacaaguugcagggcgcccau

SEQ ID NO: 3895668 - RNA, 22 nt, Human adenovirus A
gcacaauaguuuaauguuuccc

SEQ ID NO: 3895669 - RNA, 17 nt, Human adenovirus A
gcacgccaaagccacac

SEQ ID NO: 3895670 - RNA, 13 nt, Human adenovirus A
gcacugggccagg

SEQ ID NO: 3895671 - RNA, 18 nt, Human adenovirus A
gcacuggucgcaccacug

SEQ ID NO: 3895672 - RNA, 13 nt, Human adenovirus A
gcacuuccuucag

SEQ ID NO: 3895673 - RNA, 20 nt, Human adenovirus A
gcagacgcaugaaggguggg

SEQ ID NO: 3895674 - RNA, 15 nt, Human adenovirus A
gcagcaaacacugcu

SEQ ID NO: 3895675 - RNA, 15 nt, Human adenovirus A
gcagcaacaaggaaa

SEQ ID NO: 3895676 - RNA, 21 nt, Human adenovirus A
gcagcugauuucagcuucuac

SEQ ID NO: 3895677 - RNA, 13 nt, Human adenovirus A
gcagcuggagugg

SEQ ID NO: 3895678 - RNA, 23 nt, Human adenovirus A
gcaggaaaucugggaggaagaau

SEQ ID NO: 3895679 - RNA, 13 nt, Human adenovirus A
gcaggcuggaggu

SEQ ID NO: 3895680 - RNA, 15 nt, Human adenovirus A
gcagguggcagcgau

SEQ ID NO: 3895681 - RNA, 22 nt, Human adenovirus A
gcaguaaaucuuccgccaaagg

SEQ ID NO: 3895682 - RNA, 20 nt, Human adenovirus A
gcaguaggugaaauaaaaaa

SEQ ID NO: 3895683 - RNA, 17 nt, Human adenovirus A
gcagucugacagcaauu

SEQ ID NO: 3895684 - RNA, 22 nt, Human adenovirus A
gcaucuauaguaaaaaugccag

SEQ ID NO: 3895685 - RNA, 16 nt, Human adenovirus A
gcauuaccagcagcca

SEQ ID NO: 3895686 - RNA, 17 nt, Human adenovirus A
gcauuaccagcagccaa

SEQ ID NO: 3895687 - RNA, 21 nt, Human adenovirus A
gcauuacgucgcuaaauggau

SEQ ID NO: 3895688 - RNA, 16 nt, Human adenovirus A
gcauuaguucuuuucu

SEQ ID NO: 3895689 - RNA, 21 nt, Human adenovirus A
gccaaacagcuguggaaagca

SEQ ID NO: 3895690 - RNA, 21 nt, Human adenovirus A
gccaacaaaacuuaucagcca

SEQ ID NO: 3895691 - RNA, 20 nt, Human adenovirus A
gccaacaucaugaaaacagc

SEQ ID NO: 3895692 - RNA, 15 nt, Human adenovirus A
gccaaucaggcugua

SEQ ID NO: 3895693 - RNA, 22 nt, Human adenovirus A
gccacaccuccacccaaucaaa

SEQ ID NO: 3895694 - RNA, 16 nt, Human adenovirus A
gccagaagcacuggca

SEQ ID NO: 3895695 - RNA, 22 nt, Human adenovirus A
gccagcaagugccuccucagua

SEQ ID NO: 3895696 - RNA, 15 nt, Human adenovirus A
ccggcguagaccaac

SEQ ID NO: 3895697 - RNA, 13 nt, Human adenovirus A
ccgggcaagcuuc

SEQ ID NO: 3895698 - RNA, 18 nt, Human adenovirus A
ccgguugaaacagacccc

SEQ ID NO: 3895699 - RNA, 14 nt, Human adenovirus A
ccgucgcuuucaac

SEQ ID NO: 3895700 - RNA, 18 nt, Human adenovirus A
ccgugcguuaccacccua

SEQ ID NO: 3895701 - RNA, 21 nt, Human adenovirus A
ccgugguuggugggcagggau

SEQ ID NO: 3895702 - RNA, 20 nt, Human adenovirus A
ccguucccugcguucacuua

SEQ ID NO: 3895703 - RNA, 20 nt, Human adenovirus A
ccguuuucuucuugagccca

SEQ ID NO: 3895704 - RNA, 20 nt, Human adenovirus A
ccuaauggagugucacugcc

SEQ ID NO: 3895705 - RNA, 16 nt, Human adenovirus A
ccuacacaacacaaaa

SEQ ID NO: 3895706 - RNA, 20 nt, Human adenovirus A
ccuacuguuaccaauggaac

SEQ ID NO: 3895707 - RNA, 22 nt, Human adenovirus A
ccuacuuacuggggugccuaau

SEQ ID NO: 3895708 - RNA, 16 nt, Human adenovirus A
ccuacuucacccuggg

SEQ ID NO: 3895709 - RNA, 17 nt, Human adenovirus A
ccuccccgcuauuuggg

SEQ ID NO: 3895710 - RNA, 18 nt, Human adenovirus A
ccucccucuuggccagcu

SEQ ID NO: 3895711 - RNA, 19 nt, Human adenovirus A
ccuccuauguuagcgccag

SEQ ID NO: 3895712 - RNA, 14 nt, Human adenovirus A
ccuccuuauccuuc

SEQ ID NO: 3895713 - RNA, 12 nt, Human adenovirus A
ccuccuucccau

SEQ ID NO: 3895714 - RNA, 11 nt, Human adenovirus A
ccucuucccaa

SEQ ID NO: 3895715 - RNA, 21 nt, Human adenovirus A
ccugaugcuuuucgccagcag

SEQ ID NO: 3895716 - RNA, 23 nt, Human adenovirus A
ccugcaguuauuggacaccaugg

SEQ ID NO: 3895717 - RNA, 16 nt, Human adenovirus A
ccugcgggaagcgggg

SEQ ID NO: 3895718 - RNA, 14 nt, Human adenovirus A
ccugcgguggugga

SEQ ID NO: 3895719 - RNA, 17 nt, Human adenovirus A
ccugcuccgacaacagc

SEQ ID NO: 3895720 - RNA, 17 nt, Human adenovirus A
ccuguaguugcagcaga

SEQ ID NO: 3895721 - RNA, 21 nt, Human adenovirus A
ccugucuacaaaucuuucaau

SEQ ID NO: 3895722 - RNA, 17 nt, Human adenovirus A
ccuucccaacuacuuua

SEQ ID NO: 3895723 - RNA, 22 nt, Human adenovirus A
ccuuccgugguuugguggaaaa

SEQ ID NO: 3895724 - RNA, 17 nt, Human adenovirus A
ccuucgaaaugcaggga

SEQ ID NO: 3895725 - RNA, 20 nt, Human adenovirus A
ccuucgcugucccgagcgcg

SEQ ID NO: 3895726 - RNA, 16 nt, Human adenovirus A
ccuucuacgcuuccaa

SEQ ID NO: 3895727 - RNA, 20 nt, Human adenovirus A
ccuuggaagaggugccuaaa

SEQ ID NO: 3895728 - RNA, 21 nt, Human adenovirus A
ccuuguggaauuccgcagugg

SEQ ID NO: 3895729 - RNA, 16 nt, Human adenovirus A
ccuuuaccaacaccaa

SEQ ID NO: 3895730 - RNA, 17 nt, Human adenovirus A
ccuuucucugugacaaa

SEQ ID NO: 3895731 - RNA, 23 nt, Human adenovirus A
ccuuugaagagcucgacaaggaa

SEQ ID NO: 3895732 - RNA, 14 nt, Human adenovirus A
cgaaacuguugacc

SEQ ID NO: 3895733 - RNA, 23 nt, Human adenovirus A
cgacaaaaauuuucccaacaaug

SEQ ID NO: 3895734 - RNA, 17 nt, Human adenovirus A
cgacacuaucaccgccg

SEQ ID NO: 3895735 - RNA, 22 nt, Human adenovirus A
cgaccgccuuuucuagaacaaa

SEQ ID NO: 3895736 - RNA, 16 nt, Human adenovirus A
cgacucauaagcugug

SEQ ID NO: 3895737 - RNA, 12 nt, Human adenovirus A
cgagacugcagg

SEQ ID NO: 3895738 - RNA, 12 nt, Human adenovirus A
cgagcugccacc

SEQ ID NO: 3895739 - RNA, 21 nt, Human adenovirus A
cgaguguuaauucccaucugu

SEQ ID NO: 3895740 - RNA, 18 nt, Human adenovirus A
cgaugaugccgcaguggu

SEQ ID NO: 3895741 - RNA, 13 nt, Human adenovirus A
cgauuaagacaua

SEQ ID NO: 3895742 - RNA, 17 nt, Human adenovirus A
cgauuauugucacauua

SEQ ID NO: 3895743 - RNA, 17 nt, Human adenovirus A
cgauuccaaggaauguc

SEQ ID NO: 3895744 - RNA, 15 nt, Human adenovirus A
cgcacugggccagga

SEQ ID NO: 3895745 - RNA, 18 nt, Human adenovirus A
cgcagcugcggccgcaac

SEQ ID NO: 3895746 - RNA, 12 nt, Human adenovirus A
cgccaagccugu

SEQ ID NO: 3895747 - RNA, 21 nt, Human adenovirus A
cgccaaguaacaacacgggcu

SEQ ID NO: 3895748 - RNA, 16 nt, Human adenovirus A
cgccaauaaaaacaac

SEQ ID NO: 3895749 - RNA, 18 nt, Human adenovirus A
cgccgcgacggcggcgca

SEQ ID NO: 3895750 - RNA, 17 nt, Human adenovirus A
cgccggcgaacgggcag

SEQ ID NO: 3895751 - RNA, 18 nt, Human adenovirus A
cgccggcgaacgggcagc

SEQ ID NO: 3895752 - RNA, 17 nt, Human adenovirus A
cgcgcaagcuuucauug

SEQ ID NO: 3895753 - RNA, 17 nt, Human adenovirus A
cgcgcacugggccagga

SEQ ID NO: 3895754 - RNA, 13 nt, Human adenovirus A
cgcgcgcauugcg

SEQ ID NO: 3895755 - RNA, 22 nt, Human adenovirus A
cgcggagacgggccgcagcugc

SEQ ID NO: 3895756 - RNA, 20 nt, Human adenovirus A
cgcggcgguguaugccaaca

SEQ ID NO: 3895757 - RNA, 22 nt, Human adenovirus A
cgcguuguacaaagggggcgca

SEQ ID NO: 3895758 - RNA, 20 nt, Human adenovirus A
cgcuacagauccauguugcu

SEQ ID NO: 3895759 - RNA, 18 nt, Human adenovirus A
cgcucaaaggcaggcauu

SEQ ID NO: 3895760 - RNA, 17 nt, Human adenovirus A
cgcucuggcaggggaag

SEQ ID NO: 3895761 - RNA, 13 nt, Human adenovirus A
cgcugcagcuucc

SEQ ID NO: 3895762 - RNA, 23 nt, Human adenovirus A
cgcuuuggaggcagcuggagugg

SEQ ID NO: 3895763 - RNA, 20 nt, Human adenovirus A
cgcuuuuuugaguacucagc

SEQ ID NO: 3895764 - RNA, 13 nt, Human adenovirus A
cggaggaaagggc

SEQ ID NO: 3895765 - RNA, 15 nt, Human adenovirus A
cggcaacagcagcaa

SEQ ID NO: 3895766 - RNA, 22 nt, Human adenovirus A
cggcaaguaaaacgcauuuugc

SEQ ID NO: 3895767 - RNA, 22 nt, Human adenovirus A
cggcaggaaaucugggaggaag

SEQ ID NO: 3895768 - RNA, 21 nt, Human adenovirus A
cggcauuuagaggcuggagcu

SEQ ID NO: 3895769 - RNA, 16 nt, Human adenovirus A
cggccauuggagccgu

SEQ ID NO: 3895770 - RNA, 22 nt, Human adenovirus A
cggcgaucaucgcggagagggc

SEQ ID NO: 3895771 - RNA, 16 nt, Human adenovirus A
cggcgcggcucaagac

SEQ ID NO: 3895772 - RNA, 20 nt, Human adenovirus A
cggcucuuuugcagcuccaa

SEQ ID NO: 3895773 - RNA, 20 nt, Human adenovirus A
cgggagcaggaacagaggac

SEQ ID NO: 3895774 - RNA, 19 nt, Human adenovirus A
cgggaugaaaaacgagcag

SEQ ID NO: 3895775 - RNA, 15 nt, Human adenovirus A
cgggcaccacagugg

SEQ ID NO: 3895776 - RNA, 11 nt, Human adenovirus A
cgggcucuggc

SEQ ID NO: 3895777 - RNA, 19 nt, Human adenovirus A
cgggcuggggacugggugc

SEQ ID NO: 3895778 - RNA, 22 nt, Human adenovirus A
cgggcuggggacugggugccgc

SEQ ID NO: 3895779 - RNA, 16 nt, Human adenovirus A
cggggcuacugcucau

SEQ ID NO: 3895780 - RNA, 21 nt, Human adenovirus A
cgggucggagaaccuuucaag

SEQ ID NO: 3895781 - RNA, 20 nt, Human adenovirus A
cggguggacggagccagcgu

SEQ ID NO: 3895782 - RNA, 19 nt, Human adenovirus A
cgguguaugccaacaaaac

SEQ ID NO: 3895783 - RNA, 15 nt, Human adenovirus A
cgguuccagaaggag

SEQ ID NO: 3895784 - RNA, 16 nt, Human adenovirus A
cguaaaauacacauaa

SEQ ID NO: 3895785 - RNA, 12 nt, Human adenovirus A
cguacacuggcu

SEQ ID NO: 3895786 - RNA, 18 nt, Human adenovirus A
cguacuuaaaaaaacaaa

SEQ ID NO: 3895787 - RNA, 23 nt, Human adenovirus A
cguagcaguaucaguggaguuca

SEQ ID NO: 3895788 - RNA, 21 nt, Human adenovirus A
cgucacccaagggugcagcuc

SEQ ID NO: 3895789 - RNA, 22 nt, Human adenovirus A
cguccaggcaggguuugcaaac

SEQ ID NO: 3895790 - RNA, 16 nt, Human adenovirus A
cgucgccagcaagugc

SEQ ID NO: 3895791 - RNA, 18 nt, Human adenovirus A
cgucggggcuacugcuca

SEQ ID NO: 3895792 - RNA, 22 nt, Human adenovirus A
cgucugcaguauuauuacucug

SEQ ID NO: 3895793 - RNA, 20 nt, Human adenovirus A
cgugaaguauuccaugagcc

SEQ ID NO: 3895794 - RNA, 13 nt, Human adenovirus A
cgugccaggcauu

SEQ ID NO: 3895795 - RNA, 18 nt, Human adenovirus A
cguggaacagccaaaccg

SEQ ID NO: 3895796 - RNA, 16 nt, Human adenovirus A
cguguacacaaugcau

SEQ ID NO: 3895797 - RNA, 23 nt, Human adenovirus A
cguguucacaauuuucugguggu

SEQ ID NO: 3895798 - RNA, 22 nt, Human adenovirus A
cguucaacuuuguccaguuuac

SEQ ID NO: 3895799 - RNA, 22 nt, Human adenovirus A
cguuccgucaaaaaagcaaagu

SEQ ID NO: 3895800 - RNA, 12 nt, Human adenovirus A
cguucuguggau

SEQ ID NO: 3895801 - RNA, 23 nt, Human adenovirus A
cguuguacaaagggggcgcacac

SEQ ID NO: 3895802 - RNA, 21 nt, Human adenovirus A
cguuucagcgccaacaaaaac

SEQ ID NO: 3895803 - RNA, 21 nt, Human adenovirus A
cuaaaacaaggucuagccaac

SEQ ID NO: 3895804 - RNA, 11 nt, Human adenovirus A
cuaaaacagaa

SEQ ID NO: 3895805 - RNA, 19 nt, Human adenovirus A
cuaaaagagccacagcucu

SEQ ID NO: 3895806 - RNA, 14 nt, Human adenovirus A
cuaaaauguauuca

SEQ ID NO: 3895807 - RNA, 15 nt, Human adenovirus A
cuaaacaaacuguua

SEQ ID NO: 3895808 - RNA, 12 nt, Human adenovirus A
cuaaauauugua

SEQ ID NO: 3895809 - RNA, 11 nt, Human adenovirus A
cuaacaccaaa

SEQ ID NO: 3895810 - RNA, 13 nt, Human adenovirus A
cuaacuguuaauc

SEQ ID NO: 3895811 - RNA, 20 nt, Human adenovirus A
cuaagggacaaguuaaaaga

SEQ ID NO: 3895812 - RNA, 22 nt, Human adenovirus A
cuaagugguugggaacagacaa

SEQ ID NO: 3895813 - RNA, 13 nt, Human adenovirus A
cuaauacaaaugc

SEQ ID NO: 3895814 - RNA, 13 nt, Human adenovirus A
cuacacaugaagg

SEQ ID NO: 3895815 - RNA, 12 nt, Human adenovirus A
cuacaggcaggg

SEQ ID NO: 3895816 - RNA, 16 nt, Human adenovirus A
cuacauuacgccccca

SEQ ID NO: 3895817 - RNA, 17 nt, Human adenovirus A
cuacauuacgcccccag

SEQ ID NO: 3895818 - RNA, 18 nt, Human adenovirus A
cuaccaccuaucccauga

SEQ ID NO: 3895819 - RNA, 17 nt, Human adenovirus A
cuacccaccaucuucau

SEQ ID NO: 3895820 - RNA, 19 nt, Human adenovirus A
cuaccgcugcucagcucca

SEQ ID NO: 3895821 - RNA, 16 nt, Human adenovirus A
cuaccgucaucucuac

SEQ ID NO: 3895822 - RNA, 20 nt, Human adenovirus A
cuaccugacacuacagagcu

SEQ ID NO: 3895823 - RNA, 21 nt, Human adenovirus A
cuaccugauaacaagaacacc

SEQ ID NO: 3895824 - RNA, 20 nt, Human adenovirus A
cuacggcugucauggagaag

SEQ ID NO: 3895825 - RNA, 18 nt, Human adenovirus A
cuacuacgugagaauugu

SEQ ID NO: 3895826 - RNA, 15 nt, Human adenovirus A
cuacuccuacaaggc

SEQ ID NO: 3895827 - RNA, 16 nt, Human adenovirus A
cuacugcgucucccca

SEQ ID NO: 3895828 - RNA, 20 nt, Human adenovirus A
cuacuuaaaagcaagcgcgc

SEQ ID NO: 3895829 - RNA, 18 nt, Human adenovirus A
cuacuucacccugggaaa

SEQ ID NO: 3895830 - RNA, 12 nt, Human adenovirus A
cuagauggggug

SEQ ID NO: 3895831 - RNA, 20 nt, Human adenovirus A
cuagcggugcccuaucuguu

SEQ ID NO: 3895832 - RNA, 16 nt, Human adenovirus A
cuagcguacagccaga

SEQ ID NO: 3895833 - RNA, 16 nt, Human adenovirus A
cuaggaaaacaaacaa

SEQ ID NO: 3895834 - RNA, 13 nt, Human adenovirus A
cuaggcuguggac

SEQ ID NO: 3895835 - RNA, 17 nt, Human adenovirus A
cuagucccauuacagua

SEQ ID NO: 3895836 - RNA, 17 nt, Human adenovirus A
cuagugcaacauuugua

SEQ ID NO: 3895837 - RNA, 20 nt, Human adenovirus A
cuaguuugguagcaaaagau

SEQ ID NO: 3895838 - RNA, 18 nt, Human adenovirus A
cuauaguaaaaaugccag

SEQ ID NO: 3895839 - RNA, 19 nt, Human adenovirus A
cuauauacaacucuacaaa

SEQ ID NO: 3895840 - RNA, 14 nt, Human adenovirus A
cuauauuaacuuua

SEQ ID NO: 3895841 - RNA, 16 nt, Human adenovirus A
cuauauuaacuuuaua

SEQ ID NO: 3895842 - RNA, 22 nt, Human adenovirus A
cuauggaccgguuuugacgaac

SEQ ID NO: 3895843 - RNA, 14 nt, Human adenovirus A
cuauugcgcagcaa

SEQ ID NO: 3895844 - RNA, 15 nt, Human adenovirus A
cucaaaagcagccau

SEQ ID NO: 3895845 - RNA, 22 nt, Human adenovirus A
cucacaaauuugcauuucccaa

SEQ ID NO: 3895846 - RNA, 13 nt, Human adenovirus A
cucacugcuuugc

SEQ ID NO: 3895847 - RNA, 20 nt, Human adenovirus A
cucauccauuauuauggcaa

SEQ ID NO: 3895848 - RNA, 14 nt, Human adenovirus A
cucauccucagcuc

SEQ ID NO: 3895849 - RNA, 19 nt, Human adenovirus A
cuccaaugaaacccgcugu

SEQ ID NO: 3895850 - RNA, 19 nt, Human adenovirus A
cuccagcuauaaaaagagu

SEQ ID NO: 3895851 - RNA, 21 nt, Human adenovirus A
cuccaggggaaacccauuugc

SEQ ID NO: 3895852 - RNA, 17 nt, Human adenovirus A
cuccauccaaaacuaac

SEQ ID NO: 3895853 - RNA, 20 nt, Human adenovirus A
cuccccuguggagccacugc

SEQ ID NO: 3895854 - RNA, 21 nt, Human adenovirus A
cucccgauaccaaaaacaccu

SEQ ID NO: 3895855 - RNA, 17 nt, Human adenovirus A
cucccucuuggccagcu

SEQ ID NO: 3895856 - RNA, 19 nt, Human adenovirus A
cucccucuuggccagcugc

SEQ ID NO: 3895857 - RNA, 18 nt, Human adenovirus A
cuccguguucccacagua

SEQ ID NO: 3895858 - RNA, 23 nt, Human adenovirus A
cuccguguucccacaguaggaag

SEQ ID NO: 3895859 - RNA, 16 nt, Human adenovirus A
cucgcaccagaaagca

SEQ ID NO: 3895860 - RNA, 18 nt, Human adenovirus A
cucgcaguauggcagcug

SEQ ID NO: 3895861 - RNA, 17 nt, Human adenovirus A
cucgccuggacacuauc

SEQ ID NO: 3895862 - RNA, 16 nt, Human adenovirus A
cucguugaugucaccu

SEQ ID NO: 3895863 - RNA, 22 nt, Human adenovirus A
cucuaacaaaggugcuucccac

SEQ ID NO: 3895864 - RNA, 18 nt, Human adenovirus A
cucuaacugcucagcugg

SEQ ID NO: 3895865 - RNA, 16 nt, Human adenovirus A
cucucgcuuaaagagu

SEQ ID NO: 3895866 - RNA, 23 nt, Human adenovirus A
cucuuacgaaaccgugauggcag

SEQ ID NO: 3895867 - RNA, 16 nt, Human adenovirus A
cucuuggccagcugcc

SEQ ID NO: 3895868 - RNA, 15 nt, Human adenovirus A
cucuuuuaagaucuu

SEQ ID NO: 3895869 - RNA, 13 nt, Human adenovirus A
cugaagaaacaga

SEQ ID NO: 3895870 - RNA, 18 nt, Human adenovirus A
cugaagugccucaaagug

SEQ ID NO: 3895871 - RNA, 21 nt, Human adenovirus A
cugacacuguggacaacuccu

SEQ ID NO: 3895872 - RNA, 17 nt, Human adenovirus A
cugacagacuugcaaac

SEQ ID NO: 3895873 - RNA, 21 nt, Human adenovirus A
cugacuauuucacaagacaca

SEQ ID NO: 3895874 - RNA, 22 nt, Human adenovirus A
cugagcccuauccgucuccagc

SEQ ID NO: 3895875 - RNA, 21 nt, Human adenovirus A
cugagucccggucuggugcaa

SEQ ID NO: 3895876 - RNA, 19 nt, Human adenovirus A
cugauauuaguaccgaaaa

SEQ ID NO: 3895877 - RNA, 14 nt, Human adenovirus A
cugauuuucaucug

SEQ ID NO: 3895878 - RNA, 13 nt, Human adenovirus A
cugcaaaaagaaa

SEQ ID NO: 3895879 - RNA, 15 nt, Human adenovirus A
cugcaacagccaagc

SEQ ID NO: 3895880 - RNA, 15 nt, Human adenovirus A
cugcaauuucuuuca

SEQ ID NO: 3895881 - RNA, 17 nt, Human adenovirus A
cugcacucucuggggaa

SEQ ID NO: 3895882 - RNA, 15 nt, Human adenovirus A
cugcagacaguggcu

SEQ ID NO: 3895883 - RNA, 19 nt, Human adenovirus A
cugcagacaguggcuuuuc

SEQ ID NO: 3895884 - RNA, 18 nt, Human adenovirus A
cugcauguccagauuuca

SEQ ID NO: 3895885 - RNA, 22 nt, Human adenovirus A
cugcccugauauaucaggaaaa

SEQ ID NO: 3895886 - RNA, 17 nt, Human adenovirus A
cugccuccuucccauuu

SEQ ID NO: 3895887 - RNA, 23 nt, Human adenovirus A
cugcgcugccguuuuuucagaug

SEQ ID NO: 3895888 - RNA, 12 nt, Human adenovirus A
cugcggccauga

SEQ ID NO: 3895889 - RNA, 23 nt, Human adenovirus A
cugcgucuccccauucgcagcau

SEQ ID NO: 3895890 - RNA, 19 nt, Human adenovirus A
cugcuaaacucacauugug

SEQ ID NO: 3895891 - RNA, 20 nt, Human adenovirus A
cugcuacuaacauuaaaaga

SEQ ID NO: 3895892 - RNA, 14 nt, Human adenovirus A
cugcucaaguugug

SEQ ID NO: 3895893 - RNA, 17 nt, Human adenovirus A
cugcuccgacaacagcu

SEQ ID NO: 3895894 - RNA, 15 nt, Human adenovirus A
cugcugcauugccac

SEQ ID NO: 3895895 - RNA, 15 nt, Human adenovirus A
cugcugucacugagc

SEQ ID NO: 3895896 - RNA, 17 nt, Human adenovirus A
cuggaacuuaacaacug

SEQ ID NO: 3895897 - RNA, 18 nt, Human adenovirus A
cuggccagugugcgcuuu

SEQ ID NO: 3895898 - RNA, 19 nt, Human adenovirus A
cuggcgaacaggaagagcc

SEQ ID NO: 3895899 - RNA, 14 nt, Human adenovirus A
cuggcuguggguga

SEQ ID NO: 3895900 - RNA, 22 nt, Human adenovirus A
cugggggcguacacuggcuggc

SEQ ID NO: 3895901 - RNA, 23 nt, Human adenovirus A
cugggguuaagcaguagaaagua

SEQ ID NO: 3895902 - RNA, 22 nt, Human adenovirus A
cugggugcgcgacucagugacc

SEQ ID NO: 3895903 - RNA, 15 nt, Human adenovirus A
cugguccccagaugu

SEQ ID NO: 3895904 - RNA, 19 nt, Human adenovirus A
cugguugagcgcuggccag

SEQ ID NO: 3895905 - RNA, 13 nt, Human adenovirus A
cuguaaaaaagug

SEQ ID NO: 3895906 - RNA, 18 nt, Human adenovirus A
cuguacgcaagcauuuuu

SEQ ID NO: 3895907 - RNA, 15 nt, Human adenovirus A
cugucacuuugcaac

SEQ ID NO: 3895908 - RNA, 19 nt, Human adenovirus A
cugucuuaaaaucuccuga

SEQ ID NO: 3895909 - RNA, 19 nt, Human adenovirus A
cugucuugucuugcauggu

SEQ ID NO: 3895910 - RNA, 15 nt, Human adenovirus A
cugugcuucggcaag

SEQ ID NO: 3895911 - RNA, 14 nt, Human adenovirus A
cuguggcaccugca

SEQ ID NO: 3895912 - RNA, 14 nt, Human adenovirus A
cuguguauacgccu

SEQ ID NO: 3895913 - RNA, 20 nt, Human adenovirus A
cuguuacauaccuggcaaac

SEQ ID NO: 3895914 - RNA, 14 nt, Human adenovirus A
cuguucauauugug

SEQ ID NO: 3895915 - RNA, 15 nt, Human adenovirus A
cuguucauauuguga

SEQ ID NO: 3895916 - RNA, 15 nt, Human adenovirus A
cuguuuaaacaucua

SEQ ID NO: 3895917 - RNA, 13 nt, Human adenovirus A
cuuaaaaacuguu

SEQ ID NO: 3895918 - RNA, 15 nt, Human adenovirus A
cuuaaauugagaugg

SEQ ID NO: 3895919 - RNA, 20 nt, Human adenovirus A
cuuaaggcgggguauguuua

SEQ ID NO: 3895920 - RNA, 21 nt, Human adenovirus A
cuuacgaaaccgugauggcag

SEQ ID NO: 3895921 - RNA, 16 nt, Human adenovirus A
cuuacuggggugccua

SEQ ID NO: 3895922 - RNA, 23 nt, Human adenovirus A
cuuaguaauggaguuggaaacug

SEQ ID NO: 3895923 - RNA, 19 nt, Human adenovirus A
cuuagucauuacaacauug

SEQ ID NO: 3895924 - RNA, 17 nt, Human adenovirus A
cuuaguuguaaauucua

SEQ ID NO: 3895925 - RNA, 13 nt, Human adenovirus A
cuuaucagccaga

SEQ ID NO: 3895926 - RNA, 19 nt, Human adenovirus A
cuuaugcgugagggugcca

SEQ ID NO: 3895927 - RNA, 22 nt, Human adenovirus A
cuuaugcucccacacgcagcaa

SEQ ID NO: 3895928 - RNA, 23 nt, Human adenovirus A
cuuauuuuauuccugauuucuaa

SEQ ID NO: 3895929 - RNA, 13 nt, Human adenovirus A
cuuauuuuccuuc

SEQ ID NO: 3895930 - RNA, 22 nt, Human adenovirus A
cuucaccgcgcugcggccauga

SEQ ID NO: 3895931 - RNA, 18 nt, Human adenovirus A
cuucaucgcuuucuucug

SEQ ID NO: 3895932 - RNA, 18 nt, Human adenovirus A
cuucccaaucccuaccca

SEQ ID NO: 3895933 - RNA, 16 nt, Human adenovirus A
cuucguugagccaugu

SEQ ID NO: 3895934 - RNA, 14 nt, Human adenovirus A
cuucucaucuuuuu

SEQ ID NO: 3895935 - RNA, 16 nt, Human adenovirus A
cuucucgaaaaaauua

SEQ ID NO: 3895936 - RNA, 14 nt, Human adenovirus A
cuucuugcugaaau

SEQ ID NO: 3895937 - RNA, 21 nt, Human adenovirus A
cuugaacaacuuuuaacauua

SEQ ID NO: 3895938 - RNA, 23 nt, Human adenovirus A
cuugcaggacgcagaagcucugu

SEQ ID NO: 3895939 - RNA, 11 nt, Human adenovirus A
cuugcuuccag

SEQ ID NO: 3895940 - RNA, 19 nt, Human adenovirus A
cuuggccaguuccccuaac

SEQ ID NO: 3895941 - RNA, 17 nt, Human adenovirus A
cuugggaaauuugucau

SEQ ID NO: 3895942 - RNA, 23 nt, Human adenovirus A
cuugguacccgccagugcuuuca

SEQ ID NO: 3895943 - RNA, 18 nt, Human adenovirus A
cuugguguuucaggaaaa

SEQ ID NO: 3895944 - RNA, 15 nt, Human adenovirus A
cuuguguuuaagccu

SEQ ID NO: 3895945 - RNA, 22 nt, Human adenovirus A
cuuguucuuccucuucuaccuc

SEQ ID NO: 3895946 - RNA, 17 nt, Human adenovirus A
cuuuaacggaaaacacg

SEQ ID NO: 3895947 - RNA, 17 nt, Human adenovirus A
cuuuacaaaugcaauuc

SEQ ID NO: 3895948 - RNA, 20 nt, Human adenovirus A
cuuuaccaacaccaacaguu

SEQ ID NO: 3895949 - RNA, 15 nt, Human adenovirus A
cuuuagaagccaugu

SEQ ID NO: 3895950 - RNA, 22 nt, Human adenovirus A
cuuuagguuagccugaaaaaua

SEQ ID NO: 3895951 - RNA, 22 nt, Human adenovirus A
cuuuauauugcauuuguccugu

SEQ ID NO: 3895952 - RNA, 15 nt, Human adenovirus A
cuuuccgccauggcu

SEQ ID NO: 3895953 - RNA, 14 nt, Human adenovirus A
cuuucucugugaca

SEQ ID NO: 3895954 - RNA, 12 nt, Human adenovirus A
cuuucuuuagaa

SEQ ID NO: 3895955 - RNA, 12 nt, Human adenovirus A
cuuuggaggcag

SEQ ID NO: 3895956 - RNA, 16 nt, Human adenovirus A
cuuugggagacagaac

SEQ ID NO: 3895957 - RNA, 19 nt, Human adenovirus A
cuuuuacuaaaaugcaaaa

SEQ ID NO: 3895958 - RNA, 19 nt, Human adenovirus A
cuuuucaaacuuuacaaac

SEQ ID NO: 3895959 - RNA, 14 nt, Human adenovirus A
cuuuugcagcucca

SEQ ID NO: 3895960 - RNA, 16 nt, Human adenovirus A
cuuuuguuagaugcag

SEQ ID NO: 3895961 - RNA, 20 nt, Human adenovirus A
gaaaaacaguacaaagccag

SEQ ID NO: 3895962 - RNA, 12 nt, Human adenovirus A
gaaaaaugugua

SEQ ID NO: 3895963 - RNA, 17 nt, Human adenovirus A
gaaaacagcagcgggca

SEQ ID NO: 3895964 - RNA, 23 nt, Human adenovirus A
gaaaagcauguccgcggggacag

SEQ ID NO: 3895965 - RNA, 11 nt, Human adenovirus A
gaaacgucacc

SEQ ID NO: 3895966 - RNA, 13 nt, Human adenovirus A
gaaacuguugacc

SEQ ID NO: 3895967 - RNA, 21 nt, Human adenovirus A
gaaagaagacuauagagagga

SEQ ID NO: 3895968 - RNA, 21 nt, Human adenovirus A
gaaagaggcagccguuucagg

SEQ ID NO: 3895969 - RNA, 21 nt, Human adenovirus A
gaaaguucaccuccagguaca

SEQ ID NO: 3895970 - RNA, 21 nt, Human adenovirus A
gaaauugucauaccuuaaaaa

SEQ ID NO: 3895971 - RNA, 12 nt, Human adenovirus A
gaacacacugau

SEQ ID NO: 3895972 - RNA, 22 nt, Human adenovirus A
gaacaguguuuucagcaauuac

SEQ ID NO: 3895973 - RNA, 20 nt, Human adenovirus A
gaacauacaacuugcacaaa

SEQ ID NO: 3895974 - RNA, 14 nt, Human adenovirus A
gaacgggcagccug

SEQ ID NO: 3895975 - RNA, 23 nt, Human adenovirus A
gaacgguugcuucuauugcuuuu

SEQ ID NO: 3895976 - RNA, 16 nt, Human adenovirus A
gaacuaaacaaacugu

SEQ ID NO: 3895977 - RNA, 13 nt, Human adenovirus A
gaacuaaaccuuc

SEQ ID NO: 3895978 - RNA, 17 nt, Human adenovirus A
gaacuaaaccuuccauc

SEQ ID NO: 3895979 - RNA, 13 nt, Human adenovirus A
gaacuaucuugca

SEQ ID NO: 3895980 - RNA, 14 nt, Human adenovirus A
gaagaaugggagga

SEQ ID NO: 3895981 - RNA, 21 nt, Human adenovirus A
gaagaccaguacgaggacuga

SEQ ID NO: 3895982 - RNA, 18 nt, Human adenovirus A
gaagagcucgacaaggaa

SEQ ID NO: 3895983 - RNA, 12 nt, Human adenovirus A
gaagagcugcug

SEQ ID NO: 3895984 - RNA, 13 nt, Human adenovirus A
gaagagcugcugc

SEQ ID NO: 3895985 - RNA, 15 nt, Human adenovirus A
gaagcaauaaaacaa

SEQ ID NO: 3895986 - RNA, 13 nt, Human adenovirus A
gaagcgggggaag

SEQ ID NO: 3895987 - RNA, 14 nt, Human adenovirus A
gaagcuucuuguac

SEQ ID NO: 3895988 - RNA, 19 nt, Human adenovirus A
gaagugaagauagacagcu

SEQ ID NO: 3895989 - RNA, 15 nt, Human adenovirus A
gaaugagaacuucug

SEQ ID NO: 3895990 - RNA, 18 nt, Human adenovirus A
gaauggaugcgcuccugg

SEQ ID NO: 3895991 - RNA, 14 nt, Human adenovirus A
gacaaagagugacu

SEQ ID NO: 3895992 - RNA, 14 nt, Human adenovirus A
gacaacagcgggga

SEQ ID NO: 3895993 - RNA, 18 nt, Human adenovirus A
gacaacagcugcugucac

SEQ ID NO: 3895994 - RNA, 12 nt, Human adenovirus A
gacaacauugcc

SEQ ID NO: 3895995 - RNA, 12 nt, Human adenovirus A
gacaacugaggu

SEQ ID NO: 3895996 - RNA, 15 nt, Human adenovirus A
gacaaggaagugaag

SEQ ID NO: 3895997 - RNA, 21 nt, Human adenovirus A
gacaccaugguaaaaaggaag

SEQ ID NO: 3895998 - RNA, 21 nt, Human adenovirus A
gacaccgcccaggcaggcgcg

SEQ ID NO: 3895999 - RNA, 16 nt, Human adenovirus A
gacacggcacgcggcc

SEQ ID NO: 3896000 - RNA, 14 nt, Human adenovirus A
gacacuacagagcu

SEQ ID NO: 3896001 - RNA, 18 nt, Human adenovirus A
gacagaaauacagagcug

SEQ ID NO: 3896002 - RNA, 17 nt, Human adenovirus A
gacagacuugcaaacag

SEQ ID NO: 3896003 - RNA, 14 nt, Human adenovirus A
gacagcauggagug

SEQ ID NO: 3896004 - RNA, 15 nt, Human adenovirus A
gacagcauggagugc

SEQ ID NO: 3896005 - RNA, 15 nt, Human adenovirus A
gacagucgcguggca

SEQ ID NO: 3896006 - RNA, 13 nt, Human adenovirus A
gacauccauguga

SEQ ID NO: 3896007 - RNA, 16 nt, Human adenovirus A
gacaucuuaaugccag

SEQ ID NO: 3896008 - RNA, 15 nt, Human adenovirus A
gacauggaaaaaaug

SEQ ID NO: 3896009 - RNA, 23 nt, Human adenovirus A
gacccaccaccaaacugcagccu

SEQ ID NO: 3896010 - RNA, 16 nt, Human adenovirus A
gacccggaggcaacag

SEQ ID NO: 3896011 - RNA, 15 nt, Human adenovirus A
gaccggucaggcgug

SEQ ID NO: 3896012 - RNA, 17 nt, Human adenovirus A
gaccuacuuacuggggu

SEQ ID NO: 3896013 - RNA, 16 nt, Human adenovirus A
gaccucagcccagggc

SEQ ID NO: 3896014 - RNA, 12 nt, Human adenovirus A
gacgcaaaaaag

SEQ ID NO: 3896015 - RNA, 19 nt, Human adenovirus A
gacgcaccgguugagcaga

SEQ ID NO: 3896016 - RNA, 19 nt, Human adenovirus A
gacgcagaagcucuguuca

SEQ ID NO: 3896017 - RNA, 23 nt, Human adenovirus A
gacgcagugagugaaucugugga

SEQ ID NO: 3896018 - RNA, 12 nt, Human adenovirus A
gacgggccaggc

SEQ ID NO: 3896019 - RNA, 15 nt, Human adenovirus A
gacgggccaggcgca

SEQ ID NO: 3896020 - RNA, 13 nt, Human adenovirus A
gacguaaugugcg

SEQ ID NO: 3896021 - RNA, 18 nt, Human adenovirus A
gacuccauaaggcggcgu

SEQ ID NO: 3896022 - RNA, 21 nt, Human adenovirus A
gacugagaaccgucugcauga

SEQ ID NO: 3896023 - RNA, 17 nt, Human adenovirus A
gacugucagugucuccg

SEQ ID NO: 3896024 - RNA, 20 nt, Human adenovirus A
gacuugcuaacuaccuagcu

SEQ ID NO: 3896025 - RNA, 13 nt, Human adenovirus A
gagacagaacacg

SEQ ID NO: 3896026 - RNA, 18 nt, Human adenovirus A
gagaucuaggcuguggac

SEQ ID NO: 3896027 - RNA, 23 nt, Human adenovirus A
gagcaaaucucagaaagccaacc

SEQ ID NO: 3896028 - RNA, 15 nt, Human adenovirus A
gagcacacugggaaa

SEQ ID NO: 3896029 - RNA, 12 nt, Human adenovirus A
gagcaccugggc

SEQ ID NO: 3896030 - RNA, 22 nt, Human adenovirus A
gagcacuaaaaucccuauggac

SEQ ID NO: 3896031 - RNA, 20 nt, Human adenovirus A
gagcaggcuggaggugcagg

SEQ ID NO: 3896032 - RNA, 13 nt, Human adenovirus A
gagcgcccuuaac

SEQ ID NO: 3896033 - RNA, 14 nt, Human adenovirus A
gagcggcugacaga

SEQ ID NO: 3896034 - RNA, 19 nt, Human adenovirus A
gagcguucgccagcucuug

SEQ ID NO: 3896035 - RNA, 14 nt, Human adenovirus A
gagcguucugggau

SEQ ID NO: 3896036 - RNA, 20 nt, Human adenovirus A
gagcuacgcaguuuuucuac

SEQ ID NO: 3896037 - RNA, 23 nt, Human adenovirus A
gagcucauccucagcuccgagau

SEQ ID NO: 3896038 - RNA, 22 nt, Human adenovirus A
gagcuccauucuugagccugga

SEQ ID NO: 3896039 - RNA, 14 nt, Human adenovirus A
gagcugcugcaggc

SEQ ID NO: 3896040 - RNA, 13 nt, Human adenovirus A
gaggacuuggaag

SEQ ID NO: 3896041 - RNA, 16 nt, Human adenovirus A
gaggacuuggaagaau

SEQ ID NO: 3896042 - RNA, 19 nt, Human adenovirus A
gaggagcacccccaggggc

SEQ ID NO: 3896043 - RNA, 15 nt, Human adenovirus A
gaggaggcggacagc

SEQ ID NO: 3896044 - RNA, 15 nt, Human adenovirus A
gaggcagcuggagug

SEQ ID NO: 3896045 - RNA, 15 nt, Human adenovirus A
gagguauuccuccuu

SEQ ID NO: 3896046 - RNA, 14 nt, Human adenovirus A
gagucucaaaagca

SEQ ID NO: 3896047 - RNA, 19 nt, Human adenovirus A
gauaaacuggauuugcgca

SEQ ID NO: 3896048 - RNA, 20 nt, Human adenovirus A
gauaauggggucaugaaagu

SEQ ID NO: 3896049 - RNA, 14 nt, Human adenovirus A
gauagcaaagccau

SEQ ID NO: 3896050 - RNA, 17 nt, Human adenovirus A
gauauaguacugcuucc

SEQ ID NO: 3896051 - RNA, 21 nt, Human adenovirus A
gaucaauuucuuccuccugga

SEQ ID NO: 3896052 - RNA, 16 nt, Human adenovirus A
acuuaccccugggcuu

SEQ ID NO: 3896053 - RNA, 20 nt, Human adenovirus A
acuuagagggaggcaauauu

SEQ ID NO: 3896054 - RNA, 21 nt, Human adenovirus A
acuuaucaagaaauaaccagu

SEQ ID NO: 3896055 - RNA, 12 nt, Human adenovirus A
acuuccuucaga

SEQ ID NO: 3896056 - RNA, 14 nt, Human adenovirus A
acuuuaauguuuca

SEQ ID NO: 3896057 - RNA, 14 nt, Human adenovirus A
acuuucaaaaaagc

SEQ ID NO: 3896058 - RNA, 20 nt, Human adenovirus A
acuuucuccaaaucuuaaau

SEQ ID NO: 3896059 - RNA, 21 nt, Human adenovirus A
acuuuguaccgcgaagccauu

SEQ ID NO: 3896060 - RNA, 21 nt, Human adenovirus A
acuuuuagggaugcaaugcuu

SEQ ID NO: 3896061 - RNA, 13 nt, Human adenovirus A
acuuuuuucccau

SEQ ID NO: 3896062 - RNA, 20 nt, Human adenovirus A
agaaaaaaaccuucgagaac

SEQ ID NO: 3896063 - RNA, 17 nt, Human adenovirus A
agaaaauaacacauaag

SEQ ID NO: 3896064 - RNA, 13 nt, Human adenovirus A
agaaacagcagca

SEQ ID NO: 3896065 - RNA, 18 nt, Human adenovirus A
agaaaguucaccuccagg

SEQ ID NO: 3896066 - RNA, 15 nt, Human adenovirus A
agaaauaaccagugu

SEQ ID NO: 3896067 - RNA, 20 nt, Human adenovirus A
agaaauacagagcugucaua

SEQ ID NO: 3896068 - RNA, 22 nt, Human adenovirus A
agaaaucuuuuaccaaugaauu

SEQ ID NO: 3896069 - RNA, 21 nt, Human adenovirus A
agaaccuuucaagaaaggcau

SEQ ID NO: 3896070 - RNA, 13 nt, Human adenovirus A
agaagagcugcug

SEQ ID NO: 3896071 - RNA, 23 nt, Human adenovirus A
agaaucggcaacagcagcaacaa

SEQ ID NO: 3896072 - RNA, 18 nt, Human adenovirus A
agaauuuuccgaaguacu

SEQ ID NO: 3896073 - RNA, 18 nt, Human adenovirus A
agacaaaaaaaauacuaa

SEQ ID NO: 3896074 - RNA, 14 nt, Human adenovirus A
agacaaagagugac

SEQ ID NO: 3896075 - RNA, 12 nt, Human adenovirus A
agaccaaaaagu

SEQ ID NO: 3896076 - RNA, 14 nt, Human adenovirus A
agacgacaacugag

SEQ ID NO: 3896077 - RNA, 18 nt, Human adenovirus A
agacguaaaccuugaaau

SEQ ID NO: 3896078 - RNA, 14 nt, Human adenovirus A
agacuucccacagc

SEQ ID NO: 3896079 - RNA, 18 nt, Human adenovirus A
agacuugcaaacagcaaa

SEQ ID NO: 3896080 - RNA, 12 nt, Human adenovirus A
agagcggcgaga

SEQ ID NO: 3896081 - RNA, 13 nt, Human adenovirus A
agaggaggguuug

SEQ ID NO: 3896082 - RNA, 17 nt, Human adenovirus A
agaguguguuuaaaugg

SEQ ID NO: 3896083 - RNA, 13 nt, Human adenovirus A
agauaaguuuaaa

SEQ ID NO: 3896084 - RNA, 14 nt, Human adenovirus A
agauccauguugcu

SEQ ID NO: 3896085 - RNA, 19 nt, Human adenovirus A
agauccguacaaggcauug

SEQ ID NO: 3896086 - RNA, 19 nt, Human adenovirus A
agaucuucguaggaaagau

SEQ ID NO: 3896087 - RNA, 18 nt, Human adenovirus A
agauuauacaaacuucau

SEQ ID NO: 3896088 - RNA, 12 nt, Human adenovirus A
agauuggcaaug

SEQ ID NO: 3896089 - RNA, 21 nt, Human adenovirus A
agauuguaauuuuuuucuccu

SEQ ID NO: 3896090 - RNA, 17 nt, Human adenovirus A
agauugucauccccaga

SEQ ID NO: 3896091 - RNA, 12 nt, Human adenovirus A
agcaaaguacaa

SEQ ID NO: 3896092 - RNA, 21 nt, Human adenovirus A
agcaaaugcauuaucaugaaa

SEQ ID NO: 3896093 - RNA, 22 nt, Human adenovirus A
agcaaaugcccugcaaaaagaa

SEQ ID NO: 3896094 - RNA, 17 nt, Human adenovirus A
agcaagugccuccucag

SEQ ID NO: 3896095 - RNA, 15 nt, Human adenovirus A
agcaauuacuugaac

SEQ ID NO: 3896096 - RNA, 18 nt, Human adenovirus A
agcacacugggaaaugau

SEQ ID NO: 3896097 - RNA, 17 nt, Human adenovirus A
agcagcaacaaggaaag

SEQ ID NO: 3896098 - RNA, 13 nt, Human adenovirus A
agcagccaaaacu

SEQ ID NO: 3896099 - RNA, 19 nt, Human adenovirus A
agcaggcuggaggugcagg

SEQ ID NO: 3896100 - RNA, 18 nt, Human adenovirus A
agcagguguaaccagcug

SEQ ID NO: 3896101 - RNA, 14 nt, Human adenovirus A
agcaguaucagugg

SEQ ID NO: 3896102 - RNA, 19 nt, Human adenovirus A
agcauaaaugggacaaguu

SEQ ID NO: 3896103 - RNA, 13 nt, Human adenovirus A
agcauguuaaaaa

SEQ ID NO: 3896104 - RNA, 16 nt, Human adenovirus A
agcauguuaaaaaacg

SEQ ID NO: 3896105 - RNA, 13 nt, Human adenovirus A
agcauuauuugcg

SEQ ID NO: 3896106 - RNA, 22 nt, Human adenovirus A
agccaaaaaaacagauucugga

SEQ ID NO: 3896107 - RNA, 15 nt, Human adenovirus A
agccacaugggaagg

SEQ ID NO: 3896108 - RNA, 15 nt, Human adenovirus A
agccaguacacuugg

SEQ ID NO: 3896109 - RNA, 22 nt, Human adenovirus A
agccauggcuuccaugccuuuu

SEQ ID NO: 3896110 - RNA, 14 nt, Human adenovirus A
agcccaacccauug

SEQ ID NO: 3896111 - RNA, 23 nt, Human adenovirus A
agcccccgcguccuccuucuguu

SEQ ID NO: 3896112 - RNA, 14 nt, Human adenovirus A
agcccgaaguugac

SEQ ID NO: 3896113 - RNA, 21 nt, Human adenovirus A
agcccgaaguugacuggcaug

SEQ ID NO: 3896114 - RNA, 20 nt, Human adenovirus A
agcccuauccgucuccagcu

SEQ ID NO: 3896115 - RNA, 18 nt, Human adenovirus A
agccgucuacucacagcu

SEQ ID NO: 3896116 - RNA, 19 nt, Human adenovirus A
agccuugucuacaacugcu

SEQ ID NO: 3896117 - RNA, 14 nt, Human adenovirus A
agcgccaccugcca

SEQ ID NO: 3896118 - RNA, 18 nt, Human adenovirus A
agcgccagucgccgcaga

SEQ ID NO: 3896119 - RNA, 19 nt, Human adenovirus A
agcgccccccuagcaguaa

SEQ ID NO: 3896120 - RNA, 13 nt, Human adenovirus A
agcgcgagaagaa

SEQ ID NO: 3896121 - RNA, 21 nt, Human adenovirus A
agcggcgagaaugggaggaaa

SEQ ID NO: 3896122 - RNA, 14 nt, Human adenovirus A
agcguucuguggau

SEQ ID NO: 3896123 - RNA, 20 nt, Human adenovirus A
agcuacccuucgcuaugaau

SEQ ID NO: 3896124 - RNA, 19 nt, Human adenovirus A
agcuacgcaguuuuucuac

SEQ ID NO: 3896125 - RNA, 19 nt, Human adenovirus A
agcuauuugagccuucauu

SEQ ID NO: 3896126 - RNA, 14 nt, Human adenovirus A
agcuccauggggcg

SEQ ID NO: 3896127 - RNA, 20 nt, Human adenovirus A
agcugaaacuaggggcuggc

SEQ ID NO: 3896128 - RNA, 19 nt, Human adenovirus A
agcugacgacaguagugua

SEQ ID NO: 3896129 - RNA, 19 nt, Human adenovirus A
agcugagcaaugcuacuaa

SEQ ID NO: 3896130 - RNA, 13 nt, Human adenovirus A
agcugcaguuugu

SEQ ID NO: 3896131 - RNA, 21 nt, Human adenovirus A
agcugccgucuucguggagaa

SEQ ID NO: 3896132 - RNA, 13 nt, Human adenovirus A
agcugugaaaaug

SEQ ID NO: 3896133 - RNA, 16 nt, Human adenovirus A
agcugugaaaaugcgu

SEQ ID NO: 3896134 - RNA, 23 nt, Human adenovirus A
agcuuaccacucagaccuuauga

SEQ ID NO: 3896135 - RNA, 20 nt, Human adenovirus A
agcuucagaaaaugccuguu

SEQ ID NO: 3896136 - RNA, 15 nt, Human adenovirus A
aggaaaagcugccac

SEQ ID NO: 3896137 - RNA, 23 nt, Human adenovirus A
aggaaaagcugccaccucuagaa

SEQ ID NO: 3896138 - RNA, 22 nt, Human adenovirus A
aggaaagacagccaagaccagu

SEQ ID NO: 3896139 - RNA, 19 nt, Human adenovirus A
aggaacuaaaccuuccauc

SEQ ID NO: 3896140 - RNA, 22 nt, Human adenovirus A
aggaacuaaaccuuccaucacc

SEQ ID NO: 3896141 - RNA, 21 nt, Human adenovirus A
aggaacuccgcgcaaggagcu

SEQ ID NO: 3896142 - RNA, 22 nt, Human adenovirus A
aggaagcaauaaaacaaggagc

SEQ ID NO: 3896143 - RNA, 17 nt, Human adenovirus A
aggaagguuccaaggac

SEQ ID NO: 3896144 - RNA, 15 nt, Human adenovirus A
aggaauacaagguag

SEQ ID NO: 3896145 - RNA, 17 nt, Human adenovirus A
aggaauuagcugaugcu

SEQ ID NO: 3896146 - RNA, 19 nt, Human adenovirus A
aggaauuuacuccaucugu

SEQ ID NO: 3896147 - RNA, 21 nt, Human adenovirus A
aggacccccagacacggagag

SEQ ID NO: 3896148 - RNA, 18 nt, Human adenovirus A
aggagaaaauaacacaua

SEQ ID NO: 3896149 - RNA, 18 nt, Human adenovirus A
aggagacguuuuugccca

SEQ ID NO: 3896150 - RNA, 22 nt, Human adenovirus A
aggagcggaacccugcgguggu

SEQ ID NO: 3896151 - RNA, 18 nt, Human adenovirus A
aggagguuuguaagcggu

SEQ ID NO: 3896152 - RNA, 21 nt, Human adenovirus A
aggauugguuccuaauacaaa

SEQ ID NO: 3896153 - RNA, 17 nt, Human adenovirus A
aggcaacauagccccag

SEQ ID NO: 3896154 - RNA, 14 nt, Human adenovirus A
aggcaaugggagau

SEQ ID NO: 3896155 - RNA, 21 nt, Human adenovirus A
aggcagccguuucaggaagga

SEQ ID NO: 3896156 - RNA, 22 nt, Human adenovirus A
aggcagccguuucaggaaggau

SEQ ID NO: 3896157 - RNA, 21 nt, Human adenovirus A
aggcauggaaaaacuuggaaa

SEQ ID NO: 3896158 - RNA, 14 nt, Human adenovirus A
aggccaaacagcug

SEQ ID NO: 3896159 - RNA, 19 nt, Human adenovirus A
aggccaaacagcuguggaa

SEQ ID NO: 3896160 - RNA, 22 nt, Human adenovirus A
aggccaucuugcuuguuuaaac

SEQ ID NO: 3896161 - RNA, 14 nt, Human adenovirus A
aggcgcgcggugga

SEQ ID NO: 3896162 - RNA, 22 nt, Human adenovirus A
aggcgcuugcgcguugaacccg

SEQ ID NO: 3896163 - RNA, 17 nt, Human adenovirus A
aggcuagugcccucaca

SEQ ID NO: 3896164 - RNA, 14 nt, Human adenovirus A
aggcuuucuucaaa

SEQ ID NO: 3896165 - RNA, 16 nt, Human adenovirus A
aggcuuucuucaaauc

SEQ ID NO: 3896166 - RNA, 13 nt, Human adenovirus A
agggaaauccaac

SEQ ID NO: 3896167 - RNA, 20 nt, Human adenovirus A
agggcuggcgcuuccauacc

SEQ ID NO: 3896168 - RNA, 19 nt, Human adenovirus A
agggcuuuuggcuucacua

SEQ ID NO: 3896169 - RNA, 18 nt, Human adenovirus A
aggggcacaugcggggga

SEQ ID NO: 3896170 - RNA, 14 nt, Human adenovirus A
aauuuucuccccac

SEQ ID NO: 3896171 - RNA, 20 nt, Human adenovirus A
acaaaaagacugucaguguc

SEQ ID NO: 3896172 - RNA, 20 nt, Human adenovirus A
acaaacacggauacuuaaua

SEQ ID NO: 3896173 - RNA, 16 nt, Human adenovirus A
acaaaugcgaccucag

SEQ ID NO: 3896174 - RNA, 20 nt, Human adenovirus A
acaacacggaguaaugaaca

SEQ ID NO: 3896175 - RNA, 13 nt, Human adenovirus A
acaacauugaacu

SEQ ID NO: 3896176 - RNA, 14 nt, Human adenovirus A
acaacgagcaagcc

SEQ ID NO: 3896177 - RNA, 23 nt, Human adenovirus A
acaacugcacuugaauauuucga

SEQ ID NO: 3896178 - RNA, 15 nt, Human adenovirus A
acaacuuaacaaauu

SEQ ID NO: 3896179 - RNA, 24 nt, Human adenovirus A
acaacuuuuaacauuagcagucug

SEQ ID NO: 3896180 - RNA, 14 nt, Human adenovirus A
acaagccgcaggac

SEQ ID NO: 3896181 - RNA, 14 nt, Human adenovirus A
acaagguggccgcc

SEQ ID NO: 3896182 - RNA, 17 nt, Human adenovirus A
acaaguuccggaguucc

SEQ ID NO: 3896183 - RNA, 12 nt, Human adenovirus A
acacaaagaaaa

SEQ ID NO: 3896184 - RNA, 13 nt, Human adenovirus A
acacauaaagagu

SEQ ID NO: 3896185 - RNA, 12 nt, Human adenovirus A
acaccuccaccc

SEQ ID NO: 3896186 - RNA, 23 nt, Human adenovirus A
acacgcuuuuacucacuggccug

SEQ ID NO: 3896187 - RNA, 18 nt, Human adenovirus A
acacucaggccauaaaga

SEQ ID NO: 3896188 - RNA, 20 nt, Human adenovirus A
acacugaaggcauuuaaggg

SEQ ID NO: 3896189 - RNA, 21 nt, Human adenovirus A
acacuguaagaggagacaacu

SEQ ID NO: 3896190 - RNA, 19 nt, Human adenovirus A
acacuuacgaauggaacuu

SEQ ID NO: 3896191 - RNA, 17 nt, Human adenovirus A
acacuuuaauaaaaaca

SEQ ID NO: 3896192 - RNA, 15 nt, Human adenovirus A
acacuuuccgccaug

SEQ ID NO: 3896193 - RNA, 13 nt, Human adenovirus A
acagaaccauggu

SEQ ID NO: 3896194 - RNA, 16 nt, Human adenovirus A
acagauguaaaggagg

SEQ ID NO: 3896195 - RNA, 16 nt, Human adenovirus A
acagcggggaggaagc

SEQ ID NO: 3896196 - RNA, 17 nt, Human adenovirus A
acagcuucuaaaagagc

SEQ ID NO: 3896197 - RNA, 22 nt, Human adenovirus A
acagcuucuaaaagagccacag

SEQ ID NO: 3896198 - RNA, 11 nt, Human adenovirus A
acaggcagggc

SEQ ID NO: 3896199 - RNA, 22 nt, Human adenovirus A
acaggcggguaagagcaggcug

SEQ ID NO: 3896200 - RNA, 15 nt, Human adenovirus A
acaguaucaauuuuu

SEQ ID NO: 3896201 - RNA, 14 nt, Human adenovirus A
acauaaagagucuc

SEQ ID NO: 3896202 - RNA, 14 nt, Human adenovirus A
acauaauuucccuc

SEQ ID NO: 3896203 - RNA, 21 nt, Human adenovirus A
acauaauuucccucacaaauu

SEQ ID NO: 3896204 - RNA, 17 nt, Human adenovirus A
acauacaucaccucuuu

SEQ ID NO: 3896205 - RNA, 13 nt, Human adenovirus A
acauaccuggcaa

SEQ ID NO: 3896206 - RNA, 21 nt, Human adenovirus A
acauaccuggcaaacugggau

SEQ ID NO: 3896207 - RNA, 21 nt, Human adenovirus A
acauacuagguauaagaaaga

SEQ ID NO: 3896208 - RNA, 23 nt, Human adenovirus A
acauaggcuggguuuauggaauu

SEQ ID NO: 3896209 - RNA, 18 nt, Human adenovirus A
acaucaauuuuucgucgc

SEQ ID NO: 3896210 - RNA, 22 nt, Human adenovirus A
acaucagacguacccuuuguua

SEQ ID NO: 3896211 - RNA, 23 nt, Human adenovirus A
acaugcgggggaugaaggaagcg

SEQ ID NO: 3896212 - RNA, 16 nt, Human adenovirus A
acauguggagcuuuca

SEQ ID NO: 3896213 - RNA, 18 nt, Human adenovirus A
acauguggagcuuucaac

SEQ ID NO: 3896214 - RNA, 20 nt, Human adenovirus A
acauucgcagcgcacuggca

SEQ ID NO: 3896215 - RNA, 19 nt, Human adenovirus A
accaaaauuuucaacagaa

SEQ ID NO: 3896216 - RNA, 14 nt, Human adenovirus A
accaaacgcaaguu

SEQ ID NO: 3896217 - RNA, 13 nt, Human adenovirus A
accaaagccaugg

SEQ ID NO: 3896218 - RNA, 18 nt, Human adenovirus A
accaaaugagcaaaacgc

SEQ ID NO: 3896219 - RNA, 19 nt, Human adenovirus A
accaaaugcucuuugcgca

SEQ ID NO: 3896220 - RNA, 20 nt, Human adenovirus A
accaccaaauuuaaggccag

SEQ ID NO: 3896221 - RNA, 18 nt, Human adenovirus A
accacggccucagcagcg

SEQ ID NO: 3896222 - RNA, 15 nt, Human adenovirus A
accacucgaguguac

SEQ ID NO: 3896223 - RNA, 17 nt, Human adenovirus A
accacuguagugcaaaa

SEQ ID NO: 3896224 - RNA, 14 nt, Human adenovirus A
accagaaaaacagu

SEQ ID NO: 3896225 - RNA, 13 nt, Human adenovirus A
accauccaaugga

SEQ ID NO: 3896226 - RNA, 18 nt, Human adenovirus A
acccaguuuuugcagugc

SEQ ID NO: 3896227 - RNA, 13 nt, Human adenovirus A
accccaaggcaug

SEQ ID NO: 3896228 - RNA, 15 nt, Human adenovirus A
acccgauaugaugca

SEQ ID NO: 3896229 - RNA, 15 nt, Human adenovirus A
acccucccucuuggc

SEQ ID NO: 3896230 - RNA, 14 nt, Human adenovirus A
accgccaugcgcgc

SEQ ID NO: 3896231 - RNA, 21 nt, Human adenovirus A
accgccguccuaugaggaagc

SEQ ID NO: 3896232 - RNA, 22 nt, Human adenovirus A
accgcgagcgcauagaaaaagc

SEQ ID NO: 3896233 - RNA, 14 nt, Human adenovirus A
accggcccuguugu

SEQ ID NO: 3896234 - RNA, 18 nt, Human adenovirus A
accgucaucucuacagcc

SEQ ID NO: 3896235 - RNA, 16 nt, Human adenovirus A
accuaaggcuucaaga

SEQ ID NO: 3896236 - RNA, 15 nt, Human adenovirus A
accuacacaugaagg

SEQ ID NO: 3896237 - RNA, 20 nt, Human adenovirus A
accuacuucacccugggaaa

SEQ ID NO: 3896238 - RNA, 20 nt, Human adenovirus A
accuaucccaugaccaagcc

SEQ ID NO: 3896239 - RNA, 14 nt, Human adenovirus A
accugaaagaaagu

SEQ ID NO: 3896240 - RNA, 13 nt, Human adenovirus A
accugacagacuu

SEQ ID NO: 3896241 - RNA, 22 nt, Human adenovirus A
accugagucccggucuggugca

SEQ ID NO: 3896242 - RNA, 15 nt, Human adenovirus A
accuguucuccccac

SEQ ID NO: 3896243 - RNA, 15 nt, Human adenovirus A
acgaacuacaacagc

SEQ ID NO: 3896244 - RNA, 19 nt, Human adenovirus A
acgacaacugagguaagug

SEQ ID NO: 3896245 - RNA, 21 nt, Human adenovirus A
acgagaaaguguuaaccauug

SEQ ID NO: 3896246 - RNA, 13 nt, Human adenovirus A
acgagugcuuucu

SEQ ID NO: 3896247 - RNA, 15 nt, Human adenovirus A
acgauaccacucgag

SEQ ID NO: 3896248 - RNA, 15 nt, Human adenovirus A
acgcacacaacagaa

SEQ ID NO: 3896249 - RNA, 20 nt, Human adenovirus A
acgcagaagcucuguucaau

SEQ ID NO: 3896250 - RNA, 16 nt, Human adenovirus A
acgcaugaaggguggg

SEQ ID NO: 3896251 - RNA, 15 nt, Human adenovirus A
acgccaaagccacac

SEQ ID NO: 3896252 - RNA, 12 nt, Human adenovirus A
acgccaccagcg

SEQ ID NO: 3896253 - RNA, 14 nt, Human adenovirus A
acgcucaaagaaac

SEQ ID NO: 3896254 - RNA, 15 nt, Human adenovirus A
acgcucuggcagggg

SEQ ID NO: 3896255 - RNA, 16 nt, Human adenovirus A
acggccggaugcagag

SEQ ID NO: 3896256 - RNA, 20 nt, Human adenovirus A
acgggaaaaaaaagaggaag

SEQ ID NO: 3896257 - RNA, 12 nt, Human adenovirus A
acgggccaggcg

SEQ ID NO: 3896258 - RNA, 16 nt, Human adenovirus A
acgggccgcagcugcg

SEQ ID NO: 3896259 - RNA, 14 nt, Human adenovirus A
acguaacuuucaaa

SEQ ID NO: 3896260 - RNA, 19 nt, Human adenovirus A
acuaaauaucgcagcuggu

SEQ ID NO: 3896261 - RNA, 17 nt, Human adenovirus A
acuaaauggaagacauc

SEQ ID NO: 3896262 - RNA, 11 nt, Human adenovirus A
acuaacaccaa

SEQ ID NO: 3896263 - RNA, 21 nt, Human adenovirus A
acuaacgcuggggcacagcuu

SEQ ID NO: 3896264 - RNA, 21 nt, Human adenovirus A
acuaaugaggcuuuucaucca

SEQ ID NO: 3896265 - RNA, 14 nt, Human adenovirus A
acuacucagaacaa

SEQ ID NO: 3896266 - RNA, 18 nt, Human adenovirus A
acuagguauaagaaagag

SEQ ID NO: 3896267 - RNA, 15 nt, Human adenovirus A
acuauucuagcaaaa

SEQ ID NO: 3896268 - RNA, 18 nt, Human adenovirus A
acucacccugugcuuaac

SEQ ID NO: 3896269 - RNA, 22 nt, Human adenovirus A
acucacuggccugaccauccaa

SEQ ID NO: 3896270 - RNA, 12 nt, Human adenovirus A
acucacuuugcc

SEQ ID NO: 3896271 - RNA, 22 nt, Human adenovirus A
acucagcgacaaaccuuuacug

SEQ ID NO: 3896272 - RNA, 20 nt, Human adenovirus A
acucaggauucgugggauac

SEQ ID NO: 3896273 - RNA, 14 nt, Human adenovirus A
acucauaagcugug

SEQ ID NO: 3896274 - RNA, 14 nt, Human adenovirus A
acuccaucuguuua

SEQ ID NO: 3896275 - RNA, 19 nt, Human adenovirus A
acucuacuaacaacuccag

SEQ ID NO: 3896276 - RNA, 22 nt, Human adenovirus A
acucuacuaacaacuccagaug

SEQ ID NO: 3896277 - RNA, 21 nt, Human adenovirus A
acugaaccauucccagguaau

SEQ ID NO: 3896278 - RNA, 19 nt, Human adenovirus A
acugaccaggucagcucag

SEQ ID NO: 3896279 - RNA, 14 nt, Human adenovirus A
acugcagccugucu

SEQ ID NO: 3896280 - RNA, 17 nt, Human adenovirus A
acuggauuugcgcacug

SEQ ID NO: 3896281 - RNA, 19 nt, Human adenovirus A
acuggcuaacgcuccaggg

SEQ ID NO: 3896282 - RNA, 22 nt, Human adenovirus A
acugggauggguguuuggcagc

SEQ ID NO: 3896283 - RNA, 16 nt, Human adenovirus A
acugggccaggaggac

SEQ ID NO: 3896284 - RNA, 13 nt, Human adenovirus A
acugggugccgcc

SEQ ID NO: 3896285 - RNA, 15 nt, Human adenovirus A
acuguaagaggagac

SEQ ID NO: 3896286 - RNA, 22 nt, Human adenovirus A
acuguagugcaaaauaaugacu

SEQ ID NO: 3896287 - RNA, 16 nt, Human adenovirus A
acuguccagggcuuuu

SEQ ID NO: 3896288 - RNA, 14 nt, Human adenovirus A
acuuaauacuggcu

SEQ ID NO: 3896289 - RNA, 13 nt, Human adenovirus A
aggguccagggac

SEQ ID NO: 3896290 - RNA, 20 nt, Human adenovirus A
agggugccacccccagugcc

SEQ ID NO: 3896291 - RNA, 17 nt, Human adenovirus A
aggguggggugcugccc

SEQ ID NO: 3896292 - RNA, 23 nt, Human adenovirus A
aggguuugcaaaccguaaacuua

SEQ ID NO: 3896293 - RNA, 20 nt, Human adenovirus A
agguagaggcauaaaaacuu

SEQ ID NO: 3896294 - RNA, 17 nt, Human adenovirus A
agguagcauuuuaacau

SEQ ID NO: 3896295 - RNA, 16 nt, Human adenovirus A
agguaggcuaaguuuu

SEQ ID NO: 3896296 - RNA, 16 nt, Human adenovirus A
agguauaacaaaauuc

SEQ ID NO: 3896297 - RNA, 16 nt, Human adenovirus A
agguauucagcugaac

SEQ ID NO: 3896298 - RNA, 17 nt, Human adenovirus A
aggucgaggacuuggaa

SEQ ID NO: 3896299 - RNA, 17 nt, Human adenovirus A
aggugcaagaaggccau

SEQ ID NO: 3896300 - RNA, 16 nt, Human adenovirus A
aggugcuucccacaua

SEQ ID NO: 3896301 - RNA, 11 nt, Human adenovirus A
agguggaaacc

SEQ ID NO: 3896302 - RNA, 21 nt, Human adenovirus A
agguggaaaccuagguuuaaa

SEQ ID NO: 3896303 - RNA, 20 nt, Human adenovirus A
aguaaagauauucccacgcc

SEQ ID NO: 3896304 - RNA, 12 nt, Human adenovirus A
aguaacaaacug

SEQ ID NO: 3896305 - RNA, 15 nt, Human adenovirus A
aguaacaacacgggc

SEQ ID NO: 3896306 - RNA, 17 nt, Human adenovirus A
aguaacuucaugucuau

SEQ ID NO: 3896307 - RNA, 13 nt, Human adenovirus A
aguaaugaacaag

SEQ ID NO: 3896308 - RNA, 14 nt, Human adenovirus A
aguaauggaguugg

SEQ ID NO: 3896309 - RNA, 15 nt, Human adenovirus A
aguacacuugggaaa

SEQ ID NO: 3896310 - RNA, 21 nt, Human adenovirus A
aguacaggcaacaugggugua

SEQ ID NO: 3896311 - RNA, 19 nt, Human adenovirus A
aguacguccgauaaaaaag

SEQ ID NO: 3896312 - RNA, 13 nt, Human adenovirus A
aguacugcuucca

SEQ ID NO: 3896313 - RNA, 15 nt, Human adenovirus A
aguaggcuaacuguu

SEQ ID NO: 3896314 - RNA, 14 nt, Human adenovirus A
aguauaagguauau

SEQ ID NO: 3896315 - RNA, 14 nt, Human adenovirus A
aguauuugucuccu

SEQ ID NO: 3896316 - RNA, 18 nt, Human adenovirus A
agucaaaguaugcugcac

SEQ ID NO: 3896317 - RNA, 14 nt, Human adenovirus A
agucacaaguacau

SEQ ID NO: 3896318 - RNA, 23 nt, Human adenovirus A
agucagcugcaaaccgcgcuuuu

SEQ ID NO: 3896319 - RNA, 21 nt, Human adenovirus A
agucaggcagaggacgagguc

SEQ ID NO: 3896320 - RNA, 17 nt, Human adenovirus A
agucccggucuggugca

SEQ ID NO: 3896321 - RNA, 15 nt, Human adenovirus A
agucugacagcaauu

SEQ ID NO: 3896322 - RNA, 20 nt, Human adenovirus A
agugaacccggacgcuggca

SEQ ID NO: 3896323 - RNA, 22 nt, Human adenovirus A
agugaauggaacaccagcauug

SEQ ID NO: 3896324 - RNA, 19 nt, Human adenovirus A
agugccagaagcacuggca

SEQ ID NO: 3896325 - RNA, 16 nt, Human adenovirus A
agugccucaaagugaa

SEQ ID NO: 3896326 - RNA, 20 nt, Human adenovirus A
agugcucuaauagaacugga

SEQ ID NO: 3896327 - RNA, 16 nt, Human adenovirus A
agugcuggaaagugac

SEQ ID NO: 3896328 - RNA, 17 nt, Human adenovirus A
aguggcacaacacauac

SEQ ID NO: 3896329 - RNA, 19 nt, Human adenovirus A
agugguauuccgcgguccu

SEQ ID NO: 3896330 - RNA, 13 nt, Human adenovirus A
agugucuccguau

SEQ ID NO: 3896331 - RNA, 19 nt, Human adenovirus A
agugucuuguuaauguuug

SEQ ID NO: 3896332 - RNA, 15 nt, Human adenovirus A
aguguuaaccauugu

SEQ ID NO: 3896333 - RNA, 12 nt, Human adenovirus A
aguuaaguuuga

SEQ ID NO: 3896334 - RNA, 23 nt, Human adenovirus A
aguuaauugauuuacaaaccgug

SEQ ID NO: 3896335 - RNA, 21 nt, Human adenovirus A
aguuaggucaucguaggacaa

SEQ ID NO: 3896336 - RNA, 15 nt, Human adenovirus A
aguucaaacagugga

SEQ ID NO: 3896337 - RNA, 16 nt, Human adenovirus A
aguucaccuccaggua

SEQ ID NO: 3896338 - RNA, 19 nt, Human adenovirus A
aguucaccuccagguacaa

SEQ ID NO: 3896339 - RNA, 21 nt, Human adenovirus A
aguuccguaaagacuccggaa

SEQ ID NO: 3896340 - RNA, 21 nt, Human adenovirus A
aguucgccuacacaacacaaa

SEQ ID NO: 3896341 - RNA, 22 nt, Human adenovirus A
aguugacgccccauccguggca

SEQ ID NO: 3896342 - RNA, 15 nt, Human adenovirus A
aguugcgagcugcca

SEQ ID NO: 3896343 - RNA, 17 nt, Human adenovirus A
aguuuacccgccagugu

SEQ ID NO: 3896344 - RNA, 19 nt, Human adenovirus A
aguuugacaccagaaacuu

SEQ ID NO: 3896345 - RNA, 15 nt, Human adenovirus A
aguuugguagcaaaa

SEQ ID NO: 3896346 - RNA, 13 nt, Human adenovirus A
auaaaaacacaca

SEQ ID NO: 3896347 - RNA, 15 nt, Human adenovirus A
auaaaaccugugccu

SEQ ID NO: 3896348 - RNA, 21 nt, Human adenovirus A
auaaaagcuucaauuugccua

SEQ ID NO: 3896349 - RNA, 14 nt, Human adenovirus A
auaaagaaaaaacu

SEQ ID NO: 3896350 - RNA, 23 nt, Human adenovirus A
auaaagaguuaauugauuuacaa

SEQ ID NO: 3896351 - RNA, 20 nt, Human adenovirus A
auaacuaacuuuaauguuuc

SEQ ID NO: 3896352 - RNA, 18 nt, Human adenovirus A
auaagcauuagagucgcc

SEQ ID NO: 3896353 - RNA, 16 nt, Human adenovirus A
auacaaaucagaagcc

SEQ ID NO: 3896354 - RNA, 21 nt, Human adenovirus A
auacacuccaggaaacauaaa

SEQ ID NO: 3896355 - RNA, 15 nt, Human adenovirus A
auacagauuuaaggg

SEQ ID NO: 3896356 - RNA, 20 nt, Human adenovirus A
auacauaauuuuaaaguaaa

SEQ ID NO: 3896357 - RNA, 22 nt, Human adenovirus A
auaccaguuucaauugcagaac

SEQ ID NO: 3896358 - RNA, 17 nt, Human adenovirus A
auaccuggcaaacuggg

SEQ ID NO: 3896359 - RNA, 20 nt, Human adenovirus A
auaccuggcaaacugggaug

SEQ ID NO: 3896360 - RNA, 12 nt, Human adenovirus A
auacuaaagaaa

SEQ ID NO: 3896361 - RNA, 17 nt, Human adenovirus A
auacuaacaaugcuuuc

SEQ ID NO: 3896362 - RNA, 11 nt, Human adenovirus A
auacucuggaa

SEQ ID NO: 3896363 - RNA, 12 nt, Human adenovirus A
auacugggugcg

SEQ ID NO: 3896364 - RNA, 18 nt, Human adenovirus A
auagagauaagcaggaaa

SEQ ID NO: 3896365 - RNA, 13 nt, Human adenovirus A
auagcaaagccau

SEQ ID NO: 3896366 - RNA, 13 nt, Human adenovirus A
auagcugaacccc

SEQ ID NO: 3896367 - RNA, 13 nt, Human adenovirus A
auaggaggaguua

SEQ ID NO: 3896368 - RNA, 18 nt, Human adenovirus A
auaguaaaaaugccagga

SEQ ID NO: 3896369 - RNA, 13 nt, Human adenovirus A
auauaguacugcu

SEQ ID NO: 3896370 - RNA, 15 nt, Human adenovirus A
auauauccuugcaaa

SEQ ID NO: 3896371 - RNA, 20 nt, Human adenovirus A
auauuaaaaagcucuguaag

SEQ ID NO: 3896372 - RNA, 21 nt, Human adenovirus A
auauucgcgugccaggcauuu

SEQ ID NO: 3896373 - RNA, 16 nt, Human adenovirus A
auauugcauuuguccu

SEQ ID NO: 3896374 - RNA, 18 nt, Human adenovirus A
auauuuugccagcucuug

SEQ ID NO: 3896375 - RNA, 18 nt, Human adenovirus A
aucaacgacuaaaacaaa

SEQ ID NO: 3896376 - RNA, 21 nt, Human adenovirus A
aucaacgacuaaaacaaaucu

SEQ ID NO: 3896377 - RNA, 19 nt, Human adenovirus A
aucaagcauguuaaaaaac

SEQ ID NO: 3896378 - RNA, 16 nt, Human adenovirus A
aucaaggaaauacuau

SEQ ID NO: 3896379 - RNA, 10 nt, Human adenovirus A
aucacuuccg

SEQ ID NO: 3896380 - RNA, 14 nt, Human adenovirus A
aucaguggaguuca

SEQ ID NO: 3896381 - RNA, 15 nt, Human adenovirus A
aucaucaaacugccu

SEQ ID NO: 3896382 - RNA, 14 nt, Human adenovirus A
aucaugaaaacagc

SEQ ID NO: 3896383 - RNA, 21 nt, Human adenovirus A
aucaugauguuuaauaaagcg

SEQ ID NO: 3896384 - RNA, 21 nt, Human adenovirus A
auccaaguucuaaugcaaguu

SEQ ID NO: 3896385 - RNA, 19 nt, Human adenovirus A
aucccagcugacauacacu

SEQ ID NO: 3896386 - RNA, 17 nt, Human adenovirus A
aucccuugcuugcuuac

SEQ ID NO: 3896387 - RNA, 16 nt, Human adenovirus A
auccguggcaggccau

SEQ ID NO: 3896388 - RNA, 17 nt, Human adenovirus A
auccuacaaaaaguaac

SEQ ID NO: 3896389 - RNA, 16 nt, Human adenovirus A
auccuaggcaaagaaa

SEQ ID NO: 3896390 - RNA, 18 nt, Human adenovirus A
aucgccccgcugcaauuu

SEQ ID NO: 3896391 - RNA, 20 nt, Human adenovirus A
aucuacagcgacaaagcacu

SEQ ID NO: 3896392 - RNA, 21 nt, Human adenovirus A
aucucaccuggaccuuuaacg

SEQ ID NO: 3896393 - RNA, 24 nt, Human adenovirus A
aucucacuuaagucuuuacaauaa

SEQ ID NO: 3896394 - RNA, 17 nt, Human adenovirus A
aucugaucgcucuucaa

SEQ ID NO: 3896395 - RNA, 15 nt, Human adenovirus A
aucugccacuacccg

SEQ ID NO: 3896396 - RNA, 22 nt, Human adenovirus A
aucugcgccacaauaacuacaa

SEQ ID NO: 3896397 - RNA, 12 nt, Human adenovirus A
aucugucggcgu

SEQ ID NO: 3896398 - RNA, 13 nt, Human adenovirus A
aucuucaaacacc

SEQ ID NO: 3896399 - RNA, 16 nt, Human adenovirus A
aucuucaucuuuucua

SEQ ID NO: 3896400 - RNA, 16 nt, Human adenovirus A
aucuuccgccaaaggu

SEQ ID NO: 3896401 - RNA, 15 nt, Human adenovirus A
aucuuggaguguacc

SEQ ID NO: 3896402 - RNA, 14 nt, Human adenovirus A
augaaaacagcauu

SEQ ID NO: 3896403 - RNA, 22 nt, Human adenovirus A
augaaacccgcugugagcaaau

SEQ ID NO: 3896404 - RNA, 21 nt, Human adenovirus A
augaacaaacgguuacagagg

SEQ ID NO: 3896405 - RNA, 14 nt, Human adenovirus A
augaagcacgcaga

SEQ ID NO: 3896406 - RNA, 15 nt, Human adenovirus A
augaugcgggcagcc

SEQ ID NO: 3896407 - RNA, 21 nt, Human adenovirus A
augauuaaacaacaaaacacu

SEQ ID NO: 3896408 - RNA, 15 nt, Human adenovirus A
uucgucgcuguuuug

SEQ ID NO: 3896409 - RNA, 22 nt, Human adenovirus A
uucuacuuuagaagccauguua

SEQ ID NO: 3896410 - RNA, 16 nt, Human adenovirus A
uucuagcaaaaugaau

SEQ ID NO: 3896411 - RNA, 11 nt, Human adenovirus A
uucuccaaauc

SEQ ID NO: 3896412 - RNA, 22 nt, Human adenovirus A
uucuccaaaucuuaaauggaag

SEQ ID NO: 3896413 - RNA, 18 nt, Human adenovirus A
uucuccuuuuuuuuucca

SEQ ID NO: 3896414 - RNA, 12 nt, Human adenovirus A
uucugcugucau

SEQ ID NO: 3896415 - RNA, 14 nt, Human adenovirus A
uucugcugucauuu

SEQ ID NO: 3896416 - RNA, 14 nt, Human adenovirus A
uucuggaauaacaa

SEQ ID NO: 3896417 - RNA, 14 nt, Human adenovirus A
uucuuaagcaguga

SEQ ID NO: 3896418 - RNA, 21 nt, Human adenovirus A
uucuuaguaggcuaacuguua

SEQ ID NO: 3896419 - RNA, 15 nt, Human adenovirus A
uucuuuacaacugua

SEQ ID NO: 3896420 - RNA, 15 nt, Human adenovirus A
uucuuugguuugcaa

SEQ ID NO: 3896421 - RNA, 22 nt, Human adenovirus A
uugaaaagacugagaaccgucu

SEQ ID NO: 3896422 - RNA, 21 nt, Human adenovirus A
uugaaccagcgucccaaaagc

SEQ ID NO: 3896423 - RNA, 20 nt, Human adenovirus A
uugaauaguucaucuuagua

SEQ ID NO: 3896424 - RNA, 20 nt, Human adenovirus A
uugacaaacgcccugcuccg

SEQ ID NO: 3896425 - RNA, 18 nt, Human adenovirus A
uugagcccgaaguugacu

SEQ ID NO: 3896426 - RNA, 20 nt, Human adenovirus A
uugaguaacuucaacauuua

SEQ ID NO: 3896427 - RNA, 20 nt, Human adenovirus A
uugauacuuguuuuuucuga

SEQ ID NO: 3896428 - RNA, 17 nt, Human adenovirus A
uugcaagcgaucccaua

SEQ ID NO: 3896429 - RNA, 22 nt, Human adenovirus A
uugcagcagaauuacugccagu

SEQ ID NO: 3896430 - RNA, 10 nt, Human adenovirus A
uugcauggug

SEQ ID NO: 3896431 - RNA, 15 nt, Human adenovirus A
uugccuacccggcag

SEQ ID NO: 3896432 - RNA, 18 nt, Human adenovirus A
uugcgcuauguacagcaa

SEQ ID NO: 3896433 - RNA, 16 nt, Human adenovirus A
uugcuaaauuggccuu

SEQ ID NO: 3896434 - RNA, 16 nt, Human adenovirus A
uuggaaacugugcugc

SEQ ID NO: 3896435 - RNA, 22 nt, Human adenovirus A
uuggagccccuuaccaacaccu

SEQ ID NO: 3896436 - RNA, 16 nt, Human adenovirus A
uuggaguuggaagaag

SEQ ID NO: 3896437 - RNA, 19 nt, Human adenovirus A
uuggccaccauagccccuc

SEQ ID NO: 3896438 - RNA, 16 nt, Human adenovirus A
uuggcuuucgaggggu

SEQ ID NO: 3896439 - RNA, 19 nt, Human adenovirus A
uugguuaagcgccggaccc

SEQ ID NO: 3896440 - RNA, 16 nt, Human adenovirus A
uugugguucaggaacg

SEQ ID NO: 3896441 - RNA, 22 nt, Human adenovirus A
uuuaagucgagauucauaccug

SEQ ID NO: 3896442 - RNA, 19 nt, Human adenovirus A
uuuaauacugaaaaauagu

SEQ ID NO: 3896443 - RNA, 16 nt, Human adenovirus A
uuuaauuaacauucug

SEQ ID NO: 3896444 - RNA, 12 nt, Human adenovirus A
uuuagguccugu

SEQ ID NO: 3896445 - RNA, 16 nt, Human adenovirus A
uuuaguggcaaucaaa

SEQ ID NO: 3896446 - RNA, 22 nt, Human adenovirus A
uuuaugccuaaugugagugcuu

SEQ ID NO: 3896447 - RNA, 12 nt, Human adenovirus A
uuuauuggccug

SEQ ID NO: 3896448 - RNA, 14 nt, Human adenovirus A
uuucacauucaacu

SEQ ID NO: 3896449 - RNA, 13 nt, Human adenovirus A
uuucagcacugcg

SEQ ID NO: 3896450 - RNA, 22 nt, Human adenovirus A
uuucauuaggcuuucuuccauu

SEQ ID NO: 3896451 - RNA, 14 nt, Human adenovirus A
uuucccucuuccca

SEQ ID NO: 3896452 - RNA, 14 nt, Human adenovirus A
uuucguuccagacu

SEQ ID NO: 3896453 - RNA, 15 nt, Human adenovirus A
uuucugacaugguaa

SEQ ID NO: 3896454 - RNA, 14 nt, Human adenovirus A
uuugaaccugaaag

SEQ ID NO: 3896455 - RNA, 14 nt, Human adenovirus A
uuugaccggucagg

SEQ ID NO: 3896456 - RNA, 14 nt, Human adenovirus A
uuugagauuggcaa

SEQ ID NO: 3896457 - RNA, 16 nt, Human adenovirus A
uuugaguacucagccg

SEQ ID NO: 3896458 - RNA, 17 nt, Human adenovirus A
uuugcaaggcgguauuu

SEQ ID NO: 3896459 - RNA, 18 nt, Human adenovirus A
uuugcuggagauaaguuu

SEQ ID NO: 3896460 - RNA, 13 nt, Human adenovirus A
uuuggagccccuu

SEQ ID NO: 3896461 - RNA, 21 nt, Human adenovirus A
uuuggcggccaugcaaagcca

SEQ ID NO: 3896462 - RNA, 19 nt, Human adenovirus A
uuuguccaguuuacuaaca

SEQ ID NO: 3896463 - RNA, 15 nt, Human adenovirus A
uuugugccucgucag

SEQ ID NO: 3896464 - RNA, 15 nt, Human adenovirus A
uuuuaacugugaaaa

SEQ ID NO: 3896465 - RNA, 23 nt, Human adenovirus A
uuuuaagaagcaccacaucuuug

SEQ ID NO: 3896466 - RNA, 14 nt, Human adenovirus A
uuuucaguggacaa

SEQ ID NO: 3896467 - RNA, 23 nt, Human adenovirus A
uuuucuagaacaaaaaggaggaa

SEQ ID NO: 3896468 - RNA, 18 nt, Human adenovirus A
uuuucuuacauuacccaa

SEQ ID NO: 3896469 - RNA, 14 nt, Human adenovirus A
uuuuguuucuucua

SEQ ID NO: 3896470 - RNA, 21 nt, Human adenovirus A
ugaugccacuugaauucugga

SEQ ID NO: 3896471 - RNA, 20 nt, Human adenovirus A
ugaugcuuuucgccagcagc

SEQ ID NO: 3896472 - RNA, 22 nt, Human adenovirus A
ugauuucgauaaacaaaagcaa

SEQ ID NO: 3896473 - RNA, 23 nt, Human adenovirus A
ugcaaaaagaaaaugaacaaaau

SEQ ID NO: 3896474 - RNA, 17 nt, Human adenovirus A
ugcaaauucaucaacau

SEQ ID NO: 3896475 - RNA, 17 nt, Human adenovirus A
ugcaagaggagaaggag

SEQ ID NO: 3896476 - RNA, 16 nt, Human adenovirus A
ugcaaugcuuaacaua

SEQ ID NO: 3896477 - RNA, 18 nt, Human adenovirus A
ugcacguacuagccccug

SEQ ID NO: 3896478 - RNA, 16 nt, Human adenovirus A
ugcagccugucuuaaa

SEQ ID NO: 3896479 - RNA, 21 nt, Human adenovirus A
ugcagcgugcggccuguuuug

SEQ ID NO: 3896480 - RNA, 18 nt, Human adenovirus A
ugcaggcuaauuugugga

SEQ ID NO: 3896481 - RNA, 18 nt, Human adenovirus A
ugcaggcuucucgaaaaa

SEQ ID NO: 3896482 - RNA, 22 nt, Human adenovirus A
ugcaguuuuuuuuccacacauc

SEQ ID NO: 3896483 - RNA, 17 nt, Human adenovirus A
ugcaucguaaacaacag

SEQ ID NO: 3896484 - RNA, 21 nt, Human adenovirus A
ugcaucguaaacaacagacuu

SEQ ID NO: 3896485 - RNA, 14 nt, Human adenovirus A
ugcauuaccagcag

SEQ ID NO: 3896486 - RNA, 17 nt, Human adenovirus A
ugcauuaucaugaaacu

SEQ ID NO: 3896487 - RNA, 14 nt, Human adenovirus A
ugcauuuaguguuu

SEQ ID NO: 3896488 - RNA, 20 nt, Human adenovirus A
ugcauuuuauuauuugcugc

SEQ ID NO: 3896489 - RNA, 18 nt, Human adenovirus A
ugccaccucuagaaacug

SEQ ID NO: 3896490 - RNA, 23 nt, Human adenovirus A
ugccacgcuuugaccggucaggc

SEQ ID NO: 3896491 - RNA, 22 nt, Human adenovirus A
ugccauuaauugaucaauuucu

SEQ ID NO: 3896492 - RNA, 12 nt, Human adenovirus A
ugcccugcaaaa

SEQ ID NO: 3896493 - RNA, 18 nt, Human adenovirus A
ugccgcccgcauguaugg

SEQ ID NO: 3896494 - RNA, 14 nt, Human adenovirus A
ugccguuggcagag

SEQ ID NO: 3896495 - RNA, 22 nt, Human adenovirus A
ugccuacccggcaguaaaucuu

SEQ ID NO: 3896496 - RNA, 21 nt, Human adenovirus A
ugccuuaggcagcagcagcaa

SEQ ID NO: 3896497 - RNA, 14 nt, Human adenovirus A
ugcgaccgggcacc

SEQ ID NO: 3896498 - RNA, 21 nt, Human adenovirus A
ugcgacguuuuguuaccugug

SEQ ID NO: 3896499 - RNA, 21 nt, Human adenovirus A
ugcgccuauauuauagguaac

SEQ ID NO: 3896500 - RNA, 19 nt, Human adenovirus A
ugcguagcaguaucagugg

SEQ ID NO: 3896501 - RNA, 23 nt, Human adenovirus A
ugcuaagggacaaguuaaaagac

SEQ ID NO: 3896502 - RNA, 16 nt, Human adenovirus A
ugcuaugugcaaauau

SEQ ID NO: 3896503 - RNA, 13 nt, Human adenovirus A
ugcuccuuuucuu

SEQ ID NO: 3896504 - RNA, 17 nt, Human adenovirus A
ugcucgaccguuuucac

SEQ ID NO: 3896505 - RNA, 17 nt, Human adenovirus A
ugcucuaauagaacugg

SEQ ID NO: 3896506 - RNA, 17 nt, Human adenovirus A
ugcuggugaaagaucac

SEQ ID NO: 3896507 - RNA, 16 nt, Human adenovirus A
ugcuuuccaaaugccc

SEQ ID NO: 3896508 - RNA, 23 nt, Human adenovirus A
ugcuuuuagaugucgaaugcagg

SEQ ID NO: 3896509 - RNA, 17 nt, Human adenovirus A
uggaaaaaaugaaaguu

SEQ ID NO: 3896510 - RNA, 13 nt, Human adenovirus A
uggaaaaacaacu

SEQ ID NO: 3896511 - RNA, 21 nt, Human adenovirus A
uggaaaccuagguuuaaaucu

SEQ ID NO: 3896512 - RNA, 22 nt, Human adenovirus A
uggaacaacaggugcaagaagg

SEQ ID NO: 3896513 - RNA, 23 nt, Human adenovirus A
uggaacaacaggugcaagaaggc

SEQ ID NO: 3896514 - RNA, 15 nt, Human adenovirus A
uggaacccuuacacu

SEQ ID NO: 3896515 - RNA, 20 nt, Human adenovirus A
uggaacucgagugcaugcau

SEQ ID NO: 3896516 - RNA, 18 nt, Human adenovirus A
uggaagaaugggaggagg

SEQ ID NO: 3896517 - RNA, 14 nt, Human adenovirus A
uggaauaagguuuc

SEQ ID NO: 3896518 - RNA, 10 nt, Human adenovirus A
uggacacuau

SEQ ID NO: 3896519 - RNA, 21 nt, Human adenovirus A
uggaccuacuuacuggggugc

SEQ ID NO: 3896520 - RNA, 14 nt, Human adenovirus A
uggacggagccagc

SEQ ID NO: 3896521 - RNA, 19 nt, Human adenovirus A
uggacguuaguaacaacaa

SEQ ID NO: 3896522 - RNA, 22 nt, Human adenovirus A
uggagcggucuuaaaaauuuug

SEQ ID NO: 3896523 - RNA, 17 nt, Human adenovirus A
uggaggcagcuggagug

SEQ ID NO: 3896524 - RNA, 13 nt, Human adenovirus A
uggaguuggaaac

SEQ ID NO: 3896525 - RNA, 14 nt, Human adenovirus A
uggauguuggaagg

SEQ ID NO: 3896526 - RNA, 16 nt, Human adenovirus A
uggcagcugauuucag

SEQ ID NO: 3896527 - RNA, 14 nt, Human adenovirus A
uggccagcugcccu

SEQ ID NO: 3896528 - RNA, 18 nt, Human adenovirus A
uggcgcuacggcugucau

SEQ ID NO: 3896529 - RNA, 22 nt, Human adenovirus A
uggcuacgugcgccaagccugu

SEQ ID NO: 3896530 - RNA, 21 nt, Human adenovirus A
uggcuguugcuguaaggaacg

SEQ ID NO: 3896531 - RNA, 17 nt, Human adenovirus A
ugggacauaauuucccu

SEQ ID NO: 3896532 - RNA, 14 nt, Human adenovirus A
ugggaggaaagaca

SEQ ID NO: 3896533 - RNA, 13 nt, Human adenovirus A
ugggaggaagaau

SEQ ID NO: 3896534 - RNA, 22 nt, Human adenovirus A
uggucccuacccgauaugaugc

SEQ ID NO: 3896535 - RNA, 23 nt, Human adenovirus A
uggucuggcuucgggaauuaaug

SEQ ID NO: 3896536 - RNA, 23 nt, Human adenovirus A
ugguggaaaaagaucaaggaaau

SEQ ID NO: 3896537 - RNA, 20 nt, Human adenovirus A
ugguucugccucuucuucuu

SEQ ID NO: 3896538 - RNA, 15 nt, Human adenovirus A
uguaaaugcuuuguu

SEQ ID NO: 3896539 - RNA, 22 nt, Human adenovirus A
uguaacuguggaacucgagugc

SEQ ID NO: 3896540 - RNA, 20 nt, Human adenovirus A
uguacagaaaaaaauugcca

SEQ ID NO: 3896541 - RNA, 20 nt, Human adenovirus A
uguacagcaaucuguaaguu

SEQ ID NO: 3896542 - RNA, 20 nt, Human adenovirus A
uguaguggggauugggaagg

SEQ ID NO: 3896543 - RNA, 22 nt, Human adenovirus A
uguauaaauucuuaaacaaucu

SEQ ID NO: 3896544 - RNA, 19 nt, Human adenovirus A
uguauacucuggaaccauu

SEQ ID NO: 3896545 - RNA, 16 nt, Human adenovirus A
uguaucagucuggacc

SEQ ID NO: 3896546 - RNA, 15 nt, Human adenovirus A
uguccccgaaagccg

SEQ ID NO: 3896547 - RNA, 18 nt, Human adenovirus A
uguccccgaaagccgcaa

SEQ ID NO: 3896548 - RNA, 21 nt, Human adenovirus A
ugucggccugacgcucuggca

SEQ ID NO: 3896549 - RNA, 16 nt, Human adenovirus A
ugucuccucuguaguu

SEQ ID NO: 3896550 - RNA, 13 nt, Human adenovirus A
ugucuuguuaaug

SEQ ID NO: 3896551 - RNA, 15 nt, Human adenovirus A
uguggcccaaugcaa

SEQ ID NO: 3896552 - RNA, 15 nt, Human adenovirus A
uguguccuuggaaga

SEQ ID NO: 3896553 - RNA, 10 nt, Human adenovirus A
uguuaaccau

SEQ ID NO: 3896554 - RNA, 20 nt, Human adenovirus A
uguucaauaaauacugcucc

SEQ ID NO: 3896555 - RNA, 21 nt, Human adenovirus A
uguuuggcagcaaugcuugga

SEQ ID NO: 3896556 - RNA, 16 nt, Human adenovirus A
uuaaccauuguaaaug

SEQ ID NO: 3896557 - RNA, 19 nt, Human adenovirus A
uuaagaucuucguaggaaa

SEQ ID NO: 3896558 - RNA, 22 nt, Human adenovirus A
uuaagcgacgaucuuggagugu

SEQ ID NO: 3896559 - RNA, 17 nt, Human adenovirus A
uuaagggcguacaguuu

SEQ ID NO: 3896560 - RNA, 20 nt, Human adenovirus A
uuaauccuaggcaaagaaac

SEQ ID NO: 3896561 - RNA, 23 nt, Human adenovirus A
uuaaugcaucuuugggacuuugu

SEQ ID NO: 3896562 - RNA, 23 nt, Human adenovirus A
uuaaugguguagcugcaguuugu

SEQ ID NO: 3896563 - RNA, 14 nt, Human adenovirus A
uuaauguuucaggu

SEQ ID NO: 3896564 - RNA, 15 nt, Human adenovirus A
uuacaacuugcuucc

SEQ ID NO: 3896565 - RNA, 21 nt, Human adenovirus A
uuacagaggaacguaacuuuc

SEQ ID NO: 3896566 - RNA, 21 nt, Human adenovirus A
uuaccagaaugaucacagcaa

SEQ ID NO: 3896567 - RNA, 21 nt, Human adenovirus A
uuacucgauuuaauuaacauu

SEQ ID NO: 3896568 - RNA, 12 nt, Human adenovirus A
uuacucugcuaa

SEQ ID NO: 3896569 - RNA, 16 nt, Human adenovirus A
uuacuugaacaacuuu

SEQ ID NO: 3896570 - RNA, 20 nt, Human adenovirus A
uuaguaacagcauaugaaca

SEQ ID NO: 3896571 - RNA, 23 nt, Human adenovirus A
uuaguccugcaguuauuggacac

SEQ ID NO: 3896572 - RNA, 15 nt, Human adenovirus A
uuaucuucaaaucau

SEQ ID NO: 3896573 - RNA, 11 nt, Human adenovirus A
uuaucuuggua

SEQ ID NO: 3896574 - RNA, 13 nt, Human adenovirus A
uuauguaugaaca

SEQ ID NO: 3896575 - RNA, 13 nt, Human adenovirus A
uuauuugaacaca

SEQ ID NO: 3896576 - RNA, 15 nt, Human adenovirus A
uucaaacuuuacaaa

SEQ ID NO: 3896577 - RNA, 19 nt, Human adenovirus A
uucaacaggcgggaaaagu

SEQ ID NO: 3896578 - RNA, 20 nt, Human adenovirus A
uucaccgcgcugcggccaug

SEQ ID NO: 3896579 - RNA, 14 nt, Human adenovirus A
uucagcaguugcaa

SEQ ID NO: 3896580 - RNA, 18 nt, Human adenovirus A
uucagccacucaaacauu

SEQ ID NO: 3896581 - RNA, 18 nt, Human adenovirus A
uuccaaccaaaggagaaa

SEQ ID NO: 3896582 - RNA, 17 nt, Human adenovirus A
uuccaauggucuucaag

SEQ ID NO: 3896583 - RNA, 16 nt, Human adenovirus A
uuccaccaaaugcucu

SEQ ID NO: 3896584 - RNA, 17 nt, Human adenovirus A
uucccaagauuuaauuu

SEQ ID NO: 3896585 - RNA, 23 nt, Human adenovirus A
uuccccgauaagauuguaauuuu

SEQ ID NO: 3896586 - RNA, 18 nt, Human adenovirus A
uuccggaguucccacaga

SEQ ID NO: 3896587 - RNA, 16 nt, Human adenovirus A
cgcugaaacagcaggg

SEQ ID NO: 3896588 - RNA, 20 nt, Human adenovirus A
cgcugacgggagcaggaaca

SEQ ID NO: 3896589 - RNA, 23 nt, Human adenovirus A
cgcugacgggagcaggaacagag

SEQ ID NO: 3896590 - RNA, 15 nt, Human adenovirus A
cgcugcagcuuccgc

SEQ ID NO: 3896591 - RNA, 15 nt, Human adenovirus A
cgcugcucagcucca

SEQ ID NO: 3896592 - RNA, 22 nt, Human adenovirus A
cgcuguugggacagcaagcagc

SEQ ID NO: 3896593 - RNA, 21 nt, Human adenovirus A
cgcuuucccgagaaccagaua

SEQ ID NO: 3896594 - RNA, 15 nt, Human adenovirus A
cgcuuuugccagacu

SEQ ID NO: 3896595 - RNA, 16 nt, Human adenovirus A
cggaacuauuucuugu

SEQ ID NO: 3896596 - RNA, 16 nt, Human adenovirus A
cggaaugauuaaacaa

SEQ ID NO: 3896597 - RNA, 14 nt, Human adenovirus A
cggacaguagcugc

SEQ ID NO: 3896598 - RNA, 14 nt, Human adenovirus A
cggcaaaaaacgaa

SEQ ID NO: 3896599 - RNA, 20 nt, Human adenovirus A
cggcacaacagacuggggaa

SEQ ID NO: 3896600 - RNA, 14 nt, Human adenovirus A
cggcaugcugaaac

SEQ ID NO: 3896601 - RNA, 14 nt, Human adenovirus A
cggcauuccccauc

SEQ ID NO: 3896602 - RNA, 13 nt, Human adenovirus A
cggccagccaagc

SEQ ID NO: 3896603 - RNA, 15 nt, Human adenovirus A
cggcgaacgggcagc

SEQ ID NO: 3896604 - RNA, 19 nt, Human adenovirus A
cggcguaguaugcgcagac

SEQ ID NO: 3896605 - RNA, 15 nt, Human adenovirus A
cgggcagccaggcgg

SEQ ID NO: 3896606 - RNA, 14 nt, Human adenovirus A
cgggccgcagcugc

SEQ ID NO: 3896607 - RNA, 19 nt, Human adenovirus A
cgggcuguaucuguugaau

SEQ ID NO: 3896608 - RNA, 21 nt, Human adenovirus A
cggggaauacuuuacaaaugc

SEQ ID NO: 3896609 - RNA, 16 nt, Human adenovirus A
cggggaggaagcugag

SEQ ID NO: 3896610 - RNA, 17 nt, Human adenovirus A
cggguccugcgggaagc

SEQ ID NO: 3896611 - RNA, 15 nt, Human adenovirus A
cgguggaacugcaga

SEQ ID NO: 3896612 - RNA, 20 nt, Human adenovirus A
cgguggaacugcagacagug

SEQ ID NO: 3896613 - RNA, 22 nt, Human adenovirus A
cgguggaacugcagacaguggc

SEQ ID NO: 3896614 - RNA, 17 nt, Human adenovirus A
cguacuuguaacugugg

SEQ ID NO: 3896615 - RNA, 17 nt, Human adenovirus A
cgucaaaaaagcaaagu

SEQ ID NO: 3896616 - RNA, 18 nt, Human adenovirus A
cgucuucguggagaagcg

SEQ ID NO: 3896617 - RNA, 18 nt, Human adenovirus A
cgugaauauuaaaaagcu

SEQ ID NO: 3896618 - RNA, 15 nt, Human adenovirus A
cgugauggcagcggc

SEQ ID NO: 3896619 - RNA, 16 nt, Human adenovirus A
cgugcaucaguguaaa

SEQ ID NO: 3896620 - RNA, 19 nt, Human adenovirus A
cgugucuucucccugugcu

SEQ ID NO: 3896621 - RNA, 14 nt, Human adenovirus A
cguuacagcuucag

SEQ ID NO: 3896622 - RNA, 13 nt, Human adenovirus A
cguuuggaaacug

SEQ ID NO: 3896623 - RNA, 15 nt, Human adenovirus A
cguuuggaaacugua

SEQ ID NO: 3896624 - RNA, 19 nt, Human adenovirus A
cguuuugugcccguggauc

SEQ ID NO: 3896625 - RNA, 10 nt, Human adenovirus A
cuaaaacaga

SEQ ID NO: 3896626 - RNA, 16 nt, Human adenovirus A
cuaaaccaagccaugc

SEQ ID NO: 3896627 - RNA, 17 nt, Human adenovirus A
cuaaaccaagccaugcu

SEQ ID NO: 3896628 - RNA, 22 nt, Human adenovirus A
cuaaaugcaucauuacuucaaa

SEQ ID NO: 3896629 - RNA, 22 nt, Human adenovirus A
cuaaccccaaaugaauuugaaa

SEQ ID NO: 3896630 - RNA, 19 nt, Human adenovirus A
cuaacgcuggggcacagcu

SEQ ID NO: 3896631 - RNA, 13 nt, Human adenovirus A
cuaacuaccuagc

SEQ ID NO: 3896632 - RNA, 23 nt, Human adenovirus A
cuaaggagguuuguaagcgguuu

SEQ ID NO: 3896633 - RNA, 16 nt, Human adenovirus A
cuaauacuuccauccg

SEQ ID NO: 3896634 - RNA, 21 nt, Human adenovirus A
cuacaucuuuuacuaaaaugc

SEQ ID NO: 3896635 - RNA, 23 nt, Human adenovirus A
cuaccaaggaaaacuuuuguauu

SEQ ID NO: 3896636 - RNA, 22 nt, Human adenovirus A
cuaccugacacuacagagcuca

SEQ ID NO: 3896637 - RNA, 17 nt, Human adenovirus A
cuacgcucguccaacca

SEQ ID NO: 3896638 - RNA, 16 nt, Human adenovirus A
cuacgguggcagccaa

SEQ ID NO: 3896639 - RNA, 17 nt, Human adenovirus A
cuacgguggcagccaag

SEQ ID NO: 3896640 - RNA, 16 nt, Human adenovirus A
cuacgugagaauuguu

SEQ ID NO: 3896641 - RNA, 22 nt, Human adenovirus A
cuagaggcgugccguuggcaga

SEQ ID NO: 3896642 - RNA, 23 nt, Human adenovirus A
cuagaugaagcgcagcagaaccc

SEQ ID NO: 3896643 - RNA, 18 nt, Human adenovirus A
cuagcccaauugcaugcu

SEQ ID NO: 3896644 - RNA, 13 nt, Human adenovirus A
cuaggggcuggcu

SEQ ID NO: 3896645 - RNA, 22 nt, Human adenovirus A
cuaguccguuuucuucuugagc

SEQ ID NO: 3896646 - RNA, 22 nt, Human adenovirus A
cuaugacccuugagcugccucc

SEQ ID NO: 3896647 - RNA, 17 nt, Human adenovirus A
cuaugaugcgggcagcc

SEQ ID NO: 3896648 - RNA, 21 nt, Human adenovirus A
cuauguaaguaggauagcacc

SEQ ID NO: 3896649 - RNA, 17 nt, Human adenovirus A
cuauucggaaaccauga

SEQ ID NO: 3896650 - RNA, 19 nt, Human adenovirus A
cucaaaagcgaagaucagu

SEQ ID NO: 3896651 - RNA, 20 nt, Human adenovirus A
cucaaagaaacagcagcaac

SEQ ID NO: 3896652 - RNA, 18 nt, Human adenovirus A
cucaacgugucaguuucu

SEQ ID NO: 3896653 - RNA, 19 nt, Human adenovirus A
cucacgacacgucacaucc

SEQ ID NO: 3896654 - RNA, 15 nt, Human adenovirus A
cucagaaagccaacc

SEQ ID NO: 3896655 - RNA, 14 nt, Human adenovirus A
cucaggacaugaug

SEQ ID NO: 3896656 - RNA, 18 nt, Human adenovirus A
cucauguauuuuuucaaa

SEQ ID NO: 3896657 - RNA, 18 nt, Human adenovirus A
cuccaauuuuuugauuac

SEQ ID NO: 3896658 - RNA, 12 nt, Human adenovirus A
cuccaucuguuu

SEQ ID NO: 3896659 - RNA, 14 nt, Human adenovirus A
cuccccacagcugg

SEQ ID NO: 3896660 - RNA, 19 nt, Human adenovirus A
cuccccacagcuggcgcac

SEQ ID NO: 3896661 - RNA, 14 nt, Human adenovirus A
cuccccuguggagc

SEQ ID NO: 3896662 - RNA, 18 nt, Human adenovirus A
cuccccuguggagccacu

SEQ ID NO: 3896663 - RNA, 14 nt, Human adenovirus A
cuccgacaacagcu

SEQ ID NO: 3896664 - RNA, 20 nt, Human adenovirus A
cuccuccgugaguuggccug

SEQ ID NO: 3896665 - RNA, 23 nt, Human adenovirus A
cuccugacccaccaccaaacugc

SEQ ID NO: 3896666 - RNA, 12 nt, Human adenovirus A
cuccuuaauuuc

SEQ ID NO: 3896667 - RNA, 20 nt, Human adenovirus A
cucgcauaaauucgcgggcu

SEQ ID NO: 3896668 - RNA, 19 nt, Human adenovirus A
cucgcgcuuuggaggcagc

SEQ ID NO: 3896669 - RNA, 18 nt, Human adenovirus A
cucguaaaaucuacaaaa

SEQ ID NO: 3896670 - RNA, 15 nt, Human adenovirus A
cucuaacaagcugcg

SEQ ID NO: 3896671 - RNA, 14 nt, Human adenovirus A
cucuaagcuuagau

SEQ ID NO: 3896672 - RNA, 18 nt, Human adenovirus A
cucuaaguucuguuucau

SEQ ID NO: 3896673 - RNA, 23 nt, Human adenovirus A
cucuacagccccuuugaagagcu

SEQ ID NO: 3896674 - RNA, 14 nt, Human adenovirus A
cucugaaacaugcu

SEQ ID NO: 3896675 - RNA, 21 nt, Human adenovirus A
cucugauuucgauaaacaaaa

SEQ ID NO: 3896676 - RNA, 18 nt, Human adenovirus A
cucuggcgaacaggaaga

SEQ ID NO: 3896677 - RNA, 22 nt, Human adenovirus A
cucuguucaauaaauacugcuc

SEQ ID NO: 3896678 - RNA, 13 nt, Human adenovirus A
cucuuaaugcagg

SEQ ID NO: 3896679 - RNA, 20 nt, Human adenovirus A
cucuucuaucaucaaacugc

SEQ ID NO: 3896680 - RNA, 14 nt, Human adenovirus A
cucuuggccagcug

SEQ ID NO: 3896681 - RNA, 10 nt, Human adenovirus A
cucuuuucuu

SEQ ID NO: 3896682 - RNA, 14 nt, Human adenovirus A
cucuuuucuuuacc

SEQ ID NO: 3896683 - RNA, 17 nt, Human adenovirus A
cugaaacaaauauuuac

SEQ ID NO: 3896684 - RNA, 12 nt, Human adenovirus A
cugaagaggagg

SEQ ID NO: 3896685 - RNA, 21 nt, Human adenovirus A
cugacagagcgcggcugcgac

SEQ ID NO: 3896686 - RNA, 15 nt, Human adenovirus A
cugacgauaacguuc

SEQ ID NO: 3896687 - RNA, 14 nt, Human adenovirus A
cugacgucacuggc

SEQ ID NO: 3896688 - RNA, 12 nt, Human adenovirus A
cugacugaacca

SEQ ID NO: 3896689 - RNA, 16 nt, Human adenovirus A
cugagacgaagaaaua

SEQ ID NO: 3896690 - RNA, 17 nt, Human adenovirus A
cugaggcggcuggugcu

SEQ ID NO: 3896691 - RNA, 20 nt, Human adenovirus A
cugauggugccuaagcggca

SEQ ID NO: 3896692 - RNA, 16 nt, Human adenovirus A
cugauuaugcauuuua

SEQ ID NO: 3896693 - RNA, 10 nt, Human adenovirus A
cugcagagca

SEQ ID NO: 3896694 - RNA, 13 nt, Human adenovirus A
cugcaguaaauuc

SEQ ID NO: 3896695 - RNA, 13 nt, Human adenovirus A
cugcauuggguga

SEQ ID NO: 3896696 - RNA, 21 nt, Human adenovirus A
cugccauugccgcacggccaa

SEQ ID NO: 3896697 - RNA, 15 nt, Human adenovirus A
cugcgugaggaggac

SEQ ID NO: 3896698 - RNA, 17 nt, Human adenovirus A
cugcuagaacaagccgc

SEQ ID NO: 3896699 - RNA, 19 nt, Human adenovirus A
cugcuagaacaagccgcuc

SEQ ID NO: 3896700 - RNA, 16 nt, Human adenovirus A
cugcuaugugcaaaua

SEQ ID NO: 3896701 - RNA, 16 nt, Human adenovirus A
cugcuuucagcacugc

SEQ ID NO: 3896702 - RNA, 22 nt, Human adenovirus A
cuggaaaacauaugcacaagag

SEQ ID NO: 3896703 - RNA, 18 nt, Human adenovirus A
cuggacagcggccaugga

SEQ ID NO: 3896704 - RNA, 19 nt, Human adenovirus A
cuggaccuuuaacggaaaa

SEQ ID NO: 3896705 - RNA, 18 nt, Human adenovirus A
cuggacugccgacaacac

SEQ ID NO: 3896706 - RNA, 19 nt, Human adenovirus A
accccuaacugcccagcug

SEQ ID NO: 3896707 - RNA, 18 nt, Human adenovirus A
acccuauuuuuugggaac

SEQ ID NO: 3896708 - RNA, 21 nt, Human adenovirus A
acccucccucuuggccagcug

SEQ ID NO: 3896709 - RNA, 15 nt, Human adenovirus A
acccuccguguuccc

SEQ ID NO: 3896710 - RNA, 15 nt, Human adenovirus A
acccucgccuuugga

SEQ ID NO: 3896711 - RNA, 12 nt, Human adenovirus A
acccuucccaac

SEQ ID NO: 3896712 - RNA, 21 nt, Human adenovirus A
acccuuccccaccuuucuggu

SEQ ID NO: 3896713 - RNA, 20 nt, Human adenovirus A
accgacgaagcgucagcucg

SEQ ID NO: 3896714 - RNA, 23 nt, Human adenovirus A
accgccaugcgcgcggccagagc

SEQ ID NO: 3896715 - RNA, 20 nt, Human adenovirus A
accguucuuugguuugcaau

SEQ ID NO: 3896716 - RNA, 17 nt, Human adenovirus A
accuaucccaugaccaa

SEQ ID NO: 3896717 - RNA, 19 nt, Human adenovirus A
accugggauacuaccgcug

SEQ ID NO: 3896718 - RNA, 18 nt, Human adenovirus A
accuucuggcuuguaugc

SEQ ID NO: 3896719 - RNA, 21 nt, Human adenovirus A
accuucuggcuuguaugcuca

SEQ ID NO: 3896720 - RNA, 18 nt, Human adenovirus A
accuuuaauacugaaaaa

SEQ ID NO: 3896721 - RNA, 19 nt, Human adenovirus A
accuuugugugcuacugcg

SEQ ID NO: 3896722 - RNA, 16 nt, Human adenovirus A
acgaacugaaaauaaa

SEQ ID NO: 3896723 - RNA, 18 nt, Human adenovirus A
acgaccgccuuuucuaga

SEQ ID NO: 3896724 - RNA, 19 nt, Human adenovirus A
acgaccgccuuuucuagaa

SEQ ID NO: 3896725 - RNA, 14 nt, Human adenovirus A
acgacuaaaacaaa

SEQ ID NO: 3896726 - RNA, 23 nt, Human adenovirus A
acgaggcggugagcauccaaaug

SEQ ID NO: 3896727 - RNA, 22 nt, Human adenovirus A
acgaggguuuuguccuuccagg

SEQ ID NO: 3896728 - RNA, 14 nt, Human adenovirus A
acgaguacaugaac

SEQ ID NO: 3896729 - RNA, 17 nt, Human adenovirus A
acgaugacgaagaccag

SEQ ID NO: 3896730 - RNA, 18 nt, Human adenovirus A
acgaugacgaagaccagu

SEQ ID NO: 3896731 - RNA, 20 nt, Human adenovirus A
acgcaacaacugagacuucc

SEQ ID NO: 3896732 - RNA, 20 nt, Human adenovirus A
acgcaagcgugcaaacagac

SEQ ID NO: 3896733 - RNA, 19 nt, Human adenovirus A
acgccuuacauguggagcu

SEQ ID NO: 3896734 - RNA, 18 nt, Human adenovirus A
acgcgaugaagcacgcag

SEQ ID NO: 3896735 - RNA, 22 nt, Human adenovirus A
acgcguccaccucacccuuaga

SEQ ID NO: 3896736 - RNA, 17 nt, Human adenovirus A
acgcucaaagaaacagc

SEQ ID NO: 3896737 - RNA, 21 nt, Human adenovirus A
acgcucaaagaaacagcagca

SEQ ID NO: 3896738 - RNA, 14 nt, Human adenovirus A
acgcugcccacuca

SEQ ID NO: 3896739 - RNA, 22 nt, Human adenovirus A
acggagacccagaaaaaggagu

SEQ ID NO: 3896740 - RNA, 12 nt, Human adenovirus A
acggaugaaagc

SEQ ID NO: 3896741 - RNA, 17 nt, Human adenovirus A
acggugucagaauaaca

SEQ ID NO: 3896742 - RNA, 20 nt, Human adenovirus A
acguacuagagcacaugaag

SEQ ID NO: 3896743 - RNA, 20 nt, Human adenovirus A
acgucaccaccucaaaaucu

SEQ ID NO: 3896744 - RNA, 22 nt, Human adenovirus A
acguccaggcaggguuugcaaa

SEQ ID NO: 3896745 - RNA, 21 nt, Human adenovirus A
acguuuacaaagcacugggca

SEQ ID NO: 3896746 - RNA, 22 nt, Human adenovirus A
acuaaugguuacugaagugccu

SEQ ID NO: 3896747 - RNA, 17 nt, Human adenovirus A
acuacagacaaacaagu

SEQ ID NO: 3896748 - RNA, 23 nt, Human adenovirus A
acuacccggcgauugauaucuug

SEQ ID NO: 3896749 - RNA, 13 nt, Human adenovirus A
acuacuaccacug

SEQ ID NO: 3896750 - RNA, 22 nt, Human adenovirus A
acuagccccugucaacagcauu

SEQ ID NO: 3896751 - RNA, 14 nt, Human adenovirus A
acuauagagaggaa

SEQ ID NO: 3896752 - RNA, 16 nt, Human adenovirus A
acuauugacuuaauga

SEQ ID NO: 3896753 - RNA, 15 nt, Human adenovirus A
acucacgagaaagug

SEQ ID NO: 3896754 - RNA, 15 nt, Human adenovirus A
acucauaccccaaga

SEQ ID NO: 3896755 - RNA, 14 nt, Human adenovirus A
acucaucagaggga

SEQ ID NO: 3896756 - RNA, 19 nt, Human adenovirus A
acuccauguggagguauaa

SEQ ID NO: 3896757 - RNA, 15 nt, Human adenovirus A
acuccgggaguguac

SEQ ID NO: 3896758 - RNA, 20 nt, Human adenovirus A
acucuccaauuuguggagga

SEQ ID NO: 3896759 - RNA, 13 nt, Human adenovirus A
acugaaaauggaa

SEQ ID NO: 3896760 - RNA, 23 nt, Human adenovirus A
acugaaacucccuuaguuguaaa

SEQ ID NO: 3896761 - RNA, 13 nt, Human adenovirus A
acugaucggccgu

SEQ ID NO: 3896762 - RNA, 15 nt, Human adenovirus A
acugauuuucaucug

SEQ ID NO: 3896763 - RNA, 13 nt, Human adenovirus A
acugcagccuguc

SEQ ID NO: 3896764 - RNA, 14 nt, Human adenovirus A
acugcauuggguga

SEQ ID NO: 3896765 - RNA, 15 nt, Human adenovirus A
acugcucagcuggaa

SEQ ID NO: 3896766 - RNA, 15 nt, Human adenovirus A
acugcuuugcucgag

SEQ ID NO: 3896767 - RNA, 17 nt, Human adenovirus A
acuggacagcggccaug

SEQ ID NO: 3896768 - RNA, 23 nt, Human adenovirus A
acuggccugaccauccaauggau

SEQ ID NO: 3896769 - RNA, 15 nt, Human adenovirus A
acugguuagagccau

SEQ ID NO: 3896770 - RNA, 18 nt, Human adenovirus A
acuguaagaggagacaac

SEQ ID NO: 3896771 - RNA, 19 nt, Human adenovirus A
acuguaugcgcgccuuaau

SEQ ID NO: 3896772 - RNA, 14 nt, Human adenovirus A
acuuaaaaaaggac

SEQ ID NO: 3896773 - RNA, 13 nt, Human adenovirus A
acuuaaaagcaag

SEQ ID NO: 3896774 - RNA, 16 nt, Human adenovirus A
acuuaccaaagccaug

SEQ ID NO: 3896775 - RNA, 22 nt, Human adenovirus A
acuuauuacugguacuaugacu

SEQ ID NO: 3896776 - RNA, 13 nt, Human adenovirus A
acuuauugcugcg

SEQ ID NO: 3896777 - RNA, 17 nt, Human adenovirus A
acuucacccugggaaac

SEQ ID NO: 3896778 - RNA, 20 nt, Human adenovirus A
acuucacccugggaaacaag

SEQ ID NO: 3896779 - RNA, 14 nt, Human adenovirus A
acuucauauuugcu

SEQ ID NO: 3896780 - RNA, 17 nt, Human adenovirus A
acuucccaaauuuucca

SEQ ID NO: 3896781 - RNA, 21 nt, Human adenovirus A
acuuggcuucgaaugcuguga

SEQ ID NO: 3896782 - RNA, 13 nt, Human adenovirus A
acuuuagccccag

SEQ ID NO: 3896783 - RNA, 19 nt, Human adenovirus A
acuuuauauugcauuuguc

SEQ ID NO: 3896784 - RNA, 23 nt, Human adenovirus A
agaaaaacaguacaaagccaggc

SEQ ID NO: 3896785 - RNA, 12 nt, Human adenovirus A
agaaacaaacua

SEQ ID NO: 3896786 - RNA, 19 nt, Human adenovirus A
agaaaggauguaaacauga

SEQ ID NO: 3896787 - RNA, 14 nt, Human adenovirus A
agaaaucuugaagu

SEQ ID NO: 3896788 - RNA, 14 nt, Human adenovirus A
agaacauacaacuu

SEQ ID NO: 3896789 - RNA, 20 nt, Human adenovirus A
agaacccaguaugcugaaga

SEQ ID NO: 3896790 - RNA, 14 nt, Human adenovirus A
agaagacaaagagu

SEQ ID NO: 3896791 - RNA, 14 nt, Human adenovirus A
agaagccagcagca

SEQ ID NO: 3896792 - RNA, 19 nt, Human adenovirus A
agaagcuuauguacauaau

SEQ ID NO: 3896793 - RNA, 19 nt, Human adenovirus A
agaaugggaggaaagacag

SEQ ID NO: 3896794 - RNA, 19 nt, Human adenovirus A
agacaccgcccaggcaggc

SEQ ID NO: 3896795 - RNA, 14 nt, Human adenovirus A
agaccaaaugccag

SEQ ID NO: 3896796 - RNA, 18 nt, Human adenovirus A
agaccacugucgccaacc

SEQ ID NO: 3896797 - RNA, 14 nt, Human adenovirus A
agacguaggguaca

SEQ ID NO: 3896798 - RNA, 18 nt, Human adenovirus A
agacguaggguacagugg

SEQ ID NO: 3896799 - RNA, 21 nt, Human adenovirus A
agacugagaaccgucugcaug

SEQ ID NO: 3896800 - RNA, 23 nt, Human adenovirus A
agacuuaccccugggcuuuggac

SEQ ID NO: 3896801 - RNA, 15 nt, Human adenovirus A
agagaacaaacagug

SEQ ID NO: 3896802 - RNA, 14 nt, Human adenovirus A
agagagugcccccc

SEQ ID NO: 3896803 - RNA, 15 nt, Human adenovirus A
agagcaaagguaucu

SEQ ID NO: 3896804 - RNA, 17 nt, Human adenovirus A
agagcguucugggaugc

SEQ ID NO: 3896805 - RNA, 19 nt, Human adenovirus A
agagcuaagcgacaaagag

SEQ ID NO: 3896806 - RNA, 13 nt, Human adenovirus A
agaggaagaaaga

SEQ ID NO: 3896807 - RNA, 22 nt, Human adenovirus A
agaggaagaagucgccgcggcg

SEQ ID NO: 3896808 - RNA, 10 nt, Human adenovirus A
agaggcuggc

SEQ ID NO: 3896809 - RNA, 19 nt, Human adenovirus A
agagggcgaacaguguuuu

SEQ ID NO: 3896810 - RNA, 16 nt, Human adenovirus A
agaucuucguaggaaa

SEQ ID NO: 3896811 - RNA, 13 nt, Human adenovirus A
agaugaggcuggu

SEQ ID NO: 3896812 - RNA, 23 nt, Human adenovirus A
agaugcauccuguccugcgacaa

SEQ ID NO: 3896813 - RNA, 15 nt, Human adenovirus A
agauguaaaggaggc

SEQ ID NO: 3896814 - RNA, 17 nt, Human adenovirus A
agauguaaaggaggcgc

SEQ ID NO: 3896815 - RNA, 22 nt, Human adenovirus A
agauuguaauuuuuuucuccuu

SEQ ID NO: 3896816 - RNA, 15 nt, Human adenovirus A
agauuuaauuucaga

SEQ ID NO: 3896817 - RNA, 17 nt, Human adenovirus A
agauuuguuccuuuuca

SEQ ID NO: 3896818 - RNA, 16 nt, Human adenovirus A
agcaaaacgcugggcu

SEQ ID NO: 3896819 - RNA, 23 nt, Human adenovirus A
agcaaagccauccgcaaagauga

SEQ ID NO: 3896820 - RNA, 17 nt, Human adenovirus A
agcaaccaaaugagcaa

SEQ ID NO: 3896821 - RNA, 22 nt, Human adenovirus A
agcaacuuuuuaaccacuguag

SEQ ID NO: 3896822 - RNA, 20 nt, Human adenovirus A
agcaagcagcgccaaauaga

SEQ ID NO: 3896823 - RNA, 11 nt, Human adenovirus A
agcaaguaaac

SEQ ID NO: 3896824 - RNA, 20 nt, Human adenovirus A
aaauacacauaaagagucuc

SEQ ID NO: 3896825 - RNA, 18 nt, Human adenovirus A
aaauacugcucccucucg

SEQ ID NO: 3896826 - RNA, 19 nt, Human adenovirus A
aaauaguuccguaaagacu

SEQ ID NO: 3896827 - RNA, 14 nt, Human adenovirus A
aaauauccaaagua

SEQ ID NO: 3896828 - RNA, 12 nt, Human adenovirus A
aaauaugcugua

SEQ ID NO: 3896829 - RNA, 16 nt, Human adenovirus A
aaaucagaagccagca

SEQ ID NO: 3896830 - RNA, 23 nt, Human adenovirus A
aaaucucgucggcggacagagca

SEQ ID NO: 3896831 - RNA, 14 nt, Human adenovirus A
aaaugaccccaucu

SEQ ID NO: 3896832 - RNA, 18 nt, Human adenovirus A
aaaugcauuaucaugaaa

SEQ ID NO: 3896833 - RNA, 19 nt, Human adenovirus A
aaaugcccugcaaaaagaa

SEQ ID NO: 3896834 - RNA, 14 nt, Human adenovirus A
aaauggaacccuua

SEQ ID NO: 3896835 - RNA, 17 nt, Human adenovirus A
aaauguguacuugcuuu

SEQ ID NO: 3896836 - RNA, 18 nt, Human adenovirus A
aaauguucaacaacagcu

SEQ ID NO: 3896837 - RNA, 14 nt, Human adenovirus A
aaauuacaaaggca

SEQ ID NO: 3896838 - RNA, 12 nt, Human adenovirus A
aacaaaacacug

SEQ ID NO: 3896839 - RNA, 21 nt, Human adenovirus A
aacaaacuguuagacagagca

SEQ ID NO: 3896840 - RNA, 14 nt, Human adenovirus A
aacaacaagcuaau

SEQ ID NO: 3896841 - RNA, 22 nt, Human adenovirus A
aacaacagcuucuaaaagagcc

SEQ ID NO: 3896842 - RNA, 18 nt, Human adenovirus A
aacaacaggugcaagaag

SEQ ID NO: 3896843 - RNA, 21 nt, Human adenovirus A
aacacguuaccaauacagaua

SEQ ID NO: 3896844 - RNA, 20 nt, Human adenovirus A
aacaguuugcgugccuggcu

SEQ ID NO: 3896845 - RNA, 12 nt, Human adenovirus A
aacauaagauca

SEQ ID NO: 3896846 - RNA, 21 nt, Human adenovirus A
aacauccuuuuucuacaggca

SEQ ID NO: 3896847 - RNA, 21 nt, Human adenovirus A
aacaucuacagcgacaaagca

SEQ ID NO: 3896848 - RNA, 23 nt, Human adenovirus A
aacaugcuuuagguuagccugaa

SEQ ID NO: 3896849 - RNA, 13 nt, Human adenovirus A
aacauuaaaagac

SEQ ID NO: 3896850 - RNA, 14 nt, Human adenovirus A
aacauuaaaagacg

SEQ ID NO: 3896851 - RNA, 23 nt, Human adenovirus A
aaccaaaggagaaaagcggccac

SEQ ID NO: 3896852 - RNA, 21 nt, Human adenovirus A
aaccacuugcgccaaguugag

SEQ ID NO: 3896853 - RNA, 17 nt, Human adenovirus A
aaccaugaaaacagcau

SEQ ID NO: 3896854 - RNA, 20 nt, Human adenovirus A
aaccauucccuauuuagacg

SEQ ID NO: 3896855 - RNA, 16 nt, Human adenovirus A
aacccacgauccagua

SEQ ID NO: 3896856 - RNA, 18 nt, Human adenovirus A
aaccccaaaugggacugg

SEQ ID NO: 3896857 - RNA, 18 nt, Human adenovirus A
aacccuuuagcaguugcu

SEQ ID NO: 3896858 - RNA, 13 nt, Human adenovirus A
aaccuuugacaaa

SEQ ID NO: 3896859 - RNA, 16 nt, Human adenovirus A
aacgcaaguucaaaga

SEQ ID NO: 3896860 - RNA, 16 nt, Human adenovirus A
aacgcaccuugcagga

SEQ ID NO: 3896861 - RNA, 15 nt, Human adenovirus A
aacgcugaugccacu

SEQ ID NO: 3896862 - RNA, 20 nt, Human adenovirus A
aacggaucuugggcaaaaua

SEQ ID NO: 3896863 - RNA, 17 nt, Human adenovirus A
aacggcgcgcaguccug

SEQ ID NO: 3896864 - RNA, 15 nt, Human adenovirus A
aacgggcagccuguc

SEQ ID NO: 3896865 - RNA, 14 nt, Human adenovirus A
aacgucgccugagu

SEQ ID NO: 3896866 - RNA, 23 nt, Human adenovirus A
aacuaguuuacccgccaguguua

SEQ ID NO: 3896867 - RNA, 23 nt, Human adenovirus A
aacugauggugccuaagcggcaa

SEQ ID NO: 3896868 - RNA, 15 nt, Human adenovirus A
aacugcagacagugg

SEQ ID NO: 3896869 - RNA, 22 nt, Human adenovirus A
aacugcuccccucaacagcaca

SEQ ID NO: 3896870 - RNA, 19 nt, Human adenovirus A
aacuguuagacagagcacu

SEQ ID NO: 3896871 - RNA, 15 nt, Human adenovirus A
aacuuaacaacugau

SEQ ID NO: 3896872 - RNA, 14 nt, Human adenovirus A
aacuuaacccuccc

SEQ ID NO: 3896873 - RNA, 21 nt, Human adenovirus A
aacuucgccaauaaaaacaac

SEQ ID NO: 3896874 - RNA, 13 nt, Human adenovirus A
aacuuuuaacauu

SEQ ID NO: 3896875 - RNA, 13 nt, Human adenovirus A
aagaaaaugaaca

SEQ ID NO: 3896876 - RNA, 14 nt, Human adenovirus A
aagaaacagcagca

SEQ ID NO: 3896877 - RNA, 15 nt, Human adenovirus A
aagaaauaaccagug

SEQ ID NO: 3896878 - RNA, 14 nt, Human adenovirus A
aagaaucgcaagca

SEQ ID NO: 3896879 - RNA, 23 nt, Human adenovirus A
aagaaucuugggagagucaggca

SEQ ID NO: 3896880 - RNA, 19 nt, Human adenovirus A
aagacacauugacuguuuc

SEQ ID NO: 3896881 - RNA, 13 nt, Human adenovirus A
aagacagcaugga

SEQ ID NO: 3896882 - RNA, 15 nt, Human adenovirus A
aagacugagaaccgu

SEQ ID NO: 3896883 - RNA, 14 nt, Human adenovirus A
aagagccacagcuc

SEQ ID NO: 3896884 - RNA, 14 nt, Human adenovirus A
aagagcugcugcag

SEQ ID NO: 3896885 - RNA, 18 nt, Human adenovirus A
aagaucaaggaaauacua

SEQ ID NO: 3896886 - RNA, 17 nt, Human adenovirus A
aagaugcaaacuugcaa

SEQ ID NO: 3896887 - RNA, 20 nt, Human adenovirus A
aagauguaugaguaagagca

SEQ ID NO: 3896888 - RNA, 13 nt, Human adenovirus A
aagcaaaguacaa

SEQ ID NO: 3896889 - RNA, 15 nt, Human adenovirus A
aagcaaguacaaagg

SEQ ID NO: 3896890 - RNA, 14 nt, Human adenovirus A
aagcacugccuguu

SEQ ID NO: 3896891 - RNA, 14 nt, Human adenovirus A
aagcagcgccaaau

SEQ ID NO: 3896892 - RNA, 11 nt, Human adenovirus A
aagcaggaaaa

SEQ ID NO: 3896893 - RNA, 14 nt, Human adenovirus A
aagcaggagaacaa

SEQ ID NO: 3896894 - RNA, 16 nt, Human adenovirus A
aagcauauaaaacuga

SEQ ID NO: 3896895 - RNA, 21 nt, Human adenovirus A
aagccauggcgaccaguguuc

SEQ ID NO: 3896896 - RNA, 19 nt, Human adenovirus A
aagcgaccucugaaacaug

SEQ ID NO: 3896897 - RNA, 21 nt, Human adenovirus A
aagcggcacaacagacugggg

SEQ ID NO: 3896898 - RNA, 21 nt, Human adenovirus A
aagcugaaacuaggggcuggc

SEQ ID NO: 3896899 - RNA, 20 nt, Human adenovirus A
aagcuuucauugguccaggc

SEQ ID NO: 3896900 - RNA, 15 nt, Human adenovirus A
aaggaggaagaacau

SEQ ID NO: 3896901 - RNA, 13 nt, Human adenovirus A
aaggcaggcauua

SEQ ID NO: 3896902 - RNA, 23 nt, Human adenovirus A
aaggcauggaaaaacuuggaaac

SEQ ID NO: 3896903 - RNA, 17 nt, Human adenovirus A
aaggcugcuaggauuga

SEQ ID NO: 3896904 - RNA, 20 nt, Human adenovirus A
aaggggaggaccccaaggca

SEQ ID NO: 3896905 - RNA, 17 nt, Human adenovirus A
aagggugguugcaaagu

SEQ ID NO: 3896906 - RNA, 13 nt, Human adenovirus A
aagguagcuccag

SEQ ID NO: 3896907 - RNA, 15 nt, Human adenovirus A
aagguauucagcuga

SEQ ID NO: 3896908 - RNA, 13 nt, Human adenovirus A
aaggugguggcaa

SEQ ID NO: 3896909 - RNA, 15 nt, Human adenovirus A
aagguguugagcccg

SEQ ID NO: 3896910 - RNA, 15 nt, Human adenovirus A
aagguuuaauguuua

SEQ ID NO: 3896911 - RNA, 15 nt, Human adenovirus A
aaguaccaggaagcu

SEQ ID NO: 3896912 - RNA, 19 nt, Human adenovirus A
aaguaucugcccauuuuug

SEQ ID NO: 3896913 - RNA, 15 nt, Human adenovirus A
aagucauccaaagau

SEQ ID NO: 3896914 - RNA, 22 nt, Human adenovirus A
aagucgcaauuagggccagcau

SEQ ID NO: 3896915 - RNA, 13 nt, Human adenovirus A
aagugacauugga

SEQ ID NO: 3896916 - RNA, 14 nt, Human adenovirus A
aagugccuccucag

SEQ ID NO: 3896917 - RNA, 13 nt, Human adenovirus A
aaguguaauuuuc

SEQ ID NO: 3896918 - RNA, 20 nt, Human adenovirus A
aaguguuuguuugaaaaaug

SEQ ID NO: 3896919 - RNA, 21 nt, Human adenovirus A
aaguucaccggugaagaugau

SEQ ID NO: 3896920 - RNA, 14 nt, Human adenovirus A
aaguucuguuucau

SEQ ID NO: 3896921 - RNA, 12 nt, Human adenovirus A
aaguuuaaaggc

SEQ ID NO: 3896922 - RNA, 15 nt, Human adenovirus A
aauaaaauaaaacuu

SEQ ID NO: 3896923 - RNA, 21 nt, Human adenovirus A
aauaaacgguuccuuagccuu

SEQ ID NO: 3896924 - RNA, 13 nt, Human adenovirus A
aauaaauacugcu

SEQ ID NO: 3896925 - RNA, 12 nt, Human adenovirus A
aauaacacauaa

SEQ ID NO: 3896926 - RNA, 18 nt, Human adenovirus A
aauagcacuuuggauggc

SEQ ID NO: 3896927 - RNA, 21 nt, Human adenovirus A
aauauuguagccugcuuucag

SEQ ID NO: 3896928 - RNA, 16 nt, Human adenovirus A
aauauuguauuuccag

SEQ ID NO: 3896929 - RNA, 21 nt, Human adenovirus A
aauauuuagacuauaaucccu

SEQ ID NO: 3896930 - RNA, 13 nt, Human adenovirus A
aauccacaaagca

SEQ ID NO: 3896931 - RNA, 12 nt, Human adenovirus A
aaucuuaaaugg

SEQ ID NO: 3896932 - RNA, 20 nt, Human adenovirus A
aaugaaaguugguaagcgac

SEQ ID NO: 3896933 - RNA, 13 nt, Human adenovirus A
aaugcaaaaugga

SEQ ID NO: 3896934 - RNA, 17 nt, Human adenovirus A
aaugcauuaccagcagc

SEQ ID NO: 3896935 - RNA, 16 nt, Human adenovirus A
aaugcccccauccagg

SEQ ID NO: 3896936 - RNA, 17 nt, Human adenovirus A
aaugcucuggacaugga

SEQ ID NO: 3896937 - RNA, 22 nt, Human adenovirus A
aaugcuuagucauuacaacauu

SEQ ID NO: 3896938 - RNA, 22 nt, Human adenovirus A
aaugcuuuccauuuuucuuuua

SEQ ID NO: 3896939 - RNA, 15 nt, Human adenovirus A
aauguguuccaguau

SEQ ID NO: 3896940 - RNA, 21 nt, Human adenovirus A
aauguuuucuggaucagaaac

SEQ ID NO: 3896941 - RNA, 12 nt, Human adenovirus A
aauuaacugcac

SEQ ID NO: 3896942 - RNA, 17 nt, Human adenovirus A
aauuacuaaaacaguaa

SEQ ID NO: 3896943 - RNA, 18 nt, Human adenovirus A
aauuacuugaacaacuuu

SEQ ID NO: 3896944 - RNA, 14 nt, Human adenovirus A
aauuccgcagugga

SEQ ID NO: 3896945 - RNA, 20 nt, Human adenovirus A
aauucgcaggcggucugcca

SEQ ID NO: 3896946 - RNA, 13 nt, Human adenovirus A
aauucuuaaacaa

SEQ ID NO: 3896947 - RNA, 17 nt, Human adenovirus A
aauugaaguaagcuguu

SEQ ID NO: 3896948 - RNA, 18 nt, Human adenovirus A
aauugaugagguaguggc

SEQ ID NO: 3896949 - RNA, 22 nt, Human adenovirus A
aauuugucugaaaauugcauga

SEQ ID NO: 3896950 - RNA, 19 nt, Human adenovirus A
aauuuuaaaggguccaggg

SEQ ID NO: 3896951 - RNA, 21 nt, Human adenovirus A
ugccccccuccccuguggagc

SEQ ID NO: 3896952 - RNA, 13 nt, Human adenovirus A
ugcccucacacuu

SEQ ID NO: 3896953 - RNA, 21 nt, Human adenovirus A
ugcccugauauaucaggaaaa

SEQ ID NO: 3896954 - RNA, 13 nt, Human adenovirus A
ugccgacaacacu

SEQ ID NO: 3896955 - RNA, 18 nt, Human adenovirus A
ugccgcacggccaaugcc

SEQ ID NO: 3896956 - RNA, 15 nt, Human adenovirus A
ugccuuaggcagcag

SEQ ID NO: 3896957 - RNA, 21 nt, Human adenovirus A
ugcgaccgggcaccacagugg

SEQ ID NO: 3896958 - RNA, 18 nt, Human adenovirus A
ugcgaguaggaagacagc

SEQ ID NO: 3896959 - RNA, 22 nt, Human adenovirus A
ugcgaguaggaagacagcaugg

SEQ ID NO: 3896960 - RNA, 13 nt, Human adenovirus A
ugcgcauggcuuu

SEQ ID NO: 3896961 - RNA, 14 nt, Human adenovirus A
ugcgcgcggccaga

SEQ ID NO: 3896962 - RNA, 16 nt, Human adenovirus A
ugcgcuuuaaacugag

SEQ ID NO: 3896963 - RNA, 17 nt, Human adenovirus A
ugcguuucuuaccuugc

SEQ ID NO: 3896964 - RNA, 15 nt, Human adenovirus A
ugcucagcuggaaga

SEQ ID NO: 3896965 - RNA, 18 nt, Human adenovirus A
ugcuccccucaacagcac

SEQ ID NO: 3896966 - RNA, 18 nt, Human adenovirus A
ugcuccgacaacagcugc

SEQ ID NO: 3896967 - RNA, 22 nt, Human adenovirus A
ugcucguaaaaucuacaaaagu

SEQ ID NO: 3896968 - RNA, 17 nt, Human adenovirus A
ugcuggaaccugaagug

SEQ ID NO: 3896969 - RNA, 22 nt, Human adenovirus A
ugcuguacgcaaacucagccca

SEQ ID NO: 3896970 - RNA, 14 nt, Human adenovirus A
ugcuguucuuagua

SEQ ID NO: 3896971 - RNA, 16 nt, Human adenovirus A
ugcuuagucauuacaa

SEQ ID NO: 3896972 - RNA, 19 nt, Human adenovirus A
ugcuuagucauuacaacau

SEQ ID NO: 3896973 - RNA, 16 nt, Human adenovirus A
ugcuuuucgccagcag

SEQ ID NO: 3896974 - RNA, 20 nt, Human adenovirus A
uggaaaaagaucaaggaaau

SEQ ID NO: 3896975 - RNA, 16 nt, Human adenovirus A
uggaaaacauaugcac

SEQ ID NO: 3896976 - RNA, 13 nt, Human adenovirus A
uggaacaccagca

SEQ ID NO: 3896977 - RNA, 16 nt, Human adenovirus A
uggacguuaguaacaa

SEQ ID NO: 3896978 - RNA, 19 nt, Human adenovirus A
uggagccaaaaaaacagau

SEQ ID NO: 3896979 - RNA, 20 nt, Human adenovirus A
uggagcgagaucuuccaaca

SEQ ID NO: 3896980 - RNA, 16 nt, Human adenovirus A
uggagcuuucaacccc

SEQ ID NO: 3896981 - RNA, 11 nt, Human adenovirus A
uggaggcagcu

SEQ ID NO: 3896982 - RNA, 23 nt, Human adenovirus A
uggaguggcgauuccaaggaaug

SEQ ID NO: 3896983 - RNA, 19 nt, Human adenovirus A
uggagugugcuauuaaagc

SEQ ID NO: 3896984 - RNA, 14 nt, Human adenovirus A
uggauagcaaagcc

SEQ ID NO: 3896985 - RNA, 19 nt, Human adenovirus A
uggaucguauuauggcuuu

SEQ ID NO: 3896986 - RNA, 22 nt, Human adenovirus A
uggaucuggagccacaggaaag

SEQ ID NO: 3896987 - RNA, 21 nt, Human adenovirus A
uggauuacaugucaaugcagc

SEQ ID NO: 3896988 - RNA, 18 nt, Human adenovirus A
uggauuugauucaagagg

SEQ ID NO: 3896989 - RNA, 12 nt, Human adenovirus A
uggcacaacaca

SEQ ID NO: 3896990 - RNA, 17 nt, Human adenovirus A
uggcacauaacacagcu

SEQ ID NO: 3896991 - RNA, 20 nt, Human adenovirus A
uggcagcaaugcuuggaaga

SEQ ID NO: 3896992 - RNA, 22 nt, Human adenovirus A
uggcagcaaugcuuggaagaaa

SEQ ID NO: 3896993 - RNA, 17 nt, Human adenovirus A
uggcagcggcgccaccc

SEQ ID NO: 3896994 - RNA, 17 nt, Human adenovirus A
uggcagcugauuucagc

SEQ ID NO: 3896995 - RNA, 22 nt, Human adenovirus A
uggcaggaguugcaggaugaau

SEQ ID NO: 3896996 - RNA, 15 nt, Human adenovirus A
uggccagugugcgcu

SEQ ID NO: 3896997 - RNA, 22 nt, Human adenovirus A
uggccauaauguaacccuuccc

SEQ ID NO: 3896998 - RNA, 23 nt, Human adenovirus A
uggccauaauguaacccuucccc

SEQ ID NO: 3896999 - RNA, 23 nt, Human adenovirus A
uggcucaacgagagcgcuuucau

SEQ ID NO: 3897000 - RNA, 13 nt, Human adenovirus A
uggcugaagagga

SEQ ID NO: 3897001 - RNA, 15 nt, Human adenovirus A
uggcuuuaggccauc

SEQ ID NO: 3897002 - RNA, 17 nt, Human adenovirus A
ugggaagggcaaaagua

SEQ ID NO: 3897003 - RNA, 21 nt, Human adenovirus A
ugggaauauagccgccaugga

SEQ ID NO: 3897004 - RNA, 19 nt, Human adenovirus A
ugggacaaguugcuuucca

SEQ ID NO: 3897005 - RNA, 17 nt, Human adenovirus A
ugggaguucaaacagug

SEQ ID NO: 3897006 - RNA, 20 nt, Human adenovirus A
ugggauacuaccgcugcuca

SEQ ID NO: 3897007 - RNA, 17 nt, Human adenovirus A
ugggccuucggaagaaa

SEQ ID NO: 3897008 - RNA, 16 nt, Human adenovirus A
ugggcggcauuuagag

SEQ ID NO: 3897009 - RNA, 22 nt, Human adenovirus A
uggggugcugcccuuccuaauu

SEQ ID NO: 3897010 - RNA, 22 nt, Human adenovirus A
uggguccuacggagggaagaaa

SEQ ID NO: 3897011 - RNA, 15 nt, Human adenovirus A
uggguuuggauggaa

SEQ ID NO: 3897012 - RNA, 20 nt, Human adenovirus A
ugguaacauguccauuuugg

SEQ ID NO: 3897013 - RNA, 12 nt, Human adenovirus A
ugguccaggcua

SEQ ID NO: 3897014 - RNA, 22 nt, Human adenovirus A
uggucuucaucgcuuucuucug

SEQ ID NO: 3897015 - RNA, 15 nt, Human adenovirus A
ugguggguuuggaug

SEQ ID NO: 3897016 - RNA, 19 nt, Human adenovirus A
ugguuacugaagugccuca

SEQ ID NO: 3897017 - RNA, 17 nt, Human adenovirus A
ugguugggaacagacaa

SEQ ID NO: 3897018 - RNA, 15 nt, Human adenovirus A
ugguuuaauauacaa

SEQ ID NO: 3897019 - RNA, 17 nt, Human adenovirus A
uguaaagauuugaaauu

SEQ ID NO: 3897020 - RNA, 23 nt, Human adenovirus A
uguaaccagagcaccccuuccca

SEQ ID NO: 3897021 - RNA, 17 nt, Human adenovirus A
uguaaccagcugggcag

SEQ ID NO: 3897022 - RNA, 14 nt, Human adenovirus A
uguaacccuucccc

SEQ ID NO: 3897023 - RNA, 13 nt, Human adenovirus A
uguaaguaggaua

SEQ ID NO: 3897024 - RNA, 13 nt, Human adenovirus A
uguaauaaagcua

SEQ ID NO: 3897025 - RNA, 18 nt, Human adenovirus A
uguacuugacucuggcga

SEQ ID NO: 3897026 - RNA, 18 nt, Human adenovirus A
uguagaagcuuauguaca

SEQ ID NO: 3897027 - RNA, 17 nt, Human adenovirus A
uguagagucuuggaaua

SEQ ID NO: 3897028 - RNA, 20 nt, Human adenovirus A
uguagcugaaaacaacugca

SEQ ID NO: 3897029 - RNA, 13 nt, Human adenovirus A
uguauaaaaucau

SEQ ID NO: 3897030 - RNA, 19 nt, Human adenovirus A
uguauauuaagguacauug

SEQ ID NO: 3897031 - RNA, 14 nt, Human adenovirus A
uguaucagcagcca

SEQ ID NO: 3897032 - RNA, 14 nt, Human adenovirus A
uguaucuguugaau

SEQ ID NO: 3897033 - RNA, 14 nt, Human adenovirus A
uguaugaacacuua

SEQ ID NO: 3897034 - RNA, 15 nt, Human adenovirus A
uguauguucuuacac

SEQ ID NO: 3897035 - RNA, 13 nt, Human adenovirus A
uguauuagcacuu

SEQ ID NO: 3897036 - RNA, 21 nt, Human adenovirus A
uguauuggccgggcaagcuuc

SEQ ID NO: 3897037 - RNA, 22 nt, Human adenovirus A
uguccacuugcggaacaauaaa

SEQ ID NO: 3897038 - RNA, 14 nt, Human adenovirus A
uguccagauuucag

SEQ ID NO: 3897039 - RNA, 11 nt, Human adenovirus A
uguccuuccag

SEQ ID NO: 3897040 - RNA, 21 nt, Human adenovirus A
uguccuuggaagaggugccua

SEQ ID NO: 3897041 - RNA, 21 nt, Human adenovirus A
ugucuguugccaauccucuga

SEQ ID NO: 3897042 - RNA, 22 nt, Human adenovirus A
ugugagggccgaugcauacaug

SEQ ID NO: 3897043 - RNA, 15 nt, Human adenovirus A
ugugauuauguauga

SEQ ID NO: 3897044 - RNA, 12 nt, Human adenovirus A
ugugcugcaaac

SEQ ID NO: 3897045 - RNA, 16 nt, Human adenovirus A
ugugcugcaaaguuuu

SEQ ID NO: 3897046 - RNA, 22 nt, Human adenovirus A
uguggacccuauuuuuugggaa

SEQ ID NO: 3897047 - RNA, 16 nt, Human adenovirus A
uguggcaccugcaaau

SEQ ID NO: 3897048 - RNA, 15 nt, Human adenovirus A
ugugugcugcaaaca

SEQ ID NO: 3897049 - RNA, 14 nt, Human adenovirus A
uguuaacacugccg

SEQ ID NO: 3897050 - RNA, 13 nt, Human adenovirus A
uguuaucuucaaa

SEQ ID NO: 3897051 - RNA, 14 nt, Human adenovirus A
uuaaaagaccaaaa

SEQ ID NO: 3897052 - RNA, 14 nt, Human adenovirus A
uuaaauauaucuuu

SEQ ID NO: 3897053 - RNA, 16 nt, Human adenovirus A
uuaaccacuguagugc

SEQ ID NO: 3897054 - RNA, 22 nt, Human adenovirus A
uuaacuaguuuacccgccagug

SEQ ID NO: 3897055 - RNA, 23 nt, Human adenovirus A
uuaagaacacggugaauguguuc

SEQ ID NO: 3897056 - RNA, 18 nt, Human adenovirus A
uuaaugcuggaugcuuug

SEQ ID NO: 3897057 - RNA, 23 nt, Human adenovirus A
uuaauuacuccauguuaaguuug

SEQ ID NO: 3897058 - RNA, 18 nt, Human adenovirus A
uuacaagcacgccaaagc

SEQ ID NO: 3897059 - RNA, 18 nt, Human adenovirus A
uuacaggaggaggaggaa

SEQ ID NO: 3897060 - RNA, 22 nt, Human adenovirus A
uuaccaccaaauuuaaggccag

SEQ ID NO: 3897061 - RNA, 20 nt, Human adenovirus A
uuacccgcagcugucucuac

SEQ ID NO: 3897062 - RNA, 15 nt, Human adenovirus A
uuacugguacuauga

SEQ ID NO: 3897063 - RNA, 21 nt, Human adenovirus A
uuagcucauuggaguacaagc

SEQ ID NO: 3897064 - RNA, 22 nt, Human adenovirus A
uuagucgcgcacugggccagga

SEQ ID NO: 3897065 - RNA, 11 nt, Human adenovirus A
uuauuggccug

SEQ ID NO: 3897066 - RNA, 18 nt, Human adenovirus A
uucaaacaauaacauugc

SEQ ID NO: 3897067 - RNA, 14 nt, Human adenovirus A
uucaauaaauacug

SEQ ID NO: 3897068 - RNA, 15 nt, Human adenovirus A
uucagaauaaaacaa

SEQ ID NO: 3897069 - RNA, 14 nt, Human adenovirus A
uaaaacugauuuac

SEQ ID NO: 3897070 - RNA, 12 nt, Human adenovirus A
uaaaagcaagcg

SEQ ID NO: 3897071 - RNA, 16 nt, Human adenovirus A
uaaaauacacauaaag

SEQ ID NO: 3897072 - RNA, 19 nt, Human adenovirus A
uaaaauuucuaauguggag

SEQ ID NO: 3897073 - RNA, 23 nt, Human adenovirus A
uaaacaaaagcaaagcaaaugca

SEQ ID NO: 3897074 - RNA, 23 nt, Human adenovirus A
uaaacaucuacagcgacaaagca

SEQ ID NO: 3897075 - RNA, 15 nt, Human adenovirus A
uaaacaucucauaau

SEQ ID NO: 3897076 - RNA, 15 nt, Human adenovirus A
uaaaccaagccaugc

SEQ ID NO: 3897077 - RNA, 23 nt, Human adenovirus A
uaaacugaggcggcuggugcuga

SEQ ID NO: 3897078 - RNA, 11 nt, Human adenovirus A
uaaacugccuc

SEQ ID NO: 3897079 - RNA, 16 nt, Human adenovirus A
uaaacugucuguaaaa

SEQ ID NO: 3897080 - RNA, 12 nt, Human adenovirus A
uaaagaguaaaa

SEQ ID NO: 3897081 - RNA, 21 nt, Human adenovirus A
uaaaggcuagugcccucacac

SEQ ID NO: 3897082 - RNA, 21 nt, Human adenovirus A
uaaaucuuccgccaaagguaa

SEQ ID NO: 3897083 - RNA, 20 nt, Human adenovirus A
uaacaaaggugcuucccaca

SEQ ID NO: 3897084 - RNA, 13 nt, Human adenovirus A
uaacaacaagcua

SEQ ID NO: 3897085 - RNA, 17 nt, Human adenovirus A
uaacacaagagcgcccu

SEQ ID NO: 3897086 - RNA, 17 nt, Human adenovirus A
uaacauucugcagagca

SEQ ID NO: 3897087 - RNA, 21 nt, Human adenovirus A
uaacauugccuuaggcagcag

SEQ ID NO: 3897088 - RNA, 18 nt, Human adenovirus A
uaacucuuguaaagauuu

SEQ ID NO: 3897089 - RNA, 22 nt, Human adenovirus A
uaacugaaaauggaacccuuac

SEQ ID NO: 3897090 - RNA, 13 nt, Human adenovirus A
uaacuucuaccca

SEQ ID NO: 3897091 - RNA, 22 nt, Human adenovirus A
uaacuucuacccaguuuuugca

SEQ ID NO: 3897092 - RNA, 13 nt, Human adenovirus A
uaagaaagaggca

SEQ ID NO: 3897093 - RNA, 19 nt, Human adenovirus A
uaagaucuucguaggaaag

SEQ ID NO: 3897094 - RNA, 19 nt, Human adenovirus A
uaaggcauguuugacaaga

SEQ ID NO: 3897095 - RNA, 16 nt, Human adenovirus A
uaauaauugaguaacu

SEQ ID NO: 3897096 - RNA, 17 nt, Human adenovirus A
uaauagcacuuuggaug

SEQ ID NO: 3897097 - RNA, 22 nt, Human adenovirus A
uaaucaagacggucagcaagga

SEQ ID NO: 3897098 - RNA, 23 nt, Human adenovirus A
uaaucacacuuacccuuuuaaug

SEQ ID NO: 3897099 - RNA, 15 nt, Human adenovirus A
uaauguaacccuucc

SEQ ID NO: 3897100 - RNA, 14 nt, Human adenovirus A
uaauugaaguaagc

SEQ ID NO: 3897101 - RNA, 21 nt, Human adenovirus A
uaauugcuaauggaagaccuu

SEQ ID NO: 3897102 - RNA, 12 nt, Human adenovirus A
uacaaagccagg

SEQ ID NO: 3897103 - RNA, 22 nt, Human adenovirus A
uacaaaguccucagguaguggg

SEQ ID NO: 3897104 - RNA, 17 nt, Human adenovirus A
uacaaccacucucgcag

SEQ ID NO: 3897105 - RNA, 14 nt, Human adenovirus A
uacaacuugcuucc

SEQ ID NO: 3897106 - RNA, 14 nt, Human adenovirus A
uacaagcacgccaa

SEQ ID NO: 3897107 - RNA, 18 nt, Human adenovirus A
uacacgcugcccacucag

SEQ ID NO: 3897108 - RNA, 17 nt, Human adenovirus A
uacacuuaugcucccac

SEQ ID NO: 3897109 - RNA, 22 nt, Human adenovirus A
uacacuuuaaaugcggaagaag

SEQ ID NO: 3897110 - RNA, 11 nt, Human adenovirus A
uacagagagca

SEQ ID NO: 3897111 - RNA, 22 nt, Human adenovirus A
uacagaggaacguaacuuucaa

SEQ ID NO: 3897112 - RNA, 14 nt, Human adenovirus A
uacaggcagggcau

SEQ ID NO: 3897113 - RNA, 16 nt, Human adenovirus A
uacauacacucaugua

SEQ ID NO: 3897114 - RNA, 14 nt, Human adenovirus A
uacaugccgcaaau

SEQ ID NO: 3897115 - RNA, 20 nt, Human adenovirus A
uaccaauacuguuaccaaug

SEQ ID NO: 3897116 - RNA, 20 nt, Human adenovirus A
uaccagaaugaucacagcaa

SEQ ID NO: 3897117 - RNA, 14 nt, Human adenovirus A
uacccaccaucuuc

SEQ ID NO: 3897118 - RNA, 13 nt, Human adenovirus A
uacccgccagugu

SEQ ID NO: 3897119 - RNA, 13 nt, Human adenovirus A
uacgcuggcugug

SEQ ID NO: 3897120 - RNA, 17 nt, Human adenovirus A
uacucggaauugucacc

SEQ ID NO: 3897121 - RNA, 12 nt, Human adenovirus A
uacugcuuccag

SEQ ID NO: 3897122 - RNA, 19 nt, Human adenovirus A
uacuguugcuaauugcccc

SEQ ID NO: 3897123 - RNA, 22 nt, Human adenovirus A
uacuuaccggaaaucugaaaau

SEQ ID NO: 3897124 - RNA, 21 nt, Human adenovirus A
uacuuggcuaguagagacauc

SEQ ID NO: 3897125 - RNA, 12 nt, Human adenovirus A
uacuuguuguau

SEQ ID NO: 3897126 - RNA, 13 nt, Human adenovirus A
uagaaaaagcuac

SEQ ID NO: 3897127 - RNA, 21 nt, Human adenovirus A
uagaacaaaaaggaggaagaa

SEQ ID NO: 3897128 - RNA, 23 nt, Human adenovirus A
uagacauagccaaucaggcugua

SEQ ID NO: 3897129 - RNA, 19 nt, Human adenovirus A
uagacauuguuggccugua

SEQ ID NO: 3897130 - RNA, 20 nt, Human adenovirus A
uagaccaaaugccagugagg

SEQ ID NO: 3897131 - RNA, 17 nt, Human adenovirus A
uagacggcaccuuuuac

SEQ ID NO: 3897132 - RNA, 13 nt, Human adenovirus A
uagagaggaauuu

SEQ ID NO: 3897133 - RNA, 15 nt, Human adenovirus A
uagagauaagcagga

SEQ ID NO: 3897134 - RNA, 17 nt, Human adenovirus A
uagagccaugggaggau

SEQ ID NO: 3897135 - RNA, 22 nt, Human adenovirus A
uagagucuuuuucccauugguc

SEQ ID NO: 3897136 - RNA, 16 nt, Human adenovirus A
uagaugugcuguggaa

SEQ ID NO: 3897137 - RNA, 13 nt, Human adenovirus A
uagcguacagcca

SEQ ID NO: 3897138 - RNA, 14 nt, Human adenovirus A
uaggcauuaaaugg

SEQ ID NO: 3897139 - RNA, 23 nt, Human adenovirus A
uagguauaagaaagaggcagccg

SEQ ID NO: 3897140 - RNA, 18 nt, Human adenovirus A
uaguacuccuauguaagu

SEQ ID NO: 3897141 - RNA, 19 nt, Human adenovirus A
uaguaggcuaacuguuaau

SEQ ID NO: 3897142 - RNA, 15 nt, Human adenovirus A
uaguucuuuucuuua

SEQ ID NO: 3897143 - RNA, 11 nt, Human adenovirus A
uaguugccacg

SEQ ID NO: 3897144 - RNA, 17 nt, Human adenovirus A
uaguuguggucuagagu

SEQ ID NO: 3897145 - RNA, 18 nt, Human adenovirus A
uauaccaugauggagugg

SEQ ID NO: 3897146 - RNA, 12 nt, Human adenovirus A
uauacugggugc

SEQ ID NO: 3897147 - RNA, 17 nt, Human adenovirus A
uauaguggcacaacaca

SEQ ID NO: 3897148 - RNA, 15 nt, Human adenovirus A
uauauccuugcaaaa

SEQ ID NO: 3897149 - RNA, 23 nt, Human adenovirus A
uauauuaagguacauuggcauua

SEQ ID NO: 3897150 - RNA, 13 nt, Human adenovirus A
uaucagccagagc

SEQ ID NO: 3897151 - RNA, 21 nt, Human adenovirus A
uaugaugcgggcagccaggcg

SEQ ID NO: 3897152 - RNA, 20 nt, Human adenovirus A
uaugccaucucgauccagca

SEQ ID NO: 3897153 - RNA, 13 nt, Human adenovirus A
uaugcccagcaug

SEQ ID NO: 3897154 - RNA, 14 nt, Human adenovirus A
uaugcccagcauga

SEQ ID NO: 3897155 - RNA, 16 nt, Human adenovirus A
uaugcuacaaaguccu

SEQ ID NO: 3897156 - RNA, 21 nt, Human adenovirus A
uaugcucccacacgcagcaac

SEQ ID NO: 3897157 - RNA, 17 nt, Human adenovirus A
uauggaaauccaaacuu

SEQ ID NO: 3897158 - RNA, 20 nt, Human adenovirus A
uaugugaucauaacauguuu

SEQ ID NO: 3897159 - RNA, 15 nt, Human adenovirus A
uauguuaaauuaaag

SEQ ID NO: 3897160 - RNA, 14 nt, Human adenovirus A
uauuaacuuuauau

SEQ ID NO: 3897161 - RNA, 15 nt, Human adenovirus A
uauugaguugcacau

SEQ ID NO: 3897162 - RNA, 14 nt, Human adenovirus A
uauugcgcagcaac

SEQ ID NO: 3897163 - RNA, 23 nt, Human adenovirus A
uauuucuuguucuuccucuucua

SEQ ID NO: 3897164 - RNA, 23 nt, Human adenovirus A
ucaaaaaagcaaaguacaaccac

SEQ ID NO: 3897165 - RNA, 14 nt, Human adenovirus A
ucaaacaauaacau

SEQ ID NO: 3897166 - RNA, 19 nt, Human adenovirus A
ucaaacaccugcaguaaau

SEQ ID NO: 3897167 - RNA, 22 nt, Human adenovirus A
ucaaacaccugcaguaaauuca

SEQ ID NO: 3897168 - RNA, 15 nt, Human adenovirus A
ucaaagaaacagcag

SEQ ID NO: 3897169 - RNA, 14 nt, Human adenovirus A
ucaaaggcaggcau

SEQ ID NO: 3897170 - RNA, 20 nt, Human adenovirus A
ucaaaguaccuuacaaacga

SEQ ID NO: 3897171 - RNA, 15 nt, Human adenovirus A
ucaaaguaugcugca

SEQ ID NO: 3897172 - RNA, 20 nt, Human adenovirus A
ucaacagaaucaaucucagu

SEQ ID NO: 3897173 - RNA, 16 nt, Human adenovirus A
ucaacgacuaaaacaa

SEQ ID NO: 3897174 - RNA, 21 nt, Human adenovirus A
ucaacgacuaaaacaaaucua

SEQ ID NO: 3897175 - RNA, 20 nt, Human adenovirus A
ucaagacguuccauggcuuc

SEQ ID NO: 3897176 - RNA, 19 nt, Human adenovirus A
ucaagacuauucuagcaaa

SEQ ID NO: 3897177 - RNA, 14 nt, Human adenovirus A
ucaaggaaauacua

SEQ ID NO: 3897178 - RNA, 16 nt, Human adenovirus A
ucaauaguugccacgc

SEQ ID NO: 3897179 - RNA, 17 nt, Human adenovirus A
ucaaugcagcuguggag

SEQ ID NO: 3897180 - RNA, 16 nt, Human adenovirus A
ucaauucuucuuccaa

SEQ ID NO: 3897181 - RNA, 19 nt, Human adenovirus A
ucaauuugccuaaaagcua

SEQ ID NO: 3897182 - RNA, 17 nt, Human adenovirus A
ucaauuuugcaagugua

SEQ ID NO: 3897183 - RNA, 15 nt, Human adenovirus A
ucacaagacacauug

SEQ ID NO: 3897184 - RNA, 16 nt, Human adenovirus A
ucacaaggucuuaaac

SEQ ID NO: 3897185 - RNA, 20 nt, Human adenovirus A
ucacaaggucuuaaacuuuc

SEQ ID NO: 3897186 - RNA, 22 nt, Human adenovirus A
ucacacccuccguguucccaca

SEQ ID NO: 3897187 - RNA, 19 nt, Human adenovirus A
ucaccgcgcugcggccaug

SEQ ID NO: 3897188 - RNA, 23 nt, Human adenovirus A
ucaccuggaccuuuaacggaaaa

SEQ ID NO: 3897189 - RNA, 23 nt, Human adenovirus A
ucacugccgcugcaaucuuugca

SEQ ID NO: 3897190 - RNA, 15 nt, Human adenovirus A
ucagauagcaagcgu

SEQ ID NO: 3897191 - RNA, 16 nt, Human adenovirus A
ucagauccuuagauuu

SEQ ID NO: 3897192 - RNA, 16 nt, Human adenovirus A
ucagauuuugugccua

SEQ ID NO: 3897193 - RNA, 11 nt, Human adenovirus A
ucagcacugcg

SEQ ID NO: 3897194 - RNA, 18 nt, Human adenovirus A
ucagcaguugcaagcgau

SEQ ID NO: 3897195 - RNA, 18 nt, Human adenovirus A
ucagcgagucaccaucac

SEQ ID NO: 3897196 - RNA, 13 nt, Human adenovirus A
ucagcuucuccag

SEQ ID NO: 3897197 - RNA, 16 nt, Human adenovirus A
ucaggcagaggacgag

SEQ ID NO: 3897198 - RNA, 19 nt, Human adenovirus A
ucagucagagagaaaagca

SEQ ID NO: 3897199 - RNA, 16 nt, Human adenovirus A
ucauaagacaaagccu

SEQ ID NO: 3897200 - RNA, 21 nt, Human adenovirus A
ucauccacaucuacaaagcgg

SEQ ID NO: 3897201 - RNA, 21 nt, Human adenovirus A
ucauccgcauuuaagcaacau

SEQ ID NO: 3897202 - RNA, 14 nt, Human adenovirus A
ucauccucagcucc

SEQ ID NO: 3897203 - RNA, 15 nt, Human adenovirus A
ucaucucuacagccc

SEQ ID NO: 3897204 - RNA, 14 nt, Human adenovirus A
ucaugaaaacagca

SEQ ID NO: 3897205 - RNA, 20 nt, Human adenovirus A
ucaugguuugcuaacagcuc

SEQ ID NO: 3897206 - RNA, 12 nt, Human adenovirus A
ucauuccuucag

SEQ ID NO: 3897207 - RNA, 19 nt, Human adenovirus A
ucauuugcgcccacagggu

SEQ ID NO: 3897208 - RNA, 19 nt, Human adenovirus A
uccaaauguucaacaacag

SEQ ID NO: 3897209 - RNA, 15 nt, Human adenovirus A
uccaaccaaaggaga

SEQ ID NO: 3897210 - RNA, 22 nt, Human adenovirus A
uccaaccaacgaacacggagga

SEQ ID NO: 3897211 - RNA, 15 nt, Human adenovirus A
uccaauggucuucaa

SEQ ID NO: 3897212 - RNA, 16 nt, Human adenovirus A
uccacacaucucaccu

SEQ ID NO: 3897213 - RNA, 23 nt, Human adenovirus A
uccaccgccauccgcaggcagua

SEQ ID NO: 3897214 - RNA, 13 nt, Human adenovirus A
uccagaggaggag

SEQ ID NO: 3897215 - RNA, 23 nt, Human adenovirus A
ucccacgccgcgccccacuuccu

SEQ ID NO: 3897216 - RNA, 20 nt, Human adenovirus A
ucccgaguguuuagcccccu

SEQ ID NO: 3897217 - RNA, 20 nt, Human adenovirus A
uccgcauugguugcccccuc

SEQ ID NO: 3897218 - RNA, 15 nt, Human adenovirus A
uccgccuaaggaaag

SEQ ID NO: 3897219 - RNA, 15 nt, Human adenovirus A
uccuacauuggaguu

SEQ ID NO: 3897220 - RNA, 14 nt, Human adenovirus A
uccucgaaagcgag

SEQ ID NO: 3897221 - RNA, 18 nt, Human adenovirus A
uccucuucugcugcauug

SEQ ID NO: 3897222 - RNA, 20 nt, Human adenovirus A
uccugcuccuuuucuuacau

SEQ ID NO: 3897223 - RNA, 14 nt, Human adenovirus A
ucgacgggccaggc

SEQ ID NO: 3897224 - RNA, 20 nt, Human adenovirus A
ucgagaucuaggcuguggac

SEQ ID NO: 3897225 - RNA, 21 nt, Human adenovirus A
ucgcaauuagggccagcauug

SEQ ID NO: 3897226 - RNA, 17 nt, Human adenovirus A
ucgcaguauggcagcug

SEQ ID NO: 3897227 - RNA, 18 nt, Human adenovirus A
ucgcgcacugggccagga

SEQ ID NO: 3897228 - RNA, 12 nt, Human adenovirus A
ucgcggagaggg

SEQ ID NO: 3897229 - RNA, 17 nt, Human adenovirus A
ucgcugguccccagaug

SEQ ID NO: 3897230 - RNA, 14 nt, Human adenovirus A
ucgcuuucuucugc

SEQ ID NO: 3897231 - RNA, 17 nt, Human adenovirus A
ucggaagaaaagcgugg

SEQ ID NO: 3897232 - RNA, 17 nt, Human adenovirus A
ucggcaacagcagcaac

SEQ ID NO: 3897233 - RNA, 17 nt, Human adenovirus A
ucgggaauuaauggagu

SEQ ID NO: 3897234 - RNA, 13 nt, Human adenovirus A
ucguacuuaaaaa

SEQ ID NO: 3897235 - RNA, 20 nt, Human adenovirus A
ucguacuuaaaaaaacaaaa

SEQ ID NO: 3897236 - RNA, 21 nt, Human adenovirus A
ucgucuuauuuuccuucuucc

SEQ ID NO: 3897237 - RNA, 18 nt, Human adenovirus A
ucuaaaccuauaacaaug

SEQ ID NO: 3897238 - RNA, 22 nt, Human adenovirus A
ucuaacaagcugcgcugccguu

SEQ ID NO: 3897239 - RNA, 18 nt, Human adenovirus A
ucuaagccaugcaaauag

SEQ ID NO: 3897240 - RNA, 20 nt, Human adenovirus A
ucuaagguguguaaacacau

SEQ ID NO: 3897241 - RNA, 14 nt, Human adenovirus A
ucuaaugcaaguug

SEQ ID NO: 3897242 - RNA, 22 nt, Human adenovirus A
ucuaaugcaaguuguaaggcau

SEQ ID NO: 3897243 - RNA, 23 nt, Human adenovirus A
ucucaaaagcagccauaaugccu

SEQ ID NO: 3897244 - RNA, 14 nt, Human adenovirus A
ucucuaacaagcug

SEQ ID NO: 3897245 - RNA, 22 nt, Human adenovirus A
ucugccauuaauugaucaauuu

SEQ ID NO: 3897246 - RNA, 17 nt, Human adenovirus A
ucuggcgaacaggaaga

SEQ ID NO: 3897247 - RNA, 16 nt, Human adenovirus A
ucuguaguuucuuuac

SEQ ID NO: 3897248 - RNA, 14 nt, Human adenovirus A
ucuguuauguaugc

SEQ ID NO: 3897249 - RNA, 23 nt, Human adenovirus A
ucuguucaauaaauacugcuccc

SEQ ID NO: 3897250 - RNA, 15 nt, Human adenovirus A
ucuuaggguuugauu

SEQ ID NO: 3897251 - RNA, 14 nt, Human adenovirus A
ucuucaaacaccug

SEQ ID NO: 3897252 - RNA, 22 nt, Human adenovirus A
ucuucaucuuuucuagaugaag

SEQ ID NO: 3897253 - RNA, 20 nt, Human adenovirus A
ucuucggguggacggagcca

SEQ ID NO: 3897254 - RNA, 13 nt, Human adenovirus A
ucuucuucccaau

SEQ ID NO: 3897255 - RNA, 18 nt, Human adenovirus A
ucuugaaugcucuggaca

SEQ ID NO: 3897256 - RNA, 22 nt, Human adenovirus A
ucuugaccaccguucccuauca

SEQ ID NO: 3897257 - RNA, 16 nt, Human adenovirus A
ucuugcugaaaugcgc

SEQ ID NO: 3897258 - RNA, 20 nt, Human adenovirus A
ucuuggucgucacacccucc

SEQ ID NO: 3897259 - RNA, 20 nt, Human adenovirus A
ucuuuguguguuucuaaaac

SEQ ID NO: 3897260 - RNA, 15 nt, Human adenovirus A
ucuuuugcagcucca

SEQ ID NO: 3897261 - RNA, 16 nt, Human adenovirus A
ugaaaagacugagaac

SEQ ID NO: 3897262 - RNA, 16 nt, Human adenovirus A
ugaaagaucacagcca

SEQ ID NO: 3897263 - RNA, 14 nt, Human adenovirus A
ugaaagucaaguca

SEQ ID NO: 3897264 - RNA, 23 nt, Human adenovirus A
ugaagaagaaccuaacugucauc

SEQ ID NO: 3897265 - RNA, 14 nt, Human adenovirus A
ugaagauagacagc

SEQ ID NO: 3897266 - RNA, 23 nt, Human adenovirus A
ugaagcaaaccacauaggcauug

SEQ ID NO: 3897267 - RNA, 18 nt, Human adenovirus A
ugaagugccucaaaguga

SEQ ID NO: 3897268 - RNA, 19 nt, Human adenovirus A
ugaaucgcagucaccacca

SEQ ID NO: 3897269 - RNA, 11 nt, Human adenovirus A
ugacaaagaug

SEQ ID NO: 3897270 - RNA, 17 nt, Human adenovirus A
ugacaaugaauaagcca

SEQ ID NO: 3897271 - RNA, 21 nt, Human adenovirus A
ugacaaugcccgccuggcagu

SEQ ID NO: 3897272 - RNA, 21 nt, Human adenovirus A
ugacaccaacgaccagucuuu

SEQ ID NO: 3897273 - RNA, 20 nt, Human adenovirus A
ugacggugccccucgaccug

SEQ ID NO: 3897274 - RNA, 22 nt, Human adenovirus A
ugacuggacagcggccauggau

SEQ ID NO: 3897275 - RNA, 12 nt, Human adenovirus A
ugacuggcaugg

SEQ ID NO: 3897276 - RNA, 12 nt, Human adenovirus A
ugagaacuucug

SEQ ID NO: 3897277 - RNA, 19 nt, Human adenovirus A
ugagcaaaucucagaaagc

SEQ ID NO: 3897278 - RNA, 19 nt, Human adenovirus A
ugaggacacugaaggcauu

SEQ ID NO: 3897279 - RNA, 13 nt, Human adenovirus A
ugagguguaccug

SEQ ID NO: 3897280 - RNA, 20 nt, Human adenovirus A
ugaguaaagauauucccacg

SEQ ID NO: 3897281 - RNA, 17 nt, Human adenovirus A
ugagucgcuguugggac

SEQ ID NO: 3897282 - RNA, 19 nt, Human adenovirus A
ugagucgcuguugggacag

SEQ ID NO: 3897283 - RNA, 19 nt, Human adenovirus A
ugagugggcagaauuugug

SEQ ID NO: 3897284 - RNA, 17 nt, Human adenovirus A
ugaucacagcaacuuuu

SEQ ID NO: 3897285 - RNA, 18 nt, Human adenovirus A
ugaucacagcaacuuuuu

SEQ ID NO: 3897286 - RNA, 15 nt, Human adenovirus A
ugauucuucagagca

SEQ ID NO: 3897287 - RNA, 20 nt, Human adenovirus A
ugcaaaauggacucaaauaa

SEQ ID NO: 3897288 - RNA, 17 nt, Human adenovirus A
ugcaaguuguaaggcau

SEQ ID NO: 3897289 - RNA, 13 nt, Human adenovirus A
ugcaaucuuugca

SEQ ID NO: 3897290 - RNA, 11 nt, Human adenovirus A
ugcaaugcagc

SEQ ID NO: 3897291 - RNA, 14 nt, Human adenovirus A
ugcacuuccuucag

SEQ ID NO: 3897292 - RNA, 12 nt, Human adenovirus A
ugcagcagaauu

SEQ ID NO: 3897293 - RNA, 15 nt, Human adenovirus A
ugcagccucauacaa

SEQ ID NO: 3897294 - RNA, 16 nt, Human adenovirus A
ugcagccuuucuuaaa

SEQ ID NO: 3897295 - RNA, 23 nt, Human adenovirus A
ugcagggaccgcagucugacagc

SEQ ID NO: 3897296 - RNA, 20 nt, Human adenovirus A
ugcauauauccuugcaaaaa

SEQ ID NO: 3897297 - RNA, 20 nt, Human adenovirus A
ugcaucucaccacugaaacu

SEQ ID NO: 3897298 - RNA, 19 nt, Human adenovirus A
ugccaccaguuggaagaau

SEQ ID NO: 3897299 - RNA, 17 nt, Human adenovirus A
ugccagaagcacuggca

SEQ ID NO: 3897300 - RNA, 23 nt, Human adenovirus A
ugccagacuacguuuuacauccu

SEQ ID NO: 3897301 - RNA, 11 nt, Human adenovirus A
ugccagcucuu

SEQ ID NO: 3897302 - RNA, 19 nt, Human adenovirus A
ugccagcucuuggaauaaa

SEQ ID NO: 3897303 - RNA, 18 nt, Human adenovirus A
ugccaggacaaagauuuu

SEQ ID NO: 3897304 - RNA, 17 nt, Human adenovirus A
ugccaggcauuuccagg

SEQ ID NO: 3897305 - RNA, 15 nt, Human adenovirus A
ugccaguuguauaaa

SEQ ID NO: 3897306 - RNA, 23 nt, Human adenovirus A
ggcgguucggguccugcgggaag

SEQ ID NO: 3897307 - RNA, 17 nt, Human adenovirus A
ggcguacagccuggagc

SEQ ID NO: 3897308 - RNA, 20 nt, Human adenovirus A
ggcgugccguuggcagaguc

SEQ ID NO: 3897309 - RNA, 21 nt, Human adenovirus A
ggcuagcuugcgaaacccacg

SEQ ID NO: 3897310 - RNA, 13 nt, Human adenovirus A
ggcugacagagcg

SEQ ID NO: 3897311 - RNA, 12 nt, Human adenovirus A
ggcuggcuugcc

SEQ ID NO: 3897312 - RNA, 21 nt, Human adenovirus A
ggcuggggacugggugccgcc

SEQ ID NO: 3897313 - RNA, 16 nt, Human adenovirus A
ggcuguauacuacccc

SEQ ID NO: 3897314 - RNA, 20 nt, Human adenovirus A
ggcuucgaaugcugugacac

SEQ ID NO: 3897315 - RNA, 20 nt, Human adenovirus A
gggauuauaaaaggcuggaa

SEQ ID NO: 3897316 - RNA, 13 nt, Human adenovirus A
gggcagccaggcg

SEQ ID NO: 3897317 - RNA, 12 nt, Human adenovirus A
gggccaggagga

SEQ ID NO: 3897318 - RNA, 23 nt, Human adenovirus A
gggccaggcgcauugggcggcga

SEQ ID NO: 3897319 - RNA, 20 nt, Human adenovirus A
gggcccaagaugugugcgcu

SEQ ID NO: 3897320 - RNA, 13 nt, Human adenovirus A
gggcgacuacccg

SEQ ID NO: 3897321 - RNA, 23 nt, Human adenovirus A
gggcuguaucuguugaaugaggu

SEQ ID NO: 3897322 - RNA, 22 nt, Human adenovirus A
ggguacuggaucguggucccag

SEQ ID NO: 3897323 - RNA, 18 nt, Human adenovirus A
ggguguauuggccgggca

SEQ ID NO: 3897324 - RNA, 19 nt, Human adenovirus A
gguaccauagcgaggaacc

SEQ ID NO: 3897325 - RNA, 17 nt, Human adenovirus A
gguaccuucgaaaugca

SEQ ID NO: 3897326 - RNA, 18 nt, Human adenovirus A
gguacuuuuccuugugga

SEQ ID NO: 3897327 - RNA, 16 nt, Human adenovirus A
gguagacgaacaaacu

SEQ ID NO: 3897328 - RNA, 18 nt, Human adenovirus A
ggucagauccuuagauuu

SEQ ID NO: 3897329 - RNA, 18 nt, Human adenovirus A
ggucgcaccacuguagac

SEQ ID NO: 3897330 - RNA, 23 nt, Human adenovirus A
ggucggugguuacucgauuuaau

SEQ ID NO: 3897331 - RNA, 14 nt, Human adenovirus A
ggucuuaaacuuuc

SEQ ID NO: 3897332 - RNA, 22 nt, Human adenovirus A
ggugaaagaagacuauagagag

SEQ ID NO: 3897333 - RNA, 18 nt, Human adenovirus A
ggugauaagcuccugcau

SEQ ID NO: 3897334 - RNA, 14 nt, Human adenovirus A
ggugcagcucgccc

SEQ ID NO: 3897335 - RNA, 15 nt, Human adenovirus A
gguggacaacaaguc

SEQ ID NO: 3897336 - RNA, 15 nt, Human adenovirus A
gguguuuggcagcaa

SEQ ID NO: 3897337 - RNA, 18 nt, Human adenovirus A
gguucgacgggccaggcg

SEQ ID NO: 3897338 - RNA, 19 nt, Human adenovirus A
gguugauuuuacagagagc

SEQ ID NO: 3897339 - RNA, 19 nt, Human adenovirus A
guaaacuuaacucaggcuu

SEQ ID NO: 3897340 - RNA, 17 nt, Human adenovirus A
guaaauucaguagauuu

SEQ ID NO: 3897341 - RNA, 13 nt, Human adenovirus A
guaacucuuguaa

SEQ ID NO: 3897342 - RNA, 11 nt, Human adenovirus A
guacacuggcu

SEQ ID NO: 3897343 - RNA, 14 nt, Human adenovirus A
guacagccagaugu

SEQ ID NO: 3897344 - RNA, 19 nt, Human adenovirus A
guaccauagcgaggaaccc

SEQ ID NO: 3897345 - RNA, 16 nt, Human adenovirus A
guacgcguccaccuca

SEQ ID NO: 3897346 - RNA, 13 nt, Human adenovirus A
guacucaucagag

SEQ ID NO: 3897347 - RNA, 15 nt, Human adenovirus A
guacuuaaaaaaaca

SEQ ID NO: 3897348 - RNA, 21 nt, Human adenovirus A
guagacauagccaaucaggcu

SEQ ID NO: 3897349 - RNA, 15 nt, Human adenovirus A
guagagacaucagau

SEQ ID NO: 3897350 - RNA, 17 nt, Human adenovirus A
guagaggaaaagcugcc

SEQ ID NO: 3897351 - RNA, 13 nt, Human adenovirus A
guagagucuuuuu

SEQ ID NO: 3897352 - RNA, 19 nt, Human adenovirus A
guauuauuugaacacacug

SEQ ID NO: 3897353 - RNA, 12 nt, Human adenovirus A
gucaaucauguu

SEQ ID NO: 3897354 - RNA, 17 nt, Human adenovirus A
gucaauucuucuuccaa

SEQ ID NO: 3897355 - RNA, 14 nt, Human adenovirus A
gucacaacaagaug

SEQ ID NO: 3897356 - RNA, 16 nt, Human adenovirus A
gucacaaguacaucca

SEQ ID NO: 3897357 - RNA, 17 nt, Human adenovirus A
gucacagucacaaggua

SEQ ID NO: 3897358 - RNA, 22 nt, Human adenovirus A
gucaccaucacugacgcccgcc

SEQ ID NO: 3897359 - RNA, 23 nt, Human adenovirus A
gucacucaagcggcauuccccau

SEQ ID NO: 3897360 - RNA, 17 nt, Human adenovirus A
gucagauagcaagcgua

SEQ ID NO: 3897361 - RNA, 15 nt, Human adenovirus A
gucagcucaggacau

SEQ ID NO: 3897362 - RNA, 23 nt, Human adenovirus A
gucauagcaacaacgcugggcau

SEQ ID NO: 3897363 - RNA, 15 nt, Human adenovirus A
gucauggagaaggac

SEQ ID NO: 3897364 - RNA, 16 nt, Human adenovirus A
gucccggucuggugca

SEQ ID NO: 3897365 - RNA, 14 nt, Human adenovirus A
guccuuccagggac

SEQ ID NO: 3897366 - RNA, 20 nt, Human adenovirus A
gucgaccuguggcaccugca

SEQ ID NO: 3897367 - RNA, 17 nt, Human adenovirus A
gucgaggacuuggaaga

SEQ ID NO: 3897368 - RNA, 13 nt, Human adenovirus A
gucgcaccacugu

SEQ ID NO: 3897369 - RNA, 15 nt, Human adenovirus A
gucgccgcagagagc

SEQ ID NO: 3897370 - RNA, 22 nt, Human adenovirus A
gucggaaugauuaaacaacaaa

SEQ ID NO: 3897371 - RNA, 17 nt, Human adenovirus A
gucggagaaccuuucaa

SEQ ID NO: 3897372 - RNA, 18 nt, Human adenovirus A
gucuacaacugcuccccu

SEQ ID NO: 3897373 - RNA, 21 nt, Human adenovirus A
gucugccauuccccacacguc

SEQ ID NO: 3897374 - RNA, 16 nt, Human adenovirus A
gucuuacaugcacauc

SEQ ID NO: 3897375 - RNA, 14 nt, Human adenovirus A
gucuugccugcgga

SEQ ID NO: 3897376 - RNA, 17 nt, Human adenovirus A
gucuuuaccuacuuuga

SEQ ID NO: 3897377 - RNA, 18 nt, Human adenovirus A
gugaaagugaauacuuaa

SEQ ID NO: 3897378 - RNA, 15 nt, Human adenovirus A
gugaagauagacagc

SEQ ID NO: 3897379 - RNA, 21 nt, Human adenovirus A
gugaagcaaaccacauaggca

SEQ ID NO: 3897380 - RNA, 11 nt, Human adenovirus A
gugacuuccca

SEQ ID NO: 3897381 - RNA, 17 nt, Human adenovirus A
gugagcauccaaaugga

SEQ ID NO: 3897382 - RNA, 13 nt, Human adenovirus A
gugaguuggccug

SEQ ID NO: 3897383 - RNA, 18 nt, Human adenovirus A
gugauaagcuccugcauu

SEQ ID NO: 3897384 - RNA, 16 nt, Human adenovirus A
gugaugaaaguagaaa

SEQ ID NO: 3897385 - RNA, 23 nt, Human adenovirus A
gugcaaaacuuucuaccaaggaa

SEQ ID NO: 3897386 - RNA, 12 nt, Human adenovirus A
gugcacgucaca

SEQ ID NO: 3897387 - RNA, 12 nt, Human adenovirus A
gugccaggcauu

SEQ ID NO: 3897388 - RNA, 18 nt, Human adenovirus A
gugccaggcauuuccagg

SEQ ID NO: 3897389 - RNA, 20 nt, Human adenovirus A
gugccaggcauuuccaggug

SEQ ID NO: 3897390 - RNA, 16 nt, Human adenovirus A
gugccuauauauuuua

SEQ ID NO: 3897391 - RNA, 16 nt, Human adenovirus A
gugcuacugcgucucc

SEQ ID NO: 3897392 - RNA, 16 nt, Human adenovirus A
gugcugauugcuggcc

SEQ ID NO: 3897393 - RNA, 21 nt, Human adenovirus A
guggaaagcaucacacagaaa

SEQ ID NO: 3897394 - RNA, 16 nt, Human adenovirus A
guggauaccacagaau

SEQ ID NO: 3897395 - RNA, 15 nt, Human adenovirus A
guggcuaggaaaaca

SEQ ID NO: 3897396 - RNA, 15 nt, Human adenovirus A
guguaauuuuccagc

SEQ ID NO: 3897397 - RNA, 22 nt, Human adenovirus A
guguacuugguggacaacaagu

SEQ ID NO: 3897398 - RNA, 15 nt, Human adenovirus A
gugugcugcaaacau

SEQ ID NO: 3897399 - RNA, 18 nt, Human adenovirus A
guguucccacaguaggaa

SEQ ID NO: 3897400 - RNA, 15 nt, Human adenovirus A
guguugcuuugaaua

SEQ ID NO: 3897401 - RNA, 11 nt, Human adenovirus A
guuaaauuaaa

SEQ ID NO: 3897402 - RNA, 13 nt, Human adenovirus A
guuaaauuaaaga

SEQ ID NO: 3897403 - RNA, 21 nt, Human adenovirus A
guuaaguuugacaccagaaac

SEQ ID NO: 3897404 - RNA, 16 nt, Human adenovirus A
guuacauaccuggcaa

SEQ ID NO: 3897405 - RNA, 18 nt, Human adenovirus A
guuaccugugcugaugga

SEQ ID NO: 3897406 - RNA, 13 nt, Human adenovirus A
guuacugaagugc

SEQ ID NO: 3897407 - RNA, 21 nt, Human adenovirus A
guuagcaacuauccuguaguu

SEQ ID NO: 3897408 - RNA, 22 nt, Human adenovirus A
guucaacaacagcuucuaaaag

SEQ ID NO: 3897409 - RNA, 21 nt, Human adenovirus A
guucccaaauauccaggagga

SEQ ID NO: 3897410 - RNA, 17 nt, Human adenovirus A
guucgacgggccaggcg

SEQ ID NO: 3897411 - RNA, 18 nt, Human adenovirus A
guucuccccacgugugcc

SEQ ID NO: 3897412 - RNA, 21 nt, Human adenovirus A
guugcaagcgaucccauagcu

SEQ ID NO: 3897413 - RNA, 21 nt, Human adenovirus A
guugcuuuccaaaugccccca

SEQ ID NO: 3897414 - RNA, 15 nt, Human adenovirus A
guuggaaacugugcu

SEQ ID NO: 3897415 - RNA, 15 nt, Human adenovirus A
guuguggauaccaca

SEQ ID NO: 3897416 - RNA, 22 nt, Human adenovirus A
guuuaaaucuuucugcuccccu

SEQ ID NO: 3897417 - RNA, 13 nt, Human adenovirus A
guuuagaaggaaa

SEQ ID NO: 3897418 - RNA, 15 nt, Human adenovirus A
guuuccgauaaugag

SEQ ID NO: 3897419 - RNA, 12 nt, Human adenovirus A
guuucuucuaaa

SEQ ID NO: 3897420 - RNA, 13 nt, Human adenovirus A
guuugacaccaga

SEQ ID NO: 3897421 - RNA, 15 nt, Human adenovirus A
guuuggaaacuguau

SEQ ID NO: 3897422 - RNA, 23 nt, Human adenovirus A
guuuugagcggaagccuucaaaa

SEQ ID NO: 3897423 - RNA, 21 nt, Human adenovirus A
guuuuggcggccaugcaaagc

SEQ ID NO: 3897424 - RNA, 17 nt, Human adenovirus A
uaaaaaauuacaaaggc

SEQ ID NO: 3897425 - RNA, 13 nt, Human adenovirus A
aaaaaacaguuuc

SEQ ID NO: 3897426 - RNA, 23 nt, Human adenovirus A
aaaaagcaaaguacaaccacucu

SEQ ID NO: 3897427 - RNA, 13 nt, Human adenovirus A
aaaaaucaaaugg

SEQ ID NO: 3897428 - RNA, 17 nt, Human adenovirus A
aaaaaucaaauggcucu

SEQ ID NO: 3897429 - RNA, 19 nt, Human adenovirus A
aaaaauguguacuugcuuu

SEQ ID NO: 3897430 - RNA, 20 nt, Human adenovirus A
aaaacacgucggaaugauua

SEQ ID NO: 3897431 - RNA, 11 nt, Human adenovirus A
aaaacacugag

SEQ ID NO: 3897432 - RNA, 16 nt, Human adenovirus A
aaaacgagcagcaaau

SEQ ID NO: 3897433 - RNA, 20 nt, Human adenovirus A
aaaagagccacagcucugau

SEQ ID NO: 3897434 - RNA, 19 nt, Human adenovirus A
aaaagcagccauaaugccu

SEQ ID NO: 3897435 - RNA, 17 nt, Human adenovirus A
aaaagcauacuuaccaa

SEQ ID NO: 3897436 - RNA, 24 nt, Human adenovirus A
aaaagcugccaccucuagaaacug

SEQ ID NO: 3897437 - RNA, 20 nt, Human adenovirus A
aaaagcuuuaauaaccaugu

SEQ ID NO: 3897438 - RNA, 13 nt, Human adenovirus A
aaaaggcuggaag

SEQ ID NO: 3897439 - RNA, 17 nt, Human adenovirus A
aaaagucuacucauacc

SEQ ID NO: 3897440 - RNA, 16 nt, Human adenovirus A
aaaauaaaacuuccaa

SEQ ID NO: 3897441 - RNA, 16 nt, Human adenovirus A
aaaauauguuaaauua

SEQ ID NO: 3897442 - RNA, 21 nt, Human adenovirus A
aaaaugcaaaauggacucaaa

SEQ ID NO: 3897443 - RNA, 15 nt, Human adenovirus A
aaaauggaacccuua

SEQ ID NO: 3897444 - RNA, 17 nt, Human adenovirus A
aaaauuuucaacagaaa

SEQ ID NO: 3897445 - RNA, 16 nt, Human adenovirus A
aaacaaaagcaaagca

SEQ ID NO: 3897446 - RNA, 19 nt, Human adenovirus A
aaacaaaagcaaagcaaau

SEQ ID NO: 3897447 - RNA, 15 nt, Human adenovirus A
aaacaacgaaggcca

SEQ ID NO: 3897448 - RNA, 19 nt, Human adenovirus A
aaacacuguaagaggagac

SEQ ID NO: 3897449 - RNA, 18 nt, Human adenovirus A
aaacagauucuggagaau

SEQ ID NO: 3897450 - RNA, 21 nt, Human adenovirus A
aaacaggcuauugcgcagcaa

SEQ ID NO: 3897451 - RNA, 16 nt, Human adenovirus A
aaacaguacaaagcca

SEQ ID NO: 3897452 - RNA, 13 nt, Human adenovirus A
aaacauaaaacua

SEQ ID NO: 3897453 - RNA, 16 nt, Human adenovirus A
aaaccggccagaugcu

SEQ ID NO: 3897454 - RNA, 21 nt, Human adenovirus A
aaaccggcgaggaacuaaacc

SEQ ID NO: 3897455 - RNA, 17 nt, Human adenovirus A
aaaccgucgcuuucaac

SEQ ID NO: 3897456 - RNA, 13 nt, Human adenovirus A
aaaccuagcugcu

SEQ ID NO: 3897457 - RNA, 17 nt, Human adenovirus A
aaacgaccgccuuuucu

SEQ ID NO: 3897458 - RNA, 13 nt, Human adenovirus A
aaacucuaacugc

SEQ ID NO: 3897459 - RNA, 18 nt, Human adenovirus A
aaacugaggcggcuggug

SEQ ID NO: 3897460 - RNA, 23 nt, Human adenovirus A
aaacuucgccaauaaaaacaacg

SEQ ID NO: 3897461 - RNA, 17 nt, Human adenovirus A
aaagacuccggaaacaa

SEQ ID NO: 3897462 - RNA, 15 nt, Human adenovirus A
aaagaucacagccag

SEQ ID NO: 3897463 - RNA, 13 nt, Human adenovirus A
aaagcaaaguaca

SEQ ID NO: 3897464 - RNA, 22 nt, Human adenovirus A
aaagcaaauuacgcaacaacug

SEQ ID NO: 3897465 - RNA, 17 nt, Human adenovirus A
aaagcauaauaugguuu

SEQ ID NO: 3897466 - RNA, 13 nt, Human adenovirus A
aaagcaucccagc

SEQ ID NO: 3897467 - RNA, 18 nt, Human adenovirus A
aaaggaagcugcuguucu

SEQ ID NO: 3897468 - RNA, 16 nt, Human adenovirus A
aaaguaccaggaagcu

SEQ ID NO: 3897469 - RNA, 13 nt, Human adenovirus A
aaagucacaaggg

SEQ ID NO: 3897470 - RNA, 15 nt, Human adenovirus A
aaauaaccaguguua

SEQ ID NO: 3897471 - RNA, 15 nt, Human adenovirus A
aaauacacauaaaga

SEQ ID NO: 3897472 - RNA, 12 nt, Human adenovirus A
aaauauccagga

SEQ ID NO: 3897473 - RNA, 19 nt, Human adenovirus A
aaaucugaaaauacaucau

SEQ ID NO: 3897474 - RNA, 18 nt, Human adenovirus A
aaaugccuguuuuguauu

SEQ ID NO: 3897475 - RNA, 23 nt, Human adenovirus A
aaaugcuuuguuggauagcaaag

SEQ ID NO: 3897476 - RNA, 21 nt, Human adenovirus A
aaauggaacccuuacacucaa

SEQ ID NO: 3897477 - RNA, 20 nt, Human adenovirus A
aaaugguaggacgcugaaac

SEQ ID NO: 3897478 - RNA, 13 nt, Human adenovirus A
aaauuacacacua

SEQ ID NO: 3897479 - RNA, 21 nt, Human adenovirus A
aaauuguuuuuguucuuuuaa

SEQ ID NO: 3897480 - RNA, 18 nt, Human adenovirus A
aaauuuguugcuguugcc

SEQ ID NO: 3897481 - RNA, 14 nt, Human adenovirus A
aacacauacaguaa

SEQ ID NO: 3897482 - RNA, 19 nt, Human adenovirus A
aacacggaggacaauccaa

SEQ ID NO: 3897483 - RNA, 21 nt, Human adenovirus A
aacacgggcuggggacugggu

SEQ ID NO: 3897484 - RNA, 16 nt, Human adenovirus A
aacacgguacuuuucc

SEQ ID NO: 3897485 - RNA, 21 nt, Human adenovirus A
aacacugucagugaagcaaac

SEQ ID NO: 3897486 - RNA, 15 nt, Human adenovirus A
aacagacaauuccaa

SEQ ID NO: 3897487 - RNA, 20 nt, Human adenovirus A
aacagacuggggaauuugca

SEQ ID NO: 3897488 - RNA, 16 nt, Human adenovirus A
aacagcaaacuuucuc

SEQ ID NO: 3897489 - RNA, 22 nt, Human adenovirus A
aacagcgcaugcguaucucacu

SEQ ID NO: 3897490 - RNA, 13 nt, Human adenovirus A
aacagcuucuaaa

SEQ ID NO: 3897491 - RNA, 22 nt, Human adenovirus A
aacagcuucuaaaagagccaca

SEQ ID NO: 3897492 - RNA, 15 nt, Human adenovirus A
aacaucaacugugcu

SEQ ID NO: 3897493 - RNA, 16 nt, Human adenovirus A
aacaucgcaaaacacg

SEQ ID NO: 3897494 - RNA, 17 nt, Human adenovirus A
aacaucgcaaaacacgu

SEQ ID NO: 3897495 - RNA, 12 nt, Human adenovirus A
aaccaaauacug

SEQ ID NO: 3897496 - RNA, 18 nt, Human adenovirus A
aaccacauaggcauuggg

SEQ ID NO: 3897497 - RNA, 22 nt, Human adenovirus A
aaccaccgccaugcgcgcggcc

SEQ ID NO: 3897498 - RNA, 15 nt, Human adenovirus A
aaccacgaaaacggu

SEQ ID NO: 3897499 - RNA, 14 nt, Human adenovirus A
aaccacggccucag

SEQ ID NO: 3897500 - RNA, 23 nt, Human adenovirus A
aaccagcugggcagaaagcaaau

SEQ ID NO: 3897501 - RNA, 19 nt, Human adenovirus A
aaccauuuuauuagcucau

SEQ ID NO: 3897502 - RNA, 16 nt, Human adenovirus A
aacccaaacuguacaa

SEQ ID NO: 3897503 - RNA, 15 nt, Human adenovirus A
aacccugaauguuug

SEQ ID NO: 3897504 - RNA, 11 nt, Human adenovirus A
aacccuucccc

SEQ ID NO: 3897505 - RNA, 17 nt, Human adenovirus A
aaccgauugggaaaaag

SEQ ID NO: 3897506 - RNA, 15 nt, Human adenovirus A
aaccgucgcuuucaa

SEQ ID NO: 3897507 - RNA, 20 nt, Human adenovirus A
aaccugaucuagaaauugau

SEQ ID NO: 3897508 - RNA, 16 nt, Human adenovirus A
aacgaaaaugugccua

SEQ ID NO: 3897509 - RNA, 17 nt, Human adenovirus A
aacgaggugcagcugcc

SEQ ID NO: 3897510 - RNA, 12 nt, Human adenovirus A
aacgcugggcuc

SEQ ID NO: 3897511 - RNA, 22 nt, Human adenovirus A
aacggcgcgcaguccugaugcu

SEQ ID NO: 3897512 - RNA, 13 nt, Human adenovirus A
aacuacaaaaaag

SEQ ID NO: 3897513 - RNA, 17 nt, Human adenovirus A
aacuauggaaauccaaa

SEQ ID NO: 3897514 - RNA, 22 nt, Human adenovirus A
aacucagcccaugcucuagaca

SEQ ID NO: 3897515 - RNA, 21 nt, Human adenovirus A
cagcaaacuuucuccaaaucu

SEQ ID NO: 3897516 - RNA, 21 nt, Human adenovirus A
cagcaaagaaaguucaccucc

SEQ ID NO: 3897517 - RNA, 22 nt, Human adenovirus A
cagcaaagaaaguucaccucca

SEQ ID NO: 3897518 - RNA, 17 nt, Human adenovirus A
cagcaacggcaggaaau

SEQ ID NO: 3897519 - RNA, 14 nt, Human adenovirus A
cagcacgagagggg

SEQ ID NO: 3897520 - RNA, 20 nt, Human adenovirus A
cagcagugcggccuguugcc

SEQ ID NO: 3897521 - RNA, 16 nt, Human adenovirus A
cagccacaccgcggcg

SEQ ID NO: 3897522 - RNA, 15 nt, Human adenovirus A
cagccauaaugccuu

SEQ ID NO: 3897523 - RNA, 17 nt, Human adenovirus A
cagcccaacccuuccca

SEQ ID NO: 3897524 - RNA, 16 nt, Human adenovirus A
cagccgcuaccaucac

SEQ ID NO: 3897525 - RNA, 17 nt, Human adenovirus A
cagccguuucaggaagg

SEQ ID NO: 3897526 - RNA, 15 nt, Human adenovirus A
cagccugucuacaaa

SEQ ID NO: 3897527 - RNA, 16 nt, Human adenovirus A
cagccugucuacaaau

SEQ ID NO: 3897528 - RNA, 17 nt, Human adenovirus A
cagcgccaacaaaaacc

SEQ ID NO: 3897529 - RNA, 16 nt, Human adenovirus A
cagcgccgagccacag

SEQ ID NO: 3897530 - RNA, 14 nt, Human adenovirus A
cagcggggaggaag

SEQ ID NO: 3897531 - RNA, 16 nt, Human adenovirus A
cagcggggaggaagcu

SEQ ID NO: 3897532 - RNA, 15 nt, Human adenovirus A
cagcguccaugaaug

SEQ ID NO: 3897533 - RNA, 22 nt, Human adenovirus A
cagcucuuuuggauguaaaaaa

SEQ ID NO: 3897534 - RNA, 16 nt, Human adenovirus A
cagcugacgacaguag

SEQ ID NO: 3897535 - RNA, 20 nt, Human adenovirus A
cagcugcggccgcaacagcu

SEQ ID NO: 3897536 - RNA, 18 nt, Human adenovirus A
cagcuucagaugacugga

SEQ ID NO: 3897537 - RNA, 15 nt, Human adenovirus A
caggaggacacuggc

SEQ ID NO: 3897538 - RNA, 15 nt, Human adenovirus A
caggcaguacuucau

SEQ ID NO: 3897539 - RNA, 22 nt, Human adenovirus A
cagguaauacuuaauuucuaga

SEQ ID NO: 3897540 - RNA, 20 nt, Human adenovirus A
cagguauaaaggucgcacug

SEQ ID NO: 3897541 - RNA, 18 nt, Human adenovirus A
caggucccguaaaauaca

SEQ ID NO: 3897542 - RNA, 13 nt, Human adenovirus A
caguaacaaacug

SEQ ID NO: 3897543 - RNA, 13 nt, Human adenovirus A
caguaaucuuuuu

SEQ ID NO: 3897544 - RNA, 22 nt, Human adenovirus A
caguagauuuacauuaggcucc

SEQ ID NO: 3897545 - RNA, 18 nt, Human adenovirus A
caguaugcugaagaaaca

SEQ ID NO: 3897546 - RNA, 13 nt, Human adenovirus A
cagucaccaccag

SEQ ID NO: 3897547 - RNA, 22 nt, Human adenovirus A
cagucgcguggcauuugugccu

SEQ ID NO: 3897548 - RNA, 23 nt, Human adenovirus A
cagucuguuuaguccugcaguua

SEQ ID NO: 3897549 - RNA, 14 nt, Human adenovirus A
cagugaagcaaacc

SEQ ID NO: 3897550 - RNA, 17 nt, Human adenovirus A
cagugcggccuguugcc

SEQ ID NO: 3897551 - RNA, 18 nt, Human adenovirus A
caguggacaaaaacuaug

SEQ ID NO: 3897552 - RNA, 13 nt, Human adenovirus A
caguuuuaagccc

SEQ ID NO: 3897553 - RNA, 22 nt, Human adenovirus A
cauaaaagcuucaauuugccua

SEQ ID NO: 3897554 - RNA, 15 nt, Human adenovirus A
cauaagcugugaaaa

SEQ ID NO: 3897555 - RNA, 19 nt, Human adenovirus A
cauaaggagacguuuuugc

SEQ ID NO: 3897556 - RNA, 18 nt, Human adenovirus A
cauaauguaacccuuccc

SEQ ID NO: 3897557 - RNA, 15 nt, Human adenovirus A
cauaauuaaaggcgc

SEQ ID NO: 3897558 - RNA, 16 nt, Human adenovirus A
cauaauuuuaaaguaa

SEQ ID NO: 3897559 - RNA, 23 nt, Human adenovirus A
cauaccaguuaaugcuggaugcu

SEQ ID NO: 3897560 - RNA, 20 nt, Human adenovirus A
cauaccugggauuguguccu

SEQ ID NO: 3897561 - RNA, 20 nt, Human adenovirus A
cauacuuaccaaagccaugg

SEQ ID NO: 3897562 - RNA, 15 nt, Human adenovirus A
cauagccccaggucc

SEQ ID NO: 3897563 - RNA, 14 nt, Human adenovirus A
cauagccccucuaa

SEQ ID NO: 3897564 - RNA, 20 nt, Human adenovirus A
cauaggcaugugguccaggg

SEQ ID NO: 3897565 - RNA, 22 nt, Human adenovirus A
cauaguagagacaaugaaacuu

SEQ ID NO: 3897566 - RNA, 17 nt, Human adenovirus A
cauaguucuugauuuag

SEQ ID NO: 3897567 - RNA, 16 nt, Human adenovirus A
cauauagcucauguga

SEQ ID NO: 3897568 - RNA, 14 nt, Human adenovirus A
cauauuguggagaa

SEQ ID NO: 3897569 - RNA, 13 nt, Human adenovirus A
caucauacauaau

SEQ ID NO: 3897570 - RNA, 18 nt, Human adenovirus A
caucaugaaaacagcagc

SEQ ID NO: 3897571 - RNA, 19 nt, Human adenovirus A
cauccguggcaggccaucu

SEQ ID NO: 3897572 - RNA, 19 nt, Human adenovirus A
caucuaaaccuauaacaau

SEQ ID NO: 3897573 - RNA, 17 nt, Human adenovirus A
caucuauaguaaaaaug

SEQ ID NO: 3897574 - RNA, 21 nt, Human adenovirus A
caucuauaguaaaaaugccag

SEQ ID NO: 3897575 - RNA, 22 nt, Human adenovirus A
caucuauaguaaaaaugccagg

SEQ ID NO: 3897576 - RNA, 20 nt, Human adenovirus A
caucuggggggucggcaucu

SEQ ID NO: 3897577 - RNA, 14 nt, Human adenovirus A
caucuguuuacuuc

SEQ ID NO: 3897578 - RNA, 14 nt, Human adenovirus A
caugaaaacagcau

SEQ ID NO: 3897579 - RNA, 16 nt, Human adenovirus A
caugaccauguaauaa

SEQ ID NO: 3897580 - RNA, 18 nt, Human adenovirus A
caugauggaucaaaaaca

SEQ ID NO: 3897581 - RNA, 18 nt, Human adenovirus A
caugauguuaccaccgau

SEQ ID NO: 3897582 - RNA, 13 nt, Human adenovirus A
caugcaaagccag

SEQ ID NO: 3897583 - RNA, 22 nt, Human adenovirus A
caugcaucguuuuuucuccgac

SEQ ID NO: 3897584 - RNA, 23 nt, Human adenovirus A
caugcgcgcggccagagcguugg

SEQ ID NO: 3897585 - RNA, 17 nt, Human adenovirus A
caugcuauuaagcaagc

SEQ ID NO: 3897586 - RNA, 20 nt, Human adenovirus A
caugcuuuagguuagccuga

SEQ ID NO: 3897587 - RNA, 22 nt, Human adenovirus A
cauggaucguauuauggcuuua

SEQ ID NO: 3897588 - RNA, 19 nt, Human adenovirus A
cauggaugaauugcagccu

SEQ ID NO: 3897589 - RNA, 22 nt, Human adenovirus A
cauggcacauaacacagcuucu

SEQ ID NO: 3897590 - RNA, 13 nt, Human adenovirus A
cauggcuuccaug

SEQ ID NO: 3897591 - RNA, 20 nt, Human adenovirus A
caugggcaucuugcaugaaa

SEQ ID NO: 3897592 - RNA, 16 nt, Human adenovirus A
cauggugauuaaauau

SEQ ID NO: 3897593 - RNA, 17 nt, Human adenovirus A
caugugcgcacacuaau

SEQ ID NO: 3897594 - RNA, 17 nt, Human adenovirus A
cauguggagcuuucaac

SEQ ID NO: 3897595 - RNA, 16 nt, Human adenovirus A
cauguguugugcacuu

SEQ ID NO: 3897596 - RNA, 20 nt, Human adenovirus A
cauuaagaacacggugaaug

SEQ ID NO: 3897597 - RNA, 22 nt, Human adenovirus A
cauuaccagcagccaaaacuca

SEQ ID NO: 3897598 - RNA, 19 nt, Human adenovirus A
cauuaccgagcuccauggg

SEQ ID NO: 3897599 - RNA, 18 nt, Human adenovirus A
cauuacuuuuaaauacug

SEQ ID NO: 3897600 - RNA, 17 nt, Human adenovirus A
cauuaucaugaaacucu

SEQ ID NO: 3897601 - RNA, 16 nt, Human adenovirus A
cauucaugcugauguu

SEQ ID NO: 3897602 - RNA, 21 nt, Human adenovirus A
cauuccagagagcuacaagga

SEQ ID NO: 3897603 - RNA, 15 nt, Human adenovirus A
cauuccccaguuuaa

SEQ ID NO: 3897604 - RNA, 13 nt, Human adenovirus A
cauucgcagcgca

SEQ ID NO: 3897605 - RNA, 16 nt, Human adenovirus A
cauugaaaccagcgcc

SEQ ID NO: 3897606 - RNA, 18 nt, Human adenovirus A
cauugcgauaaacuggau

SEQ ID NO: 3897607 - RNA, 17 nt, Human adenovirus A
cauuggaguuaaguuug

SEQ ID NO: 3897608 - RNA, 13 nt, Human adenovirus A
cauuuacugcagc

SEQ ID NO: 3897609 - RNA, 15 nt, Human adenovirus A
cauuuauaaauguua

SEQ ID NO: 3897610 - RNA, 18 nt, Human adenovirus A
cauuugcgcccagacgua

SEQ ID NO: 3897611 - RNA, 21 nt, Human adenovirus A
cauuugugccucgucagaaca

SEQ ID NO: 3897612 - RNA, 16 nt, Human adenovirus A
cauuuuucccacuuua

SEQ ID NO: 3897613 - RNA, 21 nt, Human adenovirus A
ccaaauauccaggaggaauau

SEQ ID NO: 3897614 - RNA, 23 nt, Human adenovirus A
ccaacaaaacuuaucagccagag

SEQ ID NO: 3897615 - RNA, 20 nt, Human adenovirus A
ccaacggcacaugcgagcca

SEQ ID NO: 3897616 - RNA, 16 nt, Human adenovirus A
ccaagcguagccgcag

SEQ ID NO: 3897617 - RNA, 16 nt, Human adenovirus A
ccaaggaugacaacau

SEQ ID NO: 3897618 - RNA, 13 nt, Human adenovirus A
ccaauccaaaccc

SEQ ID NO: 3897619 - RNA, 18 nt, Human adenovirus A
ccaauuucguuccagacu

SEQ ID NO: 3897620 - RNA, 21 nt, Human adenovirus A
ccacagcuggcgcacaaguug

SEQ ID NO: 3897621 - RNA, 14 nt, Human adenovirus A
ccacauacaucacc

SEQ ID NO: 3897622 - RNA, 19 nt, Human adenovirus A
ccaccaaacugcagccuca

SEQ ID NO: 3897623 - RNA, 22 nt, Human adenovirus A
ccacccuguacgcaagcauuuu

SEQ ID NO: 3897624 - RNA, 18 nt, Human adenovirus A
ccaccgaucgcucgcagc

SEQ ID NO: 3897625 - RNA, 22 nt, Human adenovirus A
ccaccgucaauucuucuuccaa

SEQ ID NO: 3897626 - RNA, 16 nt, Human adenovirus A
ccaccguggcucccac

SEQ ID NO: 3897627 - RNA, 14 nt, Human adenovirus A
ccaccucuagaaac

SEQ ID NO: 3897628 - RNA, 17 nt, Human adenovirus A
ccaccuuggcuuucgag

SEQ ID NO: 3897629 - RNA, 20 nt, Human adenovirus A
ccacgccgcgccccacuucc

SEQ ID NO: 3897630 - RNA, 18 nt, Human adenovirus A
ccacgccuggguaccgug

SEQ ID NO: 3897631 - RNA, 12 nt, Human adenovirus A
ccacucuccuga

SEQ ID NO: 3897632 - RNA, 20 nt, Human adenovirus A
ccacugcgucaguaacaaac

SEQ ID NO: 3897633 - RNA, 23 nt, Human adenovirus A
ccacuguuguauuauuugaacac

SEQ ID NO: 3897634 - RNA, 14 nt, Human adenovirus A
ccagaagcacuggc

SEQ ID NO: 3897635 - RNA, 17 nt, Human adenovirus A
ccagagcaccccuuccc

SEQ ID NO: 3897636 - RNA, 15 nt, Human adenovirus A
ccagauuguggaaua

SEQ ID NO: 3897637 - RNA, 22 nt, Human adenovirus A
ccagcguucgcuuugacaacau

SEQ ID NO: 3897638 - RNA, 20 nt, Human adenovirus A
ccagcucacggugucagaau

SEQ ID NO: 3897639 - RNA, 19 nt, Human adenovirus A
ccagcugaacgggggcgcc

SEQ ID NO: 3897640 - RNA, 13 nt, Human adenovirus A
ccaggaagcugag

SEQ ID NO: 3897641 - RNA, 20 nt, Human adenovirus A
ccaggcauuuccaggugggg

SEQ ID NO: 3897642 - RNA, 15 nt, Human adenovirus A
ccaguacacuuggga

SEQ ID NO: 3897643 - RNA, 19 nt, Human adenovirus A
ccagugcuuucaacaaaaa

SEQ ID NO: 3897644 - RNA, 16 nt, Human adenovirus A
ccaguuuaaaggcugu

SEQ ID NO: 3897645 - RNA, 19 nt, Human adenovirus A
ccaucagaaauuuguugcu

SEQ ID NO: 3897646 - RNA, 17 nt, Human adenovirus A
ccauccguggcaggcca

SEQ ID NO: 3897647 - RNA, 11 nt, Human adenovirus A
ccaugcaaagc

SEQ ID NO: 3897648 - RNA, 15 nt, Human adenovirus A
ccauguaucagcagc

SEQ ID NO: 3897649 - RNA, 18 nt, Human adenovirus A
ccauguaucagcagccaa

SEQ ID NO: 3897650 - RNA, 20 nt, Human adenovirus A
ccauguaucagcagccaacu

SEQ ID NO: 3897651 - RNA, 22 nt, Human adenovirus A
ccauguggagguauaacaaaau

SEQ ID NO: 3897652 - RNA, 15 nt, Human adenovirus A
ccauuagcauagcca

SEQ ID NO: 3897653 - RNA, 19 nt, Human adenovirus A
cccaagcuaaccgcuuuuc

SEQ ID NO: 3897654 - RNA, 23 nt, Human adenovirus A
cccacgccgcgccccacuuccuc

SEQ ID NO: 3897655 - RNA, 22 nt, Human adenovirus A
cccagugccgccuuagacauga

SEQ ID NO: 3897656 - RNA, 12 nt, Human adenovirus A
cccccuccugga

SEQ ID NO: 3897657 - RNA, 23 nt, Human adenovirus A
cccccuuuguagcugaaaacaac

SEQ ID NO: 3897658 - RNA, 14 nt, Human adenovirus A
ccccuguggagcca

SEQ ID NO: 3897659 - RNA, 18 nt, Human adenovirus A
cccgacggaguguuucag

SEQ ID NO: 3897660 - RNA, 21 nt, Human adenovirus A
cccgacggaguguuucagcuc

SEQ ID NO: 3897661 - RNA, 21 nt, Human adenovirus A
cccgcgaaaaaaaucacuucc

SEQ ID NO: 3897662 - RNA, 14 nt, Human adenovirus A
cccggcguaaccaa

SEQ ID NO: 3897663 - RNA, 14 nt, Human adenovirus A
cccucuccaaugaa

SEQ ID NO: 3897664 - RNA, 16 nt, Human adenovirus A
ccgaggacgcacuggu

SEQ ID NO: 3897665 - RNA, 12 nt, Human adenovirus A
ccgcaaaacagg

SEQ ID NO: 3897666 - RNA, 17 nt, Human adenovirus A
ccgcacggccaaugccc

SEQ ID NO: 3897667 - RNA, 17 nt, Human adenovirus A
ccgcagcugucucuacc

SEQ ID NO: 3897668 - RNA, 20 nt, Human adenovirus A
ccgcgaaaaaaaucacuucc

SEQ ID NO: 3897669 - RNA, 15 nt, Human adenovirus A
ccgcgccccacuucc

SEQ ID NO: 3897670 - RNA, 19 nt, Human adenovirus A
ccgcgcgcggacuuucaac

SEQ ID NO: 3897671 - RNA, 15 nt, Human adenovirus A
ccgcgcugcggccau

SEQ ID NO: 3897672 - RNA, 18 nt, Human adenovirus A
ccgcgguuuuggcggcca

SEQ ID NO: 3897673 - RNA, 20 nt, Human adenovirus A
ccgcugugagcaaaucucag

SEQ ID NO: 3897674 - RNA, 17 nt, Human adenovirus A
ccggaguacgucagaau

SEQ ID NO: 3897675 - RNA, 21 nt, Human adenovirus A
ccggcuaauguuccgcguggu

SEQ ID NO: 3897676 - RNA, 16 nt, Human adenovirus A
ccgguugagcagaacu

SEQ ID NO: 3897677 - RNA, 17 nt, Human adenovirus A
ccguaaaauacacauaa

SEQ ID NO: 3897678 - RNA, 15 nt, Human adenovirus A
ccgucaucucuacag

SEQ ID NO: 3897679 - RNA, 18 nt, Human adenovirus A
ccgucuucguggagaagc

SEQ ID NO: 3897680 - RNA, 15 nt, Human adenovirus A
ccguuccuguugcau

SEQ ID NO: 3897681 - RNA, 18 nt, Human adenovirus A
ccuaaaauuuuugaaggu

SEQ ID NO: 3897682 - RNA, 17 nt, Human adenovirus A
ccuaauacaaaugcuua

SEQ ID NO: 3897683 - RNA, 21 nt, Human adenovirus A
ccuacauuggaguuggaagaa

SEQ ID NO: 3897684 - RNA, 12 nt, Human adenovirus A
ccuaccacugua

SEQ ID NO: 3897685 - RNA, 14 nt, Human adenovirus A
ccuacgguggcagc

SEQ ID NO: 3897686 - RNA, 20 nt, Human adenovirus A
ccuacuucacccugggaaac

SEQ ID NO: 3897687 - RNA, 17 nt, Human adenovirus A
ccuagcguacagccaga

SEQ ID NO: 3897688 - RNA, 15 nt, Human adenovirus A
ccuauccgucuccag

SEQ ID NO: 3897689 - RNA, 14 nt, Human adenovirus A
ccuaucuguugcua

SEQ ID NO: 3897690 - RNA, 22 nt, Human adenovirus A
ccucguacaggaauucugacca

SEQ ID NO: 3897691 - RNA, 17 nt, Human adenovirus A
ccugacacuacagagcu

SEQ ID NO: 3897692 - RNA, 17 nt, Human adenovirus A
ccugaguugggauuaca

SEQ ID NO: 3897693 - RNA, 12 nt, Human adenovirus A
ccugcagcacug

SEQ ID NO: 3897694 - RNA, 19 nt, Human adenovirus A
ccugccauugccgcacggc

SEQ ID NO: 3897695 - RNA, 22 nt, Human adenovirus A
ccuggagcgagaucuuccaaca

SEQ ID NO: 3897696 - RNA, 16 nt, Human adenovirus A
ccuggaggucuccaug

SEQ ID NO: 3897697 - RNA, 23 nt, Human adenovirus A
ccuggcaguuuuaaagcgcaaua

SEQ ID NO: 3897698 - RNA, 13 nt, Human adenovirus A
ccuguucucccca

SEQ ID NO: 3897699 - RNA, 20 nt, Human adenovirus A
ccuuaacuucuacccaguuu

SEQ ID NO: 3897700 - RNA, 17 nt, Human adenovirus A
ccuuacagaucacggga

SEQ ID NO: 3897701 - RNA, 14 nt, Human adenovirus A
ccuuagaagacaaa

SEQ ID NO: 3897702 - RNA, 18 nt, Human adenovirus A
ccuucaauuggaacagua

SEQ ID NO: 3897703 - RNA, 18 nt, Human adenovirus A
ccuucgaaaugcagggac

SEQ ID NO: 3897704 - RNA, 23 nt, Human adenovirus A
ccuucgagaacuaaacaaacugu

SEQ ID NO: 3897705 - RNA, 22 nt, Human adenovirus A
ccuucuggcguuacagcuucag

SEQ ID NO: 3897706 - RNA, 16 nt, Human adenovirus A
ccuucuuuauguuuua

SEQ ID NO: 3897707 - RNA, 14 nt, Human adenovirus A
ccuugaaaugccag

SEQ ID NO: 3897708 - RNA, 20 nt, Human adenovirus A
ccuugcagcgguuguaauaa

SEQ ID NO: 3897709 - RNA, 23 nt, Human adenovirus A
ccuugcuugacucucgggcgagu

SEQ ID NO: 3897710 - RNA, 12 nt, Human adenovirus A
ccuuugacaaac

SEQ ID NO: 3897711 - RNA, 14 nt, Human adenovirus A
cgaaaacagucugc

SEQ ID NO: 3897712 - RNA, 15 nt, Human adenovirus A
cgaacaguguuuuca

SEQ ID NO: 3897713 - RNA, 15 nt, Human adenovirus A
cgacaacagcugcug

SEQ ID NO: 3897714 - RNA, 16 nt, Human adenovirus A
cgacauuuagaccacu

SEQ ID NO: 3897715 - RNA, 21 nt, Human adenovirus A
cgaccuucauuuuuucugggg

SEQ ID NO: 3897716 - RNA, 13 nt, Human adenovirus A
cgacgggccaggc

SEQ ID NO: 3897717 - RNA, 22 nt, Human adenovirus A
cgacuaaugguuacugaagugc

SEQ ID NO: 3897718 - RNA, 19 nt, Human adenovirus A
cgagaaaguguuaaccauu

SEQ ID NO: 3897719 - RNA, 18 nt, Human adenovirus A
cgagaagaaguagccauu

SEQ ID NO: 3897720 - RNA, 13 nt, Human adenovirus A
cgagacugcauuu

SEQ ID NO: 3897721 - RNA, 14 nt, Human adenovirus A
cgaggcggugagca

SEQ ID NO: 3897722 - RNA, 15 nt, Human adenovirus A
cgagucaccaucacu

SEQ ID NO: 3897723 - RNA, 19 nt, Human adenovirus A
cgauaaacaaaagcaaagc

SEQ ID NO: 3897724 - RNA, 13 nt, Human adenovirus A
cgauaugaugcaa

SEQ ID NO: 3897725 - RNA, 20 nt, Human adenovirus A
cgaucguucaacuuugucca

SEQ ID NO: 3897726 - RNA, 17 nt, Human adenovirus A
cgaugaagcacgcagag

SEQ ID NO: 3897727 - RNA, 21 nt, Human adenovirus A
cgaugcucgcaaguaccgcgc

SEQ ID NO: 3897728 - RNA, 12 nt, Human adenovirus A
cgauuccaagga

SEQ ID NO: 3897729 - RNA, 23 nt, Human adenovirus A
cgcaagcuuucauugguccaggc

SEQ ID NO: 3897730 - RNA, 23 nt, Human adenovirus A
cgcaaguucaaagaagagcugcu

SEQ ID NO: 3897731 - RNA, 18 nt, Human adenovirus A
cgcaccgguugagcagaa

SEQ ID NO: 3897732 - RNA, 19 nt, Human adenovirus A
cgcacuggucgcaccacug

SEQ ID NO: 3897733 - RNA, 18 nt, Human adenovirus A
cgcagaagcucuguucaa

SEQ ID NO: 3897734 - RNA, 14 nt, Human adenovirus A
cgcagacggcugcg

SEQ ID NO: 3897735 - RNA, 15 nt, Human adenovirus A
cgcaggcuugcuaaa

SEQ ID NO: 3897736 - RNA, 20 nt, Human adenovirus A
cgcagucuuaguuuggcaga

SEQ ID NO: 3897737 - RNA, 15 nt, Human adenovirus A
cgcauuuuucccacu

SEQ ID NO: 3897738 - RNA, 17 nt, Human adenovirus A
cgccagcaagugccucc

SEQ ID NO: 3897739 - RNA, 20 nt, Human adenovirus A
cgcccauaacaucaggagca

SEQ ID NO: 3897740 - RNA, 14 nt, Human adenovirus A
cgccgcgacggcgg

SEQ ID NO: 3897741 - RNA, 13 nt, Human adenovirus A
cgccguccuauga

SEQ ID NO: 3897742 - RNA, 22 nt, Human adenovirus A
cgccugaaauauauggcccauc

SEQ ID NO: 3897743 - RNA, 14 nt, Human adenovirus A
cgccuuaacuucua

SEQ ID NO: 3897744 - RNA, 19 nt, Human adenovirus A
cgcgauacaacggccagcc

SEQ ID NO: 3897745 - RNA, 14 nt, Human adenovirus A
cgcgcaaguugacu

SEQ ID NO: 3897746 - RNA, 12 nt, Human adenovirus A
cgcgccacggac

SEQ ID NO: 3897747 - RNA, 20 nt, Human adenovirus A
cgcggccguacaugggcacc

SEQ ID NO: 3897748 - RNA, 14 nt, Human adenovirus A
cgcggggacagcgc

SEQ ID NO: 3897749 - RNA, 20 nt, Human adenovirus A
cgcguggcauuugugccucg

SEQ ID NO: 3897750 - RNA, 19 nt, Human adenovirus A
cgcgugucuucucccugug

SEQ ID NO: 3897751 - RNA, 16 nt, Human adenovirus A
cgcucgucaagccuac

SEQ ID NO: 3897752 - RNA, 21 nt, Human adenovirus A
aacucuaacugcucagcugga

SEQ ID NO: 3897753 - RNA, 23 nt, Human adenovirus A
aacugcuccccucaacagcacag

SEQ ID NO: 3897754 - RNA, 21 nt, Human adenovirus A
aacugggggcguacacuggcu

SEQ ID NO: 3897755 - RNA, 12 nt, Human adenovirus A
aacuuuagaaag

SEQ ID NO: 3897756 - RNA, 19 nt, Human adenovirus A
aacuuucuaccaaggaaaa

SEQ ID NO: 3897757 - RNA, 15 nt, Human adenovirus A
aacuuuuuacuaacu

SEQ ID NO: 3897758 - RNA, 20 nt, Human adenovirus A
aagaaagagaacaaacagug

SEQ ID NO: 3897759 - RNA, 16 nt, Human adenovirus A
aagaaggagaaggcau

SEQ ID NO: 3897760 - RNA, 17 nt, Human adenovirus A
aagaccaaaauuuucaa

SEQ ID NO: 3897761 - RNA, 14 nt, Human adenovirus A
aagaccaauccaaa

SEQ ID NO: 3897762 - RNA, 15 nt, Human adenovirus A
aagacuauagagagg

SEQ ID NO: 3897763 - RNA, 13 nt, Human adenovirus A
aagagcugcugca

SEQ ID NO: 3897764 - RNA, 18 nt, Human adenovirus A
aagagcuuaugcauagcu

SEQ ID NO: 3897765 - RNA, 21 nt, Human adenovirus A
aagcaaaccacauaggcauug

SEQ ID NO: 3897766 - RNA, 12 nt, Human adenovirus A
aagcaaaccacu

SEQ ID NO: 3897767 - RNA, 20 nt, Human adenovirus A
aagcaauaaaacaaggagcc

SEQ ID NO: 3897768 - RNA, 17 nt, Human adenovirus A
aagcagccauaaugccu

SEQ ID NO: 3897769 - RNA, 13 nt, Human adenovirus A
aagcaguagaaag

SEQ ID NO: 3897770 - RNA, 21 nt, Human adenovirus A
aagcauacuuaccaaagccau

SEQ ID NO: 3897771 - RNA, 16 nt, Human adenovirus A
aagcaucacacagaaa

SEQ ID NO: 3897772 - RNA, 18 nt, Human adenovirus A
aagcgacaaagagcuuau

SEQ ID NO: 3897773 - RNA, 18 nt, Human adenovirus A
aagcgacagaguugcuuu

SEQ ID NO: 3897774 - RNA, 23 nt, Human adenovirus A
aagcgcgacuaguccguuuucuu

SEQ ID NO: 3897775 - RNA, 23 nt, Human adenovirus A
aagcgcucgcgcuuuggaggcag

SEQ ID NO: 3897776 - RNA, 23 nt, Human adenovirus A
aagcgguaugucggccugacgcu

SEQ ID NO: 3897777 - RNA, 16 nt, Human adenovirus A
aagcuauuugagccuu

SEQ ID NO: 3897778 - RNA, 13 nt, Human adenovirus A
aagcucuguucaa

SEQ ID NO: 3897779 - RNA, 16 nt, Human adenovirus A
aaggagguuuguaagc

SEQ ID NO: 3897780 - RNA, 22 nt, Human adenovirus A
aaggauugguuccuaauacaaa

SEQ ID NO: 3897781 - RNA, 20 nt, Human adenovirus A
aaggcaucuagccagucaca

SEQ ID NO: 3897782 - RNA, 23 nt, Human adenovirus A
aaggccauguacuugacucuggc

SEQ ID NO: 3897783 - RNA, 12 nt, Human adenovirus A
aaggguccaggg

SEQ ID NO: 3897784 - RNA, 17 nt, Human adenovirus A
aaggguggggugcugcc

SEQ ID NO: 3897785 - RNA, 19 nt, Human adenovirus A
aagguaaugagcgcaguga

SEQ ID NO: 3897786 - RNA, 16 nt, Human adenovirus A
aagguacauuggcauu

SEQ ID NO: 3897787 - RNA, 22 nt, Human adenovirus A
aaguaaaccccuaacugcccag

SEQ ID NO: 3897788 - RNA, 15 nt, Human adenovirus A
aaguaaauuaaaugg

SEQ ID NO: 3897789 - RNA, 17 nt, Human adenovirus A
aagucaacccaaacugu

SEQ ID NO: 3897790 - RNA, 11 nt, Human adenovirus A
aagugccucaa

SEQ ID NO: 3897791 - RNA, 22 nt, Human adenovirus A
aaguuguggauaccacagaaua

SEQ ID NO: 3897792 - RNA, 14 nt, Human adenovirus A
aaguuuuguuucuu

SEQ ID NO: 3897793 - RNA, 14 nt, Human adenovirus A
aauaaaacuuccaa

SEQ ID NO: 3897794 - RNA, 16 nt, Human adenovirus A
aauaaaauuucuagaa

SEQ ID NO: 3897795 - RNA, 15 nt, Human adenovirus A
aauaauaaaaccauu

SEQ ID NO: 3897796 - RNA, 20 nt, Human adenovirus A
aauaaugcauuaccagcagc

SEQ ID NO: 3897797 - RNA, 17 nt, Human adenovirus A
aauacagucaaugcuuc

SEQ ID NO: 3897798 - RNA, 17 nt, Human adenovirus A
aauacugaaaaauagug

SEQ ID NO: 3897799 - RNA, 14 nt, Human adenovirus A
aauacugaacuauu

SEQ ID NO: 3897800 - RNA, 15 nt, Human adenovirus A
aauacuguuaccaau

SEQ ID NO: 3897801 - RNA, 21 nt, Human adenovirus A
aauaggggaugguuuaacauu

SEQ ID NO: 3897802 - RNA, 19 nt, Human adenovirus A
aauaguggcugcaagguca

SEQ ID NO: 3897803 - RNA, 16 nt, Human adenovirus A
aauaguuuaauguuuc

SEQ ID NO: 3897804 - RNA, 14 nt, Human adenovirus A
aaucagaagccagc

SEQ ID NO: 3897805 - RNA, 20 nt, Human adenovirus A
aauccaaggaugacaacauu

SEQ ID NO: 3897806 - RNA, 21 nt, Human adenovirus A
aaucccucgcccgcacaguca

SEQ ID NO: 3897807 - RNA, 16 nt, Human adenovirus A
aaucuacaaacuggaa

SEQ ID NO: 3897808 - RNA, 15 nt, Human adenovirus A
aaugcagcaaacacu

SEQ ID NO: 3897809 - RNA, 15 nt, Human adenovirus A
aaugcagcuguggag

SEQ ID NO: 3897810 - RNA, 22 nt, Human adenovirus A
aaugcaucuuugggacuuugua

SEQ ID NO: 3897811 - RNA, 18 nt, Human adenovirus A
aaugcccccauccaggug

SEQ ID NO: 3897812 - RNA, 20 nt, Human adenovirus A
aaugccuguuuuguauuauu

SEQ ID NO: 3897813 - RNA, 19 nt, Human adenovirus A
aaugcgccugcuuaaaauc

SEQ ID NO: 3897814 - RNA, 22 nt, Human adenovirus A
aauggaacuuuagaaaggaugu

SEQ ID NO: 3897815 - RNA, 19 nt, Human adenovirus A
aauggaguuggaaacugug

SEQ ID NO: 3897816 - RNA, 20 nt, Human adenovirus A
aaugguaggacgcugaaaca

SEQ ID NO: 3897817 - RNA, 22 nt, Human adenovirus A
aaugucuguuauguaugcccag

SEQ ID NO: 3897818 - RNA, 23 nt, Human adenovirus A
aauuucccucuucccaacuguca

SEQ ID NO: 3897819 - RNA, 18 nt, Human adenovirus A
aauuucuaauguggagcu

SEQ ID NO: 3897820 - RNA, 16 nt, Human adenovirus A
aauuuuauuggccuga

SEQ ID NO: 3897821 - RNA, 19 nt, Human adenovirus A
aauuuuuuagauuguuaua

SEQ ID NO: 3897822 - RNA, 20 nt, Human adenovirus A
acaaaucagaagccagcagc

SEQ ID NO: 3897823 - RNA, 21 nt, Human adenovirus A
acaacagcggcguaaacucau

SEQ ID NO: 3897824 - RNA, 22 nt, Human adenovirus A
acaacagcggcguaaacucaug

SEQ ID NO: 3897825 - RNA, 13 nt, Human adenovirus A
acaacaguacagg

SEQ ID NO: 3897826 - RNA, 23 nt, Human adenovirus A
acaacagucaguguccaucagcc

SEQ ID NO: 3897827 - RNA, 14 nt, Human adenovirus A
acaacauugaacuu

SEQ ID NO: 3897828 - RNA, 21 nt, Human adenovirus A
acaaccacucucgcaggcuug

SEQ ID NO: 3897829 - RNA, 16 nt, Human adenovirus A
acaacugcacuugaau

SEQ ID NO: 3897830 - RNA, 15 nt, Human adenovirus A
acaacuuuuaacauu

SEQ ID NO: 3897831 - RNA, 19 nt, Human adenovirus A
acaagaugaguaaagauau

SEQ ID NO: 3897832 - RNA, 17 nt, Human adenovirus A
acaagcacgccaaagcc

SEQ ID NO: 3897833 - RNA, 15 nt, Human adenovirus A
acaagcugcgcugcc

SEQ ID NO: 3897834 - RNA, 18 nt, Human adenovirus A
acaaggaccguuuucugc

SEQ ID NO: 3897835 - RNA, 22 nt, Human adenovirus A
acaaggaccguuuucugcagcg

SEQ ID NO: 3897836 - RNA, 20 nt, Human adenovirus A
acaaggucuuaaacuuucuu

SEQ ID NO: 3897837 - RNA, 14 nt, Human adenovirus A
acaagugaggcgcu

SEQ ID NO: 3897838 - RNA, 19 nt, Human adenovirus A
acaccuuuuguuaauuaag

SEQ ID NO: 3897839 - RNA, 13 nt, Human adenovirus A
acacgcugcccug

SEQ ID NO: 3897840 - RNA, 17 nt, Human adenovirus A
acacgguacuuuuccuu

SEQ ID NO: 3897841 - RNA, 18 nt, Human adenovirus A
acacuuacccuuuuaaug

SEQ ID NO: 3897842 - RNA, 20 nt, Human adenovirus A
acagaguugcuuuuagaugu

SEQ ID NO: 3897843 - RNA, 18 nt, Human adenovirus A
acagcagcaacaaggaaa

SEQ ID NO: 3897844 - RNA, 21 nt, Human adenovirus A
acagcuucagaugacuggaca

SEQ ID NO: 3897845 - RNA, 22 nt, Human adenovirus A
acagcuucagaugacuggacag

SEQ ID NO: 3897846 - RNA, 21 nt, Human adenovirus A
acagcuucuacuuuagaagcc

SEQ ID NO: 3897847 - RNA, 21 nt, Human adenovirus A
acaggaauucugaccacucug

SEQ ID NO: 3897848 - RNA, 19 nt, Human adenovirus A
acagguaguuuaagguggu

SEQ ID NO: 3897849 - RNA, 16 nt, Human adenovirus A
acaguaaccauuacuu

SEQ ID NO: 3897850 - RNA, 16 nt, Human adenovirus A
acaguugaaaaaggaa

SEQ ID NO: 3897851 - RNA, 13 nt, Human adenovirus A
acaguuuaacaca

SEQ ID NO: 3897852 - RNA, 15 nt, Human adenovirus A
acauaauccagcaag

SEQ ID NO: 3897853 - RNA, 23 nt, Human adenovirus A
acauacaacuugcacaaauggac

SEQ ID NO: 3897854 - RNA, 17 nt, Human adenovirus A
acauaggcauugggaau

SEQ ID NO: 3897855 - RNA, 21 nt, Human adenovirus A
acaugaagauuucugcuguca

SEQ ID NO: 3897856 - RNA, 16 nt, Human adenovirus A
acaugguaagcucuug

SEQ ID NO: 3897857 - RNA, 22 nt, Human adenovirus A
acauugcccuguaugcuaacuu

SEQ ID NO: 3897858 - RNA, 12 nt, Human adenovirus A
acauuuuaacug

SEQ ID NO: 3897859 - RNA, 12 nt, Human adenovirus A
accaaacugcag

SEQ ID NO: 3897860 - RNA, 13 nt, Human adenovirus A
accaacaaacacg

SEQ ID NO: 3897861 - RNA, 21 nt, Human adenovirus A
accaagcccucuccaaugaaa

SEQ ID NO: 3897862 - RNA, 20 nt, Human adenovirus A
accaccgaucgcucgcagcg

SEQ ID NO: 3897863 - RNA, 15 nt, Human adenovirus A
accaccucaaaaucu

SEQ ID NO: 3897864 - RNA, 19 nt, Human adenovirus A
accacggccucagcagcgg

SEQ ID NO: 3897865 - RNA, 19 nt, Human adenovirus A
accacucugacacaaaagc

SEQ ID NO: 3897866 - RNA, 18 nt, Human adenovirus A
accagcgucccaaaagca

SEQ ID NO: 3897867 - RNA, 11 nt, Human adenovirus A
accaggaagcu

SEQ ID NO: 3897868 - RNA, 18 nt, Human adenovirus A
accauguaauaauugagu

SEQ ID NO: 3897869 - RNA, 15 nt, Human adenovirus A
accauugaaaccagc

SEQ ID NO: 3897870 - RNA, 15 nt, Human adenovirus A
auccuguaguugcag

SEQ ID NO: 3897871 - RNA, 14 nt, Human adenovirus A
aucgcaagcaggcg

SEQ ID NO: 3897872 - RNA, 16 nt, Human adenovirus A
aucguauuauggcuuu

SEQ ID NO: 3897873 - RNA, 15 nt, Human adenovirus A
aucucagaaagccaa

SEQ ID NO: 3897874 - RNA, 13 nt, Human adenovirus A
aucuccugccacc

SEQ ID NO: 3897875 - RNA, 23 nt, Human adenovirus A
aucuggagcggucuuaaaaauuu

SEQ ID NO: 3897876 - RNA, 13 nt, Human adenovirus A
aucuuaaauggaa

SEQ ID NO: 3897877 - RNA, 19 nt, Human adenovirus A
augaaguuuugauuguauu

SEQ ID NO: 3897878 - RNA, 16 nt, Human adenovirus A
augauaaccuugcaaa

SEQ ID NO: 3897879 - RNA, 17 nt, Human adenovirus A
augauagagauaagcag

SEQ ID NO: 3897880 - RNA, 22 nt, Human adenovirus A
augauuuaagaguaguacaaau

SEQ ID NO: 3897881 - RNA, 12 nt, Human adenovirus A
augcaaagccag

SEQ ID NO: 3897882 - RNA, 14 nt, Human adenovirus A
augcaaagccagcc

SEQ ID NO: 3897883 - RNA, 14 nt, Human adenovirus A
augcagaggaaacc

SEQ ID NO: 3897884 - RNA, 18 nt, Human adenovirus A
augcgcauacccauucca

SEQ ID NO: 3897885 - RNA, 17 nt, Human adenovirus A
augcgggcagccaggcg

SEQ ID NO: 3897886 - RNA, 17 nt, Human adenovirus A
augcgggggaugaagga

SEQ ID NO: 3897887 - RNA, 15 nt, Human adenovirus A
augcuaugcaggcag

SEQ ID NO: 3897888 - RNA, 18 nt, Human adenovirus A
auggaaaaacuuggaaac

SEQ ID NO: 3897889 - RNA, 16 nt, Human adenovirus A
auggaaccccaaaucg

SEQ ID NO: 3897890 - RNA, 14 nt, Human adenovirus A
auggaauuacauuu

SEQ ID NO: 3897891 - RNA, 16 nt, Human adenovirus A
auggagugucacugcc

SEQ ID NO: 3897892 - RNA, 21 nt, Human adenovirus A
auggaguuggaaacugugcug

SEQ ID NO: 3897893 - RNA, 14 nt, Human adenovirus A
auggaucuggagcc

SEQ ID NO: 3897894 - RNA, 15 nt, Human adenovirus A
auggaugcgcuccug

SEQ ID NO: 3897895 - RNA, 17 nt, Human adenovirus A
auggcugaagaggaggg

SEQ ID NO: 3897896 - RNA, 23 nt, Human adenovirus A
auggcuucguaaaagucuacugc

SEQ ID NO: 3897897 - RNA, 12 nt, Human adenovirus A
augggaggagga

SEQ ID NO: 3897898 - RNA, 20 nt, Human adenovirus A
augggguggagauuuaaaaa

SEQ ID NO: 3897899 - RNA, 15 nt, Human adenovirus A
auggugauuaaauau

SEQ ID NO: 3897900 - RNA, 16 nt, Human adenovirus A
augguguuaugaaucu

SEQ ID NO: 3897901 - RNA, 23 nt, Human adenovirus A
auguaaacccuuuuaaccaccac

SEQ ID NO: 3897902 - RNA, 20 nt, Human adenovirus A
auguaaaggaggcgcuggcu

SEQ ID NO: 3897903 - RNA, 14 nt, Human adenovirus A
auguaucuggacau

SEQ ID NO: 3897904 - RNA, 14 nt, Human adenovirus A
augucgaaugcagg

SEQ ID NO: 3897905 - RNA, 15 nt, Human adenovirus A
augugauaacccuga

SEQ ID NO: 3897906 - RNA, 17 nt, Human adenovirus A
augugaugaaaguagaa

SEQ ID NO: 3897907 - RNA, 14 nt, Human adenovirus A
augugaugccggca

SEQ ID NO: 3897908 - RNA, 22 nt, Human adenovirus A
augugcuauuguuaacacugcc

SEQ ID NO: 3897909 - RNA, 15 nt, Human adenovirus A
auguguugugcacuu

SEQ ID NO: 3897910 - RNA, 23 nt, Human adenovirus A
auguguugugcacuuccuucaga

SEQ ID NO: 3897911 - RNA, 19 nt, Human adenovirus A
auguuaaauuaaagaugcc

SEQ ID NO: 3897912 - RNA, 13 nt, Human adenovirus A
auguuaaguuugg

SEQ ID NO: 3897913 - RNA, 19 nt, Human adenovirus A
auuaaaagggaagccaugg

SEQ ID NO: 3897914 - RNA, 21 nt, Human adenovirus A
auuaacuaagugguugggaac

SEQ ID NO: 3897915 - RNA, 14 nt, Human adenovirus A
auuacaugcuggau

SEQ ID NO: 3897916 - RNA, 23 nt, Human adenovirus A
auuaggcuuucuuccauuugauc

SEQ ID NO: 3897917 - RNA, 19 nt, Human adenovirus A
auuaguaacuccgggagug

SEQ ID NO: 3897918 - RNA, 14 nt, Human adenovirus A
auuaucaugaaacu

SEQ ID NO: 3897919 - RNA, 20 nt, Human adenovirus A
auuaugcuggaaccugaagu

SEQ ID NO: 3897920 - RNA, 21 nt, Human adenovirus A
auucagcuaacaaugcagcaa

SEQ ID NO: 3897921 - RNA, 18 nt, Human adenovirus A
auucauauuguggagaac

SEQ ID NO: 3897922 - RNA, 18 nt, Human adenovirus A
auucccagguaauuuuca

SEQ ID NO: 3897923 - RNA, 13 nt, Human adenovirus A
auuccgcagugga

SEQ ID NO: 3897924 - RNA, 20 nt, Human adenovirus A
auuccuuuggacgagggaaa

SEQ ID NO: 3897925 - RNA, 18 nt, Human adenovirus A
auucgcagcgcacuggca

SEQ ID NO: 3897926 - RNA, 16 nt, Human adenovirus A
auucgcgugccaggca

SEQ ID NO: 3897927 - RNA, 18 nt, Human adenovirus A
auucuggagaauaagcau

SEQ ID NO: 3897928 - RNA, 14 nt, Human adenovirus A
auucuguuggacac

SEQ ID NO: 3897929 - RNA, 18 nt, Human adenovirus A
auucuuccacuguuguau

SEQ ID NO: 3897930 - RNA, 18 nt, Human adenovirus A
auugaagggaauggcuau

SEQ ID NO: 3897931 - RNA, 15 nt, Human adenovirus A
auugaauaaaagcau

SEQ ID NO: 3897932 - RNA, 20 nt, Human adenovirus A
auugccgcacggccaaugcc

SEQ ID NO: 3897933 - RNA, 16 nt, Human adenovirus A
auugcgauaaacugga

SEQ ID NO: 3897934 - RNA, 21 nt, Human adenovirus A
auuggaguacaagcuugacug

SEQ ID NO: 3897935 - RNA, 14 nt, Human adenovirus A
auuguuaacacugc

SEQ ID NO: 3897936 - RNA, 14 nt, Human adenovirus A
auuuacugcagccu

SEQ ID NO: 3897937 - RNA, 15 nt, Human adenovirus A
auuucacaagacaca

SEQ ID NO: 3897938 - RNA, 14 nt, Human adenovirus A
auuucccucuuccc

SEQ ID NO: 3897939 - RNA, 16 nt, Human adenovirus A
auuucccucuucccaa

SEQ ID NO: 3897940 - RNA, 21 nt, Human adenovirus A
auuucgauaaacaaaagcaaa

SEQ ID NO: 3897941 - RNA, 14 nt, Human adenovirus A
auuucuuccuccug

SEQ ID NO: 3897942 - RNA, 18 nt, Human adenovirus A
auuucuuguucuuccucu

SEQ ID NO: 3897943 - RNA, 12 nt, Human adenovirus A
auuugaaugcgu

SEQ ID NO: 3897944 - RNA, 21 nt, Human adenovirus A
auuugcugaaaaaagucugga

SEQ ID NO: 3897945 - RNA, 15 nt, Human adenovirus A
auuuguugcuguugc

SEQ ID NO: 3897946 - RNA, 16 nt, Human adenovirus A
auuuugccagcucuug

SEQ ID NO: 3897947 - RNA, 16 nt, Human adenovirus A
caaaaaguaaacuguc

SEQ ID NO: 3897948 - RNA, 14 nt, Human adenovirus A
caaaaaguaacaac

SEQ ID NO: 3897949 - RNA, 12 nt, Human adenovirus A
caaaacacaaau

SEQ ID NO: 3897950 - RNA, 20 nt, Human adenovirus A
caaaagauccguacaaggca

SEQ ID NO: 3897951 - RNA, 23 nt, Human adenovirus A
caaaauaccccuauccugucgag

SEQ ID NO: 3897952 - RNA, 17 nt, Human adenovirus A
caaaaucuaagccaugc

SEQ ID NO: 3897953 - RNA, 23 nt, Human adenovirus A
gagcucccggaggaagcggcggu

SEQ ID NO: 3897954 - RNA, 17 nt, Human adenovirus A
gagcugcugcaggccuu

SEQ ID NO: 3897955 - RNA, 21 nt, Human adenovirus A
gaggcgcgcgaguuaagaaaa

SEQ ID NO: 3897956 - RNA, 14 nt, Human adenovirus A
gaggcgcuggcuca

SEQ ID NO: 3897957 - RNA, 17 nt, Human adenovirus A
gaggcguagaugugcug

SEQ ID NO: 3897958 - RNA, 13 nt, Human adenovirus A
gaggcuggcacgc

SEQ ID NO: 3897959 - RNA, 14 nt, Human adenovirus A
gaggucuccauguc

SEQ ID NO: 3897960 - RNA, 15 nt, Human adenovirus A
gagucucaaaagcag

SEQ ID NO: 3897961 - RNA, 21 nt, Human adenovirus A
gaguuaggucaucguaggaca

SEQ ID NO: 3897962 - RNA, 22 nt, Human adenovirus A
gauacagcgcugauuaugcauu

SEQ ID NO: 3897963 - RNA, 14 nt, Human adenovirus A
gauagcaagcguaa

SEQ ID NO: 3897964 - RNA, 13 nt, Human adenovirus A
gauagcaccugcc

SEQ ID NO: 3897965 - RNA, 18 nt, Human adenovirus A
gauauaguacugcuucca

SEQ ID NO: 3897966 - RNA, 23 nt, Human adenovirus A
gauauaguacugcuuccagguug

SEQ ID NO: 3897967 - RNA, 20 nt, Human adenovirus A
gaucaacgacuaaaacaaau

SEQ ID NO: 3897968 - RNA, 18 nt, Human adenovirus A
gaucggcacgagccagcu

SEQ ID NO: 3897969 - RNA, 14 nt, Human adenovirus A
gaucuagaaauuga

SEQ ID NO: 3897970 - RNA, 21 nt, Human adenovirus A
gaucuagaaauugauggaaga

SEQ ID NO: 3897971 - RNA, 22 nt, Human adenovirus A
gaucuucggguggacggagcca

SEQ ID NO: 3897972 - RNA, 20 nt, Human adenovirus A
gaugaaaaacgagcagcaaa

SEQ ID NO: 3897973 - RNA, 21 nt, Human adenovirus A
gaugcauaaugcggacgggcg

SEQ ID NO: 3897974 - RNA, 20 nt, Human adenovirus A
gaugcaugggcuaaaccaag

SEQ ID NO: 3897975 - RNA, 16 nt, Human adenovirus A
gaugcgagcaauaacc

SEQ ID NO: 3897976 - RNA, 17 nt, Human adenovirus A
gaugcgggcagccaggc

SEQ ID NO: 3897977 - RNA, 16 nt, Human adenovirus A
gauggaucaaaaacaa

SEQ ID NO: 3897978 - RNA, 22 nt, Human adenovirus A
gauggauuaccuucaccgcgcu

SEQ ID NO: 3897979 - RNA, 20 nt, Human adenovirus A
gauggguguuuggcagcaau

SEQ ID NO: 3897980 - RNA, 19 nt, Human adenovirus A
gauuaaauauaucuuuuaa

SEQ ID NO: 3897981 - RNA, 22 nt, Human adenovirus A
gauuacaugucaaugcagcugu

SEQ ID NO: 3897982 - RNA, 16 nt, Human adenovirus A
gauuaugguucagcuu

SEQ ID NO: 3897983 - RNA, 17 nt, Human adenovirus A
gauucauauuguggaga

SEQ ID NO: 3897984 - RNA, 14 nt, Human adenovirus A
gauucuucuuccca

SEQ ID NO: 3897985 - RNA, 15 nt, Human adenovirus A
gauugcgaacaacaa

SEQ ID NO: 3897986 - RNA, 14 nt, Human adenovirus A
gauuucagcuucua

SEQ ID NO: 3897987 - RNA, 15 nt, Human adenovirus A
gauuucugcugucau

SEQ ID NO: 3897988 - RNA, 17 nt, Human adenovirus A
gcaaagaaacacaugau

SEQ ID NO: 3897989 - RNA, 17 nt, Human adenovirus A
gcaaauauaaaagcaca

SEQ ID NO: 3897990 - RNA, 17 nt, Human adenovirus A
gcaaaucucagaaagcc

SEQ ID NO: 3897991 - RNA, 20 nt, Human adenovirus A
gcaaaugcauuaucaugaaa

SEQ ID NO: 3897992 - RNA, 19 nt, Human adenovirus A
gcaaaugcccugcaaaaag

SEQ ID NO: 3897993 - RNA, 18 nt, Human adenovirus A
gcaaauuacgcaacaacu

SEQ ID NO: 3897994 - RNA, 20 nt, Human adenovirus A
gcaacagcagcaacaaggaa

SEQ ID NO: 3897995 - RNA, 22 nt, Human adenovirus A
gcaacauaccauauuuucuuua

SEQ ID NO: 3897996 - RNA, 23 nt, Human adenovirus A
gcaacuuuuuaaccacuguagug

SEQ ID NO: 3897997 - RNA, 16 nt, Human adenovirus A
gcaagaggagaaggag

SEQ ID NO: 3897998 - RNA, 18 nt, Human adenovirus A
gcaagcgugcaaacagac

SEQ ID NO: 3897999 - RNA, 20 nt, Human adenovirus A
gcaaguguaauuuuccagcg

SEQ ID NO: 3898000 - RNA, 17 nt, Human adenovirus A
gcaauaaaauaggggua

SEQ ID NO: 3898001 - RNA, 16 nt, Human adenovirus A
gcaauauuccagcucu

SEQ ID NO: 3898002 - RNA, 20 nt, Human adenovirus A
gcacaggcggguaagagcag

SEQ ID NO: 3898003 - RNA, 23 nt, Human adenovirus A
gcaccuugcaggacgcagaagcu

SEQ ID NO: 3898004 - RNA, 16 nt, Human adenovirus A
gcacgagccagcugaa

SEQ ID NO: 3898005 - RNA, 21 nt, Human adenovirus A
gcacugaaaaaccaacaaaca

SEQ ID NO: 3898006 - RNA, 14 nt, Human adenovirus A
gcacugggccagga

SEQ ID NO: 3898007 - RNA, 15 nt, Human adenovirus A
gcagacaagguggcc

SEQ ID NO: 3898008 - RNA, 13 nt, Human adenovirus A
gcagacaguggcu

SEQ ID NO: 3898009 - RNA, 18 nt, Human adenovirus A
gcagaccuacgguggcag

SEQ ID NO: 3898010 - RNA, 18 nt, Human adenovirus A
gcagcaaaugcccugcaa

SEQ ID NO: 3898011 - RNA, 16 nt, Human adenovirus A
gcagcaacaaggaaag

SEQ ID NO: 3898012 - RNA, 17 nt, Human adenovirus A
gcagcaaugcuuggaag

SEQ ID NO: 3898013 - RNA, 15 nt, Human adenovirus A
gcagcaccuggagcg

SEQ ID NO: 3898014 - RNA, 18 nt, Human adenovirus A
gcaggcuggaggugcagg

SEQ ID NO: 3898015 - RNA, 16 nt, Human adenovirus A
gcaguauaccucuaaa

SEQ ID NO: 3898016 - RNA, 20 nt, Human adenovirus A
gcaguauaccucuaaaaaca

SEQ ID NO: 3898017 - RNA, 20 nt, Human adenovirus A
gcagucuugaaugcucugga

SEQ ID NO: 3898018 - RNA, 19 nt, Human adenovirus A
gcaguuuagaggccacacu

SEQ ID NO: 3898019 - RNA, 15 nt, Human adenovirus A
gcauagaaaaagcua

SEQ ID NO: 3898020 - RNA, 14 nt, Human adenovirus A
gcaucgacagugag

SEQ ID NO: 3898021 - RNA, 15 nt, Human adenovirus A
gcaucugcacgguaa

SEQ ID NO: 3898022 - RNA, 12 nt, Human adenovirus A
gcaucuguucca

SEQ ID NO: 3898023 - RNA, 14 nt, Human adenovirus A
gcaucuugcaugaa

SEQ ID NO: 3898024 - RNA, 19 nt, Human adenovirus A
gcauggaaaaacuuggaaa

SEQ ID NO: 3898025 - RNA, 19 nt, Human adenovirus A
gcauguuugacaagauugu

SEQ ID NO: 3898026 - RNA, 13 nt, Human adenovirus A
gcauuaggccauc

SEQ ID NO: 3898027 - RNA, 12 nt, Human adenovirus A
gcauuaguucuu

SEQ ID NO: 3898028 - RNA, 21 nt, Human adenovirus A
gcauuccccauccaaaaccag

SEQ ID NO: 3898029 - RNA, 18 nt, Human adenovirus A
gccaagcgcucgcgcuuu

SEQ ID NO: 3898030 - RNA, 14 nt, Human adenovirus A
gccaaucaggcugu

SEQ ID NO: 3898031 - RNA, 13 nt, Human adenovirus A
gccacaccuccac

SEQ ID NO: 3898032 - RNA, 15 nt, Human adenovirus A
gccacaccuccaccc

SEQ ID NO: 3898033 - RNA, 17 nt, Human adenovirus A
gccacaccuccacccaa

SEQ ID NO: 3898034 - RNA, 15 nt, Human adenovirus A
gccacaugggaaggg

SEQ ID NO: 3898035 - RNA, 15 nt, Human adenovirus A
gccaccauagccccu

SEQ ID NO: 3898036 - RNA, 23 nt, Human adenovirus A
gccacccuacgugccuccccgcu

SEQ ID NO: 3898037 - RNA, 21 nt, Human adenovirus A
gccacgcuuugaccggucagg

SEQ ID NO: 3898038 - RNA, 22 nt, Human adenovirus A
gccacgcuuugaccggucaggc

SEQ ID NO: 3898039 - RNA, 14 nt, Human adenovirus A
gccagaacccacua

SEQ ID NO: 3898040 - RNA, 16 nt, Human adenovirus A
gccagcagcaaagaaa

SEQ ID NO: 3898041 - RNA, 17 nt, Human adenovirus A
gccaggguaaugguggc

SEQ ID NO: 3898042 - RNA, 18 nt, Human adenovirus A
gccaguacacuugggaaa

SEQ ID NO: 3898043 - RNA, 21 nt, Human adenovirus A
gccaguucguacgcguccacc

SEQ ID NO: 3898044 - RNA, 18 nt, Human adenovirus A
gccaucggccauaggcau

SEQ ID NO: 3898045 - RNA, 16 nt, Human adenovirus A
gccaugcaaagccagc

SEQ ID NO: 3898046 - RNA, 17 nt, Human adenovirus A
gccauuccugcagcacu

SEQ ID NO: 3898047 - RNA, 17 nt, Human adenovirus A
gccauuuuggaagcagu

SEQ ID NO: 3898048 - RNA, 16 nt, Human adenovirus A
gcccacaaggaaauga

SEQ ID NO: 3898049 - RNA, 15 nt, Human adenovirus A
gcccagcuguucuua

SEQ ID NO: 3898050 - RNA, 18 nt, Human adenovirus A
gcccauguaucagcagcc

SEQ ID NO: 3898051 - RNA, 12 nt, Human adenovirus A
gccccacuuccu

SEQ ID NO: 3898052 - RNA, 21 nt, Human adenovirus A
gccccauccguggcaggccau

SEQ ID NO: 3898053 - RNA, 13 nt, Human adenovirus A
gcccgccgccgga

SEQ ID NO: 3898054 - RNA, 17 nt, Human adenovirus A
gccgacguugcaagagg

SEQ ID NO: 3898055 - RNA, 14 nt, Human adenovirus A
gccgcaaaacaggc

SEQ ID NO: 3898056 - RNA, 15 nt, Human adenovirus A
gccguaccuuuuguu

SEQ ID NO: 3898057 - RNA, 15 nt, Human adenovirus A
gccuaaaagcuauuu

SEQ ID NO: 3898058 - RNA, 16 nt, Human adenovirus A
gccuacacaacacaaa

SEQ ID NO: 3898059 - RNA, 17 nt, Human adenovirus A
gccucauacaagagcua

SEQ ID NO: 3898060 - RNA, 15 nt, Human adenovirus A
gccugacgcucuggc

SEQ ID NO: 3898061 - RNA, 22 nt, Human adenovirus A
gccuguuuuguauuauugaagg

SEQ ID NO: 3898062 - RNA, 16 nt, Human adenovirus A
gccuucauuccuucag

SEQ ID NO: 3898063 - RNA, 21 nt, Human adenovirus A
gcgacaaagagcuuaugcaua

SEQ ID NO: 3898064 - RNA, 18 nt, Human adenovirus A
gcgagcgacugcugcgug

SEQ ID NO: 3898065 - RNA, 13 nt, Human adenovirus A
gcgagcugccacc

SEQ ID NO: 3898066 - RNA, 21 nt, Human adenovirus A
gcgagucaccaucacugacgc

SEQ ID NO: 3898067 - RNA, 17 nt, Human adenovirus A
gcgcaccaucuccauuc

SEQ ID NO: 3898068 - RNA, 16 nt, Human adenovirus A
gcgcacugggccagga

SEQ ID NO: 3898069 - RNA, 14 nt, Human adenovirus A
uccaauuuguggag

SEQ ID NO: 3898070 - RNA, 21 nt, Human adenovirus A
uccaggggaaacccauuugca

SEQ ID NO: 3898071 - RNA, 15 nt, Human adenovirus A
uccagucauagcaac

SEQ ID NO: 3898072 - RNA, 22 nt, Human adenovirus A
uccauaaggcggcguccuuucu

SEQ ID NO: 3898073 - RNA, 19 nt, Human adenovirus A
uccaucuguuuacuucaau

SEQ ID NO: 3898074 - RNA, 23 nt, Human adenovirus A
ucccagcuaacgccaccagcgug

SEQ ID NO: 3898075 - RNA, 17 nt, Human adenovirus A
ucccauuggucccaucc

SEQ ID NO: 3898076 - RNA, 23 nt, Human adenovirus A
ucccgcgguuuuggcggccaugc

SEQ ID NO: 3898077 - RNA, 14 nt, Human adenovirus A
ucccucuucccaac

SEQ ID NO: 3898078 - RNA, 15 nt, Human adenovirus A
uccggaaacaacacg

SEQ ID NO: 3898079 - RNA, 15 nt, Human adenovirus A
uccuaaaacugcucu

SEQ ID NO: 3898080 - RNA, 20 nt, Human adenovirus A
uccuaccacuguacuuuugc

SEQ ID NO: 3898081 - RNA, 22 nt, Human adenovirus A
uccuaggcaacguuggcagcga

SEQ ID NO: 3898082 - RNA, 13 nt, Human adenovirus A
uccuccuggaggu

SEQ ID NO: 3898083 - RNA, 21 nt, Human adenovirus A
uccucuguaguuucuuuacaa

SEQ ID NO: 3898084 - RNA, 15 nt, Human adenovirus A
uccugcgacaaaugc

SEQ ID NO: 3898085 - RNA, 19 nt, Human adenovirus A
uccuguaguugcagcagaa

SEQ ID NO: 3898086 - RNA, 15 nt, Human adenovirus A
ucgagaacuaaacaa

SEQ ID NO: 3898087 - RNA, 20 nt, Human adenovirus A
ucgcaauuagggccagcauu

SEQ ID NO: 3898088 - RNA, 20 nt, Human adenovirus A
ucgccagcaagugccuccuc

SEQ ID NO: 3898089 - RNA, 12 nt, Human adenovirus A
ucgccagcagcc

SEQ ID NO: 3898090 - RNA, 23 nt, Human adenovirus A
ucgccuaaaaacuaaagaaacuc

SEQ ID NO: 3898091 - RNA, 16 nt, Human adenovirus A
ucgcgcauaggaggag

SEQ ID NO: 3898092 - RNA, 22 nt, Human adenovirus A
ucgcuuucaaccaagcccucuc

SEQ ID NO: 3898093 - RNA, 20 nt, Human adenovirus A
ucggcacgagccagcugaac

SEQ ID NO: 3898094 - RNA, 17 nt, Human adenovirus A
ucgggcgaguucuccau

SEQ ID NO: 3898095 - RNA, 16 nt, Human adenovirus A
ucguccaagaucuuug

SEQ ID NO: 3898096 - RNA, 23 nt, Human adenovirus A
ucuaaaagagccacagcucugau

SEQ ID NO: 3898097 - RNA, 17 nt, Human adenovirus A
ucuaaauccgcauuggu

SEQ ID NO: 3898098 - RNA, 18 nt, Human adenovirus A
ucuaacugcucagcugga

SEQ ID NO: 3898099 - RNA, 13 nt, Human adenovirus A
ucuaccaaggaaa

SEQ ID NO: 3898100 - RNA, 21 nt, Human adenovirus A
ucuacccaguuuuugcagugc

SEQ ID NO: 3898101 - RNA, 20 nt, Human adenovirus A
ucuacuaacaacuccagaug

SEQ ID NO: 3898102 - RNA, 14 nt, Human adenovirus A
ucuacucauacccc

SEQ ID NO: 3898103 - RNA, 20 nt, Human adenovirus A
ucuagccaacauccagugcg

SEQ ID NO: 3898104 - RNA, 13 nt, Human adenovirus A
ucuaguccaagca

SEQ ID NO: 3898105 - RNA, 13 nt, Human adenovirus A
ucucagugucauu

SEQ ID NO: 3898106 - RNA, 14 nt, Human adenovirus A
ucucagugucauuu

SEQ ID NO: 3898107 - RNA, 20 nt, Human adenovirus A
ucuccuaaauauccaaagua

SEQ ID NO: 3898108 - RNA, 13 nt, Human adenovirus A
ucucgauccagca

SEQ ID NO: 3898109 - RNA, 17 nt, Human adenovirus A
ucucgcagcucuuauuu

SEQ ID NO: 3898110 - RNA, 12 nt, Human adenovirus A
ucugcugucauu

SEQ ID NO: 3898111 - RNA, 19 nt, Human adenovirus A
ucuggaucuucaaacaccu

SEQ ID NO: 3898112 - RNA, 16 nt, Human adenovirus A
ucugggguuaagcagu

SEQ ID NO: 3898113 - RNA, 23 nt, Human adenovirus A
ucuuaguuuggcagacaaggugg

SEQ ID NO: 3898114 - RNA, 22 nt, Human adenovirus A
ucuucguggagaagcggagcca

SEQ ID NO: 3898115 - RNA, 18 nt, Human adenovirus A
ucuugcauuaaccuuucc

SEQ ID NO: 3898116 - RNA, 20 nt, Human adenovirus A
ucuugcuuuaagggcuggcg

SEQ ID NO: 3898117 - RNA, 11 nt, Human adenovirus A
ucuuggagugu

SEQ ID NO: 3898118 - RNA, 17 nt, Human adenovirus A
ucuuuacaacuguaugc

SEQ ID NO: 3898119 - RNA, 17 nt, Human adenovirus A
ugaaaaacgagcagcaa

SEQ ID NO: 3898120 - RNA, 13 nt, Human adenovirus A
ugaaaguagaaau

SEQ ID NO: 3898121 - RNA, 15 nt, Human adenovirus A
ugaaaguagaaaucu

SEQ ID NO: 3898122 - RNA, 22 nt, Human adenovirus A
ugaaauaaagcguucuguggau

SEQ ID NO: 3898123 - RNA, 13 nt, Human adenovirus A
ugaacaaaaucac

SEQ ID NO: 3898124 - RNA, 23 nt, Human adenovirus A
ugaacgucgccugaguuaucuug

SEQ ID NO: 3898125 - RNA, 18 nt, Human adenovirus A
ugaaguguaucagucugg

SEQ ID NO: 3898126 - RNA, 22 nt, Human adenovirus A
ugaaguuuugauuguauuuuga

SEQ ID NO: 3898127 - RNA, 19 nt, Human adenovirus A
ugaauaagccaccgcucau

SEQ ID NO: 3898128 - RNA, 15 nt, Human adenovirus A
ugaauacuuaaauga

SEQ ID NO: 3898129 - RNA, 15 nt, Human adenovirus A
ugaaugcucuggaca

SEQ ID NO: 3898130 - RNA, 19 nt, Human adenovirus A
ugaauggaacaccagcauu

SEQ ID NO: 3898131 - RNA, 18 nt, Human adenovirus A
ugaauuguauaaauucuu

SEQ ID NO: 3898132 - RNA, 21 nt, Human adenovirus A
ugaauuguauaaauucuuaaa

SEQ ID NO: 3898133 - RNA, 14 nt, Human adenovirus A
ugacaacauugccc

SEQ ID NO: 3898134 - RNA, 13 nt, Human adenovirus A
ugacacaucagac

SEQ ID NO: 3898135 - RNA, 19 nt, Human adenovirus A
ugacacuguggacaacucc

SEQ ID NO: 3898136 - RNA, 14 nt, Human adenovirus A
ugacauugcuucau

SEQ ID NO: 3898137 - RNA, 21 nt, Human adenovirus A
ugaccccaucuuguuuccagu

SEQ ID NO: 3898138 - RNA, 23 nt, Human adenovirus A
ugaccgaauccacaaagcaguaa

SEQ ID NO: 3898139 - RNA, 20 nt, Human adenovirus A
ugacuggacagcggccaugg

SEQ ID NO: 3898140 - RNA, 14 nt, Human adenovirus A
ugagacuucccaca

SEQ ID NO: 3898141 - RNA, 21 nt, Human adenovirus A
ugagacuucccacagccagug

SEQ ID NO: 3898142 - RNA, 17 nt, Human adenovirus A
ugagccauguugugcau

SEQ ID NO: 3898143 - RNA, 20 nt, Human adenovirus A
ugagcccgaaguugacuggc

SEQ ID NO: 3898144 - RNA, 17 nt, Human adenovirus A
ugaggagcugagaagug

SEQ ID NO: 3898145 - RNA, 15 nt, Human adenovirus A
ugagugggcagaauu

SEQ ID NO: 3898146 - RNA, 21 nt, Human adenovirus A
ugauagagauaagcaggaaaa

SEQ ID NO: 3898147 - RNA, 15 nt, Human adenovirus A
ugauaucuugaaucu

SEQ ID NO: 3898148 - RNA, 20 nt, Human adenovirus A
ugaucaauuucuuccuccug

SEQ ID NO: 3898149 - RNA, 16 nt, Human adenovirus A
ugaucugucagugaaa

SEQ ID NO: 3898150 - RNA, 17 nt, Human adenovirus A
ugauggaucuggagcca

SEQ ID NO: 3898151 - RNA, 14 nt, Human adenovirus A
ugauuucagcuucu

SEQ ID NO: 3898152 - RNA, 14 nt, Human adenovirus A
ugauuuuacagaga

SEQ ID NO: 3898153 - RNA, 16 nt, Human adenovirus A
ugauuuuauccuacaa

SEQ ID NO: 3898154 - RNA, 12 nt, Human adenovirus A
ugcaaacagcaa

SEQ ID NO: 3898155 - RNA, 19 nt, Human adenovirus A
ugcaagaggagaaggagga

SEQ ID NO: 3898156 - RNA, 14 nt, Human adenovirus A
ugcaagugauaguu

SEQ ID NO: 3898157 - RNA, 12 nt, Human adenovirus A
ugcaaugcuuaa

SEQ ID NO: 3898158 - RNA, 19 nt, Human adenovirus A
ugcacaucgccggucagga

SEQ ID NO: 3898159 - RNA, 17 nt, Human adenovirus A
ugcacguacuagccccu

SEQ ID NO: 3898160 - RNA, 14 nt, Human adenovirus A
ugcagagcauugug

SEQ ID NO: 3898161 - RNA, 19 nt, Human adenovirus A
ugcagccuacaaugcaacu

SEQ ID NO: 3898162 - RNA, 16 nt, Human adenovirus A
ugcaggacgcagaagc

SEQ ID NO: 3898163 - RNA, 16 nt, Human adenovirus A
ugcaggaucaaaacac

SEQ ID NO: 3898164 - RNA, 21 nt, Human adenovirus A
ugcagguaauacuuaauuucu

SEQ ID NO: 3898165 - RNA, 14 nt, Human adenovirus A
ugcauagcuuacaa

SEQ ID NO: 3898166 - RNA, 17 nt, Human adenovirus A
ugcaucauuacuucaaa

SEQ ID NO: 3898167 - RNA, 17 nt, Human adenovirus A
ugcaucuacgaacgcaa

SEQ ID NO: 3898168 - RNA, 17 nt, Human adenovirus A
ugcauguccagauuuca

SEQ ID NO: 3898169 - RNA, 16 nt, Human adenovirus A
ugcauuaccagcagcc

SEQ ID NO: 3898170 - RNA, 20 nt, Human adenovirus A
ugccggauugcgaacaacaa

SEQ ID NO: 3898171 - RNA, 15 nt, Human adenovirus A
ugcgaacaacaacaa

SEQ ID NO: 3898172 - RNA, 17 nt, Human adenovirus A
ugcguagcaguaucagu

SEQ ID NO: 3898173 - RNA, 15 nt, Human adenovirus A
ugcuaaauuggccuu

SEQ ID NO: 3898174 - RNA, 20 nt, Human adenovirus A
ugcuauuauugagcauuauu

SEQ ID NO: 3898175 - RNA, 22 nt, Human adenovirus A
ugcuccaguuauugacaaacgc

SEQ ID NO: 3898176 - RNA, 18 nt, Human adenovirus A
ugcucguaaaaucuacaa

SEQ ID NO: 3898177 - RNA, 14 nt, Human adenovirus A
ugcucuggacaugg

SEQ ID NO: 3898178 - RNA, 21 nt, Human adenovirus A
ugcugcacaauuaucgcucuu

SEQ ID NO: 3898179 - RNA, 21 nt, Human adenovirus A
ugcuggugaaagaucacagcc

SEQ ID NO: 3898180 - RNA, 14 nt, Human adenovirus A
ugcugucacugagc

SEQ ID NO: 3898181 - RNA, 23 nt, Human adenovirus A
ugcuucauugaauuaccagaaug

SEQ ID NO: 3898182 - RNA, 17 nt, Human adenovirus A
uggaaaaacuuggaaac

SEQ ID NO: 3898183 - RNA, 18 nt, Human adenovirus A
uggaaagcauuuuggauu

SEQ ID NO: 3898184 - RNA, 23 nt, Human adenovirus A
uggaaauuaauuugcaggcuaau

SEQ ID NO: 3898185 - RNA, 16 nt, Human adenovirus A
aagcuugaaacucuaa

SEQ ID NO: 3898186 - RNA, 11 nt, Human adenovirus A
aaggaaaguaa

SEQ ID NO: 3898187 - RNA, 17 nt, Human adenovirus A
aaggaaaugauggcuuu

SEQ ID NO: 3898188 - RNA, 22 nt, Human adenovirus A
aaggaagccacaugggaagggu

SEQ ID NO: 3898189 - RNA, 23 nt, Human adenovirus A
aaggaagcugcuguucuuaguag

SEQ ID NO: 3898190 - RNA, 13 nt, Human adenovirus A
aaggagaaaagcg

SEQ ID NO: 3898191 - RNA, 17 nt, Human adenovirus A
aaggauugguuccuaau

SEQ ID NO: 3898192 - RNA, 17 nt, Human adenovirus A
aaggcauuggaaagcag

SEQ ID NO: 3898193 - RNA, 20 nt, Human adenovirus A
aaggcgcuccauccaaaacu

SEQ ID NO: 3898194 - RNA, 17 nt, Human adenovirus A
aagggcgcccuccaccg

SEQ ID NO: 3898195 - RNA, 14 nt, Human adenovirus A
aaggggaggacccc

SEQ ID NO: 3898196 - RNA, 13 nt, Human adenovirus A
aagucaacccaaa

SEQ ID NO: 3898197 - RNA, 18 nt, Human adenovirus A
aagucaacccaaacugua

SEQ ID NO: 3898198 - RNA, 23 nt, Human adenovirus A
aagucuggaucuucaaacaccug

SEQ ID NO: 3898199 - RNA, 15 nt, Human adenovirus A
aagucuucugacauu

SEQ ID NO: 3898200 - RNA, 18 nt, Human adenovirus A
aaguggaucuccugccac

SEQ ID NO: 3898201 - RNA, 12 nt, Human adenovirus A
aaguuuaaagga

SEQ ID NO: 3898202 - RNA, 12 nt, Human adenovirus A
aauaauaucaau

SEQ ID NO: 3898203 - RNA, 15 nt, Human adenovirus A
aauacuggcuaacgc

SEQ ID NO: 3898204 - RNA, 19 nt, Human adenovirus A
aauacugguauuuaaaauc

SEQ ID NO: 3898205 - RNA, 13 nt, Human adenovirus A
aauaucaacugcu

SEQ ID NO: 3898206 - RNA, 14 nt, Human adenovirus A
aauaucaauguuuu

SEQ ID NO: 3898207 - RNA, 16 nt, Human adenovirus A
aauaucucauuugcaa

SEQ ID NO: 3898208 - RNA, 14 nt, Human adenovirus A
aaucaaauuacaca

SEQ ID NO: 3898209 - RNA, 20 nt, Human adenovirus A
aaucauacaaaucagaagcc

SEQ ID NO: 3898210 - RNA, 18 nt, Human adenovirus A
aauccucugacuauuuca

SEQ ID NO: 3898211 - RNA, 18 nt, Human adenovirus A
aaucggcaacagcagcaa

SEQ ID NO: 3898212 - RNA, 15 nt, Human adenovirus A
aaucucagaaagcca

SEQ ID NO: 3898213 - RNA, 14 nt, Human adenovirus A
aaucuuaaauggaa

SEQ ID NO: 3898214 - RNA, 16 nt, Human adenovirus A
aaugaaaguugcauuu

SEQ ID NO: 3898215 - RNA, 12 nt, Human adenovirus A
aaugaacaaaau

SEQ ID NO: 3898216 - RNA, 12 nt, Human adenovirus A
aaugaacaaugc

SEQ ID NO: 3898217 - RNA, 14 nt, Human adenovirus A
aaugcaaaauggac

SEQ ID NO: 3898218 - RNA, 24 nt, Human adenovirus A
aaugcaauaugacuaaggauuggu

SEQ ID NO: 3898219 - RNA, 14 nt, Human adenovirus A
aaugcccugcaaaa

SEQ ID NO: 3898220 - RNA, 22 nt, Human adenovirus A
aaugcuggaugcuuugggagac

SEQ ID NO: 3898221 - RNA, 15 nt, Human adenovirus A
aauggagugucacug

SEQ ID NO: 3898222 - RNA, 22 nt, Human adenovirus A
aaugguuacugaagugccucaa

SEQ ID NO: 3898223 - RNA, 13 nt, Human adenovirus A
aauuaaacccuuu

SEQ ID NO: 3898224 - RNA, 18 nt, Human adenovirus A
aauuaauggaguuguaga

SEQ ID NO: 3898225 - RNA, 12 nt, Human adenovirus A
aauuacauuuau

SEQ ID NO: 3898226 - RNA, 20 nt, Human adenovirus A
aauuacuuaccggaaaucug

SEQ ID NO: 3898227 - RNA, 15 nt, Human adenovirus A
aauuacuugaacaac

SEQ ID NO: 3898228 - RNA, 14 nt, Human adenovirus A
aauugcagaacuau

SEQ ID NO: 3898229 - RNA, 18 nt, Human adenovirus A
aauuugccuaaaagcuau

SEQ ID NO: 3898230 - RNA, 21 nt, Human adenovirus A
aauuuuuugccaucagaaauu

SEQ ID NO: 3898231 - RNA, 22 nt, Human adenovirus A
acaaaaaacggaucuauuguua

SEQ ID NO: 3898232 - RNA, 12 nt, Human adenovirus A
acaaaacacaaa

SEQ ID NO: 3898233 - RNA, 21 nt, Human adenovirus A
acaaaacuuaucagccagagc

SEQ ID NO: 3898234 - RNA, 17 nt, Human adenovirus A
acaaaauaccccuaucc

SEQ ID NO: 3898235 - RNA, 19 nt, Human adenovirus A
acaaaaucaccaugggaau

SEQ ID NO: 3898236 - RNA, 22 nt, Human adenovirus A
acaaacaacgaaggccaaacca

SEQ ID NO: 3898237 - RNA, 17 nt, Human adenovirus A
acaaauuugcauuuccc

SEQ ID NO: 3898238 - RNA, 13 nt, Human adenovirus A
acaacaaaacacu

SEQ ID NO: 3898239 - RNA, 18 nt, Human adenovirus A
acaacaaaacacugagcu

SEQ ID NO: 3898240 - RNA, 15 nt, Human adenovirus A
acaacaagcuaauug

SEQ ID NO: 3898241 - RNA, 17 nt, Human adenovirus A
acaacacaaaaaaaacc

SEQ ID NO: 3898242 - RNA, 19 nt, Human adenovirus A
acaacacggaguaaugaac

SEQ ID NO: 3898243 - RNA, 12 nt, Human adenovirus A
acaacagcugcu

SEQ ID NO: 3898244 - RNA, 14 nt, Human adenovirus A
acaacgaaggccaa

SEQ ID NO: 3898245 - RNA, 21 nt, Human adenovirus A
acaacucuacuuaaaagcaag

SEQ ID NO: 3898246 - RNA, 11 nt, Human adenovirus A
acaagccgcag

SEQ ID NO: 3898247 - RNA, 13 nt, Human adenovirus A
acaaguuaaaaga

SEQ ID NO: 3898248 - RNA, 18 nt, Human adenovirus A
acaauaaucacaacacag

SEQ ID NO: 3898249 - RNA, 18 nt, Human adenovirus A
acaauggcauagaaaguu

SEQ ID NO: 3898250 - RNA, 16 nt, Human adenovirus A
acacaaaacacaaauu

SEQ ID NO: 3898251 - RNA, 14 nt, Human adenovirus A
acacaaaagcucua

SEQ ID NO: 3898252 - RNA, 20 nt, Human adenovirus A
acacaaucugccgcaagugc

SEQ ID NO: 3898253 - RNA, 23 nt, Human adenovirus A
acacaugauggaucuggagccac

SEQ ID NO: 3898254 - RNA, 14 nt, Human adenovirus A
acacauuaaaaugu

SEQ ID NO: 3898255 - RNA, 21 nt, Human adenovirus A
acacauugacuguuuccacug

SEQ ID NO: 3898256 - RNA, 22 nt, Human adenovirus A
acaccaugguaaaaaggaagca

SEQ ID NO: 3898257 - RNA, 19 nt, Human adenovirus A
acaccuuggucucgcagcu

SEQ ID NO: 3898258 - RNA, 18 nt, Human adenovirus A
acacgcuuuuacucacug

SEQ ID NO: 3898259 - RNA, 23 nt, Human adenovirus A
acacuauacgcgugguuaaacug

SEQ ID NO: 3898260 - RNA, 18 nt, Human adenovirus A
acacuguggacaacuccu

SEQ ID NO: 3898261 - RNA, 12 nt, Human adenovirus A
acacuuaacaca

SEQ ID NO: 3898262 - RNA, 13 nt, Human adenovirus A
acagaaauacaga

SEQ ID NO: 3898263 - RNA, 21 nt, Human adenovirus A
acagacaccgcccaggcaggc

SEQ ID NO: 3898264 - RNA, 21 nt, Human adenovirus A
acagacgaauaagcucggcca

SEQ ID NO: 3898265 - RNA, 21 nt, Human adenovirus A
acagcaacuuuuuaaccacug

SEQ ID NO: 3898266 - RNA, 23 nt, Human adenovirus A
acagcacuaacauguuauuuaaa

SEQ ID NO: 3898267 - RNA, 20 nt, Human adenovirus A
acagcauggagugcuggaaa

SEQ ID NO: 3898268 - RNA, 20 nt, Human adenovirus A
acagcauuggaauuuaacuu

SEQ ID NO: 3898269 - RNA, 18 nt, Human adenovirus A
acagccuagacgaggauc

SEQ ID NO: 3898270 - RNA, 17 nt, Human adenovirus A
acagcgcgcaaguugac

SEQ ID NO: 3898271 - RNA, 19 nt, Human adenovirus A
acagcggcguaaacucaug

SEQ ID NO: 3898272 - RNA, 22 nt, Human adenovirus A
acagcucugauuucgauaaaca

SEQ ID NO: 3898273 - RNA, 14 nt, Human adenovirus A
acaggaaagcuuaa

SEQ ID NO: 3898274 - RNA, 11 nt, Human adenovirus A
acaggaagagc

SEQ ID NO: 3898275 - RNA, 15 nt, Human adenovirus A
acaggugaaagugaa

SEQ ID NO: 3898276 - RNA, 13 nt, Human adenovirus A
acaguagcugcag

SEQ ID NO: 3898277 - RNA, 19 nt, Human adenovirus A
acaguagcugcagagcuag

SEQ ID NO: 3898278 - RNA, 22 nt, Human adenovirus A
acaguauugugggacugggagu

SEQ ID NO: 3898279 - RNA, 15 nt, Human adenovirus A
acagucacaagguag

SEQ ID NO: 3898280 - RNA, 16 nt, Human adenovirus A
acaguugacgccccau

SEQ ID NO: 3898281 - RNA, 14 nt, Human adenovirus A
acauaacacagcuu

SEQ ID NO: 3898282 - RNA, 17 nt, Human adenovirus A
acauauggcaccaaggc

SEQ ID NO: 3898283 - RNA, 16 nt, Human adenovirus A
acaucacucuauuuca

SEQ ID NO: 3898284 - RNA, 17 nt, Human adenovirus A
acaucguccaagaucuu

SEQ ID NO: 3898285 - RNA, 22 nt, Human adenovirus A
acaucuuuuacuaaaaugcaaa

SEQ ID NO: 3898286 - RNA, 23 nt, Human adenovirus A
acaugauggaucuggagccacag

SEQ ID NO: 3898287 - RNA, 19 nt, Human adenovirus A
acaugauucuucagagcac

SEQ ID NO: 3898288 - RNA, 18 nt, Human adenovirus A
acaugcuggauuacaugu

SEQ ID NO: 3898289 - RNA, 15 nt, Human adenovirus A
acauuaggcuccaca

SEQ ID NO: 3898290 - RNA, 19 nt, Human adenovirus A
acauucaaauuccugugca

SEQ ID NO: 3898291 - RNA, 17 nt, Human adenovirus A
acauuccagagagcuac

SEQ ID NO: 3898292 - RNA, 16 nt, Human adenovirus A
acauugcauucagaga

SEQ ID NO: 3898293 - RNA, 15 nt, Human adenovirus A
acauuuagaccacug

SEQ ID NO: 3898294 - RNA, 13 nt, Human adenovirus A
acauuuaggcuua

SEQ ID NO: 3898295 - RNA, 20 nt, Human adenovirus A
accaaaaacaccuuuuguua

SEQ ID NO: 3898296 - RNA, 15 nt, Human adenovirus A
accaaacuggccaug

SEQ ID NO: 3898297 - RNA, 11 nt, Human adenovirus A
accaaagccau

SEQ ID NO: 3898298 - RNA, 14 nt, Human adenovirus A
accaagcccucucc

SEQ ID NO: 3898299 - RNA, 13 nt, Human adenovirus A
accacaucuuugg

SEQ ID NO: 3898300 - RNA, 20 nt, Human adenovirus A
accacccuagcauucucuaa

SEQ ID NO: 3898301 - RNA, 17 nt, Human adenovirus A
accacguacgaccacug

SEQ ID NO: 3898302 - RNA, 16 nt, Human adenovirus A
accacugaaacucccu

SEQ ID NO: 3898303 - RNA, 23 nt, Human adenovirus A
accagagcaccccuucccaccuu

SEQ ID NO: 3898304 - RNA, 15 nt, Human adenovirus A
accagcgucccaaaa

SEQ ID NO: 3898305 - RNA, 22 nt, Human adenovirus A
accaggcauggccaucauacau

SEQ ID NO: 3898306 - RNA, 17 nt, Human adenovirus A
accaugaaaacagcauu

SEQ ID NO: 3898307 - RNA, 13 nt, Human adenovirus A
accauggaauuuu

SEQ ID NO: 3898308 - RNA, 16 nt, Human adenovirus A
accauugaaaccagcg

SEQ ID NO: 3898309 - RNA, 14 nt, Human adenovirus A
accccaaaagcccg

SEQ ID NO: 3898310 - RNA, 15 nt, Human adenovirus A
accccaaaagcccgc

SEQ ID NO: 3898311 - RNA, 15 nt, Human adenovirus A
accccauuguaacug

SEQ ID NO: 3898312 - RNA, 12 nt, Human adenovirus A
acccccagugcc

SEQ ID NO: 3898313 - RNA, 17 nt, Human adenovirus A
acccuuacacucaagcu

SEQ ID NO: 3898314 - RNA, 15 nt, Human adenovirus A
acccuuccccaccuu

SEQ ID NO: 3898315 - RNA, 14 nt, Human adenovirus A
acccuuuagcaguu

SEQ ID NO: 3898316 - RNA, 14 nt, Human adenovirus A
accgauugggacag

SEQ ID NO: 3898317 - RNA, 15 nt, Human adenovirus A
accgcucgucaagcc

SEQ ID NO: 3898318 - RNA, 16 nt, Human adenovirus A
accguagaugggacac

SEQ ID NO: 3898319 - RNA, 23 nt, Human adenovirus A
accgugaauauuaaaaagcucug

SEQ ID NO: 3898320 - RNA, 23 nt, Human adenovirus A
accguucccuaucauuaagaaca

SEQ ID NO: 3898321 - RNA, 20 nt, Human adenovirus A
accuacgguggcagccaagc

SEQ ID NO: 3898322 - RNA, 13 nt, Human adenovirus A
accuagguuuaaa

SEQ ID NO: 3898323 - RNA, 18 nt, Human adenovirus A
accucacaaggucuuaaa

SEQ ID NO: 3898324 - RNA, 21 nt, Human adenovirus A
accuccauuauuucuuccucg

SEQ ID NO: 3898325 - RNA, 20 nt, Human adenovirus A
accucccgauaccaaaaaca

SEQ ID NO: 3898326 - RNA, 20 nt, Human adenovirus A
accugauuuucacauuugug

SEQ ID NO: 3898327 - RNA, 15 nt, Human adenovirus A
accuucgagaacuaa

SEQ ID NO: 3898328 - RNA, 18 nt, Human adenovirus A
accuugaaaugccagaca

SEQ ID NO: 3898329 - RNA, 16 nt, Human adenovirus A
acgaaggccaaaccau

SEQ ID NO: 3898330 - RNA, 14 nt, Human adenovirus A
acgagacucccccc

SEQ ID NO: 3898331 - RNA, 19 nt, Human adenovirus A
acgagcucccggaggaagc

SEQ ID NO: 3898332 - RNA, 19 nt, Human adenovirus A
acgcaagcgugcaaacaga

SEQ ID NO: 3898333 - RNA, 13 nt, Human adenovirus A
acgccaaagccac

SEQ ID NO: 3898334 - RNA, 13 nt, Human adenovirus A
acgccaacaggau

SEQ ID NO: 3898335 - RNA, 15 nt, Human adenovirus A
acgccccauccgugg

SEQ ID NO: 3898336 - RNA, 18 nt, Human adenovirus A
acgccuuacauguggagc

SEQ ID NO: 3898337 - RNA, 22 nt, Human adenovirus A
acgcgugguuaaacugccuccu

SEQ ID NO: 3898338 - RNA, 16 nt, Human adenovirus A
acgcuaaccaggcaug

SEQ ID NO: 3898339 - RNA, 21 nt, Human adenovirus A
acgcuauaacaguaccaaugu

SEQ ID NO: 3898340 - RNA, 19 nt, Human adenovirus A
acgcugcguuuugugcccg

SEQ ID NO: 3898341 - RNA, 15 nt, Human adenovirus A
acgcuugugcagccu

SEQ ID NO: 3898342 - RNA, 14 nt, Human adenovirus A
acggaacuacucag

SEQ ID NO: 3898343 - RNA, 13 nt, Human adenovirus A
acggcggcgcaua

SEQ ID NO: 3898344 - RNA, 15 nt, Human adenovirus A
acgggcagccugucu

SEQ ID NO: 3898345 - RNA, 19 nt, Human adenovirus A
acgggccgcagcugcggcc

SEQ ID NO: 3898346 - RNA, 15 nt, Human adenovirus A
acgggcgugugacug

SEQ ID NO: 3898347 - RNA, 16 nt, Human adenovirus A
acguaaaccuugaaau

SEQ ID NO: 3898348 - RNA, 21 nt, Human adenovirus A
acguaaugugcgcgucagggu

SEQ ID NO: 3898349 - RNA, 18 nt, Human adenovirus A
acguccaagcgguuauug

SEQ ID NO: 3898350 - RNA, 11 nt, Human adenovirus A
acgugugcccc

SEQ ID NO: 3898351 - RNA, 16 nt, Human adenovirus A
acguugcaagaggaga

SEQ ID NO: 3898352 - RNA, 18 nt, Human adenovirus A
acuaaaacaaaucuauca

SEQ ID NO: 3898353 - RNA, 14 nt, Human adenovirus A
acuaaagaaacaaa

SEQ ID NO: 3898354 - RNA, 18 nt, Human adenovirus A
acuaacaaugcuuuccau

SEQ ID NO: 3898355 - RNA, 23 nt, Human adenovirus A
acuaaccgucgccagcaagugcc

SEQ ID NO: 3898356 - RNA, 15 nt, Human adenovirus A
acuaccuagcuuacc

SEQ ID NO: 3898357 - RNA, 22 nt, Human adenovirus A
acuacuuuauaacuaacuuuaa

SEQ ID NO: 3898358 - RNA, 17 nt, Human adenovirus A
acuagaguguauggaaa

SEQ ID NO: 3898359 - RNA, 14 nt, Human adenovirus A
acuaggggcuggcu

SEQ ID NO: 3898360 - RNA, 15 nt, Human adenovirus A
acuauagagaggaau

SEQ ID NO: 3898361 - RNA, 14 nt, Human adenovirus A
acuaugagucaagu

SEQ ID NO: 3898362 - RNA, 20 nt, Human adenovirus A
acuccauaaggcggcguccu

SEQ ID NO: 3898363 - RNA, 21 nt, Human adenovirus A
acucuauugccaccuuuuguu

SEQ ID NO: 3898364 - RNA, 13 nt, Human adenovirus A
acucucuggggaa

SEQ ID NO: 3898365 - RNA, 19 nt, Human adenovirus A
acugaacuauuaagugaaa

SEQ ID NO: 3898366 - RNA, 13 nt, Human adenovirus A
acugaagugccuc

SEQ ID NO: 3898367 - RNA, 16 nt, Human adenovirus A
acugaggagcugagaa

SEQ ID NO: 3898368 - RNA, 16 nt, Human adenovirus A
acugcccagcuguucu

SEQ ID NO: 3898369 - RNA, 20 nt, Human adenovirus A
acugccccgggguuggugga

SEQ ID NO: 3898370 - RNA, 17 nt, Human adenovirus A
acugccgacaacacugu

SEQ ID NO: 3898371 - RNA, 21 nt, Human adenovirus A
acugcgucaguaacaaacugg

SEQ ID NO: 3898372 - RNA, 15 nt, Human adenovirus A
acugcgucuccccau

SEQ ID NO: 3898373 - RNA, 23 nt, Human adenovirus A
acugcgucuccccauucgcagca

SEQ ID NO: 3898374 - RNA, 16 nt, Human adenovirus A
acuggacagcggccau

SEQ ID NO: 3898375 - RNA, 23 nt, Human adenovirus A
acugggauggguguuuggcagca

SEQ ID NO: 3898376 - RNA, 12 nt, Human adenovirus A
acugggccagga

SEQ ID NO: 3898377 - RNA, 19 nt, Human adenovirus A
acuggggaauuugcauaug

SEQ ID NO: 3898378 - RNA, 16 nt, Human adenovirus A
acugguacuaugacug

SEQ ID NO: 3898379 - RNA, 15 nt, Human adenovirus A
acuuaccccugggcu

SEQ ID NO: 3898380 - RNA, 13 nt, Human adenovirus A
acuuacuacgacu

SEQ ID NO: 3898381 - RNA, 22 nt, Human adenovirus A
acuucaauccuuuuucgggcuc

SEQ ID NO: 3898382 - RNA, 21 nt, Human adenovirus A
acuuccucauccgcccaaacu

SEQ ID NO: 3898383 - RNA, 20 nt, Human adenovirus A
acuugggaaauuugucaugg

SEQ ID NO: 3898384 - RNA, 16 nt, Human adenovirus A
acuuguaacuguggaa

SEQ ID NO: 3898385 - RNA, 15 nt, Human adenovirus A
acuuuaugagucaaa

SEQ ID NO: 3898386 - RNA, 16 nt, Human adenovirus A
acuuucaaaaaagcuu

SEQ ID NO: 3898387 - RNA, 16 nt, Human adenovirus A
acuuuccgccauggcu

SEQ ID NO: 3898388 - RNA, 19 nt, Human adenovirus A
acuuuccggagaaagaauu

SEQ ID NO: 3898389 - RNA, 18 nt, Human adenovirus A
agaaaaaccaccaggugu

SEQ ID NO: 3898390 - RNA, 16 nt, Human adenovirus A
agaaacagcagcaacg

SEQ ID NO: 3898391 - RNA, 15 nt, Human adenovirus A
agaaaguuuaaagga

SEQ ID NO: 3898392 - RNA, 17 nt, Human adenovirus A
agaaaucccaccugagu

SEQ ID NO: 3898393 - RNA, 14 nt, Human adenovirus A
agaacaaacagugc

SEQ ID NO: 3898394 - RNA, 18 nt, Human adenovirus A
agaacacggugaaugugu

SEQ ID NO: 3898395 - RNA, 17 nt, Human adenovirus A
agaaccgucugcaugau

SEQ ID NO: 3898396 - RNA, 18 nt, Human adenovirus A
agaacuacaaaaaaguaa

SEQ ID NO: 3898397 - RNA, 15 nt, Human adenovirus A
agaagcuuauguaca

SEQ ID NO: 3898398 - RNA, 18 nt, Human adenovirus A
agaaucaaucucaguguc

SEQ ID NO: 3898399 - RNA, 21 nt, Human adenovirus A
agaaucaaucucagugucauu

SEQ ID NO: 3898400 - RNA, 13 nt, Human adenovirus A
agacaugacagcg

SEQ ID NO: 3898401 - RNA, 14 nt, Human adenovirus A
agacgaacaaacuu

SEQ ID NO: 3898402 - RNA, 15 nt, Human adenovirus A
agacggcugcgucgc

SEQ ID NO: 3898403 - RNA, 15 nt, Human adenovirus A
agacguuuuugccca

SEQ ID NO: 3898404 - RNA, 16 nt, Human adenovirus A
agacuauaaucccuug

SEQ ID NO: 3898405 - RNA, 13 nt, Human adenovirus A
gcuaagggacaag

SEQ ID NO: 3898406 - RNA, 15 nt, Human adenovirus A
gcuaagggacaaguu

SEQ ID NO: 3898407 - RNA, 13 nt, Human adenovirus A
gcuacaucuuuua

SEQ ID NO: 3898408 - RNA, 21 nt, Human adenovirus A
gcuacgagacuccccccgagg

SEQ ID NO: 3898409 - RNA, 20 nt, Human adenovirus A
gcuagcugacauaauuuucc

SEQ ID NO: 3898410 - RNA, 20 nt, Human adenovirus A
gcuaugagcacaagugaggc

SEQ ID NO: 3898411 - RNA, 17 nt, Human adenovirus A
gcuauuguuaacacugc

SEQ ID NO: 3898412 - RNA, 18 nt, Human adenovirus A
gcucaacgagagcgcuuu

SEQ ID NO: 3898413 - RNA, 14 nt, Human adenovirus A
gcucagcuccaccc

SEQ ID NO: 3898414 - RNA, 15 nt, Human adenovirus A
gcucauggcgggcuc

SEQ ID NO: 3898415 - RNA, 14 nt, Human adenovirus A
gcuccaaccaugaa

SEQ ID NO: 3898416 - RNA, 15 nt, Human adenovirus A
gcucccgcagugagg

SEQ ID NO: 3898417 - RNA, 22 nt, Human adenovirus A
gcucgcuuuacgcuggcugugg

SEQ ID NO: 3898418 - RNA, 14 nt, Human adenovirus A
gcucggccaccguc

SEQ ID NO: 3898419 - RNA, 12 nt, Human adenovirus A
gcucuaccuuaa

SEQ ID NO: 3898420 - RNA, 15 nt, Human adenovirus A
gcugaggaaaugcga

SEQ ID NO: 3898421 - RNA, 20 nt, Human adenovirus A
gcugagguuaaaaggaguga

SEQ ID NO: 3898422 - RNA, 23 nt, Human adenovirus A
gcugcacaauuaucgcucuuuua

SEQ ID NO: 3898423 - RNA, 21 nt, Human adenovirus A
gcugcccugauauaucaggaa

SEQ ID NO: 3898424 - RNA, 18 nt, Human adenovirus A
gcugcuacuaacauuaaa

SEQ ID NO: 3898425 - RNA, 11 nt, Human adenovirus A
gcuggaaccug

SEQ ID NO: 3898426 - RNA, 21 nt, Human adenovirus A
gcuggaugcuuugggagacag

SEQ ID NO: 3898427 - RNA, 20 nt, Human adenovirus A
gcuggcgggagggcauuaaa

SEQ ID NO: 3898428 - RNA, 15 nt, Human adenovirus A
gcugugaaaugaggc

SEQ ID NO: 3898429 - RNA, 16 nt, Human adenovirus A
gcuucacaauggucag

SEQ ID NO: 3898430 - RNA, 19 nt, Human adenovirus A
gcuuccguagccuugcagc

SEQ ID NO: 3898431 - RNA, 16 nt, Human adenovirus A
gcuucuaaaagagcca

SEQ ID NO: 3898432 - RNA, 21 nt, Human adenovirus A
gcuucuauugcuuuuuuggca

SEQ ID NO: 3898433 - RNA, 21 nt, Human adenovirus A
gcuugagcaaaaauguuuucu

SEQ ID NO: 3898434 - RNA, 21 nt, Human adenovirus A
gcuuggaagaaaaaaaccuuc

SEQ ID NO: 3898435 - RNA, 23 nt, Human adenovirus A
gcuuuguuggauagcaaagccau

SEQ ID NO: 3898436 - RNA, 23 nt, Human adenovirus A
gcuuuuccugagacaccaccucc

SEQ ID NO: 3898437 - RNA, 16 nt, Human adenovirus A
gcuuuucgccagcagc

SEQ ID NO: 3898438 - RNA, 11 nt, Human adenovirus A
ggaaaacuuuu

SEQ ID NO: 3898439 - RNA, 23 nt, Human adenovirus A
ggaaacaaguuuagaaaccccac

SEQ ID NO: 3898440 - RNA, 19 nt, Human adenovirus A
ggaacagacaccgcccagg

SEQ ID NO: 3898441 - RNA, 16 nt, Human adenovirus A
ggaaccccaaaucgca

SEQ ID NO: 3898442 - RNA, 18 nt, Human adenovirus A
ggaacugcagacaguggc

SEQ ID NO: 3898443 - RNA, 22 nt, Human adenovirus A
ggacagagcauucaugcugaug

SEQ ID NO: 3898444 - RNA, 14 nt, Human adenovirus A
ggacauaauuuccc

SEQ ID NO: 3898445 - RNA, 22 nt, Human adenovirus A
ggaccgcagucugacagcaauu

SEQ ID NO: 3898446 - RNA, 16 nt, Human adenovirus A
ggacgaccccgccgga

SEQ ID NO: 3898447 - RNA, 20 nt, Human adenovirus A
ggacggucgaccuguggcac

SEQ ID NO: 3898448 - RNA, 15 nt, Human adenovirus A
ggagaaccuuucaag

SEQ ID NO: 3898449 - RNA, 12 nt, Human adenovirus A
ggaggcagcugg

SEQ ID NO: 3898450 - RNA, 23 nt, Human adenovirus A
ggagggacaagcuuaccccgcca

SEQ ID NO: 3898451 - RNA, 17 nt, Human adenovirus A
ggaggguuugcauuuac

SEQ ID NO: 3898452 - RNA, 22 nt, Human adenovirus A
ggaguaauaaaaccugugccuc

SEQ ID NO: 3898453 - RNA, 23 nt, Human adenovirus A
ggagugucacugccgcugcaauc

SEQ ID NO: 3898454 - RNA, 21 nt, Human adenovirus A
ggauaauguaaacccuuuuaa

SEQ ID NO: 3898455 - RNA, 18 nt, Human adenovirus A
ggauacuuaauacuggcu

SEQ ID NO: 3898456 - RNA, 14 nt, Human adenovirus A
ggauagcaccugcc

SEQ ID NO: 3898457 - RNA, 12 nt, Human adenovirus A
ggauauaaagcu

SEQ ID NO: 3898458 - RNA, 20 nt, Human adenovirus A
ggaucaaaaacaaguuuccc

SEQ ID NO: 3898459 - RNA, 22 nt, Human adenovirus A
ggauccuagcguacagccagau

SEQ ID NO: 3898460 - RNA, 18 nt, Human adenovirus A
ggauggguguuuggcagc

SEQ ID NO: 3898461 - RNA, 19 nt, Human adenovirus A
ggauuguguccuuggaaga

SEQ ID NO: 3898462 - RNA, 22 nt, Human adenovirus A
ggcaaagaaacacaugauggau

SEQ ID NO: 3898463 - RNA, 16 nt, Human adenovirus A
ggcacaacagacuggg

SEQ ID NO: 3898464 - RNA, 22 nt, Human adenovirus A
ggcagcaaugcuuggaagaaaa

SEQ ID NO: 3898465 - RNA, 18 nt, Human adenovirus A
ggcagccaagcgcucgcg

SEQ ID NO: 3898466 - RNA, 12 nt, Human adenovirus A
ggcaggaguugc

SEQ ID NO: 3898467 - RNA, 17 nt, Human adenovirus A
ggcaggggaagguguug

SEQ ID NO: 3898468 - RNA, 22 nt, Human adenovirus A
ggcagucacaaguacauccagg

SEQ ID NO: 3898469 - RNA, 17 nt, Human adenovirus A
ggcaucuugcaugaaaa

SEQ ID NO: 3898470 - RNA, 20 nt, Human adenovirus A
ggcauuccccauccaaaacc

SEQ ID NO: 3898471 - RNA, 14 nt, Human adenovirus A
ggccagcauugccg

SEQ ID NO: 3898472 - RNA, 19 nt, Human adenovirus A
ggccagugugcgcuuuaaa

SEQ ID NO: 3898473 - RNA, 19 nt, Human adenovirus A
ggccauguacuugacucug

SEQ ID NO: 3898474 - RNA, 17 nt, Human adenovirus A
ggccauuuuggaagcag

SEQ ID NO: 3898475 - RNA, 16 nt, Human adenovirus A
ggcgaacaggaagagc

SEQ ID NO: 3898476 - RNA, 16 nt, Human adenovirus A
ggcgaggaacuaaacc

SEQ ID NO: 3898477 - RNA, 18 nt, Human adenovirus A
ggcgcggacgagcucccg

SEQ ID NO: 3898478 - RNA, 21 nt, Human adenovirus A
ggcgcuguaccgccugaagaa

SEQ ID NO: 3898479 - RNA, 19 nt, Human adenovirus A
ggcggguaagagcaggcug

SEQ ID NO: 3898480 - RNA, 12 nt, Human adenovirus A
ggcggugagcau

SEQ ID NO: 3898481 - RNA, 17 nt, Human adenovirus A
ggcguacacuggcuggc

SEQ ID NO: 3898482 - RNA, 16 nt, Human adenovirus A
ggcuaggaaaacaaac

SEQ ID NO: 3898483 - RNA, 17 nt, Human adenovirus A
ggcuccacaccuugguc

SEQ ID NO: 3898484 - RNA, 13 nt, Human adenovirus A
ggcuuaugcaagg

SEQ ID NO: 3898485 - RNA, 21 nt, Human adenovirus A
gggaaaaaaaagaggaagaag

SEQ ID NO: 3898486 - RNA, 23 nt, Human adenovirus A
gggaccgcagucugacagcaauu

SEQ ID NO: 3898487 - RNA, 14 nt, Human adenovirus A
gggaguugcgagcu

SEQ ID NO: 3898488 - RNA, 20 nt, Human adenovirus A
gggauacuaccgcugcucag

SEQ ID NO: 3898489 - RNA, 23 nt, Human adenovirus A
gggauggguguuuggcagcaaug

SEQ ID NO: 3898490 - RNA, 19 nt, Human adenovirus A
gggauuguguccuuggaag

SEQ ID NO: 3898491 - RNA, 21 nt, Human adenovirus A
gggcagccaggcgggcugcaa

SEQ ID NO: 3898492 - RNA, 20 nt, Human adenovirus A
gggcagcccaacccuuccca

SEQ ID NO: 3898493 - RNA, 15 nt, Human adenovirus A
gggcaucuugcauga

SEQ ID NO: 3898494 - RNA, 16 nt, Human adenovirus A
gggcauggugauuaaa

SEQ ID NO: 3898495 - RNA, 13 nt, Human adenovirus A
gggccgcagcugc

SEQ ID NO: 3898496 - RNA, 15 nt, Human adenovirus A
ggggauugggaaggg

SEQ ID NO: 3898497 - RNA, 15 nt, Human adenovirus A
ggggcuacugcucau

SEQ ID NO: 3898498 - RNA, 14 nt, Human adenovirus A
ggguucgugcucca

SEQ ID NO: 3898499 - RNA, 14 nt, Human adenovirus A
gguaagugggugga

SEQ ID NO: 3898500 - RNA, 20 nt, Human adenovirus A
gguacccgccagugcuuuca

SEQ ID NO: 3898501 - RNA, 20 nt, Human adenovirus A
gguacuuuuccuuguggaau

SEQ ID NO: 3898502 - RNA, 18 nt, Human adenovirus A
gguaguuuaagguggugg

SEQ ID NO: 3898503 - RNA, 22 nt, Human adenovirus A
ggucaagaacacgaacugaaaa

SEQ ID NO: 3898504 - RNA, 21 nt, Human adenovirus A
ggucuuaaaaauuuugguucc

SEQ ID NO: 3898505 - RNA, 21 nt, Human adenovirus A
ggugaaugggguacgagcccg

SEQ ID NO: 3898506 - RNA, 20 nt, Human adenovirus A
gguggggaaaaugguggugc

SEQ ID NO: 3898507 - RNA, 15 nt, Human adenovirus A
gguggggugcugccc

SEQ ID NO: 3898508 - RNA, 22 nt, Human adenovirus A
gguuagaacuuucuaaggugug

SEQ ID NO: 3898509 - RNA, 14 nt, Human adenovirus A
gguucucuuucaac

SEQ ID NO: 3898510 - RNA, 13 nt, Human adenovirus A
gguuuaauguuua

SEQ ID NO: 3898511 - RNA, 21 nt, Human adenovirus A
guaacuuucaaaaaagcuuua

SEQ ID NO: 3898512 - RNA, 18 nt, Human adenovirus A
guaagagcaggcuggagg

SEQ ID NO: 3898513 - RNA, 19 nt, Human adenovirus A
guaaugagcgcagugauga

SEQ ID NO: 3898514 - RNA, 21 nt, Human adenovirus A
guaauggguucaagcgaacag

SEQ ID NO: 3898515 - RNA, 23 nt, Human adenovirus A
guaauuggcaaaguacccuaaac

SEQ ID NO: 3898516 - RNA, 23 nt, Human adenovirus A
guaauuuuccagcgccaccugcc

SEQ ID NO: 3898517 - RNA, 18 nt, Human adenovirus A
guaauuuuuuucuccuuu

SEQ ID NO: 3898518 - RNA, 12 nt, Human adenovirus A
guacaaagccag

SEQ ID NO: 3898519 - RNA, 13 nt, Human adenovirus A
guacaaagccagg

SEQ ID NO: 3898520 - RNA, 17 nt, Human adenovirus A
guacacuaaugaggcuu

SEQ ID NO: 3898521 - RNA, 14 nt, Human adenovirus A
guacccgccagugc

SEQ ID NO: 3898522 - RNA, 15 nt, Human adenovirus A
guaccgcgaagccau

SEQ ID NO: 3898523 - RNA, 13 nt, Human adenovirus A
guacgaaacuguu

SEQ ID NO: 3898524 - RNA, 17 nt, Human adenovirus A
guacgcaaacucagccc

SEQ ID NO: 3898525 - RNA, 21 nt, Human adenovirus A
guacgcauucaccagccacac

SEQ ID NO: 3898526 - RNA, 19 nt, Human adenovirus A
guacucaacgugucaguuu

SEQ ID NO: 3898527 - RNA, 18 nt, Human adenovirus A
guagaccugcaagacaga

SEQ ID NO: 3898528 - RNA, 20 nt, Human adenovirus A
guagccauugguuuaaugca

SEQ ID NO: 3898529 - RNA, 15 nt, Human adenovirus A
guagccuugcaggcu

SEQ ID NO: 3898530 - RNA, 16 nt, Human adenovirus A
guagccuugcaggcuu

SEQ ID NO: 3898531 - RNA, 18 nt, Human adenovirus A
guaguaugcgcagacgca

SEQ ID NO: 3898532 - RNA, 13 nt, Human adenovirus A
guaguugcgcaag

SEQ ID NO: 3898533 - RNA, 16 nt, Human adenovirus A
guauaagaaagaggca

SEQ ID NO: 3898534 - RNA, 12 nt, Human adenovirus A
guaugccaacaa

SEQ ID NO: 3898535 - RNA, 14 nt, Human adenovirus A
guaugcgcagacgc

SEQ ID NO: 3898536 - RNA, 22 nt, Human adenovirus A
guauguucccauugacaaggaa

SEQ ID NO: 3898537 - RNA, 15 nt, Human adenovirus A
guauucauauaugua

SEQ ID NO: 3898538 - RNA, 13 nt, Human adenovirus A
gucaaaaaagcaa

SEQ ID NO: 3898539 - RNA, 18 nt, Human adenovirus A
gucaaaguaugcugcaca

SEQ ID NO: 3898540 - RNA, 13 nt, Human adenovirus A
gucaacuacauaa

SEQ ID NO: 3898541 - RNA, 22 nt, Human adenovirus A
gucacaaguacauccagggcac

SEQ ID NO: 3898542 - RNA, 13 nt, Human adenovirus A
gucagacuauuac

SEQ ID NO: 3898543 - RNA, 18 nt, Human adenovirus A
gucaggcgugcgcagucu

SEQ ID NO: 3898544 - RNA, 13 nt, Human adenovirus A
gucaguguccauc

SEQ ID NO: 3898545 - RNA, 17 nt, Human adenovirus A
gucaucucuacagcccc

SEQ ID NO: 3898546 - RNA, 12 nt, Human adenovirus A
guccacacaguu

SEQ ID NO: 3898547 - RNA, 11 nt, Human adenovirus A
gucccauccaa

SEQ ID NO: 3898548 - RNA, 20 nt, Human adenovirus A
gucccgcccgcguuuggaaa

SEQ ID NO: 3898549 - RNA, 11 nt, Human adenovirus A
guccuacggag

SEQ ID NO: 3898550 - RNA, 13 nt, Human adenovirus A
guccucuuccucu

SEQ ID NO: 3898551 - RNA, 12 nt, Human adenovirus A
guccuuccaggg

SEQ ID NO: 3898552 - RNA, 24 nt, Human adenovirus A
gucgccgcggcgucagcagacggc

SEQ ID NO: 3898553 - RNA, 16 nt, Human adenovirus A
gucgcgagcugcgccg

SEQ ID NO: 3898554 - RNA, 16 nt, Human adenovirus A
gucgcuuucaaccaag

SEQ ID NO: 3898555 - RNA, 21 nt, Human adenovirus A
gucgugguggaagcuggccau

SEQ ID NO: 3898556 - RNA, 22 nt, Human adenovirus A
uacgcaaacucagcccaugcuc

SEQ ID NO: 3898557 - RNA, 14 nt, Human adenovirus A
uacggacagucugu

SEQ ID NO: 3898558 - RNA, 14 nt, Human adenovirus A
uacgguggcagcca

SEQ ID NO: 3898559 - RNA, 16 nt, Human adenovirus A
uacuaaaagcuuuaau

SEQ ID NO: 3898560 - RNA, 12 nt, Human adenovirus A
uacuaacaacuc

SEQ ID NO: 3898561 - RNA, 22 nt, Human adenovirus A
uacuagccccugucaacagcau

SEQ ID NO: 3898562 - RNA, 14 nt, Human adenovirus A
uacucuuauaaaau

SEQ ID NO: 3898563 - RNA, 15 nt, Human adenovirus A
uacugcucccucucg

SEQ ID NO: 3898564 - RNA, 16 nt, Human adenovirus A
uacugucccccaccag

SEQ ID NO: 3898565 - RNA, 22 nt, Human adenovirus A
uacuuacagggagauacaucua

SEQ ID NO: 3898566 - RNA, 20 nt, Human adenovirus A
uacuucaccgcgcaagcuuu

SEQ ID NO: 3898567 - RNA, 15 nt, Human adenovirus A
uagaaacugugcccg

SEQ ID NO: 3898568 - RNA, 19 nt, Human adenovirus A
uagacaucgcgcauaggag

SEQ ID NO: 3898569 - RNA, 20 nt, Human adenovirus A
uagagcacaugaagguggau

SEQ ID NO: 3898570 - RNA, 13 nt, Human adenovirus A
uagagggaggcaa

SEQ ID NO: 3898571 - RNA, 19 nt, Human adenovirus A
uagauacaagcgacagagu

SEQ ID NO: 3898572 - RNA, 12 nt, Human adenovirus A
uagauuucuuga

SEQ ID NO: 3898573 - RNA, 20 nt, Human adenovirus A
uagccugcuuucagcacugc

SEQ ID NO: 3898574 - RNA, 16 nt, Human adenovirus A
uaggauagcaccugcc

SEQ ID NO: 3898575 - RNA, 15 nt, Human adenovirus A
uaggcauaaugcagc

SEQ ID NO: 3898576 - RNA, 23 nt, Human adenovirus A
uagguguaagucacguguucaca

SEQ ID NO: 3898577 - RNA, 17 nt, Human adenovirus A
uaguaacauuuguguag

SEQ ID NO: 3898578 - RNA, 15 nt, Human adenovirus A
uaguucugcacgggc

SEQ ID NO: 3898579 - RNA, 16 nt, Human adenovirus A
uauaagaaagaggcag

SEQ ID NO: 3898580 - RNA, 15 nt, Human adenovirus A
uauaaucuccaaaua

SEQ ID NO: 3898581 - RNA, 16 nt, Human adenovirus A
uauacgccuccuaugu

SEQ ID NO: 3898582 - RNA, 16 nt, Human adenovirus A
uauaguaaaaaugcca

SEQ ID NO: 3898583 - RNA, 13 nt, Human adenovirus A
uauaguggcacaa

SEQ ID NO: 3898584 - RNA, 17 nt, Human adenovirus A
uaugaccuuaaucuguu

SEQ ID NO: 3898585 - RNA, 19 nt, Human adenovirus A
uaugcaaggcgccgcagac

SEQ ID NO: 3898586 - RNA, 20 nt, Human adenovirus A
caggucccguaaaauacaca

SEQ ID NO: 3898587 - RNA, 15 nt, Human adenovirus A
cagguguacuggucc

SEQ ID NO: 3898588 - RNA, 15 nt, Human adenovirus A
cagucaccaccagcg

SEQ ID NO: 3898589 - RNA, 23 nt, Human adenovirus A
cagucagagagaaaagcaugucc

SEQ ID NO: 3898590 - RNA, 19 nt, Human adenovirus A
cagugagccguccagcagu

SEQ ID NO: 3898591 - RNA, 17 nt, Human adenovirus A
cagugagugaaucugug

SEQ ID NO: 3898592 - RNA, 16 nt, Human adenovirus A
caguuuaacacauaca

SEQ ID NO: 3898593 - RNA, 19 nt, Human adenovirus A
caguuuuggagccaaaaaa

SEQ ID NO: 3898594 - RNA, 15 nt, Human adenovirus A
caguuuuugcagugc

SEQ ID NO: 3898595 - RNA, 15 nt, Human adenovirus A
cauaaugaaaacaau

SEQ ID NO: 3898596 - RNA, 23 nt, Human adenovirus A
cauaauuaaacccuuuagcaguu

SEQ ID NO: 3898597 - RNA, 15 nt, Human adenovirus A
cauacaguaagcaca

SEQ ID NO: 3898598 - RNA, 15 nt, Human adenovirus A
cauacauacacucau

SEQ ID NO: 3898599 - RNA, 18 nt, Human adenovirus A
cauacuuaccaaagccau

SEQ ID NO: 3898600 - RNA, 14 nt, Human adenovirus A
cauagaaaaucuuu

SEQ ID NO: 3898601 - RNA, 16 nt, Human adenovirus A
cauagcuuacaaaggg

SEQ ID NO: 3898602 - RNA, 18 nt, Human adenovirus A
cauaguuucgguuacugc

SEQ ID NO: 3898603 - RNA, 21 nt, Human adenovirus A
cauauaaaacugauuuaccgc

SEQ ID NO: 3898604 - RNA, 20 nt, Human adenovirus A
cauccagauauaguacugcu

SEQ ID NO: 3898605 - RNA, 21 nt, Human adenovirus A
cauccaugugaugccggcagc

SEQ ID NO: 3898606 - RNA, 17 nt, Human adenovirus A
cauccccagacaguuuc

SEQ ID NO: 3898607 - RNA, 16 nt, Human adenovirus A
cauccguggcaggcca

SEQ ID NO: 3898608 - RNA, 14 nt, Human adenovirus A
cauccucagcuccg

SEQ ID NO: 3898609 - RNA, 14 nt, Human adenovirus A
caucgcaaaacacg

SEQ ID NO: 3898610 - RNA, 18 nt, Human adenovirus A
caucgccggucaggaugc

SEQ ID NO: 3898611 - RNA, 18 nt, Human adenovirus A
caucuaaaccuauaacaa

SEQ ID NO: 3898612 - RNA, 20 nt, Human adenovirus A
caucuagccagucacaguca

SEQ ID NO: 3898613 - RNA, 15 nt, Human adenovirus A
caucuuaaugccagu

SEQ ID NO: 3898614 - RNA, 13 nt, Human adenovirus A
caucuuuuuaugc

SEQ ID NO: 3898615 - RNA, 14 nt, Human adenovirus A
cauggcugaagagg

SEQ ID NO: 3898616 - RNA, 16 nt, Human adenovirus A
cauggcugaagaggag

SEQ ID NO: 3898617 - RNA, 20 nt, Human adenovirus A
cauggguguauuggccgggc

SEQ ID NO: 3898618 - RNA, 21 nt, Human adenovirus A
cauguaaaaugggaaaugagg

SEQ ID NO: 3898619 - RNA, 16 nt, Human adenovirus A
cauguauaauaaaacu

SEQ ID NO: 3898620 - RNA, 20 nt, Human adenovirus A
cauguggucaggucuaucaa

SEQ ID NO: 3898621 - RNA, 14 nt, Human adenovirus A
cauguuaaaaaacg

SEQ ID NO: 3898622 - RNA, 18 nt, Human adenovirus A
cauguuaagaaaugacac

SEQ ID NO: 3898623 - RNA, 11 nt, Human adenovirus A
cauuacaguag

SEQ ID NO: 3898624 - RNA, 22 nt, Human adenovirus A
cauuacccaagaauaaaaacac

SEQ ID NO: 3898625 - RNA, 23 nt, Human adenovirus A
cauuacccaagaauaaaaacaca

SEQ ID NO: 3898626 - RNA, 17 nt, Human adenovirus A
cauuacuccuaaaacug

SEQ ID NO: 3898627 - RNA, 15 nt, Human adenovirus A
cauuaucaugaaacu

SEQ ID NO: 3898628 - RNA, 16 nt, Human adenovirus A
cauucaacugaccagg

SEQ ID NO: 3898629 - RNA, 19 nt, Human adenovirus A
cauucgcagcgcacuggca

SEQ ID NO: 3898630 - RNA, 15 nt, Human adenovirus A
cauucuuccacuguu

SEQ ID NO: 3898631 - RNA, 12 nt, Human adenovirus A
cauugaaaccag

SEQ ID NO: 3898632 - RNA, 19 nt, Human adenovirus A
cauugacaaagaugcaaac

SEQ ID NO: 3898633 - RNA, 13 nt, Human adenovirus A
cauugcaacgcaa

SEQ ID NO: 3898634 - RNA, 22 nt, Human adenovirus A
cauuggcgcuacggcugucaug

SEQ ID NO: 3898635 - RNA, 16 nt, Human adenovirus A
cauuguaaaugcuuug

SEQ ID NO: 3898636 - RNA, 20 nt, Human adenovirus A
cauuguuggccuguauguga

SEQ ID NO: 3898637 - RNA, 23 nt, Human adenovirus A
cauuuauaguggcacaacacaua

SEQ ID NO: 3898638 - RNA, 19 nt, Human adenovirus A
cauuuuggagcaagcggca

SEQ ID NO: 3898639 - RNA, 18 nt, Human adenovirus A
cauuuuuugaaaagacug

SEQ ID NO: 3898640 - RNA, 15 nt, Human adenovirus A
cauuuuuuguugcuc

SEQ ID NO: 3898641 - RNA, 18 nt, Human adenovirus A
ccaacaugaggcgguggu

SEQ ID NO: 3898642 - RNA, 21 nt, Human adenovirus A
ccaacgcgugaaucgcaguca

SEQ ID NO: 3898643 - RNA, 14 nt, Human adenovirus A
ccaacugguugggu

SEQ ID NO: 3898644 - RNA, 18 nt, Human adenovirus A
ccaagcguagccgcagca

SEQ ID NO: 3898645 - RNA, 14 nt, Human adenovirus A
ccaaguaacaacac

SEQ ID NO: 3898646 - RNA, 16 nt, Human adenovirus A
ccaauaaagaaaaaac

SEQ ID NO: 3898647 - RNA, 14 nt, Human adenovirus A
ccacacgcagcaac

SEQ ID NO: 3898648 - RNA, 18 nt, Human adenovirus A
ccacagccagugggucca

SEQ ID NO: 3898649 - RNA, 11 nt, Human adenovirus A
ccacaggaaag

SEQ ID NO: 3898650 - RNA, 15 nt, Human adenovirus A
ccacagguggugggg

SEQ ID NO: 3898651 - RNA, 17 nt, Human adenovirus A
ccaccgccaugcgcgcg

SEQ ID NO: 3898652 - RNA, 20 nt, Human adenovirus A
ccaccgccaugcgcgcggcc

SEQ ID NO: 3898653 - RNA, 23 nt, Human adenovirus A
ccacggacaccuacuucacccug

SEQ ID NO: 3898654 - RNA, 21 nt, Human adenovirus A
ccacuaaagaccgaugcguua

SEQ ID NO: 3898655 - RNA, 21 nt, Human adenovirus A
ccacuugguguuucaggaaaa

SEQ ID NO: 3898656 - RNA, 19 nt, Human adenovirus A
ccagaaaguaucugcccau

SEQ ID NO: 3898657 - RNA, 20 nt, Human adenovirus A
ccagagcaccccuucccacc

SEQ ID NO: 3898658 - RNA, 16 nt, Human adenovirus A
ccagauuguggaauaa

SEQ ID NO: 3898659 - RNA, 15 nt, Human adenovirus A
ccagcgccaccugcc

SEQ ID NO: 3898660 - RNA, 18 nt, Human adenovirus A
ccagcuaacgccaccagc

SEQ ID NO: 3898661 - RNA, 16 nt, Human adenovirus A
ccaggcaggcgcggcg

SEQ ID NO: 3898662 - RNA, 15 nt, Human adenovirus A
ccaggcgggcugcaa

SEQ ID NO: 3898663 - RNA, 16 nt, Human adenovirus A
ccaggcgggcugcaac

SEQ ID NO: 3898664 - RNA, 14 nt, Human adenovirus A
ccaggggugguggg

SEQ ID NO: 3898665 - RNA, 14 nt, Human adenovirus A
ccagguaauuuuca

SEQ ID NO: 3898666 - RNA, 22 nt, Human adenovirus A
ccaguguuagucgcgcacuggg

SEQ ID NO: 3898667 - RNA, 21 nt, Human adenovirus A
uccaaugaaacccgcugugag

SEQ ID NO: 3898668 - RNA, 16 nt, Human adenovirus A
uccacggugcacuuuu

SEQ ID NO: 3898669 - RNA, 19 nt, Human adenovirus A
uccagaaaguaucugccca

SEQ ID NO: 3898670 - RNA, 13 nt, Human adenovirus A
uccagagcccccg

SEQ ID NO: 3898671 - RNA, 20 nt, Human adenovirus A
uccaucaccuuugugugcua

SEQ ID NO: 3898672 - RNA, 21 nt, Human adenovirus A
uccauguggagguauaacaaa

SEQ ID NO: 3898673 - RNA, 23 nt, Human adenovirus A
uccauguuaaguuugggaaaguu

SEQ ID NO: 3898674 - RNA, 17 nt, Human adenovirus A
ucccacauacaucaccu

SEQ ID NO: 3898675 - RNA, 22 nt, Human adenovirus A
ucccauagcucaguuauauuuu

SEQ ID NO: 3898676 - RNA, 13 nt, Human adenovirus A
ucccauuacagua

SEQ ID NO: 3898677 - RNA, 20 nt, Human adenovirus A
ucccauuacaguagagucuu

SEQ ID NO: 3898678 - RNA, 19 nt, Human adenovirus A
ucccgauaccaaaaacacc

SEQ ID NO: 3898679 - RNA, 20 nt, Human adenovirus A
ucccgauaccaaaaacaccu

SEQ ID NO: 3898680 - RNA, 19 nt, Human adenovirus A
ucccucuuggccagcugcc

SEQ ID NO: 3898681 - RNA, 15 nt, Human adenovirus A
ucccugugcuucggc

SEQ ID NO: 3898682 - RNA, 23 nt, Human adenovirus A
uccgauaaaaaagguagcuccag

SEQ ID NO: 3898683 - RNA, 18 nt, Human adenovirus A
uccgcguggucaggaaga

SEQ ID NO: 3898684 - RNA, 16 nt, Human adenovirus A
uccguacaaggcauug

SEQ ID NO: 3898685 - RNA, 14 nt, Human adenovirus A
uccguggcaggcca

SEQ ID NO: 3898686 - RNA, 14 nt, Human adenovirus A
uccuaaugcuucac

SEQ ID NO: 3898687 - RNA, 20 nt, Human adenovirus A
uccuacaaggcucgcuuuac

SEQ ID NO: 3898688 - RNA, 20 nt, Human adenovirus A
uccucuuccucuucugcugc

SEQ ID NO: 3898689 - RNA, 14 nt, Human adenovirus A
uccucuucugcugc

SEQ ID NO: 3898690 - RNA, 22 nt, Human adenovirus A
uccugaugcuuuucgccagcag

SEQ ID NO: 3898691 - RNA, 19 nt, Human adenovirus A
uccugauuguagcuacaga

SEQ ID NO: 3898692 - RNA, 21 nt, Human adenovirus A
uccugcgacaaaugcgaccuc

SEQ ID NO: 3898693 - RNA, 13 nt, Human adenovirus A
uccuuucucugug

SEQ ID NO: 3898694 - RNA, 16 nt, Human adenovirus A
uccuuuucuuacauua

SEQ ID NO: 3898695 - RNA, 18 nt, Human adenovirus A
uccuuuuucuacaggcag

SEQ ID NO: 3898696 - RNA, 22 nt, Human adenovirus A
ucgacagugagccguccagcag

SEQ ID NO: 3898697 - RNA, 19 nt, Human adenovirus A
ucgaccuguggcaccugca

SEQ ID NO: 3898698 - RNA, 19 nt, Human adenovirus A
ucgagaucuaggcugugga

SEQ ID NO: 3898699 - RNA, 23 nt, Human adenovirus A
ucgcagcugacaucuuaaugcca

SEQ ID NO: 3898700 - RNA, 13 nt, Human adenovirus A
ucgcgacaacagc

SEQ ID NO: 3898701 - RNA, 15 nt, Human adenovirus A
ucgcuuuugccagac

SEQ ID NO: 3898702 - RNA, 15 nt, Human adenovirus A
ucggcggacagagca

SEQ ID NO: 3898703 - RNA, 21 nt, Human adenovirus A
ucggcuguauacuaccccucc

SEQ ID NO: 3898704 - RNA, 23 nt, Human adenovirus A
ucguccaaccaacgaacacggag

SEQ ID NO: 3898705 - RNA, 22 nt, Human adenovirus A
ucguguuauguggcgcauccca

SEQ ID NO: 3898706 - RNA, 20 nt, Human adenovirus A
ucuaaaguaccaggaagcug

SEQ ID NO: 3898707 - RNA, 23 nt, Human adenovirus A
ucuaaugcaaguuguaaggcaug

SEQ ID NO: 3898708 - RNA, 18 nt, Human adenovirus A
ucuacaacgagcaagccg

SEQ ID NO: 3898709 - RNA, 16 nt, Human adenovirus A
ucuacuguugaugcag

SEQ ID NO: 3898710 - RNA, 11 nt, Human adenovirus A
ucuagaaacug

SEQ ID NO: 3898711 - RNA, 16 nt, Human adenovirus A
ucuagaacaaaaagga

SEQ ID NO: 3898712 - RNA, 18 nt, Human adenovirus A
ucuagugcaacauuugua

SEQ ID NO: 3898713 - RNA, 15 nt, Human adenovirus A
ucuauagguacgaaa

SEQ ID NO: 3898714 - RNA, 18 nt, Human adenovirus A
ucuauaguaaaaaugcca

SEQ ID NO: 3898715 - RNA, 13 nt, Human adenovirus A
ucucauaaucagu

SEQ ID NO: 3898716 - RNA, 13 nt, Human adenovirus A
ucucuacagcccc

SEQ ID NO: 3898717 - RNA, 14 nt, Human adenovirus A
ucucuuuucuuuac

SEQ ID NO: 3898718 - RNA, 14 nt, Human adenovirus A
ucugcccauuuuug

SEQ ID NO: 3898719 - RNA, 14 nt, Human adenovirus A
ucuggaucuucaaa

SEQ ID NO: 3898720 - RNA, 19 nt, Human adenovirus A
ucuguguauacgccuccua

SEQ ID NO: 3898721 - RNA, 13 nt, Human adenovirus A
ucuuaaaaauuuu

SEQ ID NO: 3898722 - RNA, 18 nt, Human adenovirus A
ucuuacaugggcaucuug

SEQ ID NO: 3898723 - RNA, 18 nt, Human adenovirus A
ucuucagagcacacuggg

SEQ ID NO: 3898724 - RNA, 21 nt, Human adenovirus A
ucuucccaacugucaaaccug

SEQ ID NO: 3898725 - RNA, 18 nt, Human adenovirus A
ucuuuaaaaaucacaaaa

SEQ ID NO: 3898726 - RNA, 13 nt, Human adenovirus A
ucuuuagaaacuu

SEQ ID NO: 3898727 - RNA, 14 nt, Human adenovirus A
ucuuuugcagcucc

SEQ ID NO: 3898728 - RNA, 11 nt, Human adenovirus A
ugaacacacug

SEQ ID NO: 3898729 - RNA, 14 nt, Human adenovirus A
ugaacgauuuuaug

SEQ ID NO: 3898730 - RNA, 15 nt, Human adenovirus A
ugaaggcauuuaagg

SEQ ID NO: 3898731 - RNA, 13 nt, Human adenovirus A
ugaaucuguggau

SEQ ID NO: 3898732 - RNA, 20 nt, Human adenovirus A
ugaaugcguaaaucucgcag

SEQ ID NO: 3898733 - RNA, 23 nt, Human adenovirus A
ugaauguguuccaguauuuugua

SEQ ID NO: 3898734 - RNA, 18 nt, Human adenovirus A
ugaauguuuguacacuuu

SEQ ID NO: 3898735 - RNA, 15 nt, Human adenovirus A
ugacaaacguuuucc

SEQ ID NO: 3898736 - RNA, 18 nt, Human adenovirus A
ugaccaccuuacccuguc

SEQ ID NO: 3898737 - RNA, 20 nt, Human adenovirus A
ugacccaccaccaaacugca

SEQ ID NO: 3898738 - RNA, 12 nt, Human adenovirus A
ugacuggacagc

SEQ ID NO: 3898739 - RNA, 20 nt, Human adenovirus A
ugaggacacugaaggcauuu

SEQ ID NO: 3898740 - RNA, 16 nt, Human adenovirus A
ugaguaacuucaacau

SEQ ID NO: 3898741 - RNA, 22 nt, Human adenovirus A
ugaguuaucuugguaggcaauu

SEQ ID NO: 3898742 - RNA, 12 nt, Human adenovirus A
ugauaugaaguu

SEQ ID NO: 3898743 - RNA, 14 nt, Human adenovirus A
ugaucgcucuucaa

SEQ ID NO: 3898744 - RNA, 16 nt, Human adenovirus A
ugaugcauaaugcgga

SEQ ID NO: 3898745 - RNA, 14 nt, Human adenovirus A
caacaaaacacuga

SEQ ID NO: 3898746 - RNA, 21 nt, Human adenovirus A
caacaaaacuuaucagccaga

SEQ ID NO: 3898747 - RNA, 14 nt, Human adenovirus A
caacaacagcuucu

SEQ ID NO: 3898748 - RNA, 13 nt, Human adenovirus A
caacaagaugagu

SEQ ID NO: 3898749 - RNA, 17 nt, Human adenovirus A
caacaccaacaguuuaa

SEQ ID NO: 3898750 - RNA, 16 nt, Human adenovirus A
caacaguacaggcaac

SEQ ID NO: 3898751 - RNA, 19 nt, Human adenovirus A
caacauugcccuguaugcu

SEQ ID NO: 3898752 - RNA, 21 nt, Human adenovirus A
caaccguuuagagccgcggcc

SEQ ID NO: 3898753 - RNA, 19 nt, Human adenovirus A
caaccuauuaaccugggau

SEQ ID NO: 3898754 - RNA, 13 nt, Human adenovirus A
caacguagcuuuu

SEQ ID NO: 3898755 - RNA, 23 nt, Human adenovirus A
caacguagcuuuugacuguuccu

SEQ ID NO: 3898756 - RNA, 14 nt, Human adenovirus A
caacugauuuucau

SEQ ID NO: 3898757 - RNA, 17 nt, Human adenovirus A
caacuuaacccucccuc

SEQ ID NO: 3898758 - RNA, 18 nt, Human adenovirus A
caacuuuuaacauuagca

SEQ ID NO: 3898759 - RNA, 18 nt, Human adenovirus A
caagaaggccauguacuu

SEQ ID NO: 3898760 - RNA, 15 nt, Human adenovirus A
caagacagaaauaca

SEQ ID NO: 3898761 - RNA, 23 nt, Human adenovirus A
caagaccaguucgcccuccuagg

SEQ ID NO: 3898762 - RNA, 18 nt, Human adenovirus A
caagacggucagcaagga

SEQ ID NO: 3898763 - RNA, 19 nt, Human adenovirus A
caagauccggugacuuuuc

SEQ ID NO: 3898764 - RNA, 16 nt, Human adenovirus A
caagcacgccaaagcc

SEQ ID NO: 3898765 - RNA, 19 nt, Human adenovirus A
caagcacgccaaagccaca

SEQ ID NO: 3898766 - RNA, 23 nt, Human adenovirus A
caagcauguuaaaaaacgggaaa

SEQ ID NO: 3898767 - RNA, 13 nt, Human adenovirus A
caagcgcugaaac

SEQ ID NO: 3898768 - RNA, 17 nt, Human adenovirus A
caagcgugcaaacagac

SEQ ID NO: 3898769 - RNA, 11 nt, Human adenovirus A
caagcugaaac

SEQ ID NO: 3898770 - RNA, 13 nt, Human adenovirus A
caaggaaauacua

SEQ ID NO: 3898771 - RNA, 15 nt, Human adenovirus A
caaggcguggaacag

SEQ ID NO: 3898772 - RNA, 23 nt, Human adenovirus A
caagucuucugacauugcuucau

SEQ ID NO: 3898773 - RNA, 18 nt, Human adenovirus A
caaguucaaagaagagcu

SEQ ID NO: 3898774 - RNA, 21 nt, Human adenovirus A
caauaaaacaaggagccgcuc

SEQ ID NO: 3898775 - RNA, 17 nt, Human adenovirus A
caauaaagaaaaaacuu

SEQ ID NO: 3898776 - RNA, 20 nt, Human adenovirus A
caauaaauacugcucccucu

SEQ ID NO: 3898777 - RNA, 16 nt, Human adenovirus A
caauacugaauauuua

SEQ ID NO: 3898778 - RNA, 13 nt, Human adenovirus A
caauauuccagcu

SEQ ID NO: 3898779 - RNA, 23 nt, Human adenovirus A
caauccaaggaugacaacauuga

SEQ ID NO: 3898780 - RNA, 13 nt, Human adenovirus A
caaucucaguguc

SEQ ID NO: 3898781 - RNA, 15 nt, Human adenovirus A
caaugaaacccgcug

SEQ ID NO: 3898782 - RNA, 20 nt, Human adenovirus A
caaugaauaagccaccgcuc

SEQ ID NO: 3898783 - RNA, 15 nt, Human adenovirus A
caaugacaaugaaua

SEQ ID NO: 3898784 - RNA, 21 nt, Human adenovirus A
caaugcagcuguggagggcau

SEQ ID NO: 3898785 - RNA, 20 nt, Human adenovirus A
caauuugccuaaaagcuauu

SEQ ID NO: 3898786 - RNA, 11 nt, Human adenovirus A
cacaaaacaca

SEQ ID NO: 3898787 - RNA, 15 nt, Human adenovirus A
cacaaaacacaaauu

SEQ ID NO: 3898788 - RNA, 23 nt, Human adenovirus A
cacaauaacuacaaacaguuuca

SEQ ID NO: 3898789 - RNA, 14 nt, Human adenovirus A
cacaaugcauuaau

SEQ ID NO: 3898790 - RNA, 23 nt, Human adenovirus A
cacacuaauagcgcgagaagaag

SEQ ID NO: 3898791 - RNA, 13 nt, Human adenovirus A
cacagcuggcgca

SEQ ID NO: 3898792 - RNA, 22 nt, Human adenovirus A
cacagcuggcgcacaaguugca

SEQ ID NO: 3898793 - RNA, 14 nt, Human adenovirus A
cacagucacaaggu

SEQ ID NO: 3898794 - RNA, 13 nt, Human adenovirus A
cacauacaucacc

SEQ ID NO: 3898795 - RNA, 12 nt, Human adenovirus A
cacaucuacaaa

SEQ ID NO: 3898796 - RNA, 21 nt, Human adenovirus A
cacaugauggaucuggagcca

SEQ ID NO: 3898797 - RNA, 14 nt, Human adenovirus A
cacaugucuccuuc

SEQ ID NO: 3898798 - RNA, 20 nt, Human adenovirus A
cacauucaacugaccagguc

SEQ ID NO: 3898799 - RNA, 16 nt, Human adenovirus A
caccaaacgcccgcua

SEQ ID NO: 3898800 - RNA, 20 nt, Human adenovirus A
caccaaauuuaaggccaggg

SEQ ID NO: 3898801 - RNA, 15 nt, Human adenovirus A
caccaccaaacugca

SEQ ID NO: 3898802 - RNA, 20 nt, Human adenovirus A
caccagguguauuagcacuu

SEQ ID NO: 3898803 - RNA, 21 nt, Human adenovirus A
caccaugguaaaaaggaagca

SEQ ID NO: 3898804 - RNA, 15 nt, Human adenovirus A
caccgcccaggcagg

SEQ ID NO: 3898805 - RNA, 21 nt, Human adenovirus A
caccgcucccgccauuggcgc

SEQ ID NO: 3898806 - RNA, 23 nt, Human adenovirus A
caccucaaaaucuaagccaugca

SEQ ID NO: 3898807 - RNA, 11 nt, Human adenovirus A
caccugccauu

SEQ ID NO: 3898808 - RNA, 14 nt, Human adenovirus A
caccuuuuguuaau

SEQ ID NO: 3898809 - RNA, 19 nt, Human adenovirus A
cacgccaaagccacaccuc

SEQ ID NO: 3898810 - RNA, 20 nt, Human adenovirus A
cacgccaaagccacaccucc

SEQ ID NO: 3898811 - RNA, 21 nt, Human adenovirus A
cacggccggaugcagaggaaa

SEQ ID NO: 3898812 - RNA, 22 nt, Human adenovirus A
cacgggcccauguaucagcagc

SEQ ID NO: 3898813 - RNA, 21 nt, Human adenovirus A
cacgggcuggggacugggugc

SEQ ID NO: 3898814 - RNA, 18 nt, Human adenovirus A
cacgguuccacggugcac

SEQ ID NO: 3898815 - RNA, 15 nt, Human adenovirus A
cacucugacacaaaa

SEQ ID NO: 3898816 - RNA, 23 nt, Human adenovirus A
cacuggcaacauaccauauuuuc

SEQ ID NO: 3898817 - RNA, 15 nt, Human adenovirus A
cacuggcuggcuuuu

SEQ ID NO: 3898818 - RNA, 14 nt, Human adenovirus A
cacuguaagaggag

SEQ ID NO: 3898819 - RNA, 15 nt, Human adenovirus A
cacuguagugcaaaa

SEQ ID NO: 3898820 - RNA, 23 nt, Human adenovirus A
cacugucagugaagcaaaccaca

SEQ ID NO: 3898821 - RNA, 17 nt, Human adenovirus A
cacuguuguauuauuug

SEQ ID NO: 3898822 - RNA, 20 nt, Human adenovirus A
cacuuggcuucgaaugcugu

SEQ ID NO: 3898823 - RNA, 21 nt, Human adenovirus A
cacuuuaauaaaaacacugug

SEQ ID NO: 3898824 - RNA, 23 nt, Human adenovirus A
cagaacauguuucgcgacaacag

SEQ ID NO: 3898825 - RNA, 23 nt, Human adenovirus A
cagaaggaguaauaaaaccugug

SEQ ID NO: 3898826 - RNA, 13 nt, Human adenovirus A
cagaauauaagaa

SEQ ID NO: 3898827 - RNA, 18 nt, Human adenovirus A
cagaauauaagaacuaca

SEQ ID NO: 3898828 - RNA, 15 nt, Human adenovirus A
cagacaguggcuuuu

SEQ ID NO: 3898829 - RNA, 23 nt, Human adenovirus A
cagacuaaauggaagacaucaau

SEQ ID NO: 3898830 - RNA, 17 nt, Human adenovirus A
cagagcacacugggaaa

SEQ ID NO: 3898831 - RNA, 14 nt, Human adenovirus A
cagagcgcggcugc

SEQ ID NO: 3898832 - RNA, 17 nt, Human adenovirus A
cagaugauggaaagccg

SEQ ID NO: 3898833 - RNA, 22 nt, Human adenovirus A
cagaugggaaaaucaauaccac

SEQ ID NO: 3898834 - RNA, 20 nt, Human adenovirus A
cagauguaacaggcggcucc

SEQ ID NO: 3898835 - RNA, 18 nt, Human adenovirus A
cagauuaagcaacauacu

SEQ ID NO: 3898836 - RNA, 14 nt, Human adenovirus A
cagcaaacacugcu

SEQ ID NO: 3898837 - RNA, 16 nt, Human adenovirus A
gaaacuuucagcccau

SEQ ID NO: 3898838 - RNA, 18 nt, Human adenovirus A
gaaaguaacucuuguaaa

SEQ ID NO: 3898839 - RNA, 14 nt, Human adenovirus A
gaaaugaggcgcgc

SEQ ID NO: 3898840 - RNA, 22 nt, Human adenovirus A
gaacaacuuuuaacauuagcag

SEQ ID NO: 3898841 - RNA, 17 nt, Human adenovirus A
gaacaauaaaaaaaaca

SEQ ID NO: 3898842 - RNA, 15 nt, Human adenovirus A
gaacaauuucaucaa

SEQ ID NO: 3898843 - RNA, 19 nt, Human adenovirus A
gaacacgguacuuuuccuu

SEQ ID NO: 3898844 - RNA, 17 nt, Human adenovirus A
gaacagacaccgcccag

SEQ ID NO: 3898845 - RNA, 15 nt, Human adenovirus A
gaacaucaacugugc

SEQ ID NO: 3898846 - RNA, 13 nt, Human adenovirus A
gaaccuuugacaa

SEQ ID NO: 3898847 - RNA, 17 nt, Human adenovirus A
gaacggagagggugacg

SEQ ID NO: 3898848 - RNA, 14 nt, Human adenovirus A
gaacgguugcuucu

SEQ ID NO: 3898849 - RNA, 14 nt, Human adenovirus A
gaacuaaacaaacu

SEQ ID NO: 3898850 - RNA, 22 nt, Human adenovirus A
gaacuauuaagugaaagucaag

SEQ ID NO: 3898851 - RNA, 18 nt, Human adenovirus A
gaagaauggcuguugaug

SEQ ID NO: 3898852 - RNA, 14 nt, Human adenovirus A
gaagagcugcugca

SEQ ID NO: 3898853 - RNA, 19 nt, Human adenovirus A
gaagcgguaugucggccug

SEQ ID NO: 3898854 - RNA, 17 nt, Human adenovirus A
gaagcugagcaaugcua

SEQ ID NO: 3898855 - RNA, 13 nt, Human adenovirus A
gaagcuggccaua

SEQ ID NO: 3898856 - RNA, 23 nt, Human adenovirus A
gaaggucagauucuucuucccaa

SEQ ID NO: 3898857 - RNA, 13 nt, Human adenovirus A
gaaguaagcuguu

SEQ ID NO: 3898858 - RNA, 16 nt, Human adenovirus A
gaaguaagcuguuuua

SEQ ID NO: 3898859 - RNA, 22 nt, Human adenovirus A
gaaguagccauugguuuaaugc

SEQ ID NO: 3898860 - RNA, 23 nt, Human adenovirus A
gaaguauuccaugagcccgggga

SEQ ID NO: 3898861 - RNA, 20 nt, Human adenovirus A
gaagucaacuaaaaauuguu

SEQ ID NO: 3898862 - RNA, 16 nt, Human adenovirus A
gaauaaaauuucuaga

SEQ ID NO: 3898863 - RNA, 12 nt, Human adenovirus A
gaaucuguggau

SEQ ID NO: 3898864 - RNA, 14 nt, Human adenovirus A
gaauuacuaaaaca

SEQ ID NO: 3898865 - RNA, 15 nt, Human adenovirus A
gacaacuuaacaaau

SEQ ID NO: 3898866 - RNA, 16 nt, Human adenovirus A
gacaaguugcuuucca

SEQ ID NO: 3898867 - RNA, 16 nt, Human adenovirus A
gacaccgcccaggcag

SEQ ID NO: 3898868 - RNA, 18 nt, Human adenovirus A
gacaccgcccaggcaggc

SEQ ID NO: 3898869 - RNA, 15 nt, Human adenovirus A
gacagaguugcuuuu

SEQ ID NO: 3898870 - RNA, 12 nt, Human adenovirus A
gacagcaagcag

SEQ ID NO: 3898871 - RNA, 13 nt, Human adenovirus A
gacagugugagug

SEQ ID NO: 3898872 - RNA, 14 nt, Human adenovirus A
gacaguuucaucac

SEQ ID NO: 3898873 - RNA, 21 nt, Human adenovirus A
gacauccaugugaugccggca

SEQ ID NO: 3898874 - RNA, 12 nt, Human adenovirus A
gacccauauuag

SEQ ID NO: 3898875 - RNA, 23 nt, Human adenovirus A
gacccgacggaguguuucagcuc

SEQ ID NO: 3898876 - RNA, 12 nt, Human adenovirus A
gaccugcaacag

SEQ ID NO: 3898877 - RNA, 17 nt, Human adenovirus A
gacgcucuggcagggga

SEQ ID NO: 3898878 - RNA, 13 nt, Human adenovirus A
gacgggccaggcg

SEQ ID NO: 3898879 - RNA, 12 nt, Human adenovirus A
gacucagugacc

SEQ ID NO: 3898880 - RNA, 15 nt, Human adenovirus A
gacucauaagcugug

SEQ ID NO: 3898881 - RNA, 11 nt, Human adenovirus A
gacuuccaggu

SEQ ID NO: 3898882 - RNA, 15 nt, Human adenovirus A
gacuucccacagcca

SEQ ID NO: 3898883 - RNA, 22 nt, Human adenovirus A
gacuuggaagaaugggaggagg

SEQ ID NO: 3898884 - RNA, 15 nt, Human adenovirus A
gacuuuguagaagcu

SEQ ID NO: 3898885 - RNA, 18 nt, Human adenovirus A
gagaaccgucugcaugau

SEQ ID NO: 3898886 - RNA, 15 nt, Human adenovirus A
gagaagcggagccac

SEQ ID NO: 3898887 - RNA, 16 nt, Human adenovirus A
gagaaggacaaaaguc

SEQ ID NO: 3898888 - RNA, 23 nt, Human adenovirus A
gagacuucccacagccagugggu

SEQ ID NO: 3898889 - RNA, 23 nt, Human adenovirus A
gagauuggcaauguuaccugcca

SEQ ID NO: 3898890 - RNA, 15 nt, Human adenovirus A
gagcaccccuuccca

SEQ ID NO: 3898891 - RNA, 17 nt, Human adenovirus A
gagccacagccccuagc

SEQ ID NO: 3898892 - RNA, 13 nt, Human adenovirus A
gagccacagcucu

SEQ ID NO: 3898893 - RNA, 19 nt, Human adenovirus A
gagccacuucauucaucau

SEQ ID NO: 3898894 - RNA, 14 nt, Human adenovirus A
gagccauguugugc

SEQ ID NO: 3898895 - RNA, 20 nt, Human adenovirus A
gagcccgaaguugacuggca

SEQ ID NO: 3898896 - RNA, 20 nt, Human adenovirus A
gagcccggcguaaccaaaua

SEQ ID NO: 3898897 - RNA, 22 nt, Human adenovirus A
gagcccuauccgucuccagcua

SEQ ID NO: 3898898 - RNA, 15 nt, Human adenovirus A
gagcgcccuuaacca

SEQ ID NO: 3898899 - RNA, 18 nt, Human adenovirus A
gagcggcugacagagcgc

SEQ ID NO: 3898900 - RNA, 23 nt, Human adenovirus A
gagcuguccaugguaucagucag

SEQ ID NO: 3898901 - RNA, 17 nt, Human adenovirus A
gaggaauaucaacugcu

SEQ ID NO: 3898902 - RNA, 16 nt, Human adenovirus A
gaggacgaccccgccg

SEQ ID NO: 3898903 - RNA, 22 nt, Human adenovirus A
gaggcguagaugugcuguggaa

SEQ ID NO: 3898904 - RNA, 21 nt, Human adenovirus A
gagggugccacccccagugcc

SEQ ID NO: 3898905 - RNA, 14 nt, Human adenovirus A
gaggucaagaacac

SEQ ID NO: 3898906 - RNA, 14 nt, Human adenovirus A
auuuaaggccaggg

SEQ ID NO: 3898907 - RNA, 11 nt, Human adenovirus A
auuuaggacac

SEQ ID NO: 3898908 - RNA, 20 nt, Human adenovirus A
auuuccagguggggaaaaug

SEQ ID NO: 3898909 - RNA, 16 nt, Human adenovirus A
auuucuaauguggagc

SEQ ID NO: 3898910 - RNA, 12 nt, Human adenovirus A
auuucuuccucc

SEQ ID NO: 3898911 - RNA, 19 nt, Human adenovirus A
auuugaaauuuuuaagugg

SEQ ID NO: 3898912 - RNA, 14 nt, Human adenovirus A
auuugaacacacug

SEQ ID NO: 3898913 - RNA, 15 nt, Human adenovirus A
auuugacuuccaggu

SEQ ID NO: 3898914 - RNA, 14 nt, Human adenovirus A
auuugaucagaaaa

SEQ ID NO: 3898915 - RNA, 19 nt, Human adenovirus A
auuuggauuuucugaucaa

SEQ ID NO: 3898916 - RNA, 20 nt, Human adenovirus A
auuugucugaaaauugcaug

SEQ ID NO: 3898917 - RNA, 13 nt, Human adenovirus A
auuuuaacuguga

SEQ ID NO: 3898918 - RNA, 18 nt, Human adenovirus A
auuuuauccuacaaaaag

SEQ ID NO: 3898919 - RNA, 16 nt, Human adenovirus A
auuuuauuauuugcug

SEQ ID NO: 3898920 - RNA, 17 nt, Human adenovirus A
auuuucuccccacagcu

SEQ ID NO: 3898921 - RNA, 22 nt, Human adenovirus A
auuuugcaaguguaauuuucca

SEQ ID NO: 3898922 - RNA, 15 nt, Human adenovirus A
auuuugccagcucuu

SEQ ID NO: 3898923 - RNA, 19 nt, Human adenovirus A
auuuuucuuuuauuucucu

SEQ ID NO: 3898924 - RNA, 19 nt, Human adenovirus A
auuuuuugggaaccuuuga

SEQ ID NO: 3898925 - RNA, 21 nt, Human adenovirus A
caaaaauuuucccaacaaugg

SEQ ID NO: 3898926 - RNA, 17 nt, Human adenovirus A
caaaaggcgcuccuaau

SEQ ID NO: 3898927 - RNA, 20 nt, Human adenovirus A
caaaauaccccuauccuguc

SEQ ID NO: 3898928 - RNA, 17 nt, Human adenovirus A
caaaauugaggaauguc

SEQ ID NO: 3898929 - RNA, 18 nt, Human adenovirus A
caaacacggauacuuaau

SEQ ID NO: 3898930 - RNA, 18 nt, Human adenovirus A
caaacagccgaaagacca

SEQ ID NO: 3898931 - RNA, 15 nt, Human adenovirus A
caaacagcuguggaa

SEQ ID NO: 3898932 - RNA, 10 nt, Human adenovirus A
caaacagugc

SEQ ID NO: 3898933 - RNA, 18 nt, Human adenovirus A
caaacgauuauugucaca

SEQ ID NO: 3898934 - RNA, 20 nt, Human adenovirus A
caaacggguggaaaaacaac

SEQ ID NO: 3898935 - RNA, 12 nt, Human adenovirus A
caaacuacauag

SEQ ID NO: 3898936 - RNA, 19 nt, Human adenovirus A
cuaacugcucagcuggaag

SEQ ID NO: 3898937 - RNA, 21 nt, Human adenovirus A
cuaagaaggcacccucccaga

SEQ ID NO: 3898938 - RNA, 12 nt, Human adenovirus A
cuaauagcacuu

SEQ ID NO: 3898939 - RNA, 22 nt, Human adenovirus A
cuaauugcccccuuuaccaaca

SEQ ID NO: 3898940 - RNA, 14 nt, Human adenovirus A
cuacaacugcuccc

SEQ ID NO: 3898941 - RNA, 14 nt, Human adenovirus A
cuacacaacacaaa

SEQ ID NO: 3898942 - RNA, 15 nt, Human adenovirus A
cuacacaacacaaaa

SEQ ID NO: 3898943 - RNA, 21 nt, Human adenovirus A
cuacauuggaguuggaagaag

SEQ ID NO: 3898944 - RNA, 17 nt, Human adenovirus A
cuaccaccuaagaaggc

SEQ ID NO: 3898945 - RNA, 14 nt, Human adenovirus A
cuaccugacacuac

SEQ ID NO: 3898946 - RNA, 15 nt, Human adenovirus A
cuacgcugguaacua

SEQ ID NO: 3898947 - RNA, 20 nt, Human adenovirus A
cuacgugcgccaagccugua

SEQ ID NO: 3898948 - RNA, 19 nt, Human adenovirus A
cuacuaacaacuccagaug

SEQ ID NO: 3898949 - RNA, 16 nt, Human adenovirus A
cuacucacgagaaagu

SEQ ID NO: 3898950 - RNA, 20 nt, Human adenovirus A
cuacuucaccgcgcaagcuu

SEQ ID NO: 3898951 - RNA, 22 nt, Human adenovirus A
cuacuuuauaacuaacuuuaau

SEQ ID NO: 3898952 - RNA, 20 nt, Human adenovirus A
cuagagcacaugaaggugga

SEQ ID NO: 3898953 - RNA, 18 nt, Human adenovirus A
cuagccaacauccagugc

SEQ ID NO: 3898954 - RNA, 19 nt, Human adenovirus A
cuagccaacauccagugcg

SEQ ID NO: 3898955 - RNA, 20 nt, Human adenovirus A
cuagccccugucaacagcau

SEQ ID NO: 3898956 - RNA, 17 nt, Human adenovirus A
cuagcuuaccacucaga

SEQ ID NO: 3898957 - RNA, 23 nt, Human adenovirus A
cuaguucuugucaacuacauaaa

SEQ ID NO: 3898958 - RNA, 22 nt, Human adenovirus A
cuauaacaguaccaaugugcag

SEQ ID NO: 3898959 - RNA, 18 nt, Human adenovirus A
cuaucaaacuauauaaau

SEQ ID NO: 3898960 - RNA, 17 nt, Human adenovirus A
cuaucaucaaacugccu

SEQ ID NO: 3898961 - RNA, 12 nt, Human adenovirus A
cuaugaaucuuu

SEQ ID NO: 3898962 - RNA, 20 nt, Human adenovirus A
cuaugaugcgggcagccagg

SEQ ID NO: 3898963 - RNA, 16 nt, Human adenovirus A
cuauuguuaacacugc

SEQ ID NO: 3898964 - RNA, 13 nt, Human adenovirus A
cucaaaaacucca

SEQ ID NO: 3898965 - RNA, 21 nt, Human adenovirus A
cucaaacgccgacgcugcuac

SEQ ID NO: 3898966 - RNA, 16 nt, Human adenovirus A
cucaaagugaagugua

SEQ ID NO: 3898967 - RNA, 18 nt, Human adenovirus A
cucacauuguguaaccag

SEQ ID NO: 3898968 - RNA, 15 nt, Human adenovirus A
cucacuuaagucuuu

SEQ ID NO: 3898969 - RNA, 16 nt, Human adenovirus A
cucacuuugccuaccc

SEQ ID NO: 3898970 - RNA, 17 nt, Human adenovirus A
cucauccgcccaaacuu

SEQ ID NO: 3898971 - RNA, 15 nt, Human adenovirus A
cucaugaccauguaa

SEQ ID NO: 3898972 - RNA, 12 nt, Human adenovirus A
cucauuugcaag

SEQ ID NO: 3898973 - RNA, 20 nt, Human adenovirus A
cuccaaccaugaaaacagca

SEQ ID NO: 3898974 - RNA, 19 nt, Human adenovirus A
cuccaauuuguggaggaau

SEQ ID NO: 3898975 - RNA, 14 nt, Human adenovirus A
cuccauggggcgcg

SEQ ID NO: 3898976 - RNA, 13 nt, Human adenovirus A
cucccacccauga

SEQ ID NO: 3898977 - RNA, 12 nt, Human adenovirus A
cuccccacagcu

SEQ ID NO: 3898978 - RNA, 15 nt, Human adenovirus A
cuccccauucgcagc

SEQ ID NO: 3898979 - RNA, 13 nt, Human adenovirus A
cuccccuguggag

SEQ ID NO: 3898980 - RNA, 22 nt, Human adenovirus A
cuccgugaguuggccuggaaau

SEQ ID NO: 3898981 - RNA, 21 nt, Human adenovirus A
cuccuauguuagcgccagagg

SEQ ID NO: 3898982 - RNA, 12 nt, Human adenovirus A
cuccugccacca

SEQ ID NO: 3898983 - RNA, 14 nt, Human adenovirus A
cuccuuauccuucc

SEQ ID NO: 3898984 - RNA, 15 nt, Human adenovirus A
cucgcagcucuuauu

SEQ ID NO: 3898985 - RNA, 17 nt, Human adenovirus A
cucgcagcucuuauuuu

SEQ ID NO: 3898986 - RNA, 17 nt, Human adenovirus A
cucgucaagccuaccug

SEQ ID NO: 3898987 - RNA, 21 nt, Human adenovirus A
cucuaaguucuguuucaugua

SEQ ID NO: 3898988 - RNA, 14 nt, Human adenovirus A
cucuccaauuugug

SEQ ID NO: 3898989 - RNA, 17 nt, Human adenovirus A
cucuggcgaacaggaag

SEQ ID NO: 3898990 - RNA, 18 nt, Human adenovirus A
cucuguaguuucuuuaca

SEQ ID NO: 3898991 - RNA, 22 nt, Human adenovirus A
cucuuauaggccaaacagcugu

SEQ ID NO: 3898992 - RNA, 14 nt, Human adenovirus A
cucuucccaacugu

SEQ ID NO: 3898993 - RNA, 16 nt, Human adenovirus A
cucuuuugcagcucca

SEQ ID NO: 3898994 - RNA, 13 nt, Human adenovirus A
cugaaaacaacug

SEQ ID NO: 3898995 - RNA, 15 nt, Human adenovirus A
cugaacgggggcgcc

SEQ ID NO: 3898996 - RNA, 23 nt, Human adenovirus A
cugaagcgcgugucuucucccug

SEQ ID NO: 3898997 - RNA, 16 nt, Human adenovirus A
cugaaggcauuuaagg

SEQ ID NO: 3898998 - RNA, 15 nt, Human adenovirus A
cugaagugccucaaa

SEQ ID NO: 3898999 - RNA, 14 nt, Human adenovirus A
cugacauacacugu

SEQ ID NO: 3899000 - RNA, 16 nt, Human adenovirus A
cugacgggagcaggaa

SEQ ID NO: 3899001 - RNA, 15 nt, Human adenovirus A
cugacgucacuggcg

SEQ ID NO: 3899002 - RNA, 14 nt, Human adenovirus A
cugacuauuucaca

SEQ ID NO: 3899003 - RNA, 15 nt, Human adenovirus A
cugacuauuucacaa

SEQ ID NO: 3899004 - RNA, 18 nt, Human adenovirus A
cugagaaccgucugcaug

SEQ ID NO: 3899005 - RNA, 19 nt, Human adenovirus A
cugagacuucccacagcca

SEQ ID NO: 3899006 - RNA, 14 nt, Human adenovirus A
cugagcaaugcuac

SEQ ID NO: 3899007 - RNA, 22 nt, Human adenovirus A
cugaggaaaugcgagacugcag

SEQ ID NO: 3899008 - RNA, 22 nt, Human adenovirus A
cugauaacaagaacaccuacga

SEQ ID NO: 3899009 - RNA, 18 nt, Human adenovirus A
cugaucuagaaauugaug

SEQ ID NO: 3899010 - RNA, 19 nt, Human adenovirus A
cugcaaaccgcgcuuuucu

SEQ ID NO: 3899011 - RNA, 15 nt, Human adenovirus A
cugcacuaacucuga

SEQ ID NO: 3899012 - RNA, 12 nt, Human adenovirus A
cugcagcuuccg

SEQ ID NO: 3899013 - RNA, 16 nt, Human adenovirus A
cugccaccgucaauuc

SEQ ID NO: 3899014 - RNA, 21 nt, Human adenovirus A
cugccgccacgaaugcuggcg

SEQ ID NO: 3899015 - RNA, 13 nt, Human adenovirus A
cugccgcugcaau

SEQ ID NO: 3899016 - RNA, 23 nt, Human adenovirus A
cugccgcugcaaucuuugcaccc

SEQ ID NO: 3899017 - RNA, 24 nt, Human adenovirus A
cugccgcugcguagcaguaucagu

SEQ ID NO: 3899018 - RNA, 15 nt, Human adenovirus A
cugccuaccugcgca

SEQ ID NO: 3899019 - RNA, 20 nt, Human adenovirus A
cugccugacugaaccauucc

SEQ ID NO: 3899020 - RNA, 13 nt, Human adenovirus A
cugccuguugaau

SEQ ID NO: 3899021 - RNA, 19 nt, Human adenovirus A
cugcgggaagcgggggaag

SEQ ID NO: 3899022 - RNA, 19 nt, Human adenovirus A
cugcggugguggagaagua

SEQ ID NO: 3899023 - RNA, 23 nt, Human adenovirus A
cugcguucacuuacccgcagcug

SEQ ID NO: 3899024 - RNA, 12 nt, Human adenovirus A
cugcucagcugg

SEQ ID NO: 3899025 - RNA, 15 nt, Human adenovirus A
cugcugucauuugug

SEQ ID NO: 3899026 - RNA, 23 nt, Human adenovirus A
cuggaaccauucccuauuuagac

SEQ ID NO: 3899027 - RNA, 21 nt, Human adenovirus A
cuggaagucaacuaaaaauug

SEQ ID NO: 3899028 - RNA, 19 nt, Human adenovirus A
cuggaauaacaagccuagg

SEQ ID NO: 3899029 - RNA, 17 nt, Human adenovirus A
cuggacagcggccaugg

SEQ ID NO: 3899030 - RNA, 14 nt, Human adenovirus A
cuggacauggaaaa

SEQ ID NO: 3899031 - RNA, 18 nt, Human adenovirus A
cuggagcagguguaacca

SEQ ID NO: 3899032 - RNA, 15 nt, Human adenovirus A
cuggcgaacaggaag

SEQ ID NO: 3899033 - RNA, 23 nt, Human adenovirus A
cuggugguauuggaacucuccaa

SEQ ID NO: 3899034 - RNA, 23 nt, Human adenovirus A
cuguacagaaaaaaauugccaac

SEQ ID NO: 3899035 - RNA, 17 nt, Human adenovirus A
cugucaaaccugacaga

SEQ ID NO: 3899036 - RNA, 16 nt, Human adenovirus A
cugucaacagcauugg

SEQ ID NO: 3899037 - RNA, 21 nt, Human adenovirus A
cugucgagcuaaccgcagccg

SEQ ID NO: 3899038 - RNA, 17 nt, Human adenovirus A
cugugacaaaaagacug

SEQ ID NO: 3899039 - RNA, 22 nt, Human adenovirus A
cugugagugcugauugcuggcc

SEQ ID NO: 3899040 - RNA, 17 nt, Human adenovirus A
cuguggacccuauuuuu

SEQ ID NO: 3899041 - RNA, 23 nt, Human adenovirus A
cuguuacauaccuggcaaacugg

SEQ ID NO: 3899042 - RNA, 18 nt, Human adenovirus A
cuguucuuaguaggcuaa

SEQ ID NO: 3899043 - RNA, 15 nt, Human adenovirus A
cuguugggacagcaa

SEQ ID NO: 3899044 - RNA, 16 nt, Human adenovirus A
cuuaaaaaaacaaaac

SEQ ID NO: 3899045 - RNA, 14 nt, Human adenovirus A
cuuaacaaaaaacg

SEQ ID NO: 3899046 - RNA, 15 nt, Human adenovirus A
cuuaacccucccucu

SEQ ID NO: 3899047 - RNA, 22 nt, Human adenovirus A
cuuaaugccaguuguauaaaau

SEQ ID NO: 3899048 - RNA, 10 nt, Human adenovirus A
cuuacaguau

SEQ ID NO: 3899049 - RNA, 14 nt, Human adenovirus A
cuuacauuauguaa

SEQ ID NO: 3899050 - RNA, 23 nt, Human adenovirus A
cuuagaagacaaagagugacuca

SEQ ID NO: 3899051 - RNA, 17 nt, Human adenovirus A
cuuagauuuuucaucug

SEQ ID NO: 3899052 - RNA, 21 nt, Human adenovirus A
cuuaguaacagcauaugaaca

SEQ ID NO: 3899053 - RNA, 13 nt, Human adenovirus A
cuuaguauuuguc

SEQ ID NO: 3899054 - RNA, 18 nt, Human adenovirus A
cuuagucauuacaacauu

SEQ ID NO: 3899055 - RNA, 16 nt, Human adenovirus A
cacuguaagaggagac

SEQ ID NO: 3899056 - RNA, 22 nt, Human adenovirus A
cacugucgccaaccucacugcu

SEQ ID NO: 3899057 - RNA, 23 nt, Human adenovirus A
cacuuacgaauggaacuuuagaa

SEQ ID NO: 3899058 - RNA, 19 nt, Human adenovirus A
cacuuauugcugcggccau

SEQ ID NO: 3899059 - RNA, 22 nt, Human adenovirus A
cacuucauuuuaauauuggcac

SEQ ID NO: 3899060 - RNA, 17 nt, Human adenovirus A
cacuuuauaugcuauuu

SEQ ID NO: 3899061 - RNA, 13 nt, Human adenovirus A
cagaaaaaaauug

SEQ ID NO: 3899062 - RNA, 22 nt, Human adenovirus A
cagaaaaacaguacaaagccag

SEQ ID NO: 3899063 - RNA, 13 nt, Human adenovirus A
cagaaaaaguuuc

SEQ ID NO: 3899064 - RNA, 13 nt, Human adenovirus A
cagaaagccaacc

SEQ ID NO: 3899065 - RNA, 18 nt, Human adenovirus A
cagaaaguuguagauggu

SEQ ID NO: 3899066 - RNA, 15 nt, Human adenovirus A
cagaacauacaacuu

SEQ ID NO: 3899067 - RNA, 20 nt, Human adenovirus A
cagaagccagcagcaaagaa

SEQ ID NO: 3899068 - RNA, 15 nt, Human adenovirus A
cagaauaaaacaagc

SEQ ID NO: 3899069 - RNA, 18 nt, Human adenovirus A
cagacaguggcuuuuccu

SEQ ID NO: 3899070 - RNA, 20 nt, Human adenovirus A
cagacuacguuuuacauccu

SEQ ID NO: 3899071 - RNA, 14 nt, Human adenovirus A
cagagcacuaaaau

SEQ ID NO: 3899072 - RNA, 19 nt, Human adenovirus A
cagagggaaagguauucag

SEQ ID NO: 3899073 - RNA, 22 nt, Human adenovirus A
cagauacuggugcguccaccag

SEQ ID NO: 3899074 - RNA, 17 nt, Human adenovirus A
cagaugacuggacagcg

SEQ ID NO: 3899075 - RNA, 20 nt, Human adenovirus A
cagaugacuggacagcggcc

SEQ ID NO: 3899076 - RNA, 14 nt, Human adenovirus A
cagauguaaaagua

SEQ ID NO: 3899077 - RNA, 23 nt, Human adenovirus A
cagcaaagaaaguucaccuccag

SEQ ID NO: 3899078 - RNA, 16 nt, Human adenovirus A
cagcagcagcaacacu

SEQ ID NO: 3899079 - RNA, 15 nt, Human adenovirus A
cagcagcgguggcgc

SEQ ID NO: 3899080 - RNA, 17 nt, Human adenovirus A
cagcauaaaagcuucaa

SEQ ID NO: 3899081 - RNA, 13 nt, Human adenovirus A
cagcauggagugc

SEQ ID NO: 3899082 - RNA, 23 nt, Human adenovirus A
cagcccaacccuucccaacuacu

SEQ ID NO: 3899083 - RNA, 15 nt, Human adenovirus A
cagccuagacgagga

SEQ ID NO: 3899084 - RNA, 18 nt, Human adenovirus A
cagcgagucaccaucacu

SEQ ID NO: 3899085 - RNA, 16 nt, Human adenovirus A
cagcggcgccacccua

SEQ ID NO: 3899086 - RNA, 19 nt, Human adenovirus A
cagcggggaggaagcugag

SEQ ID NO: 3899087 - RNA, 17 nt, Human adenovirus A
cagcgguaguuguugcu

SEQ ID NO: 3899088 - RNA, 19 nt, Human adenovirus A
cagcgucccaaaagcaucc

SEQ ID NO: 3899089 - RNA, 20 nt, Human adenovirus A
cagcguuggcguuccgucaa

SEQ ID NO: 3899090 - RNA, 21 nt, Human adenovirus A
cagcugacgacaguaguguau

SEQ ID NO: 3899091 - RNA, 14 nt, Human adenovirus A
cagcugcugucacu

SEQ ID NO: 3899092 - RNA, 22 nt, Human adenovirus A
cagcuguggagggcauggcuga

SEQ ID NO: 3899093 - RNA, 11 nt, Human adenovirus A
aaaaauguuuu

SEQ ID NO: 3899094 - RNA, 16 nt, Human adenovirus A
aaaaauguuuucugga

SEQ ID NO: 3899095 - RNA, 20 nt, Human adenovirus A
aaaaauuuucccaacaaugg

SEQ ID NO: 3899096 - RNA, 14 nt, Human adenovirus A
aaaacaaguuuccc

SEQ ID NO: 3899097 - RNA, 12 nt, Human adenovirus A
aaaacagcagcg

SEQ ID NO: 3899098 - RNA, 21 nt, Human adenovirus A
aaaagcaaccaaaugagcaaa

SEQ ID NO: 3899099 - RNA, 18 nt, Human adenovirus A
aaaagugugguaacaugu

SEQ ID NO: 3899100 - RNA, 20 nt, Human adenovirus A
aaaauagggguaaugugguu

SEQ ID NO: 3899101 - RNA, 17 nt, Human adenovirus A
aaaauucggcuauuuac

SEQ ID NO: 3899102 - RNA, 18 nt, Human adenovirus A
aaaauuuucccaacaaug

SEQ ID NO: 3899103 - RNA, 13 nt, Human adenovirus A
aaacaaacuacau

SEQ ID NO: 3899104 - RNA, 16 nt, Human adenovirus A
aaacaacaaaacacug

SEQ ID NO: 3899105 - RNA, 24 nt, Human adenovirus A
aaacaaggucuagccaacauccag

SEQ ID NO: 3899106 - RNA, 12 nt, Human adenovirus A
aaacacacacaa

SEQ ID NO: 3899107 - RNA, 19 nt, Human adenovirus A
aaacacaugauggaucugg

SEQ ID NO: 3899108 - RNA, 16 nt, Human adenovirus A
aaacacugagcuccau

SEQ ID NO: 3899109 - RNA, 23 nt, Human adenovirus A
aaacaggcuauugcgcagcaacg

SEQ ID NO: 3899110 - RNA, 22 nt, Human adenovirus A
aaacagugccuguugaucuguc

SEQ ID NO: 3899111 - RNA, 22 nt, Human adenovirus A
aaacauucgcagcgcacuggca

SEQ ID NO: 3899112 - RNA, 22 nt, Human adenovirus A
aaacuggauuugcgcacugaaa

SEQ ID NO: 3899113 - RNA, 14 nt, Human adenovirus A
aaagaaacagcagc

SEQ ID NO: 3899114 - RNA, 10 nt, Human adenovirus A
aaagaaacuc

SEQ ID NO: 3899115 - RNA, 20 nt, Human adenovirus A
aaagaauuauucccgcagcc

SEQ ID NO: 3899116 - RNA, 13 nt, Human adenovirus A
aaagccaaauggu

SEQ ID NO: 3899117 - RNA, 20 nt, Human adenovirus A
aaagcgcagaguauccacac

SEQ ID NO: 3899118 - RNA, 17 nt, Human adenovirus A
aaagcuaaaucugccac

SEQ ID NO: 3899119 - RNA, 23 nt, Human adenovirus A
aaagcuggguugguguugcuuug

SEQ ID NO: 3899120 - RNA, 17 nt, Human adenovirus A
aaagcuuaaccgccccc

SEQ ID NO: 3899121 - RNA, 14 nt, Human adenovirus A
aaagcuucaauuug

SEQ ID NO: 3899122 - RNA, 16 nt, Human adenovirus A
aaagcuucaauuugcc

SEQ ID NO: 3899123 - RNA, 23 nt, Human adenovirus A
aaaggaggaagaacauccaacug

SEQ ID NO: 3899124 - RNA, 21 nt, Human adenovirus A
aaaggcaggcauuaccucugu

SEQ ID NO: 3899125 - RNA, 15 nt, Human adenovirus A
aaaggcauggaaaaa

SEQ ID NO: 3899126 - RNA, 13 nt, Human adenovirus A
aaaguaugcugca

SEQ ID NO: 3899127 - RNA, 18 nt, Human adenovirus A
aaagucauccaaagauca

SEQ ID NO: 3899128 - RNA, 13 nt, Human adenovirus A
aaagucuguugcg

SEQ ID NO: 3899129 - RNA, 16 nt, Human adenovirus A
aaauaguuccguaaag

SEQ ID NO: 3899130 - RNA, 13 nt, Human adenovirus A
aaauaucauauac

SEQ ID NO: 3899131 - RNA, 19 nt, Human adenovirus A
aaaucagaagccagcagca

SEQ ID NO: 3899132 - RNA, 17 nt, Human adenovirus A
aaaucccuauggaccgg

SEQ ID NO: 3899133 - RNA, 21 nt, Human adenovirus A
aaauggauacucuuuaacauu

SEQ ID NO: 3899134 - RNA, 14 nt, Human adenovirus A
aaaugggaaaugag

SEQ ID NO: 3899135 - RNA, 17 nt, Human adenovirus A
aaaugugccuaugaccc

SEQ ID NO: 3899136 - RNA, 12 nt, Human adenovirus A
aaauguguacuu

SEQ ID NO: 3899137 - RNA, 22 nt, Human adenovirus A
aaauugcucgaugaugcauaau

SEQ ID NO: 3899138 - RNA, 16 nt, Human adenovirus A
aaauuucccucuuccc

SEQ ID NO: 3899139 - RNA, 19 nt, Human adenovirus A
aacaacgcugggcauggug

SEQ ID NO: 3899140 - RNA, 20 nt, Human adenovirus A
aacaacucuacuuaaaagca

SEQ ID NO: 3899141 - RNA, 22 nt, Human adenovirus A
aacaacugcacuugaauauuuc

SEQ ID NO: 3899142 - RNA, 20 nt, Human adenovirus A
aacaagcgaccucugaaaca

SEQ ID NO: 3899143 - RNA, 15 nt, Human adenovirus A
aacaaguuuagaaac

SEQ ID NO: 3899144 - RNA, 17 nt, Human adenovirus A
aacaauugcuucugagu

SEQ ID NO: 3899145 - RNA, 18 nt, Human adenovirus A
aacaauuugcaucucacc

SEQ ID NO: 3899146 - RNA, 17 nt, Human adenovirus A
aacacacugauuuugca

SEQ ID NO: 3899147 - RNA, 18 nt, Human adenovirus A
aacacaguuuaacacaua

SEQ ID NO: 3899148 - RNA, 23 nt, Human adenovirus A
aacacaguuuaacacauacagua

SEQ ID NO: 3899149 - RNA, 14 nt, Human adenovirus A
aacacaugucuccu

SEQ ID NO: 3899150 - RNA, 20 nt, Human adenovirus A
aacacggaguaaugaacaag

SEQ ID NO: 3899151 - RNA, 13 nt, Human adenovirus A
aacagcuauugca

SEQ ID NO: 3899152 - RNA, 15 nt, Human adenovirus A
aacaguacaaagcca

SEQ ID NO: 3899153 - RNA, 16 nt, Human adenovirus A
aacaguacaaagccag

SEQ ID NO: 3899154 - RNA, 22 nt, Human adenovirus A
aacaguacaaagccaggcacag

SEQ ID NO: 3899155 - RNA, 17 nt, Human adenovirus A
aacaguaccaaugugca

SEQ ID NO: 3899156 - RNA, 20 nt, Human adenovirus A
aacaucaugaaaacagcagc

SEQ ID NO: 3899157 - RNA, 18 nt, Human adenovirus A
aacaugauucuucagagc

SEQ ID NO: 3899158 - RNA, 12 nt, Human adenovirus A
aacauuaaaaga

SEQ ID NO: 3899159 - RNA, 19 nt, Human adenovirus A
aacauuagcagucugguac

SEQ ID NO: 3899160 - RNA, 13 nt, Human adenovirus A
aacauucgcagcg

SEQ ID NO: 3899161 - RNA, 16 nt, Human adenovirus A
aaccaaucuacaaacu

SEQ ID NO: 3899162 - RNA, 20 nt, Human adenovirus A
aaccagagcaccccuuccca

SEQ ID NO: 3899163 - RNA, 12 nt, Human adenovirus A
aaccagcugggc

SEQ ID NO: 3899164 - RNA, 18 nt, Human adenovirus A
aaccagcugggcagaaag

SEQ ID NO: 3899165 - RNA, 17 nt, Human adenovirus A
aaccaugacuauugacu

SEQ ID NO: 3899166 - RNA, 18 nt, Human adenovirus A
aacccauuugcaucugca

SEQ ID NO: 3899167 - RNA, 13 nt, Human adenovirus A
aaccccaaaagcc

SEQ ID NO: 3899168 - RNA, 21 nt, Human adenovirus A
aaccgucgccagcaagugccu

SEQ ID NO: 3899169 - RNA, 19 nt, Human adenovirus A
aacgaccgccuuuucuaga

SEQ ID NO: 3899170 - RNA, 20 nt, Human adenovirus A
aacgaccgccuuuucuagaa

SEQ ID NO: 3899171 - RNA, 23 nt, Human adenovirus A
aacgagggagauguccuguuuaa

SEQ ID NO: 3899172 - RNA, 15 nt, Human adenovirus A
aacgcucguugccca

SEQ ID NO: 3899173 - RNA, 11 nt, Human adenovirus A
aacggagaggg

SEQ ID NO: 3899174 - RNA, 15 nt, Human adenovirus A
aacggaggaggaggu

SEQ ID NO: 3899175 - RNA, 14 nt, Human adenovirus A
aacuaacuuuaaug

SEQ ID NO: 3899176 - RNA, 18 nt, Human adenovirus A
aacuaacuuuaauguuuc

SEQ ID NO: 3899177 - RNA, 19 nt, Human adenovirus A
aacucuacuuaaaagcaag

SEQ ID NO: 3899178 - RNA, 19 nt, Human adenovirus A
aacugaccaggucagcuca

SEQ ID NO: 3899179 - RNA, 18 nt, Human adenovirus A
aacugccuccuucccauu

SEQ ID NO: 3899180 - RNA, 16 nt, Human adenovirus A
aacuuaguaacagcau

SEQ ID NO: 3899181 - RNA, 15 nt, Human adenovirus A
aacuuaucagccaga

SEQ ID NO: 3899182 - RNA, 14 nt, Human adenovirus A
aacuuuaauguuuc

SEQ ID NO: 3899183 - RNA, 14 nt, Human adenovirus A
aagaaaagcgugga

SEQ ID NO: 3899184 - RNA, 15 nt, Human adenovirus A
aagaaaaugaacaaa

SEQ ID NO: 3899185 - RNA, 13 nt, Human adenovirus A
aagaaacagcagc

SEQ ID NO: 3899186 - RNA, 21 nt, Human adenovirus A
aagaacacggugaauguguuc

SEQ ID NO: 3899187 - RNA, 13 nt, Human adenovirus A
aagaagaacgcau

SEQ ID NO: 3899188 - RNA, 16 nt, Human adenovirus A
aagaaugggaggagga

SEQ ID NO: 3899189 - RNA, 12 nt, Human adenovirus A
aagacagaaaua

SEQ ID NO: 3899190 - RNA, 20 nt, Human adenovirus A
aagacagaaauacagagcug

SEQ ID NO: 3899191 - RNA, 24 nt, Human adenovirus A
aagacagaaauacagagcugucau

SEQ ID NO: 3899192 - RNA, 23 nt, Human adenovirus A
aagacgcaccgguugagcagaac

SEQ ID NO: 3899193 - RNA, 13 nt, Human adenovirus A
aagagccacagcu

SEQ ID NO: 3899194 - RNA, 12 nt, Human adenovirus A
aagaggaggguu

SEQ ID NO: 3899195 - RNA, 15 nt, Human adenovirus A
aagauacuaccuacu

SEQ ID NO: 3899196 - RNA, 16 nt, Human adenovirus A
aagaucaguagcuaag

SEQ ID NO: 3899197 - RNA, 20 nt, Human adenovirus A
aagauccguacaaggcauug

SEQ ID NO: 3899198 - RNA, 18 nt, Human adenovirus A
aagaucuucguaggaaag

SEQ ID NO: 3899199 - RNA, 23 nt, Human adenovirus A
aagauguaugaguaagagcaaag

SEQ ID NO: 3899200 - RNA, 12 nt, Human adenovirus A
aagcaaaugcau

SEQ ID NO: 3899201 - RNA, 15 nt, Human adenovirus A
aagcaauaaaacaag

SEQ ID NO: 3899202 - RNA, 14 nt, Human adenovirus A
aagcagccauaaug

SEQ ID NO: 3899203 - RNA, 16 nt, Human adenovirus A
aagcaguagaaaguag

SEQ ID NO: 3899204 - RNA, 14 nt, Human adenovirus A
aagccaacggcaca

SEQ ID NO: 3899205 - RNA, 15 nt, Human adenovirus A
aagcgacgagcaauu

SEQ ID NO: 3899206 - RNA, 14 nt, Human adenovirus A
aagcgaugacucag

SEQ ID NO: 3899207 - RNA, 13 nt, Human adenovirus A
aagcgcaauauug

SEQ ID NO: 3899208 - RNA, 16 nt, Human adenovirus A
aagcgucccaugagcu

SEQ ID NO: 3899209 - RNA, 15 nt, Human adenovirus A
aagcgugaguaagcc

SEQ ID NO: 3899210 - RNA, 19 nt, Human adenovirus A
aagcuauuugagccuucau

SEQ ID NO: 3899211 - RNA, 22 nt, Human adenovirus A
aagcugaaacuaggggcuggcu

SEQ ID NO: 3899212 - RNA, 20 nt, Human adenovirus A
aaaaaaccuucgagaacuaa

SEQ ID NO: 3899213 - RNA, 13 nt, Human adenovirus A
aaaacaaaaccac

SEQ ID NO: 3899214 - RNA, 22 nt, Human adenovirus A
aaaacaguuucuggagcaggug

SEQ ID NO: 3899215 - RNA, 20 nt, Human adenovirus A
aaaacaucacucuauuucaa

SEQ ID NO: 3899216 - RNA, 21 nt, Human adenovirus A
aaaacuuaaugcccaagguca

SEQ ID NO: 3899217 - RNA, 13 nt, Human adenovirus A
aaaagaucaagga

SEQ ID NO: 3899218 - RNA, 16 nt, Human adenovirus A
aaaagcacaacuccau

SEQ ID NO: 3899219 - RNA, 20 nt, Human adenovirus A
aaaauaacacauaagcauua

SEQ ID NO: 3899220 - RNA, 17 nt, Human adenovirus A
aaaaucauacaaaucag

SEQ ID NO: 3899221 - RNA, 17 nt, Human adenovirus A
aaaaugaugacuucaac

SEQ ID NO: 3899222 - RNA, 21 nt, Human adenovirus A
aaaaugcguuuaguccaauuu

SEQ ID NO: 3899223 - RNA, 23 nt, Human adenovirus A
aaaauuacaaaggcauuaagcca

SEQ ID NO: 3899224 - RNA, 14 nt, Human adenovirus A
aaacacaugaugga

SEQ ID NO: 3899225 - RNA, 20 nt, Human adenovirus A
aaacagcaaacuuucuccaa

SEQ ID NO: 3899226 - RNA, 12 nt, Human adenovirus A
aaacagcagcaa

SEQ ID NO: 3899227 - RNA, 20 nt, Human adenovirus A
aaacaguauugugggacugg

SEQ ID NO: 3899228 - RNA, 19 nt, Human adenovirus A
aaacauaaaacuaccugau

SEQ ID NO: 3899229 - RNA, 17 nt, Human adenovirus A
aaaccacguacgaccac

SEQ ID NO: 3899230 - RNA, 22 nt, Human adenovirus A
aaacccaauuaguaacuccggg

SEQ ID NO: 3899231 - RNA, 13 nt, Human adenovirus A
aaacgagcagcaa

SEQ ID NO: 3899232 - RNA, 19 nt, Human adenovirus A
aaagaauuauucccgcagc

SEQ ID NO: 3899233 - RNA, 14 nt, Human adenovirus A
aaagaccccauugu

SEQ ID NO: 3899234 - RNA, 14 nt, Human adenovirus A
aaagaucaguagcu

SEQ ID NO: 3899235 - RNA, 18 nt, Human adenovirus A
aaagcagaugggaaaauc

SEQ ID NO: 3899236 - RNA, 18 nt, Human adenovirus A
aaagcagccauaaugccu

SEQ ID NO: 3899237 - RNA, 16 nt, Human adenovirus A
aaaguagaaaucucgu

SEQ ID NO: 3899238 - RNA, 14 nt, Human adenovirus A
aaaguaucugccca

SEQ ID NO: 3899239 - RNA, 22 nt, Human adenovirus A
aaagucagacuauuacacucag

SEQ ID NO: 3899240 - RNA, 21 nt, Human adenovirus A
aaaguggucagauccuuagau

SEQ ID NO: 3899241 - RNA, 22 nt, Human adenovirus A
aaauaaagcguucuguggaugg

SEQ ID NO: 3899242 - RNA, 22 nt, Human adenovirus A
aaauaaugcauuaccagcagcc

SEQ ID NO: 3899243 - RNA, 16 nt, Human adenovirus A
aaauacgaaaacaguc

SEQ ID NO: 3899244 - RNA, 16 nt, Human adenovirus A
aaauauaaaagcacaa

SEQ ID NO: 3899245 - RNA, 17 nt, Human adenovirus A
aaauauuuacuaugauu

SEQ ID NO: 3899246 - RNA, 15 nt, Human adenovirus A
aaaucauacaaauca

SEQ ID NO: 3899247 - RNA, 12 nt, Human adenovirus A
aaaugaccccau

SEQ ID NO: 3899248 - RNA, 21 nt, Human adenovirus A
aaaugaucuucggguggacgg

SEQ ID NO: 3899249 - RNA, 14 nt, Human adenovirus A
aaauuccugugcaa

SEQ ID NO: 3899250 - RNA, 19 nt, Human adenovirus A
aaauuguguacuuuucaaa

SEQ ID NO: 3899251 - RNA, 22 nt, Human adenovirus A
aaauuugcauuucccaagauuu

SEQ ID NO: 3899252 - RNA, 20 nt, Human adenovirus A
aacaaaagcaaagcaaaugc

SEQ ID NO: 3899253 - RNA, 13 nt, Human adenovirus A
aacaacaaaacac

SEQ ID NO: 3899254 - RNA, 22 nt, Human adenovirus A
aacaaccucccgauaccaaaaa

SEQ ID NO: 3899255 - RNA, 17 nt, Human adenovirus A
aacaaugaaaguugcau

SEQ ID NO: 3899256 - RNA, 20 nt, Human adenovirus A
aacaaugaaaguugcauuua

SEQ ID NO: 3899257 - RNA, 20 nt, Human adenovirus A
aacacggaggacaauccaag

SEQ ID NO: 3899258 - RNA, 20 nt, Human adenovirus A
aacagaaaguuguagauggu

SEQ ID NO: 3899259 - RNA, 12 nt, Human adenovirus A
aacagaccccaa

SEQ ID NO: 3899260 - RNA, 21 nt, Human adenovirus A
aacagacgaauaagcucggcc

SEQ ID NO: 3899261 - RNA, 14 nt, Human adenovirus A
aacagacgcucucc

SEQ ID NO: 3899262 - RNA, 19 nt, Human adenovirus A
aacagcaaacuuucuccaa

SEQ ID NO: 3899263 - RNA, 14 nt, Human adenovirus A
aacaguaccaaugu

SEQ ID NO: 3899264 - RNA, 20 nt, Human adenovirus A
aacagucaguguccaucagc

SEQ ID NO: 3899265 - RNA, 13 nt, Human adenovirus A
aacaguuucugga

SEQ ID NO: 3899266 - RNA, 13 nt, Human adenovirus A
aacauaaaacuac

SEQ ID NO: 3899267 - RNA, 15 nt, Human adenovirus A
aacaucgcaaaacac

SEQ ID NO: 3899268 - RNA, 14 nt, Human adenovirus A
aaccaaauacugcu

SEQ ID NO: 3899269 - RNA, 20 nt, Human adenovirus A
aaccaagcccucuccaauga

SEQ ID NO: 3899270 - RNA, 19 nt, Human adenovirus A
aaccacggccucagcagcg

SEQ ID NO: 3899271 - RNA, 14 nt, Human adenovirus A
aacccggccaagga

SEQ ID NO: 3899272 - RNA, 13 nt, Human adenovirus A
aaccguuuagagc

SEQ ID NO: 3899273 - RNA, 16 nt, Human adenovirus A
aaccuacacaugaagg

SEQ ID NO: 3899274 - RNA, 15 nt, Human adenovirus A
aacgcaagcgugcaa

SEQ ID NO: 3899275 - RNA, 19 nt, Human adenovirus A
aacgccaccagcgugccca

SEQ ID NO: 3899276 - RNA, 14 nt, Human adenovirus A
aacgggcagccugu

SEQ ID NO: 3899277 - RNA, 13 nt, Human adenovirus A
aacggguggaaaa

SEQ ID NO: 3899278 - RNA, 18 nt, Human adenovirus A
aacggguggaaaaacaac

SEQ ID NO: 3899279 - RNA, 16 nt, Human adenovirus A
aacgguuaagcugggu

SEQ ID NO: 3899280 - RNA, 22 nt, Human adenovirus A
aacguagcuuuugacuguuccu

SEQ ID NO: 3899281 - RNA, 21 nt, Human adenovirus A
aacuaaccgucgccagcaagu

SEQ ID NO: 3899282 - RNA, 18 nt, Human adenovirus A
aacuacauuacgccccca

SEQ ID NO: 3899283 - RNA, 17 nt, Human adenovirus A
aacuaccugauaacaag

SEQ ID NO: 3899284 - RNA, 14 nt, Human adenovirus A
aacuacucagaaca

SEQ ID NO: 3899285 - RNA, 18 nt, Human adenovirus A
aacuaugccaguuuacug

SEQ ID NO: 3899286 - RNA, 15 nt, Human adenovirus A
aacuccgcgcaagga

SEQ ID NO: 3899287 - RNA, 16 nt, Human adenovirus A
aacugcagacaguggc

SEQ ID NO: 3899288 - RNA, 22 nt, Human adenovirus A
aacugggggcguacacuggcug

SEQ ID NO: 3899289 - RNA, 23 nt, Human adenovirus A
aacuuucuccaaaucuuaaaugg

SEQ ID NO: 3899290 - RNA, 13 nt, Human adenovirus A
aagaaugggagga

SEQ ID NO: 3899291 - RNA, 22 nt, Human adenovirus A
aagaccccauuguaacugaaaa

SEQ ID NO: 3899292 - RNA, 16 nt, Human adenovirus A
aagagguaucgcagcc

SEQ ID NO: 3899293 - RNA, 20 nt, Human adenovirus A
aagaucuucguaggaaagau

SEQ ID NO: 3899294 - RNA, 17 nt, Human adenovirus A
aagaugauugaaccuga

SEQ ID NO: 3899295 - RNA, 23 nt, Human adenovirus A
aagcaaaccacugcaaugcagcc

SEQ ID NO: 3899296 - RNA, 16 nt, Human adenovirus A
aagcacgccaaagcca

SEQ ID NO: 3899297 - RNA, 21 nt, Human adenovirus A
aagcagcgccaaauagagcaa

SEQ ID NO: 3899298 - RNA, 16 nt, Human adenovirus A
aagcaguagugccguc

SEQ ID NO: 3899299 - RNA, 23 nt, Human adenovirus A
aagccacuuuagccccagcggca

SEQ ID NO: 3899300 - RNA, 22 nt, Human adenovirus A
aagccgucuacucacagcuuau

SEQ ID NO: 3899301 - RNA, 20 nt, Human adenovirus A
aagccuagggggggagccgu

SEQ ID NO: 3899302 - RNA, 18 nt, Human adenovirus A
aagcgaagaucaguugca

SEQ ID NO: 3899303 - RNA, 13 nt, Human adenovirus A
aagcgcugaaaca

SEQ ID NO: 3899304 - RNA, 16 nt, Human adenovirus A
aagcgucacuacagac

SEQ ID NO: 3899305 - RNA, 15 nt, Human adenovirus A
aagcuaauaccuguc

SEQ ID NO: 3899306 - RNA, 22 nt, Human adenovirus A
aagcucuguucaauaaauacug

SEQ ID NO: 3899307 - RNA, 22 nt, Human adenovirus A
aaggaaaguaacucuuguaaag

SEQ ID NO: 3899308 - RNA, 14 nt, Human adenovirus A
aaggaggaagaaca

SEQ ID NO: 3899309 - RNA, 21 nt, Human adenovirus A
aagguacuaacauuaagcgac

SEQ ID NO: 3899310 - RNA, 14 nt, Human adenovirus A
aagguguguaaaca

SEQ ID NO: 3899311 - RNA, 18 nt, Human adenovirus A
aaguacuacuaccacugu

SEQ ID NO: 3899312 - RNA, 20 nt, Human adenovirus A
aaguaggauagcaccugccg

SEQ ID NO: 3899313 - RNA, 22 nt, Human adenovirus A
aagucacguguucacaauuuuc

SEQ ID NO: 3899314 - RNA, 17 nt, Human adenovirus A
aagugucuuguuaaugu

SEQ ID NO: 3899315 - RNA, 23 nt, Human adenovirus A
aaguucaaagaagagcugcugca

SEQ ID NO: 3899316 - RNA, 16 nt, Human adenovirus A
aauaaagaaaaaacuu

SEQ ID NO: 3899317 - RNA, 20 nt, Human adenovirus A
aauaaucaauuuugcaagug

SEQ ID NO: 3899318 - RNA, 15 nt, Human adenovirus A
aauaauuggcuucag

SEQ ID NO: 3899319 - RNA, 13 nt, Human adenovirus A
aauaccugucuug

SEQ ID NO: 3899320 - RNA, 21 nt, Human adenovirus A
aauauaaaagcacaacuccau

SEQ ID NO: 3899321 - RNA, 19 nt, Human adenovirus A
aauauugagguuacucacu

SEQ ID NO: 3899322 - RNA, 15 nt, Human adenovirus A
aauauuguauuucca

SEQ ID NO: 3899323 - RNA, 22 nt, Human adenovirus A
aaucagaagccagcagcaaaga

SEQ ID NO: 3899324 - RNA, 18 nt, Human adenovirus A
aaucaggcuguacagaaa

SEQ ID NO: 3899325 - RNA, 19 nt, Human adenovirus A
aauccaaggaugacaacau

SEQ ID NO: 3899326 - RNA, 12 nt, Human adenovirus A
aaucggcggcgc

SEQ ID NO: 3899327 - RNA, 14 nt, Human adenovirus A
auauaaaguuuaaa

SEQ ID NO: 3899328 - RNA, 18 nt, Human adenovirus A
auauagccgccauggaaa

SEQ ID NO: 3899329 - RNA, 18 nt, Human adenovirus A
auauaguacugcuuccag

SEQ ID NO: 3899330 - RNA, 11 nt, Human adenovirus A
auaugcauuua

SEQ ID NO: 3899331 - RNA, 18 nt, Human adenovirus A
auaugcuauuuuucagca

SEQ ID NO: 3899332 - RNA, 16 nt, Human adenovirus A
auauuaaaaagcucug

SEQ ID NO: 3899333 - RNA, 14 nt, Human adenovirus A
auauucccacgccu

SEQ ID NO: 3899334 - RNA, 20 nt, Human adenovirus A
auauuugcugaaaaaagucu

SEQ ID NO: 3899335 - RNA, 23 nt, Human adenovirus A
aucaaauuguaagcgauuuucca

SEQ ID NO: 3899336 - RNA, 17 nt, Human adenovirus A
aucaacuuaacccuccc

SEQ ID NO: 3899337 - RNA, 16 nt, Human adenovirus A
aucagaagccagcagc

SEQ ID NO: 3899338 - RNA, 13 nt, Human adenovirus A
aucagcagccaac

SEQ ID NO: 3899339 - RNA, 17 nt, Human adenovirus A
aucagccuuucucuaca

SEQ ID NO: 3899340 - RNA, 15 nt, Human adenovirus A
aucaguguaaaaaag

SEQ ID NO: 3899341 - RNA, 22 nt, Human adenovirus A
aucauacauaauuuuaaaguaa

SEQ ID NO: 3899342 - RNA, 15 nt, Human adenovirus A
aucauaguugugguc

SEQ ID NO: 3899343 - RNA, 14 nt, Human adenovirus A
aucauauacauaua

SEQ ID NO: 3899344 - RNA, 16 nt, Human adenovirus A
auccuacaaaaaguaa

SEQ ID NO: 3899345 - RNA, 17 nt, Human adenovirus A
auccuagcguacagcca

SEQ ID NO: 3899346 - RNA, 19 nt, Human adenovirus A
auccuagcguacagccaga

SEQ ID NO: 3899347 - RNA, 17 nt, Human adenovirus A
auccuaggcaaagaaac

SEQ ID NO: 3899348 - RNA, 23 nt, Human adenovirus A
auccugucgagcuaaccgcagcc

SEQ ID NO: 3899349 - RNA, 20 nt, Human adenovirus A
auccuuagauuuuucaucug

SEQ ID NO: 3899350 - RNA, 22 nt, Human adenovirus A
auccuuccauugugcccacgcc

SEQ ID NO: 3899351 - RNA, 19 nt, Human adenovirus A
auccuuuuucuacaggcag

SEQ ID NO: 3899352 - RNA, 18 nt, Human adenovirus A
aucggcaacagcagcaac

SEQ ID NO: 3899353 - RNA, 19 nt, Human adenovirus A
aucucuacagccccuuuga

SEQ ID NO: 3899354 - RNA, 23 nt, Human adenovirus A
aucuugggcaaaauaugcuguac

SEQ ID NO: 3899355 - RNA, 17 nt, Human adenovirus A
aucuuguuuccagugcg

SEQ ID NO: 3899356 - RNA, 13 nt, Human adenovirus A
augaaaacaaugu

SEQ ID NO: 3899357 - RNA, 23 nt, Human adenovirus A
augaaaguugcauuuaauggcau

SEQ ID NO: 3899358 - RNA, 11 nt, Human adenovirus A
augaacaaugc

SEQ ID NO: 3899359 - RNA, 11 nt, Human adenovirus A
augaauuaaau

SEQ ID NO: 3899360 - RNA, 14 nt, Human adenovirus A
augaauuaaauaaa

SEQ ID NO: 3899361 - RNA, 16 nt, Human adenovirus A
augaauuugaaauaaa

SEQ ID NO: 3899362 - RNA, 20 nt, Human adenovirus A
augagcaaaacgcugggcuc

SEQ ID NO: 3899363 - RNA, 14 nt, Human adenovirus A
augagccugaaccu

SEQ ID NO: 3899364 - RNA, 14 nt, Human adenovirus A
augaggcagucaca

SEQ ID NO: 3899365 - RNA, 19 nt, Human adenovirus A
augaugcgggcagccaggc

SEQ ID NO: 3899366 - RNA, 20 nt, Human adenovirus A
augaugcgggcagccaggcg

SEQ ID NO: 3899367 - RNA, 14 nt, Human adenovirus A
augauggaaagccg

SEQ ID NO: 3899368 - RNA, 12 nt, Human adenovirus A
augauggcuuuu

SEQ ID NO: 3899369 - RNA, 16 nt, Human adenovirus A
augcacaagagcggcg

SEQ ID NO: 3899370 - RNA, 14 nt, Human adenovirus A
augcagcaaacacu

SEQ ID NO: 3899371 - RNA, 13 nt, Human adenovirus A
augcagcugugga

SEQ ID NO: 3899372 - RNA, 14 nt, Human adenovirus A
augcgcauggcuuu

SEQ ID NO: 3899373 - RNA, 21 nt, Human adenovirus A
augcgcccggaacuauuucuu

SEQ ID NO: 3899374 - RNA, 16 nt, Human adenovirus A
augcgggcagccaggc

SEQ ID NO: 3899375 - RNA, 20 nt, Human adenovirus A
augcgugagggugccacccc

SEQ ID NO: 3899376 - RNA, 23 nt, Human adenovirus A
augcguuacccuagaaaagucaa

SEQ ID NO: 3899377 - RNA, 13 nt, Human adenovirus A
augcucuggacau

SEQ ID NO: 3899378 - RNA, 19 nt, Human adenovirus A
augcuuuagguuagccuga

SEQ ID NO: 3899379 - RNA, 14 nt, Human adenovirus A
auggaaaaaacgaa

SEQ ID NO: 3899380 - RNA, 14 nt, Human adenovirus A
auggaacaccagca

SEQ ID NO: 3899381 - RNA, 14 nt, Human adenovirus A
auggagaaggacaa

SEQ ID NO: 3899382 - RNA, 18 nt, Human adenovirus A
augggaggaaagacagcc

SEQ ID NO: 3899383 - RNA, 10 nt, Human adenovirus A
augguuuaac

SEQ ID NO: 3899384 - RNA, 14 nt, Human adenovirus A
auguaaaaaaauac

SEQ ID NO: 3899385 - RNA, 23 nt, Human adenovirus A
auguaacugaggagcugagaagu

SEQ ID NO: 3899386 - RNA, 23 nt, Human adenovirus A
auguaaguaggauagcaccugcc

SEQ ID NO: 3899387 - RNA, 18 nt, Human adenovirus A
augucaccuaaggcuuca

SEQ ID NO: 3899388 - RNA, 15 nt, Human adenovirus A
auguccuacauugga

SEQ ID NO: 3899389 - RNA, 21 nt, Human adenovirus A
augucggccugacgcucuggc

SEQ ID NO: 3899390 - RNA, 17 nt, Human adenovirus A
augugaaggcgccagga

SEQ ID NO: 3899391 - RNA, 22 nt, Human adenovirus A
augugcaaauauaaaagcacaa

SEQ ID NO: 3899392 - RNA, 22 nt, Human adenovirus A
auguucccauugacaaggaagu

SEQ ID NO: 3899393 - RNA, 13 nt, Human adenovirus A
auuaaaaugugcc

SEQ ID NO: 3899394 - RNA, 14 nt, Human adenovirus A
auuaccagcagcca

SEQ ID NO: 3899395 - RNA, 19 nt, Human adenovirus A
auuaccagcagccaaaacu

SEQ ID NO: 3899396 - RNA, 15 nt, Human adenovirus A
auuacuuuuaaauac

SEQ ID NO: 3899397 - RNA, 18 nt, Human adenovirus A
auuagcacuuaauuacaa

SEQ ID NO: 3899398 - RNA, 15 nt, Human adenovirus A
auuaguucuuuucuu

SEQ ID NO: 3899399 - RNA, 15 nt, Human adenovirus A
auuauuugugugcug

SEQ ID NO: 3899400 - RNA, 21 nt, Human adenovirus A
auucauauauguaucuggaca

SEQ ID NO: 3899401 - RNA, 13 nt, Human adenovirus A
auucauauugugg

SEQ ID NO: 3899402 - RNA, 14 nt, Human adenovirus A
auuccaugagcccg

SEQ ID NO: 3899403 - RNA, 20 nt, Human adenovirus A
auucgcaggcggucugccau

SEQ ID NO: 3899404 - RNA, 15 nt, Human adenovirus A
auucggcuauuuaca

SEQ ID NO: 3899405 - RNA, 16 nt, Human adenovirus A
auucuagcaaaaugaa

SEQ ID NO: 3899406 - RNA, 17 nt, Human adenovirus A
auucuuucuuuagaaac

SEQ ID NO: 3899407 - RNA, 16 nt, Human adenovirus A
auugaaguaagcuguu

SEQ ID NO: 3899408 - RNA, 17 nt, Human adenovirus A
auugacucgguaguggc

SEQ ID NO: 3899409 - RNA, 22 nt, Human adenovirus A
auugcaggggcucuuuuaagau

SEQ ID NO: 3899410 - RNA, 19 nt, Human adenovirus A
auugcgcaaaauugaggaa

SEQ ID NO: 3899411 - RNA, 16 nt, Human adenovirus A
auuggaaagcagcuug

SEQ ID NO: 3899412 - RNA, 12 nt, Human adenovirus A
auugggaguuca

SEQ ID NO: 3899413 - RNA, 18 nt, Human adenovirus A
auuggucccauccaaguu

SEQ ID NO: 3899414 - RNA, 14 nt, Human adenovirus A
auugucacauuaca

SEQ ID NO: 3899415 - RNA, 15 nt, Human adenovirus A
auuguuggccuguau

SEQ ID NO: 3899416 - RNA, 14 nt, Human adenovirus A
auuuaauuucagau

SEQ ID NO: 3899417 - RNA, 14 nt, Human adenovirus A
auuucuagaaauuu

SEQ ID NO: 3899418 - RNA, 19 nt, Human adenovirus A
auuucuuccuccuggaggu

SEQ ID NO: 3899419 - RNA, 13 nt, Human adenovirus A
auuugaacacacu

SEQ ID NO: 3899420 - RNA, 22 nt, Human adenovirus A
auuugaaugcguaaaucucgca

SEQ ID NO: 3899421 - RNA, 15 nt, Human adenovirus A
auuugccggaaggaa

SEQ ID NO: 3899422 - RNA, 18 nt, Human adenovirus A
auuugcgaguaggaagac

SEQ ID NO: 3899423 - RNA, 13 nt, Human adenovirus A
auuugucuccucu

SEQ ID NO: 3899424 - RNA, 14 nt, Human adenovirus A
auuuuccaaauguu

SEQ ID NO: 3899425 - RNA, 19 nt, Human adenovirus A
auuuucuuuaaaaaucaca

SEQ ID NO: 3899426 - RNA, 15 nt, Human adenovirus A
auuuugauuauuaua

SEQ ID NO: 3899427 - RNA, 16 nt, Human adenovirus A
auuuugcagguuuaaa

SEQ ID NO: 3899428 - RNA, 13 nt, Human adenovirus A
caaaaaaacagau

SEQ ID NO: 3899429 - RNA, 15 nt, Human adenovirus A
caaaaaaacagauuc

SEQ ID NO: 3899430 - RNA, 13 nt, Human adenovirus A
caaaaaagcuuua

SEQ ID NO: 3899431 - RNA, 19 nt, Human adenovirus A
caaaaauguuuucuggauc

SEQ ID NO: 3899432 - RNA, 13 nt, Human adenovirus A
caaaaccaggucc

SEQ ID NO: 3899433 - RNA, 18 nt, Human adenovirus A
caaaacucacccugugcu

SEQ ID NO: 3899434 - RNA, 19 nt, Human adenovirus A
caaaacuuucuaccaagga

SEQ ID NO: 3899435 - RNA, 21 nt, Human adenovirus A
caaaagcaaccaaaugagcaa

SEQ ID NO: 3899436 - RNA, 20 nt, Human adenovirus A
caaaaucuaagccaugcaaa

SEQ ID NO: 3899437 - RNA, 15 nt, Human adenovirus A
caaacagacccuugg

SEQ ID NO: 3899438 - RNA, 16 nt, Human adenovirus A
caaacaguggacauuc

SEQ ID NO: 3899439 - RNA, 13 nt, Human adenovirus A
caaaccggccaga

SEQ ID NO: 3899440 - RNA, 15 nt, Human adenovirus A
caaaccuagcugcuc

SEQ ID NO: 3899441 - RNA, 21 nt, Human adenovirus A
caaaccugacagacuugcaaa

SEQ ID NO: 3899442 - RNA, 19 nt, Human adenovirus A
caaacgguuacagaggaac

SEQ ID NO: 3899443 - RNA, 12 nt, Human adenovirus A
caaagaaaacau

SEQ ID NO: 3899444 - RNA, 18 nt, Human adenovirus A
caaagaaaguucaccucc

SEQ ID NO: 3899445 - RNA, 11 nt, Human adenovirus A
uggaacaccag

SEQ ID NO: 3899446 - RNA, 18 nt, Human adenovirus A
uggaacugcagacagugg

SEQ ID NO: 3899447 - RNA, 15 nt, Human adenovirus A
uggaacuuaacaacu

SEQ ID NO: 3899448 - RNA, 14 nt, Human adenovirus A
uggaagcuggccau

SEQ ID NO: 3899449 - RNA, 15 nt, Human adenovirus A
uggaagcuggccaua

SEQ ID NO: 3899450 - RNA, 18 nt, Human adenovirus A
uggaauuauguaagguua

SEQ ID NO: 3899451 - RNA, 14 nt, Human adenovirus A
uggacauccaugug

SEQ ID NO: 3899452 - RNA, 21 nt, Human adenovirus A
uggagcagguguaaccagcug

SEQ ID NO: 3899453 - RNA, 18 nt, Human adenovirus A
uggaguuuagaaggaaag

SEQ ID NO: 3899454 - RNA, 15 nt, Human adenovirus A
uggaucaaaaacaag

SEQ ID NO: 3899455 - RNA, 13 nt, Human adenovirus A
uggauccaaugga

SEQ ID NO: 3899456 - RNA, 15 nt, Human adenovirus A
uggcagcggcgccac

SEQ ID NO: 3899457 - RNA, 16 nt, Human adenovirus A
uggcaggaguugcagg

SEQ ID NO: 3899458 - RNA, 20 nt, Human adenovirus A
uggccauaauguaacccuuc

SEQ ID NO: 3899459 - RNA, 17 nt, Human adenovirus A
uggcuggacugccgaca

SEQ ID NO: 3899460 - RNA, 20 nt, Human adenovirus A
uggcuucacuagaccuuugu

SEQ ID NO: 3899461 - RNA, 14 nt, Human adenovirus A
uggcuucagcauuu

SEQ ID NO: 3899462 - RNA, 13 nt, Human adenovirus A
uggcuuuuggaug

SEQ ID NO: 3899463 - RNA, 17 nt, Human adenovirus A
ugggaggauauggagug

SEQ ID NO: 3899464 - RNA, 17 nt, Human adenovirus A
ugggaggcguagaugug

SEQ ID NO: 3899465 - RNA, 16 nt, Human adenovirus A
ugggcaucuugcauga

SEQ ID NO: 3899466 - RNA, 20 nt, Human adenovirus A
ugggcaucuugcaugaaaac

SEQ ID NO: 3899467 - RNA, 17 nt, Human adenovirus A
ugggcuuauaccuacca

SEQ ID NO: 3899468 - RNA, 19 nt, Human adenovirus A
ugguacgcauucaccagcc

SEQ ID NO: 3899469 - RNA, 20 nt, Human adenovirus A
ugguuacugaagugccucaa

SEQ ID NO: 3899470 - RNA, 13 nt, Human adenovirus A
ugguuuaacauuc

SEQ ID NO: 3899471 - RNA, 21 nt, Human adenovirus A
uguaaaaaaguguuuguuuga

SEQ ID NO: 3899472 - RNA, 15 nt, Human adenovirus A
uguaaaaugggaaau

SEQ ID NO: 3899473 - RNA, 18 nt, Human adenovirus A
uguaaccagagcaccccu

SEQ ID NO: 3899474 - RNA, 14 nt, Human adenovirus A
uguaaccagcuggg

SEQ ID NO: 3899475 - RNA, 20 nt, Human adenovirus A
uguaagcgacgagcaauuaa

SEQ ID NO: 3899476 - RNA, 17 nt, Human adenovirus A
uguagauaauccaguca

SEQ ID NO: 3899477 - RNA, 14 nt, Human adenovirus A
uguauacugggugc

SEQ ID NO: 3899478 - RNA, 16 nt, Human adenovirus A
uguccccgaaagccgc

SEQ ID NO: 3899479 - RNA, 23 nt, Human adenovirus A
uguccuacauuggaguuggaaga

SEQ ID NO: 3899480 - RNA, 13 nt, Human adenovirus A
ugucgaaugcagg

SEQ ID NO: 3899481 - RNA, 16 nt, Human adenovirus A
ugucuacaacugcucc

SEQ ID NO: 3899482 - RNA, 20 nt, Human adenovirus A
ugugagggccgaugcauaca

SEQ ID NO: 3899483 - RNA, 18 nt, Human adenovirus A
ugugcaaauauaaaagca

SEQ ID NO: 3899484 - RNA, 17 nt, Human adenovirus A
ugugcuauuaaagcuuu

SEQ ID NO: 3899485 - RNA, 20 nt, Human adenovirus A
ugugcuauuaaagcuuuugc

SEQ ID NO: 3899486 - RNA, 14 nt, Human adenovirus A
uguggaaagcauuu

SEQ ID NO: 3899487 - RNA, 18 nt, Human adenovirus A
uguggaauaauaguuccc

SEQ ID NO: 3899488 - RNA, 15 nt, Human adenovirus A
uguggucuagaguua

SEQ ID NO: 3899489 - RNA, 13 nt, Human adenovirus A
uguuaccaaugga

SEQ ID NO: 3899490 - RNA, 20 nt, Human adenovirus A
uguuaugcuugccaagcuug

SEQ ID NO: 3899491 - RNA, 17 nt, Human adenovirus A
uguucaacaacagcuuc

SEQ ID NO: 3899492 - RNA, 13 nt, Human adenovirus A
uguugaaugaggu

SEQ ID NO: 3899493 - RNA, 21 nt, Human adenovirus A
uguuuacuucaauccuuuuuc

SEQ ID NO: 3899494 - RNA, 15 nt, Human adenovirus A
uguuugacaagauug

SEQ ID NO: 3899495 - RNA, 15 nt, Human adenovirus A
uguuuguuugaaaaa

SEQ ID NO: 3899496 - RNA, 15 nt, Human adenovirus A
uuaaaaauuugcaag

SEQ ID NO: 3899497 - RNA, 16 nt, Human adenovirus A
uuaaaauuccauaauu

SEQ ID NO: 3899498 - RNA, 15 nt, Human adenovirus A
uuaaagcaaaccacu

SEQ ID NO: 3899499 - RNA, 16 nt, Human adenovirus A
uuaaauaauauuuugc

SEQ ID NO: 3899500 - RNA, 19 nt, Human adenovirus A
uuaaauugagaugguguua

SEQ ID NO: 3899501 - RNA, 13 nt, Human adenovirus A
uuaagaaaucuuu

SEQ ID NO: 3899502 - RNA, 10 nt, Human adenovirus A
uuaauguuuc

SEQ ID NO: 3899503 - RNA, 21 nt, Human adenovirus A
uuacaacuugcuuccagacaa

SEQ ID NO: 3899504 - RNA, 22 nt, Human adenovirus A
uuacaagcacgccaaagccaca

SEQ ID NO: 3899505 - RNA, 20 nt, Human adenovirus A
uuacacucaggccauaaaga

SEQ ID NO: 3899506 - RNA, 18 nt, Human adenovirus A
uuacauuauguaaaguca

SEQ ID NO: 3899507 - RNA, 13 nt, Human adenovirus A
uuacgcuggcugu

SEQ ID NO: 3899508 - RNA, 18 nt, Human adenovirus A
uuacuuaccggaaaucug

SEQ ID NO: 3899509 - RNA, 21 nt, Human adenovirus A
uuagaagacaaagagugacuc

SEQ ID NO: 3899510 - RNA, 22 nt, Human adenovirus A
uuagccuuaauaaccgccccuc

SEQ ID NO: 3899511 - RNA, 20 nt, Human adenovirus A
uuagucgcgcacugggccag

SEQ ID NO: 3899512 - RNA, 13 nt, Human adenovirus A
uuaguuuggcaga

SEQ ID NO: 3899513 - RNA, 20 nt, Human adenovirus A
uuauaugcgcauggcuuuaa

SEQ ID NO: 3899514 - RNA, 12 nt, Human adenovirus A
uuauggcuuuaa

SEQ ID NO: 3899515 - RNA, 22 nt, Human adenovirus A
uuauuaaaaaucaaauggcucu

SEQ ID NO: 3899516 - RNA, 13 nt, Human adenovirus A
uuauucccgcagc

SEQ ID NO: 3899517 - RNA, 20 nt, Human adenovirus A
uuauucgauccauuuggauu

SEQ ID NO: 3899518 - RNA, 19 nt, Human adenovirus A
uuauuugcugcguaggaac

SEQ ID NO: 3899519 - RNA, 12 nt, Human adenovirus A
uucaacuuuguc

SEQ ID NO: 3899520 - RNA, 21 nt, Human adenovirus A
uucaagaaaggcaucuagcca

SEQ ID NO: 3899521 - RNA, 22 nt, Human adenovirus A
uucaagcgcgacuaguccguuu

SEQ ID NO: 3899522 - RNA, 23 nt, Human adenovirus A
uucagaauaaaacaagccgcagg

SEQ ID NO: 3899523 - RNA, 22 nt, Human adenovirus A
uucauguggucaggucuaucaa

SEQ ID NO: 3899524 - RNA, 23 nt, Human adenovirus A
uucauguggucaggucuaucaaa

SEQ ID NO: 3899525 - RNA, 14 nt, Human adenovirus A
uucccaaauaucca

SEQ ID NO: 3899526 - RNA, 21 nt, Human adenovirus A
uucccaaauauccaggaggaa

SEQ ID NO: 3899527 - RNA, 15 nt, Human adenovirus A
uucccaaauuuucca

SEQ ID NO: 3899528 - RNA, 15 nt, Human adenovirus A
uuccgcgaucagcca

SEQ ID NO: 3899529 - RNA, 17 nt, Human adenovirus A
uucgcagcgcacuggca

SEQ ID NO: 3899530 - RNA, 22 nt, Human adenovirus A
uucgcgacaacagcggggagga

SEQ ID NO: 3899531 - RNA, 22 nt, Human adenovirus A
uucuagaacaaaaaggaggaag

SEQ ID NO: 3899532 - RNA, 22 nt, Human adenovirus A
uucugaucaacgacuaaaacaa

SEQ ID NO: 3899533 - RNA, 21 nt, Human adenovirus A
uucuggcguuacagcuucaga

SEQ ID NO: 3899534 - RNA, 11 nt, Human adenovirus A
uucuuccaaca

SEQ ID NO: 3899535 - RNA, 16 nt, Human adenovirus A
uugaaugcguaaaucu

SEQ ID NO: 3899536 - RNA, 22 nt, Human adenovirus A
uugauucagcuaacaaugcagc

SEQ ID NO: 3899537 - RNA, 19 nt, Human adenovirus A
uugcaaacagcaaacuuuc

SEQ ID NO: 3899538 - RNA, 19 nt, Human adenovirus A
uugccgcacggccaaugcc

SEQ ID NO: 3899539 - RNA, 15 nt, Human adenovirus A
uugcgagcugccacc

SEQ ID NO: 3899540 - RNA, 14 nt, Human adenovirus A
uugcgauaaacugg

SEQ ID NO: 3899541 - RNA, 16 nt, Human adenovirus A
uuggaaagcagcuugg

SEQ ID NO: 3899542 - RNA, 18 nt, Human adenovirus A
uuggauagcaaagccauc

SEQ ID NO: 3899543 - RNA, 15 nt, Human adenovirus A
uuggccagcugcccu

SEQ ID NO: 3899544 - RNA, 12 nt, Human adenovirus A
uugggacagaac

SEQ ID NO: 3899545 - RNA, 21 nt, Human adenovirus A
uugggcgcccacucuccugag

SEQ ID NO: 3899546 - RNA, 20 nt, Human adenovirus A
uuggguccggcuuguugaau

SEQ ID NO: 3899547 - RNA, 16 nt, Human adenovirus A
uugucauuacugacca

SEQ ID NO: 3899548 - RNA, 14 nt, Human adenovirus A
uugugcauauuuuc

SEQ ID NO: 3899549 - RNA, 23 nt, Human adenovirus A
uuguguguuucuaaaacagaacc

SEQ ID NO: 3899550 - RNA, 12 nt, Human adenovirus A
uuuaaaaaucac

SEQ ID NO: 3899551 - RNA, 23 nt, Human adenovirus A
uuuaaaggaagcugcuguucuua

SEQ ID NO: 3899552 - RNA, 20 nt, Human adenovirus A
uuuaaaggcauuauguucga

SEQ ID NO: 3899553 - RNA, 14 nt, Human adenovirus A
uuuaacggaaaaca

SEQ ID NO: 3899554 - RNA, 13 nt, Human adenovirus A
uuuaaggccaggg

SEQ ID NO: 3899555 - RNA, 14 nt, Human adenovirus A
uuuacucacuggcc

SEQ ID NO: 3899556 - RNA, 13 nt, Human adenovirus A
uuuccaaaugccc

SEQ ID NO: 3899557 - RNA, 20 nt, Human adenovirus A
uuuccagcgccaccugccau

SEQ ID NO: 3899558 - RNA, 20 nt, Human adenovirus A
uuucccucacaaauuugcau

SEQ ID NO: 3899559 - RNA, 14 nt, Human adenovirus A
uuuccggagaaaga

SEQ ID NO: 3899560 - RNA, 20 nt, Human adenovirus A
uuucgguugaagugucuugu

SEQ ID NO: 3899561 - RNA, 16 nt, Human adenovirus A
uuugccagcucuugga

SEQ ID NO: 3899562 - RNA, 20 nt, Human adenovirus A
ccaaggcguggaacagccaa

SEQ ID NO: 3899563 - RNA, 21 nt, Human adenovirus A
ccaaggcguggaacagccaaa

SEQ ID NO: 3899564 - RNA, 21 nt, Human adenovirus A
ccaaggucaacuuacagcuag

SEQ ID NO: 3899565 - RNA, 22 nt, Human adenovirus A
ccacaaggaaaugaggaggagg

SEQ ID NO: 3899566 - RNA, 14 nt, Human adenovirus A
ccacacaucucacc

SEQ ID NO: 3899567 - RNA, 21 nt, Human adenovirus A
ccacaccuccacccaaucaaa

SEQ ID NO: 3899568 - RNA, 11 nt, Human adenovirus A
ccacagcucug

SEQ ID NO: 3899569 - RNA, 13 nt, Human adenovirus A
ccacaugggaagg

SEQ ID NO: 3899570 - RNA, 16 nt, Human adenovirus A
ccaccaaaugcucuuu

SEQ ID NO: 3899571 - RNA, 21 nt, Human adenovirus A
ccaccaaauuuaaggccaggg

SEQ ID NO: 3899572 - RNA, 12 nt, Human adenovirus A
ccaccagacccc

SEQ ID NO: 3899573 - RNA, 13 nt, Human adenovirus A
ccaccaguuggaa

SEQ ID NO: 3899574 - RNA, 13 nt, Human adenovirus A
ccacccccagugc

SEQ ID NO: 3899575 - RNA, 12 nt, Human adenovirus A
ccaccgccaugc

SEQ ID NO: 3899576 - RNA, 19 nt, Human adenovirus A
ccacgccuuacauguggag

SEQ ID NO: 3899577 - RNA, 14 nt, Human adenovirus A
ccacggccucagca

SEQ ID NO: 3899578 - RNA, 18 nt, Human adenovirus A
ccacggccucagcagcgg

SEQ ID NO: 3899579 - RNA, 17 nt, Human adenovirus A
ccacugcaaugcagccg

SEQ ID NO: 3899580 - RNA, 17 nt, Human adenovirus A
ccacugucgccaaccuc

SEQ ID NO: 3899581 - RNA, 22 nt, Human adenovirus A
ccagacacgcaucuuguguuua

SEQ ID NO: 3899582 - RNA, 13 nt, Human adenovirus A
ccagacaguuuca

SEQ ID NO: 3899583 - RNA, 13 nt, Human adenovirus A
ccagccuucuggc

SEQ ID NO: 3899584 - RNA, 10 nt, Human adenovirus A
ccagcucuug

SEQ ID NO: 3899585 - RNA, 16 nt, Human adenovirus A
ccagcucuuggaauaa

SEQ ID NO: 3899586 - RNA, 21 nt, Human adenovirus A
ccagcugcccugauauaucag

SEQ ID NO: 3899587 - RNA, 21 nt, Human adenovirus A
ccaggcacagcagacacaauc

SEQ ID NO: 3899588 - RNA, 21 nt, Human adenovirus A
ccaggguuugcuucagcaguu

SEQ ID NO: 3899589 - RNA, 12 nt, Human adenovirus A
ccagucacaguc

SEQ ID NO: 3899590 - RNA, 14 nt, Human adenovirus A
ccagucgccgcaga

SEQ ID NO: 3899591 - RNA, 22 nt, Human adenovirus A
ccauaaggcggcguccuuucuc

SEQ ID NO: 3899592 - RNA, 17 nt, Human adenovirus A
ccaugaaaacagcauua

SEQ ID NO: 3899593 - RNA, 16 nt, Human adenovirus A
ccaugacuauugacuu

SEQ ID NO: 3899594 - RNA, 17 nt, Human adenovirus A
ccauuacuuuuaaauac

SEQ ID NO: 3899595 - RNA, 13 nt, Human adenovirus A
cccaacccuuccc

SEQ ID NO: 3899596 - RNA, 11 nt, Human adenovirus A
cccaccguggc

SEQ ID NO: 3899597 - RNA, 20 nt, Human adenovirus A
cccacgccgcgccccacuuc

SEQ ID NO: 3899598 - RNA, 22 nt, Human adenovirus A
cccacgguauuggccauuccug

SEQ ID NO: 3899599 - RNA, 16 nt, Human adenovirus A
cccagacacggagagg

SEQ ID NO: 3899600 - RNA, 19 nt, Human adenovirus A
cccagacguaggguacagu

SEQ ID NO: 3899601 - RNA, 16 nt, Human adenovirus A
cccagcggcaguacgu

SEQ ID NO: 3899602 - RNA, 17 nt, Human adenovirus A
cccagcuaacgccacca

SEQ ID NO: 3899603 - RNA, 14 nt, Human adenovirus A
cccaggcaggcgcg

SEQ ID NO: 3899604 - RNA, 19 nt, Human adenovirus A
cccaguuuuugcagugcca

SEQ ID NO: 3899605 - RNA, 19 nt, Human adenovirus A
cccauaacaucaggagcag

SEQ ID NO: 3899606 - RNA, 19 nt, Human adenovirus A
cccaugaguaggcaaguug

SEQ ID NO: 3899607 - RNA, 15 nt, Human adenovirus A
agacuauagagagga

SEQ ID NO: 3899608 - RNA, 20 nt, Human adenovirus A
agacuccccccgaggaauuu

SEQ ID NO: 3899609 - RNA, 21 nt, Human adenovirus A
agacugcauuuaccuuuuccu

SEQ ID NO: 3899610 - RNA, 14 nt, Human adenovirus A
agacugcuguaaug

SEQ ID NO: 3899611 - RNA, 22 nt, Human adenovirus A
agacuucccacagccagugggu

SEQ ID NO: 3899612 - RNA, 12 nt, Human adenovirus A
agagacaaugaa

SEQ ID NO: 3899613 - RNA, 18 nt, Human adenovirus A
agagcacaugaaggugga

SEQ ID NO: 3899614 - RNA, 16 nt, Human adenovirus A
agagcauugugguuca

SEQ ID NO: 3899615 - RNA, 13 nt, Human adenovirus A
agagcuuaugcau

SEQ ID NO: 3899616 - RNA, 16 nt, Human adenovirus A
agagucaggcagagga

SEQ ID NO: 3899617 - RNA, 17 nt, Human adenovirus A
agagucaggcagaggac

SEQ ID NO: 3899618 - RNA, 22 nt, Human adenovirus A
agauaaguuuaaaggcauuaug

SEQ ID NO: 3899619 - RNA, 13 nt, Human adenovirus A
agaucaaggaaau

SEQ ID NO: 3899620 - RNA, 17 nt, Human adenovirus A
agauccguacaaggcau

SEQ ID NO: 3899621 - RNA, 17 nt, Human adenovirus A
agaucuuccaacaugag

SEQ ID NO: 3899622 - RNA, 14 nt, Human adenovirus A
agaugagccuguau

SEQ ID NO: 3899623 - RNA, 21 nt, Human adenovirus A
agaugcauccuguccugcgac

SEQ ID NO: 3899624 - RNA, 18 nt, Human adenovirus A
agauguaacaggcggcuc

SEQ ID NO: 3899625 - RNA, 16 nt, Human adenovirus A
agauguaauuaaugga

SEQ ID NO: 3899626 - RNA, 11 nt, Human adenovirus A
cccccagugcc

SEQ ID NO: 3899627 - RNA, 19 nt, Human adenovirus A
ccccgaggaauuugaaggc

SEQ ID NO: 3899628 - RNA, 18 nt, Human adenovirus A
ccccucgaccugcauguc

SEQ ID NO: 3899629 - RNA, 12 nt, Human adenovirus A
ccccuuugaaga

SEQ ID NO: 3899630 - RNA, 17 nt, Human adenovirus A
cccgccauuggcgcuac

SEQ ID NO: 3899631 - RNA, 23 nt, Human adenovirus A
cccgcgauuaugcaguguaacca

SEQ ID NO: 3899632 - RNA, 17 nt, Human adenovirus A
cccgcgguuuuggcggc

SEQ ID NO: 3899633 - RNA, 23 nt, Human adenovirus A
cccggaggaagcggcgguucggg

SEQ ID NO: 3899634 - RNA, 14 nt, Human adenovirus A
cccuaucuguugcu

SEQ ID NO: 3899635 - RNA, 21 nt, Human adenovirus A
cccucgaugaugccgcagugg

SEQ ID NO: 3899636 - RNA, 14 nt, Human adenovirus A
cccugauccggcaa

SEQ ID NO: 3899637 - RNA, 21 nt, Human adenovirus A
cccugcuccgacaacagcugc

SEQ ID NO: 3899638 - RNA, 14 nt, Human adenovirus A
cccuguggagccac

SEQ ID NO: 3899639 - RNA, 16 nt, Human adenovirus A
ccgaauauccaaaccc

SEQ ID NO: 3899640 - RNA, 18 nt, Human adenovirus A
ccgcaaagaugaggcugg

SEQ ID NO: 3899641 - RNA, 22 nt, Human adenovirus A
ccgcaacagcuauugcaaaccu

SEQ ID NO: 3899642 - RNA, 12 nt, Human adenovirus A
ccgcagccaaca

SEQ ID NO: 3899643 - RNA, 20 nt, Human adenovirus A
ccgccaugcgcgcggccaga

SEQ ID NO: 3899644 - RNA, 19 nt, Human adenovirus A
ccgcgguuuuggcggccau

SEQ ID NO: 3899645 - RNA, 14 nt, Human adenovirus A
ccgcguggucagga

SEQ ID NO: 3899646 - RNA, 17 nt, Human adenovirus A
ccgcugcucagcuccac

SEQ ID NO: 3899647 - RNA, 16 nt, Human adenovirus A
ccggucuggugcaauu

SEQ ID NO: 3899648 - RNA, 15 nt, Human adenovirus A
ccgguugaaacagac

SEQ ID NO: 3899649 - RNA, 16 nt, Human adenovirus A
ccguaaaauacacaua

SEQ ID NO: 3899650 - RNA, 13 nt, Human adenovirus A
ccgucgccagcaa

SEQ ID NO: 3899651 - RNA, 18 nt, Human adenovirus A
ccguggcucccacccaug

SEQ ID NO: 3899652 - RNA, 22 nt, Human adenovirus A
ccuacguuuacaaagcacuggg

SEQ ID NO: 3899653 - RNA, 22 nt, Human adenovirus A
ccuaucuguugcuacugcagac

SEQ ID NO: 3899654 - RNA, 16 nt, Human adenovirus A
ccucacugcuuugcuc

SEQ ID NO: 3899655 - RNA, 23 nt, Human adenovirus A
ccuccgugaguuggccuggaaau

SEQ ID NO: 3899656 - RNA, 21 nt, Human adenovirus A
ccuccuggaggucuccauguc

SEQ ID NO: 3899657 - RNA, 22 nt, Human adenovirus A
ccuccuuugccagaacccacua

SEQ ID NO: 3899658 - RNA, 21 nt, Human adenovirus A
ccugaaccuaauagcacuuug

SEQ ID NO: 3899659 - RNA, 16 nt, Human adenovirus A
ccugaccauccaaugg

SEQ ID NO: 3899660 - RNA, 14 nt, Human adenovirus A
ccugacgcucuggc

SEQ ID NO: 3899661 - RNA, 19 nt, Human adenovirus A
ccugacgcucuggcagggg

SEQ ID NO: 3899662 - RNA, 18 nt, Human adenovirus A
ccugcuccuuuucuuaca

SEQ ID NO: 3899663 - RNA, 22 nt, Human adenovirus A
ccugcuuaaaaucggcggcgcg

SEQ ID NO: 3899664 - RNA, 15 nt, Human adenovirus A
ccugcuuucagcacu

SEQ ID NO: 3899665 - RNA, 13 nt, Human adenovirus A
ccuggauaaagcg

SEQ ID NO: 3899666 - RNA, 15 nt, Human adenovirus A
ccuguggcaccugca

SEQ ID NO: 3899667 - RNA, 13 nt, Human adenovirus A
ccuguuuaaacau

SEQ ID NO: 3899668 - RNA, 18 nt, Human adenovirus A
ccuuauuugacuuccagg

SEQ ID NO: 3899669 - RNA, 17 nt, Human adenovirus A
ccuucuggcuuguaugc

SEQ ID NO: 3899670 - RNA, 13 nt, Human adenovirus A
ccuuggaagaggu

SEQ ID NO: 3899671 - RNA, 18 nt, Human adenovirus A
ccuuuucuagaacaaaaa

SEQ ID NO: 3899672 - RNA, 13 nt, Human adenovirus A
cgaaaaaaaucac

SEQ ID NO: 3899673 - RNA, 18 nt, Human adenovirus A
cgaaaaaaaucacuuccg

SEQ ID NO: 3899674 - RNA, 16 nt, Human adenovirus A
cgagaucggcacgagc

SEQ ID NO: 3899675 - RNA, 15 nt, Human adenovirus A
cgagcagcaaaugcc

SEQ ID NO: 3899676 - RNA, 23 nt, Human adenovirus A
cgagcgcauagaaaaagcuacau

SEQ ID NO: 3899677 - RNA, 18 nt, Human adenovirus A
cgagcuaaccgcagccgc

SEQ ID NO: 3899678 - RNA, 17 nt, Human adenovirus A
cgagcucccggaggaag

SEQ ID NO: 3899679 - RNA, 18 nt, Human adenovirus A
cgagggaaauccaacacc

SEQ ID NO: 3899680 - RNA, 20 nt, Human adenovirus A
cgagguaaugguagaggaaa

SEQ ID NO: 3899681 - RNA, 12 nt, Human adenovirus A
cgaggugcagcu

SEQ ID NO: 3899682 - RNA, 13 nt, Human adenovirus A
cgaggugcagcug

SEQ ID NO: 3899683 - RNA, 22 nt, Human adenovirus A
cgauccaguaauuggcaaagua

SEQ ID NO: 3899684 - RNA, 15 nt, Human adenovirus A
cgcaauuagggccag

SEQ ID NO: 3899685 - RNA, 23 nt, Human adenovirus A
cgcacguucaauaguggcugcaa

SEQ ID NO: 3899686 - RNA, 20 nt, Human adenovirus A
cgcagcaacgcucaaagaaa

SEQ ID NO: 3899687 - RNA, 17 nt, Human adenovirus A
cgcagcugcggccgcaa

SEQ ID NO: 3899688 - RNA, 16 nt, Human adenovirus A
cgcagucaccaccagc

SEQ ID NO: 3899689 - RNA, 16 nt, Human adenovirus A
cgcaguuuuucuacca

SEQ ID NO: 3899690 - RNA, 16 nt, Human adenovirus A
cgccaaagccacaccu

SEQ ID NO: 3899691 - RNA, 18 nt, Human adenovirus A
gucuacucacagcuuauu

SEQ ID NO: 3899692 - RNA, 15 nt, Human adenovirus A
gucuuaaacuuucuu

SEQ ID NO: 3899693 - RNA, 23 nt, Human adenovirus A
gugaacgcaagcgugcaaacaga

SEQ ID NO: 3899694 - RNA, 21 nt, Human adenovirus A
gugacaaugcccgccuggcag

SEQ ID NO: 3899695 - RNA, 22 nt, Human adenovirus A
gugagcaaaucucagaaagcca

SEQ ID NO: 3899696 - RNA, 13 nt, Human adenovirus A
gugagggugccac

SEQ ID NO: 3899697 - RNA, 20 nt, Human adenovirus A
gugauaacccugaauguuug

SEQ ID NO: 3899698 - RNA, 15 nt, Human adenovirus A
gugauaugcauuuac

SEQ ID NO: 3899699 - RNA, 16 nt, Human adenovirus A
gugcaaauauaaaagc

SEQ ID NO: 3899700 - RNA, 17 nt, Human adenovirus A
gugccacccccagugcc

SEQ ID NO: 3899701 - RNA, 22 nt, Human adenovirus A
gugcccccuaaacggcaagcca

SEQ ID NO: 3899702 - RNA, 16 nt, Human adenovirus A
gugccuccccgcuauu

SEQ ID NO: 3899703 - RNA, 20 nt, Human adenovirus A
gugcuguggaaagcauuuug

SEQ ID NO: 3899704 - RNA, 20 nt, Human adenovirus A
gugguacgcauucaccagcc

SEQ ID NO: 3899705 - RNA, 19 nt, Human adenovirus A
guguacuuuucaaacuuua

SEQ ID NO: 3899706 - RNA, 19 nt, Human adenovirus A
guguagguuucuacaucau

SEQ ID NO: 3899707 - RNA, 16 nt, Human adenovirus A
guuacugaagugccuc

SEQ ID NO: 3899708 - RNA, 15 nt, Human adenovirus A
guuagaacuuucuaa

SEQ ID NO: 3899709 - RNA, 15 nt, Human adenovirus A
guuauguaugcccag

SEQ ID NO: 3899710 - RNA, 21 nt, Human adenovirus A
guucaauaguugccacgcuuu

SEQ ID NO: 3899711 - RNA, 11 nt, Human adenovirus A
guuccaaggac

SEQ ID NO: 3899712 - RNA, 17 nt, Human adenovirus A
guuccauggcuucguaa

SEQ ID NO: 3899713 - RNA, 14 nt, Human adenovirus A
guucgcuuugacaa

SEQ ID NO: 3899714 - RNA, 17 nt, Human adenovirus A
guugacuucgcacaggc

SEQ ID NO: 3899715 - RNA, 19 nt, Human adenovirus A
guugcaacgcaccuugcag

SEQ ID NO: 3899716 - RNA, 17 nt, Human adenovirus A
guugcuuuccaaaugcc

SEQ ID NO: 3899717 - RNA, 15 nt, Human adenovirus A
guuuaaacuacacaa

SEQ ID NO: 3899718 - RNA, 16 nt, Human adenovirus A
guuuaaaggaagcugc

SEQ ID NO: 3899719 - RNA, 18 nt, Human adenovirus A
guuuaacgaggugcagcu

SEQ ID NO: 3899720 - RNA, 17 nt, Human adenovirus A
guuuaugcgcuguacca

SEQ ID NO: 3899721 - RNA, 13 nt, Human adenovirus A
guuucuacaucau

SEQ ID NO: 3899722 - RNA, 13 nt, Human adenovirus A
guuuuaaauuguu

SEQ ID NO: 3899723 - RNA, 16 nt, Human adenovirus A
uaaaaaaacaaaacca

SEQ ID NO: 3899724 - RNA, 13 nt, Human adenovirus A
uaaaaacacacac

SEQ ID NO: 3899725 - RNA, 17 nt, Human adenovirus A
uaaaacagaaccucuua

SEQ ID NO: 3899726 - RNA, 13 nt, Human adenovirus A
uaaaaucauacaa

SEQ ID NO: 3899727 - RNA, 17 nt, Human adenovirus A
uaaaaucauacaaauca

SEQ ID NO: 3899728 - RNA, 17 nt, Human adenovirus A
uaaacaaaagcaaagca

SEQ ID NO: 3899729 - RNA, 18 nt, Human adenovirus A
uaaacaaaagcaaagcaa

SEQ ID NO: 3899730 - RNA, 18 nt, Human adenovirus A
uaaagaaacaaacuacau

SEQ ID NO: 3899731 - RNA, 16 nt, Human adenovirus A
uaaagauuugaaauuu

SEQ ID NO: 3899732 - RNA, 23 nt, Human adenovirus A
uaaauggauacucuuuaacauuc

SEQ ID NO: 3899733 - RNA, 23 nt, Human adenovirus A
uaacaaaggugcuucccacauac

SEQ ID NO: 3899734 - RNA, 23 nt, Human adenovirus A
uaacaggugaaagugaauacuua

SEQ ID NO: 3899735 - RNA, 21 nt, Human adenovirus A
uaacaguaccaaugugcaggc

SEQ ID NO: 3899736 - RNA, 13 nt, Human adenovirus A
uaaccaaauacug

SEQ ID NO: 3899737 - RNA, 16 nt, Human adenovirus A
uaaccaaauacugcua

SEQ ID NO: 3899738 - RNA, 18 nt, Human adenovirus A
uaaccaaucuacaaacug

SEQ ID NO: 3899739 - RNA, 21 nt, Human adenovirus A
uaaccagagcaccccuuccca

SEQ ID NO: 3899740 - RNA, 14 nt, Human adenovirus A
uaacgaggugcagc

SEQ ID NO: 3899741 - RNA, 19 nt, Human adenovirus A
uaacugcucagcuggaaga

SEQ ID NO: 3899742 - RNA, 15 nt, Human adenovirus A
uaacuuuauauugca

SEQ ID NO: 3899743 - RNA, 14 nt, Human adenovirus A
uaagaaccaagcau

SEQ ID NO: 3899744 - RNA, 22 nt, Human adenovirus A
uaagcaggaaaaaaaagaaagu

SEQ ID NO: 3899745 - RNA, 20 nt, Human adenovirus A
uaagcgccggaccccacaug

SEQ ID NO: 3899746 - RNA, 23 nt, Human adenovirus A
uaaggauugguuccuaauacaaa

SEQ ID NO: 3899747 - RNA, 23 nt, Human adenovirus A
uaaggggaggaccccaaggcaug

SEQ ID NO: 3899748 - RNA, 18 nt, Human adenovirus A
uaauacuuaauuucuaga

SEQ ID NO: 3899749 - RNA, 12 nt, Human adenovirus A
uaauauuuugcc

SEQ ID NO: 3899750 - RNA, 17 nt, Human adenovirus A
uaauauuuugccagcuc

SEQ ID NO: 3899751 - RNA, 23 nt, Human adenovirus A
uaaucaagacggucagcaaggau

SEQ ID NO: 3899752 - RNA, 20 nt, Human adenovirus A
uaaucgccccgcugcaauuu

SEQ ID NO: 3899753 - RNA, 15 nt, Human adenovirus A
uaauuacuccauguu

SEQ ID NO: 3899754 - RNA, 16 nt, Human adenovirus A
uaauuaucccuuugau

SEQ ID NO: 3899755 - RNA, 12 nt, Human adenovirus A
uaauugauuuac

SEQ ID NO: 3899756 - RNA, 13 nt, Human adenovirus A
uacaaaggcauua

SEQ ID NO: 3899757 - RNA, 20 nt, Human adenovirus A
uacaaaucagaagccagcag

SEQ ID NO: 3899758 - RNA, 19 nt, Human adenovirus A
uacaacucuacaaaucuug

SEQ ID NO: 3899759 - RNA, 22 nt, Human adenovirus A
uacaacugcuccccucaacagc

SEQ ID NO: 3899760 - RNA, 18 nt, Human adenovirus A
uacaauaaucacaacaca

SEQ ID NO: 3899761 - RNA, 15 nt, Human adenovirus A
uacacaacacaaaaa

SEQ ID NO: 3899762 - RNA, 19 nt, Human adenovirus A
uacacacuacgcccacuuc

SEQ ID NO: 3899763 - RNA, 21 nt, Human adenovirus A
uacacccccuuuuacuucuuc

SEQ ID NO: 3899764 - RNA, 22 nt, Human adenovirus A
uacacucauguauuuuuucaaa

SEQ ID NO: 3899765 - RNA, 12 nt, Human adenovirus A
uacacuggcugg

SEQ ID NO: 3899766 - RNA, 21 nt, Human adenovirus A
uacaugaagauuucugcuguc

SEQ ID NO: 3899767 - RNA, 17 nt, Human adenovirus A
uacaugggcaccuggaa

SEQ ID NO: 3899768 - RNA, 12 nt, Human adenovirus A
uaccaaagccau

SEQ ID NO: 3899769 - RNA, 23 nt, Human adenovirus A
uaccaccaaauuuaaggccaggg

SEQ ID NO: 3899770 - RNA, 15 nt, Human adenovirus A
uaccaggaagcugag

SEQ ID NO: 3899771 - RNA, 12 nt, Human adenovirus A
uaccaugaugga

SEQ ID NO: 3899772 - RNA, 15 nt, Human adenovirus A
uaccccuauccuguc

SEQ ID NO: 3899773 - RNA, 15 nt, Human adenovirus A
uaccgucaucucuac

SEQ ID NO: 3899774 - RNA, 19 nt, Human adenovirus A
uaccugacacuacagagcu

SEQ ID NO: 3899775 - RNA, 14 nt, Human adenovirus A
uacgacccucugac

SEQ ID NO: 3899776 - RNA, 21 nt, Human adenovirus A
uacgagacuccccccgaggaa

SEQ ID NO: 3899777 - RNA, 13 nt, Human adenovirus A
aaaaaauugccaa

SEQ ID NO: 3899778 - RNA, 18 nt, Human adenovirus A
aaaaacuuggaaacgccu

SEQ ID NO: 3899779 - RNA, 20 nt, Human adenovirus A
aaaaagcuuuaauaaccaug

SEQ ID NO: 3899780 - RNA, 23 nt, Human adenovirus A
aaaaagcuuuaauaaccaugugc

SEQ ID NO: 3899781 - RNA, 16 nt, Human adenovirus A
aaaaaguaaacugucu

SEQ ID NO: 3899782 - RNA, 14 nt, Human adenovirus A
aaaaauuacaaagg

SEQ ID NO: 3899783 - RNA, 16 nt, Human adenovirus A
aaaagaaaaugaacaa

SEQ ID NO: 3899784 - RNA, 13 nt, Human adenovirus A
aaaagagccacag

SEQ ID NO: 3899785 - RNA, 23 nt, Human adenovirus A
aaaagcauacuuaccaaagccau

SEQ ID NO: 3899786 - RNA, 20 nt, Human adenovirus A
aaaagcguggaauuaaaagg

SEQ ID NO: 3899787 - RNA, 18 nt, Human adenovirus A
aaaagcuuuaauaaccau

SEQ ID NO: 3899788 - RNA, 14 nt, Human adenovirus A
aaaauaaucaauuu

SEQ ID NO: 3899789 - RNA, 17 nt, Human adenovirus A
aaaaucccccuccuacc

SEQ ID NO: 3899790 - RNA, 22 nt, Human adenovirus A
aaaaucuaagccaugcaaauag

SEQ ID NO: 3899791 - RNA, 24 nt, Human adenovirus A
aaaaucuaagccaugcaaauaguu

SEQ ID NO: 3899792 - RNA, 16 nt, Human adenovirus A
aaacauaugcacaaga

SEQ ID NO: 3899793 - RNA, 12 nt, Human adenovirus A
aaacaugcugua

SEQ ID NO: 3899794 - RNA, 23 nt, Human adenovirus A
aaacgaaucccucgcccgcacag

SEQ ID NO: 3899795 - RNA, 22 nt, Human adenovirus A
aaacgcugggcucgaggaccau

SEQ ID NO: 3899796 - RNA, 18 nt, Human adenovirus A
aaacucagcccaugcucu

SEQ ID NO: 3899797 - RNA, 19 nt, Human adenovirus A
aaacucccuuaguuguaaa

SEQ ID NO: 3899798 - RNA, 20 nt, Human adenovirus A
aaacuguauauuggcaggag

SEQ ID NO: 3899799 - RNA, 20 nt, Human adenovirus A
aaacuuaaauugagauggug

SEQ ID NO: 3899800 - RNA, 20 nt, Human adenovirus A
aaacuuucuaccaaggaaaa

SEQ ID NO: 3899801 - RNA, 13 nt, Human adenovirus A
aaagacagccaag

SEQ ID NO: 3899802 - RNA, 19 nt, Human adenovirus A
aaagaccccauuguaacug

SEQ ID NO: 3899803 - RNA, 12 nt, Human adenovirus A
aaagagccacag

SEQ ID NO: 3899804 - RNA, 13 nt, Human adenovirus A
aaagagccacagc

SEQ ID NO: 3899805 - RNA, 21 nt, Human adenovirus A
aaagagucucaaaagcagcca

SEQ ID NO: 3899806 - RNA, 15 nt, Human adenovirus A
aaagaucaaggaaau

SEQ ID NO: 3899807 - RNA, 12 nt, Human adenovirus A
aaagaucacagc

SEQ ID NO: 3899808 - RNA, 19 nt, Human adenovirus A
aaagaucaguagcuaagga

SEQ ID NO: 3899809 - RNA, 13 nt, Human adenovirus A
aaagcaaaugcau

SEQ ID NO: 3899810 - RNA, 19 nt, Human adenovirus A
aaagccaggcacagcagac

SEQ ID NO: 3899811 - RNA, 23 nt, Human adenovirus A
aaagcccgcgcgcggacuuucaa

SEQ ID NO: 3899812 - RNA, 14 nt, Human adenovirus A
aaagccgcaaaaca

SEQ ID NO: 3899813 - RNA, 16 nt, Human adenovirus A
aaagcgcagaguaucc

SEQ ID NO: 3899814 - RNA, 13 nt, Human adenovirus A
aaaggacuuuuuu

SEQ ID NO: 3899815 - RNA, 18 nt, Human adenovirus A
aaaguacccuaaacagua

SEQ ID NO: 3899816 - RNA, 16 nt, Human adenovirus A
aaagucuacugcaaaa

SEQ ID NO: 3899817 - RNA, 19 nt, Human adenovirus A
aaauaaagaguuaauugau

SEQ ID NO: 3899818 - RNA, 21 nt, Human adenovirus A
aaauaaugcauuaccagcagc

SEQ ID NO: 3899819 - RNA, 23 nt, Human adenovirus A
aaauaaugcauuaccagcagcca

SEQ ID NO: 3899820 - RNA, 19 nt, Human adenovirus A
ggcgcugacgggagcagga

SEQ ID NO: 3899821 - RNA, 20 nt, Human adenovirus A
ggcguaaccaaauacugcua

SEQ ID NO: 3899822 - RNA, 18 nt, Human adenovirus A
ggcgugguuaaacaggga

SEQ ID NO: 3899823 - RNA, 18 nt, Human adenovirus A
ggcguuagcguccacaca

SEQ ID NO: 3899824 - RNA, 14 nt, Human adenovirus A
ggcuccgaacaggu

SEQ ID NO: 3899825 - RNA, 11 nt, Human adenovirus A
ggcugaagagg

SEQ ID NO: 3899826 - RNA, 18 nt, Human adenovirus A
ggcugcgucgccggcgua

SEQ ID NO: 3899827 - RNA, 21 nt, Human adenovirus A
ggcuggcuuuuggauggaacc

SEQ ID NO: 3899828 - RNA, 19 nt, Human adenovirus A
ggcuucgaaugcugugaca

SEQ ID NO: 3899829 - RNA, 15 nt, Human adenovirus A
gggacagcaagcagc

SEQ ID NO: 3899830 - RNA, 16 nt, Human adenovirus A
gggacgcgugugccag

SEQ ID NO: 3899831 - RNA, 13 nt, Human adenovirus A
gggaggaggagga

SEQ ID NO: 3899832 - RNA, 16 nt, Human adenovirus A
gggauuaguucugcac

SEQ ID NO: 3899833 - RNA, 18 nt, Human adenovirus A
gggauuguguccuuggaa

SEQ ID NO: 3899834 - RNA, 16 nt, Human adenovirus A
gggcauggcugaagag

SEQ ID NO: 3899835 - RNA, 13 nt, Human adenovirus A
gggcauuaaagca

SEQ ID NO: 3899836 - RNA, 19 nt, Human adenovirus A
gggccaggaggacacuggc

SEQ ID NO: 3899837 - RNA, 17 nt, Human adenovirus A
gggcccagggguggugg

SEQ ID NO: 3899838 - RNA, 16 nt, Human adenovirus A
gggccggucgcgagcu

SEQ ID NO: 3899839 - RNA, 15 nt, Human adenovirus A
gggggaugaaggaag

SEQ ID NO: 3899840 - RNA, 15 nt, Human adenovirus A
ggguccugcgggaag

SEQ ID NO: 3899841 - RNA, 12 nt, Human adenovirus A
gggucggagaac

SEQ ID NO: 3899842 - RNA, 13 nt, Human adenovirus A
gggugauaugcau

SEQ ID NO: 3899843 - RNA, 15 nt, Human adenovirus A
ggguggagauuuaaa

SEQ ID NO: 3899844 - RNA, 19 nt, Human adenovirus A
gguaggcaauuucugccau

SEQ ID NO: 3899845 - RNA, 15 nt, Human adenovirus A
gguagucggccagca

SEQ ID NO: 3899846 - RNA, 23 nt, Human adenovirus A
gguaguuuaaggugguggcaacg

SEQ ID NO: 3899847 - RNA, 19 nt, Human adenovirus A
ggucagauucuucuuccca

SEQ ID NO: 3899848 - RNA, 15 nt, Human adenovirus A
ggucuagccaacauc

SEQ ID NO: 3899849 - RNA, 22 nt, Human adenovirus A
ggugagcuccgauggguuggga

SEQ ID NO: 3899850 - RNA, 18 nt, Human adenovirus A
gguggagauuuaaaaacc

SEQ ID NO: 3899851 - RNA, 20 nt, Human adenovirus A
gguggcgcuuucgggcucug

SEQ ID NO: 3899852 - RNA, 16 nt, Human adenovirus A
gguuaagcuggguggg

SEQ ID NO: 3899853 - RNA, 18 nt, Human adenovirus A
gguuacugaagugccuca

SEQ ID NO: 3899854 - RNA, 22 nt, Human adenovirus A
gguuuguggggugucugaucaa

SEQ ID NO: 3899855 - RNA, 22 nt, Human adenovirus A
guaaacaugauucuucagagca

SEQ ID NO: 3899856 - RNA, 16 nt, Human adenovirus A
guaaacucaugauggc

SEQ ID NO: 3899857 - RNA, 12 nt, Human adenovirus A
guaacuuucaaa

SEQ ID NO: 3899858 - RNA, 17 nt, Human adenovirus A
guaagaaccaagcauau

SEQ ID NO: 3899859 - RNA, 18 nt, Human adenovirus A
guacaaauuuuuccaccu

SEQ ID NO: 3899860 - RNA, 17 nt, Human adenovirus A
guacacaaugcauuaau

SEQ ID NO: 3899861 - RNA, 15 nt, Human adenovirus A
guacacuaaugaggc

SEQ ID NO: 3899862 - RNA, 17 nt, Human adenovirus A
guacagaggaaauugug

SEQ ID NO: 3899863 - RNA, 16 nt, Human adenovirus A
guacagauguaaagga

SEQ ID NO: 3899864 - RNA, 18 nt, Human adenovirus A
guacauaauccagcaagu

SEQ ID NO: 3899865 - RNA, 13 nt, Human adenovirus A
guacucaaaugug

SEQ ID NO: 3899866 - RNA, 16 nt, Human adenovirus A
guacugcuuccagguu

SEQ ID NO: 3899867 - RNA, 20 nt, Human adenovirus A
guacuuaaaaaaacaaaacc

SEQ ID NO: 3899868 - RNA, 21 nt, Human adenovirus A
guagccugcuuucagcacugc

SEQ ID NO: 3899869 - RNA, 22 nt, Human adenovirus A
guagcugaaaacaacugcacuu

SEQ ID NO: 3899870 - RNA, 15 nt, Human adenovirus A
guaggcuaacuguua

SEQ ID NO: 3899871 - RNA, 23 nt, Human adenovirus A
guaguagaccugcaagacagaaa

SEQ ID NO: 3899872 - RNA, 14 nt, Human adenovirus A
guagucggccagca

SEQ ID NO: 3899873 - RNA, 17 nt, Human adenovirus A
guagugggcacauugca

SEQ ID NO: 3899874 - RNA, 15 nt, Human adenovirus A
guauacagauuuaag

SEQ ID NO: 3899875 - RNA, 22 nt, Human adenovirus A
guauacugaugaucuucccgaa

SEQ ID NO: 3899876 - RNA, 19 nt, Human adenovirus A
guauucugcuaaacucaca

SEQ ID NO: 3899877 - RNA, 18 nt, Human adenovirus A
gucaaaccugacagacuu

SEQ ID NO: 3899878 - RNA, 17 nt, Human adenovirus A
gucacacccuccguguu

SEQ ID NO: 3899879 - RNA, 20 nt, Human adenovirus A
gucagauaacgcuaagcuua

SEQ ID NO: 3899880 - RNA, 19 nt, Human adenovirus A
gucauuuacugcagccugu

SEQ ID NO: 3899881 - RNA, 22 nt, Human adenovirus A
guccaggguuugcuucagcagu

SEQ ID NO: 3899882 - RNA, 17 nt, Human adenovirus A
gucgauuucggcggcgu

SEQ ID NO: 3899883 - RNA, 19 nt, Human adenovirus A
gucgcaauuagggccagca

SEQ ID NO: 3899884 - RNA, 13 nt, Human adenovirus A
gucgcuguuuuga

SEQ ID NO: 3899885 - RNA, 18 nt, Human adenovirus A
gucggaaugauuaaacaa

SEQ ID NO: 3899886 - RNA, 13 nt, Human adenovirus A
gucucaaaagcag

SEQ ID NO: 3899887 - RNA, 17 nt, Human adenovirus A
gucucaaaagcagccau

SEQ ID NO: 3899888 - RNA, 23 nt, Human adenovirus A
gucuggaucuucaaacaccugca

SEQ ID NO: 3899889 - RNA, 23 nt, Human adenovirus A
gucuguuuaguccugcaguuauu

SEQ ID NO: 3899890 - RNA, 23 nt, Human adenovirus A
gucuucguacuuaaaaaaacaaa

SEQ ID NO: 3899891 - RNA, 22 nt, Human adenovirus A
gugaaucgcagucaccaccagc

SEQ ID NO: 3899892 - RNA, 17 nt, Human adenovirus A
gugaauggaacaccagc

SEQ ID NO: 3899893 - RNA, 16 nt, Human adenovirus A
caaaauugaaaaacug

SEQ ID NO: 3899894 - RNA, 15 nt, Human adenovirus A
caaacaauaacauug

SEQ ID NO: 3899895 - RNA, 15 nt, Human adenovirus A
caaaccacauaggca

SEQ ID NO: 3899896 - RNA, 16 nt, Human adenovirus A
caaacccccaaaagcg

SEQ ID NO: 3899897 - RNA, 14 nt, Human adenovirus A
caaaccuuuacugc

SEQ ID NO: 3899898 - RNA, 16 nt, Human adenovirus A
caaacguccaggcagg

SEQ ID NO: 3899899 - RNA, 17 nt, Human adenovirus A
caaacguccaggcaggg

SEQ ID NO: 3899900 - RNA, 15 nt, Human adenovirus A
caaacuuucuccaaa

SEQ ID NO: 3899901 - RNA, 16 nt, Human adenovirus A
caaagaaacagcagca

SEQ ID NO: 3899902 - RNA, 13 nt, Human adenovirus A
caaagaagagcug

SEQ ID NO: 3899903 - RNA, 21 nt, Human adenovirus A
caaagaccccauuguaacuga

SEQ ID NO: 3899904 - RNA, 18 nt, Human adenovirus A
caaagaugcaaacuugca

SEQ ID NO: 3899905 - RNA, 18 nt, Human adenovirus A
caaagccauggcgaccag

SEQ ID NO: 3899906 - RNA, 21 nt, Human adenovirus A
caaaggagaaaagcggccacg

SEQ ID NO: 3899907 - RNA, 21 nt, Human adenovirus A
caaagguaaugagcgcaguga

SEQ ID NO: 3899908 - RNA, 19 nt, Human adenovirus A
caaagguaucucugaccau

SEQ ID NO: 3899909 - RNA, 16 nt, Human adenovirus A
caaaggugcuucccac

SEQ ID NO: 3899910 - RNA, 15 nt, Human adenovirus A
caaaguaauauugua

SEQ ID NO: 3899911 - RNA, 22 nt, Human adenovirus A
caaaguaauauuguagccugcu

SEQ ID NO: 3899912 - RNA, 19 nt, Human adenovirus A
caaaguucgccuacacaac

SEQ ID NO: 3899913 - RNA, 22 nt, Human adenovirus A
caaaucagaagccagcagcaaa

SEQ ID NO: 3899914 - RNA, 14 nt, Human adenovirus A
caaauccaaaagca

SEQ ID NO: 3899915 - RNA, 22 nt, Human adenovirus A
caaaugcgaccucagcccaggg

SEQ ID NO: 3899916 - RNA, 13 nt, Human adenovirus A
caaauuacacacu

SEQ ID NO: 3899917 - RNA, 14 nt, Human adenovirus A
caaauuacacacua

SEQ ID NO: 3899918 - RNA, 20 nt, Human adenovirus A
caaauuuuccauacacucau

SEQ ID NO: 3899919 - RNA, 15 nt, Human adenovirus A
gccgccgcugcagcu

SEQ ID NO: 3899920 - RNA, 23 nt, Human adenovirus A
gccgccguacuuguaacugugga

SEQ ID NO: 3899921 - RNA, 19 nt, Human adenovirus A
gccgcucugucaccuacca

SEQ ID NO: 3899922 - RNA, 17 nt, Human adenovirus A
gccggcgaacgggcagc

SEQ ID NO: 3899923 - RNA, 16 nt, Human adenovirus A
gccguccagcagugcg

SEQ ID NO: 3899924 - RNA, 21 nt, Human adenovirus A
gccugaaccuaauagcacuuu

SEQ ID NO: 3899925 - RNA, 15 nt, Human adenovirus A
gccugguaaaacaag

SEQ ID NO: 3899926 - RNA, 18 nt, Human adenovirus A
gccuuaaauaaggcugcu

SEQ ID NO: 3899927 - RNA, 14 nt, Human adenovirus A
gccuucauuccuuc

SEQ ID NO: 3899928 - RNA, 19 nt, Human adenovirus A
gcgacagaguugcuuuuag

SEQ ID NO: 3899929 - RNA, 19 nt, Human adenovirus A
gcgacucccuuccgugguu

SEQ ID NO: 3899930 - RNA, 16 nt, Human adenovirus A
gcgaucagccaugugc

SEQ ID NO: 3899931 - RNA, 18 nt, Human adenovirus A
gcgcagcagaacccagua

SEQ ID NO: 3899932 - RNA, 16 nt, Human adenovirus A
gcgcauugggcggcga

SEQ ID NO: 3899933 - RNA, 18 nt, Human adenovirus A
gcgcccacucuccugagc

SEQ ID NO: 3899934 - RNA, 13 nt, Human adenovirus A
gcgccccacuucc

SEQ ID NO: 3899935 - RNA, 20 nt, Human adenovirus A
gcgcgagaagaaguagccau

SEQ ID NO: 3899936 - RNA, 19 nt, Human adenovirus A
gcgcgcauacccgaggacg

SEQ ID NO: 3899937 - RNA, 13 nt, Human adenovirus A
gcgcgcggccaga

SEQ ID NO: 3899938 - RNA, 24 nt, Human adenovirus A
gcgcggacgagcucccggaggaag

SEQ ID NO: 3899939 - RNA, 23 nt, Human adenovirus A
gcgcggacuuucaacaggcggga

SEQ ID NO: 3899940 - RNA, 13 nt, Human adenovirus A
gcgcggccagagc

SEQ ID NO: 3899941 - RNA, 14 nt, Human adenovirus A
gcgcucaaaggcag

SEQ ID NO: 3899942 - RNA, 19 nt, Human adenovirus A
gcgcucaaaggcaggcauu

SEQ ID NO: 3899943 - RNA, 21 nt, Human adenovirus A
gcgcucgcgcuuuggaggcag

SEQ ID NO: 3899944 - RNA, 16 nt, Human adenovirus A
gcgcugacgggagcag

SEQ ID NO: 3899945 - RNA, 16 nt, Human adenovirus A
gcggcccgacgaggua

SEQ ID NO: 3899946 - RNA, 20 nt, Human adenovirus A
gcggcucuuuugcagcucca

SEQ ID NO: 3899947 - RNA, 19 nt, Human adenovirus A
gcgguggaacugcagacag

SEQ ID NO: 3899948 - RNA, 13 nt, Human adenovirus A
gcguacagccaga

SEQ ID NO: 3899949 - RNA, 20 nt, Human adenovirus A
gcguacaguuuuggagccaa

SEQ ID NO: 3899950 - RNA, 21 nt, Human adenovirus A
gcguagaccaaccaccgccau

SEQ ID NO: 3899951 - RNA, 22 nt, Human adenovirus A
gcgucacccaagggugcagcuc

SEQ ID NO: 3899952 - RNA, 19 nt, Human adenovirus A
gcgugccguuggcagaguc

SEQ ID NO: 3899953 - RNA, 15 nt, Human adenovirus A
gcguggaacagccaa

SEQ ID NO: 3899954 - RNA, 21 nt, Human adenovirus A
gcguugguucgacgggccagg

SEQ ID NO: 3899955 - RNA, 13 nt, Human adenovirus A
gcuaauaccuguc

SEQ ID NO: 3899956 - RNA, 18 nt, Human adenovirus A
gcuaaucaccucgcucca

SEQ ID NO: 3899957 - RNA, 14 nt, Human adenovirus A
gcuacaucuuuuac

SEQ ID NO: 3899958 - RNA, 23 nt, Human adenovirus A
gcuacaucuuuuacuaaaaugca

SEQ ID NO: 3899959 - RNA, 18 nt, Human adenovirus A
gcuaggcgacgccaacag

SEQ ID NO: 3899960 - RNA, 12 nt, Human adenovirus A
gcucagcuggaa

SEQ ID NO: 3899961 - RNA, 18 nt, Human adenovirus A
gcucccacacgcagcaac

SEQ ID NO: 3899962 - RNA, 18 nt, Human adenovirus A
gcucccacccaugauguu

SEQ ID NO: 3899963 - RNA, 20 nt, Human adenovirus A
gcucgcaaguaccgcgcgcc

SEQ ID NO: 3899964 - RNA, 15 nt, Human adenovirus A
gcucgcccgggacag

SEQ ID NO: 3899965 - RNA, 16 nt, Human adenovirus A
gcucuaauagaacugg

SEQ ID NO: 3899966 - RNA, 21 nt, Human adenovirus A
gcucugauuucgauaaacaaa

SEQ ID NO: 3899967 - RNA, 12 nt, Human adenovirus A
gcucuggcaggg

SEQ ID NO: 3899968 - RNA, 19 nt, Human adenovirus A
gcugaggaaaugcgagacu

SEQ ID NO: 3899969 - RNA, 16 nt, Human adenovirus A
gcugauggaaauuguc

SEQ ID NO: 3899970 - RNA, 15 nt, Human adenovirus A
gcugcaggccuuagc

SEQ ID NO: 3899971 - RNA, 23 nt, Human adenovirus A
gcugccuccuuugccagaaccca

SEQ ID NO: 3899972 - RNA, 15 nt, Human adenovirus A
gcugcgugaggagga

SEQ ID NO: 3899973 - RNA, 20 nt, Human adenovirus A
gcuggccccgcgacacggca

SEQ ID NO: 3899974 - RNA, 17 nt, Human adenovirus A
gcugggcucgaggacca

SEQ ID NO: 3899975 - RNA, 18 nt, Human adenovirus A
gcugggcucgaggaccau

SEQ ID NO: 3899976 - RNA, 18 nt, Human adenovirus A
gcugguaacuacuucacc

SEQ ID NO: 3899977 - RNA, 20 nt, Human adenovirus A
gcuggugaaagaucacagcc

SEQ ID NO: 3899978 - RNA, 17 nt, Human adenovirus A
gcuguaucuguugaaug

SEQ ID NO: 3899979 - RNA, 20 nt, Human adenovirus A
gcuguugggacagcaagcag

SEQ ID NO: 3899980 - RNA, 13 nt, Human adenovirus A
gcuuaacauagcu

SEQ ID NO: 3899981 - RNA, 18 nt, Human adenovirus A
gcuuaauaccuuugcuca

SEQ ID NO: 3899982 - RNA, 14 nt, Human adenovirus A
gcuuaccacucaga

SEQ ID NO: 3899983 - RNA, 19 nt, Human adenovirus A
gcuuagauggagguggaaa

SEQ ID NO: 3899984 - RNA, 20 nt, Human adenovirus A
gcuucaagacguuccauggc

SEQ ID NO: 3899985 - RNA, 15 nt, Human adenovirus A
gcuucagaugacugg

SEQ ID NO: 3899986 - RNA, 17 nt, Human adenovirus A
gcuuccaguucuucuuc

SEQ ID NO: 3899987 - RNA, 19 nt, Human adenovirus A
gcuuccgcggccgcuucua

SEQ ID NO: 3899988 - RNA, 19 nt, Human adenovirus A
gcuucuacuuuagaagcca

SEQ ID NO: 3899989 - RNA, 18 nt, Human adenovirus A
gcuuggaagaaaaaaacc

SEQ ID NO: 3899990 - RNA, 19 nt, Human adenovirus A
gcuuucaagauggccacuc

SEQ ID NO: 3899991 - RNA, 16 nt, Human adenovirus A
gcuuucgggcucuggc

SEQ ID NO: 3899992 - RNA, 17 nt, Human adenovirus A
gcuuuuuugaguacuca

SEQ ID NO: 3899993 - RNA, 15 nt, Human adenovirus A
ggaagaaagagaaca

SEQ ID NO: 3899994 - RNA, 21 nt, Human adenovirus A
ggaagacagcauggagugcug

SEQ ID NO: 3899995 - RNA, 16 nt, Human adenovirus A
ggaagguguugagccc

SEQ ID NO: 3899996 - RNA, 15 nt, Human adenovirus A
ggacaaguuaaaaga

SEQ ID NO: 3899997 - RNA, 17 nt, Human adenovirus A
ggacaauccaaggauga

SEQ ID NO: 3899998 - RNA, 13 nt, Human adenovirus A
ggacaccauggua

SEQ ID NO: 3899999 - RNA, 15 nt, Human adenovirus A
ggacaccauugaaac

SEQ ID NO: 3900000 - RNA, 15 nt, Human adenovirus A
ggaccccgaaaccca

SEQ ID NO: 3900001 - RNA, 11 nt, Human adenovirus A
ggacuuucaac

SEQ ID NO: 3900002 - RNA, 20 nt, Human adenovirus A
ggagcagguguaaccagcug

SEQ ID NO: 3900003 - RNA, 22 nt, Human adenovirus A
ggagcggcugacagagcgcggc

SEQ ID NO: 3900004 - RNA, 17 nt, Human adenovirus A
ggagcugcacguacuag

SEQ ID NO: 3900005 - RNA, 14 nt, Human adenovirus A
ggaggaagcugagg

SEQ ID NO: 3900006 - RNA, 20 nt, Human adenovirus A
ggaggagcuaaaacaagguc

SEQ ID NO: 3900007 - RNA, 16 nt, Human adenovirus A
ggaggcagcuggagug

SEQ ID NO: 3900008 - RNA, 19 nt, Human adenovirus A
ggaggugcucccgcaguga

SEQ ID NO: 3900009 - RNA, 23 nt, Human adenovirus A
ggaggugcucccgcagugaggac

SEQ ID NO: 3900010 - RNA, 20 nt, Human adenovirus A
ggaguguacacuaaugaggc

SEQ ID NO: 3900011 - RNA, 16 nt, Human adenovirus A
ggaguucccacagaac

SEQ ID NO: 3900012 - RNA, 16 nt, Human adenovirus A
ggaguuguagacauag

SEQ ID NO: 3900013 - RNA, 22 nt, Human adenovirus A
ggauacaauguggcccaaugca

SEQ ID NO: 3900014 - RNA, 12 nt, Human adenovirus A
ggauacagagga

SEQ ID NO: 3900015 - RNA, 19 nt, Human adenovirus A
ggauacuaccgcugcucag

SEQ ID NO: 3900016 - RNA, 15 nt, Human adenovirus A
ggaucuccugccacc

SEQ ID NO: 3900017 - RNA, 11 nt, Human adenovirus A
ggaucuucaaa

SEQ ID NO: 3900018 - RNA, 22 nt, Human adenovirus A
ggauggguguuuggcagcaaug

SEQ ID NO: 3900019 - RNA, 15 nt, Human adenovirus A
ggcaaagaacaucaa

SEQ ID NO: 3900020 - RNA, 20 nt, Human adenovirus A
ggcaagaacaauuucaucaa

SEQ ID NO: 3900021 - RNA, 18 nt, Human adenovirus A
ggcaauauuccagcucuu

SEQ ID NO: 3900022 - RNA, 13 nt, Human adenovirus A
ggcacaacagacu

SEQ ID NO: 3900023 - RNA, 19 nt, Human adenovirus A
ggcacauugcaacgcaauc

SEQ ID NO: 3900024 - RNA, 17 nt, Human adenovirus A
ggcagacaagguggccg

SEQ ID NO: 3900025 - RNA, 20 nt, Human adenovirus A
ggcagccguuucaggaagga

SEQ ID NO: 3900026 - RNA, 15 nt, Human adenovirus A
ggcagcggcgccacc

SEQ ID NO: 3900027 - RNA, 17 nt, Human adenovirus A
ggcagcgguaguuguug

SEQ ID NO: 3900028 - RNA, 13 nt, Human adenovirus A
ggcaggggaaggu

SEQ ID NO: 3900029 - RNA, 17 nt, Human adenovirus A
ggcaguacuucauauuu

SEQ ID NO: 3900030 - RNA, 16 nt, Human adenovirus A
ggcauuccccauccaa

SEQ ID NO: 3900031 - RNA, 17 nt, Human adenovirus A
ggccagcauaaaagcuu

SEQ ID NO: 3900032 - RNA, 12 nt, Human adenovirus A
ggccagcucacg

SEQ ID NO: 3900033 - RNA, 16 nt, Human adenovirus A
ggccggaugcagagga

SEQ ID NO: 3900034 - RNA, 14 nt, Human adenovirus A
ggcgaacaggaaga

SEQ ID NO: 3900035 - RNA, 12 nt, Human adenovirus A
ggcgccaggaug

SEQ ID NO: 3900036 - RNA, 17 nt, Human adenovirus A
ggcggcaugcugaaacc

SEQ ID NO: 3900037 - RNA, 21 nt, Human adenovirus A
ggcggccaugcaaagccagcc

SEQ ID NO: 3900038 - RNA, 16 nt, Human adenovirus A
gacgaggucgaggacu

SEQ ID NO: 3900039 - RNA, 23 nt, Human adenovirus A
gacgccccauccguggcaggcca

SEQ ID NO: 3900040 - RNA, 16 nt, Human adenovirus A
gacguaaauggccaaa

SEQ ID NO: 3900041 - RNA, 18 nt, Human adenovirus A
gacucauaagcugugaaa

SEQ ID NO: 3900042 - RNA, 13 nt, Human adenovirus A
gacugacuaugag

SEQ ID NO: 3900043 - RNA, 11 nt, Human adenovirus A
gacugagaacc

SEQ ID NO: 3900044 - RNA, 22 nt, Human adenovirus A
gacuuuuuugccugguaaaaca

SEQ ID NO: 3900045 - RNA, 13 nt, Human adenovirus A
gagaacuaaacaa

SEQ ID NO: 3900046 - RNA, 16 nt, Human adenovirus A
gagaagcggagccacu

SEQ ID NO: 3900047 - RNA, 13 nt, Human adenovirus A
gagauaagcagga

SEQ ID NO: 3900048 - RNA, 20 nt, Human adenovirus A
gagauguccuguuuaaacau

SEQ ID NO: 3900049 - RNA, 14 nt, Human adenovirus A
gagccacaggaaag

SEQ ID NO: 3900050 - RNA, 13 nt, Human adenovirus A
gagccccuuacca

SEQ ID NO: 3900051 - RNA, 15 nt, Human adenovirus A
gagcgccccccuagc

SEQ ID NO: 3900052 - RNA, 19 nt, Human adenovirus A
gagcuaagcgacaaagagc

SEQ ID NO: 3900053 - RNA, 14 nt, Human adenovirus A
gagcugccaccguc

SEQ ID NO: 3900054 - RNA, 13 nt, Human adenovirus A
gaggaaagacagc

SEQ ID NO: 3900055 - RNA, 22 nt, Human adenovirus A
gaggcagccguuucaggaagga

SEQ ID NO: 3900056 - RNA, 20 nt, Human adenovirus A
gagggcauggcugaagagga

SEQ ID NO: 3900057 - RNA, 22 nt, Human adenovirus A
gaggguaacuauucggaaacca

SEQ ID NO: 3900058 - RNA, 17 nt, Human adenovirus A
gagggucaggaaaccca

SEQ ID NO: 3900059 - RNA, 19 nt, Human adenovirus A
gaggugcucccgcagugag

SEQ ID NO: 3900060 - RNA, 14 nt, Human adenovirus A
gagguguaccuggc

SEQ ID NO: 3900061 - RNA, 21 nt, Human adenovirus A
gaguacacgcgcucaaaggca

SEQ ID NO: 3900062 - RNA, 17 nt, Human adenovirus A
gaguaccugagucccgg

SEQ ID NO: 3900063 - RNA, 18 nt, Human adenovirus A
gaguacucaucagaggga

SEQ ID NO: 3900064 - RNA, 13 nt, Human adenovirus A
gaguuagaggaaa

SEQ ID NO: 3900065 - RNA, 14 nt, Human adenovirus A
gauaaacaaaagca

SEQ ID NO: 3900066 - RNA, 15 nt, Human adenovirus A
gauaaacaaaagcaa

SEQ ID NO: 3900067 - RNA, 16 nt, Human adenovirus A
gauaaacaaaagcaaa

SEQ ID NO: 3900068 - RNA, 18 nt, Human adenovirus A
gauaacccugaauguuug

SEQ ID NO: 3900069 - RNA, 22 nt, Human adenovirus A
gauaagauuguaauuuuuuucu

SEQ ID NO: 3900070 - RNA, 22 nt, Human adenovirus A
gauacuaccgcugcucagcucc

SEQ ID NO: 3900071 - RNA, 16 nt, Human adenovirus A
gauagcccacaaggaa

SEQ ID NO: 3900072 - RNA, 17 nt, Human adenovirus A
gaucaacgacuaaaaca

SEQ ID NO: 3900073 - RNA, 14 nt, Human adenovirus A
gaucagaaaaaacu

SEQ ID NO: 3900074 - RNA, 18 nt, Human adenovirus A
gaucauaacauguuuaug

SEQ ID NO: 3900075 - RNA, 14 nt, Human adenovirus A
gauccagcaaacuu

SEQ ID NO: 3900076 - RNA, 17 nt, Human adenovirus A
gauccuuagauuuuuca

SEQ ID NO: 3900077 - RNA, 21 nt, Human adenovirus A
gaucuccugccaccaguugga

SEQ ID NO: 3900078 - RNA, 19 nt, Human adenovirus A
gaucuuuguaguagucuug

SEQ ID NO: 3900079 - RNA, 18 nt, Human adenovirus A
gaugacuggacagcggcc

SEQ ID NO: 3900080 - RNA, 15 nt, Human adenovirus A
gaugauggaaagccg

SEQ ID NO: 3900081 - RNA, 23 nt, Human adenovirus A
gaugcauaauuaaacccuuuagc

SEQ ID NO: 3900082 - RNA, 20 nt, Human adenovirus A
gaugcgaaccgauugggaaa

SEQ ID NO: 3900083 - RNA, 19 nt, Human adenovirus A
gauuacaugaagauuucug

SEQ ID NO: 3900084 - RNA, 13 nt, Human adenovirus A
gauugggaguuca

SEQ ID NO: 3900085 - RNA, 22 nt, Human adenovirus A
gauugggcgcccacucuccuga

SEQ ID NO: 3900086 - RNA, 18 nt, Human adenovirus A
gauuuaggagggucagga

SEQ ID NO: 3900087 - RNA, 16 nt, Human adenovirus A
gauuuaucuguggaau

SEQ ID NO: 3900088 - RNA, 21 nt, Human adenovirus A
gauuucuaacuuguuucuagu

SEQ ID NO: 3900089 - RNA, 12 nt, Human adenovirus A
gauuuuuguccc

SEQ ID NO: 3900090 - RNA, 15 nt, Human adenovirus A
gcaaaaaaggggcac

SEQ ID NO: 3900091 - RNA, 17 nt, Human adenovirus A
gcaaaaauuuuuugcca

SEQ ID NO: 3900092 - RNA, 18 nt, Human adenovirus A
gcaaaccacugcaaugca

SEQ ID NO: 3900093 - RNA, 15 nt, Human adenovirus A
gcaaacuacauugca

SEQ ID NO: 3900094 - RNA, 14 nt, Human adenovirus A
gcaaagaaacacau

SEQ ID NO: 3900095 - RNA, 15 nt, Human adenovirus A
gcaacagaugaugga

SEQ ID NO: 3900096 - RNA, 19 nt, Human adenovirus A
gcaacauagccccaggucc

SEQ ID NO: 3900097 - RNA, 18 nt, Human adenovirus A
gcaaccacggccucagca

SEQ ID NO: 3900098 - RNA, 18 nt, Human adenovirus A
gcaacgcaccuugcagga

SEQ ID NO: 3900099 - RNA, 15 nt, Human adenovirus A
gcaacggcaggaaau

SEQ ID NO: 3900100 - RNA, 16 nt, Human adenovirus A
gcaacuauuggacccu

SEQ ID NO: 3900101 - RNA, 15 nt, Human adenovirus A
gcaagaggagaagga

SEQ ID NO: 3900102 - RNA, 16 nt, Human adenovirus A
gcaagauccggugacu

SEQ ID NO: 3900103 - RNA, 14 nt, Human adenovirus A
gcaagguagcauuu

SEQ ID NO: 3900104 - RNA, 19 nt, Human adenovirus A
gcaauaaaacaaggagccg

SEQ ID NO: 3900105 - RNA, 12 nt, Human adenovirus A
gcaaucagaaug

SEQ ID NO: 3900106 - RNA, 19 nt, Human adenovirus A
gcaaugcagccgugcuaug

SEQ ID NO: 3900107 - RNA, 19 nt, Human adenovirus A
gcaauuagggccagcauug

SEQ ID NO: 3900108 - RNA, 20 nt, Human adenovirus A
gcacauugcaacgcaaucag

SEQ ID NO: 3900109 - RNA, 14 nt, Human adenovirus A
gcaccccuucccac

SEQ ID NO: 3900110 - RNA, 18 nt, Human adenovirus A
gcaccuuuaauacugaaa

SEQ ID NO: 3900111 - RNA, 15 nt, Human adenovirus A
gcacgccaaagccac

SEQ ID NO: 3900112 - RNA, 16 nt, Human adenovirus A
gcacuggcaacauacc

SEQ ID NO: 3900113 - RNA, 14 nt, Human adenovirus A
gcacuuccuucaga

SEQ ID NO: 3900114 - RNA, 20 nt, Human adenovirus A
gcagagcauugugguucagg

SEQ ID NO: 3900115 - RNA, 14 nt, Human adenovirus A
gcagcaacaaggaa

SEQ ID NO: 3900116 - RNA, 13 nt, Human adenovirus A
gcagcaacggcag

SEQ ID NO: 3900117 - RNA, 17 nt, Human adenovirus A
gcagccaaaacucaggu

SEQ ID NO: 3900118 - RNA, 19 nt, Human adenovirus A
gcagcccaacccuucccaa

SEQ ID NO: 3900119 - RNA, 17 nt, Human adenovirus A
gcagcugacaucuuaau

SEQ ID NO: 3900120 - RNA, 20 nt, Human adenovirus A
gcaggagaaaauaacacaua

SEQ ID NO: 3900121 - RNA, 12 nt, Human adenovirus A
gcaggaguugca

SEQ ID NO: 3900122 - RNA, 23 nt, Human adenovirus A
gcaggguaugggcccaggggugg

SEQ ID NO: 3900123 - RNA, 14 nt, Human adenovirus A
gcagugaggacacu

SEQ ID NO: 3900124 - RNA, 18 nt, Human adenovirus A
gcagugcggccuguugcc

SEQ ID NO: 3900125 - RNA, 22 nt, Human adenovirus A
gcaguuuuucuaccaaugaggc

SEQ ID NO: 3900126 - RNA, 17 nt, Human adenovirus A
gcauaaccacuugcgcc

SEQ ID NO: 3900127 - RNA, 16 nt, Human adenovirus A
gcauacaacuacggag

SEQ ID NO: 3900128 - RNA, 19 nt, Human adenovirus A
gcauacuuaccaaagccau

SEQ ID NO: 3900129 - RNA, 19 nt, Human adenovirus A
gcauauugcgcuauguaca

SEQ ID NO: 3900130 - RNA, 20 nt, Human adenovirus A
gcaucuagccagucacaguc

SEQ ID NO: 3900131 - RNA, 16 nt, Human adenovirus A
gcauuaaaugguuaac

SEQ ID NO: 3900132 - RNA, 13 nt, Human adenovirus A
gcauuaagccaga

SEQ ID NO: 3900133 - RNA, 19 nt, Human adenovirus A
gcauuggaaagcagcuugg

SEQ ID NO: 3900134 - RNA, 23 nt, Human adenovirus A
gcauuuaagcaacauuaaaauca

SEQ ID NO: 3900135 - RNA, 22 nt, Human adenovirus A
gccaacaaaacuuaucagccag

SEQ ID NO: 3900136 - RNA, 16 nt, Human adenovirus A
gccaaccucacugcuu

SEQ ID NO: 3900137 - RNA, 18 nt, Human adenovirus A
gccaaggacccccagaca

SEQ ID NO: 3900138 - RNA, 17 nt, Human adenovirus A
gccacacuuaacuuuuu

SEQ ID NO: 3900139 - RNA, 22 nt, Human adenovirus A
gccacacuuaacuuuuuacuaa

SEQ ID NO: 3900140 - RNA, 20 nt, Human adenovirus A
gccaccgucaauucuucuuc

SEQ ID NO: 3900141 - RNA, 22 nt, Human adenovirus A
gccacucaaacauuaugcugga

SEQ ID NO: 3900142 - RNA, 20 nt, Human adenovirus A
gccagaagcacuggcaacau

SEQ ID NO: 3900143 - RNA, 23 nt, Human adenovirus A
gccagccaagcguagccgcagca

SEQ ID NO: 3900144 - RNA, 16 nt, Human adenovirus A
gccagcucuugcagua

SEQ ID NO: 3900145 - RNA, 14 nt, Human adenovirus A
gccauccgcaggca

SEQ ID NO: 3900146 - RNA, 17 nt, Human adenovirus A
gccauuuugaaccagcg

SEQ ID NO: 3900147 - RNA, 11 nt, Human adenovirus A
gcccaagguca

SEQ ID NO: 3900148 - RNA, 21 nt, Human adenovirus A
gcccauaacaucaggagcaga

SEQ ID NO: 3900149 - RNA, 21 nt, Human adenovirus A
gcccaucggauaaccuuacca

SEQ ID NO: 3900150 - RNA, 19 nt, Human adenovirus A
gccccaagcuaaccgcuuu

SEQ ID NO: 3900151 - RNA, 20 nt, Human adenovirus A
gcccgcguuuggaaacugua

SEQ ID NO: 3900152 - RNA, 18 nt, Human adenovirus A
gcccuauccgucuccagc

SEQ ID NO: 3900153 - RNA, 23 nt, Human adenovirus A
gcccucuccaaugaaacccgcug

SEQ ID NO: 3900154 - RNA, 15 nt, Human adenovirus A
gcccugcuccgacaa

SEQ ID NO: 3900155 - RNA, 13 nt, Human adenovirus A
gccgcagagagcu

SEQ ID NO: 3900156 - RNA, 15 nt, Human adenovirus A
gccgcagcaccugga

SEQ ID NO: 3900157 - RNA, 12 nt, Human adenovirus A
cuggagaauaag

SEQ ID NO: 3900158 - RNA, 17 nt, Human adenovirus A
cuggaggucuccauguc

SEQ ID NO: 3900159 - RNA, 19 nt, Human adenovirus A
cuggcaguuuagaggccac

SEQ ID NO: 3900160 - RNA, 23 nt, Human adenovirus A
cuggccauaauguaacccuuccc

SEQ ID NO: 3900161 - RNA, 16 nt, Human adenovirus A
cuggcuuuuggaugga

SEQ ID NO: 3900162 - RNA, 21 nt, Human adenovirus A
cuggggugccuaauuguaugc

SEQ ID NO: 3900163 - RNA, 13 nt, Human adenovirus A
cuguaaaauuucu

SEQ ID NO: 3900164 - RNA, 13 nt, Human adenovirus A
cuguacugcaaac

SEQ ID NO: 3900165 - RNA, 22 nt, Human adenovirus A
cuguaguuucuuuacaacugua

SEQ ID NO: 3900166 - RNA, 18 nt, Human adenovirus A
cuguaucccaucccagcu

SEQ ID NO: 3900167 - RNA, 13 nt, Human adenovirus A
cugucaccuacca

SEQ ID NO: 3900168 - RNA, 15 nt, Human adenovirus A
cugucccccaccagu

SEQ ID NO: 3900169 - RNA, 14 nt, Human adenovirus A
cuguuagacagagc

SEQ ID NO: 3900170 - RNA, 12 nt, Human adenovirus A
cuguugauguga

SEQ ID NO: 3900171 - RNA, 21 nt, Human adenovirus A
cuguugcgccguagugcgcua

SEQ ID NO: 3900172 - RNA, 15 nt, Human adenovirus A
cuuaaaaaaacaaaa

SEQ ID NO: 3900173 - RNA, 15 nt, Human adenovirus A
cuuaaaaaaggacac

SEQ ID NO: 3900174 - RNA, 22 nt, Human adenovirus A
cuuaaagaguaaaaaaagcccg

SEQ ID NO: 3900175 - RNA, 19 nt, Human adenovirus A
cuuaaccgcccccaccgcu

SEQ ID NO: 3900176 - RNA, 20 nt, Human adenovirus A
cuuaauaguucaacauagua

SEQ ID NO: 3900177 - RNA, 12 nt, Human adenovirus A
cuuaaucuguuu

SEQ ID NO: 3900178 - RNA, 16 nt, Human adenovirus A
cuuacauaccaacaug

SEQ ID NO: 3900179 - RNA, 14 nt, Human adenovirus A
cuuaccaacaccuc

SEQ ID NO: 3900180 - RNA, 15 nt, Human adenovirus A
cuuacccgcagcugu

SEQ ID NO: 3900181 - RNA, 19 nt, Human adenovirus A
cuuacccgcagcugucucu

SEQ ID NO: 3900182 - RNA, 21 nt, Human adenovirus A
cuuacccgcagcugucucuac

SEQ ID NO: 3900183 - RNA, 21 nt, Human adenovirus A
cuuacccuagaccaaaugcca

SEQ ID NO: 3900184 - RNA, 15 nt, Human adenovirus A
cuuacucuauugcca

SEQ ID NO: 3900185 - RNA, 15 nt, Human adenovirus A
cuuagaugcauccug

SEQ ID NO: 3900186 - RNA, 19 nt, Human adenovirus A
cuuaguaacgcacacaaca

SEQ ID NO: 3900187 - RNA, 17 nt, Human adenovirus A
cuuaguuuuaaauuguu

SEQ ID NO: 3900188 - RNA, 23 nt, Human adenovirus A
cuuauaaaauuucccucuuccca

SEQ ID NO: 3900189 - RNA, 15 nt, Human adenovirus A
cuucaauaccaguuu

SEQ ID NO: 3900190 - RNA, 16 nt, Human adenovirus A
cuucacuacacuuucc

SEQ ID NO: 3900191 - RNA, 20 nt, Human adenovirus A
cuucagagcacacugggaaa

SEQ ID NO: 3900192 - RNA, 19 nt, Human adenovirus A
cuucagcguccaugaaugu

SEQ ID NO: 3900193 - RNA, 12 nt, Human adenovirus A
cuucaucuuuuc

SEQ ID NO: 3900194 - RNA, 22 nt, Human adenovirus A
cuuccaacuuauuacugguacu

SEQ ID NO: 3900195 - RNA, 15 nt, Human adenovirus A
cuuccgcggccgcuu

SEQ ID NO: 3900196 - RNA, 20 nt, Human adenovirus A
cuuccguagccuugcagcgg

SEQ ID NO: 3900197 - RNA, 16 nt, Human adenovirus A
cuuccucguugcgggg

SEQ ID NO: 3900198 - RNA, 22 nt, Human adenovirus A
cuuccuucagauuuugugccua

SEQ ID NO: 3900199 - RNA, 22 nt, Human adenovirus A
cuucuccagacaacuucauuuu

SEQ ID NO: 3900200 - RNA, 16 nt, Human adenovirus A
cuucucccugugcuuc

SEQ ID NO: 3900201 - RNA, 14 nt, Human adenovirus A
cuucugccuaccug

SEQ ID NO: 3900202 - RNA, 18 nt, Human adenovirus A
cuugcauuaaccuuucca

SEQ ID NO: 3900203 - RNA, 22 nt, Human adenovirus A
cuuggaagaaugggaggaggag

SEQ ID NO: 3900204 - RNA, 17 nt, Human adenovirus A
cuuggccaccauagccc

SEQ ID NO: 3900205 - RNA, 23 nt, Human adenovirus A
cuugguaggcaauuucugccauu

SEQ ID NO: 3900206 - RNA, 18 nt, Human adenovirus A
cuugugcagccuuucuua

SEQ ID NO: 3900207 - RNA, 20 nt, Human adenovirus A
cuuguggaauuccgcagugg

SEQ ID NO: 3900208 - RNA, 17 nt, Human adenovirus A
cuuuaaagguacuaaca

SEQ ID NO: 3900209 - RNA, 17 nt, Human adenovirus A
cuuuauaacuaacuuua

SEQ ID NO: 3900210 - RNA, 13 nt, Human adenovirus A
cuuuauugccuua

SEQ ID NO: 3900211 - RNA, 13 nt, Human adenovirus A
cuuucaacaaaaa

SEQ ID NO: 3900212 - RNA, 14 nt, Human adenovirus A
cuuucaacaaaaaa

SEQ ID NO: 3900213 - RNA, 13 nt, Human adenovirus A
cuuucagcccaug

SEQ ID NO: 3900214 - RNA, 18 nt, Human adenovirus A
cuuucucugugacaaaaa

SEQ ID NO: 3900215 - RNA, 14 nt, Human adenovirus A
cuuugacaacauug

SEQ ID NO: 3900216 - RNA, 18 nt, Human adenovirus A
cuuuuaaaaauuugcaag

SEQ ID NO: 3900217 - RNA, 21 nt, Human adenovirus A
cuuuuaacauuagcagucugg

SEQ ID NO: 3900218 - RNA, 23 nt, Human adenovirus A
cuuuuccauuagcauagccaugg

SEQ ID NO: 3900219 - RNA, 18 nt, Human adenovirus A
cuuuucuuuauguuaauc

SEQ ID NO: 3900220 - RNA, 16 nt, Human adenovirus A
cuuuugcagcuccaac

SEQ ID NO: 3900221 - RNA, 12 nt, Human adenovirus A
cuuuuuaaccac

SEQ ID NO: 3900222 - RNA, 17 nt, Human adenovirus A
cuuuuuucuuacaguau

SEQ ID NO: 3900223 - RNA, 16 nt, Human adenovirus A
gaaaaagcuacaucuu

SEQ ID NO: 3900224 - RNA, 12 nt, Human adenovirus A
gaaaaauaauau

SEQ ID NO: 3900225 - RNA, 16 nt, Human adenovirus A
gaaaagugacgucaca

SEQ ID NO: 3900226 - RNA, 18 nt, Human adenovirus A
gaaacacauuaaaaugug

SEQ ID NO: 3900227 - RNA, 14 nt, Human adenovirus A
gaaacagaagaaaa

SEQ ID NO: 3900228 - RNA, 13 nt, Human adenovirus A
gaaacagcagcaa

SEQ ID NO: 3900229 - RNA, 21 nt, Human adenovirus A
gaaaccagcgccgcaaacuug

SEQ ID NO: 3900230 - RNA, 18 nt, Human adenovirus A
gaaagagaacaaacagug

SEQ ID NO: 3900231 - RNA, 20 nt, Human adenovirus A
gaaaggcauggaaaaacuug

SEQ ID NO: 3900232 - RNA, 16 nt, Human adenovirus A
gaaagguauucagcug

SEQ ID NO: 3900233 - RNA, 23 nt, Human adenovirus A
gaaaguuguagauggucuggcuu

SEQ ID NO: 3900234 - RNA, 22 nt, Human adenovirus A
gaaauaaaaaauuacaaaggca

SEQ ID NO: 3900235 - RNA, 16 nt, Human adenovirus A
gaaaugguaggacgcu

SEQ ID NO: 3900236 - RNA, 14 nt, Human adenovirus A
gaacaaacagugcc

SEQ ID NO: 3900237 - RNA, 22 nt, Human adenovirus A
gaacaguaucuggagcggucuu

SEQ ID NO: 3900238 - RNA, 17 nt, Human adenovirus A
gaaccacgaaaacggug

SEQ ID NO: 3900239 - RNA, 15 nt, Human adenovirus A
gaaccugaaagaaag

SEQ ID NO: 3900240 - RNA, 15 nt, Human adenovirus A
gaacggacaguagcu

SEQ ID NO: 3900241 - RNA, 14 nt, Human adenovirus A
gaacugcagacagu

SEQ ID NO: 3900242 - RNA, 23 nt, Human adenovirus A
gaacuggaaggugacaaugcccg

SEQ ID NO: 3900243 - RNA, 18 nt, Human adenovirus A
gaagacuauagagaggaa

SEQ ID NO: 3900244 - RNA, 23 nt, Human adenovirus A
gaagauagacagcuuuuauaugc

SEQ ID NO: 3900245 - RNA, 19 nt, Human adenovirus A
gaagcgcgugucuucuccc

SEQ ID NO: 3900246 - RNA, 18 nt, Human adenovirus A
gaagcugaggaaaugcga

SEQ ID NO: 3900247 - RNA, 14 nt, Human adenovirus A
gaagcuuauguaca

SEQ ID NO: 3900248 - RNA, 16 nt, Human adenovirus A
gaagggacggcaagua

SEQ ID NO: 3900249 - RNA, 18 nt, Human adenovirus A
gaaggguggggugcugcc

SEQ ID NO: 3900250 - RNA, 14 nt, Human adenovirus A
gaaguaagcuguuu

SEQ ID NO: 3900251 - RNA, 15 nt, Human adenovirus A
gaauauaagaacuac

SEQ ID NO: 3900252 - RNA, 24 nt, Human adenovirus A
gaaucccucgcccgcacagucacu

SEQ ID NO: 3900253 - RNA, 20 nt, Human adenovirus A
gaaucggcaacagcagcaac

SEQ ID NO: 3900254 - RNA, 17 nt, Human adenovirus A
gaaugauuaaacaacaa

SEQ ID NO: 3900255 - RNA, 18 nt, Human adenovirus A
gaauuccgcaguggacag

SEQ ID NO: 3900256 - RNA, 18 nt, Human adenovirus A
gacaaagagcuuaugcau

SEQ ID NO: 3900257 - RNA, 14 nt, Human adenovirus A
gacacaaaagcucu

SEQ ID NO: 3900258 - RNA, 23 nt, Human adenovirus A
gacaccaacgaccagucuuuuaa

SEQ ID NO: 3900259 - RNA, 22 nt, Human adenovirus A
gacaccuacuucacccugggaa

SEQ ID NO: 3900260 - RNA, 16 nt, Human adenovirus A
gacagaacgugcuaca

SEQ ID NO: 3900261 - RNA, 17 nt, Human adenovirus A
gacaucaccacauugcg

SEQ ID NO: 3900262 - RNA, 23 nt, Human adenovirus A
gacauccaugugaugccggcagc

SEQ ID NO: 3900263 - RNA, 17 nt, Human adenovirus A
gacaugguaagcucuug

SEQ ID NO: 3900264 - RNA, 19 nt, Human adenovirus A
gaccaaaaaguaaacuguc

SEQ ID NO: 3900265 - RNA, 20 nt, Human adenovirus A
gaccaagccuauuuuaccca

SEQ ID NO: 3900266 - RNA, 23 nt, Human adenovirus A
gaccaauccaaacccccaaaagc

SEQ ID NO: 3900267 - RNA, 23 nt, Human adenovirus A
gaccccaucuuguuuccagugcg

SEQ ID NO: 3900268 - RNA, 16 nt, Human adenovirus A
gaccccuacuuuguau

SEQ ID NO: 3900269 - RNA, 20 nt, Human adenovirus A
gacccgauuacuuuuuucaa

SEQ ID NO: 3900270 - RNA, 15 nt, Human adenovirus A
gaccgccuuuucuag

SEQ ID NO: 3900271 - RNA, 17 nt, Human adenovirus A
gaccggauggguacaga

SEQ ID NO: 3900272 - RNA, 18 nt, Human adenovirus A
gaccgggcaccacagugg

SEQ ID NO: 3900273 - RNA, 16 nt, Human adenovirus A
gaccuuaaucuguuuu

SEQ ID NO: 3900274 - RNA, 14 nt, Human adenovirus A
gacgagcucccgga

SEQ ID NO: 3900275 - RNA, 15 nt, Human adenovirus A
agcuguggagggcau

SEQ ID NO: 3900276 - RNA, 17 nt, Human adenovirus A
agcuucaauuugccuaa

SEQ ID NO: 3900277 - RNA, 17 nt, Human adenovirus A
agcuuccaguucuucuu

SEQ ID NO: 3900278 - RNA, 23 nt, Human adenovirus A
agcuucuugcuuuaagggcuggc

SEQ ID NO: 3900279 - RNA, 17 nt, Human adenovirus A
agcuuggcuauagaucu

SEQ ID NO: 3900280 - RNA, 17 nt, Human adenovirus A
agcuuuaauaaccaugu

SEQ ID NO: 3900281 - RNA, 22 nt, Human adenovirus A
aggaaaaaaaagaaaguuuaaa

SEQ ID NO: 3900282 - RNA, 12 nt, Human adenovirus A
aggaaaagcugc

SEQ ID NO: 3900283 - RNA, 16 nt, Human adenovirus A
aggaaaaucccccucc

SEQ ID NO: 3900284 - RNA, 19 nt, Human adenovirus A
aggaaaugcgagacugcag

SEQ ID NO: 3900285 - RNA, 19 nt, Human adenovirus A
aggaacuccgcgcaaggag

SEQ ID NO: 3900286 - RNA, 19 nt, Human adenovirus A
aggaagccacaugggaagg

SEQ ID NO: 3900287 - RNA, 13 nt, Human adenovirus A
aggaagcugagga

SEQ ID NO: 3900288 - RNA, 24 nt, Human adenovirus A
aggacaaaagucuacucauacccc

SEQ ID NO: 3900289 - RNA, 14 nt, Human adenovirus A
aggagcuaaaacaa

SEQ ID NO: 3900290 - RNA, 19 nt, Human adenovirus A
aggaggacuuugagccaga

SEQ ID NO: 3900291 - RNA, 21 nt, Human adenovirus A
aggaggagguggcuggacugc

SEQ ID NO: 3900292 - RNA, 16 nt, Human adenovirus A
aggaggguuugcauuu

SEQ ID NO: 3900293 - RNA, 23 nt, Human adenovirus A
aggaguaauaaaaccugugccuc

SEQ ID NO: 3900294 - RNA, 18 nt, Human adenovirus A
aggaguuaaauaaugcau

SEQ ID NO: 3900295 - RNA, 16 nt, Human adenovirus A
aggauccagaggagga

SEQ ID NO: 3900296 - RNA, 20 nt, Human adenovirus A
aggcaaagaaacacaugaug

SEQ ID NO: 3900297 - RNA, 17 nt, Human adenovirus A
aggcaacagaugaugga

SEQ ID NO: 3900298 - RNA, 17 nt, Human adenovirus A
aggcaacguuggcagcg

SEQ ID NO: 3900299 - RNA, 16 nt, Human adenovirus A
aggcaaguuguggaua

SEQ ID NO: 3900300 - RNA, 17 nt, Human adenovirus A
aggcaucuagccaguca

SEQ ID NO: 3900301 - RNA, 12 nt, Human adenovirus A
aggcauuggaaa

SEQ ID NO: 3900302 - RNA, 21 nt, Human adenovirus A
aggcauuuccagguggggaaa

SEQ ID NO: 3900303 - RNA, 15 nt, Human adenovirus A
aggcuaaguuuuguu

SEQ ID NO: 3900304 - RNA, 22 nt, Human adenovirus A
aggcuaaguuuuguuucuucua

SEQ ID NO: 3900305 - RNA, 20 nt, Human adenovirus A
aggcuuucuucaaauccaaa

SEQ ID NO: 3900306 - RNA, 20 nt, Human adenovirus A
aggggucuauccuucagugg

SEQ ID NO: 3900307 - RNA, 16 nt, Human adenovirus A
aggggugguggguuug

SEQ ID NO: 3900308 - RNA, 21 nt, Human adenovirus A
aggguccggacguuccuccuu

SEQ ID NO: 3900309 - RNA, 16 nt, Human adenovirus A
aggguggggugcugcc

SEQ ID NO: 3900310 - RNA, 18 nt, Human adenovirus A
agguacagaggaaauugu

SEQ ID NO: 3900311 - RNA, 20 nt, Human adenovirus A
agguagugggcacauugcaa

SEQ ID NO: 3900312 - RNA, 20 nt, Human adenovirus A
aggucaucguaggacaacuu

SEQ ID NO: 3900313 - RNA, 24 nt, Human adenovirus A
aggugguaaauagggugaaagaag

SEQ ID NO: 3900314 - RNA, 16 nt, Human adenovirus A
agguguuaucuucaaa

SEQ ID NO: 3900315 - RNA, 20 nt, Human adenovirus A
aguaacuccgggaguguaca

SEQ ID NO: 3900316 - RNA, 16 nt, Human adenovirus A
aguaauaaaaccugug

SEQ ID NO: 3900317 - RNA, 22 nt, Human adenovirus A
aguaauggaguuggaaacugug

SEQ ID NO: 3900318 - RNA, 18 nt, Human adenovirus A
aguaccgcgcgcccgcug

SEQ ID NO: 3900319 - RNA, 18 nt, Human adenovirus A
aguacgacgaaguguacg

SEQ ID NO: 3900320 - RNA, 22 nt, Human adenovirus A
aguagccauugguuuaaugcau

SEQ ID NO: 3900321 - RNA, 20 nt, Human adenovirus A
aguauacugaugaucuuccc

SEQ ID NO: 3900322 - RNA, 15 nt, Human adenovirus A
aguaucugcccauuu

SEQ ID NO: 3900323 - RNA, 21 nt, Human adenovirus A
agucaaugcuucugaaacaaa

SEQ ID NO: 3900324 - RNA, 12 nt, Human adenovirus A
agucacaaggua

SEQ ID NO: 3900325 - RNA, 18 nt, Human adenovirus A
agucauugguaccuucga

SEQ ID NO: 3900326 - RNA, 20 nt, Human adenovirus A
agucgcacuuuuuaaaaaag

SEQ ID NO: 3900327 - RNA, 20 nt, Human adenovirus A
agucgcgcacugggccagga

SEQ ID NO: 3900328 - RNA, 22 nt, Human adenovirus A
agucgugguggaagcuggccau

SEQ ID NO: 3900329 - RNA, 23 nt, Human adenovirus A
agucucacguacuuacagggaga

SEQ ID NO: 3900330 - RNA, 21 nt, Human adenovirus A
agucuugaaugcucuggacau

SEQ ID NO: 3900331 - RNA, 19 nt, Human adenovirus A
agugcaaaauaaugacuau

SEQ ID NO: 3900332 - RNA, 19 nt, Human adenovirus A
agugcgguuccagaaggag

SEQ ID NO: 3900333 - RNA, 17 nt, Human adenovirus A
aguggggauugggaagg

SEQ ID NO: 3900334 - RNA, 18 nt, Human adenovirus A
agugucacugccgcugca

SEQ ID NO: 3900335 - RNA, 17 nt, Human adenovirus A
aguuaagaaaacgcauu

SEQ ID NO: 3900336 - RNA, 18 nt, Human adenovirus A
aguuaaguuugacaccag

SEQ ID NO: 3900337 - RNA, 16 nt, Human adenovirus A
aguuaaugcuggaugc

SEQ ID NO: 3900338 - RNA, 18 nt, Human adenovirus A
aguuacaacuugcuucca

SEQ ID NO: 3900339 - RNA, 13 nt, Human adenovirus A
aguucaaacagug

SEQ ID NO: 3900340 - RNA, 18 nt, Human adenovirus A
aguucaaagaagagcugc

SEQ ID NO: 3900341 - RNA, 19 nt, Human adenovirus A
aguucgccuacacaacaca

SEQ ID NO: 3900342 - RNA, 13 nt, Human adenovirus A
aguucuguuucau

SEQ ID NO: 3900343 - RNA, 22 nt, Human adenovirus A
aguugcacauauucgcgugcca

SEQ ID NO: 3900344 - RNA, 11 nt, Human adenovirus A
aguuggaaacu

SEQ ID NO: 3900345 - RNA, 13 nt, Human adenovirus A
aguuguaaggcau

SEQ ID NO: 3900346 - RNA, 17 nt, Human adenovirus A
aguuguggauaccacag

SEQ ID NO: 3900347 - RNA, 18 nt, Human adenovirus A
aguuuggcagacaaggug

SEQ ID NO: 3900348 - RNA, 22 nt, Human adenovirus A
aguuuugauuguauuuugagau

SEQ ID NO: 3900349 - RNA, 11 nt, Human adenovirus A
auaaaaaauua

SEQ ID NO: 3900350 - RNA, 17 nt, Human adenovirus A
cuuauuuuugauucaaa

SEQ ID NO: 3900351 - RNA, 19 nt, Human adenovirus A
cuucaagacguuccauggc

SEQ ID NO: 3900352 - RNA, 16 nt, Human adenovirus A
cuucaauuugccuaaa

SEQ ID NO: 3900353 - RNA, 14 nt, Human adenovirus A
cuucacccugggaa

SEQ ID NO: 3900354 - RNA, 12 nt, Human adenovirus A
cuucagcauuuu

SEQ ID NO: 3900355 - RNA, 16 nt, Human adenovirus A
cuuccauugugcccac

SEQ ID NO: 3900356 - RNA, 20 nt, Human adenovirus A
cuuccauuugaucagaaaaa

SEQ ID NO: 3900357 - RNA, 14 nt, Human adenovirus A
cuucgcgaaauugg

SEQ ID NO: 3900358 - RNA, 19 nt, Human adenovirus A
cuucuacaacgagcaagcc

SEQ ID NO: 3900359 - RNA, 17 nt, Human adenovirus A
cuucuacaaucacuugg

SEQ ID NO: 3900360 - RNA, 20 nt, Human adenovirus A
cuucuccagacaacuucauu

SEQ ID NO: 3900361 - RNA, 19 nt, Human adenovirus A
cuucugcugcauugccacu

SEQ ID NO: 3900362 - RNA, 16 nt, Human adenovirus A
cuucuuguacucaaau

SEQ ID NO: 3900363 - RNA, 23 nt, Human adenovirus A
cuugagcaaaaauguuuucugga

SEQ ID NO: 3900364 - RNA, 15 nt, Human adenovirus A
cuugagccuggauaa

SEQ ID NO: 3900365 - RNA, 16 nt, Human adenovirus A
cuugauccccaaaccg

SEQ ID NO: 3900366 - RNA, 17 nt, Human adenovirus A
cuugauggauuaccuuc

SEQ ID NO: 3900367 - RNA, 17 nt, Human adenovirus A
cuugcauuaaccuuucc

SEQ ID NO: 3900368 - RNA, 15 nt, Human adenovirus A
cuugccaagcuugaa

SEQ ID NO: 3900369 - RNA, 19 nt, Human adenovirus A
cuugcuuccagacaaaaaa

SEQ ID NO: 3900370 - RNA, 12 nt, Human adenovirus A
cuuggaguguac

SEQ ID NO: 3900371 - RNA, 14 nt, Human adenovirus A
cuuggccaguuccc

SEQ ID NO: 3900372 - RNA, 19 nt, Human adenovirus A
cuugggagagucaggcaga

SEQ ID NO: 3900373 - RNA, 19 nt, Human adenovirus A
cuuguacggacaacauccu

SEQ ID NO: 3900374 - RNA, 17 nt, Human adenovirus A
cuugugcagccuuucuu

SEQ ID NO: 3900375 - RNA, 15 nt, Human adenovirus A
cuuguuaauguuugu

SEQ ID NO: 3900376 - RNA, 15 nt, Human adenovirus A
cuuguuuccagugcg

SEQ ID NO: 3900377 - RNA, 23 nt, Human adenovirus A
cuuguuuccagugcgcgacaaaa

SEQ ID NO: 3900378 - RNA, 17 nt, Human adenovirus A
cuuuaauaaaaacacug

SEQ ID NO: 3900379 - RNA, 18 nt, Human adenovirus A
cuuuaauacugaaaaaua

SEQ ID NO: 3900380 - RNA, 21 nt, Human adenovirus A
cuuuacaaaccacuuaguuuu

SEQ ID NO: 3900381 - RNA, 16 nt, Human adenovirus A
cuuuaccaacaccaac

SEQ ID NO: 3900382 - RNA, 20 nt, Human adenovirus A
cuuuacucgccuaaaaacua

SEQ ID NO: 3900383 - RNA, 17 nt, Human adenovirus A
cuuuaggcauuaaaugg

SEQ ID NO: 3900384 - RNA, 17 nt, Human adenovirus A
cuuuagguuagccugaa

SEQ ID NO: 3900385 - RNA, 22 nt, Human adenovirus A
cuuucaaccaagcccucuccaa

SEQ ID NO: 3900386 - RNA, 15 nt, Human adenovirus A
cuuucuaccaaggaa

SEQ ID NO: 3900387 - RNA, 16 nt, Human adenovirus A
cuuugaccggucaggc

SEQ ID NO: 3900388 - RNA, 18 nt, Human adenovirus A
cuuugagccagaugaaca

SEQ ID NO: 3900389 - RNA, 16 nt, Human adenovirus A
cuuuuacucacuggcc

SEQ ID NO: 3900390 - RNA, 22 nt, Human adenovirus A
cuuuuagaugucgaaugcaggg

SEQ ID NO: 3900391 - RNA, 20 nt, Human adenovirus A
cuuuuaguacuccuauguaa

SEQ ID NO: 3900392 - RNA, 18 nt, Human adenovirus A
cuuuuauuucucuuuucu

SEQ ID NO: 3900393 - RNA, 12 nt, Human adenovirus A
cuuuucaaacuu

SEQ ID NO: 3900394 - RNA, 13 nt, Human adenovirus A
cuuuucauuuucg

SEQ ID NO: 3900395 - RNA, 22 nt, Human adenovirus A
gaaaaacaguacaaagccaggc

SEQ ID NO: 3900396 - RNA, 13 nt, Human adenovirus A
gaaaaagcuacau

SEQ ID NO: 3900397 - RNA, 18 nt, Human adenovirus A
gaaaacaauguucccaaa

SEQ ID NO: 3900398 - RNA, 17 nt, Human adenovirus A
gaaaagcugccaccucu

SEQ ID NO: 3900399 - RNA, 21 nt, Human adenovirus A
gaaacucuaacugcucagcug

SEQ ID NO: 3900400 - RNA, 12 nt, Human adenovirus A
uuaauacuggcu

SEQ ID NO: 3900401 - RNA, 16 nt, Human adenovirus A
uuacaaaggcauuaag

SEQ ID NO: 3900402 - RNA, 23 nt, Human adenovirus A
uuacaacuugcuuccagacaaaa

SEQ ID NO: 3900403 - RNA, 20 nt, Human adenovirus A
uuacaagcacgccaaagcca

SEQ ID NO: 3900404 - RNA, 20 nt, Human adenovirus A
uuacauaccuggcaaacugg

SEQ ID NO: 3900405 - RNA, 15 nt, Human adenovirus A
uuacauccuuccauu

SEQ ID NO: 3900406 - RNA, 22 nt, Human adenovirus A
uuacaugaagauuucugcuguc

SEQ ID NO: 3900407 - RNA, 17 nt, Human adenovirus A
uuacaugucaaugcagc

SEQ ID NO: 3900408 - RNA, 13 nt, Human adenovirus A
uuacauguggagc

SEQ ID NO: 3900409 - RNA, 19 nt, Human adenovirus A
uuacauguggagcuuucaa

SEQ ID NO: 3900410 - RNA, 19 nt, Human adenovirus A
uuacccuagaccaaaugcc

SEQ ID NO: 3900411 - RNA, 14 nt, Human adenovirus A
uuacuaaaacagua

SEQ ID NO: 3900412 - RNA, 17 nt, Human adenovirus A
uuagaaggaaaggcaug

SEQ ID NO: 3900413 - RNA, 12 nt, Human adenovirus A
uuagacagagca

SEQ ID NO: 3900414 - RNA, 19 nt, Human adenovirus A
uuagaccuucccaauguaa

SEQ ID NO: 3900415 - RNA, 17 nt, Human adenovirus A
uuaggcagcagcagcaa

SEQ ID NO: 3900416 - RNA, 14 nt, Human adenovirus A
uuaguguuguagau

SEQ ID NO: 3900417 - RNA, 19 nt, Human adenovirus A
uuauaugcgcauggcuuua

SEQ ID NO: 3900418 - RNA, 12 nt, Human adenovirus A
uuaugaaucuuu

SEQ ID NO: 3900419 - RNA, 17 nt, Human adenovirus A
uucaaacaccugcagua

SEQ ID NO: 3900420 - RNA, 17 nt, Human adenovirus A
uucaccgcgcaagcuuu

SEQ ID NO: 3900421 - RNA, 19 nt, Human adenovirus A
uucagcagagucgagguca

SEQ ID NO: 3900422 - RNA, 19 nt, Human adenovirus A
uucagguguuaucuucaaa

SEQ ID NO: 3900423 - RNA, 16 nt, Human adenovirus A
uucauugguccaggcu

SEQ ID NO: 3900424 - RNA, 14 nt, Human adenovirus A
uuccaccaaaugcu

SEQ ID NO: 3900425 - RNA, 22 nt, Human adenovirus A
uuccacugguaacggucuucaa

SEQ ID NO: 3900426 - RNA, 23 nt, Human adenovirus A
uuccacugguaacggucuucaag

SEQ ID NO: 3900427 - RNA, 23 nt, Human adenovirus A
uuccacuuauugcugcggccauu

SEQ ID NO: 3900428 - RNA, 19 nt, Human adenovirus A
uuccagcgccaccugccau

SEQ ID NO: 3900429 - RNA, 21 nt, Human adenovirus A
uuccccuauagaggcuggcac

SEQ ID NO: 3900430 - RNA, 20 nt, Human adenovirus A
uucccuaucauuaagaacac

SEQ ID NO: 3900431 - RNA, 13 nt, Human adenovirus A
uucccucuuccca

SEQ ID NO: 3900432 - RNA, 15 nt, Human adenovirus A
uucgacgggccaggc

SEQ ID NO: 3900433 - RNA, 20 nt, Human adenovirus A
uucgauaauggggucaugaa

SEQ ID NO: 3900434 - RNA, 18 nt, Human adenovirus A
uucgcaggagaaaauaac

SEQ ID NO: 3900435 - RNA, 14 nt, Human adenovirus A
uucuaaaagagcca

SEQ ID NO: 3900436 - RNA, 23 nt, Human adenovirus A
uucuaaaagagccacagcucuga

SEQ ID NO: 3900437 - RNA, 14 nt, Human adenovirus A
uucuaauguggagc

SEQ ID NO: 3900438 - RNA, 15 nt, Human adenovirus A
uucuaccaaggaaaa

SEQ ID NO: 3900439 - RNA, 14 nt, Human adenovirus A
uucugccuaccugc

SEQ ID NO: 3900440 - RNA, 12 nt, Human adenovirus A
uucuugcuuuaa

SEQ ID NO: 3900441 - RNA, 15 nt, Human adenovirus A
uucuuuaccuucugg

SEQ ID NO: 3900442 - RNA, 14 nt, Human adenovirus A
uugaacaauuaaaa

SEQ ID NO: 3900443 - RNA, 16 nt, Human adenovirus A
uugaaccgguugaaac

SEQ ID NO: 3900444 - RNA, 14 nt, Human adenovirus A
uugaauucuggaau

SEQ ID NO: 3900445 - RNA, 15 nt, Human adenovirus A
uugaguacucagccg

SEQ ID NO: 3900446 - RNA, 23 nt, Human adenovirus A
uugcaaaacggcuugccugacuu

SEQ ID NO: 3900447 - RNA, 23 nt, Human adenovirus A
uugcaagaggagaaggaggagga

SEQ ID NO: 3900448 - RNA, 18 nt, Human adenovirus A
uugcauauauccuugcaa

SEQ ID NO: 3900449 - RNA, 12 nt, Human adenovirus A
uugcauuuccca

SEQ ID NO: 3900450 - RNA, 13 nt, Human adenovirus A
uugcgcaagcgcu

SEQ ID NO: 3900451 - RNA, 20 nt, Human adenovirus A
uugcuucauugaauuaccag

SEQ ID NO: 3900452 - RNA, 22 nt, Human adenovirus A
uuggagcgccccccuagcagua

SEQ ID NO: 3900453 - RNA, 17 nt, Human adenovirus A
uuggauaccaagguuuu

SEQ ID NO: 3900454 - RNA, 16 nt, Human adenovirus A
uuggauagcaaagcca

SEQ ID NO: 3900455 - RNA, 15 nt, Human adenovirus A
uuggcagacaaggug

SEQ ID NO: 3900456 - RNA, 13 nt, Human adenovirus A
uuggcggccaugc

SEQ ID NO: 3900457 - RNA, 18 nt, Human adenovirus A
uuggguccuacggaggga

SEQ ID NO: 3900458 - RNA, 19 nt, Human adenovirus A
uugguucgacgggccaggc

SEQ ID NO: 3900459 - RNA, 13 nt, Human adenovirus A
uuguauaaauucu

SEQ ID NO: 3900460 - RNA, 20 nt, Human adenovirus A
uuguugaauucgcaggcggu

SEQ ID NO: 3900461 - RNA, 14 nt, Human adenovirus A
uuguuggauagcaa

SEQ ID NO: 3900462 - RNA, 14 nt, Human adenovirus A
uuuaaaaaccaucu

SEQ ID NO: 3900463 - RNA, 15 nt, Human adenovirus A
uuuaaaaucuugguc

SEQ ID NO: 3900464 - RNA, 18 nt, Human adenovirus A
uuuaauccuaggcaaaga

SEQ ID NO: 3900465 - RNA, 15 nt, Human adenovirus A
uuuaaugcaucuuug

SEQ ID NO: 3900466 - RNA, 14 nt, Human adenovirus A
uuuaauuaacauuc

SEQ ID NO: 3900467 - RNA, 17 nt, Human adenovirus A
uuuacuaaaaugcaaaa

SEQ ID NO: 3900468 - RNA, 13 nt, Human adenovirus A
uuuauccuacaaa

SEQ ID NO: 3900469 - RNA, 20 nt, Human adenovirus A
uuuaugcucguaaaaucuac

SEQ ID NO: 3900470 - RNA, 15 nt, Human adenovirus A
uuuauuaaaaaucaa

SEQ ID NO: 3900471 - RNA, 21 nt, Human adenovirus A
uuucaaacuuuacaaaccacu

SEQ ID NO: 3900472 - RNA, 20 nt, Human adenovirus A
uuucacauucaacugaccag

SEQ ID NO: 3900473 - RNA, 20 nt, Human adenovirus A
uuuccaccaaaugcucuuug

SEQ ID NO: 3900474 - RNA, 19 nt, Human adenovirus A
uuuccauuuuuugaaaaga

SEQ ID NO: 3900475 - RNA, 17 nt, Human adenovirus A
uuucuucaaauccaaaa

SEQ ID NO: 3900476 - RNA, 19 nt, Human adenovirus A
uuugaaaacauauuggccg

SEQ ID NO: 3900477 - RNA, 17 nt, Human adenovirus A
uuugagccagaugaaca

SEQ ID NO: 3900478 - RNA, 20 nt, Human adenovirus A
uuugagccagaugaacauuc

SEQ ID NO: 3900479 - RNA, 19 nt, Human adenovirus A
uuugcucgagacaucugug

SEQ ID NO: 3900480 - RNA, 14 nt, Human adenovirus A
uuuggaaacuguau

SEQ ID NO: 3900481 - RNA, 12 nt, Human adenovirus A
uuuggaggcagc

SEQ ID NO: 3900482 - RNA, 19 nt, Human adenovirus A
uuuggauguaaaaaaauac

SEQ ID NO: 3900483 - RNA, 15 nt, Human adenovirus A
uuugucauggaguuu

SEQ ID NO: 3900484 - RNA, 11 nt, Human adenovirus A
uuuuccaaaug

SEQ ID NO: 3900485 - RNA, 22 nt, Human adenovirus A
uuuucuuuaaaaaucacaaaau

SEQ ID NO: 3900486 - RNA, 15 nt, Human adenovirus A
uuuuguauucugcua

SEQ ID NO: 3900487 - RNA, 14 nt, Human adenovirus A
uuuuguuagaugca

SEQ ID NO: 3900488 - RNA, 18 nt, Human adenovirus A
gagguguaccuggcggcc

SEQ ID NO: 3900489 - RNA, 16 nt, Human adenovirus A
gaguaggaagacagca

SEQ ID NO: 3900490 - RNA, 13 nt, Human adenovirus A
gaguguauggaaa

SEQ ID NO: 3900491 - RNA, 20 nt, Human adenovirus A
gauacagcgcugauuaugca

SEQ ID NO: 3900492 - RNA, 14 nt, Human adenovirus A
gauaugaugcaaga

SEQ ID NO: 3900493 - RNA, 14 nt, Human adenovirus A
gauccagaggagga

SEQ ID NO: 3900494 - RNA, 16 nt, Human adenovirus A
gauccucgaaagcgag

SEQ ID NO: 3900495 - RNA, 14 nt, Human adenovirus A
gaucuauuguuaau

SEQ ID NO: 3900496 - RNA, 12 nt, Human adenovirus A
gaugaaggaagc

SEQ ID NO: 3900497 - RNA, 21 nt, Human adenovirus A
gaugauagagauaagcaggaa

SEQ ID NO: 3900498 - RNA, 19 nt, Human adenovirus A
gaugcuaagggacaaguua

SEQ ID NO: 3900499 - RNA, 15 nt, Human adenovirus A
gaugcuuugggagac

SEQ ID NO: 3900500 - RNA, 15 nt, Human adenovirus A
gauuguguccuugga

SEQ ID NO: 3900501 - RNA, 22 nt, Human adenovirus A
gauuuaaggggucuauccuuca

SEQ ID NO: 3900502 - RNA, 22 nt, Human adenovirus A
gauuugcgcacugaaaaaccaa

SEQ ID NO: 3900503 - RNA, 18 nt, Human adenovirus A
gcaaacaugcuguauccc

SEQ ID NO: 3900504 - RNA, 22 nt, Human adenovirus A
gcaaacgcugaugccacuugaa

SEQ ID NO: 3900505 - RNA, 15 nt, Human adenovirus A
gcaaacucagcccau

SEQ ID NO: 3900506 - RNA, 13 nt, Human adenovirus A
gcaaagaugaggc

SEQ ID NO: 3900507 - RNA, 13 nt, Human adenovirus A
gcaaagccagccu

SEQ ID NO: 3900508 - RNA, 17 nt, Human adenovirus A
gcaacauagccccaggu

SEQ ID NO: 3900509 - RNA, 17 nt, Human adenovirus A
gcaacguuggcagcgac

SEQ ID NO: 3900510 - RNA, 16 nt, Human adenovirus A
gcaagacagaaauaca

SEQ ID NO: 3900511 - RNA, 13 nt, Human adenovirus A
gcaaggcgccgca

SEQ ID NO: 3900512 - RNA, 20 nt, Human adenovirus A
gcaaggcgguauuugcuaua

SEQ ID NO: 3900513 - RNA, 21 nt, Human adenovirus A
gcaaguaggaccaagugaaug

SEQ ID NO: 3900514 - RNA, 15 nt, Human adenovirus A
gcaaugcuuggaaga

SEQ ID NO: 3900515 - RNA, 13 nt, Human adenovirus A
gcacaauaguuua

SEQ ID NO: 3900516 - RNA, 16 nt, Human adenovirus A
gcacacugggaaauga

SEQ ID NO: 3900517 - RNA, 21 nt, Human adenovirus A
gcacauauucgcgugccaggc

SEQ ID NO: 3900518 - RNA, 14 nt, Human adenovirus A
gcaccagaaagcag

SEQ ID NO: 3900519 - RNA, 17 nt, Human adenovirus A
gcaccaucuccauucca

SEQ ID NO: 3900520 - RNA, 19 nt, Human adenovirus A
gcacccccaggggccagcu

SEQ ID NO: 3900521 - RNA, 16 nt, Human adenovirus A
gcaccccuucccaccu

SEQ ID NO: 3900522 - RNA, 15 nt, Human adenovirus A
gcacgagccagcuga

SEQ ID NO: 3900523 - RNA, 14 nt, Human adenovirus A
gcacucucugggga

SEQ ID NO: 3900524 - RNA, 16 nt, Human adenovirus A
gcagagucuauugcgu

SEQ ID NO: 3900525 - RNA, 21 nt, Human adenovirus A
gcagaugagcuucuugcuuua

SEQ ID NO: 3900526 - RNA, 15 nt, Human adenovirus A
gcagaugauagagau

SEQ ID NO: 3900527 - RNA, 14 nt, Human adenovirus A
gcagcaaaugcccu

SEQ ID NO: 3900528 - RNA, 20 nt, Human adenovirus A
gcagcaacggcaggaaaucu

SEQ ID NO: 3900529 - RNA, 21 nt, Human adenovirus A
gcagcaaugcuuggaagaaaa

SEQ ID NO: 3900530 - RNA, 20 nt, Human adenovirus A
gcagcauguccccgaaagcc

SEQ ID NO: 3900531 - RNA, 16 nt, Human adenovirus A
gcagcgccaaauagag

SEQ ID NO: 3900532 - RNA, 19 nt, Human adenovirus A
gcagcuccaaccaugaaaa

SEQ ID NO: 3900533 - RNA, 21 nt, Human adenovirus A
gcagcuccaaccaugaaaaca

SEQ ID NO: 3900534 - RNA, 20 nt, Human adenovirus A
uaugcgcuguaccauacauu

SEQ ID NO: 3900535 - RNA, 21 nt, Human adenovirus A
uauuacacucaggccauaaag

SEQ ID NO: 3900536 - RNA, 19 nt, Human adenovirus A
uauuagcucauuggaguac

SEQ ID NO: 3900537 - RNA, 20 nt, Human adenovirus A
uauucgcgugccaggcauuu

SEQ ID NO: 3900538 - RNA, 19 nt, Human adenovirus A
uauuguauuuccagagccc

SEQ ID NO: 3900539 - RNA, 23 nt, Human adenovirus A
uauuuaaaauuccauaauuaaag

SEQ ID NO: 3900540 - RNA, 18 nt, Human adenovirus A
uauuucacaagacacauu

SEQ ID NO: 3900541 - RNA, 17 nt, Human adenovirus A
uauuucucuuuucuuua

SEQ ID NO: 3900542 - RNA, 23 nt, Human adenovirus A
uauuuuagagagugccccccucc

SEQ ID NO: 3900543 - RNA, 15 nt, Human adenovirus A
ucaaaauaaacaucu

SEQ ID NO: 3900544 - RNA, 16 nt, Human adenovirus A
ucaaacaauaacauug

SEQ ID NO: 3900545 - RNA, 14 nt, Human adenovirus A
ucaaacguccaggc

SEQ ID NO: 3900546 - RNA, 17 nt, Human adenovirus A
ucaaacuuuacaaacca

SEQ ID NO: 3900547 - RNA, 20 nt, Human adenovirus A
ucaaauuccugugcaaacug

SEQ ID NO: 3900548 - RNA, 18 nt, Human adenovirus A
ucaacacaguuuaacaca

SEQ ID NO: 3900549 - RNA, 15 nt, Human adenovirus A
ucaaccuauuaaccu

SEQ ID NO: 3900550 - RNA, 17 nt, Human adenovirus A
ucaacgugucaguuucu

SEQ ID NO: 3900551 - RNA, 12 nt, Human adenovirus A
ucaacugaccag

SEQ ID NO: 3900552 - RNA, 14 nt, Human adenovirus A
ucaagaaaggcauc

SEQ ID NO: 3900553 - RNA, 10 nt, Human adenovirus A
ucaaggaaau

SEQ ID NO: 3900554 - RNA, 15 nt, Human adenovirus A
ucaauuuugcaagug

SEQ ID NO: 3900555 - RNA, 16 nt, Human adenovirus A
ucacaacacagcacua

SEQ ID NO: 3900556 - RNA, 18 nt, Human adenovirus A
ucacaccaaacuggccau

SEQ ID NO: 3900557 - RNA, 17 nt, Human adenovirus A
ucacauuugugacugcu

SEQ ID NO: 3900558 - RNA, 15 nt, Human adenovirus A
ucaccacauugcgca

SEQ ID NO: 3900559 - RNA, 14 nt, Human adenovirus A
ucaccaccagcgcu

SEQ ID NO: 3900560 - RNA, 20 nt, Human adenovirus A
ucaccgcgcugcggccauga

SEQ ID NO: 3900561 - RNA, 16 nt, Human adenovirus A
ucaccguuguacgaua

SEQ ID NO: 3900562 - RNA, 22 nt, Human adenovirus A
ucaccuaccaccuaucccauga

SEQ ID NO: 3900563 - RNA, 20 nt, Human adenovirus A
ucacguggucguaacucaaa

SEQ ID NO: 3900564 - RNA, 16 nt, Human adenovirus A
ucacuacagacaaaca

SEQ ID NO: 3900565 - RNA, 18 nt, Human adenovirus A
ucacuuaagucuuuacaa

SEQ ID NO: 3900566 - RNA, 23 nt, Human adenovirus A
ucacuuacauuauguaaagucag

SEQ ID NO: 3900567 - RNA, 14 nt, Human adenovirus A
ucagaauaaaacaa

SEQ ID NO: 3900568 - RNA, 14 nt, Human adenovirus A
ucagauagcaagcg

SEQ ID NO: 3900569 - RNA, 23 nt, Human adenovirus A
ucagcagagucgaggucaagaac

SEQ ID NO: 3900570 - RNA, 20 nt, Human adenovirus A
ucagcucggaggguccggac

SEQ ID NO: 3900571 - RNA, 21 nt, Human adenovirus A
ucagugaaacgcccuagaugu

SEQ ID NO: 3900572 - RNA, 17 nt, Human adenovirus A
ucauacaaaucagaagc

SEQ ID NO: 3900573 - RNA, 21 nt, Human adenovirus A
ucauacaaaucagaagccagc

SEQ ID NO: 3900574 - RNA, 15 nt, Human adenovirus A
ucaucguaggacaac

SEQ ID NO: 3900575 - RNA, 21 nt, Human adenovirus A
ucaugucgcauaaugaaaaca

SEQ ID NO: 3900576 - RNA, 19 nt, Human adenovirus A
ucauugaauuaccagaaug

SEQ ID NO: 3900577 - RNA, 16 nt, Human adenovirus A
uccaacgaacuacaac

SEQ ID NO: 3900578 - RNA, 17 nt, Human adenovirus A
uccaaggaugacaacau

SEQ ID NO: 3900579 - RNA, 20 nt, Human adenovirus A
uccaaguucuaaugcaaguu

SEQ ID NO: 3900580 - RNA, 16 nt, Human adenovirus A
uccaauggucuucaag

SEQ ID NO: 3900581 - RNA, 17 nt, Human adenovirus A
uccagaggaggaggagg

SEQ ID NO: 3900582 - RNA, 17 nt, Human adenovirus A
uccagguguagguuucu

SEQ ID NO: 3900583 - RNA, 14 nt, Human adenovirus A
uccauaccugggau

SEQ ID NO: 3900584 - RNA, 20 nt, Human adenovirus A
uccauuuccaccaaaugcuc

SEQ ID NO: 3900585 - RNA, 14 nt, Human adenovirus A
ucccagacugcugu

SEQ ID NO: 3900586 - RNA, 14 nt, Human adenovirus A
ucccaucccagcua

SEQ ID NO: 3900587 - RNA, 19 nt, Human adenovirus A
ucccaugagcuccugaaag

SEQ ID NO: 3900588 - RNA, 18 nt, Human adenovirus A
uccccagacaguuucauc

SEQ ID NO: 3900589 - RNA, 13 nt, Human adenovirus A
uccccauccaaaa

SEQ ID NO: 3900590 - RNA, 12 nt, Human adenovirus A
uccccuguggag

SEQ ID NO: 3900591 - RNA, 22 nt, Human adenovirus A
uccccuguggagccacugcuac

SEQ ID NO: 3900592 - RNA, 19 nt, Human adenovirus A
uccgacaacagcugcuguc

SEQ ID NO: 3900593 - RNA, 23 nt, Human adenovirus A
uccgccauggcuacgugcgccaa

SEQ ID NO: 3900594 - RNA, 17 nt, Human adenovirus A
uccgcggggacagcgcg

SEQ ID NO: 3900595 - RNA, 18 nt, Human adenovirus A
uccuccauuacuaccguc

SEQ ID NO: 3900596 - RNA, 18 nt, Human adenovirus A
uccuccuuauccuuccag

SEQ ID NO: 3900597 - RNA, 22 nt, Human adenovirus A
uccugggacauaauuucccuca

SEQ ID NO: 3900598 - RNA, 19 nt, Human adenovirus A
uccuuagauuuuucaucug

SEQ ID NO: 3900599 - RNA, 13 nt, Human adenovirus A
ucgaccugcaugu

SEQ ID NO: 3900600 - RNA, 16 nt, Human adenovirus A
ucgcagcgcacuggca

SEQ ID NO: 3900601 - RNA, 22 nt, Human adenovirus A
ucgccagcaagugccuccucag

SEQ ID NO: 3900602 - RNA, 20 nt, Human adenovirus A
ucgcgcuuuggaggcagcug

SEQ ID NO: 3900603 - RNA, 17 nt, Human adenovirus A
ucgcuaugaaucuuuac

SEQ ID NO: 3900604 - RNA, 22 nt, Human adenovirus A
ucggggucucaauuaguaacaa

SEQ ID NO: 3900605 - RNA, 21 nt, Human adenovirus A
ucguacaggaauucugaccac

SEQ ID NO: 3900606 - RNA, 13 nt, Human adenovirus A
ucguuacuuuugc

SEQ ID NO: 3900607 - RNA, 14 nt, Human adenovirus A
ucuaccaaggaaaa

SEQ ID NO: 3900608 - RNA, 15 nt, Human adenovirus A
ucuacucauacccca

SEQ ID NO: 3900609 - RNA, 20 nt, Human adenovirus A
ucucaccacugaaacucccu

SEQ ID NO: 3900610 - RNA, 14 nt, Human adenovirus A
ucucagaaagccaa

SEQ ID NO: 3900611 - RNA, 15 nt, Human adenovirus A
ucuccaaaucuuaaa

SEQ ID NO: 3900612 - RNA, 23 nt, Human adenovirus A
ucucguugauuauaaucuccaaa

SEQ ID NO: 3900613 - RNA, 11 nt, Human adenovirus A
ucucuuucaac

SEQ ID NO: 3900614 - RNA, 18 nt, Human adenovirus A
ucugaucaacgacuaaaa

SEQ ID NO: 3900615 - RNA, 14 nt, Human adenovirus A
ucugcaugaugcau

SEQ ID NO: 3900616 - RNA, 17 nt, Human adenovirus A
ucugugagugcugauug

SEQ ID NO: 3900617 - RNA, 23 nt, Human adenovirus A
ucuguuauguaugcccagcauga

SEQ ID NO: 3900618 - RNA, 19 nt, Human adenovirus A
ucuuaaaaucuccugaacg

SEQ ID NO: 3900619 - RNA, 18 nt, Human adenovirus A
ucuuccaauggucuucaa

SEQ ID NO: 3900620 - RNA, 22 nt, Human adenovirus A
ucuucguaggaaagaucuucaa

SEQ ID NO: 3900621 - RNA, 15 nt, Human adenovirus A
ucuucuaucaucaaa

SEQ ID NO: 3900622 - RNA, 17 nt, Human adenovirus A
ucuucugacauugcuuc

SEQ ID NO: 3900623 - RNA, 17 nt, Human adenovirus A
ucuugccugcggacuga

SEQ ID NO: 3900624 - RNA, 23 nt, Human adenovirus A
ucuuggucgucacacccuccgug

SEQ ID NO: 3900625 - RNA, 13 nt, Human adenovirus A
ucuuuacaacugu

SEQ ID NO: 3900626 - RNA, 17 nt, Human adenovirus A
ucuuucuuuagaaacuu

SEQ ID NO: 3900627 - RNA, 18 nt, Human adenovirus A
ugaaaaaccaacaaacac

SEQ ID NO: 3900628 - RNA, 22 nt, Human adenovirus A
ugaaaacaauguucccaaauau

SEQ ID NO: 3900629 - RNA, 14 nt, Human adenovirus A
ugaaaauacaucau

SEQ ID NO: 3900630 - RNA, 17 nt, Human adenovirus A
ugaaagaucacagccag

SEQ ID NO: 3900631 - RNA, 16 nt, Human adenovirus A
ugaaccauucccaggu

SEQ ID NO: 3900632 - RNA, 15 nt, Human adenovirus A
ugaacccggccaagg

SEQ ID NO: 3900633 - RNA, 19 nt, Human adenovirus A
ugaaccgguugaaacagac

SEQ ID NO: 3900634 - RNA, 22 nt, Human adenovirus A
ugaacuauuaagugaaagucaa

SEQ ID NO: 3900635 - RNA, 15 nt, Human adenovirus A
ugaagcaaaccacau

SEQ ID NO: 3900636 - RNA, 22 nt, Human adenovirus A
ugaagugccucaaagugaagug

SEQ ID NO: 3900637 - RNA, 15 nt, Human adenovirus A
ugaaugcguaaaucu

SEQ ID NO: 3900638 - RNA, 16 nt, Human adenovirus A
ugacaaacgcccugcu

SEQ ID NO: 3900639 - RNA, 13 nt, Human adenovirus A
ugacaaggaagug

SEQ ID NO: 3900640 - RNA, 19 nt, Human adenovirus A
ugacuggacagcggccaug

SEQ ID NO: 3900641 - RNA, 19 nt, Human adenovirus A
ugacuucccaaauuuucca

SEQ ID NO: 3900642 - RNA, 20 nt, Human adenovirus A
ugacuuuucgcuccucgcgu

SEQ ID NO: 3900643 - RNA, 23 nt, Human adenovirus A
ugagaaccgucugcaugaugcau

SEQ ID NO: 3900644 - RNA, 19 nt, Human adenovirus A
ugagcagaacuugggcuac

SEQ ID NO: 3900645 - RNA, 24 nt, Human adenovirus A
ugagcccgaaguugacuggcaugg

SEQ ID NO: 3900646 - RNA, 22 nt, Human adenovirus A
ugagcgcugcggucuggggugc

SEQ ID NO: 3900647 - RNA, 19 nt, Human adenovirus A
ugaguaggcaaguugugga

SEQ ID NO: 3900648 - RNA, 18 nt, Human adenovirus A
ugaguugggauuacaugc

SEQ ID NO: 3900649 - RNA, 15 nt, Human adenovirus A
ugauaaccuugcaaa

SEQ ID NO: 3900650 - RNA, 17 nt, Human adenovirus A
ugaugcaguaauugaug

SEQ ID NO: 3900651 - RNA, 21 nt, Human adenovirus A
ugaugccgcaguggucuuaca

SEQ ID NO: 3900652 - RNA, 21 nt, Human adenovirus A
ugaugcuuuucgccagcagcc

SEQ ID NO: 3900653 - RNA, 15 nt, Human adenovirus A
ugaugugaugaaagu

SEQ ID NO: 3900654 - RNA, 20 nt, Human adenovirus A
ugauucaagaggaagaaaga

SEQ ID NO: 3900655 - RNA, 15 nt, Human adenovirus A
ugauuuacaaaccgu

SEQ ID NO: 3900656 - RNA, 15 nt, Human adenovirus A
ugauuuuacagagag

SEQ ID NO: 3900657 - RNA, 20 nt, Human adenovirus A
ugcaaguguaauuuuccagc

SEQ ID NO: 3900658 - RNA, 23 nt, Human adenovirus A
ugcacauauucgcgugccaggca

SEQ ID NO: 3900659 - RNA, 18 nt, Human adenovirus A
ugcaggaugaauuucagc

SEQ ID NO: 3900660 - RNA, 15 nt, Human adenovirus A
ugcauuaccagcagc

SEQ ID NO: 3900661 - RNA, 15 nt, Human adenovirus A
ugccagaagcacugg

SEQ ID NO: 3900662 - RNA, 18 nt, Human adenovirus A
ugcccugcaaaaagaaaa

SEQ ID NO: 3900663 - RNA, 17 nt, Human adenovirus A
ugccgacguugcaagag

SEQ ID NO: 3900664 - RNA, 19 nt, Human adenovirus A
ugccgacguugcaagagga

SEQ ID NO: 3900665 - RNA, 18 nt, Human adenovirus A
ugccgccacgaaugcugg

SEQ ID NO: 3900666 - RNA, 19 nt, Human adenovirus A
ugccgucuucguggagaag

SEQ ID NO: 3900667 - RNA, 18 nt, Human adenovirus A
ugccucaaagugaagugu

SEQ ID NO: 3900668 - RNA, 20 nt, Human adenovirus A
ugcgaaccgauugggaaaaa

SEQ ID NO: 3900669 - RNA, 22 nt, Human adenovirus A
ugcgacaaaugcgaccucagcc

SEQ ID NO: 3900670 - RNA, 14 nt, Human adenovirus A
ugcgaccucagccc

SEQ ID NO: 3900671 - RNA, 23 nt, Human adenovirus A
ugcgaccucagcccagggcaacc

SEQ ID NO: 3900672 - RNA, 15 nt, Human adenovirus A
ugcgagcugccaccg

SEQ ID NO: 3900673 - RNA, 20 nt, Human adenovirus A
ugcgcaagcgcugaaacagg

SEQ ID NO: 3900674 - RNA, 12 nt, Human adenovirus A
ugcgggcagcca

SEQ ID NO: 3900675 - RNA, 19 nt, Human adenovirus A
ugcgguuccagaaggagua

SEQ ID NO: 3900676 - RNA, 17 nt, Human adenovirus A
ugcguaaaucucgcagg

SEQ ID NO: 3900677 - RNA, 15 nt, Human adenovirus A
ugcguuuugugcccg

SEQ ID NO: 3900678 - RNA, 13 nt, Human adenovirus A
ugcuaacagcucu

SEQ ID NO: 3900679 - RNA, 16 nt, Human adenovirus A
ugcuccuuuucuuaca

SEQ ID NO: 3900680 - RNA, 18 nt, Human adenovirus A
ugcucuuggugguucugc

SEQ ID NO: 3900681 - RNA, 16 nt, Human adenovirus A
ugcugaagaaacagaa

SEQ ID NO: 3900682 - RNA, 17 nt, Human adenovirus A
ugcugagguuaaaagga

SEQ ID NO: 3900683 - RNA, 23 nt, Human adenovirus A
ugcuucggcaagguagcauuuua

SEQ ID NO: 3900684 - RNA, 18 nt, Human adenovirus A
ugcuuugcucgagacauc

SEQ ID NO: 3900685 - RNA, 23 nt, Human adenovirus A
uggaacucuccaauuuguggagg

SEQ ID NO: 3900686 - RNA, 16 nt, Human adenovirus A
uggaacugcagacagu

SEQ ID NO: 3900687 - RNA, 14 nt, Human adenovirus A
uggaagaaaaaaac

SEQ ID NO: 3900688 - RNA, 21 nt, Human adenovirus A
uggaauaaaauuucuagaaau

SEQ ID NO: 3900689 - RNA, 14 nt, Human adenovirus A
uggacauggaaaaa

SEQ ID NO: 3900690 - RNA, 21 nt, Human adenovirus A
uggacuuugagcaccugggca

SEQ ID NO: 3900691 - RNA, 22 nt, Human adenovirus A
uggagauaaguuuaaaggcauu

SEQ ID NO: 3900692 - RNA, 19 nt, Human adenovirus A
uggagccacaggaaagcuu

SEQ ID NO: 3900693 - RNA, 13 nt, Human adenovirus A
uggagcuuucaac

SEQ ID NO: 3900694 - RNA, 13 nt, Human adenovirus A
uggaggcagcugg

SEQ ID NO: 3900695 - RNA, 15 nt, Human adenovirus A
uggaguacaagcuug

SEQ ID NO: 3900696 - RNA, 15 nt, Human adenovirus A
uggaguuggaagaag

SEQ ID NO: 3900697 - RNA, 19 nt, Human adenovirus A
uggaugcuuugggagacag

SEQ ID NO: 3900698 - RNA, 15 nt, Human adenovirus A
uggcagccaagcgcu

SEQ ID NO: 3900699 - RNA, 21 nt, Human adenovirus A
uggcauagaaaguuugguaga

SEQ ID NO: 3900700 - RNA, 13 nt, Human adenovirus A
uggcauuugugcc

SEQ ID NO: 3900701 - RNA, 14 nt, Human adenovirus A
uggcccaaugcaau

SEQ ID NO: 3900702 - RNA, 13 nt, Human adenovirus A
uggcgcuuccaua

SEQ ID NO: 3900703 - RNA, 11 nt, Human adenovirus A
uggcuuccaug

SEQ ID NO: 3900704 - RNA, 14 nt, Human adenovirus A
uggcuucgaaugcu

SEQ ID NO: 3900705 - RNA, 14 nt, Human adenovirus A
ugggaaacaaguuu

SEQ ID NO: 3900706 - RNA, 17 nt, Human adenovirus A
ugggaccccgaaaccca

SEQ ID NO: 3900707 - RNA, 13 nt, Human adenovirus A
ugggcacauugca

SEQ ID NO: 3900708 - RNA, 18 nt, Human adenovirus A
ugggcuuuggacuucugc

SEQ ID NO: 3900709 - RNA, 15 nt, Human adenovirus A
ugguacuaugacugu

SEQ ID NO: 3900710 - RNA, 15 nt, Human adenovirus A
uggucccauccaagu

SEQ ID NO: 3900711 - RNA, 22 nt, Human adenovirus A
uggugcaauucgcccgcgccac

SEQ ID NO: 3900712 - RNA, 22 nt, Human adenovirus A
ugguguuaugaaucuuuauuga

SEQ ID NO: 3900713 - RNA, 14 nt, Human adenovirus A
ugguuaaacugccu

SEQ ID NO: 3900714 - RNA, 14 nt, Human adenovirus A
uguaaggaacgagg

SEQ ID NO: 3900715 - RNA, 18 nt, Human adenovirus A
uguaauaaagcuaaaucu

SEQ ID NO: 3900716 - RNA, 18 nt, Human adenovirus A
uguaauugaaguaagcug

SEQ ID NO: 3900717 - RNA, 22 nt, Human adenovirus A
uguacagcaaucuguaaguuug

SEQ ID NO: 3900718 - RNA, 13 nt, Human adenovirus A
uguacaguuucug

SEQ ID NO: 3900719 - RNA, 12 nt, Human adenovirus A
uguaucuggaca

SEQ ID NO: 3900720 - RNA, 21 nt, Human adenovirus A
uguaucuggacauccauguga

SEQ ID NO: 3900721 - RNA, 23 nt, Human adenovirus A
ugucaacuacauaaaccauggaa

SEQ ID NO: 3900722 - RNA, 13 nt, Human adenovirus A
ugucauggagaag

SEQ ID NO: 3900723 - RNA, 18 nt, Human adenovirus A
ugucauuuacugcagccu

SEQ ID NO: 3900724 - RNA, 13 nt, Human adenovirus A
uguccuuccaggg

SEQ ID NO: 3900725 - RNA, 14 nt, Human adenovirus A
ugugcaaaacuuuc

SEQ ID NO: 3900726 - RNA, 18 nt, Human adenovirus A
ugugcuacacgcugccca

SEQ ID NO: 3900727 - RNA, 15 nt, Human adenovirus A
ugugcugcaaacaug

SEQ ID NO: 3900728 - RNA, 16 nt, Human adenovirus A
uguggcccaaugcaau

SEQ ID NO: 3900729 - RNA, 19 nt, Human adenovirus A
uguuaaauuaaagaugccu

SEQ ID NO: 3900730 - RNA, 23 nt, Human adenovirus A
uguucaacaacagcuucuaaaag

SEQ ID NO: 3900731 - RNA, 21 nt, Human adenovirus A
uguugugcauauuuucuugua

SEQ ID NO: 3900732 - RNA, 19 nt, Human adenovirus A
uguuugacaagauugucau

SEQ ID NO: 3900733 - RNA, 13 nt, Human adenovirus A
uguuuuauuaaaa

SEQ ID NO: 3900734 - RNA, 18 nt, Human adenovirus A
uuaaacaacaaaacacug

SEQ ID NO: 3900735 - RNA, 18 nt, Human adenovirus A
uuaaacccuuuagcaguu

SEQ ID NO: 3900736 - RNA, 13 nt, Human adenovirus A
uuaaaguaaauua

SEQ ID NO: 3900737 - RNA, 22 nt, Human adenovirus A
uuaaauugagaugguguuauga

SEQ ID NO: 3900738 - RNA, 23 nt, Human adenovirus A
uuaacuaagugguugggaacaga

SEQ ID NO: 3900739 - RNA, 18 nt, Human adenovirus A
uuaagaaaacgcauuuuu

SEQ ID NO: 3900740 - RNA, 12 nt, Human adenovirus A
uuaagaaaucuu

SEQ ID NO: 3900741 - RNA, 17 nt, Human adenovirus A
uuaauaauaaaaccauu

SEQ ID NO: 3900742 - RNA, 13 nt, Human adenovirus A
aaucggcggcgcg

SEQ ID NO: 3900743 - RNA, 12 nt, Human adenovirus A
aaugaaaacaau

SEQ ID NO: 3900744 - RNA, 20 nt, Human adenovirus A
aaugaaacccgcugugagca

SEQ ID NO: 3900745 - RNA, 18 nt, Human adenovirus A
aaugagcgcagugaugaa

SEQ ID NO: 3900746 - RNA, 19 nt, Human adenovirus A
aaugauuaaacaacaaaac

SEQ ID NO: 3900747 - RNA, 21 nt, Human adenovirus A
aaugccuuaccagaaaaacag

SEQ ID NO: 3900748 - RNA, 23 nt, Human adenovirus A
aaugccuuaccagaaaaacagua

SEQ ID NO: 3900749 - RNA, 13 nt, Human adenovirus A
aaugcucuggaca

SEQ ID NO: 3900750 - RNA, 11 nt, Human adenovirus A
aaugcucuuug

SEQ ID NO: 3900751 - RNA, 20 nt, Human adenovirus A
aauggcuguugaugugauga

SEQ ID NO: 3900752 - RNA, 21 nt, Human adenovirus A
aaugguggcuaggaaaacaaa

SEQ ID NO: 3900753 - RNA, 20 nt, Human adenovirus A
aaugucucgcuggaaaacau

SEQ ID NO: 3900754 - RNA, 17 nt, Human adenovirus A
aauguggagcugagcaa

SEQ ID NO: 3900755 - RNA, 22 nt, Human adenovirus A
aauuaagcgagcccaacccauu

SEQ ID NO: 3900756 - RNA, 16 nt, Human adenovirus A
aauuacaaaggcauua

SEQ ID NO: 3900757 - RNA, 16 nt, Human adenovirus A
aauuacuaaaacagua

SEQ ID NO: 3900758 - RNA, 18 nt, Human adenovirus A
aauuauugcuuuccucuu

SEQ ID NO: 3900759 - RNA, 17 nt, Human adenovirus A
aauucuggaauaacaag

SEQ ID NO: 3900760 - RNA, 19 nt, Human adenovirus A
aauugagaugguguuauga

SEQ ID NO: 3900761 - RNA, 20 nt, Human adenovirus A
aauugggcggcauuuagagg

SEQ ID NO: 3900762 - RNA, 16 nt, Human adenovirus A
aauuugucugaaaauu

SEQ ID NO: 3900763 - RNA, 12 nt, Human adenovirus A
acaaaacacuga

SEQ ID NO: 3900764 - RNA, 16 nt, Human adenovirus A
acaaaauuugucugaa

SEQ ID NO: 3900765 - RNA, 16 nt, Human adenovirus A
acaaacgcccugcucc

SEQ ID NO: 3900766 - RNA, 20 nt, Human adenovirus A
acaaagcacugggcauaguu

SEQ ID NO: 3900767 - RNA, 22 nt, Human adenovirus A
acaaaugcgaccucagcccagg

SEQ ID NO: 3900768 - RNA, 22 nt, Human adenovirus A
acaacaaaacacugagcuccau

SEQ ID NO: 3900769 - RNA, 13 nt, Human adenovirus A
acaacaauuugca

SEQ ID NO: 3900770 - RNA, 16 nt, Human adenovirus A
acaacagcugcuguca

SEQ ID NO: 3900771 - RNA, 16 nt, Human adenovirus A
acaagcugcgcugccg

SEQ ID NO: 3900772 - RNA, 17 nt, Human adenovirus A
acaagguaggcuaaguu

SEQ ID NO: 3900773 - RNA, 21 nt, Human adenovirus A
acaaguuaaaagaccaaaauu

SEQ ID NO: 3900774 - RNA, 13 nt, Human adenovirus A
acaaguuucccuc

SEQ ID NO: 3900775 - RNA, 20 nt, Human adenovirus A
acaauaguuuaauguuuccc

SEQ ID NO: 3900776 - RNA, 22 nt, Human adenovirus A
acaauccaaggaugacaacauu

SEQ ID NO: 3900777 - RNA, 22 nt, Human adenovirus A
acaaugaaaguugcauuuaaug

SEQ ID NO: 3900778 - RNA, 19 nt, Human adenovirus A
acaaugcagcaaacacugc

SEQ ID NO: 3900779 - RNA, 21 nt, Human adenovirus A
acaauuugcaucucaccacug

SEQ ID NO: 3900780 - RNA, 17 nt, Human adenovirus A
acacagcacuaacaugu

SEQ ID NO: 3900781 - RNA, 15 nt, Human adenovirus A
acacagcguuccaga

SEQ ID NO: 3900782 - RNA, 12 nt, Human adenovirus A
acacaguuuaac

SEQ ID NO: 3900783 - RNA, 16 nt, Human adenovirus A
acacaguuucuuuacg

SEQ ID NO: 3900784 - RNA, 19 nt, Human adenovirus A
acaccauugaaaccagcgc

SEQ ID NO: 3900785 - RNA, 23 nt, Human adenovirus A
acacgggcuggggacugggugcc

SEQ ID NO: 3900786 - RNA, 16 nt, Human adenovirus A
acacuaauacuuccau

SEQ ID NO: 3900787 - RNA, 22 nt, Human adenovirus A
acacuauccugacgccuucaua

SEQ ID NO: 3900788 - RNA, 15 nt, Human adenovirus A
acacugaaggcauuu

SEQ ID NO: 3900789 - RNA, 13 nt, Human adenovirus A
acacuggcuggcu

SEQ ID NO: 3900790 - RNA, 13 nt, Human adenovirus A
acacuuaacacaa

SEQ ID NO: 3900791 - RNA, 18 nt, Human adenovirus A
acacuuuaauaaaaacac

SEQ ID NO: 3900792 - RNA, 21 nt, Human adenovirus A
acacuuuaauaaaaacacugu

SEQ ID NO: 3900793 - RNA, 14 nt, Human adenovirus A
acagaaaaaaauug

SEQ ID NO: 3900794 - RNA, 16 nt, Human adenovirus A
acagaccccaaaggac

SEQ ID NO: 3900795 - RNA, 17 nt, Human adenovirus A
acagacuugcaaacagc

SEQ ID NO: 3900796 - RNA, 19 nt, Human adenovirus A
acagacuugcaaacagcaa

SEQ ID NO: 3900797 - RNA, 15 nt, Human adenovirus A
acaguacaaagccag

SEQ ID NO: 3900798 - RNA, 13 nt, Human adenovirus A
acagucugcagga

SEQ ID NO: 3900799 - RNA, 21 nt, Human adenovirus A
acaguuuugaacaauuaaaaa

SEQ ID NO: 3900800 - RNA, 12 nt, Human adenovirus A
acauaccuggca

SEQ ID NO: 3900801 - RNA, 12 nt, Human adenovirus A
acauaggcauug

SEQ ID NO: 3900802 - RNA, 15 nt, Human adenovirus A
acaucaggagcagaa

SEQ ID NO: 3900803 - RNA, 20 nt, Human adenovirus A
acauccuuccauugugccca

SEQ ID NO: 3900804 - RNA, 20 nt, Human adenovirus A
acaucgccggucaggaugcc

SEQ ID NO: 3900805 - RNA, 22 nt, Human adenovirus A
acaucuacagcgacaaagcacu

SEQ ID NO: 3900806 - RNA, 14 nt, Human adenovirus A
acaucuuaaugcca

SEQ ID NO: 3900807 - RNA, 12 nt, Human adenovirus A
acaugaggcggu

SEQ ID NO: 3900808 - RNA, 13 nt, Human adenovirus A
acaugauuuccag

SEQ ID NO: 3900809 - RNA, 22 nt, Human adenovirus A
acaugcgggggaugaaggaagc

SEQ ID NO: 3900810 - RNA, 20 nt, Human adenovirus A
acauggaaaaaaugaaaguu

SEQ ID NO: 3900811 - RNA, 14 nt, Human adenovirus A
acauguuauuuaaa

SEQ ID NO: 3900812 - RNA, 16 nt, Human adenovirus A
acauuacaauuaacug

SEQ ID NO: 3900813 - RNA, 12 nt, Human adenovirus A
acauuagcaguc

SEQ ID NO: 3900814 - RNA, 13 nt, Human adenovirus A
acauuauguaaag

SEQ ID NO: 3900815 - RNA, 17 nt, Human adenovirus A
acauucgcagcgcacug

SEQ ID NO: 3900816 - RNA, 16 nt, Human adenovirus A
acauugacuguuucca

SEQ ID NO: 3900817 - RNA, 12 nt, Human adenovirus A
acauuuaauaau

SEQ ID NO: 3900818 - RNA, 13 nt, Human adenovirus A
acauuugugacug

SEQ ID NO: 3900819 - RNA, 14 nt, Human adenovirus A
accaaacuggccau

SEQ ID NO: 3900820 - RNA, 22 nt, Human adenovirus A
accaaagccauggcgaccagug

SEQ ID NO: 3900821 - RNA, 11 nt, Human adenovirus A
accacaguggu

SEQ ID NO: 3900822 - RNA, 15 nt, Human adenovirus A
accacuguagugcaa

SEQ ID NO: 3900823 - RNA, 17 nt, Human adenovirus A
accaguacgaggacuga

SEQ ID NO: 3900824 - RNA, 14 nt, Human adenovirus A
accauccaauggau

SEQ ID NO: 3900825 - RNA, 14 nt, Human adenovirus A
accauccugcuccu

SEQ ID NO: 3900826 - RNA, 14 nt, Human adenovirus A
accaugaaaacagc

SEQ ID NO: 3900827 - RNA, 15 nt, Human adenovirus A
acccaagggugcagc

SEQ ID NO: 3900828 - RNA, 23 nt, Human adenovirus A
acccaguuuuugcagugccagaa

SEQ ID NO: 3900829 - RNA, 19 nt, Human adenovirus A
accccaagauuaccacgcc

SEQ ID NO: 3900830 - RNA, 12 nt, Human adenovirus A
accccugggcuu

SEQ ID NO: 3900831 - RNA, 23 nt, Human adenovirus A
acccucccucuuggccagcugcc

SEQ ID NO: 3900832 - RNA, 23 nt, Human adenovirus A
acccuucgcuaugaaucuuuacc

SEQ ID NO: 3900833 - RNA, 17 nt, Human adenovirus A
accgaccugcaacagcc

SEQ ID NO: 3900834 - RNA, 20 nt, Human adenovirus A
accgcagucugacagcaauu

SEQ ID NO: 3900835 - RNA, 15 nt, Human adenovirus A
accguagaugggaca

SEQ ID NO: 3900836 - RNA, 15 nt, Human adenovirus A
accgucgcuuucaac

SEQ ID NO: 3900837 - RNA, 21 nt, Human adenovirus A
accgucgcuuucaaccaagcc

SEQ ID NO: 3900838 - RNA, 16 nt, Human adenovirus A
accuaaacgagggaga

SEQ ID NO: 3900839 - RNA, 22 nt, Human adenovirus A
accuaagacuuaccccugggcu

SEQ ID NO: 3900840 - RNA, 22 nt, Human adenovirus A
accuagguuuaaaucuuucugc

SEQ ID NO: 3900841 - RNA, 23 nt, Human adenovirus A
accuagguuuaaaucuuucugcu

SEQ ID NO: 3900842 - RNA, 18 nt, Human adenovirus A
accuauaacaaugaaagu

SEQ ID NO: 3900843 - RNA, 21 nt, Human adenovirus A
accucaaaaucuaagccaugc

SEQ ID NO: 3900844 - RNA, 15 nt, Human adenovirus A
accucacugcuuugc

SEQ ID NO: 3900845 - RNA, 16 nt, Human adenovirus A
accuccauuauuucuu

SEQ ID NO: 3900846 - RNA, 21 nt, Human adenovirus A
accucccgauaccaaaaacac

SEQ ID NO: 3900847 - RNA, 16 nt, Human adenovirus A
accucuaaguucuguu

SEQ ID NO: 3900848 - RNA, 18 nt, Human adenovirus A
accucuagaaacugugcc

SEQ ID NO: 3900849 - RNA, 18 nt, Human adenovirus A
accucuuuaggcauuaaa

SEQ ID NO: 3900850 - RNA, 23 nt, Human adenovirus A
accugagucccggucuggugcaa

SEQ ID NO: 3900851 - RNA, 20 nt, Human adenovirus A
accuucgagaacuaaacaaa

SEQ ID NO: 3900852 - RNA, 17 nt, Human adenovirus A
accuuggucucgcagcu

SEQ ID NO: 3900853 - RNA, 13 nt, Human adenovirus A
accuuuaacggaa

SEQ ID NO: 3900854 - RNA, 19 nt, Human adenovirus A
accuuuaguauagguauug

SEQ ID NO: 3900855 - RNA, 17 nt, Human adenovirus A
accuuugcucaggcgcc

SEQ ID NO: 3900856 - RNA, 12 nt, Human adenovirus A
acgagcaagccg

SEQ ID NO: 3900857 - RNA, 19 nt, Human adenovirus A
acgaggauccagaggagga

SEQ ID NO: 3900858 - RNA, 15 nt, Human adenovirus A
acgauuaagacauau

SEQ ID NO: 3900859 - RNA, 13 nt, Human adenovirus A
caaagcacugggc

SEQ ID NO: 3900860 - RNA, 20 nt, Human adenovirus A
caaagguaaugagcgcagug

SEQ ID NO: 3900861 - RNA, 21 nt, Human adenovirus A
caaauaaacguguacacaaug

SEQ ID NO: 3900862 - RNA, 20 nt, Human adenovirus A
caaauacugcuagaacaagc

SEQ ID NO: 3900863 - RNA, 16 nt, Human adenovirus A
caaauagcucuuaaug

SEQ ID NO: 3900864 - RNA, 23 nt, Human adenovirus A
caaauauaaaagcacaacuccau

SEQ ID NO: 3900865 - RNA, 23 nt, Human adenovirus A
caaauccauuaauauuguguccu

SEQ ID NO: 3900866 - RNA, 18 nt, Human adenovirus A
caaaucucagaaagccaa

SEQ ID NO: 3900867 - RNA, 14 nt, Human adenovirus A
caaaugagcaaaac

SEQ ID NO: 3900868 - RNA, 15 nt, Human adenovirus A
caaaugcgaccucag

SEQ ID NO: 3900869 - RNA, 17 nt, Human adenovirus A
caaaugcgaccucagcc

SEQ ID NO: 3900870 - RNA, 23 nt, Human adenovirus A
caaauggacgaggguuuuguccu

SEQ ID NO: 3900871 - RNA, 15 nt, Human adenovirus A
caaauuacacacuac

SEQ ID NO: 3900872 - RNA, 16 nt, Human adenovirus A
caaauugcggcucuuu

SEQ ID NO: 3900873 - RNA, 12 nt, Human adenovirus A
caacacaaaaaa

SEQ ID NO: 3900874 - RNA, 18 nt, Human adenovirus A
caacacggaguaaugaac

SEQ ID NO: 3900875 - RNA, 23 nt, Human adenovirus A
caacaguuuaagucgagauucau

SEQ ID NO: 3900876 - RNA, 18 nt, Human adenovirus A
caacaucaugaaaacagc

SEQ ID NO: 3900877 - RNA, 22 nt, Human adenovirus A
caacauccuuuuucuacaggca

SEQ ID NO: 3900878 - RNA, 23 nt, Human adenovirus A
caacauuuguauucauacuaaca

SEQ ID NO: 3900879 - RNA, 13 nt, Human adenovirus A
caaccaaaggaga

SEQ ID NO: 3900880 - RNA, 18 nt, Human adenovirus A
caaccaugaaaacagcau

SEQ ID NO: 3900881 - RNA, 23 nt, Human adenovirus A
caaccguuuagagccgcggcccg

SEQ ID NO: 3900882 - RNA, 19 nt, Human adenovirus A
caacgaaggccaaaccauu

SEQ ID NO: 3900883 - RNA, 13 nt, Human adenovirus A
caacgacuaaaac

SEQ ID NO: 3900884 - RNA, 22 nt, Human adenovirus A
caacggaugaaagcuuagccuu

SEQ ID NO: 3900885 - RNA, 15 nt, Human adenovirus A
caacggccagccaag

SEQ ID NO: 3900886 - RNA, 13 nt, Human adenovirus A
caacguuggcagc

SEQ ID NO: 3900887 - RNA, 21 nt, Human adenovirus A
caacucuacuuaaaagcaagc

SEQ ID NO: 3900888 - RNA, 14 nt, Human adenovirus A
caacuuaacaaauu

SEQ ID NO: 3900889 - RNA, 16 nt, Human adenovirus A
caacuuaacaaauuua

SEQ ID NO: 3900890 - RNA, 21 nt, Human adenovirus A
caacuuacagcuaguaauaau

SEQ ID NO: 3900891 - RNA, 23 nt, Human adenovirus A
caacuuuguccaguuuacuaaca

SEQ ID NO: 3900892 - RNA, 14 nt, Human adenovirus A
caagaugaguaaag

SEQ ID NO: 3900893 - RNA, 11 nt, Human adenovirus A
caagauuuaau

SEQ ID NO: 3900894 - RNA, 16 nt, Human adenovirus A
caagcauauaaaacug

SEQ ID NO: 3900895 - RNA, 13 nt, Human adenovirus A
caaggaaaugagg

SEQ ID NO: 3900896 - RNA, 21 nt, Human adenovirus A
caaggcauuggaaagcagcuu

SEQ ID NO: 3900897 - RNA, 20 nt, Human adenovirus A
caagucuucugacauugcuu

SEQ ID NO: 3900898 - RNA, 22 nt, Human adenovirus A
caagugaauggaacaccagcau

SEQ ID NO: 3900899 - RNA, 17 nt, Human adenovirus A
caaguuaaaagaccaaa

SEQ ID NO: 3900900 - RNA, 18 nt, Human adenovirus A
caaguuguggauaccaca

SEQ ID NO: 3900901 - RNA, 20 nt, Human adenovirus A
caauaaaaaaaacaguuucu

SEQ ID NO: 3900902 - RNA, 12 nt, Human adenovirus A
caauaaauacug

SEQ ID NO: 3900903 - RNA, 18 nt, Human adenovirus A
caauaacuacaaacaguu

SEQ ID NO: 3900904 - RNA, 16 nt, Human adenovirus A
caaucaaauagcucuu

SEQ ID NO: 3900905 - RNA, 13 nt, Human adenovirus A
caaucagugucua

SEQ ID NO: 3900906 - RNA, 19 nt, Human adenovirus A
caaucccuacccaccaucu

SEQ ID NO: 3900907 - RNA, 20 nt, Human adenovirus A
caaugcaauaugacuaagga

SEQ ID NO: 3900908 - RNA, 20 nt, Human adenovirus A
caaugcagcaaacacugcuc

SEQ ID NO: 3900909 - RNA, 21 nt, Human adenovirus A
caaugcuuggaagaaaaaaac

SEQ ID NO: 3900910 - RNA, 13 nt, Human adenovirus A
caaugugcaggcu

SEQ ID NO: 3900911 - RNA, 19 nt, Human adenovirus A
caaugugcaggcuaacuua

SEQ ID NO: 3900912 - RNA, 16 nt, Human adenovirus A
caauuaguaacaagaa

SEQ ID NO: 3900913 - RNA, 20 nt, Human adenovirus A
caauuuacauuuuaacugug

SEQ ID NO: 3900914 - RNA, 12 nt, Human adenovirus A
caauuucugcca

SEQ ID NO: 3900915 - RNA, 14 nt, Human adenovirus A
cacaacacagcacu

SEQ ID NO: 3900916 - RNA, 21 nt, Human adenovirus A
cacaacacauacauacacuca

SEQ ID NO: 3900917 - RNA, 18 nt, Human adenovirus A
cacaacggaugaaagcuu

SEQ ID NO: 3900918 - RNA, 10 nt, Human adenovirus A
cacaaggucu

SEQ ID NO: 3900919 - RNA, 21 nt, Human adenovirus A
cacaaucugccgcaagugcgc

SEQ ID NO: 3900920 - RNA, 20 nt, Human adenovirus A
cacaauuuucuggugguggg

SEQ ID NO: 3900921 - RNA, 15 nt, Human adenovirus A
cacacugauuuugca

SEQ ID NO: 3900922 - RNA, 20 nt, Human adenovirus A
cacacuuaacacaagagcgc

SEQ ID NO: 3900923 - RNA, 20 nt, Human adenovirus A
cacacuuuuaagaagguguc

SEQ ID NO: 3900924 - RNA, 21 nt, Human adenovirus A
cacaguuuaacacauacagua

SEQ ID NO: 3900925 - RNA, 15 nt, Human adenovirus A
cacauacaucaccuc

SEQ ID NO: 3900926 - RNA, 21 nt, Human adenovirus A
cacauauucgcgugccaggca

SEQ ID NO: 3900927 - RNA, 22 nt, Human adenovirus A
cacaugauggaucuggagccac

SEQ ID NO: 3900928 - RNA, 19 nt, Human adenovirus A
caccaaacugcagccucau

SEQ ID NO: 3900929 - RNA, 18 nt, Human adenovirus A
caccaaauuuaaggccag

SEQ ID NO: 3900930 - RNA, 12 nt, Human adenovirus A
caccaccaaacu

SEQ ID NO: 3900931 - RNA, 13 nt, Human adenovirus A
caccaccucccuc

SEQ ID NO: 3900932 - RNA, 17 nt, Human adenovirus A
caccaguuggaagaaug

SEQ ID NO: 3900933 - RNA, 19 nt, Human adenovirus A
caccaugguaaaaaggaag

SEQ ID NO: 3900934 - RNA, 19 nt, Human adenovirus A
caccgcgcugcggccauga

SEQ ID NO: 3900935 - RNA, 19 nt, Human adenovirus A
caccugcaguaaauucagu

SEQ ID NO: 3900936 - RNA, 16 nt, Human adenovirus A
cacgcgcucaaaggca

SEQ ID NO: 3900937 - RNA, 15 nt, Human adenovirus A
cacgcuuugaccggu

SEQ ID NO: 3900938 - RNA, 11 nt, Human adenovirus A
cacggagagga

SEQ ID NO: 3900939 - RNA, 16 nt, Human adenovirus A
cacggccucagcagcg

SEQ ID NO: 3900940 - RNA, 17 nt, Human adenovirus A
cacggccucagcagcgg

SEQ ID NO: 3900941 - RNA, 18 nt, Human adenovirus A
cacgguauuggccauucc

SEQ ID NO: 3900942 - RNA, 23 nt, Human adenovirus A
cacguucaauaguggcugcaagg

SEQ ID NO: 3900943 - RNA, 22 nt, Human adenovirus A
cacuagaaucggcaacagcagc

SEQ ID NO: 3900944 - RNA, 22 nt, Human adenovirus A
cacuagaccuuuguuaccacuu

SEQ ID NO: 3900945 - RNA, 16 nt, Human adenovirus A
cacugggccaggagga

SEQ ID NO: 3900946 - RNA, 17 nt, Human adenovirus A
cacugggccaggaggac

SEQ ID NO: 3900947 - RNA, 20 nt, Human adenovirus A
cacuguaaaaccuacacaug

SEQ ID NO: 3900948 - RNA, 13 nt, Human adenovirus A
cacuuagagggag

SEQ ID NO: 3900949 - RNA, 22 nt, Human adenovirus A
cacuuaugcucccacacgcagc

SEQ ID NO: 3900950 - RNA, 19 nt, Human adenovirus A
cacuuuaauaaaaacacug

SEQ ID NO: 3900951 - RNA, 21 nt, Human adenovirus A
cacuuugccuacccggcagua

SEQ ID NO: 3900952 - RNA, 19 nt, Human adenovirus A
cagaaaaaaauugccaacc

SEQ ID NO: 3900953 - RNA, 18 nt, Human adenovirus A
cagaaauacagagcuguc

SEQ ID NO: 3900954 - RNA, 19 nt, Human adenovirus A
cagaacgugcuacacucaa

SEQ ID NO: 3900955 - RNA, 12 nt, Human adenovirus A
cagaagcacugg

SEQ ID NO: 3900956 - RNA, 15 nt, Human adenovirus A
cagaaugaauuguau

SEQ ID NO: 3900957 - RNA, 17 nt, Human adenovirus A
cagacaccgcccaggca

SEQ ID NO: 3900958 - RNA, 21 nt, Human adenovirus A
cagacaguuucaucaccagca

SEQ ID NO: 3900959 - RNA, 17 nt, Human adenovirus A
cagaccuacgguggcag

SEQ ID NO: 3900960 - RNA, 16 nt, Human adenovirus A
cagacgaugacauuuu

SEQ ID NO: 3900961 - RNA, 22 nt, Human adenovirus A
cagagagcuaagcgacaaagag

SEQ ID NO: 3900962 - RNA, 15 nt, Human adenovirus A
cagagcacacuggga

SEQ ID NO: 3900963 - RNA, 21 nt, Human adenovirus A
cagagcacacugggaaaugau

SEQ ID NO: 3900964 - RNA, 16 nt, Human adenovirus A
cagagcaccccuuccc

SEQ ID NO: 3900965 - RNA, 14 nt, Human adenovirus A
cagauccguuaaug

SEQ ID NO: 3900966 - RNA, 21 nt, Human adenovirus A
cagauuaugguucagcuucuc

SEQ ID NO: 3900967 - RNA, 13 nt, Human adenovirus A
cagauucuggaga

SEQ ID NO: 3900968 - RNA, 20 nt, Human adenovirus A
cagauuucagcacgagaggg

SEQ ID NO: 3900969 - RNA, 14 nt, Human adenovirus A
cagauuuugugccu

SEQ ID NO: 3900970 - RNA, 14 nt, Human adenovirus A
cagcaagugccucc

SEQ ID NO: 3900971 - RNA, 19 nt, Human adenovirus A
cagcagcaacacuccauac

SEQ ID NO: 3900972 - RNA, 16 nt, Human adenovirus A
cagcagcgguggcgcu

SEQ ID NO: 3900973 - RNA, 23 nt, Human adenovirus A
cagcauguccccgaaagccgcaa

SEQ ID NO: 3900974 - RNA, 15 nt, Human adenovirus A
cagcauuaguucuuu

SEQ ID NO: 3900975 - RNA, 15 nt, Human adenovirus A
auaaagaauuuuccg

SEQ ID NO: 3900976 - RNA, 20 nt, Human adenovirus A
auaaauucuuaaacaaucug

SEQ ID NO: 3900977 - RNA, 21 nt, Human adenovirus A
auaaguuuaaaggcauuaugu

SEQ ID NO: 3900978 - RNA, 19 nt, Human adenovirus A
auaauaguucccucugguc

SEQ ID NO: 3900979 - RNA, 16 nt, Human adenovirus A
auaaucuccaaauaaa

SEQ ID NO: 3900980 - RNA, 21 nt, Human adenovirus A
auaaugcagcuucagaaaaug

SEQ ID NO: 3900981 - RNA, 18 nt, Human adenovirus A
auaauuggcuucagcauu

SEQ ID NO: 3900982 - RNA, 12 nt, Human adenovirus A
auaauuucccuc

SEQ ID NO: 3900983 - RNA, 22 nt, Human adenovirus A
auacaacggccagccaagcgua

SEQ ID NO: 3900984 - RNA, 19 nt, Human adenovirus A
auacaacucuacaaaucuu

SEQ ID NO: 3900985 - RNA, 21 nt, Human adenovirus A
auacacauaaagagucucaaa

SEQ ID NO: 3900986 - RNA, 18 nt, Human adenovirus A
auaccacucgaguguacu

SEQ ID NO: 3900987 - RNA, 17 nt, Human adenovirus A
auaccaugauggagugg

SEQ ID NO: 3900988 - RNA, 19 nt, Human adenovirus A
auaccuuugcucaggcgcc

SEQ ID NO: 3900989 - RNA, 20 nt, Human adenovirus A
auacgcgugguuaaacugcc

SEQ ID NO: 3900990 - RNA, 22 nt, Human adenovirus A
auacgcuugugcagccuuucuu

SEQ ID NO: 3900991 - RNA, 22 nt, Human adenovirus A
auacuaaagaaacaaacuacau

SEQ ID NO: 3900992 - RNA, 23 nt, Human adenovirus A
auagcaacaacgcugggcauggu

SEQ ID NO: 3900993 - RNA, 13 nt, Human adenovirus A
auagcgaggaacc

SEQ ID NO: 3900994 - RNA, 14 nt, Human adenovirus A
auagggguuaaggg

SEQ ID NO: 3900995 - RNA, 13 nt, Human adenovirus A
auagggugaaaga

SEQ ID NO: 3900996 - RNA, 18 nt, Human adenovirus A
auaucaauguuauccaca

SEQ ID NO: 3900997 - RNA, 15 nt, Human adenovirus A
auauccaaaguacua

SEQ ID NO: 3900998 - RNA, 23 nt, Human adenovirus A
auaucuuuuaacaacaagcuaau

SEQ ID NO: 3900999 - RNA, 14 nt, Human adenovirus A
auaugggcucuuuu

SEQ ID NO: 3901000 - RNA, 16 nt, Human adenovirus A
auauguaucuggacau

SEQ ID NO: 3901001 - RNA, 16 nt, Human adenovirus A
auauguuucuguacug

SEQ ID NO: 3901002 - RNA, 20 nt, Human adenovirus A
auauuagagcguucugggau

SEQ ID NO: 3901003 - RNA, 20 nt, Human adenovirus A
aucagaagccagcagcaaag

SEQ ID NO: 3901004 - RNA, 17 nt, Human adenovirus A
aucagccagagccgcaa

SEQ ID NO: 3901005 - RNA, 16 nt, Human adenovirus A
auccaacugauuuuca

SEQ ID NO: 3901006 - RNA, 22 nt, Human adenovirus A
auccauguugcuaggcaauggg

SEQ ID NO: 3901007 - RNA, 20 nt, Human adenovirus A
auccauuaauauuguguccu

SEQ ID NO: 3901008 - RNA, 14 nt, Human adenovirus A
aucccagcuaacgc

SEQ ID NO: 3901009 - RNA, 15 nt, Human adenovirus A
auccccagacaguuu

SEQ ID NO: 3901010 - RNA, 14 nt, Human adenovirus A
aucccgaguguuua

SEQ ID NO: 3901011 - RNA, 19 nt, Human adenovirus A
cgggcagccugucuacaaa

SEQ ID NO: 3901012 - RNA, 17 nt, Human adenovirus A
cggguggacggagccag

SEQ ID NO: 3901013 - RNA, 16 nt, Human adenovirus A
cggucucgcagcucuu

SEQ ID NO: 3901014 - RNA, 16 nt, Human adenovirus A
cguaacucaaaaacuc

SEQ ID NO: 3901015 - RNA, 22 nt, Human adenovirus A
cguaacuuucaaaaaagcuuua

SEQ ID NO: 3901016 - RNA, 16 nt, Human adenovirus A
cguagccuugcagcgg

SEQ ID NO: 3901017 - RNA, 13 nt, Human adenovirus A
cguccaggcaggg

SEQ ID NO: 3901018 - RNA, 17 nt, Human adenovirus A
cgucgaguuugugcgcu

SEQ ID NO: 3901019 - RNA, 17 nt, Human adenovirus A
cgucggggcuacugcuc

SEQ ID NO: 3901020 - RNA, 22 nt, Human adenovirus A
cgucuccccauucgcagcaugu

SEQ ID NO: 3901021 - RNA, 15 nt, Human adenovirus A
cgucucguacuaacc

SEQ ID NO: 3901022 - RNA, 15 nt, Human adenovirus A
cgucuucguggagaa

SEQ ID NO: 3901023 - RNA, 18 nt, Human adenovirus A
cguggagaagcggagcca

SEQ ID NO: 3901024 - RNA, 16 nt, Human adenovirus A
cguguuagacauggcu

SEQ ID NO: 3901025 - RNA, 13 nt, Human adenovirus A
cguuaccacccua

SEQ ID NO: 3901026 - RNA, 17 nt, Human adenovirus A
cguuccagauuguggaa

SEQ ID NO: 3901027 - RNA, 15 nt, Human adenovirus A
cguugagccauguug

SEQ ID NO: 3901028 - RNA, 12 nt, Human adenovirus A
cguuuggaaacu

SEQ ID NO: 3901029 - RNA, 12 nt, Human adenovirus A
cuaaaaugcaaa

SEQ ID NO: 3901030 - RNA, 16 nt, Human adenovirus A
cuaaaaugcaaaaugg

SEQ ID NO: 3901031 - RNA, 16 nt, Human adenovirus A
cuaaauaucgcagcug

SEQ ID NO: 3901032 - RNA, 22 nt, Human adenovirus A
cuaaauguaacugaggagcuga

SEQ ID NO: 3901033 - RNA, 17 nt, Human adenovirus A
cuaacaacuccagaugu

SEQ ID NO: 3901034 - RNA, 17 nt, Human adenovirus A
cuaacauguuauuuaaa

SEQ ID NO: 3901035 - RNA, 20 nt, Human adenovirus A
cuaacgcuggggcacagcuu

SEQ ID NO: 3901036 - RNA, 12 nt, Human adenovirus A
cuaacuuuaaug

SEQ ID NO: 3901037 - RNA, 20 nt, Human adenovirus A
cuaagaaggcacccucccag

SEQ ID NO: 3901038 - RNA, 23 nt, Human adenovirus A
cuaagacuuaccccugggcuuug

SEQ ID NO: 3901039 - RNA, 14 nt, Human adenovirus A
cuaauagaacugga

SEQ ID NO: 3901040 - RNA, 23 nt, Human adenovirus A
cuaauggagcggcugacagagcg

SEQ ID NO: 3901041 - RNA, 12 nt, Human adenovirus A
cuacacaacaca

SEQ ID NO: 3901042 - RNA, 20 nt, Human adenovirus A
cuacacaugaaggaaugccu

SEQ ID NO: 3901043 - RNA, 16 nt, Human adenovirus A
cuacacucaacacuac

SEQ ID NO: 3901044 - RNA, 14 nt, Human adenovirus A
cuacagacaaacaa

SEQ ID NO: 3901045 - RNA, 20 nt, Human adenovirus A
cuacauaaaccauggaauuu

SEQ ID NO: 3901046 - RNA, 11 nt, Human adenovirus A
cuacaucuuuu

SEQ ID NO: 3901047 - RNA, 14 nt, Human adenovirus A
cuaccugcgcaaau

SEQ ID NO: 3901048 - RNA, 20 nt, Human adenovirus A
cuaccugcgcacgcccuucu

SEQ ID NO: 3901049 - RNA, 16 nt, Human adenovirus A
cuacgagacucccccc

SEQ ID NO: 3901050 - RNA, 18 nt, Human adenovirus A
cuacuaacaacuccagau

SEQ ID NO: 3901051 - RNA, 15 nt, Human adenovirus A
cuacuaauaauguaa

SEQ ID NO: 3901052 - RNA, 22 nt, Human adenovirus A
cuagacgaggauccagaggagg

SEQ ID NO: 3901053 - RNA, 15 nt, Human adenovirus A
cuagaguguguuuaa

SEQ ID NO: 3901054 - RNA, 20 nt, Human adenovirus A
cuagcuuaccacucagaccu

SEQ ID NO: 3901055 - RNA, 13 nt, Human adenovirus A
cuaggaaaacaaa

SEQ ID NO: 3901056 - RNA, 20 nt, Human adenovirus A
cuaggcaacguuggcagcga

SEQ ID NO: 3901057 - RNA, 15 nt, Human adenovirus A
cuaguucuugucaac

SEQ ID NO: 3901058 - RNA, 18 nt, Human adenovirus A
cuaucaucaaacugccug

SEQ ID NO: 3901059 - RNA, 21 nt, Human adenovirus A
cuaugaugcgggcagccaggc

SEQ ID NO: 3901060 - RNA, 13 nt, Human adenovirus A
cuauuacacucag

SEQ ID NO: 3901061 - RNA, 23 nt, Human adenovirus A
cuauuauugagcauuauuugcga

SEQ ID NO: 3901062 - RNA, 12 nt, Human adenovirus A
cuauuguuaaug

SEQ ID NO: 3901063 - RNA, 11 nt, Human adenovirus A
cucaagacuau

SEQ ID NO: 3901064 - RNA, 14 nt, Human adenovirus A
cucaccacugaaac

SEQ ID NO: 3901065 - RNA, 23 nt, Human adenovirus A
cucagcuggaagagcuaucgcaa

SEQ ID NO: 3901066 - RNA, 15 nt, Human adenovirus A
cucaggccauaaaga

SEQ ID NO: 3901067 - RNA, 14 nt, Human adenovirus A
cucaguagccuugc

SEQ ID NO: 3901068 - RNA, 15 nt, Human adenovirus A
cucauccucagcucc

SEQ ID NO: 3901069 - RNA, 16 nt, Human adenovirus A
cucauccucagcuccg

SEQ ID NO: 3901070 - RNA, 20 nt, Human adenovirus A
cucauuugcgcccagacgua

SEQ ID NO: 3901071 - RNA, 20 nt, Human adenovirus A
cuccagacaacuucauuuuc

SEQ ID NO: 3901072 - RNA, 18 nt, Human adenovirus A
cuccccacagcuggcgca

SEQ ID NO: 3901073 - RNA, 21 nt, Human adenovirus A
cuccccuguggagccacugcu

SEQ ID NO: 3901074 - RNA, 16 nt, Human adenovirus A
cucccucuuggccagc

SEQ ID NO: 3901075 - RNA, 16 nt, Human adenovirus A
cuccggaaacaacacg

SEQ ID NO: 3901076 - RNA, 22 nt, Human adenovirus A
cuccuaccacuguacuuuugcc

SEQ ID NO: 3901077 - RNA, 19 nt, Human adenovirus A
cuccugagcgucacccaag

SEQ ID NO: 3901078 - RNA, 14 nt, Human adenovirus A
cucgaccacaggug

SEQ ID NO: 3901079 - RNA, 13 nt, Human adenovirus A
cucgcagcucuua

SEQ ID NO: 3901080 - RNA, 18 nt, Human adenovirus A
cucgcgcuuuggaggcag

SEQ ID NO: 3901081 - RNA, 13 nt, Human adenovirus A
cucuaccucgcgg

SEQ ID NO: 3901082 - RNA, 20 nt, Human adenovirus A
cucucaaacgccgacgcugc

SEQ ID NO: 3901083 - RNA, 21 nt, Human adenovirus A
cucugguccugggacauaauu

SEQ ID NO: 3901084 - RNA, 16 nt, Human adenovirus A
cucuucgcugcaguuu

SEQ ID NO: 3901085 - RNA, 22 nt, Human adenovirus A
cucuuggaauaaaauuucuaga

SEQ ID NO: 3901086 - RNA, 13 nt, Human adenovirus A
cucuuuaacauuc

SEQ ID NO: 3901087 - RNA, 13 nt, Human adenovirus A
cugaaagaaaguu

SEQ ID NO: 3901088 - RNA, 22 nt, Human adenovirus A
cugaagaagaaccuaacuguca

SEQ ID NO: 3901089 - RNA, 19 nt, Human adenovirus A
cugaagugccucaaaguga

SEQ ID NO: 3901090 - RNA, 15 nt, Human adenovirus A
cugacacaaaagcuc

SEQ ID NO: 3901091 - RNA, 15 nt, Human adenovirus A
cugaccauuacuuuu

SEQ ID NO: 3901092 - RNA, 18 nt, Human adenovirus A
cugagacgaagaaauaca

SEQ ID NO: 3901093 - RNA, 13 nt, Human adenovirus A
cugagacuuccca

SEQ ID NO: 3901094 - RNA, 23 nt, Human adenovirus A
cugagcccuauccgucuccagcu

SEQ ID NO: 3901095 - RNA, 12 nt, Human adenovirus A
cugagcggcaag

SEQ ID NO: 3901096 - RNA, 16 nt, Human adenovirus A
cugaucgcucuucaau

SEQ ID NO: 3901097 - RNA, 22 nt, Human adenovirus A
cugaugcuuuucgccagcagcc

SEQ ID NO: 3901098 - RNA, 20 nt, Human adenovirus A
cugauuucgauaaacaaaag

SEQ ID NO: 3901099 - RNA, 13 nt, Human adenovirus A
cugauuuucacau

SEQ ID NO: 3901100 - RNA, 18 nt, Human adenovirus A
cugcaaaaagaaaaugaa

SEQ ID NO: 3901101 - RNA, 19 nt, Human adenovirus A
cugcaaaauugaaaaacug

SEQ ID NO: 3901102 - RNA, 13 nt, Human adenovirus A
cugcaagacagaa

SEQ ID NO: 3901103 - RNA, 22 nt, Human adenovirus A
cugcaaucuuugcaccccccac

SEQ ID NO: 3901104 - RNA, 17 nt, Human adenovirus A
cugcacuaacucugauu

SEQ ID NO: 3901105 - RNA, 16 nt, Human adenovirus A
cugcacucucugggga

SEQ ID NO: 3901106 - RNA, 19 nt, Human adenovirus A
cugccaccucuagaaacug

SEQ ID NO: 3901107 - RNA, 22 nt, Human adenovirus A
cugccauuaauugaucaauuuc

SEQ ID NO: 3901108 - RNA, 21 nt, Human adenovirus A
cugcgacauuuagaccacugu

SEQ ID NO: 3901109 - RNA, 20 nt, Human adenovirus A
cugcggggggaauaucucau

SEQ ID NO: 3901110 - RNA, 18 nt, Human adenovirus A
cugcuaaacucacauugu

SEQ ID NO: 3901111 - RNA, 22 nt, Human adenovirus A
cugcuaaucaccucgcuccaau

SEQ ID NO: 3901112 - RNA, 23 nt, Human adenovirus A
cugcuccgacaacagcugcuguc

SEQ ID NO: 3901113 - RNA, 14 nt, Human adenovirus A
cuggcaaacuggga

SEQ ID NO: 3901114 - RNA, 21 nt, Human adenovirus A
cuggcaggggaagguguugag

SEQ ID NO: 3901115 - RNA, 18 nt, Human adenovirus A
cuggcaguuuagaggcca

SEQ ID NO: 3901116 - RNA, 15 nt, Human adenovirus A
cuggccccgcgacac

SEQ ID NO: 3901117 - RNA, 14 nt, Human adenovirus A
cugggaguaaaguc

SEQ ID NO: 3901118 - RNA, 19 nt, Human adenovirus A
cuggggugccuaauuguau

SEQ ID NO: 3901119 - RNA, 19 nt, Human adenovirus A
cugguucacaccaaacugg

SEQ ID NO: 3901120 - RNA, 14 nt, Human adenovirus A
cuguacgcaaacuc

SEQ ID NO: 3901121 - RNA, 15 nt, Human adenovirus A
cugucacugagcaca

SEQ ID NO: 3901122 - RNA, 20 nt, Human adenovirus A
cugucagugaagcaaaccac

SEQ ID NO: 3901123 - RNA, 20 nt, Human adenovirus A
cugugagcaaaucucagaaa

SEQ ID NO: 3901124 - RNA, 15 nt, Human adenovirus A
cuguuagacagagca

SEQ ID NO: 3901125 - RNA, 20 nt, Human adenovirus A
cuguugaugugaugaaagua

SEQ ID NO: 3901126 - RNA, 19 nt, Human adenovirus A
cuguugcuacugcagaccc

SEQ ID NO: 3901127 - RNA, 13 nt, Human adenovirus A
cuguuuacuucaa

SEQ ID NO: 3901128 - RNA, 22 nt, Human adenovirus A
gcgcacuucuugcugaaaugcg

SEQ ID NO: 3901129 - RNA, 23 nt, Human adenovirus A
gcgccaaguugaguuccacgagc

SEQ ID NO: 3901130 - RNA, 21 nt, Human adenovirus A
gcgccacccuacgugccuccc

SEQ ID NO: 3901131 - RNA, 12 nt, Human adenovirus A
gcgccaccugcc

SEQ ID NO: 3901132 - RNA, 16 nt, Human adenovirus A
gcgccgcggauuuaau

SEQ ID NO: 3901133 - RNA, 18 nt, Human adenovirus A
gcgcgcaauauggagccg

SEQ ID NO: 3901134 - RNA, 20 nt, Human adenovirus A
gcgcgcccggcucccacgcc

SEQ ID NO: 3901135 - RNA, 18 nt, Human adenovirus A
gcgcgucggggcuacugc

SEQ ID NO: 3901136 - RNA, 16 nt, Human adenovirus A
gcgcucaaaggcaggc

SEQ ID NO: 3901137 - RNA, 19 nt, Human adenovirus A
gcgcugcaucguaaacaac

SEQ ID NO: 3901138 - RNA, 17 nt, Human adenovirus A
gcgcugcggucuggggu

SEQ ID NO: 3901139 - RNA, 13 nt, Human adenovirus A
gcggcaagaacaa

SEQ ID NO: 3901140 - RNA, 15 nt, Human adenovirus A
gcggccacggccgga

SEQ ID NO: 3901141 - RNA, 17 nt, Human adenovirus A
gcggccgcaacagcuau

SEQ ID NO: 3901142 - RNA, 17 nt, Human adenovirus A
gcggccguacaugggca

SEQ ID NO: 3901143 - RNA, 19 nt, Human adenovirus A
gcggccuguuuuguuguau

SEQ ID NO: 3901144 - RNA, 18 nt, Human adenovirus A
gcggcgagaaugggagga

SEQ ID NO: 3901145 - RNA, 14 nt, Human adenovirus A
gcggcgucagcaga

SEQ ID NO: 3901146 - RNA, 20 nt, Human adenovirus A
gcguagccgcagcaccugga

SEQ ID NO: 3901147 - RNA, 14 nt, Human adenovirus A
gcgucccaaaagca

SEQ ID NO: 3901148 - RNA, 22 nt, Human adenovirus A
gcgugaaguauuccaugagccc

SEQ ID NO: 3901149 - RNA, 12 nt, Human adenovirus A
gcgugccuggcu

SEQ ID NO: 3901150 - RNA, 16 nt, Human adenovirus A
gcuaacuuuuuuccca

SEQ ID NO: 3901151 - RNA, 20 nt, Human adenovirus A
gcuaauugcccccuuuacca

SEQ ID NO: 3901152 - RNA, 15 nt, Human adenovirus A
gcuacacgcugccca

SEQ ID NO: 3901153 - RNA, 16 nt, Human adenovirus A
gcuacagauccauguu

SEQ ID NO: 3901154 - RNA, 17 nt, Human adenovirus A
gcuacugcgucucccca

SEQ ID NO: 3901155 - RNA, 21 nt, Human adenovirus A
gcuaugaaucuuuaccaggca

SEQ ID NO: 3901156 - RNA, 21 nt, Human adenovirus A
gcuaugaugcgggcagccagg

SEQ ID NO: 3901157 - RNA, 21 nt, Human adenovirus A
gcucaaaggcaggcauuaccu

SEQ ID NO: 3901158 - RNA, 23 nt, Human adenovirus A
gcuccugguugagcgcuggccag

SEQ ID NO: 3901159 - RNA, 21 nt, Human adenovirus A
gcucgcagcgucugacgcugc

SEQ ID NO: 3901160 - RNA, 16 nt, Human adenovirus A
gcucgcccgggacagu

SEQ ID NO: 3901161 - RNA, 14 nt, Human adenovirus A
gcucuagacaugac

SEQ ID NO: 3901162 - RNA, 18 nt, Human adenovirus A
gcucugucaccuaccacc

SEQ ID NO: 3901163 - RNA, 19 nt, Human adenovirus A
gcucuuuugcagcuccaac

SEQ ID NO: 3901164 - RNA, 13 nt, Human adenovirus A
gcugaaacaggua

SEQ ID NO: 3901165 - RNA, 18 nt, Human adenovirus A
gcugacauaauuuuccca

SEQ ID NO: 3901166 - RNA, 20 nt, Human adenovirus A
gcugacgggagcaggaacag

SEQ ID NO: 3901167 - RNA, 14 nt, Human adenovirus A
gcugaggaaaugcg

SEQ ID NO: 3901168 - RNA, 14 nt, Human adenovirus A
gcugcaaacaugcu

SEQ ID NO: 3901169 - RNA, 19 nt, Human adenovirus A
gcugccgacguugcaagag

SEQ ID NO: 3901170 - RNA, 19 nt, Human adenovirus A
gcugccuccuuugccagaa

SEQ ID NO: 3901171 - RNA, 13 nt, Human adenovirus A
gcuggcuguugcu

SEQ ID NO: 3901172 - RNA, 17 nt, Human adenovirus A
gcuguacaguuucugug

SEQ ID NO: 3901173 - RNA, 21 nt, Human adenovirus A
gcugucucuaccucaaaagcg

SEQ ID NO: 3901174 - RNA, 20 nt, Human adenovirus A
gcugugacacgcaccgcagu

SEQ ID NO: 3901175 - RNA, 23 nt, Human adenovirus A
gcuguggaaagcauuuuggauuu

SEQ ID NO: 3901176 - RNA, 12 nt, Human adenovirus A
gcuuaucaugug

SEQ ID NO: 3901177 - RNA, 14 nt, Human adenovirus A
gcuuaugcauagcu

SEQ ID NO: 3901178 - RNA, 20 nt, Human adenovirus A
gcuuccaugccuuuuuccca

SEQ ID NO: 3901179 - RNA, 16 nt, Human adenovirus A
gcuuggccaguucccc

SEQ ID NO: 3901180 - RNA, 20 nt, Human adenovirus A
gcuuguugaauucgcaggcg

SEQ ID NO: 3901181 - RNA, 17 nt, Human adenovirus A
gcuuucaagauggccac

SEQ ID NO: 3901182 - RNA, 23 nt, Human adenovirus A
gcuuuccaaaugcccccauccag

SEQ ID NO: 3901183 - RNA, 19 nt, Human adenovirus A
gcuuugcgcgaacaucgca

SEQ ID NO: 3901184 - RNA, 15 nt, Human adenovirus A
gcuuuggaggcagcu

SEQ ID NO: 3901185 - RNA, 15 nt, Human adenovirus A
ggaaacaacacggag

SEQ ID NO: 3901186 - RNA, 14 nt, Human adenovirus A
ggaaagacagccaa

SEQ ID NO: 3901187 - RNA, 18 nt, Human adenovirus A
ggaaagccgguuguaagc

SEQ ID NO: 3901188 - RNA, 23 nt, Human adenovirus A
ggaaaucagggcguacagccugg

SEQ ID NO: 3901189 - RNA, 11 nt, Human adenovirus A
ggaaaugaggc

SEQ ID NO: 3901190 - RNA, 19 nt, Human adenovirus A
ggaaauuaauuugcaggcu

SEQ ID NO: 3901191 - RNA, 16 nt, Human adenovirus A
ggaacagacaccgccc

SEQ ID NO: 3901192 - RNA, 21 nt, Human adenovirus A
ggaacagacaccgcccaggca

SEQ ID NO: 3901193 - RNA, 19 nt, Human adenovirus A
ggaacucgagugcaugcau

SEQ ID NO: 3901194 - RNA, 14 nt, Human adenovirus A
ggaagaacauccaa

SEQ ID NO: 3901195 - RNA, 17 nt, Human adenovirus A
ggaagaacauccaacug

SEQ ID NO: 3901196 - RNA, 16 nt, Human adenovirus A
ggaagaauggcuguug

SEQ ID NO: 3901197 - RNA, 17 nt, Human adenovirus A
ggaagcaauaaaacaag

SEQ ID NO: 3901198 - RNA, 15 nt, Human adenovirus A
ggaauaauaguuccc

SEQ ID NO: 3901199 - RNA, 17 nt, Human adenovirus A
ggaauaauuggcuucag

SEQ ID NO: 3901200 - RNA, 16 nt, Human adenovirus A
ggaaugauuaaacaac

SEQ ID NO: 3901201 - RNA, 17 nt, Human adenovirus A
ggaauuuacuccaucug

SEQ ID NO: 3901202 - RNA, 16 nt, Human adenovirus A
ggacaaguugcuuucc

SEQ ID NO: 3901203 - RNA, 15 nt, Human adenovirus A
ggacaguagcugcag

SEQ ID NO: 3901204 - RNA, 13 nt, Human adenovirus A
ggaccauugaagg

SEQ ID NO: 3901205 - RNA, 20 nt, Human adenovirus A
ggacgagcucccggaggaag

SEQ ID NO: 3901206 - RNA, 14 nt, Human adenovirus A
ggacuuggaagaau

SEQ ID NO: 3901207 - RNA, 16 nt, Human adenovirus A
ggagaaggcauagccc

SEQ ID NO: 3901208 - RNA, 12 nt, Human adenovirus A
ggagggucagga

SEQ ID NO: 3901209 - RNA, 19 nt, Human adenovirus A
ggaucuggagccacaggaa

SEQ ID NO: 3901210 - RNA, 19 nt, Human adenovirus A
ggaugaaaaacgagcagca

SEQ ID NO: 3901211 - RNA, 18 nt, Human adenovirus A
ggaugaauuucagcgggg

SEQ ID NO: 3901212 - RNA, 21 nt, Human adenovirus A
ggauuacaugaagauuucugc

SEQ ID NO: 3901213 - RNA, 19 nt, Human adenovirus A
ggauuacaugucaaugcag

SEQ ID NO: 3901214 - RNA, 20 nt, Human adenovirus A
ggauuauaaaaggcuggaag

SEQ ID NO: 3901215 - RNA, 16 nt, Human adenovirus A
ggauuuuuuuguaaaa

SEQ ID NO: 3901216 - RNA, 18 nt, Human adenovirus A
ggcagaauuugugcuacc

SEQ ID NO: 3901217 - RNA, 18 nt, Human adenovirus A
ggcagccguuucaggaag

SEQ ID NO: 3901218 - RNA, 15 nt, Human adenovirus A
ggcaggaguugcagg

SEQ ID NO: 3901219 - RNA, 18 nt, Human adenovirus A
ggccaaacagcuguggaa

SEQ ID NO: 3901220 - RNA, 19 nt, Human adenovirus A
ggccaaacagcuguggaaa

SEQ ID NO: 3901221 - RNA, 14 nt, Human adenovirus A
ggcgcccuccaccg

SEQ ID NO: 3901222 - RNA, 15 nt, Human adenovirus A
ggcgccgcagacggc

SEQ ID NO: 3901223 - RNA, 14 nt, Human adenovirus A
ggcgcucagugcga

SEQ ID NO: 3901224 - RNA, 19 nt, Human adenovirus A
ggcgcuuucgggcucuggc

SEQ ID NO: 3901225 - RNA, 17 nt, Human adenovirus A
ggcggccaugcaaagcc

SEQ ID NO: 3901226 - RNA, 20 nt, Human adenovirus A
ggcggcuccgaacaggugua

SEQ ID NO: 3901227 - RNA, 13 nt, Human adenovirus A
ggcggucugccau

SEQ ID NO: 3901228 - RNA, 22 nt, Human adenovirus A
ggcguuccgucaaaaaagcaaa

SEQ ID NO: 3901229 - RNA, 15 nt, Human adenovirus A
ggcuauugcgcagca

SEQ ID NO: 3901230 - RNA, 17 nt, Human adenovirus A
ggcuauugcgcagcaac

SEQ ID NO: 3901231 - RNA, 12 nt, Human adenovirus A
ggcuccacaccu

SEQ ID NO: 3901232 - RNA, 11 nt, Human adenovirus A
ggcucuuuuaa

SEQ ID NO: 3901233 - RNA, 20 nt, Human adenovirus A
gggcauacgcuugugcagcc

SEQ ID NO: 3901234 - RNA, 17 nt, Human adenovirus A
gggcaucuugcaugaaa

SEQ ID NO: 3901235 - RNA, 21 nt, Human adenovirus A
gggccggaguacgucagaaug

SEQ ID NO: 3901236 - RNA, 22 nt, Human adenovirus A
gggcgcugacgggagcaggaac

SEQ ID NO: 3901237 - RNA, 20 nt, Human adenovirus A
gggcucuggcgaacaggaag

SEQ ID NO: 3901238 - RNA, 18 nt, Human adenovirus A
gggggaugaaggaagcga

SEQ ID NO: 3901239 - RNA, 14 nt, Human adenovirus A
gguaaugagcgcag

SEQ ID NO: 3901240 - RNA, 12 nt, Human adenovirus A
gguauucagcug

SEQ ID NO: 3901241 - RNA, 23 nt, Human adenovirus A
ggucccauccaaguucuaaugca

SEQ ID NO: 3901242 - RNA, 21 nt, Human adenovirus A
ggucgaccuguggcaccugca

SEQ ID NO: 3901243 - RNA, 19 nt, Human adenovirus A
ggucuacuguugaugcagu

SEQ ID NO: 3901244 - RNA, 17 nt, Human adenovirus A
gguucgacgggccaggc

SEQ ID NO: 3901245 - RNA, 17 nt, Human adenovirus A
guaaaccuugaaaugcc

SEQ ID NO: 3901246 - RNA, 21 nt, Human adenovirus A
guaaaccuugaaaugccagac

SEQ ID NO: 3901247 - RNA, 21 nt, Human adenovirus A
guaaaugcuuuguuggauagc

SEQ ID NO: 3901248 - RNA, 10 nt, Human adenovirus A
guaaauuaaa

SEQ ID NO: 3901249 - RNA, 15 nt, Human adenovirus A
guaacccuuccccac

SEQ ID NO: 3901250 - RNA, 19 nt, Human adenovirus A
guaauugaaguaagcuguu

SEQ ID NO: 3901251 - RNA, 23 nt, Human adenovirus A
guacaaggcauuggaaagcagcu

SEQ ID NO: 3901252 - RNA, 15 nt, Human adenovirus A
guacauccagggcac

SEQ ID NO: 3901253 - RNA, 18 nt, Human adenovirus A
guaccgccugaagaagaa

SEQ ID NO: 3901254 - RNA, 17 nt, Human adenovirus A
guacgcagacgaugaca

SEQ ID NO: 3901255 - RNA, 18 nt, Human adenovirus A
guacgcauucaccagcca

SEQ ID NO: 3901256 - RNA, 17 nt, Human adenovirus A
guacucaucagagggaa

SEQ ID NO: 3901257 - RNA, 20 nt, Human adenovirus A
guacugcaaacgcugaugcc

SEQ ID NO: 3901258 - RNA, 18 nt, Human adenovirus A
guacuuguaacuguggaa

SEQ ID NO: 3901259 - RNA, 18 nt, Human adenovirus A
guagacauuguuggccug

SEQ ID NO: 3901260 - RNA, 12 nt, Human adenovirus A
guagacgagguc

SEQ ID NO: 3901261 - RNA, 20 nt, Human adenovirus A
guagaggaaaagcugccacc

SEQ ID NO: 3901262 - RNA, 19 nt, Human adenovirus A
guagcugcaguuugucauu

SEQ ID NO: 3901263 - RNA, 18 nt, Human adenovirus A
guaggaacuccgcgcaag

SEQ ID NO: 3901264 - RNA, 21 nt, Human adenovirus A
guaggauagcaccugccgcca

SEQ ID NO: 3901265 - RNA, 18 nt, Human adenovirus A
guaggcaaguuguggaua

SEQ ID NO: 3901266 - RNA, 18 nt, Human adenovirus A
guauaaauucuuaaacaa

SEQ ID NO: 3901267 - RNA, 17 nt, Human adenovirus A
guaucuguuuggcucua

SEQ ID NO: 3901268 - RNA, 14 nt, Human adenovirus A
guaugcucaaacag

SEQ ID NO: 3901269 - RNA, 13 nt, Human adenovirus A
guaugcugaagaa

SEQ ID NO: 3901270 - RNA, 17 nt, Human adenovirus A
guaugcugaagaaacag

SEQ ID NO: 3901271 - RNA, 14 nt, Human adenovirus A
guauggugccaauc

SEQ ID NO: 3901272 - RNA, 14 nt, Human adenovirus A
gucaaaaaagcaaa

SEQ ID NO: 3901273 - RNA, 14 nt, Human adenovirus A
gucaaaauaaucaa

SEQ ID NO: 3901274 - RNA, 22 nt, Human adenovirus A
gucacuacagacaaacaaguuc

SEQ ID NO: 3901275 - RNA, 14 nt, Human adenovirus A
gucagauucuucuu

SEQ ID NO: 3901276 - RNA, 15 nt, Human adenovirus A
gucagcugcaaaccg

SEQ ID NO: 3901277 - RNA, 19 nt, Human adenovirus A
gucagugaagcaaaccaca

SEQ ID NO: 3901278 - RNA, 23 nt, Human adenovirus A
gucauaccuuaaaaacuguucau

SEQ ID NO: 3901279 - RNA, 20 nt, Human adenovirus A
gucaucguaggacaacuuaa

SEQ ID NO: 3901280 - RNA, 19 nt, Human adenovirus A
guccaauuucguuccagac

SEQ ID NO: 3901281 - RNA, 14 nt, Human adenovirus A
guccccgaaagccg

SEQ ID NO: 3901282 - RNA, 19 nt, Human adenovirus A
gucccgacuuacaggagga

SEQ ID NO: 3901283 - RNA, 23 nt, Human adenovirus A
gucccgcccgcguuuggaaacug

SEQ ID NO: 3901284 - RNA, 21 nt, Human adenovirus A
gucccguaaaauacacauaaa

SEQ ID NO: 3901285 - RNA, 19 nt, Human adenovirus A
guccucagguagugggcac

SEQ ID NO: 3901286 - RNA, 19 nt, Human adenovirus A
guccuccucguacaggaau

SEQ ID NO: 3901287 - RNA, 13 nt, Human adenovirus A
guccuccuucugu

SEQ ID NO: 3901288 - RNA, 14 nt, Human adenovirus A
gucgcaugugaggg

SEQ ID NO: 3901289 - RNA, 20 nt, Human adenovirus A
gucgccagcaagugccuccu

SEQ ID NO: 3901290 - RNA, 22 nt, Human adenovirus A
gucgcgcacugggccaggagga

SEQ ID NO: 3901291 - RNA, 14 nt, Human adenovirus A
gucguuacuuuugc

SEQ ID NO: 3901292 - RNA, 21 nt, Human adenovirus A
gucuacaaaucuuucaaucau

SEQ ID NO: 3901293 - RNA, 21 nt, Human adenovirus A
gucuagccaacauccagugcg

SEQ ID NO: 3901294 - RNA, 14 nt, Human adenovirus A
gucuguugccaauc

SEQ ID NO: 3901295 - RNA, 19 nt, Human adenovirus A
gucuucaagaaaaaccacc

SEQ ID NO: 3901296 - RNA, 13 nt, Human adenovirus A
gucuugcauuaac

SEQ ID NO: 3901297 - RNA, 17 nt, Human adenovirus A
gugaaggcgccaggaug

SEQ ID NO: 3901298 - RNA, 15 nt, Human adenovirus A
gugacacgcaccgca

SEQ ID NO: 3901299 - RNA, 16 nt, Human adenovirus A
gugauggcagcggcgc

SEQ ID NO: 3901300 - RNA, 16 nt, Human adenovirus A
gugccacccccagugc

SEQ ID NO: 3901301 - RNA, 21 nt, Human adenovirus A
gugccccccuccccuguggag

SEQ ID NO: 3901302 - RNA, 21 nt, Human adenovirus A
gugccuaugacccuugagcug

SEQ ID NO: 3901303 - RNA, 17 nt, Human adenovirus A
gugcgcguacgcggaca

SEQ ID NO: 3901304 - RNA, 22 nt, Human adenovirus A
gugcgcuuuaaacugaggcggc

SEQ ID NO: 3901305 - RNA, 20 nt, Human adenovirus A
guggaaaagucacaagggua

SEQ ID NO: 3901306 - RNA, 13 nt, Human adenovirus A
guggaggaauuua

SEQ ID NO: 3901307 - RNA, 18 nt, Human adenovirus A
guggaucuccugccacca

SEQ ID NO: 3901308 - RNA, 15 nt, Human adenovirus A
guggcaacguguucu

SEQ ID NO: 3901309 - RNA, 15 nt, Human adenovirus A
guggcacaacacaua

SEQ ID NO: 3901310 - RNA, 13 nt, Human adenovirus A
gugguucaggaac

SEQ ID NO: 3901311 - RNA, 13 nt, Human adenovirus A
gugguuuggugga

SEQ ID NO: 3901312 - RNA, 18 nt, Human adenovirus A
guguacuugguggacaac

SEQ ID NO: 3901313 - RNA, 13 nt, Human adenovirus A
guguaugccaaca

SEQ ID NO: 3901314 - RNA, 17 nt, Human adenovirus A
guguuaucuucaaauca

SEQ ID NO: 3901315 - RNA, 17 nt, Human adenovirus A
guuaaaaauacagucaa

SEQ ID NO: 3901316 - RNA, 23 nt, Human adenovirus A
guuacuucguugauaucaauguu

SEQ ID NO: 3901317 - RNA, 18 nt, Human adenovirus A
guuagucgcgcacugggc

SEQ ID NO: 3901318 - RNA, 15 nt, Human adenovirus A
guuauccacauugcu

SEQ ID NO: 3901319 - RNA, 19 nt, Human adenovirus A
guucaauaaauacugcucc

SEQ ID NO: 3901320 - RNA, 22 nt, Human adenovirus A
guucacaauuuucugguggugg

SEQ ID NO: 3901321 - RNA, 13 nt, Human adenovirus A
guucagcuucucc

SEQ ID NO: 3901322 - RNA, 13 nt, Human adenovirus A
guuccagaaggag

SEQ ID NO: 3901323 - RNA, 17 nt, Human adenovirus A
guuccagauuguggaau

SEQ ID NO: 3901324 - RNA, 14 nt, Human adenovirus A
guuccaguauuuug

SEQ ID NO: 3901325 - RNA, 14 nt, Human adenovirus A
guuccauggcuucg

SEQ ID NO: 3901326 - RNA, 20 nt, Human adenovirus A
guucgcgauacaacggccag

SEQ ID NO: 3901327 - RNA, 19 nt, Human adenovirus A
guucgcuaguagcauuaaa

SEQ ID NO: 3901328 - RNA, 19 nt, Human adenovirus A
guucucacgacacgucaca

SEQ ID NO: 3901329 - RNA, 16 nt, Human adenovirus A
guugaacccggccaag

SEQ ID NO: 3901330 - RNA, 23 nt, Human adenovirus A
guugaccgaccuucauuuuuucu

SEQ ID NO: 3901331 - RNA, 16 nt, Human adenovirus A
guugggauuacaugcu

SEQ ID NO: 3901332 - RNA, 14 nt, Human adenovirus A
guuucaggaaggau

SEQ ID NO: 3901333 - RNA, 14 nt, Human adenovirus A
guuucuguacugca

SEQ ID NO: 3901334 - RNA, 17 nt, Human adenovirus A
guuugcuaacagcucuc

SEQ ID NO: 3901335 - RNA, 16 nt, Human adenovirus A
guuuuaugcucguaaa

SEQ ID NO: 3901336 - RNA, 19 nt, Human adenovirus A
uaaaaacacacacaaaaca

SEQ ID NO: 3901337 - RNA, 21 nt, Human adenovirus A
uaaaaaccaucuuacauacca

SEQ ID NO: 3901338 - RNA, 17 nt, Human adenovirus A
uaaaaaggaagcaggug

SEQ ID NO: 3901339 - RNA, 19 nt, Human adenovirus A
uaaaaaggaagcaggugau

SEQ ID NO: 3901340 - RNA, 16 nt, Human adenovirus A
uaaaaaucacaaaaua

SEQ ID NO: 3901341 - RNA, 20 nt, Human adenovirus A
uaaaagcgugcgcaguguuc

SEQ ID NO: 3901342 - RNA, 13 nt, Human adenovirus A
uaaacugucugua

SEQ ID NO: 3901343 - RNA, 21 nt, Human adenovirus A
uaaagaaaaaacuuaaauuga

SEQ ID NO: 3901344 - RNA, 11 nt, Human adenovirus A
uaaagaaacuc

SEQ ID NO: 3901345 - RNA, 23 nt, Human adenovirus A
uaaagcaaaccacugcaaugcag

SEQ ID NO: 3901346 - RNA, 21 nt, Human adenovirus A
uaaagcgcagaguauccacac

SEQ ID NO: 3901347 - RNA, 19 nt, Human adenovirus A
uaaaggguuagaacuuucu

SEQ ID NO: 3901348 - RNA, 15 nt, Human adenovirus A
uaaauaucgcagcug

SEQ ID NO: 3901349 - RNA, 18 nt, Human adenovirus A
uaacaaaauucgcaggag

SEQ ID NO: 3901350 - RNA, 24 nt, Human adenovirus A
uaacaacagucaguguccaucagc

SEQ ID NO: 3901351 - RNA, 22 nt, Human adenovirus A
uaacaaccucccgauaccaaaa

SEQ ID NO: 3901352 - RNA, 15 nt, Human adenovirus A
uaacaggugaaagug

SEQ ID NO: 3901353 - RNA, 18 nt, Human adenovirus A
uaacaguugaaaaaggaa

SEQ ID NO: 3901354 - RNA, 22 nt, Human adenovirus A
uaacauguuauuuaaaauucca

SEQ ID NO: 3901355 - RNA, 17 nt, Human adenovirus A
uaacauuuguguagagu

SEQ ID NO: 3901356 - RNA, 22 nt, Human adenovirus A
uaaccacgguuccacggugcac

SEQ ID NO: 3901357 - RNA, 18 nt, Human adenovirus A
uaaccagagcaccccuuc

SEQ ID NO: 3901358 - RNA, 16 nt, Human adenovirus A
uaaccagcugggcaga

SEQ ID NO: 3901359 - RNA, 18 nt, Human adenovirus A
uaaccauuguaaaugcuu

SEQ ID NO: 3901360 - RNA, 15 nt, Human adenovirus A
gcugcauugccacua

SEQ ID NO: 3901361 - RNA, 22 nt, Human adenovirus A
gcugccaccucuagaaacugug

SEQ ID NO: 3901362 - RNA, 23 nt, Human adenovirus A
gcugcccugauauaucaggaaaa

SEQ ID NO: 3901363 - RNA, 14 nt, Human adenovirus A
gcugcucagcucca

SEQ ID NO: 3901364 - RNA, 23 nt, Human adenovirus A
gcuggcgcuuccauaccugggau

SEQ ID NO: 3901365 - RNA, 16 nt, Human adenovirus A
gcugggcucgaggacc

SEQ ID NO: 3901366 - RNA, 23 nt, Human adenovirus A
gcuguacgcaaacucagcccaug

SEQ ID NO: 3901367 - RNA, 19 nt, Human adenovirus A
gcugugagcaaaucucaga

SEQ ID NO: 3901368 - RNA, 19 nt, Human adenovirus A
gcuuaauaccuuugcucag

SEQ ID NO: 3901369 - RNA, 17 nt, Human adenovirus A
gcuuaguauuugucucc

SEQ ID NO: 3901370 - RNA, 21 nt, Human adenovirus A
gcuuauguacauaauccagca

SEQ ID NO: 3901371 - RNA, 20 nt, Human adenovirus A
gcuucagguguuaucuucaa

SEQ ID NO: 3901372 - RNA, 18 nt, Human adenovirus A
gcuuccaugccuuuuucc

SEQ ID NO: 3901373 - RNA, 22 nt, Human adenovirus A
gcuucuacaacgagcaagccgu

SEQ ID NO: 3901374 - RNA, 20 nt, Human adenovirus A
gcuucuacaaucacuuggcu

SEQ ID NO: 3901375 - RNA, 12 nt, Human adenovirus A
gcuucuccagac

SEQ ID NO: 3901376 - RNA, 13 nt, Human adenovirus A
gcuucuugcuuua

SEQ ID NO: 3901377 - RNA, 18 nt, Human adenovirus A
gcuugagcgcguggcacg

SEQ ID NO: 3901378 - RNA, 23 nt, Human adenovirus A
gcuuucgagggguucucuuucaa

SEQ ID NO: 3901379 - RNA, 14 nt, Human adenovirus A
gcuuugcucgagac

SEQ ID NO: 3901380 - RNA, 18 nt, Human adenovirus A
ggaaagcauuuuggauuu

SEQ ID NO: 3901381 - RNA, 21 nt, Human adenovirus A
ggaaauuguguacuuuucaaa

SEQ ID NO: 3901382 - RNA, 14 nt, Human adenovirus A
ggaacaacaggugc

SEQ ID NO: 3901383 - RNA, 13 nt, Human adenovirus A
ggaacuauuucuu

SEQ ID NO: 3901384 - RNA, 20 nt, Human adenovirus A
ggagacgggccgcagcugcg

SEQ ID NO: 3901385 - RNA, 14 nt, Human adenovirus A
ggagacguuuuugc

SEQ ID NO: 3901386 - RNA, 20 nt, Human adenovirus A
ggagcgccccccuagcagua

SEQ ID NO: 3901387 - RNA, 23 nt, Human adenovirus A
ggagcggaacccugcgguggugg

SEQ ID NO: 3901388 - RNA, 14 nt, Human adenovirus A
ggagcuaaaacaag

SEQ ID NO: 3901389 - RNA, 17 nt, Human adenovirus A
ggaggaagcugaggaaa

SEQ ID NO: 3901390 - RNA, 23 nt, Human adenovirus A
ggaggacuuugagccagaugaac

SEQ ID NO: 3901391 - RNA, 21 nt, Human adenovirus A
ggaggucuccaugucccgcac

SEQ ID NO: 3901392 - RNA, 13 nt, Human adenovirus A
ggagguggcugga

SEQ ID NO: 3901393 - RNA, 20 nt, Human adenovirus A
ggaguuggaagaaggagaag

SEQ ID NO: 3901394 - RNA, 19 nt, Human adenovirus A
ggauggguguuuggcagca

SEQ ID NO: 3901395 - RNA, 18 nt, Human adenovirus A
ggcaagccaacggcacau

SEQ ID NO: 3901396 - RNA, 13 nt, Human adenovirus A
ggcacgagccagc

SEQ ID NO: 3901397 - RNA, 14 nt, Human adenovirus A
ggcagccaggcggg

SEQ ID NO: 3901398 - RNA, 22 nt, Human adenovirus A
ggcaggaaaucugggaggaaga

SEQ ID NO: 3901399 - RNA, 14 nt, Human adenovirus A
ggcaucuugcauga

SEQ ID NO: 3901400 - RNA, 14 nt, Human adenovirus A
ggcgacuacccggc

SEQ ID NO: 3901401 - RNA, 20 nt, Human adenovirus A
ggcgagaaugggaggaaaga

SEQ ID NO: 3901402 - RNA, 18 nt, Human adenovirus A
ggcgaucaucgcggagag

SEQ ID NO: 3901403 - RNA, 17 nt, Human adenovirus A
ggcgcccuccaccgcca

SEQ ID NO: 3901404 - RNA, 19 nt, Human adenovirus A
ggcgcgcgaguuaagaaaa

SEQ ID NO: 3901405 - RNA, 16 nt, Human adenovirus A
gugaauguguuccagu

SEQ ID NO: 3901406 - RNA, 20 nt, Human adenovirus A
gugacaaugcccgccuggca

SEQ ID NO: 3901407 - RNA, 15 nt, Human adenovirus A
gugcaaaacuuucua

SEQ ID NO: 3901408 - RNA, 17 nt, Human adenovirus A
gugccccucgaccugca

SEQ ID NO: 3901409 - RNA, 17 nt, Human adenovirus A
gugcuuccguagccuug

SEQ ID NO: 3901410 - RNA, 13 nt, Human adenovirus A
guggagccacugc

SEQ ID NO: 3901411 - RNA, 13 nt, Human adenovirus A
gugguauuggaac

SEQ ID NO: 3901412 - RNA, 12 nt, Human adenovirus A
guggucaggaag

SEQ ID NO: 3901413 - RNA, 14 nt, Human adenovirus A
gugguugggaacag

SEQ ID NO: 3901414 - RNA, 17 nt, Human adenovirus A
guguaaacacuaccggc

SEQ ID NO: 3901415 - RNA, 14 nt, Human adenovirus A
guguacacaaugca

SEQ ID NO: 3901416 - RNA, 18 nt, Human adenovirus A
gugucuucucccugugcu

SEQ ID NO: 3901417 - RNA, 13 nt, Human adenovirus A
gugugacugcccc

SEQ ID NO: 3901418 - RNA, 17 nt, Human adenovirus A
guguuaaccauuguaaa

SEQ ID NO: 3901419 - RNA, 15 nt, Human adenovirus A
guuaagcaguagaaa

SEQ ID NO: 3901420 - RNA, 14 nt, Human adenovirus A
guuacgacccugac

SEQ ID NO: 3901421 - RNA, 20 nt, Human adenovirus A
guuagccugaaaaauaaaaa

SEQ ID NO: 3901422 - RNA, 21 nt, Human adenovirus A
guuaucuaguuugguagcaaa

SEQ ID NO: 3901423 - RNA, 15 nt, Human adenovirus A
guuaucuucaaauca

SEQ ID NO: 3901424 - RNA, 17 nt, Human adenovirus A
guuaucuugguaggcaa

SEQ ID NO: 3901425 - RNA, 16 nt, Human adenovirus A
guuauguaugcccagc

SEQ ID NO: 3901426 - RNA, 23 nt, Human adenovirus A
guucaacaacagcuucuaaaaga

SEQ ID NO: 3901427 - RNA, 17 nt, Human adenovirus A
guucaauaguggcugca

SEQ ID NO: 3901428 - RNA, 16 nt, Human adenovirus A
guucacuuacccgcag

SEQ ID NO: 3901429 - RNA, 20 nt, Human adenovirus A
guucacuuacccgcagcugu

SEQ ID NO: 3901430 - RNA, 18 nt, Human adenovirus A
guuccaguauuuuguaaa

SEQ ID NO: 3901431 - RNA, 11 nt, Human adenovirus A
guucccacagu

SEQ ID NO: 3901432 - RNA, 22 nt, Human adenovirus A
guugcuuugaauaguucaucuu

SEQ ID NO: 3901433 - RNA, 23 nt, Human adenovirus A
guugguucgacgggccaggcgca

SEQ ID NO: 3901434 - RNA, 20 nt, Human adenovirus A
guuuaaaucuuucugcuccc

SEQ ID NO: 3901435 - RNA, 18 nt, Human adenovirus A
guuuacaaagcacugggc

SEQ ID NO: 3901436 - RNA, 14 nt, Human adenovirus A
guuuagaaacccca

SEQ ID NO: 3901437 - RNA, 12 nt, Human adenovirus A
guuuccagugcg

SEQ ID NO: 3901438 - RNA, 20 nt, Human adenovirus A
guuuuggcuuaagguggaaa

SEQ ID NO: 3901439 - RNA, 22 nt, Human adenovirus A
uaaaaacuguucauauugugag

SEQ ID NO: 3901440 - RNA, 18 nt, Human adenovirus A
uaaaaccuacacaugaag

SEQ ID NO: 3901441 - RNA, 16 nt, Human adenovirus A
uaaaacuaccugauaa

SEQ ID NO: 3901442 - RNA, 16 nt, Human adenovirus A
uaaaacuuccaacuua

SEQ ID NO: 3901443 - RNA, 19 nt, Human adenovirus A
uaaaagagccacagcucug

SEQ ID NO: 3901444 - RNA, 21 nt, Human adenovirus A
uaaagacuccggaaacaacac

SEQ ID NO: 3901445 - RNA, 23 nt, Human adenovirus A
uaaagcgcagaguauccacacag

SEQ ID NO: 3901446 - RNA, 20 nt, Human adenovirus A
uaaagcuuuugcuaaauugg

SEQ ID NO: 3901447 - RNA, 17 nt, Human adenovirus A
caagccuaccugacacu

SEQ ID NO: 3901448 - RNA, 16 nt, Human adenovirus A
caagcgaacaggagcu

SEQ ID NO: 3901449 - RNA, 21 nt, Human adenovirus A
caagcggcauuccccauccaa

SEQ ID NO: 3901450 - RNA, 16 nt, Human adenovirus A
caagcuacccuucgcu

SEQ ID NO: 3901451 - RNA, 19 nt, Human adenovirus A
caagcuuaccccgccaacu

SEQ ID NO: 3901452 - RNA, 21 nt, Human adenovirus A
caagcuuucauugguccaggc

SEQ ID NO: 3901453 - RNA, 21 nt, Human adenovirus A
caaggauuugaaugcguaaau

SEQ ID NO: 3901454 - RNA, 17 nt, Human adenovirus A
caaggcauuggaaagca

SEQ ID NO: 3901455 - RNA, 16 nt, Human adenovirus A
caaggcguggaacagc

SEQ ID NO: 3901456 - RNA, 17 nt, Human adenovirus A
caaggucaacuuacagc

SEQ ID NO: 3901457 - RNA, 18 nt, Human adenovirus A
caaguaacaacacgggcu

SEQ ID NO: 3901458 - RNA, 16 nt, Human adenovirus A
caaguguaauuuucca

SEQ ID NO: 3901459 - RNA, 13 nt, Human adenovirus A
caaguuaaaagac

SEQ ID NO: 3901460 - RNA, 15 nt, Human adenovirus A
caauaaaaaaaacag

SEQ ID NO: 3901461 - RNA, 12 nt, Human adenovirus A
caauaaaacaag

SEQ ID NO: 3901462 - RNA, 14 nt, Human adenovirus A
caauaaaacaagga

SEQ ID NO: 3901463 - RNA, 19 nt, Human adenovirus A
caauaaaacaaggagccgc

SEQ ID NO: 3901464 - RNA, 15 nt, Human adenovirus A
caauaaauacugcuc

SEQ ID NO: 3901465 - RNA, 20 nt, Human adenovirus A
caauaacuacaaacaguuuc

SEQ ID NO: 3901466 - RNA, 23 nt, Human adenovirus A
caauauugagguuacucacuuug

SEQ ID NO: 3901467 - RNA, 21 nt, Human adenovirus A
caaucagugucuaccaauacu

SEQ ID NO: 3901468 - RNA, 15 nt, Human adenovirus A
caaucuacaaacugg

SEQ ID NO: 3901469 - RNA, 16 nt, Human adenovirus A
caaugacaaugaauaa

SEQ ID NO: 3901470 - RNA, 15 nt, Human adenovirus A
caaugcagcaaacac

SEQ ID NO: 3901471 - RNA, 20 nt, Human adenovirus A
caaugcauuaauaauaaaac

SEQ ID NO: 3901472 - RNA, 11 nt, Human adenovirus A
caaugggagau

SEQ ID NO: 3901473 - RNA, 11 nt, Human adenovirus A
caauguaacuu

SEQ ID NO: 3901474 - RNA, 19 nt, Human adenovirus A
caauguaacuucagccacu

SEQ ID NO: 3901475 - RNA, 14 nt, Human adenovirus A
caauuaguaacaag

SEQ ID NO: 3901476 - RNA, 14 nt, Human adenovirus A
caauuucugccauu

SEQ ID NO: 3901477 - RNA, 19 nt, Human adenovirus A
cacaacacauacauacacu

SEQ ID NO: 3901478 - RNA, 12 nt, Human adenovirus A
cacacaaaacac

SEQ ID NO: 3901479 - RNA, 13 nt, Human adenovirus A
cacacgcagcaac

SEQ ID NO: 3901480 - RNA, 16 nt, Human adenovirus A
cacacuuaacacaaga

SEQ ID NO: 3901481 - RNA, 20 nt, Human adenovirus A
cacagccccuagccguagac

SEQ ID NO: 3901482 - RNA, 21 nt, Human adenovirus A
cacagcuuauucgccagucaa

SEQ ID NO: 3901483 - RNA, 19 nt, Human adenovirus A
cacauauucgcgugccagg

SEQ ID NO: 3901484 - RNA, 17 nt, Human adenovirus A
cacaucgccggucagga

SEQ ID NO: 3901485 - RNA, 22 nt, Human adenovirus A
cacaugcgggggaugaaggaag

SEQ ID NO: 3901486 - RNA, 13 nt, Human adenovirus A
cacaugggaaggg

SEQ ID NO: 3901487 - RNA, 22 nt, Human adenovirus A
cacauugcaacgcaaucagaau

SEQ ID NO: 3901488 - RNA, 20 nt, Human adenovirus A
caccaucuucaucuuuucua

SEQ ID NO: 3901489 - RNA, 18 nt, Human adenovirus A
cacccaaucaaauuacac

SEQ ID NO: 3901490 - RNA, 22 nt, Human adenovirus A
cacccugugcuuaacaaaaaac

SEQ ID NO: 3901491 - RNA, 16 nt, Human adenovirus A
cacccuuaauugcagg

SEQ ID NO: 3901492 - RNA, 18 nt, Human adenovirus A
cacccuuaauugcagggg

SEQ ID NO: 3901493 - RNA, 18 nt, Human adenovirus A
caccgcccaggcaggcgc

SEQ ID NO: 3901494 - RNA, 17 nt, Human adenovirus A
caccgcgcugcggccau

SEQ ID NO: 3901495 - RNA, 20 nt, Human adenovirus A
caccuuuuaccuaaaccaca

SEQ ID NO: 3901496 - RNA, 22 nt, Human adenovirus A
caccuuuuguuaauuaaggcgc

SEQ ID NO: 3901497 - RNA, 19 nt, Human adenovirus A
cacgccgcgccccacuucc

SEQ ID NO: 3901498 - RNA, 18 nt, Human adenovirus A
cacggaguaaugaacaag

SEQ ID NO: 3901499 - RNA, 14 nt, Human adenovirus A
cacggcacgcggcc

SEQ ID NO: 3901500 - RNA, 15 nt, Human adenovirus A
cacggccucagcagc

SEQ ID NO: 3901501 - RNA, 19 nt, Human adenovirus A
cacgggacccugccgcugc

SEQ ID NO: 3901502 - RNA, 21 nt, Human adenovirus A
cacuacccguuccgcaagcac

SEQ ID NO: 3901503 - RNA, 17 nt, Human adenovirus A
cacucagcgacaaaccu

SEQ ID NO: 3901504 - RNA, 18 nt, Human adenovirus A
cacugaaaaaccaacaaa

SEQ ID NO: 3901505 - RNA, 14 nt, Human adenovirus A
cacugcaaugcagc

SEQ ID NO: 3901506 - RNA, 18 nt, Human adenovirus A
cacugcuuugcucgagac

SEQ ID NO: 3901507 - RNA, 17 nt, Human adenovirus A
cacuggcgaugacgaug

SEQ ID NO: 3901508 - RNA, 13 nt, Human adenovirus A
cacugggccagga

SEQ ID NO: 3901509 - RNA, 22 nt, Human adenovirus A
cacugggccaggaggacacugg

SEQ ID NO: 3901510 - RNA, 21 nt, Human adenovirus A
cacugguuaucgcaccucguc

SEQ ID NO: 3901511 - RNA, 18 nt, Human adenovirus A
cacuuaagucuuuacaau

SEQ ID NO: 3901512 - RNA, 18 nt, Human adenovirus A
cacuuacccgcagcuguc

SEQ ID NO: 3901513 - RNA, 16 nt, Human adenovirus A
cacuuaugcucccaca

SEQ ID NO: 3901514 - RNA, 16 nt, Human adenovirus A
cacuucuugcugaaau

SEQ ID NO: 3901515 - RNA, 21 nt, Human adenovirus A
cagaaaaacaguacaaagcca

SEQ ID NO: 3901516 - RNA, 18 nt, Human adenovirus A
cagaacauacaacuugca

SEQ ID NO: 3901517 - RNA, 21 nt, Human adenovirus A
cagaacccaguaugcugaaga

SEQ ID NO: 3901518 - RNA, 15 nt, Human adenovirus A
cagaagccagcagca

SEQ ID NO: 3901519 - RNA, 19 nt, Human adenovirus A
cagaauauaagaacuacaa

SEQ ID NO: 3901520 - RNA, 17 nt, Human adenovirus A
cagaauuugugcuaccc

SEQ ID NO: 3901521 - RNA, 18 nt, Human adenovirus A
cagacgacuuaaaauaca

SEQ ID NO: 3901522 - RNA, 18 nt, Human adenovirus A
cagacgcaugaagggugg

SEQ ID NO: 3901523 - RNA, 16 nt, Human adenovirus A
cagagagaaaagcaug

SEQ ID NO: 3901524 - RNA, 23 nt, Human adenovirus A
cagagcguugguucgacgggcca

SEQ ID NO: 3901525 - RNA, 18 nt, Human adenovirus A
cagaggaggaggaggaag

SEQ ID NO: 3901526 - RNA, 23 nt, Human adenovirus A
cagagggaaagguauucagcuga

SEQ ID NO: 3901527 - RNA, 20 nt, Human adenovirus A
cagagucgaggucaagaaca

SEQ ID NO: 3901528 - RNA, 20 nt, Human adenovirus A
cagaguugcuuuuagauguc

SEQ ID NO: 3901529 - RNA, 18 nt, Human adenovirus A
cagaugacuggacagcgg

SEQ ID NO: 3901530 - RNA, 12 nt, Human adenovirus A
cagauuuugugc

SEQ ID NO: 3901531 - RNA, 14 nt, Human adenovirus A
cagcaagcagcgcc

SEQ ID NO: 3901532 - RNA, 17 nt, Human adenovirus A
caaaguaugcugcacaa

SEQ ID NO: 3901533 - RNA, 15 nt, Human adenovirus A
caaauagagcaaacu

SEQ ID NO: 3901534 - RNA, 18 nt, Human adenovirus A
caaauagagcaaacuaca

SEQ ID NO: 3901535 - RNA, 12 nt, Human adenovirus A
caaauagcucuu

SEQ ID NO: 3901536 - RNA, 19 nt, Human adenovirus A
caaauauuuacuaugauuu

SEQ ID NO: 3901537 - RNA, 16 nt, Human adenovirus A
caaaucagaagccagc

SEQ ID NO: 3901538 - RNA, 15 nt, Human adenovirus A
caaauuuaaggccag

SEQ ID NO: 3901539 - RNA, 17 nt, Human adenovirus A
caaauuuaaggccaggg

SEQ ID NO: 3901540 - RNA, 12 nt, Human adenovirus A
caacaaggaaag

SEQ ID NO: 3901541 - RNA, 21 nt, Human adenovirus A
caacacuacgcgaugaagcac

SEQ ID NO: 3901542 - RNA, 17 nt, Human adenovirus A
caacagaaaguuguaga

SEQ ID NO: 3901543 - RNA, 13 nt, Human adenovirus A
caacagcacagga

SEQ ID NO: 3901544 - RNA, 17 nt, Human adenovirus A
caacagcuauugcaaac

SEQ ID NO: 3901545 - RNA, 21 nt, Human adenovirus A
caacagcuucuaaaagagcca

SEQ ID NO: 3901546 - RNA, 14 nt, Human adenovirus A
caacaguacaggca

SEQ ID NO: 3901547 - RNA, 15 nt, Human adenovirus A
caacagucagugucc

SEQ ID NO: 3901548 - RNA, 18 nt, Human adenovirus A
caacauaacaacucagga

SEQ ID NO: 3901549 - RNA, 15 nt, Human adenovirus A
caaccaaaggagaaa

SEQ ID NO: 3901550 - RNA, 11 nt, Human adenovirus A
caacccuuccc

SEQ ID NO: 3901551 - RNA, 18 nt, Human adenovirus A
caaccucacugcuuugcu

SEQ ID NO: 3901552 - RNA, 15 nt, Human adenovirus A
caacgcuuugcuuga

SEQ ID NO: 3901553 - RNA, 20 nt, Human adenovirus A
caacguuaaaaauacaguca

SEQ ID NO: 3901554 - RNA, 23 nt, Human adenovirus A
caacuaaaaauuguuuuuguucu

SEQ ID NO: 3901555 - RNA, 15 nt, Human adenovirus A
caacugauauuagua

SEQ ID NO: 3901556 - RNA, 16 nt, Human adenovirus A
caacuuaacccucccu

SEQ ID NO: 3901557 - RNA, 14 nt, Human adenovirus A
caacuuacagcuag

SEQ ID NO: 3901558 - RNA, 15 nt, Human adenovirus A
caacuuuauugccuu

SEQ ID NO: 3901559 - RNA, 17 nt, Human adenovirus A
caagacguuccauggcu

SEQ ID NO: 3901560 - RNA, 14 nt, Human adenovirus A
caagaggagaagga

SEQ ID NO: 3901561 - RNA, 18 nt, Human adenovirus B (HAdV-B)
gaaugaaaauaaacuuug

SEQ ID NO: 3901562 - RNA, 22 nt, Human adenovirus B (HAdV-B)
gaauugagaauggcaacaucaa

SEQ ID NO: 3901563 - RNA, 20 nt, Human adenovirus B (HAdV-B)
gaauugcaaggccccagcag

SEQ ID NO: 3901564 - RNA, 14 nt, Human adenovirus B (HAdV-B)
gacaguuuggagga

SEQ ID NO: 3901565 - RNA, 15 nt, Human adenovirus B (HAdV-B)
gaccagaacuuccaa

SEQ ID NO: 3901566 - RNA, 12 nt, Human adenovirus B (HAdV-B)
gacccaggccau

SEQ ID NO: 3901567 - RNA, 10 nt, Human adenovirus B (HAdV-B)
gaccucccca

SEQ ID NO: 3901568 - RNA, 19 nt, Human adenovirus B (HAdV-B)
gacgaggaaaaggagcaga

SEQ ID NO: 3901569 - RNA, 20 nt, Human adenovirus B (HAdV-B)
gacguuaugugccuuuccac

SEQ ID NO: 3901570 - RNA, 15 nt, Human adenovirus B (HAdV-B)
gacucgggccgcaaa

SEQ ID NO: 3901571 - RNA, 14 nt, Human adenovirus B (HAdV-B)
gacuuggaagaggg

SEQ ID NO: 3901572 - RNA, 12 nt, Human adenovirus B (HAdV-B)
gagaauuacuuc

SEQ ID NO: 3901573 - RNA, 21 nt, Human adenovirus B (HAdV-B)
gagacucgggccgcaaaugcu

SEQ ID NO: 3901574 - RNA, 21 nt, Human adenovirus B (HAdV-B)
gagaugcgagcuucccgcuuu

SEQ ID NO: 3901575 - RNA, 15 nt, Human adenovirus B (HAdV-B)
gagcaguaucuggag

SEQ ID NO: 3901576 - RNA, 23 nt, Human adenovirus B (HAdV-B)
gagcuuccuuacauagaagaggc

SEQ ID NO: 3901577 - RNA, 14 nt, Human adenovirus B (HAdV-B)
gaggauuugcaugu

SEQ ID NO: 3901578 - RNA, 21 nt, Human adenovirus B (HAdV-B)
gaggucccaguuucaaacccu

SEQ ID NO: 3901579 - RNA, 14 nt, Human adenovirus B (HAdV-B)
gaguacuuggaaga

SEQ ID NO: 3901580 - RNA, 14 nt, Human adenovirus B (HAdV-B)
gauaugugcagcag

SEQ ID NO: 3901581 - RNA, 19 nt, Human adenovirus B (HAdV-B)
gaucuaccgccagugcugu

SEQ ID NO: 3901582 - RNA, 20 nt, Human adenovirus B (HAdV-B)
gaucucuacagcuaaaagug

SEQ ID NO: 3901583 - RNA, 15 nt, Human adenovirus B (HAdV-B)
gaucuucgagggucu

SEQ ID NO: 3901584 - RNA, 21 nt, Human adenovirus B (HAdV-B)
gaugaaguuucuguauugcag

SEQ ID NO: 3901585 - RNA, 17 nt, Human adenovirus B (HAdV-B)
gaugacuggcagaaccc

SEQ ID NO: 3901586 - RNA, 18 nt, Human adenovirus B (HAdV-B)
gaugagcgaaacccagau

SEQ ID NO: 3901587 - RNA, 17 nt, Human adenovirus B (HAdV-B)
gaugauugggagguggc

SEQ ID NO: 3901588 - RNA, 21 nt, Human adenovirus B (HAdV-B)
gaugcauuauuggacagaacu

SEQ ID NO: 3901589 - RNA, 17 nt, Human adenovirus B (HAdV-B)
gaugccuuuuccagaau

SEQ ID NO: 3901590 - RNA, 23 nt, Human adenovirus B (HAdV-B)
gaugggcguccagcgcugccagg

SEQ ID NO: 3901591 - RNA, 14 nt, Human adenovirus B (HAdV-B)
gcaaaaauaaaaaa

SEQ ID NO: 3901592 - RNA, 16 nt, Human adenovirus B (HAdV-B)
gcaaaacaaugacuuu

SEQ ID NO: 3901593 - RNA, 19 nt, Human adenovirus B (HAdV-B)
gcaaugcugaacgggguca

SEQ ID NO: 3901594 - RNA, 17 nt, Human adenovirus B (HAdV-B)
gcaccgacucucccagg

SEQ ID NO: 3901595 - RNA, 16 nt, Human adenovirus B (HAdV-B)
gcagacaguaaaggaa

SEQ ID NO: 3901596 - RNA, 22 nt, Human adenovirus B (HAdV-B)
gcagcagcuccuuuagccagag

SEQ ID NO: 3901597 - RNA, 18 nt, Human adenovirus B (HAdV-B)
gcagcuccuuuagccaga

SEQ ID NO: 3901598 - RNA, 16 nt, Human adenovirus B (HAdV-B)
gcaggcgccucccagg

SEQ ID NO: 3901599 - RNA, 13 nt, Human adenovirus B (HAdV-B)
gcaguggcagccu

SEQ ID NO: 3901600 - RNA, 16 nt, Human adenovirus B (HAdV-B)
gcaguuuaccaugagu

SEQ ID NO: 3901601 - RNA, 22 nt, Human adenovirus B (HAdV-B)
gcauccgcgaguucaacugaaa

SEQ ID NO: 3901602 - RNA, 19 nt, Human adenovirus B (HAdV-B)
gcauuguggagaacaugga

SEQ ID NO: 3901603 - RNA, 11 nt, Human adenovirus B (HAdV-B)
gccacuugaau

SEQ ID NO: 3901604 - RNA, 17 nt, Human adenovirus B (HAdV-B)
gccagacucgcaguacu

SEQ ID NO: 3901605 - RNA, 12 nt, Human adenovirus B (HAdV-B)
gccagaggguca

SEQ ID NO: 3901606 - RNA, 20 nt, Human adenovirus B (HAdV-B)
gcccaucaguguggaagagc

SEQ ID NO: 3901607 - RNA, 23 nt, Human adenovirus B (HAdV-B)
gccgccaagaucccgucuugggu

SEQ ID NO: 3901608 - RNA, 20 nt, Human adenovirus B (HAdV-B)
gccugacuuuaugagccaga

SEQ ID NO: 3901609 - RNA, 20 nt, Human adenovirus B (HAdV-B)
gccuggacccuccaguggag

SEQ ID NO: 3901610 - RNA, 17 nt, Human adenovirus B (HAdV-B)
gcgacaucggcacgagc

SEQ ID NO: 3901611 - RNA, 21 nt, Human adenovirus B (HAdV-B)
gcgaguuugcuuauggcaagc

SEQ ID NO: 3901612 - RNA, 14 nt, Human adenovirus B (HAdV-B)
gcgcgcgcagucau

SEQ ID NO: 3901613 - RNA, 22 nt, Human adenovirus B (HAdV-B)
gcggcccuggcagaacacacuc

SEQ ID NO: 3901614 - RNA, 11 nt, Human adenovirus B (HAdV-B)
gcucagccgcg

SEQ ID NO: 3901615 - RNA, 23 nt, Human adenovirus B (HAdV-B)
gcucgaaaacugguuagcugcac

SEQ ID NO: 3901616 - RNA, 15 nt, Human adenovirus B (HAdV-B)
gcugcaaaaguucua

SEQ ID NO: 3901617 - RNA, 13 nt, Human adenovirus B (HAdV-B)
gcugcacagcacc

SEQ ID NO: 3901618 - RNA, 19 nt, Human adenovirus B (HAdV-B)
gcugccaccggucaacgug

SEQ ID NO: 3901619 - RNA, 16 nt, Human adenovirus B (HAdV-B)
gcugcugcuguggcuu

SEQ ID NO: 3901620 - RNA, 22 nt, Human adenovirus B (HAdV-B)
gcuggacuacuugcacagagcu

SEQ ID NO: 3901621 - RNA, 16 nt, Human adenovirus B (HAdV-B)
gcugucucaaccccag

SEQ ID NO: 3901622 - RNA, 13 nt, Human adenovirus B (HAdV-B)
gcuuauugcuugu

SEQ ID NO: 3901623 - RNA, 16 nt, Human adenovirus B (HAdV-B)
ggaaucauguccaccu

SEQ ID NO: 3901624 - RNA, 22 nt, Human adenovirus B (HAdV-B)
ggaauuuuugacaugaacaugc

SEQ ID NO: 3901625 - RNA, 17 nt, Human adenovirus B (HAdV-B)
ggacaaagcgugcugca

SEQ ID NO: 3901626 - RNA, 20 nt, Human adenovirus B (HAdV-B)
ggacugccccauggcauggg

SEQ ID NO: 3901627 - RNA, 12 nt, Human adenovirus B (HAdV-B)
ggagugcaugcc

SEQ ID NO: 3901628 - RNA, 12 nt, Human adenovirus B (HAdV-B)
ggauacaaagua

SEQ ID NO: 3901629 - RNA, 17 nt, Human adenovirus B (HAdV-B)
ggauacguuuuggauuu

SEQ ID NO: 3901630 - RNA, 14 nt, Human adenovirus B (HAdV-B)
ggauugccacagcu

SEQ ID NO: 3901631 - RNA, 20 nt, Human adenovirus B (HAdV-B)
ggcaacuccgacugcagcac

SEQ ID NO: 3901632 - RNA, 21 nt, Human adenovirus B (HAdV-B)
ggcaacuccgacugcagcacu

SEQ ID NO: 3901633 - RNA, 18 nt, Human adenovirus B (HAdV-B)
aguuggugcgauuggguu

SEQ ID NO: 3901634 - RNA, 19 nt, Human adenovirus B (HAdV-B)
auaaaaaaaaaaacaagcg

SEQ ID NO: 3901635 - RNA, 17 nt, Human adenovirus B (HAdV-B)
auaaaaauccaucggga

SEQ ID NO: 3901636 - RNA, 16 nt, Human adenovirus B (HAdV-B)
auaguaucacaaucug

SEQ ID NO: 3901637 - RNA, 18 nt, Human adenovirus B (HAdV-B)
auauaaucuguugcacca

SEQ ID NO: 3901638 - RNA, 20 nt, Human adenovirus B (HAdV-B)
auauagcuuccuuggaagag

SEQ ID NO: 3901639 - RNA, 14 nt, Human adenovirus B (HAdV-B)
auaugugcagcaga

SEQ ID NO: 3901640 - RNA, 16 nt, Human adenovirus B (HAdV-B)
auauguggccuggggu

SEQ ID NO: 3901641 - RNA, 17 nt, Human adenovirus B (HAdV-B)
aucaccaacuugggaac

SEQ ID NO: 3901642 - RNA, 23 nt, Human adenovirus B (HAdV-B)
aucauagauaauuacuugaaagu

SEQ ID NO: 3901643 - RNA, 17 nt, Human adenovirus B (HAdV-B)
aucauguccaccugggg

SEQ ID NO: 3901644 - RNA, 13 nt, Human adenovirus B (HAdV-B)
auccccacuggag

SEQ ID NO: 3901645 - RNA, 19 nt, Human adenovirus B (HAdV-B)
aucccggcagucucgacag

SEQ ID NO: 3901646 - RNA, 15 nt, Human adenovirus B (HAdV-B)
auccgguggggccau

SEQ ID NO: 3901647 - RNA, 17 nt, Human adenovirus B (HAdV-B)
aucgaaguugcuggaaa

SEQ ID NO: 3901648 - RNA, 18 nt, Human adenovirus B (HAdV-B)
aucgaaguugcuggaaau

SEQ ID NO: 3901649 - RNA, 18 nt, Human adenovirus B (HAdV-B)
aucuaacguggaacucac

SEQ ID NO: 3901650 - RNA, 18 nt, Human adenovirus B (HAdV-B)
aucuguggaguucuuauu

SEQ ID NO: 3901651 - RNA, 22 nt, Human adenovirus B (HAdV-B)
augacuuuaccccuacggaagc

SEQ ID NO: 3901652 - RNA, 18 nt, Human adenovirus B (HAdV-B)
augcaugcaggugggcgu

SEQ ID NO: 3901653 - RNA, 16 nt, Human adenovirus B (HAdV-B)
augccuggaguguaua

SEQ ID NO: 3901654 - RNA, 17 nt, Human adenovirus B (HAdV-B)
augccuuaccaguguaa

SEQ ID NO: 3901655 - RNA, 16 nt, Human adenovirus B (HAdV-B)
augccuuucaugaggu

SEQ ID NO: 3901656 - RNA, 22 nt, Human adenovirus B (HAdV-B)
augcucaggaucacagagacga

SEQ ID NO: 3901657 - RNA, 16 nt, Human adenovirus B (HAdV-B)
augcuuuuauaugcuu

SEQ ID NO: 3901658 - RNA, 20 nt, Human adenovirus B (HAdV-B)
augugcauauuaacaaucug

SEQ ID NO: 3901659 - RNA, 13 nt, Human adenovirus B (HAdV-B)
auuaccaccccua

SEQ ID NO: 3901660 - RNA, 20 nt, Human adenovirus B (HAdV-B)
auucaaccugagguuaaagu

SEQ ID NO: 3901661 - RNA, 19 nt, Human adenovirus B (HAdV-B)
auugucucugaagaaaugc

SEQ ID NO: 3901662 - RNA, 16 nt, Human adenovirus B (HAdV-B)
auuguuucugaugcaa

SEQ ID NO: 3901663 - RNA, 16 nt, Human adenovirus B (HAdV-B)
auuuccacuucaacaa

SEQ ID NO: 3901664 - RNA, 18 nt, Human adenovirus B (HAdV-B)
auuucugugggacgacgu

SEQ ID NO: 3901665 - RNA, 18 nt, Human adenovirus B (HAdV-B)
auuugccaaaaaaacauu

SEQ ID NO: 3901666 - RNA, 22 nt, Human adenovirus B (HAdV-B)
auuugugggauuugauggaagc

SEQ ID NO: 3901667 - RNA, 14 nt, Human adenovirus B (HAdV-B)
auuuugccuccccc

SEQ ID NO: 3901668 - RNA, 22 nt, Human adenovirus B (HAdV-B)
caaaguaaaaggcacaggagaa

SEQ ID NO: 3901669 - RNA, 19 nt, Human adenovirus B (HAdV-B)
caacgaauuuucucccagc

SEQ ID NO: 3901670 - RNA, 20 nt, Human adenovirus B (HAdV-B)
caacgaauuuucucccagcg

SEQ ID NO: 3901671 - RNA, 17 nt, Human adenovirus B (HAdV-B)
caacuucacauacaaca

SEQ ID NO: 3901672 - RNA, 22 nt, Human adenovirus B (HAdV-B)
caagcggguuaaaaaggacaaa

SEQ ID NO: 3901673 - RNA, 20 nt, Human adenovirus B (HAdV-B)
caagcguaguagaauaacuu

SEQ ID NO: 3901674 - RNA, 22 nt, Human adenovirus B (HAdV-B)
caagcucuuacagaaaucucuu

SEQ ID NO: 3901675 - RNA, 15 nt, Human adenovirus B (HAdV-B)
caaggccccagcagc

SEQ ID NO: 3901676 - RNA, 12 nt, Human adenovirus B (HAdV-B)
caauccccacug

SEQ ID NO: 3901677 - RNA, 15 nt, Human adenovirus B (HAdV-B)
caaucgcgaagaggc

SEQ ID NO: 3901678 - RNA, 22 nt, Human adenovirus B (HAdV-B)
cacacguggcugcagccaaccu

SEQ ID NO: 3901679 - RNA, 20 nt, Human adenovirus B (HAdV-B)
caccaccucuacccuagaag

SEQ ID NO: 3901680 - RNA, 15 nt, Human adenovirus B (HAdV-B)
caccguuucuggggc

SEQ ID NO: 3901681 - RNA, 17 nt, Human adenovirus B (HAdV-B)
caccuuaaucccagaaa

SEQ ID NO: 3901682 - RNA, 23 nt, Human adenovirus B (HAdV-B)
cacggcuuugugcggcaggcaug

SEQ ID NO: 3901683 - RNA, 17 nt, Human adenovirus B (HAdV-B)
cacuagucacugcauuu

SEQ ID NO: 3901684 - RNA, 13 nt, Human adenovirus B (HAdV-B)
cacuugugcuggu

SEQ ID NO: 3901685 - RNA, 22 nt, Human adenovirus B (HAdV-B)
cagaacuugaaagagcuugaca

SEQ ID NO: 3901686 - RNA, 23 nt, Human adenovirus B (HAdV-B)
cagaagacaugcaugacccagau

SEQ ID NO: 3901687 - RNA, 14 nt, Human adenovirus B (HAdV-B)
cagaaguuggagga

SEQ ID NO: 3901688 - RNA, 13 nt, Human adenovirus B (HAdV-B)
cagacaugaugaa

SEQ ID NO: 3901689 - RNA, 15 nt, Human adenovirus B (HAdV-B)
cagagacgagccugg

SEQ ID NO: 3901690 - RNA, 14 nt, Human adenovirus B (HAdV-B)
cagaggcuggucau

SEQ ID NO: 3901691 - RNA, 23 nt, Human adenovirus B (HAdV-B)
cagcagcggcaguuagaaaauac

SEQ ID NO: 3901692 - RNA, 21 nt, Human adenovirus B (HAdV-B)
cagcauucguuauucggaacu

SEQ ID NO: 3901693 - RNA, 13 nt, Human adenovirus B (HAdV-B)
cagccaugcauug

SEQ ID NO: 3901694 - RNA, 16 nt, Human adenovirus B (HAdV-B)
aguuggaggauuggcu

SEQ ID NO: 3901695 - RNA, 13 nt, Human adenovirus B (HAdV-B)
auauguggccugg

SEQ ID NO: 3901696 - RNA, 14 nt, Human adenovirus B (HAdV-B)
auauuagauaaaug

SEQ ID NO: 3901697 - RNA, 22 nt, Human adenovirus B (HAdV-B)
aucaagaaauuacccaagucag

SEQ ID NO: 3901698 - RNA, 18 nt, Human adenovirus B (HAdV-B)
aucaccaagaugcuggaa

SEQ ID NO: 3901699 - RNA, 15 nt, Human adenovirus B (HAdV-B)
aucaugcccacaucc

SEQ ID NO: 3901700 - RNA, 18 nt, Human adenovirus B (HAdV-B)
aucauggggauuacaagu

SEQ ID NO: 3901701 - RNA, 21 nt, Human adenovirus B (HAdV-B)
aucggauucuuaacagugcag

SEQ ID NO: 3901702 - RNA, 17 nt, Human adenovirus B (HAdV-B)
aucuaacguggaacuca

SEQ ID NO: 3901703 - RNA, 20 nt, Human adenovirus B (HAdV-B)
aucuagaccacugccgccgc

SEQ ID NO: 3901704 - RNA, 22 nt, Human adenovirus B (HAdV-B)
aucucuccuaccacucggaugu

SEQ ID NO: 3901705 - RNA, 18 nt, Human adenovirus B (HAdV-B)
aucugcuccuucugaauc

SEQ ID NO: 3901706 - RNA, 14 nt, Human adenovirus B (HAdV-B)
augacuggcagaac

SEQ ID NO: 3901707 - RNA, 17 nt, Human adenovirus B (HAdV-B)
augaucuggacuuggaa

SEQ ID NO: 3901708 - RNA, 21 nt, Human adenovirus B (HAdV-B)
augccagcgguucuggaggag

SEQ ID NO: 3901709 - RNA, 17 nt, Human adenovirus B (HAdV-B)
augucauaaccugguug

SEQ ID NO: 3901710 - RNA, 12 nt, Human adenovirus B (HAdV-B)
augugauuggcu

SEQ ID NO: 3901711 - RNA, 12 nt, Human adenovirus B (HAdV-B)
auguggccuggg

SEQ ID NO: 3901712 - RNA, 21 nt, Human adenovirus B (HAdV-B)
auguugaaaugggcaugaggu

SEQ ID NO: 3901713 - RNA, 12 nt, Human adenovirus B (HAdV-B)
auucacuggaac

SEQ ID NO: 3901714 - RNA, 19 nt, Human adenovirus B (HAdV-B)
auuccacauuccaaacagu

SEQ ID NO: 3901715 - RNA, 21 nt, Human adenovirus B (HAdV-B)
auuccagucuccugccgcgcu

SEQ ID NO: 3901716 - RNA, 17 nt, Human adenovirus B (HAdV-B)
auugccggcugcgggag

SEQ ID NO: 3901717 - RNA, 14 nt, Human adenovirus B (HAdV-B)
auugucaaguuugg

SEQ ID NO: 3901718 - RNA, 19 nt, Human adenovirus B (HAdV-B)
auuguugaucaccugggca

SEQ ID NO: 3901719 - RNA, 17 nt, Human adenovirus B (HAdV-B)
auuuccauuccuucucg

SEQ ID NO: 3901720 - RNA, 23 nt, Human adenovirus B (HAdV-B)
caaagcuauucguccagaugagg

SEQ ID NO: 3901721 - RNA, 22 nt, Human adenovirus B (HAdV-B)
caaaugcucugcaaaagggaga

SEQ ID NO: 3901722 - RNA, 18 nt, Human adenovirus B (HAdV-B)
caacaauaccuguguaga

SEQ ID NO: 3901723 - RNA, 22 nt, Human adenovirus B (HAdV-B)
caaccacaggcggaucucuaca

SEQ ID NO: 3901724 - RNA, 19 nt, Human adenovirus B (HAdV-B)
caacgugacagcaaaugac

SEQ ID NO: 3901725 - RNA, 14 nt, Human adenovirus B (HAdV-B)
caaguguuucuuga

SEQ ID NO: 3901726 - RNA, 15 nt, Human adenovirus B (HAdV-B)
caaucaccacacgau

SEQ ID NO: 3901727 - RNA, 17 nt, Human adenovirus B (HAdV-B)
caauccccacuggaggc

SEQ ID NO: 3901728 - RNA, 16 nt, Human adenovirus B (HAdV-B)
caaucugggaccuggu

SEQ ID NO: 3901729 - RNA, 20 nt, Human adenovirus B (HAdV-B)
caaugaggcuuucagagagg

SEQ ID NO: 3901730 - RNA, 23 nt, Human adenovirus B (HAdV-B)
cacaacccccacuacucccugcu

SEQ ID NO: 3901731 - RNA, 18 nt, Human adenovirus B (HAdV-B)
cacacugguggccaccuc

SEQ ID NO: 3901732 - RNA, 17 nt, Human adenovirus B (HAdV-B)
cacagcuuucuggucag

SEQ ID NO: 3901733 - RNA, 16 nt, Human adenovirus B (HAdV-B)
cacagggucuccagcu

SEQ ID NO: 3901734 - RNA, 21 nt, Human adenovirus B (HAdV-B)
cacccgcaugaauuggcucag

SEQ ID NO: 3901735 - RNA, 16 nt, Human adenovirus B (HAdV-B)
caccgacucucccagg

SEQ ID NO: 3901736 - RNA, 18 nt, Human adenovirus B (HAdV-B)
cacuaugcaacugauggu

SEQ ID NO: 3901737 - RNA, 21 nt, Human adenovirus B (HAdV-B)
cacuuagaagauacugagcag

SEQ ID NO: 3901738 - RNA, 20 nt, Human adenovirus B (HAdV-B)
cacuugaauucgggaaucac

SEQ ID NO: 3901739 - RNA, 16 nt, Human adenovirus B (HAdV-B)
cagaacccuacuagca

SEQ ID NO: 3901740 - RNA, 14 nt, Human adenovirus B (HAdV-B)
cagaaguacuggcu

SEQ ID NO: 3901741 - RNA, 18 nt, Human adenovirus B (HAdV-B)
cagaaguacuggcuaccu

SEQ ID NO: 3901742 - RNA, 18 nt, Human adenovirus B (HAdV-B)
cagaauggagugcuugaa

SEQ ID NO: 3901743 - RNA, 19 nt, Human adenovirus B (HAdV-B)
cagacgguaaaucugagcc

SEQ ID NO: 3901744 - RNA, 23 nt, Human adenovirus B (HAdV-B)
cagagcuuaagcauuccaccgcc

SEQ ID NO: 3901745 - RNA, 21 nt, Human adenovirus B (HAdV-B)
cagaggcauacaugccacaga

SEQ ID NO: 3901746 - RNA, 14 nt, Human adenovirus B (HAdV-B)
cagaggugcaaacc

SEQ ID NO: 3901747 - RNA, 22 nt, Human adenovirus B (HAdV-B)
cagagucggggucaagagcagg

SEQ ID NO: 3901748 - RNA, 14 nt, Human adenovirus B (HAdV-B)
cagauacuggaugu

SEQ ID NO: 3901749 - RNA, 22 nt, Human adenovirus B (HAdV-B)
cagcaccgaaaguuccucgcgg

SEQ ID NO: 3901750 - RNA, 17 nt, Human adenovirus B (HAdV-B)
cagcacuggacaugaca

SEQ ID NO: 3901751 - RNA, 15 nt, Human adenovirus B (HAdV-B)
cagcagacacaucac

SEQ ID NO: 3901752 - RNA, 14 nt, Human adenovirus B (HAdV-B)
cagcagcagcaggc

SEQ ID NO: 3901753 - RNA, 16 nt, Human adenovirus B (HAdV-B)
cagccaacgagccagc

SEQ ID NO: 3901754 - RNA, 17 nt, Human adenovirus B (HAdV-B)
cagcgugaugccaaccu

SEQ ID NO: 3901755 - RNA, 23 nt, Human adenovirus B (HAdV-B)
caggagaaauauucacuggaaca

SEQ ID NO: 3901756 - RNA, 21 nt, Human adenovirus B (HAdV-B)
caggcgacggcggugaugcaa

SEQ ID NO: 3901757 - RNA, 14 nt, Human adenovirus B (HAdV-B)
caggcuguccgugu

SEQ ID NO: 3901758 - RNA, 18 nt, Human adenovirus B (HAdV-B)
caguaacuacccuguggu

SEQ ID NO: 3901759 - RNA, 19 nt, Human adenovirus B (HAdV-B)
caguaacuuuuguaaaugu

SEQ ID NO: 3901760 - RNA, 16 nt, Human adenovirus B (HAdV-B)
caguagaugggacgag

SEQ ID NO: 3901761 - RNA, 12 nt, Human adenovirus B (HAdV-B)
caguggacggcu

SEQ ID NO: 3901762 - RNA, 15 nt, Human adenovirus B (HAdV-B)
cauagugcaggagcg

SEQ ID NO: 3901763 - RNA, 17 nt, Human adenovirus B (HAdV-B)
caucaguuaacgagaaa

SEQ ID NO: 3901764 - RNA, 15 nt, Human adenovirus B (HAdV-B)
caucgccggacagga

SEQ ID NO: 3901765 - RNA, 23 nt, Human adenovirus B (HAdV-B)
caugaacaugcaaaucuggaaga

SEQ ID NO: 3901766 - RNA, 15 nt, Human adenovirus B (HAdV-B)
caugacagacagagg

SEQ ID NO: 3901767 - RNA, 23 nt, Human adenovirus B (HAdV-B)
caugauggauauguggccugggg

SEQ ID NO: 3901768 - RNA, 22 nt, Human adenovirus B (HAdV-B)
cauguugguuggagccugagga

SEQ ID NO: 3901769 - RNA, 16 nt, Human adenovirus B (HAdV-B)
cauuaacuuugaugaa

SEQ ID NO: 3901770 - RNA, 15 nt, Human adenovirus B (HAdV-B)
cauuacccggacgag

SEQ ID NO: 3901771 - RNA, 23 nt, Human adenovirus B (HAdV-B)
cauuagggguguguuggacagag

SEQ ID NO: 3901772 - RNA, 14 nt, Human adenovirus B (HAdV-B)
ccaaacggaguucu

SEQ ID NO: 3901773 - RNA, 19 nt, Human adenovirus B (HAdV-B)
ccaaacuuauauugcaugg

SEQ ID NO: 3901774 - RNA, 15 nt, Human adenovirus B (HAdV-B)
ccacaacccccacua

SEQ ID NO: 3901775 - RNA, 23 nt, Human adenovirus B (HAdV-B)
ccacaacccccacuacucccugc

SEQ ID NO: 3901776 - RNA, 16 nt, Human adenovirus B (HAdV-B)
ccacaacgcacagccu

SEQ ID NO: 3901777 - RNA, 14 nt, Human adenovirus B (HAdV-B)
ccacacgauccaca

SEQ ID NO: 3901778 - RNA, 14 nt, Human adenovirus B (HAdV-B)
ccaccaccucuacc

SEQ ID NO: 3901779 - RNA, 16 nt, Human adenovirus B (HAdV-B)
ccagacgccaccgagc

SEQ ID NO: 3901780 - RNA, 14 nt, Human adenovirus B (HAdV-B)
ccagacgccgcacc

SEQ ID NO: 3901781 - RNA, 20 nt, Human adenovirus B (HAdV-B)
ccagggcacacguggcugca

SEQ ID NO: 3901782 - RNA, 14 nt, Human adenovirus B (HAdV-B)
ccaguuggaggauu

SEQ ID NO: 3901783 - RNA, 19 nt, Human adenovirus B (HAdV-B)
cccaacaacagccccccuc

SEQ ID NO: 3901784 - RNA, 17 nt, Human adenovirus B (HAdV-B)
cccaauuggcuccagca

SEQ ID NO: 3901785 - RNA, 17 nt, Human adenovirus B (HAdV-B)
cccaggacuacuccacc

SEQ ID NO: 3901786 - RNA, 14 nt, Human adenovirus B (HAdV-B)
cccccaaauuuaau

SEQ ID NO: 3901787 - RNA, 22 nt, Human adenovirus B (HAdV-B)
ccccuucuccggaucuccuggg

SEQ ID NO: 3901788 - RNA, 17 nt, Human adenovirus B (HAdV-B)
ccgauccaugcuucugg

SEQ ID NO: 3901789 - RNA, 14 nt, Human adenovirus B (HAdV-B)
ccgcaggaccugcu

SEQ ID NO: 3901790 - RNA, 21 nt, Human adenovirus B (HAdV-B)
ccgcccuaguguaccaggaaa

SEQ ID NO: 3901791 - RNA, 23 nt, Human adenovirus B (HAdV-B)
ccgcguucgggggugugcucccu

SEQ ID NO: 3901792 - RNA, 21 nt, Human adenovirus B (HAdV-B)
ccggauuuuacaaccagaaga

SEQ ID NO: 3901793 - RNA, 21 nt, Human adenovirus B (HAdV-B)
ccggccuggacccuccagugg

SEQ ID NO: 3901794 - RNA, 21 nt, Human adenovirus B (HAdV-B)
ccgguauaucgggcaggaugu

SEQ ID NO: 3901795 - RNA, 18 nt, Human adenovirus B (HAdV-B)
ccggucacuuugcagcaa

SEQ ID NO: 3901796 - RNA, 14 nt, Human adenovirus B (HAdV-B)
uuggaacagcagua

SEQ ID NO: 3901797 - RNA, 18 nt, Human adenovirus B (HAdV-B)
uuggauggaaaagcgugg

SEQ ID NO: 3901798 - RNA, 17 nt, Human adenovirus B (HAdV-B)
uuggcaauauugccgcc

SEQ ID NO: 3901799 - RNA, 13 nt, Human adenovirus B (HAdV-B)
uuggcuccagcaa

SEQ ID NO: 3901800 - RNA, 16 nt, Human adenovirus B (HAdV-B)
uugggacagucaggca

SEQ ID NO: 3901801 - RNA, 20 nt, Human adenovirus B (HAdV-B)
aaaaauuucccaaacaaugg

SEQ ID NO: 3901802 - RNA, 18 nt, Human adenovirus B (HAdV-B)
aaacccaacacacacccc

SEQ ID NO: 3901803 - RNA, 20 nt, Human adenovirus B (HAdV-B)
aaagaauguaucauucccug

SEQ ID NO: 3901804 - RNA, 18 nt, Human adenovirus B (HAdV-B)
aaaggcgcgcguccaggc

SEQ ID NO: 3901805 - RNA, 21 nt, Human adenovirus B (HAdV-B)
aaaugggauuggcggcaggcg

SEQ ID NO: 3901806 - RNA, 21 nt, Human adenovirus B (HAdV-B)
aaauguuuaaccccacuaaca

SEQ ID NO: 3901807 - RNA, 19 nt, Human adenovirus B (HAdV-B)
aacaccguuucuggggcgg

SEQ ID NO: 3901808 - RNA, 22 nt, Human adenovirus B (HAdV-B)
aacaggaauuuuugacaugaac

SEQ ID NO: 3901809 - RNA, 16 nt, Human adenovirus B (HAdV-B)
aaccaggggguccacc

SEQ ID NO: 3901810 - RNA, 22 nt, Human adenovirus B (HAdV-B)
aaccgucuaucggccaucaugg

SEQ ID NO: 3901811 - RNA, 11 nt, Human adenovirus B (HAdV-B)
aaccugacccc

SEQ ID NO: 3901812 - RNA, 19 nt, Human adenovirus B (HAdV-B)
aacugaauuaagacucucc

SEQ ID NO: 3901813 - RNA, 16 nt, Human adenovirus B (HAdV-B)
aacugcuuagccagaa

SEQ ID NO: 3901814 - RNA, 22 nt, Human adenovirus B (HAdV-B)
aacuggauuuccugccaccagu

SEQ ID NO: 3901815 - RNA, 23 nt, Human adenovirus B (HAdV-B)
aacuuauauugcaugguuguagc

SEQ ID NO: 3901816 - RNA, 13 nt, Human adenovirus B (HAdV-B)
aagaggcggauga

SEQ ID NO: 3901817 - RNA, 15 nt, Human adenovirus B (HAdV-B)
aagcaacgaagcuug

SEQ ID NO: 3901818 - RNA, 20 nt, Human adenovirus B (HAdV-B)
aagcucuaaagugacucucc

SEQ ID NO: 3901819 - RNA, 18 nt, Human adenovirus B (HAdV-B)
aaggcgcauugccagacg

SEQ ID NO: 3901820 - RNA, 14 nt, Human adenovirus B (HAdV-B)
aaggcuacaacgua

SEQ ID NO: 3901821 - RNA, 23 nt, Human adenovirus B (HAdV-B)
aagggagaaaauggcauggauga

SEQ ID NO: 3901822 - RNA, 18 nt, Human adenovirus B (HAdV-B)
aaguccuggcgggggcau

SEQ ID NO: 3901823 - RNA, 18 nt, Human adenovirus B (HAdV-B)
aagugccaccacaccacu

SEQ ID NO: 3901824 - RNA, 18 nt, Human adenovirus B (HAdV-B)
aaguuuaaaacugacccc

SEQ ID NO: 3901825 - RNA, 16 nt, Human adenovirus B (HAdV-B)
aauaauucuacaacuu

SEQ ID NO: 3901826 - RNA, 21 nt, Human adenovirus B (HAdV-B)
aauacauacucuuacaaagug

SEQ ID NO: 3901827 - RNA, 17 nt, Human adenovirus B (HAdV-B)
aauccaauccacacauu

SEQ ID NO: 3901828 - RNA, 16 nt, Human adenovirus B (HAdV-B)
ugauuaaacaacagca

SEQ ID NO: 3901829 - RNA, 20 nt, Human adenovirus B (HAdV-B)
ugcaacgaauuuucucccag

SEQ ID NO: 3901830 - RNA, 21 nt, Human adenovirus B (HAdV-B)
ugcaacgaauuuucucccagc

SEQ ID NO: 3901831 - RNA, 17 nt, Human adenovirus B (HAdV-B)
ugcagcagcagcaggcg

SEQ ID NO: 3901832 - RNA, 18 nt, Human adenovirus B (HAdV-B)
ugcagccaugaggccaca

SEQ ID NO: 3901833 - RNA, 19 nt, Human adenovirus B (HAdV-B)
ugcaggagcggagccuggg

SEQ ID NO: 3901834 - RNA, 16 nt, Human adenovirus B (HAdV-B)
ugcaggcacuucagcu

SEQ ID NO: 3901835 - RNA, 14 nt, Human adenovirus B (HAdV-B)
ugcaguggcagccu

SEQ ID NO: 3901836 - RNA, 16 nt, Human adenovirus B (HAdV-B)
ugcauuauuggacaga

SEQ ID NO: 3901837 - RNA, 15 nt, Human adenovirus B (HAdV-B)
ugccaagauagcuuu

SEQ ID NO: 3901838 - RNA, 22 nt, Human adenovirus B (HAdV-B)
ugccagcacggugggaucugca

SEQ ID NO: 3901839 - RNA, 14 nt, Human adenovirus B (HAdV-B)
ugccccccgccgcu

SEQ ID NO: 3901840 - RNA, 16 nt, Human adenovirus B (HAdV-B)
ugccuaugagaacagu

SEQ ID NO: 3901841 - RNA, 19 nt, Human adenovirus B (HAdV-B)
ugccuuaccaguguaacau

SEQ ID NO: 3901842 - RNA, 23 nt, Human adenovirus B (HAdV-B)
ugcgccugcuugggcgcuugcca

SEQ ID NO: 3901843 - RNA, 15 nt, Human adenovirus B (HAdV-B)
ugcuaaagguuucau

SEQ ID NO: 3901844 - RNA, 14 nt, Human adenovirus B (HAdV-B)
ugcuauuccaccau

SEQ ID NO: 3901845 - RNA, 18 nt, Human adenovirus B (HAdV-B)
ugcuuaaccgaagagcaa

SEQ ID NO: 3901846 - RNA, 12 nt, Human adenovirus B (HAdV-B)
ugcuugaaagug

SEQ ID NO: 3901847 - RNA, 20 nt, Human adenovirus B (HAdV-B)
uggaagacugauggcacaac

SEQ ID NO: 3901848 - RNA, 22 nt, Human adenovirus B (HAdV-B)
uggaagucuacccguuucuugu

SEQ ID NO: 3901849 - RNA, 15 nt, Human adenovirus B (HAdV-B)
uggaaugcucccaau

SEQ ID NO: 3901850 - RNA, 17 nt, Human adenovirus B (HAdV-B)
uggaggaggaacagcaa

SEQ ID NO: 3901851 - RNA, 12 nt, Human adenovirus B (HAdV-B)
uggcaaugcuga

SEQ ID NO: 3901852 - RNA, 20 nt, Human adenovirus B (HAdV-B)
uggcagcaauguuuagaaga

SEQ ID NO: 3901853 - RNA, 21 nt, Human adenovirus B (HAdV-B)
uggccauuguguucuccuagg

SEQ ID NO: 3901854 - RNA, 15 nt, Human adenovirus B (HAdV-B)
ugggacaggaagaca

SEQ ID NO: 3901855 - RNA, 21 nt, Human adenovirus B (HAdV-B)
ugggacaggaagacacuggca

SEQ ID NO: 3901856 - RNA, 11 nt, Human adenovirus B (HAdV-B)
ugggaccuggu

SEQ ID NO: 3901857 - RNA, 20 nt, Human adenovirus B (HAdV-B)
ugggauuguuucugaugcaa

SEQ ID NO: 3901858 - RNA, 16 nt, Human adenovirus B (HAdV-B)
ugggucuucuccuggg

SEQ ID NO: 3901859 - RNA, 17 nt, Human adenovirus B (HAdV-B)
ugguguugcacaauauc

SEQ ID NO: 3901860 - RNA, 16 nt, Human adenovirus B (HAdV-B)
uguuacauaucuggaa

SEQ ID NO: 3901861 - RNA, 21 nt, Human adenovirus B (HAdV-B)
uguuggacagaggucccaguu

SEQ ID NO: 3901862 - RNA, 20 nt, Human adenovirus B (HAdV-B)
uuacugugcguaugcauaca

SEQ ID NO: 3901863 - RNA, 19 nt, Human adenovirus B (HAdV-B)
uuauaauggaauaguguuu

SEQ ID NO: 3901864 - RNA, 14 nt, Human adenovirus B (HAdV-B)
uucacucaaaucuu

SEQ ID NO: 3901865 - RNA, 13 nt, Human adenovirus B (HAdV-B)
uucacuuccgcaa

SEQ ID NO: 3901866 - RNA, 22 nt, Human adenovirus B (HAdV-B)
uuccacccuugaagccaugcug

SEQ ID NO: 3901867 - RNA, 19 nt, Human adenovirus B (HAdV-B)
uuccagccuugaauuauuc

SEQ ID NO: 3901868 - RNA, 21 nt, Human adenovirus B (HAdV-B)
uucccgaacccaaccagcgcu

SEQ ID NO: 3901869 - RNA, 16 nt, Human adenovirus B (HAdV-B)
uucgugcaggugagga

SEQ ID NO: 3901870 - RNA, 16 nt, Human adenovirus B (HAdV-B)
uucucuagcagcagug

SEQ ID NO: 3901871 - RNA, 13 nt, Human adenovirus B (HAdV-B)
uugaaacgcuuuc

SEQ ID NO: 3901872 - RNA, 18 nt, Human adenovirus B (HAdV-B)
uugcagcacugaaacacc

SEQ ID NO: 3901873 - RNA, 18 nt, Human adenovirus B (HAdV-B)
uugcuccugugucaccug

SEQ ID NO: 3901874 - RNA, 13 nt, Human adenovirus B (HAdV-B)
uugcuucccuacg

SEQ ID NO: 3901875 - RNA, 11 nt, Human adenovirus B (HAdV-B)
uuggaggagga

SEQ ID NO: 3901876 - RNA, 19 nt, Human adenovirus B (HAdV-B)
uugggcgcuugccagggug

SEQ ID NO: 3901877 - RNA, 18 nt, Human adenovirus B (HAdV-B)
uuugaagcucuuaauuug

SEQ ID NO: 3901878 - RNA, 16 nt, Human adenovirus B (HAdV-B)
uuuggaccgaagacga

SEQ ID NO: 3901879 - RNA, 23 nt, Human adenovirus B (HAdV-B)
uuuggggucuggauuugaccccu

SEQ ID NO: 3901880 - RNA, 14 nt, Human adenovirus B (HAdV-B)
cuagaccacugccg

SEQ ID NO: 3901881 - RNA, 17 nt, Human adenovirus B (HAdV-B)
cuagagagagaggauga

SEQ ID NO: 3901882 - RNA, 16 nt, Human adenovirus B (HAdV-B)
cuaggcggagcggugg

SEQ ID NO: 3901883 - RNA, 14 nt, Human adenovirus B (HAdV-B)
cuagucacugcauu

SEQ ID NO: 3901884 - RNA, 18 nt, Human adenovirus B (HAdV-B)
cuagugaucgcacugcuu

SEQ ID NO: 3901885 - RNA, 21 nt, Human adenovirus B (HAdV-B)
cucaaugcuucuuuugccauc

SEQ ID NO: 3901886 - RNA, 15 nt, Human adenovirus B (HAdV-B)
cuccacagccccuac

SEQ ID NO: 3901887 - RNA, 16 nt, Human adenovirus B (HAdV-B)
cucccaagcagacacc

SEQ ID NO: 3901888 - RNA, 17 nt, Human adenovirus B (HAdV-B)
cucccgacggugcugca

SEQ ID NO: 3901889 - RNA, 15 nt, Human adenovirus B (HAdV-B)
acuacuuucaaaacc

SEQ ID NO: 3901890 - RNA, 17 nt, Human adenovirus B (HAdV-B)
acucaagcgaagcaucg

SEQ ID NO: 3901891 - RNA, 11 nt, Human adenovirus B (HAdV-B)
acugcuggacu

SEQ ID NO: 3901892 - RNA, 14 nt, Human adenovirus B (HAdV-B)
acuuacuugaaauc

SEQ ID NO: 3901893 - RNA, 13 nt, Human adenovirus B (HAdV-B)
acuuauauugcau

SEQ ID NO: 3901894 - RNA, 22 nt, Human adenovirus B (HAdV-B)
acuuuuaagaagguuuccauca

SEQ ID NO: 3901895 - RNA, 18 nt, Human adenovirus B (HAdV-B)
agaaaauggcauggauga

SEQ ID NO: 3901896 - RNA, 16 nt, Human adenovirus B (HAdV-B)
agaacagaacuugaaa

SEQ ID NO: 3901897 - RNA, 15 nt, Human adenovirus B (HAdV-B)
agaacaguaaagcug

SEQ ID NO: 3901898 - RNA, 22 nt, Human adenovirus B (HAdV-B)
agaagaggcggaugaaggcgag

SEQ ID NO: 3901899 - RNA, 14 nt, Human adenovirus B (HAdV-B)
agaauuucuacuga

SEQ ID NO: 3901900 - RNA, 14 nt, Human adenovirus B (HAdV-B)
agacacggcuuugu

SEQ ID NO: 3901901 - RNA, 23 nt, Human adenovirus B (HAdV-B)
agacagucgcucauagucaagga

SEQ ID NO: 3901902 - RNA, 12 nt, Human adenovirus B (HAdV-B)
agacauggaaac

SEQ ID NO: 3901903 - RNA, 19 nt, Human adenovirus B (HAdV-B)
agacgaugggcguccagcg

SEQ ID NO: 3901904 - RNA, 16 nt, Human adenovirus B (HAdV-B)
agauaauuacuugaaa

SEQ ID NO: 3901905 - RNA, 13 nt, Human adenovirus B (HAdV-B)
agaucggacaggg

SEQ ID NO: 3901906 - RNA, 22 nt, Human adenovirus B (HAdV-B)
agcaggggacgcuacagugcag

SEQ ID NO: 3901907 - RNA, 19 nt, Human adenovirus B (HAdV-B)
agccaaucaccacacgauc

SEQ ID NO: 3901908 - RNA, 17 nt, Human adenovirus B (HAdV-B)
agcggagacggcuugcu

SEQ ID NO: 3901909 - RNA, 19 nt, Human adenovirus B (HAdV-B)
agcucauaggagcuggcuu

SEQ ID NO: 3901910 - RNA, 16 nt, Human adenovirus B (HAdV-B)
agcugcugcagaagcu

SEQ ID NO: 3901911 - RNA, 17 nt, Human adenovirus B (HAdV-B)
aggacagucuggaggac

SEQ ID NO: 3901912 - RNA, 21 nt, Human adenovirus B (HAdV-B)
aggacguuuuggagaaaguaa

SEQ ID NO: 3901913 - RNA, 19 nt, Human adenovirus B (HAdV-B)
aggagccgaaaucuugaaa

SEQ ID NO: 3901914 - RNA, 16 nt, Human adenovirus B (HAdV-B)
aggaggacagucugga

SEQ ID NO: 3901915 - RNA, 13 nt, Human adenovirus B (HAdV-B)
aggaggcggagga

SEQ ID NO: 3901916 - RNA, 17 nt, Human adenovirus B (HAdV-B)
aggaggcggaggaggac

SEQ ID NO: 3901917 - RNA, 13 nt, Human adenovirus B (HAdV-B)
aggcagaggaggc

SEQ ID NO: 3901918 - RNA, 19 nt, Human adenovirus B (HAdV-B)
aggccccagcagccaaggc

SEQ ID NO: 3901919 - RNA, 15 nt, Human adenovirus B (HAdV-B)
aggccuuaucaaaug

SEQ ID NO: 3901920 - RNA, 16 nt, Human adenovirus B (HAdV-B)
aggucaauuacaaaga

SEQ ID NO: 3901921 - RNA, 15 nt, Human adenovirus B (HAdV-B)
agguccguugaaauu

SEQ ID NO: 3901922 - RNA, 17 nt, Human adenovirus B (HAdV-B)
aggucucuguugaaauu

SEQ ID NO: 3901923 - RNA, 14 nt, Human adenovirus B (HAdV-B)
aguaacuugcaaca

SEQ ID NO: 3901924 - RNA, 21 nt, Human adenovirus B (HAdV-B)
aguaugcaaacacaugucacc

SEQ ID NO: 3901925 - RNA, 21 nt, Human adenovirus B (HAdV-B)
agucaugacggcggucaugga

SEQ ID NO: 3901926 - RNA, 12 nt, Human adenovirus B (HAdV-B)
agucuggaggaa

SEQ ID NO: 3901927 - RNA, 12 nt, Human adenovirus B (HAdV-B)
agugcaggagcg

SEQ ID NO: 3901928 - RNA, 20 nt, Human adenovirus B (HAdV-B)
agugcuggauauggccagca

SEQ ID NO: 3901929 - RNA, 17 nt, Human adenovirus B (HAdV-B)
agugcuugaaagugaca

SEQ ID NO: 3901930 - RNA, 23 nt, Human adenovirus B (HAdV-B)
aguggucagugaugagcagcuaa

SEQ ID NO: 3901931 - RNA, 21 nt, Human adenovirus B (HAdV-B)
aguugaaggugcagccgccgc

SEQ ID NO: 3901932 - RNA, 16 nt, Human adenovirus B (HAdV-B)
cagccgccgcccccag

SEQ ID NO: 3901933 - RNA, 18 nt, Human adenovirus B (HAdV-B)
cagccgccgcccccagaa

SEQ ID NO: 3901934 - RNA, 17 nt, Human adenovirus B (HAdV-B)
cagcuaacccgauggcu

SEQ ID NO: 3901935 - RNA, 16 nt, Human adenovirus B (HAdV-B)
cagcuccgccagucca

SEQ ID NO: 3901936 - RNA, 14 nt, Human adenovirus B (HAdV-B)
cagcugcugcagaa

SEQ ID NO: 3901937 - RNA, 23 nt, Human adenovirus B (HAdV-B)
caggacuacuccacccgcaugaa

SEQ ID NO: 3901938 - RNA, 19 nt, Human adenovirus B (HAdV-B)
caggccucuucuccagugg

SEQ ID NO: 3901939 - RNA, 14 nt, Human adenovirus B (HAdV-B)
caggcgccucccag

SEQ ID NO: 3901940 - RNA, 16 nt, Human adenovirus B (HAdV-B)
cagggaacugaugcac

SEQ ID NO: 3901941 - RNA, 18 nt, Human adenovirus B (HAdV-B)
cagguuguaucuggugga

SEQ ID NO: 3901942 - RNA, 13 nt, Human adenovirus B (HAdV-B)
caguacaggacag

SEQ ID NO: 3901943 - RNA, 15 nt, Human adenovirus B (HAdV-B)
caguacaggacaggc

SEQ ID NO: 3901944 - RNA, 13 nt, Human adenovirus B (HAdV-B)
cagucaggcagag

SEQ ID NO: 3901945 - RNA, 22 nt, Human adenovirus B (HAdV-B)
cagugguugacuugcaggacag

SEQ ID NO: 3901946 - RNA, 13 nt, Human adenovirus B (HAdV-B)
caguguggaagag

SEQ ID NO: 3901947 - RNA, 22 nt, Human adenovirus B (HAdV-B)
cauaaaggugauccauuacuua

SEQ ID NO: 3901948 - RNA, 17 nt, Human adenovirus B (HAdV-B)
cauaaaugcaugcaucu

SEQ ID NO: 3901949 - RNA, 20 nt, Human adenovirus B (HAdV-B)
cauaggacccccaaucacuu

SEQ ID NO: 3901950 - RNA, 19 nt, Human adenovirus B (HAdV-B)
cauauuuuuugaugcguuu

SEQ ID NO: 3901951 - RNA, 20 nt, Human adenovirus B (HAdV-B)
cauccaaaaaucccgccaag

SEQ ID NO: 3901952 - RNA, 20 nt, Human adenovirus B (HAdV-B)
caucgcgcgguuagcgccag

SEQ ID NO: 3901953 - RNA, 17 nt, Human adenovirus B (HAdV-B)
caucuacuucgaacucc

SEQ ID NO: 3901954 - RNA, 17 nt, Human adenovirus B (HAdV-B)
caucuagaccacugccg

SEQ ID NO: 3901955 - RNA, 14 nt, Human adenovirus B (HAdV-B)
caugaaagccuuug

SEQ ID NO: 3901956 - RNA, 14 nt, Human adenovirus B (HAdV-B)
caugacagacagag

SEQ ID NO: 3901957 - RNA, 19 nt, Human adenovirus B (HAdV-B)
caugccuuucucccaagca

SEQ ID NO: 3901958 - RNA, 14 nt, Human adenovirus B (HAdV-B)
cauguaugcagaaa

SEQ ID NO: 3901959 - RNA, 15 nt, Human adenovirus B (HAdV-B)
cauuauuggacagaa

SEQ ID NO: 3901960 - RNA, 18 nt, Human adenovirus B (HAdV-B)
cauuauuggccgaugugu

SEQ ID NO: 3901961 - RNA, 11 nt, Human adenovirus B (HAdV-B)
cauucagaacc

SEQ ID NO: 3901962 - RNA, 13 nt, Human adenovirus B (HAdV-B)
cauuugugcauuu

SEQ ID NO: 3901963 - RNA, 19 nt, Human adenovirus B (HAdV-B)
ccaacaccgcucccccagc

SEQ ID NO: 3901964 - RNA, 23 nt, Human adenovirus B (HAdV-B)
ccaacucuugcuugacucucugg

SEQ ID NO: 3901965 - RNA, 15 nt, Human adenovirus B (HAdV-B)
ccacaacgcacagcc

SEQ ID NO: 3901966 - RNA, 14 nt, Human adenovirus B (HAdV-B)
ccaccacaccacuc

SEQ ID NO: 3901967 - RNA, 15 nt, Human adenovirus B (HAdV-B)
ccacgagugccauca

SEQ ID NO: 3901968 - RNA, 18 nt, Human adenovirus B (HAdV-B)
ccagaggugcaaaccucu

SEQ ID NO: 3901969 - RNA, 22 nt, Human adenovirus B (HAdV-B)
gcgcgguuagcgccagcaggag

SEQ ID NO: 3901970 - RNA, 11 nt, Human adenovirus B (HAdV-B)
gcgcuccagcc

SEQ ID NO: 3901971 - RNA, 22 nt, Human adenovirus B (HAdV-B)
gcggcaggcgccucccaggacu

SEQ ID NO: 3901972 - RNA, 19 nt, Human adenovirus B (HAdV-B)
gcggucaggcaaaacaaaa

SEQ ID NO: 3901973 - RNA, 13 nt, Human adenovirus B (HAdV-B)
gcguguuggauug

SEQ ID NO: 3901974 - RNA, 17 nt, Human adenovirus B (HAdV-B)
gcuagaucugaguuggc

SEQ ID NO: 3901975 - RNA, 12 nt, Human adenovirus B (HAdV-B)
gcucaccagaag

SEQ ID NO: 3901976 - RNA, 16 nt, Human adenovirus B (HAdV-B)
gcucuauaucucccag

SEQ ID NO: 3901977 - RNA, 22 nt, Human adenovirus B (HAdV-B)
gcugaaauuacaaaagaaggac

SEQ ID NO: 3901978 - RNA, 14 nt, Human adenovirus B (HAdV-B)
gcugcgcacugccc

SEQ ID NO: 3901979 - RNA, 14 nt, Human adenovirus B (HAdV-B)
gcugucucaacccc

SEQ ID NO: 3901980 - RNA, 20 nt, Human adenovirus B (HAdV-B)
gcuguguacucccagcagcu

SEQ ID NO: 3901981 - RNA, 14 nt, Human adenovirus B (HAdV-B)
gcuguuucuggugg

SEQ ID NO: 3901982 - RNA, 15 nt, Human adenovirus B (HAdV-B)
ggaacagcaagagga

SEQ ID NO: 3901983 - RNA, 16 nt, Human adenovirus B (HAdV-B)
ggacaggaagacacug

SEQ ID NO: 3901984 - RNA, 16 nt, Human adenovirus B (HAdV-B)
ggacagucaggcagag

SEQ ID NO: 3901985 - RNA, 18 nt, Human adenovirus B (HAdV-B)
ggacagucuggaggaaga

SEQ ID NO: 3901986 - RNA, 16 nt, Human adenovirus B (HAdV-B)
ggacgauuggacccag

SEQ ID NO: 3901987 - RNA, 15 nt, Human adenovirus B (HAdV-B)
ggaggagaggauccu

SEQ ID NO: 3901988 - RNA, 15 nt, Human adenovirus B (HAdV-B)
ggauuggcggcaggc

SEQ ID NO: 3901989 - RNA, 23 nt, Human adenovirus B (HAdV-B)
ggcaaaguuuaaaacugaccccg

SEQ ID NO: 3901990 - RNA, 20 nt, Human adenovirus B (HAdV-B)
ggcacacguggcugcagcca

SEQ ID NO: 3901991 - RNA, 21 nt, Human adenovirus B (HAdV-B)
ggcauggguguauggcagcaa

SEQ ID NO: 3901992 - RNA, 21 nt, Human adenovirus B (HAdV-B)
ggcauuaacuccucggacgau

SEQ ID NO: 3901993 - RNA, 14 nt, Human adenovirus B (HAdV-B)
ggccccagcagcca

SEQ ID NO: 3901994 - RNA, 18 nt, Human adenovirus B (HAdV-B)
ggcgacggcggugaugca

SEQ ID NO: 3901995 - RNA, 17 nt, Human adenovirus B (HAdV-B)
ggcuugcuggaguguca

SEQ ID NO: 3901996 - RNA, 17 nt, Human adenovirus B (HAdV-B)
ggcuuugugcggcaggc

SEQ ID NO: 3901997 - RNA, 23 nt, Human adenovirus B (HAdV-B)
gggcccauacuagucuugcuugu

SEQ ID NO: 3901998 - RNA, 11 nt, Human adenovirus B (HAdV-B)
ggggagugcau

SEQ ID NO: 3901999 - RNA, 18 nt, Human adenovirus B (HAdV-B)
ggggucaaaaacaaguuu

SEQ ID NO: 3902000 - RNA, 19 nt, Human adenovirus B (HAdV-B)
ggguuuauuuccccaaaug

SEQ ID NO: 3902001 - RNA, 14 nt, Human adenovirus B (HAdV-B)
gguacaacacauua

SEQ ID NO: 3902002 - RNA, 22 nt, Human adenovirus B (HAdV-B)
ggucuccaugaguucguguccu

SEQ ID NO: 3902003 - RNA, 12 nt, Human adenovirus B (HAdV-B)
ggugagugcaga

SEQ ID NO: 3902004 - RNA, 18 nt, Human adenovirus B (HAdV-B)
gguggaacacgaggaaga

SEQ ID NO: 3902005 - RNA, 14 nt, Human adenovirus B (HAdV-B)
gguggcaugagguu

SEQ ID NO: 3902006 - RNA, 15 nt, Human adenovirus B (HAdV-B)
ggugggugcagagcu

SEQ ID NO: 3902007 - RNA, 22 nt, Human adenovirus B (HAdV-B)
guacgagagcgugaugcagcag

SEQ ID NO: 3902008 - RNA, 16 nt, Human adenovirus B (HAdV-B)
guacguagcagcgaag

SEQ ID NO: 3902009 - RNA, 18 nt, Human adenovirus B (HAdV-B)
guacuggugacagaugcg

SEQ ID NO: 3902010 - RNA, 21 nt, Human adenovirus B (HAdV-B)
guagaagaaccugaccccaca

SEQ ID NO: 3902011 - RNA, 13 nt, Human adenovirus B (HAdV-B)
guagagcgagccg

SEQ ID NO: 3902012 - RNA, 20 nt, Human adenovirus B (HAdV-B)
guagucgguauggaagcagu

SEQ ID NO: 3902013 - RNA, 15 nt, Human adenovirus B (HAdV-B)
guaucaaggcucugc

SEQ ID NO: 3902014 - RNA, 18 nt, Human adenovirus B (HAdV-B)
guaucauucccugcagaa

SEQ ID NO: 3902015 - RNA, 20 nt, Human adenovirus B (HAdV-B)
guaucauucccugcagaaau

SEQ ID NO: 3902016 - RNA, 17 nt, Human adenovirus B (HAdV-B)
gucacuuugcagcaagu

SEQ ID NO: 3902017 - RNA, 21 nt, Human adenovirus B (HAdV-B)
gucgcuuccgaccuggcagac

SEQ ID NO: 3902018 - RNA, 13 nt, Human adenovirus B (HAdV-B)
gucuaucuguacc

SEQ ID NO: 3902019 - RNA, 15 nt, Human adenovirus B (HAdV-B)
gucucugaccaugac

SEQ ID NO: 3902020 - RNA, 17 nt, Human adenovirus B (HAdV-B)
gucugcgcgcuccaagc

SEQ ID NO: 3902021 - RNA, 14 nt, Human adenovirus B (HAdV-B)
gugcacgccccacc

SEQ ID NO: 3902022 - RNA, 17 nt, Human adenovirus B (HAdV-B)
gugcaggagcggagccu

SEQ ID NO: 3902023 - RNA, 17 nt, Human adenovirus B (HAdV-B)
gugcgcacccguccccc

SEQ ID NO: 3902024 - RNA, 22 nt, Human adenovirus B (HAdV-B)
gugcuggugggcauuguaauau

SEQ ID NO: 3902025 - RNA, 13 nt, Human adenovirus B (HAdV-B)
guuauuagaugcu

SEQ ID NO: 3902026 - RNA, 19 nt, Human adenovirus B (HAdV-B)
guuccugcucucacagauc

SEQ ID NO: 3902027 - RNA, 18 nt, Human adenovirus B (HAdV-B)
guugaaggugcagccgcc

SEQ ID NO: 3902028 - RNA, 19 nt, Human adenovirus B (HAdV-B)
guugaucaccugggcagcu

SEQ ID NO: 3902029 - RNA, 16 nt, Human adenovirus B (HAdV-B)
guugcuaacgcuggag

SEQ ID NO: 3902030 - RNA, 16 nt, Human adenovirus B (HAdV-B)
guuggauugccacagc

SEQ ID NO: 3902031 - RNA, 14 nt, Human adenovirus B (HAdV-B)
uaacagugcaggca

SEQ ID NO: 3902032 - RNA, 15 nt, Human adenovirus B (HAdV-B)
uaacagugcaggcag

SEQ ID NO: 3902033 - RNA, 19 nt, Human adenovirus B (HAdV-B)
uaaccccacuaacaaccac

SEQ ID NO: 3902034 - RNA, 19 nt, Human adenovirus B (HAdV-B)
uaacgcuggagaggucaga

SEQ ID NO: 3902035 - RNA, 14 nt, Human adenovirus B (HAdV-B)
uaagaaugccauca

SEQ ID NO: 3902036 - RNA, 20 nt, Human adenovirus B (HAdV-B)
uaagauucccacugaaagua

SEQ ID NO: 3902037 - RNA, 14 nt, Human adenovirus B (HAdV-B)
uaagcauuccaccg

SEQ ID NO: 3902038 - RNA, 22 nt, Human adenovirus B (HAdV-B)
uaauaugcuggcuacugugcau

SEQ ID NO: 3902039 - RNA, 12 nt, Human adenovirus B (HAdV-B)
uaaugccagacu

SEQ ID NO: 3902040 - RNA, 21 nt, Human adenovirus B (HAdV-B)
uacaaaagaaggacucccagu

SEQ ID NO: 3902041 - RNA, 22 nt, Human adenovirus B (HAdV-B)
uacaauuauggcgaucccgaaa

SEQ ID NO: 3902042 - RNA, 19 nt, Human adenovirus B (HAdV-B)
uacacacaauaacaaaacc

SEQ ID NO: 3902043 - RNA, 14 nt, Human adenovirus B (HAdV-B)
uacaccgcuuuucc

SEQ ID NO: 3902044 - RNA, 16 nt, Human adenovirus B (HAdV-B)
uacauggguauucugc

SEQ ID NO: 3902045 - RNA, 17 nt, Human adenovirus B (HAdV-B)
uaccugauauagcuucc

SEQ ID NO: 3902046 - RNA, 22 nt, Human adenovirus B (HAdV-B)
uacgcugucucaaccccagcug

SEQ ID NO: 3902047 - RNA, 14 nt, Human adenovirus B (HAdV-B)
uacucccagcagcu

SEQ ID NO: 3902048 - RNA, 16 nt, Human adenovirus B (HAdV-B)
uacuugaaaucagcaa

SEQ ID NO: 3902049 - RNA, 14 nt, Human adenovirus B (HAdV-B)
uacuuuaaaauguu

SEQ ID NO: 3902050 - RNA, 15 nt, Human adenovirus B (HAdV-B)
uagcgccagcaggag

SEQ ID NO: 3902051 - RNA, 16 nt, Human adenovirus B (HAdV-B)
uagcugaaacccacug

SEQ ID NO: 3902052 - RNA, 14 nt, Human adenovirus B (HAdV-B)
uagcuugcaacccc

SEQ ID NO: 3902053 - RNA, 15 nt, Human adenovirus B (HAdV-B)
uagcuuugaggccug

SEQ ID NO: 3902054 - RNA, 15 nt, Human adenovirus B (HAdV-B)
uaggcugauugccac

SEQ ID NO: 3902055 - RNA, 20 nt, Human adenovirus B (HAdV-B)
uagucaccuccccauuuacc

SEQ ID NO: 3902056 - RNA, 13 nt, Human adenovirus B (HAdV-B)
uagugcaggagcg

SEQ ID NO: 3902057 - RNA, 16 nt, Human adenovirus B (HAdV-B)
uagugccuucccgcuc

SEQ ID NO: 3902058 - RNA, 18 nt, Human adenovirus B (HAdV-B)
uauagcuuccuuggaaga

SEQ ID NO: 3902059 - RNA, 21 nt, Human adenovirus B (HAdV-B)
uauagcuuccuuggaagaggu

SEQ ID NO: 3902060 - RNA, 14 nt, Human adenovirus B (HAdV-B)
uauauauacacaag

SEQ ID NO: 3902061 - RNA, 22 nt, Human adenovirus B (HAdV-B)
uaugaagaugaaagcaccuccc

SEQ ID NO: 3902062 - RNA, 14 nt, Human adenovirus B (HAdV-B)
uauggagcccagca

SEQ ID NO: 3902063 - RNA, 12 nt, Human adenovirus B (HAdV-B)
ucaacauccagg

SEQ ID NO: 3902064 - RNA, 15 nt, Human adenovirus B (HAdV-B)
ucaaccccagguaga

SEQ ID NO: 3902065 - RNA, 19 nt, Human adenovirus B (HAdV-B)
ucaacgguggcuuccagca

SEQ ID NO: 3902066 - RNA, 18 nt, Human adenovirus B (HAdV-B)
ucaccccucgucaggcug

SEQ ID NO: 3902067 - RNA, 18 nt, Human adenovirus B (HAdV-B)
ucagaccgucagccaugg

SEQ ID NO: 3902068 - RNA, 23 nt, Human adenovirus B (HAdV-B)
ucagaugucaccugcggagcaga

SEQ ID NO: 3902069 - RNA, 15 nt, Human adenovirus B (HAdV-B)
ucaggguuacuuugc

SEQ ID NO: 3902070 - RNA, 13 nt, Human adenovirus B (HAdV-B)
ucaguguggaaga

SEQ ID NO: 3902071 - RNA, 22 nt, Human adenovirus B (HAdV-B)
ucauagauaauuacuugaaagu

SEQ ID NO: 3902072 - RNA, 19 nt, Human adenovirus B (HAdV-B)
acaaugaggcuuucagaga

SEQ ID NO: 3902073 - RNA, 15 nt, Human adenovirus B (HAdV-B)
acaccuacgacuaca

SEQ ID NO: 3902074 - RNA, 20 nt, Human adenovirus B (HAdV-B)
acaccuugcuucacuuucuu

SEQ ID NO: 3902075 - RNA, 13 nt, Human adenovirus B (HAdV-B)
acagcagagacaa

SEQ ID NO: 3902076 - RNA, 17 nt, Human adenovirus B (HAdV-B)
acagcugcugcagaagc

SEQ ID NO: 3902077 - RNA, 16 nt, Human adenovirus B (HAdV-B)
acaguaaaggaagagc

SEQ ID NO: 3902078 - RNA, 17 nt, Human adenovirus B (HAdV-B)
acaguauggugaacacc

SEQ ID NO: 3902079 - RNA, 19 nt, Human adenovirus B (HAdV-B)
acaguuucacauuccacca

SEQ ID NO: 3902080 - RNA, 14 nt, Human adenovirus B (HAdV-B)
acaguuucacuucc

SEQ ID NO: 3902081 - RNA, 17 nt, Human adenovirus B (HAdV-B)
acaucacuuccaugccu

SEQ ID NO: 3902082 - RNA, 14 nt, Human adenovirus B (HAdV-B)
accacugccaugcg

SEQ ID NO: 3902083 - RNA, 15 nt, Human adenovirus B (HAdV-B)
accagacaaaguaca

SEQ ID NO: 3902084 - RNA, 14 nt, Human adenovirus B (HAdV-B)
accagcgcuuccaa

SEQ ID NO: 3902085 - RNA, 12 nt, Human adenovirus B (HAdV-B)
acccggcggcgu

SEQ ID NO: 3902086 - RNA, 22 nt, Human adenovirus B (HAdV-B)
acccuguaugccaucuuccagc

SEQ ID NO: 3902087 - RNA, 17 nt, Human adenovirus B (HAdV-B)
accucugaccgcccagc

SEQ ID NO: 3902088 - RNA, 18 nt, Human adenovirus B (HAdV-B)
accugcugcgcacugccc

SEQ ID NO: 3902089 - RNA, 19 nt, Human adenovirus B (HAdV-B)
acgagaaaaaacagccaac

SEQ ID NO: 3902090 - RNA, 17 nt, Human adenovirus B (HAdV-B)
acgcauccgccagcagc

SEQ ID NO: 3902091 - RNA, 14 nt, Human adenovirus B (HAdV-B)
acggcuugcuggag

SEQ ID NO: 3902092 - RNA, 12 nt, Human adenovirus B (HAdV-B)
acuacacagcua

SEQ ID NO: 3902093 - RNA, 20 nt, Human adenovirus B (HAdV-B)
acucauguaguguacaaacc

SEQ ID NO: 3902094 - RNA, 23 nt, Human adenovirus B (HAdV-B)
acuccauacguucccauagacaa

SEQ ID NO: 3902095 - RNA, 15 nt, Human adenovirus B (HAdV-B)
acucugaacuucuug

SEQ ID NO: 3902096 - RNA, 16 nt, Human adenovirus B (HAdV-B)
acugcagcacuggaca

SEQ ID NO: 3902097 - RNA, 20 nt, Human adenovirus B (HAdV-B)
acuggcaguuuggaagccac

SEQ ID NO: 3902098 - RNA, 12 nt, Human adenovirus B (HAdV-B)
acuuggaagacu

SEQ ID NO: 3902099 - RNA, 13 nt, Human adenovirus B (HAdV-B)
acuuuaaaauguu

SEQ ID NO: 3902100 - RNA, 23 nt, Human adenovirus B (HAdV-B)
agaaaugcauauuucaaagaugu

SEQ ID NO: 3902101 - RNA, 13 nt, Human adenovirus B (HAdV-B)
agacgagccuggg

SEQ ID NO: 3902102 - RNA, 12 nt, Human adenovirus B (HAdV-B)
agaggaauguuu

SEQ ID NO: 3902103 - RNA, 18 nt, Human adenovirus B (HAdV-B)
agaggaggcggaggagga

SEQ ID NO: 3902104 - RNA, 15 nt, Human adenovirus B (HAdV-B)
agaugccugugauga

SEQ ID NO: 3902105 - RNA, 16 nt, Human adenovirus B (HAdV-B)
agauuacagccaacga

SEQ ID NO: 3902106 - RNA, 22 nt, Human adenovirus B (HAdV-B)
agauucuugaagcuugguuacc

SEQ ID NO: 3902107 - RNA, 21 nt, Human adenovirus B (HAdV-B)
agcaacagcgcuaccaucucc

SEQ ID NO: 3902108 - RNA, 16 nt, Human adenovirus B (HAdV-B)
agcaaccccaggccaa

SEQ ID NO: 3902109 - RNA, 21 nt, Human adenovirus B (HAdV-B)
agcaagauguacggaggcgca

SEQ ID NO: 3902110 - RNA, 14 nt, Human adenovirus B (HAdV-B)
agcaagggggccac

SEQ ID NO: 3902111 - RNA, 16 nt, Human adenovirus B (HAdV-B)
agcagcgugcuggacu

SEQ ID NO: 3902112 - RNA, 19 nt, Human adenovirus B (HAdV-B)
agcaucauauugcuugaaa

SEQ ID NO: 3902113 - RNA, 14 nt, Human adenovirus B (HAdV-B)
agccagcacccaga

SEQ ID NO: 3902114 - RNA, 15 nt, Human adenovirus B (HAdV-B)
agcgaucuucucaau

SEQ ID NO: 3902115 - RNA, 22 nt, Human adenovirus B (HAdV-B)
agcgcauacaacuugggcgcaa

SEQ ID NO: 3902116 - RNA, 14 nt, Human adenovirus B (HAdV-B)
agcgggcuuaaaaa

SEQ ID NO: 3902117 - RNA, 20 nt, Human adenovirus B (HAdV-B)
agcgugaguaagggcaaagg

SEQ ID NO: 3902118 - RNA, 14 nt, Human adenovirus B (HAdV-B)
agcuuaccuuugga

SEQ ID NO: 3902119 - RNA, 16 nt, Human adenovirus B (HAdV-B)
aggaagacaguuugga

SEQ ID NO: 3902120 - RNA, 16 nt, Human adenovirus B (HAdV-B)
aggcagaggaggugga

SEQ ID NO: 3902121 - RNA, 18 nt, Human adenovirus B (HAdV-B)
aggcucaaacugcacacu

SEQ ID NO: 3902122 - RNA, 15 nt, Human adenovirus B (HAdV-B)
agguggcugccauca

SEQ ID NO: 3902123 - RNA, 15 nt, Human adenovirus B (HAdV-B)
aguaacuugcaacau

SEQ ID NO: 3902124 - RNA, 15 nt, Human adenovirus B (HAdV-B)
aguacuggcuaccua

SEQ ID NO: 3902125 - RNA, 14 nt, Human adenovirus B (HAdV-B)
aguagcugacuugu

SEQ ID NO: 3902126 - RNA, 16 nt, Human adenovirus B (HAdV-B)
agucacugcuaccugu

SEQ ID NO: 3902127 - RNA, 12 nt, Human adenovirus B (HAdV-B)
agucgcagggcu

SEQ ID NO: 3902128 - RNA, 15 nt, Human adenovirus B (HAdV-B)
agucuguuccacagu

SEQ ID NO: 3902129 - RNA, 20 nt, Human adenovirus B (HAdV-B)
agugauguguucuauggcau

SEQ ID NO: 3902130 - RNA, 18 nt, Human adenovirus B (HAdV-B)
aguucgacaccaggaacu

SEQ ID NO: 3902131 - RNA, 20 nt, Human adenovirus B (HAdV-B)
aguuuacuuugccagaaggc

SEQ ID NO: 3902132 - RNA, 15 nt, Human adenovirus B (HAdV-B)
auaagcauauuggga

SEQ ID NO: 3902133 - RNA, 21 nt, Human adenovirus B (HAdV-B)
auacuaaggguugcauucacu

SEQ ID NO: 3902134 - RNA, 21 nt, Human adenovirus B (HAdV-B)
auacucauuugugcauuuaau

SEQ ID NO: 3902135 - RNA, 20 nt, Human adenovirus B (HAdV-B)
auagcaauggggccgugggc

SEQ ID NO: 3902136 - RNA, 12 nt, Human adenovirus B (HAdV-B)
auagccacagca

SEQ ID NO: 3902137 - RNA, 20 nt, Human adenovirus B (HAdV-B)
auagccacagcauuguggag

SEQ ID NO: 3902138 - RNA, 15 nt, Human adenovirus B (HAdV-B)
auaucuggaaauggg

SEQ ID NO: 3902139 - RNA, 19 nt, Human adenovirus B (HAdV-B)
auaugcuggcuacugugca

SEQ ID NO: 3902140 - RNA, 12 nt, Human adenovirus B (HAdV-B)
aucaaaacucca

SEQ ID NO: 3902141 - RNA, 14 nt, Human adenovirus B (HAdV-B)
aucaaggcucugca

SEQ ID NO: 3902142 - RNA, 17 nt, Human adenovirus B (HAdV-B)
auccaagaacaaaagaa

SEQ ID NO: 3902143 - RNA, 12 nt, Human adenovirus B (HAdV-B)
aucgcagugcag

SEQ ID NO: 3902144 - RNA, 13 nt, Human adenovirus B (HAdV-B)
aucgcgaagccau

SEQ ID NO: 3902145 - RNA, 13 nt, Human adenovirus B (HAdV-B)
aucuuccagcaga

SEQ ID NO: 3902146 - RNA, 13 nt, Human adenovirus B (HAdV-B)
aucuugaaaucac

SEQ ID NO: 3902147 - RNA, 18 nt, Human adenovirus B (HAdV-B)
augaauuaaaaaaugauu

SEQ ID NO: 3902148 - RNA, 15 nt, Human adenovirus B (HAdV-B)
augacccgcaggcag

SEQ ID NO: 3902149 - RNA, 21 nt, Human adenovirus B (HAdV-B)
augagaacaguaagaaagaac

SEQ ID NO: 3902150 - RNA, 20 nt, Human adenovirus B (HAdV-B)
augagucgcagacguccuga

SEQ ID NO: 3902151 - RNA, 17 nt, Human adenovirus B (HAdV-B)
augcaucccgugcugcg

SEQ ID NO: 3902152 - RNA, 19 nt, Human adenovirus B (HAdV-B)
augcuaacuacacacagaa

SEQ ID NO: 3902153 - RNA, 18 nt, Human adenovirus B (HAdV-B)
auggauauguggccuggg

SEQ ID NO: 3902154 - RNA, 16 nt, Human adenovirus B (HAdV-B)
augggacgagaccgga

SEQ ID NO: 3902155 - RNA, 20 nt, Human adenovirus B (HAdV-B)
auguguugagaccuggaacu

SEQ ID NO: 3902156 - RNA, 21 nt, Human adenovirus B (HAdV-B)
auuaauauccggaaugcuugu

SEQ ID NO: 3902157 - RNA, 20 nt, Human adenovirus B (HAdV-B)
auucauuuuucagaaacuuc

SEQ ID NO: 3902158 - RNA, 16 nt, Human adenovirus B (HAdV-B)
auucugcaugagaauc

SEQ ID NO: 3902159 - RNA, 14 nt, Human adenovirus B (HAdV-B)
auugaauaaaagaa

SEQ ID NO: 3902160 - RNA, 11 nt, Human adenovirus B (HAdV-B)
auugccacagc

SEQ ID NO: 3902161 - RNA, 12 nt, Human adenovirus B (HAdV-B)
auugccacagcu

SEQ ID NO: 3902162 - RNA, 16 nt, Human adenovirus B (HAdV-B)
auuucauagccacagc

SEQ ID NO: 3902163 - RNA, 16 nt, Human adenovirus B (HAdV-B)
auuugaugaacaaugc

SEQ ID NO: 3902164 - RNA, 15 nt, Human adenovirus B (HAdV-B)
auuuuggauuggauu

SEQ ID NO: 3902165 - RNA, 15 nt, Human adenovirus B (HAdV-B)
caaaaaagaagagga

SEQ ID NO: 3902166 - RNA, 19 nt, Human adenovirus B (HAdV-B)
caaaagaaggacucccagu

SEQ ID NO: 3902167 - RNA, 17 nt, Human adenovirus B (HAdV-B)
ggaaaaggagcagagcu

SEQ ID NO: 3902168 - RNA, 16 nt, Human adenovirus B (HAdV-B)
ggacaaugucaaccca

SEQ ID NO: 3902169 - RNA, 12 nt, Human adenovirus B (HAdV-B)
gaugacaccaac

SEQ ID NO: 3902170 - RNA, 19 nt, Human adenovirus B (HAdV-B)
gaugggugcauucggggug

SEQ ID NO: 3902171 - RNA, 15 nt, Human adenovirus B (HAdV-B)
gauguagaugccuau

SEQ ID NO: 3902172 - RNA, 12 nt, Human adenovirus B (HAdV-B)
gauguccaagcg

SEQ ID NO: 3902173 - RNA, 13 nt, Human adenovirus B (HAdV-B)
gaugugagcuucc

SEQ ID NO: 3902174 - RNA, 18 nt, Human adenovirus B (HAdV-B)
gauuacagccaacgagcc

SEQ ID NO: 3902175 - RNA, 19 nt, Human adenovirus B (HAdV-B)
gcaaggguccgccacugcg

SEQ ID NO: 3902176 - RNA, 20 nt, Human adenovirus B (HAdV-B)
gcacagcuagaucaaaagaa

SEQ ID NO: 3902177 - RNA, 20 nt, Human adenovirus B (HAdV-B)
gcacauagucauauaguuca

SEQ ID NO: 3902178 - RNA, 16 nt, Human adenovirus B (HAdV-B)
gcaccgacucucccag

SEQ ID NO: 3902179 - RNA, 13 nt, Human adenovirus B (HAdV-B)
gcacgccccaccg

SEQ ID NO: 3902180 - RNA, 22 nt, Human adenovirus B (HAdV-B)
gcacuucagcuugcccucauaa

SEQ ID NO: 3902181 - RNA, 23 nt, Human adenovirus B (HAdV-B)
gcagcaauguuuagaagaacaga

SEQ ID NO: 3902182 - RNA, 20 nt, Human adenovirus B (HAdV-B)
gcagccgccgcccccagaag

SEQ ID NO: 3902183 - RNA, 22 nt, Human adenovirus B (HAdV-B)
gcaguagccacagcaaccccag

SEQ ID NO: 3902184 - RNA, 22 nt, Human adenovirus B (HAdV-B)
gcauaugcaaaucccaaccaag

SEQ ID NO: 3902185 - RNA, 19 nt, Human adenovirus B (HAdV-B)
gcaugaccaucauaccaaa

SEQ ID NO: 3902186 - RNA, 15 nt, Human adenovirus B (HAdV-B)
gccaaguagcaguuu

SEQ ID NO: 3902187 - RNA, 12 nt, Human adenovirus B (HAdV-B)
gccccagcagcc

SEQ ID NO: 3902188 - RNA, 22 nt, Human adenovirus B (HAdV-B)
gcccuggugcggcaaguguacc

SEQ ID NO: 3902189 - RNA, 20 nt, Human adenovirus B (HAdV-B)
gccgagaagguggcugccau

SEQ ID NO: 3902190 - RNA, 22 nt, Human adenovirus B (HAdV-B)
gccuccgcgauaccuggcaccu

SEQ ID NO: 3902191 - RNA, 22 nt, Human adenovirus B (HAdV-B)
gccuccuugcagauauggcccu

SEQ ID NO: 3902192 - RNA, 14 nt, Human adenovirus B (HAdV-B)
gcgauaccuggcac

SEQ ID NO: 3902193 - RNA, 21 nt, Human adenovirus B (HAdV-B)
gcgcugccaggguucgguccu

SEQ ID NO: 3902194 - RNA, 16 nt, Human adenovirus B (HAdV-B)
gcgcugcgcuccaaca

SEQ ID NO: 3902195 - RNA, 16 nt, Human adenovirus B (HAdV-B)
gcgggcaaacacguuc

SEQ ID NO: 3902196 - RNA, 18 nt, Human adenovirus B (HAdV-B)
gcgucccgauuuggaaga

SEQ ID NO: 3902197 - RNA, 13 nt, Human adenovirus B (HAdV-B)
gcguuaagaggga

SEQ ID NO: 3902198 - RNA, 19 nt, Human adenovirus B (HAdV-B)
gcguucgcucaccagaagu

SEQ ID NO: 3902199 - RNA, 20 nt, Human adenovirus B (HAdV-B)
gcuaugaacucugauuauuu

SEQ ID NO: 3902200 - RNA, 15 nt, Human adenovirus B (HAdV-B)
gcugcugcuguggcu

SEQ ID NO: 3902201 - RNA, 22 nt, Human adenovirus B (HAdV-B)
gcuggacuugggugggagagga

SEQ ID NO: 3902202 - RNA, 15 nt, Human adenovirus B (HAdV-B)
gcuggauauggccag

SEQ ID NO: 3902203 - RNA, 15 nt, Human adenovirus B (HAdV-B)
gcuguuucugguggu

SEQ ID NO: 3902204 - RNA, 18 nt, Human adenovirus B (HAdV-B)
gcuguuucugguggugca

SEQ ID NO: 3902205 - RNA, 22 nt, Human adenovirus B (HAdV-B)
ggaagguucgcaagaugaggac

SEQ ID NO: 3902206 - RNA, 17 nt, Human adenovirus B (HAdV-B)
ggagccggaggagaugc

SEQ ID NO: 3902207 - RNA, 13 nt, Human adenovirus B (HAdV-B)
ggaggaggagagg

SEQ ID NO: 3902208 - RNA, 22 nt, Human adenovirus B (HAdV-B)
ggauccuuagauaugugcagca

SEQ ID NO: 3902209 - RNA, 17 nt, Human adenovirus B (HAdV-B)
ggaugacuggcagaacc

SEQ ID NO: 3902210 - RNA, 18 nt, Human adenovirus B (HAdV-B)
ggauuucauagccacagc

SEQ ID NO: 3902211 - RNA, 22 nt, Human adenovirus B (HAdV-B)
ggcacucccgucucgacccagc

SEQ ID NO: 3902212 - RNA, 17 nt, Human adenovirus B (HAdV-B)
ggcccaauugcaagcca

SEQ ID NO: 3902213 - RNA, 12 nt, Human adenovirus B (HAdV-B)
ggccgguaacgc

SEQ ID NO: 3902214 - RNA, 17 nt, Human adenovirus B (HAdV-B)
ggcggagcgguggugua

SEQ ID NO: 3902215 - RNA, 12 nt, Human adenovirus B (HAdV-B)
ggcggaggagga

SEQ ID NO: 3902216 - RNA, 18 nt, Human adenovirus B (HAdV-B)
ggcggaugacuggcagaa

SEQ ID NO: 3902217 - RNA, 19 nt, Human adenovirus B (HAdV-B)
ggcggccagacgugcagcu

SEQ ID NO: 3902218 - RNA, 18 nt, Human adenovirus B (HAdV-B)
gggagcugacuugcagug

SEQ ID NO: 3902219 - RNA, 15 nt, Human adenovirus B (HAdV-B)
ggguucgcugguggc

SEQ ID NO: 3902220 - RNA, 17 nt, Human adenovirus B (HAdV-B)
gguaaaucugagccaag

SEQ ID NO: 3902221 - RNA, 20 nt, Human adenovirus B (HAdV-B)
gguagaagaaccugacccca

SEQ ID NO: 3902222 - RNA, 18 nt, Human adenovirus B (HAdV-B)
ggugaaauuaugugcauu

SEQ ID NO: 3902223 - RNA, 17 nt, Human adenovirus B (HAdV-B)
ggugagugcagaggcau

SEQ ID NO: 3902224 - RNA, 20 nt, Human adenovirus B (HAdV-B)
ggugcuaccgcggcugagcc

SEQ ID NO: 3902225 - RNA, 22 nt, Human adenovirus B (HAdV-B)
ggugcuaccgcggcugagcccg

SEQ ID NO: 3902226 - RNA, 21 nt, Human adenovirus B (HAdV-B)
gguggugcaacacagcagaga

SEQ ID NO: 3902227 - RNA, 16 nt, Human adenovirus B (HAdV-B)
gguuagcugcacagcc

SEQ ID NO: 3902228 - RNA, 20 nt, Human adenovirus B (HAdV-B)
gguucuauucccuaccugga

SEQ ID NO: 3902229 - RNA, 21 nt, Human adenovirus B (HAdV-B)
gguugcaaucgcagugcaggg

SEQ ID NO: 3902230 - RNA, 16 nt, Human adenovirus B (HAdV-B)
gguuguaucuggugga

SEQ ID NO: 3902231 - RNA, 15 nt, Human adenovirus B (HAdV-B)
guaacuuuuguaaau

SEQ ID NO: 3902232 - RNA, 20 nt, Human adenovirus B (HAdV-B)
guaagaaggaucggcaggga

SEQ ID NO: 3902233 - RNA, 12 nt, Human adenovirus B (HAdV-B)
guaagggcagca

SEQ ID NO: 3902234 - RNA, 13 nt, Human adenovirus B (HAdV-B)
guagccaggucac

SEQ ID NO: 3902235 - RNA, 20 nt, Human adenovirus B (HAdV-B)
guaggcacgguuugaccagu

SEQ ID NO: 3902236 - RNA, 12 nt, Human adenovirus B (HAdV-B)
guauaaugaggc

SEQ ID NO: 3902237 - RNA, 17 nt, Human adenovirus B (HAdV-B)
guauucugcaugagaau

SEQ ID NO: 3902238 - RNA, 13 nt, Human adenovirus B (HAdV-B)
guccuuucaagcc

SEQ ID NO: 3902239 - RNA, 12 nt, Human adenovirus B (HAdV-B)
gucuccaugagu

SEQ ID NO: 3902240 - RNA, 16 nt, Human adenovirus B (HAdV-B)
gugaugcaauccccac

SEQ ID NO: 3902241 - RNA, 19 nt, Human adenovirus B (HAdV-B)
gugcgcgaguuugccccac

SEQ ID NO: 3902242 - RNA, 13 nt, Human adenovirus B (HAdV-B)
guggaagaugaac

SEQ ID NO: 3902243 - RNA, 19 nt, Human adenovirus B (HAdV-B)
gugggucuagcauaaguuc

SEQ ID NO: 3902244 - RNA, 23 nt, Human adenovirus B (HAdV-B)
guuggauugccacagcuggcaga

SEQ ID NO: 3902245 - RNA, 18 nt, Human adenovirus B (HAdV-B)
guuuagauacaugggcau

SEQ ID NO: 3902246 - RNA, 16 nt, Human adenovirus B (HAdV-B)
guuuaguaacaaguuc

SEQ ID NO: 3902247 - RNA, 21 nt, Human adenovirus B (HAdV-B)
guuuuggagaaaguaaaagug

SEQ ID NO: 3902248 - RNA, 19 nt, Human adenovirus B (HAdV-B)
uaacaauuuucgcucuuuc

SEQ ID NO: 3902249 - RNA, 18 nt, Human adenovirus B (HAdV-B)
uaacuuguuuauuugaaa

SEQ ID NO: 3902250 - RNA, 14 nt, Human adenovirus B (HAdV-B)
uaagggaaaugcca

SEQ ID NO: 3902251 - RNA, 20 nt, Human adenovirus B (HAdV-B)
uaauaugcuaacuacacaca

SEQ ID NO: 3902252 - RNA, 13 nt, Human adenovirus B (HAdV-B)
uaauucuacaacu

SEQ ID NO: 3902253 - RNA, 13 nt, Human adenovirus B (HAdV-B)
uacaaggaagaaa

SEQ ID NO: 3902254 - RNA, 18 nt, Human adenovirus B (HAdV-B)
uacacaccuugcuucacu

SEQ ID NO: 3902255 - RNA, 14 nt, Human adenovirus B (HAdV-B)
uacacugucucugu

SEQ ID NO: 3902256 - RNA, 15 nt, Human adenovirus B (HAdV-B)
uacagcugcugcaga

SEQ ID NO: 3902257 - RNA, 19 nt, Human adenovirus B (HAdV-B)
uacaguuucacuuccgcaa

SEQ ID NO: 3902258 - RNA, 17 nt, Human adenovirus B (HAdV-B)
uacauucaauucaaaca

SEQ ID NO: 3902259 - RNA, 20 nt, Human adenovirus B (HAdV-B)
uacccuguggugggugcaga

SEQ ID NO: 3902260 - RNA, 15 nt, Human adenovirus B (HAdV-B)
uaccgauccaugcuu

SEQ ID NO: 3902261 - RNA, 21 nt, Human adenovirus B (HAdV-B)
uacuaagaugaaaccaugcua

SEQ ID NO: 3902262 - RNA, 16 nt, Human adenovirus B (HAdV-B)
uacuaaggguugcauu

SEQ ID NO: 3902263 - RNA, 14 nt, Human adenovirus B (HAdV-B)
uacuauagccagca

SEQ ID NO: 3902264 - RNA, 22 nt, Human adenovirus B (HAdV-B)
uacuuuuggaacagucagcucu

SEQ ID NO: 3902265 - RNA, 17 nt, Human adenovirus B (HAdV-B)
uagacagaauggagugc

SEQ ID NO: 3902266 - RNA, 20 nt, Human adenovirus B (HAdV-B)
uagaccuacagagucucuga

SEQ ID NO: 3902267 - RNA, 16 nt, Human adenovirus B (HAdV-B)
uaggcugauugccaca

SEQ ID NO: 3902268 - RNA, 22 nt, Human adenovirus B (HAdV-B)
uagugcaggagcggagccuggg

SEQ ID NO: 3902269 - RNA, 16 nt, Human adenovirus B (HAdV-B)
uaguuuaaaagagguu

SEQ ID NO: 3902270 - RNA, 12 nt, Human adenovirus B (HAdV-B)
uauaaaacaucc

SEQ ID NO: 3902271 - RNA, 22 nt, Human adenovirus B (HAdV-B)
ggacaggguucgacgagcgcac

SEQ ID NO: 3902272 - RNA, 16 nt, Human adenovirus B (HAdV-B)
ggaccgaagacgagug

SEQ ID NO: 3902273 - RNA, 22 nt, Human adenovirus B (HAdV-B)
ggaggaaaacgaggaggcagag

SEQ ID NO: 3902274 - RNA, 16 nt, Human adenovirus B (HAdV-B)
ggaggagaugcgagcu

SEQ ID NO: 3902275 - RNA, 11 nt, Human adenovirus B (HAdV-B)
ggaggcagagg

SEQ ID NO: 3902276 - RNA, 20 nt, Human adenovirus B (HAdV-B)
ggauucuuaacagugcaggc

SEQ ID NO: 3902277 - RNA, 22 nt, Human adenovirus B (HAdV-B)
ggcaggaugucacuccacagcu

SEQ ID NO: 3902278 - RNA, 17 nt, Human adenovirus B (HAdV-B)
ggcguccagcgcugcca

SEQ ID NO: 3902279 - RNA, 13 nt, Human adenovirus B (HAdV-B)
gggaaucaacccc

SEQ ID NO: 3902280 - RNA, 16 nt, Human adenovirus B (HAdV-B)
ggggccgugggcagcg

SEQ ID NO: 3902281 - RNA, 19 nt, Human adenovirus B (HAdV-B)
ggggucuaccuugaccccc

SEQ ID NO: 3902282 - RNA, 19 nt, Human adenovirus B (HAdV-B)
gggucuugugugggacgau

SEQ ID NO: 3902283 - RNA, 11 nt, Human adenovirus B (HAdV-B)
gggugggagag

SEQ ID NO: 3902284 - RNA, 22 nt, Human adenovirus B (HAdV-B)
gguaaauccaauccacacauua

SEQ ID NO: 3902285 - RNA, 20 nt, Human adenovirus B (HAdV-B)
gguaagaaggaucggcaggg

SEQ ID NO: 3902286 - RNA, 20 nt, Human adenovirus B (HAdV-B)
ggucgaaaacuucugucgcu

SEQ ID NO: 3902287 - RNA, 20 nt, Human adenovirus B (HAdV-B)
ggucuuuacacccggcgagc

SEQ ID NO: 3902288 - RNA, 20 nt, Human adenovirus B (HAdV-B)
ggugacgcgcguagaugaac

SEQ ID NO: 3902289 - RNA, 19 nt, Human adenovirus B (HAdV-B)
ggugcaacacagcagagac

SEQ ID NO: 3902290 - RNA, 15 nt, Human adenovirus B (HAdV-B)
guauaucgggcagga

SEQ ID NO: 3902291 - RNA, 12 nt, Human adenovirus B (HAdV-B)
gucacaggccuc

SEQ ID NO: 3902292 - RNA, 15 nt, Human adenovirus B (HAdV-B)
gucagccaugggcau

SEQ ID NO: 3902293 - RNA, 23 nt, Human adenovirus B (HAdV-B)
gucaugccagcgguucuggagga

SEQ ID NO: 3902294 - RNA, 15 nt, Human adenovirus B (HAdV-B)
gucccuacguguaca

SEQ ID NO: 3902295 - RNA, 19 nt, Human adenovirus B (HAdV-B)
guccguucucgcuggccac

SEQ ID NO: 3902296 - RNA, 22 nt, Human adenovirus B (HAdV-B)
gucgacgcugaguuacuuucaa

SEQ ID NO: 3902297 - RNA, 20 nt, Human adenovirus B (HAdV-B)
gucgccguagacgcacaagc

SEQ ID NO: 3902298 - RNA, 22 nt, Human adenovirus B (HAdV-B)
gucgcgcuuugggacaggaaga

SEQ ID NO: 3902299 - RNA, 13 nt, Human adenovirus B (HAdV-B)
gugcagcagagcg

SEQ ID NO: 3902300 - RNA, 21 nt, Human adenovirus B (HAdV-B)
gugcagccgccgcccccagaa

SEQ ID NO: 3902301 - RNA, 21 nt, Human adenovirus B (HAdV-B)
gugccuccgcgauaccuggca

SEQ ID NO: 3902302 - RNA, 21 nt, Human adenovirus B (HAdV-B)
gugcugcacagcacccugaag

SEQ ID NO: 3902303 - RNA, 15 nt, Human adenovirus B (HAdV-B)
gugggcgcaaaguuc

SEQ ID NO: 3902304 - RNA, 23 nt, Human adenovirus B (HAdV-B)
gugguugacuugcaggacagaaa

SEQ ID NO: 3902305 - RNA, 14 nt, Human adenovirus B (HAdV-B)
gugugacagugcaa

SEQ ID NO: 3902306 - RNA, 14 nt, Human adenovirus B (HAdV-B)
guuacauggcuccg

SEQ ID NO: 3902307 - RNA, 17 nt, Human adenovirus B (HAdV-B)
guuaugaaggaccacca

SEQ ID NO: 3902308 - RNA, 22 nt, Human adenovirus B (HAdV-B)
guugcggaacugauacuugggu

SEQ ID NO: 3902309 - RNA, 17 nt, Human adenovirus B (HAdV-B)
guuggauaaaaguuugg

SEQ ID NO: 3902310 - RNA, 17 nt, Human adenovirus B (HAdV-B)
guuuggacggcuccugg

SEQ ID NO: 3902311 - RNA, 17 nt, Human adenovirus B (HAdV-B)
uaacuuuuguaaauguu

SEQ ID NO: 3902312 - RNA, 16 nt, Human adenovirus B (HAdV-B)
uaagucgcccgaguuu

SEQ ID NO: 3902313 - RNA, 19 nt, Human adenovirus B (HAdV-B)
uaauauugccaugcaggca

SEQ ID NO: 3902314 - RNA, 12 nt, Human adenovirus B (HAdV-B)
uaaucccagaaa

SEQ ID NO: 3902315 - RNA, 16 nt, Human adenovirus B (HAdV-B)
uacaguuucacuuccg

SEQ ID NO: 3902316 - RNA, 17 nt, Human adenovirus B (HAdV-B)
uaccaacacaacaacuc

SEQ ID NO: 3902317 - RNA, 13 nt, Human adenovirus B (HAdV-B)
uaccuuuggaagu

SEQ ID NO: 3902318 - RNA, 14 nt, Human adenovirus B (HAdV-B)
uacggaagccagca

SEQ ID NO: 3902319 - RNA, 19 nt, Human adenovirus B (HAdV-B)
uacuggucgcuuccagaca

SEQ ID NO: 3902320 - RNA, 15 nt, Human adenovirus B (HAdV-B)
uacuuugccagaagg

SEQ ID NO: 3902321 - RNA, 11 nt, Human adenovirus B (HAdV-B)
uagaaacuuuu

SEQ ID NO: 3902322 - RNA, 20 nt, Human adenovirus B (HAdV-B)
uagaagcugcuacagcugcu

SEQ ID NO: 3902323 - RNA, 16 nt, Human adenovirus B (HAdV-B)
uagcgaucuucucaau

SEQ ID NO: 3902324 - RNA, 12 nt, Human adenovirus B (HAdV-B)
uaucaaaugcuc

SEQ ID NO: 3902325 - RNA, 20 nt, Human adenovirus B (HAdV-B)
uauccagcuuuugcugugcc

SEQ ID NO: 3902326 - RNA, 13 nt, Human adenovirus B (HAdV-B)
uaucggaggagga

SEQ ID NO: 3902327 - RNA, 17 nt, Human adenovirus B (HAdV-B)
uaugaagauuuagaagg

SEQ ID NO: 3902328 - RNA, 14 nt, Human adenovirus B (HAdV-B)
uaugagccagagca

SEQ ID NO: 3902329 - RNA, 19 nt, Human adenovirus B (HAdV-B)
uaugcggccuaagagaccu

SEQ ID NO: 3902330 - RNA, 15 nt, Human adenovirus B (HAdV-B)
uauggccuccuagca

SEQ ID NO: 3902331 - RNA, 12 nt, Human adenovirus B (HAdV-B)
uaugugcagcag

SEQ ID NO: 3902332 - RNA, 14 nt, Human adenovirus B (HAdV-B)
uaugugcagcagag

SEQ ID NO: 3902333 - RNA, 20 nt, Human adenovirus B (HAdV-B)
uauugcuugaaagccugcug

SEQ ID NO: 3902334 - RNA, 21 nt, Human adenovirus B (HAdV-B)
uauuguuucccaucaacgcaa

SEQ ID NO: 3902335 - RNA, 20 nt, Human adenovirus B (HAdV-B)
uauuugcaccacacuucugc

SEQ ID NO: 3902336 - RNA, 21 nt, Human adenovirus B (HAdV-B)
ucaaauuuuagcuccucuccu

SEQ ID NO: 3902337 - RNA, 23 nt, Human adenovirus B (HAdV-B)
ucaagagcaggaacugaaaauaa

SEQ ID NO: 3902338 - RNA, 12 nt, Human adenovirus B (HAdV-B)
ucacaccucacu

SEQ ID NO: 3902339 - RNA, 19 nt, Human adenovirus B (HAdV-B)
ucacaucucguccucagcg

SEQ ID NO: 3902340 - RNA, 19 nt, Human adenovirus B (HAdV-B)
ucagcaauaaggucucugu

SEQ ID NO: 3902341 - RNA, 21 nt, Human adenovirus B (HAdV-B)
ucagcugcaaagcuccaagca

SEQ ID NO: 3902342 - RNA, 16 nt, Human adenovirus B (HAdV-B)
ucauccaaauucacca

SEQ ID NO: 3902343 - RNA, 15 nt, Human adenovirus B (HAdV-B)
ucauccuuggcuccg

SEQ ID NO: 3902344 - RNA, 15 nt, Human adenovirus B (HAdV-B)
ucaugccuggagugu

SEQ ID NO: 3902345 - RNA, 19 nt, Human adenovirus B (HAdV-B)
ucaugucuuucuucccaga

SEQ ID NO: 3902346 - RNA, 19 nt, Human adenovirus B (HAdV-B)
ucccaggacuacuccaccc

SEQ ID NO: 3902347 - RNA, 19 nt, Human adenovirus B (HAdV-B)
ucccaguagguuuggaagu

SEQ ID NO: 3902348 - RNA, 20 nt, Human adenovirus B (HAdV-B)
uccccaaauggcuucacaca

SEQ ID NO: 3902349 - RNA, 18 nt, Human adenovirus B (HAdV-B)
uccggaucgcuguccagg

SEQ ID NO: 3902350 - RNA, 22 nt, Human adenovirus B (HAdV-B)
ucgacgcaucucaugacaugca

SEQ ID NO: 3902351 - RNA, 19 nt, Human adenovirus B (HAdV-B)
ucgaggucacacacuucgc

SEQ ID NO: 3902352 - RNA, 11 nt, Human adenovirus B (HAdV-B)
ucgcagcagca

SEQ ID NO: 3902353 - RNA, 15 nt, Human adenovirus B (HAdV-B)
ucuggaagauccuga

SEQ ID NO: 3902354 - RNA, 22 nt, Human adenovirus B (HAdV-B)
ucuucccagagcgucucagggu

SEQ ID NO: 3902355 - RNA, 22 nt, Human adenovirus B (HAdV-B)
ucuucgcugucuugacugaugu

SEQ ID NO: 3902356 - RNA, 14 nt, Human adenovirus B (HAdV-B)
ugaaggaugaaaaa

SEQ ID NO: 3902357 - RNA, 15 nt, Human adenovirus B (HAdV-B)
ugacagaugcgcuug

SEQ ID NO: 3902358 - RNA, 14 nt, Human adenovirus B (HAdV-B)
ugacauuggaaaaa

SEQ ID NO: 3902359 - RNA, 23 nt, Human adenovirus B (HAdV-B)
ugacggauuucugugggacgacg

SEQ ID NO: 3902360 - RNA, 16 nt, Human adenovirus B (HAdV-B)
ugacggcggucaugga

SEQ ID NO: 3902361 - RNA, 22 nt, Human adenovirus B (HAdV-B)
ugacuugucuccugaacugcaa

SEQ ID NO: 3902362 - RNA, 20 nt, Human adenovirus B (HAdV-B)
ugagaaauugguauuugaag

SEQ ID NO: 3902363 - RNA, 21 nt, Human adenovirus B (HAdV-B)
ugagagccgaucgggaagaac

SEQ ID NO: 3902364 - RNA, 22 nt, Human adenovirus B (HAdV-B)
ugagcaauugagauuugccaca

SEQ ID NO: 3902365 - RNA, 17 nt, Human adenovirus B (HAdV-B)
ugagcggagacggcuug

SEQ ID NO: 3902366 - RNA, 23 nt, Human adenovirus B (HAdV-B)
ugaguuacuuucaagauggccac

SEQ ID NO: 3902367 - RNA, 18 nt, Human adenovirus B (HAdV-B)
ugaucuggacuuggaaga

SEQ ID NO: 3902368 - RNA, 18 nt, Human adenovirus B (HAdV-B)
ugaugacgaaguguacca

SEQ ID NO: 3902369 - RNA, 20 nt, Human adenovirus B (HAdV-B)
ugaugcaauccccacuggag

SEQ ID NO: 3902370 - RNA, 22 nt, Human adenovirus B (HAdV-B)
aaucuucaugucuuucuuccca

SEQ ID NO: 3902371 - RNA, 15 nt, Human adenovirus B (HAdV-B)
aaugaaaauaaacuu

SEQ ID NO: 3902372 - RNA, 22 nt, Human adenovirus B (HAdV-B)
aaugagccuaacaggaauuuuu

SEQ ID NO: 3902373 - RNA, 21 nt, Human adenovirus B (HAdV-B)
aauugcaaggccccagcagcc

SEQ ID NO: 3902374 - RNA, 12 nt, Human adenovirus B (HAdV-B)
aauuuggggcgg

SEQ ID NO: 3902375 - RNA, 12 nt, Human adenovirus B (HAdV-B)
acaaaccuggaa

SEQ ID NO: 3902376 - RNA, 19 nt, Human adenovirus B (HAdV-B)
acaacaagugcagcaacag

SEQ ID NO: 3902377 - RNA, 12 nt, Human adenovirus B (HAdV-B)
acaacuuacacu

SEQ ID NO: 3902378 - RNA, 16 nt, Human adenovirus B (HAdV-B)
acaaguacugcgcgcu

SEQ ID NO: 3902379 - RNA, 14 nt, Human adenovirus B (HAdV-B)
acaauauuaacacc

SEQ ID NO: 3902380 - RNA, 18 nt, Human adenovirus B (HAdV-B)
aaaaccugcugcuucucc

SEQ ID NO: 3902381 - RNA, 13 nt, Human adenovirus B (HAdV-B)
aaaauaaacuuug

SEQ ID NO: 3902382 - RNA, 19 nt, Human adenovirus B (HAdV-B)
aaaccucugcuacaacccu

SEQ ID NO: 3902383 - RNA, 22 nt, Human adenovirus B (HAdV-B)
aaaccuggaacagaagacacaa

SEQ ID NO: 3902384 - RNA, 21 nt, Human adenovirus B (HAdV-B)
aaacucgcgccguagaagagg

SEQ ID NO: 3902385 - RNA, 19 nt, Human adenovirus B (HAdV-B)
aaaguggguagacagaaug

SEQ ID NO: 3902386 - RNA, 15 nt, Human adenovirus B (HAdV-B)
aaauauucacuggaa

SEQ ID NO: 3902387 - RNA, 22 nt, Human adenovirus B (HAdV-B)
aacaagugcagcaacaggagga

SEQ ID NO: 3902388 - RNA, 17 nt, Human adenovirus B (HAdV-B)
aacagaaaaccagcagc

SEQ ID NO: 3902389 - RNA, 14 nt, Human adenovirus B (HAdV-B)
aacagcaagcaccg

SEQ ID NO: 3902390 - RNA, 22 nt, Human adenovirus B (HAdV-B)
aacccggcggcgucccagcagu

SEQ ID NO: 3902391 - RNA, 14 nt, Human adenovirus B (HAdV-B)
aacgaagcuuggaa

SEQ ID NO: 3902392 - RNA, 19 nt, Human adenovirus B (HAdV-B)
aacgaggaggcagaggagg

SEQ ID NO: 3902393 - RNA, 23 nt, Human adenovirus B (HAdV-B)
aacgcuaccacguaagaagcuuc

SEQ ID NO: 3902394 - RNA, 13 nt, Human adenovirus B (HAdV-B)
aacuacauuuacg

SEQ ID NO: 3902395 - RNA, 11 nt, Human adenovirus B (HAdV-B)
aacugcacacu

SEQ ID NO: 3902396 - RNA, 19 nt, Human adenovirus B (HAdV-B)
aagacaguuuggaggagga

SEQ ID NO: 3902397 - RNA, 12 nt, Human adenovirus B (HAdV-B)
aagagccaugcu

SEQ ID NO: 3902398 - RNA, 22 nt, Human adenovirus B (HAdV-B)
aagagcuagacgcguggggcga

SEQ ID NO: 3902399 - RNA, 20 nt, Human adenovirus B (HAdV-B)
aagcaccucccaacaccccu

SEQ ID NO: 3902400 - RNA, 13 nt, Human adenovirus B (HAdV-B)
aaggauacaaaga

SEQ ID NO: 3902401 - RNA, 17 nt, Human adenovirus B (HAdV-B)
aaguacgucuagggcgc

SEQ ID NO: 3902402 - RNA, 15 nt, Human adenovirus B (HAdV-B)
aauaaguuuagaaau

SEQ ID NO: 3902403 - RNA, 13 nt, Human adenovirus B (HAdV-B)
aauacaauuucca

SEQ ID NO: 3902404 - RNA, 13 nt, Human adenovirus B (HAdV-B)
aaucaauucacaa

SEQ ID NO: 3902405 - RNA, 16 nt, Human adenovirus B (HAdV-B)
aaucaugcccacaucc

SEQ ID NO: 3902406 - RNA, 17 nt, Human adenovirus B (HAdV-B)
aaucuucccaucaucgu

SEQ ID NO: 3902407 - RNA, 12 nt, Human adenovirus B (HAdV-B)
aaugacagaaug

SEQ ID NO: 3902408 - RNA, 17 nt, Human adenovirus B (HAdV-B)
aauuacaaagacuucaa

SEQ ID NO: 3902409 - RNA, 15 nt, Human adenovirus B (HAdV-B)
aauuacuugaaagug

SEQ ID NO: 3902410 - RNA, 23 nt, Human adenovirus B (HAdV-B)
aauucuaacacuaguuaaaacug

SEQ ID NO: 3902411 - RNA, 18 nt, Human adenovirus B (HAdV-B)
aauugagauuugccacau

SEQ ID NO: 3902412 - RNA, 15 nt, Human adenovirus B (HAdV-B)
aauuggcuccagcaa

SEQ ID NO: 3902413 - RNA, 23 nt, Human adenovirus B (HAdV-B)
acaacagacauggaaacucagcc

SEQ ID NO: 3902414 - RNA, 14 nt, Human adenovirus B (HAdV-B)
acaacuacuuucuc

SEQ ID NO: 3902415 - RNA, 18 nt, Human adenovirus B (HAdV-B)
acaagcucuaaagugacu

SEQ ID NO: 3902416 - RNA, 15 nt, Human adenovirus B (HAdV-B)
acaagcucuuacaga

SEQ ID NO: 3902417 - RNA, 12 nt, Human adenovirus B (HAdV-B)
acaaucuggcaa

SEQ ID NO: 3902418 - RNA, 13 nt, Human adenovirus B (HAdV-B)
acacaucacuucc

SEQ ID NO: 3902419 - RNA, 15 nt, Human adenovirus B (HAdV-B)
acacccuuguguccu

SEQ ID NO: 3902420 - RNA, 15 nt, Human adenovirus B (HAdV-B)
acaccgcuuccaccc

SEQ ID NO: 3902421 - RNA, 23 nt, Human adenovirus B (HAdV-B)
acaccuguuccgacugcagaauc

SEQ ID NO: 3902422 - RNA, 21 nt, Human adenovirus B (HAdV-B)
acagaguucccucgguaacga

SEQ ID NO: 3902423 - RNA, 19 nt, Human adenovirus B (HAdV-B)
acagcaguacaggacaggc

SEQ ID NO: 3902424 - RNA, 18 nt, Human adenovirus B (HAdV-B)
acagcuagaucaaaagaa

SEQ ID NO: 3902425 - RNA, 20 nt, Human adenovirus B (HAdV-B)
accaaaguuuaauauaaauu

SEQ ID NO: 3902426 - RNA, 12 nt, Human adenovirus B (HAdV-B)
acccaaccagcg

SEQ ID NO: 3902427 - RNA, 23 nt, Human adenovirus B (HAdV-B)
acccugauugcccgcgaagaagu

SEQ ID NO: 3902428 - RNA, 22 nt, Human adenovirus B (HAdV-B)
accgcaaugguagugcggaacc

SEQ ID NO: 3902429 - RNA, 17 nt, Human adenovirus B (HAdV-B)
accgucagccaugggca

SEQ ID NO: 3902430 - RNA, 13 nt, Human adenovirus B (HAdV-B)
accuccacugaag

SEQ ID NO: 3902431 - RNA, 15 nt, Human adenovirus B (HAdV-B)
accuuuggaaguuuu

SEQ ID NO: 3902432 - RNA, 18 nt, Human adenovirus B (HAdV-B)
acgcaaaaaauggccugu

SEQ ID NO: 3902433 - RNA, 13 nt, Human adenovirus B (HAdV-B)
acgcucuucuccu

SEQ ID NO: 3902434 - RNA, 15 nt, Human adenovirus B (HAdV-B)
acggagggcagaaac

SEQ ID NO: 3902435 - RNA, 20 nt, Human adenovirus B (HAdV-B)
acguggaacucaccaaccug

SEQ ID NO: 3902436 - RNA, 14 nt, Human adenovirus B (HAdV-B)
cugaagugcccauc

SEQ ID NO: 3902437 - RNA, 15 nt, Human adenovirus B (HAdV-B)
cugagaguuucauga

SEQ ID NO: 3902438 - RNA, 22 nt, Human adenovirus B (HAdV-B)
cugcaacgaauuuucucccagc

SEQ ID NO: 3902439 - RNA, 16 nt, Human adenovirus B (HAdV-B)
cugcacacuuacuuuu

SEQ ID NO: 3902440 - RNA, 12 nt, Human adenovirus B (HAdV-B)
cugccccauggc

SEQ ID NO: 3902441 - RNA, 19 nt, Human adenovirus B (HAdV-B)
cugccugguuauuaauuuu

SEQ ID NO: 3902442 - RNA, 15 nt, Human adenovirus B (HAdV-B)
cugcuacgaagagcu

SEQ ID NO: 3902443 - RNA, 16 nt, Human adenovirus B (HAdV-B)
cugcugcuguggcuuu

SEQ ID NO: 3902444 - RNA, 17 nt, Human adenovirus B (HAdV-B)
cugcugcuucucccagg

SEQ ID NO: 3902445 - RNA, 16 nt, Human adenovirus B (HAdV-B)
cuggacuuggaagagg

SEQ ID NO: 3902446 - RNA, 19 nt, Human adenovirus B (HAdV-B)
cuggaggaagacaguuugg

SEQ ID NO: 3902447 - RNA, 17 nt, Human adenovirus B (HAdV-B)
cuggagugucacugccg

SEQ ID NO: 3902448 - RNA, 12 nt, Human adenovirus B (HAdV-B)
cuggccacaucc

SEQ ID NO: 3902449 - RNA, 18 nt, Human adenovirus B (HAdV-B)
cuggcccaauugcaagcc

SEQ ID NO: 3902450 - RNA, 20 nt, Human adenovirus B (HAdV-B)
cugucaaaucaugaacucca

SEQ ID NO: 3902451 - RNA, 14 nt, Human adenovirus B (HAdV-B)
cugugcgaggauga

SEQ ID NO: 3902452 - RNA, 19 nt, Human adenovirus B (HAdV-B)
cugugcgaggaugagagcc

SEQ ID NO: 3902453 - RNA, 19 nt, Human adenovirus B (HAdV-B)
cuguuaaaaaccugcugcu

SEQ ID NO: 3902454 - RNA, 15 nt, Human adenovirus B (HAdV-B)
cuuacauagaagagg

SEQ ID NO: 3902455 - RNA, 18 nt, Human adenovirus B (HAdV-B)
cuuacauugauuaauguu

SEQ ID NO: 3902456 - RNA, 19 nt, Human adenovirus B (HAdV-B)
cuucaaccccuucuccgga

SEQ ID NO: 3902457 - RNA, 20 nt, Human adenovirus B (HAdV-B)
cuucccagagcgucucaggg

SEQ ID NO: 3902458 - RNA, 23 nt, Human adenovirus B (HAdV-B)
cuucguacgagagcgugaugcag

SEQ ID NO: 3902459 - RNA, 14 nt, Human adenovirus B (HAdV-B)
cuugaaagugggua

SEQ ID NO: 3902460 - RNA, 18 nt, Human adenovirus B (HAdV-B)
cuuugauauaaucugcaa

SEQ ID NO: 3902461 - RNA, 18 nt, Human adenovirus B (HAdV-B)
cuuuuaaaacgcacugug

SEQ ID NO: 3902462 - RNA, 23 nt, Human adenovirus B (HAdV-B)
gaaccucagcugggagaugaaac

SEQ ID NO: 3902463 - RNA, 19 nt, Human adenovirus B (HAdV-B)
gaacugauuaacugccuug

SEQ ID NO: 3902464 - RNA, 23 nt, Human adenovirus B (HAdV-B)
gaagauugggacagucaggcaga

SEQ ID NO: 3902465 - RNA, 17 nt, Human adenovirus B (HAdV-B)
gaagcguugauuacuuu

SEQ ID NO: 3902466 - RNA, 17 nt, Human adenovirus B (HAdV-B)
gaaguugaaggugcagc

SEQ ID NO: 3902467 - RNA, 16 nt, Human adenovirus B (HAdV-B)
gaauaccgcaaccaaa

SEQ ID NO: 3902468 - RNA, 13 nt, Human adenovirus B (HAdV-B)
ucaugcaacccaa

SEQ ID NO: 3902469 - RNA, 16 nt, Human adenovirus B (HAdV-B)
ucauucacacagcagc

SEQ ID NO: 3902470 - RNA, 16 nt, Human adenovirus B (HAdV-B)
uccaaccucuccacaa

SEQ ID NO: 3902471 - RNA, 13 nt, Human adenovirus B (HAdV-B)
uccaucagcagac

SEQ ID NO: 3902472 - RNA, 19 nt, Human adenovirus B (HAdV-B)
uccaugccuuucucccaag

SEQ ID NO: 3902473 - RNA, 16 nt, Human adenovirus B (HAdV-B)
ucccagaguuggaagu

SEQ ID NO: 3902474 - RNA, 18 nt, Human adenovirus B (HAdV-B)
ucccagggauuuggaaga

SEQ ID NO: 3902475 - RNA, 16 nt, Human adenovirus B (HAdV-B)
ucccauagacaaggag

SEQ ID NO: 3902476 - RNA, 18 nt, Human adenovirus B (HAdV-B)
ucccgacgaaaguacggu

SEQ ID NO: 3902477 - RNA, 12 nt, Human adenovirus B (HAdV-B)
ucccuggcuccu

SEQ ID NO: 3902478 - RNA, 23 nt, Human adenovirus B (HAdV-B)
uccuaggcagagaaacaacagac

SEQ ID NO: 3902479 - RNA, 18 nt, Human adenovirus B (HAdV-B)
uccugcaccauucccaga

SEQ ID NO: 3902480 - RNA, 20 nt, Human adenovirus B (HAdV-B)
uccugcccgccaccugcugc

SEQ ID NO: 3902481 - RNA, 17 nt, Human adenovirus B (HAdV-B)
ucgcagcagcagcagca

SEQ ID NO: 3902482 - RNA, 12 nt, Human adenovirus B (HAdV-B)
ucgcugcuuugc

SEQ ID NO: 3902483 - RNA, 14 nt, Human adenovirus B (HAdV-B)
ucgcuuccgaccug

SEQ ID NO: 3902484 - RNA, 23 nt, Human adenovirus B (HAdV-B)
ucgcuuuuggaaccggguucugc

SEQ ID NO: 3902485 - RNA, 15 nt, Human adenovirus B (HAdV-B)
ucgggcgccagcgcc

SEQ ID NO: 3902486 - RNA, 16 nt, Human adenovirus B (HAdV-B)
ucguuauccagccugu

SEQ ID NO: 3902487 - RNA, 17 nt, Human adenovirus B (HAdV-B)
ucuacagauacuggaug

SEQ ID NO: 3902488 - RNA, 15 nt, Human adenovirus B (HAdV-B)
ucuaccacuccagca

SEQ ID NO: 3902489 - RNA, 15 nt, Human adenovirus B (HAdV-B)
ucuaccgccagugcu

SEQ ID NO: 3902490 - RNA, 17 nt, Human adenovirus B (HAdV-B)
ucuccggaucuccuggg

SEQ ID NO: 3902491 - RNA, 20 nt, Human adenovirus B (HAdV-B)
ucucgacagauaaagacagc

SEQ ID NO: 3902492 - RNA, 20 nt, Human adenovirus B (HAdV-B)
ucucugcguucgcucaccag

SEQ ID NO: 3902493 - RNA, 19 nt, Human adenovirus B (HAdV-B)
ucugcaacggcagagaccu

SEQ ID NO: 3902494 - RNA, 20 nt, Human adenovirus B (HAdV-B)
ucuggggucuuguugccauc

SEQ ID NO: 3902495 - RNA, 18 nt, Human adenovirus B (HAdV-B)
ucuugcuugacucucugg

SEQ ID NO: 3902496 - RNA, 14 nt, Human adenovirus B (HAdV-B)
ucuugcuugcuauc

SEQ ID NO: 3902497 - RNA, 21 nt, Human adenovirus B (HAdV-B)
ugaaaccauuugguggcauga

SEQ ID NO: 3902498 - RNA, 11 nt, Human adenovirus B (HAdV-B)
ugaaagagcuu

SEQ ID NO: 3902499 - RNA, 22 nt, Human adenovirus B (HAdV-B)
ugaaagcaccucccaacacccc

SEQ ID NO: 3902500 - RNA, 19 nt, Human adenovirus B (HAdV-B)
ugaacaugcaaaucuggaa

SEQ ID NO: 3902501 - RNA, 16 nt, Human adenovirus B (HAdV-B)
ugaaggugcagccgcc

SEQ ID NO: 3902502 - RNA, 23 nt, Human adenovirus B (HAdV-B)
ugaccugggguccccgcuggggg

SEQ ID NO: 3902503 - RNA, 15 nt, Human adenovirus B (HAdV-B)
ugacuugucuccuga

SEQ ID NO: 3902504 - RNA, 13 nt, Human adenovirus B (HAdV-B)
ugagaauuggaag

SEQ ID NO: 3902505 - RNA, 16 nt, Human adenovirus B (HAdV-B)
ugagaauuggaagaga

SEQ ID NO: 3902506 - RNA, 22 nt, Human adenovirus B (HAdV-B)
ugagaggccuuaucaaaugcuc

SEQ ID NO: 3902507 - RNA, 22 nt, Human adenovirus B (HAdV-B)
ugagcagcuaacccgauggcug

SEQ ID NO: 3902508 - RNA, 17 nt, Human adenovirus B (HAdV-B)
ugaucaugccuggagug

SEQ ID NO: 3902509 - RNA, 22 nt, Human adenovirus B (HAdV-B)
ugaugaaggauccugucacuuu

SEQ ID NO: 3902510 - RNA, 13 nt, Human adenovirus B (HAdV-B)
ugaugcagcagca

SEQ ID NO: 3902511 - RNA, 15 nt, Human adenovirus B (HAdV-B)
ugaugcagcagcagc

SEQ ID NO: 3902512 - RNA, 20 nt, Human adenovirus B (HAdV-B)
ugcaaauuaauucuaacacu

SEQ ID NO: 3902513 - RNA, 18 nt, Human adenovirus B (HAdV-B)
ugcaaggccccagcagcc

SEQ ID NO: 3902514 - RNA, 18 nt, Human adenovirus B (HAdV-B)
ugcacaguuugcaaagag

SEQ ID NO: 3902515 - RNA, 21 nt, Human adenovirus B (HAdV-B)
ugcagaggcauacaugccaca

SEQ ID NO: 3902516 - RNA, 17 nt, Human adenovirus B (HAdV-B)
ugcaguuauugacagug

SEQ ID NO: 3902517 - RNA, 20 nt, Human adenovirus B (HAdV-B)
ugccaucaucuccugcuugc

SEQ ID NO: 3902518 - RNA, 19 nt, Human adenovirus B (HAdV-B)
ugccucccccuucccauuu

SEQ ID NO: 3902519 - RNA, 17 nt, Human adenovirus B (HAdV-B)
ugcgccuaauuggaagg

SEQ ID NO: 3902520 - RNA, 21 nt, Human adenovirus B (HAdV-B)
ugcgccuucacccgagcggca

SEQ ID NO: 3902521 - RNA, 21 nt, Human adenovirus B (HAdV-B)
ugcgggcggcgcugcagagcc

SEQ ID NO: 3902522 - RNA, 16 nt, Human adenovirus B (HAdV-B)
ugcugcuucucccagg

SEQ ID NO: 3902523 - RNA, 22 nt, Human adenovirus B (HAdV-B)
ugcuggacuugggugggagagg

SEQ ID NO: 3902524 - RNA, 16 nt, Human adenovirus B (HAdV-B)
uggacccaggccaugc

SEQ ID NO: 3902525 - RNA, 15 nt, Human adenovirus B (HAdV-B)
ugggaugggugagug

SEQ ID NO: 3902526 - RNA, 23 nt, Human adenovirus B (HAdV-B)
ugggucgcgguguaccccgguuc

SEQ ID NO: 3902527 - RNA, 18 nt, Human adenovirus B (HAdV-B)
ugguuaccgaggaagaaa

SEQ ID NO: 3902528 - RNA, 13 nt, Human adenovirus B (HAdV-B)
ugguuugaugcau

SEQ ID NO: 3902529 - RNA, 17 nt, Human adenovirus B (HAdV-B)
uguaaauguuaaguuua

SEQ ID NO: 3902530 - RNA, 19 nt, Human adenovirus B (HAdV-B)
uguaucgcaaugacagaau

SEQ ID NO: 3902531 - RNA, 12 nt, Human adenovirus B (HAdV-B)
uguaucuggugg

SEQ ID NO: 3902532 - RNA, 19 nt, Human adenovirus B (HAdV-B)
uguaugucggccaaguagc

SEQ ID NO: 3902533 - RNA, 19 nt, Human adenovirus B (HAdV-B)
uguggguuacauggcuccg

SEQ ID NO: 3902534 - RNA, 12 nt, Human adenovirus B (HAdV-B)
uguguagaugcc

SEQ ID NO: 3902535 - RNA, 14 nt, Human adenovirus B (HAdV-B)
uguuaacuguucac

SEQ ID NO: 3902536 - RNA, 18 nt, Human adenovirus B (HAdV-B)
uguugaucaccugggcag

SEQ ID NO: 3902537 - RNA, 12 nt, Human adenovirus B (HAdV-B)
uuacacucucau

SEQ ID NO: 3902538 - RNA, 20 nt, Human adenovirus B (HAdV-B)
uuacaguggaugacaccaac

SEQ ID NO: 3902539 - RNA, 19 nt, Human adenovirus B (HAdV-B)
uuaccccuacggaagccag

SEQ ID NO: 3902540 - RNA, 15 nt, Human adenovirus B (HAdV-B)
uucaaguacaaccac

SEQ ID NO: 3902541 - RNA, 22 nt, Human adenovirus B (HAdV-B)
uuccaacaaccaguuacaaauc

SEQ ID NO: 3902542 - RNA, 11 nt, Human adenovirus B (HAdV-B)
uuccagucucc

SEQ ID NO: 3902543 - RNA, 15 nt, Human adenovirus B (HAdV-B)
uucccagauaauuuu

SEQ ID NO: 3902544 - RNA, 13 nt, Human adenovirus B (HAdV-B)
uuccgagggugga

SEQ ID NO: 3902545 - RNA, 16 nt, Human adenovirus B (HAdV-B)
uucuacagauacugga

SEQ ID NO: 3902546 - RNA, 22 nt, Human adenovirus B (HAdV-B)
uucuaugcguguuggauugcca

SEQ ID NO: 3902547 - RNA, 14 nt, Human adenovirus B (HAdV-B)
uucucccagcagca

SEQ ID NO: 3902548 - RNA, 13 nt, Human adenovirus B (HAdV-B)
uucuggaggagga

SEQ ID NO: 3902549 - RNA, 15 nt, Human adenovirus B (HAdV-B)
uugaaaaucaauuca

SEQ ID NO: 3902550 - RNA, 19 nt, Human adenovirus B (HAdV-B)
uugaaauuuucucccagca

SEQ ID NO: 3902551 - RNA, 23 nt, Human adenovirus B (HAdV-B)
uugaugaaaugacagggaucagu

SEQ ID NO: 3902552 - RNA, 22 nt, Human adenovirus B (HAdV-B)
uugcaagccauccaaaaauccc

SEQ ID NO: 3902553 - RNA, 18 nt, Human adenovirus B (HAdV-B)
uugcuagauggaacagca

SEQ ID NO: 3902554 - RNA, 13 nt, Human adenovirus B (HAdV-B)
uuggaagagaugg

SEQ ID NO: 3902555 - RNA, 16 nt, Human adenovirus B (HAdV-B)
uugggcgcuugccagg

SEQ ID NO: 3902556 - RNA, 17 nt, Human adenovirus B (HAdV-B)
uuguugguagauugccc

SEQ ID NO: 3902557 - RNA, 15 nt, Human adenovirus B (HAdV-B)
uuuaacuuguuuauu

SEQ ID NO: 3902558 - RNA, 14 nt, Human adenovirus B (HAdV-B)
uuucuacacgggcg

SEQ ID NO: 3902559 - RNA, 12 nt, Human adenovirus B (HAdV-B)
uuuucucccagc

SEQ ID NO: 3902560 - RNA, 15 nt, Human adenovirus B (HAdV-B)
uuuuugaucacaaug

SEQ ID NO: 3902561 - RNA, 22 nt, Human adenovirus B (HAdV-B)
caacgagcagauaacuaucacc

SEQ ID NO: 3902562 - RNA, 21 nt, Human adenovirus B (HAdV-B)
caagaaguugaaggugcagcc

SEQ ID NO: 3902563 - RNA, 16 nt, Human adenovirus B (HAdV-B)
caaggucgcagugcau

SEQ ID NO: 3902564 - RNA, 20 nt, Human adenovirus B (HAdV-B)
caagugcagcaacaggagga

SEQ ID NO: 3902565 - RNA, 18 nt, Human adenovirus B (HAdV-B)
caaucacagccuccaaag

SEQ ID NO: 3902566 - RNA, 22 nt, Human adenovirus B (HAdV-B)
caaugcugaacggggucaucuu

SEQ ID NO: 3902567 - RNA, 17 nt, Human adenovirus B (HAdV-B)
cacagcaguagccacag

SEQ ID NO: 3902568 - RNA, 21 nt, Human adenovirus B (HAdV-B)
caccgucgcuuccgaccuggc

SEQ ID NO: 3902569 - RNA, 18 nt, Human adenovirus B (HAdV-B)
caccucagaugucaccug

SEQ ID NO: 3902570 - RNA, 13 nt, Human adenovirus B (HAdV-B)
cacgaggaagagu

SEQ ID NO: 3902571 - RNA, 13 nt, Human adenovirus B (HAdV-B)
cagaagacaugca

SEQ ID NO: 3902572 - RNA, 16 nt, Human adenovirus B (HAdV-B)
cagaagacaugcauga

SEQ ID NO: 3902573 - RNA, 16 nt, Human adenovirus B (HAdV-B)
cagaagauauggagga

SEQ ID NO: 3902574 - RNA, 12 nt, Human adenovirus B (HAdV-B)
cagaagcggcga

SEQ ID NO: 3902575 - RNA, 13 nt, Human adenovirus B (HAdV-B)
cagauucaaugau

SEQ ID NO: 3902576 - RNA, 14 nt, Human adenovirus B (HAdV-B)
cagcacccagacca

SEQ ID NO: 3902577 - RNA, 14 nt, Human adenovirus B (HAdV-B)
cagcacgacugccu

SEQ ID NO: 3902578 - RNA, 18 nt, Human adenovirus B (HAdV-B)
cagcagcaccucacuucc

SEQ ID NO: 3902579 - RNA, 14 nt, Human adenovirus B (HAdV-B)
cagcagcuccuuua

SEQ ID NO: 3902580 - RNA, 21 nt, Human adenovirus B (HAdV-B)
cagcaguacaggacaggcgcu

SEQ ID NO: 3902581 - RNA, 19 nt, Human adenovirus B (HAdV-B)
cagcauuggcaaugcugaa

SEQ ID NO: 3902582 - RNA, 13 nt, Human adenovirus B (HAdV-B)
cagcgaccgcgcu

SEQ ID NO: 3902583 - RNA, 12 nt, Human adenovirus B (HAdV-B)
cagcgcuaccau

SEQ ID NO: 3902584 - RNA, 19 nt, Human adenovirus B (HAdV-B)
cagcgggcacacaaagcac

SEQ ID NO: 3902585 - RNA, 13 nt, Human adenovirus B (HAdV-B)
cagcuguuggggu

SEQ ID NO: 3902586 - RNA, 16 nt, Human adenovirus B (HAdV-B)
caggagcggagccugg

SEQ ID NO: 3902587 - RNA, 20 nt, Human adenovirus B (HAdV-B)
caggcauuaguuuaaaagag

SEQ ID NO: 3902588 - RNA, 21 nt, Human adenovirus B (HAdV-B)
caggcauuaguuuaaaagagg

SEQ ID NO: 3902589 - RNA, 13 nt, Human adenovirus B (HAdV-B)
caggcgacggcgg

SEQ ID NO: 3902590 - RNA, 14 nt, Human adenovirus B (HAdV-B)
cagggcucugagcg

SEQ ID NO: 3902591 - RNA, 14 nt, Human adenovirus B (HAdV-B)
caguauaggcauuu

SEQ ID NO: 3902592 - RNA, 17 nt, Human adenovirus B (HAdV-B)
cagucaggcagaggagg

SEQ ID NO: 3902593 - RNA, 16 nt, Human adenovirus B (HAdV-B)
caguccugccaccacc

SEQ ID NO: 3902594 - RNA, 12 nt, Human adenovirus B (HAdV-B)
caguugaaaacc

SEQ ID NO: 3902595 - RNA, 22 nt, Human adenovirus B (HAdV-B)
caguuugcaaagagcucugacu

SEQ ID NO: 3902596 - RNA, 15 nt, Human adenovirus B (HAdV-B)
cauagauaauuacuu

SEQ ID NO: 3902597 - RNA, 12 nt, Human adenovirus B (HAdV-B)
cauagccacagc

SEQ ID NO: 3902598 - RNA, 23 nt, Human adenovirus B (HAdV-B)
caucauuucccuuacaugcauau

SEQ ID NO: 3902599 - RNA, 19 nt, Human adenovirus B (HAdV-B)
cauccgaguaucaucacuu

SEQ ID NO: 3902600 - RNA, 18 nt, Human adenovirus B (HAdV-B)
caucuacuguggaugcag

SEQ ID NO: 3902601 - RNA, 23 nt, Human adenovirus B (HAdV-B)
cauuacuaccgucaccuccacag

SEQ ID NO: 3902602 - RNA, 13 nt, Human adenovirus B (HAdV-B)
cauugcagccaug

SEQ ID NO: 3902603 - RNA, 17 nt, Human adenovirus B (HAdV-B)
cauugcuucucugaacu

SEQ ID NO: 3902604 - RNA, 15 nt, Human adenovirus B (HAdV-B)
cauuuuaaugaauuu

SEQ ID NO: 3902605 - RNA, 19 nt, Human adenovirus B (HAdV-B)
ccaaaggaucccauccagg

SEQ ID NO: 3902606 - RNA, 12 nt, Human adenovirus B (HAdV-B)
ccaaugccaucu

SEQ ID NO: 3902607 - RNA, 21 nt, Human adenovirus B (HAdV-B)
ccaaugucacucuuccagaaa

SEQ ID NO: 3902608 - RNA, 16 nt, Human adenovirus B (HAdV-B)
ccacacuucugcccca

SEQ ID NO: 3902609 - RNA, 16 nt, Human adenovirus B (HAdV-B)
ccacagggucuccagc

SEQ ID NO: 3902610 - RNA, 13 nt, Human adenovirus B (HAdV-B)
ccaccccucgcgg

SEQ ID NO: 3902611 - RNA, 20 nt, Human adenovirus B (HAdV-B)
ccacguaagaagcuucuugc

SEQ ID NO: 3902612 - RNA, 19 nt, Human adenovirus B (HAdV-B)
ccagaccggcgaggaacuc

SEQ ID NO: 3902613 - RNA, 20 nt, Human adenovirus B (HAdV-B)
ccagcagcaccucacuuccc

SEQ ID NO: 3902614 - RNA, 16 nt, Human adenovirus B (HAdV-B)
ccagcggcgaggaugu

SEQ ID NO: 3902615 - RNA, 20 nt, Human adenovirus B (HAdV-B)
ccaggcauagcuuccguggc

SEQ ID NO: 3902616 - RNA, 17 nt, Human adenovirus B (HAdV-B)
ccaucaguguggaagag

SEQ ID NO: 3902617 - RNA, 14 nt, Human adenovirus B (HAdV-B)
ccaucuuccagcag

SEQ ID NO: 3902618 - RNA, 16 nt, Human adenovirus B (HAdV-B)
ccaugcaugcaggugg

SEQ ID NO: 3902619 - RNA, 19 nt, Human adenovirus B (HAdV-B)
ccaugcgagccgcaagagc

SEQ ID NO: 3902620 - RNA, 16 nt, Human adenovirus B (HAdV-B)
ccaugugaccaaccug

SEQ ID NO: 3902621 - RNA, 13 nt, Human adenovirus B (HAdV-B)
ccauguuaauuuu

SEQ ID NO: 3902622 - RNA, 15 nt, Human adenovirus B (HAdV-B)
ccauuugguggcaug

SEQ ID NO: 3902623 - RNA, 13 nt, Human adenovirus B (HAdV-B)
cccagcagccaag

SEQ ID NO: 3902624 - RNA, 22 nt, Human adenovirus B (HAdV-B)
cccagggaauaggaagcucuug

SEQ ID NO: 3902625 - RNA, 13 nt, Human adenovirus B (HAdV-B)
cccaucgaugcug

SEQ ID NO: 3902626 - RNA, 18 nt, Human adenovirus B (HAdV-B)
ccccagcagccaaggcga

SEQ ID NO: 3902627 - RNA, 17 nt, Human adenovirus B (HAdV-B)
ccccuacuauagccagc

SEQ ID NO: 3902628 - RNA, 15 nt, Human adenovirus B (HAdV-B)
ccccucccccugcug

SEQ ID NO: 3902629 - RNA, 16 nt, Human adenovirus B (HAdV-B)
cccgaacccaaccagc

SEQ ID NO: 3902630 - RNA, 21 nt, Human adenovirus B (HAdV-B)
cccgacgaaaguacgguccag

SEQ ID NO: 3902631 - RNA, 14 nt, Human adenovirus B (HAdV-B)
cccuaugaaaucaa

SEQ ID NO: 3902632 - RNA, 22 nt, Human adenovirus B (HAdV-B)
cccuguggugggugcagagcuu

SEQ ID NO: 3902633 - RNA, 13 nt, Human adenovirus B (HAdV-B)
ccgacugcagaau

SEQ ID NO: 3902634 - RNA, 14 nt, Human adenovirus B (HAdV-B)
ccgcacuggcugcc

SEQ ID NO: 3902635 - RNA, 18 nt, Human adenovirus B (HAdV-B)
ccgcuuucgcagcggcga

SEQ ID NO: 3902636 - RNA, 18 nt, Human adenovirus B (HAdV-B)
ccggagacagggaggauu

SEQ ID NO: 3902637 - RNA, 16 nt, Human adenovirus B (HAdV-B)
ccggccggagccgcgg

SEQ ID NO: 3902638 - RNA, 12 nt, Human adenovirus B (HAdV-B)
ccgucuggccaa

SEQ ID NO: 3902639 - RNA, 17 nt, Human adenovirus B (HAdV-B)
ccguucucgcuggccac

SEQ ID NO: 3902640 - RNA, 22 nt, Human adenovirus B (HAdV-B)
ccuaacaggaauuuuugacaug

SEQ ID NO: 3902641 - RNA, 13 nt, Human adenovirus B (HAdV-B)
ccuaugcacuuuu

SEQ ID NO: 3902642 - RNA, 19 nt, Human adenovirus B (HAdV-B)
ccucaaaaacacacuaccc

SEQ ID NO: 3902643 - RNA, 15 nt, Human adenovirus B (HAdV-B)
ccucaucuucccaga

SEQ ID NO: 3902644 - RNA, 21 nt, Human adenovirus B (HAdV-B)
ccugauuacuucuuucagacu

SEQ ID NO: 3902645 - RNA, 19 nt, Human adenovirus B (HAdV-B)
ccugcagaaaucuucccau

SEQ ID NO: 3902646 - RNA, 17 nt, Human adenovirus B (HAdV-B)
ccugcccgccaccugcu

SEQ ID NO: 3902647 - RNA, 13 nt, Human adenovirus B (HAdV-B)
ccugcugcuucuc

SEQ ID NO: 3902648 - RNA, 20 nt, Human adenovirus B (HAdV-B)
ccuggacccuccaguggagg

SEQ ID NO: 3902649 - RNA, 14 nt, Human adenovirus B (HAdV-B)
ccuucaccccucgu

SEQ ID NO: 3902650 - RNA, 12 nt, Human adenovirus B (HAdV-B)
ccuuggaagagg

SEQ ID NO: 3902651 - RNA, 21 nt, Human adenovirus B (HAdV-B)
ccuuuggguguagcgggaauc

SEQ ID NO: 3902652 - RNA, 19 nt, Human adenovirus B (HAdV-B)
cgaacccgaggggagaugg

SEQ ID NO: 3902653 - RNA, 21 nt, Human adenovirus B (HAdV-B)
cgaagcaucgaggucacacac

SEQ ID NO: 3902654 - RNA, 11 nt, Human adenovirus B (HAdV-B)
cgaagugggua

SEQ ID NO: 3902655 - RNA, 21 nt, Human adenovirus B (HAdV-B)
cgacgcaucucaugacaugca

SEQ ID NO: 3902656 - RNA, 17 nt, Human adenovirus B (HAdV-B)
cgagaaaaaacagccaa

SEQ ID NO: 3902657 - RNA, 16 nt, Human adenovirus B (HAdV-B)
cgagagcgugaugcag

SEQ ID NO: 3902658 - RNA, 18 nt, Human adenovirus B (HAdV-B)
cgagagcgugaugcagca

SEQ ID NO: 3902659 - RNA, 17 nt, Human adenovirus B (HAdV-B)
cgaggaggcagaggagg

SEQ ID NO: 3902660 - RNA, 18 nt, Human adenovirus B (HAdV-B)
cgaggaggcagaggaggu

SEQ ID NO: 3902661 - RNA, 22 nt, Human adenovirus B (HAdV-B)
cgaguuuaaugggcgaagagga

SEQ ID NO: 3902662 - RNA, 19 nt, Human adenovirus B (HAdV-B)
cgaugggucuucuccuggg

SEQ ID NO: 3902663 - RNA, 16 nt, Human adenovirus B (HAdV-B)
cgaugugucugaagga

SEQ ID NO: 3902664 - RNA, 16 nt, Human adenovirus B (HAdV-B)
cgccacgagugccauc

SEQ ID NO: 3902665 - RNA, 22 nt, Human adenovirus B (HAdV-B)
cgcguucgggggugugcucccu

SEQ ID NO: 3902666 - RNA, 15 nt, Human adenovirus B (HAdV-B)
cgcugucaaccugcc

SEQ ID NO: 3902667 - RNA, 19 nt, Human adenovirus B (HAdV-B)
cgcugucaaccugcccccu

SEQ ID NO: 3902668 - RNA, 18 nt, Human adenovirus B (HAdV-B)
cggaggaggacagucugg

SEQ ID NO: 3902669 - RNA, 13 nt, Human adenovirus B (HAdV-B)
cggaugacuggca

SEQ ID NO: 3902670 - RNA, 11 nt, Human adenovirus B (HAdV-B)
cggcaccugcg

SEQ ID NO: 3902671 - RNA, 21 nt, Human adenovirus B (HAdV-B)
cggcgaggauguccaagcgca

SEQ ID NO: 3902672 - RNA, 20 nt, Human adenovirus B (HAdV-B)
cgggccgcaaaugcucugca

SEQ ID NO: 3902673 - RNA, 17 nt, Human adenovirus B (HAdV-B)
cgggcggcgcugcagag

SEQ ID NO: 3902674 - RNA, 18 nt, Human adenovirus B (HAdV-B)
cgguaaaucugagccaag

SEQ ID NO: 3902675 - RNA, 21 nt, Human adenovirus B (HAdV-B)
cggugcgggacagcccgccua

SEQ ID NO: 3902676 - RNA, 13 nt, Human adenovirus B (HAdV-B)
cgguucuggagga

SEQ ID NO: 3902677 - RNA, 19 nt, Human adenovirus B (HAdV-B)
cuagucuuaaaccggucac

SEQ ID NO: 3902678 - RNA, 13 nt, Human adenovirus B (HAdV-B)
cuaugagaacagu

SEQ ID NO: 3902679 - RNA, 20 nt, Human adenovirus B (HAdV-B)
cuaugggggcccuuacagac

SEQ ID NO: 3902680 - RNA, 17 nt, Human adenovirus B (HAdV-B)
cuauuuagagacagaag

SEQ ID NO: 3902681 - RNA, 23 nt, Human adenovirus B (HAdV-B)
cucaacacaagguucccucagga

SEQ ID NO: 3902682 - RNA, 19 nt, Human adenovirus B (HAdV-B)
cucaguacgauaccaccag

SEQ ID NO: 3902683 - RNA, 20 nt, Human adenovirus B (HAdV-B)
cucauaaugacaaaauaucu

SEQ ID NO: 3902684 - RNA, 16 nt, Human adenovirus B (HAdV-B)
cucaugaaagcaucau

SEQ ID NO: 3902685 - RNA, 22 nt, Human adenovirus B (HAdV-B)
cuccacagccccuacuauagcc

SEQ ID NO: 3902686 - RNA, 14 nt, Human adenovirus B (HAdV-B)
cuccauggggcgcc

SEQ ID NO: 3902687 - RNA, 23 nt, Human adenovirus B (HAdV-B)
cuccuacggacugccgcuucuuc

SEQ ID NO: 3902688 - RNA, 19 nt, Human adenovirus B (HAdV-B)
cucgauaaucugcuccuuc

SEQ ID NO: 3902689 - RNA, 17 nt, Human adenovirus B (HAdV-B)
cucgggauucuccuuua

SEQ ID NO: 3902690 - RNA, 19 nt, Human adenovirus B (HAdV-B)
cucugggaugcaaaugcaa

SEQ ID NO: 3902691 - RNA, 16 nt, Human adenovirus B (HAdV-B)
cucuuacagaaaucuc

SEQ ID NO: 3902692 - RNA, 15 nt, Human adenovirus B (HAdV-B)
cugaacgggggcgcc

SEQ ID NO: 3902693 - RNA, 13 nt, Human adenovirus B (HAdV-B)
cugaguuggcuuu

SEQ ID NO: 3902694 - RNA, 21 nt, Human adenovirus B (HAdV-B)
cugcaacgaauuuucucccag

SEQ ID NO: 3902695 - RNA, 22 nt, Human adenovirus B (HAdV-B)
cugccaggguucgguccuucca

SEQ ID NO: 3902696 - RNA, 23 nt, Human adenovirus B (HAdV-B)
cugccaugcgagccgcaagagcu

SEQ ID NO: 3902697 - RNA, 13 nt, Human adenovirus B (HAdV-B)
cugcgcacugccc

SEQ ID NO: 3902698 - RNA, 20 nt, Human adenovirus B (HAdV-B)
cugcuuugcccgggaacuca

SEQ ID NO: 3902699 - RNA, 22 nt, Human adenovirus B (HAdV-B)
cuggaaauggggcugagguggu

SEQ ID NO: 3902700 - RNA, 24 nt, Human adenovirus B (HAdV-B)
cuggaauaggguaugagacgaugg

SEQ ID NO: 3902701 - RNA, 20 nt, Human adenovirus B (HAdV-B)
cuggcggcuccacccuaugu

SEQ ID NO: 3902702 - RNA, 15 nt, Human adenovirus B (HAdV-B)
cuggcuacugugcau

SEQ ID NO: 3902703 - RNA, 14 nt, Human adenovirus B (HAdV-B)
cugggcgacagaac

SEQ ID NO: 3902704 - RNA, 19 nt, Human adenovirus B (HAdV-B)
cugguggugcaacacagca

SEQ ID NO: 3902705 - RNA, 15 nt, Human adenovirus B (HAdV-B)
cugucgcuuggcgcc

SEQ ID NO: 3902706 - RNA, 13 nt, Human adenovirus B (HAdV-B)
cugugccagaagu

SEQ ID NO: 3902707 - RNA, 12 nt, Human adenovirus B (HAdV-B)
cuguggaguucu

SEQ ID NO: 3902708 - RNA, 13 nt, Human adenovirus B (HAdV-B)
cuuagagauggaa

SEQ ID NO: 3902709 - RNA, 20 nt, Human adenovirus B (HAdV-B)
cuucagcgcacucucgagga

SEQ ID NO: 3902710 - RNA, 15 nt, Human adenovirus B (HAdV-B)
cuucagcuugcccuc

SEQ ID NO: 3902711 - RNA, 14 nt, Human adenovirus B (HAdV-B)
cuucucaaagagcu

SEQ ID NO: 3902712 - RNA, 21 nt, Human adenovirus B (HAdV-B)
cuucuccggaucuccugggca

SEQ ID NO: 3902713 - RNA, 16 nt, Human adenovirus B (HAdV-B)
cuucuuuugccauccu

SEQ ID NO: 3902714 - RNA, 21 nt, Human adenovirus B (HAdV-B)
cuugaaagagcuugacaagcu

SEQ ID NO: 3902715 - RNA, 12 nt, Human adenovirus B (HAdV-B)
cuugaaaucaca

SEQ ID NO: 3902716 - RNA, 14 nt, Human adenovirus B (HAdV-B)
gaaaucuucccauc

SEQ ID NO: 3902717 - RNA, 22 nt, Human adenovirus B (HAdV-B)
gaacaaagcuuggaacagcagu

SEQ ID NO: 3902718 - RNA, 17 nt, Human adenovirus B (HAdV-B)
gaagcauuuucccuacu

SEQ ID NO: 3902719 - RNA, 14 nt, Human adenovirus B (HAdV-B)
gaagguucuggggu

SEQ ID NO: 3902720 - RNA, 23 nt, Human adenovirus B (HAdV-B)
gacauggaaacucagccauugcu

SEQ ID NO: 3902721 - RNA, 15 nt, Human adenovirus B (HAdV-B)
gacccuaugcggccu

SEQ ID NO: 3902722 - RNA, 21 nt, Human adenovirus B (HAdV-B)
gaccuccaacagaaaaccagc

SEQ ID NO: 3902723 - RNA, 15 nt, Human adenovirus B (HAdV-B)
gacuccuucaacccu

SEQ ID NO: 3902724 - RNA, 20 nt, Human adenovirus B (HAdV-B)
gagaaaaaacagccaacaua

SEQ ID NO: 3902725 - RNA, 19 nt, Human adenovirus B (HAdV-B)
gagagcccauucgugcagg

SEQ ID NO: 3902726 - RNA, 16 nt, Human adenovirus B (HAdV-B)
gagccugggccuggcc

SEQ ID NO: 3902727 - RNA, 13 nt, Human adenovirus B (HAdV-B)
gagcgugaugcag

SEQ ID NO: 3902728 - RNA, 22 nt, Human adenovirus B (HAdV-B)
gagcuuaagcauuccaccgccc

SEQ ID NO: 3902729 - RNA, 18 nt, Human adenovirus B (HAdV-B)
gagguucagaaagaggga

SEQ ID NO: 3902730 - RNA, 21 nt, Human adenovirus B (HAdV-B)
gauaacuaucaccaagaugcu

SEQ ID NO: 3902731 - RNA, 19 nt, Human adenovirus B (HAdV-B)
gauccagauauucaaccug

SEQ ID NO: 3902732 - RNA, 16 nt, Human adenovirus B (HAdV-B)
gaucugaguuggcuuu

SEQ ID NO: 3902733 - RNA, 19 nt, Human adenovirus B (HAdV-B)
gaugcaauccccacuggag

SEQ ID NO: 3902734 - RNA, 12 nt, Human adenovirus B (HAdV-B)
gaugccugggga

SEQ ID NO: 3902735 - RNA, 11 nt, Human adenovirus B (HAdV-B)
gauucugggga

SEQ ID NO: 3902736 - RNA, 22 nt, Human adenovirus B (HAdV-B)
gcaaagagcucugacuggagcu

SEQ ID NO: 3902737 - RNA, 15 nt, Human adenovirus B (HAdV-B)
gcacgucuucaaccg

SEQ ID NO: 3902738 - RNA, 22 nt, Human adenovirus B (HAdV-B)
gcagagcaggucuacuggucgc

SEQ ID NO: 3902739 - RNA, 19 nt, Human adenovirus B (HAdV-B)
gcagaggaggcggaggagg

SEQ ID NO: 3902740 - RNA, 19 nt, Human adenovirus B (HAdV-B)
gcagccuagucgcagggcu

SEQ ID NO: 3902741 - RNA, 23 nt, Human adenovirus B (HAdV-B)
gcagcgugcuggacuuggguggg

SEQ ID NO: 3902742 - RNA, 13 nt, Human adenovirus B (HAdV-B)
gcaggaggcgcaa

SEQ ID NO: 3902743 - RNA, 14 nt, Human adenovirus B (HAdV-B)
gcaggucaggagcc

SEQ ID NO: 3902744 - RNA, 15 nt, Human adenovirus B (HAdV-B)
gcaguuauugacagu

SEQ ID NO: 3902745 - RNA, 12 nt, Human adenovirus B (HAdV-B)
gcauacuuucuc

SEQ ID NO: 3902746 - RNA, 12 nt, Human adenovirus B (HAdV-B)
gcauauucuguu

SEQ ID NO: 3902747 - RNA, 16 nt, Human adenovirus B (HAdV-B)
gccaacugucaaauca

SEQ ID NO: 3902748 - RNA, 24 nt, Human adenovirus B (HAdV-B)
gccagcacccagaccauuaacuuu

SEQ ID NO: 3902749 - RNA, 20 nt, Human adenovirus B (HAdV-B)
gccaugcgagccgcaagagc

SEQ ID NO: 3902750 - RNA, 22 nt, Human adenovirus B (HAdV-B)
gcccucauaaucauugcagcca

SEQ ID NO: 3902751 - RNA, 17 nt, Human adenovirus B (HAdV-B)
gcccucgcuuggguggu

SEQ ID NO: 3902752 - RNA, 23 nt, Human adenovirus B (HAdV-B)
gccuggggacagguuaguguacg

SEQ ID NO: 3902753 - RNA, 16 nt, Human adenovirus B (HAdV-B)
gccugugaugagggua

SEQ ID NO: 3902754 - RNA, 13 nt, Human adenovirus B (HAdV-B)
gcgcccuccacca

SEQ ID NO: 3902755 - RNA, 16 nt, Human adenovirus B (HAdV-B)
gcgccuucacccgagc

SEQ ID NO: 3902756 - RNA, 13 nt, Human adenovirus B (HAdV-B)
gcggagcagagca

SEQ ID NO: 3902757 - RNA, 16 nt, Human adenovirus B (HAdV-B)
gcggaggaggagagga

SEQ ID NO: 3902758 - RNA, 14 nt, Human adenovirus B (HAdV-B)
gcuccauggggcgc

SEQ ID NO: 3902759 - RNA, 16 nt, Human adenovirus B (HAdV-B)
gcugaaacccacugcu

SEQ ID NO: 3902760 - RNA, 22 nt, Human adenovirus B (HAdV-B)
gcugaguuacuuucaagauggc

SEQ ID NO: 3902761 - RNA, 15 nt, Human adenovirus B (HAdV-B)
gcugauugccacaga

SEQ ID NO: 3902762 - RNA, 16 nt, Human adenovirus B (HAdV-B)
gcugcgcuccaacauu

SEQ ID NO: 3902763 - RNA, 17 nt, Human adenovirus B (HAdV-B)
gcugcuacagcugcugc

SEQ ID NO: 3902764 - RNA, 13 nt, Human adenovirus B (HAdV-B)
gcuggcuggucaa

SEQ ID NO: 3902765 - RNA, 19 nt, Human adenovirus B (HAdV-B)
gcugggcaccgacucuccc

SEQ ID NO: 3902766 - RNA, 15 nt, Human adenovirus B (HAdV-B)
gcugucaaccugccc

SEQ ID NO: 3902767 - RNA, 19 nt, Human adenovirus B (HAdV-B)
ggcacacguggcugcagcc

SEQ ID NO: 3902768 - RNA, 20 nt, Human adenovirus B (HAdV-B)
ggcaggugguugaugagguc

SEQ ID NO: 3902769 - RNA, 19 nt, Human adenovirus B (HAdV-B)
ggcgacggcggugaugcaa

SEQ ID NO: 3902770 - RNA, 20 nt, Human adenovirus B (HAdV-B)
ggcgcccuccaccaccauuc

SEQ ID NO: 3902771 - RNA, 21 nt, Human adenovirus B (HAdV-B)
ggcggaugaaggcgaggagga

SEQ ID NO: 3902772 - RNA, 15 nt, Human adenovirus B (HAdV-B)
ggcggcgaccuccaa

SEQ ID NO: 3902773 - RNA, 16 nt, Human adenovirus B (HAdV-B)
ggcggcgcugcagagc

SEQ ID NO: 3902774 - RNA, 14 nt, Human adenovirus B (HAdV-B)
gggaacugaugcac

SEQ ID NO: 3902775 - RNA, 21 nt, Human adenovirus B (HAdV-B)
gggauaggggcguuaagaggg

SEQ ID NO: 3902776 - RNA, 19 nt, Human adenovirus B (HAdV-B)
gggcacccaauuaggcuug

SEQ ID NO: 3902777 - RNA, 21 nt, Human adenovirus B (HAdV-B)
ggggcaacuccgacugcagca

SEQ ID NO: 3902778 - RNA, 12 nt, Human adenovirus B (HAdV-B)
ggucagcugcaa

SEQ ID NO: 3902779 - RNA, 17 nt, Human adenovirus B (HAdV-B)
ggucauuucuugcuugc

SEQ ID NO: 3902780 - RNA, 15 nt, Human adenovirus B (HAdV-B)
ggucgcagugcaugg

SEQ ID NO: 3902781 - RNA, 12 nt, Human adenovirus B (HAdV-B)
ggugacaaguac

SEQ ID NO: 3902782 - RNA, 13 nt, Human adenovirus B (HAdV-B)
ggugaccagcaug

SEQ ID NO: 3902783 - RNA, 23 nt, Human adenovirus B (HAdV-B)
ggugcaacacagcagagacaaug

SEQ ID NO: 3902784 - RNA, 15 nt, Human adenovirus B (HAdV-B)
gguggacaacaaguc

SEQ ID NO: 3902785 - RNA, 16 nt, Human adenovirus B (HAdV-B)
gguggacgagcagacc

SEQ ID NO: 3902786 - RNA, 17 nt, Human adenovirus B (HAdV-B)
gguucuuugcucuuccu

SEQ ID NO: 3902787 - RNA, 20 nt, Human adenovirus B (HAdV-B)
guaaaaauugaauaaaagaa

SEQ ID NO: 3902788 - RNA, 17 nt, Human adenovirus B (HAdV-B)
guaugagacgaugggcg

SEQ ID NO: 3902789 - RNA, 16 nt, Human adenovirus B (HAdV-B)
guauugcaggagaaau

SEQ ID NO: 3902790 - RNA, 18 nt, Human adenovirus B (HAdV-B)
gucaauugucucugaaga

SEQ ID NO: 3902791 - RNA, 12 nt, Human adenovirus B (HAdV-B)
gucaccucccca

SEQ ID NO: 3902792 - RNA, 17 nt, Human adenovirus B (HAdV-B)
gucauggaccaguuacu

SEQ ID NO: 3902793 - RNA, 23 nt, Human adenovirus B (HAdV-B)
gucucaguguucgagucaggguu

SEQ ID NO: 3902794 - RNA, 14 nt, Human adenovirus B (HAdV-B)
gucucugaagaaau

SEQ ID NO: 3902795 - RNA, 12 nt, Human adenovirus B (HAdV-B)
gugaacaccaau

SEQ ID NO: 3902796 - RNA, 15 nt, Human adenovirus B (HAdV-B)
gugauagaaguucuu

SEQ ID NO: 3902797 - RNA, 14 nt, Human adenovirus B (HAdV-B)
gugcggcaggcaug

SEQ ID NO: 3902798 - RNA, 14 nt, Human adenovirus B (HAdV-B)
gugucaccuguagc

SEQ ID NO: 3902799 - RNA, 16 nt, Human adenovirus B (HAdV-B)
guucgcucaccagaag

SEQ ID NO: 3902800 - RNA, 19 nt, Human adenovirus B (HAdV-B)
guucggcggugacaaguac

SEQ ID NO: 3902801 - RNA, 12 nt, Human adenovirus B (HAdV-B)
guuggggauacu

SEQ ID NO: 3902802 - RNA, 16 nt, Human adenovirus B (HAdV-B)
uaaaaccugucaucau

SEQ ID NO: 3902803 - RNA, 18 nt, Human adenovirus B (HAdV-B)
uaaacacacccucauaau

SEQ ID NO: 3902804 - RNA, 17 nt, Human adenovirus B (HAdV-B)
uaaauccaauccacaca

SEQ ID NO: 3902805 - RNA, 17 nt, Human adenovirus B (HAdV-B)
uaaccccacuaacaacc

SEQ ID NO: 3902806 - RNA, 22 nt, Human adenovirus B (HAdV-B)
uaacgagaaaaaacagccaaca

SEQ ID NO: 3902807 - RNA, 18 nt, Human adenovirus B (HAdV-B)
uaagguucuguggacagg

SEQ ID NO: 3902808 - RNA, 15 nt, Human adenovirus B (HAdV-B)
uacaaagacuucaag

SEQ ID NO: 3902809 - RNA, 22 nt, Human adenovirus B (HAdV-B)
uacaacaauuuccacuucaaca

SEQ ID NO: 3902810 - RNA, 19 nt, Human adenovirus B (HAdV-B)
uacaccggauugcagcacu

SEQ ID NO: 3902811 - RNA, 12 nt, Human adenovirus B (HAdV-B)
uacauggcuccg

SEQ ID NO: 3902812 - RNA, 18 nt, Human adenovirus B (HAdV-B)
uaccagacaaaguacagc

SEQ ID NO: 3902813 - RNA, 17 nt, Human adenovirus B (HAdV-B)
uaccuguguagaugccu

SEQ ID NO: 3902814 - RNA, 20 nt, Human adenovirus B (HAdV-B)
uaccuguuccgucuggccaa

SEQ ID NO: 3902815 - RNA, 15 nt, Human adenovirus B (HAdV-B)
uaccuuuuacuacau

SEQ ID NO: 3902816 - RNA, 19 nt, Human adenovirus B (HAdV-B)
uacgagagcgugaugcagc

SEQ ID NO: 3902817 - RNA, 19 nt, Human adenovirus B (HAdV-B)
uacgauugaugucugguga

SEQ ID NO: 3902818 - RNA, 14 nt, Human adenovirus B (HAdV-B)
uacuaagaugaaac

SEQ ID NO: 3902819 - RNA, 15 nt, Human adenovirus B (HAdV-B)
uacugacgccagacg

SEQ ID NO: 3902820 - RNA, 20 nt, Human adenovirus B (HAdV-B)
uacuuuuauauuagauaaau

SEQ ID NO: 3902821 - RNA, 13 nt, Human adenovirus B (HAdV-B)
uagcccuuaacau

SEQ ID NO: 3902822 - RNA, 21 nt, Human adenovirus B (HAdV-B)
uagcucauaggagcuggcuuu

SEQ ID NO: 3902823 - RNA, 17 nt, Human adenovirus B (HAdV-B)
uaggagccggauuggga

SEQ ID NO: 3902824 - RNA, 23 nt, Human adenovirus B (HAdV-B)
uaguugccagcgacucuacaagg

SEQ ID NO: 3902825 - RNA, 13 nt, Human adenovirus B (HAdV-B)
uauagcaaagcca

SEQ ID NO: 3902826 - RNA, 16 nt, Human adenovirus B (HAdV-B)
uaucaccaaacugcuu

SEQ ID NO: 3902827 - RNA, 14 nt, Human adenovirus B (HAdV-B)
uauccggaaugcuu

SEQ ID NO: 3902828 - RNA, 14 nt, Human adenovirus B (HAdV-B)
uaugcucaggauca

SEQ ID NO: 3902829 - RNA, 21 nt, Human adenovirus B (HAdV-B)
uaugcucaggaucacagagac

SEQ ID NO: 3902830 - RNA, 12 nt, Human adenovirus B (HAdV-B)
uauggagcccag

SEQ ID NO: 3902831 - RNA, 19 nt, Human adenovirus B (HAdV-B)
ucaaaaacacacuacccac

SEQ ID NO: 3902832 - RNA, 20 nt, Human adenovirus B (HAdV-B)
ucaacccggauuuuacaacc

SEQ ID NO: 3902833 - RNA, 22 nt, Human adenovirus B (HAdV-B)
ucaacccggauuuuacaaccag

SEQ ID NO: 3902834 - RNA, 14 nt, Human adenovirus B (HAdV-B)
ucaacgacuacacc

SEQ ID NO: 3902835 - RNA, 13 nt, Human adenovirus B (HAdV-B)
ucaauaaacauca

SEQ ID NO: 3902836 - RNA, 15 nt, Human adenovirus B (HAdV-B)
ucaaugauugcaauu

SEQ ID NO: 3902837 - RNA, 18 nt, Human adenovirus B (HAdV-B)
ucaccaaacugcuuagcc

SEQ ID NO: 3902838 - RNA, 20 nt, Human adenovirus B (HAdV-B)
ucaccagggaaaaguacagu

SEQ ID NO: 3902839 - RNA, 17 nt, Human adenovirus B (HAdV-B)
ucaccuccacagccccu

SEQ ID NO: 3902840 - RNA, 20 nt, Human adenovirus B (HAdV-B)
ucaccugcggagcagagcag

SEQ ID NO: 3902841 - RNA, 12 nt, Human adenovirus B (HAdV-B)
ucaccugggcag

SEQ ID NO: 3902842 - RNA, 15 nt, Human adenovirus B (HAdV-B)
ucacgcuugccagca

SEQ ID NO: 3902843 - RNA, 13 nt, Human adenovirus B (HAdV-B)
ucauagccacagc

SEQ ID NO: 3902844 - RNA, 16 nt, Human adenovirus B (HAdV-B)
ucaucuucccagagcg

SEQ ID NO: 3902845 - RNA, 19 nt, Human adenovirus B (HAdV-B)
uccaacagaaaaccagcag

SEQ ID NO: 3902846 - RNA, 20 nt, Human adenovirus B (HAdV-B)
uccaacagaaaaccagcagc

SEQ ID NO: 3902847 - RNA, 21 nt, Human adenovirus B (HAdV-B)
uccagaagcauuuucccuacu

SEQ ID NO: 3902848 - RNA, 14 nt, Human adenovirus B (HAdV-B)
ucccggcagucucg

SEQ ID NO: 3902849 - RNA, 11 nt, Human adenovirus B (HAdV-B)
uccgaccuggc

SEQ ID NO: 3902850 - RNA, 19 nt, Human adenovirus B (HAdV-B)
uccgcauuaguaacaacac

SEQ ID NO: 3902851 - RNA, 18 nt, Human adenovirus B (HAdV-B)
uccgcgauaccuggcacc

SEQ ID NO: 3902852 - RNA, 19 nt, Human adenovirus B (HAdV-B)
uccuagcaaggacaacauc

SEQ ID NO: 3902853 - RNA, 17 nt, Human adenovirus B (HAdV-B)
ucgcagaaaacaaacuu

SEQ ID NO: 3902854 - RNA, 16 nt, Human adenovirus B (HAdV-B)
ucgcagcagcagcagc

SEQ ID NO: 3902855 - RNA, 23 nt, Human adenovirus B (HAdV-B)
ucggucucaaaagaucccuccuc

SEQ ID NO: 3902856 - RNA, 14 nt, Human adenovirus B (HAdV-B)
ucuacuucaacccc

SEQ ID NO: 3902857 - RNA, 15 nt, Human adenovirus B (HAdV-B)
ucuagcaagacaguc

SEQ ID NO: 3902858 - RNA, 17 nt, Human adenovirus B (HAdV-B)
ucuauugcuucccuacg

SEQ ID NO: 3902859 - RNA, 23 nt, Human adenovirus B (HAdV-B)
ucucuguugaaauuuucucccag

SEQ ID NO: 3902860 - RNA, 18 nt, Human adenovirus B (HAdV-B)
ucucuuaagguucugugg

SEQ ID NO: 3902861 - RNA, 13 nt, Human adenovirus B (HAdV-B)
ucugagacagaca

SEQ ID NO: 3902862 - RNA, 22 nt, Human adenovirus B (HAdV-B)
ucuggcccaauugcaagccauc

SEQ ID NO: 3902863 - RNA, 20 nt, Human adenovirus B (HAdV-B)
ugaaaguguuguuggaacca

SEQ ID NO: 3902864 - RNA, 21 nt, Human adenovirus B (HAdV-B)
ugaacaccaaucaugguaccu

SEQ ID NO: 3902865 - RNA, 15 nt, Human adenovirus B (HAdV-B)
ugaauuggcucagcg

SEQ ID NO: 3902866 - RNA, 14 nt, Human adenovirus B (HAdV-B)
ugaccacagcaacu

SEQ ID NO: 3902867 - RNA, 18 nt, Human adenovirus B (HAdV-B)
ugacgccgccggucccac

SEQ ID NO: 3902868 - RNA, 22 nt, Human adenovirus B (HAdV-B)
ugacuuuaugagccagagcaug

SEQ ID NO: 3902869 - RNA, 16 nt, Human adenovirus B (HAdV-B)
ugagaacaguaagaaa

SEQ ID NO: 3902870 - RNA, 19 nt, Human adenovirus B (HAdV-B)
ugagacccauuaagcaggu

SEQ ID NO: 3902871 - RNA, 19 nt, Human adenovirus B (HAdV-B)
aaaacaagcgucauaucau

SEQ ID NO: 3902872 - RNA, 14 nt, Human adenovirus B (HAdV-B)
aaaagaaaaauuug

SEQ ID NO: 3902873 - RNA, 14 nt, Human adenovirus B (HAdV-B)
aaaaugccaaauau

SEQ ID NO: 3902874 - RNA, 13 nt, Human adenovirus B (HAdV-B)
aaaauguugaaau

SEQ ID NO: 3902875 - RNA, 12 nt, Human adenovirus B (HAdV-B)
aaacaacauuug

SEQ ID NO: 3902876 - RNA, 21 nt, Human adenovirus B (HAdV-B)
aaaccauuugguggcaugagg

SEQ ID NO: 3902877 - RNA, 20 nt, Human adenovirus B (HAdV-B)
aaacccaggguuuauuuccc

SEQ ID NO: 3902878 - RNA, 11 nt, Human adenovirus B (HAdV-B)
aaaccuucuca

SEQ ID NO: 3902879 - RNA, 21 nt, Human adenovirus B (HAdV-B)
aaacuuaaagaccagaacuuc

SEQ ID NO: 3902880 - RNA, 16 nt, Human adenovirus B (HAdV-B)
aaaguuaacuggaugc

SEQ ID NO: 3902881 - RNA, 18 nt, Human adenovirus B (HAdV-B)
aaaugacgagacaucaua

SEQ ID NO: 3902882 - RNA, 18 nt, Human adenovirus B (HAdV-B)
aaauuuaccugcauggug

SEQ ID NO: 3902883 - RNA, 16 nt, Human adenovirus B (HAdV-B)
aaauuucuucuucacc

SEQ ID NO: 3902884 - RNA, 15 nt, Human adenovirus B (HAdV-B)
aaauuuucucccagc

SEQ ID NO: 3902885 - RNA, 18 nt, Human adenovirus B (HAdV-B)
aaauuuucucccagcagc

SEQ ID NO: 3902886 - RNA, 14 nt, Human adenovirus B (HAdV-B)
aacaaagcuuggaa

SEQ ID NO: 3902887 - RNA, 16 nt, Human adenovirus B (HAdV-B)
aacaaccaguuacaaa

SEQ ID NO: 3902888 - RNA, 15 nt, Human adenovirus B (HAdV-B)
aacaaggucgcagug

SEQ ID NO: 3902889 - RNA, 17 nt, Human adenovirus B (HAdV-B)
aacaccguuucuggggc

SEQ ID NO: 3902890 - RNA, 15 nt, Human adenovirus B (HAdV-B)
aacaucauugaagag

SEQ ID NO: 3902891 - RNA, 22 nt, Human adenovirus B (HAdV-B)
aacauguugguuggagccugag

SEQ ID NO: 3902892 - RNA, 15 nt, Human adenovirus B (HAdV-B)
aacauucuacagagu

SEQ ID NO: 3902893 - RNA, 19 nt, Human adenovirus B (HAdV-B)
aaccaguggucagugauga

SEQ ID NO: 3902894 - RNA, 20 nt, Human adenovirus B (HAdV-B)
aaccucccgacggugcugca

SEQ ID NO: 3902895 - RNA, 21 nt, Human adenovirus B (HAdV-B)
aacgaauuuucucccagcggc

SEQ ID NO: 3902896 - RNA, 19 nt, Human adenovirus B (HAdV-B)
aacgcaaaaaauggccugu

SEQ ID NO: 3902897 - RNA, 16 nt, Human adenovirus B (HAdV-B)
aacuuauauugcaugg

SEQ ID NO: 3902898 - RNA, 23 nt, Human adenovirus B (HAdV-B)
aacuucuugaccacgguggugca

SEQ ID NO: 3902899 - RNA, 15 nt, Human adenovirus B (HAdV-B)
aagacaaacauaaag

SEQ ID NO: 3902900 - RNA, 16 nt, Human adenovirus B (HAdV-B)
aagagacggaagaacc

SEQ ID NO: 3902901 - RNA, 17 nt, Human adenovirus B (HAdV-B)
aagaugaaagcaccucc

SEQ ID NO: 3902902 - RNA, 20 nt, Human adenovirus B (HAdV-B)
aagcuaauuugggacaacaa

SEQ ID NO: 3902903 - RNA, 16 nt, Human adenovirus B (HAdV-B)
aagcucuugcagaaca

SEQ ID NO: 3902904 - RNA, 16 nt, Human adenovirus B (HAdV-B)
aagcugaaauuacaaa

SEQ ID NO: 3902905 - RNA, 20 nt, Human adenovirus B (HAdV-B)
aagcugcuacagcugcugca

SEQ ID NO: 3902906 - RNA, 19 nt, Human adenovirus B (HAdV-B)
aaggacaaaaaagaagagg

SEQ ID NO: 3902907 - RNA, 23 nt, Human adenovirus B (HAdV-B)
aaggcgaugggucuucuccuggg

SEQ ID NO: 3902908 - RNA, 18 nt, Human adenovirus B (HAdV-B)
aagguucccucaggaugu

SEQ ID NO: 3902909 - RNA, 19 nt, Human adenovirus B (HAdV-B)
aagugcagcaacaggagga

SEQ ID NO: 3902910 - RNA, 12 nt, Human adenovirus B (HAdV-B)
aauaugcuggcu

SEQ ID NO: 3902911 - RNA, 18 nt, Human adenovirus B (HAdV-B)
aaucaaguucuaugagga

SEQ ID NO: 3902912 - RNA, 18 nt, Human adenovirus B (HAdV-B)
aaucuauggcgaaguuuc

SEQ ID NO: 3902913 - RNA, 12 nt, Human adenovirus B (HAdV-B)
aaucugcaacaa

SEQ ID NO: 3902914 - RNA, 14 nt, Human adenovirus B (HAdV-B)
aaugccaucaucuc

SEQ ID NO: 3902915 - RNA, 18 nt, Human adenovirus B (HAdV-B)
aauggagugcuugaaagu

SEQ ID NO: 3902916 - RNA, 15 nt, Human adenovirus B (HAdV-B)
aauggggcugaggug

SEQ ID NO: 3902917 - RNA, 16 nt, Human adenovirus B (HAdV-B)
aauuaucgcugcugca

SEQ ID NO: 3902918 - RNA, 14 nt, Human adenovirus B (HAdV-B)
aauuucuuuuuaua

SEQ ID NO: 3902919 - RNA, 14 nt, Human adenovirus B (HAdV-B)
acaacaauuuccac

SEQ ID NO: 3902920 - RNA, 13 nt, Human adenovirus B (HAdV-B)
acaacaguagcaa

SEQ ID NO: 3902921 - RNA, 20 nt, Human adenovirus B (HAdV-B)
acaagugagaucggacaggg

SEQ ID NO: 3902922 - RNA, 15 nt, Human adenovirus B (HAdV-B)
acaaguuuuccgcca

SEQ ID NO: 3902923 - RNA, 21 nt, Human adenovirus B (HAdV-B)
acacaucauaguuauguuccu

SEQ ID NO: 3902924 - RNA, 17 nt, Human adenovirus B (HAdV-B)
acacccugcugaagacc

SEQ ID NO: 3902925 - RNA, 15 nt, Human adenovirus B (HAdV-B)
acacguuccgugggu

SEQ ID NO: 3902926 - RNA, 15 nt, Human adenovirus B (HAdV-B)
acacucaccaccucc

SEQ ID NO: 3902927 - RNA, 15 nt, Human adenovirus B (HAdV-B)
acacugguggccacc

SEQ ID NO: 3902928 - RNA, 14 nt, Human adenovirus B (HAdV-B)
acacuucugcccca

SEQ ID NO: 3902929 - RNA, 18 nt, Human adenovirus B (HAdV-B)
acagaacuuucuuaccaa

SEQ ID NO: 3902930 - RNA, 14 nt, Human adenovirus B (HAdV-B)
acagcaacuucuug

SEQ ID NO: 3902931 - RNA, 17 nt, Human adenovirus B (HAdV-B)
acaguaaagcuggcaga

SEQ ID NO: 3902932 - RNA, 14 nt, Human adenovirus B (HAdV-B)
acaguaaaggaaga

SEQ ID NO: 3902933 - RNA, 15 nt, Human adenovirus B (HAdV-B)
acaguuuggaggagg

SEQ ID NO: 3902934 - RNA, 17 nt, Human adenovirus B (HAdV-B)
acauaauuacacucuca

SEQ ID NO: 3902935 - RNA, 17 nt, Human adenovirus B (HAdV-B)
acauacaacaauuucca

SEQ ID NO: 3902936 - RNA, 21 nt, Human adenovirus B (HAdV-B)
acauagccuuuggguauaauu

SEQ ID NO: 3902937 - RNA, 16 nt, Human adenovirus B (HAdV-B)
acaucgccggacagga

SEQ ID NO: 3902938 - RNA, 21 nt, Human adenovirus B (HAdV-B)
acaucuagcaagacagucgcu

SEQ ID NO: 3902939 - RNA, 12 nt, Human adenovirus B (HAdV-B)
acaugccacaga

SEQ ID NO: 3902940 - RNA, 13 nt, Human adenovirus B (HAdV-B)
acccaacacacac

SEQ ID NO: 3902941 - RNA, 13 nt, Human adenovirus B (HAdV-B)
acccagggggcaa

SEQ ID NO: 3902942 - RNA, 19 nt, Human adenovirus B (HAdV-B)
accccuacggaagccagca

SEQ ID NO: 3902943 - RNA, 16 nt, Human adenovirus B (HAdV-B)
acccugucuaccccua

SEQ ID NO: 3902944 - RNA, 18 nt, Human adenovirus B (HAdV-B)
accgcuuuccugagaacc

SEQ ID NO: 3902945 - RNA, 17 nt, Human adenovirus B (HAdV-B)
accucccaacaccccuu

SEQ ID NO: 3902946 - RNA, 16 nt, Human adenovirus B (HAdV-B)
accuugacccccagac

SEQ ID NO: 3902947 - RNA, 17 nt, Human adenovirus B (HAdV-B)
accuugcuucacuuucu

SEQ ID NO: 3902948 - RNA, 20 nt, Human adenovirus B (HAdV-B)
acgcgcaugcgaaugcggag

SEQ ID NO: 3902949 - RNA, 18 nt, Human adenovirus B (HAdV-B)
acgcggcccuggcagaac

SEQ ID NO: 3902950 - RNA, 16 nt, Human adenovirus B (HAdV-B)
acgucuagggcgcagu

SEQ ID NO: 3902951 - RNA, 17 nt, Human adenovirus B (HAdV-B)
acguggaaaaaggaagg

SEQ ID NO: 3902952 - RNA, 17 nt, Human adenovirus B (HAdV-B)
acuacaccgcuuuucca

SEQ ID NO: 3902953 - RNA, 12 nt, Human adenovirus B (HAdV-B)
acucacaaacua

SEQ ID NO: 3902954 - RNA, 11 nt, Human adenovirus B (HAdV-B)
acuccacagcu

SEQ ID NO: 3902955 - RNA, 16 nt, Human adenovirus B (HAdV-B)
acucuugcuugacucu

SEQ ID NO: 3902956 - RNA, 13 nt, Human adenovirus B (HAdV-B)
acugguggccacc

SEQ ID NO: 3902957 - RNA, 12 nt, Human adenovirus B (HAdV-B)
acuuggaagagg

SEQ ID NO: 3902958 - RNA, 15 nt, Human adenovirus B (HAdV-B)
agaaaagacaaacau

SEQ ID NO: 3902959 - RNA, 21 nt, Human adenovirus B (HAdV-B)
agaaaucucuuaagguucugu

SEQ ID NO: 3902960 - RNA, 12 nt, Human adenovirus B (HAdV-B)
agaaauuacuug

SEQ ID NO: 3902961 - RNA, 18 nt, Human adenovirus B (HAdV-B)
agaacaccgacuaccuca

SEQ ID NO: 3902962 - RNA, 16 nt, Human adenovirus B (HAdV-B)
agaacgaaacuuuucc

SEQ ID NO: 3902963 - RNA, 18 nt, Human adenovirus B (HAdV-B)
agaauaaaaaauauaauu

SEQ ID NO: 3902964 - RNA, 14 nt, Human adenovirus B (HAdV-B)
agaaucgccuagga

SEQ ID NO: 3902965 - RNA, 19 nt, Human adenovirus B (HAdV-B)
agaaugacccgcaggcagu

SEQ ID NO: 3902966 - RNA, 15 nt, Human adenovirus B (HAdV-B)
agacccgggcuaugu

SEQ ID NO: 3902967 - RNA, 18 nt, Human adenovirus B (HAdV-B)
agacuagcagacagggcu

SEQ ID NO: 3902968 - RNA, 13 nt, Human adenovirus B (HAdV-B)
agagagaggauga

SEQ ID NO: 3902969 - RNA, 14 nt, Human adenovirus B (HAdV-B)
agagccggccugga

SEQ ID NO: 3902970 - RNA, 16 nt, Human adenovirus B (HAdV-B)
agagcgucgcaagcuu

SEQ ID NO: 3902971 - RNA, 19 nt, Human adenovirus B (HAdV-B)
agagcgugaugcagcagca

SEQ ID NO: 3902972 - RNA, 23 nt, Human adenovirus B (HAdV-B)
agaggggucuugugugggacgau

SEQ ID NO: 3902973 - RNA, 16 nt, Human adenovirus B (HAdV-B)
agauacuggauguuuu

SEQ ID NO: 3902974 - RNA, 13 nt, Human adenovirus B (HAdV-B)
agcaacaggagga

SEQ ID NO: 3902975 - RNA, 21 nt, Human adenovirus B (HAdV-B)
agcaccucacuucccucuucc

SEQ ID NO: 3902976 - RNA, 18 nt, Human adenovirus B (HAdV-B)
agcaucauauugcuugaa

SEQ ID NO: 3902977 - RNA, 14 nt, Human adenovirus B (HAdV-B)
agcccgagucugca

SEQ ID NO: 3902978 - RNA, 12 nt, Human adenovirus B (HAdV-B)
agccggccugga

SEQ ID NO: 3902979 - RNA, 13 nt, Human adenovirus B (HAdV-B)
agcggguuaaaaa

SEQ ID NO: 3902980 - RNA, 16 nt, Human adenovirus B (HAdV-B)
agcucugacuggagcu

SEQ ID NO: 3902981 - RNA, 18 nt, Human adenovirus B (HAdV-B)
aggacgccgaggcucucu

SEQ ID NO: 3902982 - RNA, 16 nt, Human adenovirus B (HAdV-B)
aggaggcggaggagga

SEQ ID NO: 3902983 - RNA, 13 nt, Human adenovirus B (HAdV-B)
aggagucaacccc

SEQ ID NO: 3902984 - RNA, 21 nt, Human adenovirus B (HAdV-B)
aggccaugcaacguaucaugg

SEQ ID NO: 3902985 - RNA, 22 nt, Human adenovirus B (HAdV-B)
agggaucaguccugccagggca

SEQ ID NO: 3902986 - RNA, 24 nt, Human adenovirus B (HAdV-B)
aggguuuauuuccccaaauggcuu

SEQ ID NO: 3902987 - RNA, 20 nt, Human adenovirus B (HAdV-B)
aguacagcgggcacacaaag

SEQ ID NO: 3902988 - RNA, 17 nt, Human adenovirus B (HAdV-B)
aguacaggacaggcgcu

SEQ ID NO: 3902989 - RNA, 24 nt, Human adenovirus B (HAdV-B)
aguaccucagagcgaaguguauca

SEQ ID NO: 3902990 - RNA, 19 nt, Human adenovirus B (HAdV-B)
aguccugccaccaccucua

SEQ ID NO: 3902991 - RNA, 23 nt, Human adenovirus B (HAdV-B)
agugcaauguaauaaaaauaugu

SEQ ID NO: 3902992 - RNA, 22 nt, Human adenovirus B (HAdV-B)
agugcuguuuguaacugguccc

SEQ ID NO: 3902993 - RNA, 13 nt, Human adenovirus B (HAdV-B)
agugucacugccg

SEQ ID NO: 3902994 - RNA, 14 nt, Human adenovirus B (HAdV-B)
aguuaacuggaugc

SEQ ID NO: 3902995 - RNA, 12 nt, Human adenovirus B (HAdV-B)
auaaaacauccc

SEQ ID NO: 3902996 - RNA, 15 nt, Human adenovirus B (HAdV-B)
auauaaucugcaaca

SEQ ID NO: 3902997 - RNA, 22 nt, Human adenovirus B (HAdV-B)
aucagagaagacgacugacaaa

SEQ ID NO: 3902998 - RNA, 20 nt, Human adenovirus B (HAdV-B)
auccuacgagaucaccgcua

SEQ ID NO: 3902999 - RNA, 12 nt, Human adenovirus B (HAdV-B)
auccuucucaac

SEQ ID NO: 3903000 - RNA, 20 nt, Human adenovirus B (HAdV-B)
aucguugucaaccagggggu

SEQ ID NO: 3903001 - RNA, 18 nt, Human adenovirus B (HAdV-B)
aucuacguccacuggacg

SEQ ID NO: 3903002 - RNA, 16 nt, Human adenovirus B (HAdV-B)
aucuagaccacugccg

SEQ ID NO: 3903003 - RNA, 17 nt, Human adenovirus B (HAdV-B)
augaauuaaaaaaugau

SEQ ID NO: 3903004 - RNA, 17 nt, Human adenovirus B (HAdV-B)
augauauucuugagcag

SEQ ID NO: 3903005 - RNA, 16 nt, Human adenovirus B (HAdV-B)
augaugggcuggcgga

SEQ ID NO: 3903006 - RNA, 21 nt, Human adenovirus B (HAdV-B)
augauuaauaaaaaaucacuu

SEQ ID NO: 3903007 - RNA, 20 nt, Human adenovirus B (HAdV-B)
augauuugcggugcuuccga

SEQ ID NO: 3903008 - RNA, 17 nt, Human adenovirus B (HAdV-B)
augcacaugaucaucca

SEQ ID NO: 3903009 - RNA, 22 nt, Human adenovirus B (HAdV-B)
augcaucugcgccgcaggaggc

SEQ ID NO: 3903010 - RNA, 18 nt, Human adenovirus B (HAdV-B)
augccagcgguucuggag

SEQ ID NO: 3903011 - RNA, 20 nt, Human adenovirus B (HAdV-B)
auggcuuaccagacaaagua

SEQ ID NO: 3903012 - RNA, 13 nt, Human adenovirus B (HAdV-B)
augugucugaagg

SEQ ID NO: 3903013 - RNA, 12 nt, Human adenovirus B (HAdV-B)
auuacagccaac

SEQ ID NO: 3903014 - RNA, 22 nt, Human adenovirus B (HAdV-B)
auuacuucuuucagacuagcag

SEQ ID NO: 3903015 - RNA, 13 nt, Human adenovirus B (HAdV-B)
auuaugugcauuu

SEQ ID NO: 3903016 - RNA, 14 nt, Human adenovirus B (HAdV-B)
auucaaacaacauu

SEQ ID NO: 3903017 - RNA, 14 nt, Human adenovirus B (HAdV-B)
auucccacugaaag

SEQ ID NO: 3903018 - RNA, 19 nt, Human adenovirus B (HAdV-B)
auucuacugguaauuuacu

SEQ ID NO: 3903019 - RNA, 19 nt, Human adenovirus B (HAdV-B)
auuuuugauauacccccua

SEQ ID NO: 3903020 - RNA, 19 nt, Human adenovirus B (HAdV-B)
caaaccucugcuacaaccc

SEQ ID NO: 3903021 - RNA, 15 nt, Human adenovirus B (HAdV-B)
caaacgucagccaaa

SEQ ID NO: 3903022 - RNA, 21 nt, Human adenovirus B (HAdV-B)
caaacugcuggacuacuugca

SEQ ID NO: 3903023 - RNA, 20 nt, Human adenovirus B (HAdV-B)
caaagcgugcugcacagcac

SEQ ID NO: 3903024 - RNA, 23 nt, Human adenovirus B (HAdV-B)
caaaguuuacagcgguuacuauu

SEQ ID NO: 3903025 - RNA, 21 nt, Human adenovirus B (HAdV-B)
caaaugacaaaggcuucuauu

SEQ ID NO: 3903026 - RNA, 17 nt, Human adenovirus B (HAdV-B)
caaauucaccaaugcaa

SEQ ID NO: 3903027 - RNA, 19 nt, Human adenovirus B (HAdV-B)
caaccguugaaggaugaaa

SEQ ID NO: 3903028 - RNA, 16 nt, Human adenovirus B (HAdV-B)
caacucccuggcuccu

SEQ ID NO: 3903029 - RNA, 21 nt, Human adenovirus B (HAdV-B)
caagaacaaaagaauaccaaa

SEQ ID NO: 3903030 - RNA, 23 nt, Human adenovirus B (HAdV-B)
caagcgcaaauacaaggaagaaa

SEQ ID NO: 3903031 - RNA, 22 nt, Human adenovirus B (HAdV-B)
caagugcagcaacaggaggauu

SEQ ID NO: 3903032 - RNA, 12 nt, Human adenovirus B (HAdV-B)
caauaaacauca

SEQ ID NO: 3903033 - RNA, 14 nt, Human adenovirus B (HAdV-B)
caaucacaaaaggc

SEQ ID NO: 3903034 - RNA, 15 nt, Human adenovirus B (HAdV-B)
caauuggcuccagca

SEQ ID NO: 3903035 - RNA, 21 nt, Human adenovirus B (HAdV-B)
cacaugggagccaggaguucc

SEQ ID NO: 3903036 - RNA, 13 nt, Human adenovirus B (HAdV-B)
caccaaacugcuu

SEQ ID NO: 3903037 - RNA, 18 nt, Human adenovirus B (HAdV-B)
caccacacgauccacacu

SEQ ID NO: 3903038 - RNA, 17 nt, Human adenovirus B (HAdV-B)
caccuuuccuacucaca

SEQ ID NO: 3903039 - RNA, 23 nt, Human adenovirus B (HAdV-B)
cacucggaugugaucgaggaugu

SEQ ID NO: 3903040 - RNA, 17 nt, Human adenovirus B (HAdV-B)
cacuggacaugacagcg

SEQ ID NO: 3903041 - RNA, 20 nt, Human adenovirus B (HAdV-B)
cagaaccaagagucaauugu

SEQ ID NO: 3903042 - RNA, 23 nt, Human adenovirus B (HAdV-B)
cagaaccuauuuagagacagaag

SEQ ID NO: 3903043 - RNA, 21 nt, Human adenovirus B (HAdV-B)
cagaagacaugcaugacccag

SEQ ID NO: 3903044 - RNA, 20 nt, Human adenovirus B (HAdV-B)
cagaagcggcgaggagccgg

SEQ ID NO: 3903045 - RNA, 20 nt, Human adenovirus B (HAdV-B)
cagaccucaucuucccagag

SEQ ID NO: 3903046 - RNA, 16 nt, Human adenovirus B (HAdV-B)
cagacuugggacagaa

SEQ ID NO: 3903047 - RNA, 19 nt, Human adenovirus B (HAdV-B)
cagcaaccccaggccaacc

SEQ ID NO: 3903048 - RNA, 16 nt, Human adenovirus B (HAdV-B)
cagcacugaaacacca

SEQ ID NO: 3903049 - RNA, 13 nt, Human adenovirus B (HAdV-B)
cagcagcaggcga

SEQ ID NO: 3903050 - RNA, 17 nt, Human adenovirus B (HAdV-B)
cagccaugaggccacaa

SEQ ID NO: 3903051 - RNA, 12 nt, Human adenovirus B (HAdV-B)
cagcgugcugga

SEQ ID NO: 3903052 - RNA, 19 nt, Human adenovirus B (HAdV-B)
cagcucuuaccaccacgcc

SEQ ID NO: 3903053 - RNA, 13 nt, Human adenovirus B (HAdV-B)
caggcagaggagg

SEQ ID NO: 3903054 - RNA, 22 nt, Human adenovirus B (HAdV-B)
caggccucuucuccaguggagu

SEQ ID NO: 3903055 - RNA, 15 nt, Human adenovirus B (HAdV-B)
caggcgccucccagg

SEQ ID NO: 3903056 - RNA, 14 nt, Human adenovirus B (HAdV-B)
caguacaggacagg

SEQ ID NO: 3903057 - RNA, 12 nt, Human adenovirus B (HAdV-B)
caguaucaucuu

SEQ ID NO: 3903058 - RNA, 21 nt, Human adenovirus B (HAdV-B)
caguccgguccugauuacuuc

SEQ ID NO: 3903059 - RNA, 18 nt, Human adenovirus B (HAdV-B)
cagucuccgauguugugu

SEQ ID NO: 3903060 - RNA, 23 nt, Human adenovirus B (HAdV-B)
caguuuggaagccacucugaacu

SEQ ID NO: 3903061 - RNA, 21 nt, Human adenovirus B (HAdV-B)
cauaauauugccaugcaggca

SEQ ID NO: 3903062 - RNA, 23 nt, Human adenovirus B (HAdV-B)
cauacuuuaaaggggaugucaaa

SEQ ID NO: 3903063 - RNA, 16 nt, Human adenovirus B (HAdV-B)
cauagauaauuacuug

SEQ ID NO: 3903064 - RNA, 16 nt, Human adenovirus B (HAdV-B)
caucacuuccaugccu

SEQ ID NO: 3903065 - RNA, 21 nt, Human adenovirus B (HAdV-B)
caucaucuccugcuugcauga

SEQ ID NO: 3903066 - RNA, 14 nt, Human adenovirus B (HAdV-B)
cauccuuggcuccg

SEQ ID NO: 3903067 - RNA, 22 nt, Human adenovirus B (HAdV-B)
caucggcuaucagggcuucuac

SEQ ID NO: 3903068 - RNA, 18 nt, Human adenovirus B (HAdV-B)
caugcuucuggguaacgg

SEQ ID NO: 3903069 - RNA, 19 nt, Human adenovirus B (HAdV-B)
cauugcuuauugcuugugc

SEQ ID NO: 3903070 - RNA, 17 nt, Human adenovirus B (HAdV-B)
cauuuucccuacuaaua

SEQ ID NO: 3903071 - RNA, 12 nt, Human adenovirus B (HAdV-B)
ccaaaucagaaa

SEQ ID NO: 3903072 - RNA, 14 nt, Human adenovirus B (HAdV-B)
ccaaccucuccaca

SEQ ID NO: 3903073 - RNA, 23 nt, Human adenovirus B (HAdV-B)
ccaagauagcuuugaggccugau

SEQ ID NO: 3903074 - RNA, 13 nt, Human adenovirus B (HAdV-B)
ccaauccaaccuu

SEQ ID NO: 3903075 - RNA, 20 nt, Human adenovirus B (HAdV-B)
ccaaugaauuaaaaaaugau

SEQ ID NO: 3903076 - RNA, 17 nt, Human adenovirus B (HAdV-B)
ccaauuaucgcugcugc

SEQ ID NO: 3903077 - RNA, 17 nt, Human adenovirus B (HAdV-B)
ccacagggucuccagcu

SEQ ID NO: 3903078 - RNA, 18 nt, Human adenovirus B (HAdV-B)
ccagaaguuggaggacgu

SEQ ID NO: 3903079 - RNA, 11 nt, Human adenovirus B (HAdV-B)
ccagaaugagc

SEQ ID NO: 3903080 - RNA, 16 nt, Human adenovirus B (HAdV-B)
ccaggaacgucagcug

SEQ ID NO: 3903081 - RNA, 15 nt, Human adenovirus B (HAdV-B)
ccaguccugccacca

SEQ ID NO: 3903082 - RNA, 17 nt, Human adenovirus B (HAdV-B)
ccagugaaucuaaugau

SEQ ID NO: 3903083 - RNA, 17 nt, Human adenovirus B (HAdV-B)
ccaguguaacaugaauc

SEQ ID NO: 3903084 - RNA, 22 nt, Human adenovirus B (HAdV-B)
ccauaauuaaaagcgcuccagc

SEQ ID NO: 3903085 - RNA, 18 nt, Human adenovirus B (HAdV-B)
ccauaguuaucacccagc

SEQ ID NO: 3903086 - RNA, 21 nt, Human adenovirus B (HAdV-B)
ccaucagcagacacaucacuu

SEQ ID NO: 3903087 - RNA, 23 nt, Human adenovirus B (HAdV-B)
ccaugccuuucucccaagcagac

SEQ ID NO: 3903088 - RNA, 15 nt, Human adenovirus B (HAdV-B)
ccaugcuuagggcgg

SEQ ID NO: 3903089 - RNA, 16 nt, Human adenovirus B (HAdV-B)
cccaauuggcuccagc

SEQ ID NO: 3903090 - RNA, 16 nt, Human adenovirus B (HAdV-B)
cccagaaauuggcccg

SEQ ID NO: 3903091 - RNA, 23 nt, Human adenovirus B (HAdV-B)
cccagggggcaauucuggcccaa

SEQ ID NO: 3903092 - RNA, 21 nt, Human adenovirus B (HAdV-B)
cccgcacuggcugcccccacc

SEQ ID NO: 3903093 - RNA, 12 nt, Human adenovirus B (HAdV-B)
ccgaccuggcag

SEQ ID NO: 3903094 - RNA, 22 nt, Human adenovirus B (HAdV-B)
ccgaccuggcagaccucaucuu

SEQ ID NO: 3903095 - RNA, 12 nt, Human adenovirus B (HAdV-B)
ccgacucuccca

SEQ ID NO: 3903096 - RNA, 20 nt, Human adenovirus B (HAdV-B)
ccgacuuugugccucucacc

SEQ ID NO: 3903097 - RNA, 23 nt, Human adenovirus B (HAdV-B)
ccgauguugugucccagcggcga

SEQ ID NO: 3903098 - RNA, 13 nt, Human adenovirus B (HAdV-B)
ccgccggucccac

SEQ ID NO: 3903099 - RNA, 14 nt, Human adenovirus B (HAdV-B)
ccgcgagugccccc

SEQ ID NO: 3903100 - RNA, 16 nt, Human adenovirus B (HAdV-B)
ccgcuuuuccagaagc

SEQ ID NO: 3903101 - RNA, 13 nt, Human adenovirus B (HAdV-B)
ccggcaggucccg

SEQ ID NO: 3903102 - RNA, 12 nt, Human adenovirus B (HAdV-B)
ccuacuccuggu

SEQ ID NO: 3903103 - RNA, 17 nt, Human adenovirus B (HAdV-B)
ccuauccuuucaaugau

SEQ ID NO: 3903104 - RNA, 20 nt, Human adenovirus B (HAdV-B)
ccucagcgacgaggaaaagg

SEQ ID NO: 3903105 - RNA, 13 nt, Human adenovirus B (HAdV-B)
ccucggugcuccu

SEQ ID NO: 3903106 - RNA, 19 nt, Human adenovirus B (HAdV-B)
ccucuucuccaguggagug

SEQ ID NO: 3903107 - RNA, 18 nt, Human adenovirus B (HAdV-B)
ccuggcagaacacacucu

SEQ ID NO: 3903108 - RNA, 16 nt, Human adenovirus B (HAdV-B)
ccuguacauucccaau

SEQ ID NO: 3903109 - RNA, 18 nt, Human adenovirus B (HAdV-B)
ccuuaccaguguaacaug

SEQ ID NO: 3903110 - RNA, 13 nt, Human adenovirus B (HAdV-B)
ccuuaucaaaugc

SEQ ID NO: 3903111 - RNA, 17 nt, Human adenovirus B (HAdV-B)
ccuucgcggcuggccau

SEQ ID NO: 3903112 - RNA, 14 nt, Human adenovirus B (HAdV-B)
ccuugacccccaga

SEQ ID NO: 3903113 - RNA, 12 nt, Human adenovirus B (HAdV-B)
ccuuucucccaa

SEQ ID NO: 3903114 - RNA, 18 nt, Human adenovirus B (HAdV-B)
cgaagagcaauaaaugac

SEQ ID NO: 3903115 - RNA, 22 nt, Human adenovirus B (HAdV-B)
cgaagccauagggcaaagucag

SEQ ID NO: 3903116 - RNA, 16 nt, Human adenovirus B (HAdV-B)
cgacaugaguaaagaa

SEQ ID NO: 3903117 - RNA, 15 nt, Human adenovirus B (HAdV-B)
cgagggucugggcaa

SEQ ID NO: 3903118 - RNA, 14 nt, Human adenovirus B (HAdV-B)
cgccagcaggaggc

SEQ ID NO: 3903119 - RNA, 17 nt, Human adenovirus B (HAdV-B)
cgcgccguagaagaggg

SEQ ID NO: 3903120 - RNA, 20 nt, Human adenovirus B (HAdV-B)
cgcucgauuguugaucaccu

SEQ ID NO: 3903121 - RNA, 16 nt, Human adenovirus B (HAdV-B)
cggaucuccugggcau

SEQ ID NO: 3903122 - RNA, 22 nt, Human adenovirus B (HAdV-B)
cggauucuuaacagugcaggca

SEQ ID NO: 3903123 - RNA, 13 nt, Human adenovirus B (HAdV-B)
cggcgucccagca

SEQ ID NO: 3903124 - RNA, 15 nt, Human adenovirus B (HAdV-B)
cgguccuuccagggu

SEQ ID NO: 3903125 - RNA, 14 nt, Human adenovirus B (HAdV-B)
cguaguugagcgcc

SEQ ID NO: 3903126 - RNA, 14 nt, Human adenovirus B (HAdV-B)
cguucgcucaccag

SEQ ID NO: 3903127 - RNA, 19 nt, Human adenovirus B (HAdV-B)
cuaaccaggcugugcagaa

SEQ ID NO: 3903128 - RNA, 23 nt, Human adenovirus B (HAdV-B)
cuacacacagaaauauaaauuuu

SEQ ID NO: 3903129 - RNA, 23 nt, Human adenovirus B (HAdV-B)
ugagcaucacagcguucuggugg

SEQ ID NO: 3903130 - RNA, 18 nt, Human adenovirus B (HAdV-B)
ugagcugcgucacgguuu

SEQ ID NO: 3903131 - RNA, 18 nt, Human adenovirus B (HAdV-B)
ugaggaccaaucacagcc

SEQ ID NO: 3903132 - RNA, 23 nt, Human adenovirus B (HAdV-B)
ugaugaagcauacaauccagaca

SEQ ID NO: 3903133 - RNA, 16 nt, Human adenovirus B (HAdV-B)
ugaugcagcagcagca

SEQ ID NO: 3903134 - RNA, 22 nt, Human adenovirus B (HAdV-B)
ugauggauauguggccuggggu

SEQ ID NO: 3903135 - RNA, 19 nt, Human adenovirus B (HAdV-B)
ugauuaacugccuuguaag

SEQ ID NO: 3903136 - RNA, 18 nt, Human adenovirus B (HAdV-B)
ugauuucacucaaaucuu

SEQ ID NO: 3903137 - RNA, 16 nt, Human adenovirus B (HAdV-B)
ugcaaggccccagcag

SEQ ID NO: 3903138 - RNA, 12 nt, Human adenovirus B (HAdV-B)
ugcacgccccac

SEQ ID NO: 3903139 - RNA, 23 nt, Human adenovirus B (HAdV-B)
ugcaucgcuguccggggucaugg

SEQ ID NO: 3903140 - RNA, 18 nt, Human adenovirus B (HAdV-B)
ugccacauccgguggggc

SEQ ID NO: 3903141 - RNA, 16 nt, Human adenovirus B (HAdV-B)
ugccaucuuccagcag

SEQ ID NO: 3903142 - RNA, 22 nt, Human adenovirus B (HAdV-B)
ugcgcccccaacaacagccccc

SEQ ID NO: 3903143 - RNA, 16 nt, Human adenovirus B (HAdV-B)
ugcggaggaggagagg

SEQ ID NO: 3903144 - RNA, 17 nt, Human adenovirus B (HAdV-B)
ugcggaggaggagagga

SEQ ID NO: 3903145 - RNA, 15 nt, Human adenovirus B (HAdV-B)
ugcggcaggcaugca

SEQ ID NO: 3903146 - RNA, 15 nt, Human adenovirus B (HAdV-B)
ugcgggacagcccgc

SEQ ID NO: 3903147 - RNA, 16 nt, Human adenovirus B (HAdV-B)
ugcguucgcucaccag

SEQ ID NO: 3903148 - RNA, 23 nt, Human adenovirus B (HAdV-B)
ugcuaccuguuccgucuggccaa

SEQ ID NO: 3903149 - RNA, 19 nt, Human adenovirus B (HAdV-B)
ugcuuagggcggccagacg

SEQ ID NO: 3903150 - RNA, 18 nt, Human adenovirus B (HAdV-B)
uggaaaagcguggaaaaa

SEQ ID NO: 3903151 - RNA, 20 nt, Human adenovirus B (HAdV-B)
uggcacgucuaggugcgccu

SEQ ID NO: 3903152 - RNA, 23 nt, Human adenovirus B (HAdV-B)
uggcaugagguucagaaagaggg

SEQ ID NO: 3903153 - RNA, 23 nt, Human adenovirus B (HAdV-B)
uggcugggcaccgacucucccag

SEQ ID NO: 3903154 - RNA, 16 nt, Human adenovirus B (HAdV-B)
ugggacagucaggcag

SEQ ID NO: 3903155 - RNA, 20 nt, Human adenovirus B (HAdV-B)
ugggcauuacccggacgagu

SEQ ID NO: 3903156 - RNA, 14 nt, Human adenovirus B (HAdV-B)
uggguagacagaau

SEQ ID NO: 3903157 - RNA, 13 nt, Human adenovirus B (HAdV-B)
uguaagggcagca

SEQ ID NO: 3903158 - RNA, 17 nt, Human adenovirus B (HAdV-B)
ugugcgaauugccuacc

SEQ ID NO: 3903159 - RNA, 20 nt, Human adenovirus B (HAdV-B)
ugugggagggguagcgaucg

SEQ ID NO: 3903160 - RNA, 13 nt, Human adenovirus B (HAdV-B)
ugugugacagaac

SEQ ID NO: 3903161 - RNA, 14 nt, Human adenovirus B (HAdV-B)
uuaaacacacccuc

SEQ ID NO: 3903162 - RNA, 16 nt, Human adenovirus B (HAdV-B)
uuaaaccggucacuuu

SEQ ID NO: 3903163 - RNA, 15 nt, Human adenovirus B (HAdV-B)
uuaauaaaaacugaa

SEQ ID NO: 3903164 - RNA, 13 nt, Human adenovirus B (HAdV-B)
uuacaucucucau

SEQ ID NO: 3903165 - RNA, 23 nt, Human adenovirus B (HAdV-B)
uuacuagucucgcaacucugacu

SEQ ID NO: 3903166 - RNA, 23 nt, Human adenovirus B (HAdV-B)
uuacuuugcgaaacggauugccu

SEQ ID NO: 3903167 - RNA, 23 nt, Human adenovirus B (HAdV-B)
uuagacagcaaccccaggccaac

SEQ ID NO: 3903168 - RNA, 20 nt, Human adenovirus B (HAdV-B)
uuauaaacccaggguuuauu

SEQ ID NO: 3903169 - RNA, 12 nt, Human adenovirus B (HAdV-B)
uucacagcagua

SEQ ID NO: 3903170 - RNA, 17 nt, Human adenovirus B (HAdV-B)
uuccaacccuguaugcc

SEQ ID NO: 3903171 - RNA, 17 nt, Human adenovirus B (HAdV-B)
uuccaucgagugcaccu

SEQ ID NO: 3903172 - RNA, 23 nt, Human adenovirus B (HAdV-B)
uuccccuacaaaacaugcaacau

SEQ ID NO: 3903173 - RNA, 21 nt, Human adenovirus B (HAdV-B)
uuccuagaacagaaaggggga

SEQ ID NO: 3903174 - RNA, 17 nt, Human adenovirus B (HAdV-B)
uucggccugcgucauca

SEQ ID NO: 3903175 - RNA, 17 nt, Human adenovirus B (HAdV-B)
uucuaacuccucaauca

SEQ ID NO: 3903176 - RNA, 15 nt, Human adenovirus B (HAdV-B)
uucuuguagugagga

SEQ ID NO: 3903177 - RNA, 18 nt, Human adenovirus B (HAdV-B)
uuggaauaucuauucuug

SEQ ID NO: 3903178 - RNA, 15 nt, Human adenovirus B (HAdV-B)
uugggugggagagga

SEQ ID NO: 3903179 - RNA, 21 nt, Human adenovirus B (HAdV-B)
uuguagugcuaggaauucuug

SEQ ID NO: 3903180 - RNA, 16 nt, Human adenovirus B (HAdV-B)
uugugauuauucuuug

SEQ ID NO: 3903181 - RNA, 14 nt, Human adenovirus B (HAdV-B)
uuucagaagacaug

SEQ ID NO: 3903182 - RNA, 12 nt, Human adenovirus B (HAdV-B)
uuuccauuccuu

SEQ ID NO: 3903183 - RNA, 12 nt, Human adenovirus B (HAdV-B)
uuucuguucugu

SEQ ID NO: 3903184 - RNA, 17 nt, Human adenovirus B (HAdV-B)
ccguagaagagggaugu

SEQ ID NO: 3903185 - RNA, 13 nt, Human adenovirus B (HAdV-B)
ccuaacaggaauu

SEQ ID NO: 3903186 - RNA, 21 nt, Human adenovirus B (HAdV-B)
ccuccccaauuggcuccagca

SEQ ID NO: 3903187 - RNA, 22 nt, Human adenovirus B (HAdV-B)
ccugcaacgaauuuucucccag

SEQ ID NO: 3903188 - RNA, 9 nt, Human adenovirus B (HAdV-B)
ccugcugcu

SEQ ID NO: 3903189 - RNA, 21 nt, Human adenovirus B (HAdV-B)
ccuggcaccuacggagggcag

SEQ ID NO: 3903190 - RNA, 14 nt, Human adenovirus B (HAdV-B)
ccugguccugugac

SEQ ID NO: 3903191 - RNA, 14 nt, Human adenovirus B (HAdV-B)
ccuguaugccaucu

SEQ ID NO: 3903192 - RNA, 19 nt, Human adenovirus B (HAdV-B)
ccuguaugccaucuuccag

SEQ ID NO: 3903193 - RNA, 18 nt, Human adenovirus B (HAdV-B)
ccuuaucaaaugcucacu

SEQ ID NO: 3903194 - RNA, 16 nt, Human adenovirus B (HAdV-B)
ccuucuccggaucucc

SEQ ID NO: 3903195 - RNA, 19 nt, Human adenovirus B (HAdV-B)
cgaagccuuuagacagcaa

SEQ ID NO: 3903196 - RNA, 21 nt, Human adenovirus B (HAdV-B)
cgaggaaaaggagcagagcuu

SEQ ID NO: 3903197 - RNA, 14 nt, Human adenovirus B (HAdV-B)
cgaggaggaagagg

SEQ ID NO: 3903198 - RNA, 15 nt, Human adenovirus B (HAdV-B)
cgaggaggaagaggg

SEQ ID NO: 3903199 - RNA, 21 nt, Human adenovirus B (HAdV-B)
cgaguuaaugauauacgcgcc

SEQ ID NO: 3903200 - RNA, 20 nt, Human adenovirus B (HAdV-B)
cgaucucgcaguacuucaaa

SEQ ID NO: 3903201 - RNA, 14 nt, Human adenovirus B (HAdV-B)
cgauggcugggcac

SEQ ID NO: 3903202 - RNA, 16 nt, Human adenovirus B (HAdV-B)
cgcaaaaaauggccug

SEQ ID NO: 3903203 - RNA, 21 nt, Human adenovirus B (HAdV-B)
cgcaucucaugacaugcagaa

SEQ ID NO: 3903204 - RNA, 16 nt, Human adenovirus B (HAdV-B)
cgccaaacccaacaca

SEQ ID NO: 3903205 - RNA, 19 nt, Human adenovirus B (HAdV-B)
cgcccucaagggccgcacu

SEQ ID NO: 3903206 - RNA, 20 nt, Human adenovirus B (HAdV-B)
cgcgguuagcgccagcagga

SEQ ID NO: 3903207 - RNA, 19 nt, Human adenovirus B (HAdV-B)
cgcuuccgaccuggcagac

SEQ ID NO: 3903208 - RNA, 13 nt, Human adenovirus B (HAdV-B)
cggcucugggcau

SEQ ID NO: 3903209 - RNA, 23 nt, Human adenovirus B (HAdV-B)
cgggacccugccguugcgcagca

SEQ ID NO: 3903210 - RNA, 16 nt, Human adenovirus B (HAdV-B)
cgggguugggcaaagc

SEQ ID NO: 3903211 - RNA, 23 nt, Human adenovirus B (HAdV-B)
cggugcuuccgaugagaggccuu

SEQ ID NO: 3903212 - RNA, 21 nt, Human adenovirus B (HAdV-B)
cgguugagaugccuuucauga

SEQ ID NO: 3903213 - RNA, 19 nt, Human adenovirus B (HAdV-B)
cguccuuucaagccgcacu

SEQ ID NO: 3903214 - RNA, 13 nt, Human adenovirus B (HAdV-B)
cgugaugcagcag

SEQ ID NO: 3903215 - RNA, 18 nt, Human adenovirus B (HAdV-B)
cguuaaccccacagccaa

SEQ ID NO: 3903216 - RNA, 21 nt, Human adenovirus B (HAdV-B)
cguuccugcucucacagauca

SEQ ID NO: 3903217 - RNA, 20 nt, Human adenovirus B (HAdV-B)
cuaaggccauuugccauucu

SEQ ID NO: 3903218 - RNA, 14 nt, Human adenovirus B (HAdV-B)
cuaaugauugcaaa

SEQ ID NO: 3903219 - RNA, 14 nt, Human adenovirus B (HAdV-B)
cuacaaaacaugca

SEQ ID NO: 3903220 - RNA, 18 nt, Human adenovirus B (HAdV-B)
cuacagcugcugcagaag

SEQ ID NO: 3903221 - RNA, 21 nt, Human adenovirus B (HAdV-B)
cuagcuuguuaacuccgaacu

SEQ ID NO: 3903222 - RNA, 19 nt, Human adenovirus B (HAdV-B)
cuauaggcucaaacugcac

SEQ ID NO: 3903223 - RNA, 15 nt, Human adenovirus B (HAdV-B)
cuauccgcaagcaau

SEQ ID NO: 3903224 - RNA, 20 nt, Human adenovirus B (HAdV-B)
cuauggagucacugcuaccu

SEQ ID NO: 3903225 - RNA, 18 nt, Human adenovirus B (HAdV-B)
cuauucaaccuguagaaa

SEQ ID NO: 3903226 - RNA, 14 nt, Human adenovirus B (HAdV-B)
cuauuuagagacag

SEQ ID NO: 3903227 - RNA, 12 nt, Human adenovirus B (HAdV-B)
cucaaaacucca

SEQ ID NO: 3903228 - RNA, 16 nt, Human adenovirus B (HAdV-B)
cucacuauucaaccug

SEQ ID NO: 3903229 - RNA, 22 nt, Human adenovirus B (HAdV-B)
cucacuucccucuucccaacuc

SEQ ID NO: 3903230 - RNA, 15 nt, Human adenovirus B (HAdV-B)
cucacuugccacccu

SEQ ID NO: 3903231 - RNA, 18 nt, Human adenovirus B (HAdV-B)
cucaguggauugcagaag

SEQ ID NO: 3903232 - RNA, 19 nt, Human adenovirus B (HAdV-B)
cuccaacauuguuaguuuu

SEQ ID NO: 3903233 - RNA, 17 nt, Human adenovirus B (HAdV-B)
cuccaucagcagacaca

SEQ ID NO: 3903234 - RNA, 23 nt, Human adenovirus B (HAdV-B)
cuccgguauccugcccgccaccu

SEQ ID NO: 3903235 - RNA, 20 nt, Human adenovirus B (HAdV-B)
cucgcaacucugacuucugc

SEQ ID NO: 3903236 - RNA, 17 nt, Human adenovirus B (HAdV-B)
cucuucgggggcagagg

SEQ ID NO: 3903237 - RNA, 14 nt, Human adenovirus B (HAdV-B)
cucuucuccagugg

SEQ ID NO: 3903238 - RNA, 12 nt, Human adenovirus B (HAdV-B)
cucuucucuuuc

SEQ ID NO: 3903239 - RNA, 21 nt, Human adenovirus B (HAdV-B)
cugaagugcccaucagugugg

SEQ ID NO: 3903240 - RNA, 16 nt, Human adenovirus B (HAdV-B)
cugacacuccuggucc

SEQ ID NO: 3903241 - RNA, 17 nt, Human adenovirus B (HAdV-B)
cugaugggagugggguc

SEQ ID NO: 3903242 - RNA, 15 nt, Human adenovirus B (HAdV-B)
cugcaacuacugcaa

SEQ ID NO: 3903243 - RNA, 21 nt, Human adenovirus B (HAdV-B)
cugcaaucaugcccacaucca

SEQ ID NO: 3903244 - RNA, 18 nt, Human adenovirus B (HAdV-B)
cugccaaugcaaccaaua

SEQ ID NO: 3903245 - RNA, 19 nt, Human adenovirus B (HAdV-B)
cugccguugcgcagcagua

SEQ ID NO: 3903246 - RNA, 20 nt, Human adenovirus B (HAdV-B)
cuggaggacagucuggagga

SEQ ID NO: 3903247 - RNA, 22 nt, Human adenovirus B (HAdV-B)
cuggcacgauucucacuugcca

SEQ ID NO: 3903248 - RNA, 18 nt, Human adenovirus B (HAdV-B)
cuggcuuucauccaugga

SEQ ID NO: 3903249 - RNA, 19 nt, Human adenovirus B (HAdV-B)
cugggaccugguucacgcu

SEQ ID NO: 3903250 - RNA, 19 nt, Human adenovirus B (HAdV-B)
cugggaugggaucccgaaa

SEQ ID NO: 3903251 - RNA, 17 nt, Human adenovirus B (HAdV-B)
cuguauaggagcauuug

SEQ ID NO: 3903252 - RNA, 20 nt, Human adenovirus B (HAdV-B)
cuguggacaguuaugauccu

SEQ ID NO: 3903253 - RNA, 18 nt, Human adenovirus B (HAdV-B)
cuguguagaugccugggg

SEQ ID NO: 3903254 - RNA, 17 nt, Human adenovirus B (HAdV-B)
cuuacauucaauucaaa

SEQ ID NO: 3903255 - RNA, 14 nt, Human adenovirus B (HAdV-B)
cuuagaaaaugcaa

SEQ ID NO: 3903256 - RNA, 20 nt, Human adenovirus B (HAdV-B)
cuuaucaacauucuacagag

SEQ ID NO: 3903257 - RNA, 16 nt, Human adenovirus B (HAdV-B)
cuuccagaaaacaaaa

SEQ ID NO: 3903258 - RNA, 19 nt, Human adenovirus B (HAdV-B)
cuucuccggaucuccuggg

SEQ ID NO: 3903259 - RNA, 13 nt, Human adenovirus B (HAdV-B)
cuucuccugggca

SEQ ID NO: 3903260 - RNA, 14 nt, Human adenovirus B (HAdV-B)
cuucuccugggcaa

SEQ ID NO: 3903261 - RNA, 22 nt, Human adenovirus B (HAdV-B)
cuucuuagacucaucuaaaacc

SEQ ID NO: 3903262 - RNA, 20 nt, Human adenovirus B (HAdV-B)
cuugagaaugaaaaauaucu

SEQ ID NO: 3903263 - RNA, 21 nt, Human adenovirus B (HAdV-B)
cuugcuggagugucacugccg

SEQ ID NO: 3903264 - RNA, 15 nt, Human adenovirus B (HAdV-B)
cuugugacuagugaa

SEQ ID NO: 3903265 - RNA, 13 nt, Human adenovirus B (HAdV-B)
gaacgaaacuuuu

SEQ ID NO: 3903266 - RNA, 17 nt, Human adenovirus B (HAdV-B)
gaagacaguuuggagga

SEQ ID NO: 3903267 - RNA, 17 nt, Human adenovirus B (HAdV-B)
gaagaugaacuucccaa

SEQ ID NO: 3903268 - RNA, 21 nt, Human adenovirus B (HAdV-B)
gaagauugggacagucaggca

SEQ ID NO: 3903269 - RNA, 17 nt, Human adenovirus B (HAdV-B)
gaaucaccaacuuggga

SEQ ID NO: 3903270 - RNA, 21 nt, Human adenovirus B (HAdV-B)
gaaugacccgcaggcagugau

SEQ ID NO: 3903271 - RNA, 19 nt, Human adenovirus B (HAdV-B)
gacaauucucuagaaacuu

SEQ ID NO: 3903272 - RNA, 14 nt, Human adenovirus B (HAdV-B)
gacagaauggagug

SEQ ID NO: 3903273 - RNA, 23 nt, Human adenovirus B (HAdV-B)
gacgaaaguacgguccagcaagu

SEQ ID NO: 3903274 - RNA, 13 nt, Human adenovirus B (HAdV-B)
gacuauaaaagua

SEQ ID NO: 3903275 - RNA, 17 nt, Human adenovirus B (HAdV-B)
gacuugucuccugaacu

SEQ ID NO: 3903276 - RNA, 14 nt, Human adenovirus B (HAdV-B)
gagacgagccuggg

SEQ ID NO: 3903277 - RNA, 15 nt, Human adenovirus B (HAdV-B)
gagacgcccaggccg

SEQ ID NO: 3903278 - RNA, 15 nt, Human adenovirus B (HAdV-B)
gagaugcgagcuucc

SEQ ID NO: 3903279 - RNA, 14 nt, Human adenovirus B (HAdV-B)
gagccugggaucau

SEQ ID NO: 3903280 - RNA, 15 nt, Human adenovirus B (HAdV-B)
gagcucagccgcgcc

SEQ ID NO: 3903281 - RNA, 17 nt, Human adenovirus B (HAdV-B)
gaggcagucuaccugcg

SEQ ID NO: 3903282 - RNA, 14 nt, Human adenovirus B (HAdV-B)
gagugcgggggcaa

SEQ ID NO: 3903283 - RNA, 14 nt, Human adenovirus B (HAdV-B)
gagugcuugaaagu

SEQ ID NO: 3903284 - RNA, 15 nt, Human adenovirus B (HAdV-B)
gagugcuugaaagug

SEQ ID NO: 3903285 - RNA, 16 nt, Human adenovirus B (HAdV-B)
gaguucauaccgaacu

SEQ ID NO: 3903286 - RNA, 23 nt, Human adenovirus B (HAdV-B)
gauccauggaugcccaugccuau

SEQ ID NO: 3903287 - RNA, 13 nt, Human adenovirus B (HAdV-B)
cucccuggcuccu

SEQ ID NO: 3903288 - RNA, 14 nt, Human adenovirus B (HAdV-B)
cuccuaggcagaga

SEQ ID NO: 3903289 - RNA, 18 nt, Human adenovirus B (HAdV-B)
cucgaaaacugguuagcu

SEQ ID NO: 3903290 - RNA, 16 nt, Human adenovirus B (HAdV-B)
cucuaccccauuccug

SEQ ID NO: 3903291 - RNA, 16 nt, Human adenovirus B (HAdV-B)
cucugacacuccuggu

SEQ ID NO: 3903292 - RNA, 23 nt, Human adenovirus B (HAdV-B)
cucugagcgccgcgacggcagga

SEQ ID NO: 3903293 - RNA, 23 nt, Human adenovirus B (HAdV-B)
cugagcaauugagauuugccaca

SEQ ID NO: 3903294 - RNA, 19 nt, Human adenovirus B (HAdV-B)
cugcaaccauggccugcgg

SEQ ID NO: 3903295 - RNA, 14 nt, Human adenovirus B (HAdV-B)
cugcaaucaugccc

SEQ ID NO: 3903296 - RNA, 13 nt, Human adenovirus B (HAdV-B)
cugcagaaucauu

SEQ ID NO: 3903297 - RNA, 13 nt, Human adenovirus B (HAdV-B)
cugcagagccagc

SEQ ID NO: 3903298 - RNA, 17 nt, Human adenovirus B (HAdV-B)
cugcgguccgaccugga

SEQ ID NO: 3903299 - RNA, 21 nt, Human adenovirus B (HAdV-B)
cugcguucgcucaccagaagu

SEQ ID NO: 3903300 - RNA, 23 nt, Human adenovirus B (HAdV-B)
cugcuugggcgcuugccagggug

SEQ ID NO: 3903301 - RNA, 19 nt, Human adenovirus B (HAdV-B)
cuggacuacuugcacagag

SEQ ID NO: 3903302 - RNA, 13 nt, Human adenovirus B (HAdV-B)
cugguggccaccu

SEQ ID NO: 3903303 - RNA, 17 nt, Human adenovirus B (HAdV-B)
cugguuuuuauugcuuu

SEQ ID NO: 3903304 - RNA, 16 nt, Human adenovirus B (HAdV-B)
cuguauaggagcauuu

SEQ ID NO: 3903305 - RNA, 15 nt, Human adenovirus B (HAdV-B)
cuuaacauuuaauuu

SEQ ID NO: 3903306 - RNA, 17 nt, Human adenovirus B (HAdV-B)
cuuaccggcucugggca

SEQ ID NO: 3903307 - RNA, 12 nt, Human adenovirus B (HAdV-B)
cuuaccuuuggu

SEQ ID NO: 3903308 - RNA, 22 nt, Human adenovirus B (HAdV-B)
cuuagauuugauauuuaauuug

SEQ ID NO: 3903309 - RNA, 15 nt, Human adenovirus B (HAdV-B)
cuucaacauccagga

SEQ ID NO: 3903310 - RNA, 21 nt, Human adenovirus B (HAdV-B)
cuucgacccagaaaacugcac

SEQ ID NO: 3903311 - RNA, 14 nt, Human adenovirus B (HAdV-B)
cuucucauaauuuu

SEQ ID NO: 3903312 - RNA, 19 nt, Human adenovirus B (HAdV-B)
cuugaauucgggaaucacc

SEQ ID NO: 3903313 - RNA, 18 nt, Human adenovirus B (HAdV-B)
cuugaccacgguggugca

SEQ ID NO: 3903314 - RNA, 14 nt, Human adenovirus B (HAdV-B)
cuugcaggacagaa

SEQ ID NO: 3903315 - RNA, 15 nt, Human adenovirus B (HAdV-B)
cuugcaggucugccu

SEQ ID NO: 3903316 - RNA, 23 nt, Human adenovirus B (HAdV-B)
cuugccagggugcgcuucagacu

SEQ ID NO: 3903317 - RNA, 20 nt, Human adenovirus B (HAdV-B)
cuugcuggagugucacugcc

SEQ ID NO: 3903318 - RNA, 13 nt, Human adenovirus B (HAdV-B)
cuugggacagaau

SEQ ID NO: 3903319 - RNA, 14 nt, Human adenovirus B (HAdV-B)
cuuggguugccacu

SEQ ID NO: 3903320 - RNA, 15 nt, Human adenovirus B (HAdV-B)
cuugguuugaugcau

SEQ ID NO: 3903321 - RNA, 21 nt, Human adenovirus B (HAdV-B)
cuuguagugaggaaaaguuuu

SEQ ID NO: 3903322 - RNA, 11 nt, Human adenovirus B (HAdV-B)
cuuuaaguuua

SEQ ID NO: 3903323 - RNA, 14 nt, Human adenovirus B (HAdV-B)
cuuuaugagccaga

SEQ ID NO: 3903324 - RNA, 20 nt, Human adenovirus B (HAdV-B)
cuuugugccucucaccuacc

SEQ ID NO: 3903325 - RNA, 15 nt, Human adenovirus B (HAdV-B)
gaacagcaguacagg

SEQ ID NO: 3903326 - RNA, 14 nt, Human adenovirus B (HAdV-B)
gaagauauggagga

SEQ ID NO: 3903327 - RNA, 15 nt, Human adenovirus B (HAdV-B)
gaagccguacauggg

SEQ ID NO: 3903328 - RNA, 14 nt, Human adenovirus B (HAdV-B)
gaaggacucccagu

SEQ ID NO: 3903329 - RNA, 20 nt, Human adenovirus B (HAdV-B)
gaaggcgauaaugccagacu

SEQ ID NO: 3903330 - RNA, 22 nt, Human adenovirus B (HAdV-B)
gaaggggugugcgccugcuugg

SEQ ID NO: 3903331 - RNA, 12 nt, Human adenovirus B (HAdV-B)
gaauacaccaau

SEQ ID NO: 3903332 - RNA, 19 nt, Human adenovirus B (HAdV-B)
gaaucauaauauugccaug

SEQ ID NO: 3903333 - RNA, 21 nt, Human adenovirus B (HAdV-B)
gaaugaaggcgaagcaagggu

SEQ ID NO: 3903334 - RNA, 18 nt, Human adenovirus B (HAdV-B)
gaauggcagggaagugag

SEQ ID NO: 3903335 - RNA, 23 nt, Human adenovirus B (HAdV-B)
gacacggcuuugugcggcaggca

SEQ ID NO: 3903336 - RNA, 15 nt, Human adenovirus B (HAdV-B)
gacacuccugguccu

SEQ ID NO: 3903337 - RNA, 18 nt, Human adenovirus B (HAdV-B)
gacagacaucgagcaaga

SEQ ID NO: 3903338 - RNA, 16 nt, Human adenovirus B (HAdV-B)
gacagucaggcagagg

SEQ ID NO: 3903339 - RNA, 21 nt, Human adenovirus B (HAdV-B)
gacaugcaugacccagaugcc

SEQ ID NO: 3903340 - RNA, 13 nt, Human adenovirus B (HAdV-B)
gacgaaguguacc

SEQ ID NO: 3903341 - RNA, 16 nt, Human adenovirus B (HAdV-B)
gacuccguagccugga

SEQ ID NO: 3903342 - RNA, 21 nt, Human adenovirus B (HAdV-B)
gacugccgcuucuucaacccg

SEQ ID NO: 3903343 - RNA, 20 nt, Human adenovirus B (HAdV-B)
gacuuuaugagccagagcau

SEQ ID NO: 3903344 - RNA, 12 nt, Human adenovirus B (HAdV-B)
gagaauaaaaaa

SEQ ID NO: 3903345 - RNA, 14 nt, Human adenovirus B (HAdV-B)
gagacaagcaacag

SEQ ID NO: 3903346 - RNA, 15 nt, Human adenovirus B (HAdV-B)
gagacgagccuggga

SEQ ID NO: 3903347 - RNA, 14 nt, Human adenovirus B (HAdV-B)
gagacgcuggugac

SEQ ID NO: 3903348 - RNA, 12 nt, Human adenovirus B (HAdV-B)
gagcagacagua

SEQ ID NO: 3903349 - RNA, 21 nt, Human adenovirus B (HAdV-B)
gagccagcgcaaacccgagag

SEQ ID NO: 3903350 - RNA, 17 nt, Human adenovirus B (HAdV-B)
gagcugacuugcagugg

SEQ ID NO: 3903351 - RNA, 16 nt, Human adenovirus B (HAdV-B)
gagcuuaagcauucca

SEQ ID NO: 3903352 - RNA, 19 nt, Human adenovirus B (HAdV-B)
gaggaaaaggagcagagcu

SEQ ID NO: 3903353 - RNA, 15 nt, Human adenovirus B (HAdV-B)
gagggucugcaucca

SEQ ID NO: 3903354 - RNA, 19 nt, Human adenovirus B (HAdV-B)
gaguucuuacuuuaaaaug

SEQ ID NO: 3903355 - RNA, 20 nt, Human adenovirus B (HAdV-B)
gauacucaagacaaggcagu

SEQ ID NO: 3903356 - RNA, 18 nt, Human adenovirus B (HAdV-B)
gauagccccaauggccac

SEQ ID NO: 3903357 - RNA, 16 nt, Human adenovirus B (HAdV-B)
gaucaccugggcagcu

SEQ ID NO: 3903358 - RNA, 14 nt, Human adenovirus B (HAdV-B)
gaucaugccuggag

SEQ ID NO: 3903359 - RNA, 11 nt, Human adenovirus B (HAdV-B)
gaucuccuggg

SEQ ID NO: 3903360 - RNA, 12 nt, Human adenovirus B (HAdV-B)
gaugagcaucac

SEQ ID NO: 3903361 - RNA, 14 nt, Human adenovirus B (HAdV-B)
gauggaacagcaag

SEQ ID NO: 3903362 - RNA, 18 nt, Human adenovirus B (HAdV-B)
gaugucucacgcuugcca

SEQ ID NO: 3903363 - RNA, 14 nt, Human adenovirus B (HAdV-B)
gauugcccaggacu

SEQ ID NO: 3903364 - RNA, 14 nt, Human adenovirus B (HAdV-B)
gcaaaucuggaaga

SEQ ID NO: 3903365 - RNA, 14 nt, Human adenovirus B (HAdV-B)
gcaaggccccagca

SEQ ID NO: 3903366 - RNA, 17 nt, Human adenovirus B (HAdV-B)
gcaaggccccagcagcc

SEQ ID NO: 3903367 - RNA, 20 nt, Human adenovirus B (HAdV-B)
gcacacguggcugcagccaa

SEQ ID NO: 3903368 - RNA, 21 nt, Human adenovirus B (HAdV-B)
gcacauccaagaacaaaagaa

SEQ ID NO: 3903369 - RNA, 18 nt, Human adenovirus B (HAdV-B)
gcacccaauuaggcuugu

SEQ ID NO: 3903370 - RNA, 19 nt, Human adenovirus B (HAdV-B)
gcacgguuugaccagugag

SEQ ID NO: 3903371 - RNA, 13 nt, Human adenovirus B (HAdV-B)
gcagaauaaaaaa

SEQ ID NO: 3903372 - RNA, 16 nt, Human adenovirus B (HAdV-B)
gcagagacaaugaggc

SEQ ID NO: 3903373 - RNA, 19 nt, Human adenovirus B (HAdV-B)
gcagcaauguuuagaagaa

SEQ ID NO: 3903374 - RNA, 16 nt, Human adenovirus B (HAdV-B)
gcagcacuggacauga

SEQ ID NO: 3903375 - RNA, 14 nt, Human adenovirus B (HAdV-B)
gcagcagcagcaau

SEQ ID NO: 3903376 - RNA, 21 nt, Human adenovirus B (HAdV-B)
gcaggaacugaaaauaaaaaa

SEQ ID NO: 3903377 - RNA, 14 nt, Human adenovirus B (HAdV-B)
gcaggcaagcagcc

SEQ ID NO: 3903378 - RNA, 20 nt, Human adenovirus B (HAdV-B)
gcaggcacuucagcuugccc

SEQ ID NO: 3903379 - RNA, 18 nt, Human adenovirus B (HAdV-B)
gcaguagaugggacgaga

SEQ ID NO: 3903380 - RNA, 16 nt, Human adenovirus B (HAdV-B)
gcauacaugccacaga

SEQ ID NO: 3903381 - RNA, 16 nt, Human adenovirus B (HAdV-B)
gccaaagagcucagag

SEQ ID NO: 3903382 - RNA, 19 nt, Human adenovirus B (HAdV-B)
gcccgucuucucaaagagc

SEQ ID NO: 3903383 - RNA, 23 nt, Human adenovirus B (HAdV-B)
gccugcaacgaauuuucucccag

SEQ ID NO: 3903384 - RNA, 16 nt, Human adenovirus B (HAdV-B)
gccugcgucaucaccc

SEQ ID NO: 3903385 - RNA, 17 nt, Human adenovirus B (HAdV-B)
gcgaagcaucgagguca

SEQ ID NO: 3903386 - RNA, 17 nt, Human adenovirus B (HAdV-B)
gcgccaaggucaacccu

SEQ ID NO: 3903387 - RNA, 18 nt, Human adenovirus B (HAdV-B)
gcgccaugacagacagag

SEQ ID NO: 3903388 - RNA, 22 nt, Human adenovirus B (HAdV-B)
gcgccugcuugggcgcuugcca

SEQ ID NO: 3903389 - RNA, 19 nt, Human adenovirus B (HAdV-B)
gcgcgauaccaggcauagc

SEQ ID NO: 3903390 - RNA, 22 nt, Human adenovirus B (HAdV-B)
aaaaaguucuugugugacagaa

SEQ ID NO: 3903391 - RNA, 22 nt, Human adenovirus B (HAdV-B)
aaaacacacuacccacauacau

SEQ ID NO: 3903392 - RNA, 19 nt, Human adenovirus B (HAdV-B)
ccagcgguucuggaggagg

SEQ ID NO: 3903393 - RNA, 15 nt, Human adenovirus B (HAdV-B)
ccagguggucucugg

SEQ ID NO: 3903394 - RNA, 19 nt, Human adenovirus B (HAdV-B)
ccagguuguaucuggugga

SEQ ID NO: 3903395 - RNA, 13 nt, Human adenovirus B (HAdV-B)
ccaguggaggagg

SEQ ID NO: 3903396 - RNA, 17 nt, Human adenovirus B (HAdV-B)
ccaucagcgacggaugu

SEQ ID NO: 3903397 - RNA, 22 nt, Human adenovirus B (HAdV-B)
ccaucgugaacgcguuggugga

SEQ ID NO: 3903398 - RNA, 15 nt, Human adenovirus B (HAdV-B)
ccaucuuccagcaga

SEQ ID NO: 3903399 - RNA, 16 nt, Human adenovirus B (HAdV-B)
ccaucuuccagcagag

SEQ ID NO: 3903400 - RNA, 16 nt, Human adenovirus B (HAdV-B)
ccaugccuuucuccca

SEQ ID NO: 3903401 - RNA, 18 nt, Human adenovirus B (HAdV-B)
cccagggauuuggaagag

SEQ ID NO: 3903402 - RNA, 19 nt, Human adenovirus B (HAdV-B)
ccccuacuauagccagcaa

SEQ ID NO: 3903403 - RNA, 18 nt, Human adenovirus B (HAdV-B)
cccgucuucucaaagagc

SEQ ID NO: 3903404 - RNA, 20 nt, Human adenovirus B (HAdV-B)
cccuccgacuuugugccucu

SEQ ID NO: 3903405 - RNA, 17 nt, Human adenovirus B (HAdV-B)
cccuugaagccaugcug

SEQ ID NO: 3903406 - RNA, 14 nt, Human adenovirus B (HAdV-B)
ccgacucucccagg

SEQ ID NO: 3903407 - RNA, 13 nt, Human adenovirus B (HAdV-B)
ccgauccaugcuu

SEQ ID NO: 3903408 - RNA, 17 nt, Human adenovirus B (HAdV-B)
ccgccgcccccagaaga

SEQ ID NO: 3903409 - RNA, 21 nt, Human adenovirus B (HAdV-B)
ccggcaucauucacacagcag

SEQ ID NO: 3903410 - RNA, 19 nt, Human adenovirus B (HAdV-B)
ccguagacgcacaagcaaa

SEQ ID NO: 3903411 - RNA, 13 nt, Human adenovirus B (HAdV-B)
ccgucaccuccac

SEQ ID NO: 3903412 - RNA, 23 nt, Human adenovirus B (HAdV-B)
ccuacauggguauucugcaugag

SEQ ID NO: 3903413 - RNA, 13 nt, Human adenovirus B (HAdV-B)
ccuaucacaucuu

SEQ ID NO: 3903414 - RNA, 22 nt, Human adenovirus B (HAdV-B)
ccucggcugcguggccuuuggc

SEQ ID NO: 3903415 - RNA, 14 nt, Human adenovirus B (HAdV-B)
ccugcugcuacugc

SEQ ID NO: 3903416 - RNA, 18 nt, Human adenovirus B (HAdV-B)
ccugcugcuucucccagg

SEQ ID NO: 3903417 - RNA, 16 nt, Human adenovirus B (HAdV-B)
ccuggcaccuacggag

SEQ ID NO: 3903418 - RNA, 13 nt, Human adenovirus B (HAdV-B)
ccuuaaucccaga

SEQ ID NO: 3903419 - RNA, 16 nt, Human adenovirus B (HAdV-B)
cgagaagguggcugcc

SEQ ID NO: 3903420 - RNA, 22 nt, Human adenovirus B (HAdV-B)
cgagucaguggacggcuacgau

SEQ ID NO: 3903421 - RNA, 15 nt, Human adenovirus B (HAdV-B)
cgagucgaggaaccc

SEQ ID NO: 3903422 - RNA, 18 nt, Human adenovirus B (HAdV-B)
cgauccagcagaccuccu

SEQ ID NO: 3903423 - RNA, 21 nt, Human adenovirus B (HAdV-B)
cgcgcuaaucgcacccgcgcc

SEQ ID NO: 3903424 - RNA, 18 nt, Human adenovirus B (HAdV-B)
cggcaggcgccucccagg

SEQ ID NO: 3903425 - RNA, 18 nt, Human adenovirus B (HAdV-B)
cggcgcccuggugcggca

SEQ ID NO: 3903426 - RNA, 19 nt, Human adenovirus B (HAdV-B)
cggggucaucuugcagguc

SEQ ID NO: 3903427 - RNA, 20 nt, Human adenovirus B (HAdV-B)
cgguaugcccuagaccaccg

SEQ ID NO: 3903428 - RNA, 19 nt, Human adenovirus B (HAdV-B)
cguacgagagcgugaugca

SEQ ID NO: 3903429 - RNA, 14 nt, Human adenovirus B (HAdV-B)
cguagccuggagga

SEQ ID NO: 3903430 - RNA, 19 nt, Human adenovirus B (HAdV-B)
cguguuggauugccacagc

SEQ ID NO: 3903431 - RNA, 19 nt, Human adenovirus B (HAdV-B)
cguuccuaugaugaggugu

SEQ ID NO: 3903432 - RNA, 17 nt, Human adenovirus B (HAdV-B)
cuaaaauugucauguau

SEQ ID NO: 3903433 - RNA, 19 nt, Human adenovirus B (HAdV-B)
cuaagaugaaaccaugcua

SEQ ID NO: 3903434 - RNA, 18 nt, Human adenovirus B (HAdV-B)
cuaccgcgagugcccccc

SEQ ID NO: 3903435 - RNA, 18 nt, Human adenovirus B (HAdV-B)
cuaccgucaccuccacag

SEQ ID NO: 3903436 - RNA, 16 nt, Human adenovirus B (HAdV-B)
cuaccuugacccccag

SEQ ID NO: 3903437 - RNA, 15 nt, Human adenovirus B (HAdV-B)
cuacggaagccagca

SEQ ID NO: 3903438 - RNA, 22 nt, Human adenovirus B (HAdV-B)
cuagucuguuccacaguucagu

SEQ ID NO: 3903439 - RNA, 14 nt, Human adenovirus B (HAdV-B)
cuauaucucccaga

SEQ ID NO: 3903440 - RNA, 20 nt, Human adenovirus B (HAdV-B)
cuauugauuugaugaacaau

SEQ ID NO: 3903441 - RNA, 22 nt, Human adenovirus B (HAdV-B)
cucacagaucacgggacccugc

SEQ ID NO: 3903442 - RNA, 16 nt, Human adenovirus B (HAdV-B)
cucacuugccacccuc

SEQ ID NO: 3903443 - RNA, 20 nt, Human adenovirus B (HAdV-B)
cucaggauuuagaaacauau

SEQ ID NO: 3903444 - RNA, 21 nt, Human adenovirus B (HAdV-B)
cuccaacagaaaaccagcagc

SEQ ID NO: 3903445 - RNA, 11 nt, Human adenovirus B (HAdV-B)
cuccaagcaag

SEQ ID NO: 3903446 - RNA, 22 nt, Human adenovirus B (HAdV-B)
cuccacagcuuucuggucagcu

SEQ ID NO: 3903447 - RNA, 18 nt, Human adenovirus B (HAdV-B)
cuccagacacucauguag

SEQ ID NO: 3903448 - RNA, 20 nt, Human adenovirus B (HAdV-B)
cucccagacucguacaaaua

SEQ ID NO: 3903449 - RNA, 14 nt, Human adenovirus B (HAdV-B)
cuccgacugcagca

SEQ ID NO: 3903450 - RNA, 14 nt, Human adenovirus B (HAdV-B)
cuccuuaaacaucu

SEQ ID NO: 3903451 - RNA, 12 nt, Human adenovirus B (HAdV-B)
cucgacccagcc

SEQ ID NO: 3903452 - RNA, 17 nt, Human adenovirus B (HAdV-B)
cucgagcugccagugcg

SEQ ID NO: 3903453 - RNA, 13 nt, Human adenovirus B (HAdV-B)
cucgcccccacug

SEQ ID NO: 3903454 - RNA, 14 nt, Human adenovirus B (HAdV-B)
cucgcuggccacau

SEQ ID NO: 3903455 - RNA, 13 nt, Human adenovirus B (HAdV-B)
cucggcugcggag

SEQ ID NO: 3903456 - RNA, 17 nt, Human adenovirus B (HAdV-B)
cucgguauaaaacaucc

SEQ ID NO: 3903457 - RNA, 16 nt, Human adenovirus B (HAdV-B)
cucuauaucucccaga

SEQ ID NO: 3903458 - RNA, 22 nt, Human adenovirus B (HAdV-B)
cucuccaaccucuccacaauau

SEQ ID NO: 3903459 - RNA, 13 nt, Human adenovirus B (HAdV-B)
aaagcacaagcuc

SEQ ID NO: 3903460 - RNA, 21 nt, Human adenovirus B (HAdV-B)
aacaagauuggaauaagcaua

SEQ ID NO: 3903461 - RNA, 23 nt, Human adenovirus B (HAdV-B)
aacagccccccucgcagcagcag

SEQ ID NO: 3903462 - RNA, 10 nt, Human adenovirus B (HAdV-B)
aaccccacua

SEQ ID NO: 3903463 - RNA, 23 nt, Human adenovirus B (HAdV-B)
aaccgguauaucgggcaggaugu

SEQ ID NO: 3903464 - RNA, 20 nt, Human adenovirus B (HAdV-B)
aacugguuagcugcacagcc

SEQ ID NO: 3903465 - RNA, 22 nt, Human adenovirus B (HAdV-B)
aagacgcgcuccuuaaacaucu

SEQ ID NO: 3903466 - RNA, 19 nt, Human adenovirus B (HAdV-B)
aagaucccgacgaaaguac

SEQ ID NO: 3903467 - RNA, 18 nt, Human adenovirus B (HAdV-B)
aagauguaaccugggcau

SEQ ID NO: 3903468 - RNA, 20 nt, Human adenovirus B (HAdV-B)
aagauucccacugaaaguau

SEQ ID NO: 3903469 - RNA, 15 nt, Human adenovirus B (HAdV-B)
aagauucuugaagcu

SEQ ID NO: 3903470 - RNA, 12 nt, Human adenovirus B (HAdV-B)
aaggcuacaacg

SEQ ID NO: 3903471 - RNA, 15 nt, Human adenovirus B (HAdV-B)
aagguccggcccacg

SEQ ID NO: 3903472 - RNA, 21 nt, Human adenovirus B (HAdV-B)
aaguuucagaugaagaaagua

SEQ ID NO: 3903473 - RNA, 23 nt, Human adenovirus B (HAdV-B)
aauaucuauaguggcacaacaua

SEQ ID NO: 3903474 - RNA, 18 nt, Human adenovirus B (HAdV-B)
aauaugcaugcuuuuaua

SEQ ID NO: 3903475 - RNA, 18 nt, Human adenovirus B (HAdV-B)
aaugcgggcggcgcugca

SEQ ID NO: 3903476 - RNA, 21 nt, Human adenovirus B (HAdV-B)
aauggagugcuugaaagugac

SEQ ID NO: 3903477 - RNA, 11 nt, Human adenovirus B (HAdV-B)
aauuaaaugac

SEQ ID NO: 3903478 - RNA, 17 nt, Human adenovirus B (HAdV-B)
aauucaccaaugcaaaa

SEQ ID NO: 3903479 - RNA, 19 nt, Human adenovirus B (HAdV-B)
aauucuucgcuguuaaaaa

SEQ ID NO: 3903480 - RNA, 16 nt, Human adenovirus B (HAdV-B)
aauugcaaggccccag

SEQ ID NO: 3903481 - RNA, 12 nt, Human adenovirus B (HAdV-B)
acaacacuuuca

SEQ ID NO: 3903482 - RNA, 13 nt, Human adenovirus B (HAdV-B)
acaagcgcagacc

SEQ ID NO: 3903483 - RNA, 21 nt, Human adenovirus B (HAdV-B)
acagagacgagccugggauca

SEQ ID NO: 3903484 - RNA, 19 nt, Human adenovirus B (HAdV-B)
acagagucucugacaaagu

SEQ ID NO: 3903485 - RNA, 18 nt, Human adenovirus B (HAdV-B)
acagauaagcccuuggug

SEQ ID NO: 3903486 - RNA, 15 nt, Human adenovirus B (HAdV-B)
acagcuggcagaacc

SEQ ID NO: 3903487 - RNA, 17 nt, Human adenovirus B (HAdV-B)
acagcuuuaaacauuug

SEQ ID NO: 3903488 - RNA, 15 nt, Human adenovirus B (HAdV-B)
acagucaggcagagg

SEQ ID NO: 3903489 - RNA, 14 nt, Human adenovirus B (HAdV-B)
acagugcaggcagc

SEQ ID NO: 3903490 - RNA, 20 nt, Human adenovirus B (HAdV-B)
acagugcaggcagcagcucc

SEQ ID NO: 3903491 - RNA, 21 nt, Human adenovirus B (HAdV-B)
acauauccuucacgcggcgcu

SEQ ID NO: 3903492 - RNA, 16 nt, Human adenovirus B (HAdV-B)
acaugaaucaugugaa

SEQ ID NO: 3903493 - RNA, 22 nt, Human adenovirus B (HAdV-B)
accaaaauaucgcggcacuucu

SEQ ID NO: 3903494 - RNA, 14 nt, Human adenovirus B (HAdV-B)
accaaucacagccu

SEQ ID NO: 3903495 - RNA, 23 nt, Human adenovirus B (HAdV-B)
accaccauucuuaaacacacccu

SEQ ID NO: 3903496 - RNA, 23 nt, Human adenovirus B (HAdV-B)
accacgguggugcaaaacaauga

SEQ ID NO: 3903497 - RNA, 20 nt, Human adenovirus B (HAdV-B)
accagacggaaucuuucaga

SEQ ID NO: 3903498 - RNA, 16 nt, Human adenovirus B (HAdV-B)
accagggaaaaguaca

SEQ ID NO: 3903499 - RNA, 17 nt, Human adenovirus B (HAdV-B)
accaguguaacaugaau

SEQ ID NO: 3903500 - RNA, 16 nt, Human adenovirus B (HAdV-B)
acccgucaccuuggau

SEQ ID NO: 3903501 - RNA, 17 nt, Human adenovirus B (HAdV-B)
acccuccaguggaggag

SEQ ID NO: 3903502 - RNA, 16 nt, Human adenovirus B (HAdV-B)
accggggugaugaaac

SEQ ID NO: 3903503 - RNA, 19 nt, Human adenovirus B (HAdV-B)
accguugauguuguguccu

SEQ ID NO: 3903504 - RNA, 16 nt, Human adenovirus B (HAdV-B)
accucaucuucccaga

SEQ ID NO: 3903505 - RNA, 21 nt, Human adenovirus B (HAdV-B)
accuguagcgaauugagaaug

SEQ ID NO: 3903506 - RNA, 17 nt, Human adenovirus B (HAdV-B)
accuuaaucccagaaau

SEQ ID NO: 3903507 - RNA, 22 nt, Human adenovirus B (HAdV-B)
acgagccugggaucauggggau

SEQ ID NO: 3903508 - RNA, 18 nt, Human adenovirus B (HAdV-B)
acgaucgcgguggggcgg

SEQ ID NO: 3903509 - RNA, 15 nt, Human adenovirus B (HAdV-B)
acgcacaagcaaacc

SEQ ID NO: 3903510 - RNA, 17 nt, Human adenovirus B (HAdV-B)
acgccuuacauguggag

SEQ ID NO: 3903511 - RNA, 12 nt, Human adenovirus B (HAdV-B)
acggcaggaugu

SEQ ID NO: 3903512 - RNA, 17 nt, Human adenovirus B (HAdV-B)
acguguacccgugcgca

SEQ ID NO: 3903513 - RNA, 15 nt, Human adenovirus B (HAdV-B)
acuccguagccugga

SEQ ID NO: 3903514 - RNA, 18 nt, Human adenovirus B (HAdV-B)
acuggauuuccugccacc

SEQ ID NO: 3903515 - RNA, 19 nt, Human adenovirus B (HAdV-B)
acuggauuuccugccacca

SEQ ID NO: 3903516 - RNA, 14 nt, Human adenovirus B (HAdV-B)
acuggccagugcag

SEQ ID NO: 3903517 - RNA, 15 nt, Human adenovirus B (HAdV-B)
acuucccucuuccca

SEQ ID NO: 3903518 - RNA, 18 nt, Human adenovirus B (HAdV-B)
acuuuuggcaaugcuccu

SEQ ID NO: 3903519 - RNA, 13 nt, Human adenovirus B (HAdV-B)
acuuuuuucccca

SEQ ID NO: 3903520 - RNA, 13 nt, Human adenovirus B (HAdV-B)
agaaauauaaauu

SEQ ID NO: 3903521 - RNA, 19 nt, Human adenovirus B (HAdV-B)
agacucucgccugcaacga

SEQ ID NO: 3903522 - RNA, 23 nt, Human adenovirus B (HAdV-B)
agagccauuguccaagaccuggg

SEQ ID NO: 3903523 - RNA, 13 nt, Human adenovirus B (HAdV-B)
agauauggaggaa

SEQ ID NO: 3903524 - RNA, 13 nt, Human adenovirus B (HAdV-B)
agauccugaggua

SEQ ID NO: 3903525 - RNA, 16 nt, Human adenovirus B (HAdV-B)
agaucugaguuggcuu

SEQ ID NO: 3903526 - RNA, 22 nt, Human adenovirus B (HAdV-B)
agaugcaucccgugcugcgaca

SEQ ID NO: 3903527 - RNA, 13 nt, Human adenovirus B (HAdV-B)
agaugccugggga

SEQ ID NO: 3903528 - RNA, 18 nt, Human adenovirus B (HAdV-B)
agauugggacagucaggc

SEQ ID NO: 3903529 - RNA, 22 nt, Human adenovirus B (HAdV-B)
agcaaaacgcggcccuggcaga

SEQ ID NO: 3903530 - RNA, 22 nt, Human adenovirus B (HAdV-B)
agcaauggggccgugggcagcg

SEQ ID NO: 3903531 - RNA, 19 nt, Human adenovirus B (HAdV-B)
agcaggauauuuugaaaua

SEQ ID NO: 3903532 - RNA, 16 nt, Human adenovirus B (HAdV-B)
agccggcgaaggcgca

SEQ ID NO: 3903533 - RNA, 22 nt, Human adenovirus B (HAdV-B)
agccguuaaccccacagccaau

SEQ ID NO: 3903534 - RNA, 15 nt, Human adenovirus B (HAdV-B)
agccugggaucaugg

SEQ ID NO: 3903535 - RNA, 18 nt, Human adenovirus B (HAdV-B)
agcuagacgcguggggcg

SEQ ID NO: 3903536 - RNA, 20 nt, Human adenovirus B (HAdV-B)
agcucugacuggagcuggaa

SEQ ID NO: 3903537 - RNA, 21 nt, Human adenovirus B (HAdV-B)
agcuguguacucccagcagcu

SEQ ID NO: 3903538 - RNA, 17 nt, Human adenovirus B (HAdV-B)
agcuugcccucauaauc

SEQ ID NO: 3903539 - RNA, 19 nt, Human adenovirus B (HAdV-B)
aggacaaagcgugcugcac

SEQ ID NO: 3903540 - RNA, 19 nt, Human adenovirus B (HAdV-B)
aggacaggcgcuuagaaau

SEQ ID NO: 3903541 - RNA, 16 nt, Human adenovirus B (HAdV-B)
aggacagucuggagga

SEQ ID NO: 3903542 - RNA, 22 nt, Human adenovirus B (HAdV-B)
aggaugcuucggaguaccugag

SEQ ID NO: 3903543 - RNA, 21 nt, Human adenovirus B (HAdV-B)
aggaugugagcggagacggcu

SEQ ID NO: 3903544 - RNA, 15 nt, Human adenovirus B (HAdV-B)
aggcgcugcugaaca

SEQ ID NO: 3903545 - RNA, 17 nt, Human adenovirus B (HAdV-B)
aggcugauugccacaga

SEQ ID NO: 3903546 - RNA, 21 nt, Human adenovirus B (HAdV-B)
agggcugcgguccgaccugga

SEQ ID NO: 3903547 - RNA, 19 nt, Human adenovirus B (HAdV-B)
agggcuugacggggaagac

SEQ ID NO: 3903548 - RNA, 20 nt, Human adenovirus B (HAdV-B)
aggggacugccccauggcau

SEQ ID NO: 3903549 - RNA, 12 nt, Human adenovirus B (HAdV-B)
aggugucucuga

SEQ ID NO: 3903550 - RNA, 17 nt, Human adenovirus B (HAdV-B)
agguucccucaggaugu

SEQ ID NO: 3903551 - RNA, 19 nt, Human adenovirus B (HAdV-B)
agguuguaucugguggaca

SEQ ID NO: 3903552 - RNA, 15 nt, Human adenovirus B (HAdV-B)
aguacucagccugcu

SEQ ID NO: 3903553 - RNA, 15 nt, Human adenovirus B (HAdV-B)
agucuggaggaagac

SEQ ID NO: 3903554 - RNA, 16 nt, Human adenovirus B (HAdV-B)
agugcaaacggaucca

SEQ ID NO: 3903555 - RNA, 11 nt, Human adenovirus B (HAdV-B)
agugcagcaac

SEQ ID NO: 3903556 - RNA, 12 nt, Human adenovirus B (HAdV-B)
aguggaggaggc

SEQ ID NO: 3903557 - RNA, 22 nt, Human adenovirus B (HAdV-B)
aguucaaguacaaccacacucu

SEQ ID NO: 3903558 - RNA, 19 nt, Human adenovirus B (HAdV-B)
uaugaagaugaaagcaccu

SEQ ID NO: 3903559 - RNA, 17 nt, Human adenovirus B (HAdV-B)
uaugccaucuuccagca

SEQ ID NO: 3903560 - RNA, 21 nt, Human adenovirus B (HAdV-B)
uauuauggaaccgacuauaaa

SEQ ID NO: 3903561 - RNA, 18 nt, Human adenovirus B (HAdV-B)
uauuuccccaaauggcuu

SEQ ID NO: 3903562 - RNA, 16 nt, Human adenovirus B (HAdV-B)
ucaaaaccucugggau

SEQ ID NO: 3903563 - RNA, 19 nt, Human adenovirus B (HAdV-B)
ucaaaugcucacuugugcu

SEQ ID NO: 3903564 - RNA, 18 nt, Human adenovirus B (HAdV-B)
ucaaccccuucuccggau

SEQ ID NO: 3903565 - RNA, 14 nt, Human adenovirus B (HAdV-B)
ucaaguacaaccac

SEQ ID NO: 3903566 - RNA, 13 nt, Human adenovirus B (HAdV-B)
ucacacagcagcg

SEQ ID NO: 3903567 - RNA, 21 nt, Human adenovirus B (HAdV-B)
ucacaucucguccucagcgac

SEQ ID NO: 3903568 - RNA, 21 nt, Human adenovirus B (HAdV-B)
ucaccaagaugcuggaaauag

SEQ ID NO: 3903569 - RNA, 15 nt, Human adenovirus B (HAdV-B)
ucaccaaggccaugg

SEQ ID NO: 3903570 - RNA, 16 nt, Human adenovirus B (HAdV-B)
ucaccuccacagcccc

SEQ ID NO: 3903571 - RNA, 19 nt, Human adenovirus B (HAdV-B)
ucacgcuugccagcacggu

SEQ ID NO: 3903572 - RNA, 21 nt, Human adenovirus B (HAdV-B)
ucagagcgagccaaucugggg

SEQ ID NO: 3903573 - RNA, 13 nt, Human adenovirus B (HAdV-B)
ucagguggacgag

SEQ ID NO: 3903574 - RNA, 21 nt, Human adenovirus B (HAdV-B)
ucagugacuccuucaacccug

SEQ ID NO: 3903575 - RNA, 22 nt, Human adenovirus B (HAdV-B)
ucauagaagcucggguuucauu

SEQ ID NO: 3903576 - RNA, 20 nt, Human adenovirus B (HAdV-B)
ucauccuggaacgcuccggu

SEQ ID NO: 3903577 - RNA, 13 nt, Human adenovirus B (HAdV-B)
ucaucuucccaga

SEQ ID NO: 3903578 - RNA, 17 nt, Human adenovirus B (HAdV-B)
uccaaggaugagacagu

SEQ ID NO: 3903579 - RNA, 17 nt, Human adenovirus B (HAdV-B)
uccaaggucuuccuaca

SEQ ID NO: 3903580 - RNA, 14 nt, Human adenovirus B (HAdV-B)
uccaccagaacacc

SEQ ID NO: 3903581 - RNA, 15 nt, Human adenovirus B (HAdV-B)
uccagcgcugccagg

SEQ ID NO: 3903582 - RNA, 19 nt, Human adenovirus B (HAdV-B)
uccaugcacucauccauga

SEQ ID NO: 3903583 - RNA, 23 nt, Human adenovirus B (HAdV-B)
ucccgacgaaaguacgguccagc

SEQ ID NO: 3903584 - RNA, 15 nt, Human adenovirus B (HAdV-B)
ucccgacggugcugc

SEQ ID NO: 3903585 - RNA, 20 nt, Human adenovirus B (HAdV-B)
ucccggcgcccuggugcggc

SEQ ID NO: 3903586 - RNA, 16 nt, Human adenovirus B (HAdV-B)
uccgaacucccgccua

SEQ ID NO: 3903587 - RNA, 18 nt, Human adenovirus B (HAdV-B)
uccgaccuggcagaccuc

SEQ ID NO: 3903588 - RNA, 18 nt, Human adenovirus B (HAdV-B)
uccggaagauuaccaccc

SEQ ID NO: 3903589 - RNA, 13 nt, Human adenovirus B (HAdV-B)
uccguagccugga

SEQ ID NO: 3903590 - RNA, 18 nt, Human adenovirus B (HAdV-B)
uccguucucgcuggccac

SEQ ID NO: 3903591 - RNA, 15 nt, Human adenovirus B (HAdV-B)
uccuaggcagagaaa

SEQ ID NO: 3903592 - RNA, 20 nt, Human adenovirus B (HAdV-B)
uccuaugcacuuuuugcuuu

SEQ ID NO: 3903593 - RNA, 15 nt, Human adenovirus B (HAdV-B)
uccugcaccauuccc

SEQ ID NO: 3903594 - RNA, 16 nt, Human adenovirus B (HAdV-B)
uccugcccgccaccug

SEQ ID NO: 3903595 - RNA, 18 nt, Human adenovirus B (HAdV-B)
uccuucgcggcuggccau

SEQ ID NO: 3903596 - RNA, 15 nt, Human adenovirus B (HAdV-B)
ucgccaacuacaaca

SEQ ID NO: 3903597 - RNA, 12 nt, Human adenovirus B (HAdV-B)
ucgcuggccaca

SEQ ID NO: 3903598 - RNA, 22 nt, Human adenovirus B (HAdV-B)
ucuagcggaaacccgucuuugu

SEQ ID NO: 3903599 - RNA, 14 nt, Human adenovirus B (HAdV-B)
ucucacuugccacc

SEQ ID NO: 3903600 - RNA, 14 nt, Human adenovirus B (HAdV-B)
ucuccgcuccgagu

SEQ ID NO: 3903601 - RNA, 19 nt, Human adenovirus B (HAdV-B)
ucugacgagaaucagaaug

SEQ ID NO: 3903602 - RNA, 17 nt, Human adenovirus B (HAdV-B)
ucuggggguacaaacug

SEQ ID NO: 3903603 - RNA, 11 nt, Human adenovirus B (HAdV-B)
ucugugggguc

SEQ ID NO: 3903604 - RNA, 19 nt, Human adenovirus B (HAdV-B)
ucuuaaacccgcacuggcu

SEQ ID NO: 3903605 - RNA, 17 nt, Human adenovirus B (HAdV-B)
ugaaagcaccucccaac

SEQ ID NO: 3903606 - RNA, 20 nt, Human adenovirus B (HAdV-B)
ugaaagcaucauauugcuug

SEQ ID NO: 3903607 - RNA, 20 nt, Human adenovirus B (HAdV-B)
ugaaggcgaggaggaagagg

SEQ ID NO: 3903608 - RNA, 21 nt, Human adenovirus B (HAdV-B)
ugaaguuucuguauugcagga

SEQ ID NO: 3903609 - RNA, 16 nt, Human adenovirus B (HAdV-B)
ugacaugaacaugcaa

SEQ ID NO: 3903610 - RNA, 19 nt, Human adenovirus B (HAdV-B)
ugagaagguccuggccauc

SEQ ID NO: 3903611 - RNA, 20 nt, Human adenovirus B (HAdV-B)
ugaggccacaacgcacagcc

SEQ ID NO: 3903612 - RNA, 19 nt, Human adenovirus B (HAdV-B)
ugauauucuugagcaggcg

SEQ ID NO: 3903613 - RNA, 16 nt, Human adenovirus B (HAdV-B)
ugaucacaagcaggau

SEQ ID NO: 3903614 - RNA, 18 nt, Human adenovirus B (HAdV-B)
ugaugaacaaugccauca

SEQ ID NO: 3903615 - RNA, 20 nt, Human adenovirus B (HAdV-B)
ugaugauagcaaauuucuga

SEQ ID NO: 3903616 - RNA, 15 nt, Human adenovirus B (HAdV-B)
ugauuaauugugaug

SEQ ID NO: 3903617 - RNA, 15 nt, Human adenovirus B (HAdV-B)
ugcaacacagcagag

SEQ ID NO: 3903618 - RNA, 17 nt, Human adenovirus B (HAdV-B)
ugcaaggccccagcagc

SEQ ID NO: 3903619 - RNA, 23 nt, Human adenovirus B (HAdV-B)
ugcacaugaucauccacaagacc

SEQ ID NO: 3903620 - RNA, 13 nt, Human adenovirus B (HAdV-B)
ugcagaacaguaa

SEQ ID NO: 3903621 - RNA, 11 nt, Human adenovirus B (HAdV-B)
ugcagcacuga

SEQ ID NO: 3903622 - RNA, 13 nt, Human adenovirus B (HAdV-B)
ugcaggcagcagc

SEQ ID NO: 3903623 - RNA, 14 nt, Human adenovirus B (HAdV-B)
ugcaggcagcagcu

SEQ ID NO: 3903624 - RNA, 16 nt, Human adenovirus B (HAdV-B)
ugccauccuucucaac

SEQ ID NO: 3903625 - RNA, 12 nt, Human adenovirus B (HAdV-B)
ugcgggacgagg

SEQ ID NO: 3903626 - RNA, 16 nt, Human adenovirus B (HAdV-B)
ugcgucaucacccagg

SEQ ID NO: 3903627 - RNA, 13 nt, Human adenovirus B (HAdV-B)
ugcuauuccacca

SEQ ID NO: 3903628 - RNA, 15 nt, Human adenovirus B (HAdV-B)
ugcugcuucucccag

SEQ ID NO: 3903629 - RNA, 18 nt, Human adenovirus B (HAdV-B)
uggaacaauaccuuaucc

SEQ ID NO: 3903630 - RNA, 11 nt, Human adenovirus B (HAdV-B)
uggaagagcuc

SEQ ID NO: 3903631 - RNA, 15 nt, Human adenovirus B (HAdV-B)
uggaaguuuucuugc

SEQ ID NO: 3903632 - RNA, 23 nt, Human adenovirus B (HAdV-B)
uggagcaguaucuggagcgggcu

SEQ ID NO: 3903633 - RNA, 22 nt, Human adenovirus B (HAdV-B)
uggcaauauugccgccaagauc

SEQ ID NO: 3903634 - RNA, 22 nt, Human adenovirus B (HAdV-B)
uggcaccuacggagggcagaaa

SEQ ID NO: 3903635 - RNA, 15 nt, Human adenovirus B (HAdV-B)
uggcaguuuggaagc

SEQ ID NO: 3903636 - RNA, 19 nt, Human adenovirus B (HAdV-B)
uggcgugagaauuggaaga

SEQ ID NO: 3903637 - RNA, 21 nt, Human adenovirus B (HAdV-B)
uggcucgcuacaacaguagca

SEQ ID NO: 3903638 - RNA, 19 nt, Human adenovirus B (HAdV-B)
uggcucuauaucucccaga

SEQ ID NO: 3903639 - RNA, 13 nt, Human adenovirus B (HAdV-B)
uggcuuccagcaa

SEQ ID NO: 3903640 - RNA, 22 nt, Human adenovirus B (HAdV-B)
ugguaaagauucccggaaguaa

SEQ ID NO: 3903641 - RNA, 16 nt, Human adenovirus B (HAdV-B)
ugguggaauuggaagg

SEQ ID NO: 3903642 - RNA, 20 nt, Human adenovirus B (HAdV-B)
ugguuuuagauuccacauuc

SEQ ID NO: 3903643 - RNA, 19 nt, Human adenovirus B (HAdV-B)
ugucucugaagaaaugcau

SEQ ID NO: 3903644 - RNA, 14 nt, Human adenovirus B (HAdV-B)
ugugcucccugugg

SEQ ID NO: 3903645 - RNA, 15 nt, Human adenovirus B (HAdV-B)
uguugaaaugggcau

SEQ ID NO: 3903646 - RNA, 19 nt, Human adenovirus B (HAdV-B)
uuaaaauguuuaaccccac

SEQ ID NO: 3903647 - RNA, 22 nt, Human adenovirus B (HAdV-B)
uuacaaaagaaggacucccagu

SEQ ID NO: 3903648 - RNA, 15 nt, Human adenovirus B (HAdV-B)
uuaccccuacggaag

SEQ ID NO: 3903649 - RNA, 13 nt, Human adenovirus B (HAdV-B)
uuacucccucugu

SEQ ID NO: 3903650 - RNA, 17 nt, Human adenovirus B (HAdV-B)
uuaugcucaggaucaca

SEQ ID NO: 3903651 - RNA, 13 nt, Human adenovirus B (HAdV-B)
uucaauucaaaca

SEQ ID NO: 3903652 - RNA, 13 nt, Human adenovirus B (HAdV-B)
uucacucaaaucu

SEQ ID NO: 3903653 - RNA, 15 nt, Human adenovirus B (HAdV-B)
uucagaaacuuccag

SEQ ID NO: 3903654 - RNA, 17 nt, Human adenovirus B (HAdV-B)
uuccgaugagaggccuu

SEQ ID NO: 3903655 - RNA, 14 nt, Human adenovirus B (HAdV-B)
uuccuucaccccuc

SEQ ID NO: 3903656 - RNA, 12 nt, Human adenovirus B (HAdV-B)
uucgcugcuuug

SEQ ID NO: 3903657 - RNA, 17 nt, Human adenovirus B (HAdV-B)
uugacugaugucuugca

SEQ ID NO: 3903658 - RNA, 22 nt, Human adenovirus B (HAdV-B)
uugcaaggccccagcagccaag

SEQ ID NO: 3903659 - RNA, 21 nt, Human adenovirus B (HAdV-B)
uugcaguagguacaacacauu

SEQ ID NO: 3903660 - RNA, 18 nt, Human adenovirus B (HAdV-B)
uugcaugguuguagcuuu

SEQ ID NO: 3903661 - RNA, 20 nt, Human adenovirus B [HAdV-B]
caccuguuccgacugcagaa

SEQ ID NO: 3903662 - RNA, 20 nt, Human adenovirus B [HAdV-B]
caccuuggauuugcccccuc

SEQ ID NO: 3903663 - RNA, 22 nt, Human adenovirus B [HAdV-B]
cacgguuuggaccgaagacgag

SEQ ID NO: 3903664 - RNA, 15 nt, Human adenovirus B [HAdV-B]
cacguggcugcagcc

SEQ ID NO: 3903665 - RNA, 14 nt, Human adenovirus B [HAdV-B]
cacucaccaccucc

SEQ ID NO: 3903666 - RNA, 18 nt, Human adenovirus B [HAdV-B]
cacugaaacaccaucagc

SEQ ID NO: 3903667 - RNA, 14 nt, Human adenovirus B [HAdV-B]
cacugaagugcaaa

SEQ ID NO: 3903668 - RNA, 11 nt, Human adenovirus B [HAdV-B]
cacuggcugcc

SEQ ID NO: 3903669 - RNA, 14 nt, Human adenovirus B [HAdV-B]
cucgcucacaccuc

SEQ ID NO: 3903670 - RNA, 14 nt, Human adenovirus B [HAdV-B]
cucguccucagcga

SEQ ID NO: 3903671 - RNA, 19 nt, Human adenovirus B [HAdV-B]
cugaagggggaagcccgcc

SEQ ID NO: 3903672 - RNA, 21 nt, Human adenovirus B [HAdV-B]
cugaaucauaauauugccaug

SEQ ID NO: 3903673 - RNA, 17 nt, Human adenovirus B [HAdV-B]
cugaccccgggacugug

SEQ ID NO: 3903674 - RNA, 22 nt, Human adenovirus B [HAdV-B]
cugacgccgccggucccacucg

SEQ ID NO: 3903675 - RNA, 16 nt, Human adenovirus B [HAdV-B]
cugauuucacucaaau

SEQ ID NO: 3903676 - RNA, 22 nt, Human adenovirus B [HAdV-B]
cugcaaagcuccaagcagguca

SEQ ID NO: 3903677 - RNA, 20 nt, Human adenovirus B [HAdV-B]
cugcaacgggugcuuacugg

SEQ ID NO: 3903678 - RNA, 11 nt, Human adenovirus B [HAdV-B]
cugcacagcac

SEQ ID NO: 3903679 - RNA, 17 nt, Human adenovirus B [HAdV-B]
cugcagaaaucuuccca

SEQ ID NO: 3903680 - RNA, 13 nt, Human adenovirus B [HAdV-B]
cugccgcugcaau

SEQ ID NO: 3903681 - RNA, 21 nt, Human adenovirus B [HAdV-B]
cugccuacccauggcgggcac

SEQ ID NO: 3903682 - RNA, 15 nt, Human adenovirus B [HAdV-B]
cugccuggcugcgga

SEQ ID NO: 3903683 - RNA, 16 nt, Human adenovirus B [HAdV-B]
cugcguucgcucacca

SEQ ID NO: 3903684 - RNA, 15 nt, Human adenovirus B [HAdV-B]
cugcuccuucugaau

SEQ ID NO: 3903685 - RNA, 18 nt, Human adenovirus B [HAdV-B]
cugcucgcucacaccuca

SEQ ID NO: 3903686 - RNA, 21 nt, Human adenovirus B [HAdV-B]
cugcucucacagaucacggga

SEQ ID NO: 3903687 - RNA, 15 nt, Human adenovirus B [HAdV-B]
cugcugcagaagcua

SEQ ID NO: 3903688 - RNA, 13 nt, Human adenovirus B [HAdV-B]
cugcuugcaugag

SEQ ID NO: 3903689 - RNA, 15 nt, Human adenovirus B [HAdV-B]
cuggaggacagucug

SEQ ID NO: 3903690 - RNA, 13 nt, Human adenovirus B [HAdV-B]
cuggaggaggaac

SEQ ID NO: 3903691 - RNA, 15 nt, Human adenovirus B [HAdV-B]
cuggcagaacacacu

SEQ ID NO: 3903692 - RNA, 22 nt, Human adenovirus B [HAdV-B]
cuggcagaccucaucuucccag

SEQ ID NO: 3903693 - RNA, 14 nt, Human adenovirus B [HAdV-B]
cuggcuaccuauca

SEQ ID NO: 3903694 - RNA, 12 nt, Human adenovirus B [HAdV-B]
cugggaccuggu

SEQ ID NO: 3903695 - RNA, 22 nt, Human adenovirus B [HAdV-B]
cugggaugggaucccgaaacca

SEQ ID NO: 3903696 - RNA, 15 nt, Human adenovirus B [HAdV-B]
cuggucagcugcaaa

SEQ ID NO: 3903697 - RNA, 18 nt, Human adenovirus B [HAdV-B]
cugguucuauucccuacc

SEQ ID NO: 3903698 - RNA, 16 nt, Human adenovirus B [HAdV-B]
cuguauaggagcauuu

SEQ ID NO: 3903699 - RNA, 17 nt, Human adenovirus B [HAdV-B]
cuguauaggagcauuug

SEQ ID NO: 3903700 - RNA, 19 nt, Human adenovirus B [HAdV-B]
cuguguacucccagcagcu

SEQ ID NO: 3903701 - RNA, 21 nt, Human adenovirus B [HAdV-B]
cuuaagcauuccaccgcccag

SEQ ID NO: 3903702 - RNA, 18 nt, Human adenovirus B [HAdV-B]
cuuaagguucuguggaca

SEQ ID NO: 3903703 - RNA, 15 nt, Human adenovirus B [HAdV-B]
cuuaaucccagaaau

SEQ ID NO: 3903704 - RNA, 18 nt, Human adenovirus B [HAdV-B]
cuuaccggcucugggcau

SEQ ID NO: 3903705 - RNA, 17 nt, Human adenovirus B [HAdV-B]
cuuacgagcagacagua

SEQ ID NO: 3903706 - RNA, 18 nt, Human adenovirus B [HAdV-B]
cuuacuuuaaaauguuua

SEQ ID NO: 3903707 - RNA, 12 nt, Human adenovirus B [HAdV-B]
cuucacacaaag

SEQ ID NO: 3903708 - RNA, 19 nt, Human adenovirus B [HAdV-B]
cuuccgcaaucccaacagg

SEQ ID NO: 3903709 - RNA, 15 nt, Human adenovirus B [HAdV-B]
cuuccuaugcacuuu

SEQ ID NO: 3903710 - RNA, 15 nt, Human adenovirus B [HAdV-B]
cuucgcggcuggcca

SEQ ID NO: 3903711 - RNA, 22 nt, Human adenovirus B [HAdV-B]
cuucuccggaucuccugggcau

SEQ ID NO: 3903712 - RNA, 13 nt, Human adenovirus B [HAdV-B]
cuucuccugggca

SEQ ID NO: 3903713 - RNA, 22 nt, Human adenovirus B [HAdV-B]
cuucuuucagacuagcagacag

SEQ ID NO: 3903714 - RNA, 18 nt, Human adenovirus B [HAdV-B]
cuugaccacgguggugca

SEQ ID NO: 3903715 - RNA, 16 nt, Human adenovirus B [HAdV-B]
cuugcaacauacaaaa

SEQ ID NO: 3903716 - RNA, 21 nt, Human adenovirus B [HAdV-B]
cuugcuggagugucacugccg

SEQ ID NO: 3903717 - RNA, 14 nt, Human adenovirus B [HAdV-B]
cuuggaagagguuc

SEQ ID NO: 3903718 - RNA, 13 nt, Human adenovirus B [HAdV-B]
cuuggcuucuuuu

SEQ ID NO: 3903719 - RNA, 18 nt, Human adenovirus B [HAdV-B]
cuugggugggagaggaag

SEQ ID NO: 3903720 - RNA, 16 nt, Human adenovirus B [HAdV-B]
cuuucaagauggccac

SEQ ID NO: 3903721 - RNA, 18 nt, Human adenovirus B [HAdV-B]
cuuucagagaggcgcugc

SEQ ID NO: 3903722 - RNA, 11 nt, Human adenovirus B [HAdV-B]
gaaaaagcaca

SEQ ID NO: 3903723 - RNA, 22 nt, Human adenovirus B [HAdV-B]
gaaaacugcacacuuacuuuug

SEQ ID NO: 3903724 - RNA, 21 nt, Human adenovirus B [HAdV-B]
gaaacccagauaauaggcacc

SEQ ID NO: 3903725 - RNA, 15 nt, Human adenovirus B [HAdV-B]
gaaauuuucucccag

SEQ ID NO: 3903726 - RNA, 14 nt, Human adenovirus B [HAdV-B]
gaacaaaagaauac

SEQ ID NO: 3903727 - RNA, 19 nt, Human adenovirus B [HAdV-B]
gaacacgaggaagaguuga

SEQ ID NO: 3903728 - RNA, 12 nt, Human adenovirus B [HAdV-B]
gaacaguaagaa

SEQ ID NO: 3903729 - RNA, 22 nt, Human adenovirus B [HAdV-B]
gaacuugaaagagcuugacaag

SEQ ID NO: 3903730 - RNA, 16 nt, Human adenovirus B [HAdV-B]
gaagaaaguaaaccga

SEQ ID NO: 3903731 - RNA, 11 nt, Human adenovirus B [HAdV-B]
gaagaaaugca

SEQ ID NO: 3903732 - RNA, 20 nt, Human adenovirus B [HAdV-B]
gaagaccacgaacacaacuu

SEQ ID NO: 3903733 - RNA, 15 nt, Human adenovirus B [HAdV-B]
gaagauuaccacccc

SEQ ID NO: 3903734 - RNA, 20 nt, Human adenovirus B [HAdV-B]
gaagccuuuagacagcaacc

SEQ ID NO: 3903735 - RNA, 13 nt, Human adenovirus B [HAdV-B]
gaagguucugggg

SEQ ID NO: 3903736 - RNA, 19 nt, Human adenovirus B [HAdV-B]
gaaucauaauauugccaug

SEQ ID NO: 3903737 - RNA, 17 nt, Human adenovirus B [HAdV-B]
gaaugagccuaacagga

SEQ ID NO: 3903738 - RNA, 18 nt, Human adenovirus B [HAdV-B]
gaauuuucucccagcggc

SEQ ID NO: 3903739 - RNA, 18 nt, Human adenovirus B [HAdV-B]
gacaaaaaagaagaggaa

SEQ ID NO: 3903740 - RNA, 14 nt, Human adenovirus B [HAdV-B]
gacaaagcgugcug

SEQ ID NO: 3903741 - RNA, 21 nt, Human adenovirus B [HAdV-B]
gacaaugaggcuuucagagag

SEQ ID NO: 3903742 - RNA, 14 nt, Human adenovirus B [HAdV-B]
gacagaaacacaga

SEQ ID NO: 3903743 - RNA, 12 nt, Human adenovirus B [HAdV-B]
gacagauaaaga

SEQ ID NO: 3903744 - RNA, 19 nt, Human adenovirus B [HAdV-B]
gacagcaaccccaggccaa

SEQ ID NO: 3903745 - RNA, 17 nt, Human adenovirus B [HAdV-B]
gacagcccgccuaugau

SEQ ID NO: 3903746 - RNA, 19 nt, Human adenovirus B [HAdV-B]
gacaggaagacacuggcag

SEQ ID NO: 3903747 - RNA, 16 nt, Human adenovirus B [HAdV-B]
gacaggcgcuuagaaa

SEQ ID NO: 3903748 - RNA, 12 nt, Human adenovirus B [HAdV-B]
gacccaggccau

SEQ ID NO: 3903749 - RNA, 13 nt, Human adenovirus B [HAdV-B]
gacccgcaggcag

SEQ ID NO: 3903750 - RNA, 21 nt, Human adenovirus B [HAdV-B]
gaccgcgcuuauucaaaaaag

SEQ ID NO: 3903751 - RNA, 16 nt, Human adenovirus B [HAdV-B]
gaccggacgcuucccg

SEQ ID NO: 3903752 - RNA, 19 nt, Human adenovirus B [HAdV-B]
gaccggcgaggaacucaac

SEQ ID NO: 3903753 - RNA, 16 nt, Human adenovirus B [HAdV-B]
gacgcuacagugcagu

SEQ ID NO: 3903754 - RNA, 16 nt, Human adenovirus B [HAdV-B]
gacggcggucauggac

SEQ ID NO: 3903755 - RNA, 21 nt, Human adenovirus B [HAdV-B]
gagaaacaacagacauggaaa

SEQ ID NO: 3903756 - RNA, 14 nt, Human adenovirus B [HAdV-B]
gagagagaggauga

SEQ ID NO: 3903757 - RNA, 20 nt, Human adenovirus B [HAdV-B]
gagaguuucaugaccagcau

SEQ ID NO: 3903758 - RNA, 15 nt, Human adenovirus B [HAdV-B]
gagcaauaaaugacg

SEQ ID NO: 3903759 - RNA, 23 nt, Human adenovirus B [HAdV-B]
gagcaucaaccucuaugcuacuu

SEQ ID NO: 3903760 - RNA, 23 nt, Human adenovirus B [HAdV-B]
gagcuuaagcauuccaccgccca

SEQ ID NO: 3903761 - RNA, 22 nt, Human adenovirus B [HAdV-B]
gagcuuccuuacauagaagagg

SEQ ID NO: 3903762 - RNA, 22 nt, Human adenovirus B [HAdV-B]
gagcuucuacaacgaacaagcu

SEQ ID NO: 3903763 - RNA, 13 nt, Human adenovirus B [HAdV-B]
gaggccggacugg

SEQ ID NO: 3903764 - RNA, 20 nt, Human adenovirus B [HAdV-B]
gaggccuuaucaaaugcuca

SEQ ID NO: 3903765 - RNA, 15 nt, Human adenovirus B [HAdV-B]
gagugcguuccugga

SEQ ID NO: 3903766 - RNA, 15 nt, Human adenovirus B [HAdV-B]
gauacuggauguuuu

SEQ ID NO: 3903767 - RNA, 20 nt, Human adenovirus B [HAdV-B]
gaucccauggaugagcccac

SEQ ID NO: 3903768 - RNA, 22 nt, Human adenovirus B [HAdV-B]
gaucgaggguacgcgcaugcga

SEQ ID NO: 3903769 - RNA, 18 nt, Human adenovirus B [HAdV-B]
gaucgcgguggggcgguc

SEQ ID NO: 3903770 - RNA, 19 nt, Human adenovirus B [HAdV-B]
gaucuaccgccagugcugu

SEQ ID NO: 3903771 - RNA, 20 nt, Human adenovirus B [HAdV-B]
gaucucgucgaaaccguuga

SEQ ID NO: 3903772 - RNA, 16 nt, Human adenovirus B [HAdV-B]
caggcaaaacaaaaaa

SEQ ID NO: 3903773 - RNA, 14 nt, Human adenovirus B [HAdV-B]
caggucaggagccg

SEQ ID NO: 3903774 - RNA, 16 nt, Human adenovirus B [HAdV-B]
caggugaaaacauguu

SEQ ID NO: 3903775 - RNA, 20 nt, Human adenovirus B [HAdV-B]
caguaagaaagaacaaaaag

SEQ ID NO: 3903776 - RNA, 21 nt, Human adenovirus B [HAdV-B]
caguagucaaguguuucuuga

SEQ ID NO: 3903777 - RNA, 21 nt, Human adenovirus B [HAdV-B]
caguccugccagggcacacgu

SEQ ID NO: 3903778 - RNA, 14 nt, Human adenovirus B [HAdV-B]
cagucuggaggaag

SEQ ID NO: 3903779 - RNA, 18 nt, Human adenovirus B [HAdV-B]
caguguccugaagcauga

SEQ ID NO: 3903780 - RNA, 18 nt, Human adenovirus B [HAdV-B]
cagugucgcuaacaauac

SEQ ID NO: 3903781 - RNA, 21 nt, Human adenovirus B [HAdV-B]
caguuguaaucaaaacuccau

SEQ ID NO: 3903782 - RNA, 22 nt, Human adenovirus B [HAdV-B]
cauaauuaaaagcgcuccagcc

SEQ ID NO: 3903783 - RNA, 22 nt, Human adenovirus B [HAdV-B]
cauaggacccccaaucacuuca

SEQ ID NO: 3903784 - RNA, 13 nt, Human adenovirus B [HAdV-B]
cauaguugccagc

SEQ ID NO: 3903785 - RNA, 12 nt, Human adenovirus B [HAdV-B]
caucagccaugg

SEQ ID NO: 3903786 - RNA, 22 nt, Human adenovirus B [HAdV-B]
cauccauggagguuugggccau

SEQ ID NO: 3903787 - RNA, 16 nt, Human adenovirus B [HAdV-B]
caucgcagaaaacaaa

SEQ ID NO: 3903788 - RNA, 17 nt, Human adenovirus B [HAdV-B]
caucuagaccacugccg

SEQ ID NO: 3903789 - RNA, 19 nt, Human adenovirus B [HAdV-B]
caucuauuauuccuacucc

SEQ ID NO: 3903790 - RNA, 20 nt, Human adenovirus B [HAdV-B]
caugaaaggaacuaguuguu

SEQ ID NO: 3903791 - RNA, 13 nt, Human adenovirus B [HAdV-B]
caugaacaugcaa

SEQ ID NO: 3903792 - RNA, 21 nt, Human adenovirus B [HAdV-B]
caugagcaaacaguauucucu

SEQ ID NO: 3903793 - RNA, 18 nt, Human adenovirus B [HAdV-B]
cauguggaaucaggcugu

SEQ ID NO: 3903794 - RNA, 19 nt, Human adenovirus B [HAdV-B]
cauuaagauucccacugaa

SEQ ID NO: 3903795 - RNA, 21 nt, Human adenovirus B [HAdV-B]
cauuaagcagguagcgccugg

SEQ ID NO: 3903796 - RNA, 14 nt, Human adenovirus B [HAdV-B]
cauucacacagcag

SEQ ID NO: 3903797 - RNA, 17 nt, Human adenovirus B [HAdV-B]
cauucucgagcugccag

SEQ ID NO: 3903798 - RNA, 12 nt, Human adenovirus B [HAdV-B]
cauugcuucucu

SEQ ID NO: 3903799 - RNA, 18 nt, Human adenovirus B [HAdV-B]
cauugguccaacagagcc

SEQ ID NO: 3903800 - RNA, 13 nt, Human adenovirus B [HAdV-B]
ccaaauggagaca

SEQ ID NO: 3903801 - RNA, 14 nt, Human adenovirus B [HAdV-B]
ccaacgacgagaaa

SEQ ID NO: 3903802 - RNA, 14 nt, Human adenovirus B [HAdV-B]
ccaagcaaugcaac

SEQ ID NO: 3903803 - RNA, 22 nt, Human adenovirus B [HAdV-B]
ccacaauauauauauacacaag

SEQ ID NO: 3903804 - RNA, 18 nt, Human adenovirus B [HAdV-B]
ccacaucguaggucagga

SEQ ID NO: 3903805 - RNA, 15 nt, Human adenovirus B [HAdV-B]
ccacuaccacauucc

SEQ ID NO: 3903806 - RNA, 22 nt, Human adenovirus B [HAdV-B]
ccagaacaccuuagaaaaugca

SEQ ID NO: 3903807 - RNA, 19 nt, Human adenovirus B [HAdV-B]
ccagaacuuccaacaaaaa

SEQ ID NO: 3903808 - RNA, 15 nt, Human adenovirus B [HAdV-B]
ccagcacgacugccu

SEQ ID NO: 3903809 - RNA, 19 nt, Human adenovirus B [HAdV-B]
ccagcgccaugacagacag

SEQ ID NO: 3903810 - RNA, 15 nt, Human adenovirus B [HAdV-B]
ccagggcacacgugg

SEQ ID NO: 3903811 - RNA, 14 nt, Human adenovirus B [HAdV-B]
ccaggggguccacc

SEQ ID NO: 3903812 - RNA, 22 nt, Human adenovirus B [HAdV-B]
ccaguagguuuggaaguuucag

SEQ ID NO: 3903813 - RNA, 18 nt, Human adenovirus B [HAdV-B]
ccauacucauuugugcau

SEQ ID NO: 3903814 - RNA, 14 nt, Human adenovirus B [HAdV-B]
ccaucaucuccugc

SEQ ID NO: 3903815 - RNA, 16 nt, Human adenovirus B [HAdV-B]
ccaugagcaggcaggu

SEQ ID NO: 3903816 - RNA, 21 nt, Human adenovirus B [HAdV-B]
ccaugccuuucucccaagcag

SEQ ID NO: 3903817 - RNA, 13 nt, Human adenovirus B [HAdV-B]
ccauuguguucuc

SEQ ID NO: 3903818 - RNA, 23 nt, Human adenovirus B [HAdV-B]
cccacugaaaguauggaagugca

SEQ ID NO: 3903819 - RNA, 14 nt, Human adenovirus B [HAdV-B]
cccagcuguuucug

SEQ ID NO: 3903820 - RNA, 14 nt, Human adenovirus B [HAdV-B]
ccccucgcagcagc

SEQ ID NO: 3903821 - RNA, 17 nt, Human adenovirus B [HAdV-B]
cccgcaggaccugcucg

SEQ ID NO: 3903822 - RNA, 13 nt, Human adenovirus B [HAdV-B]
cccgccaccugcu

SEQ ID NO: 3903823 - RNA, 17 nt, Human adenovirus B [HAdV-B]
cccuacggaagccagca

SEQ ID NO: 3903824 - RNA, 15 nt, Human adenovirus B [HAdV-B]
cccuaguguaccagg

SEQ ID NO: 3903825 - RNA, 15 nt, Human adenovirus B [HAdV-B]
cccuccaguggagga

SEQ ID NO: 3903826 - RNA, 13 nt, Human adenovirus B [HAdV-B]
ccgacugcagcac

SEQ ID NO: 3903827 - RNA, 17 nt, Human adenovirus B [HAdV-B]
ccgacugcagcacugga

SEQ ID NO: 3903828 - RNA, 18 nt, Human adenovirus B [HAdV-B]
ccgagcuaccacugccau

SEQ ID NO: 3903829 - RNA, 21 nt, Human adenovirus B [HAdV-B]
ccgcaaugcgggcggcgcugc

SEQ ID NO: 3903830 - RNA, 23 nt, Human adenovirus B [HAdV-B]
ccgccuaugaucuggacuuggaa

SEQ ID NO: 3903831 - RNA, 14 nt, Human adenovirus B [HAdV-B]
ccgcugucaaccug

SEQ ID NO: 3903832 - RNA, 16 nt, Human adenovirus B [HAdV-B]
ccggauugcagcacug

SEQ ID NO: 3903833 - RNA, 21 nt, Human adenovirus B [HAdV-B]
ccggcgaaggcgcauugccag

SEQ ID NO: 3903834 - RNA, 22 nt, Human adenovirus B [HAdV-B]
ccgggccuucuaugauuucucg

SEQ ID NO: 3903835 - RNA, 17 nt, Human adenovirus B [HAdV-B]
ccgucuuugucugcacg

SEQ ID NO: 3903836 - RNA, 17 nt, Human adenovirus B [HAdV-B]
ccuacaaaacaugcaac

SEQ ID NO: 3903837 - RNA, 18 nt, Human adenovirus B [HAdV-B]
ccuacuacgccugcugcu

SEQ ID NO: 3903838 - RNA, 13 nt, Human adenovirus B [HAdV-B]
ccuaugcacuuuu

SEQ ID NO: 3903839 - RNA, 21 nt, Human adenovirus B [HAdV-B]
ccucagagcgaaguguaucag

SEQ ID NO: 3903840 - RNA, 21 nt, Human adenovirus B [HAdV-B]
ccucaguacgauaccaccagg

SEQ ID NO: 3903841 - RNA, 18 nt, Human adenovirus B [HAdV-B]
ccuccacugaagugcaaa

SEQ ID NO: 3903842 - RNA, 16 nt, Human adenovirus B [HAdV-B]
ccuccgcgauaccugg

SEQ ID NO: 3903843 - RNA, 16 nt, Human adenovirus B [HAdV-B]
ccucugggaugcaaau

SEQ ID NO: 3903844 - RNA, 20 nt, Human adenovirus B [HAdV-B]
ccugacgaacagauggauaa

SEQ ID NO: 3903845 - RNA, 16 nt, Human adenovirus B [HAdV-B]
ccugccaccaccucua

SEQ ID NO: 3903846 - RNA, 21 nt, Human adenovirus B [HAdV-B]
ccugcugcuucucccaggcuc

SEQ ID NO: 3903847 - RNA, 17 nt, Human adenovirus B [HAdV-B]
ccugcuuguaaccacuc

SEQ ID NO: 3903848 - RNA, 17 nt, Human adenovirus B [HAdV-B]
ccuggcagaacacacuc

SEQ ID NO: 3903849 - RNA, 19 nt, Human adenovirus B [HAdV-B]
ccuguagaaaaagauagua

SEQ ID NO: 3903850 - RNA, 21 nt, Human adenovirus B [HAdV-B]
ccugucacuuuccgcuccacu

SEQ ID NO: 3903851 - RNA, 16 nt, Human adenovirus B [HAdV-B]
ccugucaucaugauua

SEQ ID NO: 3903852 - RNA, 22 nt, Human adenovirus B [HAdV-B]
ccuucuccggaucuccugggca

SEQ ID NO: 3903853 - RNA, 18 nt, Human adenovirus B [HAdV-B]
ccuuguaagggcagcagc

SEQ ID NO: 3903854 - RNA, 15 nt, Human adenovirus B [HAdV-B]
ccuuguguccuccaa

SEQ ID NO: 3903855 - RNA, 15 nt, Human adenovirus B [HAdV-B]
cgacguggacagcga

SEQ ID NO: 3903856 - RNA, 13 nt, Human adenovirus B [HAdV-B]
cgacugcagcacu

SEQ ID NO: 3903857 - RNA, 19 nt, Human adenovirus B [HAdV-B]
cgagcuaccacugccaugc

SEQ ID NO: 3903858 - RNA, 15 nt, Human adenovirus B [HAdV-B]
cgaggaaaaggagca

SEQ ID NO: 3903859 - RNA, 13 nt, Human adenovirus B [HAdV-B]
cgaggaggcagag

SEQ ID NO: 3903860 - RNA, 15 nt, Human adenovirus B [HAdV-B]
cgaggcucucuucaa

SEQ ID NO: 3903861 - RNA, 22 nt, Human adenovirus B [HAdV-B]
cgaggguggaaucauguccacc

SEQ ID NO: 3903862 - RNA, 16 nt, Human adenovirus B [HAdV-B]
cgaguaucaucacuua

SEQ ID NO: 3903863 - RNA, 20 nt, Human adenovirus B [HAdV-B]
cgaguuuacuuugccagaag

SEQ ID NO: 3903864 - RNA, 23 nt, Human adenovirus B [HAdV-B]
cgaugcccuacucaaucugggac

SEQ ID NO: 3903865 - RNA, 17 nt, Human adenovirus B [HAdV-B]
cgauuggacccaggcca

SEQ ID NO: 3903866 - RNA, 21 nt, Human adenovirus B [HAdV-B]
cgcaaaaaauggccuguuuuu

SEQ ID NO: 3903867 - RNA, 17 nt, Human adenovirus B [HAdV-B]
cgcaaguccccuuucag

SEQ ID NO: 3903868 - RNA, 20 nt, Human adenovirus B [HAdV-B]
cgccuucaauuggagcagua

SEQ ID NO: 3903869 - RNA, 22 nt, Human adenovirus B [HAdV-B]
cgcggcgugccucugacgugag

SEQ ID NO: 3903870 - RNA, 14 nt, Human adenovirus B [HAdV-B]
cgcuaccaucuccg

SEQ ID NO: 3903871 - RNA, 18 nt, Human adenovirus B [HAdV-B]
cgcuauggagucacugcu

SEQ ID NO: 3903872 - RNA, 16 nt, Human adenovirus B [HAdV-B]
cgcugcaaucugugca

SEQ ID NO: 3903873 - RNA, 13 nt, Human adenovirus B [HAdV-B]
cgcugcagagcca

SEQ ID NO: 3903874 - RNA, 21 nt, Human adenovirus B [HAdV-B]
gccuuguaagggcagcagccc

SEQ ID NO: 3903875 - RNA, 20 nt, Human adenovirus B [HAdV-B]
gcgaaauauggagcccagca

SEQ ID NO: 3903876 - RNA, 24 nt, Human adenovirus B [HAdV-B]
gcgacucgacuccguagccuggag

SEQ ID NO: 3903877 - RNA, 12 nt, Human adenovirus B [HAdV-B]
gcgccaacaccu

SEQ ID NO: 3903878 - RNA, 21 nt, Human adenovirus B [HAdV-B]
gcgugcaauggcgugggcgca

SEQ ID NO: 3903879 - RNA, 14 nt, Human adenovirus B [HAdV-B]
gcgugccaggcacu

SEQ ID NO: 3903880 - RNA, 18 nt, Human adenovirus B [HAdV-B]
gcguuccuggacauugcu

SEQ ID NO: 3903881 - RNA, 15 nt, Human adenovirus B [HAdV-B]
gcuacagcugcugca

SEQ ID NO: 3903882 - RNA, 14 nt, Human adenovirus B [HAdV-B]
gcuacgaagagcua

SEQ ID NO: 3903883 - RNA, 11 nt, Human adenovirus B [HAdV-B]
gcuagcagccc

SEQ ID NO: 3903884 - RNA, 21 nt, Human adenovirus B [HAdV-B]
gcuaggcggagcgguggugua

SEQ ID NO: 3903885 - RNA, 19 nt, Human adenovirus B [HAdV-B]
gcuagugaucgcacugcuu

SEQ ID NO: 3903886 - RNA, 22 nt, Human adenovirus B [HAdV-B]
gcucaucaaagguuaggucugu

SEQ ID NO: 3903887 - RNA, 16 nt, Human adenovirus B [HAdV-B]
gcucauggacaaacag

SEQ ID NO: 3903888 - RNA, 20 nt, Human adenovirus B [HAdV-B]
gcuccaaauacaucucagug

SEQ ID NO: 3903889 - RNA, 19 nt, Human adenovirus B [HAdV-B]
gcuccgccaguccaccucg

SEQ ID NO: 3903890 - RNA, 18 nt, Human adenovirus B [HAdV-B]
gcuccgguauccugcccg

SEQ ID NO: 3903891 - RNA, 14 nt, Human adenovirus B [HAdV-B]
gcucuaugccaacu

SEQ ID NO: 3903892 - RNA, 19 nt, Human adenovirus B [HAdV-B]
gcuggacuacuugcacaga

SEQ ID NO: 3903893 - RNA, 16 nt, Human adenovirus B [HAdV-B]
gcugucaaccugcccc

SEQ ID NO: 3903894 - RNA, 18 nt, Human adenovirus B [HAdV-B]
gcuuaacugauuuccuuc

SEQ ID NO: 3903895 - RNA, 18 nt, Human adenovirus B [HAdV-B]
gcuuacaacucccuggcu

SEQ ID NO: 3903896 - RNA, 14 nt, Human adenovirus B [HAdV-B]
gcuuaccuuuggaa

SEQ ID NO: 3903897 - RNA, 18 nt, Human adenovirus B [HAdV-B]
gcuucacacaaagcccaa

SEQ ID NO: 3903898 - RNA, 18 nt, Human adenovirus B [HAdV-B]
gcuugggcgcuugccagg

SEQ ID NO: 3903899 - RNA, 15 nt, Human adenovirus B [HAdV-B]
gcuuuugcugugcca

SEQ ID NO: 3903900 - RNA, 16 nt, Human adenovirus B [HAdV-B]
ggaacaaagcuuggaa

SEQ ID NO: 3903901 - RNA, 20 nt, Human adenovirus B [HAdV-B]
ggaagagucuuucugugcga

SEQ ID NO: 3903902 - RNA, 11 nt, Human adenovirus B [HAdV-B]
ggacaggguuc

SEQ ID NO: 3903903 - RNA, 18 nt, Human adenovirus B [HAdV-B]
ggagccgaaaucuugaaa

SEQ ID NO: 3903904 - RNA, 13 nt, Human adenovirus B [HAdV-B]
ggagcgguggugu

SEQ ID NO: 3903905 - RNA, 19 nt, Human adenovirus B [HAdV-B]
ggagcuuaccuuuggaagu

SEQ ID NO: 3903906 - RNA, 20 nt, Human adenovirus B [HAdV-B]
ggaggacagucuggaggaca

SEQ ID NO: 3903907 - RNA, 12 nt, Human adenovirus B [HAdV-B]
ggaggcagagga

SEQ ID NO: 3903908 - RNA, 12 nt, Human adenovirus B [HAdV-B]
ggagucacugcu

SEQ ID NO: 3903909 - RNA, 23 nt, Human adenovirus B [HAdV-B]
ggauagcuuccggcaucaaugga

SEQ ID NO: 3903910 - RNA, 15 nt, Human adenovirus B [HAdV-B]
ggaucacccucaagg

SEQ ID NO: 3903911 - RNA, 11 nt, Human adenovirus B [HAdV-B]
ggaucuccugg

SEQ ID NO: 3903912 - RNA, 21 nt, Human adenovirus B [HAdV-B]
ggauguagaugccuaugagaa

SEQ ID NO: 3903913 - RNA, 16 nt, Human adenovirus B [HAdV-B]
ggauuuccugccacca

SEQ ID NO: 3903914 - RNA, 11 nt, Human adenovirus B [HAdV-B]
ggcagaggugg

SEQ ID NO: 3903915 - RNA, 13 nt, Human adenovirus B [HAdV-B]
ggcagcagcuccu

SEQ ID NO: 3903916 - RNA, 15 nt, Human adenovirus B [HAdV-B]
ggcaggaugugagcu

SEQ ID NO: 3903917 - RNA, 15 nt, Human adenovirus B [HAdV-B]
ggcaggcaugcaaga

SEQ ID NO: 3903918 - RNA, 17 nt, Human adenovirus B [HAdV-B]
ggcaguuuggaagccac

SEQ ID NO: 3903919 - RNA, 20 nt, Human adenovirus B [HAdV-B]
ggcauggguguauggcagca

SEQ ID NO: 3903920 - RNA, 18 nt, Human adenovirus B [HAdV-B]
ggccaccucguucaucau

SEQ ID NO: 3903921 - RNA, 15 nt, Human adenovirus B [HAdV-B]
ggccauuuuggaaga

SEQ ID NO: 3903922 - RNA, 17 nt, Human adenovirus B [HAdV-B]
ggccgcaaaugcucugc

SEQ ID NO: 3903923 - RNA, 18 nt, Human adenovirus B [HAdV-B]
ggccuaagagaccugcua

SEQ ID NO: 3903924 - RNA, 15 nt, Human adenovirus B [HAdV-B]
ggccuccuagcaagg

SEQ ID NO: 3903925 - RNA, 18 nt, Human adenovirus B [HAdV-B]
ggccugcgucaucaccca

SEQ ID NO: 3903926 - RNA, 18 nt, Human adenovirus B [HAdV-B]
ggcgacggcggugaugca

SEQ ID NO: 3903927 - RNA, 18 nt, Human adenovirus B [HAdV-B]
ggcgcaguagucaagugu

SEQ ID NO: 3903928 - RNA, 20 nt, Human adenovirus B [HAdV-B]
ggcgccuucaauuggagcag

SEQ ID NO: 3903929 - RNA, 22 nt, Human adenovirus B [HAdV-B]
ggcgcuacuugcuauuccacca

SEQ ID NO: 3903930 - RNA, 18 nt, Human adenovirus B [HAdV-B]
ggcgcugcagagccagcc

SEQ ID NO: 3903931 - RNA, 16 nt, Human adenovirus B [HAdV-B]
ggcgcuugccagggug

SEQ ID NO: 3903932 - RNA, 13 nt, Human adenovirus B [HAdV-B]
ggcggcuccaccc

SEQ ID NO: 3903933 - RNA, 23 nt, Human adenovirus B [HAdV-B]
ggcguccagcgcugccaggguuc

SEQ ID NO: 3903934 - RNA, 17 nt, Human adenovirus B [HAdV-B]
ggcucagcgccgggccu

SEQ ID NO: 3903935 - RNA, 17 nt, Human adenovirus B [HAdV-B]
ggcucucuucaacaagu

SEQ ID NO: 3903936 - RNA, 19 nt, Human adenovirus B [HAdV-B]
ggcugcgguccgaccugga

SEQ ID NO: 3903937 - RNA, 14 nt, Human adenovirus B [HAdV-B]
gggacagucaggca

SEQ ID NO: 3903938 - RNA, 14 nt, Human adenovirus B [HAdV-B]
gggauguaguuucu

SEQ ID NO: 3903939 - RNA, 15 nt, Human adenovirus B [HAdV-B]
gggauuuggaagagc

SEQ ID NO: 3903940 - RNA, 23 nt, Human adenovirus B [HAdV-B]
gggcaaaguuuaaaacugacccc

SEQ ID NO: 3903941 - RNA, 18 nt, Human adenovirus B [HAdV-B]
gggcaacuccgacugcag

SEQ ID NO: 3903942 - RNA, 15 nt, Human adenovirus B [HAdV-B]
gggcggcgcugcaga

SEQ ID NO: 3903943 - RNA, 17 nt, Human adenovirus B [HAdV-B]
gggggcaauucuggccc

SEQ ID NO: 3903944 - RNA, 11 nt, Human adenovirus B [HAdV-B]
gggggcagagg

SEQ ID NO: 3903945 - RNA, 17 nt, Human adenovirus B [HAdV-B]
ggggugcuggcugguca

SEQ ID NO: 3903946 - RNA, 15 nt, Human adenovirus B [HAdV-B]
gggguguguuggaca

SEQ ID NO: 3903947 - RNA, 14 nt, Human adenovirus B [HAdV-B]
gggucuucuccugg

SEQ ID NO: 3903948 - RNA, 22 nt, Human adenovirus B [HAdV-B]
gggucuugugugggacgaugag

SEQ ID NO: 3903949 - RNA, 14 nt, Human adenovirus B [HAdV-B]
gguagaacugcugc

SEQ ID NO: 3903950 - RNA, 14 nt, Human adenovirus B [HAdV-B]
gguagacagaaugg

SEQ ID NO: 3903951 - RNA, 21 nt, Human adenovirus B [HAdV-B]
gguagcugaaacccacugcua

SEQ ID NO: 3903952 - RNA, 13 nt, Human adenovirus B [HAdV-B]
gguaggagaaaga

SEQ ID NO: 3903953 - RNA, 18 nt, Human adenovirus B [HAdV-B]
gguagucgguauggaagc

SEQ ID NO: 3903954 - RNA, 18 nt, Human adenovirus B [HAdV-B]
ggucagugaugagcagcu

SEQ ID NO: 3903955 - RNA, 20 nt, Human adenovirus B [HAdV-B]
ggucaucuugcaggucugcc

SEQ ID NO: 3903956 - RNA, 20 nt, Human adenovirus B [HAdV-B]
ggugcaacacagcagagaca

SEQ ID NO: 3903957 - RNA, 14 nt, Human adenovirus B [HAdV-B]
ggugccaggugguc

SEQ ID NO: 3903958 - RNA, 22 nt, Human adenovirus B [HAdV-B]
gguggugcaacacagcagagac

SEQ ID NO: 3903959 - RNA, 19 nt, Human adenovirus B [HAdV-B]
gguguaucgcaaugacaga

SEQ ID NO: 3903960 - RNA, 17 nt, Human adenovirus B [HAdV-B]
gguugcauucacugcuc

SEQ ID NO: 3903961 - RNA, 19 nt, Human adenovirus B [HAdV-B]
guacaugggcaccuggagc

SEQ ID NO: 3903962 - RNA, 14 nt, Human adenovirus B [HAdV-B]
guaccaugcaugca

SEQ ID NO: 3903963 - RNA, 16 nt, Human adenovirus B [HAdV-B]
guacgauaccaccagg

SEQ ID NO: 3903964 - RNA, 16 nt, Human adenovirus B [HAdV-B]
guauaauuaugcuuaa

SEQ ID NO: 3903965 - RNA, 15 nt, Human adenovirus B [HAdV-B]
guaucacaagagcga

SEQ ID NO: 3903966 - RNA, 14 nt, Human adenovirus B [HAdV-B]
guaucgcaaugaca

SEQ ID NO: 3903967 - RNA, 15 nt, Human adenovirus B [HAdV-B]
gucaaguguuucuug

SEQ ID NO: 3903968 - RNA, 21 nt, Human adenovirus B [HAdV-B]
gucaucuuuagcgaucuucuc

SEQ ID NO: 3903969 - RNA, 22 nt, Human adenovirus B [HAdV-B]
gucaucuuuagcgaucuucuca

SEQ ID NO: 3903970 - RNA, 15 nt, Human adenovirus B [HAdV-B]
gucccgauuuggaag

SEQ ID NO: 3903971 - RNA, 17 nt, Human adenovirus B [HAdV-B]
guccugccaccaccucu

SEQ ID NO: 3903972 - RNA, 16 nt, Human adenovirus B [HAdV-B]
guccugccagggcaca

SEQ ID NO: 3903973 - RNA, 21 nt, Human adenovirus B [HAdV-B]
gucggcggacauugcuucucu

SEQ ID NO: 3903974 - RNA, 20 nt, Human adenovirus B [HAdV-B]
gucuaucuguaccugugcca

SEQ ID NO: 3903975 - RNA, 13 nt, Human adenovirus B [HAdV-B]
gucucaaccccag

SEQ ID NO: 3903976 - RNA, 14 nt, Human adenovirus B [HAdV-B]
gucucacgcuugcc

SEQ ID NO: 3903977 - RNA, 20 nt, Human adenovirus B [HAdV-B]
agacgccaccgagcuaccac

SEQ ID NO: 3903978 - RNA, 14 nt, Human adenovirus B [HAdV-B]
agagcgagccguag

SEQ ID NO: 3903979 - RNA, 20 nt, Human adenovirus B [HAdV-B]
agagcgugaugcagcagcag

SEQ ID NO: 3903980 - RNA, 16 nt, Human adenovirus B [HAdV-B]
agagcucugacuggag

SEQ ID NO: 3903981 - RNA, 20 nt, Human adenovirus B [HAdV-B]
agagcucugacuggagcugg

SEQ ID NO: 3903982 - RNA, 17 nt, Human adenovirus B [HAdV-B]
agaggugggauugaaug

SEQ ID NO: 3903983 - RNA, 17 nt, Human adenovirus B [HAdV-B]
agaguaucauagugcag

SEQ ID NO: 3903984 - RNA, 18 nt, Human adenovirus B [HAdV-B]
agagucucugacaaagug

SEQ ID NO: 3903985 - RNA, 16 nt, Human adenovirus B [HAdV-B]
agauaacuaucaccaa

SEQ ID NO: 3903986 - RNA, 15 nt, Human adenovirus B [HAdV-B]
agauguaaccugggc

SEQ ID NO: 3903987 - RNA, 22 nt, Human adenovirus B [HAdV-B]
agauguacgcgaagccgugucu

SEQ ID NO: 3903988 - RNA, 22 nt, Human adenovirus B [HAdV-B]
agcaacgcauucugauuucacu

SEQ ID NO: 3903989 - RNA, 19 nt, Human adenovirus B [HAdV-B]
agcaauggggccgugggca

SEQ ID NO: 3903990 - RNA, 14 nt, Human adenovirus B [HAdV-B]
agcagagcaggucu

SEQ ID NO: 3903991 - RNA, 16 nt, Human adenovirus B [HAdV-B]
agcagcaggcgacggc

SEQ ID NO: 3903992 - RNA, 16 nt, Human adenovirus B [HAdV-B]
agcaguaucuggagcg

SEQ ID NO: 3903993 - RNA, 23 nt, Human adenovirus B [HAdV-B]
agccagguuaaauccgguucauu

SEQ ID NO: 3903994 - RNA, 21 nt, Human adenovirus B [HAdV-B]
agcccauucgugcaggugagg

SEQ ID NO: 3903995 - RNA, 19 nt, Human adenovirus B [HAdV-B]
agccccccgggaacaagag

SEQ ID NO: 3903996 - RNA, 14 nt, Human adenovirus B [HAdV-B]
agccuacugccacc

SEQ ID NO: 3903997 - RNA, 18 nt, Human adenovirus B [HAdV-B]
agccuggaggaacgugaa

SEQ ID NO: 3903998 - RNA, 16 nt, Human adenovirus B [HAdV-B]
agcgccagcaggaggc

SEQ ID NO: 3903999 - RNA, 16 nt, Human adenovirus B [HAdV-B]
agcgcuaccaucuccg

SEQ ID NO: 3904000 - RNA, 14 nt, Human adenovirus B [HAdV-B]
agcgcuuucacagu

SEQ ID NO: 3904001 - RNA, 21 nt, Human adenovirus B [HAdV-B]
agcucagagaugucauccaaa

SEQ ID NO: 3904002 - RNA, 15 nt, Human adenovirus B [HAdV-B]
agcucagagccauug

SEQ ID NO: 3904003 - RNA, 18 nt, Human adenovirus B [HAdV-B]
agcucgccugugccauug

SEQ ID NO: 3904004 - RNA, 13 nt, Human adenovirus B [HAdV-B]
agcugacuugcag

SEQ ID NO: 3904005 - RNA, 16 nt, Human adenovirus B [HAdV-B]
agcugcuacagcugcu

SEQ ID NO: 3904006 - RNA, 21 nt, Human adenovirus B [HAdV-B]
aggaaccugaaguaaauggaa

SEQ ID NO: 3904007 - RNA, 16 nt, Human adenovirus B [HAdV-B]
aggaccagugcuuuga

SEQ ID NO: 3904008 - RNA, 16 nt, Human adenovirus B [HAdV-B]
aggagcggagccuggg

SEQ ID NO: 3904009 - RNA, 22 nt, Human adenovirus B [HAdV-B]
aggaggaaaacgaggaggcaga

SEQ ID NO: 3904010 - RNA, 13 nt, Human adenovirus B [HAdV-B]
aggaggacagucu

SEQ ID NO: 3904011 - RNA, 19 nt, Human adenovirus B [HAdV-B]
aggaggcggaggaggacag

SEQ ID NO: 3904012 - RNA, 20 nt, Human adenovirus B [HAdV-B]
aggauauuuugaaauaugag

SEQ ID NO: 3904013 - RNA, 13 nt, Human adenovirus B [HAdV-B]
aggaucacagaga

SEQ ID NO: 3904014 - RNA, 22 nt, Human adenovirus B [HAdV-B]
aggcgaugggucuucuccuggg

SEQ ID NO: 3904015 - RNA, 15 nt, Human adenovirus B [HAdV-B]
aggcggagcgguggu

SEQ ID NO: 3904016 - RNA, 18 nt, Human adenovirus B [HAdV-B]
aggggcguuaagagggag

SEQ ID NO: 3904017 - RNA, 18 nt, Human adenovirus B [HAdV-B]
aggguugcauucacugcu

SEQ ID NO: 3904018 - RNA, 15 nt, Human adenovirus B [HAdV-B]
aggucaucugggcca

SEQ ID NO: 3904019 - RNA, 14 nt, Human adenovirus B [HAdV-B]
aggucgcagugcau

SEQ ID NO: 3904020 - RNA, 21 nt, Human adenovirus B [HAdV-B]
aggugaagauuuguaucccac

SEQ ID NO: 3904021 - RNA, 18 nt, Human adenovirus B [HAdV-B]
agguggacgagcagaccu

SEQ ID NO: 3904022 - RNA, 15 nt, Human adenovirus B [HAdV-B]
agguggucucuggau

SEQ ID NO: 3904023 - RNA, 19 nt, Human adenovirus B [HAdV-B]
agguuacuggccagugcag

SEQ ID NO: 3904024 - RNA, 17 nt, Human adenovirus B [HAdV-B]
aguaacuuuuguaaaug

SEQ ID NO: 3904025 - RNA, 17 nt, Human adenovirus B [HAdV-B]
aguacuccaccagaaca

SEQ ID NO: 3904026 - RNA, 18 nt, Human adenovirus B [HAdV-B]
agucaaguguuucuugaa

SEQ ID NO: 3904027 - RNA, 17 nt, Human adenovirus B [HAdV-B]
agucggcggacauugcu

SEQ ID NO: 3904028 - RNA, 16 nt, Human adenovirus B [HAdV-B]
agucugagacagacau

SEQ ID NO: 3904029 - RNA, 22 nt, Human adenovirus B [HAdV-B]
agucuguuccacaguucaguga

SEQ ID NO: 3904030 - RNA, 16 nt, Human adenovirus B [HAdV-B]
agucuguugaugccca

SEQ ID NO: 3904031 - RNA, 19 nt, Human adenovirus B [HAdV-B]
agugaaccacaacccccac

SEQ ID NO: 3904032 - RNA, 15 nt, Human adenovirus B [HAdV-B]
agugagaucggacag

SEQ ID NO: 3904033 - RNA, 21 nt, Human adenovirus B [HAdV-B]
agugcccaucaguguggaaga

SEQ ID NO: 3904034 - RNA, 23 nt, Human adenovirus B [HAdV-B]
agugcccaucaguguggaagagc

SEQ ID NO: 3904035 - RNA, 23 nt, Human adenovirus B [HAdV-B]
agugcggaaccuuugacacugcc

SEQ ID NO: 3904036 - RNA, 13 nt, Human adenovirus B [HAdV-B]
aguucaaguacaa

SEQ ID NO: 3904037 - RNA, 21 nt, Human adenovirus B [HAdV-B]
aguucuugugguaaauccaau

SEQ ID NO: 3904038 - RNA, 19 nt, Human adenovirus B [HAdV-B]
aguugagcgccucggcugc

SEQ ID NO: 3904039 - RNA, 17 nt, Human adenovirus B [HAdV-B]
aguugcgccucuucucu

SEQ ID NO: 3904040 - RNA, 22 nt, Human adenovirus B [HAdV-B]
auaaaucagucuuuccaucaca

SEQ ID NO: 3904041 - RNA, 13 nt, Human adenovirus B [HAdV-B]
auaagaaugccau

SEQ ID NO: 3904042 - RNA, 13 nt, Human adenovirus B [HAdV-B]
auacaauggacuc

SEQ ID NO: 3904043 - RNA, 18 nt, Human adenovirus B [HAdV-B]
auaccgcaaccaaaauau

SEQ ID NO: 3904044 - RNA, 15 nt, Human adenovirus B [HAdV-B]
auacugacgaaaaug

SEQ ID NO: 3904045 - RNA, 13 nt, Human adenovirus B [HAdV-B]
auacuuuuggaac

SEQ ID NO: 3904046 - RNA, 16 nt, Human adenovirus B [HAdV-B]
auagcuuugaggccug

SEQ ID NO: 3904047 - RNA, 22 nt, Human adenovirus B [HAdV-B]
auagggcuugacggggaagacg

SEQ ID NO: 3904048 - RNA, 16 nt, Human adenovirus B [HAdV-B]
auaguuauguuccuga

SEQ ID NO: 3904049 - RNA, 13 nt, Human adenovirus B [HAdV-B]
aucaaaugcucac

SEQ ID NO: 3904050 - RNA, 21 nt, Human adenovirus B [HAdV-B]
aucacaauuaggaccagugcu

SEQ ID NO: 3904051 - RNA, 12 nt, Human adenovirus B [HAdV-B]
aucacccagcaa

SEQ ID NO: 3904052 - RNA, 22 nt, Human adenovirus B [HAdV-B]
aucagccauggcuuaccagaca

SEQ ID NO: 3904053 - RNA, 18 nt, Human adenovirus B [HAdV-B]
auccacaagacccagagg

SEQ ID NO: 3904054 - RNA, 20 nt, Human adenovirus B [HAdV-B]
aucccgccaaacccaacaca

SEQ ID NO: 3904055 - RNA, 22 nt, Human adenovirus B [HAdV-B]
aucccgccaaacccaacacaca

SEQ ID NO: 3904056 - RNA, 21 nt, Human adenovirus B [HAdV-B]
auccugcccgccaccugcugc

SEQ ID NO: 3904057 - RNA, 21 nt, Human adenovirus B [HAdV-B]
auccugucugauuccuggaua

SEQ ID NO: 3904058 - RNA, 21 nt, Human adenovirus B [HAdV-B]
aucggcacgagccaacugaac

SEQ ID NO: 3904059 - RNA, 19 nt, Human adenovirus B [HAdV-B]
aucuggacuuggaagaggg

SEQ ID NO: 3904060 - RNA, 13 nt, Human adenovirus B [HAdV-B]
augaacaaugcca

SEQ ID NO: 3904061 - RNA, 14 nt, Human adenovirus B [HAdV-B]
augaacaaugccau

SEQ ID NO: 3904062 - RNA, 13 nt, Human adenovirus B [HAdV-B]
augaauguuccuu

SEQ ID NO: 3904063 - RNA, 11 nt, Human adenovirus B [HAdV-B]
augaauuaaaa

SEQ ID NO: 3904064 - RNA, 22 nt, Human adenovirus B [HAdV-B]
augacccagaugccugugauga

SEQ ID NO: 3904065 - RNA, 19 nt, Human adenovirus B [HAdV-B]
augagaacaguaagaaaga

SEQ ID NO: 3904066 - RNA, 12 nt, Human adenovirus B [HAdV-B]
augagacagugu

SEQ ID NO: 3904067 - RNA, 12 nt, Human adenovirus B [HAdV-B]
augaggccacaa

SEQ ID NO: 3904068 - RNA, 19 nt, Human adenovirus B [HAdV-B]
augaggcuuucagagaggc

SEQ ID NO: 3904069 - RNA, 14 nt, Human adenovirus B [HAdV-B]
augauaacagaugu

SEQ ID NO: 3904070 - RNA, 20 nt, Human adenovirus B [HAdV-B]
augaugaaggauccugucac

SEQ ID NO: 3904071 - RNA, 21 nt, Human adenovirus B [HAdV-B]
augauuaauaaaaaaucacuu

SEQ ID NO: 3904072 - RNA, 19 nt, Human adenovirus B [HAdV-B]
augcaguuauugacagugu

SEQ ID NO: 3904073 - RNA, 20 nt, Human adenovirus B [HAdV-B]
augccauggacaaugucaac

SEQ ID NO: 3904074 - RNA, 18 nt, Human adenovirus B [HAdV-B]
augcgggcggcgcugcag

SEQ ID NO: 3904075 - RNA, 21 nt, Human adenovirus B [HAdV-B]
augcuggcuacugugcauauu

SEQ ID NO: 3904076 - RNA, 21 nt, Human adenovirus B [HAdV-B]
auggacaggagucaaccccac

SEQ ID NO: 3904077 - RNA, 20 nt, Human adenovirus B [HAdV-B]
auggcgaucccgaaaaagga

SEQ ID NO: 3904078 - RNA, 13 nt, Human adenovirus B [HAdV-B]
auggcgcuagcag

SEQ ID NO: 3904079 - RNA, 18 nt, Human adenovirus B [HAdV-B]
gcuauggagucacugcua

SEQ ID NO: 3904080 - RNA, 20 nt, Human adenovirus B [HAdV-B]
gcuauggagucacugcuacc

SEQ ID NO: 3904081 - RNA, 15 nt, Human adenovirus B [HAdV-B]
gcucaccauuaccaa

SEQ ID NO: 3904082 - RNA, 17 nt, Human adenovirus B [HAdV-B]
gcuccgccaguccaccu

SEQ ID NO: 3904083 - RNA, 18 nt, Human adenovirus B [HAdV-B]
gcuccgggguaguguugu

SEQ ID NO: 3904084 - RNA, 17 nt, Human adenovirus B [HAdV-B]
gcucgggauucuccuuu

SEQ ID NO: 3904085 - RNA, 21 nt, Human adenovirus B [HAdV-B]
gcucuuaccaccacgccccgc

SEQ ID NO: 3904086 - RNA, 22 nt, Human adenovirus B [HAdV-B]
gcucuuacugcggaggaggaga

SEQ ID NO: 3904087 - RNA, 13 nt, Human adenovirus B [HAdV-B]
gcugauugccaca

SEQ ID NO: 3904088 - RNA, 20 nt, Human adenovirus B [HAdV-B]
gcugcaaagcuccaagcagg

SEQ ID NO: 3904089 - RNA, 13 nt, Human adenovirus B [HAdV-B]
gcugcacagcacc

SEQ ID NO: 3904090 - RNA, 15 nt, Human adenovirus B [HAdV-B]
gcugcagagccagcc

SEQ ID NO: 3904091 - RNA, 12 nt, Human adenovirus B [HAdV-B]
gcugccagugcg

SEQ ID NO: 3904092 - RNA, 11 nt, Human adenovirus B [HAdV-B]
gcugcuacagc

SEQ ID NO: 3904093 - RNA, 22 nt, Human adenovirus B [HAdV-B]
gcugcuacagcugcugcagaag

SEQ ID NO: 3904094 - RNA, 13 nt, Human adenovirus B [HAdV-B]
gcugguuuccgaa

SEQ ID NO: 3904095 - RNA, 13 nt, Human adenovirus B [HAdV-B]
gcuuauggcaagc

SEQ ID NO: 3904096 - RNA, 13 nt, Human adenovirus B [HAdV-B]
gcuucacuuucuu

SEQ ID NO: 3904097 - RNA, 19 nt, Human adenovirus B [HAdV-B]
gcuuccagacaugaugaag

SEQ ID NO: 3904098 - RNA, 22 nt, Human adenovirus B [HAdV-B]
gcuuccagacaugaugaaggau

SEQ ID NO: 3904099 - RNA, 18 nt, Human adenovirus B [HAdV-B]
gcuuccgaccuggcagac

SEQ ID NO: 3904100 - RNA, 14 nt, Human adenovirus B [HAdV-B]
gcuugacucucugg

SEQ ID NO: 3904101 - RNA, 15 nt, Human adenovirus B [HAdV-B]
gcuuggaaugcccac

SEQ ID NO: 3904102 - RNA, 17 nt, Human adenovirus B [HAdV-B]
gcuugggcgcuugccag

SEQ ID NO: 3904103 - RNA, 19 nt, Human adenovirus B [HAdV-B]
ggaaaacggauucugggga

SEQ ID NO: 3904104 - RNA, 11 nt, Human adenovirus B [HAdV-B]
ggaacuggcac

SEQ ID NO: 3904105 - RNA, 15 nt, Human adenovirus B [HAdV-B]
ggaagacgcgcuccu

SEQ ID NO: 3904106 - RNA, 23 nt, Human adenovirus B [HAdV-B]
ggaagcaacgaagcuuggaaugc

SEQ ID NO: 3904107 - RNA, 17 nt, Human adenovirus B [HAdV-B]
ggaagugaguccuauuu

SEQ ID NO: 3904108 - RNA, 19 nt, Human adenovirus B [HAdV-B]
ggaaguuucagaugaagaa

SEQ ID NO: 3904109 - RNA, 14 nt, Human adenovirus B [HAdV-B]
ggaaucaaccccau

SEQ ID NO: 3904110 - RNA, 21 nt, Human adenovirus B [HAdV-B]
ggaaucaccaacuugggaacc

SEQ ID NO: 3904111 - RNA, 20 nt, Human adenovirus B [HAdV-B]
ggaaucaggcuguggacagu

SEQ ID NO: 3904112 - RNA, 18 nt, Human adenovirus B [HAdV-B]
ggaaugcgacgcuacagg

SEQ ID NO: 3904113 - RNA, 13 nt, Human adenovirus B [HAdV-B]
gacagaacugaag

SEQ ID NO: 3904114 - RNA, 14 nt, Human adenovirus B [HAdV-B]
gacagcaaaugaca

SEQ ID NO: 3904115 - RNA, 19 nt, Human adenovirus B [HAdV-B]
gacaggguucgacgagcgc

SEQ ID NO: 3904116 - RNA, 15 nt, Human adenovirus B [HAdV-B]
gacauggaaacucag

SEQ ID NO: 3904117 - RNA, 15 nt, Human adenovirus B [HAdV-B]
gacauggcuucucuu

SEQ ID NO: 3904118 - RNA, 14 nt, Human adenovirus B [HAdV-B]
gaccacgguggugc

SEQ ID NO: 3904119 - RNA, 20 nt, Human adenovirus B [HAdV-B]
gaccucaucuucccagagcg

SEQ ID NO: 3904120 - RNA, 14 nt, Human adenovirus B [HAdV-B]
gacgagaaaacaag

SEQ ID NO: 3904121 - RNA, 20 nt, Human adenovirus B [HAdV-B]
gacgccagcgccaugacaga

SEQ ID NO: 3904122 - RNA, 23 nt, Human adenovirus B [HAdV-B]
gacggaugucucacgcuugccag

SEQ ID NO: 3904123 - RNA, 16 nt, Human adenovirus B [HAdV-B]
gacggcggugaugcaa

SEQ ID NO: 3904124 - RNA, 14 nt, Human adenovirus B [HAdV-B]
gacuagcagacagg

SEQ ID NO: 3904125 - RNA, 18 nt, Human adenovirus B [HAdV-B]
gacucugacacuccuggu

SEQ ID NO: 3904126 - RNA, 21 nt, Human adenovirus B [HAdV-B]
gacugcagcacuggacaugac

SEQ ID NO: 3904127 - RNA, 13 nt, Human adenovirus B [HAdV-B]
gacuuaugcucag

SEQ ID NO: 3904128 - RNA, 14 nt, Human adenovirus B [HAdV-B]
gacuugggacagaa

SEQ ID NO: 3904129 - RNA, 15 nt, Human adenovirus B [HAdV-B]
gagagccggccugga

SEQ ID NO: 3904130 - RNA, 13 nt, Human adenovirus B [HAdV-B]
gagagcgugaugc

SEQ ID NO: 3904131 - RNA, 21 nt, Human adenovirus B [HAdV-B]
gagcaguaucuggagcgggcu

SEQ ID NO: 3904132 - RNA, 13 nt, Human adenovirus B [HAdV-B]
gagcccagcaugu

SEQ ID NO: 3904133 - RNA, 13 nt, Human adenovirus B [HAdV-B]
gagcggagccugg

SEQ ID NO: 3904134 - RNA, 16 nt, Human adenovirus B [HAdV-B]
gaggaaaaggagcaga

SEQ ID NO: 3904135 - RNA, 20 nt, Human adenovirus B [HAdV-B]
gaggaagauggcgaugaugg

SEQ ID NO: 3904136 - RNA, 15 nt, Human adenovirus B [HAdV-B]
gaggaugugagcgga

SEQ ID NO: 3904137 - RNA, 19 nt, Human adenovirus B [HAdV-B]
gaggcagucuaccugcgua

SEQ ID NO: 3904138 - RNA, 20 nt, Human adenovirus B [HAdV-B]
gaggcggaugaaggcgagga

SEQ ID NO: 3904139 - RNA, 12 nt, Human adenovirus B [HAdV-B]
gagggcgaagga

SEQ ID NO: 3904140 - RNA, 19 nt, Human adenovirus B [HAdV-B]
gaggguaaaccagugguca

SEQ ID NO: 3904141 - RNA, 15 nt, Human adenovirus B [HAdV-B]
gagucggugagcucu

SEQ ID NO: 3904142 - RNA, 13 nt, Human adenovirus B [HAdV-B]
gagugucacugcc

SEQ ID NO: 3904143 - RNA, 12 nt, Human adenovirus B [HAdV-B]
aaaaauggccug

SEQ ID NO: 3904144 - RNA, 14 nt, Human adenovirus B [HAdV-B]
aaaacaugcaacau

SEQ ID NO: 3904145 - RNA, 21 nt, Human adenovirus B [HAdV-B]
aaaacugguuagcugcacagc

SEQ ID NO: 3904146 - RNA, 18 nt, Human adenovirus B [HAdV-B]
aaaauguugaaaugggca

SEQ ID NO: 3904147 - RNA, 19 nt, Human adenovirus B [HAdV-B]
aaaauuugccaaaaaaaca

SEQ ID NO: 3904148 - RNA, 19 nt, Human adenovirus B [HAdV-B]
aaacuuuuauccagcuuuu

SEQ ID NO: 3904149 - RNA, 12 nt, Human adenovirus B [HAdV-B]
aaagccaaaaua

SEQ ID NO: 3904150 - RNA, 12 nt, Human adenovirus B [HAdV-B]
aaagccugcugg

SEQ ID NO: 3904151 - RNA, 17 nt, Human adenovirus B [HAdV-B]
aaagcgugcugcacagc

SEQ ID NO: 3904152 - RNA, 17 nt, Human adenovirus B [HAdV-B]
aaagugacauugguguu

SEQ ID NO: 3904153 - RNA, 14 nt, Human adenovirus B [HAdV-B]
aaaguuugguggau

SEQ ID NO: 3904154 - RNA, 15 nt, Human adenovirus B [HAdV-B]
aaauuacccaaguca

SEQ ID NO: 3904155 - RNA, 16 nt, Human adenovirus B [HAdV-B]
aacaaagaaaaaaugc

SEQ ID NO: 3904156 - RNA, 17 nt, Human adenovirus B [HAdV-B]
aacaauuuucgcucuuu

SEQ ID NO: 3904157 - RNA, 20 nt, Human adenovirus B [HAdV-B]
aacaccuuagaaaaugcaaa

SEQ ID NO: 3904158 - RNA, 23 nt, Human adenovirus B [HAdV-B]
aacacguuccgugggucugacac

SEQ ID NO: 3904159 - RNA, 20 nt, Human adenovirus B [HAdV-B]
aacaggaggauuaaagauua

SEQ ID NO: 3904160 - RNA, 14 nt, Human adenovirus B [HAdV-B]
aacagugcaggcag

SEQ ID NO: 3904161 - RNA, 23 nt, Human adenovirus B [HAdV-B]
aacagugcaggcagcagcuccuu

SEQ ID NO: 3904162 - RNA, 22 nt, Human adenovirus B [HAdV-B]
aacauagacauaaaugcaugca

SEQ ID NO: 3904163 - RNA, 18 nt, Human adenovirus B [HAdV-B]
aacaucaauugacaugcc

SEQ ID NO: 3904164 - RNA, 21 nt, Human adenovirus B [HAdV-B]
aacauuauuguacugccaucu

SEQ ID NO: 3904165 - RNA, 16 nt, Human adenovirus B [HAdV-B]
aacauucuacagagua

SEQ ID NO: 3904166 - RNA, 11 nt, Human adenovirus B [HAdV-B]
aaccacaaccc

SEQ ID NO: 3904167 - RNA, 16 nt, Human adenovirus B [HAdV-B]
aacccccacuacuccc

SEQ ID NO: 3904168 - RNA, 17 nt, Human adenovirus B [HAdV-B]
aaccuuugacacugccg

SEQ ID NO: 3904169 - RNA, 21 nt, Human adenovirus B [HAdV-B]
aacgaauuuucucccagcggc

SEQ ID NO: 3904170 - RNA, 21 nt, Human adenovirus B [HAdV-B]
aacgagcagauaacuaucacc

SEQ ID NO: 3904171 - RNA, 16 nt, Human adenovirus B [HAdV-B]
aacgaggaggcagagg

SEQ ID NO: 3904172 - RNA, 22 nt, Human adenovirus B [HAdV-B]
aacucugaccacucugauacaa

SEQ ID NO: 3904173 - RNA, 19 nt, Human adenovirus B [HAdV-B]
aagaacaaaaagccaaaau

SEQ ID NO: 3904174 - RNA, 20 nt, Human adenovirus B [HAdV-B]
aagagcuugacaagcucuua

SEQ ID NO: 3904175 - RNA, 19 nt, Human adenovirus B [HAdV-B]
aagcaaggguccgccacug

SEQ ID NO: 3904176 - RNA, 20 nt, Human adenovirus B [HAdV-B]
aagcaaggguccgccacugc

SEQ ID NO: 3904177 - RNA, 16 nt, Human adenovirus B [HAdV-B]
aagcauacaauccaga

SEQ ID NO: 3904178 - RNA, 19 nt, Human adenovirus B [HAdV-B]
aagcaugauuuuaauagcc

SEQ ID NO: 3904179 - RNA, 19 nt, Human adenovirus B [HAdV-B]
aagccauagggcaaaguca

SEQ ID NO: 3904180 - RNA, 16 nt, Human adenovirus B [HAdV-B]
aagcuaaggcaaacau

SEQ ID NO: 3904181 - RNA, 13 nt, Human adenovirus B [HAdV-B]
aaguauggaggca

SEQ ID NO: 3904182 - RNA, 21 nt, Human adenovirus B [HAdV-B]
aauaguaacuugcaacauaca

SEQ ID NO: 3904183 - RNA, 17 nt, Human adenovirus B [HAdV-B]
aauaguuccaaauggag

SEQ ID NO: 3904184 - RNA, 23 nt, Human adenovirus B [HAdV-B]
aauaucaucgaaguugcuggaaa

SEQ ID NO: 3904185 - RNA, 22 nt, Human adenovirus B [HAdV-B]
aaucagaaugacccgcaggcag

SEQ ID NO: 3904186 - RNA, 14 nt, Human adenovirus B [HAdV-B]
aaucauaauccgaa

SEQ ID NO: 3904187 - RNA, 12 nt, Human adenovirus B [HAdV-B]
aaucaugugaaa

SEQ ID NO: 3904188 - RNA, 15 nt, Human adenovirus B [HAdV-B]
aaucugcacuacacu

SEQ ID NO: 3904189 - RNA, 20 nt, Human adenovirus B [HAdV-B]
aaucuuagguuacuggccag

SEQ ID NO: 3904190 - RNA, 24 nt, Human adenovirus B [HAdV-B]
aaugacggauuucugugggacgac

SEQ ID NO: 3904191 - RNA, 14 nt, Human adenovirus B [HAdV-B]
ucaaacugcacacu

SEQ ID NO: 3904192 - RNA, 13 nt, Human adenovirus B [HAdV-B]
ucaaaugcucacu

SEQ ID NO: 3904193 - RNA, 17 nt, Human adenovirus B [HAdV-B]
ucaaccccagcugccua

SEQ ID NO: 3904194 - RNA, 16 nt, Human adenovirus B [HAdV-B]
ucaauaguuccaaaug

SEQ ID NO: 3904195 - RNA, 16 nt, Human adenovirus B [HAdV-B]
ucaauucaaacaacau

SEQ ID NO: 3904196 - RNA, 17 nt, Human adenovirus B [HAdV-B]
ucacaagacaagccaca

SEQ ID NO: 3904197 - RNA, 18 nt, Human adenovirus B [HAdV-B]
ucacagagacgagccugg

SEQ ID NO: 3904198 - RNA, 14 nt, Human adenovirus B [HAdV-B]
ucacagauuugcau

SEQ ID NO: 3904199 - RNA, 20 nt, Human adenovirus B [HAdV-B]
ucacaggcucccuguuccca

SEQ ID NO: 3904200 - RNA, 23 nt, Human adenovirus B [HAdV-B]
ucagcagacacaucacuuccaug

SEQ ID NO: 3904201 - RNA, 12 nt, Human adenovirus B [HAdV-B]
ucagcugcaaag

SEQ ID NO: 3904202 - RNA, 17 nt, Human adenovirus B [HAdV-B]
ucagcuguugggguagg

SEQ ID NO: 3904203 - RNA, 14 nt, Human adenovirus B [HAdV-B]
ucaguccugccagg

SEQ ID NO: 3904204 - RNA, 18 nt, Human adenovirus B [HAdV-B]
ucagugaaaacguuccug

SEQ ID NO: 3904205 - RNA, 22 nt, Human adenovirus B [HAdV-B]
ucaguguggaagagcucagccg

SEQ ID NO: 3904206 - RNA, 13 nt, Human adenovirus B [HAdV-B]
ucauagccacagc

SEQ ID NO: 3904207 - RNA, 15 nt, Human adenovirus B [HAdV-B]
ucauccuuggcuccg

SEQ ID NO: 3904208 - RNA, 14 nt, Human adenovirus B [HAdV-B]
ucaucuaaaaccau

SEQ ID NO: 3904209 - RNA, 18 nt, Human adenovirus B [HAdV-B]
ucaucugggccaaacugg

SEQ ID NO: 3904210 - RNA, 22 nt, Human adenovirus B [HAdV-B]
uccaacaaccguggucauuucu

SEQ ID NO: 3904211 - RNA, 18 nt, Human adenovirus B [HAdV-B]
uccaacagagccuaccuc

SEQ ID NO: 3904212 - RNA, 18 nt, Human adenovirus B [HAdV-B]
uccagguguaaguuucca

SEQ ID NO: 3904213 - RNA, 23 nt, Human adenovirus B [HAdV-B]
uccaguggaggaggcggaguagc

SEQ ID NO: 3904214 - RNA, 15 nt, Human adenovirus B [HAdV-B]
ucccagcagcaccuc

SEQ ID NO: 3904215 - RNA, 19 nt, Human adenovirus B [HAdV-B]
uccccccaaacgucagcca

SEQ ID NO: 3904216 - RNA, 14 nt, Human adenovirus B [HAdV-B]
uccccgcugggggg

SEQ ID NO: 3904217 - RNA, 18 nt, Human adenovirus B [HAdV-B]
ucccgacgaaaguacggu

SEQ ID NO: 3904218 - RNA, 15 nt, Human adenovirus B [HAdV-B]
uccgacugcagaauc

SEQ ID NO: 3904219 - RNA, 19 nt, Human adenovirus B [HAdV-B]
uccgagucgaggaacccgg

SEQ ID NO: 3904220 - RNA, 17 nt, Human adenovirus B [HAdV-B]
uccgguauccugcccgc

SEQ ID NO: 3904221 - RNA, 20 nt, Human adenovirus B [HAdV-B]
uccugcccgccaccugcugc

SEQ ID NO: 3904222 - RNA, 17 nt, Human adenovirus B [HAdV-B]
ucgaaaccguugauguu

SEQ ID NO: 3904223 - RNA, 17 nt, Human adenovirus B [HAdV-B]
ucgacuccguagccugg

SEQ ID NO: 3904224 - RNA, 22 nt, Human adenovirus B [HAdV-B]
ucgcaacugggcggcuuucaga

SEQ ID NO: 3904225 - RNA, 20 nt, Human adenovirus B [HAdV-B]
ucgcauaucccgcugucaac

SEQ ID NO: 3904226 - RNA, 22 nt, Human adenovirus B [HAdV-B]
ucgcauguauucauuuuucaga

SEQ ID NO: 3904227 - RNA, 19 nt, Human adenovirus B [HAdV-B]
ucgccacgagugccaucac

SEQ ID NO: 3904228 - RNA, 15 nt, Human adenovirus B [HAdV-B]
ucgcgauccuuccag

SEQ ID NO: 3904229 - RNA, 15 nt, Human adenovirus B [HAdV-B]
ucggcugcggagaca

SEQ ID NO: 3904230 - RNA, 18 nt, Human adenovirus B [HAdV-B]
ucggcuuacgagcagaca

SEQ ID NO: 3904231 - RNA, 21 nt, Human adenovirus B [HAdV-B]
ucguacgagagcgugaugcag

SEQ ID NO: 3904232 - RNA, 16 nt, Human adenovirus B [HAdV-B]
ucguucaucauuuccc

SEQ ID NO: 3904233 - RNA, 13 nt, Human adenovirus B [HAdV-B]
ucuacauuccaga

SEQ ID NO: 3904234 - RNA, 12 nt, Human adenovirus B [HAdV-B]
ucuaccuugacc

SEQ ID NO: 3904235 - RNA, 16 nt, Human adenovirus B [HAdV-B]
ucuagcaagacagucg

SEQ ID NO: 3904236 - RNA, 20 nt, Human adenovirus B [HAdV-B]
ucuccaaccucuccacaaua

SEQ ID NO: 3904237 - RNA, 14 nt, Human adenovirus B [HAdV-B]
ucuccuccuaguga

SEQ ID NO: 3904238 - RNA, 17 nt, Human adenovirus B [HAdV-B]
ucugcaaucaugcccac

SEQ ID NO: 3904239 - RNA, 18 nt, Human adenovirus B [HAdV-B]
ucuggcacgauucucacu

SEQ ID NO: 3904240 - RNA, 13 nt, Human adenovirus B [HAdV-B]
ucuuaaagaguag

SEQ ID NO: 3904241 - RNA, 18 nt, Human adenovirus B [HAdV-B]
ucuuaaguuggucaaaag

SEQ ID NO: 3904242 - RNA, 20 nt, Human adenovirus B [HAdV-B]
ucuucaaccgcuuuccugag

SEQ ID NO: 3904243 - RNA, 14 nt, Human adenovirus B [HAdV-B]
ucuuccagaaaaca

SEQ ID NO: 3904244 - RNA, 13 nt, Human adenovirus B [HAdV-B]
ucuucccagagcg

SEQ ID NO: 3904245 - RNA, 12 nt, Human adenovirus B [HAdV-B]
ucuucuccuggg

SEQ ID NO: 3904246 - RNA, 21 nt, Human adenovirus B [HAdV-B]
ucuuuagcgaucuucucaaug

SEQ ID NO: 3904247 - RNA, 21 nt, Human adenovirus B [HAdV-B]
ucuuuugccauccuucucaac

SEQ ID NO: 3904248 - RNA, 18 nt, Human adenovirus B [HAdV-B]
ugaaaauaaacuuuguau

SEQ ID NO: 3904249 - RNA, 19 nt, Human adenovirus B [HAdV-B]
ugaaacgcuuucuagagag

SEQ ID NO: 3904250 - RNA, 17 nt, Human adenovirus B [HAdV-B]
ugaaacucacuauucaa

SEQ ID NO: 3904251 - RNA, 20 nt, Human adenovirus B [HAdV-B]
ugaaaguauggaagugcaaa

SEQ ID NO: 3904252 - RNA, 19 nt, Human adenovirus B [HAdV-B]
ugaaccacaacccccacua

SEQ ID NO: 3904253 - RNA, 16 nt, Human adenovirus B [HAdV-B]
ugaacuaucagaauga

SEQ ID NO: 3904254 - RNA, 16 nt, Human adenovirus B [HAdV-B]
ugaagaaaugcauauu

SEQ ID NO: 3904255 - RNA, 21 nt, Human adenovirus B [HAdV-B]
ugaauaauucuacaacuucac

SEQ ID NO: 3904256 - RNA, 21 nt, Human adenovirus B [HAdV-B]
ugacauucucguauuuuguau

SEQ ID NO: 3904257 - RNA, 21 nt, Human adenovirus B [HAdV-B]
ugacgaaaaugccggccaauu

SEQ ID NO: 3904258 - RNA, 18 nt, Human adenovirus B [HAdV-B]
ugacucuccaaccucucc

SEQ ID NO: 3904259 - RNA, 16 nt, Human adenovirus B [HAdV-B]
ugacugaaacacucac

SEQ ID NO: 3904260 - RNA, 14 nt, Human adenovirus B [HAdV-B]
ugagcugcgucacg

SEQ ID NO: 3904261 - RNA, 17 nt, Human adenovirus B [HAdV-B]
ugagcugggaugggugc

SEQ ID NO: 3904262 - RNA, 15 nt, Human adenovirus B [HAdV-B]
ugaucaccugggcag

SEQ ID NO: 3904263 - RNA, 12 nt, Human adenovirus B [HAdV-B]
ugcaaacugaac

SEQ ID NO: 3904264 - RNA, 16 nt, Human adenovirus B [HAdV-B]
ugcaaagagcucugac

SEQ ID NO: 3904265 - RNA, 19 nt, Human adenovirus B [HAdV-B]
ugcaacaaaacaaaaccaa

SEQ ID NO: 3904266 - RNA, 21 nt, Human adenovirus B [HAdV-B]
ugcaaguccuuuuccuagucu

SEQ ID NO: 3904267 - RNA, 12 nt, Human adenovirus B [HAdV-B]
ugcagaaaucuu

SEQ ID NO: 3904268 - RNA, 21 nt, Human adenovirus B [HAdV-B]
ugcagcacuggacaugacagc

SEQ ID NO: 3904269 - RNA, 18 nt, Human adenovirus B [HAdV-B]
ugcagccgccgcccccag

SEQ ID NO: 3904270 - RNA, 21 nt, Human adenovirus B [HAdV-B]
ugcagccgccgcccccagaag

SEQ ID NO: 3904271 - RNA, 22 nt, Human adenovirus B [HAdV-B]
ugcagccgccgcccccagaaga

SEQ ID NO: 3904272 - RNA, 19 nt, Human adenovirus B [HAdV-B]
ugcagcuucgggcgccagc

SEQ ID NO: 3904273 - RNA, 17 nt, Human adenovirus B [HAdV-B]
ugcaggcagcagcuccu

SEQ ID NO: 3904274 - RNA, 13 nt, Human adenovirus B [HAdV-B]
ugcaugauggaua

SEQ ID NO: 3904275 - RNA, 20 nt, Human adenovirus B [HAdV-B]
ugccagcgguucuggaggag

SEQ ID NO: 3904276 - RNA, 22 nt, Human adenovirus B [HAdV-B]
ugccaggguucgguccuuccag

SEQ ID NO: 3904277 - RNA, 15 nt, Human adenovirus B [HAdV-B]
ugccaucgaucccac

SEQ ID NO: 3904278 - RNA, 15 nt, Human adenovirus B [HAdV-B]
ugccaugcgagccgc

SEQ ID NO: 3904279 - RNA, 18 nt, Human adenovirus B [HAdV-B]
ugcccacauccagaucuu

SEQ ID NO: 3904280 - RNA, 17 nt, Human adenovirus B [HAdV-B]
ugcccaggacuuuuuga

SEQ ID NO: 3904281 - RNA, 15 nt, Human adenovirus B [HAdV-B]
ugccgcugccuccuu

SEQ ID NO: 3904282 - RNA, 12 nt, Human adenovirus B [HAdV-B]
ugccuggagugu

SEQ ID NO: 3904283 - RNA, 21 nt, Human adenovirus B [HAdV-B]
ugccuuucucccaagcagaca

SEQ ID NO: 3904284 - RNA, 23 nt, Human adenovirus B [HAdV-B]
ugcgacaucuagaccacugccgc

SEQ ID NO: 3904285 - RNA, 13 nt, Human adenovirus B [HAdV-B]
ugcgggggcaaca

SEQ ID NO: 3904286 - RNA, 19 nt, Human adenovirus B [HAdV-B]
ugcucagugucuugugacu

SEQ ID NO: 3904287 - RNA, 18 nt, Human adenovirus B [HAdV-B]
ugcucuaccccauuccug

SEQ ID NO: 3904288 - RNA, 15 nt, Human adenovirus B [HAdV-B]
ugcugcgcacugccc

SEQ ID NO: 3904289 - RNA, 20 nt, Human adenovirus B [HAdV-B]
ugcuggagugucacugccgc

SEQ ID NO: 3904290 - RNA, 21 nt, Human adenovirus B [HAdV-B]
uggaaaucccaccccuagucu

SEQ ID NO: 3904291 - RNA, 12 nt, Human adenovirus B [HAdV-B]
uggaacucacca

SEQ ID NO: 3904292 - RNA, 20 nt, Human adenovirus B [HAdV-B]
uggaagacugauggcacaac

SEQ ID NO: 3904293 - RNA, 18 nt, Human adenovirus B [HAdV-B]
uggacucugacacuccug

SEQ ID NO: 3904294 - RNA, 15 nt, Human adenovirus B [HAdV-B]
uggacuuggaagagg

SEQ ID NO: 3904295 - RNA, 21 nt, Human adenovirus B [HAdV-B]
uggaggaagauugggacaguc

SEQ ID NO: 3904296 - RNA, 17 nt, Human adenovirus B [HAdV-B]
uggcaguuuggaagcca

SEQ ID NO: 3904297 - RNA, 16 nt, Human adenovirus B [HAdV-B]
uggcaugggaugggug

SEQ ID NO: 3904298 - RNA, 21 nt, Human adenovirus B [HAdV-B]
uggccgaugugucugaaggaa

SEQ ID NO: 3904299 - RNA, 12 nt, Human adenovirus B [HAdV-B]
uggcugcagcca

SEQ ID NO: 3904300 - RNA, 22 nt, Human adenovirus B [HAdV-B]
uggcuuccagcaaagccuccac

SEQ ID NO: 3904301 - RNA, 13 nt, Human adenovirus B [HAdV-B]
ugggccauuuugg

SEQ ID NO: 3904302 - RNA, 17 nt, Human adenovirus B [HAdV-B]
uggggccgugggcagcg

SEQ ID NO: 3904303 - RNA, 17 nt, Human adenovirus B [HAdV-B]
uggguagacagaaugga

SEQ ID NO: 3904304 - RNA, 18 nt, Human adenovirus B [HAdV-B]
uggucauuucuugcuugc

SEQ ID NO: 3904305 - RNA, 15 nt, Human adenovirus B [HAdV-B]
uguacguagcagcga

SEQ ID NO: 3904306 - RNA, 14 nt, Human adenovirus B [HAdV-B]
uguacucccagcag

SEQ ID NO: 3904307 - RNA, 20 nt, Human adenovirus B [HAdV-B]
uguagaugccuaugagaaca

SEQ ID NO: 3904308 - RNA, 21 nt, Human adenovirus B [HAdV-B]
uguauaggagcauuugcuucc

SEQ ID NO: 3904309 - RNA, 18 nt, Human adenovirus B [HAdV-B]
ugucacccucuucaacau

SEQ ID NO: 3904310 - RNA, 17 nt, Human adenovirus B [HAdV-B]
ugucacuccacagcuuu

SEQ ID NO: 3904311 - RNA, 20 nt, Human adenovirus B [HAdV-B]
ugucagcauugucacugccg

SEQ ID NO: 3904312 - RNA, 21 nt, Human adenovirus B [HAdV-B]
ugucauaauggaguugcuucc

SEQ ID NO: 3904313 - RNA, 20 nt, Human adenovirus B [HAdV-B]
ugucgguagaagaaccugac

SEQ ID NO: 3904314 - RNA, 16 nt, Human adenovirus B [HAdV-B]
ugugggagggguagcg

SEQ ID NO: 3904315 - RNA, 18 nt, Human adenovirus B [HAdV-B]
uguucccagaguuggaag

SEQ ID NO: 3904316 - RNA, 23 nt, Human adenovirus B [HAdV-B]
uguugcacaauaucuuuuagaag

SEQ ID NO: 3904317 - RNA, 22 nt, Human adenovirus B [HAdV-B]
uguuggauugccacagcuggca

SEQ ID NO: 3904318 - RNA, 14 nt, Human adenovirus B [HAdV-B]
uguuucugaugcaa

SEQ ID NO: 3904319 - RNA, 16 nt, Human adenovirus B [HAdV-B]
uguuuggucuuccuug

SEQ ID NO: 3904320 - RNA, 13 nt, Human adenovirus B [HAdV-B]
uuaagagggagag

SEQ ID NO: 3904321 - RNA, 12 nt, Human adenovirus B [HAdV-B]
uuacaaaaccau

SEQ ID NO: 3904322 - RNA, 13 nt, Human adenovirus B [HAdV-B]
uuacagaaaucuc

SEQ ID NO: 3904323 - RNA, 17 nt, Human adenovirus B [HAdV-B]
uuacuaccgucaccucc

SEQ ID NO: 3904324 - RNA, 14 nt, Human adenovirus B [HAdV-B]
uuagcuauuugcac

SEQ ID NO: 3904325 - RNA, 13 nt, Human adenovirus B [HAdV-B]
uuaggaccagugc

SEQ ID NO: 3904326 - RNA, 23 nt, Human adenovirus B [HAdV-B]
uuaugcuuaaucguaaguauagc

SEQ ID NO: 3904327 - RNA, 11 nt, Human adenovirus B [HAdV-B]
uuauuuacagu

SEQ ID NO: 3904328 - RNA, 19 nt, Human adenovirus B [HAdV-B]
uucagaagacaugcaugac

SEQ ID NO: 3904329 - RNA, 14 nt, Human adenovirus B [HAdV-B]
uucagcauuggcaa

SEQ ID NO: 3904330 - RNA, 18 nt, Human adenovirus B [HAdV-B]
uucuccggaucuccuggg

SEQ ID NO: 3904331 - RNA, 14 nt, Human adenovirus B [HAdV-B]
uucucgagcugcca

SEQ ID NO: 3904332 - RNA, 15 nt, Human adenovirus B [HAdV-B]
uucugaggaaaucau

SEQ ID NO: 3904333 - RNA, 11 nt, Human adenovirus B [HAdV-B]
uucuggggagu

SEQ ID NO: 3904334 - RNA, 16 nt, Human adenovirus B [HAdV-B]
uugacaagcucuuaca

SEQ ID NO: 3904335 - RNA, 16 nt, Human adenovirus B [HAdV-B]
uugacaugaacaugca

SEQ ID NO: 3904336 - RNA, 15 nt, Human adenovirus B [HAdV-B]
uugaguacucagccu

SEQ ID NO: 3904337 - RNA, 17 nt, Human adenovirus B [HAdV-B]
uugcaaggccccagcag

SEQ ID NO: 3904338 - RNA, 22 nt, Human adenovirus B [HAdV-B]
uugcccucauaaucauugcagc

SEQ ID NO: 3904339 - RNA, 19 nt, Human adenovirus B [HAdV-B]
uugcuggagugucacugcc

SEQ ID NO: 3904340 - RNA, 13 nt, Human adenovirus B [HAdV-B]
uugggccauuuug

SEQ ID NO: 3904341 - RNA, 17 nt, Human adenovirus B [HAdV-B]
uuuccaucacaagacaa

SEQ ID NO: 3904342 - RNA, 22 nt, Human adenovirus B [HAdV-B]
uuucuuaccuuuggucuccaug

SEQ ID NO: 3904343 - RNA, 17 nt, Human adenovirus B [HAdV-B]
uuucuuuucccacaguu

SEQ ID NO: 3904344 - RNA, 16 nt, Human adenovirus B [HAdV-B]
uuugaaaaauguugaa

SEQ ID NO: 3904345 - RNA, 17 nt, Human adenovirus B [HAdV-B]
uuugacaugaacaugca

SEQ ID NO: 3904346 - RNA, 21 nt, Human adenovirus B [HAdV-B]
uuugagaaauugguauuugaa

SEQ ID NO: 3904347 - RNA, 19 nt, Human adenovirus B [HAdV-B]
uuugaggccugauaaacag

SEQ ID NO: 3904348 - RNA, 18 nt, Human adenovirus B [HAdV-B]
uuugccauccuucucaac

SEQ ID NO: 3904349 - RNA, 19 nt, Human adenovirus B [HAdV-B]
uuugcugugccagaaguac

SEQ ID NO: 3904350 - RNA, 20 nt, Human adenovirus B [HAdV-B]
uuuuaauagcccuuaacauc

SEQ ID NO: 3904351 - RNA, 14 nt, Human adenovirus B [HAdV-B]
agacauaaaugcau

SEQ ID NO: 3904352 - RNA, 18 nt, Human adenovirus B [HAdV-B]
agacaugcaugacccaga

SEQ ID NO: 3904353 - RNA, 13 nt, Human adenovirus B [HAdV-B]
agacgagccuggg

SEQ ID NO: 3904354 - RNA, 13 nt, Human adenovirus B [HAdV-B]
agacgcuggugac

SEQ ID NO: 3904355 - RNA, 12 nt, Human adenovirus B [HAdV-B]
agagcucagccg

SEQ ID NO: 3904356 - RNA, 23 nt, Human adenovirus B [HAdV-B]
agagucguuugagcaaccuucuu

SEQ ID NO: 3904357 - RNA, 22 nt, Human adenovirus B [HAdV-B]
agauaauuacuugaaagugggu

SEQ ID NO: 3904358 - RNA, 13 nt, Human adenovirus B [HAdV-B]
agauacaugggca

SEQ ID NO: 3904359 - RNA, 15 nt, Human adenovirus B [HAdV-B]
agauaguuguuaauu

SEQ ID NO: 3904360 - RNA, 15 nt, Human adenovirus B [HAdV-B]
agaugccuuucauga

SEQ ID NO: 3904361 - RNA, 22 nt, Human adenovirus B [HAdV-B]
agauuacagccaacgagccagc

SEQ ID NO: 3904362 - RNA, 15 nt, Human adenovirus B [HAdV-B]
agauucccacugaaa

SEQ ID NO: 3904363 - RNA, 18 nt, Human adenovirus B [HAdV-B]
agcagcagaggaaaaaag

SEQ ID NO: 3904364 - RNA, 13 nt, Human adenovirus B [HAdV-B]
agcagcagcaggc

SEQ ID NO: 3904365 - RNA, 21 nt, Human adenovirus B [HAdV-B]
agcagcuaacccgauggcugg

SEQ ID NO: 3904366 - RNA, 17 nt, Human adenovirus B [HAdV-B]
agccacagcaaccccag

SEQ ID NO: 3904367 - RNA, 15 nt, Human adenovirus B [HAdV-B]
agccccaauggccac

SEQ ID NO: 3904368 - RNA, 14 nt, Human adenovirus B [HAdV-B]
agccggccuggacc

SEQ ID NO: 3904369 - RNA, 20 nt, Human adenovirus B [HAdV-B]
agccguagacgccagcgcca

SEQ ID NO: 3904370 - RNA, 17 nt, Human adenovirus B [HAdV-B]
agccguuaaccccacag

SEQ ID NO: 3904371 - RNA, 15 nt, Human adenovirus B [HAdV-B]
agcgccggcaggucc

SEQ ID NO: 3904372 - RNA, 13 nt, Human adenovirus B [HAdV-B]
agcggugguguau

SEQ ID NO: 3904373 - RNA, 16 nt, Human adenovirus B [HAdV-B]
agcuagaucaaaagaa

SEQ ID NO: 3904374 - RNA, 20 nt, Human adenovirus B [HAdV-B]
agcucaacgacuacaccgcu

SEQ ID NO: 3904375 - RNA, 20 nt, Human adenovirus B [HAdV-B]
agcucuuacagaaaucucuu

SEQ ID NO: 3904376 - RNA, 13 nt, Human adenovirus B [HAdV-B]
agcugggaugggu

SEQ ID NO: 3904377 - RNA, 15 nt, Human adenovirus B [HAdV-B]
agcuguguacuccca

SEQ ID NO: 3904378 - RNA, 20 nt, Human adenovirus B [HAdV-B]
agcuguguacucccagcagc

SEQ ID NO: 3904379 - RNA, 15 nt, Human adenovirus B [HAdV-B]
agcuuaagcauucca

SEQ ID NO: 3904380 - RNA, 19 nt, Human adenovirus B [HAdV-B]
aggacaaaaaagaagagga

SEQ ID NO: 3904381 - RNA, 18 nt, Human adenovirus B [HAdV-B]
aggacagucuggaggaag

SEQ ID NO: 3904382 - RNA, 14 nt, Human adenovirus B [HAdV-B]
aggaguaucuaaac

SEQ ID NO: 3904383 - RNA, 21 nt, Human adenovirus B [HAdV-B]
aggauccuuagauaugugcag

SEQ ID NO: 3904384 - RNA, 16 nt, Human adenovirus B [HAdV-B]
aggaugaaaaaaaacc

SEQ ID NO: 3904385 - RNA, 12 nt, Human adenovirus B [HAdV-B]
aggauuugcaug

SEQ ID NO: 3904386 - RNA, 15 nt, Human adenovirus B [HAdV-B]
aggcacuucagcuug

SEQ ID NO: 3904387 - RNA, 21 nt, Human adenovirus B [HAdV-B]
aggcagagaaacaacagacau

SEQ ID NO: 3904388 - RNA, 20 nt, Human adenovirus B [HAdV-B]
aggcagaguuucuuguaaaa

SEQ ID NO: 3904389 - RNA, 16 nt, Human adenovirus B [HAdV-B]
agggugagaauuacuu

SEQ ID NO: 3904390 - RNA, 17 nt, Human adenovirus B [HAdV-B]
aggguugcauucacugc

SEQ ID NO: 3904391 - RNA, 17 nt, Human adenovirus B [HAdV-B]
aggucgacgcaucucau

SEQ ID NO: 3904392 - RNA, 15 nt, Human adenovirus B [HAdV-B]
agguggacgagcaga

SEQ ID NO: 3904393 - RNA, 18 nt, Human adenovirus B [HAdV-B]
aguaaauggaacaaguga

SEQ ID NO: 3904394 - RNA, 15 nt, Human adenovirus B [HAdV-B]
agucugcaaaaauaa

SEQ ID NO: 3904395 - RNA, 13 nt, Human adenovirus B [HAdV-B]
agugaugagcagc

SEQ ID NO: 3904396 - RNA, 14 nt, Human adenovirus B [HAdV-B]
agugcaaacugaac

SEQ ID NO: 3904397 - RNA, 14 nt, Human adenovirus B [HAdV-B]
agugcaauguaaua

SEQ ID NO: 3904398 - RNA, 17 nt, Human adenovirus B [HAdV-B]
agugccaucacaucucg

SEQ ID NO: 3904399 - RNA, 11 nt, Human adenovirus B [HAdV-B]
agugucacugc

SEQ ID NO: 3904400 - RNA, 20 nt, Human adenovirus B [HAdV-B]
aguuauuagaugcugcauga

SEQ ID NO: 3904401 - RNA, 21 nt, Human adenovirus B [HAdV-B]
aguugaaaaccacgaaaaugc

SEQ ID NO: 3904402 - RNA, 21 nt, Human adenovirus B [HAdV-B]
aguuucauccuaaaaaacaag

SEQ ID NO: 3904403 - RNA, 11 nt, Human adenovirus B [HAdV-B]
auaaaagaaaa

SEQ ID NO: 3904404 - RNA, 15 nt, Human adenovirus B [HAdV-B]
auacaauccagacau

SEQ ID NO: 3904405 - RNA, 15 nt, Human adenovirus B [HAdV-B]
auaccuguguagaug

SEQ ID NO: 3904406 - RNA, 23 nt, Human adenovirus B [HAdV-B]
auacugggugcgugacgcugcca

SEQ ID NO: 3904407 - RNA, 23 nt, Human adenovirus B [HAdV-B]
auagcaauggggccgugggcagc

SEQ ID NO: 3904408 - RNA, 16 nt, Human adenovirus B [HAdV-B]
auagcuuccuuggaag

SEQ ID NO: 3904409 - RNA, 17 nt, Human adenovirus B [HAdV-B]
auaguaacuugcaacau

SEQ ID NO: 3904410 - RNA, 23 nt, Human adenovirus B [HAdV-B]
auagugcaggagcggagccuggg

SEQ ID NO: 3904411 - RNA, 12 nt, Human adenovirus B [HAdV-B]
auauaauuauuu

SEQ ID NO: 3904412 - RNA, 21 nt, Human adenovirus B [HAdV-B]
auauuaucaccaaacugcuua

SEQ ID NO: 3904413 - RNA, 20 nt, Human adenovirus B [HAdV-B]
auauucacuggaacagguga

SEQ ID NO: 3904414 - RNA, 18 nt, Human adenovirus B [HAdV-B]
aucaaaaaauuccagucu

SEQ ID NO: 3904415 - RNA, 12 nt, Human adenovirus B [HAdV-B]
aucaaaagaaau

SEQ ID NO: 3904416 - RNA, 21 nt, Human adenovirus B [HAdV-B]
aucaagcggguuaaaaaggac

SEQ ID NO: 3904417 - RNA, 16 nt, Human adenovirus B [HAdV-B]
aucaccugggcagcua

SEQ ID NO: 3904418 - RNA, 21 nt, Human adenovirus B [HAdV-B]
aucauucccugcagaaaucuu

SEQ ID NO: 3904419 - RNA, 16 nt, Human adenovirus B [HAdV-B]
auccagaucuucagca

SEQ ID NO: 3904420 - RNA, 20 nt, Human adenovirus B [HAdV-B]
auccagcuuuugcugugcca

SEQ ID NO: 3904421 - RNA, 15 nt, Human adenovirus B [HAdV-B]
auccauggaugccca

SEQ ID NO: 3904422 - RNA, 21 nt, Human adenovirus B [HAdV-B]
aucccgugcugcgacagaugc

SEQ ID NO: 3904423 - RNA, 23 nt, Human adenovirus B [HAdV-B]
augaaaacugcccaaaacaacga

SEQ ID NO: 3904424 - RNA, 18 nt, Human adenovirus B [HAdV-B]
augaacgaucgcgguggg

SEQ ID NO: 3904425 - RNA, 21 nt, Human adenovirus B [HAdV-B]
augaaggcgaggaggaagagg

SEQ ID NO: 3904426 - RNA, 20 nt, Human adenovirus B [HAdV-B]
augacugaaacacucaccac

SEQ ID NO: 3904427 - RNA, 18 nt, Human adenovirus B [HAdV-B]
augaggaccaaucacagc

SEQ ID NO: 3904428 - RNA, 13 nt, Human adenovirus B [HAdV-B]
augaggcuuucag

SEQ ID NO: 3904429 - RNA, 21 nt, Human adenovirus B [HAdV-B]
augcaaacacaugucacccuc

SEQ ID NO: 3904430 - RNA, 22 nt, Human adenovirus B [HAdV-B]
augccaucauagauaauuacuu

SEQ ID NO: 3904431 - RNA, 22 nt, Human adenovirus B [HAdV-B]
augcguguuggauugccacagc

SEQ ID NO: 3904432 - RNA, 16 nt, Human adenovirus B [HAdV-B]
auggaagugcaaacug

SEQ ID NO: 3904433 - RNA, 22 nt, Human adenovirus B [HAdV-B]
auggaauagaaaguuuggugga

SEQ ID NO: 3904434 - RNA, 13 nt, Human adenovirus B [HAdV-B]
auggacaggaguc

SEQ ID NO: 3904435 - RNA, 13 nt, Human adenovirus B [HAdV-B]
auggagucacugc

SEQ ID NO: 3904436 - RNA, 12 nt, Human adenovirus B [HAdV-B]
auggcugggcac

SEQ ID NO: 3904437 - RNA, 16 nt, Human adenovirus B [HAdV-B]
auggcuuaccagacaa

SEQ ID NO: 3904438 - RNA, 21 nt, Human adenovirus B [HAdV-B]
augguacccaaacgccagaag

SEQ ID NO: 3904439 - RNA, 13 nt, Human adenovirus B [HAdV-B]
auggugggucuuu

SEQ ID NO: 3904440 - RNA, 21 nt, Human adenovirus B [HAdV-B]
augguuguagcuuuuuugguu

SEQ ID NO: 3904441 - RNA, 17 nt, Human adenovirus B [HAdV-B]
augucaccugcggagca

SEQ ID NO: 3904442 - RNA, 23 nt, Human adenovirus B [HAdV-B]
augugagcggagacggcuugcug

SEQ ID NO: 3904443 - RNA, 14 nt, Human adenovirus B [HAdV-B]
auuacaaagacuuc

SEQ ID NO: 3904444 - RNA, 13 nt, Human adenovirus B [HAdV-B]
auuacaacugacg

SEQ ID NO: 3904445 - RNA, 19 nt, Human adenovirus B [HAdV-B]
auuaguuuaaaagagguuc

SEQ ID NO: 3904446 - RNA, 18 nt, Human adenovirus B [HAdV-B]
auuauacuccuacugcgc

SEQ ID NO: 3904447 - RNA, 12 nt, Human adenovirus B [HAdV-B]
auucacugcucc

SEQ ID NO: 3904448 - RNA, 13 nt, Human adenovirus B [HAdV-B]
auucccggaagua

SEQ ID NO: 3904449 - RNA, 20 nt, Human adenovirus B [HAdV-B]
auugcaaggccccagcagcc

SEQ ID NO: 3904450 - RNA, 16 nt, Human adenovirus B [HAdV-B]
auugccacagcuggca

SEQ ID NO: 3904451 - RNA, 22 nt, Human adenovirus B [HAdV-B]
auuguguucuccuaggcagaga

SEQ ID NO: 3904452 - RNA, 24 nt, Human adenovirus B [HAdV-B]
auuucuaucgaaggcaaaauagac

SEQ ID NO: 3904453 - RNA, 23 nt, Human adenovirus B [HAdV-B]
auuugccauucucgagcugccag

SEQ ID NO: 3904454 - RNA, 19 nt, Human adenovirus B [HAdV-B]
auuuggcuaaccaggcugu

SEQ ID NO: 3904455 - RNA, 22 nt, Human adenovirus B [HAdV-B]
auuuuggagagaguuugcugca

SEQ ID NO: 3904456 - RNA, 15 nt, Human adenovirus B [HAdV-B]
caaaacaacgagcag

SEQ ID NO: 3904457 - RNA, 20 nt, Human adenovirus B [HAdV-B]
caaaacgcggcccuggcaga

SEQ ID NO: 3904458 - RNA, 21 nt, Human adenovirus B [HAdV-B]
caaacggcaccugcgagccaa

SEQ ID NO: 3904459 - RNA, 17 nt, Human adenovirus B [HAdV-B]
caaacugcuuagccaga

SEQ ID NO: 3904460 - RNA, 16 nt, Human adenovirus B [HAdV-B]
caaagccuacugccac

SEQ ID NO: 3904461 - RNA, 22 nt, Human adenovirus B [HAdV-B]
caaagcuauucguccagaugag

SEQ ID NO: 3904462 - RNA, 15 nt, Human adenovirus B [HAdV-B]
caaaggugucucuga

SEQ ID NO: 3904463 - RNA, 22 nt, Human adenovirus B [HAdV-B]
caaaguaaaaggcacaggagaa

SEQ ID NO: 3904464 - RNA, 20 nt, Human adenovirus B [HAdV-B]
caacccggauuuuacaacca

SEQ ID NO: 3904465 - RNA, 21 nt, Human adenovirus B [HAdV-B]
caaccuggguucgcugguggc

SEQ ID NO: 3904466 - RNA, 14 nt, Human adenovirus B [HAdV-B]
caacucugacuucu

SEQ ID NO: 3904467 - RNA, 14 nt, Human adenovirus B [HAdV-B]
caacuucacauaca

SEQ ID NO: 3904468 - RNA, 22 nt, Human adenovirus B [HAdV-B]
caagagcucugcuacgaagagc

SEQ ID NO: 3904469 - RNA, 14 nt, Human adenovirus B [HAdV-B]
caagaugaggacaa

SEQ ID NO: 3904470 - RNA, 16 nt, Human adenovirus B [HAdV-B]
caagcagacaccaggg

SEQ ID NO: 3904471 - RNA, 17 nt, Human adenovirus B [HAdV-B]
caagcucuuacagaaau

SEQ ID NO: 3904472 - RNA, 18 nt, Human adenovirus B [HAdV-B]
caagcuguguacucccag

SEQ ID NO: 3904473 - RNA, 21 nt, Human adenovirus B [HAdV-B]
caaguuugcuccggaagauua

SEQ ID NO: 3904474 - RNA, 16 nt, Human adenovirus B [HAdV-B]
caaucaucauauuaca

SEQ ID NO: 3904475 - RNA, 23 nt, Human adenovirus B [HAdV-B]
cacaacaccgcuuccacccuuga

SEQ ID NO: 3904476 - RNA, 13 nt, Human adenovirus B [HAdV-B]
cacaacccccacu

SEQ ID NO: 3904477 - RNA, 15 nt, Human adenovirus B [HAdV-B]
cacaacgcacagccu

SEQ ID NO: 3904478 - RNA, 23 nt, Human adenovirus B [HAdV-B]
cacaagguucccucaggaugucc

SEQ ID NO: 3904479 - RNA, 19 nt, Human adenovirus B [HAdV-B]
cacacccgacgaaaaaaac

SEQ ID NO: 3904480 - RNA, 18 nt, Human adenovirus B [HAdV-B]
cacacuucugccccagcg

SEQ ID NO: 3904481 - RNA, 22 nt, Human adenovirus B [HAdV-B]
cacagcuagugaucgcacugcu

SEQ ID NO: 3904482 - RNA, 19 nt, Human adenovirus B [HAdV-B]
cacauacaacaauuuccac

SEQ ID NO: 3904483 - RNA, 17 nt, Human adenovirus B [HAdV-B]
cacauccagaucuucag

SEQ ID NO: 3904484 - RNA, 17 nt, Human adenovirus B [HAdV-B]
caccaagaugcuggaaa

SEQ ID NO: 3904485 - RNA, 22 nt, Human adenovirus B [HAdV-B]
caccaaggccauggcgacgagc

SEQ ID NO: 3904486 - RNA, 15 nt, Human adenovirus B [HAdV-B]
caccauaauuucauu

SEQ ID NO: 3904487 - RNA, 15 nt, Human adenovirus B [HAdV-B]
caccccgcacaacua

SEQ ID NO: 3904488 - RNA, 17 nt, Human adenovirus B [HAdV-B]
caccucuuucugaucau

SEQ ID NO: 3904489 - RNA, 22 nt, Human adenovirus B [HAdV-B]
cacucuuccagaaaacaaaaac

SEQ ID NO: 3904490 - RNA, 23 nt, Human adenovirus B [HAdV-B]
cacugaaaguauggaagugcaaa

SEQ ID NO: 3904491 - RNA, 17 nt, Human adenovirus B [HAdV-B]
cacugccaacaccgcuc

SEQ ID NO: 3904492 - RNA, 18 nt, Human adenovirus B [HAdV-B]
cacugguggccaccucgc

SEQ ID NO: 3904493 - RNA, 18 nt, Human adenovirus B [HAdV-B]
cagaaguaccucagagcg

SEQ ID NO: 3904494 - RNA, 20 nt, Human adenovirus B [HAdV-B]
cagaauaaaaaagcgaaaga

SEQ ID NO: 3904495 - RNA, 14 nt, Human adenovirus B [HAdV-B]
cagacaugaugaag

SEQ ID NO: 3904496 - RNA, 20 nt, Human adenovirus B [HAdV-B]
cagacgguaaaucugagcca

SEQ ID NO: 3904497 - RNA, 21 nt, Human adenovirus B [HAdV-B]
cagagcgugggauuguuucug

SEQ ID NO: 3904498 - RNA, 12 nt, Human adenovirus B [HAdV-B]
cagagcugccgc

SEQ ID NO: 3904499 - RNA, 21 nt, Human adenovirus B [HAdV-B]
cagaggagguggaagaaguaa

SEQ ID NO: 3904500 - RNA, 22 nt, Human adenovirus B [HAdV-B]
cagaguaucauagugcaggagc

SEQ ID NO: 3904501 - RNA, 15 nt, Human adenovirus B [HAdV-B]
cagcaccucacuucc

SEQ ID NO: 3904502 - RNA, 13 nt, Human adenovirus B [HAdV-B]
cagcacugaaaca

SEQ ID NO: 3904503 - RNA, 21 nt, Human adenovirus B [HAdV-B]
cagcacugaaacaccaucagc

SEQ ID NO: 3904504 - RNA, 22 nt, Human adenovirus B [HAdV-B]
cagccagaaccucagcugggag

SEQ ID NO: 3904505 - RNA, 21 nt, Human adenovirus B [HAdV-B]
cagccccccucgcagcagcag

SEQ ID NO: 3904506 - RNA, 17 nt, Human adenovirus B [HAdV-B]
cagccgaaacaguaccu

SEQ ID NO: 3904507 - RNA, 15 nt, Human adenovirus B [HAdV-B]
cagcgacggaugucu

SEQ ID NO: 3904508 - RNA, 22 nt, Human adenovirus B [HAdV-B]
cagcgcgaaauauggagcccag

SEQ ID NO: 3904509 - RNA, 16 nt, Human adenovirus B [HAdV-B]
cagcgcugccaggguu

SEQ ID NO: 3904510 - RNA, 15 nt, Human adenovirus B [HAdV-B]
cagcugcugcagaag

SEQ ID NO: 3904511 - RNA, 20 nt, Human adenovirus B [HAdV-B]
cagcuuuugcugugccagaa

SEQ ID NO: 3904512 - RNA, 18 nt, Human adenovirus B [HAdV-B]
caggaaagucccgcuccc

SEQ ID NO: 3904513 - RNA, 15 nt, Human adenovirus B [HAdV-B]
caggcugugcagaaa

SEQ ID NO: 3904514 - RNA, 20 nt, Human adenovirus B [HAdV-B]
cagggggcaauucuggccca

SEQ ID NO: 3904515 - RNA, 17 nt, Human adenovirus B [HAdV-B]
cagguagaacugcugcu

SEQ ID NO: 3904516 - RNA, 18 nt, Human adenovirus B [HAdV-B]
caggucccgcaggcaagc

SEQ ID NO: 3904517 - RNA, 19 nt, Human adenovirus B [HAdV-B]
cagguuaucgcaccugaag

SEQ ID NO: 3904518 - RNA, 15 nt, Human adenovirus B [HAdV-B]
caguagccacagcaa

SEQ ID NO: 3904519 - RNA, 12 nt, Human adenovirus B [HAdV-B]
cagucaggcaga

SEQ ID NO: 3904520 - RNA, 24 nt, Human adenovirus B [HAdV-B]
cagucuuuccaucacaagacaagc

SEQ ID NO: 3904521 - RNA, 19 nt, Human adenovirus B [HAdV-B]
cagugucgcuaacaauaca

SEQ ID NO: 3904522 - RNA, 14 nt, Human adenovirus B [HAdV-B]
caguguggaagagc

SEQ ID NO: 3904523 - RNA, 15 nt, Human adenovirus B [HAdV-B]
caguuuggaagccac

SEQ ID NO: 3904524 - RNA, 14 nt, Human adenovirus B [HAdV-B]
cauaagauucuuga

SEQ ID NO: 3904525 - RNA, 16 nt, Human adenovirus B [HAdV-B]
cauagauaauuacuug

SEQ ID NO: 3904526 - RNA, 18 nt, Human adenovirus B [HAdV-B]
cauaucauaguagccuga

SEQ ID NO: 3904527 - RNA, 17 nt, Human adenovirus B [HAdV-B]
cauauuucaaagaugua

SEQ ID NO: 3904528 - RNA, 18 nt, Human adenovirus B [HAdV-B]
caucccucaaaacuccac

SEQ ID NO: 3904529 - RNA, 16 nt, Human adenovirus B [HAdV-B]
cauccuaaaaaacaag

SEQ ID NO: 3904530 - RNA, 18 nt, Human adenovirus B [HAdV-B]
caucgccggacaggaugc

SEQ ID NO: 3904531 - RNA, 20 nt, Human adenovirus B [HAdV-B]
caucuagugguacugaugcu

SEQ ID NO: 3904532 - RNA, 12 nt, Human adenovirus B [HAdV-B]
caugaacuccag

SEQ ID NO: 3904533 - RNA, 15 nt, Human adenovirus B [HAdV-B]
caugacagacagagg

SEQ ID NO: 3904534 - RNA, 16 nt, Human adenovirus B [HAdV-B]
cauggaaacucagcca

SEQ ID NO: 3904535 - RNA, 16 nt, Human adenovirus B [HAdV-B]
cauucaauucaaacaa

SEQ ID NO: 3904536 - RNA, 17 nt, Human adenovirus B [HAdV-B]
cauuccugcaccauucc

SEQ ID NO: 3904537 - RNA, 14 nt, Human adenovirus B [HAdV-B]
cauugcagccauga

SEQ ID NO: 3904538 - RNA, 14 nt, Human adenovirus B [HAdV-B]
cauuuccauuccuu

SEQ ID NO: 3904539 - RNA, 19 nt, Human adenovirus B [HAdV-B]
cauuuggucagaaaacaca

SEQ ID NO: 3904540 - RNA, 21 nt, Human adenovirus B [HAdV-B]
ccaaaauaucgcggcacuucu

SEQ ID NO: 3904541 - RNA, 20 nt, Human adenovirus B [HAdV-B]
ccaacaccgcucccccagcc

SEQ ID NO: 3904542 - RNA, 16 nt, Human adenovirus B [HAdV-B]
ccaacgacgagaaaac

SEQ ID NO: 3904543 - RNA, 13 nt, Human adenovirus B [HAdV-B]
ccaacuaucucuc

SEQ ID NO: 3904544 - RNA, 17 nt, Human adenovirus B [HAdV-B]
ccaaggaugagacagug

SEQ ID NO: 3904545 - RNA, 15 nt, Human adenovirus B [HAdV-B]
ccacaacgcacagcc

SEQ ID NO: 3904546 - RNA, 16 nt, Human adenovirus B [HAdV-B]
ccacacgauccacacu

SEQ ID NO: 3904547 - RNA, 17 nt, Human adenovirus B [HAdV-B]
ccacagcaacuucuuga

SEQ ID NO: 3904548 - RNA, 18 nt, Human adenovirus B [HAdV-B]
ccacagcauuguggagaa

SEQ ID NO: 3904549 - RNA, 16 nt, Human adenovirus B [HAdV-B]
ccaccgagcuaccacu

SEQ ID NO: 3904550 - RNA, 16 nt, Human adenovirus B [HAdV-B]
ccaccugcugcgcacu

SEQ ID NO: 3904551 - RNA, 18 nt, Human adenovirus B [HAdV-B]
ccacgguagcauaugcaa

SEQ ID NO: 3904552 - RNA, 15 nt, Human adenovirus B [HAdV-B]
ccacugaagugcaaa

SEQ ID NO: 3904553 - RNA, 18 nt, Human adenovirus B [HAdV-B]
ccagaacuuccaacaaaa

SEQ ID NO: 3904554 - RNA, 19 nt, Human adenovirus B [HAdV-B]
ccagaagauauggaggaag

SEQ ID NO: 3904555 - RNA, 16 nt, Human adenovirus B [HAdV-B]
ccagacgugcagcuuc

SEQ ID NO: 3904556 - RNA, 19 nt, Human adenovirus B [HAdV-B]
ccagaucuucagcauuggc

SEQ ID NO: 3904557 - RNA, 12 nt, Human adenovirus B [HAdV-B]
ccagaugccuuu

SEQ ID NO: 3904558 - RNA, 21 nt, Human adenovirus B [HAdV-B]
ccagccuguacuucuccauca

SEQ ID NO: 3904559 - RNA, 18 nt, Human adenovirus B [HAdV-B]
ccagcgccaugacagaca

SEQ ID NO: 3904560 - RNA, 23 nt, Human adenovirus B [HAdV-B]
ccagcuguuucugguggugcaac

SEQ ID NO: 3904561 - RNA, 18 nt, Human adenovirus B [HAdV-B]
ccagcuuuugcugugcca

SEQ ID NO: 3904562 - RNA, 17 nt, Human adenovirus B [HAdV-B]
ccaggacuacuccaccc

SEQ ID NO: 3904563 - RNA, 14 nt, Human adenovirus B [HAdV-B]
ccaguccugccacc

SEQ ID NO: 3904564 - RNA, 16 nt, Human adenovirus B [HAdV-B]
ccaguguaacaugaau

SEQ ID NO: 3904565 - RNA, 15 nt, Human adenovirus B [HAdV-B]
ccaguugaaaaccac

SEQ ID NO: 3904566 - RNA, 21 nt, Human adenovirus B [HAdV-B]
ccauccgaguaucaucacuua

SEQ ID NO: 3904567 - RNA, 23 nt, Human adenovirus B [HAdV-B]
ccaucuauuauuccuacuccugg

SEQ ID NO: 3904568 - RNA, 16 nt, Human adenovirus B [HAdV-B]
ccaugcacucauccau

SEQ ID NO: 3904569 - RNA, 21 nt, Human adenovirus B [HAdV-B]
ccaugcuuagggcggccagac

SEQ ID NO: 3904570 - RNA, 20 nt, Human adenovirus B [HAdV-B]
ccauggaugagcccacccug

SEQ ID NO: 3904571 - RNA, 13 nt, Human adenovirus B [HAdV-B]
cccacccugcuuu

SEQ ID NO: 3904572 - RNA, 20 nt, Human adenovirus B [HAdV-B]
cccagagcgucucaggguua

SEQ ID NO: 3904573 - RNA, 18 nt, Human adenovirus B [HAdV-B]
cccagaugccugugauga

SEQ ID NO: 3904574 - RNA, 21 nt, Human adenovirus B [HAdV-B]
ccccacggcgacgcgugcaau

SEQ ID NO: 3904575 - RNA, 17 nt, Human adenovirus B [HAdV-B]
ccccucccccugcugcu

SEQ ID NO: 3904576 - RNA, 14 nt, Human adenovirus B [HAdV-B]
cccgcaggcaagca

SEQ ID NO: 3904577 - RNA, 12 nt, Human adenovirus B [HAdV-B]
cccgcaggcagu

SEQ ID NO: 3904578 - RNA, 14 nt, Human adenovirus B [HAdV-B]
cccgccgccagcaa

SEQ ID NO: 3904579 - RNA, 23 nt, Human adenovirus B [HAdV-B]
cccguaacuccgcgaacaggugu

SEQ ID NO: 3904580 - RNA, 18 nt, Human adenovirus B [HAdV-B]
cccuacggaagccagcac

SEQ ID NO: 3904581 - RNA, 17 nt, Human adenovirus B [HAdV-B]
cccucaaaaacacacua

SEQ ID NO: 3904582 - RNA, 21 nt, Human adenovirus B [HAdV-B]
cccugcaacuacugcaacugc

SEQ ID NO: 3904583 - RNA, 18 nt, Human adenovirus B [HAdV-B]
ccgaagagcaauaaauga

SEQ ID NO: 3904584 - RNA, 13 nt, Human adenovirus B [HAdV-B]
ccgacugcagaau

SEQ ID NO: 3904585 - RNA, 19 nt, Human adenovirus B [HAdV-B]
ccgagucgaggaacccggc

SEQ ID NO: 3904586 - RNA, 14 nt, Human adenovirus B [HAdV-B]
ccgcacuggcugcc

SEQ ID NO: 3904587 - RNA, 16 nt, Human adenovirus B [HAdV-B]
ccgcaggcaagcagcc

SEQ ID NO: 3904588 - RNA, 21 nt, Human adenovirus B [HAdV-B]
ccgcaggcaagcagccgcuuu

SEQ ID NO: 3904589 - RNA, 22 nt, Human adenovirus B [HAdV-B]
ccggccggagccgcggcuaacg

SEQ ID NO: 3904590 - RNA, 22 nt, Human adenovirus B [HAdV-B]
ccgggacuguggaccuccgccu

SEQ ID NO: 3904591 - RNA, 18 nt, Human adenovirus B [HAdV-B]
ccuacauggguauucugc

SEQ ID NO: 3904592 - RNA, 14 nt, Human adenovirus B [HAdV-B]
ccuaccaacacaac

SEQ ID NO: 3904593 - RNA, 17 nt, Human adenovirus B [HAdV-B]
ccuacggaagccagcac

SEQ ID NO: 3904594 - RNA, 18 nt, Human adenovirus B [HAdV-B]
ccuacggaagccagcacc

SEQ ID NO: 3904595 - RNA, 18 nt, Human adenovirus B [HAdV-B]
ccuaguguaccaggaaag

SEQ ID NO: 3904596 - RNA, 14 nt, Human adenovirus B [HAdV-B]
ccucaaaacuccac

SEQ ID NO: 3904597 - RNA, 14 nt, Human adenovirus B [HAdV-B]
ccuccaguggagga

SEQ ID NO: 3904598 - RNA, 15 nt, Human adenovirus B [HAdV-B]
ccucccaacaccccu

SEQ ID NO: 3904599 - RNA, 17 nt, Human adenovirus B [HAdV-B]
ccucccgacggugcugc

SEQ ID NO: 3904600 - RNA, 23 nt, Human adenovirus B [HAdV-B]
ccucgcggugaccagcaugaaua

SEQ ID NO: 3904601 - RNA, 20 nt, Human adenovirus B [HAdV-B]
ccucguuuacguacugguga

SEQ ID NO: 3904602 - RNA, 19 nt, Human adenovirus B [HAdV-B]
ccugcagaaaucuucccau

SEQ ID NO: 3904603 - RNA, 14 nt, Human adenovirus B [HAdV-B]
ccugccaaugcaac

SEQ ID NO: 3904604 - RNA, 19 nt, Human adenovirus B [HAdV-B]
ccugcgagccaaauccucg

SEQ ID NO: 3904605 - RNA, 15 nt, Human adenovirus B [HAdV-B]
ccuggcagaacacac

SEQ ID NO: 3904606 - RNA, 23 nt, Human adenovirus B [HAdV-B]
ccuggcagaccucaucuucccag

SEQ ID NO: 3904607 - RNA, 12 nt, Human adenovirus B [HAdV-B]
ccugggccuggc

SEQ ID NO: 3904608 - RNA, 20 nt, Human adenovirus B [HAdV-B]
ccuggggacagguuagugua

SEQ ID NO: 3904609 - RNA, 18 nt, Human adenovirus B [HAdV-B]
ccuucaauuggagcagua

SEQ ID NO: 3904610 - RNA, 16 nt, Human adenovirus B [HAdV-B]
ccuucuuacugcuuua

SEQ ID NO: 3904611 - RNA, 17 nt, Human adenovirus B [HAdV-B]
ccuugaagccaugcugc

SEQ ID NO: 3904612 - RNA, 21 nt, Human adenovirus B [HAdV-B]
ccuuggcuccgcgacacggca

SEQ ID NO: 3904613 - RNA, 22 nt, Human adenovirus B [HAdV-B]
ccuuguagugcuaggaauucuu

SEQ ID NO: 3904614 - RNA, 12 nt, Human adenovirus B [HAdV-B]
ccuuugcugucu

SEQ ID NO: 3904615 - RNA, 22 nt, Human adenovirus B [HAdV-B]
cgaagccguacaugggcaccug

SEQ ID NO: 3904616 - RNA, 18 nt, Human adenovirus B [HAdV-B]
cgaaggcgcauugccaga

SEQ ID NO: 3904617 - RNA, 14 nt, Human adenovirus B [HAdV-B]
cgacauguguugag

SEQ ID NO: 3904618 - RNA, 23 nt, Human adenovirus B [HAdV-B]
cgacgaggaaaaggagcagagcu

SEQ ID NO: 3904619 - RNA, 14 nt, Human adenovirus B [HAdV-B]
cgagacgcucuucu

SEQ ID NO: 3904620 - RNA, 18 nt, Human adenovirus B [HAdV-B]
cgagagccggccuggacc

SEQ ID NO: 3904621 - RNA, 14 nt, Human adenovirus B [HAdV-B]
cgagcugccagugc

SEQ ID NO: 3904622 - RNA, 15 nt, Human adenovirus B [HAdV-B]
cgaggaggcagagga

SEQ ID NO: 3904623 - RNA, 20 nt, Human adenovirus B [HAdV-B]
cgagucggugagcucuccgc

SEQ ID NO: 3904624 - RNA, 12 nt, Human adenovirus B [HAdV-B]
cgaucugagaaa

SEQ ID NO: 3904625 - RNA, 19 nt, Human adenovirus B [HAdV-B]
cgaugggucuucuccuggg

SEQ ID NO: 3904626 - RNA, 21 nt, Human adenovirus B [HAdV-B]
cgauguugugucccagcggcg

SEQ ID NO: 3904627 - RNA, 11 nt, Human adenovirus B [HAdV-B]
cgauuuggaag

SEQ ID NO: 3904628 - RNA, 15 nt, Human adenovirus B [HAdV-B]
cgcaagagcucugcu

SEQ ID NO: 3904629 - RNA, 23 nt, Human adenovirus B [HAdV-B]
cgcaggaggcgcaaacaguuuca

SEQ ID NO: 3904630 - RNA, 14 nt, Human adenovirus B [HAdV-B]
cgcagggcucugag

SEQ ID NO: 3904631 - RNA, 12 nt, Human adenovirus B [HAdV-B]
cgccagcagcag

SEQ ID NO: 3904632 - RNA, 15 nt, Human adenovirus B [HAdV-B]
cgcccaguccugcca

SEQ ID NO: 3904633 - RNA, 15 nt, Human adenovirus B [HAdV-B]
cgccgucacagcagc

SEQ ID NO: 3904634 - RNA, 14 nt, Human adenovirus B [HAdV-B]
cgcgaagaggcaau

SEQ ID NO: 3904635 - RNA, 17 nt, Human adenovirus B [HAdV-B]
cgcgaguuaagcgacag

SEQ ID NO: 3904636 - RNA, 20 nt, Human adenovirus B [HAdV-B]
cgcgcgguuagcgccagcag

SEQ ID NO: 3904637 - RNA, 23 nt, Human adenovirus B [HAdV-B]
cgcguggggcgaagagccaugcu

SEQ ID NO: 3904638 - RNA, 21 nt, Human adenovirus B [HAdV-B]
cgcuaacaauacaauuuccaa

SEQ ID NO: 3904639 - RNA, 14 nt, Human adenovirus B [HAdV-B]
cgcucgggauucuc

SEQ ID NO: 3904640 - RNA, 13 nt, Human adenovirus B [HAdV-B]
cgcuuccacccuu

SEQ ID NO: 3904641 - RNA, 12 nt, Human adenovirus B [HAdV-B]
cgcuugccuucu

SEQ ID NO: 3904642 - RNA, 23 nt, Human adenovirus B [HAdV-B]
cggaagccagcacccagaccauu

SEQ ID NO: 3904643 - RNA, 11 nt, Human adenovirus B [HAdV-B]
cggaggaggac

SEQ ID NO: 3904644 - RNA, 18 nt, Human adenovirus B [HAdV-B]
cggaucgcuguccaggaa

SEQ ID NO: 3904645 - RNA, 13 nt, Human adenovirus B [HAdV-B]
cggaucuccuggg

SEQ ID NO: 3904646 - RNA, 19 nt, Human adenovirus B [HAdV-B]
cggcgaggagccggaggag

SEQ ID NO: 3904647 - RNA, 23 nt, Human adenovirus B [HAdV-B]
cgggccccggagcauaguucccc

SEQ ID NO: 3904648 - RNA, 22 nt, Human adenovirus B [HAdV-B]
cgguacaccggauugcagcacu

SEQ ID NO: 3904649 - RNA, 14 nt, Human adenovirus B [HAdV-B]
cgguccuuccaggg

SEQ ID NO: 3904650 - RNA, 23 nt, Human adenovirus B [HAdV-B]
cguacgagagcgugaugcagcag

SEQ ID NO: 3904651 - RNA, 15 nt, Human adenovirus B [HAdV-B]
cgugacgcugccacc

SEQ ID NO: 3904652 - RNA, 21 nt, Human adenovirus B [HAdV-B]
cgugcagcuucgggcgccagc

SEQ ID NO: 3904653 - RNA, 16 nt, Human adenovirus B [HAdV-B]
cguuauccagccugua

SEQ ID NO: 3904654 - RNA, 13 nt, Human adenovirus B [HAdV-B]
cuaaauacacaua

SEQ ID NO: 3904655 - RNA, 14 nt, Human adenovirus B [HAdV-B]
cuaacgcuggagag

SEQ ID NO: 3904656 - RNA, 23 nt, Human adenovirus B [HAdV-B]
cuaauaauaauaugcaugcuuuu

SEQ ID NO: 3904657 - RNA, 15 nt, Human adenovirus B [HAdV-B]
cuacagagucucuga

SEQ ID NO: 3904658 - RNA, 16 nt, Human adenovirus B [HAdV-B]
cuacagagucucugac

SEQ ID NO: 3904659 - RNA, 15 nt, Human adenovirus B [HAdV-B]
cuacccuagaagaua

SEQ ID NO: 3904660 - RNA, 20 nt, Human adenovirus B [HAdV-B]
cuaccuguuccgucuggcca

SEQ ID NO: 3904661 - RNA, 15 nt, Human adenovirus B [HAdV-B]
cuacggaagccagca

SEQ ID NO: 3904662 - RNA, 18 nt, Human adenovirus B [HAdV-B]
cuacuauagccagcaaau

SEQ ID NO: 3904663 - RNA, 11 nt, Human adenovirus B [HAdV-B]
cuacuccuggu

SEQ ID NO: 3904664 - RNA, 12 nt, Human adenovirus B [HAdV-B]
cuacuccugguu

SEQ ID NO: 3904665 - RNA, 20 nt, Human adenovirus B [HAdV-B]
cuagagagagaggaugaaaa

SEQ ID NO: 3904666 - RNA, 11 nt, Human adenovirus B [HAdV-B]
cuagcuugcaa

SEQ ID NO: 3904667 - RNA, 22 nt, Human adenovirus B [HAdV-B]
cuagugaaaguuaacuggaugc

SEQ ID NO: 3904668 - RNA, 17 nt, Human adenovirus B [HAdV-B]
cuauaggcucaaacugc

SEQ ID NO: 3904669 - RNA, 18 nt, Human adenovirus B [HAdV-B]
cucaaacugcacacuaaa

SEQ ID NO: 3904670 - RNA, 13 nt, Human adenovirus B [HAdV-B]
cucacgcuugcca

SEQ ID NO: 3904671 - RNA, 18 nt, Human adenovirus B [HAdV-B]
cucacgcuugccagcacg

SEQ ID NO: 3904672 - RNA, 18 nt, Human adenovirus B [HAdV-B]
cucacuauucaaccugua

SEQ ID NO: 3904673 - RNA, 16 nt, Human adenovirus B [HAdV-B]
cucagccauugcuguc

SEQ ID NO: 3904674 - RNA, 18 nt, Human adenovirus B [HAdV-B]
cucauauuugucagcauu

SEQ ID NO: 3904675 - RNA, 16 nt, Human adenovirus B [HAdV-B]
cucauggacaaacagu

SEQ ID NO: 3904676 - RNA, 19 nt, Human adenovirus B [HAdV-B]
cuccaacagaaaaccagca

SEQ ID NO: 3904677 - RNA, 18 nt, Human adenovirus B [HAdV-B]
cuccaagauuuuccaugc

SEQ ID NO: 3904678 - RNA, 12 nt, Human adenovirus B [HAdV-B]
cuccauacuuua

SEQ ID NO: 3904679 - RNA, 12 nt, Human adenovirus B [HAdV-B]
cucccaagcaga

SEQ ID NO: 3904680 - RNA, 13 nt, Human adenovirus B [HAdV-B]
cucccagcagcac

SEQ ID NO: 3904681 - RNA, 18 nt, Human adenovirus B [HAdV-B]
cuccggaucuccugggca

SEQ ID NO: 3904682 - RNA, 19 nt, Human adenovirus B [HAdV-B]
cuccguagccuggaggaac

SEQ ID NO: 3904683 - RNA, 23 nt, Human adenovirus B [HAdV-B]
cuccguuccggagacagggagga

SEQ ID NO: 3904684 - RNA, 21 nt, Human adenovirus B [HAdV-B]
cuccuaaaggcgcuccaaaua

SEQ ID NO: 3904685 - RNA, 19 nt, Human adenovirus B [HAdV-B]
cuccucaauaugcucuuac

SEQ ID NO: 3904686 - RNA, 15 nt, Human adenovirus B [HAdV-B]
cuccucguccaaaug

SEQ ID NO: 3904687 - RNA, 22 nt, Human adenovirus B [HAdV-B]
cucgaaaacugguuagcugcac

SEQ ID NO: 3904688 - RNA, 15 nt, Human adenovirus B [HAdV-B]
cucgcagcagcagca

SEQ ID NO: 3904689 - RNA, 16 nt, Human adenovirus B [HAdV-B]
cucgcggugaccagca

SEQ ID NO: 3904690 - RNA, 20 nt, Human adenovirus B [HAdV-B]
cucgcgugccaggcacuucc

SEQ ID NO: 3904691 - RNA, 22 nt, Human adenovirus B [HAdV-B]
cucggacgauuggacccaggcc

SEQ ID NO: 3904692 - RNA, 20 nt, Human adenovirus B [HAdV-B]
cucggcugcggagacaagca

SEQ ID NO: 3904693 - RNA, 16 nt, Human adenovirus B [HAdV-B]
cucguucaucauuucc

SEQ ID NO: 3904694 - RNA, 13 nt, Human adenovirus B [HAdV-B]
cucucgaggacgc

SEQ ID NO: 3904695 - RNA, 14 nt, Human adenovirus B [HAdV-B]
cucugaacuucuug

SEQ ID NO: 3904696 - RNA, 16 nt, Human adenovirus B [HAdV-B]
cucugacuggagcugg

SEQ ID NO: 3904697 - RNA, 14 nt, Human adenovirus B [HAdV-B]
cucuuucuucuucg

SEQ ID NO: 3904698 - RNA, 19 nt, Human adenovirus B [HAdV-B]
cucuuucuucuucgcuguc

SEQ ID NO: 3904699 - RNA, 12 nt, Human adenovirus B [HAdV-B]
cugacaaauaaa

SEQ ID NO: 3904700 - RNA, 20 nt, Human adenovirus B [HAdV-B]
cugacacuccugguccugug

SEQ ID NO: 3904701 - RNA, 19 nt, Human adenovirus B [HAdV-B]
cugacgccagacgccgcac

SEQ ID NO: 3904702 - RNA, 20 nt, Human adenovirus B [HAdV-B]
cugacuuuaugagccagagc

SEQ ID NO: 3904703 - RNA, 18 nt, Human adenovirus B [HAdV-B]
cugagacagacaucgagc

SEQ ID NO: 3904704 - RNA, 21 nt, Human adenovirus B [HAdV-B]
cugagguuaaagugagaccca

SEQ ID NO: 3904705 - RNA, 14 nt, Human adenovirus B [HAdV-B]
cugauugccacaga

SEQ ID NO: 3904706 - RNA, 13 nt, Human adenovirus B [HAdV-B]
cugcaaaaauaaa

SEQ ID NO: 3904707 - RNA, 14 nt, Human adenovirus B [HAdV-B]
cugcaaucugugca

SEQ ID NO: 3904708 - RNA, 22 nt, Human adenovirus B [HAdV-B]
cugccaccaccucuacccuaga

SEQ ID NO: 3904709 - RNA, 16 nt, Human adenovirus B [HAdV-B]
cugccaccuccacuga

SEQ ID NO: 3904710 - RNA, 16 nt, Human adenovirus B [HAdV-B]
cugcccgccaccugcu

SEQ ID NO: 3904711 - RNA, 19 nt, Human adenovirus B [HAdV-B]
cugccguugcgcagcagua

SEQ ID NO: 3904712 - RNA, 17 nt, Human adenovirus B [HAdV-B]
cugccuccuugcagaua

SEQ ID NO: 3904713 - RNA, 18 nt, Human adenovirus B [HAdV-B]
cugcgcacugcccuccga

SEQ ID NO: 3904714 - RNA, 17 nt, Human adenovirus B [HAdV-B]
cugcguggccuuuggcg

SEQ ID NO: 3904715 - RNA, 19 nt, Human adenovirus B [HAdV-B]
cugcuacaaguugcgccuc

SEQ ID NO: 3904716 - RNA, 17 nt, Human adenovirus B [HAdV-B]
cugcuacagcugcugca

SEQ ID NO: 3904717 - RNA, 17 nt, Human adenovirus B [HAdV-B]
cuggagugucacugccg

SEQ ID NO: 3904718 - RNA, 18 nt, Human adenovirus B [HAdV-B]
cuggauguuuuauuuuga

SEQ ID NO: 3904719 - RNA, 17 nt, Human adenovirus B [HAdV-B]
cuggcagaccucaucuu

SEQ ID NO: 3904720 - RNA, 16 nt, Human adenovirus B [HAdV-B]
cuggccaucgugaacg

SEQ ID NO: 3904721 - RNA, 17 nt, Human adenovirus B [HAdV-B]
cugggaugcaaaugcaa

SEQ ID NO: 3904722 - RNA, 15 nt, Human adenovirus B [HAdV-B]
cugucgguagaagaa

SEQ ID NO: 3904723 - RNA, 19 nt, Human adenovirus B [HAdV-B]
cugugccagaaguacuggc

SEQ ID NO: 3904724 - RNA, 16 nt, Human adenovirus B [HAdV-B]
cuguuccgucuggcca

SEQ ID NO: 3904725 - RNA, 18 nt, Human adenovirus B [HAdV-B]
cuguucugacuuuggaaa

SEQ ID NO: 3904726 - RNA, 17 nt, Human adenovirus B [HAdV-B]
cuuaaacccgcacuggc

SEQ ID NO: 3904727 - RNA, 16 nt, Human adenovirus B [HAdV-B]
cuuaaccgaagagcaa

SEQ ID NO: 3904728 - RNA, 18 nt, Human adenovirus B [HAdV-B]
cuuaugcccgucuucuca

SEQ ID NO: 3904729 - RNA, 14 nt, Human adenovirus B [HAdV-B]
cuucaauuggagca

SEQ ID NO: 3904730 - RNA, 19 nt, Human adenovirus B [HAdV-B]
cuuccgaccuggcagaccu

SEQ ID NO: 3904731 - RNA, 18 nt, Human adenovirus B [HAdV-B]
cuucgacaugggagcuga

SEQ ID NO: 3904732 - RNA, 18 nt, Human adenovirus B [HAdV-B]
cuucgagggucugggcaa

SEQ ID NO: 3904733 - RNA, 19 nt, Human adenovirus B [HAdV-B]
cuucgcauaucccgcuguc

SEQ ID NO: 3904734 - RNA, 15 nt, Human adenovirus B [HAdV-B]
cuucgggggcagagg

SEQ ID NO: 3904735 - RNA, 23 nt, Human adenovirus B [HAdV-B]
cuugaaaguggguagacagaaug

SEQ ID NO: 3904736 - RNA, 17 nt, Human adenovirus B [HAdV-B]
cuugacaagcucuuaca

SEQ ID NO: 3904737 - RNA, 23 nt, Human adenovirus B [HAdV-B]
cuugcgcaaguuugcuccggaag

SEQ ID NO: 3904738 - RNA, 23 nt, Human adenovirus B [HAdV-B]
cuuuaaaauguuuaaccccacua

SEQ ID NO: 3904739 - RNA, 18 nt, Human adenovirus B [HAdV-B]
cuuucagacuagcagaca

SEQ ID NO: 3904740 - RNA, 16 nt, Human adenovirus B [HAdV-B]
cuuucuccauacuuua

SEQ ID NO: 3904741 - RNA, 18 nt, Human adenovirus B [HAdV-B]
cuuucucccaagcagaca

SEQ ID NO: 3904742 - RNA, 16 nt, Human adenovirus B [HAdV-B]
cuuucucuagcagcag

SEQ ID NO: 3904743 - RNA, 23 nt, Human adenovirus B [HAdV-B]
cuuuuccaaaguaugcaaacaca

SEQ ID NO: 3904744 - RNA, 18 nt, Human adenovirus B [HAdV-B]
gaaaccauuugguggcau

SEQ ID NO: 3904745 - RNA, 18 nt, Human adenovirus B [HAdV-B]
gaaagagucugagacaga

SEQ ID NO: 3904746 - RNA, 19 nt, Human adenovirus B [HAdV-B]
gaaaguauggaagugcaaa

SEQ ID NO: 3904747 - RNA, 17 nt, Human adenovirus B [HAdV-B]
gaacagaacuugaaaga

SEQ ID NO: 3904748 - RNA, 18 nt, Human adenovirus B [HAdV-B]
gaacccuacuagcaaacc

SEQ ID NO: 3904749 - RNA, 14 nt, Human adenovirus B [HAdV-B]
gaacgaaacuuuuc

SEQ ID NO: 3904750 - RNA, 16 nt, Human adenovirus B [HAdV-B]
gaacucaccaaccugg

SEQ ID NO: 3904751 - RNA, 22 nt, Human adenovirus B [HAdV-B]
gaagacaguuuggaggaggaaa

SEQ ID NO: 3904752 - RNA, 15 nt, Human adenovirus B [HAdV-B]
gaagauacugagcag

SEQ ID NO: 3904753 - RNA, 15 nt, Human adenovirus B [HAdV-B]
gaagaugaaagcacc

SEQ ID NO: 3904754 - RNA, 16 nt, Human adenovirus B [HAdV-B]
gaagcuauaauguguu

SEQ ID NO: 3904755 - RNA, 21 nt, Human adenovirus B [HAdV-B]
gaagcucuuaauuugggccau

SEQ ID NO: 3904756 - RNA, 18 nt, Human adenovirus B [HAdV-B]
gaagcuuggaaugcccac

SEQ ID NO: 3904757 - RNA, 20 nt, Human adenovirus B [HAdV-B]
gaaucagaaugacccgcagg

SEQ ID NO: 3904758 - RNA, 19 nt, Human adenovirus B [HAdV-B]
gaaucauguccaccugggg

SEQ ID NO: 3904759 - RNA, 20 nt, Human adenovirus B [HAdV-B]
gaaucauguccaccuggggg

SEQ ID NO: 3904760 - RNA, 13 nt, Human adenovirus B [HAdV-B]
gacaaaguacagc

SEQ ID NO: 3904761 - RNA, 17 nt, Human adenovirus B [HAdV-B]
gacaauuggaauaucua

SEQ ID NO: 3904762 - RNA, 15 nt, Human adenovirus B [HAdV-B]
gacagcaaccccagg

SEQ ID NO: 3904763 - RNA, 17 nt, Human adenovirus B [HAdV-B]
gacaguaaaggaagagc

SEQ ID NO: 3904764 - RNA, 16 nt, Human adenovirus B [HAdV-B]
gacagucaggcagagg

SEQ ID NO: 3904765 - RNA, 15 nt, Human adenovirus B [HAdV-B]
gaccacgguggugca

SEQ ID NO: 3904766 - RNA, 20 nt, Human adenovirus B [HAdV-B]
ggcaaaauagacucucgccu

SEQ ID NO: 3904767 - RNA, 16 nt, Human adenovirus B [HAdV-B]
ggcaccgacucuccca

SEQ ID NO: 3904768 - RNA, 14 nt, Human adenovirus B [HAdV-B]
ggcaccugcgagcc

SEQ ID NO: 3904769 - RNA, 22 nt, Human adenovirus B [HAdV-B]
ggcacgauucucacuugccacc

SEQ ID NO: 3904770 - RNA, 19 nt, Human adenovirus B [HAdV-B]
ggcagaccucaucuuccca

SEQ ID NO: 3904771 - RNA, 22 nt, Human adenovirus B [HAdV-B]
ggcagcaauguuuagaagaaca

SEQ ID NO: 3904772 - RNA, 15 nt, Human adenovirus B [HAdV-B]
ggcagucucgacaga

SEQ ID NO: 3904773 - RNA, 19 nt, Human adenovirus B [HAdV-B]
ggcaguuauuagaugcugc

SEQ ID NO: 3904774 - RNA, 17 nt, Human adenovirus B [HAdV-B]
ggcauggaugagcauca

SEQ ID NO: 3904775 - RNA, 21 nt, Human adenovirus B [HAdV-B]
ggccaacuaucucuccuacca

SEQ ID NO: 3904776 - RNA, 22 nt, Human adenovirus B [HAdV-B]
ggcccaauugcaagccauccaa

SEQ ID NO: 3904777 - RNA, 23 nt, Human adenovirus B [HAdV-B]
ggcccuuacagacuugggacaga

SEQ ID NO: 3904778 - RNA, 18 nt, Human adenovirus B [HAdV-B]
ggccgagaagguggcugc

SEQ ID NO: 3904779 - RNA, 16 nt, Human adenovirus B [HAdV-B]
ggcgaagagccaugcu

SEQ ID NO: 3904780 - RNA, 14 nt, Human adenovirus B [HAdV-B]
ggcgaccuccaaca

SEQ ID NO: 3904781 - RNA, 17 nt, Human adenovirus B [HAdV-B]
ggcggagcgguggugua

SEQ ID NO: 3904782 - RNA, 18 nt, Human adenovirus B [HAdV-B]
ggcggaugaaggcgagga

SEQ ID NO: 3904783 - RNA, 17 nt, Human adenovirus B [HAdV-B]
ggcggaugacuggcaga

SEQ ID NO: 3904784 - RNA, 18 nt, Human adenovirus B [HAdV-B]
ggcggcgcugcagagcca

SEQ ID NO: 3904785 - RNA, 15 nt, Human adenovirus B [HAdV-B]
ggcucucaugaaagc

SEQ ID NO: 3904786 - RNA, 14 nt, Human adenovirus B [HAdV-B]
ggcugcagccaacc

SEQ ID NO: 3904787 - RNA, 16 nt, Human adenovirus B [HAdV-B]
gggacagucaggcaga

SEQ ID NO: 3904788 - RNA, 22 nt, Human adenovirus B [HAdV-B]
gggugcuaccgcggcugagccc

SEQ ID NO: 3904789 - RNA, 15 nt, Human adenovirus B [HAdV-B]
gguacuuccgcucga

SEQ ID NO: 3904790 - RNA, 22 nt, Human adenovirus B [HAdV-B]
ggucaagagcaggaacugaaaa

SEQ ID NO: 3904791 - RNA, 22 nt, Human adenovirus B [HAdV-B]
ggucccuagcuugcaaccccca

SEQ ID NO: 3904792 - RNA, 16 nt, Human adenovirus B [HAdV-B]
ggucuugugugggacg

SEQ ID NO: 3904793 - RNA, 18 nt, Human adenovirus B [HAdV-B]
ggugacgcggcugagcua

SEQ ID NO: 3904794 - RNA, 20 nt, Human adenovirus B [HAdV-B]
gguggaacacgaggaagagu

SEQ ID NO: 3904795 - RNA, 16 nt, Human adenovirus B [HAdV-B]
gguguguuggacagag

SEQ ID NO: 3904796 - RNA, 15 nt, Human adenovirus B [HAdV-B]
gguucuguggacagg

SEQ ID NO: 3904797 - RNA, 13 nt, Human adenovirus B [HAdV-B]
guaauuaaaucca

SEQ ID NO: 3904798 - RNA, 18 nt, Human adenovirus B [HAdV-B]
guaccgcaaugguagugc

SEQ ID NO: 3904799 - RNA, 12 nt, Human adenovirus B [HAdV-B]
guagaagaggga

SEQ ID NO: 3904800 - RNA, 14 nt, Human adenovirus B [HAdV-B]
guagguuuggaagu

SEQ ID NO: 3904801 - RNA, 17 nt, Human adenovirus B [HAdV-B]
guaucauagugcaggag

SEQ ID NO: 3904802 - RNA, 11 nt, Human adenovirus B [HAdV-B]
guaugaagauu

SEQ ID NO: 3904803 - RNA, 21 nt, Human adenovirus B [HAdV-B]
gucaccagggaaaaguacagu

SEQ ID NO: 3904804 - RNA, 12 nt, Human adenovirus B [HAdV-B]
gucaccugcgga

SEQ ID NO: 3904805 - RNA, 14 nt, Human adenovirus B [HAdV-B]
gucaggcuguucug

SEQ ID NO: 3904806 - RNA, 16 nt, Human adenovirus B [HAdV-B]
guccagcgcugccagg

SEQ ID NO: 3904807 - RNA, 17 nt, Human adenovirus B [HAdV-B]
gucccgauuuggaagag

SEQ ID NO: 3904808 - RNA, 15 nt, Human adenovirus B [HAdV-B]
guccggcccacggag

SEQ ID NO: 3904809 - RNA, 14 nt, Human adenovirus B [HAdV-B]
guccuuugccaaac

SEQ ID NO: 3904810 - RNA, 13 nt, Human adenovirus B [HAdV-B]
gucgcuacaaaaa

SEQ ID NO: 3904811 - RNA, 19 nt, Human adenovirus B [HAdV-B]
gucucacgcuugccagcac

SEQ ID NO: 3904812 - RNA, 16 nt, Human adenovirus B [HAdV-B]
gucucuguugaaauuu

SEQ ID NO: 3904813 - RNA, 22 nt, Human adenovirus B [HAdV-B]
gucuugacugaugucuugcaug

SEQ ID NO: 3904814 - RNA, 14 nt, Human adenovirus B [HAdV-B]
gucuuguugccauc

SEQ ID NO: 3904815 - RNA, 22 nt, Human adenovirus B [HAdV-B]
gugaaaacauguugguuggagc

SEQ ID NO: 3904816 - RNA, 19 nt, Human adenovirus B [HAdV-B]
gugaaaguguuguuggaac

SEQ ID NO: 3904817 - RNA, 14 nt, Human adenovirus B [HAdV-B]
gugacgcugccacc

SEQ ID NO: 3904818 - RNA, 15 nt, Human adenovirus B [HAdV-B]
gugacgcugccaccg

SEQ ID NO: 3904819 - RNA, 14 nt, Human adenovirus B [HAdV-B]
gugcuuugagacug

SEQ ID NO: 3904820 - RNA, 16 nt, Human adenovirus B [HAdV-B]
guggcgguucaggccu

SEQ ID NO: 3904821 - RNA, 15 nt, Human adenovirus B [HAdV-B]
guguggaagagcuca

SEQ ID NO: 3904822 - RNA, 13 nt, Human adenovirus B [HAdV-B]
guguuggacagag

SEQ ID NO: 3904823 - RNA, 12 nt, Human adenovirus B [HAdV-B]
guuaauucaucu

SEQ ID NO: 3904824 - RNA, 14 nt, Human adenovirus B [HAdV-B]
guuagcugcacagc

SEQ ID NO: 3904825 - RNA, 15 nt, Human adenovirus B [HAdV-B]
guuaggucugugggg

SEQ ID NO: 3904826 - RNA, 20 nt, Human adenovirus B [HAdV-B]
guucagcggcauacuuucuc

SEQ ID NO: 3904827 - RNA, 19 nt, Human adenovirus B [HAdV-B]
guucugacgagaaucagaa

SEQ ID NO: 3904828 - RNA, 17 nt, Human adenovirus B [HAdV-B]
guucugaggaaaucauc

SEQ ID NO: 3904829 - RNA, 20 nt, Human adenovirus B [HAdV-B]
guucuggaggaggaacagca

SEQ ID NO: 3904830 - RNA, 15 nt, Human adenovirus B [HAdV-B]
guugaaggugcagcc

SEQ ID NO: 3904831 - RNA, 23 nt, Human adenovirus B [HAdV-B]
guugagcgccucggcugcguggc

SEQ ID NO: 3904832 - RNA, 18 nt, Human adenovirus B [HAdV-B]
guugaucaugccuggagu

SEQ ID NO: 3904833 - RNA, 12 nt, Human adenovirus B [HAdV-B]
guugaugcccaa

SEQ ID NO: 3904834 - RNA, 18 nt, Human adenovirus B [HAdV-B]
guuguuggaaccagaugc

SEQ ID NO: 3904835 - RNA, 22 nt, Human adenovirus B [HAdV-B]
guuucucuucgggggcagaggu

SEQ ID NO: 3904836 - RNA, 16 nt, Human adenovirus B [HAdV-B]
guuucugaugcaagag

SEQ ID NO: 3904837 - RNA, 20 nt, Human adenovirus B [HAdV-B]
guuugcgcuacuuucacagc

SEQ ID NO: 3904838 - RNA, 12 nt, Human adenovirus B [HAdV-B]
guuuggaggagg

SEQ ID NO: 3904839 - RNA, 13 nt, Human adenovirus B [HAdV-B]
guuugguggauaa

SEQ ID NO: 3904840 - RNA, 18 nt, Human adenovirus B [HAdV-B]
uaaaaaauauaauuauuu

SEQ ID NO: 3904841 - RNA, 15 nt, Human adenovirus B [HAdV-B]
uaaaacuggagcacu

SEQ ID NO: 3904842 - RNA, 15 nt, Human adenovirus B [HAdV-B]
uaagcauuccaccgc

SEQ ID NO: 3904843 - RNA, 16 nt, Human adenovirus B [HAdV-B]
uaagggggucuaccuu

SEQ ID NO: 3904844 - RNA, 15 nt, Human adenovirus B [HAdV-B]
uaaucauaaaucagg

SEQ ID NO: 3904845 - RNA, 18 nt, Human adenovirus B [HAdV-B]
uacaacucccuggcuccu

SEQ ID NO: 3904846 - RNA, 21 nt, Human adenovirus B [HAdV-B]
uacaagcgcagaccuccccaa

SEQ ID NO: 3904847 - RNA, 12 nt, Human adenovirus B [HAdV-B]
uacauggcuccg

SEQ ID NO: 3904848 - RNA, 16 nt, Human adenovirus B [HAdV-B]
uacauuccagaaggau

SEQ ID NO: 3904849 - RNA, 14 nt, Human adenovirus B [HAdV-B]
uaccaggaaagucc

SEQ ID NO: 3904850 - RNA, 14 nt, Human adenovirus B [HAdV-B]
uacgagcagacagu

SEQ ID NO: 3904851 - RNA, 12 nt, Human adenovirus B [HAdV-B]
uacuuucucuag

SEQ ID NO: 3904852 - RNA, 14 nt, Human adenovirus B [HAdV-B]
uacuuugccagaag

SEQ ID NO: 3904853 - RNA, 18 nt, Human adenovirus B [HAdV-B]
uagaaaaugcaaauucca

SEQ ID NO: 3904854 - RNA, 19 nt, Human adenovirus B [HAdV-B]
uagaagcugcuacagcugc

SEQ ID NO: 3904855 - RNA, 21 nt, Human adenovirus B [HAdV-B]
uagacacggcuuugugcggca

SEQ ID NO: 3904856 - RNA, 19 nt, Human adenovirus B [HAdV-B]
uagacagcaaccccaggcc

SEQ ID NO: 3904857 - RNA, 23 nt, Human adenovirus B [HAdV-B]
uagagcgagccguagacgccagc

SEQ ID NO: 3904858 - RNA, 23 nt, Human adenovirus B [HAdV-B]
uagaugggauccucaaagaugcc

SEQ ID NO: 3904859 - RNA, 23 nt, Human adenovirus B [HAdV-B]
uagcugaugggaguggggucauc

SEQ ID NO: 3904860 - RNA, 19 nt, Human adenovirus B [HAdV-B]
uagucuacccuuuucucua

SEQ ID NO: 3904861 - RNA, 17 nt, Human adenovirus B [HAdV-B]
uagucuguuccacaguu

SEQ ID NO: 3904862 - RNA, 14 nt, Human adenovirus B [HAdV-B]
uagugauagaaguu

SEQ ID NO: 3904863 - RNA, 14 nt, Human adenovirus B [HAdV-B]
uaguuauguuccug

SEQ ID NO: 3904864 - RNA, 16 nt, Human adenovirus B [HAdV-B]
uaguuauuuugccucc

SEQ ID NO: 3904865 - RNA, 13 nt, Human adenovirus B [HAdV-B]
uaucauugagaac

SEQ ID NO: 3904866 - RNA, 11 nt, Human adenovirus B [HAdV-B]
uaugaaaucaa

SEQ ID NO: 3904867 - RNA, 18 nt, Human adenovirus B [HAdV-B]
uauggaagugcaaacuga

SEQ ID NO: 3904868 - RNA, 14 nt, Human adenovirus B [HAdV-B]
uauucuuugcuacc

SEQ ID NO: 3904869 - RNA, 23 nt, Human adenovirus B [HAdV-B]
uauuuugauuaagggaaaugcca

SEQ ID NO: 3904870 - RNA, 16 nt, Human adenovirus B [HAdV-B]
aaugauugcuggaaua

SEQ ID NO: 3904871 - RNA, 19 nt, Human adenovirus B [HAdV-B]
aaugggaguaaaguguaaa

SEQ ID NO: 3904872 - RNA, 15 nt, Human adenovirus B [HAdV-B]
aaugugaaaggcggu

SEQ ID NO: 3904873 - RNA, 15 nt, Human adenovirus B [HAdV-B]
aauuaagacucuccu

SEQ ID NO: 3904874 - RNA, 20 nt, Human adenovirus B [HAdV-B]
aauugcaaggccccagcagc

SEQ ID NO: 3904875 - RNA, 17 nt, Human adenovirus B [HAdV-B]
aauugcgagugaugcga

SEQ ID NO: 3904876 - RNA, 17 nt, Human adenovirus B [HAdV-B]
aauugugaugauagcaa

SEQ ID NO: 3904877 - RNA, 21 nt, Human adenovirus B [HAdV-B]
aauuugccaaaaaaacauuca

SEQ ID NO: 3904878 - RNA, 12 nt, Human adenovirus B [HAdV-B]
aauuuuggcuca

SEQ ID NO: 3904879 - RNA, 22 nt, Human adenovirus B [HAdV-B]
acaaugaagaacccaauucucu

SEQ ID NO: 3904880 - RNA, 15 nt, Human adenovirus B [HAdV-B]
acaaugaggcuuuca

SEQ ID NO: 3904881 - RNA, 12 nt, Human adenovirus B [HAdV-B]
acaauucucuag

SEQ ID NO: 3904882 - RNA, 14 nt, Human adenovirus B [HAdV-B]
acacacagaaauau

SEQ ID NO: 3904883 - RNA, 18 nt, Human adenovirus B [HAdV-B]
acaccgcucccccagcca

SEQ ID NO: 3904884 - RNA, 14 nt, Human adenovirus B [HAdV-B]
acaccuaugugaac

SEQ ID NO: 3904885 - RNA, 17 nt, Human adenovirus B [HAdV-B]
acagggcguuggauaaa

SEQ ID NO: 3904886 - RNA, 16 nt, Human adenovirus B [HAdV-B]
acagugcaggcagcag

SEQ ID NO: 3904887 - RNA, 14 nt, Human adenovirus B [HAdV-B]
acauccaauagcgc

SEQ ID NO: 3904888 - RNA, 18 nt, Human adenovirus B [HAdV-B]
acaugcagaauaaaaaag

SEQ ID NO: 3904889 - RNA, 16 nt, Human adenovirus B [HAdV-B]
acaugggagcugacuu

SEQ ID NO: 3904890 - RNA, 15 nt, Human adenovirus B [HAdV-B]
acaugggcaccugga

SEQ ID NO: 3904891 - RNA, 20 nt, Human adenovirus B [HAdV-B]
acauugucuuacugccuggc

SEQ ID NO: 3904892 - RNA, 23 nt, Human adenovirus B [HAdV-B]
accaagagucaauugucucugaa

SEQ ID NO: 3904893 - RNA, 18 nt, Human adenovirus B [HAdV-B]
accaauauuuuugcuucu

SEQ ID NO: 3904894 - RNA, 11 nt, Human adenovirus B [HAdV-B]
accaaugccau

SEQ ID NO: 3904895 - RNA, 18 nt, Human adenovirus B [HAdV-B]
accaaugccaucuuaaac

SEQ ID NO: 3904896 - RNA, 12 nt, Human adenovirus B [HAdV-B]
accacacucuua

SEQ ID NO: 3904897 - RNA, 12 nt, Human adenovirus B [HAdV-B]
accacacugcca

SEQ ID NO: 3904898 - RNA, 20 nt, Human adenovirus B [HAdV-B]
accaggaacuucaagcuggg

SEQ ID NO: 3904899 - RNA, 16 nt, Human adenovirus B [HAdV-B]
acccaacauccugucc

SEQ ID NO: 3904900 - RNA, 14 nt, Human adenovirus B [HAdV-B]
acccacaagcagcc

SEQ ID NO: 3904901 - RNA, 19 nt, Human adenovirus B [HAdV-B]
acccagaggaacacauucc

SEQ ID NO: 3904902 - RNA, 12 nt, Human adenovirus B [HAdV-B]
accccaggccaa

SEQ ID NO: 3904903 - RNA, 17 nt, Human adenovirus B [HAdV-B]
acccggcggcgucccag

SEQ ID NO: 3904904 - RNA, 18 nt, Human adenovirus B [HAdV-B]
acccuaugucgucacagg

SEQ ID NO: 3904905 - RNA, 22 nt, Human adenovirus B [HAdV-B]
accgaaaaguauggaggcaggg

SEQ ID NO: 3904906 - RNA, 17 nt, Human adenovirus B [HAdV-B]
accggauugcagcacug

SEQ ID NO: 3904907 - RNA, 21 nt, Human adenovirus B [HAdV-B]
accugcugcuucucccaggcu

SEQ ID NO: 3904908 - RNA, 18 nt, Human adenovirus B [HAdV-B]
accuguaucgcgaagcca

SEQ ID NO: 3904909 - RNA, 18 nt, Human adenovirus B [HAdV-B]
acgaggaaaaggagcaga

SEQ ID NO: 3904910 - RNA, 12 nt, Human adenovirus B [HAdV-B]
acgcacagccug

SEQ ID NO: 3904911 - RNA, 14 nt, Human adenovirus B [HAdV-B]
acgcacagccugua

SEQ ID NO: 3904912 - RNA, 14 nt, Human adenovirus B [HAdV-B]
acggagggcagaaa

SEQ ID NO: 3904913 - RNA, 19 nt, Human adenovirus B [HAdV-B]
acggaguucuuacuuuaaa

SEQ ID NO: 3904914 - RNA, 19 nt, Human adenovirus B [HAdV-B]
acgguuuuuugaaagaaaa

SEQ ID NO: 3904915 - RNA, 15 nt, Human adenovirus B [HAdV-B]
acguggcaaaccggc

SEQ ID NO: 3904916 - RNA, 13 nt, Human adenovirus B [HAdV-B]
acguuuuggauuu

SEQ ID NO: 3904917 - RNA, 12 nt, Human adenovirus B [HAdV-B]
acuaaugugaaa

SEQ ID NO: 3904918 - RNA, 17 nt, Human adenovirus B [HAdV-B]
acuacuugcacagagcu

SEQ ID NO: 3904919 - RNA, 23 nt, Human adenovirus B [HAdV-B]
acuaucuccuaacgaauuugaaa

SEQ ID NO: 3904920 - RNA, 16 nt, Human adenovirus B [HAdV-B]
acucaucuaaaaccau

SEQ ID NO: 3904921 - RNA, 22 nt, Human adenovirus B [HAdV-B]
acuccagugaaucuaaugauug

SEQ ID NO: 3904922 - RNA, 15 nt, Human adenovirus B [HAdV-B]
acucugaacuucuug

SEQ ID NO: 3904923 - RNA, 22 nt, Human adenovirus B [HAdV-B]
acugcccaaaacaacgagcaga

SEQ ID NO: 3904924 - RNA, 22 nt, Human adenovirus B [HAdV-B]
acugccgcugcaaucugugcac

SEQ ID NO: 3904925 - RNA, 12 nt, Human adenovirus B [HAdV-B]
acugcuggacua

SEQ ID NO: 3904926 - RNA, 14 nt, Human adenovirus B [HAdV-B]
acugcuuuucccau

SEQ ID NO: 3904927 - RNA, 14 nt, Human adenovirus B [HAdV-B]
acuuccagcccaug

SEQ ID NO: 3904928 - RNA, 14 nt, Human adenovirus B [HAdV-B]
acuugcaguggcag

SEQ ID NO: 3904929 - RNA, 11 nt, Human adenovirus B [HAdV-B]
agaaaaaaaca

SEQ ID NO: 3904930 - RNA, 19 nt, Human adenovirus B [HAdV-B]
agaaaaaaauuucccaaac

SEQ ID NO: 3904931 - RNA, 12 nt, Human adenovirus B [HAdV-B]
agaaagagggaa

SEQ ID NO: 3904932 - RNA, 23 nt, Human adenovirus B [HAdV-B]
agaacgcuucggacggagucucc

SEQ ID NO: 3904933 - RNA, 16 nt, Human adenovirus B [HAdV-B]
agaagguccuggccau

SEQ ID NO: 3904934 - RNA, 13 nt, Human adenovirus B [HAdV-B]
agaauacaccaau

SEQ ID NO: 3904935 - RNA, 16 nt, Human adenovirus B [HAdV-B]
agaccggcgaggaacu

SEQ ID NO: 3904936 - RNA, 15 nt, Human adenovirus B [HAdV-B]
agaccugcuaccaau

SEQ ID NO: 3904937 - RNA, 21 nt, Human adenovirus B [HAdV-B]
agacgcgcuccuuaaacaucu

SEQ ID NO: 3904938 - RNA, 20 nt, Human adenovirus B [HAdV-B]
agacggauuaauauccggaa

SEQ ID NO: 3904939 - RNA, 14 nt, Human adenovirus B [HAdV-B]
agacuagcagacag

SEQ ID NO: 3904940 - RNA, 23 nt, Human adenovirus B [HAdV-B]
agacuguauaggagcauuugcuu

SEQ ID NO: 3904941 - RNA, 14 nt, Human adenovirus B [HAdV-B]
agagcgugaugcag

SEQ ID NO: 3904942 - RNA, 14 nt, Human adenovirus B [HAdV-B]
agagcgugggauug

SEQ ID NO: 3904943 - RNA, 14 nt, Human adenovirus B [HAdV-B]
agagcuucuacaac

SEQ ID NO: 3904944 - RNA, 22 nt, Human adenovirus B [HAdV-B]
agaggcaauguauacugggugc

SEQ ID NO: 3904945 - RNA, 14 nt, Human adenovirus B [HAdV-B]
agaggucagaggag

SEQ ID NO: 3904946 - RNA, 11 nt, Human adenovirus B [HAdV-B]
agaguuucaug

SEQ ID NO: 3904947 - RNA, 12 nt, Human adenovirus B [HAdV-B]
agaguuucauga

SEQ ID NO: 3904948 - RNA, 20 nt, Human adenovirus B [HAdV-B]
agaugccuggggacagguua

SEQ ID NO: 3904949 - RNA, 14 nt, Human adenovirus B [HAdV-B]
agauguacggaggc

SEQ ID NO: 3904950 - RNA, 13 nt, Human adenovirus B [HAdV-B]
agauuacagccaa

SEQ ID NO: 3904951 - RNA, 18 nt, Human adenovirus B [HAdV-B]
agauugggacagucaggc

SEQ ID NO: 3904952 - RNA, 15 nt, Human adenovirus B [HAdV-B]
agauuuuucugcaac

SEQ ID NO: 3904953 - RNA, 23 nt, Human adenovirus B [HAdV-B]
agcaagcaccggaucccgcaaug

SEQ ID NO: 3904954 - RNA, 16 nt, Human adenovirus B [HAdV-B]
agcaagggggccaccu

SEQ ID NO: 3904955 - RNA, 19 nt, Human adenovirus B [HAdV-B]
agcaauugagauuugccac

SEQ ID NO: 3904956 - RNA, 18 nt, Human adenovirus B [HAdV-B]
agcagacagggcuugcag

SEQ ID NO: 3904957 - RNA, 14 nt, Human adenovirus B [HAdV-B]
agcagagcguggga

SEQ ID NO: 3904958 - RNA, 14 nt, Human adenovirus B [HAdV-B]
agcaggaacugaaa

SEQ ID NO: 3904959 - RNA, 18 nt, Human adenovirus B [HAdV-B]
agccgcuuucgcagcggc

SEQ ID NO: 3904960 - RNA, 15 nt, Human adenovirus B [HAdV-B]
agccggccggagccg

SEQ ID NO: 3904961 - RNA, 18 nt, Human adenovirus B [HAdV-B]
agccguuaaccccacagc

SEQ ID NO: 3904962 - RNA, 12 nt, Human adenovirus B [HAdV-B]
agccuacugcca

SEQ ID NO: 3904963 - RNA, 22 nt, Human adenovirus B [HAdV-B]
agcgccggcaggucccgcaggc

SEQ ID NO: 3904964 - RNA, 16 nt, Human adenovirus B [HAdV-B]
agcgugaugcagcagc

SEQ ID NO: 3904965 - RNA, 16 nt, Human adenovirus B [HAdV-B]
agcucaugcucuggac

SEQ ID NO: 3904966 - RNA, 14 nt, Human adenovirus B [HAdV-B]
agcuccgccagucc

SEQ ID NO: 3904967 - RNA, 19 nt, Human adenovirus B [HAdV-B]
agcucuuaauuugggccau

SEQ ID NO: 3904968 - RNA, 20 nt, Human adenovirus B [HAdV-B]
agcugccuauaguacuccac

SEQ ID NO: 3904969 - RNA, 22 nt, Human adenovirus B [HAdV-B]
agcuguagugccuucccgcucu

SEQ ID NO: 3904970 - RNA, 17 nt, Human adenovirus B [HAdV-B]
aggacccccaaucacuu

SEQ ID NO: 3904971 - RNA, 11 nt, Human adenovirus B [HAdV-B]
aggagcuggcu

SEQ ID NO: 3904972 - RNA, 23 nt, Human adenovirus B [HAdV-B]
aggauccuauagaggugggauug

SEQ ID NO: 3904973 - RNA, 23 nt, Human adenovirus B [HAdV-B]
aggaugauugggagguggccauu

SEQ ID NO: 3904974 - RNA, 19 nt, Human adenovirus B [HAdV-B]
aggaugucacuccacagcu

SEQ ID NO: 3904975 - RNA, 22 nt, Human adenovirus B [HAdV-B]
aggauucggccgaugauagcag

SEQ ID NO: 3904976 - RNA, 16 nt, Human adenovirus B [HAdV-B]
aggcagaggaggugga

SEQ ID NO: 3904977 - RNA, 15 nt, Human adenovirus B [HAdV-B]
aggcauuaguuuaaa

SEQ ID NO: 3904978 - RNA, 15 nt, Human adenovirus B [HAdV-B]
aggcgacggcgguga

SEQ ID NO: 3904979 - RNA, 15 nt, Human adenovirus B [HAdV-B]
aggcugucccugcaa

SEQ ID NO: 3904980 - RNA, 15 nt, Human adenovirus B [HAdV-B]
agggcgaaggacugg

SEQ ID NO: 3904981 - RNA, 14 nt, Human adenovirus B [HAdV-B]
aggucaggagccga

SEQ ID NO: 3904982 - RNA, 22 nt, Human adenovirus B [HAdV-B]
aggucccgcaggcaagcagccg

SEQ ID NO: 3904983 - RNA, 20 nt, Human adenovirus B [HAdV-B]
aguaagaaagaacaaaaagc

SEQ ID NO: 3904984 - RNA, 19 nt, Human adenovirus B [HAdV-B]
aguagacaccuaugugaac

SEQ ID NO: 3904985 - RNA, 16 nt, Human adenovirus B [HAdV-B]
agucgaggaacccggc

SEQ ID NO: 3904986 - RNA, 19 nt, Human adenovirus B [HAdV-B]
agugcaccuacacccugcu

SEQ ID NO: 3904987 - RNA, 18 nt, Human adenovirus B [HAdV-B]
agugccaucacaucucgu

SEQ ID NO: 3904988 - RNA, 21 nt, Human adenovirus B [HAdV-B]
agugguugacuugcaggacag

SEQ ID NO: 3904989 - RNA, 15 nt, Human adenovirus B [HAdV-B]
aguguuucuugaaug

SEQ ID NO: 3904990 - RNA, 22 nt, Human adenovirus B [HAdV-B]
aguuacccuugguuugaugcau

SEQ ID NO: 3904991 - RNA, 13 nt, Human adenovirus B [HAdV-B]
aguuauguuccug

SEQ ID NO: 3904992 - RNA, 14 nt, Human adenovirus B [HAdV-B]
aguucaucgggagg

SEQ ID NO: 3904993 - RNA, 17 nt, Human adenovirus B [HAdV-B]
aguucguuauccagccu

SEQ ID NO: 3904994 - RNA, 19 nt, Human adenovirus B [HAdV-B]
aguucuuguagugaggaaa

SEQ ID NO: 3904995 - RNA, 20 nt, Human adenovirus B [HAdV-B]
aguuuacuuugccagaaggc

SEQ ID NO: 3904996 - RNA, 17 nt, Human adenovirus B [HAdV-B]
aguuucagaugaagaaa

SEQ ID NO: 3904997 - RNA, 22 nt, Human adenovirus B [HAdV-B]
aguuucuaugcguguuggauug

SEQ ID NO: 3904998 - RNA, 14 nt, Human adenovirus B [HAdV-B]
aguuuggcaaugga

SEQ ID NO: 3904999 - RNA, 20 nt, Human adenovirus B [HAdV-B]
auaacaaaaccuggaacaau

SEQ ID NO: 3905000 - RNA, 21 nt, Human adenovirus B [HAdV-B]
auacaaagccucaucagccau

SEQ ID NO: 3905001 - RNA, 16 nt, Human adenovirus B [HAdV-B]
auacaacaauuuccac

SEQ ID NO: 3905002 - RNA, 13 nt, Human adenovirus B [HAdV-B]
auacaauuuccaa

SEQ ID NO: 3905003 - RNA, 22 nt, Human adenovirus B [HAdV-B]
auacuaacaugccaaacgugaa

SEQ ID NO: 3905004 - RNA, 13 nt, Human adenovirus B [HAdV-B]
auauuuucccgca

SEQ ID NO: 3905005 - RNA, 12 nt, Human adenovirus B [HAdV-B]
auauuuuugcuu

SEQ ID NO: 3905006 - RNA, 13 nt, Human adenovirus B [HAdV-B]
aucaccugggcag

SEQ ID NO: 3905007 - RNA, 20 nt, Human adenovirus B [HAdV-B]
aucacugguuaccgaggaag

SEQ ID NO: 3905008 - RNA, 23 nt, Human adenovirus B [HAdV-B]
aucccgacgaaaguacgguccag

SEQ ID NO: 3905009 - RNA, 18 nt, Human adenovirus B [HAdV-B]
aucccgcugucaaccugc

SEQ ID NO: 3905010 - RNA, 22 nt, Human adenovirus B [HAdV-B]
aucucuuaagguucuguggaca

SEQ ID NO: 3905011 - RNA, 17 nt, Human adenovirus B [HAdV-B]
aucugcaacaaaacaaa

SEQ ID NO: 3905012 - RNA, 20 nt, Human adenovirus B [HAdV-B]
aucugggaccugguucacgc

SEQ ID NO: 3905013 - RNA, 14 nt, Human adenovirus B [HAdV-B]
aucuguggaguucu

SEQ ID NO: 3905014 - RNA, 11 nt, Human adenovirus B [HAdV-B]
aucuguugcac

SEQ ID NO: 3905015 - RNA, 11 nt, Human adenovirus B [HAdV-B]
augaacaaugc

SEQ ID NO: 3905016 - RNA, 18 nt, Human adenovirus B [HAdV-B]
augacagaaugcaucgcg

SEQ ID NO: 3905017 - RNA, 20 nt, Human adenovirus B [HAdV-B]
augagaaucgccuaggacaa

SEQ ID NO: 3905018 - RNA, 13 nt, Human adenovirus B [HAdV-B]
augaucacaagca

SEQ ID NO: 3905019 - RNA, 17 nt, Human adenovirus B [HAdV-B]
augaucuugggguguau

SEQ ID NO: 3905020 - RNA, 22 nt, Human adenovirus B [HAdV-B]
augcccaugccuauuacaacug

SEQ ID NO: 3905021 - RNA, 16 nt, Human adenovirus B [HAdV-B]
augcuggcuacugugc

SEQ ID NO: 3905022 - RNA, 20 nt, Human adenovirus B [HAdV-B]
auggaagacuuaugcucagg

SEQ ID NO: 3905023 - RNA, 18 nt, Human adenovirus B [HAdV-B]
auggcgaugaugggcugg

SEQ ID NO: 3905024 - RNA, 23 nt, Human adenovirus B [HAdV-B]
augggcguccagcgcugccaggg

SEQ ID NO: 3905025 - RNA, 14 nt, Human adenovirus B [HAdV-B]
augugccccaacag

SEQ ID NO: 3905026 - RNA, 18 nt, Human adenovirus B [HAdV-B]
auguuagcaaaguuuaca

SEQ ID NO: 3905027 - RNA, 23 nt, Human adenovirus B [HAdV-B]
auguugacgagacgcucuucucc

SEQ ID NO: 3905028 - RNA, 20 nt, Human adenovirus B [HAdV-B]
auuaaaugacguucccucaa

SEQ ID NO: 3905029 - RNA, 19 nt, Human adenovirus B [HAdV-B]
auuaacaaacugcuggacu

SEQ ID NO: 3905030 - RNA, 21 nt, Human adenovirus B [HAdV-B]
auuacagccaacgagccagcg

SEQ ID NO: 3905031 - RNA, 15 nt, Human adenovirus B [HAdV-B]
auucacacagcagcg

SEQ ID NO: 3905032 - RNA, 20 nt, Human adenovirus B [HAdV-B]
auucauuuuucagaaacuuc

SEQ ID NO: 3905033 - RNA, 14 nt, Human adenovirus B [HAdV-B]
auuccaccagccag

SEQ ID NO: 3905034 - RNA, 18 nt, Human adenovirus B [HAdV-B]
auuccagucuccugccgc

SEQ ID NO: 3905035 - RNA, 14 nt, Human adenovirus B [HAdV-B]
auuccuugcucaga

SEQ ID NO: 3905036 - RNA, 19 nt, Human adenovirus B [HAdV-B]
auucuagagaaaaagaaaa

SEQ ID NO: 3905037 - RNA, 15 nt, Human adenovirus B [HAdV-B]
auucuuaaacacacc

SEQ ID NO: 3905038 - RNA, 16 nt, Human adenovirus B [HAdV-B]
auuguguuucaagcag

SEQ ID NO: 3905039 - RNA, 16 nt, Human adenovirus B [HAdV-B]
auuucaccaaugccau

SEQ ID NO: 3905040 - RNA, 17 nt, Human adenovirus B [HAdV-B]
auuucauagccacagca

SEQ ID NO: 3905041 - RNA, 22 nt, Human adenovirus B [HAdV-B]
auuuccacuucaacaaucagca

SEQ ID NO: 3905042 - RNA, 13 nt, Human adenovirus B [HAdV-B]
auuuccauuccuu

SEQ ID NO: 3905043 - RNA, 19 nt, Human adenovirus B [HAdV-B]
auuuccccaaauggcuuca

SEQ ID NO: 3905044 - RNA, 18 nt, Human adenovirus B [HAdV-B]
auuugugugacagugcaa

SEQ ID NO: 3905045 - RNA, 15 nt, Human adenovirus B [HAdV-B]
auuuuuaacuccuca

SEQ ID NO: 3905046 - RNA, 22 nt, Human adenovirus B [HAdV-B]
caaaaauaaaaaaaaaaacaag

SEQ ID NO: 3905047 - RNA, 11 nt, Human adenovirus B [HAdV-B]
caaaacaaaaa

SEQ ID NO: 3905048 - RNA, 14 nt, Human adenovirus B [HAdV-B]
caaaacaaaaccaa

SEQ ID NO: 3905049 - RNA, 14 nt, Human adenovirus B [HAdV-B]
caaacccacaagca

SEQ ID NO: 3905050 - RNA, 20 nt, Human adenovirus B [HAdV-B]
caaagcgcgugugauggugu

SEQ ID NO: 3905051 - RNA, 14 nt, Human adenovirus B [HAdV-B]
caaagcgugcugca

SEQ ID NO: 3905052 - RNA, 18 nt, Human adenovirus B [HAdV-B]
caaaucccaaccaagcaa

SEQ ID NO: 3905053 - RNA, 12 nt, Human adenovirus B [HAdV-B]
caaaucuggaag

SEQ ID NO: 3905054 - RNA, 14 nt, Human adenovirus B [HAdV-B]
caacaagugcagca

SEQ ID NO: 3905055 - RNA, 18 nt, Human adenovirus B [HAdV-B]
caacaccuuaaucccaga

SEQ ID NO: 3905056 - RNA, 19 nt, Human adenovirus B [HAdV-B]
caacucagcucaugcucug

SEQ ID NO: 3905057 - RNA, 11 nt, Human adenovirus B [HAdV-B]
caacuggugag

SEQ ID NO: 3905058 - RNA, 14 nt, Human adenovirus B [HAdV-B]
caagagcaggggac

SEQ ID NO: 3905059 - RNA, 11 nt, Human adenovirus B [HAdV-B]
caagaggacaa

SEQ ID NO: 3905060 - RNA, 13 nt, Human adenovirus B [HAdV-B]
caagauagcuuug

SEQ ID NO: 3905061 - RNA, 16 nt, Human adenovirus B [HAdV-B]
caagcaaaccgacucc

SEQ ID NO: 3905062 - RNA, 16 nt, Human adenovirus B [HAdV-B]
caaggccccagcagcc

SEQ ID NO: 3905063 - RNA, 17 nt, Human adenovirus B [HAdV-B]
caaggucaacccuaucc

SEQ ID NO: 3905064 - RNA, 14 nt, Human adenovirus B [HAdV-B]
caagguucccucag

SEQ ID NO: 3905065 - RNA, 14 nt, Human adenovirus B [HAdV-B]
caauaaacaucacu

SEQ ID NO: 3905066 - RNA, 20 nt, Human adenovirus B [HAdV-B]
caauggaugguuuacaaaac

SEQ ID NO: 3905067 - RNA, 22 nt, Human adenovirus B [HAdV-B]
cacaacgugguaacugggcucu

SEQ ID NO: 3905068 - RNA, 16 nt, Human adenovirus B [HAdV-B]
cacaagacaagccaca

SEQ ID NO: 3905069 - RNA, 13 nt, Human adenovirus B [HAdV-B]
cacacaaagcaca

SEQ ID NO: 3905070 - RNA, 12 nt, Human adenovirus B [HAdV-B]
cacagagcugcc

SEQ ID NO: 3905071 - RNA, 20 nt, Human adenovirus B [HAdV-B]
cacagcacccugaaggggga

SEQ ID NO: 3905072 - RNA, 14 nt, Human adenovirus B [HAdV-B]
cacagcagagacaa

SEQ ID NO: 3905073 - RNA, 14 nt, Human adenovirus B [HAdV-B]
cacaggagaauaaa

SEQ ID NO: 3905074 - RNA, 11 nt, Human adenovirus B [HAdV-B]
caccaaugcca

SEQ ID NO: 3905075 - RNA, 21 nt, Human adenovirus B [HAdV-B]
caccagguuguaucuggugga

SEQ ID NO: 3905076 - RNA, 20 nt, Human adenovirus B [HAdV-B]
caccauucuuaaacacaccc

SEQ ID NO: 3905077 - RNA, 16 nt, Human adenovirus B [HAdV-B]
caccccggauugcaug

SEQ ID NO: 3905078 - RNA, 23 nt, Human adenovirus B [HAdV-B]
caccgagcuaccacugccaugcg

SEQ ID NO: 3905079 - RNA, 18 nt, Human adenovirus B [HAdV-B]
agccaacgagccagcgca

SEQ ID NO: 3905080 - RNA, 15 nt, Human adenovirus B [HAdV-B]
agccauugcugucaa

SEQ ID NO: 3905081 - RNA, 21 nt, Human adenovirus B [HAdV-B]
agcgcuccagccaaaacucau

SEQ ID NO: 3905082 - RNA, 15 nt, Human adenovirus B [HAdV-B]
agcgugcugcacagc

SEQ ID NO: 3905083 - RNA, 23 nt, Human adenovirus B [HAdV-B]
agcucauaggagcuggcuuucau

SEQ ID NO: 3905084 - RNA, 21 nt, Human adenovirus B [HAdV-B]
agcucaugcucuggacaugac

SEQ ID NO: 3905085 - RNA, 20 nt, Human adenovirus B [HAdV-B]
agcugaaauuacaaaagaag

SEQ ID NO: 3905086 - RNA, 19 nt, Human adenovirus B [HAdV-B]
agcugacuugucuccugaa

SEQ ID NO: 3905087 - RNA, 16 nt, Human adenovirus B [HAdV-B]
agcuguguacucccag

SEQ ID NO: 3905088 - RNA, 15 nt, Human adenovirus B [HAdV-B]
agcuugguuaccagu

SEQ ID NO: 3905089 - RNA, 16 nt, Human adenovirus B [HAdV-B]
agcuuuugcugugcca

SEQ ID NO: 3905090 - RNA, 16 nt, Human adenovirus B [HAdV-B]
aggaaaaggagcagag

SEQ ID NO: 3905091 - RNA, 21 nt, Human adenovirus B [HAdV-B]
aggaccagugcuuugagcgcg

SEQ ID NO: 3905092 - RNA, 22 nt, Human adenovirus B [HAdV-B]
aggagaaagagcaaccgugucu

SEQ ID NO: 3905093 - RNA, 13 nt, Human adenovirus B [HAdV-B]
caauccccacugg

SEQ ID NO: 3905094 - RNA, 23 nt, Human adenovirus B [HAdV-B]
caaugaauaaauaaacaagcuug

SEQ ID NO: 3905095 - RNA, 19 nt, Human adenovirus B [HAdV-B]
caaugaggcuuucagagag

SEQ ID NO: 3905096 - RNA, 22 nt, Human adenovirus B [HAdV-B]
caauggacucugacacuccugg

SEQ ID NO: 3905097 - RNA, 23 nt, Human adenovirus B [HAdV-B]
caauggaugguuuacaaaaccau

SEQ ID NO: 3905098 - RNA, 20 nt, Human adenovirus B [HAdV-B]
caaugucacucuuccagaaa

SEQ ID NO: 3905099 - RNA, 12 nt, Human adenovirus B [HAdV-B]
caauuguugcag

SEQ ID NO: 3905100 - RNA, 22 nt, Human adenovirus B [HAdV-B]
cacaaagcccaaacggaguucu

SEQ ID NO: 3905101 - RNA, 16 nt, Human adenovirus B [HAdV-B]
cacaacuuacacuaug

SEQ ID NO: 3905102 - RNA, 20 nt, Human adenovirus B [HAdV-B]
cacacaaagcacaagcucua

SEQ ID NO: 3905103 - RNA, 12 nt, Human adenovirus B [HAdV-B]
cacacagcagcg

SEQ ID NO: 3905104 - RNA, 21 nt, Human adenovirus B [HAdV-B]
cacacauuacaaacagguccc

SEQ ID NO: 3905105 - RNA, 14 nt, Human adenovirus B [HAdV-B]
cacauacaaagccu

SEQ ID NO: 3905106 - RNA, 14 nt, Human adenovirus B [HAdV-B]
cacauccaagaaca

SEQ ID NO: 3905107 - RNA, 15 nt, Human adenovirus B [HAdV-B]
cacauuccaccagcc

SEQ ID NO: 3905108 - RNA, 13 nt, Human adenovirus B [HAdV-B]
caccacaccacuc

SEQ ID NO: 3905109 - RNA, 17 nt, Human adenovirus B [HAdV-B]
caccauucuuaaacaca

SEQ ID NO: 3905110 - RNA, 22 nt, Human adenovirus B [HAdV-B]
caccauucuuaaacacacccuc

SEQ ID NO: 3905111 - RNA, 17 nt, Human adenovirus B [HAdV-B]
ccaaccaagcaaugcaa

SEQ ID NO: 3905112 - RNA, 16 nt, Human adenovirus B [HAdV-B]
ccaagaugcuggaaau

SEQ ID NO: 3905113 - RNA, 16 nt, Human adenovirus B [HAdV-B]
ccaaguagcaguuuac

SEQ ID NO: 3905114 - RNA, 17 nt, Human adenovirus B [HAdV-B]
ccaauuaucgcugcugc

SEQ ID NO: 3905115 - RNA, 17 nt, Human adenovirus B [HAdV-B]
ccacagggucuccagcu

SEQ ID NO: 3905116 - RNA, 14 nt, Human adenovirus B [HAdV-B]
ccaccacaccacuc

SEQ ID NO: 3905117 - RNA, 21 nt, Human adenovirus B [HAdV-B]
ccacccuaugucgucacaggc

SEQ ID NO: 3905118 - RNA, 21 nt, Human adenovirus B [HAdV-B]
ccagcgccaugacagacagag

SEQ ID NO: 3905119 - RNA, 15 nt, Human adenovirus B [HAdV-B]
ccagggucucagugu

SEQ ID NO: 3905120 - RNA, 15 nt, Human adenovirus B [HAdV-B]
ccagucgccguagcc

SEQ ID NO: 3905121 - RNA, 23 nt, Human adenovirus B [HAdV-B]
ccauaaccuacuacgccugcugc

SEQ ID NO: 3905122 - RNA, 20 nt, Human adenovirus B [HAdV-B]
ccaucuauuauuccuacucc

SEQ ID NO: 3905123 - RNA, 14 nt, Human adenovirus B [HAdV-B]
ccaugacagacaga

SEQ ID NO: 3905124 - RNA, 21 nt, Human adenovirus B [HAdV-B]
ccauguucaugagcaaacagu

SEQ ID NO: 3905125 - RNA, 18 nt, Human adenovirus B [HAdV-B]
ccauuagauauagacaug

SEQ ID NO: 3905126 - RNA, 14 nt, Human adenovirus B [HAdV-B]
ccauuaggaggcgc

SEQ ID NO: 3905127 - RNA, 23 nt, Human adenovirus B [HAdV-B]
ccauucucgagcugccagugcgc

SEQ ID NO: 3905128 - RNA, 17 nt, Human adenovirus B [HAdV-B]
ccauucuuaaacacacc

SEQ ID NO: 3905129 - RNA, 16 nt, Human adenovirus B [HAdV-B]
ccauuguguucuccua

SEQ ID NO: 3905130 - RNA, 16 nt, Human adenovirus B [HAdV-B]
cccaaugcaacaugac

SEQ ID NO: 3905131 - RNA, 16 nt, Human adenovirus B [HAdV-B]
cccagcagcaccucac

SEQ ID NO: 3905132 - RNA, 21 nt, Human adenovirus B [HAdV-B]
cccauggaugagcccacccug

SEQ ID NO: 3905133 - RNA, 15 nt, Human adenovirus B [HAdV-B]
ccccagcagccaagg

SEQ ID NO: 3905134 - RNA, 17 nt, Human adenovirus B [HAdV-B]
agaauuucuacugaaaa

SEQ ID NO: 3905135 - RNA, 20 nt, Human adenovirus B [HAdV-B]
aaaaauuucccaaacaaugg

SEQ ID NO: 3905136 - RNA, 12 nt, Human adenovirus B [HAdV-B]
aaaacaggacua

SEQ ID NO: 3905137 - RNA, 14 nt, Human adenovirus B [HAdV-B]
aaaaucaauucaca

SEQ ID NO: 3905138 - RNA, 19 nt, Human adenovirus B [HAdV-B]
aaacaccguuucuggggcg

SEQ ID NO: 3905139 - RNA, 13 nt, Human adenovirus B [HAdV-B]
aaaccugcugcuu

SEQ ID NO: 3905140 - RNA, 20 nt, Human adenovirus B [HAdV-B]
cacuggcugcccccaccugg

SEQ ID NO: 3905141 - RNA, 22 nt, Human adenovirus B [HAdV-B]
cacugguuuuuauugcuuuuug

SEQ ID NO: 3905142 - RNA, 20 nt, Human adenovirus B [HAdV-B]
cacuguauuacuuccucgag

SEQ ID NO: 3905143 - RNA, 19 nt, Human adenovirus B [HAdV-B]
cacuuagaagauacugagc

SEQ ID NO: 3905144 - RNA, 17 nt, Human adenovirus B [HAdV-B]
cagaacaaggaagacca

SEQ ID NO: 3905145 - RNA, 20 nt, Human adenovirus B [HAdV-B]
cagaaccuauuuagagacag

SEQ ID NO: 3905146 - RNA, 14 nt, Human adenovirus B [HAdV-B]
cagaacuugaaaga

SEQ ID NO: 3905147 - RNA, 18 nt, Human adenovirus B [HAdV-B]
cagaaugacccgcaggca

SEQ ID NO: 3905148 - RNA, 13 nt, Human adenovirus B [HAdV-B]
cagacacaucacu

SEQ ID NO: 3905149 - RNA, 23 nt, Human adenovirus B [HAdV-B]
cagaccauuaacuuugaugaacg

SEQ ID NO: 3905150 - RNA, 14 nt, Human adenovirus B [HAdV-B]
cagaggaacacauu

SEQ ID NO: 3905151 - RNA, 11 nt, Human adenovirus B [HAdV-B]
cagaggcuggu

SEQ ID NO: 3905152 - RNA, 16 nt, Human adenovirus B [HAdV-B]
cagauguacgcgaagc

SEQ ID NO: 3905153 - RNA, 14 nt, Human adenovirus B [HAdV-B]
cagcagcaccucac

SEQ ID NO: 3905154 - RNA, 19 nt, Human adenovirus B [HAdV-B]
cagcagcaggcgacggcgg

SEQ ID NO: 3905155 - RNA, 20 nt, Human adenovirus B [HAdV-B]
cagcaguacaggacaggcgc

SEQ ID NO: 3905156 - RNA, 22 nt, Human adenovirus B [HAdV-B]
cagcauuaucgcugcagugaca

SEQ ID NO: 3905157 - RNA, 12 nt, Human adenovirus B [HAdV-B]
cagccaacgagc

SEQ ID NO: 3905158 - RNA, 20 nt, Human adenovirus B [HAdV-B]
cagccauggcuuaccagaca

SEQ ID NO: 3905159 - RNA, 19 nt, Human adenovirus B [HAdV-B]
cagccccccucgcagcagc

SEQ ID NO: 3905160 - RNA, 15 nt, Human adenovirus B [HAdV-B]
cagccuguacuucuc

SEQ ID NO: 3905161 - RNA, 22 nt, Human adenovirus B [HAdV-B]
cagccuguacuucuccaucagc

SEQ ID NO: 3905162 - RNA, 23 nt, Human adenovirus B [HAdV-B]
cagcgccaugacagacagagggg

SEQ ID NO: 3905163 - RNA, 14 nt, Human adenovirus B [HAdV-B]
cagcugcugcagaa

SEQ ID NO: 3905164 - RNA, 12 nt, Human adenovirus B [HAdV-B]
caggaacugaaa

SEQ ID NO: 3905165 - RNA, 13 nt, Human adenovirus B [HAdV-B]
caggaacugaaaa

SEQ ID NO: 3905166 - RNA, 15 nt, Human adenovirus B [HAdV-B]
caggacagaaacaca

SEQ ID NO: 3905167 - RNA, 22 nt, Human adenovirus B [HAdV-B]
caggacaggcgcuuagaaauaa

SEQ ID NO: 3905168 - RNA, 16 nt, Human adenovirus B [HAdV-B]
caggacuacuccaccc

SEQ ID NO: 3905169 - RNA, 20 nt, Human adenovirus B [HAdV-B]
caggagaaauauucacugga

SEQ ID NO: 3905170 - RNA, 15 nt, Human adenovirus B [HAdV-B]
caggaucacagagac

SEQ ID NO: 3905171 - RNA, 15 nt, Human adenovirus B [HAdV-B]
caggcagcagcuccu

SEQ ID NO: 3905172 - RNA, 14 nt, Human adenovirus B [HAdV-B]
caggcggcugaccg

SEQ ID NO: 3905173 - RNA, 19 nt, Human adenovirus B [HAdV-B]
cagggcacacguggcugca

SEQ ID NO: 3905174 - RNA, 21 nt, Human adenovirus B [HAdV-B]
caggguuguuuccgucacagu

SEQ ID NO: 3905175 - RNA, 15 nt, Human adenovirus B [HAdV-B]
cagguggacgagcag

SEQ ID NO: 3905176 - RNA, 15 nt, Human adenovirus B [HAdV-B]
cagguuaucgcaccu

SEQ ID NO: 3905177 - RNA, 17 nt, Human adenovirus B [HAdV-B]
cagguuaucgcaccuga

SEQ ID NO: 3905178 - RNA, 18 nt, Human adenovirus B [HAdV-B]
caguacugguaacauggg

SEQ ID NO: 3905179 - RNA, 22 nt, Human adenovirus B [HAdV-B]
caguagaugggacgagaccgga

SEQ ID NO: 3905180 - RNA, 13 nt, Human adenovirus B [HAdV-B]
cagucaggcagag

SEQ ID NO: 3905181 - RNA, 16 nt, Human adenovirus B [HAdV-B]
cagucaggcagaggag

SEQ ID NO: 3905182 - RNA, 17 nt, Human adenovirus B [HAdV-B]
caguccugccaccaccu

SEQ ID NO: 3905183 - RNA, 11 nt, Human adenovirus B [HAdV-B]
cagucuccugc

SEQ ID NO: 3905184 - RNA, 13 nt, Human adenovirus B [HAdV-B]
cagucuggaggac

SEQ ID NO: 3905185 - RNA, 13 nt, Human adenovirus B [HAdV-B]
cagugcaggcagc

SEQ ID NO: 3905186 - RNA, 17 nt, Human adenovirus B [HAdV-B]
cagugcaggcagcagcu

SEQ ID NO: 3905187 - RNA, 21 nt, Human adenovirus B [HAdV-B]
caguggucagugaugagcagc

SEQ ID NO: 3905188 - RNA, 13 nt, Human adenovirus B [HAdV-B]
caguguaacauga

SEQ ID NO: 3905189 - RNA, 22 nt, Human adenovirus B [HAdV-B]
caguuagcuggcggcuccaccc

SEQ ID NO: 3905190 - RNA, 14 nt, Human adenovirus B [HAdV-B]
caguuucacauucc

SEQ ID NO: 3905191 - RNA, 19 nt, Human adenovirus B [HAdV-B]
cauaaucauugcagccaug

SEQ ID NO: 3905192 - RNA, 17 nt, Human adenovirus B [HAdV-B]
cauaggagcuggcuuuc

SEQ ID NO: 3905193 - RNA, 17 nt, Human adenovirus B [HAdV-B]
cauaguuauguuccuga

SEQ ID NO: 3905194 - RNA, 15 nt, Human adenovirus B [HAdV-B]
cauaucagccagaac

SEQ ID NO: 3905195 - RNA, 21 nt, Human adenovirus B [HAdV-B]
caucaaccucuaugcuacuuu

SEQ ID NO: 3905196 - RNA, 21 nt, Human adenovirus B [HAdV-B]
caucaccgaacccgaggggag

SEQ ID NO: 3905197 - RNA, 19 nt, Human adenovirus B [HAdV-B]
cauccaccggucaugccag

SEQ ID NO: 3905198 - RNA, 20 nt, Human adenovirus B [HAdV-B]
caucccgaauaccgcaacca

SEQ ID NO: 3905199 - RNA, 19 nt, Human adenovirus B [HAdV-B]
caucuagugguacugaugc

SEQ ID NO: 3905200 - RNA, 12 nt, Human adenovirus B [HAdV-B]
caucuuccagca

SEQ ID NO: 3905201 - RNA, 20 nt, Human adenovirus B [HAdV-B]
caucuuuuuuaaaaaucaaa

SEQ ID NO: 3905202 - RNA, 14 nt, Human adenovirus B [HAdV-B]
caugaaagccuuug

SEQ ID NO: 3905203 - RNA, 19 nt, Human adenovirus B [HAdV-B]
caugaaagccuuugcuguc

SEQ ID NO: 3905204 - RNA, 18 nt, Human adenovirus B [HAdV-B]
caugaauuggcucagcgc

SEQ ID NO: 3905205 - RNA, 16 nt, Human adenovirus B [HAdV-B]
caugcaugacccagau

SEQ ID NO: 3905206 - RNA, 16 nt, Human adenovirus B [HAdV-B]
cauggaaaucccaccc

SEQ ID NO: 3905207 - RNA, 13 nt, Human adenovirus B [HAdV-B]
caugggcaccugg

SEQ ID NO: 3905208 - RNA, 19 nt, Human adenovirus B [HAdV-B]
cauggguauucugcaugag

SEQ ID NO: 3905209 - RNA, 14 nt, Human adenovirus B [HAdV-B]
cauguaugcagaaa

SEQ ID NO: 3905210 - RNA, 22 nt, Human adenovirus B [HAdV-B]
cauuagggguguguuggacaga

SEQ ID NO: 3905211 - RNA, 17 nt, Human adenovirus B [HAdV-B]
cauugcuuauugcuugu

SEQ ID NO: 3905212 - RNA, 15 nt, Human adenovirus B [HAdV-B]
cauugucuuacugcc

SEQ ID NO: 3905213 - RNA, 18 nt, Human adenovirus B [HAdV-B]
cauuguggagaacaugga

SEQ ID NO: 3905214 - RNA, 18 nt, Human adenovirus B [HAdV-B]
cauuuucgcgcuccaugg

SEQ ID NO: 3905215 - RNA, 22 nt, Human adenovirus B [HAdV-B]
ccaaaacaacgagcagauaacu

SEQ ID NO: 3905216 - RNA, 14 nt, Human adenovirus B [HAdV-B]
ccaaacgccagaag

SEQ ID NO: 3905217 - RNA, 16 nt, Human adenovirus B [HAdV-B]
ccaaacggcaccugcg

SEQ ID NO: 3905218 - RNA, 11 nt, Human adenovirus B [HAdV-B]
ccaacaccugu

SEQ ID NO: 3905219 - RNA, 22 nt, Human adenovirus B [HAdV-B]
ccaacaccuuaaucccagaaau

SEQ ID NO: 3905220 - RNA, 23 nt, Human adenovirus B [HAdV-B]
ccaacgguuuuuugaaagaaaac

SEQ ID NO: 3905221 - RNA, 17 nt, Human adenovirus B [HAdV-B]
ccaauauuuuugcuucu

SEQ ID NO: 3905222 - RNA, 16 nt, Human adenovirus B [HAdV-B]
ccaccagguuguaucu

SEQ ID NO: 3905223 - RNA, 21 nt, Human adenovirus B [HAdV-B]
ccacccucgauuaugcaaggu

SEQ ID NO: 3905224 - RNA, 15 nt, Human adenovirus B [HAdV-B]
ccaccuccacugaag

SEQ ID NO: 3905225 - RNA, 19 nt, Human adenovirus B [HAdV-B]
ccacgccuuacauguggag

SEQ ID NO: 3905226 - RNA, 18 nt, Human adenovirus B [HAdV-B]
ccacuagacaagucagua

SEQ ID NO: 3905227 - RNA, 13 nt, Human adenovirus B [HAdV-B]
ccagaaaacaaaa

SEQ ID NO: 3905228 - RNA, 14 nt, Human adenovirus B [HAdV-B]
ccagaaaacaaaaa

SEQ ID NO: 3905229 - RNA, 16 nt, Human adenovirus B [HAdV-B]
ccagacaaaguacagc

SEQ ID NO: 3905230 - RNA, 19 nt, Human adenovirus B [HAdV-B]
ccagaccauuaacuuugau

SEQ ID NO: 3905231 - RNA, 17 nt, Human adenovirus B [HAdV-B]
ccagacucgcaguacuc

SEQ ID NO: 3905232 - RNA, 12 nt, Human adenovirus B [HAdV-B]
ccagcagcggca

SEQ ID NO: 3905233 - RNA, 20 nt, Human adenovirus B [HAdV-B]
ccagcgugaugccaaccugg

SEQ ID NO: 3905234 - RNA, 13 nt, Human adenovirus B [HAdV-B]
ccagggucucagu

SEQ ID NO: 3905235 - RNA, 15 nt, Human adenovirus B [HAdV-B]
ccagguggucucugg

SEQ ID NO: 3905236 - RNA, 15 nt, Human adenovirus B [HAdV-B]
gaugaaaacugccca

SEQ ID NO: 3905237 - RNA, 22 nt, Human adenovirus B [HAdV-B]
gaugaaaccuucucaguugcau

SEQ ID NO: 3905238 - RNA, 14 nt, Human adenovirus B [HAdV-B]
gaugaaaugacagg

SEQ ID NO: 3905239 - RNA, 14 nt, Human adenovirus B [HAdV-B]
gaugagacaguguc

SEQ ID NO: 3905240 - RNA, 13 nt, Human adenovirus B [HAdV-B]
gaugagaggccuu

SEQ ID NO: 3905241 - RNA, 19 nt, Human adenovirus B [HAdV-B]
gaugcaauccccacuggag

SEQ ID NO: 3905242 - RNA, 23 nt, Human adenovirus B [HAdV-B]
gaugcggcaucgcagaaaacaaa

SEQ ID NO: 3905243 - RNA, 15 nt, Human adenovirus B [HAdV-B]
gauggccguggugcu

SEQ ID NO: 3905244 - RNA, 20 nt, Human adenovirus B [HAdV-B]
gaugucucacgcuugccagc

SEQ ID NO: 3905245 - RNA, 14 nt, Human adenovirus B [HAdV-B]
gauucucacuugcc

SEQ ID NO: 3905246 - RNA, 18 nt, Human adenovirus B [HAdV-B]
gauucuuaacagugcagg

SEQ ID NO: 3905247 - RNA, 12 nt, Human adenovirus B [HAdV-B]
gauugcuggaau

SEQ ID NO: 3905248 - RNA, 16 nt, Human adenovirus B [HAdV-B]
gauuuuggcuggaaug

SEQ ID NO: 3905249 - RNA, 18 nt, Human adenovirus B [HAdV-B]
gcaaacucgaagagaauc

SEQ ID NO: 3905250 - RNA, 18 nt, Human adenovirus B [HAdV-B]
gcaaagccuacugccacc

SEQ ID NO: 3905251 - RNA, 14 nt, Human adenovirus B [HAdV-B]
gcaacauacaaaau

SEQ ID NO: 3905252 - RNA, 21 nt, Human adenovirus B [HAdV-B]
gcaacuccgacugcagcacug

SEQ ID NO: 3905253 - RNA, 14 nt, Human adenovirus B [HAdV-B]
gcaagggggccacc

SEQ ID NO: 3905254 - RNA, 13 nt, Human adenovirus B [HAdV-B]
gcaaguggaggaa

SEQ ID NO: 3905255 - RNA, 14 nt, Human adenovirus B [HAdV-B]
gcaaugacagaaug

SEQ ID NO: 3905256 - RNA, 16 nt, Human adenovirus B [HAdV-B]
gcacaacuacuuucuc

SEQ ID NO: 3905257 - RNA, 14 nt, Human adenovirus B [HAdV-B]
gcacccgucccccu

SEQ ID NO: 3905258 - RNA, 22 nt, Human adenovirus B [HAdV-B]
gcaccgucgcuuccgaccuggc

SEQ ID NO: 3905259 - RNA, 15 nt, Human adenovirus B [HAdV-B]
gcacuggacaugaca

SEQ ID NO: 3905260 - RNA, 22 nt, Human adenovirus B [HAdV-B]
gcacuuagaagauacugagcag

SEQ ID NO: 3905261 - RNA, 18 nt, Human adenovirus B [HAdV-B]
gcagaccucaucuuccca

SEQ ID NO: 3905262 - RNA, 22 nt, Human adenovirus B [HAdV-B]
gcagagucggggucaagagcag

SEQ ID NO: 3905263 - RNA, 17 nt, Human adenovirus B [HAdV-B]
gcagcacuggacaugac

SEQ ID NO: 3905264 - RNA, 15 nt, Human adenovirus B [HAdV-B]
gcagcagcaaucaca

SEQ ID NO: 3905265 - RNA, 12 nt, Human adenovirus B [HAdV-B]
gcagccaaggcg

SEQ ID NO: 3905266 - RNA, 20 nt, Human adenovirus B [HAdV-B]
gcagcuccuuuagccagagg

SEQ ID NO: 3905267 - RNA, 18 nt, Human adenovirus B [HAdV-B]
gcaggacagaaacacaga

SEQ ID NO: 3905268 - RNA, 12 nt, Human adenovirus B [HAdV-B]
gcaggcagcagc

SEQ ID NO: 3905269 - RNA, 18 nt, Human adenovirus B [HAdV-B]
gcaggcgccucccaggac

SEQ ID NO: 3905270 - RNA, 22 nt, Human adenovirus B [HAdV-B]
gcaggggacgcuacagugcagu

SEQ ID NO: 3905271 - RNA, 20 nt, Human adenovirus B [HAdV-B]
gcaguacaagcgcagaccuc

SEQ ID NO: 3905272 - RNA, 15 nt, Human adenovirus B [HAdV-B]
gcaguaucuggagcg

SEQ ID NO: 3905273 - RNA, 18 nt, Human adenovirus B [HAdV-B]
gcaguuauugacagugua

SEQ ID NO: 3905274 - RNA, 21 nt, Human adenovirus B [HAdV-B]
gcaguuggggauacuuaugau

SEQ ID NO: 3905275 - RNA, 15 nt, Human adenovirus B [HAdV-B]
gcaucucaugacaug

SEQ ID NO: 3905276 - RNA, 18 nt, Human adenovirus B [HAdV-B]
gcaucucaugacaugcag

SEQ ID NO: 3905277 - RNA, 20 nt, Human adenovirus B [HAdV-B]
gcauuaucgcugcagugaca

SEQ ID NO: 3905278 - RNA, 15 nt, Human adenovirus B [HAdV-B]
gcauuauuggacaga

SEQ ID NO: 3905279 - RNA, 20 nt, Human adenovirus B [HAdV-B]
gccaccuccacugaagugca

SEQ ID NO: 3905280 - RNA, 22 nt, Human adenovirus B [HAdV-B]
gccaccucguucaucauuuccc

SEQ ID NO: 3905281 - RNA, 21 nt, Human adenovirus B [HAdV-B]
gccagacucgcaguacucaag

SEQ ID NO: 3905282 - RNA, 17 nt, Human adenovirus B [HAdV-B]
gccagcacccagaccau

SEQ ID NO: 3905283 - RNA, 21 nt, Human adenovirus B [HAdV-B]
gccagggcacacguggcugca

SEQ ID NO: 3905284 - RNA, 20 nt, Human adenovirus B [HAdV-B]
gccaucaucuccugcuugca

SEQ ID NO: 3905285 - RNA, 19 nt, Human adenovirus B [HAdV-B]
gccaucuuccagcagaguc

SEQ ID NO: 3905286 - RNA, 20 nt, Human adenovirus B [HAdV-B]
gccauucucgagcugccagu

SEQ ID NO: 3905287 - RNA, 13 nt, Human adenovirus B [HAdV-B]
gccauuugccauu

SEQ ID NO: 3905288 - RNA, 21 nt, Human adenovirus B [HAdV-B]
gcccaaucgcgaagaggcaau

SEQ ID NO: 3905289 - RNA, 18 nt, Human adenovirus B [HAdV-B]
gcccaucaguguggaaga

SEQ ID NO: 3905290 - RNA, 20 nt, Human adenovirus B [HAdV-B]
gccccuacuauagccagcaa

SEQ ID NO: 3905291 - RNA, 16 nt, Human adenovirus B [HAdV-B]
gcccucaagggccgca

SEQ ID NO: 3905292 - RNA, 11 nt, Human adenovirus B [HAdV-B]
gccggacagga

SEQ ID NO: 3905293 - RNA, 17 nt, Human adenovirus B [HAdV-B]
gccguagacgccagcgc

SEQ ID NO: 3905294 - RNA, 16 nt, Human adenovirus B [HAdV-B]
gccuacugccaccucc

SEQ ID NO: 3905295 - RNA, 23 nt, Human adenovirus B [HAdV-B]
gccuggacccuccaguggaggag

SEQ ID NO: 3905296 - RNA, 20 nt, Human adenovirus B [HAdV-B]
gcgacagggaacugaugcac

SEQ ID NO: 3905297 - RNA, 17 nt, Human adenovirus B [HAdV-B]
gcgccgcgacggcagga

SEQ ID NO: 3905298 - RNA, 19 nt, Human adenovirus B [HAdV-B]
gcgcgguuagcgccagcag

SEQ ID NO: 3905299 - RNA, 22 nt, Human adenovirus B [HAdV-B]
gcgcgguuagcgccagcaggag

SEQ ID NO: 3905300 - RNA, 20 nt, Human adenovirus B [HAdV-B]
gcgcuuugggacaggaagac

SEQ ID NO: 3905301 - RNA, 17 nt, Human adenovirus B [HAdV-B]
gcggaguagcugacuug

SEQ ID NO: 3905302 - RNA, 18 nt, Human adenovirus B [HAdV-B]
gcggaugacuggcagaac

SEQ ID NO: 3905303 - RNA, 14 nt, Human adenovirus B [HAdV-B]
gcggcgauagaaug

SEQ ID NO: 3905304 - RNA, 14 nt, Human adenovirus B [HAdV-B]
gcgggucgugagcu

SEQ ID NO: 3905305 - RNA, 17 nt, Human adenovirus B [HAdV-B]
gcguccagcgcugccag

SEQ ID NO: 3905306 - RNA, 21 nt, Human adenovirus B [HAdV-B]
gcuaacccgauggcugggcac

SEQ ID NO: 3905307 - RNA, 12 nt, Human adenovirus B [HAdV-B]
gcuacugcugua

SEQ ID NO: 3905308 - RNA, 14 nt, Human adenovirus B [HAdV-B]
gcuauacuaccaau

SEQ ID NO: 3905309 - RNA, 13 nt, Human adenovirus B [HAdV-B]
gcucaccaccuca

SEQ ID NO: 3905310 - RNA, 17 nt, Human adenovirus B [HAdV-B]
gcuccagcaaaaacaag

SEQ ID NO: 3905311 - RNA, 19 nt, Human adenovirus B [HAdV-B]
gcucccuuugugccuccgc

SEQ ID NO: 3905312 - RNA, 20 nt, Human adenovirus B [HAdV-B]
gcuccgguauccugcccgcc

SEQ ID NO: 3905313 - RNA, 18 nt, Human adenovirus B [HAdV-B]
gcuccuucugaaucauaa

SEQ ID NO: 3905314 - RNA, 22 nt, Human adenovirus B [HAdV-B]
gcucuaccccauuccugccaau

SEQ ID NO: 3905315 - RNA, 17 nt, Human adenovirus B [HAdV-B]
gcugccccgaaaccagu

SEQ ID NO: 3905316 - RNA, 15 nt, Human adenovirus B [HAdV-B]
gcugcgcacugcccu

SEQ ID NO: 3905317 - RNA, 22 nt, Human adenovirus B [HAdV-B]
gcuggaaccgagggugagaauu

SEQ ID NO: 3905318 - RNA, 15 nt, Human adenovirus B [HAdV-B]
gcuggcggcuccacc

SEQ ID NO: 3905319 - RNA, 18 nt, Human adenovirus B [HAdV-B]
gcuguuucugguggugca

SEQ ID NO: 3905320 - RNA, 14 nt, Human adenovirus B [HAdV-B]
gcuuacaacucccu

SEQ ID NO: 3905321 - RNA, 15 nt, Human adenovirus B [HAdV-B]
gcuucgugcccguug

SEQ ID NO: 3905322 - RNA, 19 nt, Human adenovirus B [HAdV-B]
gcuugggcgcuugccaggg

SEQ ID NO: 3905323 - RNA, 20 nt, Human adenovirus B [HAdV-B]
ggaaaacgaggaggcagagg

SEQ ID NO: 3905324 - RNA, 12 nt, Human adenovirus B [HAdV-B]
ggaaauggggcu

SEQ ID NO: 3905325 - RNA, 20 nt, Human adenovirus B [HAdV-B]
ggaacaaagcuuggaacagc

SEQ ID NO: 3905326 - RNA, 15 nt, Human adenovirus B [HAdV-B]
ggaacacgaggaaga

SEQ ID NO: 3905327 - RNA, 14 nt, Human adenovirus B [HAdV-B]
ggaagacugauggc

SEQ ID NO: 3905328 - RNA, 22 nt, Human adenovirus B [HAdV-B]
ggaauguuuaugccuuaccagu

SEQ ID NO: 3905329 - RNA, 21 nt, Human adenovirus B [HAdV-B]
ggacagaggucccaguuucaa

SEQ ID NO: 3905330 - RNA, 18 nt, Human adenovirus B [HAdV-B]
ggacauugcuucucugaa

SEQ ID NO: 3905331 - RNA, 14 nt, Human adenovirus B [HAdV-B]
ggacuacuccaccc

SEQ ID NO: 3905332 - RNA, 20 nt, Human adenovirus B [HAdV-B]
ggaggcagaggagguggaag

SEQ ID NO: 3905333 - RNA, 23 nt, Human adenovirus B [HAdV-B]
ggaggcagggcucucaaacccga

SEQ ID NO: 3905334 - RNA, 15 nt, Human adenovirus B [HAdV-B]
ggaggcuauguggga

SEQ ID NO: 3905335 - RNA, 12 nt, Human adenovirus B [HAdV-B]
ggagggcagaaa

SEQ ID NO: 3905336 - RNA, 22 nt, Human adenovirus B [HAdV-B]
ggaugggugagugcagaggcau

SEQ ID NO: 3905337 - RNA, 12 nt, Human adenovirus B [HAdV-B]
ggauuuggaaga

SEQ ID NO: 3905338 - RNA, 15 nt, Human adenovirus B [HAdV-B]
cggaggaggacaguc

SEQ ID NO: 3905339 - RNA, 17 nt, Human adenovirus B [HAdV-B]
cggaggguccuccuccu

SEQ ID NO: 3905340 - RNA, 18 nt, Human adenovirus B [HAdV-B]
cggcaacugccgucuucu

SEQ ID NO: 3905341 - RNA, 15 nt, Human adenovirus B [HAdV-B]
cggccagacgugcag

SEQ ID NO: 3905342 - RNA, 14 nt, Human adenovirus B [HAdV-B]
cggcgcugcagagc

SEQ ID NO: 3905343 - RNA, 15 nt, Human adenovirus B [HAdV-B]
cgggcggcgcugcag

SEQ ID NO: 3905344 - RNA, 21 nt, Human adenovirus B [HAdV-B]
cggguuaaaaaggacaaaaaa

SEQ ID NO: 3905345 - RNA, 18 nt, Human adenovirus B [HAdV-B]
cgguucaggccucgcaac

SEQ ID NO: 3905346 - RNA, 18 nt, Human adenovirus B [HAdV-B]
cguagaggaauguuuaug

SEQ ID NO: 3905347 - RNA, 22 nt, Human adenovirus B [HAdV-B]
cgucagugaaaacguuccugcu

SEQ ID NO: 3905348 - RNA, 22 nt, Human adenovirus B [HAdV-B]
cgucgccguagacgcacaagca

SEQ ID NO: 3905349 - RNA, 12 nt, Human adenovirus B [HAdV-B]
cgucgcugcuuu

SEQ ID NO: 3905350 - RNA, 15 nt, Human adenovirus B [HAdV-B]
cgugaugcagcagca

SEQ ID NO: 3905351 - RNA, 14 nt, Human adenovirus B [HAdV-B]
cgugcugcacagca

SEQ ID NO: 3905352 - RNA, 18 nt, Human adenovirus B [HAdV-B]
cguguuacccaguugaaa

SEQ ID NO: 3905353 - RNA, 15 nt, Human adenovirus B [HAdV-B]
cguguugcucaggca

SEQ ID NO: 3905354 - RNA, 20 nt, Human adenovirus B [HAdV-B]
cuaaaggcgcuccaaauaca

SEQ ID NO: 3905355 - RNA, 23 nt, Human adenovirus B [HAdV-B]
cuaacaaccacaggcggaucucu

SEQ ID NO: 3905356 - RNA, 15 nt, Human adenovirus B [HAdV-B]
cuaaugauugcaaau

SEQ ID NO: 3905357 - RNA, 18 nt, Human adenovirus B [HAdV-B]
cuacacaguguacguagc

SEQ ID NO: 3905358 - RNA, 18 nt, Human adenovirus B [HAdV-B]
cuacaucuacuguggaug

SEQ ID NO: 3905359 - RNA, 13 nt, Human adenovirus B [HAdV-B]
cuaccgccagugc

SEQ ID NO: 3905360 - RNA, 19 nt, Human adenovirus B [HAdV-B]
cuacggaagccagcaccca

SEQ ID NO: 3905361 - RNA, 16 nt, Human adenovirus B [HAdV-B]
cuacuggucgcuucca

SEQ ID NO: 3905362 - RNA, 17 nt, Human adenovirus B [HAdV-B]
cuagaucgugggccaug

SEQ ID NO: 3905363 - RNA, 21 nt, Human adenovirus B [HAdV-B]
cuaggacaaagcgugcugcac

SEQ ID NO: 3905364 - RNA, 14 nt, Human adenovirus B [HAdV-B]
cuaggcaacuguua

SEQ ID NO: 3905365 - RNA, 11 nt, Human adenovirus B [HAdV-B]
cuaggcagaga

SEQ ID NO: 3905366 - RNA, 19 nt, Human adenovirus B [HAdV-B]
cuaucagaaugaccacagc

SEQ ID NO: 3905367 - RNA, 18 nt, Human adenovirus B [HAdV-B]
cuaucuguaccugugcca

SEQ ID NO: 3905368 - RNA, 23 nt, Human adenovirus B [HAdV-B]
cuaugacuauugauuugaugaac

SEQ ID NO: 3905369 - RNA, 21 nt, Human adenovirus B [HAdV-B]
cuauggagucacugcuaccug

SEQ ID NO: 3905370 - RNA, 14 nt, Human adenovirus B [HAdV-B]
cuauuuagagacag

SEQ ID NO: 3905371 - RNA, 22 nt, Human adenovirus B [HAdV-B]
cucaacacaagguucccucagg

SEQ ID NO: 3905372 - RNA, 15 nt, Human adenovirus B [HAdV-B]
cucaaugcuucuuuu

SEQ ID NO: 3905373 - RNA, 21 nt, Human adenovirus B [HAdV-B]
cucacuauucaaccuguagaa

SEQ ID NO: 3905374 - RNA, 20 nt, Human adenovirus B [HAdV-B]
cucauauuugucagcauugu

SEQ ID NO: 3905375 - RNA, 16 nt, Human adenovirus B [HAdV-B]
cuccagcaaaaacaag

SEQ ID NO: 3905376 - RNA, 22 nt, Human adenovirus B [HAdV-B]
cucccagcagcaccucacuucc

SEQ ID NO: 3905377 - RNA, 13 nt, Human adenovirus B [HAdV-B]
cucccaggacuac

SEQ ID NO: 3905378 - RNA, 14 nt, Human adenovirus B [HAdV-B]
cucccccugcugcu

SEQ ID NO: 3905379 - RNA, 13 nt, Human adenovirus B [HAdV-B]
cuccuaggcagag

SEQ ID NO: 3905380 - RNA, 23 nt, Human adenovirus B [HAdV-B]
cucgagcaacuucaugucuaugg

SEQ ID NO: 3905381 - RNA, 21 nt, Human adenovirus B [HAdV-B]
cucgcacuuagaagauacuga

SEQ ID NO: 3905382 - RNA, 15 nt, Human adenovirus B [HAdV-B]
cucuagcagcagugu

SEQ ID NO: 3905383 - RNA, 20 nt, Human adenovirus B [HAdV-B]
cucucccagggauuuggaag

SEQ ID NO: 3905384 - RNA, 19 nt, Human adenovirus B [HAdV-B]
cucugacuggagcuggaac

SEQ ID NO: 3905385 - RNA, 15 nt, Human adenovirus B [HAdV-B]
cucugggaugcaaau

SEQ ID NO: 3905386 - RNA, 17 nt, Human adenovirus B [HAdV-B]
cucuuccagaaaacaaa

SEQ ID NO: 3905387 - RNA, 14 nt, Human adenovirus B [HAdV-B]
cucuuccucacugu

SEQ ID NO: 3905388 - RNA, 11 nt, Human adenovirus B [HAdV-B]
cucuuucugau

SEQ ID NO: 3905389 - RNA, 15 nt, Human adenovirus B [HAdV-B]
cugacacuccugguc

SEQ ID NO: 3905390 - RNA, 15 nt, Human adenovirus B [HAdV-B]
cugacuugcaguggc

SEQ ID NO: 3905391 - RNA, 13 nt, Human adenovirus B [HAdV-B]
cugacuugucucc

SEQ ID NO: 3905392 - RNA, 19 nt, Human adenovirus B [HAdV-B]
cugacuuuaugagccagag

SEQ ID NO: 3905393 - RNA, 21 nt, Human adenovirus B [HAdV-B]
cugauuauuucaccaaugcca

SEQ ID NO: 3905394 - RNA, 21 nt, Human adenovirus B [HAdV-B]
cugcaacgaauuuucucccag

SEQ ID NO: 3905395 - RNA, 15 nt, Human adenovirus B [HAdV-B]
cugcaaucugugcac

SEQ ID NO: 3905396 - RNA, 13 nt, Human adenovirus B [HAdV-B]
cugcacagcaccc

SEQ ID NO: 3905397 - RNA, 23 nt, Human adenovirus B [HAdV-B]
cugcacagccggcaucauucaca

SEQ ID NO: 3905398 - RNA, 18 nt, Human adenovirus B [HAdV-B]
cugccaugcgagccgcaa

SEQ ID NO: 3905399 - RNA, 18 nt, Human adenovirus B [HAdV-B]
cugcccaaaacaacgagc

SEQ ID NO: 3905400 - RNA, 18 nt, Human adenovirus B [HAdV-B]
cugcccgccaccugcugc

SEQ ID NO: 3905401 - RNA, 19 nt, Human adenovirus B [HAdV-B]
cugcggagcagagcagguc

SEQ ID NO: 3905402 - RNA, 18 nt, Human adenovirus B [HAdV-B]
cugcguauguagcauagu

SEQ ID NO: 3905403 - RNA, 22 nt, Human adenovirus B [HAdV-B]
cuggaacagaagacacaaguuc

SEQ ID NO: 3905404 - RNA, 20 nt, Human adenovirus B [HAdV-B]
cuggacuacuugcacagagc

SEQ ID NO: 3905405 - RNA, 22 nt, Human adenovirus B [HAdV-B]
cuggaggacagucuggaggaag

SEQ ID NO: 3905406 - RNA, 21 nt, Human adenovirus B [HAdV-B]
cuggaugguaccuucuaccug

SEQ ID NO: 3905407 - RNA, 15 nt, Human adenovirus B [HAdV-B]
cuggauuuccugcca

SEQ ID NO: 3905408 - RNA, 22 nt, Human adenovirus B [HAdV-B]
cuggcagaacaaggaagaccac

SEQ ID NO: 3905409 - RNA, 21 nt, Human adenovirus B [HAdV-B]
cuggccgagaagguggcugcc

SEQ ID NO: 3905410 - RNA, 21 nt, Human adenovirus B [HAdV-B]
cuguacuucuccaucagcaga

SEQ ID NO: 3905411 - RNA, 23 nt, Human adenovirus B [HAdV-B]
cuguacuucuccaucagcagaca

SEQ ID NO: 3905412 - RNA, 11 nt, Human adenovirus B [HAdV-B]
cuguggcuuuu

SEQ ID NO: 3905413 - RNA, 19 nt, Human adenovirus B [HAdV-B]
cuguuaaaaaccugcugcu

SEQ ID NO: 3905414 - RNA, 22 nt, Human adenovirus B [HAdV-B]
cuguuucugguggugcaacaca

SEQ ID NO: 3905415 - RNA, 21 nt, Human adenovirus B [HAdV-B]
cuuaaagaguaggcagcgacc

SEQ ID NO: 3905416 - RNA, 20 nt, Human adenovirus B [HAdV-B]
cuuaacagugcaggcagcag

SEQ ID NO: 3905417 - RNA, 14 nt, Human adenovirus B [HAdV-B]
cuuacgagcagaca

SEQ ID NO: 3905418 - RNA, 18 nt, Human adenovirus B [HAdV-B]
cuuacuugaaaucagcaa

SEQ ID NO: 3905419 - RNA, 16 nt, Human adenovirus B [HAdV-B]
cuucaacauccaggaa

SEQ ID NO: 3905420 - RNA, 21 nt, Human adenovirus B [HAdV-B]
cuuccaaggaugagacagugu

SEQ ID NO: 3905421 - RNA, 21 nt, Human adenovirus B [HAdV-B]
cuucccauuuaacagaauaca

SEQ ID NO: 3905422 - RNA, 18 nt, Human adenovirus B [HAdV-B]
cuucuccaucagcagaca

SEQ ID NO: 3905423 - RNA, 14 nt, Human adenovirus B [HAdV-B]
cuucuccugggcaa

SEQ ID NO: 3905424 - RNA, 22 nt, Human adenovirus B [HAdV-B]
cuucucgcaacugggcggcuuu

SEQ ID NO: 3905425 - RNA, 12 nt, Human adenovirus B [HAdV-B]
cuucuugcuuac

SEQ ID NO: 3905426 - RNA, 19 nt, Human adenovirus B [HAdV-B]
cuuucagaagacaugcaug

SEQ ID NO: 3905427 - RNA, 13 nt, Human adenovirus B [HAdV-B]
cuuucuaaaaaaa

SEQ ID NO: 3905428 - RNA, 18 nt, Human adenovirus B [HAdV-B]
cuuuuaaaacgcacugug

SEQ ID NO: 3905429 - RNA, 14 nt, Human adenovirus B [HAdV-B]
cuuuugcugugcca

SEQ ID NO: 3905430 - RNA, 14 nt, Human adenovirus B [HAdV-B]
gaaacgcuuucuag

SEQ ID NO: 3905431 - RNA, 22 nt, Human adenovirus B [HAdV-B]
gaaagcaucauauugcuugaaa

SEQ ID NO: 3905432 - RNA, 20 nt, Human adenovirus B [HAdV-B]
gaaagguuccagcgugaugc

SEQ ID NO: 3905433 - RNA, 15 nt, Human adenovirus B [HAdV-B]
gaaaguggguagaca

SEQ ID NO: 3905434 - RNA, 16 nt, Human adenovirus B [HAdV-B]
gaaaucuugaaaucac

SEQ ID NO: 3905435 - RNA, 23 nt, Human adenovirus B [HAdV-B]
gaacaauaccuuauccaccacau

SEQ ID NO: 3905436 - RNA, 15 nt, Human adenovirus B [HAdV-B]
gaacagcaagaggac

SEQ ID NO: 3905437 - RNA, 21 nt, Human adenovirus B [HAdV-B]
gaaccacacugccaacaccgc

SEQ ID NO: 3905438 - RNA, 16 nt, Human adenovirus B [HAdV-B]
gaacugaagugcccau

SEQ ID NO: 3905439 - RNA, 14 nt, Human adenovirus B [HAdV-B]
gaacugaugcacag

SEQ ID NO: 3905440 - RNA, 20 nt, Human adenovirus B [HAdV-B]
ugacagugccgguugagaug

SEQ ID NO: 3905441 - RNA, 21 nt, Human adenovirus B [HAdV-B]
ugacauaucugucaugcuuaa

SEQ ID NO: 3905442 - RNA, 19 nt, Human adenovirus B [HAdV-B]
ugaccaugacuuugagaaa

SEQ ID NO: 3905443 - RNA, 23 nt, Human adenovirus B [HAdV-B]
ugacguucccucaaaaacacacu

SEQ ID NO: 3905444 - RNA, 20 nt, Human adenovirus B [HAdV-B]
ugagcgccgcgacggcagga

SEQ ID NO: 3905445 - RNA, 16 nt, Human adenovirus B [HAdV-B]
ugagcugggaugggug

SEQ ID NO: 3905446 - RNA, 23 nt, Human adenovirus B [HAdV-B]
ugaggccugauaaacaguauaag

SEQ ID NO: 3905447 - RNA, 18 nt, Human adenovirus B [HAdV-B]
ugaguuuaauggcuagau

SEQ ID NO: 3905448 - RNA, 16 nt, Human adenovirus B [HAdV-B]
ugaucacaaugugaug

SEQ ID NO: 3905449 - RNA, 22 nt, Human adenovirus B [HAdV-B]
ugaugcaauccccacuggaggc

SEQ ID NO: 3905450 - RNA, 13 nt, Human adenovirus B [HAdV-B]
ugauugccacaga

SEQ ID NO: 3905451 - RNA, 17 nt, Human adenovirus B [HAdV-B]
ugauuugcggugcuucc

SEQ ID NO: 3905452 - RNA, 13 nt, Human adenovirus B [HAdV-B]
ugcaaaacaauga

SEQ ID NO: 3905453 - RNA, 21 nt, Human adenovirus B [HAdV-B]
ugcaacuggauuguguuucaa

SEQ ID NO: 3905454 - RNA, 12 nt, Human adenovirus B [HAdV-B]
ugcaagauaucu

SEQ ID NO: 3905455 - RNA, 18 nt, Human adenovirus B [HAdV-B]
ugcaccuacacccugcug

SEQ ID NO: 3905456 - RNA, 16 nt, Human adenovirus B [HAdV-B]
ugcagaaaucuuccca

SEQ ID NO: 3905457 - RNA, 19 nt, Human adenovirus B [HAdV-B]
ugcagacgguaaaucugag

SEQ ID NO: 3905458 - RNA, 23 nt, Human adenovirus B [HAdV-B]
ugcagaggcauacaugccacaga

SEQ ID NO: 3905459 - RNA, 20 nt, Human adenovirus B [HAdV-B]
ugcagcacuggacaugacag

SEQ ID NO: 3905460 - RNA, 16 nt, Human adenovirus B [HAdV-B]
ugcagcuaacaugcuc

SEQ ID NO: 3905461 - RNA, 16 nt, Human adenovirus B [HAdV-B]
ugcaggagcggagccu

SEQ ID NO: 3905462 - RNA, 20 nt, Human adenovirus B [HAdV-B]
ugccaccuccacugaagugc

SEQ ID NO: 3905463 - RNA, 23 nt, Human adenovirus B [HAdV-B]
ugccaccuccacugaagugcaaa

SEQ ID NO: 3905464 - RNA, 20 nt, Human adenovirus B [HAdV-B]
ugccagcacggugggaucug

SEQ ID NO: 3905465 - RNA, 15 nt, Human adenovirus B [HAdV-B]
ugccaucaauuacuc

SEQ ID NO: 3905466 - RNA, 17 nt, Human adenovirus B [HAdV-B]
ugccaucuuccagcaga

SEQ ID NO: 3905467 - RNA, 18 nt, Human adenovirus B [HAdV-B]
ugccaucuuccagcagag

SEQ ID NO: 3905468 - RNA, 16 nt, Human adenovirus B [HAdV-B]
ugccaugcaggcacuu

SEQ ID NO: 3905469 - RNA, 23 nt, Human adenovirus B [HAdV-B]
ugcccuacucaaucugggaccug

SEQ ID NO: 3905470 - RNA, 17 nt, Human adenovirus B [HAdV-B]
ugcuacagcugcugcag

SEQ ID NO: 3905471 - RNA, 18 nt, Human adenovirus B [HAdV-B]
ugcuauuaguuacuucaa

SEQ ID NO: 3905472 - RNA, 16 nt, Human adenovirus B [HAdV-B]
ugcucacuugugcugg

SEQ ID NO: 3905473 - RNA, 21 nt, Human adenovirus B [HAdV-B]
ugcuuaacaauuuucgcucuu

SEQ ID NO: 3905474 - RNA, 14 nt, Human adenovirus B [HAdV-B]
uggaaacucagcca

SEQ ID NO: 3905475 - RNA, 16 nt, Human adenovirus B [HAdV-B]
uggaagccacucugaa

SEQ ID NO: 3905476 - RNA, 16 nt, Human adenovirus B [HAdV-B]
uggacauugcucacca

SEQ ID NO: 3905477 - RNA, 13 nt, Human adenovirus B [HAdV-B]
uggauaaaucagu

SEQ ID NO: 3905478 - RNA, 17 nt, Human adenovirus B [HAdV-B]
uggauccagauauucaa

SEQ ID NO: 3905479 - RNA, 13 nt, Human adenovirus B [HAdV-B]
uggaugccaugga

SEQ ID NO: 3905480 - RNA, 19 nt, Human adenovirus B [HAdV-B]
uggauguagaugccuauga

SEQ ID NO: 3905481 - RNA, 13 nt, Human adenovirus B [HAdV-B]
uggauuuccugcc

SEQ ID NO: 3905482 - RNA, 14 nt, Human adenovirus B [HAdV-B]
uggcagaacacacu

SEQ ID NO: 3905483 - RNA, 17 nt, Human adenovirus B [HAdV-B]
uggcuccgaccaugcgc

SEQ ID NO: 3905484 - RNA, 19 nt, Human adenovirus B [HAdV-B]
ugggagcugacuugcagug

SEQ ID NO: 3905485 - RNA, 16 nt, Human adenovirus B [HAdV-B]
ugggcgcuugccaggg

SEQ ID NO: 3905486 - RNA, 16 nt, Human adenovirus B [HAdV-B]
uggggccgugggcagc

SEQ ID NO: 3905487 - RNA, 14 nt, Human adenovirus B [HAdV-B]
uggggcgaagagcc

SEQ ID NO: 3905488 - RNA, 14 nt, Human adenovirus B [HAdV-B]
uggguauaauuaug

SEQ ID NO: 3905489 - RNA, 19 nt, Human adenovirus B [HAdV-B]
uggucagugaugagcagcu

SEQ ID NO: 3905490 - RNA, 15 nt, Human adenovirus B [HAdV-B]
uggucuccaugaguu

SEQ ID NO: 3905491 - RNA, 20 nt, Human adenovirus B [HAdV-B]
uggucuggggguacaaacug

SEQ ID NO: 3905492 - RNA, 13 nt, Human adenovirus B [HAdV-B]
uggugaacaccaa

SEQ ID NO: 3905493 - RNA, 13 nt, Human adenovirus B [HAdV-B]
uguagaaaaagau

SEQ ID NO: 3905494 - RNA, 14 nt, Human adenovirus B [HAdV-B]
ugucaaccaggggg

SEQ ID NO: 3905495 - RNA, 22 nt, Human adenovirus B [HAdV-B]
ugucauagacguagaugggauc

SEQ ID NO: 3905496 - RNA, 20 nt, Human adenovirus B [HAdV-B]
ugugacagugcaauguaaua

SEQ ID NO: 3905497 - RNA, 23 nt, Human adenovirus B [HAdV-B]
uguguccuccaagauuuuccaug

SEQ ID NO: 3905498 - RNA, 14 nt, Human adenovirus B [HAdV-B]
ugugucugaaggaa

SEQ ID NO: 3905499 - RNA, 14 nt, Human adenovirus B [HAdV-B]
uguuaauucaucug

SEQ ID NO: 3905500 - RNA, 17 nt, Human adenovirus B [HAdV-B]
uguuagcaucaguuaac

SEQ ID NO: 3905501 - RNA, 18 nt, Human adenovirus B [HAdV-B]
uguucaauaaacaucacu

SEQ ID NO: 3905502 - RNA, 13 nt, Human adenovirus B [HAdV-B]
uguucccagaguu

SEQ ID NO: 3905503 - RNA, 22 nt, Human adenovirus B [HAdV-B]
uguucccagaguuggaagucua

SEQ ID NO: 3905504 - RNA, 22 nt, Human adenovirus B [HAdV-B]
uguucuccuaggcagagaaaca

SEQ ID NO: 3905505 - RNA, 14 nt, Human adenovirus B [HAdV-B]
uguuucaagcagga

SEQ ID NO: 3905506 - RNA, 17 nt, Human adenovirus B [HAdV-B]
uguuuccgucacaguga

SEQ ID NO: 3905507 - RNA, 23 nt, Human adenovirus B [HAdV-B]
uguuuucuuagagauggaagaca

SEQ ID NO: 3905508 - RNA, 16 nt, Human adenovirus B [HAdV-B]
uuaagauucccacuga

SEQ ID NO: 3905509 - RNA, 18 nt, Human adenovirus B [HAdV-B]
uuaagauucccacugaaa

SEQ ID NO: 3905510 - RNA, 18 nt, Human adenovirus B [HAdV-B]
uuaccagacaaaguacag

SEQ ID NO: 3905511 - RNA, 16 nt, Human adenovirus B [HAdV-B]
uuaccaguguaacaug

SEQ ID NO: 3905512 - RNA, 15 nt, Human adenovirus B [HAdV-B]
uuacuuugccagaag

SEQ ID NO: 3905513 - RNA, 23 nt, Human adenovirus B [HAdV-B]
uuagacagcaaccccaggccaac

SEQ ID NO: 3905514 - RNA, 20 nt, Human adenovirus B [HAdV-B]
uuaggccgucuuuggggugg

SEQ ID NO: 3905515 - RNA, 14 nt, Human adenovirus B [HAdV-B]
uuaucaaaugcuca

SEQ ID NO: 3905516 - RNA, 13 nt, Human adenovirus B [HAdV-B]
uucccucuuccca

SEQ ID NO: 3905517 - RNA, 19 nt, Human adenovirus B [HAdV-B]
uuccucgagacgcccaggc

SEQ ID NO: 3905518 - RNA, 15 nt, Human adenovirus B [HAdV-B]
uucgcugucuugacu

SEQ ID NO: 3905519 - RNA, 13 nt, Human adenovirus B [HAdV-B]
uucggaacuggca

SEQ ID NO: 3905520 - RNA, 23 nt, Human adenovirus B [HAdV-B]
uucggacggagucuccgguuuuu

SEQ ID NO: 3905521 - RNA, 19 nt, Human adenovirus B [HAdV-B]
uucuaacuccucaaucauc

SEQ ID NO: 3905522 - RNA, 22 nt, Human adenovirus B [HAdV-B]
uucugaucaucgcacguggaaa

SEQ ID NO: 3905523 - RNA, 18 nt, Human adenovirus B [HAdV-B]
uucuucgcugucuugacu

SEQ ID NO: 3905524 - RNA, 20 nt, Human adenovirus B [HAdV-B]
uucuuuugccauccuucuca

SEQ ID NO: 3905525 - RNA, 21 nt, Human adenovirus B [HAdV-B]
uugagcgccucggcugcgugg

SEQ ID NO: 3905526 - RNA, 19 nt, Human adenovirus B [HAdV-B]
uugaugaacaaugccauca

SEQ ID NO: 3905527 - RNA, 23 nt, Human adenovirus B [HAdV-B]
uugcagacgguaaaucugagcca

SEQ ID NO: 3905528 - RNA, 21 nt, Human adenovirus B [HAdV-B]
uugcaugguuguagcuuuuuu

SEQ ID NO: 3905529 - RNA, 21 nt, Human adenovirus B [HAdV-B]
uuuaugccuuaccaguguaac

SEQ ID NO: 3905530 - RNA, 12 nt, Human adenovirus B [HAdV-B]
uuucagaagaca

SEQ ID NO: 3905531 - RNA, 14 nt, Human adenovirus B [HAdV-B]
uuucuaacuccuca

SEQ ID NO: 3905532 - RNA, 15 nt, Human adenovirus B [HAdV-B]
uuugauuaagggaaa

SEQ ID NO: 3905533 - RNA, 21 nt, Human adenovirus B [HAdV-B]
uuugcaguagguacaacacau

SEQ ID NO: 3905534 - RNA, 14 nt, Human adenovirus B [HAdV-B]
uuuuccaacuuaua

SEQ ID NO: 3905535 - RNA, 23 nt, Human adenovirus B [HAdV-B]
uuuugcugguuuccgaauggcag

SEQ ID NO: 3905536 - RNA, 13 nt, Human adenovirus B [HAdV-B]
uuuugcugugcca

SEQ ID NO: 3905537 - RNA, 16 nt, Human adenovirus B [HAdV-B]
guucgcgguugagaag

SEQ ID NO: 3905538 - RNA, 13 nt, Human adenovirus B [HAdV-B]
guucucgcuggcc

SEQ ID NO: 3905539 - RNA, 17 nt, Human adenovirus B [HAdV-B]
guucucgcuggccacau

SEQ ID NO: 3905540 - RNA, 16 nt, Human adenovirus B [HAdV-B]
guucugacuuuggaaa

SEQ ID NO: 3905541 - RNA, 17 nt, Human adenovirus B [HAdV-B]
guugacuugcaggacag

SEQ ID NO: 3905542 - RNA, 14 nt, Human adenovirus B [HAdV-B]
guugagaccuggaa

SEQ ID NO: 3905543 - RNA, 16 nt, Human adenovirus B [HAdV-B]
guugauuuaaaaucaa

SEQ ID NO: 3905544 - RNA, 23 nt, Human adenovirus B [HAdV-B]
guuucacauuccaccagccaggu

SEQ ID NO: 3905545 - RNA, 18 nt, Human adenovirus B [HAdV-B]
guuuugagcuugggaaaa

SEQ ID NO: 3905546 - RNA, 19 nt, Human adenovirus B [HAdV-B]
uaaccuacuacgccugcug

SEQ ID NO: 3905547 - RNA, 15 nt, Human adenovirus B [HAdV-B]
uaagguauauuauug

SEQ ID NO: 3905548 - RNA, 12 nt, Human adenovirus B [HAdV-B]
uaaugacaaaau

SEQ ID NO: 3905549 - RNA, 18 nt, Human adenovirus B [HAdV-B]
uaauggaauaguguuuau

SEQ ID NO: 3905550 - RNA, 14 nt, Human adenovirus B [HAdV-B]
uacaaaagaaggac

SEQ ID NO: 3905551 - RNA, 16 nt, Human adenovirus B [HAdV-B]
uacacggcucucauga

SEQ ID NO: 3905552 - RNA, 19 nt, Human adenovirus B [HAdV-B]
uacagccaacgagccagcg

SEQ ID NO: 3905553 - RNA, 21 nt, Human adenovirus B [HAdV-B]
uacccucgguauaaaacaucc

SEQ ID NO: 3905554 - RNA, 18 nt, Human adenovirus B [HAdV-B]
uaccgucaccuccacagc

SEQ ID NO: 3905555 - RNA, 22 nt, Human adenovirus B [HAdV-B]
uacguccacuggacgggauagg

SEQ ID NO: 3905556 - RNA, 12 nt, Human adenovirus B [HAdV-B]
uacuaauacuac

SEQ ID NO: 3905557 - RNA, 16 nt, Human adenovirus B [HAdV-B]
uacugagcucaucaaa

SEQ ID NO: 3905558 - RNA, 16 nt, Human adenovirus B [HAdV-B]
uacuuagauuugauau

SEQ ID NO: 3905559 - RNA, 21 nt, Human adenovirus B [HAdV-B]
uagaauaagucgcccgaguuu

SEQ ID NO: 3905560 - RNA, 18 nt, Human adenovirus B [HAdV-B]
uagcagcgugcuggacuu

SEQ ID NO: 3905561 - RNA, 20 nt, Human adenovirus B [HAdV-B]
uagcaucgccccccucugau

SEQ ID NO: 3905562 - RNA, 13 nt, Human adenovirus B [HAdV-B]
uagcugcacagcc

SEQ ID NO: 3905563 - RNA, 15 nt, Human adenovirus B [HAdV-B]
uagguuggauagcau

SEQ ID NO: 3905564 - RNA, 19 nt, Human adenovirus B [HAdV-B]
uagucauauaguucaugug

SEQ ID NO: 3905565 - RNA, 14 nt, Human adenovirus B [HAdV-B]
uaguggcacaacau

SEQ ID NO: 3905566 - RNA, 17 nt, Human adenovirus B [HAdV-B]
uauaauggaauaguguu

SEQ ID NO: 3905567 - RNA, 18 nt, Human adenovirus B [HAdV-B]
uauagcuuccuuggaaga

SEQ ID NO: 3905568 - RNA, 16 nt, Human adenovirus B [HAdV-B]
uaucaacgugacagca

SEQ ID NO: 3905569 - RNA, 17 nt, Human adenovirus B [HAdV-B]
uaucggaggaggaggac

SEQ ID NO: 3905570 - RNA, 16 nt, Human adenovirus B [HAdV-B]
uaugaagaugaaagca

SEQ ID NO: 3905571 - RNA, 14 nt, Human adenovirus B [HAdV-B]
uaugagccagagca

SEQ ID NO: 3905572 - RNA, 20 nt, Human adenovirus B [HAdV-B]
uauggaagcaguaacuuuug

SEQ ID NO: 3905573 - RNA, 22 nt, Human adenovirus B [HAdV-B]
uauggccaauaccaaacuuaua

SEQ ID NO: 3905574 - RNA, 21 nt, Human adenovirus B [HAdV-B]
uauguuccugaguuaaaucau

SEQ ID NO: 3905575 - RNA, 22 nt, Human adenovirus B [HAdV-B]
aaucucuuaagguucuguggac

SEQ ID NO: 3905576 - RNA, 15 nt, Human adenovirus B [HAdV-B]
aaucugcaacaaaac

SEQ ID NO: 3905577 - RNA, 14 nt, Human adenovirus B [HAdV-B]
aaugaaagcguuca

SEQ ID NO: 3905578 - RNA, 13 nt, Human adenovirus B [HAdV-B]
aaugacaaaauau

SEQ ID NO: 3905579 - RNA, 23 nt, Human adenovirus B [HAdV-B]
aaugcuuguuacauaucuggaaa

SEQ ID NO: 3905580 - RNA, 13 nt, Human adenovirus B [HAdV-B]
aauguuagcaaag

SEQ ID NO: 3905581 - RNA, 17 nt, Human adenovirus B [HAdV-B]
aauucgggaaucaccaa

SEQ ID NO: 3905582 - RNA, 21 nt, Human adenovirus B [HAdV-B]
aauugacaugcccuuggcucu

SEQ ID NO: 3905583 - RNA, 23 nt, Human adenovirus B [HAdV-B]
aauugcaaggccccagcagccaa

SEQ ID NO: 3905584 - RNA, 22 nt, Human adenovirus B [HAdV-B]
cguuuggacccgccgccagcaa

SEQ ID NO: 3905585 - RNA, 20 nt, Human adenovirus B [HAdV-B]
cuaacccgauggcugggcac

SEQ ID NO: 3905586 - RNA, 16 nt, Human adenovirus B [HAdV-B]
cuaccacugccaugcg

SEQ ID NO: 3905587 - RNA, 17 nt, Human adenovirus B [HAdV-B]
cuagaagauaaggaggu

SEQ ID NO: 3905588 - RNA, 20 nt, Human adenovirus B [HAdV-B]
cuagaucugaguuggcuuua

SEQ ID NO: 3905589 - RNA, 23 nt, Human adenovirus B [HAdV-B]
cuaggacaaagcgugcugcacag

SEQ ID NO: 3905590 - RNA, 14 nt, Human adenovirus B [HAdV-B]
cuaggcagagaaac

SEQ ID NO: 3905591 - RNA, 23 nt, Human adenovirus B [HAdV-B]
cuagucucgcaacucugacuucu

SEQ ID NO: 3905592 - RNA, 20 nt, Human adenovirus B [HAdV-B]
cuaguuguuugccaaaggau

SEQ ID NO: 3905593 - RNA, 21 nt, Human adenovirus B [HAdV-B]
cuaugaggaccaaucacagcc

SEQ ID NO: 3905594 - RNA, 15 nt, Human adenovirus B [HAdV-B]
cuauuuagagacaga

SEQ ID NO: 3905595 - RNA, 14 nt, Human adenovirus B [HAdV-B]
cucaaaaacacacu

SEQ ID NO: 3905596 - RNA, 17 nt, Human adenovirus B [HAdV-B]
cucaaccccagcugccu

SEQ ID NO: 3905597 - RNA, 23 nt, Human adenovirus B [HAdV-B]
cucaccauuaccaacugacuguc

SEQ ID NO: 3905598 - RNA, 17 nt, Human adenovirus B [HAdV-B]
cucagccauugcuguca

SEQ ID NO: 3905599 - RNA, 19 nt, Human adenovirus B [HAdV-B]
cucagccauugcugucaac

SEQ ID NO: 3905600 - RNA, 18 nt, Human adenovirus B [HAdV-B]
cucaggaucacagagacg

SEQ ID NO: 3905601 - RNA, 21 nt, Human adenovirus B [HAdV-B]
cucaggaucacagagacgagc

SEQ ID NO: 3905602 - RNA, 17 nt, Human adenovirus B [HAdV-B]
cucagguugucaguuuc

SEQ ID NO: 3905603 - RNA, 16 nt, Human adenovirus B [HAdV-B]
cuccaagcaagaugua

SEQ ID NO: 3905604 - RNA, 19 nt, Human adenovirus B [HAdV-B]
cuccacuagacaagucagu

SEQ ID NO: 3905605 - RNA, 14 nt, Human adenovirus B [HAdV-B]
cuccaguggaggag

SEQ ID NO: 3905606 - RNA, 22 nt, Human adenovirus B [HAdV-B]
cucccgacggugcugcaguugg

SEQ ID NO: 3905607 - RNA, 16 nt, Human adenovirus B [HAdV-B]
cuccuaggcagagaaa

SEQ ID NO: 3905608 - RNA, 18 nt, Human adenovirus B [HAdV-B]
cuccuccuucguacgaga

SEQ ID NO: 3905609 - RNA, 16 nt, Human adenovirus B [HAdV-B]
cuccuuuagccagagg

SEQ ID NO: 3905610 - RNA, 13 nt, Human adenovirus B [HAdV-B]
cuccuuuccuaga

SEQ ID NO: 3905611 - RNA, 14 nt, Human adenovirus B [HAdV-B]
cucgaagagaaucu

SEQ ID NO: 3905612 - RNA, 17 nt, Human adenovirus B [HAdV-B]
cucgaagggguucauug

SEQ ID NO: 3905613 - RNA, 23 nt, Human adenovirus B [HAdV-B]
cucgguauaaaacaucccgcagg

SEQ ID NO: 3905614 - RNA, 13 nt, Human adenovirus B [HAdV-B]
cucucaccuaccg

SEQ ID NO: 3905615 - RNA, 17 nt, Human adenovirus B [HAdV-B]
cucucauaggaccccca

SEQ ID NO: 3905616 - RNA, 22 nt, Human adenovirus B [HAdV-B]
cucugcguucgcucaccagaag

SEQ ID NO: 3905617 - RNA, 18 nt, Human adenovirus B [HAdV-B]
cucuucgggggcagaggu

SEQ ID NO: 3905618 - RNA, 16 nt, Human adenovirus B [HAdV-B]
cucuuucauccuggaa

SEQ ID NO: 3905619 - RNA, 21 nt, Human adenovirus B [HAdV-B]
cugaaaguauggaagugcaaa

SEQ ID NO: 3905620 - RNA, 21 nt, Human adenovirus B [HAdV-B]
cugaacggggucaucuugcag

SEQ ID NO: 3905621 - RNA, 17 nt, Human adenovirus B [HAdV-B]
cugaagcugaaauuaca

SEQ ID NO: 3905622 - RNA, 14 nt, Human adenovirus B [HAdV-B]
cugaccgcccagcu

SEQ ID NO: 3905623 - RNA, 22 nt, Human adenovirus B [HAdV-B]
cugagcagucuccgauguugug

SEQ ID NO: 3905624 - RNA, 21 nt, Human adenovirus B [HAdV-B]
cugagcuaucucggcugcgac

SEQ ID NO: 3905625 - RNA, 22 nt, Human adenovirus B [HAdV-B]
cugagcuaucucggcugcgaca

SEQ ID NO: 3905626 - RNA, 14 nt, Human adenovirus B [HAdV-B]
cugauuacuucuuu

SEQ ID NO: 3905627 - RNA, 22 nt, Human adenovirus B [HAdV-B]
cugauuauuucaccaaugccau

SEQ ID NO: 3905628 - RNA, 14 nt, Human adenovirus B [HAdV-B]
cugcagagccagcc

SEQ ID NO: 3905629 - RNA, 19 nt, Human adenovirus B [HAdV-B]
cugccuuguaagggcagca

SEQ ID NO: 3905630 - RNA, 14 nt, Human adenovirus B [HAdV-B]
cugcggaggaggag

SEQ ID NO: 3905631 - RNA, 16 nt, Human adenovirus B [HAdV-B]
cugcuacgaagagcua

SEQ ID NO: 3905632 - RNA, 16 nt, Human adenovirus B [HAdV-B]
cuggaacacaggagau

SEQ ID NO: 3905633 - RNA, 23 nt, Human adenovirus B [HAdV-B]
cuggaaggcggaugacuggcaga

SEQ ID NO: 3905634 - RNA, 20 nt, Human adenovirus B [HAdV-B]
cuggacauugcucaccaccu

SEQ ID NO: 3905635 - RNA, 23 nt, Human adenovirus B [HAdV-B]
cuggagcuggaaccgagggugag

SEQ ID NO: 3905636 - RNA, 15 nt, Human adenovirus B [HAdV-B]
cuggagugucacugc

SEQ ID NO: 3905637 - RNA, 18 nt, Human adenovirus B [HAdV-B]
cuggccaacuaucucucc

SEQ ID NO: 3905638 - RNA, 23 nt, Human adenovirus B [HAdV-B]
cuggccaacuaucucuccuacca

SEQ ID NO: 3905639 - RNA, 15 nt, Human adenovirus B [HAdV-B]
cuggcggcuccaccc

SEQ ID NO: 3905640 - RNA, 15 nt, Human adenovirus B [HAdV-B]
cugggcagcuaggac

SEQ ID NO: 3905641 - RNA, 13 nt, Human adenovirus B [HAdV-B]
cugggcauucuga

SEQ ID NO: 3905642 - RNA, 22 nt, Human adenovirus B [HAdV-B]
cuggucuggggguacaaacugu

SEQ ID NO: 3905643 - RNA, 22 nt, Human adenovirus B [HAdV-B]
cugguuagcugcacagccggca

SEQ ID NO: 3905644 - RNA, 14 nt, Human adenovirus B [HAdV-B]
cuguaccugugcca

SEQ ID NO: 3905645 - RNA, 16 nt, Human adenovirus B [HAdV-B]
cuguagacgaucuggc

SEQ ID NO: 3905646 - RNA, 22 nt, Human adenovirus B [HAdV-B]
cuguagugccuucccgcucuaa

SEQ ID NO: 3905647 - RNA, 16 nt, Human adenovirus B [HAdV-B]
cugucaacaucgccac

SEQ ID NO: 3905648 - RNA, 14 nt, Human adenovirus B [HAdV-B]
cugucucaacccca

SEQ ID NO: 3905649 - RNA, 16 nt, Human adenovirus B [HAdV-B]
cuucaacaaguacugc

SEQ ID NO: 3905650 - RNA, 18 nt, Human adenovirus B [HAdV-B]
cuucagcuugcccucaua

SEQ ID NO: 3905651 - RNA, 14 nt, Human adenovirus B [HAdV-B]
cuuccaacaaaaag

SEQ ID NO: 3905652 - RNA, 14 nt, Human adenovirus B [HAdV-B]
cuucccucuuccca

SEQ ID NO: 3905653 - RNA, 13 nt, Human adenovirus B [HAdV-B]
cuucuccaucagc

SEQ ID NO: 3905654 - RNA, 19 nt, Human adenovirus B [HAdV-B]
cuucuccggaucuccuggg

SEQ ID NO: 3905655 - RNA, 12 nt, Human adenovirus B [HAdV-B]
cuugaauuauuc

SEQ ID NO: 3905656 - RNA, 18 nt, Human adenovirus B [HAdV-B]
cuugagcagcuuuucgua

SEQ ID NO: 3905657 - RNA, 20 nt, Human adenovirus B [HAdV-B]
cuugcuggagugucacugcc

SEQ ID NO: 3905658 - RNA, 15 nt, Human adenovirus B [HAdV-B]
cuuggaagacugaug

SEQ ID NO: 3905659 - RNA, 21 nt, Human adenovirus B [HAdV-B]
cuuucagaagacaugcaugac

SEQ ID NO: 3905660 - RNA, 14 nt, Human adenovirus B [HAdV-B]
cuuuccagccuuga

SEQ ID NO: 3905661 - RNA, 15 nt, Human adenovirus B [HAdV-B]
cuuuccugagaacca

SEQ ID NO: 3905662 - RNA, 15 nt, Human adenovirus B [HAdV-B]
cuuucuguuuacaga

SEQ ID NO: 3905663 - RNA, 14 nt, Human adenovirus B [HAdV-B]
cuuugagacugaug

SEQ ID NO: 3905664 - RNA, 17 nt, Human adenovirus B [HAdV-B]
cuuuggguauaauuaug

SEQ ID NO: 3905665 - RNA, 19 nt, Human adenovirus B [HAdV-B]
gaaaaugaaagcguucagc

SEQ ID NO: 3905666 - RNA, 23 nt, Human adenovirus B [HAdV-B]
gaaaaugccggccaauugccauu

SEQ ID NO: 3905667 - RNA, 19 nt, Human adenovirus B [HAdV-B]
gaaaauguaaauuuggaaa

SEQ ID NO: 3905668 - RNA, 22 nt, Human adenovirus B [HAdV-B]
gaaaccuugcgcaaacucgaag

SEQ ID NO: 3905669 - RNA, 20 nt, Human adenovirus B [HAdV-B]
gaaacuuuuacaucucccac

SEQ ID NO: 3905670 - RNA, 21 nt, Human adenovirus B [HAdV-B]
gaaauaugagugguucgaguu

SEQ ID NO: 3905671 - RNA, 20 nt, Human adenovirus B [HAdV-B]
gaaauauggagcccagcaug

SEQ ID NO: 3905672 - RNA, 14 nt, Human adenovirus B [HAdV-B]
gaacaacugccgua

SEQ ID NO: 3905673 - RNA, 23 nt, Human adenovirus B [HAdV-B]
gaacacaggagaugccccagagg

SEQ ID NO: 3905674 - RNA, 14 nt, Human adenovirus B [HAdV-B]
gaacauuggugcca

SEQ ID NO: 3905675 - RNA, 14 nt, Human adenovirus B [HAdV-B]
gaagacacuggcag

SEQ ID NO: 3905676 - RNA, 23 nt, Human adenovirus B [HAdV-B]
gaagagcguaacuuccaaaaguc

SEQ ID NO: 3905677 - RNA, 17 nt, Human adenovirus B [HAdV-B]
gaagauauggaggaaga

SEQ ID NO: 3905678 - RNA, 19 nt, Human adenovirus B [HAdV-B]
gaauaauuaauauaaucug

SEQ ID NO: 3905679 - RNA, 22 nt, Human adenovirus B [HAdV-B]
gaaucagaaugacccgcaggca

SEQ ID NO: 3905680 - RNA, 21 nt, Human adenovirus B [HAdV-B]
gaaucauaauauugccaugca

SEQ ID NO: 3905681 - RNA, 19 nt, Human adenovirus B [HAdV-B]
gaaugccaucaucuccugc

SEQ ID NO: 3905682 - RNA, 14 nt, Human adenovirus B [HAdV-B]
gaauuaaaaaauga

SEQ ID NO: 3905683 - RNA, 21 nt, Human adenovirus B [HAdV-B]
gaauugcaaggccccagcagc

SEQ ID NO: 3905684 - RNA, 22 nt, Human adenovirus B [HAdV-B]
gacaauggaugguuuacaaaac

SEQ ID NO: 3905685 - RNA, 15 nt, Human adenovirus B [HAdV-B]
gauauguggccuggg

SEQ ID NO: 3905686 - RNA, 12 nt, Human adenovirus B [HAdV-B]
gaucaccugggc

SEQ ID NO: 3905687 - RNA, 23 nt, Human adenovirus B [HAdV-B]
gaucugcaaucaugcccacaucc

SEQ ID NO: 3905688 - RNA, 21 nt, Human adenovirus B [HAdV-B]
gaugauauucuugagcaggcg

SEQ ID NO: 3905689 - RNA, 11 nt, Human adenovirus B [HAdV-B]
gaugcuggaaa

SEQ ID NO: 3905690 - RNA, 14 nt, Human adenovirus B [HAdV-B]
gauggcgccagcau

SEQ ID NO: 3905691 - RNA, 14 nt, Human adenovirus B [HAdV-B]
gaugugaacauggu

SEQ ID NO: 3905692 - RNA, 18 nt, Human adenovirus B [HAdV-B]
gauuaagggaaaugccag

SEQ ID NO: 3905693 - RNA, 20 nt, Human adenovirus B [HAdV-B]
gauuacuuugauauaaucug

SEQ ID NO: 3905694 - RNA, 13 nt, Human adenovirus B [HAdV-B]
gauugccacagcu

SEQ ID NO: 3905695 - RNA, 13 nt, Human adenovirus B [HAdV-B]
gauugcuggaaua

SEQ ID NO: 3905696 - RNA, 18 nt, Human adenovirus B [HAdV-B]
gauuucauagccacagca

SEQ ID NO: 3905697 - RNA, 11 nt, Human adenovirus B [HAdV-B]
gauuuggaaga

SEQ ID NO: 3905698 - RNA, 15 nt, Human adenovirus B [HAdV-B]
gauuuuggcuggaau

SEQ ID NO: 3905699 - RNA, 18 nt, Human adenovirus B [HAdV-B]
gcaacgaauuuucuccca

SEQ ID NO: 3905700 - RNA, 19 nt, Human adenovirus B [HAdV-B]
gcaacgaauuuucucccag

SEQ ID NO: 3905701 - RNA, 16 nt, Human adenovirus B [HAdV-B]
gcaacgggugcuuacu

SEQ ID NO: 3905702 - RNA, 13 nt, Human adenovirus B [HAdV-B]
gcaaggacaacau

SEQ ID NO: 3905703 - RNA, 19 nt, Human adenovirus B [HAdV-B]
gcaauauugccgccaagau

SEQ ID NO: 3905704 - RNA, 21 nt, Human adenovirus B [HAdV-B]
gcaaucaugcccacauccaga

SEQ ID NO: 3905705 - RNA, 14 nt, Human adenovirus B [HAdV-B]
gcacacaaagcaca

SEQ ID NO: 3905706 - RNA, 21 nt, Human adenovirus B [HAdV-B]
gcaccgucgcuuccgaccugg

SEQ ID NO: 3905707 - RNA, 21 nt, Human adenovirus B [HAdV-B]
gcaccuuugaauugcaaggcc

SEQ ID NO: 3905708 - RNA, 23 nt, Human adenovirus B [HAdV-B]
gcacgucuucaaccgcuuuccug

SEQ ID NO: 3905709 - RNA, 13 nt, Human adenovirus B [HAdV-B]
gcagcacugaaac

SEQ ID NO: 3905710 - RNA, 22 nt, Human adenovirus B [HAdV-B]
gcagcagcuccuuuagccagag

SEQ ID NO: 3905711 - RNA, 12 nt, Human adenovirus B [HAdV-B]
gcagcgaagugg

SEQ ID NO: 3905712 - RNA, 17 nt, Human adenovirus B [HAdV-B]
gcaggaggcgcaaacag

SEQ ID NO: 3905713 - RNA, 15 nt, Human adenovirus B [HAdV-B]
gcaggauauuuugaa

SEQ ID NO: 3905714 - RNA, 15 nt, Human adenovirus B [HAdV-B]
gcaggcgccucccag

SEQ ID NO: 3905715 - RNA, 22 nt, Human adenovirus B [HAdV-B]
gcagucucgacagauaaagaca

SEQ ID NO: 3905716 - RNA, 17 nt, Human adenovirus B [HAdV-B]
gcauaugcaaaucccaa

SEQ ID NO: 3905717 - RNA, 21 nt, Human adenovirus B [HAdV-B]
gcaucaaaaacgccaauaaca

SEQ ID NO: 3905718 - RNA, 17 nt, Human adenovirus B [HAdV-B]
gcaugaccucugcacuc

SEQ ID NO: 3905719 - RNA, 16 nt, Human adenovirus B [HAdV-B]
gcaugcgaaugcggag

SEQ ID NO: 3905720 - RNA, 13 nt, Human adenovirus B [HAdV-B]
gcaugggaugggu

SEQ ID NO: 3905721 - RNA, 19 nt, Human adenovirus B [HAdV-B]
gcauuguggagaacaugga

SEQ ID NO: 3905722 - RNA, 17 nt, Human adenovirus B [HAdV-B]
gccaaacccaacacaca

SEQ ID NO: 3905723 - RNA, 20 nt, Human adenovirus B [HAdV-B]
gccaccaucccgaauaccgc

SEQ ID NO: 3905724 - RNA, 19 nt, Human adenovirus B [HAdV-B]
gccagcgguucuggaggag

SEQ ID NO: 3905725 - RNA, 21 nt, Human adenovirus B [HAdV-B]
gccaggguucgguccuuccag

SEQ ID NO: 3905726 - RNA, 22 nt, Human adenovirus B [HAdV-B]
gccaugcgagccgcaagagcuc

SEQ ID NO: 3905727 - RNA, 21 nt, Human adenovirus B [HAdV-B]
gccaugcuuagggcggccaga

SEQ ID NO: 3905728 - RNA, 17 nt, Human adenovirus B [HAdV-B]
gcccaguccugccacca

SEQ ID NO: 3905729 - RNA, 14 nt, Human adenovirus B [HAdV-B]
gccccaauggccac

SEQ ID NO: 3905730 - RNA, 22 nt, Human adenovirus B [HAdV-B]
gcccccagaagauauggaggaa

SEQ ID NO: 3905731 - RNA, 20 nt, Human adenovirus B [HAdV-B]
gcccccucccccugcugcua

SEQ ID NO: 3905732 - RNA, 13 nt, Human adenovirus B [HAdV-B]
gccccgccaacac

SEQ ID NO: 3905733 - RNA, 14 nt, Human adenovirus B [HAdV-B]
gccgcaggaggcgc

SEQ ID NO: 3905734 - RNA, 15 nt, Human adenovirus B [HAdV-B]
gccgccggucccacu

SEQ ID NO: 3905735 - RNA, 23 nt, Human adenovirus B [HAdV-B]
gccuacaucuacuguggaugcag

SEQ ID NO: 3905736 - RNA, 22 nt, Human adenovirus B [HAdV-B]
gccuaggacaaagcgugcugca

SEQ ID NO: 3905737 - RNA, 17 nt, Human adenovirus B [HAdV-B]
gcgauaaugccagacuc

SEQ ID NO: 3905738 - RNA, 16 nt, Human adenovirus B [HAdV-B]
gcgcaaguuugcuccg

SEQ ID NO: 3905739 - RNA, 17 nt, Human adenovirus B [HAdV-B]
gcgcaguagucaagugu

SEQ ID NO: 3905740 - RNA, 17 nt, Human adenovirus B [HAdV-B]
gcgccaugacagacaga

SEQ ID NO: 3905741 - RNA, 14 nt, Human adenovirus B [HAdV-B]
gcgcgggcaaacac

SEQ ID NO: 3905742 - RNA, 14 nt, Human adenovirus B [HAdV-B]
gcggagacaagcaa

SEQ ID NO: 3905743 - RNA, 10 nt, Human adenovirus B [HAdV-B]
gcggaggagg

SEQ ID NO: 3905744 - RNA, 19 nt, Human adenovirus B [HAdV-B]
gcggccuaagagaccugcu

SEQ ID NO: 3905745 - RNA, 14 nt, Human adenovirus B [HAdV-B]
gcggcgcugcagag

SEQ ID NO: 3905746 - RNA, 14 nt, Human adenovirus B [HAdV-B]
gcggcucauguugc

SEQ ID NO: 3905747 - RNA, 19 nt, Human adenovirus B [HAdV-B]
gcgggacgaggauuucgaa

SEQ ID NO: 3905748 - RNA, 13 nt, Human adenovirus B [HAdV-B]
gcgggucgugagc

SEQ ID NO: 3905749 - RNA, 18 nt, Human adenovirus B [HAdV-B]
gcguccagcgcugccagg

SEQ ID NO: 3905750 - RNA, 14 nt, Human adenovirus B [HAdV-B]
gcgugaugcagcag

SEQ ID NO: 3905751 - RNA, 16 nt, Human adenovirus B [HAdV-B]
gcguggggcgaagagc

SEQ ID NO: 3905752 - RNA, 14 nt, Human adenovirus B [HAdV-B]
gcuacagcugcugc

SEQ ID NO: 3905753 - RNA, 18 nt, Human adenovirus B [HAdV-B]
gcuaccaucuccgcuccg

SEQ ID NO: 3905754 - RNA, 22 nt, Human adenovirus B [HAdV-B]
gcuauaauguguuggaagacaa

SEQ ID NO: 3905755 - RNA, 12 nt, Human adenovirus B [HAdV-B]
ggaauuggaagg

SEQ ID NO: 3905756 - RNA, 20 nt, Human adenovirus B [HAdV-B]
ggacauaauuacacucucau

SEQ ID NO: 3905757 - RNA, 18 nt, Human adenovirus B [HAdV-B]
ggacucuguuaacuucac

SEQ ID NO: 3905758 - RNA, 14 nt, Human adenovirus B [HAdV-B]
ggacuuggaagagg

SEQ ID NO: 3905759 - RNA, 11 nt, Human adenovirus B [HAdV-B]
ggagcagagcu

SEQ ID NO: 3905760 - RNA, 15 nt, Human adenovirus B [HAdV-B]
ggagcugacuugcag

SEQ ID NO: 3905761 - RNA, 12 nt, Human adenovirus B [HAdV-B]
ggaggaggaaca

SEQ ID NO: 3905762 - RNA, 13 nt, Human adenovirus B [HAdV-B]
ggagggcagaaac

SEQ ID NO: 3905763 - RNA, 14 nt, Human adenovirus B [HAdV-B]
ggaggugaagauag

SEQ ID NO: 3905764 - RNA, 11 nt, Human adenovirus B [HAdV-B]
ggagucacugc

SEQ ID NO: 3905765 - RNA, 21 nt, Human adenovirus B [HAdV-B]
ggaucacagagacgagccugg

SEQ ID NO: 3905766 - RNA, 17 nt, Human adenovirus B [HAdV-B]
ggaucaguccugccagg

SEQ ID NO: 3905767 - RNA, 21 nt, Human adenovirus B [HAdV-B]
ggauucuuaacagugcaggca

SEQ ID NO: 3905768 - RNA, 17 nt, Human adenovirus B [HAdV-B]
ggcacacguggcugcag

SEQ ID NO: 3905769 - RNA, 16 nt, Human adenovirus B [HAdV-B]
ggcacuucagcuugcc

SEQ ID NO: 3905770 - RNA, 19 nt, Human adenovirus B [HAdV-B]
ggcaggaugugagcuuccu

SEQ ID NO: 3905771 - RNA, 21 nt, Human adenovirus B [HAdV-B]
ggcaucucgauccagcagacc

SEQ ID NO: 3905772 - RNA, 17 nt, Human adenovirus B [HAdV-B]
ggccgaacuuucggccu

SEQ ID NO: 3905773 - RNA, 16 nt, Human adenovirus B [HAdV-B]
ggccgagaagguggcu

SEQ ID NO: 3905774 - RNA, 20 nt, Human adenovirus B [HAdV-B]
ggccugcgucaucacccagg

SEQ ID NO: 3905775 - RNA, 20 nt, Human adenovirus B [HAdV-B]
ggcgagucgugcuaggcgga

SEQ ID NO: 3905776 - RNA, 23 nt, Human adenovirus B [HAdV-B]
ggcggaugaaggcgaggaggaag

SEQ ID NO: 3905777 - RNA, 21 nt, Human adenovirus B [HAdV-B]
gggacaacaaucuaugcccaa

SEQ ID NO: 3905778 - RNA, 17 nt, Human adenovirus B [HAdV-B]
ggggaguccaacgugug

SEQ ID NO: 3905779 - RNA, 22 nt, Human adenovirus B [HAdV-B]
ggguccaccuuuuccaaaguau

SEQ ID NO: 3905780 - RNA, 19 nt, Human adenovirus B [HAdV-B]
gggucuaccuugaccccca

SEQ ID NO: 3905781 - RNA, 22 nt, Human adenovirus B [HAdV-B]
ggucaaaagaaugcuggcuuca

SEQ ID NO: 3905782 - RNA, 15 nt, Human adenovirus B [HAdV-B]
gguccgccacugcgc

SEQ ID NO: 3905783 - RNA, 19 nt, Human adenovirus B [HAdV-B]
ggugcaacacagcagagac

SEQ ID NO: 3905784 - RNA, 13 nt, Human adenovirus B [HAdV-B]
gguggcuuccagc

SEQ ID NO: 3905785 - RNA, 16 nt, Human adenovirus B [HAdV-B]
ggugggcauuguaaua

SEQ ID NO: 3905786 - RNA, 14 nt, Human adenovirus B [HAdV-B]
gguguccagaaaac

SEQ ID NO: 3905787 - RNA, 20 nt, Human adenovirus B [HAdV-B]
gguuaccguagaacuagagu

SEQ ID NO: 3905788 - RNA, 23 nt, Human adenovirus B [HAdV-B]
guaaaacaagccaagauauccua

SEQ ID NO: 3905789 - RNA, 12 nt, Human adenovirus B [HAdV-B]
guaccugugcca

SEQ ID NO: 3905790 - RNA, 14 nt, Human adenovirus B [HAdV-B]
guacgagagcguga

SEQ ID NO: 3905791 - RNA, 15 nt, Human adenovirus B [HAdV-B]
guacggggaugauga

SEQ ID NO: 3905792 - RNA, 13 nt, Human adenovirus B [HAdV-B]
guacugaugcuag

SEQ ID NO: 3905793 - RNA, 21 nt, Human adenovirus B [HAdV-B]
guaucagaaaaaaacagccau

SEQ ID NO: 3905794 - RNA, 13 nt, Human adenovirus B [HAdV-B]
guaucggaggagg

SEQ ID NO: 3905795 - RNA, 23 nt, Human adenovirus B [HAdV-B]
guaugccaucuuccagcagaguc

SEQ ID NO: 3905796 - RNA, 14 nt, Human adenovirus B [HAdV-B]
guccguugaaauua

SEQ ID NO: 3905797 - RNA, 13 nt, Human adenovirus B [HAdV-B]
guccucagcgacg

SEQ ID NO: 3905798 - RNA, 12 nt, Human adenovirus B [HAdV-B]
guccuuccaggg

SEQ ID NO: 3905799 - RNA, 18 nt, Human adenovirus B [HAdV-B]
gucuacuggucgcuucca

SEQ ID NO: 3905800 - RNA, 18 nt, Human adenovirus B [HAdV-B]
gucuaucuguaccugugc

SEQ ID NO: 3905801 - RNA, 21 nt, Human adenovirus B [HAdV-B]
gucucaguguucgagucaggg

SEQ ID NO: 3905802 - RNA, 18 nt, Human adenovirus B [HAdV-B]
gucuccgguuuuuggaga

SEQ ID NO: 3905803 - RNA, 16 nt, Human adenovirus B [HAdV-B]
gucucugacaaagugg

SEQ ID NO: 3905804 - RNA, 21 nt, Human adenovirus B [HAdV-B]
gucuuacugccuggcugcgga

SEQ ID NO: 3905805 - RNA, 20 nt, Human adenovirus B [HAdV-B]
gucuucucaaagagcuucua

SEQ ID NO: 3905806 - RNA, 21 nt, Human adenovirus B [HAdV-B]
gugaugaggguaaaccagugg

SEQ ID NO: 3905807 - RNA, 20 nt, Human adenovirus B [HAdV-B]
gugaugcaauccccacugga

SEQ ID NO: 3905808 - RNA, 20 nt, Human adenovirus B [HAdV-B]
gugcaggagcggagccuggg

SEQ ID NO: 3905809 - RNA, 12 nt, Human adenovirus B [HAdV-B]
gugccaccacac

SEQ ID NO: 3905810 - RNA, 12 nt, Human adenovirus B [HAdV-B]
gugcugcacagc

SEQ ID NO: 3905811 - RNA, 20 nt, Human adenovirus B [HAdV-B]
guggacaggguucgacgagc

SEQ ID NO: 3905812 - RNA, 21 nt, Human adenovirus B [HAdV-B]
guggcagccuagucgcagggc

SEQ ID NO: 3905813 - RNA, 12 nt, Human adenovirus B [HAdV-B]
guguuggacaga

SEQ ID NO: 3905814 - RNA, 18 nt, Human adenovirus B [HAdV-B]
guuaaaaaccugcugcuu

SEQ ID NO: 3905815 - RNA, 16 nt, Human adenovirus B [HAdV-B]
guuaagacuggucacu

SEQ ID NO: 3905816 - RNA, 20 nt, Human adenovirus B [HAdV-B]
guuaccuacuaaaccuguau

SEQ ID NO: 3905817 - RNA, 16 nt, Human adenovirus B [HAdV-B]
guuagcgccagcagga

SEQ ID NO: 3905818 - RNA, 16 nt, Human adenovirus B [HAdV-B]
guucaugagcaaacag

SEQ ID NO: 3905819 - RNA, 13 nt, Human adenovirus B [HAdV-B]
guuccugcucuca

SEQ ID NO: 3905820 - RNA, 16 nt, Human adenovirus B [HAdV-B]
guucgagucaggguug

SEQ ID NO: 3905821 - RNA, 16 nt, Human adenovirus B [HAdV-B]
caccccguccaauguc

SEQ ID NO: 3905822 - RNA, 18 nt, Human adenovirus B [HAdV-B]
caccggauugcagcacug

SEQ ID NO: 3905823 - RNA, 21 nt, Human adenovirus B [HAdV-B]
caccgguggaacacgaggaag

SEQ ID NO: 3905824 - RNA, 15 nt, Human adenovirus B [HAdV-B]
caccgucgaugaugu

SEQ ID NO: 3905825 - RNA, 13 nt, Human adenovirus B [HAdV-B]
caccuccacugaa

SEQ ID NO: 3905826 - RNA, 19 nt, Human adenovirus B [HAdV-B]
caccugcugcgcacugccc

SEQ ID NO: 3905827 - RNA, 17 nt, Human adenovirus B [HAdV-B]
cacgagccaacugaacg

SEQ ID NO: 3905828 - RNA, 20 nt, Human adenovirus B [HAdV-B]
cacgagugccaucacaucuc

SEQ ID NO: 3905829 - RNA, 18 nt, Human adenovirus B [HAdV-B]
cacgccccgccaacaccu

SEQ ID NO: 3905830 - RNA, 20 nt, Human adenovirus B [HAdV-B]
cacuauucaaccuguagaaa

SEQ ID NO: 3905831 - RNA, 12 nt, Human adenovirus B [HAdV-B]
cacuccacagcu

SEQ ID NO: 3905832 - RNA, 14 nt, Human adenovirus B [HAdV-B]
cacuugccacccuc

SEQ ID NO: 3905833 - RNA, 13 nt, Human adenovirus B [HAdV-B]
cagaacacacucu

SEQ ID NO: 3905834 - RNA, 22 nt, Human adenovirus B [HAdV-B]
cagaacugaagugcccaucagu

SEQ ID NO: 3905835 - RNA, 20 nt, Human adenovirus B [HAdV-B]
cagaagguguaaaaaauaca

SEQ ID NO: 3905836 - RNA, 20 nt, Human adenovirus B [HAdV-B]
cagacauggaaacucagcca

SEQ ID NO: 3905837 - RNA, 14 nt, Human adenovirus B [HAdV-B]
cagacuagcagaca

SEQ ID NO: 3905838 - RNA, 15 nt, Human adenovirus B [HAdV-B]
cagagaggcgcugcu

SEQ ID NO: 3905839 - RNA, 20 nt, Human adenovirus B [HAdV-B]
cagaugcaucccgugcugcg

SEQ ID NO: 3905840 - RNA, 23 nt, Human adenovirus B [HAdV-B]
cagaugcgcccccaacaacagcc

SEQ ID NO: 3905841 - RNA, 21 nt, Human adenovirus B [HAdV-B]
cagauucaaugauugcaauug

SEQ ID NO: 3905842 - RNA, 23 nt, Human adenovirus B [HAdV-B]
cagauuugcauuucccaagcuuu

SEQ ID NO: 3905843 - RNA, 16 nt, Human adenovirus B [HAdV-B]
cagcaaccccaggcca

SEQ ID NO: 3905844 - RNA, 20 nt, Human adenovirus B [HAdV-B]
cagcacuggacaugacagcg

SEQ ID NO: 3905845 - RNA, 16 nt, Human adenovirus B [HAdV-B]
cagcagcagcagcagc

SEQ ID NO: 3905846 - RNA, 12 nt, Human adenovirus B [HAdV-B]
cagcaguacagg

SEQ ID NO: 3905847 - RNA, 23 nt, Human adenovirus B [HAdV-B]
cagcauuguggagaacauggaag

SEQ ID NO: 3905848 - RNA, 19 nt, Human adenovirus B [HAdV-B]
cagcccaugagcaggcagg

SEQ ID NO: 3905849 - RNA, 20 nt, Human adenovirus B [HAdV-B]
cagcccaugagcaggcaggu

SEQ ID NO: 3905850 - RNA, 17 nt, Human adenovirus B [HAdV-B]
cagccgccgcccccaga

SEQ ID NO: 3905851 - RNA, 19 nt, Human adenovirus B [HAdV-B]
cagccgccgcccccagaag

SEQ ID NO: 3905852 - RNA, 21 nt, Human adenovirus B [HAdV-B]
cagcgccaugacagacagagg

SEQ ID NO: 3905853 - RNA, 15 nt, Human adenovirus B [HAdV-B]
cagcgcugccagggu

SEQ ID NO: 3905854 - RNA, 19 nt, Human adenovirus B [HAdV-B]
cagcgcuuccaagaccggu

SEQ ID NO: 3905855 - RNA, 21 nt, Human adenovirus B [HAdV-B]
cagcggcggcgaccuccaaca

SEQ ID NO: 3905856 - RNA, 15 nt, Human adenovirus B [HAdV-B]
cagcuaaagaccauc

SEQ ID NO: 3905857 - RNA, 23 nt, Human adenovirus B [HAdV-B]
cagcugccuauaguacuccacca

SEQ ID NO: 3905858 - RNA, 21 nt, Human adenovirus B [HAdV-B]
cagcuuuugcugugccagaag

SEQ ID NO: 3905859 - RNA, 14 nt, Human adenovirus B [HAdV-B]
caggagcggagccu

SEQ ID NO: 3905860 - RNA, 19 nt, Human adenovirus B [HAdV-B]
caggauccuauagaggugg

SEQ ID NO: 3905861 - RNA, 23 nt, Human adenovirus B [HAdV-B]
caggaugucccaacgacgagaaa

SEQ ID NO: 3905862 - RNA, 13 nt, Human adenovirus B [HAdV-B]
caggcaaaacaaa

SEQ ID NO: 3905863 - RNA, 12 nt, Human adenovirus B [HAdV-B]
caggccagcaca

SEQ ID NO: 3905864 - RNA, 14 nt, Human adenovirus B [HAdV-B]
caggucuacugguc

SEQ ID NO: 3905865 - RNA, 15 nt, Human adenovirus B [HAdV-B]
caguacaagcgcaga

SEQ ID NO: 3905866 - RNA, 15 nt, Human adenovirus B [HAdV-B]
caguagguuuggaag

SEQ ID NO: 3905867 - RNA, 14 nt, Human adenovirus B [HAdV-B]
caguccugccacca

SEQ ID NO: 3905868 - RNA, 22 nt, Human adenovirus B [HAdV-B]
cagucuuuccaucacaagacaa

SEQ ID NO: 3905869 - RNA, 24 nt, Human adenovirus B [HAdV-B]
cagugagcuggccuggaaaugaca

SEQ ID NO: 3905870 - RNA, 23 nt, Human adenovirus B [HAdV-B]
cagugaugagcagcuaacccgau

SEQ ID NO: 3905871 - RNA, 14 nt, Human adenovirus B [HAdV-B]
cagugcaggcagca

SEQ ID NO: 3905872 - RNA, 16 nt, Human adenovirus B [HAdV-B]
caguggauugcagaag

SEQ ID NO: 3905873 - RNA, 20 nt, Human adenovirus B [HAdV-B]
caguggcagccuagucgcag

SEQ ID NO: 3905874 - RNA, 21 nt, Human adenovirus B [HAdV-B]
caguguggaagagcucagccg

SEQ ID NO: 3905875 - RNA, 13 nt, Human adenovirus B [HAdV-B]
caguuacuaugac

SEQ ID NO: 3905876 - RNA, 15 nt, Human adenovirus B [HAdV-B]
cauacaauccagaca

SEQ ID NO: 3905877 - RNA, 15 nt, Human adenovirus B [HAdV-B]
cauacaugccacaga

SEQ ID NO: 3905878 - RNA, 18 nt, Human adenovirus B [HAdV-B]
cauacucgcgugccaggc

SEQ ID NO: 3905879 - RNA, 23 nt, Human adenovirus B [HAdV-B]
cauauucuguuugguaaaacaag

SEQ ID NO: 3905880 - RNA, 12 nt, Human adenovirus B [HAdV-B]
caucaguuucac

SEQ ID NO: 3905881 - RNA, 15 nt, Human adenovirus B [HAdV-B]
cauccucgacaugag

SEQ ID NO: 3905882 - RNA, 13 nt, Human adenovirus B [HAdV-B]
caucgugcucagu

SEQ ID NO: 3905883 - RNA, 12 nt, Human adenovirus B [HAdV-B]
caucuacugugg

SEQ ID NO: 3905884 - RNA, 19 nt, Human adenovirus B [HAdV-B]
caucucccaccacacccga

SEQ ID NO: 3905885 - RNA, 14 nt, Human adenovirus B [HAdV-B]
caucuuccagcaga

SEQ ID NO: 3905886 - RNA, 14 nt, Human adenovirus B [HAdV-B]
caucuucccagagc

SEQ ID NO: 3905887 - RNA, 15 nt, Human adenovirus B [HAdV-B]
caugaaucaugugaa

SEQ ID NO: 3905888 - RNA, 19 nt, Human adenovirus B [HAdV-B]
caugcauacuaacaugcca

SEQ ID NO: 3905889 - RNA, 17 nt, Human adenovirus B [HAdV-B]
caugccaaacgugaacg

SEQ ID NO: 3905890 - RNA, 15 nt, Human adenovirus B [HAdV-B]
cauggaaacucagcc

SEQ ID NO: 3905891 - RNA, 20 nt, Human adenovirus B [HAdV-B]
cauggaagcuguagugccuu

SEQ ID NO: 3905892 - RNA, 20 nt, Human adenovirus B [HAdV-B]
cauggaugagcaucacagcg

SEQ ID NO: 3905893 - RNA, 13 nt, Human adenovirus B [HAdV-B]
caugggcauuuug

SEQ ID NO: 3905894 - RNA, 12 nt, Human adenovirus B [HAdV-B]
cauguccaccug

SEQ ID NO: 3905895 - RNA, 21 nt, Human adenovirus B [HAdV-B]
caugugauggcgcuagcagcc

SEQ ID NO: 3905896 - RNA, 17 nt, Human adenovirus B [HAdV-B]
cauuaacuuugaugaac

SEQ ID NO: 3905897 - RNA, 15 nt, Human adenovirus B [HAdV-B]
cauuccuuaugcuua

SEQ ID NO: 3905898 - RNA, 14 nt, Human adenovirus B [HAdV-B]
cauugaugcucuau

SEQ ID NO: 3905899 - RNA, 14 nt, Human adenovirus B [HAdV-B]
cauugcuucucuga

SEQ ID NO: 3905900 - RNA, 16 nt, Human adenovirus B [HAdV-B]
ccaaagacugguucuu

SEQ ID NO: 3905901 - RNA, 12 nt, Human adenovirus B [HAdV-B]
ccaacagaaaac

SEQ ID NO: 3905902 - RNA, 16 nt, Human adenovirus B [HAdV-B]
ccccaucgaugcugcc

SEQ ID NO: 3905903 - RNA, 16 nt, Human adenovirus B [HAdV-B]
ccccggacccaaguug

SEQ ID NO: 3905904 - RNA, 20 nt, Human adenovirus B [HAdV-B]
cccgaagccuuuagacagca

SEQ ID NO: 3905905 - RNA, 22 nt, Human adenovirus B [HAdV-B]
cccgcaaugcgggcggcgcugc

SEQ ID NO: 3905906 - RNA, 13 nt, Human adenovirus B [HAdV-B]
cccgcaggcagug

SEQ ID NO: 3905907 - RNA, 15 nt, Human adenovirus B [HAdV-B]
cccgggacuguggac

SEQ ID NO: 3905908 - RNA, 13 nt, Human adenovirus B [HAdV-B]
cccuacgcugucu

SEQ ID NO: 3905909 - RNA, 14 nt, Human adenovirus B [HAdV-B]
ccgacggugcugca

SEQ ID NO: 3905910 - RNA, 12 nt, Human adenovirus B [HAdV-B]
ccgcaagagcuc

SEQ ID NO: 3905911 - RNA, 18 nt, Human adenovirus B [HAdV-B]
ccgccaaacccaacacac

SEQ ID NO: 3905912 - RNA, 20 nt, Human adenovirus B [HAdV-B]
ccgcguucgggggugugcuc

SEQ ID NO: 3905913 - RNA, 22 nt, Human adenovirus B [HAdV-B]
ccggcauggguguauggcagca

SEQ ID NO: 3905914 - RNA, 22 nt, Human adenovirus B [HAdV-B]
ccggcgaaggcgcauugccaga

SEQ ID NO: 3905915 - RNA, 16 nt, Human adenovirus B [HAdV-B]
ccggucccacucgaag

SEQ ID NO: 3905916 - RNA, 18 nt, Human adenovirus B [HAdV-B]
ccgucgccauacccuacc

SEQ ID NO: 3905917 - RNA, 16 nt, Human adenovirus B [HAdV-B]
ccguucucgcuggcca

SEQ ID NO: 3905918 - RNA, 21 nt, Human adenovirus B [HAdV-B]
ccuacuugcgcaaguuugcuc

SEQ ID NO: 3905919 - RNA, 13 nt, Human adenovirus B [HAdV-B]
ccuagaaauuucu

SEQ ID NO: 3905920 - RNA, 21 nt, Human adenovirus B [HAdV-B]
ccuagucuacccuuuucucua

SEQ ID NO: 3905921 - RNA, 15 nt, Human adenovirus B [HAdV-B]
ccucaaaacuccacu

SEQ ID NO: 3905922 - RNA, 15 nt, Human adenovirus B [HAdV-B]
ccucaagggccgcac

SEQ ID NO: 3905923 - RNA, 16 nt, Human adenovirus B [HAdV-B]
ccuccaguggaggagg

SEQ ID NO: 3905924 - RNA, 22 nt, Human adenovirus B [HAdV-B]
ccuccccaauuggcuccagcaa

SEQ ID NO: 3905925 - RNA, 13 nt, Human adenovirus B [HAdV-B]
ccuccgccagaaa

SEQ ID NO: 3905926 - RNA, 13 nt, Human adenovirus B [HAdV-B]
ccucgcagcagca

SEQ ID NO: 3905927 - RNA, 15 nt, Human adenovirus B [HAdV-B]
ccucucaccuaccgc

SEQ ID NO: 3905928 - RNA, 16 nt, Human adenovirus B [HAdV-B]
ccugauuacuucuuuc

SEQ ID NO: 3905929 - RNA, 20 nt, Human adenovirus B [HAdV-B]
ccugcauggugggaaucaac

SEQ ID NO: 3905930 - RNA, 15 nt, Human adenovirus B [HAdV-B]
ccugcugcgcacugc

SEQ ID NO: 3905931 - RNA, 13 nt, Human adenovirus B [HAdV-B]
ccuggaaggcgga

SEQ ID NO: 3905932 - RNA, 21 nt, Human adenovirus B [HAdV-B]
ccuggaaggcggaugacuggc

SEQ ID NO: 3905933 - RNA, 18 nt, Human adenovirus B [HAdV-B]
ccuggagcgacaucggca

SEQ ID NO: 3905934 - RNA, 18 nt, Human adenovirus B [HAdV-B]
ccugucugauuccuggau

SEQ ID NO: 3905935 - RNA, 17 nt, Human adenovirus B [HAdV-B]
ccuguuccgucuggcca

SEQ ID NO: 3905936 - RNA, 16 nt, Human adenovirus B [HAdV-B]
ccuuagaaaaugcaaa

SEQ ID NO: 3905937 - RNA, 17 nt, Human adenovirus B [HAdV-B]
ccuuccaguacucuucu

SEQ ID NO: 3905938 - RNA, 13 nt, Human adenovirus B [HAdV-B]
ccuuuagacagca

SEQ ID NO: 3905939 - RNA, 14 nt, Human adenovirus B [HAdV-B]
ccuuugacacugcc

SEQ ID NO: 3905940 - RNA, 16 nt, Human adenovirus B [HAdV-B]
cgaagagaaucugcac

SEQ ID NO: 3905941 - RNA, 14 nt, Human adenovirus B [HAdV-B]
cgaaguugaugaaa

SEQ ID NO: 3905942 - RNA, 14 nt, Human adenovirus B [HAdV-B]
cgagacgcccaggc

SEQ ID NO: 3905943 - RNA, 16 nt, Human adenovirus B [HAdV-B]
cgagcaagacccgggc

SEQ ID NO: 3905944 - RNA, 16 nt, Human adenovirus B [HAdV-B]
cgaggcagucuaccug

SEQ ID NO: 3905945 - RNA, 13 nt, Human adenovirus B [HAdV-B]
cgaguacuuggaa

SEQ ID NO: 3905946 - RNA, 15 nt, Human adenovirus B [HAdV-B]
cgauccaugcuucug

SEQ ID NO: 3905947 - RNA, 17 nt, Human adenovirus B [HAdV-B]
cgaugggucuucuccug

SEQ ID NO: 3905948 - RNA, 18 nt, Human adenovirus B [HAdV-B]
cgaugggucuucuccugg

SEQ ID NO: 3905949 - RNA, 19 nt, Human adenovirus B [HAdV-B]
cgcaaaguucgacaugugu

SEQ ID NO: 3905950 - RNA, 14 nt, Human adenovirus B [HAdV-B]
cgcauugccagacg

SEQ ID NO: 3905951 - RNA, 13 nt, Human adenovirus B [HAdV-B]
cgccaccugcugc

SEQ ID NO: 3905952 - RNA, 17 nt, Human adenovirus B [HAdV-B]
cgccagacgccgcaccu

SEQ ID NO: 3905953 - RNA, 16 nt, Human adenovirus B [HAdV-B]
cgccaugacagacaga

SEQ ID NO: 3905954 - RNA, 22 nt, Human adenovirus B [HAdV-B]
cgcccguaauuauacuccuacu

SEQ ID NO: 3905955 - RNA, 14 nt, Human adenovirus B [HAdV-B]
cgccucccaggacu

SEQ ID NO: 3905956 - RNA, 10 nt, Human adenovirus B [HAdV-B]
cgcgaacagg

SEQ ID NO: 3905957 - RNA, 14 nt, Human adenovirus B [HAdV-B]
cgcucacaccucac

SEQ ID NO: 3905958 - RNA, 11 nt, Human adenovirus B [HAdV-B]
cgcuuucacag

SEQ ID NO: 3905959 - RNA, 15 nt, Human adenovirus B [HAdV-B]
cggaagccagcaccc

SEQ ID NO: 3905960 - RNA, 17 nt, Human adenovirus B [HAdV-B]
cggagacaagcaacagc

SEQ ID NO: 3905961 - RNA, 14 nt, Human adenovirus B [HAdV-B]
cggagggcagaaac

SEQ ID NO: 3905962 - RNA, 14 nt, Human adenovirus B [HAdV-B]
cggcaggaugugag

SEQ ID NO: 3905963 - RNA, 17 nt, Human adenovirus B [HAdV-B]
cggcaggcgccucccag

SEQ ID NO: 3905964 - RNA, 17 nt, Human adenovirus B [HAdV-B]
cggcaggucccgcaggc

SEQ ID NO: 3905965 - RNA, 23 nt, Human adenovirus B [HAdV-B]
cggcgcuacuugcuauuccacca

SEQ ID NO: 3905966 - RNA, 16 nt, Human adenovirus B [HAdV-B]
cgggcaugaccucugc

SEQ ID NO: 3905967 - RNA, 16 nt, Human adenovirus B [HAdV-B]
cgggcggaaucgggac

SEQ ID NO: 3905968 - RNA, 16 nt, Human adenovirus B [HAdV-B]
cgggucgugagcugcg

SEQ ID NO: 3905969 - RNA, 18 nt, Human adenovirus B [HAdV-B]
cgguacaccggauugcag

SEQ ID NO: 3905970 - RNA, 19 nt, Human adenovirus B [HAdV-B]
cggucacuuugcagcaagu

SEQ ID NO: 3905971 - RNA, 13 nt, Human adenovirus B [HAdV-B]
cgguccagcaagu

SEQ ID NO: 3905972 - RNA, 22 nt, Human adenovirus B [HAdV-B]
cgguucauuggggucaaaaaca

SEQ ID NO: 3905973 - RNA, 20 nt, Human adenovirus B [HAdV-B]
cguacgagagcgugaugcag

SEQ ID NO: 3905974 - RNA, 20 nt, Human adenovirus B [HAdV-B]
cguagacugauuuuacaggc

SEQ ID NO: 3905975 - RNA, 16 nt, Human adenovirus B [HAdV-B]
cguagcccaaugcaac

SEQ ID NO: 3905976 - RNA, 15 nt, Human adenovirus B [HAdV-B]
cgucaucacccaggg

SEQ ID NO: 3905977 - RNA, 19 nt, Human adenovirus B [HAdV-B]
cguccagcgcugccagggu

SEQ ID NO: 3905978 - RNA, 20 nt, Human adenovirus B [HAdV-B]
cguggucauuucuugcuugc

SEQ ID NO: 3905979 - RNA, 19 nt, Human adenovirus B [HAdV-B]
uauuuugccucccccuucc

SEQ ID NO: 3905980 - RNA, 13 nt, Human adenovirus B [HAdV-B]
uauuuuugcuucu

SEQ ID NO: 3905981 - RNA, 20 nt, Human adenovirus B [HAdV-B]
ucaacaauaccuguguagau

SEQ ID NO: 3905982 - RNA, 13 nt, Human adenovirus B [HAdV-B]
ucaagauggccac

SEQ ID NO: 3905983 - RNA, 13 nt, Human adenovirus B [HAdV-B]
ucacagagacgag

SEQ ID NO: 3905984 - RNA, 20 nt, Human adenovirus B [HAdV-B]
ucacaucucguccucagcga

SEQ ID NO: 3905985 - RNA, 21 nt, Human adenovirus B [HAdV-B]
ucaccaaacugcuuagccaga

SEQ ID NO: 3905986 - RNA, 15 nt, Human adenovirus B [HAdV-B]
ucaccaaggccaugg

SEQ ID NO: 3905987 - RNA, 14 nt, Human adenovirus B [HAdV-B]
ucaccugggcagcu

SEQ ID NO: 3905988 - RNA, 14 nt, Human adenovirus B [HAdV-B]
ucacuucccucuuc

SEQ ID NO: 3905989 - RNA, 19 nt, Human adenovirus B [HAdV-B]
ucagauaaggcguaguguu

SEQ ID NO: 3905990 - RNA, 19 nt, Human adenovirus B [HAdV-B]
ucagcaauaaggucucugu

SEQ ID NO: 3905991 - RNA, 17 nt, Human adenovirus B [HAdV-B]
ucagccagaaccucagc

SEQ ID NO: 3905992 - RNA, 15 nt, Human adenovirus B [HAdV-B]
ucauccaaauucacc

SEQ ID NO: 3905993 - RNA, 23 nt, Human adenovirus B [HAdV-B]
ucauccauggagguuugggccau

SEQ ID NO: 3905994 - RNA, 17 nt, Human adenovirus B [HAdV-B]
ucaugaccagcaugaaa

SEQ ID NO: 3905995 - RNA, 11 nt, Human adenovirus B [HAdV-B]
ucaugccugga

SEQ ID NO: 3905996 - RNA, 21 nt, Human adenovirus B [HAdV-B]
ucaugguaccuagaaauuucu

SEQ ID NO: 3905997 - RNA, 20 nt, Human adenovirus B [HAdV-B]
uccaacagaaaaccagcagc

SEQ ID NO: 3905998 - RNA, 16 nt, Human adenovirus B [HAdV-B]
uccagcgcugccaggg

SEQ ID NO: 3905999 - RNA, 13 nt, Human adenovirus B [HAdV-B]
uccagucuccugc

SEQ ID NO: 3906000 - RNA, 16 nt, Human adenovirus B [HAdV-B]
uccagucuccugccgc

SEQ ID NO: 3906001 - RNA, 21 nt, Human adenovirus B [HAdV-B]
uccaucacaagacaagccaca

SEQ ID NO: 3906002 - RNA, 22 nt, Human adenovirus B [HAdV-B]
uccaucagcagacacaucacuu

SEQ ID NO: 3906003 - RNA, 16 nt, Human adenovirus B [HAdV-B]
ucccagggauuuggaa

SEQ ID NO: 3906004 - RNA, 20 nt, Human adenovirus B [HAdV-B]
ucccgagugguacacugucu

SEQ ID NO: 3906005 - RNA, 16 nt, Human adenovirus B [HAdV-B]
ucccgcagacucauuu

SEQ ID NO: 3906006 - RNA, 22 nt, Human adenovirus B [HAdV-B]
ucccgccaagaauuucuacuga

SEQ ID NO: 3906007 - RNA, 19 nt, Human adenovirus B [HAdV-B]
ucccgcugucaaccugccc

SEQ ID NO: 3906008 - RNA, 16 nt, Human adenovirus B [HAdV-B]
uccgaccuggcagacc

SEQ ID NO: 3906009 - RNA, 12 nt, Human adenovirus B [HAdV-B]
uccgacugcagc

SEQ ID NO: 3906010 - RNA, 20 nt, Human adenovirus B [HAdV-B]
uccgcgauaccuggcaccua

SEQ ID NO: 3906011 - RNA, 15 nt, Human adenovirus B [HAdV-B]
uccgguauccugccc

SEQ ID NO: 3906012 - RNA, 19 nt, Human adenovirus B [HAdV-B]
ucgagccggccggagccgc

SEQ ID NO: 3906013 - RNA, 16 nt, Human adenovirus B [HAdV-B]
ucgagggucugggcaa

SEQ ID NO: 3906014 - RNA, 13 nt, Human adenovirus B [HAdV-B]
ucgcgugccaggc

SEQ ID NO: 3906015 - RNA, 15 nt, Human adenovirus B [HAdV-B]
ucgcucaccagaagu

SEQ ID NO: 3906016 - RNA, 16 nt, Human adenovirus B [HAdV-B]
ucggaacuggcaccuc

SEQ ID NO: 3906017 - RNA, 13 nt, Human adenovirus B [HAdV-B]
ucgggggcagagg

SEQ ID NO: 3906018 - RNA, 22 nt, Human adenovirus B [HAdV-B]
ucgguccuuccagggucucagu

SEQ ID NO: 3906019 - RNA, 19 nt, Human adenovirus B [HAdV-B]
ucuaaggccauuugccauu

SEQ ID NO: 3906020 - RNA, 16 nt, Human adenovirus B [HAdV-B]
ucuagaccacugccgc

SEQ ID NO: 3906021 - RNA, 13 nt, Human adenovirus B [HAdV-B]
ucuaugaggacca

SEQ ID NO: 3906022 - RNA, 20 nt, Human adenovirus B [HAdV-B]
ucugcacucagguugucagu

SEQ ID NO: 3906023 - RNA, 17 nt, Human adenovirus B [HAdV-B]
ucuguauugcaggagaa

SEQ ID NO: 3906024 - RNA, 22 nt, Human adenovirus B [HAdV-B]
ucuuaaaccggucacuuugcag

SEQ ID NO: 3906025 - RNA, 17 nt, Human adenovirus B [HAdV-B]
ucuucgggggcagaggu

SEQ ID NO: 3906026 - RNA, 15 nt, Human adenovirus B [HAdV-B]
ugaaacccacugcua

SEQ ID NO: 3906027 - RNA, 11 nt, Human adenovirus B [HAdV-B]
ugaacucugau

SEQ ID NO: 3906028 - RNA, 14 nt, Human adenovirus B [HAdV-B]
ugaagccaugcugc

SEQ ID NO: 3906029 - RNA, 18 nt, Human adenovirus B [HAdV-B]
ugaaggaugaaaaaaaac

SEQ ID NO: 3906030 - RNA, 11 nt, Human adenovirus B [HAdV-B]
ugaagugcaaa

SEQ ID NO: 3906031 - RNA, 17 nt, Human adenovirus B [HAdV-B]
ugaauuagucugcaaaa

SEQ ID NO: 3906032 - RNA, 12 nt, Human adenovirus B [HAdV-B]
ugaccacagcaa

SEQ ID NO: 3906033 - RNA, 19 nt, Human adenovirus B [HAdV-B]
ugagaagguccuggccauc

SEQ ID NO: 3906034 - RNA, 13 nt, Human adenovirus B [HAdV-B]
ugagcugggaugg

SEQ ID NO: 3906035 - RNA, 17 nt, Human adenovirus B [HAdV-B]
ugaggaccaaucacagc

SEQ ID NO: 3906036 - RNA, 20 nt, Human adenovirus B [HAdV-B]
ugaggccacaacgcacagcc

SEQ ID NO: 3906037 - RNA, 14 nt, Human adenovirus B [HAdV-B]
ugaucgcacugcuu

SEQ ID NO: 3906038 - RNA, 12 nt, Human adenovirus B [HAdV-B]
ugaucuggacuu

SEQ ID NO: 3906039 - RNA, 18 nt, Human adenovirus B [HAdV-B]
ugaucuggacuuggaaga

SEQ ID NO: 3906040 - RNA, 14 nt, Human adenovirus B [HAdV-B]
ugaugaaaugacag

SEQ ID NO: 3906041 - RNA, 14 nt, Human adenovirus B [HAdV-B]
ugaugcguuucuua

SEQ ID NO: 3906042 - RNA, 22 nt, Human adenovirus B [HAdV-B]
ugcaaaucuggaagauccugag

SEQ ID NO: 3906043 - RNA, 13 nt, Human adenovirus B [HAdV-B]
ugcaacccccagu

SEQ ID NO: 3906044 - RNA, 20 nt, Human adenovirus B [HAdV-B]
aggagaaauauucacuggaa

SEQ ID NO: 3906045 - RNA, 21 nt, Human adenovirus B [HAdV-B]
aggaggauuaaagauuacagc

SEQ ID NO: 3906046 - RNA, 20 nt, Human adenovirus B [HAdV-B]
aggaggcggaguagcugacu

SEQ ID NO: 3906047 - RNA, 15 nt, Human adenovirus B [HAdV-B]
aggagucaaccccac

SEQ ID NO: 3906048 - RNA, 19 nt, Human adenovirus B [HAdV-B]
aggaugcauuauuggacag

SEQ ID NO: 3906049 - RNA, 13 nt, Human adenovirus B [HAdV-B]
aggauguccaagc

SEQ ID NO: 3906050 - RNA, 12 nt, Human adenovirus B [HAdV-B]
aggcaaaacaaa

SEQ ID NO: 3906051 - RNA, 18 nt, Human adenovirus B [HAdV-B]
aggcaauguauacugggu

SEQ ID NO: 3906052 - RNA, 19 nt, Human adenovirus B [HAdV-B]
aggcagaggaggcggagga

SEQ ID NO: 3906053 - RNA, 15 nt, Human adenovirus B [HAdV-B]
aggcgcugcugaaca

SEQ ID NO: 3906054 - RNA, 23 nt, Human adenovirus B [HAdV-B]
aggcuacaacguagcccaaugca

SEQ ID NO: 3906055 - RNA, 18 nt, Human adenovirus B [HAdV-B]
aggcuguucugacuuugg

SEQ ID NO: 3906056 - RNA, 14 nt, Human adenovirus B [HAdV-B]
agggaaaaguacag

SEQ ID NO: 3906057 - RNA, 16 nt, Human adenovirus B [HAdV-B]
agggauuuggaagagc

SEQ ID NO: 3906058 - RNA, 20 nt, Human adenovirus B [HAdV-B]
aggggacugccccauggcau

SEQ ID NO: 3906059 - RNA, 22 nt, Human adenovirus B [HAdV-B]
aggguaauuuguuugccaugga

SEQ ID NO: 3906060 - RNA, 17 nt, Human adenovirus B [HAdV-B]
agguguauuucacguga

SEQ ID NO: 3906061 - RNA, 13 nt, Human adenovirus B [HAdV-B]
agguucuguggac

SEQ ID NO: 3906062 - RNA, 20 nt, Human adenovirus B [HAdV-B]
aguacuggcuaccuaucaca

SEQ ID NO: 3906063 - RNA, 16 nt, Human adenovirus B [HAdV-B]
aguaguuauuuugccu

SEQ ID NO: 3906064 - RNA, 19 nt, Human adenovirus B [HAdV-B]
aguccugccagggcacacg

SEQ ID NO: 3906065 - RNA, 17 nt, Human adenovirus B [HAdV-B]
agucuguugaugcccaa

SEQ ID NO: 3906066 - RNA, 17 nt, Human adenovirus B [HAdV-B]
agugaaucuaaugauug

SEQ ID NO: 3906067 - RNA, 19 nt, Human adenovirus B [HAdV-B]
agugcgguacacccuggcc

SEQ ID NO: 3906068 - RNA, 15 nt, Human adenovirus B [HAdV-B]
agugcuuugagacug

SEQ ID NO: 3906069 - RNA, 14 nt, Human adenovirus B [HAdV-B]
aguuccaaauggag

SEQ ID NO: 3906070 - RNA, 12 nt, Human adenovirus B [HAdV-B]
auaaaacaggac

SEQ ID NO: 3906071 - RNA, 21 nt, Human adenovirus B [HAdV-B]
auaaacaagcuuguuguugau

SEQ ID NO: 3906072 - RNA, 19 nt, Human adenovirus B [HAdV-B]
auaauauugccaugcaggc

SEQ ID NO: 3906073 - RNA, 23 nt, Human adenovirus B [HAdV-B]
auacaccccguccaaugucacuc

SEQ ID NO: 3906074 - RNA, 22 nt, Human adenovirus B [HAdV-B]
auacacggcucucaugaaagca

SEQ ID NO: 3906075 - RNA, 22 nt, Human adenovirus B [HAdV-B]
auacuagucuugcuuguuuuac

SEQ ID NO: 3906076 - RNA, 19 nt, Human adenovirus B [HAdV-B]
auagcuuccuuggaagagg

SEQ ID NO: 3906077 - RNA, 17 nt, Human adenovirus B [HAdV-B]
auauaaucugcaacaaa

SEQ ID NO: 3906078 - RNA, 21 nt, Human adenovirus B [HAdV-B]
aucaacgugacagcaaaugac

SEQ ID NO: 3906079 - RNA, 19 nt, Human adenovirus B [HAdV-B]
aucacaaucuggcaacagc

SEQ ID NO: 3906080 - RNA, 15 nt, Human adenovirus B [HAdV-B]
aucacuuccaugccu

SEQ ID NO: 3906081 - RNA, 16 nt, Human adenovirus B [HAdV-B]
aucauagugcaggagc

SEQ ID NO: 3906082 - RNA, 19 nt, Human adenovirus B [HAdV-B]
aucauauugcuugaaagcc

SEQ ID NO: 3906083 - RNA, 15 nt, Human adenovirus B [HAdV-B]
aucaugguguggaag

SEQ ID NO: 3906084 - RNA, 19 nt, Human adenovirus B [HAdV-B]
auccauggaugcccaugcc

SEQ ID NO: 3906085 - RNA, 20 nt, Human adenovirus B [HAdV-B]
aucccacuaugcaacugaug

SEQ ID NO: 3906086 - RNA, 17 nt, Human adenovirus B [HAdV-B]
auccucggcugcggaga

SEQ ID NO: 3906087 - RNA, 20 nt, Human adenovirus B [HAdV-B]
aucuaaggccauuugccauu

SEQ ID NO: 3906088 - RNA, 18 nt, Human adenovirus B [HAdV-B]
aucuacuucgaacucccc

SEQ ID NO: 3906089 - RNA, 14 nt, Human adenovirus B [HAdV-B]
aucucccaccacac

SEQ ID NO: 3906090 - RNA, 16 nt, Human adenovirus B [HAdV-B]
aucuguaccugugcca

SEQ ID NO: 3906091 - RNA, 23 nt, Human adenovirus B [HAdV-B]
aucuugcaggucugccuacccau

SEQ ID NO: 3906092 - RNA, 12 nt, Human adenovirus B [HAdV-B]
augaaaaacacc

SEQ ID NO: 3906093 - RNA, 17 nt, Human adenovirus B [HAdV-B]
augaacaaugccaucau

SEQ ID NO: 3906094 - RNA, 14 nt, Human adenovirus B [HAdV-B]
augacagaaugcau

SEQ ID NO: 3906095 - RNA, 22 nt, Human adenovirus B [HAdV-B]
augaccagcaugaaaggaacua

SEQ ID NO: 3906096 - RNA, 17 nt, Human adenovirus B [HAdV-B]
augacccagaugccugu

SEQ ID NO: 3906097 - RNA, 20 nt, Human adenovirus B [HAdV-B]
augaguggaacuuuaggaag

SEQ ID NO: 3906098 - RNA, 22 nt, Human adenovirus B [HAdV-B]
augauauucuugagcaggcggc

SEQ ID NO: 3906099 - RNA, 23 nt, Human adenovirus B [HAdV-B]
augccaucaucuccugcuugcau

SEQ ID NO: 3906100 - RNA, 12 nt, Human adenovirus B [HAdV-B]
augcccagcacg

SEQ ID NO: 3906101 - RNA, 20 nt, Human adenovirus B [HAdV-B]
augcuuagggcggccagacg

SEQ ID NO: 3906102 - RNA, 13 nt, Human adenovirus B [HAdV-B]
auggaaaucccac

SEQ ID NO: 3906103 - RNA, 14 nt, Human adenovirus B [HAdV-B]
auggcagggaagug

SEQ ID NO: 3906104 - RNA, 16 nt, Human adenovirus B [HAdV-B]
augggcaccuggagcg

SEQ ID NO: 3906105 - RNA, 15 nt, Human adenovirus B [HAdV-B]
augggcgaagaggag

SEQ ID NO: 3906106 - RNA, 21 nt, Human adenovirus B [HAdV-B]
auggugggucuuugaaaaaug

SEQ ID NO: 3906107 - RNA, 14 nt, Human adenovirus B [HAdV-B]
auguuuaaccccac

SEQ ID NO: 3906108 - RNA, 12 nt, Human adenovirus B [HAdV-B]
auucccugcaga

SEQ ID NO: 3906109 - RNA, 20 nt, Human adenovirus B [HAdV-B]
auucuguuugguaaaacaag

SEQ ID NO: 3906110 - RNA, 16 nt, Human adenovirus B [HAdV-B]
auucuuaacagugcag

SEQ ID NO: 3906111 - RNA, 22 nt, Human adenovirus B [HAdV-B]
auugaugacaauauuaacaccu

SEQ ID NO: 3906112 - RNA, 12 nt, Human adenovirus B [HAdV-B]
auugccacagcu

SEQ ID NO: 3906113 - RNA, 19 nt, Human adenovirus B [HAdV-B]
auuguguucuccuaggcag

SEQ ID NO: 3906114 - RNA, 14 nt, Human adenovirus B [HAdV-B]
auuguguuucaagc

SEQ ID NO: 3906115 - RNA, 20 nt, Human adenovirus B [HAdV-B]
auuuacuaacuagacucuca

SEQ ID NO: 3906116 - RNA, 20 nt, Human adenovirus B [HAdV-B]
auuuuacaggccucuucucc

SEQ ID NO: 3906117 - RNA, 23 nt, Human adenovirus B [HAdV-B]
auuuuggagagaguuugcugcaa

SEQ ID NO: 3906118 - RNA, 23 nt, Human adenovirus B [HAdV-B]
caaaaauaaaaaaaaaaacaagc

SEQ ID NO: 3906119 - RNA, 17 nt, Human adenovirus B [HAdV-B]
caaaauagaagcugcua

SEQ ID NO: 3906120 - RNA, 13 nt, Human adenovirus B [HAdV-B]
caaacgccagaag

SEQ ID NO: 3906121 - RNA, 14 nt, Human adenovirus B [HAdV-B]
caaagaaacucccu

SEQ ID NO: 3906122 - RNA, 13 nt, Human adenovirus B [HAdV-B]
caacaaaacaaaa

SEQ ID NO: 3906123 - RNA, 12 nt, Human adenovirus B [HAdV-B]
caaccacacucu

SEQ ID NO: 3906124 - RNA, 18 nt, Human adenovirus B [HAdV-B]
caagaauuucuacugaaa

SEQ ID NO: 3906125 - RNA, 14 nt, Human adenovirus B [HAdV-B]
caagauuggaauaa

SEQ ID NO: 3906126 - RNA, 12 nt, Human adenovirus B [HAdV-B]
caagcaggagag

SEQ ID NO: 3906127 - RNA, 21 nt, Human adenovirus B [HAdV-B]
caagccacagggucuccagcu

SEQ ID NO: 3906128 - RNA, 19 nt, Human adenovirus B [HAdV-B]
caaguugaucaugccugga

SEQ ID NO: 3906129 - RNA, 12 nt, Human adenovirus B [HAdV-B]
caauaacaaaac

SEQ ID NO: 3906130 - RNA, 15 nt, Human adenovirus B [HAdV-B]
gcgaaggugaagauu

SEQ ID NO: 3906131 - RNA, 15 nt, Human adenovirus B [HAdV-B]
gcgaccuccaacaga

SEQ ID NO: 3906132 - RNA, 14 nt, Human adenovirus B [HAdV-B]
gcgaggagccggag

SEQ ID NO: 3906133 - RNA, 15 nt, Human adenovirus B [HAdV-B]
gcgauaaugccagac

SEQ ID NO: 3906134 - RNA, 12 nt, Human adenovirus B [HAdV-B]
gcgccagcagga

SEQ ID NO: 3906135 - RNA, 19 nt, Human adenovirus B [HAdV-B]
gcgccagcaucaguuucac

SEQ ID NO: 3906136 - RNA, 19 nt, Human adenovirus B [HAdV-B]
gcgccgcgacggcaggaug

SEQ ID NO: 3906137 - RNA, 22 nt, Human adenovirus B [HAdV-B]
gcgccucccaggacuacuccac

SEQ ID NO: 3906138 - RNA, 14 nt, Human adenovirus B [HAdV-B]
gcgcugcagagcca

SEQ ID NO: 3906139 - RNA, 15 nt, Human adenovirus B [HAdV-B]
gcgcugcagagccag

SEQ ID NO: 3906140 - RNA, 20 nt, Human adenovirus B [HAdV-B]
gcggacauugcuucucugaa

SEQ ID NO: 3906141 - RNA, 21 nt, Human adenovirus B [HAdV-B]
gcggcgaggagccggaggaga

SEQ ID NO: 3906142 - RNA, 15 nt, Human adenovirus B [HAdV-B]
gcgggacagcccgcc

SEQ ID NO: 3906143 - RNA, 16 nt, Human adenovirus B [HAdV-B]
gcguggcucgcuacaa

SEQ ID NO: 3906144 - RNA, 22 nt, Human adenovirus B [HAdV-B]
gcguugguggagaacaaagcua

SEQ ID NO: 3906145 - RNA, 18 nt, Human adenovirus B [HAdV-B]
gcuauuugcaccacacuu

SEQ ID NO: 3906146 - RNA, 15 nt, Human adenovirus B [HAdV-B]
gcucuuacugcggag

SEQ ID NO: 3906147 - RNA, 14 nt, Human adenovirus B [HAdV-B]
gcucuuccucacug

SEQ ID NO: 3906148 - RNA, 20 nt, Human adenovirus B [HAdV-B]
gcugacuugucuccugaacu

SEQ ID NO: 3906149 - RNA, 18 nt, Human adenovirus B [HAdV-B]
gcuggauauggccagcac

SEQ ID NO: 3906150 - RNA, 20 nt, Human adenovirus B [HAdV-B]
gcuuaacuugccuaucugug

SEQ ID NO: 3906151 - RNA, 16 nt, Human adenovirus B [HAdV-B]
gcuuccuuggaagagg

SEQ ID NO: 3906152 - RNA, 22 nt, Human adenovirus B [HAdV-B]
gcuucucugaacuaucagaaug

SEQ ID NO: 3906153 - RNA, 13 nt, Human adenovirus B [HAdV-B]
gcuucuugcaaau

SEQ ID NO: 3906154 - RNA, 22 nt, Human adenovirus B [HAdV-B]
ggaacagcaguacaggacaggc

SEQ ID NO: 3906155 - RNA, 22 nt, Human adenovirus B [HAdV-B]
ggaaccagaugccuuuuccaga

SEQ ID NO: 3906156 - RNA, 20 nt, Human adenovirus B [HAdV-B]
ggaagagcucagccgcgccu

SEQ ID NO: 3906157 - RNA, 24 nt, Human adenovirus B [HAdV-B]
ggaagauccugagguaugaugaua

SEQ ID NO: 3906158 - RNA, 17 nt, Human adenovirus B [HAdV-B]
ggaaggcggaugacugg

SEQ ID NO: 3906159 - RNA, 11 nt, Human adenovirus B [HAdV-B]
ggaaguuucag

SEQ ID NO: 3906160 - RNA, 15 nt, Human adenovirus B [HAdV-B]
ggaauccugaggcau

SEQ ID NO: 3906161 - RNA, 19 nt, Human adenovirus B [HAdV-B]
ggacccuccaguggaggag

SEQ ID NO: 3906162 - RNA, 23 nt, Human adenovirus B [HAdV-B]
ggaccguucaauuuguggaggag

SEQ ID NO: 3906163 - RNA, 18 nt, Human adenovirus B [HAdV-B]
ggagacggcuugcuggag

SEQ ID NO: 3906164 - RNA, 17 nt, Human adenovirus B [HAdV-B]
ggagcagccaaaucaga

SEQ ID NO: 3906165 - RNA, 13 nt, Human adenovirus B [HAdV-B]
ggcaaaguuuaaa

SEQ ID NO: 3906166 - RNA, 14 nt, Human adenovirus B [HAdV-B]
ggcaauucuggccc

SEQ ID NO: 3906167 - RNA, 15 nt, Human adenovirus B [HAdV-B]
ggcaauucuggccca

SEQ ID NO: 3906168 - RNA, 13 nt, Human adenovirus B [HAdV-B]
ggcaccuggagcg

SEQ ID NO: 3906169 - RNA, 13 nt, Human adenovirus B [HAdV-B]
ggcacgagccaac

SEQ ID NO: 3906170 - RNA, 19 nt, Human adenovirus B [HAdV-B]
ggcaggaugucacuccaca

SEQ ID NO: 3906171 - RNA, 14 nt, Human adenovirus B [HAdV-B]
ggcaggaugugagc

SEQ ID NO: 3906172 - RNA, 14 nt, Human adenovirus B [HAdV-B]
ggcaguuuggaagc

SEQ ID NO: 3906173 - RNA, 20 nt, Human adenovirus B [HAdV-B]
ggccaucauggaagcuguag

SEQ ID NO: 3906174 - RNA, 22 nt, Human adenovirus B [HAdV-B]
ggcccuggcagaacacacucuu

SEQ ID NO: 3906175 - RNA, 17 nt, Human adenovirus B [HAdV-B]
ggcgacggcggugaugc

SEQ ID NO: 3906176 - RNA, 16 nt, Human adenovirus B [HAdV-B]
ggcgaggaggaagagg

SEQ ID NO: 3906177 - RNA, 18 nt, Human adenovirus B [HAdV-B]
ggcgcuccucguccaaau

SEQ ID NO: 3906178 - RNA, 17 nt, Human adenovirus B [HAdV-B]
ggcgcugcagagccagc

SEQ ID NO: 3906179 - RNA, 13 nt, Human adenovirus B [HAdV-B]
ggcgggcacccaa

SEQ ID NO: 3906180 - RNA, 14 nt, Human adenovirus B [HAdV-B]
ggcggguggugccg

SEQ ID NO: 3906181 - RNA, 21 nt, Human adenovirus B [HAdV-B]
ggcuccagcaaaaacaagauu

SEQ ID NO: 3906182 - RNA, 22 nt, Human adenovirus B [HAdV-B]
ggcuccuaaaggcgcuccaaau

SEQ ID NO: 3906183 - RNA, 13 nt, Human adenovirus B [HAdV-B]
ggcuguggacagu

SEQ ID NO: 3906184 - RNA, 17 nt, Human adenovirus B [HAdV-B]
ggcuugacggggaagac

SEQ ID NO: 3906185 - RNA, 18 nt, Human adenovirus B [HAdV-B]
gggaacucauugaguuca

SEQ ID NO: 3906186 - RNA, 19 nt, Human adenovirus B [HAdV-B]
gggacagucaggcagagga

SEQ ID NO: 3906187 - RNA, 22 nt, Human adenovirus B [HAdV-B]
gggacgaggauuucgaaguuga

SEQ ID NO: 3906188 - RNA, 14 nt, Human adenovirus B [HAdV-B]
gggaugaaguuucu

SEQ ID NO: 3906189 - RNA, 23 nt, Human adenovirus B [HAdV-B]
gggcggcuuucagaggcugguca

SEQ ID NO: 3906190 - RNA, 13 nt, Human adenovirus B [HAdV-B]
gggcggguggugc

SEQ ID NO: 3906191 - RNA, 17 nt, Human adenovirus B [HAdV-B]
gggcggucagcuaaaga

SEQ ID NO: 3906192 - RNA, 15 nt, Human adenovirus B [HAdV-B]
gggugggagaggaag

SEQ ID NO: 3906193 - RNA, 15 nt, Human adenovirus B [HAdV-B]
gguccgaccuggaag

SEQ ID NO: 3906194 - RNA, 14 nt, Human adenovirus B [HAdV-B]
ggucugcauccaug

SEQ ID NO: 3906195 - RNA, 20 nt, Human adenovirus B [HAdV-B]
ggugcucaacgguggcuucc

SEQ ID NO: 3906196 - RNA, 22 nt, Human adenovirus B [HAdV-B]
gguggauaaaaugaguagaugg

SEQ ID NO: 3906197 - RNA, 16 nt, Human adenovirus B [HAdV-B]
gguggggcggucagcu

SEQ ID NO: 3906198 - RNA, 15 nt, Human adenovirus B [HAdV-B]
guaacagaagaggaa

SEQ ID NO: 3906199 - RNA, 18 nt, Human adenovirus B [HAdV-B]
guaaugggaguaaagugu

SEQ ID NO: 3906200 - RNA, 16 nt, Human adenovirus B [HAdV-B]
guacaaacuguagaca

SEQ ID NO: 3906201 - RNA, 16 nt, Human adenovirus B [HAdV-B]
guacaaccacacucuu

SEQ ID NO: 3906202 - RNA, 18 nt, Human adenovirus B [HAdV-B]
guacagcgggcacacaaa

SEQ ID NO: 3906203 - RNA, 23 nt, Human adenovirus B [HAdV-B]
guagacgccagcgccaugacaga

SEQ ID NO: 3906204 - RNA, 12 nt, Human adenovirus B [HAdV-B]
guagaggaaugu

SEQ ID NO: 3906205 - RNA, 17 nt, Human adenovirus B [HAdV-B]
guagauggcgccagcau

SEQ ID NO: 3906206 - RNA, 19 nt, Human adenovirus B [HAdV-B]
guagucaauauagaaauua

SEQ ID NO: 3906207 - RNA, 16 nt, Human adenovirus B [HAdV-B]
guaguguuguaaauca

SEQ ID NO: 3906208 - RNA, 16 nt, Human adenovirus B [HAdV-B]
guaucaaggcucugca

SEQ ID NO: 3906209 - RNA, 19 nt, Human adenovirus B [HAdV-B]
guauccugcccgccaccug

SEQ ID NO: 3906210 - RNA, 15 nt, Human adenovirus B [HAdV-B]
guaucgcgaagccau

SEQ ID NO: 3906211 - RNA, 12 nt, Human adenovirus B [HAdV-B]
guaugcaaacac

SEQ ID NO: 3906212 - RNA, 15 nt, Human adenovirus B [HAdV-B]
guauggaagugcaaa

SEQ ID NO: 3906213 - RNA, 19 nt, Human adenovirus B [HAdV-B]
guauugguuuaaaaaaugg

SEQ ID NO: 3906214 - RNA, 20 nt, Human adenovirus B [HAdV-B]
gucaaauuuuagcuccucuc

SEQ ID NO: 3906215 - RNA, 13 nt, Human adenovirus B [HAdV-B]
gucaauugucucu

SEQ ID NO: 3906216 - RNA, 15 nt, Human adenovirus B [HAdV-B]
gucagcauugucacu

SEQ ID NO: 3906217 - RNA, 21 nt, Human adenovirus B [HAdV-B]
gucaugggugcuaccgcggcu

SEQ ID NO: 3906218 - RNA, 14 nt, Human adenovirus B [HAdV-B]
guccaaaugcgcac

SEQ ID NO: 3906219 - RNA, 17 nt, Human adenovirus B [HAdV-B]
guccuggcgggggcaua

SEQ ID NO: 3906220 - RNA, 19 nt, Human adenovirus B [HAdV-B]
gucggggucaagagcagga

SEQ ID NO: 3906221 - RNA, 20 nt, Human adenovirus B [HAdV-B]
gucggggucaagagcaggaa

SEQ ID NO: 3906222 - RNA, 16 nt, Human adenovirus B [HAdV-B]
gucuacccguuucuug

SEQ ID NO: 3906223 - RNA, 15 nt, Human adenovirus B [HAdV-B]
gucuuacugccuggc

SEQ ID NO: 3906224 - RNA, 22 nt, Human adenovirus B [HAdV-B]
gucuuccggaucgcuguccagg

SEQ ID NO: 3906225 - RNA, 15 nt, Human adenovirus B [HAdV-B]
gucuuccuuggcuuc

SEQ ID NO: 3906226 - RNA, 16 nt, Human adenovirus B [HAdV-B]
gucuuuccaucacaag

SEQ ID NO: 3906227 - RNA, 15 nt, Human adenovirus B [HAdV-B]
gugaaaguguuguug

SEQ ID NO: 3906228 - RNA, 15 nt, Human adenovirus B [HAdV-B]
gugagaauuggaaga

SEQ ID NO: 3906229 - RNA, 15 nt, Human adenovirus B [HAdV-B]
gugaggcgcgcgcag

SEQ ID NO: 3906230 - RNA, 18 nt, Human adenovirus B [HAdV-B]
gugccaggcacuuccauu

SEQ ID NO: 3906231 - RNA, 18 nt, Human adenovirus B [HAdV-B]
gugccagguggucucugg

SEQ ID NO: 3906232 - RNA, 19 nt, Human adenovirus B [HAdV-B]
gugcccaucaguguggaag

SEQ ID NO: 3906233 - RNA, 12 nt, Human adenovirus B [HAdV-B]
gugcgggggcaa

SEQ ID NO: 3906234 - RNA, 19 nt, Human adenovirus B [HAdV-B]
gugcucaacgguggcuucc

SEQ ID NO: 3906235 - RNA, 17 nt, Human adenovirus B [HAdV-B]
guggauuuuuuccagga

SEQ ID NO: 3906236 - RNA, 18 nt, Human adenovirus B [HAdV-B]
guggcgguucaggccucg

SEQ ID NO: 3906237 - RNA, 16 nt, Human adenovirus B [HAdV-B]
gugggauuguuucuga

SEQ ID NO: 3906238 - RNA, 20 nt, Human adenovirus B [HAdV-B]
guggucagugaugagcagcu

SEQ ID NO: 3906239 - RNA, 14 nt, Human adenovirus B [HAdV-B]
guguauggcagcaa

SEQ ID NO: 3906240 - RNA, 15 nt, Human adenovirus B [HAdV-B]
guguugcucaggcau

SEQ ID NO: 3906241 - RNA, 22 nt, Human adenovirus B [HAdV-B]
guuagcuggcggcuccacccua

SEQ ID NO: 3906242 - RNA, 19 nt, Human adenovirus B [HAdV-B]
guucaauuuguggaggagu

SEQ ID NO: 3906243 - RNA, 19 nt, Human adenovirus B [HAdV-B]
guuccggagacagggagga

SEQ ID NO: 3906244 - RNA, 16 nt, Human adenovirus B [HAdV-B]
guuccuggacauugcu

SEQ ID NO: 3906245 - RNA, 23 nt, Human adenovirus B [HAdV-B]
guucgaaccaccgucgaugaugu

SEQ ID NO: 3906246 - RNA, 18 nt, Human adenovirus B [HAdV-B]
guucgcaagaugaggaca

SEQ ID NO: 3906247 - RNA, 13 nt, Human adenovirus B [HAdV-B]
guucuggaggagg

SEQ ID NO: 3906248 - RNA, 17 nt, Human adenovirus B [HAdV-B]
guucuggaggaggaaca

SEQ ID NO: 3906249 - RNA, 14 nt, Human adenovirus B [HAdV-B]
guugguuaaucaug

SEQ ID NO: 3906250 - RNA, 18 nt, Human adenovirus B [HAdV-B]
guuguaucugguggacaa

SEQ ID NO: 3906251 - RNA, 15 nt, Human adenovirus B [HAdV-B]
guuuacuuaagguga

SEQ ID NO: 3906252 - RNA, 22 nt, Human adenovirus B [HAdV-B]
guuucacauuccaccagccagg

SEQ ID NO: 3906253 - RNA, 20 nt, Human adenovirus B [HAdV-B]
guuucauuuuccucacaacg

SEQ ID NO: 3906254 - RNA, 14 nt, Human adenovirus B [HAdV-B]
guuucugguggugc

SEQ ID NO: 3906255 - RNA, 23 nt, Human adenovirus B [HAdV-B]
uaacaggaauuuuugacaugaac

SEQ ID NO: 3906256 - RNA, 21 nt, Human adenovirus B [HAdV-B]
uaacuguucacugguuuuuau

SEQ ID NO: 3906257 - RNA, 18 nt, Human adenovirus B [HAdV-B]
uaacuuuuguaaauguua

SEQ ID NO: 3906258 - RNA, 23 nt, Human adenovirus B [HAdV-B]
uaagcagguagcgccuggucugg

SEQ ID NO: 3906259 - RNA, 19 nt, Human adenovirus B [HAdV-B]
uaagugcuuugagacugau

SEQ ID NO: 3906260 - RNA, 11 nt, Human adenovirus B [HAdV-B]
uaauuggaagg

SEQ ID NO: 3906261 - RNA, 11 nt, Human adenovirus B [HAdV-B]
uacaaaaccau

SEQ ID NO: 3906262 - RNA, 22 nt, Human adenovirus B [HAdV-B]
uacacaccuugcuucacuuucu

SEQ ID NO: 3906263 - RNA, 14 nt, Human adenovirus B [HAdV-B]
uacacugucucugu

SEQ ID NO: 3906264 - RNA, 19 nt, Human adenovirus B [HAdV-B]
uacaugggcaccuggagcg

SEQ ID NO: 3906265 - RNA, 16 nt, Human adenovirus B [HAdV-B]
uaccgcggcugagccc

SEQ ID NO: 3906266 - RNA, 23 nt, Human adenovirus B [HAdV-B]
uacgaccagacggaaucuuucag

SEQ ID NO: 3906267 - RNA, 23 nt, Human adenovirus B [HAdV-B]
uacggaagccagcacccagacca

SEQ ID NO: 3906268 - RNA, 20 nt, Human adenovirus B [HAdV-B]
uacggagggcagaaacagca

SEQ ID NO: 3906269 - RNA, 16 nt, Human adenovirus B [HAdV-B]
uacguucguucuucuu

SEQ ID NO: 3906270 - RNA, 20 nt, Human adenovirus B [HAdV-B]
uacuaccaauauuuuugcuu

SEQ ID NO: 3906271 - RNA, 14 nt, Human adenovirus B [HAdV-B]
uacucacaaacuag

SEQ ID NO: 3906272 - RNA, 23 nt, Human adenovirus B [HAdV-B]
uacucgcgugccaggcacuucca

SEQ ID NO: 3906273 - RNA, 14 nt, Human adenovirus B [HAdV-B]
uacuugaaaucagc

SEQ ID NO: 3906274 - RNA, 17 nt, Human adenovirus B [HAdV-B]
uagaaugcauucuucug

SEQ ID NO: 3906275 - RNA, 13 nt, Human adenovirus B [HAdV-B]
uagagacagaagc

SEQ ID NO: 3906276 - RNA, 18 nt, Human adenovirus B [HAdV-B]
uagaucaaaagaaaugcg

SEQ ID NO: 3906277 - RNA, 16 nt, Human adenovirus B [HAdV-B]
uagccccaauggccac

SEQ ID NO: 3906278 - RNA, 18 nt, Human adenovirus B [HAdV-B]
uaguuauguuccugaguu

SEQ ID NO: 3906279 - RNA, 12 nt, Human adenovirus B [HAdV-B]
uauaaauuaaau

SEQ ID NO: 3906280 - RNA, 18 nt, Human adenovirus B [HAdV-B]
uauaaauuuuacugcaga

SEQ ID NO: 3906281 - RNA, 19 nt, Human adenovirus B [HAdV-B]
uaucagaaaaaaacagcca

SEQ ID NO: 3906282 - RNA, 20 nt, Human adenovirus B [HAdV-B]
uauccugcccgccaccugcu

SEQ ID NO: 3906283 - RNA, 14 nt, Human adenovirus B [HAdV-B]
uaucggaggaggag

SEQ ID NO: 3906284 - RNA, 19 nt, Human adenovirus B [HAdV-B]
uaucuaacguggaacucac

SEQ ID NO: 3906285 - RNA, 11 nt, Human adenovirus B [HAdV-B]
uaucuggagcg

SEQ ID NO: 3906286 - RNA, 22 nt, Human adenovirus B [HAdV-B]
uaugcaucugcgccgcaggagg

SEQ ID NO: 3906287 - RNA, 18 nt, Human adenovirus B [HAdV-B]
uaugcccgucuucucaaa

SEQ ID NO: 3906288 - RNA, 22 nt, Human adenovirus B [HAdV-B]
uauggaagcaguaacuuuugua

SEQ ID NO: 3906289 - RNA, 12 nt, Human adenovirus B [HAdV-B]
uauggccagcac

SEQ ID NO: 3906290 - RNA, 16 nt, Human adenovirus B [HAdV-B]
uauuccaauguggcuc

SEQ ID NO: 3906291 - RNA, 17 nt, Human adenovirus B [HAdV-B]
uauuguucguguugcuc

SEQ ID NO: 3906292 - RNA, 13 nt, Human adenovirus B [HAdV-B]
ucaauucacaaaa

SEQ ID NO: 3906293 - RNA, 23 nt, Human adenovirus B [HAdV-B]
ucacaaaaggcugucccugcaac

SEQ ID NO: 3906294 - RNA, 14 nt, Human adenovirus B [HAdV-B]
ucacaagacaagcc

SEQ ID NO: 3906295 - RNA, 14 nt, Human adenovirus B [HAdV-B]
ucacaaucuggcaa

SEQ ID NO: 3906296 - RNA, 17 nt, Human adenovirus B [HAdV-B]
ucacaucucguccucag

SEQ ID NO: 3906297 - RNA, 12 nt, Human adenovirus B [HAdV-B]
ucacuccacagc

SEQ ID NO: 3906298 - RNA, 12 nt, Human adenovirus B [HAdV-B]
ucagaaauuccc

SEQ ID NO: 3906299 - RNA, 17 nt, Human adenovirus B [HAdV-B]
ucagacuagcagacagg

SEQ ID NO: 3906300 - RNA, 19 nt, Human adenovirus B [HAdV-B]
ucagacucauccugcuggu

SEQ ID NO: 3906301 - RNA, 20 nt, Human adenovirus B [HAdV-B]
ucagagaggcgcugcugaac

SEQ ID NO: 3906302 - RNA, 23 nt, Human adenovirus B [HAdV-B]
ucagaugcaucccgugcugcgac

SEQ ID NO: 3906303 - RNA, 21 nt, Human adenovirus B [HAdV-B]
ucagcauuggcaaugcugaac

SEQ ID NO: 3906304 - RNA, 15 nt, Human adenovirus B [HAdV-B]
ucaggaucacagaga

SEQ ID NO: 3906305 - RNA, 22 nt, Human adenovirus B [HAdV-B]
ucagucgcgcuuugggacagga

SEQ ID NO: 3906306 - RNA, 20 nt, Human adenovirus B [HAdV-B]
ucauaggagcuggcuuucau

SEQ ID NO: 3906307 - RNA, 20 nt, Human adenovirus B [HAdV-B]
ucaugcuccgggguaguguu

SEQ ID NO: 3906308 - RNA, 17 nt, Human adenovirus B [HAdV-B]
uccaaggaugagacagu

SEQ ID NO: 3906309 - RNA, 17 nt, Human adenovirus B [HAdV-B]
uccacauuccaaacagu

SEQ ID NO: 3906310 - RNA, 13 nt, Human adenovirus B [HAdV-B]
uccaccuuuucca

SEQ ID NO: 3906311 - RNA, 19 nt, Human adenovirus B [HAdV-B]
uccagcuuuugcugugcca

SEQ ID NO: 3906312 - RNA, 15 nt, Human adenovirus B [HAdV-B]
uccagucuccugccg

SEQ ID NO: 3906313 - RNA, 22 nt, Human adenovirus B [HAdV-B]
uccauggagguuugggccauuu

SEQ ID NO: 3906314 - RNA, 23 nt, Human adenovirus B [HAdV-B]
ucccacucaugagaagguccugg

SEQ ID NO: 3906315 - RNA, 12 nt, Human adenovirus B [HAdV-B]
ucccaucacugg

SEQ ID NO: 3906316 - RNA, 12 nt, Human adenovirus B [HAdV-B]
ucccaucaucgu

SEQ ID NO: 3906317 - RNA, 15 nt, Human adenovirus B [HAdV-B]
ucccucuaaauacac

SEQ ID NO: 3906318 - RNA, 18 nt, Human adenovirus B [HAdV-B]
ucccugcagaaaucuucc

SEQ ID NO: 3906319 - RNA, 21 nt, Human adenovirus B [HAdV-B]
uccgaccuggaaggcggauga

SEQ ID NO: 3906320 - RNA, 14 nt, Human adenovirus B [HAdV-B]
uccgaccuggcaga

SEQ ID NO: 3906321 - RNA, 21 nt, Human adenovirus B [HAdV-B]
uccgcgauugugucuaucugu

SEQ ID NO: 3906322 - RNA, 14 nt, Human adenovirus B [HAdV-B]
uccugaaaccauuu

SEQ ID NO: 3906323 - RNA, 16 nt, Human adenovirus B [HAdV-B]
ucgaaggcgggcauga

SEQ ID NO: 3906324 - RNA, 19 nt, Human adenovirus B [HAdV-B]
ucgacagauaaagacagcg

SEQ ID NO: 3906325 - RNA, 16 nt, Human adenovirus B [HAdV-B]
ucgacgcaucucauga

SEQ ID NO: 3906326 - RNA, 12 nt, Human adenovirus B [HAdV-B]
ucgauuguugau

SEQ ID NO: 3906327 - RNA, 17 nt, Human adenovirus B [HAdV-B]
ucgcaaugacagaaugc

SEQ ID NO: 3906328 - RNA, 22 nt, Human adenovirus B [HAdV-B]
ucgcccccggucccucuaaaua

SEQ ID NO: 3906329 - RNA, 19 nt, Human adenovirus B [HAdV-B]
ucgcgcgguuagcgccagc

SEQ ID NO: 3906330 - RNA, 20 nt, Human adenovirus B [HAdV-B]
ucggcuuacgagcagacagu

SEQ ID NO: 3906331 - RNA, 18 nt, Human adenovirus B [HAdV-B]
ucggggaagauaguuguu

SEQ ID NO: 3906332 - RNA, 13 nt, Human adenovirus B [HAdV-B]
ucguucuucuuua

SEQ ID NO: 3906333 - RNA, 19 nt, Human adenovirus B [HAdV-B]
ucuaaauacacauacaaag

SEQ ID NO: 3906334 - RNA, 14 nt, Human adenovirus B [HAdV-B]
ccaucaucgugcuc

SEQ ID NO: 3906335 - RNA, 17 nt, Human adenovirus B [HAdV-B]
ccaucaucgugcucagu

SEQ ID NO: 3906336 - RNA, 19 nt, Human adenovirus B [HAdV-B]
ccaucaucgugcucagugu

SEQ ID NO: 3906337 - RNA, 13 nt, Human adenovirus B [HAdV-B]
ccaucuaccacuc

SEQ ID NO: 3906338 - RNA, 15 nt, Human adenovirus B [HAdV-B]
ugcaaggccccagca

SEQ ID NO: 3906339 - RNA, 22 nt, Human adenovirus B [HAdV-B]
ugcacagccggcaucauucaca

SEQ ID NO: 3906340 - RNA, 15 nt, Human adenovirus B [HAdV-B]
ugcacucauccauga

SEQ ID NO: 3906341 - RNA, 14 nt, Human adenovirus B [HAdV-B]
ugcacuuuuugcuu

SEQ ID NO: 3906342 - RNA, 16 nt, Human adenovirus B [HAdV-B]
ugcagcaacaggagga

SEQ ID NO: 3906343 - RNA, 11 nt, Human adenovirus B [HAdV-B]
ugcagcagcag

SEQ ID NO: 3906344 - RNA, 13 nt, Human adenovirus B [HAdV-B]
ugcaggucugccu

SEQ ID NO: 3906345 - RNA, 15 nt, Human adenovirus B [HAdV-B]
ugcaggugguaguuu

SEQ ID NO: 3906346 - RNA, 20 nt, Human adenovirus B [HAdV-B]
ugcaugaaagccuuugcugu

SEQ ID NO: 3906347 - RNA, 14 nt, Human adenovirus B [HAdV-B]
ugcauucacugcuc

SEQ ID NO: 3906348 - RNA, 20 nt, Human adenovirus B [HAdV-B]
ugccaaacguggcaaaccgg

SEQ ID NO: 3906349 - RNA, 19 nt, Human adenovirus B [HAdV-B]
ugccagguggucucuggau

SEQ ID NO: 3906350 - RNA, 21 nt, Human adenovirus B [HAdV-B]
ugccgccaucucuaguagaca

SEQ ID NO: 3906351 - RNA, 19 nt, Human adenovirus B [HAdV-B]
ugccuuguaagggcagcag

SEQ ID NO: 3906352 - RNA, 16 nt, Human adenovirus B [HAdV-B]
ugcgaaaaggcugugg

SEQ ID NO: 3906353 - RNA, 20 nt, Human adenovirus B [HAdV-B]
ugcgcacgggcggguagcug

SEQ ID NO: 3906354 - RNA, 22 nt, Human adenovirus B [HAdV-B]
ugcgucaucacccagggggcaa

SEQ ID NO: 3906355 - RNA, 20 nt, Human adenovirus B [HAdV-B]
ugcuaucgagaaaaaucaga

SEQ ID NO: 3906356 - RNA, 23 nt, Human adenovirus B [HAdV-B]
ugcugaacggggucaucuugcag

SEQ ID NO: 3906357 - RNA, 18 nt, Human adenovirus B [HAdV-B]
uggaacacgaggaagagu

SEQ ID NO: 3906358 - RNA, 14 nt, Human adenovirus B [HAdV-B]
uggaacagaagaca

SEQ ID NO: 3906359 - RNA, 16 nt, Human adenovirus B [HAdV-B]
uggaacaggugaaaac

SEQ ID NO: 3906360 - RNA, 16 nt, Human adenovirus B [HAdV-B]
uggaagagcucagccg

SEQ ID NO: 3906361 - RNA, 19 nt, Human adenovirus B [HAdV-B]
uggaagccacucugaacuu

SEQ ID NO: 3906362 - RNA, 14 nt, Human adenovirus B [HAdV-B]
uggacccaggccau

SEQ ID NO: 3906363 - RNA, 14 nt, Human adenovirus B [HAdV-B]
uggauugccacagc

SEQ ID NO: 3906364 - RNA, 20 nt, Human adenovirus B [HAdV-B]
uggcagaccucaucuuccca

SEQ ID NO: 3906365 - RNA, 15 nt, Human adenovirus B [HAdV-B]
uggcuucucuuacau

SEQ ID NO: 3906366 - RNA, 20 nt, Human adenovirus B [HAdV-B]
ugggagggggacuuacagug

SEQ ID NO: 3906367 - RNA, 16 nt, Human adenovirus B [HAdV-B]
ugggaugggugcauuc

SEQ ID NO: 3906368 - RNA, 18 nt, Human adenovirus B [HAdV-B]
uggggcgaagagccaugc

SEQ ID NO: 3906369 - RNA, 22 nt, Human adenovirus B [HAdV-B]
uggggggguauaaaagggggcg

SEQ ID NO: 3906370 - RNA, 23 nt, Human adenovirus B [HAdV-B]
ugguuagcucauaggagcuggcu

SEQ ID NO: 3906371 - RNA, 17 nt, Human adenovirus B [HAdV-B]
ugguuuuagauuccaca

SEQ ID NO: 3906372 - RNA, 19 nt, Human adenovirus B [HAdV-B]
uguaccgcaaugguagugc

SEQ ID NO: 3906373 - RNA, 18 nt, Human adenovirus B [HAdV-B]
uguagcgggaauccugag

SEQ ID NO: 3906374 - RNA, 14 nt, Human adenovirus B [HAdV-B]
uguauacugggugc

SEQ ID NO: 3906375 - RNA, 19 nt, Human adenovirus B [HAdV-B]
uguauaggagcauuugcuu

SEQ ID NO: 3906376 - RNA, 16 nt, Human adenovirus B [HAdV-B]
uguaucgcaaugacag

SEQ ID NO: 3906377 - RNA, 23 nt, Human adenovirus B [HAdV-B]
uguaucggcuuacgagcagacag

SEQ ID NO: 3906378 - RNA, 20 nt, Human adenovirus B [HAdV-B]
uguccguucucgcuggccac

SEQ ID NO: 3906379 - RNA, 20 nt, Human adenovirus B [HAdV-B]
ugucggccaaguagcaguuu

SEQ ID NO: 3906380 - RNA, 19 nt, Human adenovirus B [HAdV-B]
ugucgucacaggccucggc

SEQ ID NO: 3906381 - RNA, 15 nt, Human adenovirus B [HAdV-B]
ugucucacgcuugcc

SEQ ID NO: 3906382 - RNA, 18 nt, Human adenovirus B [HAdV-B]
ugucucugaagaaaugca

SEQ ID NO: 3906383 - RNA, 18 nt, Human adenovirus B [HAdV-B]
ugucucugaccaugacuu

SEQ ID NO: 3906384 - RNA, 14 nt, Human adenovirus B [HAdV-B]
ugucuuucuuccca

SEQ ID NO: 3906385 - RNA, 18 nt, Human adenovirus B [HAdV-B]
ugugccucucaccuaccg

SEQ ID NO: 3906386 - RNA, 16 nt, Human adenovirus B [HAdV-B]
ugugccuuuccacaua

SEQ ID NO: 3906387 - RNA, 12 nt, Human adenovirus B [HAdV-B]
uguuaacuguuc

SEQ ID NO: 3906388 - RNA, 16 nt, Human adenovirus B [HAdV-B]
uguuaauucaucuggc

SEQ ID NO: 3906389 - RNA, 18 nt, Human adenovirus B [HAdV-B]
uguuccacaguucaguga

SEQ ID NO: 3906390 - RNA, 17 nt, Human adenovirus B [HAdV-B]
uguuggauugccacagc

SEQ ID NO: 3906391 - RNA, 17 nt, Human adenovirus B [HAdV-B]
uguugggacgcggaaug

SEQ ID NO: 3906392 - RNA, 13 nt, Human adenovirus B [HAdV-B]
uguuuagaagaac

SEQ ID NO: 3906393 - RNA, 18 nt, Human adenovirus B [HAdV-B]
uuacacacaauaacaaaa

SEQ ID NO: 3906394 - RNA, 19 nt, Human adenovirus B [HAdV-B]
uuaccagacaaaguacagc

SEQ ID NO: 3906395 - RNA, 18 nt, Human adenovirus B [HAdV-B]
uuaccccuacggaagcca

SEQ ID NO: 3906396 - RNA, 16 nt, Human adenovirus B [HAdV-B]
uuacugacgccagacg

SEQ ID NO: 3906397 - RNA, 22 nt, Human adenovirus B [HAdV-B]
uuacuugaaaguggguagacag

SEQ ID NO: 3906398 - RNA, 17 nt, Human adenovirus B [HAdV-B]
uuagaagauacugagca

SEQ ID NO: 3906399 - RNA, 15 nt, Human adenovirus B [HAdV-B]
uuagcgaucuucuca

SEQ ID NO: 3906400 - RNA, 19 nt, Human adenovirus B [HAdV-B]
uucagacucauccugcugg

SEQ ID NO: 3906401 - RNA, 22 nt, Human adenovirus B [HAdV-B]
uuccacaguucagugauguguu

SEQ ID NO: 3906402 - RNA, 18 nt, Human adenovirus B [HAdV-B]
uuccuggauacacggcuc

SEQ ID NO: 3906403 - RNA, 17 nt, Human adenovirus B [HAdV-B]
uucuggcccaauugcaa

SEQ ID NO: 3906404 - RNA, 19 nt, Human adenovirus B [HAdV-B]
uucuggcccaauugcaagc

SEQ ID NO: 3906405 - RNA, 19 nt, Human adenovirus B [HAdV-B]
uucuggggucuuguugcca

SEQ ID NO: 3906406 - RNA, 18 nt, Human adenovirus B [HAdV-B]
uucuuagagauggaagac

SEQ ID NO: 3906407 - RNA, 17 nt, Human adenovirus B [HAdV-B]
uugaauucgggaaucac

SEQ ID NO: 3906408 - RNA, 19 nt, Human adenovirus B [HAdV-B]
uugacugaugucuugcaug

SEQ ID NO: 3906409 - RNA, 23 nt, Human adenovirus B [HAdV-B]
uugauuaauguuagcaaaguuua

SEQ ID NO: 3906410 - RNA, 15 nt, Human adenovirus B [HAdV-B]
uugauuugaugaaca

SEQ ID NO: 3906411 - RNA, 23 nt, Human adenovirus B [HAdV-B]
uugcaacauacaaaaucuuacau

SEQ ID NO: 3906412 - RNA, 18 nt, Human adenovirus B [HAdV-B]
uugcaaggccccagcagc

SEQ ID NO: 3906413 - RNA, 17 nt, Human adenovirus B [HAdV-B]
uugccauccuucucaac

SEQ ID NO: 3906414 - RNA, 21 nt, Human adenovirus B [HAdV-B]
uugccaugcaggcacuucagc

SEQ ID NO: 3906415 - RNA, 16 nt, Human adenovirus B [HAdV-B]
uugcugugccagaagu

SEQ ID NO: 3906416 - RNA, 15 nt, Human adenovirus B [HAdV-B]
uuggacggcuccugg

SEQ ID NO: 3906417 - RNA, 21 nt, Human adenovirus B [HAdV-B]
uuggauaaaaguuuggcaaug

SEQ ID NO: 3906418 - RNA, 14 nt, Human adenovirus B [HAdV-B]
uuguucguguugcu

SEQ ID NO: 3906419 - RNA, 11 nt, Human adenovirus B [HAdV-B]
uuguugccauc

SEQ ID NO: 3906420 - RNA, 12 nt, Human adenovirus B [HAdV-B]
uuuaacuccuca

SEQ ID NO: 3906421 - RNA, 18 nt, Human adenovirus B [HAdV-B]
uuuagcgaucuucucaau

SEQ ID NO: 3906422 - RNA, 18 nt, Human adenovirus B [HAdV-B]
uuuauuugaaaaucaauu

SEQ ID NO: 3906423 - RNA, 15 nt, Human adenovirus B [HAdV-B]
uuucauagccacagc

SEQ ID NO: 3906424 - RNA, 19 nt, Human adenovirus B [HAdV-B]
uuuccaucauguuugacuc

SEQ ID NO: 3906425 - RNA, 17 nt, Human adenovirus B [HAdV-B]
uuucccaagcuuucagu

SEQ ID NO: 3906426 - RNA, 16 nt, Human adenovirus B [HAdV-B]
uuugcaguagguacaa

SEQ ID NO: 3906427 - RNA, 10 nt, Human adenovirus B [HAdV-B]
uuugccaaaa

SEQ ID NO: 3906428 - RNA, 20 nt, Human adenovirus B [HAdV-B]
uuuggagagaguuugcugca

SEQ ID NO: 3906429 - RNA, 13 nt, Human adenovirus B [HAdV-B]
uuuggaggaggaa

SEQ ID NO: 3906430 - RNA, 16 nt, Human adenovirus B [HAdV-B]
uuuuaggauaaaacag

SEQ ID NO: 3906431 - RNA, 15 nt, Human adenovirus B [HAdV-B]
uuuuccgccauauuu

SEQ ID NO: 3906432 - RNA, 20 nt, Human adenovirus B [HAdV-B]
uuuugaucacaaugugauga

SEQ ID NO: 3906433 - RNA, 12 nt, Human adenovirus B [HAdV-B]
aaaaaacagcca

SEQ ID NO: 3906434 - RNA, 18 nt, Human adenovirus B [HAdV-B]
aaaacggauucuggggag

SEQ ID NO: 3906435 - RNA, 14 nt, Human adenovirus B [HAdV-B]
aaaagaagaggaag

SEQ ID NO: 3906436 - RNA, 20 nt, Human adenovirus B [HAdV-B]
aaaaugaguagauggaagac

SEQ ID NO: 3906437 - RNA, 23 nt, Human adenovirus B [HAdV-B]
aaaaugauuaauaaaaaaucacu

SEQ ID NO: 3906438 - RNA, 22 nt, Human adenovirus B [HAdV-B]
aaaaugccggccaauugccauu

SEQ ID NO: 3906439 - RNA, 17 nt, Human adenovirus B [HAdV-B]
aaaccaguggucaguga

SEQ ID NO: 3906440 - RNA, 12 nt, Human adenovirus B [HAdV-B]
aaacccacugcu

SEQ ID NO: 3906441 - RNA, 14 nt, Human adenovirus B [HAdV-B]
aaacggcaccugcg

SEQ ID NO: 3906442 - RNA, 17 nt, Human adenovirus B [HAdV-B]
aaagcacaagcucuaaa

SEQ ID NO: 3906443 - RNA, 12 nt, Human adenovirus B [HAdV-B]
aaagcuccaagc

SEQ ID NO: 3906444 - RNA, 18 nt, Human adenovirus B [HAdV-B]
aaauacacauacaaagcc

SEQ ID NO: 3906445 - RNA, 14 nt, Human adenovirus B [HAdV-B]
aaaucaacacagcc

SEQ ID NO: 3906446 - RNA, 21 nt, Human adenovirus B [HAdV-B]
aaaugccggccaauugccauu

SEQ ID NO: 3906447 - RNA, 13 nt, Human adenovirus B [HAdV-B]
aaaugcucugcaa

SEQ ID NO: 3906448 - RNA, 18 nt, Human adenovirus B [HAdV-B]
aaauuuucucccagcagc

SEQ ID NO: 3906449 - RNA, 19 nt, Human adenovirus B [HAdV-B]
aaauuuuggcucaaccaua

SEQ ID NO: 3906450 - RNA, 20 nt, Human adenovirus B [HAdV-B]
aacacacaccccgaaacugc

SEQ ID NO: 3906451 - RNA, 15 nt, Human adenovirus B [HAdV-B]
aacagccaacauagc

SEQ ID NO: 3906452 - RNA, 14 nt, Human adenovirus B [HAdV-B]
aacagucagcucuu

SEQ ID NO: 3906453 - RNA, 19 nt, Human adenovirus B [HAdV-B]
aacagugcaggcagcagcu

SEQ ID NO: 3906454 - RNA, 14 nt, Human adenovirus B [HAdV-B]
aaccagcagcggca

SEQ ID NO: 3906455 - RNA, 13 nt, Human adenovirus B [HAdV-B]
aaccgaucucugc

SEQ ID NO: 3906456 - RNA, 14 nt, Human adenovirus B [HAdV-B]
aaccuugucauaau

SEQ ID NO: 3906457 - RNA, 13 nt, Human adenovirus B [HAdV-B]
aacgagccagcgc

SEQ ID NO: 3906458 - RNA, 18 nt, Human adenovirus B [HAdV-B]
aacgaugggaaucauaau

SEQ ID NO: 3906459 - RNA, 17 nt, Human adenovirus B [HAdV-B]
aacgcgggucgugagcu

SEQ ID NO: 3906460 - RNA, 19 nt, Human adenovirus B [HAdV-B]
aacuaucucuccuaccacu

SEQ ID NO: 3906461 - RNA, 21 nt, Human adenovirus B [HAdV-B]
aacucagcucaugcucuggac

SEQ ID NO: 3906462 - RNA, 20 nt, Human adenovirus B [HAdV-B]
aacugacgccgccgguccca

SEQ ID NO: 3906463 - RNA, 24 nt, Human adenovirus B [HAdV-B]
aacuuggacugaccuugauggaaa

SEQ ID NO: 3906464 - RNA, 22 nt, Human adenovirus B [HAdV-B]
aagaaaucggaucuuuccaacc

SEQ ID NO: 3906465 - RNA, 20 nt, Human adenovirus B [HAdV-B]
aagaacaaaagaauaccaaa

SEQ ID NO: 3906466 - RNA, 19 nt, Human adenovirus B [HAdV-B]
aagagcucugacuggagcu

SEQ ID NO: 3906467 - RNA, 18 nt, Human adenovirus B [HAdV-B]
aagauuuuguaugaagau

SEQ ID NO: 3906468 - RNA, 18 nt, Human adenovirus B [HAdV-B]
aagccaaaauagaagcug

SEQ ID NO: 3906469 - RNA, 19 nt, Human adenovirus B [HAdV-B]
aagcggcgaggagccggag

SEQ ID NO: 3906470 - RNA, 17 nt, Human adenovirus B [HAdV-B]
aagcuaaggcaaacaua

SEQ ID NO: 3906471 - RNA, 22 nt, Human adenovirus B [HAdV-B]
aaggaccaccaagacgguguau

SEQ ID NO: 3906472 - RNA, 12 nt, Human adenovirus B [HAdV-B]
aaggaugugaac

SEQ ID NO: 3906473 - RNA, 16 nt, Human adenovirus B [HAdV-B]
aaggcgauaaugccag

SEQ ID NO: 3906474 - RNA, 17 nt, Human adenovirus B [HAdV-B]
aagggagaaaauggcau

SEQ ID NO: 3906475 - RNA, 14 nt, Human adenovirus B [HAdV-B]
aaguaaauggaaca

SEQ ID NO: 3906476 - RNA, 17 nt, Human adenovirus B [HAdV-B]
aaguagcaguuuaccau

SEQ ID NO: 3906477 - RNA, 23 nt, Human adenovirus B [HAdV-B]
aagucagucgcgcuuugggacag

SEQ ID NO: 3906478 - RNA, 20 nt, Human adenovirus B [HAdV-B]
aaucaugcaacccaauauaa

SEQ ID NO: 3906479 - RNA, 15 nt, Human adenovirus B [HAdV-B]
aaucuaaugauugca

SEQ ID NO: 3906480 - RNA, 16 nt, Human adenovirus B [HAdV-B]
aauuggcgcgauacca

SEQ ID NO: 3906481 - RNA, 17 nt, Human adenovirus B [HAdV-B]
aauuuuagcuccucucc

SEQ ID NO: 3906482 - RNA, 16 nt, Human adenovirus B [HAdV-B]
acaacugacgccgccg

SEQ ID NO: 3906483 - RNA, 14 nt, Human adenovirus B [HAdV-B]
acaagaauuugaaa

SEQ ID NO: 3906484 - RNA, 15 nt, Human adenovirus B [HAdV-B]
acaauacaauuucca

SEQ ID NO: 3906485 - RNA, 15 nt, Human adenovirus B [HAdV-B]
acaaugucaacccau

SEQ ID NO: 3906486 - RNA, 18 nt, Human adenovirus B [HAdV-B]
acacaagguucccucagg

SEQ ID NO: 3906487 - RNA, 12 nt, Human adenovirus B [HAdV-B]
acacagaacuuu

SEQ ID NO: 3906488 - RNA, 23 nt, Human adenovirus B [HAdV-B]
acaccaaucucuccccacgcaca

SEQ ID NO: 3906489 - RNA, 13 nt, Human adenovirus B [HAdV-B]
acacggcacgaag

SEQ ID NO: 3906490 - RNA, 23 nt, Human adenovirus B [HAdV-B]
acacucaccaccuccaauuccgc

SEQ ID NO: 3906491 - RNA, 15 nt, Human adenovirus B [HAdV-B]
acagacauggcuucu

SEQ ID NO: 3906492 - RNA, 21 nt, Human adenovirus B [HAdV-B]
acagauaagcccuugguguag

SEQ ID NO: 3906493 - RNA, 17 nt, Human adenovirus B [HAdV-B]
acagcaaccccaggcca

SEQ ID NO: 3906494 - RNA, 22 nt, Human adenovirus B [HAdV-B]
acagcggcggcgaccuccaaca

SEQ ID NO: 3906495 - RNA, 16 nt, Human adenovirus B [HAdV-B]
acagcugcugcagaag

SEQ ID NO: 3906496 - RNA, 17 nt, Human adenovirus B [HAdV-B]
acagggaacugaugcac

SEQ ID NO: 3906497 - RNA, 15 nt, Human adenovirus B [HAdV-B]
acagugcaguacaag

SEQ ID NO: 3906498 - RNA, 22 nt, Human adenovirus B [HAdV-B]
acaugaacaugcaaaucuggaa

SEQ ID NO: 3906499 - RNA, 18 nt, Human adenovirus B [HAdV-B]
acauuggugccagguggu

SEQ ID NO: 3906500 - RNA, 17 nt, Human adenovirus B [HAdV-B]
accaaucggucucaaaa

SEQ ID NO: 3906501 - RNA, 17 nt, Human adenovirus B [HAdV-B]
accacguaagaagcuuc

SEQ ID NO: 3906502 - RNA, 20 nt, Human adenovirus B [HAdV-B]
accagcgcuuccaagaccgg

SEQ ID NO: 3906503 - RNA, 18 nt, Human adenovirus B [HAdV-B]
accagggaaaaguacagu

SEQ ID NO: 3906504 - RNA, 17 nt, Human adenovirus B [HAdV-B]
acccaauauaaccuucc

SEQ ID NO: 3906505 - RNA, 21 nt, Human adenovirus B [HAdV-B]
accccuacggaagccagcacc

SEQ ID NO: 3906506 - RNA, 13 nt, Human adenovirus B [HAdV-B]
accguuucugggg

SEQ ID NO: 3906507 - RNA, 16 nt, Human adenovirus B [HAdV-B]
accuacuaaugugaaa

SEQ ID NO: 3906508 - RNA, 12 nt, Human adenovirus B [HAdV-B]
accucacuuccc

SEQ ID NO: 3906509 - RNA, 20 nt, Human adenovirus B [HAdV-B]
accugaagucuacggccaac

SEQ ID NO: 3906510 - RNA, 23 nt, Human adenovirus B [HAdV-B]
acgaggaaaaggagcagagcuua

SEQ ID NO: 3906511 - RNA, 14 nt, Human adenovirus B [HAdV-B]
acgaggaggcagag

SEQ ID NO: 3906512 - RNA, 22 nt, Human adenovirus B [HAdV-B]
acgcacagccuguacauuccca

SEQ ID NO: 3906513 - RNA, 17 nt, Human adenovirus B [HAdV-B]
acgcauccgccagcagc

SEQ ID NO: 3906514 - RNA, 18 nt, Human adenovirus B [HAdV-B]
acgccuuacauguggagu

SEQ ID NO: 3906515 - RNA, 21 nt, Human adenovirus B [HAdV-B]
acgcuggagaggucagaggag

SEQ ID NO: 3906516 - RNA, 15 nt, Human adenovirus B [HAdV-B]
acguggaacucacca

SEQ ID NO: 3906517 - RNA, 22 nt, Human adenovirus B [HAdV-B]
acuaacuuuuuaagugcuuuga

SEQ ID NO: 3906518 - RNA, 13 nt, Human adenovirus B [HAdV-B]
acuacacuuuuag

SEQ ID NO: 3906519 - RNA, 16 nt, Human adenovirus B [HAdV-B]
acuaccgucaccucca

SEQ ID NO: 3906520 - RNA, 23 nt, Human adenovirus B [HAdV-B]
acuagugaaaguuaacuggaugc

SEQ ID NO: 3906521 - RNA, 19 nt, Human adenovirus B [HAdV-B]
acuauaaaaguaguuuaga

SEQ ID NO: 3906522 - RNA, 21 nt, Human adenovirus B [HAdV-B]
acuauaaacaagaauuugaaa

SEQ ID NO: 3906523 - RNA, 12 nt, Human adenovirus B [HAdV-B]
acuaucgcagcc

SEQ ID NO: 3906524 - RNA, 15 nt, Human adenovirus B [HAdV-B]
acuccguagccugga

SEQ ID NO: 3906525 - RNA, 20 nt, Human adenovirus B [HAdV-B]
acucgacuccguagccugga

SEQ ID NO: 3906526 - RNA, 22 nt, Human adenovirus B [HAdV-B]
acucucccagggauuuggaaga

SEQ ID NO: 3906527 - RNA, 18 nt, Human adenovirus B [HAdV-B]
acugcacacuaaaaggac

SEQ ID NO: 3906528 - RNA, 18 nt, Human adenovirus B [HAdV-B]
acugccuauccuuucaau

SEQ ID NO: 3906529 - RNA, 20 nt, Human adenovirus B [HAdV-B]
acugcuacaaguugcgccuc

SEQ ID NO: 3906530 - RNA, 15 nt, Human adenovirus B [HAdV-B]
acuggaggcucccuu

SEQ ID NO: 3906531 - RNA, 19 nt, Human adenovirus B [HAdV-B]
acuggaucuacguccacug

SEQ ID NO: 3906532 - RNA, 24 nt, Human adenovirus B [HAdV-B]
acugugcguaugcauacaccugcu

SEQ ID NO: 3906533 - RNA, 20 nt, Human adenovirus B [HAdV-B]
acuguugguagcuccuuuca

SEQ ID NO: 3906534 - RNA, 16 nt, Human adenovirus B [HAdV-B]
acuucagcgcacucuc

SEQ ID NO: 3906535 - RNA, 14 nt, Human adenovirus B [HAdV-B]
acuucgaacucccc

SEQ ID NO: 3906536 - RNA, 18 nt, Human adenovirus B [HAdV-B]
acuucgaacuccccaagg

SEQ ID NO: 3906537 - RNA, 20 nt, Human adenovirus B [HAdV-B]
acuuggaagacugauggcac

SEQ ID NO: 3906538 - RNA, 20 nt, Human adenovirus B [HAdV-B]
acuuuaggaaggaugugaac

SEQ ID NO: 3906539 - RNA, 15 nt, Human adenovirus B [HAdV-B]
acuuuaugagccaga

SEQ ID NO: 3906540 - RNA, 20 nt, Human adenovirus B [HAdV-B]
acuuugauauaaucugcaac

SEQ ID NO: 3906541 - RNA, 16 nt, Human adenovirus B [HAdV-B]
agaacucgguggauuu

SEQ ID NO: 3906542 - RNA, 20 nt, Human adenovirus B [HAdV-B]
agaaguaggcugauugccac

SEQ ID NO: 3906543 - RNA, 22 nt, Human adenovirus B [HAdV-B]
agaaucuuaccggcucugggca

SEQ ID NO: 3906544 - RNA, 21 nt, Human adenovirus B [HAdV-B]
agaauguaucauucccugcag

SEQ ID NO: 3906545 - RNA, 18 nt, Human adenovirus B [HAdV-B]
agacaaggcaguuauuag

SEQ ID NO: 3906546 - RNA, 20 nt, Human adenovirus B [HAdV-B]
agacaauuuugcgccaacac

SEQ ID NO: 3906547 - RNA, 20 nt, Human adenovirus B [HAdV-B]
agacauggaaacucagccau

SEQ ID NO: 3906548 - RNA, 17 nt, Human adenovirus B [HAdV-B]
agacgacugacaaauaa

SEQ ID NO: 3906549 - RNA, 14 nt, Human adenovirus B [HAdV-B]
agagaggaugaaaa

SEQ ID NO: 3906550 - RNA, 22 nt, Human adenovirus B [HAdV-B]
agagcccauucgugcaggugag

SEQ ID NO: 3906551 - RNA, 19 nt, Human adenovirus B [HAdV-B]
agagcgugaugcagcagca

SEQ ID NO: 3906552 - RNA, 23 nt, Human adenovirus B [HAdV-B]
agaggauccuuagauaugugcag

SEQ ID NO: 3906553 - RNA, 17 nt, Human adenovirus B [HAdV-B]
agaggucaucugggcca

SEQ ID NO: 3906554 - RNA, 18 nt, Human adenovirus B [HAdV-B]
agagguuccaaagaucuu

SEQ ID NO: 3906555 - RNA, 23 nt, Human adenovirus B [HAdV-B]
agagucaauugucucugaagaaa

SEQ ID NO: 3906556 - RNA, 18 nt, Human adenovirus B [HAdV-B]
agauaugugcagcagagc

SEQ ID NO: 3906557 - RNA, 21 nt, Human adenovirus B [HAdV-B]
agauuacagccaacgagccag

SEQ ID NO: 3906558 - RNA, 15 nt, Human adenovirus B [HAdV-B]
agauugcccaggacu

SEQ ID NO: 3906559 - RNA, 23 nt, Human adenovirus B [HAdV-B]
agauugggguaugaauguuccuu

SEQ ID NO: 3906560 - RNA, 23 nt, Human adenovirus B [HAdV-B]
agauuuguaucccacuaugcaac

SEQ ID NO: 3906561 - RNA, 15 nt, Human adenovirus B [HAdV-B]
agcaaaguuuacagc

SEQ ID NO: 3906562 - RNA, 21 nt, Human adenovirus B [HAdV-B]
agcagauaacuaucaccaaga

SEQ ID NO: 3906563 - RNA, 13 nt, Human adenovirus B [HAdV-B]
agcagcagcaauc

SEQ ID NO: 3906564 - RNA, 23 nt, Human adenovirus B [HAdV-B]
agcaggaacgcgcggccaaagag

SEQ ID NO: 3906565 - RNA, 23 nt, Human adenovirus B [HAdV-B]
agcaggggacgcuacagugcagu

SEQ ID NO: 3906566 - RNA, 18 nt, Human adenovirus B [HAdV-B]
agcauaugcaaaucccaa

SEQ ID NO: 3906567 - RNA, 12 nt, Human adenovirus B [HAdV-B]
agcauguggaau

SEQ ID NO: 3906568 - RNA, 20 nt, Human adenovirus B [HAdV-B]
agcauguggaaucaggcugu

SEQ ID NO: 3906569 - RNA, 20 nt, Human adenovirus B [HAdV-B]
aaaaaauacaauggacucug

SEQ ID NO: 3906570 - RNA, 21 nt, Human adenovirus B [HAdV-B]
aaaaagcacagcuagaucaaa

SEQ ID NO: 3906571 - RNA, 17 nt, Human adenovirus B [HAdV-B]
aaaacaacggagcagcc

SEQ ID NO: 3906572 - RNA, 22 nt, Human adenovirus B [HAdV-B]
aaaacugguuagcugcacagcc

SEQ ID NO: 3906573 - RNA, 18 nt, Human adenovirus B [HAdV-B]
aaaauaaaaaaaaaaaca

SEQ ID NO: 3906574 - RNA, 21 nt, Human adenovirus B [HAdV-B]
aaaaugccaaauauggcaaag

SEQ ID NO: 3906575 - RNA, 23 nt, Human adenovirus B [HAdV-B]
aaacaucccgcaggaccugcucg

SEQ ID NO: 3906576 - RNA, 21 nt, Human adenovirus B [HAdV-B]
aaacuccagacacucauguag

SEQ ID NO: 3906577 - RNA, 12 nt, Human adenovirus B [HAdV-B]
aaacucgcgccg

SEQ ID NO: 3906578 - RNA, 23 nt, Human adenovirus B [HAdV-B]
aaaucaaguguuuuuauuucauu

SEQ ID NO: 3906579 - RNA, 14 nt, Human adenovirus B [HAdV-B]
aaauccgguucauu

SEQ ID NO: 3906580 - RNA, 11 nt, Human adenovirus B [HAdV-B]
aaaugcuuucu

SEQ ID NO: 3906581 - RNA, 23 nt, Human adenovirus B [HAdV-B]
aaauguaaauuuggaaacuccag

SEQ ID NO: 3906582 - RNA, 14 nt, Human adenovirus B [HAdV-B]
aaauugucauguau

SEQ ID NO: 3906583 - RNA, 21 nt, Human adenovirus B [HAdV-B]
aacacaacaacucuggcuuug

SEQ ID NO: 3906584 - RNA, 16 nt, Human adenovirus B [HAdV-B]
aacacacccucauaau

SEQ ID NO: 3906585 - RNA, 12 nt, Human adenovirus B [HAdV-B]
aacacgaggaag

SEQ ID NO: 3906586 - RNA, 17 nt, Human adenovirus B [HAdV-B]
aacagaaaaccagcagc

SEQ ID NO: 3906587 - RNA, 13 nt, Human adenovirus B [HAdV-B]
aaccaagcaaugc

SEQ ID NO: 3906588 - RNA, 14 nt, Human adenovirus B [HAdV-B]
aacccaaccagcgc

SEQ ID NO: 3906589 - RNA, 17 nt, Human adenovirus B [HAdV-B]
aaccccacuaacaacca

SEQ ID NO: 3906590 - RNA, 18 nt, Human adenovirus B [HAdV-B]
aaccccagguagaacugc

SEQ ID NO: 3906591 - RNA, 22 nt, Human adenovirus B [HAdV-B]
aaccgguauaucgggcaggaug

SEQ ID NO: 3906592 - RNA, 19 nt, Human adenovirus B [HAdV-B]
aacguugguuaaucaugca

SEQ ID NO: 3906593 - RNA, 23 nt, Human adenovirus B [HAdV-B]
aacucuugcuugacucucugggc

SEQ ID NO: 3906594 - RNA, 16 nt, Human adenovirus B [HAdV-B]
aacugcccaaaacaac

SEQ ID NO: 3906595 - RNA, 22 nt, Human adenovirus B [HAdV-B]
aacugcccaaaacaacgagcag

SEQ ID NO: 3906596 - RNA, 14 nt, Human adenovirus B [HAdV-B]
aacuggugaggaac

SEQ ID NO: 3906597 - RNA, 20 nt, Human adenovirus B [HAdV-B]
aacuuaaagaccagaacuuc

SEQ ID NO: 3906598 - RNA, 16 nt, Human adenovirus B [HAdV-B]
aacuuuuacaucuccc

SEQ ID NO: 3906599 - RNA, 18 nt, Human adenovirus B [HAdV-B]
aagaucaacuucagcgca

SEQ ID NO: 3906600 - RNA, 15 nt, Human adenovirus B [HAdV-B]
aagauuuuccaugca

SEQ ID NO: 3906601 - RNA, 22 nt, Human adenovirus B [HAdV-B]
aagcuguguacucccagcagcu

SEQ ID NO: 3906602 - RNA, 18 nt, Human adenovirus B [HAdV-B]
aagucagguggacgagca

SEQ ID NO: 3906603 - RNA, 18 nt, Human adenovirus B [HAdV-B]
aaguccccuuucagaaga

SEQ ID NO: 3906604 - RNA, 18 nt, Human adenovirus B [HAdV-B]
aauacaauggacucugac

SEQ ID NO: 3906605 - RNA, 11 nt, Human adenovirus B [HAdV-B]
aauaugagugg

SEQ ID NO: 3906606 - RNA, 20 nt, Human adenovirus B [HAdV-B]
aauccacacauuacaaacag

SEQ ID NO: 3906607 - RNA, 17 nt, Human adenovirus B [HAdV-B]
aaucuggggucagugau

SEQ ID NO: 3906608 - RNA, 14 nt, Human adenovirus B [HAdV-B]
aaugcacaugauca

SEQ ID NO: 3906609 - RNA, 12 nt, Human adenovirus B [HAdV-B]
aauuccagucuc

SEQ ID NO: 3906610 - RNA, 10 nt, Human adenovirus B [HAdV-B]
aauuggcucc

SEQ ID NO: 3906611 - RNA, 15 nt, Human adenovirus B [HAdV-B]
aauuuccaauccaac

SEQ ID NO: 3906612 - RNA, 20 nt, Human adenovirus B [HAdV-B]
aauuuuucauccuuggcucc

SEQ ID NO: 3906613 - RNA, 21 nt, Human adenovirus B [HAdV-B]
acaaagcccaaacggaguucu

SEQ ID NO: 3906614 - RNA, 23 nt, Human adenovirus B [HAdV-B]
acaacaauuuccacuucaacaau

SEQ ID NO: 3906615 - RNA, 18 nt, Human adenovirus B [HAdV-B]
acaagauuggaauaagca

SEQ ID NO: 3906616 - RNA, 20 nt, Human adenovirus B [HAdV-B]
acaagucggcggacauugcu

SEQ ID NO: 3906617 - RNA, 12 nt, Human adenovirus B [HAdV-B]
acaauccagaca

SEQ ID NO: 3906618 - RNA, 21 nt, Human adenovirus B [HAdV-B]
acacacucuucuucgccuucu

SEQ ID NO: 3906619 - RNA, 23 nt, Human adenovirus B [HAdV-B]
acaccaggaacuucaagcuggga

SEQ ID NO: 3906620 - RNA, 17 nt, Human adenovirus B [HAdV-B]
acagaaaaccagcagcg

SEQ ID NO: 3906621 - RNA, 21 nt, Human adenovirus B [HAdV-B]
acagagccuaccuccuuuccu

SEQ ID NO: 3906622 - RNA, 16 nt, Human adenovirus B [HAdV-B]
acagauggauaaauca

SEQ ID NO: 3906623 - RNA, 17 nt, Human adenovirus B [HAdV-B]
acagauuugcauuuccc

SEQ ID NO: 3906624 - RNA, 14 nt, Human adenovirus B [HAdV-B]
acagcaacuucuug

SEQ ID NO: 3906625 - RNA, 21 nt, Human adenovirus B [HAdV-B]
acagcuuucuggucagcugca

SEQ ID NO: 3906626 - RNA, 15 nt, Human adenovirus B [HAdV-B]
acagucaggcagagg

SEQ ID NO: 3906627 - RNA, 13 nt, Human adenovirus B [HAdV-B]
acagugcaggcag

SEQ ID NO: 3906628 - RNA, 17 nt, Human adenovirus B [HAdV-B]
acauacaacaauuucca

SEQ ID NO: 3906629 - RNA, 18 nt, Human adenovirus B [HAdV-B]
acaucuagaccacugccg

SEQ ID NO: 3906630 - RNA, 21 nt, Human adenovirus B [HAdV-B]
acaugcucuaccccauuccug

SEQ ID NO: 3906631 - RNA, 20 nt, Human adenovirus B [HAdV-B]
acaugggagccaggaguucc

SEQ ID NO: 3906632 - RNA, 17 nt, Human adenovirus B [HAdV-B]
accagacaaaguacagc

SEQ ID NO: 3906633 - RNA, 20 nt, Human adenovirus B [HAdV-B]
accagacugaaaaccaaaga

SEQ ID NO: 3906634 - RNA, 17 nt, Human adenovirus B [HAdV-B]
acccaguugaaaaccac

SEQ ID NO: 3906635 - RNA, 20 nt, Human adenovirus B [HAdV-B]
accccacuaacaaccacagg

SEQ ID NO: 3906636 - RNA, 21 nt, Human adenovirus B [HAdV-B]
accccagguagaacugcugcu

SEQ ID NO: 3906637 - RNA, 23 nt, Human adenovirus B [HAdV-B]
accccguucagcggcauacuuuc

SEQ ID NO: 3906638 - RNA, 20 nt, Human adenovirus B [HAdV-B]
acccuguggugggugcagag

SEQ ID NO: 3906639 - RNA, 15 nt, Human adenovirus B [HAdV-B]
accggcucugggcau

SEQ ID NO: 3906640 - RNA, 20 nt, Human adenovirus B [HAdV-B]
accgucgcuuccgaccuggc

SEQ ID NO: 3906641 - RNA, 22 nt, Human adenovirus B [HAdV-B]
accuuccggaaccacacugcca

SEQ ID NO: 3906642 - RNA, 20 nt, Human adenovirus B [HAdV-B]
accuugacccccagaccggc

SEQ ID NO: 3906643 - RNA, 15 nt, Human adenovirus B [HAdV-B]
acgaggaaaaggagc

SEQ ID NO: 3906644 - RNA, 18 nt, Human adenovirus B [HAdV-B]
acgauuggacccaggcca

SEQ ID NO: 3906645 - RNA, 17 nt, Human adenovirus B [HAdV-B]
acggcaggaugugagcu

SEQ ID NO: 3906646 - RNA, 19 nt, Human adenovirus B [HAdV-B]
acgggaacaaagcuuggaa

SEQ ID NO: 3906647 - RNA, 15 nt, Human adenovirus B [HAdV-B]
acgguagcauaugca

SEQ ID NO: 3906648 - RNA, 13 nt, Human adenovirus B [HAdV-B]
acgugaccugggg

SEQ ID NO: 3906649 - RNA, 22 nt, Human adenovirus B [HAdV-B]
acguggaacucaccaaccuggu

SEQ ID NO: 3906650 - RNA, 20 nt, Human adenovirus B [HAdV-B]
acuacuguuuuccacuggac

SEQ ID NO: 3906651 - RNA, 17 nt, Human adenovirus B [HAdV-B]
acugaccaucgccucuc

SEQ ID NO: 3906652 - RNA, 23 nt, Human adenovirus B [HAdV-B]
acugcccuccgacuuugugccuc

SEQ ID NO: 3906653 - RNA, 16 nt, Human adenovirus B [HAdV-B]
acuggaacaggugaaa

SEQ ID NO: 3906654 - RNA, 18 nt, Human adenovirus B [HAdV-B]
acuuacuugaaaucagca

SEQ ID NO: 3906655 - RNA, 20 nt, Human adenovirus B [HAdV-B]
acuuacuugaaaucagcaau

SEQ ID NO: 3906656 - RNA, 19 nt, Human adenovirus B [HAdV-B]
acuuagaagauacugagca

SEQ ID NO: 3906657 - RNA, 18 nt, Human adenovirus B [HAdV-B]
acuucaacaaucagcauu

SEQ ID NO: 3906658 - RNA, 20 nt, Human adenovirus B [HAdV-B]
acuuccgcaaucccaacagg

SEQ ID NO: 3906659 - RNA, 15 nt, Human adenovirus B [HAdV-B]
acuugggugggagag

SEQ ID NO: 3906660 - RNA, 22 nt, Human adenovirus B [HAdV-B]
acuugucgccuucgcguuccca

SEQ ID NO: 3906661 - RNA, 19 nt, Human adenovirus B [HAdV-B]
agaaacauaucccagggaa

SEQ ID NO: 3906662 - RNA, 16 nt, Human adenovirus B [HAdV-B]
agaagauacugagcag

SEQ ID NO: 3906663 - RNA, 16 nt, Human adenovirus B [HAdV-B]
agaagcagaccugugu

SEQ ID NO: 3906664 - RNA, 18 nt, Human adenovirus B [HAdV-B]
agaaguaccucagagcga

SEQ ID NO: 3906665 - RNA, 20 nt, Human adenovirus B [HAdV-B]
agacgagccugggaucaugg

SEQ ID NO: 3906666 - RNA, 20 nt, Human adenovirus B [HAdV-B]
aaacgaggaggcagaggagg

SEQ ID NO: 3906667 - RNA, 14 nt, Human adenovirus B [HAdV-B]
aaagauaguaagaa

SEQ ID NO: 3906668 - RNA, 20 nt, Human adenovirus B [HAdV-B]
aaagcuauucguccagauga

SEQ ID NO: 3906669 - RNA, 20 nt, Human adenovirus B [HAdV-B]
aaauggcuucacacaaagcc

SEQ ID NO: 3906670 - RNA, 18 nt, Human adenovirus B [HAdV-B]
aaauuuaccugcauggug

SEQ ID NO: 3906671 - RNA, 22 nt, Human adenovirus B [HAdV-B]
aacauguugguuggagccugag

SEQ ID NO: 3906672 - RNA, 18 nt, Human adenovirus B [HAdV-B]
aaccacgaaaaugccaaa

SEQ ID NO: 3906673 - RNA, 15 nt, Human adenovirus B [HAdV-B]
aaccccacagccaau

SEQ ID NO: 3906674 - RNA, 22 nt, Human adenovirus B [HAdV-B]
aacccggcggcgucccagcagu

SEQ ID NO: 3906675 - RNA, 21 nt, Human adenovirus B [HAdV-B]
aaccggucacuuugcagcaag

SEQ ID NO: 3906676 - RNA, 11 nt, Human adenovirus B [HAdV-B]
aaccugcugcu

SEQ ID NO: 3906677 - RNA, 13 nt, Human adenovirus B [HAdV-B]
aacucaacacaag

SEQ ID NO: 3906678 - RNA, 13 nt, Human adenovirus B [HAdV-B]
aagaaaugcauau

SEQ ID NO: 3906679 - RNA, 16 nt, Human adenovirus B [HAdV-B]
aagacuaggcaacugu

SEQ ID NO: 3906680 - RNA, 22 nt, Human adenovirus B [HAdV-B]
aagagcucugacuggagcugga

SEQ ID NO: 3906681 - RNA, 23 nt, Human adenovirus B [HAdV-B]
aagagggcgaguacuuggaagac

SEQ ID NO: 3906682 - RNA, 21 nt, Human adenovirus B [HAdV-B]
aagauagcuuugaggccugau

SEQ ID NO: 3906683 - RNA, 16 nt, Human adenovirus B [HAdV-B]
aagauugggacaguca

SEQ ID NO: 3906684 - RNA, 13 nt, Human adenovirus B [HAdV-B]
aagccaugcugcg

SEQ ID NO: 3906685 - RNA, 16 nt, Human adenovirus B [HAdV-B]
aagcgcgugugauggu

SEQ ID NO: 3906686 - RNA, 23 nt, Human adenovirus B [HAdV-B]
aagcuguguacucccagcagcuc

SEQ ID NO: 3906687 - RNA, 22 nt, Human adenovirus B [HAdV-B]
aaggacuuacauucaauucaaa

SEQ ID NO: 3906688 - RNA, 12 nt, Human adenovirus B [HAdV-B]
aagggaaaugcc

SEQ ID NO: 3906689 - RNA, 21 nt, Human adenovirus B [HAdV-B]
aaggucgcagugcaugguguu

SEQ ID NO: 3906690 - RNA, 17 nt, Human adenovirus B [HAdV-B]
aagucuacccguuucuu

SEQ ID NO: 3906691 - RNA, 17 nt, Human adenovirus B [HAdV-B]
aaguucuaguuguaaaa

SEQ ID NO: 3906692 - RNA, 13 nt, Human adenovirus B [HAdV-B]
aaguuuggcaaug

SEQ ID NO: 3906693 - RNA, 19 nt, Human adenovirus B [HAdV-B]
aaguuugguggcaaaugau

SEQ ID NO: 3906694 - RNA, 13 nt, Human adenovirus B [HAdV-B]
aaguuuucuugca

SEQ ID NO: 3906695 - RNA, 18 nt, Human adenovirus B [HAdV-B]
aauaaaaaaaaaaacaag

SEQ ID NO: 3906696 - RNA, 13 nt, Human adenovirus B [HAdV-B]
aaugaggcuuuca

SEQ ID NO: 3906697 - RNA, 20 nt, Human adenovirus B [HAdV-B]
aaugagucgcagacguccug

SEQ ID NO: 3906698 - RNA, 20 nt, Human adenovirus B [HAdV-B]
aaugccuuaaccucuuucug

SEQ ID NO: 3906699 - RNA, 22 nt, Human adenovirus B [HAdV-B]
aauggagugguagauuuggcua

SEQ ID NO: 3906700 - RNA, 16 nt, Human adenovirus B [HAdV-B]
aauuauggcgaucccg

SEQ ID NO: 3906701 - RNA, 16 nt, Human adenovirus B [HAdV-B]
aauuccagucuccugc

SEQ ID NO: 3906702 - RNA, 15 nt, Human adenovirus B [HAdV-B]
acaaaacaaaaccaa

SEQ ID NO: 3906703 - RNA, 20 nt, Human adenovirus B [HAdV-B]
acaacugacgccgccggucc

SEQ ID NO: 3906704 - RNA, 18 nt, Human adenovirus B [HAdV-B]
acaagaauuugaaaaguu

SEQ ID NO: 3906705 - RNA, 16 nt, Human adenovirus B [HAdV-B]
acaagagcgaagauca

SEQ ID NO: 3906706 - RNA, 11 nt, Human adenovirus B [HAdV-B]
acacagcagcg

SEQ ID NO: 3906707 - RNA, 17 nt, Human adenovirus B [HAdV-B]
acagcaguagccacagc

SEQ ID NO: 3906708 - RNA, 17 nt, Human adenovirus B [HAdV-B]
acagcauuguggagaac

SEQ ID NO: 3906709 - RNA, 23 nt, Human adenovirus B [HAdV-B]
acagcauuguggagaacauggaa

SEQ ID NO: 3906710 - RNA, 22 nt, Human adenovirus B [HAdV-B]
acagccccccucgcagcagcag

SEQ ID NO: 3906711 - RNA, 14 nt, Human adenovirus B [HAdV-B]
acagucaggcagag

SEQ ID NO: 3906712 - RNA, 16 nt, Human adenovirus B [HAdV-B]
acagucaggcagagga

SEQ ID NO: 3906713 - RNA, 18 nt, Human adenovirus B [HAdV-B]
acagucaggcagaggagg

SEQ ID NO: 3906714 - RNA, 19 nt, Human adenovirus B [HAdV-B]
acauaucagccagaaccuc

SEQ ID NO: 3906715 - RNA, 20 nt, Human adenovirus B [HAdV-B]
acauaucuggaaauggggcu

SEQ ID NO: 3906716 - RNA, 16 nt, Human adenovirus B [HAdV-B]
acaugaaucaugugaa

SEQ ID NO: 3906717 - RNA, 17 nt, Human adenovirus B [HAdV-B]
acaugaaucaugugaaa

SEQ ID NO: 3906718 - RNA, 18 nt, Human adenovirus B [HAdV-B]
acaugaccaaagacuggu

SEQ ID NO: 3906719 - RNA, 20 nt, Human adenovirus B [HAdV-B]
acaugggggugcuggcuggu

SEQ ID NO: 3906720 - RNA, 17 nt, Human adenovirus B [HAdV-B]
acauugcuucucugaac

SEQ ID NO: 3906721 - RNA, 16 nt, Human adenovirus B [HAdV-B]
acccacaaucuucaug

SEQ ID NO: 3906722 - RNA, 14 nt, Human adenovirus B [HAdV-B]
acccacgaugugac

SEQ ID NO: 3906723 - RNA, 19 nt, Human adenovirus B [HAdV-B]
accguucaauuuguggagg

SEQ ID NO: 3906724 - RNA, 22 nt, Human adenovirus B [HAdV-B]
accuauacacaccuugcuucac

SEQ ID NO: 3906725 - RNA, 12 nt, Human adenovirus B [HAdV-B]
accuaugugaac

SEQ ID NO: 3906726 - RNA, 16 nt, Human adenovirus B [HAdV-B]
accucuuucuguuuac

SEQ ID NO: 3906727 - RNA, 17 nt, Human adenovirus B [HAdV-B]
accugaaguaaauggaa

SEQ ID NO: 3906728 - RNA, 18 nt, Human adenovirus B [HAdV-B]
accugaaguaaauggaac

SEQ ID NO: 3906729 - RNA, 21 nt, Human adenovirus B [HAdV-B]
accugaagucuacggccaacc

SEQ ID NO: 3906730 - RNA, 19 nt, Human adenovirus B [HAdV-B]
accugcgagccaaauccuc

SEQ ID NO: 3906731 - RNA, 13 nt, Human adenovirus B [HAdV-B]
accugcggagcag

SEQ ID NO: 3906732 - RNA, 18 nt, Human adenovirus B [HAdV-B]
accugcugcgcacugccc

SEQ ID NO: 3906733 - RNA, 21 nt, Human adenovirus B [HAdV-B]
accuuccggaaccacacugcc

SEQ ID NO: 3906734 - RNA, 20 nt, Human adenovirus B [HAdV-B]
acgaaguguaccaugcaugc

SEQ ID NO: 3906735 - RNA, 22 nt, Human adenovirus B [HAdV-B]
acgaccagacggaaucuuucag

SEQ ID NO: 3906736 - RNA, 16 nt, Human adenovirus B [HAdV-B]
acgagccaacugaacg

SEQ ID NO: 3906737 - RNA, 12 nt, Human adenovirus B [HAdV-B]
acgaggaggcag

SEQ ID NO: 3906738 - RNA, 22 nt, Human adenovirus B [HAdV-B]
acgccagacgccgcaccugucc

SEQ ID NO: 3906739 - RNA, 12 nt, Human adenovirus B [HAdV-B]
acgcccaggccg

SEQ ID NO: 3906740 - RNA, 13 nt, Human adenovirus B [HAdV-B]
acggauucugggg

SEQ ID NO: 3906741 - RNA, 18 nt, Human adenovirus B [HAdV-B]
acggcgacgcgugcaaug

SEQ ID NO: 3906742 - RNA, 16 nt, Human adenovirus B [HAdV-B]
acgggugcuuacugga

SEQ ID NO: 3906743 - RNA, 17 nt, Human adenovirus B [HAdV-B]
acgguaaaucugagcca

SEQ ID NO: 3906744 - RNA, 15 nt, Human adenovirus B [HAdV-B]
acggugcugcaguug

SEQ ID NO: 3906745 - RNA, 17 nt, Human adenovirus B [HAdV-B]
acuaucagaaugaccac

SEQ ID NO: 3906746 - RNA, 24 nt, Human adenovirus B [HAdV-B]
acuauguuuucuuagagauggaag

SEQ ID NO: 3906747 - RNA, 14 nt, Human adenovirus B [HAdV-B]
acucccagcagcuc

SEQ ID NO: 3906748 - RNA, 22 nt, Human adenovirus B [HAdV-B]
acuccccccaaacgucagccaa

SEQ ID NO: 3906749 - RNA, 22 nt, Human adenovirus B [HAdV-B]
acucgguggauuuuuuccagga

SEQ ID NO: 3906750 - RNA, 18 nt, Human adenovirus B [HAdV-B]
acucuuccagaaaacaaa

SEQ ID NO: 3906751 - RNA, 18 nt, Human adenovirus B [HAdV-B]
acugaagugcccaucagu

SEQ ID NO: 3906752 - RNA, 13 nt, Human adenovirus B [HAdV-B]
acugacgccagac

SEQ ID NO: 3906753 - RNA, 17 nt, Human adenovirus B [HAdV-B]
acugcagcacuggacau

SEQ ID NO: 3906754 - RNA, 18 nt, Human adenovirus B [HAdV-B]
acugcccuccgacuuugu

SEQ ID NO: 3906755 - RNA, 15 nt, Human adenovirus B [HAdV-B]
acuggcuaccuauca

SEQ ID NO: 3906756 - RNA, 17 nt, Human adenovirus B [HAdV-B]
acuucuccaucagcaga

SEQ ID NO: 3906757 - RNA, 17 nt, Human adenovirus B [HAdV-B]
acuuuaaagaaaaaguu

SEQ ID NO: 3906758 - RNA, 23 nt, Human adenovirus B [HAdV-B]
agaacaaaagaauaccaaaagaa

SEQ ID NO: 3906759 - RNA, 16 nt, Human adenovirus B [HAdV-B]
agaacagaacuugaaa

SEQ ID NO: 3906760 - RNA, 13 nt, Human adenovirus B [HAdV-B]
agaaccugacccc

SEQ ID NO: 3906761 - RNA, 20 nt, Human adenovirus B [HAdV-B]
agaacuggauuuccugccac

SEQ ID NO: 3906762 - RNA, 11 nt, Human adenovirus B [HAdV-B]
agaagaggaag

SEQ ID NO: 3906763 - RNA, 17 nt, Human adenovirus B [HAdV-B]
agaagaggcggaugaag

SEQ ID NO: 3906764 - RNA, 19 nt, Human adenovirus B [HAdV-B]
agaagguuuccaucauguu

SEQ ID NO: 3906765 - RNA, 16 nt, Human adenovirus B [HAdV-B]
agaaugacccgcaggc

SEQ ID NO: 3906766 - RNA, 19 nt, Human adenovirus B [HAdV-B]
agaaugagccuaacaggaa

SEQ ID NO: 3906767 - RNA, 24 nt, Human adenovirus B [HAdV-B]
agaauuacuucgacaugggagcug

SEQ ID NO: 3906768 - RNA, 19 nt, Human adenovirus B [HAdV-B]
ccaugauaauagcaauggg

SEQ ID NO: 3906769 - RNA, 23 nt, Human adenovirus B [HAdV-B]
ccaugccuauuacaacugacgcc

SEQ ID NO: 3906770 - RNA, 21 nt, Human adenovirus B [HAdV-B]
ccauugaagggauucaugcuc

SEQ ID NO: 3906771 - RNA, 17 nt, Human adenovirus B [HAdV-B]
ccauuugccauucucga

SEQ ID NO: 3906772 - RNA, 16 nt, Human adenovirus B [HAdV-B]
cccaaucgcgaagagg

SEQ ID NO: 3906773 - RNA, 17 nt, Human adenovirus B [HAdV-B]
cccaauuggcuccagca

SEQ ID NO: 3906774 - RNA, 18 nt, Human adenovirus B [HAdV-B]
cccagaagauauggagga

SEQ ID NO: 3906775 - RNA, 16 nt, Human adenovirus B [HAdV-B]
cccagagcgucucagg

SEQ ID NO: 3906776 - RNA, 11 nt, Human adenovirus B [HAdV-B]
cccagcagcuc

SEQ ID NO: 3906777 - RNA, 22 nt, Human adenovirus B [HAdV-B]
cccaggccaugcaacguaucau

SEQ ID NO: 3906778 - RNA, 13 nt, Human adenovirus B [HAdV-B]
cccaguccugcca

SEQ ID NO: 3906779 - RNA, 19 nt, Human adenovirus B [HAdV-B]
cccaguccugccaccaccu

SEQ ID NO: 3906780 - RNA, 21 nt, Human adenovirus B [HAdV-B]
cccgccaaacccaacacacac

SEQ ID NO: 3906781 - RNA, 20 nt, Human adenovirus B [HAdV-B]
cccggcggcgucccagcagu

SEQ ID NO: 3906782 - RNA, 19 nt, Human adenovirus B [HAdV-B]
cccuaguguaccaggaaag

SEQ ID NO: 3906783 - RNA, 18 nt, Human adenovirus B [HAdV-B]
cccugccguugcgcagca

SEQ ID NO: 3906784 - RNA, 11 nt, Human adenovirus B [HAdV-B]
cccugcugcua

SEQ ID NO: 3906785 - RNA, 23 nt, Human adenovirus B [HAdV-B]
cccuguaugccaucuuccagcag

SEQ ID NO: 3906786 - RNA, 24 nt, Human adenovirus B [HAdV-B]
ccgacugcagcacuggacaugaca

SEQ ID NO: 3906787 - RNA, 21 nt, Human adenovirus B [HAdV-B]
ccgacuuugugccucucaccu

SEQ ID NO: 3906788 - RNA, 20 nt, Human adenovirus B [HAdV-B]
ccgagaagguggcugccauc

SEQ ID NO: 3906789 - RNA, 15 nt, Human adenovirus B [HAdV-B]
ccgcaagacaccugc

SEQ ID NO: 3906790 - RNA, 17 nt, Human adenovirus B [HAdV-B]
ccgcuuucgcagcggcg

SEQ ID NO: 3906791 - RNA, 21 nt, Human adenovirus B [HAdV-B]
ccgguauccugcccgccaccu

SEQ ID NO: 3906792 - RNA, 20 nt, Human adenovirus B [HAdV-B]
ccgucgcuuccgaccuggca

SEQ ID NO: 3906793 - RNA, 17 nt, Human adenovirus B [HAdV-B]
ccuacauggguauucug

SEQ ID NO: 3906794 - RNA, 20 nt, Human adenovirus B [HAdV-B]
ccuagucgcagggcucugag

SEQ ID NO: 3906795 - RNA, 14 nt, Human adenovirus B [HAdV-B]
ccucaaaaacacac

SEQ ID NO: 3906796 - RNA, 19 nt, Human adenovirus B [HAdV-B]
ccucccgacggugcugcag

SEQ ID NO: 3906797 - RNA, 20 nt, Human adenovirus B [HAdV-B]
ccucccgacggugcugcagu

SEQ ID NO: 3906798 - RNA, 14 nt, Human adenovirus B [HAdV-B]
ccucggcugcggag

SEQ ID NO: 3906799 - RNA, 15 nt, Human adenovirus B [HAdV-B]
ccucugcacucaggu

SEQ ID NO: 3906800 - RNA, 15 nt, Human adenovirus B [HAdV-B]
ccucuuuucaccucg

SEQ ID NO: 3906801 - RNA, 18 nt, Human adenovirus B [HAdV-B]
ccugauauagcuuccuug

SEQ ID NO: 3906802 - RNA, 17 nt, Human adenovirus B [HAdV-B]
ccugcaacgaauuuucu

SEQ ID NO: 3906803 - RNA, 21 nt, Human adenovirus B [HAdV-B]
ccugcagaaaucuucccauca

SEQ ID NO: 3906804 - RNA, 16 nt, Human adenovirus B [HAdV-B]
ccugcggagcagagca

SEQ ID NO: 3906805 - RNA, 22 nt, Human adenovirus B [HAdV-B]
ccugcuugggcgcuugccaggg

SEQ ID NO: 3906806 - RNA, 15 nt, Human adenovirus B [HAdV-B]
ccuguggugggugca

SEQ ID NO: 3906807 - RNA, 21 nt, Human adenovirus B [HAdV-B]
ccuuccagggucucaguguuc

SEQ ID NO: 3906808 - RNA, 13 nt, Human adenovirus B [HAdV-B]
ccuuccaguacuc

SEQ ID NO: 3906809 - RNA, 16 nt, Human adenovirus B [HAdV-B]
ccuucgcggcuggcca

SEQ ID NO: 3906810 - RNA, 20 nt, Human adenovirus B [HAdV-B]
ccuuggaagagguuccaaag

SEQ ID NO: 3906811 - RNA, 16 nt, Human adenovirus B [HAdV-B]
ccuuuauuccaaugug

SEQ ID NO: 3906812 - RNA, 14 nt, Human adenovirus B [HAdV-B]
cgaagccauagggc

SEQ ID NO: 3906813 - RNA, 18 nt, Human adenovirus B [HAdV-B]
cgaagcuaauuugggaca

SEQ ID NO: 3906814 - RNA, 17 nt, Human adenovirus B [HAdV-B]
cgagaaaaaacagccaa

SEQ ID NO: 3906815 - RNA, 22 nt, Human adenovirus B [HAdV-B]
cgagagcgugaugcagcagcag

SEQ ID NO: 3906816 - RNA, 11 nt, Human adenovirus B [HAdV-B]
cgaggaggaag

SEQ ID NO: 3906817 - RNA, 16 nt, Human adenovirus B [HAdV-B]
cgaggaggaagagggc

SEQ ID NO: 3906818 - RNA, 13 nt, Human adenovirus B [HAdV-B]
cgaucuucucaau

SEQ ID NO: 3906819 - RNA, 15 nt, Human adenovirus B [HAdV-B]
cgaugacaauucucu

SEQ ID NO: 3906820 - RNA, 15 nt, Human adenovirus B [HAdV-B]
cgaugucgucacagg

SEQ ID NO: 3906821 - RNA, 20 nt, Human adenovirus B [HAdV-B]
cgauuagcgagucaguggac

SEQ ID NO: 3906822 - RNA, 21 nt, Human adenovirus B [HAdV-B]
cgauucucacuugccacccuc

SEQ ID NO: 3906823 - RNA, 15 nt, Human adenovirus B [HAdV-B]
cgcaguacuucaaau

SEQ ID NO: 3906824 - RNA, 21 nt, Human adenovirus B [HAdV-B]
cgcaugaauuggcucagcgcc

SEQ ID NO: 3906825 - RNA, 17 nt, Human adenovirus B [HAdV-B]
cgccaccugcugcgcac

SEQ ID NO: 3906826 - RNA, 21 nt, Human adenovirus B [HAdV-B]
cgcccagcuguuucugguggu

SEQ ID NO: 3906827 - RNA, 19 nt, Human adenovirus B [HAdV-B]
cgcgcagauggcaucucuc

SEQ ID NO: 3906828 - RNA, 17 nt, Human adenovirus B [HAdV-B]
cgcguggggcgaagagc

SEQ ID NO: 3906829 - RNA, 14 nt, Human adenovirus B [HAdV-B]
cgcucuaaucccac

SEQ ID NO: 3906830 - RNA, 14 nt, Human adenovirus B [HAdV-B]
cgcuugccagcacg

SEQ ID NO: 3906831 - RNA, 13 nt, Human adenovirus B [HAdV-B]
cgcuugccagggu

SEQ ID NO: 3906832 - RNA, 22 nt, Human adenovirus B [HAdV-B]
cggauucuuaacagugcaggca

SEQ ID NO: 3906833 - RNA, 21 nt, Human adenovirus B [HAdV-B]
cggcccuggcagaacacacuc

SEQ ID NO: 3906834 - RNA, 21 nt, Human adenovirus B [HAdV-B]
cggcgcugcagagccagccgu

SEQ ID NO: 3906835 - RNA, 14 nt, Human adenovirus B [HAdV-B]
cggcgucccagcag

SEQ ID NO: 3906836 - RNA, 15 nt, Human adenovirus B [HAdV-B]
cggcgugccucugac

SEQ ID NO: 3906837 - RNA, 14 nt, Human adenovirus B [HAdV-B]
cgggcaggauguca

SEQ ID NO: 3906838 - RNA, 13 nt, Human adenovirus B [HAdV-B]
cggggucaagagc

SEQ ID NO: 3906839 - RNA, 23 nt, Human adenovirus B [HAdV-B]
cggugaugcaauccccacuggag

SEQ ID NO: 3906840 - RNA, 17 nt, Human adenovirus B [HAdV-B]
cgguucuuugcucuucc

SEQ ID NO: 3906841 - RNA, 19 nt, Human adenovirus B [HAdV-B]
cguguacaaggcacugggc

SEQ ID NO: 3906842 - RNA, 13 nt, Human adenovirus B [HAdV-B]
cguguugcucagg

SEQ ID NO: 3906843 - RNA, 18 nt, Human adenovirus B [HAdV-B]
cguuaaccccacagccaa

SEQ ID NO: 3906844 - RNA, 22 nt, Human adenovirus B [HAdV-B]
cguuguccguucucgcuggcca

SEQ ID NO: 3906845 - RNA, 18 nt, Human adenovirus B [HAdV-B]
cuaacgaauuugaaauaa

SEQ ID NO: 3906846 - RNA, 17 nt, Human adenovirus B [HAdV-B]
cuacccaacauccuguc

SEQ ID NO: 3906847 - RNA, 15 nt, Human adenovirus B [HAdV-B]
cuaccuauacacacc

SEQ ID NO: 3906848 - RNA, 17 nt, Human adenovirus B [HAdV-B]
cuaccuugacccccaga

SEQ ID NO: 3906849 - RNA, 12 nt, Human adenovirus B [HAdV-B]
cuacuuucacag

SEQ ID NO: 3906850 - RNA, 17 nt, Human adenovirus B [HAdV-B]
cuagcauaaguucaucg

SEQ ID NO: 3906851 - RNA, 20 nt, Human adenovirus B [HAdV-B]
cuaggacaaagcgugcugca

SEQ ID NO: 3906852 - RNA, 14 nt, Human adenovirus B [HAdV-B]
cuaguagacaccua

SEQ ID NO: 3906853 - RNA, 14 nt, Human adenovirus B [HAdV-B]
cuagucuugcuugu

SEQ ID NO: 3906854 - RNA, 17 nt, Human adenovirus B [HAdV-B]
cuaucucuccuaccacu

SEQ ID NO: 3906855 - RNA, 19 nt, Human adenovirus B [HAdV-B]
cucaagguccggcccacgg

SEQ ID NO: 3906856 - RNA, 23 nt, Human adenovirus B [HAdV-B]
cucagcgacgaggaaaaggagca

SEQ ID NO: 3906857 - RNA, 17 nt, Human adenovirus B [HAdV-B]
cucagcucaugcucugg

SEQ ID NO: 3906858 - RNA, 15 nt, Human adenovirus B [HAdV-B]
cucagguugucaguu

SEQ ID NO: 3906859 - RNA, 15 nt, Human adenovirus B [HAdV-B]
cucauuugugcauuu

SEQ ID NO: 3906860 - RNA, 12 nt, Human adenovirus B [HAdV-B]
cucccagcagca

SEQ ID NO: 3906861 - RNA, 21 nt, Human adenovirus B [HAdV-B]
cuccccaaggaucacccucaa

SEQ ID NO: 3906862 - RNA, 15 nt, Human adenovirus B [HAdV-B]
cucccccagccaugc

SEQ ID NO: 3906863 - RNA, 16 nt, Human adenovirus B [HAdV-B]
cucccccagccaugca

SEQ ID NO: 3906864 - RNA, 15 nt, Human adenovirus B [HAdV-B]
cucccgacggugcug

SEQ ID NO: 3906865 - RNA, 18 nt, Human adenovirus B [HAdV-B]
cuccgacugcagcacugg

SEQ ID NO: 3906866 - RNA, 15 nt, Human adenovirus B [HAdV-B]
cuccggaucuccugg

SEQ ID NO: 3906867 - RNA, 22 nt, Human adenovirus B [HAdV-B]
cuccucguuuacguacugguga

SEQ ID NO: 3906868 - RNA, 13 nt, Human adenovirus B [HAdV-B]
cucgaagcaaggg

SEQ ID NO: 3906869 - RNA, 20 nt, Human adenovirus B [HAdV-B]
cucgaagggguucauugguc

SEQ ID NO: 3906870 - RNA, 17 nt, Human adenovirus B [HAdV-B]
cucgauaaucugcuccu

SEQ ID NO: 3906871 - RNA, 22 nt, Human adenovirus B [HAdV-B]
ugaagcucuuaauuugggccau

SEQ ID NO: 3906872 - RNA, 14 nt, Human adenovirus B [HAdV-B]
ugaaggggugugcg

SEQ ID NO: 3906873 - RNA, 10 nt, Human adenovirus B [HAdV-B]
ugaauuauuc

SEQ ID NO: 3906874 - RNA, 14 nt, Human adenovirus B [HAdV-B]
ugaccccgggacug

SEQ ID NO: 3906875 - RNA, 17 nt, Human adenovirus B [HAdV-B]
ugacguuucgcucacca

SEQ ID NO: 3906876 - RNA, 18 nt, Human adenovirus B [HAdV-B]
ugacugucgguagaagaa

SEQ ID NO: 3906877 - RNA, 21 nt, Human adenovirus B [HAdV-B]
ugaugacaauauuaacaccuu

SEQ ID NO: 3906878 - RNA, 19 nt, Human adenovirus B [HAdV-B]
ugaugcagcagcagcaggc

SEQ ID NO: 3906879 - RNA, 15 nt, Human adenovirus B [HAdV-B]
ugauuacuuugauau

SEQ ID NO: 3906880 - RNA, 17 nt, Human adenovirus B [HAdV-B]
ugauuauucuuugcuac

SEQ ID NO: 3906881 - RNA, 18 nt, Human adenovirus B [HAdV-B]
ugauuuaaaaucaagugu

SEQ ID NO: 3906882 - RNA, 18 nt, Human adenovirus B [HAdV-B]
ugcaaaccucugcuacaa

SEQ ID NO: 3906883 - RNA, 12 nt, Human adenovirus B [HAdV-B]
ugcaacccccag

SEQ ID NO: 3906884 - RNA, 16 nt, Human adenovirus B [HAdV-B]
ugcaaggccccagcag

SEQ ID NO: 3906885 - RNA, 15 nt, Human adenovirus B [HAdV-B]
ugcaccacacuucug

SEQ ID NO: 3906886 - RNA, 17 nt, Human adenovirus B [HAdV-B]
ugcagcaacaggaggau

SEQ ID NO: 3906887 - RNA, 18 nt, Human adenovirus B [HAdV-B]
ugcaggugaggauuugca

SEQ ID NO: 3906888 - RNA, 19 nt, Human adenovirus B [HAdV-B]
ugcaguagguacaacacau

SEQ ID NO: 3906889 - RNA, 14 nt, Human adenovirus B [HAdV-B]
ugccaaaaaaacau

SEQ ID NO: 3906890 - RNA, 20 nt, Human adenovirus B [HAdV-B]
ugccauucucgagcugccag

SEQ ID NO: 3906891 - RNA, 23 nt, Human adenovirus B [HAdV-B]
ugccccacggcgacgcgugcaau

SEQ ID NO: 3906892 - RNA, 16 nt, Human adenovirus B [HAdV-B]
ugcccgccaccugcug

SEQ ID NO: 3906893 - RNA, 23 nt, Human adenovirus B [HAdV-B]
ugccugacuuuaugagccagagc

SEQ ID NO: 3906894 - RNA, 20 nt, Human adenovirus B [HAdV-B]
ugcgaucuggccauguucau

SEQ ID NO: 3906895 - RNA, 21 nt, Human adenovirus B [HAdV-B]
ugcgauuuucaaggugcucaa

SEQ ID NO: 3906896 - RNA, 19 nt, Human adenovirus B [HAdV-B]
ugcggcaucgcagaaaaca

SEQ ID NO: 3906897 - RNA, 20 nt, Human adenovirus B [HAdV-B]
ugcuacagcugcugcagaag

SEQ ID NO: 3906898 - RNA, 14 nt, Human adenovirus B [HAdV-B]
ugcuacgaagagcu

SEQ ID NO: 3906899 - RNA, 15 nt, Human adenovirus B [HAdV-B]
ugcuagauggaacag

SEQ ID NO: 3906900 - RNA, 12 nt, Human adenovirus B [HAdV-B]
ugcucugcaaaa

SEQ ID NO: 3906901 - RNA, 18 nt, Human adenovirus B [HAdV-B]
uggaagagaugguggguc

SEQ ID NO: 3906902 - RNA, 20 nt, Human adenovirus B [HAdV-B]
uggacccuccaguggaggag

SEQ ID NO: 3906903 - RNA, 23 nt, Human adenovirus B [HAdV-B]
uggaggaggaaaacgaggaggca

SEQ ID NO: 3906904 - RNA, 14 nt, Human adenovirus B [HAdV-B]
uggagucacugcua

SEQ ID NO: 3906905 - RNA, 13 nt, Human adenovirus B [HAdV-B]
uggaucccaugga

SEQ ID NO: 3906906 - RNA, 23 nt, Human adenovirus B [HAdV-B]
uggcacucccgucucgacccagc

SEQ ID NO: 3906907 - RNA, 13 nt, Human adenovirus B [HAdV-B]
uggcaugggaugg

SEQ ID NO: 3906908 - RNA, 18 nt, Human adenovirus B [HAdV-B]
uggcgcgauaccaggcau

SEQ ID NO: 3906909 - RNA, 23 nt, Human adenovirus B [HAdV-B]
uggcuacugugcauauuguuucc

SEQ ID NO: 3906910 - RNA, 23 nt, Human adenovirus B [HAdV-B]
uggcuuaccagacaaaguacagc

SEQ ID NO: 3906911 - RNA, 18 nt, Human adenovirus B [HAdV-B]
ugggacagucaggcagag

SEQ ID NO: 3906912 - RNA, 18 nt, Human adenovirus B [HAdV-B]
ugggcaccgacucuccca

SEQ ID NO: 3906913 - RNA, 21 nt, Human adenovirus B [HAdV-B]
ugggcauucugaaugaaggcg

SEQ ID NO: 3906914 - RNA, 14 nt, Human adenovirus B [HAdV-B]
ugggggugcuggcu

SEQ ID NO: 3906915 - RNA, 17 nt, Human adenovirus B [HAdV-B]
ugggucugacacaucau

SEQ ID NO: 3906916 - RNA, 17 nt, Human adenovirus B [HAdV-B]
uguaucccacuaugcaa

SEQ ID NO: 3906917 - RNA, 21 nt, Human adenovirus B [HAdV-B]
uguauccggaggguccuccuc

SEQ ID NO: 3906918 - RNA, 13 nt, Human adenovirus B [HAdV-B]
uguccaagcgcaa

SEQ ID NO: 3906919 - RNA, 15 nt, Human adenovirus B [HAdV-B]
uguccuccaagauuu

SEQ ID NO: 3906920 - RNA, 17 nt, Human adenovirus B [HAdV-B]
ugugauggcgcuagcag

SEQ ID NO: 3906921 - RNA, 13 nt, Human adenovirus B [HAdV-B]
ugugcagcagagc

SEQ ID NO: 3906922 - RNA, 20 nt, Human adenovirus B [HAdV-B]
uguuugccaaaggaucccau

SEQ ID NO: 3906923 - RNA, 19 nt, Human adenovirus B [HAdV-B]
uguuuggucuuccuuggcu

SEQ ID NO: 3906924 - RNA, 18 nt, Human adenovirus B [HAdV-B]
uuaaaaaccugcugcuuc

SEQ ID NO: 3906925 - RNA, 19 nt, Human adenovirus B [HAdV-B]
uuaaauccacacugguggc

SEQ ID NO: 3906926 - RNA, 17 nt, Human adenovirus B [HAdV-B]
uuaagcauuccaccgcc

SEQ ID NO: 3906927 - RNA, 20 nt, Human adenovirus B [HAdV-B]
uuaauauaaauuaaaugacg

SEQ ID NO: 3906928 - RNA, 14 nt, Human adenovirus B [HAdV-B]
uuacaaccagaaga

SEQ ID NO: 3906929 - RNA, 12 nt, Human adenovirus B [HAdV-B]
uuaugugcauuu

SEQ ID NO: 3906930 - RNA, 17 nt, Human adenovirus B [HAdV-B]
uucucuagaaacuuuua

SEQ ID NO: 3906931 - RNA, 13 nt, Human adenovirus B [HAdV-B]
uucuuaacagugc

SEQ ID NO: 3906932 - RNA, 22 nt, Human adenovirus B [HAdV-B]
uugagcugggaugggugcauuc

SEQ ID NO: 3906933 - RNA, 17 nt, Human adenovirus B [HAdV-B]
uugcaaucgcagugcag

SEQ ID NO: 3906934 - RNA, 13 nt, Human adenovirus B [HAdV-B]
uugcaugaaagcc

SEQ ID NO: 3906935 - RNA, 16 nt, Human adenovirus B [HAdV-B]
uugcgccaacaccugu

SEQ ID NO: 3906936 - RNA, 14 nt, Human adenovirus B [HAdV-B]
uugcuaacgcugga

SEQ ID NO: 3906937 - RNA, 18 nt, Human adenovirus B [HAdV-B]
uuguaucccacuaugcaa

SEQ ID NO: 3906938 - RNA, 14 nt, Human adenovirus B [HAdV-B]
uuguaucuggugga

SEQ ID NO: 3906939 - RNA, 18 nt, Human adenovirus B [HAdV-B]
uugucuccugaacugcaa

SEQ ID NO: 3906940 - RNA, 22 nt, Human adenovirus B [HAdV-B]
uugugcggcaggcaugcaagau

SEQ ID NO: 3906941 - RNA, 17 nt, Human adenovirus B [HAdV-B]
uuuauuugaaaaucaau

SEQ ID NO: 3906942 - RNA, 11 nt, Human adenovirus B [HAdV-B]
uuuccagaagc

SEQ ID NO: 3906943 - RNA, 11 nt, Human adenovirus B [HAdV-B]
uuugcugugcc

SEQ ID NO: 3906944 - RNA, 16 nt, Human adenovirus B [HAdV-B]
uuuucucccagcagca

SEQ ID NO: 3906945 - RNA, 14 nt, Human adenovirus B [HAdV-B]
uuuucuuacuuuua

SEQ ID NO: 3906946 - RNA, 23 nt, Human adenovirus B [HAdV-B]
uuuugcacccgacacaagccgca

SEQ ID NO: 3906947 - RNA, 18 nt, Human adenovirus B [HAdV-B]
gaccccgggacuguggac

SEQ ID NO: 3906948 - RNA, 13 nt, Human adenovirus B [HAdV-B]
gaccucaucuucc

SEQ ID NO: 3906949 - RNA, 20 nt, Human adenovirus B [HAdV-B]
gaccuuucauuaacaaacug

SEQ ID NO: 3906950 - RNA, 18 nt, Human adenovirus B [HAdV-B]
gacgguaaaucugagcca

SEQ ID NO: 3906951 - RNA, 19 nt, Human adenovirus B [HAdV-B]
gacuacuugcacagagcug

SEQ ID NO: 3906952 - RNA, 17 nt, Human adenovirus B [HAdV-B]
gacucucgccugcaacg

SEQ ID NO: 3906953 - RNA, 18 nt, Human adenovirus B [HAdV-B]
gacuuuaugagccagagc

SEQ ID NO: 3906954 - RNA, 20 nt, Human adenovirus B [HAdV-B]
gacuuuaugagccagagcau

SEQ ID NO: 3906955 - RNA, 14 nt, Human adenovirus B [HAdV-B]
gagaaaaagaaaac

SEQ ID NO: 3906956 - RNA, 18 nt, Human adenovirus B [HAdV-B]
gagaaaaaucagaaauuc

SEQ ID NO: 3906957 - RNA, 22 nt, Human adenovirus B [HAdV-B]
gagaccugcuaccaaugaauua

SEQ ID NO: 3906958 - RNA, 13 nt, Human adenovirus B [HAdV-B]
gaggaauguuuau

SEQ ID NO: 3906959 - RNA, 18 nt, Human adenovirus B [HAdV-B]
gaggagaugcgagcuucc

SEQ ID NO: 3906960 - RNA, 21 nt, Human adenovirus B [HAdV-B]
gaggccacaacgcacagccug

SEQ ID NO: 3906961 - RNA, 14 nt, Human adenovirus B [HAdV-B]
gaguacuuggaaga

SEQ ID NO: 3906962 - RNA, 13 nt, Human adenovirus B [HAdV-B]
gagucgaggaacc

SEQ ID NO: 3906963 - RNA, 18 nt, Human adenovirus B [HAdV-B]
gagucugagacagacauc

SEQ ID NO: 3906964 - RNA, 21 nt, Human adenovirus B [HAdV-B]
gagucugagacagacaucgag

SEQ ID NO: 3906965 - RNA, 20 nt, Human adenovirus B [HAdV-B]
gaguuuaaugggcgaagagg

SEQ ID NO: 3906966 - RNA, 15 nt, Human adenovirus B [HAdV-B]
gauagccccaauggc

SEQ ID NO: 3906967 - RNA, 21 nt, Human adenovirus B [HAdV-B]
gauauugacagugccgguuga

SEQ ID NO: 3906968 - RNA, 15 nt, Human adenovirus B [HAdV-B]
gaucaaaagaaaugc

SEQ ID NO: 3906969 - RNA, 15 nt, Human adenovirus B [HAdV-B]
gaucacaaugugaug

SEQ ID NO: 3906970 - RNA, 19 nt, Human adenovirus B [HAdV-B]
gaucauggaaaucccaccc

SEQ ID NO: 3906971 - RNA, 17 nt, Human adenovirus B [HAdV-B]
gauccauggaugcccau

SEQ ID NO: 3906972 - RNA, 15 nt, Human adenovirus B [HAdV-B]
gauccugagguauga

SEQ ID NO: 3906973 - RNA, 23 nt, Human adenovirus B [HAdV-B]
gauccuuagauaugugcagcaga

SEQ ID NO: 3906974 - RNA, 12 nt, Human adenovirus B [HAdV-B]
gaucggacaggg

SEQ ID NO: 3906975 - RNA, 16 nt, Human adenovirus B [HAdV-B]
gaugaaaacugcccaa

SEQ ID NO: 3906976 - RNA, 16 nt, Human adenovirus B [HAdV-B]
gaugaaaugacaggga

SEQ ID NO: 3906977 - RNA, 20 nt, Human adenovirus B [HAdV-B]
gaugagcccacccugcuuua

SEQ ID NO: 3906978 - RNA, 19 nt, Human adenovirus B [HAdV-B]
gaugcauuauuggacagaa

SEQ ID NO: 3906979 - RNA, 19 nt, Human adenovirus B [HAdV-B]
gaugccuuuuccagaauga

SEQ ID NO: 3906980 - RNA, 14 nt, Human adenovirus B [HAdV-B]
gauggaaaaaccga

SEQ ID NO: 3906981 - RNA, 15 nt, Human adenovirus B [HAdV-B]
gaugguuauaaugga

SEQ ID NO: 3906982 - RNA, 18 nt, Human adenovirus B [HAdV-B]
gaugucaccugcggagca

SEQ ID NO: 3906983 - RNA, 23 nt, Human adenovirus B [HAdV-B]
gaugucccaacgacgagaaaaca

SEQ ID NO: 3906984 - RNA, 14 nt, Human adenovirus B [HAdV-B]
gauuccuugcucag

SEQ ID NO: 3906985 - RNA, 23 nt, Human adenovirus B [HAdV-B]
gauuggcggcaggcgccucccag

SEQ ID NO: 3906986 - RNA, 17 nt, Human adenovirus B [HAdV-B]
gauuucugugggacgac

SEQ ID NO: 3906987 - RNA, 20 nt, Human adenovirus B [HAdV-B]
gauuugauauugacagugcc

SEQ ID NO: 3906988 - RNA, 19 nt, Human adenovirus B [HAdV-B]
gauuugauggaagcuauca

SEQ ID NO: 3906989 - RNA, 14 nt, Human adenovirus B [HAdV-B]
gcaaaacaaugacu

SEQ ID NO: 3906990 - RNA, 19 nt, Human adenovirus B [HAdV-B]
gcaaaguucgacauguguu

SEQ ID NO: 3906991 - RNA, 22 nt, Human adenovirus B [HAdV-B]
gcaaauacaaggaagaaaugcu

SEQ ID NO: 3906992 - RNA, 23 nt, Human adenovirus B [HAdV-B]
gcaagagcucugcuacgaagagc

SEQ ID NO: 3906993 - RNA, 16 nt, Human adenovirus B [HAdV-B]
gcaaucgcagugcagg

SEQ ID NO: 3906994 - RNA, 22 nt, Human adenovirus B [HAdV-B]
gcacacuaaaaggaccucaagg

SEQ ID NO: 3906995 - RNA, 17 nt, Human adenovirus B [HAdV-B]
gcacgucuucaaccgcu

SEQ ID NO: 3906996 - RNA, 16 nt, Human adenovirus B [HAdV-B]
gcagaacacacucuuc

SEQ ID NO: 3906997 - RNA, 20 nt, Human adenovirus B [HAdV-B]
gcagagaaacaacagacaug

SEQ ID NO: 3906998 - RNA, 12 nt, Human adenovirus B [HAdV-B]
gcaggagcggag

SEQ ID NO: 3906999 - RNA, 17 nt, Human adenovirus B [HAdV-B]
gcaggaugugagcuucc

SEQ ID NO: 3907000 - RNA, 17 nt, Human adenovirus B [HAdV-B]
gcaguaacuuuuguaaa

SEQ ID NO: 3907001 - RNA, 15 nt, Human adenovirus B [HAdV-B]
gcaguacucaagcga

SEQ ID NO: 3907002 - RNA, 18 nt, Human adenovirus B [HAdV-B]
gcauacaauccagacaug

SEQ ID NO: 3907003 - RNA, 12 nt, Human adenovirus B [HAdV-B]
gcauacuuucuc

SEQ ID NO: 3907004 - RNA, 21 nt, Human adenovirus B [HAdV-B]
gcauagcuuccguggcgguuc

SEQ ID NO: 3907005 - RNA, 19 nt, Human adenovirus B [HAdV-B]
gcauccaccggucaugcca

SEQ ID NO: 3907006 - RNA, 15 nt, Human adenovirus B [HAdV-B]
gcaugaauuggcuca

SEQ ID NO: 3907007 - RNA, 23 nt, Human adenovirus B [HAdV-B]
gcaugacccagaugccugugaug

SEQ ID NO: 3907008 - RNA, 17 nt, Human adenovirus B [HAdV-B]
gccaaccguugaaggau

SEQ ID NO: 3907009 - RNA, 18 nt, Human adenovirus B [HAdV-B]
gccaacuaucucuccuac

SEQ ID NO: 3907010 - RNA, 16 nt, Human adenovirus B [HAdV-B]
gccaaugcaaccaaua

SEQ ID NO: 3907011 - RNA, 15 nt, Human adenovirus B [HAdV-B]
gccacagcuggcaga

SEQ ID NO: 3907012 - RNA, 21 nt, Human adenovirus B [HAdV-B]
gccacagggucuccagcucga

SEQ ID NO: 3907013 - RNA, 15 nt, Human adenovirus B [HAdV-B]
gccaccugcugcgca

SEQ ID NO: 3907014 - RNA, 20 nt, Human adenovirus B [HAdV-B]
gccaccugcugcgcacugcc

SEQ ID NO: 3907015 - RNA, 17 nt, Human adenovirus B [HAdV-B]
gccacgagugccaucac

SEQ ID NO: 3907016 - RNA, 19 nt, Human adenovirus B [HAdV-B]
gccagcgcaaacccgagag

SEQ ID NO: 3907017 - RNA, 15 nt, Human adenovirus B [HAdV-B]
gccagcgccaugaca

SEQ ID NO: 3907018 - RNA, 18 nt, Human adenovirus B [HAdV-B]
gccagcgguucuggagga

SEQ ID NO: 3907019 - RNA, 14 nt, Human adenovirus B [HAdV-B]
gccaugacagacag

SEQ ID NO: 3907020 - RNA, 17 nt, Human adenovirus B [HAdV-B]
gccaugcauugaaguga

SEQ ID NO: 3907021 - RNA, 18 nt, Human adenovirus B [HAdV-B]
gcccaguccugccaccac

SEQ ID NO: 3907022 - RNA, 22 nt, Human adenovirus B [HAdV-B]
gccccccgggaacaagagcagg

SEQ ID NO: 3907023 - RNA, 16 nt, Human adenovirus B [HAdV-B]
gcccuacucaaucugg

SEQ ID NO: 3907024 - RNA, 12 nt, Human adenovirus B [HAdV-B]
gccgaugugucu

SEQ ID NO: 3907025 - RNA, 20 nt, Human adenovirus B [HAdV-B]
gccuacccauggcgggcacc

SEQ ID NO: 3907026 - RNA, 14 nt, Human adenovirus B [HAdV-B]
gccuacugccaccu

SEQ ID NO: 3907027 - RNA, 15 nt, Human adenovirus B [HAdV-B]
gccuacugccaccuc

SEQ ID NO: 3907028 - RNA, 14 nt, Human adenovirus B [HAdV-B]
gccucuucucuuuc

SEQ ID NO: 3907029 - RNA, 20 nt, Human adenovirus B [HAdV-B]
gccugacuuuaugagccaga

SEQ ID NO: 3907030 - RNA, 17 nt, Human adenovirus B [HAdV-B]
gccuguacuucuccauc

SEQ ID NO: 3907031 - RNA, 16 nt, Human adenovirus B [HAdV-B]
gccuucaauuggagca

SEQ ID NO: 3907032 - RNA, 17 nt, Human adenovirus B [HAdV-B]
ucuaaggccauuugcca

SEQ ID NO: 3907033 - RNA, 18 nt, Human adenovirus B [HAdV-B]
ucuaaucccacucaugag

SEQ ID NO: 3907034 - RNA, 19 nt, Human adenovirus B [HAdV-B]
ucuaccuugacccccagac

SEQ ID NO: 3907035 - RNA, 23 nt, Human adenovirus B [HAdV-B]
ucuacuucaaccccuucuccgga

SEQ ID NO: 3907036 - RNA, 15 nt, Human adenovirus B [HAdV-B]
ucuauucugguucua

SEQ ID NO: 3907037 - RNA, 14 nt, Human adenovirus B [HAdV-B]
ucucaaccccagcu

SEQ ID NO: 3907038 - RNA, 21 nt, Human adenovirus B [HAdV-B]
ucucccagacucguacaaaua

SEQ ID NO: 3907039 - RNA, 20 nt, Human adenovirus B [HAdV-B]
ucucugaccaugacuuugag

SEQ ID NO: 3907040 - RNA, 17 nt, Human adenovirus B [HAdV-B]
ucugaacuaucagaaug

SEQ ID NO: 3907041 - RNA, 15 nt, Human adenovirus B [HAdV-B]
ucugauuccuggaua

SEQ ID NO: 3907042 - RNA, 12 nt, Human adenovirus B [HAdV-B]
ucuggggucuug

SEQ ID NO: 3907043 - RNA, 14 nt, Human adenovirus B [HAdV-B]
ucuguugaaauuuu

SEQ ID NO: 3907044 - RNA, 14 nt, Human adenovirus B [HAdV-B]
ucuuacugcuuuac

SEQ ID NO: 3907045 - RNA, 21 nt, Human adenovirus B [HAdV-B]
ucuuagguuacuggccagugc

SEQ ID NO: 3907046 - RNA, 13 nt, Human adenovirus B [HAdV-B]
ucuuaugaggaag

SEQ ID NO: 3907047 - RNA, 17 nt, Human adenovirus B [HAdV-B]
ucuucaccauacucauu

SEQ ID NO: 3907048 - RNA, 19 nt, Human adenovirus B [HAdV-B]
ucuucgcgauccuuccagu

SEQ ID NO: 3907049 - RNA, 18 nt, Human adenovirus B [HAdV-B]
ucuugcuucuugcaaaua

SEQ ID NO: 3907050 - RNA, 20 nt, Human adenovirus B [HAdV-B]
ucuuuagcgaucuucucaau

SEQ ID NO: 3907051 - RNA, 22 nt, Human adenovirus B [HAdV-B]
ucuuuugccauccuucucaacg

SEQ ID NO: 3907052 - RNA, 13 nt, Human adenovirus B [HAdV-B]
ugaaaugggcaug

SEQ ID NO: 3907053 - RNA, 17 nt, Human adenovirus B [HAdV-B]
ugaaauuaugugcauuu

SEQ ID NO: 3907054 - RNA, 14 nt, Human adenovirus B [HAdV-B]
ugaacaugguucua

SEQ ID NO: 3907055 - RNA, 13 nt, Human adenovirus B [HAdV-B]
auggcgugggcgc

SEQ ID NO: 3907056 - RNA, 21 nt, Human adenovirus B [HAdV-B]
augggcguccagcgcugccag

SEQ ID NO: 3907057 - RNA, 13 nt, Human adenovirus B [HAdV-B]
augggucuucucc

SEQ ID NO: 3907058 - RNA, 20 nt, Human adenovirus B [HAdV-B]
augggucuucuccugggcaa

SEQ ID NO: 3907059 - RNA, 15 nt, Human adenovirus B [HAdV-B]
auguaaauuuggaaa

SEQ ID NO: 3907060 - RNA, 19 nt, Human adenovirus B [HAdV-B]
auguaguuucuaugcgugu

SEQ ID NO: 3907061 - RNA, 16 nt, Human adenovirus B [HAdV-B]
augugacaccggugga

SEQ ID NO: 3907062 - RNA, 17 nt, Human adenovirus B [HAdV-B]
auguguacugaguuuaa

SEQ ID NO: 3907063 - RNA, 13 nt, Human adenovirus B [HAdV-B]
auuaaaaaaugau

SEQ ID NO: 3907064 - RNA, 21 nt, Human adenovirus B [HAdV-B]
auuacuaaugcuaaagguuuc

SEQ ID NO: 3907065 - RNA, 17 nt, Human adenovirus B [HAdV-B]
auuaucaccaaacugcu

SEQ ID NO: 3907066 - RNA, 15 nt, Human adenovirus B [HAdV-B]
auuaugugcauuuug

SEQ ID NO: 3907067 - RNA, 13 nt, Human adenovirus B [HAdV-B]
auucagaaaccuu

SEQ ID NO: 3907068 - RNA, 17 nt, Human adenovirus B [HAdV-B]
auuccaccagccagguu

SEQ ID NO: 3907069 - RNA, 22 nt, Human adenovirus B [HAdV-B]
auucccugcagaaaucuuccca

SEQ ID NO: 3907070 - RNA, 15 nt, Human adenovirus B [HAdV-B]
auugcccaggacuuu

SEQ ID NO: 3907071 - RNA, 14 nt, Human adenovirus B [HAdV-B]
auugccugacuuua

SEQ ID NO: 3907072 - RNA, 20 nt, Human adenovirus B [HAdV-B]
auugcucaccaccucagaug

SEQ ID NO: 3907073 - RNA, 21 nt, Human adenovirus B [HAdV-B]
auuggagcaguaucuggagcg

SEQ ID NO: 3907074 - RNA, 16 nt, Human adenovirus B [HAdV-B]
auuguuucugaugcaa

SEQ ID NO: 3907075 - RNA, 20 nt, Human adenovirus B [HAdV-B]
auuuacauauuggcaccauu

SEQ ID NO: 3907076 - RNA, 20 nt, Human adenovirus B [HAdV-B]
auuugauuuuggcuggaaug

SEQ ID NO: 3907077 - RNA, 21 nt, Human adenovirus B [HAdV-B]
auuugugggauuugauggaag

SEQ ID NO: 3907078 - RNA, 15 nt, Human adenovirus B [HAdV-B]
auuuucccuacuaau

SEQ ID NO: 3907079 - RNA, 16 nt, Human adenovirus B [HAdV-B]
auuuucuaacuccuca

SEQ ID NO: 3907080 - RNA, 17 nt, Human adenovirus B [HAdV-B]
auuuucucccagcggcc

SEQ ID NO: 3907081 - RNA, 15 nt, Human adenovirus B [HAdV-B]
caaaaaauuccaguc

SEQ ID NO: 3907082 - RNA, 18 nt, Human adenovirus B [HAdV-B]
caaacccaacacacaccc

SEQ ID NO: 3907083 - RNA, 14 nt, Human adenovirus B [HAdV-B]
caaagagcucugac

SEQ ID NO: 3907084 - RNA, 22 nt, Human adenovirus B [HAdV-B]
caaagaucuaccgccagugcug

SEQ ID NO: 3907085 - RNA, 16 nt, Human adenovirus B [HAdV-B]
caaaguaaaaggcaca

SEQ ID NO: 3907086 - RNA, 18 nt, Human adenovirus B [HAdV-B]
caaaguacagcgggcaca

SEQ ID NO: 3907087 - RNA, 18 nt, Human adenovirus B [HAdV-B]
caaaucaugaacuccagu

SEQ ID NO: 3907088 - RNA, 22 nt, Human adenovirus B [HAdV-B]
caaauuaggacaaggacuuaca

SEQ ID NO: 3907089 - RNA, 12 nt, Human adenovirus B [HAdV-B]
caacaaaacaaa

SEQ ID NO: 3907090 - RNA, 22 nt, Human adenovirus B [HAdV-B]
caacaaccguggucauuucuug

SEQ ID NO: 3907091 - RNA, 17 nt, Human adenovirus B [HAdV-B]
caacaaucuaugcccaa

SEQ ID NO: 3907092 - RNA, 11 nt, Human adenovirus B [HAdV-B]
caacacuuuca

SEQ ID NO: 3907093 - RNA, 18 nt, Human adenovirus B [HAdV-B]
caacagacccaacuacau

SEQ ID NO: 3907094 - RNA, 15 nt, Human adenovirus B [HAdV-B]
caacauauccuucac

SEQ ID NO: 3907095 - RNA, 17 nt, Human adenovirus B [HAdV-B]
caaccauaaaaacauac

SEQ ID NO: 3907096 - RNA, 16 nt, Human adenovirus B [HAdV-B]
caacgaacaagcugug

SEQ ID NO: 3907097 - RNA, 19 nt, Human adenovirus B [HAdV-B]
caagaauuucuacugaaaa

SEQ ID NO: 3907098 - RNA, 15 nt, Human adenovirus B [HAdV-B]
caagacaagccacag

SEQ ID NO: 3907099 - RNA, 17 nt, Human adenovirus B [HAdV-B]
caagcuuucaguuccga

SEQ ID NO: 3907100 - RNA, 12 nt, Human adenovirus B [HAdV-B]
caaggaggugaa

SEQ ID NO: 3907101 - RNA, 14 nt, Human adenovirus B [HAdV-B]
caaggccccagcag

SEQ ID NO: 3907102 - RNA, 20 nt, Human adenovirus B [HAdV-B]
caaggccccagcagccaagg

SEQ ID NO: 3907103 - RNA, 22 nt, Human adenovirus B [HAdV-B]
caagguaauuaaauccacacug

SEQ ID NO: 3907104 - RNA, 19 nt, Human adenovirus B [HAdV-B]
caaggucgcagugcauggu

SEQ ID NO: 3907105 - RNA, 15 nt, Human adenovirus B [HAdV-B]
caaguugaucaugcc

SEQ ID NO: 3907106 - RNA, 21 nt, Human adenovirus B [HAdV-B]
caaucaugcccacauccagau

SEQ ID NO: 3907107 - RNA, 16 nt, Human adenovirus B [HAdV-B]
caauccacacauuaca

SEQ ID NO: 3907108 - RNA, 13 nt, Human adenovirus B [HAdV-B]
caauguggcucua

SEQ ID NO: 3907109 - RNA, 17 nt, Human adenovirus B [HAdV-B]
caauguugccgcugccu

SEQ ID NO: 3907110 - RNA, 18 nt, Human adenovirus B [HAdV-B]
caauuaggaccagugcuu

SEQ ID NO: 3907111 - RNA, 18 nt, Human adenovirus B [HAdV-B]
cacaacaagugcagcaac

SEQ ID NO: 3907112 - RNA, 14 nt, Human adenovirus B [HAdV-B]
cacaacgcacagcc

SEQ ID NO: 3907113 - RNA, 17 nt, Human adenovirus B [HAdV-B]
cacacugguggccaccu

SEQ ID NO: 3907114 - RNA, 12 nt, Human adenovirus B [HAdV-B]
cacagacaccua

SEQ ID NO: 3907115 - RNA, 21 nt, Human adenovirus B [HAdV-B]
cacagcagcgggcgucauugu

SEQ ID NO: 3907116 - RNA, 18 nt, Human adenovirus B [HAdV-B]
cacagccaaucaccacac

SEQ ID NO: 3907117 - RNA, 23 nt, Human adenovirus B [HAdV-B]
cacagccccuacuauagccagca

SEQ ID NO: 3907118 - RNA, 20 nt, Human adenovirus B [HAdV-B]
cacaggcucccuguucccag

SEQ ID NO: 3907119 - RNA, 13 nt, Human adenovirus B [HAdV-B]
cacauacaagugc

SEQ ID NO: 3907120 - RNA, 18 nt, Human adenovirus B [HAdV-B]
cacaucacuuccaugccu

SEQ ID NO: 3907121 - RNA, 12 nt, Human adenovirus B [HAdV-B]
caccaaugcaaa

SEQ ID NO: 3907122 - RNA, 19 nt, Human adenovirus B [HAdV-B]
caccagggaaaaguacagu

SEQ ID NO: 3907123 - RNA, 15 nt, Human adenovirus B [HAdV-B]
caccccgaaacugcg

SEQ ID NO: 3907124 - RNA, 12 nt, Human adenovirus B [HAdV-B]
caccgacagcgg

SEQ ID NO: 3907125 - RNA, 19 nt, Human adenovirus B [HAdV-B]
caccucgcuuacgcacguc

SEQ ID NO: 3907126 - RNA, 14 nt, Human adenovirus B [HAdV-B]
caccugcggagcag

SEQ ID NO: 3907127 - RNA, 20 nt, Human adenovirus B [HAdV-B]
caccuuagaaaaugcaaauu

SEQ ID NO: 3907128 - RNA, 14 nt, Human adenovirus B [HAdV-B]
cacgcgcacaucca

SEQ ID NO: 3907129 - RNA, 15 nt, Human adenovirus B [HAdV-B]
cacgguggugcaaaa

SEQ ID NO: 3907130 - RNA, 18 nt, Human adenovirus B [HAdV-B]
cacugguuaccgaggaag

SEQ ID NO: 3907131 - RNA, 20 nt, Human adenovirus B [HAdV-B]
cacuuacuugaaaucagcaa

SEQ ID NO: 3907132 - RNA, 15 nt, Human adenovirus B [HAdV-B]
cagaaugaccacagc

SEQ ID NO: 3907133 - RNA, 15 nt, Human adenovirus B [HAdV-B]
cagaaugacccgcag

SEQ ID NO: 3907134 - RNA, 20 nt, Human adenovirus B [HAdV-B]
cagaccgucagccaugggca

SEQ ID NO: 3907135 - RNA, 17 nt, Human adenovirus B [HAdV-B]
cagaccucaucuuccca

SEQ ID NO: 3907136 - RNA, 19 nt, Human adenovirus B [HAdV-B]
cagaccucaucuucccaga

SEQ ID NO: 3907137 - RNA, 16 nt, Human adenovirus B [HAdV-B]
cagacgccgcaccugu

SEQ ID NO: 3907138 - RNA, 15 nt, Human adenovirus B [HAdV-B]
cagacuagcagacag

SEQ ID NO: 3907139 - RNA, 16 nt, Human adenovirus B [HAdV-B]
cagaggaacacauucc

SEQ ID NO: 3907140 - RNA, 18 nt, Human adenovirus B [HAdV-B]
cagauaaagacagcggcg

SEQ ID NO: 3907141 - RNA, 19 nt, Human adenovirus B [HAdV-B]
cagauauggcccucacuug

SEQ ID NO: 3907142 - RNA, 21 nt, Human adenovirus B [HAdV-B]
cagaugucaccugcggagcag

SEQ ID NO: 3907143 - RNA, 20 nt, Human adenovirus B [HAdV-B]
cagcacggugggaucugcaa

SEQ ID NO: 3907144 - RNA, 21 nt, Human adenovirus B [HAdV-B]
cagcacggugggaucugcaau

SEQ ID NO: 3907145 - RNA, 16 nt, Human adenovirus B [HAdV-B]
cagcagcccuucucua

SEQ ID NO: 3907146 - RNA, 17 nt, Human adenovirus B [HAdV-B]
cagcagcuccgccaguc

SEQ ID NO: 3907147 - RNA, 22 nt, Human adenovirus B [HAdV-B]
cagcagugucgcuaacaauaca

SEQ ID NO: 3907148 - RNA, 16 nt, Human adenovirus B [HAdV-B]
cagccaaacggcaccu

SEQ ID NO: 3907149 - RNA, 23 nt, Human adenovirus B [HAdV-B]
cagccaaggcgaugggucuucuc

SEQ ID NO: 3907150 - RNA, 18 nt, Human adenovirus B [HAdV-B]
cagccccccucgcagcag

SEQ ID NO: 3907151 - RNA, 15 nt, Human adenovirus B [HAdV-B]
cagccuccaaaggcc

SEQ ID NO: 3907152 - RNA, 14 nt, Human adenovirus B [HAdV-B]
cagcgcugccaggg

SEQ ID NO: 3907153 - RNA, 15 nt, Human adenovirus B [HAdV-B]
cagcuccgccagucc

SEQ ID NO: 3907154 - RNA, 18 nt, Human adenovirus B [HAdV-B]
cagcuccuuuagccagag

SEQ ID NO: 3907155 - RNA, 17 nt, Human adenovirus B [HAdV-B]
cagcuuuugcugugcca

SEQ ID NO: 3907156 - RNA, 14 nt, Human adenovirus B [HAdV-B]
caggaucacagaga

SEQ ID NO: 3907157 - RNA, 18 nt, Human adenovirus B [HAdV-B]
caggaugugagcuuccuu

SEQ ID NO: 3907158 - RNA, 19 nt, Human adenovirus B [HAdV-B]
gaagcaacgaagcuuggaa

SEQ ID NO: 3907159 - RNA, 22 nt, Human adenovirus B [HAdV-B]
gaagcuucuugcuucuugcaaa

SEQ ID NO: 3907160 - RNA, 13 nt, Human adenovirus B [HAdV-B]
gaagggguucauu

SEQ ID NO: 3907161 - RNA, 23 nt, Human adenovirus B [HAdV-B]
gaaguaggcugauugccacagau

SEQ ID NO: 3907162 - RNA, 17 nt, Human adenovirus B [HAdV-B]
gaaugaugaccaaagau

SEQ ID NO: 3907163 - RNA, 16 nt, Human adenovirus B [HAdV-B]
gaauguuuaugccuua

SEQ ID NO: 3907164 - RNA, 17 nt, Human adenovirus B [HAdV-B]
gacaaugaggcuuucag

SEQ ID NO: 3907165 - RNA, 14 nt, Human adenovirus B [HAdV-B]
gacagaaccagaua

SEQ ID NO: 3907166 - RNA, 15 nt, Human adenovirus B [HAdV-B]
gacagaauggagugc

SEQ ID NO: 3907167 - RNA, 15 nt, Human adenovirus B [HAdV-B]
gacagggaacugaug

SEQ ID NO: 3907168 - RNA, 13 nt, Human adenovirus B [HAdV-B]
gacagucaggcag

SEQ ID NO: 3907169 - RNA, 15 nt, Human adenovirus B [HAdV-B]
gacaguuuggaggag

SEQ ID NO: 3907170 - RNA, 18 nt, Human adenovirus B [HAdV-B]
gacauacucgcgugccag

SEQ ID NO: 3907171 - RNA, 19 nt, Human adenovirus B [HAdV-B]
gacaucuagaccacugccg

SEQ ID NO: 3907172 - RNA, 17 nt, Human adenovirus B [HAdV-B]
gacauuggaaaaaaacg

SEQ ID NO: 3907173 - RNA, 24 nt, Human adenovirus B [HAdV-B]
gaccccacacggcgacagguguuu

SEQ ID NO: 3907174 - RNA, 16 nt, Human adenovirus B [HAdV-B]
gacccgccgccagcaa

SEQ ID NO: 3907175 - RNA, 16 nt, Human adenovirus B [HAdV-B]
gacgauuggacccagg

SEQ ID NO: 3907176 - RNA, 15 nt, Human adenovirus B [HAdV-B]
gacggcggugaugca

SEQ ID NO: 3907177 - RNA, 12 nt, Human adenovirus B [HAdV-B]
gacggcuugcug

SEQ ID NO: 3907178 - RNA, 16 nt, Human adenovirus B [HAdV-B]
gacguaagagccggcg

SEQ ID NO: 3907179 - RNA, 22 nt, Human adenovirus B [HAdV-B]
gacuauaaacaagaauuugaaa

SEQ ID NO: 3907180 - RNA, 14 nt, Human adenovirus B [HAdV-B]
gacucuuaaagagu

SEQ ID NO: 3907181 - RNA, 14 nt, Human adenovirus B [HAdV-B]
gacugaaaaccaaa

SEQ ID NO: 3907182 - RNA, 16 nt, Human adenovirus B [HAdV-B]
gacuugcaggacagaa

SEQ ID NO: 3907183 - RNA, 23 nt, Human adenovirus B [HAdV-B]
gacuuuaccccuacggaagccag

SEQ ID NO: 3907184 - RNA, 14 nt, Human adenovirus B [HAdV-B]
gagaaaaugaaagc

SEQ ID NO: 3907185 - RNA, 15 nt, Human adenovirus B [HAdV-B]
gagaauggcaacauc

SEQ ID NO: 3907186 - RNA, 14 nt, Human adenovirus B [HAdV-B]
gagacgagccuggg

SEQ ID NO: 3907187 - RNA, 13 nt, Human adenovirus B [HAdV-B]
gagaggaugaaaa

SEQ ID NO: 3907188 - RNA, 21 nt, Human adenovirus B [HAdV-B]
gagcccagcauguaugccagu

SEQ ID NO: 3907189 - RNA, 18 nt, Human adenovirus B [HAdV-B]
gagcccgagucugcaagu

SEQ ID NO: 3907190 - RNA, 11 nt, Human adenovirus B [HAdV-B]
gagcgaagugu

SEQ ID NO: 3907191 - RNA, 17 nt, Human adenovirus B [HAdV-B]
gagcgccgcgacggcag

SEQ ID NO: 3907192 - RNA, 17 nt, Human adenovirus B [HAdV-B]
gagcgugaugcagcagc

SEQ ID NO: 3907193 - RNA, 21 nt, Human adenovirus B [HAdV-B]
gagcuuaagcauuccaccgcc

SEQ ID NO: 3907194 - RNA, 16 nt, Human adenovirus B [HAdV-B]
gaggcgcugcugaaca

SEQ ID NO: 3907195 - RNA, 17 nt, Human adenovirus B [HAdV-B]
gaggcuuucagagaggc

SEQ ID NO: 3907196 - RNA, 19 nt, Human adenovirus B [HAdV-B]
gagggcgaaggacuggcac

SEQ ID NO: 3907197 - RNA, 15 nt, Human adenovirus B [HAdV-B]
gaguacuuggaagac

SEQ ID NO: 3907198 - RNA, 14 nt, Human adenovirus B [HAdV-B]
gaguagauggaaga

SEQ ID NO: 3907199 - RNA, 15 nt, Human adenovirus B [HAdV-B]
gagucugagacagac

SEQ ID NO: 3907200 - RNA, 12 nt, Human adenovirus B [HAdV-B]
gaguuaaaucau

SEQ ID NO: 3907201 - RNA, 17 nt, Human adenovirus B [HAdV-B]
gaguuaagcgacaggga

SEQ ID NO: 3907202 - RNA, 11 nt, Human adenovirus B [HAdV-B]
gaguuggaagu

SEQ ID NO: 3907203 - RNA, 21 nt, Human adenovirus B [HAdV-B]
gauacuuaugaucacaagcag

SEQ ID NO: 3907204 - RNA, 18 nt, Human adenovirus B [HAdV-B]
gauaugugcagcagagcg

SEQ ID NO: 3907205 - RNA, 22 nt, Human adenovirus B [HAdV-B]
gauauucuugagcaggcggcug

SEQ ID NO: 3907206 - RNA, 21 nt, Human adenovirus B [HAdV-B]
gaucaguaucaucuuggccug

SEQ ID NO: 3907207 - RNA, 15 nt, Human adenovirus B [HAdV-B]
gaucccauggaugag

SEQ ID NO: 3907208 - RNA, 17 nt, Human adenovirus B [HAdV-B]
gaucuaccgccagugcu

SEQ ID NO: 3907209 - RNA, 14 nt, Human adenovirus B [HAdV-B]
gaucuccuacuaag

SEQ ID NO: 3907210 - RNA, 19 nt, Human adenovirus B [HAdV-B]
gaugcagcagcagcaggcg

SEQ ID NO: 3907211 - RNA, 23 nt, Human adenovirus B [HAdV-B]
gaugcuggaaauagggaucagaa

SEQ ID NO: 3907212 - RNA, 18 nt, Human adenovirus B [HAdV-B]
gaugguuauaauggaaua

SEQ ID NO: 3907213 - RNA, 15 nt, Human adenovirus B [HAdV-B]
gauuaugcaagguaa

SEQ ID NO: 3907214 - RNA, 16 nt, Human adenovirus B [HAdV-B]
gauucucacuugccac

SEQ ID NO: 3907215 - RNA, 13 nt, Human adenovirus B [HAdV-B]
gauugcagcacug

SEQ ID NO: 3907216 - RNA, 20 nt, Human adenovirus B [HAdV-B]
gauugggacagucaggcaga

SEQ ID NO: 3907217 - RNA, 22 nt, Human adenovirus B [HAdV-B]
gauuuccuucgcggcuggccau

SEQ ID NO: 3907218 - RNA, 13 nt, Human adenovirus B [HAdV-B]
gcaaaaacaagau

SEQ ID NO: 3907219 - RNA, 16 nt, Human adenovirus B [HAdV-B]
gcaaacucgaagagaa

SEQ ID NO: 3907220 - RNA, 22 nt, Human adenovirus B [HAdV-B]
gcaaagauucgauccgaugaca

SEQ ID NO: 3907221 - RNA, 22 nt, Human adenovirus B [HAdV-B]
gcaacucugacuucugcucgcu

SEQ ID NO: 3907222 - RNA, 14 nt, Human adenovirus B [HAdV-B]
gcaagaugaggaca

SEQ ID NO: 3907223 - RNA, 16 nt, Human adenovirus B [HAdV-B]
gcaaggccccagcagc

SEQ ID NO: 3907224 - RNA, 22 nt, Human adenovirus B [HAdV-B]
gcaagguaauuaaauccacacu

SEQ ID NO: 3907225 - RNA, 15 nt, Human adenovirus B [HAdV-B]
gcaagucuguugaug

SEQ ID NO: 3907226 - RNA, 16 nt, Human adenovirus B [HAdV-B]
gcaauccccacuggag

SEQ ID NO: 3907227 - RNA, 21 nt, Human adenovirus B [HAdV-B]
gcaaugcgggcggcgcugcag

SEQ ID NO: 3907228 - RNA, 18 nt, Human adenovirus B [HAdV-B]
gcacaagcucuaaaguga

SEQ ID NO: 3907229 - RNA, 18 nt, Human adenovirus B [HAdV-B]
gcaccacacuucugcccc

SEQ ID NO: 3907230 - RNA, 16 nt, Human adenovirus B [HAdV-B]
gcaccgacucucccag

SEQ ID NO: 3907231 - RNA, 19 nt, Human adenovirus B [HAdV-B]
gcaccuuugaauugcaagg

SEQ ID NO: 3907232 - RNA, 22 nt, Human adenovirus B [HAdV-B]
gcacugggcauagucgcaccgc

SEQ ID NO: 3907233 - RNA, 13 nt, Human adenovirus B [HAdV-B]
gcacuuuuugcuu

SEQ ID NO: 3907234 - RNA, 16 nt, Human adenovirus B [HAdV-B]
gcagaaaucuucccau

SEQ ID NO: 3907235 - RNA, 16 nt, Human adenovirus B [HAdV-B]
gcagaagcuaaggcaa

SEQ ID NO: 3907236 - RNA, 14 nt, Human adenovirus B [HAdV-B]
gcagacacaucacu

SEQ ID NO: 3907237 - RNA, 20 nt, Human adenovirus B [HAdV-B]
gcagcacuggacaugacagc

SEQ ID NO: 3907238 - RNA, 21 nt, Human adenovirus B [HAdV-B]
gcagcagcaaucacaaaaggc

SEQ ID NO: 3907239 - RNA, 14 nt, Human adenovirus B [HAdV-B]
gcagggcucugagc

SEQ ID NO: 3907240 - RNA, 14 nt, Human adenovirus B [HAdV-B]
gcaguacaggacag

SEQ ID NO: 3907241 - RNA, 19 nt, Human adenovirus B [HAdV-B]
gcauccgccagcagcagga

SEQ ID NO: 3907242 - RNA, 20 nt, Human adenovirus B [HAdV-B]
gcaugaauuggcucagcgcc

SEQ ID NO: 3907243 - RNA, 19 nt, Human adenovirus B [HAdV-B]
gcaugauggauauguggcc

SEQ ID NO: 3907244 - RNA, 16 nt, Human adenovirus B [HAdV-B]
gcauuaguaacaacac

SEQ ID NO: 3907245 - RNA, 16 nt, Human adenovirus B [HAdV-B]
gccaaggcgauggguc

SEQ ID NO: 3907246 - RNA, 22 nt, Human adenovirus B [HAdV-B]
gccagcgccaugacagacagag

SEQ ID NO: 3907247 - RNA, 15 nt, Human adenovirus B [HAdV-B]
gccagcgguucugga

SEQ ID NO: 3907248 - RNA, 20 nt, Human adenovirus B [HAdV-B]
gccauacccuaccaacacaa

SEQ ID NO: 3907249 - RNA, 18 nt, Human adenovirus B [HAdV-B]
gccaugcuuagggcggcc

SEQ ID NO: 3907250 - RNA, 13 nt, Human adenovirus B [HAdV-B]
gccauugcuguca

SEQ ID NO: 3907251 - RNA, 18 nt, Human adenovirus B [HAdV-B]
gccauugcugucaacauc

SEQ ID NO: 3907252 - RNA, 20 nt, Human adenovirus B [HAdV-B]
gcccaaucgcgaagaggcaa

SEQ ID NO: 3907253 - RNA, 23 nt, Human adenovirus B [HAdV-B]
gcccaaugcaacaugaccaaaga

SEQ ID NO: 3907254 - RNA, 16 nt, Human adenovirus B [HAdV-B]
gcccaguccugccacc

SEQ ID NO: 3907255 - RNA, 21 nt, Human adenovirus B [HAdV-B]
gcccgucuucucaaagagcuu

SEQ ID NO: 3907256 - RNA, 18 nt, Human adenovirus B [HAdV-B]
gccgcuaugaacucugau

SEQ ID NO: 3907257 - RNA, 11 nt, Human adenovirus B [HAdV-B]
gccggaggaga

SEQ ID NO: 3907258 - RNA, 18 nt, Human adenovirus B [HAdV-B]
gccuacaucuacugugga

SEQ ID NO: 3907259 - RNA, 19 nt, Human adenovirus B [HAdV-B]
gccuggacccuccagugga

SEQ ID NO: 3907260 - RNA, 14 nt, Human adenovirus B [HAdV-B]
gccuggcugcggag

SEQ ID NO: 3907261 - RNA, 17 nt, Human adenovirus B [HAdV-B]
gugaacgcguuggugga

SEQ ID NO: 3907262 - RNA, 17 nt, Human adenovirus B [HAdV-B]
gugagcuggccuggaaa

SEQ ID NO: 3907263 - RNA, 20 nt, Human adenovirus B [HAdV-B]
gugaugcagcagcagcaggc

SEQ ID NO: 3907264 - RNA, 18 nt, Human adenovirus B [HAdV-B]
gugcgccugcuugggcgc

SEQ ID NO: 3907265 - RNA, 13 nt, Human adenovirus B [HAdV-B]
gugcggcaggcau

SEQ ID NO: 3907266 - RNA, 18 nt, Human adenovirus B [HAdV-B]
gugcugcacagcacccug

SEQ ID NO: 3907267 - RNA, 15 nt, Human adenovirus B [HAdV-B]
guggugggugcagag

SEQ ID NO: 3907268 - RNA, 21 nt, Human adenovirus B [HAdV-B]
gugucuaucuguaccugugcc

SEQ ID NO: 3907269 - RNA, 22 nt, Human adenovirus B [HAdV-B]
gugucuaucuguaccugugcca

SEQ ID NO: 3907270 - RNA, 18 nt, Human adenovirus B [HAdV-B]
guguggaagagcucagcc

SEQ ID NO: 3907271 - RNA, 13 nt, Human adenovirus B [HAdV-B]
guuaaaucaucau

SEQ ID NO: 3907272 - RNA, 14 nt, Human adenovirus B [HAdV-B]
guuaacuguucacu

SEQ ID NO: 3907273 - RNA, 21 nt, Human adenovirus B [HAdV-B]
guuaaguucgacaccaggaac

SEQ ID NO: 3907274 - RNA, 14 nt, Human adenovirus B [HAdV-B]
guuccgucuggcca

SEQ ID NO: 3907275 - RNA, 18 nt, Human adenovirus B [HAdV-B]
guugaucaccugggcagc

SEQ ID NO: 3907276 - RNA, 19 nt, Human adenovirus B [HAdV-B]
guuuaugccuuaccagugu

SEQ ID NO: 3907277 - RNA, 21 nt, Human adenovirus B [HAdV-B]
guuucacuuccgcaaucccaa

SEQ ID NO: 3907278 - RNA, 18 nt, Human adenovirus B [HAdV-B]
guuucuguauugcaggag

SEQ ID NO: 3907279 - RNA, 13 nt, Human adenovirus B [HAdV-B]
guuuggaggagga

SEQ ID NO: 3907280 - RNA, 18 nt, Human adenovirus B [HAdV-B]
guuugggccauuuuggaa

SEQ ID NO: 3907281 - RNA, 20 nt, Human adenovirus B [HAdV-B]
guuugggccauuuuggaaga

SEQ ID NO: 3907282 - RNA, 22 nt, Human adenovirus B [HAdV-B]
guuugugcgcgaguuugcccca

SEQ ID NO: 3907283 - RNA, 13 nt, Human adenovirus B [HAdV-B]
uaaacaacagcac

SEQ ID NO: 3907284 - RNA, 13 nt, Human adenovirus B [HAdV-B]
uaaacaagaauuu

SEQ ID NO: 3907285 - RNA, 16 nt, Human adenovirus B [HAdV-B]
uaaaccauaauuaaaa

SEQ ID NO: 3907286 - RNA, 15 nt, Human adenovirus B [HAdV-B]
uaaacgcgaagguga

SEQ ID NO: 3907287 - RNA, 13 nt, Human adenovirus B [HAdV-B]
uaaagcuggcaga

SEQ ID NO: 3907288 - RNA, 17 nt, Human adenovirus B [HAdV-B]
uaacgcuggagagguca

SEQ ID NO: 3907289 - RNA, 23 nt, Human adenovirus B [HAdV-B]
uaaguuuaggggagaugguuaua

SEQ ID NO: 3907290 - RNA, 19 nt, Human adenovirus B [HAdV-B]
uaauggaauaguguuuaug

SEQ ID NO: 3907291 - RNA, 18 nt, Human adenovirus B [HAdV-B]
uacacaacaagugcagca

SEQ ID NO: 3907292 - RNA, 18 nt, Human adenovirus B [HAdV-B]
uaccagacaaaguacagc

SEQ ID NO: 3907293 - RNA, 18 nt, Human adenovirus B [HAdV-B]
uacccaguugaaaaccac

SEQ ID NO: 3907294 - RNA, 23 nt, Human adenovirus B [HAdV-B]
uacccuguggugggugcagagcu

SEQ ID NO: 3907295 - RNA, 19 nt, Human adenovirus B [HAdV-B]
uacccuugguuugaugcau

SEQ ID NO: 3907296 - RNA, 20 nt, Human adenovirus B [HAdV-B]
uacuaaggguugcauucacu

SEQ ID NO: 3907297 - RNA, 22 nt, Human adenovirus B [HAdV-B]
uacuggaucuacguccacugga

SEQ ID NO: 3907298 - RNA, 15 nt, Human adenovirus B [HAdV-B]
uacuggauguuuuau

SEQ ID NO: 3907299 - RNA, 20 nt, Human adenovirus B [HAdV-B]
uacuucuccaucagcagaca

SEQ ID NO: 3907300 - RNA, 19 nt, Human adenovirus B [HAdV-B]
uacuugcuauuccaccaug

SEQ ID NO: 3907301 - RNA, 16 nt, Human adenovirus B [HAdV-B]
uacuuggaagacugau

SEQ ID NO: 3907302 - RNA, 17 nt, Human adenovirus B [HAdV-B]
uacuuucucuagcagca

SEQ ID NO: 3907303 - RNA, 18 nt, Human adenovirus B [HAdV-B]
uagauugcccaggacuuu

SEQ ID NO: 3907304 - RNA, 19 nt, Human adenovirus B [HAdV-B]
uagcugaaacccacugcua

SEQ ID NO: 3907305 - RNA, 15 nt, Human adenovirus B [HAdV-B]
uauaauucuaugaaa

SEQ ID NO: 3907306 - RNA, 16 nt, Human adenovirus B [HAdV-B]
uauggagucacugcua

SEQ ID NO: 3907307 - RNA, 21 nt, Human adenovirus B [HAdV-B]
uauucuucgcgauccuuccag

SEQ ID NO: 3907308 - RNA, 13 nt, Human adenovirus B [HAdV-B]
uauugcuuuuugg

SEQ ID NO: 3907309 - RNA, 21 nt, Human adenovirus B [HAdV-B]
ucaaaacuccacuuaaucaua

SEQ ID NO: 3907310 - RNA, 13 nt, Human adenovirus B [HAdV-B]
ucaauaaacauca

SEQ ID NO: 3907311 - RNA, 20 nt, Human adenovirus B [HAdV-B]
ucaccagggaaaaguacagu

SEQ ID NO: 3907312 - RNA, 19 nt, Human adenovirus B [HAdV-B]
ucaccugcggagcagagca

SEQ ID NO: 3907313 - RNA, 14 nt, Human adenovirus B [HAdV-B]
ucacugguuuuuau

SEQ ID NO: 3907314 - RNA, 12 nt, Human adenovirus B [HAdV-B]
ucagaacaccga

SEQ ID NO: 3907315 - RNA, 17 nt, Human adenovirus B [HAdV-B]
ucagaccggcaagagaa

SEQ ID NO: 3907316 - RNA, 17 nt, Human adenovirus B [HAdV-B]
ucaggagccgaaaucuu

SEQ ID NO: 3907317 - RNA, 14 nt, Human adenovirus B [HAdV-B]
ucaggaugucccaa

SEQ ID NO: 3907318 - RNA, 17 nt, Human adenovirus B [HAdV-B]
ucaucgggagggucugc

SEQ ID NO: 3907319 - RNA, 17 nt, Human adenovirus B [HAdV-B]
ucaugauuaaacaacag

SEQ ID NO: 3907320 - RNA, 15 nt, Human adenovirus B [HAdV-B]
ucaugcauacuaaca

SEQ ID NO: 3907321 - RNA, 20 nt, Human adenovirus B [HAdV-B]
uccaaugucacucuuccaga

SEQ ID NO: 3907322 - RNA, 20 nt, Human adenovirus B [HAdV-B]
uccacacugguggccaccuc

SEQ ID NO: 3907323 - RNA, 21 nt, Human adenovirus B [HAdV-B]
uccaccgcccaguccugccac

SEQ ID NO: 3907324 - RNA, 19 nt, Human adenovirus B [HAdV-B]
uccagacaugaugaaggau

SEQ ID NO: 3907325 - RNA, 15 nt, Human adenovirus B [HAdV-B]
uccagaugaggccgg

SEQ ID NO: 3907326 - RNA, 15 nt, Human adenovirus B [HAdV-B]
uccagguguaaguuu

SEQ ID NO: 3907327 - RNA, 15 nt, Human adenovirus B [HAdV-B]
uccaguacucuucua

SEQ ID NO: 3907328 - RNA, 21 nt, Human adenovirus B [HAdV-B]
uccaucagcagacacaucacu

SEQ ID NO: 3907329 - RNA, 18 nt, Human adenovirus B [HAdV-B]
ucccaguagguuuggaag

SEQ ID NO: 3907330 - RNA, 12 nt, Human adenovirus B [HAdV-B]
ucccaguuucaa

SEQ ID NO: 3907331 - RNA, 13 nt, Human adenovirus B [HAdV-B]
uccccuacaaaac

SEQ ID NO: 3907332 - RNA, 17 nt, Human adenovirus B [HAdV-B]
ucccgcaggaccugcuc

SEQ ID NO: 3907333 - RNA, 18 nt, Human adenovirus B [HAdV-B]
uccggaucuccugggcau

SEQ ID NO: 3907334 - RNA, 14 nt, Human adenovirus B [HAdV-B]
uccuaaaaaacaag

SEQ ID NO: 3907335 - RNA, 23 nt, Human adenovirus B [HAdV-B]
uccuacauggguauucugcauga

SEQ ID NO: 3907336 - RNA, 21 nt, Human adenovirus B [HAdV-B]
uccuaccacucggaugugauc

SEQ ID NO: 3907337 - RNA, 14 nt, Human adenovirus B [HAdV-B]
uccuaugcacuuuu

SEQ ID NO: 3907338 - RNA, 21 nt, Human adenovirus B [HAdV-B]
uccuuaaacaucuagcaagac

SEQ ID NO: 3907339 - RNA, 21 nt, Human adenovirus B [HAdV-B]
ucgaagcaagggggccaccuc

SEQ ID NO: 3907340 - RNA, 19 nt, Human adenovirus B [HAdV-B]
ucgaguuuacuuugccaga

SEQ ID NO: 3907341 - RNA, 19 nt, Human adenovirus B [HAdV-B]
ucgaugcugccccaauggg

SEQ ID NO: 3907342 - RNA, 13 nt, Human adenovirus B [HAdV-B]
ucgcaaccccgcu

SEQ ID NO: 3907343 - RNA, 17 nt, Human adenovirus B [HAdV-B]
ucgcuacaaaaaguuuc

SEQ ID NO: 3907344 - RNA, 19 nt, Human adenovirus B [HAdV-B]
ucggcuuacgagcagacag

SEQ ID NO: 3907345 - RNA, 23 nt, Human adenovirus B [HAdV-B]
ucuacggccaaccguugaaggau

SEQ ID NO: 3907346 - RNA, 22 nt, Human adenovirus B [HAdV-B]
ucuacuggucgcuuccagacau

SEQ ID NO: 3907347 - RNA, 16 nt, Human adenovirus B [HAdV-B]
ucucaacgaugcgcac

SEQ ID NO: 3907348 - RNA, 15 nt, Human adenovirus B [HAdV-B]
ucucacuugccaccc

SEQ ID NO: 3907349 - RNA, 18 nt, Human adenovirus B [HAdV-B]
ucuccaaccucuccacaa

SEQ ID NO: 3907350 - RNA, 14 nt, Human adenovirus B [HAdV-B]
ucuccuaggcagag

SEQ ID NO: 3907351 - RNA, 23 nt, Human adenovirus B [HAdV-B]
ucuuaacagugcaggcagcagcu

SEQ ID NO: 3907352 - RNA, 21 nt, Human adenovirus B [HAdV-B]
ucuuaccuuuggucuccauga

SEQ ID NO: 3907353 - RNA, 22 nt, Human adenovirus B [HAdV-B]
ucuuagacucaucuaaaaccau

SEQ ID NO: 3907354 - RNA, 18 nt, Human adenovirus B [HAdV-B]
ucuucccagagcgucuca

SEQ ID NO: 3907355 - RNA, 11 nt, Human adenovirus B [HAdV-B]
ucuuccuucac

SEQ ID NO: 3907356 - RNA, 22 nt, Human adenovirus B [HAdV-B]
ucuugaccacgguggugcaaaa

SEQ ID NO: 3907357 - RNA, 15 nt, Human adenovirus B [HAdV-B]
ugaaaccuucucagu

SEQ ID NO: 3907358 - RNA, 13 nt, Human adenovirus B [HAdV-B]
ugaaagaaaacau

SEQ ID NO: 3907359 - RNA, 21 nt, Human adenovirus B [HAdV-B]
ugaacggggucaucuugcagg

SEQ ID NO: 3907360 - RNA, 13 nt, Human adenovirus B [HAdV-B]
ugaaggugcagcc

SEQ ID NO: 3907361 - RNA, 12 nt, Human adenovirus B [HAdV-B]
ugaauguuccuu

SEQ ID NO: 3907362 - RNA, 16 nt, Human adenovirus B [HAdV-B]
ugaauuaagacucucc

SEQ ID NO: 3907363 - RNA, 19 nt, Human adenovirus C
ccuccaccggccguggaga

SEQ ID NO: 3907364 - RNA, 13 nt, Human adenovirus C
ccucccggccacu

SEQ ID NO: 3907365 - RNA, 13 nt, Human adenovirus C
ccuccgcaccacu

SEQ ID NO: 3907366 - RNA, 12 nt, Human adenovirus C
ccuccgcccugc

SEQ ID NO: 3907367 - RNA, 15 nt, Human adenovirus C
ccuccgggcacagca

SEQ ID NO: 3907368 - RNA, 19 nt, Human adenovirus C
ccuccucagcagcggcaag

SEQ ID NO: 3907369 - RNA, 13 nt, Human adenovirus C
ccuccuccagaag

SEQ ID NO: 3907370 - RNA, 16 nt, Human adenovirus C
ccuccugccaggcuca

SEQ ID NO: 3907371 - RNA, 17 nt, Human adenovirus C
ccuccuuauuccacuga

SEQ ID NO: 3907372 - RNA, 15 nt, Human adenovirus C
ccucgaacaggcggc

SEQ ID NO: 3907373 - RNA, 16 nt, Human adenovirus C
ccucgccggcgcccca

SEQ ID NO: 3907374 - RNA, 22 nt, Human adenovirus C
ccucgcucgacgaagugccaaa

SEQ ID NO: 3907375 - RNA, 21 nt, Human adenovirus C
ccucguaggugagcuccucag

SEQ ID NO: 3907376 - RNA, 15 nt, Human adenovirus C
ccucuuguccugcau

SEQ ID NO: 3907377 - RNA, 17 nt, Human adenovirus C
ccucuuguccugcaucu

SEQ ID NO: 3907378 - RNA, 19 nt, Human adenovirus C
ccugagcaggggggccacu

SEQ ID NO: 3907379 - RNA, 15 nt, Human adenovirus C
ccugauuuccagggg

SEQ ID NO: 3907380 - RNA, 19 nt, Human adenovirus C
ccugcaaagggcccuggcu

SEQ ID NO: 3907381 - RNA, 23 nt, Human adenovirus C
ccugcgcgagauugagcuccacg

SEQ ID NO: 3907382 - RNA, 19 nt, Human adenovirus C
ccugcgcggccuuccggag

SEQ ID NO: 3907383 - RNA, 14 nt, Human adenovirus C
ccugcgcugggccc

SEQ ID NO: 3907384 - RNA, 20 nt, Human adenovirus C
ccugcugaaugcgcaggcgg

SEQ ID NO: 3907385 - RNA, 13 nt, Human adenovirus C
ccugcugcacgca

SEQ ID NO: 3907386 - RNA, 16 nt, Human adenovirus C
ccuggacccucgggaa

SEQ ID NO: 3907387 - RNA, 13 nt, Human adenovirus C
ccuggaggagcgc

SEQ ID NO: 3907388 - RNA, 13 nt, Human adenovirus C
ccuggccucuggc

SEQ ID NO: 3907389 - RNA, 20 nt, Human adenovirus C
ccuggcgcggcuaggagcgc

SEQ ID NO: 3907390 - RNA, 23 nt, Human adenovirus C
ccuggcggacauuaucuuccccg

SEQ ID NO: 3907391 - RNA, 16 nt, Human adenovirus C
ccugggcggcgagcac

SEQ ID NO: 3907392 - RNA, 23 nt, Human adenovirus C
ccugguaaccgcguacgagcaga

SEQ ID NO: 3907393 - RNA, 12 nt, Human adenovirus C
ccuggugcugcc

SEQ ID NO: 3907394 - RNA, 16 nt, Human adenovirus C
ccuguaacgcuggacc

SEQ ID NO: 3907395 - RNA, 14 nt, Human adenovirus C
ccugugcugccagg

SEQ ID NO: 3907396 - RNA, 17 nt, Human adenovirus C
ccuuaguaugcagcgcg

SEQ ID NO: 3907397 - RNA, 12 nt, Human adenovirus C
ccuuccaggcgc

SEQ ID NO: 3907398 - RNA, 16 nt, Human adenovirus C
ccuuccaggcgcggcg

SEQ ID NO: 3907399 - RNA, 14 nt, Human adenovirus C
ccuucccaaaaagg

SEQ ID NO: 3907400 - RNA, 23 nt, Human adenovirus C
ccuuccgcuccacgagccagauc

SEQ ID NO: 3907401 - RNA, 14 nt, Human adenovirus C
ccuucggcaucgcg

SEQ ID NO: 3907402 - RNA, 19 nt, Human adenovirus C
ccuugagcgacgaccuggg

SEQ ID NO: 3907403 - RNA, 13 nt, Human adenovirus C
ccuugauuuuccg

SEQ ID NO: 3907404 - RNA, 15 nt, Human adenovirus C
ccuugcggcagggcg

SEQ ID NO: 3907405 - RNA, 16 nt, Human adenovirus C
ccuugcuucccaggau

SEQ ID NO: 3907406 - RNA, 14 nt, Human adenovirus C
ccuuuccgccgcca

SEQ ID NO: 3907407 - RNA, 14 nt, Human adenovirus C
ccuuugccuggaac

SEQ ID NO: 3907408 - RNA, 12 nt, Human adenovirus C
ccuuuugguggu

SEQ ID NO: 3907409 - RNA, 22 nt, Human adenovirus C
cgaaccuuuggacaccucccac

SEQ ID NO: 3907410 - RNA, 12 nt, Human adenovirus C
cgaagaaaagcg

SEQ ID NO: 3907411 - RNA, 22 nt, Human adenovirus C
cgaagccuuccauccagacauc

SEQ ID NO: 3907412 - RNA, 14 nt, Human adenovirus C
cgaaugagcuccac

SEQ ID NO: 3907413 - RNA, 17 nt, Human adenovirus C
cgacagggaagaaacuc

SEQ ID NO: 3907414 - RNA, 13 nt, Human adenovirus C
cgaccacagcaac

SEQ ID NO: 3907415 - RNA, 15 nt, Human adenovirus C
cgacccggcacugcc

SEQ ID NO: 3907416 - RNA, 19 nt, Human adenovirus C
cgacccggcacugccgccc

SEQ ID NO: 3907417 - RNA, 19 nt, Human adenovirus C
cgaccgggguucgaacccc

SEQ ID NO: 3907418 - RNA, 21 nt, Human adenovirus C
cgacgagcggccgccgcagca

SEQ ID NO: 3907419 - RNA, 19 nt, Human adenovirus C
cgacgccgaaccaccacug

SEQ ID NO: 3907420 - RNA, 20 nt, Human adenovirus C
cgacugaaugaccaguggag

SEQ ID NO: 3907421 - RNA, 14 nt, Human adenovirus C
cgacuuaccgcagc

SEQ ID NO: 3907422 - RNA, 19 nt, Human adenovirus C
cgagaaggaggacagccua

SEQ ID NO: 3907423 - RNA, 20 nt, Human adenovirus C
cgagaccguguaccugcgca

SEQ ID NO: 3907424 - RNA, 21 nt, Human adenovirus C
cgagaccgugucuggaacgcc

SEQ ID NO: 3907425 - RNA, 22 nt, Human adenovirus C
cgagagcguggugagcgcggcg

SEQ ID NO: 3907426 - RNA, 19 nt, Human adenovirus C
cgagauuagguucuacgaa

SEQ ID NO: 3907427 - RNA, 13 nt, Human adenovirus C
cgagcaggcagag

SEQ ID NO: 3907428 - RNA, 20 nt, Human adenovirus C
cgagcgcauccacaaggccg

SEQ ID NO: 3907429 - RNA, 17 nt, Human adenovirus C
cgagcugcuucccaaag

SEQ ID NO: 3907430 - RNA, 17 nt, Human adenovirus C
cgagggccgcuggcugc

SEQ ID NO: 3907431 - RNA, 23 nt, Human adenovirus C
cgaggucguuggagaugcgggcc

SEQ ID NO: 3907432 - RNA, 17 nt, Human adenovirus C
cgagucucgggccggcc

SEQ ID NO: 3907433 - RNA, 21 nt, Human adenovirus C
cgagugguggcucccgggcuu

SEQ ID NO: 3907434 - RNA, 12 nt, Human adenovirus C
cgaucgcacccu

SEQ ID NO: 3907435 - RNA, 15 nt, Human adenovirus C
cgaucucuuccuccu

SEQ ID NO: 3907436 - RNA, 16 nt, Human adenovirus C
cgaucuuggccuugcu

SEQ ID NO: 3907437 - RNA, 14 nt, Human adenovirus C
cgaugagcagcugg

SEQ ID NO: 3907438 - RNA, 18 nt, Human adenovirus C
cgaugccgccaacgcgcc

SEQ ID NO: 3907439 - RNA, 19 nt, Human adenovirus C
cgauggauuccucugggac

SEQ ID NO: 3907440 - RNA, 16 nt, Human adenovirus C
cgauguuuagcugcac

SEQ ID NO: 3907441 - RNA, 14 nt, Human adenovirus C
cgcaacaccacugc

SEQ ID NO: 3907442 - RNA, 15 nt, Human adenovirus C
cgcaaccgcagaccc

SEQ ID NO: 3907443 - RNA, 13 nt, Human adenovirus C
cgcaacugggcag

SEQ ID NO: 3907444 - RNA, 22 nt, Human adenovirus C
cgcaauggccaaauccgccguc

SEQ ID NO: 3907445 - RNA, 15 nt, Human adenovirus C
cgcacccgccccccg

SEQ ID NO: 3907446 - RNA, 23 nt, Human adenovirus C
cgcaccuucgccccaggcugggg

SEQ ID NO: 3907447 - RNA, 16 nt, Human adenovirus C
cgcacgaaggaggcgu

SEQ ID NO: 3907448 - RNA, 19 nt, Human adenovirus C
cgcacggcguccggcucac

SEQ ID NO: 3907449 - RNA, 14 nt, Human adenovirus C
cgcagcagcagggc

SEQ ID NO: 3907450 - RNA, 22 nt, Human adenovirus C
cgcagcgaugugccccucgcca

SEQ ID NO: 3907451 - RNA, 16 nt, Human adenovirus C
cgcagcggugcagcca

SEQ ID NO: 3907452 - RNA, 15 nt, Human adenovirus C
cgcaguacuggcagc

SEQ ID NO: 3907453 - RNA, 21 nt, Human adenovirus C
cgcaguggucuuacaugcaca

SEQ ID NO: 3907454 - RNA, 16 nt, Human adenovirus C
cgcauccacaaggccg

SEQ ID NO: 3907455 - RNA, 21 nt, Human adenovirus C
cgcauuccacgagccagguga

SEQ ID NO: 3907456 - RNA, 20 nt, Human adenovirus C
cgccaccuguucucaccgcg

SEQ ID NO: 3907457 - RNA, 15 nt, Human adenovirus C
cgccagaccccccau

SEQ ID NO: 3907458 - RNA, 13 nt, Human adenovirus C
cgccagcccccac

SEQ ID NO: 3907459 - RNA, 20 nt, Human adenovirus C
cgccaucaucucugucaugg

SEQ ID NO: 3907460 - RNA, 21 nt, Human adenovirus C
cgcccagcguggcgcuggaca

SEQ ID NO: 3907461 - RNA, 22 nt, Human adenovirus C
cgcccaggcggcggguacagug

SEQ ID NO: 3907462 - RNA, 12 nt, Human adenovirus C
cgcccgcgccgu

SEQ ID NO: 3907463 - RNA, 22 nt, Human adenovirus C
cgcccucccguagaggagccuc

SEQ ID NO: 3907464 - RNA, 15 nt, Human adenovirus C
cgcccuggaggcagc

SEQ ID NO: 3907465 - RNA, 16 nt, Human adenovirus C
cgccgacccggcacug

SEQ ID NO: 3907466 - RNA, 16 nt, Human adenovirus C
cgccgcacgaggggca

SEQ ID NO: 3907467 - RNA, 20 nt, Human adenovirus C
cgccgccguuagcccaagag

SEQ ID NO: 3907468 - RNA, 15 nt, Human adenovirus C
cgccgcgcgcgggca

SEQ ID NO: 3907469 - RNA, 17 nt, Human adenovirus C
cgccgcuuucuucucua

SEQ ID NO: 3907470 - RNA, 14 nt, Human adenovirus C
cgccggcacugccu

SEQ ID NO: 3907471 - RNA, 19 nt, Human adenovirus C
cgccgucgccagcccgugc

SEQ ID NO: 3907472 - RNA, 23 nt, Human adenovirus C
cgccguuggagacugcagccucc

SEQ ID NO: 3907473 - RNA, 16 nt, Human adenovirus C
cgccugcugggcgagg

SEQ ID NO: 3907474 - RNA, 16 nt, Human adenovirus C
cgccuguugcugcugc

SEQ ID NO: 3907475 - RNA, 18 nt, Human adenovirus C
cgcgagcgguugcugcgc

SEQ ID NO: 3907476 - RNA, 13 nt, Human adenovirus C
cgcgcaacuacac

SEQ ID NO: 3907477 - RNA, 22 nt, Human adenovirus C
cgcgcacaaacgcggccgcacu

SEQ ID NO: 3907478 - RNA, 18 nt, Human adenovirus C
cgcgcagaugggagcugu

SEQ ID NO: 3907479 - RNA, 20 nt, Human adenovirus C
cgcgcagcagcagggcaacc

SEQ ID NO: 3907480 - RNA, 22 nt, Human adenovirus C
cgugaccuuccgcuccacgagc

SEQ ID NO: 3907481 - RNA, 19 nt, Human adenovirus C
cgugagcgcgcgcagcagc

SEQ ID NO: 3907482 - RNA, 19 nt, Human adenovirus C
cgugagcgugagccggcgg

SEQ ID NO: 3907483 - RNA, 18 nt, Human adenovirus C
cgugcaagacuccaaacu

SEQ ID NO: 3907484 - RNA, 19 nt, Human adenovirus C
cgugcgagggagcgaggag

SEQ ID NO: 3907485 - RNA, 13 nt, Human adenovirus C
cgugcggcaggga

SEQ ID NO: 3907486 - RNA, 16 nt, Human adenovirus C
cgugcucuacauuggc

SEQ ID NO: 3907487 - RNA, 13 nt, Human adenovirus C
cgugcuggccccg

SEQ ID NO: 3907488 - RNA, 20 nt, Human adenovirus C
cguggcuacaccuaccgccc

SEQ ID NO: 3907489 - RNA, 19 nt, Human adenovirus C
cguggcucguuacaacagc

SEQ ID NO: 3907490 - RNA, 13 nt, Human adenovirus C
cguggcugugauu

SEQ ID NO: 3907491 - RNA, 13 nt, Human adenovirus C
cguguggcagcaa

SEQ ID NO: 3907492 - RNA, 18 nt, Human adenovirus C
cguguucugacagggccc

SEQ ID NO: 3907493 - RNA, 17 nt, Human adenovirus C
cguucagauacccacca

SEQ ID NO: 3907494 - RNA, 22 nt, Human adenovirus C
cguucagauacccaccaccagu

SEQ ID NO: 3907495 - RNA, 19 nt, Human adenovirus C
cguuccugcucucacagau

SEQ ID NO: 3907496 - RNA, 20 nt, Human adenovirus C
cguugauguuguggcccacg

SEQ ID NO: 3907497 - RNA, 22 nt, Human adenovirus C
cguuucgcggguuggggcggcu

SEQ ID NO: 3907498 - RNA, 20 nt, Human adenovirus C
cuaaccagcguagccccuau

SEQ ID NO: 3907499 - RNA, 16 nt, Human adenovirus C
cuaaggacaaacaggu

SEQ ID NO: 3907500 - RNA, 20 nt, Human adenovirus C
cuaaugcggcaggagggaga

SEQ ID NO: 3907501 - RNA, 11 nt, Human adenovirus C
cuacaagcgcg

SEQ ID NO: 3907502 - RNA, 19 nt, Human adenovirus C
cuacaagcuacccacccag

SEQ ID NO: 3907503 - RNA, 13 nt, Human adenovirus C
cuacaauucccaa

SEQ ID NO: 3907504 - RNA, 13 nt, Human adenovirus C
cuacagccccuac

SEQ ID NO: 3907505 - RNA, 23 nt, Human adenovirus C
cuacagccugagcguaaccagac

SEQ ID NO: 3907506 - RNA, 17 nt, Human adenovirus C
cuacaucguaggugaca

SEQ ID NO: 3907507 - RNA, 13 nt, Human adenovirus C
cuacaugagcgcg

SEQ ID NO: 3907508 - RNA, 14 nt, Human adenovirus C
cuacauuccagaaa

SEQ ID NO: 3907509 - RNA, 15 nt, Human adenovirus C
cuacauuucugggaa

SEQ ID NO: 3907510 - RNA, 14 nt, Human adenovirus C
cuaccaccuucccc

SEQ ID NO: 3907511 - RNA, 19 nt, Human adenovirus C
cuaccgcgcgcccuggggc

SEQ ID NO: 3907512 - RNA, 15 nt, Human adenovirus C
cuaccucgcucccac

SEQ ID NO: 3907513 - RNA, 21 nt, Human adenovirus C
cuacggcaucucgauccagca

SEQ ID NO: 3907514 - RNA, 19 nt, Human adenovirus C
cuacucuuauaaaaugcac

SEQ ID NO: 3907515 - RNA, 18 nt, Human adenovirus C
cuacugcaccggcggcag

SEQ ID NO: 3907516 - RNA, 16 nt, Human adenovirus C
cuacuuccgcagccac

SEQ ID NO: 3907517 - RNA, 19 nt, Human adenovirus C
cuacuugcaucgcgcggcc

SEQ ID NO: 3907518 - RNA, 15 nt, Human adenovirus C
cuagacugcuccuuc

SEQ ID NO: 3907519 - RNA, 14 nt, Human adenovirus C
cuagcacuucugug

SEQ ID NO: 3907520 - RNA, 23 nt, Human adenovirus C
cuagccaacuaccuugccuacca

SEQ ID NO: 3907521 - RNA, 17 nt, Human adenovirus C
cuagcccugcaaacauc

SEQ ID NO: 3907522 - RNA, 16 nt, Human adenovirus C
cuagccgugcugaaac

SEQ ID NO: 3907523 - RNA, 22 nt, Human adenovirus C
cuagcgccugcugccaugcgcg

SEQ ID NO: 3907524 - RNA, 20 nt, Human adenovirus C
cuagcuuuuuuggccacugg

SEQ ID NO: 3907525 - RNA, 17 nt, Human adenovirus C
cuauaggacugaugcau

SEQ ID NO: 3907526 - RNA, 20 nt, Human adenovirus C
cuaucaggguccagaggacc

SEQ ID NO: 3907527 - RNA, 20 nt, Human adenovirus C
cuaucguggcuacaccuacc

SEQ ID NO: 3907528 - RNA, 14 nt, Human adenovirus C
cuaugcgccacugg

SEQ ID NO: 3907529 - RNA, 20 nt, Human adenovirus C
cuauggccccccgaagaagg

SEQ ID NO: 3907530 - RNA, 14 nt, Human adenovirus C
cuaugugcagcaga

SEQ ID NO: 3907531 - RNA, 13 nt, Human adenovirus C
cuauuaccaccac

SEQ ID NO: 3907532 - RNA, 16 nt, Human adenovirus C
cucaacccgaauaaac

SEQ ID NO: 3907533 - RNA, 17 nt, Human adenovirus C
cucacagaccugggcca

SEQ ID NO: 3907534 - RNA, 17 nt, Human adenovirus C
cucacccgcagcugccu

SEQ ID NO: 3907535 - RNA, 14 nt, Human adenovirus C
cucacucucuuccg

SEQ ID NO: 3907536 - RNA, 22 nt, Human adenovirus C
cucacucucuuccgcaucgcug

SEQ ID NO: 3907537 - RNA, 18 nt, Human adenovirus C
cucacuuaaaaaacauua

SEQ ID NO: 3907538 - RNA, 17 nt, Human adenovirus C
cucacuuaaaucagcac

SEQ ID NO: 3907539 - RNA, 20 nt, Human adenovirus C
cucacuuaaaucagcacagu

SEQ ID NO: 3907540 - RNA, 14 nt, Human adenovirus C
cucagaaaugacac

SEQ ID NO: 3907541 - RNA, 13 nt, Human adenovirus C
cucagaugcugac

SEQ ID NO: 3907542 - RNA, 13 nt, Human adenovirus C
cucagcgcagcgg

SEQ ID NO: 3907543 - RNA, 22 nt, Human adenovirus C
cucagcgccucccaaaagacau

SEQ ID NO: 3907544 - RNA, 14 nt, Human adenovirus C
cucagcuacaagcu

SEQ ID NO: 3907545 - RNA, 20 nt, Human adenovirus C
cucaggcgccgccggcacug

SEQ ID NO: 3907546 - RNA, 23 nt, Human adenovirus C
cucauguucuugucccuccgcac

SEQ ID NO: 3907547 - RNA, 23 nt, Human adenovirus C
cuccaccggccguggagacagug

SEQ ID NO: 3907548 - RNA, 19 nt, Human adenovirus C
cuccacuuaaacucaggca

SEQ ID NO: 3907549 - RNA, 23 nt, Human adenovirus C
cuccagagcgcccuccaccuuca

SEQ ID NO: 3907550 - RNA, 15 nt, Human adenovirus C
cuccagggugcgcca

SEQ ID NO: 3907551 - RNA, 19 nt, Human adenovirus C
cuccaucccaucgcgcaac

SEQ ID NO: 3907552 - RNA, 20 nt, Human adenovirus C
cucccaaaagacauauuucc

SEQ ID NO: 3907553 - RNA, 21 nt, Human adenovirus C
cucccaaaauguaaccacugu

SEQ ID NO: 3907554 - RNA, 13 nt, Human adenovirus C
cuccccccgcuga

SEQ ID NO: 3907555 - RNA, 18 nt, Human adenovirus C
cuccccggcuggccuuaa

SEQ ID NO: 3907556 - RNA, 14 nt, Human adenovirus C
cucccggccacuac

SEQ ID NO: 3907557 - RNA, 12 nt, Human adenovirus C
cucccgguacca

SEQ ID NO: 3907558 - RNA, 23 nt, Human adenovirus C
cuccgaacgguaagagccuagca

SEQ ID NO: 3907559 - RNA, 22 nt, Human adenovirus C
cuccgagauuuuccaugcauuc

SEQ ID NO: 3907560 - RNA, 23 nt, Human adenovirus C
cuccgccgcuuuggggucacugc

SEQ ID NO: 3907561 - RNA, 15 nt, Human adenovirus C
cuccgcgguaccugc

SEQ ID NO: 3907562 - RNA, 21 nt, Human adenovirus C
cuccguggccgcgcaccuggc

SEQ ID NO: 3907563 - RNA, 15 nt, Human adenovirus C
cuccucagcagcggc

SEQ ID NO: 3907564 - RNA, 17 nt, Human adenovirus C
cuccugacguaaccugc

SEQ ID NO: 3907565 - RNA, 15 nt, Human adenovirus C
cuccugccaggcuca

SEQ ID NO: 3907566 - RNA, 19 nt, Human adenovirus C
cuccuuuccuuccucccaa

SEQ ID NO: 3907567 - RNA, 18 nt, Human adenovirus C
cuccuuugucuggagaaa

SEQ ID NO: 3907568 - RNA, 20 nt, Human adenovirus C
cucgaucucuuccuccugga

SEQ ID NO: 3907569 - RNA, 17 nt, Human adenovirus C
cucgcccuacuuccgca

SEQ ID NO: 3907570 - RNA, 13 nt, Human adenovirus C
cucgccugcgcca

SEQ ID NO: 3907571 - RNA, 20 nt, Human adenovirus C
cucgccuucgaucucagcgc

SEQ ID NO: 3907572 - RNA, 15 nt, Human adenovirus C
cucgcguccaggcca

SEQ ID NO: 3907573 - RNA, 16 nt, Human adenovirus C
cucgcguccaggccag

SEQ ID NO: 3907574 - RNA, 18 nt, Human adenovirus C
cucgcguccaggccagca

SEQ ID NO: 3907575 - RNA, 12 nt, Human adenovirus C
cucgcugcugca

SEQ ID NO: 3907576 - RNA, 16 nt, Human adenovirus C
cucgcugcugcagccg

SEQ ID NO: 3907577 - RNA, 13 nt, Human adenovirus C
cucgcuguggagc

SEQ ID NO: 3907578 - RNA, 19 nt, Human adenovirus C
cucggagcuaugcuaacca

SEQ ID NO: 3907579 - RNA, 17 nt, Human adenovirus C
cucggcagacgacagca

SEQ ID NO: 3907580 - RNA, 20 nt, Human adenovirus C
cucggcuaauauggccugcu

SEQ ID NO: 3907581 - RNA, 16 nt, Human adenovirus C
cucgggcuugggagag

SEQ ID NO: 3907582 - RNA, 18 nt, Human adenovirus C
cucguccagacgggccag

SEQ ID NO: 3907583 - RNA, 17 nt, Human adenovirus C
cucuacaagcuugucua

SEQ ID NO: 3907584 - RNA, 19 nt, Human adenovirus C
cucucuacgcgucuccgaa

SEQ ID NO: 3907585 - RNA, 14 nt, Human adenovirus C
cucucugacccacg

SEQ ID NO: 3907586 - RNA, 16 nt, Human adenovirus C
cucucugaguauucca

SEQ ID NO: 3907587 - RNA, 16 nt, Human adenovirus C
cucugcgugaagacga

SEQ ID NO: 3907588 - RNA, 19 nt, Human adenovirus C
cucugguaucucagccgcc

SEQ ID NO: 3907589 - RNA, 21 nt, Human adenovirus C
cucuuccauaagggccucccc

SEQ ID NO: 3907590 - RNA, 13 nt, Human adenovirus C
cucuugcguccgc

SEQ ID NO: 3907591 - RNA, 23 nt, Human adenovirus C
cugaaaauaaaaaacaggucucu

SEQ ID NO: 3907592 - RNA, 13 nt, Human adenovirus C
cugaaacccacca

SEQ ID NO: 3907593 - RNA, 23 nt, Human adenovirus C
cugaacuguuuccagaacugaga

SEQ ID NO: 3907594 - RNA, 19 nt, Human adenovirus C
cugacacccagcagaaacc

SEQ ID NO: 3907595 - RNA, 20 nt, Human adenovirus C
cugacccggagaugcagcgc

SEQ ID NO: 3907596 - RNA, 14 nt, Human adenovirus C
gaucggcgcgcucc

SEQ ID NO: 3907597 - RNA, 18 nt, Human adenovirus C
gaucuccgcguccggcuc

SEQ ID NO: 3907598 - RNA, 12 nt, Human adenovirus C
gaucugcgccag

SEQ ID NO: 3907599 - RNA, 18 nt, Human adenovirus C
gaucuggaaggugcugag

SEQ ID NO: 3907600 - RNA, 18 nt, Human adenovirus C
gaucuuaugccaggccua

SEQ ID NO: 3907601 - RNA, 23 nt, Human adenovirus C
gaucuuaugccaggccuacaaau

SEQ ID NO: 3907602 - RNA, 13 nt, Human adenovirus C
gaugaccuggagg

SEQ ID NO: 3907603 - RNA, 17 nt, Human adenovirus C
gaugcgggccaugagcu

SEQ ID NO: 3907604 - RNA, 22 nt, Human adenovirus C
gaugcgggccaugagcugcgag

SEQ ID NO: 3907605 - RNA, 17 nt, Human adenovirus C
gauggcacccaaaaaga

SEQ ID NO: 3907606 - RNA, 18 nt, Human adenovirus C
gauuagcaaacuuguaaa

SEQ ID NO: 3907607 - RNA, 19 nt, Human adenovirus C
gauuugucacccuuauccu

SEQ ID NO: 3907608 - RNA, 23 nt, Human adenovirus C
gcaacagcaggaggaagccaggc

SEQ ID NO: 3907609 - RNA, 19 nt, Human adenovirus C
gcaacagggucugccagac

SEQ ID NO: 3907610 - RNA, 22 nt, Human adenovirus C
gcaacaucaacaacagcugccg

SEQ ID NO: 3907611 - RNA, 18 nt, Human adenovirus C
gcaacccuuccaggaggg

SEQ ID NO: 3907612 - RNA, 15 nt, Human adenovirus C
gcaaccgcgcccagg

SEQ ID NO: 3907613 - RNA, 13 nt, Human adenovirus C
gcaaccguuccca

SEQ ID NO: 3907614 - RNA, 22 nt, Human adenovirus C
gcaaccuaaaggagcugcagaa

SEQ ID NO: 3907615 - RNA, 17 nt, Human adenovirus C
gcaacuuguugggcauc

SEQ ID NO: 3907616 - RNA, 14 nt, Human adenovirus C
gcaagcacacagac

SEQ ID NO: 3907617 - RNA, 19 nt, Human adenovirus C
gcaagccgcucauggcgca

SEQ ID NO: 3907618 - RNA, 20 nt, Human adenovirus C
gcaagcuaaugauggccgca

SEQ ID NO: 3907619 - RNA, 16 nt, Human adenovirus C
gcaagcuagaggaaac

SEQ ID NO: 3907620 - RNA, 15 nt, Human adenovirus C
gcaaggccuggccag

SEQ ID NO: 3907621 - RNA, 21 nt, Human adenovirus C
gcaaggguaucauggcggacg

SEQ ID NO: 3907622 - RNA, 19 nt, Human adenovirus C
gcaaguuuuacgcccgcaa

SEQ ID NO: 3907623 - RNA, 15 nt, Human adenovirus C
gcaauaacacaggcu

SEQ ID NO: 3907624 - RNA, 19 nt, Human adenovirus C
gcaauaugagcgguggcgc

SEQ ID NO: 3907625 - RNA, 21 nt, Human adenovirus C
gcaauucaaguaacucuacaa

SEQ ID NO: 3907626 - RNA, 22 nt, Human adenovirus C
gcaccaccggcggcggcgcgcg

SEQ ID NO: 3907627 - RNA, 16 nt, Human adenovirus C
gcaccagccgcaccgc

SEQ ID NO: 3907628 - RNA, 13 nt, Human adenovirus C
gcaccaggugcac

SEQ ID NO: 3907629 - RNA, 16 nt, Human adenovirus C
gcaccgggaggcgguc

SEQ ID NO: 3907630 - RNA, 15 nt, Human adenovirus C
gcaccuacgcacgac

SEQ ID NO: 3907631 - RNA, 15 nt, Human adenovirus C
gcaccuucgccccag

SEQ ID NO: 3907632 - RNA, 15 nt, Human adenovirus C
gcacgaaggaggcgu

SEQ ID NO: 3907633 - RNA, 22 nt, Human adenovirus C
gcacgaaggaggcguaggaguc

SEQ ID NO: 3907634 - RNA, 23 nt, Human adenovirus C
gcacgaccgucagcggggucugg

SEQ ID NO: 3907635 - RNA, 19 nt, Human adenovirus C
gcacgcaaccgcgcccagg

SEQ ID NO: 3907636 - RNA, 17 nt, Human adenovirus C
gcacgucuagggcgcag

SEQ ID NO: 3907637 - RNA, 16 nt, Human adenovirus C
gcacucacagaccugg

SEQ ID NO: 3907638 - RNA, 21 nt, Human adenovirus C
gcacucacagaccugggccaa

SEQ ID NO: 3907639 - RNA, 20 nt, Human adenovirus C
gcacugggcgcaccaccguc

SEQ ID NO: 3907640 - RNA, 16 nt, Human adenovirus C
gcacuuaaccuacccc

SEQ ID NO: 3907641 - RNA, 21 nt, Human adenovirus C
gcacuucuucuucuccuuccu

SEQ ID NO: 3907642 - RNA, 21 nt, Human adenovirus C
gcagaaaccugugcugccagg

SEQ ID NO: 3907643 - RNA, 18 nt, Human adenovirus C
gcagacacgaucggcagg

SEQ ID NO: 3907644 - RNA, 20 nt, Human adenovirus C
gcagacaugcagggcacccu

SEQ ID NO: 3907645 - RNA, 15 nt, Human adenovirus C
gcagaccaaccugga

SEQ ID NO: 3907646 - RNA, 17 nt, Human adenovirus C
gcagaccguaaaccuga

SEQ ID NO: 3907647 - RNA, 23 nt, Human adenovirus C
gcagaccguaaaccugagccagg

SEQ ID NO: 3907648 - RNA, 21 nt, Human adenovirus C
gcagacuuuuaagggcguaga

SEQ ID NO: 3907649 - RNA, 15 nt, Human adenovirus C
gcagagcgugagccu

SEQ ID NO: 3907650 - RNA, 22 nt, Human adenovirus C
gcagaggagguuuuggacgagg

SEQ ID NO: 3907651 - RNA, 14 nt, Human adenovirus C
gcagaggcggcgcu

SEQ ID NO: 3907652 - RNA, 18 nt, Human adenovirus C
gcagaugggagcugucca

SEQ ID NO: 3907653 - RNA, 18 nt, Human adenovirus C
gcagcacaggccagaugc

SEQ ID NO: 3907654 - RNA, 14 nt, Human adenovirus C
gcagcagccgcagg

SEQ ID NO: 3907655 - RNA, 14 nt, Human adenovirus C
gcagccgcaggcca

SEQ ID NO: 3907656 - RNA, 12 nt, Human adenovirus C
gcagccuggagg

SEQ ID NO: 3907657 - RNA, 18 nt, Human adenovirus C
gcagcgccagugcgccau

SEQ ID NO: 3907658 - RNA, 21 nt, Human adenovirus C
gcagcggcagcaacagcagcg

SEQ ID NO: 3907659 - RNA, 20 nt, Human adenovirus C
gcagcggcgcggaagagaac

SEQ ID NO: 3907660 - RNA, 23 nt, Human adenovirus C
gcagcuagccaacuaccuugccu

SEQ ID NO: 3907661 - RNA, 20 nt, Human adenovirus C
gcagcugaugguacccaagc

SEQ ID NO: 3907662 - RNA, 12 nt, Human adenovirus C
gcagcugccugu

SEQ ID NO: 3907663 - RNA, 20 nt, Human adenovirus C
gcagcuggccuugcggcagg

SEQ ID NO: 3907664 - RNA, 21 nt, Human adenovirus C
gcagcuuguugaccagcucgg

SEQ ID NO: 3907665 - RNA, 15 nt, Human adenovirus C
gcaggaaucgcccca

SEQ ID NO: 3907666 - RNA, 18 nt, Human adenovirus C
gcaggacccuggugcugc

SEQ ID NO: 3907667 - RNA, 14 nt, Human adenovirus C
gcaggcgcagagac

SEQ ID NO: 3907668 - RNA, 16 nt, Human adenovirus C
gcaggcgcagagacac

SEQ ID NO: 3907669 - RNA, 12 nt, Human adenovirus C
gcagggugacaa

SEQ ID NO: 3907670 - RNA, 14 nt, Human adenovirus C
gcagguggcaccgg

SEQ ID NO: 3907671 - RNA, 20 nt, Human adenovirus C
gcagguggucgcgaaagguc

SEQ ID NO: 3907672 - RNA, 15 nt, Human adenovirus C
gcagguuccugagca

SEQ ID NO: 3907673 - RNA, 19 nt, Human adenovirus C
gcagguuccugagcagcug

SEQ ID NO: 3907674 - RNA, 20 nt, Human adenovirus C
gcagucugcagcgcugccaa

SEQ ID NO: 3907675 - RNA, 22 nt, Human adenovirus C
gcauaccccgcgccacuggguc

SEQ ID NO: 3907676 - RNA, 16 nt, Human adenovirus C
gcauagccgggucagg

SEQ ID NO: 3907677 - RNA, 21 nt, Human adenovirus C
gcauaguggugcaggagcgca

SEQ ID NO: 3907678 - RNA, 15 nt, Human adenovirus C
gcauccacaaggccg

SEQ ID NO: 3907679 - RNA, 17 nt, Human adenovirus C
gcauccggugcugcggc

SEQ ID NO: 3907680 - RNA, 14 nt, Human adenovirus C
gcaucugcagcgcc

SEQ ID NO: 3907681 - RNA, 16 nt, Human adenovirus C
gcaucugcagcgccag

SEQ ID NO: 3907682 - RNA, 20 nt, Human adenovirus C
gcaugauaaauauguggccg

SEQ ID NO: 3907683 - RNA, 15 nt, Human adenovirus C
gcaugcuuuugagcg

SEQ ID NO: 3907684 - RNA, 15 nt, Human adenovirus C
gcauggccggccacg

SEQ ID NO: 3907685 - RNA, 16 nt, Human adenovirus C
gcauggccggccacgg

SEQ ID NO: 3907686 - RNA, 21 nt, Human adenovirus C
gcaugucccugacuugcaugu

SEQ ID NO: 3907687 - RNA, 18 nt, Human adenovirus C
gcauguuuucccugacca

SEQ ID NO: 3907688 - RNA, 20 nt, Human adenovirus C
gcauuagcggggugguggac

SEQ ID NO: 3907689 - RNA, 13 nt, Human adenovirus C
gcauuccacgagc

SEQ ID NO: 3907690 - RNA, 20 nt, Human adenovirus C
gcauuccccucgccggcgcc

SEQ ID NO: 3907691 - RNA, 17 nt, Human adenovirus C
gcauugcguaccucagg

SEQ ID NO: 3907692 - RNA, 13 nt, Human adenovirus C
gccaaaaccugcc

SEQ ID NO: 3907693 - RNA, 20 nt, Human adenovirus C
gccaacuaccuugccuacca

SEQ ID NO: 3907694 - RNA, 23 nt, Human adenovirus C
gccacaacgcgcagcccgugggc

SEQ ID NO: 3907695 - RNA, 21 nt, Human adenovirus C
gccacacgggcggaggagaag

SEQ ID NO: 3907696 - RNA, 15 nt, Human adenovirus C
gccacauccuuggcc

SEQ ID NO: 3907697 - RNA, 17 nt, Human adenovirus C
gccacccacggacgagg

SEQ ID NO: 3907698 - RNA, 11 nt, Human adenovirus C
gccacgucaca

SEQ ID NO: 3907699 - RNA, 16 nt, Human adenovirus C
gccacuggcagggaca

SEQ ID NO: 3907700 - RNA, 15 nt, Human adenovirus C
gccagaaggcgcucg

SEQ ID NO: 3907701 - RNA, 17 nt, Human adenovirus C
gccagaggagcugcuga

SEQ ID NO: 3907702 - RNA, 24 nt, Human adenovirus C
gccagcaccugucgucagcgccau

SEQ ID NO: 3907703 - RNA, 12 nt, Human adenovirus C
gccagcgacugg

SEQ ID NO: 3907704 - RNA, 17 nt, Human adenovirus C
gccagcgcacuacugcc

SEQ ID NO: 3907705 - RNA, 16 nt, Human adenovirus C
gccagcgccugcacug

SEQ ID NO: 3907706 - RNA, 14 nt, Human adenovirus C
gccagguagcauuu

SEQ ID NO: 3907707 - RNA, 22 nt, Human adenovirus C
gccauagaugccaugaaccacc

SEQ ID NO: 3907708 - RNA, 22 nt, Human adenovirus C
gccaugcucagaaaugacacca

SEQ ID NO: 3907709 - RNA, 15 nt, Human adenovirus C
gccauggcaccgagc

SEQ ID NO: 3907710 - RNA, 22 nt, Human adenovirus C
gccauuagcauuugcagguggu

SEQ ID NO: 3907711 - RNA, 18 nt, Human adenovirus C
gcccagcgauagcaguuc

SEQ ID NO: 3907712 - RNA, 14 nt, Human adenovirus C
gcgggccaugagcu

SEQ ID NO: 3907713 - RNA, 13 nt, Human adenovirus C
gcgggcggagggu

SEQ ID NO: 3907714 - RNA, 14 nt, Human adenovirus C
gcgggcggcgcugc

SEQ ID NO: 3907715 - RNA, 14 nt, Human adenovirus C
gcgggcugcucugc

SEQ ID NO: 3907716 - RNA, 16 nt, Human adenovirus C
gcggggcuuaaagggu

SEQ ID NO: 3907717 - RNA, 15 nt, Human adenovirus C
gcggggugcugggau

SEQ ID NO: 3907718 - RNA, 14 nt, Human adenovirus C
gcgguauccugccc

SEQ ID NO: 3907719 - RNA, 14 nt, Human adenovirus C
gcggucggccaugc

SEQ ID NO: 3907720 - RNA, 15 nt, Human adenovirus C
gcggucggccaugcc

SEQ ID NO: 3907721 - RNA, 14 nt, Human adenovirus C
gcggugcaggcggc

SEQ ID NO: 3907722 - RNA, 15 nt, Human adenovirus C
gcggugcaggcggcc

SEQ ID NO: 3907723 - RNA, 16 nt, Human adenovirus C
gcggugcgggcggcgc

SEQ ID NO: 3907724 - RNA, 14 nt, Human adenovirus C
gcgguuaggcugga

SEQ ID NO: 3907725 - RNA, 15 nt, Human adenovirus C
gcguaacuugcugga

SEQ ID NO: 3907726 - RNA, 18 nt, Human adenovirus C
gcguaggagucgcgcagc

SEQ ID NO: 3907727 - RNA, 14 nt, Human adenovirus C
gcgucuggcgccca

SEQ ID NO: 3907728 - RNA, 18 nt, Human adenovirus C
gcgugacacgcgcgaggc

SEQ ID NO: 3907729 - RNA, 14 nt, Human adenovirus C
gcguguaugaugag

SEQ ID NO: 3907730 - RNA, 14 nt, Human adenovirus C
gcguguggcagcaa

SEQ ID NO: 3907731 - RNA, 20 nt, Human adenovirus C
gcuaaaauacaaccccacca

SEQ ID NO: 3907732 - RNA, 18 nt, Human adenovirus C
gcuacaaccuccgcuccu

SEQ ID NO: 3907733 - RNA, 20 nt, Human adenovirus C
gcuacaacguagcucagugc

SEQ ID NO: 3907734 - RNA, 22 nt, Human adenovirus C
gcuacaacguagcucagugcaa

SEQ ID NO: 3907735 - RNA, 19 nt, Human adenovirus C
gcuacaccuaccgccccag

SEQ ID NO: 3907736 - RNA, 18 nt, Human adenovirus C
gcuaccaccccagcaucg

SEQ ID NO: 3907737 - RNA, 23 nt, Human adenovirus C
gcuaccggagugcugggccagca

SEQ ID NO: 3907738 - RNA, 17 nt, Human adenovirus C
gcuaccucgcucccacc

SEQ ID NO: 3907739 - RNA, 15 nt, Human adenovirus C
gcuaccucuccgcgu

SEQ ID NO: 3907740 - RNA, 23 nt, Human adenovirus C
gcucaagggcgaggcgcgccgcg

SEQ ID NO: 3907741 - RNA, 16 nt, Human adenovirus C
gcucagucugggcaag

SEQ ID NO: 3907742 - RNA, 14 nt, Human adenovirus C
gcucaucuccgccg

SEQ ID NO: 3907743 - RNA, 14 nt, Human adenovirus C
gcuccagugagcag

SEQ ID NO: 3907744 - RNA, 16 nt, Human adenovirus C
gcucccaaaccucagc

SEQ ID NO: 3907745 - RNA, 17 nt, Human adenovirus C
gcucccaaaccucagcg

SEQ ID NO: 3907746 - RNA, 23 nt, Human adenovirus C
gcucccaccaugcgcgagggaca

SEQ ID NO: 3907747 - RNA, 17 nt, Human adenovirus C
gcucccuggucugcaau

SEQ ID NO: 3907748 - RNA, 23 nt, Human adenovirus C
gcuccuucagcgcgcgcugcccg

SEQ ID NO: 3907749 - RNA, 14 nt, Human adenovirus C
gcucgccgcccagc

SEQ ID NO: 3907750 - RNA, 23 nt, Human adenovirus C
gcucgcuguggagcggcauuaaa

SEQ ID NO: 3907751 - RNA, 21 nt, Human adenovirus C
gcucguccagacgggccaggg

SEQ ID NO: 3907752 - RNA, 13 nt, Human adenovirus C
gcucuacagcuuc

SEQ ID NO: 3907753 - RNA, 14 nt, Human adenovirus C
gcugaaacccacca

SEQ ID NO: 3907754 - RNA, 15 nt, Human adenovirus C
gcugaaacgcagcau

SEQ ID NO: 3907755 - RNA, 12 nt, Human adenovirus C
gcugaaagaggu

SEQ ID NO: 3907756 - RNA, 15 nt, Human adenovirus C
gcugcagagccagcc

SEQ ID NO: 3907757 - RNA, 13 nt, Human adenovirus C
gcugcagccaggg

SEQ ID NO: 3907758 - RNA, 16 nt, Human adenovirus C
gcugcagcugccgccg

SEQ ID NO: 3907759 - RNA, 21 nt, Human adenovirus C
gcugccggucuucgcccugcg

SEQ ID NO: 3907760 - RNA, 13 nt, Human adenovirus C
gcugccugcacuu

SEQ ID NO: 3907761 - RNA, 18 nt, Human adenovirus C
gcugcgagagcucggugu

SEQ ID NO: 3907762 - RNA, 23 nt, Human adenovirus C
gcugcgcgcggagguugcuggcg

SEQ ID NO: 3907763 - RNA, 15 nt, Human adenovirus C
gcugcgggguggugu

SEQ ID NO: 3907764 - RNA, 19 nt, Human adenovirus C
gcugcgguucaucccugug

SEQ ID NO: 3907765 - RNA, 21 nt, Human adenovirus C
gcugcgguucaucccugugga

SEQ ID NO: 3907766 - RNA, 16 nt, Human adenovirus C
gcugcuggaagggggu

SEQ ID NO: 3907767 - RNA, 21 nt, Human adenovirus C
gcugcuggaaggggguggugu

SEQ ID NO: 3907768 - RNA, 15 nt, Human adenovirus C
gcuggaagccaugcu

SEQ ID NO: 3907769 - RNA, 18 nt, Human adenovirus C
gcuggaagccaugcucag

SEQ ID NO: 3907770 - RNA, 15 nt, Human adenovirus C
gcuggaccugccucc

SEQ ID NO: 3907771 - RNA, 18 nt, Human adenovirus C
gcuggacgagggcaaccc

SEQ ID NO: 3907772 - RNA, 12 nt, Human adenovirus C
gcuggccgggca

SEQ ID NO: 3907773 - RNA, 15 nt, Human adenovirus C
gcugggcguggugcc

SEQ ID NO: 3907774 - RNA, 12 nt, Human adenovirus C
gcuggggccugc

SEQ ID NO: 3907775 - RNA, 15 nt, Human adenovirus C
gcuggguucccccuu

SEQ ID NO: 3907776 - RNA, 17 nt, Human adenovirus C
gcugguccugcuggugc

SEQ ID NO: 3907777 - RNA, 14 nt, Human adenovirus C
gcuggucucuggac

SEQ ID NO: 3907778 - RNA, 14 nt, Human adenovirus C
gcuguacauccugc

SEQ ID NO: 3907779 - RNA, 14 nt, Human adenovirus C
gcuguccagcugcu

SEQ ID NO: 3907780 - RNA, 13 nt, Human adenovirus C
gcuuaaggguggg

SEQ ID NO: 3907781 - RNA, 21 nt, Human adenovirus C
gcuuaccccgccaacgugccc

SEQ ID NO: 3907782 - RNA, 23 nt, Human adenovirus C
gcuuauuacagcgcuugcuuugg

SEQ ID NO: 3907783 - RNA, 19 nt, Human adenovirus C
gcuuauuuguugccuaaag

SEQ ID NO: 3907784 - RNA, 14 nt, Human adenovirus C
gcuucacuggacuc

SEQ ID NO: 3907785 - RNA, 16 nt, Human adenovirus C
gcuucagccgcugcag

SEQ ID NO: 3907786 - RNA, 23 nt, Human adenovirus C
gcuucccaaaggcccccauccaa

SEQ ID NO: 3907787 - RNA, 14 nt, Human adenovirus C
gcuugaggaggagg

SEQ ID NO: 3907788 - RNA, 16 nt, Human adenovirus C
gcuugaucugcuggcg

SEQ ID NO: 3907789 - RNA, 14 nt, Human adenovirus C
gcuuguagacugcu

SEQ ID NO: 3907790 - RNA, 22 nt, Human adenovirus C
gcuuucaagaacuugcaggggc

SEQ ID NO: 3907791 - RNA, 21 nt, Human adenovirus C
gcuuugcucccaaaccucagc

SEQ ID NO: 3907792 - RNA, 16 nt, Human adenovirus C
ggaaagacgguggugc

SEQ ID NO: 3907793 - RNA, 16 nt, Human adenovirus C
ggaacauucccagcug

SEQ ID NO: 3907794 - RNA, 21 nt, Human adenovirus C
ggaagacguaugcgcaggagc

SEQ ID NO: 3907795 - RNA, 22 nt, Human adenovirus C
ggaagacguaugcgcaggagca

SEQ ID NO: 3907796 - RNA, 19 nt, Human adenovirus C
ggaagcgacgaaugagcuc

SEQ ID NO: 3907797 - RNA, 15 nt, Human adenovirus C
ggaaggugcugaggu

SEQ ID NO: 3907798 - RNA, 15 nt, Human adenovirus C
ggaauacaacauggc

SEQ ID NO: 3907799 - RNA, 14 nt, Human adenovirus C
ggacaaaagaugaa

SEQ ID NO: 3907800 - RNA, 21 nt, Human adenovirus C
ggacaccacuggaaccagggc

SEQ ID NO: 3907801 - RNA, 12 nt, Human adenovirus C
ggacaguggcag

SEQ ID NO: 3907802 - RNA, 18 nt, Human adenovirus C
ggacccuggugcugccaa

SEQ ID NO: 3907803 - RNA, 19 nt, Human adenovirus C
ggaccuggccaaccaggca

SEQ ID NO: 3907804 - RNA, 14 nt, Human adenovirus C
ggacgagcccaccc

SEQ ID NO: 3907805 - RNA, 20 nt, Human adenovirus C
ggacgcgacgagaaacgcgc

SEQ ID NO: 3907806 - RNA, 14 nt, Human adenovirus C
ggacggcuacgacu

SEQ ID NO: 3907807 - RNA, 22 nt, Human adenovirus C
ggacgggggguuuaccuggacc

SEQ ID NO: 3907808 - RNA, 18 nt, Human adenovirus C
ggacugggcgugcagacc

SEQ ID NO: 3907809 - RNA, 16 nt, Human adenovirus C
ggagcaacagcaggag

SEQ ID NO: 3907810 - RNA, 15 nt, Human adenovirus C
ggagcagagcccaug

SEQ ID NO: 3907811 - RNA, 18 nt, Human adenovirus C
ggagccugggcuggagcc

SEQ ID NO: 3907812 - RNA, 22 nt, Human adenovirus C
ggagccugggcuggagcccgag

SEQ ID NO: 3907813 - RNA, 21 nt, Human adenovirus C
ggagcgcagcuugagccuggc

SEQ ID NO: 3907814 - RNA, 18 nt, Human adenovirus C
ggagcggggggcuucuga

SEQ ID NO: 3907815 - RNA, 19 nt, Human adenovirus C
ggagcggggggcuucugag

SEQ ID NO: 3907816 - RNA, 22 nt, Human adenovirus C
ggagcuggugcugcgcgcggag

SEQ ID NO: 3907817 - RNA, 15 nt, Human adenovirus C
ggaggagaagcgcgc

SEQ ID NO: 3907818 - RNA, 21 nt, Human adenovirus C
ggaggagcaacagcaggagga

SEQ ID NO: 3907819 - RNA, 18 nt, Human adenovirus C
ggaggauaggguggccuu

SEQ ID NO: 3907820 - RNA, 15 nt, Human adenovirus C
ggaggcagcuggggc

SEQ ID NO: 3907821 - RNA, 17 nt, Human adenovirus C
ggagugcugggccagca

SEQ ID NO: 3907822 - RNA, 22 nt, Human adenovirus C
ggaguugcgcgccgacacgguu

SEQ ID NO: 3907823 - RNA, 17 nt, Human adenovirus C
ggaucacaaccccacca

SEQ ID NO: 3907824 - RNA, 22 nt, Human adenovirus C
ggaucaccuacgaugaccugga

SEQ ID NO: 3907825 - RNA, 22 nt, Human adenovirus C
ggaugaagaagaggaagaugaa

SEQ ID NO: 3907826 - RNA, 11 nt, Human adenovirus C
ggaugagcucg

SEQ ID NO: 3907827 - RNA, 17 nt, Human adenovirus C
ggcaacaacaguggcag

SEQ ID NO: 3907828 - RNA, 19 nt, Human adenovirus C
ggcaacccguuugcgcacc

SEQ ID NO: 3907829 - RNA, 18 nt, Human adenovirus C
ugggauuuuuuaauuaag

SEQ ID NO: 3907830 - RNA, 19 nt, Human adenovirus C
ugggcaccuaugacaagcg

SEQ ID NO: 3907831 - RNA, 13 nt, Human adenovirus C
ugggccgcggggg

SEQ ID NO: 3907832 - RNA, 16 nt, Human adenovirus C
ugggcguguggcagca

SEQ ID NO: 3907833 - RNA, 16 nt, Human adenovirus C
uggggauaugagaugc

SEQ ID NO: 3907834 - RNA, 19 nt, Human adenovirus C
uggggcuccucccaggcaa

SEQ ID NO: 3907835 - RNA, 15 nt, Human adenovirus C
ugggggcgcgcgggg

SEQ ID NO: 3907836 - RNA, 19 nt, Human adenovirus C
ugguccgugugcaccagcc

SEQ ID NO: 3907837 - RNA, 22 nt, Human adenovirus C
uggugcgcucgucgggcaccag

SEQ ID NO: 3907838 - RNA, 18 nt, Human adenovirus C
ugguggacgucgcgccgc

SEQ ID NO: 3907839 - RNA, 14 nt, Human adenovirus C
ugguggaggcgcgc

SEQ ID NO: 3907840 - RNA, 16 nt, Human adenovirus C
ugguuauuaugaaugu

SEQ ID NO: 3907841 - RNA, 20 nt, Human adenovirus C
uguaagcgaagacgacgagg

SEQ ID NO: 3907842 - RNA, 16 nt, Human adenovirus C
uguaccugccagacaa

SEQ ID NO: 3907843 - RNA, 19 nt, Human adenovirus C
uguacucguucuucagaaa

SEQ ID NO: 3907844 - RNA, 11 nt, Human adenovirus C
uguagguacuc

SEQ ID NO: 3907845 - RNA, 15 nt, Human adenovirus C
uguauauuaaugcau

SEQ ID NO: 3907846 - RNA, 18 nt, Human adenovirus C
uguaugcuauauuucaac

SEQ ID NO: 3907847 - RNA, 15 nt, Human adenovirus C
uguauuuuuuccagg

SEQ ID NO: 3907848 - RNA, 17 nt, Human adenovirus C
ugucagccgcgcgcugg

SEQ ID NO: 3907849 - RNA, 16 nt, Human adenovirus C
ugucgcccucuucggc

SEQ ID NO: 3907850 - RNA, 16 nt, Human adenovirus C
ugucgcgcaccucgcg

SEQ ID NO: 3907851 - RNA, 19 nt, Human adenovirus C
ugucugcgagggccagcug

SEQ ID NO: 3907852 - RNA, 15 nt, Human adenovirus C
ugugaguuggaugau

SEQ ID NO: 3907853 - RNA, 14 nt, Human adenovirus C
uguggaaaaaucaa

SEQ ID NO: 3907854 - RNA, 18 nt, Human adenovirus C
uguggccuccgacugugg

SEQ ID NO: 3907855 - RNA, 19 nt, Human adenovirus C
ugugguacuucccagagac

SEQ ID NO: 3907856 - RNA, 12 nt, Human adenovirus C
uguuccaccgcu

SEQ ID NO: 3907857 - RNA, 22 nt, Human adenovirus C
uguucuaauggagaacuccuca

SEQ ID NO: 3907858 - RNA, 22 nt, Human adenovirus C
uguuuggaagauuuuucugcug

SEQ ID NO: 3907859 - RNA, 23 nt, Human adenovirus C
uguuuggaagauuuuucugcugu

SEQ ID NO: 3907860 - RNA, 14 nt, Human adenovirus C
uguuuugcugauuu

SEQ ID NO: 3907861 - RNA, 21 nt, Human adenovirus C
uuaaaucagcacaguaacugc

SEQ ID NO: 3907862 - RNA, 15 nt, Human adenovirus C
uuaagggugggaaag

SEQ ID NO: 3907863 - RNA, 19 nt, Human adenovirus C
uuacuuauuucugugcuac

SEQ ID NO: 3907864 - RNA, 11 nt, Human adenovirus C
uuagcccaaga

SEQ ID NO: 3907865 - RNA, 14 nt, Human adenovirus C
uuagcgaaagucaa

SEQ ID NO: 3907866 - RNA, 14 nt, Human adenovirus C
uuagcguacaguca

SEQ ID NO: 3907867 - RNA, 20 nt, Human adenovirus C
uuagguucuacgaagaccaa

SEQ ID NO: 3907868 - RNA, 19 nt, Human adenovirus C
uuauaacagcacuggcaac

SEQ ID NO: 3907869 - RNA, 18 nt, Human adenovirus C
uuauacgccaucaucucu

SEQ ID NO: 3907870 - RNA, 14 nt, Human adenovirus C
uucaaaaucccaca

SEQ ID NO: 3907871 - RNA, 22 nt, Human adenovirus C
uucaacuacaccgucaagaaaa

SEQ ID NO: 3907872 - RNA, 18 nt, Human adenovirus C
uucagagaagaacaugcc

SEQ ID NO: 3907873 - RNA, 14 nt, Human adenovirus C
uucaucccugugga

SEQ ID NO: 3907874 - RNA, 14 nt, Human adenovirus C
uuccaccgcucugc

SEQ ID NO: 3907875 - RNA, 17 nt, Human adenovirus C
uuccagaaagcuacaag

SEQ ID NO: 3907876 - RNA, 20 nt, Human adenovirus C
uuccauaagggccuccccuu

SEQ ID NO: 3907877 - RNA, 23 nt, Human adenovirus C
uuccauaggugauagaaccagau

SEQ ID NO: 3907878 - RNA, 23 nt, Human adenovirus C
uuccaugagccgguguccacgcu

SEQ ID NO: 3907879 - RNA, 16 nt, Human adenovirus C
uucccagcaucgcuac

SEQ ID NO: 3907880 - RNA, 20 nt, Human adenovirus C
uucccccguaacauccugca

SEQ ID NO: 3907881 - RNA, 17 nt, Human adenovirus C
uuccuaucaaccagaac

SEQ ID NO: 3907882 - RNA, 10 nt, Human adenovirus C
uuccucccaa

SEQ ID NO: 3907883 - RNA, 21 nt, Human adenovirus C
uuccuccggaaacagggacga

SEQ ID NO: 3907884 - RNA, 19 nt, Human adenovirus C
uucgcgaccgcgagggaga

SEQ ID NO: 3907885 - RNA, 17 nt, Human adenovirus C
uucugccacgaagaagu

SEQ ID NO: 3907886 - RNA, 23 nt, Human adenovirus C
uugacaugaccaugaagaucugg

SEQ ID NO: 3907887 - RNA, 18 nt, Human adenovirus C
uugaucaaacccagcuuc

SEQ ID NO: 3907888 - RNA, 15 nt, Human adenovirus C
uugaugaaaagaaaa

SEQ ID NO: 3907889 - RNA, 23 nt, Human adenovirus C
uugcaggggcuguggggggugcg

SEQ ID NO: 3907890 - RNA, 20 nt, Human adenovirus C
uugcauacggccgccagagc

SEQ ID NO: 3907891 - RNA, 22 nt, Human adenovirus C
uugcauuucccacgcuuugagu

SEQ ID NO: 3907892 - RNA, 13 nt, Human adenovirus C
uugccaggggcag

SEQ ID NO: 3907893 - RNA, 18 nt, Human adenovirus C
uugccaggggcaggcccu

SEQ ID NO: 3907894 - RNA, 16 nt, Human adenovirus C
uugcccgugcacucca

SEQ ID NO: 3907895 - RNA, 16 nt, Human adenovirus C
uugcgucucuggcccc

SEQ ID NO: 3907896 - RNA, 18 nt, Human adenovirus C
uugcugcgcccacaccua

SEQ ID NO: 3907897 - RNA, 18 nt, Human adenovirus C
uuggacgcaauggccaaa

SEQ ID NO: 3907898 - RNA, 16 nt, Human adenovirus C
uuggguauccugucug

SEQ ID NO: 3907899 - RNA, 21 nt, Human adenovirus C
uugucacccuuauccucaucu

SEQ ID NO: 3907900 - RNA, 12 nt, Human adenovirus C
uuguccagcuua

SEQ ID NO: 3907901 - RNA, 15 nt, Human adenovirus C
uuguuguaacccgcc

SEQ ID NO: 3907902 - RNA, 16 nt, Human adenovirus C
uuguuucuccacacaa

SEQ ID NO: 3907903 - RNA, 20 nt, Human adenovirus C
uuuaauuaaguauaugagca

SEQ ID NO: 3907904 - RNA, 16 nt, Human adenovirus C
uuuaccccccacccuu

SEQ ID NO: 3907905 - RNA, 20 nt, Human adenovirus C
uuuacgccaccuucuucccc

SEQ ID NO: 3907906 - RNA, 14 nt, Human adenovirus C
uuuacugcugcugg

SEQ ID NO: 3907907 - RNA, 14 nt, Human adenovirus C
uuuagcugcacgua

SEQ ID NO: 3907908 - RNA, 19 nt, Human adenovirus C
uuucacuccacaggcugcg

SEQ ID NO: 3907909 - RNA, 17 nt, Human adenovirus C
uuucauucaguaguaua

SEQ ID NO: 3907910 - RNA, 12 nt, Human adenovirus C
uuuccaggcuuu

SEQ ID NO: 3907911 - RNA, 15 nt, Human adenovirus C
uuucugccagcgccu

SEQ ID NO: 3907912 - RNA, 14 nt, Human adenovirus C
uuucuuaccucugg

SEQ ID NO: 3907913 - RNA, 17 nt, Human adenovirus C
uuuguccagcuuauuca

SEQ ID NO: 3907914 - RNA, 20 nt, Human adenovirus C
uuuuuggccacuggccgcgc

SEQ ID NO: 3907915 - RNA, 18 nt, Human adenovirus C
ugcucccaaaccucagcg

SEQ ID NO: 3907916 - RNA, 20 nt, Human adenovirus C
ugcuccucguuuagccaggu

SEQ ID NO: 3907917 - RNA, 23 nt, Human adenovirus C
ugcugacacuguaccgcgaggcc

SEQ ID NO: 3907918 - RNA, 22 nt, Human adenovirus C
ugcugacccggagaugcagcgc

SEQ ID NO: 3907919 - RNA, 14 nt, Human adenovirus C
ugcugagccgccgu

SEQ ID NO: 3907920 - RNA, 19 nt, Human adenovirus C
ugcugcaccugcgugaggg

SEQ ID NO: 3907921 - RNA, 19 nt, Human adenovirus C
ugcugcccacgcuugcacc

SEQ ID NO: 3907922 - RNA, 19 nt, Human adenovirus C
ugcugccgccgccgcuccg

SEQ ID NO: 3907923 - RNA, 18 nt, Human adenovirus C
ugcuggaugugaccgagg

SEQ ID NO: 3907924 - RNA, 13 nt, Human adenovirus C
ugcuggucaggca

SEQ ID NO: 3907925 - RNA, 22 nt, Human adenovirus C
ugcuuaaaaaaacaacucccau

SEQ ID NO: 3907926 - RNA, 21 nt, Human adenovirus C
ugcuuaacaguccccagguac

SEQ ID NO: 3907927 - RNA, 12 nt, Human adenovirus C
ugcuugccaccu

SEQ ID NO: 3907928 - RNA, 16 nt, Human adenovirus C
ugcuugcgcuuaaaau

SEQ ID NO: 3907929 - RNA, 19 nt, Human adenovirus C
uggaacagcagcacaggcc

SEQ ID NO: 3907930 - RNA, 19 nt, Human adenovirus C
uggacaccuccgcaccacu

SEQ ID NO: 3907931 - RNA, 13 nt, Human adenovirus C
uggaccucccggc

SEQ ID NO: 3907932 - RNA, 13 nt, Human adenovirus C
uggaccuggccaa

SEQ ID NO: 3907933 - RNA, 13 nt, Human adenovirus C
uggacuucaccca

SEQ ID NO: 3907934 - RNA, 16 nt, Human adenovirus C
uggacuuggaggaggg

SEQ ID NO: 3907935 - RNA, 15 nt, Human adenovirus C
uggagacugcagccu

SEQ ID NO: 3907936 - RNA, 18 nt, Human adenovirus C
uggagaugcgggccauga

SEQ ID NO: 3907937 - RNA, 15 nt, Human adenovirus C
uggaggaggcgccgc

SEQ ID NO: 3907938 - RNA, 14 nt, Human adenovirus C
uggaggaggcgcgc

SEQ ID NO: 3907939 - RNA, 17 nt, Human adenovirus C
uggaggaggcgcgcaac

SEQ ID NO: 3907940 - RNA, 14 nt, Human adenovirus C
uggcaaccaccgcu

SEQ ID NO: 3907941 - RNA, 16 nt, Human adenovirus C
uggcacaacacaggca

SEQ ID NO: 3907942 - RNA, 23 nt, Human adenovirus C
uggcacccaaaaagaagcugcag

SEQ ID NO: 3907943 - RNA, 15 nt, Human adenovirus C
uggcaccgggacugg

SEQ ID NO: 3907944 - RNA, 16 nt, Human adenovirus C
uggcacuuaggccaga

SEQ ID NO: 3907945 - RNA, 23 nt, Human adenovirus C
uggcagcaaggccuggaacagca

SEQ ID NO: 3907946 - RNA, 21 nt, Human adenovirus C
uggcagcaaugccuggaggag

SEQ ID NO: 3907947 - RNA, 17 nt, Human adenovirus C
uggcauuagcggggugg

SEQ ID NO: 3907948 - RNA, 22 nt, Human adenovirus C
uggccauuaccuuugacucuuc

SEQ ID NO: 3907949 - RNA, 18 nt, Human adenovirus C
uggccguagguggcgccc

SEQ ID NO: 3907950 - RNA, 20 nt, Human adenovirus C
uggcgaccccucauaaacac

SEQ ID NO: 3907951 - RNA, 21 nt, Human adenovirus C
uggcgaucguaaacgcgcugg

SEQ ID NO: 3907952 - RNA, 14 nt, Human adenovirus C
uggcgaugagcagc

SEQ ID NO: 3907953 - RNA, 22 nt, Human adenovirus C
uggcgaugagcagcuggcgcgc

SEQ ID NO: 3907954 - RNA, 20 nt, Human adenovirus C
uggcgccuucagcuggggcu

SEQ ID NO: 3907955 - RNA, 21 nt, Human adenovirus C
uggcgguguguucugccacga

SEQ ID NO: 3907956 - RNA, 20 nt, Human adenovirus C
uggcuauaggacugaugcau

SEQ ID NO: 3907957 - RNA, 13 nt, Human adenovirus C
ugggaaacuggca

SEQ ID NO: 3907958 - RNA, 20 nt, Human adenovirus C
ugggaacucaacuaaugcaa

SEQ ID NO: 3907959 - RNA, 15 nt, Human adenovirus C
ugggauaugcuccag

SEQ ID NO: 3907960 - RNA, 21 nt, Human adenovirus C
ugggcauccgcaagcggcaac

SEQ ID NO: 3907961 - RNA, 14 nt, Human adenovirus C
ugggccggggugcg

SEQ ID NO: 3907962 - RNA, 17 nt, Human adenovirus C
ugggcguguggcagcaa

SEQ ID NO: 3907963 - RNA, 14 nt, Human adenovirus C
ggcauuaacaugga

SEQ ID NO: 3907964 - RNA, 23 nt, Human adenovirus C
ggccaaucaagcagguggcaccg

SEQ ID NO: 3907965 - RNA, 18 nt, Human adenovirus C
ggccacuacccggaccag

SEQ ID NO: 3907966 - RNA, 11 nt, Human adenovirus C
ggccagaugcu

SEQ ID NO: 3907967 - RNA, 22 nt, Human adenovirus C
ggccagggugcgcuugaggcug

SEQ ID NO: 3907968 - RNA, 21 nt, Human adenovirus C
ggccauuagugcuaugacuca

SEQ ID NO: 3907969 - RNA, 16 nt, Human adenovirus C
ggccauuuccuucucc

SEQ ID NO: 3907970 - RNA, 19 nt, Human adenovirus C
ggccauuuuuucuggggug

SEQ ID NO: 3907971 - RNA, 21 nt, Human adenovirus C
ggccccgcgacacggcucgcg

SEQ ID NO: 3907972 - RNA, 20 nt, Human adenovirus C
ggcccuggcuggcacgggca

SEQ ID NO: 3907973 - RNA, 16 nt, Human adenovirus C
ggccgacgggcggcca

SEQ ID NO: 3907974 - RNA, 15 nt, Human adenovirus C
ggccgccgaccuggu

SEQ ID NO: 3907975 - RNA, 22 nt, Human adenovirus C
ggccggaaaccucaccucccaa

SEQ ID NO: 3907976 - RNA, 16 nt, Human adenovirus C
ggccggugaggcgugc

SEQ ID NO: 3907977 - RNA, 15 nt, Human adenovirus C
ggccguggagacagu

SEQ ID NO: 3907978 - RNA, 17 nt, Human adenovirus C
ggccuccccuucuucuu

SEQ ID NO: 3907979 - RNA, 17 nt, Human adenovirus C
ggccuccgacugugguu

SEQ ID NO: 3907980 - RNA, 12 nt, Human adenovirus C
ggccugcagacc

SEQ ID NO: 3907981 - RNA, 18 nt, Human adenovirus C
ggccugcgcgugcccgug

SEQ ID NO: 3907982 - RNA, 18 nt, Human adenovirus C
ggccugguaggcgcagca

SEQ ID NO: 3907983 - RNA, 19 nt, Human adenovirus C
ggccuggucuacgacgcgc

SEQ ID NO: 3907984 - RNA, 15 nt, Human adenovirus C
ggccuuugccuggaa

SEQ ID NO: 3907985 - RNA, 23 nt, Human adenovirus C
ggcgaucguaaacgcgcuggccg

SEQ ID NO: 3907986 - RNA, 13 nt, Human adenovirus C
ggcgaugagcagc

SEQ ID NO: 3907987 - RNA, 21 nt, Human adenovirus C
ggcgaugagcagcuggcgcgc

SEQ ID NO: 3907988 - RNA, 22 nt, Human adenovirus C
ggcgauuucggccaugaacugc

SEQ ID NO: 3907989 - RNA, 17 nt, Human adenovirus C
ggcgcagcaucccuuuu

SEQ ID NO: 3907990 - RNA, 12 nt, Human adenovirus C
ggcgcaggcggc

SEQ ID NO: 3907991 - RNA, 18 nt, Human adenovirus C
ggcgccuucagcuggggc

SEQ ID NO: 3907992 - RNA, 19 nt, Human adenovirus C
ggcgccuucagcuggggcu

SEQ ID NO: 3907993 - RNA, 13 nt, Human adenovirus C
ggcgcgcccgcca

SEQ ID NO: 3907994 - RNA, 13 nt, Human adenovirus C
ggcgcgcggaaag

SEQ ID NO: 3907995 - RNA, 17 nt, Human adenovirus C
ggcgcggcggcugcugc

SEQ ID NO: 3907996 - RNA, 15 nt, Human adenovirus C
ggcgcggcuaggagc

SEQ ID NO: 3907997 - RNA, 16 nt, Human adenovirus C
ggcgcggcuaggagcg

SEQ ID NO: 3907998 - RNA, 15 nt, Human adenovirus C
ggcgcgggcacaaga

SEQ ID NO: 3907999 - RNA, 14 nt, Human adenovirus C
ggcgcguucguccu

SEQ ID NO: 3908000 - RNA, 20 nt, Human adenovirus C
ggcgcucguugguccagcag

SEQ ID NO: 3908001 - RNA, 17 nt, Human adenovirus C
ggcgcugcagagccagc

SEQ ID NO: 3908002 - RNA, 21 nt, Human adenovirus C
ggcggcccugcuuaaccgcgc

SEQ ID NO: 3908003 - RNA, 15 nt, Human adenovirus C
ggcggcggcgcgcaa

SEQ ID NO: 3908004 - RNA, 14 nt, Human adenovirus C
ggcggcggcggagu

SEQ ID NO: 3908005 - RNA, 15 nt, Human adenovirus C
ggcggcguggaggaa

SEQ ID NO: 3908006 - RNA, 15 nt, Human adenovirus C
ggcgggagcuccugc

SEQ ID NO: 3908007 - RNA, 22 nt, Human adenovirus C
ggcggggauggcgcaggcggcg

SEQ ID NO: 3908008 - RNA, 19 nt, Human adenovirus C
ggcguggcccuuggcgcgc

SEQ ID NO: 3908009 - RNA, 22 nt, Human adenovirus C
ggcguugccgcuggacgagggc

SEQ ID NO: 3908010 - RNA, 20 nt, Human adenovirus C
ggcuaagugggagggguagc

SEQ ID NO: 3908011 - RNA, 19 nt, Human adenovirus C
ggcuccuuugucuggagaa

SEQ ID NO: 3908012 - RNA, 19 nt, Human adenovirus C
ggcucgcgaaggaggcagg

SEQ ID NO: 3908013 - RNA, 13 nt, Human adenovirus C
ggcucgcucccug

SEQ ID NO: 3908014 - RNA, 18 nt, Human adenovirus C
ggcucuagcgaugaagau

SEQ ID NO: 3908015 - RNA, 14 nt, Human adenovirus C
ggcugcagccaggg

SEQ ID NO: 3908016 - RNA, 16 nt, Human adenovirus C
ggcugcgcaccaucac

SEQ ID NO: 3908017 - RNA, 14 nt, Human adenovirus C
ggcugcuguugcuu

SEQ ID NO: 3908018 - RNA, 17 nt, Human adenovirus C
ggcuggagcccgagguc

SEQ ID NO: 3908019 - RNA, 10 nt, Human adenovirus C
ggcuggggcc

SEQ ID NO: 3908020 - RNA, 18 nt, Human adenovirus C
ggcugguccugcuggugc

SEQ ID NO: 3908021 - RNA, 13 nt, Human adenovirus C
ggcuugcucgccc

SEQ ID NO: 3908022 - RNA, 23 nt, Human adenovirus C
gggaauuugagccccucgccugg

SEQ ID NO: 3908023 - RNA, 16 nt, Human adenovirus C
gggacacauaccuagg

SEQ ID NO: 3908024 - RNA, 17 nt, Human adenovirus C
gggacccgccgggagag

SEQ ID NO: 3908025 - RNA, 16 nt, Human adenovirus C
gggacgcucuggccgg

SEQ ID NO: 3908026 - RNA, 15 nt, Human adenovirus C
gggagcgaggagguc

SEQ ID NO: 3908027 - RNA, 12 nt, Human adenovirus C
gggaggcggcgg

SEQ ID NO: 3908028 - RNA, 17 nt, Human adenovirus C
gggcagccuggaggcaa

SEQ ID NO: 3908029 - RNA, 19 nt, Human adenovirus C
gggcaggggcuaaaggggg

SEQ ID NO: 3908030 - RNA, 13 nt, Human adenovirus C
gggccaagaacaa

SEQ ID NO: 3908031 - RNA, 11 nt, Human adenovirus C
gggccagcaca

SEQ ID NO: 3908032 - RNA, 22 nt, Human adenovirus C
gggcccacgggcggcggccugg

SEQ ID NO: 3908033 - RNA, 16 nt, Human adenovirus C
gggcgcaguaguccag

SEQ ID NO: 3908034 - RNA, 17 nt, Human adenovirus C
gggcgcaguuggaagac

SEQ ID NO: 3908035 - RNA, 22 nt, Human adenovirus C
gggcgccgagcuguugcccgug

SEQ ID NO: 3908036 - RNA, 14 nt, Human adenovirus C
gggcuaaagggggu

SEQ ID NO: 3908037 - RNA, 16 nt, Human adenovirus C
gggcuagguccaggug

SEQ ID NO: 3908038 - RNA, 14 nt, Human adenovirus C
gggcuggcgguggc

SEQ ID NO: 3908039 - RNA, 13 nt, Human adenovirus C
ggggcagugcaga

SEQ ID NO: 3908040 - RNA, 17 nt, Human adenovirus C
uuggacaccuccgcacc

SEQ ID NO: 3908041 - RNA, 12 nt, Human adenovirus C
uugguccagcag

SEQ ID NO: 3908042 - RNA, 22 nt, Human adenovirus C
uuguaaaaaucugcuccagagc

SEQ ID NO: 3908043 - RNA, 22 nt, Human adenovirus C
uuguaaauaucaggaauuguug

SEQ ID NO: 3908044 - RNA, 16 nt, Human adenovirus C
uuuaaugacuaccuuu

SEQ ID NO: 3908045 - RNA, 16 nt, Human adenovirus C
uuuacugcugcuggaa

SEQ ID NO: 3908046 - RNA, 21 nt, Human adenovirus C
uuuagagaacacuggcaccuu

SEQ ID NO: 3908047 - RNA, 16 nt, Human adenovirus C
uuuccauuuuaugaaa

SEQ ID NO: 3908048 - RNA, 18 nt, Human adenovirus C
uuucgcgcugcuccucuu

SEQ ID NO: 3908049 - RNA, 20 nt, Human adenovirus C
uuugacgcggugaaagacuc

SEQ ID NO: 3908050 - RNA, 21 nt, Human adenovirus C
uuugacgcugcgguucauccc

SEQ ID NO: 3908051 - RNA, 12 nt, Human adenovirus C
uuugagccccuc

SEQ ID NO: 3908052 - RNA, 23 nt, Human adenovirus C
uuugccuccccgucaugcaagac

SEQ ID NO: 3908053 - RNA, 17 nt, Human adenovirus C
uuugucacuugaaaaac

SEQ ID NO: 3908054 - RNA, 15 nt, Human adenovirus C
aaaaacaaagucaaa

SEQ ID NO: 3908055 - RNA, 19 nt, Human adenovirus C
aaaacccaaagucaaacug

SEQ ID NO: 3908056 - RNA, 15 nt, Human adenovirus C
aaaaccuccuccucc

SEQ ID NO: 3908057 - RNA, 14 nt, Human adenovirus C
aaaagaaccugccu

SEQ ID NO: 3908058 - RNA, 18 nt, Human adenovirus C
aaaagaagcaagcaacau

SEQ ID NO: 3908059 - RNA, 20 nt, Human adenovirus C
aaaagaagcugcagcugccg

SEQ ID NO: 3908060 - RNA, 19 nt, Human adenovirus C
aaaauacaaccccaccaau

SEQ ID NO: 3908061 - RNA, 21 nt, Human adenovirus C
aaaaugaugacaaacuuaccc

SEQ ID NO: 3908062 - RNA, 21 nt, Human adenovirus C
aaacaacucgcugcugcagcc

SEQ ID NO: 3908063 - RNA, 16 nt, Human adenovirus C
aaacaauuacaaaaag

SEQ ID NO: 3908064 - RNA, 13 nt, Human adenovirus C
aaacccaaaguca

SEQ ID NO: 3908065 - RNA, 19 nt, Human adenovirus C
aaacccaaagucaaacugc

SEQ ID NO: 3908066 - RNA, 18 nt, Human adenovirus C
aaacccaaauagcaagcc

SEQ ID NO: 3908067 - RNA, 19 nt, Human adenovirus C
aaaccgggccuccaacugu

SEQ ID NO: 3908068 - RNA, 14 nt, Human adenovirus C
aaaccucaccuccc

SEQ ID NO: 3908069 - RNA, 16 nt, Human adenovirus C
aaaccucagcgccucc

SEQ ID NO: 3908070 - RNA, 23 nt, Human adenovirus C
aaaccuucucuacgccaacuccg

SEQ ID NO: 3908071 - RNA, 21 nt, Human adenovirus C
aaacuccgauacacuaacagu

SEQ ID NO: 3908072 - RNA, 23 nt, Human adenovirus C
aaacucuucgcggucuuuccagu

SEQ ID NO: 3908073 - RNA, 14 nt, Human adenovirus C
aaagaugacaccga

SEQ ID NO: 3908074 - RNA, 17 nt, Human adenovirus C
aaagcaggggccaagaa

SEQ ID NO: 3908075 - RNA, 14 nt, Human adenovirus C
aaagcaugaugcaa

SEQ ID NO: 3908076 - RNA, 19 nt, Human adenovirus C
aaagccaccugagccuuug

SEQ ID NO: 3908077 - RNA, 11 nt, Human adenovirus C
aaagcgcgggc

SEQ ID NO: 3908078 - RNA, 23 nt, Human adenovirus C
aaagcggaacauuaacaaaaaua

SEQ ID NO: 3908079 - RNA, 23 nt, Human adenovirus C
aaaggcuacaggggccucuucuu

SEQ ID NO: 3908080 - RNA, 12 nt, Human adenovirus C
aaaguccagaug

SEQ ID NO: 3908081 - RNA, 12 nt, Human adenovirus C
aaauagcaagcc

SEQ ID NO: 3908082 - RNA, 17 nt, Human adenovirus C
aaaugaugacaaacuua

SEQ ID NO: 3908083 - RNA, 17 nt, Human adenovirus C
aacaaacagagcgauuu

SEQ ID NO: 3908084 - RNA, 15 nt, Human adenovirus C
aacaaagucaaacau

SEQ ID NO: 3908085 - RNA, 16 nt, Human adenovirus C
aacaaagucaaacaua

SEQ ID NO: 3908086 - RNA, 12 nt, Human adenovirus C
aacaacagcgcc

SEQ ID NO: 3908087 - RNA, 14 nt, Human adenovirus C
aacaaguuuagaaa

SEQ ID NO: 3908088 - RNA, 16 nt, Human adenovirus C
aacaaucuaugccaaa

SEQ ID NO: 3908089 - RNA, 10 nt, Human adenovirus C
aacaggaggg

SEQ ID NO: 3908090 - RNA, 15 nt, Human adenovirus C
aacaguggcaaccac

SEQ ID NO: 3908091 - RNA, 21 nt, Human adenovirus C
aacaugguguguggcaacugc

SEQ ID NO: 3908092 - RNA, 12 nt, Human adenovirus C
aaccaccagcac

SEQ ID NO: 3908093 - RNA, 16 nt, Human adenovirus C
aaccauaucccaggga

SEQ ID NO: 3908094 - RNA, 18 nt, Human adenovirus C
aacccaauccccccgccg

SEQ ID NO: 3908095 - RNA, 15 nt, Human adenovirus C
aacccacacaaugaa

SEQ ID NO: 3908096 - RNA, 19 nt, Human adenovirus C
aaccccaccaauguggaaa

SEQ ID NO: 3908097 - RNA, 16 nt, Human adenovirus C
aacccuuccaggaggg

SEQ ID NO: 3908098 - RNA, 15 nt, Human adenovirus C
aaccuaaaugccaac

SEQ ID NO: 3908099 - RNA, 17 nt, Human adenovirus C
aaccuaaaugccaaccu

SEQ ID NO: 3908100 - RNA, 13 nt, Human adenovirus C
aaccuacgucacc

SEQ ID NO: 3908101 - RNA, 14 nt, Human adenovirus C
aaccuauggagaaa

SEQ ID NO: 3908102 - RNA, 13 nt, Human adenovirus C
aaccucaccuccc

SEQ ID NO: 3908103 - RNA, 20 nt, Human adenovirus C
aaccugagccaggcuuucaa

SEQ ID NO: 3908104 - RNA, 18 nt, Human adenovirus C
aacgaagcuauguccaag

SEQ ID NO: 3908105 - RNA, 13 nt, Human adenovirus C
aacgaccacagca

SEQ ID NO: 3908106 - RNA, 18 nt, Human adenovirus C
aacgcagcaucgagguca

SEQ ID NO: 3908107 - RNA, 14 nt, Human adenovirus C
aacgcgccuaccac

SEQ ID NO: 3908108 - RNA, 11 nt, Human adenovirus C
aacuacugcca

SEQ ID NO: 3908109 - RNA, 19 nt, Human adenovirus C
aacucugguaucucagccg

SEQ ID NO: 3908110 - RNA, 19 nt, Human adenovirus C
aacugcuuagcgaaaguca

SEQ ID NO: 3908111 - RNA, 18 nt, Human adenovirus C
aacuggccccaaacuccc

SEQ ID NO: 3908112 - RNA, 21 nt, Human adenovirus C
aacuggccccaaacucccaug

SEQ ID NO: 3908113 - RNA, 21 nt, Human adenovirus C
aacuggugcuuauggugggag

SEQ ID NO: 3908114 - RNA, 19 nt, Human adenovirus C
aacuuugauaauacugcca

SEQ ID NO: 3908115 - RNA, 12 nt, Human adenovirus C
aacuuugccaug

SEQ ID NO: 3908116 - RNA, 18 nt, Human adenovirus C
aagaaagucccccuggag

SEQ ID NO: 3908117 - RNA, 13 nt, Human adenovirus C
aagaagagcaaaa

SEQ ID NO: 3908118 - RNA, 21 nt, Human adenovirus C
aagacguguuuugcgacccgg

SEQ ID NO: 3908119 - RNA, 16 nt, Human adenovirus C
aagagacgcucggugc

SEQ ID NO: 3908120 - RNA, 19 nt, Human adenovirus C
aagaucuggaaggugcuga

SEQ ID NO: 3908121 - RNA, 20 nt, Human adenovirus C
aagaucuugguugugggcca

SEQ ID NO: 3908122 - RNA, 12 nt, Human adenovirus C
aagauggcuacc

SEQ ID NO: 3908123 - RNA, 11 nt, Human adenovirus C
aagcaaaacca

SEQ ID NO: 3908124 - RNA, 15 nt, Human adenovirus C
aagcaaaccucaccu

SEQ ID NO: 3908125 - RNA, 21 nt, Human adenovirus C
aagcaagauguuuggcggggc

SEQ ID NO: 3908126 - RNA, 15 nt, Human adenovirus C
aagcaggccaaacuu

SEQ ID NO: 3908127 - RNA, 22 nt, Human adenovirus C
aagcagguuccugagcagcugc

SEQ ID NO: 3908128 - RNA, 23 nt, Human adenovirus C
aagcagguuccugagcagcugcg

SEQ ID NO: 3908129 - RNA, 21 nt, Human adenovirus C
aagcccgugacacugcagcag

SEQ ID NO: 3908130 - RNA, 15 nt, Human adenovirus C
aagcgcagacgcgcc

SEQ ID NO: 3908131 - RNA, 14 nt, Human adenovirus C
aagcgcgcuggagc

SEQ ID NO: 3908132 - RNA, 20 nt, Human adenovirus C
aagcgcgcuggagcaaaacc

SEQ ID NO: 3908133 - RNA, 22 nt, Human adenovirus C
aagcgcucgaucaucuccccgc

SEQ ID NO: 3908134 - RNA, 22 nt, Human adenovirus C
aaggacugguuccuggugcaga

SEQ ID NO: 3908135 - RNA, 18 nt, Human adenovirus C
aaggccggaaaccucacc

SEQ ID NO: 3908136 - RNA, 12 nt, Human adenovirus C
aaggccuggcca

SEQ ID NO: 3908137 - RNA, 16 nt, Human adenovirus C
aaggccuggccagugu

SEQ ID NO: 3908138 - RNA, 15 nt, Human adenovirus C
aaggcuaauggcaau

SEQ ID NO: 3908139 - RNA, 15 nt, Human adenovirus C
aaggcuacaggggcc

SEQ ID NO: 3908140 - RNA, 19 nt, Human adenovirus C
aagggcacgagcugcuucc

SEQ ID NO: 3908141 - RNA, 20 nt, Human adenovirus C
aagggugcaugcccaggcuu

SEQ ID NO: 3908142 - RNA, 22 nt, Human adenovirus C
aaguauuccauagagcagcuga

SEQ ID NO: 3908143 - RNA, 17 nt, Human adenovirus C
aagucuaagcagccgcc

SEQ ID NO: 3908144 - RNA, 20 nt, Human adenovirus C
aagugauuaucgagcaggac

SEQ ID NO: 3908145 - RNA, 21 nt, Human adenovirus C
aagugauuaucgagcaggacc

SEQ ID NO: 3908146 - RNA, 13 nt, Human adenovirus C
aauacaacauggc

SEQ ID NO: 3908147 - RNA, 11 nt, Human adenovirus C
aaucaaaauaa

SEQ ID NO: 3908148 - RNA, 18 nt, Human adenovirus C
aauccacagcggcggcag

SEQ ID NO: 3908149 - RNA, 23 nt, Human adenovirus C
aauccuguggugagcuguuugau

SEQ ID NO: 3908150 - RNA, 18 nt, Human adenovirus C
aaugaaaacggugccaug

SEQ ID NO: 3908151 - RNA, 16 nt, Human adenovirus C
aaugcgccgugggcua

SEQ ID NO: 3908152 - RNA, 20 nt, Human adenovirus C
aaugugaugggcuccagcau

SEQ ID NO: 3908153 - RNA, 19 nt, Human adenovirus C
aauucuguuuauucuuaua

SEQ ID NO: 3908154 - RNA, 22 nt, Human adenovirus C
acaaacuccacccccucauuau

SEQ ID NO: 3908155 - RNA, 23 nt, Human adenovirus C
acaacagcugccgccaugggcuc

SEQ ID NO: 3908156 - RNA, 20 nt, Human adenovirus C
acaacaguggcagcggcgcg

SEQ ID NO: 3908157 - RNA, 12 nt, Human adenovirus C
acaagcagcugg

SEQ ID NO: 3908158 - RNA, 16 nt, Human adenovirus C
acaaggccugcagacc

SEQ ID NO: 3908159 - RNA, 16 nt, Human adenovirus C
acaagugcuuugcccg

SEQ ID NO: 3908160 - RNA, 13 nt, Human adenovirus C
acaauaaauuacu

SEQ ID NO: 3908161 - RNA, 20 nt, Human adenovirus C
acaauauuggcuaccagggc

SEQ ID NO: 3908162 - RNA, 17 nt, Human adenovirus C
acaaugaaaaaauucau

SEQ ID NO: 3908163 - RNA, 20 nt, Human adenovirus C
acacaccucgaccacugccg

SEQ ID NO: 3908164 - RNA, 14 nt, Human adenovirus C
acacaggcuggggc

SEQ ID NO: 3908165 - RNA, 19 nt, Human adenovirus C
acacaugucuaugcccagg

SEQ ID NO: 3908166 - RNA, 20 nt, Human adenovirus C
acacccagaaaaccgcacgc

SEQ ID NO: 3908167 - RNA, 15 nt, Human adenovirus C
acaccgaacagcgcc

SEQ ID NO: 3908168 - RNA, 16 nt, Human adenovirus C
acaccuaccgccccag

SEQ ID NO: 3908169 - RNA, 13 nt, Human adenovirus C
uccacgagccagg

SEQ ID NO: 3908170 - RNA, 23 nt, Human adenovirus C
uccacgcuggaagccaugcucag

SEQ ID NO: 3908171 - RNA, 15 nt, Human adenovirus C
uccagacgggccagg

SEQ ID NO: 3908172 - RNA, 15 nt, Human adenovirus C
uccaggaaguacggc

SEQ ID NO: 3908173 - RNA, 17 nt, Human adenovirus C
uccaggccagcacgaag

SEQ ID NO: 3908174 - RNA, 23 nt, Human adenovirus C
uccaggcgcggcggcugcugcgc

SEQ ID NO: 3908175 - RNA, 12 nt, Human adenovirus C
uccauacacaaa

SEQ ID NO: 3908176 - RNA, 18 nt, Human adenovirus C
uccauagagcagcugacc

SEQ ID NO: 3908177 - RNA, 13 nt, Human adenovirus C
uccauagcgcuua

SEQ ID NO: 3908178 - RNA, 15 nt, Human adenovirus C
uccauccggcccagg

SEQ ID NO: 3908179 - RNA, 17 nt, Human adenovirus C
uccaugggcgcacucac

SEQ ID NO: 3908180 - RNA, 15 nt, Human adenovirus C
ucccacacugcaggg

SEQ ID NO: 3908181 - RNA, 21 nt, Human adenovirus C
ucccagcaucgcuacaaccuc

SEQ ID NO: 3908182 - RNA, 13 nt, Human adenovirus C
ucccauagacaag

SEQ ID NO: 3908183 - RNA, 14 nt, Human adenovirus C
ucccaucgcgcaac

SEQ ID NO: 3908184 - RNA, 13 nt, Human adenovirus C
ucccauucuccag

SEQ ID NO: 3908185 - RNA, 15 nt, Human adenovirus C
uccccccgccgccgc

SEQ ID NO: 3908186 - RNA, 15 nt, Human adenovirus C
uccccuaucaggguc

SEQ ID NO: 3908187 - RNA, 16 nt, Human adenovirus C
uccccuuaguaugcag

SEQ ID NO: 3908188 - RNA, 13 nt, Human adenovirus C
ucccgcggcgaca

SEQ ID NO: 3908189 - RNA, 23 nt, Human adenovirus C
ucccugaccaaaugcgccagaag

SEQ ID NO: 3908190 - RNA, 16 nt, Human adenovirus C
ucccugggaucaggcu

SEQ ID NO: 3908191 - RNA, 16 nt, Human adenovirus C
ucccuuagaaccaaag

SEQ ID NO: 3908192 - RNA, 22 nt, Human adenovirus C
uccgaaccuuuggacaccuccc

SEQ ID NO: 3908193 - RNA, 20 nt, Human adenovirus C
uccgaucuaggcgcugcggc

SEQ ID NO: 3908194 - RNA, 13 nt, Human adenovirus C
uccgcaauacaga

SEQ ID NO: 3908195 - RNA, 20 nt, Human adenovirus C
uccgcacccacuaucuucau

SEQ ID NO: 3908196 - RNA, 19 nt, Human adenovirus C
uccgcauaccccgcgccac

SEQ ID NO: 3908197 - RNA, 15 nt, Human adenovirus C
uccgcgguccuccuc

SEQ ID NO: 3908198 - RNA, 20 nt, Human adenovirus C
uccgcguccagguccuccgc

SEQ ID NO: 3908199 - RNA, 19 nt, Human adenovirus C
uccgcuccucaggcgccgc

SEQ ID NO: 3908200 - RNA, 21 nt, Human adenovirus C
uccgggcugcgcgcuggccag

SEQ ID NO: 3908201 - RNA, 18 nt, Human adenovirus C
uccguagauguaccugga

SEQ ID NO: 3908202 - RNA, 14 nt, Human adenovirus C
uccguccugcagga

SEQ ID NO: 3908203 - RNA, 16 nt, Human adenovirus C
uccgugcgcuuuuugg

SEQ ID NO: 3908204 - RNA, 12 nt, Human adenovirus C
uccucaccugcc

SEQ ID NO: 3908205 - RNA, 15 nt, Human adenovirus C
uccuccagaagacgg

SEQ ID NO: 3908206 - RNA, 19 nt, Human adenovirus C
uccuccgggcacagcagcg

SEQ ID NO: 3908207 - RNA, 17 nt, Human adenovirus C
uccugaagcaaaaccag

SEQ ID NO: 3908208 - RNA, 12 nt, Human adenovirus C
uccugaaggggg

SEQ ID NO: 3908209 - RNA, 11 nt, Human adenovirus C
uccugccaggc

SEQ ID NO: 3908210 - RNA, 13 nt, Human adenovirus C
uccugccaggcuc

SEQ ID NO: 3908211 - RNA, 14 nt, Human adenovirus C
uccugccaggcuca

SEQ ID NO: 3908212 - RNA, 20 nt, Human adenovirus C
uccuuuaaugacuaccuuuc

SEQ ID NO: 3908213 - RNA, 12 nt, Human adenovirus C
ucgaccacugcc

SEQ ID NO: 3908214 - RNA, 19 nt, Human adenovirus C
ucgaggucacccacuuugc

SEQ ID NO: 3908215 - RNA, 16 nt, Human adenovirus C
ucgcaacaccacugcu

SEQ ID NO: 3908216 - RNA, 17 nt, Human adenovirus C
ucgccagcccgugcugg

SEQ ID NO: 3908217 - RNA, 22 nt, Human adenovirus C
ucgccagggcuacgugcgccag

SEQ ID NO: 3908218 - RNA, 18 nt, Human adenovirus C
ucgccggcgccccagaaa

SEQ ID NO: 3908219 - RNA, 18 nt, Human adenovirus C
ucgcgccgcaccgcgucc

SEQ ID NO: 3908220 - RNA, 19 nt, Human adenovirus C
ucgcgccuguugcugcugc

SEQ ID NO: 3908221 - RNA, 13 nt, Human adenovirus C
ucgcgcugcuccu

SEQ ID NO: 3908222 - RNA, 23 nt, Human adenovirus C
ucgcggacgcgguuccagauguu

SEQ ID NO: 3908223 - RNA, 18 nt, Human adenovirus C
ucgcguuucagccccccg

SEQ ID NO: 3908224 - RNA, 14 nt, Human adenovirus C
ucgggaagaacugg

SEQ ID NO: 3908225 - RNA, 14 nt, Human adenovirus C
ucgggaaugaaugu

SEQ ID NO: 3908226 - RNA, 14 nt, Human adenovirus C
ucgggccaggacgc

SEQ ID NO: 3908227 - RNA, 18 nt, Human adenovirus C
ucgggcggggggaccaaa

SEQ ID NO: 3908228 - RNA, 18 nt, Human adenovirus C
ucggggucaaaaaccagg

SEQ ID NO: 3908229 - RNA, 14 nt, Human adenovirus C
ucgugcgcaccacc

SEQ ID NO: 3908230 - RNA, 15 nt, Human adenovirus C
ucgugcgcaccaccg

SEQ ID NO: 3908231 - RNA, 15 nt, Human adenovirus C
ucguugguccagcag

SEQ ID NO: 3908232 - RNA, 23 nt, Human adenovirus C
ucuacagcuuccuggagcgccac

SEQ ID NO: 3908233 - RNA, 23 nt, Human adenovirus C
augcuauggaucuuaugccaggc

SEQ ID NO: 3908234 - RNA, 21 nt, Human adenovirus C
auggaaaaauaggaauuaaaa

SEQ ID NO: 3908235 - RNA, 13 nt, Human adenovirus C
auggaaauuaaaa

SEQ ID NO: 3908236 - RNA, 17 nt, Human adenovirus C
auggaagacugggacag

SEQ ID NO: 3908237 - RNA, 17 nt, Human adenovirus C
auggagaacuccucacu

SEQ ID NO: 3908238 - RNA, 19 nt, Human adenovirus C
auggaucuuaugccaggcc

SEQ ID NO: 3908239 - RNA, 20 nt, Human adenovirus C
auggaucuuaugccaggccu

SEQ ID NO: 3908240 - RNA, 14 nt, Human adenovirus C
auggcacccaaaaa

SEQ ID NO: 3908241 - RNA, 16 nt, Human adenovirus C
auggcccucaccugcc

SEQ ID NO: 3908242 - RNA, 17 nt, Human adenovirus C
auggccggccacggccu

SEQ ID NO: 3908243 - RNA, 14 nt, Human adenovirus C
auggccugcugcac

SEQ ID NO: 3908244 - RNA, 18 nt, Human adenovirus C
auggccuggccucuggca

SEQ ID NO: 3908245 - RNA, 23 nt, Human adenovirus C
auggcuaccggagugcugggcca

SEQ ID NO: 3908246 - RNA, 23 nt, Human adenovirus C
auggguguucuugcuggucaggc

SEQ ID NO: 3908247 - RNA, 18 nt, Human adenovirus C
augguacccaagcgccag

SEQ ID NO: 3908248 - RNA, 22 nt, Human adenovirus C
auguacaugagcaaacaguaca

SEQ ID NO: 3908249 - RNA, 22 nt, Human adenovirus C
auguaccuuacuuuaucucaaa

SEQ ID NO: 3908250 - RNA, 14 nt, Human adenovirus C
augucagccuugcc

SEQ ID NO: 3908251 - RNA, 14 nt, Human adenovirus C
augugccccucgcc

SEQ ID NO: 3908252 - RNA, 17 nt, Human adenovirus C
auguggaaucaggcugu

SEQ ID NO: 3908253 - RNA, 21 nt, Human adenovirus C
auguggccuccgacugugguu

SEQ ID NO: 3908254 - RNA, 21 nt, Human adenovirus C
auguuucuccacgccuuugcc

SEQ ID NO: 3908255 - RNA, 21 nt, Human adenovirus C
auuaaccuuggggcgcgcugg

SEQ ID NO: 3908256 - RNA, 19 nt, Human adenovirus C
auuaacgaggaugggcagg

SEQ ID NO: 3908257 - RNA, 17 nt, Human adenovirus C
auuacaaaaagcgggcu

SEQ ID NO: 3908258 - RNA, 15 nt, Human adenovirus C
auuaccauguacaug

SEQ ID NO: 3908259 - RNA, 18 nt, Human adenovirus C
auucaaccugccaccucc

SEQ ID NO: 3908260 - RNA, 14 nt, Human adenovirus C
auucccacgcccua

SEQ ID NO: 3908261 - RNA, 18 nt, Human adenovirus C
auuccucgaguucuuaua

SEQ ID NO: 3908262 - RNA, 21 nt, Human adenovirus C
auucguccauaaugauggcaa

SEQ ID NO: 3908263 - RNA, 17 nt, Human adenovirus C
auucuucucaaauacua

SEQ ID NO: 3908264 - RNA, 22 nt, Human adenovirus C
auugaaaaccauggaacugagg

SEQ ID NO: 3908265 - RNA, 17 nt, Human adenovirus C
auugcaucccaccuuuc

SEQ ID NO: 3908266 - RNA, 14 nt, Human adenovirus C
auugcguaccucag

SEQ ID NO: 3908267 - RNA, 13 nt, Human adenovirus C
auugcuugagccc

SEQ ID NO: 3908268 - RNA, 18 nt, Human adenovirus C
auugggguaacugacacc

SEQ ID NO: 3908269 - RNA, 23 nt, Human adenovirus C
auuugcaagacagaaacacagag

SEQ ID NO: 3908270 - RNA, 16 nt, Human adenovirus C
auuuucuggccaugca

SEQ ID NO: 3908271 - RNA, 20 nt, Human adenovirus C
auuuuuccaaaacaggaggu

SEQ ID NO: 3908272 - RNA, 21 nt, Human adenovirus C
caaaaacaugcuaccucuuug

SEQ ID NO: 3908273 - RNA, 16 nt, Human adenovirus C
caaaaggcaaacugcc

SEQ ID NO: 3908274 - RNA, 22 nt, Human adenovirus C
caaaauuggcaaguaugcugua

SEQ ID NO: 3908275 - RNA, 13 nt, Human adenovirus C
caaacaacaugga

SEQ ID NO: 3908276 - RNA, 16 nt, Human adenovirus C
caaacaacauggaaau

SEQ ID NO: 3908277 - RNA, 17 nt, Human adenovirus C
caaacaucagccccccu

SEQ ID NO: 3908278 - RNA, 19 nt, Human adenovirus C
caaacccagcuucagcuug

SEQ ID NO: 3908279 - RNA, 15 nt, Human adenovirus C
caaaccccugacaga

SEQ ID NO: 3908280 - RNA, 14 nt, Human adenovirus C
caaacgccaagaaa

SEQ ID NO: 3908281 - RNA, 15 nt, Human adenovirus C
caaacugcccucacg

SEQ ID NO: 3908282 - RNA, 20 nt, Human adenovirus C
caaagacaaaauuggcaagu

SEQ ID NO: 3908283 - RNA, 17 nt, Human adenovirus C
caaagcaaaccucaccu

SEQ ID NO: 3908284 - RNA, 18 nt, Human adenovirus C
caaagcagaccaaagcaa

SEQ ID NO: 3908285 - RNA, 14 nt, Human adenovirus C
caaagcccaagaaa

SEQ ID NO: 3908286 - RNA, 19 nt, Human adenovirus C
ugagggacaaguugaaaga

SEQ ID NO: 3908287 - RNA, 19 nt, Human adenovirus C
ugagguacgaugagacccg

SEQ ID NO: 3908288 - RNA, 22 nt, Human adenovirus C
ugagguggaucccauggacgag

SEQ ID NO: 3908289 - RNA, 21 nt, Human adenovirus C
ugagguguaccaguccgggcc

SEQ ID NO: 3908290 - RNA, 13 nt, Human adenovirus C
ugaugccuuugag

SEQ ID NO: 3908291 - RNA, 14 nt, Human adenovirus C
ugaugccuuugagg

SEQ ID NO: 3908292 - RNA, 21 nt, Human adenovirus C
ugaugcggaagggucccggca

SEQ ID NO: 3908293 - RNA, 18 nt, Human adenovirus C
ugaugggcuccagcauug

SEQ ID NO: 3908294 - RNA, 21 nt, Human adenovirus C
ugauuaaaugagacaugauuc

SEQ ID NO: 3908295 - RNA, 18 nt, Human adenovirus C
ugauucgggaguuuacca

SEQ ID NO: 3908296 - RNA, 18 nt, Human adenovirus C
ugcaaacaucagcccccc

SEQ ID NO: 3908297 - RNA, 16 nt, Human adenovirus C
ugcaaacuugcaagaa

SEQ ID NO: 3908298 - RNA, 19 nt, Human adenovirus C
ugcaaagggcccuggcugg

SEQ ID NO: 3908299 - RNA, 11 nt, Human adenovirus C
ugcaaaggugg

SEQ ID NO: 3908300 - RNA, 18 nt, Human adenovirus C
ugcaacaagaaaacagcg

SEQ ID NO: 3908301 - RNA, 12 nt, Human adenovirus C
ugcaacccgcgg

SEQ ID NO: 3908302 - RNA, 21 nt, Human adenovirus C
ugcaagaccccgugaccuucc

SEQ ID NO: 3908303 - RNA, 22 nt, Human adenovirus C
ugcaaggcgcuguauccaaagc

SEQ ID NO: 3908304 - RNA, 13 nt, Human adenovirus C
ugcacgaccccug

SEQ ID NO: 3908305 - RNA, 19 nt, Human adenovirus C
ugcacgaccccuggagagg

SEQ ID NO: 3908306 - RNA, 13 nt, Human adenovirus C
ugcagaccgugga

SEQ ID NO: 3908307 - RNA, 21 nt, Human adenovirus C
ugcagagcauaguggugcagg

SEQ ID NO: 3908308 - RNA, 20 nt, Human adenovirus C
ugcagauauggcccucaccu

SEQ ID NO: 3908309 - RNA, 13 nt, Human adenovirus C
ugcagccagggga

SEQ ID NO: 3908310 - RNA, 19 nt, Human adenovirus C
ugcagcgcaagcuagagga

SEQ ID NO: 3908311 - RNA, 17 nt, Human adenovirus C
ugcaggagcgcagcuug

SEQ ID NO: 3908312 - RNA, 22 nt, Human adenovirus C
ugcaggggcccaacucggccgc

SEQ ID NO: 3908313 - RNA, 13 nt, Human adenovirus C
ugcaucccaccuu

SEQ ID NO: 3908314 - RNA, 14 nt, Human adenovirus C
ugcaugaaagccuu

SEQ ID NO: 3908315 - RNA, 21 nt, Human adenovirus C
ugcauggugauaaaacuaaac

SEQ ID NO: 3908316 - RNA, 14 nt, Human adenovirus C
ugccacacgggcgg

SEQ ID NO: 3908317 - RNA, 17 nt, Human adenovirus C
ugccacagagggcaugg

SEQ ID NO: 3908318 - RNA, 14 nt, Human adenovirus C
ugccagacaagcua

SEQ ID NO: 3908319 - RNA, 17 nt, Human adenovirus C
ugccagacaugaugcaa

SEQ ID NO: 3908320 - RNA, 19 nt, Human adenovirus C
ugccauuaaaaaccuccuc

SEQ ID NO: 3908321 - RNA, 14 nt, Human adenovirus C
ugcccgccaccugc

SEQ ID NO: 3908322 - RNA, 16 nt, Human adenovirus C
ugcccgcggcuccggu

SEQ ID NO: 3908323 - RNA, 16 nt, Human adenovirus C
ugcccuaaauuuaccc

SEQ ID NO: 3908324 - RNA, 18 nt, Human adenovirus C
ugcccuacauccuuccau

SEQ ID NO: 3908325 - RNA, 13 nt, Human adenovirus C
ugccgcagugguc

SEQ ID NO: 3908326 - RNA, 17 nt, Human adenovirus C
ugccgccgccgccaccc

SEQ ID NO: 3908327 - RNA, 18 nt, Human adenovirus C
ugccgccugcugcacgca

SEQ ID NO: 3908328 - RNA, 20 nt, Human adenovirus C
ugccgcggggacaggaggac

SEQ ID NO: 3908329 - RNA, 19 nt, Human adenovirus C
ugccgucaucccugagcag

SEQ ID NO: 3908330 - RNA, 14 nt, Human adenovirus C
ugccgugccagagg

SEQ ID NO: 3908331 - RNA, 20 nt, Human adenovirus C
ugccuacgaacgccaccugu

SEQ ID NO: 3908332 - RNA, 14 nt, Human adenovirus C
ugccuuugagggug

SEQ ID NO: 3908333 - RNA, 16 nt, Human adenovirus C
ugccuuugaggguggc

SEQ ID NO: 3908334 - RNA, 14 nt, Human adenovirus C
ugcgacgucagaca

SEQ ID NO: 3908335 - RNA, 23 nt, Human adenovirus C
ugcgcacccgccccccgcgcaac

SEQ ID NO: 3908336 - RNA, 21 nt, Human adenovirus C
ugcgcgaggccguggcgcagc

SEQ ID NO: 3908337 - RNA, 19 nt, Human adenovirus C
ugcgcgcuggccagggugc

SEQ ID NO: 3908338 - RNA, 15 nt, Human adenovirus C
ugcgcgucggccagg

SEQ ID NO: 3908339 - RNA, 16 nt, Human adenovirus C
ugcgcgugcgcgggca

SEQ ID NO: 3908340 - RNA, 19 nt, Human adenovirus C
ugcggccaaucaagcaggu

SEQ ID NO: 3908341 - RNA, 20 nt, Human adenovirus C
ugcggccuaccggggggaga

SEQ ID NO: 3908342 - RNA, 17 nt, Human adenovirus C
ugcgucgcaaccaggaa

SEQ ID NO: 3908343 - RNA, 14 nt, Human adenovirus C
ugcgugcucuacau

SEQ ID NO: 3908344 - RNA, 13 nt, Human adenovirus C
ugcguggaagaac

SEQ ID NO: 3908345 - RNA, 13 nt, Human adenovirus C
ugcuauauuucaa

SEQ ID NO: 3908346 - RNA, 16 nt, Human adenovirus C
ugcuccagagcgcccu

SEQ ID NO: 3908347 - RNA, 20 nt, Human adenovirus C
ugcucgaucucuuccuccug

SEQ ID NO: 3908348 - RNA, 21 nt, Human adenovirus C
ugcucguccagacgggccagg

SEQ ID NO: 3908349 - RNA, 22 nt, Human adenovirus C
ugcugaguauaauaaauacaga

SEQ ID NO: 3908350 - RNA, 21 nt, Human adenovirus C
ugcugcacgcaaccgcgccca

SEQ ID NO: 3908351 - RNA, 15 nt, Human adenovirus C
ugcuggacagggggc

SEQ ID NO: 3908352 - RNA, 19 nt, Human adenovirus C
ugcuguugaagcaucugca

SEQ ID NO: 3908353 - RNA, 13 nt, Human adenovirus C
ugcuuauuacagc

SEQ ID NO: 3908354 - RNA, 18 nt, Human adenovirus C
gcugaggccgaggcagcg

SEQ ID NO: 3908355 - RNA, 14 nt, Human adenovirus C
gcugauugccaggg

SEQ ID NO: 3908356 - RNA, 14 nt, Human adenovirus C
gcugcagagccagc

SEQ ID NO: 3908357 - RNA, 13 nt, Human adenovirus C
gcugccagggccg

SEQ ID NO: 3908358 - RNA, 23 nt, Human adenovirus C
gcugcccugguguaccaggaaag

SEQ ID NO: 3908359 - RNA, 15 nt, Human adenovirus C
gcugccgccaugggc

SEQ ID NO: 3908360 - RNA, 21 nt, Human adenovirus C
gcugccuguaucacaaaagcg

SEQ ID NO: 3908361 - RNA, 12 nt, Human adenovirus C
gcugcugagccg

SEQ ID NO: 3908362 - RNA, 18 nt, Human adenovirus C
gcuggagcugcccaagac

SEQ ID NO: 3908363 - RNA, 21 nt, Human adenovirus C
gcuggaugugaccgaggagcu

SEQ ID NO: 3908364 - RNA, 19 nt, Human adenovirus C
gcuggccagggugcgcuug

SEQ ID NO: 3908365 - RNA, 23 nt, Human adenovirus C
gcugggaagaaagcagguuccug

SEQ ID NO: 3908366 - RNA, 15 nt, Human adenovirus C
gcuggggcaggagga

SEQ ID NO: 3908367 - RNA, 13 nt, Human adenovirus C
gcuggucucugga

SEQ ID NO: 3908368 - RNA, 14 nt, Human adenovirus C
gcuggugcugcgcg

SEQ ID NO: 3908369 - RNA, 20 nt, Human adenovirus C
gcugugccuuuuacugcugc

SEQ ID NO: 3908370 - RNA, 14 nt, Human adenovirus C
gcuguugcccgugc

SEQ ID NO: 3908371 - RNA, 15 nt, Human adenovirus C
gcuugcgggcggcuu

SEQ ID NO: 3908372 - RNA, 13 nt, Human adenovirus C
gcuuucagggaca

SEQ ID NO: 3908373 - RNA, 17 nt, Human adenovirus C
gcuuuccaagauggcua

SEQ ID NO: 3908374 - RNA, 17 nt, Human adenovirus C
ggaaagacgguggugcg

SEQ ID NO: 3908375 - RNA, 20 nt, Human adenovirus C
ggaaagcuuccgcaggccaa

SEQ ID NO: 3908376 - RNA, 18 nt, Human adenovirus C
ggaaaugcguggaagaac

SEQ ID NO: 3908377 - RNA, 13 nt, Human adenovirus C
ggaacaaaccgaa

SEQ ID NO: 3908378 - RNA, 21 nt, Human adenovirus C
ggaacgcggguuuggcagggc

SEQ ID NO: 3908379 - RNA, 19 nt, Human adenovirus C
ggaacggggccgaggugga

SEQ ID NO: 3908380 - RNA, 20 nt, Human adenovirus C
ggaagaaagcagguuccuga

SEQ ID NO: 3908381 - RNA, 19 nt, Human adenovirus C
ggaagaugaagaugaagaa

SEQ ID NO: 3908382 - RNA, 14 nt, Human adenovirus C
ggaagccaugcuca

SEQ ID NO: 3908383 - RNA, 17 nt, Human adenovirus C
ggaauccgcgcccaccg

SEQ ID NO: 3908384 - RNA, 21 nt, Human adenovirus C
ggaauuugaagagcuuuugaa

SEQ ID NO: 3908385 - RNA, 21 nt, Human adenovirus C
ggacaaacagguggagcugaa

SEQ ID NO: 3908386 - RNA, 18 nt, Human adenovirus C
ggacaaccccagacccau

SEQ ID NO: 3908387 - RNA, 20 nt, Human adenovirus C
ggacaaccccagacccaucu

SEQ ID NO: 3908388 - RNA, 12 nt, Human adenovirus C
ggacaccuccca

SEQ ID NO: 3908389 - RNA, 12 nt, Human adenovirus C
ggacauaaacau

SEQ ID NO: 3908390 - RNA, 13 nt, Human adenovirus C
ggaccaccacgcc

SEQ ID NO: 3908391 - RNA, 17 nt, Human adenovirus C
ggaccccauggcauggg

SEQ ID NO: 3908392 - RNA, 13 nt, Human adenovirus C
ggacccuggugcu

SEQ ID NO: 3908393 - RNA, 13 nt, Human adenovirus C
ggaccugagcgag

SEQ ID NO: 3908394 - RNA, 18 nt, Human adenovirus C
ggacugguuccuggugca

SEQ ID NO: 3908395 - RNA, 14 nt, Human adenovirus C
ggagcgaggagguc

SEQ ID NO: 3908396 - RNA, 22 nt, Human adenovirus C
ggagcucccgcggcgacagguc

SEQ ID NO: 3908397 - RNA, 16 nt, Human adenovirus C
ggagcugcccaagacu

SEQ ID NO: 3908398 - RNA, 14 nt, Human adenovirus C
ggagcugcugagcc

SEQ ID NO: 3908399 - RNA, 13 nt, Human adenovirus C
ggaggaagccagg

SEQ ID NO: 3908400 - RNA, 17 nt, Human adenovirus C
ggaggaauacugggaca

SEQ ID NO: 3908401 - RNA, 18 nt, Human adenovirus C
ggaggaauacugggacag

SEQ ID NO: 3908402 - RNA, 17 nt, Human adenovirus C
ggaggacuuugagcccg

SEQ ID NO: 3908403 - RNA, 13 nt, Human adenovirus C
ggaggaggagcgc

SEQ ID NO: 3908404 - RNA, 11 nt, Human adenovirus C
ggaggaggcgc

SEQ ID NO: 3908405 - RNA, 14 nt, Human adenovirus C
ggagggccuacccg

SEQ ID NO: 3908406 - RNA, 14 nt, Human adenovirus C
ggaggggcaacauc

SEQ ID NO: 3908407 - RNA, 17 nt, Human adenovirus C
ggaucuuaugccaggcc

SEQ ID NO: 3908408 - RNA, 13 nt, Human adenovirus C
ggauggcgcaggc

SEQ ID NO: 3908409 - RNA, 13 nt, Human adenovirus C
ggaugggugcaua

SEQ ID NO: 3908410 - RNA, 17 nt, Human adenovirus C
ggaugucaaauuccuca

SEQ ID NO: 3908411 - RNA, 15 nt, Human adenovirus C
ggcaaccugggcucc

SEQ ID NO: 3908412 - RNA, 16 nt, Human adenovirus C
ggcaacgucggcggcg

SEQ ID NO: 3908413 - RNA, 19 nt, Human adenovirus C
ggcacccccgcuugaggag

SEQ ID NO: 3908414 - RNA, 17 nt, Human adenovirus C
ggcacgucggcgccgcg

SEQ ID NO: 3908415 - RNA, 20 nt, Human adenovirus C
ggcacuaaagcaaggccugc

SEQ ID NO: 3908416 - RNA, 23 nt, Human adenovirus C
ggcacuaccuggacuuggaggag

SEQ ID NO: 3908417 - RNA, 20 nt, Human adenovirus C
ggcacucuuccguggucugg

SEQ ID NO: 3908418 - RNA, 19 nt, Human adenovirus C
ggcagaaacagagggcugc

SEQ ID NO: 3908419 - RNA, 14 nt, Human adenovirus C
ggcagaagcugccg

SEQ ID NO: 3908420 - RNA, 15 nt, Human adenovirus C
ggcagaagcugccgc

SEQ ID NO: 3908421 - RNA, 20 nt, Human adenovirus C
ggcagaugccgcggugcagg

SEQ ID NO: 3908422 - RNA, 18 nt, Human adenovirus C
ggcagcaacagcagcggu

SEQ ID NO: 3908423 - RNA, 15 nt, Human adenovirus C
ggcagcaaggccugg

SEQ ID NO: 3908424 - RNA, 20 nt, Human adenovirus C
ggcaguggucuccucagcga

SEQ ID NO: 3908425 - RNA, 15 nt, Human adenovirus C
ggcauaagcccgucu

SEQ ID NO: 3908426 - RNA, 15 nt, Human adenovirus C
ggcauagucucgccg

SEQ ID NO: 3908427 - RNA, 19 nt, Human adenovirus C
ggcaugcgucgugcgcacc

SEQ ID NO: 3908428 - RNA, 15 nt, Human adenovirus C
ggcauggagacacaa

SEQ ID NO: 3908429 - RNA, 18 nt, Human adenovirus C
ggccaagaacaagagcug

SEQ ID NO: 3908430 - RNA, 14 nt, Human adenovirus C
ggccacuacccgga

SEQ ID NO: 3908431 - RNA, 16 nt, Human adenovirus C
ggccagaugcugaggg

SEQ ID NO: 3908432 - RNA, 18 nt, Human adenovirus C
ggccagcacgaaggaggc

SEQ ID NO: 3908433 - RNA, 20 nt, Human adenovirus C
ggccauauuuuuugggcacc

SEQ ID NO: 3908434 - RNA, 21 nt, Human adenovirus C
ggccaugggcguguggcagca

SEQ ID NO: 3908435 - RNA, 18 nt, Human adenovirus C
ggcccacaacacggccuc

SEQ ID NO: 3908436 - RNA, 12 nt, Human adenovirus C
ggcccacgggcg

SEQ ID NO: 3908437 - RNA, 16 nt, Human adenovirus C
ggcccauuacaguguc

SEQ ID NO: 3908438 - RNA, 18 nt, Human adenovirus C
ggcccgcugcccuggugu

SEQ ID NO: 3908439 - RNA, 17 nt, Human adenovirus C
ggcccguagccaguggc

SEQ ID NO: 3908440 - RNA, 14 nt, Human adenovirus C
ggccgaagaggugu

SEQ ID NO: 3908441 - RNA, 12 nt, Human adenovirus C
ggccgccagagc

SEQ ID NO: 3908442 - RNA, 14 nt, Human adenovirus C
ggccgccagagcuu

SEQ ID NO: 3908443 - RNA, 16 nt, Human adenovirus C
ggccgccgcagcagcc

SEQ ID NO: 3908444 - RNA, 14 nt, Human adenovirus C
ggccgccuguggac

SEQ ID NO: 3908445 - RNA, 17 nt, Human adenovirus C
ggccgcgggcugggugu

SEQ ID NO: 3908446 - RNA, 20 nt, Human adenovirus C
ggccgcucgaaggcuggccg

SEQ ID NO: 3908447 - RNA, 12 nt, Human adenovirus C
ggccggacaggc

SEQ ID NO: 3908448 - RNA, 23 nt, Human adenovirus C
ggccggaccugggcuggcggugg

SEQ ID NO: 3908449 - RNA, 17 nt, Human adenovirus C
ggccgucuacucccagc

SEQ ID NO: 3908450 - RNA, 18 nt, Human adenovirus C
ggccguggagacaguguc

SEQ ID NO: 3908451 - RNA, 12 nt, Human adenovirus C
ggccuacccgca

SEQ ID NO: 3908452 - RNA, 23 nt, Human adenovirus C
ggccuaucauugugcucaaccca

SEQ ID NO: 3908453 - RNA, 13 nt, Human adenovirus C
ggccuccccuucu

SEQ ID NO: 3908454 - RNA, 20 nt, Human adenovirus C
ggccuugcaggcgcagagac

SEQ ID NO: 3908455 - RNA, 22 nt, Human adenovirus C
ggccuugcaggcgcagagacac

SEQ ID NO: 3908456 - RNA, 19 nt, Human adenovirus C
ggcgaaucucaguggaacg

SEQ ID NO: 3908457 - RNA, 20 nt, Human adenovirus C
ggcgaccggauagcaagacu

SEQ ID NO: 3908458 - RNA, 16 nt, Human adenovirus C
ggcgacgaggaccugc

SEQ ID NO: 3908459 - RNA, 14 nt, Human adenovirus C
ggcgaggcgcgccg

SEQ ID NO: 3908460 - RNA, 16 nt, Human adenovirus C
ggcgaggcgcgccgcg

SEQ ID NO: 3908461 - RNA, 19 nt, Human adenovirus C
ggcgaguacuaagcgguga

SEQ ID NO: 3908462 - RNA, 20 nt, Human adenovirus C
ggcgauggagcgcaggguuu

SEQ ID NO: 3908463 - RNA, 17 nt, Human adenovirus C
ggcgcaccgggaggcgg

SEQ ID NO: 3908464 - RNA, 15 nt, Human adenovirus C
ggcgcagagacacug

SEQ ID NO: 3908465 - RNA, 14 nt, Human adenovirus C
ggcgcagcgugagc

SEQ ID NO: 3908466 - RNA, 15 nt, Human adenovirus C
ggcgcagcgugagcg

SEQ ID NO: 3908467 - RNA, 15 nt, Human adenovirus C
ggcgcaguuggaaga

SEQ ID NO: 3908468 - RNA, 23 nt, Human adenovirus C
ggcgccgcgcgcgggcaggagcu

SEQ ID NO: 3908469 - RNA, 16 nt, Human adenovirus C
ggcgccgugcccggaa

SEQ ID NO: 3908470 - RNA, 17 nt, Human adenovirus C
ggcgcgcacaaacgcgg

SEQ ID NO: 3908471 - RNA, 14 nt, Human adenovirus C
ggcgcgcugcggcu

SEQ ID NO: 3908472 - RNA, 20 nt, Human adenovirus C
ggcgcggaagagaacuccaa

SEQ ID NO: 3908473 - RNA, 16 nt, Human adenovirus C
ggcgcggcggcugcug

SEQ ID NO: 3908474 - RNA, 13 nt, Human adenovirus C
cccagcgccaaaa

SEQ ID NO: 3908475 - RNA, 18 nt, Human adenovirus C
cccagcguggcgcuggac

SEQ ID NO: 3908476 - RNA, 22 nt, Human adenovirus C
cccaggcaaaguuagucugcag

SEQ ID NO: 3908477 - RNA, 15 nt, Human adenovirus C
cccaggcuggggaga

SEQ ID NO: 3908478 - RNA, 20 nt, Human adenovirus C
cccauggcauggggugggug

SEQ ID NO: 3908479 - RNA, 15 nt, Human adenovirus C
ccccaggcuggggag

SEQ ID NO: 3908480 - RNA, 18 nt, Human adenovirus C
ccccagguacagcccacc

SEQ ID NO: 3908481 - RNA, 13 nt, Human adenovirus C
ccccccaggucca

SEQ ID NO: 3908482 - RNA, 19 nt, Human adenovirus C
cccccgcugacacccagca

SEQ ID NO: 3908483 - RNA, 12 nt, Human adenovirus C
cccccuccucag

SEQ ID NO: 3908484 - RNA, 15 nt, Human adenovirus C
ccccgcugacaccca

SEQ ID NO: 3908485 - RNA, 18 nt, Human adenovirus C
ccccgggcagcaggcgcg

SEQ ID NO: 3908486 - RNA, 16 nt, Human adenovirus C
ccccgggcuggugcag

SEQ ID NO: 3908487 - RNA, 18 nt, Human adenovirus C
ccccgggcuggugcaguu

SEQ ID NO: 3908488 - RNA, 22 nt, Human adenovirus C
ccccuacugcaccggcggcagc

SEQ ID NO: 3908489 - RNA, 13 nt, Human adenovirus C
ccccuccgcggcg

SEQ ID NO: 3908490 - RNA, 22 nt, Human adenovirus C
ccccuucccugggaucaggcua

SEQ ID NO: 3908491 - RNA, 20 nt, Human adenovirus C
ccccuuugaguucgccacca

SEQ ID NO: 3908492 - RNA, 22 nt, Human adenovirus C
cccgacgccgaaccaccacugg

SEQ ID NO: 3908493 - RNA, 16 nt, Human adenovirus C
cccgcaccaggugcag

SEQ ID NO: 3908494 - RNA, 22 nt, Human adenovirus C
cccgcggcgacaggucaggcgg

SEQ ID NO: 3908495 - RNA, 17 nt, Human adenovirus C
cccgcggcgccgggccc

SEQ ID NO: 3908496 - RNA, 13 nt, Human adenovirus C
cccgcucccacca

SEQ ID NO: 3908497 - RNA, 20 nt, Human adenovirus C
cccgcuugcaaauuccuccg

SEQ ID NO: 3908498 - RNA, 22 nt, Human adenovirus C
cccggaauugcauccguggccu

SEQ ID NO: 3908499 - RNA, 14 nt, Human adenovirus C
cccggagguagggg

SEQ ID NO: 3908500 - RNA, 14 nt, Human adenovirus C
cccggccacuaccc

SEQ ID NO: 3908501 - RNA, 17 nt, Human adenovirus C
cccgggcuggugcaguu

SEQ ID NO: 3908502 - RNA, 19 nt, Human adenovirus C
cccggugagcgcuccaccc

SEQ ID NO: 3908503 - RNA, 15 nt, Human adenovirus C
cccggugccgggauu

SEQ ID NO: 3908504 - RNA, 24 nt, Human adenovirus C
cccuaacaguggcaaccaccgcuc

SEQ ID NO: 3908505 - RNA, 19 nt, Human adenovirus C
cccuagacaaggccggaaa

SEQ ID NO: 3908506 - RNA, 16 nt, Human adenovirus C
cccuaucagcagccgc

SEQ ID NO: 3908507 - RNA, 21 nt, Human adenovirus C
cccuauguaagcuuguugcau

SEQ ID NO: 3908508 - RNA, 14 nt, Human adenovirus C
cccuccgcggcgug

SEQ ID NO: 3908509 - RNA, 13 nt, Human adenovirus C
cccucuuccuccc

SEQ ID NO: 3908510 - RNA, 18 nt, Human adenovirus C
cccugcaaacaucagccc

SEQ ID NO: 3908511 - RNA, 17 nt, Human adenovirus C
cccugggaucaggcuac

SEQ ID NO: 3908512 - RNA, 13 nt, Human adenovirus C
cccuguggaccgc

SEQ ID NO: 3908513 - RNA, 22 nt, Human adenovirus C
cccuuacuacaccuacucuggc

SEQ ID NO: 3908514 - RNA, 13 nt, Human adenovirus C
cccuucccuggga

SEQ ID NO: 3908515 - RNA, 20 nt, Human adenovirus C
cccuuggaggaggcgccgca

SEQ ID NO: 3908516 - RNA, 19 nt, Human adenovirus C
ccgaagauagcggccgggc

SEQ ID NO: 3908517 - RNA, 21 nt, Human adenovirus C
ccgacacgguuaacuccuccu

SEQ ID NO: 3908518 - RNA, 11 nt, Human adenovirus C
ccgacuggcca

SEQ ID NO: 3908519 - RNA, 16 nt, Human adenovirus C
ccgaggaagaaugcac

SEQ ID NO: 3908520 - RNA, 19 nt, Human adenovirus C
ccgagggccgcuggcugcu

SEQ ID NO: 3908521 - RNA, 17 nt, Human adenovirus C
ccgaggucgagaagccu

SEQ ID NO: 3908522 - RNA, 13 nt, Human adenovirus C
ccgagguggagau

SEQ ID NO: 3908523 - RNA, 17 nt, Human adenovirus C
ccgagguugcuacgggc

SEQ ID NO: 3908524 - RNA, 22 nt, Human adenovirus C
ccgauguaaggguucggggcug

SEQ ID NO: 3908525 - RNA, 20 nt, Human adenovirus C
ccgauuuccgugcgcagggu

SEQ ID NO: 3908526 - RNA, 17 nt, Human adenovirus C
ccgcaacuucagacugg

SEQ ID NO: 3908527 - RNA, 22 nt, Human adenovirus C
ccgcacgaggggcagugcagac

SEQ ID NO: 3908528 - RNA, 19 nt, Human adenovirus C
ccgcacugggcgcaccacc

SEQ ID NO: 3908529 - RNA, 17 nt, Human adenovirus C
ccgcauaccccgcgcca

SEQ ID NO: 3908530 - RNA, 19 nt, Human adenovirus C
ccgccagaggagcugcuga

SEQ ID NO: 3908531 - RNA, 15 nt, Human adenovirus C
ccgcccgcgccugcu

SEQ ID NO: 3908532 - RNA, 12 nt, Human adenovirus C
ccgccgccgcag

SEQ ID NO: 3908533 - RNA, 14 nt, Human adenovirus C
ccgccgggagaggg

SEQ ID NO: 3908534 - RNA, 23 nt, Human adenovirus C
ccgccucgggcaaaacgugcuuc

SEQ ID NO: 3908535 - RNA, 14 nt, Human adenovirus C
ccgccugcugcacg

SEQ ID NO: 3908536 - RNA, 23 nt, Human adenovirus C
ccgcgcaccuggcggacauuauc

SEQ ID NO: 3908537 - RNA, 19 nt, Human adenovirus C
ccgcggcgugcuggacagg

SEQ ID NO: 3908538 - RNA, 18 nt, Human adenovirus C
ccgcgguugugcagggug

SEQ ID NO: 3908539 - RNA, 19 nt, Human adenovirus C
ccgcguccaucuggucaga

SEQ ID NO: 3908540 - RNA, 18 nt, Human adenovirus C
ccgcguccggcucgcucc

SEQ ID NO: 3908541 - RNA, 12 nt, Human adenovirus C
ccgcuacgugcc

SEQ ID NO: 3908542 - RNA, 18 nt, Human adenovirus C
ccgcucauggacccuccu

SEQ ID NO: 3908543 - RNA, 19 nt, Human adenovirus C
ccggaaaccucaccuccca

SEQ ID NO: 3908544 - RNA, 22 nt, Human adenovirus C
ccggaccaguuuauucccaacu

SEQ ID NO: 3908545 - RNA, 15 nt, Human adenovirus C
ccggcaaggcaaugc

SEQ ID NO: 3908546 - RNA, 13 nt, Human adenovirus C
ccggccgacgggc

SEQ ID NO: 3908547 - RNA, 13 nt, Human adenovirus C
ccggcgccagcac

SEQ ID NO: 3908548 - RNA, 14 nt, Human adenovirus C
ccggcggcagcggc

SEQ ID NO: 3908549 - RNA, 17 nt, Human adenovirus C
cgucagcggggucuggu

SEQ ID NO: 3908550 - RNA, 21 nt, Human adenovirus C
cgucauaguuguguuccagga

SEQ ID NO: 3908551 - RNA, 17 nt, Human adenovirus C
cgucaugcacgcagcac

SEQ ID NO: 3908552 - RNA, 18 nt, Human adenovirus C
cgucauuacccagggcca

SEQ ID NO: 3908553 - RNA, 12 nt, Human adenovirus C
cguccgagcgag

SEQ ID NO: 3908554 - RNA, 19 nt, Human adenovirus C
cguccuaucgagccgcacu

SEQ ID NO: 3908555 - RNA, 16 nt, Human adenovirus C
cgucgccagcccgugc

SEQ ID NO: 3908556 - RNA, 22 nt, Human adenovirus C
cgucgccagcccgugcuggccc

SEQ ID NO: 3908557 - RNA, 15 nt, Human adenovirus C
cgucggcgccgcgcg

SEQ ID NO: 3908558 - RNA, 16 nt, Human adenovirus C
cgucugaagacaccuu

SEQ ID NO: 3908559 - RNA, 12 nt, Human adenovirus C
cgucuggcugcu

SEQ ID NO: 3908560 - RNA, 12 nt, Human adenovirus C
cgugacacugca

SEQ ID NO: 3908561 - RNA, 16 nt, Human adenovirus C
cgugacacugcagcag

SEQ ID NO: 3908562 - RNA, 20 nt, Human adenovirus C
cgugaggguagacuggaagu

SEQ ID NO: 3908563 - RNA, 19 nt, Human adenovirus C
cgugcagaccaaccuggac

SEQ ID NO: 3908564 - RNA, 20 nt, Human adenovirus C
cgugcccaucuccaucccau

SEQ ID NO: 3908565 - RNA, 16 nt, Human adenovirus C
cgugcgcaccaccggc

SEQ ID NO: 3908566 - RNA, 17 nt, Human adenovirus C
cgugcgcaggguggcuc

SEQ ID NO: 3908567 - RNA, 21 nt, Human adenovirus C
cgugcgcaguacuggcagcgg

SEQ ID NO: 3908568 - RNA, 18 nt, Human adenovirus C
cgugcugaaacgcagcau

SEQ ID NO: 3908569 - RNA, 14 nt, Human adenovirus C
cguggagccugggc

SEQ ID NO: 3908570 - RNA, 15 nt, Human adenovirus C
cguggagccugggcu

SEQ ID NO: 3908571 - RNA, 19 nt, Human adenovirus C
cguggcccuuggcgcgcag

SEQ ID NO: 3908572 - RNA, 24 nt, Human adenovirus C
cguggcccuuggcgcgcagcuugc

SEQ ID NO: 3908573 - RNA, 16 nt, Human adenovirus C
cguggccuugcaggcg

SEQ ID NO: 3908574 - RNA, 21 nt, Human adenovirus C
cguggccuugcaggcgcagag

SEQ ID NO: 3908575 - RNA, 20 nt, Human adenovirus C
cguggcgaaaagcguccgcg

SEQ ID NO: 3908576 - RNA, 12 nt, Human adenovirus C
cguggcgcagcg

SEQ ID NO: 3908577 - RNA, 15 nt, Human adenovirus C
cguggcuuaagggug

SEQ ID NO: 3908578 - RNA, 20 nt, Human adenovirus C
cguucaugggaaacuggcaa

SEQ ID NO: 3908579 - RNA, 19 nt, Human adenovirus C
cguucucgcgggggcgcag

SEQ ID NO: 3908580 - RNA, 18 nt, Human adenovirus C
cguuggagacugcagccu

SEQ ID NO: 3908581 - RNA, 16 nt, Human adenovirus C
cguuucagccccccgg

SEQ ID NO: 3908582 - RNA, 14 nt, Human adenovirus C
cuaaaaaacuggaa

SEQ ID NO: 3908583 - RNA, 21 nt, Human adenovirus C
cuaaaccuaugauacuuacca

SEQ ID NO: 3908584 - RNA, 13 nt, Human adenovirus C
cuaaagcccguga

SEQ ID NO: 3908585 - RNA, 12 nt, Human adenovirus C
cuaaagcggguc

SEQ ID NO: 3908586 - RNA, 20 nt, Human adenovirus C
cuaaaggggguaaagaggga

SEQ ID NO: 3908587 - RNA, 22 nt, Human adenovirus C
cuaacaguggcaaccaccgcuc

SEQ ID NO: 3908588 - RNA, 22 nt, Human adenovirus C
cuaacauaaacacacaauaaau

SEQ ID NO: 3908589 - RNA, 16 nt, Human adenovirus C
cuaacucaggggcgca

SEQ ID NO: 3908590 - RNA, 15 nt, Human adenovirus C
cuacaacaaacagag

SEQ ID NO: 3908591 - RNA, 12 nt, Human adenovirus C
cuacaccagugu

SEQ ID NO: 3908592 - RNA, 12 nt, Human adenovirus C
cuacaccuaccg

SEQ ID NO: 3908593 - RNA, 20 nt, Human adenovirus C
cuacacgcccacgccgccac

SEQ ID NO: 3908594 - RNA, 23 nt, Human adenovirus C
cuacagcccgggggaggcaagca

SEQ ID NO: 3908595 - RNA, 12 nt, Human adenovirus C
cuacaggggccu

SEQ ID NO: 3908596 - RNA, 21 nt, Human adenovirus C
cuacaugagcgcgggacccca

SEQ ID NO: 3908597 - RNA, 17 nt, Human adenovirus C
cuacauugcccaggaau

SEQ ID NO: 3908598 - RNA, 12 nt, Human adenovirus C
cuacccccggcu

SEQ ID NO: 3908599 - RNA, 22 nt, Human adenovirus C
cuaccccguauuugccgugcca

SEQ ID NO: 3908600 - RNA, 20 nt, Human adenovirus C
cuacccgacgccgaaccacc

SEQ ID NO: 3908601 - RNA, 20 nt, Human adenovirus C
cuaccgcgucaggaggggca

SEQ ID NO: 3908602 - RNA, 15 nt, Human adenovirus C
cuaccggagugcugg

SEQ ID NO: 3908603 - RNA, 16 nt, Human adenovirus C
cuaccggagugcuggg

SEQ ID NO: 3908604 - RNA, 17 nt, Human adenovirus C
cuaccggagugcugggc

SEQ ID NO: 3908605 - RNA, 19 nt, Human adenovirus C
cuaccggagugcugggcca

SEQ ID NO: 3908606 - RNA, 17 nt, Human adenovirus C
cuacgucaucuccagcg

SEQ ID NO: 3908607 - RNA, 21 nt, Human adenovirus C
cuacgucaucuccagcggcca

SEQ ID NO: 3908608 - RNA, 20 nt, Human adenovirus C
cuacgugcccuuucacauuc

SEQ ID NO: 3908609 - RNA, 18 nt, Human adenovirus C
cuacuccgagaccaugac

SEQ ID NO: 3908610 - RNA, 21 nt, Human adenovirus C
cuacuugcaucgcgcggccgc

SEQ ID NO: 3908611 - RNA, 16 nt, Human adenovirus C
cuagacgaagcuuccg

SEQ ID NO: 3908612 - RNA, 20 nt, Human adenovirus C
cuagcauuaaguuugacagc

SEQ ID NO: 3908613 - RNA, 14 nt, Human adenovirus C
cuagcccugcaaac

SEQ ID NO: 3908614 - RNA, 20 nt, Human adenovirus C
cuagcgagguaagcacuuac

SEQ ID NO: 3908615 - RNA, 19 nt, Human adenovirus C
cuagcgccugcugccaugc

SEQ ID NO: 3908616 - RNA, 23 nt, Human adenovirus C
cuagcuacuguagcugcuuuggc

SEQ ID NO: 3908617 - RNA, 15 nt, Human adenovirus C
cuagcucccaagggc

SEQ ID NO: 3908618 - RNA, 22 nt, Human adenovirus C
cuaggggguccacucgcuccag

SEQ ID NO: 3908619 - RNA, 17 nt, Human adenovirus C
cuaggucacuugcugac

SEQ ID NO: 3908620 - RNA, 19 nt, Human adenovirus C
cuaggucacuugcugacac

SEQ ID NO: 3908621 - RNA, 13 nt, Human adenovirus C
cuaucagcagccg

SEQ ID NO: 3908622 - RNA, 14 nt, Human adenovirus C
cuauguaaacuccu

SEQ ID NO: 3908623 - RNA, 18 nt, Human adenovirus C
cuauguggaaucaggcug

SEQ ID NO: 3908624 - RNA, 16 nt, Human adenovirus C
cuauguucccagccau

SEQ ID NO: 3908625 - RNA, 15 nt, Human adenovirus C
cuauuaaaaaacacc

SEQ ID NO: 3908626 - RNA, 19 nt, Human adenovirus C
cuauuaccggcugcaacug

SEQ ID NO: 3908627 - RNA, 16 nt, Human adenovirus C
cuauucugcugcaugu

SEQ ID NO: 3908628 - RNA, 13 nt, Human adenovirus C
cucaaaagcgggc

SEQ ID NO: 3908629 - RNA, 20 nt, Human adenovirus C
cucaaaggcuacaggggccu

SEQ ID NO: 3908630 - RNA, 20 nt, Human adenovirus C
cucaacucccggaacucagg

SEQ ID NO: 3908631 - RNA, 13 nt, Human adenovirus C
cucaccaaggcca

SEQ ID NO: 3908632 - RNA, 15 nt, Human adenovirus C
cucaccaaggccaug

SEQ ID NO: 3908633 - RNA, 15 nt, Human adenovirus C
cucaccacccaggua

SEQ ID NO: 3908634 - RNA, 18 nt, Human adenovirus C
cucacuuaaaucagcaca

SEQ ID NO: 3908635 - RNA, 22 nt, Human adenovirus C
cucagcgaccgcgagcugaugc

SEQ ID NO: 3908636 - RNA, 15 nt, Human adenovirus C
cucagcgccucccaa

SEQ ID NO: 3908637 - RNA, 21 nt, Human adenovirus C
cucaggauuacaagcuccucc

SEQ ID NO: 3908638 - RNA, 22 nt, Human adenovirus C
cucaggcgccgccggcacugcc

SEQ ID NO: 3908639 - RNA, 12 nt, Human adenovirus C
cucaucugcagc

SEQ ID NO: 3908640 - RNA, 15 nt, Human adenovirus C
cuccagcggccacac

SEQ ID NO: 3908641 - RNA, 17 nt, Human adenovirus C
cuccauggucgggacgc

SEQ ID NO: 3908642 - RNA, 19 nt, Human adenovirus C
cucccauggaucacaaccc

SEQ ID NO: 3908643 - RNA, 18 nt, Human adenovirus C
cucccgccaccaguugga

SEQ ID NO: 3908644 - RNA, 19 nt, Human adenovirus C
cucccggaacucaggucaa

SEQ ID NO: 3908645 - RNA, 16 nt, Human adenovirus C
cucccggccacuaccc

SEQ ID NO: 3908646 - RNA, 15 nt, Human adenovirus C
cucccucguacgagg

SEQ ID NO: 3908647 - RNA, 15 nt, Human adenovirus C
cucccuugccgugcu

SEQ ID NO: 3908648 - RNA, 13 nt, Human adenovirus C
cuccggcacugcc

SEQ ID NO: 3908649 - RNA, 14 nt, Human adenovirus C
cuccgggcugcgcg

SEQ ID NO: 3908650 - RNA, 20 nt, Human adenovirus C
cuccguggccgcgcaccugg

SEQ ID NO: 3908651 - RNA, 17 nt, Human adenovirus C
cuccuaacuccugugag

SEQ ID NO: 3908652 - RNA, 14 nt, Human adenovirus C
cuccuccuccugcc

SEQ ID NO: 3908653 - RNA, 14 nt, Human adenovirus C
cuccugccaggcuc

SEQ ID NO: 3908654 - RNA, 21 nt, Human adenovirus C
cuccugcgccguagcgccauu

SEQ ID NO: 3908655 - RNA, 16 nt, Human adenovirus C
accgugcagcugaugg

SEQ ID NO: 3908656 - RNA, 17 nt, Human adenovirus C
accguggagccugggcu

SEQ ID NO: 3908657 - RNA, 18 nt, Human adenovirus C
accguggagccugggcug

SEQ ID NO: 3908658 - RNA, 15 nt, Human adenovirus C
accguggcgggcggc

SEQ ID NO: 3908659 - RNA, 20 nt, Human adenovirus C
accgugucuagcuugcugac

SEQ ID NO: 3908660 - RNA, 23 nt, Human adenovirus C
accgugugcuugauauggcuucc

SEQ ID NO: 3908661 - RNA, 21 nt, Human adenovirus C
accuaaacaacucgcugcugc

SEQ ID NO: 3908662 - RNA, 21 nt, Human adenovirus C
accuacgacuacaugaacaag

SEQ ID NO: 3908663 - RNA, 13 nt, Human adenovirus C
accuacucuggcu

SEQ ID NO: 3908664 - RNA, 14 nt, Human adenovirus C
accuacucuggcuc

SEQ ID NO: 3908665 - RNA, 18 nt, Human adenovirus C
accuaugacaagcgcuuu

SEQ ID NO: 3908666 - RNA, 19 nt, Human adenovirus C
accuaugauacuuaccauu

SEQ ID NO: 3908667 - RNA, 20 nt, Human adenovirus C
accucaggcgcccuaacagu

SEQ ID NO: 3908668 - RNA, 23 nt, Human adenovirus C
accuccgcuccucaggcgccgcc

SEQ ID NO: 3908669 - RNA, 17 nt, Human adenovirus C
accuccuccuccugcca

SEQ ID NO: 3908670 - RNA, 21 nt, Human adenovirus C
accuccuccuccugccaggcu

SEQ ID NO: 3908671 - RNA, 20 nt, Human adenovirus C
accucgaccacugccgccgc

SEQ ID NO: 3908672 - RNA, 18 nt, Human adenovirus C
accucuuugagcccuuug

SEQ ID NO: 3908673 - RNA, 15 nt, Human adenovirus C
accugcuugagcagg

SEQ ID NO: 3908674 - RNA, 20 nt, Human adenovirus C
accuggccaaccaggcagug

SEQ ID NO: 3908675 - RNA, 12 nt, Human adenovirus C
accugggcggcg

SEQ ID NO: 3908676 - RNA, 13 nt, Human adenovirus C
accugggcggcga

SEQ ID NO: 3908677 - RNA, 13 nt, Human adenovirus C
accugggcuggcg

SEQ ID NO: 3908678 - RNA, 17 nt, Human adenovirus C
accuguaacgcuggacc

SEQ ID NO: 3908679 - RNA, 14 nt, Human adenovirus C
accugugcugccag

SEQ ID NO: 3908680 - RNA, 14 nt, Human adenovirus C
accuuaaucaaacu

SEQ ID NO: 3908681 - RNA, 13 nt, Human adenovirus C
accuucacccagu

SEQ ID NO: 3908682 - RNA, 13 nt, Human adenovirus C
accuucuccuaca

SEQ ID NO: 3908683 - RNA, 17 nt, Human adenovirus C
accuuggggcgcgcugg

SEQ ID NO: 3908684 - RNA, 16 nt, Human adenovirus C
acgaaagccaaaaaac

SEQ ID NO: 3908685 - RNA, 14 nt, Human adenovirus C
acgaagccuuccau

SEQ ID NO: 3908686 - RNA, 20 nt, Human adenovirus C
acgagcauacuuuccaggag

SEQ ID NO: 3908687 - RNA, 21 nt, Human adenovirus C
acgaggaggaauacugggaca

SEQ ID NO: 3908688 - RNA, 17 nt, Human adenovirus C
acgaggaggcacuaaag

SEQ ID NO: 3908689 - RNA, 19 nt, Human adenovirus C
acgagguggaacugcugca

SEQ ID NO: 3908690 - RNA, 15 nt, Human adenovirus C
acgcacgaaggaggc

SEQ ID NO: 3908691 - RNA, 15 nt, Human adenovirus C
acgcagcaccuugcg

SEQ ID NO: 3908692 - RNA, 14 nt, Human adenovirus C
acgccaacuccgcc

SEQ ID NO: 3908693 - RNA, 12 nt, Human adenovirus C
acgccaagaaaa

SEQ ID NO: 3908694 - RNA, 23 nt, Human adenovirus C
acgccaccuguucucaccgcgcg

SEQ ID NO: 3908695 - RNA, 20 nt, Human adenovirus C
acgccccgcgccacgucaca

SEQ ID NO: 3908696 - RNA, 21 nt, Human adenovirus C
acgccuuccugaguacacagc

SEQ ID NO: 3908697 - RNA, 19 nt, Human adenovirus C
acgccuuugccaacuggcc

SEQ ID NO: 3908698 - RNA, 12 nt, Human adenovirus C
acgcgccagacc

SEQ ID NO: 3908699 - RNA, 17 nt, Human adenovirus C
acgcgcgagccugccga

SEQ ID NO: 3908700 - RNA, 17 nt, Human adenovirus C
acgcgcgcgcagccucc

SEQ ID NO: 3908701 - RNA, 14 nt, Human adenovirus C
acgcgcggcggcgg

SEQ ID NO: 3908702 - RNA, 15 nt, Human adenovirus C
acgcgcuccccuccg

SEQ ID NO: 3908703 - RNA, 20 nt, Human adenovirus C
acgcggguuuggcagggcga

SEQ ID NO: 3908704 - RNA, 19 nt, Human adenovirus C
acgcguugcaagagcgcag

SEQ ID NO: 3908705 - RNA, 18 nt, Human adenovirus C
acgcucgagaucaggcua

SEQ ID NO: 3908706 - RNA, 19 nt, Human adenovirus C
acgcugcccgagggcaacu

SEQ ID NO: 3908707 - RNA, 12 nt, Human adenovirus C
acgcugguggcu

SEQ ID NO: 3908708 - RNA, 18 nt, Human adenovirus C
acgcuuguggcgcgcgag

SEQ ID NO: 3908709 - RNA, 14 nt, Human adenovirus C
acggacaguggcag

SEQ ID NO: 3908710 - RNA, 18 nt, Human adenovirus C
acggccgcuacgugcccu

SEQ ID NO: 3908711 - RNA, 16 nt, Human adenovirus C
acggccuacuggagug

SEQ ID NO: 3908712 - RNA, 16 nt, Human adenovirus C
acggcgaguacuaagc

SEQ ID NO: 3908713 - RNA, 14 nt, Human adenovirus C
acgggcagccugga

SEQ ID NO: 3908714 - RNA, 17 nt, Human adenovirus C
acgggcagccuggaggc

SEQ ID NO: 3908715 - RNA, 11 nt, Human adenovirus C
acgggcgcagg

SEQ ID NO: 3908716 - RNA, 17 nt, Human adenovirus C
acgggcgcaggguccuc

SEQ ID NO: 3908717 - RNA, 17 nt, Human adenovirus C
acgggcgggcugcucug

SEQ ID NO: 3908718 - RNA, 19 nt, Human adenovirus C
acggggccgagguggagau

SEQ ID NO: 3908719 - RNA, 17 nt, Human adenovirus C
acgguuaacuccuccuc

SEQ ID NO: 3908720 - RNA, 20 nt, Human adenovirus C
acgucaucuccagcggccac

SEQ ID NO: 3908721 - RNA, 19 nt, Human adenovirus C
acgucgccaccgccgccga

SEQ ID NO: 3908722 - RNA, 17 nt, Human adenovirus C
acgugcccaucuccauc

SEQ ID NO: 3908723 - RNA, 15 nt, Human adenovirus C
acgugccgcggcaga

SEQ ID NO: 3908724 - RNA, 16 nt, Human adenovirus C
acguggcggccgccga

SEQ ID NO: 3908725 - RNA, 20 nt, Human adenovirus C
acuaaaccuaugauacuuac

SEQ ID NO: 3908726 - RNA, 14 nt, Human adenovirus C
acuacaugaacaag

SEQ ID NO: 3908727 - RNA, 20 nt, Human adenovirus C
acuacaugaacaagcgagug

SEQ ID NO: 3908728 - RNA, 21 nt, Human adenovirus C
acuacgucaucuccagcggcc

SEQ ID NO: 3908729 - RNA, 14 nt, Human adenovirus C
acuaggagacacuu

SEQ ID NO: 3908730 - RNA, 19 nt, Human adenovirus C
acucacguugugcauuguc

SEQ ID NO: 3908731 - RNA, 21 nt, Human adenovirus C
acucccauggaucacaacccc

SEQ ID NO: 3908732 - RNA, 23 nt, Human adenovirus C
acucccauuuuuccaaaacagga

SEQ ID NO: 3908733 - RNA, 23 nt, Human adenovirus C
acuccugcgccguagcgccauug

SEQ ID NO: 3908734 - RNA, 13 nt, Human adenovirus C
acucgcugcugca

SEQ ID NO: 3908735 - RNA, 17 nt, Human adenovirus C
acucggcagacgacagc

SEQ ID NO: 3908736 - RNA, 20 nt, Human adenovirus C
acucugguaucucagccgcc

SEQ ID NO: 3908737 - RNA, 20 nt, Human adenovirus C
acucuuccuuuuccucuugc

SEQ ID NO: 3908738 - RNA, 13 nt, Human adenovirus C
acugacgccagac

SEQ ID NO: 3908739 - RNA, 14 nt, Human adenovirus C
acugcaccggcggc

SEQ ID NO: 3908740 - RNA, 15 nt, Human adenovirus C
acugcagccuccgcc

SEQ ID NO: 3908741 - RNA, 19 nt, Human adenovirus C
acugcucgaucucuuccuc

SEQ ID NO: 3908742 - RNA, 21 nt, Human adenovirus C
acuggaacaaugacaguggag

SEQ ID NO: 3908743 - RNA, 22 nt, Human adenovirus C
acuggcaaagcacacugaacag

SEQ ID NO: 3908744 - RNA, 19 nt, Human adenovirus C
acuggcaccuuuuguucca

SEQ ID NO: 3908745 - RNA, 19 nt, Human adenovirus C
acuggccccaaacucccau

SEQ ID NO: 3908746 - RNA, 14 nt, Human adenovirus C
acugggacagccua

SEQ ID NO: 3908747 - RNA, 19 nt, Human adenovirus C
acuggggcuccugucgcca

SEQ ID NO: 3908748 - RNA, 18 nt, Human adenovirus C
acuggucguugccagaca

SEQ ID NO: 3908749 - RNA, 23 nt, Human adenovirus C
acuggucuugucaugccuggggu

SEQ ID NO: 3908750 - RNA, 11 nt, Human adenovirus C
acuuccagccc

SEQ ID NO: 3908751 - RNA, 20 nt, Human adenovirus C
acuucggcugcuuguccuug

SEQ ID NO: 3908752 - RNA, 13 nt, Human adenovirus C
acuucugugccuu

SEQ ID NO: 3908753 - RNA, 18 nt, Human adenovirus C
acuugcggcuggagcugc

SEQ ID NO: 3908754 - RNA, 20 nt, Human adenovirus C
acuugcggcuggagcugccc

SEQ ID NO: 3908755 - RNA, 21 nt, Human adenovirus C
acuuggcacccaccgugcagc

SEQ ID NO: 3908756 - RNA, 14 nt, Human adenovirus C
acuuggcgauggag

SEQ ID NO: 3908757 - RNA, 19 nt, Human adenovirus C
acuuucuccaaaguuuaaa

SEQ ID NO: 3908758 - RNA, 17 nt, Human adenovirus C
acuuugcgucucuggcc

SEQ ID NO: 3908759 - RNA, 15 nt, Human adenovirus C
agaaagaugaugaug

SEQ ID NO: 3908760 - RNA, 21 nt, Human adenovirus C
agaaauuuccuuuacuccaau

SEQ ID NO: 3908761 - RNA, 14 nt, Human adenovirus C
agaaccagauauuu

SEQ ID NO: 3908762 - RNA, 18 nt, Human adenovirus C
agaacgggguucuggaaa

SEQ ID NO: 3908763 - RNA, 22 nt, Human adenovirus C
agaacuccucacuuaaaaaaca

SEQ ID NO: 3908764 - RNA, 13 nt, Human adenovirus C
agacagaaacaca

SEQ ID NO: 3908765 - RNA, 22 nt, Human adenovirus C
agacagcuaugauccagauguu

SEQ ID NO: 3908766 - RNA, 19 nt, Human adenovirus C
agacaucauuuugcugcca

SEQ ID NO: 3908767 - RNA, 15 nt, Human adenovirus C
agaccaguagacaag

SEQ ID NO: 3908768 - RNA, 17 nt, Human adenovirus C
agaccgggauccgcuca

SEQ ID NO: 3908769 - RNA, 22 nt, Human adenovirus C
agaccgucugaagacaccuuca

SEQ ID NO: 3908770 - RNA, 14 nt, Human adenovirus C
agacgacagcagcg

SEQ ID NO: 3908771 - RNA, 13 nt, Human adenovirus C
agacggcggaggc

SEQ ID NO: 3908772 - RNA, 15 nt, Human adenovirus C
agacguugaagcugg

SEQ ID NO: 3908773 - RNA, 16 nt, Human adenovirus C
agacucggcggacggc

SEQ ID NO: 3908774 - RNA, 14 nt, Human adenovirus C
agcccuacuccggc

SEQ ID NO: 3908775 - RNA, 21 nt, Human adenovirus C
agccgccgccguuagcccaag

SEQ ID NO: 3908776 - RNA, 15 nt, Human adenovirus C
agccgccgugcgccc

SEQ ID NO: 3908777 - RNA, 20 nt, Human adenovirus C
agccgcggcaaugcagccgg

SEQ ID NO: 3908778 - RNA, 20 nt, Human adenovirus C
agccgcucauggcgcagcug

SEQ ID NO: 3908779 - RNA, 16 nt, Human adenovirus C
agccgcugcagccacc

SEQ ID NO: 3908780 - RNA, 12 nt, Human adenovirus C
agccggccugga

SEQ ID NO: 3908781 - RNA, 15 nt, Human adenovirus C
agccggugggcccgu

SEQ ID NO: 3908782 - RNA, 19 nt, Human adenovirus C
agccuccaugcccuucucc

SEQ ID NO: 3908783 - RNA, 14 nt, Human adenovirus C
agccucgccccccu

SEQ ID NO: 3908784 - RNA, 19 nt, Human adenovirus C
agccucgccccccuucucc

SEQ ID NO: 3908785 - RNA, 21 nt, Human adenovirus C
agccugcaaagggcccuggcu

SEQ ID NO: 3908786 - RNA, 22 nt, Human adenovirus C
agccugcaaagggcccuggcug

SEQ ID NO: 3908787 - RNA, 13 nt, Human adenovirus C
agccuggcugaca

SEQ ID NO: 3908788 - RNA, 21 nt, Human adenovirus C
agccuguaagcgggcacucuu

SEQ ID NO: 3908789 - RNA, 19 nt, Human adenovirus C
agcgaccgcgagcugaugc

SEQ ID NO: 3908790 - RNA, 11 nt, Human adenovirus C
agcgaggagga

SEQ ID NO: 3908791 - RNA, 21 nt, Human adenovirus C
agcgcagcuugagccuggcug

SEQ ID NO: 3908792 - RNA, 22 nt, Human adenovirus C
agcgcauccacaaggccgugag

SEQ ID NO: 3908793 - RNA, 16 nt, Human adenovirus C
agcgccagcgacugga

SEQ ID NO: 3908794 - RNA, 23 nt, Human adenovirus C
agcgccugauuucugccagcgcc

SEQ ID NO: 3908795 - RNA, 14 nt, Human adenovirus C
agcgcgcuggagca

SEQ ID NO: 3908796 - RNA, 17 nt, Human adenovirus C
agcgcggcgccaguggc

SEQ ID NO: 3908797 - RNA, 21 nt, Human adenovirus C
agcgcguaugccugcgcggcc

SEQ ID NO: 3908798 - RNA, 18 nt, Human adenovirus C
agcgcuccacccgcaccu

SEQ ID NO: 3908799 - RNA, 19 nt, Human adenovirus C
agcggcaacgugcagacca

SEQ ID NO: 3908800 - RNA, 16 nt, Human adenovirus C
agcggcggcagcagca

SEQ ID NO: 3908801 - RNA, 19 nt, Human adenovirus C
agcgggggguaccugcugg

SEQ ID NO: 3908802 - RNA, 22 nt, Human adenovirus C
agcgguacgguuuuccuggcca

SEQ ID NO: 3908803 - RNA, 17 nt, Human adenovirus C
agcgguguuccgcgguc

SEQ ID NO: 3908804 - RNA, 21 nt, Human adenovirus C
agcuaaagcgggucaaaaaga

SEQ ID NO: 3908805 - RNA, 15 nt, Human adenovirus C
agcuacccacccagc

SEQ ID NO: 3908806 - RNA, 17 nt, Human adenovirus C
agcuaugcuaaccagcg

SEQ ID NO: 3908807 - RNA, 14 nt, Human adenovirus C
agcucccgcggcga

SEQ ID NO: 3908808 - RNA, 20 nt, Human adenovirus C
agcucggcggugaccugcac

SEQ ID NO: 3908809 - RNA, 22 nt, Human adenovirus C
agcugaaauaugagugggugga

SEQ ID NO: 3908810 - RNA, 20 nt, Human adenovirus C
agcugaucgugcgccgugca

SEQ ID NO: 3908811 - RNA, 13 nt, Human adenovirus C
agcugaucuucuc

SEQ ID NO: 3908812 - RNA, 21 nt, Human adenovirus C
agcugauugccaggggcaggc

SEQ ID NO: 3908813 - RNA, 18 nt, Human adenovirus C
agcugcaaacuuucucca

SEQ ID NO: 3908814 - RNA, 21 nt, Human adenovirus C
agcugccgucaucccugagca

SEQ ID NO: 3908815 - RNA, 23 nt, Human adenovirus C
agcugccgucaucccugagcagg

SEQ ID NO: 3908816 - RNA, 13 nt, Human adenovirus C
agcugcugagccg

SEQ ID NO: 3908817 - RNA, 13 nt, Human adenovirus C
agcuggccgggca

SEQ ID NO: 3908818 - RNA, 21 nt, Human adenovirus C
agcuguccauggucuggagcu

SEQ ID NO: 3908819 - RNA, 18 nt, Human adenovirus C
agcuuccgcaggccaagc

SEQ ID NO: 3908820 - RNA, 17 nt, Human adenovirus C
agcuugagugcaugcag

SEQ ID NO: 3908821 - RNA, 18 nt, Human adenovirus C
agcuugccugcuccagag

SEQ ID NO: 3908822 - RNA, 14 nt, Human adenovirus C
aggaaaccccuucc

SEQ ID NO: 3908823 - RNA, 17 nt, Human adenovirus C
aggaaagucccgcuccc

SEQ ID NO: 3908824 - RNA, 23 nt, Human adenovirus C
aggaaccagccugugaugcugga

SEQ ID NO: 3908825 - RNA, 14 nt, Human adenovirus C
aggaagaagaagag

SEQ ID NO: 3908826 - RNA, 18 nt, Human adenovirus C
aggaagaugaagaugaag

SEQ ID NO: 3908827 - RNA, 12 nt, Human adenovirus C
aggaagccaggc

SEQ ID NO: 3908828 - RNA, 16 nt, Human adenovirus C
aggacccuggugcugc

SEQ ID NO: 3908829 - RNA, 23 nt, Human adenovirus C
aggagcagagcccauggaacccg

SEQ ID NO: 3908830 - RNA, 14 nt, Human adenovirus C
aggagccuccaccg

SEQ ID NO: 3908831 - RNA, 20 nt, Human adenovirus C
aggagcgcagcuugagccug

SEQ ID NO: 3908832 - RNA, 18 nt, Human adenovirus C
aggaggacuuugagcccg

SEQ ID NO: 3908833 - RNA, 21 nt, Human adenovirus C
aggagggagagugcuuaaaaa

SEQ ID NO: 3908834 - RNA, 23 nt, Human adenovirus C
aggaggucgggaccgagguugcu

SEQ ID NO: 3908835 - RNA, 21 nt, Human adenovirus C
aggaucaccuacgaugaccug

SEQ ID NO: 3908836 - RNA, 14 nt, Human adenovirus C
aggaugaagaagag

SEQ ID NO: 3908837 - RNA, 13 nt, Human adenovirus C
aggcagcuggggc

SEQ ID NO: 3908838 - RNA, 15 nt, Human adenovirus C
aggcaguagcuugaa

SEQ ID NO: 3908839 - RNA, 17 nt, Human adenovirus C
aggccagcacgaaggag

SEQ ID NO: 3908840 - RNA, 18 nt, Human adenovirus C
aggccgaggcagcggcag

SEQ ID NO: 3908841 - RNA, 21 nt, Human adenovirus C
aggccguggcgcagcgugagc

SEQ ID NO: 3908842 - RNA, 13 nt, Human adenovirus C
aggccuggaacag

SEQ ID NO: 3908843 - RNA, 14 nt, Human adenovirus C
aggccuggaacagc

SEQ ID NO: 3908844 - RNA, 14 nt, Human adenovirus C
aggcgcauguggac

SEQ ID NO: 3908845 - RNA, 19 nt, Human adenovirus C
aggcgcauguggacgagca

SEQ ID NO: 3908846 - RNA, 12 nt, Human adenovirus C
aggcgccgccgg

SEQ ID NO: 3908847 - RNA, 22 nt, Human adenovirus C
aggcgcuuuuccaagagaaggu

SEQ ID NO: 3908848 - RNA, 24 nt, Human adenovirus C
aggcggcggcaacaacaguggcag

SEQ ID NO: 3908849 - RNA, 16 nt, Human adenovirus C
aggcggucccacagcu

SEQ ID NO: 3908850 - RNA, 17 nt, Human adenovirus C
aggcguacgugccgcgg

SEQ ID NO: 3908851 - RNA, 18 nt, Human adenovirus C
aggcuacagaggaggcua

SEQ ID NO: 3908852 - RNA, 16 nt, Human adenovirus C
aggcugcuguccaacu

SEQ ID NO: 3908853 - RNA, 12 nt, Human adenovirus C
agggaguggcaa

SEQ ID NO: 3908854 - RNA, 13 nt, Human adenovirus C
agggcaaccuggg

SEQ ID NO: 3908855 - RNA, 16 nt, Human adenovirus C
agggcccuggcuggca

SEQ ID NO: 3908856 - RNA, 19 nt, Human adenovirus C
agggccucucagaugcuga

SEQ ID NO: 3908857 - RNA, 17 nt, Human adenovirus C
agggcguagagcuuggg

SEQ ID NO: 3908858 - RNA, 16 nt, Human adenovirus C
agggcugccugcacuu

SEQ ID NO: 3908859 - RNA, 18 nt, Human adenovirus C
aggggcaacauccgcggc

SEQ ID NO: 3908860 - RNA, 13 nt, Human adenovirus C
aggggccaagaac

SEQ ID NO: 3908861 - RNA, 22 nt, Human adenovirus C
aggggccaagaacaagagcuga

SEQ ID NO: 3908862 - RNA, 19 nt, Human adenovirus C
aggguauaacucaccugaa

SEQ ID NO: 3908863 - RNA, 15 nt, Human adenovirus C
agguacgccugcagg

SEQ ID NO: 3908864 - RNA, 14 nt, Human adenovirus C
agguacugaaaugu

SEQ ID NO: 3908865 - RNA, 23 nt, Human adenovirus C
agguagcaccacugcagagcuuc

SEQ ID NO: 3908866 - RNA, 11 nt, Human adenovirus C
aggucagcugc

SEQ ID NO: 3908867 - RNA, 11 nt, Human adenovirus C
agguccuccuc

SEQ ID NO: 3908868 - RNA, 19 nt, Human adenovirus C
aggugaccgugcccggucu

SEQ ID NO: 3908869 - RNA, 22 nt, Human adenovirus C
aggugaugccggcggcgguggu

SEQ ID NO: 3908870 - RNA, 18 nt, Human adenovirus C
aggugcgggcgugacaaa

SEQ ID NO: 3908871 - RNA, 11 nt, Human adenovirus C
aggugcugccc

SEQ ID NO: 3908872 - RNA, 14 nt, Human adenovirus C
aggugcugcucaaa

SEQ ID NO: 3908873 - RNA, 19 nt, Human adenovirus C
aggugguagauggccuggc

SEQ ID NO: 3908874 - RNA, 15 nt, Human adenovirus C
agguguaggccacgu

SEQ ID NO: 3908875 - RNA, 16 nt, Human adenovirus C
agguuaccucugcaaa

SEQ ID NO: 3908876 - RNA, 18 nt, Human adenovirus C
agguugcuacgggcgggc

SEQ ID NO: 3908877 - RNA, 12 nt, Human adenovirus C
agguugcuggcg

SEQ ID NO: 3908878 - RNA, 14 nt, Human adenovirus C
aguagcuugaaguu

SEQ ID NO: 3908879 - RNA, 18 nt, Human adenovirus C
agucacaagccccacuga

SEQ ID NO: 3908880 - RNA, 13 nt, Human adenovirus C
agucacuggucuu

SEQ ID NO: 3908881 - RNA, 13 nt, Human adenovirus C
aguccacaaaaaa

SEQ ID NO: 3908882 - RNA, 12 nt, Human adenovirus C
agucggugcucg

SEQ ID NO: 3908883 - RNA, 13 nt, Human adenovirus C
agugcaaaauaag

SEQ ID NO: 3908884 - RNA, 14 nt, Human adenovirus C
agugcagacuuuua

SEQ ID NO: 3908885 - RNA, 18 nt, Human adenovirus C
agugcuuguuaccgugga

SEQ ID NO: 3908886 - RNA, 14 nt, Human adenovirus C
agugcuuugcccgc

SEQ ID NO: 3908887 - RNA, 18 nt, Human adenovirus C
aguggagagcccaggacu

SEQ ID NO: 3908888 - RNA, 13 nt, Human adenovirus C
aguggagcgggag

SEQ ID NO: 3908889 - RNA, 14 nt, Human adenovirus C
aguggcggcggcgc

SEQ ID NO: 3908890 - RNA, 14 nt, Human adenovirus C
agugggcaggcaga

SEQ ID NO: 3908891 - RNA, 23 nt, Human adenovirus C
cagugucgucgcauccgcccugc

SEQ ID NO: 3908892 - RNA, 17 nt, Human adenovirus C
cagugucuccagagggg

SEQ ID NO: 3908893 - RNA, 12 nt, Human adenovirus C
caguuccaggcg

SEQ ID NO: 3908894 - RNA, 18 nt, Human adenovirus C
cauaaguuuggacaccuc

SEQ ID NO: 3908895 - RNA, 20 nt, Human adenovirus C
cauaaguuuggacaccuccg

SEQ ID NO: 3908896 - RNA, 17 nt, Human adenovirus C
cauaccuugacauuggc

SEQ ID NO: 3908897 - RNA, 15 nt, Human adenovirus C
cauagaugccaugaa

SEQ ID NO: 3908898 - RNA, 16 nt, Human adenovirus C
cauauuuccugcagau

SEQ ID NO: 3908899 - RNA, 22 nt, Human adenovirus C
caucaacgcgcgcgcagccucc

SEQ ID NO: 3908900 - RNA, 16 nt, Human adenovirus C
caucagccccccucuc

SEQ ID NO: 3908901 - RNA, 21 nt, Human adenovirus C
caucaugucgcugacugcgcg

SEQ ID NO: 3908902 - RNA, 24 nt, Human adenovirus C
cauccacaaggccgugagcgugag

SEQ ID NO: 3908903 - RNA, 21 nt, Human adenovirus C
cauccauuucaaucacgugcu

SEQ ID NO: 3908904 - RNA, 13 nt, Human adenovirus C
caucccaccuuuc

SEQ ID NO: 3908905 - RNA, 22 nt, Human adenovirus C
caucccugagcaggggggccac

SEQ ID NO: 3908906 - RNA, 13 nt, Human adenovirus C
cauccgcgccgca

SEQ ID NO: 3908907 - RNA, 14 nt, Human adenovirus C
caucuccagcggcc

SEQ ID NO: 3908908 - RNA, 16 nt, Human adenovirus C
caucuccagcggccac

SEQ ID NO: 3908909 - RNA, 13 nt, Human adenovirus C
caucucgggccag

SEQ ID NO: 3908910 - RNA, 14 nt, Human adenovirus C
caucucuacagccc

SEQ ID NO: 3908911 - RNA, 15 nt, Human adenovirus C
caucugcagcgccag

SEQ ID NO: 3908912 - RNA, 22 nt, Human adenovirus C
caucuugcgcuaugugcagcag

SEQ ID NO: 3908913 - RNA, 23 nt, Human adenovirus C
caugagcgcgggaccccacauga

SEQ ID NO: 3908914 - RNA, 12 nt, Human adenovirus C
caugcacaucuc

SEQ ID NO: 3908915 - RNA, 18 nt, Human adenovirus C
caugcagggcacccuccc

SEQ ID NO: 3908916 - RNA, 17 nt, Human adenovirus C
caugcaucuguggagag

SEQ ID NO: 3908917 - RNA, 15 nt, Human adenovirus C
caugccuuugucaau

SEQ ID NO: 3908918 - RNA, 18 nt, Human adenovirus C
caugcgcgagggacaggc

SEQ ID NO: 3908919 - RNA, 16 nt, Human adenovirus C
caugcucagucugggc

SEQ ID NO: 3908920 - RNA, 23 nt, Human adenovirus C
cauggagucagucgagaaggagg

SEQ ID NO: 3908921 - RNA, 14 nt, Human adenovirus C
cauggcgcagcugu

SEQ ID NO: 3908922 - RNA, 17 nt, Human adenovirus C
caugggaaacuggcaag

SEQ ID NO: 3908923 - RNA, 18 nt, Human adenovirus C
cauggugucauaguccag

SEQ ID NO: 3908924 - RNA, 15 nt, Human adenovirus C
caugucgcccucuuc

SEQ ID NO: 3908925 - RNA, 14 nt, Human adenovirus C
caugucgccgccag

SEQ ID NO: 3908926 - RNA, 15 nt, Human adenovirus C
caugucgcuguccag

SEQ ID NO: 3908927 - RNA, 21 nt, Human adenovirus C
caugucgcuguccagcugcug

SEQ ID NO: 3908928 - RNA, 16 nt, Human adenovirus C
cauguucucuucuuuu

SEQ ID NO: 3908929 - RNA, 12 nt, Human adenovirus C
cauuaacaaaaa

SEQ ID NO: 3908930 - RNA, 20 nt, Human adenovirus C
cauuaaguuugacagcauuu

SEQ ID NO: 3908931 - RNA, 16 nt, Human adenovirus C
cauugaaaaccaugga

SEQ ID NO: 3908932 - RNA, 15 nt, Human adenovirus C
cauugcguaccucag

SEQ ID NO: 3908933 - RNA, 18 nt, Human adenovirus C
cauugcuuucagggacaa

SEQ ID NO: 3908934 - RNA, 17 nt, Human adenovirus C
cauuuggguaacaggag

SEQ ID NO: 3908935 - RNA, 20 nt, Human adenovirus C
ccaaaccucagcgccuccca

SEQ ID NO: 3908936 - RNA, 13 nt, Human adenovirus C
ccaaagcagacca

SEQ ID NO: 3908937 - RNA, 20 nt, Human adenovirus C
ccaaagcagaccaaagcaaa

SEQ ID NO: 3908938 - RNA, 14 nt, Human adenovirus C
ccaacacacagagu

SEQ ID NO: 3908939 - RNA, 22 nt, Human adenovirus C
ccaaccgcagccgagcggacaa

SEQ ID NO: 3908940 - RNA, 14 nt, Human adenovirus C
ccaagacuacucaa

SEQ ID NO: 3908941 - RNA, 16 nt, Human adenovirus C
ccaagcaguuccaggc

SEQ ID NO: 3908942 - RNA, 12 nt, Human adenovirus C
ccaagcgccagc

SEQ ID NO: 3908943 - RNA, 18 nt, Human adenovirus C
ccaauauugcgcuguacc

SEQ ID NO: 3908944 - RNA, 15 nt, Human adenovirus C
ccacaacgcgcagcc

SEQ ID NO: 3908945 - RNA, 15 nt, Human adenovirus C
ccacaauguggccuc

SEQ ID NO: 3908946 - RNA, 15 nt, Human adenovirus C
ccacagaacaugaaa

SEQ ID NO: 3908947 - RNA, 17 nt, Human adenovirus C
ccacagcggcggcagca

SEQ ID NO: 3908948 - RNA, 19 nt, Human adenovirus C
ccacagcucgcgguugagg

SEQ ID NO: 3908949 - RNA, 22 nt, Human adenovirus C
ccacauccuuggccaauugcaa

SEQ ID NO: 3908950 - RNA, 18 nt, Human adenovirus C
ccaccaguagcacuagua

SEQ ID NO: 3908951 - RNA, 12 nt, Human adenovirus C
ccacccuugccg

SEQ ID NO: 3908952 - RNA, 22 nt, Human adenovirus C
ccaccgcaaugcgggccuccgu

SEQ ID NO: 3908953 - RNA, 21 nt, Human adenovirus C
ccaccgcagaauaagccacac

SEQ ID NO: 3908954 - RNA, 12 nt, Human adenovirus C
ccacgccuuugc

SEQ ID NO: 3908955 - RNA, 18 nt, Human adenovirus C
ccacgcuggaagccaugc

SEQ ID NO: 3908956 - RNA, 13 nt, Human adenovirus C
ccacgugccgggc

SEQ ID NO: 3908957 - RNA, 13 nt, Human adenovirus C
ccacucgcuccag

SEQ ID NO: 3908958 - RNA, 14 nt, Human adenovirus C
ccacuguuacucag

SEQ ID NO: 3908959 - RNA, 18 nt, Human adenovirus C
ccacuguuacucagccac

SEQ ID NO: 3908960 - RNA, 14 nt, Human adenovirus C
ccacuuaaaaaaac

SEQ ID NO: 3908961 - RNA, 19 nt, Human adenovirus C
ccacuuaaacucaggcaca

SEQ ID NO: 3908962 - RNA, 13 nt, Human adenovirus C
ccagaggugcuug

SEQ ID NO: 3908963 - RNA, 20 nt, Human adenovirus C
ccagauguugcgcagcggca

SEQ ID NO: 3908964 - RNA, 22 nt, Human adenovirus C
ccagauuuuggcgcgcccgcca

SEQ ID NO: 3908965 - RNA, 19 nt, Human adenovirus C
ccagcaauaugagcggugg

SEQ ID NO: 3908966 - RNA, 13 nt, Human adenovirus C
ccagcagaggcgg

SEQ ID NO: 3908967 - RNA, 17 nt, Human adenovirus C
ccagcauaacaacucag

SEQ ID NO: 3908968 - RNA, 17 nt, Human adenovirus C
ccagcaucguuuaaaag

SEQ ID NO: 3908969 - RNA, 13 nt, Human adenovirus C
ccagcgacuggaa

SEQ ID NO: 3908970 - RNA, 14 nt, Human adenovirus C
ccagcgccugcacu

SEQ ID NO: 3908971 - RNA, 15 nt, Human adenovirus C
ccagcgccugcacug

SEQ ID NO: 3908972 - RNA, 16 nt, Human adenovirus C
ccagcgccugcacugc

SEQ ID NO: 3908973 - RNA, 17 nt, Human adenovirus C
ccagcgccugcacugca

SEQ ID NO: 3908974 - RNA, 13 nt, Human adenovirus C
ccagcggucucgg

SEQ ID NO: 3908975 - RNA, 23 nt, Human adenovirus C
ccagcugcuacaacaaacagagc

SEQ ID NO: 3908976 - RNA, 20 nt, Human adenovirus C
ccagcugcugagccacaggc

SEQ ID NO: 3908977 - RNA, 17 nt, Human adenovirus C
ccagcuggccaaaaccu

SEQ ID NO: 3908978 - RNA, 20 nt, Human adenovirus C
ccaggaaagucccgcuccca

SEQ ID NO: 3908979 - RNA, 13 nt, Human adenovirus C
ccaggaacagcuc

SEQ ID NO: 3908980 - RNA, 19 nt, Human adenovirus C
ccaggcggcggguacagug

SEQ ID NO: 3908981 - RNA, 17 nt, Human adenovirus C
ccaggcuuugaguugca

SEQ ID NO: 3908982 - RNA, 18 nt, Human adenovirus C
ccaggcuuugaguugcac

SEQ ID NO: 3908983 - RNA, 15 nt, Human adenovirus C
ccagguacagcccac

SEQ ID NO: 3908984 - RNA, 21 nt, Human adenovirus C
ccaggugcgggcgugacaaac

SEQ ID NO: 3908985 - RNA, 17 nt, Human adenovirus C
ccagucguagcaggagc

SEQ ID NO: 3908986 - RNA, 13 nt, Human adenovirus C
ccaguggagaggc

SEQ ID NO: 3908987 - RNA, 20 nt, Human adenovirus C
ccaguggagaggcagagcga

SEQ ID NO: 3908988 - RNA, 13 nt, Human adenovirus C
ccauagcggaugu

SEQ ID NO: 3908989 - RNA, 16 nt, Human adenovirus C
ccauaugacacagaaa

SEQ ID NO: 3908990 - RNA, 20 nt, Human adenovirus C
ccauccaaguauaggucucu

SEQ ID NO: 3908991 - RNA, 11 nt, Human adenovirus C
ccauccagaca

SEQ ID NO: 3908992 - RNA, 20 nt, Human adenovirus C
ccaucuccuaacugcagaau

SEQ ID NO: 3908993 - RNA, 23 nt, Human adenovirus C
ccaugaaccacccuacuuuccca

SEQ ID NO: 3908994 - RNA, 21 nt, Human adenovirus C
ccaugauuacuaaacuuggag

SEQ ID NO: 3908995 - RNA, 18 nt, Human adenovirus C
ccaugcccuucucccacg

SEQ ID NO: 3908996 - RNA, 15 nt, Human adenovirus C
ccaugcucagucugg

SEQ ID NO: 3908997 - RNA, 20 nt, Human adenovirus C
ccauggacgagcccacccuu

SEQ ID NO: 3908998 - RNA, 22 nt, Human adenovirus C
ccauggcccacaacacggccuc

SEQ ID NO: 3908999 - RNA, 18 nt, Human adenovirus C
ccauggcuaccggagugc

SEQ ID NO: 3909000 - RNA, 17 nt, Human adenovirus C
ccauggucuggagcucc

SEQ ID NO: 3909001 - RNA, 21 nt, Human adenovirus C
ccaugucgccgccagaggagc

SEQ ID NO: 3909002 - RNA, 23 nt, Human adenovirus C
ccauuaacgaggaugggcagggg

SEQ ID NO: 3909003 - RNA, 19 nt, Human adenovirus C
ccauucaacuaacauaaac

SEQ ID NO: 3909004 - RNA, 21 nt, Human adenovirus C
ccauucacguagccagccacu

SEQ ID NO: 3909005 - RNA, 22 nt, Human adenovirus C
ccauuuuuacaaagcgcgggcg

SEQ ID NO: 3909006 - RNA, 18 nt, Human adenovirus C
ccauuuuuccaaaacagg

SEQ ID NO: 3909007 - RNA, 19 nt, Human adenovirus C
cccaaaaagaagcugcagc

SEQ ID NO: 3909008 - RNA, 23 nt, Human adenovirus C
gugcgcgggcacuaccgcgcgcc

SEQ ID NO: 3909009 - RNA, 13 nt, Human adenovirus C
gugcggucgcccg

SEQ ID NO: 3909010 - RNA, 14 nt, Human adenovirus C
gugcugcggcagau

SEQ ID NO: 3909011 - RNA, 19 nt, Human adenovirus C
gugcuguugaagcaucugc

SEQ ID NO: 3909012 - RNA, 15 nt, Human adenovirus C
gugcuuaccuugagc

SEQ ID NO: 3909013 - RNA, 15 nt, Human adenovirus C
gugcuugccaccuau

SEQ ID NO: 3909014 - RNA, 19 nt, Human adenovirus C
guggaacgaagcugaugcu

SEQ ID NO: 3909015 - RNA, 17 nt, Human adenovirus C
guggaccuggccaacca

SEQ ID NO: 3909016 - RNA, 22 nt, Human adenovirus C
guggacguaaaggcuaaacccu

SEQ ID NO: 3909017 - RNA, 16 nt, Human adenovirus C
guggagaugacugaau

SEQ ID NO: 3909018 - RNA, 18 nt, Human adenovirus C
guggccgggggugcuugg

SEQ ID NO: 3909019 - RNA, 18 nt, Human adenovirus C
guggccuugcaggcgcag

SEQ ID NO: 3909020 - RNA, 14 nt, Human adenovirus C
guggcgcccucuuc

SEQ ID NO: 3909021 - RNA, 14 nt, Human adenovirus C
guggcuaccucucc

SEQ ID NO: 3909022 - RNA, 16 nt, Human adenovirus C
guggcucccgggcuug

SEQ ID NO: 3909023 - RNA, 23 nt, Human adenovirus C
guggugaaaguagaagucccugc

SEQ ID NO: 3909024 - RNA, 19 nt, Human adenovirus C
guggugcaggagcgcagcu

SEQ ID NO: 3909025 - RNA, 13 nt, Human adenovirus C
gugguggaccugg

SEQ ID NO: 3909026 - RNA, 17 nt, Human adenovirus C
gugucccuaaccaugac

SEQ ID NO: 3909027 - RNA, 19 nt, Human adenovirus C
gugucgaacccaggugugc

SEQ ID NO: 3909028 - RNA, 18 nt, Human adenovirus C
gugucguugacggcggcc

SEQ ID NO: 3909029 - RNA, 20 nt, Human adenovirus C
gugugaccccgaagccccuc

SEQ ID NO: 3909030 - RNA, 20 nt, Human adenovirus C
guguggaagccuggaccgau

SEQ ID NO: 3909031 - RNA, 16 nt, Human adenovirus C
guguggcaacugcgag

SEQ ID NO: 3909032 - RNA, 13 nt, Human adenovirus C
guguggcagcaau

SEQ ID NO: 3909033 - RNA, 15 nt, Human adenovirus C
guguuacuuuucagc

SEQ ID NO: 3909034 - RNA, 19 nt, Human adenovirus C
guuaacaugguucugcaga

SEQ ID NO: 3909035 - RNA, 23 nt, Human adenovirus C
guuccaggaaguacggcaccgcc

SEQ ID NO: 3909036 - RNA, 21 nt, Human adenovirus C
guuccauccggcccaggggcg

SEQ ID NO: 3909037 - RNA, 22 nt, Human adenovirus C
guuccauccggcccaggggcgu

SEQ ID NO: 3909038 - RNA, 23 nt, Human adenovirus C
guucccagcaucgcuacaaccuc

SEQ ID NO: 3909039 - RNA, 19 nt, Human adenovirus C
guuccugcucucacagauc

SEQ ID NO: 3909040 - RNA, 15 nt, Human adenovirus C
guucggggcugugcc

SEQ ID NO: 3909041 - RNA, 16 nt, Human adenovirus C
guucggggcugugccu

SEQ ID NO: 3909042 - RNA, 20 nt, Human adenovirus C
guucugcagagcucucuggg

SEQ ID NO: 3909043 - RNA, 13 nt, Human adenovirus C
guugacggccugg

SEQ ID NO: 3909044 - RNA, 15 nt, Human adenovirus C
guugagugggggacc

SEQ ID NO: 3909045 - RNA, 17 nt, Human adenovirus C
guugccucggcgguggc

SEQ ID NO: 3909046 - RNA, 23 nt, Human adenovirus C
guugcuggugaaggucagcugca

SEQ ID NO: 3909047 - RNA, 20 nt, Human adenovirus C
guuggaauucuucaccagca

SEQ ID NO: 3909048 - RNA, 17 nt, Human adenovirus C
guuggagaucugcacca

SEQ ID NO: 3909049 - RNA, 23 nt, Human adenovirus C
guuggagaugcgggccaugagcu

SEQ ID NO: 3909050 - RNA, 19 nt, Human adenovirus C
guuucagccccccggcgcc

SEQ ID NO: 3909051 - RNA, 16 nt, Human adenovirus C
guuucgcgcugcuccu

SEQ ID NO: 3909052 - RNA, 21 nt, Human adenovirus C
guuucgcgcugcuccucuucc

SEQ ID NO: 3909053 - RNA, 23 nt, Human adenovirus C
guuucuggcggaggugcugcuga

SEQ ID NO: 3909054 - RNA, 19 nt, Human adenovirus C
guuuguaccuauugucagc

SEQ ID NO: 3909055 - RNA, 13 nt, Human adenovirus C
guuuuccuggcca

SEQ ID NO: 3909056 - RNA, 21 nt, Human adenovirus C
uaaaacauaaauaaaaaccag

SEQ ID NO: 3909057 - RNA, 20 nt, Human adenovirus C
uaaacacgcuggacauaaac

SEQ ID NO: 3909058 - RNA, 22 nt, Human adenovirus C
uaaauauggaaaccccagacac

SEQ ID NO: 3909059 - RNA, 16 nt, Human adenovirus C
uaacacaggcuggggc

SEQ ID NO: 3909060 - RNA, 18 nt, Human adenovirus C
uaacaugguguguggcaa

SEQ ID NO: 3909061 - RNA, 13 nt, Human adenovirus C
uaacaugguucug

SEQ ID NO: 3909062 - RNA, 18 nt, Human adenovirus C
uaacgcuggaccugccuc

SEQ ID NO: 3909063 - RNA, 14 nt, Human adenovirus C
uaacuccagggugc

SEQ ID NO: 3909064 - RNA, 15 nt, Human adenovirus C
uaacucuacaagcuu

SEQ ID NO: 3909065 - RNA, 12 nt, Human adenovirus C
uaacuugcaugg

SEQ ID NO: 3909066 - RNA, 15 nt, Human adenovirus C
uaagucuaagcagcc

SEQ ID NO: 3909067 - RNA, 14 nt, Human adenovirus C
uaaugacugcaaau

SEQ ID NO: 3909068 - RNA, 19 nt, Human adenovirus C
uaaugagcuugaucugcug

SEQ ID NO: 3909069 - RNA, 12 nt, Human adenovirus C
uaaugcaucaaa

SEQ ID NO: 3909070 - RNA, 21 nt, Human adenovirus C
uaauguacuaggagacacuuu

SEQ ID NO: 3909071 - RNA, 14 nt, Human adenovirus C
uacaaaaagcgggc

SEQ ID NO: 3909072 - RNA, 13 nt, Human adenovirus C
uacaacaguuucc

SEQ ID NO: 3909073 - RNA, 19 nt, Human adenovirus C
uacaacaguuuccagcgag

SEQ ID NO: 3909074 - RNA, 23 nt, Human adenovirus C
uacaaccccaccaauguggaaau

SEQ ID NO: 3909075 - RNA, 13 nt, Human adenovirus C
uacaacgcucuag

SEQ ID NO: 3909076 - RNA, 16 nt, Human adenovirus C
uacaagcuacccaccc

SEQ ID NO: 3909077 - RNA, 19 nt, Human adenovirus C
uacaaggaguaucagcagg

SEQ ID NO: 3909078 - RNA, 18 nt, Human adenovirus C
uacaaguuguggccccca

SEQ ID NO: 3909079 - RNA, 23 nt, Human adenovirus C
uacaaguuguggcccccacaaaa

SEQ ID NO: 3909080 - RNA, 18 nt, Human adenovirus C
uacaauauuggcuaccag

SEQ ID NO: 3909081 - RNA, 13 nt, Human adenovirus C
uacaucugaccuc

SEQ ID NO: 3909082 - RNA, 21 nt, Human adenovirus C
uacaugcacaucucgggccag

SEQ ID NO: 3909083 - RNA, 15 nt, Human adenovirus C
uaccaacucuuacac

SEQ ID NO: 3909084 - RNA, 11 nt, Human adenovirus C
uaccagccaca

SEQ ID NO: 3909085 - RNA, 16 nt, Human adenovirus C
uaccgcgucaggaggg

SEQ ID NO: 3909086 - RNA, 15 nt, Human adenovirus C
uaccgucaucucuac

SEQ ID NO: 3909087 - RNA, 14 nt, Human adenovirus C
uaccuggaccccca

SEQ ID NO: 3909088 - RNA, 21 nt, Human adenovirus C
uaccugugcuuugcucccaaa

SEQ ID NO: 3909089 - RNA, 17 nt, Human adenovirus C
uaccuuuuuaaugcauc

SEQ ID NO: 3909090 - RNA, 21 nt, Human adenovirus C
uacgaacccccgcggcgccgg

SEQ ID NO: 3909091 - RNA, 15 nt, Human adenovirus C
uacgaacgccaccug

SEQ ID NO: 3909092 - RNA, 18 nt, Human adenovirus C
uacgacccuuacuacacc

SEQ ID NO: 3909093 - RNA, 13 nt, Human adenovirus C
uacgccaacuccg

SEQ ID NO: 3909094 - RNA, 12 nt, Human adenovirus C
uacgcccagaaa

SEQ ID NO: 3909095 - RNA, 12 nt, Human adenovirus C
uacgucacuucc

SEQ ID NO: 3909096 - RNA, 17 nt, Human adenovirus C
uacuaaaaaacuggaag

SEQ ID NO: 3909097 - RNA, 14 nt, Human adenovirus C
uacuaagaaaacac

SEQ ID NO: 3909098 - RNA, 16 nt, Human adenovirus C
uacuaagaaaacacau

SEQ ID NO: 3909099 - RNA, 18 nt, Human adenovirus C
uacucagccacuuaaaaa

SEQ ID NO: 3909100 - RNA, 18 nt, Human adenovirus C
uacucccauuuuuccaaa

SEQ ID NO: 3909101 - RNA, 21 nt, Human adenovirus C
uacuccggcacugccuacaac

SEQ ID NO: 3909102 - RNA, 22 nt, Human adenovirus C
uacuccggcacugccuacaacg

SEQ ID NO: 3909103 - RNA, 14 nt, Human adenovirus C
uacucuuauaaaau

SEQ ID NO: 3909104 - RNA, 14 nt, Human adenovirus C
uacugaaaugugug

SEQ ID NO: 3909105 - RNA, 15 nt, Human adenovirus C
uacugcaccggcggc

SEQ ID NO: 3909106 - RNA, 23 nt, Human adenovirus C
uacugcaccggcggcagcggcag

SEQ ID NO: 3909107 - RNA, 18 nt, Human adenovirus C
uacugcccgaauaugccc

SEQ ID NO: 3909108 - RNA, 19 nt, Human adenovirus C
uacuggucguugccagaca

SEQ ID NO: 3909109 - RNA, 14 nt, Human adenovirus C
uacuuaaaaucagu

SEQ ID NO: 3909110 - RNA, 15 nt, Human adenovirus C
uacuuuucagcagau

SEQ ID NO: 3909111 - RNA, 12 nt, Human adenovirus C
uagacugcuccu

SEQ ID NO: 3909112 - RNA, 12 nt, Human adenovirus C
uagaggagccuc

SEQ ID NO: 3909113 - RNA, 23 nt, Human adenovirus C
uagauuugcaagacagaaacaca

SEQ ID NO: 3909114 - RNA, 18 nt, Human adenovirus C
uagcaccacugcagagcu

SEQ ID NO: 3909115 - RNA, 23 nt, Human adenovirus C
uagcaccgguggguugcugaaac

SEQ ID NO: 3909116 - RNA, 16 nt, Human adenovirus C
uagcauguagaacugg

SEQ ID NO: 3909117 - RNA, 21 nt, Human adenovirus C
uagcgccauugcuucuucccc

SEQ ID NO: 3909118 - RNA, 19 nt, Human adenovirus C
uaggcgauuucggccauga

SEQ ID NO: 3909119 - RNA, 14 nt, Human adenovirus C
uaggcgcagcaucc

SEQ ID NO: 3909120 - RNA, 14 nt, Human adenovirus C
uagguguaggccac

SEQ ID NO: 3909121 - RNA, 15 nt, Human adenovirus C
uagugaauccacaga

SEQ ID NO: 3909122 - RNA, 23 nt, Human adenovirus C
uaguuucgcgcccuuucucaaau

SEQ ID NO: 3909123 - RNA, 18 nt, Human adenovirus C
uaguuuuguaucuguuuu

SEQ ID NO: 3909124 - RNA, 14 nt, Human adenovirus C
cuucagcuugccug

SEQ ID NO: 3909125 - RNA, 13 nt, Human adenovirus C
cuucauucagccg

SEQ ID NO: 3909126 - RNA, 12 nt, Human adenovirus C
cuucauucaguu

SEQ ID NO: 3909127 - RNA, 12 nt, Human adenovirus C
cuuccgcagcca

SEQ ID NO: 3909128 - RNA, 16 nt, Human adenovirus C
cuuccuuccaggcgcg

SEQ ID NO: 3909129 - RNA, 21 nt, Human adenovirus C
cuucgcaaauuuguaccugag

SEQ ID NO: 3909130 - RNA, 18 nt, Human adenovirus C
cuucucccacccccacug

SEQ ID NO: 3909131 - RNA, 21 nt, Human adenovirus C
cuugaaagugggcaggcagaa

SEQ ID NO: 3909132 - RNA, 17 nt, Human adenovirus C
cuugaagucgcaguugg

SEQ ID NO: 3909133 - RNA, 21 nt, Human adenovirus C
cuugacgaccguucgcacugg

SEQ ID NO: 3909134 - RNA, 23 nt, Human adenovirus C
cuugagacgcgcgagccugccga

SEQ ID NO: 3909135 - RNA, 12 nt, Human adenovirus C
cuugaggaggag

SEQ ID NO: 3909136 - RNA, 18 nt, Human adenovirus C
cuugagugcaugcagcgg

SEQ ID NO: 3909137 - RNA, 18 nt, Human adenovirus C
cuugcagauauggcccuc

SEQ ID NO: 3909138 - RNA, 22 nt, Human adenovirus C
cuugccuacgaacgccaccugu

SEQ ID NO: 3909139 - RNA, 14 nt, Human adenovirus C
cuugccugcuccag

SEQ ID NO: 3909140 - RNA, 19 nt, Human adenovirus C
cuugcgcuaugugcagcag

SEQ ID NO: 3909141 - RNA, 20 nt, Human adenovirus C
cuugcuggaacagagcucua

SEQ ID NO: 3909142 - RNA, 22 nt, Human adenovirus C
cuugcuuguauuccccuggaca

SEQ ID NO: 3909143 - RNA, 14 nt, Human adenovirus C
cuuggaugaugcau

SEQ ID NO: 3909144 - RNA, 22 nt, Human adenovirus C
cuuggcgcgcagcuugcccuug

SEQ ID NO: 3909145 - RNA, 23 nt, Human adenovirus C
cuugggagaggggcgcuucuuuu

SEQ ID NO: 3909146 - RNA, 19 nt, Human adenovirus C
cuuggguccggccugcuga

SEQ ID NO: 3909147 - RNA, 21 nt, Human adenovirus C
cuugucccuccgcacccacua

SEQ ID NO: 3909148 - RNA, 19 nt, Human adenovirus C
cuuugcaaguagcacaaaa

SEQ ID NO: 3909149 - RNA, 11 nt, Human adenovirus C
cuuugccaacu

SEQ ID NO: 3909150 - RNA, 20 nt, Human adenovirus C
cuuuggggucacugcuaccu

SEQ ID NO: 3909151 - RNA, 20 nt, Human adenovirus C
cuuugguagcugccuuccca

SEQ ID NO: 3909152 - RNA, 22 nt, Human adenovirus C
cuuuuaagggcguagagcuugg

SEQ ID NO: 3909153 - RNA, 17 nt, Human adenovirus C
cuuuuacugcugcugga

SEQ ID NO: 3909154 - RNA, 14 nt, Human adenovirus C
gaaaacagcgaaaa

SEQ ID NO: 3909155 - RNA, 13 nt, Human adenovirus C
gaaacacagagcu

SEQ ID NO: 3909156 - RNA, 14 nt, Human adenovirus C
gaaacacagagcug

SEQ ID NO: 3909157 - RNA, 11 nt, Human adenovirus C
gaaaccccaga

SEQ ID NO: 3909158 - RNA, 16 nt, Human adenovirus C
gaaaccucaccuccca

SEQ ID NO: 3909159 - RNA, 17 nt, Human adenovirus C
gaaaccugugcugccag

SEQ ID NO: 3909160 - RNA, 15 nt, Human adenovirus C
gaaacgcgcggcaaa

SEQ ID NO: 3909161 - RNA, 20 nt, Human adenovirus C
gaaacucggaccacucugag

SEQ ID NO: 3909162 - RNA, 15 nt, Human adenovirus C
gaaagcuuccgcagg

SEQ ID NO: 3909163 - RNA, 18 nt, Human adenovirus C
gaaagcuuccgcaggcca

SEQ ID NO: 3909164 - RNA, 17 nt, Human adenovirus C
gaaagugggcaggcaga

SEQ ID NO: 3909165 - RNA, 18 nt, Human adenovirus C
gaaaugccuguuugaaag

SEQ ID NO: 3909166 - RNA, 20 nt, Human adenovirus C
gaacagcaucgugggucugg

SEQ ID NO: 3909167 - RNA, 13 nt, Human adenovirus C
gaacaggcggcua

SEQ ID NO: 3909168 - RNA, 16 nt, Human adenovirus C
gaacauucccagcugc

SEQ ID NO: 3909169 - RNA, 20 nt, Human adenovirus C
gaaccuuuggacaccuccca

SEQ ID NO: 3909170 - RNA, 17 nt, Human adenovirus C
gaacgaccggcaaggca

SEQ ID NO: 3909171 - RNA, 22 nt, Human adenovirus C
gaacgguuguuaauuaccuggg

SEQ ID NO: 3909172 - RNA, 21 nt, Human adenovirus C
gaacugaggaugaauugccaa

SEQ ID NO: 3909173 - RNA, 20 nt, Human adenovirus C
gaagaacuggaucucccgcc

SEQ ID NO: 3909174 - RNA, 16 nt, Human adenovirus C
gaagacgacgggcccg

SEQ ID NO: 3909175 - RNA, 17 nt, Human adenovirus C
gaagacguaugcgcagg

SEQ ID NO: 3909176 - RNA, 21 nt, Human adenovirus C
gaagacguaugcgcaggagca

SEQ ID NO: 3909177 - RNA, 17 nt, Human adenovirus C
gaagacgugagcgguga

SEQ ID NO: 3909178 - RNA, 18 nt, Human adenovirus C
gaagaucuggaaggugcu

SEQ ID NO: 3909179 - RNA, 19 nt, Human adenovirus C
gaagaucuggaaggugcug

SEQ ID NO: 3909180 - RNA, 20 nt, Human adenovirus C
gaagaucuggaaggugcuga

SEQ ID NO: 3909181 - RNA, 21 nt, Human adenovirus C
gaagcugcagcugccgccgcc

SEQ ID NO: 3909182 - RNA, 14 nt, Human adenovirus C
gaaggugauugguu

SEQ ID NO: 3909183 - RNA, 21 nt, Human adenovirus C
gaagugauuaucgagcaggac

SEQ ID NO: 3909184 - RNA, 22 nt, Human adenovirus C
gaagugauuaucgagcaggacc

SEQ ID NO: 3909185 - RNA, 20 nt, Human adenovirus C
gaaucaggcuguagacagcu

SEQ ID NO: 3909186 - RNA, 14 nt, Human adenovirus C
ggcaacgaccgccu

SEQ ID NO: 3909187 - RNA, 22 nt, Human adenovirus C
ggcaaugcagccgguggaggac

SEQ ID NO: 3909188 - RNA, 23 nt, Human adenovirus C
ggcacaaccauccgcggcagcuc

SEQ ID NO: 3909189 - RNA, 20 nt, Human adenovirus C
ggcacacgugcauacacuuc

SEQ ID NO: 3909190 - RNA, 21 nt, Human adenovirus C
ggcaccauccgcaauacagag

SEQ ID NO: 3909191 - RNA, 18 nt, Human adenovirus C
ggcacugccuguucgccg

SEQ ID NO: 3909192 - RNA, 16 nt, Human adenovirus C
ggcagagcgacugcgc

SEQ ID NO: 3909193 - RNA, 18 nt, Human adenovirus C
ggcagagcgacugcgccu

SEQ ID NO: 3909194 - RNA, 19 nt, Human adenovirus C
ggcagcaaugccuggagga

SEQ ID NO: 3909195 - RNA, 17 nt, Human adenovirus C
ggcagcagccgcaggcc

SEQ ID NO: 3909196 - RNA, 16 nt, Human adenovirus C
ggcagcggugcacggg

SEQ ID NO: 3909197 - RNA, 13 nt, Human adenovirus C
ggcagcucgguga

SEQ ID NO: 3909198 - RNA, 12 nt, Human adenovirus C
ggcaggacccug

SEQ ID NO: 3909199 - RNA, 19 nt, Human adenovirus C
ggcaggacccuggugcugc

SEQ ID NO: 3909200 - RNA, 22 nt, Human adenovirus C
ggcaggggcacgucggcgccgc

SEQ ID NO: 3909201 - RNA, 22 nt, Human adenovirus C
ggcaguugccgaggaugaagaa

SEQ ID NO: 3909202 - RNA, 16 nt, Human adenovirus C
ggcaucucgauccagc

SEQ ID NO: 3909203 - RNA, 16 nt, Human adenovirus C
ggccaaccaggcagug

SEQ ID NO: 3909204 - RNA, 19 nt, Human adenovirus C
ggccaaccaggcagugcaa

SEQ ID NO: 3909205 - RNA, 22 nt, Human adenovirus C
ggccaaucaagcagguggcacc

SEQ ID NO: 3909206 - RNA, 19 nt, Human adenovirus C
ggccagcuguuggggugag

SEQ ID NO: 3909207 - RNA, 17 nt, Human adenovirus C
ggccaguguuugagcac

SEQ ID NO: 3909208 - RNA, 17 nt, Human adenovirus C
ggccaucauaccacaag

SEQ ID NO: 3909209 - RNA, 16 nt, Human adenovirus C
ggccauucagaccgug

SEQ ID NO: 3909210 - RNA, 22 nt, Human adenovirus C
ggccauuuuuacaaagcgcggg

SEQ ID NO: 3909211 - RNA, 11 nt, Human adenovirus C
ggcccacgggc

SEQ ID NO: 3909212 - RNA, 20 nt, Human adenovirus C
ggccccaaacucccauggau

SEQ ID NO: 3909213 - RNA, 18 nt, Human adenovirus C
ggcccgaugaggccggcc

SEQ ID NO: 3909214 - RNA, 15 nt, Human adenovirus C
ggcccgcggugaugc

SEQ ID NO: 3909215 - RNA, 13 nt, Human adenovirus C
ggccgacgggcgg

SEQ ID NO: 3909216 - RNA, 13 nt, Human adenovirus C
ggccgaggcagcg

SEQ ID NO: 3909217 - RNA, 20 nt, Human adenovirus C
ggccgccgugaaccccgagu

SEQ ID NO: 3909218 - RNA, 17 nt, Human adenovirus C
ggccggaccugggcugg

SEQ ID NO: 3909219 - RNA, 15 nt, Human adenovirus C
ggccguagguggcgc

SEQ ID NO: 3909220 - RNA, 16 nt, Human adenovirus C
ggccguggagacagug

SEQ ID NO: 3909221 - RNA, 17 nt, Human adenovirus C
ggccguucucgcggggg

SEQ ID NO: 3909222 - RNA, 20 nt, Human adenovirus C
ggccguucucgcgggggcgc

SEQ ID NO: 3909223 - RNA, 17 nt, Human adenovirus C
ggccuacuggaguguca

SEQ ID NO: 3909224 - RNA, 14 nt, Human adenovirus C
ggccugacgggcgg

SEQ ID NO: 3909225 - RNA, 17 nt, Human adenovirus C
ggccugacgggcggcau

SEQ ID NO: 3909226 - RNA, 16 nt, Human adenovirus C
ggccuuccggagcgag

SEQ ID NO: 3909227 - RNA, 15 nt, Human adenovirus C
ggccuugcggcaggg

SEQ ID NO: 3909228 - RNA, 17 nt, Human adenovirus C
ggcgacgagcggccgcc

SEQ ID NO: 3909229 - RNA, 19 nt, Human adenovirus C
ggcgagggccuggcgcggc

SEQ ID NO: 3909230 - RNA, 22 nt, Human adenovirus C
ggcgauccuaacucugcagacc

SEQ ID NO: 3909231 - RNA, 14 nt, Human adenovirus C
ggcgaugagcagcu

SEQ ID NO: 3909232 - RNA, 21 nt, Human adenovirus C
ggcgcaccgggaggcggucga

SEQ ID NO: 3909233 - RNA, 23 nt, Human adenovirus C
ggcgcacggcguccggcucacca

SEQ ID NO: 3909234 - RNA, 16 nt, Human adenovirus C
ggcgccgcgcgcgggc

SEQ ID NO: 3909235 - RNA, 19 nt, Human adenovirus C
ggcgcgcugcggcugcugu

SEQ ID NO: 3909236 - RNA, 16 nt, Human adenovirus C
ggcgcgcuggucucug

SEQ ID NO: 3909237 - RNA, 23 nt, Human adenovirus C
ggcgcuccauggccucguagaag

SEQ ID NO: 3909238 - RNA, 12 nt, Human adenovirus C
ggcggaggcgcg

SEQ ID NO: 3909239 - RNA, 14 nt, Human adenovirus C
ggcggaggugcugc

SEQ ID NO: 3909240 - RNA, 11 nt, Human adenovirus C
ggcggcagcag

SEQ ID NO: 3909241 - RNA, 11 nt, Human adenovirus C
ggcggcagcgg

SEQ ID NO: 3909242 - RNA, 23 nt, Human adenovirus C
ggcggcagcggcagcggcagcaa

SEQ ID NO: 3909243 - RNA, 13 nt, Human adenovirus C
ggcggcgcgcaac

SEQ ID NO: 3909244 - RNA, 16 nt, Human adenovirus C
ggcggcgcugcagagc

SEQ ID NO: 3909245 - RNA, 21 nt, Human adenovirus C
ggcggcgcugcagagccagcc

SEQ ID NO: 3909246 - RNA, 14 nt, Human adenovirus C
ggcggcgcuggccg

SEQ ID NO: 3909247 - RNA, 19 nt, Human adenovirus C
ggcggcuauuaccaccaca

SEQ ID NO: 3909248 - RNA, 20 nt, Human adenovirus C
ggcggcuuucgucacagggu

SEQ ID NO: 3909249 - RNA, 12 nt, Human adenovirus C
ggcgggcggcag

SEQ ID NO: 3909250 - RNA, 16 nt, Human adenovirus C
ggcgggcggugggccg

SEQ ID NO: 3909251 - RNA, 12 nt, Human adenovirus C
ggcgggcugcuc

SEQ ID NO: 3909252 - RNA, 15 nt, Human adenovirus C
ggcggggggcugccg

SEQ ID NO: 3909253 - RNA, 21 nt, Human adenovirus C
ggcggucggccaugccccagg

SEQ ID NO: 3909254 - RNA, 14 nt, Human adenovirus C
ggcgguggcagaug

SEQ ID NO: 3909255 - RNA, 16 nt, Human adenovirus C
ggcgguggcagaugcc

SEQ ID NO: 3909256 - RNA, 22 nt, Human adenovirus C
ggcguccggcucaccacccagg

SEQ ID NO: 3909257 - RNA, 19 nt, Human adenovirus C
ggcgugcuggacagggggc

SEQ ID NO: 3909258 - RNA, 17 nt, Human adenovirus C
ggcguugccgcuggacg

SEQ ID NO: 3909259 - RNA, 15 nt, Human adenovirus C
ggcuacuaagaaaac

SEQ ID NO: 3909260 - RNA, 15 nt, Human adenovirus C
ggcuauaggacugau

SEQ ID NO: 3909261 - RNA, 15 nt, Human adenovirus C
ggcucaccacccagg

SEQ ID NO: 3909262 - RNA, 22 nt, Human adenovirus C
ggcucgcucccuguagccggag

SEQ ID NO: 3909263 - RNA, 19 nt, Human adenovirus C
ggcugacaagguggccgcc

SEQ ID NO: 3909264 - RNA, 17 nt, Human adenovirus C
ggcugacgcggcggcag

SEQ ID NO: 3909265 - RNA, 19 nt, Human adenovirus C
ggcugacgcggcggcagau

SEQ ID NO: 3909266 - RNA, 18 nt, Human adenovirus C
ggcugccgugcggcaggg

SEQ ID NO: 3909267 - RNA, 13 nt, Human adenovirus C
ggcugcuuguccu

SEQ ID NO: 3909268 - RNA, 15 nt, Human adenovirus C
ggcuggcgguggcac

SEQ ID NO: 3909269 - RNA, 23 nt, Human adenovirus C
ggcuguacauccugcacgagguu

SEQ ID NO: 3909270 - RNA, 22 nt, Human adenovirus C
ggcuugggaguguuuggaagau

SEQ ID NO: 3909271 - RNA, 21 nt, Human adenovirus C
ggcuuuguuucuccacacaag

SEQ ID NO: 3909272 - RNA, 13 nt, Human adenovirus C
gggaacaacccau

SEQ ID NO: 3909273 - RNA, 23 nt, Human adenovirus C
gggacauuucagaucggcggcgc

SEQ ID NO: 3909274 - RNA, 20 nt, Human adenovirus C
gggacuugcggcuggagcug

SEQ ID NO: 3909275 - RNA, 18 nt, Human adenovirus C
cgcaccgucgcaugcgcg

SEQ ID NO: 3909276 - RNA, 17 nt, Human adenovirus C
cgcaccuacaagcgcgu

SEQ ID NO: 3909277 - RNA, 15 nt, Human adenovirus C
cgcaccugccccuac

SEQ ID NO: 3909278 - RNA, 19 nt, Human adenovirus C
cgcacugggcgcaccaccg

SEQ ID NO: 3909279 - RNA, 21 nt, Human adenovirus C
cgcagcccuaucagcagccgc

SEQ ID NO: 3909280 - RNA, 12 nt, Human adenovirus C
cgcagccggugg

SEQ ID NO: 3909281 - RNA, 17 nt, Human adenovirus C
cgcagccggugggcccg

SEQ ID NO: 3909282 - RNA, 22 nt, Human adenovirus C
cgcagcugccuguaucacaaaa

SEQ ID NO: 3909283 - RNA, 17 nt, Human adenovirus C
cgcagcuugagccuggc

SEQ ID NO: 3909284 - RNA, 20 nt, Human adenovirus C
cgcagcuugagccuggcuga

SEQ ID NO: 3909285 - RNA, 21 nt, Human adenovirus C
cgcagcuuguugaccagcucg

SEQ ID NO: 3909286 - RNA, 15 nt, Human adenovirus C
cgcaggcggcggcaa

SEQ ID NO: 3909287 - RNA, 22 nt, Human adenovirus C
cgcaucgcuaugcgccacuggc

SEQ ID NO: 3909288 - RNA, 16 nt, Human adenovirus C
cgcaugaccaccugcg

SEQ ID NO: 3909289 - RNA, 17 nt, Human adenovirus C
cgcaugcccccaugggc

SEQ ID NO: 3909290 - RNA, 16 nt, Human adenovirus C
cgcauggucucgguga

SEQ ID NO: 3909291 - RNA, 24 nt, Human adenovirus C
cgccaaccgcgguugugcagggug

SEQ ID NO: 3909292 - RNA, 17 nt, Human adenovirus C
cgccagacgccgcaccu

SEQ ID NO: 3909293 - RNA, 19 nt, Human adenovirus C
cgccagacgccgcaccugc

SEQ ID NO: 3909294 - RNA, 15 nt, Human adenovirus C
cgccagaggagcugc

SEQ ID NO: 3909295 - RNA, 21 nt, Human adenovirus C
cgcccacaccuacagccugag

SEQ ID NO: 3909296 - RNA, 20 nt, Human adenovirus C
cgcccagcaauaacacaggc

SEQ ID NO: 3909297 - RNA, 15 nt, Human adenovirus C
cgccccaggcugggg

SEQ ID NO: 3909298 - RNA, 14 nt, Human adenovirus C
cgcccccuuugagu

SEQ ID NO: 3909299 - RNA, 23 nt, Human adenovirus C
cgcccguucaugggaaacuggca

SEQ ID NO: 3909300 - RNA, 20 nt, Human adenovirus C
cgcccuacuuccgcagccac

SEQ ID NO: 3909301 - RNA, 15 nt, Human adenovirus C
cgcccucuccugagc

SEQ ID NO: 3909302 - RNA, 20 nt, Human adenovirus C
cgcccuggaggcagcugggg

SEQ ID NO: 3909303 - RNA, 19 nt, Human adenovirus C
cgccgaaccaccacuggaa

SEQ ID NO: 3909304 - RNA, 12 nt, Human adenovirus C
cgccgcagcagc

SEQ ID NO: 3909305 - RNA, 15 nt, Human adenovirus C
cgccgcagcagccgc

SEQ ID NO: 3909306 - RNA, 13 nt, Human adenovirus C
cgccgccaccagu

SEQ ID NO: 3909307 - RNA, 15 nt, Human adenovirus C
cgccgccgacccggc

SEQ ID NO: 3909308 - RNA, 15 nt, Human adenovirus C
cgccgccgcagcccu

SEQ ID NO: 3909309 - RNA, 15 nt, Human adenovirus C
cgccgccggcacugc

SEQ ID NO: 3909310 - RNA, 18 nt, Human adenovirus C
cgccggcgccccagaaau

SEQ ID NO: 3909311 - RNA, 23 nt, Human adenovirus C
cgccgggagagggggcaggggca

SEQ ID NO: 3909312 - RNA, 15 nt, Human adenovirus C
cgccguuagcccaag

SEQ ID NO: 3909313 - RNA, 16 nt, Human adenovirus C
cgccuaccaggcaagc

SEQ ID NO: 3909314 - RNA, 14 nt, Human adenovirus C
cgccugacacaccu

SEQ ID NO: 3909315 - RNA, 12 nt, Human adenovirus C
cgccugcugcac

SEQ ID NO: 3909316 - RNA, 22 nt, Human adenovirus C
cgccugcugccaugcgcgggcg

SEQ ID NO: 3909317 - RNA, 13 nt, Human adenovirus C
cgccugcugggcg

SEQ ID NO: 3909318 - RNA, 17 nt, Human adenovirus C
cgccugcuuacucccaa

SEQ ID NO: 3909319 - RNA, 22 nt, Human adenovirus C
cgccuguggacuauucugcugc

SEQ ID NO: 3909320 - RNA, 21 nt, Human adenovirus C
cgccuucgaucucagcgcagc

SEQ ID NO: 3909321 - RNA, 15 nt, Human adenovirus C
cgcgagacugggggc

SEQ ID NO: 3909322 - RNA, 23 nt, Human adenovirus C
cgcgagcugaugcacagccugca

SEQ ID NO: 3909323 - RNA, 19 nt, Human adenovirus C
cgcgagggagaggagcccg

SEQ ID NO: 3909324 - RNA, 18 nt, Human adenovirus C
cgcgcaaaccccacgcac

SEQ ID NO: 3909325 - RNA, 22 nt, Human adenovirus C
cgcgcaaaccccacgcacgaga

SEQ ID NO: 3909326 - RNA, 14 nt, Human adenovirus C
cgcgcaccuggcgg

SEQ ID NO: 3909327 - RNA, 13 nt, Human adenovirus C
cgcgcccuggggc

SEQ ID NO: 3909328 - RNA, 16 nt, Human adenovirus C
cgcgccuaccaccuuc

SEQ ID NO: 3909329 - RNA, 18 nt, Human adenovirus C
cgcgcgcagcagcagggc

SEQ ID NO: 3909330 - RNA, 14 nt, Human adenovirus C
cgcgcgucgcaccg

SEQ ID NO: 3909331 - RNA, 14 nt, Human adenovirus C
cgcgcugcggcugc

SEQ ID NO: 3909332 - RNA, 15 nt, Human adenovirus C
cgcgcuggccagggu

SEQ ID NO: 3909333 - RNA, 15 nt, Human adenovirus C
cgcggcgacagguca

SEQ ID NO: 3909334 - RNA, 14 nt, Human adenovirus C
cgcggcgacggcgc

SEQ ID NO: 3909335 - RNA, 17 nt, Human adenovirus C
cgcggcggcggcccugc

SEQ ID NO: 3909336 - RNA, 13 nt, Human adenovirus C
cgcggcggcugcu

SEQ ID NO: 3909337 - RNA, 20 nt, Human adenovirus C
cgcggcggucaccagaggcu

SEQ ID NO: 3909338 - RNA, 15 nt, Human adenovirus C
cgcggcguaagcggu

SEQ ID NO: 3909339 - RNA, 22 nt, Human adenovirus C
cgcggcgugcuggacagggggc

SEQ ID NO: 3909340 - RNA, 15 nt, Human adenovirus C
cgcggcugacgcggc

SEQ ID NO: 3909341 - RNA, 19 nt, Human adenovirus C
cgcggcuguagaccacgcc

SEQ ID NO: 3909342 - RNA, 15 nt, Human adenovirus C
cgcgggcggagggug

SEQ ID NO: 3909343 - RNA, 13 nt, Human adenovirus C
cgcgguaggcccg

SEQ ID NO: 3909344 - RNA, 16 nt, Human adenovirus C
cgcgguucacccuggc

SEQ ID NO: 3909345 - RNA, 17 nt, Human adenovirus C
cgcgucaugcacgcagc

SEQ ID NO: 3909346 - RNA, 14 nt, Human adenovirus C
cgcguccaggccag

SEQ ID NO: 3909347 - RNA, 15 nt, Human adenovirus C
cgcguccaggccagc

SEQ ID NO: 3909348 - RNA, 16 nt, Human adenovirus C
cgcguuccggcagcag

SEQ ID NO: 3909349 - RNA, 17 nt, Human adenovirus C
cgcuaugcgccacuggc

SEQ ID NO: 3909350 - RNA, 17 nt, Human adenovirus C
cgcucauggcgcagcug

SEQ ID NO: 3909351 - RNA, 19 nt, Human adenovirus C
cgcucgucgggcaccaggu

SEQ ID NO: 3909352 - RNA, 16 nt, Human adenovirus C
cgcucugcuuauuaca

SEQ ID NO: 3909353 - RNA, 15 nt, Human adenovirus C
cgcugaggccgaggc

SEQ ID NO: 3909354 - RNA, 14 nt, Human adenovirus C
cgcugcccuggugu

SEQ ID NO: 3909355 - RNA, 19 nt, Human adenovirus C
cgcuggacaugaccgcgcg

SEQ ID NO: 3909356 - RNA, 17 nt, Human adenovirus C
cgcuggccagcacgcuc

SEQ ID NO: 3909357 - RNA, 12 nt, Human adenovirus C
cgcuggccaggg

SEQ ID NO: 3909358 - RNA, 13 nt, Human adenovirus C
cgcuggccagggu

SEQ ID NO: 3909359 - RNA, 20 nt, Human adenovirus C
cgcuggccgaaaacagggcc

SEQ ID NO: 3909360 - RNA, 13 nt, Human adenovirus C
cgcuggggcagga

SEQ ID NO: 3909361 - RNA, 17 nt, Human adenovirus C
cgcuggggcaggaggac

SEQ ID NO: 3909362 - RNA, 16 nt, Human adenovirus C
cgcuguaccugccaga

SEQ ID NO: 3909363 - RNA, 15 nt, Human adenovirus C
cgcuguacggcagua

SEQ ID NO: 3909364 - RNA, 23 nt, Human adenovirus C
cgcuguccacgaucaccucuggg

SEQ ID NO: 3909365 - RNA, 18 nt, Human adenovirus C
cggaaaccucaccuccca

SEQ ID NO: 3909366 - RNA, 19 nt, Human adenovirus C
cggaagacuaucugccuga

SEQ ID NO: 3909367 - RNA, 19 nt, Human adenovirus C
cggacuaucgcaacaccac

SEQ ID NO: 3909368 - RNA, 19 nt, Human adenovirus C
cggaggcguacaugccgca

SEQ ID NO: 3909369 - RNA, 12 nt, Human adenovirus C
acaaagcagggg

SEQ ID NO: 3909370 - RNA, 16 nt, Human adenovirus C
acaacuuugccaugga

SEQ ID NO: 3909371 - RNA, 12 nt, Human adenovirus C
acaagugggaau

SEQ ID NO: 3909372 - RNA, 18 nt, Human adenovirus C
acaagugggaauuugaag

SEQ ID NO: 3909373 - RNA, 21 nt, Human adenovirus C
acaauaggaaacaaaaaugau

SEQ ID NO: 3909374 - RNA, 14 nt, Human adenovirus C
acaaugacuacagc

SEQ ID NO: 3909375 - RNA, 22 nt, Human adenovirus C
acaauguggccuccgacugugg

SEQ ID NO: 3909376 - RNA, 14 nt, Human adenovirus C
acacagaagcaaag

SEQ ID NO: 3909377 - RNA, 13 nt, Human adenovirus C
acacagcccgcca

SEQ ID NO: 3909378 - RNA, 19 nt, Human adenovirus C
acacccggcgccagcaccu

SEQ ID NO: 3909379 - RNA, 15 nt, Human adenovirus C
acaccgucacccucg

SEQ ID NO: 3909380 - RNA, 14 nt, Human adenovirus C
acaccuacagccug

SEQ ID NO: 3909381 - RNA, 16 nt, Human adenovirus C
acaccuacgacuacau

SEQ ID NO: 3909382 - RNA, 13 nt, Human adenovirus C
acacggccuccac

SEQ ID NO: 3909383 - RNA, 18 nt, Human adenovirus C
acacugauuaaaaacaag

SEQ ID NO: 3909384 - RNA, 19 nt, Human adenovirus C
acagauaauggcauuugua

SEQ ID NO: 3909385 - RNA, 15 nt, Human adenovirus C
acagccgccugagca

SEQ ID NO: 3909386 - RNA, 20 nt, Human adenovirus C
acagcggcaacgugcagacc

SEQ ID NO: 3909387 - RNA, 15 nt, Human adenovirus C
acagcugccgccaug

SEQ ID NO: 3909388 - RNA, 20 nt, Human adenovirus C
acagcuuccuggagcgccac

SEQ ID NO: 3909389 - RNA, 13 nt, Human adenovirus C
acaggccgcguca

SEQ ID NO: 3909390 - RNA, 22 nt, Human adenovirus C
acauauuuccugcagauucacu

SEQ ID NO: 3909391 - RNA, 14 nt, Human adenovirus C
acaucauggaagac

SEQ ID NO: 3909392 - RNA, 22 nt, Human adenovirus C
acauccgcggcgugcuggacag

SEQ ID NO: 3909393 - RNA, 23 nt, Human adenovirus C
acaucgaaguagauugcauccca

SEQ ID NO: 3909394 - RNA, 17 nt, Human adenovirus C
acaucucgggccaggac

SEQ ID NO: 3909395 - RNA, 15 nt, Human adenovirus C
acaugcgagcccaac

SEQ ID NO: 3909396 - RNA, 20 nt, Human adenovirus C
acauuacucccauuuuucca

SEQ ID NO: 3909397 - RNA, 16 nt, Human adenovirus C
acauucccagcugcua

SEQ ID NO: 3909398 - RNA, 23 nt, Human adenovirus C
accaaaagugguuuuguacagug

SEQ ID NO: 3909399 - RNA, 12 nt, Human adenovirus C
accaauguggaa

SEQ ID NO: 3909400 - RNA, 18 nt, Human adenovirus C
accacagaccggucccag

SEQ ID NO: 3909401 - RNA, 14 nt, Human adenovirus C
accaccacaccucg

SEQ ID NO: 3909402 - RNA, 15 nt, Human adenovirus C
accaccacuggaacc

SEQ ID NO: 3909403 - RNA, 22 nt, Human adenovirus C
accacccgcccgcgccugcugg

SEQ ID NO: 3909404 - RNA, 16 nt, Human adenovirus C
accacccuccucaccu

SEQ ID NO: 3909405 - RNA, 15 nt, Human adenovirus C
accacuguuacucag

SEQ ID NO: 3909406 - RNA, 15 nt, Human adenovirus C
accacuuacuggcug

SEQ ID NO: 3909407 - RNA, 18 nt, Human adenovirus C
accagacauuacucccau

SEQ ID NO: 3909408 - RNA, 23 nt, Human adenovirus C
accagauauuuuucuauguggaa

SEQ ID NO: 3909409 - RNA, 19 nt, Human adenovirus C
accagcaauaugagcggug

SEQ ID NO: 3909410 - RNA, 14 nt, Human adenovirus C
accagccgcaccgc

SEQ ID NO: 3909411 - RNA, 20 nt, Human adenovirus C
accagccugugaugcuggau

SEQ ID NO: 3909412 - RNA, 21 nt, Human adenovirus C
accagcucaaucagucacagu

SEQ ID NO: 3909413 - RNA, 18 nt, Human adenovirus C
accauccuaaaccagcug

SEQ ID NO: 3909414 - RNA, 18 nt, Human adenovirus C
accaugcgcgagggacag

SEQ ID NO: 3909415 - RNA, 15 nt, Human adenovirus C
acccaacaccuagcc

SEQ ID NO: 3909416 - RNA, 18 nt, Human adenovirus C
acccaagggugcagcuga

SEQ ID NO: 3909417 - RNA, 16 nt, Human adenovirus C
acccaccgugcagcug

SEQ ID NO: 3909418 - RNA, 16 nt, Human adenovirus C
accccaacaccuacga

SEQ ID NO: 3909419 - RNA, 17 nt, Human adenovirus C
accccaaguucaugccu

SEQ ID NO: 3909420 - RNA, 14 nt, Human adenovirus C
acccccgcggcgcc

SEQ ID NO: 3909421 - RNA, 12 nt, Human adenovirus C
accccgcaccgc

SEQ ID NO: 3909422 - RNA, 18 nt, Human adenovirus C
accccgccaacgugcccu

SEQ ID NO: 3909423 - RNA, 13 nt, Human adenovirus C
accccgcgccacu

SEQ ID NO: 3909424 - RNA, 20 nt, Human adenovirus C
acccgcaccaggugcagacc

SEQ ID NO: 3909425 - RNA, 20 nt, Human adenovirus C
acccgcccgcgccugcuggg

SEQ ID NO: 3909426 - RNA, 22 nt, Human adenovirus C
acccgcccgcgccugcugggcg

SEQ ID NO: 3909427 - RNA, 15 nt, Human adenovirus C
acccgcgcgcgcugg

SEQ ID NO: 3909428 - RNA, 13 nt, Human adenovirus C
gggagaggagccc

SEQ ID NO: 3909429 - RNA, 13 nt, Human adenovirus C
gggagaggggcgc

SEQ ID NO: 3909430 - RNA, 15 nt, Human adenovirus C
gggagaucagcuggg

SEQ ID NO: 3909431 - RNA, 14 nt, Human adenovirus C
gggagcuccugcag

SEQ ID NO: 3909432 - RNA, 22 nt, Human adenovirus C
gggaggcaagcacacagaccau

SEQ ID NO: 3909433 - RNA, 14 nt, Human adenovirus C
gggcaaagaagcgc

SEQ ID NO: 3909434 - RNA, 14 nt, Human adenovirus C
gggcccggcgcacg

SEQ ID NO: 3909435 - RNA, 12 nt, Human adenovirus C
gggccggggugc

SEQ ID NO: 3909436 - RNA, 19 nt, Human adenovirus C
gggcgggcccccggaggua

SEQ ID NO: 3909437 - RNA, 14 nt, Human adenovirus C
gggcggugggccgc

SEQ ID NO: 3909438 - RNA, 19 nt, Human adenovirus C
gggcguggcuuaagggugg

SEQ ID NO: 3909439 - RNA, 16 nt, Human adenovirus C
gggcguguggcagcaa

SEQ ID NO: 3909440 - RNA, 15 nt, Human adenovirus C
gggcugcgcgcuggc

SEQ ID NO: 3909441 - RNA, 20 nt, Human adenovirus C
gggcugguugguggcggcgu

SEQ ID NO: 3909442 - RNA, 23 nt, Human adenovirus C
ggggaggggggacacggcggcga

SEQ ID NO: 3909443 - RNA, 18 nt, Human adenovirus C
ggggauucauguugugca

SEQ ID NO: 3909444 - RNA, 21 nt, Human adenovirus C
ggggcaacaucuccuucgccc

SEQ ID NO: 3909445 - RNA, 15 nt, Human adenovirus C
ggggcauggccggcc

SEQ ID NO: 3909446 - RNA, 18 nt, Human adenovirus C
ggggcgcgcuggucucug

SEQ ID NO: 3909447 - RNA, 11 nt, Human adenovirus C
ggggucacugc

SEQ ID NO: 3909448 - RNA, 21 nt, Human adenovirus C
gggguccacucgcuccagggu

SEQ ID NO: 3909449 - RNA, 13 nt, Human adenovirus C
ggggugggugagc

SEQ ID NO: 3909450 - RNA, 14 nt, Human adenovirus C
gggguuugacccag

SEQ ID NO: 3909451 - RNA, 17 nt, Human adenovirus C
ggguaacagacauauuc

SEQ ID NO: 3909452 - RNA, 13 nt, Human adenovirus C
gggucgcaggggc

SEQ ID NO: 3909453 - RNA, 21 nt, Human adenovirus C
gggucuuuuaccagcacucgc

SEQ ID NO: 3909454 - RNA, 14 nt, Human adenovirus C
gggugguggaccug

SEQ ID NO: 3909455 - RNA, 21 nt, Human adenovirus C
ggguguucuugcuggucaggc

SEQ ID NO: 3909456 - RNA, 17 nt, Human adenovirus C
ggguugaaacucacucc

SEQ ID NO: 3909457 - RNA, 21 nt, Human adenovirus C
ggguuguuucuggcggaggug

SEQ ID NO: 3909458 - RNA, 13 nt, Human adenovirus C
ggguuugccuccc

SEQ ID NO: 3909459 - RNA, 23 nt, Human adenovirus C
gguaccgcgcggcgggcgguggg

SEQ ID NO: 3909460 - RNA, 21 nt, Human adenovirus C
gguaccuuugagcugcagggu

SEQ ID NO: 3909461 - RNA, 21 nt, Human adenovirus C
gguacuucccagagacgccca

SEQ ID NO: 3909462 - RNA, 14 nt, Human adenovirus C
gguagauggccugg

SEQ ID NO: 3909463 - RNA, 20 nt, Human adenovirus C
gguagcaccacugcagagcu

SEQ ID NO: 3909464 - RNA, 22 nt, Human adenovirus C
gguaguuaagagagcugcagcu

SEQ ID NO: 3909465 - RNA, 15 nt, Human adenovirus C
ggucaggcgggagcu

SEQ ID NO: 3909466 - RNA, 16 nt, Human adenovirus C
ggucaucgcgccggag

SEQ ID NO: 3909467 - RNA, 17 nt, Human adenovirus C
gguccagcagaggcggc

SEQ ID NO: 3909468 - RNA, 17 nt, Human adenovirus C
gguccugcuggugcuga

SEQ ID NO: 3909469 - RNA, 19 nt, Human adenovirus C
gguccugcuggugcugaag

SEQ ID NO: 3909470 - RNA, 18 nt, Human adenovirus C
ggucuccguccggacggg

SEQ ID NO: 3909471 - RNA, 20 nt, Human adenovirus C
ggugagcuccucaggggagc

SEQ ID NO: 3909472 - RNA, 21 nt, Human adenovirus C
ggugaugccuuugaggguggc

SEQ ID NO: 3909473 - RNA, 15 nt, Human adenovirus C
ggugcaggagcgcag

SEQ ID NO: 3909474 - RNA, 22 nt, Human adenovirus C
ggugcaugcccaggcuuugagu

SEQ ID NO: 3909475 - RNA, 19 nt, Human adenovirus C
ggugcucguccagacgggc

SEQ ID NO: 3909476 - RNA, 18 nt, Human adenovirus C
ggugcugaagcgcugccg

SEQ ID NO: 3909477 - RNA, 11 nt, Human adenovirus C
gguggcggcga

SEQ ID NO: 3909478 - RNA, 17 nt, Human adenovirus C
gguggucgcgaaagguc

SEQ ID NO: 3909479 - RNA, 14 nt, Human adenovirus C
ggugguggaccugg

SEQ ID NO: 3909480 - RNA, 19 nt, Human adenovirus C
gguguaggccacgugaccg

SEQ ID NO: 3909481 - RNA, 13 nt, Human adenovirus C
ggugugggugagc

SEQ ID NO: 3909482 - RNA, 13 nt, Human adenovirus C
gguucccccuucg

SEQ ID NO: 3909483 - RNA, 14 nt, Human adenovirus C
gguugaucuccuga

SEQ ID NO: 3909484 - RNA, 17 nt, Human adenovirus C
gguuggcggggggcugc

SEQ ID NO: 3909485 - RNA, 12 nt, Human adenovirus C
gguuggggcggc

SEQ ID NO: 3909486 - RNA, 15 nt, Human adenovirus C
gguuuacugguccca

SEQ ID NO: 3909487 - RNA, 14 nt, Human adenovirus C
gguuuuccuggcca

SEQ ID NO: 3909488 - RNA, 17 nt, Human adenovirus C
guaagcgcgcuggagca

SEQ ID NO: 3909489 - RNA, 19 nt, Human adenovirus C
guaccaguccgggccagac

SEQ ID NO: 3909490 - RNA, 13 nt, Human adenovirus C
guaccgcagcugg

SEQ ID NO: 3909491 - RNA, 14 nt, Human adenovirus C
guaccgcgaggcca

SEQ ID NO: 3909492 - RNA, 17 nt, Human adenovirus C
guaccugagccccgggc

SEQ ID NO: 3909493 - RNA, 13 nt, Human adenovirus C
guaccuuaaucaa

SEQ ID NO: 3909494 - RNA, 16 nt, Human adenovirus C
guacggcaccgccagc

SEQ ID NO: 3909495 - RNA, 16 nt, Human adenovirus C
guacggcgacgaggac

SEQ ID NO: 3909496 - RNA, 19 nt, Human adenovirus C
guacgguuuuccuggccaa

SEQ ID NO: 3909497 - RNA, 22 nt, Human adenovirus C
guacuggcagcggugcacgggc

SEQ ID NO: 3909498 - RNA, 21 nt, Human adenovirus C
guacuuuaacggcucuucauu

SEQ ID NO: 3909499 - RNA, 18 nt, Human adenovirus C
guagacaaggccugcaga

SEQ ID NO: 3909500 - RNA, 21 nt, Human adenovirus C
guagacaaggccugcagaccg

SEQ ID NO: 3909501 - RNA, 17 nt, Human adenovirus C
guagaugauccagucgu

SEQ ID NO: 3909502 - RNA, 20 nt, Human adenovirus C
guagcaagcugauugccagg

SEQ ID NO: 3909503 - RNA, 13 nt, Human adenovirus C
guagcgccacauc

SEQ ID NO: 3909504 - RNA, 14 nt, Human adenovirus C
guaggagucgcgca

SEQ ID NO: 3909505 - RNA, 23 nt, Human adenovirus C
guaggggagaucagcugggaaga

SEQ ID NO: 3909506 - RNA, 21 nt, Human adenovirus C
guaguagucuugcaugagccu

SEQ ID NO: 3909507 - RNA, 15 nt, Human adenovirus C
guauacagacuugag

SEQ ID NO: 3909508 - RNA, 13 nt, Human adenovirus C
guauccugccccu

SEQ ID NO: 3909509 - RNA, 21 nt, Human adenovirus C
guaucgacccgcgagcuuaga

SEQ ID NO: 3909510 - RNA, 23 nt, Human adenovirus C
guauucgcgcgcaacgcaccgcc

SEQ ID NO: 3909511 - RNA, 18 nt, Human adenovirus C
gucaagcaggccaaacuu

SEQ ID NO: 3909512 - RNA, 11 nt, Human adenovirus C
gucacaaacuc

SEQ ID NO: 3909513 - RNA, 16 nt, Human adenovirus C
gucagccgcgcgcugg

SEQ ID NO: 3909514 - RNA, 21 nt, Human adenovirus C
gucagccgcgcgcuggggcag

SEQ ID NO: 3909515 - RNA, 15 nt, Human adenovirus C
gucaggaggggcaac

SEQ ID NO: 3909516 - RNA, 14 nt, Human adenovirus C
gucaggcgggagcu

SEQ ID NO: 3909517 - RNA, 14 nt, Human adenovirus C
gucauaccacugca

SEQ ID NO: 3909518 - RNA, 14 nt, Human adenovirus C
gucaucucugugcu

SEQ ID NO: 3909519 - RNA, 20 nt, Human adenovirus C
gucauggaccgcaucauguc

SEQ ID NO: 3909520 - RNA, 22 nt, Human adenovirus C
guccacaaaaaacacccagaaa

SEQ ID NO: 3909521 - RNA, 19 nt, Human adenovirus C
guccagcugcugagccaca

SEQ ID NO: 3909522 - RNA, 23 nt, Human adenovirus C
guccauccuuauaucgcccagca

SEQ ID NO: 3909523 - RNA, 15 nt, Human adenovirus C
gucccuccgcaccca

SEQ ID NO: 3909524 - RNA, 19 nt, Human adenovirus C
gucccugcgccgugccgcc

SEQ ID NO: 3909525 - RNA, 14 nt, Human adenovirus C
guccuccgggcaca

SEQ ID NO: 3909526 - RNA, 23 nt, Human adenovirus C
guccucggagccgcgcuccggag

SEQ ID NO: 3909527 - RNA, 18 nt, Human adenovirus C
gucgcauuccccucgccg

SEQ ID NO: 3909528 - RNA, 13 nt, Human adenovirus C
gucgccaccgccg

SEQ ID NO: 3909529 - RNA, 17 nt, Human adenovirus C
gucgccgccagaggagc

SEQ ID NO: 3909530 - RNA, 15 nt, Human adenovirus C
gucgcgccgcaccgc

SEQ ID NO: 3909531 - RNA, 12 nt, Human adenovirus C
gucggcgccgcg

SEQ ID NO: 3909532 - RNA, 13 nt, Human adenovirus C
gucgucagcgcca

SEQ ID NO: 3909533 - RNA, 15 nt, Human adenovirus C
gucuaagcagccgcc

SEQ ID NO: 3909534 - RNA, 22 nt, Human adenovirus C
gucuagcugcgucucguccggg

SEQ ID NO: 3909535 - RNA, 23 nt, Human adenovirus C
gucuagggcgcaguaguccaggg

SEQ ID NO: 3909536 - RNA, 16 nt, Human adenovirus C
gucucgcgcggcgguc

SEQ ID NO: 3909537 - RNA, 14 nt, Human adenovirus C
gucucuggccccgc

SEQ ID NO: 3909538 - RNA, 15 nt, Human adenovirus C
gucugcagcgcugcc

SEQ ID NO: 3909539 - RNA, 17 nt, Human adenovirus C
gucuucauucagccgcc

SEQ ID NO: 3909540 - RNA, 23 nt, Human adenovirus C
gucuuuguaguagucuugcauga

SEQ ID NO: 3909541 - RNA, 15 nt, Human adenovirus C
gugaauccacagaaa

SEQ ID NO: 3909542 - RNA, 15 nt, Human adenovirus C
gugaccuuccgcucc

SEQ ID NO: 3909543 - RNA, 22 nt, Human adenovirus C
gugacgaaaaggcuguccgugu

SEQ ID NO: 3909544 - RNA, 17 nt, Human adenovirus C
gugacuuggcacccacc

SEQ ID NO: 3909545 - RNA, 16 nt, Human adenovirus C
gugcaugcccaggcuu

SEQ ID NO: 3909546 - RNA, 23 nt, Human adenovirus C
gugccuuuuacugcugcuggaag

SEQ ID NO: 3909547 - RNA, 18 nt, Human adenovirus C
gugcgcccgcuuuccaag

SEQ ID NO: 3909548 - RNA, 16 nt, Human adenovirus C
gugcgcggcaccagcg

SEQ ID NO: 3909549 - RNA, 19 nt, Human adenovirus C
gugcguaacuugcuggaac

SEQ ID NO: 3909550 - RNA, 13 nt, Human adenovirus C
gugcugcagcagc

SEQ ID NO: 3909551 - RNA, 16 nt, Human adenovirus C
gugcugcggcagaugc

SEQ ID NO: 3909552 - RNA, 23 nt, Human adenovirus C
gugcugguggaacuugaggguga

SEQ ID NO: 3909553 - RNA, 22 nt, Human adenovirus C
gugcuuauggugggagaaaaac

SEQ ID NO: 3909554 - RNA, 22 nt, Human adenovirus C
guggaccuggccaaccaggcag

SEQ ID NO: 3909555 - RNA, 17 nt, Human adenovirus C
guggacgucgcgccgca

SEQ ID NO: 3909556 - RNA, 22 nt, Human adenovirus C
guggacguucagauacccacca

SEQ ID NO: 3909557 - RNA, 16 nt, Human adenovirus C
guggacuucacccaca

SEQ ID NO: 3909558 - RNA, 14 nt, Human adenovirus C
guggagccugggcu

SEQ ID NO: 3909559 - RNA, 16 nt, Human adenovirus C
guggagccugggcugg

SEQ ID NO: 3909560 - RNA, 17 nt, Human adenovirus C
guggagccugggcugga

SEQ ID NO: 3909561 - RNA, 14 nt, Human adenovirus C
guggcaacuggcaa

SEQ ID NO: 3909562 - RNA, 20 nt, Human adenovirus C
guggcccuuggcgcgcagcu

SEQ ID NO: 3909563 - RNA, 18 nt, Human adenovirus C
guggccuccgacuguggu

SEQ ID NO: 3909564 - RNA, 16 nt, Human adenovirus C
guggcgguguguucug

SEQ ID NO: 3909565 - RNA, 19 nt, Human adenovirus C
gugggugagcgcaaaggug

SEQ ID NO: 3909566 - RNA, 18 nt, Human adenovirus C
gugggugagcgcggaggc

SEQ ID NO: 3909567 - RNA, 19 nt, Human adenovirus C
gugguagauggccuggccu

SEQ ID NO: 3909568 - RNA, 17 nt, Human adenovirus C
guggugagcgcggcgcc

SEQ ID NO: 3909569 - RNA, 12 nt, Human adenovirus C
guggugcaggag

SEQ ID NO: 3909570 - RNA, 15 nt, Human adenovirus C
guggugcugcagcag

SEQ ID NO: 3909571 - RNA, 16 nt, Human adenovirus C
gugguggaccuggcca

SEQ ID NO: 3909572 - RNA, 17 nt, Human adenovirus C
gugguggaccuggccaa

SEQ ID NO: 3909573 - RNA, 22 nt, Human adenovirus C
guguagacacuuaagcucgccu

SEQ ID NO: 3909574 - RNA, 21 nt, Human adenovirus C
gugugaugcggaagggucccg

SEQ ID NO: 3909575 - RNA, 14 nt, Human adenovirus C
guuaauuaccuggg

SEQ ID NO: 3909576 - RNA, 17 nt, Human adenovirus C
guuccugagcagcugcg

SEQ ID NO: 3909577 - RNA, 15 nt, Human adenovirus C
guucgcacuggggcg

SEQ ID NO: 3909578 - RNA, 22 nt, Human adenovirus C
guucuaauggagaacuccucac

SEQ ID NO: 3909579 - RNA, 15 nt, Human adenovirus C
guucugcgagucaca

SEQ ID NO: 3909580 - RNA, 19 nt, Human adenovirus C
guucuucagaaacuuccag

SEQ ID NO: 3909581 - RNA, 14 nt, Human adenovirus C
guugaaagagcaaa

SEQ ID NO: 3909582 - RNA, 16 nt, Human adenovirus C
guugacggcggccugg

SEQ ID NO: 3909583 - RNA, 15 nt, Human adenovirus C
guugcauguggaaaa

SEQ ID NO: 3909584 - RNA, 13 nt, Human adenovirus C
guugcgcuuuucu

SEQ ID NO: 3909585 - RNA, 16 nt, Human adenovirus C
guugcgcuuuucugug

SEQ ID NO: 3909586 - RNA, 14 nt, Human adenovirus C
guuggagaucugca

SEQ ID NO: 3909587 - RNA, 13 nt, Human adenovirus C
guuggauguggac

SEQ ID NO: 3909588 - RNA, 19 nt, Human adenovirus C
guuguacagguggcugaac

SEQ ID NO: 3909589 - RNA, 18 nt, Human adenovirus C
guugucaagcuugguggc

SEQ ID NO: 3909590 - RNA, 21 nt, Human adenovirus C
guuuaaacagcgaggaggagc

SEQ ID NO: 3909591 - RNA, 15 nt, Human adenovirus C
guuuagagaacacug

SEQ ID NO: 3909592 - RNA, 13 nt, Human adenovirus C
guuugugccuccg

SEQ ID NO: 3909593 - RNA, 20 nt, Human adenovirus C
guuuucacuccacaggcugc

SEQ ID NO: 3909594 - RNA, 17 nt, Human adenovirus C
uaaacucaggcacaacc

SEQ ID NO: 3909595 - RNA, 15 nt, Human adenovirus C
uaaauaaaaaccaga

SEQ ID NO: 3909596 - RNA, 19 nt, Human adenovirus C
uaaaugccaaccuauggag

SEQ ID NO: 3909597 - RNA, 21 nt, Human adenovirus C
uaaaugggaugucaaauuccu

SEQ ID NO: 3909598 - RNA, 16 nt, Human adenovirus C
uaacagcacuggcaac

SEQ ID NO: 3909599 - RNA, 16 nt, Human adenovirus C
uaacaguccccaggua

SEQ ID NO: 3909600 - RNA, 15 nt, Human adenovirus C
uaacauccaccaccg

SEQ ID NO: 3909601 - RNA, 16 nt, Human adenovirus C
uaacaugguucugcag

SEQ ID NO: 3909602 - RNA, 12 nt, Human adenovirus C
uaacucuacaag

SEQ ID NO: 3909603 - RNA, 16 nt, Human adenovirus C
uaacuuggacauaaac

SEQ ID NO: 3909604 - RNA, 19 nt, Human adenovirus C
uaagauugucaguuuccaa

SEQ ID NO: 3909605 - RNA, 15 nt, Human adenovirus C
uaagcccgucucugg

SEQ ID NO: 3909606 - RNA, 21 nt, Human adenovirus C
uaaguaccuuaccugguacuu

SEQ ID NO: 3909607 - RNA, 12 nt, Human adenovirus C
uaaguuugacag

SEQ ID NO: 3909608 - RNA, 13 nt, Human adenovirus C
uaaguuugccaca

SEQ ID NO: 3909609 - RNA, 15 nt, Human adenovirus C
uaauuaccugggcgg

SEQ ID NO: 3909610 - RNA, 19 nt, Human adenovirus C
uacaaacgaagccuuccau

SEQ ID NO: 3909611 - RNA, 15 nt, Human adenovirus C
uacaacguagcucag

SEQ ID NO: 3909612 - RNA, 16 nt, Human adenovirus C
uacacaggguugcagc

SEQ ID NO: 3909613 - RNA, 19 nt, Human adenovirus C
uacacaggguugcagcacu

SEQ ID NO: 3909614 - RNA, 15 nt, Human adenovirus C
uacagagacaggacu

SEQ ID NO: 3909615 - RNA, 19 nt, Human adenovirus C
uacagccccuacugcaccg

SEQ ID NO: 3909616 - RNA, 18 nt, Human adenovirus C
uacagcccgggggaggca

SEQ ID NO: 3909617 - RNA, 20 nt, Human adenovirus C
uacaugagcgcgggacccca

SEQ ID NO: 3909618 - RNA, 15 nt, Human adenovirus C
uacauugcccaggaa

SEQ ID NO: 3909619 - RNA, 12 nt, Human adenovirus C
uaccgcgcggcg

SEQ ID NO: 3909620 - RNA, 19 nt, Human adenovirus C
uaccggagugcugggccag

SEQ ID NO: 3909621 - RNA, 23 nt, Human adenovirus C
uaccugcuggauuuucuggccau

SEQ ID NO: 3909622 - RNA, 21 nt, Human adenovirus C
uaccuguguggaagccuggac

SEQ ID NO: 3909623 - RNA, 23 nt, Human adenovirus C
uaccuuuccgccgccaacaugcu

SEQ ID NO: 3909624 - RNA, 21 nt, Human adenovirus C
uacgccaucaucucugucaug

SEQ ID NO: 3909625 - RNA, 21 nt, Human adenovirus C
uacggaggauaggguggccuu

SEQ ID NO: 3909626 - RNA, 15 nt, Human adenovirus C
uacggauuugucacc

SEQ ID NO: 3909627 - RNA, 12 nt, Human adenovirus C
uacgucaucucc

SEQ ID NO: 3909628 - RNA, 15 nt, Human adenovirus C
uacgugccgcggcag

SEQ ID NO: 3909629 - RNA, 17 nt, Human adenovirus C
uacuaagaaaacacaug

SEQ ID NO: 3909630 - RNA, 23 nt, Human adenovirus C
uacuaaggacaaacagguggagc

SEQ ID NO: 3909631 - RNA, 16 nt, Human adenovirus C
uacugcugcuggaagg

SEQ ID NO: 3909632 - RNA, 14 nt, Human adenovirus C
uacuuacuuaaaau

SEQ ID NO: 3909633 - RNA, 21 nt, Human adenovirus C
uacuugaaagugggcaggcag

SEQ ID NO: 3909634 - RNA, 13 nt, Human adenovirus C
uagauggccuggc

SEQ ID NO: 3909635 - RNA, 20 nt, Human adenovirus C
uagauugcaagaaaaaacua

SEQ ID NO: 3909636 - RNA, 23 nt, Human adenovirus C
uagcaagccgcucauggcgcagc

SEQ ID NO: 3909637 - RNA, 13 nt, Human adenovirus C
uagcacaaaacuc

SEQ ID NO: 3909638 - RNA, 17 nt, Human adenovirus C
uagcgacuuugugccca

SEQ ID NO: 3909639 - RNA, 16 nt, Human adenovirus C
uaggauuuuucccacu

SEQ ID NO: 3909640 - RNA, 16 nt, Human adenovirus C
uaggcccgggaccagc

SEQ ID NO: 3909641 - RNA, 13 nt, Human adenovirus C
uaggguagcaucu

SEQ ID NO: 3909642 - RNA, 16 nt, Human adenovirus C
uaguuaagagagcugc

SEQ ID NO: 3909643 - RNA, 22 nt, Human adenovirus C
uauaaauuuccauuuuaugaaa

SEQ ID NO: 3909644 - RNA, 21 nt, Human adenovirus C
uauaacucaccugaaaaucag

SEQ ID NO: 3909645 - RNA, 15 nt, Human adenovirus C
uauaauaaauacaga

SEQ ID NO: 3909646 - RNA, 17 nt, Human adenovirus C
uauagguguaggccacg

SEQ ID NO: 3909647 - RNA, 14 nt, Human adenovirus C
uaucagcagccgcg

SEQ ID NO: 3909648 - RNA, 13 nt, Human adenovirus C
uaucgacccgcga

SEQ ID NO: 3909649 - RNA, 16 nt, Human adenovirus C
uaugcuaaaaugaaga

SEQ ID NO: 3909650 - RNA, 18 nt, Human adenovirus C
uaugcuauuuggcagcca

SEQ ID NO: 3909651 - RNA, 17 nt, Human adenovirus C
uauggcccucaccugcc

SEQ ID NO: 3909652 - RNA, 19 nt, Human adenovirus C
uauguggaaucaggcugua

SEQ ID NO: 3909653 - RNA, 20 nt, Human adenovirus C
uauuuguugccuaaagcgca

SEQ ID NO: 3909654 - RNA, 15 nt, Human adenovirus C
ucaaacucacagaac

SEQ ID NO: 3909655 - RNA, 18 nt, Human adenovirus C
ucaaagggguucugccgc

SEQ ID NO: 3909656 - RNA, 16 nt, Human adenovirus C
ucaaauacaaaagcag

SEQ ID NO: 3909657 - RNA, 17 nt, Human adenovirus C
ucaaaucuucacuuccg

SEQ ID NO: 3909658 - RNA, 17 nt, Human adenovirus C
ucaacaaagcaggggcc

SEQ ID NO: 3909659 - RNA, 13 nt, Human adenovirus C
ucaacaacagcug

SEQ ID NO: 3909660 - RNA, 15 nt, Human adenovirus C
ucaauaugucucuaa

SEQ ID NO: 3909661 - RNA, 15 nt, Human adenovirus C
ucacaaccccaccau

SEQ ID NO: 3909662 - RNA, 11 nt, Human adenovirus C
ucaccaggcgc

SEQ ID NO: 3909663 - RNA, 15 nt, Human adenovirus C
ucacccacagccgcc

SEQ ID NO: 3909664 - RNA, 15 nt, Human adenovirus C
ucacccgcagcugcc

SEQ ID NO: 3909665 - RNA, 12 nt, Human adenovirus C
ucacccuuaucc

SEQ ID NO: 3909666 - RNA, 23 nt, Human adenovirus C
ucacccuuauccucaucugcagc

SEQ ID NO: 3909667 - RNA, 16 nt, Human adenovirus C
uggaggcuugggagug

SEQ ID NO: 3909668 - RNA, 19 nt, Human adenovirus C
uggaucggaccaccacgcc

SEQ ID NO: 3909669 - RNA, 15 nt, Human adenovirus C
uggcaaugggcccac

SEQ ID NO: 3909670 - RNA, 16 nt, Human adenovirus C
uggcaaugggcccacg

SEQ ID NO: 3909671 - RNA, 19 nt, Human adenovirus C
uggcacccaccgugcagcu

SEQ ID NO: 3909672 - RNA, 22 nt, Human adenovirus C
uggcaccccuauucgacaccac

SEQ ID NO: 3909673 - RNA, 19 nt, Human adenovirus C
uggcacccgcgcgcgcugg

SEQ ID NO: 3909674 - RNA, 20 nt, Human adenovirus C
uggcaccgggacugggcgug

SEQ ID NO: 3909675 - RNA, 11 nt, Human adenovirus C
uggcagugguc

SEQ ID NO: 3909676 - RNA, 22 nt, Human adenovirus C
uggccaauugcaagccaucaac

SEQ ID NO: 3909677 - RNA, 19 nt, Human adenovirus C
uggccauuaccuuugacuc

SEQ ID NO: 3909678 - RNA, 13 nt, Human adenovirus C
uggccgcgggcug

SEQ ID NO: 3909679 - RNA, 15 nt, Human adenovirus C
uggccugaaccgcga

SEQ ID NO: 3909680 - RNA, 14 nt, Human adenovirus C
uggcgccaggucau

SEQ ID NO: 3909681 - RNA, 19 nt, Human adenovirus C
uggcgggcgcucgggcuug

SEQ ID NO: 3909682 - RNA, 19 nt, Human adenovirus C
uggcggguuuggcuggugg

SEQ ID NO: 3909683 - RNA, 17 nt, Human adenovirus C
uggcguugccgcuggac

SEQ ID NO: 3909684 - RNA, 21 nt, Human adenovirus C
ugggagacgacgugcuguuga

SEQ ID NO: 3909685 - RNA, 21 nt, Human adenovirus C
ugggagcuguccauggucugg

SEQ ID NO: 3909686 - RNA, 23 nt, Human adenovirus C
ugggccaaaaccuucucuacgcc

SEQ ID NO: 3909687 - RNA, 11 nt, Human adenovirus C
ugggcgcacca

SEQ ID NO: 3909688 - RNA, 19 nt, Human adenovirus C
ugggcgugcagaccgugga

SEQ ID NO: 3909689 - RNA, 14 nt, Human adenovirus C
uggggauggcgggc

SEQ ID NO: 3909690 - RNA, 18 nt, Human adenovirus C
ugguacuuguccaucaac

SEQ ID NO: 3909691 - RNA, 21 nt, Human adenovirus C
ugguaguuaagagagcugcag

SEQ ID NO: 3909692 - RNA, 22 nt, Human adenovirus C
uggugacgcaaauagaugagcc

SEQ ID NO: 3909693 - RNA, 15 nt, Human adenovirus C
uggugcaggagcgca

SEQ ID NO: 3909694 - RNA, 16 nt, Human adenovirus C
uggugcgcggagcccg

SEQ ID NO: 3909695 - RNA, 20 nt, Human adenovirus C
ugguggaggaggcgcgcaac

SEQ ID NO: 3909696 - RNA, 17 nt, Human adenovirus C
ugguuccauccggccca

SEQ ID NO: 3909697 - RNA, 14 nt, Human adenovirus C
ugguuuccaugagc

SEQ ID NO: 3909698 - RNA, 14 nt, Human adenovirus C
uguaauuuacaaca

SEQ ID NO: 3909699 - RNA, 13 nt, Human adenovirus C
uguaccgcgaggc

SEQ ID NO: 3909700 - RNA, 15 nt, Human adenovirus C
uguagguuaccucug

SEQ ID NO: 3909701 - RNA, 16 nt, Human adenovirus C
uguauuauaacagcac

SEQ ID NO: 3909702 - RNA, 18 nt, Human adenovirus C
ugucauacuuauccuguc

SEQ ID NO: 3909703 - RNA, 23 nt, Human adenovirus C
ugucccuuuuuuuuccacagcuc

SEQ ID NO: 3909704 - RNA, 18 nt, Human adenovirus C
uguccuaucaacucuugc

SEQ ID NO: 3909705 - RNA, 10 nt, Human adenovirus C
uguccuugga

SEQ ID NO: 3909706 - RNA, 14 nt, Human adenovirus C
uguccuuggaugau

SEQ ID NO: 3909707 - RNA, 17 nt, Human adenovirus C
ugucgucgcauccgccc

SEQ ID NO: 3909708 - RNA, 16 nt, Human adenovirus C
ugucguuucucagcag

SEQ ID NO: 3909709 - RNA, 13 nt, Human adenovirus C
ugucuaccugcgg

SEQ ID NO: 3909710 - RNA, 15 nt, Human adenovirus C
ugucugcgagggcca

SEQ ID NO: 3909711 - RNA, 17 nt, Human adenovirus C
ugucugcgagggccagc

SEQ ID NO: 3909712 - RNA, 17 nt, Human adenovirus C
ugucuuacaaaccugga

SEQ ID NO: 3909713 - RNA, 14 nt, Human adenovirus C
ugugcuacaccugg

SEQ ID NO: 3909714 - RNA, 23 nt, Human adenovirus C
uguuaacaugguucugcagagcu

SEQ ID NO: 3909715 - RNA, 13 nt, Human adenovirus C
uguugucaucucu

SEQ ID NO: 3909716 - RNA, 14 nt, Human adenovirus C
uuaaaaaacaccac

SEQ ID NO: 3909717 - RNA, 22 nt, Human adenovirus C
uuaaaaacaaguugcaugugga

SEQ ID NO: 3909718 - RNA, 22 nt, Human adenovirus C
uuaaccuacaccaguguaaaag

SEQ ID NO: 3909719 - RNA, 13 nt, Human adenovirus C
uuacugcugcugg

SEQ ID NO: 3909720 - RNA, 13 nt, Human adenovirus C
uuagcauuugcag

SEQ ID NO: 3909721 - RNA, 20 nt, Human adenovirus C
uuagcggggugguggaccug

SEQ ID NO: 3909722 - RNA, 14 nt, Human adenovirus C
uuauaaaaugcacc

SEQ ID NO: 3909723 - RNA, 21 nt, Human adenovirus C
uuauacuagcacuucugugcc

SEQ ID NO: 3909724 - RNA, 16 nt, Human adenovirus C
uucaaaucaaacuuuc

SEQ ID NO: 3909725 - RNA, 18 nt, Human adenovirus C
uucaacuaacauaaacac

SEQ ID NO: 3909726 - RNA, 20 nt, Human adenovirus C
uucaaguaacucuacaagcu

SEQ ID NO: 3909727 - RNA, 16 nt, Human adenovirus C
uucaauugcagaaaau

SEQ ID NO: 3909728 - RNA, 13 nt, Human adenovirus C
uucaccuggcccg

SEQ ID NO: 3909729 - RNA, 20 nt, Human adenovirus C
uucacggacaguggcagcgu

SEQ ID NO: 3909730 - RNA, 23 nt, Human adenovirus C
uucagauacccaccaccaguagc

SEQ ID NO: 3909731 - RNA, 17 nt, Human adenovirus C
uucagcaaauacugcgc

SEQ ID NO: 3909732 - RNA, 15 nt, Human adenovirus C
uucaggaauucugcc

SEQ ID NO: 3909733 - RNA, 20 nt, Human adenovirus C
uucaguaguauagccccacc

SEQ ID NO: 3909734 - RNA, 21 nt, Human adenovirus C
uuccaugcucagucugggcaa

SEQ ID NO: 3909735 - RNA, 22 nt, Human adenovirus C
uuccuaucaaccagaaccucaa

SEQ ID NO: 3909736 - RNA, 15 nt, Human adenovirus C
uucuauggguuuaac

SEQ ID NO: 3909737 - RNA, 23 nt, Human adenovirus C
uucuccccggcuggccuuaaaaa

SEQ ID NO: 3909738 - RNA, 23 nt, Human adenovirus C
uucuuaccucugguuuccaugag

SEQ ID NO: 3909739 - RNA, 23 nt, Human adenovirus C
uucuugucccuccgcacccacua

SEQ ID NO: 3909740 - RNA, 17 nt, Human adenovirus C
uugaaauccugugguga

SEQ ID NO: 3909741 - RNA, 14 nt, Human adenovirus C
uugagccccucgcc

SEQ ID NO: 3909742 - RNA, 16 nt, Human adenovirus C
uugaucaaacccagcu

SEQ ID NO: 3909743 - RNA, 14 nt, Human adenovirus C
uugauggagggcaa

SEQ ID NO: 3909744 - RNA, 21 nt, Human adenovirus C
uugcaacagcgcgagcaggca

SEQ ID NO: 3909745 - RNA, 22 nt, Human adenovirus C
uugcaagacagaaacacagagc

SEQ ID NO: 3909746 - RNA, 18 nt, Human adenovirus C
uugcaauguuacauuuaa

SEQ ID NO: 3909747 - RNA, 18 nt, Human adenovirus C
uugccagacaugaugcaa

SEQ ID NO: 3909748 - RNA, 20 nt, Human adenovirus C
uugcccaggaauaaagaauc

SEQ ID NO: 3909749 - RNA, 21 nt, Human adenovirus C
uugcgcgcgcgguaggcccgg

SEQ ID NO: 3909750 - RNA, 16 nt, Human adenovirus C
uugcuggaacagagcu

SEQ ID NO: 3909751 - RNA, 15 nt, Human adenovirus C
uuggacaccucccac

SEQ ID NO: 3909752 - RNA, 19 nt, Human adenovirus C
uuggcgcgcagcuugcccu

SEQ ID NO: 3909753 - RNA, 20 nt, Human adenovirus C
uuggcgcgcccgccagcccc

SEQ ID NO: 3909754 - RNA, 22 nt, Human adenovirus C
uuggcguugccgcuggacgagg

SEQ ID NO: 3909755 - RNA, 11 nt, Human adenovirus C
uugggcaccua

SEQ ID NO: 3909756 - RNA, 13 nt, Human adenovirus C
uugguucuuacaa

SEQ ID NO: 3909757 - RNA, 20 nt, Human adenovirus C
uuguaagcgcgcuggagcaa

SEQ ID NO: 3909758 - RNA, 21 nt, Human adenovirus C
uuguagguuaccucugcaaac

SEQ ID NO: 3909759 - RNA, 20 nt, Human adenovirus C
uuguccuccgggcacagcag

SEQ ID NO: 3909760 - RNA, 12 nt, Human adenovirus C
uuguugcuacau

SEQ ID NO: 3909761 - RNA, 14 nt, Human adenovirus C
uuucaccaaugcca

SEQ ID NO: 3909762 - RNA, 23 nt, Human adenovirus C
uuuccaacguggagcucugcaac

SEQ ID NO: 3909763 - RNA, 14 nt, Human adenovirus C
uuugacucuucugu

SEQ ID NO: 3909764 - RNA, 14 nt, Human adenovirus C
uuugcuuuccugag

SEQ ID NO: 3909765 - RNA, 19 nt, Human adenovirus C
uuuguagcgccacaucuuc

SEQ ID NO: 3909766 - RNA, 11 nt, Human adenovirus C
uuuucugcugu

SEQ ID NO: 3909767 - RNA, 10 nt, Human adenovirus C
aaaaaacaac

SEQ ID NO: 3909768 - RNA, 20 nt, Human adenovirus C
aaaaagaagcugcagcugcc

SEQ ID NO: 3909769 - RNA, 19 nt, Human adenovirus C
aaaagaagcugcagcugcc

SEQ ID NO: 3909770 - RNA, 19 nt, Human adenovirus C
aaaagauuauccaaaaccu

SEQ ID NO: 3909771 - RNA, 20 nt, Human adenovirus C
aaaauacaaccccaccaaug

SEQ ID NO: 3909772 - RNA, 15 nt, Human adenovirus C
aaaaucguaaaacuu

SEQ ID NO: 3909773 - RNA, 22 nt, Human adenovirus C
aaaaugggcagcggucuuaccc

SEQ ID NO: 3909774 - RNA, 17 nt, Human adenovirus C
aaaauuuccaacgugga

SEQ ID NO: 3909775 - RNA, 18 nt, Human adenovirus C
aaacaauacuaaaaaacu

SEQ ID NO: 3909776 - RNA, 12 nt, Human adenovirus C
aaacauguaaaa

SEQ ID NO: 3909777 - RNA, 20 nt, Human adenovirus C
aaaccagcuggccaaaaccu

SEQ ID NO: 3909778 - RNA, 17 nt, Human adenovirus C
aaacccugcaacagggu

SEQ ID NO: 3909779 - RNA, 13 nt, Human adenovirus C
aaaccgggccucc

SEQ ID NO: 3909780 - RNA, 16 nt, Human adenovirus C
aaacgacugcagguac

SEQ ID NO: 3909781 - RNA, 23 nt, Human adenovirus C
aaacuacgucaucuccagcggcc

SEQ ID NO: 3909782 - RNA, 22 nt, Human adenovirus C
aaacucccuuagaaccaaaguu

SEQ ID NO: 3909783 - RNA, 23 nt, Human adenovirus C
aaacuuaccuacgaaaaaaccac

SEQ ID NO: 3909784 - RNA, 16 nt, Human adenovirus C
aaacuuuugcuaccaa

SEQ ID NO: 3909785 - RNA, 16 nt, Human adenovirus C
aaagcagaccaaagca

SEQ ID NO: 3909786 - RNA, 20 nt, Human adenovirus C
aaagcgcgggcggagggugc

SEQ ID NO: 3909787 - RNA, 18 nt, Human adenovirus C
aaagcgguuaagcuggga

SEQ ID NO: 3909788 - RNA, 21 nt, Human adenovirus C
aaagcuagcccugcaaacauc

SEQ ID NO: 3909789 - RNA, 23 nt, Human adenovirus C
aaagcuagcccugcaaacaucag

SEQ ID NO: 3909790 - RNA, 15 nt, Human adenovirus C
aaagcuauguugggu

SEQ ID NO: 3909791 - RNA, 16 nt, Human adenovirus C
aaagcuuccgcaggcc

SEQ ID NO: 3909792 - RNA, 16 nt, Human adenovirus C
aaagggcccuggcugg

SEQ ID NO: 3909793 - RNA, 13 nt, Human adenovirus C
aaaggugaugaaa

SEQ ID NO: 3909794 - RNA, 22 nt, Human adenovirus C
aaaguccacaaaaaacacccag

SEQ ID NO: 3909795 - RNA, 17 nt, Human adenovirus C
aaagugguuuuguacag

SEQ ID NO: 3909796 - RNA, 16 nt, Human adenovirus C
aaauagaugagccucc

SEQ ID NO: 3909797 - RNA, 22 nt, Human adenovirus C
aaaugaccguggagccugggcu

SEQ ID NO: 3909798 - RNA, 15 nt, Human adenovirus C
aaaugggaugucaaa

SEQ ID NO: 3909799 - RNA, 14 nt, Human adenovirus C
aacacaagcuaaac

SEQ ID NO: 3909800 - RNA, 22 nt, Human adenovirus C
aacacggccuccacgcuggaag

SEQ ID NO: 3909801 - RNA, 15 nt, Human adenovirus C
aacagagggcugccu

SEQ ID NO: 3909802 - RNA, 17 nt, Human adenovirus C
aacagcacuggcaacau

SEQ ID NO: 3909803 - RNA, 13 nt, Human adenovirus C
aacagcagcacag

SEQ ID NO: 3909804 - RNA, 18 nt, Human adenovirus C
aacagcgcgagcaggcag

SEQ ID NO: 3909805 - RNA, 21 nt, Human adenovirus C
aacagcggcaacgugcagacc

SEQ ID NO: 3909806 - RNA, 23 nt, Human adenovirus C
aacaugguucugcagagcucucu

SEQ ID NO: 3909807 - RNA, 24 nt, Human adenovirus C
aacccaccauuuguagcgccacau

SEQ ID NO: 3909808 - RNA, 23 nt, Human adenovirus C
aacccccgcggcgccgggcccgg

SEQ ID NO: 3909809 - RNA, 12 nt, Human adenovirus C
aaccccuucccu

SEQ ID NO: 3909810 - RNA, 13 nt, Human adenovirus C
aaccgcgcccagg

SEQ ID NO: 3909811 - RNA, 18 nt, Human adenovirus C
aaccgcgguugugcaggg

SEQ ID NO: 3909812 - RNA, 22 nt, Human adenovirus C
aaccgcgguugugcagggugac

SEQ ID NO: 3909813 - RNA, 14 nt, Human adenovirus C
aaccucaccuccca

SEQ ID NO: 3909814 - RNA, 15 nt, Human adenovirus C
aaccuccgcuccuca

SEQ ID NO: 3909815 - RNA, 17 nt, Human adenovirus C
aaccuggaccggcuggu

SEQ ID NO: 3909816 - RNA, 13 nt, Human adenovirus C
aaccugugcugcc

SEQ ID NO: 3909817 - RNA, 20 nt, Human adenovirus C
aaccuucuagccuauccaaa

SEQ ID NO: 3909818 - RNA, 16 nt, Human adenovirus C
aaccuuuggacaccuc

SEQ ID NO: 3909819 - RNA, 11 nt, Human adenovirus C
aacgccaagaa

SEQ ID NO: 3909820 - RNA, 18 nt, Human adenovirus C
aacgccaccaacgugccc

SEQ ID NO: 3909821 - RNA, 11 nt, Human adenovirus C
agaaaccccac

SEQ ID NO: 3909822 - RNA, 17 nt, Human adenovirus C
agaaaccgggccuccaa

SEQ ID NO: 3909823 - RNA, 14 nt, Human adenovirus C
agaacuauggcagc

SEQ ID NO: 3909824 - RNA, 12 nt, Human adenovirus C
agaagcgcgggg

SEQ ID NO: 3909825 - RNA, 17 nt, Human adenovirus C
agaagcugcagcugccg

SEQ ID NO: 3909826 - RNA, 19 nt, Human adenovirus C
agaagguaagcgggucuug

SEQ ID NO: 3909827 - RNA, 16 nt, Human adenovirus C
agaauggaagacauca

SEQ ID NO: 3909828 - RNA, 16 nt, Human adenovirus C
agacagugucuccaga

SEQ ID NO: 3909829 - RNA, 12 nt, Human adenovirus C
agacaugaugca

SEQ ID NO: 3909830 - RNA, 20 nt, Human adenovirus C
agaccaguagacaaggccug

SEQ ID NO: 3909831 - RNA, 22 nt, Human adenovirus C
agaccguaaaccugagccaggc

SEQ ID NO: 3909832 - RNA, 13 nt, Human adenovirus C
agacgacgaggau

SEQ ID NO: 3909833 - RNA, 18 nt, Human adenovirus C
agacgacgugcuguugaa

SEQ ID NO: 3909834 - RNA, 19 nt, Human adenovirus C
agacgccgcaccugccccu

SEQ ID NO: 3909835 - RNA, 13 nt, Human adenovirus C
agacgggccaggg

SEQ ID NO: 3909836 - RNA, 18 nt, Human adenovirus C
agacguugaagcuggcgu

SEQ ID NO: 3909837 - RNA, 20 nt, Human adenovirus C
agacugggguuugacccagu

SEQ ID NO: 3909838 - RNA, 22 nt, Human adenovirus C
agagaacuccaacgcggcagcc

SEQ ID NO: 3909839 - RNA, 15 nt, Human adenovirus C
agagacgcccaggcc

SEQ ID NO: 3909840 - RNA, 14 nt, Human adenovirus C
agagcagcugacca

SEQ ID NO: 3909841 - RNA, 17 nt, Human adenovirus C
agagcauaguggugcag

SEQ ID NO: 3909842 - RNA, 23 nt, Human adenovirus C
agagcauguccaaggugaaccug

SEQ ID NO: 3909843 - RNA, 17 nt, Human adenovirus C
agagccggccuggaccc

SEQ ID NO: 3909844 - RNA, 21 nt, Human adenovirus C
agagcgcagcgaugugccccu

SEQ ID NO: 3909845 - RNA, 22 nt, Human adenovirus C
agagcugaaaauaaaaaacagg

SEQ ID NO: 3909846 - RNA, 15 nt, Human adenovirus C
agagcugcagcugcc

SEQ ID NO: 3909847 - RNA, 22 nt, Human adenovirus C
agagcuuccacuuggucaggca

SEQ ID NO: 3909848 - RNA, 11 nt, Human adenovirus C
agagggcaugg

SEQ ID NO: 3909849 - RNA, 14 nt, Human adenovirus C
agagggggcagggg

SEQ ID NO: 3909850 - RNA, 20 nt, Human adenovirus C
agagugcuuaaaaaaacaac

SEQ ID NO: 3909851 - RNA, 22 nt, Human adenovirus C
agauaaugacugcaaauuuacu

SEQ ID NO: 3909852 - RNA, 16 nt, Human adenovirus C
agauccgcguccaggu

SEQ ID NO: 3909853 - RNA, 21 nt, Human adenovirus C
agaugacuaacucaggggcgc

SEQ ID NO: 3909854 - RNA, 16 nt, Human adenovirus C
agaugagguacaugau

SEQ ID NO: 3909855 - RNA, 18 nt, Human adenovirus C
agaugccgcggugcaggc

SEQ ID NO: 3909856 - RNA, 14 nt, Human adenovirus C
agauguugcacaau

SEQ ID NO: 3909857 - RNA, 19 nt, Human adenovirus C
agauuauacccacaaccuu

SEQ ID NO: 3909858 - RNA, 12 nt, Human adenovirus C
agauuuuucugc

SEQ ID NO: 3909859 - RNA, 19 nt, Human adenovirus C
agcaaaucccgaauauuaa

SEQ ID NO: 3909860 - RNA, 23 nt, Human adenovirus C
agcaaugacagcaccuucaccca

SEQ ID NO: 3909861 - RNA, 12 nt, Human adenovirus C
agcaccaugucc

SEQ ID NO: 3909862 - RNA, 23 nt, Human adenovirus C
agcaccguggcgggcggcagcgg

SEQ ID NO: 3909863 - RNA, 13 nt, Human adenovirus C
agcagcaggagga

SEQ ID NO: 3909864 - RNA, 20 nt, Human adenovirus C
agcagcagggcaaccugggc

SEQ ID NO: 3909865 - RNA, 22 nt, Human adenovirus C
agcagcagggcaaccugggcuc

SEQ ID NO: 3909866 - RNA, 16 nt, Human adenovirus C
agcagcuggccuugcg

SEQ ID NO: 3909867 - RNA, 13 nt, Human adenovirus C
agcaggaggagga

SEQ ID NO: 3909868 - RNA, 23 nt, Human adenovirus C
agcaggcagaggcggcgcugcga

SEQ ID NO: 3909869 - RNA, 16 nt, Human adenovirus C
agcaggggggccacuu

SEQ ID NO: 3909870 - RNA, 23 nt, Human adenovirus C
agcauaaaaaaauccaguggacu

SEQ ID NO: 3909871 - RNA, 15 nt, Human adenovirus C
agcauaguggugcag

SEQ ID NO: 3909872 - RNA, 11 nt, Human adenovirus C
agcaucugcag

SEQ ID NO: 3909873 - RNA, 15 nt, Human adenovirus C
agcaugauaaauaug

SEQ ID NO: 3909874 - RNA, 16 nt, Human adenovirus C
agcauuugcagguggu

SEQ ID NO: 3909875 - RNA, 16 nt, Human adenovirus C
agccaacuaccuugcc

SEQ ID NO: 3909876 - RNA, 22 nt, Human adenovirus C
agccaacuaccuugccuaccac

SEQ ID NO: 3909877 - RNA, 15 nt, Human adenovirus C
agccacacccagcca

SEQ ID NO: 3909878 - RNA, 18 nt, Human adenovirus C
agccagaggacggcgagu

SEQ ID NO: 3909879 - RNA, 17 nt, Human adenovirus C
agccaggugagcucugg

SEQ ID NO: 3909880 - RNA, 17 nt, Human adenovirus C
agccaugcucagaaaug

SEQ ID NO: 3909881 - RNA, 20 nt, Human adenovirus C
agcccaagaaauccacagcg

SEQ ID NO: 3909882 - RNA, 23 nt, Human adenovirus C
agccccuacugcaccggcggcag

SEQ ID NO: 3909883 - RNA, 15 nt, Human adenovirus C
agcccgacgcgcgga

SEQ ID NO: 3909884 - RNA, 23 nt, Human adenovirus C
agcccgccaacgugccgcgggga

SEQ ID NO: 3909885 - RNA, 21 nt, Human adenovirus C
agccgagcggacaagcagcug

SEQ ID NO: 3909886 - RNA, 13 nt, Human adenovirus C
agccgcgcgcugg

SEQ ID NO: 3909887 - RNA, 17 nt, Human adenovirus C
agccgcgcgcuggggca

SEQ ID NO: 3909888 - RNA, 23 nt, Human adenovirus C
agccgcgcgcuggggcaggagga

SEQ ID NO: 3909889 - RNA, 16 nt, Human adenovirus C
agccgcggcaaugcag

SEQ ID NO: 3909890 - RNA, 20 nt, Human adenovirus C
agccgcugcagccaccgccc

SEQ ID NO: 3909891 - RNA, 14 nt, Human adenovirus C
agccggccuggacc

SEQ ID NO: 3909892 - RNA, 14 nt, Human adenovirus C
agccggcggcgcga

SEQ ID NO: 3909893 - RNA, 22 nt, Human adenovirus C
agccuauccaaaaacccaaagu

SEQ ID NO: 3909894 - RNA, 15 nt, Human adenovirus C
agccugaauaacaag

SEQ ID NO: 3909895 - RNA, 19 nt, Human adenovirus C
agccuggaggcaacccuga

SEQ ID NO: 3909896 - RNA, 19 nt, Human adenovirus C
agcgaagaaacccaucuga

SEQ ID NO: 3909897 - RNA, 14 nt, Human adenovirus C
agcgacgaccuggg

SEQ ID NO: 3909898 - RNA, 13 nt, Human adenovirus C
agcgagugguggc

SEQ ID NO: 3909899 - RNA, 21 nt, Human adenovirus C
agcgcaaccuaaaggagcugc

SEQ ID NO: 3909900 - RNA, 23 nt, Human adenovirus C
agcgcaaccuaaaggagcugcag

SEQ ID NO: 3909901 - RNA, 18 nt, Human adenovirus C
agcgcccucuccugagcg

SEQ ID NO: 3909902 - RNA, 21 nt, Human adenovirus C
agcgcccuucacggacagugg

SEQ ID NO: 3909903 - RNA, 16 nt, Human adenovirus C
agcgcgcgcagcagca

SEQ ID NO: 3909904 - RNA, 18 nt, Human adenovirus C
agcgcgcgcagcagcagg

SEQ ID NO: 3909905 - RNA, 13 nt, Human adenovirus C
agcgcggggugcc

SEQ ID NO: 3909906 - RNA, 14 nt, Human adenovirus C
agcgcugccggucu

SEQ ID NO: 3909907 - RNA, 19 nt, Human adenovirus C
agcggaugucagccuugcc

SEQ ID NO: 3909908 - RNA, 14 nt, Human adenovirus C
agcggcauuaaaaa

SEQ ID NO: 3909909 - RNA, 12 nt, Human adenovirus C
agcggccgccgc

SEQ ID NO: 3909910 - RNA, 17 nt, Human adenovirus C
agcggcgcggaagagaa

SEQ ID NO: 3909911 - RNA, 23 nt, Human adenovirus C
agcgguguuccgcgguccuccuc

SEQ ID NO: 3909912 - RNA, 18 nt, Human adenovirus C
agcuacccacccagcgcc

SEQ ID NO: 3909913 - RNA, 19 nt, Human adenovirus C
agcucggcggugaccugca

SEQ ID NO: 3909914 - RNA, 13 nt, Human adenovirus C
agcugcagcugcc

SEQ ID NO: 3909915 - RNA, 17 nt, Human adenovirus C
agcugccgccgccgcca

SEQ ID NO: 3909916 - RNA, 20 nt, Human adenovirus C
agcuggcgcgcuggcuugag

SEQ ID NO: 3909917 - RNA, 14 nt, Human adenovirus C
agcuggugcugcgc

SEQ ID NO: 3909918 - RNA, 22 nt, Human adenovirus C
agcuguccauggucuggagcuc

SEQ ID NO: 3909919 - RNA, 20 nt, Human adenovirus C
agcuguugcccgugcacucc

SEQ ID NO: 3909920 - RNA, 17 nt, Human adenovirus C
agcuugagccuggcuga

SEQ ID NO: 3909921 - RNA, 17 nt, Human adenovirus C
agcuugcccuuggagga

SEQ ID NO: 3909922 - RNA, 20 nt, Human adenovirus C
aggacaaacagguggagcug

SEQ ID NO: 3909923 - RNA, 17 nt, Human adenovirus C
aggacccuggugcugcc

SEQ ID NO: 3909924 - RNA, 18 nt, Human adenovirus C
aggacccuggugcugcca

SEQ ID NO: 3909925 - RNA, 19 nt, Human adenovirus C
aggacccuggugcugccaa

SEQ ID NO: 3909926 - RNA, 14 nt, Human adenovirus C
aggacuaaaaaaug

SEQ ID NO: 3909927 - RNA, 19 nt, Human adenovirus C
aggagcaacagcaggagga

SEQ ID NO: 3909928 - RNA, 23 nt, Human adenovirus C
aggagcgcaaccuaaaggagcug

SEQ ID NO: 3909929 - RNA, 23 nt, Human adenovirus C
aggagcgcagcuugagccuggcu

SEQ ID NO: 3909930 - RNA, 13 nt, Human adenovirus C
aggagcugaggcc

SEQ ID NO: 3909931 - RNA, 15 nt, Human adenovirus C
aggagcugcagaagc

SEQ ID NO: 3909932 - RNA, 16 nt, Human adenovirus C
aggagcuggugcugcg

SEQ ID NO: 3909933 - RNA, 15 nt, Human adenovirus C
aggaggacacgggca

SEQ ID NO: 3909934 - RNA, 23 nt, Human adenovirus C
aggaggagaugauggaagacugg

SEQ ID NO: 3909935 - RNA, 13 nt, Human adenovirus C
aggaggggcaaca

SEQ ID NO: 3909936 - RNA, 15 nt, Human adenovirus C
aggauaggguggccu

SEQ ID NO: 3909937 - RNA, 17 nt, Human adenovirus C
aggauggcacccaaaaa

SEQ ID NO: 3909938 - RNA, 15 nt, Human adenovirus C
aggaugggcaggggc

SEQ ID NO: 3909939 - RNA, 17 nt, Human adenovirus C
aggaugggcaggggcua

SEQ ID NO: 3909940 - RNA, 22 nt, Human adenovirus C
aggauuacaagugggaauuuga

SEQ ID NO: 3909941 - RNA, 15 nt, Human adenovirus C
aggcaaugcuacuaa

SEQ ID NO: 3909942 - RNA, 13 nt, Human adenovirus C
aggcagaggaggu

SEQ ID NO: 3909943 - RNA, 14 nt, Human adenovirus C
aggcaggacccugg

SEQ ID NO: 3909944 - RNA, 16 nt, Human adenovirus C
aggcaguagcuugaag

SEQ ID NO: 3909945 - RNA, 16 nt, Human adenovirus C
aggcagugcaaaauaa

SEQ ID NO: 3909946 - RNA, 17 nt, Human adenovirus C
aggccaagcagcuuguc

SEQ ID NO: 3909947 - RNA, 14 nt, Human adenovirus C
aggcccgggaccag

SEQ ID NO: 3909948 - RNA, 17 nt, Human adenovirus C
aggccgugagcgugagc

SEQ ID NO: 3909949 - RNA, 18 nt, Human adenovirus C
aggccuggccaguguuug

SEQ ID NO: 3909950 - RNA, 16 nt, Human adenovirus C
aggcgcaaggcggcgu

SEQ ID NO: 3909951 - RNA, 18 nt, Human adenovirus C
aggcgcaaggcggcgucc

SEQ ID NO: 3909952 - RNA, 18 nt, Human adenovirus C
aggcgcagagacacugau

SEQ ID NO: 3909953 - RNA, 13 nt, Human adenovirus C
aggcgcggcggcu

SEQ ID NO: 3909954 - RNA, 19 nt, Human adenovirus C
aggcgcuccauggccucgu

SEQ ID NO: 3909955 - RNA, 23 nt, Human adenovirus C
aggcggcggcggcggcaggagca

SEQ ID NO: 3909956 - RNA, 23 nt, Human adenovirus C
aggcuaauggcaauggcucaggc

SEQ ID NO: 3909957 - RNA, 23 nt, Human adenovirus C
aggcuaccgcucguggcgcgggc

SEQ ID NO: 3909958 - RNA, 18 nt, Human adenovirus C
aggcuaccucgcucccac

SEQ ID NO: 3909959 - RNA, 16 nt, Human adenovirus C
aggcucgcguccaggc

SEQ ID NO: 3909960 - RNA, 21 nt, Human adenovirus C
aggcugagcaccguggcgggc

SEQ ID NO: 3909961 - RNA, 11 nt, Human adenovirus C
aggcuggggcc

SEQ ID NO: 3909962 - RNA, 14 nt, Human adenovirus C
aggcuguagacagc

SEQ ID NO: 3909963 - RNA, 17 nt, Human adenovirus C
aggcuguccgugucccc

SEQ ID NO: 3909964 - RNA, 17 nt, Human adenovirus C
aggcuugggaguguuug

SEQ ID NO: 3909965 - RNA, 17 nt, Human adenovirus C
agggcaacccaacaccu

SEQ ID NO: 3909966 - RNA, 16 nt, Human adenovirus C
agggcacccuccccuu

SEQ ID NO: 3909967 - RNA, 15 nt, Human adenovirus C
agggcauggagacac

SEQ ID NO: 3909968 - RNA, 16 nt, Human adenovirus C
agggccgcuggcugcu

SEQ ID NO: 3909969 - RNA, 19 nt, Human adenovirus C
agggccuccccuucuucuu

SEQ ID NO: 3909970 - RNA, 14 nt, Human adenovirus C
agggcgaaggugac

SEQ ID NO: 3909971 - RNA, 21 nt, Human adenovirus C
agggcgagguauucagcucaa

SEQ ID NO: 3909972 - RNA, 20 nt, Human adenovirus C
agggcuacaacguagcucag

SEQ ID NO: 3909973 - RNA, 20 nt, Human adenovirus C
agggcuacgugcgccaggcc

SEQ ID NO: 3909974 - RNA, 12 nt, Human adenovirus C
aggggccaagaa

SEQ ID NO: 3909975 - RNA, 20 nt, Human adenovirus C
aggggccagcguaggguggc

SEQ ID NO: 3909976 - RNA, 15 nt, Human adenovirus C
agggggguguuccua

SEQ ID NO: 3909977 - RNA, 14 nt, Human adenovirus C
ccggagcgaggugu

SEQ ID NO: 3909978 - RNA, 16 nt, Human adenovirus C
ccggagugcugggcca

SEQ ID NO: 3909979 - RNA, 18 nt, Human adenovirus C
ccggcaaggcaaugcuac

SEQ ID NO: 3909980 - RNA, 16 nt, Human adenovirus C
cggcuggagcugccca

SEQ ID NO: 3909981 - RNA, 23 nt, Human adenovirus C
cggcuuucgcuguacggcaguag

SEQ ID NO: 3909982 - RNA, 21 nt, Human adenovirus C
cgggaagaacuggaucucccg

SEQ ID NO: 3909983 - RNA, 20 nt, Human adenovirus C
cgggacgcuaccgcugcgca

SEQ ID NO: 3909984 - RNA, 19 nt, Human adenovirus C
cgggaguuuaccaagcgcc

SEQ ID NO: 3909985 - RNA, 17 nt, Human adenovirus C
cgggauagagagccuag

SEQ ID NO: 3909986 - RNA, 11 nt, Human adenovirus C
cgggcagcagc

SEQ ID NO: 3909987 - RNA, 15 nt, Human adenovirus C
cgggccaugagcugc

SEQ ID NO: 3909988 - RNA, 23 nt, Human adenovirus C
cgggccaugagcugcgagaaggc

SEQ ID NO: 3909989 - RNA, 18 nt, Human adenovirus C
cgggcccuugcuucccag

SEQ ID NO: 3909990 - RNA, 22 nt, Human adenovirus C
cgggcccuugcuucccaggaug

SEQ ID NO: 3909991 - RNA, 20 nt, Human adenovirus C
cgggccgcucgaaggcuggc

SEQ ID NO: 3909992 - RNA, 20 nt, Human adenovirus C
cgggcggccaugcgggccgc

SEQ ID NO: 3909993 - RNA, 20 nt, Human adenovirus C
cgggcggcgcugcagagcca

SEQ ID NO: 3909994 - RNA, 12 nt, Human adenovirus C
cggggacaggag

SEQ ID NO: 3909995 - RNA, 21 nt, Human adenovirus C
cggggauucauguugugcaga

SEQ ID NO: 3909996 - RNA, 21 nt, Human adenovirus C
cggggggcugccgugcggcag

SEQ ID NO: 3909997 - RNA, 22 nt, Human adenovirus C
cgggguggacuucacccacagc

SEQ ID NO: 3909998 - RNA, 14 nt, Human adenovirus C
cggggugguggacc

SEQ ID NO: 3909999 - RNA, 22 nt, Human adenovirus C
cgggucagggcgcgggcuaggu

SEQ ID NO: 3910000 - RNA, 16 nt, Human adenovirus C
cggguuuggcuggugg

SEQ ID NO: 3910001 - RNA, 14 nt, Human adenovirus C
cgguagaggggcca

SEQ ID NO: 3910002 - RNA, 14 nt, Human adenovirus C
cggucggccaugcc

SEQ ID NO: 3910003 - RNA, 21 nt, Human adenovirus C
cggugaaguuuucacuccaca

SEQ ID NO: 3910004 - RNA, 20 nt, Human adenovirus C
cggugacgcgggcgggcccc

SEQ ID NO: 3910005 - RNA, 19 nt, Human adenovirus C
cggugaggcgugcgcaguc

SEQ ID NO: 3910006 - RNA, 18 nt, Human adenovirus C
cggugcugcggcagaugc

SEQ ID NO: 3910007 - RNA, 16 nt, Human adenovirus C
cgguuaacuccuccuc

SEQ ID NO: 3910008 - RNA, 20 nt, Human adenovirus C
cgguucuuugcugacccgga

SEQ ID NO: 3910009 - RNA, 18 nt, Human adenovirus C
cgguuuuccuggccaaua

SEQ ID NO: 3910010 - RNA, 18 nt, Human adenovirus C
cguaauaaccuuaauccc

SEQ ID NO: 3910011 - RNA, 17 nt, Human adenovirus C
cguacgugccgcggcag

SEQ ID NO: 3910012 - RNA, 16 nt, Human adenovirus C
cguaggagucgcgcag

SEQ ID NO: 3910013 - RNA, 19 nt, Human adenovirus C
cguaggagucgcgcagcuu

SEQ ID NO: 3910014 - RNA, 23 nt, Human adenovirus C
cguaggcgcucguugguccagca

SEQ ID NO: 3910015 - RNA, 16 nt, Human adenovirus C
cguaggugagcuccuc

SEQ ID NO: 3910016 - RNA, 17 nt, Human adenovirus C
cguaugccugcgcggcc

SEQ ID NO: 3910017 - RNA, 14 nt, Human adenovirus C
cguaugcgcaggag

SEQ ID NO: 3910018 - RNA, 12 nt, Human adenovirus C
cgucaggagggg

SEQ ID NO: 3910019 - RNA, 16 nt, Human adenovirus C
cguccgcauaccccgc

SEQ ID NO: 3910020 - RNA, 14 nt, Human adenovirus C
cguccugcaggaau

SEQ ID NO: 3910021 - RNA, 17 nt, Human adenovirus C
cgucgcgccgcaccgcg

SEQ ID NO: 3910022 - RNA, 22 nt, Human adenovirus C
cgucgguguuggagaucugcac

SEQ ID NO: 3910023 - RNA, 20 nt, Human adenovirus C
cgugaagacgacgggcccgg

SEQ ID NO: 3910024 - RNA, 20 nt, Human adenovirus C
cgugaccggguguuccugaa

SEQ ID NO: 3910025 - RNA, 17 nt, Human adenovirus C
cgugagcgcgcgcagca

SEQ ID NO: 3910026 - RNA, 16 nt, Human adenovirus C
cgugcgcaguacuggc

SEQ ID NO: 3910027 - RNA, 17 nt, Human adenovirus C
cgugcuggacagggggc

SEQ ID NO: 3910028 - RNA, 18 nt, Human adenovirus C
cguggagccugggcugga

SEQ ID NO: 3910029 - RNA, 18 nt, Human adenovirus C
cguggccgcgcaccuggc

SEQ ID NO: 3910030 - RNA, 12 nt, Human adenovirus C
cguggcggccgc

SEQ ID NO: 3910031 - RNA, 17 nt, Human adenovirus C
cguggcuuaaggguggg

SEQ ID NO: 3910032 - RNA, 16 nt, Human adenovirus C
cgugguaaaggugacu

SEQ ID NO: 3910033 - RNA, 19 nt, Human adenovirus C
cgugguacuuguccaucaa

SEQ ID NO: 3910034 - RNA, 18 nt, Human adenovirus C
cgugguccgugugcacca

SEQ ID NO: 3910035 - RNA, 13 nt, Human adenovirus C
cguggugagcgcg

SEQ ID NO: 3910036 - RNA, 19 nt, Human adenovirus C
cguugguuuucuuguauuc

SEQ ID NO: 3910037 - RNA, 17 nt, Human adenovirus C
cguuucucagcagcugu

SEQ ID NO: 3910038 - RNA, 14 nt, Human adenovirus C
cuaaacccuucagg

SEQ ID NO: 3910039 - RNA, 17 nt, Human adenovirus C
cuaacauaaacacacaa

SEQ ID NO: 3910040 - RNA, 16 nt, Human adenovirus C
cuaacgaugcaucuca

SEQ ID NO: 3910041 - RNA, 13 nt, Human adenovirus C
cuaacucugcaga

SEQ ID NO: 3910042 - RNA, 22 nt, Human adenovirus C
cuaaugagcuugaucugcuggc

SEQ ID NO: 3910043 - RNA, 12 nt, Human adenovirus C
cuaauggcaaug

SEQ ID NO: 3910044 - RNA, 22 nt, Human adenovirus C
cuacaacguagcucagugcaac

SEQ ID NO: 3910045 - RNA, 19 nt, Human adenovirus C
cuacaccuaccgccccaga

SEQ ID NO: 3910046 - RNA, 19 nt, Human adenovirus C
cuacaccuuucgccagggc

SEQ ID NO: 3910047 - RNA, 19 nt, Human adenovirus C
cuacaucguaggugacaaa

SEQ ID NO: 3910048 - RNA, 22 nt, Human adenovirus C
cuacaugagcgcgggaccccac

SEQ ID NO: 3910049 - RNA, 14 nt, Human adenovirus C
cuacccacccagcg

SEQ ID NO: 3910050 - RNA, 20 nt, Human adenovirus C
cuaccccguauuugccgugc

SEQ ID NO: 3910051 - RNA, 21 nt, Human adenovirus C
cuaccuggacuuggaggaggg

SEQ ID NO: 3910052 - RNA, 16 nt, Human adenovirus C
cuaccugugcuuugcu

SEQ ID NO: 3910053 - RNA, 16 nt, Human adenovirus C
cuacgaaaaaaccacu

SEQ ID NO: 3910054 - RNA, 20 nt, Human adenovirus C
cuacgaaaaaaccacuaccg

SEQ ID NO: 3910055 - RNA, 17 nt, Human adenovirus C
cuacgaacgccaccugu

SEQ ID NO: 3910056 - RNA, 14 nt, Human adenovirus C
cuacgaagaccaau

SEQ ID NO: 3910057 - RNA, 17 nt, Human adenovirus C
cuacgccaacuccgccc

SEQ ID NO: 3910058 - RNA, 15 nt, Human adenovirus C
cuacgggcgggcugc

SEQ ID NO: 3910059 - RNA, 14 nt, Human adenovirus C
cuacucccagcuca

SEQ ID NO: 3910060 - RNA, 15 nt, Human adenovirus C
cuacuccggcacugc

SEQ ID NO: 3910061 - RNA, 21 nt, Human adenovirus C
cuacuuccgcagccacagugc

SEQ ID NO: 3910062 - RNA, 19 nt, Human adenovirus C
cuacuuuuaagcccuacuc

SEQ ID NO: 3910063 - RNA, 15 nt, Human adenovirus C
cuagccaacuaccuu

SEQ ID NO: 3910064 - RNA, 20 nt, Human adenovirus C
cuagccauauauccauaccu

SEQ ID NO: 3910065 - RNA, 12 nt, Human adenovirus C
cuagguccaggu

SEQ ID NO: 3910066 - RNA, 17 nt, Human adenovirus C
cuauaaaugcaggaaag

SEQ ID NO: 3910067 - RNA, 17 nt, Human adenovirus C
cuaucauugugcucaac

SEQ ID NO: 3910068 - RNA, 19 nt, Human adenovirus C
cuauccaaaaacccaaagu

SEQ ID NO: 3910069 - RNA, 14 nt, Human adenovirus C
cuauggccccccga

SEQ ID NO: 3910070 - RNA, 15 nt, Human adenovirus C
cucaaagcauccagg

SEQ ID NO: 3910071 - RNA, 19 nt, Human adenovirus C
cucaacuaaugcaaaucca

SEQ ID NO: 3910072 - RNA, 11 nt, Human adenovirus C
cucagcagcug

SEQ ID NO: 3910073 - RNA, 14 nt, Human adenovirus C
cucagcgccuccca

SEQ ID NO: 3910074 - RNA, 17 nt, Human adenovirus C
cucaggcaccauccgca

SEQ ID NO: 3910075 - RNA, 18 nt, Human adenovirus C
cucaggggcgcagcuugc

SEQ ID NO: 3910076 - RNA, 20 nt, Human adenovirus C
cucauaacuuggacauaaac

SEQ ID NO: 3910077 - RNA, 22 nt, Human adenovirus C
cucaucagugauauuaauaaac

SEQ ID NO: 3910078 - RNA, 15 nt, Human adenovirus C
cucaucugcagccuc

SEQ ID NO: 3910079 - RNA, 18 nt, Human adenovirus C
cuccaacgcggcagccgc

SEQ ID NO: 3910080 - RNA, 13 nt, Human adenovirus C
cuccacaggcugc

SEQ ID NO: 3910081 - RNA, 17 nt, Human adenovirus C
cuccacaggcugcgcac

SEQ ID NO: 3910082 - RNA, 20 nt, Human adenovirus C
cuccacgcuggaagccaugc

SEQ ID NO: 3910083 - RNA, 16 nt, Human adenovirus C
cuccacgugccgggcg

SEQ ID NO: 3910084 - RNA, 11 nt, Human adenovirus C
cuccagagggg

SEQ ID NO: 3910085 - RNA, 18 nt, Human adenovirus C
cuccagcggccacacccg

SEQ ID NO: 3910086 - RNA, 18 nt, Human adenovirus C
cuccaugcccuucuccca

SEQ ID NO: 3910087 - RNA, 18 nt, Human adenovirus C
cuccauguuguugggaaa

SEQ ID NO: 3910088 - RNA, 23 nt, Human adenovirus C
cucccaccacugugguacuuccc

SEQ ID NO: 3910089 - RNA, 14 nt, Human adenovirus C
cucccacgcagaca

SEQ ID NO: 3910090 - RNA, 23 nt, Human adenovirus C
cucccucacccgcagcugccugu

SEQ ID NO: 3910091 - RNA, 23 nt, Human adenovirus C
cuccgcaauucuggaagcggugg

SEQ ID NO: 3910092 - RNA, 18 nt, Human adenovirus C
cuccgggcugcgcgcugg

SEQ ID NO: 3910093 - RNA, 13 nt, Human adenovirus C
cuccuaacugcag

SEQ ID NO: 3910094 - RNA, 15 nt, Human adenovirus C
cuccuccuccugcca

SEQ ID NO: 3910095 - RNA, 17 nt, Human adenovirus C
cuccucuauaaacauuc

SEQ ID NO: 3910096 - RNA, 13 nt, Human adenovirus C
cuccugccaggcu

SEQ ID NO: 3910097 - RNA, 24 nt, Human adenovirus C
cuccugcgccguagcgccauugcu

SEQ ID NO: 3910098 - RNA, 15 nt, Human adenovirus C
gcgcgucccugcgcc

SEQ ID NO: 3910099 - RNA, 14 nt, Human adenovirus C
gcgcgucgcaccgu

SEQ ID NO: 3910100 - RNA, 13 nt, Human adenovirus C
gcgcuccauggcc

SEQ ID NO: 3910101 - RNA, 17 nt, Human adenovirus C
gcgcucccucacccgca

SEQ ID NO: 3910102 - RNA, 19 nt, Human adenovirus C
gcgcuccuuuuggcuuccu

SEQ ID NO: 3910103 - RNA, 14 nt, Human adenovirus C
gcgcugcagagcca

SEQ ID NO: 3910104 - RNA, 18 nt, Human adenovirus C
gcgcugcgaaaggaaagc

SEQ ID NO: 3910105 - RNA, 18 nt, Human adenovirus C
gcgcugcuccucuucccg

SEQ ID NO: 3910106 - RNA, 22 nt, Human adenovirus C
gcgcuggcaacgucggcggcgu

SEQ ID NO: 3910107 - RNA, 22 nt, Human adenovirus C
gcgcuggccgaaaacagggcca

SEQ ID NO: 3910108 - RNA, 20 nt, Human adenovirus C
gcggagguugcuggcgaacg

SEQ ID NO: 3910109 - RNA, 19 nt, Human adenovirus C
gcggaugucagccuugccu

SEQ ID NO: 3910110 - RNA, 20 nt, Human adenovirus C
gcggaugucagccuugccua

SEQ ID NO: 3910111 - RNA, 21 nt, Human adenovirus C
gcggcaacaacaguggcagcg

SEQ ID NO: 3910112 - RNA, 17 nt, Human adenovirus C
gcggcaacgugcagacc

SEQ ID NO: 3910113 - RNA, 21 nt, Human adenovirus C
gcggcaagagcaagagcagcg

SEQ ID NO: 3910114 - RNA, 16 nt, Human adenovirus C
gcggcagcggcagcaa

SEQ ID NO: 3910115 - RNA, 17 nt, Human adenovirus C
gcggcaggagcagagcc

SEQ ID NO: 3910116 - RNA, 15 nt, Human adenovirus C
gcggcagucugcagc

SEQ ID NO: 3910117 - RNA, 22 nt, Human adenovirus C
gcggcaugcgucgugcgcacca

SEQ ID NO: 3910118 - RNA, 18 nt, Human adenovirus C
gcggccacacccggcgcc

SEQ ID NO: 3910119 - RNA, 18 nt, Human adenovirus C
gcggccuaaagcgcgagu

SEQ ID NO: 3910120 - RNA, 20 nt, Human adenovirus C
gcggccuaccggggggagaa

SEQ ID NO: 3910121 - RNA, 16 nt, Human adenovirus C
gcggcgacaggucagg

SEQ ID NO: 3910122 - RNA, 15 nt, Human adenovirus C
gcggcggcugcugcg

SEQ ID NO: 3910123 - RNA, 23 nt, Human adenovirus C
gcggcgguauccugccccuccuu

SEQ ID NO: 3910124 - RNA, 19 nt, Human adenovirus C
gcggcgguugaucuccuga

SEQ ID NO: 3910125 - RNA, 13 nt, Human adenovirus C
gcggcuggagcug

SEQ ID NO: 3910126 - RNA, 14 nt, Human adenovirus C
gcgggcacucuucc

SEQ ID NO: 3910127 - RNA, 22 nt, Human adenovirus C
gcgggccuccguuaucgcucca

SEQ ID NO: 3910128 - RNA, 16 nt, Human adenovirus C
gcggggaccacagaac

SEQ ID NO: 3910129 - RNA, 14 nt, Human adenovirus C
gcggggaggcggcg

SEQ ID NO: 3910130 - RNA, 13 nt, Human adenovirus C
gcgggggcgcagu

SEQ ID NO: 3910131 - RNA, 14 nt, Human adenovirus C
gcggguuggggcgg

SEQ ID NO: 3910132 - RNA, 23 nt, Human adenovirus C
gcggucucggucguugagggucc

SEQ ID NO: 3910133 - RNA, 13 nt, Human adenovirus C
gcggucuuuccag

SEQ ID NO: 3910134 - RNA, 23 nt, Human adenovirus C
gcggucuuuccaguacucuugga

SEQ ID NO: 3910135 - RNA, 18 nt, Human adenovirus C
cuggaccaggugucaccg

SEQ ID NO: 3910136 - RNA, 15 nt, Human adenovirus C
cuggacguuagcgcc

SEQ ID NO: 3910137 - RNA, 13 nt, Human adenovirus C
cuggagaucuccg

SEQ ID NO: 3910138 - RNA, 21 nt, Human adenovirus C
cuggagaucuuucauccauga

SEQ ID NO: 3910139 - RNA, 15 nt, Human adenovirus C
cuggagcucccgcgg

SEQ ID NO: 3910140 - RNA, 21 nt, Human adenovirus C
cuggagucucacgcucgcuug

SEQ ID NO: 3910141 - RNA, 17 nt, Human adenovirus C
cuggauuuucuggccau

SEQ ID NO: 3910142 - RNA, 15 nt, Human adenovirus C
cuggcaaagcacacu

SEQ ID NO: 3910143 - RNA, 16 nt, Human adenovirus C
cuggccaguguuugag

SEQ ID NO: 3910144 - RNA, 18 nt, Human adenovirus C
cuggccccaaacucccau

SEQ ID NO: 3910145 - RNA, 19 nt, Human adenovirus C
cuggccgaaaacagggcca

SEQ ID NO: 3910146 - RNA, 16 nt, Human adenovirus C
cuggccgcgcgcggcg

SEQ ID NO: 3910147 - RNA, 21 nt, Human adenovirus C
cuggcgcaaaaucuccugcac

SEQ ID NO: 3910148 - RNA, 22 nt, Human adenovirus C
cugggcauagucucgccgcgcg

SEQ ID NO: 3910149 - RNA, 17 nt, Human adenovirus C
cugggccagcacacacc

SEQ ID NO: 3910150 - RNA, 23 nt, Human adenovirus C
cuggggcgcgcacaaacgcggcc

SEQ ID NO: 3910151 - RNA, 14 nt, Human adenovirus C
cugggucgucuuca

SEQ ID NO: 3910152 - RNA, 23 nt, Human adenovirus C
cuggucuugucaugccuggggua

SEQ ID NO: 3910153 - RNA, 13 nt, Human adenovirus C
cuggugaagguca

SEQ ID NO: 3910154 - RNA, 18 nt, Human adenovirus C
cuggugcugaagcgcugc

SEQ ID NO: 3910155 - RNA, 19 nt, Human adenovirus C
cugguguuuagugcuccac

SEQ ID NO: 3910156 - RNA, 17 nt, Human adenovirus C
cugguuuccaugagccg

SEQ ID NO: 3910157 - RNA, 20 nt, Human adenovirus C
cuguaacgcuggaccugccu

SEQ ID NO: 3910158 - RNA, 14 nt, Human adenovirus C
cuguaacugcauca

SEQ ID NO: 3910159 - RNA, 18 nt, Human adenovirus C
cuguagaccacgcccccu

SEQ ID NO: 3910160 - RNA, 17 nt, Human adenovirus C
cuguauaacgcuggaaa

SEQ ID NO: 3910161 - RNA, 16 nt, Human adenovirus C
cugucauaccacugca

SEQ ID NO: 3910162 - RNA, 13 nt, Human adenovirus C
cugucugagggua

SEQ ID NO: 3910163 - RNA, 21 nt, Human adenovirus C
cugucugcgagggccagcugu

SEQ ID NO: 3910164 - RNA, 17 nt, Human adenovirus C
cugugcuuugcucccaa

SEQ ID NO: 3910165 - RNA, 18 nt, Human adenovirus C
cuguggggcuccucccag

SEQ ID NO: 3910166 - RNA, 14 nt, Human adenovirus C
cugugguacuuccc

SEQ ID NO: 3910167 - RNA, 19 nt, Human adenovirus C
cuguguauuuuuuccagga

SEQ ID NO: 3910168 - RNA, 23 nt, Human adenovirus C
cuguugaagcaucugcagcgcca

SEQ ID NO: 3910169 - RNA, 14 nt, Human adenovirus C
cuguuuugcagcag

SEQ ID NO: 3910170 - RNA, 16 nt, Human adenovirus C
cuuacaaaccuggaaa

SEQ ID NO: 3910171 - RNA, 17 nt, Human adenovirus C
cuuacacguagccugau

SEQ ID NO: 3910172 - RNA, 21 nt, Human adenovirus C
cuuagaaauaggauuuuuccc

SEQ ID NO: 3910173 - RNA, 21 nt, Human adenovirus C
cuucaaaucaaacuuuccugg

SEQ ID NO: 3910174 - RNA, 17 nt, Human adenovirus C
cuucaaucuccucuucc

SEQ ID NO: 3910175 - RNA, 21 nt, Human adenovirus C
cuucagaaacuuccagcccau

SEQ ID NO: 3910176 - RNA, 19 nt, Human adenovirus C
cuucagagaagaacaugcc

SEQ ID NO: 3910177 - RNA, 14 nt, Human adenovirus C
ggacagggccucuc

SEQ ID NO: 3910178 - RNA, 19 nt, Human adenovirus C
ggaccucccggccacuacc

SEQ ID NO: 3910179 - RNA, 14 nt, Human adenovirus C
ggaccucugcacuc

SEQ ID NO: 3910180 - RNA, 13 nt, Human adenovirus C
ggacgacgcagag

SEQ ID NO: 3910181 - RNA, 22 nt, Human adenovirus C
ggacgcuaccgcugcgcaacag

SEQ ID NO: 3910182 - RNA, 17 nt, Human adenovirus C
ggacugggcgugcagac

SEQ ID NO: 3910183 - RNA, 15 nt, Human adenovirus C
ggagaucugcaccac

SEQ ID NO: 3910184 - RNA, 13 nt, Human adenovirus C
ggagaugcagcgc

SEQ ID NO: 3910185 - RNA, 18 nt, Human adenovirus C
ggagcaacagcaggagga

SEQ ID NO: 3910186 - RNA, 14 nt, Human adenovirus C
ggagccugggcugg

SEQ ID NO: 3910187 - RNA, 13 nt, Human adenovirus C
ggagcgaggaggu

SEQ ID NO: 3910188 - RNA, 23 nt, Human adenovirus C
ggagcgcaaccuaaaggagcugc

SEQ ID NO: 3910189 - RNA, 13 nt, Human adenovirus C
ggagcgcaggguu

SEQ ID NO: 3910190 - RNA, 19 nt, Human adenovirus C
ggagcgcugggcguggugc

SEQ ID NO: 3910191 - RNA, 16 nt, Human adenovirus C
ggagcgggagcggggu

SEQ ID NO: 3910192 - RNA, 17 nt, Human adenovirus C
ggaggacacgggcagcc

SEQ ID NO: 3910193 - RNA, 20 nt, Human adenovirus C
ggaggacacgggcagccugg

SEQ ID NO: 3910194 - RNA, 22 nt, Human adenovirus C
ggaggcaagcacacagaccauc

SEQ ID NO: 3910195 - RNA, 12 nt, Human adenovirus C
ggaggcagcugg

SEQ ID NO: 3910196 - RNA, 15 nt, Human adenovirus C
ggaggcaggacccug

SEQ ID NO: 3910197 - RNA, 12 nt, Human adenovirus C
ggaggggcaugg

SEQ ID NO: 3910198 - RNA, 11 nt, Human adenovirus C
ggaggugagcu

SEQ ID NO: 3910199 - RNA, 14 nt, Human adenovirus C
ggaggugagcucaa

SEQ ID NO: 3910200 - RNA, 11 nt, Human adenovirus C
ggagugcuggg

SEQ ID NO: 3910201 - RNA, 14 nt, Human adenovirus C
ggagugcugggcca

SEQ ID NO: 3910202 - RNA, 14 nt, Human adenovirus C
ggaguuaccagcca

SEQ ID NO: 3910203 - RNA, 21 nt, Human adenovirus C
ggaucacaaccccaccaugaa

SEQ ID NO: 3910204 - RNA, 19 nt, Human adenovirus C
ggauuacaagcuccucccg

SEQ ID NO: 3910205 - RNA, 22 nt, Human adenovirus C
ggauuugucacccuuauccuca

SEQ ID NO: 3910206 - RNA, 20 nt, Human adenovirus C
ggcaacccuuccaggagggc

SEQ ID NO: 3910207 - RNA, 16 nt, Human adenovirus C
ucaccgucacccagca

SEQ ID NO: 3910208 - RNA, 11 nt, Human adenovirus C
ucaccucccaa

SEQ ID NO: 3910209 - RNA, 14 nt, Human adenovirus C
ucaccugccgccuc

SEQ ID NO: 3910210 - RNA, 15 nt, Human adenovirus C
ucacggugaaggggu

SEQ ID NO: 3910211 - RNA, 13 nt, Human adenovirus C
ucacuccacaggc

SEQ ID NO: 3910212 - RNA, 23 nt, Human adenovirus C
ucagaaacuuccagcccaugagc

SEQ ID NO: 3910213 - RNA, 19 nt, Human adenovirus C
ucagauacaugggcauaag

SEQ ID NO: 3910214 - RNA, 18 nt, Human adenovirus C
ucagaugcgaguagccca

SEQ ID NO: 3910215 - RNA, 15 nt, Human adenovirus C
ucagaugcugaccug

SEQ ID NO: 3910216 - RNA, 18 nt, Human adenovirus C
ucagcagcggcaagagca

SEQ ID NO: 3910217 - RNA, 12 nt, Human adenovirus C
ucagccuugccu

SEQ ID NO: 3910218 - RNA, 23 nt, Human adenovirus C
ucagcgaccgcgagcugaugcac

SEQ ID NO: 3910219 - RNA, 14 nt, Human adenovirus C
ucagcuacaagcua

SEQ ID NO: 3910220 - RNA, 20 nt, Human adenovirus C
ucagcugggaagaaagcagg

SEQ ID NO: 3910221 - RNA, 13 nt, Human adenovirus C
ucaggaauucugc

SEQ ID NO: 3910222 - RNA, 18 nt, Human adenovirus C
ucaggcacaaccauccgc

SEQ ID NO: 3910223 - RNA, 20 nt, Human adenovirus C
ucaggcgauccuaacucugc

SEQ ID NO: 3910224 - RNA, 20 nt, Human adenovirus C
ucaggcgggagcuccugcag

SEQ ID NO: 3910225 - RNA, 22 nt, Human adenovirus C
ucagggcgcgggcuagguccag

SEQ ID NO: 3910226 - RNA, 17 nt, Human adenovirus C
ucauaaccagcaugaag

SEQ ID NO: 3910227 - RNA, 13 nt, Human adenovirus C
ucauaccacaagc

SEQ ID NO: 3910228 - RNA, 15 nt, Human adenovirus C
ucaucccugagcagg

SEQ ID NO: 3910229 - RNA, 17 nt, Human adenovirus C
ucauggguaacagacau

SEQ ID NO: 3910230 - RNA, 19 nt, Human adenovirus C
ucauuccacgcucaagggc

SEQ ID NO: 3910231 - RNA, 18 nt, Human adenovirus C
uccaaacuaagcauugcu

SEQ ID NO: 3910232 - RNA, 19 nt, Human adenovirus C
uccaauauugcgcuguacc

SEQ ID NO: 3910233 - RNA, 12 nt, Human adenovirus C
uccacagcucgc

SEQ ID NO: 3910234 - RNA, 21 nt, Human adenovirus C
uccacgcuggaagccaugcuc

SEQ ID NO: 3910235 - RNA, 23 nt, Human adenovirus C
uccacgguaaagaccccgggcag

SEQ ID NO: 3910236 - RNA, 20 nt, Human adenovirus C
uccaggcuuuguuucuccac

SEQ ID NO: 3910237 - RNA, 20 nt, Human adenovirus C
uccauagagcagcugaccac

SEQ ID NO: 3910238 - RNA, 17 nt, Human adenovirus C
uccauaugacacagaaa

SEQ ID NO: 3910239 - RNA, 16 nt, Human adenovirus C
uccauggucuggagcu

SEQ ID NO: 3910240 - RNA, 19 nt, Human adenovirus C
ucccaaaaagggugcaugc

SEQ ID NO: 3910241 - RNA, 14 nt, Human adenovirus C
ucccaaaagacaua

SEQ ID NO: 3910242 - RNA, 21 nt, Human adenovirus C
ucccacgauacgucacuuccc

SEQ ID NO: 3910243 - RNA, 22 nt, Human adenovirus C
ucccagaugcauccggugcugc

SEQ ID NO: 3910244 - RNA, 18 nt, Human adenovirus C
ucccaugaaaccaugcua

SEQ ID NO: 3910245 - RNA, 14 nt, Human adenovirus C
uccccagguacagc

SEQ ID NO: 3910246 - RNA, 20 nt, Human adenovirus C
uccccuccgguggcgugguc

SEQ ID NO: 3910247 - RNA, 12 nt, Human adenovirus C
ucccuugccgug

SEQ ID NO: 3910248 - RNA, 22 nt, Human adenovirus C
uccgcgcgcggcggucggagcu

SEQ ID NO: 3910249 - RNA, 13 nt, Human adenovirus C
uccggcagcagcc

SEQ ID NO: 3910250 - RNA, 21 nt, Human adenovirus C
uccggcagcagccgcaggcca

SEQ ID NO: 3910251 - RNA, 15 nt, Human adenovirus C
uccgggcacagcagc

SEQ ID NO: 3910252 - RNA, 22 nt, Human adenovirus C
uccgggcugcgcgcuggccagg

SEQ ID NO: 3910253 - RNA, 20 nt, Human adenovirus C
uccuaccuuggaauuuugca

SEQ ID NO: 3910254 - RNA, 18 nt, Human adenovirus C
uccucaggauuacaagcu

SEQ ID NO: 3910255 - RNA, 23 nt, Human adenovirus C
uccucauguucuugucccuccgc

SEQ ID NO: 3910256 - RNA, 13 nt, Human adenovirus C
uccuccugccagg

SEQ ID NO: 3910257 - RNA, 13 nt, Human adenovirus C
uccuccuggagau

SEQ ID NO: 3910258 - RNA, 20 nt, Human adenovirus C
uccucggagccgcgcuccgg

SEQ ID NO: 3910259 - RNA, 12 nt, Human adenovirus C
uccugcaucucu

SEQ ID NO: 3910260 - RNA, 12 nt, Human adenovirus C
uccugccaggcu

SEQ ID NO: 3910261 - RNA, 14 nt, Human adenovirus C
uccuggagaucucc

SEQ ID NO: 3910262 - RNA, 12 nt, Human adenovirus C
uccuggugcaga

SEQ ID NO: 3910263 - RNA, 19 nt, Human adenovirus C
uccugucgagccaaacgcu

SEQ ID NO: 3910264 - RNA, 19 nt, Human adenovirus C
uccuuggccaauugcaagc

SEQ ID NO: 3910265 - RNA, 15 nt, Human adenovirus C
ucgaaggcuggccgc

SEQ ID NO: 3910266 - RNA, 12 nt, Human adenovirus C
ucgacaccaccc

SEQ ID NO: 3910267 - RNA, 19 nt, Human adenovirus C
ucgagaaggaggacagccu

SEQ ID NO: 3910268 - RNA, 21 nt, Human adenovirus C
ucgagacgccgccucagccgc

SEQ ID NO: 3910269 - RNA, 17 nt, Human adenovirus C
ucgcaaggccuggccag

SEQ ID NO: 3910270 - RNA, 16 nt, Human adenovirus C
ucgcagggccagcuga

SEQ ID NO: 3910271 - RNA, 21 nt, Human adenovirus C
ucgccagcccgugcuggcccc

SEQ ID NO: 3910272 - RNA, 13 nt, Human adenovirus C
ucgccccaucauc

SEQ ID NO: 3910273 - RNA, 15 nt, Human adenovirus C
ucgccccccuucucc

SEQ ID NO: 3910274 - RNA, 22 nt, Human adenovirus C
ucgcccugcgcgucggccaggu

SEQ ID NO: 3910275 - RNA, 23 nt, Human adenovirus C
ucgcccuugcggcagucugcagc

SEQ ID NO: 3910276 - RNA, 13 nt, Human adenovirus C
ucgccggcgcccc

SEQ ID NO: 3910277 - RNA, 18 nt, Human adenovirus C
ucgccugcuacuguuguc

SEQ ID NO: 3910278 - RNA, 18 nt, Human adenovirus C
ucgcgcaacugggcagca

SEQ ID NO: 3910279 - RNA, 22 nt, Human adenovirus C
ucgcgcaccucgcgcucaaagg

SEQ ID NO: 3910280 - RNA, 13 nt, Human adenovirus C
ucgcguccaggcc

SEQ ID NO: 3910281 - RNA, 16 nt, Human adenovirus C
ucgcguuucagccccc

SEQ ID NO: 3910282 - RNA, 14 nt, Human adenovirus C
ucgcuaugcgccac

SEQ ID NO: 3910283 - RNA, 17 nt, Human adenovirus C
ucgcugcugcagccgca

SEQ ID NO: 3910284 - RNA, 19 nt, Human adenovirus C
ucggcagaaacagagggcu

SEQ ID NO: 3910285 - RNA, 12 nt, Human adenovirus C
ucgggcagcagc

SEQ ID NO: 3910286 - RNA, 18 nt, Human adenovirus C
ucguaaacguagaggggc

SEQ ID NO: 3910287 - RNA, 19 nt, Human adenovirus C
ucguaggugagcuccucag

SEQ ID NO: 3910288 - RNA, 15 nt, Human adenovirus C
ucguccagacgggcc

SEQ ID NO: 3910289 - RNA, 15 nt, Human adenovirus C
ucguugaggguccug

SEQ ID NO: 3910290 - RNA, 22 nt, Human adenovirus C
ucuacggcaucucgauccagca

SEQ ID NO: 3910291 - RNA, 21 nt, Human adenovirus C
ucucacgcucgcuugguccug

SEQ ID NO: 3910292 - RNA, 12 nt, Human adenovirus C
ucucagcagcug

SEQ ID NO: 3910293 - RNA, 20 nt, Human adenovirus C
ucucagcgcagcggugcagc

SEQ ID NO: 3910294 - RNA, 15 nt, Human adenovirus C
ucuccaucccaucgc

SEQ ID NO: 3910295 - RNA, 14 nt, Human adenovirus C
ucucuacagccccu

SEQ ID NO: 3910296 - RNA, 17 nt, Human adenovirus C
ucugacaaagcccaaga

SEQ ID NO: 3910297 - RNA, 22 nt, Human adenovirus C
ucugcacucuuauuaaaaccau

SEQ ID NO: 3910298 - RNA, 21 nt, Human adenovirus C
ucugcagcgccagugcgccau

SEQ ID NO: 3910299 - RNA, 13 nt, Human adenovirus C
ucugcccgccacc

SEQ ID NO: 3910300 - RNA, 20 nt, Human adenovirus C
ucugcuuaaaagccaccuga

SEQ ID NO: 3910301 - RNA, 15 nt, Human adenovirus C
ucuggcgcccaacga

SEQ ID NO: 3910302 - RNA, 22 nt, Human adenovirus C
ucuguguaguaguuguaguaua

SEQ ID NO: 3910303 - RNA, 23 nt, Human adenovirus C
ucuuacaugcacaucucgggcca

SEQ ID NO: 3910304 - RNA, 19 nt, Human adenovirus C
ucuuauauuauugacccuu

SEQ ID NO: 3910305 - RNA, 21 nt, Human adenovirus C
ucuucucaaauacuaccucuu

SEQ ID NO: 3910306 - RNA, 16 nt, Human adenovirus C
ucuuggaaaaaaugac

SEQ ID NO: 3910307 - RNA, 17 nt, Human adenovirus C
ucuuggaaaaaaugacc

SEQ ID NO: 3910308 - RNA, 18 nt, Human adenovirus C
ucuuuacgccaccuucuu

SEQ ID NO: 3910309 - RNA, 12 nt, Human adenovirus C
ucuuuuuccaaa

SEQ ID NO: 3910310 - RNA, 16 nt, Human adenovirus C
ugaaaauaaaaaacag

SEQ ID NO: 3910311 - RNA, 16 nt, Human adenovirus C
ugaaaaucagagggcg

SEQ ID NO: 3910312 - RNA, 16 nt, Human adenovirus C
ugaaacucacuccggg

SEQ ID NO: 3910313 - RNA, 20 nt, Human adenovirus C
ugaaaugugcgauauuacca

SEQ ID NO: 3910314 - RNA, 22 nt, Human adenovirus C
ugaaccgcgagcgguugcugcg

SEQ ID NO: 3910315 - RNA, 15 nt, Human adenovirus C
ugaagacgacgggcc

SEQ ID NO: 3910316 - RNA, 21 nt, Human adenovirus C
ugaagcgcugccggucuucgc

SEQ ID NO: 3910317 - RNA, 16 nt, Human adenovirus C
ugaaggggugcgcucc

SEQ ID NO: 3910318 - RNA, 22 nt, Human adenovirus C
ugaauguuguacagguggcuga

SEQ ID NO: 3910319 - RNA, 22 nt, Human adenovirus C
ugacacaccucgaccacugccg

SEQ ID NO: 3910320 - RNA, 20 nt, Human adenovirus C
ugaccagacaccguccugag

SEQ ID NO: 3910321 - RNA, 18 nt, Human adenovirus C
ugaccgucuggcugcucg

SEQ ID NO: 3910322 - RNA, 15 nt, Human adenovirus C
ugaccugcgcugggc

SEQ ID NO: 3910323 - RNA, 22 nt, Human adenovirus C
ugacgaccgcgcacaaggaagc

SEQ ID NO: 3910324 - RNA, 21 nt, Human adenovirus C
ugacggccugguaggcgcagc

SEQ ID NO: 3910325 - RNA, 15 nt, Human adenovirus C
cuguuuugcagcagc

SEQ ID NO: 3910326 - RNA, 16 nt, Human adenovirus C
uagcccugcaaacauc

SEQ ID NO: 3910327 - RNA, 16 nt, Human adenovirus C
uaggagucgcgcagcu

SEQ ID NO: 3910328 - RNA, 21 nt, Human adenovirus C
uaggcgcagcaucccuuuucu

SEQ ID NO: 3910329 - RNA, 18 nt, Human adenovirus C
uaggggagaucagcuggg

SEQ ID NO: 3910330 - RNA, 21 nt, Human adenovirus C
uaguuaagagagcugcagcug

SEQ ID NO: 3910331 - RNA, 13 nt, Human adenovirus C
uauaacagaggcc

SEQ ID NO: 3910332 - RNA, 19 nt, Human adenovirus C
uauacagacuugagaggcc

SEQ ID NO: 3910333 - RNA, 17 nt, Human adenovirus C
uauaccuuuuuaaugca

SEQ ID NO: 3910334 - RNA, 12 nt, Human adenovirus C
uaucacaucuuu

SEQ ID NO: 3910335 - RNA, 20 nt, Human adenovirus C
uaucaccgucacccagcacu

SEQ ID NO: 3910336 - RNA, 21 nt, Human adenovirus C
uaucagcagccgcgggcccuu

SEQ ID NO: 3910337 - RNA, 15 nt, Human adenovirus C
uaucccccaaggccu

SEQ ID NO: 3910338 - RNA, 16 nt, Human adenovirus C
uaugauccagauguua

SEQ ID NO: 3910339 - RNA, 16 nt, Human adenovirus C
uauggcagcaaggccu

SEQ ID NO: 3910340 - RNA, 20 nt, Human adenovirus C
uauugaucaccguaccuuaa

SEQ ID NO: 3910341 - RNA, 13 nt, Human adenovirus C
ucaaaaacaugcu

SEQ ID NO: 3910342 - RNA, 15 nt, Human adenovirus C
ucaaaaucccacagu

SEQ ID NO: 3910343 - RNA, 12 nt, Human adenovirus C
ucaaacccagcu

SEQ ID NO: 3910344 - RNA, 18 nt, Human adenovirus C
ucaaaggcuacaggggcc

SEQ ID NO: 3910345 - RNA, 23 nt, Human adenovirus C
ucaacgcgcgcgcagccuccaug

SEQ ID NO: 3910346 - RNA, 23 nt, Human adenovirus C
ucaacuuugcgucucuggccccg

SEQ ID NO: 3910347 - RNA, 19 nt, Human adenovirus C
ucaauccguucugguuccg

SEQ ID NO: 3910348 - RNA, 20 nt, Human adenovirus C
ucaauguuggcacaacacag

SEQ ID NO: 3910349 - RNA, 14 nt, Human adenovirus C
ucacaagccccacu

SEQ ID NO: 3910350 - RNA, 23 nt, Human adenovirus C
ucacaccuauuaccggcugcaac

SEQ ID NO: 3910351 - RNA, 22 nt, Human adenovirus C
ucacaucgaaguagauugcauc

SEQ ID NO: 3910352 - RNA, 12 nt, Human adenovirus C
ucaccaaggcca

SEQ ID NO: 3910353 - RNA, 16 nt, Human adenovirus C
ucacccuggcuguggg

SEQ ID NO: 3910354 - RNA, 18 nt, Human adenovirus C
ucacggugaaggggugcg

SEQ ID NO: 3910355 - RNA, 17 nt, Human adenovirus C
ucacugcuaccuucugc

SEQ ID NO: 3910356 - RNA, 20 nt, Human adenovirus C
ucacuugcugaagaccauuc

SEQ ID NO: 3910357 - RNA, 18 nt, Human adenovirus C
ucacuuggugcuggccug

SEQ ID NO: 3910358 - RNA, 14 nt, Human adenovirus C
ucacuuuccgcuuc

SEQ ID NO: 3910359 - RNA, 14 nt, Human adenovirus C
ucagagaagaacau

SEQ ID NO: 3910360 - RNA, 18 nt, Human adenovirus C
ucagauaaugacugcaaa

SEQ ID NO: 3910361 - RNA, 17 nt, Human adenovirus C
ucagauacccaccacca

SEQ ID NO: 3910362 - RNA, 22 nt, Human adenovirus C
ucagcagguuggaauucuucac

SEQ ID NO: 3910363 - RNA, 13 nt, Human adenovirus C
ucagccacuuaaa

SEQ ID NO: 3910364 - RNA, 17 nt, Human adenovirus C
ucagccgcgcgcugggg

SEQ ID NO: 3910365 - RNA, 16 nt, Human adenovirus C
ucagccgcugcagcca

SEQ ID NO: 3910366 - RNA, 20 nt, Human adenovirus C
ucagccugaauaacaaguuu

SEQ ID NO: 3910367 - RNA, 20 nt, Human adenovirus C
ucagcgcagcggugcagcca

SEQ ID NO: 3910368 - RNA, 22 nt, Human adenovirus C
ucagcgccauuaugagcaagga

SEQ ID NO: 3910369 - RNA, 13 nt, Human adenovirus C
ucagcgccuccca

SEQ ID NO: 3910370 - RNA, 17 nt, Human adenovirus C
ucagcuugccugcucca

SEQ ID NO: 3910371 - RNA, 23 nt, Human adenovirus C
ucaggaauucugcccgccaccug

SEQ ID NO: 3910372 - RNA, 21 nt, Human adenovirus C
ucaggcgccgccggcacugcc

SEQ ID NO: 3910373 - RNA, 13 nt, Human adenovirus C
ucauccaugacag

SEQ ID NO: 3910374 - RNA, 23 nt, Human adenovirus C
ucaucggcugaagcagggccagg

SEQ ID NO: 3910375 - RNA, 17 nt, Human adenovirus C
ucaucucuacagccccu

SEQ ID NO: 3910376 - RNA, 23 nt, Human adenovirus C
ucauguucuugucccuccgcacc

SEQ ID NO: 3910377 - RNA, 13 nt, Human adenovirus C
ucauuccacgcuc

SEQ ID NO: 3910378 - RNA, 22 nt, Human adenovirus C
ucauugugcucaacccacacaa

SEQ ID NO: 3910379 - RNA, 15 nt, Human adenovirus C
uccaagauggcuacc

SEQ ID NO: 3910380 - RNA, 16 nt, Human adenovirus C
uccacccgcaccuaca

SEQ ID NO: 3910381 - RNA, 16 nt, Human adenovirus C
caccggcggcggcgcg

SEQ ID NO: 3910382 - RNA, 17 nt, Human adenovirus C
caccgucacccagcacu

SEQ ID NO: 3910383 - RNA, 19 nt, Human adenovirus C
caccgugcuuucacuuucc

SEQ ID NO: 3910384 - RNA, 18 nt, Human adenovirus C
caccuacgacuacaugaa

SEQ ID NO: 3910385 - RNA, 17 nt, Human adenovirus C
caccuacgaugaccugg

SEQ ID NO: 3910386 - RNA, 18 nt, Human adenovirus C
caccuacgaugaccugga

SEQ ID NO: 3910387 - RNA, 16 nt, Human adenovirus C
caccucgaccacugcc

SEQ ID NO: 3910388 - RNA, 12 nt, Human adenovirus C
caccucugggga

SEQ ID NO: 3910389 - RNA, 19 nt, Human adenovirus C
caccugaaaaucagagggc

SEQ ID NO: 3910390 - RNA, 20 nt, Human adenovirus C
caccuguaacgcuggaccug

SEQ ID NO: 3910391 - RNA, 17 nt, Human adenovirus C
caccugucgucagcgcc

SEQ ID NO: 3910392 - RNA, 18 nt, Human adenovirus C
cacgaccccuggagaggg

SEQ ID NO: 3910393 - RNA, 19 nt, Human adenovirus C
cacgcaaccgcgcccaggc

SEQ ID NO: 3910394 - RNA, 21 nt, Human adenovirus C
cacgcaaccgcgcccaggcgg

SEQ ID NO: 3910395 - RNA, 19 nt, Human adenovirus C
cacgcuggaagccaugcuc

SEQ ID NO: 3910396 - RNA, 13 nt, Human adenovirus C
cacggcggcgacg

SEQ ID NO: 3910397 - RNA, 20 nt, Human adenovirus C
cacggcggcgacgacggcgc

SEQ ID NO: 3910398 - RNA, 21 nt, Human adenovirus C
cacgggacgcuaccgcugcgc

SEQ ID NO: 3910399 - RNA, 14 nt, Human adenovirus C
cacgggcggcggcc

SEQ ID NO: 3910400 - RNA, 17 nt, Human adenovirus C
cacgguuuccugucgag

SEQ ID NO: 3910401 - RNA, 23 nt, Human adenovirus C
cacguacuuugacauccgcggcg

SEQ ID NO: 3910402 - RNA, 13 nt, Human adenovirus C
cacgucuccugag

SEQ ID NO: 3910403 - RNA, 23 nt, Human adenovirus C
cacuaccggcaaccgccucagcu

SEQ ID NO: 3910404 - RNA, 18 nt, Human adenovirus C
cacuaguauugccacugc

SEQ ID NO: 3910405 - RNA, 16 nt, Human adenovirus C
cacuagugaauccaca

SEQ ID NO: 3910406 - RNA, 17 nt, Human adenovirus C
cacucacagaccugggc

SEQ ID NO: 3910407 - RNA, 13 nt, Human adenovirus C
cacuccacaggcu

SEQ ID NO: 3910408 - RNA, 15 nt, Human adenovirus C
cacuccacaggcugc

SEQ ID NO: 3910409 - RNA, 14 nt, Human adenovirus C
cacuccugcgccgu

SEQ ID NO: 3910410 - RNA, 16 nt, Human adenovirus C
cacucgcuccagggug

SEQ ID NO: 3910411 - RNA, 13 nt, Human adenovirus C
cacucgugcuggc

SEQ ID NO: 3910412 - RNA, 22 nt, Human adenovirus C
cacucucgcaaggccuggccag

SEQ ID NO: 3910413 - RNA, 13 nt, Human adenovirus C
cacugaacagcau

SEQ ID NO: 3910414 - RNA, 17 nt, Human adenovirus C
cacugaucgccgcggcg

SEQ ID NO: 3910415 - RNA, 17 nt, Human adenovirus C
cacugccgccgccacaa

SEQ ID NO: 3910416 - RNA, 20 nt, Human adenovirus C
cacugcuaccuucugcagcu

SEQ ID NO: 3910417 - RNA, 22 nt, Human adenovirus C
cacugugguacuucccagagac

SEQ ID NO: 3910418 - RNA, 19 nt, Human adenovirus C
cacuguuacucagccacuu

SEQ ID NO: 3910419 - RNA, 15 nt, Human adenovirus C
cacuuggugcuggcc

SEQ ID NO: 3910420 - RNA, 15 nt, Human adenovirus C
cacuuucaauaaagg

SEQ ID NO: 3910421 - RNA, 19 nt, Human adenovirus C
cagaaaccgggccuccaac

SEQ ID NO: 3910422 - RNA, 18 nt, Human adenovirus C
cagaaacuuccagcccau

SEQ ID NO: 3910423 - RNA, 15 nt, Human adenovirus C
cagaaggcgcucgcc

SEQ ID NO: 3910424 - RNA, 16 nt, Human adenovirus C
cagacaaugcagaaac

SEQ ID NO: 3910425 - RNA, 17 nt, Human adenovirus C
cagacacacaucugucu

SEQ ID NO: 3910426 - RNA, 21 nt, Human adenovirus C
cgcugcgguucaucccugugg

SEQ ID NO: 3910427 - RNA, 13 nt, Human adenovirus C
cgcuggccagcac

SEQ ID NO: 3910428 - RNA, 18 nt, Human adenovirus C
cgcugucugcgagggcca

SEQ ID NO: 3910429 - RNA, 22 nt, Human adenovirus C
cgcuugcaagcagugcagcuuc

SEQ ID NO: 3910430 - RNA, 15 nt, Human adenovirus C
cggacaagcagcugg

SEQ ID NO: 3910431 - RNA, 12 nt, Human adenovirus C
cggacaggccgc

SEQ ID NO: 3910432 - RNA, 22 nt, Human adenovirus C
cggaccacucugagacgaaggc

SEQ ID NO: 3910433 - RNA, 15 nt, Human adenovirus C
cggacccggcggugc

SEQ ID NO: 3910434 - RNA, 12 nt, Human adenovirus C
cggaccugggcu

SEQ ID NO: 3910435 - RNA, 20 nt, Human adenovirus C
cggagaugcagcgcaagcua

SEQ ID NO: 3910436 - RNA, 21 nt, Human adenovirus C
cggagcuaugcuaaccagcgu

SEQ ID NO: 3910437 - RNA, 14 nt, Human adenovirus C
cggagggugccaga

SEQ ID NO: 3910438 - RNA, 15 nt, Human adenovirus C
cggaguaccugagcc

SEQ ID NO: 3910439 - RNA, 15 nt, Human adenovirus C
cggagugcugggcca

SEQ ID NO: 3910440 - RNA, 18 nt, Human adenovirus C
cggcaaccgccucagcua

SEQ ID NO: 3910441 - RNA, 17 nt, Human adenovirus C
cggcacuuaaccuaccc

SEQ ID NO: 3910442 - RNA, 16 nt, Human adenovirus C
cggcagaagauccccu

SEQ ID NO: 3910443 - RNA, 20 nt, Human adenovirus C
cggcagacaugcagggcacc

SEQ ID NO: 3910444 - RNA, 14 nt, Human adenovirus C
cggcagaugcgccc

SEQ ID NO: 3910445 - RNA, 18 nt, Human adenovirus C
cggcagaugcgccccccu

SEQ ID NO: 3910446 - RNA, 14 nt, Human adenovirus C
cggcagcggcagca

SEQ ID NO: 3910447 - RNA, 21 nt, Human adenovirus C
cggcaguagucggugcucguc

SEQ ID NO: 3910448 - RNA, 20 nt, Human adenovirus C
cggcaugcgucgugcgcacc

SEQ ID NO: 3910449 - RNA, 19 nt, Human adenovirus C
cggccacuuccccgccagg

SEQ ID NO: 3910450 - RNA, 19 nt, Human adenovirus C
cggccaugcgggccgcucg

SEQ ID NO: 3910451 - RNA, 11 nt, Human adenovirus C
cggccccaccg

SEQ ID NO: 3910452 - RNA, 18 nt, Human adenovirus C
cggcccgaugaggccggc

SEQ ID NO: 3910453 - RNA, 19 nt, Human adenovirus C
cggcccguagccaguggca

SEQ ID NO: 3910454 - RNA, 22 nt, Human adenovirus C
cggcccugcuuaaccgcgcacg

SEQ ID NO: 3910455 - RNA, 24 nt, Human adenovirus C
cggccguggagacagugucuccag

SEQ ID NO: 3910456 - RNA, 16 nt, Human adenovirus C
cggccuaccgggggga

SEQ ID NO: 3910457 - RNA, 17 nt, Human adenovirus C
cggccuuccggagcgag

SEQ ID NO: 3910458 - RNA, 18 nt, Human adenovirus C
cggcgacccucagaccgg

SEQ ID NO: 3910459 - RNA, 16 nt, Human adenovirus C
cggcgccagcaccugu

SEQ ID NO: 3910460 - RNA, 15 nt, Human adenovirus C
cggcgccgggcccgg

SEQ ID NO: 3910461 - RNA, 13 nt, Human adenovirus C
cggcgcugcagag

SEQ ID NO: 3910462 - RNA, 15 nt, Human adenovirus C
cggcgcugcagagcc

SEQ ID NO: 3910463 - RNA, 13 nt, Human adenovirus C
cggcggcagaaga

SEQ ID NO: 3910464 - RNA, 15 nt, Human adenovirus C
cggcggcggcaggag

SEQ ID NO: 3910465 - RNA, 15 nt, Human adenovirus C
cggcggcuggcggua

SEQ ID NO: 3910466 - RNA, 23 nt, Human adenovirus C
cggcguaguuucgcaggcgcuga

SEQ ID NO: 3910467 - RNA, 17 nt, Human adenovirus C
cggcguccggcucacca

SEQ ID NO: 3910468 - RNA, 13 nt, Human adenovirus C
cggcuaggucucg

SEQ ID NO: 3910469 - RNA, 21 nt, Human adenovirus C
cggcuauuaccaccacaccuc

SEQ ID NO: 3910470 - RNA, 18 nt, Human adenovirus C
cggcucaaccaucgcgcc

SEQ ID NO: 3910471 - RNA, 15 nt, Human adenovirus C
cggcucaccacccag

SEQ ID NO: 3910472 - RNA, 14 nt, Human adenovirus C
cggcucgcgcccgu

SEQ ID NO: 3910473 - RNA, 13 nt, Human adenovirus C
cggcuggagcugc

SEQ ID NO: 3910474 - RNA, 20 nt, Human adenovirus C
cgggacgcucuggccgguga

SEQ ID NO: 3910475 - RNA, 17 nt, Human adenovirus C
cgggagagggggcaggg

SEQ ID NO: 3910476 - RNA, 15 nt, Human adenovirus C
cgggcagcaggcgcg

SEQ ID NO: 3910477 - RNA, 16 nt, Human adenovirus C
cgggcagccuggaggc

SEQ ID NO: 3910478 - RNA, 15 nt, Human adenovirus C
cgggcaggagcuggu

SEQ ID NO: 3910479 - RNA, 16 nt, Human adenovirus C
cgggccaugagcugcg

SEQ ID NO: 3910480 - RNA, 20 nt, Human adenovirus C
cgggcccuugcuucccagga

SEQ ID NO: 3910481 - RNA, 19 nt, Human adenovirus C
cgggccgaacacucgugcu

SEQ ID NO: 3910482 - RNA, 19 nt, Human adenovirus C
cgggccgcucgaaggcugg

SEQ ID NO: 3910483 - RNA, 14 nt, Human adenovirus C
cgggcgcagggucc

SEQ ID NO: 3910484 - RNA, 12 nt, Human adenovirus C
cgggcggcaugc

SEQ ID NO: 3910485 - RNA, 14 nt, Human adenovirus C
cgggcuagguccag

SEQ ID NO: 3910486 - RNA, 21 nt, Human adenovirus C
cgggcugcgcgcuggccaggg

SEQ ID NO: 3910487 - RNA, 21 nt, Human adenovirus C
cggggaguaggcauccgcgcc

SEQ ID NO: 3910488 - RNA, 18 nt, Human adenovirus C
cggggggcuucugaggcu

SEQ ID NO: 3910489 - RNA, 23 nt, Human adenovirus C
cgggucaaaaagaaaaagaaaga

SEQ ID NO: 3910490 - RNA, 14 nt, Human adenovirus C
cgguaccuuugagc

SEQ ID NO: 3910491 - RNA, 15 nt, Human adenovirus C
cgguagaggggccag

SEQ ID NO: 3910492 - RNA, 22 nt, Human adenovirus C
cgguagugggucuagcugcguc

SEQ ID NO: 3910493 - RNA, 15 nt, Human adenovirus C
cggucaccagaggcu

SEQ ID NO: 3910494 - RNA, 13 nt, Human adenovirus C
cggucccacagcu

SEQ ID NO: 3910495 - RNA, 13 nt, Human adenovirus C
cggucggccaugc

SEQ ID NO: 3910496 - RNA, 15 nt, Human adenovirus C
cggucguugaggguc

SEQ ID NO: 3910497 - RNA, 18 nt, Human adenovirus C
cggucguugaggguccug

SEQ ID NO: 3910498 - RNA, 11 nt, Human adenovirus C
cggugagcgcu

SEQ ID NO: 3910499 - RNA, 17 nt, Human adenovirus C
cggugagcgcuccaccc

SEQ ID NO: 3910500 - RNA, 22 nt, Human adenovirus C
cggugaugccuuugaggguggc

SEQ ID NO: 3910501 - RNA, 19 nt, Human adenovirus C
cggugcaggcggccgcugc

SEQ ID NO: 3910502 - RNA, 11 nt, Human adenovirus C
cggugccauga

SEQ ID NO: 3910503 - RNA, 20 nt, Human adenovirus C
cggugccaugauuacuaaac

SEQ ID NO: 3910504 - RNA, 12 nt, Human adenovirus C
cgguggcaccua

SEQ ID NO: 3910505 - RNA, 21 nt, Human adenovirus C
cgguguuggagaucugcacca

SEQ ID NO: 3910506 - RNA, 21 nt, Human adenovirus C
cgguugacaguauuacccaga

SEQ ID NO: 3910507 - RNA, 21 nt, Human adenovirus C
cguacacuggauggccuuugc

SEQ ID NO: 3910508 - RNA, 19 nt, Human adenovirus C
cguaugcgcaggagcacag

SEQ ID NO: 3910509 - RNA, 22 nt, Human adenovirus C
cgucaccgguugcugcgcccac

SEQ ID NO: 3910510 - RNA, 17 nt, Human adenovirus C
cgucaucccugagcagg

SEQ ID NO: 3910511 - RNA, 19 nt, Human adenovirus C
cguccagacgggccagggu

SEQ ID NO: 3910512 - RNA, 14 nt, Human adenovirus C
cgucccugcgccgu

SEQ ID NO: 3910513 - RNA, 16 nt, Human adenovirus C
cgucuagggcgcagua

SEQ ID NO: 3910514 - RNA, 19 nt, Human adenovirus C
cgugacacugcagcaggug

SEQ ID NO: 3910515 - RNA, 21 nt, Human adenovirus C
cgugacacugcagcaggugcu

SEQ ID NO: 3910516 - RNA, 16 nt, Human adenovirus C
cgugcacuccaagagc

SEQ ID NO: 3910517 - RNA, 15 nt, Human adenovirus C
cgugcagaccgugga

SEQ ID NO: 3910518 - RNA, 16 nt, Human adenovirus C
cgugcauacacuuccu

SEQ ID NO: 3910519 - RNA, 17 nt, Human adenovirus C
cgugccaaccgcagccg

SEQ ID NO: 3910520 - RNA, 20 nt, Human adenovirus C
cgugcuguugaagcaucugc

SEQ ID NO: 3910521 - RNA, 13 nt, Human adenovirus C
cguggcgggcggc

SEQ ID NO: 3910522 - RNA, 16 nt, Human adenovirus C
cguggcuacaccuacc

SEQ ID NO: 3910523 - RNA, 17 nt, Human adenovirus C
cgugggucugggggugc

SEQ ID NO: 3910524 - RNA, 21 nt, Human adenovirus C
cgugugaccccgaagccccuc

SEQ ID NO: 3910525 - RNA, 18 nt, Human adenovirus C
cgugugcaccagccgcac

SEQ ID NO: 3910526 - RNA, 22 nt, Human adenovirus C
cguucaggaauucugcccgcca

SEQ ID NO: 3910527 - RNA, 15 nt, Human adenovirus C
cguuccggcagcagc

SEQ ID NO: 3910528 - RNA, 16 nt, Human adenovirus C
cguuggagacugcagc

SEQ ID NO: 3910529 - RNA, 13 nt, Human adenovirus C
cuaaaccagcugg

SEQ ID NO: 3910530 - RNA, 17 nt, Human adenovirus C
cuacuccggcacugccu

SEQ ID NO: 3910531 - RNA, 15 nt, Human adenovirus C
cuacuucggcugcuu

SEQ ID NO: 3910532 - RNA, 23 nt, Human adenovirus C
cuagccuaaagcccgugacacug

SEQ ID NO: 3910533 - RNA, 15 nt, Human adenovirus C
cuagcgagguaagca

SEQ ID NO: 3910534 - RNA, 13 nt, Human adenovirus C
cuagcuugcugac

SEQ ID NO: 3910535 - RNA, 21 nt, Human adenovirus C
cuagcuuuuuuggccacuggc

SEQ ID NO: 3910536 - RNA, 21 nt, Human adenovirus C
cuagggcgcaguaguccaggg

SEQ ID NO: 3910537 - RNA, 15 nt, Human adenovirus C
cuauauuucaacaaa

SEQ ID NO: 3910538 - RNA, 19 nt, Human adenovirus C
cuaucaccgucacccagca

SEQ ID NO: 3910539 - RNA, 18 nt, Human adenovirus C
cuauccugccgugccaac

SEQ ID NO: 3910540 - RNA, 20 nt, Human adenovirus C
cuaugcaccccgcaccgcuc

SEQ ID NO: 3910541 - RNA, 20 nt, Human adenovirus C
cuauguugggucaacaaucu

SEQ ID NO: 3910542 - RNA, 22 nt, Human adenovirus C
cuauuuauguaaauaauggaaa

SEQ ID NO: 3910543 - RNA, 13 nt, Human adenovirus C
cucaaagcaucca

SEQ ID NO: 3910544 - RNA, 15 nt, Human adenovirus C
cucaaauacuaccuc

SEQ ID NO: 3910545 - RNA, 15 nt, Human adenovirus C
cucaaauauggaaca

SEQ ID NO: 3910546 - RNA, 14 nt, Human adenovirus C
cucaacuaaugcaa

SEQ ID NO: 3910547 - RNA, 16 nt, Human adenovirus C
cucacagaccugggcc

SEQ ID NO: 3910548 - RNA, 15 nt, Human adenovirus C
cucacccgcagcugc

SEQ ID NO: 3910549 - RNA, 12 nt, Human adenovirus C
cucaccucccaa

SEQ ID NO: 3910550 - RNA, 16 nt, Human adenovirus C
cucagcagcggcaaga

SEQ ID NO: 3910551 - RNA, 23 nt, Human adenovirus C
cucagccgccuuuuagcugcaaa

SEQ ID NO: 3910552 - RNA, 23 nt, Human adenovirus C
cucagcgaccgcgagcugaugca

SEQ ID NO: 3910553 - RNA, 21 nt, Human adenovirus C
cucagcgcagcggugcagcca

SEQ ID NO: 3910554 - RNA, 16 nt, Human adenovirus C
cucagugcaacaugac

SEQ ID NO: 3910555 - RNA, 22 nt, Human adenovirus C
cucaguggaacgaagcugaugc

SEQ ID NO: 3910556 - RNA, 17 nt, Human adenovirus C
cucaucggcugaagcag

SEQ ID NO: 3910557 - RNA, 17 nt, Human adenovirus C
cuccaccgaugccgcca

SEQ ID NO: 3910558 - RNA, 15 nt, Human adenovirus C
cuccacgccuuugcc

SEQ ID NO: 3910559 - RNA, 16 nt, Human adenovirus C
cuccacgccuuugcca

SEQ ID NO: 3910560 - RNA, 23 nt, Human adenovirus C
cuccacgcuggaagccaugcuca

SEQ ID NO: 3910561 - RNA, 21 nt, Human adenovirus C
cuccacuuaaacucaggcaca

SEQ ID NO: 3910562 - RNA, 19 nt, Human adenovirus C
cuccagagcgcccuccacc

SEQ ID NO: 3910563 - RNA, 20 nt, Human adenovirus C
cuccagaggggcguggcgaa

SEQ ID NO: 3910564 - RNA, 23 nt, Human adenovirus C
cuccagauaucaacccaauaaaa

SEQ ID NO: 3910565 - RNA, 20 nt, Human adenovirus C
cuccaggcgggcaagauuau

SEQ ID NO: 3910566 - RNA, 14 nt, Human adenovirus C
cuccaugcccuucu

SEQ ID NO: 3910567 - RNA, 21 nt, Human adenovirus C
cucccaaaagacauauuuccu

SEQ ID NO: 3910568 - RNA, 17 nt, Human adenovirus C
cucccaaaauguaacca

SEQ ID NO: 3910569 - RNA, 23 nt, Human adenovirus C
cucccaaaauguaaccacuguua

SEQ ID NO: 3910570 - RNA, 16 nt, Human adenovirus C
cucccacccccacuga

SEQ ID NO: 3910571 - RNA, 13 nt, Human adenovirus C
cucccacgcagac

SEQ ID NO: 3910572 - RNA, 13 nt, Human adenovirus C
cucccgccaccag

SEQ ID NO: 3910573 - RNA, 19 nt, Human adenovirus C
cucccgguaccauauaaac

SEQ ID NO: 3910574 - RNA, 17 nt, Human adenovirus C
cucccguguagacacuu

SEQ ID NO: 3910575 - RNA, 11 nt, Human adenovirus C
cuccucaccug

SEQ ID NO: 3910576 - RNA, 18 nt, Human adenovirus C
cuccucaggggagcugag

SEQ ID NO: 3910577 - RNA, 15 nt, Human adenovirus C
cuccuccugccaggc

SEQ ID NO: 3910578 - RNA, 17 nt, Human adenovirus C
cuccugaaucuggcgcc

SEQ ID NO: 3910579 - RNA, 23 nt, Human adenovirus C
cuccugcgccguagcgccauugc

SEQ ID NO: 3910580 - RNA, 17 nt, Human adenovirus C
cuccuucagcgcgcgcu

SEQ ID NO: 3910581 - RNA, 14 nt, Human adenovirus C
cuccuuugcacucc

SEQ ID NO: 3910582 - RNA, 20 nt, Human adenovirus C
cucgacgaagugccaaaaau

SEQ ID NO: 3910583 - RNA, 17 nt, Human adenovirus C
cucgaucucuuccuccu

SEQ ID NO: 3910584 - RNA, 21 nt, Human adenovirus C
cucgcaaggccuggccagugu

SEQ ID NO: 3910585 - RNA, 21 nt, Human adenovirus C
cucgcauuccacgagccaggu

SEQ ID NO: 3910586 - RNA, 21 nt, Human adenovirus C
cucgccccccuucucccaccc

SEQ ID NO: 3910587 - RNA, 22 nt, Human adenovirus C
cucgccuucgaucucagcgcag

SEQ ID NO: 3910588 - RNA, 20 nt, Human adenovirus C
cucgcgcucaaaggcuacag

SEQ ID NO: 3910589 - RNA, 17 nt, Human adenovirus C
cucgcucccaccaugcg

SEQ ID NO: 3910590 - RNA, 19 nt, Human adenovirus C
cucgcucgacgaagugcca

SEQ ID NO: 3910591 - RNA, 11 nt, Human adenovirus C
cucgcugcugc

SEQ ID NO: 3910592 - RNA, 23 nt, Human adenovirus C
cucgcugcugcagccgcagcgcg

SEQ ID NO: 3910593 - RNA, 23 nt, Human adenovirus C
cucggcuaauauggccugcugca

SEQ ID NO: 3910594 - RNA, 16 nt, Human adenovirus C
cucggucgcauucccc

SEQ ID NO: 3910595 - RNA, 18 nt, Human adenovirus C
cucgguuagcggccugcg

SEQ ID NO: 3910596 - RNA, 19 nt, Human adenovirus C
cucguccagacgggccagg

SEQ ID NO: 3910597 - RNA, 18 nt, Human adenovirus C
cucguuacaacagcggca

SEQ ID NO: 3910598 - RNA, 21 nt, Human adenovirus C
cucuaugugggauaugcucca

SEQ ID NO: 3910599 - RNA, 13 nt, Human adenovirus C
cucugcaaccugg

SEQ ID NO: 3910600 - RNA, 18 nt, Human adenovirus C
cucugcagaccucguccu

SEQ ID NO: 3910601 - RNA, 21 nt, Human adenovirus C
cucugcgugaagacgacgggc

SEQ ID NO: 3910602 - RNA, 17 nt, Human adenovirus C
cucugguaucucagccg

SEQ ID NO: 3910603 - RNA, 14 nt, Human adenovirus C
cucuuacaccuucu

SEQ ID NO: 3910604 - RNA, 14 nt, Human adenovirus C
cucuuguccugcau

SEQ ID NO: 3910605 - RNA, 16 nt, Human adenovirus C
cugaagcagggccagg

SEQ ID NO: 3910606 - RNA, 20 nt, Human adenovirus C
cugaaucuggcgccucugcg

SEQ ID NO: 3910607 - RNA, 15 nt, Human adenovirus C
cugacaaagcccaag

SEQ ID NO: 3910608 - RNA, 22 nt, Human adenovirus C
cugacaaagcccaagaaaucca

SEQ ID NO: 3910609 - RNA, 17 nt, Human adenovirus C
cugacagaggacagcaa

SEQ ID NO: 3910610 - RNA, 13 nt, Human adenovirus C
cugacagggccca

SEQ ID NO: 3910611 - RNA, 22 nt, Human adenovirus C
cugaccaaaugcgccagaaggc

SEQ ID NO: 3910612 - RNA, 23 nt, Human adenovirus C
cugaccaaaugcgccagaaggcg

SEQ ID NO: 3910613 - RNA, 22 nt, Human adenovirus C
cugaccacuuacuggcugcagc

SEQ ID NO: 3910614 - RNA, 17 nt, Human adenovirus C
cugacgaccgcgcacaa

SEQ ID NO: 3910615 - RNA, 23 nt, Human adenovirus C
cugacgccagacgccgcaccugc

SEQ ID NO: 3910616 - RNA, 18 nt, Human adenovirus C
cugagacaccgcaaagug

SEQ ID NO: 3910617 - RNA, 14 nt, Human adenovirus C
cugagacgaaggcu

SEQ ID NO: 3910618 - RNA, 22 nt, Human adenovirus C
cugagcaacuuguugggcaucc

SEQ ID NO: 3910619 - RNA, 19 nt, Human adenovirus C
cugaggcccgaucacuugg

SEQ ID NO: 3910620 - RNA, 14 nt, Human adenovirus C
cugaguauuccaag

SEQ ID NO: 3910621 - RNA, 16 nt, Human adenovirus C
cugaguuggcaccccu

SEQ ID NO: 3910622 - RNA, 14 nt, Human adenovirus C
cugaucucacuuaa

SEQ ID NO: 3910623 - RNA, 19 nt, Human adenovirus C
cugaugguacccaagcgcc

SEQ ID NO: 3910624 - RNA, 19 nt, Human adenovirus C
cugcaaacaucagcccccc

SEQ ID NO: 3910625 - RNA, 19 nt, Human adenovirus C
cugcaccugcgugagggua

SEQ ID NO: 3910626 - RNA, 15 nt, Human adenovirus C
cugcacgucuccuga

SEQ ID NO: 3910627 - RNA, 15 nt, Human adenovirus C
cugcagaccucgucc

SEQ ID NO: 3910628 - RNA, 10 nt, Human adenovirus C
cugcagagca

SEQ ID NO: 3910629 - RNA, 14 nt, Human adenovirus C
cugcagagccagcc

SEQ ID NO: 3910630 - RNA, 18 nt, Human adenovirus C
cugcagagcucucuggga

SEQ ID NO: 3910631 - RNA, 13 nt, Human adenovirus C
cugcagccagggg

SEQ ID NO: 3910632 - RNA, 21 nt, Human adenovirus C
cugcagccuccgccgccgcuu

SEQ ID NO: 3910633 - RNA, 14 nt, Human adenovirus C
cugcagcgcugcca

SEQ ID NO: 3910634 - RNA, 15 nt, Human adenovirus C
cugcagcgcugccaa

SEQ ID NO: 3910635 - RNA, 14 nt, Human adenovirus C
cugcagcugccgcc

SEQ ID NO: 3910636 - RNA, 21 nt, Human adenovirus C
cugcagcugccgccgccgcca

SEQ ID NO: 3910637 - RNA, 12 nt, Human adenovirus C
gcgagggccugg

SEQ ID NO: 3910638 - RNA, 18 nt, Human adenovirus C
gcgagguauucagcucaa

SEQ ID NO: 3910639 - RNA, 18 nt, Human adenovirus C
gcgaggugugggugagcg

SEQ ID NO: 3910640 - RNA, 17 nt, Human adenovirus C
gcgagugguggcucccg

SEQ ID NO: 3910641 - RNA, 22 nt, Human adenovirus C
gcgauccuaacucugcagaccu

SEQ ID NO: 3910642 - RNA, 14 nt, Human adenovirus C
gcgaugagcagcug

SEQ ID NO: 3910643 - RNA, 16 nt, Human adenovirus C
gcgcaacgcaccgcca

SEQ ID NO: 3910644 - RNA, 16 nt, Human adenovirus C
gcgcacaaacgcggcc

SEQ ID NO: 3910645 - RNA, 19 nt, Human adenovirus C
gcgcacaaacgcggccgca

SEQ ID NO: 3910646 - RNA, 17 nt, Human adenovirus C
gcgcaccaccggcggcg

SEQ ID NO: 3910647 - RNA, 21 nt, Human adenovirus C
gcgcaccaccggcggcggcgc

SEQ ID NO: 3910648 - RNA, 18 nt, Human adenovirus C
gcgcagcagcagggcaac

SEQ ID NO: 3910649 - RNA, 16 nt, Human adenovirus C
gcgcagcggugcagcc

SEQ ID NO: 3910650 - RNA, 13 nt, Human adenovirus C
gcgcaggguggcu

SEQ ID NO: 3910651 - RNA, 22 nt, Human adenovirus C
gcgcauccacaaggccgugagc

SEQ ID NO: 3910652 - RNA, 19 nt, Human adenovirus C
gcgcaucccauucuccagu

SEQ ID NO: 3910653 - RNA, 20 nt, Human adenovirus C
gcgccacaauguggccuccg

SEQ ID NO: 3910654 - RNA, 20 nt, Human adenovirus C
gcgcccacaccuacagccug

SEQ ID NO: 3910655 - RNA, 20 nt, Human adenovirus C
gcgcccauggcuaccggagu

SEQ ID NO: 3910656 - RNA, 13 nt, Human adenovirus C
gcgcccgcccacc

SEQ ID NO: 3910657 - RNA, 13 nt, Human adenovirus C
gcgcccuggaggc

SEQ ID NO: 3910658 - RNA, 20 nt, Human adenovirus C
gcgcccuggaggcagcuggg

SEQ ID NO: 3910659 - RNA, 21 nt, Human adenovirus C
gcgcccuucacggacaguggc

SEQ ID NO: 3910660 - RNA, 17 nt, Human adenovirus C
gcgccgcacgaggggca

SEQ ID NO: 3910661 - RNA, 20 nt, Human adenovirus C
gcgccguagcgccauugcuu

SEQ ID NO: 3910662 - RNA, 16 nt, Human adenovirus C
gcgccgugccgccagc

SEQ ID NO: 3910663 - RNA, 12 nt, Human adenovirus C
gcgccuaccacc

SEQ ID NO: 3910664 - RNA, 21 nt, Human adenovirus C
gcgccugauuucugccagcgc

SEQ ID NO: 3910665 - RNA, 15 nt, Human adenovirus C
gcgccuucagcuggg

SEQ ID NO: 3910666 - RNA, 23 nt, Human adenovirus C
gcgcgcuggccagggugcgcuug

SEQ ID NO: 3910667 - RNA, 23 nt, Human adenovirus C
gcgcgucccugcgccgugccgcc

SEQ ID NO: 3910668 - RNA, 14 nt, Human adenovirus C
gcgcgucggccagg

SEQ ID NO: 3910669 - RNA, 19 nt, Human adenovirus C
gcgcgugcccgugcgcacc

SEQ ID NO: 3910670 - RNA, 17 nt, Human adenovirus C
gcgcucaaaaacaugcu

SEQ ID NO: 3910671 - RNA, 18 nt, Human adenovirus C
gcgcuccuuggccgcgau

SEQ ID NO: 3910672 - RNA, 15 nt, Human adenovirus C
gcgcugaccugcgcu

SEQ ID NO: 3910673 - RNA, 20 nt, Human adenovirus C
gcgcugaccugcgcugggcc

SEQ ID NO: 3910674 - RNA, 13 nt, Human adenovirus C
gcgcugcuccucu

SEQ ID NO: 3910675 - RNA, 19 nt, Human adenovirus C
gcgcuggccgcucuucauu

SEQ ID NO: 3910676 - RNA, 15 nt, Human adenovirus C
gcgcuggggcaggag

SEQ ID NO: 3910677 - RNA, 19 nt, Human adenovirus C
gcgcuguaccugccagaca

SEQ ID NO: 3910678 - RNA, 15 nt, Human adenovirus C
gcggaggagaagcgc

SEQ ID NO: 3910679 - RNA, 15 nt, Human adenovirus C
gcggcaccagcgcau

SEQ ID NO: 3910680 - RNA, 17 nt, Human adenovirus C
gcggcagacaugcaggg

SEQ ID NO: 3910681 - RNA, 16 nt, Human adenovirus C
gcggcagcaacagcag

SEQ ID NO: 3910682 - RNA, 12 nt, Human adenovirus C
gcggcaggagca

SEQ ID NO: 3910683 - RNA, 14 nt, Human adenovirus C
gcggcaggagcaga

SEQ ID NO: 3910684 - RNA, 13 nt, Human adenovirus C
gcggccaugcggg

SEQ ID NO: 3910685 - RNA, 17 nt, Human adenovirus C
gcggccgcacugggcgc

SEQ ID NO: 3910686 - RNA, 24 nt, Human adenovirus C
gcggccguucucgcgggggcgcag

SEQ ID NO: 3910687 - RNA, 18 nt, Human adenovirus C
gcggccuuccggagcgag

SEQ ID NO: 3910688 - RNA, 19 nt, Human adenovirus C
gcggcgccaguggcggcgg

SEQ ID NO: 3910689 - RNA, 14 nt, Human adenovirus C
gcggcgcgcaacga

SEQ ID NO: 3910690 - RNA, 15 nt, Human adenovirus C
gcggcgcggaagaga

SEQ ID NO: 3910691 - RNA, 14 nt, Human adenovirus C
gcggcgcugcagag

SEQ ID NO: 3910692 - RNA, 16 nt, Human adenovirus C
gcggcgcugcagagcc

SEQ ID NO: 3910693 - RNA, 13 nt, Human adenovirus C
gcggcggcggcug

SEQ ID NO: 3910694 - RNA, 15 nt, Human adenovirus C
gcggcggucggagcu

SEQ ID NO: 3910695 - RNA, 18 nt, Human adenovirus C
gcggcggugggggagggg

SEQ ID NO: 3910696 - RNA, 23 nt, Human adenovirus C
gcggcgucgaugacuugcaagag

SEQ ID NO: 3910697 - RNA, 13 nt, Human adenovirus C
gcggcgugcugga

SEQ ID NO: 3910698 - RNA, 21 nt, Human adenovirus C
gcggcugacgcggcggcagau

SEQ ID NO: 3910699 - RNA, 12 nt, Human adenovirus C
gcggcugcuguu

SEQ ID NO: 3910700 - RNA, 13 nt, Human adenovirus C
gcggcugcuguug

SEQ ID NO: 3910701 - RNA, 17 nt, Human adenovirus C
gcggcuggcgguagagg

SEQ ID NO: 3910702 - RNA, 23 nt, Human adenovirus C
gcgggcacucuuccguggucugg

SEQ ID NO: 3910703 - RNA, 18 nt, Human adenovirus C
gcgggcccuugcuuccca

SEQ ID NO: 3910704 - RNA, 14 nt, Human adenovirus C
gcggggugcccuug

SEQ ID NO: 3910705 - RNA, 22 nt, Human adenovirus C
gcggguauugucacugugcccc

SEQ ID NO: 3910706 - RNA, 17 nt, Human adenovirus C
gcgguauccugccccuc

SEQ ID NO: 3910707 - RNA, 17 nt, Human adenovirus C
gcggugcgggcggcgcu

SEQ ID NO: 3910708 - RNA, 17 nt, Human adenovirus C
gcgguucacccuggcug

SEQ ID NO: 3910709 - RNA, 19 nt, Human adenovirus C
gcgguucacccuggcugug

SEQ ID NO: 3910710 - RNA, 21 nt, Human adenovirus C
gcguagcacgucgccaccgcc

SEQ ID NO: 3910711 - RNA, 22 nt, Human adenovirus C
gcgucccugcgccgugccgcca

SEQ ID NO: 3910712 - RNA, 21 nt, Human adenovirus C
gcguccuggauuugggaggga

SEQ ID NO: 3910713 - RNA, 18 nt, Human adenovirus C
gcgugucccgggacacau

SEQ ID NO: 3910714 - RNA, 19 nt, Human adenovirus C
gcguugcaagagcgcagcg

SEQ ID NO: 3910715 - RNA, 17 nt, Human adenovirus C
gcguuucagccccccgg

SEQ ID NO: 3910716 - RNA, 20 nt, Human adenovirus C
gcuaauggcaauggcucagg

SEQ ID NO: 3910717 - RNA, 17 nt, Human adenovirus C
gcuacaaauaggaucag

SEQ ID NO: 3910718 - RNA, 19 nt, Human adenovirus C
gcuacaacguagcucagug

SEQ ID NO: 3910719 - RNA, 23 nt, Human adenovirus C
gcuacaacguagcucagugcaac

SEQ ID NO: 3910720 - RNA, 17 nt, Human adenovirus C
gcuacaagcuacccacc

SEQ ID NO: 3910721 - RNA, 18 nt, Human adenovirus C
gcuaccggagugcugggc

SEQ ID NO: 3910722 - RNA, 20 nt, Human adenovirus C
gcuaccggagugcugggcca

SEQ ID NO: 3910723 - RNA, 22 nt, Human adenovirus C
gcuaccggagugcugggccagc

SEQ ID NO: 3910724 - RNA, 23 nt, Human adenovirus C
gcuaccucuccgcguaggcgcuc

SEQ ID NO: 3910725 - RNA, 21 nt, Human adenovirus C
gcuaccuucugcagcuagcca

SEQ ID NO: 3910726 - RNA, 19 nt, Human adenovirus C
gcuagugaaaagcguggcu

SEQ ID NO: 3910727 - RNA, 16 nt, Human adenovirus C
gcuauaaaugcaggaa

SEQ ID NO: 3910728 - RNA, 23 nt, Human adenovirus C
gcuaugcgccacuggcagggaca

SEQ ID NO: 3910729 - RNA, 14 nt, Human adenovirus C
gcuaugugcagcag

SEQ ID NO: 3910730 - RNA, 14 nt, Human adenovirus C
gcucagggcgaacg

SEQ ID NO: 3910731 - RNA, 22 nt, Human adenovirus C
gcuccacuuaaacucaggcaca

SEQ ID NO: 3910732 - RNA, 12 nt, Human adenovirus C
gcucccaagggc

SEQ ID NO: 3910733 - RNA, 14 nt, Human adenovirus C
gcucccaccacugu

SEQ ID NO: 3910734 - RNA, 15 nt, Human adenovirus C
gcucccaccaugcgc

SEQ ID NO: 3910735 - RNA, 17 nt, Human adenovirus C
gcucccucacccgcagc

SEQ ID NO: 3910736 - RNA, 21 nt, Human adenovirus C
gcucccucacccgcagcugcc

SEQ ID NO: 3910737 - RNA, 17 nt, Human adenovirus C
gcuccguccugcaggaa

SEQ ID NO: 3910738 - RNA, 16 nt, Human adenovirus C
gcuccuaacuccugug

SEQ ID NO: 3910739 - RNA, 20 nt, Human adenovirus C
gcuccucaggcgccgccggc

SEQ ID NO: 3910740 - RNA, 12 nt, Human adenovirus C
gcuccucucuug

SEQ ID NO: 3910741 - RNA, 21 nt, Human adenovirus C
gcuccuuugucuggagaaaca

SEQ ID NO: 3910742 - RNA, 19 nt, Human adenovirus C
gcuccuuuuggcuuccuuc

SEQ ID NO: 3910743 - RNA, 21 nt, Human adenovirus C
gcuccuuuuggcuuccuucca

SEQ ID NO: 3910744 - RNA, 13 nt, Human adenovirus C
gcucgaggggagu

SEQ ID NO: 3910745 - RNA, 15 nt, Human adenovirus C
gcucgaucucuuccu

SEQ ID NO: 3910746 - RNA, 16 nt, Human adenovirus C
gcucgaucucuuccuc

SEQ ID NO: 3910747 - RNA, 21 nt, Human adenovirus C
gcucgaucucuuccuccugga

SEQ ID NO: 3910748 - RNA, 22 nt, Human adenovirus C
gcucggugaaguuuucacucca

SEQ ID NO: 3910749 - RNA, 15 nt, Human adenovirus C
gcucuacagcuuccu

SEQ ID NO: 3910750 - RNA, 19 nt, Human adenovirus C
gcucuagaccgugcaaaag

SEQ ID NO: 3910751 - RNA, 18 nt, Human adenovirus C
gcucuagcgaugaagaua

SEQ ID NO: 3910752 - RNA, 13 nt, Human adenovirus C
gcucugcaaccug

SEQ ID NO: 3910753 - RNA, 22 nt, Human adenovirus C
gcucuggccggugaggcgugcg

SEQ ID NO: 3910754 - RNA, 17 nt, Human adenovirus C
gcugaggcccgaucacu

SEQ ID NO: 3910755 - RNA, 13 nt, Human adenovirus C
cucgaccacugcc

SEQ ID NO: 3910756 - RNA, 15 nt, Human adenovirus C
cucgagaucaggcua

SEQ ID NO: 3910757 - RNA, 16 nt, Human adenovirus C
cucgagaucaggcuac

SEQ ID NO: 3910758 - RNA, 19 nt, Human adenovirus C
cucgcauuccacgagccag

SEQ ID NO: 3910759 - RNA, 20 nt, Human adenovirus C
cucgcauuccacgagccagg

SEQ ID NO: 3910760 - RNA, 19 nt, Human adenovirus C
cucgccugcgccauaguca

SEQ ID NO: 3910761 - RNA, 15 nt, Human adenovirus C
cucgcgccuguugcu

SEQ ID NO: 3910762 - RNA, 17 nt, Human adenovirus C
cucgcguccaggccagc

SEQ ID NO: 3910763 - RNA, 12 nt, Human adenovirus C
cucgcuguggag

SEQ ID NO: 3910764 - RNA, 21 nt, Human adenovirus C
cucgcuuacuaaggacaaaca

SEQ ID NO: 3910765 - RNA, 17 nt, Human adenovirus C
cucggaccacucugaga

SEQ ID NO: 3910766 - RNA, 19 nt, Human adenovirus C
cucggaguaccugagcccc

SEQ ID NO: 3910767 - RNA, 12 nt, Human adenovirus C
cucgucacaucc

SEQ ID NO: 3910768 - RNA, 17 nt, Human adenovirus C
cucguccagacgggcca

SEQ ID NO: 3910769 - RNA, 20 nt, Human adenovirus C
cucguccagacgggccaggg

SEQ ID NO: 3910770 - RNA, 16 nt, Human adenovirus C
cucgucgggcaccagg

SEQ ID NO: 3910771 - RNA, 16 nt, Human adenovirus C
cucguggcgcgggcac

SEQ ID NO: 3910772 - RNA, 15 nt, Human adenovirus C
cucuagcgaugaaga

SEQ ID NO: 3910773 - RNA, 23 nt, Human adenovirus C
cucuaugugggauaugcuccagg

SEQ ID NO: 3910774 - RNA, 16 nt, Human adenovirus C
cucucuucagcaaaua

SEQ ID NO: 3910775 - RNA, 19 nt, Human adenovirus C
cucuggggauggcgggcgc

SEQ ID NO: 3910776 - RNA, 22 nt, Human adenovirus C
cucuuauaaaaugcaccacaga

SEQ ID NO: 3910777 - RNA, 19 nt, Human adenovirus C
cucuuccuuuuccucuugc

SEQ ID NO: 3910778 - RNA, 22 nt, Human adenovirus C
cugaaagagguaguugagggug

SEQ ID NO: 3910779 - RNA, 18 nt, Human adenovirus C
cugaacauaaucgugcag

SEQ ID NO: 3910780 - RNA, 14 nt, Human adenovirus C
cugaagcagggcca

SEQ ID NO: 3910781 - RNA, 23 nt, Human adenovirus C
cugacccggagaugcagcgcaag

SEQ ID NO: 3910782 - RNA, 17 nt, Human adenovirus C
cugaccugcgcugggcc

SEQ ID NO: 3910783 - RNA, 19 nt, Human adenovirus C
cugacgcguuccggcagca

SEQ ID NO: 3910784 - RNA, 16 nt, Human adenovirus C
cugagacgaaggcucg

SEQ ID NO: 3910785 - RNA, 15 nt, Human adenovirus C
cugagacgcauuuua

SEQ ID NO: 3910786 - RNA, 16 nt, Human adenovirus C
cugagcaggggggcca

SEQ ID NO: 3910787 - RNA, 13 nt, Human adenovirus C
cugagccccgggc

SEQ ID NO: 3910788 - RNA, 22 nt, Human adenovirus C
cugagcccguguucugacaggg

SEQ ID NO: 3910789 - RNA, 22 nt, Human adenovirus C
cugaggacuaccacgcccacga

SEQ ID NO: 3910790 - RNA, 16 nt, Human adenovirus C
cugaggcuacagagga

SEQ ID NO: 3910791 - RNA, 17 nt, Human adenovirus C
cugaggcuacagaggag

SEQ ID NO: 3910792 - RNA, 22 nt, Human adenovirus C
cugaguauaauaaauacagaaa

SEQ ID NO: 3910793 - RNA, 15 nt, Human adenovirus C
cugaucuucucagaa

SEQ ID NO: 3910794 - RNA, 14 nt, Human adenovirus C
cugauugccagggg

SEQ ID NO: 3910795 - RNA, 16 nt, Human adenovirus C
cugauugccaggggca

SEQ ID NO: 3910796 - RNA, 21 nt, Human adenovirus C
cugauuggccggacaggccgc

SEQ ID NO: 3910797 - RNA, 18 nt, Human adenovirus C
cugcaaagggcccuggcu

SEQ ID NO: 3910798 - RNA, 14 nt, Human adenovirus C
cugcaacaagaaaa

SEQ ID NO: 3910799 - RNA, 12 nt, Human adenovirus C
cugcaacccgcg

SEQ ID NO: 3910800 - RNA, 16 nt, Human adenovirus C
cugcaagaugaggguu

SEQ ID NO: 3910801 - RNA, 22 nt, Human adenovirus C
cugcaagaugaggguuggaagc

SEQ ID NO: 3910802 - RNA, 20 nt, Human adenovirus C
cugcacgcaaccgcgcccag

SEQ ID NO: 3910803 - RNA, 16 nt, Human adenovirus C
cugcagaauuaaggag

SEQ ID NO: 3910804 - RNA, 23 nt, Human adenovirus C
cugcagaccguaaaccugagcca

SEQ ID NO: 3910805 - RNA, 14 nt, Human adenovirus C
cugcagccagggga

SEQ ID NO: 3910806 - RNA, 20 nt, Human adenovirus C
cugcagggaagaccucgcac

SEQ ID NO: 3910807 - RNA, 14 nt, Human adenovirus C
cugccacagagggc

SEQ ID NO: 3910808 - RNA, 18 nt, Human adenovirus C
cugccaccucccucccaa

SEQ ID NO: 3910809 - RNA, 20 nt, Human adenovirus C
cugccaugcgcgggcggcaa

SEQ ID NO: 3910810 - RNA, 18 nt, Human adenovirus C
cugcccacgcuugcaccg

SEQ ID NO: 3910811 - RNA, 13 nt, Human adenovirus C
cugcccgccaccu

SEQ ID NO: 3910812 - RNA, 17 nt, Human adenovirus C
cugcccgccaccugcug

SEQ ID NO: 3910813 - RNA, 21 nt, Human adenovirus C
cugcccguuuucgcucgucac

SEQ ID NO: 3910814 - RNA, 13 nt, Human adenovirus C
cugccgccgccac

SEQ ID NO: 3910815 - RNA, 20 nt, Human adenovirus C
cugccgccgccgccacccac

SEQ ID NO: 3910816 - RNA, 20 nt, Human adenovirus C
cugccggucuucgcccugcg

SEQ ID NO: 3910817 - RNA, 15 nt, Human adenovirus C
cugcgacgcguugca

SEQ ID NO: 3910818 - RNA, 17 nt, Human adenovirus C
cugcgagagcucggugu

SEQ ID NO: 3910819 - RNA, 13 nt, Human adenovirus C
cugcgaggacagg

SEQ ID NO: 3910820 - RNA, 22 nt, Human adenovirus C
cugcgaggacagggccucucag

SEQ ID NO: 3910821 - RNA, 12 nt, Human adenovirus C
cugcgagggcca

SEQ ID NO: 3910822 - RNA, 15 nt, Human adenovirus C
cugcgcgaggaggac

SEQ ID NO: 3910823 - RNA, 16 nt, Human adenovirus C
cugcgcucccucaccc

SEQ ID NO: 3910824 - RNA, 18 nt, Human adenovirus C
cugcggcuaauggugacu

SEQ ID NO: 3910825 - RNA, 16 nt, Human adenovirus C
cugcggcucggagcag

SEQ ID NO: 3910826 - RNA, 21 nt, Human adenovirus C
cugcgucauuacccagggcca

SEQ ID NO: 3910827 - RNA, 21 nt, Human adenovirus C
cugcgugaagacgacgggccc

SEQ ID NO: 3910828 - RNA, 21 nt, Human adenovirus C
cugcugccaugcgcgggcggc

SEQ ID NO: 3910829 - RNA, 19 nt, Human adenovirus C
cugcuuaaaagccaccuga

SEQ ID NO: 3910830 - RNA, 21 nt, Human adenovirus C
cugcuuaaaagccaccugagc

SEQ ID NO: 3910831 - RNA, 15 nt, Human adenovirus C
cugcuugagcaggcc

SEQ ID NO: 3910832 - RNA, 20 nt, Human adenovirus C
cuggaacagagcucuaacag

SEQ ID NO: 3910833 - RNA, 16 nt, Human adenovirus C
cuggaacagcagcaca

SEQ ID NO: 3910834 - RNA, 17 nt, Human adenovirus C
cuggaacagcagcacag

SEQ ID NO: 3910835 - RNA, 17 nt, Human adenovirus C
cuggaagccaugcucag

SEQ ID NO: 3910836 - RNA, 23 nt, Human adenovirus C
cuggaaugccauagaugccauga

SEQ ID NO: 3910837 - RNA, 20 nt, Human adenovirus C
cuggaccggcugguggggga

SEQ ID NO: 3910838 - RNA, 17 nt, Human adenovirus C
cuggagcucccgcggcg

SEQ ID NO: 3910839 - RNA, 17 nt, Human adenovirus C
cuggaggcagcuggggc

SEQ ID NO: 3910840 - RNA, 21 nt, Human adenovirus C
cuggaugugaccgaggagcug

SEQ ID NO: 3910841 - RNA, 18 nt, Human adenovirus C
cuggauuuucuggccaug

SEQ ID NO: 3910842 - RNA, 13 nt, Human adenovirus C
cuggcagggacac

SEQ ID NO: 3910843 - RNA, 12 nt, Human adenovirus C
cuggcagugaca

SEQ ID NO: 3910844 - RNA, 18 nt, Human adenovirus C
cuggccccgcgacacggc

SEQ ID NO: 3910845 - RNA, 22 nt, Human adenovirus C
cuggccgcggguauugucacug

SEQ ID NO: 3910846 - RNA, 15 nt, Human adenovirus C
cuggccgcucuucau

SEQ ID NO: 3910847 - RNA, 23 nt, Human adenovirus C
cuggccugcacccgcgcugaguu

SEQ ID NO: 3910848 - RNA, 22 nt, Human adenovirus C
cuggcgaacgcgacgacgcggc

SEQ ID NO: 3910849 - RNA, 20 nt, Human adenovirus C
cuggcggacauuaucuuccc

SEQ ID NO: 3910850 - RNA, 13 nt, Human adenovirus C
cuggcggcggugg

SEQ ID NO: 3910851 - RNA, 20 nt, Human adenovirus C
cuggcuaccgcccccugguu

SEQ ID NO: 3910852 - RNA, 16 nt, Human adenovirus C
cuggcugcagccaggg

SEQ ID NO: 3910853 - RNA, 12 nt, Human adenovirus C
cugggacagccu

SEQ ID NO: 3910854 - RNA, 17 nt, Human adenovirus C
cugggacagucaggcag

SEQ ID NO: 3910855 - RNA, 16 nt, Human adenovirus C
cugggggcaacaucca

SEQ ID NO: 3910856 - RNA, 14 nt, Human adenovirus C
cugggggcguacac

SEQ ID NO: 3910857 - RNA, 23 nt, Human adenovirus C
cuggggugaugcaguagaaggua

SEQ ID NO: 3910858 - RNA, 13 nt, Human adenovirus C
cuggguucccccu

SEQ ID NO: 3910859 - RNA, 21 nt, Human adenovirus C
cugguaggcgcagcaucccuu

SEQ ID NO: 3910860 - RNA, 17 nt, Human adenovirus C
cuggugcaguuugcccg

SEQ ID NO: 3910861 - RNA, 14 nt, Human adenovirus C
cuggugcugccaac

SEQ ID NO: 3910862 - RNA, 15 nt, Human adenovirus C
cugguuuccaugagc

SEQ ID NO: 3910863 - RNA, 19 nt, Human adenovirus C
cuguccacgaucaccucug

SEQ ID NO: 3910864 - RNA, 18 nt, Human adenovirus C
cugucccuuuuuuuucca

SEQ ID NO: 3910865 - RNA, 21 nt, Human adenovirus C
cugucccuuuuuuuuccacag

SEQ ID NO: 3910866 - RNA, 22 nt, Human adenovirus C
cugucgccauccugugaacgcc

SEQ ID NO: 3910867 - RNA, 19 nt, Human adenovirus C
cugugccuuuuacugcugc

SEQ ID NO: 3910868 - RNA, 16 nt, Human adenovirus C
cugugcugccagggcc

SEQ ID NO: 3910869 - RNA, 19 nt, Human adenovirus C
cuguggugagcuguuugau

SEQ ID NO: 3910870 - RNA, 21 nt, Human adenovirus C
cuguuuauucuuauacuagca

SEQ ID NO: 3910871 - RNA, 18 nt, Human adenovirus C
ccagcgcacuacugcccg

SEQ ID NO: 3910872 - RNA, 10 nt, Human adenovirus C
ccagcggcgg

SEQ ID NO: 3910873 - RNA, 15 nt, Human adenovirus C
ccagcucggcgguga

SEQ ID NO: 3910874 - RNA, 14 nt, Human adenovirus C
ccagcugcuacaac

SEQ ID NO: 3910875 - RNA, 16 nt, Human adenovirus C
ccagcuguugggguga

SEQ ID NO: 3910876 - RNA, 13 nt, Human adenovirus C
ccagcuuauucag

SEQ ID NO: 3910877 - RNA, 23 nt, Human adenovirus C
ccaggaaguacggcaccgccagc

SEQ ID NO: 3910878 - RNA, 18 nt, Human adenovirus C
ccaggacgacgcagaggc

SEQ ID NO: 3910879 - RNA, 12 nt, Human adenovirus C
ccaggccagcac

SEQ ID NO: 3910880 - RNA, 18 nt, Human adenovirus C
ccaggcgacgagcggccg

SEQ ID NO: 3910881 - RNA, 13 nt, Human adenovirus C
ccaggcgcggcgg

SEQ ID NO: 3910882 - RNA, 23 nt, Human adenovirus C
ccaggcgcggcggcugcugcgcu

SEQ ID NO: 3910883 - RNA, 19 nt, Human adenovirus C
ccaggcuccuuugucugga

SEQ ID NO: 3910884 - RNA, 22 nt, Human adenovirus C
ccaggcuuugaguugcacucgc

SEQ ID NO: 3910885 - RNA, 22 nt, Human adenovirus C
ccagggugcgcuugaggcuggu

SEQ ID NO: 3910886 - RNA, 13 nt, Human adenovirus C
ccagguacagccc

SEQ ID NO: 3910887 - RNA, 19 nt, Human adenovirus C
ccagguacagcccacccug

SEQ ID NO: 3910888 - RNA, 19 nt, Human adenovirus C
ccagguccuccgcguugcu

SEQ ID NO: 3910889 - RNA, 14 nt, Human adenovirus C
ccaggugcagaccc

SEQ ID NO: 3910890 - RNA, 16 nt, Human adenovirus C
ccaguagacaaggccu

SEQ ID NO: 3910891 - RNA, 15 nt, Human adenovirus C
ccaguggcaacuggc

SEQ ID NO: 3910892 - RNA, 22 nt, Human adenovirus C
ccauaagggccuccccuucuuc

SEQ ID NO: 3910893 - RNA, 13 nt, Human adenovirus C
ccauagagcagcu

SEQ ID NO: 3910894 - RNA, 14 nt, Human adenovirus C
ccauccgcggcagc

SEQ ID NO: 3910895 - RNA, 21 nt, Human adenovirus C
ccauccuuauaucgcccagca

SEQ ID NO: 3910896 - RNA, 17 nt, Human adenovirus C
ccaucgcgcaacugggc

SEQ ID NO: 3910897 - RNA, 19 nt, Human adenovirus C
ccaucgcgcaacugggcag

SEQ ID NO: 3910898 - RNA, 14 nt, Human adenovirus C
ccaugcgcgaggga

SEQ ID NO: 3910899 - RNA, 19 nt, Human adenovirus C
ccauggcccacaacacggc

SEQ ID NO: 3910900 - RNA, 17 nt, Human adenovirus C
ccauuaaaaaccuccuc

SEQ ID NO: 3910901 - RNA, 19 nt, Human adenovirus C
ccauuaaguaccgugaaug

SEQ ID NO: 3910902 - RNA, 21 nt, Human adenovirus C
ccauuccugaaucagcguaaa

SEQ ID NO: 3910903 - RNA, 19 nt, Human adenovirus C
ccauucuccaguaacuuua

SEQ ID NO: 3910904 - RNA, 17 nt, Human adenovirus C
ccauuucaaucacgugc

SEQ ID NO: 3910905 - RNA, 21 nt, Human adenovirus C
ccauuuguagcgccacaucuu

SEQ ID NO: 3910906 - RNA, 16 nt, Human adenovirus C
cccaaaaagaagcugc

SEQ ID NO: 3910907 - RNA, 22 nt, Human adenovirus C
cccaaccguagaugggacacca

SEQ ID NO: 3910908 - RNA, 20 nt, Human adenovirus C
cccaacucggccgccugugg

SEQ ID NO: 3910909 - RNA, 23 nt, Human adenovirus C
cccaccauuuguagcgccacauc

SEQ ID NO: 3910910 - RNA, 24 nt, Human adenovirus C
cccacgauguaaaguuccaagaag

SEQ ID NO: 3910911 - RNA, 14 nt, Human adenovirus C
cccacucuguaugc

SEQ ID NO: 3910912 - RNA, 21 nt, Human adenovirus C
cccagcaauaacacaggcugg

SEQ ID NO: 3910913 - RNA, 17 nt, Human adenovirus C
cccagcgauagcaguuc

SEQ ID NO: 3910914 - RNA, 16 nt, Human adenovirus C
ccggcggcagcggcag

SEQ ID NO: 3910915 - RNA, 19 nt, Human adenovirus C
ccggcucgcuccacggugg

SEQ ID NO: 3910916 - RNA, 16 nt, Human adenovirus C
ccgggacugggcgugc

SEQ ID NO: 3910917 - RNA, 23 nt, Human adenovirus C
ccgggacugggcgugcagaccgu

SEQ ID NO: 3910918 - RNA, 16 nt, Human adenovirus C
ccgggagagggggcag

SEQ ID NO: 3910919 - RNA, 12 nt, Human adenovirus C
ccgggcagcagg

SEQ ID NO: 3910920 - RNA, 21 nt, Human adenovirus C
ccggggcgcgcugcggcugcu

SEQ ID NO: 3910921 - RNA, 21 nt, Human adenovirus C
ccgggucagggcgcgggcuag

SEQ ID NO: 3910922 - RNA, 15 nt, Human adenovirus C
ccggugcugcggcag

SEQ ID NO: 3910923 - RNA, 18 nt, Human adenovirus C
ccgugacacugcagcagg

SEQ ID NO: 3910924 - RNA, 20 nt, Human adenovirus C
ccgugcugaaacgcagcauc

SEQ ID NO: 3910925 - RNA, 16 nt, Human adenovirus C
ccguggcgggcggcag

SEQ ID NO: 3910926 - RNA, 19 nt, Human adenovirus C
ccguguaccugcgcacgcc

SEQ ID NO: 3910927 - RNA, 20 nt, Human adenovirus C
ccgugugcaccagccgcacc

SEQ ID NO: 3910928 - RNA, 22 nt, Human adenovirus C
ccgugugcaccagccgcaccgc

SEQ ID NO: 3910929 - RNA, 12 nt, Human adenovirus C
ccguucccagca

SEQ ID NO: 3910930 - RNA, 21 nt, Human adenovirus C
ccguucgcacuggggcggcga

SEQ ID NO: 3910931 - RNA, 14 nt, Human adenovirus C
ccguugaacaaaac

SEQ ID NO: 3910932 - RNA, 19 nt, Human adenovirus C
ccguugauguuguggccca

SEQ ID NO: 3910933 - RNA, 13 nt, Human adenovirus C
ccuaacccuggau

SEQ ID NO: 3910934 - RNA, 13 nt, Human adenovirus C
ccuacaccagugu

SEQ ID NO: 3910935 - RNA, 16 nt, Human adenovirus C
ccuaccggggggagaa

SEQ ID NO: 3910936 - RNA, 16 nt, Human adenovirus C
ccuagccgcgcguccc

SEQ ID NO: 3910937 - RNA, 12 nt, Human adenovirus C
ccuaucagcagc

SEQ ID NO: 3910938 - RNA, 15 nt, Human adenovirus C
ccuauccugccgugc

SEQ ID NO: 3910939 - RNA, 15 nt, Human adenovirus C
ccucacucucuuccg

SEQ ID NO: 3910940 - RNA, 20 nt, Human adenovirus C
ccucagcgaugauucgcacc

SEQ ID NO: 3910941 - RNA, 13 nt, Human adenovirus C
ccucagcgccucc

SEQ ID NO: 3910942 - RNA, 21 nt, Human adenovirus C
ccucagcgccucccaaaagac

SEQ ID NO: 3910943 - RNA, 19 nt, Human adenovirus C
ccucaggcgccgccggcac

SEQ ID NO: 3910944 - RNA, 15 nt, Human adenovirus C
ccucaggggagcuga

SEQ ID NO: 3910945 - RNA, 16 nt, Human adenovirus C
ccucaucggcugaagc

SEQ ID NO: 3910946 - RNA, 15 nt, Human adenovirus C
ccucccuugccgugc

SEQ ID NO: 3910947 - RNA, 12 nt, Human adenovirus C
ccuccgcaccca

SEQ ID NO: 3910948 - RNA, 19 nt, Human adenovirus C
cugccaaaaagguugaguu

SEQ ID NO: 3910949 - RNA, 12 nt, Human adenovirus C
augaacugcucg

SEQ ID NO: 3910950 - RNA, 16 nt, Human adenovirus C
augaagaucuggaagg

SEQ ID NO: 3910951 - RNA, 17 nt, Human adenovirus C
augaauggaacuucagg

SEQ ID NO: 3910952 - RNA, 17 nt, Human adenovirus C
augacaaacuuacccug

SEQ ID NO: 3910953 - RNA, 21 nt, Human adenovirus C
augacaacaucgcgcagaugg

SEQ ID NO: 3910954 - RNA, 22 nt, Human adenovirus C
augacaccgaacagggcgggga

SEQ ID NO: 3910955 - RNA, 15 nt, Human adenovirus C
augaccaccugcgcg

SEQ ID NO: 3910956 - RNA, 14 nt, Human adenovirus C
augaccaugaagau

SEQ ID NO: 3910957 - RNA, 22 nt, Human adenovirus C
augacugcaaauuuacuuuggu

SEQ ID NO: 3910958 - RNA, 12 nt, Human adenovirus C
augagacaugau

SEQ ID NO: 3910959 - RNA, 14 nt, Human adenovirus C
augagcagcuggcg

SEQ ID NO: 3910960 - RNA, 21 nt, Human adenovirus C
augagcagcuggcgcgcuggc

SEQ ID NO: 3910961 - RNA, 16 nt, Human adenovirus C
augauggccgcagugc

SEQ ID NO: 3910962 - RNA, 20 nt, Human adenovirus C
augcacaucucgggccagga

SEQ ID NO: 3910963 - RNA, 13 nt, Human adenovirus C
augcaucaaacaa

SEQ ID NO: 3910964 - RNA, 19 nt, Human adenovirus C
augcaucuaaaagcgguga

SEQ ID NO: 3910965 - RNA, 20 nt, Human adenovirus C
augccaggccuacaaauccu

SEQ ID NO: 3910966 - RNA, 16 nt, Human adenovirus C
augcgccagaaggcgc

SEQ ID NO: 3910967 - RNA, 17 nt, Human adenovirus C
augcgcgggcggcaagc

SEQ ID NO: 3910968 - RNA, 14 nt, Human adenovirus C
augcggcaggaggg

SEQ ID NO: 3910969 - RNA, 20 nt, Human adenovirus C
augcgggccaugagcugcga

SEQ ID NO: 3910970 - RNA, 18 nt, Human adenovirus C
augcuaaaaugaagagac

SEQ ID NO: 3910971 - RNA, 16 nt, Human adenovirus C
augcucagucugggca

SEQ ID NO: 3910972 - RNA, 15 nt, Human adenovirus C
augcuccccuggacc

SEQ ID NO: 3910973 - RNA, 22 nt, Human adenovirus C
augcuuuugagcguuugaccaa

SEQ ID NO: 3910974 - RNA, 16 nt, Human adenovirus C
auggaagacugggaca

SEQ ID NO: 3910975 - RNA, 18 nt, Human adenovirus C
auggcagcaaggccugga

SEQ ID NO: 3910976 - RNA, 17 nt, Human adenovirus C
auggccugaaccgcgag

SEQ ID NO: 3910977 - RNA, 13 nt, Human adenovirus C
auggcgcagcugu

SEQ ID NO: 3910978 - RNA, 22 nt, Human adenovirus C
auguagcaugauaaauaugugg

SEQ ID NO: 3910979 - RNA, 19 nt, Human adenovirus C
auguccaaggugaaccuga

SEQ ID NO: 3910980 - RNA, 21 nt, Human adenovirus C
augucguaaacguagaggggc

SEQ ID NO: 3910981 - RNA, 22 nt, Human adenovirus C
augugaccgaggagcugaggcc

SEQ ID NO: 3910982 - RNA, 13 nt, Human adenovirus C
augugcccggccc

SEQ ID NO: 3910983 - RNA, 17 nt, Human adenovirus C
augugggauaugcucca

SEQ ID NO: 3910984 - RNA, 23 nt, Human adenovirus C
auuaaacauggcgccauccacca

SEQ ID NO: 3910985 - RNA, 22 nt, Human adenovirus C
auuaagaaaugccuguuugaaa

SEQ ID NO: 3910986 - RNA, 13 nt, Human adenovirus C
auuaccauguaca

SEQ ID NO: 3910987 - RNA, 23 nt, Human adenovirus C
auuagcggggugguggaccuggc

SEQ ID NO: 3910988 - RNA, 23 nt, Human adenovirus C
auuaugagcaaggaaauucccac

SEQ ID NO: 3910989 - RNA, 14 nt, Human adenovirus C
auugacgcgguggu

SEQ ID NO: 3910990 - RNA, 13 nt, Human adenovirus C
auugaggaguucg

SEQ ID NO: 3910991 - RNA, 18 nt, Human adenovirus C
auugcgcuguaccugcca

SEQ ID NO: 3910992 - RNA, 18 nt, Human adenovirus C
auuggacggucugaaacc

SEQ ID NO: 3910993 - RNA, 13 nt, Human adenovirus C
auuuauguaaaua

SEQ ID NO: 3910994 - RNA, 18 nt, Human adenovirus C
auuuccaacguggagcuc

SEQ ID NO: 3910995 - RNA, 23 nt, Human adenovirus C
auuucugccagcgccugcacugc

SEQ ID NO: 3910996 - RNA, 18 nt, Human adenovirus C
auuuggguaacaggaggg

SEQ ID NO: 3910997 - RNA, 23 nt, Human adenovirus C
auuuguagcgccacaucuucucu

SEQ ID NO: 3910998 - RNA, 18 nt, Human adenovirus C
auuugucacccuuauccu

SEQ ID NO: 3910999 - RNA, 18 nt, Human adenovirus C
auuuuaaaaaaacuacaa

SEQ ID NO: 3911000 - RNA, 23 nt, Human adenovirus C
caaaaccuucucuacgccaacuc

SEQ ID NO: 3911001 - RNA, 22 nt, Human adenovirus C
caaaagugguuuuguacaguga

SEQ ID NO: 3911002 - RNA, 18 nt, Human adenovirus C
caaaauuuccaacgugga

SEQ ID NO: 3911003 - RNA, 17 nt, Human adenovirus C
caaacaauacuaaaaaa

SEQ ID NO: 3911004 - RNA, 14 nt, Human adenovirus C
caaacacaucugag

SEQ ID NO: 3911005 - RNA, 20 nt, Human adenovirus C
caaaccgaagauagcggccg

SEQ ID NO: 3911006 - RNA, 20 nt, Human adenovirus C
caaacgacccguagagggcg

SEQ ID NO: 3911007 - RNA, 14 nt, Human adenovirus C
caaacgaggaacaa

SEQ ID NO: 3911008 - RNA, 22 nt, Human adenovirus C
caaacucuucgcggucuuucca

SEQ ID NO: 3911009 - RNA, 15 nt, Human adenovirus C
caaacuuucuccaaa

SEQ ID NO: 3911010 - RNA, 20 nt, Human adenovirus C
caaagcaaaccucaccuccg

SEQ ID NO: 3911011 - RNA, 14 nt, Human adenovirus C
caaagcaggggcca

SEQ ID NO: 3911012 - RNA, 17 nt, Human adenovirus C
caaagcaggggccaaga

SEQ ID NO: 3911013 - RNA, 13 nt, Human adenovirus C
caaauauggaaca

SEQ ID NO: 3911014 - RNA, 14 nt, Human adenovirus C
caacaccuagccua

SEQ ID NO: 3911015 - RNA, 15 nt, Human adenovirus C
caacacggccuccac

SEQ ID NO: 3911016 - RNA, 19 nt, Human adenovirus C
caacacggccuccacgcug

SEQ ID NO: 3911017 - RNA, 13 nt, Human adenovirus C
caacacguaauga

SEQ ID NO: 3911018 - RNA, 22 nt, Human adenovirus C
caacagcaggaggaagccaggc

SEQ ID NO: 3911019 - RNA, 22 nt, Human adenovirus C
caacccaauccccccgccgccg

SEQ ID NO: 3911020 - RNA, 16 nt, Human adenovirus C
caaccccaccaaugug

SEQ ID NO: 3911021 - RNA, 16 nt, Human adenovirus C
caacccuuccaggagg

SEQ ID NO: 3911022 - RNA, 16 nt, Human adenovirus C
caaccuauggagaaau

SEQ ID NO: 3911023 - RNA, 18 nt, Human adenovirus C
caacgugcccaucuccau

SEQ ID NO: 3911024 - RNA, 14 nt, Human adenovirus C
caagaaaaacacca

SEQ ID NO: 3911025 - RNA, 18 nt, Human adenovirus C
caagaaaaacaccaccac

SEQ ID NO: 3911026 - RNA, 17 nt, Human adenovirus C
caagaacuugcaggggc

SEQ ID NO: 3911027 - RNA, 16 nt, Human adenovirus C
caagaaguugaagaca

SEQ ID NO: 3911028 - RNA, 19 nt, Human adenovirus C
caagacagaaacacagagc

SEQ ID NO: 3911029 - RNA, 13 nt, Human adenovirus C
caagacuacucaa

SEQ ID NO: 3911030 - RNA, 12 nt, Human adenovirus C
caagacuguggg

SEQ ID NO: 3911031 - RNA, 15 nt, Human adenovirus C
caagcaggccaaacu

SEQ ID NO: 3911032 - RNA, 21 nt, Human adenovirus C
caagccccacugaccgugcaa

SEQ ID NO: 3911033 - RNA, 12 nt, Human adenovirus C
caagcgcaaaau

SEQ ID NO: 3911034 - RNA, 19 nt, Human adenovirus C
caagcuacccacccagcgc

SEQ ID NO: 3911035 - RNA, 16 nt, Human adenovirus C
caagcuugguggcaaa

SEQ ID NO: 3911036 - RNA, 17 nt, Human adenovirus C
caaggccggaaaccuca

SEQ ID NO: 3911037 - RNA, 23 nt, Human adenovirus C
caaggccggaaaccucaccuccc

SEQ ID NO: 3911038 - RNA, 20 nt, Human adenovirus C
caagggcgaggcgcgccgcg

SEQ ID NO: 3911039 - RNA, 18 nt, Human adenovirus C
caaggguaucauggcgga

SEQ ID NO: 3911040 - RNA, 18 nt, Human adenovirus C
caagggugcagcugaagc

SEQ ID NO: 3911041 - RNA, 18 nt, Human adenovirus C
caaggucaacgcuggugg

SEQ ID NO: 3911042 - RNA, 20 nt, Human adenovirus C
caagucuagcgccugcugcc

SEQ ID NO: 3911043 - RNA, 18 nt, Human adenovirus C
caaguugaaagagcaaaa

SEQ ID NO: 3911044 - RNA, 23 nt, Human adenovirus C
caaguuguggcccccacaaaagu

SEQ ID NO: 3911045 - RNA, 18 nt, Human adenovirus C
cacaacacggccuccacg

SEQ ID NO: 3911046 - RNA, 19 nt, Human adenovirus C
cacaagaaucgccugcuac

SEQ ID NO: 3911047 - RNA, 13 nt, Human adenovirus C
cacaagcucgccu

SEQ ID NO: 3911048 - RNA, 16 nt, Human adenovirus C
cacacacgggaggagc

SEQ ID NO: 3911049 - RNA, 15 nt, Human adenovirus C
cacagccgccugagc

SEQ ID NO: 3911050 - RNA, 16 nt, Human adenovirus C
cacagcggcggcagca

SEQ ID NO: 3911051 - RNA, 18 nt, Human adenovirus C
cacagggaugugcccggc

SEQ ID NO: 3911052 - RNA, 16 nt, Human adenovirus C
cacaggguugcagcac

SEQ ID NO: 3911053 - RNA, 23 nt, Human adenovirus C
cacaguccuuucuccccggcugg

SEQ ID NO: 3911054 - RNA, 20 nt, Human adenovirus C
cacaguuuaaacagcgagga

SEQ ID NO: 3911055 - RNA, 15 nt, Human adenovirus C
cacaucucgggccag

SEQ ID NO: 3911056 - RNA, 21 nt, Human adenovirus C
cacaugucuaugcccaggcuc

SEQ ID NO: 3911057 - RNA, 19 nt, Human adenovirus C
caccaacgugcccaucucc

SEQ ID NO: 3911058 - RNA, 13 nt, Human adenovirus C
caccaccacccuc

SEQ ID NO: 3911059 - RNA, 15 nt, Human adenovirus C
caccacccuccucac

SEQ ID NO: 3911060 - RNA, 12 nt, Human adenovirus C
caccacugcaga

SEQ ID NO: 3911061 - RNA, 15 nt, Human adenovirus C
caccaggugcagacc

SEQ ID NO: 3911062 - RNA, 21 nt, Human adenovirus C
caccaugcgcgagggacaggc

SEQ ID NO: 3911063 - RNA, 15 nt, Human adenovirus C
cacccggcgccagca

SEQ ID NO: 3911064 - RNA, 16 nt, Human adenovirus C
caccgcggaugcuggc

SEQ ID NO: 3911065 - RNA, 23 nt, Human adenovirus C
caccggccgacgggcggccaugc

SEQ ID NO: 3911066 - RNA, 15 nt, Human adenovirus C
caccgggacugggcg

SEQ ID NO: 3911067 - RNA, 14 nt, Human adenovirus C
agggugacaagguc

SEQ ID NO: 3911068 - RNA, 20 nt, Human adenovirus C
aggguggcucgcgaaggagg

SEQ ID NO: 3911069 - RNA, 13 nt, Human adenovirus C
aggguucggggcu

SEQ ID NO: 3911070 - RNA, 16 nt, Human adenovirus C
agguacgaugagaccc

SEQ ID NO: 3911071 - RNA, 13 nt, Human adenovirus C
agguacugaaaug

SEQ ID NO: 3911072 - RNA, 21 nt, Human adenovirus C
agguaggcgaucccuacugua

SEQ ID NO: 3911073 - RNA, 16 nt, Human adenovirus C
aggucugcacggacca

SEQ ID NO: 3911074 - RNA, 14 nt, Human adenovirus C
aggugcccgagggu

SEQ ID NO: 3911075 - RNA, 22 nt, Human adenovirus C
agguggcaccgggacugggcgu

SEQ ID NO: 3911076 - RNA, 18 nt, Human adenovirus C
agguggucgcgaaagguc

SEQ ID NO: 3911077 - RNA, 14 nt, Human adenovirus C
agguuaccucugca

SEQ ID NO: 3911078 - RNA, 14 nt, Human adenovirus C
agguuccugagcag

SEQ ID NO: 3911079 - RNA, 17 nt, Human adenovirus C
agguuccugagcagcug

SEQ ID NO: 3911080 - RNA, 19 nt, Human adenovirus C
agguuccugagcagcugcg

SEQ ID NO: 3911081 - RNA, 17 nt, Human adenovirus C
aguacaagauuagcaaa

SEQ ID NO: 3911082 - RNA, 15 nt, Human adenovirus C
aguaccaacagagga

SEQ ID NO: 3911083 - RNA, 15 nt, Human adenovirus C
aguaccucuugguuu

SEQ ID NO: 3911084 - RNA, 13 nt, Human adenovirus C
aguaccugagccc

SEQ ID NO: 3911085 - RNA, 16 nt, Human adenovirus C
aguagcacaaaacucc

SEQ ID NO: 3911086 - RNA, 16 nt, Human adenovirus C
agucacuggucuuguc

SEQ ID NO: 3911087 - RNA, 14 nt, Human adenovirus C
agucauccaugucc

SEQ ID NO: 3911088 - RNA, 14 nt, Human adenovirus C
aguccgggccagac

SEQ ID NO: 3911089 - RNA, 17 nt, Human adenovirus C
agucugcagcgcugcca

SEQ ID NO: 3911090 - RNA, 18 nt, Human adenovirus C
agucugcagcgcugccaa

SEQ ID NO: 3911091 - RNA, 20 nt, Human adenovirus C
agugcagcacagcagggaca

SEQ ID NO: 3911092 - RNA, 22 nt, Human adenovirus C
agugcccgcugucauaccacug

SEQ ID NO: 3911093 - RNA, 14 nt, Human adenovirus C
agugcugggccagc

SEQ ID NO: 3911094 - RNA, 15 nt, Human adenovirus C
agugcugggccagca

SEQ ID NO: 3911095 - RNA, 16 nt, Human adenovirus C
agugcuuaaaaaaaca

SEQ ID NO: 3911096 - RNA, 23 nt, Human adenovirus C
aguggaaaauacaccacugaaac

SEQ ID NO: 3911097 - RNA, 16 nt, Human adenovirus C
aguggucuuacaugca

SEQ ID NO: 3911098 - RNA, 15 nt, Human adenovirus C
aguguccacagugga

SEQ ID NO: 3911099 - RNA, 20 nt, Human adenovirus C
aguucgugccuucgguuuac

SEQ ID NO: 3911100 - RNA, 17 nt, Human adenovirus C
aguugagggugguggcg

SEQ ID NO: 3911101 - RNA, 14 nt, Human adenovirus C
aguugcauguggaa

SEQ ID NO: 3911102 - RNA, 22 nt, Human adenovirus C
aguugcuugcuugcaagacugu

SEQ ID NO: 3911103 - RNA, 17 nt, Human adenovirus C
aguuggaagacgccgcc

SEQ ID NO: 3911104 - RNA, 19 nt, Human adenovirus C
aguuggcccgcugcccugg

SEQ ID NO: 3911105 - RNA, 15 nt, Human adenovirus C
aguuucgcaggcgcu

SEQ ID NO: 3911106 - RNA, 21 nt, Human adenovirus C
aguuucgcgcccuuucucaaa

SEQ ID NO: 3911107 - RNA, 21 nt, Human adenovirus C
aguuuuauaaaggauaaaugg

SEQ ID NO: 3911108 - RNA, 17 nt, Human adenovirus C
auaacagcacuggcaac

SEQ ID NO: 3911109 - RNA, 15 nt, Human adenovirus C
auaagggccuccccu

SEQ ID NO: 3911110 - RNA, 22 nt, Human adenovirus C
auacggaggauaggguggccuu

SEQ ID NO: 3911111 - RNA, 19 nt, Human adenovirus C
auacugggacagucaggca

SEQ ID NO: 3911112 - RNA, 15 nt, Human adenovirus C
auagccgggucaggg

SEQ ID NO: 3911113 - RNA, 19 nt, Human adenovirus C
auagcuaacgugucguaug

SEQ ID NO: 3911114 - RNA, 22 nt, Human adenovirus C
auauaaaccucugauuaaacau

SEQ ID NO: 3911115 - RNA, 20 nt, Human adenovirus C
auaugaguggguggaguuca

SEQ ID NO: 3911116 - RNA, 21 nt, Human adenovirus C
auauggcccucaccugccgcc

SEQ ID NO: 3911117 - RNA, 20 nt, Human adenovirus C
auaugguuggacgcuggaag

SEQ ID NO: 3911118 - RNA, 14 nt, Human adenovirus C
auauuguucaaaau

SEQ ID NO: 3911119 - RNA, 11 nt, Human adenovirus C
aucacaaaagc

SEQ ID NO: 3911120 - RNA, 21 nt, Human adenovirus C
aucagauccgcguccaggucc

SEQ ID NO: 3911121 - RNA, 18 nt, Human adenovirus C
aucagcguaaaucccaca

SEQ ID NO: 3911122 - RNA, 18 nt, Human adenovirus C
aucagcuucggcgcacgc

SEQ ID NO: 3911123 - RNA, 21 nt, Human adenovirus C
aucagcuucggcgcacgcugg

SEQ ID NO: 3911124 - RNA, 12 nt, Human adenovirus C
aucauugaaaac

SEQ ID NO: 3911125 - RNA, 16 nt, Human adenovirus C
auccacagcggcggca

SEQ ID NO: 3911126 - RNA, 19 nt, Human adenovirus C
auccagcggcggcggcgcg

SEQ ID NO: 3911127 - RNA, 17 nt, Human adenovirus C
aucccacacugcaggga

SEQ ID NO: 3911128 - RNA, 23 nt, Human adenovirus C
aucccauggacgagcccacccuu

SEQ ID NO: 3911129 - RNA, 13 nt, Human adenovirus C
aucccuccgggga

SEQ ID NO: 3911130 - RNA, 15 nt, Human adenovirus C
aucccugaacuacca

SEQ ID NO: 3911131 - RNA, 22 nt, Human adenovirus C
aucccugagcaggggggccacu

SEQ ID NO: 3911132 - RNA, 12 nt, Human adenovirus C
auccgcccugcu

SEQ ID NO: 3911133 - RNA, 21 nt, Human adenovirus C
auccgcggcgugcuggacagg

SEQ ID NO: 3911134 - RNA, 17 nt, Human adenovirus C
auccuaacucugcagac

SEQ ID NO: 3911135 - RNA, 15 nt, Human adenovirus C
auccucaucugcagc

SEQ ID NO: 3911136 - RNA, 18 nt, Human adenovirus C
auccucaucugcagccuc

SEQ ID NO: 3911137 - RNA, 23 nt, Human adenovirus C
auccugccgugccaaccgcagcc

SEQ ID NO: 3911138 - RNA, 14 nt, Human adenovirus C
aucgcccagcaaua

SEQ ID NO: 3911139 - RNA, 18 nt, Human adenovirus C
aucgcgcccauggcuacc

SEQ ID NO: 3911140 - RNA, 16 nt, Human adenovirus C
aucgcucaguaccaac

SEQ ID NO: 3911141 - RNA, 22 nt, Human adenovirus C
aucgcuuucccgagaaccagau

SEQ ID NO: 3911142 - RNA, 13 nt, Human adenovirus C
aucguuuaaaagc

SEQ ID NO: 3911143 - RNA, 19 nt, Human adenovirus C
aucuccagcggccacaccc

SEQ ID NO: 3911144 - RNA, 16 nt, Human adenovirus C
aucucccgccaccagu

SEQ ID NO: 3911145 - RNA, 13 nt, Human adenovirus C
aucuccuaacugc

SEQ ID NO: 3911146 - RNA, 16 nt, Human adenovirus C
aucucgucgaagccgu

SEQ ID NO: 3911147 - RNA, 13 nt, Human adenovirus C
aucugagcggggg

SEQ ID NO: 3911148 - RNA, 19 nt, Human adenovirus C
aucugggucaccaggcgcu

SEQ ID NO: 3911149 - RNA, 12 nt, Human adenovirus C
acggcaccgcca

SEQ ID NO: 3911150 - RNA, 14 nt, Human adenovirus C
acggccgccagagc

SEQ ID NO: 3911151 - RNA, 20 nt, Human adenovirus C
acggccgccagagcuuccac

SEQ ID NO: 3911152 - RNA, 22 nt, Human adenovirus C
acggccuucaacgagcgcuccg

SEQ ID NO: 3911153 - RNA, 13 nt, Human adenovirus C
acggcggccuggc

SEQ ID NO: 3911154 - RNA, 16 nt, Human adenovirus C
acgggcagccuggagg

SEQ ID NO: 3911155 - RNA, 16 nt, Human adenovirus C
acgggcccggugagcu

SEQ ID NO: 3911156 - RNA, 16 nt, Human adenovirus C
acgguuuuccuggcca

SEQ ID NO: 3911157 - RNA, 22 nt, Human adenovirus C
acgucauaguuguguuccagga

SEQ ID NO: 3911158 - RNA, 16 nt, Human adenovirus C
acgucuagggcgcagu

SEQ ID NO: 3911159 - RNA, 12 nt, Human adenovirus C
acgugcagacca

SEQ ID NO: 3911160 - RNA, 19 nt, Human adenovirus C
acgugcagaccaaccugga

SEQ ID NO: 3911161 - RNA, 20 nt, Human adenovirus C
acgugcauacacuuccucag

SEQ ID NO: 3911162 - RNA, 19 nt, Human adenovirus C
acgugcccaucuccauccc

SEQ ID NO: 3911163 - RNA, 21 nt, Human adenovirus C
acgugccgcggggacaggagg

SEQ ID NO: 3911164 - RNA, 23 nt, Human adenovirus C
acgugccgcggggacaggaggac

SEQ ID NO: 3911165 - RNA, 19 nt, Human adenovirus C
acgugcgccaggccugcaa

SEQ ID NO: 3911166 - RNA, 21 nt, Human adenovirus C
acguuuacaaggcccugggca

SEQ ID NO: 3911167 - RNA, 20 nt, Human adenovirus C
acuaaacuuugauaauacug

SEQ ID NO: 3911168 - RNA, 15 nt, Human adenovirus C
acuaacauaaacaca

SEQ ID NO: 3911169 - RNA, 18 nt, Human adenovirus C
acuacaauauuggcuacc

SEQ ID NO: 3911170 - RNA, 22 nt, Human adenovirus C
acuacauggacaaaagaugaaa

SEQ ID NO: 3911171 - RNA, 21 nt, Human adenovirus C
acuaccgcgcgcccuggggcg

SEQ ID NO: 3911172 - RNA, 20 nt, Human adenovirus C
acuagcuacuguagcugcuu

SEQ ID NO: 3911173 - RNA, 20 nt, Human adenovirus C
acuaucgcaacaccacugcu

SEQ ID NO: 3911174 - RNA, 22 nt, Human adenovirus C
acuaucugccugaagauggcau

SEQ ID NO: 3911175 - RNA, 17 nt, Human adenovirus C
acuauucugcugcaugu

SEQ ID NO: 3911176 - RNA, 17 nt, Human adenovirus C
acucacagaccugggcc

SEQ ID NO: 3911177 - RNA, 17 nt, Human adenovirus C
acucaggucaaaaaagc

SEQ ID NO: 3911178 - RNA, 14 nt, Human adenovirus C
acuccacaggcugc

SEQ ID NO: 3911179 - RNA, 20 nt, Human adenovirus C
acucccauuuuuccaaaaca

SEQ ID NO: 3911180 - RNA, 22 nt, Human adenovirus C
acucgcgccuguugcugcugcu

SEQ ID NO: 3911181 - RNA, 14 nt, Human adenovirus C
acucgcugcugcag

SEQ ID NO: 3911182 - RNA, 18 nt, Human adenovirus C
acucggaccacucugaga

SEQ ID NO: 3911183 - RNA, 15 nt, Human adenovirus C
acucugacaaagccc

SEQ ID NO: 3911184 - RNA, 21 nt, Human adenovirus C
acucugacaaagcccaagaaa

SEQ ID NO: 3911185 - RNA, 20 nt, Human adenovirus C
acugcagagcuucaugcugc

SEQ ID NO: 3911186 - RNA, 17 nt, Human adenovirus C
acugcagcacagcacca

SEQ ID NO: 3911187 - RNA, 20 nt, Human adenovirus C
acugcagcaggugcugccca

SEQ ID NO: 3911188 - RNA, 15 nt, Human adenovirus C
acugccacagagggc

SEQ ID NO: 3911189 - RNA, 16 nt, Human adenovirus C
acugccacagagggca

SEQ ID NO: 3911190 - RNA, 19 nt, Human adenovirus C
acugcgccugacacaccuc

SEQ ID NO: 3911191 - RNA, 15 nt, Human adenovirus C
acugcuaaaaauaac

SEQ ID NO: 3911192 - RNA, 21 nt, Human adenovirus C
acugcuaaaaauaacauuguc

SEQ ID NO: 3911193 - RNA, 16 nt, Human adenovirus C
acuggaaccagggccg

SEQ ID NO: 3911194 - RNA, 16 nt, Human adenovirus C
acuggaacccgccgcc

SEQ ID NO: 3911195 - RNA, 18 nt, Human adenovirus C
acuggaacccgccgccgc

SEQ ID NO: 3911196 - RNA, 21 nt, Human adenovirus C
acuggcaccuuuuguuccacc

SEQ ID NO: 3911197 - RNA, 19 nt, Human adenovirus C
acuggccauuuccuucucc

SEQ ID NO: 3911198 - RNA, 13 nt, Human adenovirus C
acuggcugcagcc

SEQ ID NO: 3911199 - RNA, 17 nt, Human adenovirus C
acuggcugcagccaggg

SEQ ID NO: 3911200 - RNA, 17 nt, Human adenovirus C
acugucacuugcugaag

SEQ ID NO: 3911201 - RNA, 18 nt, Human adenovirus C
acuuacuggcugcagcca

SEQ ID NO: 3911202 - RNA, 23 nt, Human adenovirus C
acuucaggaaggauguuaacaug

SEQ ID NO: 3911203 - RNA, 14 nt, Human adenovirus C
acuuccagcccaug

SEQ ID NO: 3911204 - RNA, 22 nt, Human adenovirus C
acuugcaucgcgcggccgccgu

SEQ ID NO: 3911205 - RNA, 21 nt, Human adenovirus C
acuugcauggugauaaaacua

SEQ ID NO: 3911206 - RNA, 14 nt, Human adenovirus C
acuugcggcuggag

SEQ ID NO: 3911207 - RNA, 23 nt, Human adenovirus C
acuuggcacccaccgugcagcug

SEQ ID NO: 3911208 - RNA, 22 nt, Human adenovirus C
acuuuccuggacguuagcgccu

SEQ ID NO: 3911209 - RNA, 16 nt, Human adenovirus C
acuuugcgucucuggc

SEQ ID NO: 3911210 - RNA, 22 nt, Human adenovirus C
acuuuuaagcccuacuccggca

SEQ ID NO: 3911211 - RNA, 20 nt, Human adenovirus C
acuuuuagcuuaaugaccag

SEQ ID NO: 3911212 - RNA, 22 nt, Human adenovirus C
agaaaagcgcggccuaaagcgc

SEQ ID NO: 3911213 - RNA, 13 nt, Human adenovirus C
agaaacacaagcu

SEQ ID NO: 3911214 - RNA, 14 nt, Human adenovirus C
agaaacacagagcu

SEQ ID NO: 3911215 - RNA, 12 nt, Human adenovirus C
cgagguggagau

SEQ ID NO: 3911216 - RNA, 19 nt, Human adenovirus C
cgagucuggugacuuggca

SEQ ID NO: 3911217 - RNA, 14 nt, Human adenovirus C
cgagugguggcucc

SEQ ID NO: 3911218 - RNA, 17 nt, Human adenovirus C
cgauauuaccauguaca

SEQ ID NO: 3911219 - RNA, 20 nt, Human adenovirus C
cgaucacuuggugcuggccu

SEQ ID NO: 3911220 - RNA, 15 nt, Human adenovirus C
cgaucgaugcggccc

SEQ ID NO: 3911221 - RNA, 14 nt, Human adenovirus C
cgaucguggagcac

SEQ ID NO: 3911222 - RNA, 14 nt, Human adenovirus C
cgaugagacccgca

SEQ ID NO: 3911223 - RNA, 17 nt, Human adenovirus C
cgaugagacccgcacca

SEQ ID NO: 3911224 - RNA, 18 nt, Human adenovirus C
cgaugaugccgcaguggu

SEQ ID NO: 3911225 - RNA, 17 nt, Human adenovirus C
cgcaaccgcagacccug

SEQ ID NO: 3911226 - RNA, 21 nt, Human adenovirus C
cgcaaccuaaaggagcugcag

SEQ ID NO: 3911227 - RNA, 13 nt, Human adenovirus C
cgcaaggccuggc

SEQ ID NO: 3911228 - RNA, 13 nt, Human adenovirus C
cgcaauucuggaa

SEQ ID NO: 3911229 - RNA, 18 nt, Human adenovirus C
cgcaccgcguccgcgcuc

SEQ ID NO: 3911230 - RNA, 21 nt, Human adenovirus C
cacgguuaacuccuccuccag

SEQ ID NO: 3911231 - RNA, 20 nt, Human adenovirus C
cacuacccggaccaguuuau

SEQ ID NO: 3911232 - RNA, 13 nt, Human adenovirus C
cacuaucagcgcc

SEQ ID NO: 3911233 - RNA, 20 nt, Human adenovirus C
cacucgcccuacuuccgcag

SEQ ID NO: 3911234 - RNA, 14 nt, Human adenovirus C
cacucgugcuggcu

SEQ ID NO: 3911235 - RNA, 16 nt, Human adenovirus C
cacucucgcaaggccu

SEQ ID NO: 3911236 - RNA, 15 nt, Human adenovirus C
cacugcagcaggugc

SEQ ID NO: 3911237 - RNA, 13 nt, Human adenovirus C
cacugccacagag

SEQ ID NO: 3911238 - RNA, 15 nt, Human adenovirus C
cacugcuaccggacu

SEQ ID NO: 3911239 - RNA, 24 nt, Human adenovirus C
cacugcuaccuucugcagcuagcc

SEQ ID NO: 3911240 - RNA, 15 nt, Human adenovirus C
cacuggcaacauggg

SEQ ID NO: 3911241 - RNA, 22 nt, Human adenovirus C
cacuggucuugucaugccuggg

SEQ ID NO: 3911242 - RNA, 23 nt, Human adenovirus C
cacuggucuugucaugccugggg

SEQ ID NO: 3911243 - RNA, 17 nt, Human adenovirus C
cacugucgcugcaaccu

SEQ ID NO: 3911244 - RNA, 23 nt, Human adenovirus C
cacugugccccccagguccaggc

SEQ ID NO: 3911245 - RNA, 17 nt, Human adenovirus C
cagaaaccugugcugcc

SEQ ID NO: 3911246 - RNA, 21 nt, Human adenovirus C
cagaaaccugugcugccaggg

SEQ ID NO: 3911247 - RNA, 14 nt, Human adenovirus C
cagaaccaccagca

SEQ ID NO: 3911248 - RNA, 15 nt, Human adenovirus C
cagaagcugccgccc

SEQ ID NO: 3911249 - RNA, 17 nt, Human adenovirus C
cagaaggugaccgugcc

SEQ ID NO: 3911250 - RNA, 17 nt, Human adenovirus C
cagacaaugcagaaaca

SEQ ID NO: 3911251 - RNA, 19 nt, Human adenovirus C
cagacaucauuuugcugcc

SEQ ID NO: 3911252 - RNA, 21 nt, Human adenovirus C
cagacaucauuuugcugccag

SEQ ID NO: 3911253 - RNA, 14 nt, Human adenovirus C
cagaccugggccaa

SEQ ID NO: 3911254 - RNA, 14 nt, Human adenovirus C
cagacgacagcagc

SEQ ID NO: 3911255 - RNA, 14 nt, Human adenovirus C
cagacgcgccagac

SEQ ID NO: 3911256 - RNA, 20 nt, Human adenovirus C
cagacgcgccagacccccca

SEQ ID NO: 3911257 - RNA, 12 nt, Human adenovirus C
cagacgggccag

SEQ ID NO: 3911258 - RNA, 20 nt, Human adenovirus C
cagacuauuuuuuccagacc

SEQ ID NO: 3911259 - RNA, 15 nt, Human adenovirus C
cagagacgcccaggc

SEQ ID NO: 3911260 - RNA, 20 nt, Human adenovirus C
cagagcauaguggugcagga

SEQ ID NO: 3911261 - RNA, 22 nt, Human adenovirus C
cagagcauaguggugcaggagc

SEQ ID NO: 3911262 - RNA, 13 nt, Human adenovirus C
cagagcgugagcc

SEQ ID NO: 3911263 - RNA, 23 nt, Human adenovirus C
cagagcgugagccuuaaccugau

SEQ ID NO: 3911264 - RNA, 12 nt, Human adenovirus C
cagagcuguccu

SEQ ID NO: 3911265 - RNA, 22 nt, Human adenovirus C
cagagcuuccacuuggucaggc

SEQ ID NO: 3911266 - RNA, 13 nt, Human adenovirus C
cagaggacagcaa

SEQ ID NO: 3911267 - RNA, 18 nt, Human adenovirus C
cagaggagcugcugagcc

SEQ ID NO: 3911268 - RNA, 13 nt, Human adenovirus C
cagaggcggcgcu

SEQ ID NO: 3911269 - RNA, 20 nt, Human adenovirus C
cagagugggaauuugagccc

SEQ ID NO: 3911270 - RNA, 17 nt, Human adenovirus C
cagaugcugagggacaa

SEQ ID NO: 3911271 - RNA, 14 nt, Human adenovirus C
cagauucacucaaa

SEQ ID NO: 3911272 - RNA, 20 nt, Human adenovirus C
cagcaauaacacaggcuggg

SEQ ID NO: 3911273 - RNA, 15 nt, Human adenovirus C
cagcacagcaccaca

SEQ ID NO: 3911274 - RNA, 11 nt, Human adenovirus C
cagcacagcag

SEQ ID NO: 3911275 - RNA, 22 nt, Human adenovirus C
cagcacaguguauccggugcac

SEQ ID NO: 3911276 - RNA, 17 nt, Human adenovirus C
cagcacucggcagaaac

SEQ ID NO: 3911277 - RNA, 15 nt, Human adenovirus C
cagcagauuaaggau

SEQ ID NO: 3911278 - RNA, 15 nt, Human adenovirus C
cagcagccgcaggcc

SEQ ID NO: 3911279 - RNA, 16 nt, Human adenovirus C
cagcagccgcaggcca

SEQ ID NO: 3911280 - RNA, 13 nt, Human adenovirus C
cagcagccgcggc

SEQ ID NO: 3911281 - RNA, 14 nt, Human adenovirus C
cagcagccgcgggc

SEQ ID NO: 3911282 - RNA, 14 nt, Human adenovirus C
cagcagcgcacccu

SEQ ID NO: 3911283 - RNA, 14 nt, Human adenovirus C
cagcaggugcugcc

SEQ ID NO: 3911284 - RNA, 19 nt, Human adenovirus C
cagcagguuucugcccuga

SEQ ID NO: 3911285 - RNA, 14 nt, Human adenovirus C
cagcaucaccuccu

SEQ ID NO: 3911286 - RNA, 18 nt, Human adenovirus C
cagcaucgcuacaaccuc

SEQ ID NO: 3911287 - RNA, 12 nt, Human adenovirus C
cagccacagugc

SEQ ID NO: 3911288 - RNA, 21 nt, Human adenovirus C
cagccacucucgcaaggccug

SEQ ID NO: 3911289 - RNA, 14 nt, Human adenovirus C
cagcccuaucagca

SEQ ID NO: 3911290 - RNA, 20 nt, Human adenovirus C
cagccgagcggacaagcagc

SEQ ID NO: 3911291 - RNA, 12 nt, Human adenovirus C
cagccgcagcgc

SEQ ID NO: 3911292 - RNA, 13 nt, Human adenovirus C
cagccgcaggcca

SEQ ID NO: 3911293 - RNA, 13 nt, Human adenovirus C
cagccgccugagc

SEQ ID NO: 3911294 - RNA, 13 nt, Human adenovirus C
cagccgcggccau

SEQ ID NO: 3911295 - RNA, 13 nt, Human adenovirus C
cagccgcugcagc

SEQ ID NO: 3911296 - RNA, 17 nt, Human adenovirus C
cagccgguggaggacau

SEQ ID NO: 3911297 - RNA, 23 nt, Human adenovirus C
cagccuagacgaagcuuccgagg

SEQ ID NO: 3911298 - RNA, 22 nt, Human adenovirus C
cagccugcaaagggcccuggcu

SEQ ID NO: 3911299 - RNA, 23 nt, Human adenovirus C
cagccugcaaagggcccuggcug

SEQ ID NO: 3911300 - RNA, 14 nt, Human adenovirus C
cagcgccaaggcua

SEQ ID NO: 3911301 - RNA, 13 nt, Human adenovirus C
cagcgccgggugg

SEQ ID NO: 3911302 - RNA, 19 nt, Human adenovirus C
cagcggcaacgugcagacc

SEQ ID NO: 3911303 - RNA, 24 nt, Human adenovirus C
cagcggcaagagcaagagcagcgg

SEQ ID NO: 3911304 - RNA, 22 nt, Human adenovirus C
cagcggcagacaugcagggcac

SEQ ID NO: 3911305 - RNA, 17 nt, Human adenovirus C
cagcggcggcagcagca

SEQ ID NO: 3911306 - RNA, 15 nt, Human adenovirus C
cagcggugcagccac

SEQ ID NO: 3911307 - RNA, 17 nt, Human adenovirus C
cagcuaaaugccguggu

SEQ ID NO: 3911308 - RNA, 14 nt, Human adenovirus C
cagcugccgccgcc

SEQ ID NO: 3911309 - RNA, 21 nt, Human adenovirus C
cagcugcgacuuaccgcagcc

SEQ ID NO: 3911310 - RNA, 14 nt, Human adenovirus C
cagcuggggccgga

SEQ ID NO: 3911311 - RNA, 15 nt, Human adenovirus C
cagcugguaccuugc

SEQ ID NO: 3911312 - RNA, 13 nt, Human adenovirus C
cagcuguuggggu

SEQ ID NO: 3911313 - RNA, 19 nt, Human adenovirus C
cagcuugccugcuccagag

SEQ ID NO: 3911314 - RNA, 17 nt, Human adenovirus C
caggaaagucccgcucc

SEQ ID NO: 3911315 - RNA, 18 nt, Human adenovirus C
caggaacagcucuacagc

SEQ ID NO: 3911316 - RNA, 14 nt, Human adenovirus C
caggaaccaugaca

SEQ ID NO: 3911317 - RNA, 22 nt, Human adenovirus C
caggacgccucggaguaccuga

SEQ ID NO: 3911318 - RNA, 19 nt, Human adenovirus C
caggaggugagcucaacuc

SEQ ID NO: 3911319 - RNA, 21 nt, Human adenovirus C
caggcacaaccauccgcggca

SEQ ID NO: 3911320 - RNA, 13 nt, Human adenovirus C
caggcagaggagg

SEQ ID NO: 3911321 - RNA, 18 nt, Human adenovirus C
caggccgucuacucccag

SEQ ID NO: 3911322 - RNA, 14 nt, Human adenovirus C
caggcgacgagcgg

SEQ ID NO: 3911323 - RNA, 23 nt, Human adenovirus C
caggcgauccuaacucugcagac

SEQ ID NO: 3911324 - RNA, 13 nt, Human adenovirus C
caggcgcagagac

SEQ ID NO: 3911325 - RNA, 14 nt, Human adenovirus C
caggcgcagagaca

SEQ ID NO: 3911326 - RNA, 16 nt, Human adenovirus C
caggcgcggcggcugc

SEQ ID NO: 3911327 - RNA, 17 nt, Human adenovirus C
caggcgcggcggcugcu

SEQ ID NO: 3911328 - RNA, 23 nt, Human adenovirus C
caggcggcggcggcggcaggagc

SEQ ID NO: 3911329 - RNA, 16 nt, Human adenovirus C
caggcggcuauuacca

SEQ ID NO: 3911330 - RNA, 18 nt, Human adenovirus C
caggcuggggccugcgcu

SEQ ID NO: 3911331 - RNA, 15 nt, Human adenovirus C
caggcuuaccccgcc

SEQ ID NO: 3911332 - RNA, 14 nt, Human adenovirus C
cagggaugcgcugc

SEQ ID NO: 3911333 - RNA, 16 nt, Human adenovirus C
caggggagcugagccc

SEQ ID NO: 3911334 - RNA, 16 nt, Human adenovirus C
caggggccaagaacaa

SEQ ID NO: 3911335 - RNA, 14 nt, Human adenovirus C
caggggccucuucu

SEQ ID NO: 3911336 - RNA, 16 nt, Human adenovirus C
cagggugacaagguca

SEQ ID NO: 3911337 - RNA, 13 nt, Human adenovirus C
cagguacagccca

SEQ ID NO: 3911338 - RNA, 14 nt, Human adenovirus C
caggucaucgcgcc

SEQ ID NO: 3911339 - RNA, 15 nt, Human adenovirus C
caggugcacgcgcca

SEQ ID NO: 3911340 - RNA, 15 nt, Human adenovirus C
caggugcagacccug

SEQ ID NO: 3911341 - RNA, 21 nt, Human adenovirus C
cagguggagaugacugaaucu

SEQ ID NO: 3911342 - RNA, 17 nt, Human adenovirus C
cagguuggaauucuuca

SEQ ID NO: 3911343 - RNA, 20 nt, Human adenovirus C
cagguuggaauucuucacca

SEQ ID NO: 3911344 - RNA, 16 nt, Human adenovirus C
cagucacaagccccac

SEQ ID NO: 3911345 - RNA, 19 nt, Human adenovirus C
caguccccagguacagccc

SEQ ID NO: 3911346 - RNA, 15 nt, Human adenovirus C
caguccgggccagac

SEQ ID NO: 3911347 - RNA, 22 nt, Human adenovirus C
cagucgagaaggaggacagccu

SEQ ID NO: 3911348 - RNA, 18 nt, Human adenovirus C
cagucugcagcgcugcca

SEQ ID NO: 3911349 - RNA, 18 nt, Human adenovirus C
caguggagaggcagagcg

SEQ ID NO: 3911350 - RNA, 19 nt, Human adenovirus C
cagugucagauggaaagcu

SEQ ID NO: 3911351 - RNA, 14 nt, Human adenovirus C
caguguccacagug

SEQ ID NO: 3911352 - RNA, 21 nt, Human adenovirus C
caguuccaggcggucccacag

SEQ ID NO: 3911353 - RNA, 16 nt, Human adenovirus C
caguuggaggaguggc

SEQ ID NO: 3911354 - RNA, 18 nt, Human adenovirus C
caguuggggccuccgccc

SEQ ID NO: 3911355 - RNA, 14 nt, Human adenovirus C
cauaaaagaagcaa

SEQ ID NO: 3911356 - RNA, 13 nt, Human adenovirus C
cauaccacugcaa

SEQ ID NO: 3911357 - RNA, 20 nt, Human adenovirus C
cauacccgccaacgccacca

SEQ ID NO: 3911358 - RNA, 14 nt, Human adenovirus C
cauacugacccgcu

SEQ ID NO: 3911359 - RNA, 14 nt, Human adenovirus C
cauaguagagcccg

SEQ ID NO: 3911360 - RNA, 14 nt, Human adenovirus C
cauccacaaggccg

SEQ ID NO: 3911361 - RNA, 16 nt, Human adenovirus C
cauccaggugaugccg

SEQ ID NO: 3911362 - RNA, 18 nt, Human adenovirus C
cauccgcccugcucccag

SEQ ID NO: 3911363 - RNA, 16 nt, Human adenovirus C
cauccgcggcagcucg

SEQ ID NO: 3911364 - RNA, 15 nt, Human adenovirus C
caucguaggugacaa

SEQ ID NO: 3911365 - RNA, 21 nt, Human adenovirus C
caucguuuaaaagccggucuu

SEQ ID NO: 3911366 - RNA, 17 nt, Human adenovirus C
caucuccuaacugcaga

SEQ ID NO: 3911367 - RNA, 13 nt, Human adenovirus C
caucugcagccuc

SEQ ID NO: 3911368 - RNA, 14 nt, Human adenovirus C
caucugcagccucg

SEQ ID NO: 3911369 - RNA, 14 nt, Human adenovirus C
caugaaaccaugcu

SEQ ID NO: 3911370 - RNA, 14 nt, Human adenovirus C
caugaaccacccua

SEQ ID NO: 3911371 - RNA, 13 nt, Human adenovirus C
caugagccggugu

SEQ ID NO: 3911372 - RNA, 21 nt, Human adenovirus C
caugcgagcccaacccgcgcc

SEQ ID NO: 3911373 - RNA, 21 nt, Human adenovirus C
caugcgcgagggacaggcuua

SEQ ID NO: 3911374 - RNA, 14 nt, Human adenovirus C
cauggcgccaucca

SEQ ID NO: 3911375 - RNA, 21 nt, Human adenovirus C
cauggcgccauccaccaccau

SEQ ID NO: 3911376 - RNA, 24 nt, Human adenovirus C
caugguguguggcaacugcgagga

SEQ ID NO: 3911377 - RNA, 14 nt, Human adenovirus C
caugucgcugucca

SEQ ID NO: 3911378 - RNA, 21 nt, Human adenovirus C
caugucuaccugcggggcgau

SEQ ID NO: 3911379 - RNA, 21 nt, Human adenovirus C
caugucuuuccacgggcgcag

SEQ ID NO: 3911380 - RNA, 23 nt, Human adenovirus C
cauguuguaauucaccaccuccc

SEQ ID NO: 3911381 - RNA, 13 nt, Human adenovirus C
cauuacccagggc

SEQ ID NO: 3911382 - RNA, 17 nt, Human adenovirus C
cauucaacuaacauaaa

SEQ ID NO: 3911383 - RNA, 19 nt, Human adenovirus C
cauucagggaugcgcugcu

SEQ ID NO: 3911384 - RNA, 13 nt, Human adenovirus C
cauucccagcugc

SEQ ID NO: 3911385 - RNA, 17 nt, Human adenovirus C
ccaaaaagaagcugcag

SEQ ID NO: 3911386 - RNA, 13 nt, Human adenovirus C
ccaaaaccuucuc

SEQ ID NO: 3911387 - RNA, 15 nt, Human adenovirus C
ccaaaagcagggcuu

SEQ ID NO: 3911388 - RNA, 15 nt, Human adenovirus C
ccaaagcagaccaaa

SEQ ID NO: 3911389 - RNA, 15 nt, Human adenovirus C
ccaaccaggcagugc

SEQ ID NO: 3911390 - RNA, 14 nt, Human adenovirus C
ccaacccgcgccuc

SEQ ID NO: 3911391 - RNA, 13 nt, Human adenovirus C
ccaaccggcggca

SEQ ID NO: 3911392 - RNA, 15 nt, Human adenovirus C
ccaacuaccuugccu

SEQ ID NO: 3911393 - RNA, 14 nt, Human adenovirus C
ccaacuccaugcuu

SEQ ID NO: 3911394 - RNA, 17 nt, Human adenovirus C
ccaagaacaagagcuga

SEQ ID NO: 3911395 - RNA, 22 nt, Human adenovirus C
ccaagcaguuccaggcgguccc

SEQ ID NO: 3911396 - RNA, 22 nt, Human adenovirus C
ccaaggacugguuccuggugca

SEQ ID NO: 3911397 - RNA, 18 nt, Human adenovirus C
ccaaggccauggcaccga

SEQ ID NO: 3911398 - RNA, 22 nt, Human adenovirus C
ccaaguggacguaaaggcuaaa

SEQ ID NO: 3911399 - RNA, 16 nt, Human adenovirus C
ccaaguucaugccuuu

SEQ ID NO: 3911400 - RNA, 22 nt, Human adenovirus C
ccaauugcaagccaucaacaaa

SEQ ID NO: 3911401 - RNA, 16 nt, Human adenovirus C
ccacacaagcucgccu

SEQ ID NO: 3911402 - RNA, 15 nt, Human adenovirus C
ccacacugcagggaa

SEQ ID NO: 3911403 - RNA, 16 nt, Human adenovirus C
ccacagaaacuagcga

SEQ ID NO: 3911404 - RNA, 20 nt, Human adenovirus C
ccacagagggcauggagaca

SEQ ID NO: 3911405 - RNA, 17 nt, Human adenovirus C
ccacagccgccugagca

SEQ ID NO: 3911406 - RNA, 19 nt, Human adenovirus C
ccacagcggcggcagcagc

SEQ ID NO: 3911407 - RNA, 20 nt, Human adenovirus C
ccacagcggcggcagcagca

SEQ ID NO: 3911408 - RNA, 17 nt, Human adenovirus C
ccaccaauguggaaaua

SEQ ID NO: 3911409 - RNA, 15 nt, Human adenovirus C
ccaccaccacauagc

SEQ ID NO: 3911410 - RNA, 15 nt, Human adenovirus C
ccaccacgccgcgcg

SEQ ID NO: 3911411 - RNA, 13 nt, Human adenovirus C
ccacccuccucac

SEQ ID NO: 3911412 - RNA, 14 nt, Human adenovirus C
ccacgagccaggug

SEQ ID NO: 3911413 - RNA, 12 nt, Human adenovirus C
ccacgcucggug

SEQ ID NO: 3911414 - RNA, 13 nt, Human adenovirus C
ccacgcucgguga

SEQ ID NO: 3911415 - RNA, 16 nt, Human adenovirus C
ccacgcuggaagccau

SEQ ID NO: 3911416 - RNA, 23 nt, Human adenovirus C
ccacuaggggguccacucgcucc

SEQ ID NO: 3911417 - RNA, 15 nt, Human adenovirus C
ccacucgacacggca

SEQ ID NO: 3911418 - RNA, 19 nt, Human adenovirus C
ccacuguuacucagccacu

SEQ ID NO: 3911419 - RNA, 21 nt, Human adenovirus C
ccacuucuuuuugucacuuga

SEQ ID NO: 3911420 - RNA, 14 nt, Human adenovirus C
ccagaacgaccaca

SEQ ID NO: 3911421 - RNA, 16 nt, Human adenovirus C
ccagacauuacuccca

SEQ ID NO: 3911422 - RNA, 18 nt, Human adenovirus C
ccagaccgucugaagaca

SEQ ID NO: 3911423 - RNA, 21 nt, Human adenovirus C
ccagacuauuuuuuccagacc

SEQ ID NO: 3911424 - RNA, 18 nt, Human adenovirus C
ccagaggaccucugcacu

SEQ ID NO: 3911425 - RNA, 23 nt, Human adenovirus C
ccagaggagcugcugagccgccg

SEQ ID NO: 3911426 - RNA, 17 nt, Human adenovirus C
ccagcaauaacacaggc

SEQ ID NO: 3911427 - RNA, 20 nt, Human adenovirus C
ccagcaccugucgucagcgc

SEQ ID NO: 3911428 - RNA, 21 nt, Human adenovirus C
ccagcagaaaccugugcugcc

SEQ ID NO: 3911429 - RNA, 18 nt, Human adenovirus C
ccagcccaugagccggca

SEQ ID NO: 3911430 - RNA, 17 nt, Human adenovirus C
ccagcccgugcuggccc

SEQ ID NO: 3911431 - RNA, 18 nt, Human adenovirus C
ccagcgcggccacuuccc

SEQ ID NO: 3911432 - RNA, 17 nt, Human adenovirus C
ccagcggccacacccgg

SEQ ID NO: 3911433 - RNA, 22 nt, Human adenovirus C
ccagcggccacacccggcgcca

SEQ ID NO: 3911434 - RNA, 15 nt, Human adenovirus C
ccagcugcugagcca

SEQ ID NO: 3911435 - RNA, 18 nt, Human adenovirus C
ccagcugcugagccacag

SEQ ID NO: 3911436 - RNA, 23 nt, Human adenovirus C
ccagcuucagcuugccugcucca

SEQ ID NO: 3911437 - RNA, 21 nt, Human adenovirus C
ccaggaacagcucuacagcuu

SEQ ID NO: 3911438 - RNA, 19 nt, Human adenovirus C
ccaggacgacgcagaggca

SEQ ID NO: 3911439 - RNA, 12 nt, Human adenovirus C
ccaggacgccuc

SEQ ID NO: 3911440 - RNA, 12 nt, Human adenovirus C
ccaggcgccccc

SEQ ID NO: 3911441 - RNA, 22 nt, Human adenovirus C
ccaggcgcggcggcugcugcgc

SEQ ID NO: 3911442 - RNA, 20 nt, Human adenovirus C
ccaggcggcggcggcggcag

SEQ ID NO: 3911443 - RNA, 19 nt, Human adenovirus C
ccaggcggucccacagcuc

SEQ ID NO: 3911444 - RNA, 21 nt, Human adenovirus C
ccagggcuucuacauuccaga

SEQ ID NO: 3911445 - RNA, 11 nt, Human adenovirus C
gcaaccaggaa

SEQ ID NO: 3911446 - RNA, 15 nt, Human adenovirus C
gcaacccaacaccua

SEQ ID NO: 3911447 - RNA, 19 nt, Human adenovirus C
gcaaccuaaaggagcugca

SEQ ID NO: 3911448 - RNA, 20 nt, Human adenovirus C
gcaaccuaaaggagcugcag

SEQ ID NO: 3911449 - RNA, 12 nt, Human adenovirus C
gcaacgccacaa

SEQ ID NO: 3911450 - RNA, 15 nt, Human adenovirus C
gcaacgccacaacau

SEQ ID NO: 3911451 - RNA, 23 nt, Human adenovirus C
gcaacuuggcgauggagcgcagg

SEQ ID NO: 3911452 - RNA, 23 nt, Human adenovirus C
gcaacuuuccgguggugggcgcc

SEQ ID NO: 3911453 - RNA, 13 nt, Human adenovirus C
gcaagaccaggac

SEQ ID NO: 3911454 - RNA, 19 nt, Human adenovirus C
gcaagacucugacaaagcc

SEQ ID NO: 3911455 - RNA, 20 nt, Human adenovirus C
gcaagcaacaucaacaacag

SEQ ID NO: 3911456 - RNA, 13 nt, Human adenovirus C
gcaaggccuggaa

SEQ ID NO: 3911457 - RNA, 21 nt, Human adenovirus C
gcaaggccuggaacagcagca

SEQ ID NO: 3911458 - RNA, 23 nt, Human adenovirus C
gcaaggccuggaacagcagcaca

SEQ ID NO: 3911459 - RNA, 20 nt, Human adenovirus C
gcacagggaugugcccggcc

SEQ ID NO: 3911460 - RNA, 20 nt, Human adenovirus C
gcacaguguauccggugcac

SEQ ID NO: 3911461 - RNA, 18 nt, Human adenovirus C
gcacaucucgggccagga

SEQ ID NO: 3911462 - RNA, 17 nt, Human adenovirus C
gcacaugcgagcccaac

SEQ ID NO: 3911463 - RNA, 14 nt, Human adenovirus C
gcaccaggugcacg

SEQ ID NO: 3911464 - RNA, 15 nt, Human adenovirus C
gcaccaggugcagac

SEQ ID NO: 3911465 - RNA, 23 nt, Human adenovirus C
gcacccaaaaagaagcugcagcu

SEQ ID NO: 3911466 - RNA, 14 nt, Human adenovirus C
gcaccccgcaccgc

SEQ ID NO: 3911467 - RNA, 21 nt, Human adenovirus C
gcaccccuauucgacaccacc

SEQ ID NO: 3911468 - RNA, 15 nt, Human adenovirus C
gcaccgcccgcagca

SEQ ID NO: 3911469 - RNA, 13 nt, Human adenovirus C
gcaccggcggcag

SEQ ID NO: 3911470 - RNA, 19 nt, Human adenovirus C
gcaccgggacugggcgugc

SEQ ID NO: 3911471 - RNA, 18 nt, Human adenovirus C
gcaccguccgaagaaaag

SEQ ID NO: 3911472 - RNA, 21 nt, Human adenovirus C
gcaccguccgaagaaaagcgc

SEQ ID NO: 3911473 - RNA, 19 nt, Human adenovirus C
gcacgaccgucagcggggu

SEQ ID NO: 3911474 - RNA, 18 nt, Human adenovirus C
gcacgacguaaccacaga

SEQ ID NO: 3911475 - RNA, 15 nt, Human adenovirus C
gcacgcuggccagca

SEQ ID NO: 3911476 - RNA, 19 nt, Human adenovirus C
gcacgcuggccagcacgcu

SEQ ID NO: 3911477 - RNA, 14 nt, Human adenovirus C
gcacgucgcaccgg

SEQ ID NO: 3911478 - RNA, 22 nt, Human adenovirus C
gcacugccgcccaacgcgcggc

SEQ ID NO: 3911479 - RNA, 17 nt, Human adenovirus C
gcagaaaccugugcugc

SEQ ID NO: 3911480 - RNA, 18 nt, Human adenovirus C
gcagaauaagccacaccc

SEQ ID NO: 3911481 - RNA, 20 nt, Human adenovirus C
gcagacccugcgaguguggc

SEQ ID NO: 3911482 - RNA, 14 nt, Human adenovirus C
gcagaccguggacg

SEQ ID NO: 3911483 - RNA, 16 nt, Human adenovirus C
gcagacgacagcagcg

SEQ ID NO: 3911484 - RNA, 16 nt, Human adenovirus C
gcagagcgacugcgcc

SEQ ID NO: 3911485 - RNA, 19 nt, Human adenovirus C
gcagaggcggccgcccuug

SEQ ID NO: 3911486 - RNA, 16 nt, Human adenovirus C
gcagauguuggccaac

SEQ ID NO: 3911487 - RNA, 19 nt, Human adenovirus C
gcagcaaugccuggaggag

SEQ ID NO: 3911488 - RNA, 13 nt, Human adenovirus C
gcagcacagcacc

SEQ ID NO: 3911489 - RNA, 15 nt, Human adenovirus C
gcagcacaggccaga

SEQ ID NO: 3911490 - RNA, 18 nt, Human adenovirus C
gcagcagccgcaggccaa

SEQ ID NO: 3911491 - RNA, 13 nt, Human adenovirus C
gcagcaggaggag

SEQ ID NO: 3911492 - RNA, 14 nt, Human adenovirus C
gcagcaggaggagg

SEQ ID NO: 3911493 - RNA, 10 nt, Human adenovirus C
gcagccacag

SEQ ID NO: 3911494 - RNA, 16 nt, Human adenovirus C
gcagccaccgcccgcg

SEQ ID NO: 3911495 - RNA, 19 nt, Human adenovirus C
gcagccgcgggcccuugcu

SEQ ID NO: 3911496 - RNA, 17 nt, Human adenovirus C
gcagccggugggcccgu

SEQ ID NO: 3911497 - RNA, 16 nt, Human adenovirus C
gcagccucgucacugu

SEQ ID NO: 3911498 - RNA, 17 nt, Human adenovirus C
gcagcgccagugcgcca

SEQ ID NO: 3911499 - RNA, 23 nt, Human adenovirus C
gcagcggcaagagcaagagcagc

SEQ ID NO: 3911500 - RNA, 22 nt, Human adenovirus C
gcagcggcagacaugcagggca

SEQ ID NO: 3911501 - RNA, 23 nt, Human adenovirus C
gcagcggcagacaugcagggcac

SEQ ID NO: 3911502 - RNA, 16 nt, Human adenovirus C
gcagcggguggcgguc

SEQ ID NO: 3911503 - RNA, 19 nt, Human adenovirus C
gcagcgugagcgcgcgcag

SEQ ID NO: 3911504 - RNA, 16 nt, Human adenovirus C
gcagcuggcgcgcugg

SEQ ID NO: 3911505 - RNA, 22 nt, Human adenovirus C
gcagcuguuggaucugcgccag

SEQ ID NO: 3911506 - RNA, 12 nt, Human adenovirus C
gcaggacccagg

SEQ ID NO: 3911507 - RNA, 17 nt, Human adenovirus C
gcaggagcgcugggcgu

SEQ ID NO: 3911508 - RNA, 17 nt, Human adenovirus C
gcaggaggaagccaggc

SEQ ID NO: 3911509 - RNA, 12 nt, Human adenovirus C
gcaggcagaacg

SEQ ID NO: 3911510 - RNA, 15 nt, Human adenovirus C
gcaggcggccgcugc

SEQ ID NO: 3911511 - RNA, 14 nt, Human adenovirus C
gcagggccagcuga

SEQ ID NO: 3911512 - RNA, 14 nt, Human adenovirus C
acacguccuccaug

SEQ ID NO: 3911513 - RNA, 20 nt, Human adenovirus C
acacugcagcaggugcugcc

SEQ ID NO: 3911514 - RNA, 14 nt, Human adenovirus C
acacuggauggccu

SEQ ID NO: 3911515 - RNA, 22 nt, Human adenovirus C
acagaagcaccauguccuuggg

SEQ ID NO: 3911516 - RNA, 19 nt, Human adenovirus C
acagagggcauggagacac

SEQ ID NO: 3911517 - RNA, 22 nt, Human adenovirus C
acagagggcugccugcacuucc

SEQ ID NO: 3911518 - RNA, 20 nt, Human adenovirus C
acagcagcggucacacagaa

SEQ ID NO: 3911519 - RNA, 15 nt, Human adenovirus C
acagcaggaggaagc

SEQ ID NO: 3911520 - RNA, 17 nt, Human adenovirus C
acagccccuacugcacc

SEQ ID NO: 3911521 - RNA, 20 nt, Human adenovirus C
acagccugcaaagggcccug

SEQ ID NO: 3911522 - RNA, 20 nt, Human adenovirus C
acaggucucugcgcucccuc

SEQ ID NO: 3911523 - RNA, 22 nt, Human adenovirus C
acagucuuccaaggugaaaauc

SEQ ID NO: 3911524 - RNA, 20 nt, Human adenovirus C
acaguguauccggugcacuu

SEQ ID NO: 3911525 - RNA, 20 nt, Human adenovirus C
acaucauuuugcugccagga

SEQ ID NO: 3911526 - RNA, 23 nt, Human adenovirus C
acaugcacaucucgggccaggac

SEQ ID NO: 3911527 - RNA, 18 nt, Human adenovirus C
acauguggugguuuucca

SEQ ID NO: 3911528 - RNA, 13 nt, Human adenovirus C
acauucccagcug

SEQ ID NO: 3911529 - RNA, 19 nt, Human adenovirus C
acauugcuuucagggacaa

SEQ ID NO: 3911530 - RNA, 20 nt, Human adenovirus C
accaaccuggaccggcuggu

SEQ ID NO: 3911531 - RNA, 22 nt, Human adenovirus C
accacccuacuuucccagugcc

SEQ ID NO: 3911532 - RNA, 19 nt, Human adenovirus C
accacuaccggcaaccgcc

SEQ ID NO: 3911533 - RNA, 15 nt, Human adenovirus C
accacucgacacggc

SEQ ID NO: 3911534 - RNA, 16 nt, Human adenovirus C
accagcaugaagggca

SEQ ID NO: 3911535 - RNA, 11 nt, Human adenovirus C
accagccacaa

SEQ ID NO: 3911536 - RNA, 20 nt, Human adenovirus C
accaggacgacgcagaggca

SEQ ID NO: 3911537 - RNA, 19 nt, Human adenovirus C
accaguuggaggaguggcu

SEQ ID NO: 3911538 - RNA, 15 nt, Human adenovirus C
accaucgcgcccaca

SEQ ID NO: 3911539 - RNA, 14 nt, Human adenovirus C
accauuuuugcccu

SEQ ID NO: 3911540 - RNA, 21 nt, Human adenovirus C
acccaaaaagaagcugcagcu

SEQ ID NO: 3911541 - RNA, 16 nt, Human adenovirus C
acccacccaaagcaga

SEQ ID NO: 3911542 - RNA, 14 nt, Human adenovirus C
acccacccagcgcc

SEQ ID NO: 3911543 - RNA, 17 nt, Human adenovirus C
acccagcacucggcaga

SEQ ID NO: 3911544 - RNA, 21 nt, Human adenovirus C
acccagcacucggcagaaaca

SEQ ID NO: 3911545 - RNA, 16 nt, Human adenovirus C
accccccacccuugcc

SEQ ID NO: 3911546 - RNA, 21 nt, Human adenovirus C
acccgcccgcgccugcugggc

SEQ ID NO: 3911547 - RNA, 13 nt, Human adenovirus C
acccuccucaccu

SEQ ID NO: 3911548 - RNA, 17 nt, Human adenovirus C
acccuccucaccugccg

SEQ ID NO: 3911549 - RNA, 23 nt, Human adenovirus C
acccuuauccucaucugcagccu

SEQ ID NO: 3911550 - RNA, 16 nt, Human adenovirus C
acccuuccaggagggc

SEQ ID NO: 3911551 - RNA, 13 nt, Human adenovirus C
accgcccgcggga

SEQ ID NO: 3911552 - RNA, 16 nt, Human adenovirus C
accgcgcgcccugggg

SEQ ID NO: 3911553 - RNA, 17 nt, Human adenovirus C
accgcgcgcccuggggc

SEQ ID NO: 3911554 - RNA, 15 nt, Human adenovirus C
accgcucccuggucu

SEQ ID NO: 3911555 - RNA, 22 nt, Human adenovirus C
accggcacuucuucuucuccuu

SEQ ID NO: 3911556 - RNA, 21 nt, Human adenovirus C
accgggguacccaacuccaug

SEQ ID NO: 3911557 - RNA, 17 nt, Human adenovirus C
accgucaagaaaaacac

SEQ ID NO: 3911558 - RNA, 18 nt, Human adenovirus C
accguucgcacuggggcg

SEQ ID NO: 3911559 - RNA, 15 nt, Human adenovirus C
accuaaaugccaacc

SEQ ID NO: 3911560 - RNA, 20 nt, Human adenovirus C
accuaucaccgucacccagc

SEQ ID NO: 3911561 - RNA, 12 nt, Human adenovirus C
accucagcgccu

SEQ ID NO: 3911562 - RNA, 13 nt, Human adenovirus C
accucaggcacca

SEQ ID NO: 3911563 - RNA, 14 nt, Human adenovirus C
accucauggaggcu

SEQ ID NO: 3911564 - RNA, 22 nt, Human adenovirus C
accuccuccuccugccaggcuc

SEQ ID NO: 3911565 - RNA, 15 nt, Human adenovirus C
accucgaccacugcc

SEQ ID NO: 3911566 - RNA, 23 nt, Human adenovirus C
accugaacgggguguuugacaug

SEQ ID NO: 3911567 - RNA, 17 nt, Human adenovirus C
accugagccccgggcug

SEQ ID NO: 3911568 - RNA, 19 nt, Human adenovirus C
accugagccccgggcuggu

SEQ ID NO: 3911569 - RNA, 12 nt, Human adenovirus C
accugagccuuu

SEQ ID NO: 3911570 - RNA, 21 nt, Human adenovirus C
accugagccuuugcgccuuca

SEQ ID NO: 3911571 - RNA, 16 nt, Human adenovirus C
accugaggacuaccac

SEQ ID NO: 3911572 - RNA, 16 nt, Human adenovirus C
accugccagacaagcu

SEQ ID NO: 3911573 - RNA, 23 nt, Human adenovirus C
accugccuccccccgcugacacc

SEQ ID NO: 3911574 - RNA, 14 nt, Human adenovirus C
accugcgcugggcc

SEQ ID NO: 3911575 - RNA, 21 nt, Human adenovirus C
accugcucggacggcaacugu

SEQ ID NO: 3911576 - RNA, 11 nt, Human adenovirus C
accugcuggau

SEQ ID NO: 3911577 - RNA, 23 nt, Human adenovirus C
accugggcuggcgguggcacccg

SEQ ID NO: 3911578 - RNA, 21 nt, Human adenovirus C
accuguguggaagccuggacc

SEQ ID NO: 3911579 - RNA, 16 nt, Human adenovirus C
accuucgccccaggcu

SEQ ID NO: 3911580 - RNA, 15 nt, Human adenovirus C
accuuuccgccgcca

SEQ ID NO: 3911581 - RNA, 19 nt, Human adenovirus C
acgaagccuuccauccaga

SEQ ID NO: 3911582 - RNA, 12 nt, Human adenovirus C
acgagccagagg

SEQ ID NO: 3911583 - RNA, 14 nt, Human adenovirus C
acgagccagaggac

SEQ ID NO: 3911584 - RNA, 18 nt, Human adenovirus C
acgaggaggaggagauga

SEQ ID NO: 3911585 - RNA, 16 nt, Human adenovirus C
acgaucggcaggcuca

SEQ ID NO: 3911586 - RNA, 22 nt, Human adenovirus C
acgauguaaaguuccaagaagc

SEQ ID NO: 3911587 - RNA, 12 nt, Human adenovirus C
acgccaccuucu

SEQ ID NO: 3911588 - RNA, 15 nt, Human adenovirus C
acgccaucaucucug

SEQ ID NO: 3911589 - RNA, 20 nt, Human adenovirus C
acgcccggugagcgcuccac

SEQ ID NO: 3911590 - RNA, 19 nt, Human adenovirus C
acgccucggaguaccugag

SEQ ID NO: 3911591 - RNA, 18 nt, Human adenovirus C
acgcgcagcccgugggcu

SEQ ID NO: 3911592 - RNA, 23 nt, Human adenovirus C
acgcgccaaccgcgguugugcag

SEQ ID NO: 3911593 - RNA, 14 nt, Human adenovirus C
acgcgcccuggagg

SEQ ID NO: 3911594 - RNA, 22 nt, Human adenovirus C
acgcgcgaggcguacgugccgc

SEQ ID NO: 3911595 - RNA, 14 nt, Human adenovirus C
acgcggcagccgcg

SEQ ID NO: 3911596 - RNA, 23 nt, Human adenovirus C
acgcguuccggcagcagccgcag

SEQ ID NO: 3911597 - RNA, 14 nt, Human adenovirus C
acgcucuggccggu

SEQ ID NO: 3911598 - RNA, 16 nt, Human adenovirus C
acgcugcccgagggca

SEQ ID NO: 3911599 - RNA, 20 nt, Human adenovirus C
acgcuggaagacgcggaggc

SEQ ID NO: 3911600 - RNA, 15 nt, Human adenovirus C
acgcuggaccugccu

SEQ ID NO: 3911601 - RNA, 13 nt, Human adenovirus C
acgcuggccagca

SEQ ID NO: 3911602 - RNA, 23 nt, Human adenovirus C
acgcuuguggcgcgcgaggaggu

SEQ ID NO: 3911603 - RNA, 12 nt, Human adenovirus C
acggacaguggc

SEQ ID NO: 3911604 - RNA, 16 nt, Human adenovirus C
acggacgacuggcgcc

SEQ ID NO: 3911605 - RNA, 19 nt, Human adenovirus C
acggccugguaggcgcagc

SEQ ID NO: 3911606 - RNA, 23 nt, Human adenovirus C
acggccugguaggcgcagcaucc

SEQ ID NO: 3911607 - RNA, 19 nt, Human adenovirus C
acggcgacgaggaccugcu

SEQ ID NO: 3911608 - RNA, 22 nt, Human adenovirus C
acggcguccggcucaccaccca

SEQ ID NO: 3911609 - RNA, 16 nt, Human adenovirus C
acgggccagggucaug

SEQ ID NO: 3911610 - RNA, 18 nt, Human adenovirus C
acgggcggcaugcgucgu

SEQ ID NO: 3911611 - RNA, 22 nt, Human adenovirus C
acgguuguuaauuaccugggcg

SEQ ID NO: 3911612 - RNA, 19 nt, Human adenovirus C
acgguuugaggccguccgc

SEQ ID NO: 3911613 - RNA, 17 nt, Human adenovirus C
acgguuuuccuggccaa

SEQ ID NO: 3911614 - RNA, 21 nt, Human adenovirus C
acguccccgguugccucggcg

SEQ ID NO: 3911615 - RNA, 18 nt, Human adenovirus C
acgucgcaccggccgacg

SEQ ID NO: 3911616 - RNA, 17 nt, Human adenovirus C
acgucgccaccgccgcc

SEQ ID NO: 3911617 - RNA, 13 nt, Human adenovirus C
acgucgcgccgca

SEQ ID NO: 3911618 - RNA, 15 nt, Human adenovirus C
acgucuuaaacuggg

SEQ ID NO: 3911619 - RNA, 21 nt, Human adenovirus C
acgugcagaccaaccuggacc

SEQ ID NO: 3911620 - RNA, 14 nt, Human adenovirus C
acgugccgcgggga

SEQ ID NO: 3911621 - RNA, 22 nt, Human adenovirus C
acgugccgcggggacaggagga

SEQ ID NO: 3911622 - RNA, 19 nt, Human adenovirus C
acgugccgggcgaagacgg

SEQ ID NO: 3911623 - RNA, 17 nt, Human adenovirus C
acguggagcucugcaac

SEQ ID NO: 3911624 - RNA, 22 nt, Human adenovirus C
acguggcggccgccgaccuggu

SEQ ID NO: 3911625 - RNA, 21 nt, Human adenovirus C
acuacaccuuucgccagggcu

SEQ ID NO: 3911626 - RNA, 22 nt, Human adenovirus C
acuacccgacgccgaaccacca

SEQ ID NO: 3911627 - RNA, 16 nt, Human adenovirus C
acuaccuugccuacca

SEQ ID NO: 3911628 - RNA, 16 nt, Human adenovirus C
caaauacaaaagcaga

SEQ ID NO: 3911629 - RNA, 19 nt, Human adenovirus C
caaauacaaaagcagacgc

SEQ ID NO: 3911630 - RNA, 17 nt, Human adenovirus C
caaauacuaccucuuug

SEQ ID NO: 3911631 - RNA, 23 nt, Human adenovirus C
caaauauggaacauucccagcug

SEQ ID NO: 3911632 - RNA, 17 nt, Human adenovirus C
caaauccauacacaaau

SEQ ID NO: 3911633 - RNA, 12 nt, Human adenovirus C
caaauccuuuug

SEQ ID NO: 3911634 - RNA, 15 nt, Human adenovirus C
caaaucuucacuucc

SEQ ID NO: 3911635 - RNA, 14 nt, Human adenovirus C
caaauuugaucaaa

SEQ ID NO: 3911636 - RNA, 17 nt, Human adenovirus C
caacaaaaggugguaga

SEQ ID NO: 3911637 - RNA, 15 nt, Human adenovirus C
caacaaucuaugcca

SEQ ID NO: 3911638 - RNA, 11 nt, Human adenovirus C
caacagcagcg

SEQ ID NO: 3911639 - RNA, 15 nt, Human adenovirus C
caacagcgccaaggc

SEQ ID NO: 3911640 - RNA, 15 nt, Human adenovirus C
caacagggucugcca

SEQ ID NO: 3911641 - RNA, 20 nt, Human adenovirus C
caacauaaaagaagcaagca

SEQ ID NO: 3911642 - RNA, 20 nt, Human adenovirus C
caacaugaccaaggacuggu

SEQ ID NO: 3911643 - RNA, 17 nt, Human adenovirus C
caacccuuccaggaggg

SEQ ID NO: 3911644 - RNA, 18 nt, Human adenovirus C
caaccgcgcccaggcggc

SEQ ID NO: 3911645 - RNA, 20 nt, Human adenovirus C
caaccguagaugggacacca

SEQ ID NO: 3911646 - RNA, 19 nt, Human adenovirus C
caaccuaaaggagcugcag

SEQ ID NO: 3911647 - RNA, 21 nt, Human adenovirus C
caaccuccgcuccucaggcgc

SEQ ID NO: 3911648 - RNA, 19 nt, Human adenovirus C
caacgagcgcuccguggcc

SEQ ID NO: 3911649 - RNA, 16 nt, Human adenovirus C
caacgcugguggcuac

SEQ ID NO: 3911650 - RNA, 21 nt, Human adenovirus C
caacggacuaucgcaacacca

SEQ ID NO: 3911651 - RNA, 16 nt, Human adenovirus C
caacgugccgcgggga

SEQ ID NO: 3911652 - RNA, 14 nt, Human adenovirus C
caacucgcugcugc

SEQ ID NO: 3911653 - RNA, 16 nt, Human adenovirus C
caacuggcaaagcaca

SEQ ID NO: 3911654 - RNA, 17 nt, Human adenovirus C
caagaaaaacaccacca

SEQ ID NO: 3911655 - RNA, 19 nt, Human adenovirus C
caagaacaagagcugaaaa

SEQ ID NO: 3911656 - RNA, 12 nt, Human adenovirus C
caagaccaggac

SEQ ID NO: 3911657 - RNA, 15 nt, Human adenovirus C
caagagcaagagcag

SEQ ID NO: 3911658 - RNA, 18 nt, Human adenovirus C
caagagcaagagcagcgg

SEQ ID NO: 3911659 - RNA, 15 nt, Human adenovirus C
caagcacacagacca

SEQ ID NO: 3911660 - RNA, 20 nt, Human adenovirus C
caagccgcucauggcgcagc

SEQ ID NO: 3911661 - RNA, 16 nt, Human adenovirus C
caaggaaauucccacg

SEQ ID NO: 3911662 - RNA, 16 nt, Human adenovirus C
caaggccauggcaccg

SEQ ID NO: 3911663 - RNA, 20 nt, Human adenovirus C
caaggccggaaaccucaccu

SEQ ID NO: 3911664 - RNA, 15 nt, Human adenovirus C
caaggccugcagacc

SEQ ID NO: 3911665 - RNA, 16 nt, Human adenovirus C
caaggccugcccacca

SEQ ID NO: 3911666 - RNA, 19 nt, Human adenovirus C
caaggccugcccaccaccc

SEQ ID NO: 3911667 - RNA, 13 nt, Human adenovirus C
caaggccuggaac

SEQ ID NO: 3911668 - RNA, 23 nt, Human adenovirus C
caaggccuggaacagcagcacag

SEQ ID NO: 3911669 - RNA, 21 nt, Human adenovirus C
caaguacuagcuacuguagcu

SEQ ID NO: 3911670 - RNA, 21 nt, Human adenovirus C
caagucgggcggggggaccaa

SEQ ID NO: 3911671 - RNA, 16 nt, Human adenovirus C
caaucaaucagccucg

SEQ ID NO: 3911672 - RNA, 13 nt, Human adenovirus C
caaugacuacagc

SEQ ID NO: 3911673 - RNA, 12 nt, Human adenovirus C
caauugcagaaa

SEQ ID NO: 3911674 - RNA, 22 nt, Human adenovirus C
cacaaccauccgcggcagcucg

SEQ ID NO: 3911675 - RNA, 14 nt, Human adenovirus C
cacaacgcgcagcc

SEQ ID NO: 3911676 - RNA, 14 nt, Human adenovirus C
cacaagccccacug

SEQ ID NO: 3911677 - RNA, 17 nt, Human adenovirus C
cacaagcucgccugcgc

SEQ ID NO: 3911678 - RNA, 19 nt, Human adenovirus C
cacaagcucgccugcgcca

SEQ ID NO: 3911679 - RNA, 23 nt, Human adenovirus C
cacacaaccuucucggcuucaac

SEQ ID NO: 3911680 - RNA, 19 nt, Human adenovirus C
cacaccucgaccacugccg

SEQ ID NO: 3911681 - RNA, 24 nt, Human adenovirus C
cacaccucguaauaaccuuaaucc

SEQ ID NO: 3911682 - RNA, 20 nt, Human adenovirus C
cacagaacaugaaaagcuua

SEQ ID NO: 3911683 - RNA, 15 nt, Human adenovirus C
cacagaagcaaaggc

SEQ ID NO: 3911684 - RNA, 23 nt, Human adenovirus C
cacagagggcauggagacacaaa

SEQ ID NO: 3911685 - RNA, 21 nt, Human adenovirus C
cacagccugcaaagggcccug

SEQ ID NO: 3911686 - RNA, 18 nt, Human adenovirus C
cacaggguugcagcacug

SEQ ID NO: 3911687 - RNA, 14 nt, Human adenovirus C
cacaguaacugcag

SEQ ID NO: 3911688 - RNA, 15 nt, Human adenovirus C
caccaccaguagcac

SEQ ID NO: 3911689 - RNA, 13 nt, Human adenovirus C
caccaccgccucc

SEQ ID NO: 3911690 - RNA, 15 nt, Human adenovirus C
caccaccgccuccac

SEQ ID NO: 3911691 - RNA, 12 nt, Human adenovirus C
caccaccucccg

SEQ ID NO: 3911692 - RNA, 19 nt, Human adenovirus C
caccacugaaacuuuugcu

SEQ ID NO: 3911693 - RNA, 11 nt, Human adenovirus C
caccaugcgcg

SEQ ID NO: 3911694 - RNA, 22 nt, Human adenovirus C
caccaugcgcgagggacaggcu

SEQ ID NO: 3911695 - RNA, 20 nt, Human adenovirus C
cacccaaugguuuccaagaa

SEQ ID NO: 3911696 - RNA, 17 nt, Human adenovirus C
cacccaccgugcagcug

SEQ ID NO: 3911697 - RNA, 19 nt, Human adenovirus C
cacccaguaccgcagcugg

SEQ ID NO: 3911698 - RNA, 14 nt, Human adenovirus C
caccccgcaccgcu

SEQ ID NO: 3911699 - RNA, 19 nt, Human adenovirus C
cacccgucccaucgcgccc

SEQ ID NO: 3911700 - RNA, 17 nt, Human adenovirus C
cacccuacuuucccagu

SEQ ID NO: 3911701 - RNA, 18 nt, Human adenovirus C
cacccugcgucgcaacca

SEQ ID NO: 3911702 - RNA, 22 nt, Human adenovirus C
caccgccgccgacccggcacug

SEQ ID NO: 3911703 - RNA, 13 nt, Human adenovirus C
caccggcggcagc

SEQ ID NO: 3911704 - RNA, 15 nt, Human adenovirus C
caccggcggcagcgg

SEQ ID NO: 3911705 - RNA, 20 nt, Human adenovirus C
caccggggcgcgcugcggcu

SEQ ID NO: 3911706 - RNA, 22 nt, Human adenovirus C
caccgguugcugcgcccacacc

SEQ ID NO: 3911707 - RNA, 23 nt, Human adenovirus C
caccgucaagaaaaacaccacca

SEQ ID NO: 3911708 - RNA, 23 nt, Human adenovirus C
caccuccuuuccuuccucccaac

SEQ ID NO: 3911709 - RNA, 15 nt, Human adenovirus C
caccucgaccacugc

SEQ ID NO: 3911710 - RNA, 18 nt, Human adenovirus C
caccugucgucagcgcca

SEQ ID NO: 3911711 - RNA, 20 nt, Human adenovirus C
caccuuuuguuccaccgcuc

SEQ ID NO: 3911712 - RNA, 19 nt, Human adenovirus C
cacgaaaaccgccucgggc

SEQ ID NO: 3911713 - RNA, 17 nt, Human adenovirus C
cacgagaaggugcuggc

SEQ ID NO: 3911714 - RNA, 14 nt, Human adenovirus C
cacgagcugcuucc

SEQ ID NO: 3911715 - RNA, 18 nt, Human adenovirus C
cacgaucuuggccuugcu

SEQ ID NO: 3911716 - RNA, 21 nt, Human adenovirus C
cacgccuuugccaacuggccc

SEQ ID NO: 3911717 - RNA, 13 nt, Human adenovirus C
cacgcugcccgag

SEQ ID NO: 3911718 - RNA, 13 nt, Human adenovirus C
cacgcuggccagc

SEQ ID NO: 3911719 - RNA, 18 nt, Human adenovirus C
cacgcuugaagacaaagg

SEQ ID NO: 3911720 - RNA, 18 nt, Human adenovirus C
cacggcguggccuucccc

SEQ ID NO: 3911721 - RNA, 14 nt, Human adenovirus C
cacggcucgcgccc

SEQ ID NO: 3911722 - RNA, 22 nt, Human adenovirus C
cacgguaaagaccccgggcagc

SEQ ID NO: 3911723 - RNA, 18 nt, Human adenovirus C
cacgguguaagcuucuau

SEQ ID NO: 3911724 - RNA, 19 nt, Human adenovirus C
cacgguuaacuccuccucc

SEQ ID NO: 3911725 - RNA, 20 nt, Human adenovirus C
cacguggccaucauaccaca

SEQ ID NO: 3911726 - RNA, 16 nt, Human adenovirus C
cacuaaagcaaggccu

SEQ ID NO: 3911727 - RNA, 21 nt, Human adenovirus C
cacuacaccuuucgccagggc

SEQ ID NO: 3911728 - RNA, 19 nt, Human adenovirus C
cacuaccgcgcgcccuggg

SEQ ID NO: 3911729 - RNA, 19 nt, Human adenovirus C
cacuaguauugccacugcc

SEQ ID NO: 3911730 - RNA, 21 nt, Human adenovirus C
cacuaguauugccacugccac

SEQ ID NO: 3911731 - RNA, 23 nt, Human adenovirus C
cacuccugacguaaccugcggcu

SEQ ID NO: 3911732 - RNA, 13 nt, Human adenovirus C
cacuccugcgccg

SEQ ID NO: 3911733 - RNA, 22 nt, Human adenovirus C
cacucgcccuacuuccgcagcc

SEQ ID NO: 3911734 - RNA, 12 nt, Human adenovirus C
cacucgcuccag

SEQ ID NO: 3911735 - RNA, 13 nt, Human adenovirus C
cacugccgccgcc

SEQ ID NO: 3911736 - RNA, 17 nt, Human adenovirus C
cacuggaacccgccgcc

SEQ ID NO: 3911737 - RNA, 16 nt, Human adenovirus C
cacuguaccgcgaggc

SEQ ID NO: 3911738 - RNA, 18 nt, Human adenovirus C
cacugugguacuucccag

SEQ ID NO: 3911739 - RNA, 16 nt, Human adenovirus C
cacuguuacucagcca

SEQ ID NO: 3911740 - RNA, 22 nt, Human adenovirus C
cacuguuggauguggacgccua

SEQ ID NO: 3911741 - RNA, 14 nt, Human adenovirus C
cacuuacuggcugc

SEQ ID NO: 3911742 - RNA, 16 nt, Human adenovirus C
cacuuacuggcugcag

SEQ ID NO: 3911743 - RNA, 15 nt, Human adenovirus C
cagaaacuuccagcc

SEQ ID NO: 3911744 - RNA, 18 nt, Human adenovirus C
ggcaacccuuccaggagg

SEQ ID NO: 3911745 - RNA, 17 nt, Human adenovirus C
ggcaagauaucggcacc

SEQ ID NO: 3911746 - RNA, 20 nt, Human adenovirus C
ggcaccaggugcacgcgcca

SEQ ID NO: 3911747 - RNA, 22 nt, Human adenovirus C
ggcacccaaaaagaagcugcag

SEQ ID NO: 3911748 - RNA, 19 nt, Human adenovirus C
ggcacccgcgcgcgcuggc

SEQ ID NO: 3911749 - RNA, 16 nt, Human adenovirus C
ggcagaaacagagggc

SEQ ID NO: 3911750 - RNA, 17 nt, Human adenovirus C
ggcagaggcggcgcugc

SEQ ID NO: 3911751 - RNA, 20 nt, Human adenovirus C
ggcagcaaugccuggaggag

SEQ ID NO: 3911752 - RNA, 23 nt, Human adenovirus C
ggcagcagcggaugauccuccag

SEQ ID NO: 3911753 - RNA, 20 nt, Human adenovirus C
ggcagccaggugacacuaac

SEQ ID NO: 3911754 - RNA, 14 nt, Human adenovirus C
ggcagccgcggcaa

SEQ ID NO: 3911755 - RNA, 14 nt, Human adenovirus C
ggcagccuggaggc

SEQ ID NO: 3911756 - RNA, 13 nt, Human adenovirus C
ggcagcggcagca

SEQ ID NO: 3911757 - RNA, 12 nt, Human adenovirus C
ggcagcgggugg

SEQ ID NO: 3911758 - RNA, 15 nt, Human adenovirus C
ggcagcuggggccgg

SEQ ID NO: 3911759 - RNA, 22 nt, Human adenovirus C
ggcagcuggggccggaccuggg

SEQ ID NO: 3911760 - RNA, 17 nt, Human adenovirus C
ggcaggacccuggugcu

SEQ ID NO: 3911761 - RNA, 23 nt, Human adenovirus C
ggcaggaggacacgggcagccug

SEQ ID NO: 3911762 - RNA, 16 nt, Human adenovirus C
ggcagucugcagcgcu

SEQ ID NO: 3911763 - RNA, 15 nt, Human adenovirus C
ggcauccgcgccgca

SEQ ID NO: 3911764 - RNA, 11 nt, Human adenovirus C
ggcaugacuuc

SEQ ID NO: 3911765 - RNA, 14 nt, Human adenovirus C
ggccaaccaggcag

SEQ ID NO: 3911766 - RNA, 20 nt, Human adenovirus C
ggccaagaacaagagcugaa

SEQ ID NO: 3911767 - RNA, 18 nt, Human adenovirus C
ggccacacccggcgccag

SEQ ID NO: 3911768 - RNA, 12 nt, Human adenovirus C
ggccagcuguug

SEQ ID NO: 3911769 - RNA, 17 nt, Human adenovirus C
ggccagcuguuggggug

SEQ ID NO: 3911770 - RNA, 20 nt, Human adenovirus C
ggccagcuguuggggugagu

SEQ ID NO: 3911771 - RNA, 18 nt, Human adenovirus C
ggccaggacgccucggag

SEQ ID NO: 3911772 - RNA, 14 nt, Human adenovirus C
ggccagggugcgcu

SEQ ID NO: 3911773 - RNA, 18 nt, Human adenovirus C
ggccaguguuugagcaca

SEQ ID NO: 3911774 - RNA, 15 nt, Human adenovirus C
ggccaugagcugcga

SEQ ID NO: 3911775 - RNA, 14 nt, Human adenovirus C
ggccaugcaucugu

SEQ ID NO: 3911776 - RNA, 21 nt, Human adenovirus C
ggcccgaugaggccggccugg

SEQ ID NO: 3911777 - RNA, 20 nt, Human adenovirus C
ggcccgcggugaugccuuug

SEQ ID NO: 3911778 - RNA, 21 nt, Human adenovirus C
ggcccuuggcgcgcagcuugc

SEQ ID NO: 3911779 - RNA, 17 nt, Human adenovirus C
ggccgaaaacagggcca

SEQ ID NO: 3911780 - RNA, 19 nt, Human adenovirus C
ggccgaacacucgugcugg

SEQ ID NO: 3911781 - RNA, 21 nt, Human adenovirus C
ggccgcgauguuuagcugcac

SEQ ID NO: 3911782 - RNA, 22 nt, Human adenovirus C
ggccgcgauguuuagcugcacg

SEQ ID NO: 3911783 - RNA, 18 nt, Human adenovirus C
ggccgcggucgcucacau

SEQ ID NO: 3911784 - RNA, 22 nt, Human adenovirus C
ggccgcgucaugcacgcagcac

SEQ ID NO: 3911785 - RNA, 16 nt, Human adenovirus C
ggccggacaggccgcg

SEQ ID NO: 3911786 - RNA, 14 nt, Human adenovirus C
ggccggcaacgcca

SEQ ID NO: 3911787 - RNA, 12 nt, Human adenovirus C
ggccgggcaguu

SEQ ID NO: 3911788 - RNA, 13 nt, Human adenovirus C
ggccucuucuucu

SEQ ID NO: 3911789 - RNA, 14 nt, Human adenovirus C
ggccucuucuucuu

SEQ ID NO: 3911790 - RNA, 16 nt, Human adenovirus C
ggccugaaccgcgagc

SEQ ID NO: 3911791 - RNA, 19 nt, Human adenovirus C
ggccugcaaaauuuccaac

SEQ ID NO: 3911792 - RNA, 23 nt, Human adenovirus C
ggccuggcgcaaaaucuccugca

SEQ ID NO: 3911793 - RNA, 16 nt, Human adenovirus C
ggccugguaggcgcag

SEQ ID NO: 3911794 - RNA, 23 nt, Human adenovirus C
ggccuugcggcagggcgcuguca

SEQ ID NO: 3911795 - RNA, 20 nt, Human adenovirus C
ggcgaaaagcguccgcggcc

SEQ ID NO: 3911796 - RNA, 20 nt, Human adenovirus C
ggcgaccccucauaaacacg

SEQ ID NO: 3911797 - RNA, 15 nt, Human adenovirus C
ggcgaggcgcgccgc

SEQ ID NO: 3911798 - RNA, 19 nt, Human adenovirus C
ggcgauccuaacucugcag

SEQ ID NO: 3911799 - RNA, 13 nt, Human adenovirus C
ggcgauggagcgc

SEQ ID NO: 3911800 - RNA, 14 nt, Human adenovirus C
ggcgauggagcgca

SEQ ID NO: 3911801 - RNA, 15 nt, Human adenovirus C
ggcgauuggcgccgu

SEQ ID NO: 3911802 - RNA, 23 nt, Human adenovirus C
ggcgcacucacagaccugggcca

SEQ ID NO: 3911803 - RNA, 17 nt, Human adenovirus C
ggcgcaggcggcggcaa

SEQ ID NO: 3911804 - RNA, 20 nt, Human adenovirus C
ggcgcaggguccucgucagc

SEQ ID NO: 3911805 - RNA, 20 nt, Human adenovirus C
ggcgcaguaguccaggguuu

SEQ ID NO: 3911806 - RNA, 17 nt, Human adenovirus C
ggcgccauccaccacca

SEQ ID NO: 3911807 - RNA, 14 nt, Human adenovirus C
ggcgcggcggcugc

SEQ ID NO: 3911808 - RNA, 13 nt, Human adenovirus C
ggcgcugcagagc

SEQ ID NO: 3911809 - RNA, 18 nt, Human adenovirus C
ggcgcugcagagccagcc

SEQ ID NO: 3911810 - RNA, 18 nt, Human adenovirus C
ggcgcuggguucccccuu

SEQ ID NO: 3911811 - RNA, 18 nt, Human adenovirus C
ggcggcaggagcagagcc

SEQ ID NO: 3911812 - RNA, 18 nt, Human adenovirus C
ggcggccaugcgggccgc

SEQ ID NO: 3911813 - RNA, 17 nt, Human adenovirus C
ggcggcgacgacggcgc

SEQ ID NO: 3911814 - RNA, 20 nt, Human adenovirus C
ggcggcggaguuuggccgua

SEQ ID NO: 3911815 - RNA, 14 nt, Human adenovirus C
ggcggcggcaggag

SEQ ID NO: 3911816 - RNA, 13 nt, Human adenovirus C
ggcggcggcccug

SEQ ID NO: 3911817 - RNA, 17 nt, Human adenovirus C
ggcggcuauuaccacca

SEQ ID NO: 3911818 - RNA, 17 nt, Human adenovirus C
ggcgggcggugggccgc

SEQ ID NO: 3911819 - RNA, 15 nt, Human adenovirus C
ggcggggaccacaga

SEQ ID NO: 3911820 - RNA, 18 nt, Human adenovirus C
ggcggucccacagcucgg

SEQ ID NO: 3911821 - RNA, 17 nt, Human adenovirus C
ggcggugcgggcggcgc

SEQ ID NO: 3911822 - RNA, 15 nt, Human adenovirus C
ggcgucgaugacuug

SEQ ID NO: 3911823 - RNA, 13 nt, Human adenovirus C
ggcgugcuggaca

SEQ ID NO: 3911824 - RNA, 14 nt, Human adenovirus C
ggcguggccuuccc

SEQ ID NO: 3911825 - RNA, 15 nt, Human adenovirus C
ggcguguggcagcaa

SEQ ID NO: 3911826 - RNA, 19 nt, Human adenovirus C
ggcucgcguccaggccagc

SEQ ID NO: 3911827 - RNA, 18 nt, Human adenovirus C
ggcugcucugcucggaag

SEQ ID NO: 3911828 - RNA, 17 nt, Human adenovirus C
ggcuggcacgggcagcg

SEQ ID NO: 3911829 - RNA, 20 nt, Human adenovirus C
ggcuucuacauuccagaaag

SEQ ID NO: 3911830 - RNA, 22 nt, Human adenovirus C
ggcuuucgcuguacggcaguag

SEQ ID NO: 3911831 - RNA, 21 nt, Human adenovirus C
gggaagagcuggaagaaccau

SEQ ID NO: 3911832 - RNA, 13 nt, Human adenovirus C
gggacaccacugg

SEQ ID NO: 3911833 - RNA, 21 nt, Human adenovirus C
gggagaucagcugggaagaaa

SEQ ID NO: 3911834 - RNA, 19 nt, Human adenovirus C
gggagcggggggcuucuga

SEQ ID NO: 3911835 - RNA, 16 nt, Human adenovirus C
gggauagagagccuag

SEQ ID NO: 3911836 - RNA, 19 nt, Human adenovirus C
gggauggcgcaggcggcgg

SEQ ID NO: 3911837 - RNA, 19 nt, Human adenovirus C
gggauuugaggugcccgag

SEQ ID NO: 3911838 - RNA, 16 nt, Human adenovirus C
gggcaggagcuggugc

SEQ ID NO: 3911839 - RNA, 18 nt, Human adenovirus C
gggccaggucggcgacaa

SEQ ID NO: 3911840 - RNA, 16 nt, Human adenovirus C
gggcccauuacagugu

SEQ ID NO: 3911841 - RNA, 19 nt, Human adenovirus C
gggccccaagccgacgcgc

SEQ ID NO: 3911842 - RNA, 14 nt, Human adenovirus C
gggcccccggaggu

SEQ ID NO: 3911843 - RNA, 23 nt, Human adenovirus C
gggccgcucgaaggcuggccgcg

SEQ ID NO: 3911844 - RNA, 19 nt, Human adenovirus C
gggcgagguauucagcuca

SEQ ID NO: 3911845 - RNA, 19 nt, Human adenovirus C
gggcgcacucacagaccug

SEQ ID NO: 3911846 - RNA, 15 nt, Human adenovirus C
gggcguagagcuugg

SEQ ID NO: 3911847 - RNA, 13 nt, Human adenovirus C
gggcuagguccag

SEQ ID NO: 3911848 - RNA, 20 nt, Human adenovirus C
gggcucccacaggcgaccgc

SEQ ID NO: 3911849 - RNA, 21 nt, Human adenovirus C
gggcugcucugcucggaagac

SEQ ID NO: 3911850 - RNA, 18 nt, Human adenovirus C
gggcuguacauccugcac

SEQ ID NO: 3911851 - RNA, 14 nt, Human adenovirus C
gggcuucugaggcu

SEQ ID NO: 3911852 - RNA, 15 nt, Human adenovirus C
ggggccggaccuggg

SEQ ID NO: 3911853 - RNA, 19 nt, Human adenovirus C
ggguaucauggcggacgac

SEQ ID NO: 3911854 - RNA, 21 nt, Human adenovirus C
gggugauggugucgcgcucgc

SEQ ID NO: 3911855 - RNA, 19 nt, Human adenovirus C
ggguggugcacgcuggcca

SEQ ID NO: 3911856 - RNA, 14 nt, Human adenovirus C
gggugguggcggug

SEQ ID NO: 3911857 - RNA, 15 nt, Human adenovirus C
gggugguggcggugu

SEQ ID NO: 3911858 - RNA, 22 nt, Human adenovirus C
ggguguucuugcuggucaggca

SEQ ID NO: 3911859 - RNA, 13 nt, Human adenovirus C
gguaacaggaggg

SEQ ID NO: 3911860 - RNA, 22 nt, Human adenovirus C
uauaacucaccugaaaaucaga

SEQ ID NO: 3911861 - RNA, 18 nt, Human adenovirus C
uauaccuuuuuaaugcau

SEQ ID NO: 3911862 - RNA, 18 nt, Human adenovirus C
uauauccacucucucaaa

SEQ ID NO: 3911863 - RNA, 21 nt, Human adenovirus C
uaucagcgccggguggugcac

SEQ ID NO: 3911864 - RNA, 13 nt, Human adenovirus C
uaucccuccgggg

SEQ ID NO: 3911865 - RNA, 15 nt, Human adenovirus C
uaugacacagaaacc

SEQ ID NO: 3911866 - RNA, 15 nt, Human adenovirus C
uaugagcaauucaag

SEQ ID NO: 3911867 - RNA, 20 nt, Human adenovirus C
uaugcaccccgcaccgcucc

SEQ ID NO: 3911868 - RNA, 14 nt, Human adenovirus C
uaugcacugcaggg

SEQ ID NO: 3911869 - RNA, 22 nt, Human adenovirus C
uauggaucuuaugccaggccua

SEQ ID NO: 3911870 - RNA, 13 nt, Human adenovirus C
uauguucccagcc

SEQ ID NO: 3911871 - RNA, 22 nt, Human adenovirus C
uauuuccugaagcaaaaccagg

SEQ ID NO: 3911872 - RNA, 15 nt, Human adenovirus C
ucaaacccagcuuca

SEQ ID NO: 3911873 - RNA, 20 nt, Human adenovirus C
ucaacgcgcgcgcagccucc

SEQ ID NO: 3911874 - RNA, 15 nt, Human adenovirus C
ucaacgcugguggcu

SEQ ID NO: 3911875 - RNA, 19 nt, Human adenovirus C
ucaacggaauccgcgccca

SEQ ID NO: 3911876 - RNA, 15 nt, Human adenovirus C
ucaacuaacauaaac

SEQ ID NO: 3911877 - RNA, 19 nt, Human adenovirus C
ucaagaaaaacaccaccac

SEQ ID NO: 3911878 - RNA, 13 nt, Human adenovirus C
ucaaguacuagcu

SEQ ID NO: 3911879 - RNA, 19 nt, Human adenovirus C
ucaauguuggcacaacaca

SEQ ID NO: 3911880 - RNA, 17 nt, Human adenovirus C
ucacagaccugggccaa

SEQ ID NO: 3911881 - RNA, 13 nt, Human adenovirus C
ucaccacccaggu

SEQ ID NO: 3911882 - RNA, 19 nt, Human adenovirus C
ucaccgguugcugcgccca

SEQ ID NO: 3911883 - RNA, 16 nt, Human adenovirus C
ucaccugaaaaucaga

SEQ ID NO: 3911884 - RNA, 19 nt, Human adenovirus C
ucacgcucgcuugguccug

SEQ ID NO: 3911885 - RNA, 16 nt, Human adenovirus C
ucacugucgcugcaac

SEQ ID NO: 3911886 - RNA, 15 nt, Human adenovirus C
ucacugugcccccca

SEQ ID NO: 3911887 - RNA, 14 nt, Human adenovirus C
ucacuuggugcugg

SEQ ID NO: 3911888 - RNA, 19 nt, Human adenovirus C
ucagacaaugcagaaacac

SEQ ID NO: 3911889 - RNA, 19 nt, Human adenovirus C
ucagagaagaacaugccgc

SEQ ID NO: 3911890 - RNA, 22 nt, Human adenovirus C
ucagccacuuaaaaaaacaaag

SEQ ID NO: 3911891 - RNA, 21 nt, Human adenovirus C
ucagcgcagcggugcagccac

SEQ ID NO: 3911892 - RNA, 15 nt, Human adenovirus C
ucagcgccucccaaa

SEQ ID NO: 3911893 - RNA, 20 nt, Human adenovirus C
ucagcuggggcucgcugugg

SEQ ID NO: 3911894 - RNA, 21 nt, Human adenovirus C
ucaggcgcauguggacgagca

SEQ ID NO: 3911895 - RNA, 12 nt, Human adenovirus C
ucaggcgccgcc

SEQ ID NO: 3911896 - RNA, 17 nt, Human adenovirus C
ucaggcuacuaagaaaa

SEQ ID NO: 3911897 - RNA, 14 nt, Human adenovirus C
ucaguaccaacaga

SEQ ID NO: 3911898 - RNA, 22 nt, Human adenovirus C
ucagugcaacaugaccaaggac

SEQ ID NO: 3911899 - RNA, 22 nt, Human adenovirus C
ucauagauuggacggucugaaa

SEQ ID NO: 3911900 - RNA, 16 nt, Human adenovirus C
ucauauuuccugaagc

SEQ ID NO: 3911901 - RNA, 13 nt, Human adenovirus C
ucaucugcagccu

SEQ ID NO: 3911902 - RNA, 17 nt, Human adenovirus C
ucaugcugcgggguggu

SEQ ID NO: 3911903 - RNA, 19 nt, Human adenovirus C
ucauggcggggaccacaga

SEQ ID NO: 3911904 - RNA, 21 nt, Human adenovirus C
ucauugugcucaacccacaca

SEQ ID NO: 3911905 - RNA, 23 nt, Human adenovirus C
ucauuuuuguuuugcugauuuuu

SEQ ID NO: 3911906 - RNA, 13 nt, Human adenovirus C
uccaagagcuucu

SEQ ID NO: 3911907 - RNA, 14 nt, Human adenovirus C
uccaagauggcuac

SEQ ID NO: 3911908 - RNA, 18 nt, Human adenovirus C
uccacagcggcggcagca

SEQ ID NO: 3911909 - RNA, 14 nt, Human adenovirus C
uccaccggccgugg

SEQ ID NO: 3911910 - RNA, 20 nt, Human adenovirus C
uccacggacgacuggcgcca

SEQ ID NO: 3911911 - RNA, 16 nt, Human adenovirus C
uccagacgggccaggg

SEQ ID NO: 3911912 - RNA, 18 nt, Human adenovirus C
uccagagcgcccuccacc

SEQ ID NO: 3911913 - RNA, 21 nt, Human adenovirus C
uccagaggaccucugcacucu

SEQ ID NO: 3911914 - RNA, 22 nt, Human adenovirus C
uccagcuuauucagcaucaccu

SEQ ID NO: 3911915 - RNA, 14 nt, Human adenovirus C
uccaggcgacgagc

SEQ ID NO: 3911916 - RNA, 22 nt, Human adenovirus C
uccaggcggucccacagcucgg

SEQ ID NO: 3911917 - RNA, 22 nt, Human adenovirus C
uccauagagcagcugaccacuu

SEQ ID NO: 3911918 - RNA, 16 nt, Human adenovirus C
uccauccggcccaggg

SEQ ID NO: 3911919 - RNA, 23 nt, Human adenovirus C
ucccaaaccucagcgccucccaa

SEQ ID NO: 3911920 - RNA, 14 nt, Human adenovirus C
ucccacggcaugcu

SEQ ID NO: 3911921 - RNA, 20 nt, Human adenovirus C
ucccagcugcuacaacaaac

SEQ ID NO: 3911922 - RNA, 16 nt, Human adenovirus C
ucccagggaacaaccc

SEQ ID NO: 3911923 - RNA, 21 nt, Human adenovirus C
ucccaucgcgcccauggcuac

SEQ ID NO: 3911924 - RNA, 18 nt, Human adenovirus C
ucccguagaggagccucc

SEQ ID NO: 3911925 - RNA, 17 nt, Human adenovirus C
ucccuuagaaccaaagu

SEQ ID NO: 3911926 - RNA, 23 nt, Human adenovirus C
uccgcaagcggcaacccuuccag

SEQ ID NO: 3911927 - RNA, 23 nt, Human adenovirus C
uccgccgaacuucauaaccagca

SEQ ID NO: 3911928 - RNA, 15 nt, Human adenovirus C
uccgccgccaacaug

SEQ ID NO: 3911929 - RNA, 16 nt, Human adenovirus C
uccgccguaggcaugc

SEQ ID NO: 3911930 - RNA, 13 nt, Human adenovirus C
uccguccugcagg

SEQ ID NO: 3911931 - RNA, 21 nt, Human adenovirus C
uccguggccuugcaggcgcag

SEQ ID NO: 3911932 - RNA, 21 nt, Human adenovirus C
uccucagcgaugauucgcacc

SEQ ID NO: 3911933 - RNA, 14 nt, Human adenovirus C
uccuccugccaggc

SEQ ID NO: 3911934 - RNA, 18 nt, Human adenovirus C
uccucggagccgcgcucc

SEQ ID NO: 3911935 - RNA, 20 nt, Human adenovirus C
uccucugauaguuacuagcg

SEQ ID NO: 3911936 - RNA, 12 nt, Human adenovirus C
uccugccccucc

SEQ ID NO: 3911937 - RNA, 16 nt, Human adenovirus C
uccuggauuugggagg

SEQ ID NO: 3911938 - RNA, 19 nt, Human adenovirus C
uccuuccuaucaaccagaa

SEQ ID NO: 3911939 - RNA, 13 nt, Human adenovirus C
ucgaugcuccccu

SEQ ID NO: 3911940 - RNA, 22 nt, Human adenovirus C
ucgccagcccgugcuggccccg

SEQ ID NO: 3911941 - RNA, 15 nt, Human adenovirus C
ucgccccaggcuggg

SEQ ID NO: 3911942 - RNA, 18 nt, Human adenovirus C
ucgccccaucaucgucac

SEQ ID NO: 3911943 - RNA, 13 nt, Human adenovirus C
ucgccugcgccau

SEQ ID NO: 3911944 - RNA, 15 nt, Human adenovirus C
ucgcguccaggccag

SEQ ID NO: 3911945 - RNA, 16 nt, Human adenovirus C
ucgcguccaggccagc

SEQ ID NO: 3911946 - RNA, 19 nt, Human adenovirus C
ucgcuacaaccuccgcucc

SEQ ID NO: 3911947 - RNA, 16 nt, Human adenovirus C
ucgcucccaccaugcg

SEQ ID NO: 3911948 - RNA, 22 nt, Human adenovirus C
ucggaagacuaucugccugaag

SEQ ID NO: 3911949 - RNA, 21 nt, Human adenovirus C
ucggccccaccgguucuucac

SEQ ID NO: 3911950 - RNA, 14 nt, Human adenovirus C
ucgucauaggccau

SEQ ID NO: 3911951 - RNA, 22 nt, Human adenovirus C
ucguggcuacaccuaccgcccc

SEQ ID NO: 3911952 - RNA, 20 nt, Human adenovirus C
ucuacagccccuacugcacc

SEQ ID NO: 3911953 - RNA, 20 nt, Human adenovirus C
ucuacuggggcuccugucgc

SEQ ID NO: 3911954 - RNA, 18 nt, Human adenovirus C
ucuauguggaaucaggcu

SEQ ID NO: 3911955 - RNA, 17 nt, Human adenovirus C
ucucagaugcugaccug

SEQ ID NO: 3911956 - RNA, 15 nt, Human adenovirus C
ucuccgcguccggcu

SEQ ID NO: 3911957 - RNA, 13 nt, Human adenovirus C
ucuccugcacguc

SEQ ID NO: 3911958 - RNA, 15 nt, Human adenovirus C
ucucuuccuccugga

SEQ ID NO: 3911959 - RNA, 20 nt, Human adenovirus C
ucugacaaccccaacaccua

SEQ ID NO: 3911960 - RNA, 16 nt, Human adenovirus C
ucugcagcgcugccaa

SEQ ID NO: 3911961 - RNA, 21 nt, Human adenovirus C
ucugccagcgccugcacugca

SEQ ID NO: 3911962 - RNA, 17 nt, Human adenovirus C
ucugcccgccaccugcu

SEQ ID NO: 3911963 - RNA, 20 nt, Human adenovirus C
ucugcgacgcguugcaagag

SEQ ID NO: 3911964 - RNA, 12 nt, Human adenovirus C
ucuggacuacau

SEQ ID NO: 3911965 - RNA, 17 nt, Human adenovirus C
ucuggugacuuggcacc

SEQ ID NO: 3911966 - RNA, 21 nt, Human adenovirus C
ucugguuccggaugaaaaagg

SEQ ID NO: 3911967 - RNA, 22 nt, Human adenovirus C
ucugugccuuaggguugccgcc

SEQ ID NO: 3911968 - RNA, 20 nt, Human adenovirus C
ucuuaugccaggccuacaaa

SEQ ID NO: 3911969 - RNA, 15 nt, Human adenovirus C
ucuuauuaaaaccau

SEQ ID NO: 3911970 - RNA, 17 nt, Human adenovirus C
ucuucagcaaauacugc

SEQ ID NO: 3911971 - RNA, 18 nt, Human adenovirus C
ucuucauucagccgccgc

SEQ ID NO: 3911972 - RNA, 12 nt, Human adenovirus C
ucuuccuccugg

SEQ ID NO: 3911973 - RNA, 19 nt, Human adenovirus C
ucuucggcaucaaggaagg

SEQ ID NO: 3911974 - RNA, 23 nt, Human adenovirus C
ucuugcauacggccgccagagcu

SEQ ID NO: 3911975 - RNA, 16 nt, Human adenovirus C
ucuugcuggucaggca

SEQ ID NO: 3911976 - RNA, 21 nt, Human adenovirus C
aaaaagaagcugcagcugccg

SEQ ID NO: 3911977 - RNA, 23 nt, Human adenovirus C
aaaaccuaucaccgucacccagc

SEQ ID NO: 3911978 - RNA, 19 nt, Human adenovirus C
aaaacuacgucuuaaacug

SEQ ID NO: 3911979 - RNA, 14 nt, Human adenovirus C
aaaaggcaaacugc

SEQ ID NO: 3911980 - RNA, 22 nt, Human adenovirus C
aaaaggcuguccguguccccgu

SEQ ID NO: 3911981 - RNA, 21 nt, Human adenovirus C
aaaaugugggagucaaguacu

SEQ ID NO: 3911982 - RNA, 12 nt, Human adenovirus C
cgcgcccauggc

SEQ ID NO: 3911983 - RNA, 19 nt, Human adenovirus C
cgcgccuaccaccuucccc

SEQ ID NO: 3911984 - RNA, 13 nt, Human adenovirus C
cgcgcgcagcagc

SEQ ID NO: 3911985 - RNA, 13 nt, Human adenovirus C
cgcgcgcuggggc

SEQ ID NO: 3911986 - RNA, 16 nt, Human adenovirus C
cgcgcgcuggggcagg

SEQ ID NO: 3911987 - RNA, 18 nt, Human adenovirus C
cgcgcggagguugcuggc

SEQ ID NO: 3911988 - RNA, 20 nt, Human adenovirus C
cgcgcggcggcggcccugcu

SEQ ID NO: 3911989 - RNA, 17 nt, Human adenovirus C
cgcgcggcgggcggugg

SEQ ID NO: 3911990 - RNA, 17 nt, Human adenovirus C
cgcgcgucccugcgccg

SEQ ID NO: 3911991 - RNA, 11 nt, Human adenovirus C
cgcggagcccg

SEQ ID NO: 3911992 - RNA, 20 nt, Human adenovirus C
cgcggcaaacgcucugcaac

SEQ ID NO: 3911993 - RNA, 21 nt, Human adenovirus C
cgcggcaaacgcucugcaaca

SEQ ID NO: 3911994 - RNA, 13 nt, Human adenovirus C
cgcggccgcacug

SEQ ID NO: 3911995 - RNA, 16 nt, Human adenovirus C
cgcggcgauuggcgcc

SEQ ID NO: 3911996 - RNA, 15 nt, Human adenovirus C
cgcggcgccgggccc

SEQ ID NO: 3911997 - RNA, 14 nt, Human adenovirus C
cgcggcggcggccc

SEQ ID NO: 3911998 - RNA, 15 nt, Human adenovirus C
cgcggcggcugcugc

SEQ ID NO: 3911999 - RNA, 19 nt, Human adenovirus C
cgcggcgugcuggacaggg

SEQ ID NO: 3912000 - RNA, 20 nt, Human adenovirus C
cgcgggcacuaccgcgcgcc

SEQ ID NO: 3912001 - RNA, 19 nt, Human adenovirus C
cgcgggcaggagcuggugc

SEQ ID NO: 3912002 - RNA, 18 nt, Human adenovirus C
cgcgggcccuugcuuccc

SEQ ID NO: 3912003 - RNA, 21 nt, Human adenovirus C
cgcgggcgcugaccugcgcug

SEQ ID NO: 3912004 - RNA, 20 nt, Human adenovirus C
cgcgggcuagguccagguga

SEQ ID NO: 3912005 - RNA, 21 nt, Human adenovirus C
cgcggugcaggcggccgcugc

SEQ ID NO: 3912006 - RNA, 21 nt, Human adenovirus C
cgcguagcacgucgccaccgc

SEQ ID NO: 3912007 - RNA, 13 nt, Human adenovirus C
cgcguccaggcca

SEQ ID NO: 3912008 - RNA, 17 nt, Human adenovirus C
cgcguccaucuggucag

SEQ ID NO: 3912009 - RNA, 17 nt, Human adenovirus C
cgcgucggccagguagc

SEQ ID NO: 3912010 - RNA, 22 nt, Human adenovirus C
cgcguucguccucacucucuuc

SEQ ID NO: 3912011 - RNA, 17 nt, Human adenovirus C
cgcucaguugacgggga

SEQ ID NO: 3912012 - RNA, 22 nt, Human adenovirus C
cgcuccacgguggcggcgaggu

SEQ ID NO: 3912013 - RNA, 18 nt, Human adenovirus C
cgcucgagaucaggcuac

SEQ ID NO: 3912014 - RNA, 20 nt, Human adenovirus C
cgcucgucgggcaccaggug

SEQ ID NO: 3912015 - RNA, 16 nt, Human adenovirus C
cgcugaccugcgcugg

SEQ ID NO: 3912016 - RNA, 18 nt, Human adenovirus C
cgcugcgucuggcgccca

SEQ ID NO: 3912017 - RNA, 18 nt, Human adenovirus C
cgcuggaaaaguccaccc

SEQ ID NO: 3912018 - RNA, 22 nt, Human adenovirus C
cgcuggaagacguugaagcugg

SEQ ID NO: 3912019 - RNA, 16 nt, Human adenovirus C
cgcuggaccugccucc

SEQ ID NO: 3912020 - RNA, 14 nt, Human adenovirus C
cgcuggccagcacg

SEQ ID NO: 3912021 - RNA, 17 nt, Human adenovirus C
cgcuggccgcucuucau

SEQ ID NO: 3912022 - RNA, 14 nt, Human adenovirus C
cgcuguggagcggc

SEQ ID NO: 3912023 - RNA, 16 nt, Human adenovirus C
cgcuucacuggacucu

SEQ ID NO: 3912024 - RNA, 14 nt, Human adenovirus C
cgcuugaggaggag

SEQ ID NO: 3912025 - RNA, 19 nt, Human adenovirus C
cgcuugcuuguauuccccu

SEQ ID NO: 3912026 - RNA, 19 nt, Human adenovirus C
cggaaacagggacgagccc

SEQ ID NO: 3912027 - RNA, 15 nt, Human adenovirus C
cggaaaccucaccuc

SEQ ID NO: 3912028 - RNA, 16 nt, Human adenovirus C
cggaacauuaacaaaa

SEQ ID NO: 3912029 - RNA, 13 nt, Human adenovirus C
cggaggaguccag

SEQ ID NO: 3912030 - RNA, 21 nt, Human adenovirus C
cggaggcucucuucagcaaau

SEQ ID NO: 3912031 - RNA, 22 nt, Human adenovirus C
cggagucaacuuugguagcugc

SEQ ID NO: 3912032 - RNA, 14 nt, Human adenovirus C
cggagugcugggcc

SEQ ID NO: 3912033 - RNA, 14 nt, Human adenovirus C
cggcaccagcaaua

SEQ ID NO: 3912034 - RNA, 21 nt, Human adenovirus C
cggcacugccgcccaacgcgc

SEQ ID NO: 3912035 - RNA, 18 nt, Human adenovirus C
cggcagacaugcagggca

SEQ ID NO: 3912036 - RNA, 14 nt, Human adenovirus C
cggcagacgacagc

SEQ ID NO: 3912037 - RNA, 21 nt, Human adenovirus C
cggcagaugcgccccccuccu

SEQ ID NO: 3912038 - RNA, 14 nt, Human adenovirus C
cggcagcagccgca

SEQ ID NO: 3912039 - RNA, 20 nt, Human adenovirus C
cggccaaucaagcagguggc

SEQ ID NO: 3912040 - RNA, 21 nt, Human adenovirus C
cggccaugaacugcucgaucu

SEQ ID NO: 3912041 - RNA, 16 nt, Human adenovirus C
cggccauucagaccgu

SEQ ID NO: 3912042 - RNA, 20 nt, Human adenovirus C
cggccgacgggcggccaugc

SEQ ID NO: 3912043 - RNA, 14 nt, Human adenovirus C
cggccgcugcggcc

SEQ ID NO: 3912044 - RNA, 16 nt, Human adenovirus C
cggccgggcaguugcc

SEQ ID NO: 3912045 - RNA, 20 nt, Human adenovirus C
cggcgaguacuaagcgguga

SEQ ID NO: 3912046 - RNA, 16 nt, Human adenovirus C
cggcgauuggcgccgu

SEQ ID NO: 3912047 - RNA, 20 nt, Human adenovirus C
cggcgcaccgggaggcgguc

SEQ ID NO: 3912048 - RNA, 22 nt, Human adenovirus C
cggcgccgcgcgcgggcaggag

SEQ ID NO: 3912049 - RNA, 16 nt, Human adenovirus C
cggcgcgcaacgaagc

SEQ ID NO: 3912050 - RNA, 14 nt, Human adenovirus C
cggcgcgcuccuug

SEQ ID NO: 3912051 - RNA, 14 nt, Human adenovirus C
cggcggcgcgcaac

SEQ ID NO: 3912052 - RNA, 14 nt, Human adenovirus C
cggcggcugcugcg

SEQ ID NO: 3912053 - RNA, 17 nt, Human adenovirus C
cggcggucggagcuuga

SEQ ID NO: 3912054 - RNA, 22 nt, Human adenovirus C
cggcguaagcgguuaggcugga

SEQ ID NO: 3912055 - RNA, 14 nt, Human adenovirus C
cggcgugcuggaca

SEQ ID NO: 3912056 - RNA, 20 nt, Human adenovirus C
cggcuauuaccaccacaccu

SEQ ID NO: 3912057 - RNA, 18 nt, Human adenovirus C
cggcugaagcagggccag

SEQ ID NO: 3912058 - RNA, 15 nt, Human adenovirus C
cggcugcuguugcuu

SEQ ID NO: 3912059 - RNA, 15 nt, Human adenovirus C
cggcuggagcugccc

SEQ ID NO: 3912060 - RNA, 18 nt, Human adenovirus C
cgggacgcucuggccggu

SEQ ID NO: 3912061 - RNA, 16 nt, Human adenovirus C
cgggagagggggcagg

SEQ ID NO: 3912062 - RNA, 22 nt, Human adenovirus C
cgggagagggggcaggggcacg

SEQ ID NO: 3912063 - RNA, 24 nt, Human adenovirus C
cgggcaagauuauacccacaaccu

SEQ ID NO: 3912064 - RNA, 16 nt, Human adenovirus C
cgggcacagcagcgca

SEQ ID NO: 3912065 - RNA, 13 nt, Human adenovirus C
cgggcacuaccgc

SEQ ID NO: 3912066 - RNA, 16 nt, Human adenovirus C
cgggcacuaccgcgcg

SEQ ID NO: 3912067 - RNA, 14 nt, Human adenovirus C
cgggccaugagcug

SEQ ID NO: 3912068 - RNA, 18 nt, Human adenovirus C
cgggcccggugagcuuga

SEQ ID NO: 3912069 - RNA, 17 nt, Human adenovirus C
cgggcggaggagaagcg

SEQ ID NO: 3912070 - RNA, 22 nt, Human adenovirus C
cgggcggcagcggguggcgguc

SEQ ID NO: 3912071 - RNA, 22 nt, Human adenovirus C
cgggcggcaugcgucgugcgca

SEQ ID NO: 3912072 - RNA, 15 nt, Human adenovirus C
cgggcggcgcugcag

SEQ ID NO: 3912073 - RNA, 19 nt, Human adenovirus C
cgggcggcgcugcagagcc

SEQ ID NO: 3912074 - RNA, 23 nt, Human adenovirus C
cgggcugggugugcgcggcacca

SEQ ID NO: 3912075 - RNA, 24 nt, Human adenovirus C
cggggcaaagaagcgcuccgacca

SEQ ID NO: 3912076 - RNA, 21 nt, Human adenovirus C
cgggucaacggaauccgcgcc

SEQ ID NO: 3912077 - RNA, 14 nt, Human adenovirus C
cggucaccagaggc

SEQ ID NO: 3912078 - RNA, 15 nt, Human adenovirus C
cggucgcauuccccu

SEQ ID NO: 3912079 - RNA, 18 nt, Human adenovirus C
cggucucggucguugagg

SEQ ID NO: 3912080 - RNA, 15 nt, Human adenovirus C
cggucuucgcccugc

SEQ ID NO: 3912081 - RNA, 14 nt, Human adenovirus C
cggugaaggggugc

SEQ ID NO: 3912082 - RNA, 21 nt, Human adenovirus C
cgguucaucccuguggaccgc

SEQ ID NO: 3912083 - RNA, 20 nt, Human adenovirus C
cgguucgagucucgggccgg

SEQ ID NO: 3912084 - RNA, 20 nt, Human adenovirus C
cguacgugccgcggcagaac

SEQ ID NO: 3912085 - RNA, 16 nt, Human adenovirus C
cguagcucagugcaac

SEQ ID NO: 3912086 - RNA, 21 nt, Human adenovirus C
cguagguggcgcccucuuccu

SEQ ID NO: 3912087 - RNA, 18 nt, Human adenovirus C
cguaguuucgcaggcgcu

SEQ ID NO: 3912088 - RNA, 15 nt, Human adenovirus C
cgucacccagcacuc

SEQ ID NO: 3912089 - RNA, 14 nt, Human adenovirus C
cgucaucuccagcg

SEQ ID NO: 3912090 - RNA, 19 nt, Human adenovirus C
cgucaucucuacagccccu

SEQ ID NO: 3912091 - RNA, 16 nt, Human adenovirus C
cguccagacgggccag

SEQ ID NO: 3912092 - RNA, 13 nt, Human adenovirus C
cguccugagugug

SEQ ID NO: 3912093 - RNA, 14 nt, Human adenovirus C
cgucgcaaccagga

SEQ ID NO: 3912094 - RNA, 17 nt, Human adenovirus C
cgucgccaccgccgccg

SEQ ID NO: 3912095 - RNA, 14 nt, Human adenovirus C
cgucuagggcgcag

SEQ ID NO: 3912096 - RNA, 15 nt, Human adenovirus C
cgucuggcugcucga

SEQ ID NO: 3912097 - RNA, 20 nt, Human adenovirus C
cgugacacugcagcaggugc

SEQ ID NO: 3912098 - RNA, 16 nt, Human adenovirus C
gaacaagagcugaaaa

SEQ ID NO: 3912099 - RNA, 16 nt, Human adenovirus C
gaacagcagcacaggc

SEQ ID NO: 3912100 - RNA, 12 nt, Human adenovirus C
gaacccccgcgg

SEQ ID NO: 3912101 - RNA, 18 nt, Human adenovirus C
gaaccccggauccggccg

SEQ ID NO: 3912102 - RNA, 19 nt, Human adenovirus C
gaacccuaguauucaaccu

SEQ ID NO: 3912103 - RNA, 15 nt, Human adenovirus C
gaaccugaacggggu

SEQ ID NO: 3912104 - RNA, 19 nt, Human adenovirus C
gaaccuuuggacaccuccc

SEQ ID NO: 3912105 - RNA, 20 nt, Human adenovirus C
gaacgcggguuuggcagggc

SEQ ID NO: 3912106 - RNA, 18 nt, Human adenovirus C
gaacgggguguuugacau

SEQ ID NO: 3912107 - RNA, 23 nt, Human adenovirus C
gaacuauggcagcaaggccugga

SEQ ID NO: 3912108 - RNA, 15 nt, Human adenovirus C
gaagaaacucuggug

SEQ ID NO: 3912109 - RNA, 21 nt, Human adenovirus C
gaagauacagauugagguacu

SEQ ID NO: 3912110 - RNA, 17 nt, Human adenovirus C
gaagccucagaagaaac

SEQ ID NO: 3912111 - RNA, 20 nt, Human adenovirus C
gaagcgugacacgcgcgagg

SEQ ID NO: 3912112 - RNA, 18 nt, Human adenovirus C
gaaggcucgcguccaggc

SEQ ID NO: 3912113 - RNA, 23 nt, Human adenovirus C
gaaggcucgcguccaggccagca

SEQ ID NO: 3912114 - RNA, 12 nt, Human adenovirus C
gaagguggccau

SEQ ID NO: 3912115 - RNA, 22 nt, Human adenovirus C
gaaguauuccauagagcagcug

SEQ ID NO: 3912116 - RNA, 13 nt, Human adenovirus C
gaagucuuugacg

SEQ ID NO: 3912117 - RNA, 21 nt, Human adenovirus C
gaauaugcccuacauccuucc

SEQ ID NO: 3912118 - RNA, 11 nt, Human adenovirus C
gaaucaggcug

SEQ ID NO: 3912119 - RNA, 15 nt, Human adenovirus C
gaaugcgcaggcggu

SEQ ID NO: 3912120 - RNA, 14 nt, Human adenovirus C
gacaaagcccaaga

SEQ ID NO: 3912121 - RNA, 22 nt, Human adenovirus C
gacaacgaggcauucagggaug

SEQ ID NO: 3912122 - RNA, 16 nt, Human adenovirus C
gacaaggagguaaaga

SEQ ID NO: 3912123 - RNA, 14 nt, Human adenovirus C
gacaaguugaaaga

SEQ ID NO: 3912124 - RNA, 18 nt, Human adenovirus C
gacacugcagcaggugcu

SEQ ID NO: 3912125 - RNA, 19 nt, Human adenovirus C
gacacuuucaauaaaggca

SEQ ID NO: 3912126 - RNA, 17 nt, Human adenovirus C
gacagcaacuuggcgau

SEQ ID NO: 3912127 - RNA, 14 nt, Human adenovirus C
gacagcauuugucu

SEQ ID NO: 3912128 - RNA, 13 nt, Human adenovirus C
gacagggaagaaa

SEQ ID NO: 3912129 - RNA, 15 nt, Human adenovirus C
gacaugcagggcacc

SEQ ID NO: 3912130 - RNA, 22 nt, Human adenovirus C
gacauguuggcguugccgcugg

SEQ ID NO: 3912131 - RNA, 21 nt, Human adenovirus C
gacauuucagaucggcggcgc

SEQ ID NO: 3912132 - RNA, 13 nt, Human adenovirus C
gaccaaagcaaac

SEQ ID NO: 3912133 - RNA, 15 nt, Human adenovirus C
gaccaaccggcggca

SEQ ID NO: 3912134 - RNA, 18 nt, Human adenovirus C
gaccaguuaacggucugg

SEQ ID NO: 3912135 - RNA, 15 nt, Human adenovirus C
gaccccgggcagcag

SEQ ID NO: 3912136 - RNA, 17 nt, Human adenovirus C
gaccccuguauauuaau

SEQ ID NO: 3912137 - RNA, 19 nt, Human adenovirus C
gacccgccguuugugccuc

SEQ ID NO: 3912138 - RNA, 13 nt, Human adenovirus C
gaccggcuggugg

SEQ ID NO: 3912139 - RNA, 16 nt, Human adenovirus C
gaccgucuggcugcuc

SEQ ID NO: 3912140 - RNA, 17 nt, Human adenovirus C
gaccgucuggcugcucg

SEQ ID NO: 3912141 - RNA, 19 nt, Human adenovirus C
gaccgugguuugcaacugu

SEQ ID NO: 3912142 - RNA, 22 nt, Human adenovirus C
gaccgugucuagcuugcugacg

SEQ ID NO: 3912143 - RNA, 11 nt, Human adenovirus C
gaccugcacgu

SEQ ID NO: 3912144 - RNA, 16 nt, Human adenovirus C
gaccugcucggacggc

SEQ ID NO: 3912145 - RNA, 23 nt, Human adenovirus C
gacgaagcuuccgaggccgaaga

SEQ ID NO: 3912146 - RNA, 12 nt, Human adenovirus C
gacgacgaggug

SEQ ID NO: 3912147 - RNA, 19 nt, Human adenovirus C
gacgcaaauagaugagccu

SEQ ID NO: 3912148 - RNA, 16 nt, Human adenovirus C
gacgcgggcgggcccc

SEQ ID NO: 3912149 - RNA, 14 nt, Human adenovirus C
gacgcgguggugga

SEQ ID NO: 3912150 - RNA, 23 nt, Human adenovirus C
gacgcguugcaagagcgcagcga

SEQ ID NO: 3912151 - RNA, 13 nt, Human adenovirus C
gacgggguaacgc

SEQ ID NO: 3912152 - RNA, 23 nt, Human adenovirus C
gacuaccuuuccgccgccaacau

SEQ ID NO: 3912153 - RNA, 18 nt, Human adenovirus C
gacuacgguaccgcgcgg

SEQ ID NO: 3912154 - RNA, 14 nt, Human adenovirus C
gacuacucaacccg

SEQ ID NO: 3912155 - RNA, 19 nt, Human adenovirus C
gacuacuugcaucgcgcgg

SEQ ID NO: 3912156 - RNA, 18 nt, Human adenovirus C
gacucgguuagcggccug

SEQ ID NO: 3912157 - RNA, 16 nt, Human adenovirus C
gacucugacaaagccc

SEQ ID NO: 3912158 - RNA, 22 nt, Human adenovirus C
gacugaaugaccaguggagagg

SEQ ID NO: 3912159 - RNA, 18 nt, Human adenovirus C
gacugcgguauaaugguu

SEQ ID NO: 3912160 - RNA, 21 nt, Human adenovirus C
gacugcuacauuaaccuuggg

SEQ ID NO: 3912161 - RNA, 13 nt, Human adenovirus C
gacuggaagaugu

SEQ ID NO: 3912162 - RNA, 20 nt, Human adenovirus C
gacugggguuugacccaguc

SEQ ID NO: 3912163 - RNA, 20 nt, Human adenovirus C
gacuuugcuuuccugagccc

SEQ ID NO: 3912164 - RNA, 17 nt, Human adenovirus C
gagaacgccuaaaacaa

SEQ ID NO: 3912165 - RNA, 21 nt, Human adenovirus C
gagaacuccucacuuaaaaaa

SEQ ID NO: 3912166 - RNA, 22 nt, Human adenovirus C
gagaaggucaucaagacuuugg

SEQ ID NO: 3912167 - RNA, 17 nt, Human adenovirus C
gagaauguuuuaaaaaa

SEQ ID NO: 3912168 - RNA, 11 nt, Human adenovirus C
gagacaugauu

SEQ ID NO: 3912169 - RNA, 19 nt, Human adenovirus C
gagacugcagccuccgccg

SEQ ID NO: 3912170 - RNA, 19 nt, Human adenovirus C
gagagggggcaggggcacg

SEQ ID NO: 3912171 - RNA, 14 nt, Human adenovirus C
gagcaacaacagcg

SEQ ID NO: 3912172 - RNA, 18 nt, Human adenovirus C
gagcacagucaugagcga

SEQ ID NO: 3912173 - RNA, 19 nt, Human adenovirus C
gagcauacuuuccaggaga

SEQ ID NO: 3912174 - RNA, 18 nt, Human adenovirus C
gagccccgggcuggugca

SEQ ID NO: 3912175 - RNA, 19 nt, Human adenovirus C
gagccccgggcuggugcag

SEQ ID NO: 3912176 - RNA, 22 nt, Human adenovirus C
gagcccgacgcgcggaccggga

SEQ ID NO: 3912177 - RNA, 15 nt, Human adenovirus C
gagccugggcuggag

SEQ ID NO: 3912178 - RNA, 19 nt, Human adenovirus C
gagcgacgcaagcuaauga

SEQ ID NO: 3912179 - RNA, 18 nt, Human adenovirus C
gagcgcagcuugagccug

SEQ ID NO: 3912180 - RNA, 21 nt, Human adenovirus C
gagcgcagcuugagccuggcu

SEQ ID NO: 3912181 - RNA, 20 nt, Human adenovirus C
gagcgcuccacccgcaccua

SEQ ID NO: 3912182 - RNA, 21 nt, Human adenovirus C
gagcggggggcuucugaggcu

SEQ ID NO: 3912183 - RNA, 17 nt, Human adenovirus C
gagcuccacgugccggg

SEQ ID NO: 3912184 - RNA, 22 nt, Human adenovirus C
gagcugcccaagacuacucaac

SEQ ID NO: 3912185 - RNA, 14 nt, Human adenovirus C
gaggaagaugaaga

SEQ ID NO: 3912186 - RNA, 16 nt, Human adenovirus C
gaggaauacugggaca

SEQ ID NO: 3912187 - RNA, 18 nt, Human adenovirus C
gaggacacgggcagccug

SEQ ID NO: 3912188 - RNA, 13 nt, Human adenovirus C
gaggacuaccacg

SEQ ID NO: 3912189 - RNA, 18 nt, Human adenovirus C
gaggagcaacagcaggag

SEQ ID NO: 3912190 - RNA, 17 nt, Human adenovirus C
gaggagccuccaccggc

SEQ ID NO: 3912191 - RNA, 16 nt, Human adenovirus C
gaggaggcgccgcacg

SEQ ID NO: 3912192 - RNA, 23 nt, Human adenovirus C
gaggaugaagaagaggaagauga

SEQ ID NO: 3912193 - RNA, 16 nt, Human adenovirus C
gaggccguggcgcagc

SEQ ID NO: 3912194 - RNA, 13 nt, Human adenovirus C
gaggccucccucg

SEQ ID NO: 3912195 - RNA, 18 nt, Human adenovirus C
gaggcuaagugggagggg

SEQ ID NO: 3912196 - RNA, 15 nt, Human adenovirus C
gagggcgagggccug

SEQ ID NO: 3912197 - RNA, 18 nt, Human adenovirus C
gagggcgagggccuggcg

SEQ ID NO: 3912198 - RNA, 20 nt, Human adenovirus C
gagggcguuggacagcaacu

SEQ ID NO: 3912199 - RNA, 23 nt, Human adenovirus C
gagguugaccugacgaccgcgca

SEQ ID NO: 3912200 - RNA, 19 nt, Human adenovirus C
gagguugcuacgggcgggc

SEQ ID NO: 3912201 - RNA, 23 nt, Human adenovirus C
gaguacuaagcggugauguuucu

SEQ ID NO: 3912202 - RNA, 19 nt, Human adenovirus C
gagucaacuuugguagcug

SEQ ID NO: 3912203 - RNA, 23 nt, Human adenovirus C
gaguugcaacagcgcgagcaggc

SEQ ID NO: 3912204 - RNA, 17 nt, Human adenovirus C
gauagcggccgggcagu

SEQ ID NO: 3912205 - RNA, 13 nt, Human adenovirus C
gauaucaacccaa

SEQ ID NO: 3912206 - RNA, 22 nt, Human adenovirus C
gauauccguagauguaccugga

SEQ ID NO: 3912207 - RNA, 20 nt, Human adenovirus C
gauauuuuucuauguggaau

SEQ ID NO: 3912208 - RNA, 15 nt, Human adenovirus C
gaucacaaccccacc

SEQ ID NO: 3912209 - RNA, 17 nt, Human adenovirus C
gaucacuuggugcuggc

SEQ ID NO: 3912210 - RNA, 10 nt, Human adenovirus C
gaucaggcua

SEQ ID NO: 3912211 - RNA, 17 nt, Human adenovirus C
gaucaggcuacuaagaa

SEQ ID NO: 3912212 - RNA, 14 nt, Human adenovirus C
gaucauggagucag

SEQ ID NO: 3912213 - RNA, 20 nt, Human adenovirus C
gauccuaacucugcagaccu

SEQ ID NO: 3912214 - RNA, 22 nt, Human adenovirus C
aggcacccccgcuugaggagga

SEQ ID NO: 3912215 - RNA, 21 nt, Human adenovirus C
aggcagaacgggguucuggaa

SEQ ID NO: 3912216 - RNA, 14 nt, Human adenovirus C
aggcagcuggggcc

SEQ ID NO: 3912217 - RNA, 21 nt, Human adenovirus C
aggcagugcaaaauaagauua

SEQ ID NO: 3912218 - RNA, 15 nt, Human adenovirus C
aggccgaggcagcgg

SEQ ID NO: 3912219 - RNA, 13 nt, Human adenovirus C
aggccggccuggu

SEQ ID NO: 3912220 - RNA, 14 nt, Human adenovirus C
aggccugcagaccg

SEQ ID NO: 3912221 - RNA, 18 nt, Human adenovirus C
aggcgacgagcggccgcc

SEQ ID NO: 3912222 - RNA, 18 nt, Human adenovirus C
aggcgccgcacgaggggc

SEQ ID NO: 3912223 - RNA, 20 nt, Human adenovirus C
aggcgcgcaacuacacgccc

SEQ ID NO: 3912224 - RNA, 15 nt, Human adenovirus C
aggcgcgccgcgacu

SEQ ID NO: 3912225 - RNA, 19 nt, Human adenovirus C
aggcgcuguauccaaagcu

SEQ ID NO: 3912226 - RNA, 17 nt, Human adenovirus C
aggcguugaggccuccc

SEQ ID NO: 3912227 - RNA, 19 nt, Human adenovirus C
aggcguugaggccucccuc

SEQ ID NO: 3912228 - RNA, 16 nt, Human adenovirus C
aggcuacagaggaggc

SEQ ID NO: 3912229 - RNA, 21 nt, Human adenovirus C
aggcuacuaagaaaacacaug

SEQ ID NO: 3912230 - RNA, 14 nt, Human adenovirus C
aggcugcuguccaa

SEQ ID NO: 3912231 - RNA, 21 nt, Human adenovirus C
agggacaaguugaaagagcaa

SEQ ID NO: 3912232 - RNA, 19 nt, Human adenovirus C
agggcacccuccccuucuc

SEQ ID NO: 3912233 - RNA, 14 nt, Human adenovirus C
agggcacgagcugc

SEQ ID NO: 3912234 - RNA, 21 nt, Human adenovirus C
agggcccggcgcacggcgucc

SEQ ID NO: 3912235 - RNA, 13 nt, Human adenovirus C
agggccuccccuu

SEQ ID NO: 3912236 - RNA, 18 nt, Human adenovirus C
agggccuccccuucuucu

SEQ ID NO: 3912237 - RNA, 20 nt, Human adenovirus C
agggcgcuccuaacuccugu

SEQ ID NO: 3912238 - RNA, 20 nt, Human adenovirus C
agggcgcugucauaccugau

SEQ ID NO: 3912239 - RNA, 19 nt, Human adenovirus C
agggcggggauggcgcagg

SEQ ID NO: 3912240 - RNA, 19 nt, Human adenovirus C
aggggcaacauccgcggcu

SEQ ID NO: 3912241 - RNA, 13 nt, Human adenovirus C
aggggcagugcag

SEQ ID NO: 3912242 - RNA, 22 nt, Human adenovirus C
aggggcauggccggccacggcc

SEQ ID NO: 3912243 - RNA, 17 nt, Human adenovirus C
aggggccucuucuucuu

SEQ ID NO: 3912244 - RNA, 20 nt, Human adenovirus C
aggggugcgcuccgggcugc

SEQ ID NO: 3912245 - RNA, 15 nt, Human adenovirus C
agggucaugucuuuc

SEQ ID NO: 3912246 - RNA, 14 nt, Human adenovirus C
aggguccucgucag

SEQ ID NO: 3912247 - RNA, 17 nt, Human adenovirus C
agggugcaugcccaggc

SEQ ID NO: 3912248 - RNA, 15 nt, Human adenovirus C
agggugccagacugc

SEQ ID NO: 3912249 - RNA, 21 nt, Human adenovirus C
aggguggcucgcgaaggaggc

SEQ ID NO: 3912250 - RNA, 15 nt, Human adenovirus C
aggucacuugcugac

SEQ ID NO: 3912251 - RNA, 21 nt, Human adenovirus C
agguccaggcgacgagcggcc

SEQ ID NO: 3912252 - RNA, 19 nt, Human adenovirus C
aggucccuucgcagggcca

SEQ ID NO: 3912253 - RNA, 18 nt, Human adenovirus C
agguccgcgugcggccaa

SEQ ID NO: 3912254 - RNA, 20 nt, Human adenovirus C
aggugaaaaucguaaaacuu

SEQ ID NO: 3912255 - RNA, 21 nt, Human adenovirus C
aggugagcuccucaggggagc

SEQ ID NO: 3912256 - RNA, 21 nt, Human adenovirus C
agguggcuauaggacugaugc

SEQ ID NO: 3912257 - RNA, 20 nt, Human adenovirus C
aggugucaccguugaacaaa

SEQ ID NO: 3912258 - RNA, 17 nt, Human adenovirus C
aguaacucuacaagcuu

SEQ ID NO: 3912259 - RNA, 22 nt, Human adenovirus C
aguaaguuugccacacaaccuu

SEQ ID NO: 3912260 - RNA, 14 nt, Human adenovirus C
aguaccgcagcugg

SEQ ID NO: 3912261 - RNA, 18 nt, Human adenovirus C
aguacgagucacuccugc

SEQ ID NO: 3912262 - RNA, 13 nt, Human adenovirus C
aguagcacaaaac

SEQ ID NO: 3912263 - RNA, 12 nt, Human adenovirus C
aguaguccaggg

SEQ ID NO: 3912264 - RNA, 13 nt, Human adenovirus C
aguaguuacugga

SEQ ID NO: 3912265 - RNA, 16 nt, Human adenovirus C
aguaugauuaaaugag

SEQ ID NO: 3912266 - RNA, 12 nt, Human adenovirus C
agucacuccugc

SEQ ID NO: 3912267 - RNA, 11 nt, Human adenovirus C
agucacugugg

SEQ ID NO: 3912268 - RNA, 18 nt, Human adenovirus C
agucagcaaaucuuuguc

SEQ ID NO: 3912269 - RNA, 13 nt, Human adenovirus C
agucgcaggaccc

SEQ ID NO: 3912270 - RNA, 14 nt, Human adenovirus C
agucuaagcagccg

SEQ ID NO: 3912271 - RNA, 13 nt, Human adenovirus C
agucucgggccgg

SEQ ID NO: 3912272 - RNA, 20 nt, Human adenovirus C
agucugcagcgcugccaaaa

SEQ ID NO: 3912273 - RNA, 15 nt, Human adenovirus C
agugcccgcugucau

SEQ ID NO: 3912274 - RNA, 18 nt, Human adenovirus C
agugcgcgugcgcgggca

SEQ ID NO: 3912275 - RNA, 13 nt, Human adenovirus C
agugcggcggcgg

SEQ ID NO: 3912276 - RNA, 22 nt, Human adenovirus C
agugcuuguuaccguggagcuu

SEQ ID NO: 3912277 - RNA, 20 nt, Human adenovirus C
aguggaaaauacaccacuga

SEQ ID NO: 3912278 - RNA, 23 nt, Human adenovirus C
aguuccucguaggugagcuccuc

SEQ ID NO: 3912279 - RNA, 20 nt, Human adenovirus C
aguugccgaggaugaagaag

SEQ ID NO: 3912280 - RNA, 13 nt, Human adenovirus C
aguuggaagacgc

SEQ ID NO: 3912281 - RNA, 15 nt, Human adenovirus C
aguuggcccgcugcc

SEQ ID NO: 3912282 - RNA, 16 nt, Human adenovirus C
aguuggggccuccgcc

SEQ ID NO: 3912283 - RNA, 19 nt, Human adenovirus C
aguuuucacuccacaggcu

SEQ ID NO: 3912284 - RNA, 16 nt, Human adenovirus C
auaaacauuaccucuu

SEQ ID NO: 3912285 - RNA, 13 nt, Human adenovirus C
auacaaaagcaga

SEQ ID NO: 3912286 - RNA, 23 nt, Human adenovirus C
auagauacggaggauaggguggc

SEQ ID NO: 3912287 - RNA, 22 nt, Human adenovirus C
auagccgggucagggcgcgggc

SEQ ID NO: 3912288 - RNA, 14 nt, Human adenovirus C
caugcccaggcuuu

SEQ ID NO: 3912289 - RNA, 15 nt, Human adenovirus C
cauggaaauuaaaac

SEQ ID NO: 3912290 - RNA, 17 nt, Human adenovirus C
cauggccggccacggcc

SEQ ID NO: 3912291 - RNA, 18 nt, Human adenovirus C
cauggccggccacggccu

SEQ ID NO: 3912292 - RNA, 20 nt, Human adenovirus C
cauggcggggaccacagaac

SEQ ID NO: 3912293 - RNA, 22 nt, Human adenovirus C
cauggcggggaccacagaaccc

SEQ ID NO: 3912294 - RNA, 12 nt, Human adenovirus C
caugggcgcacu

SEQ ID NO: 3912295 - RNA, 14 nt, Human adenovirus C
cauggugauaaaac

SEQ ID NO: 3912296 - RNA, 19 nt, Human adenovirus C
cauguaugcguccaugucg

SEQ ID NO: 3912297 - RNA, 19 nt, Human adenovirus C
caugucgcuguccagcugc

SEQ ID NO: 3912298 - RNA, 20 nt, Human adenovirus C
caugucuaugcccaggcucc

SEQ ID NO: 3912299 - RNA, 14 nt, Human adenovirus C
cauguugugcagaa

SEQ ID NO: 3912300 - RNA, 16 nt, Human adenovirus C
cauuaccuuugacucu

SEQ ID NO: 3912301 - RNA, 21 nt, Human adenovirus C
cauucagauaaugacugcaaa

SEQ ID NO: 3912302 - RNA, 13 nt, Human adenovirus C
cauuccagcaccu

SEQ ID NO: 3912303 - RNA, 15 nt, Human adenovirus C
cauuccagcaccuuc

SEQ ID NO: 3912304 - RNA, 22 nt, Human adenovirus C
cauucccagcugcuacaacaaa

SEQ ID NO: 3912305 - RNA, 16 nt, Human adenovirus C
cauucgggcagcagcg

SEQ ID NO: 3912306 - RNA, 12 nt, Human adenovirus C
cauucugcagag

SEQ ID NO: 3912307 - RNA, 16 nt, Human adenovirus C
cauugucaaagaucuu

SEQ ID NO: 3912308 - RNA, 21 nt, Human adenovirus C
ccaaaagauuauccaaaaccu

SEQ ID NO: 3912309 - RNA, 13 nt, Human adenovirus C
ccaaaagcagggc

SEQ ID NO: 3912310 - RNA, 20 nt, Human adenovirus C
ccaaagcaaaccucaccucc

SEQ ID NO: 3912311 - RNA, 14 nt, Human adenovirus C
ccaacagaggauaa

SEQ ID NO: 3912312 - RNA, 14 nt, Human adenovirus C
ccaaccaggcagug

SEQ ID NO: 3912313 - RNA, 13 nt, Human adenovirus C
ccaacgcgcggcg

SEQ ID NO: 3912314 - RNA, 14 nt, Human adenovirus C
ccaacgcgcggcgg

SEQ ID NO: 3912315 - RNA, 21 nt, Human adenovirus C
ccaacuacaauauuggcuacc

SEQ ID NO: 3912316 - RNA, 18 nt, Human adenovirus C
ccaacucugguaucucag

SEQ ID NO: 3912317 - RNA, 13 nt, Human adenovirus C
ccaacuggcccca

SEQ ID NO: 3912318 - RNA, 15 nt, Human adenovirus C
ccaagaaauccacag

SEQ ID NO: 3912319 - RNA, 20 nt, Human adenovirus C
ccaagaugagguacaugauu

SEQ ID NO: 3912320 - RNA, 11 nt, Human adenovirus C
ccaagcaguuc

SEQ ID NO: 3912321 - RNA, 18 nt, Human adenovirus C
ccaagccgacgcgcccug

SEQ ID NO: 3912322 - RNA, 17 nt, Human adenovirus C
ccaagcgccagcgacug

SEQ ID NO: 3912323 - RNA, 15 nt, Human adenovirus C
ccaagggugcagcug

SEQ ID NO: 3912324 - RNA, 16 nt, Human adenovirus C
ccaaucaaucagccuc

SEQ ID NO: 3912325 - RNA, 17 nt, Human adenovirus C
ccaaucaaucagccucg

SEQ ID NO: 3912326 - RNA, 22 nt, Human adenovirus C
ccaaucaaucagccucgccccc

SEQ ID NO: 3912327 - RNA, 16 nt, Human adenovirus C
ccaaucccgcccgcca

SEQ ID NO: 3912328 - RNA, 18 nt, Human adenovirus C
ccacaaccuucaaaucaa

SEQ ID NO: 3912329 - RNA, 18 nt, Human adenovirus C
ccacaccuacagccugag

SEQ ID NO: 3912330 - RNA, 19 nt, Human adenovirus C
ccacacgggcggaggagaa

SEQ ID NO: 3912331 - RNA, 16 nt, Human adenovirus C
ccacauuucggcccca

SEQ ID NO: 3912332 - RNA, 13 nt, Human adenovirus C
ccaccacaccucg

SEQ ID NO: 3912333 - RNA, 18 nt, Human adenovirus C
ccaccaguuggaggagug

SEQ ID NO: 3912334 - RNA, 15 nt, Human adenovirus C
ccacccaaagcagac

SEQ ID NO: 3912335 - RNA, 13 nt, Human adenovirus C
ccacccagcgcca

SEQ ID NO: 3912336 - RNA, 17 nt, Human adenovirus C
ccaccggcggcggcgcg

SEQ ID NO: 3912337 - RNA, 15 nt, Human adenovirus C
ccaccgugcagcuga

SEQ ID NO: 3912338 - RNA, 22 nt, Human adenovirus C
ccaccugcgcgagauugagcuc

SEQ ID NO: 3912339 - RNA, 13 nt, Human adenovirus C
ccaccuucagccu

SEQ ID NO: 3912340 - RNA, 16 nt, Human adenovirus C
ccaccuucagccucaa

SEQ ID NO: 3912341 - RNA, 20 nt, Human adenovirus C
ccacgccccgcgccacguca

SEQ ID NO: 3912342 - RNA, 19 nt, Human adenovirus C
ccacgcccuacauguggag

SEQ ID NO: 3912343 - RNA, 18 nt, Human adenovirus C
ccacggacgacuggcgcc

SEQ ID NO: 3912344 - RNA, 23 nt, Human adenovirus C
ccacggcuaggucucgcgcggcg

SEQ ID NO: 3912345 - RNA, 15 nt, Human adenovirus C
ccacgguggcaccua

SEQ ID NO: 3912346 - RNA, 22 nt, Human adenovirus C
ccacgugaccggguguuccuga

SEQ ID NO: 3912347 - RNA, 15 nt, Human adenovirus C
ccacgugcgcacgcu

SEQ ID NO: 3912348 - RNA, 22 nt, Human adenovirus C
ccacucucgcaaggccuggcca

SEQ ID NO: 3912349 - RNA, 15 nt, Human adenovirus C
ccacugccacagagg

SEQ ID NO: 3912350 - RNA, 19 nt, Human adenovirus C
ccacuggaacccgccgccg

SEQ ID NO: 3912351 - RNA, 14 nt, Human adenovirus C
ccagacgcggcugu

SEQ ID NO: 3912352 - RNA, 14 nt, Human adenovirus C
ccagacgggccagg

SEQ ID NO: 3912353 - RNA, 23 nt, Human adenovirus C
ccagacuauuuuuuccagaccag

SEQ ID NO: 3912354 - RNA, 23 nt, Human adenovirus C
ccagcauugauggucgccccguc

SEQ ID NO: 3912355 - RNA, 18 nt, Human adenovirus C
ccagccugugaugcugga

SEQ ID NO: 3912356 - RNA, 14 nt, Human adenovirus C
aagaaaaacaccac

SEQ ID NO: 3912357 - RNA, 21 nt, Human adenovirus C
aagaaucgugaaccuguugca

SEQ ID NO: 3912358 - RNA, 22 nt, Human adenovirus C
aagaccauucacguagccagcc

SEQ ID NO: 3912359 - RNA, 14 nt, Human adenovirus C
aagacucggcggac

SEQ ID NO: 3912360 - RNA, 16 nt, Human adenovirus C
aagacugugggggcaa

SEQ ID NO: 3912361 - RNA, 14 nt, Human adenovirus C
aagagcugaaaaua

SEQ ID NO: 3912362 - RNA, 12 nt, Human adenovirus C
aagaucagcuuc

SEQ ID NO: 3912363 - RNA, 17 nt, Human adenovirus C
aagaucuggaaggugcu

SEQ ID NO: 3912364 - RNA, 23 nt, Human adenovirus C
aagaucuuuguugucaucucugu

SEQ ID NO: 3912365 - RNA, 15 nt, Human adenovirus C
aagaugaagaagagg

SEQ ID NO: 3912366 - RNA, 16 nt, Human adenovirus C
aagauggcaugugagu

SEQ ID NO: 3912367 - RNA, 13 nt, Human adenovirus C
aagcaagcaacau

SEQ ID NO: 3912368 - RNA, 16 nt, Human adenovirus C
aagcaggggccaagaa

SEQ ID NO: 3912369 - RNA, 19 nt, Human adenovirus C
aagcaggggccaagaacaa

SEQ ID NO: 3912370 - RNA, 18 nt, Human adenovirus C
aagccaugcucagaaaug

SEQ ID NO: 3912371 - RNA, 13 nt, Human adenovirus C
aagccgacgcgcc

SEQ ID NO: 3912372 - RNA, 18 nt, Human adenovirus C
aagccgcucauggcgcag

SEQ ID NO: 3912373 - RNA, 14 nt, Human adenovirus C
aagcgcgcugaggc

SEQ ID NO: 3912374 - RNA, 14 nt, Human adenovirus C
aagcgggucaaaaa

SEQ ID NO: 3912375 - RNA, 15 nt, Human adenovirus C
aagcgugcaggggcc

SEQ ID NO: 3912376 - RNA, 14 nt, Human adenovirus C
aagcuacaaggacc

SEQ ID NO: 3912377 - RNA, 15 nt, Human adenovirus C
aagcucgccugcgcc

SEQ ID NO: 3912378 - RNA, 16 nt, Human adenovirus C
aagcucgccugcgcca

SEQ ID NO: 3912379 - RNA, 22 nt, Human adenovirus C
aaggaggacagccuaaccgccc

SEQ ID NO: 3912380 - RNA, 16 nt, Human adenovirus C
aaggcuaauggcaaug

SEQ ID NO: 3912381 - RNA, 17 nt, Human adenovirus C
aaggcucgcguccaggc

SEQ ID NO: 3912382 - RNA, 13 nt, Human adenovirus C
aagggcccuggcu

SEQ ID NO: 3912383 - RNA, 11 nt, Human adenovirus C
aagggccuccc

SEQ ID NO: 3912384 - RNA, 14 nt, Human adenovirus C
aagggugcagcuga

SEQ ID NO: 3912385 - RNA, 18 nt, Human adenovirus C
aagggugcaugcccaggc

SEQ ID NO: 3912386 - RNA, 20 nt, Human adenovirus C
aaggguugagucgcaggacc

SEQ ID NO: 3912387 - RNA, 15 nt, Human adenovirus C
aauaagauuaacagu

SEQ ID NO: 3912388 - RNA, 15 nt, Human adenovirus C
aauacuaaaaaacug

SEQ ID NO: 3912389 - RNA, 12 nt, Human adenovirus C
aaucuccugcac

SEQ ID NO: 3912390 - RNA, 12 nt, Human adenovirus C
aaugacugggcg

SEQ ID NO: 3912391 - RNA, 13 nt, Human adenovirus C
aaugcaccacaga

SEQ ID NO: 3912392 - RNA, 23 nt, Human adenovirus C
aaugcaggaaagggucuggaguu

SEQ ID NO: 3912393 - RNA, 18 nt, Human adenovirus C
aauggggcggggcuuaaa

SEQ ID NO: 3912394 - RNA, 23 nt, Human adenovirus C
aauguauuauaacagcacuggca

SEQ ID NO: 3912395 - RNA, 17 nt, Human adenovirus C
aaugugagguuuacugg

SEQ ID NO: 3912396 - RNA, 17 nt, Human adenovirus C
aauuaaccuaaaugcca

SEQ ID NO: 3912397 - RNA, 20 nt, Human adenovirus C
aauuaaguauaugagcaauu

SEQ ID NO: 3912398 - RNA, 14 nt, Human adenovirus C
aauuaccugggcgg

SEQ ID NO: 3912399 - RNA, 22 nt, Human adenovirus C
aauucuuuaauuaugaaacgga

SEQ ID NO: 3912400 - RNA, 15 nt, Human adenovirus C
aauuuccaacgugga

SEQ ID NO: 3912401 - RNA, 15 nt, Human adenovirus C
aauuuuucuggaauu

SEQ ID NO: 3912402 - RNA, 22 nt, Human adenovirus C
acaacaguuuccagcgagacga

SEQ ID NO: 3912403 - RNA, 12 nt, Human adenovirus C
acaacucagggg

SEQ ID NO: 3912404 - RNA, 18 nt, Human adenovirus C
acaagaaguugaagacau

SEQ ID NO: 3912405 - RNA, 11 nt, Human adenovirus C
acaagcagcug

SEQ ID NO: 3912406 - RNA, 17 nt, Human adenovirus C
acaagcgagugguggcu

SEQ ID NO: 3912407 - RNA, 18 nt, Human adenovirus C
acaagcuaaaauacaacc

SEQ ID NO: 3912408 - RNA, 18 nt, Human adenovirus C
acaagcuacccacccagc

SEQ ID NO: 3912409 - RNA, 21 nt, Human adenovirus C
acaaggccggaaaccucaccu

SEQ ID NO: 3912410 - RNA, 18 nt, Human adenovirus C
acaaggccugcagaccgu

SEQ ID NO: 3912411 - RNA, 22 nt, Human adenovirus C
acaauacuaaaaaacuggaagu

SEQ ID NO: 3912412 - RNA, 15 nt, Human adenovirus C
acacaagcuaaaccu

SEQ ID NO: 3912413 - RNA, 22 nt, Human adenovirus C
acacaccucgaccacugccgcc

SEQ ID NO: 3912414 - RNA, 15 nt, Human adenovirus C
acacagaagcaaagg

SEQ ID NO: 3912415 - RNA, 15 nt, Human adenovirus C
acacaggcuggggcc

SEQ ID NO: 3912416 - RNA, 13 nt, Human adenovirus C
acacccuuacugu

SEQ ID NO: 3912417 - RNA, 17 nt, Human adenovirus C
acaccuagccuaaagcc

SEQ ID NO: 3912418 - RNA, 18 nt, Human adenovirus C
acaccuagccuaaagccc

SEQ ID NO: 3912419 - RNA, 15 nt, Human adenovirus C
acacgggcagccugg

SEQ ID NO: 3912420 - RNA, 18 nt, Human adenovirus C
acacuaacaguaguuacu

SEQ ID NO: 3912421 - RNA, 21 nt, Human adenovirus C
acacugcagcaggugcugccc

SEQ ID NO: 3912422 - RNA, 20 nt, Human adenovirus C
acagaacccacguggccauc

SEQ ID NO: 3912423 - RNA, 17 nt, Human adenovirus C
acagagcgaguauauau

SEQ ID NO: 3912424 - RNA, 15 nt, Human adenovirus C
acagaggaggcuagg

SEQ ID NO: 3912425 - RNA, 15 nt, Human adenovirus C
acagcgccugcauga

SEQ ID NO: 3912426 - RNA, 15 nt, Human adenovirus C
acagcgcgagcaggc

SEQ ID NO: 3912427 - RNA, 19 nt, Human adenovirus C
acagcggcggcagcagcag

SEQ ID NO: 3912428 - RNA, 14 nt, Human adenovirus C
acagugaagaugua

SEQ ID NO: 3912429 - RNA, 22 nt, Human adenovirus C
acaucaacuuugcgucucuggc

SEQ ID NO: 3912430 - RNA, 17 nt, Human adenovirus C
acaugaccaaggacugg

SEQ ID NO: 3912431 - RNA, 23 nt, Human adenovirus C
acaugcgagcccaacccgcgccu

SEQ ID NO: 3912432 - RNA, 20 nt, Human adenovirus C
acaugucuaugcccaggcuc

SEQ ID NO: 3912433 - RNA, 13 nt, Human adenovirus C
acauuccagcacc

SEQ ID NO: 3912434 - RNA, 19 nt, Human adenovirus C
accaaagcaaaccucaccu

SEQ ID NO: 3912435 - RNA, 18 nt, Human adenovirus C
accaacgugcccaucucc

SEQ ID NO: 3912436 - RNA, 11 nt, Human adenovirus C
accaccacccu

SEQ ID NO: 3912437 - RNA, 19 nt, Human adenovirus C
accaccauccuaaaccagc

SEQ ID NO: 3912438 - RNA, 18 nt, Human adenovirus C
accacuguuacucagcca

SEQ ID NO: 3912439 - RNA, 20 nt, Human adenovirus C
accacuuacaauuaccucag

SEQ ID NO: 3912440 - RNA, 22 nt, Human adenovirus C
accacuuacuggcugcagccag

SEQ ID NO: 3912441 - RNA, 18 nt, Human adenovirus C
accagccugugaugcugg

SEQ ID NO: 3912442 - RNA, 13 nt, Human adenovirus C
accaggcagugca

SEQ ID NO: 3912443 - RNA, 22 nt, Human adenovirus C
accagggcuucuacauuccaga

SEQ ID NO: 3912444 - RNA, 14 nt, Human adenovirus C
accaguccgggcca

SEQ ID NO: 3912445 - RNA, 21 nt, Human adenovirus C
accaguggagaggcagagcga

SEQ ID NO: 3912446 - RNA, 18 nt, Human adenovirus C
accaguuaacggucuggu

SEQ ID NO: 3912447 - RNA, 18 nt, Human adenovirus C
accaguuggaggaguggc

SEQ ID NO: 3912448 - RNA, 19 nt, Human adenovirus C
accauccuaaaccagcugg

SEQ ID NO: 3912449 - RNA, 22 nt, Human adenovirus C
agcggcaacccuuccaggaggg

SEQ ID NO: 3912450 - RNA, 17 nt, Human adenovirus C
agcggcagcggcagcaa

SEQ ID NO: 3912451 - RNA, 16 nt, Human adenovirus C
agcggggggcuucuga

SEQ ID NO: 3912452 - RNA, 20 nt, Human adenovirus C
agcggggggcuucugaggcu

SEQ ID NO: 3912453 - RNA, 14 nt, Human adenovirus C
agcgggguggugga

SEQ ID NO: 3912454 - RNA, 17 nt, Human adenovirus C
agcggggugguggaccu

SEQ ID NO: 3912455 - RNA, 20 nt, Human adenovirus C
agcggucacacagaagcaaa

SEQ ID NO: 3912456 - RNA, 19 nt, Human adenovirus C
agcggugacgcgggcgggc

SEQ ID NO: 3912457 - RNA, 16 nt, Human adenovirus C
agcgguuaagcuggga

SEQ ID NO: 3912458 - RNA, 17 nt, Human adenovirus C
agcgguuaagcugggau

SEQ ID NO: 3912459 - RNA, 18 nt, Human adenovirus C
agcgugcaggggcccaac

SEQ ID NO: 3912460 - RNA, 19 nt, Human adenovirus C
agcuaaaauacaaccccac

SEQ ID NO: 3912461 - RNA, 17 nt, Human adenovirus C
agcuacccacccagcgc

SEQ ID NO: 3912462 - RNA, 23 nt, Human adenovirus C
agcuacuuuaauuugacaggugg

SEQ ID NO: 3912463 - RNA, 23 nt, Human adenovirus C
agcucagugcaacaugaccaagg

SEQ ID NO: 3912464 - RNA, 18 nt, Human adenovirus C
agcuccucaggggagcug

SEQ ID NO: 3912465 - RNA, 18 nt, Human adenovirus C
agcucugcaaccuggucu

SEQ ID NO: 3912466 - RNA, 19 nt, Human adenovirus C
agcucugcaaccuggucuc

SEQ ID NO: 3912467 - RNA, 22 nt, Human adenovirus C
agcugccgucaucccugagcag

SEQ ID NO: 3912468 - RNA, 19 nt, Human adenovirus C
agcuuauuauucgccacaa

SEQ ID NO: 3912469 - RNA, 15 nt, Human adenovirus C
agcuugagccuggcu

SEQ ID NO: 3912470 - RNA, 15 nt, Human adenovirus C
agcuugaucugcugg

SEQ ID NO: 3912471 - RNA, 16 nt, Human adenovirus C
agcuugaucugcuggc

SEQ ID NO: 3912472 - RNA, 17 nt, Human adenovirus C
agcuugaucugcuggcg

SEQ ID NO: 3912473 - RNA, 12 nt, Human adenovirus C
agcuugguggca

SEQ ID NO: 3912474 - RNA, 14 nt, Human adenovirus C
agcuuguugaccag

SEQ ID NO: 3912475 - RNA, 22 nt, Human adenovirus C
aggaaccagccugugaugcugg

SEQ ID NO: 3912476 - RNA, 11 nt, Human adenovirus C
aggaaggugau

SEQ ID NO: 3912477 - RNA, 14 nt, Human adenovirus C
aggacagggccucu

SEQ ID NO: 3912478 - RNA, 22 nt, Human adenovirus C
aggacgaugaguacgagccaga

SEQ ID NO: 3912479 - RNA, 12 nt, Human adenovirus C
aggacugaugca

SEQ ID NO: 3912480 - RNA, 20 nt, Human adenovirus C
aggagaagcgcgcugaggcc

SEQ ID NO: 3912481 - RNA, 20 nt, Human adenovirus C
aggaggcaggacccuggugc

SEQ ID NO: 3912482 - RNA, 15 nt, Human adenovirus C
aggaugcggggugga

SEQ ID NO: 3912483 - RNA, 16 nt, Human adenovirus C
aggaugggcaggggcu

SEQ ID NO: 3912484 - RNA, 14 nt, Human adenovirus C
aggcaaacgaggaa

SEQ ID NO: 3912485 - RNA, 13 nt, Human adenovirus C
ugggcuccagcau

SEQ ID NO: 3912486 - RNA, 15 nt, Human adenovirus C
uggggcaggaggaca

SEQ ID NO: 3912487 - RNA, 17 nt, Human adenovirus C
ugguacuucccagagac

SEQ ID NO: 3912488 - RNA, 14 nt, Human adenovirus C
uggugcugccaaca

SEQ ID NO: 3912489 - RNA, 16 nt, Human adenovirus C
ugguggcuaccucucc

SEQ ID NO: 3912490 - RNA, 13 nt, Human adenovirus C
uggugggcgccga

SEQ ID NO: 3912491 - RNA, 16 nt, Human adenovirus C
ugguuaugauucauca

SEQ ID NO: 3912492 - RNA, 11 nt, Human adenovirus C
ugguuuccaag

SEQ ID NO: 3912493 - RNA, 23 nt, Human adenovirus C
uguaguagucuugcaugagccuu

SEQ ID NO: 3912494 - RNA, 22 nt, Human adenovirus C
uguaguauauccacucucucaa

SEQ ID NO: 3912495 - RNA, 14 nt, Human adenovirus C
ugucagauggaaag

SEQ ID NO: 3912496 - RNA, 11 nt, Human adenovirus C
ugucagccgcg

SEQ ID NO: 3912497 - RNA, 22 nt, Human adenovirus C
uguccacaguggacgcggccau

SEQ ID NO: 3912498 - RNA, 23 nt, Human adenovirus C
ugucccuaaccaugacuuugagg

SEQ ID NO: 3912499 - RNA, 22 nt, Human adenovirus C
ugucccuuuuuuuuccacagcu

SEQ ID NO: 3912500 - RNA, 21 nt, Human adenovirus C
uguccuuggguccggccugcu

SEQ ID NO: 3912501 - RNA, 17 nt, Human adenovirus C
ugucgcgaucggcgcgc

SEQ ID NO: 3912502 - RNA, 17 nt, Human adenovirus C
ugucguuucucagcagc

SEQ ID NO: 3912503 - RNA, 15 nt, Human adenovirus C
ugucuaugcccaggc

SEQ ID NO: 3912504 - RNA, 13 nt, Human adenovirus C
ugucucuaagcaa

SEQ ID NO: 3912505 - RNA, 17 nt, Human adenovirus C
ugucuuuacgccaccuu

SEQ ID NO: 3912506 - RNA, 19 nt, Human adenovirus C
ugucuuuccacgggcgcag

SEQ ID NO: 3912507 - RNA, 15 nt, Human adenovirus C
ugugcaccagccgca

SEQ ID NO: 3912508 - RNA, 12 nt, Human adenovirus C
ugugcccggccc

SEQ ID NO: 3912509 - RNA, 18 nt, Human adenovirus C
ugugcgacgucagacaac

SEQ ID NO: 3912510 - RNA, 17 nt, Human adenovirus C
ugugcguaacuugcugg

SEQ ID NO: 3912511 - RNA, 11 nt, Human adenovirus C
uguggaagccu

SEQ ID NO: 3912512 - RNA, 21 nt, Human adenovirus C
ugugucauguaugcguccaug

SEQ ID NO: 3912513 - RNA, 14 nt, Human adenovirus C
uguguggucaagca

SEQ ID NO: 3912514 - RNA, 22 nt, Human adenovirus C
uguuaccguggagcuugagugc

SEQ ID NO: 3912515 - RNA, 14 nt, Human adenovirus C
uguuauauuccaca

SEQ ID NO: 3912516 - RNA, 22 nt, Human adenovirus C
uguucccagcggucccauccaa

SEQ ID NO: 3912517 - RNA, 16 nt, Human adenovirus C
uguuucuccacgccuu

SEQ ID NO: 3912518 - RNA, 17 nt, Human adenovirus C
uuaaaucagcacaguaa

SEQ ID NO: 3912519 - RNA, 22 nt, Human adenovirus C
uuaaaucagcacaguaacugca

SEQ ID NO: 3912520 - RNA, 20 nt, Human adenovirus C
uuaagaaaugccuguuugaa

SEQ ID NO: 3912521 - RNA, 19 nt, Human adenovirus C
uuacaagugggaauuugaa

SEQ ID NO: 3912522 - RNA, 18 nt, Human adenovirus C
uuacaauaggaaacaaaa

SEQ ID NO: 3912523 - RNA, 16 nt, Human adenovirus C
uuacauuuaaaucaga

SEQ ID NO: 3912524 - RNA, 18 nt, Human adenovirus C
uuaccaagcgcccccugc

SEQ ID NO: 3912525 - RNA, 13 nt, Human adenovirus C
uuacuguaacugc

SEQ ID NO: 3912526 - RNA, 16 nt, Human adenovirus C
uuaggccagauugcaa

SEQ ID NO: 3912527 - RNA, 15 nt, Human adenovirus C
uucaacuaacauaaa

SEQ ID NO: 3912528 - RNA, 19 nt, Human adenovirus C
uucacacgcuugaagacaa

SEQ ID NO: 3912529 - RNA, 22 nt, Human adenovirus C
uucacccacagccgccugagca

SEQ ID NO: 3912530 - RNA, 15 nt, Human adenovirus C
uucagagaagaacau

SEQ ID NO: 3912531 - RNA, 12 nt, Human adenovirus C
uuccagaacuga

SEQ ID NO: 3912532 - RNA, 22 nt, Human adenovirus C
uuccaggcgcggcggcugcugc

SEQ ID NO: 3912533 - RNA, 17 nt, Human adenovirus C
uuccgcgguccuccucg

SEQ ID NO: 3912534 - RNA, 17 nt, Human adenovirus C
uuccggcagcagccgca

SEQ ID NO: 3912535 - RNA, 23 nt, Human adenovirus C
uucgcccugcgcgucggccaggu

SEQ ID NO: 3912536 - RNA, 21 nt, Human adenovirus C
uucgggaaagacgguggugcg

SEQ ID NO: 3912537 - RNA, 23 nt, Human adenovirus C
uucgugcgagggagcgaggaggu

SEQ ID NO: 3912538 - RNA, 14 nt, Human adenovirus C
uucuaaagcuaugu

SEQ ID NO: 3912539 - RNA, 15 nt, Human adenovirus C
uucugcccgccaccu

SEQ ID NO: 3912540 - RNA, 10 nt, Human adenovirus C
uucugcugug

SEQ ID NO: 3912541 - RNA, 12 nt, Human adenovirus C
uucugcugugcg

SEQ ID NO: 3912542 - RNA, 20 nt, Human adenovirus C
uucuucacgaucuuggccuu

SEQ ID NO: 3912543 - RNA, 11 nt, Human adenovirus C
uugaagacaug

SEQ ID NO: 3912544 - RNA, 17 nt, Human adenovirus C
uugacaacucaggggcc

SEQ ID NO: 3912545 - RNA, 22 nt, Human adenovirus C
uugagccuggcugacaaggugg

SEQ ID NO: 3912546 - RNA, 23 nt, Human adenovirus C
uugaguuuaaggaaccagcuugc

SEQ ID NO: 3912547 - RNA, 17 nt, Human adenovirus C
uugauauucaccuggcc

SEQ ID NO: 3912548 - RNA, 17 nt, Human adenovirus C
uugcaagacagaaacac

SEQ ID NO: 3912549 - RNA, 14 nt, Human adenovirus C
uugcauuuggguaa

SEQ ID NO: 3912550 - RNA, 13 nt, Human adenovirus C
uugcccgcgccac

SEQ ID NO: 3912551 - RNA, 16 nt, Human adenovirus C
uugcgcccuaccugug

SEQ ID NO: 3912552 - RNA, 14 nt, Human adenovirus C
uugcucgcccuugc

SEQ ID NO: 3912553 - RNA, 22 nt, Human adenovirus C
uugcugcgcccacaccuacagc

SEQ ID NO: 3912554 - RNA, 17 nt, Human adenovirus C
uugcugcgcgaggagga

SEQ ID NO: 3912555 - RNA, 20 nt, Human adenovirus C
uuggaaaaaaugaccgugga

SEQ ID NO: 3912556 - RNA, 22 nt, Human adenovirus C
ggggccagcguaggguggccgg

SEQ ID NO: 3912557 - RNA, 17 nt, Human adenovirus C
ggggcuccgggggcgag

SEQ ID NO: 3912558 - RNA, 11 nt, Human adenovirus C
ggggcugugcc

SEQ ID NO: 3912559 - RNA, 20 nt, Human adenovirus C
gggggcaacauccaagauga

SEQ ID NO: 3912560 - RNA, 15 nt, Human adenovirus C
gggguaccugcugga

SEQ ID NO: 3912561 - RNA, 22 nt, Human adenovirus C
gggguccacucgcuccagggug

SEQ ID NO: 3912562 - RNA, 22 nt, Human adenovirus C
gggugcuuggcauggacggggu

SEQ ID NO: 3912563 - RNA, 16 nt, Human adenovirus C
gguaccauauaaaccu

SEQ ID NO: 3912564 - RNA, 17 nt, Human adenovirus C
gguaccuuugagcugca

SEQ ID NO: 3912565 - RNA, 18 nt, Human adenovirus C
gguaccuuugagcugcag

SEQ ID NO: 3912566 - RNA, 17 nt, Human adenovirus C
gguagugggucuagcug

SEQ ID NO: 3912567 - RNA, 17 nt, Human adenovirus C
gguauugggguaacuga

SEQ ID NO: 3912568 - RNA, 22 nt, Human adenovirus C
ggucacccacuuugccuacccg

SEQ ID NO: 3912569 - RNA, 19 nt, Human adenovirus C
ggucacggugaaggggugc

SEQ ID NO: 3912570 - RNA, 12 nt, Human adenovirus C
ggucagcugcaa

SEQ ID NO: 3912571 - RNA, 18 nt, Human adenovirus C
ggucagggcgcgggcuag

SEQ ID NO: 3912572 - RNA, 19 nt, Human adenovirus C
gguccgugugcaccagccg

SEQ ID NO: 3912573 - RNA, 16 nt, Human adenovirus C
ggucgcccgggcaggg

SEQ ID NO: 3912574 - RNA, 21 nt, Human adenovirus C
ggugagcuccucaggggagcu

SEQ ID NO: 3912575 - RNA, 13 nt, Human adenovirus C
ggugcagacccug

SEQ ID NO: 3912576 - RNA, 13 nt, Human adenovirus C
ggugcgcggagcc

SEQ ID NO: 3912577 - RNA, 17 nt, Human adenovirus C
gguggaccuggccaacc

SEQ ID NO: 3912578 - RNA, 21 nt, Human adenovirus C
gguggcaccgggacugggcgu

SEQ ID NO: 3912579 - RNA, 22 nt, Human adenovirus C
gguggcaccgggacugggcgug

SEQ ID NO: 3912580 - RNA, 19 nt, Human adenovirus C
gguggcacuuaggccagau

SEQ ID NO: 3912581 - RNA, 20 nt, Human adenovirus C
gguggcguggucaaacucua

SEQ ID NO: 3912582 - RNA, 17 nt, Human adenovirus C
gguggcucccgggcuug

SEQ ID NO: 3912583 - RNA, 15 nt, Human adenovirus C
gguggucuucuacuu

SEQ ID NO: 3912584 - RNA, 14 nt, Human adenovirus C
ggugguuuuccaua

SEQ ID NO: 3912585 - RNA, 14 nt, Human adenovirus C
gguguaagcuucua

SEQ ID NO: 3912586 - RNA, 21 nt, Human adenovirus C
ggugucauaguccagccccuc

SEQ ID NO: 3912587 - RNA, 22 nt, Human adenovirus C
gguguguucugccacgaagaag

SEQ ID NO: 3912588 - RNA, 20 nt, Human adenovirus C
gguucgagucucgggccggc

SEQ ID NO: 3912589 - RNA, 22 nt, Human adenovirus C
gguuuacuucaaccccuuuucu

SEQ ID NO: 3912590 - RNA, 14 nt, Human adenovirus C
guaaacgcgcuggc

SEQ ID NO: 3912591 - RNA, 16 nt, Human adenovirus C
guaaaggugacucugg

SEQ ID NO: 3912592 - RNA, 22 nt, Human adenovirus C
guaaaguuccaagaagcgcggg

SEQ ID NO: 3912593 - RNA, 23 nt, Human adenovirus C
guaacaggagggggguguuccua

SEQ ID NO: 3912594 - RNA, 15 nt, Human adenovirus C
guaacucuacaagcu

SEQ ID NO: 3912595 - RNA, 20 nt, Human adenovirus C
guaacuuuauguccaugggc

SEQ ID NO: 3912596 - RNA, 20 nt, Human adenovirus C
guacacagcccgccaacgug

SEQ ID NO: 3912597 - RNA, 15 nt, Human adenovirus C
guacagcccacccug

SEQ ID NO: 3912598 - RNA, 21 nt, Human adenovirus C
cuuaaaaaacauuacuggaac

SEQ ID NO: 3912599 - RNA, 22 nt, Human adenovirus C
cuuaaaagccaccugagccuuu

SEQ ID NO: 3912600 - RNA, 16 nt, Human adenovirus C
cuuaacaguccccagg

SEQ ID NO: 3912601 - RNA, 15 nt, Human adenovirus C
cuuaaugaccagaca

SEQ ID NO: 3912602 - RNA, 16 nt, Human adenovirus C
cuuaccucccuugccg

SEQ ID NO: 3912603 - RNA, 16 nt, Human adenovirus C
cuuacuacaccuacuc

SEQ ID NO: 3912604 - RNA, 20 nt, Human adenovirus C
cuuacuggcugcagccaggg

SEQ ID NO: 3912605 - RNA, 15 nt, Human adenovirus C
cuuacuguaacugca

SEQ ID NO: 3912606 - RNA, 20 nt, Human adenovirus C
cuuauacuagcacuucugug

SEQ ID NO: 3912607 - RNA, 17 nt, Human adenovirus C
cuuauucagcaucaccu

SEQ ID NO: 3912608 - RNA, 17 nt, Human adenovirus C
cuucaacuacaccguca

SEQ ID NO: 3912609 - RNA, 18 nt, Human adenovirus C
cuucagcuugccugcucc

SEQ ID NO: 3912610 - RNA, 18 nt, Human adenovirus C
cuucauauuguugcagau

SEQ ID NO: 3912611 - RNA, 16 nt, Human adenovirus C
cuucauucagccgccg

SEQ ID NO: 3912612 - RNA, 22 nt, Human adenovirus C
cuucauucaguucauugacugg

SEQ ID NO: 3912613 - RNA, 16 nt, Human adenovirus C
cuuccagcccaugagc

SEQ ID NO: 3912614 - RNA, 23 nt, Human adenovirus C
cuuccaggcgcggcggcugcugc

SEQ ID NO: 3912615 - RNA, 23 nt, Human adenovirus C
cuuccauaagggccuccccuucu

SEQ ID NO: 3912616 - RNA, 19 nt, Human adenovirus C
cuucccugggaucaggcua

SEQ ID NO: 3912617 - RNA, 11 nt, Human adenovirus C
cuuccucccaa

SEQ ID NO: 3912618 - RNA, 19 nt, Human adenovirus C
cuucgaugcuccccuggac

SEQ ID NO: 3912619 - RNA, 15 nt, Human adenovirus C
cuucuaaauagcuaa

SEQ ID NO: 3912620 - RNA, 20 nt, Human adenovirus C
cuucucggccggcaacgcca

SEQ ID NO: 3912621 - RNA, 17 nt, Human adenovirus C
cuugaaagugggcaggc

SEQ ID NO: 3912622 - RNA, 16 nt, Human adenovirus C
cuugaacccgcacugg

SEQ ID NO: 3912623 - RNA, 22 nt, Human adenovirus C
cuugacgaccguucgcacuggg

SEQ ID NO: 3912624 - RNA, 13 nt, Human adenovirus C
cuugagaggccug

SEQ ID NO: 3912625 - RNA, 24 nt, Human adenovirus C
cuugagcaggccaacgagcgccuc

SEQ ID NO: 3912626 - RNA, 13 nt, Human adenovirus C
cuugaucugcugg

SEQ ID NO: 3912627 - RNA, 14 nt, Human adenovirus C
cuugcaaggaagca

SEQ ID NO: 3912628 - RNA, 20 nt, Human adenovirus C
cuugcagauauggcccucac

SEQ ID NO: 3912629 - RNA, 14 nt, Human adenovirus C
cuugcccuuggagg

SEQ ID NO: 3912630 - RNA, 15 nt, Human adenovirus C
cuugccugcuccaga

SEQ ID NO: 3912631 - RNA, 13 nt, Human adenovirus C
cuugcuagacugc

SEQ ID NO: 3912632 - RNA, 16 nt, Human adenovirus C
cuuggagacgcccuug

SEQ ID NO: 3912633 - RNA, 23 nt, Human adenovirus C
cuuggcacccaccgugcagcuga

SEQ ID NO: 3912634 - RNA, 20 nt, Human adenovirus C
cuuggguauccugucugagg

SEQ ID NO: 3912635 - RNA, 20 nt, Human adenovirus C
cuugugacgagucuucuucg

SEQ ID NO: 3912636 - RNA, 14 nt, Human adenovirus C
cuuuaauuaugaaa

SEQ ID NO: 3912637 - RNA, 16 nt, Human adenovirus C
cuuuccaagauggcua

SEQ ID NO: 3912638 - RNA, 11 nt, Human adenovirus C
cuuuccaggcu

SEQ ID NO: 3912639 - RNA, 22 nt, Human adenovirus C
cuuugaguucgccaccaccgcc

SEQ ID NO: 3912640 - RNA, 17 nt, Human adenovirus C
cuuuggacaccucccac

SEQ ID NO: 3912641 - RNA, 13 nt, Human adenovirus C
cuuugugagcgca

SEQ ID NO: 3912642 - RNA, 20 nt, Human adenovirus C
cuuuuauguauaaauuucca

SEQ ID NO: 3912643 - RNA, 15 nt, Human adenovirus C
cuuuuuugaguuuua

SEQ ID NO: 3912644 - RNA, 14 nt, Human adenovirus C
gaaaagcuuauuau

SEQ ID NO: 3912645 - RNA, 16 nt, Human adenovirus C
gaaaauucuaaagcua

SEQ ID NO: 3912646 - RNA, 21 nt, Human adenovirus C
gaaacacaagcuaaaccugua

SEQ ID NO: 3912647 - RNA, 18 nt, Human adenovirus C
gaaaccccacgguggcac

SEQ ID NO: 3912648 - RNA, 16 nt, Human adenovirus C
gaaacuuccagcccau

SEQ ID NO: 3912649 - RNA, 11 nt, Human adenovirus C
gaaagcuaaag

SEQ ID NO: 3912650 - RNA, 14 nt, Human adenovirus C
gaaagugggcaggc

SEQ ID NO: 3912651 - RNA, 22 nt, Human adenovirus C
gaacagggcggggauggcgcag

SEQ ID NO: 3912652 - RNA, 19 nt, Human adenovirus C
gaacgcggguuuggcaggg

SEQ ID NO: 3912653 - RNA, 16 nt, Human adenovirus C
gaacuaccugcugacc

SEQ ID NO: 3912654 - RNA, 19 nt, Human adenovirus C
gaacuauggcagcaaggcc

SEQ ID NO: 3912655 - RNA, 17 nt, Human adenovirus C
gaagaccaaucccgccc

SEQ ID NO: 3912656 - RNA, 21 nt, Human adenovirus C
gaagaccauucacguagccag

SEQ ID NO: 3912657 - RNA, 15 nt, Human adenovirus C
gaagaugucuuggaa

SEQ ID NO: 3912658 - RNA, 21 nt, Human adenovirus C
gaagaugucuuggaaaaaaug

SEQ ID NO: 3912659 - RNA, 18 nt, Human adenovirus C
gaagauuuuucugcugug

SEQ ID NO: 3912660 - RNA, 18 nt, Human adenovirus C
gaagccccucaucggcug

SEQ ID NO: 3912661 - RNA, 22 nt, Human adenovirus C
gaagcgacgaaugagcuccaca

SEQ ID NO: 3912662 - RNA, 14 nt, Human adenovirus C
gaagcugcagcugc

SEQ ID NO: 3912663 - RNA, 18 nt, Human adenovirus C
gaagcuggcgucugugag

SEQ ID NO: 3912664 - RNA, 21 nt, Human adenovirus C
gaaggcucgcguccaggccag

SEQ ID NO: 3912665 - RNA, 14 nt, Human adenovirus C
gaagggcacgagcu

SEQ ID NO: 3912666 - RNA, 19 nt, Human adenovirus C
gaagggcacgagcugcuuc

SEQ ID NO: 3912667 - RNA, 23 nt, Human adenovirus C
gaaggggguggugugucgcccca

SEQ ID NO: 3912668 - RNA, 19 nt, Human adenovirus C
gaagucccugcgacgggcc

SEQ ID NO: 3912669 - RNA, 16 nt, Human adenovirus C
gaaucuaacuuuuagc

SEQ ID NO: 3912670 - RNA, 16 nt, Human adenovirus C
gaaucuacuggggcuc

SEQ ID NO: 3912671 - RNA, 14 nt, Human adenovirus C
gaaucuggcgccuc

SEQ ID NO: 3912672 - RNA, 16 nt, Human adenovirus C
gaaugcgcaggcgguc

SEQ ID NO: 3912673 - RNA, 17 nt, Human adenovirus C
gacaaagcccaagaaau

SEQ ID NO: 3912674 - RNA, 13 nt, Human adenovirus C
gacaacgcgcaug

SEQ ID NO: 3912675 - RNA, 16 nt, Human adenovirus C
gacaacgcgcaugccc

SEQ ID NO: 3912676 - RNA, 19 nt, Human adenovirus C
gacaagcgcuuuccaggcu

SEQ ID NO: 3912677 - RNA, 15 nt, Human adenovirus C
gacaagcuaaaauac

SEQ ID NO: 3912678 - RNA, 17 nt, Human adenovirus C
gacaaguugaaagagca

SEQ ID NO: 3912679 - RNA, 16 nt, Human adenovirus C
gacaaugcagaaacac

SEQ ID NO: 3912680 - RNA, 19 nt, Human adenovirus C
gacacccaagggugcagcu

SEQ ID NO: 3912681 - RNA, 15 nt, Human adenovirus C
gacaccuucaacccc

SEQ ID NO: 3912682 - RNA, 12 nt, Human adenovirus C
gacacggcggcg

SEQ ID NO: 3912683 - RNA, 17 nt, Human adenovirus C
gacacuguaccgcgagg

SEQ ID NO: 3912684 - RNA, 12 nt, Human adenovirus C
gacagaaacaca

SEQ ID NO: 3912685 - RNA, 14 nt, Human adenovirus C
gacagaaacacaga

SEQ ID NO: 3912686 - RNA, 17 nt, Human adenovirus C
gacagaaacacagagcu

SEQ ID NO: 3912687 - RNA, 13 nt, Human adenovirus C
gacagcaagaaac

SEQ ID NO: 3912688 - RNA, 21 nt, Human adenovirus C
gacagggcccagucugcaaga

SEQ ID NO: 3912689 - RNA, 23 nt, Human adenovirus C
gacaugcagggcacccuccccuu

SEQ ID NO: 3912690 - RNA, 22 nt, Human adenovirus C
gacauuggcuggaaugccauag

SEQ ID NO: 3912691 - RNA, 20 nt, Human adenovirus C
gacauuucagaucggcggcg

SEQ ID NO: 3912692 - RNA, 21 nt, Human adenovirus C
gaccaaagcaaaccucaccuc

SEQ ID NO: 3912693 - RNA, 12 nt, Human adenovirus C
gaccccauggca

SEQ ID NO: 3912694 - RNA, 16 nt, Human adenovirus C
gaccggcaaggcaaug

SEQ ID NO: 3912695 - RNA, 17 nt, Human adenovirus C
gaccguaaaccugagcc

SEQ ID NO: 3912696 - RNA, 20 nt, Human adenovirus C
gaccguggagccugggcugg

SEQ ID NO: 3912697 - RNA, 17 nt, Human adenovirus C
gaccugccuccccccgc

SEQ ID NO: 3912698 - RNA, 11 nt, Human adenovirus C
gaccuggccaa

SEQ ID NO: 3912699 - RNA, 14 nt, Human adenovirus C
gaccuggccaacca

SEQ ID NO: 3912700 - RNA, 16 nt, Human adenovirus C
gaccuggccaaccagg

SEQ ID NO: 3912701 - RNA, 14 nt, Human adenovirus C
gacgaaggcucgcg

SEQ ID NO: 3912702 - RNA, 18 nt, Human adenovirus C
gacgaaguaaguuugcca

SEQ ID NO: 3912703 - RNA, 14 nt, Human adenovirus C
gacgacagcagcgu

SEQ ID NO: 3912704 - RNA, 18 nt, Human adenovirus C
gacgacauagacgacagc

SEQ ID NO: 3912705 - RNA, 11 nt, Human adenovirus C
gacgaccuggg

SEQ ID NO: 3912706 - RNA, 19 nt, Human adenovirus C
gacgagguggaacugcugc

SEQ ID NO: 3912707 - RNA, 13 nt, Human adenovirus C
gacgccgccucag

SEQ ID NO: 3912708 - RNA, 22 nt, Human adenovirus C
gacgcggaggcucucuucagca

SEQ ID NO: 3912709 - RNA, 12 nt, Human adenovirus C
gacgcggcggca

SEQ ID NO: 3912710 - RNA, 12 nt, Human adenovirus C
gacgcucggugc

SEQ ID NO: 3912711 - RNA, 13 nt, Human adenovirus C
gacggaugagcuc

SEQ ID NO: 3912712 - RNA, 13 nt, Human adenovirus C
gacggcgcaccgg

SEQ ID NO: 3912713 - RNA, 12 nt, Human adenovirus C
gacggcggccug

SEQ ID NO: 3912714 - RNA, 24 nt, Human adenovirus C
gacggcguaguuucgcaggcgcug

SEQ ID NO: 3912715 - RNA, 12 nt, Human adenovirus C
gacgguggugcg

SEQ ID NO: 3912716 - RNA, 15 nt, Human adenovirus C
gacguacuucagccu

SEQ ID NO: 3912717 - RNA, 23 nt, Human adenovirus C
cccuaacaguggcaaccaccgcu

SEQ ID NO: 3912718 - RNA, 12 nt, Human adenovirus C
cccuccccuucu

SEQ ID NO: 3912719 - RNA, 14 nt, Human adenovirus C
cccuccucaccugc

SEQ ID NO: 3912720 - RNA, 17 nt, Human adenovirus C
cccucgccggcgcccca

SEQ ID NO: 3912721 - RNA, 19 nt, Human adenovirus C
cccugcaaacaucagcccc

SEQ ID NO: 3912722 - RNA, 23 nt, Human adenovirus C
cccugcaaacaucagccccccuc

SEQ ID NO: 3912723 - RNA, 22 nt, Human adenovirus C
cccugcgucgcaaccaggaaca

SEQ ID NO: 3912724 - RNA, 16 nt, Human adenovirus C
cccuggaggcagcugg

SEQ ID NO: 3912725 - RNA, 19 nt, Human adenovirus C
cccuggcuggcacgggcag

SEQ ID NO: 3912726 - RNA, 13 nt, Human adenovirus C
cccuggcuguggg

SEQ ID NO: 3912727 - RNA, 13 nt, Human adenovirus C
cccuggugcugcc

SEQ ID NO: 3912728 - RNA, 17 nt, Human adenovirus C
cccuguggaccgcgagg

SEQ ID NO: 3912729 - RNA, 15 nt, Human adenovirus C
cccuucucccacccc

SEQ ID NO: 3912730 - RNA, 13 nt, Human adenovirus C
cccuucuucuucu

SEQ ID NO: 3912731 - RNA, 9 nt, Human adenovirus C
cccuugccg

SEQ ID NO: 3912732 - RNA, 22 nt, Human adenovirus C
ccgaaccuuuggacaccuccca

SEQ ID NO: 3912733 - RNA, 21 nt, Human adenovirus C
ccgaagaggugucagacgaaa

SEQ ID NO: 3912734 - RNA, 14 nt, Human adenovirus C
ccgacccggcacug

SEQ ID NO: 3912735 - RNA, 15 nt, Human adenovirus C
ccgacccggcacugc

SEQ ID NO: 3912736 - RNA, 15 nt, Human adenovirus C
ccgaggucgagaagc

SEQ ID NO: 3912737 - RNA, 22 nt, Human adenovirus C
ccgaucacuuggugcuggccug

SEQ ID NO: 3912738 - RNA, 20 nt, Human adenovirus C
ccgcaauacagagacaggac

SEQ ID NO: 3912739 - RNA, 22 nt, Human adenovirus C
ccgcaccgcucccuggucugca

SEQ ID NO: 3912740 - RNA, 23 nt, Human adenovirus C
ccgcacgcgaaccuacgcccaga

SEQ ID NO: 3912741 - RNA, 21 nt, Human adenovirus C
ccgcacuggcuaccgcccccu

SEQ ID NO: 3912742 - RNA, 20 nt, Human adenovirus C
ccgcagcccuaucagcagcc

SEQ ID NO: 3912743 - RNA, 21 nt, Human adenovirus C
ccgcagcccuaucagcagccg

SEQ ID NO: 3912744 - RNA, 19 nt, Human adenovirus C
ccgcaggccaagcagcuug

SEQ ID NO: 3912745 - RNA, 23 nt, Human adenovirus C
ccgccagcccccaccaucaccac

SEQ ID NO: 3912746 - RNA, 15 nt, Human adenovirus C
ccgccgcaccgugcg

SEQ ID NO: 3912747 - RNA, 13 nt, Human adenovirus C
ccgccgccgcagc

SEQ ID NO: 3912748 - RNA, 12 nt, Human adenovirus C
ccgccgccgccg

SEQ ID NO: 3912749 - RNA, 21 nt, Human adenovirus C
ccgccgcuuuggggucacugc

SEQ ID NO: 3912750 - RNA, 15 nt, Human adenovirus C
ccgccggcacugccu

SEQ ID NO: 3912751 - RNA, 14 nt, Human adenovirus C
ccgccucagccgcu

SEQ ID NO: 3912752 - RNA, 14 nt, Human adenovirus C
ccgccucagcuaca

SEQ ID NO: 3912753 - RNA, 19 nt, Human adenovirus C
ccgccuuuuagcugcaaac

SEQ ID NO: 3912754 - RNA, 15 nt, Human adenovirus C
ccgcgagcuuagaaa

SEQ ID NO: 3912755 - RNA, 23 nt, Human adenovirus C
ccgcgcacaaggaagcagagugg

SEQ ID NO: 3912756 - RNA, 13 nt, Human adenovirus C
ccgcgcccaccga

SEQ ID NO: 3912757 - RNA, 15 nt, Human adenovirus C
ccgcgcgcuggggca

SEQ ID NO: 3912758 - RNA, 18 nt, Human adenovirus C
ccgcggcgacaggucagg

SEQ ID NO: 3912759 - RNA, 15 nt, Human adenovirus C
ccgcggcguggcccu

SEQ ID NO: 3912760 - RNA, 13 nt, Human adenovirus C
ccgcggggacagg

SEQ ID NO: 3912761 - RNA, 19 nt, Human adenovirus C
ccgcgguugugcaggguga

SEQ ID NO: 3912762 - RNA, 23 nt, Human adenovirus C
ccgcgguugugcagggugacaag

SEQ ID NO: 3912763 - RNA, 21 nt, Human adenovirus C
ccgcguacgagcagacgguga

SEQ ID NO: 3912764 - RNA, 14 nt, Human adenovirus C
ccgcguccgcgcuc

SEQ ID NO: 3912765 - RNA, 20 nt, Human adenovirus C
ccgcuccucaggcgccgccg

SEQ ID NO: 3912766 - RNA, 18 nt, Human adenovirus C
ccgcucgaaggcuggccg

SEQ ID NO: 3912767 - RNA, 21 nt, Human adenovirus C
ccgcuuuccaagauggcuacc

SEQ ID NO: 3912768 - RNA, 12 nt, Human adenovirus C
ccggaaacaggg

SEQ ID NO: 3912769 - RNA, 21 nt, Human adenovirus C
ccggaccugggcuggcggugg

SEQ ID NO: 3912770 - RNA, 12 nt, Human adenovirus C
ccggcacugccg

SEQ ID NO: 3912771 - RNA, 22 nt, Human adenovirus C
ccggcagcagccgcaggccaac

SEQ ID NO: 3912772 - RNA, 15 nt, Human adenovirus C
ccggcgccagcaccu

SEQ ID NO: 3912773 - RNA, 20 nt, Human adenovirus C
ccggcgcgcgcaaaccccac

SEQ ID NO: 3912774 - RNA, 15 nt, Human adenovirus C
ccggcggcagcggca

SEQ ID NO: 3912775 - RNA, 17 nt, Human adenovirus C
ccggcggcgguggugga

SEQ ID NO: 3912776 - RNA, 13 nt, Human adenovirus C
ccgggcacagcag

SEQ ID NO: 3912777 - RNA, 11 nt, Human adenovirus C
ccgggcagcag

SEQ ID NO: 3912778 - RNA, 17 nt, Human adenovirus C
ccgggcagcaggcgcgc

SEQ ID NO: 3912779 - RNA, 20 nt, Human adenovirus C
ccgggcugcgcgcuggccag

SEQ ID NO: 3912780 - RNA, 23 nt, Human adenovirus C
ccggggcgcgcugcggcugcugu

SEQ ID NO: 3912781 - RNA, 14 nt, Human adenovirus C
ccggggcuguggac

SEQ ID NO: 3912782 - RNA, 20 nt, Human adenovirus C
ccgggggugcuuggcaugga

SEQ ID NO: 3912783 - RNA, 13 nt, Human adenovirus C
ccgggucagggcg

SEQ ID NO: 3912784 - RNA, 23 nt, Human adenovirus C
ccgucaagaaaaacaccaccacc

SEQ ID NO: 3912785 - RNA, 13 nt, Human adenovirus C
ccgucacccagca

SEQ ID NO: 3912786 - RNA, 20 nt, Human adenovirus C
ccguccgccgugauccaugc

SEQ ID NO: 3912787 - RNA, 18 nt, Human adenovirus C
ccgucuacucccagcuca

SEQ ID NO: 3912788 - RNA, 15 nt, Human adenovirus C
ccgugauccaugcgg

SEQ ID NO: 3912789 - RNA, 15 nt, Human adenovirus C
ccgugcuggccccga

SEQ ID NO: 3912790 - RNA, 19 nt, Human adenovirus C
ccguggagccugggcugga

SEQ ID NO: 3912791 - RNA, 20 nt, Human adenovirus C
ccgugggcucguggugcuug

SEQ ID NO: 3912792 - RNA, 14 nt, Human adenovirus C
ccguucucgcgggg

SEQ ID NO: 3912793 - RNA, 20 nt, Human adenovirus C
ccguuggagacugcagccuc

SEQ ID NO: 3912794 - RNA, 13 nt, Human adenovirus C
ccguuuucccacg

SEQ ID NO: 3912795 - RNA, 20 nt, Human adenovirus C
ccuaaacaacucgcugcugc

SEQ ID NO: 3912796 - RNA, 14 nt, Human adenovirus C
ccuaaaccagcugg

SEQ ID NO: 3912797 - RNA, 14 nt, Human adenovirus C
ccuaaaggagcugc

SEQ ID NO: 3912798 - RNA, 12 nt, Human adenovirus C
ccuaaaugccaa

SEQ ID NO: 3912799 - RNA, 16 nt, Human adenovirus C
ccuacuccggcacugc

SEQ ID NO: 3912800 - RNA, 15 nt, Human adenovirus C
ccuaucauugugcuc

SEQ ID NO: 3912801 - RNA, 13 nt, Human adenovirus C
ccuauuaaaaaac

SEQ ID NO: 3912802 - RNA, 14 nt, Human adenovirus C
ccucacccgcagcu

SEQ ID NO: 3912803 - RNA, 15 nt, Human adenovirus C
ccucacccgcagcug

SEQ ID NO: 3912804 - RNA, 12 nt, Human adenovirus C
ccucagcagcgg

SEQ ID NO: 3912805 - RNA, 15 nt, Human adenovirus C
ccucagcuacaagcu

SEQ ID NO: 3912806 - RNA, 18 nt, Human adenovirus C
ccuccaccuucagccuca

SEQ ID NO: 3912807 - RNA, 16 nt, Human adenovirus C
ccuccccuucuccuac

SEQ ID NO: 3912808 - RNA, 14 nt, Human adenovirus C
ccuccgcccugcgc

SEQ ID NO: 3912809 - RNA, 17 nt, Human adenovirus C
ccuccgcccugcgcgcg

SEQ ID NO: 3912810 - RNA, 13 nt, Human adenovirus C
ccuccucccuccu

SEQ ID NO: 3912811 - RNA, 15 nt, Human adenovirus C
ccuccuccugccagg

SEQ ID NO: 3912812 - RNA, 22 nt, Human adenovirus C
ccucggacucgagacgccgccu

SEQ ID NO: 3912813 - RNA, 18 nt, Human adenovirus C
ccucuucccgacuggcca

SEQ ID NO: 3912814 - RNA, 14 nt, Human adenovirus C
ccucuuccucccau

SEQ ID NO: 3912815 - RNA, 20 nt, Human adenovirus C
ccucuuguccugcaucucuu

SEQ ID NO: 3912816 - RNA, 22 nt, Human adenovirus C
ccugaacuaccagaacgaccac

SEQ ID NO: 3912817 - RNA, 13 nt, Human adenovirus C
ccugaauaacaag

SEQ ID NO: 3912818 - RNA, 23 nt, Human adenovirus C
ccugacgcguuccggcagcagcc

SEQ ID NO: 3912819 - RNA, 16 nt, Human adenovirus C
ccugagccccgggcug

SEQ ID NO: 3912820 - RNA, 13 nt, Human adenovirus C
ccugagccuuugc

SEQ ID NO: 3912821 - RNA, 17 nt, Human adenovirus C
ccugagcguaaccagac

SEQ ID NO: 3912822 - RNA, 18 nt, Human adenovirus C
ccugcaggaaucgcccca

SEQ ID NO: 3912823 - RNA, 20 nt, Human adenovirus C
ccugcaggaaucgccccauc

SEQ ID NO: 3912824 - RNA, 18 nt, Human adenovirus C
ccugccagacaagcuaaa

SEQ ID NO: 3912825 - RNA, 22 nt, Human adenovirus C
ccugccgugccaaccgcagccg

SEQ ID NO: 3912826 - RNA, 15 nt, Human adenovirus C
ccugcgacgggccga

SEQ ID NO: 3912827 - RNA, 18 nt, Human adenovirus C
ccugcgccguagcgccau

SEQ ID NO: 3912828 - RNA, 12 nt, Human adenovirus C
ccugcgccgugc

SEQ ID NO: 3912829 - RNA, 20 nt, Human adenovirus C
ccugcgucauuacccagggc

SEQ ID NO: 3912830 - RNA, 19 nt, Human adenovirus C
ccugcugaaugcgcaggcg

SEQ ID NO: 3912831 - RNA, 19 nt, Human adenovirus C
ccuggccaaccaggcagug

SEQ ID NO: 3912832 - RNA, 22 nt, Human adenovirus C
ccuggcugacaagguggccgcc

SEQ ID NO: 3912833 - RNA, 16 nt, Human adenovirus C
ccuggcuggcacgggc

SEQ ID NO: 3912834 - RNA, 20 nt, Human adenovirus C
ccuguaacgcuggaccugcc

SEQ ID NO: 3912835 - RNA, 16 nt, Human adenovirus C
ccuguauauuaaugca

SEQ ID NO: 3912836 - RNA, 18 nt, Human adenovirus C
ccuguauauuaaugcauc

SEQ ID NO: 3912837 - RNA, 15 nt, Human adenovirus C
ccugugaugcuggau

SEQ ID NO: 3912838 - RNA, 16 nt, Human adenovirus C
ccugugcugccagggc

SEQ ID NO: 3912839 - RNA, 17 nt, Human adenovirus C
ccugugcuuugcuccca

SEQ ID NO: 3912840 - RNA, 22 nt, Human adenovirus C
ccugugcuuugcucccaaaccu

SEQ ID NO: 3912841 - RNA, 19 nt, Human adenovirus C
ccuguguggaagccuggac

SEQ ID NO: 3912842 - RNA, 20 nt, Human adenovirus C
ccuguguggaagccuggacc

SEQ ID NO: 3912843 - RNA, 22 nt, Human adenovirus C
ccuuaguaugcagcgcgcggcg

SEQ ID NO: 3912844 - RNA, 16 nt, Human adenovirus C
ccuuauaucgcccagc

SEQ ID NO: 3912845 - RNA, 21 nt, Human adenovirus C
ccuucagccucaagcagcgaa

SEQ ID NO: 3912846 - RNA, 14 nt, Human adenovirus C
ccuucucccacccc

SEQ ID NO: 3912847 - RNA, 18 nt, Human adenovirus C
ccuugacggaaccuucua

SEQ ID NO: 3912848 - RNA, 14 nt, Human adenovirus C
ccuugccgugcuug

SEQ ID NO: 3912849 - RNA, 20 nt, Human adenovirus C
ccuuggaggaggcgccgcac

SEQ ID NO: 3912850 - RNA, 22 nt, Human adenovirus C
ccuuucacauucaggugcccca

SEQ ID NO: 3912851 - RNA, 14 nt, Human adenovirus C
ccuuugagcugcag

SEQ ID NO: 3912852 - RNA, 13 nt, Human adenovirus C
cgaacccccgcgg

SEQ ID NO: 3912853 - RNA, 20 nt, Human adenovirus C
cgaagaaggaagagcaggau

SEQ ID NO: 3912854 - RNA, 19 nt, Human adenovirus C
cgaagagcauaucgagggc

SEQ ID NO: 3912855 - RNA, 20 nt, Human adenovirus C
cgacacgguuaacuccuccu

SEQ ID NO: 3912856 - RNA, 16 nt, Human adenovirus C
cgacccgcgagcuuag

SEQ ID NO: 3912857 - RNA, 14 nt, Human adenovirus C
cgacgaaugagcuc

SEQ ID NO: 3912858 - RNA, 16 nt, Human adenovirus C
cgacgccgaaccacca

SEQ ID NO: 3912859 - RNA, 23 nt, Human adenovirus C
cgacgcggcgguugaucuccuga

SEQ ID NO: 3912860 - RNA, 24 nt, Human adenovirus C
cgacuacaugaacaagcgaguggu

SEQ ID NO: 3912861 - RNA, 20 nt, Human adenovirus C
cgagagcguggugagcgcgg

SEQ ID NO: 3912862 - RNA, 16 nt, Human adenovirus C
cgagauugagcuccac

SEQ ID NO: 3912863 - RNA, 20 nt, Human adenovirus C
cgagcggccgccgcagcagc

SEQ ID NO: 3912864 - RNA, 17 nt, Human adenovirus C
cgagcgguugcugcgcg

SEQ ID NO: 3912865 - RNA, 13 nt, Human adenovirus C
cgaggagcugagg

SEQ ID NO: 3912866 - RNA, 20 nt, Human adenovirus C
cgaggaggacuuugagcccg

SEQ ID NO: 3912867 - RNA, 13 nt, Human adenovirus C
cgaggaggaggag

SEQ ID NO: 3912868 - RNA, 19 nt, Human adenovirus C
cgaggaucgcucaguacca

SEQ ID NO: 3912869 - RNA, 17 nt, Human adenovirus C
cgaggaugaagaagagg

SEQ ID NO: 3912870 - RNA, 13 nt, Human adenovirus C
cgagggagaggag

SEQ ID NO: 3912871 - RNA, 14 nt, Human adenovirus C
cgagggccagcugu

SEQ ID NO: 3912872 - RNA, 12 nt, Human adenovirus C
cgagggccuggc

SEQ ID NO: 3912873 - RNA, 19 nt, Human adenovirus C
cgaggggaguuauggugga

SEQ ID NO: 3912874 - RNA, 23 nt, Human adenovirus C
cgagucuggugacuuggcaccca

SEQ ID NO: 3912875 - RNA, 15 nt, Human adenovirus C
cgaucggcaggcuca

SEQ ID NO: 3912876 - RNA, 18 nt, Human adenovirus C
cgaucggcaggcucagcg

SEQ ID NO: 3912877 - RNA, 21 nt, Human adenovirus C
cgaucguaaacgcgcuggccg

SEQ ID NO: 3912878 - RNA, 24 nt, Human adenovirus C
cgaugacucggcagacgacagcag

SEQ ID NO: 3912879 - RNA, 13 nt, Human adenovirus C
cgaugagcagcug

SEQ ID NO: 3912880 - RNA, 20 nt, Human adenovirus C
cgaugaggccggccuggucu

SEQ ID NO: 3912881 - RNA, 16 nt, Human adenovirus C
cgaugauucgcaccgc

SEQ ID NO: 3912882 - RNA, 23 nt, Human adenovirus C
cgaugccgccaacgcgccuacca

SEQ ID NO: 3912883 - RNA, 15 nt, Human adenovirus C
cgcaacaccacugcu

SEQ ID NO: 3912884 - RNA, 13 nt, Human adenovirus C
cgcaaccgcagac

SEQ ID NO: 3912885 - RNA, 19 nt, Human adenovirus C
cgcaacuagauugcaagaa

SEQ ID NO: 3912886 - RNA, 12 nt, Human adenovirus C
cgcaacugggca

SEQ ID NO: 3912887 - RNA, 14 nt, Human adenovirus C
cgcaacugggcagc

SEQ ID NO: 3912888 - RNA, 14 nt, Human adenovirus C
cgcaccugccccua

SEQ ID NO: 3912889 - RNA, 19 nt, Human adenovirus C
cgcacgaggggcagugcag

SEQ ID NO: 3912890 - RNA, 21 nt, Human adenovirus C
cgcacggcguccggcucacca

SEQ ID NO: 3912891 - RNA, 24 nt, Human adenovirus C
cgcagacacgaucggcaggcucag

SEQ ID NO: 3912892 - RNA, 16 nt, Human adenovirus C
cgcagaugggagcugu

SEQ ID NO: 3912893 - RNA, 13 nt, Human adenovirus C
cgcagcagcaggg

SEQ ID NO: 3912894 - RNA, 18 nt, Human adenovirus C
cgcagcccuaucagcagc

SEQ ID NO: 3912895 - RNA, 15 nt, Human adenovirus C
cgcagcuugagccug

SEQ ID NO: 3912896 - RNA, 20 nt, Human adenovirus C
cgcagcuuguugaccagcuc

SEQ ID NO: 3912897 - RNA, 23 nt, Human adenovirus C
cgcaguuggcgaugagcagcugg

SEQ ID NO: 3912898 - RNA, 17 nt, Human adenovirus C
cgcaguuggggccuccg

SEQ ID NO: 3912899 - RNA, 23 nt, Human adenovirus C
cgcaucuugcgcuaugugcagca

SEQ ID NO: 3912900 - RNA, 21 nt, Human adenovirus C
cgcauugcguaccucaggcac

SEQ ID NO: 3912901 - RNA, 21 nt, Human adenovirus C
cgccaaccgcgguugugcagg

SEQ ID NO: 3912902 - RNA, 21 nt, Human adenovirus C
cgccaacuccgcccacgcgcu

SEQ ID NO: 3912903 - RNA, 16 nt, Human adenovirus C
cgccaccaccgccucc

SEQ ID NO: 3912904 - RNA, 22 nt, Human adenovirus C
cgccaccaccgccuccaccgau

SEQ ID NO: 3912905 - RNA, 17 nt, Human adenovirus C
cgccaccaguuggagga

SEQ ID NO: 3912906 - RNA, 21 nt, Human adenovirus C
cgccaccgagacguacuucag

SEQ ID NO: 3912907 - RNA, 21 nt, Human adenovirus C
cgccaccuucuuccccauggc

SEQ ID NO: 3912908 - RNA, 19 nt, Human adenovirus C
cgccagagcuuccacuugg

SEQ ID NO: 3912909 - RNA, 19 nt, Human adenovirus C
cgccagaggagcugcugag

SEQ ID NO: 3912910 - RNA, 21 nt, Human adenovirus C
cgccagaggagcugcugagcc

SEQ ID NO: 3912911 - RNA, 13 nt, Human adenovirus C
cgccagcccgugc

SEQ ID NO: 3912912 - RNA, 15 nt, Human adenovirus C
cgccagcgacuggaa

SEQ ID NO: 3912913 - RNA, 13 nt, Human adenovirus C
cgccagugcgcca

SEQ ID NO: 3912914 - RNA, 19 nt, Human adenovirus C
cgccaguggcggcggcgcu

SEQ ID NO: 3912915 - RNA, 13 nt, Human adenovirus C
cgccauagucaau

SEQ ID NO: 3912916 - RNA, 15 nt, Human adenovirus C
cgccaugggcuccag

SEQ ID NO: 3912917 - RNA, 23 nt, Human adenovirus C
cgccaugggcuccagugagcagg

SEQ ID NO: 3912918 - RNA, 17 nt, Human adenovirus C
cgcccgcgccugcuggg

SEQ ID NO: 3912919 - RNA, 16 nt, Human adenovirus C
cgcccucuuccuccca

SEQ ID NO: 3912920 - RNA, 22 nt, Human adenovirus C
cgcccugcgcgucggccaggua

SEQ ID NO: 3912921 - RNA, 17 nt, Human adenovirus C
cgccgagcuguugcccg

SEQ ID NO: 3912922 - RNA, 16 nt, Human adenovirus C
cgccgccacccacgga

SEQ ID NO: 3912923 - RNA, 14 nt, Human adenovirus C
cgccgccagaggag

SEQ ID NO: 3912924 - RNA, 20 nt, Human adenovirus C
cgccgcuucagccgcugcag

SEQ ID NO: 3912925 - RNA, 18 nt, Human adenovirus C
cgccggagaucuauggcc

SEQ ID NO: 3912926 - RNA, 20 nt, Human adenovirus C
cgccgggcccggcacuaccu

SEQ ID NO: 3912927 - RNA, 15 nt, Human adenovirus C
cgccuacccccggcu

SEQ ID NO: 3912928 - RNA, 21 nt, Human adenovirus C
cgccugcgucauuacccaggg

SEQ ID NO: 3912929 - RNA, 21 nt, Human adenovirus C
cgcgaccgugucuagcuugcu

SEQ ID NO: 3912930 - RNA, 22 nt, Human adenovirus C
cgcgaggaggacuuugagcccg

SEQ ID NO: 3912931 - RNA, 23 nt, Human adenovirus C
cgcgaggccauaggucaggcgca

SEQ ID NO: 3912932 - RNA, 15 nt, Human adenovirus C
cgcgagucuggugac

SEQ ID NO: 3912933 - RNA, 20 nt, Human adenovirus C
cgcgcacgucgcaccggccg

SEQ ID NO: 3912934 - RNA, 22 nt, Human adenovirus C
cgcgcaugcccccaugggccgg

SEQ ID NO: 3912935 - RNA, 14 nt, Human adenovirus C
cgcgcccuggaggc

SEQ ID NO: 3912936 - RNA, 13 nt, Human adenovirus C
cgcgccgacacgg

SEQ ID NO: 3912937 - RNA, 11 nt, Human adenovirus C
cgcgccgcacc

SEQ ID NO: 3912938 - RNA, 17 nt, Human adenovirus C
cgcgccuaccaccuucc

SEQ ID NO: 3912939 - RNA, 19 nt, Human adenovirus C
cgcgccuguugcugcugcu

SEQ ID NO: 3912940 - RNA, 14 nt, Human adenovirus C
cgcgcgcggcgguc

SEQ ID NO: 3912941 - RNA, 23 nt, Human adenovirus C
cgcgcucaaaggcuacaggggcc

SEQ ID NO: 3912942 - RNA, 12 nt, Human adenovirus C
cgcgcuggagca

SEQ ID NO: 3912943 - RNA, 17 nt, Human adenovirus C
cgcgcuggccagggugc

SEQ ID NO: 3912944 - RNA, 15 nt, Human adenovirus C
cgcgcuggucucugg

SEQ ID NO: 3912945 - RNA, 18 nt, Human adenovirus C
cgcggcaaacgcucugca

SEQ ID NO: 3912946 - RNA, 13 nt, Human adenovirus C
cgcggcaccagcg

SEQ ID NO: 3912947 - RNA, 12 nt, Human adenovirus C
cgcggcagaacc

SEQ ID NO: 3912948 - RNA, 16 nt, Human adenovirus C
cgcggcggcugcugcg

SEQ ID NO: 3912949 - RNA, 15 nt, Human adenovirus C
cgcggcggucaccag

SEQ ID NO: 3912950 - RNA, 19 nt, Human adenovirus C
cgcgggcggagggugccag

SEQ ID NO: 3912951 - RNA, 22 nt, Human adenovirus C
cgcggggacaggaggacuacac

SEQ ID NO: 3912952 - RNA, 16 nt, Human adenovirus C
cgcgguaccugcggcc

SEQ ID NO: 3912953 - RNA, 12 nt, Human adenovirus C
cgcgguggugga

SEQ ID NO: 3912954 - RNA, 14 nt, Human adenovirus C
caggagcgcugggc

SEQ ID NO: 3912955 - RNA, 13 nt, Human adenovirus C
caggcagaggcgg

SEQ ID NO: 3912956 - RNA, 13 nt, Human adenovirus C
caggccaacgagc

SEQ ID NO: 3912957 - RNA, 14 nt, Human adenovirus C
caggcgaccgcgcg

SEQ ID NO: 3912958 - RNA, 19 nt, Human adenovirus C
caggcggccgcugcggccg

SEQ ID NO: 3912959 - RNA, 17 nt, Human adenovirus C
caggcggucggccaugc

SEQ ID NO: 3912960 - RNA, 20 nt, Human adenovirus C
caggcuacuaagaaaacaca

SEQ ID NO: 3912961 - RNA, 11 nt, Human adenovirus C
caggcugggga

SEQ ID NO: 3912962 - RNA, 21 nt, Human adenovirus C
cagggaagaaacucuggugac

SEQ ID NO: 3912963 - RNA, 20 nt, Human adenovirus C
cagggcuacgugcgccaggc

SEQ ID NO: 3912964 - RNA, 17 nt, Human adenovirus C
caggguauaacucaccu

SEQ ID NO: 3912965 - RNA, 18 nt, Human adenovirus C
caggguauaacucaccug

SEQ ID NO: 3912966 - RNA, 14 nt, Human adenovirus C
cagggucugccaga

SEQ ID NO: 3912967 - RNA, 12 nt, Human adenovirus C
cagggugcgcca

SEQ ID NO: 3912968 - RNA, 15 nt, Human adenovirus C
caggucaucgcgccg

SEQ ID NO: 3912969 - RNA, 22 nt, Human adenovirus C
caggucucugcgcucccucacc

SEQ ID NO: 3912970 - RNA, 14 nt, Human adenovirus C
caggugagcucugg

SEQ ID NO: 3912971 - RNA, 16 nt, Human adenovirus C
cagguuucugcccuga

SEQ ID NO: 3912972 - RNA, 22 nt, Human adenovirus C
cagguuuuguaagcgaagacga

SEQ ID NO: 3912973 - RNA, 13 nt, Human adenovirus C
caguaacugcagc

SEQ ID NO: 3912974 - RNA, 14 nt, Human adenovirus C
caguacuggcagcg

SEQ ID NO: 3912975 - RNA, 18 nt, Human adenovirus C
caguagucggugcucguc

SEQ ID NO: 3912976 - RNA, 15 nt, Human adenovirus C
caguauuacccagaa

SEQ ID NO: 3912977 - RNA, 21 nt, Human adenovirus C
cagucaaguuuacuugcaugg

SEQ ID NO: 3912978 - RNA, 19 nt, Human adenovirus C
cagucacaagccccacuga

SEQ ID NO: 3912979 - RNA, 14 nt, Human adenovirus C
cagucacagucgca

SEQ ID NO: 3912980 - RNA, 13 nt, Human adenovirus C
cagucaggcagag

SEQ ID NO: 3912981 - RNA, 19 nt, Human adenovirus C
cagucaugagcgagcugau

SEQ ID NO: 3912982 - RNA, 17 nt, Human adenovirus C
cagucgagaaggaggac

SEQ ID NO: 3912983 - RNA, 13 nt, Human adenovirus C
cagucugcaagau

SEQ ID NO: 3912984 - RNA, 15 nt, Human adenovirus C
cagucugcagcgcug

SEQ ID NO: 3912985 - RNA, 21 nt, Human adenovirus C
cagugcaacaugaccaaggac

SEQ ID NO: 3912986 - RNA, 20 nt, Human adenovirus C
caguggaacgaagcugaugc

SEQ ID NO: 3912987 - RNA, 15 nt, Human adenovirus C
caguggcagcggcgc

SEQ ID NO: 3912988 - RNA, 15 nt, Human adenovirus C
caguggucuccucag

SEQ ID NO: 3912989 - RNA, 15 nt, Human adenovirus C
caguucauugacugg

SEQ ID NO: 3912990 - RNA, 12 nt, Human adenovirus C
caguuuccaaaa

SEQ ID NO: 3912991 - RNA, 14 nt, Human adenovirus C
cauaaaaaaaucca

SEQ ID NO: 3912992 - RNA, 21 nt, Human adenovirus C
cauaaacacgcuggacauaaa

SEQ ID NO: 3912993 - RNA, 15 nt, Human adenovirus C
cauaacauggugugu

SEQ ID NO: 3912994 - RNA, 17 nt, Human adenovirus C
cauacggccgccagagc

SEQ ID NO: 3912995 - RNA, 20 nt, Human adenovirus C
cauauauccauaccuugaca

SEQ ID NO: 3912996 - RNA, 22 nt, Human adenovirus C
caucaccuccuuuccuuccucc

SEQ ID NO: 3912997 - RNA, 17 nt, Human adenovirus C
caucaucgucacaaagg

SEQ ID NO: 3912998 - RNA, 14 nt, Human adenovirus C
caucaucucuguca

SEQ ID NO: 3912999 - RNA, 14 nt, Human adenovirus C
cauccauguccaca

SEQ ID NO: 3913000 - RNA, 15 nt, Human adenovirus C
cauccgcccugcucc

SEQ ID NO: 3913001 - RNA, 13 nt, Human adenovirus C
cauccgcggcagc

SEQ ID NO: 3913002 - RNA, 18 nt, Human adenovirus C
cauccggugcugcggcag

SEQ ID NO: 3913003 - RNA, 21 nt, Human adenovirus C
cauccguggccuugcaggcgc

SEQ ID NO: 3913004 - RNA, 18 nt, Human adenovirus C
caucgcagcuaaaugccg

SEQ ID NO: 3913005 - RNA, 17 nt, Human adenovirus C
caucgcgcaacugggca

SEQ ID NO: 3913006 - RNA, 18 nt, Human adenovirus C
caucuccuaacugcagaa

SEQ ID NO: 3913007 - RNA, 20 nt, Human adenovirus C
caucuccuucgcccgccgcu

SEQ ID NO: 3913008 - RNA, 15 nt, Human adenovirus C
caucucgggccagga

SEQ ID NO: 3913009 - RNA, 13 nt, Human adenovirus C
caucugcagcgcc

SEQ ID NO: 3913010 - RNA, 14 nt, Human adenovirus C
caucuuccaccgcg

SEQ ID NO: 3913011 - RNA, 19 nt, Human adenovirus C
caucuugcgcuaugugcag

SEQ ID NO: 3913012 - RNA, 14 nt, Human adenovirus C
caugaaagccuuga

SEQ ID NO: 3913013 - RNA, 21 nt, Human adenovirus C
caugaagggcacgagcugcuu

SEQ ID NO: 3913014 - RNA, 18 nt, Human adenovirus C
caugagccgguguccacg

SEQ ID NO: 3913015 - RNA, 14 nt, Human adenovirus C
caugagcgagcuga

SEQ ID NO: 3913016 - RNA, 15 nt, Human adenovirus C
caugcagggcacccu

SEQ ID NO: 3913017 - RNA, 16 nt, Human adenovirus C
caugcgcgagggacag

SEQ ID NO: 3913018 - RNA, 21 nt, Human adenovirus C
caugcgcgggcggcaagcgcg

SEQ ID NO: 3913019 - RNA, 22 nt, Human adenovirus C
caugcuauaccccauacccgcc

SEQ ID NO: 3913020 - RNA, 22 nt, Human adenovirus C
cauggaccgcaucaugucgcug

SEQ ID NO: 3913021 - RNA, 14 nt, Human adenovirus C
cauggcauggggug

SEQ ID NO: 3913022 - RNA, 17 nt, Human adenovirus C
cauggcauggggugggu

SEQ ID NO: 3913023 - RNA, 20 nt, Human adenovirus C
cauggguguucuugcugguc

SEQ ID NO: 3913024 - RNA, 17 nt, Human adenovirus C
cauguacucguucuuca

SEQ ID NO: 3913025 - RNA, 13 nt, Human adenovirus C
caugucccugacu

SEQ ID NO: 3913026 - RNA, 13 nt, Human adenovirus C
caugucgccgcca

SEQ ID NO: 3913027 - RNA, 17 nt, Human adenovirus C
caugucuaugcccaggc

SEQ ID NO: 3913028 - RNA, 19 nt, Human adenovirus C
cauguggaguuaccagcca

SEQ ID NO: 3913029 - RNA, 22 nt, Human adenovirus C
cauguggaguuaccagccacaa

SEQ ID NO: 3913030 - RNA, 12 nt, Human adenovirus C
cauuaacaugga

SEQ ID NO: 3913031 - RNA, 15 nt, Human adenovirus C
cauucagaccguggu

SEQ ID NO: 3913032 - RNA, 19 nt, Human adenovirus C
cauuccacgagccagguga

SEQ ID NO: 3913033 - RNA, 14 nt, Human adenovirus C
cauucccagcugcu

SEQ ID NO: 3913034 - RNA, 18 nt, Human adenovirus C
cauucgcggcgacaccuu

SEQ ID NO: 3913035 - RNA, 14 nt, Human adenovirus C
cauucugcagagca

SEQ ID NO: 3913036 - RNA, 15 nt, Human adenovirus C
cauucugcagagcau

SEQ ID NO: 3913037 - RNA, 17 nt, Human adenovirus C
cauuguaaaaaucugcu

SEQ ID NO: 3913038 - RNA, 13 nt, Human adenovirus C
cauuuuaaaaaaa

SEQ ID NO: 3913039 - RNA, 15 nt, Human adenovirus C
cauuuuaaaaaaacu

SEQ ID NO: 3913040 - RNA, 18 nt, Human adenovirus C
cauuuuaaaaaaacuaca

SEQ ID NO: 3913041 - RNA, 15 nt, Human adenovirus C
cauuuuugcccuagc

SEQ ID NO: 3913042 - RNA, 22 nt, Human adenovirus C
cauuuuuucuggggugaugcag

SEQ ID NO: 3913043 - RNA, 20 nt, Human adenovirus C
ccaaaaagaagcugcagcug

SEQ ID NO: 3913044 - RNA, 14 nt, Human adenovirus C
ccaaaccucagcgc

SEQ ID NO: 3913045 - RNA, 17 nt, Human adenovirus C
ccaaacgccaagaaaac

SEQ ID NO: 3913046 - RNA, 22 nt, Human adenovirus C
ccaaacuuaccuacgaaaaaac

SEQ ID NO: 3913047 - RNA, 13 nt, Human adenovirus C
ccaaagcaaaccu

SEQ ID NO: 3913048 - RNA, 20 nt, Human adenovirus C
ccaaagcgugcaggggccca

SEQ ID NO: 3913049 - RNA, 22 nt, Human adenovirus C
ccaaaugcggagcuuaccgccu

SEQ ID NO: 3913050 - RNA, 17 nt, Human adenovirus C
ccaacaccuagccuaaa

SEQ ID NO: 3913051 - RNA, 12 nt, Human adenovirus C
ccaaccgcagcc

SEQ ID NO: 3913052 - RNA, 22 nt, Human adenovirus C
ccaaccgcgguugugcagggug

SEQ ID NO: 3913053 - RNA, 23 nt, Human adenovirus C
ccaacgcgccuaccaccuucccc

SEQ ID NO: 3913054 - RNA, 15 nt, Human adenovirus C
ccaacgcggcagccg

SEQ ID NO: 3913055 - RNA, 18 nt, Human adenovirus C
ccaacgcggcagccgcgg

SEQ ID NO: 3913056 - RNA, 22 nt, Human adenovirus C
ccaacgugccgcggggacagga

SEQ ID NO: 3913057 - RNA, 18 nt, Human adenovirus C
ccaacguggagcucugca

SEQ ID NO: 3913058 - RNA, 15 nt, Human adenovirus C
ccaacucggccgccu

SEQ ID NO: 3913059 - RNA, 21 nt, Human adenovirus C
ccaacucugguaucucagccg

SEQ ID NO: 3913060 - RNA, 20 nt, Human adenovirus C
ccaagaaauccacagcggcg

SEQ ID NO: 3913061 - RNA, 13 nt, Human adenovirus C
ccaagaagcgcgg

SEQ ID NO: 3913062 - RNA, 21 nt, Human adenovirus C
ccaagagcaacaacagcgcca

SEQ ID NO: 3913063 - RNA, 24 nt, Human adenovirus C
ccaagccgacgcgcccuggaggca

SEQ ID NO: 3913064 - RNA, 18 nt, Human adenovirus C
ccaagguuaugagcacag

SEQ ID NO: 3913065 - RNA, 11 nt, Human adenovirus C
ccaaguacaga

SEQ ID NO: 3913066 - RNA, 20 nt, Human adenovirus C
ccaauccccccgccgccgca

SEQ ID NO: 3913067 - RNA, 23 nt, Human adenovirus C
ccaauccccccgccgccgcagcc

SEQ ID NO: 3913068 - RNA, 15 nt, Human adenovirus C
ccacacaagcucgcc

SEQ ID NO: 3913069 - RNA, 17 nt, Human adenovirus C
ccacacccagccaaccu

SEQ ID NO: 3913070 - RNA, 15 nt, Human adenovirus C
ccacaccuacagccu

SEQ ID NO: 3913071 - RNA, 18 nt, Human adenovirus C
ccacagaccggucccagc

SEQ ID NO: 3913072 - RNA, 22 nt, Human adenovirus C
ccacagcucggucacgugcucu

SEQ ID NO: 3913073 - RNA, 17 nt, Human adenovirus C
ccacaggcugcugucca

SEQ ID NO: 3913074 - RNA, 18 nt, Human adenovirus C
ccacaggcugcuguccaa

SEQ ID NO: 3913075 - RNA, 12 nt, Human adenovirus C
ccaccaacgugc

SEQ ID NO: 3913076 - RNA, 12 nt, Human adenovirus C
ccaccaccgccu

SEQ ID NO: 3913077 - RNA, 12 nt, Human adenovirus C
ccaccacuggaa

SEQ ID NO: 3913078 - RNA, 13 nt, Human adenovirus C
ccaccacuggaac

SEQ ID NO: 3913079 - RNA, 13 nt, Human adenovirus C
ccaccauccuaaa

SEQ ID NO: 3913080 - RNA, 23 nt, Human adenovirus C
ccacccgcccgcgccugcugggc

SEQ ID NO: 3913081 - RNA, 13 nt, Human adenovirus C
ccacccuucuuua

SEQ ID NO: 3913082 - RNA, 18 nt, Human adenovirus C
ccaccgcggaugcuggcg

SEQ ID NO: 3913083 - RNA, 13 nt, Human adenovirus C
ccaccggccgugg

SEQ ID NO: 3913084 - RNA, 15 nt, Human adenovirus C
ccaccggccguggag

SEQ ID NO: 3913085 - RNA, 22 nt, Human adenovirus C
ccaccugagccuuugcgccuuc

SEQ ID NO: 3913086 - RNA, 22 nt, Human adenovirus C
ccaccuucuuccccauggccca

SEQ ID NO: 3913087 - RNA, 17 nt, Human adenovirus C
ccacgcucggugacgaa

SEQ ID NO: 3913088 - RNA, 17 nt, Human adenovirus C
ccacgguaaagaccccg

SEQ ID NO: 3913089 - RNA, 22 nt, Human adenovirus C
ccacuaccggcaaccgccucag

SEQ ID NO: 3913090 - RNA, 16 nt, Human adenovirus C
ccacucgcccuacuuc

SEQ ID NO: 3913091 - RNA, 21 nt, Human adenovirus C
ccacuggcagggacacguugc

SEQ ID NO: 3913092 - RNA, 16 nt, Human adenovirus C
ccacuguuacucagcc

SEQ ID NO: 3913093 - RNA, 17 nt, Human adenovirus C
ccacuguuacucagcca

SEQ ID NO: 3913094 - RNA, 19 nt, Human adenovirus C
ccacuuacaauuaccucag

SEQ ID NO: 3913095 - RNA, 11 nt, Human adenovirus C
ccacuucuuuu

SEQ ID NO: 3913096 - RNA, 18 nt, Human adenovirus C
ccagaacgaccacagcaa

SEQ ID NO: 3913097 - RNA, 21 nt, Human adenovirus C
ccagacaagcuaaaauacaac

SEQ ID NO: 3913098 - RNA, 14 nt, Human adenovirus C
ccagacacacaucu

SEQ ID NO: 3913099 - RNA, 21 nt, Human adenovirus C
ccagacaucauuuugcugcca

SEQ ID NO: 3913100 - RNA, 21 nt, Human adenovirus C
ccagaccaguagacaaggccu

SEQ ID NO: 3913101 - RNA, 21 nt, Human adenovirus C
ccagaccgucugaagacaccu

SEQ ID NO: 3913102 - RNA, 14 nt, Human adenovirus C
ccagacgccgcacc

SEQ ID NO: 3913103 - RNA, 15 nt, Human adenovirus C
ccagacgggccaggg

SEQ ID NO: 3913104 - RNA, 20 nt, Human adenovirus C
ccagagaugaccggcucaac

SEQ ID NO: 3913105 - RNA, 16 nt, Human adenovirus C
ccagaggagcugcuga

SEQ ID NO: 3913106 - RNA, 20 nt, Human adenovirus C
ccagaggagcugcugagccg

SEQ ID NO: 3913107 - RNA, 21 nt, Human adenovirus C
ccagauguccgcgcgcggcgg

SEQ ID NO: 3913108 - RNA, 17 nt, Human adenovirus C
ccagauugcaaguacaa

SEQ ID NO: 3913109 - RNA, 13 nt, Human adenovirus C
ccagcacacaccu

SEQ ID NO: 3913110 - RNA, 16 nt, Human adenovirus C
ccagcaucgcuacaac

SEQ ID NO: 3913111 - RNA, 24 nt, Human adenovirus C
ccagcccaugagccggcaaguggu

SEQ ID NO: 3913112 - RNA, 13 nt, Human adenovirus C
ccagccugugaug

SEQ ID NO: 3913113 - RNA, 14 nt, Human adenovirus C
ccagcgacuggaag

SEQ ID NO: 3913114 - RNA, 12 nt, Human adenovirus C
ccagcggccaca

SEQ ID NO: 3913115 - RNA, 14 nt, Human adenovirus C
ccagcggccacacc

SEQ ID NO: 3913116 - RNA, 22 nt, Human adenovirus C
ccagcucggcggugaccugcac

SEQ ID NO: 3913117 - RNA, 23 nt, Human adenovirus C
ccagcuuauucagcaucaccucc

SEQ ID NO: 3913118 - RNA, 18 nt, Human adenovirus C
ccaggaaccaugacaaaa

SEQ ID NO: 3913119 - RNA, 15 nt, Human adenovirus C
ccaggauggcaccca

SEQ ID NO: 3913120 - RNA, 21 nt, Human adenovirus C
ccaggccagcacgaaggaggc

SEQ ID NO: 3913121 - RNA, 18 nt, Human adenovirus C
ccaggccgucuacuccca

SEQ ID NO: 3913122 - RNA, 21 nt, Human adenovirus C
ccaggcgacgagcggccgccg

SEQ ID NO: 3913123 - RNA, 20 nt, Human adenovirus C
ccaggcgcggcggcugcugc

SEQ ID NO: 3913124 - RNA, 12 nt, Human adenovirus C
ccaggcgggcaa

SEQ ID NO: 3913125 - RNA, 14 nt, Human adenovirus C
ccaggcggucccac

SEQ ID NO: 3913126 - RNA, 21 nt, Human adenovirus C
ccaggguuuccuugaugaugu

SEQ ID NO: 3913127 - RNA, 20 nt, Human adenovirus C
ccaggugaugccggcggcgg

SEQ ID NO: 3913128 - RNA, 22 nt, Human adenovirus C
ccaguagcacuaguauugccac

SEQ ID NO: 3913129 - RNA, 15 nt, Human adenovirus C
ccaguccgggccaga

SEQ ID NO: 3913130 - RNA, 16 nt, Human adenovirus C
ccaguccgggccagac

SEQ ID NO: 3913131 - RNA, 21 nt, Human adenovirus C
ccaguccuuuaaugacuaccu

SEQ ID NO: 3913132 - RNA, 19 nt, Human adenovirus C
ccagucguagcaggagcgc

SEQ ID NO: 3913133 - RNA, 15 nt, Human adenovirus C
ccagugagcaggaac

SEQ ID NO: 3913134 - RNA, 17 nt, Human adenovirus C
ccaguggagaggcagag

SEQ ID NO: 3913135 - RNA, 18 nt, Human adenovirus C
ccaguggcaacuggcaaa

SEQ ID NO: 3913136 - RNA, 21 nt, Human adenovirus C
ccaguggcggcggcgcugggu

SEQ ID NO: 3913137 - RNA, 18 nt, Human adenovirus C
ccauagcggaugucagcc

SEQ ID NO: 3913138 - RNA, 15 nt, Human adenovirus C
ccaucaacaaagccc

SEQ ID NO: 3913139 - RNA, 19 nt, Human adenovirus C
ccaucaacaaagcccgcca

SEQ ID NO: 3913140 - RNA, 12 nt, Human adenovirus C
ccaucaccaccg

SEQ ID NO: 3913141 - RNA, 14 nt, Human adenovirus C
ccauccggcccagg

SEQ ID NO: 3913142 - RNA, 19 nt, Human adenovirus C
ccaucgcgcccauggcuac

SEQ ID NO: 3913143 - RNA, 20 nt, Human adenovirus C
ccaucgcgcccauggcuacc

SEQ ID NO: 3913144 - RNA, 19 nt, Human adenovirus C
ccaucuauaggccuaucau

SEQ ID NO: 3913145 - RNA, 14 nt, Human adenovirus C
ccaucugagcgggg

SEQ ID NO: 3913146 - RNA, 13 nt, Human adenovirus C
ccaugcuuuuuga

SEQ ID NO: 3913147 - RNA, 22 nt, Human adenovirus C
ccauuacaauaggaaacaaaaa

SEQ ID NO: 3913148 - RNA, 22 nt, Human adenovirus C
ccauuugaugcucaaacaaaac

SEQ ID NO: 3913149 - RNA, 18 nt, Human adenovirus C
ccauuuuugcccuagcca

SEQ ID NO: 3913150 - RNA, 22 nt, Human adenovirus C
cccaaaaagaagcugcagcugc

SEQ ID NO: 3913151 - RNA, 17 nt, Human adenovirus C
cccaacccgcgccucaa

SEQ ID NO: 3913152 - RNA, 23 nt, Human adenovirus C
cccaacucugguaucucagccgc

SEQ ID NO: 3913153 - RNA, 17 nt, Human adenovirus C
cccaagggugcagcuga

SEQ ID NO: 3913154 - RNA, 13 nt, Human adenovirus C
cccaccacugugg

SEQ ID NO: 3913155 - RNA, 11 nt, Human adenovirus C
cccagacacac

SEQ ID NO: 3913156 - RNA, 24 nt, Human adenovirus C
cccagaugcauccggugcugcggc

SEQ ID NO: 3913157 - RNA, 18 nt, Human adenovirus C
cccagcacucggcagaaa

SEQ ID NO: 3913158 - RNA, 23 nt, Human adenovirus C
cccagcacucggcagaaacagag

SEQ ID NO: 3913159 - RNA, 14 nt, Human adenovirus C
cccagcugcuacaa

SEQ ID NO: 3913160 - RNA, 16 nt, Human adenovirus C
cccagcuucagcuugc

SEQ ID NO: 3913161 - RNA, 20 nt, Human adenovirus C
cccaggcggcggguacagug

SEQ ID NO: 3913162 - RNA, 14 nt, Human adenovirus C
cccagggccacauc

SEQ ID NO: 3913163 - RNA, 21 nt, Human adenovirus C
cccauggacgagcccacccuu

SEQ ID NO: 3913164 - RNA, 16 nt, Human adenovirus C
cccauggcccacaaca

SEQ ID NO: 3913165 - RNA, 20 nt, Human adenovirus C
cccauggcccacaacacggc

SEQ ID NO: 3913166 - RNA, 19 nt, Human adenovirus C
ccccaaaaguuuuuugcca

SEQ ID NO: 3913167 - RNA, 12 nt, Human adenovirus C
ccccacaugaua

SEQ ID NO: 3913168 - RNA, 16 nt, Human adenovirus C
ccccagguccaggcga

SEQ ID NO: 3913169 - RNA, 16 nt, Human adenovirus C
ccccgggcagcaggcg

SEQ ID NO: 3913170 - RNA, 24 nt, Human adenovirus C
ccccgguugccucggcgguggcag

SEQ ID NO: 3913171 - RNA, 17 nt, Human adenovirus C
ccccuucgaugcucccc

SEQ ID NO: 3913172 - RNA, 20 nt, Human adenovirus C
ccccuucggcaucgcgggcg

SEQ ID NO: 3913173 - RNA, 19 nt, Human adenovirus C
cccgagagccggccuggac

SEQ ID NO: 3913174 - RNA, 15 nt, Human adenovirus C
cccgagggccgcugg

SEQ ID NO: 3913175 - RNA, 19 nt, Human adenovirus C
cccgagggccgcuggcugc

SEQ ID NO: 3913176 - RNA, 20 nt, Human adenovirus C
cccgagggccgcuggcugcu

SEQ ID NO: 3913177 - RNA, 16 nt, Human adenovirus C
cccgccaacgugccgc

SEQ ID NO: 3913178 - RNA, 15 nt, Human adenovirus C
cccgccaccaguugg

SEQ ID NO: 3913179 - RNA, 22 nt, Human adenovirus C
cccgccaccugcugugcgcuuc

SEQ ID NO: 3913180 - RNA, 17 nt, Human adenovirus C
cccgccgccgcagcccu

SEQ ID NO: 3913181 - RNA, 18 nt, Human adenovirus C
cccgccgggagagggggc

SEQ ID NO: 3913182 - RNA, 14 nt, Human adenovirus C
cccgcgccacuggg

SEQ ID NO: 3913183 - RNA, 14 nt, Human adenovirus C
cccgcggugcuccu

SEQ ID NO: 3913184 - RNA, 21 nt, Human adenovirus C
cccggaauugcauccguggcc

SEQ ID NO: 3913185 - RNA, 18 nt, Human adenovirus C
cccggccacuacccggac

SEQ ID NO: 3913186 - RNA, 13 nt, Human adenovirus C
cccggcgccagca

SEQ ID NO: 3913187 - RNA, 15 nt, Human adenovirus C
cccggcggugcgggc

SEQ ID NO: 3913188 - RNA, 16 nt, Human adenovirus C
cccggcggugcgggcg

SEQ ID NO: 3913189 - RNA, 21 nt, Human adenovirus C
cccguagaggagccuccaccg

SEQ ID NO: 3913190 - RNA, 13 nt, Human adenovirus C
cccgugggcucgu

SEQ ID NO: 3913191 - RNA, 20 nt, Human adenovirus C
cccguucaugggaaacuggc

SEQ ID NO: 3913192 - RNA, 17 nt, Human adenovirus C
aggcaucgcagcuaaau

SEQ ID NO: 3913193 - RNA, 14 nt, Human adenovirus C
aggccaagcagcuu

SEQ ID NO: 3913194 - RNA, 13 nt, Human adenovirus C
aggccagaugcug

SEQ ID NO: 3913195 - RNA, 12 nt, Human adenovirus C
aggcccugggca

SEQ ID NO: 3913196 - RNA, 14 nt, Human adenovirus C
aggcccuuggugua

SEQ ID NO: 3913197 - RNA, 14 nt, Human adenovirus C
aggcgccgccggca

SEQ ID NO: 3913198 - RNA, 20 nt, Human adenovirus C
aggcggccgcccuugcgcga

SEQ ID NO: 3913199 - RNA, 19 nt, Human adenovirus C
aggcggcggguacagugga

SEQ ID NO: 3913200 - RNA, 22 nt, Human adenovirus C
aggcggucuugagacggcggau

SEQ ID NO: 3913201 - RNA, 14 nt, Human adenovirus C
aggcguacgugccg

SEQ ID NO: 3913202 - RNA, 15 nt, Human adenovirus C
aggcuaauggcaaug

SEQ ID NO: 3913203 - RNA, 17 nt, Human adenovirus C
aggcucucuucagcaaa

SEQ ID NO: 3913204 - RNA, 16 nt, Human adenovirus C
agggaagaaacucugg

SEQ ID NO: 3913205 - RNA, 15 nt, Human adenovirus C
agggcaaccugggcu

SEQ ID NO: 3913206 - RNA, 13 nt, Human adenovirus C
agggcccuggcug

SEQ ID NO: 3913207 - RNA, 14 nt, Human adenovirus C
agggccgcuggcug

SEQ ID NO: 3913208 - RNA, 15 nt, Human adenovirus C
agggccgcuggcugc

SEQ ID NO: 3913209 - RNA, 22 nt, Human adenovirus C
aggggcaacguguacugggugc

SEQ ID NO: 3913210 - RNA, 17 nt, Human adenovirus C
aggguaucauggcggac

SEQ ID NO: 3913211 - RNA, 15 nt, Human adenovirus C
aggguggccgcgucc

SEQ ID NO: 3913212 - RNA, 16 nt, Human adenovirus C
aggucacuugcugaca

SEQ ID NO: 3913213 - RNA, 13 nt, Human adenovirus C
aggucagcugcaa

SEQ ID NO: 3913214 - RNA, 17 nt, Human adenovirus C
agguccgcgugcggcca

SEQ ID NO: 3913215 - RNA, 22 nt, Human adenovirus C
aggucguuggagaugcgggcca

SEQ ID NO: 3913216 - RNA, 13 nt, Human adenovirus C
aggugaugaaaau

SEQ ID NO: 3913217 - RNA, 12 nt, Human adenovirus C
aggugcagaccc

SEQ ID NO: 3913218 - RNA, 13 nt, Human adenovirus C
agguggaacugcu

SEQ ID NO: 3913219 - RNA, 22 nt, Human adenovirus C
agguggagauagauacggagga

SEQ ID NO: 3913220 - RNA, 19 nt, Human adenovirus C
agguggcacuuaggccaga

SEQ ID NO: 3913221 - RNA, 22 nt, Human adenovirus C
agguguaccaguccgggccaga

SEQ ID NO: 3913222 - RNA, 14 nt, Human adenovirus C
agguugaguuuaag

SEQ ID NO: 3913223 - RNA, 16 nt, Human adenovirus C
agguuucuguggggcu

SEQ ID NO: 3913224 - RNA, 15 nt, Human adenovirus C
aguaacugcagcaca

SEQ ID NO: 3913225 - RNA, 17 nt, Human adenovirus C
aguaaguuugccacaca

SEQ ID NO: 3913226 - RNA, 15 nt, Human adenovirus C
aguaccuuaccuggu

SEQ ID NO: 3913227 - RNA, 13 nt, Human adenovirus C
aguacgagccaga

SEQ ID NO: 3913228 - RNA, 20 nt, Human adenovirus C
aguacggcaccgccagcgca

SEQ ID NO: 3913229 - RNA, 22 nt, Human adenovirus C
aguagaagucccugcgacgggc

SEQ ID NO: 3913230 - RNA, 22 nt, Human adenovirus C
agucagucgagaaggaggacag

SEQ ID NO: 3913231 - RNA, 15 nt, Human adenovirus C
aguccacaaaaaaca

SEQ ID NO: 3913232 - RNA, 17 nt, Human adenovirus C
aguccacaaaaaacacc

SEQ ID NO: 3913233 - RNA, 17 nt, Human adenovirus C
aguccacgccuacaugg

SEQ ID NO: 3913234 - RNA, 18 nt, Human adenovirus C
aguccccagguacagccc

SEQ ID NO: 3913235 - RNA, 22 nt, Human adenovirus C
agucgagaaggaggacagccua

SEQ ID NO: 3913236 - RNA, 22 nt, Human adenovirus C
agucuagcgccugcugccaugc

SEQ ID NO: 3913237 - RNA, 22 nt, Human adenovirus C
agucucacgcucgcuugguccu

SEQ ID NO: 3913238 - RNA, 14 nt, Human adenovirus C
agucucgggccggc

SEQ ID NO: 3913239 - RNA, 21 nt, Human adenovirus C
agucugcagcgcugccaaaaa

SEQ ID NO: 3913240 - RNA, 15 nt, Human adenovirus C
agucuuccaagguga

SEQ ID NO: 3913241 - RNA, 15 nt, Human adenovirus C
agugaagauguaaau

SEQ ID NO: 3913242 - RNA, 21 nt, Human adenovirus C
agugcaaaauaagauuaacag

SEQ ID NO: 3913243 - RNA, 18 nt, Human adenovirus C
agugcagcacagcaggga

SEQ ID NO: 3913244 - RNA, 12 nt, Human adenovirus C
agugcggcggcg

SEQ ID NO: 3913245 - RNA, 13 nt, Human adenovirus C
agugcugggccag

SEQ ID NO: 3913246 - RNA, 22 nt, Human adenovirus C
agugcuuaaaaaaacaacuccc

SEQ ID NO: 3913247 - RNA, 15 nt, Human adenovirus C
aguggacaagaugag

SEQ ID NO: 3913248 - RNA, 13 nt, Human adenovirus C
agugggcaggcag

SEQ ID NO: 3913249 - RNA, 18 nt, Human adenovirus C
agugucgucgcauccgcc

SEQ ID NO: 3913250 - RNA, 18 nt, Human adenovirus C
agugucuugcugucuuua

SEQ ID NO: 3913251 - RNA, 17 nt, Human adenovirus C
aguuaagagagcugcag

SEQ ID NO: 3913252 - RNA, 18 nt, Human adenovirus C
aguucaugucgcugucca

SEQ ID NO: 3913253 - RNA, 20 nt, Human adenovirus C
aguuccaagaagcgcggggu

SEQ ID NO: 3913254 - RNA, 20 nt, Human adenovirus C
gucucggugacggcgcggcc

SEQ ID NO: 3913255 - RNA, 16 nt, Human adenovirus C
gucugcgagggccagc

SEQ ID NO: 3913256 - RNA, 14 nt, Human adenovirus C
gucuggagcucccg

SEQ ID NO: 3913257 - RNA, 15 nt, Human adenovirus C
gucugggucacggug

SEQ ID NO: 3913258 - RNA, 18 nt, Human adenovirus C
gucuugcauacggccgcc

SEQ ID NO: 3913259 - RNA, 16 nt, Human adenovirus C
gucuugucaugccugg

SEQ ID NO: 3913260 - RNA, 14 nt, Human adenovirus C
gucuuuccacgggc

SEQ ID NO: 3913261 - RNA, 19 nt, Human adenovirus C
gugaagacgacgggcccgg

SEQ ID NO: 3913262 - RNA, 21 nt, Human adenovirus C
gugacaacgcgcgccuagccg

SEQ ID NO: 3913263 - RNA, 24 nt, Human adenovirus C
gugacaaggucaacgcugguggcu

SEQ ID NO: 3913264 - RNA, 14 nt, Human adenovirus C
gugacggcgcggcc

SEQ ID NO: 3913265 - RNA, 13 nt, Human adenovirus C
gugagcgcacugc

SEQ ID NO: 3913266 - RNA, 14 nt, Human adenovirus C
gugagcgcggcgcc

SEQ ID NO: 3913267 - RNA, 17 nt, Human adenovirus C
gugagcuguuugauucu

SEQ ID NO: 3913268 - RNA, 23 nt, Human adenovirus C
gugauugguuuauagguguaggc

SEQ ID NO: 3913269 - RNA, 20 nt, Human adenovirus C
gugcacgaccccuggagagg

SEQ ID NO: 3913270 - RNA, 11 nt, Human adenovirus C
gugcagaccaa

SEQ ID NO: 3913271 - RNA, 12 nt, Human adenovirus C
gugcagcacagc

SEQ ID NO: 3913272 - RNA, 14 nt, Human adenovirus C
gugcaguuggccau

SEQ ID NO: 3913273 - RNA, 21 nt, Human adenovirus C
gugcaguuugcccgcgccacc

SEQ ID NO: 3913274 - RNA, 13 nt, Human adenovirus C
gugcaugcccagg

SEQ ID NO: 3913275 - RNA, 22 nt, Human adenovirus C
gugccaaaaaucuuugaggguc

SEQ ID NO: 3913276 - RNA, 13 nt, Human adenovirus C
gugccagaggugc

SEQ ID NO: 3913277 - RNA, 17 nt, Human adenovirus C
gugccccccagguccag

SEQ ID NO: 3913278 - RNA, 17 nt, Human adenovirus C
gugccccucgccauagc

SEQ ID NO: 3913279 - RNA, 15 nt, Human adenovirus C
gugcgcaguacuggc

SEQ ID NO: 3913280 - RNA, 20 nt, Human adenovirus C
gugcgccacaauguggccuc

SEQ ID NO: 3913281 - RNA, 15 nt, Human adenovirus C
gugcgcuuaccuccc

SEQ ID NO: 3913282 - RNA, 21 nt, Human adenovirus C
gugcuuaaaaaaacaacuccc

SEQ ID NO: 3913283 - RNA, 15 nt, Human adenovirus C
guggaccuggccaac

SEQ ID NO: 3913284 - RNA, 17 nt, Human adenovirus C
guggaggaggcgcgcaa

SEQ ID NO: 3913285 - RNA, 22 nt, Human adenovirus C
guggcaaccaccgcuccucuga

SEQ ID NO: 3913286 - RNA, 22 nt, Human adenovirus C
guggcaccgggacugggcgugc

SEQ ID NO: 3913287 - RNA, 22 nt, Human adenovirus C
gugggccgcggggguguccuug

SEQ ID NO: 3913288 - RNA, 19 nt, Human adenovirus C
guggggcuccucccaggca

SEQ ID NO: 3913289 - RNA, 21 nt, Human adenovirus C
gugggggaugugcgcgaggcc

SEQ ID NO: 3913290 - RNA, 17 nt, Human adenovirus C
gugggucugggggugca

SEQ ID NO: 3913291 - RNA, 20 nt, Human adenovirus C
guggucaagcaggccaaacu

SEQ ID NO: 3913292 - RNA, 20 nt, Human adenovirus C
gugguccgugugcaccagcc

SEQ ID NO: 3913293 - RNA, 17 nt, Human adenovirus C
guguaccaguccgggcc

SEQ ID NO: 3913294 - RNA, 20 nt, Human adenovirus C
guguaggccacgugaccggg

SEQ ID NO: 3913295 - RNA, 18 nt, Human adenovirus C
gugucagacgaaacaccg

SEQ ID NO: 3913296 - RNA, 22 nt, Human adenovirus C
gugugggcguggcuuaagggug

SEQ ID NO: 3913297 - RNA, 19 nt, Human adenovirus C
guguuccgcgguccuccuc

SEQ ID NO: 3913298 - RNA, 20 nt, Human adenovirus C
guuaacaugguucugcagag

SEQ ID NO: 3913299 - RNA, 16 nt, Human adenovirus C
guuagucugcagaauu

SEQ ID NO: 3913300 - RNA, 20 nt, Human adenovirus C
guucaugggaaacuggcaag

SEQ ID NO: 3913301 - RNA, 14 nt, Human adenovirus C
guuccacgcagggc

SEQ ID NO: 3913302 - RNA, 19 nt, Human adenovirus C
guuccagacgcggcuguag

SEQ ID NO: 3913303 - RNA, 18 nt, Human adenovirus C
guuccucguaggugagcu

SEQ ID NO: 3913304 - RNA, 14 nt, Human adenovirus C
guuccugagcagcu

SEQ ID NO: 3913305 - RNA, 16 nt, Human adenovirus C
guuccuugcauuuggg

SEQ ID NO: 3913306 - RNA, 18 nt, Human adenovirus C
guucgagucucgggccgg

SEQ ID NO: 3913307 - RNA, 15 nt, Human adenovirus C
guucuugcuggucag

SEQ ID NO: 3913308 - RNA, 17 nt, Human adenovirus C
guugaagcaucugcagc

SEQ ID NO: 3913309 - RNA, 17 nt, Human adenovirus C
guugacggggagggcua

SEQ ID NO: 3913310 - RNA, 14 nt, Human adenovirus C
guugaggguggugg

SEQ ID NO: 3913311 - RNA, 17 nt, Human adenovirus C
guugagucgcaggaccc

SEQ ID NO: 3913312 - RNA, 13 nt, Human adenovirus C
guugcauguggaa

SEQ ID NO: 3913313 - RNA, 14 nt, Human adenovirus C
guugccgcuggacg

SEQ ID NO: 3913314 - RNA, 15 nt, Human adenovirus C
guuggacgcuggaag

SEQ ID NO: 3913315 - RNA, 15 nt, Human adenovirus C
guuggaggaguggcu

SEQ ID NO: 3913316 - RNA, 18 nt, Human adenovirus C
guuggcggggggcugccg

SEQ ID NO: 3913317 - RNA, 22 nt, Human adenovirus C
guuggcggggggcugccgugcg

SEQ ID NO: 3913318 - RNA, 16 nt, Human adenovirus C
guugucaagcuuggug

SEQ ID NO: 3913319 - RNA, 15 nt, Human adenovirus C
guuuacuucaacccc

SEQ ID NO: 3913320 - RNA, 21 nt, Human adenovirus C
guuucuggcggaggugcugcu

SEQ ID NO: 3913321 - RNA, 22 nt, Human adenovirus C
guuugcaacuguccuaacccug

SEQ ID NO: 3913322 - RNA, 13 nt, Human adenovirus C
guuugccuccccg

SEQ ID NO: 3913323 - RNA, 14 nt, Human adenovirus C
guuuggcggggcaa

SEQ ID NO: 3913324 - RNA, 18 nt, Human adenovirus C
uaaacaacucgcugcugc

SEQ ID NO: 3913325 - RNA, 23 nt, Human adenovirus C
uaaacguagaggggcucucugag

SEQ ID NO: 3913326 - RNA, 22 nt, Human adenovirus C
uaaagcaaggccugcccaccac

SEQ ID NO: 3913327 - RNA, 15 nt, Human adenovirus C
uaaaugagacaugau

SEQ ID NO: 3913328 - RNA, 13 nt, Human adenovirus C
uaacagcacuggc

SEQ ID NO: 3913329 - RNA, 22 nt, Human adenovirus C
uaacccugacgcguuccggcag

SEQ ID NO: 3913330 - RNA, 17 nt, Human adenovirus C
uaaccuaaaugccaacc

SEQ ID NO: 3913331 - RNA, 19 nt, Human adenovirus C
uaacgcuggaccugccucc

SEQ ID NO: 3913332 - RNA, 21 nt, Human adenovirus C
uaacgugucguaugugucaug

SEQ ID NO: 3913333 - RNA, 21 nt, Human adenovirus C
uaacucaggggcgcagcuugc

SEQ ID NO: 3913334 - RNA, 10 nt, Human adenovirus C
uaacuccugu

SEQ ID NO: 3913335 - RNA, 16 nt, Human adenovirus C
uaacuuuauguccaug

SEQ ID NO: 3913336 - RNA, 17 nt, Human adenovirus C
uaagaacuauggcagca

SEQ ID NO: 3913337 - RNA, 18 nt, Human adenovirus C
uaagagagcugcagcugc

SEQ ID NO: 3913338 - RNA, 15 nt, Human adenovirus C
uaagcacuuacucua

SEQ ID NO: 3913339 - RNA, 18 nt, Human adenovirus C
uaagcauugcuacuaaag

SEQ ID NO: 3913340 - RNA, 22 nt, Human adenovirus C
uaaguuccucguaggugagcuc

SEQ ID NO: 3913341 - RNA, 21 nt, Human adenovirus C
uaauacugccauagcuauaaa

SEQ ID NO: 3913342 - RNA, 13 nt, Human adenovirus C
uaaugaaauagga

SEQ ID NO: 3913343 - RNA, 14 nt, Human adenovirus C
uaauggacuacuug

SEQ ID NO: 3913344 - RNA, 13 nt, Human adenovirus C
uaauucaccaccu

SEQ ID NO: 3913345 - RNA, 20 nt, Human adenovirus C
uacaaagcgcgguucacccu

SEQ ID NO: 3913346 - RNA, 16 nt, Human adenovirus C
uacaaccccaccaaug

SEQ ID NO: 3913347 - RNA, 23 nt, Human adenovirus C
uacacaguccuuucuccccggcu

SEQ ID NO: 3913348 - RNA, 15 nt, Human adenovirus C
uacacucucggguga

SEQ ID NO: 3913349 - RNA, 17 nt, Human adenovirus C
uacagucacaagcccca

SEQ ID NO: 3913350 - RNA, 16 nt, Human adenovirus C
uacaugagcaaacagu

SEQ ID NO: 3913351 - RNA, 21 nt, Human adenovirus C
uacauggacaaaagaugaaac

SEQ ID NO: 3913352 - RNA, 18 nt, Human adenovirus C
uacauucgggcagcagcg

SEQ ID NO: 3913353 - RNA, 20 nt, Human adenovirus C
uacauugcccaggaauaaag

SEQ ID NO: 3913354 - RNA, 14 nt, Human adenovirus C
uaccaccacaccuc

SEQ ID NO: 3913355 - RNA, 20 nt, Human adenovirus C
uacccacccaaagcagacca

SEQ ID NO: 3913356 - RNA, 22 nt, Human adenovirus C
uaccgcgucaggaggggcaaca

SEQ ID NO: 3913357 - RNA, 19 nt, Human adenovirus C
uaccucugcaaacgacugc

SEQ ID NO: 3913358 - RNA, 19 nt, Human adenovirus C
uaccuggacuuggaggagg

SEQ ID NO: 3913359 - RNA, 22 nt, Human adenovirus C
uaccuguguggaagccuggacc

SEQ ID NO: 3913360 - RNA, 15 nt, Human adenovirus C
uacgaaaaaaccacu

SEQ ID NO: 3913361 - RNA, 21 nt, Human adenovirus C
uacggcaucucgauccagcau

SEQ ID NO: 3913362 - RNA, 16 nt, Human adenovirus C
uacucccauuuuucca

SEQ ID NO: 3913363 - RNA, 15 nt, Human adenovirus C
uacugacgccagacg

SEQ ID NO: 3913364 - RNA, 19 nt, Human adenovirus C
uacugggacagucaggcag

SEQ ID NO: 3913365 - RNA, 14 nt, Human adenovirus C
uacuuuccaggaga

SEQ ID NO: 3913366 - RNA, 21 nt, Human adenovirus C
uagaaaccccacgguggcacc

SEQ ID NO: 3913367 - RNA, 22 nt, Human adenovirus C
uagaaccaaaguugcaggagcu

SEQ ID NO: 3913368 - RNA, 16 nt, Human adenovirus C
uagaggggcucucuga

SEQ ID NO: 3913369 - RNA, 21 nt, Human adenovirus C
uagauugcaucccaccuuuca

SEQ ID NO: 3913370 - RNA, 18 nt, Human adenovirus C
uagcaggucgggcgccga

SEQ ID NO: 3913371 - RNA, 21 nt, Human adenovirus C
uagcauuaaguuugacagcau

SEQ ID NO: 3913372 - RNA, 11 nt, Human adenovirus C
ggcggaggcgc

SEQ ID NO: 3913373 - RNA, 19 nt, Human adenovirus C
ggcggaggcgcguagcacg

SEQ ID NO: 3913374 - RNA, 22 nt, Human adenovirus C
ggcggcaacaacaguggcagcg

SEQ ID NO: 3913375 - RNA, 15 nt, Human adenovirus C
ggcggcaggagcaga

SEQ ID NO: 3913376 - RNA, 13 nt, Human adenovirus C
ggcggcggcgcgc

SEQ ID NO: 3913377 - RNA, 13 nt, Human adenovirus C
ggcggcggcgcug

SEQ ID NO: 3913378 - RNA, 12 nt, Human adenovirus C
ggcggcgguggg

SEQ ID NO: 3913379 - RNA, 14 nt, Human adenovirus C
ggcgggagcuccug

SEQ ID NO: 3913380 - RNA, 15 nt, Human adenovirus C
ggcgggcccccggag

SEQ ID NO: 3913381 - RNA, 17 nt, Human adenovirus C
ggcgggcgcucgggcuu

SEQ ID NO: 3913382 - RNA, 21 nt, Human adenovirus C
ggcggguacaguggaaagguc

SEQ ID NO: 3913383 - RNA, 13 nt, Human adenovirus C
ggcggugaccugc

SEQ ID NO: 3913384 - RNA, 17 nt, Human adenovirus C
ggcggugguggaggcgc

SEQ ID NO: 3913385 - RNA, 18 nt, Human adenovirus C
ggcgucaucgagaccgug

SEQ ID NO: 3913386 - RNA, 20 nt, Human adenovirus C
ggcguccggcucaccaccca

SEQ ID NO: 3913387 - RNA, 13 nt, Human adenovirus C
ggcgugcagaccg

SEQ ID NO: 3913388 - RNA, 13 nt, Human adenovirus C
ggcguuggacagc

SEQ ID NO: 3913389 - RNA, 16 nt, Human adenovirus C
ggcuacaggggccucu

SEQ ID NO: 3913390 - RNA, 21 nt, Human adenovirus C
ggcuaccgcucguggcgcggg

SEQ ID NO: 3913391 - RNA, 13 nt, Human adenovirus C
ggcucaccaccca

SEQ ID NO: 3913392 - RNA, 22 nt, Human adenovirus C
ggcucuccgcaauucuggaagc

SEQ ID NO: 3913393 - RNA, 21 nt, Human adenovirus C
ggcugcgcgcuggccagggug

SEQ ID NO: 3913394 - RNA, 17 nt, Human adenovirus C
ggcuguugaugugguga

SEQ ID NO: 3913395 - RNA, 19 nt, Human adenovirus C
ggcuugagacgcgcgagcc

SEQ ID NO: 3913396 - RNA, 15 nt, Human adenovirus C
gggaacaacccauuc

SEQ ID NO: 3913397 - RNA, 21 nt, Human adenovirus C
gggacgggggguuuaccugga

SEQ ID NO: 3913398 - RNA, 16 nt, Human adenovirus C
gggagaucagcuggga

SEQ ID NO: 3913399 - RNA, 13 nt, Human adenovirus C
gggagcugagccc

SEQ ID NO: 3913400 - RNA, 23 nt, Human adenovirus C
gggaugcaaacuugcaagaacaa

SEQ ID NO: 3913401 - RNA, 12 nt, Human adenovirus C
gggauggcgggc

SEQ ID NO: 3913402 - RNA, 18 nt, Human adenovirus C
gggauuccgaggaagaau

SEQ ID NO: 3913403 - RNA, 22 nt, Human adenovirus C
gggcacagcagcgcacccugau

SEQ ID NO: 3913404 - RNA, 19 nt, Human adenovirus C
gggcauccgcaagcggcaa

SEQ ID NO: 3913405 - RNA, 19 nt, Human adenovirus C
gggcccggcacuaccugga

SEQ ID NO: 3913406 - RNA, 14 nt, Human adenovirus C
gggccggaccuggg

SEQ ID NO: 3913407 - RNA, 13 nt, Human adenovirus C
gggcgaggcgcgc

SEQ ID NO: 3913408 - RNA, 12 nt, Human adenovirus C
gggcggcaagcg

SEQ ID NO: 3913409 - RNA, 13 nt, Human adenovirus C
gggcguguggcag

SEQ ID NO: 3913410 - RNA, 12 nt, Human adenovirus C
gggcucgggacc

SEQ ID NO: 3913411 - RNA, 18 nt, Human adenovirus C
gggcugcgcgcuggccag

SEQ ID NO: 3913412 - RNA, 16 nt, Human adenovirus C
gggcuguggggggugc

SEQ ID NO: 3913413 - RNA, 22 nt, Human adenovirus C
ggggaggcaagcacacagacca

SEQ ID NO: 3913414 - RNA, 13 nt, Human adenovirus C
ggggcauggccgg

SEQ ID NO: 3913415 - RNA, 13 nt, Human adenovirus C
ggggccuccgccc

SEQ ID NO: 3913416 - RNA, 12 nt, Human adenovirus C
gggggcgagguc

SEQ ID NO: 3913417 - RNA, 13 nt, Human adenovirus C
gggggcugccgug

SEQ ID NO: 3913418 - RNA, 18 nt, Human adenovirus C
ggggguccacucgcucca

SEQ ID NO: 3913419 - RNA, 18 nt, Human adenovirus C
gggguccacucgcuccag

SEQ ID NO: 3913420 - RNA, 14 nt, Human adenovirus C
ggggugggugagcg

SEQ ID NO: 3913421 - RNA, 15 nt, Human adenovirus C
gggucaaaaaccagg

SEQ ID NO: 3913422 - RNA, 13 nt, Human adenovirus C
ggguccagaggac

SEQ ID NO: 3913423 - RNA, 20 nt, Human adenovirus C
gggucugccagacuucacca

SEQ ID NO: 3913424 - RNA, 11 nt, Human adenovirus C
gggugcccuug

SEQ ID NO: 3913425 - RNA, 18 nt, Human adenovirus C
gggugguggaccuggcca

SEQ ID NO: 3913426 - RNA, 14 nt, Human adenovirus C
gguacccaacucca

SEQ ID NO: 3913427 - RNA, 18 nt, Human adenovirus C
gguacgaugagacccgca

SEQ ID NO: 3913428 - RNA, 23 nt, Human adenovirus C
gguaguuaagagagcugcagcug

SEQ ID NO: 3913429 - RNA, 23 nt, Human adenovirus C
gguccacucgcuccaggguguga

SEQ ID NO: 3913430 - RNA, 13 nt, Human adenovirus C
ggucccacagcuc

SEQ ID NO: 3913431 - RNA, 12 nt, Human adenovirus C
ggucccuguguu

SEQ ID NO: 3913432 - RNA, 17 nt, Human adenovirus C
ggucgcccgggcagggu

SEQ ID NO: 3913433 - RNA, 15 nt, Human adenovirus C
ggugagcuccucagg

SEQ ID NO: 3913434 - RNA, 19 nt, Human adenovirus C
ggugcagacccugcgagug

SEQ ID NO: 3913435 - RNA, 22 nt, Human adenovirus C
ggugcgggcggcgcugcagagc

SEQ ID NO: 3913436 - RNA, 18 nt, Human adenovirus C
ggugcugcgcgcggaggu

SEQ ID NO: 3913437 - RNA, 22 nt, Human adenovirus C
gguggaccuggccaaccaggca

SEQ ID NO: 3913438 - RNA, 16 nt, Human adenovirus C
gguggacgucgcgccg

SEQ ID NO: 3913439 - RNA, 14 nt, Human adenovirus C
gguggaggaggcgc

SEQ ID NO: 3913440 - RNA, 15 nt, Human adenovirus C
gguggaggaggcgcg

SEQ ID NO: 3913441 - RNA, 13 nt, Human adenovirus C
gguggcagaugcc

SEQ ID NO: 3913442 - RNA, 23 nt, Human adenovirus C
gguggccgcguccaucuggucag

SEQ ID NO: 3913443 - RNA, 15 nt, Human adenovirus C
gguggcggcgagguc

SEQ ID NO: 3913444 - RNA, 19 nt, Human adenovirus C
ggugggccgcggggguguc

SEQ ID NO: 3913445 - RNA, 16 nt, Human adenovirus C
ggugggugagcgcgga

SEQ ID NO: 3913446 - RNA, 23 nt, Human adenovirus C
ggugguagauggccuggccucug

SEQ ID NO: 3913447 - RNA, 16 nt, Human adenovirus C
ggugugggaggacgau

SEQ ID NO: 3913448 - RNA, 15 nt, Human adenovirus C
gguuaacuccuccuc

SEQ ID NO: 3913449 - RNA, 15 nt, Human adenovirus C
gguuauccuuacucu

SEQ ID NO: 3913450 - RNA, 17 nt, Human adenovirus C
gguuccugagcagcugc

SEQ ID NO: 3913451 - RNA, 22 nt, Human adenovirus C
gguugugcagggugacaagguc

SEQ ID NO: 3913452 - RNA, 19 nt, Human adenovirus C
gguuucugcccugaaggcu

SEQ ID NO: 3913453 - RNA, 19 nt, Human adenovirus C
guacaaguuguggccccca

SEQ ID NO: 3913454 - RNA, 13 nt, Human adenovirus C
guacagcccaccc

SEQ ID NO: 3913455 - RNA, 13 nt, Human adenovirus C
guacccaacucca

SEQ ID NO: 3913456 - RNA, 23 nt, Human adenovirus C
guaccugagccccgggcuggugc

SEQ ID NO: 3913457 - RNA, 12 nt, Human adenovirus C
guaccugcugga

SEQ ID NO: 3913458 - RNA, 17 nt, Human adenovirus C
guaccuuaccugguacu

SEQ ID NO: 3913459 - RNA, 18 nt, Human adenovirus C
guacggcaccgccagcgc

SEQ ID NO: 3913460 - RNA, 24 nt, Human adenovirus C
guacucccucucaaaagcgggcau

SEQ ID NO: 3913461 - RNA, 21 nt, Human adenovirus C
guacuccgccaccgagggacc

SEQ ID NO: 3913462 - RNA, 17 nt, Human adenovirus C
guacucguacaaagcgc

SEQ ID NO: 3913463 - RNA, 19 nt, Human adenovirus C
guagaggggcucucugagu

SEQ ID NO: 3913464 - RNA, 17 nt, Human adenovirus C
guagcaccacugcagag

SEQ ID NO: 3913465 - RNA, 15 nt, Human adenovirus C
guagcugccuuccca

SEQ ID NO: 3913466 - RNA, 16 nt, Human adenovirus C
guagguacuccgccac

SEQ ID NO: 3913467 - RNA, 16 nt, Human adenovirus C
guaggugagcuccuca

SEQ ID NO: 3913468 - RNA, 19 nt, Human adenovirus C
guagguggcgcccucuucc

SEQ ID NO: 3913469 - RNA, 13 nt, Human adenovirus C
guaguccaggguu

SEQ ID NO: 3913470 - RNA, 15 nt, Human adenovirus C
guaguuucgcaggcg

SEQ ID NO: 3913471 - RNA, 21 nt, Human adenovirus C
guaugcguccaugucgccgcc

SEQ ID NO: 3913472 - RNA, 17 nt, Human adenovirus C
guauugccacugccaca

SEQ ID NO: 3913473 - RNA, 21 nt, Human adenovirus C
gucacuguagucaucgccuuc

SEQ ID NO: 3913474 - RNA, 21 nt, Human adenovirus C
gucaggcgauccuaacucugc

SEQ ID NO: 3913475 - RNA, 20 nt, Human adenovirus C
gucaggcgggagcuccugca

SEQ ID NO: 3913476 - RNA, 16 nt, Human adenovirus C
gucaucaagacuuugg

SEQ ID NO: 3913477 - RNA, 16 nt, Human adenovirus C
gucaucucuacagccc

SEQ ID NO: 3913478 - RNA, 18 nt, Human adenovirus C
gucaucucuacagccccu

SEQ ID NO: 3913479 - RNA, 15 nt, Human adenovirus C
gucaugucuuuccac

SEQ ID NO: 3913480 - RNA, 22 nt, Human adenovirus C
guccaggcgacgagcggccgcc

SEQ ID NO: 3913481 - RNA, 23 nt, Human adenovirus C
guccccagguacagcccacccug

SEQ ID NO: 3913482 - RNA, 20 nt, Human adenovirus C
guccgaagaaaagcgcggcc

SEQ ID NO: 3913483 - RNA, 21 nt, Human adenovirus C
guccggacgggacauuucaga

SEQ ID NO: 3913484 - RNA, 14 nt, Human adenovirus C
guccguguccccgu

SEQ ID NO: 3913485 - RNA, 20 nt, Human adenovirus C
gucgcaccggccgacgggcg

SEQ ID NO: 3913486 - RNA, 15 nt, Human adenovirus C
gucgccaccgccgcc

SEQ ID NO: 3913487 - RNA, 12 nt, Human adenovirus C
gucgccagcccg

SEQ ID NO: 3913488 - RNA, 16 nt, Human adenovirus C
gucgccgucgccagcc

SEQ ID NO: 3913489 - RNA, 23 nt, Human adenovirus C
gucgugcgcaccaccggcggcgg

SEQ ID NO: 3913490 - RNA, 20 nt, Human adenovirus C
gucucgcauuccacgagcca

SEQ ID NO: 3913491 - RNA, 19 nt, Human adenovirus C
acuuugcuuuccugagccc

SEQ ID NO: 3913492 - RNA, 14 nt, Human adenovirus C
agaaagaugaugau

SEQ ID NO: 3913493 - RNA, 21 nt, Human adenovirus C
agaacugguugacggccuggu

SEQ ID NO: 3913494 - RNA, 14 nt, Human adenovirus C
agaagaacaugccg

SEQ ID NO: 3913495 - RNA, 13 nt, Human adenovirus C
agaagaagagcaa

SEQ ID NO: 3913496 - RNA, 14 nt, Human adenovirus C
agaagcgcuccgac

SEQ ID NO: 3913497 - RNA, 14 nt, Human adenovirus C
agaagcugcagcug

SEQ ID NO: 3913498 - RNA, 15 nt, Human adenovirus C
agaagcugcagcugc

SEQ ID NO: 3913499 - RNA, 16 nt, Human adenovirus C
agaaggcguugaggcc

SEQ ID NO: 3913500 - RNA, 15 nt, Human adenovirus C
agaaggugcuggcga

SEQ ID NO: 3913501 - RNA, 18 nt, Human adenovirus C
agaauggcgguagugggu

SEQ ID NO: 3913502 - RNA, 16 nt, Human adenovirus C
agacaccuucaacccc

SEQ ID NO: 3913503 - RNA, 19 nt, Human adenovirus C
agacacgaucggcaggcuc

SEQ ID NO: 3913504 - RNA, 16 nt, Human adenovirus C
agacacuuaagcucgc

SEQ ID NO: 3913505 - RNA, 18 nt, Human adenovirus C
agaccugggccaaaaccu

SEQ ID NO: 3913506 - RNA, 12 nt, Human adenovirus C
agacgacagcgu

SEQ ID NO: 3913507 - RNA, 16 nt, Human adenovirus C
agacgccgcaccugcc

SEQ ID NO: 3913508 - RNA, 23 nt, Human adenovirus C
agacggcguaguuucgcaggcgc

SEQ ID NO: 3913509 - RNA, 20 nt, Human adenovirus C
agacucugacaaagcccaag

SEQ ID NO: 3913510 - RNA, 17 nt, Human adenovirus C
agacugugggggcaaca

SEQ ID NO: 3913511 - RNA, 12 nt, Human adenovirus C
agagagcugcag

SEQ ID NO: 3913512 - RNA, 15 nt, Human adenovirus C
agagagcugcagcug

SEQ ID NO: 3913513 - RNA, 13 nt, Human adenovirus C
agagcccgagggc

SEQ ID NO: 3913514 - RNA, 14 nt, Human adenovirus C
agagcccgagggcc

SEQ ID NO: 3913515 - RNA, 14 nt, Human adenovirus C
agagccggccugga

SEQ ID NO: 3913516 - RNA, 14 nt, Human adenovirus C
agagcugcagcugc

SEQ ID NO: 3913517 - RNA, 12 nt, Human adenovirus C
agaggccgcauc

SEQ ID NO: 3913518 - RNA, 17 nt, Human adenovirus C
agagggagcggggggcu

SEQ ID NO: 3913519 - RNA, 14 nt, Human adenovirus C
agaguuucugcuac

SEQ ID NO: 3913520 - RNA, 24 nt, Human adenovirus C
agauaccccuauccugccgugcca

SEQ ID NO: 3913521 - RNA, 16 nt, Human adenovirus C
agaugaagaagaggaa

SEQ ID NO: 3913522 - RNA, 17 nt, Human adenovirus C
agaugaagaugaagaag

SEQ ID NO: 3913523 - RNA, 22 nt, Human adenovirus C
agaugugggagacgacgugcug

SEQ ID NO: 3913524 - RNA, 15 nt, Human adenovirus C
agcaaaccucaccuc

SEQ ID NO: 3913525 - RNA, 21 nt, Human adenovirus C
agcaacagcagcggucacaca

SEQ ID NO: 3913526 - RNA, 20 nt, Human adenovirus C
agcaaggaaauucccacgcc

SEQ ID NO: 3913527 - RNA, 18 nt, Human adenovirus C
agcaaggccugcccacca

SEQ ID NO: 3913528 - RNA, 14 nt, Human adenovirus C
agcaaugacagcac

SEQ ID NO: 3913529 - RNA, 19 nt, Human adenovirus C
agcacaacauacugacccg

SEQ ID NO: 3913530 - RNA, 20 nt, Human adenovirus C
agcaccgguggguugcugaa

SEQ ID NO: 3913531 - RNA, 16 nt, Human adenovirus C
agcaccugucgucagc

SEQ ID NO: 3913532 - RNA, 14 nt, Human adenovirus C
agcacgaaggaggc

SEQ ID NO: 3913533 - RNA, 22 nt, Human adenovirus C
agcacuaguauugccacugcca

SEQ ID NO: 3913534 - RNA, 23 nt, Human adenovirus C
agcagagcgugagccuuaaccug

SEQ ID NO: 3913535 - RNA, 21 nt, Human adenovirus C
agcagcggaugauccuccagu

SEQ ID NO: 3913536 - RNA, 22 nt, Human adenovirus C
agcagcugcgacuuaccgcagc

SEQ ID NO: 3913537 - RNA, 14 nt, Human adenovirus C
agcaggagcgcugg

SEQ ID NO: 3913538 - RNA, 15 nt, Human adenovirus C
agcaggagcgcuggg

SEQ ID NO: 3913539 - RNA, 17 nt, Human adenovirus C
agcaggaggaggagcgc

SEQ ID NO: 3913540 - RNA, 22 nt, Human adenovirus C
agcaggccaacgagcgccucgg

SEQ ID NO: 3913541 - RNA, 13 nt, Human adenovirus C
agcagggccaggu

SEQ ID NO: 3913542 - RNA, 14 nt, Human adenovirus C
agcaggggggccac

SEQ ID NO: 3913543 - RNA, 13 nt, Human adenovirus C
agcagugcagcuu

SEQ ID NO: 3913544 - RNA, 16 nt, Human adenovirus C
agcaguuccaggcggu

SEQ ID NO: 3913545 - RNA, 20 nt, Human adenovirus C
agcauaaaaaaauccagugg

SEQ ID NO: 3913546 - RNA, 19 nt, Human adenovirus C
agcauaguggugcaggagc

SEQ ID NO: 3913547 - RNA, 12 nt, Human adenovirus C
agcaugaagggc

SEQ ID NO: 3913548 - RNA, 20 nt, Human adenovirus C
agcaugaagggcacgagcug

SEQ ID NO: 3913549 - RNA, 18 nt, Human adenovirus C
agcauugauggucgcccc

SEQ ID NO: 3913550 - RNA, 13 nt, Human adenovirus C
agcauuugaccau

SEQ ID NO: 3913551 - RNA, 21 nt, Human adenovirus C
agccacuuaaaaaaacaaagu

SEQ ID NO: 3913552 - RNA, 14 nt, Human adenovirus C
agccaggucuugca

SEQ ID NO: 3913553 - RNA, 15 nt, Human adenovirus C
agccaguggcaacug

SEQ ID NO: 3913554 - RNA, 15 nt, Human adenovirus C
agcccgagagcaugu

SEQ ID NO: 3913555 - RNA, 13 nt, Human adenovirus C
agccgccugagca

SEQ ID NO: 3913556 - RNA, 14 nt, Human adenovirus C
agccgcugcagcca

SEQ ID NO: 3913557 - RNA, 16 nt, Human adenovirus C
agccugggcuggagcc

SEQ ID NO: 3913558 - RNA, 15 nt, Human adenovirus C
agcgacgaccugggc

SEQ ID NO: 3913559 - RNA, 14 nt, Human adenovirus C
agcgaguccgcauc

SEQ ID NO: 3913560 - RNA, 13 nt, Human adenovirus C
agcgcacuacugc

SEQ ID NO: 3913561 - RNA, 14 nt, Human adenovirus C
agcgcacugcggcu

SEQ ID NO: 3913562 - RNA, 23 nt, Human adenovirus C
agcgcagcgaugugccccucgcc

SEQ ID NO: 3913563 - RNA, 20 nt, Human adenovirus C
agcgcagcggugcagccaca

SEQ ID NO: 3913564 - RNA, 20 nt, Human adenovirus C
agcgcagcuugagccuggcu

SEQ ID NO: 3913565 - RNA, 20 nt, Human adenovirus C
agcgccugcaugaaagccuu

SEQ ID NO: 3913566 - RNA, 17 nt, Human adenovirus C
agcgcgaaaagaaccug

SEQ ID NO: 3913567 - RNA, 15 nt, Human adenovirus C
agcggcauaaggaca

SEQ ID NO: 3913568 - RNA, 22 nt, Human adenovirus C
agcggcggcagcagcaggagga

SEQ ID NO: 3913569 - RNA, 14 nt, Human adenovirus C
agcgggcacucuuc

SEQ ID NO: 3913570 - RNA, 20 nt, Human adenovirus C
agcgggggguaccugcugga

SEQ ID NO: 3913571 - RNA, 22 nt, Human adenovirus C
agcggggugguggaccuggcca

SEQ ID NO: 3913572 - RNA, 19 nt, Human adenovirus C
agcggucccauccaagguc

SEQ ID NO: 3913573 - RNA, 21 nt, Human adenovirus C
agcgguuaagcugggaugggu

SEQ ID NO: 3913574 - RNA, 15 nt, Human adenovirus C
agcgguuaggcugga

SEQ ID NO: 3913575 - RNA, 14 nt, Human adenovirus C
agcgguugcugcgc

SEQ ID NO: 3913576 - RNA, 13 nt, Human adenovirus C
agcguccgcggcc

SEQ ID NO: 3913577 - RNA, 16 nt, Human adenovirus C
agcguggcgcuggaca

SEQ ID NO: 3913578 - RNA, 17 nt, Human adenovirus C
agcuaaaauacaacccc

SEQ ID NO: 3913579 - RNA, 18 nt, Human adenovirus C
agcucauggcggggacca

SEQ ID NO: 3913580 - RNA, 21 nt, Human adenovirus C
agcugcaaacuuucuccaaag

SEQ ID NO: 3913581 - RNA, 18 nt, Human adenovirus C
agcugcagcugccgccgc

SEQ ID NO: 3913582 - RNA, 21 nt, Human adenovirus C
agcugccgccgccgccaccca

SEQ ID NO: 3913583 - RNA, 17 nt, Human adenovirus C
agcugccuucccaaaaa

SEQ ID NO: 3913584 - RNA, 21 nt, Human adenovirus C
agcuggggccggaccugggcu

SEQ ID NO: 3913585 - RNA, 15 nt, Human adenovirus C
agcuguccuaucaac

SEQ ID NO: 3913586 - RNA, 15 nt, Human adenovirus C
agcuuaaaagaugac

SEQ ID NO: 3913587 - RNA, 14 nt, Human adenovirus C
agcuugaucugcug

SEQ ID NO: 3913588 - RNA, 15 nt, Human adenovirus C
agcuugccugcucca

SEQ ID NO: 3913589 - RNA, 20 nt, Human adenovirus C
agcuugccugcuccagagau

SEQ ID NO: 3913590 - RNA, 17 nt, Human adenovirus C
agcuuguugaccagcuc

SEQ ID NO: 3913591 - RNA, 13 nt, Human adenovirus C
agcuuuugaaauc

SEQ ID NO: 3913592 - RNA, 13 nt, Human adenovirus C
aggaagagcagga

SEQ ID NO: 3913593 - RNA, 16 nt, Human adenovirus C
aggaauacugggacag

SEQ ID NO: 3913594 - RNA, 15 nt, Human adenovirus C
aggaccucugcacuc

SEQ ID NO: 3913595 - RNA, 19 nt, Human adenovirus C
aggacgugguaaaggugac

SEQ ID NO: 3913596 - RNA, 15 nt, Human adenovirus C
aggagcgcugggcgu

SEQ ID NO: 3913597 - RNA, 12 nt, Human adenovirus C
aggagcugaggc

SEQ ID NO: 3913598 - RNA, 15 nt, Human adenovirus C
aggagcugaggcccg

SEQ ID NO: 3913599 - RNA, 19 nt, Human adenovirus C
aggagcugcagaagcugcu

SEQ ID NO: 3913600 - RNA, 19 nt, Human adenovirus C
aggaggacuuugagcccga

SEQ ID NO: 3913601 - RNA, 14 nt, Human adenovirus C
aggaggagcgcugc

SEQ ID NO: 3913602 - RNA, 21 nt, Human adenovirus C
aggaggauuacaagugggaau

SEQ ID NO: 3913603 - RNA, 15 nt, Human adenovirus C
aggaggcacuaaagc

SEQ ID NO: 3913604 - RNA, 21 nt, Human adenovirus C
aggaggcuaagugggaggggu

SEQ ID NO: 3913605 - RNA, 15 nt, Human adenovirus C
aggagggcgagggcc

SEQ ID NO: 3913606 - RNA, 16 nt, Human adenovirus C
aggaugaagaagagga

SEQ ID NO: 3913607 - RNA, 14 nt, Human adenovirus C
aggcacuaaagcaa

SEQ ID NO: 3913608 - RNA, 19 nt, Human adenovirus C
aggcacuaaagcaaggccu

SEQ ID NO: 3913609 - RNA, 21 nt, Human adenovirus C
aggcaggacccuggugcugcc

SEQ ID NO: 3913610 - RNA, 17 nt, Human adenovirus C
aggcauccgcgccgcag

SEQ ID NO: 3913611 - RNA, 17 nt, Human adenovirus C
acaccuacucuggcucc

SEQ ID NO: 3913612 - RNA, 18 nt, Human adenovirus C
acaccucgaccacugccg

SEQ ID NO: 3913613 - RNA, 15 nt, Human adenovirus C
acacguggcggccgc

SEQ ID NO: 3913614 - RNA, 22 nt, Human adenovirus C
acacugcagcaggugcugccca

SEQ ID NO: 3913615 - RNA, 16 nt, Human adenovirus C
acacuuaagcucgccu

SEQ ID NO: 3913616 - RNA, 14 nt, Human adenovirus C
acagagacaggacu

SEQ ID NO: 3913617 - RNA, 13 nt, Human adenovirus C
acagcacuggcaa

SEQ ID NO: 3913618 - RNA, 17 nt, Human adenovirus C
acagcgaggaggagcgc

SEQ ID NO: 3913619 - RNA, 14 nt, Human adenovirus C
acagcgcgagcagg

SEQ ID NO: 3913620 - RNA, 18 nt, Human adenovirus C
acagcuaugauccagaug

SEQ ID NO: 3913621 - RNA, 17 nt, Human adenovirus C
acaggccagaugcugag

SEQ ID NO: 3913622 - RNA, 19 nt, Human adenovirus C
acaggcggcuauuaccacc

SEQ ID NO: 3913623 - RNA, 20 nt, Human adenovirus C
acagggcccagucugcaaga

SEQ ID NO: 3913624 - RNA, 14 nt, Human adenovirus C
acagguggagauga

SEQ ID NO: 3913625 - RNA, 21 nt, Human adenovirus C
acagguggagcugaaauauga

SEQ ID NO: 3913626 - RNA, 22 nt, Human adenovirus C
acaguaacugcagcacagcacc

SEQ ID NO: 3913627 - RNA, 24 nt, Human adenovirus C
acaguaugauuaaaugagacauga

SEQ ID NO: 3913628 - RNA, 14 nt, Human adenovirus C
acagucaggcagag

SEQ ID NO: 3913629 - RNA, 16 nt, Human adenovirus C
acagucaggcagagga

SEQ ID NO: 3913630 - RNA, 16 nt, Human adenovirus C
acauaaacuauaacag

SEQ ID NO: 3913631 - RNA, 18 nt, Human adenovirus C
acaucaacuuugcgucuc

SEQ ID NO: 3913632 - RNA, 18 nt, Human adenovirus C
acaucauuuugcugccag

SEQ ID NO: 3913633 - RNA, 23 nt, Human adenovirus C
acauccaggugaugccggcggcg

SEQ ID NO: 3913634 - RNA, 14 nt, Human adenovirus C
acaugaccaaggac

SEQ ID NO: 3913635 - RNA, 21 nt, Human adenovirus C
acaugcagggcacccuccccu

SEQ ID NO: 3913636 - RNA, 21 nt, Human adenovirus C
acaugcuaccucuuugagccc

SEQ ID NO: 3913637 - RNA, 21 nt, Human adenovirus C
acauggguguucuugcugguc

SEQ ID NO: 3913638 - RNA, 13 nt, Human adenovirus C
acauguggaguua

SEQ ID NO: 3913639 - RNA, 14 nt, Human adenovirus C
acauuacuggaacu

SEQ ID NO: 3913640 - RNA, 15 nt, Human adenovirus C
acauucaggugcccc

SEQ ID NO: 3913641 - RNA, 15 nt, Human adenovirus C
acauuggcuggaaug

SEQ ID NO: 3913642 - RNA, 16 nt, Human adenovirus C
accaaaguugcaggag

SEQ ID NO: 3913643 - RNA, 19 nt, Human adenovirus C
accaacaugccaaauguga

SEQ ID NO: 3913644 - RNA, 16 nt, Human adenovirus C
accaaggacugguucc

SEQ ID NO: 3913645 - RNA, 14 nt, Human adenovirus C
accaccacccuccu

SEQ ID NO: 3913646 - RNA, 11 nt, Human adenovirus C
accacuguggu

SEQ ID NO: 3913647 - RNA, 16 nt, Human adenovirus C
accagaacgaccacag

SEQ ID NO: 3913648 - RNA, 23 nt, Human adenovirus C
accagacauuacucccauuuuuc

SEQ ID NO: 3913649 - RNA, 15 nt, Human adenovirus C
accaucaaucuugac

SEQ ID NO: 3913650 - RNA, 16 nt, Human adenovirus C
accauccuaaaccagc

SEQ ID NO: 3913651 - RNA, 18 nt, Human adenovirus C
accauuaacgaggauggg

SEQ ID NO: 3913652 - RNA, 17 nt, Human adenovirus C
acccaaaaagaagcugc

SEQ ID NO: 3913653 - RNA, 20 nt, Human adenovirus C
acccaaaaagaagcugcagc

SEQ ID NO: 3913654 - RNA, 15 nt, Human adenovirus C
acccaagggugcagc

SEQ ID NO: 3913655 - RNA, 15 nt, Human adenovirus C
acccaccgugcagcu

SEQ ID NO: 3913656 - RNA, 15 nt, Human adenovirus C
acccagcagaaaccu

SEQ ID NO: 3913657 - RNA, 21 nt, Human adenovirus C
acccagcagaaaccugugcug

SEQ ID NO: 3913658 - RNA, 21 nt, Human adenovirus C
acccauuugaugcucaaacaa

SEQ ID NO: 3913659 - RNA, 22 nt, Human adenovirus C
accccacgguggcaccuacgca

SEQ ID NO: 3913660 - RNA, 21 nt, Human adenovirus C
accccgugaccuuccgcucca

SEQ ID NO: 3913661 - RNA, 15 nt, Human adenovirus C
accccuauccugccg

SEQ ID NO: 3913662 - RNA, 16 nt, Human adenovirus C
accccugacagaggac

SEQ ID NO: 3913663 - RNA, 14 nt, Human adenovirus C
acccgcagcugccu

SEQ ID NO: 3913664 - RNA, 15 nt, Human adenovirus C
acccgucggccuccg

SEQ ID NO: 3913665 - RNA, 11 nt, Human adenovirus C
acccuccccuu

SEQ ID NO: 3913666 - RNA, 15 nt, Human adenovirus C
acccuggcugugggu

SEQ ID NO: 3913667 - RNA, 21 nt, Human adenovirus C
acccuuauccucaucugcagc

SEQ ID NO: 3913668 - RNA, 21 nt, Human adenovirus C
accgaagauagcggccgggca

SEQ ID NO: 3913669 - RNA, 13 nt, Human adenovirus C
accgcccccuggu

SEQ ID NO: 3913670 - RNA, 19 nt, Human adenovirus C
accgcgcacgucgcaccgg

SEQ ID NO: 3913671 - RNA, 19 nt, Human adenovirus C
accgggacugggcgugcag

SEQ ID NO: 3913672 - RNA, 20 nt, Human adenovirus C
accgggguacccaacuccau

SEQ ID NO: 3913673 - RNA, 14 nt, Human adenovirus C
accgguggguugcu

SEQ ID NO: 3913674 - RNA, 21 nt, Human adenovirus C
accguaccuuaaucaaacuca

SEQ ID NO: 3913675 - RNA, 16 nt, Human adenovirus C
accguagaugggacac

SEQ ID NO: 3913676 - RNA, 13 nt, Human adenovirus C
accguaggagggg

SEQ ID NO: 3913677 - RNA, 18 nt, Human adenovirus C
accgucaucucuacagcc

SEQ ID NO: 3913678 - RNA, 12 nt, Human adenovirus C
accucccuugcc

SEQ ID NO: 3913679 - RNA, 20 nt, Human adenovirus C
accuccuuuccuuccuccca

SEQ ID NO: 3913680 - RNA, 17 nt, Human adenovirus C
accucuuugagcccuuu

SEQ ID NO: 3913681 - RNA, 20 nt, Human adenovirus C
accugccaccucccucccaa

SEQ ID NO: 3913682 - RNA, 12 nt, Human adenovirus C
accugcggccua

SEQ ID NO: 3913683 - RNA, 21 nt, Human adenovirus C
accuggaaaaggugaugaaaa

SEQ ID NO: 3913684 - RNA, 16 nt, Human adenovirus C
accuggaccggcuggu

SEQ ID NO: 3913685 - RNA, 18 nt, Human adenovirus C
accuggccaaccaggcag

SEQ ID NO: 3913686 - RNA, 14 nt, Human adenovirus C
accuggucuccuac

SEQ ID NO: 3913687 - RNA, 12 nt, Human adenovirus C
accugugcugcc

SEQ ID NO: 3913688 - RNA, 23 nt, Human adenovirus C
accugugcuuugcucccaaaccu

SEQ ID NO: 3913689 - RNA, 18 nt, Human adenovirus C
accuucuuccccauggcc

SEQ ID NO: 3913690 - RNA, 16 nt, Human adenovirus C
acgaacccccgcggcg

SEQ ID NO: 3913691 - RNA, 14 nt, Human adenovirus C
acgaccccuggaga

SEQ ID NO: 3913692 - RNA, 12 nt, Human adenovirus C
acgaccugggcg

SEQ ID NO: 3913693 - RNA, 14 nt, Human adenovirus C
acgacgggcccggu

SEQ ID NO: 3913694 - RNA, 16 nt, Human adenovirus C
acgagaaacgcgcggc

SEQ ID NO: 3913695 - RNA, 16 nt, Human adenovirus C
acgaggggcagugcag

SEQ ID NO: 3913696 - RNA, 18 nt, Human adenovirus C
acgagucacuccugcgcc

SEQ ID NO: 3913697 - RNA, 17 nt, Human adenovirus C
acgaucuuggccuugcu

SEQ ID NO: 3913698 - RNA, 23 nt, Human adenovirus C
acgaugcuucuaaauagcuaacg

SEQ ID NO: 3913699 - RNA, 17 nt, Human adenovirus C
acgccaccaacgugccc

SEQ ID NO: 3913700 - RNA, 23 nt, Human adenovirus C
acgccaccuucuuccccauggcc

SEQ ID NO: 3913701 - RNA, 23 nt, Human adenovirus C
acgccauugacgcggugguggag

SEQ ID NO: 3913702 - RNA, 22 nt, Human adenovirus C
acgcccagcguggcgcuggaca

SEQ ID NO: 3913703 - RNA, 14 nt, Human adenovirus C
acgcgcgagccugc

SEQ ID NO: 3913704 - RNA, 20 nt, Human adenovirus C
acgcgcgcgcagccuccaug

SEQ ID NO: 3913705 - RNA, 23 nt, Human adenovirus C
acgcgcggcaaacgcucugcaac

SEQ ID NO: 3913706 - RNA, 17 nt, Human adenovirus C
acgcggaggcucucuuc

SEQ ID NO: 3913707 - RNA, 19 nt, Human adenovirus C
acgcguuccggcagcagcc

SEQ ID NO: 3913708 - RNA, 19 nt, Human adenovirus C
acgcucaagggcgaggcgc

SEQ ID NO: 3913709 - RNA, 14 nt, Human adenovirus C
acgcuggaagacgu

SEQ ID NO: 3913710 - RNA, 13 nt, Human adenovirus C
acgcuggaccugc

SEQ ID NO: 3913711 - RNA, 14 nt, Human adenovirus C
acggacgaggagga

SEQ ID NO: 3913712 - RNA, 13 nt, Human adenovirus C
acggcaccgccag

SEQ ID NO: 3913713 - RNA, 17 nt, Human adenovirus C
acggcaccgccagcgca

SEQ ID NO: 3913714 - RNA, 17 nt, Human adenovirus C
acggccgcuacgugccc

SEQ ID NO: 3913715 - RNA, 14 nt, Human adenovirus C
acggccuacuggag

SEQ ID NO: 3913716 - RNA, 18 nt, Human adenovirus C
acggcgacgaggaccugc

SEQ ID NO: 3913717 - RNA, 15 nt, Human adenovirus C
acgggcggaggagaa

SEQ ID NO: 3913718 - RNA, 19 nt, Human adenovirus C
acgggcggcggccugggcg

SEQ ID NO: 3913719 - RNA, 20 nt, Human adenovirus C
acgggcggcggccugggcga

SEQ ID NO: 3913720 - RNA, 19 nt, Human adenovirus C
acgguaaagaccccgggca

SEQ ID NO: 3913721 - RNA, 21 nt, Human adenovirus C
acguagaggggcucucugagu

SEQ ID NO: 3913722 - RNA, 19 nt, Human adenovirus C
acgucaucuccagcggcca

SEQ ID NO: 3913723 - RNA, 15 nt, Human adenovirus C
acgugguccgugugc

SEQ ID NO: 3913724 - RNA, 14 nt, Human adenovirus C
acuaaagcaaggcc

SEQ ID NO: 3913725 - RNA, 12 nt, Human adenovirus C
acuaccacgccc

SEQ ID NO: 3913726 - RNA, 21 nt, Human adenovirus C
acuaccuuuccgccgccaaca

SEQ ID NO: 3913727 - RNA, 12 nt, Human adenovirus C
acuacguccgcg

SEQ ID NO: 3913728 - RNA, 21 nt, Human adenovirus C
acuacuugaaagugggcaggc

SEQ ID NO: 3913729 - RNA, 13 nt, Human adenovirus C
acuauaacagagg

SEQ ID NO: 3913730 - RNA, 18 nt, Human adenovirus C
acucacagaccugggcca

SEQ ID NO: 3913731 - RNA, 14 nt, Human adenovirus C
acucaccaaggcca

SEQ ID NO: 3913732 - RNA, 15 nt, Human adenovirus C
acucacuccggggcu

SEQ ID NO: 3913733 - RNA, 19 nt, Human adenovirus C
acucagggucgcaggggca

SEQ ID NO: 3913734 - RNA, 16 nt, Human adenovirus C
acuccucacuuaaaaa

SEQ ID NO: 3913735 - RNA, 19 nt, Human adenovirus C
acucgcuccagggugugaa

SEQ ID NO: 3913736 - RNA, 17 nt, Human adenovirus C
acucuaugucuuuuaca

SEQ ID NO: 3913737 - RNA, 20 nt, Human adenovirus C
acucugacaaagcccaagaa

SEQ ID NO: 3913738 - RNA, 22 nt, Human adenovirus C
acugacuuugcuuuccugagcc

SEQ ID NO: 3913739 - RNA, 12 nt, Human adenovirus C
acugaggaugaa

SEQ ID NO: 3913740 - RNA, 21 nt, Human adenovirus C
acugcaacagguuauugcccc

SEQ ID NO: 3913741 - RNA, 13 nt, Human adenovirus C
acugcagcaggug

SEQ ID NO: 3913742 - RNA, 18 nt, Human adenovirus C
acugcagcaggugcugcc

SEQ ID NO: 3913743 - RNA, 23 nt, Human adenovirus C
acugcagguacgccugcaggaau

SEQ ID NO: 3913744 - RNA, 13 nt, Human adenovirus C
acugccgccgcca

SEQ ID NO: 3913745 - RNA, 14 nt, Human adenovirus C
acugcuaccuucug

SEQ ID NO: 3913746 - RNA, 12 nt, Human adenovirus C
acugcugcugga

SEQ ID NO: 3913747 - RNA, 13 nt, Human adenovirus C
acugcugcuggaa

SEQ ID NO: 3913748 - RNA, 15 nt, Human adenovirus C
acuggcagcggugca

SEQ ID NO: 3913749 - RNA, 14 nt, Human adenovirus C
acuggcagggacac

SEQ ID NO: 3913750 - RNA, 13 nt, Human adenovirus C
acugggaguugcg

SEQ ID NO: 3913751 - RNA, 13 nt, Human adenovirus C
acuggggcggcga

SEQ ID NO: 3913752 - RNA, 22 nt, Human adenovirus C
acuggucuugucaugccugggg

SEQ ID NO: 3913753 - RNA, 20 nt, Human adenovirus C
acugguguuuagugcuccac

SEQ ID NO: 3913754 - RNA, 19 nt, Human adenovirus C
acuguugucuuccguccgc

SEQ ID NO: 3913755 - RNA, 15 nt, Human adenovirus C
acuuacccuguggac

SEQ ID NO: 3913756 - RNA, 15 nt, Human adenovirus C
acuucacccacagcc

SEQ ID NO: 3913757 - RNA, 15 nt, Human adenovirus C
acuucagacuggggu

SEQ ID NO: 3913758 - RNA, 19 nt, Human adenovirus C
acuuccccgccaggaacca

SEQ ID NO: 3913759 - RNA, 22 nt, Human adenovirus C
acuugcauggcguguuaaaugg

SEQ ID NO: 3913760 - RNA, 13 nt, Human adenovirus C
acuugcuggaaca

SEQ ID NO: 3913761 - RNA, 21 nt, Human adenovirus C
acuuggugcuggccugcaccc

SEQ ID NO: 3913762 - RNA, 23 nt, Human adenovirus C
acuuuaacggcucuucauuugua

SEQ ID NO: 3913763 - RNA, 13 nt, Human adenovirus C
acuuucuccaaag

SEQ ID NO: 3913764 - RNA, 21 nt, Human adenovirus C
acuuugcgucucuggccccgc

SEQ ID NO: 3913765 - RNA, 18 nt, Human adenovirus C
acuuugcuuuccugagcc

SEQ ID NO: 3913766 - RNA, 14 nt, Human adenovirus C
gaagaagaggaaga

SEQ ID NO: 3913767 - RNA, 21 nt, Human adenovirus C
gcagaaguauuccauagagca

SEQ ID NO: 3913768 - RNA, 15 nt, Human adenovirus C
gcagagcccauggaa

SEQ ID NO: 3913769 - RNA, 18 nt, Human adenovirus C
gcagagcucucugggaaa

SEQ ID NO: 3913770 - RNA, 18 nt, Human adenovirus C
gcagaugcgccccccucc

SEQ ID NO: 3913771 - RNA, 15 nt, Human adenovirus C
gcagcacagcaggga

SEQ ID NO: 3913772 - RNA, 13 nt, Human adenovirus C
gcagcacaggcca

SEQ ID NO: 3913773 - RNA, 22 nt, Human adenovirus C
gcagcacaggccagaugcugag

SEQ ID NO: 3913774 - RNA, 14 nt, Human adenovirus C
gcagcaccuugcgu

SEQ ID NO: 3913775 - RNA, 15 nt, Human adenovirus C
gcagcagggcaaccu

SEQ ID NO: 3913776 - RNA, 15 nt, Human adenovirus C
gcagcaucgagguca

SEQ ID NO: 3913777 - RNA, 17 nt, Human adenovirus C
gcagccacaacgcgcag

SEQ ID NO: 3913778 - RNA, 17 nt, Human adenovirus C
gcagccgcaggccaacc

SEQ ID NO: 3913779 - RNA, 18 nt, Human adenovirus C
gcagcggugcagccacaa

SEQ ID NO: 3913780 - RNA, 23 nt, Human adenovirus C
gcagcugccgccgccgccaccca

SEQ ID NO: 3913781 - RNA, 22 nt, Human adenovirus C
gcagcuggggccggaccugggc

SEQ ID NO: 3913782 - RNA, 17 nt, Human adenovirus C
gcagcuuguugaccagc

SEQ ID NO: 3913783 - RNA, 14 nt, Human adenovirus C
gcaggagcgcagcu

SEQ ID NO: 3913784 - RNA, 14 nt, Human adenovirus C
gcagggcaaccugg

SEQ ID NO: 3913785 - RNA, 13 nt, Human adenovirus C
gcagggccagcug

SEQ ID NO: 3913786 - RNA, 16 nt, Human adenovirus C
gcagggugacaagguc

SEQ ID NO: 3913787 - RNA, 17 nt, Human adenovirus C
gcagguacgccugcagg

SEQ ID NO: 3913788 - RNA, 16 nt, Human adenovirus C
gcagguuccugagcag

SEQ ID NO: 3913789 - RNA, 18 nt, Human adenovirus C
gcagguuccugagcagcu

SEQ ID NO: 3913790 - RNA, 21 nt, Human adenovirus C
gcagguuccugagcagcugcg

SEQ ID NO: 3913791 - RNA, 16 nt, Human adenovirus C
gcaguagucggugcuc

SEQ ID NO: 3913792 - RNA, 18 nt, Human adenovirus C
gcaguggucuccucagcg

SEQ ID NO: 3913793 - RNA, 13 nt, Human adenovirus C
gcaguuccaggcg

SEQ ID NO: 3913794 - RNA, 15 nt, Human adenovirus C
gcauacggccgccag

SEQ ID NO: 3913795 - RNA, 11 nt, Human adenovirus C
gcaucccaccu

SEQ ID NO: 3913796 - RNA, 19 nt, Human adenovirus C
gcauccgcaagcggcaacc

SEQ ID NO: 3913797 - RNA, 20 nt, Human adenovirus C
gcaugaagggcacgagcugc

SEQ ID NO: 3913798 - RNA, 22 nt, Human adenovirus C
gcaugaagggcacgagcugcuu

SEQ ID NO: 3913799 - RNA, 16 nt, Human adenovirus C
gcauguagaacugguu

SEQ ID NO: 3913800 - RNA, 15 nt, Human adenovirus C
gcauguuuucccuga

SEQ ID NO: 3913801 - RNA, 15 nt, Human adenovirus C
gcauuaacauggaag

SEQ ID NO: 3913802 - RNA, 19 nt, Human adenovirus C
gcauuaaguggcucgcucc

SEQ ID NO: 3913803 - RNA, 19 nt, Human adenovirus C
gcauugcguaccucaggca

SEQ ID NO: 3913804 - RNA, 21 nt, Human adenovirus C
gccaaaaaucuuugagggucu

SEQ ID NO: 3913805 - RNA, 17 nt, Human adenovirus C
gccaaccaggcagugca

SEQ ID NO: 3913806 - RNA, 23 nt, Human adenovirus C
gccaacuacaauauuggcuacca

SEQ ID NO: 3913807 - RNA, 21 nt, Human adenovirus C
gccaaucaagcagguggcacc

SEQ ID NO: 3913808 - RNA, 19 nt, Human adenovirus C
gccacaacgcgcagcccgu

SEQ ID NO: 3913809 - RNA, 16 nt, Human adenovirus C
gccacaagugcuuugc

SEQ ID NO: 3913810 - RNA, 12 nt, Human adenovirus C
gccacagagggc

SEQ ID NO: 3913811 - RNA, 14 nt, Human adenovirus C
gccaccgcccgcgg

SEQ ID NO: 3913812 - RNA, 15 nt, Human adenovirus C
gccaccuucuucccc

SEQ ID NO: 3913813 - RNA, 11 nt, Human adenovirus C
gccacugccac

SEQ ID NO: 3913814 - RNA, 23 nt, Human adenovirus C
gccagacuauuuuuuccagacca

SEQ ID NO: 3913815 - RNA, 13 nt, Human adenovirus C
gccagcacgcucu

SEQ ID NO: 3913816 - RNA, 21 nt, Human adenovirus C
gccagcagguuucugcccuga

SEQ ID NO: 3913817 - RNA, 14 nt, Human adenovirus C
gccagcgccugcac

SEQ ID NO: 3913818 - RNA, 17 nt, Human adenovirus C
gccagcgccugcacugc

SEQ ID NO: 3913819 - RNA, 18 nt, Human adenovirus C
gccagcgccugcacugca

SEQ ID NO: 3913820 - RNA, 15 nt, Human adenovirus C
gccaggacgccucgg

SEQ ID NO: 3913821 - RNA, 17 nt, Human adenovirus C
gccauagcggaugucag

SEQ ID NO: 3913822 - RNA, 15 nt, Human adenovirus C
gccaugccccaggcu

SEQ ID NO: 3913823 - RNA, 22 nt, Human adenovirus C
gcccaacucggccgccugugga

SEQ ID NO: 3913824 - RNA, 23 nt, Human adenovirus C
gcccacaacacggccuccacgcu

SEQ ID NO: 3913825 - RNA, 17 nt, Human adenovirus C
gcccacaccuacagccu

SEQ ID NO: 3913826 - RNA, 13 nt, Human adenovirus C
gcccaggcggcgg

SEQ ID NO: 3913827 - RNA, 18 nt, Human adenovirus C
gccccaaucaaucagccu

SEQ ID NO: 3913828 - RNA, 17 nt, Human adenovirus C
gccccaggcuggggaga

SEQ ID NO: 3913829 - RNA, 17 nt, Human adenovirus C
gccccccuucucccacc

SEQ ID NO: 3913830 - RNA, 15 nt, Human adenovirus C
gccccucgccauagc

SEQ ID NO: 3913831 - RNA, 15 nt, Human adenovirus C
gcccgaggguaacga

SEQ ID NO: 3913832 - RNA, 12 nt, Human adenovirus C
gcccgccaccug

SEQ ID NO: 3913833 - RNA, 17 nt, Human adenovirus C
gcccgccagcccccacc

SEQ ID NO: 3913834 - RNA, 14 nt, Human adenovirus C
gcccgcgccaccga

SEQ ID NO: 3913835 - RNA, 15 nt, Human adenovirus C
gcccgcgccugcugg

SEQ ID NO: 3913836 - RNA, 14 nt, Human adenovirus C
gcccgggaccagcg

SEQ ID NO: 3913837 - RNA, 15 nt, Human adenovirus C
gcccgucucuggggu

SEQ ID NO: 3913838 - RNA, 21 nt, Human adenovirus C
gcccguguucugacagggccc

SEQ ID NO: 3913839 - RNA, 14 nt, Human adenovirus C
gcccuaacaguggc

SEQ ID NO: 3913840 - RNA, 19 nt, Human adenovirus C
gcccuacuuccgcagccac

SEQ ID NO: 3913841 - RNA, 17 nt, Human adenovirus C
gcccucaccugccgccu

SEQ ID NO: 3913842 - RNA, 13 nt, Human adenovirus C
gcccucuuccucc

SEQ ID NO: 3913843 - RNA, 14 nt, Human adenovirus C
gcccuggaggcagc

SEQ ID NO: 3913844 - RNA, 20 nt, Human adenovirus C
gcccuggaggcagcuggggc

SEQ ID NO: 3913845 - RNA, 21 nt, Human adenovirus C
gcccuucacggacaguggcag

SEQ ID NO: 3913846 - RNA, 18 nt, Human adenovirus C
gcccuugauggagggcaa

SEQ ID NO: 3913847 - RNA, 24 nt, Human adenovirus C
gcccuugcggcagucugcagcgcu

SEQ ID NO: 3913848 - RNA, 13 nt, Human adenovirus C
gccgaaaacaggg

SEQ ID NO: 3913849 - RNA, 16 nt, Human adenovirus C
gccgcacgaggggcag

SEQ ID NO: 3913850 - RNA, 20 nt, Human adenovirus C
gccgcacgaggggcagugca

SEQ ID NO: 3913851 - RNA, 18 nt, Human adenovirus C
gccgcacugggcgcacca

SEQ ID NO: 3913852 - RNA, 14 nt, Human adenovirus C
gccgcaggccccgc

SEQ ID NO: 3913853 - RNA, 13 nt, Human adenovirus C
gccgcauccccgc

SEQ ID NO: 3913854 - RNA, 18 nt, Human adenovirus C
gccgccaugggcuccagu

SEQ ID NO: 3913855 - RNA, 19 nt, Human adenovirus C
gccgcgauguuuagcugca

SEQ ID NO: 3913856 - RNA, 14 nt, Human adenovirus C
gccgcggcagaacc

SEQ ID NO: 3913857 - RNA, 13 nt, Human adenovirus C
gccgcggugcagg

SEQ ID NO: 3913858 - RNA, 12 nt, Human adenovirus C
gccggccuggac

SEQ ID NO: 3913859 - RNA, 17 nt, Human adenovirus C
gccggucuucgcccugc

SEQ ID NO: 3913860 - RNA, 17 nt, Human adenovirus C
gccgugccaaccgcagc

SEQ ID NO: 3913861 - RNA, 20 nt, Human adenovirus C
gccgugccaaccgcagccga

SEQ ID NO: 3913862 - RNA, 15 nt, Human adenovirus C
gccuaccaggcaagc

SEQ ID NO: 3913863 - RNA, 13 nt, Human adenovirus C
gccuacccgcagu

SEQ ID NO: 3913864 - RNA, 17 nt, Human adenovirus C
gccuccaacugugcccu

SEQ ID NO: 3913865 - RNA, 15 nt, Human adenovirus C
gccuccgcccugcgc

SEQ ID NO: 3913866 - RNA, 15 nt, Human adenovirus C
gccucuggcauuagc

SEQ ID NO: 3913867 - RNA, 22 nt, Human adenovirus C
gccugcaaaauuuccaacgugg

SEQ ID NO: 3913868 - RNA, 19 nt, Human adenovirus C
gccugccgacuuggaggag

SEQ ID NO: 3913869 - RNA, 23 nt, Human adenovirus C
gccugcgucauuacccagggcca

SEQ ID NO: 3913870 - RNA, 21 nt, Human adenovirus C
gccugcuuaaaacccugcaac

SEQ ID NO: 3913871 - RNA, 13 nt, Human adenovirus C
gccuggaggagcg

SEQ ID NO: 3913872 - RNA, 22 nt, Human adenovirus C
gccuggcggguuuggcuggugg

SEQ ID NO: 3913873 - RNA, 16 nt, Human adenovirus C
gccugggcuggagccc

SEQ ID NO: 3913874 - RNA, 23 nt, Human adenovirus C
gccuuaggguugccgccugcugc

SEQ ID NO: 3913875 - RNA, 18 nt, Human adenovirus C
gccuugcaggcgcagaga

SEQ ID NO: 3913876 - RNA, 13 nt, Human adenovirus C
gccuuugccaacu

SEQ ID NO: 3913877 - RNA, 14 nt, Human adenovirus C
gccuuugccuggaa

SEQ ID NO: 3913878 - RNA, 19 nt, Human adenovirus C
gccuuuuacugcugcugga

SEQ ID NO: 3913879 - RNA, 11 nt, Human adenovirus C
gcgaagaucag

SEQ ID NO: 3913880 - RNA, 14 nt, Human adenovirus C
gcgaaucucagugg

SEQ ID NO: 3913881 - RNA, 20 nt, Human adenovirus C
gcgaccgcgagcugaugcac

SEQ ID NO: 3913882 - RNA, 18 nt, Human adenovirus C
gcgacgaaugagcuccac

SEQ ID NO: 3913883 - RNA, 15 nt, Human adenovirus C
gcgacgucagacaac

SEQ ID NO: 3913884 - RNA, 21 nt, Human adenovirus C
gcgagaaggcguugaggccuc

SEQ ID NO: 3913885 - RNA, 13 nt, Human adenovirus C
gcgaggagcucaa

SEQ ID NO: 3913886 - RNA, 12 nt, Human adenovirus C
gcgagggccagc

SEQ ID NO: 3913887 - RNA, 17 nt, Human adenovirus C
gacgugguccgugugca

SEQ ID NO: 3913888 - RNA, 21 nt, Human adenovirus C
gacuacuugcaucgcgcggcc

SEQ ID NO: 3913889 - RNA, 20 nt, Human adenovirus C
gacuauuuuuuccagaccag

SEQ ID NO: 3913890 - RNA, 16 nt, Human adenovirus C
gacucgagacgccgcc

SEQ ID NO: 3913891 - RNA, 21 nt, Human adenovirus C
gacugcagguacgccugcagg

SEQ ID NO: 3913892 - RNA, 20 nt, Human adenovirus C
gacugggggcguacacugga

SEQ ID NO: 3913893 - RNA, 22 nt, Human adenovirus C
gagaacuccaacgcggcagccg

SEQ ID NO: 3913894 - RNA, 11 nt, Human adenovirus C
gagaagaacau

SEQ ID NO: 3913895 - RNA, 14 nt, Human adenovirus C
gagaaggugcuggc

SEQ ID NO: 3913896 - RNA, 12 nt, Human adenovirus C
gagacagugucu

SEQ ID NO: 3913897 - RNA, 16 nt, Human adenovirus C
gagacggcggaggcgc

SEQ ID NO: 3913898 - RNA, 18 nt, Human adenovirus C
gagacguacuucagccug

SEQ ID NO: 3913899 - RNA, 11 nt, Human adenovirus C
gagaggagccc

SEQ ID NO: 3913900 - RNA, 22 nt, Human adenovirus C
gagcacaacauacugacccgcu

SEQ ID NO: 3913901 - RNA, 13 nt, Human adenovirus C
gagcacagggaug

SEQ ID NO: 3913902 - RNA, 15 nt, Human adenovirus C
gagcacuacuugaaa

SEQ ID NO: 3913903 - RNA, 22 nt, Human adenovirus C
gagcagacggugaaccaggaga

SEQ ID NO: 3913904 - RNA, 18 nt, Human adenovirus C
gagcagcggcagacaugc

SEQ ID NO: 3913905 - RNA, 13 nt, Human adenovirus C
gagcaggacccag

SEQ ID NO: 3913906 - RNA, 15 nt, Human adenovirus C
gagcaggucuacugg

SEQ ID NO: 3913907 - RNA, 13 nt, Human adenovirus C
gagccccucgccu

SEQ ID NO: 3913908 - RNA, 15 nt, Human adenovirus C
gagccuccaccggcc

SEQ ID NO: 3913909 - RNA, 16 nt, Human adenovirus C
gagcgacgaccugggc

SEQ ID NO: 3913910 - RNA, 14 nt, Human adenovirus C
gagcgagguguggg

SEQ ID NO: 3913911 - RNA, 19 nt, Human adenovirus C
gagcgcugcgucuggcgcc

SEQ ID NO: 3913912 - RNA, 19 nt, Human adenovirus C
gagcgugagccggcggcgc

SEQ ID NO: 3913913 - RNA, 15 nt, Human adenovirus C
gagcucagcgaccgc

SEQ ID NO: 3913914 - RNA, 21 nt, Human adenovirus C
gagcucuaacaguaccucuug

SEQ ID NO: 3913915 - RNA, 20 nt, Human adenovirus C
gagcugaugcacagccugca

SEQ ID NO: 3913916 - RNA, 23 nt, Human adenovirus C
gagcugcugagccgccgugcgcc

SEQ ID NO: 3913917 - RNA, 21 nt, Human adenovirus C
gaggaagugauuaucgagcag

SEQ ID NO: 3913918 - RNA, 21 nt, Human adenovirus C
gaggagccuccaccggccgug

SEQ ID NO: 3913919 - RNA, 13 nt, Human adenovirus C
gaggauagggugg

SEQ ID NO: 3913920 - RNA, 13 nt, Human adenovirus C
gaggaugaagaag

SEQ ID NO: 3913921 - RNA, 21 nt, Human adenovirus C
gaggcacuaaagcaaggccug

SEQ ID NO: 3913922 - RNA, 19 nt, Human adenovirus C
gaggcagagcgacugcgcc

SEQ ID NO: 3913923 - RNA, 20 nt, Human adenovirus C
gaggccauaggucaggcgca

SEQ ID NO: 3913924 - RNA, 15 nt, Human adenovirus C
gaggccgaggcagcg

SEQ ID NO: 3913925 - RNA, 15 nt, Human adenovirus C
gaggccguggcgcag

SEQ ID NO: 3913926 - RNA, 21 nt, Human adenovirus C
gaggcgccgcacgaggggcag

SEQ ID NO: 3913927 - RNA, 13 nt, Human adenovirus C
gaggcuugggagu

SEQ ID NO: 3913928 - RNA, 13 nt, Human adenovirus C
gagggacaggcuu

SEQ ID NO: 3913929 - RNA, 17 nt, Human adenovirus C
gagggaccugagcgagu

SEQ ID NO: 3913930 - RNA, 17 nt, Human adenovirus C
gagggcauggagacaca

SEQ ID NO: 3913931 - RNA, 22 nt, Human adenovirus C
gagggccagcuguuggggugag

SEQ ID NO: 3913932 - RNA, 16 nt, Human adenovirus C
gagggcccggcgcacg

SEQ ID NO: 3913933 - RNA, 16 nt, Human adenovirus C
gaggggcagugcagac

SEQ ID NO: 3913934 - RNA, 19 nt, Human adenovirus C
gagggugacaacgcgcgcc

SEQ ID NO: 3913935 - RNA, 16 nt, Human adenovirus C
gagguccgcgugcggc

SEQ ID NO: 3913936 - RNA, 16 nt, Human adenovirus C
gagucucgggccggcc

SEQ ID NO: 3913937 - RNA, 16 nt, Human adenovirus C
gaguuuaaggaaccag

SEQ ID NO: 3913938 - RNA, 20 nt, Human adenovirus C
gaguuuaaggaaccagcuug

SEQ ID NO: 3913939 - RNA, 13 nt, Human adenovirus C
gauaaauggagcg

SEQ ID NO: 3913940 - RNA, 16 nt, Human adenovirus C
gauaucggcaccagca

SEQ ID NO: 3913941 - RNA, 14 nt, Human adenovirus C
gauaucuugaaguc

SEQ ID NO: 3913942 - RNA, 18 nt, Human adenovirus C
gauaugcuccaggcgggc

SEQ ID NO: 3913943 - RNA, 15 nt, Human adenovirus C
gaucaggcuacuaag

SEQ ID NO: 3913944 - RNA, 14 nt, Human adenovirus C
gaucggcaggcuca

SEQ ID NO: 3913945 - RNA, 21 nt, Human adenovirus C
gaucuccugaaucuggcgccu

SEQ ID NO: 3913946 - RNA, 15 nt, Human adenovirus C
gaucugcgccagcag

SEQ ID NO: 3913947 - RNA, 21 nt, Human adenovirus C
gaucugcuuaaaagccaccug

SEQ ID NO: 3913948 - RNA, 19 nt, Human adenovirus C
gaucuugguugugggccau

SEQ ID NO: 3913949 - RNA, 14 nt, Human adenovirus C
gaugaagaagagga

SEQ ID NO: 3913950 - RNA, 15 nt, Human adenovirus C
gaugaagaagaggaa

SEQ ID NO: 3913951 - RNA, 18 nt, Human adenovirus C
gaugaccggcucaaccau

SEQ ID NO: 3913952 - RNA, 13 nt, Human adenovirus C
gaugaggccggcc

SEQ ID NO: 3913953 - RNA, 12 nt, Human adenovirus C
gaugcaaaauaa

SEQ ID NO: 3913954 - RNA, 18 nt, Human adenovirus C
gaugccaugaaccacccu

SEQ ID NO: 3913955 - RNA, 13 nt, Human adenovirus C
gaugcgaguagcc

SEQ ID NO: 3913956 - RNA, 16 nt, Human adenovirus C
gaugcgggccaugagc

SEQ ID NO: 3913957 - RNA, 16 nt, Human adenovirus C
gaugcugaccugcucg

SEQ ID NO: 3913958 - RNA, 24 nt, Human adenovirus C
gauggcgggcgcucgggcuuggga

SEQ ID NO: 3913959 - RNA, 20 nt, Human adenovirus C
gaugugaccgaggagcugag

SEQ ID NO: 3913960 - RNA, 19 nt, Human adenovirus C
gauguggcaucccugaacu

SEQ ID NO: 3913961 - RNA, 16 nt, Human adenovirus C
gauuaaaaacaaguug

SEQ ID NO: 3913962 - RNA, 16 nt, Human adenovirus C
gauuucugccagcgcc

SEQ ID NO: 3913963 - RNA, 20 nt, Human adenovirus C
gauuugggagggaguggcaa

SEQ ID NO: 3913964 - RNA, 14 nt, Human adenovirus C
gcaaaacgcucgag

SEQ ID NO: 3913965 - RNA, 23 nt, Human adenovirus C
gcaaaacgcucgagaucaggcua

SEQ ID NO: 3913966 - RNA, 18 nt, Human adenovirus C
gcaaaaucuccugcacgu

SEQ ID NO: 3913967 - RNA, 21 nt, Human adenovirus C
gcaaagcacacugaacagcau

SEQ ID NO: 3913968 - RNA, 15 nt, Human adenovirus C
gcaaaucuuugucca

SEQ ID NO: 3913969 - RNA, 14 nt, Human adenovirus C
gcaacaccacugcu

SEQ ID NO: 3913970 - RNA, 17 nt, Human adenovirus C
gcaacagcgcgagcagg

SEQ ID NO: 3913971 - RNA, 20 nt, Human adenovirus C
gcaacaucaacaacagcugc

SEQ ID NO: 3913972 - RNA, 20 nt, Human adenovirus C
gcaacccuuccaggagggcu

SEQ ID NO: 3913973 - RNA, 16 nt, Human adenovirus C
gcaacgaccgccugcu

SEQ ID NO: 3913974 - RNA, 21 nt, Human adenovirus C
gcaacgugcagaccaaccugg

SEQ ID NO: 3913975 - RNA, 13 nt, Human adenovirus C
gcaacugggcagc

SEQ ID NO: 3913976 - RNA, 20 nt, Human adenovirus C
gcaacuuucuaaccacgguc

SEQ ID NO: 3913977 - RNA, 17 nt, Human adenovirus C
gcaagaccaggacgacg

SEQ ID NO: 3913978 - RNA, 17 nt, Human adenovirus C
gcaagauaccccuaucc

SEQ ID NO: 3913979 - RNA, 12 nt, Human adenovirus C
gcaaggccuggc

SEQ ID NO: 3913980 - RNA, 14 nt, Human adenovirus C
gcaauaacacaggc

SEQ ID NO: 3913981 - RNA, 20 nt, Human adenovirus C
gcaauaacacaggcuggggc

SEQ ID NO: 3913982 - RNA, 17 nt, Human adenovirus C
gcaauacagagacagga

SEQ ID NO: 3913983 - RNA, 13 nt, Human adenovirus C
gcaaugacagcac

SEQ ID NO: 3913984 - RNA, 18 nt, Human adenovirus C
gcacacugaacagcaucg

SEQ ID NO: 3913985 - RNA, 14 nt, Human adenovirus C
gcacagcagggaca

SEQ ID NO: 3913986 - RNA, 17 nt, Human adenovirus C
gcacaucucgggccagg

SEQ ID NO: 3913987 - RNA, 21 nt, Human adenovirus C
gcaccacauuucggccccacc

SEQ ID NO: 3913988 - RNA, 21 nt, Human adenovirus C
gcaccagcucaaucagucaca

SEQ ID NO: 3913989 - RNA, 23 nt, Human adenovirus C
gcaccagcucaaucagucacagu

SEQ ID NO: 3913990 - RNA, 17 nt, Human adenovirus C
gcaccaggugcagaccc

SEQ ID NO: 3913991 - RNA, 15 nt, Human adenovirus C
gcacccuccccuucu

SEQ ID NO: 3913992 - RNA, 19 nt, Human adenovirus C
gcacccugaucucacuuaa

SEQ ID NO: 3913993 - RNA, 14 nt, Human adenovirus C
gcaccgccagcgca

SEQ ID NO: 3913994 - RNA, 15 nt, Human adenovirus C
gcaccggcggcagcg

SEQ ID NO: 3913995 - RNA, 18 nt, Human adenovirus C
gcaccggcggcagcggca

SEQ ID NO: 3913996 - RNA, 18 nt, Human adenovirus C
gcacgagcugcuucccaa

SEQ ID NO: 3913997 - RNA, 20 nt, Human adenovirus C
gcacgcccuucucggccggc

SEQ ID NO: 3913998 - RNA, 16 nt, Human adenovirus C
gcacgcuggccagcac

SEQ ID NO: 3913999 - RNA, 23 nt, Human adenovirus C
gcacggcguccggcucaccaccc

SEQ ID NO: 3914000 - RNA, 18 nt, Human adenovirus C
gcacucacagaccugggc

SEQ ID NO: 3914001 - RNA, 19 nt, Human adenovirus C
gcacucacagaccugggcc

SEQ ID NO: 3914002 - RNA, 13 nt, Human adenovirus C
gcacucgcaccgu

SEQ ID NO: 3914003 - RNA, 15 nt, Human adenovirus C
gcacugccgcccaac

SEQ ID NO: 3914004 - RNA, 13 nt, Human adenovirus C
gcagaaacacaag

SEQ ID NO: 3914005 - RNA, 15 nt, Human adenovirus C
gcagaagcugccgcc

SEQ ID NO: 3914006 - RNA, 14 nt, Human adenovirus C
cggugcgaggaugc

SEQ ID NO: 3914007 - RNA, 15 nt, Human adenovirus C
cggugguaugcgccc

SEQ ID NO: 3914008 - RNA, 18 nt, Human adenovirus C
cggugguggaggaggcgc

SEQ ID NO: 3914009 - RNA, 18 nt, Human adenovirus C
cgguugccucggcggugg

SEQ ID NO: 3914010 - RNA, 15 nt, Human adenovirus C
cgguuuuccuggcca

SEQ ID NO: 3914011 - RNA, 17 nt, Human adenovirus C
cguaaaccugagccagg

SEQ ID NO: 3914012 - RNA, 22 nt, Human adenovirus C
cguagaggagccuccaccggcc

SEQ ID NO: 3914013 - RNA, 20 nt, Human adenovirus C
cguagccaguggcaacuggc

SEQ ID NO: 3914014 - RNA, 23 nt, Human adenovirus C
cguagccugauucgggaguuuac

SEQ ID NO: 3914015 - RNA, 20 nt, Human adenovirus C
cguaggagucgcgcagcuug

SEQ ID NO: 3914016 - RNA, 21 nt, Human adenovirus C
cguaggcgcucguugguccag

SEQ ID NO: 3914017 - RNA, 12 nt, Human adenovirus C
cguaggugagcu

SEQ ID NO: 3914018 - RNA, 14 nt, Human adenovirus C
cgucacccagcacu

SEQ ID NO: 3914019 - RNA, 17 nt, Human adenovirus C
cgcauagccgggucagg

SEQ ID NO: 3914020 - RNA, 17 nt, Human adenovirus C
cgcauugcguaccucag

SEQ ID NO: 3914021 - RNA, 15 nt, Human adenovirus C
cgccaacgcgccuac

SEQ ID NO: 3914022 - RNA, 16 nt, Human adenovirus C
cgccaacuccgcccac

SEQ ID NO: 3914023 - RNA, 19 nt, Human adenovirus C
cgccacaauguggccuccg

SEQ ID NO: 3914024 - RNA, 23 nt, Human adenovirus C
cgccaccguuuuuacccacccaa

SEQ ID NO: 3914025 - RNA, 17 nt, Human adenovirus C
cgccagcccccaccauc

SEQ ID NO: 3914026 - RNA, 20 nt, Human adenovirus C
cgccagggcuacgugcgcca

SEQ ID NO: 3914027 - RNA, 12 nt, Human adenovirus C
cgcccagcaaua

SEQ ID NO: 3914028 - RNA, 14 nt, Human adenovirus C
cgccccaggcuggg

SEQ ID NO: 3914029 - RNA, 21 nt, Human adenovirus C
cgcccugcgcgucggccaggu

SEQ ID NO: 3914030 - RNA, 14 nt, Human adenovirus C
cgccgaaccaccac

SEQ ID NO: 3914031 - RNA, 20 nt, Human adenovirus C
cgccgcgcgcgggcaggagc

SEQ ID NO: 3914032 - RNA, 15 nt, Human adenovirus C
cgccgugccgccagc

SEQ ID NO: 3914033 - RNA, 21 nt, Human adenovirus C
cgccucggaguaccugagccc

SEQ ID NO: 3914034 - RNA, 23 nt, Human adenovirus C
cgccugacgaaaaguccgcggcu

SEQ ID NO: 3914035 - RNA, 21 nt, Human adenovirus C
cgccugauuucugccagcgcc

SEQ ID NO: 3914036 - RNA, 14 nt, Human adenovirus C
cgccugcaggaauc

SEQ ID NO: 3914037 - RNA, 14 nt, Human adenovirus C
cgccugcugggcga

SEQ ID NO: 3914038 - RNA, 18 nt, Human adenovirus C
cgccuuuuagcugcaaac

SEQ ID NO: 3914039 - RNA, 21 nt, Human adenovirus C
cgcgacuacgguaccgcgcgg

SEQ ID NO: 3914040 - RNA, 23 nt, Human adenovirus C
cgcgaggcguacgugccgcggca

SEQ ID NO: 3914041 - RNA, 18 nt, Human adenovirus C
cgcgcaacgaagcuaugu

SEQ ID NO: 3914042 - RNA, 16 nt, Human adenovirus C
cgcgcacgucgcaccg

SEQ ID NO: 3914043 - RNA, 12 nt, Human adenovirus C
cgcgccagaccc

SEQ ID NO: 3914044 - RNA, 16 nt, Human adenovirus C
cgcgcccuggaggcag

SEQ ID NO: 3914045 - RNA, 22 nt, Human adenovirus C
cgcgcccuggaggcagcugggg

SEQ ID NO: 3914046 - RNA, 23 nt, Human adenovirus C
cgcgcgagcccaaaguccagaug

SEQ ID NO: 3914047 - RNA, 14 nt, Human adenovirus C
cgcgcgcgggcagg

SEQ ID NO: 3914048 - RNA, 14 nt, Human adenovirus C
cgcgcuccuuggcc

SEQ ID NO: 3914049 - RNA, 21 nt, Human adenovirus C
cgcgcugcggcugcuguugcu

SEQ ID NO: 3914050 - RNA, 14 nt, Human adenovirus C
cgcgcugcuccucu

SEQ ID NO: 3914051 - RNA, 13 nt, Human adenovirus C
cgcgcuggccagg

SEQ ID NO: 3914052 - RNA, 14 nt, Human adenovirus C
cgcgcuggccaggg

SEQ ID NO: 3914053 - RNA, 16 nt, Human adenovirus C
cgcgcuggggcaggag

SEQ ID NO: 3914054 - RNA, 15 nt, Human adenovirus C
cgcggcagccgcggc

SEQ ID NO: 3914055 - RNA, 15 nt, Human adenovirus C
cgcggcccgacaggg

SEQ ID NO: 3914056 - RNA, 16 nt, Human adenovirus C
cgcggcgccgggcccg

SEQ ID NO: 3914057 - RNA, 13 nt, Human adenovirus C
cgcggcggcggcc

SEQ ID NO: 3914058 - RNA, 15 nt, Human adenovirus C
cgcggcgugcuggac

SEQ ID NO: 3914059 - RNA, 14 nt, Human adenovirus C
cgcggcugacgcgg

SEQ ID NO: 3914060 - RNA, 13 nt, Human adenovirus C
cgcgggcgggccc

SEQ ID NO: 3914061 - RNA, 16 nt, Human adenovirus C
cgcgggcuagguccag

SEQ ID NO: 3914062 - RNA, 15 nt, Human adenovirus C
cgcgggggcgcaguu

SEQ ID NO: 3914063 - RNA, 15 nt, Human adenovirus C
cgcggugcaggcggc

SEQ ID NO: 3914064 - RNA, 20 nt, Human adenovirus C
cgcguccuaucgagccgcac

SEQ ID NO: 3914065 - RNA, 14 nt, Human adenovirus C
cgcguuccggcagc

SEQ ID NO: 3914066 - RNA, 16 nt, Human adenovirus C
cgcuaugugcagcaga

SEQ ID NO: 3914067 - RNA, 13 nt, Human adenovirus C
cgcucccuggucu

SEQ ID NO: 3914068 - RNA, 14 nt, Human adenovirus C
cgcuccuaacuccu

SEQ ID NO: 3914069 - RNA, 20 nt, Human adenovirus C
cgcucgggcuugggagaggg

SEQ ID NO: 3914070 - RNA, 18 nt, Human adenovirus C
cgcucguugguccagcag

SEQ ID NO: 3914071 - RNA, 19 nt, Human adenovirus C
cgcucguugguccagcaga

SEQ ID NO: 3914072 - RNA, 14 nt, Human adenovirus C
cgcugacacccagc

SEQ ID NO: 3914073 - RNA, 23 nt, Human adenovirus C
cgcugaggccgaggcagcggcag

SEQ ID NO: 3914074 - RNA, 16 nt, Human adenovirus C
cgcugcggccgcgucc

SEQ ID NO: 3914075 - RNA, 20 nt, Human adenovirus C
cgcuggacgagggcaaccca

SEQ ID NO: 3914076 - RNA, 18 nt, Human adenovirus C
cgcuucagccgcugcagc

SEQ ID NO: 3914077 - RNA, 19 nt, Human adenovirus C
cgcuugcaaauuccuccgg

SEQ ID NO: 3914078 - RNA, 19 nt, Human adenovirus C
cgcuugcaagcagugcagc

SEQ ID NO: 3914079 - RNA, 19 nt, Human adenovirus C
cggaaaccucaccucccaa

SEQ ID NO: 3914080 - RNA, 12 nt, Human adenovirus C
cggaaagcggca

SEQ ID NO: 3914081 - RNA, 18 nt, Human adenovirus C
cggaccaguuuauuccca

SEQ ID NO: 3914082 - RNA, 15 nt, Human adenovirus C
cggaccugggcuggc

SEQ ID NO: 3914083 - RNA, 20 nt, Human adenovirus C
cggacuaucgcaacaccacu

SEQ ID NO: 3914084 - RNA, 18 nt, Human adenovirus C
cggagaucuauggccccc

SEQ ID NO: 3914085 - RNA, 20 nt, Human adenovirus C
cggagaucuauggccccccg

SEQ ID NO: 3914086 - RNA, 14 nt, Human adenovirus C
cggagaugcagcgc

SEQ ID NO: 3914087 - RNA, 20 nt, Human adenovirus C
cggaggagcaacagcaggag

SEQ ID NO: 3914088 - RNA, 15 nt, Human adenovirus C
cggaggugcugcuga

SEQ ID NO: 3914089 - RNA, 15 nt, Human adenovirus C
cggcaaccgccucag

SEQ ID NO: 3914090 - RNA, 17 nt, Human adenovirus C
cggcaacugucacuugc

SEQ ID NO: 3914091 - RNA, 16 nt, Human adenovirus C
cggcacuaccuggacu

SEQ ID NO: 3914092 - RNA, 14 nt, Human adenovirus C
cggcagaaacagag

SEQ ID NO: 3914093 - RNA, 17 nt, Human adenovirus C
cggcagaaacagagggc

SEQ ID NO: 3914094 - RNA, 17 nt, Human adenovirus C
cggcagcagcaggagga

SEQ ID NO: 3914095 - RNA, 15 nt, Human adenovirus C
cggcagcggcagcaa

SEQ ID NO: 3914096 - RNA, 16 nt, Human adenovirus C
cggcagcggcagcggc

SEQ ID NO: 3914097 - RNA, 15 nt, Human adenovirus C
cggccacuacccgga

SEQ ID NO: 3914098 - RNA, 16 nt, Human adenovirus C
cggccaugcgggccgc

SEQ ID NO: 3914099 - RNA, 23 nt, Human adenovirus C
cggcccguagccaguggcaacug

SEQ ID NO: 3914100 - RNA, 19 nt, Human adenovirus C
cggccgccgcagcagccgc

SEQ ID NO: 3914101 - RNA, 12 nt, Human adenovirus C
cggccguccgcc

SEQ ID NO: 3914102 - RNA, 13 nt, Human adenovirus C
cggccuggcgcaa

SEQ ID NO: 3914103 - RNA, 16 nt, Human adenovirus C
cggccugguaggcgca

SEQ ID NO: 3914104 - RNA, 17 nt, Human adenovirus C
cggccugguaggcgcag

SEQ ID NO: 3914105 - RNA, 18 nt, Human adenovirus C
cggccugguaggcgcagc

SEQ ID NO: 3914106 - RNA, 16 nt, Human adenovirus C
cggcgacaggucaggc

SEQ ID NO: 3914107 - RNA, 20 nt, Human adenovirus C
cggcgacaggucaggcggga

SEQ ID NO: 3914108 - RNA, 12 nt, Human adenovirus C
cggcgacgggga

SEQ ID NO: 3914109 - RNA, 21 nt, Human adenovirus C
cggcgccaguggcggcggcgc

SEQ ID NO: 3914110 - RNA, 21 nt, Human adenovirus C
cggcgccgcgcgcgggcagga

SEQ ID NO: 3914111 - RNA, 16 nt, Human adenovirus C
cggcgccgggcccggc

SEQ ID NO: 3914112 - RNA, 22 nt, Human adenovirus C
cggcgcggaagagaacuccaac

SEQ ID NO: 3914113 - RNA, 12 nt, Human adenovirus C
cggcggcagcag

SEQ ID NO: 3914114 - RNA, 15 nt, Human adenovirus C
cggcggcagcagcag

SEQ ID NO: 3914115 - RNA, 16 nt, Human adenovirus C
cggcggccuggcgcaa

SEQ ID NO: 3914116 - RNA, 12 nt, Human adenovirus C
cggcggcggugg

SEQ ID NO: 3914117 - RNA, 13 nt, Human adenovirus C
cggcgggcggugg

SEQ ID NO: 3914118 - RNA, 16 nt, Human adenovirus C
cggcgguggcagaugc

SEQ ID NO: 3914119 - RNA, 19 nt, Human adenovirus C
cggcugaagcagggccagg

SEQ ID NO: 3914120 - RNA, 18 nt, Human adenovirus C
cggcugacgcggcggcag

SEQ ID NO: 3914121 - RNA, 14 nt, Human adenovirus C
cgggaagaacugga

SEQ ID NO: 3914122 - RNA, 15 nt, Human adenovirus C
cgggacugggcgugc

SEQ ID NO: 3914123 - RNA, 15 nt, Human adenovirus C
cgggcacuaccgcgc

SEQ ID NO: 3914124 - RNA, 13 nt, Human adenovirus C
cgggcagcaggcg

SEQ ID NO: 3914125 - RNA, 13 nt, Human adenovirus C
cgggcagcggcga

SEQ ID NO: 3914126 - RNA, 13 nt, Human adenovirus C
cgggcaggagcug

SEQ ID NO: 3914127 - RNA, 18 nt, Human adenovirus C
cgggcaggagcuggugcu

SEQ ID NO: 3914128 - RNA, 19 nt, Human adenovirus C
cgggcccuugcuucccagg

SEQ ID NO: 3914129 - RNA, 16 nt, Human adenovirus C
cgggcggaggagaagc

SEQ ID NO: 3914130 - RNA, 18 nt, Human adenovirus C
cgggcggccaugcgggcc

SEQ ID NO: 3914131 - RNA, 19 nt, Human adenovirus C
cggggauggcgcaggcggc

SEQ ID NO: 3914132 - RNA, 20 nt, Human adenovirus C
cggggcuccgggggcgaggu

SEQ ID NO: 3914133 - RNA, 22 nt, Human adenovirus C
cgguaaagaccccgggcagcag

SEQ ID NO: 3914134 - RNA, 19 nt, Human adenovirus C
cgguaccuuugagcugcag

SEQ ID NO: 3914135 - RNA, 21 nt, Human adenovirus C
cgguccuuugcaaguagcaca

SEQ ID NO: 3914136 - RNA, 14 nt, Human adenovirus C
cggugaaccaggag

SEQ ID NO: 3914137 - RNA, 14 nt, Human adenovirus C
cggugacgcgggcg

SEQ ID NO: 3914138 - RNA, 19 nt, Human adenovirus C
cggugagcgcuccacccgc

SEQ ID NO: 3914139 - RNA, 18 nt, Human adenovirus C
ccuccgcuccucaggcgc

SEQ ID NO: 3914140 - RNA, 20 nt, Human adenovirus C
ccuccgggcacagcagcgca

SEQ ID NO: 3914141 - RNA, 17 nt, Human adenovirus C
ccuccucagcagcggca

SEQ ID NO: 3914142 - RNA, 21 nt, Human adenovirus C
ccucgcgcaaaaaagcaagca

SEQ ID NO: 3914143 - RNA, 13 nt, Human adenovirus C
ccucgcucccacc

SEQ ID NO: 3914144 - RNA, 18 nt, Human adenovirus C
ccucggucgcauuccccu

SEQ ID NO: 3914145 - RNA, 22 nt, Human adenovirus C
ccucguaggugagcuccucagg

SEQ ID NO: 3914146 - RNA, 18 nt, Human adenovirus C
ccucguccucggagccgc

SEQ ID NO: 3914147 - RNA, 16 nt, Human adenovirus C
ccucuuugagcccuuu

SEQ ID NO: 3914148 - RNA, 23 nt, Human adenovirus C
ccugcaacagggucugccagacu

SEQ ID NO: 3914149 - RNA, 12 nt, Human adenovirus C
ccugccaccucc

SEQ ID NO: 3914150 - RNA, 19 nt, Human adenovirus C
ccugccaccucccucccaa

SEQ ID NO: 3914151 - RNA, 15 nt, Human adenovirus C
ccugccgugccaacc

SEQ ID NO: 3914152 - RNA, 17 nt, Human adenovirus C
ccugcgcgugcccgugc

SEQ ID NO: 3914153 - RNA, 15 nt, Human adenovirus C
ccugcggggcgauga

SEQ ID NO: 3914154 - RNA, 14 nt, Human adenovirus C
ccuggaggcagcug

SEQ ID NO: 3914155 - RNA, 20 nt, Human adenovirus C
ccuggccaaccaggcagugc

SEQ ID NO: 3914156 - RNA, 19 nt, Human adenovirus C
ccugggcauagucucgccg

SEQ ID NO: 3914157 - RNA, 12 nt, Human adenovirus C
ccugggcuggcg

SEQ ID NO: 3914158 - RNA, 16 nt, Human adenovirus C
ccugguaggcgcagca

SEQ ID NO: 3914159 - RNA, 15 nt, Human adenovirus C
ccuguaagcgggcac

SEQ ID NO: 3914160 - RNA, 22 nt, Human adenovirus C
ccuguaagcgggcacucuuccg

SEQ ID NO: 3914161 - RNA, 20 nt, Human adenovirus C
ccuucacccaguaccgcagc

SEQ ID NO: 3914162 - RNA, 15 nt, Human adenovirus C
ccuucagcuggggcu

SEQ ID NO: 3914163 - RNA, 21 nt, Human adenovirus C
ccuucuccuaccgcgucagga

SEQ ID NO: 3914164 - RNA, 19 nt, Human adenovirus C
ccuugcggcagucugcagc

SEQ ID NO: 3914165 - RNA, 15 nt, Human adenovirus C
ccuugcuucccagga

SEQ ID NO: 3914166 - RNA, 20 nt, Human adenovirus C
ccuuggccaauugcaagcca

SEQ ID NO: 3914167 - RNA, 17 nt, Human adenovirus C
ccuuggcgcgcagcuug

SEQ ID NO: 3914168 - RNA, 17 nt, Human adenovirus C
ccuuuccuuccucccaa

SEQ ID NO: 3914169 - RNA, 19 nt, Human adenovirus C
ccuuugaguucgccaccac

SEQ ID NO: 3914170 - RNA, 17 nt, Human adenovirus C
ccuuuuguuccaccgcu

SEQ ID NO: 3914171 - RNA, 15 nt, Human adenovirus C
cgaaaaggcuguccg

SEQ ID NO: 3914172 - RNA, 17 nt, Human adenovirus C
cgaaagcuaaagcgggu

SEQ ID NO: 3914173 - RNA, 19 nt, Human adenovirus C
cgaagccuuccauccagac

SEQ ID NO: 3914174 - RNA, 20 nt, Human adenovirus C
cgaagcuauguccaagcgca

SEQ ID NO: 3914175 - RNA, 18 nt, Human adenovirus C
cgaaucaugauugcaaaa

SEQ ID NO: 3914176 - RNA, 22 nt, Human adenovirus C
cgacacccaagggugcagcuga

SEQ ID NO: 3914177 - RNA, 22 nt, Human adenovirus C
cgacaggucaggcgggagcucc

SEQ ID NO: 3914178 - RNA, 12 nt, Human adenovirus C
cgaccacagcaa

SEQ ID NO: 3914179 - RNA, 12 nt, Human adenovirus C
cgaccaggccgu

SEQ ID NO: 3914180 - RNA, 15 nt, Human adenovirus C
cgaccgcgagcugau

SEQ ID NO: 3914181 - RNA, 21 nt, Human adenovirus C
cgacgaggaccugcuugagca

SEQ ID NO: 3914182 - RNA, 22 nt, Human adenovirus C
cgacgcggcgguugaucuccug

SEQ ID NO: 3914183 - RNA, 17 nt, Human adenovirus C
cgacgcguugcaagagc

SEQ ID NO: 3914184 - RNA, 13 nt, Human adenovirus C
cgacugcgccuga

SEQ ID NO: 3914185 - RNA, 22 nt, Human adenovirus C
cgacugcgccugacacaccucg

SEQ ID NO: 3914186 - RNA, 20 nt, Human adenovirus C
cgagacguacuucagccuga

SEQ ID NO: 3914187 - RNA, 18 nt, Human adenovirus C
cgagagccggccuggacc

SEQ ID NO: 3914188 - RNA, 16 nt, Human adenovirus C
cgagcaggacccaggu

SEQ ID NO: 3914189 - RNA, 15 nt, Human adenovirus C
cgagcaggcagaggc

SEQ ID NO: 3914190 - RNA, 15 nt, Human adenovirus C
cgagccaggugagcu

SEQ ID NO: 3914191 - RNA, 17 nt, Human adenovirus C
cgagcccaacccgcgcc

SEQ ID NO: 3914192 - RNA, 16 nt, Human adenovirus C
cgagcggccgccgcag

SEQ ID NO: 3914193 - RNA, 14 nt, Human adenovirus C
cgagcgguguuccg

SEQ ID NO: 3914194 - RNA, 14 nt, Human adenovirus C
cgagcgguugcugc

SEQ ID NO: 3914195 - RNA, 23 nt, Human adenovirus C
cgagcgguugcugcgcgaggagg

SEQ ID NO: 3914196 - RNA, 16 nt, Human adenovirus C
cgagcugaugcacagc

SEQ ID NO: 3914197 - RNA, 23 nt, Human adenovirus C
cgagcugcuucccaaaggccccc

SEQ ID NO: 3914198 - RNA, 16 nt, Human adenovirus C
cgaggacagggccucu

SEQ ID NO: 3914199 - RNA, 22 nt, Human adenovirus C
cgaggaccugcuugagcaggcc

SEQ ID NO: 3914200 - RNA, 22 nt, Human adenovirus C
cgaggacgaugaguacgagcca

SEQ ID NO: 3914201 - RNA, 23 nt, Human adenovirus C
cgaggaggcacuaaagcaaggcc

SEQ ID NO: 3914202 - RNA, 16 nt, Human adenovirus C
cgaggcauucagggau

SEQ ID NO: 3914203 - RNA, 14 nt, Human adenovirus C
cgaggccgaagagg

SEQ ID NO: 3914204 - RNA, 16 nt, Human adenovirus C
cgaggccguggcgcag

SEQ ID NO: 3914205 - RNA, 17 nt, Human adenovirus C
cgagggagaggagcccg

SEQ ID NO: 3914206 - RNA, 18 nt, Human adenovirus C
cgagguccgcgugcggcc

SEQ ID NO: 3914207 - RNA, 15 nt, Human adenovirus C
cgaggucgagaagcc

SEQ ID NO: 3914208 - RNA, 21 nt, Human adenovirus C
cgaggucgauggccgcgggcu

SEQ ID NO: 3914209 - RNA, 17 nt, Human adenovirus C
cgaugaguacgagccag

SEQ ID NO: 3914210 - RNA, 19 nt, Human adenovirus C
cgaugauauccguagaugu

SEQ ID NO: 3914211 - RNA, 17 nt, Human adenovirus C
cgaugcuccccuggacc

SEQ ID NO: 3914212 - RNA, 21 nt, Human adenovirus C
cgaugcuccccuggacccgcc

SEQ ID NO: 3914213 - RNA, 17 nt, Human adenovirus C
cgcaaccgcgcccaggc

SEQ ID NO: 3914214 - RNA, 15 nt, Human adenovirus C
cgcaacuucagacug

SEQ ID NO: 3914215 - RNA, 14 nt, Human adenovirus C
cgcacccgcccccc

SEQ ID NO: 3914216 - RNA, 16 nt, Human adenovirus C
cgcacccgccccccgc

SEQ ID NO: 3914217 - RNA, 19 nt, Human adenovirus C
cgcaccuacaagcgcgugu

SEQ ID NO: 3914218 - RNA, 12 nt, Human adenovirus C
cgcaccucgcgc

SEQ ID NO: 3914219 - RNA, 15 nt, Human adenovirus C
cgcacgcccuucucg

SEQ ID NO: 3914220 - RNA, 15 nt, Human adenovirus C
cgcagcagcagggca

SEQ ID NO: 3914221 - RNA, 14 nt, Human adenovirus C
cgcagccuccaugc

SEQ ID NO: 3914222 - RNA, 18 nt, Human adenovirus C
cgcagcgaugugccccuc

SEQ ID NO: 3914223 - RNA, 18 nt, Human adenovirus C
cgcagcuugagccuggcu

SEQ ID NO: 3914224 - RNA, 17 nt, Human adenovirus C
aaaaacccaaagucaaa

SEQ ID NO: 3914225 - RNA, 12 nt, Human adenovirus C
aaaacaaaguca

SEQ ID NO: 3914226 - RNA, 12 nt, Human adenovirus C
aaaaccuucucu

SEQ ID NO: 3914227 - RNA, 13 nt, Human adenovirus C
aaaacuaaaauug

SEQ ID NO: 3914228 - RNA, 20 nt, Human adenovirus C
aaaaucagucagcaaaucuu

SEQ ID NO: 3914229 - RNA, 15 nt, Human adenovirus C
aaaaucugcuccaga

SEQ ID NO: 3914230 - RNA, 17 nt, Human adenovirus C
aaaaugaaagucacugu

SEQ ID NO: 3914231 - RNA, 20 nt, Human adenovirus C
aaaaugaaagucacugugga

SEQ ID NO: 3914232 - RNA, 17 nt, Human adenovirus C
aaaaugugggagucaag

SEQ ID NO: 3914233 - RNA, 18 nt, Human adenovirus C
aaacaauuacaaaaagcg

SEQ ID NO: 3914234 - RNA, 21 nt, Human adenovirus C
aaaccuauuaaaaaacaccac

SEQ ID NO: 3914235 - RNA, 14 nt, Human adenovirus C
aaaccugagccagg

SEQ ID NO: 3914236 - RNA, 16 nt, Human adenovirus C
aaaccugugcugccag

SEQ ID NO: 3914237 - RNA, 23 nt, Human adenovirus C
aaacuaagcauugcuacuaaagg

SEQ ID NO: 3914238 - RNA, 12 nt, Human adenovirus C
aaacuacaugag

SEQ ID NO: 3914239 - RNA, 19 nt, Human adenovirus C
aaacuacgucuuaaacugg

SEQ ID NO: 3914240 - RNA, 23 nt, Human adenovirus C
aaacuuuuauguauaaauuucca

SEQ ID NO: 3914241 - RNA, 20 nt, Human adenovirus C
aaagaacagauaauggcauu

SEQ ID NO: 3914242 - RNA, 17 nt, Human adenovirus C
aaagacaaucuuuuugu

SEQ ID NO: 3914243 - RNA, 20 nt, Human adenovirus C
aaagagggagcggggggcuu

SEQ ID NO: 3914244 - RNA, 21 nt, Human adenovirus C
aaagcgcgguucacccuggcu

SEQ ID NO: 3914245 - RNA, 21 nt, Human adenovirus C
aaaggugguagauggccuggc

SEQ ID NO: 3914246 - RNA, 17 nt, Human adenovirus C
aaagucccccuggaguu

SEQ ID NO: 3914247 - RNA, 16 nt, Human adenovirus C
aaaguuuuuugccauu

SEQ ID NO: 3914248 - RNA, 22 nt, Human adenovirus C
aaauauguggccgggggugcuu

SEQ ID NO: 3914249 - RNA, 16 nt, Human adenovirus C
aaaucaggcaaagccu

SEQ ID NO: 3914250 - RNA, 19 nt, Human adenovirus C
aacaacgggauagagagcc

SEQ ID NO: 3914251 - RNA, 19 nt, Human adenovirus C
aacaaguugcauguggaaa

SEQ ID NO: 3914252 - RNA, 19 nt, Human adenovirus C
aacacaugucuaugcccag

SEQ ID NO: 3914253 - RNA, 20 nt, Human adenovirus C
aacagcgaaaaugaaaguca

SEQ ID NO: 3914254 - RNA, 20 nt, Human adenovirus C
aacagcgccaaggcuaccgc

SEQ ID NO: 3914255 - RNA, 16 nt, Human adenovirus C
aacaugcuaccucuuu

SEQ ID NO: 3914256 - RNA, 19 nt, Human adenovirus C
aacauuccagcaccuucaa

SEQ ID NO: 3914257 - RNA, 17 nt, Human adenovirus C
aacauucugcagagcau

SEQ ID NO: 3914258 - RNA, 16 nt, Human adenovirus C
aaccaaaguugcagga

SEQ ID NO: 3914259 - RNA, 20 nt, Human adenovirus C
aacccacacugauuaugaca

SEQ ID NO: 3914260 - RNA, 17 nt, Human adenovirus C
aacccagcuucagcuug

SEQ ID NO: 3914261 - RNA, 11 nt, Human adenovirus C
aacccuucagg

SEQ ID NO: 3914262 - RNA, 18 nt, Human adenovirus C
aaccuaucaccgucaccc

SEQ ID NO: 3914263 - RNA, 19 nt, Human adenovirus C
aaccuuuggacaccuccca

SEQ ID NO: 3914264 - RNA, 21 nt, Human adenovirus C
aacgacgagucggugagcucc

SEQ ID NO: 3914265 - RNA, 14 nt, Human adenovirus C
aacgcaccgccauu

SEQ ID NO: 3914266 - RNA, 21 nt, Human adenovirus C
aacgccacaacauaaaagaag

SEQ ID NO: 3914267 - RNA, 14 nt, Human adenovirus C
aacgcgcggcggcg

SEQ ID NO: 3914268 - RNA, 18 nt, Human adenovirus C
aacgcguuuagcaggucg

SEQ ID NO: 3914269 - RNA, 15 nt, Human adenovirus C
aacgggguguuugac

SEQ ID NO: 3914270 - RNA, 15 nt, Human adenovirus C
aacguguacugggug

SEQ ID NO: 3914271 - RNA, 17 nt, Human adenovirus C
aacuacaccgucaagaa

SEQ ID NO: 3914272 - RNA, 16 nt, Human adenovirus C
aacuauuuuguagaau

SEQ ID NO: 3914273 - RNA, 16 nt, Human adenovirus C
aacucaccugaaaauc

SEQ ID NO: 3914274 - RNA, 16 nt, Human adenovirus C
aacuccaacgcggcag

SEQ ID NO: 3914275 - RNA, 23 nt, Human adenovirus C
aacucgcgccuguugcugcugcu

SEQ ID NO: 3914276 - RNA, 14 nt, Human adenovirus C
aacucgcugcugca

SEQ ID NO: 3914277 - RNA, 20 nt, Human adenovirus C
aacugcgaggacagggccuc

SEQ ID NO: 3914278 - RNA, 20 nt, Human adenovirus C
aacuuugauaauacugccau

SEQ ID NO: 3914279 - RNA, 15 nt, Human adenovirus C
auaggacugaugcau

SEQ ID NO: 3914280 - RNA, 19 nt, Human adenovirus C
auagugcagcacagcaggg

SEQ ID NO: 3914281 - RNA, 14 nt, Human adenovirus C
auaguggugcagga

SEQ ID NO: 3914282 - RNA, 19 nt, Human adenovirus C
auaugagaugcaucuugga

SEQ ID NO: 3914283 - RNA, 18 nt, Human adenovirus C
auauggcccucaccugcc

SEQ ID NO: 3914284 - RNA, 21 nt, Human adenovirus C
aucaaaauaaaaagucuggag

SEQ ID NO: 3914285 - RNA, 14 nt, Human adenovirus C
aucaaacccagcuu

SEQ ID NO: 3914286 - RNA, 14 nt, Human adenovirus C
aucagaugaugcaa

SEQ ID NO: 3914287 - RNA, 14 nt, Human adenovirus C
aucagccccccucu

SEQ ID NO: 3914288 - RNA, 19 nt, Human adenovirus C
aucaggguccagaggaccu

SEQ ID NO: 3914289 - RNA, 18 nt, Human adenovirus C
auccagucguagcaggag

SEQ ID NO: 3914290 - RNA, 16 nt, Human adenovirus C
auccauaugacacaga

SEQ ID NO: 3914291 - RNA, 16 nt, Human adenovirus C
aucccuuuaaccacca

SEQ ID NO: 3914292 - RNA, 15 nt, Human adenovirus C
auccgcggcagcucg

SEQ ID NO: 3914293 - RNA, 14 nt, Human adenovirus C
auccggugcugcgg

SEQ ID NO: 3914294 - RNA, 22 nt, Human adenovirus C
aucgaaguagauugcaucccac

SEQ ID NO: 3914295 - RNA, 13 nt, Human adenovirus C
aucgccgcggcga

SEQ ID NO: 3914296 - RNA, 15 nt, Human adenovirus C
aucgcuacggcggcg

SEQ ID NO: 3914297 - RNA, 22 nt, Human adenovirus C
aucgcugucugcgagggccagc

SEQ ID NO: 3914298 - RNA, 18 nt, Human adenovirus C
aucggcugaagcagggcc

SEQ ID NO: 3914299 - RNA, 17 nt, Human adenovirus C
aucucaaauacaaaagc

SEQ ID NO: 3914300 - RNA, 12 nt, Human adenovirus C
aucuccucuucc

SEQ ID NO: 3914301 - RNA, 15 nt, Human adenovirus C
aucucgauccagcau

SEQ ID NO: 3914302 - RNA, 23 nt, Human adenovirus C
aucugagcgggggguaccugcug

SEQ ID NO: 3914303 - RNA, 15 nt, Human adenovirus C
aucugcgccagcagg

SEQ ID NO: 3914304 - RNA, 13 nt, Human adenovirus C
aucugcgucuccg

SEQ ID NO: 3914305 - RNA, 15 nt, Human adenovirus C
aucuuaugccaggcc

SEQ ID NO: 3914306 - RNA, 20 nt, Human adenovirus C
aucuucucagaauucuuuaa

SEQ ID NO: 3914307 - RNA, 22 nt, Human adenovirus C
augaacuugacgacgaggugga

SEQ ID NO: 3914308 - RNA, 15 nt, Human adenovirus C
augaagaagaggaag

SEQ ID NO: 3914309 - RNA, 20 nt, Human adenovirus C
augaaugugagguuuacugg

SEQ ID NO: 3914310 - RNA, 14 nt, Human adenovirus C
augacuaacucagg

SEQ ID NO: 3914311 - RNA, 11 nt, Human adenovirus C
augagcagcug

SEQ ID NO: 3914312 - RNA, 12 nt, Human adenovirus C
augagcagcugg

SEQ ID NO: 3914313 - RNA, 14 nt, Human adenovirus C
augaugacaaacuu

SEQ ID NO: 3914314 - RNA, 20 nt, Human adenovirus C
augauggaagacugggacag

SEQ ID NO: 3914315 - RNA, 23 nt, Human adenovirus C
augcaguagaagguaagcggguc

SEQ ID NO: 3914316 - RNA, 17 nt, Human adenovirus C
augcauccggugcugcg

SEQ ID NO: 3914317 - RNA, 16 nt, Human adenovirus C
augccaaccuauggag

SEQ ID NO: 3914318 - RNA, 16 nt, Human adenovirus C
augccauucgcggcga

SEQ ID NO: 3914319 - RNA, 12 nt, Human adenovirus C
augccgcagugg

SEQ ID NO: 3914320 - RNA, 14 nt, Human adenovirus C
augccugcgcggcc

SEQ ID NO: 3914321 - RNA, 18 nt, Human adenovirus C
augcgagcccaacccgcg

SEQ ID NO: 3914322 - RNA, 20 nt, Human adenovirus C
augcgagccgaucgggaaga

SEQ ID NO: 3914323 - RNA, 23 nt, Human adenovirus C
augcgccccccuccucagcagcg

SEQ ID NO: 3914324 - RNA, 13 nt, Human adenovirus C
caccgggacuggg

SEQ ID NO: 3914325 - RNA, 21 nt, Human adenovirus C
caccgucgcaugcgcggcggu

SEQ ID NO: 3914326 - RNA, 23 nt, Human adenovirus C
caccgugcagcugaugguaccca

SEQ ID NO: 3914327 - RNA, 19 nt, Human adenovirus C
caccguuuuuacccaccca

SEQ ID NO: 3914328 - RNA, 18 nt, Human adenovirus C
caccuacucuggcuccau

SEQ ID NO: 3914329 - RNA, 13 nt, Human adenovirus C
caccugagccuuu

SEQ ID NO: 3914330 - RNA, 17 nt, Human adenovirus C
caccuuucgccagggcu

SEQ ID NO: 3914331 - RNA, 16 nt, Human adenovirus C
cacgaaaaccgccucg

SEQ ID NO: 3914332 - RNA, 21 nt, Human adenovirus C
cacgaaggaggcguaggaguc

SEQ ID NO: 3914333 - RNA, 17 nt, Human adenovirus C
cacgaucggcaggcuca

SEQ ID NO: 3914334 - RNA, 19 nt, Human adenovirus C
cacgaucuuggccuugcua

SEQ ID NO: 3914335 - RNA, 14 nt, Human adenovirus C
cacgcaaccgcgcc

SEQ ID NO: 3914336 - RNA, 18 nt, Human adenovirus C
cacgcacgaaggaggcgu

SEQ ID NO: 3914337 - RNA, 18 nt, Human adenovirus C
cacgcccacgccgccacc

SEQ ID NO: 3914338 - RNA, 17 nt, Human adenovirus C
cacgcuggaagacgcgg

SEQ ID NO: 3914339 - RNA, 18 nt, Human adenovirus C
cacgcuggaagccaugcu

SEQ ID NO: 3914340 - RNA, 16 nt, Human adenovirus C
cacgggcagccuggag

SEQ ID NO: 3914341 - RNA, 21 nt, Human adenovirus C
cacgggcggcggccugggcga

SEQ ID NO: 3914342 - RNA, 21 nt, Human adenovirus C
cacgggcuguacauccugcac

SEQ ID NO: 3914343 - RNA, 14 nt, Human adenovirus C
cacgucgcaccggc

SEQ ID NO: 3914344 - RNA, 23 nt, Human adenovirus C
cacguggcggccgccgaccuggu

SEQ ID NO: 3914345 - RNA, 14 nt, Human adenovirus C
cacuaaagcaaggc

SEQ ID NO: 3914346 - RNA, 12 nt, Human adenovirus C
cacuacccggac

SEQ ID NO: 3914347 - RNA, 13 nt, Human adenovirus C
cacuaccuggacu

SEQ ID NO: 3914348 - RNA, 20 nt, Human adenovirus C
cacuagugaauccacagaaa

SEQ ID NO: 3914349 - RNA, 20 nt, Human adenovirus C
cacucacagaccugggccaa

SEQ ID NO: 3914350 - RNA, 13 nt, Human adenovirus C
cacucgcuccagg

SEQ ID NO: 3914351 - RNA, 15 nt, Human adenovirus C
cacucugagacgaag

SEQ ID NO: 3914352 - RNA, 21 nt, Human adenovirus C
cacucuguaugcuauauuuca

SEQ ID NO: 3914353 - RNA, 21 nt, Human adenovirus C
cacugcagagcuucaugcugc

SEQ ID NO: 3914354 - RNA, 16 nt, Human adenovirus C
cacuggaaccagggcc

SEQ ID NO: 3914355 - RNA, 13 nt, Human adenovirus C
cacuggcagggac

SEQ ID NO: 3914356 - RNA, 21 nt, Human adenovirus C
cacugugguacuucccagaga

SEQ ID NO: 3914357 - RNA, 17 nt, Human adenovirus C
cacuuaaaaaaacaaag

SEQ ID NO: 3914358 - RNA, 19 nt, Human adenovirus C
cacuuaauggcacuaguga

SEQ ID NO: 3914359 - RNA, 13 nt, Human adenovirus C
cacuuaggccaga

SEQ ID NO: 3914360 - RNA, 16 nt, Human adenovirus C
cacuuggucaggcagu

SEQ ID NO: 3914361 - RNA, 17 nt, Human adenovirus C
cacuuggugcuggccug

SEQ ID NO: 3914362 - RNA, 19 nt, Human adenovirus C
cacuuggugcuggccugca

SEQ ID NO: 3914363 - RNA, 22 nt, Human adenovirus C
cagaaaccugugcugccagggc

SEQ ID NO: 3914364 - RNA, 18 nt, Human adenovirus C
cagaagacggaugagcuc

SEQ ID NO: 3914365 - RNA, 23 nt, Human adenovirus C
cagaaggcgcucgccgcccagcg

SEQ ID NO: 3914366 - RNA, 13 nt, Human adenovirus C
cagacaaugcaga

SEQ ID NO: 3914367 - RNA, 14 nt, Human adenovirus C
cagacaaugcagaa

SEQ ID NO: 3914368 - RNA, 19 nt, Human adenovirus C
cagacaaugcagaaacaca

SEQ ID NO: 3914369 - RNA, 16 nt, Human adenovirus C
cagacacgaucggcag

SEQ ID NO: 3914370 - RNA, 21 nt, Human adenovirus C
cagacacgaucggcaggcuca

SEQ ID NO: 3914371 - RNA, 15 nt, Human adenovirus C
cagacaugcagggca

SEQ ID NO: 3914372 - RNA, 23 nt, Human adenovirus C
cagaccaaagcaaaccucaccuc

SEQ ID NO: 3914373 - RNA, 22 nt, Human adenovirus C
cagaccaguagacaaggccugc

SEQ ID NO: 3914374 - RNA, 15 nt, Human adenovirus C
cagacgggccagggu

SEQ ID NO: 3914375 - RNA, 17 nt, Human adenovirus C
cagacgggccaggguca

SEQ ID NO: 3914376 - RNA, 18 nt, Human adenovirus C
cagacggugaaccaggag

SEQ ID NO: 3914377 - RNA, 15 nt, Human adenovirus C
cagacuugagaggcc

SEQ ID NO: 3914378 - RNA, 19 nt, Human adenovirus C
cagagaagaacaugccgca

SEQ ID NO: 3914379 - RNA, 22 nt, Human adenovirus C
cagagcaaaaaguccgugcgcu

SEQ ID NO: 3914380 - RNA, 20 nt, Human adenovirus C
cagagcgauuugucagaagc

SEQ ID NO: 3914381 - RNA, 19 nt, Human adenovirus C
cagagggcgagguauucag

SEQ ID NO: 3914382 - RNA, 18 nt, Human adenovirus C
cagagggcugccugcacu

SEQ ID NO: 3914383 - RNA, 16 nt, Human adenovirus C
cagauccuuccuauca

SEQ ID NO: 3914384 - RNA, 23 nt, Human adenovirus C
cagauccuuccuaucaaccagaa

SEQ ID NO: 3914385 - RNA, 19 nt, Human adenovirus C
cagaugaaacgcgccagac

SEQ ID NO: 3914386 - RNA, 21 nt, Human adenovirus C
cagaugaaacgcgccagaccg

SEQ ID NO: 3914387 - RNA, 15 nt, Human adenovirus C
cagaugccgcggugc

SEQ ID NO: 3914388 - RNA, 15 nt, Human adenovirus C
cagaugggagcuguc

SEQ ID NO: 3914389 - RNA, 15 nt, Human adenovirus C
cagcaaauacugcgc

SEQ ID NO: 3914390 - RNA, 16 nt, Human adenovirus C
cagcaaauacugcgcg

SEQ ID NO: 3914391 - RNA, 17 nt, Human adenovirus C
cagcaaggccuggaaca

SEQ ID NO: 3914392 - RNA, 21 nt, Human adenovirus C
cagcacuggaacacuaucagc

SEQ ID NO: 3914393 - RNA, 14 nt, Human adenovirus C
cagcagccgcggcc

SEQ ID NO: 3914394 - RNA, 21 nt, Human adenovirus C
cagcaggaggaagccaggcgg

SEQ ID NO: 3914395 - RNA, 18 nt, Human adenovirus C
cagcauaacaacucagga

SEQ ID NO: 3914396 - RNA, 20 nt, Human adenovirus C
cagccauaucccuccgggga

SEQ ID NO: 3914397 - RNA, 13 nt, Human adenovirus C
cagccccccggcg

SEQ ID NO: 3914398 - RNA, 16 nt, Human adenovirus C
cagccccuccgcggcg

SEQ ID NO: 3914399 - RNA, 13 nt, Human adenovirus C
cagccgcaccgcg

SEQ ID NO: 3914400 - RNA, 16 nt, Human adenovirus C
cagccgcaggccaacc

SEQ ID NO: 3914401 - RNA, 16 nt, Human adenovirus C
cagccgccgcaccgug

SEQ ID NO: 3914402 - RNA, 14 nt, Human adenovirus C
cagccucgcccccc

SEQ ID NO: 3914403 - RNA, 22 nt, Human adenovirus C
cagccucgccccccuucuccca

SEQ ID NO: 3914404 - RNA, 21 nt, Human adenovirus C
cagccugagcguaaccagaca

SEQ ID NO: 3914405 - RNA, 22 nt, Human adenovirus C
cagccuggaggcaacccugaac

SEQ ID NO: 3914406 - RNA, 22 nt, Human adenovirus C
cagcgaaaaugaaagucacugu

SEQ ID NO: 3914407 - RNA, 22 nt, Human adenovirus C
cagcgaccgcgagcugaugcac

SEQ ID NO: 3914408 - RNA, 13 nt, Human adenovirus C
cagcgaggaggag

SEQ ID NO: 3914409 - RNA, 16 nt, Human adenovirus C
cagcgcacuacugccc

SEQ ID NO: 3914410 - RNA, 22 nt, Human adenovirus C
cagcgccggguggugcacgcug

SEQ ID NO: 3914411 - RNA, 18 nt, Human adenovirus C
cagcgccucccaaaagac

SEQ ID NO: 3914412 - RNA, 22 nt, Human adenovirus C
cagcggcaaaaagugcuccaug

SEQ ID NO: 3914413 - RNA, 20 nt, Human adenovirus C
cagcggcaacgugcagacca

SEQ ID NO: 3914414 - RNA, 21 nt, Human adenovirus C
cagcggcaagagcaagagcag

SEQ ID NO: 3914415 - RNA, 13 nt, Human adenovirus C
cagcggcagaagc

SEQ ID NO: 3914416 - RNA, 20 nt, Human adenovirus C
cagcggcagacaugcagggc

SEQ ID NO: 3914417 - RNA, 14 nt, Human adenovirus C
cagcggcggcagca

SEQ ID NO: 3914418 - RNA, 15 nt, Human adenovirus C
cagcggcggcagcag

SEQ ID NO: 3914419 - RNA, 18 nt, Human adenovirus C
cagcggcggcagcagcag

SEQ ID NO: 3914420 - RNA, 15 nt, Human adenovirus C
cagcggcggcggcgc

SEQ ID NO: 3914421 - RNA, 21 nt, Human adenovirus C
cagcggguuuaucaccgugcu

SEQ ID NO: 3914422 - RNA, 22 nt, Human adenovirus C
cagcggucccauccaaggucca

SEQ ID NO: 3914423 - RNA, 13 nt, Human adenovirus C
cagcucuacagcu

SEQ ID NO: 3914424 - RNA, 21 nt, Human adenovirus C
cagcugaccacuuacuggcug

SEQ ID NO: 3914425 - RNA, 22 nt, Human adenovirus C
cagcugaugguacccaagcgcc

SEQ ID NO: 3914426 - RNA, 17 nt, Human adenovirus C
cagcugccgccgccgcc

SEQ ID NO: 3914427 - RNA, 20 nt, Human adenovirus C
cagcuggggccggaccuggg

SEQ ID NO: 3914428 - RNA, 22 nt, Human adenovirus C
cagcuggggccggaccugggcu

SEQ ID NO: 3914429 - RNA, 23 nt, Human adenovirus C
cagcuggggccggaccugggcug

SEQ ID NO: 3914430 - RNA, 21 nt, Human adenovirus C
cagcuggggcucgcuguggag

SEQ ID NO: 3914431 - RNA, 20 nt, Human adenovirus C
cagcuguuggaucugcgcca

SEQ ID NO: 3914432 - RNA, 14 nt, Human adenovirus C
cagcuuauucagca

SEQ ID NO: 3914433 - RNA, 14 nt, Human adenovirus C
cagcuucagcuugc

SEQ ID NO: 3914434 - RNA, 17 nt, Human adenovirus C
cagcuugagccuggcug

SEQ ID NO: 3914435 - RNA, 12 nt, Human adenovirus C
cagcuugccugc

SEQ ID NO: 3914436 - RNA, 14 nt, Human adenovirus C
caggaacugaaagc

SEQ ID NO: 3914437 - RNA, 14 nt, Human adenovirus C
caggacccuggugc

SEQ ID NO: 3914438 - RNA, 18 nt, Human adenovirus C
caggacccuggugcugcc

SEQ ID NO: 3914439 - RNA, 14 nt, Human adenovirus C
caggagcagagccc

SEQ ID NO: 3914440 - RNA, 13 nt, Human adenovirus C
caggagcuggugc

SEQ ID NO: 3914441 - RNA, 17 nt, Human adenovirus C
caggagcuggugcugcg

SEQ ID NO: 3914442 - RNA, 19 nt, Human adenovirus C
augcgcggcgguauccugc

SEQ ID NO: 3914443 - RNA, 18 nt, Human adenovirus C
augcggcaggagggagag

SEQ ID NO: 3914444 - RNA, 23 nt, Human adenovirus C
augcuggaugugaccgaggagcu

SEQ ID NO: 3914445 - RNA, 17 nt, Human adenovirus C
auggaucacaaccccac

SEQ ID NO: 3914446 - RNA, 21 nt, Human adenovirus C
auggcagcaaggccuggaaca

SEQ ID NO: 3914447 - RNA, 19 nt, Human adenovirus C
auggcaguggucuccucag

SEQ ID NO: 3914448 - RNA, 16 nt, Human adenovirus C
auggccuuugccugga

SEQ ID NO: 3914449 - RNA, 23 nt, Human adenovirus C
augggacuugcggcuggagcugc

SEQ ID NO: 3914450 - RNA, 23 nt, Human adenovirus C
augggcgcacucacagaccuggg

SEQ ID NO: 3914451 - RNA, 21 nt, Human adenovirus C
augguuaaccuacaccagugu

SEQ ID NO: 3914452 - RNA, 19 nt, Human adenovirus C
auguacuaggagacacuuu

SEQ ID NO: 3914453 - RNA, 22 nt, Human adenovirus C
auguaugcguccaugucgccgc

SEQ ID NO: 3914454 - RNA, 22 nt, Human adenovirus C
auguauuauaacagcacuggca

SEQ ID NO: 3914455 - RNA, 19 nt, Human adenovirus C
auguccacaaagcgguggu

SEQ ID NO: 3914456 - RNA, 20 nt, Human adenovirus C
auguccaugggcgcacucac

SEQ ID NO: 3914457 - RNA, 16 nt, Human adenovirus C
augucgcuguccagcu

SEQ ID NO: 3914458 - RNA, 20 nt, Human adenovirus C
augucguuucucagcagcug

SEQ ID NO: 3914459 - RNA, 18 nt, Human adenovirus C
auguuacauuuaaaucag

SEQ ID NO: 3914460 - RNA, 19 nt, Human adenovirus C
auguucagauacaugggca

SEQ ID NO: 3914461 - RNA, 16 nt, Human adenovirus C
auguuguacagguggc

SEQ ID NO: 3914462 - RNA, 17 nt, Human adenovirus C
auguuuuguuugaaguc

SEQ ID NO: 3914463 - RNA, 14 nt, Human adenovirus C
auuaacaaaaauac

SEQ ID NO: 3914464 - RNA, 20 nt, Human adenovirus C
auuaagaaaugccuguuuga

SEQ ID NO: 3914465 - RNA, 19 nt, Human adenovirus C
auuaugaaacggaguguca

SEQ ID NO: 3914466 - RNA, 13 nt, Human adenovirus C
auucagccgccgc

SEQ ID NO: 3914467 - RNA, 16 nt, Human adenovirus C
auucagguuccucaca

SEQ ID NO: 3914468 - RNA, 19 nt, Human adenovirus C
auucaguaguauagcccca

SEQ ID NO: 3914469 - RNA, 13 nt, Human adenovirus C
auucccagcugcu

SEQ ID NO: 3914470 - RNA, 23 nt, Human adenovirus C
auugauggucgccccguccugcc

SEQ ID NO: 3914471 - RNA, 20 nt, Human adenovirus C
auugcguaccucaggcacca

SEQ ID NO: 3914472 - RNA, 17 nt, Human adenovirus C
auuggcuaccagggcuu

SEQ ID NO: 3914473 - RNA, 17 nt, Human adenovirus C
auuuaccccccacccuu

SEQ ID NO: 3914474 - RNA, 16 nt, Human adenovirus C
auuucaacaaagcagg

SEQ ID NO: 3914475 - RNA, 20 nt, Human adenovirus C
auuucaaucacgugcuccuu

SEQ ID NO: 3914476 - RNA, 20 nt, Human adenovirus C
auuucugccagcgccugcac

SEQ ID NO: 3914477 - RNA, 18 nt, Human adenovirus C
auuugaagagcuuuugaa

SEQ ID NO: 3914478 - RNA, 19 nt, Human adenovirus C
auuugaagagcuuuugaaa

SEQ ID NO: 3914479 - RNA, 17 nt, Human adenovirus C
auuugaugcucaaacaa

SEQ ID NO: 3914480 - RNA, 23 nt, Human adenovirus C
auuugucuuuacgccaccuucuu

SEQ ID NO: 3914481 - RNA, 21 nt, Human adenovirus C
auuuuuucuggggugaugcag

SEQ ID NO: 3914482 - RNA, 16 nt, Human adenovirus C
caaaaagaagcugcag

SEQ ID NO: 3914483 - RNA, 14 nt, Human adenovirus C
caaaagcagggcuu

SEQ ID NO: 3914484 - RNA, 16 nt, Human adenovirus C
caaaauaaaaagucug

SEQ ID NO: 3914485 - RNA, 21 nt, Human adenovirus C
caaaauguaaccacuguuacu

SEQ ID NO: 3914486 - RNA, 21 nt, Human adenovirus C
caaaauuuccaacaaaaggug

SEQ ID NO: 3914487 - RNA, 21 nt, Human adenovirus C
caaacagagcgauuugucaga

SEQ ID NO: 3914488 - RNA, 20 nt, Human adenovirus C
caaacagguggagcugaaau

SEQ ID NO: 3914489 - RNA, 22 nt, Human adenovirus C
caaaccuggaaaaggugaugaa

SEQ ID NO: 3914490 - RNA, 13 nt, Human adenovirus C
caaacgacugcag

SEQ ID NO: 3914491 - RNA, 18 nt, Human adenovirus C
caaacuuucuccaaaguu

SEQ ID NO: 3914492 - RNA, 13 nt, Human adenovirus C
caaagcacacuga

SEQ ID NO: 3914493 - RNA, 19 nt, Human adenovirus C
caaagcaggggccaagaac

SEQ ID NO: 3914494 - RNA, 20 nt, Human adenovirus C
caaagcgugcaggggcccaa

SEQ ID NO: 3914495 - RNA, 13 nt, Human adenovirus C
caaaggugucccu

SEQ ID NO: 3914496 - RNA, 14 nt, Human adenovirus C
caaauacaaaagca

SEQ ID NO: 3914497 - RNA, 12 nt, Human adenovirus C
caaauccauaca

SEQ ID NO: 3914498 - RNA, 23 nt, Human adenovirus C
caacauacugacccgcuguuccu

SEQ ID NO: 3914499 - RNA, 19 nt, Human adenovirus C
caacauccgcggcugacgc

SEQ ID NO: 3914500 - RNA, 19 nt, Human adenovirus C
caaccaggaacagcucuac

SEQ ID NO: 3914501 - RNA, 17 nt, Human adenovirus C
caaccaggcagugcaaa

SEQ ID NO: 3914502 - RNA, 16 nt, Human adenovirus C
caacccaacaccuagc

SEQ ID NO: 3914503 - RNA, 11 nt, Human adenovirus C
caaccccacca

SEQ ID NO: 3914504 - RNA, 20 nt, Human adenovirus C
caacccgaggucgagaagcc

SEQ ID NO: 3914505 - RNA, 18 nt, Human adenovirus C
caacccgcggugcuccuc

SEQ ID NO: 3914506 - RNA, 13 nt, Human adenovirus C
caaccgcgcccag

SEQ ID NO: 3914507 - RNA, 15 nt, Human adenovirus C
caaccguucccagca

SEQ ID NO: 3914508 - RNA, 20 nt, Human adenovirus C
caaccuggaccggcuggugg

SEQ ID NO: 3914509 - RNA, 23 nt, Human adenovirus C
caaccuucaaaucaaacuuuccu

SEQ ID NO: 3914510 - RNA, 16 nt, Human adenovirus C
caacggaauccgcgcc

SEQ ID NO: 3914511 - RNA, 18 nt, Human adenovirus C
caacggacccggcggugc

SEQ ID NO: 3914512 - RNA, 19 nt, Human adenovirus C
caacguguuuauuuuucaa

SEQ ID NO: 3914513 - RNA, 19 nt, Human adenovirus C
caacucggccgccugugga

SEQ ID NO: 3914514 - RNA, 20 nt, Human adenovirus C
caacugcgaggacagggccu

SEQ ID NO: 3914515 - RNA, 11 nt, Human adenovirus C
caacuggcaaa

SEQ ID NO: 3914516 - RNA, 23 nt, Human adenovirus C
caacuuugguagcugccuuccca

SEQ ID NO: 3914517 - RNA, 13 nt, Human adenovirus C
caagacagaaaca

SEQ ID NO: 3914518 - RNA, 19 nt, Human adenovirus C
caagagcaagagcagcggc

SEQ ID NO: 3914519 - RNA, 13 nt, Human adenovirus C
caagagcagcggc

SEQ ID NO: 3914520 - RNA, 14 nt, Human adenovirus C
caagagcagcggca

SEQ ID NO: 3914521 - RNA, 20 nt, Human adenovirus C
caagauuauacccacaaccu

SEQ ID NO: 3914522 - RNA, 13 nt, Human adenovirus C
caagcacacagac

SEQ ID NO: 3914523 - RNA, 14 nt, Human adenovirus C
caagcagugcagcu

SEQ ID NO: 3914524 - RNA, 18 nt, Human adenovirus C
caagcagugcagcuuccc

SEQ ID NO: 3914525 - RNA, 19 nt, Human adenovirus C
caagcgagugguggcuccc

SEQ ID NO: 3914526 - RNA, 23 nt, Human adenovirus C
caagcgcaaaaucaaagaagaga

SEQ ID NO: 3914527 - RNA, 20 nt, Human adenovirus C
caagcggcaacccuuccagg

SEQ ID NO: 3914528 - RNA, 15 nt, Human adenovirus C
caagcuugguggcaa

SEQ ID NO: 3914529 - RNA, 13 nt, Human adenovirus C
caagggugcagcu

SEQ ID NO: 3914530 - RNA, 15 nt, Human adenovirus C
caaguauaggucucu

SEQ ID NO: 3914531 - RNA, 20 nt, Human adenovirus C
caagugcuuugcccgcggcu

SEQ ID NO: 3914532 - RNA, 19 nt, Human adenovirus C
caaucuccucuuccauaag

SEQ ID NO: 3914533 - RNA, 12 nt, Human adenovirus C
caaugggcccac

SEQ ID NO: 3914534 - RNA, 23 nt, Human adenovirus C
caauuucggugucguugacggcg

SEQ ID NO: 3914535 - RNA, 18 nt, Human adenovirus C
cacaacuuccucaaaucu

SEQ ID NO: 3914536 - RNA, 20 nt, Human adenovirus C
cacaagaaucgccugcuacu

SEQ ID NO: 3914537 - RNA, 17 nt, Human adenovirus C
cacacagaccaucaauc

SEQ ID NO: 3914538 - RNA, 23 nt, Human adenovirus C
cacaccggggcgcgcugcggcug

SEQ ID NO: 3914539 - RNA, 21 nt, Human adenovirus C
cacacgggcggaggagaagcg

SEQ ID NO: 3914540 - RNA, 13 nt, Human adenovirus C
cacagaccugggc

SEQ ID NO: 3914541 - RNA, 18 nt, Human adenovirus C
cacagcggcggcagcagc

SEQ ID NO: 3914542 - RNA, 21 nt, Human adenovirus C
cacaggccagaugcugaggga

SEQ ID NO: 3914543 - RNA, 17 nt, Human adenovirus C
cacaggguugcagcacu

SEQ ID NO: 3914544 - RNA, 16 nt, Human adenovirus C
cacaguaacugcagca

SEQ ID NO: 3914545 - RNA, 14 nt, Human adenovirus C
cacaguggacgcgg

SEQ ID NO: 3914546 - RNA, 16 nt, Human adenovirus C
caccaacgaccagucc

SEQ ID NO: 3914547 - RNA, 22 nt, Human adenovirus C
caccacugugguacuucccaga

SEQ ID NO: 3914548 - RNA, 15 nt, Human adenovirus C
caccagcauaacaac

SEQ ID NO: 3914549 - RNA, 22 nt, Human adenovirus C
caccagcucaaucagucacagu

SEQ ID NO: 3914550 - RNA, 16 nt, Human adenovirus C
caccaguguaaaagag

SEQ ID NO: 3914551 - RNA, 19 nt, Human adenovirus C
cacccaaaaagaagcugca

SEQ ID NO: 3914552 - RNA, 14 nt, Human adenovirus C
cacccaccgugcag

SEQ ID NO: 3914553 - RNA, 17 nt, Human adenovirus C
cacccacggacgaggag

SEQ ID NO: 3914554 - RNA, 17 nt, Human adenovirus C
cacccagcgccaaaaac

SEQ ID NO: 3914555 - RNA, 17 nt, Human adenovirus C
cacccgcaacuucagac

SEQ ID NO: 3914556 - RNA, 14 nt, Human adenovirus C
cacccgcagcugcc

SEQ ID NO: 3914557 - RNA, 13 nt, Human adenovirus C
cacccgccccguu

SEQ ID NO: 3914558 - RNA, 21 nt, Human adenovirus C
cacccuugccgucugcgccgu

SEQ ID NO: 3914559 - RNA, 21 nt, Human adenovirus C
caccggccgacgggcggccau

SEQ ID NO: 3914560 - RNA, 16 nt, Human adenovirus C
gaagaaggaagagcag

SEQ ID NO: 3914561 - RNA, 13 nt, Human adenovirus C
gaagacgcggagg

SEQ ID NO: 3914562 - RNA, 14 nt, Human adenovirus C
gaagacugggacag

SEQ ID NO: 3914563 - RNA, 14 nt, Human adenovirus C
gaagaucuggaagg

SEQ ID NO: 3914564 - RNA, 19 nt, Human adenovirus C
gaagauuuuucugcugugc

SEQ ID NO: 3914565 - RNA, 22 nt, Human adenovirus C
gaagcaucugcagcgccagugc

SEQ ID NO: 3914566 - RNA, 14 nt, Human adenovirus C
gaagccuggaccga

SEQ ID NO: 3914567 - RNA, 18 nt, Human adenovirus C
gaagcugcuaaagcaaaa

SEQ ID NO: 3914568 - RNA, 19 nt, Human adenovirus C
gaaggaaaugcguggaaga

SEQ ID NO: 3914569 - RNA, 21 nt, Human adenovirus C
gaaggucaucaagacuuugga

SEQ ID NO: 3914570 - RNA, 18 nt, Human adenovirus C
gaaugagcuccacagguc

SEQ ID NO: 3914571 - RNA, 16 nt, Human adenovirus C
gaauggcgguaguggg

SEQ ID NO: 3914572 - RNA, 15 nt, Human adenovirus C
gacaacaucgcgcag

SEQ ID NO: 3914573 - RNA, 21 nt, Human adenovirus C
gacaccacccguguguaccuu

SEQ ID NO: 3914574 - RNA, 20 nt, Human adenovirus C
gacaccacuggaaccagggc

SEQ ID NO: 3914575 - RNA, 20 nt, Human adenovirus C
gacacccaagggugcagcug

SEQ ID NO: 3914576 - RNA, 15 nt, Human adenovirus C
gacacgggcagccug

SEQ ID NO: 3914577 - RNA, 16 nt, Human adenovirus C
gacacgggcagccugg

SEQ ID NO: 3914578 - RNA, 15 nt, Human adenovirus C
gacagaggacagcaa

SEQ ID NO: 3914579 - RNA, 18 nt, Human adenovirus C
gacagcaccuucacccag

SEQ ID NO: 3914580 - RNA, 17 nt, Human adenovirus C
gacauauuuccugcaga

SEQ ID NO: 3914581 - RNA, 23 nt, Human adenovirus C
gaccacuuacuggcugcagccag

SEQ ID NO: 3914582 - RNA, 20 nt, Human adenovirus C
gaccaguggagaggcagagc

SEQ ID NO: 3914583 - RNA, 13 nt, Human adenovirus C
gaccaugaagauc

SEQ ID NO: 3914584 - RNA, 18 nt, Human adenovirus C
gaccauucacguagccag

SEQ ID NO: 3914585 - RNA, 19 nt, Human adenovirus C
gaccauucacguagccagc

SEQ ID NO: 3914586 - RNA, 13 nt, Human adenovirus C
gaccccuggagag

SEQ ID NO: 3914587 - RNA, 14 nt, Human adenovirus C
gacccggcugcgag

SEQ ID NO: 3914588 - RNA, 16 nt, Human adenovirus C
gacccuggugcugcca

SEQ ID NO: 3914589 - RNA, 18 nt, Human adenovirus C
gaccgaggagcugaggcc

SEQ ID NO: 3914590 - RNA, 20 nt, Human adenovirus C
gaccgagguugcuacgggcg

SEQ ID NO: 3914591 - RNA, 14 nt, Human adenovirus C
gaccguggagccug

SEQ ID NO: 3914592 - RNA, 19 nt, Human adenovirus C
gaccucguccucggagccg

SEQ ID NO: 3914593 - RNA, 14 nt, Human adenovirus C
gaccucugcacucu

SEQ ID NO: 3914594 - RNA, 21 nt, Human adenovirus C
gaccuggccaaccaggcagug

SEQ ID NO: 3914595 - RNA, 19 nt, Human adenovirus C
gacgaaguaaguuugccac

SEQ ID NO: 3914596 - RNA, 14 nt, Human adenovirus C
gacgaaugagcucc

SEQ ID NO: 3914597 - RNA, 12 nt, Human adenovirus C
gacgacagcagc

SEQ ID NO: 3914598 - RNA, 16 nt, Human adenovirus C
gacgagaaacgcgcgg

SEQ ID NO: 3914599 - RNA, 22 nt, Human adenovirus C
gacgagcauacuuuccaggaga

SEQ ID NO: 3914600 - RNA, 16 nt, Human adenovirus C
gacgagucggugagcu

SEQ ID NO: 3914601 - RNA, 18 nt, Human adenovirus C
gacgaugacucggcagac

SEQ ID NO: 3914602 - RNA, 21 nt, Human adenovirus C
gacgaugcuucuaaauagcua

SEQ ID NO: 3914603 - RNA, 18 nt, Human adenovirus C
gacgcggugguggaggag

SEQ ID NO: 3914604 - RNA, 20 nt, Human adenovirus C
gacgcguuccggcagcagcc

SEQ ID NO: 3914605 - RNA, 24 nt, Human adenovirus C
gacggccugguaggcgcagcaucc

SEQ ID NO: 3914606 - RNA, 14 nt, Human adenovirus C
gacgggccaggguc

SEQ ID NO: 3914607 - RNA, 17 nt, Human adenovirus C
gacgggcccggugagcu

SEQ ID NO: 3914608 - RNA, 19 nt, Human adenovirus C
gacguaugcgcaggagcac

SEQ ID NO: 3914609 - RNA, 14 nt, Human adenovirus C
gacuacaugaacaa

SEQ ID NO: 3914610 - RNA, 21 nt, Human adenovirus C
gacuaucgcaacaccacugcu

SEQ ID NO: 3914611 - RNA, 22 nt, Human adenovirus C
gacugacuuugcuuuccugagc

SEQ ID NO: 3914612 - RNA, 21 nt, Human adenovirus C
gacuggaagaugucuuggaaa

SEQ ID NO: 3914613 - RNA, 13 nt, Human adenovirus C
gacuuugugccca

SEQ ID NO: 3914614 - RNA, 17 nt, Human adenovirus C
gagaaggaggacagccu

SEQ ID NO: 3914615 - RNA, 15 nt, Human adenovirus C
gagaaggucaucaag

SEQ ID NO: 3914616 - RNA, 20 nt, Human adenovirus C
gagacguacuucagccugaa

SEQ ID NO: 3914617 - RNA, 15 nt, Human adenovirus C
gagagccggccugga

SEQ ID NO: 3914618 - RNA, 14 nt, Human adenovirus C
gagagggggcaggg

SEQ ID NO: 3914619 - RNA, 16 nt, Human adenovirus C
gagcaaaauuuccaac

SEQ ID NO: 3914620 - RNA, 23 nt, Human adenovirus C
gagcaacagcaggaggaagccag

SEQ ID NO: 3914621 - RNA, 15 nt, Human adenovirus C
gagcagcuggcgcgc

SEQ ID NO: 3914622 - RNA, 19 nt, Human adenovirus C
gagcaggcagaggcggcgc

SEQ ID NO: 3914623 - RNA, 15 nt, Human adenovirus C
gagccagaggacggc

SEQ ID NO: 3914624 - RNA, 16 nt, Human adenovirus C
gagccaggugagcucu

SEQ ID NO: 3914625 - RNA, 17 nt, Human adenovirus C
gagccccuuuuuugcuu

SEQ ID NO: 3914626 - RNA, 23 nt, Human adenovirus C
gagcccgagguccgcgugcggcc

SEQ ID NO: 3914627 - RNA, 16 nt, Human adenovirus C
gagccgguguccacgc

SEQ ID NO: 3914628 - RNA, 21 nt, Human adenovirus C
gagccugggcuggagcccgag

SEQ ID NO: 3914629 - RNA, 16 nt, Human adenovirus C
gagccuguaagcgggc

SEQ ID NO: 3914630 - RNA, 15 nt, Human adenovirus C
gagcgacgaccuggg

SEQ ID NO: 3914631 - RNA, 21 nt, Human adenovirus C
gagcgcaaccuaaaggagcug

SEQ ID NO: 3914632 - RNA, 19 nt, Human adenovirus C
gagcgcccucuccugagcg

SEQ ID NO: 3914633 - RNA, 15 nt, Human adenovirus C
gagcgcuccacccgc

SEQ ID NO: 3914634 - RNA, 18 nt, Human adenovirus C
gagcuaugcuaaccagcg

SEQ ID NO: 3914635 - RNA, 23 nt, Human adenovirus C
gagcucggcgacagugucgcgca

SEQ ID NO: 3914636 - RNA, 20 nt, Human adenovirus C
gagcucuggccguucggggu

SEQ ID NO: 3914637 - RNA, 14 nt, Human adenovirus C
gagcugcagcugcc

SEQ ID NO: 3914638 - RNA, 21 nt, Human adenovirus C
gagcuuccacuuggucaggca

SEQ ID NO: 3914639 - RNA, 15 nt, Human adenovirus C
gaggacuaccacgcc

SEQ ID NO: 3914640 - RNA, 16 nt, Human adenovirus C
gaggacuaccacgccc

SEQ ID NO: 3914641 - RNA, 18 nt, Human adenovirus C
gaggaggaauacugggac

SEQ ID NO: 3914642 - RNA, 18 nt, Human adenovirus C
gaggcaaacgaggaacaa

SEQ ID NO: 3914643 - RNA, 20 nt, Human adenovirus C
gaggcaagcacacagaccau

SEQ ID NO: 3914644 - RNA, 23 nt, Human adenovirus C
gaggcacuaaagcaaggccugcc

SEQ ID NO: 3914645 - RNA, 15 nt, Human adenovirus C
gaggcagcuggggcc

SEQ ID NO: 3914646 - RNA, 17 nt, Human adenovirus C
gaggccucccucguucc

SEQ ID NO: 3914647 - RNA, 19 nt, Human adenovirus C
gaggcguaggagucgcgca

SEQ ID NO: 3914648 - RNA, 21 nt, Human adenovirus C
gaggcguaggagucgcgcagc

SEQ ID NO: 3914649 - RNA, 16 nt, Human adenovirus C
gaggcugguccugcug

SEQ ID NO: 3914650 - RNA, 13 nt, Human adenovirus C
gagggacaaguug

SEQ ID NO: 3914651 - RNA, 16 nt, Human adenovirus C
gagggagaggagcccg

SEQ ID NO: 3914652 - RNA, 13 nt, Human adenovirus C
gagggcccggcgc

SEQ ID NO: 3914653 - RNA, 20 nt, Human adenovirus C
gaggggggacacggcggcga

SEQ ID NO: 3914654 - RNA, 12 nt, Human adenovirus C
gaggugagcuca

SEQ ID NO: 3914655 - RNA, 13 nt, Human adenovirus C
gaggugcuugcca

SEQ ID NO: 3914656 - RNA, 17 nt, Human adenovirus C
gaggugcuugccaccua

SEQ ID NO: 3914657 - RNA, 17 nt, Human adenovirus C
gagucgcgcagcuuguu

SEQ ID NO: 3914658 - RNA, 21 nt, Human adenovirus C
gaguggcuguugaugugguga

SEQ ID NO: 3914659 - RNA, 11 nt, Human adenovirus C
gauacgucacu

SEQ ID NO: 3914660 - RNA, 15 nt, Human adenovirus C
gauacgucacuuccc

SEQ ID NO: 3914661 - RNA, 22 nt, Human adenovirus C
gauauggcccucaccugccgcc

SEQ ID NO: 3914662 - RNA, 15 nt, Human adenovirus C
gaucaaacccagcuu

SEQ ID NO: 3914663 - RNA, 18 nt, Human adenovirus C
gaucagcuucggcgcacg

SEQ ID NO: 3914664 - RNA, 17 nt, Human adenovirus C
gaucuauggccccccga

SEQ ID NO: 3914665 - RNA, 16 nt, Human adenovirus C
gaucuugguugugggc

SEQ ID NO: 3914666 - RNA, 16 nt, Human adenovirus C
gaugaagaagaggaag

SEQ ID NO: 3914667 - RNA, 15 nt, Human adenovirus C
gaugaagaugaagaa

SEQ ID NO: 3914668 - RNA, 18 nt, Human adenovirus C
gaugacgccauugacgcg

SEQ ID NO: 3914669 - RNA, 18 nt, Human adenovirus C
gaugacuugcaagaggcc

SEQ ID NO: 3914670 - RNA, 19 nt, Human adenovirus C
gaugagguguacggcgacg

SEQ ID NO: 3914671 - RNA, 21 nt, Human adenovirus C
gaugcaaacuugcaagaacaa

SEQ ID NO: 3914672 - RNA, 22 nt, Human adenovirus C
gaugccgccaacgcgccuacca

SEQ ID NO: 3914673 - RNA, 20 nt, Human adenovirus C
gaugccggcggcgguggugg

SEQ ID NO: 3914674 - RNA, 15 nt, Human adenovirus C
gauggaagacuggga

SEQ ID NO: 3914675 - RNA, 17 nt, Human adenovirus C
gauggaagacugggaca

SEQ ID NO: 3914676 - RNA, 18 nt, Human adenovirus C
gauggccgcgggcugggu

SEQ ID NO: 3914677 - RNA, 13 nt, Human adenovirus C
gaugugcccggcc

SEQ ID NO: 3914678 - RNA, 15 nt, Human adenovirus C
gauuccucugggacg

SEQ ID NO: 3914679 - RNA, 13 nt, Human adenovirus C
gcaaaauaaaaaa

SEQ ID NO: 3914680 - RNA, 22 nt, Human adenovirus C
gcaaaaucaaagaagagaugcu

SEQ ID NO: 3914681 - RNA, 15 nt, Human adenovirus C
gcaaacaucagcccc

SEQ ID NO: 3914682 - RNA, 18 nt, Human adenovirus C
gcaaaccucaccuccggu

SEQ ID NO: 3914683 - RNA, 21 nt, Human adenovirus C
gcaacagcgcgagcaggcaga

SEQ ID NO: 3914684 - RNA, 16 nt, Human adenovirus C
gcaaccaggaacagcu

SEQ ID NO: 3914685 - RNA, 20 nt, Human adenovirus C
gcaacccgcggugcuccucg

SEQ ID NO: 3914686 - RNA, 15 nt, Human adenovirus C
gcaaccgccucagcu

SEQ ID NO: 3914687 - RNA, 20 nt, Human adenovirus C
gcaacuagauugcaagaaaa

SEQ ID NO: 3914688 - RNA, 20 nt, Human adenovirus C
gcaacuggcaaagcacacug

SEQ ID NO: 3914689 - RNA, 15 nt, Human adenovirus C
gcaagacuccaaacu

SEQ ID NO: 3914690 - RNA, 16 nt, Human adenovirus C
gcaagagcgcagcgau

SEQ ID NO: 3914691 - RNA, 19 nt, Human adenovirus C
gcaagccaucaacaaagcc

SEQ ID NO: 3914692 - RNA, 20 nt, Human adenovirus C
gcaagccgcucauggcgcag

SEQ ID NO: 3914693 - RNA, 20 nt, Human adenovirus C
gcaagcugauugccaggggc

SEQ ID NO: 3914694 - RNA, 21 nt, Human adenovirus C
gcaagcugauugccaggggca

SEQ ID NO: 3914695 - RNA, 22 nt, Human adenovirus C
gcaagcugauugccaggggcag

SEQ ID NO: 3914696 - RNA, 23 nt, Human adenovirus C
gcaagucuagcgccugcugccau

SEQ ID NO: 3914697 - RNA, 14 nt, Human adenovirus C
gcaaugcuacuaaa

SEQ ID NO: 3914698 - RNA, 22 nt, Human adenovirus C
gcacaacauacugacccgcugu

SEQ ID NO: 3914699 - RNA, 13 nt, Human adenovirus C
gcaccagccgcac

SEQ ID NO: 3914700 - RNA, 20 nt, Human adenovirus C
gcacccaaaaagaagcugca

SEQ ID NO: 3914701 - RNA, 21 nt, Human adenovirus C
gcacccaaaaagaagcugcag

SEQ ID NO: 3914702 - RNA, 21 nt, Human adenovirus C
gcaccguggcgggcggcagcg

SEQ ID NO: 3914703 - RNA, 23 nt, Human adenovirus C
gcaccuaugacaagcgcuuucca

SEQ ID NO: 3914704 - RNA, 20 nt, Human adenovirus C
gcaccucgcgcucaaaggcu

SEQ ID NO: 3914705 - RNA, 23 nt, Human adenovirus C
gcaccuucgccccaggcugggga

SEQ ID NO: 3914706 - RNA, 14 nt, Human adenovirus C
gcacgcaaccgcgc

SEQ ID NO: 3914707 - RNA, 18 nt, Human adenovirus C
gcacgcuuguggcgcgcg

SEQ ID NO: 3914708 - RNA, 13 nt, Human adenovirus C
gcacgggcagcgg

SEQ ID NO: 3914709 - RNA, 13 nt, Human adenovirus C
gcacuacugcccg

SEQ ID NO: 3914710 - RNA, 20 nt, Human adenovirus C
gcacuaguauugccacugcc

SEQ ID NO: 3914711 - RNA, 23 nt, Human adenovirus C
gcacuccugacguaaccugcggc

SEQ ID NO: 3914712 - RNA, 15 nt, Human adenovirus C
gcacuggcaacaugg

SEQ ID NO: 3914713 - RNA, 14 nt, Human adenovirus C
gcacugggcgcacc

SEQ ID NO: 3914714 - RNA, 19 nt, Human adenovirus C
gcacuucuucuucuccuuc

SEQ ID NO: 3914715 - RNA, 14 nt, Human adenovirus C
gcagacaugcaggg

SEQ ID NO: 3914716 - RNA, 17 nt, Human adenovirus C
gcagaccaaccuggacc

SEQ ID NO: 3914717 - RNA, 19 nt, Human adenovirus C
gcagacccugcgagugugg

SEQ ID NO: 3914718 - RNA, 17 nt, Human adenovirus C
gcagacgcgccagaccc

SEQ ID NO: 3914719 - RNA, 21 nt, Human adenovirus C
gcagaggagguuuuggacgag

SEQ ID NO: 3914720 - RNA, 16 nt, Human adenovirus C
gcagaggcggcgcugc

SEQ ID NO: 3914721 - RNA, 17 nt, Human adenovirus C
gcagaugggagcugucc

SEQ ID NO: 3914722 - RNA, 13 nt, Human adenovirus C
gcagcaaggccug

SEQ ID NO: 3914723 - RNA, 15 nt, Human adenovirus C
gcagcaaggccugga

SEQ ID NO: 3914724 - RNA, 13 nt, Human adenovirus C
gcagcagcagggc

SEQ ID NO: 3914725 - RNA, 13 nt, Human adenovirus C
gcagcagccgcag

SEQ ID NO: 3914726 - RNA, 14 nt, Human adenovirus C
gcagcaggugcugc

SEQ ID NO: 3914727 - RNA, 18 nt, Human adenovirus C
gcagccacaacgcgcagc

SEQ ID NO: 3914728 - RNA, 18 nt, Human adenovirus C
gcagcccuaucagcagcc

SEQ ID NO: 3914729 - RNA, 13 nt, Human adenovirus C
gcagccgcaggcc

SEQ ID NO: 3914730 - RNA, 20 nt, Human adenovirus C
gcagcgaugugccccucgcc

SEQ ID NO: 3914731 - RNA, 15 nt, Human adenovirus C
gcagcgcgaaaagaa

SEQ ID NO: 3914732 - RNA, 20 nt, Human adenovirus C
gcagcggcagaagcugccgc

SEQ ID NO: 3914733 - RNA, 13 nt, Human adenovirus C
gcagcggcagaca

SEQ ID NO: 3914734 - RNA, 15 nt, Human adenovirus C
gcagcggcagacaug

SEQ ID NO: 3914735 - RNA, 12 nt, Human adenovirus C
gcagcggcagca

SEQ ID NO: 3914736 - RNA, 13 nt, Human adenovirus C
gcagcggcgcgga

SEQ ID NO: 3914737 - RNA, 16 nt, Human adenovirus C
gcagcggugcagccac

SEQ ID NO: 3914738 - RNA, 17 nt, Human adenovirus C
gcagcuaaaugccgugg

SEQ ID NO: 3914739 - RNA, 15 nt, Human adenovirus C
gcagcuggccuugcg

SEQ ID NO: 3914740 - RNA, 21 nt, Human adenovirus C
gcagcuguuggaucugcgcca

SEQ ID NO: 3914741 - RNA, 14 nt, Human adenovirus C
gcaggaggaagcca

SEQ ID NO: 3914742 - RNA, 19 nt, Human adenovirus C
gcaggaggacacgggcagc

SEQ ID NO: 3914743 - RNA, 21 nt, Human adenovirus C
gcaggaggacacgggcagccu

SEQ ID NO: 3914744 - RNA, 16 nt, Human adenovirus C
gcaggauuacaagccc

SEQ ID NO: 3914745 - RNA, 14 nt, Human adenovirus C
gcaggccaagcagc

SEQ ID NO: 3914746 - RNA, 14 nt, Human adenovirus C
gcaggcggccgcug

SEQ ID NO: 3914747 - RNA, 16 nt, Human adenovirus C
gcagggauacggcgcu

SEQ ID NO: 3914748 - RNA, 14 nt, Human adenovirus C
gcagggcacccucc

SEQ ID NO: 3914749 - RNA, 15 nt, Human adenovirus C
gcagggcacccuccc

SEQ ID NO: 3914750 - RNA, 18 nt, Human adenovirus C
gcagggcgaaggugacau

SEQ ID NO: 3914751 - RNA, 19 nt, Human adenovirus C
gcagggcgcugucauaccu

SEQ ID NO: 3914752 - RNA, 15 nt, Human adenovirus C
gcagguacgccugca

SEQ ID NO: 3914753 - RNA, 22 nt, Human adenovirus C
gcagguuggaauucuucaccag

SEQ ID NO: 3914754 - RNA, 16 nt, Human adenovirus C
gcaguaguccaggguu

SEQ ID NO: 3914755 - RNA, 14 nt, Human adenovirus C
gcaguagucggugc

SEQ ID NO: 3914756 - RNA, 19 nt, Human adenovirus C
gcauccgcccugcucccag

SEQ ID NO: 3914757 - RNA, 22 nt, Human adenovirus C
gcaucgcugucugcgagggcca

SEQ ID NO: 3914758 - RNA, 14 nt, Human adenovirus C
gcaugaagggcacg

SEQ ID NO: 3914759 - RNA, 16 nt, Human adenovirus C
gcaugcccccaugggc

SEQ ID NO: 3914760 - RNA, 15 nt, Human adenovirus C
gcauggcgacuaccu

SEQ ID NO: 3914761 - RNA, 15 nt, Human adenovirus C
gcauggucucgguga

SEQ ID NO: 3914762 - RNA, 24 nt, Human adenovirus C
gcaugugaguuggaugauaugguu

SEQ ID NO: 3914763 - RNA, 16 nt, Human adenovirus C
gccaaaaccuucucua

SEQ ID NO: 3914764 - RNA, 19 nt, Human adenovirus C
gccaaccaggcagugcaaa

SEQ ID NO: 3914765 - RNA, 16 nt, Human adenovirus C
gccaaccuacacauuc

SEQ ID NO: 3914766 - RNA, 12 nt, Human adenovirus C
gccaaguacaga

SEQ ID NO: 3914767 - RNA, 13 nt, Human adenovirus C
gccacacccagcc

SEQ ID NO: 3914768 - RNA, 22 nt, Human adenovirus C
gccacccacggacgaggaggaa

SEQ ID NO: 3914769 - RNA, 19 nt, Human adenovirus C
gccaccgagggaccugagc

SEQ ID NO: 3914770 - RNA, 20 nt, Human adenovirus C
gccaccucccucccaacaca

SEQ ID NO: 3914771 - RNA, 13 nt, Human adenovirus C
gccaccugagccu

SEQ ID NO: 3914772 - RNA, 16 nt, Human adenovirus C
gccacugccacagagg

SEQ ID NO: 3914773 - RNA, 18 nt, Human adenovirus C
gccagaaggcgcucgccg

SEQ ID NO: 3914774 - RNA, 16 nt, Human adenovirus C
gccagcacgcucuugu

SEQ ID NO: 3914775 - RNA, 19 nt, Human adenovirus C
gccaguggcaacuggcaaa

SEQ ID NO: 3914776 - RNA, 15 nt, Human adenovirus C
gccaugcaucugugg

SEQ ID NO: 3914777 - RNA, 22 nt, Human adenovirus C
gccaugggcguguggcagcaau

SEQ ID NO: 3914778 - RNA, 14 nt, Human adenovirus C
gccauugcuucuuc

SEQ ID NO: 3914779 - RNA, 15 nt, Human adenovirus C
gccauuuccuucucc

SEQ ID NO: 3914780 - RNA, 17 nt, Human adenovirus C
gccauuuuuucuggggu

SEQ ID NO: 3914781 - RNA, 13 nt, Human adenovirus C
gcccaacccgcgc

SEQ ID NO: 3914782 - RNA, 19 nt, Human adenovirus C
gcccagcaauaacacaggc

SEQ ID NO: 3914783 - RNA, 16 nt, Human adenovirus C
gccccaggcuggggag

SEQ ID NO: 3914784 - RNA, 21 nt, Human adenovirus C
gccccccuucucccaccccca

SEQ ID NO: 3914785 - RNA, 23 nt, Human adenovirus C
gcccccuuugaguucgccaccac

SEQ ID NO: 3914786 - RNA, 13 nt, Human adenovirus C
gcccgacagggaa

SEQ ID NO: 3914787 - RNA, 20 nt, Human adenovirus C
gcccgagggccgcuggcugc

SEQ ID NO: 3914788 - RNA, 18 nt, Human adenovirus C
gcccgcgccugcugggcg

SEQ ID NO: 3914789 - RNA, 20 nt, Human adenovirus C
gcccgcuugcaagcagugca

SEQ ID NO: 3914790 - RNA, 19 nt, Human adenovirus C
gcccgugcacuccaagagc

SEQ ID NO: 3914791 - RNA, 13 nt, Human adenovirus C
gcccgugcuggcc

SEQ ID NO: 3914792 - RNA, 22 nt, Human adenovirus C
gcccguguucugacagggccca

SEQ ID NO: 3914793 - RNA, 15 nt, Human adenovirus C
gcccuaccugugcuu

SEQ ID NO: 3914794 - RNA, 18 nt, Human adenovirus C
gcccuaccugugcuuugc

SEQ ID NO: 3914795 - RNA, 23 nt, Human adenovirus C
gcccuagccgcgcgucccugcgc

SEQ ID NO: 3914796 - RNA, 14 nt, Human adenovirus C
gcccucuccugagc

SEQ ID NO: 3914797 - RNA, 20 nt, Human adenovirus C
gcccugcgcgucggccaggu

SEQ ID NO: 3914798 - RNA, 22 nt, Human adenovirus C
uaccuugagcgacgaccugggc

SEQ ID NO: 3914799 - RNA, 22 nt, Human adenovirus C
uaccuuggguauccugucugag

SEQ ID NO: 3914800 - RNA, 18 nt, Human adenovirus C
uacgagagcguggugagc

SEQ ID NO: 3914801 - RNA, 13 nt, Human adenovirus C
uacgaugaccugg

SEQ ID NO: 3914802 - RNA, 11 nt, Human adenovirus C
uacgccaccuu

SEQ ID NO: 3914803 - RNA, 18 nt, Human adenovirus C
uacgccaccuucuucccc

SEQ ID NO: 3914804 - RNA, 16 nt, Human adenovirus C
uacuaccgucaucucu

SEQ ID NO: 3914805 - RNA, 12 nt, Human adenovirus C
uacuaccucuuu

SEQ ID NO: 3914806 - RNA, 14 nt, Human adenovirus C
uacuagcuacugua

SEQ ID NO: 3914807 - RNA, 17 nt, Human adenovirus C
uacucugaguuggcacc

SEQ ID NO: 3914808 - RNA, 13 nt, Human adenovirus C
uacucuggcucca

SEQ ID NO: 3914809 - RNA, 15 nt, Human adenovirus C
uacuggcugcagcca

SEQ ID NO: 3914810 - RNA, 21 nt, Human adenovirus C
uacuucccagagacgcccagg

SEQ ID NO: 3914811 - RNA, 15 nt, Human adenovirus C
uacuuuaucucaaau

SEQ ID NO: 3914812 - RNA, 22 nt, Human adenovirus C
uagaaucauugaaaaccaugga

SEQ ID NO: 3914813 - RNA, 22 nt, Human adenovirus C
uagcaagcugauugccaggggc

SEQ ID NO: 3914814 - RNA, 15 nt, Human adenovirus C
uaggaggggcauggc

SEQ ID NO: 3914815 - RNA, 17 nt, Human adenovirus C
uaggaucagacaaugca

SEQ ID NO: 3914816 - RNA, 15 nt, Human adenovirus C
uaggcccgggaccag

SEQ ID NO: 3914817 - RNA, 20 nt, Human adenovirus C
uaggcgcucguugguccagc

SEQ ID NO: 3914818 - RNA, 14 nt, Human adenovirus C
uaggcuaccucgcu

SEQ ID NO: 3914819 - RNA, 20 nt, Human adenovirus C
uaggcuggaaagcgaaagca

SEQ ID NO: 3914820 - RNA, 18 nt, Human adenovirus C
uagggcgcaguaguccag

SEQ ID NO: 3914821 - RNA, 18 nt, Human adenovirus C
uagguucuacgaagacca

SEQ ID NO: 3914822 - RNA, 17 nt, Human adenovirus C
uaguauagccccaccac

SEQ ID NO: 3914823 - RNA, 15 nt, Human adenovirus C
uagugcagcacagca

SEQ ID NO: 3914824 - RNA, 19 nt, Human adenovirus C
uauaaugucacagucuucc

SEQ ID NO: 3914825 - RNA, 17 nt, Human adenovirus C
uauacccacaaccuuca

SEQ ID NO: 3914826 - RNA, 19 nt, Human adenovirus C
uauacgccaucaucucugu

SEQ ID NO: 3914827 - RNA, 21 nt, Human adenovirus C
uaucucaaauacaaaagcaga

SEQ ID NO: 3914828 - RNA, 19 nt, Human adenovirus C
uaucugacaaccccaacac

SEQ ID NO: 3914829 - RNA, 18 nt, Human adenovirus C
uaugagcgguggcgccuu

SEQ ID NO: 3914830 - RNA, 14 nt, Human adenovirus C
uaugauucaucaaa

SEQ ID NO: 3914831 - RNA, 16 nt, Human adenovirus C
uauguauaaauuucca

SEQ ID NO: 3914832 - RNA, 17 nt, Human adenovirus C
uauuauucgccacaaag

SEQ ID NO: 3914833 - RNA, 23 nt, Human adenovirus C
uauucugcugcauguuucuccac

SEQ ID NO: 3914834 - RNA, 11 nt, Human adenovirus C
ucaaaaaccag

SEQ ID NO: 3914835 - RNA, 20 nt, Human adenovirus C
ucaaaaugaagaucuauuaa

SEQ ID NO: 3914836 - RNA, 13 nt, Human adenovirus C
ucaaacccagcuu

SEQ ID NO: 3914837 - RNA, 23 nt, Human adenovirus C
ucaaauauggaacauucccagcu

SEQ ID NO: 3914838 - RNA, 16 nt, Human adenovirus C
ucaaaucuucacuucc

SEQ ID NO: 3914839 - RNA, 20 nt, Human adenovirus C
ucaacaaagcccgccaagag

SEQ ID NO: 3914840 - RNA, 23 nt, Human adenovirus C
ucaacggaauccgcgcccaccga

SEQ ID NO: 3914841 - RNA, 20 nt, Human adenovirus C
ucaacuacaccgucaagaaa

SEQ ID NO: 3914842 - RNA, 20 nt, Human adenovirus C
ucaacucccggaacucaggu

SEQ ID NO: 3914843 - RNA, 16 nt, Human adenovirus C
ucacaagccccacuga

SEQ ID NO: 3914844 - RNA, 14 nt, Human adenovirus C
ucacagauuugcau

SEQ ID NO: 3914845 - RNA, 20 nt, Human adenovirus C
ucaccaacgcguuuagcagg

SEQ ID NO: 3914846 - RNA, 11 nt, Human adenovirus C
ucaccagcaua

SEQ ID NO: 3914847 - RNA, 20 nt, Human adenovirus C
ucaccagcauaacaacucag

SEQ ID NO: 3914848 - RNA, 14 nt, Human adenovirus C
ucacccgcagcugc

SEQ ID NO: 3914849 - RNA, 15 nt, Human adenovirus C
ucacccuggcugugg

SEQ ID NO: 3914850 - RNA, 13 nt, Human adenovirus C
ucaccuccuuucc

SEQ ID NO: 3914851 - RNA, 20 nt, Human adenovirus C
ucacggugaaggggugcgcu

SEQ ID NO: 3914852 - RNA, 14 nt, Human adenovirus C
ucacuccacaggcu

SEQ ID NO: 3914853 - RNA, 20 nt, Human adenovirus C
ucagcacaguaacugcagca

SEQ ID NO: 3914854 - RNA, 19 nt, Human adenovirus C
ucagccgcgcgcuggggca

SEQ ID NO: 3914855 - RNA, 16 nt, Human adenovirus C
ucagccucgccccccu

SEQ ID NO: 3914856 - RNA, 11 nt, Human adenovirus C
ucagcugcaac

SEQ ID NO: 3914857 - RNA, 21 nt, Human adenovirus C
ucagcugggaagaaagcaggu

SEQ ID NO: 3914858 - RNA, 22 nt, Human adenovirus C
ucagcuggggcucgcuguggag

SEQ ID NO: 3914859 - RNA, 17 nt, Human adenovirus C
ucaggaauucugcccgc

SEQ ID NO: 3914860 - RNA, 15 nt, Human adenovirus C
ucaggcgggagcucc

SEQ ID NO: 3914861 - RNA, 23 nt, Human adenovirus C
ucagggcgcgggcuagguccagg

SEQ ID NO: 3914862 - RNA, 14 nt, Human adenovirus C
ucaguagcaagcug

SEQ ID NO: 3914863 - RNA, 23 nt, Human adenovirus C
ucaguaguauagccccaccacca

SEQ ID NO: 3914864 - RNA, 18 nt, Human adenovirus C
ucagucgagaaggaggac

SEQ ID NO: 3914865 - RNA, 18 nt, Human adenovirus C
ucauaguuguguuccagg

SEQ ID NO: 3914866 - RNA, 14 nt, Human adenovirus C
ucaucccugagcag

SEQ ID NO: 3914867 - RNA, 14 nt, Human adenovirus C
ucaucccuguggac

SEQ ID NO: 3914868 - RNA, 13 nt, Human adenovirus C
ucaucucugugcu

SEQ ID NO: 3914869 - RNA, 14 nt, Human adenovirus C
ucaugagcgagcug

SEQ ID NO: 3914870 - RNA, 18 nt, Human adenovirus C
ucaugggaaacuggcaag

SEQ ID NO: 3914871 - RNA, 17 nt, Human adenovirus C
ucauuuguaauuuacaa

SEQ ID NO: 3914872 - RNA, 13 nt, Human adenovirus C
ucauuuugcugcc

SEQ ID NO: 3914873 - RNA, 20 nt, Human adenovirus C
uccaagaugagguacaugau

SEQ ID NO: 3914874 - RNA, 17 nt, Human adenovirus C
uccaagcgcaaaaucaa

SEQ ID NO: 3914875 - RNA, 19 nt, Human adenovirus C
uccacaaaaaacacccaga

SEQ ID NO: 3914876 - RNA, 13 nt, Human adenovirus C
uccacacaagcuc

SEQ ID NO: 3914877 - RNA, 13 nt, Human adenovirus C
uccacagaaacua

SEQ ID NO: 3914878 - RNA, 20 nt, Human adenovirus C
uccacgggcgcaggguccuc

SEQ ID NO: 3914879 - RNA, 16 nt, Human adenovirus C
uccacucgcuccaggg

SEQ ID NO: 3914880 - RNA, 22 nt, Human adenovirus C
uccagacaucauuuugcugcca

SEQ ID NO: 3914881 - RNA, 13 nt, Human adenovirus C
uccauaagggccu

SEQ ID NO: 3914882 - RNA, 17 nt, Human adenovirus C
uccauagagcagcugac

SEQ ID NO: 3914883 - RNA, 24 nt, Human adenovirus C
uccaugcccuucucccacgcagac

SEQ ID NO: 3914884 - RNA, 13 nt, Human adenovirus C
ucccacccccacu

SEQ ID NO: 3914885 - RNA, 17 nt, Human adenovirus C
ucccaggauggcaccca

SEQ ID NO: 3914886 - RNA, 21 nt, Human adenovirus C
ucccauccaagguccacggcu

SEQ ID NO: 3914887 - RNA, 22 nt, Human adenovirus C
ucccaucgcgcaacugggcagc

SEQ ID NO: 3914888 - RNA, 21 nt, Human adenovirus C
ucccccaugcuuuuugaugcg

SEQ ID NO: 3914889 - RNA, 19 nt, Human adenovirus C
ucccccguaacauccugca

SEQ ID NO: 3914890 - RNA, 20 nt, Human adenovirus C
ucccgcggcgacaggucagg

SEQ ID NO: 3914891 - RNA, 22 nt, Human adenovirus C
ucccguagaggagccuccaccg

SEQ ID NO: 3914892 - RNA, 16 nt, Human adenovirus C
ucccguucauccgccc

SEQ ID NO: 3914893 - RNA, 15 nt, Human adenovirus C
ucccugggaucaggc

SEQ ID NO: 3914894 - RNA, 17 nt, Human adenovirus C
ucccugggaucaggcua

SEQ ID NO: 3914895 - RNA, 17 nt, Human adenovirus C
ucccuguagccggaggg

SEQ ID NO: 3914896 - RNA, 14 nt, Human adenovirus C
uccgaggccgaaga

SEQ ID NO: 3914897 - RNA, 14 nt, Human adenovirus C
uccgcauaccccgc

SEQ ID NO: 3914898 - RNA, 13 nt, Human adenovirus C
uccggggggucug

SEQ ID NO: 3914899 - RNA, 18 nt, Human adenovirus C
uccgggguugaaacucac

SEQ ID NO: 3914900 - RNA, 18 nt, Human adenovirus C
uccuaacucugcagaccu

SEQ ID NO: 3914901 - RNA, 13 nt, Human adenovirus C
uccuacauugccc

SEQ ID NO: 3914902 - RNA, 18 nt, Human adenovirus C
uccuacuuugacgcgggc

SEQ ID NO: 3914903 - RNA, 20 nt, Human adenovirus C
uccucaaaucuucacuuccg

SEQ ID NO: 3914904 - RNA, 15 nt, Human adenovirus C
uccucaggggagcug

SEQ ID NO: 3914905 - RNA, 17 nt, Human adenovirus C
uccucgaguucuuauau

SEQ ID NO: 3914906 - RNA, 15 nt, Human adenovirus C
uccugagcagcugcg

SEQ ID NO: 3914907 - RNA, 16 nt, Human adenovirus C
uccugagcagcugcga

SEQ ID NO: 3914908 - RNA, 18 nt, Human adenovirus C
uccuuuccuuccucccaa

SEQ ID NO: 3914909 - RNA, 17 nt, Human adenovirus C
ucgaagccguugauguu

SEQ ID NO: 3914910 - RNA, 13 nt, Human adenovirus C
ucgagaaggagga

SEQ ID NO: 3914911 - RNA, 20 nt, Human adenovirus C
ucgagaaggaggacagccua

SEQ ID NO: 3914912 - RNA, 12 nt, Human adenovirus C
ucgagaucaggc

SEQ ID NO: 3914913 - RNA, 17 nt, Human adenovirus C
ucgaugacuugcaagag

SEQ ID NO: 3914914 - RNA, 16 nt, Human adenovirus C
ucgcuguccagcugcu

SEQ ID NO: 3914915 - RNA, 16 nt, Human adenovirus C
ucgcuguggagcggca

SEQ ID NO: 3914916 - RNA, 16 nt, Human adenovirus C
ucgcuuacuaaggaca

SEQ ID NO: 3914917 - RNA, 16 nt, Human adenovirus C
ucggaccaccacgccg

SEQ ID NO: 3914918 - RNA, 14 nt, Human adenovirus C
ucggcgguggcaga

SEQ ID NO: 3914919 - RNA, 20 nt, Human adenovirus C
ucuaacaguaccucuugguu

SEQ ID NO: 3914920 - RNA, 16 nt, Human adenovirus C
ucuaagcagccgccgc

SEQ ID NO: 3914921 - RNA, 21 nt, Human adenovirus C
ucuagggcgcaguaguccagg

SEQ ID NO: 3914922 - RNA, 18 nt, Human adenovirus C
ucuaugcccaggcuccuu

SEQ ID NO: 3914923 - RNA, 15 nt, Human adenovirus C
ucuccuucgcccgcc

SEQ ID NO: 3914924 - RNA, 13 nt, Human adenovirus C
ucucgauccagca

SEQ ID NO: 3914925 - RNA, 21 nt, Human adenovirus C
ucugacaaagcccaagaaauc

SEQ ID NO: 3914926 - RNA, 19 nt, Human adenovirus C
ucugacaaccccaacaccu

SEQ ID NO: 3914927 - RNA, 16 nt, Human adenovirus C
ucuggagcucccgcgg

SEQ ID NO: 3914928 - RNA, 19 nt, Human adenovirus C
ucuggugacuuggcaccca

SEQ ID NO: 3914929 - RNA, 13 nt, Human adenovirus C
ucuuauacuagca

SEQ ID NO: 3914930 - RNA, 13 nt, Human adenovirus C
ucuuaugccaggc

SEQ ID NO: 3914931 - RNA, 13 nt, Human adenovirus C
ucuucagaaacuu

SEQ ID NO: 3914932 - RNA, 12 nt, Human adenovirus C
ugaaaccaugcu

SEQ ID NO: 3914933 - RNA, 10 nt, Human adenovirus C
ugaaacuuuu

SEQ ID NO: 3914934 - RNA, 14 nt, Human adenovirus C
ugaaagagguaguu

SEQ ID NO: 3914935 - RNA, 21 nt, Human adenovirus C
ugaacgggguguuugacauga

SEQ ID NO: 3914936 - RNA, 19 nt, Human adenovirus C
ugaagaaaaccguuuccgg

SEQ ID NO: 3914937 - RNA, 13 nt, Human adenovirus C
ugaaguuugccuu

SEQ ID NO: 3914938 - RNA, 22 nt, Human adenovirus C
ugacaaaagaacccacacugau

SEQ ID NO: 3914939 - RNA, 18 nt, Human adenovirus C
ugacaguauuacccagaa

SEQ ID NO: 3914940 - RNA, 19 nt, Human adenovirus C
ugacaucggcgcaggucuu

SEQ ID NO: 3914941 - RNA, 20 nt, Human adenovirus C
ugaccaacgacucaagcagg

SEQ ID NO: 3914942 - RNA, 18 nt, Human adenovirus C
ugaccacuuacuggcugc

SEQ ID NO: 3914943 - RNA, 12 nt, Human adenovirus C
ugaccagcucgg

SEQ ID NO: 3914944 - RNA, 18 nt, Human adenovirus C
ugaccgugcccggucugg

SEQ ID NO: 3914945 - RNA, 21 nt, Human adenovirus C
ugacgcgggcgcugaccugcg

SEQ ID NO: 3914946 - RNA, 18 nt, Human adenovirus C
ugacgcguuccggcagca

SEQ ID NO: 3914947 - RNA, 20 nt, Human adenovirus C
ugacgcguuccggcagcagc

SEQ ID NO: 3914948 - RNA, 23 nt, Human adenovirus C
ugacggccugguaggcgcagcau

SEQ ID NO: 3914949 - RNA, 17 nt, Human adenovirus C
ugagacaugauuccucg

SEQ ID NO: 3914950 - RNA, 14 nt, Human adenovirus C
ugagacgcgcgagc

SEQ ID NO: 3914951 - RNA, 21 nt, Human adenovirus C
ugagcaaggaaauucccacgc

SEQ ID NO: 3914952 - RNA, 22 nt, Human adenovirus C
ugagcaaggaaauucccacgcc

SEQ ID NO: 3914953 - RNA, 21 nt, Human adenovirus C
ugagcacagucaugagcgagc

SEQ ID NO: 3914954 - RNA, 23 nt, Human adenovirus C
ugagcccgacgcgcggaccggga

SEQ ID NO: 3914955 - RNA, 23 nt, Human adenovirus C
ugagcccguguucugacagggcc

SEQ ID NO: 3914956 - RNA, 18 nt, Human adenovirus C
ugagcgcgcgcagcagca

SEQ ID NO: 3914957 - RNA, 13 nt, Human adenovirus C
ugagcgcgggacc

SEQ ID NO: 3914958 - RNA, 20 nt, Human adenovirus C
ugagcgugagccggcggcgc

SEQ ID NO: 3914959 - RNA, 17 nt, Human adenovirus C
ugagcuccacgugccgg

SEQ ID NO: 3914960 - RNA, 21 nt, Human adenovirus C
ugaggacuaccacgcccacga

SEQ ID NO: 3914961 - RNA, 18 nt, Human adenovirus C
ugaggcuacagaggaggc

SEQ ID NO: 3914962 - RNA, 18 nt, Human adenovirus C
ugaggcugguccugcugg

SEQ ID NO: 3914963 - RNA, 15 nt, Human adenovirus C
ugagguacaugauuu

SEQ ID NO: 3914964 - RNA, 13 nt, Human adenovirus C
ugauaaauaugug

SEQ ID NO: 3914965 - RNA, 22 nt, Human adenovirus C
ugauaggcgauuucggccauga

SEQ ID NO: 3914966 - RNA, 16 nt, Human adenovirus C
ugauaugguuggacgc

SEQ ID NO: 3914967 - RNA, 15 nt, Human adenovirus C
ugaucaaacccagcu

SEQ ID NO: 3914968 - RNA, 18 nt, Human adenovirus C
ugauccagucguagcagg

SEQ ID NO: 3914969 - RNA, 22 nt, Human adenovirus C
ugaucugcuuaaaagccaccug

SEQ ID NO: 3914970 - RNA, 14 nt, Human adenovirus C
ugaugaaaauucua

SEQ ID NO: 3914971 - RNA, 12 nt, Human adenovirus C
ugaugacaaacu

SEQ ID NO: 3914972 - RNA, 18 nt, Human adenovirus C
ugauggaagacugggaca

SEQ ID NO: 3914973 - RNA, 21 nt, Human adenovirus C
ugauggaagcauugugagcuc

SEQ ID NO: 3914974 - RNA, 18 nt, Human adenovirus C
ugauggccgcagugcuug

SEQ ID NO: 3914975 - RNA, 19 nt, Human adenovirus C
ugcaaacuugcaagaacaa

SEQ ID NO: 3914976 - RNA, 18 nt, Human adenovirus C
ugcaaacuuucuccaaag

SEQ ID NO: 3914977 - RNA, 18 nt, Human adenovirus C
ugcaacagguuauugccc

SEQ ID NO: 3914978 - RNA, 16 nt, Human adenovirus C
ugcaagcagugcagcu

SEQ ID NO: 3914979 - RNA, 17 nt, Human adenovirus C
ugcaagcagugcagcuu

SEQ ID NO: 3914980 - RNA, 19 nt, Human adenovirus C
ugcaagucuagcgccugcu

SEQ ID NO: 3914981 - RNA, 22 nt, Human adenovirus C
ugcacaguuuaaacagcgagga

SEQ ID NO: 3914982 - RNA, 18 nt, Human adenovirus C
ugcacaucucgggccagg

SEQ ID NO: 3914983 - RNA, 19 nt, Human adenovirus C
ugcaccacagaacaugaaa

SEQ ID NO: 3914984 - RNA, 21 nt, Human adenovirus C
ugcaccguaggaggggcaugg

SEQ ID NO: 3914985 - RNA, 15 nt, Human adenovirus C
ugcacgcuggccagc

SEQ ID NO: 3914986 - RNA, 18 nt, Human adenovirus C
ugcacgcuggccagcacg

SEQ ID NO: 3914987 - RNA, 20 nt, Human adenovirus C
ugcacgcuggccagcacgcu

SEQ ID NO: 3914988 - RNA, 15 nt, Human adenovirus C
ugcagaccaaccugg

SEQ ID NO: 3914989 - RNA, 18 nt, Human adenovirus C
ugcagaccaaccuggacc

SEQ ID NO: 3914990 - RNA, 17 nt, Human adenovirus C
ugcagauguuggccaac

SEQ ID NO: 3914991 - RNA, 18 nt, Human adenovirus C
ugcauacacuuccucagg

SEQ ID NO: 3914992 - RNA, 13 nt, Human adenovirus C
ugcaugcccaggc

SEQ ID NO: 3914993 - RNA, 20 nt, Human adenovirus C
ugcauguuucuccacgccuu

SEQ ID NO: 3914994 - RNA, 16 nt, Human adenovirus C
ugccacagagggcaug

SEQ ID NO: 3914995 - RNA, 18 nt, Human adenovirus C
ugccaccucccucccaac

SEQ ID NO: 3914996 - RNA, 22 nt, Human adenovirus C
ugccagaggugcuugccaccua

SEQ ID NO: 3914997 - RNA, 16 nt, Human adenovirus C
ugccaugcgcgggcgg

SEQ ID NO: 3914998 - RNA, 18 nt, Human adenovirus C
ugccauuaaaaaccuccu

SEQ ID NO: 3914999 - RNA, 12 nt, Human adenovirus C
ugcccaggcucc

SEQ ID NO: 3915000 - RNA, 17 nt, Human adenovirus C
ugccccaaucaaucagc

SEQ ID NO: 3915001 - RNA, 17 nt, Human adenovirus C
ugccccucgccauagcg

SEQ ID NO: 3915002 - RNA, 13 nt, Human adenovirus C
ugcccgccaccug

SEQ ID NO: 3915003 - RNA, 16 nt, Human adenovirus C
ugcccgccaccugcug

SEQ ID NO: 3915004 - RNA, 22 nt, Human adenovirus C
ugcccgcugucauaccacugca

SEQ ID NO: 3915005 - RNA, 18 nt, Human adenovirus C
ugcccggaauugcauccg

SEQ ID NO: 3915006 - RNA, 13 nt, Human adenovirus C
ugcccuccgccgc

SEQ ID NO: 3915007 - RNA, 14 nt, Human adenovirus C
ugcccuccgccgcu

SEQ ID NO: 3915008 - RNA, 13 nt, Human adenovirus C
ugccgcggcagaa

SEQ ID NO: 3915009 - RNA, 19 nt, Human adenovirus C
ugccgcggggacaggagga

SEQ ID NO: 3915010 - RNA, 23 nt, Human adenovirus C
ugccuuugucaaugacugggcga

SEQ ID NO: 3915011 - RNA, 13 nt, Human adenovirus C
ugccuuuuacugc

SEQ ID NO: 3915012 - RNA, 23 nt, Human adenovirus C
ugcgauacacaggguugcagcac

SEQ ID NO: 3915013 - RNA, 14 nt, Human adenovirus C
ugcgcagcggcaaa

SEQ ID NO: 3915014 - RNA, 14 nt, Human adenovirus C
ugcgcaggagcaca

SEQ ID NO: 3915015 - RNA, 20 nt, Human adenovirus C
ugcgcccacaccuacagccu

SEQ ID NO: 3915016 - RNA, 22 nt, Human adenovirus C
ugcgccccccuccucagcagcg

SEQ ID NO: 3915017 - RNA, 19 nt, Human adenovirus C
ugcgccguuuaaaaaucaa

SEQ ID NO: 3915018 - RNA, 17 nt, Human adenovirus C
ugcgcgagggacaggcu

SEQ ID NO: 3915019 - RNA, 18 nt, Human adenovirus C
ugcgcuguaccugccaga

SEQ ID NO: 3915020 - RNA, 20 nt, Human adenovirus C
ugcgcuugaggcugguccug

SEQ ID NO: 3915021 - RNA, 12 nt, Human adenovirus C
ugcgcuuuucug

SEQ ID NO: 3915022 - RNA, 18 nt, Human adenovirus C
ugcgcuuuuuggaacgcg

SEQ ID NO: 3915023 - RNA, 15 nt, Human adenovirus C
ugcggaagggucccg

SEQ ID NO: 3915024 - RNA, 18 nt, Human adenovirus C
ugcggcuggagcugccca

SEQ ID NO: 3915025 - RNA, 17 nt, Human adenovirus C
ugcgggccaugagcugc

SEQ ID NO: 3915026 - RNA, 18 nt, Human adenovirus C
ugcguaacuugcuggaac

SEQ ID NO: 3915027 - RNA, 16 nt, Human adenovirus C
ugcgucauuacccagg

SEQ ID NO: 3915028 - RNA, 23 nt, Human adenovirus C
ugcgugugaccccgaagccccuc

SEQ ID NO: 3915029 - RNA, 11 nt, Human adenovirus C
ugcuaccucuu

SEQ ID NO: 3915030 - RNA, 12 nt, Human adenovirus C
ugcuaccucuuu

SEQ ID NO: 3915031 - RNA, 16 nt, Human adenovirus C
ugcuaccucuuugagc

SEQ ID NO: 3915032 - RNA, 18 nt, Human adenovirus C
ugcuacgaaagggacggg

SEQ ID NO: 3915033 - RNA, 17 nt, Human adenovirus C
ugcuacgggcgggcugc

SEQ ID NO: 3915034 - RNA, 22 nt, Human adenovirus C
ugcuauggaucuuaugccaggc

SEQ ID NO: 3915035 - RNA, 17 nt, Human adenovirus C
ugcucaacccacacaau

SEQ ID NO: 3915036 - RNA, 19 nt, Human adenovirus C
guacagugaagauguaaau

SEQ ID NO: 3915037 - RNA, 17 nt, Human adenovirus C
guaccugaggacuacca

SEQ ID NO: 3915038 - RNA, 13 nt, Human adenovirus C
guaccugccagac

SEQ ID NO: 3915039 - RNA, 16 nt, Human adenovirus C
guaccugccagacaag

SEQ ID NO: 3915040 - RNA, 14 nt, Human adenovirus C
guaccugcgcacgc

SEQ ID NO: 3915041 - RNA, 15 nt, Human adenovirus C
guacuucccagagac

SEQ ID NO: 3915042 - RNA, 12 nt, Human adenovirus C
guagacuggaag

SEQ ID NO: 3915043 - RNA, 23 nt, Human adenovirus C
guagcaagcugauugccaggggc

SEQ ID NO: 3915044 - RNA, 13 nt, Human adenovirus C
guaggugagcucc

SEQ ID NO: 3915045 - RNA, 20 nt, Human adenovirus C
guaguggcaucagaagguga

SEQ ID NO: 3915046 - RNA, 18 nt, Human adenovirus C
guauacgcagauccuucc

SEQ ID NO: 3915047 - RNA, 14 nt, Human adenovirus C
guauauuccuuaga

SEQ ID NO: 3915048 - RNA, 15 nt, Human adenovirus C
guaugcgcaggagca

SEQ ID NO: 3915049 - RNA, 21 nt, Human adenovirus C
guauguauccagcggcggcgg

SEQ ID NO: 3915050 - RNA, 12 nt, Human adenovirus C
gucacacagaag

SEQ ID NO: 3915051 - RNA, 22 nt, Human adenovirus C
gucacccuuauccucaucugca

SEQ ID NO: 3915052 - RNA, 21 nt, Human adenovirus C
gucagacaacgggggagcgcu

SEQ ID NO: 3915053 - RNA, 15 nt, Human adenovirus C
gucagcguagucugg

SEQ ID NO: 3915054 - RNA, 16 nt, Human adenovirus C
gucauaccacugcaac

SEQ ID NO: 3915055 - RNA, 14 nt, Human adenovirus C
gucaucccugagca

SEQ ID NO: 3915056 - RNA, 12 nt, Human adenovirus C
gucaucucugug

SEQ ID NO: 3915057 - RNA, 15 nt, Human adenovirus C
gucaucucugugcug

SEQ ID NO: 3915058 - RNA, 21 nt, Human adenovirus C
gucauuacccagggccacauc

SEQ ID NO: 3915059 - RNA, 13 nt, Human adenovirus C
guccaaggugaac

SEQ ID NO: 3915060 - RNA, 13 nt, Human adenovirus C
guccagcagaggc

SEQ ID NO: 3915061 - RNA, 17 nt, Human adenovirus C
guccagccccuccgcgg

SEQ ID NO: 3915062 - RNA, 20 nt, Human adenovirus C
guccaggcgacgagcggccg

SEQ ID NO: 3915063 - RNA, 15 nt, Human adenovirus C
guccaucuggucaga

SEQ ID NO: 3915064 - RNA, 18 nt, Human adenovirus C
gucccagcguuugacgcu

SEQ ID NO: 3915065 - RNA, 19 nt, Human adenovirus C
guccuccgcguugcucagg

SEQ ID NO: 3915066 - RNA, 21 nt, Human adenovirus C
guccuccgcguugcucagggc

SEQ ID NO: 3915067 - RNA, 22 nt, Human adenovirus C
guccuguguauuuuuuccagga

SEQ ID NO: 3915068 - RNA, 20 nt, Human adenovirus C
gucgcaaccaggaacagcuc

SEQ ID NO: 3915069 - RNA, 13 nt, Human adenovirus C
gucgccgccagag

SEQ ID NO: 3915070 - RNA, 14 nt, Human adenovirus C
gucgccgccagagg

SEQ ID NO: 3915071 - RNA, 18 nt, Human adenovirus C
gucuaagcagccgccgcc

SEQ ID NO: 3915072 - RNA, 23 nt, Human adenovirus C
gucuccuaccuuggaauuuugca

SEQ ID NO: 3915073 - RNA, 19 nt, Human adenovirus C
gucugcagcgcugccaaaa

SEQ ID NO: 3915074 - RNA, 16 nt, Human adenovirus C
gugacaaagagacgcu

SEQ ID NO: 3915075 - RNA, 20 nt, Human adenovirus C
gugacacugcagcaggugcu

SEQ ID NO: 3915076 - RNA, 19 nt, Human adenovirus C
gugaccccgaagccccuca

SEQ ID NO: 3915077 - RNA, 16 nt, Human adenovirus C
gugaccgaggagcuga

SEQ ID NO: 3915078 - RNA, 18 nt, Human adenovirus C
gugacucuggauguucag

SEQ ID NO: 3915079 - RNA, 14 nt, Human adenovirus C
gugagcgcuccacc

SEQ ID NO: 3915080 - RNA, 16 nt, Human adenovirus C
gugaugccggcggcgg

SEQ ID NO: 3915081 - RNA, 13 nt, Human adenovirus C
gugaugcuggaug

SEQ ID NO: 3915082 - RNA, 21 nt, Human adenovirus C
gugauuauuuaccccccaccc

SEQ ID NO: 3915083 - RNA, 22 nt, Human adenovirus C
gugcacgaccccuggagaggga

SEQ ID NO: 3915084 - RNA, 13 nt, Human adenovirus C
gugcagcugaugg

SEQ ID NO: 3915085 - RNA, 19 nt, Human adenovirus C
gugccaaaaaucuuugagg

SEQ ID NO: 3915086 - RNA, 18 nt, Human adenovirus C
gugcccgugcgcacccgc

SEQ ID NO: 3915087 - RNA, 20 nt, Human adenovirus C
gugccgcggggacaggagga

SEQ ID NO: 3915088 - RNA, 17 nt, Human adenovirus C
gugcuggacagggggcc

SEQ ID NO: 3915089 - RNA, 21 nt, Human adenovirus C
gugcuuguagguuaccucugc

SEQ ID NO: 3915090 - RNA, 16 nt, Human adenovirus C
guggaacuugagggug

SEQ ID NO: 3915091 - RNA, 15 nt, Human adenovirus C
guggacuaaacuuug

SEQ ID NO: 3915092 - RNA, 18 nt, Human adenovirus C
guggacuauucugcugca

SEQ ID NO: 3915093 - RNA, 15 nt, Human adenovirus C
guggagaggcagagc

SEQ ID NO: 3915094 - RNA, 12 nt, Human adenovirus C
guggagcucugc

SEQ ID NO: 3915095 - RNA, 17 nt, Human adenovirus C
guggauuacccauuuga

SEQ ID NO: 3915096 - RNA, 19 nt, Human adenovirus C
guggccuugcaggcgcaga

SEQ ID NO: 3915097 - RNA, 13 nt, Human adenovirus C
guggcuguugaug

SEQ ID NO: 3915098 - RNA, 16 nt, Human adenovirus C
gugggcucguggugcu

SEQ ID NO: 3915099 - RNA, 13 nt, Human adenovirus C
guggucccggcgc

SEQ ID NO: 3915100 - RNA, 16 nt, Human adenovirus C
guggucgcgaaagguc

SEQ ID NO: 3915101 - RNA, 16 nt, Human adenovirus C
gugguggaggaggcgc

SEQ ID NO: 3915102 - RNA, 23 nt, Human adenovirus C
gugguuuuguacagugaagaugu

SEQ ID NO: 3915103 - RNA, 17 nt, Human adenovirus C
guguccacgcucgguga

SEQ ID NO: 3915104 - RNA, 16 nt, Human adenovirus C
guuaacuccuccucca

SEQ ID NO: 3915105 - RNA, 21 nt, Human adenovirus C
guuaagagagcugcagcugcc

SEQ ID NO: 3915106 - RNA, 19 nt, Human adenovirus C
guuagcgccugauuucugc

SEQ ID NO: 3915107 - RNA, 20 nt, Human adenovirus C
guucaggaauucugcccgcc

SEQ ID NO: 3915108 - RNA, 16 nt, Human adenovirus C
guucaucccuguggac

SEQ ID NO: 3915109 - RNA, 19 nt, Human adenovirus C
guuccucacagaccuguau

SEQ ID NO: 3915110 - RNA, 19 nt, Human adenovirus C
guuccuggugcagauguug

SEQ ID NO: 3915111 - RNA, 18 nt, Human adenovirus C
guuccuuauagugcagca

SEQ ID NO: 3915112 - RNA, 22 nt, Human adenovirus C
guuccuuauagugcagcacagc

SEQ ID NO: 3915113 - RNA, 16 nt, Human adenovirus C
guucugacagggccca

SEQ ID NO: 3915114 - RNA, 20 nt, Human adenovirus C
guucugguuccggaugaaaa

SEQ ID NO: 3915115 - RNA, 20 nt, Human adenovirus C
guugaucuccugaaucuggc

SEQ ID NO: 3915116 - RNA, 14 nt, Human adenovirus C
guugcauguggaaa

SEQ ID NO: 3915117 - RNA, 16 nt, Human adenovirus C
guuggacgcuggaaga

SEQ ID NO: 3915118 - RNA, 16 nt, Human adenovirus C
guuuaaggaaccagcu

SEQ ID NO: 3915119 - RNA, 20 nt, Human adenovirus C
guuugagcacaacauacuga

SEQ ID NO: 3915120 - RNA, 14 nt, Human adenovirus C
guuugccuuauuau

SEQ ID NO: 3915121 - RNA, 18 nt, Human adenovirus C
guuuugcgacccggcacc

SEQ ID NO: 3915122 - RNA, 19 nt, Human adenovirus C
guuuuggacgaggaggagg

SEQ ID NO: 3915123 - RNA, 15 nt, Human adenovirus C
uaaaagagguaucuu

SEQ ID NO: 3915124 - RNA, 20 nt, Human adenovirus C
uaaacauuccagcaccuuca

SEQ ID NO: 3915125 - RNA, 20 nt, Human adenovirus C
uaaagcaaaacuugaaggac

SEQ ID NO: 3915126 - RNA, 17 nt, Human adenovirus C
uaaagcaaggccugccc

SEQ ID NO: 3915127 - RNA, 22 nt, Human adenovirus C
uaaagcccgugacacugcagca

SEQ ID NO: 3915128 - RNA, 23 nt, Human adenovirus C
uaaaguccacaaaaaacacccag

SEQ ID NO: 3915129 - RNA, 22 nt, Human adenovirus C
uaacaggagggggguguuccua

SEQ ID NO: 3915130 - RNA, 12 nt, Human adenovirus C
uaaccaccaccg

SEQ ID NO: 3915131 - RNA, 23 nt, Human adenovirus C
uaaccuaaaugccaaccuaugga

SEQ ID NO: 3915132 - RNA, 18 nt, Human adenovirus C
uaacugacaccuaucaag

SEQ ID NO: 3915133 - RNA, 18 nt, Human adenovirus C
uaagcauaacauggugug

SEQ ID NO: 3915134 - RNA, 16 nt, Human adenovirus C
uaaguuugccacacaa

SEQ ID NO: 3915135 - RNA, 22 nt, Human adenovirus C
uaauagcgcccuucacggacag

SEQ ID NO: 3915136 - RNA, 18 nt, Human adenovirus C
uaaugucguuucucagca

SEQ ID NO: 3915137 - RNA, 21 nt, Human adenovirus C
uacaaauaggaucagacaaug

SEQ ID NO: 3915138 - RNA, 14 nt, Human adenovirus C
uacaacaaacagag

SEQ ID NO: 3915139 - RNA, 20 nt, Human adenovirus C
uacaagcuacccacccagcg

SEQ ID NO: 3915140 - RNA, 15 nt, Human adenovirus C
uacaagcuccucccg

SEQ ID NO: 3915141 - RNA, 14 nt, Human adenovirus C
uacaauuaccucag

SEQ ID NO: 3915142 - RNA, 16 nt, Human adenovirus C
uacagaggaggcuagg

SEQ ID NO: 3915143 - RNA, 22 nt, Human adenovirus C
uacagcccgggggaggcaagca

SEQ ID NO: 3915144 - RNA, 15 nt, Human adenovirus C
uacauuccagaaagc

SEQ ID NO: 3915145 - RNA, 13 nt, Human adenovirus C
uaccaucacggcg

SEQ ID NO: 3915146 - RNA, 22 nt, Human adenovirus C
uacccaccaccaguagcacuag

SEQ ID NO: 3915147 - RNA, 19 nt, Human adenovirus C
uaccccuucgaugaugccg

SEQ ID NO: 3915148 - RNA, 20 nt, Human adenovirus C
uaccggcaaccgccucagcu

SEQ ID NO: 3915149 - RNA, 17 nt, Human adenovirus C
uaccggcacuucuucuu

SEQ ID NO: 3915150 - RNA, 17 nt, Human adenovirus C
uaccgugaaugcccucc

SEQ ID NO: 3915151 - RNA, 20 nt, Human adenovirus C
uaccuaggucacuugcugac

SEQ ID NO: 3915152 - RNA, 15 nt, Human adenovirus C
uaccugagccccggg

SEQ ID NO: 3915153 - RNA, 13 nt, Human adenovirus C
uaccugcugacca

SEQ ID NO: 3915154 - RNA, 20 nt, Human adenovirus C
uaccuguguggaagccugga

SEQ ID NO: 3915155 - RNA, 22 nt, Human adenovirus C
aacgcucaucagugauauuaau

SEQ ID NO: 3915156 - RNA, 14 nt, Human adenovirus C
aacgcugggggcaa

SEQ ID NO: 3915157 - RNA, 21 nt, Human adenovirus C
aacggacuaucgcaacaccac

SEQ ID NO: 3915158 - RNA, 23 nt, Human adenovirus C
aacggauguggcaucccugaacu

SEQ ID NO: 3915159 - RNA, 18 nt, Human adenovirus C
aacggccgcuacgugccc

SEQ ID NO: 3915160 - RNA, 17 nt, Human adenovirus C
aacuaaaauuggcucug

SEQ ID NO: 3915161 - RNA, 22 nt, Human adenovirus C
aacucaggucaaaaaagcauuu

SEQ ID NO: 3915162 - RNA, 18 nt, Human adenovirus C
aacucccuuagaaccaaa

SEQ ID NO: 3915163 - RNA, 18 nt, Human adenovirus C
aacucuuacaccuucucc

SEQ ID NO: 3915164 - RNA, 18 nt, Human adenovirus C
aagaacuauggcagcaag

SEQ ID NO: 3915165 - RNA, 21 nt, Human adenovirus C
aagaacuauggcagcaaggcc

SEQ ID NO: 3915166 - RNA, 15 nt, Human adenovirus C
aagacagaaacacag

SEQ ID NO: 3915167 - RNA, 14 nt, Human adenovirus C
aagacauauuuccu

SEQ ID NO: 3915168 - RNA, 14 nt, Human adenovirus C
aagacugggacagc

SEQ ID NO: 3915169 - RNA, 22 nt, Human adenovirus C
aagagcuucuacaacgaccagg

SEQ ID NO: 3915170 - RNA, 13 nt, Human adenovirus C
aagcaagaccagg

SEQ ID NO: 3915171 - RNA, 13 nt, Human adenovirus C
aagcaaugacagc

SEQ ID NO: 3915172 - RNA, 12 nt, Human adenovirus C
aagcagcuggcc

SEQ ID NO: 3915173 - RNA, 12 nt, Human adenovirus C
aagcagggcuuc

SEQ ID NO: 3915174 - RNA, 17 nt, Human adenovirus C
aagcagguuccugagca

SEQ ID NO: 3915175 - RNA, 12 nt, Human adenovirus C
aagcaugaugca

SEQ ID NO: 3915176 - RNA, 14 nt, Human adenovirus C
aagcccgccaagag

SEQ ID NO: 3915177 - RNA, 15 nt, Human adenovirus C
aagcccgucucuggg

SEQ ID NO: 3915178 - RNA, 21 nt, Human adenovirus C
aagccgcucauggcgcagcug

SEQ ID NO: 3915179 - RNA, 12 nt, Human adenovirus C
aagccuggaccg

SEQ ID NO: 3915180 - RNA, 13 nt, Human adenovirus C
aagcuaaaauaca

SEQ ID NO: 3915181 - RNA, 12 nt, Human adenovirus C
aagcuaaaccug

SEQ ID NO: 3915182 - RNA, 19 nt, Human adenovirus C
aagcuaaugauggccgcag

SEQ ID NO: 3915183 - RNA, 13 nt, Human adenovirus C
aagcugcagcugc

SEQ ID NO: 3915184 - RNA, 14 nt, Human adenovirus C
aagcugcagcugcc

SEQ ID NO: 3915185 - RNA, 18 nt, Human adenovirus C
aagcuggcgucugugaga

SEQ ID NO: 3915186 - RNA, 22 nt, Human adenovirus C
aagcuuccgaggccgaagaggu

SEQ ID NO: 3915187 - RNA, 15 nt, Human adenovirus C
aaggccucaaggcgc

SEQ ID NO: 3915188 - RNA, 21 nt, Human adenovirus C
aaggccuggccaguguuugag

SEQ ID NO: 3915189 - RNA, 14 nt, Human adenovirus C
aaggcuacaggggc

SEQ ID NO: 3915190 - RNA, 15 nt, Human adenovirus C
aaggggguggugugu

SEQ ID NO: 3915191 - RNA, 20 nt, Human adenovirus C
aaggugguagauggccuggc

SEQ ID NO: 3915192 - RNA, 13 nt, Human adenovirus C
aagucacugugga

SEQ ID NO: 3915193 - RNA, 16 nt, Human adenovirus C
aagucuaagcagccgc

SEQ ID NO: 3915194 - RNA, 14 nt, Human adenovirus C
aaguuugccacaca

SEQ ID NO: 3915195 - RNA, 18 nt, Human adenovirus C
aaguuugccacacaaccu

SEQ ID NO: 3915196 - RNA, 21 nt, Human adenovirus C
aauaagccacacccagccaac

SEQ ID NO: 3915197 - RNA, 21 nt, Human adenovirus C
aauaauuuucaucucgccacc

SEQ ID NO: 3915198 - RNA, 22 nt, Human adenovirus C
aauaccuguguggaagccugga

SEQ ID NO: 3915199 - RNA, 17 nt, Human adenovirus C
aauacuaaaaaacugga

SEQ ID NO: 3915200 - RNA, 17 nt, Human adenovirus C
aauacugcgcgcugacu

SEQ ID NO: 3915201 - RNA, 14 nt, Human adenovirus C
aauaggcaaaaccg

SEQ ID NO: 3915202 - RNA, 21 nt, Human adenovirus C
aauauugcgcuguaccugcca

SEQ ID NO: 3915203 - RNA, 13 nt, Human adenovirus C
aauauuggcuacc

SEQ ID NO: 3915204 - RNA, 13 nt, Human adenovirus C
aaucaaacucaca

SEQ ID NO: 3915205 - RNA, 23 nt, Human adenovirus C
aauccacagcggcggcagcagca

SEQ ID NO: 3915206 - RNA, 21 nt, Human adenovirus C
aauccaguggacuaaacuuug

SEQ ID NO: 3915207 - RNA, 23 nt, Human adenovirus C
aaucuaacuuuuagcuuaaugac

SEQ ID NO: 3915208 - RNA, 19 nt, Human adenovirus C
aaugaaaaaauucauagau

SEQ ID NO: 3915209 - RNA, 16 nt, Human adenovirus C
aaugcagaaacacaag

SEQ ID NO: 3915210 - RNA, 15 nt, Human adenovirus C
aaugcaucaaacaau

SEQ ID NO: 3915211 - RNA, 14 nt, Human adenovirus C
aaugccuguuugaa

SEQ ID NO: 3915212 - RNA, 20 nt, Human adenovirus C
aaugggcccacgggcggcgg

SEQ ID NO: 3915213 - RNA, 14 nt, Human adenovirus C
aauucaccaccucc

SEQ ID NO: 3915214 - RNA, 12 nt, Human adenovirus C
aauucccacgcc

SEQ ID NO: 3915215 - RNA, 14 nt, Human adenovirus C
acccgcuguuccuu

SEQ ID NO: 3915216 - RNA, 16 nt, Human adenovirus C
acccggcacugccgcc

SEQ ID NO: 3915217 - RNA, 17 nt, Human adenovirus C
acccggcgccagcaccu

SEQ ID NO: 3915218 - RNA, 22 nt, Human adenovirus C
acccggcggugcgggcggcgcu

SEQ ID NO: 3915219 - RNA, 21 nt, Human adenovirus C
acccugcgucgcaaccaggaa

SEQ ID NO: 3915220 - RNA, 11 nt, Human adenovirus C
accgcagaccc

SEQ ID NO: 3915221 - RNA, 15 nt, Human adenovirus C
accgcagacccugcu

SEQ ID NO: 3915222 - RNA, 14 nt, Human adenovirus C
accgcggaugcugg

SEQ ID NO: 3915223 - RNA, 16 nt, Human adenovirus C
accgcgucacgcacga

SEQ ID NO: 3915224 - RNA, 15 nt, Human adenovirus C
accgcgucaggaggg

SEQ ID NO: 3915225 - RNA, 20 nt, Human adenovirus C
accgcucccuggucugcaau

SEQ ID NO: 3915226 - RNA, 23 nt, Human adenovirus C
accggagugcugggccagcacac

SEQ ID NO: 3915227 - RNA, 16 nt, Human adenovirus C
accguaaaccugagcc

SEQ ID NO: 3915228 - RNA, 15 nt, Human adenovirus C
accgucuggcugcuc

SEQ ID NO: 3915229 - RNA, 22 nt, Human adenovirus C
accguggcgggcggcagcgggu

SEQ ID NO: 3915230 - RNA, 23 nt, Human adenovirus C
accguggcgggcggcagcgggug

SEQ ID NO: 3915231 - RNA, 17 nt, Human adenovirus C
accuagaugugggagac

SEQ ID NO: 3915232 - RNA, 22 nt, Human adenovirus C
accucagcgccucccaaaagac

SEQ ID NO: 3915233 - RNA, 21 nt, Human adenovirus C
accugcgcugggccccaagcc

SEQ ID NO: 3915234 - RNA, 14 nt, Human adenovirus C
accugcggggcgau

SEQ ID NO: 3915235 - RNA, 20 nt, Human adenovirus C
accugcuuuacggauuuguc

SEQ ID NO: 3915236 - RNA, 19 nt, Human adenovirus C
accuggccaaccaggcagu

SEQ ID NO: 3915237 - RNA, 13 nt, Human adenovirus C
accugugcugcca

SEQ ID NO: 3915238 - RNA, 19 nt, Human adenovirus C
accuguguggaagccugga

SEQ ID NO: 3915239 - RNA, 13 nt, Human adenovirus C
accuucaaaucaa

SEQ ID NO: 3915240 - RNA, 22 nt, Human adenovirus C
accuugagcgacgaccugggcg

SEQ ID NO: 3915241 - RNA, 21 nt, Human adenovirus C
acgaacccguaucgacccgcg

SEQ ID NO: 3915242 - RNA, 22 nt, Human adenovirus C
acgaaggaggcguaggagucgc

SEQ ID NO: 3915243 - RNA, 13 nt, Human adenovirus C
acgagcauacuuu

SEQ ID NO: 3915244 - RNA, 17 nt, Human adenovirus C
acgagcggccgccgcag

SEQ ID NO: 3915245 - RNA, 23 nt, Human adenovirus C
acgaggaggaauacugggacagu

SEQ ID NO: 3915246 - RNA, 13 nt, Human adenovirus C
acgcacgaaggag

SEQ ID NO: 3915247 - RNA, 11 nt, Human adenovirus C
acgccaagaaa

SEQ ID NO: 3915248 - RNA, 22 nt, Human adenovirus C
acgccaccguuuuuacccaccc

SEQ ID NO: 3915249 - RNA, 16 nt, Human adenovirus C
acgcccaacucgcgcc

SEQ ID NO: 3915250 - RNA, 15 nt, Human adenovirus C
acgcccacgccgcca

SEQ ID NO: 3915251 - RNA, 16 nt, Human adenovirus C
acgcccacgccgccac

SEQ ID NO: 3915252 - RNA, 17 nt, Human adenovirus C
acgcccuacauguggag

SEQ ID NO: 3915253 - RNA, 12 nt, Human adenovirus C
acgcccuucucg

SEQ ID NO: 3915254 - RNA, 20 nt, Human adenovirus C
acgccucggaguaccugagc

SEQ ID NO: 3915255 - RNA, 22 nt, Human adenovirus C
acgccugcuuaaaacccugcaa

SEQ ID NO: 3915256 - RNA, 13 nt, Human adenovirus C
acgcgacgagaaa

SEQ ID NO: 3915257 - RNA, 16 nt, Human adenovirus C
acgcgcccuggaggca

SEQ ID NO: 3915258 - RNA, 13 nt, Human adenovirus C
acgcgcgcgcagc

SEQ ID NO: 3915259 - RNA, 13 nt, Human adenovirus C
acgcggcggcaga

SEQ ID NO: 3915260 - RNA, 21 nt, Human adenovirus C
acgcgggcgcugaccugcgcu

SEQ ID NO: 3915261 - RNA, 19 nt, Human adenovirus C
acgcggguuuggcagggcg

SEQ ID NO: 3915262 - RNA, 19 nt, Human adenovirus C
acgcggugguggaggaggc

SEQ ID NO: 3915263 - RNA, 23 nt, Human adenovirus C
acgcuggaccugccuccccccgc

SEQ ID NO: 3915264 - RNA, 21 nt, Human adenovirus C
acgcugguggcuaccucuccg

SEQ ID NO: 3915265 - RNA, 22 nt, Human adenovirus C
acgcugguggcuaccucuccgc

SEQ ID NO: 3915266 - RNA, 17 nt, Human adenovirus C
acggaggauaggguggc

SEQ ID NO: 3915267 - RNA, 16 nt, Human adenovirus C
gaaugagcuccacagg

SEQ ID NO: 3915268 - RNA, 13 nt, Human adenovirus C
gaauucauucaga

SEQ ID NO: 3915269 - RNA, 14 nt, Human adenovirus C
gaauuguugcuaca

SEQ ID NO: 3915270 - RNA, 18 nt, Human adenovirus C
gaauuugaagagcuuuug

SEQ ID NO: 3915271 - RNA, 15 nt, Human adenovirus C
gacaaaagaacccac

SEQ ID NO: 3915272 - RNA, 18 nt, Human adenovirus C
gacaaagcccaagaaauc

SEQ ID NO: 3915273 - RNA, 17 nt, Human adenovirus C
gacacagaaaccgggcc

SEQ ID NO: 3915274 - RNA, 15 nt, Human adenovirus C
gacacaugucgcccu

SEQ ID NO: 3915275 - RNA, 16 nt, Human adenovirus C
gacaccuccgcaccac

SEQ ID NO: 3915276 - RNA, 22 nt, Human adenovirus C
gacacugcagcaggugcugccc

SEQ ID NO: 3915277 - RNA, 22 nt, Human adenovirus C
gacaugcagggcacccuccccu

SEQ ID NO: 3915278 - RNA, 13 nt, Human adenovirus C
gaccaaaacggug

SEQ ID NO: 3915279 - RNA, 16 nt, Human adenovirus C
gaccaaccggcggcag

SEQ ID NO: 3915280 - RNA, 20 nt, Human adenovirus C
gacccgccgggagagggggc

SEQ ID NO: 3915281 - RNA, 18 nt, Human adenovirus C
gacccuccuuugcacucc

SEQ ID NO: 3915282 - RNA, 17 nt, Human adenovirus C
gacccuggugcugccaa

SEQ ID NO: 3915283 - RNA, 17 nt, Human adenovirus C
gaccgauguaaggguuc

SEQ ID NO: 3915284 - RNA, 12 nt, Human adenovirus C
gaccgccugcuu

SEQ ID NO: 3915285 - RNA, 19 nt, Human adenovirus C
gaccgcgagcugaugcaca

SEQ ID NO: 3915286 - RNA, 12 nt, Human adenovirus C
gaccugcgcugg

SEQ ID NO: 3915287 - RNA, 14 nt, Human adenovirus C
gaccugcgcugggc

SEQ ID NO: 3915288 - RNA, 12 nt, Human adenovirus C
gaccugcuugag

SEQ ID NO: 3915289 - RNA, 16 nt, Human adenovirus C
gacgacuggcgccagg

SEQ ID NO: 3915290 - RNA, 15 nt, Human adenovirus C
gacgagcggccgccg

SEQ ID NO: 3915291 - RNA, 23 nt, Human adenovirus C
gacgaggaccugcuugagcaggc

SEQ ID NO: 3915292 - RNA, 18 nt, Human adenovirus C
gacgcgcccuggaggcag

SEQ ID NO: 3915293 - RNA, 21 nt, Human adenovirus C
gacgcgcccuggaggcagcug

SEQ ID NO: 3915294 - RNA, 22 nt, Human adenovirus C
gacgcggcgguugaucuccuga

SEQ ID NO: 3915295 - RNA, 18 nt, Human adenovirus C
gacgcguuccggcagcag

SEQ ID NO: 3915296 - RNA, 15 nt, Human adenovirus C
gacgcucggugcgag

SEQ ID NO: 3915297 - RNA, 19 nt, Human adenovirus C
gacggccugguaggcgcag

SEQ ID NO: 3915298 - RNA, 18 nt, Human adenovirus C
gacggcggccuggcgcaa

SEQ ID NO: 3915299 - RNA, 15 nt, Human adenovirus C
gacgugguaaaggug

SEQ ID NO: 3915300 - RNA, 19 nt, Human adenovirus C
gacucagggucgcaggggc

SEQ ID NO: 3915301 - RNA, 18 nt, Human adenovirus C
gacucggcagacgacagc

SEQ ID NO: 3915302 - RNA, 13 nt, Human adenovirus C
gacucugacaaag

SEQ ID NO: 3915303 - RNA, 20 nt, Human adenovirus C
gacugcagccuccgccgccg

SEQ ID NO: 3915304 - RNA, 18 nt, Human adenovirus C
gacugcgcguaacccuga

SEQ ID NO: 3915305 - RNA, 17 nt, Human adenovirus C
gacugggcgugcagacc

SEQ ID NO: 3915306 - RNA, 17 nt, Human adenovirus C
gacugguuccuggugca

SEQ ID NO: 3915307 - RNA, 22 nt, Human adenovirus C
gacugugguugcuucaugcuag

SEQ ID NO: 3915308 - RNA, 19 nt, Human adenovirus C
gacuugagaggccuguccu

SEQ ID NO: 3915309 - RNA, 15 nt, Human adenovirus C
gacuugcggcuggag

SEQ ID NO: 3915310 - RNA, 14 nt, Human adenovirus C
gacuuggaggagcg

SEQ ID NO: 3915311 - RNA, 13 nt, Human adenovirus C
gacuuggaggagg

SEQ ID NO: 3915312 - RNA, 19 nt, Human adenovirus C
gacuuugcuuuccugagcc

SEQ ID NO: 3915313 - RNA, 19 nt, Human adenovirus C
gacuuuguaagcgcgcugg

SEQ ID NO: 3915314 - RNA, 20 nt, Human adenovirus C
gagagcucgguguaccugag

SEQ ID NO: 3915315 - RNA, 15 nt, Human adenovirus C
gagagcugcagcugc

SEQ ID NO: 3915316 - RNA, 11 nt, Human adenovirus C
gagaggccugu

SEQ ID NO: 3915317 - RNA, 17 nt, Human adenovirus C
gagaguucgacagaauc

SEQ ID NO: 3915318 - RNA, 22 nt, Human adenovirus C
gagauacuacauggacaaaaga

SEQ ID NO: 3915319 - RNA, 15 nt, Human adenovirus C
gagauugagcuccac

SEQ ID NO: 3915320 - RNA, 13 nt, Human adenovirus C
gagcagacgguga

SEQ ID NO: 3915321 - RNA, 20 nt, Human adenovirus C
gagcauaguggugcaggagc

SEQ ID NO: 3915322 - RNA, 17 nt, Human adenovirus C
gagccaggugagcucug

SEQ ID NO: 3915323 - RNA, 12 nt, Human adenovirus C
gagcccacccuu

SEQ ID NO: 3915324 - RNA, 20 nt, Human adenovirus C
caccgggacugggcgugcag

SEQ ID NO: 3915325 - RNA, 15 nt, Human adenovirus C
caccgucacccagca

SEQ ID NO: 3915326 - RNA, 19 nt, Human adenovirus C
caccgucgcaugcgcggcg

SEQ ID NO: 3915327 - RNA, 13 nt, Human adenovirus C
caccuacagccug

SEQ ID NO: 3915328 - RNA, 19 nt, Human adenovirus C
caccuaugacaagcgcuuu

SEQ ID NO: 3915329 - RNA, 17 nt, Human adenovirus C
caccuauuaccggcugc

SEQ ID NO: 3915330 - RNA, 16 nt, Human adenovirus C
caccuccgcaccacuu

SEQ ID NO: 3915331 - RNA, 21 nt, Human adenovirus C
caccucuggggauggcgggcg

SEQ ID NO: 3915332 - RNA, 19 nt, Human adenovirus C
caccuguucucaccgcgcg

SEQ ID NO: 3915333 - RNA, 24 nt, Human adenovirus C
caccuucuuccccauggcccacaa

SEQ ID NO: 3915334 - RNA, 15 nt, Human adenovirus C
caccuuucgccaggg

SEQ ID NO: 3915335 - RNA, 22 nt, Human adenovirus C
caccuuuuguuccaccgcucug

SEQ ID NO: 3915336 - RNA, 21 nt, Human adenovirus C
cacgagccaggugagcucugg

SEQ ID NO: 3915337 - RNA, 21 nt, Human adenovirus C
cacgcacgaaggaggcguagg

SEQ ID NO: 3915338 - RNA, 22 nt, Human adenovirus C
cacgcagacacgaucggcaggc

SEQ ID NO: 3915339 - RNA, 15 nt, Human adenovirus C
cacgcagcaccuugc

SEQ ID NO: 3915340 - RNA, 13 nt, Human adenovirus C
cacgcccccuucg

SEQ ID NO: 3915341 - RNA, 19 nt, Human adenovirus C
cacgccgccaccagugucc

SEQ ID NO: 3915342 - RNA, 18 nt, Human adenovirus C
cacgcucaagggcgaggc

SEQ ID NO: 3915343 - RNA, 14 nt, Human adenovirus C
cacgcuggccagca

SEQ ID NO: 3915344 - RNA, 13 nt, Human adenovirus C
cacggacgaggag

SEQ ID NO: 3915345 - RNA, 16 nt, Human adenovirus C
cacggacgaggaggaa

SEQ ID NO: 3915346 - RNA, 19 nt, Human adenovirus C
cacggugaaggggugcgcu

SEQ ID NO: 3915347 - RNA, 12 nt, Human adenovirus C
ccggcaccaccg

SEQ ID NO: 3915348 - RNA, 13 nt, Human adenovirus C
ccggcccaggggc

SEQ ID NO: 3915349 - RNA, 15 nt, Human adenovirus C
ccggcccaggggcgu

SEQ ID NO: 3915350 - RNA, 19 nt, Human adenovirus C
ccggcccgaugaggccggc

SEQ ID NO: 3915351 - RNA, 20 nt, Human adenovirus C
ccggcccgaugaggccggcc

SEQ ID NO: 3915352 - RNA, 17 nt, Human adenovirus C
ccggccggacugcggcg

SEQ ID NO: 3915353 - RNA, 16 nt, Human adenovirus C
ccggccuuaacuccac

SEQ ID NO: 3915354 - RNA, 12 nt, Human adenovirus C
ccggcggcagaa

SEQ ID NO: 3915355 - RNA, 13 nt, Human adenovirus C
ccggcggcggugg

SEQ ID NO: 3915356 - RNA, 17 nt, Human adenovirus C
ccggcuaugcacugcag

SEQ ID NO: 3915357 - RNA, 18 nt, Human adenovirus C
ccggcucaccacccaggu

SEQ ID NO: 3915358 - RNA, 17 nt, Human adenovirus C
ccgggagagggggcagg

SEQ ID NO: 3915359 - RNA, 16 nt, Human adenovirus C
ccgggccuccaacugu

SEQ ID NO: 3915360 - RNA, 17 nt, Human adenovirus C
ccgggcgaagacggcgu

SEQ ID NO: 3915361 - RNA, 12 nt, Human adenovirus C
ccgggcugcgcg

SEQ ID NO: 3915362 - RNA, 23 nt, Human adenovirus C
ccggggaguaggcauccgcgccg

SEQ ID NO: 3915363 - RNA, 19 nt, Human adenovirus C
ccgggucagggcgcgggcu

SEQ ID NO: 3915364 - RNA, 22 nt, Human adenovirus C
ccguagaggagccuccaccggc

SEQ ID NO: 3915365 - RNA, 23 nt, Human adenovirus C
ccguaucgacccgcgagcuuaga

SEQ ID NO: 3915366 - RNA, 15 nt, Human adenovirus C
ccguccugcaggaau

SEQ ID NO: 3915367 - RNA, 17 nt, Human adenovirus C
ccgugcacgaccccugg

SEQ ID NO: 3915368 - RNA, 18 nt, Human adenovirus C
ccgugcacgaccccugga

SEQ ID NO: 3915369 - RNA, 16 nt, Human adenovirus C
ccgugcuuucacuuuc

SEQ ID NO: 3915370 - RNA, 11 nt, Human adenovirus C
ccguggagaca

SEQ ID NO: 3915371 - RNA, 20 nt, Human adenovirus C
ccguggagcuugagugcaug

SEQ ID NO: 3915372 - RNA, 15 nt, Human adenovirus C
ccguggucuggugga

SEQ ID NO: 3915373 - RNA, 22 nt, Human adenovirus C
ccguguucugacagggcccagu

SEQ ID NO: 3915374 - RNA, 22 nt, Human adenovirus C
ccguucaugggaaacuggcaag

SEQ ID NO: 3915375 - RNA, 17 nt, Human adenovirus C
ccguucgcacuggggcg

SEQ ID NO: 3915376 - RNA, 16 nt, Human adenovirus C
ccuaaaaaugucuuuc

SEQ ID NO: 3915377 - RNA, 12 nt, Human adenovirus C
ccuacugcaccg

SEQ ID NO: 3915378 - RNA, 23 nt, Human adenovirus C
ccuacuuucccagugcccgcugu

SEQ ID NO: 3915379 - RNA, 19 nt, Human adenovirus C
ccuauaccuuuuuaaugca

SEQ ID NO: 3915380 - RNA, 19 nt, Human adenovirus C
ccuaucagcagccgcgggc

SEQ ID NO: 3915381 - RNA, 16 nt, Human adenovirus C
ccucacccgcagcugc

SEQ ID NO: 3915382 - RNA, 15 nt, Human adenovirus C
ccucaggcgccgccg

SEQ ID NO: 3915383 - RNA, 22 nt, Human adenovirus C
ccuccgacugugguugcuucau

SEQ ID NO: 3915384 - RNA, 14 nt, Human adenovirus C
ccuccgcacccacu

SEQ ID NO: 3915385 - RNA, 18 nt, Human adenovirus C
ccuccgggcacagcagcg

SEQ ID NO: 3915386 - RNA, 16 nt, Human adenovirus C
ccuccucaccugccgg

SEQ ID NO: 3915387 - RNA, 15 nt, Human adenovirus C
ccuccucagcagcgg

SEQ ID NO: 3915388 - RNA, 19 nt, Human adenovirus C
ccuccuccugccaggcuca

SEQ ID NO: 3915389 - RNA, 12 nt, Human adenovirus C
ccuccugccagg

SEQ ID NO: 3915390 - RNA, 13 nt, Human adenovirus C
ccuccugccaggc

SEQ ID NO: 3915391 - RNA, 21 nt, Human adenovirus C
ccucgaccacugccgccgcca

SEQ ID NO: 3915392 - RNA, 21 nt, Human adenovirus C
ccucgcauagccgggucaggg

SEQ ID NO: 3915393 - RNA, 19 nt, Human adenovirus C
ccucggcgguggcagaugc

SEQ ID NO: 3915394 - RNA, 23 nt, Human adenovirus C
ccucgucagcguagucuggguca

SEQ ID NO: 3915395 - RNA, 19 nt, Human adenovirus C
ccugaacgggguguuugac

SEQ ID NO: 3915396 - RNA, 20 nt, Human adenovirus C
ccugaagcgccgacgaugcu

SEQ ID NO: 3915397 - RNA, 14 nt, Human adenovirus C
ccugacgggcggca

SEQ ID NO: 3915398 - RNA, 19 nt, Human adenovirus C
ccugagcaacuuguugggc

SEQ ID NO: 3915399 - RNA, 12 nt, Human adenovirus C
ccugagcagcug

SEQ ID NO: 3915400 - RNA, 13 nt, Human adenovirus C
ccugagcagcugc

SEQ ID NO: 3915401 - RNA, 18 nt, Human adenovirus C
ccugauuucugccagcgc

SEQ ID NO: 3915402 - RNA, 23 nt, Human adenovirus C
ccugcaaagggcccuggcuggca

SEQ ID NO: 3915403 - RNA, 21 nt, Human adenovirus C
ccugcacgucuagggcgcagu

SEQ ID NO: 3915404 - RNA, 12 nt, Human adenovirus C
ccugcacuuccc

SEQ ID NO: 3915405 - RNA, 21 nt, Human adenovirus C
ccugcgccguagcgccauugc

SEQ ID NO: 3915406 - RNA, 22 nt, Human adenovirus C
ccugcgucauuacccagggcca

SEQ ID NO: 3915407 - RNA, 14 nt, Human adenovirus C
ccugcugcaccugc

SEQ ID NO: 3915408 - RNA, 15 nt, Human adenovirus C
ccugcugcaccugcg

SEQ ID NO: 3915409 - RNA, 17 nt, Human adenovirus C
ccugcugugcgcuuccu

SEQ ID NO: 3915410 - RNA, 20 nt, Human adenovirus C
ccuggaacagcagcacaggc

SEQ ID NO: 3915411 - RNA, 20 nt, Human adenovirus C
ccuggcaaacggccaugggc

SEQ ID NO: 3915412 - RNA, 12 nt, Human adenovirus C
ccuggcgcggcu

SEQ ID NO: 3915413 - RNA, 23 nt, Human adenovirus C
ccugggcauagucucgccgcgcg

SEQ ID NO: 3915414 - RNA, 12 nt, Human adenovirus C
ccugucccuuuu

SEQ ID NO: 3915415 - RNA, 16 nt, Human adenovirus C
ccugucgucagcgcca

SEQ ID NO: 3915416 - RNA, 18 nt, Human adenovirus C
ccuuacuacaccuacucu

SEQ ID NO: 3915417 - RNA, 16 nt, Human adenovirus C
ccuuacuuuaucucaa

SEQ ID NO: 3915418 - RNA, 13 nt, Human adenovirus C
ccuucagcugggg

SEQ ID NO: 3915419 - RNA, 22 nt, Human adenovirus C
ccuuccccgucgaggcaccccc

SEQ ID NO: 3915420 - RNA, 19 nt, Human adenovirus C
ccuucgcagggccagcuga

SEQ ID NO: 3915421 - RNA, 16 nt, Human adenovirus C
ccuucugcagcuagcc

SEQ ID NO: 3915422 - RNA, 12 nt, Human adenovirus C
ccuugcaggcgc

SEQ ID NO: 3915423 - RNA, 16 nt, Human adenovirus C
ccuugcggcagucugc

SEQ ID NO: 3915424 - RNA, 23 nt, Human adenovirus C
ccuugcuagacugcuccuucagc

SEQ ID NO: 3915425 - RNA, 22 nt, Human adenovirus C
ccuuguccuccgggcacagcag

SEQ ID NO: 3915426 - RNA, 22 nt, Human adenovirus C
ccuuucuaccggcacuucuucu

SEQ ID NO: 3915427 - RNA, 15 nt, Human adenovirus C
ccuuuggacaccucc

SEQ ID NO: 3915428 - RNA, 13 nt, Human adenovirus C
ccuuuuacugcug

SEQ ID NO: 3915429 - RNA, 22 nt, Human adenovirus C
ccuuuucuggaccucccggcca

SEQ ID NO: 3915430 - RNA, 21 nt, Human adenovirus C
cgaaccuuuggacaccuccca

SEQ ID NO: 3915431 - RNA, 20 nt, Human adenovirus C
cgaaggcucgcguccaggcc

SEQ ID NO: 3915432 - RNA, 13 nt, Human adenovirus C
cgaaguaaguuug

SEQ ID NO: 3915433 - RNA, 15 nt, Human adenovirus C
cgaaugagcuccaca

SEQ ID NO: 3915434 - RNA, 14 nt, Human adenovirus C
cgaccacagcaacu

SEQ ID NO: 3915435 - RNA, 16 nt, Human adenovirus C
cgaccggcaaggcaau

SEQ ID NO: 3915436 - RNA, 22 nt, Human adenovirus C
cgacgggccgaacacucgugcu

SEQ ID NO: 3915437 - RNA, 18 nt, Human adenovirus C
cgacuacgguaccgcgcg

SEQ ID NO: 3915438 - RNA, 15 nt, Human adenovirus C
cgacuggcgccaggu

SEQ ID NO: 3915439 - RNA, 22 nt, Human adenovirus C
cgacuggcgccaggucauggac

SEQ ID NO: 3915440 - RNA, 15 nt, Human adenovirus C
cgagaaggaggacag

SEQ ID NO: 3915441 - RNA, 19 nt, Human adenovirus C
cgagacguacuucagccug

SEQ ID NO: 3915442 - RNA, 16 nt, Human adenovirus C
cgagcccaaaguccag

SEQ ID NO: 3915443 - RNA, 21 nt, Human adenovirus C
cgaggagcugaggcccgauca

SEQ ID NO: 3915444 - RNA, 19 nt, Human adenovirus C
cgaggaugaagaagaggaa

SEQ ID NO: 3915445 - RNA, 14 nt, Human adenovirus C
cgaggcagcggcag

SEQ ID NO: 3915446 - RNA, 16 nt, Human adenovirus C
cgaggcagcggcagaa

SEQ ID NO: 3915447 - RNA, 17 nt, Human adenovirus C
cgaggccguggcgcagc

SEQ ID NO: 3915448 - RNA, 21 nt, Human adenovirus C
cgagggacaggcuuaccccgc

SEQ ID NO: 3915449 - RNA, 12 nt, Human adenovirus C
cgagggccagcu

SEQ ID NO: 3915450 - RNA, 17 nt, Human adenovirus C
cgagguggaacugcugc

SEQ ID NO: 3915451 - RNA, 13 nt, Human adenovirus C
cggaggugcugcu

SEQ ID NO: 3915452 - RNA, 16 nt, Human adenovirus C
cggaggugcugcugau

SEQ ID NO: 3915453 - RNA, 22 nt, Human adenovirus C
cggauagcaagacucugacaaa

SEQ ID NO: 3915454 - RNA, 18 nt, Human adenovirus C
cggcagcggcagcaacag

SEQ ID NO: 3915455 - RNA, 21 nt, Human adenovirus C
cggcagucugcagcgcugcca

SEQ ID NO: 3915456 - RNA, 21 nt, Human adenovirus C
cggcaugcgucgugcgcacca

SEQ ID NO: 3915457 - RNA, 18 nt, Human adenovirus C
cggccaaucaagcaggug

SEQ ID NO: 3915458 - RNA, 13 nt, Human adenovirus C
cggccgcacuggg

SEQ ID NO: 3915459 - RNA, 16 nt, Human adenovirus C
cggccgccgcagcagc

SEQ ID NO: 3915460 - RNA, 21 nt, Human adenovirus C
cggccugguaggcgcagcauc

SEQ ID NO: 3915461 - RNA, 19 nt, Human adenovirus C
cggcgacaccuuugccaca

SEQ ID NO: 3915462 - RNA, 20 nt, Human adenovirus C
cggcgacaccuuugccacac

SEQ ID NO: 3915463 - RNA, 20 nt, Human adenovirus C
cggcgacagugucgcgcacc

SEQ ID NO: 3915464 - RNA, 18 nt, Human adenovirus C
cggcgacgacggcgcacc

SEQ ID NO: 3915465 - RNA, 14 nt, Human adenovirus C
cggcgccagcaccu

SEQ ID NO: 3915466 - RNA, 12 nt, Human adenovirus C
cggcgccagugg

SEQ ID NO: 3915467 - RNA, 14 nt, Human adenovirus C
cggcgcugcagagc

SEQ ID NO: 3915468 - RNA, 13 nt, Human adenovirus C
cggcggcagcagc

SEQ ID NO: 3915469 - RNA, 18 nt, Human adenovirus C
cggcgggcggugggccgc

SEQ ID NO: 3915470 - RNA, 16 nt, Human adenovirus C
cggcggugcgggcggc

SEQ ID NO: 3915471 - RNA, 20 nt, Human adenovirus C
cggcguaguuucgcaggcgc

SEQ ID NO: 3915472 - RNA, 17 nt, Human adenovirus C
cggcuaugcacugcagg

SEQ ID NO: 3915473 - RNA, 17 nt, Human adenovirus C
cggcucaccacccaggu

SEQ ID NO: 3915474 - RNA, 17 nt, Human adenovirus C
cggcugaagcagggcca

SEQ ID NO: 3915475 - RNA, 20 nt, Human adenovirus C
cggcugaagcagggccaggu

SEQ ID NO: 3915476 - RNA, 15 nt, Human adenovirus C
gagcccacccuucuu

SEQ ID NO: 3915477 - RNA, 14 nt, Human adenovirus C
gagccccgggcugg

SEQ ID NO: 3915478 - RNA, 19 nt, Human adenovirus C
gagcccgaggagaugcggg

SEQ ID NO: 3915479 - RNA, 15 nt, Human adenovirus C
gagcccguguucuga

SEQ ID NO: 3915480 - RNA, 12 nt, Human adenovirus C
gagccggcggcg

SEQ ID NO: 3915481 - RNA, 17 nt, Human adenovirus C
gagcgcaggguuugguu

SEQ ID NO: 3915482 - RNA, 21 nt, Human adenovirus C
gagcgcauccacaaggccgug

SEQ ID NO: 3915483 - RNA, 19 nt, Human adenovirus C
gagcgcuccuuuuggcuuc

SEQ ID NO: 3915484 - RNA, 15 nt, Human adenovirus C
gagcgguggcgccuu

SEQ ID NO: 3915485 - RNA, 13 nt, Human adenovirus C
gagcucaacuccc

SEQ ID NO: 3915486 - RNA, 21 nt, Human adenovirus C
gagcucggcgacagugucgcg

SEQ ID NO: 3915487 - RNA, 14 nt, Human adenovirus C
gagcuuagaaauag

SEQ ID NO: 3915488 - RNA, 16 nt, Human adenovirus C
gagcuugaucugcugg

SEQ ID NO: 3915489 - RNA, 17 nt, Human adenovirus C
gaggaagguccuccucc

SEQ ID NO: 3915490 - RNA, 21 nt, Human adenovirus C
gaggaagguccuccucccucc

SEQ ID NO: 3915491 - RNA, 23 nt, Human adenovirus C
gaggaccugcuugagcaggccaa

SEQ ID NO: 3915492 - RNA, 15 nt, Human adenovirus C
gaggagcucaaccca

SEQ ID NO: 3915493 - RNA, 16 nt, Human adenovirus C
gaggaggaauacuggg

SEQ ID NO: 3915494 - RNA, 19 nt, Human adenovirus C
gaggaggacuuugagcccg

SEQ ID NO: 3915495 - RNA, 16 nt, Human adenovirus C
gaggcauucagggaug

SEQ ID NO: 3915496 - RNA, 17 nt, Human adenovirus C
gaggccggccuggucua

SEQ ID NO: 3915497 - RNA, 20 nt, Human adenovirus C
gagggcaacccaacaccuag

SEQ ID NO: 3915498 - RNA, 16 nt, Human adenovirus C
gagggccgcuggcugc

SEQ ID NO: 3915499 - RNA, 21 nt, Human adenovirus C
gagggcuuuaggaucaccuac

SEQ ID NO: 3915500 - RNA, 15 nt, Human adenovirus C
gaguauaauaaauac

SEQ ID NO: 3915501 - RNA, 15 nt, Human adenovirus C
gagucggugagcucc

SEQ ID NO: 3915502 - RNA, 21 nt, Human adenovirus C
gagucuccagauaucaaccca

SEQ ID NO: 3915503 - RNA, 19 nt, Human adenovirus C
gagugggaauuugagcccc

SEQ ID NO: 3915504 - RNA, 17 nt, Human adenovirus C
gauacacuaacaguagu

SEQ ID NO: 3915505 - RNA, 13 nt, Human adenovirus C
gauagcggccggg

SEQ ID NO: 3915506 - RNA, 15 nt, Human adenovirus C
gaucaccucugggga

SEQ ID NO: 3915507 - RNA, 16 nt, Human adenovirus C
gaucaucuccccgcgg

SEQ ID NO: 3915508 - RNA, 20 nt, Human adenovirus C
gaucgcacccuuuggcgcau

SEQ ID NO: 3915509 - RNA, 20 nt, Human adenovirus C
gaucucuuccuccuggagau

SEQ ID NO: 3915510 - RNA, 14 nt, Human adenovirus C
gaucugcuggcgca

SEQ ID NO: 3915511 - RNA, 20 nt, Human adenovirus C
gaugaaaagaaaaugccuug

SEQ ID NO: 3915512 - RNA, 16 nt, Human adenovirus C
gaugaagaugaagaag

SEQ ID NO: 3915513 - RNA, 14 nt, Human adenovirus C
gaugcacagccugc

SEQ ID NO: 3915514 - RNA, 14 nt, Human adenovirus C
gaugcgccccccuc

SEQ ID NO: 3915515 - RNA, 17 nt, Human adenovirus C
gauggcaaugggcccac

SEQ ID NO: 3915516 - RNA, 22 nt, Human adenovirus C
gauggcaaugggcccacgggcg

SEQ ID NO: 3915517 - RNA, 15 nt, Human adenovirus C
gauggcgcaggcggc

SEQ ID NO: 3915518 - RNA, 16 nt, Human adenovirus C
gauguaaauauggaaa

SEQ ID NO: 3915519 - RNA, 21 nt, Human adenovirus C
gauguaauuaaaguaggcggu

SEQ ID NO: 3915520 - RNA, 14 nt, Human adenovirus C
gauguuaacauggu

SEQ ID NO: 3915521 - RNA, 14 nt, Human adenovirus C
gauguuguggccca

SEQ ID NO: 3915522 - RNA, 13 nt, Human adenovirus C
gauuaaacauggc

SEQ ID NO: 3915523 - RNA, 20 nt, Human adenovirus C
gauucaucaaacaacaugga

SEQ ID NO: 3915524 - RNA, 23 nt, Human adenovirus C
gauuucugccagcgccugcacug

SEQ ID NO: 3915525 - RNA, 13 nt, Human adenovirus C
gcaacaagaaaac

SEQ ID NO: 3915526 - RNA, 18 nt, Human adenovirus C
gcaacaucaacaacagcu

SEQ ID NO: 3915527 - RNA, 15 nt, Human adenovirus C
gcaaccaccgcuccu

SEQ ID NO: 3915528 - RNA, 23 nt, Human adenovirus C
agugguuuuguacagugaagaug

SEQ ID NO: 3915529 - RNA, 23 nt, Human adenovirus C
aguguaaaaagggccaaguacag

SEQ ID NO: 3915530 - RNA, 11 nt, Human adenovirus C
agugucacugu

SEQ ID NO: 3915531 - RNA, 23 nt, Human adenovirus C
agugucagccgcgcgcuggggca

SEQ ID NO: 3915532 - RNA, 14 nt, Human adenovirus C
agugucaugccaaa

SEQ ID NO: 3915533 - RNA, 15 nt, Human adenovirus C
aguuaagagagcugc

SEQ ID NO: 3915534 - RNA, 15 nt, Human adenovirus C
aguuaccagccacaa

SEQ ID NO: 3915535 - RNA, 23 nt, Human adenovirus C
aguucaugucgcuguccagcugc

SEQ ID NO: 3915536 - RNA, 17 nt, Human adenovirus C
aguucuugcaaggaagc

SEQ ID NO: 3915537 - RNA, 16 nt, Human adenovirus C
aguuggcccgcugccc

SEQ ID NO: 3915538 - RNA, 20 nt, Human adenovirus C
aguuguaguauauccacucu

SEQ ID NO: 3915539 - RNA, 20 nt, Human adenovirus C
aguuuaaaugggaugucaaa

SEQ ID NO: 3915540 - RNA, 17 nt, Human adenovirus C
auaaacacgcuggacau

SEQ ID NO: 3915541 - RNA, 17 nt, Human adenovirus C
auaaacauuccagcacc

SEQ ID NO: 3915542 - RNA, 15 nt, Human adenovirus C
auaaggugggggucu

SEQ ID NO: 3915543 - RNA, 23 nt, Human adenovirus C
auacaaccccaccaauguggaaa

SEQ ID NO: 3915544 - RNA, 16 nt, Human adenovirus C
auacacuuccucagga

SEQ ID NO: 3915545 - RNA, 16 nt, Human adenovirus C
auacagagacaggacu

SEQ ID NO: 3915546 - RNA, 11 nt, Human adenovirus C
auaccacugca

SEQ ID NO: 3915547 - RNA, 14 nt, Human adenovirus C
auaccacugcaaca

SEQ ID NO: 3915548 - RNA, 21 nt, Human adenovirus C
auaccuugacggaaccuucua

SEQ ID NO: 3915549 - RNA, 23 nt, Human adenovirus C
auacgcagauccuuccuaucaac

SEQ ID NO: 3915550 - RNA, 12 nt, Human adenovirus C
auacuaaauaca

SEQ ID NO: 3915551 - RNA, 12 nt, Human adenovirus C
auacugggacag

SEQ ID NO: 3915552 - RNA, 18 nt, Human adenovirus C
auagcggaugucagccuu

SEQ ID NO: 3915553 - RNA, 18 nt, Human adenovirus C
auaguggugcaggagcgc

SEQ ID NO: 3915554 - RNA, 14 nt, Human adenovirus C
auauccauaccuug

SEQ ID NO: 3915555 - RNA, 21 nt, Human adenovirus C
auaugcccuacauccuuccau

SEQ ID NO: 3915556 - RNA, 18 nt, Human adenovirus C
auauuaaugcaucucaua

SEQ ID NO: 3915557 - RNA, 15 nt, Human adenovirus C
aucaaacaauacuaa

SEQ ID NO: 3915558 - RNA, 18 nt, Human adenovirus C
aucaaagaagagaugcuc

SEQ ID NO: 3915559 - RNA, 13 nt, Human adenovirus C
aucaaucagccuc

SEQ ID NO: 3915560 - RNA, 17 nt, Human adenovirus C
aucaaucagccucgccc

SEQ ID NO: 3915561 - RNA, 18 nt, Human adenovirus C
aucaccgucacccagcac

SEQ ID NO: 3915562 - RNA, 20 nt, Human adenovirus C
aucaccuacgaugaccugga

SEQ ID NO: 3915563 - RNA, 15 nt, Human adenovirus C
aucacuuggugcugg

SEQ ID NO: 3915564 - RNA, 17 nt, Human adenovirus C
aucagccccccucucug

SEQ ID NO: 3915565 - RNA, 22 nt, Human adenovirus C
aucagccucgccccccuucucc

SEQ ID NO: 3915566 - RNA, 14 nt, Human adenovirus C
aucaggguccagag

SEQ ID NO: 3915567 - RNA, 20 nt, Human adenovirus C
auccaaaaccucaaaaugaa

SEQ ID NO: 3915568 - RNA, 13 nt, Human adenovirus C
auccacaaggccg

SEQ ID NO: 3915569 - RNA, 16 nt, Human adenovirus C
auccccccgccgccgc

SEQ ID NO: 3915570 - RNA, 15 nt, Human adenovirus C
auccgcaagcggcaa

SEQ ID NO: 3915571 - RNA, 22 nt, Human adenovirus C
aucgcuacaaccuccgcuccuc

SEQ ID NO: 3915572 - RNA, 15 nt, Human adenovirus C
aucuaugccaaacag

SEQ ID NO: 3915573 - RNA, 13 nt, Human adenovirus C
aucucagccgccu

SEQ ID NO: 3915574 - RNA, 12 nt, Human adenovirus C
aucucuuccucc

SEQ ID NO: 3915575 - RNA, 13 nt, Human adenovirus C
aucugcuccagag

SEQ ID NO: 3915576 - RNA, 16 nt, Human adenovirus C
aucuggcgccucugcg

SEQ ID NO: 3915577 - RNA, 14 nt, Human adenovirus C
augaagaagaggaa

SEQ ID NO: 3915578 - RNA, 18 nt, Human adenovirus C
augaagggcacgagcugc

SEQ ID NO: 3915579 - RNA, 21 nt, Human adenovirus C
augagcaaacaguacaaguug

SEQ ID NO: 3915580 - RNA, 13 nt, Human adenovirus C
augagcaaggaaa

SEQ ID NO: 3915581 - RNA, 13 nt, Human adenovirus C
augagcuccacag

SEQ ID NO: 3915582 - RNA, 16 nt, Human adenovirus C
augagcuccacagguc

SEQ ID NO: 3915583 - RNA, 19 nt, Human adenovirus C
augaggaagguccuccucc

SEQ ID NO: 3915584 - RNA, 16 nt, Human adenovirus C
augauuuugaggaggc

SEQ ID NO: 3915585 - RNA, 18 nt, Human adenovirus C
augcagaaacacaagcua

SEQ ID NO: 3915586 - RNA, 16 nt, Human adenovirus C
augccauagaugccau

SEQ ID NO: 3915587 - RNA, 17 nt, Human adenovirus C
augccaucuugaacccg

SEQ ID NO: 3915588 - RNA, 16 nt, Human adenovirus C
augccgcaguggucuu

SEQ ID NO: 3915589 - RNA, 19 nt, Human adenovirus C
augccugcgcggccuuccg

SEQ ID NO: 3915590 - RNA, 20 nt, Human adenovirus C
augcgccacuggcagggaca

SEQ ID NO: 3915591 - RNA, 17 nt, Human adenovirus C
augcgccccccuccuca

SEQ ID NO: 3915592 - RNA, 17 nt, Human adenovirus C
augcgcgagggacaggc

SEQ ID NO: 3915593 - RNA, 20 nt, Human adenovirus C
augcguccaugucgccgcca

SEQ ID NO: 3915594 - RNA, 21 nt, Human adenovirus C
augcuaaugcggcaggaggga

SEQ ID NO: 3915595 - RNA, 17 nt, Human adenovirus C
augcuucuaaauagcua

SEQ ID NO: 3915596 - RNA, 13 nt, Human adenovirus C
auggaaaccccag

SEQ ID NO: 3915597 - RNA, 17 nt, Human adenovirus C
auggaaaccccagacac

SEQ ID NO: 3915598 - RNA, 22 nt, Human adenovirus C
auggcacccaaaaagaagcugc

SEQ ID NO: 3915599 - RNA, 19 nt, Human adenovirus C
auggccggccacggccuga

SEQ ID NO: 3915600 - RNA, 14 nt, Human adenovirus C
augguucugcagag

SEQ ID NO: 3915601 - RNA, 21 nt, Human adenovirus C
augguugguggacgucgcgcc

SEQ ID NO: 3915602 - RNA, 17 nt, Human adenovirus C
auguagcuuagaaggaa

SEQ ID NO: 3915603 - RNA, 15 nt, Human adenovirus C
augucgcccucuucg

SEQ ID NO: 3915604 - RNA, 14 nt, Human adenovirus C
auguuacauuuaaa

SEQ ID NO: 3915605 - RNA, 22 nt, Human adenovirus C
auguucucuucuuuuacaguau

SEQ ID NO: 3915606 - RNA, 17 nt, Human adenovirus C
auguucuugucccuccg

SEQ ID NO: 3915607 - RNA, 22 nt, Human adenovirus C
auuaaaaaccuccuccuccugc

SEQ ID NO: 3915608 - RNA, 23 nt, Human adenovirus C
auuaccauguacaugagcaaaca

SEQ ID NO: 3915609 - RNA, 12 nt, Human adenovirus C
auuaccugggcg

SEQ ID NO: 3915610 - RNA, 21 nt, Human adenovirus C
auuacugacgccagacgccgc

SEQ ID NO: 3915611 - RNA, 19 nt, Human adenovirus C
auuagagaucuuauuccau

SEQ ID NO: 3915612 - RNA, 17 nt, Human adenovirus C
auuauucgccacaaaga

SEQ ID NO: 3915613 - RNA, 13 nt, Human adenovirus C
auucaccaccucc

SEQ ID NO: 3915614 - RNA, 14 nt, Human adenovirus C
auucagauaaugac

SEQ ID NO: 3915615 - RNA, 13 nt, Human adenovirus C
auucaucaaacaa

SEQ ID NO: 3915616 - RNA, 18 nt, Human adenovirus C
auucgcaccgcccgcagc

SEQ ID NO: 3915617 - RNA, 21 nt, Human adenovirus C
auugagcuccacgugccgggc

SEQ ID NO: 3915618 - RNA, 18 nt, Human adenovirus C
auugaggaguucgugccu

SEQ ID NO: 3915619 - RNA, 16 nt, Human adenovirus C
auugagguacugaaau

SEQ ID NO: 3915620 - RNA, 17 nt, Human adenovirus C
auugcauccguggccuu

SEQ ID NO: 3915621 - RNA, 14 nt, Human adenovirus C
auugcuucuucccc

SEQ ID NO: 3915622 - RNA, 15 nt, Human adenovirus C
auuggccggacaggc

SEQ ID NO: 3915623 - RNA, 13 nt, Human adenovirus C
auuggcucuggca

SEQ ID NO: 3915624 - RNA, 22 nt, Human adenovirus C
auuguuguguagguacuccgcc

SEQ ID NO: 3915625 - RNA, 20 nt, Human adenovirus C
auuuaccccccacccuugcc

SEQ ID NO: 3915626 - RNA, 15 nt, Human adenovirus C
auuucaacaaagcag

SEQ ID NO: 3915627 - RNA, 16 nt, Human adenovirus C
auuuccaggggcuggu

SEQ ID NO: 3915628 - RNA, 19 nt, Human adenovirus C
auuuccauuuuaugaaaug

SEQ ID NO: 3915629 - RNA, 21 nt, Human adenovirus C
auuuccgugcgcaggguggcu

SEQ ID NO: 3915630 - RNA, 12 nt, Human adenovirus C
auuuccugcaga

SEQ ID NO: 3915631 - RNA, 19 nt, Human adenovirus C
auuugagucacacuaagau

SEQ ID NO: 3915632 - RNA, 14 nt, Human adenovirus C
auuugucacccuua

SEQ ID NO: 3915633 - RNA, 17 nt, Human adenovirus C
caaaaucaaagaagaga

SEQ ID NO: 3915634 - RNA, 14 nt, Human adenovirus C
caaacagaucugcg

SEQ ID NO: 3915635 - RNA, 14 nt, Human adenovirus C
caaacauaaguuug

SEQ ID NO: 3915636 - RNA, 20 nt, Human adenovirus C
caaaccccugacagaggaca

SEQ ID NO: 3915637 - RNA, 14 nt, Human adenovirus C
caaacucacagaac

SEQ ID NO: 3915638 - RNA, 17 nt, Human adenovirus C
caaacucuacagccaaa

SEQ ID NO: 3915639 - RNA, 14 nt, Human adenovirus C
caaacuugcaagaa

SEQ ID NO: 3915640 - RNA, 16 nt, Human adenovirus C
caaacuuuccuggacg

SEQ ID NO: 3915641 - RNA, 23 nt, Human adenovirus C
caaagaucuugguugugggccau

SEQ ID NO: 3915642 - RNA, 19 nt, Human adenovirus C
caaagcaaaccucaccucc

SEQ ID NO: 3915643 - RNA, 15 nt, Human adenovirus C
caaagcccgccaaga

SEQ ID NO: 3915644 - RNA, 17 nt, Human adenovirus C
caaagcccgccaagagu

SEQ ID NO: 3915645 - RNA, 20 nt, Human adenovirus C
cccaaaauguaaccacuguu

SEQ ID NO: 3915646 - RNA, 24 nt, Human adenovirus C
cccacaacacggccuccacgcugg

SEQ ID NO: 3915647 - RNA, 14 nt, Human adenovirus C
cccacagcucgguc

SEQ ID NO: 3915648 - RNA, 13 nt, Human adenovirus C
cccacccccacug

SEQ ID NO: 3915649 - RNA, 17 nt, Human adenovirus C
cccacggacgaggagga

SEQ ID NO: 3915650 - RNA, 14 nt, Human adenovirus C
cccagaagacgagc

SEQ ID NO: 3915651 - RNA, 16 nt, Human adenovirus C
cccagacacacaucug

SEQ ID NO: 3915652 - RNA, 23 nt, Human adenovirus C
cccagcagaaaccugugcugcca

SEQ ID NO: 3915653 - RNA, 14 nt, Human adenovirus C
cccagcggucccau

SEQ ID NO: 3915654 - RNA, 17 nt, Human adenovirus C
cccaggacucguaacca

SEQ ID NO: 3915655 - RNA, 16 nt, Human adenovirus C
cccaggauggcaccca

SEQ ID NO: 3915656 - RNA, 21 nt, Human adenovirus C
cccaggcggcggguacagugg

SEQ ID NO: 3915657 - RNA, 12 nt, Human adenovirus C
cccagggccaca

SEQ ID NO: 3915658 - RNA, 15 nt, Human adenovirus C
cccagggccacaucc

SEQ ID NO: 3915659 - RNA, 20 nt, Human adenovirus C
cccaguccggcgaggagcuc

SEQ ID NO: 3915660 - RNA, 16 nt, Human adenovirus C
cccagugcccgcuguc

SEQ ID NO: 3915661 - RNA, 14 nt, Human adenovirus C
cccauuugaugcuc

SEQ ID NO: 3915662 - RNA, 13 nt, Human adenovirus C
ccccagguccagg

SEQ ID NO: 3915663 - RNA, 21 nt, Human adenovirus C
ccccaguccggcgaggagcuc

SEQ ID NO: 3915664 - RNA, 15 nt, Human adenovirus C
ccccauggcccacaa

SEQ ID NO: 3915665 - RNA, 19 nt, Human adenovirus C
ccccgcugacacccagcag

SEQ ID NO: 3915666 - RNA, 19 nt, Human adenovirus C
ccccggcuaucguggcuac

SEQ ID NO: 3915667 - RNA, 14 nt, Human adenovirus C
ccccguccugcccg

SEQ ID NO: 3915668 - RNA, 15 nt, Human adenovirus C
ccccuauccugccgu

SEQ ID NO: 3915669 - RNA, 13 nt, Human adenovirus C
ccccucgccggcg

SEQ ID NO: 3915670 - RNA, 18 nt, Human adenovirus C
ccccuuaguaugcagcgc

SEQ ID NO: 3915671 - RNA, 10 nt, Human adenovirus C
ccccuucccu

SEQ ID NO: 3915672 - RNA, 17 nt, Human adenovirus C
ccccuuugaguucgcca

SEQ ID NO: 3915673 - RNA, 20 nt, Human adenovirus C
cccgaauaaacuacaugagc

SEQ ID NO: 3915674 - RNA, 20 nt, Human adenovirus C
cccgaucacuuggugcuggc

SEQ ID NO: 3915675 - RNA, 21 nt, Human adenovirus C
cccgaugaggccggccugguc

SEQ ID NO: 3915676 - RNA, 16 nt, Human adenovirus C
cccgcgccugcugggc

SEQ ID NO: 3915677 - RNA, 15 nt, Human adenovirus C
cccgcuugaggagga

SEQ ID NO: 3915678 - RNA, 21 nt, Human adenovirus C
cccgcuugcaagcagugcagc

SEQ ID NO: 3915679 - RNA, 17 nt, Human adenovirus C
cccggagaugcagcgca

SEQ ID NO: 3915680 - RNA, 14 nt, Human adenovirus C
cccgggaccagcgg

SEQ ID NO: 3915681 - RNA, 18 nt, Human adenovirus C
cccgguuauggguuggcg

SEQ ID NO: 3915682 - RNA, 17 nt, Human adenovirus C
cccguagaggagccucc

SEQ ID NO: 3915683 - RNA, 14 nt, Human adenovirus C
cccguagccagugg

SEQ ID NO: 3915684 - RNA, 16 nt, Human adenovirus C
cccguauuugccgugc

SEQ ID NO: 3915685 - RNA, 19 nt, Human adenovirus C
cccguguucugacagggcc

SEQ ID NO: 3915686 - RNA, 21 nt, Human adenovirus C
cccuaucagcagccgcgggcc

SEQ ID NO: 3915687 - RNA, 15 nt, Human adenovirus C
cccuauccugccgug

SEQ ID NO: 3915688 - RNA, 17 nt, Human adenovirus C
cccucacccgcagcugc

SEQ ID NO: 3915689 - RNA, 19 nt, Human adenovirus C
cccucguuccagacgcggc

SEQ ID NO: 3915690 - RNA, 14 nt, Human adenovirus C
cccugcuaguggag

SEQ ID NO: 3915691 - RNA, 14 nt, Human adenovirus C
cccuggugcugcca

SEQ ID NO: 3915692 - RNA, 20 nt, Human adenovirus C
cccuucggcaucgcgggcgc

SEQ ID NO: 3915693 - RNA, 20 nt, Human adenovirus C
cccuugcggcagucugcagc

SEQ ID NO: 3915694 - RNA, 17 nt, Human adenovirus C
cccuuucuuaccccucc

SEQ ID NO: 3915695 - RNA, 21 nt, Human adenovirus C
ccgaacagcgccuacuagaaa

SEQ ID NO: 3915696 - RNA, 13 nt, Human adenovirus C
ccgaacagggcgg

SEQ ID NO: 3915697 - RNA, 18 nt, Human adenovirus C
ccgaccaacacccagugc

SEQ ID NO: 3915698 - RNA, 19 nt, Human adenovirus C
ccgacggaggagcaacagc

SEQ ID NO: 3915699 - RNA, 17 nt, Human adenovirus C
ccgacgggcggccaugc

SEQ ID NO: 3915700 - RNA, 18 nt, Human adenovirus C
ccgagagccggccuggac

SEQ ID NO: 3915701 - RNA, 18 nt, Human adenovirus C
ccgagcuguugcccgugc

SEQ ID NO: 3915702 - RNA, 18 nt, Human adenovirus C
ccgagggccgcuggcugc

SEQ ID NO: 3915703 - RNA, 23 nt, Human adenovirus C
ccgagguugcuacgggcgggcug

SEQ ID NO: 3915704 - RNA, 11 nt, Human adenovirus C
ccgcaccugcc

SEQ ID NO: 3915705 - RNA, 15 nt, Human adenovirus C
ccgcagccacagugc

SEQ ID NO: 3915706 - RNA, 15 nt, Human adenovirus C
ccgcaggccaaccgg

SEQ ID NO: 3915707 - RNA, 16 nt, Human adenovirus C
ccgcauccccgcggcg

SEQ ID NO: 3915708 - RNA, 22 nt, Human adenovirus C
ccgccaacgccaccaacgugcc

SEQ ID NO: 3915709 - RNA, 12 nt, Human adenovirus C
ccgccaccugcu

SEQ ID NO: 3915710 - RNA, 15 nt, Human adenovirus C
ccgccgcagcagccg

SEQ ID NO: 3915711 - RNA, 17 nt, Human adenovirus C
ccgccgcuuucuucucu

SEQ ID NO: 3915712 - RNA, 21 nt, Human adenovirus C
ccgccgucgccgucgccagcc

SEQ ID NO: 3915713 - RNA, 13 nt, Human adenovirus C
ccgcgaggccaua

SEQ ID NO: 3915714 - RNA, 17 nt, Human adenovirus C
ccgcgccgcaggccccg

SEQ ID NO: 3915715 - RNA, 16 nt, Human adenovirus C
ccgcgccugcugggcg

SEQ ID NO: 3915716 - RNA, 23 nt, Human adenovirus C
ccgcgcgcgcacacguggcggcc

SEQ ID NO: 3915717 - RNA, 14 nt, Human adenovirus C
ccgcgcgcgggcag

SEQ ID NO: 3915718 - RNA, 21 nt, Human adenovirus C
ccgcgcgcgggcaggagcugg

SEQ ID NO: 3915719 - RNA, 15 nt, Human adenovirus C
ccgcggcgugcugga

SEQ ID NO: 3915720 - RNA, 20 nt, Human adenovirus C
ccgcggugcaggcggccgcu

SEQ ID NO: 3915721 - RNA, 12 nt, Human adenovirus C
ccgcguacgagc

SEQ ID NO: 3915722 - RNA, 21 nt, Human adenovirus C
ccgcguccggcucgcuccacg

SEQ ID NO: 3915723 - RNA, 19 nt, Human adenovirus C
ccgcucauggcgcagcugu

SEQ ID NO: 3915724 - RNA, 12 nt, Human adenovirus C
ccgcugcagcca

SEQ ID NO: 3915725 - RNA, 17 nt, Human adenovirus C
ccgcugcgcaacagcau

SEQ ID NO: 3915726 - RNA, 12 nt, Human adenovirus C
ccgcuggcugcu

SEQ ID NO: 3915727 - RNA, 17 nt, Human adenovirus C
ccggaaaccucaccucc

SEQ ID NO: 3915728 - RNA, 18 nt, Human adenovirus C
ccggaaaccucaccuccc

SEQ ID NO: 3915729 - RNA, 13 nt, Human adenovirus C
ccggccugcugaa

SEQ ID NO: 3915730 - RNA, 12 nt, Human adenovirus C
ccggcgcacggc

SEQ ID NO: 3915731 - RNA, 16 nt, Human adenovirus C
ccggcgccagcaccug

SEQ ID NO: 3915732 - RNA, 18 nt, Human adenovirus C
ccgggacugggcgugcag

SEQ ID NO: 3915733 - RNA, 15 nt, Human adenovirus C
ccgggaggcggucga

SEQ ID NO: 3915734 - RNA, 16 nt, Human adenovirus C
ccgggcuggugcaguu

SEQ ID NO: 3915735 - RNA, 14 nt, Human adenovirus C
ccgggucagggcgc

SEQ ID NO: 3915736 - RNA, 12 nt, Human adenovirus C
ccguagaggagc

SEQ ID NO: 3915737 - RNA, 20 nt, Human adenovirus C
ccguaguuggcccgcugccc

SEQ ID NO: 3915738 - RNA, 19 nt, Human adenovirus C
ccgucaagaaaaacaccac

SEQ ID NO: 3915739 - RNA, 15 nt, Human adenovirus C
ccgugagcgugagcc

SEQ ID NO: 3915740 - RNA, 13 nt, Human adenovirus C
ccgugcuggcccc

SEQ ID NO: 3915741 - RNA, 20 nt, Human adenovirus C
ccguggagccugggcuggag

SEQ ID NO: 3915742 - RNA, 13 nt, Human adenovirus C
ccguguauccaua

SEQ ID NO: 3915743 - RNA, 22 nt, Human adenovirus C
ccgugugcuugauauggcuucc

SEQ ID NO: 3915744 - RNA, 11 nt, Human adenovirus C
ccguucccacg

SEQ ID NO: 3915745 - RNA, 17 nt, Human adenovirus C
ccguuuuuacccaccca

SEQ ID NO: 3915746 - RNA, 21 nt, Human adenovirus C
ccuaacuccugugagugggaa

SEQ ID NO: 3915747 - RNA, 21 nt, Human adenovirus C
ccuaauaagcaaugacagcac

SEQ ID NO: 3915748 - RNA, 22 nt, Human adenovirus C
ccuacacgguguaagcuucuau

SEQ ID NO: 3915749 - RNA, 13 nt, Human adenovirus C
ccuaccaccuucc

SEQ ID NO: 3915750 - RNA, 19 nt, Human adenovirus C
ccuacgaugaccuggaggg

SEQ ID NO: 3915751 - RNA, 14 nt, Human adenovirus C
ccuacugcaccggc

SEQ ID NO: 3915752 - RNA, 22 nt, Human adenovirus C
ccuacugcaccggcggcagcgg

SEQ ID NO: 3915753 - RNA, 16 nt, Human adenovirus C
ccuacuuccgcagcca

SEQ ID NO: 3915754 - RNA, 13 nt, Human adenovirus C
ccuaucacaucuu

SEQ ID NO: 3915755 - RNA, 21 nt, Human adenovirus C
ccuaucaccgucacccagcac

SEQ ID NO: 3915756 - RNA, 15 nt, Human adenovirus C
ccuaucgagccgcac

SEQ ID NO: 3915757 - RNA, 17 nt, Human adenovirus C
ccuaugacaagcgcuuu

SEQ ID NO: 3915758 - RNA, 13 nt, Human adenovirus C
ccucacucucuuc

SEQ ID NO: 3915759 - RNA, 11 nt, Human adenovirus C
ccucagcagcg

SEQ ID NO: 3915760 - RNA, 15 nt, Human adenovirus C
ccucaggcaccaucc

SEQ ID NO: 3915761 - RNA, 22 nt, Human adenovirus C
ccucaggcgccgccggcacugc

SEQ ID NO: 3915762 - RNA, 17 nt, Human adenovirus C
ucuuggccuugcuagac

SEQ ID NO: 3915763 - RNA, 14 nt, Human adenovirus C
ucuuguucccagcg

SEQ ID NO: 3915764 - RNA, 15 nt, Human adenovirus C
ucuuuaauuaugaaa

SEQ ID NO: 3915765 - RNA, 18 nt, Human adenovirus C
ucuuuccaguacucuugg

SEQ ID NO: 3915766 - RNA, 14 nt, Human adenovirus C
ucuuugugguucuu

SEQ ID NO: 3915767 - RNA, 17 nt, Human adenovirus C
ugaaaaguaucuuuccc

SEQ ID NO: 3915768 - RNA, 15 nt, Human adenovirus C
ugaaauccuguggug

SEQ ID NO: 3915769 - RNA, 21 nt, Human adenovirus C
ugaagacaugguuaaccuaca

SEQ ID NO: 3915770 - RNA, 21 nt, Human adenovirus C
ugacaaagagacgcucggugc

SEQ ID NO: 3915771 - RNA, 20 nt, Human adenovirus C
ugacaagcgcuuuccaggcu

SEQ ID NO: 3915772 - RNA, 21 nt, Human adenovirus C
ugacaagcgcuuuccaggcuu

SEQ ID NO: 3915773 - RNA, 21 nt, Human adenovirus C
ugacaaggucaacgcuggugg

SEQ ID NO: 3915774 - RNA, 13 nt, Human adenovirus C
ugacacccgcaac

SEQ ID NO: 3915775 - RNA, 22 nt, Human adenovirus C
ugacagcgacacccuuacugua

SEQ ID NO: 3915776 - RNA, 14 nt, Human adenovirus C
ugacagggcccagu

SEQ ID NO: 3915777 - RNA, 20 nt, Human adenovirus C
ugacaguggagagcccagga

SEQ ID NO: 3915778 - RNA, 14 nt, Human adenovirus C
ugaccaaggacugg

SEQ ID NO: 3915779 - RNA, 12 nt, Human adenovirus C
ugaccaugaaga

SEQ ID NO: 3915780 - RNA, 19 nt, Human adenovirus C
ugaccgaggagcugaggcc

SEQ ID NO: 3915781 - RNA, 17 nt, Human adenovirus C
ugaccguggagccuggg

SEQ ID NO: 3915782 - RNA, 16 nt, Human adenovirus C
ugaccugcgcugggcc

SEQ ID NO: 3915783 - RNA, 19 nt, Human adenovirus C
ugacgaccguucgcacugg

SEQ ID NO: 3915784 - RNA, 23 nt, Human adenovirus C
ugacgaggacgaugaguacgagc

SEQ ID NO: 3915785 - RNA, 22 nt, Human adenovirus C
ugacgcaaauagaugagccucc

SEQ ID NO: 3915786 - RNA, 18 nt, Human adenovirus C
ugacgcggcggcagaugg

SEQ ID NO: 3915787 - RNA, 21 nt, Human adenovirus C
ugacgcguuccggcagcagcc

SEQ ID NO: 3915788 - RNA, 20 nt, Human adenovirus C
ugacggggagggcuacaacg

SEQ ID NO: 3915789 - RNA, 22 nt, Human adenovirus C
ugacuaccuuuccgccgccaac

SEQ ID NO: 3915790 - RNA, 23 nt, Human adenovirus C
ugacuaccuuuccgccgccaaca

SEQ ID NO: 3915791 - RNA, 17 nt, Human adenovirus C
ugagacgaaggcucgcg

SEQ ID NO: 3915792 - RNA, 19 nt, Human adenovirus C
ugagcaggaacugaaagcc

SEQ ID NO: 3915793 - RNA, 15 nt, Human adenovirus C
ugagcgacgaccugg

SEQ ID NO: 3915794 - RNA, 21 nt, Human adenovirus C
ugagcgggggguaccugcugg

SEQ ID NO: 3915795 - RNA, 22 nt, Human adenovirus C
ugagcgggggguaccugcugga

SEQ ID NO: 3915796 - RNA, 22 nt, Human adenovirus C
ugagcuccacaggucacgggcc

SEQ ID NO: 3915797 - RNA, 18 nt, Human adenovirus C
ugagcuccucaggggagc

SEQ ID NO: 3915798 - RNA, 17 nt, Human adenovirus C
ugagcuugaucugcugg

SEQ ID NO: 3915799 - RNA, 21 nt, Human adenovirus C
ugaggccgaggcagcggcaga

SEQ ID NO: 3915800 - RNA, 21 nt, Human adenovirus C
ugaggguaacuccagggugcg

SEQ ID NO: 3915801 - RNA, 17 nt, Human adenovirus C
ugaugggcuccagcauu

SEQ ID NO: 3915802 - RNA, 21 nt, Human adenovirus C
ugauuauuuaccccccacccu

SEQ ID NO: 3915803 - RNA, 16 nt, Human adenovirus C
ugauuccauaggugau

SEQ ID NO: 3915804 - RNA, 20 nt, Human adenovirus C
ugauucuuugaaucuggguc

SEQ ID NO: 3915805 - RNA, 20 nt, Human adenovirus C
ugcaaacaucagccccccuc

SEQ ID NO: 3915806 - RNA, 18 nt, Human adenovirus C
ugcaaacggacccgugga

SEQ ID NO: 3915807 - RNA, 15 nt, Human adenovirus C
ugcaaauuccuccgg

SEQ ID NO: 3915808 - RNA, 22 nt, Human adenovirus C
ugcaagacagaaacacagagcu

SEQ ID NO: 3915809 - RNA, 23 nt, Human adenovirus C
ugcaaguagcacaaaacuccgau

SEQ ID NO: 3915810 - RNA, 23 nt, Human adenovirus C
ugcaagucuagcgccugcugcca

SEQ ID NO: 3915811 - RNA, 13 nt, Human adenovirus C
ugcaccacagaac

SEQ ID NO: 3915812 - RNA, 17 nt, Human adenovirus C
ugcaccggcggcagcgg

SEQ ID NO: 3915813 - RNA, 20 nt, Human adenovirus C
ugcaccguaggaggggcaug

SEQ ID NO: 3915814 - RNA, 15 nt, Human adenovirus C
ugcacgucuccugag

SEQ ID NO: 3915815 - RNA, 16 nt, Human adenovirus C
ugcacuacucuuauaa

SEQ ID NO: 3915816 - RNA, 14 nt, Human adenovirus C
ugcacugcagggaa

SEQ ID NO: 3915817 - RNA, 19 nt, Human adenovirus C
ugcagaccguaaaccugag

SEQ ID NO: 3915818 - RNA, 16 nt, Human adenovirus C
ugcagauucacucaaa

SEQ ID NO: 3915819 - RNA, 14 nt, Human adenovirus C
ugcagcacagcacc

SEQ ID NO: 3915820 - RNA, 15 nt, Human adenovirus C
ugcagcacagcaggg

SEQ ID NO: 3915821 - RNA, 12 nt, Human adenovirus C
ugcagcacugga

SEQ ID NO: 3915822 - RNA, 19 nt, Human adenovirus C
ugcagcagccgccgccaug

SEQ ID NO: 3915823 - RNA, 21 nt, Human adenovirus C
ugcagcugccgucaucccuga

SEQ ID NO: 3915824 - RNA, 23 nt, Human adenovirus C
ugcagcugccgucaucccugagc

SEQ ID NO: 3915825 - RNA, 21 nt, Human adenovirus C
ugcaggaauacaacauggcag

SEQ ID NO: 3915826 - RNA, 18 nt, Human adenovirus C
ugcagggcacccuccccu

SEQ ID NO: 3915827 - RNA, 17 nt, Human adenovirus C
ugcagguacgccugcag

SEQ ID NO: 3915828 - RNA, 21 nt, Human adenovirus C
ugcaguagaagguaagcgggu

SEQ ID NO: 3915829 - RNA, 16 nt, Human adenovirus C
ugcauguuuucccuga

SEQ ID NO: 3915830 - RNA, 14 nt, Human adenovirus C
ugccaaccuaugga

SEQ ID NO: 3915831 - RNA, 15 nt, Human adenovirus C
ugccaccucccuccc

SEQ ID NO: 3915832 - RNA, 18 nt, Human adenovirus C
ugccaucuugaacccgca

SEQ ID NO: 3915833 - RNA, 14 nt, Human adenovirus C
ugccaugcgcgggc

SEQ ID NO: 3915834 - RNA, 21 nt, Human adenovirus C
ugccauuaaaaaccuccuccu

SEQ ID NO: 3915835 - RNA, 11 nt, Human adenovirus C
ugcccaggcuc

SEQ ID NO: 3915836 - RNA, 17 nt, Human adenovirus C
ugcccuucucccacgca

SEQ ID NO: 3915837 - RNA, 14 nt, Human adenovirus C
ugcccuugauggag

SEQ ID NO: 3915838 - RNA, 16 nt, Human adenovirus C
ugcccuuggaggaggc

SEQ ID NO: 3915839 - RNA, 13 nt, Human adenovirus C
ugccgaggaugaa

SEQ ID NO: 3915840 - RNA, 21 nt, Human adenovirus C
ugccgccaacgcgccuaccac

SEQ ID NO: 3915841 - RNA, 14 nt, Human adenovirus C
ugccuaaccuucua

SEQ ID NO: 3915842 - RNA, 19 nt, Human adenovirus C
ugccuacggaaagcggcau

SEQ ID NO: 3915843 - RNA, 15 nt, Human adenovirus C
ugccucaaaccggcc

SEQ ID NO: 3915844 - RNA, 17 nt, Human adenovirus C
ugcgacccggcaccacc

SEQ ID NO: 3915845 - RNA, 22 nt, Human adenovirus C
ugcgacgucagacaacggggga

SEQ ID NO: 3915846 - RNA, 21 nt, Human adenovirus C
ugcgagccgaucgggaagaac

SEQ ID NO: 3915847 - RNA, 22 nt, Human adenovirus C
ugcgccagcagguuucugcccu

SEQ ID NO: 3915848 - RNA, 17 nt, Human adenovirus C
ugcgcgagauugagcuc

SEQ ID NO: 3915849 - RNA, 18 nt, Human adenovirus C
ugcgcgagauugagcucc

SEQ ID NO: 3915850 - RNA, 16 nt, Human adenovirus C
ugcgcgcuggccaggg

SEQ ID NO: 3915851 - RNA, 16 nt, Human adenovirus C
ugcgcuaugugcagca

SEQ ID NO: 3915852 - RNA, 23 nt, Human adenovirus C
ugcgcuuaaaaugggcagcgguc

SEQ ID NO: 3915853 - RNA, 15 nt, Human adenovirus C
ugcgcuuuucugugc

SEQ ID NO: 3915854 - RNA, 12 nt, Human adenovirus C
ugcggcugcugu

SEQ ID NO: 3915855 - RNA, 12 nt, Human adenovirus C
ugcgggccauga

SEQ ID NO: 3915856 - RNA, 18 nt, Human adenovirus C
ugcgggcgugacaaacag

SEQ ID NO: 3915857 - RNA, 23 nt, Human adenovirus C
ugcgggcucccacaggcgaccgc

SEQ ID NO: 3915858 - RNA, 18 nt, Human adenovirus C
ugcgucauuacccagggc

SEQ ID NO: 3915859 - RNA, 17 nt, Human adenovirus C
ugcuaccuucugcagcu

SEQ ID NO: 3915860 - RNA, 22 nt, Human adenovirus C
ugcucgaucucuuccuccugga

SEQ ID NO: 3915861 - RNA, 13 nt, Human adenovirus C
ugcugcagccgca

SEQ ID NO: 3915862 - RNA, 17 nt, Human adenovirus C
ugcugcgcgaggaggac

SEQ ID NO: 3915863 - RNA, 19 nt, Human adenovirus C
ugcuuaaaagccaccugag

SEQ ID NO: 3915864 - RNA, 13 nt, Human adenovirus C
ugcuucccaggau

SEQ ID NO: 3915865 - RNA, 16 nt, Human adenovirus C
uggaaaauacaccacu

SEQ ID NO: 3915866 - RNA, 14 nt, Human adenovirus C
uggaacaaugacag

SEQ ID NO: 3915867 - RNA, 16 nt, Human adenovirus C
uggaacauucccagcu

SEQ ID NO: 3915868 - RNA, 22 nt, Human adenovirus C
uggaagauuuuucugcugugcg

SEQ ID NO: 3915869 - RNA, 22 nt, Human adenovirus C
uggaaucaggcuguagacagcu

SEQ ID NO: 3915870 - RNA, 12 nt, Human adenovirus C
uggacaccuccc

SEQ ID NO: 3915871 - RNA, 20 nt, Human adenovirus C
uggacaugaccgcgcgcaac

SEQ ID NO: 3915872 - RNA, 14 nt, Human adenovirus C
uggaccuggccaac

SEQ ID NO: 3915873 - RNA, 16 nt, Human adenovirus C
uggacgucgcgccgca

SEQ ID NO: 3915874 - RNA, 18 nt, Human adenovirus C
uggagcucugcaaccugg

SEQ ID NO: 3915875 - RNA, 20 nt, Human adenovirus C
uggaguuaccagccacaaau

SEQ ID NO: 3915876 - RNA, 17 nt, Human adenovirus C
uggaucugcgccagcag

SEQ ID NO: 3915877 - RNA, 18 nt, Human adenovirus C
uggaucugcgccagcagg

SEQ ID NO: 3915878 - RNA, 21 nt, Human adenovirus C
aaaauucagguuccucacaga

SEQ ID NO: 3915879 - RNA, 20 nt, Human adenovirus C
aaacaauacuaaaaaacugg

SEQ ID NO: 3915880 - RNA, 15 nt, Human adenovirus C
aaacacaugucuaug

SEQ ID NO: 3915881 - RNA, 14 nt, Human adenovirus C
aaacaggucucugc

SEQ ID NO: 3915882 - RNA, 16 nt, Human adenovirus C
aaacauuacuggaacu

SEQ ID NO: 3915883 - RNA, 13 nt, Human adenovirus C
aaaccaugcuaug

SEQ ID NO: 3915884 - RNA, 17 nt, Human adenovirus C
aaaccgaauucuccucg

SEQ ID NO: 3915885 - RNA, 16 nt, Human adenovirus C
aaaccuauuaaaaaac

SEQ ID NO: 3915886 - RNA, 17 nt, Human adenovirus C
aaaccuauuaaaaaaca

SEQ ID NO: 3915887 - RNA, 20 nt, Human adenovirus C
aaaccuucucuacgccaacu

SEQ ID NO: 3915888 - RNA, 21 nt, Human adenovirus C
aaacgcggccgcacugggcgc

SEQ ID NO: 3915889 - RNA, 23 nt, Human adenovirus C
aaacguagaggggcucucugagu

SEQ ID NO: 3915890 - RNA, 23 nt, Human adenovirus C
aaacuaaaauuggcucuggcauu

SEQ ID NO: 3915891 - RNA, 21 nt, Human adenovirus C
aaacuuaccuacgaaaaaacc

SEQ ID NO: 3915892 - RNA, 20 nt, Human adenovirus C
aaacuuguaaauaucaggaa

SEQ ID NO: 3915893 - RNA, 15 nt, Human adenovirus C
aaagaaaaugccuug

SEQ ID NO: 3915894 - RNA, 14 nt, Human adenovirus C
aaagcaaggccugc

SEQ ID NO: 3915895 - RNA, 22 nt, Human adenovirus C
aaagcagguuccugagcagcug

SEQ ID NO: 3915896 - RNA, 13 nt, Human adenovirus C
aaagccaaaaaac

SEQ ID NO: 3915897 - RNA, 17 nt, Human adenovirus C
aaagcuacaaggaccgc

SEQ ID NO: 3915898 - RNA, 13 nt, Human adenovirus C
aaagcuagcccug

SEQ ID NO: 3915899 - RNA, 20 nt, Human adenovirus C
aaagguggcacuuaggccag

SEQ ID NO: 3915900 - RNA, 23 nt, Human adenovirus C
aaaggugguagauggccuggccu

SEQ ID NO: 3915901 - RNA, 13 nt, Human adenovirus C
aaagucaaacaua

SEQ ID NO: 3915902 - RNA, 21 nt, Human adenovirus C
aacaacauggaaauuaaaacg

SEQ ID NO: 3915903 - RNA, 12 nt, Human adenovirus C
aacaacucccau

SEQ ID NO: 3915904 - RNA, 20 nt, Human adenovirus C
aacaagcgagugguggcucc

SEQ ID NO: 3915905 - RNA, 18 nt, Human adenovirus C
aacaaguugcauguggaa

SEQ ID NO: 3915906 - RNA, 16 nt, Human adenovirus C
aacaaugacuacagcc

SEQ ID NO: 3915907 - RNA, 15 nt, Human adenovirus C
aacacaggcuggggc

SEQ ID NO: 3915908 - RNA, 18 nt, Human adenovirus C
aacacaggcuggggccug

SEQ ID NO: 3915909 - RNA, 19 nt, Human adenovirus C
aacagcgaaaaugaaaguc

SEQ ID NO: 3915910 - RNA, 16 nt, Human adenovirus C
aacagcgcgcuaccac

SEQ ID NO: 3915911 - RNA, 21 nt, Human adenovirus C
aacagcgcgcuaccaccccag

SEQ ID NO: 3915912 - RNA, 13 nt, Human adenovirus C
aacagguggagcu

SEQ ID NO: 3915913 - RNA, 21 nt, Human adenovirus C
aacaucgcgcagaugggagcu

SEQ ID NO: 3915914 - RNA, 21 nt, Human adenovirus C
aacauuaccucuuuuggcaug

SEQ ID NO: 3915915 - RNA, 15 nt, Human adenovirus C
aacauucccagcugc

SEQ ID NO: 3915916 - RNA, 22 nt, Human adenovirus C
aacauugucagucaaguuuacu

SEQ ID NO: 3915917 - RNA, 18 nt, Human adenovirus C
aaccagccugugaugcug

SEQ ID NO: 3915918 - RNA, 19 nt, Human adenovirus C
aaccauuaacgaggauggg

SEQ ID NO: 3915919 - RNA, 20 nt, Human adenovirus C
aaccccuuuucuggaccucc

SEQ ID NO: 3915920 - RNA, 22 nt, Human adenovirus C
aaccuccuccuccugccaggcu

SEQ ID NO: 3915921 - RNA, 11 nt, Human adenovirus C
aaccugaaaga

SEQ ID NO: 3915922 - RNA, 15 nt, Human adenovirus C
aaccugccaccuccc

SEQ ID NO: 3915923 - RNA, 14 nt, Human adenovirus C
aaccugugcugcca

SEQ ID NO: 3915924 - RNA, 12 nt, Human adenovirus C
aaccuguugcau

SEQ ID NO: 3915925 - RNA, 18 nt, Human adenovirus C
aaccuuuggacaccuccc

SEQ ID NO: 3915926 - RNA, 21 nt, Human adenovirus C
aacgaagccuuccauccagac

SEQ ID NO: 3915927 - RNA, 15 nt, Human adenovirus C
aacgccuuccugagu

SEQ ID NO: 3915928 - RNA, 17 nt, Human adenovirus C
aacgcgaucguggagca

SEQ ID NO: 3915929 - RNA, 11 nt, Human adenovirus C
aacgcgcggca

SEQ ID NO: 3915930 - RNA, 11 nt, Human adenovirus C
aacguggagcu

SEQ ID NO: 3915931 - RNA, 22 nt, Human adenovirus C
aacuauggcagcaaggccugga

SEQ ID NO: 3915932 - RNA, 17 nt, Human adenovirus C
aacucaacuaaugcaaa

SEQ ID NO: 3915933 - RNA, 20 nt, Human adenovirus C
aacucaccaaggccauggca

SEQ ID NO: 3915934 - RNA, 14 nt, Human adenovirus C
aacucaccugaaaa

SEQ ID NO: 3915935 - RNA, 16 nt, Human adenovirus C
aacucaggcacaacca

SEQ ID NO: 3915936 - RNA, 19 nt, Human adenovirus C
aacucaggggcgcagcuug

SEQ ID NO: 3915937 - RNA, 23 nt, Human adenovirus C
aacuccagggugcgccacaaugu

SEQ ID NO: 3915938 - RNA, 19 nt, Human adenovirus C
aagaaacccaucugagcgg

SEQ ID NO: 3915939 - RNA, 19 nt, Human adenovirus C
aagaaagcagguuccugag

SEQ ID NO: 3915940 - RNA, 15 nt, Human adenovirus C
aagaacaagagcuga

SEQ ID NO: 3915941 - RNA, 13 nt, Human adenovirus C
aagagacgcucgg

SEQ ID NO: 3915942 - RNA, 14 nt, Human adenovirus C
aagagaugcuccag

SEQ ID NO: 3915943 - RNA, 20 nt, Human adenovirus C
aagagguaguugaggguggu

SEQ ID NO: 3915944 - RNA, 21 nt, Human adenovirus C
aagauaucggcaccagcaaua

SEQ ID NO: 3915945 - RNA, 17 nt, Human adenovirus C
aagaugaagaagaggaa

SEQ ID NO: 3915946 - RNA, 21 nt, Human adenovirus C
aagauguugcacaauggcuuc

SEQ ID NO: 3915947 - RNA, 13 nt, Human adenovirus C
aagauuauccaaa

SEQ ID NO: 3915948 - RNA, 13 nt, Human adenovirus C
aagcaucugcagc

SEQ ID NO: 3915949 - RNA, 21 nt, Human adenovirus C
aagcgaaagcauuaaguggcu

SEQ ID NO: 3915950 - RNA, 13 nt, Human adenovirus C
aagcuacccaccc

SEQ ID NO: 3915951 - RNA, 15 nt, Human adenovirus C
aagggcgaggcgcgc

SEQ ID NO: 3915952 - RNA, 17 nt, Human adenovirus C
aaggggugcgcuccggg

SEQ ID NO: 3915953 - RNA, 12 nt, Human adenovirus C
aagggugggaaa

SEQ ID NO: 3915954 - RNA, 15 nt, Human adenovirus C
aaguccacaaaaaac

SEQ ID NO: 3915955 - RNA, 21 nt, Human adenovirus C
aagugcuuugcccgcggcucc

SEQ ID NO: 3915956 - RNA, 18 nt, Human adenovirus C
aauacaaccccaccaaug

SEQ ID NO: 3915957 - RNA, 16 nt, Human adenovirus C
aaucaaaauaaaaagu

SEQ ID NO: 3915958 - RNA, 15 nt, Human adenovirus C
aaucaaagaagagau

SEQ ID NO: 3915959 - RNA, 19 nt, Human adenovirus C
aaucagcguaaaucccaca

SEQ ID NO: 3915960 - RNA, 11 nt, Human adenovirus C
aaucuugguua

SEQ ID NO: 3915961 - RNA, 22 nt, Human adenovirus C
aaugaauguuguacagguggcu

SEQ ID NO: 3915962 - RNA, 13 nt, Human adenovirus C
aaugagacaugau

SEQ ID NO: 3915963 - RNA, 19 nt, Human adenovirus C
aaugagcuugaucugcugg

SEQ ID NO: 3915964 - RNA, 16 nt, Human adenovirus C
aaugcaauuugaguca

SEQ ID NO: 3915965 - RNA, 22 nt, Human adenovirus C
aaugcacuacucuuauaaaaug

SEQ ID NO: 3915966 - RNA, 14 nt, Human adenovirus C
aaugcaucaaacaa

SEQ ID NO: 3915967 - RNA, 20 nt, Human adenovirus C
aaugccauagaugccaugaa

SEQ ID NO: 3915968 - RNA, 12 nt, Human adenovirus C
aaugccaucuug

SEQ ID NO: 3915969 - RNA, 19 nt, Human adenovirus C
aaugggcccacgggcggcg

SEQ ID NO: 3915970 - RNA, 15 nt, Human adenovirus C
aauguacuaggagac

SEQ ID NO: 3915971 - RNA, 21 nt, Human adenovirus C
aaugucguuucucagcagcug

SEQ ID NO: 3915972 - RNA, 11 nt, Human adenovirus C
aauguggccuc

SEQ ID NO: 3915973 - RNA, 21 nt, Human adenovirus C
aaugugugggcguggcuuaag

SEQ ID NO: 3915974 - RNA, 22 nt, Human adenovirus C
aauuaaaacgggcgguggcaug

SEQ ID NO: 3915975 - RNA, 23 nt, Human adenovirus C
aauucccacgcccuacaugugga

SEQ ID NO: 3915976 - RNA, 22 nt, Human adenovirus C
aauuccuccggaaacagggacg

SEQ ID NO: 3915977 - RNA, 22 nt, Human adenovirus C
acaaagcgcgguucacccuggc

SEQ ID NO: 3915978 - RNA, 23 nt, Human adenovirus C
acaaaggucuuguugcuggugaa

SEQ ID NO: 3915979 - RNA, 20 nt, Human adenovirus C
acaaauaggaucagacaaug

SEQ ID NO: 3915980 - RNA, 15 nt, Human adenovirus C
acaacacggccucca

SEQ ID NO: 3915981 - RNA, 15 nt, Human adenovirus C
acaacagcugccgcc

SEQ ID NO: 3915982 - RNA, 10 nt, Human adenovirus C
acaaccccaa

SEQ ID NO: 3915983 - RNA, 16 nt, Human adenovirus C
acaacucgcugcugca

SEQ ID NO: 3915984 - RNA, 14 nt, Human adenovirus C
acaagcgcagguag

SEQ ID NO: 3915985 - RNA, 17 nt, Human adenovirus C
acaaggucaacgcuggu

SEQ ID NO: 3915986 - RNA, 15 nt, Human adenovirus C
acaauaccugugugg

SEQ ID NO: 3915987 - RNA, 15 nt, Human adenovirus C
acacaauaaauuacu

SEQ ID NO: 3915988 - RNA, 21 nt, Human adenovirus C
acacccagcagaaaccugugc

SEQ ID NO: 3915989 - RNA, 19 nt, Human adenovirus C
acaccggggcgcgcugcgg

SEQ ID NO: 3915990 - RNA, 22 nt, Human adenovirus C
acaccggggcgcgcugcggcug

SEQ ID NO: 3915991 - RNA, 14 nt, Human adenovirus C
acaccuacucuggc

SEQ ID NO: 3915992 - RNA, 23 nt, Human adenovirus C
acaccuacucuggcuccauacca

SEQ ID NO: 3915993 - RNA, 19 nt, Human adenovirus C
acacgggaggagcgggaag

SEQ ID NO: 3915994 - RNA, 19 nt, Human adenovirus C
cugacgccagacgccgcac

SEQ ID NO: 3915995 - RNA, 20 nt, Human adenovirus C
cugacgcguuccggcagcag

SEQ ID NO: 3915996 - RNA, 21 nt, Human adenovirus C
cugacgcguuccggcagcagc

SEQ ID NO: 3915997 - RNA, 19 nt, Human adenovirus C
cugagccccgggcuggugc

SEQ ID NO: 3915998 - RNA, 19 nt, Human adenovirus C
cugaggccgaggcagcggc

SEQ ID NO: 3915999 - RNA, 18 nt, Human adenovirus C
cugaguacacagcccgcc

SEQ ID NO: 3916000 - RNA, 13 nt, Human adenovirus C
cugagucuccaga

SEQ ID NO: 3916001 - RNA, 13 nt, Human adenovirus C
cugauaacaucca

SEQ ID NO: 3916002 - RNA, 12 nt, Human adenovirus C
cugcaaacauca

SEQ ID NO: 3916003 - RNA, 20 nt, Human adenovirus C
cugcaaagggcccuggcugg

SEQ ID NO: 3916004 - RNA, 14 nt, Human adenovirus C
cugcaaccuggucu

SEQ ID NO: 3916005 - RNA, 19 nt, Human adenovirus C
cugcaccacauuucggccc

SEQ ID NO: 3916006 - RNA, 22 nt, Human adenovirus C
cugcacgucuagggcgcaguag

SEQ ID NO: 3916007 - RNA, 13 nt, Human adenovirus C
cugcacugcaaau

SEQ ID NO: 3916008 - RNA, 14 nt, Human adenovirus C
cugcagaauuaagg

SEQ ID NO: 3916009 - RNA, 22 nt, Human adenovirus C
cugcagaccguaaaccugagcc

SEQ ID NO: 3916010 - RNA, 23 nt, Human adenovirus C
cugcagagcauaguggugcagga

SEQ ID NO: 3916011 - RNA, 13 nt, Human adenovirus C
cugcagagccagc

SEQ ID NO: 3916012 - RNA, 14 nt, Human adenovirus C
cugcagcacagcac

SEQ ID NO: 3916013 - RNA, 14 nt, Human adenovirus C
cugcagccuccgcc

SEQ ID NO: 3916014 - RNA, 14 nt, Human adenovirus C
cugcagcuagccaa

SEQ ID NO: 3916015 - RNA, 23 nt, Human adenovirus C
cugccagcgccugcacugcaaau

SEQ ID NO: 3916016 - RNA, 12 nt, Human adenovirus C
cugcccaagacu

SEQ ID NO: 3916017 - RNA, 20 nt, Human adenovirus C
cugcccgccaccugcugugc

SEQ ID NO: 3916018 - RNA, 13 nt, Human adenovirus C
cugccgcccccgc

SEQ ID NO: 3916019 - RNA, 21 nt, Human adenovirus C
cugccgcccccgcugcgcaac

SEQ ID NO: 3916020 - RNA, 14 nt, Human adenovirus C
cugcgacgggccga

SEQ ID NO: 3916021 - RNA, 19 nt, Human adenovirus C
cugcgacuuaccgcagccg

SEQ ID NO: 3916022 - RNA, 15 nt, Human adenovirus C
cugcgagggccagcu

SEQ ID NO: 3916023 - RNA, 13 nt, Human adenovirus C
cugcucccagagc

SEQ ID NO: 3916024 - RNA, 15 nt, Human adenovirus C
cugcuccucuucccg

SEQ ID NO: 3916025 - RNA, 15 nt, Human adenovirus C
cugcugcagccgcag

SEQ ID NO: 3916026 - RNA, 18 nt, Human adenovirus C
cugcugggcgaggaggag

SEQ ID NO: 3916027 - RNA, 17 nt, Human adenovirus C
cugcuuaaaagccaccu

SEQ ID NO: 3916028 - RNA, 22 nt, Human adenovirus C
cugcuuuacggauuugucaccc

SEQ ID NO: 3916029 - RNA, 14 nt, Human adenovirus C
cuggaacagcagca

SEQ ID NO: 3916030 - RNA, 10 nt, Human adenovirus C
cuggaccccc

SEQ ID NO: 3916031 - RNA, 17 nt, Human adenovirus C
cuggaccggcugguggg

SEQ ID NO: 3916032 - RNA, 16 nt, Human adenovirus C
cuggagcugcccaaga

SEQ ID NO: 3916033 - RNA, 20 nt, Human adenovirus C
cuggagcugcccaagacuac

SEQ ID NO: 3916034 - RNA, 13 nt, Human adenovirus C
cuggaggcagcug

SEQ ID NO: 3916035 - RNA, 23 nt, Human adenovirus C
cuggcaagauaucggcaccagca

SEQ ID NO: 3916036 - RNA, 10 nt, Human adenovirus C
cuggccaggg

SEQ ID NO: 3916037 - RNA, 15 nt, Human adenovirus C
cuggccccgcgacac

SEQ ID NO: 3916038 - RNA, 18 nt, Human adenovirus C
cuggccuuaaaaagcauc

SEQ ID NO: 3916039 - RNA, 17 nt, Human adenovirus C
cuggcggaggugcugcu

SEQ ID NO: 3916040 - RNA, 18 nt, Human adenovirus C
cuggcggguuuggcuggu

SEQ ID NO: 3916041 - RNA, 20 nt, Human adenovirus C
cuggcgguagaggggccagc

SEQ ID NO: 3916042 - RNA, 19 nt, Human adenovirus C
cugggacagucaggcagag

SEQ ID NO: 3916043 - RNA, 13 nt, Human adenovirus C
cuggggcgcgcac

SEQ ID NO: 3916044 - RNA, 13 nt, Human adenovirus C
cuggggugaugca

SEQ ID NO: 3916045 - RNA, 16 nt, Human adenovirus C
cugggguuugacccag

SEQ ID NO: 3916046 - RNA, 22 nt, Human adenovirus C
cugggugugcgcggcaccagcg

SEQ ID NO: 3916047 - RNA, 23 nt, Human adenovirus C
cugguacuuuaacggcucuucau

SEQ ID NO: 3916048 - RNA, 21 nt, Human adenovirus C
cuggucuugucaugccugggg

SEQ ID NO: 3916049 - RNA, 15 nt, Human adenovirus C
cugguguaccaggaa

SEQ ID NO: 3916050 - RNA, 15 nt, Human adenovirus C
cuggugugggaggac

SEQ ID NO: 3916051 - RNA, 20 nt, Human adenovirus C
cugguuauacgccaucaucu

SEQ ID NO: 3916052 - RNA, 15 nt, Human adenovirus C
cuguaacgcuggacc

SEQ ID NO: 3916053 - RNA, 17 nt, Human adenovirus C
cuguaacgcuggaccug

SEQ ID NO: 3916054 - RNA, 21 nt, Human adenovirus C
cugucaugguuuuuugcagua

SEQ ID NO: 3916055 - RNA, 16 nt, Human adenovirus C
cuguccauggucugga

SEQ ID NO: 3916056 - RNA, 17 nt, Human adenovirus C
cuguccauggucuggag

SEQ ID NO: 3916057 - RNA, 17 nt, Human adenovirus C
cugucgagccaaacgcu

SEQ ID NO: 3916058 - RNA, 15 nt, Human adenovirus C
cugucuuacaaaccu

SEQ ID NO: 3916059 - RNA, 20 nt, Human adenovirus C
cugugccuuuuacugcugcu

SEQ ID NO: 3916060 - RNA, 11 nt, Human adenovirus C
cugugcugcca

SEQ ID NO: 3916061 - RNA, 15 nt, Human adenovirus C
cugugcugccagggc

SEQ ID NO: 3916062 - RNA, 17 nt, Human adenovirus C
cuuacaauuaccucagg

SEQ ID NO: 3916063 - RNA, 17 nt, Human adenovirus C
cuuaccauuacacuuaa

SEQ ID NO: 3916064 - RNA, 18 nt, Human adenovirus C
cuuaccccuccauuuguu

SEQ ID NO: 3916065 - RNA, 14 nt, Human adenovirus C
cuuacucccaauga

SEQ ID NO: 3916066 - RNA, 22 nt, Human adenovirus C
cuuagaaccaaaguugcaggag

SEQ ID NO: 3916067 - RNA, 17 nt, Human adenovirus C
cuuagaguugacggggc

SEQ ID NO: 3916068 - RNA, 17 nt, Human adenovirus C
cuuauccucaucugcag

SEQ ID NO: 3916069 - RNA, 23 nt, Human adenovirus C
cuuaugccaggccuacaaauccu

SEQ ID NO: 3916070 - RNA, 13 nt, Human adenovirus C
cuuauuuguugcc

SEQ ID NO: 3916071 - RNA, 17 nt, Human adenovirus C
cuucaaccccuuuucug

SEQ ID NO: 3916072 - RNA, 22 nt, Human adenovirus C
cuucacgaucuuggccuugcua

SEQ ID NO: 3916073 - RNA, 14 nt, Human adenovirus C
cuucagcuggggcu

SEQ ID NO: 3916074 - RNA, 18 nt, Human adenovirus C
cuucauucagccgccgca

SEQ ID NO: 3916075 - RNA, 24 nt, Human adenovirus C
cuuccacuuggucaggcaguagcu

SEQ ID NO: 3916076 - RNA, 14 nt, Human adenovirus C
cuuccagcccauga

SEQ ID NO: 3916077 - RNA, 21 nt, Human adenovirus C
cuuccaggcgcggcggcugcu

SEQ ID NO: 3916078 - RNA, 20 nt, Human adenovirus C
cuuccauaagggccuccccu

SEQ ID NO: 3916079 - RNA, 18 nt, Human adenovirus C
cuucccccguaacauccu

SEQ ID NO: 3916080 - RNA, 19 nt, Human adenovirus C
cuuccuagcgacuuugugc

SEQ ID NO: 3916081 - RNA, 16 nt, Human adenovirus C
cuuccucccaacucug

SEQ ID NO: 3916082 - RNA, 18 nt, Human adenovirus C
cuuccuggagcgccacuc

SEQ ID NO: 3916083 - RNA, 17 nt, Human adenovirus C
cuuccuuuuccucuugc

SEQ ID NO: 3916084 - RNA, 20 nt, Human adenovirus C
cuucgaucucagcgcagcgg

SEQ ID NO: 3916085 - RNA, 18 nt, Human adenovirus C
cuucggcaucgcgggcgc

SEQ ID NO: 3916086 - RNA, 21 nt, Human adenovirus C
cuucuucaaucuccucuucca

SEQ ID NO: 3916087 - RNA, 18 nt, Human adenovirus C
cuugaaagugggcaggca

SEQ ID NO: 3916088 - RNA, 17 nt, Human adenovirus C
cuugaacccgcacuggc

SEQ ID NO: 3916089 - RNA, 15 nt, Human adenovirus C
cuugacauuggcugg

SEQ ID NO: 3916090 - RNA, 16 nt, Human adenovirus C
cuugaggaggaggaag

SEQ ID NO: 3916091 - RNA, 18 nt, Human adenovirus C
cuugaucugcuggcgcag

SEQ ID NO: 3916092 - RNA, 20 nt, Human adenovirus C
cuugcaagcagugcagcuuc

SEQ ID NO: 3916093 - RNA, 18 nt, Human adenovirus C
cuugcuggaacagagcuc

SEQ ID NO: 3916094 - RNA, 21 nt, Human adenovirus C
cuuggaaaaaaugaccgugga

SEQ ID NO: 3916095 - RNA, 19 nt, Human adenovirus C
cuuggccaauugcaagcca

SEQ ID NO: 3916096 - RNA, 14 nt, Human adenovirus C
cuuggcgcgcagcu

SEQ ID NO: 3916097 - RNA, 17 nt, Human adenovirus C
cuuggguccggccugcu

SEQ ID NO: 3916098 - RNA, 12 nt, Human adenovirus C
cuuguugaccag

SEQ ID NO: 3916099 - RNA, 20 nt, Human adenovirus C
cuuuccgccgccaacaugcu

SEQ ID NO: 3916100 - RNA, 14 nt, Human adenovirus C
cuuugcgucucugg

SEQ ID NO: 3916101 - RNA, 15 nt, Human adenovirus C
cuuuggggucacugc

SEQ ID NO: 3916102 - RNA, 17 nt, Human adenovirus C
cuuugguucuuacaaaa

SEQ ID NO: 3916103 - RNA, 21 nt, Human adenovirus C
gaaaagcuuauuauucgccac

SEQ ID NO: 3916104 - RNA, 17 nt, Human adenovirus C
gaaaaguccgcggcucc

SEQ ID NO: 3916105 - RNA, 18 nt, Human adenovirus C
gaaaaugccuugauuuuc

SEQ ID NO: 3916106 - RNA, 23 nt, Human adenovirus C
gaaacagagggcugccugcacuu

SEQ ID NO: 3916107 - RNA, 19 nt, Human adenovirus C
gaaaccccacgguggcacc

SEQ ID NO: 3916108 - RNA, 21 nt, Human adenovirus C
gaaaccgggccuccaacugug

SEQ ID NO: 3916109 - RNA, 20 nt, Human adenovirus C
gaaauccacagcggcggcag

SEQ ID NO: 3916110 - RNA, 15 nt, Human adenovirus C
gcccagucugcaaga

SEQ ID NO: 3916111 - RNA, 14 nt, Human adenovirus C
gcccaugagccggc

SEQ ID NO: 3916112 - RNA, 17 nt, Human adenovirus C
gccccaaucaaucagcc

SEQ ID NO: 3916113 - RNA, 15 nt, Human adenovirus C
gccccaggcugggga

SEQ ID NO: 3916114 - RNA, 17 nt, Human adenovirus C
gccccccggcgcccgcg

SEQ ID NO: 3916115 - RNA, 18 nt, Human adenovirus C
gccccccuucucccaccc

SEQ ID NO: 3916116 - RNA, 17 nt, Human adenovirus C
gccccgggcuggugcag

SEQ ID NO: 3916117 - RNA, 19 nt, Human adenovirus C
gccccgggcuggugcaguu

SEQ ID NO: 3916118 - RNA, 23 nt, Human adenovirus C
gccccuccgcggcguggcccuug

SEQ ID NO: 3916119 - RNA, 24 nt, Human adenovirus C
gccccucgccauagcggaugucag

SEQ ID NO: 3916120 - RNA, 20 nt, Human adenovirus C
gcccgagggcaacuacuccg

SEQ ID NO: 3916121 - RNA, 21 nt, Human adenovirus C
gcccgccggcuaugcacugca

SEQ ID NO: 3916122 - RNA, 21 nt, Human adenovirus C
gcccgcugucauaccacugca

SEQ ID NO: 3916123 - RNA, 17 nt, Human adenovirus C
gcccgggggaggcaagc

SEQ ID NO: 3916124 - RNA, 23 nt, Human adenovirus C
gcccguucaugggaaacuggcaa

SEQ ID NO: 3916125 - RNA, 21 nt, Human adenovirus C
gcccuaacaguggcaaccacc

SEQ ID NO: 3916126 - RNA, 19 nt, Human adenovirus C
gcccuaccugugcuuugcu

SEQ ID NO: 3916127 - RNA, 18 nt, Human adenovirus C
gcccuaucagcagccgcg

SEQ ID NO: 3916128 - RNA, 16 nt, Human adenovirus C
gcccuccaccuucagc

SEQ ID NO: 3916129 - RNA, 21 nt, Human adenovirus C
gcccugcgcgcgcgaguugcg

SEQ ID NO: 3916130 - RNA, 18 nt, Human adenovirus C
gcccugcgcgucggccag

SEQ ID NO: 3916131 - RNA, 22 nt, Human adenovirus C
gcccugcuuaaccgcgcacguc

SEQ ID NO: 3916132 - RNA, 15 nt, Human adenovirus C
gcccuggaggcagcu

SEQ ID NO: 3916133 - RNA, 21 nt, Human adenovirus C
gcccuggcuggcacgggcagc

SEQ ID NO: 3916134 - RNA, 20 nt, Human adenovirus C
gcccuuggaggaggcgccgc

SEQ ID NO: 3916135 - RNA, 15 nt, Human adenovirus C
gccgacuuggaggag

SEQ ID NO: 3916136 - RNA, 13 nt, Human adenovirus C
gccgagcuguugc

SEQ ID NO: 3916137 - RNA, 15 nt, Human adenovirus C
gccgaggaugaagaa

SEQ ID NO: 3916138 - RNA, 17 nt, Human adenovirus C
gccgcacgaggggcagu

SEQ ID NO: 3916139 - RNA, 16 nt, Human adenovirus C
gccgcaggccccgcag

SEQ ID NO: 3916140 - RNA, 21 nt, Human adenovirus C
gccgccgcuucagccgcugca

SEQ ID NO: 3916141 - RNA, 15 nt, Human adenovirus C
gccgccggcacugcc

SEQ ID NO: 3916142 - RNA, 18 nt, Human adenovirus C
gccgccguuagcccaaga

SEQ ID NO: 3916143 - RNA, 13 nt, Human adenovirus C
gccgccugcugca

SEQ ID NO: 3916144 - RNA, 13 nt, Human adenovirus C
gccgcgcaccugg

SEQ ID NO: 3916145 - RNA, 19 nt, Human adenovirus C
gccgcgcgcgggcaggagc

SEQ ID NO: 3916146 - RNA, 23 nt, Human adenovirus C
gccgcggugcaggcggccgcugc

SEQ ID NO: 3916147 - RNA, 18 nt, Human adenovirus C
gccggacugcggcgaacg

SEQ ID NO: 3916148 - RNA, 20 nt, Human adenovirus C
gccggagaucuauggccccc

SEQ ID NO: 3916149 - RNA, 14 nt, Human adenovirus C
gccggcgccccaga

SEQ ID NO: 3916150 - RNA, 17 nt, Human adenovirus C
gccgucaucccugagca

SEQ ID NO: 3916151 - RNA, 22 nt, Human adenovirus C
gccgucgccagcccgugcuggc

SEQ ID NO: 3916152 - RNA, 17 nt, Human adenovirus C
gccgugagcgugagccg

SEQ ID NO: 3916153 - RNA, 23 nt, Human adenovirus C
gccgugccagaggugcuugccac

SEQ ID NO: 3916154 - RNA, 20 nt, Human adenovirus C
gccgugcugaaacgcagcau

SEQ ID NO: 3916155 - RNA, 23 nt, Human adenovirus C
gccguugauguuguggcccacga

SEQ ID NO: 3916156 - RNA, 17 nt, Human adenovirus C
gccuccccuucuucuuc

SEQ ID NO: 3916157 - RNA, 20 nt, Human adenovirus C
gccucggaguaccugagccc

SEQ ID NO: 3916158 - RNA, 16 nt, Human adenovirus C
gccucggcgguggcag

SEQ ID NO: 3916159 - RNA, 16 nt, Human adenovirus C
gccucucagaugcuga

SEQ ID NO: 3916160 - RNA, 20 nt, Human adenovirus C
gccugaagauggcaugugag

SEQ ID NO: 3916161 - RNA, 20 nt, Human adenovirus C
gccugccgacuuggaggagc

SEQ ID NO: 3916162 - RNA, 20 nt, Human adenovirus C
gccugcugaaugcgcaggcg

SEQ ID NO: 3916163 - RNA, 22 nt, Human adenovirus C
gccugcugaaugcgcaggcggu

SEQ ID NO: 3916164 - RNA, 12 nt, Human adenovirus C
gccuggaggagc

SEQ ID NO: 3916165 - RNA, 20 nt, Human adenovirus C
gccuggcggguuuggcuggu

SEQ ID NO: 3916166 - RNA, 14 nt, Human adenovirus C
gccuguccucgagc

SEQ ID NO: 3916167 - RNA, 14 nt, Human adenovirus C
gccugugaugcugg

SEQ ID NO: 3916168 - RNA, 15 nt, Human adenovirus C
gccuguugcugcugc

SEQ ID NO: 3916169 - RNA, 17 nt, Human adenovirus C
gccuguuugaaaggugu

SEQ ID NO: 3916170 - RNA, 16 nt, Human adenovirus C
gccuuccggagcgagg

SEQ ID NO: 3916171 - RNA, 20 nt, Human adenovirus C
gccuugcaggcgcagagaca

SEQ ID NO: 3916172 - RNA, 19 nt, Human adenovirus C
gcgaaaagaaccugccucc

SEQ ID NO: 3916173 - RNA, 14 nt, Human adenovirus C
gcgaacggagucaa

SEQ ID NO: 3916174 - RNA, 18 nt, Human adenovirus C
gcgaaggaggcaggaccc

SEQ ID NO: 3916175 - RNA, 12 nt, Human adenovirus C
gcgaccgcgagg

SEQ ID NO: 3916176 - RNA, 20 nt, Human adenovirus C
gcgacgggguaacgcccagc

SEQ ID NO: 3916177 - RNA, 22 nt, Human adenovirus C
gcgagauugagcuccacgugcc

SEQ ID NO: 3916178 - RNA, 19 nt, Human adenovirus C
gcgaggccauaggucaggc

SEQ ID NO: 3916179 - RNA, 13 nt, Human adenovirus C
gcgagugguggcu

SEQ ID NO: 3916180 - RNA, 16 nt, Human adenovirus C
gcgcaaaaucaaagaa

SEQ ID NO: 3916181 - RNA, 20 nt, Human adenovirus C
gcgcaacauggaaccgggca

SEQ ID NO: 3916182 - RNA, 16 nt, Human adenovirus C
gcgcaacugggcagca

SEQ ID NO: 3916183 - RNA, 16 nt, Human adenovirus C
gcgcaccaccggcggc

SEQ ID NO: 3916184 - RNA, 22 nt, Human adenovirus C
gcgcacucacagaccugggcca

SEQ ID NO: 3916185 - RNA, 18 nt, Human adenovirus C
gcgccaaaaacuggugcu

SEQ ID NO: 3916186 - RNA, 15 nt, Human adenovirus C
gcgcccacaccuaca

SEQ ID NO: 3916187 - RNA, 13 nt, Human adenovirus C
gcgcccaggcggc

SEQ ID NO: 3916188 - RNA, 13 nt, Human adenovirus C
gcgccccccuccu

SEQ ID NO: 3916189 - RNA, 16 nt, Human adenovirus C
gcgcccuaccugugcu

SEQ ID NO: 3916190 - RNA, 13 nt, Human adenovirus C
gcgcccuggggcg

SEQ ID NO: 3916191 - RNA, 16 nt, Human adenovirus C
gcgcccuucacggaca

SEQ ID NO: 3916192 - RNA, 16 nt, Human adenovirus C
gcgccgcgcgcgggca

SEQ ID NO: 3916193 - RNA, 11 nt, Human adenovirus C
gcgccucccaa

SEQ ID NO: 3916194 - RNA, 13 nt, Human adenovirus C
gcgcgagggacag

SEQ ID NO: 3916195 - RNA, 16 nt, Human adenovirus C
gcgcgcaacgcaccgc

SEQ ID NO: 3916196 - RNA, 20 nt, Human adenovirus C
gcgcgcaacuacacgcccac

SEQ ID NO: 3916197 - RNA, 14 nt, Human adenovirus C
gcgcgcccgccagc

SEQ ID NO: 3916198 - RNA, 15 nt, Human adenovirus C
gcgcgcgcugcccgu

SEQ ID NO: 3916199 - RNA, 12 nt, Human adenovirus C
gcgcgcuggggc

SEQ ID NO: 3916200 - RNA, 16 nt, Human adenovirus C
gcgcgcuggucucugg

SEQ ID NO: 3916201 - RNA, 18 nt, Human adenovirus C
gcgcucguugguccagca

SEQ ID NO: 3916202 - RNA, 17 nt, Human adenovirus C
gcgcugcggccccgcgg

SEQ ID NO: 3916203 - RNA, 15 nt, Human adenovirus C
gcgcugcggcugcug

SEQ ID NO: 3916204 - RNA, 20 nt, Human adenovirus C
gcgcuggggcaggaggacac

SEQ ID NO: 3916205 - RNA, 17 nt, Human adenovirus C
gcgcuguaccugccaga

SEQ ID NO: 3916206 - RNA, 19 nt, Human adenovirus C
gcgcuuaccucccuugccg

SEQ ID NO: 3916207 - RNA, 15 nt, Human adenovirus C
gcgcuuuccaggcuu

SEQ ID NO: 3916208 - RNA, 19 nt, Human adenovirus C
gcggaggcucucuucagca

SEQ ID NO: 3916209 - RNA, 16 nt, Human adenovirus C
gcggagggugccagac

SEQ ID NO: 3916210 - RNA, 16 nt, Human adenovirus C
gcggaugcuggcgcgc

SEQ ID NO: 3916211 - RNA, 18 nt, Human adenovirus C
gcggaugucagccuugcc

SEQ ID NO: 3916212 - RNA, 14 nt, Human adenovirus C
gcggcaacccuucc

SEQ ID NO: 3916213 - RNA, 12 nt, Human adenovirus C
gcggcagcagca

SEQ ID NO: 3916214 - RNA, 15 nt, Human adenovirus C
gcggcagcggcagcg

SEQ ID NO: 3916215 - RNA, 23 nt, Human adenovirus C
gcggccauucagaccguggugcg

SEQ ID NO: 3916216 - RNA, 16 nt, Human adenovirus C
gcggccugggcgaaga

SEQ ID NO: 3916217 - RNA, 13 nt, Human adenovirus C
gcggcgacagguc

SEQ ID NO: 3916218 - RNA, 13 nt, Human adenovirus C
gcggcgaccugaa

SEQ ID NO: 3916219 - RNA, 13 nt, Human adenovirus C
gcggcggcagcag

SEQ ID NO: 3916220 - RNA, 16 nt, Human adenovirus C
gcggcggcggcaggag

SEQ ID NO: 3916221 - RNA, 13 nt, Human adenovirus C
gcggcggcggcgc

SEQ ID NO: 3916222 - RNA, 13 nt, Human adenovirus C
gcggcggcuggcg

SEQ ID NO: 3916223 - RNA, 15 nt, Human adenovirus C
gcggcggugggggag

SEQ ID NO: 3916224 - RNA, 15 nt, Human adenovirus C
gcggcugcuguugcu

SEQ ID NO: 3916225 - RNA, 14 nt, Human adenovirus C
gcgggagcuccugc

SEQ ID NO: 3916226 - RNA, 15 nt, Human adenovirus C
gcgggagcuccugca

SEQ ID NO: 3916227 - RNA, 14 nt, Human adenovirus C
accauuaagaacua

SEQ ID NO: 3916228 - RNA, 17 nt, Human adenovirus C
accauuacugacgccag

SEQ ID NO: 3916229 - RNA, 17 nt, Human adenovirus C
acccaagggugcagcug

SEQ ID NO: 3916230 - RNA, 18 nt, Human adenovirus C
acccacccaaagcagacc

SEQ ID NO: 3916231 - RNA, 20 nt, Human adenovirus C
acccaccgugcagcugaugg

SEQ ID NO: 3916232 - RNA, 14 nt, Human adenovirus C
acccccacugagau

SEQ ID NO: 3916233 - RNA, 17 nt, Human adenovirus C
accccgccaacgugccc

SEQ ID NO: 3916234 - RNA, 15 nt, Human adenovirus C
acccgcaacuucaga

SEQ ID NO: 3916235 - RNA, 13 nt, Human adenovirus C
acccgcaccuaca

SEQ ID NO: 3916236 - RNA, 15 nt, Human adenovirus C
acccggagaugcagc

SEQ ID NO: 3916237 - RNA, 19 nt, Human adenovirus C
acccggcggugcgggcggc

SEQ ID NO: 3916238 - RNA, 13 nt, Human adenovirus C
acccuggcugugg

SEQ ID NO: 3916239 - RNA, 14 nt, Human adenovirus C
acccuggugcugcc

SEQ ID NO: 3916240 - RNA, 16 nt, Human adenovirus C
acccuggugcugccaa

SEQ ID NO: 3916241 - RNA, 15 nt, Human adenovirus C
acccuuccaggaggg

SEQ ID NO: 3916242 - RNA, 12 nt, Human adenovirus C
accgcaaaguga

SEQ ID NO: 3916243 - RNA, 13 nt, Human adenovirus C
accgccgccgacc

SEQ ID NO: 3916244 - RNA, 12 nt, Human adenovirus C
accgccucagcu

SEQ ID NO: 3916245 - RNA, 14 nt, Human adenovirus C
accgccuccaccga

SEQ ID NO: 3916246 - RNA, 19 nt, Human adenovirus C
accgccuccaccgaugccg

SEQ ID NO: 3916247 - RNA, 14 nt, Human adenovirus C
accgcgcggcgggc

SEQ ID NO: 3916248 - RNA, 15 nt, Human adenovirus C
accggagugcugggc

SEQ ID NO: 3916249 - RNA, 21 nt, Human adenovirus C
accggcggcggcgcgcgucgc

SEQ ID NO: 3916250 - RNA, 15 nt, Human adenovirus C
accguagaugggaca

SEQ ID NO: 3916251 - RNA, 13 nt, Human adenovirus C
accgucacccagc

SEQ ID NO: 3916252 - RNA, 19 nt, Human adenovirus C
accgugaaugcccuccgcc

SEQ ID NO: 3916253 - RNA, 13 nt, Human adenovirus C
accgugcagcuga

SEQ ID NO: 3916254 - RNA, 13 nt, Human adenovirus C
caggaggacacgg

SEQ ID NO: 3916255 - RNA, 14 nt, Human adenovirus C
caggcgcugaaaga

SEQ ID NO: 3916256 - RNA, 12 nt, Human adenovirus C
caggcgggagcu

SEQ ID NO: 3916257 - RNA, 23 nt, Human adenovirus C
caggcuccuuugucuggagaaac

SEQ ID NO: 3916258 - RNA, 14 nt, Human adenovirus C
cagggccaggucgg

SEQ ID NO: 3916259 - RNA, 16 nt, Human adenovirus C
cagggcgaaggugaca

SEQ ID NO: 3916260 - RNA, 21 nt, Human adenovirus C
cagggcggggauggcgcaggc

SEQ ID NO: 3916261 - RNA, 21 nt, Human adenovirus C
cagggcuacgugcgccaggcc

SEQ ID NO: 3916262 - RNA, 13 nt, Human adenovirus C
caggugagcucug

SEQ ID NO: 3916263 - RNA, 12 nt, Human adenovirus C
cagguuccugag

SEQ ID NO: 3916264 - RNA, 23 nt, Human adenovirus C
cagguuggaauucuucaccagca

SEQ ID NO: 3916265 - RNA, 15 nt, Human adenovirus C
caguagacaaggccu

SEQ ID NO: 3916266 - RNA, 23 nt, Human adenovirus C
caguaguauagccccaccaccac

SEQ ID NO: 3916267 - RNA, 16 nt, Human adenovirus C
caguauuacccagaaa

SEQ ID NO: 3916268 - RNA, 18 nt, Human adenovirus C
cagucaggcagaggaggu

SEQ ID NO: 3916269 - RNA, 15 nt, Human adenovirus C
cagucguagcaggag

SEQ ID NO: 3916270 - RNA, 16 nt, Human adenovirus C
cagucguagcaggagc

SEQ ID NO: 3916271 - RNA, 20 nt, Human adenovirus C
cagugcaacaugaccaagga

SEQ ID NO: 3916272 - RNA, 16 nt, Human adenovirus C
cagugcccgcugucau

SEQ ID NO: 3916273 - RNA, 21 nt, Human adenovirus C
caguggaacgaagcugaugcu

SEQ ID NO: 3916274 - RNA, 14 nt, Human adenovirus C
caguggacgcggcc

SEQ ID NO: 3916275 - RNA, 19 nt, Human adenovirus C
caguggagaggcagagcga

SEQ ID NO: 3916276 - RNA, 18 nt, Human adenovirus C
caguggcaaccaccgcuc

SEQ ID NO: 3916277 - RNA, 17 nt, Human adenovirus C
caguggcaacuggcaaa

SEQ ID NO: 3916278 - RNA, 18 nt, Human adenovirus C
caguugccgaggaugaag

SEQ ID NO: 3916279 - RNA, 14 nt, Human adenovirus C
caguuuauucccaa

SEQ ID NO: 3916280 - RNA, 21 nt, Human adenovirus C
cauaaaguugcgugugaugcg

SEQ ID NO: 3916281 - RNA, 16 nt, Human adenovirus C
cauaaauaaaaaccag

SEQ ID NO: 3916282 - RNA, 17 nt, Human adenovirus C
cauaacuuggacauaaa

SEQ ID NO: 3916283 - RNA, 22 nt, Human adenovirus C
cauagaugccaugaaccacccu

SEQ ID NO: 3916284 - RNA, 20 nt, Human adenovirus C
cauagcggaugucagccuug

SEQ ID NO: 3916285 - RNA, 21 nt, Human adenovirus C
cauagcuauaaaugcaggaaa

SEQ ID NO: 3916286 - RNA, 17 nt, Human adenovirus C
cauaguccagccccucc

SEQ ID NO: 3916287 - RNA, 22 nt, Human adenovirus C
cauaucccagggaacaacccau

SEQ ID NO: 3916288 - RNA, 19 nt, Human adenovirus C
caucaaacaauacuaaaaa

SEQ ID NO: 3916289 - RNA, 23 nt, Human adenovirus C
caucaaacaauacuaaaaaacug

SEQ ID NO: 3916290 - RNA, 15 nt, Human adenovirus C
cauccaccaccaucc

SEQ ID NO: 3916291 - RNA, 13 nt, Human adenovirus C
cauccaugacagg

SEQ ID NO: 3916292 - RNA, 15 nt, Human adenovirus C
cauccccgcggcgcg

SEQ ID NO: 3916293 - RNA, 13 nt, Human adenovirus C
cauccgcccugcu

SEQ ID NO: 3916294 - RNA, 14 nt, Human adenovirus C
cauccggugcugcg

SEQ ID NO: 3916295 - RNA, 20 nt, Human adenovirus C
cauccguggccuugcaggcg

SEQ ID NO: 3916296 - RNA, 17 nt, Human adenovirus C
caucgaggucacccacu

SEQ ID NO: 3916297 - RNA, 10 nt, Human adenovirus C
caucgcgccu

SEQ ID NO: 3916298 - RNA, 21 nt, Human adenovirus C
caucgcuaugcgccacuggca

SEQ ID NO: 3916299 - RNA, 21 nt, Human adenovirus C
caugaaccacccuacuuuccc

SEQ ID NO: 3916300 - RNA, 14 nt, Human adenovirus C
caugaagaucugga

SEQ ID NO: 3916301 - RNA, 17 nt, Human adenovirus C
caugaagaucuggaagg

SEQ ID NO: 3916302 - RNA, 21 nt, Human adenovirus C
caugaccaugaagaucuggaa

SEQ ID NO: 3916303 - RNA, 16 nt, Human adenovirus C
caugcacgcagcaccu

SEQ ID NO: 3916304 - RNA, 19 nt, Human adenovirus C
caugcagggcacccucccc

SEQ ID NO: 3916305 - RNA, 12 nt, Human adenovirus C
agagacaggacu

SEQ ID NO: 3916306 - RNA, 23 nt, Human adenovirus C
agagcaaaauuuccaacaaaagg

SEQ ID NO: 3916307 - RNA, 18 nt, Human adenovirus C
agagcaacaacagcgcca

SEQ ID NO: 3916308 - RNA, 16 nt, Human adenovirus C
agagccuaguggacaa

SEQ ID NO: 3916309 - RNA, 14 nt, Human adenovirus C
agagcgacugcgcc

SEQ ID NO: 3916310 - RNA, 22 nt, Human adenovirus C
agagcguggugagcgcggcgcc

SEQ ID NO: 3916311 - RNA, 15 nt, Human adenovirus C
agaggaccucugcac

SEQ ID NO: 3916312 - RNA, 20 nt, Human adenovirus C
agaggagcugcugagccgcc

SEQ ID NO: 3916313 - RNA, 18 nt, Human adenovirus C
agaggccgaguccuacuu

SEQ ID NO: 3916314 - RNA, 20 nt, Human adenovirus C
agauaucggcaccagcaaua

SEQ ID NO: 3916315 - RNA, 21 nt, Human adenovirus C
agauauggcccucaccugccg

SEQ ID NO: 3916316 - RNA, 13 nt, Human adenovirus C
agaucagcuggga

SEQ ID NO: 3916317 - RNA, 14 nt, Human adenovirus C
agaucagcugggaa

SEQ ID NO: 3916318 - RNA, 12 nt, Human adenovirus C
agauccgcgucc

SEQ ID NO: 3916319 - RNA, 13 nt, Human adenovirus C
agaucggcggcgc

SEQ ID NO: 3916320 - RNA, 14 nt, Human adenovirus C
agaucuccgcgucc

SEQ ID NO: 3916321 - RNA, 13 nt, Human adenovirus C
agaucuuauucca

SEQ ID NO: 3916322 - RNA, 20 nt, Human adenovirus C
agaucuugguugugggccau

SEQ ID NO: 3916323 - RNA, 19 nt, Human adenovirus C
agaugacuaacucaggggc

SEQ ID NO: 3916324 - RNA, 21 nt, Human adenovirus C
agaugccgcggugcaggcggc

SEQ ID NO: 3916325 - RNA, 19 nt, Human adenovirus C
agaugcgggccaugagcug

SEQ ID NO: 3916326 - RNA, 12 nt, Human adenovirus C
agauggccuggc

SEQ ID NO: 3916327 - RNA, 21 nt, Human adenovirus C
agauugagguacugaaaugug

SEQ ID NO: 3916328 - RNA, 14 nt, Human adenovirus C
agcaacaacagcgc

SEQ ID NO: 3916329 - RNA, 12 nt, Human adenovirus C
agcaacagcagc

SEQ ID NO: 3916330 - RNA, 16 nt, Human adenovirus C
agcaacagcaggagga

SEQ ID NO: 3916331 - RNA, 22 nt, Human adenovirus C
agcaagccgcucauggcgcagc

SEQ ID NO: 3916332 - RNA, 14 nt, Human adenovirus C
agcaaggccugccc

SEQ ID NO: 3916333 - RNA, 14 nt, Human adenovirus C
agcaaggccuggaa

SEQ ID NO: 3916334 - RNA, 13 nt, Human adenovirus C
agcacagcaccac

SEQ ID NO: 3916335 - RNA, 23 nt, Human adenovirus C
agcagaaaccugugcugccaggg

SEQ ID NO: 3916336 - RNA, 17 nt, Human adenovirus C
agcagacggugaaccag

SEQ ID NO: 3916337 - RNA, 14 nt, Human adenovirus C
agcagagcgugagc

SEQ ID NO: 3916338 - RNA, 15 nt, Human adenovirus C
agcagcagggcaacc

SEQ ID NO: 3916339 - RNA, 15 nt, Human adenovirus C
agcagccgcggccau

SEQ ID NO: 3916340 - RNA, 18 nt, Human adenovirus C
agcaggaggaagccaggc

SEQ ID NO: 3916341 - RNA, 18 nt, Human adenovirus C
agcagggcaaccugggcu

SEQ ID NO: 3916342 - RNA, 21 nt, Human adenovirus C
agcagguuccugagcagcugc

SEQ ID NO: 3916343 - RNA, 23 nt, Human adenovirus C
agcagguuccugagcagcugcga

SEQ ID NO: 3916344 - RNA, 24 nt, Human adenovirus C
agcagguuccugagcagcugcgac

SEQ ID NO: 3916345 - RNA, 14 nt, Human adenovirus C
agcaucgcuacaac

SEQ ID NO: 3916346 - RNA, 22 nt, Human adenovirus C
agcaugaagggcacgagcugcu

SEQ ID NO: 3916347 - RNA, 20 nt, Human adenovirus C
agcaugauaaauauguggcc

SEQ ID NO: 3916348 - RNA, 12 nt, Human adenovirus C
agcaugaugcaa

SEQ ID NO: 3916349 - RNA, 20 nt, Human adenovirus C
agcauuaaguggcucgcucc

SEQ ID NO: 3916350 - RNA, 20 nt, Human adenovirus C
agccaaaaaacccacaacuu

SEQ ID NO: 3916351 - RNA, 16 nt, Human adenovirus C
agccagaucagcaacu

SEQ ID NO: 3916352 - RNA, 18 nt, Human adenovirus C
agccaguggcaacuggca

SEQ ID NO: 3916353 - RNA, 12 nt, Human adenovirus C
agcccacccugc

SEQ ID NO: 3916354 - RNA, 15 nt, Human adenovirus C
agccccaccaccaca

SEQ ID NO: 3916355 - RNA, 22 nt, Human adenovirus C
agcccgcuugcaagcagugcag

SEQ ID NO: 3916356 - RNA, 21 nt, Human adenovirus C
agcccgugacacugcagcagg

SEQ ID NO: 3916357 - RNA, 14 nt, Human adenovirus C
agcccgugcuggcc

SEQ ID NO: 3916358 - RNA, 21 nt, Human adenovirus C
agcccguguucugacagggcc

SEQ ID NO: 3916359 - RNA, 18 nt, Human adenovirus C
agcccuacuccggcacug

SEQ ID NO: 3916360 - RNA, 22 nt, Human adenovirus C
agcccuacuccggcacugccua

SEQ ID NO: 3916361 - RNA, 16 nt, Human adenovirus C
agcccuaucagcagcc

SEQ ID NO: 3916362 - RNA, 20 nt, Human adenovirus C
agccgacgcgcccuggaggc

SEQ ID NO: 3916363 - RNA, 16 nt, Human adenovirus C
agccgcgcgcuggggc

SEQ ID NO: 3916364 - RNA, 15 nt, Human adenovirus C
agccgcgcuccggag

SEQ ID NO: 3916365 - RNA, 13 nt, Human adenovirus C
agccggccuggac

SEQ ID NO: 3916366 - RNA, 13 nt, Human adenovirus C
agccggcggcgcg

SEQ ID NO: 3916367 - RNA, 21 nt, Human adenovirus C
agccuaaagcccgugacacug

SEQ ID NO: 3916368 - RNA, 19 nt, Human adenovirus C
agccugauucgggaguuua

SEQ ID NO: 3916369 - RNA, 22 nt, Human adenovirus C
agccuuucuaccggcacuucuu

SEQ ID NO: 3916370 - RNA, 22 nt, Human adenovirus C
agcgacacccaagggugcagcu

SEQ ID NO: 3916371 - RNA, 16 nt, Human adenovirus C
agcgacgaccugggcg

SEQ ID NO: 3916372 - RNA, 22 nt, Human adenovirus C
agcgaggaggagcgcaucuugc

SEQ ID NO: 3916373 - RNA, 20 nt, Human adenovirus C
agcgcaaccuaaaggagcug

SEQ ID NO: 3916374 - RNA, 19 nt, Human adenovirus C
agcgcacccugaucucacu

SEQ ID NO: 3916375 - RNA, 23 nt, Human adenovirus C
agcgcauccacaaggccgugagc

SEQ ID NO: 3916376 - RNA, 16 nt, Human adenovirus C
agcgccaaaaacuggu

SEQ ID NO: 3916377 - RNA, 21 nt, Human adenovirus C
agcgccaacucguuugaugga

SEQ ID NO: 3916378 - RNA, 14 nt, Human adenovirus C
agcgcccccugcua

SEQ ID NO: 3916379 - RNA, 13 nt, Human adenovirus C
agcgccucgggga

SEQ ID NO: 3916380 - RNA, 13 nt, Human adenovirus C
agcgccugcacug

SEQ ID NO: 3916381 - RNA, 19 nt, Human adenovirus C
agcgcgcgcucguaugggu

SEQ ID NO: 3916382 - RNA, 17 nt, Human adenovirus C
agcgcgcuaccacccca

SEQ ID NO: 3916383 - RNA, 14 nt, Human adenovirus C
agcgcgcugaggcc

SEQ ID NO: 3916384 - RNA, 15 nt, Human adenovirus C
agcgcggggugcccu

SEQ ID NO: 3916385 - RNA, 14 nt, Human adenovirus C
agcgcuccguggcc

SEQ ID NO: 3916386 - RNA, 13 nt, Human adenovirus C
agcggacaagcag

SEQ ID NO: 3916387 - RNA, 17 nt, Human adenovirus C
agcggcaacccuuccag

SEQ ID NO: 3916388 - RNA, 17 nt, Human adenovirus C
cuaagcagccgccgccg

SEQ ID NO: 3916389 - RNA, 23 nt, Human adenovirus C
cuaagcauugcuacuaaagggcc

SEQ ID NO: 3916390 - RNA, 18 nt, Human adenovirus C
cuaaugcggcaggaggga

SEQ ID NO: 3916391 - RNA, 23 nt, Human adenovirus C
cuaauggagaacuccucacuuaa

SEQ ID NO: 3916392 - RNA, 22 nt, Human adenovirus C
cuaauguauuauaacagcacug

SEQ ID NO: 3916393 - RNA, 14 nt, Human adenovirus C
cuacaacaaacaga

SEQ ID NO: 3916394 - RNA, 16 nt, Human adenovirus C
cuacaacguagcucag

SEQ ID NO: 3916395 - RNA, 17 nt, Human adenovirus C
cuaccgcgucaggaggg

SEQ ID NO: 3916396 - RNA, 19 nt, Human adenovirus C
cuaccuuaccaaugcaauu

SEQ ID NO: 3916397 - RNA, 14 nt, Human adenovirus C
cuacgacuacauga

SEQ ID NO: 3916398 - RNA, 16 nt, Human adenovirus C
cuacguccgcgacugc

SEQ ID NO: 3916399 - RNA, 15 nt, Human adenovirus C
gcguggucaaacucu

SEQ ID NO: 3916400 - RNA, 22 nt, Human adenovirus C
gcgugucgaacccaggugugcg

SEQ ID NO: 3916401 - RNA, 12 nt, Human adenovirus C
gcuaaccagcgu

SEQ ID NO: 3916402 - RNA, 19 nt, Human adenovirus C
gcuaauauggccugcugca

SEQ ID NO: 3916403 - RNA, 22 nt, Human adenovirus C
gcuacaacaaacagagcgauuu

SEQ ID NO: 3916404 - RNA, 17 nt, Human adenovirus C
gcuacaacguagcucag

SEQ ID NO: 3916405 - RNA, 23 nt, Human adenovirus C
gcuacaccuaccgccccagaaga

SEQ ID NO: 3916406 - RNA, 12 nt, Human adenovirus C
gcuaccagggcu

SEQ ID NO: 3916407 - RNA, 15 nt, Human adenovirus C
gcuacccacccagcg

SEQ ID NO: 3916408 - RNA, 14 nt, Human adenovirus C
gcuagacugcuccu

SEQ ID NO: 3916409 - RNA, 17 nt, Human adenovirus C
gcuaggagcgcccucuc

SEQ ID NO: 3916410 - RNA, 21 nt, Human adenovirus C
gcuaggucucgcgcggcgguc

SEQ ID NO: 3916411 - RNA, 16 nt, Human adenovirus C
gcuaugcacugcaggg

SEQ ID NO: 3916412 - RNA, 19 nt, Human adenovirus C
gcuauggaucuuaugccag

SEQ ID NO: 3916413 - RNA, 18 nt, Human adenovirus C
gcuaugugcagcagagcg

SEQ ID NO: 3916414 - RNA, 15 nt, Human adenovirus C
gcucaaaaacaugcu

SEQ ID NO: 3916415 - RNA, 22 nt, Human adenovirus C
gcucauggcgcagcuguuccuu

SEQ ID NO: 3916416 - RNA, 19 nt, Human adenovirus C
gcuccacuuaaacucaggc

SEQ ID NO: 3916417 - RNA, 23 nt, Human adenovirus C
gcuccgggcugcgcgcuggccag

SEQ ID NO: 3916418 - RNA, 18 nt, Human adenovirus C
gcuccuaacuccugugag

SEQ ID NO: 3916419 - RNA, 16 nt, Human adenovirus C
gcuccucaggcgccgc

SEQ ID NO: 3916420 - RNA, 21 nt, Human adenovirus C
gcuccucguuuagccaggucu

SEQ ID NO: 3916421 - RNA, 20 nt, Human adenovirus C
gcuccugucgccauccugug

SEQ ID NO: 3916422 - RNA, 23 nt, Human adenovirus C
gcucgcccuugcggcagucugca

SEQ ID NO: 3916423 - RNA, 14 nt, Human adenovirus C
gcucgccugcgcca

SEQ ID NO: 3916424 - RNA, 15 nt, Human adenovirus C
gcucgcgaaggaggc

SEQ ID NO: 3916425 - RNA, 20 nt, Human adenovirus C
gcucggaagacuaucugccu

SEQ ID NO: 3916426 - RNA, 16 nt, Human adenovirus C
gcucggucacgugcuc

SEQ ID NO: 3916427 - RNA, 16 nt, Human adenovirus C
gcucguugguccagca

SEQ ID NO: 3916428 - RNA, 18 nt, Human adenovirus C
gcucuugucggagaucag

SEQ ID NO: 3916429 - RNA, 15 nt, Human adenovirus C
gcugaaaauaaaaaa

SEQ ID NO: 3916430 - RNA, 17 nt, Human adenovirus C
gcugaccugcgcugggc

SEQ ID NO: 3916431 - RNA, 21 nt, Human adenovirus C
gcugcaaacuuucuccaaagu

SEQ ID NO: 3916432 - RNA, 14 nt, Human adenovirus C
gcugcaacccgcgg

SEQ ID NO: 3916433 - RNA, 12 nt, Human adenovirus C
gcugcagagcca

SEQ ID NO: 3916434 - RNA, 12 nt, Human adenovirus C
gcugcagcugcc

SEQ ID NO: 3916435 - RNA, 15 nt, Human adenovirus C
gcugccgccgccgcc

SEQ ID NO: 3916436 - RNA, 19 nt, Human adenovirus C
gcugccgucaucccugagc

SEQ ID NO: 3916437 - RNA, 12 nt, Human adenovirus C
gcugcgcaaccc

SEQ ID NO: 3916438 - RNA, 15 nt, Human adenovirus C
gcugcgcgaggagga

SEQ ID NO: 3916439 - RNA, 18 nt, Human adenovirus C
gcugcgcgcuggccaggg

SEQ ID NO: 3916440 - RNA, 21 nt, Human adenovirus C
gcugcggccccgcggucagau

SEQ ID NO: 3916441 - RNA, 23 nt, Human adenovirus C
gcugcggggugguguuguagaug

SEQ ID NO: 3916442 - RNA, 16 nt, Human adenovirus C
gcugcuccucuucccg

SEQ ID NO: 3916443 - RNA, 14 nt, Human adenovirus C
gcuggaacagagcu

SEQ ID NO: 3916444 - RNA, 17 nt, Human adenovirus C
gcuggaagccaugcuca

SEQ ID NO: 3916445 - RNA, 23 nt, Human adenovirus C
gcuggccgaaaacagggccaucc

SEQ ID NO: 3916446 - RNA, 15 nt, Human adenovirus C
gcuggcgcgcacgua

SEQ ID NO: 3916447 - RNA, 20 nt, Human adenovirus C
gcuggcgguagaggggccag

SEQ ID NO: 3916448 - RNA, 16 nt, Human adenovirus C
gcugggccagcacaca

SEQ ID NO: 3916449 - RNA, 17 nt, Human adenovirus C
gcuguaccugccagaca

SEQ ID NO: 3916450 - RNA, 17 nt, Human adenovirus C
gcugucauaccacugca

SEQ ID NO: 3916451 - RNA, 22 nt, Human adenovirus C
gcuguccauggucuggagcucc

SEQ ID NO: 3916452 - RNA, 23 nt, Human adenovirus C
gcuguccuaucaacucuugcuug

SEQ ID NO: 3916453 - RNA, 23 nt, Human adenovirus C
gcugugccuuuuacugcugcugg

SEQ ID NO: 3916454 - RNA, 19 nt, Human adenovirus C
gcugugcgcuuccuagcga

SEQ ID NO: 3916455 - RNA, 19 nt, Human adenovirus C
gcuuauguuuguuugccuu

SEQ ID NO: 3916456 - RNA, 17 nt, Human adenovirus C
gcuuauuacagcgcuug

SEQ ID NO: 3916457 - RNA, 17 nt, Human adenovirus C
gcuuccgcaggccaagc

SEQ ID NO: 3916458 - RNA, 14 nt, Human adenovirus C
gcuugagcaggcca

SEQ ID NO: 3916459 - RNA, 20 nt, Human adenovirus C
gcuugcuuugguauguaccu

SEQ ID NO: 3916460 - RNA, 14 nt, Human adenovirus C
ggaacauucccagc

SEQ ID NO: 3916461 - RNA, 17 nt, Human adenovirus C
ggaagacuaucugccug

SEQ ID NO: 3916462 - RNA, 12 nt, Human adenovirus C
ggaagccuggac

SEQ ID NO: 3916463 - RNA, 19 nt, Human adenovirus C
ggacaaguugaaagagcaa

SEQ ID NO: 3916464 - RNA, 14 nt, Human adenovirus C
ggacacgggcagcc

SEQ ID NO: 3916465 - RNA, 18 nt, Human adenovirus C
ggacacgggcagccugga

SEQ ID NO: 3916466 - RNA, 15 nt, Human adenovirus C
ggacaggcuuacccc

SEQ ID NO: 3916467 - RNA, 21 nt, Human adenovirus C
ggacaggcuuaccccgccaac

SEQ ID NO: 3916468 - RNA, 22 nt, Human adenovirus C
ggacagggccucucagaugcug

SEQ ID NO: 3916469 - RNA, 16 nt, Human adenovirus C
ggaccacagaacccac

SEQ ID NO: 3916470 - RNA, 16 nt, Human adenovirus C
ggaccugcuugagcag

SEQ ID NO: 3916471 - RNA, 19 nt, Human adenovirus C
ggaccugcuugagcaggcc

SEQ ID NO: 3916472 - RNA, 20 nt, Human adenovirus C
ggacgaugaguacgagccag

SEQ ID NO: 3916473 - RNA, 12 nt, Human adenovirus C
ggacgcuggaag

SEQ ID NO: 3916474 - RNA, 20 nt, Human adenovirus C
ggacguaaaggcuaaacccu

SEQ ID NO: 3916475 - RNA, 23 nt, Human adenovirus C
ggacgucgcgccgcaccgcgucc

SEQ ID NO: 3916476 - RNA, 16 nt, Human adenovirus C
ggacguuagcgccuga

SEQ ID NO: 3916477 - RNA, 15 nt, Human adenovirus C
ggagagcggugguga

SEQ ID NO: 3916478 - RNA, 14 nt, Human adenovirus C
ggagaggcagagcg

SEQ ID NO: 3916479 - RNA, 22 nt, Human adenovirus C
ggagcgaagaaacccaucugag

SEQ ID NO: 3916480 - RNA, 12 nt, Human adenovirus C
ggagcugaggcc

SEQ ID NO: 3916481 - RNA, 14 nt, Human adenovirus C
ggagcugcccaaga

SEQ ID NO: 3916482 - RNA, 18 nt, Human adenovirus C
ggagcugcugagccgccg

SEQ ID NO: 3916483 - RNA, 21 nt, Human adenovirus C
ggagcuggugcugcgcgcgga

SEQ ID NO: 3916484 - RNA, 18 nt, Human adenovirus C
ggagcuugagugcaugca

SEQ ID NO: 3916485 - RNA, 14 nt, Human adenovirus C
ggaggaagccaggc

SEQ ID NO: 3916486 - RNA, 16 nt, Human adenovirus C
ggaggacuuugagccc

SEQ ID NO: 3916487 - RNA, 19 nt, Human adenovirus C
ggaggagcaacagcaggag

SEQ ID NO: 3916488 - RNA, 15 nt, Human adenovirus C
ggaggcaagcacaca

SEQ ID NO: 3916489 - RNA, 12 nt, Human adenovirus C
ggaggggggaca

SEQ ID NO: 3916490 - RNA, 22 nt, Human adenovirus C
ggaguucacgcugcccgagggc

SEQ ID NO: 3916491 - RNA, 20 nt, Human adenovirus C
ggauagagagccuaguggac

SEQ ID NO: 3916492 - RNA, 12 nt, Human adenovirus C
ggaucagacaau

SEQ ID NO: 3916493 - RNA, 23 nt, Human adenovirus C
ggaucagacaaugcagaaacaca

SEQ ID NO: 3916494 - RNA, 14 nt, Human adenovirus C
ggaugauccuccag

SEQ ID NO: 3916495 - RNA, 18 nt, Human adenovirus C
ggauucauguugugcaga

SEQ ID NO: 3916496 - RNA, 15 nt, Human adenovirus C
ggcaacgugcagacc

SEQ ID NO: 3916497 - RNA, 14 nt, Human adenovirus C
ggcaagcgcgcgcu

SEQ ID NO: 3916498 - RNA, 14 nt, Human adenovirus C
ggcacaugcgagcc

SEQ ID NO: 3916499 - RNA, 22 nt, Human adenovirus C
ggcaccagcucaaucagucaca

SEQ ID NO: 3916500 - RNA, 14 nt, Human adenovirus C
ggcaccaggugcac

SEQ ID NO: 3916501 - RNA, 21 nt, Human adenovirus C
ggcacccaaaaagaagcugca

SEQ ID NO: 3916502 - RNA, 15 nt, Human adenovirus C
ggcacgagcugcuuc

SEQ ID NO: 3916503 - RNA, 13 nt, Human adenovirus C
ggcacuaccugga

SEQ ID NO: 3916504 - RNA, 21 nt, Human adenovirus C
ggcacugccuacaacgcucua

SEQ ID NO: 3916505 - RNA, 14 nt, Human adenovirus C
ggcacuuaggccag

SEQ ID NO: 3916506 - RNA, 13 nt, Human adenovirus C
ggcagaaacagag

SEQ ID NO: 3916507 - RNA, 18 nt, Human adenovirus C
ggcagacaugcagggcac

SEQ ID NO: 3916508 - RNA, 17 nt, Human adenovirus C
ggcagcagcaggaggag

SEQ ID NO: 3916509 - RNA, 24 nt, Human adenovirus C
ggcagccaggugacacuaacgacu

SEQ ID NO: 3916510 - RNA, 15 nt, Human adenovirus C
ggcagccuggaggca

SEQ ID NO: 3916511 - RNA, 21 nt, Human adenovirus C
ggcagccuggaggcaacccug

SEQ ID NO: 3916512 - RNA, 14 nt, Human adenovirus C
ggcagcggcagcaa

SEQ ID NO: 3916513 - RNA, 18 nt, Human adenovirus C
ggcagcggugcacgggcu

SEQ ID NO: 3916514 - RNA, 12 nt, Human adenovirus C
ggcaggagcaga

SEQ ID NO: 3916515 - RNA, 15 nt, Human adenovirus C
ggcaggagcuggugc

SEQ ID NO: 3916516 - RNA, 18 nt, Human adenovirus C
ggcagucugcagcgcugc

SEQ ID NO: 3916517 - RNA, 21 nt, Human adenovirus C
ggcaguugccgaggaugaaga

SEQ ID NO: 3916518 - RNA, 23 nt, Human adenovirus C
gcccugcgcgucggccagguagc

SEQ ID NO: 3916519 - RNA, 22 nt, Human adenovirus C
gcccugcucccagagcaaaaag

SEQ ID NO: 3916520 - RNA, 17 nt, Human adenovirus C
gcccuggaggcagcugg

SEQ ID NO: 3916521 - RNA, 21 nt, Human adenovirus C
gcccuggaggcagcuggggcc

SEQ ID NO: 3916522 - RNA, 15 nt, Human adenovirus C
gcccuggcuggcacg

SEQ ID NO: 3916523 - RNA, 17 nt, Human adenovirus C
gcccuucucggccggca

SEQ ID NO: 3916524 - RNA, 17 nt, Human adenovirus C
gcccuugauggagggca

SEQ ID NO: 3916525 - RNA, 21 nt, Human adenovirus C
gcccuuggaggaggcgccgca

SEQ ID NO: 3916526 - RNA, 16 nt, Human adenovirus C
gcccuuggcgcgcagc

SEQ ID NO: 3916527 - RNA, 23 nt, Human adenovirus C
gccgaagaggugucagacgaaac

SEQ ID NO: 3916528 - RNA, 18 nt, Human adenovirus C
gccgacgcgcccuggagg

SEQ ID NO: 3916529 - RNA, 16 nt, Human adenovirus C
gccgaggaugaagaag

SEQ ID NO: 3916530 - RNA, 20 nt, Human adenovirus C
gccgcacugggcgcaccacc

SEQ ID NO: 3916531 - RNA, 23 nt, Human adenovirus C
gccgcaggccaaccggcucuccg

SEQ ID NO: 3916532 - RNA, 14 nt, Human adenovirus C
gccgccaacaugcu

SEQ ID NO: 3916533 - RNA, 19 nt, Human adenovirus C
gccgccagcgguccgcgau

SEQ ID NO: 3916534 - RNA, 20 nt, Human adenovirus C
gccgccguuagcccaagagc

SEQ ID NO: 3916535 - RNA, 23 nt, Human adenovirus C
gccgccguuagcccaagagcaac

SEQ ID NO: 3916536 - RNA, 22 nt, Human adenovirus C
gccgcgauguuuagcugcacgu

SEQ ID NO: 3916537 - RNA, 19 nt, Human adenovirus C
gccgcgcaccuggcggaca

SEQ ID NO: 3916538 - RNA, 21 nt, Human adenovirus C
gccgcgcgcgggcaggagcug

SEQ ID NO: 3916539 - RNA, 15 nt, Human adenovirus C
gccgcgcgcuggggc

SEQ ID NO: 3916540 - RNA, 18 nt, Human adenovirus C
gccgcucauggcgcagcu

SEQ ID NO: 3916541 - RNA, 20 nt, Human adenovirus C
gccgcuggacgagggcaacc

SEQ ID NO: 3916542 - RNA, 22 nt, Human adenovirus C
gccgcuucagccgcugcagcca

SEQ ID NO: 3916543 - RNA, 21 nt, Human adenovirus C
gccgcuuuggggucacugcua

SEQ ID NO: 3916544 - RNA, 13 nt, Human adenovirus C
gccggccacggcc

SEQ ID NO: 3916545 - RNA, 15 nt, Human adenovirus C
gccggccacggccug

SEQ ID NO: 3916546 - RNA, 12 nt, Human adenovirus C
gccggcggcggu

SEQ ID NO: 3916547 - RNA, 17 nt, Human adenovirus C
gccgggagagggggcag

SEQ ID NO: 3916548 - RNA, 20 nt, Human adenovirus C
gccgggagagggggcagggg

SEQ ID NO: 3916549 - RNA, 15 nt, Human adenovirus C
gccggguggugcacg

SEQ ID NO: 3916550 - RNA, 17 nt, Human adenovirus C
gccguagcgccauugcu

SEQ ID NO: 3916551 - RNA, 15 nt, Human adenovirus C
gccgugcggcaggga

SEQ ID NO: 3916552 - RNA, 23 nt, Human adenovirus C
gccuaaagcgcgagucuggugac

SEQ ID NO: 3916553 - RNA, 18 nt, Human adenovirus C
gccucaacuucuaccccg

SEQ ID NO: 3916554 - RNA, 23 nt, Human adenovirus C
gccuccccccgcugacacccagc

SEQ ID NO: 3916555 - RNA, 20 nt, Human adenovirus C
gccuccgcgguaccugcggc

SEQ ID NO: 3916556 - RNA, 18 nt, Human adenovirus C
gccucggaguaccugagc

SEQ ID NO: 3916557 - RNA, 21 nt, Human adenovirus C
gccucggcgguggcagaugcc

SEQ ID NO: 3916558 - RNA, 21 nt, Human adenovirus C
gccugcgcggccuuccggagc

SEQ ID NO: 3916559 - RNA, 21 nt, Human adenovirus C
gccugcgucauuacccagggc

SEQ ID NO: 3916560 - RNA, 20 nt, Human adenovirus C
gccugcugcaccugcgugag

SEQ ID NO: 3916561 - RNA, 10 nt, Human adenovirus C
gccugcuggg

SEQ ID NO: 3916562 - RNA, 21 nt, Human adenovirus C
gccugcugggcgaggaggagu

SEQ ID NO: 3916563 - RNA, 15 nt, Human adenovirus C
gccugcuuaaaaccc

SEQ ID NO: 3916564 - RNA, 14 nt, Human adenovirus C
gccuggaacagcag

SEQ ID NO: 3916565 - RNA, 20 nt, Human adenovirus C
gccuggaacagcagcacagg

SEQ ID NO: 3916566 - RNA, 15 nt, Human adenovirus C
gccuggaggagcgca

SEQ ID NO: 3916567 - RNA, 21 nt, Human adenovirus C
gccuggcgcaaaaucuccugc

SEQ ID NO: 3916568 - RNA, 15 nt, Human adenovirus C
gccugugaugcugga

SEQ ID NO: 3916569 - RNA, 18 nt, Human adenovirus C
gccuuaggguugccgccu

SEQ ID NO: 3916570 - RNA, 22 nt, Human adenovirus C
gccuucacacgcuugaagacaa

SEQ ID NO: 3916571 - RNA, 14 nt, Human adenovirus C
gccuugcaggcgca

SEQ ID NO: 3916572 - RNA, 15 nt, Human adenovirus C
gcgacgaaugagcuc

SEQ ID NO: 3916573 - RNA, 19 nt, Human adenovirus C
gcgacgaaugagcuccaca

SEQ ID NO: 3916574 - RNA, 13 nt, Human adenovirus C
gcgagauugagcu

SEQ ID NO: 3916575 - RNA, 15 nt, Human adenovirus C
gcgagucuggugacu

SEQ ID NO: 3916576 - RNA, 14 nt, Human adenovirus C
gcgaucguggagca

SEQ ID NO: 3916577 - RNA, 15 nt, Human adenovirus C
gcgaucguggagcac

SEQ ID NO: 3916578 - RNA, 16 nt, Human adenovirus C
gcgaugagcagcuggc

SEQ ID NO: 3916579 - RNA, 16 nt, Human adenovirus C
gcgcaaaaucuccugc

SEQ ID NO: 3916580 - RNA, 21 nt, Human adenovirus C
gcgcaaaggugucccuaacca

SEQ ID NO: 3916581 - RNA, 21 nt, Human adenovirus C
gcgcacacguggcggccgccg

SEQ ID NO: 3916582 - RNA, 15 nt, Human adenovirus C
gcgcacgcuuguggc

SEQ ID NO: 3916583 - RNA, 16 nt, Human adenovirus C
gcgcagaugggagcug

SEQ ID NO: 3916584 - RNA, 16 nt, Human adenovirus C
gcgcagcuugcccuug

SEQ ID NO: 3916585 - RNA, 15 nt, Human adenovirus C
gcgcaggagcacagg

SEQ ID NO: 3916586 - RNA, 17 nt, Human adenovirus C
gcgcaggguggcucgcg

SEQ ID NO: 3916587 - RNA, 18 nt, Human adenovirus C
gcgccaacucguuugaug

SEQ ID NO: 3916588 - RNA, 18 nt, Human adenovirus C
gcgccaguggcggcggcg

SEQ ID NO: 3916589 - RNA, 15 nt, Human adenovirus C
gcgccauccaccacc

SEQ ID NO: 3916590 - RNA, 16 nt, Human adenovirus C
gcgcccuggaggcagc

SEQ ID NO: 3916591 - RNA, 14 nt, Human adenovirus C
gcgccgccggcacu

SEQ ID NO: 3916592 - RNA, 23 nt, Human adenovirus C
gcgccgcgcgcgggcaggagcug

SEQ ID NO: 3916593 - RNA, 21 nt, Human adenovirus C
gcgccugcugggcgaggagga

SEQ ID NO: 3916594 - RNA, 22 nt, Human adenovirus C
gcgcgaaaagaaccugccuccg

SEQ ID NO: 3916595 - RNA, 19 nt, Human adenovirus C
gcgcgaggccguggcgcag

SEQ ID NO: 3916596 - RNA, 14 nt, Human adenovirus C
gcgcgaggcguacg

SEQ ID NO: 3916597 - RNA, 15 nt, Human adenovirus C
gcgcgagggacaggc

SEQ ID NO: 3916598 - RNA, 14 nt, Human adenovirus C
gcgcgcgcaaaccc

SEQ ID NO: 3916599 - RNA, 14 nt, Human adenovirus C
gcgcgcgggcagga

SEQ ID NO: 3916600 - RNA, 18 nt, Human adenovirus C
gcgcgcuaccaccccagc

SEQ ID NO: 3916601 - RNA, 21 nt, Human adenovirus C
gcgcgcugaggccgaggcagc

SEQ ID NO: 3916602 - RNA, 12 nt, Human adenovirus C
gcgcgcuggcca

SEQ ID NO: 3916603 - RNA, 12 nt, Human adenovirus C
gcgcggccgccg

SEQ ID NO: 3916604 - RNA, 14 nt, Human adenovirus C
gcgcggcggcugcu

SEQ ID NO: 3916605 - RNA, 16 nt, Human adenovirus C
gcgcggcggcugcugc

SEQ ID NO: 3916606 - RNA, 13 nt, Human adenovirus C
gcgcgggcaggag

SEQ ID NO: 3916607 - RNA, 12 nt, Human adenovirus C
gcgcuccauggc

SEQ ID NO: 3916608 - RNA, 20 nt, Human adenovirus C
gcgcucccucacccgcagcu

SEQ ID NO: 3916609 - RNA, 21 nt, Human adenovirus C
gcgcuccgaccaacacccagu

SEQ ID NO: 3916610 - RNA, 19 nt, Human adenovirus C
gcgcucgucgggcaccagg

SEQ ID NO: 3916611 - RNA, 16 nt, Human adenovirus C
gcgcugcuccucuucc

SEQ ID NO: 3916612 - RNA, 15 nt, Human adenovirus C
gcggacaagcagcug

SEQ ID NO: 3916613 - RNA, 18 nt, Human adenovirus C
gcggacauuaucuucccc

SEQ ID NO: 3916614 - RNA, 15 nt, Human adenovirus C
gcggcagcggcagca

SEQ ID NO: 3916615 - RNA, 14 nt, Human adenovirus C
gcggcagggcgcug

SEQ ID NO: 3916616 - RNA, 16 nt, Human adenovirus C
gcggcauaaggacaug

SEQ ID NO: 3916617 - RNA, 13 nt, Human adenovirus C
gcggccgccgcag

SEQ ID NO: 3916618 - RNA, 12 nt, Human adenovirus C
gcggcggcagca

SEQ ID NO: 3916619 - RNA, 13 nt, Human adenovirus C
gcggcggcaggag

SEQ ID NO: 3916620 - RNA, 19 nt, Human adenovirus C
gcggcggucaccagaggcu

SEQ ID NO: 3916621 - RNA, 12 nt, Human adenovirus C
gcggcugcugcg

SEQ ID NO: 3916622 - RNA, 17 nt, Human adenovirus C
gcggcuggagcugccca

SEQ ID NO: 3916623 - RNA, 18 nt, Human adenovirus C
gcggcuguagaccacgcc

SEQ ID NO: 3916624 - RNA, 13 nt, Human adenovirus C
gcgggcaggagcu

SEQ ID NO: 3916625 - RNA, 17 nt, Human adenovirus C
gcgggcugcucugcucg

SEQ ID NO: 3916626 - RNA, 13 nt, Human adenovirus C
gcgggguggugga

SEQ ID NO: 3916627 - RNA, 22 nt, Human adenovirus C
gcgguacgguuuuccuggccaa

SEQ ID NO: 3916628 - RNA, 18 nt, Human adenovirus C
gcggucccauccaagguc

SEQ ID NO: 3916629 - RNA, 13 nt, Human adenovirus C
gcgguggcacccg

SEQ ID NO: 3916630 - RNA, 14 nt, Human adenovirus C
gcgguugugcaggg

SEQ ID NO: 3916631 - RNA, 16 nt, Human adenovirus C
gcgucagaaugugaug

SEQ ID NO: 3916632 - RNA, 15 nt, Human adenovirus C
gcgucauuacccagg

SEQ ID NO: 3916633 - RNA, 18 nt, Human adenovirus C
gcguccaugucgccgcca

SEQ ID NO: 3916634 - RNA, 22 nt, Human adenovirus C
gcguccaugucgccgccagagg

SEQ ID NO: 3916635 - RNA, 23 nt, Human adenovirus C
gcgucccugcgccgugccgccag

SEQ ID NO: 3916636 - RNA, 16 nt, Human adenovirus C
gcgucucuggccccgc

SEQ ID NO: 3916637 - RNA, 14 nt, Human adenovirus C
cgcgucggccaggu

SEQ ID NO: 3916638 - RNA, 13 nt, Human adenovirus C
cgcgugcccgugc

SEQ ID NO: 3916639 - RNA, 15 nt, Human adenovirus C
cgcgugucgaaccca

SEQ ID NO: 3916640 - RNA, 15 nt, Human adenovirus C
cgcguugcucagggc

SEQ ID NO: 3916641 - RNA, 16 nt, Human adenovirus C
cgcuaacuacugccac

SEQ ID NO: 3916642 - RNA, 20 nt, Human adenovirus C
cgcuccacgguggcggcgag

SEQ ID NO: 3916643 - RNA, 13 nt, Human adenovirus C
cgcuccagggugu

SEQ ID NO: 3916644 - RNA, 12 nt, Human adenovirus C
cgcucccucacc

SEQ ID NO: 3916645 - RNA, 23 nt, Human adenovirus C
cgcucgaucaucuccccgcggcg

SEQ ID NO: 3916646 - RNA, 21 nt, Human adenovirus C
cgcucgucgggcaccaggugc

SEQ ID NO: 3916647 - RNA, 18 nt, Human adenovirus C
cgcugaccugcgcugggc

SEQ ID NO: 3916648 - RNA, 21 nt, Human adenovirus C
cgcugcaaccuaugcaccccg

SEQ ID NO: 3916649 - RNA, 21 nt, Human adenovirus C
cgcugcccugguguaccagga

SEQ ID NO: 3916650 - RNA, 15 nt, Human adenovirus C
cgcugcggcugcugu

SEQ ID NO: 3916651 - RNA, 16 nt, Human adenovirus C
cgcugcggcugcuguu

SEQ ID NO: 3916652 - RNA, 21 nt, Human adenovirus C
cuccuucagcgcgcgcugccc

SEQ ID NO: 3916653 - RNA, 19 nt, Human adenovirus C
aguucgccaccaccgccuc

SEQ ID NO: 3916654 - RNA, 21 nt, Human adenovirus C
aguucgccaccaccgccucca

SEQ ID NO: 3916655 - RNA, 18 nt, Human adenovirus C
auaaaaugcaccacagaa

SEQ ID NO: 3916656 - RNA, 13 nt, Human adenovirus C
auaacaacucagg

SEQ ID NO: 3916657 - RNA, 22 nt, Human adenovirus C
auaagggccuccccuucuucuu

SEQ ID NO: 3916658 - RNA, 16 nt, Human adenovirus C
auacaaggaguaucag

SEQ ID NO: 3916659 - RNA, 22 nt, Human adenovirus C
auacacaggguugcagcacugg

SEQ ID NO: 3916660 - RNA, 14 nt, Human adenovirus C
auacagacuugaga

SEQ ID NO: 3916661 - RNA, 13 nt, Human adenovirus C
auacccaccacca

SEQ ID NO: 3916662 - RNA, 22 nt, Human adenovirus C
auacggccgccagagcuuccac

SEQ ID NO: 3916663 - RNA, 13 nt, Human adenovirus C
auacgucacuucc

SEQ ID NO: 3916664 - RNA, 19 nt, Human adenovirus C
auacuacauggacaaaaga

SEQ ID NO: 3916665 - RNA, 23 nt, Human adenovirus C
auacugggacagucaggcagagg

SEQ ID NO: 3916666 - RNA, 16 nt, Human adenovirus C
auacuuuccaggagau

SEQ ID NO: 3916667 - RNA, 14 nt, Human adenovirus C
auagcggccgggca

SEQ ID NO: 3916668 - RNA, 20 nt, Human adenovirus C
auauaggacuaaaaaaugac

SEQ ID NO: 3916669 - RNA, 16 nt, Human adenovirus C
auaucgcccagcaaua

SEQ ID NO: 3916670 - RNA, 15 nt, Human adenovirus C
auauggccugcugca

SEQ ID NO: 3916671 - RNA, 23 nt, Human adenovirus C
auauuggcuaccagggcuucuac

SEQ ID NO: 3916672 - RNA, 20 nt, Human adenovirus C
aucaacuuugcgucucuggc

SEQ ID NO: 3916673 - RNA, 19 nt, Human adenovirus C
aucaccgucacccagcacu

SEQ ID NO: 3916674 - RNA, 15 nt, Human adenovirus C
aucaccuacgaugac

SEQ ID NO: 3916675 - RNA, 13 nt, Human adenovirus C
aucagcacaguaa

SEQ ID NO: 3916676 - RNA, 13 nt, Human adenovirus C
aucaggcuacuaa

SEQ ID NO: 3916677 - RNA, 18 nt, Human adenovirus C
aucaggcuacuaagaaaa

SEQ ID NO: 3916678 - RNA, 18 nt, Human adenovirus C
aucaugauugcaaaaauu

SEQ ID NO: 3916679 - RNA, 14 nt, Human adenovirus C
auccagcggcggcg

SEQ ID NO: 3916680 - RNA, 13 nt, Human adenovirus C
aucccagggaaca

SEQ ID NO: 3916681 - RNA, 12 nt, Human adenovirus C
aucccuguggac

SEQ ID NO: 3916682 - RNA, 16 nt, Human adenovirus C
auccgcaauacagaga

SEQ ID NO: 3916683 - RNA, 20 nt, Human adenovirus C
auccgcucauggacccuccu

SEQ ID NO: 3916684 - RNA, 14 nt, Human adenovirus C
auccuacacggugu

SEQ ID NO: 3916685 - RNA, 17 nt, Human adenovirus C
aucgcaacaccacugcu

SEQ ID NO: 3916686 - RNA, 13 nt, Human adenovirus C
aucggcaccagca

SEQ ID NO: 3916687 - RNA, 14 nt, Human adenovirus C
aucuauaggccuau

SEQ ID NO: 3916688 - RNA, 18 nt, Human adenovirus C
aucuccagcggccacacc

SEQ ID NO: 3916689 - RNA, 15 nt, Human adenovirus C
aucuccccgcggcga

SEQ ID NO: 3916690 - RNA, 14 nt, Human adenovirus C
aucucgggccagga

SEQ ID NO: 3916691 - RNA, 13 nt, Human adenovirus C
aucugacaacccc

SEQ ID NO: 3916692 - RNA, 15 nt, Human adenovirus C
aucugcuggcgcaga

SEQ ID NO: 3916693 - RNA, 16 nt, Human adenovirus C
aucuggagaucuuuca

SEQ ID NO: 3916694 - RNA, 18 nt, Human adenovirus C
aucugggucaccaggcgc

SEQ ID NO: 3916695 - RNA, 23 nt, Human adenovirus C
aucuuccaccgcggaugcuggcg

SEQ ID NO: 3916696 - RNA, 17 nt, Human adenovirus C
aucuugguuacaucuga

SEQ ID NO: 3916697 - RNA, 12 nt, Human adenovirus C
augagcgcggga

SEQ ID NO: 3916698 - RNA, 15 nt, Human adenovirus C
augagcuugaucugc

SEQ ID NO: 3916699 - RNA, 14 nt, Human adenovirus C
augagguacaugau

SEQ ID NO: 3916700 - RNA, 14 nt, Human adenovirus C
augaguacgagcca

SEQ ID NO: 3916701 - RNA, 15 nt, Human adenovirus C
augcaccacagaaca

SEQ ID NO: 3916702 - RNA, 14 nt, Human adenovirus C
augcagccggugga

SEQ ID NO: 3916703 - RNA, 16 nt, Human adenovirus C
augcagcgcgcggcga

SEQ ID NO: 3916704 - RNA, 18 nt, Human adenovirus C
augccaugaaccacccua

SEQ ID NO: 3916705 - RNA, 24 nt, Human adenovirus C
augcccaggcuccuuugucuggag

SEQ ID NO: 3916706 - RNA, 17 nt, Human adenovirus C
augcgagccgaucggga

SEQ ID NO: 3916707 - RNA, 14 nt, Human adenovirus C
augcgccacuggca

SEQ ID NO: 3916708 - RNA, 18 nt, Human adenovirus C
augcgccacuggcaggga

SEQ ID NO: 3916709 - RNA, 14 nt, Human adenovirus C
augcgcgggcggca

SEQ ID NO: 3916710 - RNA, 13 nt, Human adenovirus C
augcgggccuccg

SEQ ID NO: 3916711 - RNA, 15 nt, Human adenovirus C
caaagcccaagaaau

SEQ ID NO: 3916712 - RNA, 20 nt, Human adenovirus C
caaaggcacgaccgucagcg

SEQ ID NO: 3916713 - RNA, 17 nt, Human adenovirus C
caaagggcccuggcugg

SEQ ID NO: 3916714 - RNA, 18 nt, Human adenovirus C
caaagggcccuggcuggc

SEQ ID NO: 3916715 - RNA, 16 nt, Human adenovirus C
caaagggguucugccg

SEQ ID NO: 3916716 - RNA, 15 nt, Human adenovirus C
caaagucaaacugcu

SEQ ID NO: 3916717 - RNA, 16 nt, Human adenovirus C
caaauagaugagccuc

SEQ ID NO: 3916718 - RNA, 23 nt, Human adenovirus C
caaauuccucauguucuuguccc

SEQ ID NO: 3916719 - RNA, 24 nt, Human adenovirus C
caacagcugccgccaugggcucca

SEQ ID NO: 3916720 - RNA, 19 nt, Human adenovirus C
caaccaggcagugcaaaau

SEQ ID NO: 3916721 - RNA, 13 nt, Human adenovirus C
caaccggcggcag

SEQ ID NO: 3916722 - RNA, 14 nt, Human adenovirus C
caaccguucccagc

SEQ ID NO: 3916723 - RNA, 15 nt, Human adenovirus C
caaccuccgcuccuc

SEQ ID NO: 3916724 - RNA, 13 nt, Human adenovirus C
caacgccacaaca

SEQ ID NO: 3916725 - RNA, 14 nt, Human adenovirus C
caacgcgcagcccg

SEQ ID NO: 3916726 - RNA, 20 nt, Human adenovirus C
caacgcgcgccuagccgugc

SEQ ID NO: 3916727 - RNA, 17 nt, Human adenovirus C
caacuaacauaaacaca

SEQ ID NO: 3916728 - RNA, 15 nt, Human adenovirus C
caacucgcugcugca

SEQ ID NO: 3916729 - RNA, 20 nt, Human adenovirus C
caacucggccgccuguggac

SEQ ID NO: 3916730 - RNA, 13 nt, Human adenovirus C
caacuggccccaa

SEQ ID NO: 3916731 - RNA, 21 nt, Human adenovirus C
caacuggccccaaacucccau

SEQ ID NO: 3916732 - RNA, 18 nt, Human adenovirus C
caacuguccuaacccugg

SEQ ID NO: 3916733 - RNA, 15 nt, Human adenovirus C
caacuucagacuggg

SEQ ID NO: 3916734 - RNA, 15 nt, Human adenovirus C
caacuugcgguugcu

SEQ ID NO: 3916735 - RNA, 17 nt, Human adenovirus C
caacuuugguagcugcc

SEQ ID NO: 3916736 - RNA, 18 nt, Human adenovirus C
caacuuugguagcugccu

SEQ ID NO: 3916737 - RNA, 15 nt, Human adenovirus C
caagaccaggacgac

SEQ ID NO: 3916738 - RNA, 14 nt, Human adenovirus C
caagcagguggcac

SEQ ID NO: 3916739 - RNA, 18 nt, Human adenovirus C
caagccccgaaagcuaaa

SEQ ID NO: 3916740 - RNA, 22 nt, Human adenovirus C
caagcggcaacccuuccaggag

SEQ ID NO: 3916741 - RNA, 20 nt, Human adenovirus C
caagcuaaugauggccgcag

SEQ ID NO: 3916742 - RNA, 15 nt, Human adenovirus C
caagcuacccaccca

SEQ ID NO: 3916743 - RNA, 23 nt, Human adenovirus C
caagcugauugccaggggcaggc

SEQ ID NO: 3916744 - RNA, 20 nt, Human adenovirus C
caaggacugguuccuggugc

SEQ ID NO: 3916745 - RNA, 21 nt, Human adenovirus C
caaggccuggaacagcagcac

SEQ ID NO: 3916746 - RNA, 15 nt, Human adenovirus C
caaguagcacaaaac

SEQ ID NO: 3916747 - RNA, 15 nt, Human adenovirus C
caagucauuuuucau

SEQ ID NO: 3916748 - RNA, 15 nt, Human adenovirus C
caauaaaaacuaaaa

SEQ ID NO: 3916749 - RNA, 16 nt, Human adenovirus C
caauaaaaacuaaaau

SEQ ID NO: 3916750 - RNA, 16 nt, Human adenovirus C
caaucuccucuuccau

SEQ ID NO: 3916751 - RNA, 22 nt, Human adenovirus C
caaugcagaaacacaagcuaaa

SEQ ID NO: 3916752 - RNA, 19 nt, Human adenovirus C
caauucuucucaaauacua

SEQ ID NO: 3916753 - RNA, 13 nt, Human adenovirus C
cacaacacggccu

SEQ ID NO: 3916754 - RNA, 16 nt, Human adenovirus C
cacaagccccacugac

SEQ ID NO: 3916755 - RNA, 12 nt, Human adenovirus C
cacaauguggcc

SEQ ID NO: 3916756 - RNA, 13 nt, Human adenovirus C
cacaauguggccu

SEQ ID NO: 3916757 - RNA, 15 nt, Human adenovirus C
cacagaccugggcca

SEQ ID NO: 3916758 - RNA, 16 nt, Human adenovirus C
cacaggcugcgcacca

SEQ ID NO: 3916759 - RNA, 18 nt, Human adenovirus C
cacaggcuggggccugcg

SEQ ID NO: 3916760 - RNA, 22 nt, Human adenovirus C
cacaguaacugcagcacagcac

SEQ ID NO: 3916761 - RNA, 17 nt, Human adenovirus C
cacaucucgggccagga

SEQ ID NO: 3916762 - RNA, 16 nt, Human adenovirus C
cacauuucggccccac

SEQ ID NO: 3916763 - RNA, 11 nt, Human adenovirus C
caccaaggcca

SEQ ID NO: 3916764 - RNA, 14 nt, Human adenovirus C
caccaccacccucc

SEQ ID NO: 3916765 - RNA, 14 nt, Human adenovirus C
caccacccuccuca

SEQ ID NO: 3916766 - RNA, 20 nt, Human adenovirus C
caccaccgccuccaccgaug

SEQ ID NO: 3916767 - RNA, 23 nt, Human adenovirus C
caccacugugguacuucccagag

SEQ ID NO: 3916768 - RNA, 17 nt, Human adenovirus C
cacccacagccgccuga

SEQ ID NO: 3916769 - RNA, 15 nt, Human adenovirus C
caccccgcaccgcuc

SEQ ID NO: 3916770 - RNA, 13 nt, Human adenovirus C
cacccgcagcugc

SEQ ID NO: 3916771 - RNA, 12 nt, Human adenovirus C
cacccgcccgcg

SEQ ID NO: 3916772 - RNA, 20 nt, Human adenovirus C
caccgaacagggcggggaug

SEQ ID NO: 3916773 - RNA, 14 nt, Human adenovirus C
caccgccagcgcac

SEQ ID NO: 3916774 - RNA, 14 nt, Human adenovirus C
caccgcccgcagca

SEQ ID NO: 3916775 - RNA, 14 nt, Human adenovirus C
caccgccuccaccg

SEQ ID NO: 3916776 - RNA, 13 nt, Human adenovirus C
caccgcucugcuu

SEQ ID NO: 3916777 - RNA, 15 nt, Human adenovirus C
ucuagcgccugcugc

SEQ ID NO: 3916778 - RNA, 16 nt, Human adenovirus C
ucuaugcccaggcucc

SEQ ID NO: 3916779 - RNA, 15 nt, Human adenovirus C
ucucaaaagcgggca

SEQ ID NO: 3916780 - RNA, 17 nt, Human adenovirus C
ucuccuucgcccgccgc

SEQ ID NO: 3916781 - RNA, 18 nt, Human adenovirus C
ucuccuucgcccgccgcu

SEQ ID NO: 3916782 - RNA, 15 nt, Human adenovirus C
ucucgcaaggccugg

SEQ ID NO: 3916783 - RNA, 21 nt, Human adenovirus C
ucucgcaaggccuggccagug

SEQ ID NO: 3916784 - RNA, 21 nt, Human adenovirus C
ucucgcauuccacgagccagg

SEQ ID NO: 3916785 - RNA, 20 nt, Human adenovirus C
ucugcagaauuaaggaggau

SEQ ID NO: 3916786 - RNA, 11 nt, Human adenovirus C
ucugcagagca

SEQ ID NO: 3916787 - RNA, 15 nt, Human adenovirus C
ucugcccgccaccug

SEQ ID NO: 3916788 - RNA, 19 nt, Human adenovirus C
ucugcuuaaaagccaccug

SEQ ID NO: 3916789 - RNA, 16 nt, Human adenovirus C
ucuggaaggugcugag

SEQ ID NO: 3916790 - RNA, 17 nt, Human adenovirus C
ucuggaaggugcugagg

SEQ ID NO: 3916791 - RNA, 15 nt, Human adenovirus C
ucuggggugaugcag

SEQ ID NO: 3916792 - RNA, 14 nt, Human adenovirus C
ucuuaaucacaccu

SEQ ID NO: 3916793 - RNA, 15 nt, Human adenovirus C
ucuuccauaagggcc

SEQ ID NO: 3916794 - RNA, 14 nt, Human adenovirus C
ucuucuucuucugg

SEQ ID NO: 3916795 - RNA, 15 nt, Human adenovirus C
ucuuguugcugguga

SEQ ID NO: 3916796 - RNA, 12 nt, Human adenovirus C
ugaaccaggaga

SEQ ID NO: 3916797 - RNA, 19 nt, Human adenovirus C
ugaacgcgcuccccuccgg

SEQ ID NO: 3916798 - RNA, 17 nt, Human adenovirus C
ugaagaagaggaagaag

SEQ ID NO: 3916799 - RNA, 22 nt, Human adenovirus C
ugaagacaaaggaaaccccuuc

SEQ ID NO: 3916800 - RNA, 14 nt, Human adenovirus C
ugaagaugaagaag

SEQ ID NO: 3916801 - RNA, 20 nt, Human adenovirus C
ugaaggggugcgcuccgggc

SEQ ID NO: 3916802 - RNA, 22 nt, Human adenovirus C
ugaaguuuucacuccacaggcu

SEQ ID NO: 3916803 - RNA, 20 nt, Human adenovirus C
ugaaucuccucuauaaacau

SEQ ID NO: 3916804 - RNA, 19 nt, Human adenovirus C
ugaaugaccaguggagagg

SEQ ID NO: 3916805 - RNA, 18 nt, Human adenovirus C
ugacagguggagaugacu

SEQ ID NO: 3916806 - RNA, 21 nt, Human adenovirus C
ugacaguggagagcccaggac

SEQ ID NO: 3916807 - RNA, 22 nt, Human adenovirus C
ugacauccgcggcgugcuggac

SEQ ID NO: 3916808 - RNA, 19 nt, Human adenovirus C
ugaccaagcaguuccaggc

SEQ ID NO: 3916809 - RNA, 18 nt, Human adenovirus C
ugaccagcucggcgguga

SEQ ID NO: 3916810 - RNA, 20 nt, Human adenovirus C
ugaccaguggagaggcagag

SEQ ID NO: 3916811 - RNA, 21 nt, Human adenovirus C
ugaccaugaagaucuggaagg

SEQ ID NO: 3916812 - RNA, 16 nt, Human adenovirus C
ugacccgcuguuccuu

SEQ ID NO: 3916813 - RNA, 16 nt, Human adenovirus C
ugaccgaggagcugag

SEQ ID NO: 3916814 - RNA, 19 nt, Human adenovirus C
ugaccuccgagauuuucca

SEQ ID NO: 3916815 - RNA, 13 nt, Human adenovirus C
ugaccugcacguc

SEQ ID NO: 3916816 - RNA, 19 nt, Human adenovirus C
ugacuaccuuuccgccgcc

SEQ ID NO: 3916817 - RNA, 21 nt, Human adenovirus C
ugacucuucuguuagcuggcc

SEQ ID NO: 3916818 - RNA, 14 nt, Human adenovirus C
ugacugcgcguaac

SEQ ID NO: 3916819 - RNA, 15 nt, Human adenovirus C
ugagauuagcuacuu

SEQ ID NO: 3916820 - RNA, 14 nt, Human adenovirus C
ugagccccgggcug

SEQ ID NO: 3916821 - RNA, 16 nt, Human adenovirus C
ugagccccgggcuggu

SEQ ID NO: 3916822 - RNA, 17 nt, Human adenovirus C
ugagccccucgccuggc

SEQ ID NO: 3916823 - RNA, 23 nt, Human adenovirus C
ugagcgcgcgcagcagcagggca

SEQ ID NO: 3916824 - RNA, 23 nt, Human adenovirus C
ugagcuccacaggucacgggcca

SEQ ID NO: 3916825 - RNA, 14 nt, Human adenovirus C
ugagcuccucaggg

SEQ ID NO: 3916826 - RNA, 23 nt, Human adenovirus C
ugagcuugaucugcuggcgcaga

SEQ ID NO: 3916827 - RNA, 17 nt, Human adenovirus C
ugaggcugguccugcug

SEQ ID NO: 3916828 - RNA, 18 nt, Human adenovirus C
cagaccaaagcaaaccuc

SEQ ID NO: 3916829 - RNA, 22 nt, Human adenovirus C
cagacccaucuccuaacugcag

SEQ ID NO: 3916830 - RNA, 18 nt, Human adenovirus C
cagaccguaaaccugagc

SEQ ID NO: 3916831 - RNA, 21 nt, Human adenovirus C
cagaccguaaaccugagccag

SEQ ID NO: 3916832 - RNA, 23 nt, Human adenovirus C
cagaccgucugaagacaccuuca

SEQ ID NO: 3916833 - RNA, 13 nt, Human adenovirus C
cagacgacagcag

SEQ ID NO: 3916834 - RNA, 14 nt, Human adenovirus C
cagacgggccaggg

SEQ ID NO: 3916835 - RNA, 19 nt, Human adenovirus C
cagacuauuuuuuccagac

SEQ ID NO: 3916836 - RNA, 16 nt, Human adenovirus C
cagagacgcccaggcc

SEQ ID NO: 3916837 - RNA, 16 nt, Human adenovirus C
cagagcauaguggugc

SEQ ID NO: 3916838 - RNA, 23 nt, Human adenovirus C
cagaggagguuuuggacgaggag

SEQ ID NO: 3916839 - RNA, 15 nt, Human adenovirus C
cagagggcauggaga

SEQ ID NO: 3916840 - RNA, 18 nt, Human adenovirus C
cagaugccgcggugcagg

SEQ ID NO: 3916841 - RNA, 21 nt, Human adenovirus C
cagcaacuuuccggugguggg

SEQ ID NO: 3916842 - RNA, 16 nt, Human adenovirus C
cagcaauaacacaggc

SEQ ID NO: 3916843 - RNA, 22 nt, Human adenovirus C
cagcaauaacacaggcuggggc

SEQ ID NO: 3916844 - RNA, 23 nt, Human adenovirus C
cagcaauaacacaggcuggggcc

SEQ ID NO: 3916845 - RNA, 19 nt, Human adenovirus C
cagcaauaugagcgguggc

SEQ ID NO: 3916846 - RNA, 13 nt, Human adenovirus C
cagcacagcaggg

SEQ ID NO: 3916847 - RNA, 17 nt, Human adenovirus C
cagcacaguaacugcag

SEQ ID NO: 3916848 - RNA, 14 nt, Human adenovirus C
cagcacuggcaaca

SEQ ID NO: 3916849 - RNA, 15 nt, Human adenovirus C
cagcagcaggaggag

SEQ ID NO: 3916850 - RNA, 23 nt, Human adenovirus C
cagcagcgcgcgaauaaacugcu

SEQ ID NO: 3916851 - RNA, 21 nt, Human adenovirus C
cagcagcggaugauccuccag

SEQ ID NO: 3916852 - RNA, 19 nt, Human adenovirus C
cagcaggaggaagccaggc

SEQ ID NO: 3916853 - RNA, 12 nt, Human adenovirus C
cagcaggaggag

SEQ ID NO: 3916854 - RNA, 23 nt, Human adenovirus C
cagcagguuucugcccugaaggc

SEQ ID NO: 3916855 - RNA, 21 nt, Human adenovirus C
cagcaucguuuaaaagccggu

SEQ ID NO: 3916856 - RNA, 17 nt, Human adenovirus C
cagcauugauggucgcc

SEQ ID NO: 3916857 - RNA, 17 nt, Human adenovirus C
cagccacaacgcgcagc

SEQ ID NO: 3916858 - RNA, 18 nt, Human adenovirus C
cagccauaucccuccggg

SEQ ID NO: 3916859 - RNA, 19 nt, Human adenovirus C
cagcccgugcuggccccga

SEQ ID NO: 3916860 - RNA, 13 nt, Human adenovirus C
cagcccuaucagc

SEQ ID NO: 3916861 - RNA, 16 nt, Human adenovirus C
cagcccuaucagcagc

SEQ ID NO: 3916862 - RNA, 16 nt, Human adenovirus C
cagccgcaccgcggcg

SEQ ID NO: 3916863 - RNA, 15 nt, Human adenovirus C
cagccgcaggccaac

SEQ ID NO: 3916864 - RNA, 17 nt, Human adenovirus C
cagccgcgcgcuggggc

SEQ ID NO: 3916865 - RNA, 14 nt, Human adenovirus C
cagccuaaccgccc

SEQ ID NO: 3916866 - RNA, 14 nt, Human adenovirus C
cagccuccgccgcc

SEQ ID NO: 3916867 - RNA, 21 nt, Human adenovirus C
cagccugcaaagggcccuggc

SEQ ID NO: 3916868 - RNA, 14 nt, Human adenovirus C
cagccuggaggcaa

SEQ ID NO: 3916869 - RNA, 14 nt, Human adenovirus C
cagcgaugugcccc

SEQ ID NO: 3916870 - RNA, 15 nt, Human adenovirus C
cagcgcacuacugcc

SEQ ID NO: 3916871 - RNA, 15 nt, Human adenovirus C
cagcgccagugcgcc

SEQ ID NO: 3916872 - RNA, 14 nt, Human adenovirus C
cagcgccugcauga

SEQ ID NO: 3916873 - RNA, 16 nt, Human adenovirus C
cagcgcgagcaggcag

SEQ ID NO: 3916874 - RNA, 17 nt, Human adenovirus C
cagcgcgagcaggcaga

SEQ ID NO: 3916875 - RNA, 18 nt, Human adenovirus C
cagcgcgagcaggcagag

SEQ ID NO: 3916876 - RNA, 16 nt, Human adenovirus C
cagcgcgcuaccaccc

SEQ ID NO: 3916877 - RNA, 14 nt, Human adenovirus C
cagcggcagcaaca

SEQ ID NO: 3916878 - RNA, 15 nt, Human adenovirus C
cagcggcagcggcag

SEQ ID NO: 3916879 - RNA, 18 nt, Human adenovirus C
cagcggcagcggcagcaa

SEQ ID NO: 3916880 - RNA, 14 nt, Human adenovirus C
cagcggccacaccc

SEQ ID NO: 3916881 - RNA, 12 nt, Human adenovirus C
cagcggcggcag

SEQ ID NO: 3916882 - RNA, 13 nt, Human adenovirus C
cagcggcggcagc

SEQ ID NO: 3916883 - RNA, 22 nt, Human adenovirus C
cagcggguuuaucaccgugcuu

SEQ ID NO: 3916884 - RNA, 23 nt, Human adenovirus C
cagcguaaaucccacacugcagg

SEQ ID NO: 3916885 - RNA, 15 nt, Human adenovirus C
cagcguagucugggu

SEQ ID NO: 3916886 - RNA, 22 nt, Human adenovirus C
cagcgugagcgcgcgcagcagc

SEQ ID NO: 3916887 - RNA, 24 nt, Human adenovirus C
cagcgugagcgcgcgcagcagcag

SEQ ID NO: 3916888 - RNA, 23 nt, Human adenovirus C
cagcuagccaacuaccuugccua

SEQ ID NO: 3916889 - RNA, 14 nt, Human adenovirus C
cagcucggcgguga

SEQ ID NO: 3916890 - RNA, 19 nt, Human adenovirus C
cagcucggucacgugcucu

SEQ ID NO: 3916891 - RNA, 23 nt, Human adenovirus C
cagcugaccacuuacuggcugca

SEQ ID NO: 3916892 - RNA, 16 nt, Human adenovirus C
cagcugcuacaacaaa

SEQ ID NO: 3916893 - RNA, 20 nt, Human adenovirus C
cagcuuccuggagcgccacu

SEQ ID NO: 3916894 - RNA, 19 nt, Human adenovirus C
cagcuugagccuggcugac

SEQ ID NO: 3916895 - RNA, 17 nt, Human adenovirus C
cagcuuguugaccagcu

SEQ ID NO: 3916896 - RNA, 15 nt, Human adenovirus C
caggaauuguugcua

SEQ ID NO: 3916897 - RNA, 19 nt, Human adenovirus C
caggacccuggugcugcca

SEQ ID NO: 3916898 - RNA, 17 nt, Human adenovirus C
caggacgacgcagaggc

SEQ ID NO: 3916899 - RNA, 18 nt, Human adenovirus C
caggacgacgcagaggca

SEQ ID NO: 3916900 - RNA, 21 nt, Human adenovirus C
caggagcacagggaugugccc

SEQ ID NO: 3916901 - RNA, 12 nt, Human adenovirus C
ugcuucuucccc

SEQ ID NO: 3916902 - RNA, 12 nt, Human adenovirus C
ugcuugcuugca

SEQ ID NO: 3916903 - RNA, 19 nt, Human adenovirus C
ugcuuguauuccccuggac

SEQ ID NO: 3916904 - RNA, 13 nt, Human adenovirus C
uggaacucuacaa

SEQ ID NO: 3916905 - RNA, 13 nt, Human adenovirus C
uggaagccaugcu

SEQ ID NO: 3916906 - RNA, 20 nt, Human adenovirus C
uggaagcgacgaaugagcuc

SEQ ID NO: 3916907 - RNA, 15 nt, Human adenovirus C
uggaaggggguggug

SEQ ID NO: 3916908 - RNA, 14 nt, Human adenovirus C
uggacaccucccac

SEQ ID NO: 3916909 - RNA, 18 nt, Human adenovirus C
uggacuuggaggagggcg

SEQ ID NO: 3916910 - RNA, 16 nt, Human adenovirus C
uggagccugggcugga

SEQ ID NO: 3916911 - RNA, 20 nt, Human adenovirus C
uggaggagcgacgcaagcua

SEQ ID NO: 3916912 - RNA, 16 nt, Human adenovirus C
uggaggaggcgccgca

SEQ ID NO: 3916913 - RNA, 18 nt, Human adenovirus C
uggaggaguggcuguuga

SEQ ID NO: 3916914 - RNA, 14 nt, Human adenovirus C
uggaggcagcuggg

SEQ ID NO: 3916915 - RNA, 20 nt, Human adenovirus C
uggagucagucgagaaggag

SEQ ID NO: 3916916 - RNA, 14 nt, Human adenovirus C
uggagugcuggugg

SEQ ID NO: 3916917 - RNA, 15 nt, Human adenovirus C
uggaucugcgccagc

SEQ ID NO: 3916918 - RNA, 22 nt, Human adenovirus C
uggcaaccaccgcuccucugau

SEQ ID NO: 3916919 - RNA, 21 nt, Human adenovirus C
uggcaaugggcccacgggcgg

SEQ ID NO: 3916920 - RNA, 22 nt, Human adenovirus C
uggcaccuuuuguuccaccgcu

SEQ ID NO: 3916921 - RNA, 23 nt, Human adenovirus C
uggcaccuuuuguuccaccgcuc

SEQ ID NO: 3916922 - RNA, 20 nt, Human adenovirus C
uggcagcggugcacgggcug

SEQ ID NO: 3916923 - RNA, 15 nt, Human adenovirus C
uggccagggugcgcu

SEQ ID NO: 3916924 - RNA, 22 nt, Human adenovirus C
uggcccacaacacggccuccac

SEQ ID NO: 3916925 - RNA, 19 nt, Human adenovirus C
uggcccuuggcgcgcagcu

SEQ ID NO: 3916926 - RNA, 20 nt, Human adenovirus C
uggccgcgauguuuagcugc

SEQ ID NO: 3916927 - RNA, 17 nt, Human adenovirus C
uggccgcguccaucugg

SEQ ID NO: 3916928 - RNA, 17 nt, Human adenovirus C
uggccuugcaggcgcag

SEQ ID NO: 3916929 - RNA, 19 nt, Human adenovirus C
uggccuuuagauguagcau

SEQ ID NO: 3916930 - RNA, 13 nt, Human adenovirus C
uggccuuugccug

SEQ ID NO: 3916931 - RNA, 21 nt, Human adenovirus C
uggcgaaaagcguccgcggcc

SEQ ID NO: 3916932 - RNA, 16 nt, Human adenovirus C
uggcgaugagcagcug

SEQ ID NO: 3916933 - RNA, 15 nt, Human adenovirus C
uggcgauggagcgca

SEQ ID NO: 3916934 - RNA, 20 nt, Human adenovirus C
uggcgcaucccauucuccag

SEQ ID NO: 3916935 - RNA, 20 nt, Human adenovirus C
uggcgcgcccgccagccccc

SEQ ID NO: 3916936 - RNA, 18 nt, Human adenovirus C
uggcggaggugcugcuga

SEQ ID NO: 3916937 - RNA, 9 nt, Human adenovirus C
uggcggcgg

SEQ ID NO: 3916938 - RNA, 18 nt, Human adenovirus C
uggcuccauaccauaccu

SEQ ID NO: 3916939 - RNA, 21 nt, Human adenovirus C
uggcuccauaccauaccuuga

SEQ ID NO: 3916940 - RNA, 15 nt, Human adenovirus C
uggcugcucgagggg

SEQ ID NO: 3916941 - RNA, 14 nt, Human adenovirus C
ugggaaacggccgc

SEQ ID NO: 3916942 - RNA, 22 nt, Human adenovirus C
ugggaauuugaagagcuuuuga

SEQ ID NO: 3916943 - RNA, 18 nt, Human adenovirus C
ugggacaccacuggaacc

SEQ ID NO: 3916944 - RNA, 12 nt, Human adenovirus C
cugccaccuccc

SEQ ID NO: 3916945 - RNA, 16 nt, Human adenovirus C
cugccaggaugcgggg

SEQ ID NO: 3916946 - RNA, 12 nt, Human adenovirus C
cugccaggcuca

SEQ ID NO: 3916947 - RNA, 21 nt, Human adenovirus C
cugcccuaaauuuaccccaag

SEQ ID NO: 3916948 - RNA, 16 nt, Human adenovirus C
cugccgccgccgccac

SEQ ID NO: 3916949 - RNA, 15 nt, Human adenovirus C
cugccgucaucccug

SEQ ID NO: 3916950 - RNA, 20 nt, Human adenovirus C
cugccuccccccgcugacac

SEQ ID NO: 3916951 - RNA, 13 nt, Human adenovirus C
cugcgcccacacc

SEQ ID NO: 3916952 - RNA, 15 nt, Human adenovirus C
cugcgccgugccgcc

SEQ ID NO: 3916953 - RNA, 20 nt, Human adenovirus C
cugcgccgugccgccagcgg

SEQ ID NO: 3916954 - RNA, 16 nt, Human adenovirus C
cugcgcgcuggccagg

SEQ ID NO: 3916955 - RNA, 17 nt, Human adenovirus C
cugcgcgcuggccaggg

SEQ ID NO: 3916956 - RNA, 17 nt, Human adenovirus C
cugcgcgucggccaggu

SEQ ID NO: 3916957 - RNA, 22 nt, Human adenovirus C
cugcgcuagcuuuuuuggccac

SEQ ID NO: 3916958 - RNA, 23 nt, Human adenovirus C
cugcgcucccucacccgcagcug

SEQ ID NO: 3916959 - RNA, 17 nt, Human adenovirus C
cugcggcugcuguugcu

SEQ ID NO: 3916960 - RNA, 20 nt, Human adenovirus C
cugcuagaguugcaacagcg

SEQ ID NO: 3916961 - RNA, 23 nt, Human adenovirus C
cugcucggacggcaacugucacu

SEQ ID NO: 3916962 - RNA, 14 nt, Human adenovirus C
cugcugcagccgca

SEQ ID NO: 3916963 - RNA, 14 nt, Human adenovirus C
cugcugccaugcgc

SEQ ID NO: 3916964 - RNA, 22 nt, Human adenovirus C
cugcugcuaauagcgcccuuca

SEQ ID NO: 3916965 - RNA, 15 nt, Human adenovirus C
cugcuuaaccgcgca

SEQ ID NO: 3916966 - RNA, 16 nt, Human adenovirus C
cugcuugagcaggcca

SEQ ID NO: 3916967 - RNA, 17 nt, Human adenovirus C
cuggaaggugcugaggu

SEQ ID NO: 3916968 - RNA, 21 nt, Human adenovirus C
cuggacaauuuacucuaugug

SEQ ID NO: 3916969 - RNA, 12 nt, Human adenovirus C
cuggaccucccg

SEQ ID NO: 3916970 - RNA, 19 nt, Human adenovirus C
cuggagaaacaauuacaaa

SEQ ID NO: 3916971 - RNA, 18 nt, Human adenovirus C
cuggagcugcccaagacu

SEQ ID NO: 3916972 - RNA, 13 nt, Human adenovirus C
cuggaggcaaccc

SEQ ID NO: 3916973 - RNA, 15 nt, Human adenovirus C
cuggagugucacugu

SEQ ID NO: 3916974 - RNA, 19 nt, Human adenovirus C
cuggcaaagcacacugaac

SEQ ID NO: 3916975 - RNA, 14 nt, Human adenovirus C
cuggcacgggcagc

SEQ ID NO: 3916976 - RNA, 14 nt, Human adenovirus C
cuggccaaccaggc

SEQ ID NO: 3916977 - RNA, 19 nt, Human adenovirus C
cuggccaaccaggcagugc

SEQ ID NO: 3916978 - RNA, 14 nt, Human adenovirus C
cuggcccgcgguga

SEQ ID NO: 3916979 - RNA, 22 nt, Human adenovirus C
cuggcgaucguaaacgcgcugg

SEQ ID NO: 3916980 - RNA, 18 nt, Human adenovirus C
cuggcgcaaaaucuccug

SEQ ID NO: 3916981 - RNA, 13 nt, Human adenovirus C
cuggcgcagaagu

SEQ ID NO: 3916982 - RNA, 13 nt, Human adenovirus C
cuggcgcgcuggc

SEQ ID NO: 3916983 - RNA, 20 nt, Human adenovirus C
cuggcgcggcuaggagcgcc

SEQ ID NO: 3916984 - RNA, 18 nt, Human adenovirus C
cuggcggaggugcugcug

SEQ ID NO: 3916985 - RNA, 16 nt, Human adenovirus C
cuggcgguagaggggc

SEQ ID NO: 3916986 - RNA, 18 nt, Human adenovirus C
cuggcgguagaggggcca

SEQ ID NO: 3916987 - RNA, 18 nt, Human adenovirus C
cuggcuggcacgggcagc

SEQ ID NO: 3916988 - RNA, 22 nt, Human adenovirus C
cugggaacggggccgaggugga

SEQ ID NO: 3916989 - RNA, 14 nt, Human adenovirus C
cugggaagaaagca

SEQ ID NO: 3916990 - RNA, 14 nt, Human adenovirus C
cugggacagccuag

SEQ ID NO: 3916991 - RNA, 22 nt, Human adenovirus C
cugggacagucaggcagaggag

SEQ ID NO: 3916992 - RNA, 16 nt, Human adenovirus C
cugggaguugcgcgcc

SEQ ID NO: 3916993 - RNA, 16 nt, Human adenovirus C
cugggccagcacacac

SEQ ID NO: 3916994 - RNA, 15 nt, Human adenovirus C
cugggcuggagcccg

SEQ ID NO: 3916995 - RNA, 18 nt, Human adenovirus C
cugggcuggagcccgagg

SEQ ID NO: 3916996 - RNA, 23 nt, Human adenovirus C
cuggggcaggaggacacgggcag

SEQ ID NO: 3916997 - RNA, 17 nt, Human adenovirus C
cugggggcguacacugg

SEQ ID NO: 3916998 - RNA, 12 nt, Human adenovirus C
cuggugcugcca

SEQ ID NO: 3916999 - RNA, 16 nt, Human adenovirus C
cugguggaacuugagg

SEQ ID NO: 3917000 - RNA, 14 nt, Human adenovirus C
cuggugugggagga

SEQ ID NO: 3917001 - RNA, 15 nt, Human adenovirus C
cuguagucaucgccu

SEQ ID NO: 3917002 - RNA, 20 nt, Human adenovirus C
cugucuuacaaaccuggaaa

SEQ ID NO: 3917003 - RNA, 15 nt, Human adenovirus C
cugugcuacaccugg

SEQ ID NO: 3917004 - RNA, 16 nt, Human adenovirus C
cugugcuacaccuggc

SEQ ID NO: 3917005 - RNA, 22 nt, Human adenovirus C
cugugcugccagggccguccgc

SEQ ID NO: 3917006 - RNA, 22 nt, Human adenovirus C
cugugguugcuucaugcuagug

SEQ ID NO: 3917007 - RNA, 20 nt, Human adenovirus C
cuguugauguggugaaagua

SEQ ID NO: 3917008 - RNA, 21 nt, Human adenovirus C
cuguuggaucugcgccagcag

SEQ ID NO: 3917009 - RNA, 14 nt, Human adenovirus C
cuuaaccugaugcg

SEQ ID NO: 3917010 - RNA, 17 nt, Human adenovirus C
cuuagauuugaccaaaa

SEQ ID NO: 3917011 - RNA, 22 nt, Human adenovirus C
cuuaggguugccgccugcugca

SEQ ID NO: 3917012 - RNA, 12 nt, Human adenovirus C
cuuaugccaggc

SEQ ID NO: 3917013 - RNA, 15 nt, Human adenovirus C
cuucacggacagugg

SEQ ID NO: 3917014 - RNA, 17 nt, Human adenovirus C
cuucagaaacuuccagc

SEQ ID NO: 3917015 - RNA, 16 nt, Human adenovirus C
cuucagcgcgcgcugc

SEQ ID NO: 3917016 - RNA, 13 nt, Human adenovirus C
cuucagcuggggc

SEQ ID NO: 3917017 - RNA, 19 nt, Human adenovirus C
cuucagcuugccugcucca

SEQ ID NO: 3917018 - RNA, 19 nt, Human adenovirus C
cuucauuuguaauuuacaa

SEQ ID NO: 3917019 - RNA, 13 nt, Human adenovirus C
cuuccaaggugaa

SEQ ID NO: 3917020 - RNA, 17 nt, Human adenovirus C
cuuccauaagggccucc

SEQ ID NO: 3917021 - RNA, 13 nt, Human adenovirus C
cuuccgcaggcca

SEQ ID NO: 3917022 - RNA, 16 nt, Human adenovirus C
cuucgcggucuuucca

SEQ ID NO: 3917023 - RNA, 16 nt, Human adenovirus C
cuucggcgcacgcugg

SEQ ID NO: 3917024 - RNA, 21 nt, Human adenovirus C
cuucuccuacauugcccagga

SEQ ID NO: 3917025 - RNA, 21 nt, Human adenovirus C
cuugaccgucuggcugcucga

SEQ ID NO: 3917026 - RNA, 14 nt, Human adenovirus C
cuugagaggccugu

SEQ ID NO: 3917027 - RNA, 22 nt, Human adenovirus C
cuugagcaggccaacgagcgcc

SEQ ID NO: 3917028 - RNA, 18 nt, Human adenovirus C
cuugauccccgcccuccc

SEQ ID NO: 3917029 - RNA, 14 nt, Human adenovirus C
cuugaucugcuggc

SEQ ID NO: 3917030 - RNA, 21 nt, Human adenovirus C
cuugaugacaacaucgcgcag

SEQ ID NO: 3917031 - RNA, 16 nt, Human adenovirus C
cuugccgucugcgccg

SEQ ID NO: 3917032 - RNA, 13 nt, Human adenovirus C
cuugccuaccacu

SEQ ID NO: 3917033 - RNA, 19 nt, Human adenovirus C
cuugcggcuggagcugccc

SEQ ID NO: 3917034 - RNA, 17 nt, Human adenovirus C
cuugggcgcgagaaaua

SEQ ID NO: 3917035 - RNA, 17 nt, Human adenovirus C
cuuguaauucuguuuau

SEQ ID NO: 3917036 - RNA, 20 nt, Human adenovirus C
cuuuaacggcucuucauuug

SEQ ID NO: 3917037 - RNA, 14 nt, Human adenovirus C
cuuucacaguuuac

SEQ ID NO: 3917038 - RNA, 23 nt, Human adenovirus C
cuuucacuuuccgcuucacugga

SEQ ID NO: 3917039 - RNA, 13 nt, Human adenovirus C
cuuuccacgggcg

SEQ ID NO: 3917040 - RNA, 16 nt, Human adenovirus C
cuuuccuuccucccaa

SEQ ID NO: 3917041 - RNA, 20 nt, Human adenovirus C
cuuugccacacgggcggagg

SEQ ID NO: 3917042 - RNA, 19 nt, Human adenovirus C
cuuugcgucucuggccccg

SEQ ID NO: 3917043 - RNA, 16 nt, Human adenovirus C
cuuuggcgcaucccau

SEQ ID NO: 3917044 - RNA, 23 nt, Human adenovirus C
cuuuuguaaaaacgugcgcagua

SEQ ID NO: 3917045 - RNA, 15 nt, Human adenovirus C
gaaaagcgcggccua

SEQ ID NO: 3917046 - RNA, 22 nt, Human adenovirus C
gaaaaucagagggcgagguauu

SEQ ID NO: 3917047 - RNA, 14 nt, Human adenovirus C
gaaaccccuucccu

SEQ ID NO: 3917048 - RNA, 18 nt, Human adenovirus C
gaaaccucaccucccaaa

SEQ ID NO: 3917049 - RNA, 21 nt, Human adenovirus C
gaaacuagcgagguaagcacu

SEQ ID NO: 3917050 - RNA, 17 nt, Human adenovirus C
gaaagcuuccgcaggcc

SEQ ID NO: 3917051 - RNA, 19 nt, Human adenovirus C
gaaauuaaccuaaaugcca

SEQ ID NO: 3917052 - RNA, 21 nt, Human adenovirus C
gaaauuagaaucuacuggggc

SEQ ID NO: 3917053 - RNA, 18 nt, Human adenovirus C
gaacaaaacucccuuaga

SEQ ID NO: 3917054 - RNA, 20 nt, Human adenovirus C
gaacaagcgagugguggcuc

SEQ ID NO: 3917055 - RNA, 14 nt, Human adenovirus C
gaacagcagcacag

SEQ ID NO: 3917056 - RNA, 19 nt, Human adenovirus C
gaacagcagcacaggccag

SEQ ID NO: 3917057 - RNA, 22 nt, Human adenovirus C
gaacuauggcagcaaggccugg

SEQ ID NO: 3917058 - RNA, 16 nt, Human adenovirus C
gaacugguugacggcc

SEQ ID NO: 3917059 - RNA, 18 nt, Human adenovirus C
gaacugguugacggccug

SEQ ID NO: 3917060 - RNA, 19 nt, Human adenovirus C
gaacuugcaggggcugugg

SEQ ID NO: 3917061 - RNA, 17 nt, Human adenovirus C
ccaggggcugguuggug

SEQ ID NO: 3917062 - RNA, 14 nt, Human adenovirus C
ccaguuggaggagu

SEQ ID NO: 3917063 - RNA, 23 nt, Human adenovirus C
ccauaaugauggcaaugggccca

SEQ ID NO: 3917064 - RNA, 13 nt, Human adenovirus C
ccauauauccaua

SEQ ID NO: 3917065 - RNA, 20 nt, Human adenovirus C
ccaucaacgcgcgcgcagcc

SEQ ID NO: 3917066 - RNA, 16 nt, Human adenovirus C
ccaucauaccacaagc

SEQ ID NO: 3917067 - RNA, 13 nt, Human adenovirus C
ccauccaccacca

SEQ ID NO: 3917068 - RNA, 20 nt, Human adenovirus C
ccauccgcaauacagagaca

SEQ ID NO: 3917069 - RNA, 22 nt, Human adenovirus C
ccaucgcgcaacugggcagcau

SEQ ID NO: 3917070 - RNA, 21 nt, Human adenovirus C
ccaugcgcgagggacaggcuu

SEQ ID NO: 3917071 - RNA, 23 nt, Human adenovirus C
ccauggaucacaaccccaccaug

SEQ ID NO: 3917072 - RNA, 20 nt, Human adenovirus C
ccaugggcgcacucacagac

SEQ ID NO: 3917073 - RNA, 14 nt, Human adenovirus C
ccaugggcuccagu

SEQ ID NO: 3917074 - RNA, 20 nt, Human adenovirus C
ccauuaagaacuauggcagc

SEQ ID NO: 3917075 - RNA, 18 nt, Human adenovirus C
ccauuaugagcaaggaaa

SEQ ID NO: 3917076 - RNA, 15 nt, Human adenovirus C
ccauucagaccgugg

SEQ ID NO: 3917077 - RNA, 15 nt, Human adenovirus C
ccauuuuaaaaaaac

SEQ ID NO: 3917078 - RNA, 18 nt, Human adenovirus C
cccaaaaagggugcaugc

SEQ ID NO: 3917079 - RNA, 20 nt, Human adenovirus C
cccaaaagcagggcuucaau

SEQ ID NO: 3917080 - RNA, 13 nt, Human adenovirus C
cccaacuccaugc

SEQ ID NO: 3917081 - RNA, 19 nt, Human adenovirus C
cccaauccccccgccgccg

SEQ ID NO: 3917082 - RNA, 20 nt, Human adenovirus C
cccaauuacauugcuuucag

SEQ ID NO: 3917083 - RNA, 12 nt, Human adenovirus C
cccaccacugug

SEQ ID NO: 3917084 - RNA, 22 nt, Human adenovirus C
cccaccaugcgcgagggacagg

SEQ ID NO: 3917085 - RNA, 16 nt, Human adenovirus C
cccaccgugcagcuga

SEQ ID NO: 3917086 - RNA, 12 nt, Human adenovirus C
cccacgccgcca

SEQ ID NO: 3917087 - RNA, 13 nt, Human adenovirus C
cccaggcugggga

SEQ ID NO: 3917088 - RNA, 16 nt, Human adenovirus C
cccaggcuggggagaa

SEQ ID NO: 3917089 - RNA, 15 nt, Human adenovirus C
cccaguaccgcagcu

SEQ ID NO: 3917090 - RNA, 13 nt, Human adenovirus C
cccauacccgcca

SEQ ID NO: 3917091 - RNA, 17 nt, Human adenovirus C
cccaugaaaccaugcua

SEQ ID NO: 3917092 - RNA, 15 nt, Human adenovirus C
cccauuacaguguca

SEQ ID NO: 3917093 - RNA, 16 nt, Human adenovirus C
cccauuuccaagcuug

SEQ ID NO: 3917094 - RNA, 17 nt, Human adenovirus C
ccccaaacucccaugga

SEQ ID NO: 3917095 - RNA, 17 nt, Human adenovirus C
ccccaccaauguggaaa

SEQ ID NO: 3917096 - RNA, 24 nt, Human adenovirus C
ccccgccaacgugcccuacccacu

SEQ ID NO: 3917097 - RNA, 13 nt, Human adenovirus C
ccccgcggcgccg

SEQ ID NO: 3917098 - RNA, 17 nt, Human adenovirus C
ccccggcgcccgcgccg

SEQ ID NO: 3917099 - RNA, 17 nt, Human adenovirus C
ccccgucgaggcacccc

SEQ ID NO: 3917100 - RNA, 16 nt, Human adenovirus C
ccccuucgaugcuccc

SEQ ID NO: 3917101 - RNA, 22 nt, Human adenovirus C
cccgaguauuucaccaaugcca

SEQ ID NO: 3917102 - RNA, 21 nt, Human adenovirus C
cccgcaacuucagacuggggu

SEQ ID NO: 3917103 - RNA, 16 nt, Human adenovirus C
cccgccaacgccacca

SEQ ID NO: 3917104 - RNA, 14 nt, Human adenovirus C
cccgccaggaacca

SEQ ID NO: 3917105 - RNA, 19 nt, Human adenovirus C
cccgcccgcgccugcuggg

SEQ ID NO: 3917106 - RNA, 13 nt, Human adenovirus C
cccgcgccacguc

SEQ ID NO: 3917107 - RNA, 13 nt, Human adenovirus C
cccgcgccacugg

SEQ ID NO: 3917108 - RNA, 20 nt, Human adenovirus C
cccgcggcgacaggucaggc

SEQ ID NO: 3917109 - RNA, 18 nt, Human adenovirus C
cccgcuuuccaagauggc

SEQ ID NO: 3917110 - RNA, 22 nt, Human adenovirus C
cccggcuaucguggcuacaccu

SEQ ID NO: 3917111 - RNA, 15 nt, Human adenovirus C
cccgggcuggugcag

SEQ ID NO: 3917112 - RNA, 16 nt, Human adenovirus C
cccgggcuggugcagu

SEQ ID NO: 3917113 - RNA, 16 nt, Human adenovirus C
cccuauccugccgugc

SEQ ID NO: 3917114 - RNA, 18 nt, Human adenovirus C
cccuccgcacccacuauc

SEQ ID NO: 3917115 - RNA, 20 nt, Human adenovirus C
cccucgccggcgccccagaa

SEQ ID NO: 3917116 - RNA, 14 nt, Human adenovirus C
cccucgccuggcgg

SEQ ID NO: 3917117 - RNA, 15 nt, Human adenovirus C
cccucguuccagacg

SEQ ID NO: 3917118 - RNA, 19 nt, Human adenovirus C
cccucucaaaagcgggcau

SEQ ID NO: 3917119 - RNA, 13 nt, Human adenovirus C
cccugcgacgggc

SEQ ID NO: 3917120 - RNA, 22 nt, Human adenovirus C
cccugcgccgugccgccagcgg

SEQ ID NO: 3917121 - RNA, 20 nt, Human adenovirus C
cccuggaggcagcuggggcc

SEQ ID NO: 3917122 - RNA, 21 nt, Human adenovirus C
cccuugcggcagucugcagcg

SEQ ID NO: 3917123 - RNA, 23 nt, Human adenovirus C
ccgaaccuuuggacaccucccac

SEQ ID NO: 3917124 - RNA, 18 nt, Human adenovirus C
ccgaagaaaagcgcggcc

SEQ ID NO: 3917125 - RNA, 15 nt, Human adenovirus C
ccgagaccaugacca

SEQ ID NO: 3917126 - RNA, 19 nt, Human adenovirus C
ccgagcggacaagcagcug

SEQ ID NO: 3917127 - RNA, 20 nt, Human adenovirus C
ccgagcggacaagcagcugg

SEQ ID NO: 3917128 - RNA, 21 nt, Human adenovirus C
ccgagcggacaagcagcuggc

SEQ ID NO: 3917129 - RNA, 15 nt, Human adenovirus C
ccgaggagcugaggc

SEQ ID NO: 3917130 - RNA, 19 nt, Human adenovirus C
ccgaggcagcggcagaagc

SEQ ID NO: 3917131 - RNA, 18 nt, Human adenovirus C
ccgaggccgaagaggugu

SEQ ID NO: 3917132 - RNA, 16 nt, Human adenovirus C
ccgagggccgcuggcu

SEQ ID NO: 3917133 - RNA, 15 nt, Human adenovirus C
ccgcaacuucagacu

SEQ ID NO: 3917134 - RNA, 13 nt, Human adenovirus C
ccgcaccgcuccc

SEQ ID NO: 3917135 - RNA, 18 nt, Human adenovirus C
ccgcagccggugggcccg

SEQ ID NO: 3917136 - RNA, 18 nt, Human adenovirus C
ccgcaggccaagcagcuu

SEQ ID NO: 3917137 - RNA, 15 nt, Human adenovirus C
ccgcaguggucuuac

SEQ ID NO: 3917138 - RNA, 23 nt, Human adenovirus C
ccgcaguuggcgaugagcagcug

SEQ ID NO: 3917139 - RNA, 15 nt, Human adenovirus C
ccgccaaaugcggag

SEQ ID NO: 3917140 - RNA, 12 nt, Human adenovirus C
ccgccaacgugc

SEQ ID NO: 3917141 - RNA, 13 nt, Human adenovirus C
ccgccaacgugcc

SEQ ID NO: 3917142 - RNA, 20 nt, Human adenovirus C
ccgccaagaguuucugcuac

SEQ ID NO: 3917143 - RNA, 20 nt, Human adenovirus C
ccgccagaggagcugcugag

SEQ ID NO: 3917144 - RNA, 16 nt, Human adenovirus C
ccgcccuagccgcgcg

SEQ ID NO: 3917145 - RNA, 17 nt, Human adenovirus C
ccgcccuagccgcgcgu

SEQ ID NO: 3917146 - RNA, 14 nt, Human adenovirus C
ccgcccugcuccca

SEQ ID NO: 3917147 - RNA, 14 nt, Human adenovirus C
ccgccgcaccgugc

SEQ ID NO: 3917148 - RNA, 13 nt, Human adenovirus C
ccgccgcagcagc

SEQ ID NO: 3917149 - RNA, 17 nt, Human adenovirus C
ccgccgccacccacgga

SEQ ID NO: 3917150 - RNA, 18 nt, Human adenovirus C
ccgccgccacccacggac

SEQ ID NO: 3917151 - RNA, 16 nt, Human adenovirus C
ccgccgccgccaccca

SEQ ID NO: 3917152 - RNA, 16 nt, Human adenovirus C
ccgccgccgcuccguc

SEQ ID NO: 3917153 - RNA, 13 nt, Human adenovirus C
ccgccucagccgc

SEQ ID NO: 3917154 - RNA, 13 nt, Human adenovirus C
ccgccucagcuac

SEQ ID NO: 3917155 - RNA, 21 nt, Human adenovirus C
ccgccucgggcaaaacgugcu

SEQ ID NO: 3917156 - RNA, 23 nt, Human adenovirus C
ccgccuguggacuauucugcugc

SEQ ID NO: 3917157 - RNA, 19 nt, Human adenovirus C
ccgcgcacgucgcaccggc

SEQ ID NO: 3917158 - RNA, 17 nt, Human adenovirus C
ccgcgcccaggcggcgg

SEQ ID NO: 3917159 - RNA, 17 nt, Human adenovirus C
ccgcgcgcccuggggcg

SEQ ID NO: 3917160 - RNA, 12 nt, Human adenovirus C
ccgcgcgcggcg

SEQ ID NO: 3917161 - RNA, 15 nt, Human adenovirus C
ccgcgcgcgggcagg

SEQ ID NO: 3917162 - RNA, 17 nt, Human adenovirus C
ccgcggcgacaggucag

SEQ ID NO: 3917163 - RNA, 17 nt, Human adenovirus C
ccgcggcgauuggcgcc

SEQ ID NO: 3917164 - RNA, 21 nt, Human adenovirus C
ccgcggcugacgcggcggcag

SEQ ID NO: 3917165 - RNA, 15 nt, Human adenovirus C
ccgcgggcugggugu

SEQ ID NO: 3917166 - RNA, 23 nt, Human adenovirus C
ccgcgggcugggugugcgcggca

SEQ ID NO: 3917167 - RNA, 14 nt, Human adenovirus C
ccgcgguccuccuc

SEQ ID NO: 3917168 - RNA, 23 nt, Human adenovirus C
ccgcggugaugccuuugagggug

SEQ ID NO: 3917169 - RNA, 22 nt, Human adenovirus C
ccgcgucagaaccauaucccag

SEQ ID NO: 3917170 - RNA, 18 nt, Human adenovirus C
ccgcgucaugcacgcagc

SEQ ID NO: 3917171 - RNA, 15 nt, Human adenovirus C
ccgcguccaaaaccu

SEQ ID NO: 3917172 - RNA, 14 nt, Human adenovirus C
ccgcucccaccacu

SEQ ID NO: 3917173 - RNA, 14 nt, Human adenovirus C
ccgcugcagccacc

SEQ ID NO: 3917174 - RNA, 16 nt, Human adenovirus C
ccgcugcagccaccgc

SEQ ID NO: 3917175 - RNA, 23 nt, Human adenovirus C
ccgcugcccugguguaccaggaa

SEQ ID NO: 3917176 - RNA, 19 nt, Human adenovirus C
ccggacuaacaucugcccu

SEQ ID NO: 3917177 - RNA, 15 nt, Human adenovirus C
gcagggucccucgcc

SEQ ID NO: 3917178 - RNA, 15 nt, Human adenovirus C
gcaggucgggcgccg

SEQ ID NO: 3917179 - RNA, 21 nt, Human adenovirus C
gcaggucugcacggaccagcg

SEQ ID NO: 3917180 - RNA, 17 nt, Human adenovirus C
gcagguuccugagcagc

SEQ ID NO: 3917181 - RNA, 16 nt, Human adenovirus C
gcagucugcagcgcug

SEQ ID NO: 3917182 - RNA, 19 nt, Human adenovirus C
gcaucccuuuucuacgggu

SEQ ID NO: 3917183 - RNA, 17 nt, Human adenovirus C
gcauccgcccugcuccc

SEQ ID NO: 3917184 - RNA, 14 nt, Human adenovirus C
gcauccgcgccgca

SEQ ID NO: 3917185 - RNA, 22 nt, Human adenovirus C
gcaucuaucgcuacggcggcgg

SEQ ID NO: 3917186 - RNA, 14 nt, Human adenovirus C
gcaucuuggacugu

SEQ ID NO: 3917187 - RNA, 16 nt, Human adenovirus C
gcaugaaagccuugau

SEQ ID NO: 3917188 - RNA, 11 nt, Human adenovirus C
gcaugaugcaa

SEQ ID NO: 3917189 - RNA, 20 nt, Human adenovirus C
gcauggucucggugacggcg

SEQ ID NO: 3917190 - RNA, 17 nt, Human adenovirus C
gcauuggaacucuacaa

SEQ ID NO: 3917191 - RNA, 16 nt, Human adenovirus C
gccaacgcgccuacca

SEQ ID NO: 3917192 - RNA, 15 nt, Human adenovirus C
gccaagcagcuuguc

SEQ ID NO: 3917193 - RNA, 21 nt, Human adenovirus C
gccacaacauaaaagaagcaa

SEQ ID NO: 3917194 - RNA, 18 nt, Human adenovirus C
gccacacgggcggaggag

SEQ ID NO: 3917195 - RNA, 16 nt, Human adenovirus C
gccacagagggcaugg

SEQ ID NO: 3917196 - RNA, 15 nt, Human adenovirus C
gccacaucuucucuu

SEQ ID NO: 3917197 - RNA, 17 nt, Human adenovirus C
gccaccaguuggaggag

SEQ ID NO: 3917198 - RNA, 14 nt, Human adenovirus C
gccagaaggcgcuc

SEQ ID NO: 3917199 - RNA, 21 nt, Human adenovirus C
gccagacaugaugcaagaccc

SEQ ID NO: 3917200 - RNA, 15 nt, Human adenovirus C
gccaguggcaacugg

SEQ ID NO: 3917201 - RNA, 15 nt, Human adenovirus C
gccaucaucucuguc

SEQ ID NO: 3917202 - RNA, 22 nt, Human adenovirus C
gcccagcaauaacacaggcugg

SEQ ID NO: 3917203 - RNA, 17 nt, Human adenovirus C
gcccagcguggcgcugg

SEQ ID NO: 3917204 - RNA, 21 nt, Human adenovirus C
gcccaggcggcggguacagug

SEQ ID NO: 3917205 - RNA, 17 nt, Human adenovirus C
gcccaucuccaucccau

SEQ ID NO: 3917206 - RNA, 17 nt, Human adenovirus C
gccccguccugcccgca

SEQ ID NO: 3917207 - RNA, 18 nt, Human adenovirus C
gccccguccugcccgcaa

SEQ ID NO: 3917208 - RNA, 20 nt, Human adenovirus C
gccccuacguuuacaaggcc

SEQ ID NO: 3917209 - RNA, 13 nt, Human adenovirus C
gcccgagggcaac

SEQ ID NO: 3917210 - RNA, 16 nt, Human adenovirus C
gcccgagggccgcugg

SEQ ID NO: 3917211 - RNA, 20 nt, Human adenovirus C
gcccgaucacuuggugcugg

SEQ ID NO: 3917212 - RNA, 13 nt, Human adenovirus C
gcccgccaccugc

SEQ ID NO: 3917213 - RNA, 14 nt, Human adenovirus C
gcccggcgcacggc

SEQ ID NO: 3917214 - RNA, 13 nt, Human adenovirus C
gcccgugcacucc

SEQ ID NO: 3917215 - RNA, 15 nt, Human adenovirus C
gcccgugcacuccaa

SEQ ID NO: 3917216 - RNA, 16 nt, Human adenovirus C
gcccuacuuccgcagc

SEQ ID NO: 3917217 - RNA, 15 nt, Human adenovirus C
gcccucaccugccgc

SEQ ID NO: 3917218 - RNA, 16 nt, Human adenovirus C
gcccugcucccagagc

SEQ ID NO: 3917219 - RNA, 11 nt, Human adenovirus C
gcccuggggcg

SEQ ID NO: 3917220 - RNA, 15 nt, Human adenovirus C
gcccuugcuucccag

SEQ ID NO: 3917221 - RNA, 13 nt, Human adenovirus C
gcccuuggaggag

SEQ ID NO: 3917222 - RNA, 19 nt, Human adenovirus C
gcccuuucuuaccccucca

SEQ ID NO: 3917223 - RNA, 16 nt, Human adenovirus C
gcccuuuggcuuuucu

SEQ ID NO: 3917224 - RNA, 20 nt, Human adenovirus C
gccgcaccgugcgcuuaccu

SEQ ID NO: 3917225 - RNA, 13 nt, Human adenovirus C
gccgcaggccaac

SEQ ID NO: 3917226 - RNA, 15 nt, Human adenovirus C
gccgcauccccgcgg

SEQ ID NO: 3917227 - RNA, 13 nt, Human adenovirus C
gccgccgcaccgu

SEQ ID NO: 3917228 - RNA, 14 nt, Human adenovirus C
gccgccgcagcccu

SEQ ID NO: 3917229 - RNA, 16 nt, Human adenovirus C
gccgccgccgucgccg

SEQ ID NO: 3917230 - RNA, 17 nt, Human adenovirus C
gccgccuuuuagcugca

SEQ ID NO: 3917231 - RNA, 16 nt, Human adenovirus C
gccgcgcgcuggggca

SEQ ID NO: 3917232 - RNA, 19 nt, Human adenovirus C
gccgcggcgauuggcgccg

SEQ ID NO: 3917233 - RNA, 15 nt, Human adenovirus C
gccgcggucgcucac

SEQ ID NO: 3917234 - RNA, 12 nt, Human adenovirus C
gccgcggugcag

SEQ ID NO: 3917235 - RNA, 21 nt, Human adenovirus C
gccgcgucaugcacgcagcac

SEQ ID NO: 3917236 - RNA, 16 nt, Human adenovirus C
gccgcuggacgagggc

SEQ ID NO: 3917237 - RNA, 15 nt, Human adenovirus C
gccgggucagggcgc

SEQ ID NO: 3917238 - RNA, 20 nt, Human adenovirus C
gccgggucagggcgcgggcu

SEQ ID NO: 3917239 - RNA, 13 nt, Human adenovirus C
gccggguggugca

SEQ ID NO: 3917240 - RNA, 12 nt, Human adenovirus C
gccgugaacccc

SEQ ID NO: 3917241 - RNA, 19 nt, Human adenovirus C
gccgugcgcccgcuuucca

SEQ ID NO: 3917242 - RNA, 20 nt, Human adenovirus C
gccguuggagacugcagccu

SEQ ID NO: 3917243 - RNA, 16 nt, Human adenovirus C
gccuaccggggggaga

SEQ ID NO: 3917244 - RNA, 19 nt, Human adenovirus C
gccuaccggggggagaaac

SEQ ID NO: 3917245 - RNA, 20 nt, Human adenovirus C
gccuagacgaagcuuccgag

SEQ ID NO: 3917246 - RNA, 12 nt, Human adenovirus C
gccucagccgcu

SEQ ID NO: 3917247 - RNA, 23 nt, Human adenovirus C
gccuccgaacgguaagagccuag

SEQ ID NO: 3917248 - RNA, 17 nt, Human adenovirus C
gccugcaaagggcccug

SEQ ID NO: 3917249 - RNA, 16 nt, Human adenovirus C
gccugccgacuuggag

SEQ ID NO: 3917250 - RNA, 19 nt, Human adenovirus C
gccugcgucauuacccagg

SEQ ID NO: 3917251 - RNA, 12 nt, Human adenovirus C
gccuggaggcaa

SEQ ID NO: 3917252 - RNA, 22 nt, Human adenovirus C
gccuggcgcaaaaucuccugca

SEQ ID NO: 3917253 - RNA, 13 nt, Human adenovirus C
gccuggcgcggcu

SEQ ID NO: 3917254 - RNA, 14 nt, Human adenovirus C
gccuggcugacaag

SEQ ID NO: 3917255 - RNA, 15 nt, Human adenovirus C
gccuguccucgagcg

SEQ ID NO: 3917256 - RNA, 21 nt, Human adenovirus C
gccuguccucgagcgguguuc

SEQ ID NO: 3917257 - RNA, 13 nt, Human adenovirus C
gccuguugcugcu

SEQ ID NO: 3917258 - RNA, 14 nt, Human adenovirus C
gccuguugcugcug

SEQ ID NO: 3917259 - RNA, 21 nt, Human adenovirus C
gccuucccccguaacauccug

SEQ ID NO: 3917260 - RNA, 22 nt, Human adenovirus C
gccuugcaggcgcagagacacu

SEQ ID NO: 3917261 - RNA, 23 nt, Human adenovirus C
gccuugccuacgaacgccaccug

SEQ ID NO: 3917262 - RNA, 18 nt, Human adenovirus C
gccuuuuacugcugcugg

SEQ ID NO: 3917263 - RNA, 22 nt, Human adenovirus C
gcgacaggucaggcgggagcuc

SEQ ID NO: 3917264 - RNA, 21 nt, Human adenovirus C
gcgacgagcggccgccgcagc

SEQ ID NO: 3917265 - RNA, 15 nt, Human adenovirus C
gcgagauugagcucc

SEQ ID NO: 3917266 - RNA, 16 nt, Human adenovirus C
gcgagcaggcagaggc

SEQ ID NO: 3917267 - RNA, 16 nt, Human adenovirus C
gcgaggaugcgagccg

SEQ ID NO: 3917268 - RNA, 14 nt, Human adenovirus C
gcgagggagcgagg

SEQ ID NO: 3917269 - RNA, 14 nt, Human adenovirus C
gcgagggccagcug

SEQ ID NO: 3917270 - RNA, 17 nt, Human adenovirus C
gcgcaacuagauugcaa

SEQ ID NO: 3917271 - RNA, 17 nt, Human adenovirus C
gcgcacccgccccccgc

SEQ ID NO: 3917272 - RNA, 17 nt, Human adenovirus C
gcgcagacgcgccagac

SEQ ID NO: 3917273 - RNA, 19 nt, Human adenovirus C
gcgcagacgcgccagaccc

SEQ ID NO: 3917274 - RNA, 14 nt, Human adenovirus C
gcgcagaugggagc

SEQ ID NO: 3917275 - RNA, 15 nt, Human adenovirus C
gcgcagaugggagcu

SEQ ID NO: 3917276 - RNA, 16 nt, Human adenovirus C
gcgcagcggcaaaaag

SEQ ID NO: 3917277 - RNA, 15 nt, Human adenovirus C
gcgcaggcggcggca

SEQ ID NO: 3917278 - RNA, 14 nt, Human adenovirus C
gcgcaggguggcuc

SEQ ID NO: 3917279 - RNA, 14 nt, Human adenovirus C
gcgcaguuggaaga

SEQ ID NO: 3917280 - RNA, 19 nt, Human adenovirus C
gcgccagaccccccaucua

SEQ ID NO: 3917281 - RNA, 11 nt, Human adenovirus C
gcgccagcacc

SEQ ID NO: 3917282 - RNA, 12 nt, Human adenovirus C
gcgccagcaccu

SEQ ID NO: 3917283 - RNA, 13 nt, Human adenovirus C
gcgcccauggcua

SEQ ID NO: 3917284 - RNA, 15 nt, Human adenovirus C
gcgcccguguugaug

SEQ ID NO: 3917285 - RNA, 17 nt, Human adenovirus C
gcgccgggcccggcacu

SEQ ID NO: 3917286 - RNA, 18 nt, Human adenovirus C
gcgccugauuucugccag

SEQ ID NO: 3917287 - RNA, 13 nt, Human adenovirus C
gcgccugcugcca

SEQ ID NO: 3917288 - RNA, 23 nt, Human adenovirus C
gcgcgagcucagcgaccgcgagc

SEQ ID NO: 3917289 - RNA, 15 nt, Human adenovirus C
gcgcgcccuggggcg

SEQ ID NO: 3917290 - RNA, 13 nt, Human adenovirus C
gcgcgcgcagccu

SEQ ID NO: 3917291 - RNA, 14 nt, Human adenovirus C
gcgcgcuggagcaa

SEQ ID NO: 3917292 - RNA, 13 nt, Human adenovirus C
gcgcgcuggcaac

SEQ ID NO: 3917293 - RNA, 12 nt, Human adenovirus C
gcgcggcggcug

SEQ ID NO: 3917294 - RNA, 23 nt, Human adenovirus C
gcgcggcggucaccagaggcuca

SEQ ID NO: 3917295 - RNA, 15 nt, Human adenovirus C
gcgcgggcaggagcu

SEQ ID NO: 3917296 - RNA, 22 nt, Human adenovirus C
gcgcggggaggcggcggcgacg

SEQ ID NO: 3917297 - RNA, 14 nt, Human adenovirus C
cucgaucucuuccu

SEQ ID NO: 3917298 - RNA, 21 nt, Human adenovirus C
cucgcuccagggugugaagac

SEQ ID NO: 3917299 - RNA, 16 nt, Human adenovirus C
cucggaguaccugagc

SEQ ID NO: 3917300 - RNA, 17 nt, Human adenovirus C
cucggaguaccugagcc

SEQ ID NO: 3917301 - RNA, 15 nt, Human adenovirus C
cucggcgguggcaga

SEQ ID NO: 3917302 - RNA, 22 nt, Human adenovirus C
cucggcuaauauggccugcugc

SEQ ID NO: 3917303 - RNA, 18 nt, Human adenovirus C
cucguacgaggaggcacu

SEQ ID NO: 3917304 - RNA, 21 nt, Human adenovirus C
cucuauaaacauuccagcacc

SEQ ID NO: 3917305 - RNA, 17 nt, Human adenovirus C
cucugauuaaacauggc

SEQ ID NO: 3917306 - RNA, 16 nt, Human adenovirus C
cucugcucggaagacu

SEQ ID NO: 3917307 - RNA, 18 nt, Human adenovirus C
cucuggacuacauggaca

SEQ ID NO: 3917308 - RNA, 18 nt, Human adenovirus C
cucugguaucucagccgc

SEQ ID NO: 3917309 - RNA, 15 nt, Human adenovirus C
cucuuccuccuggag

SEQ ID NO: 3917310 - RNA, 14 nt, Human adenovirus C
cugaaacccaccau

SEQ ID NO: 3917311 - RNA, 13 nt, Human adenovirus C
cugaagcagggcc

SEQ ID NO: 3917312 - RNA, 22 nt, Human adenovirus C
cugacaaccccaacaccuacga

SEQ ID NO: 3917313 - RNA, 13 nt, Human adenovirus C
cugacaccuauca

SEQ ID NO: 3917314 - RNA, 14 nt, Human adenovirus C
cugacagggcccag

SEQ ID NO: 3917315 - RNA, 21 nt, Human adenovirus C
cugaccgugcaagacuccaaa

SEQ ID NO: 3917316 - RNA, 12 nt, Human adenovirus C
cugagcagcugc

SEQ ID NO: 3917317 - RNA, 15 nt, Human adenovirus C
cugagcagcugcgac

SEQ ID NO: 3917318 - RNA, 15 nt, Human adenovirus C
cugagccccgggcug

SEQ ID NO: 3917319 - RNA, 23 nt, Human adenovirus C
cugagcgggggguaccugcugga

SEQ ID NO: 3917320 - RNA, 13 nt, Human adenovirus C
cugaggacuacca

SEQ ID NO: 3917321 - RNA, 12 nt, Human adenovirus C
cugaggccgagg

SEQ ID NO: 3917322 - RNA, 20 nt, Human adenovirus C
cugaggccgaggcagcggca

SEQ ID NO: 3917323 - RNA, 15 nt, Human adenovirus C
cugaguuggcacccc

SEQ ID NO: 3917324 - RNA, 16 nt, Human adenovirus C
cugaucagaugaugca

SEQ ID NO: 3917325 - RNA, 19 nt, Human adenovirus C
cugcaacagguuauugccc

SEQ ID NO: 3917326 - RNA, 22 nt, Human adenovirus C
cugcaccacauuucggccccac

SEQ ID NO: 3917327 - RNA, 16 nt, Human adenovirus C
cugcagagcucucugg

SEQ ID NO: 3917328 - RNA, 19 nt, Human adenovirus C
cugcagagcucucugggaa

SEQ ID NO: 3917329 - RNA, 18 nt, Human adenovirus C
cugcagauucacucaaau

SEQ ID NO: 3917330 - RNA, 12 nt, Human adenovirus C
cugcagcacagc

SEQ ID NO: 3917331 - RNA, 13 nt, Human adenovirus C
cugcagcacagca

SEQ ID NO: 3917332 - RNA, 11 nt, Human adenovirus C
cugcagcagcg

SEQ ID NO: 3917333 - RNA, 13 nt, Human adenovirus C
cugcagcagcgcg

SEQ ID NO: 3917334 - RNA, 22 nt, Human adenovirus C
cugcagcagcgcgcgaauaaac

SEQ ID NO: 3917335 - RNA, 15 nt, Human adenovirus C
cugcagcgccagugc

SEQ ID NO: 3917336 - RNA, 16 nt, Human adenovirus C
cugcagcuagccaacu

SEQ ID NO: 3917337 - RNA, 18 nt, Human adenovirus C
cugcagcugccgccgccg

SEQ ID NO: 3917338 - RNA, 23 nt, Human adenovirus C
cugcagggaaccgggacuggaac

SEQ ID NO: 3917339 - RNA, 19 nt, Human adenovirus C
cugcagguacgccugcagg

SEQ ID NO: 3917340 - RNA, 15 nt, Human adenovirus C
cugcauaccaacaug

SEQ ID NO: 3917341 - RNA, 13 nt, Human adenovirus C
cugccaccucccu

SEQ ID NO: 3917342 - RNA, 20 nt, Human adenovirus C
cugccagcgccugcacugca

SEQ ID NO: 3917343 - RNA, 18 nt, Human adenovirus C
cugcccaagacuacucaa

SEQ ID NO: 3917344 - RNA, 13 nt, Human adenovirus C
cugcccaccaccc

SEQ ID NO: 3917345 - RNA, 21 nt, Human adenovirus C
cugccccuacguuuacaaggc

SEQ ID NO: 3917346 - RNA, 15 nt, Human adenovirus C
cugcccgccaccugc

SEQ ID NO: 3917347 - RNA, 17 nt, Human adenovirus C
cugccgucaucccugag

SEQ ID NO: 3917348 - RNA, 22 nt, Human adenovirus C
cugccgucaucccugagcaggg

SEQ ID NO: 3917349 - RNA, 17 nt, Human adenovirus C
cugccgugcggcaggga

SEQ ID NO: 3917350 - RNA, 16 nt, Human adenovirus C
cugcgcacgcccuucu

SEQ ID NO: 3917351 - RNA, 17 nt, Human adenovirus C
cugcgcccacaccuaca

SEQ ID NO: 3917352 - RNA, 19 nt, Human adenovirus C
cugcgcgagauugagcucc

SEQ ID NO: 3917353 - RNA, 16 nt, Human adenovirus C
cugcgcgucggccagg

SEQ ID NO: 3917354 - RNA, 21 nt, Human adenovirus C
cugcgcgugcccgugcgcacc

SEQ ID NO: 3917355 - RNA, 21 nt, Human adenovirus C
cugcgguucaucccuguggac

SEQ ID NO: 3917356 - RNA, 14 nt, Human adenovirus C
cugcgucuggcgcc

SEQ ID NO: 3917357 - RNA, 22 nt, Human adenovirus C
cugcuccucuucccgacuggcc

SEQ ID NO: 3917358 - RNA, 22 nt, Human adenovirus C
cugcucgaucucuuccuccugg

SEQ ID NO: 3917359 - RNA, 14 nt, Human adenovirus C
cugcucucacagau

SEQ ID NO: 3917360 - RNA, 17 nt, Human adenovirus C
cugcucugcucggaaga

SEQ ID NO: 3917361 - RNA, 20 nt, Human adenovirus C
cugcugagccgccgugcgcc

SEQ ID NO: 3917362 - RNA, 14 nt, Human adenovirus C
cugcugcuggaagg

SEQ ID NO: 3917363 - RNA, 14 nt, Human adenovirus C
cugcugggcgagga

SEQ ID NO: 3917364 - RNA, 22 nt, Human adenovirus C
cugcugugcgcuuccuagcgac

SEQ ID NO: 3917365 - RNA, 23 nt, Human adenovirus C
cugcugugcguaacuugcuggaa

SEQ ID NO: 3917366 - RNA, 24 nt, Human adenovirus C
cugcuuauuacagcgcuugcuuug

SEQ ID NO: 3917367 - RNA, 18 nt, Human adenovirus C
cuggaaaaguccacccaa

SEQ ID NO: 3917368 - RNA, 22 nt, Human adenovirus C
cuggaaaaguccacccaaagcg

SEQ ID NO: 3917369 - RNA, 14 nt, Human adenovirus C
cuggaacagagcuc

SEQ ID NO: 3917370 - RNA, 20 nt, Human adenovirus C
cuggaagacgcggaggcucu

SEQ ID NO: 3917371 - RNA, 20 nt, Human adenovirus C
cuggaagccaugcucagaaa

SEQ ID NO: 3917372 - RNA, 16 nt, Human adenovirus C
cuggacauaaacauua

SEQ ID NO: 3917373 - RNA, 18 nt, Human adenovirus C
gcguagcacgucgccacc

SEQ ID NO: 3917374 - RNA, 21 nt, Human adenovirus C
gcguggcccuuggcgcgcagc

SEQ ID NO: 3917375 - RNA, 13 nt, Human adenovirus C
gcguucaggaauu

SEQ ID NO: 3917376 - RNA, 14 nt, Human adenovirus C
gcguuccggcagca

SEQ ID NO: 3917377 - RNA, 24 nt, Human adenovirus C
gcguuucagccccccggcgcccgc

SEQ ID NO: 3917378 - RNA, 21 nt, Human adenovirus C
gcuaacgugucguauguguca

SEQ ID NO: 3917379 - RNA, 23 nt, Human adenovirus C
gcuaaugagcuugaucugcuggc

SEQ ID NO: 3917380 - RNA, 19 nt, Human adenovirus C
gcuaauggcaauggcucag

SEQ ID NO: 3917381 - RNA, 17 nt, Human adenovirus C
gcuacaacaaacagagc

SEQ ID NO: 3917382 - RNA, 20 nt, Human adenovirus C
gcuacaccuaccgccccaga

SEQ ID NO: 3917383 - RNA, 14 nt, Human adenovirus C
gcuacagaggaggc

SEQ ID NO: 3917384 - RNA, 20 nt, Human adenovirus C
gcuacaggggccucuucuuc

SEQ ID NO: 3917385 - RNA, 14 nt, Human adenovirus C
gcuaccaccccagc

SEQ ID NO: 3917386 - RNA, 12 nt, Human adenovirus C
gcuaccucuccg

SEQ ID NO: 3917387 - RNA, 15 nt, Human adenovirus C
gcuaccuucugcagc

SEQ ID NO: 3917388 - RNA, 15 nt, Human adenovirus C
gcuacuaagaaaaca

SEQ ID NO: 3917389 - RNA, 12 nt, Human adenovirus C
gcuagcauuaag

SEQ ID NO: 3917390 - RNA, 20 nt, Human adenovirus C
gcuagccaacuaccuugccu

SEQ ID NO: 3917391 - RNA, 22 nt, Human adenovirus C
gcuagcuuuuuuggccacuggc

SEQ ID NO: 3917392 - RNA, 13 nt, Human adenovirus C
gcuagguccaggu

SEQ ID NO: 3917393 - RNA, 21 nt, Human adenovirus C
gcucaaaggcuacaggggccu

SEQ ID NO: 3917394 - RNA, 19 nt, Human adenovirus C
gcuccacaggucacgggcc

SEQ ID NO: 3917395 - RNA, 17 nt, Human adenovirus C
gcuccccuggacccgcc

SEQ ID NO: 3917396 - RNA, 19 nt, Human adenovirus C
gcucccgggcuuguagacu

SEQ ID NO: 3917397 - RNA, 23 nt, Human adenovirus C
gcucccucacccgcagcugccug

SEQ ID NO: 3917398 - RNA, 21 nt, Human adenovirus C
gcuccuucagcgcgcgcugcc

SEQ ID NO: 3917399 - RNA, 18 nt, Human adenovirus C
gcuccuuuuggcuuccuu

SEQ ID NO: 3917400 - RNA, 14 nt, Human adenovirus C
gcucgaaggcuggc

SEQ ID NO: 3917401 - RNA, 16 nt, Human adenovirus C
gcucgagaucaggcua

SEQ ID NO: 3917402 - RNA, 18 nt, Human adenovirus C
gcucgccuucgaucucag

SEQ ID NO: 3917403 - RNA, 15 nt, Human adenovirus C
gcucgcguccaggcc

SEQ ID NO: 3917404 - RNA, 19 nt, Human adenovirus C
gcucggcggugaccugcac

SEQ ID NO: 3917405 - RNA, 20 nt, Human adenovirus C
gcucuccgcaauucuggaag

SEQ ID NO: 3917406 - RNA, 17 nt, Human adenovirus C
gcucugcaacaagaaaa

SEQ ID NO: 3917407 - RNA, 20 nt, Human adenovirus C
gcucuggccguucgggguca

SEQ ID NO: 3917408 - RNA, 15 nt, Human adenovirus C
gcugaagcagggcca

SEQ ID NO: 3917409 - RNA, 15 nt, Human adenovirus C
gcugaagcgcugccg

SEQ ID NO: 3917410 - RNA, 20 nt, Human adenovirus C
gcugacacuguaccgcgagg

SEQ ID NO: 3917411 - RNA, 20 nt, Human adenovirus C
gcugagguacgaugagaccc

SEQ ID NO: 3917412 - RNA, 14 nt, Human adenovirus C
gcugaugcacagcc

SEQ ID NO: 3917413 - RNA, 21 nt, Human adenovirus C
gcugauugccaggggcaggcc

SEQ ID NO: 3917414 - RNA, 13 nt, Human adenovirus C
gcugcaaacuuuc

SEQ ID NO: 3917415 - RNA, 12 nt, Human adenovirus C
gcugccagggcc

SEQ ID NO: 3917416 - RNA, 14 nt, Human adenovirus C
gcugccagggccgu

SEQ ID NO: 3917417 - RNA, 17 nt, Human adenovirus C
gcugccgccaugggcuc

SEQ ID NO: 3917418 - RNA, 13 nt, Human adenovirus C
gcugccuucccaa

SEQ ID NO: 3917419 - RNA, 16 nt, Human adenovirus C
gcugcgcgcuggccag

SEQ ID NO: 3917420 - RNA, 23 nt, Human adenovirus C
gcugcgcuagcuuuuuuggccac

SEQ ID NO: 3917421 - RNA, 21 nt, Human adenovirus C
gcugcuaaacauaguagagcc

SEQ ID NO: 3917422 - RNA, 12 nt, Human adenovirus C
gcugcuggaagg

SEQ ID NO: 3917423 - RNA, 21 nt, Human adenovirus C
gcuggaaaaguccacccaaag

SEQ ID NO: 3917424 - RNA, 20 nt, Human adenovirus C
gcuggaagccaugcucagaa

SEQ ID NO: 3917425 - RNA, 20 nt, Human adenovirus C
gcuggcaacgucggcggcgu

SEQ ID NO: 3917426 - RNA, 15 nt, Human adenovirus C
gcugggaugggugca

SEQ ID NO: 3917427 - RNA, 23 nt, Human adenovirus C
gcuggggcaggaggacacgggca

SEQ ID NO: 3917428 - RNA, 13 nt, Human adenovirus C
gcugggggcaaca

SEQ ID NO: 3917429 - RNA, 23 nt, Human adenovirus C
gcuggugcaguuugcccgcgcca

SEQ ID NO: 3917430 - RNA, 18 nt, Human adenovirus C
gcuggugggggaugugcg

SEQ ID NO: 3917431 - RNA, 19 nt, Human adenovirus C
gcuguacauccugcacgag

SEQ ID NO: 3917432 - RNA, 15 nt, Human adenovirus C
gcuguauccaaagcu

SEQ ID NO: 3917433 - RNA, 17 nt, Human adenovirus C
gcuuaacaguccccagg

SEQ ID NO: 3917434 - RNA, 12 nt, Human adenovirus C
gcuucaauccaa

SEQ ID NO: 3917435 - RNA, 18 nt, Human adenovirus C
gcuucagccgcugcagcc

SEQ ID NO: 3917436 - RNA, 21 nt, Human adenovirus C
gcuucagcuugccugcuccag

SEQ ID NO: 3917437 - RNA, 17 nt, Human adenovirus C
gcuuccuuccaggcgcg

SEQ ID NO: 3917438 - RNA, 23 nt, Human adenovirus C
gcuucuaaauagcuaacgugucg

SEQ ID NO: 3917439 - RNA, 23 nt, Human adenovirus C
gcuugagacgcgcgagccugccg

SEQ ID NO: 3917440 - RNA, 22 nt, Human adenovirus C
gcuugaucugcuggcgcagaag

SEQ ID NO: 3917441 - RNA, 16 nt, Human adenovirus C
gcuuucagggacaauu

SEQ ID NO: 3917442 - RNA, 21 nt, Human adenovirus C
ggaaacagggacgagccccuu

SEQ ID NO: 3917443 - RNA, 12 nt, Human adenovirus C
ggaaacuggcaa

SEQ ID NO: 3917444 - RNA, 20 nt, Human adenovirus C
ggaaccgggacuggaacaau

SEQ ID NO: 3917445 - RNA, 17 nt, Human adenovirus C
ggaacgaagcugaugcu

SEQ ID NO: 3917446 - RNA, 15 nt, Human adenovirus C
ggaagaagaagagca

SEQ ID NO: 3917447 - RNA, 20 nt, Human adenovirus C
ggaagacguaugcgcaggag

SEQ ID NO: 3917448 - RNA, 20 nt, Human adenovirus C
ggaagcagagugggaauuug

SEQ ID NO: 3917449 - RNA, 12 nt, Human adenovirus C
ggaagcgguggu

SEQ ID NO: 3917450 - RNA, 16 nt, Human adenovirus C
ggaauuugagccccuc

SEQ ID NO: 3917451 - RNA, 13 nt, Human adenovirus C
ggacaagcagcug

SEQ ID NO: 3917452 - RNA, 15 nt, Human adenovirus C
ggacaagcagcuggc

SEQ ID NO: 3917453 - RNA, 14 nt, Human adenovirus C
ggacagcaagaaac

SEQ ID NO: 3917454 - RNA, 13 nt, Human adenovirus C
ugacggcgcggcc

SEQ ID NO: 3917455 - RNA, 18 nt, Human adenovirus C
ugacuacagcccggggga

SEQ ID NO: 3917456 - RNA, 14 nt, Human adenovirus C
ugacucggcagacg

SEQ ID NO: 3917457 - RNA, 21 nt, Human adenovirus C
ugacugacuuugcuuuccuga

SEQ ID NO: 3917458 - RNA, 16 nt, Human adenovirus C
ugacuuugagguacug

SEQ ID NO: 3917459 - RNA, 13 nt, Human adenovirus C
ugagacacaagaa

SEQ ID NO: 3917460 - RNA, 22 nt, Human adenovirus C
ugagacccgcaccaggugcaga

SEQ ID NO: 3917461 - RNA, 19 nt, Human adenovirus C
ugagcagcuggcgcgcugg

SEQ ID NO: 3917462 - RNA, 15 nt, Human adenovirus C
ugagccccgggcugg

SEQ ID NO: 3917463 - RNA, 13 nt, Human adenovirus C
ugagccuggcuga

SEQ ID NO: 3917464 - RNA, 17 nt, Human adenovirus C
ugagcgcgcgcagcagc

SEQ ID NO: 3917465 - RNA, 17 nt, Human adenovirus C
ugagcucaacucccgga

SEQ ID NO: 3917466 - RNA, 21 nt, Human adenovirus C
ugagcugcagggucccucgcc

SEQ ID NO: 3917467 - RNA, 15 nt, Human adenovirus C
ugagcugcgagaagg

SEQ ID NO: 3917468 - RNA, 16 nt, Human adenovirus C
ugaggacuaccacgcc

SEQ ID NO: 3917469 - RNA, 15 nt, Human adenovirus C
ugaggcuacagagga

SEQ ID NO: 3917470 - RNA, 14 nt, Human adenovirus C
ugaggguccugugu

SEQ ID NO: 3917471 - RNA, 14 nt, Human adenovirus C
ugaggguuggaagc

SEQ ID NO: 3917472 - RNA, 12 nt, Human adenovirus C
ugagguacauga

SEQ ID NO: 3917473 - RNA, 19 nt, Human adenovirus C
ugagguggaucccauggac

SEQ ID NO: 3917474 - RNA, 15 nt, Human adenovirus C
ugaguacgagccaga

SEQ ID NO: 3917475 - RNA, 15 nt, Human adenovirus C
ugaguucgccaccac

SEQ ID NO: 3917476 - RNA, 12 nt, Human adenovirus C
ugauacaaacac

SEQ ID NO: 3917477 - RNA, 16 nt, Human adenovirus C
ugaucagaugaugcaa

SEQ ID NO: 3917478 - RNA, 13 nt, Human adenovirus C
ugauccuccagua

SEQ ID NO: 3917479 - RNA, 11 nt, Human adenovirus C
ugaugacaaac

SEQ ID NO: 3917480 - RNA, 20 nt, Human adenovirus C
ugaugccuuugaggguggcc

SEQ ID NO: 3917481 - RNA, 15 nt, Human adenovirus C
ugauggaagcauugu

SEQ ID NO: 3917482 - RNA, 14 nt, Human adenovirus C
ugaugggcuccagc

SEQ ID NO: 3917483 - RNA, 19 nt, Human adenovirus C
ugaugggcuccagcauuga

SEQ ID NO: 3917484 - RNA, 24 nt, Human adenovirus C
ugaugguacccaagcgccagcgac

SEQ ID NO: 3917485 - RNA, 15 nt, Human adenovirus C
ugauuaucgagcagg

SEQ ID NO: 3917486 - RNA, 14 nt, Human adenovirus C
ugcaaacggacccg

SEQ ID NO: 3917487 - RNA, 20 nt, Human adenovirus C
ugcaacccgcggugcuccuc

SEQ ID NO: 3917488 - RNA, 23 nt, Human adenovirus C
ugcaagaggccgcauccccgcgg

SEQ ID NO: 3917489 - RNA, 22 nt, Human adenovirus C
ugcaaguccgcaccagguacug

SEQ ID NO: 3917490 - RNA, 15 nt, Human adenovirus C
ugcaaucccugaagc

SEQ ID NO: 3917491 - RNA, 21 nt, Human adenovirus C
ugcaauucuucucaaauacua

SEQ ID NO: 3917492 - RNA, 13 nt, Human adenovirus C
ugcacgcagcacc

SEQ ID NO: 3917493 - RNA, 14 nt, Human adenovirus C
ugcacgcagcaccu

SEQ ID NO: 3917494 - RNA, 14 nt, Human adenovirus C
ugcacgucuccuga

SEQ ID NO: 3917495 - RNA, 16 nt, Human adenovirus C
ugcagaaacacaagcu

SEQ ID NO: 3917496 - RNA, 22 nt, Human adenovirus C
ugcagaccguaaaccugagcca

SEQ ID NO: 3917497 - RNA, 12 nt, Human adenovirus C
ugcagagccagc

SEQ ID NO: 3917498 - RNA, 20 nt, Human adenovirus C
ugcagagcuucaugcugcgg

SEQ ID NO: 3917499 - RNA, 16 nt, Human adenovirus C
ugcaggaauacaacau

SEQ ID NO: 3917500 - RNA, 17 nt, Human adenovirus C
ugcagguuuaccucgca

SEQ ID NO: 3917501 - RNA, 20 nt, Human adenovirus C
ugcaucaaacaauacuaaaa

SEQ ID NO: 3917502 - RNA, 16 nt, Human adenovirus C
ugcaucuaaaagcggu

SEQ ID NO: 3917503 - RNA, 13 nt, Human adenovirus C
ugcaucuguggga

SEQ ID NO: 3917504 - RNA, 14 nt, Human adenovirus C
ugcauguggaaaaa

SEQ ID NO: 3917505 - RNA, 17 nt, Human adenovirus C
ugccaccucccucccaa

SEQ ID NO: 3917506 - RNA, 18 nt, Human adenovirus C
ugccaggaugcggggugg

SEQ ID NO: 3917507 - RNA, 16 nt, Human adenovirus C
ugccaugaaccacccu

SEQ ID NO: 3917508 - RNA, 18 nt, Human adenovirus C
ugcccaucuccaucccau

SEQ ID NO: 3917509 - RNA, 19 nt, Human adenovirus C
ugcccuacauccuuccauc

SEQ ID NO: 3917510 - RNA, 21 nt, Human adenovirus C
ugccgcggugcaggcggccgc

SEQ ID NO: 3917511 - RNA, 22 nt, Human adenovirus C
ugccuccgcgguaccugcggcc

SEQ ID NO: 3917512 - RNA, 14 nt, Human adenovirus C
ugccugaagauggc

SEQ ID NO: 3917513 - RNA, 16 nt, Human adenovirus C
ugccugcuccagagau

SEQ ID NO: 3917514 - RNA, 16 nt, Human adenovirus C
ugccuuuuacugcugc

SEQ ID NO: 3917515 - RNA, 15 nt, Human adenovirus C
ugcgauacacagggu

SEQ ID NO: 3917516 - RNA, 20 nt, Human adenovirus C
ugcgcaggagcacagggaug

SEQ ID NO: 3917517 - RNA, 17 nt, Human adenovirus C
ugcgccccccuccucag

SEQ ID NO: 3917518 - RNA, 23 nt, Human adenovirus C
ugcgccccccuccucagcagcgg

SEQ ID NO: 3917519 - RNA, 21 nt, Human adenovirus C
ugcgccgugccgccagcgguc

SEQ ID NO: 3917520 - RNA, 23 nt, Human adenovirus C
ugcgcgacucgguuagcggccug

SEQ ID NO: 3917521 - RNA, 16 nt, Human adenovirus C
ugcgcgagggacaggc

SEQ ID NO: 3917522 - RNA, 15 nt, Human adenovirus C
ugcgcgcuggccagg

SEQ ID NO: 3917523 - RNA, 16 nt, Human adenovirus C
ugcgcgucggccaggu

SEQ ID NO: 3917524 - RNA, 19 nt, Human adenovirus C
ugcgcgucggccagguagc

SEQ ID NO: 3917525 - RNA, 12 nt, Human adenovirus C
ugcgcuccgggc

SEQ ID NO: 3917526 - RNA, 15 nt, Human adenovirus C
ugcgcuccgggcugc

SEQ ID NO: 3917527 - RNA, 21 nt, Human adenovirus C
ugcgcuuuuuggaacgcgggu

SEQ ID NO: 3917528 - RNA, 18 nt, Human adenovirus C
ugcggccuaccgggggga

SEQ ID NO: 3917529 - RNA, 21 nt, Human adenovirus C
ugcgggcggcgcugcagagcc

SEQ ID NO: 3917530 - RNA, 21 nt, Human adenovirus C
ugcgguucaucccuguggacc

SEQ ID NO: 3917531 - RNA, 20 nt, Human adenovirus C
ugcuaaccagcguagccccu

SEQ ID NO: 3917532 - RNA, 15 nt, Human adenovirus C
ugcuacaacaaacag

SEQ ID NO: 3917533 - RNA, 18 nt, Human adenovirus C
ugcuaccuucugcagcua

SEQ ID NO: 3917534 - RNA, 14 nt, Human adenovirus C
ugcuccucuucccg

SEQ ID NO: 3917535 - RNA, 22 nt, Human adenovirus C
ugcucguccagacgggccaggg

SEQ ID NO: 3917536 - RNA, 23 nt, Human adenovirus C
ugcugacccggagaugcagcgca

SEQ ID NO: 3917537 - RNA, 16 nt, Human adenovirus C
ugcugagccacaggcu

SEQ ID NO: 3917538 - RNA, 22 nt, Human adenovirus C
ugcugcacgcacguuuguaccu

SEQ ID NO: 3917539 - RNA, 13 nt, Human adenovirus C
ugcugcagcagcg

SEQ ID NO: 3917540 - RNA, 17 nt, Human adenovirus C
ugcugccaggaugcggg

SEQ ID NO: 3917541 - RNA, 19 nt, Human adenovirus C
ugcuggauuuucuggccau

SEQ ID NO: 3917542 - RNA, 13 nt, Human adenovirus C
ugcuggcgcgcac

SEQ ID NO: 3917543 - RNA, 12 nt, Human adenovirus C
ugcugggccagc

SEQ ID NO: 3917544 - RNA, 13 nt, Human adenovirus C
ugcuuacucccaa

SEQ ID NO: 3917545 - RNA, 13 nt, Human adenovirus C
ugcuugcuugcaa

SEQ ID NO: 3917546 - RNA, 16 nt, Human adenovirus C
ugcuugcuugcaagac

SEQ ID NO: 3917547 - RNA, 23 nt, Human adenovirus C
ugcuuguagguuaccucugcaaa

SEQ ID NO: 3917548 - RNA, 13 nt, Human adenovirus C
ugcuuuccugagc

SEQ ID NO: 3917549 - RNA, 19 nt, Human adenovirus C
uggaagacugggacagccu

SEQ ID NO: 3917550 - RNA, 18 nt, Human adenovirus C
uggaauucuucaccagca

SEQ ID NO: 3917551 - RNA, 22 nt, Human adenovirus C
uggacaaccccagacccaucuc

SEQ ID NO: 3917552 - RNA, 13 nt, Human adenovirus C
uggacauaaacau

SEQ ID NO: 3917553 - RNA, 21 nt, Human adenovirus C
uggacauaaacuauaacagag

SEQ ID NO: 3917554 - RNA, 21 nt, Human adenovirus C
uggacauguggugguuuucca

SEQ ID NO: 3917555 - RNA, 15 nt, Human adenovirus C
uggacgcuggaagac

SEQ ID NO: 3917556 - RNA, 16 nt, Human adenovirus C
uggacuaaacuuugau

SEQ ID NO: 3917557 - RNA, 22 nt, Human adenovirus C
uggacuguauuuuuagguuggc

SEQ ID NO: 3917558 - RNA, 15 nt, Human adenovirus C
uggagagcgguggug

SEQ ID NO: 3917559 - RNA, 15 nt, Human adenovirus C
uggagccugggcugg

SEQ ID NO: 3917560 - RNA, 13 nt, Human adenovirus C
uggaggcagcugg

SEQ ID NO: 3917561 - RNA, 22 nt, Human adenovirus C
acuaccuuuccgccgccaacau

SEQ ID NO: 3917562 - RNA, 17 nt, Human adenovirus C
acuagauugcaagaaaa

SEQ ID NO: 3917563 - RNA, 15 nt, Human adenovirus C
acuaguauugccacu

SEQ ID NO: 3917564 - RNA, 15 nt, Human adenovirus C
acucagggucgcagg

SEQ ID NO: 3917565 - RNA, 18 nt, Human adenovirus C
acucgagacgccgccuca

SEQ ID NO: 3917566 - RNA, 21 nt, Human adenovirus C
acucgcgccuguugcugcugc

SEQ ID NO: 3917567 - RNA, 12 nt, Human adenovirus C
acucgcugcugc

SEQ ID NO: 3917568 - RNA, 18 nt, Human adenovirus C
acucucgcaaggccuggc

SEQ ID NO: 3917569 - RNA, 13 nt, Human adenovirus C
acucugcagaccu

SEQ ID NO: 3917570 - RNA, 20 nt, Human adenovirus C
acucuguaugcuauauuuca

SEQ ID NO: 3917571 - RNA, 14 nt, Human adenovirus C
acugacaccuauca

SEQ ID NO: 3917572 - RNA, 18 nt, Human adenovirus C
acugacccgcuguuccuu

SEQ ID NO: 3917573 - RNA, 18 nt, Human adenovirus C
acugccacggguagcuug

SEQ ID NO: 3917574 - RNA, 19 nt, Human adenovirus C
acugcccucacguccaagu

SEQ ID NO: 3917575 - RNA, 14 nt, Human adenovirus C
acugccgccgccac

SEQ ID NO: 3917576 - RNA, 18 nt, Human adenovirus C
acugccuguucgccgacc

SEQ ID NO: 3917577 - RNA, 20 nt, Human adenovirus C
acugcuaccuucugcagcua

SEQ ID NO: 3917578 - RNA, 16 nt, Human adenovirus C
acugcuccuucagcgc

SEQ ID NO: 3917579 - RNA, 21 nt, Human adenovirus C
acugcucgaucucuuccuccu

SEQ ID NO: 3917580 - RNA, 22 nt, Human adenovirus C
acugcucgaucucuuccuccug

SEQ ID NO: 3917581 - RNA, 10 nt, Human adenovirus C
acugcugcug

SEQ ID NO: 3917582 - RNA, 11 nt, Human adenovirus C
acugcugcugg

SEQ ID NO: 3917583 - RNA, 14 nt, Human adenovirus C
acuggacucuuccu

SEQ ID NO: 3917584 - RNA, 17 nt, Human adenovirus C
acuggauggccuuugcc

SEQ ID NO: 3917585 - RNA, 14 nt, Human adenovirus C
acuggccccaaacu

SEQ ID NO: 3917586 - RNA, 16 nt, Human adenovirus C
acugggacagucaggc

SEQ ID NO: 3917587 - RNA, 16 nt, Human adenovirus C
acuggggcagggaccc

SEQ ID NO: 3917588 - RNA, 20 nt, Human adenovirus C
acugguuccuggugcagaug

SEQ ID NO: 3917589 - RNA, 17 nt, Human adenovirus C
acuguuacucagccacu

SEQ ID NO: 3917590 - RNA, 13 nt, Human adenovirus C
acuuaaacucagg

SEQ ID NO: 3917591 - RNA, 16 nt, Human adenovirus C
acuucaggaaggaugu

SEQ ID NO: 3917592 - RNA, 21 nt, Human adenovirus C
acuucuucuucuccuuccucu

SEQ ID NO: 3917593 - RNA, 19 nt, Human adenovirus C
acuugaaaaacauguaaaa

SEQ ID NO: 3917594 - RNA, 23 nt, Human adenovirus C
acuugcggcuggagcugcccaag

SEQ ID NO: 3917595 - RNA, 14 nt, Human adenovirus C
acuuggaggagcga

SEQ ID NO: 3917596 - RNA, 14 nt, Human adenovirus C
acuuggaggagggc

SEQ ID NO: 3917597 - RNA, 20 nt, Human adenovirus C
acuuuccgcuucacuggacu

SEQ ID NO: 3917598 - RNA, 15 nt, Human adenovirus C
acuuugguucuuaca

SEQ ID NO: 3917599 - RNA, 22 nt, Human adenovirus C
acuuuugcuaccaacucuuaca

SEQ ID NO: 3917600 - RNA, 17 nt, Human adenovirus C
agaaaccugugcugcca

SEQ ID NO: 3917601 - RNA, 21 nt, Human adenovirus C
agaaacgaaagccaaaaaacc

SEQ ID NO: 3917602 - RNA, 12 nt, Human adenovirus C
agaaaugccugu

SEQ ID NO: 3917603 - RNA, 13 nt, Human adenovirus C
agaacaagagcug

SEQ ID NO: 3917604 - RNA, 19 nt, Human adenovirus C
agaacaugccgcaagacuu

SEQ ID NO: 3917605 - RNA, 21 nt, Human adenovirus C
agaaccagauauuuuucuaug

SEQ ID NO: 3917606 - RNA, 17 nt, Human adenovirus C
agaacuauggcagcaag

SEQ ID NO: 3917607 - RNA, 11 nt, Human adenovirus C
agaacugagac

SEQ ID NO: 3917608 - RNA, 19 nt, Human adenovirus C
agaagacggaugagcucgg

SEQ ID NO: 3917609 - RNA, 18 nt, Human adenovirus C
agaagcaccauguccuug

SEQ ID NO: 3917610 - RNA, 13 nt, Human adenovirus C
agacaagcuaaaa

SEQ ID NO: 3917611 - RNA, 18 nt, Human adenovirus C
agacaccguccugagugu

SEQ ID NO: 3917612 - RNA, 15 nt, Human adenovirus C
agacagugucuccag

SEQ ID NO: 3917613 - RNA, 20 nt, Human adenovirus C
agacaugaugcaagaccccg

SEQ ID NO: 3917614 - RNA, 22 nt, Human adenovirus C
agaccaguagacaaggccugca

SEQ ID NO: 3917615 - RNA, 23 nt, Human adenovirus C
agaccgucugaagacaccuucaa

SEQ ID NO: 3917616 - RNA, 15 nt, Human adenovirus C
agaccuaccgcguca

SEQ ID NO: 3917617 - RNA, 22 nt, Human adenovirus C
agaccugggccaaaaccuucuc

SEQ ID NO: 3917618 - RNA, 22 nt, Human adenovirus C
agacgaaggcucgcguccaggc

SEQ ID NO: 3917619 - RNA, 18 nt, Human adenovirus C
agacguaugcgcaggagc

SEQ ID NO: 3917620 - RNA, 19 nt, Human adenovirus C
agacguaugcgcaggagca

SEQ ID NO: 3917621 - RNA, 22 nt, Human adenovirus C
agacucggcggacggcuacgac

SEQ ID NO: 3917622 - RNA, 20 nt, Human adenovirus C
agacucuguuuggauuuuga

SEQ ID NO: 3917623 - RNA, 19 nt, Human adenovirus C
agacugggguuugacccag

SEQ ID NO: 3917624 - RNA, 17 nt, Human adenovirus C
agagagcugcagcugcc

SEQ ID NO: 3917625 - RNA, 17 nt, Human adenovirus C
agagcaacaacagcgcc

SEQ ID NO: 3917626 - RNA, 15 nt, Human adenovirus C
agagcaagagcagcg

SEQ ID NO: 3917627 - RNA, 21 nt, Human adenovirus C
agagcccgagggccgcuggcu

SEQ ID NO: 3917628 - RNA, 16 nt, Human adenovirus C
agagcuugggcgcgag

SEQ ID NO: 3917629 - RNA, 13 nt, Human adenovirus C
agaggaggcuagg

SEQ ID NO: 3917630 - RNA, 21 nt, Human adenovirus C
agaggccgcauccccgcggcg

SEQ ID NO: 3917631 - RNA, 19 nt, Human adenovirus C
agaguugcaacagcgcgag

SEQ ID NO: 3917632 - RNA, 20 nt, Human adenovirus C
agauauuuuucuauguggaa

SEQ ID NO: 3917633 - RNA, 18 nt, Human adenovirus C
agauccgcguccaggucc

SEQ ID NO: 3917634 - RNA, 19 nt, Human adenovirus C
agaucuuucauccaugaca

SEQ ID NO: 3917635 - RNA, 15 nt, Human adenovirus C
agaugaagaagagga

SEQ ID NO: 3917636 - RNA, 15 nt, Human adenovirus C
agaugccaugaacca

SEQ ID NO: 3917637 - RNA, 22 nt, Human adenovirus C
agaugccgcggugcaggcggcc

SEQ ID NO: 3917638 - RNA, 16 nt, Human adenovirus C
agaugcugagggacaa

SEQ ID NO: 3917639 - RNA, 22 nt, Human adenovirus C
agauguuagaaucauugaaaac

SEQ ID NO: 3917640 - RNA, 16 nt, Human adenovirus C
agauguuuggcggggc

SEQ ID NO: 3917641 - RNA, 20 nt, Human adenovirus C
agauuagguucuacgaagac

SEQ ID NO: 3917642 - RNA, 15 nt, Human adenovirus C
agauuauacccacaa

SEQ ID NO: 3917643 - RNA, 22 nt, Human adenovirus C
agauuauccaaaaccucaaaau

SEQ ID NO: 3917644 - RNA, 20 nt, Human adenovirus C
agauugagcuccacgugccg

SEQ ID NO: 3917645 - RNA, 18 nt, Human adenovirus C
agauugcaagaaaaaacu

SEQ ID NO: 3917646 - RNA, 15 nt, Human adenovirus C
agauuuuucugcugu

SEQ ID NO: 3917647 - RNA, 17 nt, Human adenovirus C
agauuuuucugcugugc

SEQ ID NO: 3917648 - RNA, 13 nt, Human adenovirus C
agcaacagcagcg

SEQ ID NO: 3917649 - RNA, 19 nt, Human adenovirus C
agcaacaucaacaacagcu

SEQ ID NO: 3917650 - RNA, 17 nt, Human adenovirus C
agcaagacucugacaaa

SEQ ID NO: 3917651 - RNA, 14 nt, Human adenovirus C
agcaagagcagcgg

SEQ ID NO: 3917652 - RNA, 16 nt, Human adenovirus C
agcaaugacagcaccu

SEQ ID NO: 3917653 - RNA, 12 nt, Human adenovirus C
agcacaggccag

SEQ ID NO: 3917654 - RNA, 15 nt, Human adenovirus C
agcaccuucaaccau

SEQ ID NO: 3917655 - RNA, 23 nt, Human adenovirus C
agcacgaaggaggcuaaguggga

SEQ ID NO: 3917656 - RNA, 21 nt, Human adenovirus C
agcacucggcagaaacagagg

SEQ ID NO: 3917657 - RNA, 13 nt, Human adenovirus C
agcagcacaggcc

SEQ ID NO: 3917658 - RNA, 12 nt, Human adenovirus C
agcaggacccag

SEQ ID NO: 3917659 - RNA, 17 nt, Human adenovirus C
agcaggagcgcugggcg

SEQ ID NO: 3917660 - RNA, 15 nt, Human adenovirus C
agcagggcaaccugg

SEQ ID NO: 3917661 - RNA, 18 nt, Human adenovirus C
agcagguuccugagcagc

SEQ ID NO: 3917662 - RNA, 20 nt, Human adenovirus C
agcagguuccugagcagcug

SEQ ID NO: 3917663 - RNA, 18 nt, Human adenovirus C
agcauacuuuccaggaga

SEQ ID NO: 3917664 - RNA, 21 nt, Human adenovirus C
agccaaacgcucaucagugau

SEQ ID NO: 3917665 - RNA, 19 nt, Human adenovirus C
agccacaggcugcugucca

SEQ ID NO: 3917666 - RNA, 17 nt, Human adenovirus C
agccacucucgcaaggc

SEQ ID NO: 3917667 - RNA, 17 nt, Human adenovirus C
agccacuuaaaaaaaca

SEQ ID NO: 3917668 - RNA, 24 nt, Human adenovirus C
agccacuuaaaaaaacaaagucaa

SEQ ID NO: 3917669 - RNA, 16 nt, Human adenovirus C
agcccaacccgcgccu

SEQ ID NO: 3917670 - RNA, 17 nt, Human adenovirus C
agccccccucucuggca

SEQ ID NO: 3917671 - RNA, 12 nt, Human adenovirus C
agcccgaggaga

SEQ ID NO: 3917672 - RNA, 17 nt, Human adenovirus C
agcccgagggccgcugg

SEQ ID NO: 3917673 - RNA, 19 nt, Human adenovirus C
agcccgagggccgcuggcu

SEQ ID NO: 3917674 - RNA, 17 nt, Human adenovirus C
agcccgccaacgugccg

SEQ ID NO: 3917675 - RNA, 18 nt, Human adenovirus C
agcccgccaagaguuucu

SEQ ID NO: 3917676 - RNA, 17 nt, Human adenovirus C
agcccgugacacugcag

SEQ ID NO: 3917677 - RNA, 17 nt, Human adenovirus C
cagaaacuuccagccca

SEQ ID NO: 3917678 - RNA, 17 nt, Human adenovirus C
cagaaagcuacaaggac

SEQ ID NO: 3917679 - RNA, 15 nt, Human adenovirus C
cagaacgaccacagc

SEQ ID NO: 3917680 - RNA, 23 nt, Human adenovirus C
cagaagcuaaugaaugcacuacu

SEQ ID NO: 3917681 - RNA, 23 nt, Human adenovirus C
cagaccguaaaccugagccaggc

SEQ ID NO: 3917682 - RNA, 15 nt, Human adenovirus C
cagacgacagcagcg

SEQ ID NO: 3917683 - RNA, 21 nt, Human adenovirus C
cagacuauuuuuuccagacca

SEQ ID NO: 3917684 - RNA, 22 nt, Human adenovirus C
cagacuauuuuuuccagaccag

SEQ ID NO: 3917685 - RNA, 18 nt, Human adenovirus C
cagagaugaccggcucaa

SEQ ID NO: 3917686 - RNA, 21 nt, Human adenovirus C
cagagcauaguggugcaggag

SEQ ID NO: 3917687 - RNA, 21 nt, Human adenovirus C
cagagcgauuugucagaagcc

SEQ ID NO: 3917688 - RNA, 16 nt, Human adenovirus C
cagagcuguccuauca

SEQ ID NO: 3917689 - RNA, 22 nt, Human adenovirus C
cagaggagguuuuggacgagga

SEQ ID NO: 3917690 - RNA, 19 nt, Human adenovirus C
cagagggcauggagacaca

SEQ ID NO: 3917691 - RNA, 22 nt, Human adenovirus C
cagaggggcguggcgaaaagcg

SEQ ID NO: 3917692 - RNA, 18 nt, Human adenovirus C
cagauaaugacugcaaau

SEQ ID NO: 3917693 - RNA, 16 nt, Human adenovirus C
cagauacccaccacca

SEQ ID NO: 3917694 - RNA, 14 nt, Human adenovirus C
cagauauggcccuc

SEQ ID NO: 3917695 - RNA, 19 nt, Human adenovirus C
cagaugccgcggugcaggc

SEQ ID NO: 3917696 - RNA, 21 nt, Human adenovirus C
cagaugcgccccccuccucag

SEQ ID NO: 3917697 - RNA, 21 nt, Human adenovirus C
cagauggugauuacgaacccc

SEQ ID NO: 3917698 - RNA, 15 nt, Human adenovirus C
cagcaacagcagcgg

SEQ ID NO: 3917699 - RNA, 17 nt, Human adenovirus C
cagcaauaacacaggcu

SEQ ID NO: 3917700 - RNA, 22 nt, Human adenovirus C
cagcaauaugagcgguggcgcc

SEQ ID NO: 3917701 - RNA, 16 nt, Human adenovirus C
cagcaaugccuggagg

SEQ ID NO: 3917702 - RNA, 16 nt, Human adenovirus C
cagcacgaaggaggcu

SEQ ID NO: 3917703 - RNA, 20 nt, Human adenovirus C
cagcagaaaccugugcugcc

SEQ ID NO: 3917704 - RNA, 13 nt, Human adenovirus C
cagcagcacaggc

SEQ ID NO: 3917705 - RNA, 14 nt, Human adenovirus C
cagcagcacaggcc

SEQ ID NO: 3917706 - RNA, 17 nt, Human adenovirus C
cagcagcaggaggagga

SEQ ID NO: 3917707 - RNA, 13 nt, Human adenovirus C
cagcagcagggca

SEQ ID NO: 3917708 - RNA, 22 nt, Human adenovirus C
cagcagcagggcaaccugggcu

SEQ ID NO: 3917709 - RNA, 14 nt, Human adenovirus C
cagcagccgcaggc

SEQ ID NO: 3917710 - RNA, 12 nt, Human adenovirus C
cagcagcuguug

SEQ ID NO: 3917711 - RNA, 12 nt, Human adenovirus C
cagcaggaggaa

SEQ ID NO: 3917712 - RNA, 20 nt, Human adenovirus C
cagcagggcaaccugggcuc

SEQ ID NO: 3917713 - RNA, 15 nt, Human adenovirus C
cagcaggugcugccc

SEQ ID NO: 3917714 - RNA, 16 nt, Human adenovirus C
cagcaggugcugccca

SEQ ID NO: 3917715 - RNA, 13 nt, Human adenovirus C
cagcaucaccucc

SEQ ID NO: 3917716 - RNA, 23 nt, Human adenovirus C
cagcaugaagggcacgagcugcu

SEQ ID NO: 3917717 - RNA, 23 nt, Human adenovirus C
cagcauuugucuuuacgccaccu

SEQ ID NO: 3917718 - RNA, 15 nt, Human adenovirus C
cagccacuuaaaaaa

SEQ ID NO: 3917719 - RNA, 12 nt, Human adenovirus C
cagccaggugac

SEQ ID NO: 3917720 - RNA, 12 nt, Human adenovirus C
cagcccacccug

SEQ ID NO: 3917721 - RNA, 17 nt, Human adenovirus C
cagcccgggggaggcaa

SEQ ID NO: 3917722 - RNA, 19 nt, Human adenovirus C
cagcccgggggaggcaagc

SEQ ID NO: 3917723 - RNA, 21 nt, Human adenovirus C
cagcccgggggaggcaagcac

SEQ ID NO: 3917724 - RNA, 15 nt, Human adenovirus C
cagcccgugcuggcc

SEQ ID NO: 3917725 - RNA, 13 nt, Human adenovirus C
cagcccgugggcu

SEQ ID NO: 3917726 - RNA, 13 nt, Human adenovirus C
cagccgccgcacc

SEQ ID NO: 3917727 - RNA, 20 nt, Human adenovirus C
cagccgccuuuuagcugcaa

SEQ ID NO: 3917728 - RNA, 19 nt, Human adenovirus C
cagccgguggaggacauga

SEQ ID NO: 3917729 - RNA, 14 nt, Human adenovirus C
cagccggugggccc

SEQ ID NO: 3917730 - RNA, 15 nt, Human adenovirus C
cagccggugggcccg

SEQ ID NO: 3917731 - RNA, 17 nt, Human adenovirus C
cagccuccgccgccgcu

SEQ ID NO: 3917732 - RNA, 15 nt, Human adenovirus C
cagcgaugugccccu

SEQ ID NO: 3917733 - RNA, 15 nt, Human adenovirus C
cagcgccaaaaacug

SEQ ID NO: 3917734 - RNA, 13 nt, Human adenovirus C
cagcgccaaggcu

SEQ ID NO: 3917735 - RNA, 12 nt, Human adenovirus C
cagcgccagugc

SEQ ID NO: 3917736 - RNA, 17 nt, Human adenovirus C
cagcgccauuaugagca

SEQ ID NO: 3917737 - RNA, 13 nt, Human adenovirus C
cagcgccucccaa

SEQ ID NO: 3917738 - RNA, 17 nt, Human adenovirus C
cagcgccugcacugcaa

SEQ ID NO: 3917739 - RNA, 20 nt, Human adenovirus C
cagcgcgagcaggcagaggc

SEQ ID NO: 3917740 - RNA, 17 nt, Human adenovirus C
cagcggcaacgugcaga

SEQ ID NO: 3917741 - RNA, 20 nt, Human adenovirus C
cagcggcagaagcugccgcc

SEQ ID NO: 3917742 - RNA, 12 nt, Human adenovirus C
cagcggcagcaa

SEQ ID NO: 3917743 - RNA, 18 nt, Human adenovirus C
cagcggucacacagaagc

SEQ ID NO: 3917744 - RNA, 13 nt, Human adenovirus C
cagcggugcagcc

SEQ ID NO: 3917745 - RNA, 18 nt, Human adenovirus C
cagcguagucugggucac

SEQ ID NO: 3917746 - RNA, 23 nt, Human adenovirus C
cagcgugagcgcgcgcagcagca

SEQ ID NO: 3917747 - RNA, 19 nt, Human adenovirus C
cagcucggcggugaccugc

SEQ ID NO: 3917748 - RNA, 16 nt, Human adenovirus C
cagcucuacagcuucc

SEQ ID NO: 3917749 - RNA, 12 nt, Human adenovirus C
cagcugccgcca

SEQ ID NO: 3917750 - RNA, 23 nt, Human adenovirus C
cagcuguuccuuauagugcagca

SEQ ID NO: 3917751 - RNA, 15 nt, Human adenovirus C
caggacgacgcagag

SEQ ID NO: 3917752 - RNA, 23 nt, Human adenovirus C
caggagauuacaagugucagccg

SEQ ID NO: 3917753 - RNA, 16 nt, Human adenovirus C
caggaggaagccaggc

SEQ ID NO: 3917754 - RNA, 16 nt, Human adenovirus C
caggcagaggcggcgc

SEQ ID NO: 3917755 - RNA, 17 nt, Human adenovirus C
caggccagaugcugagg

SEQ ID NO: 3917756 - RNA, 16 nt, Human adenovirus C
caggcgauaauggaga

SEQ ID NO: 3917757 - RNA, 14 nt, Human adenovirus C
caggcgccgccggc

SEQ ID NO: 3917758 - RNA, 20 nt, Human adenovirus C
caggcgcggcggcugcugcg

SEQ ID NO: 3917759 - RNA, 20 nt, Human adenovirus C
caggcgcuuuuccaagagaa

SEQ ID NO: 3917760 - RNA, 18 nt, Human adenovirus C
caggcggccgcugcggcc

SEQ ID NO: 3917761 - RNA, 13 nt, Human adenovirus C
caggcgggagcuc

SEQ ID NO: 3917762 - RNA, 18 nt, Human adenovirus C
caggcgggagcuccugca

SEQ ID NO: 3917763 - RNA, 18 nt, Human adenovirus C
caggcuacuaagaaaaca

SEQ ID NO: 3917764 - RNA, 14 nt, Human adenovirus C
caggcugcgcacca

SEQ ID NO: 3917765 - RNA, 21 nt, Human adenovirus C
caggcuucguuuugacaucgg

SEQ ID NO: 3917766 - RNA, 19 nt, Human adenovirus C
caggcuuuguuucuccaca

SEQ ID NO: 3917767 - RNA, 15 nt, Human adenovirus C
cagggaugcgcugcu

SEQ ID NO: 3917768 - RNA, 15 nt, Human adenovirus C
cagggcaaccugggc

SEQ ID NO: 3917769 - RNA, 17 nt, Human adenovirus C
cagggcuucaauuaaga

SEQ ID NO: 3917770 - RNA, 16 nt, Human adenovirus C
caggggaugauuuuga

SEQ ID NO: 3917771 - RNA, 21 nt, Human adenovirus C
caggggcgcagcuugcgggcg

SEQ ID NO: 3917772 - RNA, 18 nt, Human adenovirus C
cagggucaugucuuucca

SEQ ID NO: 3917773 - RNA, 15 nt, Human adenovirus C
caggguccagaggac

SEQ ID NO: 3917774 - RNA, 22 nt, Human adenovirus C
cagggugcgcuugaggcugguc

SEQ ID NO: 3917775 - RNA, 18 nt, Human adenovirus C
cagguacagcccacccug

SEQ ID NO: 3917776 - RNA, 18 nt, Human adenovirus C
cagguacgccugcaggaa

SEQ ID NO: 3917777 - RNA, 14 nt, Human adenovirus C
caggucucugcgcu

SEQ ID NO: 3917778 - RNA, 12 nt, Human adenovirus C
caguaacugcag

SEQ ID NO: 3917779 - RNA, 20 nt, Human adenovirus C
caguaacugcagcacagcac

SEQ ID NO: 3917780 - RNA, 22 nt, Human adenovirus C
caguaacuuuauguccaugggc

SEQ ID NO: 3917781 - RNA, 21 nt, Human adenovirus C
caguacaaguuguggccccca

SEQ ID NO: 3917782 - RNA, 22 nt, Human adenovirus C
caguacaaguuguggcccccac

SEQ ID NO: 3917783 - RNA, 15 nt, Human adenovirus C
caguacuggcagcgg

SEQ ID NO: 3917784 - RNA, 20 nt, Human adenovirus C
caguaugauuaaaugagaca

SEQ ID NO: 3917785 - RNA, 12 nt, Human adenovirus C
cagucaggcaga

SEQ ID NO: 3917786 - RNA, 16 nt, Human adenovirus C
cagucaggcagaggag

SEQ ID NO: 3917787 - RNA, 13 nt, Human adenovirus C
caguccgggccag

SEQ ID NO: 3917788 - RNA, 14 nt, Human adenovirus C
cagugagcaggaac

SEQ ID NO: 3917789 - RNA, 17 nt, Human adenovirus C
cagugagcaggaacuga

SEQ ID NO: 3917790 - RNA, 22 nt, Human adenovirus C
cagugcuuguuaccguggagcu

SEQ ID NO: 3917791 - RNA, 16 nt, Human adenovirus C
caguggacgcggccau

SEQ ID NO: 3917792 - RNA, 13 nt, Human adenovirus C
caguggacuaaac

SEQ ID NO: 3917793 - RNA, 16 nt, Human adenovirus C
caguggcggcggcgcu

SEQ ID NO: 3917794 - RNA, 18 nt, Human adenovirus C
gguacccaacuccaugcu

SEQ ID NO: 3917795 - RNA, 18 nt, Human adenovirus C
gguagcgcguaugccugc

SEQ ID NO: 3917796 - RNA, 18 nt, Human adenovirus C
gguagcugccuucccaaa

SEQ ID NO: 3917797 - RNA, 20 nt, Human adenovirus C
gguauuagagaucuuauucc

SEQ ID NO: 3917798 - RNA, 22 nt, Human adenovirus C
gguccagaggaccucugcacuc

SEQ ID NO: 3917799 - RNA, 12 nt, Human adenovirus C
gguccagcagag

SEQ ID NO: 3917800 - RNA, 21 nt, Human adenovirus C
gguccgugugcaccagccgca

SEQ ID NO: 3917801 - RNA, 14 nt, Human adenovirus C
gguccugcuggugc

SEQ ID NO: 3917802 - RNA, 14 nt, Human adenovirus C
ggucucgcauucca

SEQ ID NO: 3917803 - RNA, 23 nt, Human adenovirus C
ggucucgcauuccacgagccagg

SEQ ID NO: 3917804 - RNA, 21 nt, Human adenovirus C
ggugaaaaucguaaaacuuuu

SEQ ID NO: 3917805 - RNA, 15 nt, Human adenovirus C
ggugaaggggugcgc

SEQ ID NO: 3917806 - RNA, 16 nt, Human adenovirus C
ggugaaggggugcgcu

SEQ ID NO: 3917807 - RNA, 17 nt, Human adenovirus C
ggugaaggucagcugca

SEQ ID NO: 3917808 - RNA, 16 nt, Human adenovirus C
ggugacaaccgugugc

SEQ ID NO: 3917809 - RNA, 21 nt, Human adenovirus C
ggugacgcgggcgggcccccg

SEQ ID NO: 3917810 - RNA, 20 nt, Human adenovirus C
ggugacggccuacuggagug

SEQ ID NO: 3917811 - RNA, 17 nt, Human adenovirus C
ggugagcgcggaggcgu

SEQ ID NO: 3917812 - RNA, 16 nt, Human adenovirus C
ggugagcgcggcgcca

SEQ ID NO: 3917813 - RNA, 23 nt, Human adenovirus C
ggugcagauguuggccaacuaca

SEQ ID NO: 3917814 - RNA, 19 nt, Human adenovirus C
ggugcaguuugcccgcgcc

SEQ ID NO: 3917815 - RNA, 17 nt, Human adenovirus C
ggugcaugcccaggcuu

SEQ ID NO: 3917816 - RNA, 15 nt, Human adenovirus C
ggugccucuuccaaa

SEQ ID NO: 3917817 - RNA, 13 nt, Human adenovirus C
ggugcgcuugagg

SEQ ID NO: 3917818 - RNA, 15 nt, Human adenovirus C
ggugcgcuugaggcu

SEQ ID NO: 3917819 - RNA, 19 nt, Human adenovirus C
ggugcugcgcgcggagguu

SEQ ID NO: 3917820 - RNA, 15 nt, Human adenovirus C
ggugcugcggcagau

SEQ ID NO: 3917821 - RNA, 18 nt, Human adenovirus C
gguggaggaggcgcgcaa

SEQ ID NO: 3917822 - RNA, 21 nt, Human adenovirus C
gguggaucccauggacgagcc

SEQ ID NO: 3917823 - RNA, 17 nt, Human adenovirus C
gguggcaccgggacugg

SEQ ID NO: 3917824 - RNA, 16 nt, Human adenovirus C
gguggcucccgggcuu

SEQ ID NO: 3917825 - RNA, 21 nt, Human adenovirus C
gguggcugaacuguuuccaga

SEQ ID NO: 3917826 - RNA, 14 nt, Human adenovirus C
ggugguggcggugu

SEQ ID NO: 3917827 - RNA, 15 nt, Human adenovirus C
gguggugggcgccga

SEQ ID NO: 3917828 - RNA, 15 nt, Human adenovirus C
ggugucauaguccag

SEQ ID NO: 3917829 - RNA, 15 nt, Human adenovirus C
gguucacccuggcug

SEQ ID NO: 3917830 - RNA, 11 nt, Human adenovirus C
gguuccagaug

SEQ ID NO: 3917831 - RNA, 20 nt, Human adenovirus C
gguuccugagcagcugcgac

SEQ ID NO: 3917832 - RNA, 17 nt, Human adenovirus C
gguucggggcugugccu

SEQ ID NO: 3917833 - RNA, 15 nt, Human adenovirus C
gguucugcagagcuc

SEQ ID NO: 3917834 - RNA, 16 nt, Human adenovirus C
gguugccgccugcugc

SEQ ID NO: 3917835 - RNA, 22 nt, Human adenovirus C
gguuguuaauuaccugggcggc

SEQ ID NO: 3917836 - RNA, 18 nt, Human adenovirus C
gguuguuucuggcggagg

SEQ ID NO: 3917837 - RNA, 16 nt, Human adenovirus C
guaaaccugagccagg

SEQ ID NO: 3917838 - RNA, 19 nt, Human adenovirus C
guaaagaccccgggcagca

SEQ ID NO: 3917839 - RNA, 21 nt, Human adenovirus C
guaagcgguuaggcuggaaag

SEQ ID NO: 3917840 - RNA, 22 nt, Human adenovirus C
guaagucuaagcagccgccgcc

SEQ ID NO: 3917841 - RNA, 13 nt, Human adenovirus C
guacaguggaaag

SEQ ID NO: 3917842 - RNA, 14 nt, Human adenovirus C
guacauccugcacg

SEQ ID NO: 3917843 - RNA, 19 nt, Human adenovirus C
guacauccugcacgagguu

SEQ ID NO: 3917844 - RNA, 13 nt, Human adenovirus C
guacaugauuuua

SEQ ID NO: 3917845 - RNA, 12 nt, Human adenovirus C
guacuuugacau

SEQ ID NO: 3917846 - RNA, 18 nt, Human adenovirus C
guagaccacgcccccuuc

SEQ ID NO: 3917847 - RNA, 18 nt, Human adenovirus C
guagagcuugggcgcgag

SEQ ID NO: 3917848 - RNA, 19 nt, Human adenovirus C
guagagggcguuggacagc

SEQ ID NO: 3917849 - RNA, 19 nt, Human adenovirus C
guagauggccuggccucug

SEQ ID NO: 3917850 - RNA, 22 nt, Human adenovirus C
guagcacgucgccaccgccgcc

SEQ ID NO: 3917851 - RNA, 15 nt, Human adenovirus C
guaggaggggcaugg

SEQ ID NO: 3917852 - RNA, 23 nt, Human adenovirus C
guaguuuuuacgcccggugagcg

SEQ ID NO: 3917853 - RNA, 17 nt, Human adenovirus C
guauacagacuugagag

SEQ ID NO: 3917854 - RNA, 14 nt, Human adenovirus C
guauccggugcacu

SEQ ID NO: 3917855 - RNA, 19 nt, Human adenovirus C
guauccggugcacuuggga

SEQ ID NO: 3917856 - RNA, 23 nt, Human adenovirus C
guaucuuuuguguggucaagcag

SEQ ID NO: 3917857 - RNA, 17 nt, Human adenovirus C
guaugcgcaggagcaca

SEQ ID NO: 3917858 - RNA, 20 nt, Human adenovirus C
guauucaaccugccaccucc

SEQ ID NO: 3917859 - RNA, 15 nt, Human adenovirus C
gucaauacggccggu

SEQ ID NO: 3917860 - RNA, 11 nt, Human adenovirus C
gucacccagca

SEQ ID NO: 3917861 - RNA, 19 nt, Human adenovirus C
gucacugcuaccuucugca

SEQ ID NO: 3917862 - RNA, 14 nt, Human adenovirus C
gucacuugcugaca

SEQ ID NO: 3917863 - RNA, 16 nt, Human adenovirus C
gucaggcgggagcucc

SEQ ID NO: 3917864 - RNA, 22 nt, Human adenovirus C
gucauaccacugcaacagguua

SEQ ID NO: 3917865 - RNA, 19 nt, Human adenovirus C
gucaugcaagaccccgcuu

SEQ ID NO: 3917866 - RNA, 21 nt, Human adenovirus C
guccacgguaaagaccccggg

SEQ ID NO: 3917867 - RNA, 16 nt, Human adenovirus C
guccacuagggggucc

SEQ ID NO: 3917868 - RNA, 15 nt, Human adenovirus C
guccagacgggccag

SEQ ID NO: 3917869 - RNA, 14 nt, Human adenovirus C
guccagcagaggcg

SEQ ID NO: 3917870 - RNA, 20 nt, Human adenovirus C
guccagcagaggcggccgcc

SEQ ID NO: 3917871 - RNA, 15 nt, Human adenovirus C
guccagcuuauucag

SEQ ID NO: 3917872 - RNA, 19 nt, Human adenovirus C
guccagcuuauucagcauc

SEQ ID NO: 3917873 - RNA, 17 nt, Human adenovirus C
guccaggguuuccuuga

SEQ ID NO: 3917874 - RNA, 17 nt, Human adenovirus C
guccauggucuggagcu

SEQ ID NO: 3917875 - RNA, 22 nt, Human adenovirus C
gucccagcguuugacgcugcgg

SEQ ID NO: 3917876 - RNA, 14 nt, Human adenovirus C
gucccgcucccacc

SEQ ID NO: 3917877 - RNA, 18 nt, Human adenovirus C
gucccuaaccaugacuuu

SEQ ID NO: 3917878 - RNA, 20 nt, Human adenovirus C
gucccuaaccaugacuuuga

SEQ ID NO: 3917879 - RNA, 16 nt, Human adenovirus C
gucccuccgcacccac

SEQ ID NO: 3917880 - RNA, 19 nt, Human adenovirus C
guccggcucaccacccagg

SEQ ID NO: 3917881 - RNA, 20 nt, Human adenovirus C
guccggcucaccacccaggu

SEQ ID NO: 3917882 - RNA, 17 nt, Human adenovirus C
guccgugugcaccagcc

SEQ ID NO: 3917883 - RNA, 22 nt, Human adenovirus C
guccuuggguccggccugcuga

SEQ ID NO: 3917884 - RNA, 22 nt, Human adenovirus C
gucgaagccguugauguugugg

SEQ ID NO: 3917885 - RNA, 13 nt, Human adenovirus C
gucgcaggggcaa

SEQ ID NO: 3917886 - RNA, 18 nt, Human adenovirus C
gucgccgucgccagcccg

SEQ ID NO: 3917887 - RNA, 16 nt, Human adenovirus C
gucgcuguccagcugc

SEQ ID NO: 3917888 - RNA, 15 nt, Human adenovirus C
gucgggcaccaggug

SEQ ID NO: 3917889 - RNA, 17 nt, Human adenovirus C
gucgggguuguuucugg

SEQ ID NO: 3917890 - RNA, 21 nt, Human adenovirus C
gucgugcgcaccaccggcggc

SEQ ID NO: 3917891 - RNA, 17 nt, Human adenovirus C
gucuaugcccaggcucc

SEQ ID NO: 3917892 - RNA, 13 nt, Human adenovirus C
gucuccagagggg

SEQ ID NO: 3917893 - RNA, 18 nt, Human adenovirus C
gucucgcauuccacgagc

SEQ ID NO: 3917894 - RNA, 23 nt, Human adenovirus C
gucugaagacaccuucaaccccg

SEQ ID NO: 3917895 - RNA, 22 nt, Human adenovirus C
gucugaggguaacuccagggug

SEQ ID NO: 3917896 - RNA, 14 nt, Human adenovirus C
gucuuacaaaccug

SEQ ID NO: 3917897 - RNA, 23 nt, Human adenovirus C
gucuucgcccugcgcgucggcca

SEQ ID NO: 3917898 - RNA, 13 nt, Human adenovirus C
gugaaccaggaga

SEQ ID NO: 3917899 - RNA, 18 nt, Human adenovirus C
gugacccggcugcgagag

SEQ ID NO: 3917900 - RNA, 14 nt, Human adenovirus C
gugacgaaaaggcu

SEQ ID NO: 3917901 - RNA, 14 nt, Human adenovirus C
gugacugacuuugc

SEQ ID NO: 3917902 - RNA, 19 nt, Human adenovirus C
gugagcgugagccggcggc

SEQ ID NO: 3917903 - RNA, 13 nt, Human adenovirus C
gugaugccuuuga

SEQ ID NO: 3917904 - RNA, 13 nt, Human adenovirus C
gugcagcagagcg

SEQ ID NO: 3917905 - RNA, 19 nt, Human adenovirus C
gugccaaccgcagccgagc

SEQ ID NO: 3917906 - RNA, 14 nt, Human adenovirus C
gugcccgcugucau

SEQ ID NO: 3917907 - RNA, 14 nt, Human adenovirus C
gugcccuugaugga

SEQ ID NO: 3917908 - RNA, 22 nt, Human adenovirus C
gugccgggauuccgaggaagaa

SEQ ID NO: 3917909 - RNA, 14 nt, Human adenovirus C
gugcgcggagcccg

SEQ ID NO: 3917910 - RNA, 23 nt, Human adenovirus C
uggauguggacgccuaccaggca

SEQ ID NO: 3917911 - RNA, 22 nt, Human adenovirus C
uggcacccgcgcgcgcuggcaa

SEQ ID NO: 3917912 - RNA, 23 nt, Human adenovirus C
uggcauuagcggggugguggacc

SEQ ID NO: 3917913 - RNA, 17 nt, Human adenovirus C
uggccaaccaggcagug

SEQ ID NO: 3917914 - RNA, 13 nt, Human adenovirus C
uggcccgcgguga

SEQ ID NO: 3917915 - RNA, 19 nt, Human adenovirus C
uggccgaaaacagggccau

SEQ ID NO: 3917916 - RNA, 22 nt, Human adenovirus C
uggccgcgauguuuagcugcac

SEQ ID NO: 3917917 - RNA, 14 nt, Human adenovirus C
uggccgcgggcugg

SEQ ID NO: 3917918 - RNA, 16 nt, Human adenovirus C
uggccggggcuccggg

SEQ ID NO: 3917919 - RNA, 13 nt, Human adenovirus C
uggccucuggcau

SEQ ID NO: 3917920 - RNA, 18 nt, Human adenovirus C
uggcgcagcgugagcgcg

SEQ ID NO: 3917921 - RNA, 17 nt, Human adenovirus C
uggcgccuucagcuggg

SEQ ID NO: 3917922 - RNA, 15 nt, Human adenovirus C
uggcggcggcgcugg

SEQ ID NO: 3917923 - RNA, 22 nt, Human adenovirus C
uggcgguagugggucuagcugc

SEQ ID NO: 3917924 - RNA, 18 nt, Human adenovirus C
uggcgguggcacccgcgc

SEQ ID NO: 3917925 - RNA, 17 nt, Human adenovirus C
uggcuaccccuucgaug

SEQ ID NO: 3917926 - RNA, 17 nt, Human adenovirus C
uggcuugagacgcgcga

SEQ ID NO: 3917927 - RNA, 17 nt, Human adenovirus C
ugggauaugcuccaggc

SEQ ID NO: 3917928 - RNA, 13 nt, Human adenovirus C
ugggcaggcagaa

SEQ ID NO: 3917929 - RNA, 13 nt, Human adenovirus C
ugggcgaggagga

SEQ ID NO: 3917930 - RNA, 16 nt, Human adenovirus C
ugggcuaaucuugguu

SEQ ID NO: 3917931 - RNA, 13 nt, Human adenovirus C
uggggcaggagga

SEQ ID NO: 3917932 - RNA, 16 nt, Human adenovirus C
uggggcggcgaccuga

SEQ ID NO: 3917933 - RNA, 22 nt, Human adenovirus C
uggggcucgcuguggagcggca

SEQ ID NO: 3917934 - RNA, 24 nt, Human adenovirus C
ugggggugcaaucccugaagcgcc

SEQ ID NO: 3917935 - RNA, 16 nt, Human adenovirus C
uggggugggugagcgc

SEQ ID NO: 3917936 - RNA, 12 nt, Human adenovirus C
ugggugagcgca

SEQ ID NO: 3917937 - RNA, 19 nt, Human adenovirus C
uggucccggcgcgcgcaaa

SEQ ID NO: 3917938 - RNA, 16 nt, Human adenovirus C
uggugcaggagcgcag

SEQ ID NO: 3917939 - RNA, 22 nt, Human adenovirus C
uggugcaguuugcccgcgccac

SEQ ID NO: 3917940 - RNA, 14 nt, Human adenovirus C
ugguggaccuggcc

SEQ ID NO: 3917941 - RNA, 15 nt, Human adenovirus C
ugguuccuggugcag

SEQ ID NO: 3917942 - RNA, 15 nt, Human adenovirus C
ugguucuugcagaua

SEQ ID NO: 3917943 - RNA, 13 nt, Human adenovirus C
uguaccugcgcac

SEQ ID NO: 3917944 - RNA, 17 nt, Human adenovirus C
uguccagcuuauucagc

SEQ ID NO: 3917945 - RNA, 22 nt, Human adenovirus C
uguccaucaacgcgcgcgcagc

SEQ ID NO: 3917946 - RNA, 16 nt, Human adenovirus C
ugugacgagucuucuu

SEQ ID NO: 3917947 - RNA, 13 nt, Human adenovirus C
ugugcagcagagc

SEQ ID NO: 3917948 - RNA, 12 nt, Human adenovirus C
ugugcgcgaggc

SEQ ID NO: 3917949 - RNA, 22 nt, Human adenovirus C
ugugcuugauauggcuuccacg

SEQ ID NO: 3917950 - RNA, 16 nt, Human adenovirus C
uguggccgggggugcu

SEQ ID NO: 3917951 - RNA, 18 nt, Human adenovirus C
uguggcgcgcgaggaggu

SEQ ID NO: 3917952 - RNA, 17 nt, Human adenovirus C
uguggugagcuguuuga

SEQ ID NO: 3917953 - RNA, 17 nt, Human adenovirus C
uguucugacagggccca

SEQ ID NO: 3917954 - RNA, 19 nt, Human adenovirus C
uguugcgcuuuucugugcg

SEQ ID NO: 3917955 - RNA, 16 nt, Human adenovirus C
uguuggcguugccgcu

SEQ ID NO: 3917956 - RNA, 17 nt, Human adenovirus C
uguugggaaacggccgc

SEQ ID NO: 3917957 - RNA, 18 nt, Human adenovirus C
uuaaacagcgaggaggag

SEQ ID NO: 3917958 - RNA, 20 nt, Human adenovirus C
uuaacaauaccuguguggaa

SEQ ID NO: 3917959 - RNA, 18 nt, Human adenovirus C
uuaagagagcugcagcug

SEQ ID NO: 3917960 - RNA, 17 nt, Human adenovirus C
uuaagcccuacuccggc

SEQ ID NO: 3917961 - RNA, 21 nt, Human adenovirus C
uuaaguauaugagcaauucaa

SEQ ID NO: 3917962 - RNA, 22 nt, Human adenovirus C
uuaaguucaugucgcuguccag

SEQ ID NO: 3917963 - RNA, 18 nt, Human adenovirus C
uuaaucaaacucacagaa

SEQ ID NO: 3917964 - RNA, 16 nt, Human adenovirus C
uuaaugcaucucauaa

SEQ ID NO: 3917965 - RNA, 19 nt, Human adenovirus C
uuacaacagcggcaacgug

SEQ ID NO: 3917966 - RNA, 14 nt, Human adenovirus C
uuacugcugcugga

SEQ ID NO: 3917967 - RNA, 17 nt, Human adenovirus C
uuacugcugcuggaagg

SEQ ID NO: 3917968 - RNA, 15 nt, Human adenovirus C
uuaggguauaugcaa

SEQ ID NO: 3917969 - RNA, 21 nt, Human adenovirus C
uuagugcuccacuuaaacuca

SEQ ID NO: 3917970 - RNA, 16 nt, Human adenovirus C
uuauacccacaaccuu

SEQ ID NO: 3917971 - RNA, 21 nt, Human adenovirus C
uuaucucaaauacaaaagcag

SEQ ID NO: 3917972 - RNA, 17 nt, Human adenovirus C
uucagccugaauaacaa

SEQ ID NO: 3917973 - RNA, 21 nt, Human adenovirus C
uucaucaaacaacauggaaau

SEQ ID NO: 3917974 - RNA, 18 nt, Human adenovirus C
uuccaaaaacgaggagga

SEQ ID NO: 3917975 - RNA, 17 nt, Human adenovirus C
uuccaaaacugcaagau

SEQ ID NO: 3917976 - RNA, 23 nt, Human adenovirus C
uuccagaccaguagacaaggccu

SEQ ID NO: 3917977 - RNA, 18 nt, Human adenovirus C
uuccaggaaguacggcac

SEQ ID NO: 3917978 - RNA, 16 nt, Human adenovirus C
uucccaggauggcacc

SEQ ID NO: 3917979 - RNA, 20 nt, Human adenovirus C
uucccagugcccgcugucau

SEQ ID NO: 3917980 - RNA, 19 nt, Human adenovirus C
uucccgcacuguuggaugu

SEQ ID NO: 3917981 - RNA, 14 nt, Human adenovirus C
uucgcacuggggcg

SEQ ID NO: 3917982 - RNA, 16 nt, Human adenovirus C
uucgcgguugggccuu

SEQ ID NO: 3917983 - RNA, 23 nt, Human adenovirus C
uucgguuccaccauuaagaacua

SEQ ID NO: 3917984 - RNA, 21 nt, Human adenovirus C
uucuaccccguauuugccgug

SEQ ID NO: 3917985 - RNA, 22 nt, Human adenovirus C
uucugaucagaugaugcaagac

SEQ ID NO: 3917986 - RNA, 17 nt, Human adenovirus C
uucuuauauuauugacc

SEQ ID NO: 3917987 - RNA, 13 nt, Human adenovirus C
uugaacaaaacuc

SEQ ID NO: 3917988 - RNA, 13 nt, Human adenovirus C
uugacaugaccau

SEQ ID NO: 3917989 - RNA, 14 nt, Human adenovirus C
uugagccuggcuga

SEQ ID NO: 3917990 - RNA, 17 nt, Human adenovirus C
uugagccuggcugacaa

SEQ ID NO: 3917991 - RNA, 23 nt, Human adenovirus C
uugcaagaacaaaccgaggaggg

SEQ ID NO: 3917992 - RNA, 15 nt, Human adenovirus C
uugcaagcagugcag

SEQ ID NO: 3917993 - RNA, 21 nt, Human adenovirus C
uugcauguuuucccugaccaa

SEQ ID NO: 3917994 - RNA, 22 nt, Human adenovirus C
uugcauuuggguaacaggaggg

SEQ ID NO: 3917995 - RNA, 17 nt, Human adenovirus C
uugcccuuggaggaggc

SEQ ID NO: 3917996 - RNA, 16 nt, Human adenovirus C
uugcgauacacagggu

SEQ ID NO: 3917997 - RNA, 17 nt, Human adenovirus C
uugcgcuaugugcagca

SEQ ID NO: 3917998 - RNA, 22 nt, Human adenovirus C
uugcgcuaugugcagcagagcg

SEQ ID NO: 3917999 - RNA, 20 nt, Human adenovirus C
uugcugacacuguaccgcga

SEQ ID NO: 3918000 - RNA, 19 nt, Human adenovirus C
uuggagaugcgggccauga

SEQ ID NO: 3918001 - RNA, 19 nt, Human adenovirus C
uuuaggcuugcucgcccuu

SEQ ID NO: 3918002 - RNA, 23 nt, Human adenovirus C
uuuccaggggcugguugguggcg

SEQ ID NO: 3918003 - RNA, 16 nt, Human adenovirus C
uuucgcguuucagccc

SEQ ID NO: 3918004 - RNA, 22 nt, Human adenovirus C
uuucuggcggaggugcugcuga

SEQ ID NO: 3918005 - RNA, 14 nt, Human adenovirus C
uuugaagagcuuuu

SEQ ID NO: 3918006 - RNA, 21 nt, Human adenovirus C
uuugagguacugguauuugaa

SEQ ID NO: 3918007 - RNA, 17 nt, Human adenovirus C
uuugauauucaccuggc

SEQ ID NO: 3918008 - RNA, 16 nt, Human adenovirus C
uuugccacacaaccuu

SEQ ID NO: 3918009 - RNA, 13 nt, Human adenovirus C
uuuguaauuuaca

SEQ ID NO: 3918010 - RNA, 19 nt, Human adenovirus C
uuuguacagugaagaugua

SEQ ID NO: 3918011 - RNA, 20 nt, Human adenovirus C
uuuuacccacccaaagcaga

SEQ ID NO: 3918012 - RNA, 17 nt, Human adenovirus C
uuuuggacgaggaggag

SEQ ID NO: 3918013 - RNA, 20 nt, Human adenovirus D
aaaaaucacucuuuccagca

SEQ ID NO: 3918014 - RNA, 10 nt, Human adenovirus D
aaaacacaca

SEQ ID NO: 3918015 - RNA, 14 nt, Human adenovirus D
aaaacagaaagcau

SEQ ID NO: 3918016 - RNA, 13 nt, Human adenovirus D
aaaaccacauuug

SEQ ID NO: 3918017 - RNA, 19 nt, Human adenovirus D
aaaaccaguuuucccccgu

SEQ ID NO: 3918018 - RNA, 13 nt, Human adenovirus D
aaaacccaugaaa

SEQ ID NO: 3918019 - RNA, 15 nt, Human adenovirus D
aaaagcguccgcagu

SEQ ID NO: 3918020 - RNA, 14 nt, Human adenovirus D
aaaccccgccaaaa

SEQ ID NO: 3918021 - RNA, 14 nt, Human adenovirus D
aaaccuuaguuggg

SEQ ID NO: 3918022 - RNA, 18 nt, Human adenovirus D
aaagcaguucacuagccu

SEQ ID NO: 3918023 - RNA, 16 nt, Human adenovirus D
aaagccagcagcacau

SEQ ID NO: 3918024 - RNA, 15 nt, Human adenovirus D
aaagcugaggauggc

SEQ ID NO: 3918025 - RNA, 22 nt, Human adenovirus D
aaagugcuggaggguugaaaga

SEQ ID NO: 3918026 - RNA, 22 nt, Human adenovirus D
cgaccucgccgucuacucccag

SEQ ID NO: 3918027 - RNA, 21 nt, Human adenovirus D
cgaccugggcguguaccgcaa

SEQ ID NO: 3918028 - RNA, 22 nt, Human adenovirus D
cgaccuugcaaaagcgccagga

SEQ ID NO: 3918029 - RNA, 20 nt, Human adenovirus D
cgacgaggauuucgagccga

SEQ ID NO: 3918030 - RNA, 15 nt, Human adenovirus D
cgacguggacagcgc

SEQ ID NO: 3918031 - RNA, 14 nt, Human adenovirus D
cgacucgcugcugc

SEQ ID NO: 3918032 - RNA, 14 nt, Human adenovirus D
cgagaccagaggca

SEQ ID NO: 3918033 - RNA, 15 nt, Human adenovirus D
cgagaccgugagcuc

SEQ ID NO: 3918034 - RNA, 19 nt, Human adenovirus D
cgagaccugcgcaaggucg

SEQ ID NO: 3918035 - RNA, 17 nt, Human adenovirus D
cgagaggcgagcagcug

SEQ ID NO: 3918036 - RNA, 19 nt, Human adenovirus D
cgagaucguccucccccga

SEQ ID NO: 3918037 - RNA, 22 nt, Human adenovirus D
cgagcaacccaaaaucgagcag

SEQ ID NO: 3918038 - RNA, 18 nt, Human adenovirus D
cgagcaagacgcaggcca

SEQ ID NO: 3918039 - RNA, 21 nt, Human adenovirus D
cgagcaagggcgaccagcucu

SEQ ID NO: 3918040 - RNA, 22 nt, Human adenovirus D
cgagcacagcaccgcauccuga

SEQ ID NO: 3918041 - RNA, 14 nt, Human adenovirus D
cgagcacucgugcu

SEQ ID NO: 3918042 - RNA, 23 nt, Human adenovirus D
cgagcagacggugaagcaggagc

SEQ ID NO: 3918043 - RNA, 16 nt, Human adenovirus D
cgagcagcgcauccug

SEQ ID NO: 3918044 - RNA, 17 nt, Human adenovirus D
cgagcaggaccugggcu

SEQ ID NO: 3918045 - RNA, 17 nt, Human adenovirus D
cgagcaugaggcggugg

SEQ ID NO: 3918046 - RNA, 13 nt, Human adenovirus D
cgagccaggugag

SEQ ID NO: 3918047 - RNA, 16 nt, Human adenovirus D
cgagccaggugagcuc

SEQ ID NO: 3918048 - RNA, 19 nt, Human adenovirus D
cgagccauugaccaccagg

SEQ ID NO: 3918049 - RNA, 21 nt, Human adenovirus D
cgagcccgcgcgggagccagg

SEQ ID NO: 3918050 - RNA, 13 nt, Human adenovirus D
cgagcgccagcug

SEQ ID NO: 3918051 - RNA, 14 nt, Human adenovirus D
cgagcgccagcugu

SEQ ID NO: 3918052 - RNA, 22 nt, Human adenovirus D
cgagcuacaugcccagcagcag

SEQ ID NO: 3918053 - RNA, 17 nt, Human adenovirus D
cgagcuggaagcccuga

SEQ ID NO: 3918054 - RNA, 21 nt, Human adenovirus D
cgaggagcugagaccagacca

SEQ ID NO: 3918055 - RNA, 23 nt, Human adenovirus D
cgaggauuucgagccgaacgagc

SEQ ID NO: 3918056 - RNA, 18 nt, Human adenovirus D
cgaggccaugcugcgccg

SEQ ID NO: 3918057 - RNA, 15 nt, Human adenovirus D
cgagggccugggcuc

SEQ ID NO: 3918058 - RNA, 15 nt, Human adenovirus D
cgagggcgcgcaguu

SEQ ID NO: 3918059 - RNA, 17 nt, Human adenovirus D
cgagggucgcuggcugc

SEQ ID NO: 3918060 - RNA, 19 nt, Human adenovirus D
cgagggucugcgagaggag

SEQ ID NO: 3918061 - RNA, 15 nt, Human adenovirus D
cgauagccgccagga

SEQ ID NO: 3918062 - RNA, 15 nt, Human adenovirus D
cgauccugacgcgcc

SEQ ID NO: 3918063 - RNA, 22 nt, Human adenovirus D
cgaugagaucaacuacaaggac

SEQ ID NO: 3918064 - RNA, 21 nt, Human adenovirus D
cgaugccaucaacauccacca

SEQ ID NO: 3918065 - RNA, 17 nt, Human adenovirus D
cgaugccuucuccaggg

SEQ ID NO: 3918066 - RNA, 19 nt, Human adenovirus D
cgaugguggcgcgcaccuc

SEQ ID NO: 3918067 - RNA, 15 nt, Human adenovirus D
cgauguaacaucacc

SEQ ID NO: 3918068 - RNA, 16 nt, Human adenovirus D
cgauguaacaucacca

SEQ ID NO: 3918069 - RNA, 18 nt, Human adenovirus D
cgcaaccaggaggagcuc

SEQ ID NO: 3918070 - RNA, 17 nt, Human adenovirus D
cgcaaugcgggccugcg

SEQ ID NO: 3918071 - RNA, 17 nt, Human adenovirus D
cgcacccguccuccucg

SEQ ID NO: 3918072 - RNA, 11 nt, Human adenovirus D
cgcaccucgcg

SEQ ID NO: 3918073 - RNA, 12 nt, Human adenovirus D
cgcaccucgcgc

SEQ ID NO: 3918074 - RNA, 13 nt, Human adenovirus D
cgcacgggccgcc

SEQ ID NO: 3918075 - RNA, 22 nt, Human adenovirus D
cgcagacgagcggccgccgccg

SEQ ID NO: 3918076 - RNA, 15 nt, Human adenovirus D
cgcaggcgcccagcc

SEQ ID NO: 3918077 - RNA, 20 nt, Human adenovirus D
cgcaggcgggacagaggagg

SEQ ID NO: 3918078 - RNA, 20 nt, Human adenovirus D
cgcaguccgccaagcuccuc

SEQ ID NO: 3918079 - RNA, 15 nt, Human adenovirus D
cgcaucauggcccug

SEQ ID NO: 3918080 - RNA, 23 nt, Human adenovirus D
cgcauguacaacaugcugacugc

SEQ ID NO: 3918081 - RNA, 14 nt, Human adenovirus D
cgcauguacuccuu

SEQ ID NO: 3918082 - RNA, 18 nt, Human adenovirus D
cgccaaccggcugaugcc

SEQ ID NO: 3918083 - RNA, 21 nt, Human adenovirus D
cgccaacucggcccacgcgcu

SEQ ID NO: 3918084 - RNA, 15 nt, Human adenovirus D
cgccaagggcagccc

SEQ ID NO: 3918085 - RNA, 12 nt, Human adenovirus D
cgccaccugcaa

SEQ ID NO: 3918086 - RNA, 22 nt, Human adenovirus D
cgccaccuucuuccccauggcg

SEQ ID NO: 3918087 - RNA, 18 nt, Human adenovirus D
cgccagacgcacgggccg

SEQ ID NO: 3918088 - RNA, 24 nt, Human adenovirus D
cgccagccgcgguuaugcagggug

SEQ ID NO: 3918089 - RNA, 17 nt, Human adenovirus D
cgccaggaggcggugcg

SEQ ID NO: 3918090 - RNA, 20 nt, Human adenovirus D
cgccauugucaacacggccg

SEQ ID NO: 3918091 - RNA, 21 nt, Human adenovirus D
cgcccagcaauaacaccggcu

SEQ ID NO: 3918092 - RNA, 14 nt, Human adenovirus D
cgcccagcaugucc

SEQ ID NO: 3918093 - RNA, 19 nt, Human adenovirus D
cgcccagcgagaggagcuc

SEQ ID NO: 3918094 - RNA, 13 nt, Human adenovirus D
cgcccgcagcacg

SEQ ID NO: 3918095 - RNA, 16 nt, Human adenovirus D
cgcccgccgccaggcc

SEQ ID NO: 3918096 - RNA, 13 nt, Human adenovirus D
cgcccgcgcccac

SEQ ID NO: 3918097 - RNA, 17 nt, Human adenovirus D
cgcccguagucuggaga

SEQ ID NO: 3918098 - RNA, 15 nt, Human adenovirus D
cgcccgucgccgcac

SEQ ID NO: 3918099 - RNA, 16 nt, Human adenovirus D
cgcccugacccagcag

SEQ ID NO: 3918100 - RNA, 18 nt, Human adenovirus D
cgcccugagagcgcuggc

SEQ ID NO: 3918101 - RNA, 15 nt, Human adenovirus D
cgcccugcuggagcg

SEQ ID NO: 3918102 - RNA, 18 nt, Human adenovirus D
cgccgaagcgccguggcc

SEQ ID NO: 3918103 - RNA, 22 nt, Human adenovirus D
cgccgacgcgcuccucgcucug

SEQ ID NO: 3918104 - RNA, 20 nt, Human adenovirus D
cgccgauuuaaagacccaca

SEQ ID NO: 3918105 - RNA, 13 nt, Human adenovirus D
cgccgccgcggcc

SEQ ID NO: 3918106 - RNA, 16 nt, Human adenovirus D
cgccggcggcgggcca

SEQ ID NO: 3918107 - RNA, 22 nt, Human adenovirus D
cgccgggccaugaugcgagccg

SEQ ID NO: 3918108 - RNA, 17 nt, Human adenovirus D
cgccgucaaccucccgc

SEQ ID NO: 3918109 - RNA, 13 nt, Human adenovirus D
cgccuccacccug

SEQ ID NO: 3918110 - RNA, 14 nt, Human adenovirus D
cgccuggggcagac

SEQ ID NO: 3918111 - RNA, 22 nt, Human adenovirus D
cgccuggggcagacagugcucc

SEQ ID NO: 3918112 - RNA, 15 nt, Human adenovirus D
cgcgaaccaggcagu

SEQ ID NO: 3918113 - RNA, 15 nt, Human adenovirus D
cgcgacccccaggcc

SEQ ID NO: 3918114 - RNA, 20 nt, Human adenovirus D
cgcgagcgagggcgcggugg

SEQ ID NO: 3918115 - RNA, 20 nt, Human adenovirus D
cgcgaguucgcuccgcggcg

SEQ ID NO: 3918116 - RNA, 18 nt, Human adenovirus D
cgcgcccguagucuggag

SEQ ID NO: 3918117 - RNA, 22 nt, Human adenovirus D
cgcgcgcaugaccaccugcgcg

SEQ ID NO: 3918118 - RNA, 16 nt, Human adenovirus D
cgcgcgcgguaggccc

SEQ ID NO: 3918119 - RNA, 15 nt, Human adenovirus D
cgcgcgggagccagg

SEQ ID NO: 3918120 - RNA, 12 nt, Human adenovirus D
cgcgcgggcagg

SEQ ID NO: 3918121 - RNA, 13 nt, Human adenovirus D
cgcgcgggcagga

SEQ ID NO: 3918122 - RNA, 18 nt, Human adenovirus D
cgcgcuugcugggcgagg

SEQ ID NO: 3918123 - RNA, 16 nt, Human adenovirus D
cgcggacggccgcggc

SEQ ID NO: 3918124 - RNA, 17 nt, Human adenovirus D
cgcggccgcccacggug

SEQ ID NO: 3918125 - RNA, 20 nt, Human adenovirus D
cgcggccguucaugggcacc

SEQ ID NO: 3918126 - RNA, 18 nt, Human adenovirus D
cgcggcguccuggaccgc

SEQ ID NO: 3918127 - RNA, 15 nt, Human adenovirus D
cgcgguccuccucgu

SEQ ID NO: 3918128 - RNA, 19 nt, Human adenovirus D
cgcggugggucggagcccc

SEQ ID NO: 3918129 - RNA, 22 nt, Human adenovirus D
cgcguaaauuggaaggggcgca

SEQ ID NO: 3918130 - RNA, 14 nt, Human adenovirus D
cgcguccaucgugc

SEQ ID NO: 3918131 - RNA, 18 nt, Human adenovirus D
cgcgucgcuguccacgag

SEQ ID NO: 3918132 - RNA, 19 nt, Human adenovirus D
cgcguguugcggcccggca

SEQ ID NO: 3918133 - RNA, 17 nt, Human adenovirus D
cgcuacgugcccuucca

SEQ ID NO: 3918134 - RNA, 17 nt, Human adenovirus D
cgcuagccagccacagc

SEQ ID NO: 3918135 - RNA, 12 nt, Human adenovirus D
cgcucaggacca

SEQ ID NO: 3918136 - RNA, 18 nt, Human adenovirus D
cgcuccaccgaaggcagc

SEQ ID NO: 3918137 - RNA, 14 nt, Human adenovirus D
cgcuccguggggcg

SEQ ID NO: 3918138 - RNA, 16 nt, Human adenovirus D
cgcucucguuccagac

SEQ ID NO: 3918139 - RNA, 19 nt, Human adenovirus D
cgcugaaaggcgggcugcc

SEQ ID NO: 3918140 - RNA, 21 nt, Human adenovirus D
cgcugagcgacgaccugggcg

SEQ ID NO: 3918141 - RNA, 20 nt, Human adenovirus D
cgcugcacgggcuguaccuc

SEQ ID NO: 3918142 - RNA, 23 nt, Human adenovirus D
acggggaucagccccgcgcgcgc

SEQ ID NO: 3918143 - RNA, 18 nt, Human adenovirus D
acggugaagcaggagcgc

SEQ ID NO: 3918144 - RNA, 19 nt, Human adenovirus D
acggugaaggggugggccc

SEQ ID NO: 3918145 - RNA, 12 nt, Human adenovirus D
acguacuucagc

SEQ ID NO: 3918146 - RNA, 15 nt, Human adenovirus D
acguagcagcccugu

SEQ ID NO: 3918147 - RNA, 22 nt, Human adenovirus D
acguagucguugcaggugcgca

SEQ ID NO: 3918148 - RNA, 16 nt, Human adenovirus D
acgucaccugcggcgc

SEQ ID NO: 3918149 - RNA, 22 nt, Human adenovirus D
acgucgcccgaguuguccuggu

SEQ ID NO: 3918150 - RNA, 19 nt, Human adenovirus D
acgugcccaucuccauccc

SEQ ID NO: 3918151 - RNA, 19 nt, Human adenovirus D
acguguugcauccuuccau

SEQ ID NO: 3918152 - RNA, 21 nt, Human adenovirus D
acuacagcugacaauucagag

SEQ ID NO: 3918153 - RNA, 18 nt, Human adenovirus D
acuacauggacaagauau

SEQ ID NO: 3918154 - RNA, 21 nt, Human adenovirus D
acuaccugcaucgcgcggcgu

SEQ ID NO: 3918155 - RNA, 20 nt, Human adenovirus D
acuacuaauucucaaagugu

SEQ ID NO: 3918156 - RNA, 18 nt, Human adenovirus D
acuagccggagccgggag

SEQ ID NO: 3918157 - RNA, 15 nt, Human adenovirus D
acuagcgcccuggua

SEQ ID NO: 3918158 - RNA, 16 nt, Human adenovirus D
acuagcgugagccgcg

SEQ ID NO: 3918159 - RNA, 22 nt, Human adenovirus D
acuagcgugagccgcgcgcugg

SEQ ID NO: 3918160 - RNA, 15 nt, Human adenovirus D
acuaggcccagcagc

SEQ ID NO: 3918161 - RNA, 18 nt, Human adenovirus D
acuaugaucccaacagcc

SEQ ID NO: 3918162 - RNA, 22 nt, Human adenovirus D
acuccccuuacuuucgcuccca

SEQ ID NO: 3918163 - RNA, 21 nt, Human adenovirus D
acucccgucucgacccgagcc

SEQ ID NO: 3918164 - RNA, 16 nt, Human adenovirus D
acucccucccucggcu

SEQ ID NO: 3918165 - RNA, 23 nt, Human adenovirus D
acucgcagacgagcggccgccgc

SEQ ID NO: 3918166 - RNA, 16 nt, Human adenovirus D
acucgcggcugcugcu

SEQ ID NO: 3918167 - RNA, 14 nt, Human adenovirus D
acucgcugcugcag

SEQ ID NO: 3918168 - RNA, 13 nt, Human adenovirus D
acucgggcacggc

SEQ ID NO: 3918169 - RNA, 16 nt, Human adenovirus D
acucguaccuggguca

SEQ ID NO: 3918170 - RNA, 21 nt, Human adenovirus D
acucgugcgaggggccaagaa

SEQ ID NO: 3918171 - RNA, 17 nt, Human adenovirus D
acugaaagaacuuggua

SEQ ID NO: 3918172 - RNA, 18 nt, Human adenovirus D
acugacuacccacugacu

SEQ ID NO: 3918173 - RNA, 21 nt, Human adenovirus D
acugcaccccccgcaggcagg

SEQ ID NO: 3918174 - RNA, 13 nt, Human adenovirus D
acugccacugcca

SEQ ID NO: 3918175 - RNA, 21 nt, Human adenovirus D
acugccgcugcaaccugugcu

SEQ ID NO: 3918176 - RNA, 14 nt, Human adenovirus D
acugcgacucgggg

SEQ ID NO: 3918177 - RNA, 15 nt, Human adenovirus D
acugcuaccucuugc

SEQ ID NO: 3918178 - RNA, 15 nt, Human adenovirus D
acugcuggcccugcu

SEQ ID NO: 3918179 - RNA, 13 nt, Human adenovirus D
agcggggccuggu

SEQ ID NO: 3918180 - RNA, 20 nt, Human adenovirus D
agcgguccucggucaggagc

SEQ ID NO: 3918181 - RNA, 19 nt, Human adenovirus D
agcggugguaggccccugu

SEQ ID NO: 3918182 - RNA, 20 nt, Human adenovirus D
agcguagcuaugacgaggug

SEQ ID NO: 3918183 - RNA, 15 nt, Human adenovirus D
agcgucgaggagcug

SEQ ID NO: 3918184 - RNA, 19 nt, Human adenovirus D
agcgugcguucucuuccuu

SEQ ID NO: 3918185 - RNA, 15 nt, Human adenovirus D
agcgugggacuggca

SEQ ID NO: 3918186 - RNA, 20 nt, Human adenovirus D
agcuaagaaaaaaucagagu

SEQ ID NO: 3918187 - RNA, 14 nt, Human adenovirus D
agcuaauggacuac

SEQ ID NO: 3918188 - RNA, 23 nt, Human adenovirus D
agcucagcccgcuuaccaguaga

SEQ ID NO: 3918189 - RNA, 19 nt, Human adenovirus D
agcuccgcgaacagcagca

SEQ ID NO: 3918190 - RNA, 17 nt, Human adenovirus D
agcuccugagcgagacc

SEQ ID NO: 3918191 - RNA, 16 nt, Human adenovirus D
agcucgccgaggaggc

SEQ ID NO: 3918192 - RNA, 22 nt, Human adenovirus D
agcucguaguugagggccucgg

SEQ ID NO: 3918193 - RNA, 20 nt, Human adenovirus D
agcucguguccaacggcaaa

SEQ ID NO: 3918194 - RNA, 13 nt, Human adenovirus D
agcucugcugcgc

SEQ ID NO: 3918195 - RNA, 23 nt, Human adenovirus D
agcugcgagaaggcgcccaggcc

SEQ ID NO: 3918196 - RNA, 15 nt, Human adenovirus D
agcugcgcgagggcc

SEQ ID NO: 3918197 - RNA, 23 nt, Human adenovirus D
agcuggaagcccugagccgccag

SEQ ID NO: 3918198 - RNA, 12 nt, Human adenovirus D
agcuggcuccgu

SEQ ID NO: 3918199 - RNA, 14 nt, Human adenovirus D
agcugggcugggac

SEQ ID NO: 3918200 - RNA, 18 nt, Human adenovirus D
agcuucgaguacgaggcc

SEQ ID NO: 3918201 - RNA, 12 nt, Human adenovirus D
agcuugcccuug

SEQ ID NO: 3918202 - RNA, 14 nt, Human adenovirus D
agcuugugcggccu

SEQ ID NO: 3918203 - RNA, 14 nt, Human adenovirus D
aggaaccagcacac

SEQ ID NO: 3918204 - RNA, 14 nt, Human adenovirus D
aggaaccaugaagg

SEQ ID NO: 3918205 - RNA, 14 nt, Human adenovirus D
aggaagcccagagc

SEQ ID NO: 3918206 - RNA, 22 nt, Human adenovirus D
aggaagcccagagcucgcgggc

SEQ ID NO: 3918207 - RNA, 14 nt, Human adenovirus D
aggacacccggccc

SEQ ID NO: 3918208 - RNA, 16 nt, Human adenovirus D
aggacauggauuaaaa

SEQ ID NO: 3918209 - RNA, 14 nt, Human adenovirus D
aggaccugggcuuc

SEQ ID NO: 3918210 - RNA, 19 nt, Human adenovirus D
aggacgguguagcccgugc

SEQ ID NO: 3918211 - RNA, 21 nt, Human adenovirus D
aggacucgcagacgagcggcc

SEQ ID NO: 3918212 - RNA, 21 nt, Human adenovirus D
aggacuuggaugaggaagagg

SEQ ID NO: 3918213 - RNA, 20 nt, Human adenovirus D
aggagaacugcuggcccugc

SEQ ID NO: 3918214 - RNA, 20 nt, Human adenovirus D
aggagaggaggaugugcugc

SEQ ID NO: 3918215 - RNA, 21 nt, Human adenovirus D
aggagaggcauggcaggcagc

SEQ ID NO: 3918216 - RNA, 13 nt, Human adenovirus D
aggagcaggagga

SEQ ID NO: 3918217 - RNA, 22 nt, Human adenovirus D
aggagccauagagggcguugga

SEQ ID NO: 3918218 - RNA, 20 nt, Human adenovirus D
aggagcugaucucgcugccg

SEQ ID NO: 3918219 - RNA, 15 nt, Human adenovirus D
aggaggaccaggucc

SEQ ID NO: 3918220 - RNA, 21 nt, Human adenovirus D
aggaggacuuaaccacccacg

SEQ ID NO: 3918221 - RNA, 13 nt, Human adenovirus D
aggaggagacuga

SEQ ID NO: 3918222 - RNA, 20 nt, Human adenovirus D
aggaggcccaucuacaggcc

SEQ ID NO: 3918223 - RNA, 14 nt, Human adenovirus D
aggaggggggccac

SEQ ID NO: 3918224 - RNA, 17 nt, Human adenovirus D
aggaucauaucccaggg

SEQ ID NO: 3918225 - RNA, 16 nt, Human adenovirus D
aggaugaacaggagca

SEQ ID NO: 3918226 - RNA, 15 nt, Human adenovirus D
aggcacacagcucaa

SEQ ID NO: 3918227 - RNA, 12 nt, Human adenovirus D
aggcagaggcac

SEQ ID NO: 3918228 - RNA, 18 nt, Human adenovirus D
aggcauauaaaaaugcag

SEQ ID NO: 3918229 - RNA, 20 nt, Human adenovirus D
aggcaucggaacccuccagu

SEQ ID NO: 3918230 - RNA, 16 nt, Human adenovirus D
aggcauucacauacac

SEQ ID NO: 3918231 - RNA, 16 nt, Human adenovirus D
aggcccuggagcagcg

SEQ ID NO: 3918232 - RNA, 22 nt, Human adenovirus D
aggccgccuacgguccagagga

SEQ ID NO: 3918233 - RNA, 23 nt, Human adenovirus D
aggccgcucucguuccagacgcg

SEQ ID NO: 3918234 - RNA, 14 nt, Human adenovirus D
aggccggcaugccc

SEQ ID NO: 3918235 - RNA, 22 nt, Human adenovirus D
aggccggggccgaaauuggugc

SEQ ID NO: 3918236 - RNA, 16 nt, Human adenovirus D
aggccgugagcgcgag

SEQ ID NO: 3918237 - RNA, 14 nt, Human adenovirus D
aggccuggcccuga

SEQ ID NO: 3918238 - RNA, 12 nt, Human adenovirus D
aggcgagcagcu

SEQ ID NO: 3918239 - RNA, 17 nt, Human adenovirus D
aggcgcgcccacccgga

SEQ ID NO: 3918240 - RNA, 18 nt, Human adenovirus D
aggcgcgcguccacgcca

SEQ ID NO: 3918241 - RNA, 19 nt, Human adenovirus D
aggcgggaauuaccucauc

SEQ ID NO: 3918242 - RNA, 18 nt, Human adenovirus D
aggcggugcugcugccga

SEQ ID NO: 3918243 - RNA, 18 nt, Human adenovirus D
aggcuagcacgcagacga

SEQ ID NO: 3918244 - RNA, 14 nt, Human adenovirus D
aggcuggagccgcg

SEQ ID NO: 3918245 - RNA, 16 nt, Human adenovirus D
aggcuggagccgcgac

SEQ ID NO: 3918246 - RNA, 14 nt, Human adenovirus D
agggaaugcgugga

SEQ ID NO: 3918247 - RNA, 17 nt, Human adenovirus D
agggacagcagcccuuc

SEQ ID NO: 3918248 - RNA, 15 nt, Human adenovirus D
agggcgaaggugucc

SEQ ID NO: 3918249 - RNA, 13 nt, Human adenovirus D
agggcgcgguggg

SEQ ID NO: 3918250 - RNA, 19 nt, Human adenovirus D
agggcgcucccaaucccag

SEQ ID NO: 3918251 - RNA, 21 nt, Human adenovirus D
agggcugcacggaugagcgca

SEQ ID NO: 3918252 - RNA, 17 nt, Human adenovirus D
agggcuuuuccugaugc

SEQ ID NO: 3918253 - RNA, 14 nt, Human adenovirus D
aggggaugaacagu

SEQ ID NO: 3918254 - RNA, 12 nt, Human adenovirus D
aggggccaagaa

SEQ ID NO: 3918255 - RNA, 14 nt, Human adenovirus D
aggggcggacccca

SEQ ID NO: 3918256 - RNA, 20 nt, Human adenovirus D
aggggcugcuagagugccac

SEQ ID NO: 3918257 - RNA, 16 nt, Human adenovirus D
aggggucuaucuggac

SEQ ID NO: 3918258 - RNA, 18 nt, Human adenovirus D
agggguugaggggcggac

SEQ ID NO: 3918259 - RNA, 14 nt, Human adenovirus D
aggguaaagccagc

SEQ ID NO: 3918260 - RNA, 18 nt, Human adenovirus D
aggguccgcgugagggug

SEQ ID NO: 3918261 - RNA, 22 nt, Human adenovirus D
agggucgcuggcugcuggagcu

SEQ ID NO: 3918262 - RNA, 14 nt, Human adenovirus D
aggguguccuggaa

SEQ ID NO: 3918263 - RNA, 18 nt, Human adenovirus D
agguauuuguugagggag

SEQ ID NO: 3918264 - RNA, 19 nt, Human adenovirus D
aggucagcagcaagagcuc

SEQ ID NO: 3918265 - RNA, 18 nt, Human adenovirus D
aggugcgccccaucaagc

SEQ ID NO: 3918266 - RNA, 20 nt, Human adenovirus D
aggugcgccccaucaagcag

SEQ ID NO: 3918267 - RNA, 22 nt, Human adenovirus D
aggugcugacauccauggccag

SEQ ID NO: 3918268 - RNA, 21 nt, Human adenovirus D
aggugcugccccaggcggugc

SEQ ID NO: 3918269 - RNA, 16 nt, Human adenovirus D
agguggcccugggccu

SEQ ID NO: 3918270 - RNA, 19 nt, Human adenovirus D
aggugguggacggccuggc

SEQ ID NO: 3918271 - RNA, 21 nt, Human adenovirus D
agguguuggcaaagcgguuga

SEQ ID NO: 3918272 - RNA, 22 nt, Human adenovirus D
agguuucucaacagcugggacu

SEQ ID NO: 3918273 - RNA, 17 nt, Human adenovirus D
agguuugaguagugggc

SEQ ID NO: 3918274 - RNA, 19 nt, Human adenovirus D
agguuugaguagugggcgu

SEQ ID NO: 3918275 - RNA, 13 nt, Human adenovirus D
aguaccugagccc

SEQ ID NO: 3918276 - RNA, 19 nt, Human adenovirus D
aguacgacaugcccgaccc

SEQ ID NO: 3918277 - RNA, 18 nt, Human adenovirus D
aguacuuggaaagcaaga

SEQ ID NO: 3918278 - RNA, 16 nt, Human adenovirus D
aguagaguuugugcgc

SEQ ID NO: 3918279 - RNA, 16 nt, Human adenovirus D
aguaggaaccagcaca

SEQ ID NO: 3918280 - RNA, 18 nt, Human adenovirus D
aguauggugaucagccau

SEQ ID NO: 3918281 - RNA, 22 nt, Human adenovirus D
agucaaaagaaaacuaaugaca

SEQ ID NO: 3918282 - RNA, 21 nt, Human adenovirus D
agucacuaggaccccagggac

SEQ ID NO: 3918283 - RNA, 20 nt, Human adenovirus D
agucacuuaaguccugggcc

SEQ ID NO: 3918284 - RNA, 11 nt, Human adenovirus D
agucaggagca

SEQ ID NO: 3918285 - RNA, 23 nt, Human adenovirus D
aguccccucgaaucaggcuggag

SEQ ID NO: 3918286 - RNA, 15 nt, Human adenovirus D
agucccuuuuccagg

SEQ ID NO: 3918287 - RNA, 20 nt, Human adenovirus D
aguccuguaaauaagucacu

SEQ ID NO: 3918288 - RNA, 18 nt, Human adenovirus D
agucugaagcgccgccga

SEQ ID NO: 3918289 - RNA, 14 nt, Human adenovirus D
agugacaauuuaac

SEQ ID NO: 3918290 - RNA, 14 nt, Human adenovirus D
agugaccgucacug

SEQ ID NO: 3918291 - RNA, 16 nt, Human adenovirus D
agugauuggggaaccu

SEQ ID NO: 3918292 - RNA, 18 nt, Human adenovirus D
agugcaacuuuagccaga

SEQ ID NO: 3918293 - RNA, 19 nt, Human adenovirus D
agugcaguuggccaugagc

SEQ ID NO: 3918294 - RNA, 14 nt, Human adenovirus D
agugccacaugcac

SEQ ID NO: 3918295 - RNA, 13 nt, Human adenovirus D
aguggaagaagag

SEQ ID NO: 3918296 - RNA, 17 nt, Human adenovirus D
aguggaagaagagcagc

SEQ ID NO: 3918297 - RNA, 18 nt, Human adenovirus D
aguuacgggagcgagccc

SEQ ID NO: 3918298 - RNA, 20 nt, Human adenovirus D
acugggcguugcgggccgag

SEQ ID NO: 3918299 - RNA, 21 nt, Human adenovirus D
acuggucaaaaacaaagugac

SEQ ID NO: 3918300 - RNA, 13 nt, Human adenovirus D
acuguaaagccac

SEQ ID NO: 3918301 - RNA, 17 nt, Human adenovirus D
acuguugcagagagaug

SEQ ID NO: 3918302 - RNA, 14 nt, Human adenovirus D
acuuacuuugcaag

SEQ ID NO: 3918303 - RNA, 16 nt, Human adenovirus D
acuuccccccuggggu

SEQ ID NO: 3918304 - RNA, 18 nt, Human adenovirus D
acuuggaugaggaagagg

SEQ ID NO: 3918305 - RNA, 15 nt, Human adenovirus D
acuuuaaugcuccaa

SEQ ID NO: 3918306 - RNA, 18 nt, Human adenovirus D
acuuugucugcuguaaag

SEQ ID NO: 3918307 - RNA, 13 nt, Human adenovirus D
acuuuucuguugc

SEQ ID NO: 3918308 - RNA, 15 nt, Human adenovirus D
agaaagcaguucacu

SEQ ID NO: 3918309 - RNA, 24 nt, Human adenovirus D
agaaaugggcccuugaacagcaua

SEQ ID NO: 3918310 - RNA, 19 nt, Human adenovirus D
agaaccaugaauacaguga

SEQ ID NO: 3918311 - RNA, 14 nt, Human adenovirus D
agaaccgccugggg

SEQ ID NO: 3918312 - RNA, 17 nt, Human adenovirus D
agaacgagggccugggc

SEQ ID NO: 3918313 - RNA, 20 nt, Human adenovirus D
agaacugcuggcccugcugg

SEQ ID NO: 3918314 - RNA, 22 nt, Human adenovirus D
agaacuuguuauugagcccauc

SEQ ID NO: 3918315 - RNA, 21 nt, Human adenovirus D
agaagcaaccuuuccaagagg

SEQ ID NO: 3918316 - RNA, 13 nt, Human adenovirus D
agaaggccggggc

SEQ ID NO: 3918317 - RNA, 16 nt, Human adenovirus D
agaaggcgcccaggcc

SEQ ID NO: 3918318 - RNA, 18 nt, Human adenovirus D
agaagugacaauuuaacu

SEQ ID NO: 3918319 - RNA, 15 nt, Human adenovirus D
agaauauaaagcaga

SEQ ID NO: 3918320 - RNA, 19 nt, Human adenovirus D
agaaucuugccugcucgcg

SEQ ID NO: 3918321 - RNA, 16 nt, Human adenovirus D
agacaaaggaggccac

SEQ ID NO: 3918322 - RNA, 18 nt, Human adenovirus D
agacaaaggaggccacgu

SEQ ID NO: 3918323 - RNA, 14 nt, Human adenovirus D
agacagccagguca

SEQ ID NO: 3918324 - RNA, 16 nt, Human adenovirus D
agacauggccagcacg

SEQ ID NO: 3918325 - RNA, 20 nt, Human adenovirus D
agaccagaacuuccagcaga

SEQ ID NO: 3918326 - RNA, 19 nt, Human adenovirus D
agaccaugugagccugggu

SEQ ID NO: 3918327 - RNA, 16 nt, Human adenovirus D
agaccgugcaggggcc

SEQ ID NO: 3918328 - RNA, 13 nt, Human adenovirus D
agaccuucaaccu

SEQ ID NO: 3918329 - RNA, 15 nt, Human adenovirus D
agaccuuccaggaga

SEQ ID NO: 3918330 - RNA, 19 nt, Human adenovirus D
agacgaugggcguccagcg

SEQ ID NO: 3918331 - RNA, 19 nt, Human adenovirus D
agacgcugaaaggcgggcu

SEQ ID NO: 3918332 - RNA, 23 nt, Human adenovirus D
agacggacuugauuggccugucc

SEQ ID NO: 3918333 - RNA, 18 nt, Human adenovirus D
agacggugaagcaggagc

SEQ ID NO: 3918334 - RNA, 19 nt, Human adenovirus D
agacggugaagcaggagcg

SEQ ID NO: 3918335 - RNA, 15 nt, Human adenovirus D
agacguuucuggggu

SEQ ID NO: 3918336 - RNA, 20 nt, Human adenovirus D
agacucauccugcuggugcu

SEQ ID NO: 3918337 - RNA, 23 nt, Human adenovirus D
agacugauggccacggggagccc

SEQ ID NO: 3918338 - RNA, 20 nt, Human adenovirus D
agagagguugaaaaggcagc

SEQ ID NO: 3918339 - RNA, 15 nt, Human adenovirus D
agagagucuggugga

SEQ ID NO: 3918340 - RNA, 13 nt, Human adenovirus D
agagcgagauguc

SEQ ID NO: 3918341 - RNA, 18 nt, Human adenovirus D
agagcgugauggcgcagg

SEQ ID NO: 3918342 - RNA, 16 nt, Human adenovirus D
agaggaaggaggacac

SEQ ID NO: 3918343 - RNA, 16 nt, Human adenovirus D
agaggcgagcagcugu

SEQ ID NO: 3918344 - RNA, 21 nt, Human adenovirus D
agagguugaaaaggcagcuga

SEQ ID NO: 3918345 - RNA, 16 nt, Human adenovirus D
agagugaggcacugcu

SEQ ID NO: 3918346 - RNA, 12 nt, Human adenovirus D
agauacuucagc

SEQ ID NO: 3918347 - RNA, 14 nt, Human adenovirus D
agaucaucauaaga

SEQ ID NO: 3918348 - RNA, 17 nt, Human adenovirus D
agaucauggugcccaag

SEQ ID NO: 3918349 - RNA, 22 nt, Human adenovirus D
agauccugagauacgaugagac

SEQ ID NO: 3918350 - RNA, 15 nt, Human adenovirus D
agaugaugugcaguu

SEQ ID NO: 3918351 - RNA, 11 nt, Human adenovirus D
agaugcagcaa

SEQ ID NO: 3918352 - RNA, 21 nt, Human adenovirus D
agaugcagcaagccccggacc

SEQ ID NO: 3918353 - RNA, 19 nt, Human adenovirus D
agaugccccagcagaagca

SEQ ID NO: 3918354 - RNA, 19 nt, Human adenovirus D
agaugcgacccaugagcug

SEQ ID NO: 3918355 - RNA, 15 nt, Human adenovirus D
agauggaagaagaau

SEQ ID NO: 3918356 - RNA, 14 nt, Human adenovirus D
agauggugggccgu

SEQ ID NO: 3918357 - RNA, 21 nt, Human adenovirus D
agauguaaccuugcaagaggc

SEQ ID NO: 3918358 - RNA, 19 nt, Human adenovirus D
agauuuaauuggcaaacuu

SEQ ID NO: 3918359 - RNA, 16 nt, Human adenovirus D
agcaagacgcaggcca

SEQ ID NO: 3918360 - RNA, 22 nt, Human adenovirus D
agcaaggugcugacauccaugg

SEQ ID NO: 3918361 - RNA, 21 nt, Human adenovirus D
agcacaaacgugcaguccaac

SEQ ID NO: 3918362 - RNA, 12 nt, Human adenovirus D
agcacagcaccg

SEQ ID NO: 3918363 - RNA, 20 nt, Human adenovirus D
agcaccccaacggcccugca

SEQ ID NO: 3918364 - RNA, 20 nt, Human adenovirus D
agcacgagcaagacgcaggc

SEQ ID NO: 3918365 - RNA, 18 nt, Human adenovirus D
agcacugcaaauuuaacu

SEQ ID NO: 3918366 - RNA, 20 nt, Human adenovirus D
agcacuggauugcaauuuug

SEQ ID NO: 3918367 - RNA, 22 nt, Human adenovirus D
agcacuuuuauuuuacaugcac

SEQ ID NO: 3918368 - RNA, 17 nt, Human adenovirus D
agcagaagaagacgaau

SEQ ID NO: 3918369 - RNA, 18 nt, Human adenovirus D
agcagagucugccgcccu

SEQ ID NO: 3918370 - RNA, 11 nt, Human adenovirus D
agcagcacagu

SEQ ID NO: 3918371 - RNA, 19 nt, Human adenovirus D
caggggaugaacaguggca

SEQ ID NO: 3918372 - RNA, 21 nt, Human adenovirus D
caggggcucguuaguccagca

SEQ ID NO: 3918373 - RNA, 17 nt, Human adenovirus D
caggguaaagccagcag

SEQ ID NO: 3918374 - RNA, 19 nt, Human adenovirus D
caggguaaagccagcagca

SEQ ID NO: 3918375 - RNA, 23 nt, Human adenovirus D
caggguagcggggcacaggcaca

SEQ ID NO: 3918376 - RNA, 15 nt, Human adenovirus D
cagggugcuccagcc

SEQ ID NO: 3918377 - RNA, 16 nt, Human adenovirus D
cagggugcuccagcca

SEQ ID NO: 3918378 - RNA, 18 nt, Human adenovirus D
caggguugagucgcggca

SEQ ID NO: 3918379 - RNA, 14 nt, Human adenovirus D
caggucaaaaccca

SEQ ID NO: 3918380 - RNA, 23 nt, Human adenovirus D
cagguccacgcugguggccaccu

SEQ ID NO: 3918381 - RNA, 20 nt, Human adenovirus D
caggugagcucgggcugcuc

SEQ ID NO: 3918382 - RNA, 18 nt, Human adenovirus D
caggugaugccggcagcg

SEQ ID NO: 3918383 - RNA, 18 nt, Human adenovirus D
caggugcugcccacccuc

SEQ ID NO: 3918384 - RNA, 18 nt, Human adenovirus D
caguagacaaagagcaca

SEQ ID NO: 3918385 - RNA, 17 nt, Human adenovirus D
cagucagugaagcccug

SEQ ID NO: 3918386 - RNA, 20 nt, Human adenovirus D
cagugcaacuuuagccagac

SEQ ID NO: 3918387 - RNA, 12 nt, Human adenovirus D
cagugcacgggc

SEQ ID NO: 3918388 - RNA, 12 nt, Human adenovirus D
caguggcccugg

SEQ ID NO: 3918389 - RNA, 18 nt, Human adenovirus D
caguggggaggacacaga

SEQ ID NO: 3918390 - RNA, 21 nt, Human adenovirus D
caguuaagaauccacagauca

SEQ ID NO: 3918391 - RNA, 12 nt, Human adenovirus D
caguuaguuggu

SEQ ID NO: 3918392 - RNA, 14 nt, Human adenovirus D
caguuugggcacug

SEQ ID NO: 3918393 - RNA, 16 nt, Human adenovirus D
cauaauagaaacagau

SEQ ID NO: 3918394 - RNA, 20 nt, Human adenovirus D
cauaaucaccauguuauuca

SEQ ID NO: 3918395 - RNA, 11 nt, Human adenovirus D
cauacaaucau

SEQ ID NO: 3918396 - RNA, 14 nt, Human adenovirus D
cgaaccaggcagug

SEQ ID NO: 3918397 - RNA, 15 nt, Human adenovirus D
cgaacuuucuccaca

SEQ ID NO: 3918398 - RNA, 16 nt, Human adenovirus D
cgaagauggggccccg

SEQ ID NO: 3918399 - RNA, 17 nt, Human adenovirus D
cgaaugggaagaagaga

SEQ ID NO: 3918400 - RNA, 16 nt, Human adenovirus D
cgacaccaacgaccag

SEQ ID NO: 3918401 - RNA, 16 nt, Human adenovirus D
cgacacugcagggagc

SEQ ID NO: 3918402 - RNA, 14 nt, Human adenovirus D
cgacagcagcacag

SEQ ID NO: 3918403 - RNA, 24 nt, Human adenovirus D
cgaccaguugacggucugcaggcc

SEQ ID NO: 3918404 - RNA, 17 nt, Human adenovirus D
cgacccaugagcugcga

SEQ ID NO: 3918405 - RNA, 12 nt, Human adenovirus D
cgacccccaggc

SEQ ID NO: 3918406 - RNA, 16 nt, Human adenovirus D
cgacccccaggcccug

SEQ ID NO: 3918407 - RNA, 14 nt, Human adenovirus D
cgaccccuggcucc

SEQ ID NO: 3918408 - RNA, 18 nt, Human adenovirus D
cgacgaacucggcgguga

SEQ ID NO: 3918409 - RNA, 21 nt, Human adenovirus D
cgacgacauccuggaccaggc

SEQ ID NO: 3918410 - RNA, 21 nt, Human adenovirus D
cgacgaguuggugagcucuuc

SEQ ID NO: 3918411 - RNA, 22 nt, Human adenovirus D
cgacgaguuggugagcucuuca

SEQ ID NO: 3918412 - RNA, 20 nt, Human adenovirus D
cgacugucuagggccuuucc

SEQ ID NO: 3918413 - RNA, 19 nt, Human adenovirus D
cgacuucaugagccagagc

SEQ ID NO: 3918414 - RNA, 16 nt, Human adenovirus D
cgagaaccgccugggg

SEQ ID NO: 3918415 - RNA, 17 nt, Human adenovirus D
cgagaaccgccuggggc

SEQ ID NO: 3918416 - RNA, 18 nt, Human adenovirus D
cgagaggcgagcagcugu

SEQ ID NO: 3918417 - RNA, 14 nt, Human adenovirus D
cgagcacagcaccg

SEQ ID NO: 3918418 - RNA, 16 nt, Human adenovirus D
cgagcaggaccugggc

SEQ ID NO: 3918419 - RNA, 24 nt, Human adenovirus D
cgagcccgagggucgcuggcugcu

SEQ ID NO: 3918420 - RNA, 22 nt, Human adenovirus D
cgagccggcggcgcgagcugag

SEQ ID NO: 3918421 - RNA, 16 nt, Human adenovirus D
cgagcgcaccgucgcc

SEQ ID NO: 3918422 - RNA, 14 nt, Human adenovirus D
cgagcucugcugcg

SEQ ID NO: 3918423 - RNA, 16 nt, Human adenovirus D
cgaggacuaccacgcc

SEQ ID NO: 3918424 - RNA, 16 nt, Human adenovirus D
cgaggagcugagacca

SEQ ID NO: 3918425 - RNA, 18 nt, Human adenovirus D
cgaggaggauuugauguu

SEQ ID NO: 3918426 - RNA, 20 nt, Human adenovirus D
cgaggaggccgugaaggccg

SEQ ID NO: 3918427 - RNA, 19 nt, Human adenovirus D
cgaggucagcagcaagagc

SEQ ID NO: 3918428 - RNA, 16 nt, Human adenovirus D
cgagucgucgcagccg

SEQ ID NO: 3918429 - RNA, 17 nt, Human adenovirus D
cgaguuggaggagaugg

SEQ ID NO: 3918430 - RNA, 21 nt, Human adenovirus D
cgauaaagugcaagucacgca

SEQ ID NO: 3918431 - RNA, 12 nt, Human adenovirus D
cgauccagcaga

SEQ ID NO: 3918432 - RNA, 17 nt, Human adenovirus D
cgauccugacgcgccag

SEQ ID NO: 3918433 - RNA, 19 nt, Human adenovirus D
cgaugaaagucaggagcag

SEQ ID NO: 3918434 - RNA, 14 nt, Human adenovirus D
cgaugggcccgugg

SEQ ID NO: 3918435 - RNA, 12 nt, Human adenovirus D
cgauguagaguu

SEQ ID NO: 3918436 - RNA, 15 nt, Human adenovirus D
cgaugugcucgguga

SEQ ID NO: 3918437 - RNA, 20 nt, Human adenovirus D
cgcaaaaccuguucagggac

SEQ ID NO: 3918438 - RNA, 13 nt, Human adenovirus D
cgcaagcucaugc

SEQ ID NO: 3918439 - RNA, 20 nt, Human adenovirus D
cgcaaggucgaggagaccug

SEQ ID NO: 3918440 - RNA, 20 nt, Human adenovirus D
cgcacgguaagagcccagca

SEQ ID NO: 3918441 - RNA, 13 nt, Human adenovirus D
cgcagaaaucagu

SEQ ID NO: 3918442 - RNA, 17 nt, Human adenovirus D
cgcagaaaucaguuucc

SEQ ID NO: 3918443 - RNA, 16 nt, Human adenovirus D
cgcagacgagcggccg

SEQ ID NO: 3918444 - RNA, 21 nt, Human adenovirus D
cgcagcgugaagacgccgccg

SEQ ID NO: 3918445 - RNA, 20 nt, Human adenovirus D
cgcagcuacaccucccucac

SEQ ID NO: 3918446 - RNA, 20 nt, Human adenovirus D
cgcagcucuucccgcugaac

SEQ ID NO: 3918447 - RNA, 16 nt, Human adenovirus D
cgcaggaguccaccgc

SEQ ID NO: 3918448 - RNA, 22 nt, Human adenovirus D
cgcaggaguccaccgcuccgcu

SEQ ID NO: 3918449 - RNA, 19 nt, Human adenovirus D
cgcaguugggagcugucca

SEQ ID NO: 3918450 - RNA, 17 nt, Human adenovirus D
cgcauccugcaacugcg

SEQ ID NO: 3918451 - RNA, 13 nt, Human adenovirus D
cgcaugaccaccu

SEQ ID NO: 3918452 - RNA, 23 nt, Human adenovirus D
cgccaaaaaaacacacacgcccu

SEQ ID NO: 3918453 - RNA, 13 nt, Human adenovirus D
cgccaacagcagc

SEQ ID NO: 3918454 - RNA, 23 nt, Human adenovirus D
cgccaagacaaaggaggccacgu

SEQ ID NO: 3918455 - RNA, 13 nt, Human adenovirus D
cgccacaggugcu

SEQ ID NO: 3918456 - RNA, 23 nt, Human adenovirus D
cgccacaggugcugcccacccuc

SEQ ID NO: 3918457 - RNA, 13 nt, Human adenovirus D
cgccacuggccac

SEQ ID NO: 3918458 - RNA, 19 nt, Human adenovirus D
cgccagacgcacgggccgc

SEQ ID NO: 3918459 - RNA, 16 nt, Human adenovirus D
cgccauggggcgccgc

SEQ ID NO: 3918460 - RNA, 21 nt, Human adenovirus D
cgcccaacucgcggcugcugc

SEQ ID NO: 3918461 - RNA, 13 nt, Human adenovirus D
cgcccagccagca

SEQ ID NO: 3918462 - RNA, 14 nt, Human adenovirus D
cgcccggcgagcgg

SEQ ID NO: 3918463 - RNA, 16 nt, Human adenovirus D
cgcccggcguacgugc

SEQ ID NO: 3918464 - RNA, 16 nt, Human adenovirus D
cgcccugagagcgcug

SEQ ID NO: 3918465 - RNA, 16 nt, Human adenovirus D
cgcccugcuggagcgc

SEQ ID NO: 3918466 - RNA, 12 nt, Human adenovirus D
cgcccugggugu

SEQ ID NO: 3918467 - RNA, 15 nt, Human adenovirus D
cgccgacccguggcc

SEQ ID NO: 3918468 - RNA, 13 nt, Human adenovirus D
cgccgagccugaa

SEQ ID NO: 3918469 - RNA, 17 nt, Human adenovirus D
cgccgauggccuccagc

SEQ ID NO: 3918470 - RNA, 23 nt, Human adenovirus D
cgccgauuuaaagacccacagcc

SEQ ID NO: 3918471 - RNA, 17 nt, Human adenovirus D
cgccgccgugcgcacca

SEQ ID NO: 3918472 - RNA, 16 nt, Human adenovirus D
cgccgcgccagacgca

SEQ ID NO: 3918473 - RNA, 22 nt, Human adenovirus D
cgccgcguaaccaacgcgccgg

SEQ ID NO: 3918474 - RNA, 13 nt, Human adenovirus D
cgccgcuaucugc

SEQ ID NO: 3918475 - RNA, 15 nt, Human adenovirus D
cgccggcucaucugc

SEQ ID NO: 3918476 - RNA, 15 nt, Human adenovirus D
cgccgggccugggcg

SEQ ID NO: 3918477 - RNA, 20 nt, Human adenovirus D
cgccgggccugggcgugcag

SEQ ID NO: 3918478 - RNA, 14 nt, Human adenovirus D
cgccuuccuggcga

SEQ ID NO: 3918479 - RNA, 16 nt, Human adenovirus D
cgccuuggaggccgcc

SEQ ID NO: 3918480 - RNA, 13 nt, Human adenovirus D
cgcgaacagcagc

SEQ ID NO: 3918481 - RNA, 17 nt, Human adenovirus D
cgcgaagauggccaccc

SEQ ID NO: 3918482 - RNA, 18 nt, Human adenovirus D
cgcgacccccaggcccug

SEQ ID NO: 3918483 - RNA, 20 nt, Human adenovirus D
cgcgaccgcggccguagcag

SEQ ID NO: 3918484 - RNA, 14 nt, Human adenovirus D
cgcgagcugaugcu

SEQ ID NO: 3918485 - RNA, 19 nt, Human adenovirus D
cgcgagcugaugcugagcc

SEQ ID NO: 3918486 - RNA, 19 nt, Human adenovirus D
cgcgaggccauaggccagg

SEQ ID NO: 3918487 - RNA, 13 nt, Human adenovirus D
cgcgagggccugg

SEQ ID NO: 3918488 - RNA, 15 nt, Human adenovirus D
cgcgccacuggccac

SEQ ID NO: 3918489 - RNA, 16 nt, Human adenovirus D
cgcgcccgcagcacgc

SEQ ID NO: 3918490 - RNA, 14 nt, Human adenovirus D
cgcgcccggggcca

SEQ ID NO: 3918491 - RNA, 17 nt, Human adenovirus D
cgcgcgaagauggccac

SEQ ID NO: 3918492 - RNA, 13 nt, Human adenovirus D
cgcgcgcuggggc

SEQ ID NO: 3918493 - RNA, 17 nt, Human adenovirus D
cgcgcucgcgcaccugc

SEQ ID NO: 3918494 - RNA, 20 nt, Human adenovirus D
cgcgcuggacaugaccgcgc

SEQ ID NO: 3918495 - RNA, 21 nt, Human adenovirus D
cgcgcugucggccgaggagga

SEQ ID NO: 3918496 - RNA, 16 nt, Human adenovirus D
cgcggacgcgcucccg

SEQ ID NO: 3918497 - RNA, 13 nt, Human adenovirus D
cgcggacggccgc

SEQ ID NO: 3918498 - RNA, 14 nt, Human adenovirus D
cgcggcgaacgagc

SEQ ID NO: 3918499 - RNA, 13 nt, Human adenovirus D
cgcggcgacagcg

SEQ ID NO: 3918500 - RNA, 16 nt, Human adenovirus D
cgcgguauauggcucc

SEQ ID NO: 3918501 - RNA, 14 nt, Human adenovirus D
cgcguacauccagc

SEQ ID NO: 3918502 - RNA, 13 nt, Human adenovirus D
cgcguccgcggcc

SEQ ID NO: 3918503 - RNA, 16 nt, Human adenovirus D
cgcguccgucagcagc

SEQ ID NO: 3918504 - RNA, 19 nt, Human adenovirus D
cgcgucgcuguccacgagc

SEQ ID NO: 3918505 - RNA, 21 nt, Human adenovirus D
cucuccgcaccgcuccugguc

SEQ ID NO: 3918506 - RNA, 14 nt, Human adenovirus D
cucugaaaagucau

SEQ ID NO: 3918507 - RNA, 12 nt, Human adenovirus D
cucugacacacc

SEQ ID NO: 3918508 - RNA, 15 nt, Human adenovirus D
cucugcaucugauga

SEQ ID NO: 3918509 - RNA, 19 nt, Human adenovirus D
cucugccacacauggcaag

SEQ ID NO: 3918510 - RNA, 15 nt, Human adenovirus D
cucugcugcgccgcg

SEQ ID NO: 3918511 - RNA, 22 nt, Human adenovirus D
cucuguaggccauccccaucca

SEQ ID NO: 3918512 - RNA, 13 nt, Human adenovirus D
cucuugcagcugg

SEQ ID NO: 3918513 - RNA, 13 nt, Human adenovirus D
cucuuugcccugc

SEQ ID NO: 3918514 - RNA, 16 nt, Human adenovirus D
cugaaaauuugcaaaa

SEQ ID NO: 3918515 - RNA, 12 nt, Human adenovirus D
cugaaagcaugg

SEQ ID NO: 3918516 - RNA, 16 nt, Human adenovirus D
cugaaccgcuggaaga

SEQ ID NO: 3918517 - RNA, 19 nt, Human adenovirus D
cugaacgacucgcugcugc

SEQ ID NO: 3918518 - RNA, 19 nt, Human adenovirus D
cugaacgggggcgccuuca

SEQ ID NO: 3918519 - RNA, 21 nt, Human adenovirus D
cugaagauguaaccuugcaag

SEQ ID NO: 3918520 - RNA, 17 nt, Human adenovirus D
cugaaggaaaaaucacu

SEQ ID NO: 3918521 - RNA, 16 nt, Human adenovirus D
cugaaggagcuggaca

SEQ ID NO: 3918522 - RNA, 16 nt, Human adenovirus D
cugacaauucagagcc

SEQ ID NO: 3918523 - RNA, 22 nt, Human adenovirus D
cugacaauucagagccagggcu

SEQ ID NO: 3918524 - RNA, 15 nt, Human adenovirus D
cugacauccauggcc

SEQ ID NO: 3918525 - RNA, 17 nt, Human adenovirus D
cugaccuugcagagcag

SEQ ID NO: 3918526 - RNA, 15 nt, Human adenovirus D
cugacgcugagcgac

SEQ ID NO: 3918527 - RNA, 18 nt, Human adenovirus D
cugacgggggugcccaac

SEQ ID NO: 3918528 - RNA, 15 nt, Human adenovirus D
cugacuacccacuga

SEQ ID NO: 3918529 - RNA, 20 nt, Human adenovirus D
cugacugccgccggccauug

SEQ ID NO: 3918530 - RNA, 18 nt, Human adenovirus D
cugagauaugugcagcag

SEQ ID NO: 3918531 - RNA, 15 nt, Human adenovirus D
cugagccgccagcug

SEQ ID NO: 3918532 - RNA, 14 nt, Human adenovirus D
cugagccugcgccg

SEQ ID NO: 3918533 - RNA, 13 nt, Human adenovirus D
cugaggcagacgc

SEQ ID NO: 3918534 - RNA, 17 nt, Human adenovirus D
cugaguuuaauaaaagc

SEQ ID NO: 3918535 - RNA, 21 nt, Human adenovirus D
cugauauugcuucccuggaag

SEQ ID NO: 3918536 - RNA, 17 nt, Human adenovirus D
cugaugaacaacgccau

SEQ ID NO: 3918537 - RNA, 22 nt, Human adenovirus D
cugaugaaucgcaagcgcccag

SEQ ID NO: 3918538 - RNA, 15 nt, Human adenovirus D
cugauggccacgggg

SEQ ID NO: 3918539 - RNA, 12 nt, Human adenovirus D
cugauguugauu

SEQ ID NO: 3918540 - RNA, 23 nt, Human adenovirus D
cugcaacccccagcuccugagcg

SEQ ID NO: 3918541 - RNA, 14 nt, Human adenovirus D
cugcaaccugugcu

SEQ ID NO: 3918542 - RNA, 21 nt, Human adenovirus D
cugcaacgccuuccccuccga

SEQ ID NO: 3918543 - RNA, 23 nt, Human adenovirus D
cugcacgagaaccgccuggggca

SEQ ID NO: 3918544 - RNA, 23 nt, Human adenovirus D
cugcagaccgggggacaaauaca

SEQ ID NO: 3918545 - RNA, 20 nt, Human adenovirus D
cugcagcauugucugccugg

SEQ ID NO: 3918546 - RNA, 20 nt, Human adenovirus D
cacuccccccuuugucuccu

SEQ ID NO: 3918547 - RNA, 16 nt, Human adenovirus D
cacucgacgagccagg

SEQ ID NO: 3918548 - RNA, 17 nt, Human adenovirus D
cacucgcgggcggccau

SEQ ID NO: 3918549 - RNA, 20 nt, Human adenovirus D
cacugaaaaugucaaccuug

SEQ ID NO: 3918550 - RNA, 17 nt, Human adenovirus D
cacugaaaauuugcaaa

SEQ ID NO: 3918551 - RNA, 18 nt, Human adenovirus D
cacugaaaauuugcaaaa

SEQ ID NO: 3918552 - RNA, 19 nt, Human adenovirus D
cacugcagggagccagggg

SEQ ID NO: 3918553 - RNA, 15 nt, Human adenovirus D
cacuggagcacagac

SEQ ID NO: 3918554 - RNA, 16 nt, Human adenovirus D
cacuggagcacagacc

SEQ ID NO: 3918555 - RNA, 19 nt, Human adenovirus D
cacuggcccgaccgaccca

SEQ ID NO: 3918556 - RNA, 22 nt, Human adenovirus D
cacuggcuuccgccgccggggu

SEQ ID NO: 3918557 - RNA, 15 nt, Human adenovirus D
cacuggguggcccuu

SEQ ID NO: 3918558 - RNA, 16 nt, Human adenovirus D
cagaaccaugaauaca

SEQ ID NO: 3918559 - RNA, 15 nt, Human adenovirus D
cagaacuggcagagc

SEQ ID NO: 3918560 - RNA, 16 nt, Human adenovirus D
cagaaggacgugcgcc

SEQ ID NO: 3918561 - RNA, 20 nt, Human adenovirus D
cagaaggacgugcgcccggc

SEQ ID NO: 3918562 - RNA, 21 nt, Human adenovirus D
cagaaggugguggacggccug

SEQ ID NO: 3918563 - RNA, 23 nt, Human adenovirus D
cagaaguaaauuugacacagcag

SEQ ID NO: 3918564 - RNA, 19 nt, Human adenovirus D
cagaaguucaccugcaugg

SEQ ID NO: 3918565 - RNA, 20 nt, Human adenovirus D
cagaaguucaccugcauggu

SEQ ID NO: 3918566 - RNA, 23 nt, Human adenovirus D
cagacaaacauccauguuggagg

SEQ ID NO: 3918567 - RNA, 14 nt, Human adenovirus D
cagacaugcugcua

SEQ ID NO: 3918568 - RNA, 15 nt, Human adenovirus D
cagaccaagcugcug

SEQ ID NO: 3918569 - RNA, 13 nt, Human adenovirus D
cagaccgugcagg

SEQ ID NO: 3918570 - RNA, 15 nt, Human adenovirus D
cagacgaagaauaua

SEQ ID NO: 3918571 - RNA, 21 nt, Human adenovirus D
cagacgcacgggccgccgggc

SEQ ID NO: 3918572 - RNA, 14 nt, Human adenovirus D
cagacggugaagca

SEQ ID NO: 3918573 - RNA, 15 nt, Human adenovirus D
cagacggugaagcag

SEQ ID NO: 3918574 - RNA, 14 nt, Human adenovirus D
cagacucugcucau

SEQ ID NO: 3918575 - RNA, 12 nt, Human adenovirus D
cagacuggucaa

SEQ ID NO: 3918576 - RNA, 15 nt, Human adenovirus D
cagacuggucaaaaa

SEQ ID NO: 3918577 - RNA, 19 nt, Human adenovirus D
cagagagauggcucucacu

SEQ ID NO: 3918578 - RNA, 19 nt, Human adenovirus D
cagagagccgccugagcaa

SEQ ID NO: 3918579 - RNA, 21 nt, Human adenovirus D
cagagauggacuuggaagagg

SEQ ID NO: 3918580 - RNA, 13 nt, Human adenovirus D
cugcaggccgggc

SEQ ID NO: 3918581 - RNA, 16 nt, Human adenovirus D
cugcaggccgggcugc

SEQ ID NO: 3918582 - RNA, 12 nt, Human adenovirus D
cugcagggcgcc

SEQ ID NO: 3918583 - RNA, 20 nt, Human adenovirus D
cugcagguggacgagccgcc

SEQ ID NO: 3918584 - RNA, 16 nt, Human adenovirus D
cugccacacauggcaa

SEQ ID NO: 3918585 - RNA, 13 nt, Human adenovirus D
cugccacucgcgg

SEQ ID NO: 3918586 - RNA, 12 nt, Human adenovirus D
cugccagcagaa

SEQ ID NO: 3918587 - RNA, 13 nt, Human adenovirus D
cugccccaggcgg

SEQ ID NO: 3918588 - RNA, 18 nt, Human adenovirus D
cugccccaggcggugcug

SEQ ID NO: 3918589 - RNA, 22 nt, Human adenovirus D
cugccccaggcggugcugcugc

SEQ ID NO: 3918590 - RNA, 19 nt, Human adenovirus D
cugcccuccgcccugagcu

SEQ ID NO: 3918591 - RNA, 13 nt, Human adenovirus D
cugccgcugcaac

SEQ ID NO: 3918592 - RNA, 20 nt, Human adenovirus D
cugccgcugcaaccugugcu

SEQ ID NO: 3918593 - RNA, 23 nt, Human adenovirus D
cugccgguuucgggcgggcaggg

SEQ ID NO: 3918594 - RNA, 12 nt, Human adenovirus D
cugccuggucaa

SEQ ID NO: 3918595 - RNA, 15 nt, Human adenovirus D
cugcgauauggauga

SEQ ID NO: 3918596 - RNA, 12 nt, Human adenovirus D
cugcgcaacgac

SEQ ID NO: 3918597 - RNA, 22 nt, Human adenovirus D
cugcgccaaaugcgucccaccc

SEQ ID NO: 3918598 - RNA, 15 nt, Human adenovirus D
cugcgcgagguugag

SEQ ID NO: 3918599 - RNA, 19 nt, Human adenovirus D
cugcgcgagguugagcucc

SEQ ID NO: 3918600 - RNA, 20 nt, Human adenovirus D
cugcgcguccgucagcagca

SEQ ID NO: 3918601 - RNA, 22 nt, Human adenovirus D
cugcgcugcuucgcccgggaga

SEQ ID NO: 3918602 - RNA, 20 nt, Human adenovirus D
cugcuaccucuugcagcugg

SEQ ID NO: 3918603 - RNA, 13 nt, Human adenovirus D
cugcuccugcacu

SEQ ID NO: 3918604 - RNA, 14 nt, Human adenovirus D
cugcucuucccugg

SEQ ID NO: 3918605 - RNA, 14 nt, Human adenovirus D
cugcugccgagccg

SEQ ID NO: 3918606 - RNA, 15 nt, Human adenovirus D
cugcugccgagccgc

SEQ ID NO: 3918607 - RNA, 13 nt, Human adenovirus D
cugcuggagcuga

SEQ ID NO: 3918608 - RNA, 11 nt, Human adenovirus D
cugcuggaugg

SEQ ID NO: 3918609 - RNA, 17 nt, Human adenovirus D
cugcuucugccugguga

SEQ ID NO: 3918610 - RNA, 12 nt, Human adenovirus D
cuggaacaccau

SEQ ID NO: 3918611 - RNA, 23 nt, Human adenovirus D
cuggaacgagaucggcaccagcc

SEQ ID NO: 3918612 - RNA, 14 nt, Human adenovirus D
cuggacccccagac

SEQ ID NO: 3918613 - RNA, 14 nt, Human adenovirus D
cuggacccgcggcc

SEQ ID NO: 3918614 - RNA, 16 nt, Human adenovirus D
cuggaccggcugguga

SEQ ID NO: 3918615 - RNA, 18 nt, Human adenovirus D
cuggaccucgagauggac

SEQ ID NO: 3918616 - RNA, 14 nt, Human adenovirus D
cuggacgagagcaa

SEQ ID NO: 3918617 - RNA, 22 nt, Human adenovirus D
cuggacgggagcaauccuccag

SEQ ID NO: 3918618 - RNA, 23 nt, Human adenovirus D
cuggacgggagcaauccuccagg

SEQ ID NO: 3918619 - RNA, 20 nt, Human adenovirus D
cuggagaagcaucgccaggg

SEQ ID NO: 3918620 - RNA, 19 nt, Human adenovirus D
cuggagacgggcugcuucu

SEQ ID NO: 3918621 - RNA, 11 nt, Human adenovirus D
cuggagcagcg

SEQ ID NO: 3918622 - RNA, 19 nt, Human adenovirus D
cuggagcgcguaggccgcu

SEQ ID NO: 3918623 - RNA, 14 nt, Human adenovirus D
cuggaucgaaauca

SEQ ID NO: 3918624 - RNA, 21 nt, Human adenovirus D
cuggcgagacugggggcgccu

SEQ ID NO: 3918625 - RNA, 19 nt, Human adenovirus D
cuggcggagaacaaggcca

SEQ ID NO: 3918626 - RNA, 18 nt, Human adenovirus D
cuggcgguagagcggcca

SEQ ID NO: 3918627 - RNA, 18 nt, Human adenovirus D
cugggcacuggagcacag

SEQ ID NO: 3918628 - RNA, 13 nt, Human adenovirus D
cuggggagggcca

SEQ ID NO: 3918629 - RNA, 22 nt, Human adenovirus D
cugggguauuacuaggcccagc

SEQ ID NO: 3918630 - RNA, 13 nt, Human adenovirus D
cuggucaaaaaca

SEQ ID NO: 3918631 - RNA, 17 nt, Human adenovirus D
cuggucacccucgagcu

SEQ ID NO: 3918632 - RNA, 13 nt, Human adenovirus D
cuggucaucaccu

SEQ ID NO: 3918633 - RNA, 21 nt, Human adenovirus D
cuggucaucaccuuccugcag

SEQ ID NO: 3918634 - RNA, 23 nt, Human adenovirus D
cugguggaaacagacagccaggu

SEQ ID NO: 3918635 - RNA, 22 nt, Human adenovirus D
cugguguaguuguucagcagca

SEQ ID NO: 3918636 - RNA, 20 nt, Human adenovirus D
cugguugacaaauggagcca

SEQ ID NO: 3918637 - RNA, 15 nt, Human adenovirus D
cuguaccgcagcugg

SEQ ID NO: 3918638 - RNA, 19 nt, Human adenovirus D
cuguaccucauccacgaga

SEQ ID NO: 3918639 - RNA, 22 nt, Human adenovirus D
cuguacuuugucugcuguaaag

SEQ ID NO: 3918640 - RNA, 19 nt, Human adenovirus D
cuguaggccauccccaucc

SEQ ID NO: 3918641 - RNA, 22 nt, Human adenovirus D
cuguauuaccuuccuugcugga

SEQ ID NO: 3918642 - RNA, 22 nt, Human adenovirus D
cugucaugccacgaacagccac

SEQ ID NO: 3918643 - RNA, 14 nt, Human adenovirus D
cugucggccgagga

SEQ ID NO: 3918644 - RNA, 23 nt, Human adenovirus D
cugugacaugcaaaaucuuacac

SEQ ID NO: 3918645 - RNA, 16 nt, Human adenovirus D
cugugcuaaguguggu

SEQ ID NO: 3918646 - RNA, 14 nt, Human adenovirus D
cuuaaccacccacg

SEQ ID NO: 3918647 - RNA, 22 nt, Human adenovirus D
cuuaaccacccacgagcaaccc

SEQ ID NO: 3918648 - RNA, 18 nt, Human adenovirus D
cuuaaggaaucuucuuuu

SEQ ID NO: 3918649 - RNA, 13 nt, Human adenovirus D
gcgugcaggcgcc

SEQ ID NO: 3918650 - RNA, 17 nt, Human adenovirus D
gcgugcuggagagcgau

SEQ ID NO: 3918651 - RNA, 12 nt, Human adenovirus D
gcguguggcagc

SEQ ID NO: 3918652 - RNA, 17 nt, Human adenovirus D
gcuacaaucgccacagg

SEQ ID NO: 3918653 - RNA, 14 nt, Human adenovirus D
gcuacaauuacuuc

SEQ ID NO: 3918654 - RNA, 15 nt, Human adenovirus D
gcuaccgcggcaccc

SEQ ID NO: 3918655 - RNA, 17 nt, Human adenovirus D
gcuaccugggaggagag

SEQ ID NO: 3918656 - RNA, 17 nt, Human adenovirus D
gcuaccuugcacccacc

SEQ ID NO: 3918657 - RNA, 17 nt, Human adenovirus D
gcuagaaaacacccaca

SEQ ID NO: 3918658 - RNA, 14 nt, Human adenovirus D
gcuagacaccacag

SEQ ID NO: 3918659 - RNA, 15 nt, Human adenovirus D
gcuagacaccacagu

SEQ ID NO: 3918660 - RNA, 13 nt, Human adenovirus D
gcuagcccuuccu

SEQ ID NO: 3918661 - RNA, 17 nt, Human adenovirus D
gcuauaauaagcagagu

SEQ ID NO: 3918662 - RNA, 17 nt, Human adenovirus D
gcucaaagaccagaacu

SEQ ID NO: 3918663 - RNA, 14 nt, Human adenovirus D
gcucaaccucuucu

SEQ ID NO: 3918664 - RNA, 17 nt, Human adenovirus D
gcucacucuuaaagacu

SEQ ID NO: 3918665 - RNA, 21 nt, Human adenovirus D
gcucaggaccauagggagccu

SEQ ID NO: 3918666 - RNA, 23 nt, Human adenovirus D
gcucaucugcagggcgcccagca

SEQ ID NO: 3918667 - RNA, 13 nt, Human adenovirus D
gcuccagccaaag

SEQ ID NO: 3918668 - RNA, 13 nt, Human adenovirus D
gcucccacagugc

SEQ ID NO: 3918669 - RNA, 17 nt, Human adenovirus D
gcucccaccgcgccgcc

SEQ ID NO: 3918670 - RNA, 18 nt, Human adenovirus D
gcucccggcggcagcggc

SEQ ID NO: 3918671 - RNA, 19 nt, Human adenovirus D
gcuccgcccacaaucgggu

SEQ ID NO: 3918672 - RNA, 14 nt, Human adenovirus D
gcuccguggggcgc

SEQ ID NO: 3918673 - RNA, 17 nt, Human adenovirus D
gcuccucgcucuggggc

SEQ ID NO: 3918674 - RNA, 13 nt, Human adenovirus D
gcuccucucgugc

SEQ ID NO: 3918675 - RNA, 17 nt, Human adenovirus D
gcucgaaaucggugcgc

SEQ ID NO: 3918676 - RNA, 15 nt, Human adenovirus D
gcucgacgcuccgga

SEQ ID NO: 3918677 - RNA, 22 nt, Human adenovirus D
gcucgaucuccuccuccuggag

SEQ ID NO: 3918678 - RNA, 17 nt, Human adenovirus D
gcucgcgcaccugcuac

SEQ ID NO: 3918679 - RNA, 17 nt, Human adenovirus D
gcucggccaugccccag

SEQ ID NO: 3918680 - RNA, 22 nt, Human adenovirus D
gcucggccaugccccaggccug

SEQ ID NO: 3918681 - RNA, 13 nt, Human adenovirus D
gcucgggcugcuc

SEQ ID NO: 3918682 - RNA, 17 nt, Human adenovirus D
gcucggucgggacgaga

SEQ ID NO: 3918683 - RNA, 14 nt, Human adenovirus D
gcucgguugaggca

SEQ ID NO: 3918684 - RNA, 16 nt, Human adenovirus D
gcucgguugaggcacc

SEQ ID NO: 3918685 - RNA, 20 nt, Human adenovirus D
gcucguacccgcucaccauc

SEQ ID NO: 3918686 - RNA, 20 nt, Human adenovirus D
gcucgucuuccaggagccug

SEQ ID NO: 3918687 - RNA, 22 nt, Human adenovirus D
gcucguguccaacggcaaacag

SEQ ID NO: 3918688 - RNA, 16 nt, Human adenovirus D
gcucguuaguccagca

SEQ ID NO: 3918689 - RNA, 16 nt, Human adenovirus D
gcucuaucgcuuccuc

SEQ ID NO: 3918690 - RNA, 15 nt, Human adenovirus D
gcucuucccuggaga

SEQ ID NO: 3918691 - RNA, 15 nt, Human adenovirus D
gcugaaacaccugca

SEQ ID NO: 3918692 - RNA, 17 nt, Human adenovirus D
gcugaccaacuggucuc

SEQ ID NO: 3918693 - RNA, 14 nt, Human adenovirus D
gcugacgcugagcg

SEQ ID NO: 3918694 - RNA, 22 nt, Human adenovirus D
gcugagccugcgccgggcgcug

SEQ ID NO: 3918695 - RNA, 18 nt, Human adenovirus D
gcugagcgaccgcgagcu

SEQ ID NO: 3918696 - RNA, 18 nt, Human adenovirus D
gcugagcgacgaccuggg

SEQ ID NO: 3918697 - RNA, 23 nt, Human adenovirus D
gcugaucaacaucuugcagagca

SEQ ID NO: 3918698 - RNA, 18 nt, Human adenovirus D
gcugauugcucuggccug

SEQ ID NO: 3918699 - RNA, 22 nt, Human adenovirus D
gcugcacgagcgccaggucggc

SEQ ID NO: 3918700 - RNA, 17 nt, Human adenovirus D
gcugccaugggaggaag

SEQ ID NO: 3918701 - RNA, 15 nt, Human adenovirus D
gcugcccgccaccug

SEQ ID NO: 3918702 - RNA, 21 nt, Human adenovirus D
gcugccgucgucccggaggag

SEQ ID NO: 3918703 - RNA, 14 nt, Human adenovirus D
gcugcgcggggcca

SEQ ID NO: 3918704 - RNA, 19 nt, Human adenovirus D
gcugcgcggggccacgacc

SEQ ID NO: 3918705 - RNA, 21 nt, Human adenovirus D
gcugcuaaacaucgccgagcc

SEQ ID NO: 3918706 - RNA, 19 nt, Human adenovirus D
gcugcugaaacaccugcag

SEQ ID NO: 3918707 - RNA, 14 nt, Human adenovirus D
gcugcugccgagcc

SEQ ID NO: 3918708 - RNA, 14 nt, Human adenovirus D
gcugcuggaugggc

SEQ ID NO: 3918709 - RNA, 20 nt, Human adenovirus D
gcugcuucgcccgggagagc

SEQ ID NO: 3918710 - RNA, 22 nt, Human adenovirus D
gcuggaagaccuacgcucagga

SEQ ID NO: 3918711 - RNA, 13 nt, Human adenovirus D
gcuggacgagagc

SEQ ID NO: 3918712 - RNA, 17 nt, Human adenovirus D
gcuggaugauguccuug

SEQ ID NO: 3918713 - RNA, 14 nt, Human adenovirus D
gcuggccagcacgc

SEQ ID NO: 3918714 - RNA, 19 nt, Human adenovirus D
gcuggccagcacgcucuug

SEQ ID NO: 3918715 - RNA, 15 nt, Human adenovirus D
gcuggcccacggcca

SEQ ID NO: 3918716 - RNA, 16 nt, Human adenovirus D
gcuggcccacggccau

SEQ ID NO: 3918717 - RNA, 17 nt, Human adenovirus D
gcuggcgagacuggggg

SEQ ID NO: 3918718 - RNA, 20 nt, Human adenovirus D
gcuggcggagaacaaggcca

SEQ ID NO: 3918719 - RNA, 21 nt, Human adenovirus D
gcuggcggagaacaaggccau

SEQ ID NO: 3918720 - RNA, 22 nt, Human adenovirus D
gcuggcggagaacaaggccauc

SEQ ID NO: 3918721 - RNA, 16 nt, Human adenovirus D
gcuggcugcuggagcu

SEQ ID NO: 3918722 - RNA, 18 nt, Human adenovirus D
gcuggcugcuggagcuga

SEQ ID NO: 3918723 - RNA, 12 nt, Human adenovirus D
gcuggggcagaa

SEQ ID NO: 3918724 - RNA, 13 nt, Human adenovirus D
gcuggggcugcuc

SEQ ID NO: 3918725 - RNA, 19 nt, Human adenovirus D
gcugguagggggcgccgcc

SEQ ID NO: 3918726 - RNA, 23 nt, Human adenovirus D
gcuggucacauccaucuccacca

SEQ ID NO: 3918727 - RNA, 14 nt, Human adenovirus D
gcugguggccaccu

SEQ ID NO: 3918728 - RNA, 19 nt, Human adenovirus D
gcuguaccgcagcugguac

SEQ ID NO: 3918729 - RNA, 14 nt, Human adenovirus D
gcuguccacgggga

SEQ ID NO: 3918730 - RNA, 18 nt, Human adenovirus D
gcugucuuaccagcucuu

SEQ ID NO: 3918731 - RNA, 13 nt, Human adenovirus D
gcugugcuggugg

SEQ ID NO: 3918732 - RNA, 19 nt, Human adenovirus D
gcugugcugguggaaacag

SEQ ID NO: 3918733 - RNA, 20 nt, Human adenovirus D
gcuuacaacagccuugcccc

SEQ ID NO: 3918734 - RNA, 16 nt, Human adenovirus D
gcuucccuggaagagu

SEQ ID NO: 3918735 - RNA, 14 nt, Human adenovirus D
gcuucuacagccag

SEQ ID NO: 3918736 - RNA, 17 nt, Human adenovirus D
gcuucuuaccucgcguc

SEQ ID NO: 3918737 - RNA, 17 nt, Human adenovirus D
gcuugaaacgucccagg

SEQ ID NO: 3918738 - RNA, 17 nt, Human adenovirus D
gcuugcgcgcuggcuug

SEQ ID NO: 3918739 - RNA, 20 nt, Human adenovirus D
ggaaacuaggcgcagcugcg

SEQ ID NO: 3918740 - RNA, 20 nt, Human adenovirus D
ggaaacucuuggagcagggu

SEQ ID NO: 3918741 - RNA, 19 nt, Human adenovirus D
ggaacaccaucagacuggg

SEQ ID NO: 3918742 - RNA, 16 nt, Human adenovirus D
ggaaccuaccacugcc

SEQ ID NO: 3918743 - RNA, 21 nt, Human adenovirus D
ggaacgagaagaacgcacaga

SEQ ID NO: 3918744 - RNA, 14 nt, Human adenovirus D
ggaacggggcagag

SEQ ID NO: 3918745 - RNA, 15 nt, Human adenovirus D
ggaagaagagcagca

SEQ ID NO: 3918746 - RNA, 14 nt, Human adenovirus D
ggaagacccggagc

SEQ ID NO: 3918747 - RNA, 16 nt, Human adenovirus D
ggaagagauggaagaa

SEQ ID NO: 3918748 - RNA, 12 nt, Human adenovirus D
ggaauccugcac

SEQ ID NO: 3918749 - RNA, 16 nt, Human adenovirus D
ggaauccugcacgaga

SEQ ID NO: 3918750 - RNA, 22 nt, Human adenovirus D
ggaaucggaucuuccccacucu

SEQ ID NO: 3918751 - RNA, 17 nt, Human adenovirus D
ggacagcaagccucuga

SEQ ID NO: 3918752 - RNA, 17 nt, Human adenovirus D
ggacaucgcgaaccagg

SEQ ID NO: 3918753 - RNA, 16 nt, Human adenovirus D
ggaccaccaggacggu

SEQ ID NO: 3918754 - RNA, 15 nt, Human adenovirus D
ggaccaggcggcaga

SEQ ID NO: 3918755 - RNA, 15 nt, Human adenovirus D
ggaccgagucgcgga

SEQ ID NO: 3918756 - RNA, 15 nt, Human adenovirus D
ggaccggucccagcg

SEQ ID NO: 3918757 - RNA, 17 nt, Human adenovirus D
ggaccuggcggaggcca

SEQ ID NO: 3918758 - RNA, 16 nt, Human adenovirus D
ggacgacguggacagc

SEQ ID NO: 3918759 - RNA, 15 nt, Human adenovirus D
ggacgaguggcuguu

SEQ ID NO: 3918760 - RNA, 15 nt, Human adenovirus D
ggacgaugguuuccc

SEQ ID NO: 3918761 - RNA, 20 nt, Human adenovirus D
ggacgcgcucccggcggcag

SEQ ID NO: 3918762 - RNA, 22 nt, Human adenovirus D
ggacgcuaccgcugcgcagcag

SEQ ID NO: 3918763 - RNA, 16 nt, Human adenovirus D
ggacggaucgcccagg

SEQ ID NO: 3918764 - RNA, 13 nt, Human adenovirus D
ggacggccaggcc

SEQ ID NO: 3918765 - RNA, 21 nt, Human adenovirus D
ggacggccgcggcgagcggga

SEQ ID NO: 3918766 - RNA, 17 nt, Human adenovirus D
ggacguggugcugcugc

SEQ ID NO: 3918767 - RNA, 15 nt, Human adenovirus D
ggacuuaaccaccca

SEQ ID NO: 3918768 - RNA, 22 nt, Human adenovirus D
ggacuuuucuguugcauguucu

SEQ ID NO: 3918769 - RNA, 16 nt, Human adenovirus D
ggagccagaacaccca

SEQ ID NO: 3918770 - RNA, 20 nt, Human adenovirus D
ggagccgcuaguggaagaga

SEQ ID NO: 3918771 - RNA, 21 nt, Human adenovirus D
ggagcuugcccuuggaagagc

SEQ ID NO: 3918772 - RNA, 20 nt, Human adenovirus D
ggaggacuuaaccacccacg

SEQ ID NO: 3918773 - RNA, 22 nt, Human adenovirus D
ggaggagaccgacgcugggcuc

SEQ ID NO: 3918774 - RNA, 12 nt, Human adenovirus D
ggaggagcagcc

SEQ ID NO: 3918775 - RNA, 14 nt, Human adenovirus D
ggaggaugugcugc

SEQ ID NO: 3918776 - RNA, 14 nt, Human adenovirus D
ggaggcaccaccua

SEQ ID NO: 3918777 - RNA, 14 nt, Human adenovirus D
ggaggcggugcgca

SEQ ID NO: 3918778 - RNA, 14 nt, Human adenovirus D
ggagggauugcagg

SEQ ID NO: 3918779 - RNA, 18 nt, Human adenovirus D
ggagguagcaccacugca

SEQ ID NO: 3918780 - RNA, 23 nt, Human adenovirus D
ggagguagcaccacugcauggcc

SEQ ID NO: 3918781 - RNA, 17 nt, Human adenovirus D
ggaguucgucagaaugu

SEQ ID NO: 3918782 - RNA, 18 nt, Human adenovirus D
ggaucgacgguggacggg

SEQ ID NO: 3918783 - RNA, 16 nt, Human adenovirus D
ggaucgcgaggacacc

SEQ ID NO: 3918784 - RNA, 14 nt, Human adenovirus D
ggaugagguggacg

SEQ ID NO: 3918785 - RNA, 15 nt, Human adenovirus D
ggaugcaugcggggg

SEQ ID NO: 3918786 - RNA, 13 nt, Human adenovirus D
ggcaaagcgguug

SEQ ID NO: 3918787 - RNA, 12 nt, Human adenovirus D
ggcaaaggagcc

SEQ ID NO: 3918788 - RNA, 23 nt, Human adenovirus D
ggcaacaccugggcacuggagca

SEQ ID NO: 3918789 - RNA, 22 nt, Human adenovirus D
ggcaacagcaaaagauacagag

SEQ ID NO: 3918790 - RNA, 22 nt, Human adenovirus D
ggcaacauccccgcccugcugg

SEQ ID NO: 3918791 - RNA, 23 nt, Human adenovirus D
ggcaacgaccggcugcucacgcc

SEQ ID NO: 3918792 - RNA, 13 nt, Human adenovirus D
ggcaacggccgcu

SEQ ID NO: 3918793 - RNA, 19 nt, Human adenovirus D
ggcaaugcuagagugaggc

SEQ ID NO: 3918794 - RNA, 12 nt, Human adenovirus D
ggcaccagccag

SEQ ID NO: 3918795 - RNA, 14 nt, Human adenovirus D
ggcaccagccagcu

SEQ ID NO: 3918796 - RNA, 21 nt, Human adenovirus D
ggcaccaucacaggaggcaca

SEQ ID NO: 3918797 - RNA, 23 nt, Human adenovirus D
ggcaccaucacaggaggcacaga

SEQ ID NO: 3918798 - RNA, 15 nt, Human adenovirus D
ggcacccacgacaca

SEQ ID NO: 3918799 - RNA, 18 nt, Human adenovirus D
ggcaccuagaccacugcc

SEQ ID NO: 3918800 - RNA, 15 nt, Human adenovirus D
ggcacgcucugaggc

SEQ ID NO: 3918801 - RNA, 18 nt, Human adenovirus D
ggcacggcacgcggccgu

SEQ ID NO: 3918802 - RNA, 17 nt, Human adenovirus D
ggcacuggagcacagac

SEQ ID NO: 3918803 - RNA, 16 nt, Human adenovirus D
ggcagagguggucauu

SEQ ID NO: 3918804 - RNA, 13 nt, Human adenovirus D
ggcagcggggccu

SEQ ID NO: 3918805 - RNA, 20 nt, Human adenovirus D
ggcagcggugguggaggcgc

SEQ ID NO: 3918806 - RNA, 20 nt, Human adenovirus D
ggcaggccauggacgagaac

SEQ ID NO: 3918807 - RNA, 14 nt, Human adenovirus D
ggcagggugagccg

SEQ ID NO: 3918808 - RNA, 20 nt, Human adenovirus D
ggcagguggucgaugagauc

SEQ ID NO: 3918809 - RNA, 12 nt, Human adenovirus D
ggcauccugcac

SEQ ID NO: 3918810 - RNA, 16 nt, Human adenovirus D
ggccaaccuguggaag

SEQ ID NO: 3918811 - RNA, 18 nt, Human adenovirus D
ggccaaccuguggaagag

SEQ ID NO: 3918812 - RNA, 19 nt, Human adenovirus D
ggccaagaaggccggggcc

SEQ ID NO: 3918813 - RNA, 22 nt, Human adenovirus D
ggccaauguuacgcugcccgcc

SEQ ID NO: 3918814 - RNA, 17 nt, Human adenovirus D
ggccacgaccgugccgc

SEQ ID NO: 3918815 - RNA, 18 nt, Human adenovirus D
ggccacggggagccccuu

SEQ ID NO: 3918816 - RNA, 16 nt, Human adenovirus D
ggccacucccagcgcc

SEQ ID NO: 3918817 - RNA, 17 nt, Human adenovirus D
ggccagaugcggaggag

SEQ ID NO: 3918818 - RNA, 13 nt, Human adenovirus D
ggccagcacgcuc

SEQ ID NO: 3918819 - RNA, 14 nt, Human adenovirus D
ggccagcacgcucu

SEQ ID NO: 3918820 - RNA, 19 nt, Human adenovirus D
ggccagcgcuggguggccg

SEQ ID NO: 3918821 - RNA, 15 nt, Human adenovirus D
ggccaggaggagacc

SEQ ID NO: 3918822 - RNA, 21 nt, Human adenovirus D
ggccagugauuggggaaccuc

SEQ ID NO: 3918823 - RNA, 16 nt, Human adenovirus D
ggccaucgugcagaac

SEQ ID NO: 3918824 - RNA, 21 nt, Human adenovirus D
ggccaucgugcagaacccgga

SEQ ID NO: 3918825 - RNA, 19 nt, Human adenovirus D
ggccaugagggucuggagc

SEQ ID NO: 3918826 - RNA, 12 nt, Human adenovirus D
ggccaugcugcg

SEQ ID NO: 3918827 - RNA, 14 nt, Human adenovirus D
ggccaugcugcgcc

SEQ ID NO: 3918828 - RNA, 13 nt, Human adenovirus D
ggccauggacgag

SEQ ID NO: 3918829 - RNA, 16 nt, Human adenovirus D
ggccauugcucgcucg

SEQ ID NO: 3918830 - RNA, 16 nt, Human adenovirus D
ggccccuggcugggcg

SEQ ID NO: 3918831 - RNA, 22 nt, Human adenovirus D
ggcccggcaacgaccggcugcu

SEQ ID NO: 3918832 - RNA, 21 nt, Human adenovirus D
ggcccggcacggcgguggugu

SEQ ID NO: 3918833 - RNA, 17 nt, Human adenovirus D
ggcccuggagcagcggc

SEQ ID NO: 3918834 - RNA, 17 nt, Human adenovirus D
ggcccugggccugaugc

SEQ ID NO: 3918835 - RNA, 17 nt, Human adenovirus D
ggccgaaaaccccgccg

SEQ ID NO: 3918836 - RNA, 19 nt, Human adenovirus D
ggccgaaaaccccgccggg

SEQ ID NO: 3918837 - RNA, 22 nt, Human adenovirus D
ggccgaaaaccccgccggguag

SEQ ID NO: 3918838 - RNA, 14 nt, Human adenovirus D
ggccgagaccguga

SEQ ID NO: 3918839 - RNA, 18 nt, Human adenovirus D
ggccgagaccgugagcuc

SEQ ID NO: 3918840 - RNA, 13 nt, Human adenovirus D
ggccgagcuggaa

SEQ ID NO: 3918841 - RNA, 16 nt, Human adenovirus D
ggccgccaacaugcuc

SEQ ID NO: 3918842 - RNA, 18 nt, Human adenovirus D
ggccgcccacgguggugg

SEQ ID NO: 3918843 - RNA, 22 nt, Human adenovirus D
ggccgcggccagaugcggagga

SEQ ID NO: 3918844 - RNA, 22 nt, Human adenovirus D
ggccgcucgcucguucugccca

SEQ ID NO: 3918845 - RNA, 17 nt, Human adenovirus D
ggccggcaugcccacca

SEQ ID NO: 3918846 - RNA, 20 nt, Human adenovirus D
ggccggcaugcccaccacgc

SEQ ID NO: 3918847 - RNA, 14 nt, Human adenovirus D
ggccgggcugcacg

SEQ ID NO: 3918848 - RNA, 18 nt, Human adenovirus D
ggccguagcaggcgccgg

SEQ ID NO: 3918849 - RNA, 17 nt, Human adenovirus D
ggccgucacccugcccu

SEQ ID NO: 3918850 - RNA, 19 nt, Human adenovirus D
ggccgugagcgcgagccgg

SEQ ID NO: 3918851 - RNA, 17 nt, Human adenovirus D
ggccguucaugggcacc

SEQ ID NO: 3918852 - RNA, 22 nt, Human adenovirus D
ggccuacuuuuugggcacccac

SEQ ID NO: 3918853 - RNA, 14 nt, Human adenovirus D
ggccucuacccgga

SEQ ID NO: 3918854 - RNA, 15 nt, Human adenovirus D
ggccugaugcaggau

SEQ ID NO: 3918855 - RNA, 18 nt, Human adenovirus D
ggccugcgucaucaccca

SEQ ID NO: 3918856 - RNA, 21 nt, Human adenovirus D
ggccuggaauaguagcacggg

SEQ ID NO: 3918857 - RNA, 13 nt, Human adenovirus D
ggccuggagcaga

SEQ ID NO: 3918858 - RNA, 17 nt, Human adenovirus D
ggccugggagugaaaag

SEQ ID NO: 3918859 - RNA, 23 nt, Human adenovirus D
ggccuguccugcaggggcguccc

SEQ ID NO: 3918860 - RNA, 23 nt, Human adenovirus D
ggcgaacgugccgcgcgggcagg

SEQ ID NO: 3918861 - RNA, 16 nt, Human adenovirus D
ggcgaagggcuggcga

SEQ ID NO: 3918862 - RNA, 12 nt, Human adenovirus D
ggcgacccagga

SEQ ID NO: 3918863 - RNA, 22 nt, Human adenovirus D
ggcgaccggucgacggugagca

SEQ ID NO: 3918864 - RNA, 19 nt, Human adenovirus D
ggcgacgacgcgcucggcg

SEQ ID NO: 3918865 - RNA, 15 nt, Human adenovirus D
ggcgacgcaccggga

SEQ ID NO: 3918866 - RNA, 20 nt, Human adenovirus D
ggcgagaagcggccgcggcc

SEQ ID NO: 3918867 - RNA, 16 nt, Human adenovirus D
ggcgagauagcaguug

SEQ ID NO: 3918868 - RNA, 21 nt, Human adenovirus D
ggcgagcgggacuuggucacc

SEQ ID NO: 3918869 - RNA, 24 nt, Human adenovirus D
ggcgauaugccagacgcaagagcc

SEQ ID NO: 3918870 - RNA, 16 nt, Human adenovirus D
ggcgccaucuugccca

SEQ ID NO: 3918871 - RNA, 17 nt, Human adenovirus D
ggcgccauucggagcac

SEQ ID NO: 3918872 - RNA, 20 nt, Human adenovirus D
ggcgccgccggcggcgagga

SEQ ID NO: 3918873 - RNA, 17 nt, Human adenovirus D
ggcgcgauccucgccca

SEQ ID NO: 3918874 - RNA, 19 nt, Human adenovirus D
ggcgcgccuuggaggccgc

SEQ ID NO: 3918875 - RNA, 20 nt, Human adenovirus D
ggcgcgccuuggaggccgcc

SEQ ID NO: 3918876 - RNA, 14 nt, Human adenovirus D
ggcgcguggaggaa

SEQ ID NO: 3918877 - RNA, 19 nt, Human adenovirus D
ggcgcugcaaagccagccg

SEQ ID NO: 3918878 - RNA, 21 nt, Human adenovirus D
ggcgcugggcguggugcugga

SEQ ID NO: 3918879 - RNA, 16 nt, Human adenovirus D
ggcggauagcgcgccg

SEQ ID NO: 3918880 - RNA, 12 nt, Human adenovirus D
ggcggcagagcg

SEQ ID NO: 3918881 - RNA, 14 nt, Human adenovirus D
ggcggcggccaacc

SEQ ID NO: 3918882 - RNA, 16 nt, Human adenovirus D
ggcggcuuucugcccg

SEQ ID NO: 3918883 - RNA, 14 nt, Human adenovirus D
ggcgggcagggagc

SEQ ID NO: 3918884 - RNA, 15 nt, Human adenovirus D
ggcgggcagggagcu

SEQ ID NO: 3918885 - RNA, 17 nt, Human adenovirus D
ggcgggcagggagcugc

SEQ ID NO: 3918886 - RNA, 13 nt, Human adenovirus D
ggcgggcugcccg

SEQ ID NO: 3918887 - RNA, 19 nt, Human adenovirus D
ggcgggggugaugagcugc

SEQ ID NO: 3918888 - RNA, 19 nt, Human adenovirus D
ggcgguagagcggccagcg

SEQ ID NO: 3918889 - RNA, 18 nt, Human adenovirus D
ggcgguccccgcccagcg

SEQ ID NO: 3918890 - RNA, 15 nt, Human adenovirus D
ggcguacgugccugc

SEQ ID NO: 3918891 - RNA, 19 nt, Human adenovirus D
ggcgugcacuggcucgccu

SEQ ID NO: 3918892 - RNA, 19 nt, Human adenovirus D
ggcgugcgcgacgacgcgg

SEQ ID NO: 3918893 - RNA, 20 nt, Human adenovirus D
ggcguggcccuuggcgcgga

SEQ ID NO: 3918894 - RNA, 20 nt, Human adenovirus D
ggcuaccgcggcacccggua

SEQ ID NO: 3918895 - RNA, 13 nt, Human adenovirus D
ggcucagcugcca

SEQ ID NO: 3918896 - RNA, 21 nt, Human adenovirus D
ggcucccagccuccaccgcua

SEQ ID NO: 3918897 - RNA, 19 nt, Human adenovirus D
ggcucgccuucggcuggaa

SEQ ID NO: 3918898 - RNA, 24 nt, Human adenovirus D
ggcugacgagcccgcgcgggagcc

SEQ ID NO: 3918899 - RNA, 15 nt, Human adenovirus D
ggcugauggugaccg

SEQ ID NO: 3918900 - RNA, 13 nt, Human adenovirus D
ggcugcuggagcu

SEQ ID NO: 3918901 - RNA, 14 nt, Human adenovirus D
ggcugcuggagcug

SEQ ID NO: 3918902 - RNA, 14 nt, Human adenovirus D
ggcugcuucugccu

SEQ ID NO: 3918903 - RNA, 12 nt, Human adenovirus D
ggcuggagccgc

SEQ ID NO: 3918904 - RNA, 11 nt, Human adenovirus D
ggcuggccgug

SEQ ID NO: 3918905 - RNA, 21 nt, Human adenovirus D
ggcuggucaguugcaccacgc

SEQ ID NO: 3918906 - RNA, 22 nt, Human adenovirus D
ggcuggucaguugcaccacgcu

SEQ ID NO: 3918907 - RNA, 15 nt, Human adenovirus D
ggcuucagagacaac

SEQ ID NO: 3918908 - RNA, 20 nt, Human adenovirus D
gggaaccucagccacuccaa

SEQ ID NO: 3918909 - RNA, 14 nt, Human adenovirus D
gggacagaguuucu

SEQ ID NO: 3918910 - RNA, 23 nt, Human adenovirus D
gggacccugagaacggggugcag

SEQ ID NO: 3918911 - RNA, 16 nt, Human adenovirus D
gggaccggcggggccu

SEQ ID NO: 3918912 - RNA, 14 nt, Human adenovirus D
gggacgugagcgcg

SEQ ID NO: 3918913 - RNA, 23 nt, Human adenovirus D
gggacucacccuggggcuccucg

SEQ ID NO: 3918914 - RNA, 17 nt, Human adenovirus D
gggagcaauccuccagg

SEQ ID NO: 3918915 - RNA, 16 nt, Human adenovirus D
gggagccagguccaga

SEQ ID NO: 3918916 - RNA, 12 nt, Human adenovirus D
gggagcgguggg

SEQ ID NO: 3918917 - RNA, 12 nt, Human adenovirus D
gggaggcgcugc

SEQ ID NO: 3918918 - RNA, 21 nt, Human adenovirus D
gggaguuugcauagcuugccg

SEQ ID NO: 3918919 - RNA, 15 nt, Human adenovirus D
gggcaccuuccagcc

SEQ ID NO: 3918920 - RNA, 14 nt, Human adenovirus D
gggcacuggagcac

SEQ ID NO: 3918921 - RNA, 16 nt, Human adenovirus D
gggcagacacaccagg

SEQ ID NO: 3918922 - RNA, 14 nt, Human adenovirus D
gggcagaggugguc

SEQ ID NO: 3918923 - RNA, 15 nt, Human adenovirus D
gggcagcgagagggc

SEQ ID NO: 3918924 - RNA, 13 nt, Human adenovirus D
gggcagggagcug

SEQ ID NO: 3918925 - RNA, 14 nt, Human adenovirus D
gggcaggggcggca

SEQ ID NO: 3918926 - RNA, 20 nt, Human adenovirus D
gggcauuaacgggguggugg

SEQ ID NO: 3918927 - RNA, 21 nt, Human adenovirus D
gggcauuaacgggguggugga

SEQ ID NO: 3918928 - RNA, 18 nt, Human adenovirus D
gggccacuacagcugaca

SEQ ID NO: 3918929 - RNA, 19 nt, Human adenovirus D
gggccuacgagcucaaccu

SEQ ID NO: 3918930 - RNA, 12 nt, Human adenovirus D
gggccugggcuc

SEQ ID NO: 3918931 - RNA, 18 nt, Human adenovirus D
gggcgccgccggcggcga

SEQ ID NO: 3918932 - RNA, 18 nt, Human adenovirus D
gggcgccuuccccggagc

SEQ ID NO: 3918933 - RNA, 23 nt, Human adenovirus D
gggcgcuugcaagggugcgcuug

SEQ ID NO: 3918934 - RNA, 16 nt, Human adenovirus D
gggcguugcgggccga

SEQ ID NO: 3918935 - RNA, 17 nt, Human adenovirus D
gggcucgcugguggcgc

SEQ ID NO: 3918936 - RNA, 11 nt, Human adenovirus D
gggcuucaccg

SEQ ID NO: 3918937 - RNA, 17 nt, Human adenovirus D
gggcuucgaagagccgg

SEQ ID NO: 3918938 - RNA, 15 nt, Human adenovirus D
ggggaacggggcaga

SEQ ID NO: 3918939 - RNA, 13 nt, Human adenovirus D
ggggacgagcugc

SEQ ID NO: 3918940 - RNA, 14 nt, Human adenovirus D
ggggaggagcccga

SEQ ID NO: 3918941 - RNA, 16 nt, Human adenovirus D
ugcgcgagcagaacgg

SEQ ID NO: 3918942 - RNA, 18 nt, Human adenovirus D
ugcgcgaguucgcuccgc

SEQ ID NO: 3918943 - RNA, 19 nt, Human adenovirus D
ugcgcguccgucagcagca

SEQ ID NO: 3918944 - RNA, 21 nt, Human adenovirus D
ugcggcagcuuuuugagcucc

SEQ ID NO: 3918945 - RNA, 16 nt, Human adenovirus D
ugcggcugcugcaaau

SEQ ID NO: 3918946 - RNA, 23 nt, Human adenovirus D
ugcguaccuugucguacuucugc

SEQ ID NO: 3918947 - RNA, 18 nt, Human adenovirus D
ugcgucaucacccagggc

SEQ ID NO: 3918948 - RNA, 19 nt, Human adenovirus D
ugcuaaacaucgccgagcc

SEQ ID NO: 3918949 - RNA, 17 nt, Human adenovirus D
ugcuccaaagcuagcac

SEQ ID NO: 3918950 - RNA, 23 nt, Human adenovirus D
ugcuccaggucgucgccccggag

SEQ ID NO: 3918951 - RNA, 16 nt, Human adenovirus D
ugcucuaccccauccc

SEQ ID NO: 3918952 - RNA, 21 nt, Human adenovirus D
ugcugacauccauggccaggg

SEQ ID NO: 3918953 - RNA, 18 nt, Human adenovirus D
ugcugacgggggugccca

SEQ ID NO: 3918954 - RNA, 17 nt, Human adenovirus D
ugcugaucaagugccac

SEQ ID NO: 3918955 - RNA, 22 nt, Human adenovirus D
ugcugcuacaucucggggaacg

SEQ ID NO: 3918956 - RNA, 21 nt, Human adenovirus D
ugcugcuccaccaccugcagc

SEQ ID NO: 3918957 - RNA, 13 nt, Human adenovirus D
ugcuuccacacuu

SEQ ID NO: 3918958 - RNA, 12 nt, Human adenovirus D
ugcuuccagcaa

SEQ ID NO: 3918959 - RNA, 17 nt, Human adenovirus D
ugcuugagaugcagaug

SEQ ID NO: 3918960 - RNA, 16 nt, Human adenovirus D
ugcuuguaccacaaaa

SEQ ID NO: 3918961 - RNA, 19 nt, Human adenovirus D
uggaacaccaucagacugg

SEQ ID NO: 3918962 - RNA, 22 nt, Human adenovirus D
uggaacccgcgcucgcgcaccu

SEQ ID NO: 3918963 - RNA, 17 nt, Human adenovirus D
uggaccccauggacaac

SEQ ID NO: 3918964 - RNA, 21 nt, Human adenovirus D
uggacccuccgucggaagagg

SEQ ID NO: 3918965 - RNA, 15 nt, Human adenovirus D
uggaccggcugguga

SEQ ID NO: 3918966 - RNA, 12 nt, Human adenovirus D
uggacgagccgc

SEQ ID NO: 3918967 - RNA, 20 nt, Human adenovirus D
uggacuucacagagagccgc

SEQ ID NO: 3918968 - RNA, 15 nt, Human adenovirus D
uggacuucgcagcca

SEQ ID NO: 3918969 - RNA, 20 nt, Human adenovirus D
uggagcaggcggcggucacc

SEQ ID NO: 3918970 - RNA, 22 nt, Human adenovirus D
uggagcagugucuggagcgggc

SEQ ID NO: 3918971 - RNA, 21 nt, Human adenovirus D
uggagcucgucgcgaaagagg

SEQ ID NO: 3918972 - RNA, 13 nt, Human adenovirus D
uggagggcugucc

SEQ ID NO: 3918973 - RNA, 20 nt, Human adenovirus D
uggaucgcgaggacaccagu

SEQ ID NO: 3918974 - RNA, 14 nt, Human adenovirus D
uggaugugcccaag

SEQ ID NO: 3918975 - RNA, 22 nt, Human adenovirus D
uggcaaagcgguugagcuggga

SEQ ID NO: 3918976 - RNA, 19 nt, Human adenovirus D
uggcaagagucugaagccu

SEQ ID NO: 3918977 - RNA, 23 nt, Human adenovirus D
uggccaacagccacaugacccug

SEQ ID NO: 3918978 - RNA, 18 nt, Human adenovirus D
uggccgcccugacccagc

SEQ ID NO: 3918979 - RNA, 20 nt, Human adenovirus D
uggccgcccugacccagcag

SEQ ID NO: 3918980 - RNA, 20 nt, Human adenovirus D
uggccuccagccuuuccaug

SEQ ID NO: 3918981 - RNA, 13 nt, Human adenovirus D
uggccugcgccau

SEQ ID NO: 3918982 - RNA, 19 nt, Human adenovirus D
uggccuguccugcaggggc

SEQ ID NO: 3918983 - RNA, 17 nt, Human adenovirus D
uggcgacccaggaaugg

SEQ ID NO: 3918984 - RNA, 21 nt, Human adenovirus D
uggcgaccgccgugcgccgcg

SEQ ID NO: 3918985 - RNA, 21 nt, Human adenovirus D
uggcgacgaacucggcgguga

SEQ ID NO: 3918986 - RNA, 19 nt, Human adenovirus D
uggcggcccuggcuggugg

SEQ ID NO: 3918987 - RNA, 21 nt, Human adenovirus D
uggcggcggccaaccugguga

SEQ ID NO: 3918988 - RNA, 14 nt, Human adenovirus D
uggcgugcuggaga

SEQ ID NO: 3918989 - RNA, 20 nt, Human adenovirus D
uggcuccuacggagggcaga

SEQ ID NO: 3918990 - RNA, 15 nt, Human adenovirus D
uggcuucuacagcca

SEQ ID NO: 3918991 - RNA, 13 nt, Human adenovirus D
ugggacagccagc

SEQ ID NO: 3918992 - RNA, 16 nt, Human adenovirus D
ucggugcggcugcugc

SEQ ID NO: 3918993 - RNA, 15 nt, Human adenovirus D
ucguacgagagcgug

SEQ ID NO: 3918994 - RNA, 14 nt, Human adenovirus D
ucuaccgucgccac

SEQ ID NO: 3918995 - RNA, 18 nt, Human adenovirus D
ucuaugaaagcauacaga

SEQ ID NO: 3918996 - RNA, 11 nt, Human adenovirus D
ucucaaagugu

SEQ ID NO: 3918997 - RNA, 13 nt, Human adenovirus D
ucucaacaucaca

SEQ ID NO: 3918998 - RNA, 18 nt, Human adenovirus D
ucucagaugucaaagagg

SEQ ID NO: 3918999 - RNA, 20 nt, Human adenovirus D
ucucccaggcuuucaucucg

SEQ ID NO: 3919000 - RNA, 13 nt, Human adenovirus D
ucucgauccagca

SEQ ID NO: 3919001 - RNA, 17 nt, Human adenovirus D
ucucggccaaucagcag

SEQ ID NO: 3919002 - RNA, 20 nt, Human adenovirus D
ucucugccauguucucacag

SEQ ID NO: 3919003 - RNA, 15 nt, Human adenovirus D
ucucuucuuguaacu

SEQ ID NO: 3919004 - RNA, 22 nt, Human adenovirus D
ucugauuagcauagucacacuu

SEQ ID NO: 3919005 - RNA, 19 nt, Human adenovirus D
ucugcaacccccagcuccu

SEQ ID NO: 3919006 - RNA, 12 nt, Human adenovirus D
ucugcucuucca

SEQ ID NO: 3919007 - RNA, 22 nt, Human adenovirus D
ucuuccccagcgguucuggguc

SEQ ID NO: 3919008 - RNA, 14 nt, Human adenovirus D
ucuuccccauggcg

SEQ ID NO: 3919009 - RNA, 20 nt, Human adenovirus D
ucuuccuccguagccuggcg

SEQ ID NO: 3919010 - RNA, 22 nt, Human adenovirus D
ucuucuuguaacuuuuagucag

SEQ ID NO: 3919011 - RNA, 17 nt, Human adenovirus D
ucuuguaacuuuuaguc

SEQ ID NO: 3919012 - RNA, 14 nt, Human adenovirus D
ucuuuaucugcugg

SEQ ID NO: 3919013 - RNA, 15 nt, Human adenovirus D
ucuuuauucuugugg

SEQ ID NO: 3919014 - RNA, 13 nt, Human adenovirus D
ugaaacaccugca

SEQ ID NO: 3919015 - RNA, 15 nt, Human adenovirus D
ugaaagcauacagag

SEQ ID NO: 3919016 - RNA, 15 nt, Human adenovirus D
ugaaaucugaaagua

SEQ ID NO: 3919017 - RNA, 14 nt, Human adenovirus D
ugaacugauguuga

SEQ ID NO: 3919018 - RNA, 22 nt, Human adenovirus D
ugaagagaaucuugccugcucg

SEQ ID NO: 3919019 - RNA, 14 nt, Human adenovirus D
ugaagagggagagg

SEQ ID NO: 3919020 - RNA, 14 nt, Human adenovirus D
ugaagggcacagcc

SEQ ID NO: 3919021 - RNA, 20 nt, Human adenovirus D
ugaagggcacagccucucug

SEQ ID NO: 3919022 - RNA, 19 nt, Human adenovirus D
ugaauaucagacaugcugc

SEQ ID NO: 3919023 - RNA, 13 nt, Human adenovirus D
ugaaucucggcca

SEQ ID NO: 3919024 - RNA, 14 nt, Human adenovirus D
ugaauggcacuggc

SEQ ID NO: 3919025 - RNA, 17 nt, Human adenovirus D
ugacaaauggagccaga

SEQ ID NO: 3919026 - RNA, 19 nt, Human adenovirus D
ugacaacccgccugccagg

SEQ ID NO: 3919027 - RNA, 23 nt, Human adenovirus D
ugacaauaauugaacugccuaca

SEQ ID NO: 3919028 - RNA, 19 nt, Human adenovirus D
ugacacaccuggaggcacc

SEQ ID NO: 3919029 - RNA, 18 nt, Human adenovirus D
ugacaguucagaaguaaa

SEQ ID NO: 3919030 - RNA, 15 nt, Human adenovirus D
ugacauacaucuuuu

SEQ ID NO: 3919031 - RNA, 15 nt, Human adenovirus D
ugaccaagcugguga

SEQ ID NO: 3919032 - RNA, 16 nt, Human adenovirus D
ugaccagacccaggcg

SEQ ID NO: 3919033 - RNA, 21 nt, Human adenovirus D
ugaccagguccacgcuggugg

SEQ ID NO: 3919034 - RNA, 18 nt, Human adenovirus D
ugacccaaucaccauagc

SEQ ID NO: 3919035 - RNA, 11 nt, Human adenovirus D
ugacccugcau

SEQ ID NO: 3919036 - RNA, 15 nt, Human adenovirus D
ugaccugcagcaggu

SEQ ID NO: 3919037 - RNA, 16 nt, Human adenovirus D
ugaccuugcagagcag

SEQ ID NO: 3919038 - RNA, 20 nt, Human adenovirus D
ugacgagcccgcgcgggagc

SEQ ID NO: 3919039 - RNA, 14 nt, Human adenovirus D
ugacgcaugcaagg

SEQ ID NO: 3919040 - RNA, 14 nt, Human adenovirus D
ugacggcgggcuga

SEQ ID NO: 3919041 - RNA, 15 nt, Human adenovirus D
ugacgucauugaaga

SEQ ID NO: 3919042 - RNA, 22 nt, Human adenovirus D
ugacuucaaccccgucuacccc

SEQ ID NO: 3919043 - RNA, 17 nt, Human adenovirus D
ugagaacggggugcagu

SEQ ID NO: 3919044 - RNA, 17 nt, Human adenovirus D
ugagaauaacaugcuga

SEQ ID NO: 3919045 - RNA, 18 nt, Human adenovirus D
ugagacucauccugcugg

SEQ ID NO: 3919046 - RNA, 21 nt, Human adenovirus D
ugagacucauccugcuggugc

SEQ ID NO: 3919047 - RNA, 13 nt, Human adenovirus D
ugagagcgcuggc

SEQ ID NO: 3919048 - RNA, 20 nt, Human adenovirus D
ugagagucugaaaaacagaa

SEQ ID NO: 3919049 - RNA, 20 nt, Human adenovirus D
ugagaugccccagcagaagc

SEQ ID NO: 3919050 - RNA, 15 nt, Human adenovirus D
ugagcagcuugcuga

SEQ ID NO: 3919051 - RNA, 16 nt, Human adenovirus D
ugagcucgucuuccag

SEQ ID NO: 3919052 - RNA, 14 nt, Human adenovirus D
ucccggccaaggcc

SEQ ID NO: 3919053 - RNA, 18 nt, Human adenovirus D
ucccucgggccccggggc

SEQ ID NO: 3919054 - RNA, 12 nt, Human adenovirus D
uccgcaacuucc

SEQ ID NO: 3919055 - RNA, 14 nt, Human adenovirus D
uccgcaacuuccag

SEQ ID NO: 3919056 - RNA, 19 nt, Human adenovirus D
uccgcacgguaagagccca

SEQ ID NO: 3919057 - RNA, 22 nt, Human adenovirus D
uccgcacgguaagagcccagca

SEQ ID NO: 3919058 - RNA, 23 nt, Human adenovirus D
uccgcacgguaagagcccagcau

SEQ ID NO: 3919059 - RNA, 18 nt, Human adenovirus D
uccgcagcuacaccuccc

SEQ ID NO: 3919060 - RNA, 17 nt, Human adenovirus D
uccgcaggcgggacaga

SEQ ID NO: 3919061 - RNA, 22 nt, Human adenovirus D
uccgcccgcgcccaccaucacc

SEQ ID NO: 3919062 - RNA, 12 nt, Human adenovirus D
uccuccaggacu

SEQ ID NO: 3919063 - RNA, 15 nt, Human adenovirus D
uccuccguagccugg

SEQ ID NO: 3919064 - RNA, 23 nt, Human adenovirus D
uccugaaccacacggccagcagg

SEQ ID NO: 3919065 - RNA, 20 nt, Human adenovirus D
uccugagcgagacccagguc

SEQ ID NO: 3919066 - RNA, 17 nt, Human adenovirus D
uccugcaccauccccag

SEQ ID NO: 3919067 - RNA, 18 nt, Human adenovirus D
uccuucaacgacuaccuc

SEQ ID NO: 3919068 - RNA, 17 nt, Human adenovirus D
ucgaagccguugauguu

SEQ ID NO: 3919069 - RNA, 23 nt, Human adenovirus D
ucgaccguggcuucgagcagugg

SEQ ID NO: 3919070 - RNA, 15 nt, Human adenovirus D
ucgacgagccaggug

SEQ ID NO: 3919071 - RNA, 13 nt, Human adenovirus D
ucgagagcgggca

SEQ ID NO: 3919072 - RNA, 15 nt, Human adenovirus D
ucgagagcgggcaug

SEQ ID NO: 3919073 - RNA, 18 nt, Human adenovirus D
ucgaggagaccugcacua

SEQ ID NO: 3919074 - RNA, 14 nt, Human adenovirus D
ucgauccagcagac

SEQ ID NO: 3919075 - RNA, 19 nt, Human adenovirus D
ucgaugaaagucaggagca

SEQ ID NO: 3919076 - RNA, 22 nt, Human adenovirus D
ucgaugaaagucaggagcagcg

SEQ ID NO: 3919077 - RNA, 17 nt, Human adenovirus D
ucgauggugaagaugcc

SEQ ID NO: 3919078 - RNA, 18 nt, Human adenovirus D
ucgcaagcgcccagagcg

SEQ ID NO: 3919079 - RNA, 18 nt, Human adenovirus D
ucgcagacgagcggccgc

SEQ ID NO: 3919080 - RNA, 21 nt, Human adenovirus D
ucgcagcgcugcacgggcugu

SEQ ID NO: 3919081 - RNA, 20 nt, Human adenovirus D
ucgccacaggugcugcccac

SEQ ID NO: 3919082 - RNA, 16 nt, Human adenovirus D
ucgcccgggagagcug

SEQ ID NO: 3919083 - RNA, 14 nt, Human adenovirus D
ucgccggaggaggc

SEQ ID NO: 3919084 - RNA, 23 nt, Human adenovirus D
ucgccuucggcuggaacccgcgc

SEQ ID NO: 3919085 - RNA, 17 nt, Human adenovirus D
ucgcgaaccaggcagug

SEQ ID NO: 3919086 - RNA, 15 nt, Human adenovirus D
ucgcgcaggccgcug

SEQ ID NO: 3919087 - RNA, 16 nt, Human adenovirus D
ucgcgccacuggccac

SEQ ID NO: 3919088 - RNA, 23 nt, Human adenovirus D
ucgcgccucaaugucagcugcaa

SEQ ID NO: 3919089 - RNA, 17 nt, Human adenovirus D
ucgcggcgaacgagcca

SEQ ID NO: 3919090 - RNA, 22 nt, Human adenovirus D
ucgcggcugcugcugcugcuga

SEQ ID NO: 3919091 - RNA, 15 nt, Human adenovirus D
ucgcucuuaucccau

SEQ ID NO: 3919092 - RNA, 19 nt, Human adenovirus D
ucgcugaaaaacaggccgc

SEQ ID NO: 3919093 - RNA, 13 nt, Human adenovirus D
ucgcuggacccca

SEQ ID NO: 3919094 - RNA, 18 nt, Human adenovirus D
ucgcuggcugcuggagcu

SEQ ID NO: 3919095 - RNA, 19 nt, Human adenovirus D
ucgcuguccacgagcgcca

SEQ ID NO: 3919096 - RNA, 15 nt, Human adenovirus D
ucggacaugaacugc

SEQ ID NO: 3919097 - RNA, 15 nt, Human adenovirus D
ucggacgacugggag

SEQ ID NO: 3919098 - RNA, 12 nt, Human adenovirus D
ucggacuggguu

SEQ ID NO: 3919099 - RNA, 15 nt, Human adenovirus D
ucggagcuggcuccg

SEQ ID NO: 3919100 - RNA, 18 nt, Human adenovirus D
ucgggaucgccaggccuc

SEQ ID NO: 3919101 - RNA, 15 nt, Human adenovirus D
ucgggccccggggcg

SEQ ID NO: 3919102 - RNA, 18 nt, Human adenovirus D
ucggucagcuggcccggc

SEQ ID NO: 3919103 - RNA, 24 nt, Human adenovirus D
gaggaggacuuaaccacccacgag

SEQ ID NO: 3919104 - RNA, 22 nt, Human adenovirus D
gaggaugcacccgcugcggggu

SEQ ID NO: 3919105 - RNA, 12 nt, Human adenovirus D
gaggcaggccau

SEQ ID NO: 3919106 - RNA, 16 nt, Human adenovirus D
gaggcauggcaggcag

SEQ ID NO: 3919107 - RNA, 22 nt, Human adenovirus D
gaggccaucuaaacuaaagcca

SEQ ID NO: 3919108 - RNA, 13 nt, Human adenovirus D
gaggccaugcugc

SEQ ID NO: 3919109 - RNA, 14 nt, Human adenovirus D
gaggcgagcagcug

SEQ ID NO: 3919110 - RNA, 21 nt, Human adenovirus D
gaggcguucagggaggcgcug

SEQ ID NO: 3919111 - RNA, 19 nt, Human adenovirus D
gagggcaugggucaggcag

SEQ ID NO: 3919112 - RNA, 13 nt, Human adenovirus D
gagggccugggcu

SEQ ID NO: 3919113 - RNA, 14 nt, Human adenovirus D
gaggggcagcaacc

SEQ ID NO: 3919114 - RNA, 16 nt, Human adenovirus D
gaggggggccaccucg

SEQ ID NO: 3919115 - RNA, 21 nt, Human adenovirus D
gagggucacacuagcgcccug

SEQ ID NO: 3919116 - RNA, 17 nt, Human adenovirus D
gagggucgcuggcugcu

SEQ ID NO: 3919117 - RNA, 21 nt, Human adenovirus D
gagggugccagauugggggac

SEQ ID NO: 3919118 - RNA, 12 nt, Human adenovirus D
gaggguguccug

SEQ ID NO: 3919119 - RNA, 18 nt, Human adenovirus D
gagguacaugggcaugag

SEQ ID NO: 3919120 - RNA, 23 nt, Human adenovirus D
gaguccuuuagacaacagccgca

SEQ ID NO: 3919121 - RNA, 17 nt, Human adenovirus D
gaguggcggcccuggcu

SEQ ID NO: 3919122 - RNA, 15 nt, Human adenovirus D
gagugucccccgccg

SEQ ID NO: 3919123 - RNA, 22 nt, Human adenovirus D
gaguuccugauggaugugugga

SEQ ID NO: 3919124 - RNA, 17 nt, Human adenovirus D
gaguuggugagcucuuc

SEQ ID NO: 3919125 - RNA, 18 nt, Human adenovirus D
gauaaagcgugguaguuu

SEQ ID NO: 3919126 - RNA, 17 nt, Human adenovirus D
gggcgaaggugucccug

SEQ ID NO: 3919127 - RNA, 15 nt, Human adenovirus D
gggcgaagugcucaa

SEQ ID NO: 3919128 - RNA, 14 nt, Human adenovirus D
gggcgccuucaccg

SEQ ID NO: 3919129 - RNA, 18 nt, Human adenovirus D
gggcgcucccaaucccag

SEQ ID NO: 3919130 - RNA, 13 nt, Human adenovirus D
gggcggagagcga

SEQ ID NO: 3919131 - RNA, 14 nt, Human adenovirus D
gggcgggcagggag

SEQ ID NO: 3919132 - RNA, 14 nt, Human adenovirus D
gggcgugcagaccg

SEQ ID NO: 3919133 - RNA, 22 nt, Human adenovirus D
gggcucuuccuccguagccugg

SEQ ID NO: 3919134 - RNA, 23 nt, Human adenovirus D
gggcucuuccuccguagccuggc

SEQ ID NO: 3919135 - RNA, 15 nt, Human adenovirus D
gggcugcuagagugc

SEQ ID NO: 3919136 - RNA, 16 nt, Human adenovirus D
gggcuggcgagacugg

SEQ ID NO: 3919137 - RNA, 15 nt, Human adenovirus D
ggggacgagcugcuu

SEQ ID NO: 3919138 - RNA, 21 nt, Human adenovirus D
ggggcagacacaccaggaugc

SEQ ID NO: 3919139 - RNA, 14 nt, Human adenovirus D
ggggcggcagaggc

SEQ ID NO: 3919140 - RNA, 15 nt, Human adenovirus D
ggggcgggucugugc

SEQ ID NO: 3919141 - RNA, 17 nt, Human adenovirus D
ggggcucguuaguccag

SEQ ID NO: 3919142 - RNA, 20 nt, Human adenovirus D
gggguauuacuaggcccagc

SEQ ID NO: 3919143 - RNA, 23 nt, Human adenovirus D
cgcggacgcgcucccggcggcag

SEQ ID NO: 3919144 - RNA, 19 nt, Human adenovirus D
cgcggaugaagugcgcgua

SEQ ID NO: 3919145 - RNA, 12 nt, Human adenovirus D
cgcggcagaacc

SEQ ID NO: 3919146 - RNA, 13 nt, Human adenovirus D
cgcggccgcccac

SEQ ID NO: 3919147 - RNA, 17 nt, Human adenovirus D
cgcggcgaaacgcucug

SEQ ID NO: 3919148 - RNA, 19 nt, Human adenovirus D
cgcggcggcgauaugccag

SEQ ID NO: 3919149 - RNA, 12 nt, Human adenovirus D
cgcgggaagagc

SEQ ID NO: 3919150 - RNA, 16 nt, Human adenovirus D
cgcgggcggccauugc

SEQ ID NO: 3919151 - RNA, 20 nt, Human adenovirus D
cgcgguaacguuccaucagc

SEQ ID NO: 3919152 - RNA, 19 nt, Human adenovirus D
cgcgguucauugacagcgu

SEQ ID NO: 3919153 - RNA, 18 nt, Human adenovirus D
cgcguaagcaggagcagg

SEQ ID NO: 3919154 - RNA, 17 nt, Human adenovirus D
cgcuaccgcuccaugcu

SEQ ID NO: 3919155 - RNA, 13 nt, Human adenovirus D
cgcuagccagcca

SEQ ID NO: 3919156 - RNA, 14 nt, Human adenovirus D
cgcuccgcugaaac

SEQ ID NO: 3919157 - RNA, 19 nt, Human adenovirus D
cgcuccucgcucuggggcc

SEQ ID NO: 3919158 - RNA, 23 nt, Human adenovirus D
cgcucgaucaucuccccgcggcg

SEQ ID NO: 3919159 - RNA, 21 nt, Human adenovirus D
cgcucggugacaaacaggcug

SEQ ID NO: 3919160 - RNA, 14 nt, Human adenovirus D
cgcucguucugccc

SEQ ID NO: 3919161 - RNA, 16 nt, Human adenovirus D
cgcucuggggcccggc

SEQ ID NO: 3919162 - RNA, 20 nt, Human adenovirus D
cgcugagcgacgaccugggc

SEQ ID NO: 3919163 - RNA, 16 nt, Human adenovirus D
cgcugcaaagccagcc

SEQ ID NO: 3919164 - RNA, 17 nt, Human adenovirus D
cgcugcaaagccagccg

SEQ ID NO: 3919165 - RNA, 16 nt, Human adenovirus D
cgcugcugcagccgcc

SEQ ID NO: 3919166 - RNA, 18 nt, Human adenovirus D
cgcugcugccgcucaguc

SEQ ID NO: 3919167 - RNA, 19 nt, Human adenovirus D
cgcugcugccgcucaguca

SEQ ID NO: 3919168 - RNA, 19 nt, Human adenovirus D
cgcuggucacauccaucuc

SEQ ID NO: 3919169 - RNA, 13 nt, Human adenovirus D
cgcuguggagcca

SEQ ID NO: 3919170 - RNA, 20 nt, Human adenovirus D
cgcuuggugggcagaggagg

SEQ ID NO: 3919171 - RNA, 18 nt, Human adenovirus D
cggacauauggaauuucu

SEQ ID NO: 3919172 - RNA, 14 nt, Human adenovirus D
cggaccggucccag

SEQ ID NO: 3919173 - RNA, 16 nt, Human adenovirus D
cggaccggucccagcg

SEQ ID NO: 3919174 - RNA, 16 nt, Human adenovirus D
cggacgugcgcgaagc

SEQ ID NO: 3919175 - RNA, 21 nt, Human adenovirus D
cggagcaagucuacuggucgc

SEQ ID NO: 3919176 - RNA, 13 nt, Human adenovirus D
cggagcuggcucc

SEQ ID NO: 3919177 - RNA, 15 nt, Human adenovirus D
cggaguaccugagcc

SEQ ID NO: 3919178 - RNA, 16 nt, Human adenovirus D
cggaguaccugagccg

SEQ ID NO: 3919179 - RNA, 14 nt, Human adenovirus D
cggcaaaaaucaca

SEQ ID NO: 3919180 - RNA, 15 nt, Human adenovirus D
cggcaccagccagcu

SEQ ID NO: 3919181 - RNA, 21 nt, Human adenovirus D
cggcaccugcgagcccaaccc

SEQ ID NO: 3919182 - RNA, 23 nt, Human adenovirus D
cggcacgcggccguucaugggca

SEQ ID NO: 3919183 - RNA, 21 nt, Human adenovirus D
cggcacggucuggccggugag

SEQ ID NO: 3919184 - RNA, 19 nt, Human adenovirus D
cggcagcggggccuggugu

SEQ ID NO: 3919185 - RNA, 17 nt, Human adenovirus D
cggcaguauaucaggug

SEQ ID NO: 3919186 - RNA, 17 nt, Human adenovirus D
cggcaucuuugacaugg

SEQ ID NO: 3919187 - RNA, 15 nt, Human adenovirus D
cggccagcagggugc

SEQ ID NO: 3919188 - RNA, 23 nt, Human adenovirus D
cggccagcgucauguccuuccag

SEQ ID NO: 3919189 - RNA, 17 nt, Human adenovirus D
cggccaugccccaggcc

SEQ ID NO: 3919190 - RNA, 17 nt, Human adenovirus D
aggacgcagcgugaaga

SEQ ID NO: 3919191 - RNA, 17 nt, Human adenovirus D
aggacuacaaggccguc

SEQ ID NO: 3919192 - RNA, 15 nt, Human adenovirus D
aggagaacugcuggc

SEQ ID NO: 3919193 - RNA, 19 nt, Human adenovirus D
aggagaacugcuggcccug

SEQ ID NO: 3919194 - RNA, 22 nt, Human adenovirus D
aggagaacugcuggcccugcug

SEQ ID NO: 3919195 - RNA, 13 nt, Human adenovirus D
aggagaccugcac

SEQ ID NO: 3919196 - RNA, 14 nt, Human adenovirus D
aggagcaggaggag

SEQ ID NO: 3919197 - RNA, 16 nt, Human adenovirus D
aggagcgaugggggca

SEQ ID NO: 3919198 - RNA, 22 nt, Human adenovirus D
aggaggacuuaaccacccacga

SEQ ID NO: 3919199 - RNA, 16 nt, Human adenovirus D
aggaggaugugcugcu

SEQ ID NO: 3919200 - RNA, 23 nt, Human adenovirus D
aggaggauuugauguuggcuugc

SEQ ID NO: 3919201 - RNA, 15 nt, Human adenovirus D
aggagggauugcagg

SEQ ID NO: 3919202 - RNA, 17 nt, Human adenovirus D
aggagggauugcagggc

SEQ ID NO: 3919203 - RNA, 16 nt, Human adenovirus D
aggaggggggccaccu

SEQ ID NO: 3919204 - RNA, 17 nt, Human adenovirus D
aggauaaauauggccug

SEQ ID NO: 3919205 - RNA, 22 nt, Human adenovirus D
aggauacgcgggaagagcccuu

SEQ ID NO: 3919206 - RNA, 20 nt, Human adenovirus D
aggauggucaucacccucag

SEQ ID NO: 3919207 - RNA, 17 nt, Human adenovirus D
aggcaaagaucaccuac

SEQ ID NO: 3919208 - RNA, 13 nt, Human adenovirus D
aggcaaugagagg

SEQ ID NO: 3919209 - RNA, 15 nt, Human adenovirus D
aggcaggacucgcag

SEQ ID NO: 3919210 - RNA, 12 nt, Human adenovirus D
aggcccagaacu

SEQ ID NO: 3919211 - RNA, 23 nt, Human adenovirus D
aggccgggcugcacgaccucgga

SEQ ID NO: 3919212 - RNA, 17 nt, Human adenovirus D
aggccgucacccugccc

SEQ ID NO: 3919213 - RNA, 18 nt, Human adenovirus D
aggccgugaaggccggca

SEQ ID NO: 3919214 - RNA, 18 nt, Human adenovirus D
aggccgugcugcucgagc

SEQ ID NO: 3919215 - RNA, 13 nt, Human adenovirus D
aggccuggcccug

SEQ ID NO: 3919216 - RNA, 17 nt, Human adenovirus D
aggcgcaaccaggagga

SEQ ID NO: 3919217 - RNA, 17 nt, Human adenovirus D
aggcgcccagccagcaa

SEQ ID NO: 3919218 - RNA, 23 nt, Human adenovirus D
aggcgcgcguccacgccaagaca

SEQ ID NO: 3919219 - RNA, 19 nt, Human adenovirus D
aggcggcggucaccucaac

SEQ ID NO: 3919220 - RNA, 19 nt, Human adenovirus D
aggcgggacagaggaggga

SEQ ID NO: 3919221 - RNA, 12 nt, Human adenovirus D
aggcgugcacug

SEQ ID NO: 3919222 - RNA, 21 nt, Human adenovirus D
agggaaaagcucaaagaccag

SEQ ID NO: 3919223 - RNA, 13 nt, Human adenovirus D
agggacagcagcc

SEQ ID NO: 3919224 - RNA, 12 nt, Human adenovirus D
agggagccaggg

SEQ ID NO: 3919225 - RNA, 22 nt, Human adenovirus D
agggaugaguugggccugaugc

SEQ ID NO: 3919226 - RNA, 21 nt, Human adenovirus D
agggcacagccucucugaagc

SEQ ID NO: 3919227 - RNA, 22 nt, Human adenovirus D
agggcaucuucugccuggucaa

SEQ ID NO: 3919228 - RNA, 17 nt, Human adenovirus D
agggcgaccagcucugg

SEQ ID NO: 3919229 - RNA, 15 nt, Human adenovirus D
agggcgaggcgcggc

SEQ ID NO: 3919230 - RNA, 17 nt, Human adenovirus D
agggcguagagcuuggg

SEQ ID NO: 3919231 - RNA, 20 nt, Human adenovirus D
agggcuuccacgugcccgag

SEQ ID NO: 3919232 - RNA, 13 nt, Human adenovirus D
aggggacgugagc

SEQ ID NO: 3919233 - RNA, 15 nt, Human adenovirus D
aggggagugaagagg

SEQ ID NO: 3919234 - RNA, 21 nt, Human adenovirus D
aggggauguugaucagucagu

SEQ ID NO: 3919235 - RNA, 21 nt, Human adenovirus D
agggggacuuacuuugcaaga

SEQ ID NO: 3919236 - RNA, 14 nt, Human adenovirus D
agggggcgggucug

SEQ ID NO: 3919237 - RNA, 14 nt, Human adenovirus D
aggguugaaagauu

SEQ ID NO: 3919238 - RNA, 13 nt, Human adenovirus D
agguacaugggca

SEQ ID NO: 3919239 - RNA, 16 nt, Human adenovirus D
aggucaaaacccacuc

SEQ ID NO: 3919240 - RNA, 17 nt, Human adenovirus D
aggucagcagcaagagc

SEQ ID NO: 3919241 - RNA, 21 nt, Human adenovirus D
aggucccgguguugcgcccug

SEQ ID NO: 3919242 - RNA, 19 nt, Human adenovirus D
aggucuaaaaaccccgcca

SEQ ID NO: 3919243 - RNA, 14 nt, Human adenovirus D
aggucucgcuccac

SEQ ID NO: 3919244 - RNA, 14 nt, Human adenovirus D
aggucugcugguag

SEQ ID NO: 3919245 - RNA, 13 nt, Human adenovirus D
aggucuggggcgc

SEQ ID NO: 3919246 - RNA, 21 nt, Human adenovirus D
aggugacaaagagccgcuccg

SEQ ID NO: 3919247 - RNA, 14 nt, Human adenovirus D
aggugagcucgggc

SEQ ID NO: 3919248 - RNA, 21 nt, Human adenovirus D
aggugagcucgggcugcucgg

SEQ ID NO: 3919249 - RNA, 11 nt, Human adenovirus D
aggugcugccc

SEQ ID NO: 3919250 - RNA, 13 nt, Human adenovirus D
aggugcugcccca

SEQ ID NO: 3919251 - RNA, 13 nt, Human adenovirus D
aggugcuggcgau

SEQ ID NO: 3919252 - RNA, 15 nt, Human adenovirus D
agguggacgagcaga

SEQ ID NO: 3919253 - RNA, 18 nt, Human adenovirus D
agguggacgagcagaccu

SEQ ID NO: 3919254 - RNA, 17 nt, Human adenovirus D
agguggacgagccgccu

SEQ ID NO: 3919255 - RNA, 24 nt, Human adenovirus D
agguggacgagggggcaguagagu

SEQ ID NO: 3919256 - RNA, 14 nt, Human adenovirus D
agguggcuauuuuc

SEQ ID NO: 3919257 - RNA, 15 nt, Human adenovirus D
agguguaggccacgu

SEQ ID NO: 3919258 - RNA, 14 nt, Human adenovirus D
aggugucccugacc

SEQ ID NO: 3919259 - RNA, 15 nt, Human adenovirus D
agguguuggcaaagc

SEQ ID NO: 3919260 - RNA, 22 nt, Human adenovirus D
aguacaagcgccaacagcagcg

SEQ ID NO: 3919261 - RNA, 18 nt, Human adenovirus D
aguacauagugaccaaga

SEQ ID NO: 3919262 - RNA, 16 nt, Human adenovirus D
aguacauguucaccag

SEQ ID NO: 3919263 - RNA, 23 nt, Human adenovirus D
aguacgacaugcccgaccccaac

SEQ ID NO: 3919264 - RNA, 13 nt, Human adenovirus D
aguacgaggccau

SEQ ID NO: 3919265 - RNA, 20 nt, Human adenovirus D
aguaggacauggauuaaaaa

SEQ ID NO: 3919266 - RNA, 20 nt, Human adenovirus D
aguaugccaagauagcccug

SEQ ID NO: 3919267 - RNA, 20 nt, Human adenovirus D
aguaugucccuggcauggua

SEQ ID NO: 3919268 - RNA, 17 nt, Human adenovirus D
aguauugugggccuggg

SEQ ID NO: 3919269 - RNA, 22 nt, Human adenovirus D
agucaaucucccaccaccagcc

SEQ ID NO: 3919270 - RNA, 13 nt, Human adenovirus D
agucaggagcagc

SEQ ID NO: 3919271 - RNA, 11 nt, Human adenovirus D
agucaggcagg

SEQ ID NO: 3919272 - RNA, 14 nt, Human adenovirus D
aguccaccgcuccg

SEQ ID NO: 3919273 - RNA, 17 nt, Human adenovirus D
aguccagcagagucugc

SEQ ID NO: 3919274 - RNA, 19 nt, Human adenovirus D
agucugagggccacccuga

SEQ ID NO: 3919275 - RNA, 22 nt, Human adenovirus D
agugcuuacucuauaacauuug

SEQ ID NO: 3919276 - RNA, 18 nt, Human adenovirus D
aguggcaacaccugggca

SEQ ID NO: 3919277 - RNA, 16 nt, Human adenovirus D
aguucagcuccagugg

SEQ ID NO: 3919278 - RNA, 22 nt, Human adenovirus D
aguugacggucugcaggccggg

SEQ ID NO: 3919279 - RNA, 13 nt, Human adenovirus D
aguuggaggagau

SEQ ID NO: 3919280 - RNA, 18 nt, Human adenovirus D
aguugggccuccaggaau

SEQ ID NO: 3919281 - RNA, 13 nt, Human adenovirus D
aguugguccagau

SEQ ID NO: 3919282 - RNA, 16 nt, Human adenovirus D
aguuggugagcucuuc

SEQ ID NO: 3919283 - RNA, 16 nt, Human adenovirus D
aguuguaaugaucaaa

SEQ ID NO: 3919284 - RNA, 22 nt, Human adenovirus D
aguuucaaacccuacucgggca

SEQ ID NO: 3919285 - RNA, 23 nt, Human adenovirus D
aguuugcauagcuugccgggcuc

SEQ ID NO: 3919286 - RNA, 17 nt, Human adenovirus D
aguuuuucauccagaau

SEQ ID NO: 3919287 - RNA, 15 nt, Human adenovirus D
auaaagaauaugcca

SEQ ID NO: 3919288 - RNA, 19 nt, Human adenovirus D
auaaaguuuuucauccaga

SEQ ID NO: 3919289 - RNA, 14 nt, Human adenovirus D
auaagguucugccc

SEQ ID NO: 3919290 - RNA, 22 nt, Human adenovirus D
auaaguuaggguguaaguguga

SEQ ID NO: 3919291 - RNA, 12 nt, Human adenovirus D
auacaagccagg

SEQ ID NO: 3919292 - RNA, 20 nt, Human adenovirus D
auacagaugguagcagcaga

SEQ ID NO: 3919293 - RNA, 17 nt, Human adenovirus D
auagcaggggcgcuggg

SEQ ID NO: 3919294 - RNA, 13 nt, Human adenovirus D
auaguaaagaaac

SEQ ID NO: 3919295 - RNA, 17 nt, Human adenovirus D
aucaaaacgaccacagc

SEQ ID NO: 3919296 - RNA, 23 nt, Human adenovirus D
cgccccugcaagugcacagaccc

SEQ ID NO: 3919297 - RNA, 16 nt, Human adenovirus D
cgcccgacacugcagg

SEQ ID NO: 3919298 - RNA, 16 nt, Human adenovirus D
cgcccgagcucugcug

SEQ ID NO: 3919299 - RNA, 15 nt, Human adenovirus D
cgcccgccgccaggc

SEQ ID NO: 3919300 - RNA, 13 nt, Human adenovirus D
cgcccgcgccgcg

SEQ ID NO: 3919301 - RNA, 13 nt, Human adenovirus D
cgcccggggccag

SEQ ID NO: 3919302 - RNA, 15 nt, Human adenovirus D
cgcccucagcagucu

SEQ ID NO: 3919303 - RNA, 12 nt, Human adenovirus D
cgcccugagagc

SEQ ID NO: 3919304 - RNA, 20 nt, Human adenovirus D
cgccgaggagaacugcuggc

SEQ ID NO: 3919305 - RNA, 22 nt, Human adenovirus D
cgccgauuuaaagacccacagc

SEQ ID NO: 3919306 - RNA, 15 nt, Human adenovirus D
cgccgcaccauccgc

SEQ ID NO: 3919307 - RNA, 13 nt, Human adenovirus D
cgccgcaccuguc

SEQ ID NO: 3919308 - RNA, 16 nt, Human adenovirus D
cgccgccacugcaccc

SEQ ID NO: 3919309 - RNA, 14 nt, Human adenovirus D
cgccgccaggccca

SEQ ID NO: 3919310 - RNA, 14 nt, Human adenovirus D
cgccgccgccgcac

SEQ ID NO: 3919311 - RNA, 17 nt, Human adenovirus D
cgccgcgccgccacugc

SEQ ID NO: 3919312 - RNA, 15 nt, Human adenovirus D
cgccgcggccaucuc

SEQ ID NO: 3919313 - RNA, 17 nt, Human adenovirus D
cgccgcuaucugcucuu

SEQ ID NO: 3919314 - RNA, 19 nt, Human adenovirus D
cgccgcuguggagccacug

SEQ ID NO: 3919315 - RNA, 20 nt, Human adenovirus D
cgccgcuguggagccacugc

SEQ ID NO: 3919316 - RNA, 22 nt, Human adenovirus D
cgccggcgcuagccagccacag

SEQ ID NO: 3919317 - RNA, 22 nt, Human adenovirus D
cgccggcggcgggccaugcgca

SEQ ID NO: 3919318 - RNA, 14 nt, Human adenovirus D
cgccggcucaagca

SEQ ID NO: 3919319 - RNA, 15 nt, Human adenovirus D
cgccuccacccugga

SEQ ID NO: 3919320 - RNA, 16 nt, Human adenovirus D
cgccucggaccuggcc

SEQ ID NO: 3919321 - RNA, 18 nt, Human adenovirus D
cgccugaggcagacgcug

SEQ ID NO: 3919322 - RNA, 14 nt, Human adenovirus D
cgccugcuugcaag

SEQ ID NO: 3919323 - RNA, 19 nt, Human adenovirus D
cgccuucaccgaccugggu

SEQ ID NO: 3919324 - RNA, 16 nt, Human adenovirus D
cgcgaacagcagcagc

SEQ ID NO: 3919325 - RNA, 14 nt, Human adenovirus D
cgcgacccccaggc

SEQ ID NO: 3919326 - RNA, 20 nt, Human adenovirus D
cgcgagcaagggcgaccagc

SEQ ID NO: 3919327 - RNA, 21 nt, Human adenovirus D
cgcgagcugaugcugagccug

SEQ ID NO: 3919328 - RNA, 17 nt, Human adenovirus D
cgcgaggacaccaguac

SEQ ID NO: 3919329 - RNA, 15 nt, Human adenovirus D
cgcgaggacgcagcg

SEQ ID NO: 3919330 - RNA, 18 nt, Human adenovirus D
cgcgaggagguggcccug

SEQ ID NO: 3919331 - RNA, 22 nt, Human adenovirus D
cgcgaggagguggcccugggcc

SEQ ID NO: 3919332 - RNA, 17 nt, Human adenovirus D
cgcgaggccauaggcca

SEQ ID NO: 3919333 - RNA, 21 nt, Human adenovirus D
cgcgagggccuggaccgccag

SEQ ID NO: 3919334 - RNA, 17 nt, Human adenovirus D
cgcgauguugagcugga

SEQ ID NO: 3919335 - RNA, 16 nt, Human adenovirus D
cgcgcaacugggccgc

SEQ ID NO: 3919336 - RNA, 23 nt, Human adenovirus D
cgcgcaucaucgcgccacuggcc

SEQ ID NO: 3919337 - RNA, 17 nt, Human adenovirus D
cgcgcaugaccaccugc

SEQ ID NO: 3919338 - RNA, 12 nt, Human adenovirus D
cgcgccacuccc

SEQ ID NO: 3919339 - RNA, 14 nt, Human adenovirus D
cgcgcccacccgga

SEQ ID NO: 3919340 - RNA, 14 nt, Human adenovirus D
cgcgcccgcagcac

SEQ ID NO: 3919341 - RNA, 17 nt, Human adenovirus D
cgcgcccggggccaggu

SEQ ID NO: 3919342 - RNA, 21 nt, Human adenovirus D
cgcgcccuucaccgacagugg

SEQ ID NO: 3919343 - RNA, 12 nt, Human adenovirus D
cgcgccgcggcg

SEQ ID NO: 3919344 - RNA, 14 nt, Human adenovirus D
cgcgcgccgcgccg

SEQ ID NO: 3919345 - RNA, 13 nt, Human adenovirus D
cgcgcgcugcccg

SEQ ID NO: 3919346 - RNA, 18 nt, Human adenovirus D
cgcgcgguaggcccuggu

SEQ ID NO: 3919347 - RNA, 14 nt, Human adenovirus D
cgcgcuccacggug

SEQ ID NO: 3919348 - RNA, 16 nt, Human adenovirus D
cgcgcuccacgguggc

SEQ ID NO: 3919349 - RNA, 18 nt, Human adenovirus D
cgcgcuggggagggccac

SEQ ID NO: 3919350 - RNA, 16 nt, Human adenovirus D
cgcgcuugcugggcga

SEQ ID NO: 3919351 - RNA, 17 nt, Human adenovirus D
cgcggaucucacggccu

SEQ ID NO: 3919352 - RNA, 15 nt, Human adenovirus D
cgcggcacggcacgc

SEQ ID NO: 3919353 - RNA, 19 nt, Human adenovirus D
cgcggccagcgucaugucc

SEQ ID NO: 3919354 - RNA, 20 nt, Human adenovirus D
cgcggcgggggcggagagcg

SEQ ID NO: 3919355 - RNA, 12 nt, Human adenovirus D
cgcggcugcugc

SEQ ID NO: 3919356 - RNA, 13 nt, Human adenovirus D
cgcggcugcugcu

SEQ ID NO: 3919357 - RNA, 16 nt, Human adenovirus D
cgcgggaagagcccuu

SEQ ID NO: 3919358 - RNA, 17 nt, Human adenovirus D
cgcgggcggacugccac

SEQ ID NO: 3919359 - RNA, 21 nt, Human adenovirus D
cgcgggcuguggggcgugcag

SEQ ID NO: 3919360 - RNA, 24 nt, Human adenovirus D
cgcguaaauuggaaggggcgcagg

SEQ ID NO: 3919361 - RNA, 18 nt, Human adenovirus D
cgcgucauggcuggucag

SEQ ID NO: 3919362 - RNA, 15 nt, Human adenovirus D
cgcgugacgcacugg

SEQ ID NO: 3919363 - RNA, 16 nt, Human adenovirus D
cgcgugacgcacuggc

SEQ ID NO: 3919364 - RNA, 13 nt, Human adenovirus D
cgcguggaggaag

SEQ ID NO: 3919365 - RNA, 21 nt, Human adenovirus D
cgcguggaggaagugcuggac

SEQ ID NO: 3919366 - RNA, 17 nt, Human adenovirus D
cgcguucucacuuccuc

SEQ ID NO: 3919367 - RNA, 12 nt, Human adenovirus D
cgcuagccagcc

SEQ ID NO: 3919368 - RNA, 24 nt, Human adenovirus D
cgcucaggaccauagggagccugc

SEQ ID NO: 3919369 - RNA, 17 nt, Human adenovirus D
cgcuccaccgaaggcag

SEQ ID NO: 3919370 - RNA, 23 nt, Human adenovirus D
cgcuccgugcgaggaugagagcc

SEQ ID NO: 3919371 - RNA, 16 nt, Human adenovirus D
cgcucgggcagguccc

SEQ ID NO: 3919372 - RNA, 16 nt, Human adenovirus D
cgcugagcuaccgcga

SEQ ID NO: 3919373 - RNA, 16 nt, Human adenovirus D
cgcugccggaccucau

SEQ ID NO: 3919374 - RNA, 15 nt, Human adenovirus D
cgcugcugcagccgc

SEQ ID NO: 3919375 - RNA, 12 nt, Human adenovirus D
cgcuggccagca

SEQ ID NO: 3919376 - RNA, 14 nt, Human adenovirus D
cgcuggccagcacg

SEQ ID NO: 3919377 - RNA, 13 nt, Human adenovirus D
cgcuggggcagaa

SEQ ID NO: 3919378 - RNA, 14 nt, Human adenovirus D
cgcuggggcugcuc

SEQ ID NO: 3919379 - RNA, 20 nt, Human adenovirus D
cgcugguagggggcgccgcc

SEQ ID NO: 3919380 - RNA, 17 nt, Human adenovirus D
cgcuucuuaccucgcgu

SEQ ID NO: 3919381 - RNA, 19 nt, Human adenovirus D
cgcuuggugggcagaggag

SEQ ID NO: 3919382 - RNA, 12 nt, Human adenovirus D
cggaaaacagga

SEQ ID NO: 3919383 - RNA, 17 nt, Human adenovirus D
cggaaacgccaccaccu

SEQ ID NO: 3919384 - RNA, 16 nt, Human adenovirus D
cggaccccgccauaag

SEQ ID NO: 3919385 - RNA, 23 nt, Human adenovirus D
cggaccugcauuggcagccgagc

SEQ ID NO: 3919386 - RNA, 17 nt, Human adenovirus D
cggacgacugggaggcu

SEQ ID NO: 3919387 - RNA, 17 nt, Human adenovirus D
cggacguggugcugcug

SEQ ID NO: 3919388 - RNA, 18 nt, Human adenovirus D
cggacguggugcugcugc

SEQ ID NO: 3919389 - RNA, 15 nt, Human adenovirus D
cggacugccaccgcc

SEQ ID NO: 3919390 - RNA, 20 nt, Human adenovirus D
cggaggccaucgugcagaac

SEQ ID NO: 3919391 - RNA, 13 nt, Human adenovirus D
cggaggcuggcug

SEQ ID NO: 3919392 - RNA, 14 nt, Human adenovirus D
cggagggcagaaac

SEQ ID NO: 3919393 - RNA, 16 nt, Human adenovirus D
cggaguggccucucgc

SEQ ID NO: 3919394 - RNA, 20 nt, Human adenovirus D
cggcaaaauggcgugcugga

SEQ ID NO: 3919395 - RNA, 22 nt, Human adenovirus D
cggcaaaauggcgugcuggaga

SEQ ID NO: 3919396 - RNA, 22 nt, Human adenovirus D
cggcaaucaacuacucggugcu

SEQ ID NO: 3919397 - RNA, 11 nt, Human adenovirus D
cggcaccugcg

SEQ ID NO: 3919398 - RNA, 20 nt, Human adenovirus D
cggcagggugagccggccgc

SEQ ID NO: 3919399 - RNA, 15 nt, Human adenovirus D
cggccaaggccacca

SEQ ID NO: 3919400 - RNA, 19 nt, Human adenovirus D
cggccaaucagcaguagcc

SEQ ID NO: 3919401 - RNA, 20 nt, Human adenovirus D
cggccaauguuacgcugccc

SEQ ID NO: 3919402 - RNA, 13 nt, Human adenovirus D
cggccaccagucc

SEQ ID NO: 3919403 - RNA, 17 nt, Human adenovirus D
cggccauucuggaggcg

SEQ ID NO: 3919404 - RNA, 21 nt, Human adenovirus D
cggccauucuggaggcggugg

SEQ ID NO: 3919405 - RNA, 19 nt, Human adenovirus D
cggcccggcacggcggugg

SEQ ID NO: 3919406 - RNA, 16 nt, Human adenovirus D
cggccgaaaaccccgc

SEQ ID NO: 3919407 - RNA, 17 nt, Human adenovirus D
cggccgaggaggagcgc

SEQ ID NO: 3919408 - RNA, 17 nt, Human adenovirus D
  misc_feature (8)..(8): n is a, c, g, or u
cggccgangggagucgc

SEQ ID NO: 3919409 - RNA, 12 nt, Human adenovirus D
cggccgccgccg

SEQ ID NO: 3919410 - RNA, 16 nt, Human adenovirus D
cggccgcggcgagcgg

SEQ ID NO: 3919411 - RNA, 17 nt, Human adenovirus D
cggccguucaugggcac

SEQ ID NO: 3919412 - RNA, 17 nt, Human adenovirus D
cggccugaaccgccgcc

SEQ ID NO: 3919413 - RNA, 22 nt, Human adenovirus D
cggccugcgucaucacccaggg

SEQ ID NO: 3919414 - RNA, 21 nt, Human adenovirus D
cggccuuguagggacagcagc

SEQ ID NO: 3919415 - RNA, 22 nt, Human adenovirus D
cggcgaugacugaccaccaccu

SEQ ID NO: 3919416 - RNA, 13 nt, Human adenovirus D
cggcgcaggggca

SEQ ID NO: 3919417 - RNA, 20 nt, Human adenovirus D
cggcgcgcccggggccaggu

SEQ ID NO: 3919418 - RNA, 12 nt, Human adenovirus D
cggcgcggagca

SEQ ID NO: 3919419 - RNA, 21 nt, Human adenovirus D
cggcgcuuggugggcagagga

SEQ ID NO: 3919420 - RNA, 22 nt, Human adenovirus D
cggcgcuuggugggcagaggag

SEQ ID NO: 3919421 - RNA, 15 nt, Human adenovirus D
cggcggcgcuucccg

SEQ ID NO: 3919422 - RNA, 20 nt, Human adenovirus D
cggcguggcgcucgggcagg

SEQ ID NO: 3919423 - RNA, 11 nt, Human adenovirus D
cggcugcugcu

SEQ ID NO: 3919424 - RNA, 17 nt, Human adenovirus D
cggcuuacaacagccuu

SEQ ID NO: 3919425 - RNA, 14 nt, Human adenovirus D
cgggaucaagcgcg

SEQ ID NO: 3919426 - RNA, 16 nt, Human adenovirus D
cgggccccggggcgaa

SEQ ID NO: 3919427 - RNA, 19 nt, Human adenovirus D
cgggccugggcgugcagac

SEQ ID NO: 3919428 - RNA, 19 nt, Human adenovirus D
cgggcgccucccaggacua

SEQ ID NO: 3919429 - RNA, 22 nt, Human adenovirus D
cgggcggcgaacuuucuccaca

SEQ ID NO: 3919430 - RNA, 14 nt, Human adenovirus D
cgggcuaccgcggc

SEQ ID NO: 3919431 - RNA, 21 nt, Human adenovirus D
cgggcugcuucugccugguga

SEQ ID NO: 3919432 - RNA, 19 nt, Human adenovirus D
cggggaaggucucgcucca

SEQ ID NO: 3919433 - RNA, 18 nt, Human adenovirus D
cggggccacgaccgugcc

SEQ ID NO: 3919434 - RNA, 21 nt, Human adenovirus D
cggggccuucgaaggggggcu

SEQ ID NO: 3919435 - RNA, 22 nt, Human adenovirus D
cggggcucggugcggcugcugc

SEQ ID NO: 3919436 - RNA, 15 nt, Human adenovirus D
cgggggcagacacac

SEQ ID NO: 3919437 - RNA, 22 nt, Human adenovirus D
cggggguucauguugugcagga

SEQ ID NO: 3919438 - RNA, 23 nt, Human adenovirus D
cggggguucauguugugcaggac

SEQ ID NO: 3919439 - RNA, 16 nt, Human adenovirus D
cgggguugcagcacug

SEQ ID NO: 3919440 - RNA, 21 nt, Human adenovirus D
cggguauaaaaacccugguga

SEQ ID NO: 3919441 - RNA, 22 nt, Human adenovirus D
cggguauaaaaacccuggugau

SEQ ID NO: 3919442 - RNA, 15 nt, Human adenovirus D
cgggugagggcgugc

SEQ ID NO: 3919443 - RNA, 15 nt, Human adenovirus D
cgggugaugguggcu

SEQ ID NO: 3919444 - RNA, 21 nt, Human adenovirus D
cgggugcuagacauggccagc

SEQ ID NO: 3919445 - RNA, 22 nt, Human adenovirus D
cgguacacgggguugcagcacu

SEQ ID NO: 3919446 - RNA, 15 nt, Human adenovirus D
cggucaggagcaagc

SEQ ID NO: 3919447 - RNA, 13 nt, Human adenovirus D
cgguccccgaggc

SEQ ID NO: 3919448 - RNA, 21 nt, Human adenovirus D
cgguggauuuuuuccaagacc

SEQ ID NO: 3919449 - RNA, 15 nt, Human adenovirus D
cgguugugcagcccc

SEQ ID NO: 3919450 - RNA, 14 nt, Human adenovirus D
cguaagcaggagca

SEQ ID NO: 3919451 - RNA, 17 nt, Human adenovirus D
cguaagcaggagcagga

SEQ ID NO: 3919452 - RNA, 23 nt, Human adenovirus D
cgucaaccucccgcccaagguca

SEQ ID NO: 3919453 - RNA, 20 nt, Human adenovirus D
cgucacccugcccuuccagc

SEQ ID NO: 3919454 - RNA, 21 nt, Human adenovirus D
cgucacggugaaggggugggc

SEQ ID NO: 3919455 - RNA, 15 nt, Human adenovirus D
cgucaggcaggcaug

SEQ ID NO: 3919456 - RNA, 15 nt, Human adenovirus D
cgucaucacccaggg

SEQ ID NO: 3919457 - RNA, 11 nt, Human adenovirus D
cgucccagcag

SEQ ID NO: 3919458 - RNA, 14 nt, Human adenovirus D
cgucccagcagcac

SEQ ID NO: 3919459 - RNA, 13 nt, Human adenovirus D
cgucccaggaaac

SEQ ID NO: 3919460 - RNA, 15 nt, Human adenovirus D
cgucccgacgaggcc

SEQ ID NO: 3919461 - RNA, 13 nt, Human adenovirus D
cguccgcggccac

SEQ ID NO: 3919462 - RNA, 14 nt, Human adenovirus D
cguccgucagcagc

SEQ ID NO: 3919463 - RNA, 13 nt, Human adenovirus D
cguccuggaccgc

SEQ ID NO: 3919464 - RNA, 16 nt, Human adenovirus D
cgucgacggcgccucc

SEQ ID NO: 3919465 - RNA, 15 nt, Human adenovirus D
cgucgagcacagcac

SEQ ID NO: 3919466 - RNA, 17 nt, Human adenovirus D
cgucgcuguccacgagc

SEQ ID NO: 3919467 - RNA, 15 nt, Human adenovirus D
cgucgcuugacagca

SEQ ID NO: 3919468 - RNA, 12 nt, Human adenovirus D
cgucggaagagg

SEQ ID NO: 3919469 - RNA, 13 nt, Human adenovirus D
cgucggaagagga

SEQ ID NO: 3919470 - RNA, 15 nt, Human adenovirus D
cgucggaagaggagu

SEQ ID NO: 3919471 - RNA, 15 nt, Human adenovirus D
cgucggccaugggca

SEQ ID NO: 3919472 - RNA, 23 nt, Human adenovirus D
cgucuacacagacaaacauccau

SEQ ID NO: 3919473 - RNA, 14 nt, Human adenovirus D
cgucuacucccagc

SEQ ID NO: 3919474 - RNA, 17 nt, Human adenovirus D
cgucugaaaaccaagga

SEQ ID NO: 3919475 - RNA, 20 nt, Human adenovirus D
cgucugacugccgccggcca

SEQ ID NO: 3919476 - RNA, 15 nt, Human adenovirus D
cgugaacgcgcuggc

SEQ ID NO: 3919477 - RNA, 19 nt, Human adenovirus D
cgugaccugcagcaggugc

SEQ ID NO: 3919478 - RNA, 12 nt, Human adenovirus D
cgugcaggcgcc

SEQ ID NO: 3919479 - RNA, 20 nt, Human adenovirus D
cgugccauccgucacccaga

SEQ ID NO: 3919480 - RNA, 12 nt, Human adenovirus D
cgugccugcucu

SEQ ID NO: 3919481 - RNA, 17 nt, Human adenovirus D
cgugcgcgaccugggcu

SEQ ID NO: 3919482 - RNA, 21 nt, Human adenovirus D
cguggacgcugcucaccaccc

SEQ ID NO: 3919483 - RNA, 21 nt, Human adenovirus D
cguggccucuucgcccgaccg

SEQ ID NO: 3919484 - RNA, 14 nt, Human adenovirus D
cguggugcugcugc

SEQ ID NO: 3919485 - RNA, 15 nt, Human adenovirus D
cguggugcuggauga

SEQ ID NO: 3919486 - RNA, 16 nt, Human adenovirus D
cguguaccgcaacgac

SEQ ID NO: 3919487 - RNA, 16 nt, Human adenovirus D
cguuccaucagcacgu

SEQ ID NO: 3919488 - RNA, 16 nt, Human adenovirus D
cuaacuuauacuacca

SEQ ID NO: 3919489 - RNA, 21 nt, Human adenovirus D
cuaaugacaaacaaaagccau

SEQ ID NO: 3919490 - RNA, 12 nt, Human adenovirus D
cuacaaggccgu

SEQ ID NO: 3919491 - RNA, 20 nt, Human adenovirus D
cuacaaucgccacaggugcu

SEQ ID NO: 3919492 - RNA, 13 nt, Human adenovirus D
cuacagaaacauc

SEQ ID NO: 3919493 - RNA, 16 nt, Human adenovirus D
cuacagccagcagcuc

SEQ ID NO: 3919494 - RNA, 17 nt, Human adenovirus D
cuacaugcccagcagca

SEQ ID NO: 3919495 - RNA, 13 nt, Human adenovirus D
cuacauucuggac

SEQ ID NO: 3919496 - RNA, 15 nt, Human adenovirus D
cuaccacgcccauga

SEQ ID NO: 3919497 - RNA, 16 nt, Human adenovirus D
cuaccagggcuuccac

SEQ ID NO: 3919498 - RNA, 19 nt, Human adenovirus D
cuacccacugacuuagcuc

SEQ ID NO: 3919499 - RNA, 16 nt, Human adenovirus D
cuaccgggacccugag

SEQ ID NO: 3919500 - RNA, 12 nt, Human adenovirus D
cuaccugggagg

SEQ ID NO: 3919501 - RNA, 15 nt, Human adenovirus D
cuaccugggaggaga

SEQ ID NO: 3919502 - RNA, 15 nt, Human adenovirus D
cuacggagggcagaa

SEQ ID NO: 3919503 - RNA, 20 nt, Human adenovirus D
cuacggagggcagaaacagc

SEQ ID NO: 3919504 - RNA, 21 nt, Human adenovirus D
cuacggcaucucgauccagca

SEQ ID NO: 3919505 - RNA, 22 nt, Human adenovirus D
cuacggcaucucgauccagcag

SEQ ID NO: 3919506 - RNA, 20 nt, Human adenovirus D
cuacugcaucuguccaaccc

SEQ ID NO: 3919507 - RNA, 19 nt, Human adenovirus D
cuagacauggccagcacgu

SEQ ID NO: 3919508 - RNA, 22 nt, Human adenovirus D
cuaggaagugcggcggcggcug

SEQ ID NO: 3919509 - RNA, 17 nt, Human adenovirus D
cuauaaaaacaacaaaa

SEQ ID NO: 3919510 - RNA, 19 nt, Human adenovirus D
cuauacgggcgaguacgac

SEQ ID NO: 3919511 - RNA, 15 nt, Human adenovirus D
cuaucuaugaaagca

SEQ ID NO: 3919512 - RNA, 18 nt, Human adenovirus D
cuaugagaugccccagca

SEQ ID NO: 3919513 - RNA, 19 nt, Human adenovirus D
cuaugagaugccccagcag

SEQ ID NO: 3919514 - RNA, 14 nt, Human adenovirus D
cuauuacugccacu

SEQ ID NO: 3919515 - RNA, 16 nt, Human adenovirus D
cucaaagaccagaacu

SEQ ID NO: 3919516 - RNA, 22 nt, Human adenovirus D
cucaaagaccagaacuuccagc

SEQ ID NO: 3919517 - RNA, 12 nt, Human adenovirus D
cucaacaucaca

SEQ ID NO: 3919518 - RNA, 21 nt, Human adenovirus D
cucaacaucacauucaaaaac

SEQ ID NO: 3919519 - RNA, 16 nt, Human adenovirus D
cucaacgcccaggcaa

SEQ ID NO: 3919520 - RNA, 18 nt, Human adenovirus D
cucaauaaacagcacuuu

SEQ ID NO: 3919521 - RNA, 19 nt, Human adenovirus D
cucacaguaagugcagcac

SEQ ID NO: 3919522 - RNA, 21 nt, Human adenovirus D
cucacaguaagugcagcacau

SEQ ID NO: 3919523 - RNA, 18 nt, Human adenovirus D
cucacaguccaggucaca

SEQ ID NO: 3919524 - RNA, 14 nt, Human adenovirus D
cucacccuggggcu

SEQ ID NO: 3919525 - RNA, 22 nt, Human adenovirus D
cucacccuggggcuccucgagg

SEQ ID NO: 3919526 - RNA, 17 nt, Human adenovirus D
cucagcagucucugccg

SEQ ID NO: 3919527 - RNA, 20 nt, Human adenovirus D
cucagcgucgaggagcugug

SEQ ID NO: 3919528 - RNA, 18 nt, Human adenovirus D
cuccaccgaaggcagcuc

SEQ ID NO: 3919529 - RNA, 16 nt, Human adenovirus D
cuccacgugccgcgcg

SEQ ID NO: 3919530 - RNA, 15 nt, Human adenovirus D
cuccacucgacccug

SEQ ID NO: 3919531 - RNA, 21 nt, Human adenovirus D
cucccaacucugguacuccag

SEQ ID NO: 3919532 - RNA, 13 nt, Human adenovirus D
cucccaaguucaa

SEQ ID NO: 3919533 - RNA, 15 nt, Human adenovirus D
cucccaccaccagcc

SEQ ID NO: 3919534 - RNA, 15 nt, Human adenovirus D
cucccucguacgaga

SEQ ID NO: 3919535 - RNA, 23 nt, Human adenovirus D
auccagaauucaaccacaccugu

SEQ ID NO: 3919536 - RNA, 19 nt, Human adenovirus D
auccagcggcgcaggggca

SEQ ID NO: 3919537 - RNA, 18 nt, Human adenovirus D
auccaguuaaugcugccu

SEQ ID NO: 3919538 - RNA, 14 nt, Human adenovirus D
aucccaacagccuu

SEQ ID NO: 3919539 - RNA, 14 nt, Human adenovirus D
aucccgccgcagga

SEQ ID NO: 3919540 - RNA, 15 nt, Human adenovirus D
aucccggccaaggcc

SEQ ID NO: 3919541 - RNA, 18 nt, Human adenovirus D
auccgcagcuacaccucc

SEQ ID NO: 3919542 - RNA, 21 nt, Human adenovirus D
auccgcagcuacaccucccuc

SEQ ID NO: 3919543 - RNA, 13 nt, Human adenovirus D
auccgugugcugu

SEQ ID NO: 3919544 - RNA, 17 nt, Human adenovirus D
auccugaucucugccau

SEQ ID NO: 3919545 - RNA, 19 nt, Human adenovirus D
auccugaucucugccaugu

SEQ ID NO: 3919546 - RNA, 12 nt, Human adenovirus D
aucgccgagccc

SEQ ID NO: 3919547 - RNA, 14 nt, Human adenovirus D
aucgcgcaggaggc

SEQ ID NO: 3919548 - RNA, 22 nt, Human adenovirus D
aucgcggcggccaucggcacga

SEQ ID NO: 3919549 - RNA, 19 nt, Human adenovirus D
aucgcgggcuuuguaacuc

SEQ ID NO: 3919550 - RNA, 21 nt, Human adenovirus D
aucgcgggcuuuguaacucua

SEQ ID NO: 3919551 - RNA, 17 nt, Human adenovirus D
aucucccaccaccagcc

SEQ ID NO: 3919552 - RNA, 17 nt, Human adenovirus D
aucuccuccuccuggag

SEQ ID NO: 3919553 - RNA, 12 nt, Human adenovirus D
aucucuagcaug

SEQ ID NO: 3919554 - RNA, 19 nt, Human adenovirus D
aucucuagcaugaccagac

SEQ ID NO: 3919555 - RNA, 15 nt, Human adenovirus D
aucuuuaucugcugg

SEQ ID NO: 3919556 - RNA, 18 nt, Human adenovirus D
augaagguagaagaccau

SEQ ID NO: 3919557 - RNA, 13 nt, Human adenovirus D
augaaucgcgggc

SEQ ID NO: 3919558 - RNA, 13 nt, Human adenovirus D
augaauuccauga

SEQ ID NO: 3919559 - RNA, 18 nt, Human adenovirus D
augaauuuugggcggagg

SEQ ID NO: 3919560 - RNA, 14 nt, Human adenovirus D
augacucaugggcg

SEQ ID NO: 3919561 - RNA, 12 nt, Human adenovirus D
augagggucugg

SEQ ID NO: 3919562 - RNA, 21 nt, Human adenovirus D
augauccagcggcgcaggggc

SEQ ID NO: 3919563 - RNA, 13 nt, Human adenovirus D
augaucccaacag

SEQ ID NO: 3919564 - RNA, 15 nt, Human adenovirus D
augcaaaaucuuaca

SEQ ID NO: 3919565 - RNA, 17 nt, Human adenovirus D
augcacaucgccgggca

SEQ ID NO: 3919566 - RNA, 15 nt, Human adenovirus D
augcacccgcugcgg

SEQ ID NO: 3919567 - RNA, 24 nt, Human adenovirus D
augcacccguaaaugacucuccug

SEQ ID NO: 3919568 - RNA, 20 nt, Human adenovirus D
augcaccugggcgccagaag

SEQ ID NO: 3919569 - RNA, 18 nt, Human adenovirus D
augcaccuguggagggca

SEQ ID NO: 3919570 - RNA, 20 nt, Human adenovirus D
augcaccugugggaccuggc

SEQ ID NO: 3919571 - RNA, 19 nt, Human adenovirus D
augcagacacuugagcugg

SEQ ID NO: 3919572 - RNA, 21 nt, Human adenovirus D
augcaggauaaauauggccug

SEQ ID NO: 3919573 - RNA, 21 nt, Human adenovirus D
augcauggccagccuuacuca

SEQ ID NO: 3919574 - RNA, 17 nt, Human adenovirus D
augccaucaacauccac

SEQ ID NO: 3919575 - RNA, 23 nt, Human adenovirus D
augccgaagaagaacaggagccg

SEQ ID NO: 3919576 - RNA, 21 nt, Human adenovirus D
augccuucgugcacuggcccg

SEQ ID NO: 3919577 - RNA, 22 nt, Human adenovirus D
augcggagccgcucggccaugc

SEQ ID NO: 3919578 - RNA, 19 nt, Human adenovirus D
augcuguggucgacuugca

SEQ ID NO: 3919579 - RNA, 18 nt, Human adenovirus D
auggaacccaaaguauga

SEQ ID NO: 3919580 - RNA, 17 nt, Human adenovirus D
auggacgggaaccccac

SEQ ID NO: 3919581 - RNA, 14 nt, Human adenovirus D
auggcaggcagcgg

SEQ ID NO: 3919582 - RNA, 19 nt, Human adenovirus D
auggcccugacgacccgca

SEQ ID NO: 3919583 - RNA, 13 nt, Human adenovirus D
auggccuggagca

SEQ ID NO: 3919584 - RNA, 20 nt, Human adenovirus D
auggcgcaggcgacccugga

SEQ ID NO: 3919585 - RNA, 14 nt, Human adenovirus D
auggcgugcuggag

SEQ ID NO: 3919586 - RNA, 15 nt, Human adenovirus D
auggcugcuggaugg

SEQ ID NO: 3919587 - RNA, 18 nt, Human adenovirus D
augggaaugagagccgga

SEQ ID NO: 3919588 - RNA, 16 nt, Human adenovirus D
augggccuggccgcgg

SEQ ID NO: 3919589 - RNA, 23 nt, Human adenovirus D
augggccuggccgcgggcgccuc

SEQ ID NO: 3919590 - RNA, 16 nt, Human adenovirus D
auguacuacaacagua

SEQ ID NO: 3919591 - RNA, 19 nt, Human adenovirus D
auguccaccugcggggcga

SEQ ID NO: 3919592 - RNA, 19 nt, Human adenovirus D
augucgacgaagcgguggu

SEQ ID NO: 3919593 - RNA, 22 nt, Human adenovirus D
augugcaguuuggccuggaucu

SEQ ID NO: 3919594 - RNA, 14 nt, Human adenovirus D
auuaaaaagcagca

SEQ ID NO: 3919595 - RNA, 19 nt, Human adenovirus D
auuacuaggcccagcagca

SEQ ID NO: 3919596 - RNA, 22 nt, Human adenovirus D
auuacucgcaaaaauaaaucau

SEQ ID NO: 3919597 - RNA, 19 nt, Human adenovirus D
auuagcuaaugugucuuug

SEQ ID NO: 3919598 - RNA, 13 nt, Human adenovirus D
auuaugcuccugg

SEQ ID NO: 3919599 - RNA, 20 nt, Human adenovirus D
auuccugcaccauccccagg

SEQ ID NO: 3919600 - RNA, 23 nt, Human adenovirus D
auugaaauacccaacaaccuuac

SEQ ID NO: 3919601 - RNA, 21 nt, Human adenovirus D
auugauuuuuacaccagcgcg

SEQ ID NO: 3919602 - RNA, 19 nt, Human adenovirus D
auugucaagcuugguggca

SEQ ID NO: 3919603 - RNA, 16 nt, Human adenovirus D
auuucagaaccaugaa

SEQ ID NO: 3919604 - RNA, 13 nt, Human adenovirus D
auuucuuccucug

SEQ ID NO: 3919605 - RNA, 13 nt, Human adenovirus D
auuugaaaccacu

SEQ ID NO: 3919606 - RNA, 22 nt, Human adenovirus D
auuuucauugucuucccucuca

SEQ ID NO: 3919607 - RNA, 15 nt, Human adenovirus D
auuuuuuccaagacc

SEQ ID NO: 3919608 - RNA, 19 nt, Human adenovirus D
caaaaacagacuggucaaa

SEQ ID NO: 3919609 - RNA, 24 nt, Human adenovirus D
caaaaaugaagcccugcuauggcu

SEQ ID NO: 3919610 - RNA, 15 nt, Human adenovirus D
caaaacgaccacagc

SEQ ID NO: 3919611 - RNA, 14 nt, Human adenovirus D
caaaagaaaacuaa

SEQ ID NO: 3919612 - RNA, 21 nt, Human adenovirus D
caaaaucgagcaggaccuggg

SEQ ID NO: 3919613 - RNA, 23 nt, Human adenovirus D
caaaaucgagcaggaccugggcu

SEQ ID NO: 3919614 - RNA, 21 nt, Human adenovirus D
caaacaggcugucgguguccc

SEQ ID NO: 3919615 - RNA, 17 nt, Human adenovirus D
caaacuagcagacaggg

SEQ ID NO: 3919616 - RNA, 21 nt, Human adenovirus D
caaagaccagaacuuccagca

SEQ ID NO: 3919617 - RNA, 13 nt, Human adenovirus D
caaagagccgcuc

SEQ ID NO: 3919618 - RNA, 18 nt, Human adenovirus D
caaagcgguugagcuggg

SEQ ID NO: 3919619 - RNA, 18 nt, Human adenovirus D
caaaguaaaaaaccgguc

SEQ ID NO: 3919620 - RNA, 11 nt, Human adenovirus D
caaauuacuuu

SEQ ID NO: 3919621 - RNA, 23 nt, Human adenovirus D
caaauucauuuuugaagucaugu

SEQ ID NO: 3919622 - RNA, 16 nt, Human adenovirus D
caacagauuuaagcaa

SEQ ID NO: 3919623 - RNA, 15 nt, Human adenovirus D
caacagccacaugac

SEQ ID NO: 3919624 - RNA, 16 nt, Human adenovirus D
caacagccacaugacc

SEQ ID NO: 3919625 - RNA, 16 nt, Human adenovirus D
caacaguacuggcaac

SEQ ID NO: 3919626 - RNA, 17 nt, Human adenovirus D
caacaucugugcugccu

SEQ ID NO: 3919627 - RNA, 21 nt, Human adenovirus D
caacaucugugcugccuuugc

SEQ ID NO: 3919628 - RNA, 20 nt, Human adenovirus D
caacaugaccaaggacuggu

SEQ ID NO: 3919629 - RNA, 22 nt, Human adenovirus D
caaccaugugcgcacccugauc

SEQ ID NO: 3919630 - RNA, 15 nt, Human adenovirus D
caacccuuccugguc

SEQ ID NO: 3919631 - RNA, 23 nt, Human adenovirus D
caaccgggugcuagacauggcca

SEQ ID NO: 3919632 - RNA, 18 nt, Human adenovirus D
caaccuccaggccaaccu

SEQ ID NO: 3919633 - RNA, 20 nt, Human adenovirus D
caaccuggaccggcugguga

SEQ ID NO: 3919634 - RNA, 15 nt, Human adenovirus D
caacgcgcgcugccc

SEQ ID NO: 3919635 - RNA, 17 nt, Human adenovirus D
caacuacacagucaacu

SEQ ID NO: 3919636 - RNA, 16 nt, Human adenovirus D
caacuagccggagccg

SEQ ID NO: 3919637 - RNA, 16 nt, Human adenovirus D
caacucgcggcugcug

SEQ ID NO: 3919638 - RNA, 13 nt, Human adenovirus D
caacucgggcuuc

SEQ ID NO: 3919639 - RNA, 20 nt, Human adenovirus D
caacuggucuccugccuggg

SEQ ID NO: 3919640 - RNA, 21 nt, Human adenovirus D
caagacugcggggggaacauc

SEQ ID NO: 3919641 - RNA, 14 nt, Human adenovirus D
caagagcgagaugu

SEQ ID NO: 3919642 - RNA, 17 nt, Human adenovirus D
caagcucaugcuggccg

SEQ ID NO: 3919643 - RNA, 17 nt, Human adenovirus D
caagcuggccugcgcca

SEQ ID NO: 3919644 - RNA, 11 nt, Human adenovirus D
caagcugguga

SEQ ID NO: 3919645 - RNA, 15 nt, Human adenovirus D
caaggugcugacauc

SEQ ID NO: 3919646 - RNA, 18 nt, Human adenovirus D
caaggugcugacauccau

SEQ ID NO: 3919647 - RNA, 20 nt, Human adenovirus D
caaguaggugaagaaaacug

SEQ ID NO: 3919648 - RNA, 20 nt, Human adenovirus D
caagugccacaugcaccugg

SEQ ID NO: 3919649 - RNA, 12 nt, Human adenovirus D
caaguggaugga

SEQ ID NO: 3919650 - RNA, 20 nt, Human adenovirus D
caaucgccacaggugcugcc

SEQ ID NO: 3919651 - RNA, 15 nt, Human adenovirus D
gucugaagcgccgcc

SEQ ID NO: 3919652 - RNA, 12 nt, Human adenovirus D
gucugagggcca

SEQ ID NO: 3919653 - RNA, 18 nt, Human adenovirus D
gucugcaggccgggcugc

SEQ ID NO: 3919654 - RNA, 16 nt, Human adenovirus D
gucugcuccugcacuu

SEQ ID NO: 3919655 - RNA, 22 nt, Human adenovirus D
gucuggcacaucuuuuggaaga

SEQ ID NO: 3919656 - RNA, 12 nt, Human adenovirus D
gucugugccucu

SEQ ID NO: 3919657 - RNA, 20 nt, Human adenovirus D
gugaagaugccgggacagag

SEQ ID NO: 3919658 - RNA, 19 nt, Human adenovirus D
gugacggccuacgagcaga

SEQ ID NO: 3919659 - RNA, 14 nt, Human adenovirus D
gugacggcgcgacc

SEQ ID NO: 3919660 - RNA, 15 nt, Human adenovirus D
gugaggguguccugg

SEQ ID NO: 3919661 - RNA, 13 nt, Human adenovirus D
gugaucugcuuga

SEQ ID NO: 3919662 - RNA, 17 nt, Human adenovirus D
gugaugucucacucaag

SEQ ID NO: 3919663 - RNA, 21 nt, Human adenovirus D
gugcacuggcccgaccgaccc

SEQ ID NO: 3919664 - RNA, 16 nt, Human adenovirus D
gugcagaccguggaca

SEQ ID NO: 3919665 - RNA, 15 nt, Human adenovirus D
gugcagcugcagaag

SEQ ID NO: 3919666 - RNA, 23 nt, Human adenovirus D
gugcagggaugaguugggccuga

SEQ ID NO: 3919667 - RNA, 21 nt, Human adenovirus D
gugcaguuugcccgcgccacc

SEQ ID NO: 3919668 - RNA, 21 nt, Human adenovirus D
gugcccaaguacuuggaaagc

SEQ ID NO: 3919669 - RNA, 18 nt, Human adenovirus D
gugccuuaccgccagaga

SEQ ID NO: 3919670 - RNA, 17 nt, Human adenovirus D
gugcgaggaugagagcc

SEQ ID NO: 3919671 - RNA, 18 nt, Human adenovirus D
gugcgcgaccugggcugc

SEQ ID NO: 3919672 - RNA, 16 nt, Human adenovirus D
gugcggccuugcggag

SEQ ID NO: 3919673 - RNA, 23 nt, Human adenovirus D
auaugaccaugcagacucugcuc

SEQ ID NO: 3919674 - RNA, 19 nt, Human adenovirus D
aucaaaacgaccacagcaa

SEQ ID NO: 3919675 - RNA, 18 nt, Human adenovirus D
aucaaaucgccaagggca

SEQ ID NO: 3919676 - RNA, 22 nt, Human adenovirus D
aucaacaucuugcagagcaucg

SEQ ID NO: 3919677 - RNA, 12 nt, Human adenovirus D
aucacacugcau

SEQ ID NO: 3919678 - RNA, 19 nt, Human adenovirus D
aucacaucggacuggguua

SEQ ID NO: 3919679 - RNA, 13 nt, Human adenovirus D
aucacccagcagu

SEQ ID NO: 3919680 - RNA, 17 nt, Human adenovirus D
aucacucuuuccagcag

SEQ ID NO: 3919681 - RNA, 15 nt, Human adenovirus D
aucacuggcggaggc

SEQ ID NO: 3919682 - RNA, 20 nt, Human adenovirus D
aucacuuacuugaaaucuga

SEQ ID NO: 3919683 - RNA, 22 nt, Human adenovirus D
aucagaauauccccuuccucac

SEQ ID NO: 3919684 - RNA, 20 nt, Human adenovirus D
aucagcacugcaaauuuaac

SEQ ID NO: 3919685 - RNA, 13 nt, Human adenovirus D
aucagccaggacu

SEQ ID NO: 3919686 - RNA, 22 nt, Human adenovirus D
aucagccccagaugggccuggc

SEQ ID NO: 3919687 - RNA, 15 nt, Human adenovirus D
aucagcgcgcugcgg

SEQ ID NO: 3919688 - RNA, 14 nt, Human adenovirus D
aucagcugcagcgc

SEQ ID NO: 3919689 - RNA, 15 nt, Human adenovirus D
aucagcugcagcgca

SEQ ID NO: 3919690 - RNA, 16 nt, Human adenovirus D
aucagguauccagccu

SEQ ID NO: 3919691 - RNA, 16 nt, Human adenovirus D
aucauaucccagggga

SEQ ID NO: 3919692 - RNA, 12 nt, Human adenovirus D
auccacaaacua

SEQ ID NO: 3919693 - RNA, 20 nt, Human adenovirus D
auccagccuguacccagagc

SEQ ID NO: 3919694 - RNA, 19 nt, Human adenovirus D
auccagucauagcaggggc

SEQ ID NO: 3919695 - RNA, 16 nt, Human adenovirus D
aucccaacagccuuca

SEQ ID NO: 3919696 - RNA, 18 nt, Human adenovirus D
auccccgucuccugccgc

SEQ ID NO: 3919697 - RNA, 16 nt, Human adenovirus D
auccgcgccgcagccc

SEQ ID NO: 3919698 - RNA, 21 nt, Human adenovirus D
auccuuuuguagagggaaccu

SEQ ID NO: 3919699 - RNA, 20 nt, Human adenovirus D
aucgccacaggugcugccca

SEQ ID NO: 3919700 - RNA, 14 nt, Human adenovirus D
aucgccgaggagaa

SEQ ID NO: 3919701 - RNA, 23 nt, Human adenovirus D
aucggacgacugggaggcugcga

SEQ ID NO: 3919702 - RNA, 16 nt, Human adenovirus D
aucggcuaccagggcu

SEQ ID NO: 3919703 - RNA, 20 nt, Human adenovirus D
aucgugcgcgaccugggcug

SEQ ID NO: 3919704 - RNA, 13 nt, Human adenovirus D
aucgugcugcucu

SEQ ID NO: 3919705 - RNA, 19 nt, Human adenovirus D
aucgugguaaacgggcccu

SEQ ID NO: 3919706 - RNA, 14 nt, Human adenovirus D
aucucauggucuga

SEQ ID NO: 3919707 - RNA, 13 nt, Human adenovirus D
aucugugcugccu

SEQ ID NO: 3919708 - RNA, 13 nt, Human adenovirus D
aucuuccuggggc

SEQ ID NO: 3919709 - RNA, 22 nt, Human adenovirus D
augaaagcauacagagauucag

SEQ ID NO: 3919710 - RNA, 15 nt, Human adenovirus D
augaaagucaggagc

SEQ ID NO: 3919711 - RNA, 13 nt, Human adenovirus D
augaauaugaauu

SEQ ID NO: 3919712 - RNA, 19 nt, Human adenovirus D
augaccaugcagacucugc

SEQ ID NO: 3919713 - RNA, 12 nt, Human adenovirus D
augaccucggca

SEQ ID NO: 3919714 - RNA, 14 nt, Human adenovirus D
augaccugggcggc

SEQ ID NO: 3919715 - RNA, 16 nt, Human adenovirus D
augagagucugaaaaa

SEQ ID NO: 3919716 - RNA, 22 nt, Human adenovirus D
augagcccguagcugcgcgggg

SEQ ID NO: 3919717 - RNA, 12 nt, Human adenovirus D
augagcugcgag

SEQ ID NO: 3919718 - RNA, 14 nt, Human adenovirus D
augaggagaaggaa

SEQ ID NO: 3919719 - RNA, 20 nt, Human adenovirus D
augaggagaaggaaaaauug

SEQ ID NO: 3919720 - RNA, 17 nt, Human adenovirus D
augcaaaaucuuacacu

SEQ ID NO: 3919721 - RNA, 19 nt, Human adenovirus D
augcaaaaucuuacacugu

SEQ ID NO: 3919722 - RNA, 20 nt, Human adenovirus D
augcaacaugaccaaggacu

SEQ ID NO: 3919723 - RNA, 18 nt, Human adenovirus D
augcacccguaaaugacu

SEQ ID NO: 3919724 - RNA, 14 nt, Human adenovirus D
augcaccuguggag

SEQ ID NO: 3919725 - RNA, 16 nt, Human adenovirus D
augcacucauccauga

SEQ ID NO: 3919726 - RNA, 23 nt, Human adenovirus D
augcagccaguggcccuggaugu

SEQ ID NO: 3919727 - RNA, 12 nt, Human adenovirus D
augcaggagggg

SEQ ID NO: 3919728 - RNA, 14 nt, Human adenovirus D
augccaagauagcc

SEQ ID NO: 3919729 - RNA, 18 nt, Human adenovirus D
augccaagauagcccugc

SEQ ID NO: 3919730 - RNA, 19 nt, Human adenovirus D
augccaagauagcccugcg

SEQ ID NO: 3919731 - RNA, 23 nt, Human adenovirus D
augccaagauagcccugcgccca

SEQ ID NO: 3919732 - RNA, 18 nt, Human adenovirus D
augccccagcagaagcag

SEQ ID NO: 3919733 - RNA, 14 nt, Human adenovirus D
augccccaggccug

SEQ ID NO: 3919734 - RNA, 22 nt, Human adenovirus D
augccgaagaagaacaggagcc

SEQ ID NO: 3919735 - RNA, 17 nt, Human adenovirus D
augccgauguugguggg

SEQ ID NO: 3919736 - RNA, 17 nt, Human adenovirus D
augccuucgugcacugg

SEQ ID NO: 3919737 - RNA, 19 nt, Human adenovirus D
augcgcuucuuaccucgcg

SEQ ID NO: 3919738 - RNA, 17 nt, Human adenovirus D
augcgugagggcggagg

SEQ ID NO: 3919739 - RNA, 13 nt, Human adenovirus D
augcuccaaagcu

SEQ ID NO: 3919740 - RNA, 21 nt, Human adenovirus D
augcucgucagggggguccgc

SEQ ID NO: 3919741 - RNA, 23 nt, Human adenovirus D
augcuggccgugguccuggucac

SEQ ID NO: 3919742 - RNA, 23 nt, Human adenovirus D
augcuuggucuuucuggcuugcu

SEQ ID NO: 3919743 - RNA, 20 nt, Human adenovirus D
auggaacccaaaguaugaca

SEQ ID NO: 3919744 - RNA, 16 nt, Human adenovirus D
auggauuaaaaauauu

SEQ ID NO: 3919745 - RNA, 15 nt, Human adenovirus D
auggauucaaaaacu

SEQ ID NO: 3919746 - RNA, 15 nt, Human adenovirus D
auggcaagcugccau

SEQ ID NO: 3919747 - RNA, 12 nt, Human adenovirus D
auggcaggcagc

SEQ ID NO: 3919748 - RNA, 18 nt, Human adenovirus D
auggccucgugcucuggg

SEQ ID NO: 3919749 - RNA, 17 nt, Human adenovirus D
auggccuggagcagaua

SEQ ID NO: 3919750 - RNA, 18 nt, Human adenovirus D
auggcuaccugggaggag

SEQ ID NO: 3919751 - RNA, 16 nt, Human adenovirus D
auggcucagcugccau

SEQ ID NO: 3919752 - RNA, 13 nt, Human adenovirus D
augggcaccugga

SEQ ID NO: 3919753 - RNA, 17 nt, Human adenovirus D
augggcccgugggcugc

SEQ ID NO: 3919754 - RNA, 18 nt, Human adenovirus D
augggccuggccgcgggc

SEQ ID NO: 3919755 - RNA, 15 nt, Human adenovirus D
augggucaggcagcg

SEQ ID NO: 3919756 - RNA, 12 nt, Human adenovirus D
augggugugcug

SEQ ID NO: 3919757 - RNA, 18 nt, Human adenovirus D
auguccuuccagggucuc

SEQ ID NO: 3919758 - RNA, 23 nt, Human adenovirus D
augucucgguguacaagauccug

SEQ ID NO: 3919759 - RNA, 23 nt, Human adenovirus D
augugaccucccaccccagaaag

SEQ ID NO: 3919760 - RNA, 18 nt, Human adenovirus D
augugcaguuuggccugg

SEQ ID NO: 3919761 - RNA, 21 nt, Human adenovirus D
auguguggacuauccuugcag

SEQ ID NO: 3919762 - RNA, 19 nt, Human adenovirus D
auguuacugcauacaaaug

SEQ ID NO: 3919763 - RNA, 23 nt, Human adenovirus D
auguucucacaguaagugcagca

SEQ ID NO: 3919764 - RNA, 12 nt, Human adenovirus D
auuaaaaaauua

SEQ ID NO: 3919765 - RNA, 18 nt, Human adenovirus D
auuaauguuaaugucacu

SEQ ID NO: 3919766 - RNA, 15 nt, Human adenovirus D
auuacugccacugcc

SEQ ID NO: 3919767 - RNA, 20 nt, Human adenovirus D
auuaugagcaucaaaaauua

SEQ ID NO: 3919768 - RNA, 18 nt, Human adenovirus D
auucaaauuacuuuucug

SEQ ID NO: 3919769 - RNA, 19 nt, Human adenovirus D
auucaaggccauaaaucug

SEQ ID NO: 3919770 - RNA, 16 nt, Human adenovirus D
auucauaccaucaaug

SEQ ID NO: 3919771 - RNA, 21 nt, Human adenovirus D
auugaaugggacuuauccaca

SEQ ID NO: 3919772 - RNA, 20 nt, Human adenovirus D
auugcaggccgugcugcucg

SEQ ID NO: 3919773 - RNA, 18 nt, Human adenovirus D
auugcuucccuggaagag

SEQ ID NO: 3919774 - RNA, 17 nt, Human adenovirus D
auuggagaaugcugcua

SEQ ID NO: 3919775 - RNA, 17 nt, Human adenovirus D
auuggugcgcuggggcu

SEQ ID NO: 3919776 - RNA, 18 nt, Human adenovirus D
auugucaagcuugguggc

SEQ ID NO: 3919777 - RNA, 14 nt, Human adenovirus D
auuuaauuggcaaa

SEQ ID NO: 3919778 - RNA, 22 nt, Human adenovirus D
auuucaaauuuuauguaucuuu

SEQ ID NO: 3919779 - RNA, 16 nt, Human adenovirus D
auuucuuagacugcua

SEQ ID NO: 3919780 - RNA, 18 nt, Human adenovirus D
auuuuuguuguacucugu

SEQ ID NO: 3919781 - RNA, 16 nt, Human adenovirus D
caaaaaaaacaaucag

SEQ ID NO: 3919782 - RNA, 15 nt, Human adenovirus D
caaaacaacaagauu

SEQ ID NO: 3919783 - RNA, 15 nt, Human adenovirus D
caaaacccacucuau

SEQ ID NO: 3919784 - RNA, 20 nt, Human adenovirus D
caaaacccacucuauuuuca

SEQ ID NO: 3919785 - RNA, 20 nt, Human adenovirus D
caaaacuaauuacagucacu

SEQ ID NO: 3919786 - RNA, 21 nt, Human adenovirus D
caaaagaguuucaacaaccau

SEQ ID NO: 3919787 - RNA, 19 nt, Human adenovirus D
caaaagcguccgcuccgca

SEQ ID NO: 3919788 - RNA, 13 nt, Human adenovirus D
caaacgccagccc

SEQ ID NO: 3919789 - RNA, 13 nt, Human adenovirus D
ccagccuccaccg

SEQ ID NO: 3919790 - RNA, 18 nt, Human adenovirus D
ccagcgagugaccgucac

SEQ ID NO: 3919791 - RNA, 13 nt, Human adenovirus D
ccagcuggccgcc

SEQ ID NO: 3919792 - RNA, 22 nt, Human adenovirus D
ccaggaaacuaggcgcagcugc

SEQ ID NO: 3919793 - RNA, 21 nt, Human adenovirus D
ccaggaggcggugcgcacgcc

SEQ ID NO: 3919794 - RNA, 18 nt, Human adenovirus D
ccaggaugcagccagugg

SEQ ID NO: 3919795 - RNA, 14 nt, Human adenovirus D
ccaggggagugaag

SEQ ID NO: 3919796 - RNA, 20 nt, Human adenovirus D
ccaggggaugaacaguggca

SEQ ID NO: 3919797 - RNA, 19 nt, Human adenovirus D
ccaggguugagucgcggca

SEQ ID NO: 3919798 - RNA, 18 nt, Human adenovirus D
ccaggucgucgccccgga

SEQ ID NO: 3919799 - RNA, 21 nt, Human adenovirus D
ccagucccuuuuccaggaaag

SEQ ID NO: 3919800 - RNA, 14 nt, Human adenovirus D
ccauagcucagccc

SEQ ID NO: 3919801 - RNA, 20 nt, Human adenovirus D
ccauagucaucacccagcag

SEQ ID NO: 3919802 - RNA, 19 nt, Human adenovirus D
ccaucagcgcccucagcag

SEQ ID NO: 3919803 - RNA, 16 nt, Human adenovirus D
ccauccgcgccgcagc

SEQ ID NO: 3919804 - RNA, 19 nt, Human adenovirus D
ccaugaaggggcucuugcu

SEQ ID NO: 3919805 - RNA, 22 nt, Human adenovirus D
ccaugagucuguguccgcgcuc

SEQ ID NO: 3919806 - RNA, 17 nt, Human adenovirus D
ccaugcgaauuccccuc

SEQ ID NO: 3919807 - RNA, 20 nt, Human adenovirus D
ccaugcgaauuccccucauc

SEQ ID NO: 3919808 - RNA, 15 nt, Human adenovirus D
ccaugcgccaagggc

SEQ ID NO: 3919809 - RNA, 19 nt, Human adenovirus D
ccauggacaacgucaaccc

SEQ ID NO: 3919810 - RNA, 23 nt, Human adenovirus D
ccauggccaggggagugaagagg

SEQ ID NO: 3919811 - RNA, 16 nt, Human adenovirus D
ccauggggcgccgccc

SEQ ID NO: 3919812 - RNA, 14 nt, Human adenovirus D
ccaugugcgcaccc

SEQ ID NO: 3919813 - RNA, 20 nt, Human adenovirus D
ccauugguugaacccagaug

SEQ ID NO: 3919814 - RNA, 21 nt, Human adenovirus D
ccauugucaacacggccggcc

SEQ ID NO: 3919815 - RNA, 13 nt, Human adenovirus D
cccaacaauaaaa

SEQ ID NO: 3919816 - RNA, 16 nt, Human adenovirus D
cccaacggcaccugcg

SEQ ID NO: 3919817 - RNA, 13 nt, Human adenovirus D
cccaacggcaugc

SEQ ID NO: 3919818 - RNA, 20 nt, Human adenovirus D
cccaacucgcggcugcugcu

SEQ ID NO: 3919819 - RNA, 16 nt, Human adenovirus D
cccaaugcaacaugac

SEQ ID NO: 3919820 - RNA, 17 nt, Human adenovirus D
cccacaggaugaacagg

SEQ ID NO: 3919821 - RNA, 12 nt, Human adenovirus D
cccagaacuggc

SEQ ID NO: 3919822 - RNA, 24 nt, Human adenovirus D
cccagaacuggcagagcacgcugc

SEQ ID NO: 3919823 - RNA, 15 nt, Human adenovirus D
cccagcaagucagca

SEQ ID NO: 3919824 - RNA, 23 nt, Human adenovirus D
cccaggaaacuaggcgcagcugc

SEQ ID NO: 3919825 - RNA, 20 nt, Human adenovirus D
cccaggaauggcacgcucug

SEQ ID NO: 3919826 - RNA, 18 nt, Human adenovirus D
cccaggcccuggagcagc

SEQ ID NO: 3919827 - RNA, 17 nt, Human adenovirus D
cccaggcggaccagaaa

SEQ ID NO: 3919828 - RNA, 23 nt, Human adenovirus D
cccaggcggugcugcugccgagc

SEQ ID NO: 3919829 - RNA, 20 nt, Human adenovirus D
cccaguuucaaacccuacuc

SEQ ID NO: 3919830 - RNA, 21 nt, Human adenovirus D
cccauggacgggaaccccacc

SEQ ID NO: 3919831 - RNA, 14 nt, Human adenovirus D
ccccaggcggugcu

SEQ ID NO: 3919832 - RNA, 18 nt, Human adenovirus D
ccccagggaccacaaugu

SEQ ID NO: 3919833 - RNA, 20 nt, Human adenovirus D
ccccauagucaucacccagc

SEQ ID NO: 3919834 - RNA, 18 nt, Human adenovirus D
ccccauggcgcacaacac

SEQ ID NO: 3919835 - RNA, 18 nt, Human adenovirus D
ccccgacccccuuccacu

SEQ ID NO: 3919836 - RNA, 16 nt, Human adenovirus D
ccccgagcgccugagg

SEQ ID NO: 3919837 - RNA, 14 nt, Human adenovirus D
ccccgcaggcagga

SEQ ID NO: 3919838 - RNA, 19 nt, Human adenovirus D
ccccgccgaggcuagcacg

SEQ ID NO: 3919839 - RNA, 12 nt, Human adenovirus D
ccccgcgggcag

SEQ ID NO: 3919840 - RNA, 22 nt, Human adenovirus D
ccccgcgggcaggggcggcaga

SEQ ID NO: 3919841 - RNA, 15 nt, Human adenovirus D
ccccgcgugcagcug

SEQ ID NO: 3919842 - RNA, 20 nt, Human adenovirus D
ccccgcgugcagcugcagaa

SEQ ID NO: 3919843 - RNA, 18 nt, Human adenovirus D
ccccuuugucuccuccga

SEQ ID NO: 3919844 - RNA, 22 nt, Human adenovirus D
cccgagaccugcgcaaggucga

SEQ ID NO: 3919845 - RNA, 11 nt, Human adenovirus D
cccgaggcccu

SEQ ID NO: 3919846 - RNA, 22 nt, Human adenovirus D
cccgagggucgcuggcugcugg

SEQ ID NO: 3919847 - RNA, 16 nt, Human adenovirus D
cccgauggucgcugga

SEQ ID NO: 3919848 - RNA, 12 nt, Human adenovirus D
cccgcacccggc

SEQ ID NO: 3919849 - RNA, 21 nt, Human adenovirus D
cccgcccagguuuuccaugca

SEQ ID NO: 3919850 - RNA, 14 nt, Human adenovirus D
cccgcccugcugga

SEQ ID NO: 3919851 - RNA, 20 nt, Human adenovirus D
cccgccgaggcuagcacgca

SEQ ID NO: 3919852 - RNA, 21 nt, Human adenovirus D
cccgcguaauuggcccuccac

SEQ ID NO: 3919853 - RNA, 20 nt, Human adenovirus D
cccgcgugcagcugcagaag

SEQ ID NO: 3919854 - RNA, 20 nt, Human adenovirus D
cccgcucaccaucugagcuc

SEQ ID NO: 3919855 - RNA, 19 nt, Human adenovirus D
cccgcucaucggccagaca

SEQ ID NO: 3919856 - RNA, 13 nt, Human adenovirus D
cccggaggagggg

SEQ ID NO: 3919857 - RNA, 20 nt, Human adenovirus D
cccggcaacgaccggcugcu

SEQ ID NO: 3919858 - RNA, 23 nt, Human adenovirus D
cccggcauccugcacgcagcagc

SEQ ID NO: 3919859 - RNA, 16 nt, Human adenovirus D
cccgugaccugcagca

SEQ ID NO: 3919860 - RNA, 22 nt, Human adenovirus D
cccguggucagcgaugagcagc

SEQ ID NO: 3919861 - RNA, 21 nt, Human adenovirus D
cccucagcgucgaggagcugu

SEQ ID NO: 3919862 - RNA, 18 nt, Human adenovirus D
cccuccacuuucauaauc

SEQ ID NO: 3919863 - RNA, 19 nt, Human adenovirus D
cccuccccgacccccuucc

SEQ ID NO: 3919864 - RNA, 11 nt, Human adenovirus D
cccucgcuggu

SEQ ID NO: 3919865 - RNA, 17 nt, Human adenovirus D
cccugagccgccagcug

SEQ ID NO: 3919866 - RNA, 19 nt, Human adenovirus D
cccugagccgccagcuggc

SEQ ID NO: 3919867 - RNA, 17 nt, Human adenovirus D
cccugcccuuccagcac

SEQ ID NO: 3919868 - RNA, 18 nt, Human adenovirus D
cccugcccuuccagcaca

SEQ ID NO: 3919869 - RNA, 13 nt, Human adenovirus D
cccuuccucacuc

SEQ ID NO: 3919870 - RNA, 13 nt, Human adenovirus D
cccuucuccagca

SEQ ID NO: 3919871 - RNA, 17 nt, Human adenovirus D
cccuucuccagcaacuu

SEQ ID NO: 3919872 - RNA, 15 nt, Human adenovirus D
cccuugaccugccuc

SEQ ID NO: 3919873 - RNA, 20 nt, Human adenovirus D
ccgaagaagaacaggagccg

SEQ ID NO: 3919874 - RNA, 19 nt, Human adenovirus D
ccgacgcgcuccucgcucu

SEQ ID NO: 3919875 - RNA, 20 nt, Human adenovirus D
ccgacuaggaagugcggcgg

SEQ ID NO: 3919876 - RNA, 18 nt, Human adenovirus D
ccgagcacucgugcugau

SEQ ID NO: 3919877 - RNA, 13 nt, Human adenovirus D
ccgagccugaagc

SEQ ID NO: 3919878 - RNA, 18 nt, Human adenovirus D
ccgagcugacggccaguc

SEQ ID NO: 3919879 - RNA, 15 nt, Human adenovirus D
ccgaggacacccggc

SEQ ID NO: 3919880 - RNA, 21 nt, Human adenovirus D
ccgaggacuaccacgcccaug

SEQ ID NO: 3919881 - RNA, 22 nt, Human adenovirus D
ccgaggagaugcgcgacugccg

SEQ ID NO: 3919882 - RNA, 18 nt, Human adenovirus D
ccgaggugccccagagcg

SEQ ID NO: 3919883 - RNA, 17 nt, Human adenovirus D
ccgagucgcggaugaag

SEQ ID NO: 3919884 - RNA, 18 nt, Human adenovirus D
ccgagucgucgcagccgc

SEQ ID NO: 3919885 - RNA, 15 nt, Human adenovirus D
ccgagucucaccugg

SEQ ID NO: 3919886 - RNA, 22 nt, Human adenovirus D
ccgaucauugagagugcggugg

SEQ ID NO: 3919887 - RNA, 20 nt, Human adenovirus D
ccgaugcuauugagagagag

SEQ ID NO: 3919888 - RNA, 19 nt, Human adenovirus D
ccgcaacucguaccugggu

SEQ ID NO: 3919889 - RNA, 23 nt, Human adenovirus D
ccgcaccgcuccuggucugcaac

SEQ ID NO: 3919890 - RNA, 20 nt, Human adenovirus D
ccgcacgguaagagcccagc

SEQ ID NO: 3919891 - RNA, 21 nt, Human adenovirus D
ccgcagccgcggcagccgcag

SEQ ID NO: 3919892 - RNA, 13 nt, Human adenovirus D
ccgcagcucuucc

SEQ ID NO: 3919893 - RNA, 18 nt, Human adenovirus D
ccgcaggaguccaccgcu

SEQ ID NO: 3919894 - RNA, 15 nt, Human adenovirus D
ccgcaggcgcccagc

SEQ ID NO: 3919895 - RNA, 13 nt, Human adenovirus D
ccgccaacaccaa

SEQ ID NO: 3919896 - RNA, 14 nt, Human adenovirus D
ccgccaagcuccuc

SEQ ID NO: 3919897 - RNA, 20 nt, Human adenovirus D
ccgccaaggagcuccucgau

SEQ ID NO: 3919898 - RNA, 12 nt, Human adenovirus D
ccgccaccugca

SEQ ID NO: 3919899 - RNA, 20 nt, Human adenovirus D
ccgccauggggcgccgcccg

SEQ ID NO: 3919900 - RNA, 13 nt, Human adenovirus D
ccgcccugagcuc

SEQ ID NO: 3919901 - RNA, 14 nt, Human adenovirus D
ccgccgaggcuagc

SEQ ID NO: 3919902 - RNA, 14 nt, Human adenovirus D
ccgccgcaggagag

SEQ ID NO: 3919903 - RNA, 15 nt, Human adenovirus D
ccgccgccgccgugc

SEQ ID NO: 3919904 - RNA, 21 nt, Human adenovirus D
ccgccgcuguggagccacugc

SEQ ID NO: 3919905 - RNA, 17 nt, Human adenovirus D
ggcaucuuccuggggca

SEQ ID NO: 3919906 - RNA, 16 nt, Human adenovirus D
ggcauggcaggcagcg

SEQ ID NO: 3919907 - RNA, 16 nt, Human adenovirus D
ggcaugggucaggcag

SEQ ID NO: 3919908 - RNA, 20 nt, Human adenovirus D
ggcaugggucaggcagcggg

SEQ ID NO: 3919909 - RNA, 20 nt, Human adenovirus D
ggccacgugcgagggguagc

SEQ ID NO: 3919910 - RNA, 17 nt, Human adenovirus D
ggccaggccuccgagca

SEQ ID NO: 3919911 - RNA, 12 nt, Human adenovirus D
ggccaggggagu

SEQ ID NO: 3919912 - RNA, 15 nt, Human adenovirus D
ggccauucuggaggc

SEQ ID NO: 3919913 - RNA, 17 nt, Human adenovirus D
ggccauucuggaggcgg

SEQ ID NO: 3919914 - RNA, 17 nt, Human adenovirus D
ggcccacggccaucuuu

SEQ ID NO: 3919915 - RNA, 16 nt, Human adenovirus D
ggcccagaacuggcag

SEQ ID NO: 3919916 - RNA, 20 nt, Human adenovirus D
ggcccagaacuggcagagca

SEQ ID NO: 3919917 - RNA, 21 nt, Human adenovirus D
ggccccggggcggaguggccu

SEQ ID NO: 3919918 - RNA, 14 nt, Human adenovirus D
ggcccgacuccgcc

SEQ ID NO: 3919919 - RNA, 21 nt, Human adenovirus D
ggcccucgaugaaagucagga

SEQ ID NO: 3919920 - RNA, 18 nt, Human adenovirus D
ggcccugcuggccgagcu

SEQ ID NO: 3919921 - RNA, 16 nt, Human adenovirus D
ggcccuggcugguggu

SEQ ID NO: 3919922 - RNA, 16 nt, Human adenovirus D
ggccgagaccgugagc

SEQ ID NO: 3919923 - RNA, 21 nt, Human adenovirus D
ggccgagaucguccucccccg

SEQ ID NO: 3919924 - RNA, 16 nt, Human adenovirus D
ggccgaggaggagcgc

SEQ ID NO: 3919925 - RNA, 15 nt, Human adenovirus D
ggccgcccugaccca

SEQ ID NO: 3919926 - RNA, 13 nt, Human adenovirus D
ggccgccgggcca

SEQ ID NO: 3919927 - RNA, 17 nt, Human adenovirus D
ggccgcgauguugagcu

SEQ ID NO: 3919928 - RNA, 19 nt, Human adenovirus D
ggccggcaugcccaccacg

SEQ ID NO: 3919929 - RNA, 18 nt, Human adenovirus D
ggccuccaggaauuccag

SEQ ID NO: 3919930 - RNA, 18 nt, Human adenovirus D
ggccucgugcucuggggu

SEQ ID NO: 3919931 - RNA, 11 nt, Human adenovirus D
ggccuggagca

SEQ ID NO: 3919932 - RNA, 12 nt, Human adenovirus D
ggccuggagcag

SEQ ID NO: 3919933 - RNA, 21 nt, Human adenovirus D
ggccuggagcagauaaaaacc

SEQ ID NO: 3919934 - RNA, 15 nt, Human adenovirus D
ggccugggcucgcug

SEQ ID NO: 3919935 - RNA, 20 nt, Human adenovirus D
ggccugggcucgcugguggc

SEQ ID NO: 3919936 - RNA, 23 nt, Human adenovirus D
ggccugugcaaugucaggucugc

SEQ ID NO: 3919937 - RNA, 21 nt, Human adenovirus D
ggccuuaaauaaggaaauguu

SEQ ID NO: 3919938 - RNA, 20 nt, Human adenovirus D
ggcgaacgugccgcgcgggc

SEQ ID NO: 3919939 - RNA, 23 nt, Human adenovirus D
ggcgaaguugaaaaacugggcgu

SEQ ID NO: 3919940 - RNA, 14 nt, Human adenovirus D
ggcgaccagcucug

SEQ ID NO: 3919941 - RNA, 23 nt, Human adenovirus D
ggcgaccggucgacggugagcag

SEQ ID NO: 3919942 - RNA, 20 nt, Human adenovirus D
ggcgacgacgacauccugga

SEQ ID NO: 3919943 - RNA, 23 nt, Human adenovirus D
ggcgacgacgcgcucggcgagga

SEQ ID NO: 3919944 - RNA, 16 nt, Human adenovirus D
ggcgacgcaccgggag

SEQ ID NO: 3919945 - RNA, 19 nt, Human adenovirus D
ggcgagaggcgagcagcug

SEQ ID NO: 3919946 - RNA, 21 nt, Human adenovirus D
ggcgaguuugccuacgggaag

SEQ ID NO: 3919947 - RNA, 13 nt, Human adenovirus D
ggcgcaaccagga

SEQ ID NO: 3919948 - RNA, 14 nt, Human adenovirus D
ggcgcaaccaggag

SEQ ID NO: 3919949 - RNA, 15 nt, Human adenovirus D
ggcgcaaccaggagg

SEQ ID NO: 3919950 - RNA, 15 nt, Human adenovirus D
ggcgcaagcucaugc

SEQ ID NO: 3919951 - RNA, 17 nt, Human adenovirus D
ggcgcacgucugacugc

SEQ ID NO: 3919952 - RNA, 22 nt, Human adenovirus D
ggcgcacgucugacugccgccg

SEQ ID NO: 3919953 - RNA, 15 nt, Human adenovirus D
ggcgcaggcgacccu

SEQ ID NO: 3919954 - RNA, 21 nt, Human adenovirus D
ggcgcaggcgacccuggaggu

SEQ ID NO: 3919955 - RNA, 11 nt, Human adenovirus D
ggcgcccagca

SEQ ID NO: 3919956 - RNA, 11 nt, Human adenovirus D
ggcgcccagcc

SEQ ID NO: 3919957 - RNA, 16 nt, Human adenovirus D
ggcgccggcgcuagcc

SEQ ID NO: 3919958 - RNA, 16 nt, Human adenovirus D
ggcgcgagcugagcga

SEQ ID NO: 3919959 - RNA, 18 nt, Human adenovirus D
ggcgcgcccggggccagg

SEQ ID NO: 3919960 - RNA, 16 nt, Human adenovirus D
ggcgcgccuuggaggc

SEQ ID NO: 3919961 - RNA, 15 nt, Human adenovirus D
ggcgcggagcuugcc

SEQ ID NO: 3919962 - RNA, 20 nt, Human adenovirus D
ggcgcggcgggggcggagag

SEQ ID NO: 3919963 - RNA, 13 nt, Human adenovirus D
ggcgcuagccagc

SEQ ID NO: 3919964 - RNA, 21 nt, Human adenovirus D
ggcgcucaaggugcugacgcu

SEQ ID NO: 3919965 - RNA, 13 nt, Human adenovirus D
ggcgcuggaagag

SEQ ID NO: 3919966 - RNA, 14 nt, Human adenovirus D
ggcgcuggaagagg

SEQ ID NO: 3919967 - RNA, 14 nt, Human adenovirus D
ggcgcuugcaaggg

SEQ ID NO: 3919968 - RNA, 17 nt, Human adenovirus D
ggcgcuuggugggcaga

SEQ ID NO: 3919969 - RNA, 15 nt, Human adenovirus D
ggcggcagaggcacg

SEQ ID NO: 3919970 - RNA, 13 nt, Human adenovirus D
ggcggccauugcu

SEQ ID NO: 3919971 - RNA, 14 nt, Human adenovirus D
ggcggcgcugcaaa

SEQ ID NO: 3919972 - RNA, 18 nt, Human adenovirus D
ggcggcuuucugcccgcg

SEQ ID NO: 3919973 - RNA, 12 nt, Human adenovirus D
ggcgggacagag

SEQ ID NO: 3919974 - RNA, 14 nt, Human adenovirus D
ggcgggggcggaga

SEQ ID NO: 3919975 - RNA, 22 nt, Human adenovirus D
ggcggguccccguugggcagcg

SEQ ID NO: 3919976 - RNA, 13 nt, Human adenovirus D
ggcgucccgcggu

SEQ ID NO: 3919977 - RNA, 13 nt, Human adenovirus D
ggcgugcagaccg

SEQ ID NO: 3919978 - RNA, 19 nt, Human adenovirus D
ggcgugcagaccguggaca

SEQ ID NO: 3919979 - RNA, 23 nt, Human adenovirus D
ggcgugcgcgugcccgugcgcac

SEQ ID NO: 3919980 - RNA, 15 nt, Human adenovirus D
ggcgugcuggagagc

SEQ ID NO: 3919981 - RNA, 18 nt, Human adenovirus D
ggcguggcuaaggugacu

SEQ ID NO: 3919982 - RNA, 17 nt, Human adenovirus D
ggcguggugcuggauga

SEQ ID NO: 3919983 - RNA, 20 nt, Human adenovirus D
ggcguucagggaggcgcugc

SEQ ID NO: 3919984 - RNA, 20 nt, Human adenovirus D
ggcuacgcgcggaaucagaa

SEQ ID NO: 3919985 - RNA, 15 nt, Human adenovirus D
ggcucggugcggcug

SEQ ID NO: 3919986 - RNA, 18 nt, Human adenovirus D
ggcugcauccacugcucc

SEQ ID NO: 3919987 - RNA, 16 nt, Human adenovirus D
ggcugcuggagcugau

SEQ ID NO: 3919988 - RNA, 13 nt, Human adenovirus D
ggcugcuggaugg

SEQ ID NO: 3919989 - RNA, 18 nt, Human adenovirus D
ggcugcuggaugggcgug

SEQ ID NO: 3919990 - RNA, 16 nt, Human adenovirus D
ggcuucuacagccagc

SEQ ID NO: 3919991 - RNA, 17 nt, Human adenovirus D
ggcuuucuuugacacac

SEQ ID NO: 3919992 - RNA, 17 nt, Human adenovirus D
gggaccggggaggcacc

SEQ ID NO: 3919993 - RNA, 12 nt, Human adenovirus D
gggacgugagcg

SEQ ID NO: 3919994 - RNA, 13 nt, Human adenovirus D
gggacuggcaagc

SEQ ID NO: 3919995 - RNA, 20 nt, Human adenovirus D
gggacuuggucaccccgccg

SEQ ID NO: 3919996 - RNA, 12 nt, Human adenovirus D
gggagcgagccc

SEQ ID NO: 3919997 - RNA, 19 nt, Human adenovirus D
gggagcugcgcgagggccu

SEQ ID NO: 3919998 - RNA, 21 nt, Human adenovirus D
gggagcugcgcgagggccugg

SEQ ID NO: 3919999 - RNA, 13 nt, Human adenovirus D
gggaucaccaguu

SEQ ID NO: 3920000 - RNA, 18 nt, Human adenovirus D
gggaugucaaauuccugg

SEQ ID NO: 3920001 - RNA, 11 nt, Human adenovirus D
gggcacccacg

SEQ ID NO: 3920002 - RNA, 12 nt, Human adenovirus D
gggcagggagcu

SEQ ID NO: 3920003 - RNA, 17 nt, Human adenovirus D
gggcaucuucugccugg

SEQ ID NO: 3920004 - RNA, 22 nt, Human adenovirus D
gggcaugaccucggcacucagg

SEQ ID NO: 3920005 - RNA, 15 nt, Human adenovirus D
gggccgccgggccau

SEQ ID NO: 3920006 - RNA, 23 nt, Human adenovirus D
gggccugcaaacggugaaccuga

SEQ ID NO: 3920007 - RNA, 19 nt, Human adenovirus D
gggccugcgcuaccgcucc

SEQ ID NO: 3920008 - RNA, 14 nt, Human adenovirus D
gggcgccucccagg

SEQ ID NO: 3920009 - RNA, 16 nt, Human adenovirus D
gggcgccucccaggac

SEQ ID NO: 3920010 - RNA, 20 nt, Human adenovirus D
gggcgcucccaaucccaguc

SEQ ID NO: 3920011 - RNA, 19 nt, Human adenovirus D
gggcggcaaaauggcgugc

SEQ ID NO: 3920012 - RNA, 12 nt, Human adenovirus D
gggcgguggugg

SEQ ID NO: 3920013 - RNA, 22 nt, Human adenovirus D
gggcgucccgcgguccuccucg

SEQ ID NO: 3920014 - RNA, 20 nt, Human adenovirus D
gggcgugcagaccguggaca

SEQ ID NO: 3920015 - RNA, 18 nt, Human adenovirus D
gggcguggugcuggauga

SEQ ID NO: 3920016 - RNA, 22 nt, Human adenovirus D
gggcguguaccgcaacgaccgc

SEQ ID NO: 3920017 - RNA, 17 nt, Human adenovirus D
gggcuccgagaagaugc

SEQ ID NO: 3920018 - RNA, 14 nt, Human adenovirus D
gggcucgagcaugg

SEQ ID NO: 3920019 - RNA, 14 nt, Human adenovirus D
gggcugggacccug

SEQ ID NO: 3920020 - RNA, 13 nt, Human adenovirus D
ggggaagauggag

SEQ ID NO: 3920021 - RNA, 14 nt, Human adenovirus D
ggggacgugagcgc

SEQ ID NO: 3920022 - RNA, 15 nt, Human adenovirus D
ucgucauccuuccag

SEQ ID NO: 3920023 - RNA, 12 nt, Human adenovirus D
ucgugcgagggg

SEQ ID NO: 3920024 - RNA, 12 nt, Human adenovirus D
ucuacaaggccc

SEQ ID NO: 3920025 - RNA, 13 nt, Human adenovirus D
ucuaccugcgcac

SEQ ID NO: 3920026 - RNA, 16 nt, Human adenovirus D
ucuaccuuggucacau

SEQ ID NO: 3920027 - RNA, 18 nt, Human adenovirus D
ucuacgcguacauccagc

SEQ ID NO: 3920028 - RNA, 13 nt, Human adenovirus D
ucuacucccagcu

SEQ ID NO: 3920029 - RNA, 14 nt, Human adenovirus D
ucuauuuucaaggu

SEQ ID NO: 3920030 - RNA, 18 nt, Human adenovirus D
ucucaauaaacagcacuu

SEQ ID NO: 3920031 - RNA, 15 nt, Human adenovirus D
ucucacucaaggugg

SEQ ID NO: 3920032 - RNA, 15 nt, Human adenovirus D
ucucgauccagcaga

SEQ ID NO: 3920033 - RNA, 22 nt, Human adenovirus D
ucucuagcaugaccagacccag

SEQ ID NO: 3920034 - RNA, 23 nt, Human adenovirus D
ucucugcgcucgcucacccgcag

SEQ ID NO: 3920035 - RNA, 17 nt, Human adenovirus D
ucugaaaagucauccaa

SEQ ID NO: 3920036 - RNA, 20 nt, Human adenovirus D
ucugccauguucucacagua

SEQ ID NO: 3920037 - RNA, 17 nt, Human adenovirus D
ucugcccgcgcucaucc

SEQ ID NO: 3920038 - RNA, 18 nt, Human adenovirus D
ucugcccgcgcucauccc

SEQ ID NO: 3920039 - RNA, 16 nt, Human adenovirus D
ucugcucauacugcua

SEQ ID NO: 3920040 - RNA, 13 nt, Human adenovirus D
ucugcugcgccgc

SEQ ID NO: 3920041 - RNA, 13 nt, Human adenovirus D
ucuggacccgcgg

SEQ ID NO: 3920042 - RNA, 20 nt, Human adenovirus D
ucuggaggcgguggucccuu

SEQ ID NO: 3920043 - RNA, 16 nt, Human adenovirus D
ucuucaaccgcuuccc

SEQ ID NO: 3920044 - RNA, 20 nt, Human adenovirus D
ucuuccgcaacuuccagccc

SEQ ID NO: 3920045 - RNA, 21 nt, Human adenovirus D
ucuuccgcaacuuccagccca

SEQ ID NO: 3920046 - RNA, 17 nt, Human adenovirus D
ucuuccuccguagccug

SEQ ID NO: 3920047 - RNA, 17 nt, Human adenovirus D
ucuuuaugaacaugaag

SEQ ID NO: 3920048 - RNA, 14 nt, Human adenovirus D
ucuuugacacaccu

SEQ ID NO: 3920049 - RNA, 16 nt, Human adenovirus D
ugaaaaaauugaggac

SEQ ID NO: 3920050 - RNA, 17 nt, Human adenovirus D
ugaaaguaugucucugg

SEQ ID NO: 3920051 - RNA, 15 nt, Human adenovirus D
ugaaagucaggagca

SEQ ID NO: 3920052 - RNA, 16 nt, Human adenovirus D
ugaaauugcgggugau

SEQ ID NO: 3920053 - RNA, 20 nt, Human adenovirus D
ugaaccacacggccagcagg

SEQ ID NO: 3920054 - RNA, 16 nt, Human adenovirus D
ugaacccgcacuggcu

SEQ ID NO: 3920055 - RNA, 14 nt, Human adenovirus D
ugaaccgccgccgg

SEQ ID NO: 3920056 - RNA, 18 nt, Human adenovirus D
ugaacgacucgcugcugc

SEQ ID NO: 3920057 - RNA, 16 nt, Human adenovirus D
ugaacgcgcuggcgga

SEQ ID NO: 3920058 - RNA, 23 nt, Human adenovirus D
ugaacuacuggcuucuacagcca

SEQ ID NO: 3920059 - RNA, 18 nt, Human adenovirus D
ugaacugccuacaaccaa

SEQ ID NO: 3920060 - RNA, 23 nt, Human adenovirus D
ugaagacgccgccggucaucucc

SEQ ID NO: 3920061 - RNA, 21 nt, Human adenovirus D
ugaagauguaaccuugcaaga

SEQ ID NO: 3920062 - RNA, 21 nt, Human adenovirus D
ugaagcccgugaccugcagca

SEQ ID NO: 3920063 - RNA, 19 nt, Human adenovirus D
ugaagcccugcuauggcuc

SEQ ID NO: 3920064 - RNA, 14 nt, Human adenovirus D
ugaagcccugguuu

SEQ ID NO: 3920065 - RNA, 19 nt, Human adenovirus D
ugaaggccggcaugcccac

SEQ ID NO: 3920066 - RNA, 13 nt, Human adenovirus D
ugaaggggacgag

SEQ ID NO: 3920067 - RNA, 17 nt, Human adenovirus D
ugaagguuaguugcaga

SEQ ID NO: 3920068 - RNA, 17 nt, Human adenovirus D
ugaauaucagacaugcu

SEQ ID NO: 3920069 - RNA, 18 nt, Human adenovirus D
ugacagcgacgagacugg

SEQ ID NO: 3920070 - RNA, 22 nt, Human adenovirus D
ugacagcgacgagacuggccuc

SEQ ID NO: 3920071 - RNA, 23 nt, Human adenovirus D
ugacauggguggggaugaaccuu

SEQ ID NO: 3920072 - RNA, 14 nt, Human adenovirus D
ugaccaacuggucu

SEQ ID NO: 3920073 - RNA, 12 nt, Human adenovirus D
ugaccaagcugg

SEQ ID NO: 3920074 - RNA, 15 nt, Human adenovirus D
ugaccaauagacagc

SEQ ID NO: 3920075 - RNA, 18 nt, Human adenovirus D
ugaccacgguggugcaga

SEQ ID NO: 3920076 - RNA, 23 nt, Human adenovirus D
ugaccgagcugacggccagucug

SEQ ID NO: 3920077 - RNA, 16 nt, Human adenovirus D
ugaccgaggagcugag

SEQ ID NO: 3920078 - RNA, 20 nt, Human adenovirus D
ugaccuacgcgaccgugggg

SEQ ID NO: 3920079 - RNA, 16 nt, Human adenovirus D
ugaccugccuccacca

SEQ ID NO: 3920080 - RNA, 17 nt, Human adenovirus D
ugagaccaaguccaggg

SEQ ID NO: 3920081 - RNA, 19 nt, Human adenovirus D
ugagccagagcauguugca

SEQ ID NO: 3920082 - RNA, 14 nt, Human adenovirus D
ugagccgccagcug

SEQ ID NO: 3920083 - RNA, 15 nt, Human adenovirus D
ugagccgcgcgcugg

SEQ ID NO: 3920084 - RNA, 16 nt, Human adenovirus D
ugagcgacgaccuggg

SEQ ID NO: 3920085 - RNA, 15 nt, Human adenovirus D
ugagcgcgagccggc

SEQ ID NO: 3920086 - RNA, 16 nt, Human adenovirus D
ugaggggcggacccca

SEQ ID NO: 3920087 - RNA, 22 nt, Human adenovirus D
ugagguacaugggcaugagccc

SEQ ID NO: 3920088 - RNA, 14 nt, Human adenovirus D
ugagguggacgagg

SEQ ID NO: 3920089 - RNA, 20 nt, Human adenovirus D
ugagguuggcgauguugcca

SEQ ID NO: 3920090 - RNA, 16 nt, Human adenovirus D
ugaguagugggcgugg

SEQ ID NO: 3920091 - RNA, 17 nt, Human adenovirus D
ugaguccgucggccaug

SEQ ID NO: 3920092 - RNA, 12 nt, Human adenovirus D
ugaucucugcca

SEQ ID NO: 3920093 - RNA, 21 nt, Human adenovirus D
ugaucuuuaugaacaugaagu

SEQ ID NO: 3920094 - RNA, 20 nt, Human adenovirus D
ugauggccuguaccgggacc

SEQ ID NO: 3920095 - RNA, 22 nt, Human adenovirus D
ugcaaaaagucacuuaaguccu

SEQ ID NO: 3920096 - RNA, 17 nt, Human adenovirus D
ugcaacaugaccaagga

SEQ ID NO: 3920097 - RNA, 21 nt, Human adenovirus D
ugcaacaugaccaaggacugg

SEQ ID NO: 3920098 - RNA, 20 nt, Human adenovirus D
ugcaacccccagcuccugag

SEQ ID NO: 3920099 - RNA, 17 nt, Human adenovirus D
ugcaagaggcgacccau

SEQ ID NO: 3920100 - RNA, 22 nt, Human adenovirus D
ugcaagggugcgcuugagacuc

SEQ ID NO: 3920101 - RNA, 17 nt, Human adenovirus D
ugcaaguggggcggcaa

SEQ ID NO: 3920102 - RNA, 21 nt, Human adenovirus D
ugcacaguauugugggccugg

SEQ ID NO: 3920103 - RNA, 19 nt, Human adenovirus D
ugcaccacgcuucuucccc

SEQ ID NO: 3920104 - RNA, 19 nt, Human adenovirus D
ugcaccagccgcaccgcgg

SEQ ID NO: 3920105 - RNA, 19 nt, Human adenovirus D
ugcaccugggcgccagaag

SEQ ID NO: 3920106 - RNA, 23 nt, Human adenovirus D
ugcaccugggcgccagaaggggc

SEQ ID NO: 3920107 - RNA, 22 nt, Human adenovirus D
ugcacgagaaccgccuggggca

SEQ ID NO: 3920108 - RNA, 18 nt, Human adenovirus D
ugcacgcgggugagggug

SEQ ID NO: 3920109 - RNA, 22 nt, Human adenovirus D
ugcacuggcccgaccgacccau

SEQ ID NO: 3920110 - RNA, 22 nt, Human adenovirus D
ugcagaccgaccccuggcuccc

SEQ ID NO: 3920111 - RNA, 21 nt, Human adenovirus D
ugcagaccgcgggccuccucg

SEQ ID NO: 3920112 - RNA, 14 nt, Human adenovirus D
ugcagacucugcuc

SEQ ID NO: 3920113 - RNA, 17 nt, Human adenovirus D
ugcagcaggugcugccc

SEQ ID NO: 3920114 - RNA, 21 nt, Human adenovirus D
ugcagcaggugcugccccagg

SEQ ID NO: 3920115 - RNA, 14 nt, Human adenovirus D
ugcagccaguggcc

SEQ ID NO: 3920116 - RNA, 23 nt, Human adenovirus D
ugcagccgugaucccacagggca

SEQ ID NO: 3920117 - RNA, 19 nt, Human adenovirus D
ugcaggauaaauauggccu

SEQ ID NO: 3920118 - RNA, 22 nt, Human adenovirus D
ugcaggauaaauauggccugga

SEQ ID NO: 3920119 - RNA, 14 nt, Human adenovirus D
ugcaggccgggcug

SEQ ID NO: 3920120 - RNA, 14 nt, Human adenovirus D
ugcagggagccagg

SEQ ID NO: 3920121 - RNA, 15 nt, Human adenovirus D
ugcagggagccaggg

SEQ ID NO: 3920122 - RNA, 18 nt, Human adenovirus D
ugcaguccaaccuggacc

SEQ ID NO: 3920123 - RNA, 13 nt, Human adenovirus D
ugcaucucccagg

SEQ ID NO: 3920124 - RNA, 15 nt, Human adenovirus D
ugcauggccagccuu

SEQ ID NO: 3920125 - RNA, 22 nt, Human adenovirus D
ugccacucgcgggcggccauug

SEQ ID NO: 3920126 - RNA, 19 nt, Human adenovirus D
ugccauuuuucagcagagu

SEQ ID NO: 3920127 - RNA, 12 nt, Human adenovirus D
ugcccagcagca

SEQ ID NO: 3920128 - RNA, 21 nt, Human adenovirus D
ugccccaaaaguucuuugcca

SEQ ID NO: 3920129 - RNA, 20 nt, Human adenovirus D
ugccccaggcggugcugcug

SEQ ID NO: 3920130 - RNA, 21 nt, Human adenovirus D
ugcccgacuucaugagccaga

SEQ ID NO: 3920131 - RNA, 15 nt, Human adenovirus D
ugcccgccaccugca

SEQ ID NO: 3920132 - RNA, 15 nt, Human adenovirus D
ugccgcgcgggcagg

SEQ ID NO: 3920133 - RNA, 16 nt, Human adenovirus D
ugccgcgcgggcagga

SEQ ID NO: 3920134 - RNA, 18 nt, Human adenovirus D
ugccugggaauccugcac

SEQ ID NO: 3920135 - RNA, 19 nt, Human adenovirus D
ugccuggucaaacaggcaa

SEQ ID NO: 3920136 - RNA, 13 nt, Human adenovirus D
ugccuuccaaaau

SEQ ID NO: 3920137 - RNA, 16 nt, Human adenovirus D
ugccuuuaucagcacu

SEQ ID NO: 3920138 - RNA, 13 nt, Human adenovirus D
gaugcugagccug

SEQ ID NO: 3920139 - RNA, 23 nt, Human adenovirus D
gaugcugcccgccaccugcaacg

SEQ ID NO: 3920140 - RNA, 16 nt, Human adenovirus D
gauggaaaggucacuu

SEQ ID NO: 3920141 - RNA, 14 nt, Human adenovirus D
gauggaggagcagc

SEQ ID NO: 3920142 - RNA, 21 nt, Human adenovirus D
gauggccacggggagccccuu

SEQ ID NO: 3920143 - RNA, 21 nt, Human adenovirus D
gauggccuguaccgggaccga

SEQ ID NO: 3920144 - RNA, 14 nt, Human adenovirus D
gauggggccccgcc

SEQ ID NO: 3920145 - RNA, 14 nt, Human adenovirus D
gaugguagcagcag

SEQ ID NO: 3920146 - RNA, 23 nt, Human adenovirus D
gaugguggcgcgcaccucgcgcu

SEQ ID NO: 3920147 - RNA, 13 nt, Human adenovirus D
gaugucugugaag

SEQ ID NO: 3920148 - RNA, 18 nt, Human adenovirus D
gaugugcaguuuggccug

SEQ ID NO: 3920149 - RNA, 14 nt, Human adenovirus D
gaugugcggcagcu

SEQ ID NO: 3920150 - RNA, 16 nt, Human adenovirus D
gauguuggcuugcccu

SEQ ID NO: 3920151 - RNA, 22 nt, Human adenovirus D
gauuagagguagguuugaguag

SEQ ID NO: 3920152 - RNA, 20 nt, Human adenovirus D
gauuauccuuucccuggugg

SEQ ID NO: 3920153 - RNA, 17 nt, Human adenovirus D
gcaaaagcgccaggagg

SEQ ID NO: 3920154 - RNA, 19 nt, Human adenovirus D
gcaaaguuuuucaggggcu

SEQ ID NO: 3920155 - RNA, 16 nt, Human adenovirus D
gcaacaccugggcacu

SEQ ID NO: 3920156 - RNA, 12 nt, Human adenovirus D
gcaacagcaaaa

SEQ ID NO: 3920157 - RNA, 20 nt, Human adenovirus D
gcaacucguaccugggucac

SEQ ID NO: 3920158 - RNA, 21 nt, Human adenovirus D
gcaacugcgcguccgucagca

SEQ ID NO: 3920159 - RNA, 21 nt, Human adenovirus D
gcaagagcucaaaguaaaaaa

SEQ ID NO: 3920160 - RNA, 21 nt, Human adenovirus D
gcaagggcgaccagcucuggg

SEQ ID NO: 3920161 - RNA, 20 nt, Human adenovirus D
gcaagguccgcaggagucca

SEQ ID NO: 3920162 - RNA, 22 nt, Human adenovirus D
gcaaggucgaggagaccugcac

SEQ ID NO: 3920163 - RNA, 17 nt, Human adenovirus D
gcaaguacauagugacc

SEQ ID NO: 3920164 - RNA, 14 nt, Human adenovirus D
gcaagugcacagac

SEQ ID NO: 3920165 - RNA, 16 nt, Human adenovirus D
gcaauaccaccccaug

SEQ ID NO: 3920166 - RNA, 14 nt, Human adenovirus D
gcaaugcgggccug

SEQ ID NO: 3920167 - RNA, 20 nt, Human adenovirus D
gcaaugcuuuuuaggagacu

SEQ ID NO: 3920168 - RNA, 20 nt, Human adenovirus D
gcacaacaccgccuccaccc

SEQ ID NO: 3920169 - RNA, 18 nt, Human adenovirus D
gcacagacaccgucgccg

SEQ ID NO: 3920170 - RNA, 17 nt, Human adenovirus D
gcacaggcacacugaca

SEQ ID NO: 3920171 - RNA, 20 nt, Human adenovirus D
gcacaggcacacugacauac

SEQ ID NO: 3920172 - RNA, 20 nt, Human adenovirus D
gcacaguauugugggccugg

SEQ ID NO: 3920173 - RNA, 16 nt, Human adenovirus D
gcacaguuggcgaccc

SEQ ID NO: 3920174 - RNA, 18 nt, Human adenovirus D
gcacauaaucaccauguu

SEQ ID NO: 3920175 - RNA, 14 nt, Human adenovirus D
gcaccacugcaugg

SEQ ID NO: 3920176 - RNA, 16 nt, Human adenovirus D
gcaccagccgcaccgc

SEQ ID NO: 3920177 - RNA, 15 nt, Human adenovirus D
gcacccaccacaguu

SEQ ID NO: 3920178 - RNA, 20 nt, Human adenovirus D
gcacccgcugcgggguacug

SEQ ID NO: 3920179 - RNA, 22 nt, Human adenovirus D
gcacccgguacuacgccagccg

SEQ ID NO: 3920180 - RNA, 22 nt, Human adenovirus D
gcaccgucgccucggaccuggc

SEQ ID NO: 3920181 - RNA, 20 nt, Human adenovirus D
gcaccucgguacccuccucc

SEQ ID NO: 3920182 - RNA, 18 nt, Human adenovirus D
gcaccugugggaccuggc

SEQ ID NO: 3920183 - RNA, 21 nt, Human adenovirus D
gcacgagaaccgccuggggca

SEQ ID NO: 3920184 - RNA, 14 nt, Human adenovirus D
gcacgauccugacg

SEQ ID NO: 3920185 - RNA, 14 nt, Human adenovirus D
gcacgcagcagcgc

SEQ ID NO: 3920186 - RNA, 15 nt, Human adenovirus D
gcacgcucugaggcu

SEQ ID NO: 3920187 - RNA, 18 nt, Human adenovirus D
gcacggcuuacaacagcc

SEQ ID NO: 3920188 - RNA, 14 nt, Human adenovirus D
gcacgucgcccgag

SEQ ID NO: 3920189 - RNA, 23 nt, Human adenovirus D
gcacguggcggcggccaaccugg

SEQ ID NO: 3920190 - RNA, 20 nt, Human adenovirus D
gcacguuucgucaggcaggc

SEQ ID NO: 3920191 - RNA, 14 nt, Human adenovirus D
gcacuacagccggg

SEQ ID NO: 3920192 - RNA, 18 nt, Human adenovirus D
gcagaacuacacggucac

SEQ ID NO: 3920193 - RNA, 24 nt, Human adenovirus D
gcagaagaucccggcgcaguacgc

SEQ ID NO: 3920194 - RNA, 13 nt, Human adenovirus D
gcagacagggccu

SEQ ID NO: 3920195 - RNA, 15 nt, Human adenovirus D
gcagacagggccugc

SEQ ID NO: 3920196 - RNA, 19 nt, Human adenovirus D
gcagacggugaagcaggag

SEQ ID NO: 3920197 - RNA, 23 nt, Human adenovirus D
gcagacuuccucguuucgggggu

SEQ ID NO: 3920198 - RNA, 16 nt, Human adenovirus D
gcagagcacgcugcac

SEQ ID NO: 3920199 - RNA, 13 nt, Human adenovirus D
gcagaggaagagg

SEQ ID NO: 3920200 - RNA, 14 nt, Human adenovirus D
gcagcacaguaagu

SEQ ID NO: 3920201 - RNA, 20 nt, Human adenovirus D
gcagcacaucaagcagaugc

SEQ ID NO: 3920202 - RNA, 14 nt, Human adenovirus D
gcagcacuggaaca

SEQ ID NO: 3920203 - RNA, 19 nt, Human adenovirus D
gcagcacuggaacaccauc

SEQ ID NO: 3920204 - RNA, 15 nt, Human adenovirus D
gcagcagcaguagcc

SEQ ID NO: 3920205 - RNA, 18 nt, Human adenovirus D
gcagcaggguacccacug

SEQ ID NO: 3920206 - RNA, 13 nt, Human adenovirus D
gcagcccuucucc

SEQ ID NO: 3920207 - RNA, 18 nt, Human adenovirus D
gcagcccuucuccacggg

SEQ ID NO: 3920208 - RNA, 15 nt, Human adenovirus D
gcagccgcggcagcc

SEQ ID NO: 3920209 - RNA, 18 nt, Human adenovirus D
gcagccgcggcagccgca

SEQ ID NO: 3920210 - RNA, 22 nt, Human adenovirus D
gcagccgugaucccacagggca

SEQ ID NO: 3920211 - RNA, 12 nt, Human adenovirus D
gcagccugagcu

SEQ ID NO: 3920212 - RNA, 20 nt, Human adenovirus D
gcagcgccagucccucaucc

SEQ ID NO: 3920213 - RNA, 17 nt, Human adenovirus D
gcagcgccccgaggaca

SEQ ID NO: 3920214 - RNA, 17 nt, Human adenovirus D
gcagcgcugcacgggcu

SEQ ID NO: 3920215 - RNA, 20 nt, Human adenovirus D
gcagcggggaggagcccgag

SEQ ID NO: 3920216 - RNA, 19 nt, Human adenovirus D
gcagcucaucgacuggugc

SEQ ID NO: 3920217 - RNA, 22 nt, Human adenovirus D
gcagcuccgguugugcagcccc

SEQ ID NO: 3920218 - RNA, 20 nt, Human adenovirus D
gcagcucuucccgcugaacu

SEQ ID NO: 3920219 - RNA, 15 nt, Human adenovirus D
gcagcuugcugacgc

SEQ ID NO: 3920220 - RNA, 16 nt, Human adenovirus D
gcaggaguccaccgcu

SEQ ID NO: 3920221 - RNA, 19 nt, Human adenovirus D
gcaggaguccaccgcuccg

SEQ ID NO: 3920222 - RNA, 23 nt, Human adenovirus D
gcaggauaaauauggccuggagc

SEQ ID NO: 3920223 - RNA, 16 nt, Human adenovirus D
gcaggccauggacgag

SEQ ID NO: 3920224 - RNA, 22 nt, Human adenovirus D
gcaggccgugcugcucgagcgc

SEQ ID NO: 3920225 - RNA, 13 nt, Human adenovirus D
gcaggcgcccagc

SEQ ID NO: 3920226 - RNA, 15 nt, Human adenovirus D
gcaggcgggacagag

SEQ ID NO: 3920227 - RNA, 16 nt, Human adenovirus D
gcaggcgucgcagcgc

SEQ ID NO: 3920228 - RNA, 16 nt, Human adenovirus D
gcagggcgcccagcau

SEQ ID NO: 3920229 - RNA, 18 nt, Human adenovirus D
gcagggugaccaggucca

SEQ ID NO: 3920230 - RNA, 22 nt, Human adenovirus D
gcagggugaccagguccacgcu

SEQ ID NO: 3920231 - RNA, 17 nt, Human adenovirus D
gcagguggacgagccgc

SEQ ID NO: 3920232 - RNA, 13 nt, Human adenovirus D
gcagguggcgccg

SEQ ID NO: 3920233 - RNA, 14 nt, Human adenovirus D
gcagguggcgccgg

SEQ ID NO: 3920234 - RNA, 19 nt, Human adenovirus D
gcagguggcgccgggccug

SEQ ID NO: 3920235 - RNA, 16 nt, Human adenovirus D
gcagguguccgagcuc

SEQ ID NO: 3920236 - RNA, 21 nt, Human adenovirus D
gcaguagccccucugugccca

SEQ ID NO: 3920237 - RNA, 23 nt, Human adenovirus D
gcaguccaugcccaacaggccua

SEQ ID NO: 3920238 - RNA, 19 nt, Human adenovirus D
gcaguccgccaagcuccuc

SEQ ID NO: 3920239 - RNA, 14 nt, Human adenovirus D
gcagugggcgcaga

SEQ ID NO: 3920240 - RNA, 16 nt, Human adenovirus D
gcaguugaccaugagc

SEQ ID NO: 3920241 - RNA, 21 nt, Human adenovirus D
gcauaauauggugaagggcug

SEQ ID NO: 3920242 - RNA, 16 nt, Human adenovirus D
gcauccacaaggccgu

SEQ ID NO: 3920243 - RNA, 22 nt, Human adenovirus D
gcauccuuuaauccgugugcug

SEQ ID NO: 3920244 - RNA, 18 nt, Human adenovirus D
gcaugcccaccacgcgca

SEQ ID NO: 3920245 - RNA, 14 nt, Human adenovirus D
gcaugcggggggag

SEQ ID NO: 3920246 - RNA, 14 nt, Human adenovirus D
gcauggccucgugc

SEQ ID NO: 3920247 - RNA, 16 nt, Human adenovirus D
gcauguacggaggagc

SEQ ID NO: 3920248 - RNA, 18 nt, Human adenovirus D
gcauguacggaggagcca

SEQ ID NO: 3920249 - RNA, 23 nt, Human adenovirus D
gcauuacuauuacugccacugcc

SEQ ID NO: 3920250 - RNA, 17 nt, Human adenovirus D
gcauuggcagccgagcc

SEQ ID NO: 3920251 - RNA, 15 nt, Human adenovirus D
gcauugucugccugg

SEQ ID NO: 3920252 - RNA, 20 nt, Human adenovirus D
gccaacauuacuucuggcac

SEQ ID NO: 3920253 - RNA, 17 nt, Human adenovirus D
gccaaccgcacccgcgc

SEQ ID NO: 3920254 - RNA, 19 nt, Human adenovirus D
gccaauaacgggauagaga

SEQ ID NO: 3920255 - RNA, 19 nt, Human adenovirus D
gccacaugacccugcaugg

SEQ ID NO: 3920256 - RNA, 22 nt, Human adenovirus D
gacagugcuccacucgacccug

SEQ ID NO: 3920257 - RNA, 14 nt, Human adenovirus D
gacaguggcagcgu

SEQ ID NO: 3920258 - RNA, 15 nt, Human adenovirus D
gacauacaaaaaucg

SEQ ID NO: 3920259 - RNA, 19 nt, Human adenovirus D
gacaucgcgaaccaggcag

SEQ ID NO: 3920260 - RNA, 19 nt, Human adenovirus D
gacaucgcuucccugaacu

SEQ ID NO: 3920261 - RNA, 22 nt, Human adenovirus D
gacaugaccgcgcgcaacaugg

SEQ ID NO: 3920262 - RNA, 15 nt, Human adenovirus D
gacauggccagcacg

SEQ ID NO: 3920263 - RNA, 15 nt, Human adenovirus D
gacaugggggcggac

SEQ ID NO: 3920264 - RNA, 19 nt, Human adenovirus D
gacaugggggcggaccugc

SEQ ID NO: 3920265 - RNA, 15 nt, Human adenovirus D
gacauuuuaaugaau

SEQ ID NO: 3920266 - RNA, 21 nt, Human adenovirus D
gaccaaucgcgcccgcagcac

SEQ ID NO: 3920267 - RNA, 14 nt, Human adenovirus D
gaccaccaccugga

SEQ ID NO: 3920268 - RNA, 16 nt, Human adenovirus D
gaccaccugcgcgagg

SEQ ID NO: 3920269 - RNA, 14 nt, Human adenovirus D
gaccacgguggugc

SEQ ID NO: 3920270 - RNA, 19 nt, Human adenovirus D
gaccacgguggugcagaac

SEQ ID NO: 3920271 - RNA, 22 nt, Human adenovirus D
gaccacugccgccgccugcgcu

SEQ ID NO: 3920272 - RNA, 17 nt, Human adenovirus D
gaccagaacuuccagca

SEQ ID NO: 3920273 - RNA, 22 nt, Human adenovirus D
gaccagaccaccuggugauggc

SEQ ID NO: 3920274 - RNA, 12 nt, Human adenovirus D
gaccaugagcuc

SEQ ID NO: 3920275 - RNA, 22 nt, Human adenovirus D
gacccaguggcgagaggcgagc

SEQ ID NO: 3920276 - RNA, 17 nt, Human adenovirus D
gacccaugagcugcgag

SEQ ID NO: 3920277 - RNA, 11 nt, Human adenovirus D
gacccccuucc

SEQ ID NO: 3920278 - RNA, 18 nt, Human adenovirus D
gaccgaguucagcuccag

SEQ ID NO: 3920279 - RNA, 23 nt, Human adenovirus D
gaccgcauccacaaggccgugag

SEQ ID NO: 3920280 - RNA, 16 nt, Human adenovirus D
gaccgcgagcugaugc

SEQ ID NO: 3920281 - RNA, 22 nt, Human adenovirus D
gaccgcggccguagcaggcgcc

SEQ ID NO: 3920282 - RNA, 17 nt, Human adenovirus D
gaccgcugucucagccu

SEQ ID NO: 3920283 - RNA, 16 nt, Human adenovirus D
gaccggucgacgguga

SEQ ID NO: 3920284 - RNA, 18 nt, Human adenovirus D
gaccgugccgcggugcgc

SEQ ID NO: 3920285 - RNA, 16 nt, Human adenovirus D
gaccuaccaaugaaaa

SEQ ID NO: 3920286 - RNA, 18 nt, Human adenovirus D
gaccucccaccccagaaa

SEQ ID NO: 3920287 - RNA, 21 nt, Human adenovirus D
gaccugcagcaggugcugccc

SEQ ID NO: 3920288 - RNA, 17 nt, Human adenovirus D
gaccugccuccaccacc

SEQ ID NO: 3920289 - RNA, 22 nt, Human adenovirus D
gaccugcgcgucgacggcgccu

SEQ ID NO: 3920290 - RNA, 14 nt, Human adenovirus D
gaccuggcggaggc

SEQ ID NO: 3920291 - RNA, 23 nt, Human adenovirus D
gaccuucauaauagaaacagauc

SEQ ID NO: 3920292 - RNA, 14 nt, Human adenovirus D
gaccuuccaggaga

SEQ ID NO: 3920293 - RNA, 17 nt, Human adenovirus D
gaccuugcagagcagcu

SEQ ID NO: 3920294 - RNA, 21 nt, Human adenovirus D
gaccuugcagagcagcucuuc

SEQ ID NO: 3920295 - RNA, 13 nt, Human adenovirus D
gacgacggcgacg

SEQ ID NO: 3920296 - RNA, 17 nt, Human adenovirus D
gacgagaaccugaagga

SEQ ID NO: 3920297 - RNA, 16 nt, Human adenovirus D
gacgagacgcgcgcgg

SEQ ID NO: 3920298 - RNA, 14 nt, Human adenovirus D
gacgagacuggccu

SEQ ID NO: 3920299 - RNA, 14 nt, Human adenovirus D
gacgcacuggccga

SEQ ID NO: 3920300 - RNA, 14 nt, Human adenovirus D
gacgcccuggccga

SEQ ID NO: 3920301 - RNA, 15 nt, Human adenovirus D
gacgccgaggcucug

SEQ ID NO: 3920302 - RNA, 14 nt, Human adenovirus D
gacgcgcucccggc

SEQ ID NO: 3920303 - RNA, 20 nt, Human adenovirus D
gacgcugagcgacgaccugg

SEQ ID NO: 3920304 - RNA, 19 nt, Human adenovirus D
gacgcugcgcuuugugccc

SEQ ID NO: 3920305 - RNA, 19 nt, Human adenovirus D
gacgguaagcacgagcggc

SEQ ID NO: 3920306 - RNA, 16 nt, Human adenovirus D
gacggucugcaggccg

SEQ ID NO: 3920307 - RNA, 18 nt, Human adenovirus D
gacuaucuaugaaagcau

SEQ ID NO: 3920308 - RNA, 21 nt, Human adenovirus D
gacucaggggguugcgcacgu

SEQ ID NO: 3920309 - RNA, 18 nt, Human adenovirus D
gacucauccugcuggugc

SEQ ID NO: 3920310 - RNA, 14 nt, Human adenovirus D
gacuccgucacggg

SEQ ID NO: 3920311 - RNA, 18 nt, Human adenovirus D
gacucgcagacgagcggc

SEQ ID NO: 3920312 - RNA, 20 nt, Human adenovirus D
gacugauggccacggggagc

SEQ ID NO: 3920313 - RNA, 15 nt, Human adenovirus D
gacugggaggcugcg

SEQ ID NO: 3920314 - RNA, 21 nt, Human adenovirus D
gacuggguuaguaugucccug

SEQ ID NO: 3920315 - RNA, 18 nt, Human adenovirus D
gacuucaugagccagagc

SEQ ID NO: 3920316 - RNA, 22 nt, Human adenovirus D
gagaauuuuuguuguacucugu

SEQ ID NO: 3920317 - RNA, 18 nt, Human adenovirus D
gagaccaacggcugcauc

SEQ ID NO: 3920318 - RNA, 15 nt, Human adenovirus D
gagacccaggucauc

SEQ ID NO: 3920319 - RNA, 24 nt, Human adenovirus D
gagacccaggucaucgguaccuuc

SEQ ID NO: 3920320 - RNA, 17 nt, Human adenovirus D
gagaccgacgcugggcu

SEQ ID NO: 3920321 - RNA, 20 nt, Human adenovirus D
gagaccggaggcgugcacug

SEQ ID NO: 3920322 - RNA, 12 nt, Human adenovirus D
gagaccugcacu

SEQ ID NO: 3920323 - RNA, 14 nt, Human adenovirus D
gagagaacaaaacc

SEQ ID NO: 3920324 - RNA, 14 nt, Human adenovirus D
gagagcgcuggcgu

SEQ ID NO: 3920325 - RNA, 18 nt, Human adenovirus D
gagagcgugauggcgcag

SEQ ID NO: 3920326 - RNA, 22 nt, Human adenovirus D
gagagguugaaaaggcagcuga

SEQ ID NO: 3920327 - RNA, 19 nt, Human adenovirus D
gagauagcaguugaccaug

SEQ ID NO: 3920328 - RNA, 23 nt, Human adenovirus D
gagauagcaguugaccaugagcu

SEQ ID NO: 3920329 - RNA, 19 nt, Human adenovirus D
gagauaugugcagcagagc

SEQ ID NO: 3920330 - RNA, 22 nt, Human adenovirus D
gagaucaacuacaaggacuaca

SEQ ID NO: 3920331 - RNA, 15 nt, Human adenovirus D
gagaucggcaccagc

SEQ ID NO: 3920332 - RNA, 17 nt, Human adenovirus D
gagaucguccuucacuc

SEQ ID NO: 3920333 - RNA, 21 nt, Human adenovirus D
gagaugccccagcagaagcag

SEQ ID NO: 3920334 - RNA, 19 nt, Human adenovirus D
gagaugcgacccaugagcu

SEQ ID NO: 3920335 - RNA, 22 nt, Human adenovirus D
gagauggugggccguuggaaga

SEQ ID NO: 3920336 - RNA, 16 nt, Human adenovirus D
gagcaaccuccugggc

SEQ ID NO: 3920337 - RNA, 19 nt, Human adenovirus D
gagcaaucccacgccgagc

SEQ ID NO: 3920338 - RNA, 17 nt, Human adenovirus D
gagcacagcaguacaag

SEQ ID NO: 3920339 - RNA, 19 nt, Human adenovirus D
gagcaccccaacggcccug

SEQ ID NO: 3920340 - RNA, 22 nt, Human adenovirus D
gagcacgcccgccauggggcgc

SEQ ID NO: 3920341 - RNA, 19 nt, Human adenovirus D
gagcagaccuuccaggaga

SEQ ID NO: 3920342 - RNA, 16 nt, Human adenovirus D
gagcaggaccugggcu

SEQ ID NO: 3920343 - RNA, 19 nt, Human adenovirus D
gagcaggguaaagccagca

SEQ ID NO: 3920344 - RNA, 15 nt, Human adenovirus D
gagccacugcuaccu

SEQ ID NO: 3920345 - RNA, 12 nt, Human adenovirus D
gagccauagagg

SEQ ID NO: 3920346 - RNA, 21 nt, Human adenovirus D
gagccauugaccaccagggag

SEQ ID NO: 3920347 - RNA, 16 nt, Human adenovirus D
gagccgccagcuggcc

SEQ ID NO: 3920348 - RNA, 23 nt, Human adenovirus D
gagccgcgcgcuggggcagaacg

SEQ ID NO: 3920349 - RNA, 14 nt, Human adenovirus D
gagccggcucgucu

SEQ ID NO: 3920350 - RNA, 16 nt, Human adenovirus D
gagccucccaggaggc

SEQ ID NO: 3920351 - RNA, 15 nt, Human adenovirus D
gagccugcgcccgcg

SEQ ID NO: 3920352 - RNA, 18 nt, Human adenovirus D
gagcgugauggcgcaggc

SEQ ID NO: 3920353 - RNA, 18 nt, Human adenovirus D
gagcucgaaugcaugcga

SEQ ID NO: 3920354 - RNA, 13 nt, Human adenovirus D
gagcucuugcagg

SEQ ID NO: 3920355 - RNA, 14 nt, Human adenovirus D
gagcugacggccag

SEQ ID NO: 3920356 - RNA, 23 nt, Human adenovirus D
gagcugagaccagaccaccuggu

SEQ ID NO: 3920357 - RNA, 22 nt, Human adenovirus D
gagcugaucucgcugccgcugg

SEQ ID NO: 3920358 - RNA, 18 nt, Human adenovirus D
gagcugaugcugagccug

SEQ ID NO: 3920359 - RNA, 16 nt, Human adenovirus D
gagcugcgcgagggcc

SEQ ID NO: 3920360 - RNA, 17 nt, Human adenovirus D
gagcugcgcgagggccu

SEQ ID NO: 3920361 - RNA, 19 nt, Human adenovirus D
gagcugcgcgagggccugg

SEQ ID NO: 3920362 - RNA, 15 nt, Human adenovirus D
gagcugggagggaug

SEQ ID NO: 3920363 - RNA, 20 nt, Human adenovirus D
gagcuguccauggugucgcg

SEQ ID NO: 3920364 - RNA, 22 nt, Human adenovirus D
gagcuuaacuuguaugugccuu

SEQ ID NO: 3920365 - RNA, 18 nt, Human adenovirus D
gagcuugcccuuggaaga

SEQ ID NO: 3920366 - RNA, 16 nt, Human adenovirus D
gaggacgaguaccuga

SEQ ID NO: 3920367 - RNA, 22 nt, Human adenovirus D
gaggacuuaaccacccacgagc

SEQ ID NO: 3920368 - RNA, 15 nt, Human adenovirus D
gaggagaccugcacu

SEQ ID NO: 3920369 - RNA, 19 nt, Human adenovirus D
gaggagcgcauccugagau

SEQ ID NO: 3920370 - RNA, 23 nt, Human adenovirus D
gaggagcugugucgggccuacga

SEQ ID NO: 3920371 - RNA, 16 nt, Human adenovirus D
gaggaggggggccacc

SEQ ID NO: 3920372 - RNA, 12 nt, Human adenovirus D
gaggcauggcag

SEQ ID NO: 3920373 - RNA, 21 nt, Human adenovirus D
gaggcauuggagaaugcugcu

SEQ ID NO: 3920374 - RNA, 20 nt, Human adenovirus D
gaggccauaggccaggcgca

SEQ ID NO: 3920375 - RNA, 20 nt, Human adenovirus D
gaggcccaucuacaggccag

SEQ ID NO: 3920376 - RNA, 18 nt, Human adenovirus D
gaggcgagcagcuguuga

SEQ ID NO: 3920377 - RNA, 22 nt, Human adenovirus D
gaggcgguccccgcccagcgag

SEQ ID NO: 3920378 - RNA, 15 nt, Human adenovirus D
gaggcuauuaagaag

SEQ ID NO: 3920379 - RNA, 20 nt, Human adenovirus D
gagggcaaugcuagagugag

SEQ ID NO: 3920380 - RNA, 17 nt, Human adenovirus D
gagggcaugggucaggc

SEQ ID NO: 3920381 - RNA, 21 nt, Human adenovirus D
gagggcaugggucaggcagcg

SEQ ID NO: 3920382 - RNA, 13 nt, Human adenovirus D
gaggggcuccucu

SEQ ID NO: 3920383 - RNA, 15 nt, Human adenovirus D
gaggggggccaccuc

SEQ ID NO: 3920384 - RNA, 16 nt, Human adenovirus D
gagggucuggagcucg

SEQ ID NO: 3920385 - RNA, 19 nt, Human adenovirus D
gagguacaugggcaugagc

SEQ ID NO: 3920386 - RNA, 13 nt, Human adenovirus D
gaggugcagaccg

SEQ ID NO: 3920387 - RNA, 20 nt, Human adenovirus D
gaggugccccagagcgaggu

SEQ ID NO: 3920388 - RNA, 22 nt, Human adenovirus D
gagguggacgagggggcaguag

SEQ ID NO: 3920389 - RNA, 15 nt, Human adenovirus D
gagguugagcuccac

SEQ ID NO: 3920390 - RNA, 22 nt, Human adenovirus D
gaguccuuuagacaacagccgc

SEQ ID NO: 3920391 - RNA, 17 nt, Human adenovirus D
gagucgaggucagcagc

SEQ ID NO: 3920392 - RNA, 15 nt, Human adenovirus D
gagucgcggaugaag

SEQ ID NO: 3920393 - RNA, 16 nt, Human adenovirus D
gagucgcggcagaacc

SEQ ID NO: 3920394 - RNA, 22 nt, Human adenovirus D
gagucugaaaaacagaaagcau

SEQ ID NO: 3920395 - RNA, 15 nt, Human adenovirus D
gagugaggcacugcu

SEQ ID NO: 3920396 - RNA, 18 nt, Human adenovirus D
gaguggccucucgcucca

SEQ ID NO: 3920397 - RNA, 13 nt, Human adenovirus D
gaguggcggcccu

SEQ ID NO: 3920398 - RNA, 21 nt, Human adenovirus D
gaguucgcuccgcggcggcgc

SEQ ID NO: 3920399 - RNA, 15 nt, Human adenovirus D
gauaaauauggccug

SEQ ID NO: 3920400 - RNA, 18 nt, Human adenovirus D
gauaaauauggccuggag

SEQ ID NO: 3920401 - RNA, 14 nt, Human adenovirus D
gaucaagugccaca

SEQ ID NO: 3920402 - RNA, 22 nt, Human adenovirus D
gauccagucauagcaggggcgc

SEQ ID NO: 3920403 - RNA, 20 nt, Human adenovirus D
gaucccagcguaagcgcgcg

SEQ ID NO: 3920404 - RNA, 14 nt, Human adenovirus D
gaucccgcuguggc

SEQ ID NO: 3920405 - RNA, 13 nt, Human adenovirus D
gauccugcugcuc

SEQ ID NO: 3920406 - RNA, 19 nt, Human adenovirus D
gaucgacgguggacgggcg

SEQ ID NO: 3920407 - RNA, 17 nt, Human adenovirus D
gaucgccgcgacccgcg

SEQ ID NO: 3920408 - RNA, 15 nt, Human adenovirus D
gaucgcgaggacacc

SEQ ID NO: 3920409 - RNA, 21 nt, Human adenovirus D
gaucgugguaaacgggcccug

SEQ ID NO: 3920410 - RNA, 18 nt, Human adenovirus D
gaucuccuccuccuggag

SEQ ID NO: 3920411 - RNA, 20 nt, Human adenovirus D
gaucuccuccuccuggagau

SEQ ID NO: 3920412 - RNA, 22 nt, Human adenovirus D
gaugaaagucaggagcagcgcc

SEQ ID NO: 3920413 - RNA, 23 nt, Human adenovirus D
gaugaacaacgccaucuuggaaa

SEQ ID NO: 3920414 - RNA, 13 nt, Human adenovirus D
gaugagcugcgag

SEQ ID NO: 3920415 - RNA, 17 nt, Human adenovirus D
gaugaggauugggagga

SEQ ID NO: 3920416 - RNA, 15 nt, Human adenovirus D
gaugaugaccgagcu

SEQ ID NO: 3920417 - RNA, 18 nt, Human adenovirus D
gaugauguccuugaggag

SEQ ID NO: 3920418 - RNA, 20 nt, Human adenovirus D
gaugccggcagcgguggugg

SEQ ID NO: 3920419 - RNA, 21 nt, Human adenovirus D
gccaccagucccuuuuccagg

SEQ ID NO: 3920420 - RNA, 18 nt, Human adenovirus D
gccaccucgccgcgcagg

SEQ ID NO: 3920421 - RNA, 14 nt, Human adenovirus D
gccacuacagcuga

SEQ ID NO: 3920422 - RNA, 19 nt, Human adenovirus D
gccacugcaccccccgcag

SEQ ID NO: 3920423 - RNA, 22 nt, Human adenovirus D
gccacuuccgcgcuccgugggg

SEQ ID NO: 3920424 - RNA, 19 nt, Human adenovirus D
gccagacagccgugccauc

SEQ ID NO: 3920425 - RNA, 22 nt, Human adenovirus D
gccagacgcacgggccgccggg

SEQ ID NO: 3920426 - RNA, 21 nt, Human adenovirus D
gccagaugcaucccguccugc

SEQ ID NO: 3920427 - RNA, 13 nt, Human adenovirus D
gccagcacguacu

SEQ ID NO: 3920428 - RNA, 18 nt, Human adenovirus D
gccagccgacuucuccag

SEQ ID NO: 3920429 - RNA, 18 nt, Human adenovirus D
gccagcgcgugcugcgcg

SEQ ID NO: 3920430 - RNA, 21 nt, Human adenovirus D
gccagcuggccgcccugaccc

SEQ ID NO: 3920431 - RNA, 12 nt, Human adenovirus D
gccaggaggcgg

SEQ ID NO: 3920432 - RNA, 17 nt, Human adenovirus D
gccaggugagcucgggc

SEQ ID NO: 3920433 - RNA, 20 nt, Human adenovirus D
gccaucaagaaccugcuccu

SEQ ID NO: 3920434 - RNA, 14 nt, Human adenovirus D
gccaugacagcgac

SEQ ID NO: 3920435 - RNA, 16 nt, Human adenovirus D
gccauggggcgccgcc

SEQ ID NO: 3920436 - RNA, 17 nt, Human adenovirus D
gcccaacggcaccugcg

SEQ ID NO: 3920437 - RNA, 20 nt, Human adenovirus D
gcccaacucgcggcugcugc

SEQ ID NO: 3920438 - RNA, 15 nt, Human adenovirus D
gcccacguccaaaau

SEQ ID NO: 3920439 - RNA, 22 nt, Human adenovirus D
gcccagcagcauguacggagga

SEQ ID NO: 3920440 - RNA, 14 nt, Human adenovirus D
gcccaggccgcucu

SEQ ID NO: 3920441 - RNA, 18 nt, Human adenovirus D
gcccagguuuuccaugca

SEQ ID NO: 3920442 - RNA, 17 nt, Human adenovirus D
gcccagugcuuccagca

SEQ ID NO: 3920443 - RNA, 23 nt, Human adenovirus D
gcccauaauucagggugcuccag

SEQ ID NO: 3920444 - RNA, 16 nt, Human adenovirus D
gcccauuccuggagau

SEQ ID NO: 3920445 - RNA, 21 nt, Human adenovirus D
gcccauuucacaguguacacg

SEQ ID NO: 3920446 - RNA, 18 nt, Human adenovirus D
gccccacaucgaggcccu

SEQ ID NO: 3920447 - RNA, 21 nt, Human adenovirus D
gccccagaugggccuggccgc

SEQ ID NO: 3920448 - RNA, 14 nt, Human adenovirus D
gccccccgcccgcg

SEQ ID NO: 3920449 - RNA, 16 nt, Human adenovirus D
gccccgcgggcagggg

SEQ ID NO: 3920450 - RNA, 20 nt, Human adenovirus D
gccccucaugaacacacugc

SEQ ID NO: 3920451 - RNA, 17 nt, Human adenovirus D
gccccugcaagugcaca

SEQ ID NO: 3920452 - RNA, 20 nt, Human adenovirus D
gcccgagggucgcuggcugc

SEQ ID NO: 3920453 - RNA, 23 nt, Human adenovirus D
gcccgagggucgcuggcugcugg

SEQ ID NO: 3920454 - RNA, 20 nt, Human adenovirus D
gcccgaguuguccugguagg

SEQ ID NO: 3920455 - RNA, 18 nt, Human adenovirus D
gcccgauagccgccagga

SEQ ID NO: 3920456 - RNA, 17 nt, Human adenovirus D
gcccgccauggggcgcc

SEQ ID NO: 3920457 - RNA, 20 nt, Human adenovirus D
gcccgccauggggcgccgcc

SEQ ID NO: 3920458 - RNA, 19 nt, Human adenovirus D
gcccgggacggaggcucgg

SEQ ID NO: 3920459 - RNA, 20 nt, Human adenovirus D
gcccgucgccgcaccugucc

SEQ ID NO: 3920460 - RNA, 18 nt, Human adenovirus D
gcccgugaccugcagcag

SEQ ID NO: 3920461 - RNA, 17 nt, Human adenovirus D
gcccgugggcugcggcu

SEQ ID NO: 3920462 - RNA, 19 nt, Human adenovirus D
gcccguucucgcuggucac

SEQ ID NO: 3920463 - RNA, 22 nt, Human adenovirus D
gcccucgaugaaagucaggagc

SEQ ID NO: 3920464 - RNA, 16 nt, Human adenovirus D
gcccugcucaccugca

SEQ ID NO: 3920465 - RNA, 17 nt, Human adenovirus D
gcccugcucaccugcac

SEQ ID NO: 3920466 - RNA, 18 nt, Human adenovirus D
gcccugcuggaugugccc

SEQ ID NO: 3920467 - RNA, 14 nt, Human adenovirus D
gcccugcuggccga

SEQ ID NO: 3920468 - RNA, 19 nt, Human adenovirus D
gcccuguggacgcuguuag

SEQ ID NO: 3920469 - RNA, 12 nt, Human adenovirus D
gcccuuccagca

SEQ ID NO: 3920470 - RNA, 14 nt, Human adenovirus D
gcccuuccagcaca

SEQ ID NO: 3920471 - RNA, 13 nt, Human adenovirus D
gcccuugccaccu

SEQ ID NO: 3920472 - RNA, 14 nt, Human adenovirus D
gcccuugccaccua

SEQ ID NO: 3920473 - RNA, 18 nt, Human adenovirus D
gcccuuuuugccggccga

SEQ ID NO: 3920474 - RNA, 23 nt, Human adenovirus D
gccgaaauuggugcgcuggggcu

SEQ ID NO: 3920475 - RNA, 14 nt, Human adenovirus D
gccgaggcuagcac

SEQ ID NO: 3920476 - RNA, 13 nt, Human adenovirus D
gccgcagcucuuc

SEQ ID NO: 3920477 - RNA, 11 nt, Human adenovirus D
gccgccaggcc

SEQ ID NO: 3920478 - RNA, 20 nt, Human adenovirus D
gccgccaucgaacacgccac

SEQ ID NO: 3920479 - RNA, 14 nt, Human adenovirus D
gccgccgccugcgc

SEQ ID NO: 3920480 - RNA, 16 nt, Human adenovirus D
gccgccgcggccaucu

SEQ ID NO: 3920481 - RNA, 15 nt, Human adenovirus D
gccgccgucugcccc

SEQ ID NO: 3920482 - RNA, 20 nt, Human adenovirus D
gccgcgggcgccucccagga

SEQ ID NO: 3920483 - RNA, 17 nt, Human adenovirus D
gccgcgguuaugcaggg

SEQ ID NO: 3920484 - RNA, 18 nt, Human adenovirus D
gccgcguaagcaggagca

SEQ ID NO: 3920485 - RNA, 19 nt, Human adenovirus D
gccgcguccccgcccgccg

SEQ ID NO: 3920486 - RNA, 18 nt, Human adenovirus D
gccgcgugguagcccccu

SEQ ID NO: 3920487 - RNA, 18 nt, Human adenovirus D
gccgcugcaaccugugcu

SEQ ID NO: 3920488 - RNA, 23 nt, Human adenovirus D
gccgcugcaaccugugcucuccg

SEQ ID NO: 3920489 - RNA, 16 nt, Human adenovirus D
gccggcgcuagccagc

SEQ ID NO: 3920490 - RNA, 14 nt, Human adenovirus D
gccggcggcgagga

SEQ ID NO: 3920491 - RNA, 14 nt, Human adenovirus D
gccggcggcgcgag

SEQ ID NO: 3920492 - RNA, 13 nt, Human adenovirus D
gccggcucaagca

SEQ ID NO: 3920493 - RNA, 22 nt, Human adenovirus D
gccgggccaugaugcgagccgc

SEQ ID NO: 3920494 - RNA, 21 nt, Human adenovirus D
gccguccuuucgcugcugccg

SEQ ID NO: 3920495 - RNA, 17 nt, Human adenovirus D
gccgugagcgcgagccg

SEQ ID NO: 3920496 - RNA, 23 nt, Human adenovirus D
gccguguccacgcauugcaugag

SEQ ID NO: 3920497 - RNA, 16 nt, Human adenovirus D
gccucccaggaggcga

SEQ ID NO: 3920498 - RNA, 19 nt, Human adenovirus D
gccuccccgcagaaaucag

SEQ ID NO: 3920499 - RNA, 19 nt, Human adenovirus D
gccucccgcccgacacugc

SEQ ID NO: 3920500 - RNA, 21 nt, Human adenovirus D
gccucgagcuacaugcccagc

SEQ ID NO: 3920501 - RNA, 15 nt, Human adenovirus D
gccucggaccuggcc

SEQ ID NO: 3920502 - RNA, 13 nt, Human adenovirus D
gccucuccaucag

SEQ ID NO: 3920503 - RNA, 22 nt, Human adenovirus D
gccucuccaucagcgcccucag

SEQ ID NO: 3920504 - RNA, 21 nt, Human adenovirus D
gccucugcgugaagaccacug

SEQ ID NO: 3920505 - RNA, 15 nt, Human adenovirus D
gccugccccucauga

SEQ ID NO: 3920506 - RNA, 23 nt, Human adenovirus D
gccugcgcccgcgccgcggcgac

SEQ ID NO: 3920507 - RNA, 14 nt, Human adenovirus D
gccuguacccagag

SEQ ID NO: 3920508 - RNA, 15 nt, Human adenovirus D
gccuguacccagagc

SEQ ID NO: 3920509 - RNA, 13 nt, Human adenovirus D
gccuuccccuccg

SEQ ID NO: 3920510 - RNA, 14 nt, Human adenovirus D
gccuucgugcacug

SEQ ID NO: 3920511 - RNA, 18 nt, Human adenovirus D
gccuucuauggaggcaga

SEQ ID NO: 3920512 - RNA, 21 nt, Human adenovirus D
gccuucuauggaggcagagcu

SEQ ID NO: 3920513 - RNA, 16 nt, Human adenovirus D
gccuuguaccugcccg

SEQ ID NO: 3920514 - RNA, 14 nt, Human adenovirus D
gccuuguagggaca

SEQ ID NO: 3920515 - RNA, 11 nt, Human adenovirus D
gcgaacagcag

SEQ ID NO: 3920516 - RNA, 14 nt, Human adenovirus D
gcgaaccaggcagu

SEQ ID NO: 3920517 - RNA, 19 nt, Human adenovirus D
gcgaaggugucccugacca

SEQ ID NO: 3920518 - RNA, 13 nt, Human adenovirus D
gcgacccaugagc

SEQ ID NO: 3920519 - RNA, 18 nt, Human adenovirus D
gcgacccaugauggugcu

SEQ ID NO: 3920520 - RNA, 18 nt, Human adenovirus D
gcgaccccguucgcgagg

SEQ ID NO: 3920521 - RNA, 19 nt, Human adenovirus D
gcgaccgcgagcugaugcu

SEQ ID NO: 3920522 - RNA, 18 nt, Human adenovirus D
gcgacgacgacauccugg

SEQ ID NO: 3920523 - RNA, 19 nt, Human adenovirus D
gcgacgcuuuuucagcgac

SEQ ID NO: 3920524 - RNA, 16 nt, Human adenovirus D
gcgagaaggcgcccag

SEQ ID NO: 3920525 - RNA, 15 nt, Human adenovirus D
gcgagaaggcgcgcg

SEQ ID NO: 3920526 - RNA, 12 nt, Human adenovirus D
gcgagacccagg

SEQ ID NO: 3920527 - RNA, 21 nt, Human adenovirus D
gcgagcagaacgggggcagca

SEQ ID NO: 3920528 - RNA, 15 nt, Human adenovirus D
gcgagccggcggcgc

SEQ ID NO: 3920529 - RNA, 16 nt, Human adenovirus D
gcgaggaugagagccg

SEQ ID NO: 3920530 - RNA, 15 nt, Human adenovirus D
gcgaggucauucgag

SEQ ID NO: 3920531 - RNA, 22 nt, Human adenovirus D
gcgagugcgggggcagacacac

SEQ ID NO: 3920532 - RNA, 16 nt, Human adenovirus D
gcgauauuggagucaa

SEQ ID NO: 3920533 - RNA, 17 nt, Human adenovirus D
gcgauccucgcccaauu

SEQ ID NO: 3920534 - RNA, 14 nt, Human adenovirus D
gcgauguugccacc

SEQ ID NO: 3920535 - RNA, 15 nt, Human adenovirus D
gcgauguugccaccc

SEQ ID NO: 3920536 - RNA, 19 nt, Human adenovirus D
gcgauguugccacccagau

SEQ ID NO: 3920537 - RNA, 14 nt, Human adenovirus D
gcgcaaccaggagg

SEQ ID NO: 3920538 - RNA, 18 nt, Human adenovirus D
ccugcaagugcacagacc

SEQ ID NO: 3920539 - RNA, 22 nt, Human adenovirus D
ccugcacgagaaccgccugggg

SEQ ID NO: 3920540 - RNA, 16 nt, Human adenovirus D
ccugcaggggcguccc

SEQ ID NO: 3920541 - RNA, 13 nt, Human adenovirus D
ccugcccuuccag

SEQ ID NO: 3920542 - RNA, 20 nt, Human adenovirus D
ccugccugggaauccugcac

SEQ ID NO: 3920543 - RNA, 12 nt, Human adenovirus D
ccugcgccgggc

SEQ ID NO: 3920544 - RNA, 17 nt, Human adenovirus D
ccugcgucaucacccag

SEQ ID NO: 3920545 - RNA, 16 nt, Human adenovirus D
ccugcuccugcucccg

SEQ ID NO: 3920546 - RNA, 17 nt, Human adenovirus D
ccuggagacgggcugcu

SEQ ID NO: 3920547 - RNA, 14 nt, Human adenovirus D
ccuggcgacgcagc

SEQ ID NO: 3920548 - RNA, 16 nt, Human adenovirus D
ccuggcggaggccauc

SEQ ID NO: 3920549 - RNA, 19 nt, Human adenovirus D
ccuggcuccgcggcacggc

SEQ ID NO: 3920550 - RNA, 12 nt, Human adenovirus D
ccugggaggaga

SEQ ID NO: 3920551 - RNA, 17 nt, Human adenovirus D
ccugggcacuggagcac

SEQ ID NO: 3920552 - RNA, 21 nt, Human adenovirus D
ccugggcacuggagcacagac

SEQ ID NO: 3920553 - RNA, 16 nt, Human adenovirus D
ccugggccugaugcac

SEQ ID NO: 3920554 - RNA, 18 nt, Human adenovirus D
ccugggcgugcagaccgu

SEQ ID NO: 3920555 - RNA, 16 nt, Human adenovirus D
ccugguacgagcuaca

SEQ ID NO: 3920556 - RNA, 22 nt, Human adenovirus D
ccugguacgagcuacagcagga

SEQ ID NO: 3920557 - RNA, 19 nt, Human adenovirus D
ccuggucacccucgagcuc

SEQ ID NO: 3920558 - RNA, 13 nt, Human adenovirus D
ccuggucaucacc

SEQ ID NO: 3920559 - RNA, 20 nt, Human adenovirus D
ccuggugguacagcacagca

SEQ ID NO: 3920560 - RNA, 22 nt, Human adenovirus D
ccugguuagguucuucacccag

SEQ ID NO: 3920561 - RNA, 15 nt, Human adenovirus D
ccugugggaccuggc

SEQ ID NO: 3920562 - RNA, 19 nt, Human adenovirus D
ccuucaacagaaccggagg

SEQ ID NO: 3920563 - RNA, 14 nt, Human adenovirus D
ccuucaaccaccac

SEQ ID NO: 3920564 - RNA, 18 nt, Human adenovirus D
ccuucagcaucagucucc

SEQ ID NO: 3920565 - RNA, 12 nt, Human adenovirus D
ccuuccugcagc

SEQ ID NO: 3920566 - RNA, 21 nt, Human adenovirus D
ccuucgugcacuggcccgacc

SEQ ID NO: 3920567 - RNA, 18 nt, Human adenovirus D
ccuucuccacggggaggg

SEQ ID NO: 3920568 - RNA, 14 nt, Human adenovirus D
ccuugaggaggaga

SEQ ID NO: 3920569 - RNA, 21 nt, Human adenovirus D
ccuugcaaaagcgccaggagg

SEQ ID NO: 3920570 - RNA, 14 nt, Human adenovirus D
ccuugcagagcagc

SEQ ID NO: 3920571 - RNA, 12 nt, Human adenovirus D
ccuugccuuccu

SEQ ID NO: 3920572 - RNA, 23 nt, Human adenovirus D
ccuugucguacuucugccagcag

SEQ ID NO: 3920573 - RNA, 15 nt, Human adenovirus D
ccuuucgcugcugcc

SEQ ID NO: 3920574 - RNA, 19 nt, Human adenovirus D
cgaaauuggugcgcugggg

SEQ ID NO: 3920575 - RNA, 16 nt, Human adenovirus D
cgaacaguccacccag

SEQ ID NO: 3920576 - RNA, 18 nt, Human adenovirus D
cgaacuuucuccacaccu

SEQ ID NO: 3920577 - RNA, 19 nt, Human adenovirus D
cgaagaagaacaggagccg

SEQ ID NO: 3920578 - RNA, 17 nt, Human adenovirus D
cgaagccguggcgcagc

SEQ ID NO: 3920579 - RNA, 20 nt, Human adenovirus D
cgacacguacuucagccugg

SEQ ID NO: 3920580 - RNA, 15 nt, Human adenovirus D
cgacagucugagggc

SEQ ID NO: 3920581 - RNA, 16 nt, Human adenovirus D
cgacaugcccgacccc

SEQ ID NO: 3920582 - RNA, 20 nt, Human adenovirus D
cgaccacagcaacuuccuga

SEQ ID NO: 3920583 - RNA, 17 nt, Human adenovirus D
cgacccaugauggugcu

SEQ ID NO: 3920584 - RNA, 13 nt, Human adenovirus D
cgacccccuucca

SEQ ID NO: 3920585 - RNA, 16 nt, Human adenovirus D
cgaccgacccauggac

SEQ ID NO: 3920586 - RNA, 23 nt, Human adenovirus D
cgaccgcauccacaaggccguga

SEQ ID NO: 3920587 - RNA, 13 nt, Human adenovirus D
cgaccgccgugcg

SEQ ID NO: 3920588 - RNA, 23 nt, Human adenovirus D
cgaccuugcaaaagcgccaggag

SEQ ID NO: 3920589 - RNA, 15 nt, Human adenovirus D
cgacgagccagguga

SEQ ID NO: 3920590 - RNA, 16 nt, Human adenovirus D
cgacgaggccgggcua

SEQ ID NO: 3920591 - RNA, 20 nt, Human adenovirus D
cgacugacuacccacugacu

SEQ ID NO: 3920592 - RNA, 12 nt, Human adenovirus D
cgacuguagggc

SEQ ID NO: 3920593 - RNA, 18 nt, Human adenovirus D
cgagaagcggccgcggcc

SEQ ID NO: 3920594 - RNA, 15 nt, Human adenovirus D
cgagaccagaggcag

SEQ ID NO: 3920595 - RNA, 16 nt, Human adenovirus D
cgagaucggcaccagc

SEQ ID NO: 3920596 - RNA, 12 nt, Human adenovirus D
cgagcacagcac

SEQ ID NO: 3920597 - RNA, 21 nt, Human adenovirus D
cgagcagaacgggggcagcac

SEQ ID NO: 3920598 - RNA, 17 nt, Human adenovirus D
cgagccauugaccacca

SEQ ID NO: 3920599 - RNA, 20 nt, Human adenovirus D
cgagcccgagggucgcuggc

SEQ ID NO: 3920600 - RNA, 23 nt, Human adenovirus D
cgagccgcgcgccgcgccgccac

SEQ ID NO: 3920601 - RNA, 13 nt, Human adenovirus D
cgagcgcaccguc

SEQ ID NO: 3920602 - RNA, 21 nt, Human adenovirus D
cgagcgggaccggggaggcac

SEQ ID NO: 3920603 - RNA, 22 nt, Human adenovirus D
cgagcucaugcccuuccgcgcc

SEQ ID NO: 3920604 - RNA, 18 nt, Human adenovirus D
cgagcuggaagcccugag

SEQ ID NO: 3920605 - RNA, 17 nt, Human adenovirus D
cgaggaccaaucgcgcc

SEQ ID NO: 3920606 - RNA, 19 nt, Human adenovirus D
cgaggagcaccccaacggc

SEQ ID NO: 3920607 - RNA, 13 nt, Human adenovirus D
cgaggaggagcgc

SEQ ID NO: 3920608 - RNA, 19 nt, Human adenovirus D
cgaggaggagcgcauccug

SEQ ID NO: 3920609 - RNA, 13 nt, Human adenovirus D
cgaggcagaggca

SEQ ID NO: 3920610 - RNA, 15 nt, Human adenovirus D
cgaggcagaggcaca

SEQ ID NO: 3920611 - RNA, 22 nt, Human adenovirus D
cgaggccgucuaccugcgcacg

SEQ ID NO: 3920612 - RNA, 21 nt, Human adenovirus D
cgagggcaaugcuagagugag

SEQ ID NO: 3920613 - RNA, 23 nt, Human adenovirus D
cgagggccugggcucgcuggugg

SEQ ID NO: 3920614 - RNA, 14 nt, Human adenovirus D
cgaggugcagaccg

SEQ ID NO: 3920615 - RNA, 19 nt, Human adenovirus D
cgaggugcagaccgacccc

SEQ ID NO: 3920616 - RNA, 12 nt, Human adenovirus D
cgagucucaccu

SEQ ID NO: 3920617 - RNA, 17 nt, Human adenovirus D
cgauaucgcgcauccug

SEQ ID NO: 3920618 - RNA, 19 nt, Human adenovirus D
cgauccugacgcgccagcc

SEQ ID NO: 3920619 - RNA, 17 nt, Human adenovirus D
cgaugaaagucaggagc

SEQ ID NO: 3920620 - RNA, 22 nt, Human adenovirus D
cgaugggcccgugggcugcggc

SEQ ID NO: 3920621 - RNA, 17 nt, Human adenovirus D
cgcaacuuccagcccau

SEQ ID NO: 3920622 - RNA, 22 nt, Human adenovirus D
cgcacccggcauccugcacgca

SEQ ID NO: 3920623 - RNA, 14 nt, Human adenovirus D
cgcaccgcuccugg

SEQ ID NO: 3920624 - RNA, 17 nt, Human adenovirus D
cgcaccgcuccuggucu

SEQ ID NO: 3920625 - RNA, 14 nt, Human adenovirus D
cgcaccgucgccuc

SEQ ID NO: 3920626 - RNA, 17 nt, Human adenovirus D
cgcacgggccgccgggc

SEQ ID NO: 3920627 - RNA, 22 nt, Human adenovirus D
cgcagaucugcaucucccaggc

SEQ ID NO: 3920628 - RNA, 13 nt, Human adenovirus D
cgcagccgcggca

SEQ ID NO: 3920629 - RNA, 19 nt, Human adenovirus D
cgcagccgcggcagccgca

SEQ ID NO: 3920630 - RNA, 17 nt, Human adenovirus D
cgcagcgcugcacgggc

SEQ ID NO: 3920631 - RNA, 16 nt, Human adenovirus D
cgcagcggcaggaaau

SEQ ID NO: 3920632 - RNA, 12 nt, Human adenovirus D
cgcaggccagga

SEQ ID NO: 3920633 - RNA, 16 nt, Human adenovirus D
cgcaggccaggaggag

SEQ ID NO: 3920634 - RNA, 14 nt, Human adenovirus D
cgcaggcgacccug

SEQ ID NO: 3920635 - RNA, 20 nt, Human adenovirus D
cgcaggcgcccagccagcaa

SEQ ID NO: 3920636 - RNA, 23 nt, Human adenovirus D
cgcaggggcucguuaguccagca

SEQ ID NO: 3920637 - RNA, 20 nt, Human adenovirus D
cgcagguggacgagcagacc

SEQ ID NO: 3920638 - RNA, 20 nt, Human adenovirus D
cgcaguacucgcagcgcugc

SEQ ID NO: 3920639 - RNA, 20 nt, Human adenovirus D
cgcagucuccaacgccugcg

SEQ ID NO: 3920640 - RNA, 19 nt, Human adenovirus D
cgcagugagagaagcggug

SEQ ID NO: 3920641 - RNA, 23 nt, Human adenovirus D
cgcagugcacgggcaucagcauc

SEQ ID NO: 3920642 - RNA, 15 nt, Human adenovirus D
cgcagugggcgcaga

SEQ ID NO: 3920643 - RNA, 21 nt, Human adenovirus D
cgcagugggcguacaugcaca

SEQ ID NO: 3920644 - RNA, 19 nt, Human adenovirus D
cgcauccugaucucugcca

SEQ ID NO: 3920645 - RNA, 16 nt, Human adenovirus D
cgcaugguuucgguga

SEQ ID NO: 3920646 - RNA, 15 nt, Human adenovirus D
cgccaaaaaaacaca

SEQ ID NO: 3920647 - RNA, 17 nt, Human adenovirus D
cgccaaccgcacccgcg

SEQ ID NO: 3920648 - RNA, 22 nt, Human adenovirus D
cgccaccacccacaccgccucc

SEQ ID NO: 3920649 - RNA, 16 nt, Human adenovirus D
cgccaccaugagcaag

SEQ ID NO: 3920650 - RNA, 20 nt, Human adenovirus D
cgccagccgcaggcgcccag

SEQ ID NO: 3920651 - RNA, 16 nt, Human adenovirus D
cgccaggaggcggugc

SEQ ID NO: 3920652 - RNA, 20 nt, Human adenovirus D
cgccauaagggcggcgcugc

SEQ ID NO: 3920653 - RNA, 18 nt, Human adenovirus D
cgccaucuugcccacguc

SEQ ID NO: 3920654 - RNA, 18 nt, Human adenovirus D
cgcccagguuuuccaugc

SEQ ID NO: 3920655 - RNA, 16 nt, Human adenovirus D
cgcccauuccuggaga

SEQ ID NO: 3920656 - RNA, 22 nt, Human adenovirus D
guccaucgugcgcgaccugggc

SEQ ID NO: 3920657 - RNA, 13 nt, Human adenovirus D
guccccgaggccc

SEQ ID NO: 3920658 - RNA, 17 nt, Human adenovirus D
gucccgcugagcuaccg

SEQ ID NO: 3920659 - RNA, 18 nt, Human adenovirus D
gucccgcuugcuggaugc

SEQ ID NO: 3920660 - RNA, 15 nt, Human adenovirus D
gucccuggcuccgcg

SEQ ID NO: 3920661 - RNA, 21 nt, Human adenovirus D
guccgcaugacuaacucaggu

SEQ ID NO: 3920662 - RNA, 14 nt, Human adenovirus D
guccgcuccgcagu

SEQ ID NO: 3920663 - RNA, 15 nt, Human adenovirus D
guccgucggccaugg

SEQ ID NO: 3920664 - RNA, 16 nt, Human adenovirus D
guccgugugauuaaaa

SEQ ID NO: 3920665 - RNA, 15 nt, Human adenovirus D
guccugucacucaaa

SEQ ID NO: 3920666 - RNA, 15 nt, Human adenovirus D
gucgaggagaccugc

SEQ ID NO: 3920667 - RNA, 19 nt, Human adenovirus D
gucgcccgaguuguccugg

SEQ ID NO: 3920668 - RNA, 15 nt, Human adenovirus D
gucgcuggcugcugg

SEQ ID NO: 3920669 - RNA, 17 nt, Human adenovirus D
gucgcuggcugcuggag

SEQ ID NO: 3920670 - RNA, 20 nt, Human adenovirus D
gucuacuggucgcugccgga

SEQ ID NO: 3920671 - RNA, 20 nt, Human adenovirus D
gucucgcacucgacgagcca

SEQ ID NO: 3920672 - RNA, 21 nt, Human adenovirus D
gucucugguguaguuguucag

SEQ ID NO: 3920673 - RNA, 13 nt, Human adenovirus D
gucugcuccugca

SEQ ID NO: 3920674 - RNA, 20 nt, Human adenovirus D
gucugcuccugcacuuucuu

SEQ ID NO: 3920675 - RNA, 17 nt, Human adenovirus D
gucugcuguaaagccag

SEQ ID NO: 3920676 - RNA, 14 nt, Human adenovirus D
gucugugccucucc

SEQ ID NO: 3920677 - RNA, 22 nt, Human adenovirus D
gucuuucucuuucucugccaca

SEQ ID NO: 3920678 - RNA, 13 nt, Human adenovirus D
gugaaaacgugcc

SEQ ID NO: 3920679 - RNA, 15 nt, Human adenovirus D
gugaagauagacagc

SEQ ID NO: 3920680 - RNA, 22 nt, Human adenovirus D
gugaaggccggcaugcccacca

SEQ ID NO: 3920681 - RNA, 20 nt, Human adenovirus D
gugaagguuaguugcagacc

SEQ ID NO: 3920682 - RNA, 18 nt, Human adenovirus D
gugaccagguccacgcug

SEQ ID NO: 3920683 - RNA, 16 nt, Human adenovirus D
gugaccaucguaccag

SEQ ID NO: 3920684 - RNA, 14 nt, Human adenovirus D
gugagcgcgagccg

SEQ ID NO: 3920685 - RNA, 15 nt, Human adenovirus D
gugagcucgggcugc

SEQ ID NO: 3920686 - RNA, 15 nt, Human adenovirus D
gugaggaucauaucc

SEQ ID NO: 3920687 - RNA, 12 nt, Human adenovirus D
gugaggcacugc

SEQ ID NO: 3920688 - RNA, 19 nt, Human adenovirus D
gugauacgaggcagaggca

SEQ ID NO: 3920689 - RNA, 21 nt, Human adenovirus D
gugauacgaggcagaggcaca

SEQ ID NO: 3920690 - RNA, 22 nt, Human adenovirus D
gugaucccacagggcacugccg

SEQ ID NO: 3920691 - RNA, 23 nt, Human adenovirus D
gugauccguaucgugcugcucuc

SEQ ID NO: 3920692 - RNA, 21 nt, Human adenovirus D
gugauggcgcaggcgacccug

SEQ ID NO: 3920693 - RNA, 21 nt, Human adenovirus D
gugcaacuuuagccagaccaa

SEQ ID NO: 3920694 - RNA, 21 nt, Human adenovirus D
gugcaaugucaggucugcugg

SEQ ID NO: 3920695 - RNA, 13 nt, Human adenovirus D
gugcagcagagcg

SEQ ID NO: 3920696 - RNA, 21 nt, Human adenovirus D
gugcagccgugaucccacagg

SEQ ID NO: 3920697 - RNA, 16 nt, Human adenovirus D
gugcaggaccaccagg

SEQ ID NO: 3920698 - RNA, 18 nt, Human adenovirus D
gugcaggaccaccaggac

SEQ ID NO: 3920699 - RNA, 16 nt, Human adenovirus D
gugcagucguggacgc

SEQ ID NO: 3920700 - RNA, 20 nt, Human adenovirus D
gugcaguuggccaugagcga

SEQ ID NO: 3920701 - RNA, 15 nt, Human adenovirus D
gugcgcuggggcugc

SEQ ID NO: 3920702 - RNA, 12 nt, Human adenovirus D
gugcgguggugu

SEQ ID NO: 3920703 - RNA, 15 nt, Human adenovirus D
gugcuaaagcucuuc

SEQ ID NO: 3920704 - RNA, 19 nt, Human adenovirus D
gugcuagacauggccagca

SEQ ID NO: 3920705 - RNA, 17 nt, Human adenovirus D
gugcugacgcugagcga

SEQ ID NO: 3920706 - RNA, 19 nt, Human adenovirus D
gugcuggaggguugaaaga

SEQ ID NO: 3920707 - RNA, 15 nt, Human adenovirus D
guggaagagauggaa

SEQ ID NO: 3920708 - RNA, 22 nt, Human adenovirus D
guggacgcgguucauugacagc

SEQ ID NO: 3920709 - RNA, 16 nt, Human adenovirus D
guggacuucacagaga

SEQ ID NO: 3920710 - RNA, 22 nt, Human adenovirus D
guggccaccucgccgcgcaggg

SEQ ID NO: 3920711 - RNA, 21 nt, Human adenovirus D
guggcgagaggcgagcagcug

SEQ ID NO: 3920712 - RNA, 15 nt, Human adenovirus D
guggcgccgggccug

SEQ ID NO: 3920713 - RNA, 14 nt, Human adenovirus D
guggcggggcccga

SEQ ID NO: 3920714 - RNA, 16 nt, Human adenovirus D
guggcuguugauguga

SEQ ID NO: 3920715 - RNA, 15 nt, Human adenovirus D
gugggcguggggcaa

SEQ ID NO: 3920716 - RNA, 17 nt, Human adenovirus D
guggguuggcuugcaug

SEQ ID NO: 3920717 - RNA, 15 nt, Human adenovirus D
gugguaguucaagga

SEQ ID NO: 3920718 - RNA, 17 nt, Human adenovirus D
guggugcuggaugaugu

SEQ ID NO: 3920719 - RNA, 14 nt, Human adenovirus D
guggugucuuccuc

SEQ ID NO: 3920720 - RNA, 19 nt, Human adenovirus D
guguaccagucgggcccgg

SEQ ID NO: 3920721 - RNA, 18 nt, Human adenovirus D
guguaguuguucagcagc

SEQ ID NO: 3920722 - RNA, 15 nt, Human adenovirus D
guguugcggcccggc

SEQ ID NO: 3920723 - RNA, 22 nt, Human adenovirus D
guuacuguaaagccacaaccag

SEQ ID NO: 3920724 - RNA, 14 nt, Human adenovirus D
guuagagaugaggc

SEQ ID NO: 3920725 - RNA, 13 nt, Human adenovirus D
guuaucgaggacg

SEQ ID NO: 3920726 - RNA, 22 nt, Human adenovirus D
guucagggaccgcagcggggag

SEQ ID NO: 3920727 - RNA, 19 nt, Human adenovirus D
guuccaugaaucgcgggcg

SEQ ID NO: 3920728 - RNA, 15 nt, Human adenovirus D
guucuggagacacug

SEQ ID NO: 3920729 - RNA, 13 nt, Human adenovirus D
guucuucacccag

SEQ ID NO: 3920730 - RNA, 19 nt, Human adenovirus D
guugacaaauggagccaga

SEQ ID NO: 3920731 - RNA, 17 nt, Human adenovirus D
guugacggucugcaggc

SEQ ID NO: 3920732 - RNA, 23 nt, Human adenovirus D
guugaggcaccuagaccacugcc

SEQ ID NO: 3920733 - RNA, 19 nt, Human adenovirus D
guugagucgcggcagaacc

SEQ ID NO: 3920734 - RNA, 13 nt, Human adenovirus D
guuggugagcucu

SEQ ID NO: 3920735 - RNA, 16 nt, Human adenovirus D
guugguuuaaucagga

SEQ ID NO: 3920736 - RNA, 17 nt, Human adenovirus D
uaaaaaccccgccaaaa

SEQ ID NO: 3920737 - RNA, 22 nt, Human adenovirus D
uaaacguguuuuuuauuucaaa

SEQ ID NO: 3920738 - RNA, 13 nt, Human adenovirus D
uaaagaaacagaa

SEQ ID NO: 3920739 - RNA, 17 nt, Human adenovirus D
uaaagaauaugccaggg

SEQ ID NO: 3920740 - RNA, 13 nt, Human adenovirus D
uaaagccagcagc

SEQ ID NO: 3920741 - RNA, 14 nt, Human adenovirus D
uaaagccagcagca

SEQ ID NO: 3920742 - RNA, 19 nt, Human adenovirus D
uaaaggcaccuuacacuga

SEQ ID NO: 3920743 - RNA, 22 nt, Human adenovirus D
uaaagugcaagucacgcaggug

SEQ ID NO: 3920744 - RNA, 13 nt, Human adenovirus D
uaaauaagucacu

SEQ ID NO: 3920745 - RNA, 23 nt, Human adenovirus D
caugcaagaccccgucaccuucc

SEQ ID NO: 3920746 - RNA, 15 nt, Human adenovirus D
caugcaagguguggu

SEQ ID NO: 3920747 - RNA, 22 nt, Human adenovirus D
caugccccaggccuggcccuga

SEQ ID NO: 3920748 - RNA, 18 nt, Human adenovirus D
caugcccucucaacauca

SEQ ID NO: 3920749 - RNA, 21 nt, Human adenovirus D
caugccgaagaagaacaggag

SEQ ID NO: 3920750 - RNA, 20 nt, Human adenovirus D
caugccuucgugcacuggcc

SEQ ID NO: 3920751 - RNA, 14 nt, Human adenovirus D
caugcuggccgugg

SEQ ID NO: 3920752 - RNA, 14 nt, Human adenovirus D
cauggaaccuagca

SEQ ID NO: 3920753 - RNA, 16 nt, Human adenovirus D
cauggccaacagccac

SEQ ID NO: 3920754 - RNA, 13 nt, Human adenovirus D
cauggcccugacg

SEQ ID NO: 3920755 - RNA, 23 nt, Human adenovirus D
cauggcuaccugggaggagagga

SEQ ID NO: 3920756 - RNA, 15 nt, Human adenovirus D
cauguucgacuccuc

SEQ ID NO: 3920757 - RNA, 15 nt, Human adenovirus D
cauguugaaaagcuc

SEQ ID NO: 3920758 - RNA, 23 nt, Human adenovirus D
cauguugugcaggaccaccagga

SEQ ID NO: 3920759 - RNA, 21 nt, Human adenovirus D
cauuacuauuacugccacugc

SEQ ID NO: 3920760 - RNA, 21 nt, Human adenovirus D
cauucacauacacacuagaaa

SEQ ID NO: 3920761 - RNA, 19 nt, Human adenovirus D
cauucuggacuucgcagcc

SEQ ID NO: 3920762 - RNA, 21 nt, Human adenovirus D
cauugaccaccagggagcuga

SEQ ID NO: 3920763 - RNA, 15 nt, Human adenovirus D
cauugcaaggcagaa

SEQ ID NO: 3920764 - RNA, 16 nt, Human adenovirus D
cauuucagaaccauga

SEQ ID NO: 3920765 - RNA, 13 nt, Human adenovirus D
cauuuuuccagcc

SEQ ID NO: 3920766 - RNA, 14 nt, Human adenovirus D
cauuuuuccagccu

SEQ ID NO: 3920767 - RNA, 13 nt, Human adenovirus D
ccaacagccacau

SEQ ID NO: 3920768 - RNA, 15 nt, Human adenovirus D
ccaacaugcucuacc

SEQ ID NO: 3920769 - RNA, 20 nt, Human adenovirus D
ccaacaugcucuaccccauc

SEQ ID NO: 3920770 - RNA, 15 nt, Human adenovirus D
ccaaccggcugaugc

SEQ ID NO: 3920771 - RNA, 15 nt, Human adenovirus D
ccaacgccugcgcca

SEQ ID NO: 3920772 - RNA, 14 nt, Human adenovirus D
ccaacgcgccgggg

SEQ ID NO: 3920773 - RNA, 14 nt, Human adenovirus D
ccaacggcugcauc

SEQ ID NO: 3920774 - RNA, 15 nt, Human adenovirus D
ccaacggcugcaucc

SEQ ID NO: 3920775 - RNA, 21 nt, Human adenovirus D
ccaacggcugcauccacugcu

SEQ ID NO: 3920776 - RNA, 17 nt, Human adenovirus D
ccaagaaacgucccagc

SEQ ID NO: 3920777 - RNA, 18 nt, Human adenovirus D
ccaagaaacgucccagca

SEQ ID NO: 3920778 - RNA, 16 nt, Human adenovirus D
ccaagaucaggggaug

SEQ ID NO: 3920779 - RNA, 19 nt, Human adenovirus D
ccaaggcacccaccacagu

SEQ ID NO: 3920780 - RNA, 15 nt, Human adenovirus D
ccaaguccagggugc

SEQ ID NO: 3920781 - RNA, 18 nt, Human adenovirus D
ccacacauggcaagcugc

SEQ ID NO: 3920782 - RNA, 15 nt, Human adenovirus D
ccacacggccagcag

SEQ ID NO: 3920783 - RNA, 22 nt, Human adenovirus D
ccacagccuugauuuuuccagc

SEQ ID NO: 3920784 - RNA, 12 nt, Human adenovirus D
ccaccaacgugc

SEQ ID NO: 3920785 - RNA, 14 nt, Human adenovirus D
ccaccgacacguac

SEQ ID NO: 3920786 - RNA, 18 nt, Human adenovirus D
ccaccgagucucaccugg

SEQ ID NO: 3920787 - RNA, 12 nt, Human adenovirus D
ccaccgccgccg

SEQ ID NO: 3920788 - RNA, 14 nt, Human adenovirus D
ccaccuacuccucu

SEQ ID NO: 3920789 - RNA, 12 nt, Human adenovirus D
ccacgacacagc

SEQ ID NO: 3920790 - RNA, 20 nt, Human adenovirus D
ccacgaugugaccacggacc

SEQ ID NO: 3920791 - RNA, 18 nt, Human adenovirus D
ccacgcuucuuccccagc

SEQ ID NO: 3920792 - RNA, 18 nt, Human adenovirus D
ccacggaccggucccagc

SEQ ID NO: 3920793 - RNA, 22 nt, Human adenovirus D
ccacggguguaaugaaacccgc

SEQ ID NO: 3920794 - RNA, 14 nt, Human adenovirus D
ccacgguggugcag

SEQ ID NO: 3920795 - RNA, 20 nt, Human adenovirus D
ccacuacucacacuacacag

SEQ ID NO: 3920796 - RNA, 24 nt, Human adenovirus D
ccacuacucacacuacacagcuag

SEQ ID NO: 3920797 - RNA, 13 nt, Human adenovirus D
ccacucugagaca

SEQ ID NO: 3920798 - RNA, 18 nt, Human adenovirus D
ccacugccgccgccugcg

SEQ ID NO: 3920799 - RNA, 21 nt, Human adenovirus D
ccacugcuccugcgaaagccc

SEQ ID NO: 3920800 - RNA, 15 nt, Human adenovirus D
ccacuggccacgggu

SEQ ID NO: 3920801 - RNA, 14 nt, Human adenovirus D
ccagaacuuccagc

SEQ ID NO: 3920802 - RNA, 17 nt, Human adenovirus D
ccagaacuuccagcaga

SEQ ID NO: 3920803 - RNA, 15 nt, Human adenovirus D
ccagaaggggcaccu

SEQ ID NO: 3920804 - RNA, 14 nt, Human adenovirus D
ccagacccaggcgc

SEQ ID NO: 3920805 - RNA, 20 nt, Human adenovirus D
ccagacgcaagagccggcgg

SEQ ID NO: 3920806 - RNA, 14 nt, Human adenovirus D
ccagacgcacgggc

SEQ ID NO: 3920807 - RNA, 16 nt, Human adenovirus D
ccagacgcggcuguag

SEQ ID NO: 3920808 - RNA, 17 nt, Human adenovirus D
ccagaggcagacucagg

SEQ ID NO: 3920809 - RNA, 19 nt, Human adenovirus D
ccagaucucggcgcggcgg

SEQ ID NO: 3920810 - RNA, 16 nt, Human adenovirus D
ccagaugcucucccac

SEQ ID NO: 3920811 - RNA, 23 nt, Human adenovirus D
ccagcaaauuccucgaccaugac

SEQ ID NO: 3920812 - RNA, 15 nt, Human adenovirus D
ccagcaacccuuccu

SEQ ID NO: 3920813 - RNA, 22 nt, Human adenovirus D
ccagcacaacaacucgggcuuc

SEQ ID NO: 3920814 - RNA, 12 nt, Human adenovirus D
ccagcagcacau

SEQ ID NO: 3920815 - RNA, 11 nt, Human adenovirus D
ccagcagcagg

SEQ ID NO: 3920816 - RNA, 22 nt, Human adenovirus D
ccagcagucgggcgagaccaac

SEQ ID NO: 3920817 - RNA, 19 nt, Human adenovirus D
ccagcaucgaggugcagac

SEQ ID NO: 3920818 - RNA, 17 nt, Human adenovirus D
ccagccgcaggcgccca

SEQ ID NO: 3920819 - RNA, 21 nt, Human adenovirus D
ccagccgcaggcgcccagcca

SEQ ID NO: 3920820 - RNA, 22 nt, Human adenovirus D
ccagcgaaagagagcucgcguc

SEQ ID NO: 3920821 - RNA, 21 nt, Human adenovirus D
ccagcgcucguacccgcucac

SEQ ID NO: 3920822 - RNA, 19 nt, Human adenovirus D
ccagcguaagcgcgcggcu

SEQ ID NO: 3920823 - RNA, 22 nt, Human adenovirus D
ccagcugaacgggggcgccuuc

SEQ ID NO: 3920824 - RNA, 16 nt, Human adenovirus D
ccagcuggccgcccug

SEQ ID NO: 3920825 - RNA, 22 nt, Human adenovirus D
ccaggaggagaccgacgcuggg

SEQ ID NO: 3920826 - RNA, 23 nt, Human adenovirus D
ccaggaggagaccgacgcugggc

SEQ ID NO: 3920827 - RNA, 23 nt, Human adenovirus D
ccaggauacgcgggaagagcccu

SEQ ID NO: 3920828 - RNA, 15 nt, Human adenovirus D
ccaggaugcagccag

SEQ ID NO: 3920829 - RNA, 23 nt, Human adenovirus D
ccaggaugcagccaguggcccug

SEQ ID NO: 3920830 - RNA, 14 nt, Human adenovirus D
ccaggccaaccugu

SEQ ID NO: 3920831 - RNA, 13 nt, Human adenovirus D
ccaggcccagaac

SEQ ID NO: 3920832 - RNA, 14 nt, Human adenovirus D
ccaggcccuggagc

SEQ ID NO: 3920833 - RNA, 15 nt, Human adenovirus D
ccaggccuggcccug

SEQ ID NO: 3920834 - RNA, 16 nt, Human adenovirus D
ccaggccuggcccuga

SEQ ID NO: 3920835 - RNA, 14 nt, Human adenovirus D
ccaggcggcagagc

SEQ ID NO: 3920836 - RNA, 15 nt, Human adenovirus D
ccaggcuggccgugc

SEQ ID NO: 3920837 - RNA, 16 nt, Human adenovirus D
ccaggcuggccgugcu

SEQ ID NO: 3920838 - RNA, 20 nt, Human adenovirus D
ccaggguugagucgcggcag

SEQ ID NO: 3920839 - RNA, 23 nt, Human adenovirus D
ccagugauuggggaaccucagcc

SEQ ID NO: 3920840 - RNA, 23 nt, Human adenovirus D
ccagugcaacuuuagccagacca

SEQ ID NO: 3920841 - RNA, 14 nt, Human adenovirus D
ccagugcuuccagc

SEQ ID NO: 3920842 - RNA, 16 nt, Human adenovirus D
ccagugcuuccagcaa

SEQ ID NO: 3920843 - RNA, 17 nt, Human adenovirus D
ccaguuugggcacuggg

SEQ ID NO: 3920844 - RNA, 15 nt, Human adenovirus D
ccauaaaucugcccu

SEQ ID NO: 3920845 - RNA, 22 nt, Human adenovirus D
ccauagcgugcguucucuuccu

SEQ ID NO: 3920846 - RNA, 15 nt, Human adenovirus D
ccauaggccaggcgc

SEQ ID NO: 3920847 - RNA, 13 nt, Human adenovirus D
ccauagggagccu

SEQ ID NO: 3920848 - RNA, 12 nt, Human adenovirus D
ccaucaccaccg

SEQ ID NO: 3920849 - RNA, 12 nt, Human adenovirus D
ccaucauguucg

SEQ ID NO: 3920850 - RNA, 13 nt, Human adenovirus D
ccaugacagcgac

SEQ ID NO: 3920851 - RNA, 18 nt, Human adenovirus D
ccaugagggucuggagcu

SEQ ID NO: 3920852 - RNA, 17 nt, Human adenovirus D
ccaugcagacucugcuc

SEQ ID NO: 3920853 - RNA, 20 nt, Human adenovirus D
ccaugcccuuuucccaggac

SEQ ID NO: 3920854 - RNA, 13 nt, Human adenovirus D
ccauggcgcagua

SEQ ID NO: 3920855 - RNA, 12 nt, Human adenovirus D
ccauggggcgcc

SEQ ID NO: 3920856 - RNA, 16 nt, Human adenovirus D
ccaugugaccucccac

SEQ ID NO: 3920857 - RNA, 17 nt, Human adenovirus D
ccauguuauucagcagc

SEQ ID NO: 3920858 - RNA, 20 nt, Human adenovirus D
ccauucggagcacgcccgcc

SEQ ID NO: 3920859 - RNA, 16 nt, Human adenovirus D
ccauugaauggcacug

SEQ ID NO: 3920860 - RNA, 15 nt, Human adenovirus D
cccaacggcaccugc

SEQ ID NO: 3920861 - RNA, 16 nt, Human adenovirus D
cccaacucgcggcugc

SEQ ID NO: 3920862 - RNA, 14 nt, Human adenovirus D
cccacagccagccg

SEQ ID NO: 3920863 - RNA, 16 nt, Human adenovirus D
cccacaucgaggcccu

SEQ ID NO: 3920864 - RNA, 16 nt, Human adenovirus D
cagcacaaacgugcag

SEQ ID NO: 3920865 - RNA, 13 nt, Human adenovirus D
cagcacacucacu

SEQ ID NO: 3920866 - RNA, 18 nt, Human adenovirus D
cagcaccgccgcagccgc

SEQ ID NO: 3920867 - RNA, 13 nt, Human adenovirus D
cagcacugcaaau

SEQ ID NO: 3920868 - RNA, 17 nt, Human adenovirus D
cagcagaaaugggcccu

SEQ ID NO: 3920869 - RNA, 20 nt, Human adenovirus D
cagcagaagaucccggcgca

SEQ ID NO: 3920870 - RNA, 15 nt, Human adenovirus D
cagcagaggaagagg

SEQ ID NO: 3920871 - RNA, 12 nt, Human adenovirus D
cagcagcacagc

SEQ ID NO: 3920872 - RNA, 12 nt, Human adenovirus D
cagcagcccaua

SEQ ID NO: 3920873 - RNA, 19 nt, Human adenovirus D
cagcaggagcgugccgcca

SEQ ID NO: 3920874 - RNA, 15 nt, Human adenovirus D
cagcagggugccucc

SEQ ID NO: 3920875 - RNA, 16 nt, Human adenovirus D
cagcaucagucuccug

SEQ ID NO: 3920876 - RNA, 16 nt, Human adenovirus D
cagcaucgaggugcag

SEQ ID NO: 3920877 - RNA, 19 nt, Human adenovirus D
cagcaucgaggugcagacc

SEQ ID NO: 3920878 - RNA, 14 nt, Human adenovirus D
cagcaucgccucac

SEQ ID NO: 3920879 - RNA, 23 nt, Human adenovirus D
cagcaugaaggggacgagcugcu

SEQ ID NO: 3920880 - RNA, 22 nt, Human adenovirus D
cagcauguacggaggagccaag

SEQ ID NO: 3920881 - RNA, 24 nt, Human adenovirus D
cagcauguacggaggagccaagaa

SEQ ID NO: 3920882 - RNA, 15 nt, Human adenovirus D
cagccaaagcucaug

SEQ ID NO: 3920883 - RNA, 11 nt, Human adenovirus D
cagccagaacc

SEQ ID NO: 3920884 - RNA, 14 nt, Human adenovirus D
cagccagcaaacgc

SEQ ID NO: 3920885 - RNA, 17 nt, Human adenovirus D
cagcccaaacuggggcg

SEQ ID NO: 3920886 - RNA, 13 nt, Human adenovirus D
cagcccagggcgc

SEQ ID NO: 3920887 - RNA, 12 nt, Human adenovirus D
cagccgagccgg

SEQ ID NO: 3920888 - RNA, 16 nt, Human adenovirus D
cagccgcaccgcggcg

SEQ ID NO: 3920889 - RNA, 15 nt, Human adenovirus D
cagccgcaggccaac

SEQ ID NO: 3920890 - RNA, 18 nt, Human adenovirus D
cagccgcguaagcaggag

SEQ ID NO: 3920891 - RNA, 13 nt, Human adenovirus D
cagccggcgaacg

SEQ ID NO: 3920892 - RNA, 18 nt, Human adenovirus D
cagccuccaccgcuaccg

SEQ ID NO: 3920893 - RNA, 22 nt, Human adenovirus D
cagccugagcuuggccgagaag

SEQ ID NO: 3920894 - RNA, 13 nt, Human adenovirus D
cagccugggcaac

SEQ ID NO: 3920895 - RNA, 21 nt, Human adenovirus D
cagccuugauuuuuccagccc

SEQ ID NO: 3920896 - RNA, 14 nt, Human adenovirus D
cagccuugccccca

SEQ ID NO: 3920897 - RNA, 13 nt, Human adenovirus D
cagcgaaagagag

SEQ ID NO: 3920898 - RNA, 16 nt, Human adenovirus D
cagcgaaagagagcuc

SEQ ID NO: 3920899 - RNA, 14 nt, Human adenovirus D
cagcgcccucagca

SEQ ID NO: 3920900 - RNA, 19 nt, Human adenovirus D
cagcggcagggugagccgg

SEQ ID NO: 3920901 - RNA, 20 nt, Human adenovirus D
cagcggcgcaagcucaugcu

SEQ ID NO: 3920902 - RNA, 16 nt, Human adenovirus D
cagcgucgaggagcug

SEQ ID NO: 3920903 - RNA, 16 nt, Human adenovirus D
cagcuacaccucccuc

SEQ ID NO: 3920904 - RNA, 23 nt, Human adenovirus D
cagcucaacgacgaguuggugag

SEQ ID NO: 3920905 - RNA, 21 nt, Human adenovirus D
cagcucaucgacuggugcugc

SEQ ID NO: 3920906 - RNA, 12 nt, Human adenovirus D
cagcugcagaag

SEQ ID NO: 3920907 - RNA, 13 nt, Human adenovirus D
cagcuggcccggc

SEQ ID NO: 3920908 - RNA, 15 nt, Human adenovirus D
cagcuguuccuggug

SEQ ID NO: 3920909 - RNA, 17 nt, Human adenovirus D
cagcuugcgcgcuggcu

SEQ ID NO: 3920910 - RNA, 12 nt, Human adenovirus D
caggaccugggc

SEQ ID NO: 3920911 - RNA, 17 nt, Human adenovirus D
caggagcgcagccugag

SEQ ID NO: 3920912 - RNA, 13 nt, Human adenovirus D
caggaggcacaga

SEQ ID NO: 3920913 - RNA, 14 nt, Human adenovirus D
caggaggcggugcg

SEQ ID NO: 3920914 - RNA, 12 nt, Human adenovirus D
caggaugcagcc

SEQ ID NO: 3920915 - RNA, 22 nt, Human adenovirus D
caggaugggucugugccucucc

SEQ ID NO: 3920916 - RNA, 15 nt, Human adenovirus D
caggcagugcagcgc

SEQ ID NO: 3920917 - RNA, 14 nt, Human adenovirus D
caggccaggaggag

SEQ ID NO: 3920918 - RNA, 17 nt, Human adenovirus D
caggcccagaacuggca

SEQ ID NO: 3920919 - RNA, 18 nt, Human adenovirus D
caggcccagaacuggcag

SEQ ID NO: 3920920 - RNA, 20 nt, Human adenovirus D
caggcccagaacuggcagag

SEQ ID NO: 3920921 - RNA, 16 nt, Human adenovirus D
caggccuccgagcagc

SEQ ID NO: 3920922 - RNA, 16 nt, Human adenovirus D
caggccuggcccugac

SEQ ID NO: 3920923 - RNA, 16 nt, Human adenovirus D
caggcgcaaccaggag

SEQ ID NO: 3920924 - RNA, 18 nt, Human adenovirus D
caggcgccauucggagca

SEQ ID NO: 3920925 - RNA, 19 nt, Human adenovirus D
caggcgcuggaagagguag

SEQ ID NO: 3920926 - RNA, 21 nt, Human adenovirus D
caggcggcagagcgggcgggc

SEQ ID NO: 3920927 - RNA, 18 nt, Human adenovirus D
caggcugucggugucccc

SEQ ID NO: 3920928 - RNA, 15 nt, Human adenovirus D
cagggaacugaaaga

SEQ ID NO: 3920929 - RNA, 15 nt, Human adenovirus D
cagggagccagggga

SEQ ID NO: 3920930 - RNA, 14 nt, Human adenovirus D
cagggagcugagga

SEQ ID NO: 3920931 - RNA, 23 nt, Human adenovirus D
cagggaugaguugggccugaugc

SEQ ID NO: 3920932 - RNA, 20 nt, Human adenovirus D
cagggcgcgauccucgccca

SEQ ID NO: 3920933 - RNA, 16 nt, Human adenovirus D
caggggcggcagaggc

SEQ ID NO: 3920934 - RNA, 18 nt, Human adenovirus D
caggggcgucccgcgguc

SEQ ID NO: 3920935 - RNA, 14 nt, Human adenovirus D
caggggguagaagc

SEQ ID NO: 3920936 - RNA, 20 nt, Human adenovirus D
caggguacccacuggguggc

SEQ ID NO: 3920937 - RNA, 15 nt, Human adenovirus D
cagguccgggggcag

SEQ ID NO: 3920938 - RNA, 17 nt, Human adenovirus D
cagguccgggggcaggg

SEQ ID NO: 3920939 - RNA, 17 nt, Human adenovirus D
caggucgucgccccgga

SEQ ID NO: 3920940 - RNA, 19 nt, Human adenovirus D
caggugagcucgggcugcu

SEQ ID NO: 3920941 - RNA, 16 nt, Human adenovirus D
caggugcugccccagg

SEQ ID NO: 3920942 - RNA, 15 nt, Human adenovirus D
cagguggacgagccg

SEQ ID NO: 3920943 - RNA, 18 nt, Human adenovirus D
caguacuggcaacauggg

SEQ ID NO: 3920944 - RNA, 19 nt, Human adenovirus D
caguauaucaggugccugc

SEQ ID NO: 3920945 - RNA, 17 nt, Human adenovirus D
cagucauagcaggggcg

SEQ ID NO: 3920946 - RNA, 15 nt, Human adenovirus D
caguccgccaagcuc

SEQ ID NO: 3920947 - RNA, 17 nt, Human adenovirus D
cagucguggacgcugcu

SEQ ID NO: 3920948 - RNA, 21 nt, Human adenovirus D
cagucuccaacgccugcgcca

SEQ ID NO: 3920949 - RNA, 13 nt, Human adenovirus D
cagucugaugaau

SEQ ID NO: 3920950 - RNA, 17 nt, Human adenovirus D
caguguguguuugagaa

SEQ ID NO: 3920951 - RNA, 16 nt, Human adenovirus D
caguuaaugcugccuu

SEQ ID NO: 3920952 - RNA, 23 nt, Human adenovirus D
caguugcuuguaccacaaaaacg

SEQ ID NO: 3920953 - RNA, 17 nt, Human adenovirus D
cauaauagaaacagauc

SEQ ID NO: 3920954 - RNA, 16 nt, Human adenovirus D
cauaaucaccauguua

SEQ ID NO: 3920955 - RNA, 13 nt, Human adenovirus D
cauaaucaggcag

SEQ ID NO: 3920956 - RNA, 18 nt, Human adenovirus D
cauagucaucacccagca

SEQ ID NO: 3920957 - RNA, 14 nt, Human adenovirus D
cauaucccagggga

SEQ ID NO: 3920958 - RNA, 17 nt, Human adenovirus D
caucacaucagccagga

SEQ ID NO: 3920959 - RNA, 17 nt, Human adenovirus D
caucagcgcccucagca

SEQ ID NO: 3920960 - RNA, 13 nt, Human adenovirus D
caucaucgcgcca

SEQ ID NO: 3920961 - RNA, 21 nt, Human adenovirus D
cauccagcauaagaaucacau

SEQ ID NO: 3920962 - RNA, 19 nt, Human adenovirus D
cauccauggccaggggagu

SEQ ID NO: 3920963 - RNA, 21 nt, Human adenovirus D
cauccccgcccugcuggaugu

SEQ ID NO: 3920964 - RNA, 19 nt, Human adenovirus D
cauccugagauaugugcag

SEQ ID NO: 3920965 - RNA, 14 nt, Human adenovirus D
cauccugaucucug

SEQ ID NO: 3920966 - RNA, 15 nt, Human adenovirus D
cauccuggaccaggc

SEQ ID NO: 3920967 - RNA, 18 nt, Human adenovirus D
cauccuggaccaggcggc

SEQ ID NO: 3920968 - RNA, 14 nt, Human adenovirus D
caucgaaaccagau

SEQ ID NO: 3920969 - RNA, 17 nt, Human adenovirus D
caucgcgaaccaggcag

SEQ ID NO: 3920970 - RNA, 22 nt, Human adenovirus D
caucgcgaaccaggcagugcag

SEQ ID NO: 3920971 - RNA, 15 nt, Human adenovirus D
caucgcgcaggccgc

SEQ ID NO: 3920972 - RNA, 19 nt, Human adenovirus D
caucggcuaccagggcuuc

SEQ ID NO: 3920973 - RNA, 13 nt, Human adenovirus D
caucgugcagaac

SEQ ID NO: 3920974 - RNA, 23 nt, Human adenovirus D
caucgugcagaacccggacagca

SEQ ID NO: 3920975 - RNA, 21 nt, Human adenovirus D
caucgugcgcgaccugggcug

SEQ ID NO: 3920976 - RNA, 14 nt, Human adenovirus D
caucuccaccacgu

SEQ ID NO: 3920977 - RNA, 17 nt, Human adenovirus D
caucucgauccagcaga

SEQ ID NO: 3920978 - RNA, 17 nt, Human adenovirus D
caucuguccaaccccga

SEQ ID NO: 3920979 - RNA, 18 nt, Human adenovirus D
caugaaggggcucuugcu

SEQ ID NO: 3920980 - RNA, 13 nt, Human adenovirus D
caugacccugcau

SEQ ID NO: 3920981 - RNA, 14 nt, Human adenovirus D
caugaccgcgcgca

SEQ ID NO: 3920982 - RNA, 17 nt, Human adenovirus D
caugagcggcuccagcg

SEQ ID NO: 3920983 - RNA, 23 nt, Human adenovirus D
caugagcucguaguugagggccu

SEQ ID NO: 3920984 - RNA, 17 nt, Human adenovirus D
ucccgaggagcacccca

SEQ ID NO: 3920985 - RNA, 22 nt, Human adenovirus D
ucccgccgcaggagaggcaugg

SEQ ID NO: 3920986 - RNA, 22 nt, Human adenovirus D
ucccgucuuugcgguccccgag

SEQ ID NO: 3920987 - RNA, 15 nt, Human adenovirus D
ucccucucgagagcg

SEQ ID NO: 3920988 - RNA, 12 nt, Human adenovirus D
ucccuggcuccg

SEQ ID NO: 3920989 - RNA, 22 nt, Human adenovirus D
uccgacuuugucccgcugagcu

SEQ ID NO: 3920990 - RNA, 11 nt, Human adenovirus D
uccgagcagcg

SEQ ID NO: 3920991 - RNA, 16 nt, Human adenovirus D
uccgcgaacagcagca

SEQ ID NO: 3920992 - RNA, 21 nt, Human adenovirus D
uccgcgaccuccuccccauga

SEQ ID NO: 3920993 - RNA, 17 nt, Human adenovirus D
uccgcggaguccagcga

SEQ ID NO: 3920994 - RNA, 19 nt, Human adenovirus D
uccgcgguauauggcuccu

SEQ ID NO: 3920995 - RNA, 16 nt, Human adenovirus D
uccgcugugcuggugg

SEQ ID NO: 3920996 - RNA, 14 nt, Human adenovirus D
uccggucuagcauc

SEQ ID NO: 3920997 - RNA, 17 nt, Human adenovirus D
uccggugaugccuucca

SEQ ID NO: 3920998 - RNA, 14 nt, Human adenovirus D
uccguccgcuucga

SEQ ID NO: 3920999 - RNA, 22 nt, Human adenovirus D
uccugagauaugugcagcagag

SEQ ID NO: 3921000 - RNA, 15 nt, Human adenovirus D
uccugaucucugcca

SEQ ID NO: 3921001 - RNA, 23 nt, Human adenovirus D
uccugccugggaauccugcacga

SEQ ID NO: 3921002 - RNA, 19 nt, Human adenovirus D
uccugcugcuccaccaccu

SEQ ID NO: 3921003 - RNA, 15 nt, Human adenovirus D
uccuggaccaggcgg

SEQ ID NO: 3921004 - RNA, 21 nt, Human adenovirus D
uccuggaccgcggucccaguu

SEQ ID NO: 3921005 - RNA, 15 nt, Human adenovirus D
uccuuucccuggugg

SEQ ID NO: 3921006 - RNA, 13 nt, Human adenovirus D
ucgacggugagca

SEQ ID NO: 3921007 - RNA, 16 nt, Human adenovirus D
ucgacuugcaagacag

SEQ ID NO: 3921008 - RNA, 21 nt, Human adenovirus D
ucgagcauggcuaccugggag

SEQ ID NO: 3921009 - RNA, 12 nt, Human adenovirus D
ucgagcugcaag

SEQ ID NO: 3921010 - RNA, 17 nt, Human adenovirus D
ucgaggacgugagcggc

SEQ ID NO: 3921011 - RNA, 12 nt, Human adenovirus D
ucgaucaucucc

SEQ ID NO: 3921012 - RNA, 14 nt, Human adenovirus D
ucgaugaucucacg

SEQ ID NO: 3921013 - RNA, 20 nt, Human adenovirus D
ucgcagucuccaacgccugc

SEQ ID NO: 3921014 - RNA, 19 nt, Human adenovirus D
ucgccacaggugcugccca

SEQ ID NO: 3921015 - RNA, 22 nt, Human adenovirus D
ucgccacggucaccgagccucc

SEQ ID NO: 3921016 - RNA, 17 nt, Human adenovirus D
ucgccgaggagaacugc

SEQ ID NO: 3921017 - RNA, 17 nt, Human adenovirus D
ucgcgccacuggccacg

SEQ ID NO: 3921018 - RNA, 14 nt, Human adenovirus D
ucgcggacggccgc

SEQ ID NO: 3921019 - RNA, 15 nt, Human adenovirus D
ucgcggcugcugcug

SEQ ID NO: 3921020 - RNA, 13 nt, Human adenovirus D
ucgcucuggggcc

SEQ ID NO: 3921021 - RNA, 17 nt, Human adenovirus D
ucgcucuggggcccggc

SEQ ID NO: 3921022 - RNA, 11 nt, Human adenovirus D
ucgcugcugcc

SEQ ID NO: 3921023 - RNA, 13 nt, Human adenovirus D
ucgcuggucacau

SEQ ID NO: 3921024 - RNA, 17 nt, Human adenovirus D
ucggcccacgcgcucga

SEQ ID NO: 3921025 - RNA, 17 nt, Human adenovirus D
ucggcggcguggcccuu

SEQ ID NO: 3921026 - RNA, 16 nt, Human adenovirus D
ucgggccccggggcga

SEQ ID NO: 3921027 - RNA, 22 nt, Human adenovirus D
ucgguacccuccucccaacucu

SEQ ID NO: 3921028 - RNA, 20 nt, Human adenovirus D
ucguaccagaugcggcagua

SEQ ID NO: 3921029 - RNA, 17 nt, Human adenovirus D
ucguagaggcgggugag

SEQ ID NO: 3921030 - RNA, 16 nt, Human adenovirus D
ucgucccggaggaggg

SEQ ID NO: 3921031 - RNA, 13 nt, Human adenovirus D
ucgucgccccgga

SEQ ID NO: 3921032 - RNA, 14 nt, Human adenovirus D
ucgucgccccggag

SEQ ID NO: 3921033 - RNA, 21 nt, Human adenovirus D
ucguugugcgccgcgcugggg

SEQ ID NO: 3921034 - RNA, 14 nt, Human adenovirus D
ucuaaccuucuuuu

SEQ ID NO: 3921035 - RNA, 14 nt, Human adenovirus D
ucuacagccagcag

SEQ ID NO: 3921036 - RNA, 16 nt, Human adenovirus D
ucuacgccaccuucuu

SEQ ID NO: 3921037 - RNA, 21 nt, Human adenovirus D
ucuacgcguacauccagcaua

SEQ ID NO: 3921038 - RNA, 19 nt, Human adenovirus D
ucuacucccagcucauccg

SEQ ID NO: 3921039 - RNA, 13 nt, Human adenovirus D
ucucaacagcugg

SEQ ID NO: 3921040 - RNA, 18 nt, Human adenovirus D
ucucagcacgguggccuu

SEQ ID NO: 3921041 - RNA, 22 nt, Human adenovirus D
ucuccaucauguucgacuccuc

SEQ ID NO: 3921042 - RNA, 17 nt, Human adenovirus D
ucucccaccaccagccc

SEQ ID NO: 3921043 - RNA, 23 nt, Human adenovirus D
ucuccggugaugccuuccaaaau

SEQ ID NO: 3921044 - RNA, 17 nt, Human adenovirus D
ucucggaccaaccccac

SEQ ID NO: 3921045 - RNA, 19 nt, Human adenovirus D
ucucgguguacaagauccu

SEQ ID NO: 3921046 - RNA, 23 nt, Human adenovirus D
ucucugccgccggggcucggugc

SEQ ID NO: 3921047 - RNA, 19 nt, Human adenovirus D
ucugaaagaaacagcagag

SEQ ID NO: 3921048 - RNA, 21 nt, Human adenovirus D
ucugauuagcauagucacacu

SEQ ID NO: 3921049 - RNA, 13 nt, Human adenovirus D
ucugccagcagaa

SEQ ID NO: 3921050 - RNA, 19 nt, Human adenovirus D
ucugcccaccgugcgcuac

SEQ ID NO: 3921051 - RNA, 14 nt, Human adenovirus D
ucugcccuccgccc

SEQ ID NO: 3921052 - RNA, 12 nt, Human adenovirus D
ucugcgagagga

SEQ ID NO: 3921053 - RNA, 19 nt, Human adenovirus D
ucuggacuucgcagccaug

SEQ ID NO: 3921054 - RNA, 18 nt, Human adenovirus D
ucuggcgguaccagggga

SEQ ID NO: 3921055 - RNA, 21 nt, Human adenovirus D
ucuggggcgcuuccaagauca

SEQ ID NO: 3921056 - RNA, 20 nt, Human adenovirus D
ucugguugacaaauggagcc

SEQ ID NO: 3921057 - RNA, 12 nt, Human adenovirus D
ucugugcugccu

SEQ ID NO: 3921058 - RNA, 15 nt, Human adenovirus D
ucuucaacaucugug

SEQ ID NO: 3921059 - RNA, 19 nt, Human adenovirus D
ucuucaacaucugugcugc

SEQ ID NO: 3921060 - RNA, 18 nt, Human adenovirus D
ucuuccucuccuccuccc

SEQ ID NO: 3921061 - RNA, 14 nt, Human adenovirus D
ucuugcaugccuuc

SEQ ID NO: 3921062 - RNA, 23 nt, Human adenovirus D
ucuugcaugccuucgugcacugg

SEQ ID NO: 3921063 - RNA, 21 nt, Human adenovirus D
ucuugcuagauucucugggug

SEQ ID NO: 3921064 - RNA, 16 nt, Human adenovirus D
ucuuggcgagggucug

SEQ ID NO: 3921065 - RNA, 15 nt, Human adenovirus D
ucuuugcccugcuca

SEQ ID NO: 3921066 - RNA, 17 nt, Human adenovirus D
ugaaaacgugccugcuc

SEQ ID NO: 3921067 - RNA, 15 nt, Human adenovirus D
ugaaagaacauacau

SEQ ID NO: 3921068 - RNA, 21 nt, Human adenovirus D
ugaaaugaagccguccucuga

SEQ ID NO: 3921069 - RNA, 14 nt, Human adenovirus D
ugaacccagaugag

SEQ ID NO: 3921070 - RNA, 13 nt, Human adenovirus D
ugaaccuuuggac

SEQ ID NO: 3921071 - RNA, 13 nt, Human adenovirus D
ugaacucggggau

SEQ ID NO: 3921072 - RNA, 22 nt, Human adenovirus D
ugaagaacauccaugugaccuc

SEQ ID NO: 3921073 - RNA, 20 nt, Human adenovirus D
ugaagauucuggaaauuaug

SEQ ID NO: 3921074 - RNA, 15 nt, Human adenovirus D
ugaaggaaaaaucac

SEQ ID NO: 3921075 - RNA, 15 nt, Human adenovirus D
ugaaguacauccauu

SEQ ID NO: 3921076 - RNA, 22 nt, Human adenovirus D
ugaauaugaauuccaugaucuu

SEQ ID NO: 3921077 - RNA, 19 nt, Human adenovirus D
ugaaucagguauccagccu

SEQ ID NO: 3921078 - RNA, 23 nt, Human adenovirus D
ugacaacccgccugccaggaugg

SEQ ID NO: 3921079 - RNA, 13 nt, Human adenovirus D
ugacaaucaaaac

SEQ ID NO: 3921080 - RNA, 23 nt, Human adenovirus D
ugacacagcaguccaugcccaac

SEQ ID NO: 3921081 - RNA, 13 nt, Human adenovirus D
ugacacgcgcaca

SEQ ID NO: 3921082 - RNA, 14 nt, Human adenovirus D
ugaccaccagggag

SEQ ID NO: 3921083 - RNA, 18 nt, Human adenovirus D
ugaccauaagcagggugg

SEQ ID NO: 3921084 - RNA, 21 nt, Human adenovirus D
ugaccugccuccaccacccac

SEQ ID NO: 3921085 - RNA, 15 nt, Human adenovirus D
ugacgucauuugcau

SEQ ID NO: 3921086 - RNA, 15 nt, Human adenovirus D
ugacucggcugagcu

SEQ ID NO: 3921087 - RNA, 19 nt, Human adenovirus D
ugacuuugaaccugaaaga

SEQ ID NO: 3921088 - RNA, 15 nt, Human adenovirus D
ugagaauaacaugcu

SEQ ID NO: 3921089 - RNA, 20 nt, Human adenovirus D
ugagcagcuugcgcgcuggc

SEQ ID NO: 3921090 - RNA, 15 nt, Human adenovirus D
ugagcccgucccggg

SEQ ID NO: 3921091 - RNA, 20 nt, Human adenovirus D
ugaggacuuguuacaugaca

SEQ ID NO: 3921092 - RNA, 15 nt, Human adenovirus D
ugaggcaggccaugg

SEQ ID NO: 3921093 - RNA, 16 nt, Human adenovirus D
ugaggcaggccaugga

SEQ ID NO: 3921094 - RNA, 17 nt, Human adenovirus D
ugagguacaugggcaug

SEQ ID NO: 3921095 - RNA, 22 nt, Human adenovirus D
ugauaaggagaaggauucaaaa

SEQ ID NO: 3921096 - RNA, 20 nt, Human adenovirus D
ugauccguaucgugcugcuc

SEQ ID NO: 3921097 - RNA, 19 nt, Human adenovirus D
ugauccuuguccagauccu

SEQ ID NO: 3921098 - RNA, 15 nt, Human adenovirus D
ugauucaaacagcaa

SEQ ID NO: 3921099 - RNA, 13 nt, Human adenovirus D
ugauuuuuccagc

SEQ ID NO: 3921100 - RNA, 14 nt, Human adenovirus D
ugcaacccccagcu

SEQ ID NO: 3921101 - RNA, 12 nt, Human adenovirus D
ugcaagaaggaa

SEQ ID NO: 3921102 - RNA, 18 nt, Human adenovirus D
ugcaagucacgcagguga

SEQ ID NO: 3921103 - RNA, 16 nt, Human adenovirus D
auaugguagacccacu

SEQ ID NO: 3921104 - RNA, 16 nt, Human adenovirus D
aucaacuacaaggacu

SEQ ID NO: 3921105 - RNA, 15 nt, Human adenovirus D
aucaagacaaaauuc

SEQ ID NO: 3921106 - RNA, 15 nt, Human adenovirus D
aucacaucagccagg

SEQ ID NO: 3921107 - RNA, 19 nt, Human adenovirus D
aucacucuuuccagcagca

SEQ ID NO: 3921108 - RNA, 13 nt, Human adenovirus D
aucagcacugcaa

SEQ ID NO: 3921109 - RNA, 22 nt, Human adenovirus D
auccaacugaaguacauccauu

SEQ ID NO: 3921110 - RNA, 21 nt, Human adenovirus D
uaaaucauuggaacuaaucau

SEQ ID NO: 3921111 - RNA, 17 nt, Human adenovirus D
uaacacuccuaaaaccg

SEQ ID NO: 3921112 - RNA, 17 nt, Human adenovirus D
uaacuaugaucccaaca

SEQ ID NO: 3921113 - RNA, 12 nt, Human adenovirus D
uaagcaggagca

SEQ ID NO: 3921114 - RNA, 15 nt, Human adenovirus D
uaaguggcaacaccu

SEQ ID NO: 3921115 - RNA, 22 nt, Human adenovirus D
uaaucaccauguuauucagcag

SEQ ID NO: 3921116 - RNA, 16 nt, Human adenovirus D
uaaucauuuaauaaag

SEQ ID NO: 3921117 - RNA, 17 nt, Human adenovirus D
uaaugguccugcaagag

SEQ ID NO: 3921118 - RNA, 15 nt, Human adenovirus D
uacaaagcugaaagc

SEQ ID NO: 3921119 - RNA, 16 nt, Human adenovirus D
uacaacgcccugcugg

SEQ ID NO: 3921120 - RNA, 24 nt, Human adenovirus D
uacaaucgccacaggugcugccca

SEQ ID NO: 3921121 - RNA, 16 nt, Human adenovirus D
uacacgggguugcagc

SEQ ID NO: 3921122 - RNA, 20 nt, Human adenovirus D
uacagaugguagcagcagag

SEQ ID NO: 3921123 - RNA, 22 nt, Human adenovirus D
uacaguuaagaauccacagauc

SEQ ID NO: 3921124 - RNA, 21 nt, Human adenovirus D
uacauagaccacgcuacaaau

SEQ ID NO: 3921125 - RNA, 23 nt, Human adenovirus D
uacaucucggggaacggggcaga

SEQ ID NO: 3921126 - RNA, 13 nt, Human adenovirus D
uacaugcacugga

SEQ ID NO: 3921127 - RNA, 15 nt, Human adenovirus D
uacaugcccagcagc

SEQ ID NO: 3921128 - RNA, 18 nt, Human adenovirus D
uacauggugggcuaauau

SEQ ID NO: 3921129 - RNA, 21 nt, Human adenovirus D
uaccagucgggcccggacuac

SEQ ID NO: 3921130 - RNA, 21 nt, Human adenovirus D
uacgccaacucggcccacgcg

SEQ ID NO: 3921131 - RNA, 14 nt, Human adenovirus D
uacgcuggccagca

SEQ ID NO: 3921132 - RNA, 16 nt, Human adenovirus D
uacucuaaaugcaaau

SEQ ID NO: 3921133 - RNA, 17 nt, Human adenovirus D
uacugccacugccaaca

SEQ ID NO: 3921134 - RNA, 14 nt, Human adenovirus D
uacuguaaagccac

SEQ ID NO: 3921135 - RNA, 11 nt, Human adenovirus D
uagaaacagau

SEQ ID NO: 3921136 - RNA, 13 nt, Human adenovirus D
uagacauggccag

SEQ ID NO: 3921137 - RNA, 20 nt, Human adenovirus D
uagagugccacugccgcugc

SEQ ID NO: 3921138 - RNA, 17 nt, Human adenovirus D
uagccagaccaagcugc

SEQ ID NO: 3921139 - RNA, 19 nt, Human adenovirus D
uagcuuagggaguuugcau

SEQ ID NO: 3921140 - RNA, 15 nt, Human adenovirus D
uaggaccccagggac

SEQ ID NO: 3921141 - RNA, 14 nt, Human adenovirus D
uagggacagcagcc

SEQ ID NO: 3921142 - RNA, 23 nt, Human adenovirus D
uagggcgccaucuugcccacguc

SEQ ID NO: 3921143 - RNA, 18 nt, Human adenovirus D
uagucaaucucccaccac

SEQ ID NO: 3921144 - RNA, 14 nt, Human adenovirus D
uagugaccaagacc

SEQ ID NO: 3921145 - RNA, 18 nt, Human adenovirus D
uaguugggccuccaggaa

SEQ ID NO: 3921146 - RNA, 14 nt, Human adenovirus D
uauaaaaacaacaa

SEQ ID NO: 3921147 - RNA, 20 nt, Human adenovirus D
uauagucuaugggaacauau

SEQ ID NO: 3921148 - RNA, 19 nt, Human adenovirus D
uaucaugcaacuuggaagg

SEQ ID NO: 3921149 - RNA, 18 nt, Human adenovirus D
uaugauaaucugcaugau

SEQ ID NO: 3921150 - RNA, 17 nt, Human adenovirus D
uaugcuccugggugaga

SEQ ID NO: 3921151 - RNA, 23 nt, Human adenovirus D
uaugggagagaacaaaaccuuag

SEQ ID NO: 3921152 - RNA, 18 nt, Human adenovirus D
uauuacuaggcccagcag

SEQ ID NO: 3921153 - RNA, 21 nt, Human adenovirus D
uauuuaaaggcaccuuacacu

SEQ ID NO: 3921154 - RNA, 13 nt, Human adenovirus D
ucaaacaggcaaa

SEQ ID NO: 3921155 - RNA, 15 nt, Human adenovirus D
ucaacagcugugcua

SEQ ID NO: 3921156 - RNA, 12 nt, Human adenovirus D
ucaaccacaccu

SEQ ID NO: 3921157 - RNA, 21 nt, Human adenovirus D
ucaaccucaccaaccagacug

SEQ ID NO: 3921158 - RNA, 13 nt, Human adenovirus D
ucaaccuccaggc

SEQ ID NO: 3921159 - RNA, 14 nt, Human adenovirus D
ucaaccuccaggcc

SEQ ID NO: 3921160 - RNA, 16 nt, Human adenovirus D
ucaagcugggcuggga

SEQ ID NO: 3921161 - RNA, 16 nt, Human adenovirus D
ucaauacauagaccac

SEQ ID NO: 3921162 - RNA, 17 nt, Human adenovirus D
ucaaugucagcugcaaa

SEQ ID NO: 3921163 - RNA, 18 nt, Human adenovirus D
ucacacuacacagcuaga

SEQ ID NO: 3921164 - RNA, 21 nt, Human adenovirus D
ucacagcuaagaaaaaaucag

SEQ ID NO: 3921165 - RNA, 14 nt, Human adenovirus D
ucacauacacacua

SEQ ID NO: 3921166 - RNA, 18 nt, Human adenovirus D
ucacauacacacuagaaa

SEQ ID NO: 3921167 - RNA, 18 nt, Human adenovirus D
ucacauccaucuccacca

SEQ ID NO: 3921168 - RNA, 15 nt, Human adenovirus D
ucaccaaggccauag

SEQ ID NO: 3921169 - RNA, 16 nt, Human adenovirus D
ucaccaguuugggcac

SEQ ID NO: 3921170 - RNA, 22 nt, Human adenovirus D
ucacccagaaaagucuccucug

SEQ ID NO: 3921171 - RNA, 22 nt, Human adenovirus D
ucacccggacguggugcugcug

SEQ ID NO: 3921172 - RNA, 23 nt, Human adenovirus D
ucacccggacguggugcugcugc

SEQ ID NO: 3921173 - RNA, 13 nt, Human adenovirus D
ucacccucgagcu

SEQ ID NO: 3921174 - RNA, 16 nt, Human adenovirus D
ucacccugcccuucca

SEQ ID NO: 3921175 - RNA, 13 nt, Human adenovirus D
ucacccuggggcu

SEQ ID NO: 3921176 - RNA, 17 nt, Human adenovirus D
ucaccgagccucccagg

SEQ ID NO: 3921177 - RNA, 21 nt, Human adenovirus D
ucaccguagagggcaccaccg

SEQ ID NO: 3921178 - RNA, 23 nt, Human adenovirus D
ucaccuuggcuuugcuggguugc

SEQ ID NO: 3921179 - RNA, 18 nt, Human adenovirus D
ucacggcaucuuccuggg

SEQ ID NO: 3921180 - RNA, 20 nt, Human adenovirus D
ucacucuuuccagcagcagg

SEQ ID NO: 3921181 - RNA, 18 nt, Human adenovirus D
ucagaauauccccuuccu

SEQ ID NO: 3921182 - RNA, 18 nt, Human adenovirus D
ucagacgggugcuccggg

SEQ ID NO: 3921183 - RNA, 19 nt, Human adenovirus D
ucagacgggugcuccgggu

SEQ ID NO: 3921184 - RNA, 22 nt, Human adenovirus D
ucagagccagggcuaagcgugg

SEQ ID NO: 3921185 - RNA, 16 nt, Human adenovirus D
ucagcaacuaccccgu

SEQ ID NO: 3921186 - RNA, 14 nt, Human adenovirus D
ucagcagucucugc

SEQ ID NO: 3921187 - RNA, 16 nt, Human adenovirus D
ucagccccuuccccua

SEQ ID NO: 3921188 - RNA, 22 nt, Human adenovirus D
ucagccccuuccccuaucccaa

SEQ ID NO: 3921189 - RNA, 21 nt, Human adenovirus D
ucagcccgcuuaccaguagac

SEQ ID NO: 3921190 - RNA, 16 nt, Human adenovirus D
ucagcgaugagcagcu

SEQ ID NO: 3921191 - RNA, 18 nt, Human adenovirus D
ucagcugcagcgcacucu

SEQ ID NO: 3921192 - RNA, 22 nt, Human adenovirus D
ucaggaccauagggagccugcg

SEQ ID NO: 3921193 - RNA, 14 nt, Human adenovirus D
ucaggagcagcgcc

SEQ ID NO: 3921194 - RNA, 23 nt, Human adenovirus D
ucaggaguggcggcccuggcugg

SEQ ID NO: 3921195 - RNA, 23 nt, Human adenovirus D
ucagggcgaaggugucccugacc

SEQ ID NO: 3921196 - RNA, 22 nt, Human adenovirus D
ucaggguccgcgugaggguggu

SEQ ID NO: 3921197 - RNA, 15 nt, Human adenovirus D
ucagggugcuccagc

SEQ ID NO: 3921198 - RNA, 19 nt, Human adenovirus D
ucagguuacauuccugcac

SEQ ID NO: 3921199 - RNA, 14 nt, Human adenovirus D
ucaguuucccauga

SEQ ID NO: 3921200 - RNA, 22 nt, Human adenovirus D
ucauaucccaggggacuggaaa

SEQ ID NO: 3921201 - RNA, 19 nt, Human adenovirus D
ucauccagaauucaaccac

SEQ ID NO: 3921202 - RNA, 22 nt, Human adenovirus D
ucauccaugaugauggcgaugg

SEQ ID NO: 3921203 - RNA, 14 nt, Human adenovirus D
ucaucuugcacagu

SEQ ID NO: 3921204 - RNA, 14 nt, Human adenovirus D
ucaugaccagcaug

SEQ ID NO: 3921205 - RNA, 18 nt, Human adenovirus D
ucaugccacgaacagcca

SEQ ID NO: 3921206 - RNA, 13 nt, Human adenovirus D
ucauguccaccug

SEQ ID NO: 3921207 - RNA, 11 nt, Human adenovirus D
ucauucaaggc

SEQ ID NO: 3921208 - RNA, 14 nt, Human adenovirus D
ucauuuuuccagcc

SEQ ID NO: 3921209 - RNA, 15 nt, Human adenovirus D
uccaaacuagcagac

SEQ ID NO: 3921210 - RNA, 18 nt, Human adenovirus D
uccaacggcaaacagcau

SEQ ID NO: 3921211 - RNA, 20 nt, Human adenovirus D
uccaaggccaucugccacuc

SEQ ID NO: 3921212 - RNA, 15 nt, Human adenovirus D
uccaccacccacgcc

SEQ ID NO: 3921213 - RNA, 21 nt, Human adenovirus D
uccaccgugugcagacacaug

SEQ ID NO: 3921214 - RNA, 14 nt, Human adenovirus D
uccaccucucccga

SEQ ID NO: 3921215 - RNA, 18 nt, Human adenovirus D
uccacgguggcggcgagg

SEQ ID NO: 3921216 - RNA, 19 nt, Human adenovirus D
uccacugcuccugcgaaag

SEQ ID NO: 3921217 - RNA, 23 nt, Human adenovirus D
uccacuuucauaaucaggcagac

SEQ ID NO: 3921218 - RNA, 15 nt, Human adenovirus D
uccagcgcggccagc

SEQ ID NO: 3921219 - RNA, 17 nt, Human adenovirus D
uccaucaacuacugugg

SEQ ID NO: 3921220 - RNA, 20 nt, Human adenovirus D
uccaucagcgcccucagcag

SEQ ID NO: 3921221 - RNA, 14 nt, Human adenovirus D
uccaugcgggugac

SEQ ID NO: 3921222 - RNA, 15 nt, Human adenovirus D
ucccaccccagaaag

SEQ ID NO: 3921223 - RNA, 13 nt, Human adenovirus D
ucccacuacaaca

SEQ ID NO: 3921224 - RNA, 15 nt, Human adenovirus D
ucccagccuccaccg

SEQ ID NO: 3921225 - RNA, 15 nt, Human adenovirus D
uccccaccuacuccu

SEQ ID NO: 3921226 - RNA, 18 nt, Human adenovirus D
uccccgcccagcgagagg

SEQ ID NO: 3921227 - RNA, 15 nt, Human adenovirus D
uccccgcccgccgcc

SEQ ID NO: 3921228 - RNA, 12 nt, Human adenovirus D
agcgcauccuga

SEQ ID NO: 3921229 - RNA, 19 nt, Human adenovirus D
agcgcauguacaacaugcu

SEQ ID NO: 3921230 - RNA, 16 nt, Human adenovirus D
agcgccaacagcagcg

SEQ ID NO: 3921231 - RNA, 13 nt, Human adenovirus D
agcgccaggaggc

SEQ ID NO: 3921232 - RNA, 20 nt, Human adenovirus D
agcgccagucccucauccuc

SEQ ID NO: 3921233 - RNA, 17 nt, Human adenovirus D
agcgcccauuccuggag

SEQ ID NO: 3921234 - RNA, 22 nt, Human adenovirus D
agcgccuuaccugguacgagcu

SEQ ID NO: 3921235 - RNA, 16 nt, Human adenovirus D
agcggccgcggccaga

SEQ ID NO: 3921236 - RNA, 19 nt, Human adenovirus D
agcgggaccggggaggcac

SEQ ID NO: 3921237 - RNA, 19 nt, Human adenovirus D
agcgggaucaucgccugcu

SEQ ID NO: 3921238 - RNA, 22 nt, Human adenovirus D
agcgggaucaucgccugcuugc

SEQ ID NO: 3921239 - RNA, 18 nt, Human adenovirus D
agcgggcucuuccuccgu

SEQ ID NO: 3921240 - RNA, 22 nt, Human adenovirus D
agcgguucaagaacgagggccu

SEQ ID NO: 3921241 - RNA, 23 nt, Human adenovirus D
agcgguucugggucaccuuggcu

SEQ ID NO: 3921242 - RNA, 23 nt, Human adenovirus D
agcgguugagcgggcucuuccuc

SEQ ID NO: 3921243 - RNA, 17 nt, Human adenovirus D
agcgguugagcugggag

SEQ ID NO: 3921244 - RNA, 21 nt, Human adenovirus D
agcguagggcuuuuccugaug

SEQ ID NO: 3921245 - RNA, 17 nt, Human adenovirus D
agcgugggacuggcaag

SEQ ID NO: 3921246 - RNA, 23 nt, Human adenovirus D
agcuagacaccacagugcagaau

SEQ ID NO: 3921247 - RNA, 14 nt, Human adenovirus D
agcucaugcuggcc

SEQ ID NO: 3921248 - RNA, 19 nt, Human adenovirus D
agcucgucuuccaggagcc

SEQ ID NO: 3921249 - RNA, 22 nt, Human adenovirus D
agcucgucuuccaggagccuga

SEQ ID NO: 3921250 - RNA, 21 nt, Human adenovirus D
agcugccaugggaggaagcaa

SEQ ID NO: 3921251 - RNA, 18 nt, Human adenovirus D
agcugcgcgagggccugg

SEQ ID NO: 3921252 - RNA, 22 nt, Human adenovirus D
agcugcuugccgaaggacccca

SEQ ID NO: 3921253 - RNA, 14 nt, Human adenovirus D
agcuggaagcccug

SEQ ID NO: 3921254 - RNA, 19 nt, Human adenovirus D
agcuggacaagcuucuugc

SEQ ID NO: 3921255 - RNA, 23 nt, Human adenovirus D
agcuggcccggcaacgaccggcu

SEQ ID NO: 3921256 - RNA, 19 nt, Human adenovirus D
agcuuguugggccuuggcc

SEQ ID NO: 3921257 - RNA, 11 nt, Human adenovirus D
aggaaccccac

SEQ ID NO: 3921258 - RNA, 20 nt, Human adenovirus D
aggaauguggaaagauucag

SEQ ID NO: 3921259 - RNA, 17 nt, Human adenovirus D
aggaccauagggagccu

SEQ ID NO: 3921260 - RNA, 12 nt, Human adenovirus D
aggaccugggcu

SEQ ID NO: 3921261 - RNA, 16 nt, Human adenovirus D
aggacgagaaccugaa

SEQ ID NO: 3921262 - RNA, 22 nt, Human adenovirus D
aggagacgauccugcaggugga

SEQ ID NO: 3921263 - RNA, 15 nt, Human adenovirus D
aggagcaggaggagg

SEQ ID NO: 3921264 - RNA, 20 nt, Human adenovirus D
aggagccgcuaguggaagag

SEQ ID NO: 3921265 - RNA, 15 nt, Human adenovirus D
aggagcgugccgcca

SEQ ID NO: 3921266 - RNA, 15 nt, Human adenovirus D
aggagcugagaccag

SEQ ID NO: 3921267 - RNA, 15 nt, Human adenovirus D
aggaggacacuaaag

SEQ ID NO: 3921268 - RNA, 20 nt, Human adenovirus D
aggaggcuauuaagaaguau

SEQ ID NO: 3921269 - RNA, 22 nt, Human adenovirus D
aggagggauugcagggcguaga

SEQ ID NO: 3921270 - RNA, 17 nt, Human adenovirus D
aggagucgccggaggag

SEQ ID NO: 3921271 - RNA, 15 nt, Human adenovirus D
aggaugaacaggagc

SEQ ID NO: 3921272 - RNA, 19 nt, Human adenovirus D
aggcaccaucacaggaggc

SEQ ID NO: 3921273 - RNA, 21 nt, Human adenovirus D
aggcaccaucacaggaggcac

SEQ ID NO: 3921274 - RNA, 13 nt, Human adenovirus D
aggcacugcucuu

SEQ ID NO: 3921275 - RNA, 14 nt, Human adenovirus D
aggcagacucaggg

SEQ ID NO: 3921276 - RNA, 21 nt, Human adenovirus D
aggcagcuccgguugugcagc

SEQ ID NO: 3921277 - RNA, 22 nt, Human adenovirus D
aggcagcuccgguugugcagcc

SEQ ID NO: 3921278 - RNA, 14 nt, Human adenovirus D
aggccaacagacuc

SEQ ID NO: 3921279 - RNA, 15 nt, Human adenovirus D
aggccaggaggagac

SEQ ID NO: 3921280 - RNA, 15 nt, Human adenovirus D
aggccauaggccagg

SEQ ID NO: 3921281 - RNA, 12 nt, Human adenovirus D
aggcccagcagc

SEQ ID NO: 3921282 - RNA, 18 nt, Human adenovirus D
aggccgccuacgguccag

SEQ ID NO: 3921283 - RNA, 17 nt, Human adenovirus D
aggccgugaaggccggc

SEQ ID NO: 3921284 - RNA, 21 nt, Human adenovirus D
aggccuacuacuccugaucag

SEQ ID NO: 3921285 - RNA, 21 nt, Human adenovirus D
aggcgaagauggggccccgcc

SEQ ID NO: 3921286 - RNA, 22 nt, Human adenovirus D
aggcgaagauggggccccgcca

SEQ ID NO: 3921287 - RNA, 17 nt, Human adenovirus D
aggcgacaacgccaggc

SEQ ID NO: 3921288 - RNA, 14 nt, Human adenovirus D
aggcgagcagcugu

SEQ ID NO: 3921289 - RNA, 12 nt, Human adenovirus D
aggcgcagcugc

SEQ ID NO: 3921290 - RNA, 16 nt, Human adenovirus D
aggcgcccagccagca

SEQ ID NO: 3921291 - RNA, 13 nt, Human adenovirus D
aggcgcccaggcc

SEQ ID NO: 3921292 - RNA, 19 nt, Human adenovirus D
aggcgcgcuucacucuggc

SEQ ID NO: 3921293 - RNA, 17 nt, Human adenovirus D
aggcggacaagcuaaau

SEQ ID NO: 3921294 - RNA, 15 nt, Human adenovirus D
aggcgggugagggcg

SEQ ID NO: 3921295 - RNA, 13 nt, Human adenovirus D
aggcggugcugcu

SEQ ID NO: 3921296 - RNA, 16 nt, Human adenovirus D
aggcuggcccuccauc

SEQ ID NO: 3921297 - RNA, 17 nt, Human adenovirus D
aggcuuucacagcuugc

SEQ ID NO: 3921298 - RNA, 22 nt, Human adenovirus D
agggaaaagcucaaagaccaga

SEQ ID NO: 3921299 - RNA, 19 nt, Human adenovirus D
agggcaccaccgagucuca

SEQ ID NO: 3921300 - RNA, 16 nt, Human adenovirus D
agggcagcccuacccc

SEQ ID NO: 3921301 - RNA, 17 nt, Human adenovirus D
agggcaugggucaggca

SEQ ID NO: 3921302 - RNA, 16 nt, Human adenovirus D
agggccuggaccgcca

SEQ ID NO: 3921303 - RNA, 20 nt, Human adenovirus D
agggcgcgcaguugggagcu

SEQ ID NO: 3921304 - RNA, 20 nt, Human adenovirus D
aggggagugaagagggagag

SEQ ID NO: 3921305 - RNA, 14 nt, Human adenovirus D
aggggcggcagagg

SEQ ID NO: 3921306 - RNA, 20 nt, Human adenovirus D
agguacaugggcaugagccc

SEQ ID NO: 3921307 - RNA, 21 nt, Human adenovirus D
aggucagcagcaagagcucaa

SEQ ID NO: 3921308 - RNA, 17 nt, Human adenovirus D
aggucgaggagaccugc

SEQ ID NO: 3921309 - RNA, 13 nt, Human adenovirus D
aggugcugacgcu

SEQ ID NO: 3921310 - RNA, 16 nt, Human adenovirus D
agguggacgagccgcc

SEQ ID NO: 3921311 - RNA, 15 nt, Human adenovirus D
agguggcccugggcc

SEQ ID NO: 3921312 - RNA, 15 nt, Human adenovirus D
aguaaagaaacagaa

SEQ ID NO: 3921313 - RNA, 18 nt, Human adenovirus D
aguaaauuugacacagca

SEQ ID NO: 3921314 - RNA, 14 nt, Human adenovirus D
aguaaguuccuguc

SEQ ID NO: 3921315 - RNA, 17 nt, Human adenovirus D
aguacaagcgccaacag

SEQ ID NO: 3921316 - RNA, 18 nt, Human adenovirus D
aguacauguucaccagca

SEQ ID NO: 3921317 - RNA, 17 nt, Human adenovirus D
aguaccugagccgcgag

SEQ ID NO: 3921318 - RNA, 15 nt, Human adenovirus D
aguagucaucaaaug

SEQ ID NO: 3921319 - RNA, 17 nt, Human adenovirus D
aguaugccaagauagcc

SEQ ID NO: 3921320 - RNA, 21 nt, Human adenovirus D
agucaaauauuagcuaaugug

SEQ ID NO: 3921321 - RNA, 22 nt, Human adenovirus D
agucacacuuaguucagcugca

SEQ ID NO: 3921322 - RNA, 20 nt, Human adenovirus D
agucacuaggaccccaggga

SEQ ID NO: 3921323 - RNA, 12 nt, Human adenovirus D
aguccaccgcuc

SEQ ID NO: 3921324 - RNA, 11 nt, Human adenovirus D
aguccagcaga

SEQ ID NO: 3921325 - RNA, 17 nt, Human adenovirus D
aguccaugcccaacagg

SEQ ID NO: 3921326 - RNA, 16 nt, Human adenovirus D
agucucaccugguuag

SEQ ID NO: 3921327 - RNA, 13 nt, Human adenovirus D
agugaccaagacc

SEQ ID NO: 3921328 - RNA, 21 nt, Human adenovirus D
agugccuuuaucagcacugca

SEQ ID NO: 3921329 - RNA, 16 nt, Human adenovirus D
aguggaagaagagcag

SEQ ID NO: 3921330 - RNA, 23 nt, Human adenovirus D
aguggcaaugcaggauccagcgc

SEQ ID NO: 3921331 - RNA, 22 nt, Human adenovirus D
aguggcgagaggcgagcagcug

SEQ ID NO: 3921332 - RNA, 12 nt, Human adenovirus D
aguucaggagcg

SEQ ID NO: 3921333 - RNA, 12 nt, Human adenovirus D
aguugagggccu

SEQ ID NO: 3921334 - RNA, 17 nt, Human adenovirus D
aguuggcgacccaggaa

SEQ ID NO: 3921335 - RNA, 13 nt, Human adenovirus D
aguugguggccgu

SEQ ID NO: 3921336 - RNA, 15 nt, Human adenovirus D
aguuguucagcagca

SEQ ID NO: 3921337 - RNA, 15 nt, Human adenovirus D
aguuuuauggcugcu

SEQ ID NO: 3921338 - RNA, 13 nt, Human adenovirus D
auaaacuuaguuu

SEQ ID NO: 3921339 - RNA, 21 nt, Human adenovirus D
auaaaucugcccugauaucca

SEQ ID NO: 3921340 - RNA, 20 nt, Human adenovirus D
auaagacauuuuaaugaauu

SEQ ID NO: 3921341 - RNA, 15 nt, Human adenovirus D
auaauagaaacagau

SEQ ID NO: 3921342 - RNA, 17 nt, Human adenovirus D
auacaaagcugaaagcu

SEQ ID NO: 3921343 - RNA, 20 nt, Human adenovirus D
auacaacucgugcgaggggc

SEQ ID NO: 3921344 - RNA, 13 nt, Human adenovirus D
auacaagccagga

SEQ ID NO: 3921345 - RNA, 18 nt, Human adenovirus D
auacagagauucagccau

SEQ ID NO: 3921346 - RNA, 17 nt, Human adenovirus D
auaugcuacaucugcug

SEQ ID NO: 3921347 - RNA, 21 nt, Human adenovirus D
acgugcaguccaaccuggacc

SEQ ID NO: 3921348 - RNA, 21 nt, Human adenovirus D
acgugcccauagacaaggagg

SEQ ID NO: 3921349 - RNA, 20 nt, Human adenovirus D
acguggccuuguaccugccc

SEQ ID NO: 3921350 - RNA, 14 nt, Human adenovirus D
acguggugcugcug

SEQ ID NO: 3921351 - RNA, 16 nt, Human adenovirus D
acguggugcugcugcc

SEQ ID NO: 3921352 - RNA, 22 nt, Human adenovirus D
acguuucuggggucagagacau

SEQ ID NO: 3921353 - RNA, 19 nt, Human adenovirus D
acuaaacuuuaugagggag

SEQ ID NO: 3921354 - RNA, 14 nt, Human adenovirus D
acuagcgcccuggu

SEQ ID NO: 3921355 - RNA, 14 nt, Human adenovirus D
acucaccaaggcca

SEQ ID NO: 3921356 - RNA, 14 nt, Human adenovirus D
acucacgccggggu

SEQ ID NO: 3921357 - RNA, 22 nt, Human adenovirus D
acucccagcgccgcgcuggaca

SEQ ID NO: 3921358 - RNA, 16 nt, Human adenovirus D
acuccgcgaccuccuc

SEQ ID NO: 3921359 - RNA, 15 nt, Human adenovirus D
acucgacgagccagg

SEQ ID NO: 3921360 - RNA, 15 nt, Human adenovirus D
acucgcggcugcugc

SEQ ID NO: 3921361 - RNA, 17 nt, Human adenovirus D
acucgcggcugcugcug

SEQ ID NO: 3921362 - RNA, 14 nt, Human adenovirus D
acucgcgggcggcc

SEQ ID NO: 3921363 - RNA, 18 nt, Human adenovirus D
acucgcgggcggccauug

SEQ ID NO: 3921364 - RNA, 21 nt, Human adenovirus D
acucggugcuuagccugggca

SEQ ID NO: 3921365 - RNA, 15 nt, Human adenovirus D
acugaaaauuugcaa

SEQ ID NO: 3921366 - RNA, 16 nt, Human adenovirus D
acugaccaccaccugg

SEQ ID NO: 3921367 - RNA, 17 nt, Human adenovirus D
acugccaccgccgccgc

SEQ ID NO: 3921368 - RNA, 21 nt, Human adenovirus D
acugcgcguccgucagcagca

SEQ ID NO: 3921369 - RNA, 21 nt, Human adenovirus D
acugcuaucaggagaaaauug

SEQ ID NO: 3921370 - RNA, 23 nt, Human adenovirus D
acugcuaucaggagaaaauugau

SEQ ID NO: 3921371 - RNA, 16 nt, Human adenovirus D
acugcucgaucuccuc

SEQ ID NO: 3921372 - RNA, 18 nt, Human adenovirus D
acugcucuucccuggaga

SEQ ID NO: 3921373 - RNA, 19 nt, Human adenovirus D
acuggaaacucuuggagca

SEQ ID NO: 3921374 - RNA, 23 nt, Human adenovirus D
acuggagcacagaccuucaggga

SEQ ID NO: 3921375 - RNA, 22 nt, Human adenovirus D
acuggcugacccaaucaccaua

SEQ ID NO: 3921376 - RNA, 14 nt, Human adenovirus D
acuggguggcccuu

SEQ ID NO: 3921377 - RNA, 20 nt, Human adenovirus D
acugguacuugggcugccac

SEQ ID NO: 3921378 - RNA, 16 nt, Human adenovirus D
acuggucaaaaacaaa

SEQ ID NO: 3921379 - RNA, 14 nt, Human adenovirus D
acuucagccugggc

SEQ ID NO: 3921380 - RNA, 19 nt, Human adenovirus D
acuuccgcguaccugcgca

SEQ ID NO: 3921381 - RNA, 15 nt, Human adenovirus D
acuucugccagcaga

SEQ ID NO: 3921382 - RNA, 15 nt, Human adenovirus D
acuugauuggccugu

SEQ ID NO: 3921383 - RNA, 15 nt, Human adenovirus D
agaaaugaggcaggc

SEQ ID NO: 3921384 - RNA, 12 nt, Human adenovirus D
agaacaaggcca

SEQ ID NO: 3921385 - RNA, 12 nt, Human adenovirus D
agaacaggagcc

SEQ ID NO: 3921386 - RNA, 17 nt, Human adenovirus D
agaacauguucuacgcc

SEQ ID NO: 3921387 - RNA, 13 nt, Human adenovirus D
agaaccaugaagg

SEQ ID NO: 3921388 - RNA, 20 nt, Human adenovirus D
agaaccauuuuuauuccaaa

SEQ ID NO: 3921389 - RNA, 17 nt, Human adenovirus D
agaaccggaggcuggcu

SEQ ID NO: 3921390 - RNA, 22 nt, Human adenovirus D
agaaccugaaggagcuggacaa

SEQ ID NO: 3921391 - RNA, 15 nt, Human adenovirus D
agaacggggugcagu

SEQ ID NO: 3921392 - RNA, 15 nt, Human adenovirus D
agaagagcagcacag

SEQ ID NO: 3921393 - RNA, 19 nt, Human adenovirus D
agaaggugagggggucccg

SEQ ID NO: 3921394 - RNA, 22 nt, Human adenovirus D
agaaggugguggacggccuggc

SEQ ID NO: 3921395 - RNA, 15 nt, Human adenovirus D
agaauauccccuucc

SEQ ID NO: 3921396 - RNA, 15 nt, Human adenovirus D
agaauccacagauca

SEQ ID NO: 3921397 - RNA, 12 nt, Human adenovirus D
agaaugcugcua

SEQ ID NO: 3921398 - RNA, 15 nt, Human adenovirus D
agacaccacagugca

SEQ ID NO: 3921399 - RNA, 13 nt, Human adenovirus D
agacagcagaaga

SEQ ID NO: 3921400 - RNA, 23 nt, Human adenovirus D
agaccaugaccauagaccugaug

SEQ ID NO: 3921401 - RNA, 15 nt, Human adenovirus D
agacgagcggccgcc

SEQ ID NO: 3921402 - RNA, 18 nt, Human adenovirus D
agacgcaggccaggagga

SEQ ID NO: 3921403 - RNA, 21 nt, Human adenovirus D
agacuaagcuaguacucuaca

SEQ ID NO: 3921404 - RNA, 14 nt, Human adenovirus D
agagacagaagaag

SEQ ID NO: 3921405 - RNA, 16 nt, Human adenovirus D
agagaugagagucuga

SEQ ID NO: 3921406 - RNA, 13 nt, Human adenovirus D
agagcccccuccc

SEQ ID NO: 3921407 - RNA, 15 nt, Human adenovirus D
agagcucaaaguaaa

SEQ ID NO: 3921408 - RNA, 13 nt, Human adenovirus D
agagcuugggcgc

SEQ ID NO: 3921409 - RNA, 21 nt, Human adenovirus D
agaggagcugaucucgcugcc

SEQ ID NO: 3921410 - RNA, 19 nt, Human adenovirus D
agaggcggaacugcuggcc

SEQ ID NO: 3921411 - RNA, 16 nt, Human adenovirus D
agagggagaggagcga

SEQ ID NO: 3921412 - RNA, 18 nt, Human adenovirus D
agagucugaaaaacagaa

SEQ ID NO: 3921413 - RNA, 20 nt, Human adenovirus D
agauagugcuuacucuauaa

SEQ ID NO: 3921414 - RNA, 20 nt, Human adenovirus D
agaucagcugcagcgcacuc

SEQ ID NO: 3921415 - RNA, 13 nt, Human adenovirus D
agaucgccgcgac

SEQ ID NO: 3921416 - RNA, 23 nt, Human adenovirus D
agaugcgacccaugagcugcgag

SEQ ID NO: 3921417 - RNA, 13 nt, Human adenovirus D
agauggccacccc

SEQ ID NO: 3921418 - RNA, 15 nt, Human adenovirus D
agcaagccccggacc

SEQ ID NO: 3921419 - RNA, 19 nt, Human adenovirus D
agcaccgccgcagccgcgg

SEQ ID NO: 3921420 - RNA, 19 nt, Human adenovirus D
agcaccucgguacccuccu

SEQ ID NO: 3921421 - RNA, 19 nt, Human adenovirus D
agcacgcggaucucacggc

SEQ ID NO: 3921422 - RNA, 20 nt, Human adenovirus D
agcacugcaaauuuaacuuc

SEQ ID NO: 3921423 - RNA, 22 nt, Human adenovirus D
agcagaaauuucaagcugggcu

SEQ ID NO: 3921424 - RNA, 19 nt, Human adenovirus D
agcagaaguucaccugcau

SEQ ID NO: 3921425 - RNA, 16 nt, Human adenovirus D
agcagacagggccugc

SEQ ID NO: 3921426 - RNA, 21 nt, Human adenovirus D
agcagacggugaagcaggagc

SEQ ID NO: 3921427 - RNA, 21 nt, Human adenovirus D
agcagaggaagagggucacac

SEQ ID NO: 3921428 - RNA, 11 nt, Human adenovirus D
agcagcagggu

SEQ ID NO: 3921429 - RNA, 19 nt, Human adenovirus D
agcagcaggguacccacug

SEQ ID NO: 3921430 - RNA, 22 nt, Human adenovirus D
agcagcaggguacccacugggu

SEQ ID NO: 3921431 - RNA, 21 nt, Human adenovirus D
agcagcauguacggaggagcc

SEQ ID NO: 3921432 - RNA, 19 nt, Human adenovirus D
agcagcccuguggacgcug

SEQ ID NO: 3921433 - RNA, 13 nt, Human adenovirus D
agcaggcaggugg

SEQ ID NO: 3921434 - RNA, 17 nt, Human adenovirus D
agcaggggcgcugggcg

SEQ ID NO: 3921435 - RNA, 18 nt, Human adenovirus D
agcaggggcgcugggcgu

SEQ ID NO: 3921436 - RNA, 21 nt, Human adenovirus D
agcaggguacccacugggugg

SEQ ID NO: 3921437 - RNA, 22 nt, Human adenovirus D
agcaggguacccacuggguggc

SEQ ID NO: 3921438 - RNA, 20 nt, Human adenovirus D
agcauaauauggugaagggc

SEQ ID NO: 3921439 - RNA, 15 nt, Human adenovirus D
agcauauaccccucc

SEQ ID NO: 3921440 - RNA, 14 nt, Human adenovirus D
agcaucgcgcaggc

SEQ ID NO: 3921441 - RNA, 23 nt, Human adenovirus D
agcaugagcggcuccagcgaaag

SEQ ID NO: 3921442 - RNA, 18 nt, Human adenovirus D
agcaugccgaagaagaac

SEQ ID NO: 3921443 - RNA, 17 nt, Human adenovirus D
agcauggcuaccuggga

SEQ ID NO: 3921444 - RNA, 18 nt, Human adenovirus D
agcauggcuaccugggag

SEQ ID NO: 3921445 - RNA, 20 nt, Human adenovirus D
agcauggcuaccugggagga

SEQ ID NO: 3921446 - RNA, 14 nt, Human adenovirus D
agccagccacagcc

SEQ ID NO: 3921447 - RNA, 16 nt, Human adenovirus D
agccaggugagcucgg

SEQ ID NO: 3921448 - RNA, 21 nt, Human adenovirus D
agccaggugagcucgggcugc

SEQ ID NO: 3921449 - RNA, 20 nt, Human adenovirus D
agcccaacggcaccugcgag

SEQ ID NO: 3921450 - RNA, 19 nt, Human adenovirus D
agcccgcgcgggagccagg

SEQ ID NO: 3921451 - RNA, 20 nt, Human adenovirus D
agcccgugaccugcagcagg

SEQ ID NO: 3921452 - RNA, 18 nt, Human adenovirus D
agccgcgcgccgcgccgc

SEQ ID NO: 3921453 - RNA, 19 nt, Human adenovirus D
agccgcgcgcuggggcaga

SEQ ID NO: 3921454 - RNA, 17 nt, Human adenovirus D
agccgcuaguggaagag

SEQ ID NO: 3921455 - RNA, 22 nt, Human adenovirus D
agccgcuccgugcgaggaugag

SEQ ID NO: 3921456 - RNA, 18 nt, Human adenovirus D
agccggcgaacgugccgc

SEQ ID NO: 3921457 - RNA, 19 nt, Human adenovirus D
agccggcucgucuagaacc

SEQ ID NO: 3921458 - RNA, 17 nt, Human adenovirus D
agccguacaccaggccu

SEQ ID NO: 3921459 - RNA, 13 nt, Human adenovirus D
agccguaccagug

SEQ ID NO: 3921460 - RNA, 14 nt, Human adenovirus D
agccguggcgcagc

SEQ ID NO: 3921461 - RNA, 12 nt, Human adenovirus D
agccuacccaaa

SEQ ID NO: 3921462 - RNA, 15 nt, Human adenovirus D
agcgaucugggaugc

SEQ ID NO: 3921463 - RNA, 20 nt, Human adenovirus D
agcgaucugggaugcugccc

SEQ ID NO: 3921464 - RNA, 15 nt, Human adenovirus D
agcgaugagcagcuu

SEQ ID NO: 3921465 - RNA, 13 nt, Human adenovirus D
cccacccccccgg

SEQ ID NO: 3921466 - RNA, 20 nt, Human adenovirus D
cccacgaugugaccacggac

SEQ ID NO: 3921467 - RNA, 20 nt, Human adenovirus D
cccacgugguauacaagcca

SEQ ID NO: 3921468 - RNA, 12 nt, Human adenovirus D
cccacugggugg

SEQ ID NO: 3921469 - RNA, 20 nt, Human adenovirus D
cccagagcucgcgggccaug

SEQ ID NO: 3921470 - RNA, 21 nt, Human adenovirus D
cccagcaauaacaccggcugg

SEQ ID NO: 3921471 - RNA, 23 nt, Human adenovirus D
cccagcagaagcagaaguucacc

SEQ ID NO: 3921472 - RNA, 21 nt, Human adenovirus D
cccagccagcaaacgccgccg

SEQ ID NO: 3921473 - RNA, 21 nt, Human adenovirus D
cccagcgucugacgcugcgcu

SEQ ID NO: 3921474 - RNA, 18 nt, Human adenovirus D
cccagcucauccgcagcu

SEQ ID NO: 3921475 - RNA, 17 nt, Human adenovirus D
cccaggcccuggagcag

SEQ ID NO: 3921476 - RNA, 18 nt, Human adenovirus D
cccaggcggugcugcugc

SEQ ID NO: 3921477 - RNA, 19 nt, Human adenovirus D
cccaggcggugcugcugcc

SEQ ID NO: 3921478 - RNA, 18 nt, Human adenovirus D
cccaguuucaaacccuac

SEQ ID NO: 3921479 - RNA, 22 nt, Human adenovirus D
cccauaauucagggugcuccag

SEQ ID NO: 3921480 - RNA, 19 nt, Human adenovirus D
cccauggacgggaacccca

SEQ ID NO: 3921481 - RNA, 17 nt, Human adenovirus D
ccccaaacgccagccca

SEQ ID NO: 3921482 - RNA, 13 nt, Human adenovirus D
ccccagacaccca

SEQ ID NO: 3921483 - RNA, 15 nt, Human adenovirus D
ccccagacacccacg

SEQ ID NO: 3921484 - RNA, 12 nt, Human adenovirus D
ccccaggccugg

SEQ ID NO: 3921485 - RNA, 13 nt, Human adenovirus D
ccccaggcggugc

SEQ ID NO: 3921486 - RNA, 20 nt, Human adenovirus D
ccccaucccggccaaggcca

SEQ ID NO: 3921487 - RNA, 16 nt, Human adenovirus D
ccccauggcgcacaac

SEQ ID NO: 3921488 - RNA, 19 nt, Human adenovirus D
cccccaggcccuggagcag

SEQ ID NO: 3921489 - RNA, 18 nt, Human adenovirus D
ccccccgcggaugcuggc

SEQ ID NO: 3921490 - RNA, 12 nt, Human adenovirus D
cccccgagcgcc

SEQ ID NO: 3921491 - RNA, 16 nt, Human adenovirus D
ccccgcgccgcgcugc

SEQ ID NO: 3921492 - RNA, 14 nt, Human adenovirus D
ccccgcggcggcga

SEQ ID NO: 3921493 - RNA, 17 nt, Human adenovirus D
ccccguugggcagcgag

SEQ ID NO: 3921494 - RNA, 15 nt, Human adenovirus D
ccccuccgcugugcu

SEQ ID NO: 3921495 - RNA, 22 nt, Human adenovirus D
ccccugcaagugcacagaccca

SEQ ID NO: 3921496 - RNA, 18 nt, Human adenovirus D
ccccuggcucccagccuc

SEQ ID NO: 3921497 - RNA, 13 nt, Human adenovirus D
ccccuuccacugu

SEQ ID NO: 3921498 - RNA, 17 nt, Human adenovirus D
cccgagcucugcugcgc

SEQ ID NO: 3921499 - RNA, 18 nt, Human adenovirus D
cccgagggcuacaaggac

SEQ ID NO: 3921500 - RNA, 20 nt, Human adenovirus D
cccgagggucgcuggcugcu

SEQ ID NO: 3921501 - RNA, 22 nt, Human adenovirus D
cccgaugacggguugcaggugg

SEQ ID NO: 3921502 - RNA, 22 nt, Human adenovirus D
cccgccgcuguggagccacugc

SEQ ID NO: 3921503 - RNA, 20 nt, Human adenovirus D
cccggacguggugcugcugc

SEQ ID NO: 3921504 - RNA, 21 nt, Human adenovirus D
cccggacguggugcugcugcc

SEQ ID NO: 3921505 - RNA, 22 nt, Human adenovirus D
cccggacguggugcugcugccg

SEQ ID NO: 3921506 - RNA, 13 nt, Human adenovirus D
cccggccaaggcc

SEQ ID NO: 3921507 - RNA, 17 nt, Human adenovirus D
cccgggggccucguccu

SEQ ID NO: 3921508 - RNA, 17 nt, Human adenovirus D
cccgggucuggugcagu

SEQ ID NO: 3921509 - RNA, 16 nt, Human adenovirus D
cccguggucggcgccg

SEQ ID NO: 3921510 - RNA, 19 nt, Human adenovirus D
cccuacgucuacaaggccc

SEQ ID NO: 3921511 - RNA, 16 nt, Human adenovirus D
cccuauuuaaaggcac

SEQ ID NO: 3921512 - RNA, 18 nt, Human adenovirus D
cccucaucacaucagcca

SEQ ID NO: 3921513 - RNA, 21 nt, Human adenovirus D
cccucaucacaucagccagga

SEQ ID NO: 3921514 - RNA, 23 nt, Human adenovirus D
cccucaucacaucagccaggacu

SEQ ID NO: 3921515 - RNA, 18 nt, Human adenovirus D
cccucgggccccggggcg

SEQ ID NO: 3921516 - RNA, 14 nt, Human adenovirus D
cccugacccagcag

SEQ ID NO: 3921517 - RNA, 17 nt, Human adenovirus D
cccugagcucgcgccuc

SEQ ID NO: 3921518 - RNA, 19 nt, Human adenovirus D
cccugcccgagggcaacuu

SEQ ID NO: 3921519 - RNA, 18 nt, Human adenovirus D
cccugcucaccugcaccu

SEQ ID NO: 3921520 - RNA, 18 nt, Human adenovirus D
cccugcuggccgagcugg

SEQ ID NO: 3921521 - RNA, 12 nt, Human adenovirus D
cccuggaagagu

SEQ ID NO: 3921522 - RNA, 14 nt, Human adenovirus D
cccuggcucccagc

SEQ ID NO: 3921523 - RNA, 20 nt, Human adenovirus D
cccuggcucccagccuccac

SEQ ID NO: 3921524 - RNA, 12 nt, Human adenovirus D
cccuggcuccgc

SEQ ID NO: 3921525 - RNA, 17 nt, Human adenovirus D
cccugugaccaagcugg

SEQ ID NO: 3921526 - RNA, 23 nt, Human adenovirus D
cccuucaccgacaguggcagcgu

SEQ ID NO: 3921527 - RNA, 18 nt, Human adenovirus D
cccuugaacagcauauac

SEQ ID NO: 3921528 - RNA, 16 nt, Human adenovirus D
ccgaagggcgagaagc

SEQ ID NO: 3921529 - RNA, 22 nt, Human adenovirus D
ccgacacugcagggagccaggg

SEQ ID NO: 3921530 - RNA, 20 nt, Human adenovirus D
ccgacgccccugagcggcug

SEQ ID NO: 3921531 - RNA, 14 nt, Human adenovirus D
ccgacgcgcuccuc

SEQ ID NO: 3921532 - RNA, 17 nt, Human adenovirus D
ccgacuucaugagccag

SEQ ID NO: 3921533 - RNA, 14 nt, Human adenovirus D
ccgagccucccagg

SEQ ID NO: 3921534 - RNA, 12 nt, Human adenovirus D
ccgagcucugcu

SEQ ID NO: 3921535 - RNA, 15 nt, Human adenovirus D
ccgagcucugcugcg

SEQ ID NO: 3921536 - RNA, 16 nt, Human adenovirus D
ccgagcugacggccag

SEQ ID NO: 3921537 - RNA, 18 nt, Human adenovirus D
ccgaggagaacugcuggc

SEQ ID NO: 3921538 - RNA, 20 nt, Human adenovirus D
ccgaggagaacugcuggccc

SEQ ID NO: 3921539 - RNA, 20 nt, Human adenovirus D
ccgagggucgcuggcugcug

SEQ ID NO: 3921540 - RNA, 21 nt, Human adenovirus D
ccgaggugccccagagcgagg

SEQ ID NO: 3921541 - RNA, 20 nt, Human adenovirus D
ccgcacuggcuuccgccgcc

SEQ ID NO: 3921542 - RNA, 21 nt, Human adenovirus D
ccgcacuggcuuccgccgccg

SEQ ID NO: 3921543 - RNA, 16 nt, Human adenovirus D
ccgcaggccaacagac

SEQ ID NO: 3921544 - RNA, 18 nt, Human adenovirus D
ccgcaggcgggacagagg

SEQ ID NO: 3921545 - RNA, 17 nt, Human adenovirus D
ccgcauccacaaggccg

SEQ ID NO: 3921546 - RNA, 14 nt, Human adenovirus D
ccgccaaggagcuc

SEQ ID NO: 3921547 - RNA, 12 nt, Human adenovirus D
ccgccagcuggc

SEQ ID NO: 3921548 - RNA, 21 nt, Human adenovirus D
ccgccauaagggcggcgcugc

SEQ ID NO: 3921549 - RNA, 21 nt, Human adenovirus D
ccgccauggggcgccgcccga

SEQ ID NO: 3921550 - RNA, 18 nt, Human adenovirus D
ccgcccgagcucugcugc

SEQ ID NO: 3921551 - RNA, 13 nt, Human adenovirus D
ccgccgccgcacc

SEQ ID NO: 3921552 - RNA, 12 nt, Human adenovirus D
ccgccgccgccg

SEQ ID NO: 3921553 - RNA, 14 nt, Human adenovirus D
ccgccgccgccgcc

SEQ ID NO: 3921554 - RNA, 13 nt, Human adenovirus D
ccgccgcggccau

SEQ ID NO: 3921555 - RNA, 14 nt, Human adenovirus D
ccgccgcggccauc

SEQ ID NO: 3921556 - RNA, 17 nt, Human adenovirus D
ccgccgcuaucugcucu

SEQ ID NO: 3921557 - RNA, 21 nt, Human adenovirus D
ccgccgcuaucugcucuucca

SEQ ID NO: 3921558 - RNA, 20 nt, Human adenovirus D
ccgccggaaacgccaccacc

SEQ ID NO: 3921559 - RNA, 14 nt, Human adenovirus D
ccgccggcucaagc

SEQ ID NO: 3921560 - RNA, 12 nt, Human adenovirus D
ccgccugccagg

SEQ ID NO: 3921561 - RNA, 23 nt, Human adenovirus D
ccgccugcgcauccccguuccga

SEQ ID NO: 3921562 - RNA, 12 nt, Human adenovirus D
ccgccuggggca

SEQ ID NO: 3921563 - RNA, 20 nt, Human adenovirus D
ccgcgagcugaugcugagcc

SEQ ID NO: 3921564 - RNA, 19 nt, Human adenovirus D
ccgcgauguugagcuggac

SEQ ID NO: 3921565 - RNA, 12 nt, Human adenovirus D
ccgcgcgccgcg

SEQ ID NO: 3921566 - RNA, 18 nt, Human adenovirus D
ccgcgcgccgcgccgcca

SEQ ID NO: 3921567 - RNA, 12 nt, Human adenovirus D
ccgcgcugggga

SEQ ID NO: 3921568 - RNA, 17 nt, Human adenovirus D
ccgcgcuugcugggcga

SEQ ID NO: 3921569 - RNA, 13 nt, Human adenovirus D
ccgcggaguccag

SEQ ID NO: 3921570 - RNA, 15 nt, Human adenovirus D
ccgcgucgcugucca

SEQ ID NO: 3921571 - RNA, 14 nt, Human adenovirus D
ccgcuaucugcucu

SEQ ID NO: 3921572 - RNA, 15 nt, Human adenovirus D
ccgcuguggagccac

SEQ ID NO: 3921573 - RNA, 13 nt, Human adenovirus D
ccgcuugcuggau

SEQ ID NO: 3921574 - RNA, 22 nt, Human adenovirus D
ccggaccccgccauaagggcgg

SEQ ID NO: 3921575 - RNA, 17 nt, Human adenovirus D
ccggaggcgugcacugg

SEQ ID NO: 3921576 - RNA, 14 nt, Human adenovirus D
ccggcaacgaccgg

SEQ ID NO: 3921577 - RNA, 19 nt, Human adenovirus D
ccggcauccugcacgcagc

SEQ ID NO: 3921578 - RNA, 14 nt, Human adenovirus D
ccggccccgcgggc

SEQ ID NO: 3921579 - RNA, 13 nt, Human adenovirus D
ccggccgcgcuug

SEQ ID NO: 3921580 - RNA, 19 nt, Human adenovirus D
ccggcgaacgugccgcgcg

SEQ ID NO: 3921581 - RNA, 16 nt, Human adenovirus D
ccggcgacaagcuggc

SEQ ID NO: 3921582 - RNA, 19 nt, Human adenovirus D
ccggcgacaagcuggccug

SEQ ID NO: 3921583 - RNA, 14 nt, Human adenovirus D
ccggcgaccaccgc

SEQ ID NO: 3921584 - RNA, 12 nt, Human adenovirus D
gcagcggcagga

SEQ ID NO: 3921585 - RNA, 22 nt, Human adenovirus D
gcagcgucgacggggaaggcua

SEQ ID NO: 3921586 - RNA, 16 nt, Human adenovirus D
gcagcguguucaaaac

SEQ ID NO: 3921587 - RNA, 12 nt, Human adenovirus D
gcaggaccuggg

SEQ ID NO: 3921588 - RNA, 17 nt, Human adenovirus D
gcaggagcaggaggagg

SEQ ID NO: 3921589 - RNA, 14 nt, Human adenovirus D
gcaggccaggagga

SEQ ID NO: 3921590 - RNA, 17 nt, Human adenovirus D
gcaggccgggcugcacg

SEQ ID NO: 3921591 - RNA, 14 nt, Human adenovirus D
gcaggccgugcugc

SEQ ID NO: 3921592 - RNA, 14 nt, Human adenovirus D
gcaggcgcccagcc

SEQ ID NO: 3921593 - RNA, 17 nt, Human adenovirus D
gcaggcgcuggaagagg

SEQ ID NO: 3921594 - RNA, 19 nt, Human adenovirus D
gcaggggcuacauucugga

SEQ ID NO: 3921595 - RNA, 14 nt, Human adenovirus D
gcaggguaaagcca

SEQ ID NO: 3921596 - RNA, 19 nt, Human adenovirus D
gcagguggacgagccgccu

SEQ ID NO: 3921597 - RNA, 13 nt, Human adenovirus D
gcagucucugccg

SEQ ID NO: 3921598 - RNA, 17 nt, Human adenovirus D
gcaucccguccugcgcc

SEQ ID NO: 3921599 - RNA, 20 nt, Human adenovirus D
gcauccugagauaugugcag

SEQ ID NO: 3921600 - RNA, 17 nt, Human adenovirus D
gcaucgaggugcagacc

SEQ ID NO: 3921601 - RNA, 17 nt, Human adenovirus D
gcaucggaacccuccag

SEQ ID NO: 3921602 - RNA, 15 nt, Human adenovirus D
gcaucuuccuggggc

SEQ ID NO: 3921603 - RNA, 21 nt, Human adenovirus D
gcaugaaggaagcccagagcu

SEQ ID NO: 3921604 - RNA, 20 nt, Human adenovirus D
gcaugaaggggacgagcugc

SEQ ID NO: 3921605 - RNA, 14 nt, Human adenovirus D
gcaugaccagaccc

SEQ ID NO: 3921606 - RNA, 12 nt, Human adenovirus D
gcauggcaggca

SEQ ID NO: 3921607 - RNA, 13 nt, Human adenovirus D
gcauggcaggcag

SEQ ID NO: 3921608 - RNA, 20 nt, Human adenovirus D
gcaugguuucggugacggcg

SEQ ID NO: 3921609 - RNA, 20 nt, Human adenovirus D
gcauguacaacaugcugacu

SEQ ID NO: 3921610 - RNA, 21 nt, Human adenovirus D
gcauguacaacaugcugacug

SEQ ID NO: 3921611 - RNA, 14 nt, Human adenovirus D
gccaacauuacuuc

SEQ ID NO: 3921612 - RNA, 18 nt, Human adenovirus D
gccaaccuggugacggcc

SEQ ID NO: 3921613 - RNA, 16 nt, Human adenovirus D
gccaagauagcccugc

SEQ ID NO: 3921614 - RNA, 16 nt, Human adenovirus D
gccacaggugcugccc

SEQ ID NO: 3921615 - RNA, 14 nt, Human adenovirus D
gccacaugacccug

SEQ ID NO: 3921616 - RNA, 20 nt, Human adenovirus D
gccacccgccgccgucugcc

SEQ ID NO: 3921617 - RNA, 21 nt, Human adenovirus D
gccaccucgccgcgcaggggc

SEQ ID NO: 3921618 - RNA, 11 nt, Human adenovirus D
gccacucccag

SEQ ID NO: 3921619 - RNA, 16 nt, Human adenovirus D
gccagcacgcucuugu

SEQ ID NO: 3921620 - RNA, 24 nt, Human adenovirus D
gccagcccaacggcaccugcgagc

SEQ ID NO: 3921621 - RNA, 14 nt, Human adenovirus D
gccagccgcaggcg

SEQ ID NO: 3921622 - RNA, 15 nt, Human adenovirus D
gccagcgcgugcugc

SEQ ID NO: 3921623 - RNA, 18 nt, Human adenovirus D
gccagcgcuggguggccg

SEQ ID NO: 3921624 - RNA, 19 nt, Human adenovirus D
gccaggaggcggugcgcac

SEQ ID NO: 3921625 - RNA, 21 nt, Human adenovirus D
gccaggccuccgagcagcgca

SEQ ID NO: 3921626 - RNA, 21 nt, Human adenovirus D
gccaggggaugaacaguggca

SEQ ID NO: 3921627 - RNA, 13 nt, Human adenovirus D
gccaggguugaau

SEQ ID NO: 3921628 - RNA, 15 nt, Human adenovirus D
gccagucccucaucc

SEQ ID NO: 3921629 - RNA, 15 nt, Human adenovirus D
gccauagcucagccc

SEQ ID NO: 3921630 - RNA, 20 nt, Human adenovirus D
gccaucaacauccaccagug

SEQ ID NO: 3921631 - RNA, 15 nt, Human adenovirus D
gccauccccauccag

SEQ ID NO: 3921632 - RNA, 21 nt, Human adenovirus D
gccaucggcacgaucccgggc

SEQ ID NO: 3921633 - RNA, 16 nt, Human adenovirus D
gccaucgugcagaacc

SEQ ID NO: 3921634 - RNA, 15 nt, Human adenovirus D
gccauggggcgccgc

SEQ ID NO: 3921635 - RNA, 17 nt, Human adenovirus D
gcccaaacuggggcgac

SEQ ID NO: 3921636 - RNA, 14 nt, Human adenovirus D
gcccaacaggccua

SEQ ID NO: 3921637 - RNA, 14 nt, Human adenovirus D
gcccacccucaggc

SEQ ID NO: 3921638 - RNA, 12 nt, Human adenovirus D
gcccacggccau

SEQ ID NO: 3921639 - RNA, 16 nt, Human adenovirus D
gcccacggugguggag

SEQ ID NO: 3921640 - RNA, 20 nt, Human adenovirus D
gcccagagcucgcgggccau

SEQ ID NO: 3921641 - RNA, 22 nt, Human adenovirus D
gcccagcaauaacaccggcugg

SEQ ID NO: 3921642 - RNA, 23 nt, Human adenovirus D
gcccagcagcauguacggaggag

SEQ ID NO: 3921643 - RNA, 16 nt, Human adenovirus D
gcccagcgagaggagc

SEQ ID NO: 3921644 - RNA, 19 nt, Human adenovirus D
gccccaggcggugcugcug

SEQ ID NO: 3921645 - RNA, 22 nt, Human adenovirus D
gccccaggcggugcugcugccg

SEQ ID NO: 3921646 - RNA, 22 nt, Human adenovirus D
gcccgacuucaugagccagagc

SEQ ID NO: 3921647 - RNA, 22 nt, Human adenovirus D
gcccgagggucgcuggcugcug

SEQ ID NO: 3921648 - RNA, 18 nt, Human adenovirus D
gcccgaguuguccuggua

SEQ ID NO: 3921649 - RNA, 15 nt, Human adenovirus D
gcccgccgccaggcc

SEQ ID NO: 3921650 - RNA, 17 nt, Human adenovirus D
gcccgccgccaggccca

SEQ ID NO: 3921651 - RNA, 13 nt, Human adenovirus D
gcccgcgccgcgg

SEQ ID NO: 3921652 - RNA, 16 nt, Human adenovirus D
gcccgggacggaggcu

SEQ ID NO: 3921653 - RNA, 16 nt, Human adenovirus D
gcccggggccaggucc

SEQ ID NO: 3921654 - RNA, 19 nt, Human adenovirus D
gcccgggucuggugcaguu

SEQ ID NO: 3921655 - RNA, 13 nt, Human adenovirus D
gcccgugggcgac

SEQ ID NO: 3921656 - RNA, 23 nt, Human adenovirus D
gcccguggucagcgaugagcagc

SEQ ID NO: 3921657 - RNA, 17 nt, Human adenovirus D
gcccugagccgccagcu

SEQ ID NO: 3921658 - RNA, 23 nt, Human adenovirus D
gcccugagcucgcgccucaaugu

SEQ ID NO: 3921659 - RNA, 14 nt, Human adenovirus D
gcccugcgcccaga

SEQ ID NO: 3921660 - RNA, 17 nt, Human adenovirus D
gcccugcuauggcucau

SEQ ID NO: 3921661 - RNA, 23 nt, Human adenovirus D
gcccugcuggccgagcuggaagc

SEQ ID NO: 3921662 - RNA, 16 nt, Human adenovirus D
gcccugguccaccucu

SEQ ID NO: 3921663 - RNA, 14 nt, Human adenovirus D
gccgaacgagcaga

SEQ ID NO: 3921664 - RNA, 12 nt, Human adenovirus D
gccgaccggagc

SEQ ID NO: 3921665 - RNA, 16 nt, Human adenovirus D
gccgagaccgugagcu

SEQ ID NO: 3921666 - RNA, 19 nt, Human adenovirus D
gccgauugggaagaacugg

SEQ ID NO: 3921667 - RNA, 20 nt, Human adenovirus D
gccgccaaggagcuccucga

SEQ ID NO: 3921668 - RNA, 22 nt, Human adenovirus D
gccgccacugcaccccccgcag

SEQ ID NO: 3921669 - RNA, 17 nt, Human adenovirus D
gccgcccugacccagca

SEQ ID NO: 3921670 - RNA, 15 nt, Human adenovirus D
gccgccgcaccgcca

SEQ ID NO: 3921671 - RNA, 13 nt, Human adenovirus D
gccgccgccgcgg

SEQ ID NO: 3921672 - RNA, 18 nt, Human adenovirus D
gccgccggcggcgggcca

SEQ ID NO: 3921673 - RNA, 21 nt, Human adenovirus D
gccgccggcggcgggccaugc

SEQ ID NO: 3921674 - RNA, 13 nt, Human adenovirus D
gccgccugcgcug

SEQ ID NO: 3921675 - RNA, 15 nt, Human adenovirus D
gccgcgagaccggag

SEQ ID NO: 3921676 - RNA, 14 nt, Human adenovirus D
gccgcgcaggggcu

SEQ ID NO: 3921677 - RNA, 16 nt, Human adenovirus D
gccgcgccaaccgcac

SEQ ID NO: 3921678 - RNA, 15 nt, Human adenovirus D
gccgcgcgcuggggc

SEQ ID NO: 3921679 - RNA, 22 nt, Human adenovirus D
gccgcggccagaugcggaggag

SEQ ID NO: 3921680 - RNA, 16 nt, Human adenovirus D
gccgcggcgagcggga

SEQ ID NO: 3921681 - RNA, 17 nt, Human adenovirus D
gccgcggcgagcgggac

SEQ ID NO: 3921682 - RNA, 20 nt, Human adenovirus D
gccgcucgcucguucugccc

SEQ ID NO: 3921683 - RNA, 14 nt, Human adenovirus D
gccgcuggacgaga

SEQ ID NO: 3921684 - RNA, 22 nt, Human adenovirus D
gccggccaauguuacgcugccc

SEQ ID NO: 3921685 - RNA, 21 nt, Human adenovirus D
gccggccgcgcuugcugggcg

SEQ ID NO: 3921686 - RNA, 16 nt, Human adenovirus D
gccggcgaaccgagca

SEQ ID NO: 3921687 - RNA, 21 nt, Human adenovirus D
gccggcgaacgugccgcgcgg

SEQ ID NO: 3921688 - RNA, 20 nt, Human adenovirus D
gccgggccaugaugcgagcc

SEQ ID NO: 3921689 - RNA, 22 nt, Human adenovirus D
gccgggguucuauacgggcgag

SEQ ID NO: 3921690 - RNA, 22 nt, Human adenovirus D
gccgguuucgggcgggcaggga

SEQ ID NO: 3921691 - RNA, 20 nt, Human adenovirus D
gccguacgugcccauagaca

SEQ ID NO: 3921692 - RNA, 16 nt, Human adenovirus D
gccguagcaggcgccg

SEQ ID NO: 3921693 - RNA, 15 nt, Human adenovirus D
gccgucacccugccc

SEQ ID NO: 3921694 - RNA, 14 nt, Human adenovirus D
gccguccgcccgcg

SEQ ID NO: 3921695 - RNA, 18 nt, Human adenovirus D
gccguccuuucgcugcug

SEQ ID NO: 3921696 - RNA, 19 nt, Human adenovirus D
gccguggccucuucgcccg

SEQ ID NO: 3921697 - RNA, 16 nt, Human adenovirus D
gccuacgagcagacgg

SEQ ID NO: 3921698 - RNA, 17 nt, Human adenovirus D
gccucaaugucagcugc

SEQ ID NO: 3921699 - RNA, 17 nt, Human adenovirus D
gccuccacccuggaagc

SEQ ID NO: 3921700 - RNA, 18 nt, Human adenovirus D
gccucggaguaccugagc

SEQ ID NO: 3921701 - RNA, 15 nt, Human adenovirus D
gccucguccucuucc

SEQ ID NO: 3921702 - RNA, 14 nt, Human adenovirus D
gccugaggcagacg

SEQ ID NO: 3921703 - RNA, 16 nt, Human adenovirus D
gccugaguggcggcuu

SEQ ID NO: 3921704 - RNA, 18 nt, Human adenovirus D
gccugaugcaccuguggg

SEQ ID NO: 3921705 - RNA, 13 nt, Human adenovirus D
gccugaugcagga

SEQ ID NO: 3921706 - RNA, 14 nt, Human adenovirus D
gccugaugcaggau

SEQ ID NO: 3921707 - RNA, 16 nt, Human adenovirus D
gccugcaaacggugaa

SEQ ID NO: 3921708 - RNA, 16 nt, Human adenovirus D
gccugccaggaugggc

SEQ ID NO: 3921709 - RNA, 17 nt, Human adenovirus D
gccugcgcccgcgccgc

SEQ ID NO: 3921710 - RNA, 21 nt, Human adenovirus D
gccugcgucaucacccagggc

SEQ ID NO: 3921711 - RNA, 18 nt, Human adenovirus D
gccugggcucgcuggugg

SEQ ID NO: 3921712 - RNA, 14 nt, Human adenovirus D
gccuggggcagaca

SEQ ID NO: 3921713 - RNA, 15 nt, Human adenovirus D
gccuggggcagacag

SEQ ID NO: 3921714 - RNA, 14 nt, Human adenovirus D
gccuucgaaggggg

SEQ ID NO: 3921715 - RNA, 21 nt, Human adenovirus D
gccuuguagggacagcagccc

SEQ ID NO: 3921716 - RNA, 19 nt, Human adenovirus D
gccuuuagguguugcauga

SEQ ID NO: 3921717 - RNA, 20 nt, Human adenovirus D
gcgaagccguggcgcagcgc

SEQ ID NO: 3921718 - RNA, 16 nt, Human adenovirus D
gcgacacacuuccauu

SEQ ID NO: 3921719 - RNA, 19 nt, Human adenovirus D
gcgacccaugagcugcgag

SEQ ID NO: 3921720 - RNA, 14 nt, Human adenovirus D
gcgacgcggcggcg

SEQ ID NO: 3921721 - RNA, 21 nt, Human adenovirus D
gcgagaacauguacccgacca

SEQ ID NO: 3921722 - RNA, 14 nt, Human adenovirus D
gcgagaagcggccg

SEQ ID NO: 3921723 - RNA, 13 nt, Human adenovirus D
gcgagacccaggu

SEQ ID NO: 3921724 - RNA, 15 nt, Human adenovirus D
gcgagccgcgcgccg

SEQ ID NO: 3921725 - RNA, 15 nt, Human adenovirus D
gcgaggacaccagua

SEQ ID NO: 3921726 - RNA, 15 nt, Human adenovirus D
gcgagggcgagaaca

SEQ ID NO: 3921727 - RNA, 13 nt, Human adenovirus D
gcgaggggccaag

SEQ ID NO: 3921728 - RNA, 17 nt, Human adenovirus D
gcgaggggcuccucucg

SEQ ID NO: 3921729 - RNA, 13 nt, Human adenovirus D
gcgagguugagcu

SEQ ID NO: 3921730 - RNA, 16 nt, Human adenovirus D
gcgauaugccagacgc

SEQ ID NO: 3921731 - RNA, 15 nt, Human adenovirus D
gcgcacaacaccgcc

SEQ ID NO: 3921732 - RNA, 18 nt, Human adenovirus D
gcgcacguggcggcggcc

SEQ ID NO: 3921733 - RNA, 14 nt, Human adenovirus D
gcgcagcggcagga

SEQ ID NO: 3921734 - RNA, 13 nt, Human adenovirus D
gcgcaggcgaccc

SEQ ID NO: 3921735 - RNA, 14 nt, Human adenovirus D
gcgcaggcgcugga

SEQ ID NO: 3921736 - RNA, 21 nt, Human adenovirus D
gcgcagguggacgagcagacc

SEQ ID NO: 3921737 - RNA, 15 nt, Human adenovirus D
gcgcaguugggagcu

SEQ ID NO: 3921738 - RNA, 19 nt, Human adenovirus D
gcgccaaaugcgucccacc

SEQ ID NO: 3921739 - RNA, 18 nt, Human adenovirus D
gcgccagacgcacgggcc

SEQ ID NO: 3921740 - RNA, 14 nt, Human adenovirus D
gcgccagccgcggu

SEQ ID NO: 3921741 - RNA, 12 nt, Human adenovirus D
gcgcccucagca

SEQ ID NO: 3921742 - RNA, 15 nt, Human adenovirus D
gcgcccugagagcgc

SEQ ID NO: 3921743 - RNA, 12 nt, Human adenovirus D
gcgccgcccgag

SEQ ID NO: 3921744 - RNA, 14 nt, Human adenovirus D
gcgccgcgccagac

SEQ ID NO: 3921745 - RNA, 18 nt, Human adenovirus D
gcgccgcggcgacagcgc

SEQ ID NO: 3921746 - RNA, 19 nt, Human adenovirus D
gcgccuucaauuggagcag

SEQ ID NO: 3921747 - RNA, 17 nt, Human adenovirus D
gcgcgaagauggccacc

SEQ ID NO: 3921748 - RNA, 19 nt, Human adenovirus D
gcgcgaagccguggcgcag

SEQ ID NO: 3921749 - RNA, 14 nt, Human adenovirus D
gcgcgaccugggcu

SEQ ID NO: 3921750 - RNA, 15 nt, Human adenovirus D
gcgcgagcugagcga

SEQ ID NO: 3921751 - RNA, 16 nt, Human adenovirus D
gcgcgaguucgcuccg

SEQ ID NO: 3921752 - RNA, 15 nt, Human adenovirus D
gcgcgcaugaccacc

SEQ ID NO: 3921753 - RNA, 16 nt, Human adenovirus D
gcgcgcccggggccag

SEQ ID NO: 3921754 - RNA, 18 nt, Human adenovirus D
gcgcgggagccaggucca

SEQ ID NO: 3921755 - RNA, 14 nt, Human adenovirus D
gcgcgggcaggaug

SEQ ID NO: 3921756 - RNA, 13 nt, Human adenovirus D
gcgcggggccacg

SEQ ID NO: 3921757 - RNA, 18 nt, Human adenovirus D
gcgcgucauggcugguca

SEQ ID NO: 3921758 - RNA, 19 nt, Human adenovirus D
gcgcgugcccgugcgcacc

SEQ ID NO: 3921759 - RNA, 13 nt, Human adenovirus D
gcgcuaccacccc

SEQ ID NO: 3921760 - RNA, 13 nt, Human adenovirus D
gcgcuccgugggg

SEQ ID NO: 3921761 - RNA, 22 nt, Human adenovirus D
gcgcucgaaauccccgggggcc

SEQ ID NO: 3921762 - RNA, 19 nt, Human adenovirus D
gcgcucgcgcaccugcuac

SEQ ID NO: 3921763 - RNA, 16 nt, Human adenovirus D
gcgcuggggagggcca

SEQ ID NO: 3921764 - RNA, 21 nt, Human adenovirus D
gcggaccugcauuggcagccg

SEQ ID NO: 3921765 - RNA, 15 nt, Human adenovirus D
gcggacgcgcucccg

SEQ ID NO: 3921766 - RNA, 23 nt, Human adenovirus D
gcggacggaucgcccaggcgcca

SEQ ID NO: 3921767 - RNA, 22 nt, Human adenovirus D
gcggaggccaucgugcagaacc

SEQ ID NO: 3921768 - RNA, 21 nt, Human adenovirus D
gcggaguccagcgagugaccg

SEQ ID NO: 3921769 - RNA, 23 nt, Human adenovirus D
gcggagucuuccaugcgggugac

SEQ ID NO: 3921770 - RNA, 22 nt, Human adenovirus D
gcggcaaaauggcgugcuggag

SEQ ID NO: 3921771 - RNA, 14 nt, Human adenovirus D
gcggccagcgcugg

SEQ ID NO: 3921772 - RNA, 14 nt, Human adenovirus D
gcggccgcggccag

SEQ ID NO: 3921773 - RNA, 23 nt, Human adenovirus D
gcggccguucaugggcaccugga

SEQ ID NO: 3921774 - RNA, 19 nt, Human adenovirus D
gcggcgaacuuucuccaca

SEQ ID NO: 3921775 - RNA, 15 nt, Human adenovirus D
gcggcgcggagcaag

SEQ ID NO: 3921776 - RNA, 20 nt, Human adenovirus D
gcggcggaugguggcgagga

SEQ ID NO: 3921777 - RNA, 14 nt, Human adenovirus D
gcggcggccaucgg

SEQ ID NO: 3921778 - RNA, 13 nt, Human adenovirus D
gcggcgggggcgg

SEQ ID NO: 3921779 - RNA, 16 nt, Human adenovirus D
gcggcgggggcggaga

SEQ ID NO: 3921780 - RNA, 21 nt, Human adenovirus D
gcggcgguuccggccccgcgg

SEQ ID NO: 3921781 - RNA, 22 nt, Human adenovirus D
gcgggacauccaggugaugccg

SEQ ID NO: 3921782 - RNA, 18 nt, Human adenovirus D
gcgggaucaucgccugcu

SEQ ID NO: 3921783 - RNA, 21 nt, Human adenovirus D
gcgggcaggggcggcagaggc

SEQ ID NO: 3921784 - RNA, 18 nt, Human adenovirus D
gcgggcgccucccaggac

SEQ ID NO: 3921785 - RNA, 20 nt, Human adenovirus D
gcggggccacgaccgugccg

SEQ ID NO: 3921786 - RNA, 15 nt, Human adenovirus D
gcggggccuggugug

SEQ ID NO: 3921787 - RNA, 15 nt, Human adenovirus D
gcguaagcaggagca

SEQ ID NO: 3921788 - RNA, 19 nt, Human adenovirus D
gcgucagggcgaagguguc

SEQ ID NO: 3921789 - RNA, 20 nt, Human adenovirus D
gcguccgcuccgcagugggc

SEQ ID NO: 3921790 - RNA, 15 nt, Human adenovirus D
gcguccgucagcagc

SEQ ID NO: 3921791 - RNA, 16 nt, Human adenovirus D
gcgucgacggcgccuc

SEQ ID NO: 3921792 - RNA, 20 nt, Human adenovirus D
gcgucuagccaaucgcaguc

SEQ ID NO: 3921793 - RNA, 14 nt, Human adenovirus D
gcgucuccaugagu

SEQ ID NO: 3921794 - RNA, 15 nt, Human adenovirus D
gcgugcgaguuggag

SEQ ID NO: 3921795 - RNA, 19 nt, Human adenovirus D
gcgugcgaguuggaggaga

SEQ ID NO: 3921796 - RNA, 22 nt, Human adenovirus D
gcguggcccuuggcgcggagcu

SEQ ID NO: 3921797 - RNA, 14 nt, Human adenovirus D
gcguguugcggccc

SEQ ID NO: 3921798 - RNA, 15 nt, Human adenovirus D
gcuaaucaugcccca

SEQ ID NO: 3921799 - RNA, 19 nt, Human adenovirus D
gcuaaugguccugcaagag

SEQ ID NO: 3921800 - RNA, 18 nt, Human adenovirus D
gcuaccaccccagcaucc

SEQ ID NO: 3921801 - RNA, 14 nt, Human adenovirus D
gcuaccgcggcacc

SEQ ID NO: 3921802 - RNA, 17 nt, Human adenovirus D
gcuaccucuugcagcug

SEQ ID NO: 3921803 - RNA, 16 nt, Human adenovirus D
gcuaccugggaggaga

SEQ ID NO: 3921804 - RNA, 19 nt, Human adenovirus D
gcuagaaaacacccacagg

SEQ ID NO: 3921805 - RNA, 16 nt, Human adenovirus D
gcuagcacgcagacga

SEQ ID NO: 3921806 - RNA, 20 nt, Human adenovirus D
gcuaguguacaacgcccugc

SEQ ID NO: 3921807 - RNA, 16 nt, Human adenovirus D
gcuauaaaucuuuucu

SEQ ID NO: 3921808 - RNA, 16 nt, Human adenovirus D
gcucaggaccauaggg

SEQ ID NO: 3921809 - RNA, 17 nt, Human adenovirus D
gcucaggaccauaggga

SEQ ID NO: 3921810 - RNA, 17 nt, Human adenovirus D
gcuccaccaccugcagc

SEQ ID NO: 3921811 - RNA, 16 nt, Human adenovirus D
gcuccaccgaaggcag

SEQ ID NO: 3921812 - RNA, 15 nt, Human adenovirus D
gcuccagccaaagcu

SEQ ID NO: 3921813 - RNA, 20 nt, Human adenovirus D
gcuccagccaaagcucaugu

SEQ ID NO: 3921814 - RNA, 21 nt, Human adenovirus D
gcuccagccaaagcucauguu

SEQ ID NO: 3921815 - RNA, 16 nt, Human adenovirus D
gcucccaaucccaguc

SEQ ID NO: 3921816 - RNA, 14 nt, Human adenovirus D
gcucccaccgcgcc

SEQ ID NO: 3921817 - RNA, 14 nt, Human adenovirus D
gcucccgggcuccu

SEQ ID NO: 3921818 - RNA, 20 nt, Human adenovirus D
gcuccggcggauagcgcgcc

SEQ ID NO: 3921819 - RNA, 21 nt, Human adenovirus D
gcuccgguugugcagcccccu

SEQ ID NO: 3921820 - RNA, 22 nt, Human adenovirus D
gcuccgguugugcagcccccuc

SEQ ID NO: 3921821 - RNA, 18 nt, Human adenovirus D
gcuccucgaggacggaga

SEQ ID NO: 3921822 - RNA, 14 nt, Human adenovirus D
cucagcagucucug

SEQ ID NO: 3921823 - RNA, 18 nt, Human adenovirus D
cucagcagucucugccgc

SEQ ID NO: 3921824 - RNA, 23 nt, Human adenovirus D
cucagccucgaacaguccaccca

SEQ ID NO: 3921825 - RNA, 21 nt, Human adenovirus D
cucaggcgcaaccaggaggag

SEQ ID NO: 3921826 - RNA, 23 nt, Human adenovirus D
cucaggcgcaaccaggaggagcu

SEQ ID NO: 3921827 - RNA, 15 nt, Human adenovirus D
cucaucggccagaca

SEQ ID NO: 3921828 - RNA, 16 nt, Human adenovirus D
cucaucucgcccagca

SEQ ID NO: 3921829 - RNA, 21 nt, Human adenovirus D
cucaucugcagggcgcccagc

SEQ ID NO: 3921830 - RNA, 15 nt, Human adenovirus D
cucaugaacacacug

SEQ ID NO: 3921831 - RNA, 18 nt, Human adenovirus D
cucaugcccuuccgcgcc

SEQ ID NO: 3921832 - RNA, 15 nt, Human adenovirus D
cucauuuuuccagcc

SEQ ID NO: 3921833 - RNA, 14 nt, Human adenovirus D
cuccaaagcuagca

SEQ ID NO: 3921834 - RNA, 15 nt, Human adenovirus D
cuccaaagcuagcac

SEQ ID NO: 3921835 - RNA, 18 nt, Human adenovirus D
cuccaacguggagcugac

SEQ ID NO: 3921836 - RNA, 12 nt, Human adenovirus D
cuccacgugccg

SEQ ID NO: 3921837 - RNA, 19 nt, Human adenovirus D
cuccagcaacuucaugucc

SEQ ID NO: 3921838 - RNA, 18 nt, Human adenovirus D
cuccaugcuucugggcaa

SEQ ID NO: 3921839 - RNA, 13 nt, Human adenovirus D
cucccacagugcc

SEQ ID NO: 3921840 - RNA, 22 nt, Human adenovirus D
cucccagcucauccgcagcuac

SEQ ID NO: 3921841 - RNA, 23 nt, Human adenovirus D
cuccccuuacuuucgcucccacc

SEQ ID NO: 3921842 - RNA, 15 nt, Human adenovirus D
cucccgccccuucga

SEQ ID NO: 3921843 - RNA, 16 nt, Human adenovirus D
cucccggcggcagcgg

SEQ ID NO: 3921844 - RNA, 13 nt, Human adenovirus D
cuccgcaccgcuc

SEQ ID NO: 3921845 - RNA, 13 nt, Human adenovirus D
cuccgcagugggc

SEQ ID NO: 3921846 - RNA, 14 nt, Human adenovirus D
cuccgcgaacagca

SEQ ID NO: 3921847 - RNA, 17 nt, Human adenovirus D
cuccgcgaacagcagca

SEQ ID NO: 3921848 - RNA, 16 nt, Human adenovirus D
cuccgcgaccuccucc

SEQ ID NO: 3921849 - RNA, 18 nt, Human adenovirus D
cuccggaccuaugggaac

SEQ ID NO: 3921850 - RNA, 17 nt, Human adenovirus D
cuccggguucuggagac

SEQ ID NO: 3921851 - RNA, 18 nt, Human adenovirus D
cuccggguucuggagaca

SEQ ID NO: 3921852 - RNA, 17 nt, Human adenovirus D
cuccgguggcgaccgcc

SEQ ID NO: 3921853 - RNA, 17 nt, Human adenovirus D
cuccgguugugcagccc

SEQ ID NO: 3921854 - RNA, 14 nt, Human adenovirus D
cuccguagccuggc

SEQ ID NO: 3921855 - RNA, 14 nt, Human adenovirus D
cuccguggggcgcu

SEQ ID NO: 3921856 - RNA, 14 nt, Human adenovirus D
cuccguuguacgac

SEQ ID NO: 3921857 - RNA, 20 nt, Human adenovirus D
cuccuccuguuacuguaaag

SEQ ID NO: 3921858 - RNA, 20 nt, Human adenovirus D
cuccucgaggacggagaggc

SEQ ID NO: 3921859 - RNA, 20 nt, Human adenovirus D
cuccucuuugcccugcucac

SEQ ID NO: 3921860 - RNA, 14 nt, Human adenovirus D
cuccugccugggaa

SEQ ID NO: 3921861 - RNA, 18 nt, Human adenovirus D
cuccugcucccgggcucc

SEQ ID NO: 3921862 - RNA, 21 nt, Human adenovirus D
cuccuggugcgucgagcacag

SEQ ID NO: 3921863 - RNA, 23 nt, Human adenovirus D
cucgaaggacgauaaagugcaag

SEQ ID NO: 3921864 - RNA, 20 nt, Human adenovirus D
cucgaaucaggcuggagccg

SEQ ID NO: 3921865 - RNA, 17 nt, Human adenovirus D
cucgacgagccagguga

SEQ ID NO: 3921866 - RNA, 19 nt, Human adenovirus D
cucgagcucgaaugcaugc

SEQ ID NO: 3921867 - RNA, 19 nt, Human adenovirus D
cucgcaguccgccaagcuc

SEQ ID NO: 3921868 - RNA, 23 nt, Human adenovirus D
cucgcaguccgccaagcuccucg

SEQ ID NO: 3921869 - RNA, 16 nt, Human adenovirus D
cucgcuccggaggcau

SEQ ID NO: 3921870 - RNA, 14 nt, Human adenovirus D
cucgcucuggggcc

SEQ ID NO: 3921871 - RNA, 22 nt, Human adenovirus D
cucgcugguggacgccuacauc

SEQ ID NO: 3921872 - RNA, 20 nt, Human adenovirus D
cucgcugguggcgcugaacg

SEQ ID NO: 3921873 - RNA, 17 nt, Human adenovirus D
cucggaccuggccgaga

SEQ ID NO: 3921874 - RNA, 12 nt, Human adenovirus D
cucggagcuggc

SEQ ID NO: 3921875 - RNA, 12 nt, Human adenovirus D
cucggcaacgac

SEQ ID NO: 3921876 - RNA, 16 nt, Human adenovirus D
cucggcggcguggccc

SEQ ID NO: 3921877 - RNA, 16 nt, Human adenovirus D
cucgguacccuccucc

SEQ ID NO: 3921878 - RNA, 15 nt, Human adenovirus D
cucggugcggcugcu

SEQ ID NO: 3921879 - RNA, 16 nt, Human adenovirus D
cucggugcuuagccug

SEQ ID NO: 3921880 - RNA, 19 nt, Human adenovirus D
cucguagaggcgggugagg

SEQ ID NO: 3921881 - RNA, 16 nt, Human adenovirus D
cucgucuuccaggagc

SEQ ID NO: 3921882 - RNA, 20 nt, Human adenovirus D
cucuacgcguacauccagca

SEQ ID NO: 3921883 - RNA, 21 nt, Human adenovirus D
cucuacgcguacauccagcau

SEQ ID NO: 3921884 - RNA, 12 nt, Human adenovirus D
cucucagcacgg

SEQ ID NO: 3921885 - RNA, 17 nt, Human adenovirus D
cucucagcacgguggcc

SEQ ID NO: 3921886 - RNA, 14 nt, Human adenovirus D
cucuccgcaccgcu

SEQ ID NO: 3921887 - RNA, 15 nt, Human adenovirus D
cucuccugaaccaca

SEQ ID NO: 3921888 - RNA, 20 nt, Human adenovirus D
cucuccuuucuucucccaca

SEQ ID NO: 3921889 - RNA, 18 nt, Human adenovirus D
cucucgaagacgccgagg

SEQ ID NO: 3921890 - RNA, 16 nt, Human adenovirus D
cucucuuugugucucc

SEQ ID NO: 3921891 - RNA, 17 nt, Human adenovirus D
cucucuuugugucuccg

SEQ ID NO: 3921892 - RNA, 15 nt, Human adenovirus D
cucugacacaccugg

SEQ ID NO: 3921893 - RNA, 21 nt, Human adenovirus D
cucugauucaugugaacaaaa

SEQ ID NO: 3921894 - RNA, 19 nt, Human adenovirus D
cucugcgcucgcucacccg

SEQ ID NO: 3921895 - RNA, 12 nt, Human adenovirus D
cucugugcccag

SEQ ID NO: 3921896 - RNA, 13 nt, Human adenovirus D
cucugugcccagu

SEQ ID NO: 3921897 - RNA, 14 nt, Human adenovirus D
cucuucgcccgacc

SEQ ID NO: 3921898 - RNA, 15 nt, Human adenovirus D
cucuuuccagcagca

SEQ ID NO: 3921899 - RNA, 17 nt, Human adenovirus D
cucuuuccagcagcagg

SEQ ID NO: 3921900 - RNA, 15 nt, Human adenovirus D
cugaaacaccugcag

SEQ ID NO: 3921901 - RNA, 17 nt, Human adenovirus D
cugaaaggcgggcugcc

SEQ ID NO: 3921902 - RNA, 18 nt, Human adenovirus D
cugaaaguaugucucugg

SEQ ID NO: 3921903 - RNA, 16 nt, Human adenovirus D
cugaacgccuuccugg

SEQ ID NO: 3921904 - RNA, 14 nt, Human adenovirus D
cugaagcgccgccg

SEQ ID NO: 3921905 - RNA, 16 nt, Human adenovirus D
cugacacaccuggucc

SEQ ID NO: 3921906 - RNA, 20 nt, Human adenovirus D
cugaccaauagacagcagaa

SEQ ID NO: 3921907 - RNA, 21 nt, Human adenovirus D
cugaccaauagacagcagaag

SEQ ID NO: 3921908 - RNA, 15 nt, Human adenovirus D
cugaccuugcagagc

SEQ ID NO: 3921909 - RNA, 13 nt, Human adenovirus D
cugacgacccgca

SEQ ID NO: 3921910 - RNA, 17 nt, Human adenovirus D
cugagccugcgccgggc

SEQ ID NO: 3921911 - RNA, 21 nt, Human adenovirus D
cugagcggcugcacgagcgcc

SEQ ID NO: 3921912 - RNA, 23 nt, Human adenovirus D
cugagcucuuaccaaguccaggg

SEQ ID NO: 3921913 - RNA, 22 nt, Human adenovirus D
cugauauugcuucccuggaaga

SEQ ID NO: 3921914 - RNA, 19 nt, Human adenovirus D
cugaucugauccuugucca

SEQ ID NO: 3921915 - RNA, 16 nt, Human adenovirus D
cugcaacgccuucccc

SEQ ID NO: 3921916 - RNA, 20 nt, Human adenovirus D
cugcaccccccgcaggcagg

SEQ ID NO: 3921917 - RNA, 16 nt, Human adenovirus D
cugcacgaccucggag

SEQ ID NO: 3921918 - RNA, 21 nt, Human adenovirus D
cugcagcccaaacuggggcga

SEQ ID NO: 3921919 - RNA, 18 nt, Human adenovirus D
cugcagcucaucgacugg

SEQ ID NO: 3921920 - RNA, 19 nt, Human adenovirus D
cugcaggcgucgcagcgcc

SEQ ID NO: 3921921 - RNA, 17 nt, Human adenovirus D
cugcagggagccagggg

SEQ ID NO: 3921922 - RNA, 19 nt, Human adenovirus D
cugcagggcgcccagcaug

SEQ ID NO: 3921923 - RNA, 20 nt, Human adenovirus D
cugcagggcgcccagcaugu

SEQ ID NO: 3921924 - RNA, 19 nt, Human adenovirus D
cugcaggggcgucccgcgg

SEQ ID NO: 3921925 - RNA, 19 nt, Human adenovirus D
cugcaugcuggaauaagcu

SEQ ID NO: 3921926 - RNA, 20 nt, Human adenovirus D
cugccaacauuacuucuggc

SEQ ID NO: 3921927 - RNA, 19 nt, Human adenovirus D
cugccaugggaggaagcaa

SEQ ID NO: 3921928 - RNA, 16 nt, Human adenovirus D
cugccgagccgcggga

SEQ ID NO: 3921929 - RNA, 15 nt, Human adenovirus D
cugccgcgccaaccg

SEQ ID NO: 3921930 - RNA, 24 nt, Human adenovirus D
cugccgcugcaaccugugcucucc

SEQ ID NO: 3921931 - RNA, 13 nt, Human adenovirus D
cugcgagaggagu

SEQ ID NO: 3921932 - RNA, 23 nt, Human adenovirus D
cugcgcaaauuuguacccgagga

SEQ ID NO: 3921933 - RNA, 21 nt, Human adenovirus D
cugcgccauugucaacacggc

SEQ ID NO: 3921934 - RNA, 15 nt, Human adenovirus D
cugcgcccgcgccgc

SEQ ID NO: 3921935 - RNA, 14 nt, Human adenovirus D
cugcgcgagggccu

SEQ ID NO: 3921936 - RNA, 19 nt, Human adenovirus D
cugcgcgagggccuggacc

SEQ ID NO: 3921937 - RNA, 18 nt, Human adenovirus D
cugcgcguccgucagcag

SEQ ID NO: 3921938 - RNA, 16 nt, Human adenovirus D
cugcggcgcggagcaa

SEQ ID NO: 3921939 - RNA, 16 nt, Human adenovirus D
cugcucgggcaugagc

SEQ ID NO: 3921940 - RNA, 17 nt, Human adenovirus D
cugcucuucccuggaga

SEQ ID NO: 3921941 - RNA, 17 nt, Human adenovirus D
cggcccuggcugguggu

SEQ ID NO: 3921942 - RNA, 13 nt, Human adenovirus D
cggccgccaacau

SEQ ID NO: 3921943 - RNA, 13 nt, Human adenovirus D
cggccgcccacgg

SEQ ID NO: 3921944 - RNA, 20 nt, Human adenovirus D
cggccguccuuucgcugcug

SEQ ID NO: 3921945 - RNA, 21 nt, Human adenovirus D
cggccuuugaugugcggcagc

SEQ ID NO: 3921946 - RNA, 12 nt, Human adenovirus D
cggcgaccaccg

SEQ ID NO: 3921947 - RNA, 20 nt, Human adenovirus D
cggcgacgacgacauccugg

SEQ ID NO: 3921948 - RNA, 23 nt, Human adenovirus D
cggcgaggggcuccucucgugcu

SEQ ID NO: 3921949 - RNA, 15 nt, Human adenovirus D
cggcgaggggcugcu

SEQ ID NO: 3921950 - RNA, 22 nt, Human adenovirus D
cggcgcagcuguuccugguggu

SEQ ID NO: 3921951 - RNA, 16 nt, Human adenovirus D
cggcgcguggaggaag

SEQ ID NO: 3921952 - RNA, 19 nt, Human adenovirus D
cggcggacaucgcuucccu

SEQ ID NO: 3921953 - RNA, 19 nt, Human adenovirus D
cggcggcgaggggcuccuc

SEQ ID NO: 3921954 - RNA, 15 nt, Human adenovirus D
cggcggcgggccaug

SEQ ID NO: 3921955 - RNA, 15 nt, Human adenovirus D
cggcggcuggcggua

SEQ ID NO: 3921956 - RNA, 19 nt, Human adenovirus D
cggcgggccaugcgcaggc

SEQ ID NO: 3921957 - RNA, 23 nt, Human adenovirus D
cggcggugguguucacgcccggc

SEQ ID NO: 3921958 - RNA, 18 nt, Human adenovirus D
cggcguaguugcgcaggc

SEQ ID NO: 3921959 - RNA, 20 nt, Human adenovirus D
cggcgucauugacggcgggc

SEQ ID NO: 3921960 - RNA, 14 nt, Human adenovirus D
cggcugcugcaaau

SEQ ID NO: 3921961 - RNA, 14 nt, Human adenovirus D
cgggaaccccacca

SEQ ID NO: 3921962 - RNA, 20 nt, Human adenovirus D
cgggaccgaguucagcucca

SEQ ID NO: 3921963 - RNA, 18 nt, Human adenovirus D
cgggacuuggucaccccg

SEQ ID NO: 3921964 - RNA, 22 nt, Human adenovirus D
cgggagcgguggggucaacccg

SEQ ID NO: 3921965 - RNA, 21 nt, Human adenovirus D
cgggauagagagucuggugga

SEQ ID NO: 3921966 - RNA, 23 nt, Human adenovirus D
cgggccaugagggucuggagcuc

SEQ ID NO: 3921967 - RNA, 23 nt, Human adenovirus D
cgggccaugaugcgagccgcgcg

SEQ ID NO: 3921968 - RNA, 15 nt, Human adenovirus D
cgggccuacgagcuc

SEQ ID NO: 3921969 - RNA, 20 nt, Human adenovirus D
cgggccuacuuuuugggcac

SEQ ID NO: 3921970 - RNA, 19 nt, Human adenovirus D
cgggcggccauugcucgcu

SEQ ID NO: 3921971 - RNA, 22 nt, Human adenovirus D
cgggcgggcagggagcugcgcg

SEQ ID NO: 3921972 - RNA, 12 nt, Human adenovirus D
cgggcucuuccu

SEQ ID NO: 3921973 - RNA, 20 nt, Human adenovirus D
cgggcucuuccuccguagcc

SEQ ID NO: 3921974 - RNA, 17 nt, Human adenovirus D
cgggcuguggggcgugc

SEQ ID NO: 3921975 - RNA, 24 nt, Human adenovirus D
cgggcuucaccggcuaccuugcac

SEQ ID NO: 3921976 - RNA, 15 nt, Human adenovirus D
cggggaucagccccg

SEQ ID NO: 3921977 - RNA, 13 nt, Human adenovirus D
cggggcacaggca

SEQ ID NO: 3921978 - RNA, 23 nt, Human adenovirus D
cggggcucggugcggcugcugca

SEQ ID NO: 3921979 - RNA, 20 nt, Human adenovirus D
cggguguaaugaaacccgcc

SEQ ID NO: 3921980 - RNA, 13 nt, Human adenovirus D
cggguucuggaga

SEQ ID NO: 3921981 - RNA, 14 nt, Human adenovirus D
cgguaagcacgagc

SEQ ID NO: 3921982 - RNA, 19 nt, Human adenovirus D
cgguaccuucgagcugcaa

SEQ ID NO: 3921983 - RNA, 22 nt, Human adenovirus D
cggucaccgagccucccaggag

SEQ ID NO: 3921984 - RNA, 21 nt, Human adenovirus D
cggucgacggugagcagcuug

SEQ ID NO: 3921985 - RNA, 20 nt, Human adenovirus D
cggucgcgguggggcgguga

SEQ ID NO: 3921986 - RNA, 17 nt, Human adenovirus D
cggugaaccugagccag

SEQ ID NO: 3921987 - RNA, 22 nt, Human adenovirus D
cggugagcagcuugcugacgcc

SEQ ID NO: 3921988 - RNA, 15 nt, Human adenovirus D
cggugcccgcuccgc

SEQ ID NO: 3921989 - RNA, 16 nt, Human adenovirus D
cggugcggcugcugca

SEQ ID NO: 3921990 - RNA, 17 nt, Human adenovirus D
cggugcuuagccugggc

SEQ ID NO: 3921991 - RNA, 16 nt, Human adenovirus D
cgguggccccgaccca

SEQ ID NO: 3921992 - RNA, 19 nt, Human adenovirus D
cgguggccccgacccacga

SEQ ID NO: 3921993 - RNA, 17 nt, Human adenovirus D
cggugggucggagcccc

SEQ ID NO: 3921994 - RNA, 16 nt, Human adenovirus D
cggugguaggccccug

SEQ ID NO: 3921995 - RNA, 17 nt, Human adenovirus D
cggugguaggccccugu

SEQ ID NO: 3921996 - RNA, 16 nt, Human adenovirus D
cguacgugccugcgca

SEQ ID NO: 3921997 - RNA, 16 nt, Human adenovirus D
cguagaaauccacggc

SEQ ID NO: 3921998 - RNA, 19 nt, Human adenovirus D
cguaggagucuugcagcuu

SEQ ID NO: 3921999 - RNA, 18 nt, Human adenovirus D
cgucaccugcggcgcgga

SEQ ID NO: 3922000 - RNA, 12 nt, Human adenovirus D
cgucaggcaggc

SEQ ID NO: 3922001 - RNA, 16 nt, Human adenovirus D
cguccacgccaagaca

SEQ ID NO: 3922002 - RNA, 16 nt, Human adenovirus D
cguccagcgcggccag

SEQ ID NO: 3922003 - RNA, 21 nt, Human adenovirus D
cguccaucgugcgcgaccugg

SEQ ID NO: 3922004 - RNA, 13 nt, Human adenovirus D
cgucccagcagca

SEQ ID NO: 3922005 - RNA, 19 nt, Human adenovirus D
cgucccgacgaggccgggc

SEQ ID NO: 3922006 - RNA, 15 nt, Human adenovirus D
cguccgcaggcggga

SEQ ID NO: 3922007 - RNA, 16 nt, Human adenovirus D
cguccgucagcagcag

SEQ ID NO: 3922008 - RNA, 19 nt, Human adenovirus D
cguccuuucgcugcugccg

SEQ ID NO: 3922009 - RNA, 12 nt, Human adenovirus D
cgucgcaucaug

SEQ ID NO: 3922010 - RNA, 17 nt, Human adenovirus D
cgucggcgucgcgcgcg

SEQ ID NO: 3922011 - RNA, 20 nt, Human adenovirus D
cgucuacaaggcccugggca

SEQ ID NO: 3922012 - RNA, 15 nt, Human adenovirus D
cgucuuugccaugga

SEQ ID NO: 3922013 - RNA, 19 nt, Human adenovirus D
cgugagcgcgagccggcgg

SEQ ID NO: 3922014 - RNA, 12 nt, Human adenovirus D
cgugcacuggcu

SEQ ID NO: 3922015 - RNA, 17 nt, Human adenovirus D
cgugcgcgugcccgugc

SEQ ID NO: 3922016 - RNA, 20 nt, Human adenovirus D
cgugcgcuaccaccccagca

SEQ ID NO: 3922017 - RNA, 14 nt, Human adenovirus D
cguggcgcagcgcg

SEQ ID NO: 3922018 - RNA, 15 nt, Human adenovirus D
cguggugcugcugcc

SEQ ID NO: 3922019 - RNA, 14 nt, Human adenovirus D
cguguacugggugc

SEQ ID NO: 3922020 - RNA, 21 nt, Human adenovirus D
cgugugauuaaaaagcagcac

SEQ ID NO: 3922021 - RNA, 22 nt, Human adenovirus D
cguuacgucacuuuugcccuua

SEQ ID NO: 3922022 - RNA, 16 nt, Human adenovirus D
cguuacucggagcugg

SEQ ID NO: 3922023 - RNA, 17 nt, Human adenovirus D
cguucuacccagcaagu

SEQ ID NO: 3922024 - RNA, 16 nt, Human adenovirus D
cguugagcucacccac

SEQ ID NO: 3922025 - RNA, 20 nt, Human adenovirus D
cuaaaaaaugucuauucuca

SEQ ID NO: 3922026 - RNA, 18 nt, Human adenovirus D
cuaaagccaaacacaccu

SEQ ID NO: 3922027 - RNA, 13 nt, Human adenovirus D
cuaaagcucuucu

SEQ ID NO: 3922028 - RNA, 22 nt, Human adenovirus D
cuaagcuaguacucuacaaucc

SEQ ID NO: 3922029 - RNA, 23 nt, Human adenovirus D
cuaaucauuuaauaaagaucacu

SEQ ID NO: 3922030 - RNA, 19 nt, Human adenovirus D
cuaaugacagaggcaacag

SEQ ID NO: 3922031 - RNA, 14 nt, Human adenovirus D
cuaauuacagucac

SEQ ID NO: 3922032 - RNA, 20 nt, Human adenovirus D
cuacaaggccgucacccugc

SEQ ID NO: 3922033 - RNA, 12 nt, Human adenovirus D
cuacagccagca

SEQ ID NO: 3922034 - RNA, 13 nt, Human adenovirus D
cuacaugcccagc

SEQ ID NO: 3922035 - RNA, 14 nt, Human adenovirus D
cuacaugcccagca

SEQ ID NO: 3922036 - RNA, 18 nt, Human adenovirus D
cuacauguucgaccccuu

SEQ ID NO: 3922037 - RNA, 19 nt, Human adenovirus D
cuacccagcaagucagcaa

SEQ ID NO: 3922038 - RNA, 16 nt, Human adenovirus D
cuaccgcugcgcagca

SEQ ID NO: 3922039 - RNA, 19 nt, Human adenovirus D
cuaccugcaucgcgcggcg

SEQ ID NO: 3922040 - RNA, 12 nt, Human adenovirus D
cuaccugggagu

SEQ ID NO: 3922041 - RNA, 15 nt, Human adenovirus D
cuaccuugcacccac

SEQ ID NO: 3922042 - RNA, 18 nt, Human adenovirus D
cuacgaaucauggaggcc

SEQ ID NO: 3922043 - RNA, 16 nt, Human adenovirus D
cuacugcaucugucca

SEQ ID NO: 3922044 - RNA, 20 nt, Human adenovirus D
cuacuggcuucuacagccag

SEQ ID NO: 3922045 - RNA, 15 nt, Human adenovirus D
cuacuggucgcugcc

SEQ ID NO: 3922046 - RNA, 16 nt, Human adenovirus D
cuagacauggccagca

SEQ ID NO: 3922047 - RNA, 17 nt, Human adenovirus D
cuagacuucauggcuug

SEQ ID NO: 3922048 - RNA, 19 nt, Human adenovirus D
cuagacuugaaagcggccg

SEQ ID NO: 3922049 - RNA, 15 nt, Human adenovirus D
cuagagugaggcacu

SEQ ID NO: 3922050 - RNA, 17 nt, Human adenovirus D
cuagagugaggcacugc

SEQ ID NO: 3922051 - RNA, 20 nt, Human adenovirus D
cuagagugaggcacugcucu

SEQ ID NO: 3922052 - RNA, 14 nt, Human adenovirus D
cuaggcccagcagc

SEQ ID NO: 3922053 - RNA, 16 nt, Human adenovirus D
cuaggcccagcagcau

SEQ ID NO: 3922054 - RNA, 13 nt, Human adenovirus D
cuaggcgcagcug

SEQ ID NO: 3922055 - RNA, 14 nt, Human adenovirus D
cuaggcgcagcugc

SEQ ID NO: 3922056 - RNA, 13 nt, Human adenovirus D
cuaucauucagag

SEQ ID NO: 3922057 - RNA, 17 nt, Human adenovirus D
cuaucuaugaaagcaua

SEQ ID NO: 3922058 - RNA, 13 nt, Human adenovirus D
cucaacagcuggg

SEQ ID NO: 3922059 - RNA, 20 nt, Human adenovirus D
cucacaguaagugcagcaca

SEQ ID NO: 3922060 - RNA, 17 nt, Human adenovirus D
uuucugcagacaucaug

SEQ ID NO: 3922061 - RNA, 22 nt, Human adenovirus D
uuucuggggucagagacaucau

SEQ ID NO: 3922062 - RNA, 20 nt, Human adenovirus D
uuugcaagaaggaaguauga

SEQ ID NO: 3922063 - RNA, 20 nt, Human adenovirus D
uuuuauggcugcuggauggg

SEQ ID NO: 3922064 - RNA, 12 nt, Human adenovirus D
uuuuuccagccc

SEQ ID NO: 3922065 - RNA, 12 nt, Human adenovirus D
uuuuuccagccu

SEQ ID NO: 3922066 - RNA, 13 nt, Human adenovirus D
gugcgggggcaga

SEQ ID NO: 3922067 - RNA, 15 nt, Human adenovirus D
gugcgucgagcacag

SEQ ID NO: 3922068 - RNA, 18 nt, Human adenovirus D
gugcuagacauggccagc

SEQ ID NO: 3922069 - RNA, 13 nt, Human adenovirus D
gugcuccagccaa

SEQ ID NO: 3922070 - RNA, 21 nt, Human adenovirus D
gugcugacauccauggccagg

SEQ ID NO: 3922071 - RNA, 15 nt, Human adenovirus D
gugcugccccaggcg

SEQ ID NO: 3922072 - RNA, 13 nt, Human adenovirus D
gugcugcugccga

SEQ ID NO: 3922073 - RNA, 17 nt, Human adenovirus D
gugcugcugccgagccg

SEQ ID NO: 3922074 - RNA, 15 nt, Human adenovirus D
guggaaacagacagc

SEQ ID NO: 3922075 - RNA, 16 nt, Human adenovirus D
guggaagaggggcagc

SEQ ID NO: 3922076 - RNA, 16 nt, Human adenovirus D
guggccccggggcgga

SEQ ID NO: 3922077 - RNA, 15 nt, Human adenovirus D
guggcccugggccug

SEQ ID NO: 3922078 - RNA, 12 nt, Human adenovirus D
guggccucuucg

SEQ ID NO: 3922079 - RNA, 15 nt, Human adenovirus D
guggccuuguaccug

SEQ ID NO: 3922080 - RNA, 17 nt, Human adenovirus D
guggcgccgggccuggg

SEQ ID NO: 3922081 - RNA, 21 nt, Human adenovirus D
guggcgcucgggcaggucccg

SEQ ID NO: 3922082 - RNA, 13 nt, Human adenovirus D
guggcuguugaug

SEQ ID NO: 3922083 - RNA, 20 nt, Human adenovirus D
gugggccccuggcugggcgc

SEQ ID NO: 3922084 - RNA, 22 nt, Human adenovirus D
guggguuggcuugcaugaagga

SEQ ID NO: 3922085 - RNA, 19 nt, Human adenovirus D
guggucagcgaugagcagc

SEQ ID NO: 3922086 - RNA, 17 nt, Human adenovirus D
gugguccuggucacccu

SEQ ID NO: 3922087 - RNA, 16 nt, Human adenovirus D
guggugguggcggggc

SEQ ID NO: 3922088 - RNA, 16 nt, Human adenovirus D
guguaccgcaacgacc

SEQ ID NO: 3922089 - RNA, 13 nt, Human adenovirus D
guguccagcuggc

SEQ ID NO: 3922090 - RNA, 17 nt, Human adenovirus D
guguccgcgcucgguga

SEQ ID NO: 3922091 - RNA, 15 nt, Human adenovirus D
gugugcgucagggcg

SEQ ID NO: 3922092 - RNA, 18 nt, Human adenovirus D
gugugcuggcuggucagg

SEQ ID NO: 3922093 - RNA, 19 nt, Human adenovirus D
guguugcaugaugggaaug

SEQ ID NO: 3922094 - RNA, 23 nt, Human adenovirus D
guuauugagcccaucaagcaaga

SEQ ID NO: 3922095 - RNA, 15 nt, Human adenovirus D
guucaauggagagaa

SEQ ID NO: 3922096 - RNA, 17 nt, Human adenovirus D
guucaggagcgcagccu

SEQ ID NO: 3922097 - RNA, 19 nt, Human adenovirus D
guucauggccaacagccac

SEQ ID NO: 3922098 - RNA, 20 nt, Human adenovirus D
guuccggccccgcgggcagg

SEQ ID NO: 3922099 - RNA, 22 nt, Human adenovirus D
guuccuggugguacagcacagc

SEQ ID NO: 3922100 - RNA, 15 nt, Human adenovirus D
guucucgcuggucac

SEQ ID NO: 3922101 - RNA, 15 nt, Human adenovirus D
guucugggucaccuu

SEQ ID NO: 3922102 - RNA, 14 nt, Human adenovirus D
guucuugcaugccu

SEQ ID NO: 3922103 - RNA, 22 nt, Human adenovirus D
guugccaaagaaaauggucagg

SEQ ID NO: 3922104 - RNA, 16 nt, Human adenovirus D
guugcgcagcggcagg

SEQ ID NO: 3922105 - RNA, 21 nt, Human adenovirus D
guuggaggaagaaaugaggca

SEQ ID NO: 3922106 - RNA, 22 nt, Human adenovirus D
guuggaggaagaaaugaggcag

SEQ ID NO: 3922107 - RNA, 18 nt, Human adenovirus D
guuggcgacccaggaaug

SEQ ID NO: 3922108 - RNA, 13 nt, Human adenovirus D
guugggcagcgag

SEQ ID NO: 3922109 - RNA, 16 nt, Human adenovirus D
guugguccagauggaa

SEQ ID NO: 3922110 - RNA, 12 nt, Human adenovirus D
guugugcaggac

SEQ ID NO: 3922111 - RNA, 13 nt, Human adenovirus D
guugugcgccgcg

SEQ ID NO: 3922112 - RNA, 19 nt, Human adenovirus D
guuucuggggucagagaca

SEQ ID NO: 3922113 - RNA, 19 nt, Human adenovirus D
guuugaguagugggcgugg

SEQ ID NO: 3922114 - RNA, 22 nt, Human adenovirus D
uaaaaauauuagaugacaaaag

SEQ ID NO: 3922115 - RNA, 15 nt, Human adenovirus D
uaaaaguaaacacua

SEQ ID NO: 3922116 - RNA, 15 nt, Human adenovirus D
uaaaauucaacugca

SEQ ID NO: 3922117 - RNA, 16 nt, Human adenovirus D
uaaagaaacagaacaa

SEQ ID NO: 3922118 - RNA, 20 nt, Human adenovirus D
uaaagccaaacacaccugac

SEQ ID NO: 3922119 - RNA, 15 nt, Human adenovirus D
uaaagccacaaccag

SEQ ID NO: 3922120 - RNA, 15 nt, Human adenovirus D
uaaaggcgggugucu

SEQ ID NO: 3922121 - RNA, 20 nt, Human adenovirus D
uaaauauggccuggagcaga

SEQ ID NO: 3922122 - RNA, 13 nt, Human adenovirus D
uaagagcccagca

SEQ ID NO: 3922123 - RNA, 13 nt, Human adenovirus D
uaaggagaaggau

SEQ ID NO: 3922124 - RNA, 17 nt, Human adenovirus D
uaaguguaagagcaaga

SEQ ID NO: 3922125 - RNA, 16 nt, Human adenovirus D
uaagugugacaaucaa

SEQ ID NO: 3922126 - RNA, 16 nt, Human adenovirus D
uaauuaugcuccuggg

SEQ ID NO: 3922127 - RNA, 12 nt, Human adenovirus D
uacaaagugugg

SEQ ID NO: 3922128 - RNA, 21 nt, Human adenovirus D
uacaacaucggcuaccagggc

SEQ ID NO: 3922129 - RNA, 11 nt, Human adenovirus D
uacaacaugcu

SEQ ID NO: 3922130 - RNA, 21 nt, Human adenovirus D
uacaaccaaggcacccaccac

SEQ ID NO: 3922131 - RNA, 14 nt, Human adenovirus D
uacaacguggccca

SEQ ID NO: 3922132 - RNA, 12 nt, Human adenovirus D
uacaacuacaca

SEQ ID NO: 3922133 - RNA, 20 nt, Human adenovirus D
uacaagcgccaacagcagcg

SEQ ID NO: 3922134 - RNA, 17 nt, Human adenovirus D
uacaaggacuacaaggc

SEQ ID NO: 3922135 - RNA, 14 nt, Human adenovirus D
uacaauacucuggg

SEQ ID NO: 3922136 - RNA, 17 nt, Human adenovirus D
uacacagcuagacacca

SEQ ID NO: 3922137 - RNA, 19 nt, Human adenovirus D
uacacgguucucucagcac

SEQ ID NO: 3922138 - RNA, 17 nt, Human adenovirus D
uacagcacagcagggac

SEQ ID NO: 3922139 - RNA, 19 nt, Human adenovirus D
uacagccagcagcuccggg

SEQ ID NO: 3922140 - RNA, 15 nt, Human adenovirus D
uacagucacuagugg

SEQ ID NO: 3922141 - RNA, 20 nt, Human adenovirus D
uacauagaccacgcuacaaa

SEQ ID NO: 3922142 - RNA, 16 nt, Human adenovirus D
uacaugcccagcagca

SEQ ID NO: 3922143 - RNA, 16 nt, Human adenovirus D
uacauggacaagauau

SEQ ID NO: 3922144 - RNA, 14 nt, Human adenovirus D
uacccacugggugg

SEQ ID NO: 3922145 - RNA, 16 nt, Human adenovirus D
uacccgaccaugcaga

SEQ ID NO: 3922146 - RNA, 16 nt, Human adenovirus D
uaccucuugcagcugg

SEQ ID NO: 3922147 - RNA, 21 nt, Human adenovirus D
uacgaggcagaggcacacagc

SEQ ID NO: 3922148 - RNA, 18 nt, Human adenovirus D
uacgcguacauccagcau

SEQ ID NO: 3922149 - RNA, 19 nt, Human adenovirus D
uacggaccaccccaggcgg

SEQ ID NO: 3922150 - RNA, 23 nt, Human adenovirus D
uacggaccaccccaggcggacca

SEQ ID NO: 3922151 - RNA, 13 nt, Human adenovirus D
uacuccagucucc

SEQ ID NO: 3922152 - RNA, 22 nt, Human adenovirus D
uacucccagcucauccgcagcu

SEQ ID NO: 3922153 - RNA, 12 nt, Human adenovirus D
uacucccgcccc

SEQ ID NO: 3922154 - RNA, 20 nt, Human adenovirus D
uacuuucgcucccaccgcgc

SEQ ID NO: 3922155 - RNA, 15 nt, Human adenovirus D
uacuuugucugcugu

SEQ ID NO: 3922156 - RNA, 20 nt, Human adenovirus D
uagaagaccauaguaaagaa

SEQ ID NO: 3922157 - RNA, 15 nt, Human adenovirus D
uagaagagcccccuc

SEQ ID NO: 3922158 - RNA, 20 nt, Human adenovirus D
uagacaaagagcacagcagu

SEQ ID NO: 3922159 - RNA, 14 nt, Human adenovirus D
uagacauggccagc

SEQ ID NO: 3922160 - RNA, 16 nt, Human adenovirus D
uagcaauggaaaucac

SEQ ID NO: 3922161 - RNA, 16 nt, Human adenovirus D
uagcaccacugcaugg

SEQ ID NO: 3922162 - RNA, 16 nt, Human adenovirus D
uagcagacagggccug

SEQ ID NO: 3922163 - RNA, 14 nt, Human adenovirus D
uaggcccagcagca

SEQ ID NO: 3922164 - RNA, 13 nt, Human adenovirus D
uagggacagcagc

SEQ ID NO: 3922165 - RNA, 19 nt, Human adenovirus D
uagggccuuuccccaccua

SEQ ID NO: 3922166 - RNA, 13 nt, Human adenovirus D
uauaaaucuuaca

SEQ ID NO: 3922167 - RNA, 21 nt, Human adenovirus D
uauaaucgccagggaacugaa

SEQ ID NO: 3922168 - RNA, 12 nt, Human adenovirus D
uaucacaucuuu

SEQ ID NO: 3922169 - RNA, 15 nt, Human adenovirus D
uaucagcgcgcugcg

SEQ ID NO: 3922170 - RNA, 20 nt, Human adenovirus D
uauccagccuguacccagag

SEQ ID NO: 3922171 - RNA, 19 nt, Human adenovirus D
uauccaguaggaaccagca

SEQ ID NO: 3922172 - RNA, 18 nt, Human adenovirus D
uaugaccaugcagacucu

SEQ ID NO: 3922173 - RNA, 17 nt, Human adenovirus D
uaugagaugccccagca

SEQ ID NO: 3922174 - RNA, 13 nt, Human adenovirus D
uaugaggaucuag

SEQ ID NO: 3922175 - RNA, 11 nt, Human adenovirus D
uaugccagacg

SEQ ID NO: 3922176 - RNA, 14 nt, Human adenovirus D
uauggccuggagca

SEQ ID NO: 3922177 - RNA, 14 nt, Human adenovirus D
uauggucugcuccu

SEQ ID NO: 3922178 - RNA, 21 nt, Human adenovirus D
ucaaacagcaaagcaucuuua

SEQ ID NO: 3922179 - RNA, 16 nt, Human adenovirus D
ucaaacaggcaaagau

SEQ ID NO: 3922180 - RNA, 17 nt, Human adenovirus D
ucaacaucugugcugcc

SEQ ID NO: 3922181 - RNA, 22 nt, Human adenovirus D
ucaacccgggucucccccagca

SEQ ID NO: 3922182 - RNA, 15 nt, Human adenovirus D
ucaacuacuguggca

SEQ ID NO: 3922183 - RNA, 14 nt, Human adenovirus D
ucaacugcagaccg

SEQ ID NO: 3922184 - RNA, 17 nt, Human adenovirus D
ucaacuguuaagaccac

SEQ ID NO: 3922185 - RNA, 19 nt, Human adenovirus D
ucaacuguuaagaccacua

SEQ ID NO: 3922186 - RNA, 12 nt, Human adenovirus D
cagccugagcuu

SEQ ID NO: 3922187 - RNA, 23 nt, Human adenovirus D
cagccuugauuuuuccagcccag

SEQ ID NO: 3922188 - RNA, 20 nt, Human adenovirus D
cagccuuggauuaucucuac

SEQ ID NO: 3922189 - RNA, 15 nt, Human adenovirus D
cagcgaaagagagcu

SEQ ID NO: 3922190 - RNA, 19 nt, Human adenovirus D
cagcgacgagacuggccuc

SEQ ID NO: 3922191 - RNA, 14 nt, Human adenovirus D
cagcgagaggagcu

SEQ ID NO: 3922192 - RNA, 17 nt, Human adenovirus D
cagcgcauccugcaacu

SEQ ID NO: 3922193 - RNA, 14 nt, Human adenovirus D
cagcgccccgagga

SEQ ID NO: 3922194 - RNA, 12 nt, Human adenovirus D
cagcgcgagcgg

SEQ ID NO: 3922195 - RNA, 15 nt, Human adenovirus D
cagcgcgcugcggcu

SEQ ID NO: 3922196 - RNA, 16 nt, Human adenovirus D
cagcgcuggguggccg

SEQ ID NO: 3922197 - RNA, 18 nt, Human adenovirus D
cagcgucaaccucuacgc

SEQ ID NO: 3922198 - RNA, 12 nt, Human adenovirus D
cagcgugguggc

SEQ ID NO: 3922199 - RNA, 14 nt, Human adenovirus D
cagcuacaccuccc

SEQ ID NO: 3922200 - RNA, 18 nt, Human adenovirus D
cagcucaucgacuggugc

SEQ ID NO: 3922201 - RNA, 20 nt, Human adenovirus D
cagcuccgguugugcagccc

SEQ ID NO: 3922202 - RNA, 13 nt, Human adenovirus D
cagcugcagaagg

SEQ ID NO: 3922203 - RNA, 13 nt, Human adenovirus D
cagcugcagcgca

SEQ ID NO: 3922204 - RNA, 17 nt, Human adenovirus D
cagcugccgucgucccg

SEQ ID NO: 3922205 - RNA, 18 nt, Human adenovirus D
cagcuggccgcccugacc

SEQ ID NO: 3922206 - RNA, 18 nt, Human adenovirus D
cagcugggacuugccgca

SEQ ID NO: 3922207 - RNA, 21 nt, Human adenovirus D
caggaaaggguacuccacagc

SEQ ID NO: 3922208 - RNA, 16 nt, Human adenovirus D
caggaaauccccgggc

SEQ ID NO: 3922209 - RNA, 13 nt, Human adenovirus D
caggaccaccagg

SEQ ID NO: 3922210 - RNA, 16 nt, Human adenovirus D
caggagaggcauggca

SEQ ID NO: 3922211 - RNA, 14 nt, Human adenovirus D
caggagcaggagga

SEQ ID NO: 3922212 - RNA, 20 nt, Human adenovirus D
caggagggggccacucccag

SEQ ID NO: 3922213 - RNA, 21 nt, Human adenovirus D
caggagggggccacucccagc

SEQ ID NO: 3922214 - RNA, 22 nt, Human adenovirus D
caggagggggccacucccagcg

SEQ ID NO: 3922215 - RNA, 17 nt, Human adenovirus D
caggaugaacaggagca

SEQ ID NO: 3922216 - RNA, 21 nt, Human adenovirus D
caggcccagaacuggcagagc

SEQ ID NO: 3922217 - RNA, 16 nt, Human adenovirus D
caggccgcagcucuuc

SEQ ID NO: 3922218 - RNA, 14 nt, Human adenovirus D
caggccgugcugcu

SEQ ID NO: 3922219 - RNA, 20 nt, Human adenovirus D
caggcgaaacgccccugcaa

SEQ ID NO: 3922220 - RNA, 16 nt, Human adenovirus D
caggcgacccuggagg

SEQ ID NO: 3922221 - RNA, 17 nt, Human adenovirus D
caggcgacccuggaggu

SEQ ID NO: 3922222 - RNA, 21 nt, Human adenovirus D
caggcgccggcgcuagccagc

SEQ ID NO: 3922223 - RNA, 18 nt, Human adenovirus D
caggcgccugaguggcgg

SEQ ID NO: 3922224 - RNA, 14 nt, Human adenovirus D
caggcgggacagag

SEQ ID NO: 3922225 - RNA, 23 nt, Human adenovirus D
caggcuggccgugcucaagcgca

SEQ ID NO: 3922226 - RNA, 14 nt, Human adenovirus D
cagggaacugauaa

SEQ ID NO: 3922227 - RNA, 12 nt, Human adenovirus D
cagggagccagg

SEQ ID NO: 3922228 - RNA, 14 nt, Human adenovirus D
cagggaggcgcugc

SEQ ID NO: 3922229 - RNA, 21 nt, Human adenovirus D
cagggcacugccggugcacuc

SEQ ID NO: 3922230 - RNA, 18 nt, Human adenovirus D
cagggcgaaggugucccu

SEQ ID NO: 3922231 - RNA, 22 nt, Human adenovirus D
caggggcuugaguccgucggcc

SEQ ID NO: 3922232 - RNA, 12 nt, Human adenovirus D
cagggggguccg

SEQ ID NO: 3922233 - RNA, 18 nt, Human adenovirus D
caggguaaagccagcagc

SEQ ID NO: 3922234 - RNA, 17 nt, Human adenovirus D
cagggugccucccgccc

SEQ ID NO: 3922235 - RNA, 19 nt, Human adenovirus D
caggucacagucuggugga

SEQ ID NO: 3922236 - RNA, 20 nt, Human adenovirus D
cagguccacgcugguggcca

SEQ ID NO: 3922237 - RNA, 21 nt, Human adenovirus D
caggugacagcguuccccucc

SEQ ID NO: 3922238 - RNA, 13 nt, Human adenovirus D
caggugcugccca

SEQ ID NO: 3922239 - RNA, 13 nt, Human adenovirus D
caguaagugcagc

SEQ ID NO: 3922240 - RNA, 23 nt, Human adenovirus D
caguacuuagaagagcccccucc

SEQ ID NO: 3922241 - RNA, 17 nt, Human adenovirus D
caguaggaaccagcaca

SEQ ID NO: 3922242 - RNA, 13 nt, Human adenovirus D
caguaguccagcg

SEQ ID NO: 3922243 - RNA, 22 nt, Human adenovirus D
caguauccgcggaguccagcga

SEQ ID NO: 3922244 - RNA, 19 nt, Human adenovirus D
caguauugugggccuggga

SEQ ID NO: 3922245 - RNA, 20 nt, Human adenovirus D
caguauugugggccugggag

SEQ ID NO: 3922246 - RNA, 12 nt, Human adenovirus D
cagucacucuca

SEQ ID NO: 3922247 - RNA, 20 nt, Human adenovirus D
cagucagugaagcccugguu

SEQ ID NO: 3922248 - RNA, 19 nt, Human adenovirus D
caguccaaccuggaccggc

SEQ ID NO: 3922249 - RNA, 18 nt, Human adenovirus D
caguccaugcccaacagg

SEQ ID NO: 3922250 - RNA, 20 nt, Human adenovirus D
cagucucugccgccggggcu

SEQ ID NO: 3922251 - RNA, 16 nt, Human adenovirus D
cagucugagggccacc

SEQ ID NO: 3922252 - RNA, 19 nt, Human adenovirus D
cagugaaaacgugccugcu

SEQ ID NO: 3922253 - RNA, 22 nt, Human adenovirus D
cagugcaacuuuagccagacca

SEQ ID NO: 3922254 - RNA, 21 nt, Human adenovirus D
caguggcgagaggcgagcagc

SEQ ID NO: 3922255 - RNA, 13 nt, Human adenovirus D
caguguuugagaa

SEQ ID NO: 3922256 - RNA, 15 nt, Human adenovirus D
caguuaaugcugccu

SEQ ID NO: 3922257 - RNA, 17 nt, Human adenovirus D
caguuugggcacugggg

SEQ ID NO: 3922258 - RNA, 16 nt, Human adenovirus D
cauaaagauggaugga

SEQ ID NO: 3922259 - RNA, 18 nt, Human adenovirus D
cauaagaaucacauuaaa

SEQ ID NO: 3922260 - RNA, 21 nt, Human adenovirus D
cauaauuaugcuccuggguga

SEQ ID NO: 3922261 - RNA, 17 nt, Human adenovirus D
cauacaaagcugaaagc

SEQ ID NO: 3922262 - RNA, 17 nt, Human adenovirus D
cauacagagauucagcc

SEQ ID NO: 3922263 - RNA, 14 nt, Human adenovirus D
cauacuuauggcuc

SEQ ID NO: 3922264 - RNA, 18 nt, Human adenovirus D
cauagaccugaugaacaa

SEQ ID NO: 3922265 - RNA, 15 nt, Human adenovirus D
cauagaugggcuccg

SEQ ID NO: 3922266 - RNA, 15 nt, Human adenovirus D
cauaguaaagaaaca

SEQ ID NO: 3922267 - RNA, 13 nt, Human adenovirus D
cauaucagccagu

SEQ ID NO: 3922268 - RNA, 22 nt, Human adenovirus D
cauaucccaggggacuggaaac

SEQ ID NO: 3922269 - RNA, 19 nt, Human adenovirus D
cauaugcuacaucugcugc

SEQ ID NO: 3922270 - RNA, 20 nt, Human adenovirus D
cauaugcuacaucugcugcc

SEQ ID NO: 3922271 - RNA, 13 nt, Human adenovirus D
caucaccacaggc

SEQ ID NO: 3922272 - RNA, 22 nt, Human adenovirus D
caucauaagacauuuuaaugaa

SEQ ID NO: 3922273 - RNA, 21 nt, Human adenovirus D
cauccaacugaaguacaucca

SEQ ID NO: 3922274 - RNA, 17 nt, Human adenovirus D
cauccacaaggccguga

SEQ ID NO: 3922275 - RNA, 22 nt, Human adenovirus D
cauccacaaggccgugagcgcg

SEQ ID NO: 3922276 - RNA, 15 nt, Human adenovirus D
cauccauggccaggg

SEQ ID NO: 3922277 - RNA, 15 nt, Human adenovirus D
cauccccgcgccgcg

SEQ ID NO: 3922278 - RNA, 18 nt, Human adenovirus D
caucccggccaaggccac

SEQ ID NO: 3922279 - RNA, 13 nt, Human adenovirus D
caucuugcagagc

SEQ ID NO: 3922280 - RNA, 16 nt, Human adenovirus D
caugaaagaacauaca

SEQ ID NO: 3922281 - RNA, 16 nt, Human adenovirus D
caugacaaccucuucu

SEQ ID NO: 3922282 - RNA, 20 nt, Human adenovirus D
caugaccauagaccugauga

SEQ ID NO: 3922283 - RNA, 16 nt, Human adenovirus D
caugacccugcauggc

SEQ ID NO: 3922284 - RNA, 19 nt, Human adenovirus D
caugacccugcauggcugc

SEQ ID NO: 3922285 - RNA, 20 nt, Human adenovirus D
caugacccugcauggcugcg

SEQ ID NO: 3922286 - RNA, 15 nt, Human adenovirus D
caugagccagagcau

SEQ ID NO: 3922287 - RNA, 16 nt, Human adenovirus D
caugagucuguguccg

SEQ ID NO: 3922288 - RNA, 15 nt, Human adenovirus D
caugauccagcggcg

SEQ ID NO: 3922289 - RNA, 16 nt, Human adenovirus D
caugcaccuguggagg

SEQ ID NO: 3922290 - RNA, 15 nt, Human adenovirus D
caugcagacucugcu

SEQ ID NO: 3922291 - RNA, 20 nt, Human adenovirus D
caugccacgaacagccacga

SEQ ID NO: 3922292 - RNA, 16 nt, Human adenovirus D
caugcggggggagaug

SEQ ID NO: 3922293 - RNA, 22 nt, Human adenovirus D
cauggacgagaacccgaggagc

SEQ ID NO: 3922294 - RNA, 18 nt, Human adenovirus D
cauggacgggaaccccac

SEQ ID NO: 3922295 - RNA, 20 nt, Human adenovirus D
cauggccaacagccacauga

SEQ ID NO: 3922296 - RNA, 17 nt, Human adenovirus D
cauggccucgugcucug

SEQ ID NO: 3922297 - RNA, 21 nt, Human adenovirus D
cauggcgcaguaguccagcgu

SEQ ID NO: 3922298 - RNA, 21 nt, Human adenovirus D
caugggaggaagcaacaucac

SEQ ID NO: 3922299 - RNA, 20 nt, Human adenovirus D
cauggggcgccgcccgagcu

SEQ ID NO: 3922300 - RNA, 22 nt, Human adenovirus D
caugguagcaauggaaaucaca

SEQ ID NO: 3922301 - RNA, 21 nt, Human adenovirus D
cauggugggcgucaaccccau

SEQ ID NO: 3922302 - RNA, 21 nt, Human adenovirus D
cauguccaccugcggggcgau

SEQ ID NO: 3922303 - RNA, 17 nt, Human adenovirus D
caugugaacaaaaccca

SEQ ID NO: 3922304 - RNA, 16 nt, Human adenovirus D
caugugcgcacccuga

SEQ ID NO: 3922305 - RNA, 20 nt, Human adenovirus D
caugugugauaucacacugc

SEQ ID NO: 3922306 - RNA, 16 nt, Human adenovirus D
cauguucaccagcaag

SEQ ID NO: 3922307 - RNA, 23 nt, Human adenovirus D
cauuacuauuacugccacugcca

SEQ ID NO: 3922308 - RNA, 12 nt, Human adenovirus D
cauucaaggcca

SEQ ID NO: 3922309 - RNA, 12 nt, Human adenovirus D
cauucuggaggc

SEQ ID NO: 3922310 - RNA, 18 nt, Human adenovirus D
cauugaauggcacuggca

SEQ ID NO: 3922311 - RNA, 13 nt, Human adenovirus D
cauugucugccug

SEQ ID NO: 3922312 - RNA, 15 nt, Human adenovirus D
cauugucugccuggu

SEQ ID NO: 3922313 - RNA, 14 nt, Human adenovirus D
ccaaaaaaacacac

SEQ ID NO: 3922314 - RNA, 18 nt, Human adenovirus D
ccaaaauggcuuacaugu

SEQ ID NO: 3922315 - RNA, 16 nt, Human adenovirus D
ccaaacgccagcccaa

SEQ ID NO: 3922316 - RNA, 18 nt, Human adenovirus D
ccaaacuauugcuuccca

SEQ ID NO: 3922317 - RNA, 18 nt, Human adenovirus D
ccaaaugcgucccacccc

SEQ ID NO: 3922318 - RNA, 20 nt, Human adenovirus D
ccaagaaacgucccagcagc

SEQ ID NO: 3922319 - RNA, 21 nt, Human adenovirus D
ccaagauagcccugcgcccag

SEQ ID NO: 3922320 - RNA, 16 nt, Human adenovirus D
ccaaugcaacaugacc

SEQ ID NO: 3922321 - RNA, 23 nt, Human adenovirus D
ccacaaaaacgaagaucagcugc

SEQ ID NO: 3922322 - RNA, 19 nt, Human adenovirus D
ccacacauggcaagcugcc

SEQ ID NO: 3922323 - RNA, 18 nt, Human adenovirus D
ccacaccugugacaugca

SEQ ID NO: 3922324 - RNA, 14 nt, Human adenovirus D
ccacacggccagca

SEQ ID NO: 3922325 - RNA, 12 nt, Human adenovirus D
ccacagccagcc

SEQ ID NO: 3922326 - RNA, 19 nt, Human adenovirus D
ccacagcucgcgguugagg

SEQ ID NO: 3922327 - RNA, 14 nt, Human adenovirus D
ccacaggugcugcc

SEQ ID NO: 3922328 - RNA, 16 nt, Human adenovirus D
ccacauccaagugccc

SEQ ID NO: 3922329 - RNA, 14 nt, Human adenovirus D
ccaccaccagccca

SEQ ID NO: 3922330 - RNA, 15 nt, Human adenovirus D
ccaccaccagcccau

SEQ ID NO: 3922331 - RNA, 18 nt, Human adenovirus D
ccacccacgagcaaccca

SEQ ID NO: 3922332 - RNA, 15 nt, Human adenovirus D
ccacccagaccgugc

SEQ ID NO: 3922333 - RNA, 11 nt, Human adenovirus D
ccaccccaggc

SEQ ID NO: 3922334 - RNA, 15 nt, Human adenovirus D
ccaccgaaggcagcu

SEQ ID NO: 3922335 - RNA, 15 nt, Human adenovirus D
ccaccucgccgcgca

SEQ ID NO: 3922336 - RNA, 22 nt, Human adenovirus D
ccaccugcgcgagguugagcuc

SEQ ID NO: 3922337 - RNA, 18 nt, Human adenovirus D
ccaccuggugauggccug

SEQ ID NO: 3922338 - RNA, 22 nt, Human adenovirus D
ccacgagcgccagcuguugggg

SEQ ID NO: 3922339 - RNA, 19 nt, Human adenovirus D
ccacgcgcucgacaugacc

SEQ ID NO: 3922340 - RNA, 19 nt, Human adenovirus D
ccacgucuucaaccgcuuc

SEQ ID NO: 3922341 - RNA, 13 nt, Human adenovirus D
ccacgugaccauc

SEQ ID NO: 3922342 - RNA, 14 nt, Human adenovirus D
ccacuacucacacu

SEQ ID NO: 3922343 - RNA, 12 nt, Human adenovirus D
ccacuccgcaca

SEQ ID NO: 3922344 - RNA, 12 nt, Human adenovirus D
ccacucgcgggc

SEQ ID NO: 3922345 - RNA, 21 nt, Human adenovirus D
ccacugcaccccccgcaggca

SEQ ID NO: 3922346 - RNA, 21 nt, Human adenovirus D
ccagaaagaaguggccagugu

SEQ ID NO: 3922347 - RNA, 16 nt, Human adenovirus D
ccagaacuuccagcag

SEQ ID NO: 3922348 - RNA, 21 nt, Human adenovirus D
ccagaaggggcaccuuccagc

SEQ ID NO: 3922349 - RNA, 17 nt, Human adenovirus D
ccagaccaagcugcugu

SEQ ID NO: 3922350 - RNA, 17 nt, Human adenovirus D
ccagacccaggcgcgga

SEQ ID NO: 3922351 - RNA, 22 nt, Human adenovirus D
ccagaugaggauugggaggagg

SEQ ID NO: 3922352 - RNA, 20 nt, Human adenovirus D
ccagauguugcgcagcggca

SEQ ID NO: 3922353 - RNA, 11 nt, Human adenovirus D
ccagcagcaca

SEQ ID NO: 3922354 - RNA, 12 nt, Human adenovirus D
ccagcagcaggg

SEQ ID NO: 3922355 - RNA, 12 nt, Human adenovirus D
ccagcccagggc

SEQ ID NO: 3922356 - RNA, 21 nt, Human adenovirus D
ccagccuuuccauggccucgu

SEQ ID NO: 3922357 - RNA, 14 nt, Human adenovirus D
ccagcgcggccagc

SEQ ID NO: 3922358 - RNA, 16 nt, Human adenovirus D
ccagcgcgugcugcgc

SEQ ID NO: 3922359 - RNA, 17 nt, Human adenovirus D
ccagcgcgugcugcgcg

SEQ ID NO: 3922360 - RNA, 17 nt, Human adenovirus D
ccagcguaagcgcgcgg

SEQ ID NO: 3922361 - RNA, 21 nt, Human adenovirus D
ccagcgucauguccuuccagg

SEQ ID NO: 3922362 - RNA, 14 nt, Human adenovirus D
ccaggaauggcacg

SEQ ID NO: 3922363 - RNA, 17 nt, Human adenovirus D
ccaggaggagcucuauc

SEQ ID NO: 3922364 - RNA, 14 nt, Human adenovirus D
ccaggaggcggugc

SEQ ID NO: 3922365 - RNA, 14 nt, Human adenovirus D
ccaggcccagaacu

SEQ ID NO: 3922366 - RNA, 22 nt, Human adenovirus D
ccaggcccagaacuggcagagc

SEQ ID NO: 3922367 - RNA, 15 nt, Human adenovirus D
ccaggcccuggagca

SEQ ID NO: 3922368 - RNA, 20 nt, Human adenovirus D
ccaggccuccgagcagcgca

SEQ ID NO: 3922369 - RNA, 17 nt, Human adenovirus D
ccaggcggaccagaaac

SEQ ID NO: 3922370 - RNA, 20 nt, Human adenovirus D
ccaggcggcagagcgggcgg

SEQ ID NO: 3922371 - RNA, 17 nt, Human adenovirus D
ccagggcuuccacgugc

SEQ ID NO: 3922372 - RNA, 14 nt, Human adenovirus D
ccaggggguccacc

SEQ ID NO: 3922373 - RNA, 16 nt, Human adenovirus D
ccaggggguccaccuu

SEQ ID NO: 3922374 - RNA, 14 nt, Human adenovirus D
ccagguccacgcug

SEQ ID NO: 3922375 - RNA, 21 nt, Human adenovirus D
ccaggugagcucgggcugcuc

SEQ ID NO: 3922376 - RNA, 21 nt, Human adenovirus D
ccaguaggaaccagcacacuc

SEQ ID NO: 3922377 - RNA, 18 nt, Human adenovirus D
ccagucccuuuuccagga

SEQ ID NO: 3922378 - RNA, 19 nt, Human adenovirus D
ccaguuucaaacccuacuc

SEQ ID NO: 3922379 - RNA, 19 nt, Human adenovirus D
ccauagggagccugcgccc

SEQ ID NO: 3922380 - RNA, 19 nt, Human adenovirus D
ccauagucaucacccagca

SEQ ID NO: 3922381 - RNA, 22 nt, Human adenovirus D
ccaugcagacacuugagcuggc

SEQ ID NO: 3922382 - RNA, 21 nt, Human adenovirus D
ccauucggagcacgcccgcca

SEQ ID NO: 3922383 - RNA, 16 nt, Human adenovirus D
ccauugucaacacggc

SEQ ID NO: 3922384 - RNA, 16 nt, Human adenovirus D
cccaaaaacugcaugc

SEQ ID NO: 3922385 - RNA, 16 nt, Human adenovirus D
cccaaaaucgagcagg

SEQ ID NO: 3922386 - RNA, 18 nt, Human adenovirus D
cccaaaaucgagcaggac

SEQ ID NO: 3922387 - RNA, 15 nt, Human adenovirus D
cccacagggcacugc

SEQ ID NO: 3922388 - RNA, 20 nt, Human adenovirus D
cccacgccgagccugaagcc

SEQ ID NO: 3922389 - RNA, 16 nt, Human adenovirus D
cccacugacuuagcuc

SEQ ID NO: 3922390 - RNA, 19 nt, Human adenovirus D
cccagaacuggcagagcac

SEQ ID NO: 3922391 - RNA, 13 nt, Human adenovirus D
cccagccuccacc

SEQ ID NO: 3922392 - RNA, 14 nt, Human adenovirus D
cccagcgccgcgcu

SEQ ID NO: 3922393 - RNA, 19 nt, Human adenovirus D
cccaggaauggcacgcucu

SEQ ID NO: 3922394 - RNA, 21 nt, Human adenovirus D
cccaggacgagaccagaggca

SEQ ID NO: 3922395 - RNA, 21 nt, Human adenovirus D
cccaggcaaagcucaacccgc

SEQ ID NO: 3922396 - RNA, 15 nt, Human adenovirus D
cccaggcggugcugc

SEQ ID NO: 3922397 - RNA, 10 nt, Human adenovirus D
cccagugcuu

SEQ ID NO: 3922398 - RNA, 16 nt, Human adenovirus D
cccagugcuuccagca

SEQ ID NO: 3922399 - RNA, 15 nt, Human adenovirus D
cccauuccuggagau

SEQ ID NO: 3922400 - RNA, 14 nt, Human adenovirus D
ccccaaacgccagc

SEQ ID NO: 3922401 - RNA, 15 nt, Human adenovirus D
ccccaaacgccagcc

SEQ ID NO: 3922402 - RNA, 18 nt, Human adenovirus D
ccccaagggcgcucccaa

SEQ ID NO: 3922403 - RNA, 13 nt, Human adenovirus D
ccccacgguggcc

SEQ ID NO: 3922404 - RNA, 14 nt, Human adenovirus D
ccccagacacccac

SEQ ID NO: 3922405 - RNA, 19 nt, Human adenovirus D
ccccaggcccuggagcagc

SEQ ID NO: 3922406 - RNA, 17 nt, Human adenovirus D
ccccaggcggaccagaa

SEQ ID NO: 3922407 - RNA, 19 nt, Human adenovirus D
ccccaggcggugcugcugc

SEQ ID NO: 3922408 - RNA, 23 nt, Human adenovirus D
ccccaggcggugcugcugccgag

SEQ ID NO: 3922409 - RNA, 15 nt, Human adenovirus D
ccccagucagaccca

SEQ ID NO: 3922410 - RNA, 18 nt, Human adenovirus D
ccccauggacaacgucaa

SEQ ID NO: 3922411 - RNA, 23 nt, Human adenovirus D
ccccauggaugagcccaccgucc

SEQ ID NO: 3922412 - RNA, 18 nt, Human adenovirus D
cccccaagggcgcuccca

SEQ ID NO: 3922413 - RNA, 12 nt, Human adenovirus D
cccccagcuccu

SEQ ID NO: 3922414 - RNA, 14 nt, Human adenovirus D
cccccagcuccuga

SEQ ID NO: 3922415 - RNA, 15 nt, Human adenovirus D
cccccaggcccugga

SEQ ID NO: 3922416 - RNA, 22 nt, Human adenovirus D
ccccgagaauuucaugaccagc

SEQ ID NO: 3922417 - RNA, 18 nt, Human adenovirus D
ccccgcaaaaucaagcgg

SEQ ID NO: 3922418 - RNA, 13 nt, Human adenovirus D
ccccgcgcgcgcg

SEQ ID NO: 3922419 - RNA, 21 nt, Human adenovirus D
ccccggacgucaccugcggcg

SEQ ID NO: 3922420 - RNA, 21 nt, Human adenovirus D
ccccucaucacaucagccagg

SEQ ID NO: 3922421 - RNA, 18 nt, Human adenovirus D
ccccucaugaacacacug

SEQ ID NO: 3922422 - RNA, 11 nt, Human adenovirus D
ccccuccugcg

SEQ ID NO: 3922423 - RNA, 12 nt, Human adenovirus D
ccccuggcuccc

SEQ ID NO: 3922424 - RNA, 15 nt, Human adenovirus D
ccccuggcucccagc

SEQ ID NO: 3922425 - RNA, 13 nt, Human adenovirus D
ccccuggcugggc

SEQ ID NO: 3922426 - RNA, 17 nt, Human adenovirus D
ccccuucaaccaccacc

SEQ ID NO: 3922427 - RNA, 16 nt, Human adenovirus D
cccgaguuguccuggu

SEQ ID NO: 3922428 - RNA, 14 nt, Human adenovirus D
cccgauagccgcca

SEQ ID NO: 3922429 - RNA, 12 nt, Human adenovirus D
cccgcaggcagg

SEQ ID NO: 3922430 - RNA, 20 nt, Human adenovirus D
cccgccaaaaaaacacacac

SEQ ID NO: 3922431 - RNA, 19 nt, Human adenovirus D
cccgccauggggcgccgcc

SEQ ID NO: 3922432 - RNA, 19 nt, Human adenovirus D
cccgcccgcgugcgccgcg

SEQ ID NO: 3922433 - RNA, 13 nt, Human adenovirus D
cccgccgccaggc

SEQ ID NO: 3922434 - RNA, 14 nt, Human adenovirus D
cccgcgacccccag

SEQ ID NO: 3922435 - RNA, 15 nt, Human adenovirus D
cccgcggaugcuggc

SEQ ID NO: 3922436 - RNA, 13 nt, Human adenovirus D
cccgcgugcgccg

SEQ ID NO: 3922437 - RNA, 24 nt, Human adenovirus D
cccgcuugcuggaugcggagccgc

SEQ ID NO: 3922438 - RNA, 12 nt, Human adenovirus D
cccggacagcaa

SEQ ID NO: 3922439 - RNA, 13 nt, Human adenovirus D
cccggacagcaag

SEQ ID NO: 3922440 - RNA, 19 nt, Human adenovirus D
cccggacgucaccugcggc

SEQ ID NO: 3922441 - RNA, 16 nt, Human adenovirus D
cccgggucucccccag

SEQ ID NO: 3922442 - RNA, 14 nt, Human adenovirus D
cccguccugcgcca

SEQ ID NO: 3922443 - RNA, 15 nt, Human adenovirus D
cccguucucgcuggu

SEQ ID NO: 3922444 - RNA, 23 nt, Human adenovirus D
cccuccacuuucauaaucaggca

SEQ ID NO: 3922445 - RNA, 13 nt, Human adenovirus D
cccucccucggcu

SEQ ID NO: 3922446 - RNA, 17 nt, Human adenovirus D
cccuccgcccugagcuc

SEQ ID NO: 3922447 - RNA, 15 nt, Human adenovirus D
cccugacccagcagg

SEQ ID NO: 3922448 - RNA, 18 nt, Human adenovirus D
cccugcaagugcacagac

SEQ ID NO: 3922449 - RNA, 19 nt, Human adenovirus D
cccugcaagugcacagacc

SEQ ID NO: 3922450 - RNA, 15 nt, Human adenovirus D
cccugcauggcugcg

SEQ ID NO: 3922451 - RNA, 15 nt, Human adenovirus D
cccugcucaccugca

SEQ ID NO: 3922452 - RNA, 22 nt, Human adenovirus D
cccuggagacgggcugcuucug

SEQ ID NO: 3922453 - RNA, 19 nt, Human adenovirus D
cccuggccgaccggagcga

SEQ ID NO: 3922454 - RNA, 17 nt, Human adenovirus D
cccuggcucccagccuc

SEQ ID NO: 3922455 - RNA, 22 nt, Human adenovirus D
cccugggcauagucgcgccgcg

SEQ ID NO: 3922456 - RNA, 22 nt, Human adenovirus D
cccuggugauacgaggcagagg

SEQ ID NO: 3922457 - RNA, 23 nt, Human adenovirus D
ccgaccuugcaaaagcgccagga

SEQ ID NO: 3922458 - RNA, 23 nt, Human adenovirus D
ccgacgauguagaguuccaugaa

SEQ ID NO: 3922459 - RNA, 14 nt, Human adenovirus D
ccgagaccgugagc

SEQ ID NO: 3922460 - RNA, 15 nt, Human adenovirus D
ccgagaccugcgcaa

SEQ ID NO: 3922461 - RNA, 21 nt, Human adenovirus D
ccgagcuccgcgaacagcagc

SEQ ID NO: 3922462 - RNA, 19 nt, Human adenovirus D
ccgagggucgcuggcugcu

SEQ ID NO: 3922463 - RNA, 20 nt, Human adenovirus D
ccgaguucagcuccaguggg

SEQ ID NO: 3922464 - RNA, 21 nt, Human adenovirus D
ccgcaccgccacccgccgccg

SEQ ID NO: 3922465 - RNA, 22 nt, Human adenovirus D
ccgcagcuacaccucccucacc

SEQ ID NO: 3922466 - RNA, 22 nt, Human adenovirus D
ccgcaggaguccaccgcuccgc

SEQ ID NO: 3922467 - RNA, 20 nt, Human adenovirus D
ccgcaggcgcccagccagca

SEQ ID NO: 3922468 - RNA, 22 nt, Human adenovirus D
ccgcauccacaaggccgugagc

SEQ ID NO: 3922469 - RNA, 22 nt, Human adenovirus D
ccgccaucgaacacgccaccgc

SEQ ID NO: 3922470 - RNA, 15 nt, Human adenovirus D
ccgcccgacacugca

SEQ ID NO: 3922471 - RNA, 20 nt, Human adenovirus D
ccgccgaggcuagcacgcag

SEQ ID NO: 3922472 - RNA, 13 nt, Human adenovirus D
ccgccgcaccgcc

SEQ ID NO: 3922473 - RNA, 15 nt, Human adenovirus D
ccgcgacccccaggc

SEQ ID NO: 3922474 - RNA, 13 nt, Human adenovirus D
ccgcgaggccaua

SEQ ID NO: 3922475 - RNA, 16 nt, Human adenovirus D
ccgcgccagacgcacg

SEQ ID NO: 3922476 - RNA, 19 nt, Human adenovirus D
ccgcgccgacgcgcuccuc

SEQ ID NO: 3922477 - RNA, 20 nt, Human adenovirus D
ccgcgcgccgcgccgccacu

SEQ ID NO: 3922478 - RNA, 15 nt, Human adenovirus D
ccgcgcgcuggggca

SEQ ID NO: 3922479 - RNA, 18 nt, Human adenovirus D
ccgcguaagcaggagcag

SEQ ID NO: 3922480 - RNA, 21 nt, Human adenovirus D
ccgcguccccgcccgccgcca

SEQ ID NO: 3922481 - RNA, 14 nt, Human adenovirus D
ccgcgugcagcugc

SEQ ID NO: 3922482 - RNA, 17 nt, Human adenovirus D
ccgcucaucggccagac

SEQ ID NO: 3922483 - RNA, 22 nt, Human adenovirus D
ccgcuccaccgaaggcagcucc

SEQ ID NO: 3922484 - RNA, 21 nt, Human adenovirus D
ccgcucgcucguucugcccac

SEQ ID NO: 3922485 - RNA, 15 nt, Human adenovirus D
ccgcugcgcagcagu

SEQ ID NO: 3922486 - RNA, 16 nt, Human adenovirus D
ccgcugucucagccuc

SEQ ID NO: 3922487 - RNA, 23 nt, Human adenovirus D
ccgcugugcugguggaaacagac

SEQ ID NO: 3922488 - RNA, 21 nt, Human adenovirus D
ccggaguaucauugaugcaug

SEQ ID NO: 3922489 - RNA, 12 nt, Human adenovirus D
ccggcacggcgg

SEQ ID NO: 3922490 - RNA, 15 nt, Human adenovirus D
ccggcacggcggugg

SEQ ID NO: 3922491 - RNA, 20 nt, Human adenovirus D
ccggccgcgcuugcugggcg

SEQ ID NO: 3922492 - RNA, 20 nt, Human adenovirus D
ccggcgcacgucugacugcc

SEQ ID NO: 3922493 - RNA, 24 nt, Human adenovirus D
ccggcgcacgucugacugccgccg

SEQ ID NO: 3922494 - RNA, 22 nt, Human adenovirus D
ccggcgcuagccagccacagcc

SEQ ID NO: 3922495 - RNA, 18 nt, Human adenovirus D
ccggcggauagcgcgccg

SEQ ID NO: 3922496 - RNA, 20 nt, Human adenovirus D
ccggcugcucacgccgaacg

SEQ ID NO: 3922497 - RNA, 12 nt, Human adenovirus D
ccgggccugggc

SEQ ID NO: 3922498 - RNA, 23 nt, Human adenovirus D
ccgggcucugugaacagcggcag

SEQ ID NO: 3922499 - RNA, 17 nt, Human adenovirus D
ccggggaggcaccaccu

SEQ ID NO: 3922500 - RNA, 16 nt, Human adenovirus D
ccgggucucccccagc

SEQ ID NO: 3922501 - RNA, 15 nt, Human adenovirus D
ccgggucuggugcag

SEQ ID NO: 3922502 - RNA, 17 nt, Human adenovirus D
ccgggucuggugcaguu

SEQ ID NO: 3922503 - RNA, 14 nt, Human adenovirus D
ccggucgacgguga

SEQ ID NO: 3922504 - RNA, 19 nt, Human adenovirus D
ccggucgacggugagcagc

SEQ ID NO: 3922505 - RNA, 18 nt, Human adenovirus D
ccggugagacgcgcgcag

SEQ ID NO: 3922506 - RNA, 14 nt, Human adenovirus D
ccgucacccagaaa

SEQ ID NO: 3922507 - RNA, 11 nt, Human adenovirus D
ccguccucuga

SEQ ID NO: 3922508 - RNA, 14 nt, Human adenovirus D
ccgucgccacgguc

SEQ ID NO: 3922509 - RNA, 13 nt, Human adenovirus D
ccgucgccgcacc

SEQ ID NO: 3922510 - RNA, 16 nt, Human adenovirus D
ccgucggaagaggagu

SEQ ID NO: 3922511 - RNA, 18 nt, Human adenovirus D
ccgucuacucccagcuca

SEQ ID NO: 3922512 - RNA, 13 nt, Human adenovirus D
ccgugcgcaccac

SEQ ID NO: 3922513 - RNA, 15 nt, Human adenovirus D
ccgugcgcaccaccg

SEQ ID NO: 3922514 - RNA, 12 nt, Human adenovirus D
ccgugcgcaccc

SEQ ID NO: 3922515 - RNA, 17 nt, Human adenovirus D
ccgugcgcuaccacccc

SEQ ID NO: 3922516 - RNA, 24 nt, Human adenovirus D
ccgugugauuaaaaagcagcacag

SEQ ID NO: 3922517 - RNA, 17 nt, Human adenovirus D
ccucaaugucagcugca

SEQ ID NO: 3922518 - RNA, 18 nt, Human adenovirus D
ccucacaguccaggucac

SEQ ID NO: 3922519 - RNA, 11 nt, Human adenovirus D
ccucagccacu

SEQ ID NO: 3922520 - RNA, 21 nt, Human adenovirus D
ccucaucacaucagccaggac

SEQ ID NO: 3922521 - RNA, 23 nt, Human adenovirus D
ccucaugaacacacugcccauau

SEQ ID NO: 3922522 - RNA, 20 nt, Human adenovirus D
ccuccgggacgcccuggccg

SEQ ID NO: 3922523 - RNA, 15 nt, Human adenovirus D
ccuccgucggaagag

SEQ ID NO: 3922524 - RNA, 16 nt, Human adenovirus D
ccuccgucggaagagg

SEQ ID NO: 3922525 - RNA, 22 nt, Human adenovirus D
ccucgaaucaggcuggagccgc

SEQ ID NO: 3922526 - RNA, 21 nt, Human adenovirus D
ccucgagcuacaugcccagca

SEQ ID NO: 3922527 - RNA, 20 nt, Human adenovirus D
ccucgaugaugccgcagugg

SEQ ID NO: 3922528 - RNA, 20 nt, Human adenovirus D
ccucgccgucuacucccagc

SEQ ID NO: 3922529 - RNA, 14 nt, Human adenovirus D
ccucgcgcaacugg

SEQ ID NO: 3922530 - RNA, 15 nt, Human adenovirus D
ccucggaccuggccg

SEQ ID NO: 3922531 - RNA, 14 nt, Human adenovirus D
ccucguucauccag

SEQ ID NO: 3922532 - RNA, 16 nt, Human adenovirus D
ccucucgugcuccggc

SEQ ID NO: 3922533 - RNA, 17 nt, Human adenovirus D
ccucuugcagcuggcca

SEQ ID NO: 3922534 - RNA, 17 nt, Human adenovirus D
ccugacacaaaacuaau

SEQ ID NO: 3922535 - RNA, 18 nt, Human adenovirus D
ccugacgacccgcaaccc

SEQ ID NO: 3922536 - RNA, 13 nt, Human adenovirus D
ccugagcccgggu

SEQ ID NO: 3922537 - RNA, 18 nt, Human adenovirus D
ccugagccgccagcuggc

SEQ ID NO: 3922538 - RNA, 20 nt, Human adenovirus D
ccugagcgagacccagguca

SEQ ID NO: 3922539 - RNA, 15 nt, Human adenovirus D
ccugaucucugccau

SEQ ID NO: 3922540 - RNA, 19 nt, Human adenovirus D
ccugaugaacaacgccauc

SEQ ID NO: 3922541 - RNA, 14 nt, Human adenovirus D
ccugcaagaggaga

SEQ ID NO: 3922542 - RNA, 15 nt, Human adenovirus D
aacgccaggcuggcc

SEQ ID NO: 3922543 - RNA, 16 nt, Human adenovirus D
aacgcccugcuggagc

SEQ ID NO: 3922544 - RNA, 19 nt, Human adenovirus D
aacggcugcauccacugcu

SEQ ID NO: 3922545 - RNA, 22 nt, Human adenovirus D
aacggcugcauccacugcuccu

SEQ ID NO: 3922546 - RNA, 23 nt, Human adenovirus D
aacuacucggugcuuagccuggg

SEQ ID NO: 3922547 - RNA, 21 nt, Human adenovirus D
aacuacuugcaaguggggcgg

SEQ ID NO: 3922548 - RNA, 23 nt, Human adenovirus D
aacuuccugaccacgguggugca

SEQ ID NO: 3922549 - RNA, 14 nt, Human adenovirus D
aagaacauccaugu

SEQ ID NO: 3922550 - RNA, 17 nt, Human adenovirus D
aagaacgagggccuggg

SEQ ID NO: 3922551 - RNA, 15 nt, Human adenovirus D
aagaagacuauaaag

SEQ ID NO: 3922552 - RNA, 13 nt, Human adenovirus D
aagaaguggccag

SEQ ID NO: 3922553 - RNA, 16 nt, Human adenovirus D
aagaauccacagauca

SEQ ID NO: 3922554 - RNA, 23 nt, Human adenovirus D
aagaccauucugcacaccaacau

SEQ ID NO: 3922555 - RNA, 16 nt, Human adenovirus D
aagacgaaugggaaga

SEQ ID NO: 3922556 - RNA, 17 nt, Human adenovirus D
aagacgcaggccaggag

SEQ ID NO: 3922557 - RNA, 16 nt, Human adenovirus D
aagacguuucuggggu

SEQ ID NO: 3922558 - RNA, 21 nt, Human adenovirus D
aagaggcuccggguggaagau

SEQ ID NO: 3922559 - RNA, 15 nt, Human adenovirus D
aagagggagaggagc

SEQ ID NO: 3922560 - RNA, 23 nt, Human adenovirus D
aagauacagaguaaaaguaaaca

SEQ ID NO: 3922561 - RNA, 17 nt, Human adenovirus D
aagcaguucacuagccu

SEQ ID NO: 3922562 - RNA, 17 nt, Human adenovirus D
aagccucugacggcgca

SEQ ID NO: 3922563 - RNA, 21 nt, Human adenovirus D
aagccuucuauggaggcagag

SEQ ID NO: 3922564 - RNA, 16 nt, Human adenovirus D
aagcgggccucacagu

SEQ ID NO: 3922565 - RNA, 19 nt, Human adenovirus D
aagcgggccucacagucca

SEQ ID NO: 3922566 - RNA, 22 nt, Human adenovirus D
aagcggucgcgcgaagaggagc

SEQ ID NO: 3922567 - RNA, 13 nt, Human adenovirus D
aagcucccacagu

SEQ ID NO: 3922568 - RNA, 13 nt, Human adenovirus D
aagcuggccugcg

SEQ ID NO: 3922569 - RNA, 15 nt, Human adenovirus D
aaggcgcgcccaccc

SEQ ID NO: 3922570 - RNA, 16 nt, Human adenovirus D
aagggcaucuucugcc

SEQ ID NO: 3922571 - RNA, 20 nt, Human adenovirus D
aaggugguggacggccuggc

SEQ ID NO: 3922572 - RNA, 19 nt, Human adenovirus D
aaguacauagugaccaaga

SEQ ID NO: 3922573 - RNA, 22 nt, Human adenovirus D
aagucacaguuauaccaccucc

SEQ ID NO: 3922574 - RNA, 19 nt, Human adenovirus D
aaguguggaagucaaauau

SEQ ID NO: 3922575 - RNA, 23 nt, Human adenovirus D
aauaaaaaacuugagcuuguuua

SEQ ID NO: 3922576 - RNA, 12 nt, Human adenovirus D
aauaagucacua

SEQ ID NO: 3922577 - RNA, 14 nt, Human adenovirus D
aaucagccccuucc

SEQ ID NO: 3922578 - RNA, 13 nt, Human adenovirus D
aaucgcggcggcc

SEQ ID NO: 3922579 - RNA, 15 nt, Human adenovirus D
aaucgcggcggccau

SEQ ID NO: 3922580 - RNA, 11 nt, Human adenovirus D
aaucugcauga

SEQ ID NO: 3922581 - RNA, 18 nt, Human adenovirus D
aaugcaggauccagcgcu

SEQ ID NO: 3922582 - RNA, 14 nt, Human adenovirus D
aauggcgugcugga

SEQ ID NO: 3922583 - RNA, 15 nt, Human adenovirus D
aauggcgugcuggag

SEQ ID NO: 3922584 - RNA, 14 nt, Human adenovirus D
aauuacagucacua

SEQ ID NO: 3922585 - RNA, 20 nt, Human adenovirus D
aauuuuuguuguacucugug

SEQ ID NO: 3922586 - RNA, 13 nt, Human adenovirus D
acaaagcugaaag

SEQ ID NO: 3922587 - RNA, 13 nt, Human adenovirus D
acaacagccgcag

SEQ ID NO: 3922588 - RNA, 19 nt, Human adenovirus D
acaaccagauccucugccg

SEQ ID NO: 3922589 - RNA, 20 nt, Human adenovirus D
acaacuacacagucaacugu

SEQ ID NO: 3922590 - RNA, 19 nt, Human adenovirus D
acaagcgccaacagcagcg

SEQ ID NO: 3922591 - RNA, 13 nt, Human adenovirus D
acaagcuggccug

SEQ ID NO: 3922592 - RNA, 12 nt, Human adenovirus D
acaaggcgcgcu

SEQ ID NO: 3922593 - RNA, 18 nt, Human adenovirus D
acaauaaaagaccaauaa

SEQ ID NO: 3922594 - RNA, 16 nt, Human adenovirus D
acaaucagccccuucc

SEQ ID NO: 3922595 - RNA, 21 nt, Human adenovirus D
acaaucuggcgguaccagggg

SEQ ID NO: 3922596 - RNA, 20 nt, Human adenovirus D
acacgggguugcagcacugg

SEQ ID NO: 3922597 - RNA, 21 nt, Human adenovirus D
acacugcagggagccagggga

SEQ ID NO: 3922598 - RNA, 13 nt, Human adenovirus D
acagagagccgcc

SEQ ID NO: 3922599 - RNA, 22 nt, Human adenovirus D
acagauuugaauugcaaauuga

SEQ ID NO: 3922600 - RNA, 16 nt, Human adenovirus D
acagcauauaccccuc

SEQ ID NO: 3922601 - RNA, 13 nt, Human adenovirus D
acagccagcagcu

SEQ ID NO: 3922602 - RNA, 14 nt, Human adenovirus D
acagccagcagcuc

SEQ ID NO: 3922603 - RNA, 17 nt, Human adenovirus D
acagcgccacgaccggc

SEQ ID NO: 3922604 - RNA, 14 nt, Human adenovirus D
acagcgugguggcg

SEQ ID NO: 3922605 - RNA, 16 nt, Human adenovirus D
acagcguuccccuccg

SEQ ID NO: 3922606 - RNA, 19 nt, Human adenovirus D
acagcuagacaccacagug

SEQ ID NO: 3922607 - RNA, 20 nt, Human adenovirus D
acagcucgcgguugagggcg

SEQ ID NO: 3922608 - RNA, 20 nt, Human adenovirus D
acaguaaguuccugucuucu

SEQ ID NO: 3922609 - RNA, 21 nt, Human adenovirus D
acaguccacccagaccgugca

SEQ ID NO: 3922610 - RNA, 21 nt, Human adenovirus D
acaguuauaccaccuccuccu

SEQ ID NO: 3922611 - RNA, 14 nt, Human adenovirus D
acauagaccacgcu

SEQ ID NO: 3922612 - RNA, 14 nt, Human adenovirus D
acauauuggaacuu

SEQ ID NO: 3922613 - RNA, 17 nt, Human adenovirus D
acaucaauuuugcgucc

SEQ ID NO: 3922614 - RNA, 15 nt, Human adenovirus D
acauccuggaccagg

SEQ ID NO: 3922615 - RNA, 16 nt, Human adenovirus D
acaucugugcugccuu

SEQ ID NO: 3922616 - RNA, 11 nt, Human adenovirus D
acaugacaugg

SEQ ID NO: 3922617 - RNA, 23 nt, Human adenovirus D
acaugcagcugccgucgucccgg

SEQ ID NO: 3922618 - RNA, 17 nt, Human adenovirus D
acaugcucuaccccauc

SEQ ID NO: 3922619 - RNA, 17 nt, Human adenovirus D
acauggaaccuagcaug

SEQ ID NO: 3922620 - RNA, 18 nt, Human adenovirus D
acauggcaagcugccaug

SEQ ID NO: 3922621 - RNA, 23 nt, Human adenovirus D
acaugggcaugagcccgucccgg

SEQ ID NO: 3922622 - RNA, 12 nt, Human adenovirus D
acauguggagcu

SEQ ID NO: 3922623 - RNA, 22 nt, Human adenovirus D
acauuccugcaccauccccagg

SEQ ID NO: 3922624 - RNA, 11 nt, Human adenovirus D
accaaccagac

SEQ ID NO: 3922625 - RNA, 19 nt, Human adenovirus D
accaacuggucuccugccu

SEQ ID NO: 3922626 - RNA, 17 nt, Human adenovirus D
accaaguccaggguagc

SEQ ID NO: 3922627 - RNA, 13 nt, Human adenovirus D
accacaccuguga

SEQ ID NO: 3922628 - RNA, 15 nt, Human adenovirus D
accacaccuucaaga

SEQ ID NO: 3922629 - RNA, 15 nt, Human adenovirus D
accaccccagcaucc

SEQ ID NO: 3922630 - RNA, 14 nt, Human adenovirus D
accacuggccccgu

SEQ ID NO: 3922631 - RNA, 14 nt, Human adenovirus D
accagaaagacuaa

SEQ ID NO: 3922632 - RNA, 18 nt, Human adenovirus D
accagaacuuccagcaga

SEQ ID NO: 3922633 - RNA, 16 nt, Human adenovirus D
accagacccaggcgcg

SEQ ID NO: 3922634 - RNA, 22 nt, Human adenovirus D
accagauccucugccguccgcc

SEQ ID NO: 3922635 - RNA, 20 nt, Human adenovirus D
accagaugcggcaguauauc

SEQ ID NO: 3922636 - RNA, 13 nt, Human adenovirus D
accaggaugcagc

SEQ ID NO: 3922637 - RNA, 16 nt, Human adenovirus D
accaggaugcagccag

SEQ ID NO: 3922638 - RNA, 23 nt, Human adenovirus D
accaugaaggggcucuugcugau

SEQ ID NO: 3922639 - RNA, 20 nt, Human adenovirus D
acccacgugguauacaagcc

SEQ ID NO: 3922640 - RNA, 16 nt, Human adenovirus D
acccacucuauuuuca

SEQ ID NO: 3922641 - RNA, 17 nt, Human adenovirus D
acccagagcuuagcaag

SEQ ID NO: 3922642 - RNA, 20 nt, Human adenovirus D
accccgaugacggguugcag

SEQ ID NO: 3922643 - RNA, 22 nt, Human adenovirus D
accccgccauaagggcggcgcu

SEQ ID NO: 3922644 - RNA, 20 nt, Human adenovirus D
accccuuacauguggagcua

SEQ ID NO: 3922645 - RNA, 13 nt, Human adenovirus D
acccgaggagcgg

SEQ ID NO: 3922646 - RNA, 21 nt, Human adenovirus D
acccgauaucgcgcauccugc

SEQ ID NO: 3922647 - RNA, 14 nt, Human adenovirus D
acccgccucuccuu

SEQ ID NO: 3922648 - RNA, 18 nt, Human adenovirus D
acccgcggccgcccacgg

SEQ ID NO: 3922649 - RNA, 18 nt, Human adenovirus D
acccggacguggugcugc

SEQ ID NO: 3922650 - RNA, 22 nt, Human adenovirus D
acccggacguggugcugcugcc

SEQ ID NO: 3922651 - RNA, 18 nt, Human adenovirus D
acccggcccguggucagc

SEQ ID NO: 3922652 - RNA, 21 nt, Human adenovirus D
acccgguucgcggacggccgc

SEQ ID NO: 3922653 - RNA, 13 nt, Human adenovirus D
acccguccuccuc

SEQ ID NO: 3922654 - RNA, 19 nt, Human adenovirus D
acccuaaucaauguaacua

SEQ ID NO: 3922655 - RNA, 22 nt, Human adenovirus D
acccucagaagaagaccacccg

SEQ ID NO: 3922656 - RNA, 14 nt, Human adenovirus D
acccugugaccaag

SEQ ID NO: 3922657 - RNA, 14 nt, Human adenovirus D
accgacgcugggcu

SEQ ID NO: 3922658 - RNA, 22 nt, Human adenovirus D
accgcagcggggaggagcccga

SEQ ID NO: 3922659 - RNA, 12 nt, Human adenovirus D
accgccuccccg

SEQ ID NO: 3922660 - RNA, 20 nt, Human adenovirus D
accgccuccccgcagaaauc

SEQ ID NO: 3922661 - RNA, 13 nt, Human adenovirus D
accgccuggggca

SEQ ID NO: 3922662 - RNA, 17 nt, Human adenovirus D
accgcugucucagccuc

SEQ ID NO: 3922663 - RNA, 14 nt, Human adenovirus D
accggaggcuggcu

SEQ ID NO: 3922664 - RNA, 18 nt, Human adenovirus D
accguagagggcaccacc

SEQ ID NO: 3922665 - RNA, 17 nt, Human adenovirus D
accgucaccuucacagc

SEQ ID NO: 3922666 - RNA, 14 nt, Human adenovirus D
accucaucgccacc

SEQ ID NO: 3922667 - RNA, 15 nt, Human adenovirus D
accucccucacccac

SEQ ID NO: 3922668 - RNA, 13 nt, Human adenovirus D
accuccugggcau

SEQ ID NO: 3922669 - RNA, 17 nt, Human adenovirus D
accucgguacccuccuc

SEQ ID NO: 3922670 - RNA, 17 nt, Human adenovirus D
accucuacgccaccuuc

SEQ ID NO: 3922671 - RNA, 21 nt, Human adenovirus D
accugaacgacucgcugcugc

SEQ ID NO: 3922672 - RNA, 23 nt, Human adenovirus D
accugaacgacucgcugcugcag

SEQ ID NO: 3922673 - RNA, 18 nt, Human adenovirus D
accugaaggagcuggaca

SEQ ID NO: 3922674 - RNA, 22 nt, Human adenovirus D
accugcgcaaggucgaggagac

SEQ ID NO: 3922675 - RNA, 14 nt, Human adenovirus D
accugcuacauguu

SEQ ID NO: 3922676 - RNA, 17 nt, Human adenovirus D
accuggugauggccugu

SEQ ID NO: 3922677 - RNA, 21 nt, Human adenovirus D
accuucaagaaagucuccauc

SEQ ID NO: 3922678 - RNA, 13 nt, Human adenovirus D
accuuccugcagc

SEQ ID NO: 3922679 - RNA, 16 nt, Human adenovirus D
accuuccugcagcuca

SEQ ID NO: 3922680 - RNA, 21 nt, Human adenovirus D
acgacauccuggaccaggcgg

SEQ ID NO: 3922681 - RNA, 16 nt, Human adenovirus D
acgacccgcaaccccg

SEQ ID NO: 3922682 - RNA, 23 nt, Human adenovirus D
acgaccucgccgucuacucccag

SEQ ID NO: 3922683 - RNA, 12 nt, Human adenovirus D
acgaccugggcg

SEQ ID NO: 3922684 - RNA, 14 nt, Human adenovirus D
acgacucgcugcug

SEQ ID NO: 3922685 - RNA, 15 nt, Human adenovirus D
acgagcggcagggcu

SEQ ID NO: 3922686 - RNA, 14 nt, Human adenovirus D
acgaggcagaggca

SEQ ID NO: 3922687 - RNA, 19 nt, Human adenovirus D
acgcacgagaaggugcugg

SEQ ID NO: 3922688 - RNA, 13 nt, Human adenovirus D
acgcacgggccgc

SEQ ID NO: 3922689 - RNA, 22 nt, Human adenovirus D
acgccggcucaucugcagggcg

SEQ ID NO: 3922690 - RNA, 23 nt, Human adenovirus D
acgccguucuccgccggaaacgc

SEQ ID NO: 3922691 - RNA, 19 nt, Human adenovirus D
acgccucggaguaccugag

SEQ ID NO: 3922692 - RNA, 14 nt, Human adenovirus D
acgccuuccuggcg

SEQ ID NO: 3922693 - RNA, 16 nt, Human adenovirus D
acgcgcacacuuugga

SEQ ID NO: 3922694 - RNA, 19 nt, Human adenovirus D
acgcugaaaggcgggcugc

SEQ ID NO: 3922695 - RNA, 22 nt, Human adenovirus D
acgcugagcgacgaccugggcg

SEQ ID NO: 3922696 - RNA, 19 nt, Human adenovirus D
acggacuugauuggccugu

SEQ ID NO: 3922697 - RNA, 17 nt, Human adenovirus D
acggcaucuuccugggg

SEQ ID NO: 3922698 - RNA, 19 nt, Human adenovirus D
acggcaucuuccuggggca

SEQ ID NO: 3922699 - RNA, 19 nt, Human adenovirus D
acggccuuguagggacagc

SEQ ID NO: 3922700 - RNA, 20 nt, Human adenovirus D
acggcugcauccacugcucc

SEQ ID NO: 3922701 - RNA, 16 nt, Human adenovirus D
acgggauagagagucu

SEQ ID NO: 3922702 - RNA, 19 nt, Human adenovirus D
acggggugguggacaucgc

SEQ ID NO: 3922703 - RNA, 21 nt, Human adenovirus D
acggucugcaggccgggcugc

SEQ ID NO: 3922704 - RNA, 16 nt, Human adenovirus D
acgguggugcagaaca

SEQ ID NO: 3922705 - RNA, 12 nt, Human adenovirus D
acuaaucauuua

SEQ ID NO: 3922706 - RNA, 14 nt, Human adenovirus D
acuaaucauuuaau

SEQ ID NO: 3922707 - RNA, 16 nt, Human adenovirus D
acuaaugacaaacaaa

SEQ ID NO: 3922708 - RNA, 20 nt, Human adenovirus D
acuacaaggacuacaaggcc

SEQ ID NO: 3922709 - RNA, 10 nt, Human adenovirus D
acuacagccg

SEQ ID NO: 3922710 - RNA, 23 nt, Human adenovirus D
acuacucggugcuuagccugggc

SEQ ID NO: 3922711 - RNA, 16 nt, Human adenovirus D
acuacugaacagacag

SEQ ID NO: 3922712 - RNA, 21 nt, Human adenovirus D
acuacuuccgcgugacgcacu

SEQ ID NO: 3922713 - RNA, 14 nt, Human adenovirus D
acuaggaccccagg

SEQ ID NO: 3922714 - RNA, 18 nt, Human adenovirus D
acuaggaccccagggacc

SEQ ID NO: 3922715 - RNA, 16 nt, Human adenovirus D
acuauaaagucacagu

SEQ ID NO: 3922716 - RNA, 17 nt, Human adenovirus D
acuaucuaugaaagcau

SEQ ID NO: 3922717 - RNA, 15 nt, Human adenovirus D
acuauugcuucccau

SEQ ID NO: 3922718 - RNA, 11 nt, Human adenovirus D
acuccacagcc

SEQ ID NO: 3922719 - RNA, 19 nt, Human adenovirus D
acucccagcgccgcgcugg

SEQ ID NO: 3922720 - RNA, 20 nt, Human adenovirus D
acuccgcgaccuccucccca

SEQ ID NO: 3922721 - RNA, 22 nt, Human adenovirus D
acuccuacaaguacacgccggc

SEQ ID NO: 3922722 - RNA, 18 nt, Human adenovirus D
acuccuacaauacucugg

SEQ ID NO: 3922723 - RNA, 21 nt, Human adenovirus D
acuccucggucagcuggcccg

SEQ ID NO: 3922724 - RNA, 21 nt, Human adenovirus D
acuccuucuuccgcaacuucc

SEQ ID NO: 3922725 - RNA, 21 nt, Human adenovirus D
acucgacccugaagggcgagg

SEQ ID NO: 3922726 - RNA, 14 nt, Human adenovirus D
acucgcggcugcug

SEQ ID NO: 3922727 - RNA, 12 nt, Human adenovirus D
acucgcugcugc

SEQ ID NO: 3922728 - RNA, 19 nt, Human adenovirus D
acucggugcuuagccuggg

SEQ ID NO: 3922729 - RNA, 22 nt, Human adenovirus D
acucuccugaaccacacggcca

SEQ ID NO: 3922730 - RNA, 18 nt, Human adenovirus D
acucugcucauacugcua

SEQ ID NO: 3922731 - RNA, 14 nt, Human adenovirus D
acucuggccguggg

SEQ ID NO: 3922732 - RNA, 15 nt, Human adenovirus D
acucuuaaagacuaa

SEQ ID NO: 3922733 - RNA, 16 nt, Human adenovirus D
acucuuaaaucauuua

SEQ ID NO: 3922734 - RNA, 18 nt, Human adenovirus D
acucuuaaaucauuuaaa

SEQ ID NO: 3922735 - RNA, 15 nt, Human adenovirus D
acugaccaccaccug

SEQ ID NO: 3922736 - RNA, 15 nt, Human adenovirus D
acugccgcugcaacc

SEQ ID NO: 3922737 - RNA, 14 nt, Human adenovirus D
acugcuaccucuug

SEQ ID NO: 3922738 - RNA, 22 nt, Human adenovirus D
acugcuaucaggagaaaauuga

SEQ ID NO: 3922739 - RNA, 18 nt, Human adenovirus D
acugcuggcccugcuggc

SEQ ID NO: 3922740 - RNA, 22 nt, Human adenovirus D
acuggcuucuacagccagcagc

SEQ ID NO: 3922741 - RNA, 13 nt, Human adenovirus D
acuggguggcccu

SEQ ID NO: 3922742 - RNA, 19 nt, Human adenovirus D
acuggucuccugccuggga

SEQ ID NO: 3922743 - RNA, 15 nt, Human adenovirus D
acuguaaagccacaa

SEQ ID NO: 3922744 - RNA, 20 nt, Human adenovirus D
acuuacuugaaaucugaaag

SEQ ID NO: 3922745 - RNA, 22 nt, Human adenovirus D
acuuagaagagcccccuccccg

SEQ ID NO: 3922746 - RNA, 20 nt, Human adenovirus D
acuucagccugggcaacaag

SEQ ID NO: 3922747 - RNA, 22 nt, Human adenovirus D
acuuccucguuucggggguugg

SEQ ID NO: 3922748 - RNA, 16 nt, Human adenovirus D
acuugacuuccggguu

SEQ ID NO: 3922749 - RNA, 16 nt, Human adenovirus D
acuugccgccugcgca

SEQ ID NO: 3922750 - RNA, 21 nt, Human adenovirus D
acuuugguacuuacaaagugu

SEQ ID NO: 3922751 - RNA, 21 nt, Human adenovirus D
acuuugucugcuguaaagcca

SEQ ID NO: 3922752 - RNA, 22 nt, Human adenovirus D
acuuuugcccuuacauguaacu

SEQ ID NO: 3922753 - RNA, 19 nt, Human adenovirus D
agaaaauugauaugcccuc

SEQ ID NO: 3922754 - RNA, 14 nt, Human adenovirus D
agaaacaagucaaa

SEQ ID NO: 3922755 - RNA, 18 nt, Human adenovirus D
agaaacgucccagcagca

SEQ ID NO: 3922756 - RNA, 20 nt, Human adenovirus D
agaacacccaacugagcagg

SEQ ID NO: 3922757 - RNA, 21 nt, Human adenovirus D
agaacacccaacugagcaggg

SEQ ID NO: 3922758 - RNA, 21 nt, Human adenovirus D
agaacccggacagcaagccuc

SEQ ID NO: 3922759 - RNA, 17 nt, Human adenovirus D
agaaccugaaggagcug

SEQ ID NO: 3922760 - RNA, 14 nt, Human adenovirus D
agaacgagggccug

SEQ ID NO: 3922761 - RNA, 18 nt, Human adenovirus D
agaacgagggccugggcu

SEQ ID NO: 3922762 - RNA, 15 nt, Human adenovirus D
agaagaacaggagcc

SEQ ID NO: 3922763 - RNA, 19 nt, Human adenovirus D
agaagaaugggacagccag

SEQ ID NO: 3922764 - RNA, 15 nt, Human adenovirus D
agaagagcccccucc

SEQ ID NO: 3922765 - RNA, 17 nt, Human adenovirus D
agaaggguuaacauuug

SEQ ID NO: 3922766 - RNA, 15 nt, Human adenovirus D
agaaggugcuggcga

SEQ ID NO: 3922767 - RNA, 13 nt, Human adenovirus D
agaaguuccucug

SEQ ID NO: 3922768 - RNA, 17 nt, Human adenovirus D
agacacuugagcuggcc

SEQ ID NO: 3922769 - RNA, 22 nt, Human adenovirus D
agacaucauaauuaugcuccug

SEQ ID NO: 3922770 - RNA, 14 nt, Human adenovirus D
agacauggccagca

SEQ ID NO: 3922771 - RNA, 14 nt, Human adenovirus D
agaccaccugguga

SEQ ID NO: 3922772 - RNA, 21 nt, Human adenovirus D
agaccaccuggugauggccug

SEQ ID NO: 3922773 - RNA, 17 nt, Human adenovirus D
agacccggagcccaccc

SEQ ID NO: 3922774 - RNA, 18 nt, Human adenovirus D
agacgauccugcaggugg

SEQ ID NO: 3922775 - RNA, 23 nt, Human adenovirus D
agacgcugaaaggcgggcugccc

SEQ ID NO: 3922776 - RNA, 16 nt, Human adenovirus D
agacucauccugcugg

SEQ ID NO: 3922777 - RNA, 16 nt, Human adenovirus D
agacugauggccacgg

SEQ ID NO: 3922778 - RNA, 21 nt, Human adenovirus D
agagaaggguuaacauuugac

SEQ ID NO: 3922779 - RNA, 22 nt, Human adenovirus D
agagaaggguuaacauuugaca

SEQ ID NO: 3922780 - RNA, 19 nt, Human adenovirus D
agagaaguuuaauggggug

SEQ ID NO: 3922781 - RNA, 13 nt, Human adenovirus D
agagccggcgggc

SEQ ID NO: 3922782 - RNA, 21 nt, Human adenovirus D
agaggagucgccggaggaggc

SEQ ID NO: 3922783 - RNA, 16 nt, Human adenovirus D
agaggcgacccaugau

SEQ ID NO: 3922784 - RNA, 15 nt, Human adenovirus D
agaggcgagcagcug

SEQ ID NO: 3922785 - RNA, 17 nt, Human adenovirus D
agagucugaaaaacaga

SEQ ID NO: 3922786 - RNA, 20 nt, Human adenovirus D
agaucaccuacgagcucgug

SEQ ID NO: 3922787 - RNA, 13 nt, Human adenovirus D
agauccagguccg

SEQ ID NO: 3922788 - RNA, 18 nt, Human adenovirus D
agaucccgccgcaggaga

SEQ ID NO: 3922789 - RNA, 16 nt, Human adenovirus D
agauccugcugcucca

SEQ ID NO: 3922790 - RNA, 19 nt, Human adenovirus D
agaugaggcgugcgguggu

SEQ ID NO: 3922791 - RNA, 23 nt, Human adenovirus D
agaugcagcaagccccggacccc

SEQ ID NO: 3922792 - RNA, 16 nt, Human adenovirus D
agaugccgggacagag

SEQ ID NO: 3922793 - RNA, 20 nt, Human adenovirus D
agauggaagaagaaugggac

SEQ ID NO: 3922794 - RNA, 21 nt, Human adenovirus D
agauguggguuggcuugcaug

SEQ ID NO: 3922795 - RNA, 21 nt, Human adenovirus D
agauucaauaagguucugccc

SEQ ID NO: 3922796 - RNA, 15 nt, Human adenovirus D
agcaaacgccgccgc

SEQ ID NO: 3922797 - RNA, 22 nt, Human adenovirus D
agcaagccucugacggcgcagc

SEQ ID NO: 3922798 - RNA, 18 nt, Human adenovirus D
agcaagggcgaccagcuc

SEQ ID NO: 3922799 - RNA, 20 nt, Human adenovirus D
agcaagggcgaccagcucug

SEQ ID NO: 3922800 - RNA, 20 nt, Human adenovirus D
agcaaguuuaaggcgcgggu

SEQ ID NO: 3922801 - RNA, 12 nt, Human adenovirus D
agcaauaccacc

SEQ ID NO: 3922802 - RNA, 16 nt, Human adenovirus D
agcaauccuccaggac

SEQ ID NO: 3922803 - RNA, 23 nt, Human adenovirus D
agcacccaaaaacugcaugcugg

SEQ ID NO: 3922804 - RNA, 20 nt, Human adenovirus D
agcaccucgguacccuccuc

SEQ ID NO: 3922805 - RNA, 21 nt, Human adenovirus D
agcacgcccgccauggggcgc

SEQ ID NO: 3922806 - RNA, 14 nt, Human adenovirus D
agcagaggaagagg

SEQ ID NO: 3922807 - RNA, 12 nt, Human adenovirus D
agcagcggcgca

SEQ ID NO: 3922808 - RNA, 17 nt, Human adenovirus D
agcagcuugcgcgcugg

SEQ ID NO: 3922809 - RNA, 19 nt, Human adenovirus D
agcagcuugcgcgcuggcu

SEQ ID NO: 3922810 - RNA, 23 nt, Human adenovirus D
agcagcuugcgcgcuggcuuggu

SEQ ID NO: 3922811 - RNA, 21 nt, Human adenovirus D
agcagcuugcugacgcccaac

SEQ ID NO: 3922812 - RNA, 15 nt, Human adenovirus D
agcaggaccugggcu

SEQ ID NO: 3922813 - RNA, 16 nt, Human adenovirus D
agcaggaccugggcuu

SEQ ID NO: 3922814 - RNA, 16 nt, Human adenovirus D
agcaggagcaggagga

SEQ ID NO: 3922815 - RNA, 19 nt, Human adenovirus D
agcaggagugcagggauga

SEQ ID NO: 3922816 - RNA, 21 nt, Human adenovirus D
agcaguauccgcggaguccag

SEQ ID NO: 3922817 - RNA, 17 nt, Human adenovirus D
agcaguccaugcccaac

SEQ ID NO: 3922818 - RNA, 23 nt, Human adenovirus D
agcaguguguguuugagaaaugc

SEQ ID NO: 3922819 - RNA, 16 nt, Human adenovirus D
agcauauaccccuccu

SEQ ID NO: 3922820 - RNA, 13 nt, Human adenovirus D
agcaucaaaaauu

SEQ ID NO: 3922821 - RNA, 12 nt, Human adenovirus D
agcauguggaac

SEQ ID NO: 3922822 - RNA, 19 nt, Human adenovirus D
agccaagaaacgucccagc

SEQ ID NO: 3922823 - RNA, 19 nt, Human adenovirus D
agccacagccacagacaga

SEQ ID NO: 3922824 - RNA, 19 nt, Human adenovirus D
agccacgauguaacaucac

SEQ ID NO: 3922825 - RNA, 20 nt, Human adenovirus D
agccaggucaaaacccacuc

SEQ ID NO: 3922826 - RNA, 21 nt, Human adenovirus D
agccaggucaaaacccacucu

SEQ ID NO: 3922827 - RNA, 17 nt, Human adenovirus D
agccaggugagcucggg

SEQ ID NO: 3922828 - RNA, 18 nt, Human adenovirus D
agccauugaccaccaggg

SEQ ID NO: 3922829 - RNA, 15 nt, Human adenovirus D
agcccaaacuggggc

SEQ ID NO: 3922830 - RNA, 21 nt, Human adenovirus D
agcccccuuuuuucuuuuugc

SEQ ID NO: 3922831 - RNA, 17 nt, Human adenovirus D
agccccggaccccgcca

SEQ ID NO: 3922832 - RNA, 15 nt, Human adenovirus D
agccccucugugccc

SEQ ID NO: 3922833 - RNA, 19 nt, Human adenovirus D
agcccugagccgccagcug

SEQ ID NO: 3922834 - RNA, 22 nt, Human adenovirus D
agcccugagccgccagcuggcc

SEQ ID NO: 3922835 - RNA, 16 nt, Human adenovirus D
agcccugcgcccagau

SEQ ID NO: 3922836 - RNA, 13 nt, Human adenovirus D
agccgcaggcgcc

SEQ ID NO: 3922837 - RNA, 17 nt, Human adenovirus D
agccgcaggcgcccagc

SEQ ID NO: 3922838 - RNA, 12 nt, Human adenovirus D
agccgccagcug

SEQ ID NO: 3922839 - RNA, 18 nt, Human adenovirus D
agccgcgguuaugcaggg

SEQ ID NO: 3922840 - RNA, 19 nt, Human adenovirus D
agccgcguaagcaggagca

SEQ ID NO: 3922841 - RNA, 23 nt, Human adenovirus D
agccgucuggacccgcggccgcc

SEQ ID NO: 3922842 - RNA, 16 nt, Human adenovirus D
agccugaugagcucgg

SEQ ID NO: 3922843 - RNA, 23 nt, Human adenovirus D
agcgacacccccgcgugcagcug

SEQ ID NO: 3922844 - RNA, 13 nt, Human adenovirus D
agcgagacccagg

SEQ ID NO: 3922845 - RNA, 23 nt, Human adenovirus D
agcgauucccgggcuuucuugcc

SEQ ID NO: 3922846 - RNA, 13 nt, Human adenovirus D
agcgcauccugag

SEQ ID NO: 3922847 - RNA, 15 nt, Human adenovirus D
agcgccaacagcagc

SEQ ID NO: 3922848 - RNA, 16 nt, Human adenovirus D
agcgcccauuccugga

SEQ ID NO: 3922849 - RNA, 20 nt, Human adenovirus D
agcgcccauuccuggagaug

SEQ ID NO: 3922850 - RNA, 15 nt, Human adenovirus D
agcgcccucagcagu

SEQ ID NO: 3922851 - RNA, 15 nt, Human adenovirus D
agcgcgagggcgaga

SEQ ID NO: 3922852 - RNA, 18 nt, Human adenovirus D
agcggccagcgcugggug

SEQ ID NO: 3922853 - RNA, 13 nt, Human adenovirus D
agcggccgcggcc

SEQ ID NO: 3922854 - RNA, 16 nt, Human adenovirus D
agcggcgcaggggcau

SEQ ID NO: 3922855 - RNA, 16 nt, Human adenovirus D
agcgguggacggccac

SEQ ID NO: 3922856 - RNA, 14 nt, Human adenovirus D
agcgguucaagaac

SEQ ID NO: 3922857 - RNA, 22 nt, Human adenovirus D
agcuagcacccaaaaacugcau

SEQ ID NO: 3922858 - RNA, 16 nt, Human adenovirus D
cuuccaggagccugau

SEQ ID NO: 3922859 - RNA, 17 nt, Human adenovirus D
cuuccguucuacccagc

SEQ ID NO: 3922860 - RNA, 18 nt, Human adenovirus D
cuuccuauuuaacauccu

SEQ ID NO: 3922861 - RNA, 20 nt, Human adenovirus D
cuuccuggcgacgcagccgg

SEQ ID NO: 3922862 - RNA, 15 nt, Human adenovirus D
cuucgagcaguggcu

SEQ ID NO: 3922863 - RNA, 21 nt, Human adenovirus D
cuucuguacuuugucugcugu

SEQ ID NO: 3922864 - RNA, 19 nt, Human adenovirus D
cuucuuccgcaacuuccag

SEQ ID NO: 3922865 - RNA, 12 nt, Human adenovirus D
cuugaacagcau

SEQ ID NO: 3922866 - RNA, 22 nt, Human adenovirus D
cuugaacucggggaucaccagu

SEQ ID NO: 3922867 - RNA, 16 nt, Human adenovirus D
cuugagaugcagaugg

SEQ ID NO: 3922868 - RNA, 23 nt, Human adenovirus D
cuugcaagacagaaacaccgagc

SEQ ID NO: 3922869 - RNA, 23 nt, Human adenovirus D
cuugcacaguuggcgacccagga

SEQ ID NO: 3922870 - RNA, 12 nt, Human adenovirus D
cuugcagagcau

SEQ ID NO: 3922871 - RNA, 17 nt, Human adenovirus D
cuugcugacgcccaacu

SEQ ID NO: 3922872 - RNA, 16 nt, Human adenovirus D
cuuggcgauggaucuc

SEQ ID NO: 3922873 - RNA, 14 nt, Human adenovirus D
cuugguaugaugau

SEQ ID NO: 3922874 - RNA, 17 nt, Human adenovirus D
cuuggucacaugcuugg

SEQ ID NO: 3922875 - RNA, 15 nt, Human adenovirus D
cuuggugggcagagg

SEQ ID NO: 3922876 - RNA, 16 nt, Human adenovirus D
cuuguagggacagcag

SEQ ID NO: 3922877 - RNA, 14 nt, Human adenovirus D
cuuguguccucccc

SEQ ID NO: 3922878 - RNA, 17 nt, Human adenovirus D
cuuguuauugagcccau

SEQ ID NO: 3922879 - RNA, 17 nt, Human adenovirus D
cuuuaucagcacugcaa

SEQ ID NO: 3922880 - RNA, 18 nt, Human adenovirus D
cuuuaucagcacugcaaa

SEQ ID NO: 3922881 - RNA, 15 nt, Human adenovirus D
cuuuaucagccagaa

SEQ ID NO: 3922882 - RNA, 11 nt, Human adenovirus D
cuuucaagaac

SEQ ID NO: 3922883 - RNA, 16 nt, Human adenovirus D
cuuuccagcagcaggg

SEQ ID NO: 3922884 - RNA, 14 nt, Human adenovirus D
cuuucggcgcuugg

SEQ ID NO: 3922885 - RNA, 22 nt, Human adenovirus D
cuuucugcccgcgcucaucccc

SEQ ID NO: 3922886 - RNA, 21 nt, Human adenovirus D
cuuugacacaccuggaggcac

SEQ ID NO: 3922887 - RNA, 11 nt, Human adenovirus D
cuuuggcuuuu

SEQ ID NO: 3922888 - RNA, 20 nt, Human adenovirus D
cuuuugguuucaaauucauu

SEQ ID NO: 3922889 - RNA, 18 nt, Human adenovirus D
cuuuuuagcccuuauuug

SEQ ID NO: 3922890 - RNA, 21 nt, Human adenovirus D
gaaacacagauuugaauugca

SEQ ID NO: 3922891 - RNA, 23 nt, Human adenovirus D
gaaaccagauauuguuggagcag

SEQ ID NO: 3922892 - RNA, 22 nt, Human adenovirus D
gaaaccucaaaaagcuguggac

SEQ ID NO: 3922893 - RNA, 13 nt, Human adenovirus D
gaaagcauacaga

SEQ ID NO: 3922894 - RNA, 15 nt, Human adenovirus D
gaaagucaggagcag

SEQ ID NO: 3922895 - RNA, 15 nt, Human adenovirus D
gaaaucgcaguuggg

SEQ ID NO: 3922896 - RNA, 20 nt, Human adenovirus D
gaaaugggcccuugaacagc

SEQ ID NO: 3922897 - RNA, 15 nt, Human adenovirus D
gaacacacugcccau

SEQ ID NO: 3922898 - RNA, 14 nt, Human adenovirus D
gaaccgccuggggc

SEQ ID NO: 3922899 - RNA, 16 nt, Human adenovirus D
gaaccucagccacucc

SEQ ID NO: 3922900 - RNA, 16 nt, Human adenovirus D
gaaccugaaggagcug

SEQ ID NO: 3922901 - RNA, 21 nt, Human adenovirus D
gaacgacucgcugcugcagcc

SEQ ID NO: 3922902 - RNA, 13 nt, Human adenovirus D
gaacgagggccug

SEQ ID NO: 3922903 - RNA, 14 nt, Human adenovirus D
gaacgagggccugg

SEQ ID NO: 3922904 - RNA, 14 nt, Human adenovirus D
gaacguagccagaa

SEQ ID NO: 3922905 - RNA, 13 nt, Human adenovirus D
gaacuuucuccac

SEQ ID NO: 3922906 - RNA, 16 nt, Human adenovirus D
gaagaagaacaggagc

SEQ ID NO: 3922907 - RNA, 17 nt, Human adenovirus D
gaagaccuacgcucagg

SEQ ID NO: 3922908 - RNA, 14 nt, Human adenovirus D
gaagagcagcacag

SEQ ID NO: 3922909 - RNA, 22 nt, Human adenovirus D
gaagauguuaaagugggcgugg

SEQ ID NO: 3922910 - RNA, 18 nt, Human adenovirus D
gaagcagaaguucaccug

SEQ ID NO: 3922911 - RNA, 21 nt, Human adenovirus D
gaagcauaauauggugaaggg

SEQ ID NO: 3922912 - RNA, 14 nt, Human adenovirus D
gaagcaucgccagg

SEQ ID NO: 3922913 - RNA, 22 nt, Human adenovirus D
gaagcggugucgcggacgcgcu

SEQ ID NO: 3922914 - RNA, 16 nt, Human adenovirus D
gaaggcgcccaggccg

SEQ ID NO: 3922915 - RNA, 16 nt, Human adenovirus D
gaaggcuuucacagcu

SEQ ID NO: 3922916 - RNA, 17 nt, Human adenovirus D
gaagggcaucuucugcc

SEQ ID NO: 3922917 - RNA, 22 nt, Human adenovirus D
gaagggcgagaagcggccgcgg

SEQ ID NO: 3922918 - RNA, 20 nt, Human adenovirus D
gaaggggacgagcugcuugc

SEQ ID NO: 3922919 - RNA, 20 nt, Human adenovirus D
gaaggugagggggucccgcu

SEQ ID NO: 3922920 - RNA, 13 nt, Human adenovirus D
gaaggugauuggc

SEQ ID NO: 3922921 - RNA, 19 nt, Human adenovirus D
gaaggugguggacggccug

SEQ ID NO: 3922922 - RNA, 17 nt, Human adenovirus D
gaagugcggcggcggcu

SEQ ID NO: 3922923 - RNA, 17 nt, Human adenovirus D
gaaucgcgggcggccuu

SEQ ID NO: 3922924 - RNA, 22 nt, Human adenovirus D
gaaucucggccaccagucccuu

SEQ ID NO: 3922925 - RNA, 13 nt, Human adenovirus D
gacaaaggaggcc

SEQ ID NO: 3922926 - RNA, 23 nt, Human adenovirus D
gacaagauaucauaaagauggau

SEQ ID NO: 3922927 - RNA, 23 nt, Human adenovirus D
gacacauguccccuuccuccgca

SEQ ID NO: 3922928 - RNA, 15 nt, Human adenovirus D
gacaccacagugcag

SEQ ID NO: 3922929 - RNA, 17 nt, Human adenovirus D
gacacugguuuggaacu

SEQ ID NO: 3922930 - RNA, 20 nt, Human adenovirus D
gacagaggcuaccucaagug

SEQ ID NO: 3922931 - RNA, 21 nt, Human adenovirus D
gacagucugagggccacccug

SEQ ID NO: 3922932 - RNA, 15 nt, Human adenovirus D
acagauccugcugcu

SEQ ID NO: 3922933 - RNA, 13 nt, Human adenovirus D
acagaugguagca

SEQ ID NO: 3922934 - RNA, 15 nt, Human adenovirus D
acagcaagccucuga

SEQ ID NO: 3922935 - RNA, 16 nt, Human adenovirus D
acagcaccgccgcagc

SEQ ID NO: 3922936 - RNA, 19 nt, Human adenovirus D
acagcaucgccucaccuau

SEQ ID NO: 3922937 - RNA, 23 nt, Human adenovirus D
acagccgucuggacccgcggccg

SEQ ID NO: 3922938 - RNA, 17 nt, Human adenovirus D
acagccucucugaagca

SEQ ID NO: 3922939 - RNA, 22 nt, Human adenovirus D
acagccuucagcaucagucucc

SEQ ID NO: 3922940 - RNA, 15 nt, Human adenovirus D
acagccuugccccca

SEQ ID NO: 3922941 - RNA, 21 nt, Human adenovirus D
acaggagccgcuaguggaaga

SEQ ID NO: 3922942 - RNA, 13 nt, Human adenovirus D
acaggccgcagcu

SEQ ID NO: 3922943 - RNA, 17 nt, Human adenovirus D
acaguaagugcagcaca

SEQ ID NO: 3922944 - RNA, 18 nt, Human adenovirus D
acaguaagugcagcacau

SEQ ID NO: 3922945 - RNA, 13 nt, Human adenovirus D
acaguacuggcaa

SEQ ID NO: 3922946 - RNA, 20 nt, Human adenovirus D
acaguagucaucaaaugcga

SEQ ID NO: 3922947 - RNA, 16 nt, Human adenovirus D
acagucaacuguuaag

SEQ ID NO: 3922948 - RNA, 21 nt, Human adenovirus D
acaguucagaaguaaauuuga

SEQ ID NO: 3922949 - RNA, 14 nt, Human adenovirus D
acaucagccaggac

SEQ ID NO: 3922950 - RNA, 13 nt, Human adenovirus D
acauccaugugac

SEQ ID NO: 3922951 - RNA, 23 nt, Human adenovirus D
acauccuggaccaggcggcagag

SEQ ID NO: 3922952 - RNA, 18 nt, Human adenovirus D
acaucgccgagcccgagg

SEQ ID NO: 3922953 - RNA, 14 nt, Human adenovirus D
acaugaccaaggac

SEQ ID NO: 3922954 - RNA, 11 nt, Human adenovirus D
acaugcacugg

SEQ ID NO: 3922955 - RNA, 13 nt, Human adenovirus D
acaugcagcugcc

SEQ ID NO: 3922956 - RNA, 16 nt, Human adenovirus D
acaugcccagcagcag

SEQ ID NO: 3922957 - RNA, 11 nt, Human adenovirus D
acauggcaagc

SEQ ID NO: 3922958 - RNA, 22 nt, Human adenovirus D
acauggugggcuaauauaacuu

SEQ ID NO: 3922959 - RNA, 11 nt, Human adenovirus D
acauguaacuu

SEQ ID NO: 3922960 - RNA, 21 nt, Human adenovirus D
acauucuggacuucgcagcca

SEQ ID NO: 3922961 - RNA, 20 nt, Human adenovirus D
accaaggcacccaccacagu

SEQ ID NO: 3922962 - RNA, 14 nt, Human adenovirus D
accacaaaaacgaa

SEQ ID NO: 3922963 - RNA, 17 nt, Human adenovirus D
accacacggccagcagg

SEQ ID NO: 3922964 - RNA, 16 nt, Human adenovirus D
accacccacaccgccu

SEQ ID NO: 3922965 - RNA, 13 nt, Human adenovirus D
accaccccaggcg

SEQ ID NO: 3922966 - RNA, 15 nt, Human adenovirus D
accaccccaggcgga

SEQ ID NO: 3922967 - RNA, 22 nt, Human adenovirus D
accaccgagucucaccugguua

SEQ ID NO: 3922968 - RNA, 19 nt, Human adenovirus D
accaccgcgaccgcggccg

SEQ ID NO: 3922969 - RNA, 12 nt, Human adenovirus D
accaccugguga

SEQ ID NO: 3922970 - RNA, 20 nt, Human adenovirus D
accaccuggugauggccugu

SEQ ID NO: 3922971 - RNA, 22 nt, Human adenovirus D
accacgcuacaaauccaacucu

SEQ ID NO: 3922972 - RNA, 16 nt, Human adenovirus D
accacgguggugcaga

SEQ ID NO: 3922973 - RNA, 13 nt, Human adenovirus D
accagacacaucu

SEQ ID NO: 3922974 - RNA, 16 nt, Human adenovirus D
accagcccauuucaca

SEQ ID NO: 3922975 - RNA, 16 nt, Human adenovirus D
accaggacgguguagc

SEQ ID NO: 3922976 - RNA, 15 nt, Human adenovirus D
accaggcagugcagc

SEQ ID NO: 3922977 - RNA, 14 nt, Human adenovirus D
accaggggguccac

SEQ ID NO: 3922978 - RNA, 15 nt, Human adenovirus D
accaggggguccacc

SEQ ID NO: 3922979 - RNA, 22 nt, Human adenovirus D
accauguuauucagcagcccau

SEQ ID NO: 3922980 - RNA, 19 nt, Human adenovirus D
acccagaccgugcaggggc

SEQ ID NO: 3922981 - RNA, 10 nt, Human adenovirus D
acccagcagg

SEQ ID NO: 3922982 - RNA, 17 nt, Human adenovirus D
accccagaaagaagugg

SEQ ID NO: 3922983 - RNA, 17 nt, Human adenovirus D
acccgcgacccccaggc

SEQ ID NO: 3922984 - RNA, 23 nt, Human adenovirus D
acccggacguggugcugcugccg

SEQ ID NO: 3922985 - RNA, 22 nt, Human adenovirus D
acccguccaugcgaauuccccu

SEQ ID NO: 3922986 - RNA, 16 nt, Human adenovirus D
acccugcccuuccagc

SEQ ID NO: 3922987 - RNA, 13 nt, Human adenovirus D
accgaaggcagcu

SEQ ID NO: 3922988 - RNA, 13 nt, Human adenovirus D
accgacgcugggc

SEQ ID NO: 3922989 - RNA, 17 nt, Human adenovirus D
accgagccucccaggag

SEQ ID NO: 3922990 - RNA, 13 nt, Human adenovirus D
accgaggugcccc

SEQ ID NO: 3922991 - RNA, 19 nt, Human adenovirus D
accgaggugccccagagcg

SEQ ID NO: 3922992 - RNA, 11 nt, Human adenovirus D
accgccacccg

SEQ ID NO: 3922993 - RNA, 16 nt, Human adenovirus D
accgccuccccgcaga

SEQ ID NO: 3922994 - RNA, 20 nt, Human adenovirus D
accgcggcgucaucgaggcc

SEQ ID NO: 3922995 - RNA, 21 nt, Human adenovirus D
accgcuccaugcuucugggca

SEQ ID NO: 3922996 - RNA, 23 nt, Human adenovirus D
accggucucugcgcucgcucacc

SEQ ID NO: 3922997 - RNA, 14 nt, Human adenovirus D
accggugcucugcg

SEQ ID NO: 3922998 - RNA, 14 nt, Human adenovirus D
accguggggaacuc

SEQ ID NO: 3922999 - RNA, 22 nt, Human adenovirus D
accuaugggaacaaggccugga

SEQ ID NO: 3923000 - RNA, 12 nt, Human adenovirus D
accuccugggca

SEQ ID NO: 3923001 - RNA, 20 nt, Human adenovirus D
accucgccgcgcaggggcuc

SEQ ID NO: 3923002 - RNA, 17 nt, Human adenovirus D
accucuugcagcuggcc

SEQ ID NO: 3923003 - RNA, 19 nt, Human adenovirus D
accugcagcaggugcugcc

SEQ ID NO: 3923004 - RNA, 23 nt, Human adenovirus D
accugccuccaccacccacgccc

SEQ ID NO: 3923005 - RNA, 15 nt, Human adenovirus D
accuucaaccucacc

SEQ ID NO: 3923006 - RNA, 12 nt, Human adenovirus D
accuucacagcu

SEQ ID NO: 3923007 - RNA, 14 nt, Human adenovirus D
accuuccuugcugg

SEQ ID NO: 3923008 - RNA, 20 nt, Human adenovirus D
accuuggcuuugcuggguug

SEQ ID NO: 3923009 - RNA, 13 nt, Human adenovirus D
acgaacagccacg

SEQ ID NO: 3923010 - RNA, 22 nt, Human adenovirus D
acgacacagcgauucccgggcu

SEQ ID NO: 3923011 - RNA, 20 nt, Human adenovirus D
acgacgacauccuggaccag

SEQ ID NO: 3923012 - RNA, 16 nt, Human adenovirus D
acgacucgcugcugca

SEQ ID NO: 3923013 - RNA, 22 nt, Human adenovirus D
acgagagcgugauggcgcaggc

SEQ ID NO: 3923014 - RNA, 19 nt, Human adenovirus D
acgagcaagacgcaggcca

SEQ ID NO: 3923015 - RNA, 20 nt, Human adenovirus D
acgagcagaccuuccaggag

SEQ ID NO: 3923016 - RNA, 17 nt, Human adenovirus D
acgagcggucgcggugg

SEQ ID NO: 3923017 - RNA, 19 nt, Human adenovirus D
acgagcucgccgaggaggc

SEQ ID NO: 3923018 - RNA, 17 nt, Human adenovirus D
acgauccugcaggugga

SEQ ID NO: 3923019 - RNA, 13 nt, Human adenovirus D
acgaugagaccaa

SEQ ID NO: 3923020 - RNA, 15 nt, Human adenovirus D
acgaugagaccaagu

SEQ ID NO: 3923021 - RNA, 19 nt, Human adenovirus D
acgaugguuucccucgggc

SEQ ID NO: 3923022 - RNA, 17 nt, Human adenovirus D
acgaugugaccacggac

SEQ ID NO: 3923023 - RNA, 18 nt, Human adenovirus D
acgcacgggccgccgggc

SEQ ID NO: 3923024 - RNA, 15 nt, Human adenovirus D
acgccaggcuggccg

SEQ ID NO: 3923025 - RNA, 21 nt, Human adenovirus D
acgccccugagcggcugcacg

SEQ ID NO: 3923026 - RNA, 15 nt, Human adenovirus D
acgcccuugugcccg

SEQ ID NO: 3923027 - RNA, 15 nt, Human adenovirus D
acgccguacgugccc

SEQ ID NO: 3923028 - RNA, 21 nt, Human adenovirus D
acgccucggaguaccugagcc

SEQ ID NO: 3923029 - RNA, 15 nt, Human adenovirus D
acgccuuccuggcga

SEQ ID NO: 3923030 - RNA, 14 nt, Human adenovirus D
acgcgaccgugggg

SEQ ID NO: 3923031 - RNA, 15 nt, Human adenovirus D
acgcgccggggccgc

SEQ ID NO: 3923032 - RNA, 22 nt, Human adenovirus D
acgcgcuccucgcucuggggcc

SEQ ID NO: 3923033 - RNA, 19 nt, Human adenovirus D
acgcggaucucacggccug

SEQ ID NO: 3923034 - RNA, 22 nt, Human adenovirus D
acgcggaucucacggccugcgu

SEQ ID NO: 3923035 - RNA, 18 nt, Human adenovirus D
acgcugaaaggcgggcug

SEQ ID NO: 3923036 - RNA, 20 nt, Human adenovirus D
acgcugagcgacgaccuggg

SEQ ID NO: 3923037 - RNA, 19 nt, Human adenovirus D
acgcuguaccgcgaggcca

SEQ ID NO: 3923038 - RNA, 18 nt, Human adenovirus D
acggacuugauuggccug

SEQ ID NO: 3923039 - RNA, 22 nt, Human adenovirus D
acggagaggcugacgagcccgc

SEQ ID NO: 3923040 - RNA, 21 nt, Human adenovirus D
acggcaucucgauccagcaga

SEQ ID NO: 3923041 - RNA, 22 nt, Human adenovirus D
acggcgcagcuguuccuggugg

SEQ ID NO: 3923042 - RNA, 14 nt, Human adenovirus D
acggcgggcugacg

SEQ ID NO: 3923043 - RNA, 19 nt, Human adenovirus D
acgguccagaggacuugga

SEQ ID NO: 3923044 - RNA, 16 nt, Human adenovirus D
acggugaaccugagcc

SEQ ID NO: 3923045 - RNA, 23 nt, Human adenovirus D
acgguggacgggcgcccagugcu

SEQ ID NO: 3923046 - RNA, 15 nt, Human adenovirus D
acgguggcggcgagg

SEQ ID NO: 3923047 - RNA, 19 nt, Human adenovirus D
acguacuucagccugggca

SEQ ID NO: 3923048 - RNA, 15 nt, Human adenovirus D
acgucaccugcggcg

SEQ ID NO: 3923049 - RNA, 16 nt, Human adenovirus D
acguccauggcgcagu

SEQ ID NO: 3923050 - RNA, 15 nt, Human adenovirus D
acgugagcggcgagg

SEQ ID NO: 3923051 - RNA, 20 nt, Human adenovirus D
ggcgccggcgcuagccagcc

SEQ ID NO: 3923052 - RNA, 14 nt, Human adenovirus D
ggcgccucccagga

SEQ ID NO: 3923053 - RNA, 21 nt, Human adenovirus D
ggcgcuagccagccacagcca

SEQ ID NO: 3923054 - RNA, 22 nt, Human adenovirus D
ggcggaccugcauuggcagccg

SEQ ID NO: 3923055 - RNA, 18 nt, Human adenovirus D
ggcggacugccaccgccg

SEQ ID NO: 3923056 - RNA, 12 nt, Human adenovirus D
ggcggaggcgga

SEQ ID NO: 3923057 - RNA, 11 nt, Human adenovirus D
ggcggagggug

SEQ ID NO: 3923058 - RNA, 16 nt, Human adenovirus D
ggcggagggugccaga

SEQ ID NO: 3923059 - RNA, 16 nt, Human adenovirus D
ggcggaugguggcgag

SEQ ID NO: 3923060 - RNA, 21 nt, Human adenovirus D
ggcggccuuugaugugcggca

SEQ ID NO: 3923061 - RNA, 19 nt, Human adenovirus D
ggcggcgauaugccagacg

SEQ ID NO: 3923062 - RNA, 21 nt, Human adenovirus D
ggcggcgauaugccagacgca

SEQ ID NO: 3923063 - RNA, 21 nt, Human adenovirus D
ggcggcgcugcaaagccagcc

SEQ ID NO: 3923064 - RNA, 17 nt, Human adenovirus D
ggcgggggugaugagcu

SEQ ID NO: 3923065 - RNA, 14 nt, Human adenovirus D
ggcggugcugcugc

SEQ ID NO: 3923066 - RNA, 16 nt, Human adenovirus D
ggcggugcugcugccg

SEQ ID NO: 3923067 - RNA, 14 nt, Human adenovirus D
ggcggugguagccg

SEQ ID NO: 3923068 - RNA, 21 nt, Human adenovirus D
ggcguaguugcgcaggcgcug

SEQ ID NO: 3923069 - RNA, 18 nt, Human adenovirus D
ggcgugcacuggcucgcc

SEQ ID NO: 3923070 - RNA, 15 nt, Human adenovirus D
ggcgugcaggcgccc

SEQ ID NO: 3923071 - RNA, 14 nt, Human adenovirus D
ggcguucagggagg

SEQ ID NO: 3923072 - RNA, 18 nt, Human adenovirus D
ggcuacgcgcggaaucag

SEQ ID NO: 3923073 - RNA, 23 nt, Human adenovirus D
ggcucaucugcagggcgcccagc

SEQ ID NO: 3923074 - RNA, 21 nt, Human adenovirus D
ggcuccagcgaaagagagcuc

SEQ ID NO: 3923075 - RNA, 15 nt, Human adenovirus D
ggcuccucucgugcu

SEQ ID NO: 3923076 - RNA, 20 nt, Human adenovirus D
ggcuccucucgugcuccggc

SEQ ID NO: 3923077 - RNA, 22 nt, Human adenovirus D
ggcucgguuguugaugaccugg

SEQ ID NO: 3923078 - RNA, 19 nt, Human adenovirus D
ggcucuaaaaaauaugcaa

SEQ ID NO: 3923079 - RNA, 21 nt, Human adenovirus D
ggcucuuccuccguagccugg

SEQ ID NO: 3923080 - RNA, 21 nt, Human adenovirus D
ggcugcuagagugccacugcc

SEQ ID NO: 3923081 - RNA, 20 nt, Human adenovirus D
ggcugcuucugccuggugaa

SEQ ID NO: 3923082 - RNA, 19 nt, Human adenovirus D
ggcuggaacccgcgcucgc

SEQ ID NO: 3923083 - RNA, 19 nt, Human adenovirus D
ggcuggcgagacugggggc

SEQ ID NO: 3923084 - RNA, 19 nt, Human adenovirus D
ggcuuacaacagccuugcc

SEQ ID NO: 3923085 - RNA, 16 nt, Human adenovirus D
ggcuuccgccgccggg

SEQ ID NO: 3923086 - RNA, 21 nt, Human adenovirus D
ggcuuugcuggguugcuccuu

SEQ ID NO: 3923087 - RNA, 15 nt, Human adenovirus D
gggaacaaggccugg

SEQ ID NO: 3923088 - RNA, 20 nt, Human adenovirus D
gggagcugcgcgagggccug

SEQ ID NO: 3923089 - RNA, 12 nt, Human adenovirus D
gggaggagcccg

SEQ ID NO: 3923090 - RNA, 15 nt, Human adenovirus D
gggcaccaccgaguc

SEQ ID NO: 3923091 - RNA, 17 nt, Human adenovirus D
gggccacuacagcugac

SEQ ID NO: 3923092 - RNA, 23 nt, Human adenovirus D
gggccucggcggcguggcccuug

SEQ ID NO: 3923093 - RNA, 15 nt, Human adenovirus D
gggccugaugcagga

SEQ ID NO: 3923094 - RNA, 21 nt, Human adenovirus D
gggcgcccagugcuuccagca

SEQ ID NO: 3923095 - RNA, 12 nt, Human adenovirus D
gggcggaccugc

SEQ ID NO: 3923096 - RNA, 15 nt, Human adenovirus D
gggcguagagcuugg

SEQ ID NO: 3923097 - RNA, 21 nt, Human adenovirus D
gggcguagagcuugggcgcaa

SEQ ID NO: 3923098 - RNA, 15 nt, Human adenovirus D
gggcgucaaccccau

SEQ ID NO: 3923099 - RNA, 16 nt, Human adenovirus D
gggcguccagcgcggc

SEQ ID NO: 3923100 - RNA, 19 nt, Human adenovirus D
gggcucguuaguccagcag

SEQ ID NO: 3923101 - RNA, 17 nt, Human adenovirus D
gggcugcucggcgcgga

SEQ ID NO: 3923102 - RNA, 14 nt, Human adenovirus D
gggcuggcgagacu

SEQ ID NO: 3923103 - RNA, 13 nt, Human adenovirus D
ggggacagagaau

SEQ ID NO: 3923104 - RNA, 13 nt, Human adenovirus D
ggggacgugagcg

SEQ ID NO: 3923105 - RNA, 21 nt, Human adenovirus D
ggggaucaccaguuugggcac

SEQ ID NO: 3923106 - RNA, 18 nt, Human adenovirus D
ggggcaacauccccgccc

SEQ ID NO: 3923107 - RNA, 14 nt, Human adenovirus D
ggggcaauaccggg

SEQ ID NO: 3923108 - RNA, 13 nt, Human adenovirus D
ggggcauugcagg

SEQ ID NO: 3923109 - RNA, 20 nt, Human adenovirus D
ggggcgccgccggcggcgag

SEQ ID NO: 3923110 - RNA, 13 nt, Human adenovirus D
ggggcgugcaggc

SEQ ID NO: 3923111 - RNA, 19 nt, Human adenovirus D
ggggcucguuaguccagca

SEQ ID NO: 3923112 - RNA, 21 nt, Human adenovirus D
gggggccacucccagcgccgc

SEQ ID NO: 3923113 - RNA, 20 nt, Human adenovirus D
gggguacuuuacgcuggcca

SEQ ID NO: 3923114 - RNA, 20 nt, Human adenovirus D
gggguucauguugugcagga

SEQ ID NO: 3923115 - RNA, 24 nt, Human adenovirus D
ggguagguauucccucucgagagc

SEQ ID NO: 3923116 - RNA, 15 nt, Human adenovirus D
ggguaguggcucgcg

SEQ ID NO: 3923117 - RNA, 15 nt, Human adenovirus D
gggugacagaaccag

SEQ ID NO: 3923118 - RNA, 15 nt, Human adenovirus D
ggguuaggccgcgcg

SEQ ID NO: 3923119 - RNA, 14 nt, Human adenovirus D
gguaagagcccagc

SEQ ID NO: 3923120 - RNA, 12 nt, Human adenovirus D
gguaauucucau

SEQ ID NO: 3923121 - RNA, 18 nt, Human adenovirus D
gguacaugggcaugagcc

SEQ ID NO: 3923122 - RNA, 16 nt, Human adenovirus D
gguacuuuacgcuggc

SEQ ID NO: 3923123 - RNA, 17 nt, Human adenovirus D
gguagagcggccagcgc

SEQ ID NO: 3923124 - RNA, 18 nt, Human adenovirus D
gguagcaccacugcaugg

SEQ ID NO: 3923125 - RNA, 22 nt, Human adenovirus D
gguagcggucguuguccaccag

SEQ ID NO: 3923126 - RNA, 19 nt, Human adenovirus D
gguagggggcgccgccggc

SEQ ID NO: 3923127 - RNA, 23 nt, Human adenovirus D
ggucacggauacaacucgcaguc

SEQ ID NO: 3923128 - RNA, 15 nt, Human adenovirus D
gguccacgcuggugg

SEQ ID NO: 3923129 - RNA, 16 nt, Human adenovirus D
gguccccgaggcccuu

SEQ ID NO: 3923130 - RNA, 23 nt, Human adenovirus D
gguccgcaggaguccaccgcucc

SEQ ID NO: 3923131 - RNA, 13 nt, Human adenovirus D
gguccgggggcag

SEQ ID NO: 3923132 - RNA, 20 nt, Human adenovirus D
gguccugcaagaggagacag

SEQ ID NO: 3923133 - RNA, 12 nt, Human adenovirus D
ggucgcgguggg

SEQ ID NO: 3923134 - RNA, 14 nt, Human adenovirus D
ggucgcgguggggc

SEQ ID NO: 3923135 - RNA, 23 nt, Human adenovirus D
ggucucgcacucgacgagccagg

SEQ ID NO: 3923136 - RNA, 20 nt, Human adenovirus D
ggucugucauauccugaaga

SEQ ID NO: 3923137 - RNA, 22 nt, Human adenovirus D
ggucugucauauccugaagaac

SEQ ID NO: 3923138 - RNA, 17 nt, Human adenovirus D
ggugaaccugagccagg

SEQ ID NO: 3923139 - RNA, 18 nt, Human adenovirus D
ggugaaccugagccaggc

SEQ ID NO: 3923140 - RNA, 15 nt, Human adenovirus D
ggugaaggggugggc

SEQ ID NO: 3923141 - RNA, 20 nt, Human adenovirus D
ggugacggccuacgagcaga

SEQ ID NO: 3923142 - RNA, 19 nt, Human adenovirus D
ggugacgguaagcacgagc

SEQ ID NO: 3923143 - RNA, 16 nt, Human adenovirus D
ggugagccggccgcgc

SEQ ID NO: 3923144 - RNA, 17 nt, Human adenovirus D
ggugagcucgggcugcu

SEQ ID NO: 3923145 - RNA, 17 nt, Human adenovirus D
ggugaugccggcagcgg

SEQ ID NO: 3923146 - RNA, 13 nt, Human adenovirus D
ggugcgcuggggc

SEQ ID NO: 3923147 - RNA, 12 nt, Human adenovirus D
ggugcuccagcc

SEQ ID NO: 3923148 - RNA, 13 nt, Human adenovirus D
ggugcugcugccg

SEQ ID NO: 3923149 - RNA, 15 nt, Human adenovirus D
ggugcuuagccuggg

SEQ ID NO: 3923150 - RNA, 21 nt, Human adenovirus D
gguggaaacagacagccaggu

SEQ ID NO: 3923151 - RNA, 22 nt, Human adenovirus D
gguggauuuuuuccaagacccg

SEQ ID NO: 3923152 - RNA, 20 nt, Human adenovirus D
ggugucagaggauggucauc

SEQ ID NO: 3923153 - RNA, 18 nt, Human adenovirus D
ggugucgcggagauccag

SEQ ID NO: 3923154 - RNA, 14 nt, Human adenovirus D
gguguggaagauga

SEQ ID NO: 3923155 - RNA, 18 nt, Human adenovirus D
gguucauguugugcagga

SEQ ID NO: 3923156 - RNA, 15 nt, Human adenovirus D
gguuccggccccgcg

SEQ ID NO: 3923157 - RNA, 16 nt, Human adenovirus D
gguugagcgggcucuu

SEQ ID NO: 3923158 - RNA, 14 nt, Human adenovirus D
guaagagcccagca

SEQ ID NO: 3923159 - RNA, 16 nt, Human adenovirus D
guaaugaaacccgcca

SEQ ID NO: 3923160 - RNA, 19 nt, Human adenovirus D
guacacgguucucucagca

SEQ ID NO: 3923161 - RNA, 16 nt, Human adenovirus D
guacauccagcauaag

SEQ ID NO: 3923162 - RNA, 21 nt, Human adenovirus D
guacccgcgacccccaggccc

SEQ ID NO: 3923163 - RNA, 22 nt, Human adenovirus D
guaccuugucguacuucugcca

SEQ ID NO: 3923164 - RNA, 19 nt, Human adenovirus D
guacgaggccaugcugcgc

SEQ ID NO: 3923165 - RNA, 13 nt, Human adenovirus D
guacuucugccag

SEQ ID NO: 3923166 - RNA, 22 nt, Human adenovirus D
guacuuuacgcuggccagcacg

SEQ ID NO: 3923167 - RNA, 17 nt, Human adenovirus D
guagacaaagagcacag

SEQ ID NO: 3923168 - RNA, 18 nt, Human adenovirus D
guagagcuugggcgcaag

SEQ ID NO: 3923169 - RNA, 20 nt, Human adenovirus D
guagcugcgcggggccacga

SEQ ID NO: 3923170 - RNA, 22 nt, Human adenovirus D
guaggaaccagcacacucacuu

SEQ ID NO: 3923171 - RNA, 20 nt, Human adenovirus D
guaggccauccccauccagu

SEQ ID NO: 3923172 - RNA, 17 nt, Human adenovirus D
guaguucaggagcgcag

SEQ ID NO: 3923173 - RNA, 15 nt, Human adenovirus D
guaguugcgcaggcg

SEQ ID NO: 3923174 - RNA, 21 nt, Human adenovirus D
guauccagccuguacccagag

SEQ ID NO: 3923175 - RNA, 22 nt, Human adenovirus D
guaucugaggcauauaaaaaug

SEQ ID NO: 3923176 - RNA, 16 nt, Human adenovirus D
guaucuuuauugauuu

SEQ ID NO: 3923177 - RNA, 20 nt, Human adenovirus D
guaugucucugguguaguug

SEQ ID NO: 3923178 - RNA, 14 nt, Human adenovirus D
gucaacaugauccu

SEQ ID NO: 3923179 - RNA, 19 nt, Human adenovirus D
gucaaggugcgccccauca

SEQ ID NO: 3923180 - RNA, 17 nt, Human adenovirus D
gucaaguuugacagcag

SEQ ID NO: 3923181 - RNA, 19 nt, Human adenovirus D
gucacauccaucuccacca

SEQ ID NO: 3923182 - RNA, 16 nt, Human adenovirus D
gucaccuucacagcua

SEQ ID NO: 3923183 - RNA, 18 nt, Human adenovirus D
gucacggucggcgcgcuc

SEQ ID NO: 3923184 - RNA, 17 nt, Human adenovirus D
gucacuuaaguccuggg

SEQ ID NO: 3923185 - RNA, 18 nt, Human adenovirus D
gucacuuaaguccugggc

SEQ ID NO: 3923186 - RNA, 16 nt, Human adenovirus D
gucacuuuugcccuua

SEQ ID NO: 3923187 - RNA, 19 nt, Human adenovirus D
gucagcaacuaccccgugg

SEQ ID NO: 3923188 - RNA, 20 nt, Human adenovirus D
gucaggaaaauaucaauaca

SEQ ID NO: 3923189 - RNA, 13 nt, Human adenovirus D
gucaggagcagcg

SEQ ID NO: 3923190 - RNA, 15 nt, Human adenovirus D
gucaggucugcuggu

SEQ ID NO: 3923191 - RNA, 12 nt, Human adenovirus D
gucaucacccag

SEQ ID NO: 3923192 - RNA, 15 nt, Human adenovirus D
gucaucacccucaga

SEQ ID NO: 3923193 - RNA, 12 nt, Human adenovirus D
gucauccuucca

SEQ ID NO: 3923194 - RNA, 15 nt, Human adenovirus D
gucauggcuggucag

SEQ ID NO: 3923195 - RNA, 18 nt, Human adenovirus D
gucauugauacccuggac

SEQ ID NO: 3923196 - RNA, 19 nt, Human adenovirus D
guccaacggcaaacagcau

SEQ ID NO: 3923197 - RNA, 17 nt, Human adenovirus D
guccagcgcggccagcg

SEQ ID NO: 3923198 - RNA, 13 nt, Human adenovirus D
guccaggucacag

SEQ ID NO: 3923199 - RNA, 18 nt, Human adenovirus D
ugcagacacuugagcugg

SEQ ID NO: 3923200 - RNA, 22 nt, Human adenovirus D
ugcagacacuugagcuggccuu

SEQ ID NO: 3923201 - RNA, 17 nt, Human adenovirus D
ugcagaccgaccccugg

SEQ ID NO: 3923202 - RNA, 14 nt, Human adenovirus D
ugcagaccgcgggc

SEQ ID NO: 3923203 - RNA, 23 nt, Human adenovirus D
ugcagcacauaaucaccauguua

SEQ ID NO: 3923204 - RNA, 12 nt, Human adenovirus D
ugcagcacugga

SEQ ID NO: 3923205 - RNA, 15 nt, Human adenovirus D
ugcagcauugucugc

SEQ ID NO: 3923206 - RNA, 22 nt, Human adenovirus D
ugcagcguguucaaaacaacaa

SEQ ID NO: 3923207 - RNA, 18 nt, Human adenovirus D
ugcaggcgucgcagcgcc

SEQ ID NO: 3923208 - RNA, 17 nt, Human adenovirus D
ugcagggaagcaaaguu

SEQ ID NO: 3923209 - RNA, 13 nt, Human adenovirus D
ugcagggugacca

SEQ ID NO: 3923210 - RNA, 14 nt, Human adenovirus D
ugcagguggacgag

SEQ ID NO: 3923211 - RNA, 15 nt, Human adenovirus D
ugcaguuggccauga

SEQ ID NO: 3923212 - RNA, 18 nt, Human adenovirus D
ugcauacaaaugcuucaa

SEQ ID NO: 3923213 - RNA, 21 nt, Human adenovirus D
ugcaucaacguuucucggcca

SEQ ID NO: 3923214 - RNA, 15 nt, Human adenovirus D
ugcaucccguccugc

SEQ ID NO: 3923215 - RNA, 21 nt, Human adenovirus D
ugcauggccucgugcucuggg

SEQ ID NO: 3923216 - RNA, 18 nt, Human adenovirus D
ugcauuggggauaaaguu

SEQ ID NO: 3923217 - RNA, 17 nt, Human adenovirus D
ugccacaugcaccuggg

SEQ ID NO: 3923218 - RNA, 15 nt, Human adenovirus D
ugccacucgcgggcg

SEQ ID NO: 3923219 - RNA, 20 nt, Human adenovirus D
ugccacucgcgggcggccau

SEQ ID NO: 3923220 - RNA, 16 nt, Human adenovirus D
ugccagacgcaagagc

SEQ ID NO: 3923221 - RNA, 20 nt, Human adenovirus D
ugccagacgcaagagccggc

SEQ ID NO: 3923222 - RNA, 20 nt, Human adenovirus D
ugccagauugggggacgaug

SEQ ID NO: 3923223 - RNA, 14 nt, Human adenovirus D
ugccaggggucuac

SEQ ID NO: 3923224 - RNA, 19 nt, Human adenovirus D
ugccccacaucgaggcccu

SEQ ID NO: 3923225 - RNA, 12 nt, Human adenovirus D
ugccccagcaga

SEQ ID NO: 3923226 - RNA, 13 nt, Human adenovirus D
ugcccccuccacu

SEQ ID NO: 3923227 - RNA, 23 nt, Human adenovirus D
ugcccgagggcuacaaggaccgc

SEQ ID NO: 3923228 - RNA, 22 nt, Human adenovirus D
ugcccuuccacauccaagugcc

SEQ ID NO: 3923229 - RNA, 13 nt, Human adenovirus D
ugcccuuccagca

SEQ ID NO: 3923230 - RNA, 12 nt, Human adenovirus D
ugccggccccuc

SEQ ID NO: 3923231 - RNA, 16 nt, Human adenovirus D
ugccgguuucgggcgg

SEQ ID NO: 3923232 - RNA, 12 nt, Human adenovirus D
ugccugccccuc

SEQ ID NO: 3923233 - RNA, 13 nt, Human adenovirus D
ugccuugucuauc

SEQ ID NO: 3923234 - RNA, 16 nt, Human adenovirus D
ugcgaaaacacuuccg

SEQ ID NO: 3923235 - RNA, 13 nt, Human adenovirus D
ugcgcgaccuggg

SEQ ID NO: 3923236 - RNA, 18 nt, Human adenovirus D
ugcgcgagguugagcucc

SEQ ID NO: 3923237 - RNA, 15 nt, Human adenovirus D
ugcgcuuugugcccg

SEQ ID NO: 3923238 - RNA, 23 nt, Human adenovirus D
ugcggagccgcucggccaugccc

SEQ ID NO: 3923239 - RNA, 20 nt, Human adenovirus D
ugcggccuugcggagcgagg

SEQ ID NO: 3923240 - RNA, 15 nt, Human adenovirus D
ugcggcugaugguga

SEQ ID NO: 3923241 - RNA, 23 nt, Human adenovirus D
ugcgguggauuuuuuccaagacc

SEQ ID NO: 3923242 - RNA, 19 nt, Human adenovirus D
ugcgucgagcacagcaccg

SEQ ID NO: 3923243 - RNA, 15 nt, Human adenovirus D
ugcgucugcagcauu

SEQ ID NO: 3923244 - RNA, 13 nt, Human adenovirus D
ugcuaaagcucuu

SEQ ID NO: 3923245 - RNA, 16 nt, Human adenovirus D
ugcuacaucugcugcc

SEQ ID NO: 3923246 - RNA, 17 nt, Human adenovirus D
ugcuagcccuuccugga

SEQ ID NO: 3923247 - RNA, 18 nt, Human adenovirus D
ugcugaccaauagacagc

SEQ ID NO: 3923248 - RNA, 18 nt, Human adenovirus D
ugcugauugcucuggccu

SEQ ID NO: 3923249 - RNA, 14 nt, Human adenovirus D
ugcugccccaggcg

SEQ ID NO: 3923250 - RNA, 16 nt, Human adenovirus D
ugcugccgcucaguca

SEQ ID NO: 3923251 - RNA, 14 nt, Human adenovirus D
ugcugccgggcugc

SEQ ID NO: 3923252 - RNA, 19 nt, Human adenovirus D
ugcugcgccgcgccagacg

SEQ ID NO: 3923253 - RNA, 18 nt, Human adenovirus D
ugcuggcuggucaggccu

SEQ ID NO: 3923254 - RNA, 21 nt, Human adenovirus D
ugcugguggaaacagacagcc

SEQ ID NO: 3923255 - RNA, 20 nt, Human adenovirus D
ugcuucugggcaacggccgc

SEQ ID NO: 3923256 - RNA, 20 nt, Human adenovirus D
uggaaacagacagccagguc

SEQ ID NO: 3923257 - RNA, 20 nt, Human adenovirus D
uggaaacucuuggagcaggg

SEQ ID NO: 3923258 - RNA, 20 nt, Human adenovirus D
uggaacaccaucagacuggg

SEQ ID NO: 3923259 - RNA, 17 nt, Human adenovirus D
uggaacccaaaguauga

SEQ ID NO: 3923260 - RNA, 19 nt, Human adenovirus D
uggaacgagaucggcacca

SEQ ID NO: 3923261 - RNA, 20 nt, Human adenovirus D
uggaagaagaaugggacagc

SEQ ID NO: 3923262 - RNA, 16 nt, Human adenovirus D
uggaagaagagcagca

SEQ ID NO: 3923263 - RNA, 24 nt, Human adenovirus D
uggaagaccuacgcucaggaccau

SEQ ID NO: 3923264 - RNA, 15 nt, Human adenovirus D
uggaagccaugcugc

SEQ ID NO: 3923265 - RNA, 17 nt, Human adenovirus D
uggacgagggggcagua

SEQ ID NO: 3923266 - RNA, 18 nt, Human adenovirus D
uggacgaguggcuguuga

SEQ ID NO: 3923267 - RNA, 13 nt, Human adenovirus D
uggaggagcagcc

SEQ ID NO: 3923268 - RNA, 16 nt, Human adenovirus D
uggaggagcagccgcg

SEQ ID NO: 3923269 - RNA, 15 nt, Human adenovirus D
uggaggcgcgcggga

SEQ ID NO: 3923270 - RNA, 22 nt, Human adenovirus D
uggagggcaugggucaggcagc

SEQ ID NO: 3923271 - RNA, 15 nt, Human adenovirus D
uggaugcggagccgc

SEQ ID NO: 3923272 - RNA, 15 nt, Human adenovirus D
uggauguggagcccg

SEQ ID NO: 3923273 - RNA, 18 nt, Human adenovirus D
uggauuaucucuacaaau

SEQ ID NO: 3923274 - RNA, 19 nt, Human adenovirus D
uggcaacaccugggcacug

SEQ ID NO: 3923275 - RNA, 13 nt, Human adenovirus D
uggcaagcugcca

SEQ ID NO: 3923276 - RNA, 14 nt, Human adenovirus D
uggccacggggagc

SEQ ID NO: 3923277 - RNA, 20 nt, Human adenovirus D
uggcccugggccugaugcac

SEQ ID NO: 3923278 - RNA, 12 nt, Human adenovirus D
uggccgaccgga

SEQ ID NO: 3923279 - RNA, 22 nt, Human adenovirus D
uggccgagcuggaagcccugag

SEQ ID NO: 3923280 - RNA, 22 nt, Human adenovirus D
uggccuggaucuugagguuggc

SEQ ID NO: 3923281 - RNA, 19 nt, Human adenovirus D
uggccuuaaauaaggaaau

SEQ ID NO: 3923282 - RNA, 20 nt, Human adenovirus D
uggcgaccgccgugcgccgc

SEQ ID NO: 3923283 - RNA, 18 nt, Human adenovirus D
uggcgagaggcgagcagc

SEQ ID NO: 3923284 - RNA, 21 nt, Human adenovirus D
uggcgaucgugaacgcgcugg

SEQ ID NO: 3923285 - RNA, 20 nt, Human adenovirus D
uggcgccgggccugggcgug

SEQ ID NO: 3923286 - RNA, 18 nt, Human adenovirus D
uggcggagaacaaggcca

SEQ ID NO: 3923287 - RNA, 16 nt, Human adenovirus D
uggcggcccuggcugg

SEQ ID NO: 3923288 - RNA, 23 nt, Human adenovirus D
uggcuauuuucacugaaggaaaa

SEQ ID NO: 3923289 - RNA, 17 nt, Human adenovirus D
uggcucagcugccaugg

SEQ ID NO: 3923290 - RNA, 15 nt, Human adenovirus D
uggcuucagagacaa

SEQ ID NO: 3923291 - RNA, 12 nt, Human adenovirus D
uggcuugcauga

SEQ ID NO: 3923292 - RNA, 17 nt, Human adenovirus D
uggcuugguacccgcga

SEQ ID NO: 3923293 - RNA, 14 nt, Human adenovirus D
ugggaacaaggccu

SEQ ID NO: 3923294 - RNA, 15 nt, Human adenovirus D
ugggacagccagcag

SEQ ID NO: 3923295 - RNA, 23 nt, Human adenovirus D
ugggaccggugcucugcgcgcgc

SEQ ID NO: 3923296 - RNA, 12 nt, Human adenovirus D
ugggaugcugcc

SEQ ID NO: 3923297 - RNA, 14 nt, Human adenovirus D
ugggaugcugcccg

SEQ ID NO: 3923298 - RNA, 23 nt, Human adenovirus D
ugggaugcugcccgccaccugca

SEQ ID NO: 3923299 - RNA, 14 nt, Human adenovirus D
ugggcacccacgac

SEQ ID NO: 3923300 - RNA, 14 nt, Human adenovirus D
ugggcacuggagca

SEQ ID NO: 3923301 - RNA, 17 nt, Human adenovirus D
ugggccguuggaagaug

SEQ ID NO: 3923302 - RNA, 15 nt, Human adenovirus D
ugggcguguggcagc

SEQ ID NO: 3923303 - RNA, 19 nt, Human adenovirus D
ugggcuauaauaagcagag

SEQ ID NO: 3923304 - RNA, 15 nt, Human adenovirus D
ugggcucgcuggugg

SEQ ID NO: 3923305 - RNA, 22 nt, Human adenovirus D
uggggcagaacgacaccgacag

SEQ ID NO: 3923306 - RNA, 11 nt, Human adenovirus D
uggggcgccgc

SEQ ID NO: 3923307 - RNA, 16 nt, Human adenovirus D
uggggcgugcaggcgc

SEQ ID NO: 3923308 - RNA, 14 nt, Human adenovirus D
uggggcuccucgag

SEQ ID NO: 3923309 - RNA, 23 nt, Human adenovirus D
ugggggcaauaccgggaugauga

SEQ ID NO: 3923310 - RNA, 23 nt, Human adenovirus D
ugggguacuuuacgcuggccagc

SEQ ID NO: 3923311 - RNA, 13 nt, Human adenovirus D
uggucggcgccga

SEQ ID NO: 3923312 - RNA, 21 nt, Human adenovirus D
uggucuuucuggcuugcuucu

SEQ ID NO: 3923313 - RNA, 14 nt, Human adenovirus D
uggugaagggcugc

SEQ ID NO: 3923314 - RNA, 22 nt, Human adenovirus D
uggugcaguuugcccgcgccac

SEQ ID NO: 3923315 - RNA, 18 nt, Human adenovirus D
uggugcgucgagcacagc

SEQ ID NO: 3923316 - RNA, 19 nt, Human adenovirus D
gcgcacgccguucuccgcc

SEQ ID NO: 3923317 - RNA, 22 nt, Human adenovirus D
gcgcacguucaggacaccgggg

SEQ ID NO: 3923318 - RNA, 14 nt, Human adenovirus D
gcgcaggaggccau

SEQ ID NO: 3923319 - RNA, 16 nt, Human adenovirus D
gcgcaggcgcuggaag

SEQ ID NO: 3923320 - RNA, 19 nt, Human adenovirus D
gcgcagguggacgagcaga

SEQ ID NO: 3923321 - RNA, 20 nt, Human adenovirus D
gcgcagguggacgagcagac

SEQ ID NO: 3923322 - RNA, 16 nt, Human adenovirus D
gcgcauccccuucucc

SEQ ID NO: 3923323 - RNA, 17 nt, Human adenovirus D
gcgcauccccuucucca

SEQ ID NO: 3923324 - RNA, 20 nt, Human adenovirus D
gcgcauccccuucuccagca

SEQ ID NO: 3923325 - RNA, 20 nt, Human adenovirus D
gcgccauugucaacacggcc

SEQ ID NO: 3923326 - RNA, 18 nt, Human adenovirus D
gcgcccaccaucaccacc

SEQ ID NO: 3923327 - RNA, 11 nt, Human adenovirus D
gcgcccgcagc

SEQ ID NO: 3923328 - RNA, 15 nt, Human adenovirus D
gcgcccucagcaguc

SEQ ID NO: 3923329 - RNA, 19 nt, Human adenovirus D
gcgccgccaucgaacacgc

SEQ ID NO: 3923330 - RNA, 14 nt, Human adenovirus D
gcgccgcgccgcca

SEQ ID NO: 3923331 - RNA, 20 nt, Human adenovirus D
gcgccgcggcgacagcgcca

SEQ ID NO: 3923332 - RNA, 20 nt, Human adenovirus D
gcgccggggccgcucgcucg

SEQ ID NO: 3923333 - RNA, 15 nt, Human adenovirus D
gcgccugaggcagac

SEQ ID NO: 3923334 - RNA, 13 nt, Human adenovirus D
gcgcgaccugggc

SEQ ID NO: 3923335 - RNA, 17 nt, Human adenovirus D
gcgcgagguugagcucc

SEQ ID NO: 3923336 - RNA, 22 nt, Human adenovirus D
gcgcgaguagucaaucucccac

SEQ ID NO: 3923337 - RNA, 19 nt, Human adenovirus D
gcgcgaucccgcuguggcu

SEQ ID NO: 3923338 - RNA, 12 nt, Human adenovirus D
gcgcgcugcccg

SEQ ID NO: 3923339 - RNA, 19 nt, Human adenovirus D
gcgcgggcggacugccacc

SEQ ID NO: 3923340 - RNA, 22 nt, Human adenovirus D
gcgcgguaggcccugguccacc

SEQ ID NO: 3923341 - RNA, 23 nt, Human adenovirus D
gcgcguggaggaagugcuggaca

SEQ ID NO: 3923342 - RNA, 23 nt, Human adenovirus D
gcgcugcccguucucgcugguca

SEQ ID NO: 3923343 - RNA, 14 nt, Human adenovirus D
gcgcuggcuuggua

SEQ ID NO: 3923344 - RNA, 20 nt, Human adenovirus D
gcgcuggggcugcucggcgc

SEQ ID NO: 3923345 - RNA, 22 nt, Human adenovirus D
gcgcugguagggggcgccgccg

SEQ ID NO: 3923346 - RNA, 22 nt, Human adenovirus D
gcgcuuccaagaucaggggaug

SEQ ID NO: 3923347 - RNA, 15 nt, Human adenovirus D
gcgcuugcugggcga

SEQ ID NO: 3923348 - RNA, 18 nt, Human adenovirus D
gcgcuuggugggcagagg

SEQ ID NO: 3923349 - RNA, 15 nt, Human adenovirus D
gcggagggugccaga

SEQ ID NO: 3923350 - RNA, 21 nt, Human adenovirus D
gcggaucaccguagagggcac

SEQ ID NO: 3923351 - RNA, 16 nt, Human adenovirus D
gcggaugcuggcgcgc

SEQ ID NO: 3923352 - RNA, 20 nt, Human adenovirus D
gcggccagaugcggaggaga

SEQ ID NO: 3923353 - RNA, 21 nt, Human adenovirus D
gcggccagcgcuggguggccg

SEQ ID NO: 3923354 - RNA, 14 nt, Human adenovirus D
gcggccgcccacgg

SEQ ID NO: 3923355 - RNA, 13 nt, Human adenovirus D
gcggcguccugga

SEQ ID NO: 3923356 - RNA, 22 nt, Human adenovirus D
gcggcguggcccuuggcgcgga

SEQ ID NO: 3923357 - RNA, 21 nt, Human adenovirus D
gcggcuggaguuucacccguc

SEQ ID NO: 3923358 - RNA, 14 nt, Human adenovirus D
gcgggagcgguggg

SEQ ID NO: 3923359 - RNA, 21 nt, Human adenovirus D
gcgggccaugcgcaggcgccu

SEQ ID NO: 3923360 - RNA, 19 nt, Human adenovirus D
gcgggccucacaguccagg

SEQ ID NO: 3923361 - RNA, 20 nt, Human adenovirus D
aaccugagccaggcuuucaa

SEQ ID NO: 3923362 - RNA, 21 nt, Human adenovirus D
aaccugcgcgggcuguggggc

SEQ ID NO: 3923363 - RNA, 22 nt, Human adenovirus D
aacgagaucggcaccagccagc

SEQ ID NO: 3923364 - RNA, 13 nt, Human adenovirus D
aacgagggccugg

SEQ ID NO: 3923365 - RNA, 17 nt, Human adenovirus D
aacgagggccugggcuc

SEQ ID NO: 3923366 - RNA, 21 nt, Human adenovirus D
aacuacuggcuucuacagcca

SEQ ID NO: 3923367 - RNA, 19 nt, Human adenovirus D
aacucgugcgaggggccaa

SEQ ID NO: 3923368 - RNA, 16 nt, Human adenovirus D
aacucuguugaggcau

SEQ ID NO: 3923369 - RNA, 17 nt, Human adenovirus D
aacugaaccgcuggaag

SEQ ID NO: 3923370 - RNA, 23 nt, Human adenovirus D
aacugcgcguccgucagcagcag

SEQ ID NO: 3923371 - RNA, 13 nt, Human adenovirus D
aacuuccagcaga

SEQ ID NO: 3923372 - RNA, 13 nt, Human adenovirus D
aagaaacagaaca

SEQ ID NO: 3923373 - RNA, 21 nt, Human adenovirus D
aagaaccugcgcgggcugugg

SEQ ID NO: 3923374 - RNA, 12 nt, Human adenovirus D
aagaagaaguua

SEQ ID NO: 3923375 - RNA, 12 nt, Human adenovirus D
aagaagagcagc

SEQ ID NO: 3923376 - RNA, 16 nt, Human adenovirus D
aagaaguaugccaaga

SEQ ID NO: 3923377 - RNA, 18 nt, Human adenovirus D
aagaggagucgccggagg

SEQ ID NO: 3923378 - RNA, 13 nt, Human adenovirus D
aagauacagagua

SEQ ID NO: 3923379 - RNA, 14 nt, Human adenovirus D
aagauaucauaaag

SEQ ID NO: 3923380 - RNA, 15 nt, Human adenovirus D
aagauaucauaaaga

SEQ ID NO: 3923381 - RNA, 19 nt, Human adenovirus D
aagauggaggagcagccgc

SEQ ID NO: 3923382 - RNA, 22 nt, Human adenovirus D
aagauggauggaaaaauauuug

SEQ ID NO: 3923383 - RNA, 19 nt, Human adenovirus D
aagauguuaaagugggcgu

SEQ ID NO: 3923384 - RNA, 19 nt, Human adenovirus D
aagcaagaugauaccaaga

SEQ ID NO: 3923385 - RNA, 14 nt, Human adenovirus D
aagcagguggcgcc

SEQ ID NO: 3923386 - RNA, 14 nt, Human adenovirus D
aagcaucgcgcagg

SEQ ID NO: 3923387 - RNA, 22 nt, Human adenovirus D
aagcgcagcguugagcucaccc

SEQ ID NO: 3923388 - RNA, 18 nt, Human adenovirus D
aagcgcugguugaacaug

SEQ ID NO: 3923389 - RNA, 22 nt, Human adenovirus D
aagcguccgcuccgcagugggc

SEQ ID NO: 3923390 - RNA, 19 nt, Human adenovirus D
aagcuagcacccaaaaacu

SEQ ID NO: 3923391 - RNA, 16 nt, Human adenovirus D
aagcugaggauggcaa

SEQ ID NO: 3923392 - RNA, 14 nt, Human adenovirus D
aaggacgauaaagu

SEQ ID NO: 3923393 - RNA, 11 nt, Human adenovirus D
aaggcagcuga

SEQ ID NO: 3923394 - RNA, 19 nt, Human adenovirus D
aagggcucggucgggacga

SEQ ID NO: 3923395 - RNA, 13 nt, Human adenovirus D
aagugugguuuau

SEQ ID NO: 3923396 - RNA, 23 nt, Human adenovirus D
aaguuccugucuucuuccggcaa

SEQ ID NO: 3923397 - RNA, 19 nt, Human adenovirus D
aaguugaaaaacugggcgu

SEQ ID NO: 3923398 - RNA, 16 nt, Human adenovirus D
aaguuuaauggggugc

SEQ ID NO: 3923399 - RNA, 23 nt, Human adenovirus D
aaguuuaauggggugcuguucau

SEQ ID NO: 3923400 - RNA, 17 nt, Human adenovirus D
aaguuuuucauccagaa

SEQ ID NO: 3923401 - RNA, 19 nt, Human adenovirus D
aauaggcacugaaaauuug

SEQ ID NO: 3923402 - RNA, 18 nt, Human adenovirus D
aauauggccuggagcaga

SEQ ID NO: 3923403 - RNA, 14 nt, Human adenovirus D
aaucaauguaacua

SEQ ID NO: 3923404 - RNA, 19 nt, Human adenovirus D
aaucaauguaacuaaacuu

SEQ ID NO: 3923405 - RNA, 21 nt, Human adenovirus D
aaucacucuuuccagcagcag

SEQ ID NO: 3923406 - RNA, 23 nt, Human adenovirus D
aaucaggaugguuuacaauuuug

SEQ ID NO: 3923407 - RNA, 21 nt, Human adenovirus D
aaucuaggaggcccaucuaca

SEQ ID NO: 3923408 - RNA, 22 nt, Human adenovirus D
aaucucccaccaccagcccauu

SEQ ID NO: 3923409 - RNA, 15 nt, Human adenovirus D
aaucuuuaucugcug

SEQ ID NO: 3923410 - RNA, 19 nt, Human adenovirus D
aaugacaaacaaaagccau

SEQ ID NO: 3923411 - RNA, 17 nt, Human adenovirus D
aaugcaggauccagcgc

SEQ ID NO: 3923412 - RNA, 14 nt, Human adenovirus D
aaugcuccaaagcu

SEQ ID NO: 3923413 - RNA, 16 nt, Human adenovirus D
aaugucaggucugcug

SEQ ID NO: 3923414 - RNA, 23 nt, Human adenovirus D
aaugucuuauggugacucggcug

SEQ ID NO: 3923415 - RNA, 18 nt, Human adenovirus D
aauuggaaaaguggaaga

SEQ ID NO: 3923416 - RNA, 16 nt, Human adenovirus D
aauuggugcgcugggg

SEQ ID NO: 3923417 - RNA, 13 nt, Human adenovirus D
aauuucaagcugg

SEQ ID NO: 3923418 - RNA, 17 nt, Human adenovirus D
acaaagagcacagcagu

SEQ ID NO: 3923419 - RNA, 21 nt, Human adenovirus D
acaaccaugugcgcacccuga

SEQ ID NO: 3923420 - RNA, 22 nt, Human adenovirus D
acaacugcguguaucucaauaa

SEQ ID NO: 3923421 - RNA, 19 nt, Human adenovirus D
acaagauucaauaagguuc

SEQ ID NO: 3923422 - RNA, 16 nt, Human adenovirus D
acaaggcccugggcau

SEQ ID NO: 3923423 - RNA, 18 nt, Human adenovirus D
acaaguacacgccggcca

SEQ ID NO: 3923424 - RNA, 16 nt, Human adenovirus D
acaagucaaaagaaaa

SEQ ID NO: 3923425 - RNA, 20 nt, Human adenovirus D
acaagucggcggacaucgcu

SEQ ID NO: 3923426 - RNA, 13 nt, Human adenovirus D
acaauaaaaauua

SEQ ID NO: 3923427 - RNA, 17 nt, Human adenovirus D
acaccagacacaucucc

SEQ ID NO: 3923428 - RNA, 23 nt, Human adenovirus D
acaccgccuccacccuggaagcc

SEQ ID NO: 3923429 - RNA, 14 nt, Human adenovirus D
acaccgccuccccg

SEQ ID NO: 3923430 - RNA, 19 nt, Human adenovirus D
acaccgugaaaauggaugu

SEQ ID NO: 3923431 - RNA, 21 nt, Human adenovirus D
acaccuggaggcaccaucaca

SEQ ID NO: 3923432 - RNA, 15 nt, Human adenovirus D
acacugaaaauguca

SEQ ID NO: 3923433 - RNA, 22 nt, Human adenovirus D
acacuuaguucagcugcaauga

SEQ ID NO: 3923434 - RNA, 14 nt, Human adenovirus D
acagaacaaaaaca

SEQ ID NO: 3923435 - RNA, 13 nt, Human adenovirus D
acagaaccggagg

SEQ ID NO: 3923436 - RNA, 13 nt, Human adenovirus D
gcugguggcgcug

SEQ ID NO: 3923437 - RNA, 13 nt, Human adenovirus D
gcugguugaacau

SEQ ID NO: 3923438 - RNA, 18 nt, Human adenovirus D
gcuguaccgcgaggccau

SEQ ID NO: 3923439 - RNA, 20 nt, Human adenovirus D
gcuguauuaccuuccuugcu

SEQ ID NO: 3923440 - RNA, 12 nt, Human adenovirus D
gcugucgguguc

SEQ ID NO: 3923441 - RNA, 19 nt, Human adenovirus D
gcuguggucgacuugcaag

SEQ ID NO: 3923442 - RNA, 15 nt, Human adenovirus D
gcuguucauggccaa

SEQ ID NO: 3923443 - RNA, 14 nt, Human adenovirus D
gcuucacucuggcc

SEQ ID NO: 3923444 - RNA, 16 nt, Human adenovirus D
gcuuccguugcgcugc

SEQ ID NO: 3923445 - RNA, 21 nt, Human adenovirus D
gcuucgaguacgaggccaugc

SEQ ID NO: 3923446 - RNA, 13 nt, Human adenovirus D
gcuucuacagcca

SEQ ID NO: 3923447 - RNA, 19 nt, Human adenovirus D
gcuuggucuuucuggcuug

SEQ ID NO: 3923448 - RNA, 16 nt, Human adenovirus D
ggaaagacgguggugc

SEQ ID NO: 3923449 - RNA, 16 nt, Human adenovirus D
ggaaccccaccaugaa

SEQ ID NO: 3923450 - RNA, 17 nt, Human adenovirus D
ggaacugauaagacaca

SEQ ID NO: 3923451 - RNA, 19 nt, Human adenovirus D
ggaagaagagacagaagaa

SEQ ID NO: 3923452 - RNA, 23 nt, Human adenovirus D
ggaagcaaaguuuuucaggggcu

SEQ ID NO: 3923453 - RNA, 17 nt, Human adenovirus D
ggaagccaugcugcgca

SEQ ID NO: 3923454 - RNA, 16 nt, Human adenovirus D
ggaagggaaugcgugg

SEQ ID NO: 3923455 - RNA, 14 nt, Human adenovirus D
ggaagugcuggaca

SEQ ID NO: 3923456 - RNA, 16 nt, Human adenovirus D
ggaauguuacugcaua

SEQ ID NO: 3923457 - RNA, 15 nt, Human adenovirus D
ggacagcagcccuuc

SEQ ID NO: 3923458 - RNA, 22 nt, Human adenovirus D
ggacaucgcgaaccaggcagug

SEQ ID NO: 3923459 - RNA, 14 nt, Human adenovirus D
ggacaugcagcugc

SEQ ID NO: 3923460 - RNA, 18 nt, Human adenovirus D
ggaccaggcggcagagcg

SEQ ID NO: 3923461 - RNA, 17 nt, Human adenovirus D
ggaccccacggcauggg

SEQ ID NO: 3923462 - RNA, 18 nt, Human adenovirus D
ggacgacugggaggcugc

SEQ ID NO: 3923463 - RNA, 18 nt, Human adenovirus D
ggacgagaaccugaagga

SEQ ID NO: 3923464 - RNA, 22 nt, Human adenovirus D
ggacgcccuggccgaccggagc

SEQ ID NO: 3923465 - RNA, 19 nt, Human adenovirus D
ggacgcugcucaccacccc

SEQ ID NO: 3923466 - RNA, 16 nt, Human adenovirus D
ggacgggcgcccagug

SEQ ID NO: 3923467 - RNA, 18 nt, Human adenovirus D
ggacuucgcagccaugca

SEQ ID NO: 3923468 - RNA, 21 nt, Human adenovirus D
ggagaucacuagcgugagccg

SEQ ID NO: 3923469 - RNA, 19 nt, Human adenovirus D
ggagaugcgcgacugccgg

SEQ ID NO: 3923470 - RNA, 12 nt, Human adenovirus D
ggagcaggagga

SEQ ID NO: 3923471 - RNA, 20 nt, Human adenovirus D
ggagcaggguaaagccagca

SEQ ID NO: 3923472 - RNA, 12 nt, Human adenovirus D
ggagccacugcu

SEQ ID NO: 3923473 - RNA, 15 nt, Human adenovirus D
ggagccauagagggc

SEQ ID NO: 3923474 - RNA, 16 nt, Human adenovirus D
ggagccugaugagcuc

SEQ ID NO: 3923475 - RNA, 13 nt, Human adenovirus D
ggagcgcauccug

SEQ ID NO: 3923476 - RNA, 16 nt, Human adenovirus D
ggagcgcguaggccgc

SEQ ID NO: 3923477 - RNA, 19 nt, Human adenovirus D
caacucgcggcugcugcug

SEQ ID NO: 3923478 - RNA, 20 nt, Human adenovirus D
caacucuuaaaucauuuaaa

SEQ ID NO: 3923479 - RNA, 15 nt, Human adenovirus D
caacugcagaccggg

SEQ ID NO: 3923480 - RNA, 15 nt, Human adenovirus D
caacuuccccuaccc

SEQ ID NO: 3923481 - RNA, 17 nt, Human adenovirus D
caagaaacgucccagca

SEQ ID NO: 3923482 - RNA, 19 nt, Human adenovirus D
caagaacgagggccugggc

SEQ ID NO: 3923483 - RNA, 20 nt, Human adenovirus D
caagaagaaguuagaggagg

SEQ ID NO: 3923484 - RNA, 20 nt, Human adenovirus D
caagacgcaggccaggagga

SEQ ID NO: 3923485 - RNA, 22 nt, Human adenovirus D
caagacgcaggccaggaggaga

SEQ ID NO: 3923486 - RNA, 23 nt, Human adenovirus D
caagacgcaggccaggaggagac

SEQ ID NO: 3923487 - RNA, 18 nt, Human adenovirus D
caagcgccaacagcagcg

SEQ ID NO: 3923488 - RNA, 20 nt, Human adenovirus D
caagcuggugaugccagggg

SEQ ID NO: 3923489 - RNA, 17 nt, Human adenovirus D
caaggacuacaaggccg

SEQ ID NO: 3923490 - RNA, 14 nt, Human adenovirus D
caaggcacccacca

SEQ ID NO: 3923491 - RNA, 21 nt, Human adenovirus D
caaggccauaaaucugcccug

SEQ ID NO: 3923492 - RNA, 17 nt, Human adenovirus D
caaggccauagcgugcg

SEQ ID NO: 3923493 - RNA, 16 nt, Human adenovirus D
caaggccgugagcgcg

SEQ ID NO: 3923494 - RNA, 13 nt, Human adenovirus D
caaggcgcgcuuc

SEQ ID NO: 3923495 - RNA, 17 nt, Human adenovirus D
caagguccgcaggaguc

SEQ ID NO: 3923496 - RNA, 15 nt, Human adenovirus D
caaggucgaggagac

SEQ ID NO: 3923497 - RNA, 19 nt, Human adenovirus D
caaguaggugaagaaaacu

SEQ ID NO: 3923498 - RNA, 13 nt, Human adenovirus D
caaguccagggug

SEQ ID NO: 3923499 - RNA, 15 nt, Human adenovirus D
caagugccuuuauca

SEQ ID NO: 3923500 - RNA, 21 nt, Human adenovirus D
caauaauggaagcauuacuau

SEQ ID NO: 3923501 - RNA, 15 nt, Human adenovirus D
caaucagccccuucc

SEQ ID NO: 3923502 - RNA, 18 nt, Human adenovirus D
caaucgggcaacagggga

SEQ ID NO: 3923503 - RNA, 18 nt, Human adenovirus D
caaucucccaccaccagc

SEQ ID NO: 3923504 - RNA, 23 nt, Human adenovirus D
caaucucggcgucauugacggcg

SEQ ID NO: 3923505 - RNA, 13 nt, Human adenovirus D
caauggaaaucac

SEQ ID NO: 3923506 - RNA, 15 nt, Human adenovirus D
caaugucagcugcaa

SEQ ID NO: 3923507 - RNA, 19 nt, Human adenovirus D
caaugucaggucugcuggu

SEQ ID NO: 3923508 - RNA, 17 nt, Human adenovirus D
caauucagagccagggc

SEQ ID NO: 3923509 - RNA, 18 nt, Human adenovirus D
cacagcaguccaugccca

SEQ ID NO: 3923510 - RNA, 14 nt, Human adenovirus D
cacagccucucuga

SEQ ID NO: 3923511 - RNA, 17 nt, Human adenovirus D
cacaggaugaacaggag

SEQ ID NO: 3923512 - RNA, 13 nt, Human adenovirus D
cacaggcacacug

SEQ ID NO: 3923513 - RNA, 14 nt, Human adenovirus D
cacaggcacacuga

SEQ ID NO: 3923514 - RNA, 16 nt, Human adenovirus D
cacaggcacacugaca

SEQ ID NO: 3923515 - RNA, 14 nt, Human adenovirus D
cacagugcccccuc

SEQ ID NO: 3923516 - RNA, 14 nt, Human adenovirus D
cacauacacacuag

SEQ ID NO: 3923517 - RNA, 13 nt, Human adenovirus D
cacaucagccagg

SEQ ID NO: 3923518 - RNA, 14 nt, Human adenovirus D
cacaucagccagga

SEQ ID NO: 3923519 - RNA, 14 nt, Human adenovirus D
cacaucggacuggg

SEQ ID NO: 3923520 - RNA, 21 nt, Human adenovirus D
cacauguccccuuccuccgca

SEQ ID NO: 3923521 - RNA, 23 nt, Human adenovirus D
cacauguccccuuccuccgcauc

SEQ ID NO: 3923522 - RNA, 11 nt, Human adenovirus D
caccaaggcca

SEQ ID NO: 3923523 - RNA, 17 nt, Human adenovirus D
caccacccacgcccgcu

SEQ ID NO: 3923524 - RNA, 14 nt, Human adenovirus D
caccagacacaucu

SEQ ID NO: 3923525 - RNA, 12 nt, Human adenovirus D
caccagcccauu

SEQ ID NO: 3923526 - RNA, 21 nt, Human adenovirus D
caccauccgcgccgcagcccg

SEQ ID NO: 3923527 - RNA, 14 nt, Human adenovirus D
caccaucugagcuc

SEQ ID NO: 3923528 - RNA, 11 nt, Human adenovirus D
caccaugcgcc

SEQ ID NO: 3923529 - RNA, 12 nt, Human adenovirus D
caccccaggcgg

SEQ ID NO: 3923530 - RNA, 17 nt, Human adenovirus D
caccccccgcaggcagg

SEQ ID NO: 3923531 - RNA, 19 nt, Human adenovirus D
cacccccgccgaggcuagc

SEQ ID NO: 3923532 - RNA, 19 nt, Human adenovirus D
cacccggacguggugcugc

SEQ ID NO: 3923533 - RNA, 21 nt, Human adenovirus D
cacccggacguggugcugcug

SEQ ID NO: 3923534 - RNA, 23 nt, Human adenovirus D
cacccgguacuacgccagccgca

SEQ ID NO: 3923535 - RNA, 22 nt, Human adenovirus D
cacccguaaaugacucuccuga

SEQ ID NO: 3923536 - RNA, 13 nt, Human adenovirus D
cacccucaggcgc

SEQ ID NO: 3923537 - RNA, 14 nt, Human adenovirus D
cacccucaggcgca

SEQ ID NO: 3923538 - RNA, 15 nt, Human adenovirus D
cacccugcccuucca

SEQ ID NO: 3923539 - RNA, 18 nt, Human adenovirus D
cacccugcccuuccagca

SEQ ID NO: 3923540 - RNA, 15 nt, Human adenovirus D
cacccuggggcuccu

SEQ ID NO: 3923541 - RNA, 16 nt, Human adenovirus D
caccgaccuugcaaaa

SEQ ID NO: 3923542 - RNA, 14 nt, Human adenovirus D
caccgagccuccca

SEQ ID NO: 3923543 - RNA, 16 nt, Human adenovirus D
caccgagccucccagg

SEQ ID NO: 3923544 - RNA, 15 nt, Human adenovirus D
caccgcgaccgcggc

SEQ ID NO: 3923545 - RNA, 16 nt, Human adenovirus D
caccgcuaccgcuucc

SEQ ID NO: 3923546 - RNA, 16 nt, Human adenovirus D
caccgcuccuggucug

SEQ ID NO: 3923547 - RNA, 20 nt, Human adenovirus D
caccgugcgcuaccacccca

SEQ ID NO: 3923548 - RNA, 21 nt, Human adenovirus D
caccguuccaugcagacacuu

SEQ ID NO: 3923549 - RNA, 17 nt, Human adenovirus D
caccucggugcagccgu

SEQ ID NO: 3923550 - RNA, 19 nt, Human adenovirus D
caccugcagcgccaguccc

SEQ ID NO: 3923551 - RNA, 15 nt, Human adenovirus D
caccuuacacugacg

SEQ ID NO: 3923552 - RNA, 14 nt, Human adenovirus D
caccuuccugcagc

SEQ ID NO: 3923553 - RNA, 19 nt, Human adenovirus D
cacgaucccgggcauagcu

SEQ ID NO: 3923554 - RNA, 12 nt, Human adenovirus D
cacgcccugggu

SEQ ID NO: 3923555 - RNA, 14 nt, Human adenovirus D
cacggccagcaggg

SEQ ID NO: 3923556 - RNA, 20 nt, Human adenovirus D
cacgguaagagcccagcaug

SEQ ID NO: 3923557 - RNA, 21 nt, Human adenovirus D
cacggucaccgagccucccag

SEQ ID NO: 3923558 - RNA, 16 nt, Human adenovirus D
cacguacuucagccug

SEQ ID NO: 3923559 - RNA, 23 nt, Human adenovirus D
cacguacuuugacauccgcggcg

SEQ ID NO: 3923560 - RNA, 24 nt, Human adenovirus D
cacuagaaagcaguucacuagccu

SEQ ID NO: 3923561 - RNA, 21 nt, Human adenovirus D
cacucacuuuuaggugaagca

SEQ ID NO: 3923562 - RNA, 21 nt, Human adenovirus D
cacucccgucucgacccgagc

SEQ ID NO: 3923563 - RNA, 22 nt, Human adenovirus D
cacuccuaaaaccggaggugag

SEQ ID NO: 3923564 - RNA, 17 nt, Human adenovirus D
cacugcauggccucgug

SEQ ID NO: 3923565 - RNA, 18 nt, Human adenovirus D
cacugccgccgccugcgc

SEQ ID NO: 3923566 - RNA, 20 nt, Human adenovirus D
cacugccgccgccugcgcug

SEQ ID NO: 3923567 - RNA, 16 nt, Human adenovirus D
cacugcuccugcgaaa

SEQ ID NO: 3923568 - RNA, 17 nt, Human adenovirus D
cacuggcuuccgccgcc

SEQ ID NO: 3923569 - RNA, 16 nt, Human adenovirus D
cacuuaaguccugggc

SEQ ID NO: 3923570 - RNA, 17 nt, Human adenovirus D
cacuucgccuaccccgc

SEQ ID NO: 3923571 - RNA, 17 nt, Human adenovirus D
cacuugagcuggccuuc

SEQ ID NO: 3923572 - RNA, 20 nt, Human adenovirus D
cacuuucauaaucaggcaga

SEQ ID NO: 3923573 - RNA, 11 nt, Human adenovirus D
cagaaagaaau

SEQ ID NO: 3923574 - RNA, 14 nt, Human adenovirus D
cagaacuggcagag

SEQ ID NO: 3923575 - RNA, 17 nt, Human adenovirus D
cagaauauccccuuccu

SEQ ID NO: 3923576 - RNA, 22 nt, Human adenovirus D
cagaaucaaaucgccaagggca

SEQ ID NO: 3923577 - RNA, 18 nt, Human adenovirus D
cagaauucaaccacaccu

SEQ ID NO: 3923578 - RNA, 15 nt, Human adenovirus D
cagacaaacauccau

SEQ ID NO: 3923579 - RNA, 16 nt, Human adenovirus D
cagacacaucuccuaa

SEQ ID NO: 3923580 - RNA, 17 nt, Human adenovirus D
cagacacaucuccuaau

SEQ ID NO: 3923581 - RNA, 19 nt, Human adenovirus D
cagacagccaggucaaaac

SEQ ID NO: 3923582 - RNA, 15 nt, Human adenovirus D
cagaccaccugguga

SEQ ID NO: 3923583 - RNA, 16 nt, Human adenovirus D
cagacgcaagagccgg

SEQ ID NO: 3923584 - RNA, 17 nt, Human adenovirus D
cagacucugcucauacu

SEQ ID NO: 3923585 - RNA, 22 nt, Human adenovirus D
cagacucugcucauacugcuau

SEQ ID NO: 3923586 - RNA, 22 nt, Human adenovirus D
cagagcucuuaagaaagacaca

SEQ ID NO: 3923587 - RNA, 19 nt, Human adenovirus D
cagaggauggucaucaccc

SEQ ID NO: 3923588 - RNA, 13 nt, Human adenovirus D
cagaguaagagga

SEQ ID NO: 3923589 - RNA, 15 nt, Human adenovirus D
cagaucauggugccc

SEQ ID NO: 3923590 - RNA, 15 nt, Human adenovirus D
cagauuuaagcaagg

SEQ ID NO: 3923591 - RNA, 15 nt, Human adenovirus D
cagcaacccuuccug

SEQ ID NO: 3923592 - RNA, 17 nt, Human adenovirus D
cugcugaaacaccugca

SEQ ID NO: 3923593 - RNA, 22 nt, Human adenovirus D
cugcugaaacaccugcagcgcc

SEQ ID NO: 3923594 - RNA, 14 nt, Human adenovirus D
cugcugccgcucag

SEQ ID NO: 3923595 - RNA, 20 nt, Human adenovirus D
cugcugccgcucagucaucc

SEQ ID NO: 3923596 - RNA, 15 nt, Human adenovirus D
cugcugccgggcugc

SEQ ID NO: 3923597 - RNA, 16 nt, Human adenovirus D
cugcuggcccacggcc

SEQ ID NO: 3923598 - RNA, 15 nt, Human adenovirus D
cugcuguaaagccag

SEQ ID NO: 3923599 - RNA, 15 nt, Human adenovirus D
cugcuucgcccggga

SEQ ID NO: 3923600 - RNA, 14 nt, Human adenovirus D
cugcuucugccugg

SEQ ID NO: 3923601 - RNA, 16 nt, Human adenovirus D
cugcuucugccuggug

SEQ ID NO: 3923602 - RNA, 21 nt, Human adenovirus D
cuggaagccaugcugcgcaac

SEQ ID NO: 3923603 - RNA, 23 nt, Human adenovirus D
cuggacuucgcagccaugcaccu

SEQ ID NO: 3923604 - RNA, 19 nt, Human adenovirus D
cuggaucgaaaucaaaauc

SEQ ID NO: 3923605 - RNA, 20 nt, Human adenovirus D
cuggaugauguccuugagga

SEQ ID NO: 3923606 - RNA, 17 nt, Human adenovirus D
cuggcagagcacgcugc

SEQ ID NO: 3923607 - RNA, 16 nt, Human adenovirus D
cuggccagcacgcucu

SEQ ID NO: 3923608 - RNA, 12 nt, Human adenovirus D
cuggcccgaccg

SEQ ID NO: 3923609 - RNA, 15 nt, Human adenovirus D
cuggccgugggcgac

SEQ ID NO: 3923610 - RNA, 18 nt, Human adenovirus D
cuggccgugguccugguc

SEQ ID NO: 3923611 - RNA, 16 nt, Human adenovirus D
cuggccucgagcuaca

SEQ ID NO: 3923612 - RNA, 19 nt, Human adenovirus D
cuggcgaaagauggcgugc

SEQ ID NO: 3923613 - RNA, 15 nt, Human adenovirus D
cuggcgacgcagccg

SEQ ID NO: 3923614 - RNA, 22 nt, Human adenovirus D
cuggcgaucgugaacgcgcugg

SEQ ID NO: 3923615 - RNA, 20 nt, Human adenovirus D
cuggcgguagagcggccagc

SEQ ID NO: 3923616 - RNA, 15 nt, Human adenovirus D
cuggcugcuggagcu

SEQ ID NO: 3923617 - RNA, 16 nt, Human adenovirus D
cuggcugcuggagcug

SEQ ID NO: 3923618 - RNA, 17 nt, Human adenovirus D
cuggcuucuacagccag

SEQ ID NO: 3923619 - RNA, 16 nt, Human adenovirus D
cugggagggaugcaug

SEQ ID NO: 3923620 - RNA, 17 nt, Human adenovirus D
cugggcucgagcauggc

SEQ ID NO: 3923621 - RNA, 17 nt, Human adenovirus D
cugggcucgcugguggc

SEQ ID NO: 3923622 - RNA, 19 nt, Human adenovirus D
cugggugacagaaccagau

SEQ ID NO: 3923623 - RNA, 17 nt, Human adenovirus D
cugguacuugggcugcc

SEQ ID NO: 3923624 - RNA, 20 nt, Human adenovirus D
cuggucaguugcaccacgcu

SEQ ID NO: 3923625 - RNA, 17 nt, Human adenovirus D
cuggugaagggcacagc

SEQ ID NO: 3923626 - RNA, 15 nt, Human adenovirus D
cuggugcgucgagca

SEQ ID NO: 3923627 - RNA, 21 nt, Human adenovirus D
ccggcgcaguacgcgcugucg

SEQ ID NO: 3923628 - RNA, 20 nt, Human adenovirus D
ccggcggcgcgagcugagcg

SEQ ID NO: 3923629 - RNA, 12 nt, Human adenovirus D
ccggcugaugcc

SEQ ID NO: 3923630 - RNA, 17 nt, Human adenovirus D
ccgggacgcccuggccg

SEQ ID NO: 3923631 - RNA, 15 nt, Human adenovirus D
ccggggcggggguga

SEQ ID NO: 3923632 - RNA, 22 nt, Human adenovirus D
ccggggguucauguugugcagg

SEQ ID NO: 3923633 - RNA, 18 nt, Human adenovirus D
ccggucucugcgcucgcu

SEQ ID NO: 3923634 - RNA, 23 nt, Human adenovirus D
ccgguggcgaccgccgugcgccg

SEQ ID NO: 3923635 - RNA, 19 nt, Human adenovirus D
ccguaucgugcugcucucu

SEQ ID NO: 3923636 - RNA, 14 nt, Human adenovirus D
ccgucagcagcagg

SEQ ID NO: 3923637 - RNA, 16 nt, Human adenovirus D
ccgucagcagcaggag

SEQ ID NO: 3923638 - RNA, 14 nt, Human adenovirus D
ccguccuugccuuc

SEQ ID NO: 3923639 - RNA, 15 nt, Human adenovirus D
ccgucggccaugggc

SEQ ID NO: 3923640 - RNA, 22 nt, Human adenovirus D
ccgugagcucgucuuccaggag

SEQ ID NO: 3923641 - RNA, 21 nt, Human adenovirus D
ccgugcgcuaccaccccagca

SEQ ID NO: 3923642 - RNA, 17 nt, Human adenovirus D
ccgugcucaagcgcagc

SEQ ID NO: 3923643 - RNA, 23 nt, Human adenovirus D
ccguggcuucgagcaguggcucu

SEQ ID NO: 3923644 - RNA, 15 nt, Human adenovirus D
ccguucuacccagca

SEQ ID NO: 3923645 - RNA, 17 nt, Human adenovirus D
ccguucuccgccggaaa

SEQ ID NO: 3923646 - RNA, 17 nt, Human adenovirus D
ccuacaucaacauaggc

SEQ ID NO: 3923647 - RNA, 16 nt, Human adenovirus D
ccuacucgggcacggc

SEQ ID NO: 3923648 - RNA, 19 nt, Human adenovirus D
ccuagcauguacgccgcca

SEQ ID NO: 3923649 - RNA, 21 nt, Human adenovirus D
ccuaggggaagauggaggagc

SEQ ID NO: 3923650 - RNA, 15 nt, Human adenovirus D
ccucacucucuuccg

SEQ ID NO: 3923651 - RNA, 17 nt, Human adenovirus D
ccucaggcgcaaccagg

SEQ ID NO: 3923652 - RNA, 20 nt, Human adenovirus D
ccucaucacaucagccagga

SEQ ID NO: 3923653 - RNA, 11 nt, Human adenovirus D
ccuccacccug

SEQ ID NO: 3923654 - RNA, 19 nt, Human adenovirus D
ccucccgcccgacacugca

SEQ ID NO: 3923655 - RNA, 18 nt, Human adenovirus D
ccuccgguggcgaccgcc

SEQ ID NO: 3923656 - RNA, 18 nt, Human adenovirus D
ccuccgucggaagaggag

SEQ ID NO: 3923657 - RNA, 21 nt, Human adenovirus D
ccuccuguuacuguaaagcca

SEQ ID NO: 3923658 - RNA, 18 nt, Human adenovirus D
ccucgaggacggagaggc

SEQ ID NO: 3923659 - RNA, 23 nt, Human adenovirus D
ccucgaugaaagucaggagcagc

SEQ ID NO: 3923660 - RNA, 13 nt, Human adenovirus D
ccucggcggcgug

SEQ ID NO: 3923661 - RNA, 14 nt, Human adenovirus D
ccucggucagcugg

SEQ ID NO: 3923662 - RNA, 19 nt, Human adenovirus D
ccucgucauccuuccagua

SEQ ID NO: 3923663 - RNA, 15 nt, Human adenovirus D
ccucguccucuuccu

SEQ ID NO: 3923664 - RNA, 16 nt, Human adenovirus D
ccucguccucuuccuc

SEQ ID NO: 3923665 - RNA, 20 nt, Human adenovirus D
ccucguuucggggguuggga

SEQ ID NO: 3923666 - RNA, 16 nt, Human adenovirus D
ccucuacgccaccuuc

SEQ ID NO: 3923667 - RNA, 14 nt, Human adenovirus D
ccucucggccgcca

SEQ ID NO: 3923668 - RNA, 11 nt, Human adenovirus D
ccucugcaucu

SEQ ID NO: 3923669 - RNA, 16 nt, Human adenovirus D
ccucugcaucugauga

SEQ ID NO: 3923670 - RNA, 16 nt, Human adenovirus D
ccucugccguccgccc

SEQ ID NO: 3923671 - RNA, 21 nt, Human adenovirus D
ccucugccguccgcccgcgcc

SEQ ID NO: 3923672 - RNA, 18 nt, Human adenovirus D
ccucuugcagcuggccaa

SEQ ID NO: 3923673 - RNA, 20 nt, Human adenovirus D
ccucuuugcccugcucaccu

SEQ ID NO: 3923674 - RNA, 15 nt, Human adenovirus D
ccugaaccgccgccg

SEQ ID NO: 3923675 - RNA, 22 nt, Human adenovirus D
ccugaagaacauccaugugacc

SEQ ID NO: 3923676 - RNA, 14 nt, Human adenovirus D
ccugaaggagcugg

SEQ ID NO: 3923677 - RNA, 14 nt, Human adenovirus D
ccugacgagccaaa

SEQ ID NO: 3923678 - RNA, 17 nt, Human adenovirus D
ccugauauugcuucccu

SEQ ID NO: 3923679 - RNA, 19 nt, Human adenovirus D
ccugaucucugccauguuc

SEQ ID NO: 3923680 - RNA, 16 nt, Human adenovirus D
ccugcacgcagcagcg

SEQ ID NO: 3923681 - RNA, 12 nt, Human adenovirus D
ccugcagcccaa

SEQ ID NO: 3923682 - RNA, 18 nt, Human adenovirus D
ccugcaggggcgucccgc

SEQ ID NO: 3923683 - RNA, 15 nt, Human adenovirus D
ccugcauuggcagcc

SEQ ID NO: 3923684 - RNA, 12 nt, Human adenovirus D
ccugcccuucca

SEQ ID NO: 3923685 - RNA, 21 nt, Human adenovirus D
ccugcgcgagguugagcucca

SEQ ID NO: 3923686 - RNA, 16 nt, Human adenovirus D
ccugcgcgggcugugg

SEQ ID NO: 3923687 - RNA, 14 nt, Human adenovirus D
ccugcgcugcuucg

SEQ ID NO: 3923688 - RNA, 17 nt, Human adenovirus D
ccugcucaccugcaccu

SEQ ID NO: 3923689 - RNA, 18 nt, Human adenovirus D
ccugcucaccugcaccug

SEQ ID NO: 3923690 - RNA, 14 nt, Human adenovirus D
ccugcuggagcgcg

SEQ ID NO: 3923691 - RNA, 22 nt, Human adenovirus D
ccugcuggagcgcguaggccgc

SEQ ID NO: 3923692 - RNA, 18 nt, Human adenovirus D
ccugcuggccgagcugga

SEQ ID NO: 3923693 - RNA, 13 nt, Human adenovirus D
ccuggagcagcgg

SEQ ID NO: 3923694 - RNA, 20 nt, Human adenovirus D
ccuggaucuugagguuggcg

SEQ ID NO: 3923695 - RNA, 15 nt, Human adenovirus D
ccuggcucccagccu

SEQ ID NO: 3923696 - RNA, 15 nt, Human adenovirus D
ccuggcuccgcggca

SEQ ID NO: 3923697 - RNA, 17 nt, Human adenovirus D
ccuggcuccgcggcacg

SEQ ID NO: 3923698 - RNA, 21 nt, Human adenovirus D
ccugggagucucuaccgaggg

SEQ ID NO: 3923699 - RNA, 17 nt, Human adenovirus D
ccuggucaucaccuucc

SEQ ID NO: 3923700 - RNA, 15 nt, Human adenovirus D
ccuggucgagcggga

SEQ ID NO: 3923701 - RNA, 19 nt, Human adenovirus D
ccuggugauacgaggcaga

SEQ ID NO: 3923702 - RNA, 21 nt, Human adenovirus D
ccuggugcgucgagcacagca

SEQ ID NO: 3923703 - RNA, 21 nt, Human adenovirus D
ccugugacaugcaaaaucuua

SEQ ID NO: 3923704 - RNA, 17 nt, Human adenovirus D
ccuucaccgaccugggu

SEQ ID NO: 3923705 - RNA, 15 nt, Human adenovirus D
ccuucggcuggaacc

SEQ ID NO: 3923706 - RNA, 20 nt, Human adenovirus D
ccuucuuccgcaacuuccag

SEQ ID NO: 3923707 - RNA, 15 nt, Human adenovirus D
ccuugaccugccucc

SEQ ID NO: 3923708 - RNA, 18 nt, Human adenovirus D
ugggccacuacagcugac

SEQ ID NO: 3923709 - RNA, 23 nt, Human adenovirus D
ugggcugcggcuuuggcaaagac

SEQ ID NO: 3923710 - RNA, 21 nt, Human adenovirus D
ugggguacuuuacgcuggcca

SEQ ID NO: 3923711 - RNA, 15 nt, Human adenovirus D
uggggucucggggaa

SEQ ID NO: 3923712 - RNA, 21 nt, Human adenovirus D
uggggugcuguucauggccaa

SEQ ID NO: 3923713 - RNA, 24 nt, Human adenovirus D
ugguagggggcgccgccggcggcg

SEQ ID NO: 3923714 - RNA, 18 nt, Human adenovirus D
uggucagcgaugagcagc

SEQ ID NO: 3923715 - RNA, 22 nt, Human adenovirus D
uggucgagcgggaccggggagg

SEQ ID NO: 3923716 - RNA, 17 nt, Human adenovirus D
uggucggcacggucugg

SEQ ID NO: 3923717 - RNA, 13 nt, Human adenovirus D
uggugauggccug

SEQ ID NO: 3923718 - RNA, 11 nt, Human adenovirus D
uggugcccaag

SEQ ID NO: 3923719 - RNA, 19 nt, Human adenovirus D
ugguggcgcgcaccucgcg

SEQ ID NO: 3923720 - RNA, 14 nt, Human adenovirus D
uguaaauaagucac

SEQ ID NO: 3923721 - RNA, 16 nt, Human adenovirus D
uguaaccuugcaagag

SEQ ID NO: 3923722 - RNA, 18 nt, Human adenovirus D
uguaagugugacaaucaa

SEQ ID NO: 3923723 - RNA, 13 nt, Human adenovirus D
uguacacugaaaa

SEQ ID NO: 3923724 - RNA, 14 nt, Human adenovirus D
uguacuuugucugc

SEQ ID NO: 3923725 - RNA, 18 nt, Human adenovirus D
uguagagggaaccuacca

SEQ ID NO: 3923726 - RNA, 20 nt, Human adenovirus D
uguaggccauccccauccag

SEQ ID NO: 3923727 - RNA, 17 nt, Human adenovirus D
ugucaaagcgcaucuac

SEQ ID NO: 3923728 - RNA, 23 nt, Human adenovirus D
ugucacuagaggugguaaaauua

SEQ ID NO: 3923729 - RNA, 16 nt, Human adenovirus D
ugucaggucugcuggu

SEQ ID NO: 3923730 - RNA, 18 nt, Human adenovirus D
uguccagauccucggcgu

SEQ ID NO: 3923731 - RNA, 19 nt, Human adenovirus D
ugucgccgauggccuccag

SEQ ID NO: 3923732 - RNA, 19 nt, Human adenovirus D
ugucuucccucucagaugu

SEQ ID NO: 3923733 - RNA, 23 nt, Human adenovirus D
ugugcaaugucaggucugcuggu

SEQ ID NO: 3923734 - RNA, 16 nt, Human adenovirus D
ugugcaguuuggccug

SEQ ID NO: 3923735 - RNA, 14 nt, Human adenovirus D
ugugcccgcccagg

SEQ ID NO: 3923736 - RNA, 19 nt, Human adenovirus D
ugugggaccuggcggaggc

SEQ ID NO: 3923737 - RNA, 16 nt, Human adenovirus D
ugugguuuaugacuca

SEQ ID NO: 3923738 - RNA, 22 nt, Human adenovirus D
uguuauugagcccaucaagcaa

SEQ ID NO: 3923739 - RNA, 15 nt, Human adenovirus D
uguucagcagcaccu

SEQ ID NO: 3923740 - RNA, 13 nt, Human adenovirus D
uguugcagagaga

SEQ ID NO: 3923741 - RNA, 14 nt, Human adenovirus D
uguuuauaaaucuu

SEQ ID NO: 3923742 - RNA, 20 nt, Human adenovirus D
uuaaaaaccaaaaaaaacaa

SEQ ID NO: 3923743 - RNA, 16 nt, Human adenovirus D
uuaaaggcuggcccuc

SEQ ID NO: 3923744 - RNA, 22 nt, Human adenovirus D
uuaacauccucuucugucucuu

SEQ ID NO: 3923745 - RNA, 21 nt, Human adenovirus D
uuacaccgcgucgcugaaagc

SEQ ID NO: 3923746 - RNA, 22 nt, Human adenovirus D
uuauaaucgccagggaacugaa

SEQ ID NO: 3923747 - RNA, 21 nt, Human adenovirus D
uucaaggccauaaaucugccc

SEQ ID NO: 3923748 - RNA, 15 nt, Human adenovirus D
uucauugucuucccu

SEQ ID NO: 3923749 - RNA, 13 nt, Human adenovirus D
uuccaaaaucaga

SEQ ID NO: 3923750 - RNA, 16 nt, Human adenovirus D
uuccagacgcggcugu

SEQ ID NO: 3923751 - RNA, 22 nt, Human adenovirus D
uuccccaccuacuccucuuugc

SEQ ID NO: 3923752 - RNA, 19 nt, Human adenovirus D
uucccuggaagagugccca

SEQ ID NO: 3923753 - RNA, 16 nt, Human adenovirus D
uuccggcaaaaaucac

SEQ ID NO: 3923754 - RNA, 17 nt, Human adenovirus D
uucgagacgucccagag

SEQ ID NO: 3923755 - RNA, 20 nt, Human adenovirus D
uucucuuacugaaacucagu

SEQ ID NO: 3923756 - RNA, 22 nt, Human adenovirus D
uucuggagaaguuccucugcau

SEQ ID NO: 3923757 - RNA, 12 nt, Human adenovirus D
uugaaaaaauug

SEQ ID NO: 3923758 - RNA, 15 nt, Human adenovirus D
uugaaaaggcagcug

SEQ ID NO: 3923759 - RNA, 15 nt, Human adenovirus D
uugaaaccacuuccu

SEQ ID NO: 3923760 - RNA, 22 nt, Human adenovirus D
uugaagucaugugugauaucac

SEQ ID NO: 3923761 - RNA, 19 nt, Human adenovirus D
uugaauuuguauggaauaa

SEQ ID NO: 3923762 - RNA, 18 nt, Human adenovirus D
uugagaauaacaugcuga

SEQ ID NO: 3923763 - RNA, 17 nt, Human adenovirus D
uugagcccaucaagcaa

SEQ ID NO: 3923764 - RNA, 15 nt, Human adenovirus D
uugaggcauucacau

SEQ ID NO: 3923765 - RNA, 22 nt, Human adenovirus D
uugaugcgcuucuuaccucgcg

SEQ ID NO: 3923766 - RNA, 12 nt, Human adenovirus D
uugauuggccug

SEQ ID NO: 3923767 - RNA, 13 nt, Human adenovirus D
uugcaaggcagaa

SEQ ID NO: 3923768 - RNA, 13 nt, Human adenovirus D
uugcccgcgccac

SEQ ID NO: 3923769 - RNA, 16 nt, Human adenovirus D
uuguagugucagaugg

SEQ ID NO: 3923770 - RNA, 19 nt, Human adenovirus D
uuuaaaaccucauuugcau

SEQ ID NO: 3923771 - RNA, 14 nt, Human adenovirus D
uuuaauuggcaaac

SEQ ID NO: 3923772 - RNA, 16 nt, Human adenovirus D
uuuacaugcacuggag

SEQ ID NO: 3923773 - RNA, 20 nt, Human adenovirus D
uuuagugggaccucagauau

SEQ ID NO: 3923774 - RNA, 23 nt, Human adenovirus D
uuucgggcgggcagggagcugcg

SEQ ID NO: 3923775 - RNA, 15 nt, Human adenovirus D
gaauugguauaagug

SEQ ID NO: 3923776 - RNA, 18 nt, Human adenovirus D
gaauuugaaaccacuucc

SEQ ID NO: 3923777 - RNA, 16 nt, Human adenovirus D
gacaaacaaaagccau

SEQ ID NO: 3923778 - RNA, 14 nt, Human adenovirus D
gacaaagagcacag

SEQ ID NO: 3923779 - RNA, 17 nt, Human adenovirus D
gacaaagagcacagcag

SEQ ID NO: 3923780 - RNA, 14 nt, Human adenovirus D
gacaacagccgcag

SEQ ID NO: 3923781 - RNA, 12 nt, Human adenovirus D
gacaacgccagg

SEQ ID NO: 3923782 - RNA, 14 nt, Human adenovirus D
gacaagcuggccug

SEQ ID NO: 3923783 - RNA, 12 nt, Human adenovirus D
gacaaugaugga

SEQ ID NO: 3923784 - RNA, 15 nt, Human adenovirus D
gacacaccuggaggc

SEQ ID NO: 3923785 - RNA, 13 nt, Human adenovirus D
gacacccccgcgu

SEQ ID NO: 3923786 - RNA, 20 nt, Human adenovirus D
gacacguacuucagccuggg

SEQ ID NO: 3923787 - RNA, 17 nt, Human adenovirus D
gacagagauggacuugg

SEQ ID NO: 3923788 - RNA, 23 nt, Human adenovirus D
gacagagauggacuuggaagagg

SEQ ID NO: 3923789 - RNA, 21 nt, Human adenovirus D
gacagcgacgagacuggccuc

SEQ ID NO: 3923790 - RNA, 15 nt, Human adenovirus D
gacagcguuccccuc

SEQ ID NO: 3923791 - RNA, 21 nt, Human adenovirus D
gacauccuggaccaggcggca

SEQ ID NO: 3923792 - RNA, 23 nt, Human adenovirus D
gacaucgcgaaccaggcagugca

SEQ ID NO: 3923793 - RNA, 13 nt, Human adenovirus D
gacauggccagca

SEQ ID NO: 3923794 - RNA, 17 nt, Human adenovirus D
gaccaggcggcagagcg

SEQ ID NO: 3923795 - RNA, 20 nt, Human adenovirus D
gaccagguccacgcuggugg

SEQ ID NO: 3923796 - RNA, 22 nt, Human adenovirus D
gaccaugacuuucaagaacugg

SEQ ID NO: 3923797 - RNA, 22 nt, Human adenovirus D
gaccaugcagaucauggugccc

SEQ ID NO: 3923798 - RNA, 15 nt, Human adenovirus D
gaccauucugcacac

SEQ ID NO: 3923799 - RNA, 13 nt, Human adenovirus D
gacccacagccag

SEQ ID NO: 3923800 - RNA, 18 nt, Human adenovirus D
gacccaggaauggcacgc

SEQ ID NO: 3923801 - RNA, 15 nt, Human adenovirus D
gaccccauggacaac

SEQ ID NO: 3923802 - RNA, 12 nt, Human adenovirus D
gacccccaggcc

SEQ ID NO: 3923803 - RNA, 20 nt, Human adenovirus D
ugagcucgucuuccaggagc

SEQ ID NO: 3923804 - RNA, 22 nt, Human adenovirus D
ugagcucuuaccaaguccaggg

SEQ ID NO: 3923805 - RNA, 12 nt, Human adenovirus D
ugagcugggagg

SEQ ID NO: 3923806 - RNA, 17 nt, Human adenovirus D
ugaggaucauaucccag

SEQ ID NO: 3923807 - RNA, 14 nt, Human adenovirus D
ugagggccucggcg

SEQ ID NO: 3923808 - RNA, 15 nt, Human adenovirus D
ugaggguguccugga

SEQ ID NO: 3923809 - RNA, 19 nt, Human adenovirus D
ugagguccucggggcauug

SEQ ID NO: 3923810 - RNA, 18 nt, Human adenovirus D
ugaguccgucggccaugg

SEQ ID NO: 3923811 - RNA, 13 nt, Human adenovirus D
ugauaaagcgugg

SEQ ID NO: 3923812 - RNA, 13 nt, Human adenovirus D
ugaugcaggaggg

SEQ ID NO: 3923813 - RNA, 23 nt, Human adenovirus D
ugaugcaggauaaauauggccug

SEQ ID NO: 3923814 - RNA, 18 nt, Human adenovirus D
ugauggauguguggacua

SEQ ID NO: 3923815 - RNA, 14 nt, Human adenovirus D
ugauuaaaaaccaa

SEQ ID NO: 3923816 - RNA, 18 nt, Human adenovirus D
ugauucaguacuuagaag

SEQ ID NO: 3923817 - RNA, 13 nt, Human adenovirus D
ugauuccacauau

SEQ ID NO: 3923818 - RNA, 15 nt, Human adenovirus D
ugauugcucuggccu

SEQ ID NO: 3923819 - RNA, 14 nt, Human adenovirus D
ugcaaaaagucacu

SEQ ID NO: 3923820 - RNA, 14 nt, Human adenovirus D
ugcaaacaauaaaa

SEQ ID NO: 3923821 - RNA, 14 nt, Human adenovirus D
ugcaaccugugcuc

SEQ ID NO: 3923822 - RNA, 23 nt, Human adenovirus D
ugcaacugcgcguccgucagcag

SEQ ID NO: 3923823 - RNA, 15 nt, Human adenovirus D
ugcaagucacgcagg

SEQ ID NO: 3923824 - RNA, 20 nt, Human adenovirus D
ugcaaugucaggucugcugg

SEQ ID NO: 3923825 - RNA, 23 nt, Human adenovirus D
ugcacaguagucaucaaaugcga

SEQ ID NO: 3923826 - RNA, 18 nt, Human adenovirus D
ugcaccauccccagguaa

SEQ ID NO: 3923827 - RNA, 12 nt, Human adenovirus D
ugcacccaccau

SEQ ID NO: 3923828 - RNA, 23 nt, Human adenovirus D
ugcacccaccaugcgccaagggc

SEQ ID NO: 3923829 - RNA, 21 nt, Human adenovirus D
ugcagaacaacgauuucaccc

SEQ ID NO: 3923830 - RNA, 20 nt, Human adenovirus D
ugcagacacuugagcuggcc

SEQ ID NO: 3923831 - RNA, 18 nt, Human adenovirus D
ugcagccaguggcccugg

SEQ ID NO: 3923832 - RNA, 16 nt, Human adenovirus D
ugcagcccccuccggu

SEQ ID NO: 3923833 - RNA, 23 nt, Human adenovirus D
ugcagccgccgcgggucaagaac

SEQ ID NO: 3923834 - RNA, 20 nt, Human adenovirus D
ugcaggauaaauauggccug

SEQ ID NO: 3923835 - RNA, 17 nt, Human adenovirus D
ugcagggagccagggga

SEQ ID NO: 3923836 - RNA, 20 nt, Human adenovirus D
ugcagucguggacgcugcuc

SEQ ID NO: 3923837 - RNA, 15 nt, Human adenovirus D
ugcaguuuggccugg

SEQ ID NO: 3923838 - RNA, 16 nt, Human adenovirus D
ugcaugagaauuuuug

SEQ ID NO: 3923839 - RNA, 19 nt, Human adenovirus D
ugccaccaguuggacgagu

SEQ ID NO: 3923840 - RNA, 14 nt, Human adenovirus D
ugcccaacaggccu

SEQ ID NO: 3923841 - RNA, 15 nt, Human adenovirus D
ugcccagcagcagca

SEQ ID NO: 3923842 - RNA, 21 nt, Human adenovirus D
ugcccagcagcagcaguagcc

SEQ ID NO: 3923843 - RNA, 13 nt, Human adenovirus D
ugcccccaagggc

SEQ ID NO: 3923844 - RNA, 21 nt, Human adenovirus D
ugcccgacgauguagaguucc

SEQ ID NO: 3923845 - RNA, 15 nt, Human adenovirus D
ugcccucgcuacugc

SEQ ID NO: 3923846 - RNA, 14 nt, Human adenovirus D
ugcccuuacaugua

SEQ ID NO: 3923847 - RNA, 20 nt, Human adenovirus D
ugccggcgacaagcuggccu

SEQ ID NO: 3923848 - RNA, 12 nt, Human adenovirus D
ugccgggacaga

SEQ ID NO: 3923849 - RNA, 16 nt, Human adenovirus D
ugccgucgucccggag

SEQ ID NO: 3923850 - RNA, 18 nt, Human adenovirus D
ugccuucgugcacuggcc

SEQ ID NO: 3923851 - RNA, 15 nt, Human adenovirus D
ugcgagaaggcgccc

SEQ ID NO: 3923852 - RNA, 22 nt, Human adenovirus D
ugcgagaaggcgcccaggccgc

SEQ ID NO: 3923853 - RNA, 17 nt, Human adenovirus D
ugcgagccgcgcgccgc

SEQ ID NO: 3923854 - RNA, 18 nt, Human adenovirus D
ugcgagccgcgcgccgcg

SEQ ID NO: 3923855 - RNA, 15 nt, Human adenovirus D
ugcgaguuggaggag

SEQ ID NO: 3923856 - RNA, 15 nt, Human adenovirus D
ugcgauauggaugau

SEQ ID NO: 3923857 - RNA, 22 nt, Human adenovirus D
ugcgcaaaaccuguucagggac

SEQ ID NO: 3923858 - RNA, 19 nt, Human adenovirus D
ugcgcaggcgccugagugg

SEQ ID NO: 3923859 - RNA, 15 nt, Human adenovirus D
ugcgccaagggcagc

SEQ ID NO: 3923860 - RNA, 18 nt, Human adenovirus D
ugcgccaagggcagcccu

SEQ ID NO: 3923861 - RNA, 16 nt, Human adenovirus D
ugcgccgaagcgccgu

SEQ ID NO: 3923862 - RNA, 16 nt, Human adenovirus D
acugauggccacgggg

SEQ ID NO: 3923863 - RNA, 17 nt, Human adenovirus D
acugcaccccccgcagg

SEQ ID NO: 3923864 - RNA, 16 nt, Human adenovirus D
acugcagggagccagg

SEQ ID NO: 3923865 - RNA, 13 nt, Human adenovirus D
acugcauggccuc

SEQ ID NO: 3923866 - RNA, 15 nt, Human adenovirus D
acugccaccgccgcc

SEQ ID NO: 3923867 - RNA, 18 nt, Human adenovirus D
acugccgccgccugcgcu

SEQ ID NO: 3923868 - RNA, 21 nt, Human adenovirus D
acugccgguuucgggcgggca

SEQ ID NO: 3923869 - RNA, 13 nt, Human adenovirus D
acugcuggcccug

SEQ ID NO: 3923870 - RNA, 18 nt, Human adenovirus D
acuggcuuccgccgccgg

SEQ ID NO: 3923871 - RNA, 19 nt, Human adenovirus D
acugggcguugcgggccga

SEQ ID NO: 3923872 - RNA, 22 nt, Human adenovirus D
acuuaacucugauucaugugaa

SEQ ID NO: 3923873 - RNA, 19 nt, Human adenovirus D
acuuacuugaaaucugaaa

SEQ ID NO: 3923874 - RNA, 13 nt, Human adenovirus D
acuuacuuugcaa

SEQ ID NO: 3923875 - RNA, 20 nt, Human adenovirus D
acuuauggcucagcugccau

SEQ ID NO: 3923876 - RNA, 15 nt, Human adenovirus D
acuucagccugggca

SEQ ID NO: 3923877 - RNA, 23 nt, Human adenovirus D
acuucuuuuugauaauaaaggug

SEQ ID NO: 3923878 - RNA, 15 nt, Human adenovirus D
acuugagcuggccuu

SEQ ID NO: 3923879 - RNA, 23 nt, Human adenovirus D
acuugcaaacaauaaaaaacuug

SEQ ID NO: 3923880 - RNA, 21 nt, Human adenovirus D
acuugcaaguggggcggcaaa

SEQ ID NO: 3923881 - RNA, 16 nt, Human adenovirus D
acuugggcugccacuu

SEQ ID NO: 3923882 - RNA, 13 nt, Human adenovirus D
acuuggggaacuu

SEQ ID NO: 3923883 - RNA, 18 nt, Human adenovirus D
acuuguaugugccuuacc

SEQ ID NO: 3923884 - RNA, 17 nt, Human adenovirus D
agaaaaguccuguaaau

SEQ ID NO: 3923885 - RNA, 23 nt, Human adenovirus D
agaaaugggcccuugaacagcau

SEQ ID NO: 3923886 - RNA, 14 nt, Human adenovirus D
agaaauuucaagcu

SEQ ID NO: 3923887 - RNA, 22 nt, Human adenovirus D
agaacaaaaacagacuggucaa

SEQ ID NO: 3923888 - RNA, 17 nt, Human adenovirus D
agaaccccacaggauga

SEQ ID NO: 3923889 - RNA, 15 nt, Human adenovirus D
agaaccugcgcgggc

SEQ ID NO: 3923890 - RNA, 16 nt, Human adenovirus D
agaaccugcuccugcu

SEQ ID NO: 3923891 - RNA, 14 nt, Human adenovirus D
agaagaacgcacag

SEQ ID NO: 3923892 - RNA, 15 nt, Human adenovirus D
agacccacagccagc

SEQ ID NO: 3923893 - RNA, 17 nt, Human adenovirus D
agaccgacgcugggcuc

SEQ ID NO: 3923894 - RNA, 21 nt, Human adenovirus D
agacugauggccacggggagc

SEQ ID NO: 3923895 - RNA, 17 nt, Human adenovirus D
agacugcuaucaggaga

SEQ ID NO: 3923896 - RNA, 14 nt, Human adenovirus D
agagagaggaagga

SEQ ID NO: 3923897 - RNA, 16 nt, Human adenovirus D
agagcaaucccacgcc

SEQ ID NO: 3923898 - RNA, 13 nt, Human adenovirus D
agagcacagcagu

SEQ ID NO: 3923899 - RNA, 21 nt, Human adenovirus D
agagggcgaagggcuggcgag

SEQ ID NO: 3923900 - RNA, 14 nt, Human adenovirus D
agaguaaaaguaaa

SEQ ID NO: 3923901 - RNA, 14 nt, Human adenovirus D
agagugccacugcc

SEQ ID NO: 3923902 - RNA, 15 nt, Human adenovirus D
agauacagaguaaaa

SEQ ID NO: 3923903 - RNA, 15 nt, Human adenovirus D
agaucaggggaugua

SEQ ID NO: 3923904 - RNA, 17 nt, Human adenovirus D
agauccugcugcuccac

SEQ ID NO: 3923905 - RNA, 15 nt, Human adenovirus D
agaucggcaccagcc

SEQ ID NO: 3923906 - RNA, 13 nt, Human adenovirus D
agaugcagcaagc

SEQ ID NO: 3923907 - RNA, 16 nt, Human adenovirus D
agcaaccuccugggca

SEQ ID NO: 3923908 - RNA, 22 nt, Human adenovirus D
agcaagacacgccggcuuguag

SEQ ID NO: 3923909 - RNA, 17 nt, Human adenovirus D
agcaauccuccaggacu

SEQ ID NO: 3923910 - RNA, 21 nt, Human adenovirus D
agcacaugguaauccacggac

SEQ ID NO: 3923911 - RNA, 15 nt, Human adenovirus D
agcacugcaaauuua

SEQ ID NO: 3923912 - RNA, 19 nt, Human adenovirus D
agcagaaauuucaagcugg

SEQ ID NO: 3923913 - RNA, 21 nt, Human adenovirus D
agcagaagaucccggcgcagu

SEQ ID NO: 3923914 - RNA, 20 nt, Human adenovirus D
agcagcaagagcucaaagua

SEQ ID NO: 3923915 - RNA, 10 nt, Human adenovirus D
agcagcacag

SEQ ID NO: 3923916 - RNA, 14 nt, Human adenovirus D
agcagcaccucggu

SEQ ID NO: 3923917 - RNA, 24 nt, Human adenovirus D
agcagcaccucgguacccuccucc

SEQ ID NO: 3923918 - RNA, 13 nt, Human adenovirus D
agcagcaguagcc

SEQ ID NO: 3923919 - RNA, 16 nt, Human adenovirus D
agcagcuguugaaaaa

SEQ ID NO: 3923920 - RNA, 14 nt, Human adenovirus D
agcaggagugcagg

SEQ ID NO: 3923921 - RNA, 21 nt, Human adenovirus D
agcaggagugcagggaugagu

SEQ ID NO: 3923922 - RNA, 14 nt, Human adenovirus D
agcaggggcgcugg

SEQ ID NO: 3923923 - RNA, 18 nt, Human adenovirus D
agcaggguaaagccagca

SEQ ID NO: 3923924 - RNA, 22 nt, Human adenovirus D
agcagggugggcaaaaagaaac

SEQ ID NO: 3923925 - RNA, 22 nt, Human adenovirus D
agcagguggcgccgggccuggg

SEQ ID NO: 3923926 - RNA, 21 nt, Human adenovirus D
agcagguuucucaacagcugg

SEQ ID NO: 3923927 - RNA, 22 nt, Human adenovirus D
agcaguagccccucugugccca

SEQ ID NO: 3923928 - RNA, 14 nt, Human adenovirus D
agcagucucugccg

SEQ ID NO: 3923929 - RNA, 16 nt, Human adenovirus D
agcauacaugcccucu

SEQ ID NO: 3923930 - RNA, 17 nt, Human adenovirus D
agcauacaugcccucuc

SEQ ID NO: 3923931 - RNA, 16 nt, Human adenovirus D
agcaucgaggugcaga

SEQ ID NO: 3923932 - RNA, 21 nt, Human adenovirus D
agcaucguaguucaggagcgc

SEQ ID NO: 3923933 - RNA, 20 nt, Human adenovirus D
agcaugaaggggacgagcug

SEQ ID NO: 3923934 - RNA, 17 nt, Human adenovirus D
agccacaugacccugca

SEQ ID NO: 3923935 - RNA, 13 nt, Human adenovirus D
agccagaccaagc

SEQ ID NO: 3923936 - RNA, 15 nt, Human adenovirus D
agccagaccaagcug

SEQ ID NO: 3923937 - RNA, 14 nt, Human adenovirus D
agccagcagcacau

SEQ ID NO: 3923938 - RNA, 21 nt, Human adenovirus D
agccaguggaagaggggcagc

SEQ ID NO: 3923939 - RNA, 17 nt, Human adenovirus D
agccaucgcgcaggagg

SEQ ID NO: 3923940 - RNA, 21 nt, Human adenovirus D
agccauugaccaccagggagc

SEQ ID NO: 3923941 - RNA, 22 nt, Human adenovirus D
agcccagggcgcacuacagccg

SEQ ID NO: 3923942 - RNA, 17 nt, Human adenovirus D
agcccaugagcaggcag

SEQ ID NO: 3923943 - RNA, 15 nt, Human adenovirus D
agcccgauagccgcc

SEQ ID NO: 3923944 - RNA, 14 nt, Human adenovirus D
agccgcaggccaac

SEQ ID NO: 3923945 - RNA, 16 nt, Human adenovirus D
agccgcgcgcuggggc

SEQ ID NO: 3923946 - RNA, 17 nt, Human adenovirus D
agccgcgcgcuggggca

SEQ ID NO: 3923947 - RNA, 19 nt, Human adenovirus D
agccggagugaugaauaug

SEQ ID NO: 3923948 - RNA, 22 nt, Human adenovirus D
agccggccgcgcuugcugggcg

SEQ ID NO: 3923949 - RNA, 13 nt, Human adenovirus D
agccggcggcgcg

SEQ ID NO: 3923950 - RNA, 22 nt, Human adenovirus D
agccgucuggacccgcggccgc

SEQ ID NO: 3923951 - RNA, 22 nt, Human adenovirus D
agccugcgccgggcgcugguag

SEQ ID NO: 3923952 - RNA, 20 nt, Human adenovirus D
agccuugauuuuuccagccc

SEQ ID NO: 3923953 - RNA, 16 nt, Human adenovirus D
agcgacgaccugggcg

SEQ ID NO: 3923954 - RNA, 17 nt, Human adenovirus D
agcgaugagcagcuugc

SEQ ID NO: 3923955 - RNA, 12 nt, Human adenovirus D
agcgcagccuga

SEQ ID NO: 3923956 - RNA, 18 nt, Human adenovirus D
agcgccagucccucaucc

SEQ ID NO: 3923957 - RNA, 13 nt, Human adenovirus D
agcgcccugguag

SEQ ID NO: 3923958 - RNA, 21 nt, Human adenovirus D
agcgcgcgucauggcugguca

SEQ ID NO: 3923959 - RNA, 15 nt, Human adenovirus D
agcgcguaggccgcu

SEQ ID NO: 3923960 - RNA, 11 nt, Human adenovirus D
agcggccagcg

SEQ ID NO: 3923961 - RNA, 17 nt, Human adenovirus D
agcggcgcaagcucaug

SEQ ID NO: 3923962 - RNA, 12 nt, Human adenovirus D
agcggggccugg

SEQ ID NO: 3923963 - RNA, 13 nt, Human adenovirus D
agcguccgcuccg

SEQ ID NO: 3923964 - RNA, 16 nt, Human adenovirus D
agcuacaugcccagca

SEQ ID NO: 3923965 - RNA, 14 nt, Human adenovirus D
agcuauaaaaauga

SEQ ID NO: 3923966 - RNA, 21 nt, Human adenovirus D
agcucaucgacuggugcugcg

SEQ ID NO: 3923967 - RNA, 19 nt, Human adenovirus D
agcuccgguugugcagccc

SEQ ID NO: 3923968 - RNA, 17 nt, Human adenovirus D
agcucgaaaucggugcg

SEQ ID NO: 3923969 - RNA, 14 nt, Human adenovirus D
agcucgcgggccau

SEQ ID NO: 3923970 - RNA, 18 nt, Human adenovirus D
agcucggcgaugguggcg

SEQ ID NO: 3923971 - RNA, 18 nt, Human adenovirus D
agcucgucuuccaggagc

SEQ ID NO: 3923972 - RNA, 21 nt, Human adenovirus D
agcucgucuuccaggagccug

SEQ ID NO: 3923973 - RNA, 19 nt, Human adenovirus D
agcugaacgggggcgccuu

SEQ ID NO: 3923974 - RNA, 15 nt, Human adenovirus D
agcugacggccaguc

SEQ ID NO: 3923975 - RNA, 16 nt, Human adenovirus D
agcugaucucgcugcc

SEQ ID NO: 3923976 - RNA, 21 nt, Human adenovirus D
agcugcaagguccgcaggagu

SEQ ID NO: 3923977 - RNA, 22 nt, Human adenovirus D
agcugcgagaaggcgcccaggc

SEQ ID NO: 3923978 - RNA, 16 nt, Human adenovirus D
agcugcgcgagggccu

SEQ ID NO: 3923979 - RNA, 23 nt, Human adenovirus D
caaacggugaaccugagccaggc

SEQ ID NO: 3923980 - RNA, 20 nt, Human adenovirus D
caaacguaacuuuaguuggu

SEQ ID NO: 3923981 - RNA, 22 nt, Human adenovirus D
caaagcuagcacccaaaaacug

SEQ ID NO: 3923982 - RNA, 21 nt, Human adenovirus D
caaaguaaaaaaccggucucu

SEQ ID NO: 3923983 - RNA, 22 nt, Human adenovirus D
caaauaaacuuuaucagccaga

SEQ ID NO: 3923984 - RNA, 12 nt, Human adenovirus D
caaauacauccu

SEQ ID NO: 3923985 - RNA, 23 nt, Human adenovirus D
caaauuguugguguaaauccacu

SEQ ID NO: 3923986 - RNA, 20 nt, Human adenovirus D
caacaaguuuaggaacccca

SEQ ID NO: 3923987 - RNA, 22 nt, Human adenovirus D
caacaccugggcacuggagcac

SEQ ID NO: 3923988 - RNA, 14 nt, Human adenovirus D
caacagccgcaggc

SEQ ID NO: 3923989 - RNA, 15 nt, Human adenovirus D
caacagccuucagca

SEQ ID NO: 3923990 - RNA, 19 nt, Human adenovirus D
caacagccuucagcaucag

SEQ ID NO: 3923991 - RNA, 16 nt, Human adenovirus D
caacaucuugcagagc

SEQ ID NO: 3923992 - RNA, 15 nt, Human adenovirus D
caacaugcugacugc

SEQ ID NO: 3923993 - RNA, 19 nt, Human adenovirus D
caacaugggugugcuggcu

SEQ ID NO: 3923994 - RNA, 17 nt, Human adenovirus D
caaccccauagucauca

SEQ ID NO: 3923995 - RNA, 19 nt, Human adenovirus D
caacccgauaucgcgcauc

SEQ ID NO: 3923996 - RNA, 22 nt, Human adenovirus D
caacccgcguaauuggcccucc

SEQ ID NO: 3923997 - RNA, 16 nt, Human adenovirus D
caaccggcugaugccc

SEQ ID NO: 3923998 - RNA, 17 nt, Human adenovirus D
caaccuccaggccaacc

SEQ ID NO: 3923999 - RNA, 14 nt, Human adenovirus D
caaccuccugggca

SEQ ID NO: 3924000 - RNA, 17 nt, Human adenovirus D
caaccucuacgccaccu

SEQ ID NO: 3924001 - RNA, 17 nt, Human adenovirus D
caacgucaaccccuuca

SEQ ID NO: 3924002 - RNA, 22 nt, Human adenovirus D
caacgugcccaucuccaucccc

SEQ ID NO: 3924003 - RNA, 16 nt, Human adenovirus D
caacuggucuccugcc

SEQ ID NO: 3924004 - RNA, 20 nt, Human adenovirus D
caagaaacgucccagcagca

SEQ ID NO: 3924005 - RNA, 12 nt, Human adenovirus D
caagaacgccau

SEQ ID NO: 3924006 - RNA, 17 nt, Human adenovirus D
caagacaaaggaggcca

SEQ ID NO: 3924007 - RNA, 18 nt, Human adenovirus D
caagaccccgucaccuuc

SEQ ID NO: 3924008 - RNA, 21 nt, Human adenovirus D
caagauagcccugcgcccaga

SEQ ID NO: 3924009 - RNA, 19 nt, Human adenovirus D
caagcagguggcgccgggc

SEQ ID NO: 3924010 - RNA, 15 nt, Human adenovirus D
caagcgggccucaca

SEQ ID NO: 3924011 - RNA, 22 nt, Human adenovirus D
caagcuaaauuuaagccagugg

SEQ ID NO: 3924012 - RNA, 16 nt, Human adenovirus D
caagcucaugcuggcc

SEQ ID NO: 3924013 - RNA, 19 nt, Human adenovirus D
caagcuggugaugccaggg

SEQ ID NO: 3924014 - RNA, 18 nt, Human adenovirus D
caagcuugguggcaaagg

SEQ ID NO: 3924015 - RNA, 12 nt, Human adenovirus D
caaggaggugaa

SEQ ID NO: 3924016 - RNA, 23 nt, Human adenovirus D
caaggccauccgucccgacgagg

SEQ ID NO: 3924017 - RNA, 20 nt, Human adenovirus D
caaguacacgccggccaaug

SEQ ID NO: 3924018 - RNA, 14 nt, Human adenovirus D
caagucucucuaac

SEQ ID NO: 3924019 - RNA, 15 nt, Human adenovirus D
caauaaacagcacuu

SEQ ID NO: 3924020 - RNA, 16 nt, Human adenovirus D
caaucagccccuuccc

SEQ ID NO: 3924021 - RNA, 16 nt, Human adenovirus D
caaucgccacaggugc

SEQ ID NO: 3924022 - RNA, 21 nt, Human adenovirus D
caaucuggcgguaccagggga

SEQ ID NO: 3924023 - RNA, 13 nt, Human adenovirus D
caaugagaggagu

SEQ ID NO: 3924024 - RNA, 18 nt, Human adenovirus D
caaugucaggucugcugg

SEQ ID NO: 3924025 - RNA, 13 nt, Human adenovirus D
cacacagcucaac

SEQ ID NO: 3924026 - RNA, 22 nt, Human adenovirus D
cacaccuggaggcaccaucaca

SEQ ID NO: 3924027 - RNA, 16 nt, Human adenovirus D
cacacgcccugggugu

SEQ ID NO: 3924028 - RNA, 20 nt, Human adenovirus D
cacacuagcgcccugguaga

SEQ ID NO: 3924029 - RNA, 19 nt, Human adenovirus D
cacagcaacuuccugacca

SEQ ID NO: 3924030 - RNA, 17 nt, Human adenovirus D
cacagcaccgcauccug

SEQ ID NO: 3924031 - RNA, 19 nt, Human adenovirus D
cacagcaguacaagcgcca

SEQ ID NO: 3924032 - RNA, 17 nt, Human adenovirus D
cacagccacagacagag

SEQ ID NO: 3924033 - RNA, 19 nt, Human adenovirus D
cacaggaugaacaggagca

SEQ ID NO: 3924034 - RNA, 21 nt, Human adenovirus D
cacaguauugugggccuggga

SEQ ID NO: 3924035 - RNA, 15 nt, Human adenovirus D
cacagucaacuguua

SEQ ID NO: 3924036 - RNA, 16 nt, Human adenovirus D
cacaguccaggucaca

SEQ ID NO: 3924037 - RNA, 12 nt, Human adenovirus D
cacagugcagaa

SEQ ID NO: 3924038 - RNA, 15 nt, Human adenovirus D
cacagugcccccucc

SEQ ID NO: 3924039 - RNA, 22 nt, Human adenovirus D
cacaguuaguacaacuacacag

SEQ ID NO: 3924040 - RNA, 16 nt, Human adenovirus D
cacaguuggcgaccca

SEQ ID NO: 3924041 - RNA, 16 nt, Human adenovirus D
cacaucggacuggguu

SEQ ID NO: 3924042 - RNA, 17 nt, Human adenovirus D
cacaucggacuggguua

SEQ ID NO: 3924043 - RNA, 19 nt, Human adenovirus D
cacaugacccugcauggcu

SEQ ID NO: 3924044 - RNA, 22 nt, Human adenovirus D
cacaugcuuggucuuucuggcu

SEQ ID NO: 3924045 - RNA, 16 nt, Human adenovirus D
caccaacgaccagucc

SEQ ID NO: 3924046 - RNA, 20 nt, Human adenovirus D
caccaccagcccauuucaca

SEQ ID NO: 3924047 - RNA, 20 nt, Human adenovirus D
caccagcgcgaguagucaau

SEQ ID NO: 3924048 - RNA, 22 nt, Human adenovirus D
caccaggccuacuacuccugau

SEQ ID NO: 3924049 - RNA, 15 nt, Human adenovirus D
caccagggagcugag

SEQ ID NO: 3924050 - RNA, 16 nt, Human adenovirus D
caccauccgcgccgca

SEQ ID NO: 3924051 - RNA, 17 nt, Human adenovirus D
caccaugagcaaggaga

SEQ ID NO: 3924052 - RNA, 19 nt, Human adenovirus D
caccauguuauucagcagc

SEQ ID NO: 3924053 - RNA, 14 nt, Human adenovirus D
cacccacaccgccu

SEQ ID NO: 3924054 - RNA, 14 nt, Human adenovirus D
cacccaccacaguu

SEQ ID NO: 3924055 - RNA, 21 nt, Human adenovirus D
cacccagaccgugcaggggcc

SEQ ID NO: 3924056 - RNA, 22 nt, Human adenovirus D
cacccagaucccgccggggguu

SEQ ID NO: 3924057 - RNA, 17 nt, Human adenovirus D
caccccaggcggaccag

SEQ ID NO: 3924058 - RNA, 15 nt, Human adenovirus D
cacccccgcgugcag

SEQ ID NO: 3924059 - RNA, 20 nt, Human adenovirus D
cacccgccgccgucugcccc

SEQ ID NO: 3924060 - RNA, 15 nt, Human adenovirus D
cacccucagaagaag

SEQ ID NO: 3924061 - RNA, 21 nt, Human adenovirus D
caccgagucucaccugguuag

SEQ ID NO: 3924062 - RNA, 21 nt, Human adenovirus D
caccgcaaugcgggccugcgc

SEQ ID NO: 3924063 - RNA, 22 nt, Human adenovirus D
caccgcaaugcgggccugcgcu

SEQ ID NO: 3924064 - RNA, 13 nt, Human adenovirus D
caccgccgcagcc

SEQ ID NO: 3924065 - RNA, 14 nt, Human adenovirus D
caccgcgaccgcgg

SEQ ID NO: 3924066 - RNA, 19 nt, Human adenovirus D
caccgcgucgcugaaagca

SEQ ID NO: 3924067 - RNA, 21 nt, Human adenovirus D
caccgucgccucggaccuggc

SEQ ID NO: 3924068 - RNA, 17 nt, Human adenovirus D
caccucaacgcccaggc

SEQ ID NO: 3924069 - RNA, 13 nt, Human adenovirus D
caccugcggcgcg

SEQ ID NO: 3924070 - RNA, 16 nt, Human adenovirus D
caccuguggagggcau

SEQ ID NO: 3924071 - RNA, 12 nt, Human adenovirus D
caccuuccagcc

SEQ ID NO: 3924072 - RNA, 19 nt, Human adenovirus D
caccuuggcuuugcugggu

SEQ ID NO: 3924073 - RNA, 20 nt, Human adenovirus D
cacgaccgugccgcggugcg

SEQ ID NO: 3924074 - RNA, 22 nt, Human adenovirus D
cacgaccgugccgcggugcgcu

SEQ ID NO: 3924075 - RNA, 18 nt, Human adenovirus D
cacgagcaagacgcaggc

SEQ ID NO: 3924076 - RNA, 14 nt, Human adenovirus D
cacgagcgccaggu

SEQ ID NO: 3924077 - RNA, 23 nt, Human adenovirus D
cacgauguaacaucaccacaggc

SEQ ID NO: 3924078 - RNA, 14 nt, Human adenovirus D
cacgcauugcauga

SEQ ID NO: 3924079 - RNA, 13 nt, Human adenovirus D
cacgcccugggug

SEQ ID NO: 3924080 - RNA, 17 nt, Human adenovirus D
cacgccguucuccgccg

SEQ ID NO: 3924081 - RNA, 17 nt, Human adenovirus D
cacgcgcacacuuugga

SEQ ID NO: 3924082 - RNA, 20 nt, Human adenovirus D
cacgcguguugcggcccggc

SEQ ID NO: 3924083 - RNA, 16 nt, Human adenovirus D
cacggaccggucccag

SEQ ID NO: 3924084 - RNA, 23 nt, Human adenovirus D
cacgggacgcuaccgcugcgcag

SEQ ID NO: 3924085 - RNA, 16 nt, Human adenovirus D
cacgggccgccgggcc

SEQ ID NO: 3924086 - RNA, 17 nt, Human adenovirus D
cacggucuucgcccugc

SEQ ID NO: 3924087 - RNA, 16 nt, Human adenovirus D
cacgguucucucagca

SEQ ID NO: 3924088 - RNA, 19 nt, Human adenovirus D
cacgugaccaggggucccc

SEQ ID NO: 3924089 - RNA, 22 nt, Human adenovirus D
cacgugcgagggguagcggucg

SEQ ID NO: 3924090 - RNA, 15 nt, Human adenovirus D
cacguggcggcggcc

SEQ ID NO: 3924091 - RNA, 21 nt, Human adenovirus D
cacuagcgugagccgcgcgcu

SEQ ID NO: 3924092 - RNA, 16 nt, Human adenovirus D
cacucccagcgccgcg

SEQ ID NO: 3924093 - RNA, 14 nt, Human adenovirus D
cacucgcagugcac

SEQ ID NO: 3924094 - RNA, 12 nt, Human adenovirus D
cacucuauuuuc

SEQ ID NO: 3924095 - RNA, 13 nt, Human adenovirus D
ccgccggcggcga

SEQ ID NO: 3924096 - RNA, 15 nt, Human adenovirus D
ccgcgccagacgcac

SEQ ID NO: 3924097 - RNA, 13 nt, Human adenovirus D
ccgcgccgcagcc

SEQ ID NO: 3924098 - RNA, 15 nt, Human adenovirus D
ccgcgccgccacugc

SEQ ID NO: 3924099 - RNA, 19 nt, Human adenovirus D
ccgcgcgcgcgcacguggc

SEQ ID NO: 3924100 - RNA, 15 nt, Human adenovirus D
ccgcgcuugcugggc

SEQ ID NO: 3924101 - RNA, 17 nt, Human adenovirus D
ccgcggaugcuggcgcg

SEQ ID NO: 3924102 - RNA, 15 nt, Human adenovirus D
ccgcggccgcccacg

SEQ ID NO: 3924103 - RNA, 17 nt, Human adenovirus D
ccgcggccguagcaggc

SEQ ID NO: 3924104 - RNA, 17 nt, Human adenovirus D
ccgcgguauauggcucc

SEQ ID NO: 3924105 - RNA, 12 nt, Human adenovirus D
ccgcggucccag

SEQ ID NO: 3924106 - RNA, 18 nt, Human adenovirus D
ccgcgguuaugcagggug

SEQ ID NO: 3924107 - RNA, 13 nt, Human adenovirus D
ccgcguccccgcc

SEQ ID NO: 3924108 - RNA, 17 nt, Human adenovirus D
ccgcguccgcggccacu

SEQ ID NO: 3924109 - RNA, 17 nt, Human adenovirus D
ccgcuaccgcuuccacu

SEQ ID NO: 3924110 - RNA, 18 nt, Human adenovirus D
ccgcuacgugcccuucca

SEQ ID NO: 3924111 - RNA, 17 nt, Human adenovirus D
ccgcuaucugcucuucc

SEQ ID NO: 3924112 - RNA, 15 nt, Human adenovirus D
ccgcucggccaugcc

SEQ ID NO: 3924113 - RNA, 21 nt, Human adenovirus D
ccgcugucucagccucgaaca

SEQ ID NO: 3924114 - RNA, 16 nt, Human adenovirus D
ccgcugugcuggugga

SEQ ID NO: 3924115 - RNA, 13 nt, Human adenovirus D
ccggaaacgccac

SEQ ID NO: 3924116 - RNA, 22 nt, Human adenovirus D
ccggagauuuacggaccacccc

SEQ ID NO: 3924117 - RNA, 15 nt, Human adenovirus D
ccggagcgacacccc

SEQ ID NO: 3924118 - RNA, 17 nt, Human adenovirus D
ccggagcgacacccccg

SEQ ID NO: 3924119 - RNA, 18 nt, Human adenovirus D
ccggaggcgugcacuggc

SEQ ID NO: 3924120 - RNA, 15 nt, Human adenovirus D
ccggccaaggccacc

SEQ ID NO: 3924121 - RNA, 14 nt, Human adenovirus D
ccggccgcgagacc

SEQ ID NO: 3924122 - RNA, 21 nt, Human adenovirus D
ccggcgacaagcuggccugcg

SEQ ID NO: 3924123 - RNA, 14 nt, Human adenovirus D
ccggcggcagcggc

SEQ ID NO: 3924124 - RNA, 18 nt, Human adenovirus D
ccggcuaccuugcaccca

SEQ ID NO: 3924125 - RNA, 20 nt, Human adenovirus D
ccggggcggaguggccucuc

SEQ ID NO: 3924126 - RNA, 16 nt, Human adenovirus D
ccggucaucucccggu

SEQ ID NO: 3924127 - RNA, 15 nt, Human adenovirus D
ccggucucugcgcuc

SEQ ID NO: 3924128 - RNA, 17 nt, Human adenovirus D
ccggugucagaggaugg

SEQ ID NO: 3924129 - RNA, 18 nt, Human adenovirus D
ccgguuucgggcgggcag

SEQ ID NO: 3924130 - RNA, 21 nt, Human adenovirus D
ccgucagcagcaggagcgugc

SEQ ID NO: 3924131 - RNA, 23 nt, Human adenovirus D
ccguccaugcgaauuccccucau

SEQ ID NO: 3924132 - RNA, 20 nt, Human adenovirus D
ccguccgcccgcgcccacca

SEQ ID NO: 3924133 - RNA, 21 nt, Human adenovirus D
ccgucgccucggaccuggccg

SEQ ID NO: 3924134 - RNA, 14 nt, Human adenovirus D
ccgucuacugcauc

SEQ ID NO: 3924135 - RNA, 15 nt, Human adenovirus D
ccgucuacugcaucu

SEQ ID NO: 3924136 - RNA, 16 nt, Human adenovirus D
ccgucuacugcaucug

SEQ ID NO: 3924137 - RNA, 21 nt, Human adenovirus D
ccuacaaguacacgccggcca

SEQ ID NO: 3924138 - RNA, 21 nt, Human adenovirus D
ccuacgcgaccguggggaacu

SEQ ID NO: 3924139 - RNA, 15 nt, Human adenovirus D
ccuacuacuccugau

SEQ ID NO: 3924140 - RNA, 23 nt, Human adenovirus D
ccucacaguccaggucacagucu

SEQ ID NO: 3924141 - RNA, 14 nt, Human adenovirus D
ccucagcagucucu

SEQ ID NO: 3924142 - RNA, 17 nt, Human adenovirus D
ccucaugaacacacugc

SEQ ID NO: 3924143 - RNA, 18 nt, Human adenovirus D
ccucaugaacacacugcc

SEQ ID NO: 3924144 - RNA, 18 nt, Human adenovirus D
ccuccaggacuaucuaug

SEQ ID NO: 3924145 - RNA, 16 nt, Human adenovirus D
ccucccccgcaagcga

SEQ ID NO: 3924146 - RNA, 19 nt, Human adenovirus D
ccuccccgacccccuucca

SEQ ID NO: 3924147 - RNA, 16 nt, Human adenovirus D
ccuccgcauccaagaa

SEQ ID NO: 3924148 - RNA, 16 nt, Human adenovirus D
ccuccgcccugagcuc

SEQ ID NO: 3924149 - RNA, 15 nt, Human adenovirus D
ccuccguagccuggc

SEQ ID NO: 3924150 - RNA, 20 nt, Human adenovirus D
ccucgagcaugaggcggugg

SEQ ID NO: 3924151 - RNA, 14 nt, Human adenovirus D
ccucgcuacugcug

SEQ ID NO: 3924152 - RNA, 22 nt, Human adenovirus D
ccucggggcauugcaggccgug

SEQ ID NO: 3924153 - RNA, 18 nt, Human adenovirus D
ccucgucauccuuccagu

SEQ ID NO: 3924154 - RNA, 22 nt, Human adenovirus D
ccucuccaucagcgcccucagc

SEQ ID NO: 3924155 - RNA, 23 nt, Human adenovirus D
ccucugacggcgcagcuguuccu

SEQ ID NO: 3924156 - RNA, 14 nt, Human adenovirus D
ccucugugcccagu

SEQ ID NO: 3924157 - RNA, 18 nt, Human adenovirus D
ccucuuugcccugcucac

SEQ ID NO: 3924158 - RNA, 21 nt, Human adenovirus D
ccugaaggagcuggacaagcu

SEQ ID NO: 3924159 - RNA, 20 nt, Human adenovirus D
ccugacgacccgcaaccccg

SEQ ID NO: 3924160 - RNA, 19 nt, Human adenovirus D
ccugacgcgccagccgcgg

SEQ ID NO: 3924161 - RNA, 19 nt, Human adenovirus D
ccugagcaaccuccugggc

SEQ ID NO: 3924162 - RNA, 22 nt, Human adenovirus D
ccugaucucugccauguucuca

SEQ ID NO: 3924163 - RNA, 12 nt, Human adenovirus D
ccugaugaacaa

SEQ ID NO: 3924164 - RNA, 15 nt, Human adenovirus D
ccugcacuuucuuug

SEQ ID NO: 3924165 - RNA, 17 nt, Human adenovirus D
ccugcagcaggugcugc

SEQ ID NO: 3924166 - RNA, 16 nt, Human adenovirus D
ccugcauuggcagccg

SEQ ID NO: 3924167 - RNA, 13 nt, Human adenovirus D
ccugcccgacucc

SEQ ID NO: 3924168 - RNA, 22 nt, Human adenovirus D
ccugcgcgucgacggcgccucc

SEQ ID NO: 3924169 - RNA, 15 nt, Human adenovirus D
ccugcggggcgauga

SEQ ID NO: 3924170 - RNA, 23 nt, Human adenovirus D
ccugcucaccugcaccugcgucu

SEQ ID NO: 3924171 - RNA, 21 nt, Human adenovirus D
ccugcuggccgagcuggaagc

SEQ ID NO: 3924172 - RNA, 14 nt, Human adenovirus D
ccuggaccaggcgg

SEQ ID NO: 3924173 - RNA, 20 nt, Human adenovirus D
ccuggaucugccgccucugc

SEQ ID NO: 3924174 - RNA, 19 nt, Human adenovirus D
ccuggccgaccggagcgaa

SEQ ID NO: 3924175 - RNA, 13 nt, Human adenovirus D
ccuggcucccagc

SEQ ID NO: 3924176 - RNA, 19 nt, Human adenovirus D
ccugggcauagucgcgccg

SEQ ID NO: 3924177 - RNA, 15 nt, Human adenovirus D
ccugggcucgcuggu

SEQ ID NO: 3924178 - RNA, 19 nt, Human adenovirus D
ccugggcugcgggccuacu

SEQ ID NO: 3924179 - RNA, 14 nt, Human adenovirus D
ccugggucagaaca

SEQ ID NO: 3924180 - RNA, 15 nt, Human adenovirus D
ccuggugauggccug

SEQ ID NO: 3924181 - RNA, 17 nt, Human adenovirus D
ccuggugcgucgagcac

SEQ ID NO: 3924182 - RNA, 22 nt, Human adenovirus D
ccuggugcgucgagcacagcac

SEQ ID NO: 3924183 - RNA, 16 nt, Human adenovirus D
ccugugacaugcaaaa

SEQ ID NO: 3924184 - RNA, 22 nt, Human adenovirus D
ccuuacuuucgcucccaccgcg

SEQ ID NO: 3924185 - RNA, 15 nt, Human adenovirus D
ccuucaccgaccugg

SEQ ID NO: 3924186 - RNA, 12 nt, Human adenovirus D
ccuucauaauag

SEQ ID NO: 3924187 - RNA, 16 nt, Human adenovirus D
ccuuccaccucggugc

SEQ ID NO: 3924188 - RNA, 13 nt, Human adenovirus D
ccuuccaguacuc

SEQ ID NO: 3924189 - RNA, 23 nt, Human adenovirus D
ccuuccaguacucccggagcggg

SEQ ID NO: 3924190 - RNA, 16 nt, Human adenovirus D
ccuuccugcagcucau

SEQ ID NO: 3924191 - RNA, 13 nt, Human adenovirus D
ccuucgagcugca

SEQ ID NO: 3924192 - RNA, 11 nt, Human adenovirus D
ccuucgcaguc

SEQ ID NO: 3924193 - RNA, 15 nt, Human adenovirus D
ccuucgugcacuggc

SEQ ID NO: 3924194 - RNA, 20 nt, Human adenovirus D
ccuucucgggaucgccaggc

SEQ ID NO: 3924195 - RNA, 16 nt, Human adenovirus D
ccuugcccccaagggc

SEQ ID NO: 3924196 - RNA, 16 nt, Human adenovirus D
ccuuguagggacagca

SEQ ID NO: 3924197 - RNA, 18 nt, Human adenovirus D
ccuuguagggacagcagc

SEQ ID NO: 3924198 - RNA, 17 nt, Human adenovirus D
ccuugucguacuucugc

SEQ ID NO: 3924199 - RNA, 14 nt, Human adenovirus D
ccuuuaucagcacu

SEQ ID NO: 3924200 - RNA, 22 nt, Human adenovirus D
ccuuucacccggacguggugcu

SEQ ID NO: 3924201 - RNA, 18 nt, Human adenovirus D
cgaagauggggccccgcc

SEQ ID NO: 3924202 - RNA, 17 nt, Human adenovirus D
cgaaucaggcuggagcc

SEQ ID NO: 3924203 - RNA, 22 nt, Human adenovirus D
cgacacccccgcgugcagcugc

SEQ ID NO: 3924204 - RNA, 15 nt, Human adenovirus D
cgacacguacuucag

SEQ ID NO: 3924205 - RNA, 17 nt, Human adenovirus D
cgacagucugagggcca

SEQ ID NO: 3924206 - RNA, 22 nt, Human adenovirus D
cgacccaggaauggcacgcucu

SEQ ID NO: 3924207 - RNA, 18 nt, Human adenovirus D
cgacccccaggcccugga

SEQ ID NO: 3924208 - RNA, 20 nt, Human adenovirus D
cgaccgcauccacaaggccg

SEQ ID NO: 3924209 - RNA, 15 nt, Human adenovirus D
cgaccgcgagcugau

SEQ ID NO: 3924210 - RNA, 19 nt, Human adenovirus D
cgaccggaucggagaaucu

SEQ ID NO: 3924211 - RNA, 18 nt, Human adenovirus D
cgaccgugccgcggugcg

SEQ ID NO: 3924212 - RNA, 20 nt, Human adenovirus D
ggggaugaaccuuuggaccu

SEQ ID NO: 3924213 - RNA, 23 nt, Human adenovirus D
ggggccaagaaggccggggccga

SEQ ID NO: 3924214 - RNA, 18 nt, Human adenovirus D
ggggcuacauucuggacu

SEQ ID NO: 3924215 - RNA, 22 nt, Human adenovirus D
gggggguccgcaucgaugguga

SEQ ID NO: 3924216 - RNA, 22 nt, Human adenovirus D
ggguagaagcaacagauuuaag

SEQ ID NO: 3924217 - RNA, 17 nt, Human adenovirus D
ggguccugucacucaaa

SEQ ID NO: 3924218 - RNA, 22 nt, Human adenovirus D
gggugccagauugggggacgau

SEQ ID NO: 3924219 - RNA, 14 nt, Human adenovirus D
gggugggccccugg

SEQ ID NO: 3924220 - RNA, 15 nt, Human adenovirus D
gguaagagcccagca

SEQ ID NO: 3924221 - RNA, 17 nt, Human adenovirus D
gguacuccagucuccgg

SEQ ID NO: 3924222 - RNA, 18 nt, Human adenovirus D
gguagggggcgccgccgg

SEQ ID NO: 3924223 - RNA, 23 nt, Human adenovirus D
gguaguucaaggacaugcagcug

SEQ ID NO: 3924224 - RNA, 16 nt, Human adenovirus D
ggucacaugcuugguc

SEQ ID NO: 3924225 - RNA, 14 nt, Human adenovirus D
ggucaccuuggcuu

SEQ ID NO: 3924226 - RNA, 21 nt, Human adenovirus D
ggucagcgaugagcagcuugc

SEQ ID NO: 3924227 - RNA, 12 nt, Human adenovirus D
ggucagcuggcc

SEQ ID NO: 3924228 - RNA, 16 nt, Human adenovirus D
ggucccgcucccagcg

SEQ ID NO: 3924229 - RNA, 23 nt, Human adenovirus D
ggucccuucucggaccaacccca

SEQ ID NO: 3924230 - RNA, 19 nt, Human adenovirus D
gguccgcgugagggugguc

SEQ ID NO: 3924231 - RNA, 16 nt, Human adenovirus D
ggucgacggugagcag

SEQ ID NO: 3924232 - RNA, 20 nt, Human adenovirus D
ggucgaggagaccugcacua

SEQ ID NO: 3924233 - RNA, 19 nt, Human adenovirus D
ggucucccccagcaugccg

SEQ ID NO: 3924234 - RNA, 12 nt, Human adenovirus D
ggucugcaggcc

SEQ ID NO: 3924235 - RNA, 19 nt, Human adenovirus D
ggucugcgaccggacggag

SEQ ID NO: 3924236 - RNA, 15 nt, Human adenovirus D
ggugaaccugagcca

SEQ ID NO: 3924237 - RNA, 18 nt, Human adenovirus D
ggugagccggccgcgcuu

SEQ ID NO: 3924238 - RNA, 16 nt, Human adenovirus D
ggugcgcacgcccgcg

SEQ ID NO: 3924239 - RNA, 22 nt, Human adenovirus D
ggugcgccccaucaagcaggug

SEQ ID NO: 3924240 - RNA, 18 nt, Human adenovirus D
ggugcuccggguucugga

SEQ ID NO: 3924241 - RNA, 13 nt, Human adenovirus D
gguggaagaugac

SEQ ID NO: 3924242 - RNA, 21 nt, Human adenovirus D
gguggauagcuaugauccaga

SEQ ID NO: 3924243 - RNA, 11 nt, Human adenovirus D
gguggccccga

SEQ ID NO: 3924244 - RNA, 15 nt, Human adenovirus D
gguggcccugggccu

SEQ ID NO: 3924245 - RNA, 17 nt, Human adenovirus D
gguggcccugggccuga

SEQ ID NO: 3924246 - RNA, 11 nt, Human adenovirus D
gguggcggcga

SEQ ID NO: 3924247 - RNA, 22 nt, Human adenovirus D
ggugggcaaaaagaaacaaguc

SEQ ID NO: 3924248 - RNA, 16 nt, Human adenovirus D
gguggggcggugaucu

SEQ ID NO: 3924249 - RNA, 14 nt, Human adenovirus D
gguggugcagaaca

SEQ ID NO: 3924250 - RNA, 16 nt, Human adenovirus D
gguuacacucgcagug

SEQ ID NO: 3924251 - RNA, 20 nt, Human adenovirus D
gguuagguucuucacccagc

SEQ ID NO: 3924252 - RNA, 20 nt, Human adenovirus D
gguuccucguccagaugcuc

SEQ ID NO: 3924253 - RNA, 16 nt, Human adenovirus D
gguugacauccuggau

SEQ ID NO: 3924254 - RNA, 18 nt, Human adenovirus D
gguuucucaacagcuggg

SEQ ID NO: 3924255 - RNA, 19 nt, Human adenovirus D
guaaagaaacagaacaaaa

SEQ ID NO: 3924256 - RNA, 16 nt, Human adenovirus D
guaacuaaacuuuaug

SEQ ID NO: 3924257 - RNA, 21 nt, Human adenovirus D
guaagcacgagcggcagggcu

SEQ ID NO: 3924258 - RNA, 20 nt, Human adenovirus D
guaaguuuuauggcugcugg

SEQ ID NO: 3924259 - RNA, 21 nt, Human adenovirus D
guacaacgcccugcuggagcg

SEQ ID NO: 3924260 - RNA, 17 nt, Human adenovirus D
guacaugauccagcggc

SEQ ID NO: 3924261 - RNA, 20 nt, Human adenovirus D
guacauguucaccagcaagu

SEQ ID NO: 3924262 - RNA, 21 nt, Human adenovirus D
guacccgaggacuaccacgcc

SEQ ID NO: 3924263 - RNA, 22 nt, Human adenovirus D
guacccuccucccaacucuggu

SEQ ID NO: 3924264 - RNA, 19 nt, Human adenovirus D
guaccuucgagcugcaagg

SEQ ID NO: 3924265 - RNA, 23 nt, Human adenovirus D
guacuacgccagccgcaggcgcc

SEQ ID NO: 3924266 - RNA, 19 nt, Human adenovirus D
guacugguacuugggcugc

SEQ ID NO: 3924267 - RNA, 21 nt, Human adenovirus D
guacuuagaagagcccccucc

SEQ ID NO: 3924268 - RNA, 16 nt, Human adenovirus D
guacuucagccugggc

SEQ ID NO: 3924269 - RNA, 17 nt, Human adenovirus D
guagguauucccucucg

SEQ ID NO: 3924270 - RNA, 23 nt, Human adenovirus D
guaguugcgcaggcgcuggaaga

SEQ ID NO: 3924271 - RNA, 20 nt, Human adenovirus D
guaucugaggcauauaaaaa

SEQ ID NO: 3924272 - RNA, 22 nt, Human adenovirus D
guaugacacgcgcacacuuugg

SEQ ID NO: 3924273 - RNA, 21 nt, Human adenovirus D
guaugccaagauagcccugcg

SEQ ID NO: 3924274 - RNA, 20 nt, Human adenovirus D
guauuaccuuccuugcugga

SEQ ID NO: 3924275 - RNA, 13 nt, Human adenovirus D
gucaaacaggcaa

SEQ ID NO: 3924276 - RNA, 20 nt, Human adenovirus D
gucagacccaguggcgagag

SEQ ID NO: 3924277 - RNA, 15 nt, Human adenovirus D
gucagcugcaaaaag

SEQ ID NO: 3924278 - RNA, 14 nt, Human adenovirus D
gucagcuggcccgg

SEQ ID NO: 3924279 - RNA, 21 nt, Human adenovirus D
gucaggagcagcgccccgagg

SEQ ID NO: 3924280 - RNA, 15 nt, Human adenovirus D
gucaggcaggauuca

SEQ ID NO: 3924281 - RNA, 13 nt, Human adenovirus D
gucaggcaggcau

SEQ ID NO: 3924282 - RNA, 23 nt, Human adenovirus D
gucauaacccgccucuccuuucu

SEQ ID NO: 3924283 - RNA, 23 nt, Human adenovirus D
gucaucaccuuccugcagcucau

SEQ ID NO: 3924284 - RNA, 16 nt, Human adenovirus D
gucaugugugauauca

SEQ ID NO: 3924285 - RNA, 14 nt, Human adenovirus D
guccaccgcuccgc

SEQ ID NO: 3924286 - RNA, 14 nt, Human adenovirus D
guccagcuggccgg

SEQ ID NO: 3924287 - RNA, 15 nt, Human adenovirus D
guccaugggcgccuu

SEQ ID NO: 3924288 - RNA, 22 nt, Human adenovirus D
gucccagcgucugacgcugcgc

SEQ ID NO: 3924289 - RNA, 13 nt, Human adenovirus D
guccccgcccgcc

SEQ ID NO: 3924290 - RNA, 18 nt, Human adenovirus D
gucccggaggaggggggc

SEQ ID NO: 3924291 - RNA, 23 nt, Human adenovirus D
guccgcacgguaagagcccagca

SEQ ID NO: 3924292 - RNA, 19 nt, Human adenovirus D
guccgcaggcgggacagag

SEQ ID NO: 3924293 - RNA, 18 nt, Human adenovirus D
guccgcccgcgcccacca

SEQ ID NO: 3924294 - RNA, 23 nt, Human adenovirus D
guccgcuccgcagugggcgcaga

SEQ ID NO: 3924295 - RNA, 13 nt, Human adenovirus D
guccucuuccucu

SEQ ID NO: 3924296 - RNA, 14 nt, Human adenovirus D
guccucuuccucuu

SEQ ID NO: 3924297 - RNA, 23 nt, Human adenovirus D
gucgccacggucaccgagccucc

SEQ ID NO: 3924298 - RNA, 22 nt, Human adenovirus D
gucgccgcaccauccgcgccgc

SEQ ID NO: 3924299 - RNA, 16 nt, Human adenovirus D
gucgccucggaccugg

SEQ ID NO: 3924300 - RNA, 16 nt, Human adenovirus D
gucgcuggcugcugga

SEQ ID NO: 3924301 - RNA, 22 nt, Human adenovirus D
gucggaagacccaagagcgaga

SEQ ID NO: 3924302 - RNA, 20 nt, Human adenovirus D
gucuagaaccccacaggaug

SEQ ID NO: 3924303 - RNA, 17 nt, Human adenovirus D
gucuccaacgccugcgc

SEQ ID NO: 3924304 - RNA, 15 nt, Human adenovirus D
gucuccgucacggug

SEQ ID NO: 3924305 - RNA, 20 nt, Human adenovirus D
gucucgaggacgagaaccug

SEQ ID NO: 3924306 - RNA, 13 nt, Human adenovirus D
gucucgcacucga

SEQ ID NO: 3924307 - RNA, 20 nt, Human adenovirus D
gucugcaacccccagcuccu

SEQ ID NO: 3924308 - RNA, 15 nt, Human adenovirus D
gucugccccccgccc

SEQ ID NO: 3924309 - RNA, 14 nt, Human adenovirus D
gucugccuggucau

SEQ ID NO: 3924310 - RNA, 15 nt, Human adenovirus D
gucugcucgggcaug

SEQ ID NO: 3924311 - RNA, 19 nt, Human adenovirus D
gucuggacccgcggccgcc

SEQ ID NO: 3924312 - RNA, 18 nt, Human adenovirus D
gucugucauauccugaag

SEQ ID NO: 3924313 - RNA, 22 nt, Human adenovirus D
gucuucccucucagaugucaaa

SEQ ID NO: 3924314 - RNA, 18 nt, Human adenovirus D
gugaagaaaacuggcaag

SEQ ID NO: 3924315 - RNA, 19 nt, Human adenovirus D
gugaagaccacuggccccg

SEQ ID NO: 3924316 - RNA, 19 nt, Human adenovirus D
gugaagaugccgggacaga

SEQ ID NO: 3924317 - RNA, 13 nt, Human adenovirus D
gugaagcaauacc

SEQ ID NO: 3924318 - RNA, 21 nt, Human adenovirus D
gugaagcccugguuucaucau

SEQ ID NO: 3924319 - RNA, 15 nt, Human adenovirus D
gugaagggcacagcc

SEQ ID NO: 3924320 - RNA, 17 nt, Human adenovirus D
gugaccaagcuggugau

SEQ ID NO: 3924321 - RNA, 19 nt, Human adenovirus D
gugacucggcugagcucgc

SEQ ID NO: 3924322 - RNA, 21 nt, Human adenovirus D
gugagccgcgcgcuggggcag

SEQ ID NO: 3924323 - RNA, 19 nt, Human adenovirus D
gugagcggcgaggggcugc

SEQ ID NO: 3924324 - RNA, 18 nt, Human adenovirus D
gugagcucuucaaucggu

SEQ ID NO: 3924325 - RNA, 19 nt, Human adenovirus D
gugaggguguccuggaagu

SEQ ID NO: 3924326 - RNA, 15 nt, Human adenovirus D
gugaguugguggccg

SEQ ID NO: 3924327 - RNA, 23 nt, Human adenovirus D
ugcgaaagccccgaguguaucua

SEQ ID NO: 3924328 - RNA, 17 nt, Human adenovirus D
ugcgacccaugagcugc

SEQ ID NO: 3924329 - RNA, 14 nt, Human adenovirus D
ugcgaggagagcag

SEQ ID NO: 3924330 - RNA, 16 nt, Human adenovirus D
ugcgcgagggccugga

SEQ ID NO: 3924331 - RNA, 12 nt, Human adenovirus D
ugcgcgggcugu

SEQ ID NO: 3924332 - RNA, 15 nt, Human adenovirus D
ugcgcggggccacga

SEQ ID NO: 3924333 - RNA, 18 nt, Human adenovirus D
ugcgcguccgucagcagc

SEQ ID NO: 3924334 - RNA, 21 nt, Human adenovirus D
ugcgcuaccgcuccaugcuuc

SEQ ID NO: 3924335 - RNA, 23 nt, Human adenovirus D
ugcggaucaccguagagggcacc

SEQ ID NO: 3924336 - RNA, 20 nt, Human adenovirus D
ugcggcagcuuuuugagcuc

SEQ ID NO: 3924337 - RNA, 14 nt, Human adenovirus D
ugcgguacacgggg

SEQ ID NO: 3924338 - RNA, 23 nt, Human adenovirus D
ugcgguacugguacuugggcugc

SEQ ID NO: 3924339 - RNA, 20 nt, Human adenovirus D
ugcguggaagaauuuggaga

SEQ ID NO: 3924340 - RNA, 19 nt, Human adenovirus D
ugcuaccucuugcagcugg

SEQ ID NO: 3924341 - RNA, 21 nt, Human adenovirus D
ugcuaccucuugcagcuggcc

SEQ ID NO: 3924342 - RNA, 14 nt, Human adenovirus D
ugcuagcccuuccu

SEQ ID NO: 3924343 - RNA, 16 nt, Human adenovirus D
ugcuccaccaccugca

SEQ ID NO: 3924344 - RNA, 22 nt, Human adenovirus D
ugcuccacucgacccugaaggg

SEQ ID NO: 3924345 - RNA, 22 nt, Human adenovirus D
ugcuccaggucgucgccccgga

SEQ ID NO: 3924346 - RNA, 21 nt, Human adenovirus D
ugcucgcucguagggguugag

SEQ ID NO: 3924347 - RNA, 21 nt, Human adenovirus D
ugcucuccgcaccgcuccugg

SEQ ID NO: 3924348 - RNA, 15 nt, Human adenovirus D
ugcucuggggucgug

SEQ ID NO: 3924349 - RNA, 18 nt, Human adenovirus D
ugcugaaacaccugcagc

SEQ ID NO: 3924350 - RNA, 22 nt, Human adenovirus D
ugcugaccaauagacagcagaa

SEQ ID NO: 3924351 - RNA, 15 nt, Human adenovirus D
ugcugcagccgccgc

SEQ ID NO: 3924352 - RNA, 14 nt, Human adenovirus D
ugcugcccgccacc

SEQ ID NO: 3924353 - RNA, 14 nt, Human adenovirus D
ugcugccgagccgc

SEQ ID NO: 3924354 - RNA, 21 nt, Human adenovirus D
ugcugccgcucagucauccaa

SEQ ID NO: 3924355 - RNA, 17 nt, Human adenovirus D
ugcugcucgagcgccca

SEQ ID NO: 3924356 - RNA, 15 nt, Human adenovirus D
ugcugcugcugcuga

SEQ ID NO: 3924357 - RNA, 19 nt, Human adenovirus D
ugcuggaggguugaaagau

SEQ ID NO: 3924358 - RNA, 18 nt, Human adenovirus D
ugcuggaugcggagccgc

SEQ ID NO: 3924359 - RNA, 15 nt, Human adenovirus D
ugcuggcccugcugg

SEQ ID NO: 3924360 - RNA, 20 nt, Human adenovirus D
ugcugguggaaacagacagc

SEQ ID NO: 3924361 - RNA, 22 nt, Human adenovirus D
ugcuguggucgacuugcaagac

SEQ ID NO: 3924362 - RNA, 17 nt, Human adenovirus D
ugcuucaauaauggaag

SEQ ID NO: 3924363 - RNA, 14 nt, Human adenovirus D
ugcuucugggcaac

SEQ ID NO: 3924364 - RNA, 21 nt, Human adenovirus D
ugcuuguguccucccccgcaa

SEQ ID NO: 3924365 - RNA, 17 nt, Human adenovirus D
uggaaaaguggaagaag

SEQ ID NO: 3924366 - RNA, 15 nt, Human adenovirus D
uggaagaagagcagc

SEQ ID NO: 3924367 - RNA, 23 nt, Human adenovirus D
uggaagagauggaagaagaaugg

SEQ ID NO: 3924368 - RNA, 17 nt, Human adenovirus D
uggacaacaccagacac

SEQ ID NO: 3924369 - RNA, 22 nt, Human adenovirus D
uggacgcgguucauugacagcg

SEQ ID NO: 3924370 - RNA, 17 nt, Human adenovirus D
uggacuugggcgggagc

SEQ ID NO: 3924371 - RNA, 22 nt, Human adenovirus D
uggagaucgccgcgacccgcgc

SEQ ID NO: 3924372 - RNA, 20 nt, Human adenovirus D
uggagcacagaccuucaggg

SEQ ID NO: 3924373 - RNA, 20 nt, Human adenovirus D
uggagcaggguaaagccagc

SEQ ID NO: 3924374 - RNA, 21 nt, Human adenovirus D
uggagcaggguaaagccagca

SEQ ID NO: 3924375 - RNA, 17 nt, Human adenovirus D
uggagcgcguaggccgc

SEQ ID NO: 3924376 - RNA, 13 nt, Human adenovirus D
uggaggccgccua

SEQ ID NO: 3924377 - RNA, 15 nt, Human adenovirus D
uggaggguugaaaga

SEQ ID NO: 3924378 - RNA, 20 nt, Human adenovirus D
uggagguuuucccggacgag

SEQ ID NO: 3924379 - RNA, 18 nt, Human adenovirus D
uggauagcuaugauccag

SEQ ID NO: 3924380 - RNA, 15 nt, Human adenovirus D
uggauugcaauuuug

SEQ ID NO: 3924381 - RNA, 20 nt, Human adenovirus D
uggcaaagcgguugagcugg

SEQ ID NO: 3924382 - RNA, 19 nt, Human adenovirus D
uggcagagcacgcugcaca

SEQ ID NO: 3924383 - RNA, 14 nt, Human adenovirus D
uggccaacagccac

SEQ ID NO: 3924384 - RNA, 14 nt, Human adenovirus D
uggccaggggagug

SEQ ID NO: 3924385 - RNA, 18 nt, Human adenovirus D
uggccaguguuugagaau

SEQ ID NO: 3924386 - RNA, 22 nt, Human adenovirus D
uggccccggggcggaguggccu

SEQ ID NO: 3924387 - RNA, 18 nt, Human adenovirus D
uggcccugacgacccgca

SEQ ID NO: 3924388 - RNA, 12 nt, Human adenovirus D
uggcccugcugg

SEQ ID NO: 3924389 - RNA, 23 nt, Human adenovirus D
uggccggcgcgcccggggccagg

SEQ ID NO: 3924390 - RNA, 15 nt, Human adenovirus D
uggccggugagacgc

SEQ ID NO: 3924391 - RNA, 14 nt, Human adenovirus D
uggcgacccaggaa

SEQ ID NO: 3924392 - RNA, 21 nt, Human adenovirus D
uggcgagaggcgagcagcugu

SEQ ID NO: 3924393 - RNA, 18 nt, Human adenovirus D
uggcgccgggccugggcg

SEQ ID NO: 3924394 - RNA, 15 nt, Human adenovirus D
uggcgcucgggcagg

SEQ ID NO: 3924395 - RNA, 13 nt, Human adenovirus D
uggcggagcgagc

SEQ ID NO: 3924396 - RNA, 13 nt, Human adenovirus D
uggcggaggccau

SEQ ID NO: 3924397 - RNA, 23 nt, Human adenovirus D
uggcggaggcggagucuuccaug

SEQ ID NO: 3924398 - RNA, 19 nt, Human adenovirus D
uggcgugcgaguuggagga

SEQ ID NO: 3924399 - RNA, 12 nt, Human adenovirus D
uggcucagcugc

SEQ ID NO: 3924400 - RNA, 22 nt, Human adenovirus D
uggcucuaaaaaauaugcaagg

SEQ ID NO: 3924401 - RNA, 17 nt, Human adenovirus D
ugggaucuuuauucuug

SEQ ID NO: 3924402 - RNA, 21 nt, Human adenovirus D
ugggaugcugcccgccaccug

SEQ ID NO: 3924403 - RNA, 18 nt, Human adenovirus D
ugggcaaaaagaaacaag

SEQ ID NO: 3924404 - RNA, 17 nt, Human adenovirus D
ugggccacuacagcuga

SEQ ID NO: 3924405 - RNA, 14 nt, Human adenovirus D
ugggcccgugggcu

SEQ ID NO: 3924406 - RNA, 22 nt, Human adenovirus D
ugggcgcuugcaagggugcgcu

SEQ ID NO: 3924407 - RNA, 13 nt, Human adenovirus D
uggggcagacagu

SEQ ID NO: 3924408 - RNA, 22 nt, Human adenovirus D
uggggcgcuuacaagcgcgggc

SEQ ID NO: 3924409 - RNA, 16 nt, Human adenovirus D
uggguuggcuugcaug

SEQ ID NO: 3924410 - RNA, 23 nt, Human adenovirus D
uggucaucaccuuccugcagcuc

SEQ ID NO: 3924411 - RNA, 21 nt, Human adenovirus D
ugguccagauggaaaggucac

SEQ ID NO: 3924412 - RNA, 17 nt, Human adenovirus D
uggucccuucucggacc

SEQ ID NO: 3924413 - RNA, 21 nt, Human adenovirus D
uggugcgcucgucgggcacga

SEQ ID NO: 3924414 - RNA, 16 nt, Human adenovirus D
uggugcgucgagcaca

SEQ ID NO: 3924415 - RNA, 22 nt, Human adenovirus D
ugguggaaacagacagccaggu

SEQ ID NO: 3924416 - RNA, 14 nt, Human adenovirus D
ugguggaggcgcgc

SEQ ID NO: 3924417 - RNA, 16 nt, Human adenovirus D
ugguggccaccucgcc

SEQ ID NO: 3924418 - RNA, 23 nt, Human adenovirus D
ugguggcuagaaaacacccacag

SEQ ID NO: 3924419 - RNA, 18 nt, Human adenovirus D
uggugggccguuggaaga

SEQ ID NO: 3924420 - RNA, 12 nt, Human adenovirus D
uguaaagccaga

SEQ ID NO: 3924421 - RNA, 17 nt, Human adenovirus D
uguaaagccagaaagaa

SEQ ID NO: 3924422 - RNA, 12 nt, Human adenovirus D
uguaacaucacc

SEQ ID NO: 3924423 - RNA, 19 nt, Human adenovirus D
uguacccgaggacuaccac

SEQ ID NO: 3924424 - RNA, 18 nt, Human adenovirus D
uguacgacaccacucgcg

SEQ ID NO: 3924425 - RNA, 18 nt, Human adenovirus D
uguacuccuucuuccgca

SEQ ID NO: 3924426 - RNA, 13 nt, Human adenovirus D
uguacuucuccca

SEQ ID NO: 3924427 - RNA, 14 nt, Human adenovirus D
uguacuucucccaa

SEQ ID NO: 3924428 - RNA, 16 nt, Human adenovirus D
ugucaaauuccugguc

SEQ ID NO: 3924429 - RNA, 13 nt, Human adenovirus D
uguccaaccccga

SEQ ID NO: 3924430 - RNA, 14 nt, Human adenovirus D
ugucccccgccgcu

SEQ ID NO: 3924431 - RNA, 11 nt, Human adenovirus D
uguccggggcg

SEQ ID NO: 3924432 - RNA, 17 nt, Human adenovirus D
ugucguacuucugccag

SEQ ID NO: 3924433 - RNA, 22 nt, Human adenovirus D
ugugaccacggaccggucccag

SEQ ID NO: 3924434 - RNA, 14 nt, Human adenovirus D
ugugauaugcacag

SEQ ID NO: 3924435 - RNA, 20 nt, Human adenovirus D
ugugauuaaaaagcagcaca

SEQ ID NO: 3924436 - RNA, 23 nt, Human adenovirus D
ugugcucuccgcaccgcuccugg

SEQ ID NO: 3924437 - RNA, 13 nt, Human adenovirus D
uguggagccacug

SEQ ID NO: 3924438 - RNA, 13 nt, Human adenovirus D
uguucagcagcac

SEQ ID NO: 3924439 - RNA, 15 nt, Human adenovirus D
uguugcauccuucca

SEQ ID NO: 3924440 - RNA, 21 nt, Human adenovirus D
uguuggaggaagaaaugaggc

SEQ ID NO: 3924441 - RNA, 16 nt, Human adenovirus D
uuaaagacccacagcc

SEQ ID NO: 3924442 - RNA, 14 nt, Human adenovirus D
uuaccgccagagaa

SEQ ID NO: 3924443 - RNA, 16 nt, Human adenovirus D
accaggcagugcagcg

SEQ ID NO: 3924444 - RNA, 17 nt, Human adenovirus D
accaggggguccaccuu

SEQ ID NO: 3924445 - RNA, 16 nt, Human adenovirus D
accagguccacgcugg

SEQ ID NO: 3924446 - RNA, 21 nt, Human adenovirus D
accagguccacgcugguggcc

SEQ ID NO: 3924447 - RNA, 21 nt, Human adenovirus D
accaguacucguacaaggcgc

SEQ ID NO: 3924448 - RNA, 13 nt, Human adenovirus D
accagucgggccc

SEQ ID NO: 3924449 - RNA, 18 nt, Human adenovirus D
acccaaaaacugcaugcu

SEQ ID NO: 3924450 - RNA, 14 nt, Human adenovirus D
acccacgacacagc

SEQ ID NO: 3924451 - RNA, 19 nt, Human adenovirus D
acccagaucccgccggggg

SEQ ID NO: 3924452 - RNA, 21 nt, Human adenovirus D
accccacgguggccccgaccc

SEQ ID NO: 3924453 - RNA, 14 nt, Human adenovirus D
accccagacaccca

SEQ ID NO: 3924454 - RNA, 22 nt, Human adenovirus D
accccauccagguguagguuuc

SEQ ID NO: 3924455 - RNA, 15 nt, Human adenovirus D
accccaucccggcca

SEQ ID NO: 3924456 - RNA, 12 nt, Human adenovirus D
acccgccacccu

SEQ ID NO: 3924457 - RNA, 18 nt, Human adenovirus D
acccuacucgggcacggc

SEQ ID NO: 3924458 - RNA, 21 nt, Human adenovirus D
acccucaggcgcaaccaggag

SEQ ID NO: 3924459 - RNA, 21 nt, Human adenovirus D
acccugagaacggggugcagu

SEQ ID NO: 3924460 - RNA, 16 nt, Human adenovirus D
acccugcccgagggca

SEQ ID NO: 3924461 - RNA, 14 nt, Human adenovirus D
accgaccccuggcu

SEQ ID NO: 3924462 - RNA, 14 nt, Human adenovirus D
accgagccucccag

SEQ ID NO: 3924463 - RNA, 18 nt, Human adenovirus D
accgagccucccaggagg

SEQ ID NO: 3924464 - RNA, 18 nt, Human adenovirus D
accgcaaugcgggccugc

SEQ ID NO: 3924465 - RNA, 21 nt, Human adenovirus D
accgcaaugcgggccugcgcu

SEQ ID NO: 3924466 - RNA, 14 nt, Human adenovirus D
accgcauccugauc

SEQ ID NO: 3924467 - RNA, 16 nt, Human adenovirus D
accgccgugcgccgcg

SEQ ID NO: 3924468 - RNA, 15 nt, Human adenovirus D
accgcuccuggucug

SEQ ID NO: 3924469 - RNA, 20 nt, Human adenovirus D
accgcuccuggucugcaacc

SEQ ID NO: 3924470 - RNA, 20 nt, Human adenovirus D
accggaggcgugcacuggcu

SEQ ID NO: 3924471 - RNA, 14 nt, Human adenovirus D
accggcagcggggc

SEQ ID NO: 3924472 - RNA, 16 nt, Human adenovirus D
accggcagcggggccu

SEQ ID NO: 3924473 - RNA, 21 nt, Human adenovirus D
accgggaugaugaccgagcug

SEQ ID NO: 3924474 - RNA, 16 nt, Human adenovirus D
accguaccaugggaaa

SEQ ID NO: 3924475 - RNA, 21 nt, Human adenovirus D
accgugaauaucagacaugcu

SEQ ID NO: 3924476 - RNA, 16 nt, Human adenovirus D
accuacgaguacauga

SEQ ID NO: 3924477 - RNA, 21 nt, Human adenovirus D
accuacuccucuuugcccugc

SEQ ID NO: 3924478 - RNA, 19 nt, Human adenovirus D
accuaugggaacaaggccu

SEQ ID NO: 3924479 - RNA, 19 nt, Human adenovirus D
accucaaaaagcuguggac

SEQ ID NO: 3924480 - RNA, 20 nt, Human adenovirus D
accucuucuauuucuuccuc

SEQ ID NO: 3924481 - RNA, 21 nt, Human adenovirus D
accucuucuauuucuuccucu

SEQ ID NO: 3924482 - RNA, 16 nt, Human adenovirus D
accugaccuugcagag

SEQ ID NO: 3924483 - RNA, 12 nt, Human adenovirus D
accugagccgcg

SEQ ID NO: 3924484 - RNA, 18 nt, Human adenovirus D
accugcaccugcgucugc

SEQ ID NO: 3924485 - RNA, 17 nt, Human adenovirus D
accugcagcgccagucc

SEQ ID NO: 3924486 - RNA, 23 nt, Human adenovirus D
accugcagcguguucaaaacaac

SEQ ID NO: 3924487 - RNA, 19 nt, Human adenovirus D
accugcauuggcagccgag

SEQ ID NO: 3924488 - RNA, 18 nt, Human adenovirus D
accugcgcaaggucgagg

SEQ ID NO: 3924489 - RNA, 16 nt, Human adenovirus D
accuggcggaggccau

SEQ ID NO: 3924490 - RNA, 12 nt, Human adenovirus D
accugggcggcg

SEQ ID NO: 3924491 - RNA, 15 nt, Human adenovirus D
accugugacaugcaa

SEQ ID NO: 3924492 - RNA, 19 nt, Human adenovirus D
accuguucagggaccgcag

SEQ ID NO: 3924493 - RNA, 16 nt, Human adenovirus D
accuucaaccucacca

SEQ ID NO: 3924494 - RNA, 15 nt, Human adenovirus D
accuugaaaccccag

SEQ ID NO: 3924495 - RNA, 14 nt, Human adenovirus D
accuugaaagggau

SEQ ID NO: 3924496 - RNA, 16 nt, Human adenovirus D
acgaccggcugcucac

SEQ ID NO: 3924497 - RNA, 13 nt, Human adenovirus D
acgagaccagagg

SEQ ID NO: 3924498 - RNA, 14 nt, Human adenovirus D
acgagacuggccuc

SEQ ID NO: 3924499 - RNA, 22 nt, Human adenovirus D
acgagcaagacgcaggccagga

SEQ ID NO: 3924500 - RNA, 20 nt, Human adenovirus D
acgagcccgcgcgggagcca

SEQ ID NO: 3924501 - RNA, 13 nt, Human adenovirus D
acgagcggccgcc

SEQ ID NO: 3924502 - RNA, 17 nt, Human adenovirus D
acgaggaauuugaaaau

SEQ ID NO: 3924503 - RNA, 19 nt, Human adenovirus D
acgaggcguucagggaggc

SEQ ID NO: 3924504 - RNA, 21 nt, Human adenovirus D
acgcaaacggguuaggccgcg

SEQ ID NO: 3924505 - RNA, 14 nt, Human adenovirus D
acgcaagagccggc

SEQ ID NO: 3924506 - RNA, 14 nt, Human adenovirus D
acgcacgggccgcc

SEQ ID NO: 3924507 - RNA, 22 nt, Human adenovirus D
acgcagccggcgaacgugccgc

SEQ ID NO: 3924508 - RNA, 15 nt, Human adenovirus D
acgcaggccaggagg

SEQ ID NO: 3924509 - RNA, 16 nt, Human adenovirus D
acgcaggccaggagga

SEQ ID NO: 3924510 - RNA, 13 nt, Human adenovirus D
acgccagccgcag

SEQ ID NO: 3924511 - RNA, 14 nt, Human adenovirus D
acgcccugcuggag

SEQ ID NO: 3924512 - RNA, 16 nt, Human adenovirus D
acgcccugcuggagcg

SEQ ID NO: 3924513 - RNA, 15 nt, Human adenovirus D
acgcccuggccgacc

SEQ ID NO: 3924514 - RNA, 15 nt, Human adenovirus D
acgccgaggcucugu

SEQ ID NO: 3924515 - RNA, 18 nt, Human adenovirus D
acgcgcgaagauggccac

SEQ ID NO: 3924516 - RNA, 21 nt, Human adenovirus D
acgcgcgaagauggccacccc

SEQ ID NO: 3924517 - RNA, 16 nt, Human adenovirus D
acgcgcucgacaugac

SEQ ID NO: 3924518 - RNA, 23 nt, Human adenovirus D
acgcucaggaccauagggagccu

SEQ ID NO: 3924519 - RNA, 21 nt, Human adenovirus D
acgcugaaaggcgggcugccc

SEQ ID NO: 3924520 - RNA, 11 nt, Human adenovirus D
acgcuggccag

SEQ ID NO: 3924521 - RNA, 18 nt, Human adenovirus D
acggaccaccccaggcgg

SEQ ID NO: 3924522 - RNA, 14 nt, Human adenovirus D
acggagggcagaaa

SEQ ID NO: 3924523 - RNA, 15 nt, Human adenovirus D
acggagggcagaaac

SEQ ID NO: 3924524 - RNA, 18 nt, Human adenovirus D
acggcaucuuccuggggc

SEQ ID NO: 3924525 - RNA, 14 nt, Human adenovirus D
acggccagcagggu

SEQ ID NO: 3924526 - RNA, 18 nt, Human adenovirus D
acggccuggccucgggca

SEQ ID NO: 3924527 - RNA, 23 nt, Human adenovirus D
acggcugcauccacugcuccugc

SEQ ID NO: 3924528 - RNA, 22 nt, Human adenovirus D
acggcuuacaacagccuugccc

SEQ ID NO: 3924529 - RNA, 13 nt, Human adenovirus D
acgggcccugcga

SEQ ID NO: 3924530 - RNA, 12 nt, Human adenovirus D
acgggccgccgg

SEQ ID NO: 3924531 - RNA, 18 nt, Human adenovirus D
acgggcugcuucugccug

SEQ ID NO: 3924532 - RNA, 17 nt, Human adenovirus D
acggucugcaggccggg

SEQ ID NO: 3924533 - RNA, 22 nt, Human adenovirus D
acggucugcaggccgggcugca

SEQ ID NO: 3924534 - RNA, 22 nt, Human adenovirus D
acgucaucgacucgguggucgc

SEQ ID NO: 3924535 - RNA, 17 nt, Human adenovirus D
acgucggcguggcgcuc

SEQ ID NO: 3924536 - RNA, 21 nt, Human adenovirus D
acgucuacaaggcccugggca

SEQ ID NO: 3924537 - RNA, 17 nt, Human adenovirus D
acgugcccaucuccauc

SEQ ID NO: 3924538 - RNA, 16 nt, Human adenovirus D
acgugccgcgcgggca

SEQ ID NO: 3924539 - RNA, 13 nt, Human adenovirus D
acguggugcugcu

SEQ ID NO: 3924540 - RNA, 21 nt, Human adenovirus D
acguggugcugcugccgggcu

SEQ ID NO: 3924541 - RNA, 22 nt, Human adenovirus D
acguggugcugcugccgggcug

SEQ ID NO: 3924542 - RNA, 18 nt, Human adenovirus D
acguuaccgacagcagca

SEQ ID NO: 3924543 - RNA, 21 nt, Human adenovirus D
acuaauucucaaagugugaaa

SEQ ID NO: 3924544 - RNA, 22 nt, Human adenovirus D
acuacuaauucucaaaguguga

SEQ ID NO: 3924545 - RNA, 16 nt, Human adenovirus D
acuaggcccagcagca

SEQ ID NO: 3924546 - RNA, 15 nt, Human adenovirus D
acucaccaaggccau

SEQ ID NO: 3924547 - RNA, 15 nt, Human adenovirus D
acucacccuggggcu

SEQ ID NO: 3924548 - RNA, 22 nt, Human adenovirus D
acucccgucucgacccgagccc

SEQ ID NO: 3924549 - RNA, 12 nt, Human adenovirus D
acucccuucuca

SEQ ID NO: 3924550 - RNA, 21 nt, Human adenovirus D
acucgcaaaaauaaaucauug

SEQ ID NO: 3924551 - RNA, 20 nt, Human adenovirus D
acucgcagacgagcggccgc

SEQ ID NO: 3924552 - RNA, 18 nt, Human adenovirus D
acucgcagugcacgggca

SEQ ID NO: 3924553 - RNA, 14 nt, Human adenovirus D
acucggagcuggcu

SEQ ID NO: 3924554 - RNA, 20 nt, Human adenovirus D
acucugguacuccagucucc

SEQ ID NO: 3924555 - RNA, 21 nt, Human adenovirus D
acucuguaggccauccccauc

SEQ ID NO: 3924556 - RNA, 15 nt, Human adenovirus D
acucugugugcugag

SEQ ID NO: 3924557 - RNA, 16 nt, Human adenovirus D
acucuuccgccgccga

SEQ ID NO: 3924558 - RNA, 19 nt, Human adenovirus D
acugaaggaaaaaucacuc

SEQ ID NO: 3924559 - RNA, 15 nt, Human adenovirus D
cgcuggccagcacgc

SEQ ID NO: 3924560 - RNA, 14 nt, Human adenovirus D
cgcuggcugcugga

SEQ ID NO: 3924561 - RNA, 22 nt, Human adenovirus D
cgcugggcguggugcuggauga

SEQ ID NO: 3924562 - RNA, 12 nt, Human adenovirus D
cgcuggggcaga

SEQ ID NO: 3924563 - RNA, 15 nt, Human adenovirus D
cgcuggggcagaacg

SEQ ID NO: 3924564 - RNA, 12 nt, Human adenovirus D
cgcuguggagcc

SEQ ID NO: 3924565 - RNA, 12 nt, Human adenovirus D
cgcuucuucccc

SEQ ID NO: 3924566 - RNA, 22 nt, Human adenovirus D
cgcuugcuggaugcggagccgc

SEQ ID NO: 3924567 - RNA, 14 nt, Human adenovirus D
cggaaacgccacca

SEQ ID NO: 3924568 - RNA, 22 nt, Human adenovirus D
cggaaucagaauauccccuucc

SEQ ID NO: 3924569 - RNA, 22 nt, Human adenovirus D
cggacggaguguuccaacuagc

SEQ ID NO: 3924570 - RNA, 14 nt, Human adenovirus D
cggacguggugcug

SEQ ID NO: 3924571 - RNA, 20 nt, Human adenovirus D
cggacguggugcugcugccg

SEQ ID NO: 3924572 - RNA, 15 nt, Human adenovirus D
cggagcccacccgcu

SEQ ID NO: 3924573 - RNA, 14 nt, Human adenovirus D
cggagcgaggugug

SEQ ID NO: 3924574 - RNA, 22 nt, Human adenovirus D
cggaggcgugcacuggcucgcc

SEQ ID NO: 3924575 - RNA, 16 nt, Human adenovirus D
cggagggugccagauu

SEQ ID NO: 3924576 - RNA, 12 nt, Human adenovirus D
cggaggugagcu

SEQ ID NO: 3924577 - RNA, 17 nt, Human adenovirus D
cggaguaccugagcccg

SEQ ID NO: 3924578 - RNA, 14 nt, Human adenovirus D
cggaucgcccaggc

SEQ ID NO: 3924579 - RNA, 22 nt, Human adenovirus D
cggcacccgguacuacgccagc

SEQ ID NO: 3924580 - RNA, 17 nt, Human adenovirus D
cggcacgaucccgggca

SEQ ID NO: 3924581 - RNA, 16 nt, Human adenovirus D
cggcagccgcagccgc

SEQ ID NO: 3924582 - RNA, 16 nt, Human adenovirus D
cggcagcggggccugg

SEQ ID NO: 3924583 - RNA, 22 nt, Human adenovirus D
cggcaugggaugcgugagggcg

SEQ ID NO: 3924584 - RNA, 15 nt, Human adenovirus D
cggccaaccugguga

SEQ ID NO: 3924585 - RNA, 12 nt, Human adenovirus D
cggccaaggcca

SEQ ID NO: 3924586 - RNA, 19 nt, Human adenovirus D
cggccagcagggugccucc

SEQ ID NO: 3924587 - RNA, 15 nt, Human adenovirus D
cggccagucugauga

SEQ ID NO: 3924588 - RNA, 16 nt, Human adenovirus D
cggccauucuggaggc

SEQ ID NO: 3924589 - RNA, 17 nt, Human adenovirus D
cggccgaaaaccccgcc

SEQ ID NO: 3924590 - RNA, 13 nt, Human adenovirus D
cggccgcggccag

SEQ ID NO: 3924591 - RNA, 18 nt, Human adenovirus D
cggccgcggcgagcggga

SEQ ID NO: 3924592 - RNA, 22 nt, Human adenovirus D
cggccguccuuucgcugcugcc

SEQ ID NO: 3924593 - RNA, 13 nt, Human adenovirus D
cggcgcgagcuga

SEQ ID NO: 3924594 - RNA, 14 nt, Human adenovirus D
cggcgcgagcugag

SEQ ID NO: 3924595 - RNA, 14 nt, Human adenovirus D
cggcgcugcaaagc

SEQ ID NO: 3924596 - RNA, 16 nt, Human adenovirus D
cggcgcugcaaagcca

SEQ ID NO: 3924597 - RNA, 18 nt, Human adenovirus D
cggcggcagcggcgguuc

SEQ ID NO: 3924598 - RNA, 17 nt, Human adenovirus D
cggcggccaaccuggug

SEQ ID NO: 3924599 - RNA, 18 nt, Human adenovirus D
cggcggccaaccugguga

SEQ ID NO: 3924600 - RNA, 13 nt, Human adenovirus D
cggcgggggcgga

SEQ ID NO: 3924601 - RNA, 24 nt, Human adenovirus D
cggcggucaccucaacgcccaggc

SEQ ID NO: 3924602 - RNA, 23 nt, Human adenovirus D
cggcugcauccacugcuccugcg

SEQ ID NO: 3924603 - RNA, 16 nt, Human adenovirus D
cggcuguagaccacgu

SEQ ID NO: 3924604 - RNA, 18 nt, Human adenovirus D
cgggaccggggaggcacc

SEQ ID NO: 3924605 - RNA, 15 nt, Human adenovirus D
cgggacgcccuggcc

SEQ ID NO: 3924606 - RNA, 11 nt, Human adenovirus D
cgggagcgagc

SEQ ID NO: 3924607 - RNA, 22 nt, Human adenovirus D
cgggccaugagggucuggagcu

SEQ ID NO: 3924608 - RNA, 13 nt, Human adenovirus D
cgggccuacgagc

SEQ ID NO: 3924609 - RNA, 21 nt, Human adenovirus D
cgggccuacgagcucaaccuc

SEQ ID NO: 3924610 - RNA, 22 nt, Human adenovirus D
cgggcggacggaucgcccaggc

SEQ ID NO: 3924611 - RNA, 17 nt, Human adenovirus D
cgggcgggcagggagcu

SEQ ID NO: 3924612 - RNA, 18 nt, Human adenovirus D
cggggaaggucucgcucc

SEQ ID NO: 3924613 - RNA, 14 nt, Human adenovirus D
cggggaggagcccg

SEQ ID NO: 3924614 - RNA, 16 nt, Human adenovirus D
cggggaucagccccgc

SEQ ID NO: 3924615 - RNA, 21 nt, Human adenovirus D
cggggcgggggugaugagcug

SEQ ID NO: 3924616 - RNA, 22 nt, Human adenovirus D
cggggcgggggugaugagcugc

SEQ ID NO: 3924617 - RNA, 15 nt, Human adenovirus D
cgggguacugacgcc

SEQ ID NO: 3924618 - RNA, 22 nt, Human adenovirus D
cgggugaccccgacgccccuga

SEQ ID NO: 3924619 - RNA, 20 nt, Human adenovirus D
cgggugaggguguccuggaa

SEQ ID NO: 3924620 - RNA, 22 nt, Human adenovirus D
cggguguaaugaaacccgccac

SEQ ID NO: 3924621 - RNA, 21 nt, Human adenovirus D
cggucaccucaacgcccaggc

SEQ ID NO: 3924622 - RNA, 17 nt, Human adenovirus D
cgguccccgaggcccuu

SEQ ID NO: 3924623 - RNA, 18 nt, Human adenovirus D
cggucgcgcgaagaggag

SEQ ID NO: 3924624 - RNA, 18 nt, Human adenovirus D
cggucguuguccaccagg

SEQ ID NO: 3924625 - RNA, 14 nt, Human adenovirus D
cggugcugcugccg

SEQ ID NO: 3924626 - RNA, 15 nt, Human adenovirus D
cgguggccccgaccc

SEQ ID NO: 3924627 - RNA, 14 nt, Human adenovirus D
cgguggggcgguga

SEQ ID NO: 3924628 - RNA, 16 nt, Human adenovirus D
cggugggucggagccc

SEQ ID NO: 3924629 - RNA, 21 nt, Human adenovirus D
cgguggucccuucucggacca

SEQ ID NO: 3924630 - RNA, 15 nt, Human adenovirus D
cgguguugcgcccug

SEQ ID NO: 3924631 - RNA, 14 nt, Human adenovirus D
cgguugagcuggga

SEQ ID NO: 3924632 - RNA, 19 nt, Human adenovirus D
cguacuucagccugggcaa

SEQ ID NO: 3924633 - RNA, 21 nt, Human adenovirus D
cguagaggcgggugagggcgu

SEQ ID NO: 3924634 - RNA, 11 nt, Human adenovirus D
cguagccagaa

SEQ ID NO: 3924635 - RNA, 18 nt, Human adenovirus D
cguaguugcgcaggcgcu

SEQ ID NO: 3924636 - RNA, 18 nt, Human adenovirus D
cgucacccugcccuucca

SEQ ID NO: 3924637 - RNA, 22 nt, Human adenovirus D
cgucagggcgaaggugucccug

SEQ ID NO: 3924638 - RNA, 14 nt, Human adenovirus D
cgucauugaagaga

SEQ ID NO: 3924639 - RNA, 22 nt, Human adenovirus D
cguccgcaguacucgcagcgcu

SEQ ID NO: 3924640 - RNA, 18 nt, Human adenovirus D
cguccgucagcagcagga

SEQ ID NO: 3924641 - RNA, 17 nt, Human adenovirus D
cguccuuucgcugcugc

SEQ ID NO: 3924642 - RNA, 17 nt, Human adenovirus D
cgucgacggggaaggcu

SEQ ID NO: 3924643 - RNA, 20 nt, Human adenovirus D
cgugaaggccggcaugccca

SEQ ID NO: 3924644 - RNA, 13 nt, Human adenovirus D
cgugaccaggggu

SEQ ID NO: 3924645 - RNA, 14 nt, Human adenovirus D
cgugcccgagggcu

SEQ ID NO: 3924646 - RNA, 18 nt, Human adenovirus D
cgugcugcgcgacgagga

SEQ ID NO: 3924647 - RNA, 21 nt, Human adenovirus D
cgugcugcucucucuucuugu

SEQ ID NO: 3924648 - RNA, 16 nt, Human adenovirus D
cguggacgcugcucac

SEQ ID NO: 3924649 - RNA, 12 nt, Human adenovirus D
cguggcgcagcg

SEQ ID NO: 3924650 - RNA, 14 nt, Human adenovirus D
cguggcuucgagca

SEQ ID NO: 3924651 - RNA, 21 nt, Human adenovirus D
cgugggacucacccuggggcu

SEQ ID NO: 3924652 - RNA, 17 nt, Human adenovirus D
cguguccacgcauugca

SEQ ID NO: 3924653 - RNA, 22 nt, Human adenovirus D
cgugugcugugauacuguugca

SEQ ID NO: 3924654 - RNA, 14 nt, Human adenovirus D
cguguggcagcagu

SEQ ID NO: 3924655 - RNA, 21 nt, Human adenovirus D
cguucgcgaggacgcagcgug

SEQ ID NO: 3924656 - RNA, 15 nt, Human adenovirus D
cuaaacuaaagccaa

SEQ ID NO: 3924657 - RNA, 16 nt, Human adenovirus D
cuaaauuuaagccagu

SEQ ID NO: 3924658 - RNA, 15 nt, Human adenovirus D
cuaaucaagacaaaa

SEQ ID NO: 3924659 - RNA, 19 nt, Human adenovirus D
cuaaucauuuaauaaagau

SEQ ID NO: 3924660 - RNA, 14 nt, Human adenovirus D
cuaaugacaaacaa

SEQ ID NO: 3924661 - RNA, 17 nt, Human adenovirus D
cuaaugacaaacaaaag

SEQ ID NO: 3924662 - RNA, 14 nt, Human adenovirus D
cuacaaggaccgca

SEQ ID NO: 3924663 - RNA, 19 nt, Human adenovirus D
cuacaucguaggugacaaa

SEQ ID NO: 3924664 - RNA, 13 nt, Human adenovirus D
cuacaucugcugc

SEQ ID NO: 3924665 - RNA, 15 nt, Human adenovirus D
cuaccaccccagcau

SEQ ID NO: 3924666 - RNA, 15 nt, Human adenovirus D
cuaccgcggcacccg

SEQ ID NO: 3924667 - RNA, 17 nt, Human adenovirus D
cuaccugggagucucua

SEQ ID NO: 3924668 - RNA, 14 nt, Human adenovirus D
cuaccuugcaccca

SEQ ID NO: 3924669 - RNA, 16 nt, Human adenovirus D
cuacgagcucaaccuc

SEQ ID NO: 3924670 - RNA, 18 nt, Human adenovirus D
cuacgccagccgcaggcg

SEQ ID NO: 3924671 - RNA, 18 nt, Human adenovirus D
cuacgcguacauccagca

SEQ ID NO: 3924672 - RNA, 17 nt, Human adenovirus D
cuacgucuacaaggccc

SEQ ID NO: 3924673 - RNA, 15 nt, Human adenovirus D
cuacgugcccuucca

SEQ ID NO: 3924674 - RNA, 16 nt, Human adenovirus D
cuacuggucgcugccg

SEQ ID NO: 3924675 - RNA, 18 nt, Human adenovirus D
cuacuuuuugggcaccca

SEQ ID NO: 3924676 - RNA, 22 nt, Human adenovirus D
cugcuaccucuugcagcuggcc

SEQ ID NO: 3924677 - RNA, 12 nt, Human adenovirus D
cugcuccugcac

SEQ ID NO: 3924678 - RNA, 19 nt, Human adenovirus D
cugcuccugcucccgggcu

SEQ ID NO: 3924679 - RNA, 22 nt, Human adenovirus D
cugcucucucuucuuguaacuu

SEQ ID NO: 3924680 - RNA, 15 nt, Human adenovirus D
cugcugcagccgccg

SEQ ID NO: 3924681 - RNA, 17 nt, Human adenovirus D
cugcugccgcucaguca

SEQ ID NO: 3924682 - RNA, 12 nt, Human adenovirus D
cugcugcuccac

SEQ ID NO: 3924683 - RNA, 14 nt, Human adenovirus D
cugcugcuccacca

SEQ ID NO: 3924684 - RNA, 23 nt, Human adenovirus D
cugcuugcaagacugcgggggga

SEQ ID NO: 3924685 - RNA, 22 nt, Human adenovirus D
cuggaaacucuuggagcagggu

SEQ ID NO: 3924686 - RNA, 22 nt, Human adenovirus D
cuggaagagguaguugagggug

SEQ ID NO: 3924687 - RNA, 15 nt, Human adenovirus D
cuggaagccaugcug

SEQ ID NO: 3924688 - RNA, 18 nt, Human adenovirus D
cuggaccaggcggcagag

SEQ ID NO: 3924689 - RNA, 20 nt, Human adenovirus D
cuggacccgcggccgcccac

SEQ ID NO: 3924690 - RNA, 22 nt, Human adenovirus D
cuggacccuccgucggaagagg

SEQ ID NO: 3924691 - RNA, 17 nt, Human adenovirus D
cuggaccggcuggugac

SEQ ID NO: 3924692 - RNA, 17 nt, Human adenovirus D
cuggagacacugguuug

SEQ ID NO: 3924693 - RNA, 23 nt, Human adenovirus D
cuggaguuucacccgucugaaaa

SEQ ID NO: 3924694 - RNA, 14 nt, Human adenovirus D
cuggaugcggagcc

SEQ ID NO: 3924695 - RNA, 16 nt, Human adenovirus D
cuggcccggcaacgac

SEQ ID NO: 3924696 - RNA, 23 nt, Human adenovirus D
cuggccgcgggcgccucccagga

SEQ ID NO: 3924697 - RNA, 15 nt, Human adenovirus D
cuggccuuccaccuc

SEQ ID NO: 3924698 - RNA, 16 nt, Human adenovirus D
cuggcgacgcagccgg

SEQ ID NO: 3924699 - RNA, 17 nt, Human adenovirus D
cuggcggagaacaaggc

SEQ ID NO: 3924700 - RNA, 13 nt, Human adenovirus D
cuggcugcuggag

SEQ ID NO: 3924701 - RNA, 14 nt, Human adenovirus D
cuggcuggucaggc

SEQ ID NO: 3924702 - RNA, 16 nt, Human adenovirus D
cuggcuucuacagcca

SEQ ID NO: 3924703 - RNA, 15 nt, Human adenovirus D
cugggaauccugcac

SEQ ID NO: 3924704 - RNA, 13 nt, Human adenovirus D
cugggaggcugcg

SEQ ID NO: 3924705 - RNA, 15 nt, Human adenovirus D
cugggcacuggagca

SEQ ID NO: 3924706 - RNA, 16 nt, Human adenovirus D
cugggcauucgcaaga

SEQ ID NO: 3924707 - RNA, 19 nt, Human adenovirus D
cugggcguugcgggccgag

SEQ ID NO: 3924708 - RNA, 15 nt, Human adenovirus D
cugggcucgcuggug

SEQ ID NO: 3924709 - RNA, 19 nt, Human adenovirus D
cugggcucgcugguggcgc

SEQ ID NO: 3924710 - RNA, 11 nt, Human adenovirus D
cugggggcgcc

SEQ ID NO: 3924711 - RNA, 13 nt, Human adenovirus D
cugggggcggugg

SEQ ID NO: 3924712 - RNA, 21 nt, Human adenovirus D
cugggguauuacuaggcccag

SEQ ID NO: 3924713 - RNA, 23 nt, Human adenovirus D
cugggguauuacuaggcccagca

SEQ ID NO: 3924714 - RNA, 13 nt, Human adenovirus D
cugguacuugggc

SEQ ID NO: 3924715 - RNA, 23 nt, Human adenovirus D
cuggugauacgaggcagaggcac

SEQ ID NO: 3924716 - RNA, 18 nt, Human adenovirus D
cuggugcgucgagcacag

SEQ ID NO: 3924717 - RNA, 16 nt, Human adenovirus D
cugguuccucguccag

SEQ ID NO: 3924718 - RNA, 21 nt, Human adenovirus D
cugguugacaaauggagccag

SEQ ID NO: 3924719 - RNA, 17 nt, Human adenovirus D
cuguauuaccuuccuug

SEQ ID NO: 3924720 - RNA, 16 nt, Human adenovirus D
cugugccucuccauca

SEQ ID NO: 3924721 - RNA, 14 nt, Human adenovirus D
cuguuacuguaaag

SEQ ID NO: 3924722 - RNA, 12 nt, Human adenovirus D
cuuaaaucauuu

SEQ ID NO: 3924723 - RNA, 23 nt, Human adenovirus D
cuuaaaucauuuaaaauaaaacu

SEQ ID NO: 3924724 - RNA, 16 nt, Human adenovirus D
cuuaccaaguccaggg

SEQ ID NO: 3924725 - RNA, 24 nt, Human adenovirus D
cuuacucagguuuggauauucaaa

SEQ ID NO: 3924726 - RNA, 20 nt, Human adenovirus D
cuuaguucagcugcaaugau

SEQ ID NO: 3924727 - RNA, 13 nt, Human adenovirus D
cuuaguuuaaaag

SEQ ID NO: 3924728 - RNA, 20 nt, Human adenovirus D
cuucaacgacuaccucucgg

SEQ ID NO: 3924729 - RNA, 23 nt, Human adenovirus D
cuucacagagagccgccugagca

SEQ ID NO: 3924730 - RNA, 16 nt, Human adenovirus D
cuuccagcccaugagc

SEQ ID NO: 3924731 - RNA, 17 nt, Human adenovirus D
cuuccaguacucccgga

SEQ ID NO: 3924732 - RNA, 23 nt, Human adenovirus D
cuuccaugcgggugaccccgacg

SEQ ID NO: 3924733 - RNA, 21 nt, Human adenovirus D
cuucccggugcccgcuccgcc

SEQ ID NO: 3924734 - RNA, 20 nt, Human adenovirus D
cuuccguucuacccagcaag

SEQ ID NO: 3924735 - RNA, 20 nt, Human adenovirus D
cuuccguugcgcugcaggcg

SEQ ID NO: 3924736 - RNA, 21 nt, Human adenovirus D
cuuccuccguagccuggcgga

SEQ ID NO: 3924737 - RNA, 14 nt, Human adenovirus D
cuuccugcagcuca

SEQ ID NO: 3924738 - RNA, 23 nt, Human adenovirus D
cuucgagguggaccccauggaug

SEQ ID NO: 3924739 - RNA, 20 nt, Human adenovirus D
cuucgaguacgaggccaugc

SEQ ID NO: 3924740 - RNA, 22 nt, Human adenovirus D
cuucgaguacgaggccaugcug

SEQ ID NO: 3924741 - RNA, 12 nt, Human adenovirus D
cuucuacagcca

SEQ ID NO: 3924742 - RNA, 15 nt, Human adenovirus D
cuucuacagccagca

SEQ ID NO: 3924743 - RNA, 14 nt, Human adenovirus D
cuucugggcaacgg

SEQ ID NO: 3924744 - RNA, 18 nt, Human adenovirus D
cuugaaagggaugucaaa

SEQ ID NO: 3924745 - RNA, 17 nt, Human adenovirus D
cuugaaaucgcaguugg

SEQ ID NO: 3924746 - RNA, 17 nt, Human adenovirus D
cuugaacuacuggcuuc

SEQ ID NO: 3924747 - RNA, 16 nt, Human adenovirus D
cuugaccugccuccac

SEQ ID NO: 3924748 - RNA, 21 nt, Human adenovirus D
cuugaccugccuccaccaccc

SEQ ID NO: 3924749 - RNA, 23 nt, Human adenovirus D
cuugagacucauccugcuggugc

SEQ ID NO: 3924750 - RNA, 18 nt, Human adenovirus D
cuugaggaggaacuucag

SEQ ID NO: 3924751 - RNA, 18 nt, Human adenovirus D
cuugcaacuugcaaacaa

SEQ ID NO: 3924752 - RNA, 15 nt, Human adenovirus D
cuugcugggcgagga

SEQ ID NO: 3924753 - RNA, 14 nt, Human adenovirus D
cuugggcugccacu

SEQ ID NO: 3924754 - RNA, 19 nt, Human adenovirus D
cuuguagggacagcagccc

SEQ ID NO: 3924755 - RNA, 23 nt, Human adenovirus D
cuuucacccggacguggugcugc

SEQ ID NO: 3924756 - RNA, 15 nt, Human adenovirus D
cuuucauccaucugg

SEQ ID NO: 3924757 - RNA, 14 nt, Human adenovirus D
cuuucucugccaca

SEQ ID NO: 3924758 - RNA, 16 nt, Human adenovirus D
cuuucuuugacacacc

SEQ ID NO: 3924759 - RNA, 19 nt, Human adenovirus D
cuuucuuugccaucaugau

SEQ ID NO: 3924760 - RNA, 22 nt, Human adenovirus D
cuuugacacaccuggaggcacc

SEQ ID NO: 3924761 - RNA, 14 nt, Human adenovirus D
cuuugucugcugua

SEQ ID NO: 3924762 - RNA, 22 nt, Human adenovirus D
cuuugucugcuguaaagccaga

SEQ ID NO: 3924763 - RNA, 15 nt, Human adenovirus D
cuuuuuaaaaacacu

SEQ ID NO: 3924764 - RNA, 18 nt, Human adenovirus D
gaaaaacagaaagcaugc

SEQ ID NO: 3924765 - RNA, 13 nt, Human adenovirus D
gaaaaggcagcug

SEQ ID NO: 3924766 - RNA, 14 nt, Human adenovirus D
gaaacaagucaaaa

SEQ ID NO: 3924767 - RNA, 16 nt, Human adenovirus D
gaaacaccugcagcgc

SEQ ID NO: 3924768 - RNA, 18 nt, Human adenovirus D
gaaacagauccugcugcu

SEQ ID NO: 3924769 - RNA, 18 nt, Human adenovirus D
gaaagaacauacaugggc

SEQ ID NO: 3924770 - RNA, 19 nt, Human adenovirus D
gaaagaggcggaacugcug

SEQ ID NO: 3924771 - RNA, 19 nt, Human adenovirus D
gaaagauuuaauuggcaaa

SEQ ID NO: 3924772 - RNA, 19 nt, Human adenovirus D
gaaagcgguugagcgggcu

SEQ ID NO: 3924773 - RNA, 16 nt, Human adenovirus D
gaaagcuauaaaaaug

SEQ ID NO: 3924774 - RNA, 16 nt, Human adenovirus D
gaaaggcgggcugccc

SEQ ID NO: 3924775 - RNA, 14 nt, Human adenovirus D
gaaagucaggagca

SEQ ID NO: 3924776 - RNA, 17 nt, Human adenovirus D
gaaaucaguuucccaug

SEQ ID NO: 3924777 - RNA, 14 nt, Human adenovirus D
gaaaugaggcaggc

SEQ ID NO: 3924778 - RNA, 15 nt, Human adenovirus D
gaaaugcuaccuggg

SEQ ID NO: 3924779 - RNA, 12 nt, Human adenovirus D
gaacaaggccau

SEQ ID NO: 3924780 - RNA, 16 nt, Human adenovirus D
gaacagcagcagcaaa

SEQ ID NO: 3924781 - RNA, 17 nt, Human adenovirus D
gaacaguccacccagac

SEQ ID NO: 3924782 - RNA, 19 nt, Human adenovirus D
gaaccgccgccggcggcgg

SEQ ID NO: 3924783 - RNA, 19 nt, Human adenovirus D
gaaccugcgcgggcugugg

SEQ ID NO: 3924784 - RNA, 19 nt, Human adenovirus D
gaaccuuuggaccugagcu

SEQ ID NO: 3924785 - RNA, 16 nt, Human adenovirus D
gaacgggggcagcaca

SEQ ID NO: 3924786 - RNA, 21 nt, Human adenovirus D
gaacuaaucauuuaauaaaga

SEQ ID NO: 3924787 - RNA, 19 nt, Human adenovirus D
gaacugauguugauuaaaa

SEQ ID NO: 3924788 - RNA, 19 nt, Human adenovirus D
gaacugcuggcccugcugg

SEQ ID NO: 3924789 - RNA, 15 nt, Human adenovirus D
gaacuggcagagcac

SEQ ID NO: 3924790 - RNA, 10 nt, Human adenovirus D
gaacuuucuc

SEQ ID NO: 3924791 - RNA, 17 nt, Human adenovirus D
gaagaaaacuggcaaga

SEQ ID NO: 3924792 - RNA, 13 nt, Human adenovirus D
gagcuuggccgag

SEQ ID NO: 3924793 - RNA, 22 nt, Human adenovirus D
gagcuuuuacaacgaccucgcc

SEQ ID NO: 3924794 - RNA, 17 nt, Human adenovirus D
gaggaccaaucgcgccc

SEQ ID NO: 3924795 - RNA, 19 nt, Human adenovirus D
gaggagaacugcuggcccu

SEQ ID NO: 3924796 - RNA, 17 nt, Human adenovirus D
gaggagagcagguuucu

SEQ ID NO: 3924797 - RNA, 22 nt, Human adenovirus D
gaggagcaccccaacggcccug

SEQ ID NO: 3924798 - RNA, 21 nt, Human adenovirus D
gaggcacgucggcguggcgcu

SEQ ID NO: 3924799 - RNA, 18 nt, Human adenovirus D
gaggcauggcaggcagcg

SEQ ID NO: 3924800 - RNA, 17 nt, Human adenovirus D
gaggccacgugcgaggg

SEQ ID NO: 3924801 - RNA, 21 nt, Human adenovirus D
gaggccaucuaaacuaaagcc

SEQ ID NO: 3924802 - RNA, 21 nt, Human adenovirus D
gaggccuugacaaaggccgug

SEQ ID NO: 3924803 - RNA, 14 nt, Human adenovirus D
gaggcgguccccgc

SEQ ID NO: 3924804 - RNA, 14 nt, Human adenovirus D
gagggcauggguca

SEQ ID NO: 3924805 - RNA, 13 nt, Human adenovirus D
gagggccuggacc

SEQ ID NO: 3924806 - RNA, 14 nt, Human adenovirus D
gagggucuggagcu

SEQ ID NO: 3924807 - RNA, 23 nt, Human adenovirus D
gagguaguugagggugguggcga

SEQ ID NO: 3924808 - RNA, 12 nt, Human adenovirus D
gaggugagcucu

SEQ ID NO: 3924809 - RNA, 13 nt, Human adenovirus D
gaguaccugagcc

SEQ ID NO: 3924810 - RNA, 12 nt, Human adenovirus D
gagugaagaggg

SEQ ID NO: 3924811 - RNA, 13 nt, Human adenovirus D
gagugcagggaug

SEQ ID NO: 3924812 - RNA, 12 nt, Human adenovirus D
gaguggcggcuu

SEQ ID NO: 3924813 - RNA, 19 nt, Human adenovirus D
gaguggcggcuuucugccc

SEQ ID NO: 3924814 - RNA, 22 nt, Human adenovirus D
gauaaggagaaggauucaaaac

SEQ ID NO: 3924815 - RNA, 22 nt, Human adenovirus D
gauacgaggcagaggcacacag

SEQ ID NO: 3924816 - RNA, 13 nt, Human adenovirus D
gauagccgccagg

SEQ ID NO: 3924817 - RNA, 18 nt, Human adenovirus D
gaucaaccuccaggccaa

SEQ ID NO: 3924818 - RNA, 14 nt, Human adenovirus D
gaucagccccgcgc

SEQ ID NO: 3924819 - RNA, 23 nt, Human adenovirus D
gaucagccccgcgcgcgcgcacg

SEQ ID NO: 3924820 - RNA, 22 nt, Human adenovirus D
gauccccgucuccugccgcgcc

SEQ ID NO: 3924821 - RNA, 21 nt, Human adenovirus D
gaucccgcuguggcugaagau

SEQ ID NO: 3924822 - RNA, 23 nt, Human adenovirus D
gauccucgcccaauugcacgcca

SEQ ID NO: 3924823 - RNA, 18 nt, Human adenovirus D
gaugaaccuuuggaccug

SEQ ID NO: 3924824 - RNA, 21 nt, Human adenovirus D
gaugaccgagcugacggccag

SEQ ID NO: 3924825 - RNA, 15 nt, Human adenovirus D
gaugaguugggccug

SEQ ID NO: 3924826 - RNA, 15 nt, Human adenovirus D
gaugauaccaagaga

SEQ ID NO: 3924827 - RNA, 16 nt, Human adenovirus D
gaugaugccgcagugg

SEQ ID NO: 3924828 - RNA, 13 nt, Human adenovirus D
gaugcagcaagcc

SEQ ID NO: 3924829 - RNA, 21 nt, Human adenovirus D
gaugcaugcggggggagauga

SEQ ID NO: 3924830 - RNA, 12 nt, Human adenovirus D
gaugccaggggu

SEQ ID NO: 3924831 - RNA, 16 nt, Human adenovirus D
gaugcugcccgccacc

SEQ ID NO: 3924832 - RNA, 20 nt, Human adenovirus D
gaugcugcccgccaccugca

SEQ ID NO: 3924833 - RNA, 20 nt, Human adenovirus D
gauggaacucuguugaggca

SEQ ID NO: 3924834 - RNA, 16 nt, Human adenovirus D
gauggacuuggaagag

SEQ ID NO: 3924835 - RNA, 19 nt, Human adenovirus D
gauggccuccagccuuucc

SEQ ID NO: 3924836 - RNA, 16 nt, Human adenovirus D
gauggccuguaccggg

SEQ ID NO: 3924837 - RNA, 13 nt, Human adenovirus D
gauggcgugcgag

SEQ ID NO: 3924838 - RNA, 17 nt, Human adenovirus D
gaugguuucccucgggc

SEQ ID NO: 3924839 - RNA, 17 nt, Human adenovirus D
gaugucauaacccgccu

SEQ ID NO: 3924840 - RNA, 19 nt, Human adenovirus D
gaugucaucacuggcggag

SEQ ID NO: 3924841 - RNA, 13 nt, Human adenovirus D
gaugucucggugu

SEQ ID NO: 3924842 - RNA, 22 nt, Human adenovirus D
gaugugcccaaguacuuggaaa

SEQ ID NO: 3924843 - RNA, 23 nt, Human adenovirus D
gauguguuuuuagaugcagcaag

SEQ ID NO: 3924844 - RNA, 18 nt, Human adenovirus D
gauuaaaaagcagcacag

SEQ ID NO: 3924845 - RNA, 21 nt, Human adenovirus D
gauucaauaagguucugcccu

SEQ ID NO: 3924846 - RNA, 21 nt, Human adenovirus D
gauuucaucaaucaucagguu

SEQ ID NO: 3924847 - RNA, 19 nt, Human adenovirus D
gcaaagcgguugagcuggg

SEQ ID NO: 3924848 - RNA, 21 nt, Human adenovirus D
gcaacauccccgcccugcugg

SEQ ID NO: 3924849 - RNA, 15 nt, Human adenovirus D
gcaaccaggaggagc

SEQ ID NO: 3924850 - RNA, 20 nt, Human adenovirus D
gcaacuucauguccaugggc

SEQ ID NO: 3924851 - RNA, 14 nt, Human adenovirus D
gcaagaggagacag

SEQ ID NO: 3924852 - RNA, 19 nt, Human adenovirus D
gcaagaugauaccaagaga

SEQ ID NO: 3924853 - RNA, 14 nt, Human adenovirus D
gcaagcgcccagag

SEQ ID NO: 3924854 - RNA, 16 nt, Human adenovirus D
gcaagggcgaccagcu

SEQ ID NO: 3924855 - RNA, 17 nt, Human adenovirus D
gcaagguccgcaggagu

SEQ ID NO: 3924856 - RNA, 20 nt, Human adenovirus D
gcaagucacgcaggugacag

SEQ ID NO: 3924857 - RNA, 19 nt, Human adenovirus D
gcaauaccgggaugaugac

SEQ ID NO: 3924858 - RNA, 21 nt, Human adenovirus D
gcaaugcuagagugaggcacu

SEQ ID NO: 3924859 - RNA, 20 nt, Human adenovirus D
gcacaaacgugcaguccaac

SEQ ID NO: 3924860 - RNA, 21 nt, Human adenovirus D
gcacagacaccgucgccgcac

SEQ ID NO: 3924861 - RNA, 22 nt, Human adenovirus D
gcacagacccaccccagucaga

SEQ ID NO: 3924862 - RNA, 15 nt, Human adenovirus D
gcacagaccuucagg

SEQ ID NO: 3924863 - RNA, 14 nt, Human adenovirus D
gcacagcagggaca

SEQ ID NO: 3924864 - RNA, 21 nt, Human adenovirus D
gcacaguuggcgacccaggaa

SEQ ID NO: 3924865 - RNA, 18 nt, Human adenovirus D
gcacaucgccgggcagga

SEQ ID NO: 3924866 - RNA, 14 nt, Human adenovirus D
gcaccauccccagg

SEQ ID NO: 3924867 - RNA, 15 nt, Human adenovirus D
gcaccccccgcaggc

SEQ ID NO: 3924868 - RNA, 18 nt, Human adenovirus D
gcaccugcuacauguucg

SEQ ID NO: 3924869 - RNA, 21 nt, Human adenovirus D
gcaccugugggaccuggcgga

SEQ ID NO: 3924870 - RNA, 23 nt, Human adenovirus D
gcacgcggccguucaugggcacc

SEQ ID NO: 3924871 - RNA, 19 nt, Human adenovirus D
gcacgguaagagcccagca

SEQ ID NO: 3924872 - RNA, 20 nt, Human adenovirus D
gcacgucggcguggcgcucg

SEQ ID NO: 3924873 - RNA, 18 nt, Human adenovirus D
gcacguucaggacaccgg

SEQ ID NO: 3924874 - RNA, 18 nt, Human adenovirus D
gcacguuucgucaggcag

SEQ ID NO: 3924875 - RNA, 17 nt, Human adenovirus D
gcacucauccaugauga

SEQ ID NO: 3924876 - RNA, 15 nt, Human adenovirus D
gcacuggagcacaga

SEQ ID NO: 3924877 - RNA, 15 nt, Human adenovirus D
gcagaacgggggcag

SEQ ID NO: 3924878 - RNA, 17 nt, Human adenovirus D
gcagaaggugguggacg

SEQ ID NO: 3924879 - RNA, 18 nt, Human adenovirus D
gcagacacaccaggaugc

SEQ ID NO: 3924880 - RNA, 18 nt, Human adenovirus D
gcagaccgcgggccuccu

SEQ ID NO: 3924881 - RNA, 19 nt, Human adenovirus D
gcagaccuucauaauagaa

SEQ ID NO: 3924882 - RNA, 15 nt, Human adenovirus D
gcagacggugaagca

SEQ ID NO: 3924883 - RNA, 13 nt, Human adenovirus D
gcagcacauaauc

SEQ ID NO: 3924884 - RNA, 22 nt, Human adenovirus D
gcagcauugucugccuggucau

SEQ ID NO: 3924885 - RNA, 12 nt, Human adenovirus D
gcagccgagccg

SEQ ID NO: 3924886 - RNA, 18 nt, Human adenovirus D
gcagccgcguaagcagga

SEQ ID NO: 3924887 - RNA, 23 nt, Human adenovirus D
gcagccgugaucccacagggcac

SEQ ID NO: 3924888 - RNA, 15 nt, Human adenovirus D
gcagccugagcuugg

SEQ ID NO: 3924889 - RNA, 19 nt, Human adenovirus D
gcagccugagcuuggccga

SEQ ID NO: 3924890 - RNA, 20 nt, Human adenovirus D
gcagcgacugacuacccacu

SEQ ID NO: 3924891 - RNA, 22 nt, Human adenovirus D
gcagcgacugacuacccacuga

SEQ ID NO: 3924892 - RNA, 13 nt, Human adenovirus D
gcagcgcacucuc

SEQ ID NO: 3924893 - RNA, 14 nt, Human adenovirus D
gcagcgccccgagg

SEQ ID NO: 3924894 - RNA, 15 nt, Human adenovirus D
gcagcgccccgagga

SEQ ID NO: 3924895 - RNA, 13 nt, Human adenovirus D
gcagcggggccug

SEQ ID NO: 3924896 - RNA, 15 nt, Human adenovirus D
gcagcggggccuggu

SEQ ID NO: 3924897 - RNA, 13 nt, Human adenovirus D
gcagcucuucccg

SEQ ID NO: 3924898 - RNA, 17 nt, Human adenovirus D
gcagcuguuccuggugg

SEQ ID NO: 3924899 - RNA, 15 nt, Human adenovirus D
gcaggcagcggccug

SEQ ID NO: 3924900 - RNA, 13 nt, Human adenovirus D
gcaggccaacaga

SEQ ID NO: 3924901 - RNA, 15 nt, Human adenovirus D
gcaggcgacccugga

SEQ ID NO: 3924902 - RNA, 17 nt, Human adenovirus D
gcaggcgacccuggagg

SEQ ID NO: 3924903 - RNA, 15 nt, Human adenovirus D
gcaggcgccggcgcu

SEQ ID NO: 3924904 - RNA, 15 nt, Human adenovirus D
gcaggcgcuggaaga

SEQ ID NO: 3924905 - RNA, 16 nt, Human adenovirus D
gcagggagccagggga

SEQ ID NO: 3924906 - RNA, 14 nt, Human adenovirus D
gcagggagcugcgc

SEQ ID NO: 3924907 - RNA, 16 nt, Human adenovirus D
gcagggagcugcgcga

SEQ ID NO: 3924908 - RNA, 22 nt, Human adenovirus D
gccuacuuuuugggcacccacg

SEQ ID NO: 3924909 - RNA, 19 nt, Human adenovirus D
gccucaaugucagcugcaa

SEQ ID NO: 3924910 - RNA, 16 nt, Human adenovirus D
gccuccaccacccacg

SEQ ID NO: 3924911 - RNA, 22 nt, Human adenovirus D
gccuccgcgguauauggcuccu

SEQ ID NO: 3924912 - RNA, 20 nt, Human adenovirus D
gccucgagcuacaugcccag

SEQ ID NO: 3924913 - RNA, 21 nt, Human adenovirus D
gccucggcggcguggcccuug

SEQ ID NO: 3924914 - RNA, 18 nt, Human adenovirus D
gccucugacggcgcagcu

SEQ ID NO: 3924915 - RNA, 14 nt, Human adenovirus D
gccugaugagcucg

SEQ ID NO: 3924916 - RNA, 15 nt, Human adenovirus D
gccuggccucgggca

SEQ ID NO: 3924917 - RNA, 18 nt, Human adenovirus D
gccugggaauccugcacg

SEQ ID NO: 3924918 - RNA, 17 nt, Human adenovirus D
gccugggcgugcagacc

SEQ ID NO: 3924919 - RNA, 14 nt, Human adenovirus D
gccuggucaaacag

SEQ ID NO: 3924920 - RNA, 12 nt, Human adenovirus D
gccuuaccuggu

SEQ ID NO: 3924921 - RNA, 16 nt, Human adenovirus D
gccuucgaaggggggc

SEQ ID NO: 3924922 - RNA, 19 nt, Human adenovirus D
gccuucgugcacuggcccg

SEQ ID NO: 3924923 - RNA, 21 nt, Human adenovirus D
gccuugauuuuuccagcccag

SEQ ID NO: 3924924 - RNA, 15 nt, Human adenovirus D
gccuuguaccugccc

SEQ ID NO: 3924925 - RNA, 19 nt, Human adenovirus D
gccuuguagggacagcagc

SEQ ID NO: 3924926 - RNA, 16 nt, Human adenovirus D
gccuuuaucagcacug

SEQ ID NO: 3924927 - RNA, 20 nt, Human adenovirus D
gcgaaccgagcacucgugcu

SEQ ID NO: 3924928 - RNA, 15 nt, Human adenovirus D
gcgaagauggccacc

SEQ ID NO: 3924929 - RNA, 20 nt, Human adenovirus D
gcgaagauggggccccgcca

SEQ ID NO: 3924930 - RNA, 22 nt, Human adenovirus D
gcgaagggcuggcgagacuggg

SEQ ID NO: 3924931 - RNA, 15 nt, Human adenovirus D
gcgacaacgccaggc

SEQ ID NO: 3924932 - RNA, 15 nt, Human adenovirus D
gcgaccaccgcgacc

SEQ ID NO: 3924933 - RNA, 23 nt, Human adenovirus D
gcgaccgcggccguagcaggcgc

SEQ ID NO: 3924934 - RNA, 18 nt, Human adenovirus D
gcgaccugggcugcgggc

SEQ ID NO: 3924935 - RNA, 14 nt, Human adenovirus D
gcgagaaggcgcgc

SEQ ID NO: 3924936 - RNA, 18 nt, Human adenovirus D
gcgagaccggaggcgugc

SEQ ID NO: 3924937 - RNA, 13 nt, Human adenovirus D
gcgagaugucugu

SEQ ID NO: 3924938 - RNA, 14 nt, Human adenovirus D
gcgaggacgcagcg

SEQ ID NO: 3924939 - RNA, 15 nt, Human adenovirus D
gcgaggagguggccc

SEQ ID NO: 3924940 - RNA, 21 nt, Human adenovirus D
gcgaggccauaggccaggcgc

SEQ ID NO: 3924941 - RNA, 20 nt, Human adenovirus D
gcgagugcgggggcagacac

SEQ ID NO: 3924942 - RNA, 17 nt, Human adenovirus D
gcgaucucggacaugaa

SEQ ID NO: 3924943 - RNA, 17 nt, Human adenovirus D
gcgauguugagcuggac

SEQ ID NO: 3924944 - RNA, 20 nt, Human adenovirus D
gcgcaaauuuguacccgagg

SEQ ID NO: 3924945 - RNA, 13 nt, Human adenovirus D
gcgcaacugggcc

SEQ ID NO: 3924946 - RNA, 20 nt, Human adenovirus D
gcgcagacggucucgcacuc

SEQ ID NO: 3924947 - RNA, 19 nt, Human adenovirus D
gcgcagcaguauccgcgga

SEQ ID NO: 3924948 - RNA, 16 nt, Human adenovirus D
gcgcagcggcaggaaa

SEQ ID NO: 3924949 - RNA, 16 nt, Human adenovirus D
gcgcaucuacaagaga

SEQ ID NO: 3924950 - RNA, 22 nt, Human adenovirus D
gcgcccaccaucaccaccguca

SEQ ID NO: 3924951 - RNA, 23 nt, Human adenovirus D
gcgcccagauugcaaguacauag

SEQ ID NO: 3924952 - RNA, 13 nt, Human adenovirus D
gcgcccaggccgc

SEQ ID NO: 3924953 - RNA, 20 nt, Human adenovirus D
gcgccccgaggacacccggc

SEQ ID NO: 3924954 - RNA, 13 nt, Human adenovirus D
gcgcccggggcca

SEQ ID NO: 3924955 - RNA, 14 nt, Human adenovirus D
gcgcccucagcagu

SEQ ID NO: 3924956 - RNA, 18 nt, Human adenovirus D
gcgcccugagagcgcugg

SEQ ID NO: 3924957 - RNA, 16 nt, Human adenovirus D
gcgcccuucaccgaca

SEQ ID NO: 3924958 - RNA, 15 nt, Human adenovirus D
gcgccgacgcgcucc

SEQ ID NO: 3924959 - RNA, 17 nt, Human adenovirus D
gcgccgcccgagcucug

SEQ ID NO: 3924960 - RNA, 20 nt, Human adenovirus D
gcgccucaaugucagcugca

SEQ ID NO: 3924961 - RNA, 17 nt, Human adenovirus D
gcgccugaggcagacgc

SEQ ID NO: 3924962 - RNA, 22 nt, Human adenovirus D
gcgcgagcagaacgggggcagc

SEQ ID NO: 3924963 - RNA, 17 nt, Human adenovirus D
gcgcgccgcgccgccac

SEQ ID NO: 3924964 - RNA, 20 nt, Human adenovirus D
gcgcgccgcgccgccacugc

SEQ ID NO: 3924965 - RNA, 15 nt, Human adenovirus D
gcgcgcucacucuua

SEQ ID NO: 3924966 - RNA, 14 nt, Human adenovirus D
gcgcgcuggggcag

SEQ ID NO: 3924967 - RNA, 15 nt, Human adenovirus D
gcgcgguaggcccug

SEQ ID NO: 3924968 - RNA, 17 nt, Human adenovirus D
gcgcgucccuugaggag

SEQ ID NO: 3924969 - RNA, 19 nt, Human adenovirus D
gcgcugggcguggugcugg

SEQ ID NO: 3924970 - RNA, 15 nt, Human adenovirus D
gcgcuugcaagggug

SEQ ID NO: 3924971 - RNA, 14 nt, Human adenovirus D
gcggagcuugcccu

SEQ ID NO: 3924972 - RNA, 23 nt, Human adenovirus D
gcggagcuugcccuuggaagagc

SEQ ID NO: 3924973 - RNA, 13 nt, Human adenovirus D
gcggaggagacga

SEQ ID NO: 3924974 - RNA, 17 nt, Human adenovirus D
gcggaguccagcgagug

SEQ ID NO: 3924975 - RNA, 23 nt, Human adenovirus D
gcggauaucuugaaaucgcaguu

SEQ ID NO: 3924976 - RNA, 20 nt, Human adenovirus D
gcggcagcuuuuugagcucc

SEQ ID NO: 3924977 - RNA, 14 nt, Human adenovirus D
gcggcccggcacgg

SEQ ID NO: 3924978 - RNA, 23 nt, Human adenovirus D
gcggccguccuuucgcugcugcc

SEQ ID NO: 3924979 - RNA, 18 nt, Human adenovirus D
gcggccuugcggagcgag

SEQ ID NO: 3924980 - RNA, 14 nt, Human adenovirus D
gcggcgcaggggca

SEQ ID NO: 3924981 - RNA, 18 nt, Human adenovirus D
gcggcggaugguggcgag

SEQ ID NO: 3924982 - RNA, 12 nt, Human adenovirus D
gcggcugcugca

SEQ ID NO: 3924983 - RNA, 23 nt, Human adenovirus D
gcggcuuuggcaaagacguuucu

SEQ ID NO: 3924984 - RNA, 20 nt, Human adenovirus D
gcgggaucaucgccugcuug

SEQ ID NO: 3924985 - RNA, 19 nt, Human adenovirus D
gcgggcagggagcugcgcg

SEQ ID NO: 3924986 - RNA, 14 nt, Human adenovirus D
gcgggcaggggcgg

SEQ ID NO: 3924987 - RNA, 18 nt, Human adenovirus D
gcgggcaugaccucggca

SEQ ID NO: 3924988 - RNA, 15 nt, Human adenovirus D
gcgggccucacaguc

SEQ ID NO: 3924989 - RNA, 22 nt, Human adenovirus D
gcggguccccguugggcagcga

SEQ ID NO: 3924990 - RNA, 22 nt, Human adenovirus D
gcgguacacgggguugcagcac

SEQ ID NO: 3924991 - RNA, 18 nt, Human adenovirus D
gcggucgcgguggggcgg

SEQ ID NO: 3924992 - RNA, 22 nt, Human adenovirus D
gcgguucaagaacgagggccug

SEQ ID NO: 3924993 - RNA, 15 nt, Human adenovirus D
gcgguugagcgggcu

SEQ ID NO: 3924994 - RNA, 15 nt, Human adenovirus D
gcgucccuggcuccg

SEQ ID NO: 3924995 - RNA, 20 nt, Human adenovirus D
gcguccgcaguacucgcagc

SEQ ID NO: 3924996 - RNA, 18 nt, Human adenovirus D
gcguccgcggccacuucc

SEQ ID NO: 3924997 - RNA, 16 nt, Human adenovirus D
gcgucgcugaaagcau

SEQ ID NO: 3924998 - RNA, 17 nt, Human adenovirus D
gcgugauggcgcaggcg

SEQ ID NO: 3924999 - RNA, 18 nt, Human adenovirus D
gcgugcccgugcgcaccc

SEQ ID NO: 3925000 - RNA, 14 nt, Human adenovirus D
gcguguggcagcag

SEQ ID NO: 3925001 - RNA, 21 nt, Human adenovirus D
gcguuccccuccgcugugcug

SEQ ID NO: 3925002 - RNA, 13 nt, Human adenovirus D
gcuaaagcucuuc

SEQ ID NO: 3925003 - RNA, 15 nt, Human adenovirus D
gcuaccucuugcagc

SEQ ID NO: 3925004 - RNA, 16 nt, Human adenovirus D
gcuaccuugcacccac

SEQ ID NO: 3925005 - RNA, 23 nt, Human adenovirus D
gcuaccuugcacccaccaugcgc

SEQ ID NO: 3925006 - RNA, 16 nt, Human adenovirus D
gcuagacaccacagug

SEQ ID NO: 3925007 - RNA, 22 nt, Human adenovirus D
gcuagagugaggcacugcucuu

SEQ ID NO: 3925008 - RNA, 17 nt, Human adenovirus D
gcuagagugccacugcc

SEQ ID NO: 3925009 - RNA, 17 nt, Human adenovirus D
gcuagcccuuccuggac

SEQ ID NO: 3925010 - RNA, 15 nt, Human adenovirus D
gcucaccaccccgga

SEQ ID NO: 3925011 - RNA, 12 nt, Human adenovirus D
gcucacccgcag

SEQ ID NO: 3925012 - RNA, 15 nt, Human adenovirus D
gcucaugcuggccgu

SEQ ID NO: 3925013 - RNA, 21 nt, Human adenovirus D
gcuccaaagcuagcacccaaa

SEQ ID NO: 3925014 - RNA, 17 nt, Human adenovirus D
gcuccaccgaaggcagc

SEQ ID NO: 3925015 - RNA, 20 nt, Human adenovirus D
gcuccacgguggcggcgagg

SEQ ID NO: 3925016 - RNA, 18 nt, Human adenovirus D
gcuccaugcuucugggca

SEQ ID NO: 3925017 - RNA, 22 nt, Human adenovirus D
gcucccacagugcccccuccac

SEQ ID NO: 3925018 - RNA, 16 nt, Human adenovirus D
gcucccaccgcgccgc

SEQ ID NO: 3925019 - RNA, 17 nt, Human adenovirus D
gcuccggguucuggaga

SEQ ID NO: 3925020 - RNA, 12 nt, Human adenovirus D
gcuccguggggc

SEQ ID NO: 3925021 - RNA, 21 nt, Human adenovirus D
gcuccguuguacgacaccacu

SEQ ID NO: 3925022 - RNA, 11 nt, Human adenovirus D
gcuccugagcg

SEQ ID NO: 3925023 - RNA, 17 nt, Human adenovirus D
gcuccugagcgagaccc

SEQ ID NO: 3925024 - RNA, 19 nt, Human adenovirus D
caaaguuuuucaggggcuu

SEQ ID NO: 3925025 - RNA, 22 nt, Human adenovirus D
caaauuggcggacauauggaau

SEQ ID NO: 3925026 - RNA, 19 nt, Human adenovirus D
caacaacucgggcuucacc

SEQ ID NO: 3925027 - RNA, 14 nt, Human adenovirus D
caacaauaaaagac

SEQ ID NO: 3925028 - RNA, 14 nt, Human adenovirus D
caacaccagacaca

SEQ ID NO: 3925029 - RNA, 15 nt, Human adenovirus D
caacaccgccuccac

SEQ ID NO: 3925030 - RNA, 16 nt, Human adenovirus D
caacaucaccauugaa

SEQ ID NO: 3925031 - RNA, 20 nt, Human adenovirus D
caacaucggcuaccagggcu

SEQ ID NO: 3925032 - RNA, 13 nt, Human adenovirus D
caacaugcugacu

SEQ ID NO: 3925033 - RNA, 15 nt, Human adenovirus D
caaccagagccagaa

SEQ ID NO: 3925034 - RNA, 23 nt, Human adenovirus D
caaccaugugcgcacccugaucg

SEQ ID NO: 3925035 - RNA, 18 nt, Human adenovirus D
caaccucaccaaccagac

SEQ ID NO: 3925036 - RNA, 15 nt, Human adenovirus D
caaccugugcucucc

SEQ ID NO: 3925037 - RNA, 18 nt, Human adenovirus D
caaccuugaaaccccaga

SEQ ID NO: 3925038 - RNA, 19 nt, Human adenovirus D
caacgauuucacccccgcc

SEQ ID NO: 3925039 - RNA, 20 nt, Human adenovirus D
caacgcaucauggcccugac

SEQ ID NO: 3925040 - RNA, 14 nt, Human adenovirus D
caacgccaggcugg

SEQ ID NO: 3925041 - RNA, 18 nt, Human adenovirus D
caacgugcccaucuccau

SEQ ID NO: 3925042 - RNA, 18 nt, Human adenovirus D
caacucuuaaaucauuua

SEQ ID NO: 3925043 - RNA, 17 nt, Human adenovirus D
caacucuuccgccgccg

SEQ ID NO: 3925044 - RNA, 18 nt, Human adenovirus D
caacuggucuccugccug

SEQ ID NO: 3925045 - RNA, 12 nt, Human adenovirus D
caacuuccagcc

SEQ ID NO: 3925046 - RNA, 21 nt, Human adenovirus D
caacuuuaucagcgcgcugcg

SEQ ID NO: 3925047 - RNA, 15 nt, Human adenovirus D
caagaacgagggccu

SEQ ID NO: 3925048 - RNA, 19 nt, Human adenovirus D
caagaccuaccaaugaaaa

SEQ ID NO: 3925049 - RNA, 16 nt, Human adenovirus D
caagagccggcgggcg

SEQ ID NO: 3925050 - RNA, 23 nt, Human adenovirus D
caagagcgagaugucugugaagc

SEQ ID NO: 3925051 - RNA, 23 nt, Human adenovirus D
caagaggcgacccaugauggugc

SEQ ID NO: 3925052 - RNA, 20 nt, Human adenovirus D
caagaucaggggauguaagu

SEQ ID NO: 3925053 - RNA, 15 nt, Human adenovirus D
caagcagguggcgcc

SEQ ID NO: 3925054 - RNA, 23 nt, Human adenovirus D
caagcagguggcgccgggccugg

SEQ ID NO: 3925055 - RNA, 20 nt, Human adenovirus D
caagccucugacggcgcagc

SEQ ID NO: 3925056 - RNA, 12 nt, Human adenovirus D
caagcgcccaga

SEQ ID NO: 3925057 - RNA, 13 nt, Human adenovirus D
caagcgcccagag

SEQ ID NO: 3925058 - RNA, 22 nt, Human adenovirus D
caagcgcgggcggacugccacc

SEQ ID NO: 3925059 - RNA, 17 nt, Human adenovirus D
caagcuggugaugccag

SEQ ID NO: 3925060 - RNA, 21 nt, Human adenovirus D
caaggcgcgcuucacucuggc

SEQ ID NO: 3925061 - RNA, 20 nt, Human adenovirus D
caagggcgcucccaauccca

SEQ ID NO: 3925062 - RNA, 11 nt, Human adenovirus D
caagucaaaag

SEQ ID NO: 3925063 - RNA, 12 nt, Human adenovirus D
caagucaaaaga

SEQ ID NO: 3925064 - RNA, 20 nt, Human adenovirus D
caagucaaaagaaaacuaau

SEQ ID NO: 3925065 - RNA, 12 nt, Human adenovirus D
caagugcacaga

SEQ ID NO: 3925066 - RNA, 21 nt, Human adenovirus D
caagugccacaugcaccuggg

SEQ ID NO: 3925067 - RNA, 22 nt, Human adenovirus D
caauaagguucugcccuccgcc

SEQ ID NO: 3925068 - RNA, 14 nt, Human adenovirus D
caauaccgggauga

SEQ ID NO: 3925069 - RNA, 12 nt, Human adenovirus D
caauacucuggg

SEQ ID NO: 3925070 - RNA, 13 nt, Human adenovirus D
caauagacagcag

SEQ ID NO: 3925071 - RNA, 17 nt, Human adenovirus D
caaucucccaccaccag

SEQ ID NO: 3925072 - RNA, 19 nt, Human adenovirus D
caaucuggcgguaccaggg

SEQ ID NO: 3925073 - RNA, 14 nt, Human adenovirus D
caauguaacuaaac

SEQ ID NO: 3925074 - RNA, 14 nt, Human adenovirus D
caaugucagcugca

SEQ ID NO: 3925075 - RNA, 20 nt, Human adenovirus D
cacaaaaaugaagcccugcu

SEQ ID NO: 3925076 - RNA, 23 nt, Human adenovirus D
cacaaguacugcgcgcucacucu

SEQ ID NO: 3925077 - RNA, 13 nt, Human adenovirus D
cacaccugugaca

SEQ ID NO: 3925078 - RNA, 13 nt, Human adenovirus D
cacacgcccuggg

SEQ ID NO: 3925079 - RNA, 19 nt, Human adenovirus D
cacagagagccgccugagc

SEQ ID NO: 3925080 - RNA, 16 nt, Human adenovirus D
cacagcaguccaugcc

SEQ ID NO: 3925081 - RNA, 18 nt, Human adenovirus D
cacagcuagacaccacag

SEQ ID NO: 3925082 - RNA, 19 nt, Human adenovirus D
cacagcuagacaccacagu

SEQ ID NO: 3925083 - RNA, 14 nt, Human adenovirus D
cacaggaggcacag

SEQ ID NO: 3925084 - RNA, 17 nt, Human adenovirus D
cacaggugcugcccacc

SEQ ID NO: 3925085 - RNA, 19 nt, Human adenovirus D
cacagugcccccuccacuu

SEQ ID NO: 3925086 - RNA, 19 nt, Human adenovirus D
cacaguuggcgacccagga

SEQ ID NO: 3925087 - RNA, 15 nt, Human adenovirus D
cacaucgaggcccuc

SEQ ID NO: 3925088 - RNA, 13 nt, Human adenovirus D
cacaucgccgggc

SEQ ID NO: 3925089 - RNA, 19 nt, Human adenovirus D
caccaacgugcccaucucc

SEQ ID NO: 3925090 - RNA, 21 nt, Human adenovirus D
caccaacuuuaucagcgcgcu

SEQ ID NO: 3925091 - RNA, 13 nt, Human adenovirus D
caccacugcaugg

SEQ ID NO: 3925092 - RNA, 13 nt, Human adenovirus D
caccagccgcacc

SEQ ID NO: 3925093 - RNA, 20 nt, Human adenovirus D
caccagccgcaccgcggcgu

SEQ ID NO: 3925094 - RNA, 14 nt, Human adenovirus D
caccaggaugcagc

SEQ ID NO: 3925095 - RNA, 17 nt, Human adenovirus D
caccaggggguccaccu

SEQ ID NO: 3925096 - RNA, 16 nt, Human adenovirus D
caccaucaccaccguc

SEQ ID NO: 3925097 - RNA, 18 nt, Human adenovirus D
caccaugcgccaagggca

SEQ ID NO: 3925098 - RNA, 23 nt, Human adenovirus D
caccauguuauucagcagcccau

SEQ ID NO: 3925099 - RNA, 17 nt, Human adenovirus D
cacccagaccgugcagg

SEQ ID NO: 3925100 - RNA, 22 nt, Human adenovirus D
cacccccucgaugaugccgcag

SEQ ID NO: 3925101 - RNA, 21 nt, Human adenovirus D
cacccgguacuacgccagccg

SEQ ID NO: 3925102 - RNA, 15 nt, Human adenovirus D
cacccuggaagccau

SEQ ID NO: 3925103 - RNA, 11 nt, Human adenovirus D
cacccuggugu

SEQ ID NO: 3925104 - RNA, 13 nt, Human adenovirus D
caccgaaggcagc

SEQ ID NO: 3925105 - RNA, 14 nt, Human adenovirus D
caccgacacguacu

SEQ ID NO: 3925106 - RNA, 20 nt, Human adenovirus D
caccgacagucugagggcca

SEQ ID NO: 3925107 - RNA, 12 nt, Human adenovirus D
caccgaccuggg

SEQ ID NO: 3925108 - RNA, 16 nt, Human adenovirus D
caccgcauccugaucu

SEQ ID NO: 3925109 - RNA, 17 nt, Human adenovirus D
caccgccacccgccgcc

SEQ ID NO: 3925110 - RNA, 20 nt, Human adenovirus D
caccgccgcagccgcggcag

SEQ ID NO: 3925111 - RNA, 13 nt, Human adenovirus D
caccgccuccacc

SEQ ID NO: 3925112 - RNA, 16 nt, Human adenovirus D
caccgccuccacccug

SEQ ID NO: 3925113 - RNA, 18 nt, Human adenovirus D
caccgccuccacccugga

SEQ ID NO: 3925114 - RNA, 13 nt, Human adenovirus D
caccggcuggggu

SEQ ID NO: 3925115 - RNA, 19 nt, Human adenovirus D
caccgugcgcuaccacccc

SEQ ID NO: 3925116 - RNA, 23 nt, Human adenovirus D
caccgugcgcuaccaccccagca

SEQ ID NO: 3925117 - RNA, 13 nt, Human adenovirus D
caccucggugcag

SEQ ID NO: 3925118 - RNA, 18 nt, Human adenovirus D
caccugcggcgcggagca

SEQ ID NO: 3925119 - RNA, 17 nt, Human adenovirus D
caccugcgucugcagca

SEQ ID NO: 3925120 - RNA, 15 nt, Human adenovirus D
caccuggaggcacca

SEQ ID NO: 3925121 - RNA, 18 nt, Human adenovirus D
caccugggcacuggagca

SEQ ID NO: 3925122 - RNA, 17 nt, Human adenovirus D
caccuggugauggccug

SEQ ID NO: 3925123 - RNA, 14 nt, Human adenovirus D
caccugucccuacg

SEQ ID NO: 3925124 - RNA, 14 nt, Human adenovirus D
caccuguggagggc

SEQ ID NO: 3925125 - RNA, 23 nt, Human adenovirus D
caccuuccguucuacccagcaag

SEQ ID NO: 3925126 - RNA, 15 nt, Human adenovirus D
caccuuccugcagcu

SEQ ID NO: 3925127 - RNA, 18 nt, Human adenovirus D
cacgagaaccgccugggg

SEQ ID NO: 3925128 - RNA, 22 nt, Human adenovirus D
cacgauguaacaucaccacagg

SEQ ID NO: 3925129 - RNA, 13 nt, Human adenovirus D
cacgccaccgcuu

SEQ ID NO: 3925130 - RNA, 12 nt, Human adenovirus D
cacgcccgcucc

SEQ ID NO: 3925131 - RNA, 22 nt, Human adenovirus D
cacgccggcuuguagaggauag

SEQ ID NO: 3925132 - RNA, 16 nt, Human adenovirus D
cacgcgcacacuuugg

SEQ ID NO: 3925133 - RNA, 21 nt, Human adenovirus D
cacgcugguggccaccucgcc

SEQ ID NO: 3925134 - RNA, 18 nt, Human adenovirus D
cacgguaagagcccagca

SEQ ID NO: 3925135 - RNA, 15 nt, Human adenovirus D
cacgguggugcagaa

SEQ ID NO: 3925136 - RNA, 19 nt, Human adenovirus D
cacguacuucagccugggc

SEQ ID NO: 3925137 - RNA, 21 nt, Human adenovirus D
cacgucugacugccgccggcc

SEQ ID NO: 3925138 - RNA, 12 nt, Human adenovirus D
cacgugaccagg

SEQ ID NO: 3925139 - RNA, 23 nt, Human adenovirus D
cacgugaccagggguccccgacg

SEQ ID NO: 3925140 - RNA, 18 nt, Human adenovirus D
cacguuucgucaggcagg

SEQ ID NO: 3925141 - RNA, 15 nt, Human adenovirus D
cacuacagccggggu

SEQ ID NO: 3925142 - RNA, 12 nt, Human adenovirus D
cacuccccccuu

SEQ ID NO: 3925143 - RNA, 16 nt, Human adenovirus D
aguucacuagccucca

SEQ ID NO: 3925144 - RNA, 20 nt, Human adenovirus D
aguucaggagcgcagccuga

SEQ ID NO: 3925145 - RNA, 17 nt, Human adenovirus D
aguugagggugguggcg

SEQ ID NO: 3925146 - RNA, 17 nt, Human adenovirus D
aguugcagaccgcgggc

SEQ ID NO: 3925147 - RNA, 15 nt, Human adenovirus D
aguugcgcaggcgcu

SEQ ID NO: 3925148 - RNA, 18 nt, Human adenovirus D
aguuuaauaaaagcuaaa

SEQ ID NO: 3925149 - RNA, 22 nt, Human adenovirus D
aguuucaacaaccaugugcgca

SEQ ID NO: 3925150 - RNA, 19 nt, Human adenovirus D
aguuuccugacgagccaaa

SEQ ID NO: 3925151 - RNA, 14 nt, Human adenovirus D
aguuuggccuggau

SEQ ID NO: 3925152 - RNA, 15 nt, Human adenovirus D
auaaauuuugacgag

SEQ ID NO: 3925153 - RNA, 15 nt, Human adenovirus D
auaagucacuaggac

SEQ ID NO: 3925154 - RNA, 13 nt, Human adenovirus D
auaaucaggcaga

SEQ ID NO: 3925155 - RNA, 22 nt, Human adenovirus D
auaauucagggugcuccagcca

SEQ ID NO: 3925156 - RNA, 19 nt, Human adenovirus D
auacagaugguagcagcag

SEQ ID NO: 3925157 - RNA, 16 nt, Human adenovirus D
auaccauugcaaggca

SEQ ID NO: 3925158 - RNA, 12 nt, Human adenovirus D
auaucagccagu

SEQ ID NO: 3925159 - RNA, 21 nt, Human adenovirus D
auauccaguaggaaccagcac

SEQ ID NO: 3925160 - RNA, 17 nt, Human adenovirus D
auauuccagaucacaug

SEQ ID NO: 3925161 - RNA, 15 nt, Human adenovirus D
aucaacauaggcgcc

SEQ ID NO: 3925162 - RNA, 20 nt, Human adenovirus D
aucaagugccacaugcaccu

SEQ ID NO: 3925163 - RNA, 22 nt, Human adenovirus D
aucaagugccacaugcaccugg

SEQ ID NO: 3925164 - RNA, 16 nt, Human adenovirus D
aucacaucagccagga

SEQ ID NO: 3925165 - RNA, 18 nt, Human adenovirus D
aucacaucggacuggguu

SEQ ID NO: 3925166 - RNA, 21 nt, Human adenovirus D
aucaccauguuauucagcagc

SEQ ID NO: 3925167 - RNA, 22 nt, Human adenovirus D
aucaccauguuauucagcagcc

SEQ ID NO: 3925168 - RNA, 17 nt, Human adenovirus D
aucacccucagaagaag

SEQ ID NO: 3925169 - RNA, 21 nt, Human adenovirus D
aucacucuuuccagcagcagg

SEQ ID NO: 3925170 - RNA, 13 nt, Human adenovirus D
aucagacaugcug

SEQ ID NO: 3925171 - RNA, 15 nt, Human adenovirus D
aucaugguguggaag

SEQ ID NO: 3925172 - RNA, 15 nt, Human adenovirus D
aucccacgccgagcc

SEQ ID NO: 3925173 - RNA, 14 nt, Human adenovirus D
aucccaugcccucg

SEQ ID NO: 3925174 - RNA, 17 nt, Human adenovirus D
auccccuucuccagcaa

SEQ ID NO: 3925175 - RNA, 19 nt, Human adenovirus D
aucccggccaaggccacca

SEQ ID NO: 3925176 - RNA, 21 nt, Human adenovirus D
auccuccgggacgcccuggcc

SEQ ID NO: 3925177 - RNA, 22 nt, Human adenovirus D
auccuccgggacgcccuggccg

SEQ ID NO: 3925178 - RNA, 18 nt, Human adenovirus D
auccuugcagacuuuagc

SEQ ID NO: 3925179 - RNA, 16 nt, Human adenovirus D
auccuuucccuggugg

SEQ ID NO: 3925180 - RNA, 18 nt, Human adenovirus D
aucgaacacgccaccgcu

SEQ ID NO: 3925181 - RNA, 17 nt, Human adenovirus D
aucgagcaggaccuggg

SEQ ID NO: 3925182 - RNA, 15 nt, Human adenovirus D
aucgauggugaagau

SEQ ID NO: 3925183 - RNA, 11 nt, Human adenovirus D
aucgccaggcc

SEQ ID NO: 3925184 - RNA, 14 nt, Human adenovirus D
aucgccgagcccga

SEQ ID NO: 3925185 - RNA, 18 nt, Human adenovirus D
aucuccaacguggagcug

SEQ ID NO: 3925186 - RNA, 15 nt, Human adenovirus D
aucucgauccagcag

SEQ ID NO: 3925187 - RNA, 16 nt, Human adenovirus D
aucucgcugccgcugg

SEQ ID NO: 3925188 - RNA, 23 nt, Human adenovirus D
aucugcccugauauccaguagga

SEQ ID NO: 3925189 - RNA, 14 nt, Human adenovirus D
aucuugcccacguc

SEQ ID NO: 3925190 - RNA, 17 nt, Human adenovirus D
aucuuugacauggaugu

SEQ ID NO: 3925191 - RNA, 12 nt, Human adenovirus D
augaacugcucg

SEQ ID NO: 3925192 - RNA, 15 nt, Human adenovirus D
augaaggcuuucaca

SEQ ID NO: 3925193 - RNA, 21 nt, Human adenovirus D
augaaggggacgagcugcuug

SEQ ID NO: 3925194 - RNA, 18 nt, Human adenovirus D
augaaguucaauggagag

SEQ ID NO: 3925195 - RNA, 19 nt, Human adenovirus D
augaccauagaccugauga

SEQ ID NO: 3925196 - RNA, 21 nt, Human adenovirus D
augaccccgaugacggguugc

SEQ ID NO: 3925197 - RNA, 22 nt, Human adenovirus D
augaccuucgagguggacccca

SEQ ID NO: 3925198 - RNA, 18 nt, Human adenovirus D
augacggguugcaggugg

SEQ ID NO: 3925199 - RNA, 15 nt, Human adenovirus D
augagagucugaaaa

SEQ ID NO: 3925200 - RNA, 21 nt, Human adenovirus D
augagcagcuugcgcgcuggc

SEQ ID NO: 3925201 - RNA, 18 nt, Human adenovirus D
augaggauugggaggagg

SEQ ID NO: 3925202 - RNA, 13 nt, Human adenovirus D
augaggcaggcca

SEQ ID NO: 3925203 - RNA, 16 nt, Human adenovirus D
augaugaccgagcuga

SEQ ID NO: 3925204 - RNA, 15 nt, Human adenovirus D
augaugauuuaaaaa

SEQ ID NO: 3925205 - RNA, 13 nt, Human adenovirus D
augcaccugggcg

SEQ ID NO: 3925206 - RNA, 20 nt, Human adenovirus D
augcagggugaccaggucca

SEQ ID NO: 3925207 - RNA, 22 nt, Human adenovirus D
augcccagcagcagcaguagcc

SEQ ID NO: 3925208 - RNA, 16 nt, Human adenovirus D
augccccaggccuggc

SEQ ID NO: 3925209 - RNA, 19 nt, Human adenovirus D
augcccuuccgcgccaaga

SEQ ID NO: 3925210 - RNA, 18 nt, Human adenovirus D
augcccuuuucccaggac

SEQ ID NO: 3925211 - RNA, 15 nt, Human adenovirus D
augcgacccaugagc

SEQ ID NO: 3925212 - RNA, 21 nt, Human adenovirus D
augcgucccacccccccggcg

SEQ ID NO: 3925213 - RNA, 14 nt, Human adenovirus D
augcuaccugggag

SEQ ID NO: 3925214 - RNA, 23 nt, Human adenovirus D
augcuccaggucgucgccccgga

SEQ ID NO: 3925215 - RNA, 20 nt, Human adenovirus D
augcugagccugcgccgggc

SEQ ID NO: 3925216 - RNA, 13 nt, Human adenovirus D
augcugaucaagu

SEQ ID NO: 3925217 - RNA, 21 nt, Human adenovirus D
augcugcccgccaccugcaac

SEQ ID NO: 3925218 - RNA, 22 nt, Human adenovirus D
auggacgagaacccgaggagcg

SEQ ID NO: 3925219 - RNA, 19 nt, Human adenovirus D
auggagcuuaucuugguua

SEQ ID NO: 3925220 - RNA, 16 nt, Human adenovirus D
auggcuuguggccccc

SEQ ID NO: 3925221 - RNA, 15 nt, Human adenovirus D
augggaacaaggccu

SEQ ID NO: 3925222 - RNA, 18 nt, Human adenovirus D
augggaacaaggccugga

SEQ ID NO: 3925223 - RNA, 15 nt, Human adenovirus D
augggaacauauauc

SEQ ID NO: 3925224 - RNA, 15 nt, Human adenovirus D
augggacagccagca

SEQ ID NO: 3925225 - RNA, 23 nt, Human adenovirus D
augggcgccuucaccgaccuggg

SEQ ID NO: 3925226 - RNA, 17 nt, Human adenovirus D
augggggcggaccugca

SEQ ID NO: 3925227 - RNA, 15 nt, Human adenovirus D
augguacuaaugaca

SEQ ID NO: 3925228 - RNA, 19 nt, Human adenovirus D
auggugcccaagcgccggc

SEQ ID NO: 3925229 - RNA, 22 nt, Human adenovirus D
auguaaguuuuauggcugcugg

SEQ ID NO: 3925230 - RNA, 13 nt, Human adenovirus D
auguguggacuau

SEQ ID NO: 3925231 - RNA, 18 nt, Human adenovirus D
auguuauucagcagccca

SEQ ID NO: 3925232 - RNA, 17 nt, Human adenovirus D
auuaaaaagcagcacag

SEQ ID NO: 3925233 - RNA, 16 nt, Human adenovirus D
auuacuauuacugcca

SEQ ID NO: 3925234 - RNA, 16 nt, Human adenovirus D
auuacucgcaaaaaua

SEQ ID NO: 3925235 - RNA, 14 nt, Human adenovirus D
auuaugacauagau

SEQ ID NO: 3925236 - RNA, 16 nt, Human adenovirus D
auuccucgaccaugac

SEQ ID NO: 3925237 - RNA, 20 nt, Human adenovirus D
auucucauuuuuccagccuu

SEQ ID NO: 3925238 - RNA, 23 nt, Human adenovirus D
auucuggacuucgcagccaugca

SEQ ID NO: 3925239 - RNA, 17 nt, Human adenovirus D
auugagagugcggugga

SEQ ID NO: 3925240 - RNA, 20 nt, Human adenovirus D
auugcaggauugauaaggag

SEQ ID NO: 3925241 - RNA, 16 nt, Human adenovirus D
auugcccaacaauaaa

SEQ ID NO: 3925242 - RNA, 19 nt, Human adenovirus D
auugcccaacaauaaaaga

SEQ ID NO: 3925243 - RNA, 15 nt, Human adenovirus D
auugcucuggccugc

SEQ ID NO: 3925244 - RNA, 12 nt, Human adenovirus D
auugcuucccau

SEQ ID NO: 3925245 - RNA, 21 nt, Human adenovirus D
auuguugggaggaaccaugaa

SEQ ID NO: 3925246 - RNA, 17 nt, Human adenovirus D
auuuaauaaagaucacu

SEQ ID NO: 3925247 - RNA, 23 nt, Human adenovirus D
auuugacacagcaguccaugccc

SEQ ID NO: 3925248 - RNA, 14 nt, Human adenovirus D
caaaaauuaucuuu

SEQ ID NO: 3925249 - RNA, 18 nt, Human adenovirus D
caaaaccuaccacuggcu

SEQ ID NO: 3925250 - RNA, 15 nt, Human adenovirus D
caaaacucacuuugg

SEQ ID NO: 3925251 - RNA, 16 nt, Human adenovirus D
caaaacucacuuuggu

SEQ ID NO: 3925252 - RNA, 17 nt, Human adenovirus D
caaaacuuaacucugau

SEQ ID NO: 3925253 - RNA, 18 nt, Human adenovirus D
caaaagauacagaguaaa

SEQ ID NO: 3925254 - RNA, 17 nt, Human adenovirus D
caaaagugcuggagggu

SEQ ID NO: 3925255 - RNA, 19 nt, Human adenovirus D
caaaauggcgugcuggaga

SEQ ID NO: 3925256 - RNA, 12 nt, Human adenovirus D
caaacaaaagcc

SEQ ID NO: 3925257 - RNA, 19 nt, Human adenovirus D
caaacacaccugacacaaa

SEQ ID NO: 3925258 - RNA, 12 nt, Human adenovirus D
caaagagcacag

SEQ ID NO: 3925259 - RNA, 14 nt, Human adenovirus D
caaagagcacagca

SEQ ID NO: 3925260 - RNA, 21 nt, Human adenovirus D
caaaggagccauagagggcgu

SEQ ID NO: 3925261 - RNA, 23 nt, Human adenovirus D
caaaggucuaaaaaccccgccaa

SEQ ID NO: 3925262 - RNA, 16 nt, Human adenovirus D
acaggcacacugacau

SEQ ID NO: 3925263 - RNA, 20 nt, Human adenovirus D
acaggccgcagcucuucccg

SEQ ID NO: 3925264 - RNA, 12 nt, Human adenovirus D
acaguacuggca

SEQ ID NO: 3925265 - RNA, 16 nt, Human adenovirus D
acagugcccccuccac

SEQ ID NO: 3925266 - RNA, 17 nt, Human adenovirus D
acagugcccccuccacu

SEQ ID NO: 3925267 - RNA, 17 nt, Human adenovirus D
acaguuggcgacccagg

SEQ ID NO: 3925268 - RNA, 20 nt, Human adenovirus D
acaucaauuuugcgucccug

SEQ ID NO: 3925269 - RNA, 18 nt, Human adenovirus D
acaucacauucaaaaacc

SEQ ID NO: 3925270 - RNA, 13 nt, Human adenovirus D
acaucagccagga

SEQ ID NO: 3925271 - RNA, 21 nt, Human adenovirus D
acaucauaauuaugcuccugg

SEQ ID NO: 3925272 - RNA, 14 nt, Human adenovirus D
acauccauggccag

SEQ ID NO: 3925273 - RNA, 18 nt, Human adenovirus D
acauccucuucugucucu

SEQ ID NO: 3925274 - RNA, 20 nt, Human adenovirus D
acaucgccgggcaggacgcc

SEQ ID NO: 3925275 - RNA, 15 nt, Human adenovirus D
acaucugugcugccu

SEQ ID NO: 3925276 - RNA, 14 nt, Human adenovirus D
acaugcccagcagc

SEQ ID NO: 3925277 - RNA, 17 nt, Human adenovirus D
acaugcgcauggcgcuc

SEQ ID NO: 3925278 - RNA, 23 nt, Human adenovirus D
acauggccagcacguacuuugac

SEQ ID NO: 3925279 - RNA, 13 nt, Human adenovirus D
acauguugaaaag

SEQ ID NO: 3925280 - RNA, 19 nt, Human adenovirus D
acauuaugauaaucugcau

SEQ ID NO: 3925281 - RNA, 16 nt, Human adenovirus D
accaaggaaacucccu

SEQ ID NO: 3925282 - RNA, 12 nt, Human adenovirus D
accacaccuuca

SEQ ID NO: 3925283 - RNA, 18 nt, Human adenovirus D
accacagcaacuuccuga

SEQ ID NO: 3925284 - RNA, 13 nt, Human adenovirus D
accaccagcccau

SEQ ID NO: 3925285 - RNA, 19 nt, Human adenovirus D
accacggaccggucccagc

SEQ ID NO: 3925286 - RNA, 15 nt, Human adenovirus D
accacucugagacaa

SEQ ID NO: 3925287 - RNA, 18 nt, Human adenovirus D
accacugcauggccucgu

SEQ ID NO: 3925288 - RNA, 15 nt, Human adenovirus D
accagaacuuccagc

SEQ ID NO: 3925289 - RNA, 16 nt, Human adenovirus D
accagaacuuccagca

SEQ ID NO: 3925290 - RNA, 13 nt, Human adenovirus D
accagaccaccug

SEQ ID NO: 3925291 - RNA, 18 nt, Human adenovirus D
accagacccaggcgcgga

SEQ ID NO: 3925292 - RNA, 12 nt, Human adenovirus D
cgugaaggccgg

SEQ ID NO: 3925293 - RNA, 18 nt, Human adenovirus D
cgugaccugcagcaggug

SEQ ID NO: 3925294 - RNA, 16 nt, Human adenovirus D
cgugaucccacagggc

SEQ ID NO: 3925295 - RNA, 21 nt, Human adenovirus D
cgugaucccacagggcacugc

SEQ ID NO: 3925296 - RNA, 16 nt, Human adenovirus D
cgugcagcugcagaag

SEQ ID NO: 3925297 - RNA, 21 nt, Human adenovirus D
cgugccccccaaacgccagcc

SEQ ID NO: 3925298 - RNA, 20 nt, Human adenovirus D
cgugcgcacccguccuccuc

SEQ ID NO: 3925299 - RNA, 16 nt, Human adenovirus D
cgugcgcgaccugggc

SEQ ID NO: 3925300 - RNA, 23 nt, Human adenovirus D
cgugcuccggcggauagcgcgcc

SEQ ID NO: 3925301 - RNA, 18 nt, Human adenovirus D
cgugcuugagaugcagau

SEQ ID NO: 3925302 - RNA, 13 nt, Human adenovirus D
cguggacgcugcu

SEQ ID NO: 3925303 - RNA, 13 nt, Human adenovirus D
cguggcgcagcgc

SEQ ID NO: 3925304 - RNA, 15 nt, Human adenovirus D
cguggcuucgagcag

SEQ ID NO: 3925305 - RNA, 21 nt, Human adenovirus D
cguggggcgcuuacaagcgcg

SEQ ID NO: 3925306 - RNA, 21 nt, Human adenovirus D
cguguccacgcauugcaugag

SEQ ID NO: 3925307 - RNA, 14 nt, Human adenovirus D
cguguucaaaacaa

SEQ ID NO: 3925308 - RNA, 21 nt, Human adenovirus D
cguuagccgugcgucgugacg

SEQ ID NO: 3925309 - RNA, 14 nt, Human adenovirus D
cguuaguccagcag

SEQ ID NO: 3925310 - RNA, 18 nt, Human adenovirus D
cguucagggaggcgcugc

SEQ ID NO: 3925311 - RNA, 12 nt, Human adenovirus D
cguucaugggca

SEQ ID NO: 3925312 - RNA, 14 nt, Human adenovirus D
cguucuacccagca

SEQ ID NO: 3925313 - RNA, 23 nt, Human adenovirus D
cuaaacuaagguggcuauuuuca

SEQ ID NO: 3925314 - RNA, 22 nt, Human adenovirus D
cuaacgcuguaccgcgaggcca

SEQ ID NO: 3925315 - RNA, 22 nt, Human adenovirus D
cuaagguggcuauuuucacuga

SEQ ID NO: 3925316 - RNA, 12 nt, Human adenovirus D
cuaaugacaaac

SEQ ID NO: 3925317 - RNA, 22 nt, Human adenovirus D
cuaaugacagaggcaacagcaa

SEQ ID NO: 3925318 - RNA, 22 nt, Human adenovirus D
cuaaugguccugcaagaggaga

SEQ ID NO: 3925319 - RNA, 14 nt, Human adenovirus D
cuacaacagcacaa

SEQ ID NO: 3925320 - RNA, 17 nt, Human adenovirus D
cuacaaggcccugggca

SEQ ID NO: 3925321 - RNA, 14 nt, Human adenovirus D
cuacaaggccguca

SEQ ID NO: 3925322 - RNA, 16 nt, Human adenovirus D
cuacaaucgccacagg

SEQ ID NO: 3925323 - RNA, 18 nt, Human adenovirus D
cuacacggucacugucca

SEQ ID NO: 3925324 - RNA, 15 nt, Human adenovirus D
cuacaugcccagcag

SEQ ID NO: 3925325 - RNA, 17 nt, Human adenovirus D
cuaccacgcccaugaga

SEQ ID NO: 3925326 - RNA, 16 nt, Human adenovirus D
cuaccucucggccgcc

SEQ ID NO: 3925327 - RNA, 20 nt, Human adenovirus D
cuaccugggaggagaggagg

SEQ ID NO: 3925328 - RNA, 23 nt, Human adenovirus D
cuacgccagccgcaggcgcccag

SEQ ID NO: 3925329 - RNA, 23 nt, Human adenovirus D
cuacucggugcuuagccugggca

SEQ ID NO: 3925330 - RNA, 17 nt, Human adenovirus D
cuacuugcaaguggggc

SEQ ID NO: 3925331 - RNA, 16 nt, Human adenovirus D
cuacuuuuugggcacc

SEQ ID NO: 3925332 - RNA, 15 nt, Human adenovirus D
cuagaaccccacagg

SEQ ID NO: 3925333 - RNA, 16 nt, Human adenovirus D
cuagcccuuccuggac

SEQ ID NO: 3925334 - RNA, 15 nt, Human adenovirus D
cuagcgcccugguag

SEQ ID NO: 3925335 - RNA, 23 nt, Human adenovirus D
cuaguguacaacgcccugcugga

SEQ ID NO: 3925336 - RNA, 16 nt, Human adenovirus D
cuaucauucagagggg

SEQ ID NO: 3925337 - RNA, 17 nt, Human adenovirus D
cuaucgcuuccucgcgc

SEQ ID NO: 3925338 - RNA, 17 nt, Human adenovirus D
cuaugggaacaaggccu

SEQ ID NO: 3925339 - RNA, 12 nt, Human adenovirus D
cuauuuucacug

SEQ ID NO: 3925340 - RNA, 14 nt, Human adenovirus D
cucaacagcuggga

SEQ ID NO: 3925341 - RNA, 17 nt, Human adenovirus D
cucaauaaacagcacuu

SEQ ID NO: 3925342 - RNA, 15 nt, Human adenovirus D
cucaccaaggccaua

SEQ ID NO: 3925343 - RNA, 17 nt, Human adenovirus D
cucaccaaggccauagc

SEQ ID NO: 3925344 - RNA, 20 nt, Human adenovirus D
cucaccaccccggacgucac

SEQ ID NO: 3925345 - RNA, 15 nt, Human adenovirus D
cucacuugccgccug

SEQ ID NO: 3925346 - RNA, 16 nt, Human adenovirus D
cucacuuuuaggugaa

SEQ ID NO: 3925347 - RNA, 13 nt, Human adenovirus D
cucagcagucucu

SEQ ID NO: 3925348 - RNA, 12 nt, Human adenovirus D
cucaggcgcaac

SEQ ID NO: 3925349 - RNA, 20 nt, Human adenovirus D
cucaggcgcaaccaggagga

SEQ ID NO: 3925350 - RNA, 18 nt, Human adenovirus D
cucagucacucucauuuc

SEQ ID NO: 3925351 - RNA, 19 nt, Human adenovirus D
cucaucacaucagccagga

SEQ ID NO: 3925352 - RNA, 14 nt, Human adenovirus D
cucaugcccuuccg

SEQ ID NO: 3925353 - RNA, 14 nt, Human adenovirus D
cuccaccacccacg

SEQ ID NO: 3925354 - RNA, 14 nt, Human adenovirus D
cuccaggccaaccu

SEQ ID NO: 3925355 - RNA, 18 nt, Human adenovirus D
cuccaguuuguggaggag

SEQ ID NO: 3925356 - RNA, 16 nt, Human adenovirus D
cuccauccccucgcgc

SEQ ID NO: 3925357 - RNA, 17 nt, Human adenovirus D
cucccacaaucacggca

SEQ ID NO: 3925358 - RNA, 13 nt, Human adenovirus D
cucccaccccaga

SEQ ID NO: 3925359 - RNA, 18 nt, Human adenovirus D
cuccccgacccccuucca

SEQ ID NO: 3925360 - RNA, 14 nt, Human adenovirus D
cucccucacccacg

SEQ ID NO: 3925361 - RNA, 19 nt, Human adenovirus D
cuccgcggcacggcacgcg

SEQ ID NO: 3925362 - RNA, 15 nt, Human adenovirus D
cuccgcggcggcgcg

SEQ ID NO: 3925363 - RNA, 22 nt, Human adenovirus D
cuccggaggcaucggaacccuc

SEQ ID NO: 3925364 - RNA, 18 nt, Human adenovirus D
cuccgggacgcccuggcc

SEQ ID NO: 3925365 - RNA, 15 nt, Human adenovirus D
cuccggguucuggag

SEQ ID NO: 3925366 - RNA, 12 nt, Human adenovirus D
cuccguagccug

SEQ ID NO: 3925367 - RNA, 13 nt, Human adenovirus D
cuccguccgcuuc

SEQ ID NO: 3925368 - RNA, 16 nt, Human adenovirus D
cuccuccuccuggaga

SEQ ID NO: 3925369 - RNA, 13 nt, Human adenovirus D
cuccuccuggaga

SEQ ID NO: 3925370 - RNA, 14 nt, Human adenovirus D
cuccuccuggagau

SEQ ID NO: 3925371 - RNA, 17 nt, Human adenovirus D
cuccucgcucuggggcc

SEQ ID NO: 3925372 - RNA, 15 nt, Human adenovirus D
cuccucguagagaaa

SEQ ID NO: 3925373 - RNA, 15 nt, Human adenovirus D
cuccucucgugcucc

SEQ ID NO: 3925374 - RNA, 22 nt, Human adenovirus D
cuccugaaccacacggccagca

SEQ ID NO: 3925375 - RNA, 19 nt, Human adenovirus D
cuccugccgcgccaaccgc

SEQ ID NO: 3925376 - RNA, 20 nt, Human adenovirus D
cuccuucaacgcgcgcugcc

SEQ ID NO: 3925377 - RNA, 20 nt, Human adenovirus D
cucgaagacgccgaggcucu

SEQ ID NO: 3925378 - RNA, 17 nt, Human adenovirus D
cucgaagauucuggaga

SEQ ID NO: 3925379 - RNA, 21 nt, Human adenovirus D
cucgagcgcccauuccuggag

SEQ ID NO: 3925380 - RNA, 22 nt, Human adenovirus D
cucgagcgcccauuccuggaga

SEQ ID NO: 3925381 - RNA, 22 nt, Human adenovirus D
cucgagcuacaugcccagcagc

SEQ ID NO: 3925382 - RNA, 17 nt, Human adenovirus D
cucgcagugcacgggca

SEQ ID NO: 3925383 - RNA, 13 nt, Human adenovirus D
cucgcccagcaau

SEQ ID NO: 3925384 - RNA, 19 nt, Human adenovirus D
cucgccgucuacucccagc

SEQ ID NO: 3925385 - RNA, 15 nt, Human adenovirus D
cucgcgcaacugggc

SEQ ID NO: 3925386 - RNA, 15 nt, Human adenovirus D
cucgcggcugcugcu

SEQ ID NO: 3925387 - RNA, 11 nt, Human adenovirus D
cucgcuccaca

SEQ ID NO: 3925388 - RNA, 20 nt, Human adenovirus D
cucgcugaaaaacaggccgc

SEQ ID NO: 3925389 - RNA, 12 nt, Human adenovirus D
cucgcugcugca

SEQ ID NO: 3925390 - RNA, 22 nt, Human adenovirus D
cucggaguaccugagcccgggu

SEQ ID NO: 3925391 - RNA, 15 nt, Human adenovirus D
cucggccaaucagca

SEQ ID NO: 3925392 - RNA, 16 nt, Human adenovirus D
cucggccauucuggag

SEQ ID NO: 3925393 - RNA, 14 nt, Human adenovirus D
cucggggcauugca

SEQ ID NO: 3925394 - RNA, 18 nt, Human adenovirus D
cucgguacccuccuccca

SEQ ID NO: 3925395 - RNA, 18 nt, Human adenovirus D
cucggugcggcugcugca

SEQ ID NO: 3925396 - RNA, 23 nt, Human adenovirus D
cucguacaaggcgcgcuucacuc

SEQ ID NO: 3925397 - RNA, 17 nt, Human adenovirus D
cucguacccgcucacca

SEQ ID NO: 3925398 - RNA, 18 nt, Human adenovirus D
cucgucgcuugacagcac

SEQ ID NO: 3925399 - RNA, 15 nt, Human adenovirus D
cucgucuuccaggag

SEQ ID NO: 3925400 - RNA, 23 nt, Human adenovirus D
cucuagcaugaccagacccaggc

SEQ ID NO: 3925401 - RNA, 23 nt, Human adenovirus D
ugagagucugaaaaacagaaagc

SEQ ID NO: 3925402 - RNA, 16 nt, Human adenovirus D
ugagauaugugcagca

SEQ ID NO: 3925403 - RNA, 23 nt, Human adenovirus D
ugagcgcauguacaacaugcuga

SEQ ID NO: 3925404 - RNA, 20 nt, Human adenovirus D
ugagcgcgagccggcggcgc

SEQ ID NO: 3925405 - RNA, 14 nt, Human adenovirus D
ugagcggcugcacg

SEQ ID NO: 3925406 - RNA, 19 nt, Human adenovirus D
ugagcgggcucuuccuccg

SEQ ID NO: 3925407 - RNA, 22 nt, Human adenovirus D
ugagcuugaaacgucccaggaa

SEQ ID NO: 3925408 - RNA, 22 nt, Human adenovirus D
ugaggaggagacugauggccac

SEQ ID NO: 3925409 - RNA, 21 nt, Human adenovirus D
ugaggaucauaucccagggga

SEQ ID NO: 3925410 - RNA, 17 nt, Human adenovirus D
ugaggauugggaggagg

SEQ ID NO: 3925411 - RNA, 12 nt, Human adenovirus D
ugaggcagacgc

SEQ ID NO: 3925412 - RNA, 21 nt, Human adenovirus D
ugaggcauauaaaaaugcagu

SEQ ID NO: 3925413 - RNA, 18 nt, Human adenovirus D
ugaggcggugguagccgu

SEQ ID NO: 3925414 - RNA, 17 nt, Human adenovirus D
ugagguuagugccaaua

SEQ ID NO: 3925415 - RNA, 16 nt, Human adenovirus D
ugauauccaguaggaa

SEQ ID NO: 3925416 - RNA, 13 nt, Human adenovirus D
ugauauugcuucc

SEQ ID NO: 3925417 - RNA, 14 nt, Human adenovirus D
ugaucaaaacuuaa

SEQ ID NO: 3925418 - RNA, 11 nt, Human adenovirus D
ugaugcccaac

SEQ ID NO: 3925419 - RNA, 16 nt, Human adenovirus D
ugauguccuugaggag

SEQ ID NO: 3925420 - RNA, 17 nt, Human adenovirus D
ugauuucuacgggugag

SEQ ID NO: 3925421 - RNA, 17 nt, Human adenovirus D
ugauuuuuacaccagcg

SEQ ID NO: 3925422 - RNA, 21 nt, Human adenovirus D
ugcaaacaauaaaaaacuuga

SEQ ID NO: 3925423 - RNA, 21 nt, Human adenovirus D
ugcaaacggugaaccugagcc

SEQ ID NO: 3925424 - RNA, 18 nt, Human adenovirus D
ugcaacaugaccaaggac

SEQ ID NO: 3925425 - RNA, 13 nt, Human adenovirus D
ugcaaccugugcu

SEQ ID NO: 3925426 - RNA, 13 nt, Human adenovirus D
ugcaaugucaggu

SEQ ID NO: 3925427 - RNA, 18 nt, Human adenovirus D
ugcacaucgccgggcagg

SEQ ID NO: 3925428 - RNA, 16 nt, Human adenovirus D
ugcaccauccccaggu

SEQ ID NO: 3925429 - RNA, 19 nt, Human adenovirus D
ugcaccuguggagggcaug

SEQ ID NO: 3925430 - RNA, 20 nt, Human adenovirus D
ugcaccuguggagggcaugg

SEQ ID NO: 3925431 - RNA, 13 nt, Human adenovirus D
ugcaccuguggga

SEQ ID NO: 3925432 - RNA, 14 nt, Human adenovirus D
ugcacgcgggugag

SEQ ID NO: 3925433 - RNA, 23 nt, Human adenovirus D
ugcagaacccggacagcaagccu

SEQ ID NO: 3925434 - RNA, 15 nt, Human adenovirus D
ugcagcacuggaaca

SEQ ID NO: 3925435 - RNA, 16 nt, Human adenovirus D
ugcagcaggugcugcc

SEQ ID NO: 3925436 - RNA, 13 nt, Human adenovirus D
ugcaggauccagc

SEQ ID NO: 3925437 - RNA, 18 nt, Human adenovirus D
ugcagggcgcccagcaug

SEQ ID NO: 3925438 - RNA, 16 nt, Human adenovirus D
ugcaguuuggccugga

SEQ ID NO: 3925439 - RNA, 11 nt, Human adenovirus D
ugccaauaaac

SEQ ID NO: 3925440 - RNA, 16 nt, Human adenovirus D
ugccacucgcgggcgg

SEQ ID NO: 3925441 - RNA, 17 nt, Human adenovirus D
ugccacugccaacauua

SEQ ID NO: 3925442 - RNA, 18 nt, Human adenovirus D
ugccagauugggggacga

SEQ ID NO: 3925443 - RNA, 17 nt, Human adenovirus D
ugccaggaugggccgga

SEQ ID NO: 3925444 - RNA, 19 nt, Human adenovirus D
ugccaucaugaucuacccc

SEQ ID NO: 3925445 - RNA, 16 nt, Human adenovirus D
ugccauguucucacag

SEQ ID NO: 3925446 - RNA, 18 nt, Human adenovirus D
ugccauuuugaacccgca

SEQ ID NO: 3925447 - RNA, 20 nt, Human adenovirus D
ugcccaaaaucuucgaaggg

SEQ ID NO: 3925448 - RNA, 19 nt, Human adenovirus D
ugcccaacggcaugcuaca

SEQ ID NO: 3925449 - RNA, 15 nt, Human adenovirus D
ugcccccaagggcgc

SEQ ID NO: 3925450 - RNA, 17 nt, Human adenovirus D
ugcccugcucaccugca

SEQ ID NO: 3925451 - RNA, 13 nt, Human adenovirus D
ugcccuuggaaga

SEQ ID NO: 3925452 - RNA, 17 nt, Human adenovirus D
ugcccuuuucccaggac

SEQ ID NO: 3925453 - RNA, 14 nt, Human adenovirus D
ugccgaagaagaac

SEQ ID NO: 3925454 - RNA, 21 nt, Human adenovirus D
ugccgagccgcgggaucaagc

SEQ ID NO: 3925455 - RNA, 14 nt, Human adenovirus D
ugccgcagugggcg

SEQ ID NO: 3925456 - RNA, 19 nt, Human adenovirus D
ugccgccaaggagcuccuc

SEQ ID NO: 3925457 - RNA, 15 nt, Human adenovirus D
ugccgcuggacgaga

SEQ ID NO: 3925458 - RNA, 16 nt, Human adenovirus D
ugccggaccucaugca

SEQ ID NO: 3925459 - RNA, 16 nt, Human adenovirus D
ugccuccaccacccac

SEQ ID NO: 3925460 - RNA, 14 nt, Human adenovirus D
ugccucuccaucag

SEQ ID NO: 3925461 - RNA, 15 nt, Human adenovirus D
ugccucuccaucagc

SEQ ID NO: 3925462 - RNA, 15 nt, Human adenovirus D
ugccuggugaagggc

SEQ ID NO: 3925463 - RNA, 17 nt, Human adenovirus D
ugccuuccaaaauguga

SEQ ID NO: 3925464 - RNA, 14 nt, Human adenovirus D
ugccuucuccaggg

SEQ ID NO: 3925465 - RNA, 18 nt, Human adenovirus D
ugcgcacccguccuccuc

SEQ ID NO: 3925466 - RNA, 15 nt, Human adenovirus D
ugcgcccgcgccgcg

SEQ ID NO: 3925467 - RNA, 23 nt, Human adenovirus D
ugcgccgcgcuggggagggccac

SEQ ID NO: 3925468 - RNA, 21 nt, Human adenovirus D
ugcgcgaagccguggcgcagc

SEQ ID NO: 3925469 - RNA, 15 nt, Human adenovirus D
ugcgcgaccugggcu

SEQ ID NO: 3925470 - RNA, 17 nt, Human adenovirus D
ugcgcgaccugggcugc

SEQ ID NO: 3925471 - RNA, 14 nt, Human adenovirus D
ugcgcgagggccug

SEQ ID NO: 3925472 - RNA, 17 nt, Human adenovirus D
ugcgcgagguugagcuc

SEQ ID NO: 3925473 - RNA, 21 nt, Human adenovirus D
ugcgcguaggagucuugcagc

SEQ ID NO: 3925474 - RNA, 22 nt, Human adenovirus D
ugcggacuuuucuguugcaugu

SEQ ID NO: 3925475 - RNA, 23 nt, Human adenovirus D
ugcggccguccuuucgcugcugc

SEQ ID NO: 3925476 - RNA, 15 nt, Human adenovirus D
ugcgucccuggcucc

SEQ ID NO: 3925477 - RNA, 15 nt, Human adenovirus D
ugcuacaucugcugc

SEQ ID NO: 3925478 - RNA, 18 nt, Human adenovirus D
ugcuauaaaucuuuucuc

SEQ ID NO: 3925479 - RNA, 22 nt, Human adenovirus D
ugcuauggcucauuugcaagac

SEQ ID NO: 3925480 - RNA, 15 nt, Human adenovirus D
ugcucaccaccccgg

SEQ ID NO: 3925481 - RNA, 21 nt, Human adenovirus D
ugcuccaaagcuagcacccaa

SEQ ID NO: 3925482 - RNA, 12 nt, Human adenovirus D
ugcuccagccaa

SEQ ID NO: 3925483 - RNA, 16 nt, Human adenovirus D
ugcuccagccaaagcu

SEQ ID NO: 3925484 - RNA, 14 nt, Human adenovirus D
ugcuccugggugag

SEQ ID NO: 3925485 - RNA, 19 nt, Human adenovirus D
ugcucgucagggggguccg

SEQ ID NO: 3925486 - RNA, 22 nt, Human adenovirus D
ugcucuccgcaccgcuccuggu

SEQ ID NO: 3925487 - RNA, 13 nt, Human adenovirus D
ugcugacugcgac

SEQ ID NO: 3925488 - RNA, 19 nt, Human adenovirus D
ugcugauugcucuggccug

SEQ ID NO: 3925489 - RNA, 23 nt, Human adenovirus D
ugcugccccaggcggugcugcug

SEQ ID NO: 3925490 - RNA, 13 nt, Human adenovirus D
ugcugcuccacca

SEQ ID NO: 3925491 - RNA, 14 nt, Human adenovirus D
ugcuggaugauguc

SEQ ID NO: 3925492 - RNA, 16 nt, Human adenovirus D
ugcuggaugcggagcc

SEQ ID NO: 3925493 - RNA, 14 nt, Human adenovirus D
uggaaacagacagc

SEQ ID NO: 3925494 - RNA, 20 nt, Human adenovirus D
uggaaagauucagggcaaaa

SEQ ID NO: 3925495 - RNA, 12 nt, Human adenovirus D
uggaagaagaau

SEQ ID NO: 3925496 - RNA, 18 nt, Human adenovirus D
uggaagaagagcagcaca

SEQ ID NO: 3925497 - RNA, 18 nt, Human adenovirus D
uggaagagauggaagaag

SEQ ID NO: 3925498 - RNA, 21 nt, Human adenovirus D
uggaagagggcgaagggcugg

SEQ ID NO: 3925499 - RNA, 16 nt, Human adenovirus D
uggaagaggggcagca

SEQ ID NO: 3925500 - RNA, 17 nt, Human adenovirus D
uggaagcccugagccgc

SEQ ID NO: 3925501 - RNA, 17 nt, Human adenovirus D
uggacaacgucaacccc

SEQ ID NO: 3925502 - RNA, 19 nt, Human adenovirus D
uggacaucgcgaaccaggc

SEQ ID NO: 3925503 - RNA, 18 nt, Human adenovirus D
uggacccgcggccgccca

SEQ ID NO: 3925504 - RNA, 16 nt, Human adenovirus D
uggaccgcggucccag

SEQ ID NO: 3925505 - RNA, 17 nt, Human adenovirus D
uggagaaguuccucugc

SEQ ID NO: 3925506 - RNA, 15 nt, Human adenovirus D
uggagaaugcugcua

SEQ ID NO: 3925507 - RNA, 20 nt, Human adenovirus D
uggagacgcccuugugcccg

SEQ ID NO: 3925508 - RNA, 23 nt, Human adenovirus D
uggagaucaaccuccaggccaac

SEQ ID NO: 3925509 - RNA, 23 nt, Human adenovirus D
uggagcacagaccuucagggagu

SEQ ID NO: 3925510 - RNA, 15 nt, Human adenovirus D
uggagccacugcuac

SEQ ID NO: 3925511 - RNA, 16 nt, Human adenovirus D
uggaggaagugcugga

SEQ ID NO: 3925512 - RNA, 12 nt, Human adenovirus D
uggaggagcagc

SEQ ID NO: 3925513 - RNA, 15 nt, Human adenovirus D
uggagguuuucccgg

SEQ ID NO: 3925514 - RNA, 14 nt, Human adenovirus D
uggaucgaaaucaa

SEQ ID NO: 3925515 - RNA, 20 nt, Human adenovirus D
uggauggaaaaauauuugug

SEQ ID NO: 3925516 - RNA, 17 nt, Human adenovirus D
uggauugcaauuuugug

SEQ ID NO: 3925517 - RNA, 13 nt, Human adenovirus D
uggcaccaauuca

SEQ ID NO: 3925518 - RNA, 16 nt, Human adenovirus D
uggcagccgagccggc

SEQ ID NO: 3925519 - RNA, 20 nt, Human adenovirus D
uggcagccgagccggcgcgc

SEQ ID NO: 3925520 - RNA, 13 nt, Human adenovirus D
auccagcggcgca

SEQ ID NO: 3925521 - RNA, 16 nt, Human adenovirus D
aucccacgccgagccu

SEQ ID NO: 3925522 - RNA, 14 nt, Human adenovirus D
auccgcgccgcagc

SEQ ID NO: 3925523 - RNA, 20 nt, Human adenovirus D
auccuccaggacuaucuaug

SEQ ID NO: 3925524 - RNA, 21 nt, Human adenovirus D
auccugacgcgccagccgcgg

SEQ ID NO: 3925525 - RNA, 14 nt, Human adenovirus D
auccugaucucugc

SEQ ID NO: 3925526 - RNA, 13 nt, Human adenovirus D
aucgaggugcaga

SEQ ID NO: 3925527 - RNA, 18 nt, Human adenovirus D
aucgccaggccucuaccc

SEQ ID NO: 3925528 - RNA, 12 nt, Human adenovirus D
aucgcccaggcg

SEQ ID NO: 3925529 - RNA, 18 nt, Human adenovirus D
aucgccgaggagaacugc

SEQ ID NO: 3925530 - RNA, 21 nt, Human adenovirus D
aucggaucuuccccacucuuu

SEQ ID NO: 3925531 - RNA, 21 nt, Human adenovirus D
aucgguccgugugauuaaaaa

SEQ ID NO: 3925532 - RNA, 17 nt, Human adenovirus D
aucgugaacgcgcuggc

SEQ ID NO: 3925533 - RNA, 16 nt, Human adenovirus D
aucuacaagagagaug

SEQ ID NO: 3925534 - RNA, 19 nt, Human adenovirus D
aucucccaccaccagccca

SEQ ID NO: 3925535 - RNA, 12 nt, Human adenovirus D
aucugaaaguau

SEQ ID NO: 3925536 - RNA, 15 nt, Human adenovirus D
aucuugcccacgucc

SEQ ID NO: 3925537 - RNA, 23 nt, Human adenovirus D
augaaaaagcugaggauggcaaa

SEQ ID NO: 3925538 - RNA, 18 nt, Human adenovirus D
augaaagcauacagagau

SEQ ID NO: 3925539 - RNA, 19 nt, Human adenovirus D
augaaagucaggagcagcg

SEQ ID NO: 3925540 - RNA, 11 nt, Human adenovirus D
augaacacacu

SEQ ID NO: 3925541 - RNA, 22 nt, Human adenovirus D
augaacacacugcccauauaca

SEQ ID NO: 3925542 - RNA, 13 nt, Human adenovirus D
augaacaggagca

SEQ ID NO: 3925543 - RNA, 14 nt, Human adenovirus D
augaacaggagcac

SEQ ID NO: 3925544 - RNA, 15 nt, Human adenovirus D
augaacaggagcacg

SEQ ID NO: 3925545 - RNA, 13 nt, Human adenovirus D
augaacaugaagu

SEQ ID NO: 3925546 - RNA, 17 nt, Human adenovirus D
augaaggcuuucacagc

SEQ ID NO: 3925547 - RNA, 19 nt, Human adenovirus D
augaaggcuuucacagcuu

SEQ ID NO: 3925548 - RNA, 19 nt, Human adenovirus D
augacagaggcaacagcaa

SEQ ID NO: 3925549 - RNA, 16 nt, Human adenovirus D
augaccauagaccuga

SEQ ID NO: 3925550 - RNA, 15 nt, Human adenovirus D
augacugaccaccac

SEQ ID NO: 3925551 - RNA, 18 nt, Human adenovirus D
augagaugccccagcaga

SEQ ID NO: 3925552 - RNA, 21 nt, Human adenovirus D
augagcucguaguugagggcc

SEQ ID NO: 3925553 - RNA, 13 nt, Human adenovirus D
augaggcgguggu

SEQ ID NO: 3925554 - RNA, 17 nt, Human adenovirus D
augauggaacccacgug

SEQ ID NO: 3925555 - RNA, 23 nt, Human adenovirus D
augcaccuguggagggcaugggu

SEQ ID NO: 3925556 - RNA, 22 nt, Human adenovirus D
augcagccaguggcccuggaug

SEQ ID NO: 3925557 - RNA, 23 nt, Human adenovirus D
augcaggauaaauauggccugga

SEQ ID NO: 3925558 - RNA, 19 nt, Human adenovirus D
augcaucccguccugcgcc

SEQ ID NO: 3925559 - RNA, 15 nt, Human adenovirus D
augccagacgcaaga

SEQ ID NO: 3925560 - RNA, 16 nt, Human adenovirus D
augccaucaacaucca

SEQ ID NO: 3925561 - RNA, 21 nt, Human adenovirus D
augccccacaucgaggcccuc

SEQ ID NO: 3925562 - RNA, 14 nt, Human adenovirus D
augccccagcagaa

SEQ ID NO: 3925563 - RNA, 12 nt, Human adenovirus D
augccccaggcc

SEQ ID NO: 3925564 - RNA, 22 nt, Human adenovirus D
augcccuccuauuacuugguga

SEQ ID NO: 3925565 - RNA, 12 nt, Human adenovirus D
augccgcagugg

SEQ ID NO: 3925566 - RNA, 21 nt, Human adenovirus D
augccggcagcggugguggag

SEQ ID NO: 3925567 - RNA, 17 nt, Human adenovirus D
augccuucuccagggug

SEQ ID NO: 3925568 - RNA, 20 nt, Human adenovirus D
augcgacccaugagcugcga

SEQ ID NO: 3925569 - RNA, 13 nt, Human adenovirus D
augcgcaggcgcc

SEQ ID NO: 3925570 - RNA, 14 nt, Human adenovirus D
augcgccaagggca

SEQ ID NO: 3925571 - RNA, 17 nt, Human adenovirus D
augcgccaagggcagcc

SEQ ID NO: 3925572 - RNA, 21 nt, Human adenovirus D
augcggaggaauguggaaaga

SEQ ID NO: 3925573 - RNA, 20 nt, Human adenovirus D
augcggggggagaugaugug

SEQ ID NO: 3925574 - RNA, 13 nt, Human adenovirus D
augcuccugggug

SEQ ID NO: 3925575 - RNA, 21 nt, Human adenovirus D
augcugagccugcgccgggcg

SEQ ID NO: 3925576 - RNA, 16 nt, Human adenovirus D
auggacuuggaagagg

SEQ ID NO: 3925577 - RNA, 14 nt, Human adenovirus D
auggaggagcagcc

SEQ ID NO: 3925578 - RNA, 17 nt, Human adenovirus D
auggauguggagcccga

SEQ ID NO: 3925579 - RNA, 22 nt, Human adenovirus D
auggccuccagccuuuccaugg

SEQ ID NO: 3925580 - RNA, 22 nt, Human adenovirus D
auggccuguaccgggaccgagu

SEQ ID NO: 3925581 - RNA, 14 nt, Human adenovirus D
auggcgaugggccc

SEQ ID NO: 3925582 - RNA, 17 nt, Human adenovirus D
auggcggagcgagcugg

SEQ ID NO: 3925583 - RNA, 20 nt, Human adenovirus D
auggcgugcgaguuggagga

SEQ ID NO: 3925584 - RNA, 18 nt, Human adenovirus D
auggcgugcuggagagcg

SEQ ID NO: 3925585 - RNA, 21 nt, Human adenovirus D
auggcuaccugggaggagagg

SEQ ID NO: 3925586 - RNA, 13 nt, Human adenovirus D
augggaaugagag

SEQ ID NO: 3925587 - RNA, 13 nt, Human adenovirus D
augggugugcugg

SEQ ID NO: 3925588 - RNA, 21 nt, Human adenovirus D
augguacuaaugacagaggca

SEQ ID NO: 3925589 - RNA, 20 nt, Human adenovirus D
auguaaguuuuauggcugcu

SEQ ID NO: 3925590 - RNA, 16 nt, Human adenovirus D
auguacaacaugcuga

SEQ ID NO: 3925591 - RNA, 22 nt, Human adenovirus D
augucagcugcaaaaagucacu

SEQ ID NO: 3925592 - RNA, 13 nt, Human adenovirus D
auguccggggcgg

SEQ ID NO: 3925593 - RNA, 22 nt, Human adenovirus D
augugaugggaucgacggugga

SEQ ID NO: 3925594 - RNA, 16 nt, Human adenovirus D
augugccuuaccgcca

SEQ ID NO: 3925595 - RNA, 20 nt, Human adenovirus D
auguggaacucugcggugga

SEQ ID NO: 3925596 - RNA, 19 nt, Human adenovirus D
auguuauucagcagcccau

SEQ ID NO: 3925597 - RNA, 17 nt, Human adenovirus D
auguugauuaaaaacca

SEQ ID NO: 3925598 - RNA, 22 nt, Human adenovirus D
auuaacuuuuguuuacuuugug

SEQ ID NO: 3925599 - RNA, 22 nt, Human adenovirus D
auuaccucaucgccaccaugag

SEQ ID NO: 3925600 - RNA, 17 nt, Human adenovirus D
auucaaaacucacuuug

SEQ ID NO: 3925601 - RNA, 12 nt, Human adenovirus D
auucaaggccau

SEQ ID NO: 3925602 - RNA, 14 nt, Human adenovirus D
auucagagccaggg

SEQ ID NO: 3925603 - RNA, 18 nt, Human adenovirus D
auucagggugcuccagcc

SEQ ID NO: 3925604 - RNA, 23 nt, Human adenovirus D
auucuggaaauuaugagcaucaa

SEQ ID NO: 3925605 - RNA, 14 nt, Human adenovirus D
auugauaaggagaa

SEQ ID NO: 3925606 - RNA, 19 nt, Human adenovirus D
auugauuuuuacaccagcg

SEQ ID NO: 3925607 - RNA, 14 nt, Human adenovirus D
auugcuagcccuuc

SEQ ID NO: 3925608 - RNA, 19 nt, Human adenovirus D
auugcuucccuggaagagu

SEQ ID NO: 3925609 - RNA, 19 nt, Human adenovirus D
auuggccuguccugcaggg

SEQ ID NO: 3925610 - RNA, 14 nt, Human adenovirus D
auuggugcgcuggg

SEQ ID NO: 3925611 - RNA, 18 nt, Human adenovirus D
auuuaaagacccacagcc

SEQ ID NO: 3925612 - RNA, 12 nt, Human adenovirus D
auuucacagugu

SEQ ID NO: 3925613 - RNA, 16 nt, Human adenovirus D
auuugacaacccgccu

SEQ ID NO: 3925614 - RNA, 15 nt, Human adenovirus D
auuuuuacaccagcg

SEQ ID NO: 3925615 - RNA, 12 nt, Human adenovirus D
caaaaagaaaca

SEQ ID NO: 3925616 - RNA, 21 nt, Human adenovirus D
caaaacuaauuacagucacua

SEQ ID NO: 3925617 - RNA, 14 nt, Human adenovirus D
caaaagcgccagga

SEQ ID NO: 3925618 - RNA, 22 nt, Human adenovirus D
caaacuauugcuucccauugaa

SEQ ID NO: 3925619 - RNA, 15 nt, Human adenovirus D
caaagcgggaucauc

SEQ ID NO: 3925620 - RNA, 18 nt, Human adenovirus D
caaagcuagcacccaaaa

SEQ ID NO: 3925621 - RNA, 21 nt, Human adenovirus D
caaauccaacucuuaaaucau

SEQ ID NO: 3925622 - RNA, 16 nt, Human adenovirus D
caaaugcgagcauaca

SEQ ID NO: 3925623 - RNA, 15 nt, Human adenovirus D
caacaccagacacau

SEQ ID NO: 3925624 - RNA, 21 nt, Human adenovirus D
caacagaaccggaggcuggcu

SEQ ID NO: 3925625 - RNA, 18 nt, Human adenovirus D
caacaggccuaacuacau

SEQ ID NO: 3925626 - RNA, 15 nt, Human adenovirus D
caaccaaggcaccca

SEQ ID NO: 3925627 - RNA, 16 nt, Human adenovirus D
caaccaugugcgcacc

SEQ ID NO: 3925628 - RNA, 21 nt, Human adenovirus D
caacccgggucucccccagca

SEQ ID NO: 3925629 - RNA, 19 nt, Human adenovirus D
caaccuccaggccaaccug

SEQ ID NO: 3925630 - RNA, 21 nt, Human adenovirus D
caacgacgguauugaaauacc

SEQ ID NO: 3925631 - RNA, 17 nt, Human adenovirus D
caacgugcccaucucca

SEQ ID NO: 3925632 - RNA, 19 nt, Human adenovirus D
ugcacgagaaccgccuggg

SEQ ID NO: 3925633 - RNA, 21 nt, Human adenovirus D
ugcacucauccaugaugaugg

SEQ ID NO: 3925634 - RNA, 19 nt, Human adenovirus D
ugcacuuucuuugccauca

SEQ ID NO: 3925635 - RNA, 19 nt, Human adenovirus D
ugcagaacccggacagcaa

SEQ ID NO: 3925636 - RNA, 13 nt, Human adenovirus D
uggugcuggauga

SEQ ID NO: 3925637 - RNA, 18 nt, Human adenovirus D
uguacaacgcccugcugg

SEQ ID NO: 3925638 - RNA, 18 nt, Human adenovirus D
uguaccgcgaggccauag

SEQ ID NO: 3925639 - RNA, 15 nt, Human adenovirus D
uguagggacagcagc

SEQ ID NO: 3925640 - RNA, 18 nt, Human adenovirus D
uguagguguuggcaaagc

SEQ ID NO: 3925641 - RNA, 15 nt, Human adenovirus D
uguccuugaggagga

SEQ ID NO: 3925642 - RNA, 12 nt, Human adenovirus D
ugucucuggugu

SEQ ID NO: 3925643 - RNA, 19 nt, Human adenovirus D
ugugagugauaaagcgugg

SEQ ID NO: 3925644 - RNA, 22 nt, Human adenovirus D
ugugauuaaaaagcagcacagu

SEQ ID NO: 3925645 - RNA, 22 nt, Human adenovirus D
ugugggccugggagugaaaagu

SEQ ID NO: 3925646 - RNA, 16 nt, Human adenovirus D
ugugguagcuuacacc

SEQ ID NO: 3925647 - RNA, 19 nt, Human adenovirus D
uguucaaaacaacaagauu

SEQ ID NO: 3925648 - RNA, 21 nt, Human adenovirus D
uguugcaugaugggaaugaga

SEQ ID NO: 3925649 - RNA, 16 nt, Human adenovirus D
uguuggagcaggcggc

SEQ ID NO: 3925650 - RNA, 20 nt, Human adenovirus D
uguuguacucugugugcuga

SEQ ID NO: 3925651 - RNA, 18 nt, Human adenovirus D
uguuuauaaaucuuacac

SEQ ID NO: 3925652 - RNA, 13 nt, Human adenovirus D
uuaaaaaccaaaa

SEQ ID NO: 3925653 - RNA, 14 nt, Human adenovirus D
uuaaaaagcagcac

SEQ ID NO: 3925654 - RNA, 19 nt, Human adenovirus D
uuaaaaagcagcacaguaa

SEQ ID NO: 3925655 - RNA, 13 nt, Human adenovirus D
uuaaaggcaccuu

SEQ ID NO: 3925656 - RNA, 16 nt, Human adenovirus D
uuaaccacccacgagc

SEQ ID NO: 3925657 - RNA, 14 nt, Human adenovirus D
uuaaccuauaaaaa

SEQ ID NO: 3925658 - RNA, 14 nt, Human adenovirus D
uuaagaauccacag

SEQ ID NO: 3925659 - RNA, 21 nt, Human adenovirus D
uuaauaugggagagaacaaaa

SEQ ID NO: 3925660 - RNA, 12 nt, Human adenovirus D
uuaaugcugccu

SEQ ID NO: 3925661 - RNA, 22 nt, Human adenovirus D
uuacaccgcgucgcugaaagca

SEQ ID NO: 3925662 - RNA, 13 nt, Human adenovirus D
uuaccgccagaga

SEQ ID NO: 3925663 - RNA, 22 nt, Human adenovirus D
uuaccucaucgccaccaugagc

SEQ ID NO: 3925664 - RNA, 18 nt, Human adenovirus D
uuagacucugacacaccu

SEQ ID NO: 3925665 - RNA, 13 nt, Human adenovirus D
uuaguccagcaga

SEQ ID NO: 3925666 - RNA, 14 nt, Human adenovirus D
uuaguucagcugca

SEQ ID NO: 3925667 - RNA, 21 nt, Human adenovirus D
uuauaucuauugcuagcccuu

SEQ ID NO: 3925668 - RNA, 15 nt, Human adenovirus D
uucaaaaacuucccc

SEQ ID NO: 3925669 - RNA, 12 nt, Human adenovirus D
uucaagaacugg

SEQ ID NO: 3925670 - RNA, 16 nt, Human adenovirus D
uucaaggacaugcagc

SEQ ID NO: 3925671 - RNA, 19 nt, Human adenovirus D
uucaaggacaugcagcugc

SEQ ID NO: 3925672 - RNA, 13 nt, Human adenovirus D
uucagagccaggg

SEQ ID NO: 3925673 - RNA, 15 nt, Human adenovirus D
uucagccugggcaac

SEQ ID NO: 3925674 - RNA, 16 nt, Human adenovirus D
uucaugaccagcauga

SEQ ID NO: 3925675 - RNA, 20 nt, Human adenovirus D
uuccaccucggugcagccgu

SEQ ID NO: 3925676 - RNA, 17 nt, Human adenovirus D
uuccaguacucccggag

SEQ ID NO: 3925677 - RNA, 22 nt, Human adenovirus D
uucccauugaauggcacuggca

SEQ ID NO: 3925678 - RNA, 16 nt, Human adenovirus D
uuccgcguaccugcgc

SEQ ID NO: 3925679 - RNA, 20 nt, Human adenovirus D
uucucacaguaagugcagca

SEQ ID NO: 3925680 - RNA, 20 nt, Human adenovirus D
uucucggccaaucagcagua

SEQ ID NO: 3925681 - RNA, 13 nt, Human adenovirus D
uucugccagcaga

SEQ ID NO: 3925682 - RNA, 21 nt, Human adenovirus D
uucuggaaauuaugagcauca

SEQ ID NO: 3925683 - RNA, 20 nt, Human adenovirus D
uucuuccggcaaaaaucaca

SEQ ID NO: 3925684 - RNA, 22 nt, Human adenovirus D
uugaagauucuggaaauuauga

SEQ ID NO: 3925685 - RNA, 20 nt, Human adenovirus D
uugacaaauggagccagaac

SEQ ID NO: 3925686 - RNA, 17 nt, Human adenovirus D
uugaccugccuccacca

SEQ ID NO: 3925687 - RNA, 19 nt, Human adenovirus D
uugaguuucccgaggagca

SEQ ID NO: 3925688 - RNA, 20 nt, Human adenovirus D
uugcacccaccaugcgccaa

SEQ ID NO: 3925689 - RNA, 13 nt, Human adenovirus D
uugcagagcagcu

SEQ ID NO: 3925690 - RNA, 16 nt, Human adenovirus D
uugccgaaggacccca

SEQ ID NO: 3925691 - RNA, 21 nt, Human adenovirus D
uugccggcgacaagcuggccu

SEQ ID NO: 3925692 - RNA, 17 nt, Human adenovirus D
uugcgcgagcagaacgg

SEQ ID NO: 3925693 - RNA, 17 nt, Human adenovirus D
uugcgucccuggcuccg

SEQ ID NO: 3925694 - RNA, 12 nt, Human adenovirus D
uuggcagccgag

SEQ ID NO: 3925695 - RNA, 21 nt, Human adenovirus D
uuggccuguccugcaggggcg

SEQ ID NO: 3925696 - RNA, 15 nt, Human adenovirus D
uugucccgcugagcu

SEQ ID NO: 3925697 - RNA, 19 nt, Human adenovirus D
uugucgcugaucugauccu

SEQ ID NO: 3925698 - RNA, 15 nt, Human adenovirus D
uuguuguacucugug

SEQ ID NO: 3925699 - RNA, 17 nt, Human adenovirus D
uuuaaaauaaaacuucu

SEQ ID NO: 3925700 - RNA, 18 nt, Human adenovirus D
uuuaauuggcaaacuugu

SEQ ID NO: 3925701 - RNA, 17 nt, Human adenovirus D
uuuacaugcgcauggcg

SEQ ID NO: 3925702 - RNA, 20 nt, Human adenovirus D
uuucaaauuuuauguaucuu

SEQ ID NO: 3925703 - RNA, 22 nt, Human adenovirus D
uuucacugaaggaaaaaucacu

SEQ ID NO: 3925704 - RNA, 18 nt, Human adenovirus D
uuuccaugcacucaucca

SEQ ID NO: 3925705 - RNA, 11 nt, Human adenovirus D
uuuccggggcg

SEQ ID NO: 3925706 - RNA, 16 nt, Human adenovirus D
uuucugcagacaucau

SEQ ID NO: 3925707 - RNA, 22 nt, Human adenovirus D
uuugaggcggcggaugguggcg

SEQ ID NO: 3925708 - RNA, 14 nt, Human adenovirus D
uuugcgaaaacacu

SEQ ID NO: 3925709 - RNA, 11 nt, Human adenovirus D
uuugggcacug

SEQ ID NO: 3925710 - RNA, 16 nt, Human adenovirus D
uuuuaaugaagaagca

SEQ ID NO: 3925711 - RNA, 20 nt, Human adenovirus D
uuuugaggaugcaucaucca

SEQ ID NO: 3925712 - RNA, 18 nt, Human adenovirus D
ccuugauuuuuccagccc

SEQ ID NO: 3925713 - RNA, 20 nt, Human adenovirus D
ccuugcagagcagcucuucg

SEQ ID NO: 3925714 - RNA, 20 nt, Human adenovirus D
ccuugcccccaagggcgcuc

SEQ ID NO: 3925715 - RNA, 23 nt, Human adenovirus D
ccuugcgcgagcagaacgggggc

SEQ ID NO: 3925716 - RNA, 16 nt, Human adenovirus D
cgaacacgccaccgcu

SEQ ID NO: 3925717 - RNA, 19 nt, Human adenovirus D
cgaagacgagggcgcgcag

SEQ ID NO: 3925718 - RNA, 22 nt, Human adenovirus D
cgaagcgccguggccucuucgc

SEQ ID NO: 3925719 - RNA, 17 nt, Human adenovirus D
cgaaguuccccucgcag

SEQ ID NO: 3925720 - RNA, 20 nt, Human adenovirus D
cgacacccccgcgugcagcu

SEQ ID NO: 3925721 - RNA, 22 nt, Human adenovirus D
cgacaugggggcggaccugcau

SEQ ID NO: 3925722 - RNA, 12 nt, Human adenovirus D
cgaccacagcaa

SEQ ID NO: 3925723 - RNA, 14 nt, Human adenovirus D
cgacccaugagcug

SEQ ID NO: 3925724 - RNA, 15 nt, Human adenovirus D
cgaccccuggcuccc

SEQ ID NO: 3925725 - RNA, 18 nt, Human adenovirus D
cgaccggucgacggugag

SEQ ID NO: 3925726 - RNA, 15 nt, Human adenovirus D
cgaccuccuccccau

SEQ ID NO: 3925727 - RNA, 20 nt, Human adenovirus D
cgaccucggaguaccugagc

SEQ ID NO: 3925728 - RNA, 12 nt, Human adenovirus D
cgacgccccuga

SEQ ID NO: 3925729 - RNA, 14 nt, Human adenovirus D
cgacgccccugagc

SEQ ID NO: 3925730 - RNA, 23 nt, Human adenovirus D
cgacgcuuuuucagcgaccccga

SEQ ID NO: 3925731 - RNA, 14 nt, Human adenovirus D
cgacuccucgguca

SEQ ID NO: 3925732 - RNA, 20 nt, Human adenovirus D
cgacucgcugcugcagccgc

SEQ ID NO: 3925733 - RNA, 22 nt, Human adenovirus D
cgacuucaugagccagagcaug

SEQ ID NO: 3925734 - RNA, 23 nt, Human adenovirus D
cgagaacguccauggcgcaguag

SEQ ID NO: 3925735 - RNA, 16 nt, Human adenovirus D
cgagaagaacgcacag

SEQ ID NO: 3925736 - RNA, 21 nt, Human adenovirus D
cgagaccggaggcgugcacug

SEQ ID NO: 3925737 - RNA, 14 nt, Human adenovirus D
cgagaucaagcgca

SEQ ID NO: 3925738 - RNA, 18 nt, Human adenovirus D
cgagaucggcaccagcca

SEQ ID NO: 3925739 - RNA, 18 nt, Human adenovirus D
cgagauggacggccaggc

SEQ ID NO: 3925740 - RNA, 20 nt, Human adenovirus D
cgagcagaacgggggcagca

SEQ ID NO: 3925741 - RNA, 12 nt, Human adenovirus D
cgagcaggaccu

SEQ ID NO: 3925742 - RNA, 16 nt, Human adenovirus D
cgagccgaacgagcag

SEQ ID NO: 3925743 - RNA, 23 nt, Human adenovirus D
cgagccgccuucguacgaggagg

SEQ ID NO: 3925744 - RNA, 18 nt, Human adenovirus D
cgagccgcgcgccgcgcc

SEQ ID NO: 3925745 - RNA, 14 nt, Human adenovirus D
cgagccucccagga

SEQ ID NO: 3925746 - RNA, 23 nt, Human adenovirus D
cgagcuacaugcccagcagcagc

SEQ ID NO: 3925747 - RNA, 23 nt, Human adenovirus D
cgagcucaaccucuucucgccgc

SEQ ID NO: 3925748 - RNA, 22 nt, Human adenovirus D
cgagcuccgcgaacagcagcag

SEQ ID NO: 3925749 - RNA, 21 nt, Human adenovirus D
cgagcucugcugcgccgcgcc

SEQ ID NO: 3925750 - RNA, 17 nt, Human adenovirus D
cgagcugacggccaguc

SEQ ID NO: 3925751 - RNA, 15 nt, Human adenovirus D
cgagcugcaaggucc

SEQ ID NO: 3925752 - RNA, 16 nt, Human adenovirus D
cgagcuggaagcccug

SEQ ID NO: 3925753 - RNA, 18 nt, Human adenovirus D
cgaggagaacugcuggcc

SEQ ID NO: 3925754 - RNA, 23 nt, Human adenovirus D
cgaggagaacugcuggcccugcu

SEQ ID NO: 3925755 - RNA, 19 nt, Human adenovirus D
cgaggagcugagaccagac

SEQ ID NO: 3925756 - RNA, 16 nt, Human adenovirus D
cgaggccgggcuagug

SEQ ID NO: 3925757 - RNA, 20 nt, Human adenovirus D
cgaggccgucuaccugcgca

SEQ ID NO: 3925758 - RNA, 16 nt, Human adenovirus D
cgaggcguucagggag

SEQ ID NO: 3925759 - RNA, 20 nt, Human adenovirus D
cgagggccuggaccgccagc

SEQ ID NO: 3925760 - RNA, 14 nt, Human adenovirus D
cgaggggcuccucu

SEQ ID NO: 3925761 - RNA, 19 nt, Human adenovirus D
cgaguacauguucaccagc

SEQ ID NO: 3925762 - RNA, 16 nt, Human adenovirus D
cgaguggaacuuccgc

SEQ ID NO: 3925763 - RNA, 17 nt, Human adenovirus D
cgaucugggaugcugcc

SEQ ID NO: 3925764 - RNA, 15 nt, Human adenovirus D
cgaugagcagcuugc

SEQ ID NO: 3925765 - RNA, 23 nt, Human adenovirus D
cgaugcuauugagagagaggaag

SEQ ID NO: 3925766 - RNA, 16 nt, Human adenovirus D
cgauguugccacccag

SEQ ID NO: 3925767 - RNA, 13 nt, Human adenovirus D
cgcaacuuccagc

SEQ ID NO: 3925768 - RNA, 14 nt, Human adenovirus D
cgcaagcucaugcu

SEQ ID NO: 3925769 - RNA, 23 nt, Human adenovirus D
cgcaagcucaugcuggccguggu

SEQ ID NO: 3925770 - RNA, 22 nt, Human adenovirus D
cgcacaacaccgccuccacccu

SEQ ID NO: 3925771 - RNA, 23 nt, Human adenovirus D
cgcacuggcuuccgccgccgggg

SEQ ID NO: 3925772 - RNA, 11 nt, Human adenovirus D
cgcagccugag

SEQ ID NO: 3925773 - RNA, 19 nt, Human adenovirus D
cgcagcggggaggagcccg

SEQ ID NO: 3925774 - RNA, 15 nt, Human adenovirus D
cgcaggaggccaucu

SEQ ID NO: 3925775 - RNA, 18 nt, Human adenovirus D
cgcaggcgacccuggagg

SEQ ID NO: 3925776 - RNA, 18 nt, Human adenovirus D
cgcaggcgcuggaagagg

SEQ ID NO: 3925777 - RNA, 15 nt, Human adenovirus D
cgcaguccgccaagc

SEQ ID NO: 3925778 - RNA, 13 nt, Human adenovirus D
cgcauugcaugag

SEQ ID NO: 3925779 - RNA, 16 nt, Human adenovirus D
cgccacaggugcugcc

SEQ ID NO: 3925780 - RNA, 21 nt, Human adenovirus D
cgccaccuucuuccccauggc

SEQ ID NO: 3925781 - RNA, 13 nt, Human adenovirus D
cgccaggcuggcc

SEQ ID NO: 3925782 - RNA, 15 nt, Human adenovirus D
cgccaggcuggccgu

SEQ ID NO: 3925783 - RNA, 22 nt, Human adenovirus D
cgcccaacucgcggcugcugcu

SEQ ID NO: 3925784 - RNA, 22 nt, Human adenovirus D
cgcccacggugguggagaugga

SEQ ID NO: 3925785 - RNA, 20 nt, Human adenovirus D
cgcccagcaauaacaccggc

SEQ ID NO: 3925786 - RNA, 21 nt, Human adenovirus D
cgcccagccagcaaacgccgc

SEQ ID NO: 3925787 - RNA, 11 nt, Human adenovirus D
cgcccaggcgc

SEQ ID NO: 3925788 - RNA, 12 nt, Human adenovirus D
cgcccaggcgcc

SEQ ID NO: 3925789 - RNA, 22 nt, Human adenovirus D
cgcccaggcgccauucggagca

SEQ ID NO: 3925790 - RNA, 17 nt, Human adenovirus D
cgcccagugcuuccagc

SEQ ID NO: 3925791 - RNA, 18 nt, Human adenovirus D
cgccccgaggacacccgg

SEQ ID NO: 3925792 - RNA, 18 nt, Human adenovirus D
cgcccggcguacgugccu

SEQ ID NO: 3925793 - RNA, 17 nt, Human adenovirus D
cgcccgggagagcugcg

SEQ ID NO: 3925794 - RNA, 17 nt, Human adenovirus D
cgcccgugggcgaccgg

SEQ ID NO: 3925795 - RNA, 12 nt, Human adenovirus D
cgcccugcugga

SEQ ID NO: 3925796 - RNA, 20 nt, Human adenovirus D
cgccgacccguggccccggg

SEQ ID NO: 3925797 - RNA, 19 nt, Human adenovirus D
cgccgacgcgcuccucgcu

SEQ ID NO: 3925798 - RNA, 16 nt, Human adenovirus D
cgccgagccugaagcc

SEQ ID NO: 3925799 - RNA, 14 nt, Human adenovirus D
cgccgccugcgcug

SEQ ID NO: 3925800 - RNA, 20 nt, Human adenovirus D
cgccgcgcuggggagggcca

SEQ ID NO: 3925801 - RNA, 23 nt, Human adenovirus D
cgccgcgcuggggagggccacgu

SEQ ID NO: 3925802 - RNA, 15 nt, Human adenovirus D
cgccggggcucggug

SEQ ID NO: 3925803 - RNA, 21 nt, Human adenovirus D
cgccucugcgugaagaccacu

SEQ ID NO: 3925804 - RNA, 23 nt, Human adenovirus D
cgccuuccuggcgacgcagccgg

SEQ ID NO: 3925805 - RNA, 15 nt, Human adenovirus D
cgccuuggaggccgc

SEQ ID NO: 3925806 - RNA, 15 nt, Human adenovirus D
cgcgaacagcagcag

SEQ ID NO: 3925807 - RNA, 17 nt, Human adenovirus D
cgcgaaccaggcagugc

SEQ ID NO: 3925808 - RNA, 16 nt, Human adenovirus D
cgcgaagaggagcuga

SEQ ID NO: 3925809 - RNA, 17 nt, Human adenovirus D
cgcgagccggcggcgcg

SEQ ID NO: 3925810 - RNA, 22 nt, Human adenovirus D
cgcgaggccauaggccaggcgc

SEQ ID NO: 3925811 - RNA, 23 nt, Human adenovirus D
cgcgaggccauaggccaggcgca

SEQ ID NO: 3925812 - RNA, 22 nt, Human adenovirus D
cgcgagggccuggaccgccagc

SEQ ID NO: 3925813 - RNA, 17 nt, Human adenovirus D
cgcgagugucccccgcc

SEQ ID NO: 3925814 - RNA, 18 nt, Human adenovirus D
cgcgccacuggccacggg

SEQ ID NO: 3925815 - RNA, 15 nt, Human adenovirus D
cgcgcgaggaggugg

SEQ ID NO: 3925816 - RNA, 19 nt, Human adenovirus D
cgcgcgcgaggagguggcc

SEQ ID NO: 3925817 - RNA, 16 nt, Human adenovirus D
cgcgcgguaggcccug

SEQ ID NO: 3925818 - RNA, 15 nt, Human adenovirus D
cgcgcuggcggagaa

SEQ ID NO: 3925819 - RNA, 22 nt, Human adenovirus D
cgcgcuggcuugguacccgcga

SEQ ID NO: 3925820 - RNA, 13 nt, Human adenovirus D
gaccgcagcgggg

SEQ ID NO: 3925821 - RNA, 19 nt, Human adenovirus D
gaccggcagcggggccugg

SEQ ID NO: 3925822 - RNA, 16 nt, Human adenovirus D
gaccggugcucugcgc

SEQ ID NO: 3925823 - RNA, 22 nt, Human adenovirus D
gaccucgccgucuacucccagc

SEQ ID NO: 3925824 - RNA, 20 nt, Human adenovirus D
gaccugcauuggcagccgag

SEQ ID NO: 3925825 - RNA, 15 nt, Human adenovirus D
gaccugccuccacca

SEQ ID NO: 3925826 - RNA, 18 nt, Human adenovirus D
gaccugcgcgucgacggc

SEQ ID NO: 3925827 - RNA, 15 nt, Human adenovirus D
gaccuugcagagcag

SEQ ID NO: 3925828 - RNA, 14 nt, Human adenovirus D
gacgacauccugga

SEQ ID NO: 3925829 - RNA, 13 nt, Human adenovirus D
gacgagaccagag

SEQ ID NO: 3925830 - RNA, 18 nt, Human adenovirus D
gacgagaccagaggcaga

SEQ ID NO: 3925831 - RNA, 19 nt, Human adenovirus D
gacgagaccagaggcagac

SEQ ID NO: 3925832 - RNA, 12 nt, Human adenovirus D
gacgagccaaac

SEQ ID NO: 3925833 - RNA, 17 nt, Human adenovirus D
gacgagccaggugagcu

SEQ ID NO: 3925834 - RNA, 19 nt, Human adenovirus D
gacgagccaggugagcucg

SEQ ID NO: 3925835 - RNA, 15 nt, Human adenovirus D
gacgagcccgcgcgg

SEQ ID NO: 3925836 - RNA, 19 nt, Human adenovirus D
gacgagguguacggcgacg

SEQ ID NO: 3925837 - RNA, 16 nt, Human adenovirus D
gacgaguuggugagcu

SEQ ID NO: 3925838 - RNA, 16 nt, Human adenovirus D
gacgcacgggccgccg

SEQ ID NO: 3925839 - RNA, 16 nt, Human adenovirus D
gacgcaggccaggagg

SEQ ID NO: 3925840 - RNA, 19 nt, Human adenovirus D
gacgcgcucccggcggcag

SEQ ID NO: 3925841 - RNA, 22 nt, Human adenovirus D
gacgcgcucccggcggcagcgg

SEQ ID NO: 3925842 - RNA, 23 nt, Human adenovirus D
gacgcggcgguugacauccugga

SEQ ID NO: 3925843 - RNA, 22 nt, Human adenovirus D
gacgcugaaaggcgggcugccc

SEQ ID NO: 3925844 - RNA, 24 nt, Human adenovirus D
gacggacuugauuggccuguccug

SEQ ID NO: 3925845 - RNA, 15 nt, Human adenovirus D
gacggaucgcccagg

SEQ ID NO: 3925846 - RNA, 15 nt, Human adenovirus D
gacggccgcggcgag

SEQ ID NO: 3925847 - RNA, 17 nt, Human adenovirus D
gacggccuacgagcaga

SEQ ID NO: 3925848 - RNA, 22 nt, Human adenovirus D
gacgggugcuccggguucugga

SEQ ID NO: 3925849 - RNA, 16 nt, Human adenovirus D
gacguggugcugcugc

SEQ ID NO: 3925850 - RNA, 17 nt, Human adenovirus D
gacguggugcugcugcc

SEQ ID NO: 3925851 - RNA, 14 nt, Human adenovirus D
gacguuucuggggu

SEQ ID NO: 3925852 - RNA, 15 nt, Human adenovirus D
gacuauccuugcaga

SEQ ID NO: 3925853 - RNA, 17 nt, Human adenovirus D
gacucacccuggggcuc

SEQ ID NO: 3925854 - RNA, 17 nt, Human adenovirus D
gacuccgcgaccuccuc

SEQ ID NO: 3925855 - RNA, 16 nt, Human adenovirus D
gacugacuacccacug

SEQ ID NO: 3925856 - RNA, 15 nt, Human adenovirus D
gacugauggccacgg

SEQ ID NO: 3925857 - RNA, 16 nt, Human adenovirus D
gacugauggccacggg

SEQ ID NO: 3925858 - RNA, 22 nt, Human adenovirus D
gacugcgacuguagggcacgag

SEQ ID NO: 3925859 - RNA, 20 nt, Human adenovirus D
gacuuggaugaggaagagga

SEQ ID NO: 3925860 - RNA, 19 nt, Human adenovirus D
gacuuugucccgcugagcu

SEQ ID NO: 3925861 - RNA, 17 nt, Human adenovirus D
gagaacggggugcaguc

SEQ ID NO: 3925862 - RNA, 17 nt, Human adenovirus D
gagaacugcuggcccug

SEQ ID NO: 3925863 - RNA, 19 nt, Human adenovirus D
gagaacugcuggcccugcu

SEQ ID NO: 3925864 - RNA, 16 nt, Human adenovirus D
gagaccaaguccaggg

SEQ ID NO: 3925865 - RNA, 22 nt, Human adenovirus D
gagaccggaggcgugcacuggc

SEQ ID NO: 3925866 - RNA, 17 nt, Human adenovirus D
gagagcaaucccacgcc

SEQ ID NO: 3925867 - RNA, 19 nt, Human adenovirus D
gagagcgugauggcgcagg

SEQ ID NO: 3925868 - RNA, 18 nt, Human adenovirus D
gagaggcugacgagcccg

SEQ ID NO: 3925869 - RNA, 22 nt, Human adenovirus D
gagauagcaguugaccaugagc

SEQ ID NO: 3925870 - RNA, 22 nt, Human adenovirus D
gagauccagguccgggggcagg

SEQ ID NO: 3925871 - RNA, 21 nt, Human adenovirus D
gagcaacccaaaaucgagcag

SEQ ID NO: 3925872 - RNA, 21 nt, Human adenovirus D
gagcagcuugcgcgcuggcuu

SEQ ID NO: 3925873 - RNA, 15 nt, Human adenovirus D
gagcaggaccugggc

SEQ ID NO: 3925874 - RNA, 21 nt, Human adenovirus D
gagcaggggcuacauucugga

SEQ ID NO: 3925875 - RNA, 21 nt, Human adenovirus D
gagcagugucuggagcgggcu

SEQ ID NO: 3925876 - RNA, 20 nt, Human adenovirus D
gagcaucguaguucaggagc

SEQ ID NO: 3925877 - RNA, 19 nt, Human adenovirus D
gagccacugcuaccucuug

SEQ ID NO: 3925878 - RNA, 16 nt, Human adenovirus D
gagccauugaccacca

SEQ ID NO: 3925879 - RNA, 12 nt, Human adenovirus D
gagcccacccgc

SEQ ID NO: 3925880 - RNA, 18 nt, Human adenovirus D
gagcccgaggagaugcgc

SEQ ID NO: 3925881 - RNA, 23 nt, Human adenovirus D
gagcccgagggucgcuggcugcu

SEQ ID NO: 3925882 - RNA, 20 nt, Human adenovirus D
gagcccgcgcgggagccagg

SEQ ID NO: 3925883 - RNA, 22 nt, Human adenovirus D
gagcccguagcugcgcggggcc

SEQ ID NO: 3925884 - RNA, 15 nt, Human adenovirus D
gagccgccagcuggc

SEQ ID NO: 3925885 - RNA, 13 nt, Human adenovirus D
gagccgccugagc

SEQ ID NO: 3925886 - RNA, 18 nt, Human adenovirus D
gagccugcgccgggcgcu

SEQ ID NO: 3925887 - RNA, 20 nt, Human adenovirus D
gagccugcgccgggcgcugg

SEQ ID NO: 3925888 - RNA, 23 nt, Human adenovirus D
gagcgacacccccgcgugcagcu

SEQ ID NO: 3925889 - RNA, 23 nt, Human adenovirus D
gagcgaggugugcgucagggcga

SEQ ID NO: 3925890 - RNA, 20 nt, Human adenovirus D
gagcgcccauuccuggagau

SEQ ID NO: 3925891 - RNA, 16 nt, Human adenovirus D
gagcgccugaggcaga

SEQ ID NO: 3925892 - RNA, 20 nt, Human adenovirus D
gagcgccugaggcagacgcu

SEQ ID NO: 3925893 - RNA, 15 nt, Human adenovirus D
gagcgccuuaccugg

SEQ ID NO: 3925894 - RNA, 14 nt, Human adenovirus D
gagcggcuccagcg

SEQ ID NO: 3925895 - RNA, 12 nt, Human adenovirus D
gagcgggacuug

SEQ ID NO: 3925896 - RNA, 19 nt, Human adenovirus D
gagcuacaugcccagcagc

SEQ ID NO: 3925897 - RNA, 14 nt, Human adenovirus D
gagcucgcgggcca

SEQ ID NO: 3925898 - RNA, 22 nt, Human adenovirus D
gagcugagaccagaccaccugg

SEQ ID NO: 3925899 - RNA, 19 nt, Human adenovirus D
gagcuggacaagcuucuug

SEQ ID NO: 3925900 - RNA, 14 nt, Human adenovirus D
gagcuggccuucca

SEQ ID NO: 3925901 - RNA, 23 nt, Human adenovirus D
gagcuggccuuccaccucggugc

SEQ ID NO: 3925902 - RNA, 22 nt, Human adenovirus D
gaggaagaucccgccgcaggag

SEQ ID NO: 3925903 - RNA, 22 nt, Human adenovirus D
gaggaaucggaucuuccccacu

SEQ ID NO: 3925904 - RNA, 15 nt, Human adenovirus D
gaggacacccggccc

SEQ ID NO: 3925905 - RNA, 16 nt, Human adenovirus D
gaggacgagaaccuga

SEQ ID NO: 3925906 - RNA, 16 nt, Human adenovirus D
gaggacuaccacgccc

SEQ ID NO: 3925907 - RNA, 20 nt, Human adenovirus D
gaggagaacugcuggcccug

SEQ ID NO: 3925908 - RNA, 19 nt, Human adenovirus D
gaggagacugauggccacg

SEQ ID NO: 3925909 - RNA, 19 nt, Human adenovirus D
gaggagcggucuggacccu

SEQ ID NO: 3925910 - RNA, 17 nt, Human adenovirus D
gauacagaguaaaagua

SEQ ID NO: 3925911 - RNA, 14 nt, Human adenovirus D
gauacccuggacaa

SEQ ID NO: 3925912 - RNA, 17 nt, Human adenovirus D
gauacuguugcagagag

SEQ ID NO: 3925913 - RNA, 20 nt, Human adenovirus D
gauacuuucggcgcuuggug

SEQ ID NO: 3925914 - RNA, 21 nt, Human adenovirus D
gauaugcccuccuauuacuug

SEQ ID NO: 3925915 - RNA, 18 nt, Human adenovirus D
gauaugugcagcagagcg

SEQ ID NO: 3925916 - RNA, 23 nt, Human adenovirus D
gaucaccguagagggcaccaccg

SEQ ID NO: 3925917 - RNA, 15 nt, Human adenovirus D
gaucagaaacacaga

SEQ ID NO: 3925918 - RNA, 12 nt, Human adenovirus D
gauccagcggcg

SEQ ID NO: 3925919 - RNA, 17 nt, Human adenovirus D
gaucccacagggcacug

SEQ ID NO: 3925920 - RNA, 15 nt, Human adenovirus D
gaucccgccgcagga

SEQ ID NO: 3925921 - RNA, 20 nt, Human adenovirus D
gaucuccaacguggagcuga

SEQ ID NO: 3925922 - RNA, 13 nt, Human adenovirus D
gaucucgcugccg

SEQ ID NO: 3925923 - RNA, 13 nt, Human adenovirus D
gaucuuggaugga

SEQ ID NO: 3925924 - RNA, 20 nt, Human adenovirus D
gaucuuuaugaacaugaagu

SEQ ID NO: 3925925 - RNA, 20 nt, Human adenovirus D
gaugacggguugcagguggu

SEQ ID NO: 3925926 - RNA, 14 nt, Human adenovirus D
gaugaguugggccu

SEQ ID NO: 3925927 - RNA, 16 nt, Human adenovirus D
gaugaguugggccuga

SEQ ID NO: 3925928 - RNA, 14 nt, Human adenovirus D
gaugccgcaguggg

SEQ ID NO: 3925929 - RNA, 18 nt, Human adenovirus D
gaugcuucaacagcugug

SEQ ID NO: 3925930 - RNA, 20 nt, Human adenovirus D
gauggacuuggaagagggcg

SEQ ID NO: 3925931 - RNA, 14 nt, Human adenovirus D
gauggaugugugga

SEQ ID NO: 3925932 - RNA, 14 nt, Human adenovirus D
gauggugaagaugc

SEQ ID NO: 3925933 - RNA, 21 nt, Human adenovirus D
gaugguggcgaggaggaccag

SEQ ID NO: 3925934 - RNA, 23 nt, Human adenovirus D
gauguaaguuuuauggcugcugg

SEQ ID NO: 3925935 - RNA, 18 nt, Human adenovirus D
gauucagccauagcucag

SEQ ID NO: 3925936 - RNA, 12 nt, Human adenovirus D
gauugcucuggc

SEQ ID NO: 3925937 - RNA, 15 nt, Human adenovirus D
gcaaaaauaaaucau

SEQ ID NO: 3925938 - RNA, 20 nt, Human adenovirus D
gcaaaaccuguucagggacc

SEQ ID NO: 3925939 - RNA, 21 nt, Human adenovirus D
gcaaaauaaaacucaccaagg

SEQ ID NO: 3925940 - RNA, 15 nt, Human adenovirus D
gcaaacuugugguuu

SEQ ID NO: 3925941 - RNA, 17 nt, Human adenovirus D
gcaaccaggaggagcuc

SEQ ID NO: 3925942 - RNA, 15 nt, Human adenovirus D
gcaacccccagcucc

SEQ ID NO: 3925943 - RNA, 13 nt, Human adenovirus D
gcaacgccuuccc

SEQ ID NO: 3925944 - RNA, 21 nt, Human adenovirus D
gcaacucguaccugggucacc

SEQ ID NO: 3925945 - RNA, 19 nt, Human adenovirus D
gcaacuuuuccgagaccau

SEQ ID NO: 3925946 - RNA, 21 nt, Human adenovirus D
gcaagagccggcgggcggacg

SEQ ID NO: 3925947 - RNA, 21 nt, Human adenovirus D
gcaagauuuacaagacgccgu

SEQ ID NO: 3925948 - RNA, 20 nt, Human adenovirus D
gcaagccccggaccccgcca

SEQ ID NO: 3925949 - RNA, 17 nt, Human adenovirus D
gcaagccucugacggcg

SEQ ID NO: 3925950 - RNA, 20 nt, Human adenovirus D
gcaagccucugacggcgcag

SEQ ID NO: 3925951 - RNA, 15 nt, Human adenovirus D
gcaagcgcccagagc

SEQ ID NO: 3925952 - RNA, 15 nt, Human adenovirus D
gcaagggcgaccagc

SEQ ID NO: 3925953 - RNA, 19 nt, Human adenovirus D
gcaagggcgaccagcucug

SEQ ID NO: 3925954 - RNA, 17 nt, Human adenovirus D
gcaaggucgaggagacc

SEQ ID NO: 3925955 - RNA, 22 nt, Human adenovirus D
gcaaguacauagugaccaagac

SEQ ID NO: 3925956 - RNA, 13 nt, Human adenovirus D
gcacaaacgugca

SEQ ID NO: 3925957 - RNA, 19 nt, Human adenovirus D
gcacaguuggcgacccagg

SEQ ID NO: 3925958 - RNA, 21 nt, Human adenovirus D
gcaccauccgcgccgcagccc

SEQ ID NO: 3925959 - RNA, 13 nt, Human adenovirus D
gcacccaccacag

SEQ ID NO: 3925960 - RNA, 14 nt, Human adenovirus D
gcacccaccacagu

SEQ ID NO: 3925961 - RNA, 21 nt, Human adenovirus D
gcacccgguacuacgccagcc

SEQ ID NO: 3925962 - RNA, 16 nt, Human adenovirus D
gcaccgccacccgccg

SEQ ID NO: 3925963 - RNA, 11 nt, Human adenovirus D
gcaccgcuccu

SEQ ID NO: 3925964 - RNA, 18 nt, Human adenovirus D
gcaccugggcgccagaag

SEQ ID NO: 3925965 - RNA, 14 nt, Human adenovirus D
gcaccugugggacc

SEQ ID NO: 3925966 - RNA, 15 nt, Human adenovirus D
gcaccugugggaccu

SEQ ID NO: 3925967 - RNA, 16 nt, Human adenovirus D
gcaccugugggaccug

SEQ ID NO: 3925968 - RNA, 22 nt, Human adenovirus D
gcacgagcaagacgcaggccag

SEQ ID NO: 3925969 - RNA, 23 nt, Human adenovirus D
gcacgcgggugaggguguccugg

SEQ ID NO: 3925970 - RNA, 16 nt, Human adenovirus D
gcacguacuuugacau

SEQ ID NO: 3925971 - RNA, 23 nt, Human adenovirus D
gcacgucggcguggcgcucgggc

SEQ ID NO: 3925972 - RNA, 16 nt, Human adenovirus D
gcacguggcggcggcc

SEQ ID NO: 3925973 - RNA, 17 nt, Human adenovirus D
gcacguggcggcggcca

SEQ ID NO: 3925974 - RNA, 18 nt, Human adenovirus D
gcacucauccaugaugau

SEQ ID NO: 3925975 - RNA, 13 nt, Human adenovirus D
gcacugccggugc

SEQ ID NO: 3925976 - RNA, 16 nt, Human adenovirus D
gcacuggagcacagac

SEQ ID NO: 3925977 - RNA, 18 nt, Human adenovirus D
gcacuggggucucgggga

SEQ ID NO: 3925978 - RNA, 19 nt, Human adenovirus D
gcacuuucauucucgagcg

SEQ ID NO: 3925979 - RNA, 22 nt, Human adenovirus D
gcagaaauuucaagcugggcug

SEQ ID NO: 3925980 - RNA, 21 nt, Human adenovirus D
gcagacacauguccccuuccu

SEQ ID NO: 3925981 - RNA, 16 nt, Human adenovirus D
gcagacuuuagcaaga

SEQ ID NO: 3925982 - RNA, 15 nt, Human adenovirus D
gcagagcagcucuuc

SEQ ID NO: 3925983 - RNA, 15 nt, Human adenovirus D
gcagaggucuggggc

SEQ ID NO: 3925984 - RNA, 16 nt, Human adenovirus D
gcagaggucuggggcg

SEQ ID NO: 3925985 - RNA, 19 nt, Human adenovirus D
gcagaggucuggggcgcuu

SEQ ID NO: 3925986 - RNA, 19 nt, Human adenovirus D
gcagaguacucauaaagaa

SEQ ID NO: 3925987 - RNA, 19 nt, Human adenovirus D
gcagagucugccgcccuug

SEQ ID NO: 3925988 - RNA, 22 nt, Human adenovirus D
gcagcacaguaaguuccugucu

SEQ ID NO: 3925989 - RNA, 19 nt, Human adenovirus D
gcagcacauaaucaccaug

SEQ ID NO: 3925990 - RNA, 22 nt, Human adenovirus D
gcagcacaugguaauccacgga

SEQ ID NO: 3925991 - RNA, 23 nt, Human adenovirus D
gcagcaccucgguacccuccucc

SEQ ID NO: 3925992 - RNA, 16 nt, Human adenovirus D
gcagcagcaguagccc

SEQ ID NO: 3925993 - RNA, 21 nt, Human adenovirus D
gcagcaggugcugccccaggc

SEQ ID NO: 3925994 - RNA, 24 nt, Human adenovirus D
gcagcaguauccgcggaguccagc

SEQ ID NO: 3925995 - RNA, 20 nt, Human adenovirus D
gcagcccaaacuggggcgac

SEQ ID NO: 3925996 - RNA, 23 nt, Human adenovirus D
gcagcccuaccccgccaacuucc

SEQ ID NO: 3925997 - RNA, 20 nt, Human adenovirus D
gcagcccuucuccacgggga

SEQ ID NO: 3925998 - RNA, 14 nt, Human adenovirus D
gcagccgccaugac

SEQ ID NO: 3925999 - RNA, 13 nt, Human adenovirus D
gcagccgccgcgg

SEQ ID NO: 3926000 - RNA, 17 nt, Human adenovirus D
gcagccgccgugcuccc

SEQ ID NO: 3926001 - RNA, 21 nt, Human adenovirus D
gcagccgcguaagcaggagca

SEQ ID NO: 3926002 - RNA, 22 nt, Human adenovirus D
gcagccgcguaagcaggagcag

SEQ ID NO: 3926003 - RNA, 20 nt, Human adenovirus D
gcagccugagcuuggccgag

SEQ ID NO: 3926004 - RNA, 16 nt, Human adenovirus D
gcagcgcauccugcaa

SEQ ID NO: 3926005 - RNA, 23 nt, Human adenovirus D
gcucgagcgcccauuccuggaga

SEQ ID NO: 3926006 - RNA, 14 nt, Human adenovirus D
gcucgcgcccguag

SEQ ID NO: 3926007 - RNA, 17 nt, Human adenovirus D
gcucgcgggccaugagg

SEQ ID NO: 3926008 - RNA, 19 nt, Human adenovirus D
gcucggcgaggauggccug

SEQ ID NO: 3926009 - RNA, 23 nt, Human adenovirus D
gcucucucuucuuguaacuuuua

SEQ ID NO: 3926010 - RNA, 20 nt, Human adenovirus D
gcucugcugcgccgcgccag

SEQ ID NO: 3926011 - RNA, 19 nt, Human adenovirus D
gcucuuaagaaagacacaa

SEQ ID NO: 3926012 - RNA, 12 nt, Human adenovirus D
gcucuugcaggg

SEQ ID NO: 3926013 - RNA, 21 nt, Human adenovirus D
gcugacaauucagagccaggg

SEQ ID NO: 3926014 - RNA, 23 nt, Human adenovirus D
gcugacaauucagagccagggcu

SEQ ID NO: 3926015 - RNA, 18 nt, Human adenovirus D
gcugacauccauggccag

SEQ ID NO: 3926016 - RNA, 20 nt, Human adenovirus D
gcugacauccauggccaggg

SEQ ID NO: 3926017 - RNA, 21 nt, Human adenovirus D
gcugagcgacgaccugggcgu

SEQ ID NO: 3926018 - RNA, 23 nt, Human adenovirus D
gcugaggaaucggaucuucccca

SEQ ID NO: 3926019 - RNA, 17 nt, Human adenovirus D
gcugaucaagugccaca

SEQ ID NO: 3926020 - RNA, 14 nt, Human adenovirus D
gcugcaaagccagc

SEQ ID NO: 3926021 - RNA, 22 nt, Human adenovirus D
gcugccccaggcggugcugcug

SEQ ID NO: 3926022 - RNA, 21 nt, Human adenovirus D
gcugcccgacuucaugagcca

SEQ ID NO: 3926023 - RNA, 21 nt, Human adenovirus D
gcugcccguucucgcugguca

SEQ ID NO: 3926024 - RNA, 22 nt, Human adenovirus D
gcugccgcuggacgagagcaau

SEQ ID NO: 3926025 - RNA, 17 nt, Human adenovirus D
gcugcgcuuugugcccg

SEQ ID NO: 3926026 - RNA, 13 nt, Human adenovirus D
gcugcggcugaug

SEQ ID NO: 3926027 - RNA, 21 nt, Human adenovirus D
gcugcuagagugccacugccg

SEQ ID NO: 3926028 - RNA, 19 nt, Human adenovirus D
gcugcucgagcgcccauuc

SEQ ID NO: 3926029 - RNA, 15 nt, Human adenovirus D
gcugcugccgagccg

SEQ ID NO: 3926030 - RNA, 14 nt, Human adenovirus D
gcugcuucugccug

SEQ ID NO: 3926031 - RNA, 18 nt, Human adenovirus D
gcuggaagcccugagccg

SEQ ID NO: 3926032 - RNA, 14 nt, Human adenovirus D
gcuggagagcgaua

SEQ ID NO: 3926033 - RNA, 15 nt, Human adenovirus D
gcuggaugcggagcc

SEQ ID NO: 3926034 - RNA, 12 nt, Human adenovirus D
gcuggccagcac

SEQ ID NO: 3926035 - RNA, 13 nt, Human adenovirus D
gcuggcccuccau

SEQ ID NO: 3926036 - RNA, 13 nt, Human adenovirus D
gcuggccgagcug

SEQ ID NO: 3926037 - RNA, 21 nt, Human adenovirus D
gcuggccgugguccuggucac

SEQ ID NO: 3926038 - RNA, 14 nt, Human adenovirus D
gcuggccuuccacc

SEQ ID NO: 3926039 - RNA, 15 nt, Human adenovirus D
gcuggcgcgcacgua

SEQ ID NO: 3926040 - RNA, 20 nt, Human adenovirus D
gcuggcugaaucccacuccc

SEQ ID NO: 3926041 - RNA, 16 nt, Human adenovirus D
gcuggcuggucaggcc

SEQ ID NO: 3926042 - RNA, 21 nt, Human adenovirus D
gcuggcuugguacccgcgacc

SEQ ID NO: 3926043 - RNA, 13 nt, Human adenovirus D
gcugggcgaggac

SEQ ID NO: 3926044 - RNA, 16 nt, Human adenovirus D
gcuggggcugcucggc

SEQ ID NO: 3926045 - RNA, 14 nt, Human adenovirus D
gcuggguggccggc

SEQ ID NO: 3926046 - RNA, 15 nt, Human adenovirus D
gcuggucaggccucu

SEQ ID NO: 3926047 - RNA, 11 nt, Human adenovirus D
gcugguugaac

SEQ ID NO: 3926048 - RNA, 13 nt, Human adenovirus D
gcuguccacgagc

SEQ ID NO: 3926049 - RNA, 20 nt, Human adenovirus D
gcuguggagccacugcuacc

SEQ ID NO: 3926050 - RNA, 19 nt, Human adenovirus D
gcuguggggcgugcaggcg

SEQ ID NO: 3926051 - RNA, 21 nt, Human adenovirus D
gcuuaaggaaucuucuuuucu

SEQ ID NO: 3926052 - RNA, 21 nt, Human adenovirus D
gcuucccauugaauggcacug

SEQ ID NO: 3926053 - RNA, 18 nt, Human adenovirus D
gcuuccguugcgcugcag

SEQ ID NO: 3926054 - RNA, 21 nt, Human adenovirus D
gcuucgcccgggagagcugcg

SEQ ID NO: 3926055 - RNA, 19 nt, Human adenovirus D
gcuugcaagggugcgcuug

SEQ ID NO: 3926056 - RNA, 12 nt, Human adenovirus D
gcuugcccugcc

SEQ ID NO: 3926057 - RNA, 22 nt, Human adenovirus D
gcuuguaaaagcguccgcagua

SEQ ID NO: 3926058 - RNA, 20 nt, Human adenovirus D
gcuuguaagcaucgcgcagg

SEQ ID NO: 3926059 - RNA, 14 nt, Human adenovirus D
ggaaccauggacac

SEQ ID NO: 3926060 - RNA, 22 nt, Human adenovirus D
ggaacuaaucauuuaauaaaga

SEQ ID NO: 3926061 - RNA, 17 nt, Human adenovirus D
ggaacucgcggacgcgg

SEQ ID NO: 3926062 - RNA, 13 nt, Human adenovirus D
ggaagagugccca

SEQ ID NO: 3926063 - RNA, 11 nt, Human adenovirus D
ggaagcccuga

SEQ ID NO: 3926064 - RNA, 22 nt, Human adenovirus D
ggaagcccugagccgccagcug

SEQ ID NO: 3926065 - RNA, 14 nt, Human adenovirus D
ggaaggaggacacu

SEQ ID NO: 3926066 - RNA, 19 nt, Human adenovirus D
ggaauaaagaauaugccag

SEQ ID NO: 3926067 - RNA, 18 nt, Human adenovirus D
ggacagccagcagaagaa

SEQ ID NO: 3926068 - RNA, 13 nt, Human adenovirus D
ggaccaaccccac

SEQ ID NO: 3926069 - RNA, 18 nt, Human adenovirus D
ggaccauagggagccugc

SEQ ID NO: 3926070 - RNA, 20 nt, Human adenovirus D
ggacccuuuuaccuuaacca

SEQ ID NO: 3926071 - RNA, 15 nt, Human adenovirus D
ggaccgcagcgggga

SEQ ID NO: 3926072 - RNA, 16 nt, Human adenovirus D
ggaccgcagcggggag

SEQ ID NO: 3926073 - RNA, 16 nt, Human adenovirus D
ggacgacgaggacucg

SEQ ID NO: 3926074 - RNA, 18 nt, Human adenovirus D
ggacgggcgcccagugcu

SEQ ID NO: 3926075 - RNA, 13 nt, Human adenovirus D
ggacuaccugcau

SEQ ID NO: 3926076 - RNA, 17 nt, Human adenovirus D
ggacuauccuugcagac

SEQ ID NO: 3926077 - RNA, 16 nt, Human adenovirus D
ggacucacccuggggc

SEQ ID NO: 3926078 - RNA, 22 nt, Human adenovirus D
ggacugguuccucguccagaug

SEQ ID NO: 3926079 - RNA, 17 nt, Human adenovirus D
ggacuucacagagagcc

SEQ ID NO: 3926080 - RNA, 19 nt, Human adenovirus D
ggagacuuucauccaucug

SEQ ID NO: 3926081 - RNA, 18 nt, Human adenovirus D
ggagaggcauggcaggca

SEQ ID NO: 3926082 - RNA, 20 nt, Human adenovirus D
ggagaucacuagcgugagcc

SEQ ID NO: 3926083 - RNA, 20 nt, Human adenovirus D
ggagauuuacggaccacccc

SEQ ID NO: 3926084 - RNA, 22 nt, Human adenovirus D
ggagcaggguaaagccagcagc

SEQ ID NO: 3926085 - RNA, 20 nt, Human adenovirus D
ggagccaagaaacgucccag

SEQ ID NO: 3926086 - RNA, 14 nt, Human adenovirus D
ggagccagguccag

SEQ ID NO: 3926087 - RNA, 15 nt, Human adenovirus D
ggagcccacccgcug

SEQ ID NO: 3926088 - RNA, 17 nt, Human adenovirus D
ggagccgcucggccaug

SEQ ID NO: 3926089 - RNA, 17 nt, Human adenovirus D
ggagccugaugagcucg

SEQ ID NO: 3926090 - RNA, 18 nt, Human adenovirus D
ggagccugaugagcucgg

SEQ ID NO: 3926091 - RNA, 21 nt, Human adenovirus D
ggagcgaggugugcgucaggg

SEQ ID NO: 3926092 - RNA, 15 nt, Human adenovirus D
ggagcggucuggacc

SEQ ID NO: 3926093 - RNA, 19 nt, Human adenovirus D
ggagcucuugcagggaagc

SEQ ID NO: 3926094 - RNA, 15 nt, Human adenovirus D
ggagcugaccaacug

SEQ ID NO: 3926095 - RNA, 15 nt, Human adenovirus D
ggaggaccagguccu

SEQ ID NO: 3926096 - RNA, 21 nt, Human adenovirus D
ggaggagaccgacgcugggcu

SEQ ID NO: 3926097 - RNA, 16 nt, Human adenovirus D
ggaggaugcacccgcu

SEQ ID NO: 3926098 - RNA, 21 nt, Human adenovirus D
ggaggcaccaucacaggaggc

SEQ ID NO: 3926099 - RNA, 20 nt, Human adenovirus D
ggaggccaucgugcagaacc

SEQ ID NO: 3926100 - RNA, 19 nt, Human adenovirus D
ggaggccgugaaggccggc

SEQ ID NO: 3926101 - RNA, 14 nt, Human adenovirus D
ggaggcgaagaugg

SEQ ID NO: 3926102 - RNA, 17 nt, Human adenovirus D
ggaggcgguccccgccc

SEQ ID NO: 3926103 - RNA, 21 nt, Human adenovirus D
ggaggcgguccccgcccagcg

SEQ ID NO: 3926104 - RNA, 15 nt, Human adenovirus D
ggaggcggugcgcac

SEQ ID NO: 3926105 - RNA, 24 nt, Human adenovirus D
ggaggcguacaugccgcaaauguc

SEQ ID NO: 3926106 - RNA, 17 nt, Human adenovirus D
ggaggcgugcacuggcu

SEQ ID NO: 3926107 - RNA, 15 nt, Human adenovirus D
ggagggauugcaggg

SEQ ID NO: 3926108 - RNA, 18 nt, Human adenovirus D
ggaguaccugagcccggg

SEQ ID NO: 3926109 - RNA, 17 nt, Human adenovirus D
ggagucuugcagcuugg

SEQ ID NO: 3926110 - RNA, 19 nt, Human adenovirus D
ggaucuagaagggggcaac

SEQ ID NO: 3926111 - RNA, 11 nt, Human adenovirus D
ggaucuucccc

SEQ ID NO: 3926112 - RNA, 23 nt, Human adenovirus D
ggaugaaccuuuggaccugagcu

SEQ ID NO: 3926113 - RNA, 23 nt, Human adenovirus D
ggcaacauccccgcccugcugga

SEQ ID NO: 3926114 - RNA, 17 nt, Human adenovirus D
ggcaagagucugaagcc

SEQ ID NO: 3926115 - RNA, 15 nt, Human adenovirus D
ggcacagacgaagaa

SEQ ID NO: 3926116 - RNA, 16 nt, Human adenovirus D
ggcacggcacgcggcc

SEQ ID NO: 3926117 - RNA, 14 nt, Human adenovirus D
ggcacggcgguggu

SEQ ID NO: 3926118 - RNA, 13 nt, Human adenovirus D
ggcacuggagcac

SEQ ID NO: 3926119 - RNA, 17 nt, Human adenovirus D
ggcagcggggacagaga

SEQ ID NO: 3926120 - RNA, 14 nt, Human adenovirus D
ggcagcggggccug

SEQ ID NO: 3926121 - RNA, 15 nt, Human adenovirus D
ggcagggagcugcgc

SEQ ID NO: 3926122 - RNA, 16 nt, Human adenovirus D
ggcaggggcggcagag

SEQ ID NO: 3926123 - RNA, 15 nt, Human adenovirus D
ggcagggugagccgg

SEQ ID NO: 3926124 - RNA, 21 nt, Human adenovirus D
ggcaguauaucaggugccugc

SEQ ID NO: 3926125 - RNA, 13 nt, Human adenovirus D
ggcagugcagcgc

SEQ ID NO: 3926126 - RNA, 20 nt, Human adenovirus D
ggcauggcaggcagcggccu

SEQ ID NO: 3926127 - RNA, 18 nt, Human adenovirus D
ggcaugggucaggcagcg

SEQ ID NO: 3926128 - RNA, 20 nt, Human adenovirus D
ggcauuggagaaugcugcua

SEQ ID NO: 3926129 - RNA, 14 nt, Human adenovirus D
ggccaaccugguga

SEQ ID NO: 3926130 - RNA, 13 nt, Human adenovirus D
ggccaaggccacc

SEQ ID NO: 3926131 - RNA, 14 nt, Human adenovirus D
ggccaaucagcagu

SEQ ID NO: 3926132 - RNA, 13 nt, Human adenovirus D
ggccaccucgccg

SEQ ID NO: 3926133 - RNA, 22 nt, Human adenovirus D
ggccaccucgccgcgcaggggc

SEQ ID NO: 3926134 - RNA, 23 nt, Human adenovirus D
ggccacguugcgguacugguacu

SEQ ID NO: 3926135 - RNA, 15 nt, Human adenovirus D
ggccagucugaugaa

SEQ ID NO: 3926136 - RNA, 18 nt, Human adenovirus D
ggcccaaugcaacaugac

SEQ ID NO: 3926137 - RNA, 22 nt, Human adenovirus D
ggccccgccaaccggcugaugc

SEQ ID NO: 3926138 - RNA, 18 nt, Human adenovirus D
ggccccgcgggcaggggc

SEQ ID NO: 3926139 - RNA, 16 nt, Human adenovirus D
ggcccgggacggaggc

SEQ ID NO: 3926140 - RNA, 15 nt, Human adenovirus D
ggcccuggagcagcg

SEQ ID NO: 3926141 - RNA, 20 nt, Human adenovirus D
ggccgagaagguggcggcaa

SEQ ID NO: 3926142 - RNA, 17 nt, Human adenovirus D
ggccgagaccgugagcu

SEQ ID NO: 3926143 - RNA, 16 nt, Human adenovirus D
  misc_feature (7)..(7): n is a, c, g, or u
ggccgangggagucgc

SEQ ID NO: 3926144 - RNA, 14 nt, Human adenovirus D
ggccgcagcucuuc

SEQ ID NO: 3926145 - RNA, 21 nt, Human adenovirus D
ggccgcccugacccagcaggu

SEQ ID NO: 3926146 - RNA, 19 nt, Human adenovirus D
ggccgccuuuagguguugc

SEQ ID NO: 3926147 - RNA, 18 nt, Human adenovirus D
ggccgcgagaccggaggc

SEQ ID NO: 3926148 - RNA, 13 nt, Human adenovirus D
ggccguagcaggc

SEQ ID NO: 3926149 - RNA, 14 nt, Human adenovirus D
ggccguuggaagau

SEQ ID NO: 3926150 - RNA, 22 nt, Human adenovirus D
ggccuacuacuccugaucagaa

SEQ ID NO: 3926151 - RNA, 19 nt, Human adenovirus D
ggccugaaccgccgccggc

SEQ ID NO: 3926152 - RNA, 18 nt, Human adenovirus D
ggccugggcgugcagacc

SEQ ID NO: 3926153 - RNA, 13 nt, Human adenovirus D
ggccuguccugca

SEQ ID NO: 3926154 - RNA, 20 nt, Human adenovirus D
ggcgacaacgccaggcuggc

SEQ ID NO: 3926155 - RNA, 18 nt, Human adenovirus D
ggcgaugggcccgugggc

SEQ ID NO: 3926156 - RNA, 16 nt, Human adenovirus D
ggcgcaaccaggagga

SEQ ID NO: 3926157 - RNA, 21 nt, Human adenovirus D
ggcgcaagcucaugcuggccg

SEQ ID NO: 3926158 - RNA, 23 nt, Human adenovirus D
ggcgcaagcucaugcuggccgug

SEQ ID NO: 3926159 - RNA, 23 nt, Human adenovirus D
ggcgcacaacaccgccuccaccc

SEQ ID NO: 3926160 - RNA, 17 nt, Human adenovirus D
ggcgcccgugggcgacc

SEQ ID NO: 3926161 - RNA, 17 nt, Human adenovirus D
ggcgccgagcucaugcc

SEQ ID NO: 3926162 - RNA, 19 nt, Human adenovirus D
ggcgccgcccgagcucugc

SEQ ID NO: 3926163 - RNA, 21 nt, Human adenovirus D
ggcgccgcccgagcucugcug

SEQ ID NO: 3926164 - RNA, 20 nt, Human adenovirus D
ggcgccuucaauuggagcag

SEQ ID NO: 3926165 - RNA, 21 nt, Human adenovirus D
ggcgcgcuccuuggccgcgau

SEQ ID NO: 3926166 - RNA, 14 nt, Human adenovirus D
ggcgcugcaaagcc

SEQ ID NO: 3926167 - RNA, 17 nt, Human adenovirus D
ggcgcugcaaagccagc

SEQ ID NO: 3926168 - RNA, 18 nt, Human adenovirus D
ggcgcugcaaagccagcc

SEQ ID NO: 3926169 - RNA, 17 nt, Human adenovirus D
ggcgcugggcguggugc

SEQ ID NO: 3926170 - RNA, 20 nt, Human adenovirus D
ggcggaacugcuggcccacg

SEQ ID NO: 3926171 - RNA, 19 nt, Human adenovirus D
ggcggacaucgcuucccug

SEQ ID NO: 3926172 - RNA, 21 nt, Human adenovirus D
ggcggaccugcauuggcagcc

SEQ ID NO: 3926173 - RNA, 21 nt, Human adenovirus D
ggcggacugccaccgccgccg

SEQ ID NO: 3926174 - RNA, 22 nt, Human adenovirus D
ggcggacugccaccgccgccgc

SEQ ID NO: 3926175 - RNA, 23 nt, Human adenovirus D
ggcggaggcguacaugccgcaaa

SEQ ID NO: 3926176 - RNA, 12 nt, Human adenovirus D
ggcggagggugc

SEQ ID NO: 3926177 - RNA, 20 nt, Human adenovirus D
ggcggagggugccagauugg

SEQ ID NO: 3926178 - RNA, 11 nt, Human adenovirus D
ggcggcagagc

SEQ ID NO: 3926179 - RNA, 17 nt, Human adenovirus D
ggcggcgcugcaaagcc

SEQ ID NO: 3926180 - RNA, 16 nt, Human adenovirus D
ggcgggcagggagcug

SEQ ID NO: 3926181 - RNA, 13 nt, Human adenovirus D
ggcggugcugcug

SEQ ID NO: 3926182 - RNA, 17 nt, Human adenovirus D
ggcgguuccggccccgc

SEQ ID NO: 3926183 - RNA, 13 nt, Human adenovirus D
ggcguacaugcac

SEQ ID NO: 3926184 - RNA, 14 nt, Human adenovirus D
ggcgucgcagcgcc

SEQ ID NO: 3926185 - RNA, 20 nt, Human adenovirus D
ggcgugcgaguuggaggaga

SEQ ID NO: 3926186 - RNA, 22 nt, Human adenovirus D
ggcguggcccuuggcgcggagc

SEQ ID NO: 3926187 - RNA, 17 nt, Human adenovirus D
ggcguucagggaggcgc

SEQ ID NO: 3926188 - RNA, 18 nt, Human adenovirus D
ggcguuuuugaggcggcg

SEQ ID NO: 3926189 - RNA, 18 nt, Human adenovirus D
ggcuaccuugcacccacc

SEQ ID NO: 3926190 - RNA, 15 nt, Human adenovirus D
ggcuccgcggcacgg

SEQ ID NO: 3926191 - RNA, 20 nt, Human adenovirus D
ggcuccuacggagggcagaa

SEQ ID NO: 3926192 - RNA, 20 nt, Human adenovirus D
ggcuccucgaggacggagag

SEQ ID NO: 3926193 - RNA, 19 nt, Human adenovirus D
ggcucggugcggcugcugc

SEQ ID NO: 3926194 - RNA, 20 nt, Human adenovirus D
ggcugaaucccacucccaca

SEQ ID NO: 3926195 - RNA, 21 nt, Human adenovirus D
ggcugcauccacugcuccugc

SEQ ID NO: 3926196 - RNA, 11 nt, Human adenovirus D
ggcugcugcug

SEQ ID NO: 3926197 - RNA, 12 nt, Human adenovirus D
ggcugcuggagc

SEQ ID NO: 3926198 - RNA, 22 nt, Human adenovirus D
ggcugggcgcuugcaagggugc

SEQ ID NO: 3926199 - RNA, 17 nt, Human adenovirus D
ggcuucaccggcuaccu

SEQ ID NO: 3926200 - RNA, 22 nt, Human adenovirus D
ggcuuuuccugaugcaggaggg

SEQ ID NO: 3926201 - RNA, 22 nt, Human adenovirus D
gggaaaggaauaggcacugaaa

SEQ ID NO: 3926202 - RNA, 16 nt, Human adenovirus D
gggaacggggcagagg

SEQ ID NO: 3926203 - RNA, 13 nt, Human adenovirus D
gggaagagcccuu

SEQ ID NO: 3926204 - RNA, 19 nt, Human adenovirus D
gggacgacguggacagcgc

SEQ ID NO: 3926205 - RNA, 21 nt, Human adenovirus D
gggagacggucgacgaagcgc

SEQ ID NO: 3926206 - RNA, 11 nt, Human adenovirus D
gggagagcugc

SEQ ID NO: 3926207 - RNA, 15 nt, Human adenovirus D
gggaugaacaguggc

SEQ ID NO: 3926208 - RNA, 14 nt, Human adenovirus D
gggcacagccucuc

SEQ ID NO: 3926209 - RNA, 19 nt, Human adenovirus D
gggcagcgagagggcgcug

SEQ ID NO: 3926210 - RNA, 22 nt, Human adenovirus D
gggcaucucgcugaugucgccg

SEQ ID NO: 3926211 - RNA, 15 nt, Human adenovirus D
gggcaugagcccguc

SEQ ID NO: 3926212 - RNA, 16 nt, Human adenovirus D
gggcaugggucaggca

SEQ ID NO: 3926213 - RNA, 19 nt, Human adenovirus D
gggccccgccaaccggcug

SEQ ID NO: 3926214 - RNA, 12 nt, Human adenovirus D
gggcccgacucc

SEQ ID NO: 3926215 - RNA, 20 nt, Human adenovirus D
aucaccaguuugggcacugg

SEQ ID NO: 3926216 - RNA, 13 nt, Human adenovirus D
aucacccagggcg

SEQ ID NO: 3926217 - RNA, 14 nt, Human adenovirus D
aucagaaacacaga

SEQ ID NO: 3926218 - RNA, 14 nt, Human adenovirus D
aucagacaugcugc

SEQ ID NO: 3926219 - RNA, 15 nt, Human adenovirus D
aucagacaugcugcu

SEQ ID NO: 3926220 - RNA, 19 nt, Human adenovirus D
aucagcaguagccccgccc

SEQ ID NO: 3926221 - RNA, 18 nt, Human adenovirus D
aucauuauuuucauaugc

SEQ ID NO: 3926222 - RNA, 21 nt, Human adenovirus D
auccacaaggccgugagcgcg

SEQ ID NO: 3926223 - RNA, 12 nt, Human adenovirus D
auccacugcucc

SEQ ID NO: 3926224 - RNA, 16 nt, Human adenovirus D
caauguuacgcugccc

SEQ ID NO: 3926225 - RNA, 15 nt, Human adenovirus D
cacaacaccgccucc

SEQ ID NO: 3926226 - RNA, 14 nt, Human adenovirus D
cacaaucacggcau

SEQ ID NO: 3926227 - RNA, 15 nt, Human adenovirus D
cacacaguuuccuga

SEQ ID NO: 3926228 - RNA, 19 nt, Human adenovirus D
cacaccaggaugcagccag

SEQ ID NO: 3926229 - RNA, 14 nt, Human adenovirus D
cacacuagaaagca

SEQ ID NO: 3926230 - RNA, 21 nt, Human adenovirus D
cacacuagaaagcaguucacu

SEQ ID NO: 3926231 - RNA, 18 nt, Human adenovirus D
cacacuuaguucagcugc

SEQ ID NO: 3926232 - RNA, 20 nt, Human adenovirus D
cacacuuuugguuucaaauu

SEQ ID NO: 3926233 - RNA, 18 nt, Human adenovirus D
cacagaccuucagggagu

SEQ ID NO: 3926234 - RNA, 21 nt, Human adenovirus D
cacagcgauucccgggcuuuc

SEQ ID NO: 3926235 - RNA, 16 nt, Human adenovirus D
cacaggaggcacagac

SEQ ID NO: 3926236 - RNA, 13 nt, Human adenovirus D
cacaggugcugcc

SEQ ID NO: 3926237 - RNA, 20 nt, Human adenovirus D
cacaggugcugcccacccuc

SEQ ID NO: 3926238 - RNA, 18 nt, Human adenovirus D
cacaguaagugcagcaca

SEQ ID NO: 3926239 - RNA, 15 nt, Human adenovirus D
cacaguaaguuccug

SEQ ID NO: 3926240 - RNA, 14 nt, Human adenovirus D
cacaguagucauca

SEQ ID NO: 3926241 - RNA, 19 nt, Human adenovirus D
cacaguagucaucaaaugc

SEQ ID NO: 3926242 - RNA, 23 nt, Human adenovirus D
cacagucaacuguuaagaccacu

SEQ ID NO: 3926243 - RNA, 21 nt, Human adenovirus D
cacaguuauaccaccuccucc

SEQ ID NO: 3926244 - RNA, 15 nt, Human adenovirus D
cacaucggacugggu

SEQ ID NO: 3926245 - RNA, 15 nt, Human adenovirus D
cacauggcaagcugc

SEQ ID NO: 3926246 - RNA, 12 nt, Human adenovirus D
caccaaggccau

SEQ ID NO: 3926247 - RNA, 21 nt, Human adenovirus D
caccacgcuucuuccccagcg

SEQ ID NO: 3926248 - RNA, 13 nt, Human adenovirus D
caccagccagcug

SEQ ID NO: 3926249 - RNA, 23 nt, Human adenovirus D
caccaggacgguguagcccgugc

SEQ ID NO: 3926250 - RNA, 22 nt, Human adenovirus D
caccaguuggacgaguggcugu

SEQ ID NO: 3926251 - RNA, 22 nt, Human adenovirus D
caccauguuauucagcagccca

SEQ ID NO: 3926252 - RNA, 19 nt, Human adenovirus D
cacccaacugagcaggggc

SEQ ID NO: 3926253 - RNA, 15 nt, Human adenovirus D
cacccacgacacagc

SEQ ID NO: 3926254 - RNA, 13 nt, Human adenovirus D
caccccccgcagg

SEQ ID NO: 3926255 - RNA, 21 nt, Human adenovirus D
caccccuuacauguggagcua

SEQ ID NO: 3926256 - RNA, 22 nt, Human adenovirus D
cacccgcgccgacgcgcuccuc

SEQ ID NO: 3926257 - RNA, 22 nt, Human adenovirus D
cacccucagaagaagaccaccc

SEQ ID NO: 3926258 - RNA, 14 nt, Human adenovirus D
cacccugcccuucc

SEQ ID NO: 3926259 - RNA, 20 nt, Human adenovirus D
cacccuggaagccaugcugc

SEQ ID NO: 3926260 - RNA, 17 nt, Human adenovirus D
caccgagucucaccugg

SEQ ID NO: 3926261 - RNA, 15 nt, Human adenovirus D
caccgcuccuggucu

SEQ ID NO: 3926262 - RNA, 20 nt, Human adenovirus D
caccggcuaccuugcaccca

SEQ ID NO: 3926263 - RNA, 19 nt, Human adenovirus D
caccguuccaugcagacac

SEQ ID NO: 3926264 - RNA, 13 nt, Human adenovirus D
caccuagaccacu

SEQ ID NO: 3926265 - RNA, 15 nt, Human adenovirus D
caccugcaccugcgu

SEQ ID NO: 3926266 - RNA, 18 nt, Human adenovirus D
caccugcgagcccaaccc

SEQ ID NO: 3926267 - RNA, 16 nt, Human adenovirus D
caccugggcgccagaa

SEQ ID NO: 3926268 - RNA, 17 nt, Human adenovirus D
caccugugggaccuggc

SEQ ID NO: 3926269 - RNA, 15 nt, Human adenovirus D
caccuucaagaaagu

SEQ ID NO: 3926270 - RNA, 13 nt, Human adenovirus D
caccuuccagccg

SEQ ID NO: 3926271 - RNA, 14 nt, Human adenovirus D
cacgagaaggugcu

SEQ ID NO: 3926272 - RNA, 21 nt, Human adenovirus D
cacgagcaagacgcaggccag

SEQ ID NO: 3926273 - RNA, 22 nt, Human adenovirus D
cacgagcgccaggucggcgacg

SEQ ID NO: 3926274 - RNA, 21 nt, Human adenovirus D
cacgcacgagaaggugcuggc

SEQ ID NO: 3926275 - RNA, 18 nt, Human adenovirus D
cacgccaccacccacacc

SEQ ID NO: 3926276 - RNA, 14 nt, Human adenovirus D
cacgcccugggugu

SEQ ID NO: 3926277 - RNA, 15 nt, Human adenovirus D
cacgccgagccugaa

SEQ ID NO: 3926278 - RNA, 23 nt, Human adenovirus D
cacgccgagccugaagcccguga

SEQ ID NO: 3926279 - RNA, 23 nt, Human adenovirus D
cacgcggaucucacggccugcgu

SEQ ID NO: 3926280 - RNA, 12 nt, Human adenovirus D
cacgcgggugag

SEQ ID NO: 3926281 - RNA, 16 nt, Human adenovirus D
cacggccuuguaggga

SEQ ID NO: 3926282 - RNA, 18 nt, Human adenovirus D
cacgggguugcagcacug

SEQ ID NO: 3926283 - RNA, 14 nt, Human adenovirus D
cacgguaagagccc

SEQ ID NO: 3926284 - RNA, 19 nt, Human adenovirus D
cacuacuaauucucaaagu

SEQ ID NO: 3926285 - RNA, 15 nt, Human adenovirus D
cacuacucagcuucu

SEQ ID NO: 3926286 - RNA, 17 nt, Human adenovirus D
cacuagcgcccugguag

SEQ ID NO: 3926287 - RNA, 16 nt, Human adenovirus D
cacucaaacuggcuga

SEQ ID NO: 3926288 - RNA, 14 nt, Human adenovirus D
cacucuuuccagca

SEQ ID NO: 3926289 - RNA, 18 nt, Human adenovirus D
cacugacuuagcucccua

SEQ ID NO: 3926290 - RNA, 13 nt, Human adenovirus D
cacugcaaauuua

SEQ ID NO: 3926291 - RNA, 17 nt, Human adenovirus D
cacugcaccccccgcag

SEQ ID NO: 3926292 - RNA, 18 nt, Human adenovirus D
cacugcagggagccaggg

SEQ ID NO: 3926293 - RNA, 19 nt, Human adenovirus D
cacugcccauauacaugau

SEQ ID NO: 3926294 - RNA, 13 nt, Human adenovirus D
cacugccgccgcc

SEQ ID NO: 3926295 - RNA, 22 nt, Human adenovirus D
cacugccgccgccugcgcugcu

SEQ ID NO: 3926296 - RNA, 19 nt, Human adenovirus D
cacugcucuucccuggaga

SEQ ID NO: 3926297 - RNA, 15 nt, Human adenovirus D
cacuggcucgccuuc

SEQ ID NO: 3926298 - RNA, 20 nt, Human adenovirus D
cacuuccuuuaccuucuccu

SEQ ID NO: 3926299 - RNA, 16 nt, Human adenovirus D
cacuugccgccugcgc

SEQ ID NO: 3926300 - RNA, 18 nt, Human adenovirus D
cacuuuugcccuuacaug

SEQ ID NO: 3926301 - RNA, 17 nt, Human adenovirus D
cagaaagaaguggccag

SEQ ID NO: 3926302 - RNA, 11 nt, Human adenovirus D
cagaacaaaaa

SEQ ID NO: 3926303 - RNA, 14 nt, Human adenovirus D
cagaacaaaaacag

SEQ ID NO: 3926304 - RNA, 19 nt, Human adenovirus D
cagaacccggacagcaagc

SEQ ID NO: 3926305 - RNA, 19 nt, Human adenovirus D
cagaaggggcaccuuccag

SEQ ID NO: 3926306 - RNA, 16 nt, Human adenovirus D
cagaaguucaccugca

SEQ ID NO: 3926307 - RNA, 12 nt, Human adenovirus D
cagacagccagg

SEQ ID NO: 3926308 - RNA, 16 nt, Human adenovirus D
cagacagggccugcaa

SEQ ID NO: 3926309 - RNA, 17 nt, Human adenovirus D
cagaccgaccccuggcu

SEQ ID NO: 3926310 - RNA, 16 nt, Human adenovirus D
cagaccuucagggagu

SEQ ID NO: 3926311 - RNA, 24 nt, Human adenovirus D
cagacgauaaauuuugacgagcgg

SEQ ID NO: 3926312 - RNA, 13 nt, Human adenovirus D
cagacgcugaaag

SEQ ID NO: 3926313 - RNA, 13 nt, Human adenovirus D
cagagagauggcu

SEQ ID NO: 3926314 - RNA, 22 nt, Human adenovirus D
cagagauggacuuggaagaggg

SEQ ID NO: 3926315 - RNA, 11 nt, Human adenovirus D
cagagccaggg

SEQ ID NO: 3926316 - RNA, 13 nt, Human adenovirus D
cagagcucgguga

SEQ ID NO: 3926317 - RNA, 19 nt, Human adenovirus D
cagaggacuuggaugagga

SEQ ID NO: 3926318 - RNA, 18 nt, Human adenovirus D
cagagggggcgguggcag

SEQ ID NO: 3926319 - RNA, 14 nt, Human adenovirus D
cagaguaagaggag

SEQ ID NO: 3926320 - RNA, 22 nt, Human adenovirus D
cagcaagccucugacggcgcag

SEQ ID NO: 3926321 - RNA, 23 nt, Human adenovirus D
cagcaaguuuaaggcgcggguga

SEQ ID NO: 3926322 - RNA, 22 nt, Human adenovirus D
cagcagaaauuucaagcugggc

SEQ ID NO: 3926323 - RNA, 20 nt, Human adenovirus D
cagcagcacaugguaaucca

SEQ ID NO: 3926324 - RNA, 11 nt, Human adenovirus D
cagcagcaccu

SEQ ID NO: 3926325 - RNA, 13 nt, Human adenovirus D
cagcagcaggagc

SEQ ID NO: 3926326 - RNA, 22 nt, Human adenovirus D
cagcagcauguacggaggagcc

SEQ ID NO: 3926327 - RNA, 15 nt, Human adenovirus D
cagcaggagugcagg

SEQ ID NO: 3926328 - RNA, 15 nt, Human adenovirus D
cagcaggugcugccc

SEQ ID NO: 3926329 - RNA, 15 nt, Human adenovirus D
cagccaguggcccug

SEQ ID NO: 3926330 - RNA, 16 nt, Human adenovirus D
cagcccaaacuggggc

SEQ ID NO: 3926331 - RNA, 18 nt, Human adenovirus D
cagcccauuucacagugu

SEQ ID NO: 3926332 - RNA, 14 nt, Human adenovirus D
cagccgccaugaca

SEQ ID NO: 3926333 - RNA, 14 nt, Human adenovirus D
cagccgcggcagcc

SEQ ID NO: 3926334 - RNA, 21 nt, Human adenovirus D
cagccgucuggacccgcggcc

SEQ ID NO: 3926335 - RNA, 18 nt, Human adenovirus D
cagccgugaucccacagg

SEQ ID NO: 3926336 - RNA, 23 nt, Human adenovirus D
agcucaaacacguagcagcccug

SEQ ID NO: 3926337 - RNA, 16 nt, Human adenovirus D
agcucaaagaccagaa

SEQ ID NO: 3926338 - RNA, 22 nt, Human adenovirus D
agcucccacagugcccccucca

SEQ ID NO: 3926339 - RNA, 19 nt, Human adenovirus D
agcugaccaacuggucucc

SEQ ID NO: 3926340 - RNA, 18 nt, Human adenovirus D
agcugcaaaaagucacuu

SEQ ID NO: 3926341 - RNA, 13 nt, Human adenovirus D
agcugcgaggaga

SEQ ID NO: 3926342 - RNA, 18 nt, Human adenovirus D
agcuggacaagcuucuug

SEQ ID NO: 3926343 - RNA, 22 nt, Human adenovirus D
agcuugguggcaaaggagccau

SEQ ID NO: 3926344 - RNA, 19 nt, Human adenovirus D
aggaaacuaggcgcagcug

SEQ ID NO: 3926345 - RNA, 19 nt, Human adenovirus D
aggaauaggcacugaaaau

SEQ ID NO: 3926346 - RNA, 19 nt, Human adenovirus D
aggaauugguauaagugua

SEQ ID NO: 3926347 - RNA, 18 nt, Human adenovirus D
aggacgagaccagaggca

SEQ ID NO: 3926348 - RNA, 16 nt, Human adenovirus D
aggacgaguaccugaa

SEQ ID NO: 3926349 - RNA, 21 nt, Human adenovirus D
cagcaacuaccccguggucgg

SEQ ID NO: 3926350 - RNA, 15 nt, Human adenovirus D
cagcaagagcucaaa

SEQ ID NO: 3926351 - RNA, 19 nt, Human adenovirus D
cagcaagccccggaccccg

SEQ ID NO: 3926352 - RNA, 21 nt, Human adenovirus D
cagcaagccucugacggcgca

SEQ ID NO: 3926353 - RNA, 14 nt, Human adenovirus D
ggaugaggaagagg

SEQ ID NO: 3926354 - RNA, 15 nt, Human adenovirus D
ggaugcgugagggcg

SEQ ID NO: 3926355 - RNA, 17 nt, Human adenovirus D
ggaugcgugagggcgga

SEQ ID NO: 3926356 - RNA, 18 nt, Human adenovirus D
ggaugguuuacaauuuug

SEQ ID NO: 3926357 - RNA, 22 nt, Human adenovirus D
ggauguaaguuuuauggcugcu

SEQ ID NO: 3926358 - RNA, 20 nt, Human adenovirus D
ggaugucaaauuccuggucc

SEQ ID NO: 3926359 - RNA, 23 nt, Human adenovirus D
ggauuaaaaauauuagaugacaa

SEQ ID NO: 3926360 - RNA, 22 nt, Human adenovirus D
ggauucaaaaacuuccccccug

SEQ ID NO: 3926361 - RNA, 22 nt, Human adenovirus D
ggcaaaauggcgugcuggagag

SEQ ID NO: 3926362 - RNA, 20 nt, Human adenovirus D
ggcaaagcgguugagcuggg

SEQ ID NO: 3926363 - RNA, 16 nt, Human adenovirus D
accagauacuucagca

SEQ ID NO: 3926364 - RNA, 13 nt, Human adenovirus D
accagcacacuca

SEQ ID NO: 3926365 - RNA, 19 nt, Human adenovirus D
accagcaucgaggugcaga

SEQ ID NO: 3926366 - RNA, 23 nt, Human adenovirus D
accagguccacgcugguggccac

SEQ ID NO: 3926367 - RNA, 21 nt, Human adenovirus D
accaugaaggcuuucacagcu

SEQ ID NO: 3926368 - RNA, 17 nt, Human adenovirus D
accaugaauacagugau

SEQ ID NO: 3926369 - RNA, 19 nt, Human adenovirus D
accaugaccauagaccuga

SEQ ID NO: 3926370 - RNA, 21 nt, Human adenovirus D
acccaaaaccuaccacuggcu

SEQ ID NO: 3926371 - RNA, 13 nt, Human adenovirus D
acccacaccgccu

SEQ ID NO: 3926372 - RNA, 22 nt, Human adenovirus D
acccacgugguauacaagccag

SEQ ID NO: 3926373 - RNA, 18 nt, Human adenovirus D
accccaggcggaccagaa

SEQ ID NO: 3926374 - RNA, 20 nt, Human adenovirus D
accccaucccggccaaggcc

SEQ ID NO: 3926375 - RNA, 19 nt, Human adenovirus D
accccuggcucccagccuc

SEQ ID NO: 3926376 - RNA, 20 nt, Human adenovirus D
accccuggcucccagccucc

SEQ ID NO: 3926377 - RNA, 23 nt, Human adenovirus D
accccuuuggguucucggaccgc

SEQ ID NO: 3926378 - RNA, 14 nt, Human adenovirus D
acccgcucaccauc

SEQ ID NO: 3926379 - RNA, 21 nt, Human adenovirus D
acccuaaggcucccuugcaac

SEQ ID NO: 3926380 - RNA, 21 nt, Human adenovirus D
accgacacguacuucagccug

SEQ ID NO: 3926381 - RNA, 16 nt, Human adenovirus D
accgacaguggcagcg

SEQ ID NO: 3926382 - RNA, 14 nt, Human adenovirus D
accgacauggaugu

SEQ ID NO: 3926383 - RNA, 21 nt, Human adenovirus D
accgcaacucguaccuggguc

SEQ ID NO: 3926384 - RNA, 16 nt, Human adenovirus D
accgccgccggcggcg

SEQ ID NO: 3926385 - RNA, 19 nt, Human adenovirus D
accgcgagcugaugcugag

SEQ ID NO: 3926386 - RNA, 14 nt, Human adenovirus D
accgcgccgccauc

SEQ ID NO: 3926387 - RNA, 14 nt, Human adenovirus D
accgcggucccagu

SEQ ID NO: 3926388 - RNA, 19 nt, Human adenovirus D
accgcgucgcugaaagcau

SEQ ID NO: 3926389 - RNA, 17 nt, Human adenovirus D
accgcuaccgcuuccac

SEQ ID NO: 3926390 - RNA, 17 nt, Human adenovirus D
accggaggcgugcacug

SEQ ID NO: 3926391 - RNA, 13 nt, Human adenovirus D
accggaggcuggc

SEQ ID NO: 3926392 - RNA, 12 nt, Human adenovirus D
accggcuggggu

SEQ ID NO: 3926393 - RNA, 17 nt, Human adenovirus D
accggggaggcaccacc

SEQ ID NO: 3926394 - RNA, 22 nt, Human adenovirus D
accgucgccucggaccuggccg

SEQ ID NO: 3926395 - RNA, 14 nt, Human adenovirus D
accgugaaaaugga

SEQ ID NO: 3926396 - RNA, 14 nt, Human adenovirus D
accuaccacugcca

SEQ ID NO: 3926397 - RNA, 21 nt, Human adenovirus D
accucauuugcauauuaacuu

SEQ ID NO: 3926398 - RNA, 16 nt, Human adenovirus D
accucccaccccagaa

SEQ ID NO: 3926399 - RNA, 16 nt, Human adenovirus D
accucuacgccaccuu

SEQ ID NO: 3926400 - RNA, 13 nt, Human adenovirus D
accucucggccgc

SEQ ID NO: 3926401 - RNA, 20 nt, Human adenovirus D
accugcagcaggugcugccc

SEQ ID NO: 3926402 - RNA, 22 nt, Human adenovirus D
accugcauuggcagccgagccg

SEQ ID NO: 3926403 - RNA, 12 nt, Human adenovirus D
accugccuccac

SEQ ID NO: 3926404 - RNA, 13 nt, Human adenovirus D
accugcgcgggcu

SEQ ID NO: 3926405 - RNA, 14 nt, Human adenovirus D
accugcggggcgau

SEQ ID NO: 3926406 - RNA, 22 nt, Human adenovirus D
accuuccagccguaccagugca

SEQ ID NO: 3926407 - RNA, 23 nt, Human adenovirus D
accuucuuuuugauacuaacacu

SEQ ID NO: 3926408 - RNA, 20 nt, Human adenovirus D
accuugcagagcagcucuuc

SEQ ID NO: 3926409 - RNA, 16 nt, Human adenovirus D
accuugcuuccacacu

SEQ ID NO: 3926410 - RNA, 18 nt, Human adenovirus D
accuuggcuuugcugggu

SEQ ID NO: 3926411 - RNA, 12 nt, Human adenovirus D
accuuggucaca

SEQ ID NO: 3926412 - RNA, 18 nt, Human adenovirus D
acgaacucggcggugacg

SEQ ID NO: 3926413 - RNA, 15 nt, Human adenovirus D
acgacauccuggacc

SEQ ID NO: 3926414 - RNA, 17 nt, Human adenovirus D
acgacauccuggaccag

SEQ ID NO: 3926415 - RNA, 21 nt, Human adenovirus D
acgaccacagcaacuuccuga

SEQ ID NO: 3926416 - RNA, 20 nt, Human adenovirus D
acgacugcgacuguagggca

SEQ ID NO: 3926417 - RNA, 16 nt, Human adenovirus D
acgagacgcgcgcggc

SEQ ID NO: 3926418 - RNA, 16 nt, Human adenovirus D
acgagcccgcgcggga

SEQ ID NO: 3926419 - RNA, 18 nt, Human adenovirus D
acgaggauuucgagccga

SEQ ID NO: 3926420 - RNA, 13 nt, Human adenovirus D
acgaggcagaggc

SEQ ID NO: 3926421 - RNA, 13 nt, Human adenovirus D
acgagggccuggg

SEQ ID NO: 3926422 - RNA, 14 nt, Human adenovirus D
acgagggccugggc

SEQ ID NO: 3926423 - RNA, 15 nt, Human adenovirus D
acgagggccugggcu

SEQ ID NO: 3926424 - RNA, 23 nt, Human adenovirus D
acgaugagaccaaguccagggug

SEQ ID NO: 3926425 - RNA, 19 nt, Human adenovirus D
acgcacgggccgccgggcc

SEQ ID NO: 3926426 - RNA, 21 nt, Human adenovirus D
acgcagccggcgaacgugccg

SEQ ID NO: 3926427 - RNA, 13 nt, Human adenovirus D
acgcccgcuccac

SEQ ID NO: 3926428 - RNA, 13 nt, Human adenovirus D
acgcccugggugu

SEQ ID NO: 3926429 - RNA, 23 nt, Human adenovirus D
acgccuuccuggcgacgcagccg

SEQ ID NO: 3926430 - RNA, 19 nt, Human adenovirus D
acgcgcaucaucgcgccac

SEQ ID NO: 3926431 - RNA, 14 nt, Human adenovirus D
acgcgccagccgcg

SEQ ID NO: 3926432 - RNA, 21 nt, Human adenovirus D
acgcgcugucggccgaggagg

SEQ ID NO: 3926433 - RNA, 24 nt, Human adenovirus D
acgcgcugucggccgaggaggagc

SEQ ID NO: 3926434 - RNA, 15 nt, Human adenovirus D
acgcguacauccagc

SEQ ID NO: 3926435 - RNA, 13 nt, Human adenovirus D
acgcugcccgcca

SEQ ID NO: 3926436 - RNA, 14 nt, Human adenovirus D
acgcuguaccgcag

SEQ ID NO: 3926437 - RNA, 18 nt, Human adenovirus D
acgcuguaccgcagcugg

SEQ ID NO: 3926438 - RNA, 21 nt, Human adenovirus D
acggaccggucccagcgucug

SEQ ID NO: 3926439 - RNA, 23 nt, Human adenovirus D
acggcaugggaugcgugagggcg

SEQ ID NO: 3926440 - RNA, 21 nt, Human adenovirus D
acggccggccgcgagaccgga

SEQ ID NO: 3926441 - RNA, 18 nt, Human adenovirus D
acgggagcgagcccccuu

SEQ ID NO: 3926442 - RNA, 19 nt, Human adenovirus D
acgggcugcuucugccugg

SEQ ID NO: 3926443 - RNA, 20 nt, Human adenovirus D
acgggcugcuucugccuggu

SEQ ID NO: 3926444 - RNA, 22 nt, Human adenovirus D
agcagccgcguaagcaggagca

SEQ ID NO: 3926445 - RNA, 22 nt, Human adenovirus D
agcagcgcgcgucauggcuggu

SEQ ID NO: 3926446 - RNA, 13 nt, Human adenovirus D
agcaggcgccggc

SEQ ID NO: 3926447 - RNA, 15 nt, Human adenovirus D
agcaggggcgcuggg

SEQ ID NO: 3926448 - RNA, 21 nt, Human adenovirus D
agcaggggcgcugggcguggu

SEQ ID NO: 3926449 - RNA, 19 nt, Human adenovirus D
agcaggggcuacauucugg

SEQ ID NO: 3926450 - RNA, 17 nt, Human adenovirus D
agcaggugcugccccag

SEQ ID NO: 3926451 - RNA, 23 nt, Human adenovirus D
agcagguggcgccgggccugggc

SEQ ID NO: 3926452 - RNA, 20 nt, Human adenovirus D
agcaguccaugcccaacagg

SEQ ID NO: 3926453 - RNA, 15 nt, Human adenovirus D
agcagucucugccgc

SEQ ID NO: 3926454 - RNA, 18 nt, Human adenovirus D
agcaucagucuccuggug

SEQ ID NO: 3926455 - RNA, 23 nt, Human adenovirus D
agcaugcgcuaaacuaagguggc

SEQ ID NO: 3926456 - RNA, 20 nt, Human adenovirus D
agcauuacuauuacugccac

SEQ ID NO: 3926457 - RNA, 14 nt, Human adenovirus D
agccaaacacaccu

SEQ ID NO: 3926458 - RNA, 15 nt, Human adenovirus D
agccaaagcucaugu

SEQ ID NO: 3926459 - RNA, 14 nt, Human adenovirus D
agccaguggcccug

SEQ ID NO: 3926460 - RNA, 16 nt, Human adenovirus D
agcccaaacuggggcg

SEQ ID NO: 3926461 - RNA, 23 nt, Human adenovirus D
agcccaacggcaccugcgagccc

SEQ ID NO: 3926462 - RNA, 22 nt, Human adenovirus D
agcccgaggucaaggugcgccc

SEQ ID NO: 3926463 - RNA, 18 nt, Human adenovirus D
agcccgggucuggugcag

SEQ ID NO: 3926464 - RNA, 13 nt, Human adenovirus D
agccgccagcugg

SEQ ID NO: 3926465 - RNA, 12 nt, Human adenovirus D
agccgccugagc

SEQ ID NO: 3926466 - RNA, 19 nt, Human adenovirus D
agccgccugagcaaccucc

SEQ ID NO: 3926467 - RNA, 14 nt, Human adenovirus D
agccggcggcgcga

SEQ ID NO: 3926468 - RNA, 17 nt, Human adenovirus D
agccgugaucccacagg

SEQ ID NO: 3926469 - RNA, 15 nt, Human adenovirus D
agccucccaggaggc

SEQ ID NO: 3926470 - RNA, 22 nt, Human adenovirus D
agccucgaacaguccacccaga

SEQ ID NO: 3926471 - RNA, 22 nt, Human adenovirus D
agcgacacccccgcgugcagcu

SEQ ID NO: 3926472 - RNA, 15 nt, Human adenovirus D
agcgaccccgagacc

SEQ ID NO: 3926473 - RNA, 17 nt, Human adenovirus D
agcgaccccgagaccug

SEQ ID NO: 3926474 - RNA, 14 nt, Human adenovirus D
agcgacgaccuggg

SEQ ID NO: 3926475 - RNA, 12 nt, Human adenovirus D
agcgccagcugu

SEQ ID NO: 3926476 - RNA, 12 nt, Human adenovirus D
agcgccaggagg

SEQ ID NO: 3926477 - RNA, 12 nt, Human adenovirus D
agcgcgagccgg

SEQ ID NO: 3926478 - RNA, 18 nt, Human adenovirus D
agcgcgccgacccguggc

SEQ ID NO: 3926479 - RNA, 19 nt, Human adenovirus D
agcgcgccgacccguggcc

SEQ ID NO: 3926480 - RNA, 22 nt, Human adenovirus D
agcgcgcgucauggcuggucag

SEQ ID NO: 3926481 - RNA, 14 nt, Human adenovirus D
agcgcgcugcggcu

SEQ ID NO: 3926482 - RNA, 16 nt, Human adenovirus D
agcgcgguguuuucac

SEQ ID NO: 3926483 - RNA, 13 nt, Human adenovirus D
agcgcgugcugcg

SEQ ID NO: 3926484 - RNA, 14 nt, Human adenovirus D
agcgcgugcugcgc

SEQ ID NO: 3926485 - RNA, 12 nt, Human adenovirus D
agcggcagggcu

SEQ ID NO: 3926486 - RNA, 17 nt, Human adenovirus D
agcggccgaaaaccccg

SEQ ID NO: 3926487 - RNA, 22 nt, Human adenovirus D
agcggccugaaccgccgccggc

SEQ ID NO: 3926488 - RNA, 19 nt, Human adenovirus D
agcggcgcaagcucaugcu

SEQ ID NO: 3926489 - RNA, 16 nt, Human adenovirus D
agcggggacagagaau

SEQ ID NO: 3926490 - RNA, 22 nt, Human adenovirus D
cagagcagcucuucggagccuc

SEQ ID NO: 3926491 - RNA, 13 nt, Human adenovirus D
cagaggaagaggg

SEQ ID NO: 3926492 - RNA, 13 nt, Human adenovirus D
cagaggagggauu

SEQ ID NO: 3926493 - RNA, 20 nt, Human adenovirus D
cagagggggcgguggcagga

SEQ ID NO: 3926494 - RNA, 15 nt, Human adenovirus D
cagauccugcugcuc

SEQ ID NO: 3926495 - RNA, 20 nt, Human adenovirus D
cagauccugcugcuccacca

SEQ ID NO: 3926496 - RNA, 17 nt, Human adenovirus D
cagauggaaaggucacu

SEQ ID NO: 3926497 - RNA, 16 nt, Human adenovirus D
cagaugggccuggccg

SEQ ID NO: 3926498 - RNA, 16 nt, Human adenovirus D
cagaugguagcagcag

SEQ ID NO: 3926499 - RNA, 20 nt, Human adenovirus D
cagaugucaggaucauugaa

SEQ ID NO: 3926500 - RNA, 23 nt, Human adenovirus D
cagcaaauuccucgaccaugacc

SEQ ID NO: 3926501 - RNA, 21 nt, Human adenovirus D
cagcaacccuuccuggucgag

SEQ ID NO: 3926502 - RNA, 23 nt, Human adenovirus D
cagcaacuucauguccaugggcg

SEQ ID NO: 3926503 - RNA, 14 nt, Human adenovirus D
cagcaagccccgga

SEQ ID NO: 3926504 - RNA, 15 nt, Human adenovirus D
cagcaagccccggac

SEQ ID NO: 3926505 - RNA, 14 nt, Human adenovirus D
cagcaagccucuga

SEQ ID NO: 3926506 - RNA, 16 nt, Human adenovirus D
cagcaauaacaccggc

SEQ ID NO: 3926507 - RNA, 14 nt, Human adenovirus D
cagcacacucacuu

SEQ ID NO: 3926508 - RNA, 15 nt, Human adenovirus D
cagcacagcagggac

SEQ ID NO: 3926509 - RNA, 20 nt, Human adenovirus D
cagcacaguaaguuccuguc

SEQ ID NO: 3926510 - RNA, 13 nt, Human adenovirus D
cagcaccccgucc

SEQ ID NO: 3926511 - RNA, 18 nt, Human adenovirus D
cagcaccgcauccugauc

SEQ ID NO: 3926512 - RNA, 15 nt, Human adenovirus D
cagcagcaagagcuc

SEQ ID NO: 3926513 - RNA, 21 nt, Human adenovirus D
cagcagcccuucuccacgggg

SEQ ID NO: 3926514 - RNA, 17 nt, Human adenovirus D
cagcaggagcgugccgc

SEQ ID NO: 3926515 - RNA, 18 nt, Human adenovirus D
cagcaggagcgugccgcc

SEQ ID NO: 3926516 - RNA, 14 nt, Human adenovirus D
cagcaggagugcag

SEQ ID NO: 3926517 - RNA, 22 nt, Human adenovirus D
cagcaggguacccacugggugg

SEQ ID NO: 3926518 - RNA, 14 nt, Human adenovirus D
cagcaggugcugcc

SEQ ID NO: 3926519 - RNA, 20 nt, Human adenovirus D
cagcaggugcugccccaggc

SEQ ID NO: 3926520 - RNA, 18 nt, Human adenovirus D
cagcaguacaagcgccaa

SEQ ID NO: 3926521 - RNA, 15 nt, Human adenovirus D
cagcaguagccccgc

SEQ ID NO: 3926522 - RNA, 17 nt, Human adenovirus D
cagcagucucugccgcc

SEQ ID NO: 3926523 - RNA, 22 nt, Human adenovirus D
cagcagugucucgaggacgaga

SEQ ID NO: 3926524 - RNA, 20 nt, Human adenovirus D
cagcaucagucuccuggugc

SEQ ID NO: 3926525 - RNA, 20 nt, Human adenovirus D
cagccacagacagagaugga

SEQ ID NO: 3926526 - RNA, 13 nt, Human adenovirus D
cagccacagccac

SEQ ID NO: 3926527 - RNA, 21 nt, Human adenovirus D
cagccacaugacccugcaugg

SEQ ID NO: 3926528 - RNA, 12 nt, Human adenovirus D
cagccagcagaa

SEQ ID NO: 3926529 - RNA, 20 nt, Human adenovirus D
cagccaguggcccuggaugu

SEQ ID NO: 3926530 - RNA, 20 nt, Human adenovirus D
cagcccaacggcaccugcga

SEQ ID NO: 3926531 - RNA, 20 nt, Human adenovirus D
cagcccauaauucagggugc

SEQ ID NO: 3926532 - RNA, 14 nt, Human adenovirus D
cagcccaugagcag

SEQ ID NO: 3926533 - RNA, 12 nt, Human adenovirus D
cagccgcaggcc

SEQ ID NO: 3926534 - RNA, 13 nt, Human adenovirus D
cagccgcaggcca

SEQ ID NO: 3926535 - RNA, 21 nt, Human adenovirus D
cagccgcaggcgcccagccag

SEQ ID NO: 3926536 - RNA, 19 nt, Human adenovirus D
cagccgcguaagcaggagc

SEQ ID NO: 3926537 - RNA, 21 nt, Human adenovirus D
cagccgugaucccacagggca

SEQ ID NO: 3926538 - RNA, 12 nt, Human adenovirus D
cagccuucagca

SEQ ID NO: 3926539 - RNA, 17 nt, Human adenovirus D
cagccuugcccccaagg

SEQ ID NO: 3926540 - RNA, 13 nt, Human adenovirus D
cagcgagaggagc

SEQ ID NO: 3926541 - RNA, 20 nt, Human adenovirus D
cagcgccacgaccggcagcg

SEQ ID NO: 3926542 - RNA, 22 nt, Human adenovirus D
cagcgcccucagcagucucugc

SEQ ID NO: 3926543 - RNA, 15 nt, Human adenovirus D
cagcgccgcgcugga

SEQ ID NO: 3926544 - RNA, 21 nt, Human adenovirus D
cagcgcgaguagucaaucucc

SEQ ID NO: 3926545 - RNA, 22 nt, Human adenovirus D
cagcgcucguacccgcucacca

SEQ ID NO: 3926546 - RNA, 14 nt, Human adenovirus D
cagcgcuggguggc

SEQ ID NO: 3926547 - RNA, 12 nt, Human adenovirus D
cagcggcgcagg

SEQ ID NO: 3926548 - RNA, 16 nt, Human adenovirus D
cagcucaucgacuggu

SEQ ID NO: 3926549 - RNA, 14 nt, Human adenovirus D
cagcuccagugggg

SEQ ID NO: 3926550 - RNA, 16 nt, Human adenovirus D
cagcucuucggagccu

SEQ ID NO: 3926551 - RNA, 16 nt, Human adenovirus D
cagcuguuccuggugg

SEQ ID NO: 3926552 - RNA, 23 nt, Human adenovirus D
cagcuucgaguacgaggccaugc

SEQ ID NO: 3926553 - RNA, 20 nt, Human adenovirus D
caggaaacuaggcgcagcug

SEQ ID NO: 3926554 - RNA, 20 nt, Human adenovirus D
caggacucgcagacgagcgg

SEQ ID NO: 3926555 - RNA, 17 nt, Human adenovirus D
caggagaggcauggcag

SEQ ID NO: 3926556 - RNA, 19 nt, Human adenovirus D
caggagaggcauggcaggc

SEQ ID NO: 3926557 - RNA, 21 nt, Human adenovirus D
caggagaugagcagaacuaca

SEQ ID NO: 3926558 - RNA, 20 nt, Human adenovirus D
caggagccgcuaguggaaga

SEQ ID NO: 3926559 - RNA, 22 nt, Human adenovirus D
caggagccgcuaguggaagaga

SEQ ID NO: 3926560 - RNA, 18 nt, Human adenovirus D
caggaggcggugcgcacg

SEQ ID NO: 3926561 - RNA, 19 nt, Human adenovirus D
caggaugcagccaguggcc

SEQ ID NO: 3926562 - RNA, 16 nt, Human adenovirus D
caggcagcggccugaa

SEQ ID NO: 3926563 - RNA, 16 nt, Human adenovirus D
caggcccuggagcagc

SEQ ID NO: 3926564 - RNA, 19 nt, Human adenovirus D
caggccuaacuacauuggc

SEQ ID NO: 3926565 - RNA, 18 nt, Human adenovirus D
caggcgcaaccaggagga

SEQ ID NO: 3926566 - RNA, 19 nt, Human adenovirus D
caggcgccauucggagcac

SEQ ID NO: 3926567 - RNA, 17 nt, Human adenovirus D
caggcgcuggaagaggu

SEQ ID NO: 3926568 - RNA, 19 nt, Human adenovirus D
caggcggcggucaccucaa

SEQ ID NO: 3926569 - RNA, 18 nt, Human adenovirus D
caggcgggacagaggagg

SEQ ID NO: 3926570 - RNA, 14 nt, Human adenovirus D
cagggaacugaaag

SEQ ID NO: 3926571 - RNA, 14 nt, Human adenovirus D
cagggacaacgagg

SEQ ID NO: 3926572 - RNA, 13 nt, Human adenovirus D
cagggagccaggg

SEQ ID NO: 3926573 - RNA, 15 nt, Human adenovirus D
cagggaggcgcugcu

SEQ ID NO: 3926574 - RNA, 14 nt, Human adenovirus D
cauagaccugauga

SEQ ID NO: 3926575 - RNA, 22 nt, Human adenovirus D
cauagagggcguuggagagaag

SEQ ID NO: 3926576 - RNA, 20 nt, Human adenovirus D
cauagcuuccguugcgcugc

SEQ ID NO: 3926577 - RNA, 13 nt, Human adenovirus D
cauauaccccucc

SEQ ID NO: 3926578 - RNA, 15 nt, Human adenovirus D
caucacaggaggcac

SEQ ID NO: 3926579 - RNA, 16 nt, Human adenovirus D
caucacaucagccagg

SEQ ID NO: 3926580 - RNA, 12 nt, Human adenovirus D
caucaccacagg

SEQ ID NO: 3926581 - RNA, 18 nt, Human adenovirus D
caucaccuuccugcagcu

SEQ ID NO: 3926582 - RNA, 12 nt, Human adenovirus D
caucagccagga

SEQ ID NO: 3926583 - RNA, 22 nt, Human adenovirus D
caucagguuacauuccugcacc

SEQ ID NO: 3926584 - RNA, 19 nt, Human adenovirus D
caucaucgcgccacuggcc

SEQ ID NO: 3926585 - RNA, 13 nt, Human adenovirus D
caucauggcccug

SEQ ID NO: 3926586 - RNA, 15 nt, Human adenovirus D
cauccaaggccaucu

SEQ ID NO: 3926587 - RNA, 16 nt, Human adenovirus D
cauccaccagugcaag

SEQ ID NO: 3926588 - RNA, 14 nt, Human adenovirus D
cauccacugcuccu

SEQ ID NO: 3926589 - RNA, 22 nt, Human adenovirus D
cauccagaauucaaccacaccu

SEQ ID NO: 3926590 - RNA, 19 nt, Human adenovirus D
cauccaguuaaugcugccu

SEQ ID NO: 3926591 - RNA, 21 nt, Human adenovirus D
cauccgucccgacgaggccgg

SEQ ID NO: 3926592 - RNA, 15 nt, Human adenovirus D
cauccugcacgcagc

SEQ ID NO: 3926593 - RNA, 14 nt, Human adenovirus D
cauccugcuggugc

SEQ ID NO: 3926594 - RNA, 19 nt, Human adenovirus D
cauccuggaccaggcggca

SEQ ID NO: 3926595 - RNA, 17 nt, Human adenovirus D
caucguaguucaggagc

SEQ ID NO: 3926596 - RNA, 14 nt, Human adenovirus D
caucgugcagaacc

SEQ ID NO: 3926597 - RNA, 18 nt, Human adenovirus D
caucgugcgcgaccuggg

SEQ ID NO: 3926598 - RNA, 22 nt, Human adenovirus D
caucuuuuggaagaucucgguc

SEQ ID NO: 3926599 - RNA, 16 nt, Human adenovirus D
caugauccagcggcgc

SEQ ID NO: 3926600 - RNA, 18 nt, Human adenovirus D
caugcacccguaaaugac

SEQ ID NO: 3926601 - RNA, 17 nt, Human adenovirus D
caugccacgaacagcca

SEQ ID NO: 3926602 - RNA, 14 nt, Human adenovirus D
caugcccgacccca

SEQ ID NO: 3926603 - RNA, 18 nt, Human adenovirus D
caugcccuuuucccagga

SEQ ID NO: 3926604 - RNA, 22 nt, Human adenovirus D
caugccgaagaagaacaggagc

SEQ ID NO: 3926605 - RNA, 17 nt, Human adenovirus D
caugccuucgugcacug

SEQ ID NO: 3926606 - RNA, 15 nt, Human adenovirus D
caugcgccaagggca

SEQ ID NO: 3926607 - RNA, 24 nt, Human adenovirus D
caugcggggggagaugaugugcag

SEQ ID NO: 3926608 - RNA, 18 nt, Human adenovirus D
cauggcaagcugccaugg

SEQ ID NO: 3926609 - RNA, 22 nt, Human adenovirus D
cauggccaggggagugaagagg

SEQ ID NO: 3926610 - RNA, 19 nt, Human adenovirus D
cauggccucgugcucuggg

SEQ ID NO: 3926611 - RNA, 22 nt, Human adenovirus D
cauggcgcucaaggugcugacg

SEQ ID NO: 3926612 - RNA, 17 nt, Human adenovirus D
cauggugcccaagcgcc

SEQ ID NO: 3926613 - RNA, 19 nt, Human adenovirus D
cauguacccgaccaugcag

SEQ ID NO: 3926614 - RNA, 12 nt, Human adenovirus D
cauguccaccug

SEQ ID NO: 3926615 - RNA, 14 nt, Human adenovirus D
caugugaacaaaac

SEQ ID NO: 3926616 - RNA, 16 nt, Human adenovirus D
cauguuauucagcagc

SEQ ID NO: 3926617 - RNA, 17 nt, Human adenovirus D
cauguucaccagcaagu

SEQ ID NO: 3926618 - RNA, 17 nt, Human adenovirus D
cauguucucacaguaag

SEQ ID NO: 3926619 - RNA, 18 nt, Human adenovirus D
cauuaacgggguggugga

SEQ ID NO: 3926620 - RNA, 22 nt, Human adenovirus D
cauucuggacuucgcagccaug

SEQ ID NO: 3926621 - RNA, 17 nt, Human adenovirus D
cauuggagaaugcugcu

SEQ ID NO: 3926622 - RNA, 17 nt, Human adenovirus D
cauugucuucccucuca

SEQ ID NO: 3926623 - RNA, 19 nt, Human adenovirus D
ccaacaauaaaagaccaau

SEQ ID NO: 3926624 - RNA, 17 nt, Human adenovirus D
ccaacagccacaugacc

SEQ ID NO: 3926625 - RNA, 14 nt, Human adenovirus D
ccaacguggagcug

SEQ ID NO: 3926626 - RNA, 16 nt, Human adenovirus D
ccaacucuuaaaucau

SEQ ID NO: 3926627 - RNA, 20 nt, Human adenovirus D
ccaacuggucuccugccugg

SEQ ID NO: 3926628 - RNA, 17 nt, Human adenovirus D
ccaagaucaggggaugu

SEQ ID NO: 3926629 - RNA, 17 nt, Human adenovirus D
ccacacggccagcaggg

SEQ ID NO: 3926630 - RNA, 16 nt, Human adenovirus D
ccacaggaugaacagg

SEQ ID NO: 3926631 - RNA, 21 nt, Human adenovirus D
ccacaggaugaacaggagcac

SEQ ID NO: 3926632 - RNA, 16 nt, Human adenovirus D
ccacagggcacugccg

SEQ ID NO: 3926633 - RNA, 17 nt, Human adenovirus D
ccacaggugcugcccac

SEQ ID NO: 3926634 - RNA, 20 nt, Human adenovirus D
ccacaggugcugcccacccu

SEQ ID NO: 3926635 - RNA, 21 nt, Human adenovirus D
ccacaggugcugcccacccuc

SEQ ID NO: 3926636 - RNA, 18 nt, Human adenovirus D
ccacauccaagugcccca

SEQ ID NO: 3926637 - RNA, 14 nt, Human adenovirus D
ccaccacgcgcauc

SEQ ID NO: 3926638 - RNA, 15 nt, Human adenovirus D
ccaccagggagcuga

SEQ ID NO: 3926639 - RNA, 20 nt, Human adenovirus D
ccacccgcaugaacuggcuc

SEQ ID NO: 3926640 - RNA, 15 nt, Human adenovirus D
ccacgaacagccacg

SEQ ID NO: 3926641 - RNA, 23 nt, Human adenovirus D
ccacgauguaacaucaccacagg

SEQ ID NO: 3926642 - RNA, 17 nt, Human adenovirus D
ccacgcugguggccacc

SEQ ID NO: 3926643 - RNA, 18 nt, Human adenovirus D
ccacguuacgucacuuuu

SEQ ID NO: 3926644 - RNA, 14 nt, Human adenovirus D
ccacuacagcugac

SEQ ID NO: 3926645 - RNA, 23 nt, Human adenovirus D
ccacucgcgggcggccauugcuc

SEQ ID NO: 3926646 - RNA, 15 nt, Human adenovirus D
ccacugcauggccuc

SEQ ID NO: 3926647 - RNA, 14 nt, Human adenovirus D
ccacuuccgcgcuc

SEQ ID NO: 3926648 - RNA, 16 nt, Human adenovirus D
ccagacacccacgugg

SEQ ID NO: 3926649 - RNA, 16 nt, Human adenovirus D
ccagaccaccugguga

SEQ ID NO: 3926650 - RNA, 22 nt, Human adenovirus D
ccagacgggcgaagugcucaac

SEQ ID NO: 3926651 - RNA, 22 nt, Human adenovirus D
ccagagaacgcgcgaagauggc

SEQ ID NO: 3926652 - RNA, 13 nt, Human adenovirus D
ccagaucacaugg

SEQ ID NO: 3926653 - RNA, 13 nt, Human adenovirus D
ccagaugaggauu

SEQ ID NO: 3926654 - RNA, 15 nt, Human adenovirus D
ccagaugcucuccca

SEQ ID NO: 3926655 - RNA, 21 nt, Human adenovirus D
ccagauguugcgcagcggcag

SEQ ID NO: 3926656 - RNA, 23 nt, Human adenovirus D
ccagcaacuucauguccaugggc

SEQ ID NO: 3926657 - RNA, 17 nt, Human adenovirus D
ccagcacacucacuuuu

SEQ ID NO: 3926658 - RNA, 22 nt, Human adenovirus D
ccagcagcagcaguagccccuc

SEQ ID NO: 3926659 - RNA, 21 nt, Human adenovirus D
ccagcaucgaggugcagaccg

SEQ ID NO: 3926660 - RNA, 18 nt, Human adenovirus D
ccagccacagccacagac

SEQ ID NO: 3926661 - RNA, 12 nt, Human adenovirus D
ccagccagcaaa

SEQ ID NO: 3926662 - RNA, 16 nt, Human adenovirus D
ccagccguaccagugc

SEQ ID NO: 3926663 - RNA, 18 nt, Human adenovirus D
ccagccuguacccagagc

SEQ ID NO: 3926664 - RNA, 17 nt, Human adenovirus D
ccagcgaaagagagcuc

SEQ ID NO: 3926665 - RNA, 16 nt, Human adenovirus D
ccagcgaucccagcgu

SEQ ID NO: 3926666 - RNA, 19 nt, Human adenovirus D
ccagcugaacgggggcgcc

SEQ ID NO: 3926667 - RNA, 17 nt, Human adenovirus D
ccagcuggccgcccuga

SEQ ID NO: 3926668 - RNA, 16 nt, Human adenovirus D
cuuacugaaacucagu

SEQ ID NO: 3926669 - RNA, 13 nt, Human adenovirus D
cuuagccugggca

SEQ ID NO: 3926670 - RNA, 18 nt, Human adenovirus D
cuuagcucccuauuuaaa

SEQ ID NO: 3926671 - RNA, 20 nt, Human adenovirus D
cuuagcucccuauuuaaagg

SEQ ID NO: 3926672 - RNA, 20 nt, Human adenovirus D
cuucaacaucugugcugccu

SEQ ID NO: 3926673 - RNA, 20 nt, Human adenovirus D
cuucacagagagccgccuga

SEQ ID NO: 3926674 - RNA, 18 nt, Human adenovirus D
cuucaccgaccuggguca

SEQ ID NO: 3926675 - RNA, 21 nt, Human adenovirus D
cuucagcauguggaacucugc

SEQ ID NO: 3926676 - RNA, 16 nt, Human adenovirus D
cuucaugagccagagc

SEQ ID NO: 3926677 - RNA, 12 nt, Human adenovirus D
cuuccagcagaa

SEQ ID NO: 3926678 - RNA, 14 nt, Human adenovirus D
cuuccguugcgcug

SEQ ID NO: 3926679 - RNA, 16 nt, Human adenovirus D
cuuccucacucccccc

SEQ ID NO: 3926680 - RNA, 13 nt, Human adenovirus D
cuucgagcagugg

SEQ ID NO: 3926681 - RNA, 17 nt, Human adenovirus D
cuucgagguggacccca

SEQ ID NO: 3926682 - RNA, 15 nt, Human adenovirus D
cuucgcagccaugca

SEQ ID NO: 3926683 - RNA, 15 nt, Human adenovirus D
cuucuauggaggcag

SEQ ID NO: 3926684 - RNA, 17 nt, Human adenovirus D
cuucuauggaggcagag

SEQ ID NO: 3926685 - RNA, 17 nt, Human adenovirus D
cuucucccaaguucaaa

SEQ ID NO: 3926686 - RNA, 15 nt, Human adenovirus D
cuucucuuacugaaa

SEQ ID NO: 3926687 - RNA, 14 nt, Human adenovirus D
cuucugccagcaga

SEQ ID NO: 3926688 - RNA, 13 nt, Human adenovirus D
cuugacagcaccg

SEQ ID NO: 3926689 - RNA, 19 nt, Human adenovirus D
cuugacagcaccgccgcag

SEQ ID NO: 3926690 - RNA, 13 nt, Human adenovirus D
cuugaggaggaac

SEQ ID NO: 3926691 - RNA, 12 nt, Human adenovirus D
cuugaggaggag

SEQ ID NO: 3926692 - RNA, 19 nt, Human adenovirus D
cuugauuuuuccagcccag

SEQ ID NO: 3926693 - RNA, 21 nt, Human adenovirus D
cuugauuuuuccagcccaggg

SEQ ID NO: 3926694 - RNA, 15 nt, Human adenovirus D
cuugcaaacaauaaa

SEQ ID NO: 3926695 - RNA, 16 nt, Human adenovirus D
cuugcaacuugcaaac

SEQ ID NO: 3926696 - RNA, 18 nt, Human adenovirus D
cuugcagacuuuagcaag

SEQ ID NO: 3926697 - RNA, 16 nt, Human adenovirus D
cuugccgaaggacccc

SEQ ID NO: 3926698 - RNA, 21 nt, Human adenovirus D
cuugcugaccaauagacagca

SEQ ID NO: 3926699 - RNA, 23 nt, Human adenovirus D
cuuggagcaggguaaagccagca

SEQ ID NO: 3926700 - RNA, 18 nt, Human adenovirus D
cuuguuacaugacauggg

SEQ ID NO: 3926701 - RNA, 16 nt, Human adenovirus D
cuuguuagagaugagg

SEQ ID NO: 3926702 - RNA, 15 nt, Human adenovirus D
cuuguugggccuugg

SEQ ID NO: 3926703 - RNA, 13 nt, Human adenovirus D
cuuuaaucauuug

SEQ ID NO: 3926704 - RNA, 14 nt, Human adenovirus D
cuuuaaugcuccaa

SEQ ID NO: 3926705 - RNA, 16 nt, Human adenovirus D
cuuuagccagaccaag

SEQ ID NO: 3926706 - RNA, 19 nt, Human adenovirus D
cuuuagguguugcaugaug

SEQ ID NO: 3926707 - RNA, 21 nt, Human adenovirus D
cuuuagguguugcaugauggg

SEQ ID NO: 3926708 - RNA, 16 nt, Human adenovirus D
cuuuaucagccagaac

SEQ ID NO: 3926709 - RNA, 13 nt, Human adenovirus D
cuuuaucugcugg

SEQ ID NO: 3926710 - RNA, 14 nt, Human adenovirus D
cuuuaucugcuggg

SEQ ID NO: 3926711 - RNA, 13 nt, Human adenovirus D
cuuucacuuuggu

SEQ ID NO: 3926712 - RNA, 13 nt, Human adenovirus D
cuuuccagcagca

SEQ ID NO: 3926713 - RNA, 14 nt, Human adenovirus D
cuuuccagcagcag

SEQ ID NO: 3926714 - RNA, 14 nt, Human adenovirus D
cuuuccauggccuc

SEQ ID NO: 3926715 - RNA, 15 nt, Human adenovirus D
cuuugacacaccugg

SEQ ID NO: 3926716 - RNA, 19 nt, Human adenovirus D
cuuuuaggugaagcaauac

SEQ ID NO: 3926717 - RNA, 15 nt, Human adenovirus D
cuuuuccugaugcag

SEQ ID NO: 3926718 - RNA, 20 nt, Human adenovirus D
cuuuuuauauguugacaaua

SEQ ID NO: 3926719 - RNA, 22 nt, Human adenovirus D
ccgccacccuugaccugccucc

SEQ ID NO: 3926720 - RNA, 23 nt, Human adenovirus D
ccgccaucgaacacgccaccgcu

SEQ ID NO: 3926721 - RNA, 13 nt, Human adenovirus D
ccgccauggggcg

SEQ ID NO: 3926722 - RNA, 15 nt, Human adenovirus D
ccgcccgccgccagg

SEQ ID NO: 3926723 - RNA, 13 nt, Human adenovirus D
ccgcccgcgugcg

SEQ ID NO: 3926724 - RNA, 14 nt, Human adenovirus D
ccgcccugcuggau

SEQ ID NO: 3926725 - RNA, 13 nt, Human adenovirus D
ccgccgccgugcg

SEQ ID NO: 3926726 - RNA, 15 nt, Human adenovirus D
ccgccgccugcgcug

SEQ ID NO: 3926727 - RNA, 17 nt, Human adenovirus D
ccgcgauguugagcugg

SEQ ID NO: 3926728 - RNA, 23 nt, Human adenovirus D
ccgcgccaaccgcacccgcgccg

SEQ ID NO: 3926729 - RNA, 19 nt, Human adenovirus D
ccgcgccagacgcacgggc

SEQ ID NO: 3926730 - RNA, 20 nt, Human adenovirus D
ccgcgcgggagccaggucca

SEQ ID NO: 3926731 - RNA, 17 nt, Human adenovirus D
ccgcgcucggugacaaa

SEQ ID NO: 3926732 - RNA, 16 nt, Human adenovirus D
ccgcgcuugcugggcg

SEQ ID NO: 3926733 - RNA, 18 nt, Human adenovirus D
ccgcggccguagcaggcg

SEQ ID NO: 3926734 - RNA, 16 nt, Human adenovirus D
ccgcgggaucaagcgc

SEQ ID NO: 3926735 - RNA, 18 nt, Human adenovirus D
ccgcgggcaggggcggca

SEQ ID NO: 3926736 - RNA, 14 nt, Human adenovirus D
ccgcgguccuccuc

SEQ ID NO: 3926737 - RNA, 19 nt, Human adenovirus D
ccgcguaauuggcccucca

SEQ ID NO: 3926738 - RNA, 19 nt, Human adenovirus D
ccgcgugacgcacuggccg

SEQ ID NO: 3926739 - RNA, 16 nt, Human adenovirus D
ccgcuaguggaagaga

SEQ ID NO: 3926740 - RNA, 13 nt, Human adenovirus D
ccgcugugcuggu

SEQ ID NO: 3926741 - RNA, 23 nt, Human adenovirus D
ccggaccuaugggaacaaggccu

SEQ ID NO: 3926742 - RNA, 15 nt, Human adenovirus D
ccggagcccacccgc

SEQ ID NO: 3926743 - RNA, 12 nt, Human adenovirus D
ccggcagcgggg

SEQ ID NO: 3926744 - RNA, 18 nt, Human adenovirus D
ccggcagcggggccuggu

SEQ ID NO: 3926745 - RNA, 13 nt, Human adenovirus D
ccggcagcggugg

SEQ ID NO: 3926746 - RNA, 20 nt, Human adenovirus D
ccggcaugcccaccacgcgc

SEQ ID NO: 3926747 - RNA, 14 nt, Human adenovirus D
ccggccaaggccac

SEQ ID NO: 3926748 - RNA, 16 nt, Human adenovirus D
ccggccccgcgggcag

SEQ ID NO: 3926749 - RNA, 15 nt, Human adenovirus D
ccggcgaccaccgcg

SEQ ID NO: 3926750 - RNA, 16 nt, Human adenovirus D
ccggcgcuagccagcc

SEQ ID NO: 3926751 - RNA, 15 nt, Human adenovirus D
ccggcggcagcggcg

SEQ ID NO: 3926752 - RNA, 16 nt, Human adenovirus D
ccgggaccgaguucag

SEQ ID NO: 3926753 - RNA, 16 nt, Human adenovirus D
ccgggccugggcgugc

SEQ ID NO: 3926754 - RNA, 18 nt, Human adenovirus D
ccgggccugggcgugcag

SEQ ID NO: 3926755 - RNA, 16 nt, Human adenovirus D
ccgggcuaccgcggca

SEQ ID NO: 3926756 - RNA, 20 nt, Human adenovirus D
ccggucucugcgcucgcuca

SEQ ID NO: 3926757 - RNA, 16 nt, Human adenovirus D
ccggugcccgcuccgc

SEQ ID NO: 3926758 - RNA, 12 nt, Human adenovirus D
ccguagccuggc

SEQ ID NO: 3926759 - RNA, 22 nt, Human adenovirus D
ccguccuuucgcugcugccgcu

SEQ ID NO: 3926760 - RNA, 16 nt, Human adenovirus D
ccgucugccccccgcc

SEQ ID NO: 3926761 - RNA, 21 nt, Human adenovirus D
ccgucuggacccgcggccgcc

SEQ ID NO: 3926762 - RNA, 17 nt, Human adenovirus D
ccgugaccugcagcagg

SEQ ID NO: 3926763 - RNA, 18 nt, Human adenovirus D
ccgugcacuuggggaacu

SEQ ID NO: 3926764 - RNA, 19 nt, Human adenovirus D
ccgugcaggggcccgacuc

SEQ ID NO: 3926765 - RNA, 15 nt, Human adenovirus D
ccgugguccugguca

SEQ ID NO: 3926766 - RNA, 20 nt, Human adenovirus D
ccguuuaucaauaagcuaau

SEQ ID NO: 3926767 - RNA, 16 nt, Human adenovirus D
ccuacgcgaccguggg

SEQ ID NO: 3926768 - RNA, 14 nt, Human adenovirus D
ccuacgguccagag

SEQ ID NO: 3926769 - RNA, 18 nt, Human adenovirus D
ccuacgucuacaaggccc

SEQ ID NO: 3926770 - RNA, 19 nt, Human adenovirus D
ccuauaaaaacaacaaaac

SEQ ID NO: 3926771 - RNA, 19 nt, Human adenovirus D
ccuaugggaacaaggccug

SEQ ID NO: 3926772 - RNA, 19 nt, Human adenovirus D
ccucaucacaucagccagg

SEQ ID NO: 3926773 - RNA, 19 nt, Human adenovirus D
ccucaugaacacacugccc

SEQ ID NO: 3926774 - RNA, 19 nt, Human adenovirus D
ccuccagccuuuccauggc

SEQ ID NO: 3926775 - RNA, 13 nt, Human adenovirus D
ccuccaggccaac

SEQ ID NO: 3926776 - RNA, 20 nt, Human adenovirus D
ccuccaguuuguggaggagu

SEQ ID NO: 3926777 - RNA, 21 nt, Human adenovirus D
ccuccgcgguauauggcuccu

SEQ ID NO: 3926778 - RNA, 22 nt, Human adenovirus D
ccuccgguggcgaccgccgugc

SEQ ID NO: 3926779 - RNA, 14 nt, Human adenovirus D
ccuccuccuggaga

SEQ ID NO: 3926780 - RNA, 22 nt, Human adenovirus D
ccuccuguuacuguaaagccac

SEQ ID NO: 3926781 - RNA, 14 nt, Human adenovirus D
ccucgaccaugacc

SEQ ID NO: 3926782 - RNA, 20 nt, Human adenovirus D
ccucgagcuacaugcccagc

SEQ ID NO: 3926783 - RNA, 17 nt, Human adenovirus D
ccucgcgucuccaugag

SEQ ID NO: 3926784 - RNA, 12 nt, Human adenovirus D
ccucgcugaaaa

SEQ ID NO: 3926785 - RNA, 19 nt, Human adenovirus D
ccucggaguaccugagccg

SEQ ID NO: 3926786 - RNA, 14 nt, Human adenovirus D
ccucggugcagccg

SEQ ID NO: 3926787 - RNA, 22 nt, Human adenovirus D
ccucugcgugaagaccacuggc

SEQ ID NO: 3926788 - RNA, 17 nt, Human adenovirus D
ccucuguggugaggauc

SEQ ID NO: 3926789 - RNA, 18 nt, Human adenovirus D
ccucuucuauuucuuccu

SEQ ID NO: 3926790 - RNA, 17 nt, Human adenovirus D
ccucuucucgccgcgcg

SEQ ID NO: 3926791 - RNA, 21 nt, Human adenovirus D
ccugaaccacacggccagcag

SEQ ID NO: 3926792 - RNA, 22 nt, Human adenovirus D
ccugaaccgccgccggcggcgg

SEQ ID NO: 3926793 - RNA, 17 nt, Human adenovirus D
ccugaacggcaucuuug

SEQ ID NO: 3926794 - RNA, 15 nt, Human adenovirus D
ccugacccagcaggu

SEQ ID NO: 3926795 - RNA, 14 nt, Human adenovirus D
ccugagagcgcugg

SEQ ID NO: 3926796 - RNA, 15 nt, Human adenovirus D
ccugagagcgcuggc

SEQ ID NO: 3926797 - RNA, 21 nt, Human adenovirus D
ccugagauacgaugagaccaa

SEQ ID NO: 3926798 - RNA, 14 nt, Human adenovirus D
ccugagccgccagc

SEQ ID NO: 3926799 - RNA, 17 nt, Human adenovirus D
ccugagccgccagcugg

SEQ ID NO: 3926800 - RNA, 11 nt, Human adenovirus D
ccugagcgaga

SEQ ID NO: 3926801 - RNA, 12 nt, Human adenovirus D
ccugaucagaaa

SEQ ID NO: 3926802 - RNA, 14 nt, Human adenovirus D
ccugaucucugcca

SEQ ID NO: 3926803 - RNA, 13 nt, Human adenovirus D
ccugaugcaggag

SEQ ID NO: 3926804 - RNA, 16 nt, Human adenovirus D
ccugcacacggagugc

SEQ ID NO: 3926805 - RNA, 17 nt, Human adenovirus D
ccugcaccugcgucugc

SEQ ID NO: 3926806 - RNA, 20 nt, Human adenovirus D
ccugcagcccaaacuggggc

SEQ ID NO: 3926807 - RNA, 15 nt, Human adenovirus D
ccugcagcgccaguc

SEQ ID NO: 3926808 - RNA, 15 nt, Human adenovirus D
ccugcccuuccagca

SEQ ID NO: 3926809 - RNA, 15 nt, Human adenovirus D
ccugccgcgccaacc

SEQ ID NO: 3926810 - RNA, 20 nt, Human adenovirus D
ccugcgcaaggucgaggaga

SEQ ID NO: 3926811 - RNA, 16 nt, Human adenovirus D
ccugcgcuaccgcucc

SEQ ID NO: 3926812 - RNA, 14 nt, Human adenovirus D
ccugcucaccugca

SEQ ID NO: 3926813 - RNA, 13 nt, Human adenovirus D
ccugcucccgggc

SEQ ID NO: 3926814 - RNA, 12 nt, Human adenovirus D
ccugcucucaca

SEQ ID NO: 3926815 - RNA, 13 nt, Human adenovirus D
ccuggcccugaca

SEQ ID NO: 3926816 - RNA, 16 nt, Human adenovirus D
ccuggcgacgcagccg

SEQ ID NO: 3926817 - RNA, 12 nt, Human adenovirus D
ccuggcucccag

SEQ ID NO: 3926818 - RNA, 16 nt, Human adenovirus D
ccugggaggagaggag

SEQ ID NO: 3926819 - RNA, 18 nt, Human adenovirus D
ccugggaggagaggagga

SEQ ID NO: 3926820 - RNA, 20 nt, Human adenovirus D
ccugggcacuggagcacaga

SEQ ID NO: 3926821 - RNA, 20 nt, Human adenovirus D
ccugggcauucgcaagaagc

SEQ ID NO: 3926822 - RNA, 16 nt, Human adenovirus D
ccugggcgccagaagg

SEQ ID NO: 3926823 - RNA, 13 nt, Human adenovirus D
ccugggcucgcug

SEQ ID NO: 3926824 - RNA, 18 nt, Human adenovirus D
ccuggggcaucucuucgu

SEQ ID NO: 3926825 - RNA, 23 nt, Human adenovirus D
ccuguauauuuuuagaauggaag

SEQ ID NO: 3926826 - RNA, 24 nt, Human adenovirus D
ccuuaccugguacgagcuacagca

SEQ ID NO: 3926827 - RNA, 15 nt, Human adenovirus D
ccuucuccaggguga

SEQ ID NO: 3926828 - RNA, 20 nt, Human adenovirus D
ccuuugcggacuccgcgacc

SEQ ID NO: 3926829 - RNA, 13 nt, Human adenovirus D
gcgccgggcgcug

SEQ ID NO: 3926830 - RNA, 14 nt, Human adenovirus D
gcgccucaauguca

SEQ ID NO: 3926831 - RNA, 19 nt, Human adenovirus D
gcgccucaaugucagcugc

SEQ ID NO: 3926832 - RNA, 22 nt, Human adenovirus D
gcgccucccaggacuacuccac

SEQ ID NO: 3926833 - RNA, 14 nt, Human adenovirus D
gcgccugaggcaga

SEQ ID NO: 3926834 - RNA, 16 nt, Human adenovirus D
gcgccuuggaggccgc

SEQ ID NO: 3926835 - RNA, 23 nt, Human adenovirus D
gcgcgcuccacgguggcggcgag

SEQ ID NO: 3926836 - RNA, 16 nt, Human adenovirus D
gcgcggcgggggcgga

SEQ ID NO: 3926837 - RNA, 13 nt, Human adenovirus D
gcgcuaccgcucc

SEQ ID NO: 3926838 - RNA, 15 nt, Human adenovirus D
gcgcucccggcggca

SEQ ID NO: 3926839 - RNA, 18 nt, Human adenovirus D
gcgcucccggcggcagcg

SEQ ID NO: 3926840 - RNA, 17 nt, Human adenovirus D
gcgcucgcgcaccugcu

SEQ ID NO: 3926841 - RNA, 16 nt, Human adenovirus D
gcgcucgcucacccgc

SEQ ID NO: 3926842 - RNA, 22 nt, Human adenovirus D
gcgcuggcggagaacaaggcca

SEQ ID NO: 3926843 - RNA, 14 nt, Human adenovirus D
gcgcuggggcagaa

SEQ ID NO: 3926844 - RNA, 16 nt, Human adenovirus D
gcgcuggggcugcucg

SEQ ID NO: 3926845 - RNA, 19 nt, Human adenovirus D
gcgcuggggcugcucggcg

SEQ ID NO: 3926846 - RNA, 14 nt, Human adenovirus D
gcgcugucggccga

SEQ ID NO: 3926847 - RNA, 18 nt, Human adenovirus D
gcgcuucacucuggccgu

SEQ ID NO: 3926848 - RNA, 23 nt, Human adenovirus D
gcgcuugagacucauccugcugg

SEQ ID NO: 3926849 - RNA, 19 nt, Human adenovirus D
gcggacggaucgcccaggc

SEQ ID NO: 3926850 - RNA, 16 nt, Human adenovirus D
gcggacugccaccgcc

SEQ ID NO: 3926851 - RNA, 17 nt, Human adenovirus D
gcggagaacaaggccau

SEQ ID NO: 3926852 - RNA, 18 nt, Human adenovirus D
gcggagccgcucggccau

SEQ ID NO: 3926853 - RNA, 16 nt, Human adenovirus D
gcggagcuugcccuug

SEQ ID NO: 3926854 - RNA, 15 nt, Human adenovirus D
gcggaugcuggcgcg

SEQ ID NO: 3926855 - RNA, 22 nt, Human adenovirus D
gcggccguccuuucgcugcugc

SEQ ID NO: 3926856 - RNA, 17 nt, Human adenovirus D
gcggccguucaugggca

SEQ ID NO: 3926857 - RNA, 17 nt, Human adenovirus D
gcggcgcaagcucaugc

SEQ ID NO: 3926858 - RNA, 15 nt, Human adenovirus D
gcggcgcgagcugag

SEQ ID NO: 3926859 - RNA, 13 nt, Human adenovirus D
gcggcggcuggcg

SEQ ID NO: 3926860 - RNA, 18 nt, Human adenovirus D
gcgggccaugagggucug

SEQ ID NO: 3926861 - RNA, 17 nt, Human adenovirus D
gcgggcuguggggcgug

SEQ ID NO: 3926862 - RNA, 14 nt, Human adenovirus D
gcggggggagauga

SEQ ID NO: 3926863 - RNA, 23 nt, Human adenovirus D
gcgguacacgggguugcagcacu

SEQ ID NO: 3926864 - RNA, 20 nt, Human adenovirus D
gcgguccccgaggcccuugc

SEQ ID NO: 3926865 - RNA, 21 nt, Human adenovirus D
gcgguucaagaacgagggccu

SEQ ID NO: 3926866 - RNA, 16 nt, Human adenovirus D
gcgguuccggccccgc

SEQ ID NO: 3926867 - RNA, 23 nt, Human adenovirus D
gcguaagcaggagcaggaggagg

SEQ ID NO: 3926868 - RNA, 17 nt, Human adenovirus D
gcgucauggcuggucag

SEQ ID NO: 3926869 - RNA, 20 nt, Human adenovirus D
gcguccccgcccgccgccag

SEQ ID NO: 3926870 - RNA, 13 nt, Human adenovirus D
gcguccgcaggcg

SEQ ID NO: 3926871 - RNA, 14 nt, Human adenovirus D
gcguccgcuccgca

SEQ ID NO: 3926872 - RNA, 15 nt, Human adenovirus D
gcgucgacggggaag

SEQ ID NO: 3926873 - RNA, 22 nt, Human adenovirus D
gcgucuuucucuuucucugcca

SEQ ID NO: 3926874 - RNA, 15 nt, Human adenovirus D
gcgugaagacgccgc

SEQ ID NO: 3926875 - RNA, 14 nt, Human adenovirus D
gcgugcagcugcag

SEQ ID NO: 3926876 - RNA, 13 nt, Human adenovirus D
ggggccagguccu

SEQ ID NO: 3926877 - RNA, 21 nt, Human adenovirus D
ggggcgccgccggcggcgagg

SEQ ID NO: 3926878 - RNA, 15 nt, Human adenovirus D
ggggcgcugggcgug

SEQ ID NO: 3926879 - RNA, 11 nt, Human adenovirus D
ggggcgguggu

SEQ ID NO: 3926880 - RNA, 17 nt, Human adenovirus D
gggggcagacacaccag

SEQ ID NO: 3926881 - RNA, 19 nt, Human adenovirus D
gggguagcggucguugucc

SEQ ID NO: 3926882 - RNA, 21 nt, Human adenovirus D
gggguauuacuaggcccagca

SEQ ID NO: 3926883 - RNA, 22 nt, Human adenovirus D
ggggugcccaacggcaugcuac

SEQ ID NO: 3926884 - RNA, 14 nt, Human adenovirus D
gggucaggcagcgg

SEQ ID NO: 3926885 - RNA, 19 nt, Human adenovirus D
gggucuaucuggaccccca

SEQ ID NO: 3926886 - RNA, 21 nt, Human adenovirus D
gggugaccagguccacgcugg

SEQ ID NO: 3926887 - RNA, 17 nt, Human adenovirus D
gggugagccggccgcgc

SEQ ID NO: 3926888 - RNA, 15 nt, Human adenovirus D
gggugaugcggaaag

SEQ ID NO: 3926889 - RNA, 18 nt, Human adenovirus D
gggugcgcuugagacuca

SEQ ID NO: 3926890 - RNA, 19 nt, Human adenovirus D
gggugcuagacauggccag

SEQ ID NO: 3926891 - RNA, 23 nt, Human adenovirus D
gggugggccccuggcugggcgcu

SEQ ID NO: 3926892 - RNA, 15 nt, Human adenovirus D
gguaaagccagcagc

SEQ ID NO: 3926893 - RNA, 15 nt, Human adenovirus D
gguacccuccuccca

SEQ ID NO: 3926894 - RNA, 15 nt, Human adenovirus D
gguauauuauugaug

SEQ ID NO: 3926895 - RNA, 21 nt, Human adenovirus D
gguauucccucucgagagcgg

SEQ ID NO: 3926896 - RNA, 15 nt, Human adenovirus D
ggucacacuagcgcc

SEQ ID NO: 3926897 - RNA, 20 nt, Human adenovirus D
ggucaccccgccgauuuaaa

SEQ ID NO: 3926898 - RNA, 16 nt, Human adenovirus D
ggucagaacauguucu

SEQ ID NO: 3926899 - RNA, 19 nt, Human adenovirus D
ggucaucaccuuccugcag

SEQ ID NO: 3926900 - RNA, 14 nt, Human adenovirus D
ggucccgguguugc

SEQ ID NO: 3926901 - RNA, 16 nt, Human adenovirus D
gguccugcaagaggag

SEQ ID NO: 3926902 - RNA, 23 nt, Human adenovirus D
ggucggaagacccaagagcgaga

SEQ ID NO: 3926903 - RNA, 17 nt, Human adenovirus D
ggucggcgacgacgcgc

SEQ ID NO: 3926904 - RNA, 20 nt, Human adenovirus D
ggucugcaacccccagcucc

SEQ ID NO: 3926905 - RNA, 17 nt, Human adenovirus D
ggucugcuccugcacuu

SEQ ID NO: 3926906 - RNA, 21 nt, Human adenovirus D
ggugaagaugccgggacagag

SEQ ID NO: 3926907 - RNA, 15 nt, Human adenovirus D
ggugacagaaccaga

SEQ ID NO: 3926908 - RNA, 17 nt, Human adenovirus D
ggugacggccuacgagc

SEQ ID NO: 3926909 - RNA, 18 nt, Human adenovirus D
ggugacgguaagcacgag

SEQ ID NO: 3926910 - RNA, 19 nt, Human adenovirus D
ggugacucggcugagcucg

SEQ ID NO: 3926911 - RNA, 15 nt, Human adenovirus D
ggugagcagcuugcu

SEQ ID NO: 3926912 - RNA, 21 nt, Human adenovirus D
ggugagccggccgcgcuugcu

SEQ ID NO: 3926913 - RNA, 15 nt, Human adenovirus D
ggugagggcgugcuu

SEQ ID NO: 3926914 - RNA, 24 nt, Human adenovirus D
ggugcccaagcgccggcgcgugga

SEQ ID NO: 3926915 - RNA, 20 nt, Human adenovirus D
ggugcuagacauggccagca

SEQ ID NO: 3926916 - RNA, 14 nt, Human adenovirus D
ggugcuuagccugg

SEQ ID NO: 3926917 - RNA, 12 nt, Human adenovirus D
gguggaggcgcg

SEQ ID NO: 3926918 - RNA, 23 nt, Human adenovirus D
gguggauagcuaugauccagaug

SEQ ID NO: 3926919 - RNA, 16 nt, Human adenovirus D
gguggcccugggccug

SEQ ID NO: 3926920 - RNA, 15 nt, Human adenovirus D
gguggcgccgggccu

SEQ ID NO: 3926921 - RNA, 20 nt, Human adenovirus D
ggugguguucacgcccggcg

SEQ ID NO: 3926922 - RNA, 17 nt, Human adenovirus D
gguuaguaugucccugg

SEQ ID NO: 3926923 - RNA, 14 nt, Human adenovirus D
gguuggcuugcaug

SEQ ID NO: 3926924 - RNA, 16 nt, Human adenovirus D
guaaagccagaaagaa

SEQ ID NO: 3926925 - RNA, 19 nt, Human adenovirus D
guaacaucaccacaggcaa

SEQ ID NO: 3926926 - RNA, 14 nt, Human adenovirus D
guaagugcagcaca

SEQ ID NO: 3926927 - RNA, 17 nt, Human adenovirus D
guaagugcagcacauaa

SEQ ID NO: 3926928 - RNA, 17 nt, Human adenovirus D
guaagugcaguuggcca

SEQ ID NO: 3926929 - RNA, 16 nt, Human adenovirus D
guaauggggcgggucc

SEQ ID NO: 3926930 - RNA, 16 nt, Human adenovirus D
guaauuggaacugaug

SEQ ID NO: 3926931 - RNA, 17 nt, Human adenovirus D
guaccagucgggcccgg

SEQ ID NO: 3926932 - RNA, 11 nt, Human adenovirus D
guacccagagc

SEQ ID NO: 3926933 - RNA, 13 nt, Human adenovirus D
guaccgcagcugg

SEQ ID NO: 3926934 - RNA, 12 nt, Human adenovirus D
guacgagagcgu

SEQ ID NO: 3926935 - RNA, 17 nt, Human adenovirus D
guacggcgacgacgaca

SEQ ID NO: 3926936 - RNA, 15 nt, Human adenovirus D
guacuggcaacaugg

SEQ ID NO: 3926937 - RNA, 13 nt, Human adenovirus D
guacuugggcugc

SEQ ID NO: 3926938 - RNA, 23 nt, Human adenovirus D
guacuuugucugcuguaaagcca

SEQ ID NO: 3926939 - RNA, 18 nt, Human adenovirus D
guagacaaagagcacagc

SEQ ID NO: 3926940 - RNA, 22 nt, Human adenovirus D
guagagggaaccuaccacugcc

SEQ ID NO: 3926941 - RNA, 13 nt, Human adenovirus D
uggccccggggcg

SEQ ID NO: 3926942 - RNA, 14 nt, Human adenovirus D
uggccccggggcgg

SEQ ID NO: 3926943 - RNA, 23 nt, Human adenovirus D
uggccccgugacuuugaaccuga

SEQ ID NO: 3926944 - RNA, 12 nt, Human adenovirus D
uggcccugggcc

SEQ ID NO: 3926945 - RNA, 13 nt, Human adenovirus D
uggcccugggccu

SEQ ID NO: 3926946 - RNA, 20 nt, Human adenovirus D
uggccgcgauguugagcugg

SEQ ID NO: 3926947 - RNA, 20 nt, Human adenovirus D
uggccggcgcgcccggggcc

SEQ ID NO: 3926948 - RNA, 13 nt, Human adenovirus D
uggccuggagcag

SEQ ID NO: 3926949 - RNA, 15 nt, Human adenovirus D
uggccuguccugcag

SEQ ID NO: 3926950 - RNA, 18 nt, Human adenovirus D
uggccuuguaccugcccg

SEQ ID NO: 3926951 - RNA, 14 nt, Human adenovirus D
uggcgagggucugc

SEQ ID NO: 3926952 - RNA, 22 nt, Human adenovirus D
uggcgaugggcccgugggcugc

SEQ ID NO: 3926953 - RNA, 18 nt, Human adenovirus D
uggcgaugugcucgguga

SEQ ID NO: 3926954 - RNA, 22 nt, Human adenovirus D
uggcgcacaacaccgccuccac

SEQ ID NO: 3926955 - RNA, 16 nt, Human adenovirus D
uggcgcucgggcaggu

SEQ ID NO: 3926956 - RNA, 22 nt, Human adenovirus D
uggcggagaacaaggccauccg

SEQ ID NO: 3926957 - RNA, 15 nt, Human adenovirus D
uggcgugcuggagag

SEQ ID NO: 3926958 - RNA, 17 nt, Human adenovirus D
uggcucccagccuccac

SEQ ID NO: 3926959 - RNA, 18 nt, Human adenovirus D
uggcuccuacggagggca

SEQ ID NO: 3926960 - RNA, 17 nt, Human adenovirus D
uggcuucuacagccagc

SEQ ID NO: 3926961 - RNA, 19 nt, Human adenovirus D
uggcuucuacagccagcag

SEQ ID NO: 3926962 - RNA, 13 nt, Human adenovirus D
uggcuugcaugaa

SEQ ID NO: 3926963 - RNA, 16 nt, Human adenovirus D
ugggaagaagagacag

SEQ ID NO: 3926964 - RNA, 14 nt, Human adenovirus D
ugggacgacgugga

SEQ ID NO: 3926965 - RNA, 15 nt, Human adenovirus D
ugggcaacggccgcu

SEQ ID NO: 3926966 - RNA, 19 nt, Human adenovirus D
ugggcacccacgacacagc

SEQ ID NO: 3926967 - RNA, 19 nt, Human adenovirus D
ugggcauagucgcgccgcg

SEQ ID NO: 3926968 - RNA, 23 nt, Human adenovirus D
ugggcccuugaacagcauauacc

SEQ ID NO: 3926969 - RNA, 15 nt, Human adenovirus D
ugggcgugcagaccg

SEQ ID NO: 3926970 - RNA, 19 nt, Human adenovirus D
ugggcgugcagaccgugga

SEQ ID NO: 3926971 - RNA, 12 nt, Human adenovirus D
ugggcugggacc

SEQ ID NO: 3926972 - RNA, 19 nt, Human adenovirus D
ugggcuucgaagagccggc

SEQ ID NO: 3926973 - RNA, 20 nt, Human adenovirus D
ugggguauuacuaggcccag

SEQ ID NO: 3926974 - RNA, 16 nt, Human adenovirus D
uggguggccggcgcgc

SEQ ID NO: 3926975 - RNA, 19 nt, Human adenovirus D
uggguuggcuugcaugaag

SEQ ID NO: 3926976 - RNA, 16 nt, Human adenovirus D
ugguagggggcgccgc

SEQ ID NO: 3926977 - RNA, 22 nt, Human adenovirus D
ugguaguuuuuucuuuaaucau

SEQ ID NO: 3926978 - RNA, 15 nt, Human adenovirus D
ugguauccaugcccu

SEQ ID NO: 3926979 - RNA, 19 nt, Human adenovirus D
uggucagagugcaccagcc

SEQ ID NO: 3926980 - RNA, 19 nt, Human adenovirus D
uggucagcgaugagcagcu

SEQ ID NO: 3926981 - RNA, 14 nt, Human adenovirus D
uggucaucacccuc

SEQ ID NO: 3926982 - RNA, 14 nt, Human adenovirus D
ugguccuggucacc

SEQ ID NO: 3926983 - RNA, 19 nt, Human adenovirus D
ugguccuggucacccucga

SEQ ID NO: 3926984 - RNA, 22 nt, Human adenovirus D
uggucggcgccgagcucaugcc

SEQ ID NO: 3926985 - RNA, 20 nt, Human adenovirus D
uggugcaguuugcccgcgcc

SEQ ID NO: 3926986 - RNA, 20 nt, Human adenovirus D
uggugcugaaacgggcacgg

SEQ ID NO: 3926987 - RNA, 14 nt, Human adenovirus D
ugguggaaacagac

SEQ ID NO: 3926988 - RNA, 22 nt, Human adenovirus D
ugguggcuagaaaacacccaca

SEQ ID NO: 3926989 - RNA, 18 nt, Human adenovirus D
uggugggauaacagcgcc

SEQ ID NO: 3926990 - RNA, 14 nt, Human adenovirus D
uggugucaggaaaa

SEQ ID NO: 3926991 - RNA, 18 nt, Human adenovirus D
uguaaagccacaaccaga

SEQ ID NO: 3926992 - RNA, 22 nt, Human adenovirus D
uguacacgguucucucagcacg

SEQ ID NO: 3926993 - RNA, 17 nt, Human adenovirus D
uguagaugauccaguca

SEQ ID NO: 3926994 - RNA, 16 nt, Human adenovirus D
uguagggacagcagcc

SEQ ID NO: 3926995 - RNA, 17 nt, Human adenovirus D
uguaguuguucagcagc

SEQ ID NO: 3926996 - RNA, 18 nt, Human adenovirus D
uguaguuguucagcagca

SEQ ID NO: 3926997 - RNA, 23 nt, Human adenovirus D
ugucagaugguuuuccaaaauca

SEQ ID NO: 3926998 - RNA, 20 nt, Human adenovirus D
uguccuggaagucguccaug

SEQ ID NO: 3926999 - RNA, 16 nt, Human adenovirus D
ugucgccgauggccuc

SEQ ID NO: 3927000 - RNA, 23 nt, Human adenovirus D
ugucuccuccgauggauucaaaa

SEQ ID NO: 3927001 - RNA, 14 nt, Human adenovirus D
ugugaccaagcugg

SEQ ID NO: 3927002 - RNA, 13 nt, Human adenovirus D
ugugaccacggac

SEQ ID NO: 3927003 - RNA, 13 nt, Human adenovirus D
ugugaccucccac

SEQ ID NO: 3927004 - RNA, 18 nt, Human adenovirus D
ugugcucuccgcaccgcu

SEQ ID NO: 3927005 - RNA, 21 nt, Human adenovirus D
ugugcugguggaaacagacag

SEQ ID NO: 3927006 - RNA, 21 nt, Human adenovirus D
uguggagggcaugggucaggc

SEQ ID NO: 3927007 - RNA, 16 nt, Human adenovirus D
uguugcacgcggguga

SEQ ID NO: 3927008 - RNA, 16 nt, Human adenovirus D
uguuguagaugaucca

SEQ ID NO: 3927009 - RNA, 17 nt, Human adenovirus D
uguuuacaaucuggcgg

SEQ ID NO: 3927010 - RNA, 18 nt, Human adenovirus D
uguuuuugcgaaaacacu

SEQ ID NO: 3927011 - RNA, 17 nt, Human adenovirus D
uuaaaaagcagcacagu

SEQ ID NO: 3927012 - RNA, 19 nt, Human adenovirus D
uuacacucgcagugcacgg

SEQ ID NO: 3927013 - RNA, 12 nt, Human adenovirus D
uuacgucacuuu

SEQ ID NO: 3927014 - RNA, 17 nt, Human adenovirus D
uuacuaggcccagcagc

SEQ ID NO: 3927015 - RNA, 12 nt, Human adenovirus D
uuacuucaucau

SEQ ID NO: 3927016 - RNA, 20 nt, Human adenovirus D
uuagucauguguaaauaaag

SEQ ID NO: 3927017 - RNA, 12 nt, Human adenovirus D
uuaguccagcag

SEQ ID NO: 3927018 - RNA, 18 nt, Human adenovirus D
uucaacgacuaccucucg

SEQ ID NO: 3927019 - RNA, 16 nt, Human adenovirus D
uucaauaauggaagca

SEQ ID NO: 3927020 - RNA, 23 nt, Human adenovirus D
uucacagcuaagaaaaaaucaga

SEQ ID NO: 3927021 - RNA, 23 nt, Human adenovirus D
uucacccggacguggugcugcug

SEQ ID NO: 3927022 - RNA, 13 nt, Human adenovirus D
uucacgcccggcg

SEQ ID NO: 3927023 - RNA, 12 nt, Human adenovirus D
uucagcagcacc

SEQ ID NO: 3927024 - RNA, 20 nt, Human adenovirus D
uucagcuccaguggggagga

SEQ ID NO: 3927025 - RNA, 14 nt, Human adenovirus D
uucagggugcucca

SEQ ID NO: 3927026 - RNA, 18 nt, Human adenovirus D
uucagggugcuccagcca

SEQ ID NO: 3927027 - RNA, 19 nt, Human adenovirus D
uuccaucaucgccgaggag

SEQ ID NO: 3927028 - RNA, 16 nt, Human adenovirus D
uuccccuccgcugugc

SEQ ID NO: 3927029 - RNA, 19 nt, Human adenovirus D
uuccgcaacuuccagccca

SEQ ID NO: 3927030 - RNA, 18 nt, Human adenovirus D
uuccguucuacccagcaa

SEQ ID NO: 3927031 - RNA, 12 nt, Human adenovirus D
uuccugaugcag

SEQ ID NO: 3927032 - RNA, 14 nt, Human adenovirus D
uuccugguccacaa

SEQ ID NO: 3927033 - RNA, 20 nt, Human adenovirus D
uuccugucuucuuccggcaa

SEQ ID NO: 3927034 - RNA, 14 nt, Human adenovirus D
uucgacagcgucaa

SEQ ID NO: 3927035 - RNA, 23 nt, Human adenovirus D
uucgucaggcaggcaugcaagau

SEQ ID NO: 3927036 - RNA, 18 nt, Human adenovirus D
uucuagaaacgaggagga

SEQ ID NO: 3927037 - RNA, 18 nt, Human adenovirus D
uucucaucucgcccagca

SEQ ID NO: 3927038 - RNA, 17 nt, Human adenovirus D
uucucggccaaucagca

SEQ ID NO: 3927039 - RNA, 20 nt, Human adenovirus D
uucugcccuccgcccugagc

SEQ ID NO: 3927040 - RNA, 14 nt, Human adenovirus D
uucugguugucugu

SEQ ID NO: 3927041 - RNA, 14 nt, Human adenovirus D
uucuguacuuuguc

SEQ ID NO: 3927042 - RNA, 16 nt, Human adenovirus D
uugaaaaggcagcuga

SEQ ID NO: 3927043 - RNA, 16 nt, Human adenovirus D
uugaccaccagggagc

SEQ ID NO: 3927044 - RNA, 22 nt, Human adenovirus D
uugagagagaggaaggaggaca

SEQ ID NO: 3927045 - RNA, 12 nt, Human adenovirus D
uugagcuggccu

SEQ ID NO: 3927046 - RNA, 19 nt, Human adenovirus D
uugagcuuguuuauguuga

SEQ ID NO: 3927047 - RNA, 15 nt, Human adenovirus D
uugcccuuacaugua

SEQ ID NO: 3927048 - RNA, 15 nt, Human adenovirus D
uugcgcccugagagc

SEQ ID NO: 3927049 - RNA, 22 nt, Human adenovirus D
uugcugaccaauagacagcaga

SEQ ID NO: 3927050 - RNA, 20 nt, Human adenovirus D
uuggugggauaacagcgccc

SEQ ID NO: 3927051 - RNA, 18 nt, Human adenovirus D
uuggugggcagaggaggu

SEQ ID NO: 3927052 - RNA, 17 nt, Human adenovirus D
uuguugagggaggaaag

SEQ ID NO: 3927053 - RNA, 14 nt, Human adenovirus D
uuuaacuguaucug

SEQ ID NO: 3927054 - RNA, 22 nt, Human adenovirus D
uuuccccaccuacuccucuuug

SEQ ID NO: 3927055 - RNA, 10 nt, Human adenovirus D
uuuccucugu

SEQ ID NO: 3927056 - RNA, 23 nt, Human adenovirus D
uuucuggggucagagacaucaua

SEQ ID NO: 3927057 - RNA, 16 nt, Human adenovirus D
uuuuagaauggaagac

SEQ ID NO: 3927058 - RNA, 19 nt, Human adenovirus D
uuuuccaugcacucaucca

SEQ ID NO: 3927059 - RNA, 21 nt, Human adenovirus D
uuuucugguugacaaauggag

SEQ ID NO: 3927060 - RNA, 18 nt, Human adenovirus D
uuuugaagucauguguga

SEQ ID NO: 3927061 - RNA, 21 nt, Human adenovirus D
aaaaagcagcacaguaaguuc

SEQ ID NO: 3927062 - RNA, 22 nt, Human adenovirus D
aaaaagucacuuaaguccuggg

SEQ ID NO: 3927063 - RNA, 22 nt, Human adenovirus D
aaaaaucacucuuuccagcagc

SEQ ID NO: 3927064 - RNA, 13 nt, Human adenovirus D
aaaacuaaugaca

SEQ ID NO: 3927065 - RNA, 13 nt, Human adenovirus D
aaaagcagcacag

SEQ ID NO: 3927066 - RNA, 20 nt, Human adenovirus D
aaaagcguccgcuccgcagu

SEQ ID NO: 3927067 - RNA, 15 nt, Human adenovirus D
aaaagcucccacagu

SEQ ID NO: 3927068 - RNA, 11 nt, Human adenovirus D
aaaagucacuu

SEQ ID NO: 3927069 - RNA, 22 nt, Human adenovirus D
aaaauagucuauuuuugaggau

SEQ ID NO: 3927070 - RNA, 11 nt, Human adenovirus D
aaaauaugcaa

SEQ ID NO: 3927071 - RNA, 15 nt, Human adenovirus D
aaacaauaaaaaacu

SEQ ID NO: 3927072 - RNA, 13 nt, Human adenovirus D
aaacaggcaaaga

SEQ ID NO: 3927073 - RNA, 12 nt, Human adenovirus D
aaacauccaugu

SEQ ID NO: 3927074 - RNA, 17 nt, Human adenovirus D
aaaccacauuugaagau

SEQ ID NO: 3927075 - RNA, 19 nt, Human adenovirus D
aaaccccgccaaaaaaaca

SEQ ID NO: 3927076 - RNA, 22 nt, Human adenovirus D
aaaccuuaguugggccuccagg

SEQ ID NO: 3927077 - RNA, 21 nt, Human adenovirus D
aaacuaagguggcuauuuuca

SEQ ID NO: 3927078 - RNA, 17 nt, Human adenovirus D
aaacuaggcgcagcugc

SEQ ID NO: 3927079 - RNA, 12 nt, Human adenovirus D
aaacuggggcga

SEQ ID NO: 3927080 - RNA, 19 nt, Human adenovirus D
aaacuugagcuuguuuaug

SEQ ID NO: 3927081 - RNA, 15 nt, Human adenovirus D
aaagaaacagcagag

SEQ ID NO: 3927082 - RNA, 17 nt, Human adenovirus D
aaagaaguggccagugu

SEQ ID NO: 3927083 - RNA, 22 nt, Human adenovirus D
aaagaggcuccggguggaagau

SEQ ID NO: 3927084 - RNA, 17 nt, Human adenovirus D
aaagccacaaccagagc

SEQ ID NO: 3927085 - RNA, 12 nt, Human adenovirus D
aaagccagcagc

SEQ ID NO: 3927086 - RNA, 13 nt, Human adenovirus D
aaagccagcagca

SEQ ID NO: 3927087 - RNA, 19 nt, Human adenovirus D
aaaggcgcgcguccacgcc

SEQ ID NO: 3927088 - RNA, 14 nt, Human adenovirus D
aaagggaugucaaa

SEQ ID NO: 3927089 - RNA, 19 nt, Human adenovirus D
aaaucacaucggacugggu

SEQ ID NO: 3927090 - RNA, 20 nt, Human adenovirus D
aaaucacucuuuccagcagc

SEQ ID NO: 3927091 - RNA, 21 nt, Human adenovirus D
aaaucacucuuuccagcagca

SEQ ID NO: 3927092 - RNA, 17 nt, Human adenovirus D
uccagcgaaagagagcu

SEQ ID NO: 3927093 - RNA, 19 nt, Human adenovirus D
uccagcgcucguacccgcu

SEQ ID NO: 3927094 - RNA, 17 nt, Human adenovirus D
uccagcggcgcaggggc

SEQ ID NO: 3927095 - RNA, 18 nt, Human adenovirus D
uccaguaggaaccagcac

SEQ ID NO: 3927096 - RNA, 17 nt, Human adenovirus D
uccaguuaaugcugccu

SEQ ID NO: 3927097 - RNA, 21 nt, Human adenovirus D
uccaugaugauggcgaugggc

SEQ ID NO: 3927098 - RNA, 20 nt, Human adenovirus D
uccaugcagacacuugagcu

SEQ ID NO: 3927099 - RNA, 13 nt, Human adenovirus D
ucccaccaccagc

SEQ ID NO: 3927100 - RNA, 14 nt, Human adenovirus D
ucccaccccuuaca

SEQ ID NO: 3927101 - RNA, 15 nt, Human adenovirus D
ucccaccgcgccgcc

SEQ ID NO: 3927102 - RNA, 13 nt, Human adenovirus D
ucccagcgccgcg

SEQ ID NO: 3927103 - RNA, 18 nt, Human adenovirus D
ucccaugauucaguacuu

SEQ ID NO: 3927104 - RNA, 22 nt, Human adenovirus D
uccccagcgguucugggucacc

SEQ ID NO: 3927105 - RNA, 17 nt, Human adenovirus D
uccccgacccccuucca

SEQ ID NO: 3927106 - RNA, 19 nt, Human adenovirus D
uccccucaucacaucagcc

SEQ ID NO: 3927107 - RNA, 19 nt, Human adenovirus D
uccccucgaaucaggcugg

SEQ ID NO: 3927108 - RNA, 23 nt, Human adenovirus D
uccccucgaaucaggcuggagcc

SEQ ID NO: 3927109 - RNA, 15 nt, Human adenovirus D
ucccgcucccagcga

SEQ ID NO: 3927110 - RNA, 16 nt, Human adenovirus D
ucccggccaaggccac

SEQ ID NO: 3927111 - RNA, 18 nt, Human adenovirus D
ucccggcgcaguacgcgc

SEQ ID NO: 3927112 - RNA, 22 nt, Human adenovirus D
ucccgucucgacccgagcccga

SEQ ID NO: 3927113 - RNA, 21 nt, Human adenovirus D
uccgcaggaguccaccgcucc

SEQ ID NO: 3927114 - RNA, 15 nt, Human adenovirus D
uccgcauccaagaag

SEQ ID NO: 3927115 - RNA, 15 nt, Human adenovirus D
uccgcgaacagcagc

SEQ ID NO: 3927116 - RNA, 15 nt, Human adenovirus D
uccgcgaccuccucc

SEQ ID NO: 3927117 - RNA, 12 nt, Human adenovirus D
uccgcgcuccgu

SEQ ID NO: 3927118 - RNA, 16 nt, Human adenovirus D
uccgcggccacuuccg

SEQ ID NO: 3927119 - RNA, 21 nt, Human adenovirus D
uccguaaccaucgaaaccaga

SEQ ID NO: 3927120 - RNA, 17 nt, Human adenovirus D
uccuacggagggcagaa

SEQ ID NO: 3927121 - RNA, 13 nt, Human adenovirus D
uccuccgcaucca

SEQ ID NO: 3927122 - RNA, 13 nt, Human adenovirus D
uccuccuggagau

SEQ ID NO: 3927123 - RNA, 15 nt, Human adenovirus D
uccucgcucuggggc

SEQ ID NO: 3927124 - RNA, 14 nt, Human adenovirus D
uccucuccuccucc

SEQ ID NO: 3927125 - RNA, 15 nt, Human adenovirus D
uccucuucugucucu

SEQ ID NO: 3927126 - RNA, 15 nt, Human adenovirus D
uccucuucuuccaug

SEQ ID NO: 3927127 - RNA, 21 nt, Human adenovirus D
uccugagauaugugcagcaga

SEQ ID NO: 3927128 - RNA, 22 nt, Human adenovirus D
uccugcacuuucuuugccauca

SEQ ID NO: 3927129 - RNA, 14 nt, Human adenovirus D
uccugcgaaagccc

SEQ ID NO: 3927130 - RNA, 17 nt, Human adenovirus D
uccugcugcuccaccac

SEQ ID NO: 3927131 - RNA, 20 nt, Human adenovirus D
uccugggccacuacagcuga

SEQ ID NO: 3927132 - RNA, 21 nt, Human adenovirus D
uccugggccacuacagcugac

SEQ ID NO: 3927133 - RNA, 20 nt, Human adenovirus D
uccuggucugcaacccccag

SEQ ID NO: 3927134 - RNA, 12 nt, Human adenovirus D
uccuuucgcugc

SEQ ID NO: 3927135 - RNA, 18 nt, Human adenovirus D
ucgacgcagugagagaag

SEQ ID NO: 3927136 - RNA, 16 nt, Human adenovirus D
ucgacggugagcagcu

SEQ ID NO: 3927137 - RNA, 24 nt, Human adenovirus D
ucgagacgucccagagcucgguga

SEQ ID NO: 3927138 - RNA, 13 nt, Human adenovirus D
ucgagcacagcac

SEQ ID NO: 3927139 - RNA, 21 nt, Human adenovirus D
ucgaggacgugagcggcgagg

SEQ ID NO: 3927140 - RNA, 20 nt, Human adenovirus D
ucgaguacgaggccaugcug

SEQ ID NO: 3927141 - RNA, 20 nt, Human adenovirus D
ucgaucaucuccccgcggcg

SEQ ID NO: 3927142 - RNA, 19 nt, Human adenovirus D
ucgcacucgacgagccagg

SEQ ID NO: 3927143 - RNA, 20 nt, Human adenovirus D
ucgcagcgcugcacgggcug

SEQ ID NO: 3927144 - RNA, 19 nt, Human adenovirus D
ucgccagggaacugaaaga

SEQ ID NO: 3927145 - RNA, 23 nt, Human adenovirus D
ucgcccgaccgcugucucagccu

SEQ ID NO: 3927146 - RNA, 22 nt, Human adenovirus D
ucgccgcaccauccgcgccgca

SEQ ID NO: 3927147 - RNA, 13 nt, Human adenovirus D
ucgcggaugaugu

SEQ ID NO: 3927148 - RNA, 14 nt, Human adenovirus D
ucgcggaugauguc

SEQ ID NO: 3927149 - RNA, 13 nt, Human adenovirus D
ucgcggcugcugc

SEQ ID NO: 3927150 - RNA, 17 nt, Human adenovirus D
ucgcgguggggcgguga

SEQ ID NO: 3927151 - RNA, 16 nt, Human adenovirus D
ucgcucguucugccca

SEQ ID NO: 3927152 - RNA, 12 nt, Human adenovirus D
ucgcugcugccg

SEQ ID NO: 3927153 - RNA, 11 nt, Human adenovirus D
ucggagccccu

SEQ ID NO: 3927154 - RNA, 17 nt, Human adenovirus D
ucggaguaccugagccc

SEQ ID NO: 3927155 - RNA, 19 nt, Human adenovirus D
ucggcuggaacccgcgcuc

SEQ ID NO: 3927156 - RNA, 19 nt, Human adenovirus D
ucgggcauuaacggggugg

SEQ ID NO: 3927157 - RNA, 19 nt, Human adenovirus D
ucggggcauugcaggccgu

SEQ ID NO: 3927158 - RNA, 19 nt, Human adenovirus D
ucguccagaugcucuccca

SEQ ID NO: 3927159 - RNA, 15 nt, Human adenovirus D
ucguuaguccagcag

SEQ ID NO: 3927160 - RNA, 12 nt, Human adenovirus D
ucguucugccca

SEQ ID NO: 3927161 - RNA, 16 nt, Human adenovirus D
ucuaaacuaaagccaa

SEQ ID NO: 3927162 - RNA, 19 nt, Human adenovirus D
ucuacgcguacauccagca

SEQ ID NO: 3927163 - RNA, 16 nt, Human adenovirus D
ucuauugcuagcccuu

SEQ ID NO: 3927164 - RNA, 23 nt, Human adenovirus D
ucuccaucauguucgacuccucg

SEQ ID NO: 3927165 - RNA, 14 nt, Human adenovirus D
ucuccauccccucg

SEQ ID NO: 3927166 - RNA, 22 nt, Human adenovirus D
ucucccacagcucgcgguugag

SEQ ID NO: 3927167 - RNA, 17 nt, Human adenovirus D
ucucugaaucucggcca

SEQ ID NO: 3927168 - RNA, 18 nt, Human adenovirus D
ucucuucaacaucugugc

SEQ ID NO: 3927169 - RNA, 16 nt, Human adenovirus D
ucucuucuuguaacuu

SEQ ID NO: 3927170 - RNA, 23 nt, Human adenovirus D
ucugccagcagaaaugggcccuu

SEQ ID NO: 3927171 - RNA, 23 nt, Human adenovirus D
ucugccuggugaagggcacagcc

SEQ ID NO: 3927172 - RNA, 15 nt, Human adenovirus D
ucuggacccccagac

SEQ ID NO: 3927173 - RNA, 22 nt, Human adenovirus D
ucuggacccuccgucggaagag

SEQ ID NO: 3927174 - RNA, 19 nt, Human adenovirus D
ucuggagaaguuccucugc

SEQ ID NO: 3927175 - RNA, 13 nt, Human adenovirus D
ucuggcuugcuuc

SEQ ID NO: 3927176 - RNA, 14 nt, Human adenovirus D
ucuguccaaccccg

SEQ ID NO: 3927177 - RNA, 17 nt, Human adenovirus D
ucuguccaaccccgaag

SEQ ID NO: 3927178 - RNA, 19 nt, Human adenovirus D
ucuuacgagggucuuuuug

SEQ ID NO: 3927179 - RNA, 12 nt, Human adenovirus D
ucuuccuggggc

SEQ ID NO: 3927180 - RNA, 16 nt, Human adenovirus D
ucuucucccacagcuc

SEQ ID NO: 3927181 - RNA, 11 nt, Human adenovirus D
ucuucugccug

SEQ ID NO: 3927182 - RNA, 12 nt, Human adenovirus D
ucuucugggugg

SEQ ID NO: 3927183 - RNA, 16 nt, Human adenovirus D
ucuuuagacucugaca

SEQ ID NO: 3927184 - RNA, 14 nt, Human adenovirus D
ucuuuccagcagca

SEQ ID NO: 3927185 - RNA, 19 nt, Human adenovirus D
ugaaaaaaacgguuuccgg

SEQ ID NO: 3927186 - RNA, 13 nt, Human adenovirus D
ugaaaaccaagga

SEQ ID NO: 3927187 - RNA, 16 nt, Human adenovirus D
ugaaagcauacagaga

SEQ ID NO: 3927188 - RNA, 19 nt, Human adenovirus D
ugaaagcuauaaaaaugaa

SEQ ID NO: 3927189 - RNA, 12 nt, Human adenovirus D
ugaacaggagca

SEQ ID NO: 3927190 - RNA, 19 nt, Human adenovirus D
ugaaccacacggccagcag

SEQ ID NO: 3927191 - RNA, 22 nt, Human adenovirus D
ugaaccugaacggcaucuuuga

SEQ ID NO: 3927192 - RNA, 15 nt, Human adenovirus D
ugaaccugagccagg

SEQ ID NO: 3927193 - RNA, 15 nt, Human adenovirus D
ugaacgccuuccugg

SEQ ID NO: 3927194 - RNA, 18 nt, Human adenovirus D
ugaacgccuuccuggcga

SEQ ID NO: 3927195 - RNA, 15 nt, Human adenovirus D
ugaacuucuugcuga

SEQ ID NO: 3927196 - RNA, 12 nt, Human adenovirus D
ugaacuugcuga

SEQ ID NO: 3927197 - RNA, 17 nt, Human adenovirus D
ugaagaaaacuggcaag

SEQ ID NO: 3927198 - RNA, 15 nt, Human adenovirus D
ugaagagggagagga

SEQ ID NO: 3927199 - RNA, 15 nt, Human adenovirus D
ugaagcaggagcgca

SEQ ID NO: 3927200 - RNA, 23 nt, Human adenovirus D
ugaagcaguguguguuugagaaa

SEQ ID NO: 3927201 - RNA, 12 nt, Human adenovirus D
ugaagcgccgcc

SEQ ID NO: 3927202 - RNA, 13 nt, Human adenovirus D
ugaaucucgguuu

SEQ ID NO: 3927203 - RNA, 18 nt, Human adenovirus D
ugacaauucagagccagg

SEQ ID NO: 3927204 - RNA, 18 nt, Human adenovirus D
ugacagaggcaacagcaa

SEQ ID NO: 3927205 - RNA, 17 nt, Human adenovirus D
ugacauccauggccagg

SEQ ID NO: 3927206 - RNA, 20 nt, Human adenovirus D
ugacaugcaaaaucuuacac

SEQ ID NO: 3927207 - RNA, 15 nt, Human adenovirus D
ugaccagacccaggc

SEQ ID NO: 3927208 - RNA, 19 nt, Human adenovirus D
ugaccgaggagcugagacc

SEQ ID NO: 3927209 - RNA, 13 nt, Human adenovirus D
ugacuacccacug

SEQ ID NO: 3927210 - RNA, 12 nt, Human adenovirus D
ugacucuccuga

SEQ ID NO: 3927211 - RNA, 15 nt, Human adenovirus D
cgcuggguggccggc

SEQ ID NO: 3927212 - RNA, 17 nt, Human adenovirus D
cgcugguagggggcgcc

SEQ ID NO: 3927213 - RNA, 15 nt, Human adenovirus D
cgcuguaccgcagcu

SEQ ID NO: 3927214 - RNA, 21 nt, Human adenovirus D
cgcuguccacgagcgccagcu

SEQ ID NO: 3927215 - RNA, 17 nt, Human adenovirus D
cgcuguggagccacugc

SEQ ID NO: 3927216 - RNA, 19 nt, Human adenovirus D
cgcuuccucgcgcgccacu

SEQ ID NO: 3927217 - RNA, 16 nt, Human adenovirus D
cgcuucuucgagaggg

SEQ ID NO: 3927218 - RNA, 14 nt, Human adenovirus D
cgcuugacagcacc

SEQ ID NO: 3927219 - RNA, 15 nt, Human adenovirus D
cggaccaccccaggc

SEQ ID NO: 3927220 - RNA, 18 nt, Human adenovirus D
cggacugccaccgccgcc

SEQ ID NO: 3927221 - RNA, 23 nt, Human adenovirus D
cggacuggguuaguaugucccug

SEQ ID NO: 3927222 - RNA, 20 nt, Human adenovirus D
cggacuugauuggccugucc

SEQ ID NO: 3927223 - RNA, 17 nt, Human adenovirus D
cggagaacaaggccauc

SEQ ID NO: 3927224 - RNA, 19 nt, Human adenovirus D
cggagaggcugacgagccc

SEQ ID NO: 3927225 - RNA, 14 nt, Human adenovirus D
cggagccucgcucc

SEQ ID NO: 3927226 - RNA, 22 nt, Human adenovirus D
cggagcgacacccccgcgugca

SEQ ID NO: 3927227 - RNA, 13 nt, Human adenovirus D
cggaggagccaag

SEQ ID NO: 3927228 - RNA, 18 nt, Human adenovirus D
cggaggccaucgugcaga

SEQ ID NO: 3927229 - RNA, 12 nt, Human adenovirus D
cggaggcuggcu

SEQ ID NO: 3927230 - RNA, 13 nt, Human adenovirus D
cggagugaugaau

SEQ ID NO: 3927231 - RNA, 21 nt, Human adenovirus D
cggcaaucaacuacucggugc

SEQ ID NO: 3927232 - RNA, 20 nt, Human adenovirus D
cggcacggucuggccgguga

SEQ ID NO: 3927233 - RNA, 18 nt, Human adenovirus D
cggcagcggggccuggug

SEQ ID NO: 3927234 - RNA, 18 nt, Human adenovirus D
cggcagcuuuuugagcuc

SEQ ID NO: 3927235 - RNA, 21 nt, Human adenovirus D
cggcaguuucgcacgccucgc

SEQ ID NO: 3927236 - RNA, 18 nt, Human adenovirus D
cggcaucuuccuggggca

SEQ ID NO: 3927237 - RNA, 19 nt, Human adenovirus D
cggcaugaaauugcgggug

SEQ ID NO: 3927238 - RNA, 16 nt, Human adenovirus D
cggccaaccuggugac

SEQ ID NO: 3927239 - RNA, 18 nt, Human adenovirus D
cggccaaucagcaguagc

SEQ ID NO: 3927240 - RNA, 17 nt, Human adenovirus D
cggccccgcgggcaggg

SEQ ID NO: 3927241 - RNA, 16 nt, Human adenovirus D
cggccguagcaggcgc

SEQ ID NO: 3927242 - RNA, 17 nt, Human adenovirus D
cggccguagcaggcgcc

SEQ ID NO: 3927243 - RNA, 21 nt, Human adenovirus D
cggccuacgagcagacgguga

SEQ ID NO: 3927244 - RNA, 18 nt, Human adenovirus D
cggccugaaccgccgccg

SEQ ID NO: 3927245 - RNA, 23 nt, Human adenovirus D
cggcgaacgugccgcgcgggcag

SEQ ID NO: 3927246 - RNA, 21 nt, Human adenovirus D
cggcgaacuuucuccacaccu

SEQ ID NO: 3927247 - RNA, 24 nt, Human adenovirus D
cggcgaggggcugcuagagugcca

SEQ ID NO: 3927248 - RNA, 19 nt, Human adenovirus D
cggcgccuccguccgcuuc

SEQ ID NO: 3927249 - RNA, 18 nt, Human adenovirus D
cggcgcgagcugagcgac

SEQ ID NO: 3927250 - RNA, 16 nt, Human adenovirus D
cggcgcgcccggggcc

SEQ ID NO: 3927251 - RNA, 14 nt, Human adenovirus D
cggcgcgcuccuug

SEQ ID NO: 3927252 - RNA, 23 nt, Human adenovirus D
cggcgcguggaggaagugcugga

SEQ ID NO: 3927253 - RNA, 13 nt, Human adenovirus D
cggcgggccaugc

SEQ ID NO: 3927254 - RNA, 16 nt, Human adenovirus D
cggcgggccaugcgca

SEQ ID NO: 3927255 - RNA, 15 nt, Human adenovirus D
cggcgggggcggaga

SEQ ID NO: 3927256 - RNA, 22 nt, Human adenovirus D
cggcgguuccggccccgcgggc

SEQ ID NO: 3927257 - RNA, 20 nt, Human adenovirus D
cggcguaguugcgcaggcgc

SEQ ID NO: 3927258 - RNA, 19 nt, Human adenovirus D
cggcuaccagggcuuccac

SEQ ID NO: 3927259 - RNA, 11 nt, Human adenovirus D
cggcugagcuc

SEQ ID NO: 3927260 - RNA, 19 nt, Human adenovirus D
cggcugcacgagcgccagg

SEQ ID NO: 3927261 - RNA, 21 nt, Human adenovirus D
cggcugggguauuacuaggcc

SEQ ID NO: 3927262 - RNA, 13 nt, Human adenovirus D
cggcuuuaacaau

SEQ ID NO: 3927263 - RNA, 21 nt, Human adenovirus D
cgggaccggggaggcaccacc

SEQ ID NO: 3927264 - RNA, 20 nt, Human adenovirus D
cgggacuuggucaccccgcc

SEQ ID NO: 3927265 - RNA, 14 nt, Human adenovirus D
cgggaucgccaggc

SEQ ID NO: 3927266 - RNA, 20 nt, Human adenovirus D
cgggaugaugaccgagcuga

SEQ ID NO: 3927267 - RNA, 15 nt, Human adenovirus D
cgggcagggagcugc

SEQ ID NO: 3927268 - RNA, 15 nt, Human adenovirus D
cgggccaugaggguc

SEQ ID NO: 3927269 - RNA, 17 nt, Human adenovirus D
cgggccgccgggccaug

SEQ ID NO: 3927270 - RNA, 16 nt, Human adenovirus D
cgggcgggcagggagc

SEQ ID NO: 3927271 - RNA, 19 nt, Human adenovirus D
cgggcuguggggcgugcag

SEQ ID NO: 3927272 - RNA, 20 nt, Human adenovirus D
cggggcauugcaggccgugc

SEQ ID NO: 3927273 - RNA, 22 nt, Human adenovirus D
cggggcgaaguuccccucgcag

SEQ ID NO: 3927274 - RNA, 24 nt, Human adenovirus D
cggggcgggggugaugagcugcga

SEQ ID NO: 3927275 - RNA, 21 nt, Human adenovirus D
cggggugaacaucccccgcaa

SEQ ID NO: 3927276 - RNA, 19 nt, Human adenovirus D
cgggguuguggacuuccgc

SEQ ID NO: 3927277 - RNA, 15 nt, Human adenovirus D
cgggucucccccagc

SEQ ID NO: 3927278 - RNA, 21 nt, Human adenovirus D
cgggugaccccgacgccccug

SEQ ID NO: 3927279 - RNA, 15 nt, Human adenovirus D
cgguauauggcuccu

SEQ ID NO: 3927280 - RNA, 20 nt, Human adenovirus D
cgguccucggucaggagcaa

SEQ ID NO: 3927281 - RNA, 21 nt, Human adenovirus D
cggucguuguccaccaggggg

SEQ ID NO: 3927282 - RNA, 17 nt, Human adenovirus D
cggucugcaggccgggc

SEQ ID NO: 3927283 - RNA, 13 nt, Human adenovirus D
cggugcugcugcc

SEQ ID NO: 3927284 - RNA, 18 nt, Human adenovirus D
cggugguggagauggaag

SEQ ID NO: 3927285 - RNA, 15 nt, Human adenovirus D
cgguguagcccgugc

SEQ ID NO: 3927286 - RNA, 20 nt, Human adenovirus D
cguaccugggucaccugcua

SEQ ID NO: 3927287 - RNA, 17 nt, Human adenovirus D
cguacuucugccagcag

SEQ ID NO: 3927288 - RNA, 16 nt, Human adenovirus D
cguagcagcccugugg

SEQ ID NO: 3927289 - RNA, 14 nt, Human adenovirus D
cgucaccugcggcg

SEQ ID NO: 3927290 - RNA, 18 nt, Human adenovirus D
cgucacggugaaggggug

SEQ ID NO: 3927291 - RNA, 22 nt, Human adenovirus D
cgucacuuuugcccuuacaugu

SEQ ID NO: 3927292 - RNA, 18 nt, Human adenovirus D
cgucauguccuuccaggg

SEQ ID NO: 3927293 - RNA, 16 nt, Human adenovirus D
cgucccggaggagggg

SEQ ID NO: 3927294 - RNA, 13 nt, Human adenovirus D
cguccgcaggcgg

SEQ ID NO: 3927295 - RNA, 20 nt, Human adenovirus D
cguccgcaguacucgcagcg

SEQ ID NO: 3927296 - RNA, 14 nt, Human adenovirus D
cgucggaagaggag

SEQ ID NO: 3927297 - RNA, 14 nt, Human adenovirus D
cgucuacaaggccc

SEQ ID NO: 3927298 - RNA, 14 nt, Human adenovirus D
gaaaaaauugagga

SEQ ID NO: 3927299 - RNA, 13 nt, Human adenovirus D
gaaaauuugcaaa

SEQ ID NO: 3927300 - RNA, 17 nt, Human adenovirus D
gaaacagauccugcugc

SEQ ID NO: 3927301 - RNA, 19 nt, Human adenovirus D
gaaaccccagacacccacg

SEQ ID NO: 3927302 - RNA, 15 nt, Human adenovirus D
gaaacgccccugcaa

SEQ ID NO: 3927303 - RNA, 20 nt, Human adenovirus D
gaaacgucccagcagcaccc

SEQ ID NO: 3927304 - RNA, 16 nt, Human adenovirus D
gaaagcaguucacuag

SEQ ID NO: 3927305 - RNA, 17 nt, Human adenovirus D
gaaaguaugucucuggu

SEQ ID NO: 3927306 - RNA, 13 nt, Human adenovirus D
gaaauaaaaaacc

SEQ ID NO: 3927307 - RNA, 20 nt, Human adenovirus D
gaaaugaggcaggccaugga

SEQ ID NO: 3927308 - RNA, 18 nt, Human adenovirus D
gaaaugguucacggccuu

SEQ ID NO: 3927309 - RNA, 19 nt, Human adenovirus D
gaacaaaacccaugaaaga

SEQ ID NO: 3927310 - RNA, 19 nt, Human adenovirus D
gaacagcauauaccccucc

SEQ ID NO: 3927311 - RNA, 16 nt, Human adenovirus D
gaacaguggcaaugca

SEQ ID NO: 3927312 - RNA, 21 nt, Human adenovirus D
gaaccccacaggaugaacagg

SEQ ID NO: 3927313 - RNA, 23 nt, Human adenovirus D
gaacccuccaguuuguggaggag

SEQ ID NO: 3927314 - RNA, 17 nt, Human adenovirus D
gaaccgccuggggcaga

SEQ ID NO: 3927315 - RNA, 22 nt, Human adenovirus D
gaaccucaaguaggugaagaaa

SEQ ID NO: 3927316 - RNA, 18 nt, Human adenovirus D
gaaccugcuccugcuccc

SEQ ID NO: 3927317 - RNA, 17 nt, Human adenovirus D
gaacgacucgcugcugc

SEQ ID NO: 3927318 - RNA, 22 nt, Human adenovirus D
gaacuccucuaucucgccuggu

SEQ ID NO: 3927319 - RNA, 13 nt, Human adenovirus D
gaacugaugaaaa

SEQ ID NO: 3927320 - RNA, 15 nt, Human adenovirus D
gaacugaugaaaaag

SEQ ID NO: 3927321 - RNA, 14 nt, Human adenovirus D
gaacuggcagagca

SEQ ID NO: 3927322 - RNA, 23 nt, Human adenovirus D
gaacuuccaaacuauugcuuccc

SEQ ID NO: 3927323 - RNA, 15 nt, Human adenovirus D
gaagaaaacuggcaa

SEQ ID NO: 3927324 - RNA, 21 nt, Human adenovirus D
gaagaaaugaggcaggccaug

SEQ ID NO: 3927325 - RNA, 14 nt, Human adenovirus D
gaagaacaggagcc

SEQ ID NO: 3927326 - RNA, 18 nt, Human adenovirus D
gaagaccauaguaaagaa

SEQ ID NO: 3927327 - RNA, 23 nt, Human adenovirus D
gaagacgaaugggaagaagagac

SEQ ID NO: 3927328 - RNA, 16 nt, Human adenovirus D
gaagacuauaaaguca

SEQ ID NO: 3927329 - RNA, 19 nt, Human adenovirus D
gaagagaaucuugccugcu

SEQ ID NO: 3927330 - RNA, 18 nt, Human adenovirus D
gaagaucagcugcagcgc

SEQ ID NO: 3927331 - RNA, 16 nt, Human adenovirus D
gaagauggggccccgc

SEQ ID NO: 3927332 - RNA, 18 nt, Human adenovirus D
gaagccaugcugcgcaac

SEQ ID NO: 3927333 - RNA, 21 nt, Human adenovirus D
gaagcccgugaccugcagcag

SEQ ID NO: 3927334 - RNA, 23 nt, Human adenovirus D
gaagcccgugaccugcagcaggu

SEQ ID NO: 3927335 - RNA, 22 nt, Human adenovirus D
gaagcccugagccgccagcugg

SEQ ID NO: 3927336 - RNA, 13 nt, Human adenovirus D
gaagcccugguuu

SEQ ID NO: 3927337 - RNA, 20 nt, Human adenovirus D
gaagccguggcgcagcgcga

SEQ ID NO: 3927338 - RNA, 20 nt, Human adenovirus D
gaagccuucuauggaggcag

SEQ ID NO: 3927339 - RNA, 19 nt, Human adenovirus D
gaaggaagcccagagcucg

SEQ ID NO: 3927340 - RNA, 17 nt, Human adenovirus D
gaaggcuuucacagcuu

SEQ ID NO: 3927341 - RNA, 22 nt, Human adenovirus D
gaagggcacagccucucugaag

SEQ ID NO: 3927342 - RNA, 15 nt, Human adenovirus D
gaagugcggcggcgg

SEQ ID NO: 3927343 - RNA, 15 nt, Human adenovirus D
gaagugcucaacccg

SEQ ID NO: 3927344 - RNA, 12 nt, Human adenovirus D
gaauaacaugcu

SEQ ID NO: 3927345 - RNA, 19 nt, Human adenovirus D
gaaucgcaagcgcccagag

SEQ ID NO: 3927346 - RNA, 23 nt, Human adenovirus D
gaaugagagccggagugaugaau

SEQ ID NO: 3927347 - RNA, 11 nt, Human adenovirus D
gaaugcugcua

SEQ ID NO: 3927348 - RNA, 20 nt, Human adenovirus D
gaauuuguauggaauaaaga

SEQ ID NO: 3927349 - RNA, 14 nt, Human adenovirus D
gacaaauggagcca

SEQ ID NO: 3927350 - RNA, 15 nt, Human adenovirus D
gacaacagccgcagg

SEQ ID NO: 3927351 - RNA, 14 nt, Human adenovirus D
gacaacgccaggcu

SEQ ID NO: 3927352 - RNA, 20 nt, Human adenovirus D
gacaaugauggauacuuggu

SEQ ID NO: 3927353 - RNA, 22 nt, Human adenovirus D
gacacagcaguccaugcccaac

SEQ ID NO: 3927354 - RNA, 14 nt, Human adenovirus D
gacaccacagugca

SEQ ID NO: 3927355 - RNA, 14 nt, Human adenovirus D
gacacugcagggag

SEQ ID NO: 3927356 - RNA, 11 nt, Human adenovirus D
gacagaagaag

SEQ ID NO: 3927357 - RNA, 18 nt, Human adenovirus D
gacagaggcaacagcaaa

SEQ ID NO: 3927358 - RNA, 23 nt, Human adenovirus D
gacagccaggucaaaacccacuc

SEQ ID NO: 3927359 - RNA, 18 nt, Human adenovirus D
gacagcgugguggcgacg

SEQ ID NO: 3927360 - RNA, 12 nt, Human adenovirus D
gacagggccugc

SEQ ID NO: 3927361 - RNA, 20 nt, Human adenovirus D
gacaguagcgucucaagaga

SEQ ID NO: 3927362 - RNA, 14 nt, Human adenovirus D
gaccaagcugcugu

SEQ ID NO: 3927363 - RNA, 16 nt, Human adenovirus D
gaccaauagacagcag

SEQ ID NO: 3927364 - RNA, 14 nt, Human adenovirus D
gaccacguccccgu

SEQ ID NO: 3927365 - RNA, 16 nt, Human adenovirus D
gaccaggcggcagagc

SEQ ID NO: 3927366 - RNA, 16 nt, Human adenovirus D
gaccagggguccccga

SEQ ID NO: 3927367 - RNA, 23 nt, Human adenovirus D
gaccagggguccccgacgggggg

SEQ ID NO: 3927368 - RNA, 15 nt, Human adenovirus D
gaccccauggaugag

SEQ ID NO: 3927369 - RNA, 14 nt, Human adenovirus D
gacccccaggcccu

SEQ ID NO: 3927370 - RNA, 22 nt, Human adenovirus D
gaccccgccauaagggcggcgc

SEQ ID NO: 3927371 - RNA, 17 nt, Human adenovirus D
gaccccuggcucccagc

SEQ ID NO: 3927372 - RNA, 18 nt, Human adenovirus D
gaccgccggcucaagcag

SEQ ID NO: 3927373 - RNA, 20 nt, Human adenovirus D
gaccgcggccguagcaggcg

SEQ ID NO: 3927374 - RNA, 21 nt, Human adenovirus D
gaccggaggcgugcacuggcu

SEQ ID NO: 3927375 - RNA, 15 nt, Human adenovirus D
gaccggggaggcacc

SEQ ID NO: 3927376 - RNA, 18 nt, Human adenovirus D
gaccguggcuucgagcag

SEQ ID NO: 3927377 - RNA, 14 nt, Human adenovirus D
gaccucggcacuca

SEQ ID NO: 3927378 - RNA, 15 nt, Human adenovirus D
gaccugaugaacaac

SEQ ID NO: 3927379 - RNA, 16 nt, Human adenovirus D
gaccuggcggaggcca

SEQ ID NO: 3927380 - RNA, 16 nt, Human adenovirus D
gaccugggcugcgggc

SEQ ID NO: 3927381 - RNA, 21 nt, Human adenovirus D
gaccuucaaccucaccaacca

SEQ ID NO: 3927382 - RNA, 18 nt, Human adenovirus D
gaccuugcagagcagcuc

SEQ ID NO: 3927383 - RNA, 14 nt, Human adenovirus D
gacgagaacccgag

SEQ ID NO: 3927384 - RNA, 22 nt, Human adenovirus D
gacgagaacguccauggcgcag

SEQ ID NO: 3927385 - RNA, 15 nt, Human adenovirus D
gacgagcggccgccg

SEQ ID NO: 3927386 - RNA, 16 nt, Human adenovirus D
gacgagcugcuugccg

SEQ ID NO: 3927387 - RNA, 13 nt, Human adenovirus D
gacgcagccggcg

SEQ ID NO: 3927388 - RNA, 14 nt, Human adenovirus D
gacgccccugagcg

SEQ ID NO: 3927389 - RNA, 16 nt, Human adenovirus D
gacggccuggccucgg

SEQ ID NO: 3927390 - RNA, 23 nt, Human adenovirus D
gacggcguaguugcgcaggcgcu

SEQ ID NO: 3927391 - RNA, 24 nt, Human adenovirus D
gacggcguaguugcgcaggcgcug

SEQ ID NO: 3927392 - RNA, 21 nt, Human adenovirus D
gacgggagcaauccuccagga

SEQ ID NO: 3927393 - RNA, 13 nt, Human adenovirus D
gacgguguagccc

SEQ ID NO: 3927394 - RNA, 19 nt, Human adenovirus D
gacgugcgcccggcguacg

SEQ ID NO: 3927395 - RNA, 17 nt, Human adenovirus D
gacguggacagcgcggu

SEQ ID NO: 3927396 - RNA, 15 nt, Human adenovirus D
gacguggugcugcug

SEQ ID NO: 3927397 - RNA, 19 nt, Human adenovirus D
gacuaccugcaucgcgcgg

SEQ ID NO: 3927398 - RNA, 22 nt, Human adenovirus D
gacuaucuaugaaagcauacag

SEQ ID NO: 3927399 - RNA, 15 nt, Human adenovirus D
gacuccgcgaccucc

SEQ ID NO: 3927400 - RNA, 20 nt, Human adenovirus D
gacucgcagacgagcggccg

SEQ ID NO: 3927401 - RNA, 14 nt, Human adenovirus D
gacucgcugcugca

SEQ ID NO: 3927402 - RNA, 14 nt, Human adenovirus D
gacucgggagcaaa

SEQ ID NO: 3927403 - RNA, 18 nt, Human adenovirus D
gacucgggggucugucau

SEQ ID NO: 3927404 - RNA, 13 nt, Human adenovirus D
gacugauggccac

SEQ ID NO: 3927405 - RNA, 19 nt, Human adenovirus D
gacuuccgcguaccugcgc

SEQ ID NO: 3927406 - RNA, 14 nt, Human adenovirus D
gacuugggcgggag

SEQ ID NO: 3927407 - RNA, 19 nt, Human adenovirus D
gagaaccgccuggggcaga

SEQ ID NO: 3927408 - RNA, 22 nt, Human adenovirus D
gagacaguagcgucucaagaga

SEQ ID NO: 3927409 - RNA, 18 nt, Human adenovirus D
gagaccaaguccagggug

SEQ ID NO: 3927410 - RNA, 18 nt, Human adenovirus D
gagaccagaggcagacuc

SEQ ID NO: 3927411 - RNA, 22 nt, Human adenovirus D
gagagcgggcaugaccucggca

SEQ ID NO: 3927412 - RNA, 24 nt, Human adenovirus D
gagaggcauggcaggcagcggccu

SEQ ID NO: 3927413 - RNA, 13 nt, Human adenovirus D
gagagucuggugg

SEQ ID NO: 3927414 - RNA, 14 nt, Human adenovirus D
gagauaugugcagc

SEQ ID NO: 3927415 - RNA, 17 nt, Human adenovirus D
gagauaugugcagcaga

SEQ ID NO: 3927416 - RNA, 22 nt, Human adenovirus D
gagaugucugugaagcagugug

SEQ ID NO: 3927417 - RNA, 12 nt, Human adenovirus D
gagcacagcagu

SEQ ID NO: 3927418 - RNA, 13 nt, Human adenovirus D
gagcagacgguga

SEQ ID NO: 3927419 - RNA, 22 nt, Human adenovirus D
gagcagacggugaagcaggagc

SEQ ID NO: 3927420 - RNA, 12 nt, Human adenovirus D
gagcagcacaga

SEQ ID NO: 3927421 - RNA, 20 nt, Human adenovirus D
gagcagcgcauccugcaacu

SEQ ID NO: 3927422 - RNA, 17 nt, Human adenovirus D
gagcaggaccugggcuu

SEQ ID NO: 3927423 - RNA, 23 nt, Human adenovirus D
gagcaggggcuacauucuggacu

SEQ ID NO: 3927424 - RNA, 21 nt, Human adenovirus D
gagcaggguaaagccagcagc

SEQ ID NO: 3927425 - RNA, 19 nt, Human adenovirus D
gagcagguuucucaacagc

SEQ ID NO: 3927426 - RNA, 15 nt, Human adenovirus D
gagccauagagggcg

SEQ ID NO: 3927427 - RNA, 20 nt, Human adenovirus D
gagccgcuaguggaagagau

SEQ ID NO: 3927428 - RNA, 17 nt, Human adenovirus D
gagccugcgcccgcgcc

SEQ ID NO: 3927429 - RNA, 15 nt, Human adenovirus D
gagcgacacccccgc

SEQ ID NO: 3927430 - RNA, 15 nt, Human adenovirus D
gagcuacagcaggag

SEQ ID NO: 3927431 - RNA, 23 nt, Human adenovirus D
gagcuacagcaggagugcaggga

SEQ ID NO: 3927432 - RNA, 13 nt, Human adenovirus D
gagcucacccacu

SEQ ID NO: 3927433 - RNA, 13 nt, Human adenovirus D
gagcucugcugcg

SEQ ID NO: 3927434 - RNA, 16 nt, Human adenovirus D
gagcucuuaagaaaga

SEQ ID NO: 3927435 - RNA, 20 nt, Human adenovirus D
gagcucuuaagaaagacaca

SEQ ID NO: 3927436 - RNA, 19 nt, Human adenovirus D
gagcugaugcugagccugc

SEQ ID NO: 3927437 - RNA, 15 nt, Human adenovirus D
gagcuggaagcccug

SEQ ID NO: 3927438 - RNA, 19 nt, Human adenovirus D
gagcuggaagcccugagcc

SEQ ID NO: 3927439 - RNA, 23 nt, Human adenovirus D
gaggaccagguccuugggucccg

SEQ ID NO: 3927440 - RNA, 12 nt, Human adenovirus D
gaggacggagag

SEQ ID NO: 3927441 - RNA, 15 nt, Human adenovirus D
gaggagguggcccug

SEQ ID NO: 3927442 - RNA, 23 nt, Human adenovirus D
gaggaguuugugcccucggucua

SEQ ID NO: 3927443 - RNA, 22 nt, Human adenovirus D
gaggaucgcggcgaacgagcca

SEQ ID NO: 3927444 - RNA, 18 nt, Human adenovirus D
gaggccaucgugcagaac

SEQ ID NO: 3927445 - RNA, 20 nt, Human adenovirus D
gaggccgccuacgguccaga

SEQ ID NO: 3927446 - RNA, 23 nt, Human adenovirus D
gaggcgaagauggggccccgcca

SEQ ID NO: 3927447 - RNA, 20 nt, Human adenovirus D
gaggcggagucuuccaugcg

SEQ ID NO: 3927448 - RNA, 21 nt, Human adenovirus D
gaggcggagucuuccaugcgg

SEQ ID NO: 3927449 - RNA, 14 nt, Human adenovirus D
gaggcgggugaggg

SEQ ID NO: 3927450 - RNA, 23 nt, Human adenovirus D
gaggcgggugagggcgugcuuga

SEQ ID NO: 3927451 - RNA, 14 nt, Human adenovirus D
gaggcgugcacugg

SEQ ID NO: 3927452 - RNA, 16 nt, Human adenovirus D
gaggcucgguuguuga

SEQ ID NO: 3927453 - RNA, 15 nt, Human adenovirus D
gagggaugcaugcgg

SEQ ID NO: 3927454 - RNA, 23 nt, Human adenovirus D
gagggaugcaugcggggggagau

SEQ ID NO: 3927455 - RNA, 17 nt, Human adenovirus D
gagggccucggcggcgu

SEQ ID NO: 3927456 - RNA, 20 nt, Human adenovirus D
gagggcgaagggcuggcgag

SEQ ID NO: 3927457 - RNA, 15 nt, Human adenovirus D
gagggcguuggagag

SEQ ID NO: 3927458 - RNA, 18 nt, Human adenovirus D
gagggcuacaaggaccgc

SEQ ID NO: 3927459 - RNA, 12 nt, Human adenovirus D
gaggggcagcaa

SEQ ID NO: 3927460 - RNA, 13 nt, Human adenovirus D
gagggucugcgag

SEQ ID NO: 3927461 - RNA, 22 nt, Human adenovirus D
gagguccucggggcauugcagg

SEQ ID NO: 3927462 - RNA, 19 nt, Human adenovirus D
gagguuccguuugugccuc

SEQ ID NO: 3927463 - RNA, 19 nt, Human adenovirus D
gaguaccugaacgacucgc

SEQ ID NO: 3927464 - RNA, 15 nt, Human adenovirus D
gaguacucauaaaga

SEQ ID NO: 3927465 - RNA, 18 nt, Human adenovirus D
gaguagucaaucucccac

SEQ ID NO: 3927466 - RNA, 22 nt, Human adenovirus D
gagucaaguuugacagcagaaa

SEQ ID NO: 3927467 - RNA, 22 nt, Human adenovirus D
gagugccacugccgcugcaacc

SEQ ID NO: 3927468 - RNA, 14 nt, Human adenovirus D
gaguggcggcccug

SEQ ID NO: 3927469 - RNA, 14 nt, Human adenovirus D
gagugggauaaaga

SEQ ID NO: 3927470 - RNA, 13 nt, Human adenovirus D
gaguugguggccg

SEQ ID NO: 3927471 - RNA, 12 nt, Human adenovirus D
gaguuguccugg

SEQ ID NO: 3927472 - RNA, 22 nt, Human adenovirus D
gauagcagcguguuggacuugg

SEQ ID NO: 3927473 - RNA, 20 nt, Human adenovirus D
gauauugcuucccuggaaga

SEQ ID NO: 3927474 - RNA, 20 nt, Human adenovirus D
gaucagucagugaagcccug

SEQ ID NO: 3927475 - RNA, 16 nt, Human adenovirus D
gaucaucuccccgcgg

SEQ ID NO: 3927476 - RNA, 21 nt, Human adenovirus D
gaucaucuccccgcggcggcg

SEQ ID NO: 3927477 - RNA, 22 nt, Human adenovirus D
gaucaucuccccgcggcggcga

SEQ ID NO: 3927478 - RNA, 17 nt, Human adenovirus D
gaucauguccaccugcg

SEQ ID NO: 3927479 - RNA, 12 nt, Human adenovirus D
gaucauugagag

SEQ ID NO: 3927480 - RNA, 21 nt, Human adenovirus D
gauccagucauagcaggggcg

SEQ ID NO: 3927481 - RNA, 18 nt, Human adenovirus D
gaucccaacagccuucag

SEQ ID NO: 3927482 - RNA, 14 nt, Human adenovirus D
gaucgccaggccuc

SEQ ID NO: 3927483 - RNA, 13 nt, Human adenovirus D
gaucgcgaggaca

SEQ ID NO: 3927484 - RNA, 20 nt, Human adenovirus D
gaucucggcgcggcgggggc

SEQ ID NO: 3927485 - RNA, 19 nt, Human adenovirus D
gaucucggucugcucgggc

SEQ ID NO: 3927486 - RNA, 12 nt, Human adenovirus D
gaucucugccau

SEQ ID NO: 3927487 - RNA, 16 nt, Human adenovirus D
gaucucugccauguuc

SEQ ID NO: 3927488 - RNA, 17 nt, Human adenovirus D
gaucugcaucucccagg

SEQ ID NO: 3927489 - RNA, 16 nt, Human adenovirus D
gaucugggaugcugcc

SEQ ID NO: 3927490 - RNA, 23 nt, Human adenovirus D
gaugauguccuugaggaggagac

SEQ ID NO: 3927491 - RNA, 23 nt, Human adenovirus D
gaugcaacgcaucauggcccuga

SEQ ID NO: 3927492 - RNA, 18 nt, Human adenovirus D
gaugccuucuccagggug

SEQ ID NO: 3927493 - RNA, 19 nt, Human adenovirus D
gaugcuucaacagcugugc

SEQ ID NO: 3927494 - RNA, 14 nt, Human adenovirus D
gaugggucugugcc

SEQ ID NO: 3927495 - RNA, 18 nt, Human adenovirus D
gauguaacaucaccacag

SEQ ID NO: 3927496 - RNA, 20 nt, Human adenovirus D
gaugucugugaagcagugug

SEQ ID NO: 3927497 - RNA, 20 nt, Human adenovirus D
gaugugcaguuuggccugga

SEQ ID NO: 3927498 - RNA, 15 nt, Human adenovirus D
gauuggccuguccug

SEQ ID NO: 3927499 - RNA, 18 nt, Human adenovirus D
gauuucaucaaucaucag

SEQ ID NO: 3927500 - RNA, 20 nt, Human adenovirus D
gauuuggcuuucuuugacac

SEQ ID NO: 3927501 - RNA, 19 nt, Human adenovirus D
gcaaaaaaaauuauaucua

SEQ ID NO: 3927502 - RNA, 15 nt, Human adenovirus D
gcaaacaauaaaaaa

SEQ ID NO: 3927503 - RNA, 19 nt, Human adenovirus D
gcaacaggggauguugauc

SEQ ID NO: 3927504 - RNA, 20 nt, Human adenovirus D
gcaacccaaaaucgagcagg

SEQ ID NO: 3927505 - RNA, 17 nt, Human adenovirus D
gcaacgaccggcugcuc

SEQ ID NO: 3927506 - RNA, 13 nt, Human adenovirus D
gcaacuuccagcc

SEQ ID NO: 3927507 - RNA, 11 nt, Human adenovirus D
gcaagaaggaa

SEQ ID NO: 3927508 - RNA, 20 nt, Human adenovirus D
gcaagaccuaccaaugaaaa

SEQ ID NO: 3927509 - RNA, 16 nt, Human adenovirus D
gcaagacgcaggccag

SEQ ID NO: 3927510 - RNA, 14 nt, Human adenovirus D
gcaaggugcugaca

SEQ ID NO: 3927511 - RNA, 17 nt, Human adenovirus D
gcaagucuacuggucgc

SEQ ID NO: 3927512 - RNA, 14 nt, Human adenovirus D
gcaauccuccagga

SEQ ID NO: 3927513 - RNA, 21 nt, Human adenovirus D
gcacaucgccgggcaggacgc

SEQ ID NO: 3927514 - RNA, 17 nt, Human adenovirus D
gcaccaccuacaccguc

SEQ ID NO: 3927515 - RNA, 23 nt, Human adenovirus D
gcaccacgcuucuuccccagcgg

SEQ ID NO: 3927516 - RNA, 18 nt, Human adenovirus D
gcaccaucacaggaggca

SEQ ID NO: 3927517 - RNA, 19 nt, Human adenovirus D
gcaccccccgcaggcagga

SEQ ID NO: 3927518 - RNA, 22 nt, Human adenovirus D
gcacccguccuccucgucccug

SEQ ID NO: 3927519 - RNA, 14 nt, Human adenovirus D
gcaccgcuccuggu

SEQ ID NO: 3927520 - RNA, 17 nt, Human adenovirus D
gcaccuagaccacugcc

SEQ ID NO: 3927521 - RNA, 18 nt, Human adenovirus D
gcaccugcgucugcagca

SEQ ID NO: 3927522 - RNA, 21 nt, Human adenovirus D
gcacgagcaagacgcaggcca

SEQ ID NO: 3927523 - RNA, 15 nt, Human adenovirus D
gcacgcccgccaugg

SEQ ID NO: 3927524 - RNA, 21 nt, Human adenovirus D
gcacgcccgcgagcgagggcg

SEQ ID NO: 3927525 - RNA, 22 nt, Human adenovirus D
gcacgcggccguucaugggcac

SEQ ID NO: 3927526 - RNA, 15 nt, Human adenovirus D
gcacgguaagagccc

SEQ ID NO: 3927527 - RNA, 21 nt, Human adenovirus D
gcacgucugacugccgccggc

SEQ ID NO: 3927528 - RNA, 22 nt, Human adenovirus D
gcacguggcggcggccaaccug

SEQ ID NO: 3927529 - RNA, 19 nt, Human adenovirus D
gcagaaauuucaagcuggg

SEQ ID NO: 3927530 - RNA, 23 nt, Human adenovirus D
gcagaacaacgauuucacccccg

SEQ ID NO: 3927531 - RNA, 18 nt, Human adenovirus D
gcagaagaagacgaaugg

SEQ ID NO: 3927532 - RNA, 19 nt, Human adenovirus D
gcagaagaucccggcgcag

SEQ ID NO: 3927533 - RNA, 14 nt, Human adenovirus D
gcagaagguggugg

SEQ ID NO: 3927534 - RNA, 16 nt, Human adenovirus D
gcagacacaccaggau

SEQ ID NO: 3927535 - RNA, 20 nt, Human adenovirus D
gcagacacauguccccuucc

SEQ ID NO: 3927536 - RNA, 14 nt, Human adenovirus D
gcagacagggccug

SEQ ID NO: 3927537 - RNA, 13 nt, Human adenovirus D
gcagagagauggc

SEQ ID NO: 3927538 - RNA, 17 nt, Human adenovirus D
gcagaggcacacagcuc

SEQ ID NO: 3927539 - RNA, 22 nt, Human adenovirus D
gcagcacauaaucaccauguua

SEQ ID NO: 3927540 - RNA, 15 nt, Human adenovirus D
gcagcaccucgguac

SEQ ID NO: 3927541 - RNA, 18 nt, Human adenovirus D
gcagcaggagcgugccgc

SEQ ID NO: 3927542 - RNA, 19 nt, Human adenovirus D
gcagcaggugcugccccag

SEQ ID NO: 3927543 - RNA, 16 nt, Human adenovirus D
gcagcaguagccccuc

SEQ ID NO: 3927544 - RNA, 22 nt, Human adenovirus D
gcagcggugguggaggcgcgcg

SEQ ID NO: 3927545 - RNA, 15 nt, Human adenovirus D
gcagcgugaagacgc

SEQ ID NO: 3927546 - RNA, 17 nt, Human adenovirus D
gcagcguguuggacuug

SEQ ID NO: 3927547 - RNA, 22 nt, Human adenovirus D
gcagcguugagcucacccacuu

SEQ ID NO: 3927548 - RNA, 17 nt, Human adenovirus D
gcagcugguaccugucc

SEQ ID NO: 3927549 - RNA, 16 nt, Human adenovirus D
gcagcuugcgcgcugg

SEQ ID NO: 3927550 - RNA, 16 nt, Human adenovirus D
gcaggaccaccaggac

SEQ ID NO: 3927551 - RNA, 14 nt, Human adenovirus D
gcaggagugcaggg

SEQ ID NO: 3927552 - RNA, 13 nt, Human adenovirus D
gcaggcagcggcc

SEQ ID NO: 3927553 - RNA, 21 nt, Human adenovirus D
gcaggcaggacucgcagacga

SEQ ID NO: 3927554 - RNA, 14 nt, Human adenovirus D
gcaggcgcuggaag

SEQ ID NO: 3927555 - RNA, 16 nt, Human adenovirus D
gcaggcgggacagagg

SEQ ID NO: 3927556 - RNA, 20 nt, Human adenovirus D
gcaggggcaucucgcugaug

SEQ ID NO: 3927557 - RNA, 19 nt, Human adenovirus D
gcaggguaaagccagcagc

SEQ ID NO: 3927558 - RNA, 18 nt, Human adenovirus D
gcaggugcugccccaggc

SEQ ID NO: 3927559 - RNA, 18 nt, Human adenovirus D
gcagguggacgagcagac

SEQ ID NO: 3927560 - RNA, 17 nt, Human adenovirus D
gcaguacucgcagcgcu

SEQ ID NO: 3927561 - RNA, 18 nt, Human adenovirus D
gcaguagccccucugugc

SEQ ID NO: 3927562 - RNA, 17 nt, Human adenovirus D
gcagugggcgcagacgg

SEQ ID NO: 3927563 - RNA, 21 nt, Human adenovirus D
gcagugggcgcagacggucuc

SEQ ID NO: 3927564 - RNA, 15 nt, Human adenovirus D
gcagugucucgagga

SEQ ID NO: 3927565 - RNA, 20 nt, Human adenovirus D
gcagugucucgaggacgaga

SEQ ID NO: 3927566 - RNA, 15 nt, Human adenovirus D
gcagugucuggagcg

SEQ ID NO: 3927567 - RNA, 15 nt, Human adenovirus D
gcaguugaccaugag

SEQ ID NO: 3927568 - RNA, 15 nt, Human adenovirus D
gcaguuggccaugag

SEQ ID NO: 3927569 - RNA, 19 nt, Human adenovirus D
gcauagucacacuuaguuc

SEQ ID NO: 3927570 - RNA, 20 nt, Human adenovirus D
gcaucaaaaauuaucuuuuu

SEQ ID NO: 3927571 - RNA, 18 nt, Human adenovirus D
gcaucagucuccuggugc

SEQ ID NO: 3927572 - RNA, 16 nt, Human adenovirus D
gcauccacugcuccug

SEQ ID NO: 3927573 - RNA, 23 nt, Human adenovirus D
gcauccugagauaugugcagcag

SEQ ID NO: 3927574 - RNA, 17 nt, Human adenovirus D
gcauccugcagcccaaa

SEQ ID NO: 3927575 - RNA, 16 nt, Human adenovirus D
gcaucgaggugcagac

SEQ ID NO: 3927576 - RNA, 15 nt, Human adenovirus D
gcaucgcgcaggccg

SEQ ID NO: 3927577 - RNA, 22 nt, Human adenovirus D
gcaugaaggggacgagcugcuu

SEQ ID NO: 3927578 - RNA, 13 nt, Human adenovirus D
gcaugagcggcuc

SEQ ID NO: 3927579 - RNA, 23 nt, Human adenovirus D
gcaugccgaagaagaacaggagc

SEQ ID NO: 3927580 - RNA, 18 nt, Human adenovirus D
gcaugccuucgugcacug

SEQ ID NO: 3927581 - RNA, 16 nt, Human adenovirus D
gcauggccucgugcuc

SEQ ID NO: 3927582 - RNA, 20 nt, Human adenovirus D
gcauggccucgugcucuggg

SEQ ID NO: 3927583 - RNA, 14 nt, Human adenovirus D
gcauggcuaccugg

SEQ ID NO: 3927584 - RNA, 16 nt, Human adenovirus D
gcauguacaacaugcu

SEQ ID NO: 3927585 - RNA, 19 nt, Human adenovirus D
gcauguacaacaugcugac

SEQ ID NO: 3927586 - RNA, 20 nt, Human adenovirus D
gcauguacgccgccaaccgg

SEQ ID NO: 3927587 - RNA, 13 nt, Human adenovirus D
gcauguucuugca

SEQ ID NO: 3927588 - RNA, 13 nt, Human adenovirus D
gccaagacaaagg

SEQ ID NO: 3927589 - RNA, 22 nt, Human adenovirus D
gccaagauagcccugcgcccag

SEQ ID NO: 3927590 - RNA, 13 nt, Human adenovirus D
gccaaucagcagu

SEQ ID NO: 3927591 - RNA, 17 nt, Human adenovirus D
gccacggucaccgagcc

SEQ ID NO: 3927592 - RNA, 18 nt, Human adenovirus D
gccacggucaccgagccu

SEQ ID NO: 3927593 - RNA, 23 nt, Human adenovirus D
gccagaaggggcaccuuccagcc

SEQ ID NO: 3927594 - RNA, 17 nt, Human adenovirus D
gccagcaaacgccgccg

SEQ ID NO: 3927595 - RNA, 11 nt, Human adenovirus D
gccagcagcac

SEQ ID NO: 3927596 - RNA, 17 nt, Human adenovirus D
gccagccacagccacag

SEQ ID NO: 3927597 - RNA, 21 nt, Human adenovirus D
gccagccgcgguuaugcaggg

SEQ ID NO: 3927598 - RNA, 18 nt, Human adenovirus D
gccagccuuacucagguu

SEQ ID NO: 3927599 - RNA, 20 nt, Human adenovirus D
gccagcgucauguccuucca

SEQ ID NO: 3927600 - RNA, 16 nt, Human adenovirus D
gccaggaggcggugcg

SEQ ID NO: 3927601 - RNA, 12 nt, Human adenovirus D
gccaggcccaga

SEQ ID NO: 3927602 - RNA, 22 nt, Human adenovirus D
gccaggccuccgagcagcgcau

SEQ ID NO: 3927603 - RNA, 22 nt, Human adenovirus D
gccaggccucuacccggacgag

SEQ ID NO: 3927604 - RNA, 13 nt, Human adenovirus D
gccaggcgcaggu

SEQ ID NO: 3927605 - RNA, 13 nt, Human adenovirus D
gccaggcuggccg

SEQ ID NO: 3927606 - RNA, 17 nt, Human adenovirus D
gccaggggaugaacagu

SEQ ID NO: 3927607 - RNA, 21 nt, Human adenovirus D
gccaguggaagaggggcagca

SEQ ID NO: 3927608 - RNA, 13 nt, Human adenovirus D
gccaguggcccug

SEQ ID NO: 3927609 - RNA, 23 nt, Human adenovirus D
gccauagagggcguuggagagaa

SEQ ID NO: 3927610 - RNA, 22 nt, Human adenovirus D
gccaucaacauccaccagugca

SEQ ID NO: 3927611 - RNA, 19 nt, Human adenovirus D
gccaucaagaaccugcucc

SEQ ID NO: 3927612 - RNA, 15 nt, Human adenovirus D
gccaugccccaggcc

SEQ ID NO: 3927613 - RNA, 16 nt, Human adenovirus D
gccaugcgcaggcgcc

SEQ ID NO: 3927614 - RNA, 22 nt, Human adenovirus D
gccauggggcgccgcccgagcu

SEQ ID NO: 3927615 - RNA, 20 nt, Human adenovirus D
gcccacggugguggagaugg

SEQ ID NO: 3927616 - RNA, 18 nt, Human adenovirus D
gcccagaacuggcagagc

SEQ ID NO: 3927617 - RNA, 14 nt, Human adenovirus D
gcccagagcucgcg

SEQ ID NO: 3927618 - RNA, 11 nt, Human adenovirus D
gcccaggcgcc

SEQ ID NO: 3927619 - RNA, 23 nt, Human adenovirus D
gcccaggcgccauucggagcacg

SEQ ID NO: 3927620 - RNA, 14 nt, Human adenovirus D
gcccaguuccauca

SEQ ID NO: 3927621 - RNA, 16 nt, Human adenovirus D
gccccacaucgaggcc

SEQ ID NO: 3927622 - RNA, 14 nt, Human adenovirus D
gccccgccaaccgg

SEQ ID NO: 3927623 - RNA, 21 nt, Human adenovirus D
gccccugagcggcugcacgag

SEQ ID NO: 3927624 - RNA, 19 nt, Human adenovirus D
gccccuucgaccguggacg

SEQ ID NO: 3927625 - RNA, 16 nt, Human adenovirus D
gcccgaccgacccaug

SEQ ID NO: 3927626 - RNA, 16 nt, Human adenovirus D
gcccgacuccgccgcc

SEQ ID NO: 3927627 - RNA, 17 nt, Human adenovirus D
gcccgagcucugcugcg

SEQ ID NO: 3927628 - RNA, 13 nt, Human adenovirus D
gcccgagggcaac

SEQ ID NO: 3927629 - RNA, 14 nt, Human adenovirus D
gcccgcgagcgagg

SEQ ID NO: 3927630 - RNA, 22 nt, Human adenovirus D
gcccgcgccgcggcgacagcgc

SEQ ID NO: 3927631 - RNA, 16 nt, Human adenovirus D
gcccgcgugcgccgcg

SEQ ID NO: 3927632 - RNA, 19 nt, Human adenovirus D
gcccguagcugcgcggggc

SEQ ID NO: 3927633 - RNA, 21 nt, Human adenovirus D
gcccguagcugcgcggggcca

SEQ ID NO: 3927634 - RNA, 14 nt, Human adenovirus D
gcccgucgccgcac

SEQ ID NO: 3927635 - RNA, 16 nt, Human adenovirus D
gcccuccgcccugagc

SEQ ID NO: 3927636 - RNA, 18 nt, Human adenovirus D
gcccugcucaccugcacc

SEQ ID NO: 3927637 - RNA, 13 nt, Human adenovirus D
gcccugcuggagc

SEQ ID NO: 3927638 - RNA, 13 nt, Human adenovirus D
gcccugcuggccg

SEQ ID NO: 3927639 - RNA, 15 nt, Human adenovirus D
gcccuugcgcgagca

SEQ ID NO: 3927640 - RNA, 17 nt, Human adenovirus D
gcccuugcgcgagcaga

SEQ ID NO: 3927641 - RNA, 16 nt, Human adenovirus D
gccgaagaagaacagg

SEQ ID NO: 3927642 - RNA, 14 nt, Human adenovirus D
gccgaagggcgaga

SEQ ID NO: 3927643 - RNA, 19 nt, Human adenovirus D
gccgacccguggccccggg

SEQ ID NO: 3927644 - RNA, 16 nt, Human adenovirus D
gccgagcuggaagccc

SEQ ID NO: 3927645 - RNA, 15 nt, Human adenovirus D
gccgcagcccggcgg

SEQ ID NO: 3927646 - RNA, 12 nt, Human adenovirus D
gccgcaggccaa

SEQ ID NO: 3927647 - RNA, 13 nt, Human adenovirus D
gccgcaggccaac

SEQ ID NO: 3927648 - RNA, 19 nt, Human adenovirus D
gccgccaggcccagaacug

SEQ ID NO: 3927649 - RNA, 21 nt, Human adenovirus D
gccgccaucgaacacgccacc

SEQ ID NO: 3927650 - RNA, 23 nt, Human adenovirus D
gccgccggcggcgggccaugcgc

SEQ ID NO: 3927651 - RNA, 15 nt, Human adenovirus D
gccgccgggccauga

SEQ ID NO: 3927652 - RNA, 18 nt, Human adenovirus D
gccgccggggcucggugc

SEQ ID NO: 3927653 - RNA, 18 nt, Human adenovirus D
gccgccucugcgugaaga

SEQ ID NO: 3927654 - RNA, 13 nt, Human adenovirus D
gccgcgccagacg

SEQ ID NO: 3927655 - RNA, 15 nt, Human adenovirus D
gccgcgcgggcagga

SEQ ID NO: 3927656 - RNA, 13 nt, Human adenovirus D
gccgcgcugggga

SEQ ID NO: 3927657 - RNA, 23 nt, Human adenovirus D
gccgcggcagccgcagccgccau

SEQ ID NO: 3927658 - RNA, 21 nt, Human adenovirus D
gccgcgggcgccucccaggac

SEQ ID NO: 3927659 - RNA, 22 nt, Human adenovirus D
gccgcuccgugcgaggaugaga

SEQ ID NO: 3927660 - RNA, 17 nt, Human adenovirus D
gccggcgaaccgagcac

SEQ ID NO: 3927661 - RNA, 20 nt, Human adenovirus D
gccggcgacaagcuggccug

SEQ ID NO: 3927662 - RNA, 22 nt, Human adenovirus D
gccggcgcgcccggggccaggu

SEQ ID NO: 3927663 - RNA, 21 nt, Human adenovirus D
gccggcggcgcgagcugagcg

SEQ ID NO: 3927664 - RNA, 15 nt, Human adenovirus D
gccgggguuguggac

SEQ ID NO: 3927665 - RNA, 14 nt, Human adenovirus D
gccggugcacuccc

SEQ ID NO: 3927666 - RNA, 14 nt, Human adenovirus D
gccguacaccaggc

SEQ ID NO: 3927667 - RNA, 19 nt, Human adenovirus D
gccguaccagugcaacuuu

SEQ ID NO: 3927668 - RNA, 15 nt, Human adenovirus D
gccgugcgcaccacc

SEQ ID NO: 3927669 - RNA, 20 nt, Human adenovirus D
gccgugcgccgcguccccgc

SEQ ID NO: 3927670 - RNA, 13 nt, Human adenovirus D
gccgugcucaagc

SEQ ID NO: 3927671 - RNA, 17 nt, Human adenovirus D
gccgugcugcucgagcg

SEQ ID NO: 3927672 - RNA, 18 nt, Human adenovirus D
gccgugggcgacaaccgg

SEQ ID NO: 3927673 - RNA, 13 nt, Human adenovirus D
gccuaccccgccg

SEQ ID NO: 3927674 - RNA, 18 nt, Human adenovirus D
gccuccccgcagaaauca

SEQ ID NO: 3927675 - RNA, 22 nt, Human adenovirus D
gccucgagcuacaugcccagca

SEQ ID NO: 3927676 - RNA, 12 nt, Human adenovirus D
gccugaggcaga

SEQ ID NO: 3927677 - RNA, 22 nt, Human adenovirus D
gccugccaggaugggccggagu

SEQ ID NO: 3927678 - RNA, 18 nt, Human adenovirus D
gccugcgcccgcgccgcg

SEQ ID NO: 3927679 - RNA, 18 nt, Human adenovirus D
gccuggaauaguagcacg

SEQ ID NO: 3927680 - RNA, 16 nt, Human adenovirus D
gccuggucaaacaggc

SEQ ID NO: 3927681 - RNA, 15 nt, Human adenovirus D
gccuggugaagggca

SEQ ID NO: 3927682 - RNA, 17 nt, Human adenovirus D
gccuggugaagggcaca

SEQ ID NO: 3927683 - RNA, 15 nt, Human adenovirus D
gccugguguacacag

SEQ ID NO: 3927684 - RNA, 15 nt, Human adenovirus D
gccuguccugcaggg

SEQ ID NO: 3927685 - RNA, 17 nt, Human adenovirus D
gccuguccugcaggggc

SEQ ID NO: 3927686 - RNA, 16 nt, Human adenovirus D
gccuuaccgccagaga

SEQ ID NO: 3927687 - RNA, 14 nt, Human adenovirus D
gccuucagcaucag

SEQ ID NO: 3927688 - RNA, 15 nt, Human adenovirus D
gccuucgugcacugg

SEQ ID NO: 3927689 - RNA, 15 nt, Human adenovirus D
gccuucuauggaggc

SEQ ID NO: 3927690 - RNA, 20 nt, Human adenovirus D
gccuucuauggaggcagagc

SEQ ID NO: 3927691 - RNA, 22 nt, Human adenovirus D
gccuugauuuuuccagcccagg

SEQ ID NO: 3927692 - RNA, 18 nt, Human adenovirus D
gccuuguagggacagcag

SEQ ID NO: 3927693 - RNA, 19 nt, Human adenovirus D
gccuuuccccaccuacucc

SEQ ID NO: 3927694 - RNA, 15 nt, Human adenovirus D
gcgaagaggagcuga

SEQ ID NO: 3927695 - RNA, 22 nt, Human adenovirus D
gcgacacccccgcgugcagcug

SEQ ID NO: 3927696 - RNA, 17 nt, Human adenovirus D
gcgacagcgccacgacc

SEQ ID NO: 3927697 - RNA, 21 nt, Human adenovirus D
gcgacccaugagcugcgagaa

SEQ ID NO: 3927698 - RNA, 17 nt, Human adenovirus D
gcgacccccaggcccug

SEQ ID NO: 3927699 - RNA, 17 nt, Human adenovirus D
gcgaccccgagaccugc

SEQ ID NO: 3927700 - RNA, 14 nt, Human adenovirus D
gcgaccugggcugc

SEQ ID NO: 3927701 - RNA, 18 nt, Human adenovirus D
gcgagaccaacggcugca

SEQ ID NO: 3927702 - RNA, 17 nt, Human adenovirus D
gcgagaggagcucuugc

SEQ ID NO: 3927703 - RNA, 15 nt, Human adenovirus D
gcgagcugagcgacc

SEQ ID NO: 3927704 - RNA, 21 nt, Human adenovirus D
gcgagcugaugcugagccugc

SEQ ID NO: 3927705 - RNA, 17 nt, Human adenovirus D
gcgaggacaccaguacu

SEQ ID NO: 3927706 - RNA, 15 nt, Human adenovirus D
gcgaggaggaccagg

SEQ ID NO: 3927707 - RNA, 15 nt, Human adenovirus D
gcgagggccuggacc

SEQ ID NO: 3927708 - RNA, 16 nt, Human adenovirus D
gcgaucccgcuguggc

SEQ ID NO: 3927709 - RNA, 17 nt, Human adenovirus D
gcgcacccguccuccuc

SEQ ID NO: 3927710 - RNA, 16 nt, Human adenovirus D
gcgcacguggcggcgg

SEQ ID NO: 3927711 - RNA, 15 nt, Human adenovirus D
gcgcagccugagcuu

SEQ ID NO: 3927712 - RNA, 23 nt, Human adenovirus D
gcgcagcguugagcucacccacu

SEQ ID NO: 3927713 - RNA, 20 nt, Human adenovirus D
gcgcagcuguuccugguggu

SEQ ID NO: 3927714 - RNA, 15 nt, Human adenovirus D
gcgcaggcgacccug

SEQ ID NO: 3927715 - RNA, 16 nt, Human adenovirus D
gcgcauccugcagccc

SEQ ID NO: 3927716 - RNA, 14 nt, Human adenovirus D
gcgccaagggcagc

SEQ ID NO: 3927717 - RNA, 13 nt, Human adenovirus D
gcgccacuggcca

SEQ ID NO: 3927718 - RNA, 16 nt, Human adenovirus D
gcgccagacgcacggg

SEQ ID NO: 3927719 - RNA, 13 nt, Human adenovirus D
gcgccccccgcgg

SEQ ID NO: 3927720 - RNA, 15 nt, Human adenovirus D
gcgcccguagucugg

SEQ ID NO: 3927721 - RNA, 15 nt, Human adenovirus D
gcgccgccggcggcg

SEQ ID NO: 3927722 - RNA, 17 nt, Human adenovirus D
gcgccgcgccagacgca

SEQ ID NO: 3927723 - RNA, 13 nt, Human adenovirus D
gcgccgcgccgcc

SEQ ID NO: 3927724 - RNA, 19 nt, Human adenovirus D
gcgccgggccugggcgugc

SEQ ID NO: 3927725 - RNA, 15 nt, Human adenovirus D
guagagguagcggga

SEQ ID NO: 3927726 - RNA, 17 nt, Human adenovirus D
guagcggggcacaggca

SEQ ID NO: 3927727 - RNA, 18 nt, Human adenovirus D
guagcggggcacaggcac

SEQ ID NO: 3927728 - RNA, 21 nt, Human adenovirus D
guaggccacgugaccaggggu

SEQ ID NO: 3927729 - RNA, 22 nt, Human adenovirus D
guaggcccugguccaccucucc

SEQ ID NO: 3927730 - RNA, 18 nt, Human adenovirus D
guagggguugaggggcgg

SEQ ID NO: 3927731 - RNA, 17 nt, Human adenovirus D
guagguguaggccacgu

SEQ ID NO: 3927732 - RNA, 15 nt, Human adenovirus D
guagucaugcaugag

SEQ ID NO: 3927733 - RNA, 13 nt, Human adenovirus D
guagucuggagaa

SEQ ID NO: 3927734 - RNA, 19 nt, Human adenovirus D
guauaaguguaagagcaag

SEQ ID NO: 3927735 - RNA, 16 nt, Human adenovirus D
guauugugggccuggg

SEQ ID NO: 3927736 - RNA, 22 nt, Human adenovirus D
gucacacuagcgcccugguaga

SEQ ID NO: 3927737 - RNA, 22 nt, Human adenovirus D
gucacccugcccuuccagcaca

SEQ ID NO: 3927738 - RNA, 19 nt, Human adenovirus D
gucaccgagccucccagga

SEQ ID NO: 3927739 - RNA, 16 nt, Human adenovirus D
gucacucucauuucag

SEQ ID NO: 3927740 - RNA, 16 nt, Human adenovirus D
gucagaaugugauggg

SEQ ID NO: 3927741 - RNA, 13 nt, Human adenovirus D
gucaguugcacca

SEQ ID NO: 3927742 - RNA, 21 nt, Human adenovirus D
gucauagcaggggcgcugggc

SEQ ID NO: 3927743 - RNA, 18 nt, Human adenovirus D
gucaucaccuuccugcag

SEQ ID NO: 3927744 - RNA, 21 nt, Human adenovirus D
gucaucaccuuccugcagcuc

SEQ ID NO: 3927745 - RNA, 16 nt, Human adenovirus D
gucaucacuggcggag

SEQ ID NO: 3927746 - RNA, 21 nt, Human adenovirus D
guccacgagcgccagcuguug

SEQ ID NO: 3927747 - RNA, 20 nt, Human adenovirus D
guccacgcugguggccaccu

SEQ ID NO: 3927748 - RNA, 15 nt, Human adenovirus D
guccagcgcggccag

SEQ ID NO: 3927749 - RNA, 21 nt, Human adenovirus D
guccaucgugcgcgaccuggg

SEQ ID NO: 3927750 - RNA, 23 nt, Human adenovirus D
guccaugggcgccuucaccgacc

SEQ ID NO: 3927751 - RNA, 20 nt, Human adenovirus D
gucccccgccgcuguggagc

SEQ ID NO: 3927752 - RNA, 16 nt, Human adenovirus D
guccccgcccgccgcc

SEQ ID NO: 3927753 - RNA, 20 nt, Human adenovirus D
guccgcaggaguccaccgcu

SEQ ID NO: 3927754 - RNA, 16 nt, Human adenovirus D
guccgcaggcgggaca

SEQ ID NO: 3927755 - RNA, 18 nt, Human adenovirus D
guccgcaggcgggacaga

SEQ ID NO: 3927756 - RNA, 13 nt, Human adenovirus D
guccgggggcagg

SEQ ID NO: 3927757 - RNA, 21 nt, Human adenovirus D
guccuucacucccaaccaggc

SEQ ID NO: 3927758 - RNA, 18 nt, Human adenovirus D
guccuugaggaggagacu

SEQ ID NO: 3927759 - RNA, 18 nt, Human adenovirus D
guccuuucgcugcugccg

SEQ ID NO: 3927760 - RNA, 15 nt, Human adenovirus D
gucgacggcgccucc

SEQ ID NO: 3927761 - RNA, 13 nt, Human adenovirus D
gucgcagccgccg

SEQ ID NO: 3927762 - RNA, 20 nt, Human adenovirus D
gucgccucggaccuggccga

SEQ ID NO: 3927763 - RNA, 15 nt, Human adenovirus D
gucgcgguggggcgg

SEQ ID NO: 3927764 - RNA, 23 nt, Human adenovirus D
gucgcuagacuugaaagcggccg

SEQ ID NO: 3927765 - RNA, 20 nt, Human adenovirus D
gucgcuugacagcaccgccg

SEQ ID NO: 3927766 - RNA, 19 nt, Human adenovirus D
gucggcacggucuggccgg

SEQ ID NO: 3927767 - RNA, 21 nt, Human adenovirus D
gucgucgcagccgccgugcuc

SEQ ID NO: 3927768 - RNA, 15 nt, Human adenovirus D
gucuacaaggcccug

SEQ ID NO: 3927769 - RNA, 17 nt, Human adenovirus D
gucuaccugcgcacgcc

SEQ ID NO: 3927770 - RNA, 15 nt, Human adenovirus D
gucugcaacccccag

SEQ ID NO: 3927771 - RNA, 10 nt, Human adenovirus D
gucugccccc

SEQ ID NO: 3927772 - RNA, 14 nt, Human adenovirus D
gucugcucgggcau

SEQ ID NO: 3927773 - RNA, 19 nt, Human adenovirus D
gucugcucgggcaugagcu

SEQ ID NO: 3927774 - RNA, 15 nt, Human adenovirus D
gucuggcacaucuuu

SEQ ID NO: 3927775 - RNA, 19 nt, Human adenovirus D
gucuggugcaguuugcccg

SEQ ID NO: 3927776 - RNA, 21 nt, Human adenovirus D
gugaacaaaacccaugaaaga

SEQ ID NO: 3927777 - RNA, 14 nt, Human adenovirus D
gugaacgcgcuggc

SEQ ID NO: 3927778 - RNA, 21 nt, Human adenovirus D
gugaaggccggcaugcccacc

SEQ ID NO: 3927779 - RNA, 19 nt, Human adenovirus D
gugaccugcagcaggugcu

SEQ ID NO: 3927780 - RNA, 18 nt, Human adenovirus D
gugacggccuacgagcag

SEQ ID NO: 3927781 - RNA, 23 nt, Human adenovirus D
gugagcucgucuuccaggagccu

SEQ ID NO: 3927782 - RNA, 15 nt, Human adenovirus D
gugagugauaaagcg

SEQ ID NO: 3927783 - RNA, 12 nt, Human adenovirus D
gugcaaugucag

SEQ ID NO: 3927784 - RNA, 18 nt, Human adenovirus D
gugcacucccaguucuug

SEQ ID NO: 3927785 - RNA, 18 nt, Human adenovirus D
gugcaguuggccaugagc

SEQ ID NO: 3927786 - RNA, 16 nt, Human adenovirus D
gugccagauuggggga

SEQ ID NO: 3927787 - RNA, 18 nt, Human adenovirus D
gugcccaacggcaugcua

SEQ ID NO: 3927788 - RNA, 20 nt, Human adenovirus D
gugccgccaaggagcuccuc

SEQ ID NO: 3927789 - RNA, 20 nt, Human adenovirus D
gugccuuuaucagcacugca

SEQ ID NO: 3927790 - RNA, 19 nt, Human adenovirus D
gugcuccagccaaagcuca

SEQ ID NO: 3927791 - RNA, 13 nt, Human adenovirus D
gugcucccauagc

SEQ ID NO: 3927792 - RNA, 20 nt, Human adenovirus D
gugcugacauccauggccag

SEQ ID NO: 3927793 - RNA, 22 nt, Human adenovirus D
gugcugacauccauggccaggg

SEQ ID NO: 3927794 - RNA, 20 nt, Human adenovirus D
gugcugcugaaacaccugca

SEQ ID NO: 3927795 - RNA, 11 nt, Human adenovirus D
gugcugcugcc

SEQ ID NO: 3927796 - RNA, 22 nt, Human adenovirus D
guggacaucgcgaaccaggcag

SEQ ID NO: 3927797 - RNA, 22 nt, Human adenovirus D
guggacauucagauccccaccg

SEQ ID NO: 3927798 - RNA, 13 nt, Human adenovirus D
guggacgagcaga

SEQ ID NO: 3927799 - RNA, 20 nt, Human adenovirus D
guggcaacaccugggcacug

SEQ ID NO: 3927800 - RNA, 16 nt, Human adenovirus D
guggcccugggccuga

SEQ ID NO: 3927801 - RNA, 18 nt, Human adenovirus D
guggccuuguaccugccc

SEQ ID NO: 3927802 - RNA, 12 nt, Human adenovirus D
guggcggggccc

SEQ ID NO: 3927803 - RNA, 12 nt, Human adenovirus D
gugggccccugg

SEQ ID NO: 3927804 - RNA, 23 nt, Human adenovirus D
guggucgacuugcaagacagaaa

SEQ ID NO: 3927805 - RNA, 21 nt, Human adenovirus D
gugguggcgacgcggcggcga

SEQ ID NO: 3927806 - RNA, 16 nt, Human adenovirus D
gugguuuuucugguug

SEQ ID NO: 3927807 - RNA, 20 nt, Human adenovirus D
guguacaacgcccugcugga

SEQ ID NO: 3927808 - RNA, 18 nt, Human adenovirus D
guguacuugguggacaac

SEQ ID NO: 3927809 - RNA, 15 nt, Human adenovirus D
guuacgcugcccgcc

SEQ ID NO: 3927810 - RNA, 15 nt, Human adenovirus D
guuacuguaaagcca

SEQ ID NO: 3927811 - RNA, 19 nt, Human adenovirus D
guuagguucuucacccagc

SEQ ID NO: 3927812 - RNA, 15 nt, Human adenovirus D
guuauggucugcucc

SEQ ID NO: 3927813 - RNA, 13 nt, Human adenovirus D
guuauucagcagc

SEQ ID NO: 3927814 - RNA, 21 nt, Human adenovirus D
guucaaaacaacaagauucaa

SEQ ID NO: 3927815 - RNA, 11 nt, Human adenovirus D
guucaccugca

SEQ ID NO: 3927816 - RNA, 16 nt, Human adenovirus D
guucaggagcgcagcc

SEQ ID NO: 3927817 - RNA, 16 nt, Human adenovirus D
guuccguuugugccuc

SEQ ID NO: 3927818 - RNA, 20 nt, Human adenovirus D
guucgagaucaagcgcagcg

SEQ ID NO: 3927819 - RNA, 13 nt, Human adenovirus D
guucugcccaccg

SEQ ID NO: 3927820 - RNA, 14 nt, Human adenovirus D
guucuucgaggacc

SEQ ID NO: 3927821 - RNA, 13 nt, Human adenovirus D
guugaacccagau

SEQ ID NO: 3927822 - RNA, 16 nt, Human adenovirus D
guugaccaugagcucg

SEQ ID NO: 3927823 - RNA, 20 nt, Human adenovirus D
guugaugaccugggcggcga

SEQ ID NO: 3927824 - RNA, 10 nt, Human adenovirus D
guugcaugag

SEQ ID NO: 3927825 - RNA, 13 nt, Human adenovirus D
guuggcuugcaug

SEQ ID NO: 3927826 - RNA, 14 nt, Human adenovirus D
guugggcagcgaga

SEQ ID NO: 3927827 - RNA, 13 nt, Human adenovirus D
guuuaauaaaagc

SEQ ID NO: 3927828 - RNA, 17 nt, Human adenovirus D
guuuauaaaucuuacac

SEQ ID NO: 3927829 - RNA, 13 nt, Human adenovirus D
guuuauguugauc

SEQ ID NO: 3927830 - RNA, 16 nt, Human adenovirus D
guuucgggcgggcagg

SEQ ID NO: 3927831 - RNA, 16 nt, Human adenovirus D
guuucgucaggcaggc

SEQ ID NO: 3927832 - RNA, 18 nt, Human adenovirus D
guuugagaauaacaugcu

SEQ ID NO: 3927833 - RNA, 15 nt, Human adenovirus D
guuugggcacugggg

SEQ ID NO: 3927834 - RNA, 16 nt, Human adenovirus D
guuuuccaugcacuca

SEQ ID NO: 3927835 - RNA, 19 nt, Human adenovirus D
uaaaaaugcaguugaauuu

SEQ ID NO: 3927836 - RNA, 17 nt, Human adenovirus D
uaaagccacaaccagag

SEQ ID NO: 3927837 - RNA, 17 nt, Human adenovirus D
uaaauauggccuggagc

SEQ ID NO: 3927838 - RNA, 15 nt, Human adenovirus D
uaacagggaaaggaa

SEQ ID NO: 3927839 - RNA, 16 nt, Human adenovirus D
uaacaucaccacaggc

SEQ ID NO: 3927840 - RNA, 14 nt, Human adenovirus D
uaacauuugaauuu

SEQ ID NO: 3927841 - RNA, 22 nt, Human adenovirus D
uaacuaugaucccaacagccuu

SEQ ID NO: 3927842 - RNA, 13 nt, Human adenovirus D
uaagaaucacauu

SEQ ID NO: 3927843 - RNA, 20 nt, Human adenovirus D
uaagcagaguacucauaaag

SEQ ID NO: 3927844 - RNA, 19 nt, Human adenovirus D
uaagcaggagcaggaggag

SEQ ID NO: 3927845 - RNA, 21 nt, Human adenovirus D
uaagcaggagcaggaggagga

SEQ ID NO: 3927846 - RNA, 20 nt, Human adenovirus D
uaagcaugagcggcuccagc

SEQ ID NO: 3927847 - RNA, 16 nt, Human adenovirus D
uaaggagaaggauuca

SEQ ID NO: 3927848 - RNA, 14 nt, Human adenovirus D
uaauagaaacagau

SEQ ID NO: 3927849 - RNA, 13 nt, Human adenovirus D
uaaugaagaagca

SEQ ID NO: 3927850 - RNA, 16 nt, Human adenovirus D
uaaugacaaacaaaag

SEQ ID NO: 3927851 - RNA, 17 nt, Human adenovirus D
uaaugaucaaaacuuaa

SEQ ID NO: 3927852 - RNA, 19 nt, Human adenovirus D
uaaugcuccaaagcuagca

SEQ ID NO: 3927853 - RNA, 16 nt, Human adenovirus D
uacaacagccuugccc

SEQ ID NO: 3927854 - RNA, 14 nt, Human adenovirus D
uacaagauccugag

SEQ ID NO: 3927855 - RNA, 19 nt, Human adenovirus D
uacaagcgccaacagcagc

SEQ ID NO: 3927856 - RNA, 21 nt, Human adenovirus D
uacacgggguugcagcacugg

SEQ ID NO: 3927857 - RNA, 22 nt, Human adenovirus D
uacacucgcagugcacgggcau

SEQ ID NO: 3927858 - RNA, 15 nt, Human adenovirus D
uacagagauucagcc

SEQ ID NO: 3927859 - RNA, 20 nt, Human adenovirus D
uacagccagcagcuccgggu

SEQ ID NO: 3927860 - RNA, 22 nt, Human adenovirus D
uacauccauucucgaagauucu

SEQ ID NO: 3927861 - RNA, 16 nt, Human adenovirus D
uaccaugggaaaugca

SEQ ID NO: 3927862 - RNA, 20 nt, Human adenovirus D
uacccagcaagucagcaacu

SEQ ID NO: 3927863 - RNA, 20 nt, Human adenovirus D
uaccccaucccggccaaggc

SEQ ID NO: 3927864 - RNA, 13 nt, Human adenovirus D
uaccgacagcagc

SEQ ID NO: 3927865 - RNA, 13 nt, Human adenovirus D
uaccucucggccg

SEQ ID NO: 3927866 - RNA, 23 nt, Human adenovirus D
uaccugcccgacuccuacaagua

SEQ ID NO: 3927867 - RNA, 20 nt, Human adenovirus D
uaccugggaggagaggagga

SEQ ID NO: 3927868 - RNA, 21 nt, Human adenovirus D
uaccugggaggagaggaggau

SEQ ID NO: 3927869 - RNA, 18 nt, Human adenovirus D
uaccugguacgagcuaca

SEQ ID NO: 3927870 - RNA, 16 nt, Human adenovirus D
uacgccaacucggccc

SEQ ID NO: 3927871 - RNA, 18 nt, Human adenovirus D
uacgccaacucggcccac

SEQ ID NO: 3927872 - RNA, 21 nt, Human adenovirus D
uacggcaucucgauccagcag

SEQ ID NO: 3927873 - RNA, 22 nt, Human adenovirus D
uacuacuccugaucagaaacac

SEQ ID NO: 3927874 - RNA, 20 nt, Human adenovirus D
uacucuacaauccuuuugua

SEQ ID NO: 3927875 - RNA, 14 nt, Human adenovirus D
uacuuuucugguug

SEQ ID NO: 3927876 - RNA, 12 nt, Human adenovirus D
uagaaacagauc

SEQ ID NO: 3927877 - RNA, 18 nt, Human adenovirus D
uagaaacagauccugcug

SEQ ID NO: 3927878 - RNA, 18 nt, Human adenovirus D
uagaagagcccccucccc

SEQ ID NO: 3927879 - RNA, 14 nt, Human adenovirus D
uagagggcaccacc

SEQ ID NO: 3927880 - RNA, 23 nt, Human adenovirus D
uagauggaucgagugaaggugac

SEQ ID NO: 3927881 - RNA, 23 nt, Human adenovirus D
uagaugggcuccgagaagaugcc

SEQ ID NO: 3927882 - RNA, 14 nt, Human adenovirus D
uagcaaggugcuga

SEQ ID NO: 3927883 - RNA, 16 nt, Human adenovirus D
uagccagaccaagcug

SEQ ID NO: 3927884 - RNA, 14 nt, Human adenovirus D
uagcuacuuucaca

SEQ ID NO: 3927885 - RNA, 18 nt, Human adenovirus D
uaggaaccagcacacuca

SEQ ID NO: 3927886 - RNA, 18 nt, Human adenovirus D
uagguuugaguagugggc

SEQ ID NO: 3927887 - RNA, 14 nt, Human adenovirus D
uagucaaucuccca

SEQ ID NO: 3927888 - RNA, 20 nt, Human adenovirus D
uagucccgaauacagggacg

SEQ ID NO: 3927889 - RNA, 20 nt, Human adenovirus D
uaguguacaacgcccugcug

SEQ ID NO: 3927890 - RNA, 16 nt, Human adenovirus D
uaguugaggguggugg

SEQ ID NO: 3927891 - RNA, 15 nt, Human adenovirus D
uauaaaucuuacaca

SEQ ID NO: 3927892 - RNA, 13 nt, Human adenovirus D
uauaauaagcaga

SEQ ID NO: 3927893 - RNA, 14 nt, Human adenovirus D
uaucagacaugcug

SEQ ID NO: 3927894 - RNA, 22 nt, Human adenovirus D
uauccagccuguacccagagcu

SEQ ID NO: 3927895 - RNA, 12 nt, Human adenovirus D
uauccccuuccu

SEQ ID NO: 3927896 - RNA, 14 nt, Human adenovirus D
uaucuaugaaagca

SEQ ID NO: 3927897 - RNA, 18 nt, Human adenovirus D
uaugacacgcgcacacuu

SEQ ID NO: 3927898 - RNA, 21 nt, Human adenovirus D
uaugacacgcgcacacuuugg

SEQ ID NO: 3927899 - RNA, 13 nt, Human adenovirus D
uaugaucccaaca

SEQ ID NO: 3927900 - RNA, 11 nt, Human adenovirus D
uaugccagggu

SEQ ID NO: 3927901 - RNA, 21 nt, Human adenovirus D
uaugguacuaaugacagaggc

SEQ ID NO: 3927902 - RNA, 12 nt, Human adenovirus D
uauuuccucugu

SEQ ID NO: 3927903 - RNA, 15 nt, Human adenovirus D
ucaaaaacaaaguga

SEQ ID NO: 3927904 - RNA, 19 nt, Human adenovirus D
ucaaacccuacucgggcac

SEQ ID NO: 3927905 - RNA, 16 nt, Human adenovirus D
ucaaagugugaaaauu

SEQ ID NO: 3927906 - RNA, 18 nt, Human adenovirus D
ucaacaaccaugugcgca

SEQ ID NO: 3927907 - RNA, 12 nt, Human adenovirus D
ucaagaaccugc

SEQ ID NO: 3927908 - RNA, 16 nt, Human adenovirus D
ucaagacaaaauucca

SEQ ID NO: 3927909 - RNA, 14 nt, Human adenovirus D
ucaagcugggcugg

SEQ ID NO: 3927910 - RNA, 19 nt, Human adenovirus D
ucaaggacaugcagcugcc

SEQ ID NO: 3927911 - RNA, 16 nt, Human adenovirus D
ucaaguaggugaagaa

SEQ ID NO: 3927912 - RNA, 14 nt, Human adenovirus D
ucaagugccacaug

SEQ ID NO: 3927913 - RNA, 18 nt, Human adenovirus D
ucaauaagguucugcccu

SEQ ID NO: 3927914 - RNA, 18 nt, Human adenovirus D
ucaaucucccaccaccag

SEQ ID NO: 3927915 - RNA, 21 nt, Human adenovirus D
ucaauguaacuaaacuuuaug

SEQ ID NO: 3927916 - RNA, 14 nt, Human adenovirus D
ucacaagucucucu

SEQ ID NO: 3927917 - RNA, 19 nt, Human adenovirus D
ucacaguaagugcagcaca

SEQ ID NO: 3927918 - RNA, 23 nt, Human adenovirus D
ucacaguuauaccaccuccuccu

SEQ ID NO: 3927919 - RNA, 15 nt, Human adenovirus D
ucacaucagccagga

SEQ ID NO: 3927920 - RNA, 13 nt, Human adenovirus D
ucacauuaaaggc

SEQ ID NO: 3927921 - RNA, 23 nt, Human adenovirus D
ucaccauguuauucagcagccca

SEQ ID NO: 3927922 - RNA, 12 nt, Human adenovirus D
ucacccagcagu

SEQ ID NO: 3927923 - RNA, 15 nt, Human adenovirus D
ucacccgcaguugcu

SEQ ID NO: 3927924 - RNA, 21 nt, Human adenovirus D
ucaccggcuaccuugcaccca

SEQ ID NO: 3927925 - RNA, 23 nt, Human adenovirus D
ucaccugcaccugcgucugcagc

SEQ ID NO: 3927926 - RNA, 13 nt, Human adenovirus D
ucacgcaggugac

SEQ ID NO: 3927927 - RNA, 23 nt, Human adenovirus D
ucacggccuuguagggacagcag

SEQ ID NO: 3927928 - RNA, 15 nt, Human adenovirus D
ucacggugaaggggu

SEQ ID NO: 3927929 - RNA, 17 nt, Human adenovirus D
ucacucaaacuggcuga

SEQ ID NO: 3927930 - RNA, 18 nt, Human adenovirus D
ucacucuggccgugggcg

SEQ ID NO: 3927931 - RNA, 15 nt, Human adenovirus D
ucacucuuuccagca

SEQ ID NO: 3927932 - RNA, 16 nt, Human adenovirus D
ucacucuuuccagcag

SEQ ID NO: 3927933 - RNA, 20 nt, Human adenovirus D
ucacugaaggaaaaaucacu

SEQ ID NO: 3927934 - RNA, 15 nt, Human adenovirus D
ucagacaugcugcua

SEQ ID NO: 3927935 - RNA, 13 nt, Human adenovirus D
ucagagccagggc

SEQ ID NO: 3927936 - RNA, 17 nt, Human adenovirus D
ucagcaguagccccgcc

SEQ ID NO: 3927937 - RNA, 15 nt, Human adenovirus D
ucagcaucagucucc

SEQ ID NO: 3927938 - RNA, 24 nt, Human adenovirus D
ucagcauguggaacucugcggugg

SEQ ID NO: 3927939 - RNA, 14 nt, Human adenovirus D
ucagccaggacucu

SEQ ID NO: 3927940 - RNA, 13 nt, Human adenovirus D
ucagccccuuccc

SEQ ID NO: 3927941 - RNA, 18 nt, Human adenovirus D
ucagcgcccucagcaguc

SEQ ID NO: 3927942 - RNA, 21 nt, Human adenovirus D
ucaggcagcggggacagagaa

SEQ ID NO: 3927943 - RNA, 15 nt, Human adenovirus D
ucagguauccagccu

SEQ ID NO: 3927944 - RNA, 18 nt, Human adenovirus D
ucaggugccugccccuca

SEQ ID NO: 3927945 - RNA, 20 nt, Human adenovirus D
ucauagcaggggcgcugggc

SEQ ID NO: 3927946 - RNA, 15 nt, Human adenovirus D
ucaucaaucaucagg

SEQ ID NO: 3927947 - RNA, 13 nt, Human adenovirus D
ucaucacccagca

SEQ ID NO: 3927948 - RNA, 21 nt, Human adenovirus D
ucaucgcgccacuggccacgg

SEQ ID NO: 3927949 - RNA, 15 nt, Human adenovirus D
ucaucucgcccagca

SEQ ID NO: 3927950 - RNA, 18 nt, Human adenovirus D
ucaucugcagggcgccca

SEQ ID NO: 3927951 - RNA, 23 nt, Human adenovirus D
ucaucugcagggcgcccagcaug

SEQ ID NO: 3927952 - RNA, 17 nt, Human adenovirus D
ucaugaccagcaugaag

SEQ ID NO: 3927953 - RNA, 17 nt, Human adenovirus D
ucaugcaacuuggaagg

SEQ ID NO: 3927954 - RNA, 11 nt, Human adenovirus D
ucaugcaagac

SEQ ID NO: 3927955 - RNA, 11 nt, Human adenovirus D
ucauggcccug

SEQ ID NO: 3927956 - RNA, 16 nt, Human adenovirus D
uccaacgccugcgcca

SEQ ID NO: 3927957 - RNA, 19 nt, Human adenovirus D
uccaacguggagcugacca

SEQ ID NO: 3927958 - RNA, 20 nt, Human adenovirus D
uccacgcugguggccaccuc

SEQ ID NO: 3927959 - RNA, 23 nt, Human adenovirus D
uccacggggaccacguccucucg

SEQ ID NO: 3927960 - RNA, 19 nt, Human adenovirus D
uccacuccgcacauguuga

SEQ ID NO: 3927961 - RNA, 13 nt, Human adenovirus D
uccagcaacuuca

SEQ ID NO: 3927962 - RNA, 18 nt, Human adenovirus D
uccagcagagucugccgc

SEQ ID NO: 3927963 - RNA, 13 nt, Human adenovirus D
cgcgugguagccc

SEQ ID NO: 3927964 - RNA, 23 nt, Human adenovirus D
cgcguguugcggcccggcacggc

SEQ ID NO: 3927965 - RNA, 14 nt, Human adenovirus D
cgcuaccgcuucca

SEQ ID NO: 3927966 - RNA, 21 nt, Human adenovirus D
cgcuacugcugauuacucuaa

SEQ ID NO: 3927967 - RNA, 19 nt, Human adenovirus D
cgcucagucauccaacuga

SEQ ID NO: 3927968 - RNA, 22 nt, Human adenovirus D
cgcuccaugaaccggcgcacgu

SEQ ID NO: 3927969 - RNA, 21 nt, Human adenovirus D
cgcuccaugcuucugggcaac

SEQ ID NO: 3927970 - RNA, 15 nt, Human adenovirus D
cgcucccaccgcgcc

SEQ ID NO: 3927971 - RNA, 15 nt, Human adenovirus D
cgcucgcgcaccugc

SEQ ID NO: 3927972 - RNA, 16 nt, Human adenovirus D
cgcucgcgcaccugcu

SEQ ID NO: 3927973 - RNA, 13 nt, Human adenovirus D
cgcucgcucaccc

SEQ ID NO: 3927974 - RNA, 20 nt, Human adenovirus D
cgcucuuaucccaugcccuc

SEQ ID NO: 3927975 - RNA, 19 nt, Human adenovirus D
cgcucuugucgcugaucug

SEQ ID NO: 3927976 - RNA, 13 nt, Human adenovirus D
cgcugaaagcaug

SEQ ID NO: 3927977 - RNA, 22 nt, Human adenovirus D
cgcugcaaccugugcucuccgc

SEQ ID NO: 3927978 - RNA, 21 nt, Human adenovirus D
cgcuggaagaccuacgcucag

SEQ ID NO: 3927979 - RNA, 17 nt, Human adenovirus D
cgcuggaccccauggac

SEQ ID NO: 3927980 - RNA, 21 nt, Human adenovirus D
cgcuggcggagaacaaggcca

SEQ ID NO: 3927981 - RNA, 23 nt, Human adenovirus D
cgcugggcucgagcauggcuacc

SEQ ID NO: 3927982 - RNA, 17 nt, Human adenovirus D
cgcuggggcugcucggc

SEQ ID NO: 3927983 - RNA, 19 nt, Human adenovirus D
ccaggagccugaugagcuc

SEQ ID NO: 3927984 - RNA, 10 nt, Human adenovirus D
ccaggaggag

SEQ ID NO: 3927985 - RNA, 16 nt, Human adenovirus D
ccaggcaaagcucaac

SEQ ID NO: 3927986 - RNA, 13 nt, Human adenovirus D
ccaggcagugcag

SEQ ID NO: 3927987 - RNA, 16 nt, Human adenovirus D
ccaggcagugcagcgc

SEQ ID NO: 3927988 - RNA, 17 nt, Human adenovirus D
ccaggcagugcagcgcg

SEQ ID NO: 3927989 - RNA, 17 nt, Human adenovirus D
ccaggcccagaacuggc

SEQ ID NO: 3927990 - RNA, 22 nt, Human adenovirus D
ccaggguugagucgcggcagaa

SEQ ID NO: 3927991 - RNA, 18 nt, Human adenovirus D
ccaggucaaaacccacuc

SEQ ID NO: 3927992 - RNA, 20 nt, Human adenovirus D
ccaggucacagucuggugga

SEQ ID NO: 3927993 - RNA, 23 nt, Human adenovirus D
ccagguccacgcugguggccacc

SEQ ID NO: 3927994 - RNA, 21 nt, Human adenovirus D
ccaguagacaaagagcacagc

SEQ ID NO: 3927995 - RNA, 22 nt, Human adenovirus D
ccaguagacaaagagcacagca

SEQ ID NO: 3927996 - RNA, 23 nt, Human adenovirus D
ccaguagacaaagagcacagcag

SEQ ID NO: 3927997 - RNA, 17 nt, Human adenovirus D
ccaguaggaaccagcac

SEQ ID NO: 3927998 - RNA, 22 nt, Human adenovirus D
ccagucccuuuuccaggaaagg

SEQ ID NO: 3927999 - RNA, 15 nt, Human adenovirus D
ccagugcuuccagca

SEQ ID NO: 3928000 - RNA, 23 nt, Human adenovirus D
ccaucaagcagguggcgccgggc

SEQ ID NO: 3928001 - RNA, 15 nt, Human adenovirus D
ccauccccauccagu

SEQ ID NO: 3928002 - RNA, 20 nt, Human adenovirus D
ccaucgugcgcgaccugggc

SEQ ID NO: 3928003 - RNA, 17 nt, Human adenovirus D
ccaucuaaacuaaagcc

SEQ ID NO: 3928004 - RNA, 19 nt, Human adenovirus D
ccaugcagaucauggugcc

SEQ ID NO: 3928005 - RNA, 23 nt, Human adenovirus D
ccauggacgggaaccccaccaug

SEQ ID NO: 3928006 - RNA, 22 nt, Human adenovirus D
ccauggcgcacaacaccgccuc

SEQ ID NO: 3928007 - RNA, 21 nt, Human adenovirus D
ccaugggcgccuucaccgacc

SEQ ID NO: 3928008 - RNA, 14 nt, Human adenovirus D
ccauguuggaggaa

SEQ ID NO: 3928009 - RNA, 20 nt, Human adenovirus D
ccauuaucccgacgccgggc

SEQ ID NO: 3928010 - RNA, 14 nt, Human adenovirus D
ccauuccuggagau

SEQ ID NO: 3928011 - RNA, 13 nt, Human adenovirus D
cccaacggcccug

SEQ ID NO: 3928012 - RNA, 18 nt, Human adenovirus D
cccaacuacguguugcau

SEQ ID NO: 3928013 - RNA, 15 nt, Human adenovirus D
cccaagagcgagaug

SEQ ID NO: 3928014 - RNA, 14 nt, Human adenovirus D
cccaccgcgccgcc

SEQ ID NO: 3928015 - RNA, 15 nt, Human adenovirus D
cccacgccgagccug

SEQ ID NO: 3928016 - RNA, 13 nt, Human adenovirus D
cccacggccaucu

SEQ ID NO: 3928017 - RNA, 17 nt, Human adenovirus D
cccacuacaacaucggc

SEQ ID NO: 3928018 - RNA, 16 nt, Human adenovirus D
cccacuacucagcuuc

SEQ ID NO: 3928019 - RNA, 21 nt, Human adenovirus D
cccacuucgccuaccccgccg

SEQ ID NO: 3928020 - RNA, 21 nt, Human adenovirus D
cccagagcuuagcaaggugcu

SEQ ID NO: 3928021 - RNA, 14 nt, Human adenovirus D
cccagcaacccuuc

SEQ ID NO: 3928022 - RNA, 22 nt, Human adenovirus D
cccagcaacccuuccuggucga

SEQ ID NO: 3928023 - RNA, 23 nt, Human adenovirus D
cccagcaauaacaccggcugggg

SEQ ID NO: 3928024 - RNA, 15 nt, Human adenovirus D
cccagcgaucccagc

SEQ ID NO: 3928025 - RNA, 17 nt, Human adenovirus D
cccagcguaagcgcgcg

SEQ ID NO: 3928026 - RNA, 17 nt, Human adenovirus D
cccagcucauccgcagc

SEQ ID NO: 3928027 - RNA, 19 nt, Human adenovirus D
cccaggaaacuaggcgcag

SEQ ID NO: 3928028 - RNA, 16 nt, Human adenovirus D
cccaggccuggcccug

SEQ ID NO: 3928029 - RNA, 13 nt, Human adenovirus D
cccaggcggugcu

SEQ ID NO: 3928030 - RNA, 17 nt, Human adenovirus D
cccaggcggugcugcug

SEQ ID NO: 3928031 - RNA, 15 nt, Human adenovirus D
cccagugcuuccagc

SEQ ID NO: 3928032 - RNA, 17 nt, Human adenovirus D
cccaugagcugcgagaa

SEQ ID NO: 3928033 - RNA, 15 nt, Human adenovirus D
cccauuucacagugu

SEQ ID NO: 3928034 - RNA, 18 nt, Human adenovirus D
ccccagaaagaaguggcc

SEQ ID NO: 3928035 - RNA, 19 nt, Human adenovirus D
ccccagaugggccuggccg

SEQ ID NO: 3928036 - RNA, 20 nt, Human adenovirus D
ccccaggcggugcugcugcc

SEQ ID NO: 3928037 - RNA, 22 nt, Human adenovirus D
cccccaggcccuggagcagcgg

SEQ ID NO: 3928038 - RNA, 23 nt, Human adenovirus D
cccccaggcccuggagcagcggc

SEQ ID NO: 3928039 - RNA, 23 nt, Human adenovirus D
ccccccucagcgucgaggagcug

SEQ ID NO: 3928040 - RNA, 22 nt, Human adenovirus D
ccccgcaggcaggacucgcaga

SEQ ID NO: 3928041 - RNA, 11 nt, Human adenovirus D
ccccgccgggu

SEQ ID NO: 3928042 - RNA, 23 nt, Human adenovirus D
ccccggacgucaccugcggcgcg

SEQ ID NO: 3928043 - RNA, 22 nt, Human adenovirus D
ccccucgaaucaggcuggagcc

SEQ ID NO: 3928044 - RNA, 23 nt, Human adenovirus D
ccccucgaaucaggcuggagccg

SEQ ID NO: 3928045 - RNA, 20 nt, Human adenovirus D
ccccuucaaccaccaccgca

SEQ ID NO: 3928046 - RNA, 22 nt, Human adenovirus D
ccccuucucgggaucgccaggc

SEQ ID NO: 3928047 - RNA, 15 nt, Human adenovirus D
cccgaccgcugucuc

SEQ ID NO: 3928048 - RNA, 15 nt, Human adenovirus D
cccgagcucugcugc

SEQ ID NO: 3928049 - RNA, 16 nt, Human adenovirus D
cccgagcucugcugcg

SEQ ID NO: 3928050 - RNA, 19 nt, Human adenovirus D
cccgagcucugcugcgccg

SEQ ID NO: 3928051 - RNA, 13 nt, Human adenovirus D
cccgcagcacgcg

SEQ ID NO: 3928052 - RNA, 22 nt, Human adenovirus D
cccgcaugaacuggcucagugc

SEQ ID NO: 3928053 - RNA, 12 nt, Human adenovirus D
cccgccacccuu

SEQ ID NO: 3928054 - RNA, 13 nt, Human adenovirus D
cccgccaccugca

SEQ ID NO: 3928055 - RNA, 20 nt, Human adenovirus D
cccgccauaagggcggcgcu

SEQ ID NO: 3928056 - RNA, 20 nt, Human adenovirus D
cccgccgcuaucugcucuuc

SEQ ID NO: 3928057 - RNA, 15 nt, Human adenovirus D
cccgcgcccaccauc

SEQ ID NO: 3928058 - RNA, 17 nt, Human adenovirus D
cccggcauccugcacgc

SEQ ID NO: 3928059 - RNA, 17 nt, Human adenovirus D
cccggccaaggccacca

SEQ ID NO: 3928060 - RNA, 21 nt, Human adenovirus D
cccggcgcaguacgcgcuguc

SEQ ID NO: 3928061 - RNA, 14 nt, Human adenovirus D
cccggcggcagcgg

SEQ ID NO: 3928062 - RNA, 20 nt, Human adenovirus D
cccggggcggaguggccucu

SEQ ID NO: 3928063 - RNA, 13 nt, Human adenovirus D
cccguccuccucg

SEQ ID NO: 3928064 - RNA, 13 nt, Human adenovirus D
cccgucuccugcc

SEQ ID NO: 3928065 - RNA, 17 nt, Human adenovirus D
cccgugaccugcagcag

SEQ ID NO: 3928066 - RNA, 20 nt, Human adenovirus D
cccucaggcgcaaccaggag

SEQ ID NO: 3928067 - RNA, 22 nt, Human adenovirus D
cccuccccgacccccuuccacu

SEQ ID NO: 3928068 - RNA, 16 nt, Human adenovirus D
cccuccgcccugagcu

SEQ ID NO: 3928069 - RNA, 19 nt, Human adenovirus D
cccucgaaucaggcuggag

SEQ ID NO: 3928070 - RNA, 20 nt, Human adenovirus D
cccucgcgcaacugggccgc

SEQ ID NO: 3928071 - RNA, 21 nt, Human adenovirus D
cccucgcgcaacugggccgcu

SEQ ID NO: 3928072 - RNA, 21 nt, Human adenovirus D
cccucggcaacgaccugcgcg

SEQ ID NO: 3928073 - RNA, 17 nt, Human adenovirus D
cccucucgagagcgggc

SEQ ID NO: 3928074 - RNA, 20 nt, Human adenovirus D
cccugaacuaucaaaacgac

SEQ ID NO: 3928075 - RNA, 19 nt, Human adenovirus D
cccugagagcgcuggcgug

SEQ ID NO: 3928076 - RNA, 16 nt, Human adenovirus D
cccugagcggcugcac

SEQ ID NO: 3928077 - RNA, 17 nt, Human adenovirus D
cccugcaagugcacaga

SEQ ID NO: 3928078 - RNA, 15 nt, Human adenovirus D
cccuggagguuccgu

SEQ ID NO: 3928079 - RNA, 14 nt, Human adenovirus D
cccugguccaccuc

SEQ ID NO: 3928080 - RNA, 22 nt, Human adenovirus D
cccuucucgggaucgccaggcc

SEQ ID NO: 3928081 - RNA, 22 nt, Human adenovirus D
ccgaaauuggugcgcuggggcu

SEQ ID NO: 3928082 - RNA, 19 nt, Human adenovirus D
ccgaagcgccguggccucu

SEQ ID NO: 3928083 - RNA, 13 nt, Human adenovirus D
ccgaaggacccca

SEQ ID NO: 3928084 - RNA, 12 nt, Human adenovirus D
ccgacacugcag

SEQ ID NO: 3928085 - RNA, 14 nt, Human adenovirus D
ccgacagcagcaca

SEQ ID NO: 3928086 - RNA, 22 nt, Human adenovirus D
ccgacuuugucccgcugagcua

SEQ ID NO: 3928087 - RNA, 22 nt, Human adenovirus D
ccgagcuccgcgaacagcagca

SEQ ID NO: 3928088 - RNA, 14 nt, Human adenovirus D
ccgaggaagauccc

SEQ ID NO: 3928089 - RNA, 20 nt, Human adenovirus D
ccgaggagcugagaccagac

SEQ ID NO: 3928090 - RNA, 16 nt, Human adenovirus D
ccgaggaggcgguccc

SEQ ID NO: 3928091 - RNA, 16 nt, Human adenovirus D
ccgagggucgcuggcu

SEQ ID NO: 3928092 - RNA, 15 nt, Human adenovirus D
ccgaguuguccuggu

SEQ ID NO: 3928093 - RNA, 20 nt, Human adenovirus D
ccgauggucgcuggacccca

SEQ ID NO: 3928094 - RNA, 14 nt, Human adenovirus D
ccgcaacuuccagc

SEQ ID NO: 3928095 - RNA, 15 nt, Human adenovirus D
ccgcaacuuccagcc

SEQ ID NO: 3928096 - RNA, 13 nt, Human adenovirus D
ccgcaccgcuccu

SEQ ID NO: 3928097 - RNA, 16 nt, Human adenovirus D
ccgcagccgcggcagc

SEQ ID NO: 3928098 - RNA, 14 nt, Human adenovirus D
ccgcagcucuuccc

SEQ ID NO: 3928099 - RNA, 13 nt, Human adenovirus D
ccgccaaccggcu

SEQ ID NO: 3928100 - RNA, 17 nt, Human adenovirus D
ccgccaaggagcuccuc

SEQ ID NO: 3928101 - RNA, 21 nt, Human adenovirus D
aaaucugaaaguaugucucug

SEQ ID NO: 3928102 - RNA, 17 nt, Human adenovirus D
aaaugcuaccugggagu

SEQ ID NO: 3928103 - RNA, 11 nt, Human adenovirus D
aacaaggccau

SEQ ID NO: 3928104 - RNA, 15 nt, Human adenovirus D
aacaauaugugcgca

SEQ ID NO: 3928105 - RNA, 20 nt, Human adenovirus D
aacaaucagccccuuccccu

SEQ ID NO: 3928106 - RNA, 13 nt, Human adenovirus D
aacagacagccag

SEQ ID NO: 3928107 - RNA, 18 nt, Human adenovirus D
aacagcaaaagauacaga

SEQ ID NO: 3928108 - RNA, 15 nt, Human adenovirus D
aacaugcucuacccc

SEQ ID NO: 3928109 - RNA, 16 nt, Human adenovirus D
aaccggaggcuggcug

SEQ ID NO: 3928110 - RNA, 23 nt, Human adenovirus D
aaccugcgcgggcuguggggcgu

SEQ ID NO: 3928111 - RNA, 21 nt, Human adenovirus D
aaccugugcucuccgcaccgc

SEQ ID NO: 3928112 - RNA, 14 nt, Human adenovirus D
aacgcgcgcugccc

SEQ ID NO: 3928113 - RNA, 13 nt, Human adenovirus D
aacggcaccugcg

SEQ ID NO: 3928114 - RNA, 12 nt, Human adenovirus D
aacuaaagccaa

SEQ ID NO: 3928115 - RNA, 22 nt, Human adenovirus D
aacuaucaaaacgaccacagca

SEQ ID NO: 3928116 - RNA, 15 nt, Human adenovirus D
aacucagucacucuc

SEQ ID NO: 3928117 - RNA, 21 nt, Human adenovirus D
aacucugauucaugugaacaa

SEQ ID NO: 3928118 - RNA, 21 nt, Human adenovirus D
aacugcgcguccgucagcagc

SEQ ID NO: 3928119 - RNA, 12 nt, Human adenovirus D
aacuuaacucug

SEQ ID NO: 3928120 - RNA, 19 nt, Human adenovirus D
aacuugugguuuuaacagg

SEQ ID NO: 3928121 - RNA, 18 nt, Human adenovirus D
aagaaacgucccagcagc

SEQ ID NO: 3928122 - RNA, 19 nt, Human adenovirus D
aagaaacgucccagcagca

SEQ ID NO: 3928123 - RNA, 16 nt, Human adenovirus D
aagaaguuagaggagg

SEQ ID NO: 3928124 - RNA, 15 nt, Human adenovirus D
aagacccacagccag

SEQ ID NO: 3928125 - RNA, 21 nt, Human adenovirus D
aagacgaaugggaagaagaga

SEQ ID NO: 3928126 - RNA, 15 nt, Human adenovirus D
aagagcccuuuuugc

SEQ ID NO: 3928127 - RNA, 20 nt, Human adenovirus D
aagaggcuccggguggaaga

SEQ ID NO: 3928128 - RNA, 13 nt, Human adenovirus D
aagaucagcugca

SEQ ID NO: 3928129 - RNA, 22 nt, Human adenovirus D
aagaugauaccaagagaaguua

SEQ ID NO: 3928130 - RNA, 17 nt, Human adenovirus D
aagcaaccuuuccaaga

SEQ ID NO: 3928131 - RNA, 17 nt, Human adenovirus D
aagcaggagcaggagga

SEQ ID NO: 3928132 - RNA, 15 nt, Human adenovirus D
aagccacaaccagag

SEQ ID NO: 3928133 - RNA, 12 nt, Human adenovirus D
aagccagcagca

SEQ ID NO: 3928134 - RNA, 20 nt, Human adenovirus D
aagccaggaaaagaggauga

SEQ ID NO: 3928135 - RNA, 20 nt, Human adenovirus D
aagcuaaugguccugcaaga

SEQ ID NO: 3928136 - RNA, 11 nt, Human adenovirus D
aagcugggcug

SEQ ID NO: 3928137 - RNA, 13 nt, Human adenovirus D
aagcugggcuggg

SEQ ID NO: 3928138 - RNA, 23 nt, Human adenovirus D
aaggauucaaaacucacuuuggu

SEQ ID NO: 3928139 - RNA, 15 nt, Human adenovirus D
aaggcucauaugacc

SEQ ID NO: 3928140 - RNA, 23 nt, Human adenovirus D
aagggauauagucuaugggaaca

SEQ ID NO: 3928141 - RNA, 15 nt, Human adenovirus D
aagggcggcgcugca

SEQ ID NO: 3928142 - RNA, 12 nt, Human adenovirus D
aaggggcgcagg

SEQ ID NO: 3928143 - RNA, 19 nt, Human adenovirus D
aaggugcugacauccaugg

SEQ ID NO: 3928144 - RNA, 14 nt, Human adenovirus D
aaggugugguuuau

SEQ ID NO: 3928145 - RNA, 13 nt, Human adenovirus D
aagguucugcccu

SEQ ID NO: 3928146 - RNA, 15 nt, Human adenovirus D
aaguacacgccggcc

SEQ ID NO: 3928147 - RNA, 19 nt, Human adenovirus D
aaguacuacugaacagaca

SEQ ID NO: 3928148 - RNA, 14 nt, Human adenovirus D
aaguaggugaagaa

SEQ ID NO: 3928149 - RNA, 21 nt, Human adenovirus D
aagucacuaggaccccaggga

SEQ ID NO: 3928150 - RNA, 22 nt, Human adenovirus D
aagucacuuaaguccugggcca

SEQ ID NO: 3928151 - RNA, 23 nt, Human adenovirus D
aagugccacaugcaccugggcgc

SEQ ID NO: 3928152 - RNA, 13 nt, Human adenovirus D
aauaacaugcuga

SEQ ID NO: 3928153 - RNA, 18 nt, Human adenovirus D
aauaucagacaugcugcu

SEQ ID NO: 3928154 - RNA, 12 nt, Human adenovirus D
aauauggccugg

SEQ ID NO: 3928155 - RNA, 18 nt, Human adenovirus D
aauaugggagagaacaaa

SEQ ID NO: 3928156 - RNA, 20 nt, Human adenovirus D
aauaugggagagaacaaaac

SEQ ID NO: 3928157 - RNA, 12 nt, Human adenovirus D
aauccacacagu

SEQ ID NO: 3928158 - RNA, 13 nt, Human adenovirus D
aauccuccaggac

SEQ ID NO: 3928159 - RNA, 21 nt, Human adenovirus D
aaucgagcaggaccugggcuu

SEQ ID NO: 3928160 - RNA, 15 nt, Human adenovirus D
aauuaugcuccuggg

SEQ ID NO: 3928161 - RNA, 16 nt, Human adenovirus D
aauucagggugcucca

SEQ ID NO: 3928162 - RNA, 13 nt, Human adenovirus D
aauucucaaagug

SEQ ID NO: 3928163 - RNA, 16 nt, Human adenovirus D
aauucucauuuuucca

SEQ ID NO: 3928164 - RNA, 14 nt, Human adenovirus D
aauuuuuauuuccu

SEQ ID NO: 3928165 - RNA, 17 nt, Human adenovirus D
acaaagcugaaagcuau

SEQ ID NO: 3928166 - RNA, 17 nt, Human adenovirus D
acaacaagauucaauaa

SEQ ID NO: 3928167 - RNA, 20 nt, Human adenovirus D
acaacaucggcuaccagggc

SEQ ID NO: 3928168 - RNA, 12 nt, Human adenovirus D
acaaggccugga

SEQ ID NO: 3928169 - RNA, 15 nt, Human adenovirus D
acaaguuuaggaacc

SEQ ID NO: 3928170 - RNA, 17 nt, Human adenovirus D
acaaucagccccuuccc

SEQ ID NO: 3928171 - RNA, 19 nt, Human adenovirus D
acaaucagccccuuccccu

SEQ ID NO: 3928172 - RNA, 23 nt, Human adenovirus D
acaaugauggauacuugguagca

SEQ ID NO: 3928173 - RNA, 15 nt, Human adenovirus D
acacacgcccugggu

SEQ ID NO: 3928174 - RNA, 14 nt, Human adenovirus D
acacccaacugagc

SEQ ID NO: 3928175 - RNA, 19 nt, Human adenovirus D
acaccugugacaugcaaaa

SEQ ID NO: 3928176 - RNA, 16 nt, Human adenovirus D
acacggucacugucca

SEQ ID NO: 3928177 - RNA, 17 nt, Human adenovirus D
acacgguucucucagca

SEQ ID NO: 3928178 - RNA, 18 nt, Human adenovirus D
acacuagaaagcaguuca

SEQ ID NO: 3928179 - RNA, 20 nt, Human adenovirus D
acacuuccuucgcagucucc

SEQ ID NO: 3928180 - RNA, 21 nt, Human adenovirus D
acacuuccuucgcagucucca

SEQ ID NO: 3928181 - RNA, 12 nt, Human adenovirus D
acagaaagcaug

SEQ ID NO: 3928182 - RNA, 14 nt, Human adenovirus D
acagacagccaggu

SEQ ID NO: 3928183 - RNA, 13 nt, Human adenovirus D
acagcacagcagg

SEQ ID NO: 3928184 - RNA, 17 nt, Human adenovirus D
acagcaggagugcaggg

SEQ ID NO: 3928185 - RNA, 18 nt, Human adenovirus D
acagcaggagugcaggga

SEQ ID NO: 3928186 - RNA, 23 nt, Human adenovirus D
acagcaguacaagcgccaacagc

SEQ ID NO: 3928187 - RNA, 23 nt, Human adenovirus D
acagccuucagcaucagucuccu

SEQ ID NO: 3928188 - RNA, 16 nt, Human adenovirus D
acagcgacgagacugg

SEQ ID NO: 3928189 - RNA, 14 nt, Human adenovirus D
acaggaggcacaga

SEQ ID NO: 3928190 - RNA, 18 nt, Human adenovirus D
acaggaugggucugugcc

SEQ ID NO: 3928191 - RNA, 20 nt, Human adenovirus D
aaauacagaugguagcagca

SEQ ID NO: 3928192 - RNA, 19 nt, Human adenovirus D
aaauccacuccgcacaugu

SEQ ID NO: 3928193 - RNA, 22 nt, Human adenovirus D
aaaucugcccugauauccagua

SEQ ID NO: 3928194 - RNA, 15 nt, Human adenovirus D
aaaucuuacacauga

SEQ ID NO: 3928195 - RNA, 22 nt, Human adenovirus D
aaaugaagccguccucugaaaa

SEQ ID NO: 3928196 - RNA, 23 nt, Human adenovirus D
aaauuguugguguaaauccacuc

SEQ ID NO: 3928197 - RNA, 12 nt, Human adenovirus D
aacacacugccc

SEQ ID NO: 3928198 - RNA, 22 nt, Human adenovirus D
aacaggagccgcuaguggaaga

SEQ ID NO: 3928199 - RNA, 14 nt, Human adenovirus D
aacaguacuggcaa

SEQ ID NO: 3928200 - RNA, 16 nt, Human adenovirus D
aacaucaccacaggca

SEQ ID NO: 3928201 - RNA, 19 nt, Human adenovirus D
aacauccccgcccugcugg

SEQ ID NO: 3928202 - RNA, 15 nt, Human adenovirus D
aacaucugugcugcc

SEQ ID NO: 3928203 - RNA, 14 nt, Human adenovirus D
aaccaaaaaaaaca

SEQ ID NO: 3928204 - RNA, 13 nt, Human adenovirus D
aacccaugaaaga

SEQ ID NO: 3928205 - RNA, 15 nt, Human adenovirus D
aaccccacaggauga

SEQ ID NO: 3928206 - RNA, 22 nt, Human adenovirus D
aacccgcgcucgcgcaccugcu

SEQ ID NO: 3928207 - RNA, 11 nt, Human adenovirus D
aacccugguga

SEQ ID NO: 3928208 - RNA, 13 nt, Human adenovirus D
aaccgccuggggc

SEQ ID NO: 3928209 - RNA, 14 nt, Human adenovirus D
aaccugcgcgggcu

SEQ ID NO: 3928210 - RNA, 17 nt, Human adenovirus D
aaccuuuggaccugagc

SEQ ID NO: 3928211 - RNA, 19 nt, Human adenovirus D
aacgacgaguuggugagcu

SEQ ID NO: 3928212 - RNA, 23 nt, Human adenovirus D
aacgaggcguucagggaggcgcu

SEQ ID NO: 3928213 - RNA, 13 nt, Human adenovirus D
aacgcccugcugg

SEQ ID NO: 3928214 - RNA, 14 nt, Human adenovirus D
aacgucccagcagc

SEQ ID NO: 3928215 - RNA, 20 nt, Human adenovirus D
aacuacuggcuucuacagcc

SEQ ID NO: 3928216 - RNA, 16 nt, Human adenovirus D
aacucagucacucuca

SEQ ID NO: 3928217 - RNA, 17 nt, Human adenovirus D
aacucgcggcugcugcu

SEQ ID NO: 3928218 - RNA, 22 nt, Human adenovirus D
aacucugauucaugugaacaaa

SEQ ID NO: 3928219 - RNA, 14 nt, Human adenovirus D
aacucuuaaaucau

SEQ ID NO: 3928220 - RNA, 16 nt, Human adenovirus D
aacugaugaaaaagcu

SEQ ID NO: 3928221 - RNA, 22 nt, Human adenovirus D
aacugcgcguccgucagcagca

SEQ ID NO: 3928222 - RNA, 11 nt, Human adenovirus D
aacugcuggcc

SEQ ID NO: 3928223 - RNA, 18 nt, Human adenovirus D
aacugcuggcccugcugg

SEQ ID NO: 3928224 - RNA, 22 nt, Human adenovirus D
aacugcuggcccugcuggccga

SEQ ID NO: 3928225 - RNA, 17 nt, Human adenovirus D
aacuuaguuuaaaagua

SEQ ID NO: 3928226 - RNA, 22 nt, Human adenovirus D
aagaagggcaucuucugccugg

SEQ ID NO: 3928227 - RNA, 20 nt, Human adenovirus D
aagaaucacauuaaaggcug

SEQ ID NO: 3928228 - RNA, 13 nt, Human adenovirus D
aagacccacagcc

SEQ ID NO: 3928229 - RNA, 15 nt, Human adenovirus D
aagaccgugaauauc

SEQ ID NO: 3928230 - RNA, 21 nt, Human adenovirus D
aagaggggcagcaaccuaaag

SEQ ID NO: 3928231 - RNA, 20 nt, Human adenovirus D
aagaucuccaacguggagcu

SEQ ID NO: 3928232 - RNA, 16 nt, Human adenovirus D
aagauggaggagcagc

SEQ ID NO: 3928233 - RNA, 23 nt, Human adenovirus D
aagcagguggcgccgggccuggg

SEQ ID NO: 3928234 - RNA, 22 nt, Human adenovirus D
aagcgccaggaggcggugcgca

SEQ ID NO: 3928235 - RNA, 12 nt, Human adenovirus D
aagcgccguggc

SEQ ID NO: 3928236 - RNA, 17 nt, Human adenovirus D
aagcgcugguugaacau

SEQ ID NO: 3928237 - RNA, 21 nt, Human adenovirus D
aagcuagcacccaaaaacugc

SEQ ID NO: 3928238 - RNA, 14 nt, Human adenovirus D
aagcugccaugggc

SEQ ID NO: 3928239 - RNA, 14 nt, Human adenovirus D
aaggaugaggugga

SEQ ID NO: 3928240 - RNA, 11 nt, Human adenovirus D
aagggcggcgc

SEQ ID NO: 3928241 - RNA, 15 nt, Human adenovirus D
aaggugaaaccagau

SEQ ID NO: 3928242 - RNA, 17 nt, Human adenovirus D
aagucacuuaaguccug

SEQ ID NO: 3928243 - RNA, 15 nt, Human adenovirus D
aagucuacuggucgc

SEQ ID NO: 3928244 - RNA, 23 nt, Human adenovirus D
aauaagcagaguacucauaaaga

SEQ ID NO: 3928245 - RNA, 20 nt, Human adenovirus D
aauacagaugguagcagcag

SEQ ID NO: 3928246 - RNA, 15 nt, Human adenovirus D
aaucaagacaaaauu

SEQ ID NO: 3928247 - RNA, 18 nt, Human adenovirus D
aaucagaguaagaggagu

SEQ ID NO: 3928248 - RNA, 14 nt, Human adenovirus D
aaucgcgggcggcc

SEQ ID NO: 3928249 - RNA, 15 nt, Human adenovirus D
aaucggaucuucccc

SEQ ID NO: 3928250 - RNA, 20 nt, Human adenovirus D
aaucuggcgguaccagggga

SEQ ID NO: 3928251 - RNA, 17 nt, Human adenovirus D
aaugggcccuugaacag

SEQ ID NO: 3928252 - RNA, 16 nt, Human adenovirus D
aaugucagcugcaaaa

SEQ ID NO: 3928253 - RNA, 17 nt, Human adenovirus D
aaugugagugauaaagc

SEQ ID NO: 3928254 - RNA, 14 nt, Human adenovirus D
aauucagagccagg

SEQ ID NO: 3928255 - RNA, 22 nt, Human adenovirus D
acaacaagauucaauaagguuc

SEQ ID NO: 3928256 - RNA, 17 nt, Human adenovirus D
acaacagccgcaggcca

SEQ ID NO: 3928257 - RNA, 21 nt, Human adenovirus D
acaacagccuugcccccaagg

SEQ ID NO: 3928258 - RNA, 17 nt, Human adenovirus D
acaacccgccugccagg

SEQ ID NO: 3928259 - RNA, 16 nt, Human adenovirus D
acaacgccaggcuggc

SEQ ID NO: 3928260 - RNA, 11 nt, Human adenovirus D
acaaggccugg

SEQ ID NO: 3928261 - RNA, 18 nt, Human adenovirus D
acaauaauugaacugccu

SEQ ID NO: 3928262 - RNA, 16 nt, Human adenovirus D
acacaaaaaugaagcc

SEQ ID NO: 3928263 - RNA, 20 nt, Human adenovirus D
acacaugauggagcuuaucu

SEQ ID NO: 3928264 - RNA, 22 nt, Human adenovirus D
acaccaacuuuaucagcgcgcu

SEQ ID NO: 3928265 - RNA, 15 nt, Human adenovirus D
acacccaacugagca

SEQ ID NO: 3928266 - RNA, 21 nt, Human adenovirus D
acacgccaccgcuuuugacaa

SEQ ID NO: 3928267 - RNA, 19 nt, Human adenovirus D
acacgcuguaccgcagcug

SEQ ID NO: 3928268 - RNA, 20 nt, Human adenovirus D
acacgcuguaccgcagcugg

SEQ ID NO: 3928269 - RNA, 15 nt, Human adenovirus D
acacggucacugucc

SEQ ID NO: 3928270 - RNA, 16 nt, Human adenovirus D
acacguagcagcccug

SEQ ID NO: 3928271 - RNA, 15 nt, Human adenovirus D
acacuacuaauucuc

SEQ ID NO: 3928272 - RNA, 18 nt, Human adenovirus D
acacuuaguucagcugca

SEQ ID NO: 3928273 - RNA, 20 nt, Human adenovirus D
acagaacaaaaacagacugg

SEQ ID NO: 3928274 - RNA, 19 nt, Human adenovirus D
acagaaccagauacuucag

SEQ ID NO: 3928275 - RNA, 12 nt, Human adenovirus D
acagacagccag

SEQ ID NO: 3928276 - RNA, 15 nt, Human adenovirus D
acagacccaccccag

SEQ ID NO: 3928277 - RNA, 15 nt, Human adenovirus D
acagcacagcaggga

SEQ ID NO: 3928278 - RNA, 15 nt, Human adenovirus D
acagcaccgccgcag

SEQ ID NO: 3928279 - RNA, 23 nt, Human adenovirus D
acagcaccgccgcagccgcggca

SEQ ID NO: 3928280 - RNA, 14 nt, Human adenovirus D
acagcagcgacuga

SEQ ID NO: 3928281 - RNA, 13 nt, Human adenovirus D
acagcaggagugc

SEQ ID NO: 3928282 - RNA, 14 nt, Human adenovirus D
acagccacaugacc

SEQ ID NO: 3928283 - RNA, 22 nt, Human adenovirus D
acagccgucuggacccgcggcc

SEQ ID NO: 3928284 - RNA, 13 nt, Human adenovirus D
acagccuucagca

SEQ ID NO: 3928285 - RNA, 21 nt, Human adenovirus D
acagccuugcccccaagggcg

SEQ ID NO: 3928286 - RNA, 21 nt, Human adenovirus D
acagcggcagggugagccggc

SEQ ID NO: 3928287 - RNA, 18 nt, Human adenovirus D
acagcuagacaccacagu

SEQ ID NO: 3928288 - RNA, 17 nt, Human adenovirus D
acaggcaaugagaggag

SEQ ID NO: 3928289 - RNA, 20 nt, Human adenovirus D
acaggccuaacuacauuggc

SEQ ID NO: 3928290 - RNA, 23 nt, Human adenovirus D
acaguagcgucucaagagagguu

SEQ ID NO: 3928291 - RNA, 19 nt, Human adenovirus D
acaguauugugggccuggg

SEQ ID NO: 3928292 - RNA, 20 nt, Human adenovirus D
acaguauugugggccuggga

SEQ ID NO: 3928293 - RNA, 21 nt, Human adenovirus D
acagucugagggccacccuga

SEQ ID NO: 3928294 - RNA, 17 nt, Human adenovirus D
acaguuauaccaccucc

SEQ ID NO: 3928295 - RNA, 12 nt, Human adenovirus D
acaucugugcug

SEQ ID NO: 3928296 - RNA, 14 nt, Human adenovirus D
acaugacccugcau

SEQ ID NO: 3928297 - RNA, 15 nt, Human adenovirus D
acaugcccagcagca

SEQ ID NO: 3928298 - RNA, 10 nt, Human adenovirus D
acauguggag

SEQ ID NO: 3928299 - RNA, 21 nt, Human adenovirus D
acauguggagcuaucagcccc

SEQ ID NO: 3928300 - RNA, 15 nt, Human adenovirus D
accaacaugcccaau

SEQ ID NO: 3928301 - RNA, 22 nt, Human adenovirus D
accaacggcugcauccacugcu

SEQ ID NO: 3928302 - RNA, 21 nt, Human adenovirus D
accaaggcacccaccacaguu

SEQ ID NO: 3928303 - RNA, 16 nt, Human adenovirus D
accaauagacagcaga

SEQ ID NO: 3928304 - RNA, 23 nt, Human adenovirus D
accacugccgccgccugcgcugc

SEQ ID NO: 3928305 - RNA, 14 nt, Human adenovirus D
accagaccaccugg

SEQ ID NO: 3928306 - RNA, 19 nt, Human adenovirus D
accaggaugcagccagugg

SEQ ID NO: 3928307 - RNA, 17 nt, Human adenovirus D
cuagagugccacugccg

SEQ ID NO: 3928308 - RNA, 19 nt, Human adenovirus D
cuagcaugaccagacccag

SEQ ID NO: 3928309 - RNA, 16 nt, Human adenovirus D
cuagccagccacagcc

SEQ ID NO: 3928310 - RNA, 14 nt, Human adenovirus D
cuagcccuuccugg

SEQ ID NO: 3928311 - RNA, 21 nt, Human adenovirus D
cuaggggaagauggaggagca

SEQ ID NO: 3928312 - RNA, 20 nt, Human adenovirus D
cuauaauccacacaguuucc

SEQ ID NO: 3928313 - RNA, 19 nt, Human adenovirus D
cuaucgcucuuaucccaug

SEQ ID NO: 3928314 - RNA, 14 nt, Human adenovirus D
cuaucugcucuucc

SEQ ID NO: 3928315 - RNA, 16 nt, Human adenovirus D
cuaugaaagcauacag

SEQ ID NO: 3928316 - RNA, 21 nt, Human adenovirus D
cuauucucaucucgcccagca

SEQ ID NO: 3928317 - RNA, 18 nt, Human adenovirus D
cuauugcuagcccuuccu

SEQ ID NO: 3928318 - RNA, 14 nt, Human adenovirus D
cucaaaaagcugug

SEQ ID NO: 3928319 - RNA, 14 nt, Human adenovirus D
cucaacgcccaggc

SEQ ID NO: 3928320 - RNA, 14 nt, Human adenovirus D
cucaaugucagcug

SEQ ID NO: 3928321 - RNA, 13 nt, Human adenovirus D
cucaccaaggcca

SEQ ID NO: 3928322 - RNA, 10 nt, Human adenovirus D
cucaccaccc

SEQ ID NO: 3928323 - RNA, 18 nt, Human adenovirus D
cucacucucuuccgcguc

SEQ ID NO: 3928324 - RNA, 18 nt, Human adenovirus D
cucagccacuccaagugg

SEQ ID NO: 3928325 - RNA, 21 nt, Human adenovirus D
cucagcugccaugggaggaag

SEQ ID NO: 3928326 - RNA, 21 nt, Human adenovirus D
cucaggaccauagggagccug

SEQ ID NO: 3928327 - RNA, 16 nt, Human adenovirus D
cucagguugucaguuu

SEQ ID NO: 3928328 - RNA, 17 nt, Human adenovirus D
cucaucacaucagccag

SEQ ID NO: 3928329 - RNA, 14 nt, Human adenovirus D
cucauccugcuggu

SEQ ID NO: 3928330 - RNA, 17 nt, Human adenovirus D
cucauuuuuccagccuu

SEQ ID NO: 3928331 - RNA, 17 nt, Human adenovirus D
cuccaacgccugcgcca

SEQ ID NO: 3928332 - RNA, 17 nt, Human adenovirus D
cuccaacguggagcuga

SEQ ID NO: 3928333 - RNA, 14 nt, Human adenovirus D
cuccacccuggugu

SEQ ID NO: 3928334 - RNA, 16 nt, Human adenovirus D
cuccacgccaccaccc

SEQ ID NO: 3928335 - RNA, 16 nt, Human adenovirus D
cucccacagcucgcgg

SEQ ID NO: 3928336 - RNA, 13 nt, Human adenovirus D
cucccaccaccag

SEQ ID NO: 3928337 - RNA, 18 nt, Human adenovirus D
cucccagcgccgcgcugg

SEQ ID NO: 3928338 - RNA, 22 nt, Human adenovirus D
cuccgagcagcgcauccugcaa

SEQ ID NO: 3928339 - RNA, 20 nt, Human adenovirus D
cuccgcacauguugaaaagc

SEQ ID NO: 3928340 - RNA, 15 nt, Human adenovirus D
cuccuccuccuggag

SEQ ID NO: 3928341 - RNA, 20 nt, Human adenovirus D
cuccugccugggaauccugc

SEQ ID NO: 3928342 - RNA, 23 nt, Human adenovirus D
cuccuggugcgucgagcacagca

SEQ ID NO: 3928343 - RNA, 17 nt, Human adenovirus D
cuccuucaacgcgcgcu

SEQ ID NO: 3928344 - RNA, 20 nt, Human adenovirus D
cucgaucuccuccuccugga

SEQ ID NO: 3928345 - RNA, 23 nt, Human adenovirus D
cucgcagaucugcaucucccagg

SEQ ID NO: 3928346 - RNA, 18 nt, Human adenovirus D
cucgccuucggcuggaac

SEQ ID NO: 3928347 - RNA, 17 nt, Human adenovirus D
cucgcgcaacugggccg

SEQ ID NO: 3928348 - RNA, 14 nt, Human adenovirus D
cucgcgcaccugcu

SEQ ID NO: 3928349 - RNA, 22 nt, Human adenovirus D
cucgcggacgcgguuccagaug

SEQ ID NO: 3928350 - RNA, 18 nt, Human adenovirus D
cucgcucgguugaggcac

SEQ ID NO: 3928351 - RNA, 13 nt, Human adenovirus D
cucgcugguggcg

SEQ ID NO: 3928352 - RNA, 15 nt, Human adenovirus D
cucggaccaacccca

SEQ ID NO: 3928353 - RNA, 16 nt, Human adenovirus D
cucggaguaccugagc

SEQ ID NO: 3928354 - RNA, 17 nt, Human adenovirus D
cucggaguaccugagcc

SEQ ID NO: 3928355 - RNA, 22 nt, Human adenovirus D
cucggccgacgauagcagcgug

SEQ ID NO: 3928356 - RNA, 16 nt, Human adenovirus D
cucggcugagcucgcu

SEQ ID NO: 3928357 - RNA, 19 nt, Human adenovirus D
cucguagaaauccacggcg

SEQ ID NO: 3928358 - RNA, 13 nt, Human adenovirus D
cucguagauggau

SEQ ID NO: 3928359 - RNA, 13 nt, Human adenovirus D
cucguaggugagg

SEQ ID NO: 3928360 - RNA, 14 nt, Human adenovirus D
cucgucuuccagga

SEQ ID NO: 3928361 - RNA, 16 nt, Human adenovirus D
cucguucauccagguc

SEQ ID NO: 3928362 - RNA, 20 nt, Human adenovirus D
cucguucugcccaccgugcg

SEQ ID NO: 3928363 - RNA, 18 nt, Human adenovirus D
cucuacgccaccuucuuc

SEQ ID NO: 3928364 - RNA, 14 nt, Human adenovirus D
cucuaucuucucuu

SEQ ID NO: 3928365 - RNA, 15 nt, Human adenovirus D
cucucguuccagacg

SEQ ID NO: 3928366 - RNA, 13 nt, Human adenovirus D
cucucucuucuug

SEQ ID NO: 3928367 - RNA, 16 nt, Human adenovirus D
cucugaaaagucaucc

SEQ ID NO: 3928368 - RNA, 17 nt, Human adenovirus D
cucugacggcgcagcug

SEQ ID NO: 3928369 - RNA, 13 nt, Human adenovirus D
cucugcgcgcgcg

SEQ ID NO: 3928370 - RNA, 23 nt, Human adenovirus D
cucugggggcgguggugguggcg

SEQ ID NO: 3928371 - RNA, 14 nt, Human adenovirus D
cucuuccgccgccg

SEQ ID NO: 3928372 - RNA, 18 nt, Human adenovirus D
cucuucgcagaaccauga

SEQ ID NO: 3928373 - RNA, 16 nt, Human adenovirus D
cucuucuuccaugaca

SEQ ID NO: 3928374 - RNA, 12 nt, Human adenovirus D
cucuuggagcag

SEQ ID NO: 3928375 - RNA, 23 nt, Human adenovirus D
cugaaaaacaggccgcagcucuu

SEQ ID NO: 3928376 - RNA, 18 nt, Human adenovirus D
cugaaccacacggccagc

SEQ ID NO: 3928377 - RNA, 22 nt, Human adenovirus D
cugaaccacacggccagcaggg

SEQ ID NO: 3928378 - RNA, 20 nt, Human adenovirus D
cugaacgacucgcugcugca

SEQ ID NO: 3928379 - RNA, 16 nt, Human adenovirus D
cugaagaacauccaug

SEQ ID NO: 3928380 - RNA, 20 nt, Human adenovirus D
cugaagauguaaccuugcaa

SEQ ID NO: 3928381 - RNA, 21 nt, Human adenovirus D
cugaagcccgugaccugcagc

SEQ ID NO: 3928382 - RNA, 22 nt, Human adenovirus D
cugaagcccgugaccugcagca

SEQ ID NO: 3928383 - RNA, 14 nt, Human adenovirus D
cugaaggagcugga

SEQ ID NO: 3928384 - RNA, 20 nt, Human adenovirus D
cugacaauucagagccaggg

SEQ ID NO: 3928385 - RNA, 15 nt, Human adenovirus D
cugacacaaaacuaa

SEQ ID NO: 3928386 - RNA, 19 nt, Human adenovirus D
cugacauccauggccaggg

SEQ ID NO: 3928387 - RNA, 21 nt, Human adenovirus D
cugacauccauggccagggga

SEQ ID NO: 3928388 - RNA, 17 nt, Human adenovirus D
cugacgagcccgcgcgg

SEQ ID NO: 3928389 - RNA, 22 nt, Human adenovirus D
cugacgcccaacucgcggcugc

SEQ ID NO: 3928390 - RNA, 14 nt, Human adenovirus D
cugacgcugagcga

SEQ ID NO: 3928391 - RNA, 19 nt, Human adenovirus D
cugagauacgaugagacca

SEQ ID NO: 3928392 - RNA, 17 nt, Human adenovirus D
cugagauaugugcagca

SEQ ID NO: 3928393 - RNA, 19 nt, Human adenovirus D
cugagauaugugcagcaga

SEQ ID NO: 3928394 - RNA, 15 nt, Human adenovirus D
cugagcaaccuccug

SEQ ID NO: 3928395 - RNA, 14 nt, Human adenovirus D
cugagccgccagcu

SEQ ID NO: 3928396 - RNA, 16 nt, Human adenovirus D
cugagcuuggccgaga

SEQ ID NO: 3928397 - RNA, 22 nt, Human adenovirus D
cugagguaaaauucaacugcag

SEQ ID NO: 3928398 - RNA, 22 nt, Human adenovirus D
cugaguggcggcuuucugcccg

SEQ ID NO: 3928399 - RNA, 15 nt, Human adenovirus D
cugaucagaaacaca

SEQ ID NO: 3928400 - RNA, 15 nt, Human adenovirus D
cugaugaaaaagcug

SEQ ID NO: 3928401 - RNA, 16 nt, Human adenovirus D
cugaugagcucggcga

SEQ ID NO: 3928402 - RNA, 16 nt, Human adenovirus D
cugcaagugcacagac

SEQ ID NO: 3928403 - RNA, 21 nt, Human adenovirus D
cugcacaccaacaugcccaau

SEQ ID NO: 3928404 - RNA, 16 nt, Human adenovirus D
cugcaccauccccagg

SEQ ID NO: 3928405 - RNA, 19 nt, Human adenovirus D
cugcaccccccgcaggcag

SEQ ID NO: 3928406 - RNA, 22 nt, Human adenovirus D
cugcacgagaaccgccuggggc

SEQ ID NO: 3928407 - RNA, 17 nt, Human adenovirus D
cugcacuuucuuugcca

SEQ ID NO: 3928408 - RNA, 14 nt, Human adenovirus D
cugcagacaucaug

SEQ ID NO: 3928409 - RNA, 19 nt, Human adenovirus D
cugcagaguucccucggca

SEQ ID NO: 3928410 - RNA, 22 nt, Human adenovirus D
cugcagcaggugcugccccagg

SEQ ID NO: 3928411 - RNA, 23 nt, Human adenovirus D
cugcagcauugucugccugguca

SEQ ID NO: 3928412 - RNA, 14 nt, Human adenovirus D
cugcagcgccaguc

SEQ ID NO: 3928413 - RNA, 16 nt, Human adenovirus D
cugcagggagccaggg

SEQ ID NO: 3928414 - RNA, 19 nt, Human adenovirus D
cugcagguggacgagccgc

SEQ ID NO: 3928415 - RNA, 22 nt, Human adenovirus D
cugcauauucggguagaggccu

SEQ ID NO: 3928416 - RNA, 18 nt, Human adenovirus D
cugcauccacugcuccug

SEQ ID NO: 3928417 - RNA, 19 nt, Human adenovirus D
cugcccguucucgcugguc

SEQ ID NO: 3928418 - RNA, 14 nt, Human adenovirus D
cugccgccggggcu

SEQ ID NO: 3928419 - RNA, 20 nt, Human adenovirus D
cugccgccggggcucggugc

SEQ ID NO: 3928420 - RNA, 21 nt, Human adenovirus D
cugccgguuucgggcgggcag

SEQ ID NO: 3928421 - RNA, 14 nt, Human adenovirus D
cugccuccaccacc

SEQ ID NO: 3928422 - RNA, 14 nt, Human adenovirus D
cugcuaaagcuaau

SEQ ID NO: 3928423 - RNA, 17 nt, Human adenovirus D
gaagaacauccauguga

SEQ ID NO: 3928424 - RNA, 12 nt, Human adenovirus D
gaagaagagaca

SEQ ID NO: 3928425 - RNA, 22 nt, Human adenovirus D
gaagaauuggaaaaguggaaga

SEQ ID NO: 3928426 - RNA, 18 nt, Human adenovirus D
gaagacgagggcgcgcag

SEQ ID NO: 3928427 - RNA, 22 nt, Human adenovirus D
gaagacggcguaguugcgcagg

SEQ ID NO: 3928428 - RNA, 18 nt, Human adenovirus D
gaagagccggcucgucua

SEQ ID NO: 3928429 - RNA, 23 nt, Human adenovirus D
gaagaggagcugaucucgcugcc

SEQ ID NO: 3928430 - RNA, 15 nt, Human adenovirus D
gaagccguggcgcag

SEQ ID NO: 3928431 - RNA, 20 nt, Human adenovirus D
gaagggcaucuucugccugg

SEQ ID NO: 3928432 - RNA, 19 nt, Human adenovirus D
gaagggguucucgcgcuca

SEQ ID NO: 3928433 - RNA, 21 nt, Human adenovirus D
gaaggugguggacggccuggc

SEQ ID NO: 3928434 - RNA, 18 nt, Human adenovirus D
gaauaggcacugaaaauu

SEQ ID NO: 3928435 - RNA, 16 nt, Human adenovirus D
gaauaucagacaugcu

SEQ ID NO: 3928436 - RNA, 14 nt, Human adenovirus D
gaauauccccuucc

SEQ ID NO: 3928437 - RNA, 23 nt, Human adenovirus D
gaauauccccuuccucacucccc

SEQ ID NO: 3928438 - RNA, 15 nt, Human adenovirus D
gaaucgcgggcggcc

SEQ ID NO: 3928439 - RNA, 19 nt, Human adenovirus D
gaaucuugaacuacuggcu

SEQ ID NO: 3928440 - RNA, 15 nt, Human adenovirus D
gacaacgccaggcug

SEQ ID NO: 3928441 - RNA, 18 nt, Human adenovirus D
gacaagauaucauaaaga

SEQ ID NO: 3928442 - RNA, 16 nt, Human adenovirus D
gacaauucagagccag

SEQ ID NO: 3928443 - RNA, 18 nt, Human adenovirus D
gacaauucagagccaggg

SEQ ID NO: 3928444 - RNA, 18 nt, Human adenovirus D
gacacaccuggaggcacc

SEQ ID NO: 3928445 - RNA, 11 nt, Human adenovirus D
gacaccacagu

SEQ ID NO: 3928446 - RNA, 18 nt, Human adenovirus D
gacacguacuucagccug

SEQ ID NO: 3928447 - RNA, 19 nt, Human adenovirus D
gacacguacuucagccugg

SEQ ID NO: 3928448 - RNA, 20 nt, Human adenovirus D
gacacugcagggagccaggg

SEQ ID NO: 3928449 - RNA, 22 nt, Human adenovirus D
gacagagauggacuuggaagag

SEQ ID NO: 3928450 - RNA, 12 nt, Human adenovirus D
gacagccagcag

SEQ ID NO: 3928451 - RNA, 11 nt, Human adenovirus D
gacagccaggu

SEQ ID NO: 3928452 - RNA, 13 nt, Human adenovirus D
gacagcguggugg

SEQ ID NO: 3928453 - RNA, 19 nt, Human adenovirus D
gacagcuuuuacaugcgca

SEQ ID NO: 3928454 - RNA, 12 nt, Human adenovirus D
gacaucaugaac

SEQ ID NO: 3928455 - RNA, 17 nt, Human adenovirus D
gaccacgguggugcaga

SEQ ID NO: 3928456 - RNA, 18 nt, Human adenovirus D
gaccagaccaccugguga

SEQ ID NO: 3928457 - RNA, 21 nt, Human adenovirus D
gaccaggcggcagagcgggcg

SEQ ID NO: 3928458 - RNA, 12 nt, Human adenovirus D
gacccaggcgcg

SEQ ID NO: 3928459 - RNA, 21 nt, Human adenovirus D
gaccccuggcucccagccucc

SEQ ID NO: 3928460 - RNA, 17 nt, Human adenovirus D
gacccugagaacggggu

SEQ ID NO: 3928461 - RNA, 15 nt, Human adenovirus D
gaccgacgcugggcu

SEQ ID NO: 3928462 - RNA, 14 nt, Human adenovirus D
gaccgcagcgggga

SEQ ID NO: 3928463 - RNA, 15 nt, Human adenovirus D
gaccggcagcggggc

SEQ ID NO: 3928464 - RNA, 21 nt, Human adenovirus D
gaccucggaguaccugagccg

SEQ ID NO: 3928465 - RNA, 20 nt, Human adenovirus D
gaccugcagcaggugcugcc

SEQ ID NO: 3928466 - RNA, 17 nt, Human adenovirus D
gacgacugggaggcugc

SEQ ID NO: 3928467 - RNA, 20 nt, Human adenovirus D
gacgagacuggccucgagcu

SEQ ID NO: 3928468 - RNA, 13 nt, Human adenovirus D
gacgagcucgccg

SEQ ID NO: 3928469 - RNA, 16 nt, Human adenovirus D
gacgcaagagccggcg

SEQ ID NO: 3928470 - RNA, 17 nt, Human adenovirus D
gacgcagccggcgaacg

SEQ ID NO: 3928471 - RNA, 21 nt, Human adenovirus D
gacgcagccggcgaacgugcc

SEQ ID NO: 3928472 - RNA, 21 nt, Human adenovirus D
gacgcccuggccgaccggagc

SEQ ID NO: 3928473 - RNA, 17 nt, Human adenovirus D
gacgcccuugugcccgc

SEQ ID NO: 3928474 - RNA, 13 nt, Human adenovirus D
gacgcgcuccucg

SEQ ID NO: 3928475 - RNA, 15 nt, Human adenovirus D
gacgcucuagaggca

SEQ ID NO: 3928476 - RNA, 16 nt, Human adenovirus D
gacggacuugauuggc

SEQ ID NO: 3928477 - RNA, 21 nt, Human adenovirus D
gacggccuacgagcagacggu

SEQ ID NO: 3928478 - RNA, 19 nt, Human adenovirus D
gacggcgcagcuguuccug

SEQ ID NO: 3928479 - RNA, 19 nt, Human adenovirus D
gacgggcugcuucugccug

SEQ ID NO: 3928480 - RNA, 19 nt, Human adenovirus D
gacgggcuuugacgagcgc

SEQ ID NO: 3928481 - RNA, 13 nt, Human adenovirus D
gacggugagcagc

SEQ ID NO: 3928482 - RNA, 12 nt, Human adenovirus D
gacgguggugcg

SEQ ID NO: 3928483 - RNA, 20 nt, Human adenovirus D
gacgucccagagcucgguga

SEQ ID NO: 3928484 - RNA, 14 nt, Human adenovirus D
gacuacaaggccgu

SEQ ID NO: 3928485 - RNA, 15 nt, Human adenovirus D
gacucacccuggggc

SEQ ID NO: 3928486 - RNA, 16 nt, Human adenovirus D
gacucacccuggggcu

SEQ ID NO: 3928487 - RNA, 21 nt, Human adenovirus D
gacuccgcgaccuccucccca

SEQ ID NO: 3928488 - RNA, 19 nt, Human adenovirus D
gacuccucggucagcuggc

SEQ ID NO: 3928489 - RNA, 20 nt, Human adenovirus D
gacucgcugcugcagccgcc

SEQ ID NO: 3928490 - RNA, 17 nt, Human adenovirus D
gacucugacacaccugg

SEQ ID NO: 3928491 - RNA, 15 nt, Human adenovirus D
gacugaccaccaccu

SEQ ID NO: 3928492 - RNA, 17 nt, Human adenovirus D
gacuggaaacucuugga

SEQ ID NO: 3928493 - RNA, 16 nt, Human adenovirus D
gacuucgcagccaugc

SEQ ID NO: 3928494 - RNA, 15 nt, Human adenovirus D
gacuugauuggccug

SEQ ID NO: 3928495 - RNA, 18 nt, Human adenovirus D
gagaaccgccuggggcag

SEQ ID NO: 3928496 - RNA, 22 nt, Human adenovirus D
gagaacugcuggcccugcuggc

SEQ ID NO: 3928497 - RNA, 16 nt, Human adenovirus D
gagaagcuuggcgaug

SEQ ID NO: 3928498 - RNA, 14 nt, Human adenovirus D
gagaaggugcuggc

SEQ ID NO: 3928499 - RNA, 18 nt, Human adenovirus D
gagaaguuccucugcauc

SEQ ID NO: 3928500 - RNA, 13 nt, Human adenovirus D
gagaccugcacua

SEQ ID NO: 3928501 - RNA, 18 nt, Human adenovirus D
gagacgcccuugugcccg

SEQ ID NO: 3928502 - RNA, 13 nt, Human adenovirus D
gagacgcgcgcag

SEQ ID NO: 3928503 - RNA, 16 nt, Human adenovirus D
gagagccgccugagca

SEQ ID NO: 3928504 - RNA, 17 nt, Human adenovirus D
gagaggagcucuugcag

SEQ ID NO: 3928505 - RNA, 16 nt, Human adenovirus D
gagauaugugcagcag

SEQ ID NO: 3928506 - RNA, 20 nt, Human adenovirus D
gagaucaaccuccaggccaa

SEQ ID NO: 3928507 - RNA, 23 nt, Human adenovirus D
gagauccagguccgggggcaggg

SEQ ID NO: 3928508 - RNA, 18 nt, Human adenovirus D
gagaucggcaccagccag

SEQ ID NO: 3928509 - RNA, 15 nt, Human adenovirus D
gagaugcgcgacugc

SEQ ID NO: 3928510 - RNA, 11 nt, Human adenovirus D
gagcaacccaa

SEQ ID NO: 3928511 - RNA, 17 nt, Human adenovirus D
gagcacgagcaagacgc

SEQ ID NO: 3928512 - RNA, 23 nt, Human adenovirus D
gagcacgagcaagacgcaggcca

SEQ ID NO: 3928513 - RNA, 22 nt, Human adenovirus D
gagcagacggggaucagccccg

SEQ ID NO: 3928514 - RNA, 15 nt, Human adenovirus D
gagcagcacagacac

SEQ ID NO: 3928515 - RNA, 21 nt, Human adenovirus D
gagcagcggcgcaagcucaug

SEQ ID NO: 3928516 - RNA, 13 nt, Human adenovirus D
gagcaggaccugg

SEQ ID NO: 3928517 - RNA, 22 nt, Human adenovirus D
gagcagugucuggagcgggcuu

SEQ ID NO: 3928518 - RNA, 23 nt, Human adenovirus D
gagccaagaaacgucccagcagc

SEQ ID NO: 3928519 - RNA, 16 nt, Human adenovirus D
gagccaggugagcucg

SEQ ID NO: 3928520 - RNA, 17 nt, Human adenovirus D
gagccaggugagcucgg

SEQ ID NO: 3928521 - RNA, 22 nt, Human adenovirus D
gagcccaacccgcgucucaacu

SEQ ID NO: 3928522 - RNA, 22 nt, Human adenovirus D
gagcccgagggucgcuggcugc

SEQ ID NO: 3928523 - RNA, 16 nt, Human adenovirus D
gagccgaacgagcaga

SEQ ID NO: 3928524 - RNA, 16 nt, Human adenovirus D
gagccugcgccgggcg

SEQ ID NO: 3928525 - RNA, 13 nt, Human adenovirus D
gagcgccagcugu

SEQ ID NO: 3928526 - RNA, 15 nt, Human adenovirus D
gagcgcgagccggcg

SEQ ID NO: 3928527 - RNA, 18 nt, Human adenovirus D
gagcgcgagccggcggcg

SEQ ID NO: 3928528 - RNA, 14 nt, Human adenovirus D
gagcggccagcgcu

SEQ ID NO: 3928529 - RNA, 19 nt, Human adenovirus D
gagcggcgaggggcugcua

SEQ ID NO: 3928530 - RNA, 14 nt, Human adenovirus D
gagcuacaugccca

SEQ ID NO: 3928531 - RNA, 12 nt, Human adenovirus D
gagcucacccac

SEQ ID NO: 3928532 - RNA, 14 nt, Human adenovirus D
gagcuccucgaugc

SEQ ID NO: 3928533 - RNA, 19 nt, Human adenovirus D
gagcucgucuuccaggagc

SEQ ID NO: 3928534 - RNA, 22 nt, Human adenovirus D
gagcucgucuuccaggagccug

SEQ ID NO: 3928535 - RNA, 20 nt, Human adenovirus D
gagcucuuaccaaguccagg

SEQ ID NO: 3928536 - RNA, 21 nt, Human adenovirus D
gagcucuugcagggaagcaaa

SEQ ID NO: 3928537 - RNA, 15 nt, Human adenovirus D
gagcugagcgaccgc

SEQ ID NO: 3928538 - RNA, 12 nt, Human adenovirus D
gagcuggcuccg

SEQ ID NO: 3928539 - RNA, 13 nt, Human adenovirus D
gagcuugcccuug

SEQ ID NO: 3928540 - RNA, 14 nt, Human adenovirus D
gcaggggcggcaga

SEQ ID NO: 3928541 - RNA, 18 nt, Human adenovirus D
gcaggguaaagccagcag

SEQ ID NO: 3928542 - RNA, 24 nt, Human adenovirus D
gcaggguaaagccagcagcacaug

SEQ ID NO: 3928543 - RNA, 22 nt, Human adenovirus D
gcaggugacagcguuccccucc

SEQ ID NO: 3928544 - RNA, 17 nt, Human adenovirus D
gcagguggacgagcaga

SEQ ID NO: 3928545 - RNA, 21 nt, Human adenovirus D
gcagguuucucaacagcuggg

SEQ ID NO: 3928546 - RNA, 23 nt, Human adenovirus D
gcagguuucucaacagcugggac

SEQ ID NO: 3928547 - RNA, 15 nt, Human adenovirus D
gcaguagccccgccc

SEQ ID NO: 3928548 - RNA, 14 nt, Human adenovirus D
gcaguccaaccugg

SEQ ID NO: 3928549 - RNA, 13 nt, Human adenovirus D
gcagugggcgcag

SEQ ID NO: 3928550 - RNA, 17 nt, Human adenovirus D
gcagugucucgaggacg

SEQ ID NO: 3928551 - RNA, 16 nt, Human adenovirus D
gcaguuggccaugagc

SEQ ID NO: 3928552 - RNA, 17 nt, Human adenovirus D
gcaguugggaccggugc

SEQ ID NO: 3928553 - RNA, 15 nt, Human adenovirus D
gcaguuuggccugga

SEQ ID NO: 3928554 - RNA, 16 nt, Human adenovirus D
gcauaauauggugaag

SEQ ID NO: 3928555 - RNA, 21 nt, Human adenovirus D
gcauacagagauucagccaua

SEQ ID NO: 3928556 - RNA, 14 nt, Human adenovirus D
gcauaucagccagu

SEQ ID NO: 3928557 - RNA, 20 nt, Human adenovirus D
gcaucagcaucauccccgcg

SEQ ID NO: 3928558 - RNA, 15 nt, Human adenovirus D
gcaucagucuccugg

SEQ ID NO: 3928559 - RNA, 16 nt, Human adenovirus D
gcaucagucuccuggu

SEQ ID NO: 3928560 - RNA, 15 nt, Human adenovirus D
gcaucucccaggcuu

SEQ ID NO: 3928561 - RNA, 19 nt, Human adenovirus D
gcaucugaugaaauaaaaa

SEQ ID NO: 3928562 - RNA, 17 nt, Human adenovirus D
gcaugaccagacccagg

SEQ ID NO: 3928563 - RNA, 16 nt, Human adenovirus D
gcaugaccucggcacu

SEQ ID NO: 3928564 - RNA, 22 nt, Human adenovirus D
gcaugcaagaucuccaacgugg

SEQ ID NO: 3928565 - RNA, 14 nt, Human adenovirus D
gcauggcaggcagc

SEQ ID NO: 3928566 - RNA, 21 nt, Human adenovirus D
gccaaacacaccugacacaaa

SEQ ID NO: 3928567 - RNA, 21 nt, Human adenovirus D
gccaagaaacgucccagcagc

SEQ ID NO: 3928568 - RNA, 23 nt, Human adenovirus D
gccaagaaacgucccagcagcac

SEQ ID NO: 3928569 - RNA, 21 nt, Human adenovirus D
gccaagacaaaggaggccacg

SEQ ID NO: 3928570 - RNA, 22 nt, Human adenovirus D
gccaagacaaaggaggccacgu

SEQ ID NO: 3928571 - RNA, 15 nt, Human adenovirus D
gccaaucgcagucgc

SEQ ID NO: 3928572 - RNA, 19 nt, Human adenovirus D
gccaauguuacgcugcccg

SEQ ID NO: 3928573 - RNA, 17 nt, Human adenovirus D
gccacaugcaccugggc

SEQ ID NO: 3928574 - RNA, 22 nt, Human adenovirus D
gccaccacccacaccgccuccc

SEQ ID NO: 3928575 - RNA, 22 nt, Human adenovirus D
gccacccuugaccugccuccac

SEQ ID NO: 3928576 - RNA, 18 nt, Human adenovirus D
gccaccuaucacaucuuu

SEQ ID NO: 3928577 - RNA, 15 nt, Human adenovirus D
gccaccuucuucccc

SEQ ID NO: 3928578 - RNA, 17 nt, Human adenovirus D
gccacgaccggcagcgg

SEQ ID NO: 3928579 - RNA, 14 nt, Human adenovirus D
gccacgugaccagg

SEQ ID NO: 3928580 - RNA, 20 nt, Human adenovirus D
gccacgugaccagggguccc

SEQ ID NO: 3928581 - RNA, 22 nt, Human adenovirus D
gccacugcaccccccgcaggca

SEQ ID NO: 3928582 - RNA, 20 nt, Human adenovirus D
gccacugccgcugcaaccug

SEQ ID NO: 3928583 - RNA, 18 nt, Human adenovirus D
gccagaaggggcaccuuc

SEQ ID NO: 3928584 - RNA, 22 nt, Human adenovirus D
gccagcaaacgccgccgccgca

SEQ ID NO: 3928585 - RNA, 13 nt, Human adenovirus D
gccagcacgcucu

SEQ ID NO: 3928586 - RNA, 13 nt, Human adenovirus D
gccagcagcacau

SEQ ID NO: 3928587 - RNA, 16 nt, Human adenovirus D
gccagcagggugccuc

SEQ ID NO: 3928588 - RNA, 18 nt, Human adenovirus D
gccagcugaacgggggcg

SEQ ID NO: 3928589 - RNA, 20 nt, Human adenovirus D
gccagcugaacgggggcgcc

SEQ ID NO: 3928590 - RNA, 12 nt, Human adenovirus D
gccaggaggaga

SEQ ID NO: 3928591 - RNA, 19 nt, Human adenovirus D
gccaggauacgcgggaaga

SEQ ID NO: 3928592 - RNA, 16 nt, Human adenovirus D
gccaggccuccgagca

SEQ ID NO: 3928593 - RNA, 22 nt, Human adenovirus D
gccaggggagugaagagggaga

SEQ ID NO: 3928594 - RNA, 18 nt, Human adenovirus D
gccaggucaaaacccacu

SEQ ID NO: 3928595 - RNA, 20 nt, Human adenovirus D
gccagguccucgagcaugag

SEQ ID NO: 3928596 - RNA, 19 nt, Human adenovirus D
gccaggugagcucgggcug

SEQ ID NO: 3928597 - RNA, 15 nt, Human adenovirus D
gccagucugaugaau

SEQ ID NO: 3928598 - RNA, 16 nt, Human adenovirus D
gccauagcucagcccg

SEQ ID NO: 3928599 - RNA, 14 nt, Human adenovirus D
gccaucaagaaccu

SEQ ID NO: 3928600 - RNA, 20 nt, Human adenovirus D
gccaucuaaacuaaagccaa

SEQ ID NO: 3928601 - RNA, 14 nt, Human adenovirus D
gccaugcgcaggcg

SEQ ID NO: 3928602 - RNA, 20 nt, Human adenovirus D
gccaugggcguguggcagca

SEQ ID NO: 3928603 - RNA, 13 nt, Human adenovirus D
gcccaacccgcgu

SEQ ID NO: 3928604 - RNA, 22 nt, Human adenovirus D
gcccaacucgcggcugcugcug

SEQ ID NO: 3928605 - RNA, 17 nt, Human adenovirus D
gcccacggugguggaga

SEQ ID NO: 3928606 - RNA, 21 nt, Human adenovirus D
gcccagcgagaggagcucuug

SEQ ID NO: 3928607 - RNA, 17 nt, Human adenovirus D
gccccaggcggugcugc

SEQ ID NO: 3928608 - RNA, 23 nt, Human adenovirus D
gccccgccaaccggcugaugccc

SEQ ID NO: 3928609 - RNA, 19 nt, Human adenovirus D
gccccugcaagugcacaga

SEQ ID NO: 3928610 - RNA, 20 nt, Human adenovirus D
gccccugcaagugcacagac

SEQ ID NO: 3928611 - RNA, 15 nt, Human adenovirus D
gccccuggcugggcg

SEQ ID NO: 3928612 - RNA, 17 nt, Human adenovirus D
gccccuggcugggcgcu

SEQ ID NO: 3928613 - RNA, 13 nt, Human adenovirus D
gcccgagcucugc

SEQ ID NO: 3928614 - RNA, 16 nt, Human adenovirus D
gcccgagcucugcugc

SEQ ID NO: 3928615 - RNA, 13 nt, Human adenovirus D
gcccgccaccugc

SEQ ID NO: 3928616 - RNA, 16 nt, Human adenovirus D
gcccgccaccugcaac

SEQ ID NO: 3928617 - RNA, 13 nt, Human adenovirus D
gcccgcuccaccg

SEQ ID NO: 3928618 - RNA, 15 nt, Human adenovirus D
gcccgugggcugcgg

SEQ ID NO: 3928619 - RNA, 22 nt, Human adenovirus D
gcccuaaauuuaaaaccucauu

SEQ ID NO: 3928620 - RNA, 14 nt, Human adenovirus D
gcccuccacccugg

SEQ ID NO: 3928621 - RNA, 20 nt, Human adenovirus D
gcccucgaugaaagucagga

SEQ ID NO: 3928622 - RNA, 16 nt, Human adenovirus D
gcccucucaacaucac

SEQ ID NO: 3928623 - RNA, 14 nt, Human adenovirus D
gcccugacccagca

SEQ ID NO: 3928624 - RNA, 16 nt, Human adenovirus D
gcccugagagcgcugg

SEQ ID NO: 3928625 - RNA, 22 nt, Human adenovirus D
gcccugagccgccagcuggccg

SEQ ID NO: 3928626 - RNA, 22 nt, Human adenovirus D
gcccugcgauauggaugauggc

SEQ ID NO: 3928627 - RNA, 21 nt, Human adenovirus D
gcccuugcggacauacaaaaa

SEQ ID NO: 3928628 - RNA, 17 nt, Human adenovirus D
gccgaacgagcagacgg

SEQ ID NO: 3928629 - RNA, 14 nt, Human adenovirus D
gccgagcccgaggg

SEQ ID NO: 3928630 - RNA, 23 nt, Human adenovirus D
gccgagcuggaagcccugagccg

SEQ ID NO: 3928631 - RNA, 18 nt, Human adenovirus D
gccgaggagaacugcugg

SEQ ID NO: 3928632 - RNA, 15 nt, Human adenovirus D
gccgaggcucuguuc

SEQ ID NO: 3928633 - RNA, 20 nt, Human adenovirus D
gccgauuuaaagacccacag

SEQ ID NO: 3928634 - RNA, 17 nt, Human adenovirus D
gccgcaccgccacccgc

SEQ ID NO: 3928635 - RNA, 16 nt, Human adenovirus D
gccgccagcuggccgc

SEQ ID NO: 3928636 - RNA, 19 nt, Human adenovirus D
gccgccgaagggcgagaag

SEQ ID NO: 3928637 - RNA, 14 nt, Human adenovirus D
gccgccgccgugcg

SEQ ID NO: 3928638 - RNA, 22 nt, Human adenovirus D
gccgccugagcaaccuccuggg

SEQ ID NO: 3928639 - RNA, 20 nt, Human adenovirus D
gccgcgccaaccgcacccgc

SEQ ID NO: 3928640 - RNA, 17 nt, Human adenovirus D
gccgcgccagacgcacg

SEQ ID NO: 3928641 - RNA, 19 nt, Human adenovirus D
gccgcgcuugcugggcgag

SEQ ID NO: 3928642 - RNA, 18 nt, Human adenovirus D
gccgcggcagccgcagcc

SEQ ID NO: 3928643 - RNA, 12 nt, Human adenovirus D
gccgcggccaga

SEQ ID NO: 3928644 - RNA, 17 nt, Human adenovirus D
gccgcguaagcaggagc

SEQ ID NO: 3928645 - RNA, 15 nt, Human adenovirus D
gccgcguccccgccc

SEQ ID NO: 3928646 - RNA, 14 nt, Human adenovirus D
gccgcucagucauc

SEQ ID NO: 3928647 - RNA, 15 nt, Human adenovirus D
gccgcuguggagcca

SEQ ID NO: 3928648 - RNA, 16 nt, Human adenovirus D
gccgggcgcugguagg

SEQ ID NO: 3928649 - RNA, 21 nt, Human adenovirus D
gccggggguucauguugugca

SEQ ID NO: 3928650 - RNA, 15 nt, Human adenovirus D
gccguagagguagcg

SEQ ID NO: 3928651 - RNA, 19 nt, Human adenovirus D
gccguagagguagcgggac

SEQ ID NO: 3928652 - RNA, 19 nt, Human adenovirus D
gccgucgucccggaggagg

SEQ ID NO: 3928653 - RNA, 15 nt, Human adenovirus D
gccgucuggacccgc

SEQ ID NO: 3928654 - RNA, 16 nt, Human adenovirus D
gccuacgguccagagg

SEQ ID NO: 3928655 - RNA, 18 nt, Human adenovirus D
gccuacuuuuugggcacc

SEQ ID NO: 3928656 - RNA, 18 nt, Human adenovirus D
aaaaacagacuggucaaa

SEQ ID NO: 3928657 - RNA, 12 nt, Human adenovirus D
aaaacuggcaag

SEQ ID NO: 3928658 - RNA, 13 nt, Human adenovirus D
aaaagaaacaagu

SEQ ID NO: 3928659 - RNA, 13 nt, Human adenovirus D
aaaauacagaugg

SEQ ID NO: 3928660 - RNA, 23 nt, Human adenovirus D
aaaaucacucuuuccagcagcag

SEQ ID NO: 3928661 - RNA, 17 nt, Human adenovirus D
aaaaucagaagagauga

SEQ ID NO: 3928662 - RNA, 20 nt, Human adenovirus D
aaaaucuuacacuguuguuu

SEQ ID NO: 3928663 - RNA, 13 nt, Human adenovirus D
aaaauuugcaaaa

SEQ ID NO: 3928664 - RNA, 13 nt, Human adenovirus D
aaacaggcugucg

SEQ ID NO: 3928665 - RNA, 22 nt, Human adenovirus D
aaaccacuuccuuuaccuucuc

SEQ ID NO: 3928666 - RNA, 18 nt, Human adenovirus D
aaacgaagaucagcugca

SEQ ID NO: 3928667 - RNA, 13 nt, Human adenovirus D
aaacucagucacu

SEQ ID NO: 3928668 - RNA, 17 nt, Human adenovirus D
aaacucuuggagcaggg

SEQ ID NO: 3928669 - RNA, 18 nt, Human adenovirus D
aaacuuuaaugcuccaaa

SEQ ID NO: 3928670 - RNA, 20 nt, Human adenovirus D
aaagugacgucauugaagag

SEQ ID NO: 3928671 - RNA, 23 nt, Human adenovirus D
aaagugcuggaggguugaaagau

SEQ ID NO: 3928672 - RNA, 13 nt, Human adenovirus D
aaaguuuuucagg

SEQ ID NO: 3928673 - RNA, 14 nt, Human adenovirus D
aaauauggccugga

SEQ ID NO: 3928674 - RNA, 12 nt, Human adenovirus D
aaauuugcaaaa

SEQ ID NO: 3928675 - RNA, 18 nt, Human adenovirus D
aaauuuuuauuuccucug

SEQ ID NO: 3928676 - RNA, 20 nt, Human adenovirus D
aacaaccuuaccaguggacu

SEQ ID NO: 3928677 - RNA, 20 nt, Human adenovirus D
aacacacacgcccugggugu

SEQ ID NO: 3928678 - RNA, 23 nt, Human adenovirus D
aacagacuggucaaaaacaaagu

SEQ ID NO: 3928679 - RNA, 22 nt, Human adenovirus D
aacagauccugcugcuccacca

SEQ ID NO: 3928680 - RNA, 13 nt, Human adenovirus D
aacagcagaggaa

SEQ ID NO: 3928681 - RNA, 19 nt, Human adenovirus D
aacauccaccagugcaaga

SEQ ID NO: 3928682 - RNA, 20 nt, Human adenovirus D
aaccagcacacucacuuuua

SEQ ID NO: 3928683 - RNA, 19 nt, Human adenovirus D
aacccgccugccaggaugg

SEQ ID NO: 3928684 - RNA, 19 nt, Human adenovirus D
aaccugaaagacaguucaa

SEQ ID NO: 3928685 - RNA, 23 nt, Human adenovirus D
ggaggacuuaaccacccacgagc

SEQ ID NO: 3928686 - RNA, 16 nt, Human adenovirus D
ggaggagacugauggc

SEQ ID NO: 3928687 - RNA, 18 nt, Human adenovirus D
ggaggagauggugggccg

SEQ ID NO: 3928688 - RNA, 18 nt, Human adenovirus D
ggaggcacagacgaagaa

SEQ ID NO: 3928689 - RNA, 12 nt, Human adenovirus D
ggagggcagaaa

SEQ ID NO: 3928690 - RNA, 14 nt, Human adenovirus D
ggaggggggccacc

SEQ ID NO: 3928691 - RNA, 17 nt, Human adenovirus D
ggaguccaccgcuccgc

SEQ ID NO: 3928692 - RNA, 12 nt, Human adenovirus D
ggaucagccccg

SEQ ID NO: 3928693 - RNA, 14 nt, Human adenovirus D
ggaucgccaggccu

SEQ ID NO: 3928694 - RNA, 13 nt, Human adenovirus D
ggaugcagccagu

SEQ ID NO: 3928695 - RNA, 20 nt, Human adenovirus D
ggaugcgugagggcggaggc

SEQ ID NO: 3928696 - RNA, 22 nt, Human adenovirus D
ggauuaucucuacaaauuguug

SEQ ID NO: 3928697 - RNA, 19 nt, Human adenovirus D
ggauugcagggcguagagc

SEQ ID NO: 3928698 - RNA, 22 nt, Human adenovirus D
ggcaaucaacuacucggugcuu

SEQ ID NO: 3928699 - RNA, 20 nt, Human adenovirus D
ggcacagccucucugaagca

SEQ ID NO: 3928700 - RNA, 13 nt, Human adenovirus D
ggcaccagccagc

SEQ ID NO: 3928701 - RNA, 15 nt, Human adenovirus D
ggcacccaccacagu

SEQ ID NO: 3928702 - RNA, 22 nt, Human adenovirus D
ggcacucagguugucaguuucu

SEQ ID NO: 3928703 - RNA, 22 nt, Human adenovirus D
ggcacugcucuucccuggagac

SEQ ID NO: 3928704 - RNA, 11 nt, Human adenovirus D
ggcacuggcac

SEQ ID NO: 3928705 - RNA, 21 nt, Human adenovirus D
ggcagcuccgguugugcagcc

SEQ ID NO: 3928706 - RNA, 16 nt, Human adenovirus D
ggcagggugagccggc

SEQ ID NO: 3928707 - RNA, 22 nt, Human adenovirus D
ggcauagcuuccguugcgcugc

SEQ ID NO: 3928708 - RNA, 17 nt, Human adenovirus D
ggcauccugcacgcagc

SEQ ID NO: 3928709 - RNA, 20 nt, Human adenovirus D
ggccaaucagcaguagcccc

SEQ ID NO: 3928710 - RNA, 20 nt, Human adenovirus D
ggccacgaccgugccgcggu

SEQ ID NO: 3928711 - RNA, 13 nt, Human adenovirus D
ggccacggggagc

SEQ ID NO: 3928712 - RNA, 19 nt, Human adenovirus D
ggccacucccagcgccgcg

SEQ ID NO: 3928713 - RNA, 17 nt, Human adenovirus D
ggccauaaaucugcccu

SEQ ID NO: 3928714 - RNA, 18 nt, Human adenovirus D
ggccauaaaucugcccug

SEQ ID NO: 3928715 - RNA, 14 nt, Human adenovirus D
ggccauaggccagg

SEQ ID NO: 3928716 - RNA, 17 nt, Human adenovirus D
ggccaugaugcgagccg

SEQ ID NO: 3928717 - RNA, 18 nt, Human adenovirus D
ggccaugaugcgagccgc

SEQ ID NO: 3928718 - RNA, 19 nt, Human adenovirus D
ggccaugccccaggccugg

SEQ ID NO: 3928719 - RNA, 20 nt, Human adenovirus D
ggccaugccccaggccuggc

SEQ ID NO: 3928720 - RNA, 17 nt, Human adenovirus D
ggccaugcgcaggcgcc

SEQ ID NO: 3928721 - RNA, 15 nt, Human adenovirus D
ggccaugcugcgccg

SEQ ID NO: 3928722 - RNA, 21 nt, Human adenovirus D
ggccauucuggaggcgguggu

SEQ ID NO: 3928723 - RNA, 14 nt, Human adenovirus D
ggccccgcgggcag

SEQ ID NO: 3928724 - RNA, 14 nt, Human adenovirus D
ggccccggggcgaa

SEQ ID NO: 3928725 - RNA, 13 nt, Human adenovirus D
ggcccggcacggc

SEQ ID NO: 3928726 - RNA, 20 nt, Human adenovirus D
ggcccugcuggccgagcugg

SEQ ID NO: 3928727 - RNA, 18 nt, Human adenovirus D
ggccgaaauuggugcgcu

SEQ ID NO: 3928728 - RNA, 22 nt, Human adenovirus D
ggccgaaauuggugcgcugggg

SEQ ID NO: 3928729 - RNA, 19 nt, Human adenovirus D
ggccgagaagguggcggca

SEQ ID NO: 3928730 - RNA, 19 nt, Human adenovirus D
ggccgagaccgugagcucg

SEQ ID NO: 3928731 - RNA, 12 nt, Human adenovirus D
ggccgagcugga

SEQ ID NO: 3928732 - RNA, 14 nt, Human adenovirus D
ggccgaggaggagc

SEQ ID NO: 3928733 - RNA, 17 nt, Human adenovirus D
ggccgcagcucuucccg

SEQ ID NO: 3928734 - RNA, 19 nt, Human adenovirus D
ggccgcgauguugagcugg

SEQ ID NO: 3928735 - RNA, 14 nt, Human adenovirus D
ggccgcggccagau

SEQ ID NO: 3928736 - RNA, 19 nt, Human adenovirus D
ggccggcgcgcccggggcc

SEQ ID NO: 3928737 - RNA, 14 nt, Human adenovirus D
ggccggugagacgc

SEQ ID NO: 3928738 - RNA, 20 nt, Human adenovirus D
ggccguccuuucgcugcugc

SEQ ID NO: 3928739 - RNA, 20 nt, Human adenovirus D
ggccgugagcgcgagccggc

SEQ ID NO: 3928740 - RNA, 16 nt, Human adenovirus D
ggccguuggaagaugu

SEQ ID NO: 3928741 - RNA, 23 nt, Human adenovirus D
ggccuacgagcucaaccucuucu

SEQ ID NO: 3928742 - RNA, 24 nt, Human adenovirus D
ggccuccgagcagcgcauccugca

SEQ ID NO: 3928743 - RNA, 18 nt, Human adenovirus D
ggccucgagcuacaugcc

SEQ ID NO: 3928744 - RNA, 22 nt, Human adenovirus D
ggccucucaauugaaugcugug

SEQ ID NO: 3928745 - RNA, 13 nt, Human adenovirus D
ggccucucgcucc

SEQ ID NO: 3928746 - RNA, 19 nt, Human adenovirus D
ggccucuucgcccgaccgc

SEQ ID NO: 3928747 - RNA, 17 nt, Human adenovirus D
ggccugaaccgccgccg

SEQ ID NO: 3928748 - RNA, 20 nt, Human adenovirus D
ggccugcgucaucacccagg

SEQ ID NO: 3928749 - RNA, 14 nt, Human adenovirus D
ggcgaacgugccgc

SEQ ID NO: 3928750 - RNA, 17 nt, Human adenovirus D
ggcgaagggcuggcgag

SEQ ID NO: 3928751 - RNA, 15 nt, Human adenovirus D
ggcgacaagcuggcc

SEQ ID NO: 3928752 - RNA, 18 nt, Human adenovirus D
ggcgacaagcuggccugc

SEQ ID NO: 3928753 - RNA, 14 nt, Human adenovirus D
ggcgaccaccgcga

SEQ ID NO: 3928754 - RNA, 20 nt, Human adenovirus D
ggcgaccagcucuggguccc

SEQ ID NO: 3928755 - RNA, 15 nt, Human adenovirus D
ggcgacgcagccggc

SEQ ID NO: 3928756 - RNA, 18 nt, Human adenovirus D
ggcgagaggcgagcagcu

SEQ ID NO: 3928757 - RNA, 19 nt, Human adenovirus D
ggcgauguugccacccaga

SEQ ID NO: 3928758 - RNA, 22 nt, Human adenovirus D
ggcgcagcugcgcuuagucaug

SEQ ID NO: 3928759 - RNA, 23 nt, Human adenovirus D
ggcgcagcuguuccuggugguac

SEQ ID NO: 3928760 - RNA, 21 nt, Human adenovirus D
ggcgccauucggagcacgccc

SEQ ID NO: 3928761 - RNA, 14 nt, Human adenovirus D
ggcgcccagccagc

SEQ ID NO: 3928762 - RNA, 17 nt, Human adenovirus D
ggcgccggcgcuagcca

SEQ ID NO: 3928763 - RNA, 22 nt, Human adenovirus D
gcgggccucacaguccagguca

SEQ ID NO: 3928764 - RNA, 12 nt, Human adenovirus D
gcgggcuguggg

SEQ ID NO: 3928765 - RNA, 21 nt, Human adenovirus D
gcggggaggagcccgaggaga

SEQ ID NO: 3928766 - RNA, 23 nt, Human adenovirus D
gcggggggagaugaugugcaguu

SEQ ID NO: 3928767 - RNA, 16 nt, Human adenovirus D
gcgggugaugguggcu

SEQ ID NO: 3928768 - RNA, 17 nt, Human adenovirus D
gcgguagagcggccagc

SEQ ID NO: 3928769 - RNA, 14 nt, Human adenovirus D
gcggucgcgguggg

SEQ ID NO: 3928770 - RNA, 19 nt, Human adenovirus D
gcgguguaggggacgugag

SEQ ID NO: 3928771 - RNA, 18 nt, Human adenovirus D
gcgucccuugaggaggaa

SEQ ID NO: 3928772 - RNA, 14 nt, Human adenovirus D
gcgucgagcacagc

SEQ ID NO: 3928773 - RNA, 14 nt, Human adenovirus D
gcgucgaggagcug

SEQ ID NO: 3928774 - RNA, 16 nt, Human adenovirus D
gcguggcgcucgggca

SEQ ID NO: 3928775 - RNA, 18 nt, Human adenovirus D
gcuaagaaaaaaucagag

SEQ ID NO: 3928776 - RNA, 20 nt, Human adenovirus D
gcuacagcaggagugcaggg

SEQ ID NO: 3928777 - RNA, 15 nt, Human adenovirus D
gcuacaugcccagca

SEQ ID NO: 3928778 - RNA, 19 nt, Human adenovirus D
gcuaccucuugcagcuggc

SEQ ID NO: 3928779 - RNA, 20 nt, Human adenovirus D
gcuagaaaacacccacaggg

SEQ ID NO: 3928780 - RNA, 17 nt, Human adenovirus D
gcuagacauggccagca

SEQ ID NO: 3928781 - RNA, 19 nt, Human adenovirus D
gcuagacauggccagcacg

SEQ ID NO: 3928782 - RNA, 21 nt, Human adenovirus D
gcuaguguacaacgcccugcu

SEQ ID NO: 3928783 - RNA, 15 nt, Human adenovirus D
gcuauaaaucuuuuc

SEQ ID NO: 3928784 - RNA, 16 nt, Human adenovirus D
gcuaucugcucuucca

SEQ ID NO: 3928785 - RNA, 21 nt, Human adenovirus D
gcucaacccgggucuccccca

SEQ ID NO: 3928786 - RNA, 23 nt, Human adenovirus D
gcucaccaucugagcucuuacca

SEQ ID NO: 3928787 - RNA, 13 nt, Human adenovirus D
gcucagcugccau

SEQ ID NO: 3928788 - RNA, 15 nt, Human adenovirus D
gcucaggaccauagg

SEQ ID NO: 3928789 - RNA, 14 nt, Human adenovirus D
gcucaucggccaga

SEQ ID NO: 3928790 - RNA, 11 nt, Human adenovirus D
gcuccaaagcu

SEQ ID NO: 3928791 - RNA, 16 nt, Human adenovirus D
gcuccaaagcuagcac

SEQ ID NO: 3928792 - RNA, 12 nt, Human adenovirus D
gcuccagccaaa

SEQ ID NO: 3928793 - RNA, 22 nt, Human adenovirus D
gcuccagcgaaagagagcucgc

SEQ ID NO: 3928794 - RNA, 19 nt, Human adenovirus D
gcucccacagugcccccuc

SEQ ID NO: 3928795 - RNA, 17 nt, Human adenovirus D
gcucccagccuccaccg

SEQ ID NO: 3928796 - RNA, 17 nt, Human adenovirus D
gcuccgcgaacagcagc

SEQ ID NO: 3928797 - RNA, 20 nt, Human adenovirus D
gcuccguuguacgacaccac

SEQ ID NO: 3928798 - RNA, 17 nt, Human adenovirus D
gcuccuggucugcaacc

SEQ ID NO: 3928799 - RNA, 15 nt, Human adenovirus D
gcucgaucuccuccu

SEQ ID NO: 3928800 - RNA, 18 nt, Human adenovirus D
gcucgcgccucaauguca

SEQ ID NO: 3928801 - RNA, 17 nt, Human adenovirus D
gcucggugacgaagaag

SEQ ID NO: 3928802 - RNA, 16 nt, Human adenovirus D
gcucggugacgugcuc

SEQ ID NO: 3928803 - RNA, 21 nt, Human adenovirus D
gcucguagggguugaggggcg

SEQ ID NO: 3928804 - RNA, 21 nt, Human adenovirus D
gcucgucuagaaccccacagg

SEQ ID NO: 3928805 - RNA, 16 nt, Human adenovirus D
gcucgucuuccaggag

SEQ ID NO: 3928806 - RNA, 16 nt, Human adenovirus D
gcucugcugcgccgcg

SEQ ID NO: 3928807 - RNA, 19 nt, Human adenovirus D
gcucuuaccaaguccaggg

SEQ ID NO: 3928808 - RNA, 13 nt, Human adenovirus D
gcugaaagcaugg

SEQ ID NO: 3928809 - RNA, 21 nt, Human adenovirus D
gcugacauccauggccagggg

SEQ ID NO: 3928810 - RNA, 20 nt, Human adenovirus D
gcugaccaauagacagcaga

SEQ ID NO: 3928811 - RNA, 21 nt, Human adenovirus D
gcugaucaacaucuugcagag

SEQ ID NO: 3928812 - RNA, 15 nt, Human adenovirus D
gcugaugcugagccu

SEQ ID NO: 3928813 - RNA, 20 nt, Human adenovirus D
gcugauuacucuaaaugcaa

SEQ ID NO: 3928814 - RNA, 17 nt, Human adenovirus D
gcugcaagguccgcagg

SEQ ID NO: 3928815 - RNA, 15 nt, Human adenovirus D
gcugccccaggcggu

SEQ ID NO: 3928816 - RNA, 18 nt, Human adenovirus D
gcugcccgccaccugcaa

SEQ ID NO: 3928817 - RNA, 24 nt, Human adenovirus D
gcugccggaccucaugcaagaccc

SEQ ID NO: 3928818 - RNA, 16 nt, Human adenovirus D
gcugcgaggagagcag

SEQ ID NO: 3928819 - RNA, 16 nt, Human adenovirus D
gcugcuagagugccac

SEQ ID NO: 3928820 - RNA, 19 nt, Human adenovirus D
gcugcuagagugccacugc

SEQ ID NO: 3928821 - RNA, 14 nt, Human adenovirus D
gcugcucaccaccc

SEQ ID NO: 3928822 - RNA, 20 nt, Human adenovirus D
gcugcucaccaccccggacg

SEQ ID NO: 3928823 - RNA, 20 nt, Human adenovirus D
gcugcugaaacaccugcagc

SEQ ID NO: 3928824 - RNA, 20 nt, Human adenovirus D
gcugcuucugccuggugaag

SEQ ID NO: 3928825 - RNA, 16 nt, Human adenovirus D
gcuggacaagcuucuu

SEQ ID NO: 3928826 - RNA, 13 nt, Human adenovirus D
gcuggccagcacg

SEQ ID NO: 3928827 - RNA, 14 nt, Human adenovirus D
gcuggcccugcugg

SEQ ID NO: 3928828 - RNA, 22 nt, Human adenovirus D
gcuggcugaaucccacucccac

SEQ ID NO: 3928829 - RNA, 22 nt, Human adenovirus D
gcuggcuugguacccgcgaccc

SEQ ID NO: 3928830 - RNA, 19 nt, Human adenovirus D
gcugggacccugugaccaa

SEQ ID NO: 3928831 - RNA, 14 nt, Human adenovirus D
gcugggcucgagca

SEQ ID NO: 3928832 - RNA, 18 nt, Human adenovirus D
gcuggggagggccacguu

SEQ ID NO: 3928833 - RNA, 22 nt, Human adenovirus D
gcuggucacauccaucuccacc

SEQ ID NO: 3928834 - RNA, 14 nt, Human adenovirus D
gcuggucaggccuc

SEQ ID NO: 3928835 - RNA, 16 nt, Human adenovirus D
gcugguggccaccucg

SEQ ID NO: 3928836 - RNA, 20 nt, Human adenovirus D
cucgaacaguccacccagac

SEQ ID NO: 3928837 - RNA, 20 nt, Human adenovirus D
cucgagcuacaugcccagca

SEQ ID NO: 3928838 - RNA, 16 nt, Human adenovirus D
cucgauccccuaccuu

SEQ ID NO: 3928839 - RNA, 20 nt, Human adenovirus D
cucgcacucgacgagccagg

SEQ ID NO: 3928840 - RNA, 22 nt, Human adenovirus D
cucgcagaucugcaucucccag

SEQ ID NO: 3928841 - RNA, 17 nt, Human adenovirus D
cucgcgcccguagucug

SEQ ID NO: 3928842 - RNA, 23 nt, Human adenovirus D
cucgcgcucaucguugugcgccg

SEQ ID NO: 3928843 - RNA, 14 nt, Human adenovirus D
cucgcuacugcuga

SEQ ID NO: 3928844 - RNA, 15 nt, Human adenovirus D
cucgcuacugcugau

SEQ ID NO: 3928845 - RNA, 16 nt, Human adenovirus D
cucgcugcugcagccg

SEQ ID NO: 3928846 - RNA, 13 nt, Human adenovirus D
cucggaguaccug

SEQ ID NO: 3928847 - RNA, 18 nt, Human adenovirus D
cucggcaacgaccugcgc

SEQ ID NO: 3928848 - RNA, 19 nt, Human adenovirus D
cucggccaaucagcaguag

SEQ ID NO: 3928849 - RNA, 17 nt, Human adenovirus D
cucggcgaugguggcgc

SEQ ID NO: 3928850 - RNA, 15 nt, Human adenovirus D
cucggggaucaccag

SEQ ID NO: 3928851 - RNA, 15 nt, Human adenovirus D
cucggucaggagcaa

SEQ ID NO: 3928852 - RNA, 16 nt, Human adenovirus D
cucggucaggagcaag

SEQ ID NO: 3928853 - RNA, 17 nt, Human adenovirus D
cucggugcggcugcugc

SEQ ID NO: 3928854 - RNA, 15 nt, Human adenovirus D
cucgguugaggcacc

SEQ ID NO: 3928855 - RNA, 20 nt, Human adenovirus D
cucguacccgcucaccaucu

SEQ ID NO: 3928856 - RNA, 15 nt, Human adenovirus D
cucguaccuggguca

SEQ ID NO: 3928857 - RNA, 17 nt, Human adenovirus D
cucguuaguccagcaga

SEQ ID NO: 3928858 - RNA, 16 nt, Human adenovirus D
cucucgcuccaugaac

SEQ ID NO: 3928859 - RNA, 20 nt, Human adenovirus D
cucucggccauucuggaggc

SEQ ID NO: 3928860 - RNA, 22 nt, Human adenovirus D
cucucugaagcauaauauggug

SEQ ID NO: 3928861 - RNA, 15 nt, Human adenovirus D
cucugccgccggggc

SEQ ID NO: 3928862 - RNA, 15 nt, Human adenovirus D
cucugcgugaagacc

SEQ ID NO: 3928863 - RNA, 19 nt, Human adenovirus D
cucugguacuccagucucc

SEQ ID NO: 3928864 - RNA, 15 nt, Human adenovirus D
cucuucuuccaugac

SEQ ID NO: 3928865 - RNA, 13 nt, Human adenovirus D
cugaaaaacagaa

SEQ ID NO: 3928866 - RNA, 15 nt, Human adenovirus D
cugaaaaacagaaag

SEQ ID NO: 3928867 - RNA, 20 nt, Human adenovirus D
cugaaacaccugcagcgcca

SEQ ID NO: 3928868 - RNA, 15 nt, Human adenovirus D
cugaacgggggcgcc

SEQ ID NO: 3928869 - RNA, 18 nt, Human adenovirus D
cugaaggagcuggacaag

SEQ ID NO: 3928870 - RNA, 15 nt, Human adenovirus D
cugaccaacuggucu

SEQ ID NO: 3928871 - RNA, 13 nt, Human adenovirus D
cugaccaccaccu

SEQ ID NO: 3928872 - RNA, 13 nt, Human adenovirus D
cugacccagcagg

SEQ ID NO: 3928873 - RNA, 20 nt, Human adenovirus D
cugacgacccgcaaccccga

SEQ ID NO: 3928874 - RNA, 15 nt, Human adenovirus D
cugacgccuccguga

SEQ ID NO: 3928875 - RNA, 15 nt, Human adenovirus D
cugacggcgcagcug

SEQ ID NO: 3928876 - RNA, 16 nt, Human adenovirus D
cugacggcgcagcugu

SEQ ID NO: 3928877 - RNA, 19 nt, Human adenovirus D
cugagcaaccuccugggca

SEQ ID NO: 3928878 - RNA, 18 nt, Human adenovirus D
cugagccgccagcuggcc

SEQ ID NO: 3928879 - RNA, 13 nt, Human adenovirus D
cugagcucgcucg

SEQ ID NO: 3928880 - RNA, 13 nt, Human adenovirus D
cugauaagacaca

SEQ ID NO: 3928881 - RNA, 14 nt, Human adenovirus D
cugaucugauccuu

SEQ ID NO: 3928882 - RNA, 17 nt, Human adenovirus D
cugaucugauccuuguc

SEQ ID NO: 3928883 - RNA, 16 nt, Human adenovirus D
cugauggccacgggga

SEQ ID NO: 3928884 - RNA, 16 nt, Human adenovirus D
cugcaaaaagucacuu

SEQ ID NO: 3928885 - RNA, 22 nt, Human adenovirus D
cugcaaacggugaaccugagcc

SEQ ID NO: 3928886 - RNA, 15 nt, Human adenovirus D
cugcaacccccagcu

SEQ ID NO: 3928887 - RNA, 20 nt, Human adenovirus D
cugcaacccccagcuccuga

SEQ ID NO: 3928888 - RNA, 19 nt, Human adenovirus D
cugcaacugcgcguccguc

SEQ ID NO: 3928889 - RNA, 13 nt, Human adenovirus D
cugcaagaggaga

SEQ ID NO: 3928890 - RNA, 19 nt, Human adenovirus D
cugcaccauccccagguaa

SEQ ID NO: 3928891 - RNA, 19 nt, Human adenovirus D
cugcacgagaaccgccugg

SEQ ID NO: 3928892 - RNA, 21 nt, Human adenovirus D
cugcacgagaaccgccugggg

SEQ ID NO: 3928893 - RNA, 18 nt, Human adenovirus D
cugcagcguguucaaaac

SEQ ID NO: 3928894 - RNA, 20 nt, Human adenovirus D
cugccacuugaacucgggga

SEQ ID NO: 3928895 - RNA, 14 nt, Human adenovirus D
cugcccaccgugcg

SEQ ID NO: 3928896 - RNA, 15 nt, Human adenovirus D
cugcccgccaacacc

SEQ ID NO: 3928897 - RNA, 17 nt, Human adenovirus D
cugccgccgccugcgcu

SEQ ID NO: 3928898 - RNA, 15 nt, Human adenovirus D
cugccggugcacucc

SEQ ID NO: 3928899 - RNA, 22 nt, Human adenovirus D
cugccuggugaagggcacagcc

SEQ ID NO: 3928900 - RNA, 23 nt, Human adenovirus D
cugcgcaaaaccuguucagggac

SEQ ID NO: 3928901 - RNA, 13 nt, Human adenovirus D
cugcgccgggcgc

SEQ ID NO: 3928902 - RNA, 13 nt, Human adenovirus D
cugcgcggggcca

SEQ ID NO: 3928903 - RNA, 20 nt, Human adenovirus D
cugcgcuuugugcccgugga

SEQ ID NO: 3928904 - RNA, 20 nt, Human adenovirus D
cugcgucaucacccagggcg

SEQ ID NO: 3928905 - RNA, 22 nt, Human adenovirus D
cugcuaaacaucgccgagcccg

SEQ ID NO: 3928906 - RNA, 16 nt, Human adenovirus D
cugcuacaucucgggg

SEQ ID NO: 3928907 - RNA, 18 nt, Human adenovirus D
cugcuagagugccacugc

SEQ ID NO: 3928908 - RNA, 17 nt, Human adenovirus D
cugcucaccaccccgga

SEQ ID NO: 3928909 - RNA, 19 nt, Human adenovirus D
cugcucccgggcuccuaca

SEQ ID NO: 3928910 - RNA, 14 nt, Human adenovirus D
cugcucucucuucu

SEQ ID NO: 3928911 - RNA, 16 nt, Human adenovirus D
cugcugccgcucaguc

SEQ ID NO: 3928912 - RNA, 22 nt, Human adenovirus D
cugcugcugaucgcgcccuuca

SEQ ID NO: 3928913 - RNA, 17 nt, Human adenovirus D
cugcuggcccugcuggc

SEQ ID NO: 3928914 - RNA, 17 nt, Human adenovirus D
cugcuguaaagccagaa

SEQ ID NO: 3928915 - RNA, 14 nt, Human adenovirus D
cuggaagcccugag

SEQ ID NO: 3928916 - RNA, 22 nt, Human adenovirus D
cuggaagcccugagccgccagc

SEQ ID NO: 3928917 - RNA, 15 nt, Human adenovirus D
cuggagacgggcugc

SEQ ID NO: 3928918 - RNA, 22 nt, Human adenovirus D
cuggagauguggguuggcuugc

SEQ ID NO: 3928919 - RNA, 20 nt, Human adenovirus D
cuggauuuccugccaccagu

SEQ ID NO: 3928920 - RNA, 22 nt, Human adenovirus D
cuggcacauacaaagcugaaag

SEQ ID NO: 3928921 - RNA, 14 nt, Human adenovirus D
cuggccgagcugga

SEQ ID NO: 3928922 - RNA, 17 nt, Human adenovirus D
cuggccucgggcauuaa

SEQ ID NO: 3928923 - RNA, 19 nt, Human adenovirus D
cuggcgacgcagccggcga

SEQ ID NO: 3928924 - RNA, 17 nt, Human adenovirus D
cuggcgagacugggggc

SEQ ID NO: 3928925 - RNA, 13 nt, Human adenovirus D
cuggcucccagcc

SEQ ID NO: 3928926 - RNA, 18 nt, Human adenovirus D
cuggcucccagccuccac

SEQ ID NO: 3928927 - RNA, 19 nt, Human adenovirus D
cugggcaacggccgcuacg

SEQ ID NO: 3928928 - RNA, 19 nt, Human adenovirus D
cugggcauagucgcgccgc

SEQ ID NO: 3928929 - RNA, 20 nt, Human adenovirus D
cugggcguggugcuggauga

SEQ ID NO: 3928930 - RNA, 18 nt, Human adenovirus D
cugggcguugcgggccga

SEQ ID NO: 3928931 - RNA, 15 nt, Human adenovirus D
cugggcugggacccu

SEQ ID NO: 3928932 - RNA, 21 nt, Human adenovirus D
cugggguacuuuacgcuggcc

SEQ ID NO: 3928933 - RNA, 14 nt, Human adenovirus D
cugggugacagaac

SEQ ID NO: 3928934 - RNA, 13 nt, Human adenovirus D
cuggguggcccuu

SEQ ID NO: 3928935 - RNA, 21 nt, Human adenovirus D
cugguagggggcgccgccggc

SEQ ID NO: 3928936 - RNA, 19 nt, Human adenovirus D
cuggucugcaacccccagc

SEQ ID NO: 3928937 - RNA, 15 nt, Human adenovirus D
cugguggaaacagac

SEQ ID NO: 3928938 - RNA, 22 nt, Human adenovirus D
cugguggaaacagacagccagg

SEQ ID NO: 3928939 - RNA, 18 nt, Human adenovirus D
cugguggcgcugaacgcc

SEQ ID NO: 3928940 - RNA, 22 nt, Human adenovirus D
cuguccaugguagcaauggaaa

SEQ ID NO: 3928941 - RNA, 17 nt, Human adenovirus D
cugucuuaccagcucuu

SEQ ID NO: 3928942 - RNA, 18 nt, Human adenovirus D
cuguggucgacuugcaag

SEQ ID NO: 3928943 - RNA, 19 nt, Human adenovirus D
cuguguccgcgcucgguga

SEQ ID NO: 3928944 - RNA, 20 nt, Human adenovirus D
cuguugcauguucuugcaug

SEQ ID NO: 3928945 - RNA, 14 nt, Human adenovirus D
cuguuggagaacga

SEQ ID NO: 3928946 - RNA, 13 nt, Human adenovirus D
cuuaaccacccac

SEQ ID NO: 3928947 - RNA, 17 nt, Human adenovirus D
cuuacucagguuuggau

SEQ ID NO: 3928948 - RNA, 21 nt, Human adenovirus D
cuuacucuauaacauuugaau

SEQ ID NO: 3928949 - RNA, 13 nt, Human adenovirus D
cuuauccacaaac

SEQ ID NO: 3928950 - RNA, 16 nt, Human adenovirus D
cuucaaccccuucucg

SEQ ID NO: 3928951 - RNA, 16 nt, Human adenovirus D
cuucaccgaccugggu

SEQ ID NO: 3928952 - RNA, 19 nt, Human adenovirus D
cuucaccggcuaccuugca

SEQ ID NO: 3928953 - RNA, 20 nt, Human adenovirus D
cuucagcaucagucuccugg

SEQ ID NO: 3928954 - RNA, 18 nt, Human adenovirus D
cuucagccugggcaacaa

SEQ ID NO: 3928955 - RNA, 20 nt, Human adenovirus D
aaaaacccucgaccagcauc

SEQ ID NO: 3928956 - RNA, 19 nt, Human adenovirus D
aaaaacugcaugcuggaau

SEQ ID NO: 3928957 - RNA, 18 nt, Human adenovirus D
aaaaagaaacaagucaaa

SEQ ID NO: 3928958 - RNA, 13 nt, Human adenovirus D
aaaaagucacuua

SEQ ID NO: 3928959 - RNA, 19 nt, Human adenovirus D
aaaaaucacucuuuccagc

SEQ ID NO: 3928960 - RNA, 11 nt, Human adenovirus D
aaaacccacuc

SEQ ID NO: 3928961 - RNA, 14 nt, Human adenovirus D
aaaacugcaugcug

SEQ ID NO: 3928962 - RNA, 21 nt, Human adenovirus D
aaaagcagcacaguaaguucc

SEQ ID NO: 3928963 - RNA, 16 nt, Human adenovirus D
aaaccuaccacuggcu

SEQ ID NO: 3928964 - RNA, 12 nt, Human adenovirus D
aaacuaaagcca

SEQ ID NO: 3928965 - RNA, 15 nt, Human adenovirus D
aaacuaaagccaaac

SEQ ID NO: 3928966 - RNA, 23 nt, Human adenovirus D
aaacuaaugacaaacaaaagcca

SEQ ID NO: 3928967 - RNA, 20 nt, Human adenovirus D
aaagaucacuuacuugaaau

SEQ ID NO: 3928968 - RNA, 11 nt, Human adenovirus D
aaagcaugguu

SEQ ID NO: 3928969 - RNA, 13 nt, Human adenovirus D
aaagcgccaggag

SEQ ID NO: 3928970 - RNA, 16 nt, Human adenovirus D
aaagcucccacagugc

SEQ ID NO: 3928971 - RNA, 20 nt, Human adenovirus D
aaaucgagcaggaccugggc

SEQ ID NO: 3928972 - RNA, 14 nt, Human adenovirus D
aaaucuuacacaug

SEQ ID NO: 3928973 - RNA, 12 nt, Human adenovirus D
aaaucuuuaucu

SEQ ID NO: 3928974 - RNA, 23 nt, Human adenovirus D
aaaugaagccguccucugaaaag

SEQ ID NO: 3928975 - RNA, 18 nt, Human adenovirus D
aacaaaacccaugaaaga

SEQ ID NO: 3928976 - RNA, 15 nt, Human adenovirus D
aacaauaaaaaacuu

SEQ ID NO: 3928977 - RNA, 14 nt, Human adenovirus D
aacagacagccagg

SEQ ID NO: 3928978 - RNA, 10 nt, Human adenovirus D
aacagcagca

SEQ ID NO: 3928979 - RNA, 16 nt, Human adenovirus D
aacagcauauaccccu

SEQ ID NO: 3928980 - RNA, 23 nt, Human adenovirus D
aacaggaugggucugugccucuc

SEQ ID NO: 3928981 - RNA, 22 nt, Human adenovirus D
aacaggcugucgguguccccgu

SEQ ID NO: 3928982 - RNA, 17 nt, Human adenovirus D
aacauuacuucuggcac

SEQ ID NO: 3928983 - RNA, 15 nt, Human adenovirus D
aaccggaggcuggcu

SEQ ID NO: 3928984 - RNA, 12 nt, Human adenovirus D
aaccucagccac

SEQ ID NO: 3928985 - RNA, 15 nt, Human adenovirus D
aaccugcgcgggcug

SEQ ID NO: 3928986 - RNA, 21 nt, Human adenovirus D
cuggugguuuucauguucgcc

SEQ ID NO: 3928987 - RNA, 21 nt, Human adenovirus D
cugucccuacgucuacaaggc

SEQ ID NO: 3928988 - RNA, 13 nt, Human adenovirus D
cugucggccgagg

SEQ ID NO: 3928989 - RNA, 14 nt, Human adenovirus D
cuguucagggaccg

SEQ ID NO: 3928990 - RNA, 18 nt, Human adenovirus D
cuuaagaaagacacaaaa

SEQ ID NO: 3928991 - RNA, 22 nt, Human adenovirus D
cuuacauguccaguuacgccuc

SEQ ID NO: 3928992 - RNA, 14 nt, Human adenovirus D
cuuagacugcuauc

SEQ ID NO: 3928993 - RNA, 16 nt, Human adenovirus D
cuuaguucagcugcaa

SEQ ID NO: 3928994 - RNA, 15 nt, Human adenovirus D
cuucaacaucugugc

SEQ ID NO: 3928995 - RNA, 19 nt, Human adenovirus D
cuucaaccccuucucggga

SEQ ID NO: 3928996 - RNA, 22 nt, Human adenovirus D
cuucaagaaagucuccaucaug

SEQ ID NO: 3928997 - RNA, 17 nt, Human adenovirus D
cuucaccgaccuggguc

SEQ ID NO: 3928998 - RNA, 20 nt, Human adenovirus D
cuuccacgugcccgagggcu

SEQ ID NO: 3928999 - RNA, 20 nt, Human adenovirus D
cuuccacuguuagcuacuuu

SEQ ID NO: 3929000 - RNA, 22 nt, Human adenovirus D
cuucccauugaauggcacuggc

SEQ ID NO: 3929001 - RNA, 13 nt, Human adenovirus D
cuuccgcgccaag

SEQ ID NO: 3929002 - RNA, 19 nt, Human adenovirus D
cuuccguucuacccagcaa

SEQ ID NO: 3929003 - RNA, 17 nt, Human adenovirus D
cuuccuccguagccugg

SEQ ID NO: 3929004 - RNA, 15 nt, Human adenovirus D
cuuccugcagcucau

SEQ ID NO: 3929005 - RNA, 12 nt, Human adenovirus D
cuuccuggggca

SEQ ID NO: 3929006 - RNA, 17 nt, Human adenovirus D
cuucgaguacgaggcca

SEQ ID NO: 3929007 - RNA, 12 nt, Human adenovirus D
cuucgcccugcg

SEQ ID NO: 3929008 - RNA, 13 nt, Human adenovirus D
cuucgugcacugg

SEQ ID NO: 3929009 - RNA, 20 nt, Human adenovirus D
cuucuacagccagcagcucc

SEQ ID NO: 3929010 - RNA, 20 nt, Human adenovirus D
cuucucgccgcgcgugcccc

SEQ ID NO: 3929011 - RNA, 21 nt, Human adenovirus D
cuucuuccccauggcgcacaa

SEQ ID NO: 3929012 - RNA, 21 nt, Human adenovirus D
cuucuuccggcaaaaaucaca

SEQ ID NO: 3929013 - RNA, 23 nt, Human adenovirus D
cuugacagcaccgccgcagccgc

SEQ ID NO: 3929014 - RNA, 15 nt, Human adenovirus D
cuugcaacuugcaaa

SEQ ID NO: 3929015 - RNA, 13 nt, Human adenovirus D
cuugcacaguugg

SEQ ID NO: 3929016 - RNA, 14 nt, Human adenovirus D
cuugcugggcgagg

SEQ ID NO: 3929017 - RNA, 17 nt, Human adenovirus D
cuugguaugagguugua

SEQ ID NO: 3929018 - RNA, 18 nt, Human adenovirus D
cuuggugggcagaggagg

SEQ ID NO: 3929019 - RNA, 21 nt, Human adenovirus D
cuuguaccugcccgacuccua

SEQ ID NO: 3929020 - RNA, 17 nt, Human adenovirus D
cuuguagggacagcagc

SEQ ID NO: 3929021 - RNA, 17 nt, Human adenovirus D
cuugugcccgcccaggu

SEQ ID NO: 3929022 - RNA, 16 nt, Human adenovirus D
cuugugguucuucugu

SEQ ID NO: 3929023 - RNA, 17 nt, Human adenovirus D
cuugugguuuuaacagg

SEQ ID NO: 3929024 - RNA, 19 nt, Human adenovirus D
cuugugguuuuaacaggga

SEQ ID NO: 3929025 - RNA, 16 nt, Human adenovirus D
cuuuacgcuggccagc

SEQ ID NO: 3929026 - RNA, 22 nt, Human adenovirus D
cuuuaguugguccagauggaaa

SEQ ID NO: 3929027 - RNA, 18 nt, Human adenovirus D
cuuugaaccugaaagaca

SEQ ID NO: 3929028 - RNA, 16 nt, Human adenovirus D
cuuugcggcaguuucg

SEQ ID NO: 3929029 - RNA, 12 nt, Human adenovirus D
cuuuggcaaaga

SEQ ID NO: 3929030 - RNA, 19 nt, Human adenovirus D
cuuuguaacucuaaucauu

SEQ ID NO: 3929031 - RNA, 14 nt, Human adenovirus D
cuuuuccaggaaag

SEQ ID NO: 3929032 - RNA, 15 nt, Human adenovirus D
cuuuuccgagaccau

SEQ ID NO: 3929033 - RNA, 20 nt, Human adenovirus D
gaaaaauugcuauaaaucuu

SEQ ID NO: 3929034 - RNA, 17 nt, Human adenovirus D
gaaaacuuuaaugcucc

SEQ ID NO: 3929035 - RNA, 14 nt, Human adenovirus D
gaaaagucauccaa

SEQ ID NO: 3929036 - RNA, 17 nt, Human adenovirus D
gaaacaagucaaaagaa

SEQ ID NO: 3929037 - RNA, 23 nt, Human adenovirus D
gaaacagcagaggaagaggguca

SEQ ID NO: 3929038 - RNA, 17 nt, Human adenovirus D
gaaacgucccagcagca

SEQ ID NO: 3929039 - RNA, 17 nt, Human adenovirus D
gaaacgucccaggaaac

SEQ ID NO: 3929040 - RNA, 15 nt, Human adenovirus D
gaaacucagucacuc

SEQ ID NO: 3929041 - RNA, 20 nt, Human adenovirus D
gaaagggcccgggacggagg

SEQ ID NO: 3929042 - RNA, 15 nt, Human adenovirus D
gaaaucacacuuuug

SEQ ID NO: 3929043 - RNA, 20 nt, Human adenovirus D
gaacaaaacccaugaaagaa

SEQ ID NO: 3929044 - RNA, 23 nt, Human adenovirus D
gaacaacgauuucacccccgccg

SEQ ID NO: 3929045 - RNA, 23 nt, Human adenovirus D
gaacccgcgcucgcgcaccugcu

SEQ ID NO: 3929046 - RNA, 20 nt, Human adenovirus D
gaaccugaaggagcuggaca

SEQ ID NO: 3929047 - RNA, 16 nt, Human adenovirus D
gaacgcgcgaagaugg

SEQ ID NO: 3929048 - RNA, 12 nt, Human adenovirus D
gaacgggggcag

SEQ ID NO: 3929049 - RNA, 17 nt, Human adenovirus D
gaacugauaagacacau

SEQ ID NO: 3929050 - RNA, 14 nt, Human adenovirus D
gaacuuuagaagug

SEQ ID NO: 3929051 - RNA, 22 nt, Human adenovirus D
gaagaaccauuuuuauuccaaa

SEQ ID NO: 3929052 - RNA, 14 nt, Human adenovirus D
gaagaagagcagca

SEQ ID NO: 3929053 - RNA, 18 nt, Human adenovirus D
gaagaaugggacagccag

SEQ ID NO: 3929054 - RNA, 17 nt, Human adenovirus D
gaagaauuuggagacgc

SEQ ID NO: 3929055 - RNA, 16 nt, Human adenovirus D
gaagagcguccgcagg

SEQ ID NO: 3929056 - RNA, 14 nt, Human adenovirus D
gaagaucagcugca

SEQ ID NO: 3929057 - RNA, 15 nt, Human adenovirus D
gaagauggaggagca

SEQ ID NO: 3929058 - RNA, 19 nt, Human adenovirus D
gaagcccagagcucgcggg

SEQ ID NO: 3929059 - RNA, 23 nt, Human adenovirus D
gaagccuucuauggaggcagagc

SEQ ID NO: 3929060 - RNA, 23 nt, Human adenovirus D
gaagcgcucgaucaucuccccgc

SEQ ID NO: 3929061 - RNA, 21 nt, Human adenovirus D
gaagggcucggucgggacgag

SEQ ID NO: 3929062 - RNA, 16 nt, Human adenovirus D
gaaguaaauuugacac

SEQ ID NO: 3929063 - RNA, 18 nt, Human adenovirus D
gaagugcggcggcggcug

SEQ ID NO: 3929064 - RNA, 23 nt, Human adenovirus D
gaagugcggcggcggcuggcggu

SEQ ID NO: 3929065 - RNA, 13 nt, Human adenovirus D
gaauaaagccucu

SEQ ID NO: 3929066 - RNA, 17 nt, Human adenovirus D
gaauaacaugcugauca

SEQ ID NO: 3929067 - RNA, 22 nt, Human adenovirus D
gaauaucagacaugcugcuaca

SEQ ID NO: 3929068 - RNA, 20 nt, Human adenovirus D
gaauauccccuuccucacuc

SEQ ID NO: 3929069 - RNA, 17 nt, Human adenovirus D
ucaaggacaugcagcug

SEQ ID NO: 3929070 - RNA, 18 nt, Human adenovirus D
ucaaguuugacagcagaa

SEQ ID NO: 3929071 - RNA, 17 nt, Human adenovirus D
ucaaucucccaccacca

SEQ ID NO: 3929072 - RNA, 19 nt, Human adenovirus D
ucacacuuaguucagcugc

SEQ ID NO: 3929073 - RNA, 23 nt, Human adenovirus D
ucacacuuaguucagcugcaaug

SEQ ID NO: 3929074 - RNA, 23 nt, Human adenovirus D
ucacagcuaagaaaaaaucagag

SEQ ID NO: 3929075 - RNA, 14 nt, Human adenovirus D
ucacaggaggcaca

SEQ ID NO: 3929076 - RNA, 19 nt, Human adenovirus D
ucaccauguuauucagcag

SEQ ID NO: 3929077 - RNA, 13 nt, Human adenovirus D
ucacccagcaguc

SEQ ID NO: 3929078 - RNA, 17 nt, Human adenovirus D
ucacccugcccuuccag

SEQ ID NO: 3929079 - RNA, 18 nt, Human adenovirus D
ucaccucaacgcccaggc

SEQ ID NO: 3929080 - RNA, 18 nt, Human adenovirus D
ucaccuuccugcagcuca

SEQ ID NO: 3929081 - RNA, 19 nt, Human adenovirus D
ucaccuuggcuuugcuggg

SEQ ID NO: 3929082 - RNA, 22 nt, Human adenovirus D
ucacuccccccuuugucuccuc

SEQ ID NO: 3929083 - RNA, 19 nt, Human adenovirus D
ucacuuugguacuuacaaa

SEQ ID NO: 3929084 - RNA, 13 nt, Human adenovirus D
ucagagugcacca

SEQ ID NO: 3929085 - RNA, 13 nt, Human adenovirus D
ucagauauuccag

SEQ ID NO: 3929086 - RNA, 23 nt, Human adenovirus D
ucagaucgugguaaacgggcccu

SEQ ID NO: 3929087 - RNA, 14 nt, Human adenovirus D
ucagcugcagcgca

SEQ ID NO: 3929088 - RNA, 16 nt, Human adenovirus D
ucaggagcgcagccug

SEQ ID NO: 3929089 - RNA, 18 nt, Human adenovirus D
ucaggagcgcagccugag

SEQ ID NO: 3929090 - RNA, 15 nt, Human adenovirus D
ucagguguccagcug

SEQ ID NO: 3929091 - RNA, 17 nt, Human adenovirus D
ucagguuuggauauuca

SEQ ID NO: 3929092 - RNA, 15 nt, Human adenovirus D
ucagucuccuggugc

SEQ ID NO: 3929093 - RNA, 17 nt, Human adenovirus D
ucauaugguagacccac

SEQ ID NO: 3929094 - RNA, 17 nt, Human adenovirus D
ucaucacaucagccagg

SEQ ID NO: 3929095 - RNA, 16 nt, Human adenovirus D
ucaucacccagcaguc

SEQ ID NO: 3929096 - RNA, 21 nt, Human adenovirus D
ucaucaccguuccaugcagac

SEQ ID NO: 3929097 - RNA, 21 nt, Human adenovirus D
ucauccuuccaguacucccgg

SEQ ID NO: 3929098 - RNA, 14 nt, Human adenovirus D
ucaucgacuggugc

SEQ ID NO: 3929099 - RNA, 20 nt, Human adenovirus D
ucaucgccugcuugcaagac

SEQ ID NO: 3929100 - RNA, 16 nt, Human adenovirus D
ucaucucgcccagcaa

SEQ ID NO: 3929101 - RNA, 19 nt, Human adenovirus D
ucaugaucuaccccuguuu

SEQ ID NO: 3929102 - RNA, 16 nt, Human adenovirus D
ucaugcaacuuggaag

SEQ ID NO: 3929103 - RNA, 15 nt, Human adenovirus D
ucauguacuacaaca

SEQ ID NO: 3929104 - RNA, 19 nt, Human adenovirus D
ucauguuggggaugaugga

SEQ ID NO: 3929105 - RNA, 18 nt, Human adenovirus D
ucauucaaggccauaaau

SEQ ID NO: 3929106 - RNA, 24 nt, Human adenovirus D
ucauucucgagcgaucugggaugc

SEQ ID NO: 3929107 - RNA, 18 nt, Human adenovirus D
uccaagcgggccucacag

SEQ ID NO: 3929108 - RNA, 20 nt, Human adenovirus D
uccacaaacuacauggacaa

SEQ ID NO: 3929109 - RNA, 18 nt, Human adenovirus D
uccaccgaaggcagcucc

SEQ ID NO: 3929110 - RNA, 21 nt, Human adenovirus D
uccaccgaaggcagcuccggu

SEQ ID NO: 3929111 - RNA, 16 nt, Human adenovirus D
uccaccucggugcagc

SEQ ID NO: 3929112 - RNA, 21 nt, Human adenovirus D
uccaccucucccgaucauuga

SEQ ID NO: 3929113 - RNA, 15 nt, Human adenovirus D
uccacgagcgccagc

SEQ ID NO: 3929114 - RNA, 17 nt, Human adenovirus D
uccacgagcgccagcug

SEQ ID NO: 3929115 - RNA, 20 nt, Human adenovirus D
uccagaggacuuggaugagg

SEQ ID NO: 3929116 - RNA, 22 nt, Human adenovirus D
uccagauggaaaggucacuugg

SEQ ID NO: 3929117 - RNA, 19 nt, Human adenovirus D
uccagcagcaggguaccca

SEQ ID NO: 3929118 - RNA, 23 nt, Human adenovirus D
uccagcagcaggguacccacugg

SEQ ID NO: 3929119 - RNA, 19 nt, Human adenovirus D
uccagggucucaggguccg

SEQ ID NO: 3929120 - RNA, 12 nt, Human adenovirus D
uccagggugcgc

SEQ ID NO: 3929121 - RNA, 20 nt, Human adenovirus D
uccaggucuggcacaucuuu

SEQ ID NO: 3929122 - RNA, 15 nt, Human adenovirus D
uccaguacucccgga

SEQ ID NO: 3929123 - RNA, 20 nt, Human adenovirus D
uccaguaggaaccagcacac

SEQ ID NO: 3929124 - RNA, 23 nt, Human adenovirus D
uccaguuacgggagcgagccccc

SEQ ID NO: 3929125 - RNA, 22 nt, Human adenovirus D
uccaucagcgcccucagcaguc

SEQ ID NO: 3929126 - RNA, 22 nt, Human adenovirus D
uccaucgugcgcgaccugggcu

SEQ ID NO: 3929127 - RNA, 17 nt, Human adenovirus D
ucccaacagccuucagc

SEQ ID NO: 3929128 - RNA, 17 nt, Human adenovirus D
ucccagcgccgcgcugg

SEQ ID NO: 3929129 - RNA, 13 nt, Human adenovirus D
ucccaggacgaga

SEQ ID NO: 3929130 - RNA, 15 nt, Human adenovirus D
ucccaggucauacaa

SEQ ID NO: 3929131 - RNA, 12 nt, Human adenovirus D
ucccccagcaug

SEQ ID NO: 3929132 - RNA, 18 nt, Human adenovirus D
uccccgaggcccuugcca

SEQ ID NO: 3929133 - RNA, 13 nt, Human adenovirus D
uccccgcgccgcg

SEQ ID NO: 3929134 - RNA, 22 nt, Human adenovirus D
uccccucaucacaucagccagg

SEQ ID NO: 3929135 - RNA, 22 nt, Human adenovirus D
uccccucgcgcaacugggccgc

SEQ ID NO: 3929136 - RNA, 20 nt, Human adenovirus D
ggggugaugagcugcgagga

SEQ ID NO: 3929137 - RNA, 14 nt, Human adenovirus D
ggggugguccuggg

SEQ ID NO: 3929138 - RNA, 21 nt, Human adenovirus D
gggucaucuugcacaguuggc

SEQ ID NO: 3929139 - RNA, 14 nt, Human adenovirus D
gggugcgcgacucc

SEQ ID NO: 3929140 - RNA, 22 nt, Human adenovirus D
ggguguuuuugcgaaaacacuu

SEQ ID NO: 3929141 - RNA, 18 nt, Human adenovirus D
gguaauccacggacagaa

SEQ ID NO: 3929142 - RNA, 16 nt, Human adenovirus D
gguacuugggcugcca

SEQ ID NO: 3929143 - RNA, 21 nt, Human adenovirus D
gguagcaccacugcauggccu

SEQ ID NO: 3929144 - RNA, 17 nt, Human adenovirus D
ggucacacuagcgcccu

SEQ ID NO: 3929145 - RNA, 23 nt, Human adenovirus D
ggucacauccaucuccaccacgu

SEQ ID NO: 3929146 - RNA, 13 nt, Human adenovirus D
ggucagagugcac

SEQ ID NO: 3929147 - RNA, 18 nt, Human adenovirus D
ggucagcgaugagcagcu

SEQ ID NO: 3929148 - RNA, 15 nt, Human adenovirus D
gguccccgaggcccu

SEQ ID NO: 3929149 - RNA, 13 nt, Human adenovirus D
ggucgcugccgga

SEQ ID NO: 3929150 - RNA, 14 nt, Human adenovirus D
ggucggagccccuu

SEQ ID NO: 3929151 - RNA, 18 nt, Human adenovirus D
ggucggcgacgacgcgcu

SEQ ID NO: 3929152 - RNA, 15 nt, Human adenovirus D
ggucgucgccccgga

SEQ ID NO: 3929153 - RNA, 15 nt, Human adenovirus D
ggucugcuccugcac

SEQ ID NO: 3929154 - RNA, 16 nt, Human adenovirus D
ggugaagcaggagcgc

SEQ ID NO: 3929155 - RNA, 23 nt, Human adenovirus D
ggugaggaucauaucccagggga

SEQ ID NO: 3929156 - RNA, 15 nt, Human adenovirus D
ggugagggggucccg

SEQ ID NO: 3929157 - RNA, 16 nt, Human adenovirus D
ggugaguugguggccg

SEQ ID NO: 3929158 - RNA, 19 nt, Human adenovirus D
ggugcagucguggacgcug

SEQ ID NO: 3929159 - RNA, 17 nt, Human adenovirus D
ggugcaguuugcccgcg

SEQ ID NO: 3929160 - RNA, 14 nt, Human adenovirus D
ggugcgcuggggcu

SEQ ID NO: 3929161 - RNA, 17 nt, Human adenovirus D
ggugcgucgagcacagc

SEQ ID NO: 3929162 - RNA, 15 nt, Human adenovirus D
ggugcuaaagcucuu

SEQ ID NO: 3929163 - RNA, 19 nt, Human adenovirus D
ggugcugaaacgggcacgg

SEQ ID NO: 3929164 - RNA, 20 nt, Human adenovirus D
ggugcugccccaggcggugc

SEQ ID NO: 3929165 - RNA, 23 nt, Human adenovirus D
gguggaaacagacagccagguca

SEQ ID NO: 3929166 - RNA, 16 nt, Human adenovirus D
gguggacgagcagacc

SEQ ID NO: 3929167 - RNA, 20 nt, Human adenovirus D
gguggacuucacagagagcc

SEQ ID NO: 3929168 - RNA, 23 nt, Human adenovirus D
gguguaccagucgggcccggacu

SEQ ID NO: 3929169 - RNA, 14 nt, Human adenovirus D
ggugucccugacca

SEQ ID NO: 3929170 - RNA, 15 nt, Human adenovirus D
ggugucuuccucucc

SEQ ID NO: 3929171 - RNA, 18 nt, Human adenovirus D
gguucaagaacgagggcc

SEQ ID NO: 3929172 - RNA, 19 nt, Human adenovirus D
gguucauguugugcaggac

SEQ ID NO: 3929173 - RNA, 15 nt, Human adenovirus D
gguucuucacccagc

SEQ ID NO: 3929174 - RNA, 17 nt, Human adenovirus D
guaaagccagcagcaca

SEQ ID NO: 3929175 - RNA, 17 nt, Human adenovirus D
guaaaugacucuccuga

SEQ ID NO: 3929176 - RNA, 18 nt, Human adenovirus D
guacaacaugcugacugc

SEQ ID NO: 3929177 - RNA, 18 nt, Human adenovirus D
guacaacgcccugcugga

SEQ ID NO: 3929178 - RNA, 15 nt, Human adenovirus D
guacacgguucucuc

SEQ ID NO: 3929179 - RNA, 17 nt, Human adenovirus D
guacagcacagcaggga

SEQ ID NO: 3929180 - RNA, 17 nt, Human adenovirus D
guaccaugggaaaugca

SEQ ID NO: 3929181 - RNA, 13 nt, Human adenovirus D
guacccgaggacu

SEQ ID NO: 3929182 - RNA, 18 nt, Human adenovirus D
guacgagagcgugauggc

SEQ ID NO: 3929183 - RNA, 22 nt, Human adenovirus D
guacgagagcgugauggcgcag

SEQ ID NO: 3929184 - RNA, 18 nt, Human adenovirus D
guacuaaugacagaggca

SEQ ID NO: 3929185 - RNA, 22 nt, Human adenovirus D
guacuacaacaguacuggcaac

SEQ ID NO: 3929186 - RNA, 13 nt, Human adenovirus D
guacucauaaaga

SEQ ID NO: 3929187 - RNA, 16 nt, Human adenovirus D
guacuucugccagcag

SEQ ID NO: 3929188 - RNA, 23 nt, Human adenovirus D
guagaagcaacagauuuaagcaa

SEQ ID NO: 3929189 - RNA, 14 nt, Human adenovirus D
guagagcggccagc

SEQ ID NO: 3929190 - RNA, 15 nt, Human adenovirus D
guagcagcagaggaa

SEQ ID NO: 3929191 - RNA, 20 nt, Human adenovirus D
guagcccgugcacuugggga

SEQ ID NO: 3929192 - RNA, 15 nt, Human adenovirus D
guagcugcgcggggc

SEQ ID NO: 3929193 - RNA, 21 nt, Human adenovirus D
guagguauucccucucgagag

SEQ ID NO: 3929194 - RNA, 16 nt, Human adenovirus D
guaguggcucgcgccc

SEQ ID NO: 3929195 - RNA, 17 nt, Human adenovirus D
guaguugcgcaggcgcu

SEQ ID NO: 3929196 - RNA, 19 nt, Human adenovirus D
guaugccaagauagcccug

SEQ ID NO: 3929197 - RNA, 22 nt, Human adenovirus D
gucaaccuugaaaccccagaca

SEQ ID NO: 3929198 - RNA, 16 nt, Human adenovirus D
gucacacuuaguucag

SEQ ID NO: 3929199 - RNA, 21 nt, Human adenovirus D
gucacacuuaguucagcugca

SEQ ID NO: 3929200 - RNA, 19 nt, Human adenovirus D
gucagacccaguggcgaga

SEQ ID NO: 3929201 - RNA, 20 nt, Human adenovirus D
gucaggcagcggggacagag

SEQ ID NO: 3929202 - RNA, 14 nt, Human adenovirus D
gucaggcaggcaug

SEQ ID NO: 3929203 - RNA, 15 nt, Human adenovirus D
gucagggaacugaua

SEQ ID NO: 3929204 - RNA, 13 nt, Human adenovirus D
gucagugaagccc

SEQ ID NO: 3929205 - RNA, 13 nt, Human adenovirus D
gucaucgacucgg

SEQ ID NO: 3929206 - RNA, 15 nt, Human adenovirus D
gucauugauacccug

SEQ ID NO: 3929207 - RNA, 17 nt, Human adenovirus D
guccacgagcgccagcu

SEQ ID NO: 3929208 - RNA, 23 nt, Human adenovirus D
guccaugguagcaauggaaauca

SEQ ID NO: 3929209 - RNA, 13 nt, Human adenovirus D
gucccagcagcac

SEQ ID NO: 3929210 - RNA, 22 nt, Human adenovirus D
gucccgguguugcgcccugaga

SEQ ID NO: 3929211 - RNA, 18 nt, Human adenovirus D
gucccucauccuccggga

SEQ ID NO: 3929212 - RNA, 19 nt, Human adenovirus D
gucccuucucggaccaacc

SEQ ID NO: 3929213 - RNA, 15 nt, Human adenovirus D
gucccuuuuccagga

SEQ ID NO: 3929214 - RNA, 17 nt, Human adenovirus D
guccgccaagcuccucg

SEQ ID NO: 3929215 - RNA, 16 nt, Human adenovirus D
guccucccccgagcgc

SEQ ID NO: 3929216 - RNA, 21 nt, Human adenovirus D
guccucugaaaagucauccaa

SEQ ID NO: 3929217 - RNA, 12 nt, Human adenovirus D
guccuggucacc

SEQ ID NO: 3929218 - RNA, 19 nt, Human adenovirus D
guccuucacucccaaccag

SEQ ID NO: 3929219 - RNA, 17 nt, Human adenovirus D
guccuugaggaggagac

SEQ ID NO: 3929220 - RNA, 14 nt, Human adenovirus D
guccuugccuuccu

SEQ ID NO: 3929221 - RNA, 21 nt, Human adenovirus D
guccuuuagacaacagccgca

SEQ ID NO: 3929222 - RNA, 14 nt, Human adenovirus D
gucgaggagaccug

SEQ ID NO: 3929223 - RNA, 22 nt, Human adenovirus D
gucgccacggucaccgagccuc

SEQ ID NO: 3929224 - RNA, 14 nt, Human adenovirus D
gucgccggaggagg

SEQ ID NO: 3929225 - RNA, 15 nt, Human adenovirus D
gucgccucggaccug

SEQ ID NO: 3929226 - RNA, 18 nt, Human adenovirus D
gucgcggacgcgcucccg

SEQ ID NO: 3929227 - RNA, 21 nt, Human adenovirus D
gucggcgcgcuccuuggccgc

SEQ ID NO: 3929228 - RNA, 19 nt, Human adenovirus D
gucguacuucugccagcag

SEQ ID NO: 3929229 - RNA, 15 nt, Human adenovirus D
gucuacuucaacccc

SEQ ID NO: 3929230 - RNA, 16 nt, Human adenovirus D
gucuagaaccccacag

SEQ ID NO: 3929231 - RNA, 21 nt, Human adenovirus D
gucuccugccugggaauccug

SEQ ID NO: 3929232 - RNA, 14 nt, Human adenovirus D
gucugaagcgccgc

SEQ ID NO: 3929233 - RNA, 19 nt, Human adenovirus D
agcugcgcgagggccugga

SEQ ID NO: 3929234 - RNA, 16 nt, Human adenovirus D
agcugcgcggggccac

SEQ ID NO: 3929235 - RNA, 13 nt, Human adenovirus D
agcuggcccggca

SEQ ID NO: 3929236 - RNA, 15 nt, Human adenovirus D
agcuggccgcccuga

SEQ ID NO: 3929237 - RNA, 23 nt, Human adenovirus D
agcuucuugcuagaaaccucaaa

SEQ ID NO: 3929238 - RNA, 23 nt, Human adenovirus D
agcuuggcgacgaacucggcggu

SEQ ID NO: 3929239 - RNA, 17 nt, Human adenovirus D
agcuugggcgcaagaaa

SEQ ID NO: 3929240 - RNA, 18 nt, Human adenovirus D
aggaaccccacgguggcc

SEQ ID NO: 3929241 - RNA, 22 nt, Human adenovirus D
aggaacuucaggaguggcggcc

SEQ ID NO: 3929242 - RNA, 16 nt, Human adenovirus D
aggaagugcggcggcg

SEQ ID NO: 3929243 - RNA, 20 nt, Human adenovirus D
aggaagugcggcggcggcug

SEQ ID NO: 3929244 - RNA, 15 nt, Human adenovirus D
aggaagugcuggaca

SEQ ID NO: 3929245 - RNA, 20 nt, Human adenovirus D
aggacacuaaagggagagcu

SEQ ID NO: 3929246 - RNA, 15 nt, Human adenovirus D
aggacaugcagcugc

SEQ ID NO: 3929247 - RNA, 16 nt, Human adenovirus D
aggagaacugcuggcc

SEQ ID NO: 3929248 - RNA, 20 nt, Human adenovirus D
aggagaccgacgcugggcuc

SEQ ID NO: 3929249 - RNA, 22 nt, Human adenovirus D
aggagcagcgccccgaggacac

SEQ ID NO: 3929250 - RNA, 19 nt, Human adenovirus D
aggagcugaucucgcugcc

SEQ ID NO: 3929251 - RNA, 22 nt, Human adenovirus D
aggagcugaucucgcugccgcu

SEQ ID NO: 3929252 - RNA, 23 nt, Human adenovirus D
aggagcuggacaagcuucuugcu

SEQ ID NO: 3929253 - RNA, 15 nt, Human adenovirus D
aggaggaugugcugc

SEQ ID NO: 3929254 - RNA, 16 nt, Human adenovirus D
aggagucgccggagga

SEQ ID NO: 3929255 - RNA, 20 nt, Human adenovirus D
aggauaaauauggccuggag

SEQ ID NO: 3929256 - RNA, 17 nt, Human adenovirus D
aggaugaacaggagcac

SEQ ID NO: 3929257 - RNA, 14 nt, Human adenovirus D
aggaugucaacaug

SEQ ID NO: 3929258 - RNA, 18 nt, Human adenovirus D
aggaugugcugcugaaac

SEQ ID NO: 3929259 - RNA, 13 nt, Human adenovirus D
aggcaaagcucaa

SEQ ID NO: 3929260 - RNA, 17 nt, Human adenovirus D
aggcaaagcucaacccg

SEQ ID NO: 3929261 - RNA, 22 nt, Human adenovirus D
aggcacugcucuucccuggaga

SEQ ID NO: 3929262 - RNA, 22 nt, Human adenovirus D
aggcagacgcugaaaggcgggc

SEQ ID NO: 3929263 - RNA, 22 nt, Human adenovirus D
aggcagaggcacacagcucaac

SEQ ID NO: 3929264 - RNA, 16 nt, Human adenovirus D
aggcauauaaaaaugc

SEQ ID NO: 3929265 - RNA, 14 nt, Human adenovirus D
aggcauggcaggca

SEQ ID NO: 3929266 - RNA, 16 nt, Human adenovirus D
aggcauggcaggcagc

SEQ ID NO: 3929267 - RNA, 20 nt, Human adenovirus D
aggcauggcaggcagcggcc

SEQ ID NO: 3929268 - RNA, 15 nt, Human adenovirus D
aggccaacagacucu

SEQ ID NO: 3929269 - RNA, 12 nt, Human adenovirus D
aggccaggagga

SEQ ID NO: 3929270 - RNA, 18 nt, Human adenovirus D
aggccaggcgcaggugga

SEQ ID NO: 3929271 - RNA, 17 nt, Human adenovirus D
aggccauaaaucugccc

SEQ ID NO: 3929272 - RNA, 14 nt, Human adenovirus D
aggcccuggagcag

SEQ ID NO: 3929273 - RNA, 18 nt, Human adenovirus D
aggccuuucacccggacg

SEQ ID NO: 3929274 - RNA, 19 nt, Human adenovirus D
aggcgaaacgccccugcaa

SEQ ID NO: 3929275 - RNA, 16 nt, Human adenovirus D
aggcgcccaggccgcu

SEQ ID NO: 3929276 - RNA, 14 nt, Human adenovirus D
aggcgcccgugggc

SEQ ID NO: 3929277 - RNA, 16 nt, Human adenovirus D
aggcgcgcccacccgg

SEQ ID NO: 3929278 - RNA, 14 nt, Human adenovirus D
aggcgcuggaagag

SEQ ID NO: 3929279 - RNA, 15 nt, Human adenovirus D
aggcgcuggaagagg

SEQ ID NO: 3929280 - RNA, 18 nt, Human adenovirus D
aggcgggacagaggaggg

SEQ ID NO: 3929281 - RNA, 15 nt, Human adenovirus D
aggcggugcugcugc

SEQ ID NO: 3929282 - RNA, 20 nt, Human adenovirus D
aggcguuuuugaggcggcgg

SEQ ID NO: 3929283 - RNA, 23 nt, Human adenovirus D
aggcuaccugaccuugcagagca

SEQ ID NO: 3929284 - RNA, 21 nt, Human adenovirus D
aggcucauaugaccaugcaga

SEQ ID NO: 3929285 - RNA, 14 nt, Human adenovirus D
aggcuuucacagcu

SEQ ID NO: 3929286 - RNA, 15 nt, Human adenovirus D
agggaacugaaagaa

SEQ ID NO: 3929287 - RNA, 18 nt, Human adenovirus D
agggagcugcgcgagggc

SEQ ID NO: 3929288 - RNA, 19 nt, Human adenovirus D
agggcagcccuaccccgcc

SEQ ID NO: 3929289 - RNA, 14 nt, Human adenovirus D
agggccucggcggc

SEQ ID NO: 3929290 - RNA, 12 nt, Human adenovirus D
agggccugggcu

SEQ ID NO: 3929291 - RNA, 22 nt, Human adenovirus D
aggggccaagaaggccggggcc

SEQ ID NO: 3929292 - RNA, 22 nt, Human adenovirus D
aggggcucguuaguccagcaga

SEQ ID NO: 3929293 - RNA, 17 nt, Human adenovirus D
agggggcgguggcagga

SEQ ID NO: 3929294 - RNA, 17 nt, Human adenovirus D
aggggguuaggcagagc

SEQ ID NO: 3929295 - RNA, 23 nt, Human adenovirus D
aggggucuaucuggacccccaga

SEQ ID NO: 3929296 - RNA, 19 nt, Human adenovirus D
aggggugggccccuggcug

SEQ ID NO: 3929297 - RNA, 13 nt, Human adenovirus D
agggguugagggg

SEQ ID NO: 3929298 - RNA, 14 nt, Human adenovirus D
agggucuggagcuc

SEQ ID NO: 3929299 - RNA, 20 nt, Human adenovirus D
agguaauucucauuuuucca

SEQ ID NO: 3929300 - RNA, 15 nt, Human adenovirus D
agguaguugagggug

SEQ ID NO: 3929301 - RNA, 21 nt, Human adenovirus D
aggucuaaaaaccccgccaaa

SEQ ID NO: 3929302 - RNA, 13 nt, Human adenovirus D
aggugagcucugg

SEQ ID NO: 3929303 - RNA, 21 nt, Human adenovirus D
aggugagggggucccgcuccc

SEQ ID NO: 3929304 - RNA, 22 nt, Human adenovirus D
aggugaugccggcagcgguggu

SEQ ID NO: 3929305 - RNA, 15 nt, Human adenovirus D
aggugauuggcuugu

SEQ ID NO: 3929306 - RNA, 12 nt, Human adenovirus D
aggugcagaccg

SEQ ID NO: 3929307 - RNA, 18 nt, Human adenovirus D
agguggcccugggccuga

SEQ ID NO: 3929308 - RNA, 16 nt, Human adenovirus D
agguguccgagcuccg

SEQ ID NO: 3929309 - RNA, 20 nt, Human adenovirus D
agguuuggcauaucagccag

SEQ ID NO: 3929310 - RNA, 20 nt, Human adenovirus D
aguaccugagccgcgagaag

SEQ ID NO: 3929311 - RNA, 18 nt, Human adenovirus D
agucaaguuugacagcag

SEQ ID NO: 3929312 - RNA, 23 nt, Human adenovirus D
agucacaguuauaccaccuccuc

SEQ ID NO: 3929313 - RNA, 22 nt, Human adenovirus D
agucagcaacuaccccgugguc

SEQ ID NO: 3929314 - RNA, 21 nt, Human adenovirus D
aguccuuuagacaacagccgc

SEQ ID NO: 3929315 - RNA, 23 nt, Human adenovirus D
agucgaggucagcagcaagagcu

SEQ ID NO: 3929316 - RNA, 11 nt, Human adenovirus D
agucuccuggu

SEQ ID NO: 3929317 - RNA, 23 nt, Human adenovirus D
agucuccuggugcgucgagcaca

SEQ ID NO: 3929318 - RNA, 16 nt, Human adenovirus D
agucugaagcgccgcc

SEQ ID NO: 3929319 - RNA, 14 nt, Human adenovirus D
agucugagggccac

SEQ ID NO: 3929320 - RNA, 15 nt, Human adenovirus D
agucugccgcccuug

SEQ ID NO: 3929321 - RNA, 23 nt, Human adenovirus D
agugaucgcgggcuuuguaacuc

SEQ ID NO: 3929322 - RNA, 13 nt, Human adenovirus D
agugcaagaaggg

SEQ ID NO: 3929323 - RNA, 20 nt, Human adenovirus D
agugccuuuaucagcacugc

SEQ ID NO: 3929324 - RNA, 15 nt, Human adenovirus D
aguggaagagaugga

SEQ ID NO: 3929325 - RNA, 21 nt, Human adenovirus D
aguggcaacaccugggcacug

SEQ ID NO: 3929326 - RNA, 15 nt, Human adenovirus D
aguggcccuggaugu

SEQ ID NO: 3929327 - RNA, 16 nt, Human adenovirus D
aguggccucucgcucc

SEQ ID NO: 3929328 - RNA, 14 nt, Human adenovirus D
aguggggcggcaaa

SEQ ID NO: 3929329 - RNA, 14 nt, Human adenovirus D
aguuaaugcugccu

SEQ ID NO: 3929330 - RNA, 19 nt, Human adenovirus D
aguuauggucugcuccugc

SEQ ID NO: 3929331 - RNA, 13 nt, Human adenovirus D
aguucagcuccag

SEQ ID NO: 3929332 - RNA, 18 nt, Human adenovirus D
aguuccugauggaugugu

SEQ ID NO: 3929333 - RNA, 19 nt, Human adenovirus D
aguucgcuccgcggcggcg

SEQ ID NO: 3929334 - RNA, 22 nt, Human adenovirus D
aguugcaccacgcuucuucccc

SEQ ID NO: 3929335 - RNA, 17 nt, Human adenovirus D
aguuuacccugcccgag

SEQ ID NO: 3929336 - RNA, 20 nt, Human adenovirus D
auaaaagggggcgggucugu

SEQ ID NO: 3929337 - RNA, 14 nt, Human adenovirus D
auaaagaagacuau

SEQ ID NO: 3929338 - RNA, 22 nt, Human adenovirus D
auaaagaucacuuacuugaaau

SEQ ID NO: 3929339 - RNA, 17 nt, Human adenovirus D
auaauaaagguguacuu

SEQ ID NO: 3929340 - RNA, 18 nt, Human adenovirus D
auacauccucuggcuuuu

SEQ ID NO: 3929341 - RNA, 13 nt, Human adenovirus D
auaccaucaaugc

SEQ ID NO: 3929342 - RNA, 16 nt, Human adenovirus D
auacucggaaaacagg

SEQ ID NO: 3929343 - RNA, 19 nt, Human adenovirus D
auagcuuccguugcgcugc

SEQ ID NO: 3929344 - RNA, 23 nt, Human adenovirus D
auaggcacugaaaauuugcaaaa

SEQ ID NO: 3929345 - RNA, 16 nt, Human adenovirus D
auaggccaggcgcagg

SEQ ID NO: 3929346 - RNA, 23 nt, Human adenovirus D
auagucacacuuaguucagcugc

SEQ ID NO: 3929347 - RNA, 22 nt, Human adenovirus D
auaucauaaagauggauggaaa

SEQ ID NO: 3929348 - RNA, 15 nt, Human adenovirus D
auaugaccaugcaga

SEQ ID NO: 3929349 - RNA, 17 nt, Human adenovirus D
cacucuuuccagcagca

SEQ ID NO: 3929350 - RNA, 21 nt, Human adenovirus D
cacugcaccccccgcaggcag

SEQ ID NO: 3929351 - RNA, 14 nt, Human adenovirus D
cacugccggugcac

SEQ ID NO: 3929352 - RNA, 21 nt, Human adenovirus D
cacuguuguuuauaaaucuua

SEQ ID NO: 3929353 - RNA, 17 nt, Human adenovirus D
cacuuaaguccugggcc

SEQ ID NO: 3929354 - RNA, 12 nt, Human adenovirus D
cagaaacagcau

SEQ ID NO: 3929355 - RNA, 17 nt, Human adenovirus D
cagaacccggacagcaa

SEQ ID NO: 3929356 - RNA, 17 nt, Human adenovirus D
cagaaccggaggcuggc

SEQ ID NO: 3929357 - RNA, 13 nt, Human adenovirus D
cagacagccaggu

SEQ ID NO: 3929358 - RNA, 14 nt, Human adenovirus D
cagacgagcggccg

SEQ ID NO: 3929359 - RNA, 23 nt, Human adenovirus D
cagacgggcgaagugcucaaccc

SEQ ID NO: 3929360 - RNA, 17 nt, Human adenovirus D
cagacggugaagcagga

SEQ ID NO: 3929361 - RNA, 19 nt, Human adenovirus D
cagacggugaagcaggagc

SEQ ID NO: 3929362 - RNA, 21 nt, Human adenovirus D
cagagccagggcuaagcgugg

SEQ ID NO: 3929363 - RNA, 15 nt, Human adenovirus D
cagagcgggcgggcg

SEQ ID NO: 3929364 - RNA, 15 nt, Human adenovirus D
cagaguaagaggagu

SEQ ID NO: 3929365 - RNA, 19 nt, Human adenovirus D
cagagucgaggucagcagc

SEQ ID NO: 3929366 - RNA, 14 nt, Human adenovirus D
cagagucugccgcc

SEQ ID NO: 3929367 - RNA, 17 nt, Human adenovirus D
cagauacuucagcaugu

SEQ ID NO: 3929368 - RNA, 19 nt, Human adenovirus D
cagauagugcuuacucuau

SEQ ID NO: 3929369 - RNA, 16 nt, Human adenovirus D
cagauauuccagauca

SEQ ID NO: 3929370 - RNA, 14 nt, Human adenovirus D
cagauccugcugcu

SEQ ID NO: 3929371 - RNA, 23 nt, Human adenovirus D
cagauccugcugcuccaccaccu

SEQ ID NO: 3929372 - RNA, 13 nt, Human adenovirus D
cagaugcggagga

SEQ ID NO: 3929373 - RNA, 17 nt, Human adenovirus D
cagaugguagcagcaga

SEQ ID NO: 3929374 - RNA, 20 nt, Human adenovirus D
cagauguugcgcagcggcag

SEQ ID NO: 3929375 - RNA, 16 nt, Human adenovirus D
cagcaacccuuccugg

SEQ ID NO: 3929376 - RNA, 19 nt, Human adenovirus D
cagcaacccuuccuggucg

SEQ ID NO: 3929377 - RNA, 22 nt, Human adenovirus D
cagcacaacaacucgggcuuca

SEQ ID NO: 3929378 - RNA, 12 nt, Human adenovirus D
cagcacaguaag

SEQ ID NO: 3929379 - RNA, 24 nt, Human adenovirus D
cagcacaugguaauccacggacag

SEQ ID NO: 3929380 - RNA, 22 nt, Human adenovirus D
cagcacgcggaucucacggccu

SEQ ID NO: 3929381 - RNA, 12 nt, Human adenovirus D
cagcacgguggc

SEQ ID NO: 3929382 - RNA, 21 nt, Human adenovirus D
cagcagaagaucccggcgcag

SEQ ID NO: 3929383 - RNA, 18 nt, Human adenovirus D
cagcagagucgaggucag

SEQ ID NO: 3929384 - RNA, 19 nt, Human adenovirus D
cagcagcaaaauaaaugau

SEQ ID NO: 3929385 - RNA, 23 nt, Human adenovirus D
cagcagcaccucgguacccuccu

SEQ ID NO: 3929386 - RNA, 15 nt, Human adenovirus D
cagcagcgacugacu

SEQ ID NO: 3929387 - RNA, 22 nt, Human adenovirus D
cagcaguacaagcgccaacagc

SEQ ID NO: 3929388 - RNA, 24 nt, Human adenovirus D
cagcaguagccccucugugcccag

SEQ ID NO: 3929389 - RNA, 21 nt, Human adenovirus D
cagcaguauccgcggagucca

SEQ ID NO: 3929390 - RNA, 18 nt, Human adenovirus D
cagcaucauccccgcgcc

SEQ ID NO: 3929391 - RNA, 16 nt, Human adenovirus D
cagcauguacggagga

SEQ ID NO: 3929392 - RNA, 20 nt, Human adenovirus D
cagcauguacggaggagcca

SEQ ID NO: 3929393 - RNA, 17 nt, Human adenovirus D
cagcauugucugccugg

SEQ ID NO: 3929394 - RNA, 17 nt, Human adenovirus D
cagccauagcucagccc

SEQ ID NO: 3929395 - RNA, 23 nt, Human adenovirus D
cagcccagggcgcacuacagccg

SEQ ID NO: 3929396 - RNA, 15 nt, Human adenovirus D
cagcccuaccccgcc

SEQ ID NO: 3929397 - RNA, 16 nt, Human adenovirus D
cagccgcagccgccau

SEQ ID NO: 3929398 - RNA, 13 nt, Human adenovirus D
cagccgcaggcgc

SEQ ID NO: 3929399 - RNA, 20 nt, Human adenovirus D
cagccgcguaagcaggagca

SEQ ID NO: 3929400 - RNA, 19 nt, Human adenovirus D
cagccggcgaacgugccgc

SEQ ID NO: 3929401 - RNA, 17 nt, Human adenovirus D
cagccgucuggacccgc

SEQ ID NO: 3929402 - RNA, 22 nt, Human adenovirus D
cagccgugaucccacagggcac

SEQ ID NO: 3929403 - RNA, 13 nt, Human adenovirus D
cagccuccaccgc

SEQ ID NO: 3929404 - RNA, 14 nt, Human adenovirus D
cagccuccaccgcu

SEQ ID NO: 3929405 - RNA, 16 nt, Human adenovirus D
cagccuguacccagag

SEQ ID NO: 3929406 - RNA, 19 nt, Human adenovirus D
cagccuucagcaucagucu

SEQ ID NO: 3929407 - RNA, 15 nt, Human adenovirus D
cagccuugcccccaa

SEQ ID NO: 3929408 - RNA, 23 nt, Human adenovirus D
cagccuuggauuaucucuacaaa

SEQ ID NO: 3929409 - RNA, 19 nt, Human adenovirus D
cagccuuuccauggccucg

SEQ ID NO: 3929410 - RNA, 15 nt, Human adenovirus D
cagcgccacgaccgg

SEQ ID NO: 3929411 - RNA, 23 nt, Human adenovirus D
cagcgccccgaggacacccggcc

SEQ ID NO: 3929412 - RNA, 15 nt, Human adenovirus D
cagcgcggccagcgu

SEQ ID NO: 3929413 - RNA, 14 nt, Human adenovirus D
cagcgcgugcugcg

SEQ ID NO: 3929414 - RNA, 17 nt, Human adenovirus D
cagcgcuggguggccgg

SEQ ID NO: 3929415 - RNA, 20 nt, Human adenovirus D
cagcggccugaaccgccgcc

SEQ ID NO: 3929416 - RNA, 14 nt, Human adenovirus D
cagcucauccgcag

SEQ ID NO: 3929417 - RNA, 23 nt, Human adenovirus D
cagcucaucgacuggugcugcgc

SEQ ID NO: 3929418 - RNA, 15 nt, Human adenovirus D
cagcuccagugggga

SEQ ID NO: 3929419 - RNA, 21 nt, Human adenovirus D
cagcuccgguugugcagcccc

SEQ ID NO: 3929420 - RNA, 23 nt, Human adenovirus D
cagcuccugagcgagacccaggu

SEQ ID NO: 3929421 - RNA, 15 nt, Human adenovirus D
cagcucugggucccc

SEQ ID NO: 3929422 - RNA, 22 nt, Human adenovirus D
cagcugacaauucagagccagg

SEQ ID NO: 3929423 - RNA, 18 nt, Human adenovirus D
cagcugcagcgcacucuc

SEQ ID NO: 3929424 - RNA, 14 nt, Human adenovirus D
cagcugccauggga

SEQ ID NO: 3929425 - RNA, 20 nt, Human adenovirus D
cagcugccaugggaggaagc

SEQ ID NO: 3929426 - RNA, 11 nt, Human adenovirus D
caggagaggca

SEQ ID NO: 3929427 - RNA, 21 nt, Human adenovirus D
caggagaucacuagcgugagc

SEQ ID NO: 3929428 - RNA, 13 nt, Human adenovirus D
caggagcacgagc

SEQ ID NO: 3929429 - RNA, 17 nt, Human adenovirus D
caggagcaggaggagga

SEQ ID NO: 3929430 - RNA, 22 nt, Human adenovirus D
caggaggagaccgacgcugggc

SEQ ID NO: 3929431 - RNA, 23 nt, Human adenovirus D
caggauaaauauggccuggagca

SEQ ID NO: 3929432 - RNA, 15 nt, Human adenovirus D
caggaucauugaaaa

SEQ ID NO: 3929433 - RNA, 14 nt, Human adenovirus D
caggaugaacagga

SEQ ID NO: 3929434 - RNA, 16 nt, Human adenovirus D
caggaugaacaggagc

SEQ ID NO: 3929435 - RNA, 22 nt, Human adenovirus D
caggaugcagccaguggcccug

SEQ ID NO: 3929436 - RNA, 23 nt, Human adenovirus D
caggcccagaacuggcagagcac

SEQ ID NO: 3929437 - RNA, 17 nt, Human adenovirus D
caggccgcagcucuucc

SEQ ID NO: 3929438 - RNA, 15 nt, Human adenovirus D
caggccgggcugcac

SEQ ID NO: 3929439 - RNA, 16 nt, Human adenovirus D
caggccgggcugcacg

SEQ ID NO: 3929440 - RNA, 16 nt, Human adenovirus D
caggcgcccagccagc

SEQ ID NO: 3929441 - RNA, 13 nt, Human adenovirus D
caggcgccugagu

SEQ ID NO: 3929442 - RNA, 16 nt, Human adenovirus D
caggcggugcugcugc

SEQ ID NO: 3929443 - RNA, 17 nt, Human adenovirus D
caggcggugcugcugcc

SEQ ID NO: 3929444 - RNA, 18 nt, Human adenovirus D
caggcggugcugcugccg

SEQ ID NO: 3929445 - RNA, 17 nt, Human adenovirus D
cagggaguuccugaugg

SEQ ID NO: 3929446 - RNA, 17 nt, Human adenovirus D
cagggcgaagguguccc

SEQ ID NO: 3929447 - RNA, 18 nt, Human adenovirus D
cagggcgcacuacagccg

SEQ ID NO: 3929448 - RNA, 17 nt, Human adenovirus D
caggggagugaagaggg

SEQ ID NO: 3929449 - RNA, 18 nt, Human adenovirus D
caggguacccacugggug

SEQ ID NO: 3929450 - RNA, 22 nt, Human adenovirus D
caggguagcggggcacaggcac

SEQ ID NO: 3929451 - RNA, 15 nt, Human adenovirus D
cagggucucaggguc

SEQ ID NO: 3929452 - RNA, 22 nt, Human adenovirus D
caggguugagucgcggcagaac

SEQ ID NO: 3929453 - RNA, 14 nt, Human adenovirus D
cagguauccagccu

SEQ ID NO: 3929454 - RNA, 17 nt, Human adenovirus D
caggucaaaacccacuc

SEQ ID NO: 3929455 - RNA, 12 nt, Human adenovirus D
caggucugcugg

SEQ ID NO: 3929456 - RNA, 17 nt, Human adenovirus D
caggugaugccggcagc

SEQ ID NO: 3929457 - RNA, 17 nt, Human adenovirus D
caggugcugccccaggc

SEQ ID NO: 3929458 - RNA, 20 nt, Human adenovirus D
cagguuacauuccugcacca

SEQ ID NO: 3929459 - RNA, 19 nt, Human adenovirus D
caguacucccggagcggga

SEQ ID NO: 3929460 - RNA, 14 nt, Human adenovirus D
caguagaaggugag

SEQ ID NO: 3929461 - RNA, 15 nt, Human adenovirus D
caguagaaggugagg

SEQ ID NO: 3929462 - RNA, 20 nt, Human adenovirus D
caguagacaaagagcacagc

SEQ ID NO: 3929463 - RNA, 19 nt, Human adenovirus D
caguauggugaucagccau

SEQ ID NO: 3929464 - RNA, 15 nt, Human adenovirus D
cagucaacuguuaag

SEQ ID NO: 3929465 - RNA, 23 nt, Human adenovirus D
cagucacucucauuucagaacca

SEQ ID NO: 3929466 - RNA, 20 nt, Human adenovirus D
cagucagacccaguggcgag

SEQ ID NO: 3929467 - RNA, 19 nt, Human adenovirus D
caguccaugcccaacaggc

SEQ ID NO: 3929468 - RNA, 13 nt, Human adenovirus D
cagucgcaccuuc

SEQ ID NO: 3929469 - RNA, 13 nt, Human adenovirus D
cagucuccuggug

SEQ ID NO: 3929470 - RNA, 21 nt, Human adenovirus D
cagugaaaacgugccugcucu

SEQ ID NO: 3929471 - RNA, 14 nt, Human adenovirus D
cagugcccccucca

SEQ ID NO: 3929472 - RNA, 16 nt, Human adenovirus D
caguggcccuggaugu

SEQ ID NO: 3929473 - RNA, 14 nt, Human adenovirus D
cagugucucgagga

SEQ ID NO: 3929474 - RNA, 19 nt, Human adenovirus D
caguuauaccaccuccucc

SEQ ID NO: 3929475 - RNA, 15 nt, Human adenovirus D
caguugggagcuguc

SEQ ID NO: 3929476 - RNA, 14 nt, Human adenovirus D
cauaaaucugcccu

SEQ ID NO: 3929477 - RNA, 16 nt, Human adenovirus D
cauacaaagcugaaag

SEQ ID NO: 3929478 - RNA, 20 nt, Human adenovirus D
cauaccugauauugcuuccc

SEQ ID NO: 3929479 - RNA, 12 nt, Human adenovirus D
cauacugcuauc

SEQ ID NO: 3929480 - RNA, 14 nt, Human adenovirus D
cauagucaucaccc

SEQ ID NO: 3929481 - RNA, 23 nt, Human adenovirus D
cauauaucuuggagguuuggcau

SEQ ID NO: 3929482 - RNA, 17 nt, Human adenovirus D
caucaagcaagaugaua

SEQ ID NO: 3929483 - RNA, 17 nt, Human adenovirus D
caucaccaccgucagug

SEQ ID NO: 3929484 - RNA, 20 nt, Human adenovirus D
caucauccaaggccaucugc

SEQ ID NO: 3929485 - RNA, 14 nt, Human adenovirus D
caucauggcccuga

SEQ ID NO: 3929486 - RNA, 23 nt, Human adenovirus D
cauccaagcgggccucacagucc

SEQ ID NO: 3929487 - RNA, 22 nt, Human adenovirus D
cauccacgagauacacagcgcg

SEQ ID NO: 3929488 - RNA, 18 nt, Human adenovirus D
cauccgcgccgcagcccg

SEQ ID NO: 3929489 - RNA, 20 nt, Human adenovirus D
cauccuggaccaggcggcag

SEQ ID NO: 3929490 - RNA, 22 nt, Human adenovirus D
cauccuggaccaggcggcagag

SEQ ID NO: 3929491 - RNA, 16 nt, Human adenovirus D
caucgccgagcccgag

SEQ ID NO: 3929492 - RNA, 20 nt, Human adenovirus D
caucgcgaaccaggcagugc

SEQ ID NO: 3929493 - RNA, 16 nt, Human adenovirus D
caucgcgcaggaggcc

SEQ ID NO: 3929494 - RNA, 20 nt, Human adenovirus D
caucgcggggugaacauccc

SEQ ID NO: 3929495 - RNA, 19 nt, Human adenovirus D
caucggacgacugggaggc

SEQ ID NO: 3929496 - RNA, 20 nt, Human adenovirus D
caucgugcgcgaccugggcu

SEQ ID NO: 3929497 - RNA, 17 nt, Human adenovirus D
caucguugugcgccgcg

SEQ ID NO: 3929498 - RNA, 15 nt, Human adenovirus D
caucuucugccuggu

SEQ ID NO: 3929499 - RNA, 17 nt, Human adenovirus D
caucuuugacauggaug

SEQ ID NO: 3929500 - RNA, 20 nt, Human adenovirus D
caugaaauugcgggugaugc

SEQ ID NO: 3929501 - RNA, 16 nt, Human adenovirus D
caugaacacacugccc

SEQ ID NO: 3929502 - RNA, 21 nt, Human adenovirus D
caugaaggggacgagcugcuu

SEQ ID NO: 3929503 - RNA, 20 nt, Human adenovirus D
caugaaguucaauggagaga

SEQ ID NO: 3929504 - RNA, 18 nt, Human adenovirus D
caugacauggguggggau

SEQ ID NO: 3929505 - RNA, 15 nt, Human adenovirus D
caugaccgcgcgcaa

SEQ ID NO: 3929506 - RNA, 14 nt, Human adenovirus D
caugagcaggcagg

SEQ ID NO: 3929507 - RNA, 16 nt, Human adenovirus D
caugagcugcgagaag

SEQ ID NO: 3929508 - RNA, 17 nt, Human adenovirus D
caugcacaucgccgggc

SEQ ID NO: 3929509 - RNA, 21 nt, Human adenovirus D
caugcagacacuugagcuggc

SEQ ID NO: 3929510 - RNA, 17 nt, Human adenovirus D
caugcccaaugugaacg

SEQ ID NO: 3929511 - RNA, 17 nt, Human adenovirus D
caugccccaggccuggc

SEQ ID NO: 3929512 - RNA, 13 nt, Human adenovirus D
caugcccuuuucc

SEQ ID NO: 3929513 - RNA, 22 nt, Human adenovirus D
caugcgacgcuuuuucagcgac

SEQ ID NO: 3929514 - RNA, 19 nt, Human adenovirus D
caugcgcaggcgccugagu

SEQ ID NO: 3929515 - RNA, 19 nt, Human adenovirus D
caugcucuaccccaucccg

SEQ ID NO: 3929516 - RNA, 13 nt, Human adenovirus D
caugcuggaauaa

SEQ ID NO: 3929517 - RNA, 16 nt, Human adenovirus D
cauggcaggcagcggc

SEQ ID NO: 3929518 - RNA, 22 nt, Human adenovirus D
cauggccagcacguacuuugac

SEQ ID NO: 3929519 - RNA, 21 nt, Human adenovirus D
cauggcccugacgacccgcaa

SEQ ID NO: 3929520 - RNA, 18 nt, Human adenovirus D
cauggccucgugcucugg

SEQ ID NO: 3929521 - RNA, 18 nt, Human adenovirus D
cauggcgcacaacaccgc

SEQ ID NO: 3929522 - RNA, 16 nt, Human adenovirus D
cauggcuaccugggag

SEQ ID NO: 3929523 - RNA, 16 nt, Human adenovirus D
caugggugugcuggcu

SEQ ID NO: 3929524 - RNA, 20 nt, Human adenovirus D
caugugaacaaaacccauga

SEQ ID NO: 3929525 - RNA, 23 nt, Human adenovirus D
caugugugauaucacacugcaug

SEQ ID NO: 3929526 - RNA, 17 nt, Human adenovirus D
cauguuauucagcagcc

SEQ ID NO: 3929527 - RNA, 20 nt, Human adenovirus D
cauguugaaaagcucccaca

SEQ ID NO: 3929528 - RNA, 21 nt, Human adenovirus D
cauucucgaagauucuggaga

SEQ ID NO: 3929529 - RNA, 22 nt, Human adenovirus D
cauugauacccuggacaaggcc

SEQ ID NO: 3929530 - RNA, 20 nt, Human adenovirus D
cauuuaauaaagaucacuua

SEQ ID NO: 3929531 - RNA, 12 nt, Human adenovirus D
ccaaaaucagaa

SEQ ID NO: 3929532 - RNA, 18 nt, Human adenovirus D
ccaacagccuucagcauc

SEQ ID NO: 3929533 - RNA, 15 nt, Human adenovirus D
ccaacggcaaacagc

SEQ ID NO: 3929534 - RNA, 14 nt, Human adenovirus D
ccaacgugcccauc

SEQ ID NO: 3929535 - RNA, 15 nt, Human adenovirus D
ccaagcgggccucac

SEQ ID NO: 3929536 - RNA, 14 nt, Human adenovirus D
ccaaggauaacaug

SEQ ID NO: 3929537 - RNA, 18 nt, Human adenovirus D
ccaaggcacccaccacag

SEQ ID NO: 3929538 - RNA, 18 nt, Human adenovirus D
ccaaucgcgcccgcagca

SEQ ID NO: 3929539 - RNA, 21 nt, Human adenovirus D
ccacaaugugguagcuuacac

SEQ ID NO: 3929540 - RNA, 23 nt, Human adenovirus D
ccacagccuugauuuuuccagcc

SEQ ID NO: 3929541 - RNA, 16 nt, Human adenovirus D
ccacaggugcugccca

SEQ ID NO: 3929542 - RNA, 18 nt, Human adenovirus D
ccacaugacccugcaugg

SEQ ID NO: 3929543 - RNA, 12 nt, Human adenovirus D
ccaccaccugca

SEQ ID NO: 3929544 - RNA, 22 nt, Human adenovirus D
ccaccaugcgccaagggcagcc

SEQ ID NO: 3929545 - RNA, 21 nt, Human adenovirus D
ccaccccuuacauguggagcu

SEQ ID NO: 3929546 - RNA, 18 nt, Human adenovirus D
ccacccuggaagccaugc

SEQ ID NO: 3929547 - RNA, 22 nt, Human adenovirus D
ccacccuugaccugccuccacc

SEQ ID NO: 3929548 - RNA, 16 nt, Human adenovirus D
ccaccgcuaccgcuuc

SEQ ID NO: 3929549 - RNA, 20 nt, Human adenovirus D
ccaccgugugcagacacaug

SEQ ID NO: 3929550 - RNA, 14 nt, Human adenovirus D
ccaccugcggggcg

SEQ ID NO: 3929551 - RNA, 16 nt, Human adenovirus D
ccacgaccggcagcgg

SEQ ID NO: 3929552 - RNA, 23 nt, Human adenovirus D
ccacgaccggcagcggggccugg

SEQ ID NO: 3929553 - RNA, 16 nt, Human adenovirus D
ccacgcccgcuccacc

SEQ ID NO: 3929554 - RNA, 22 nt, Human adenovirus D
ccacgcgcaucaucgcgccacu

SEQ ID NO: 3929555 - RNA, 14 nt, Human adenovirus D
ccacgcgcucgaca

SEQ ID NO: 3929556 - RNA, 14 nt, Human adenovirus D
ccacggggagggcg

SEQ ID NO: 3929557 - RNA, 13 nt, Human adenovirus D
ccacgguggcggc

SEQ ID NO: 3929558 - RNA, 13 nt, Human adenovirus D
ccacgguggugga

SEQ ID NO: 3929559 - RNA, 22 nt, Human adenovirus D
ccacgugguauacaagccagga

SEQ ID NO: 3929560 - RNA, 16 nt, Human adenovirus D
ccacucuauuuucaag

SEQ ID NO: 3929561 - RNA, 12 nt, Human adenovirus D
ccacugcauggc

SEQ ID NO: 3929562 - RNA, 21 nt, Human adenovirus D
ccacugcauggccucgugcuc

SEQ ID NO: 3929563 - RNA, 23 nt, Human adenovirus D
ccacugcuaccucuugcagcugg

SEQ ID NO: 3929564 - RNA, 14 nt, Human adenovirus D
ccacugcuccugcg

SEQ ID NO: 3929565 - RNA, 17 nt, Human adenovirus D
ccacuuccgcgcuccgu

SEQ ID NO: 3929566 - RNA, 12 nt, Human adenovirus D
ccacuuccuuua

SEQ ID NO: 3929567 - RNA, 15 nt, Human adenovirus D
ccagaaaccccgcaa

SEQ ID NO: 3929568 - RNA, 15 nt, Human adenovirus D
ccagaacuuccagca

SEQ ID NO: 3929569 - RNA, 11 nt, Human adenovirus D
ccagaauucaa

SEQ ID NO: 3929570 - RNA, 13 nt, Human adenovirus D
ccagaccaccugg

SEQ ID NO: 3929571 - RNA, 13 nt, Human adenovirus D
ccagaggcagacu

SEQ ID NO: 3929572 - RNA, 15 nt, Human adenovirus D
ccagauugggggacg

SEQ ID NO: 3929573 - RNA, 18 nt, Human adenovirus D
ccagcaauaacaccggcu

SEQ ID NO: 3929574 - RNA, 17 nt, Human adenovirus D
ccagcagaagguggugg

SEQ ID NO: 3929575 - RNA, 17 nt, Human adenovirus D
ccagcaucgaggugcag

SEQ ID NO: 3929576 - RNA, 22 nt, Human adenovirus D
ccagcaugccgaagaagaacag

SEQ ID NO: 3929577 - RNA, 16 nt, Human adenovirus D
ccagccaaagcucaug

SEQ ID NO: 3929578 - RNA, 20 nt, Human adenovirus D
ccagcccaugagcaggcagg

SEQ ID NO: 3929579 - RNA, 22 nt, Human adenovirus D
ccagccgcgguuaugcagggug

SEQ ID NO: 3929580 - RNA, 17 nt, Human adenovirus D
ccagccguaccagugca

SEQ ID NO: 3929581 - RNA, 18 nt, Human adenovirus D
gcuccuggucugcaaccc

SEQ ID NO: 3929582 - RNA, 22 nt, Human adenovirus D
gcuccuucaacgcgcgcugccc

SEQ ID NO: 3929583 - RNA, 23 nt, Human adenovirus D
gcucgaucuccuccuccuggaga

SEQ ID NO: 3929584 - RNA, 19 nt, Human adenovirus D
gcucgccgaggaggcgguc

SEQ ID NO: 3929585 - RNA, 20 nt, Human adenovirus D
gcucgcgcccguagucugga

SEQ ID NO: 3929586 - RNA, 16 nt, Human adenovirus D
gcucgcucguucugcc

SEQ ID NO: 3929587 - RNA, 15 nt, Human adenovirus D
gcucgguuguugaug

SEQ ID NO: 3929588 - RNA, 15 nt, Human adenovirus D
gcucguucugcccac

SEQ ID NO: 3929589 - RNA, 23 nt, Human adenovirus D
gcucucacuugccgccugcgcau

SEQ ID NO: 3929590 - RNA, 18 nt, Human adenovirus D
gcucuucccgcugaacug

SEQ ID NO: 3929591 - RNA, 14 nt, Human adenovirus D
gcucuugcagggaa

SEQ ID NO: 3929592 - RNA, 20 nt, Human adenovirus D
gcugaaacaccugcagcgcc

SEQ ID NO: 3929593 - RNA, 15 nt, Human adenovirus D
gcugaacgccuuccu

SEQ ID NO: 3929594 - RNA, 16 nt, Human adenovirus D
gcugagaccagaccac

SEQ ID NO: 3929595 - RNA, 23 nt, Human adenovirus D
gcugagaccagaccaccugguga

SEQ ID NO: 3929596 - RNA, 22 nt, Human adenovirus D
gcugagcgaccgcgagcugaug

SEQ ID NO: 3929597 - RNA, 22 nt, Human adenovirus D
gcugaggaaucggaucuucccc

SEQ ID NO: 3929598 - RNA, 13 nt, Human adenovirus D
gcugaugcccaac

SEQ ID NO: 3929599 - RNA, 12 nt, Human adenovirus D
gcugauggugac

SEQ ID NO: 3929600 - RNA, 22 nt, Human adenovirus D
gcugaugucgccgauggccucc

SEQ ID NO: 3929601 - RNA, 20 nt, Human adenovirus D
gcugcaaccugugcucuccg

SEQ ID NO: 3929602 - RNA, 17 nt, Human adenovirus D
gcugcacgagcgccagg

SEQ ID NO: 3929603 - RNA, 19 nt, Human adenovirus D
gcugcccgacuucaugagc

SEQ ID NO: 3929604 - RNA, 22 nt, Human adenovirus D
gcugcccguucucgcuggucac

SEQ ID NO: 3929605 - RNA, 14 nt, Human adenovirus D
gcugccgcuggacg

SEQ ID NO: 3929606 - RNA, 14 nt, Human adenovirus D
gcugccggaccuca

SEQ ID NO: 3929607 - RNA, 21 nt, Human adenovirus D
gcugccuugucuaucauucag

SEQ ID NO: 3929608 - RNA, 16 nt, Human adenovirus D
gcugcugaucgcgccc

SEQ ID NO: 3929609 - RNA, 21 nt, Human adenovirus D
gcugcugccgggcugcggggu

SEQ ID NO: 3929610 - RNA, 13 nt, Human adenovirus D
gcugcuggagcug

SEQ ID NO: 3929611 - RNA, 15 nt, Human adenovirus D
gcugcuucugccugg

SEQ ID NO: 3929612 - RNA, 16 nt, Human adenovirus D
gcuggaugcggagccg

SEQ ID NO: 3929613 - RNA, 16 nt, Human adenovirus D
gcuggaugugcccaag

SEQ ID NO: 3929614 - RNA, 12 nt, Human adenovirus D
gcuggcccugcu

SEQ ID NO: 3929615 - RNA, 16 nt, Human adenovirus D
gcuggccgagcuggaa

SEQ ID NO: 3929616 - RNA, 17 nt, Human adenovirus D
gcuggccgagcuggaag

SEQ ID NO: 3929617 - RNA, 15 nt, Human adenovirus D
gcuggcgaucgugaa

SEQ ID NO: 3929618 - RNA, 21 nt, Human adenovirus D
gcuggcgguagagcggccagc

SEQ ID NO: 3929619 - RNA, 14 nt, Human adenovirus D
gcuggcugcuggag

SEQ ID NO: 3929620 - RNA, 14 nt, Human adenovirus D
gcugggcguggugc

SEQ ID NO: 3929621 - RNA, 15 nt, Human adenovirus D
gcugggcguggugcu

SEQ ID NO: 3929622 - RNA, 13 nt, Human adenovirus D
gcugggcugggac

SEQ ID NO: 3929623 - RNA, 13 nt, Human adenovirus D
gcuguaaagccag

SEQ ID NO: 3929624 - RNA, 13 nt, Human adenovirus D
gcuguccacgggg

SEQ ID NO: 3929625 - RNA, 15 nt, Human adenovirus D
gcuuccguugcgcug

SEQ ID NO: 3929626 - RNA, 16 nt, Human adenovirus D
gcuucgaagagccggc

SEQ ID NO: 3929627 - RNA, 15 nt, Human adenovirus D
gcuucuacagccagc

SEQ ID NO: 3929628 - RNA, 19 nt, Human adenovirus D
gcuucugccuggugaaggg

SEQ ID NO: 3929629 - RNA, 15 nt, Human adenovirus D
gcuugccgggcucug

SEQ ID NO: 3929630 - RNA, 17 nt, Human adenovirus D
gcuugcuggaugcggag

SEQ ID NO: 3929631 - RNA, 23 nt, Human adenovirus D
gcuugguacccgcgacccccagg

SEQ ID NO: 3929632 - RNA, 18 nt, Human adenovirus D
ggaaacagacagccaggu

SEQ ID NO: 3929633 - RNA, 20 nt, Human adenovirus D
ggaaaggaauaggcacugaa

SEQ ID NO: 3929634 - RNA, 19 nt, Human adenovirus D
ggaaauguucugauuauug

SEQ ID NO: 3929635 - RNA, 22 nt, Human adenovirus D
ggaacucgucgcuugacagcac

SEQ ID NO: 3929636 - RNA, 14 nt, Human adenovirus D
ggaacugaugaaaa

SEQ ID NO: 3929637 - RNA, 18 nt, Human adenovirus D
ggaagaaaugaggcaggc

SEQ ID NO: 3929638 - RNA, 11 nt, Human adenovirus D
ggaagaagagc

SEQ ID NO: 3929639 - RNA, 14 nt, Human adenovirus D
ggaagauggaggag

SEQ ID NO: 3929640 - RNA, 16 nt, Human adenovirus D
ggaaggcuacaacgug

SEQ ID NO: 3929641 - RNA, 15 nt, Human adenovirus D
ggaauggcacgcucu

SEQ ID NO: 3929642 - RNA, 15 nt, Human adenovirus D
ggaauuaccucaucg

SEQ ID NO: 3929643 - RNA, 21 nt, Human adenovirus D
ggacacgcuguaccgcagcug

SEQ ID NO: 3929644 - RNA, 17 nt, Human adenovirus D
ggaccaaccccacgcac

SEQ ID NO: 3929645 - RNA, 15 nt, Human adenovirus D
ggaccaccccaggcg

SEQ ID NO: 3929646 - RNA, 17 nt, Human adenovirus D
ggaccaggcggcagagc

SEQ ID NO: 3929647 - RNA, 19 nt, Human adenovirus D
ggacccugugaccaagcug

SEQ ID NO: 3929648 - RNA, 14 nt, Human adenovirus D
ggaccgccagcgcg

SEQ ID NO: 3929649 - RNA, 23 nt, Human adenovirus D
ggacgccucggaguaccugagcc

SEQ ID NO: 3929650 - RNA, 22 nt, Human adenovirus D
ggacggccaggccuccgagcag

SEQ ID NO: 3929651 - RNA, 22 nt, Human adenovirus D
ggagaacgaugccuucuccagg

SEQ ID NO: 3929652 - RNA, 14 nt, Human adenovirus D
ggagacgggcugcu

SEQ ID NO: 3929653 - RNA, 14 nt, Human adenovirus D
ggagaggcauggca

SEQ ID NO: 3929654 - RNA, 15 nt, Human adenovirus D
ggagauggaagaugc

SEQ ID NO: 3929655 - RNA, 15 nt, Human adenovirus D
ggagcacgcccgcca

SEQ ID NO: 3929656 - RNA, 23 nt, Human adenovirus D
ggagcagccgcguaagcaggagc

SEQ ID NO: 3929657 - RNA, 22 nt, Human adenovirus D
ggagcagugucuggagcgggcu

SEQ ID NO: 3929658 - RNA, 21 nt, Human adenovirus D
ggagccaggggaugaacagug

SEQ ID NO: 3929659 - RNA, 14 nt, Human adenovirus D
ggagcgaggugugc

SEQ ID NO: 3929660 - RNA, 13 nt, Human adenovirus D
ggagcggucugga

SEQ ID NO: 3929661 - RNA, 15 nt, Human adenovirus D
ggagcucuugcaggg

SEQ ID NO: 3929662 - RNA, 19 nt, Human adenovirus D
ggagcugaucucgcugccg

SEQ ID NO: 3929663 - RNA, 11 nt, Human adenovirus D
ggaggcagagc

SEQ ID NO: 3929664 - RNA, 16 nt, Human adenovirus D
ggaggccacgugcgag

SEQ ID NO: 3929665 - RNA, 20 nt, Human adenovirus D
ggaggccgugaaggccggca

SEQ ID NO: 3929666 - RNA, 19 nt, Human adenovirus D
ggaggcgaagauggggccc

SEQ ID NO: 3929667 - RNA, 20 nt, Human adenovirus D
ggaggcgguccccgcccagc

SEQ ID NO: 3929668 - RNA, 19 nt, Human adenovirus D
ggaggcggugcgcacgccc

SEQ ID NO: 3929669 - RNA, 18 nt, Human adenovirus D
ggagggauugcagggcgu

SEQ ID NO: 3929670 - RNA, 22 nt, Human adenovirus D
ggagggggggaucauguccacc

SEQ ID NO: 3929671 - RNA, 20 nt, Human adenovirus D
  misc_feature (7)..(7): n is a, c, g, or u
ggagucnuacuucgacaugg

SEQ ID NO: 3929672 - RNA, 23 nt, Human adenovirus D
ggaucgacgguggacgggcgccc

SEQ ID NO: 3929673 - RNA, 13 nt, Human adenovirus D
ggaucgccaggcc

SEQ ID NO: 3929674 - RNA, 17 nt, Human adenovirus D
ggaugaugaccgagcug

SEQ ID NO: 3929675 - RNA, 20 nt, Human adenovirus D
ggaugcagccaguggcccug

SEQ ID NO: 3929676 - RNA, 13 nt, Human adenovirus D
ggaugcaugcggg

SEQ ID NO: 3929677 - RNA, 15 nt, Human adenovirus D
ggaugcggagccgcu

SEQ ID NO: 3929678 - RNA, 21 nt, Human adenovirus D
ggauguaaguuuuauggcugc

SEQ ID NO: 3929679 - RNA, 15 nt, Human adenovirus D
ggaugugcccaagua

SEQ ID NO: 3929680 - RNA, 17 nt, Human adenovirus D
ggcaaagcgguugagcu

SEQ ID NO: 3929681 - RNA, 19 nt, Human adenovirus D
ggcaaagcucaacccgcgu

SEQ ID NO: 3929682 - RNA, 21 nt, Human adenovirus D
ggcaacaccugggcacuggag

SEQ ID NO: 3929683 - RNA, 23 nt, Human adenovirus D
ggcaaugcuagagugaggcacug

SEQ ID NO: 3929684 - RNA, 20 nt, Human adenovirus D
ggcacggucuucgcccugcg

SEQ ID NO: 3929685 - RNA, 21 nt, Human adenovirus D
ggcacugcucuucccuggaga

SEQ ID NO: 3929686 - RNA, 20 nt, Human adenovirus D
ggcagacgcugaaaggcggg

SEQ ID NO: 3929687 - RNA, 17 nt, Human adenovirus D
ggcagagcucuuaagaa

SEQ ID NO: 3929688 - RNA, 15 nt, Human adenovirus D
ggcagccgagccggc

SEQ ID NO: 3929689 - RNA, 21 nt, Human adenovirus D
ggcagccgagccggcgcgccu

SEQ ID NO: 3929690 - RNA, 17 nt, Human adenovirus D
ggcagccgcagccgcca

SEQ ID NO: 3929691 - RNA, 15 nt, Human adenovirus D
ggcagcggggccugg

SEQ ID NO: 3929692 - RNA, 18 nt, Human adenovirus D
ggcagcggggccuggugu

SEQ ID NO: 3929693 - RNA, 18 nt, Human adenovirus D
ggcagcggugguggaggc

SEQ ID NO: 3929694 - RNA, 18 nt, Human adenovirus D
ggcaggccauggacgaga

SEQ ID NO: 3929695 - RNA, 13 nt, Human adenovirus D
ggcagggugagcc

SEQ ID NO: 3929696 - RNA, 18 nt, Human adenovirus D
ggcaucucgauccagcag

SEQ ID NO: 3929697 - RNA, 18 nt, Human adenovirus D
gugaugagcugcgaggag

SEQ ID NO: 3929698 - RNA, 14 nt, Human adenovirus D
gugaugccuuccaa

SEQ ID NO: 3929699 - RNA, 18 nt, Human adenovirus D
gugaugcuucaacagcug

SEQ ID NO: 3929700 - RNA, 17 nt, Human adenovirus D
gugcacucccaguucuu

SEQ ID NO: 3929701 - RNA, 18 nt, Human adenovirus D
gugcagaacccggacagc

SEQ ID NO: 3929702 - RNA, 11 nt, Human adenovirus D
gugcagcugca

SEQ ID NO: 3929703 - RNA, 22 nt, Human adenovirus D
gugccucccgcccgacacugca

SEQ ID NO: 3929704 - RNA, 14 nt, Human adenovirus D
gugcgaggaugaga

SEQ ID NO: 3929705 - RNA, 14 nt, Human adenovirus D
gugcgaggggccaa

SEQ ID NO: 3929706 - RNA, 16 nt, Human adenovirus D
gugcgaguuggaggag

SEQ ID NO: 3929707 - RNA, 22 nt, Human adenovirus D
gugcgcccggcguacgugccug

SEQ ID NO: 3929708 - RNA, 16 nt, Human adenovirus D
gugcgcgaccugggcu

SEQ ID NO: 3929709 - RNA, 17 nt, Human adenovirus D
gugcgcgaccugggcug

SEQ ID NO: 3929710 - RNA, 22 nt, Human adenovirus D
gugcgcgacuccgucacgggcg

SEQ ID NO: 3929711 - RNA, 12 nt, Human adenovirus D
gugcgcuggggc

SEQ ID NO: 3929712 - RNA, 22 nt, Human adenovirus D
gugcgucgagcacagcaccgca

SEQ ID NO: 3929713 - RNA, 14 nt, Human adenovirus D
gugcugacauccau

SEQ ID NO: 3929714 - RNA, 19 nt, Human adenovirus D
gugcugccccaggcggugc

SEQ ID NO: 3929715 - RNA, 14 nt, Human adenovirus D
gugcuggagagcga

SEQ ID NO: 3929716 - RNA, 17 nt, Human adenovirus D
gugcuggaggguugaaa

SEQ ID NO: 3929717 - RNA, 20 nt, Human adenovirus D
guggaaacagacagccaggu

SEQ ID NO: 3929718 - RNA, 15 nt, Human adenovirus D
guggacgcugcucac

SEQ ID NO: 3929719 - RNA, 17 nt, Human adenovirus D
guggacuauccuugcag

SEQ ID NO: 3929720 - RNA, 22 nt, Human adenovirus D
guggacuuccgcguaccugcgc

SEQ ID NO: 3929721 - RNA, 14 nt, Human adenovirus D
guggagccacugcu

SEQ ID NO: 3929722 - RNA, 16 nt, Human adenovirus D
guggagcccgagguca

SEQ ID NO: 3929723 - RNA, 22 nt, Human adenovirus D
guggagcugaccaacuggucuc

SEQ ID NO: 3929724 - RNA, 18 nt, Human adenovirus D
guggagggcaugggucag

SEQ ID NO: 3929725 - RNA, 17 nt, Human adenovirus D
guggccuuguaccugcc

SEQ ID NO: 3929726 - RNA, 16 nt, Human adenovirus D
guggcgcucgggcagg

SEQ ID NO: 3929727 - RNA, 19 nt, Human adenovirus D
guggcuagaaaacacccac

SEQ ID NO: 3929728 - RNA, 23 nt, Human adenovirus D
guggcuauuuucacugaaggaaa

SEQ ID NO: 3929729 - RNA, 19 nt, Human adenovirus D
gugggaccuggcggaggcc

SEQ ID NO: 3929730 - RNA, 15 nt, Human adenovirus D
gugggccccuggcug

SEQ ID NO: 3929731 - RNA, 16 nt, Human adenovirus D
gugggcguacaugcac

SEQ ID NO: 3929732 - RNA, 14 nt, Human adenovirus D
gugggcguggggca

SEQ ID NO: 3929733 - RNA, 16 nt, Human adenovirus D
gugggcguggggcaag

SEQ ID NO: 3929734 - RNA, 16 nt, Human adenovirus D
guggucagcgaugagc

SEQ ID NO: 3929735 - RNA, 22 nt, Human adenovirus D
guggucauugauacccuggaca

SEQ ID NO: 3929736 - RNA, 23 nt, Human adenovirus D
guguaucucaauaaacagcacuu

SEQ ID NO: 3929737 - RNA, 17 nt, Human adenovirus D
gugucccugaccaugac

SEQ ID NO: 3929738 - RNA, 14 nt, Human adenovirus D
gugucuuccucucc

SEQ ID NO: 3929739 - RNA, 19 nt, Human adenovirus D
gugucuuccucuccuccuc

SEQ ID NO: 3929740 - RNA, 22 nt, Human adenovirus D
gugugauuaaaaagcagcacag

SEQ ID NO: 3929741 - RNA, 16 nt, Human adenovirus D
guguugcggcccggca

SEQ ID NO: 3929742 - RNA, 16 nt, Human adenovirus D
guuacuguaaagccac

SEQ ID NO: 3929743 - RNA, 18 nt, Human adenovirus D
guuagguucuucacccag

SEQ ID NO: 3929744 - RNA, 20 nt, Human adenovirus D
guucaagaacgagggccugg

SEQ ID NO: 3929745 - RNA, 19 nt, Human adenovirus D
guuccagacgcggcuguag

SEQ ID NO: 3929746 - RNA, 22 nt, Human adenovirus D
guuccagauguugcgcagcggc

SEQ ID NO: 3929747 - RNA, 19 nt, Human adenovirus D
guuccccuccgcugugcug

SEQ ID NO: 3929748 - RNA, 19 nt, Human adenovirus D
guuccgaauuaccgaggaa

SEQ ID NO: 3929749 - RNA, 16 nt, Human adenovirus D
guucgacguggucaga

SEQ ID NO: 3929750 - RNA, 16 nt, Human adenovirus D
guucuacccagcaagu

SEQ ID NO: 3929751 - RNA, 16 nt, Human adenovirus D
guucucgcuggucaca

SEQ ID NO: 3929752 - RNA, 14 nt, Human adenovirus D
guugaggguggugg

SEQ ID NO: 3929753 - RNA, 14 nt, Human adenovirus D
guuggcuugcccug

SEQ ID NO: 3929754 - RNA, 19 nt, Human adenovirus D
guugucugugggaucuuua

SEQ ID NO: 3929755 - RNA, 18 nt, Human adenovirus D
guuuaugacucaugggcg

SEQ ID NO: 3929756 - RNA, 16 nt, Human adenovirus D
guuucucaacagcugg

SEQ ID NO: 3929757 - RNA, 19 nt, Human adenovirus D
guuucucaacagcugggac

SEQ ID NO: 3929758 - RNA, 15 nt, Human adenovirus D
guuugcccgcgccac

SEQ ID NO: 3929759 - RNA, 18 nt, Human adenovirus D
uaaaaacaacaaaaccac

SEQ ID NO: 3929760 - RNA, 12 nt, Human adenovirus D
uaaaaacccugg

SEQ ID NO: 3929761 - RNA, 20 nt, Human adenovirus D
uaaacuaaagccaaacacac

SEQ ID NO: 3929762 - RNA, 18 nt, Human adenovirus D
uaaauuuaaaaccucauu

SEQ ID NO: 3929763 - RNA, 16 nt, Human adenovirus D
uaacaccggcuggggu

SEQ ID NO: 3929764 - RNA, 18 nt, Human adenovirus D
uaaccaucgaaaccagau

SEQ ID NO: 3929765 - RNA, 22 nt, Human adenovirus D
uaagaauccacagaucagacau

SEQ ID NO: 3929766 - RNA, 23 nt, Human adenovirus D
uaagacauaacugggugaugcuu

SEQ ID NO: 3929767 - RNA, 16 nt, Human adenovirus D
uaauuaagguuacuuu

SEQ ID NO: 3929768 - RNA, 21 nt, Human adenovirus D
uaauucagggugcuccagcca

SEQ ID NO: 3929769 - RNA, 17 nt, Human adenovirus D
uaauucucaaaguguga

SEQ ID NO: 3929770 - RNA, 16 nt, Human adenovirus D
uacaaagcugaaagcu

SEQ ID NO: 3929771 - RNA, 19 nt, Human adenovirus D
uacaacaguacuggcaaca

SEQ ID NO: 3929772 - RNA, 17 nt, Human adenovirus D
uacaaccaaggcaccca

SEQ ID NO: 3929773 - RNA, 21 nt, Human adenovirus D
uacaagagagaugcuccaggu

SEQ ID NO: 3929774 - RNA, 18 nt, Human adenovirus D
uacaagcgccaacagcag

SEQ ID NO: 3929775 - RNA, 16 nt, Human adenovirus D
uacacacuagaaagca

SEQ ID NO: 3929776 - RNA, 21 nt, Human adenovirus D
uacaccaggccuacuacuccu

SEQ ID NO: 3929777 - RNA, 14 nt, Human adenovirus D
uacacucgcagugc

SEQ ID NO: 3929778 - RNA, 14 nt, Human adenovirus D
uacaugcccagcag

SEQ ID NO: 3929779 - RNA, 20 nt, Human adenovirus D
uacaugcccucucaacauca

SEQ ID NO: 3929780 - RNA, 22 nt, Human adenovirus D
uaccauugcaaggcagaaucaa

SEQ ID NO: 3929781 - RNA, 18 nt, Human adenovirus D
uacccaacaaccuuacca

SEQ ID NO: 3929782 - RNA, 22 nt, Human adenovirus D
uaccccgguucgaguccccucg

SEQ ID NO: 3929783 - RNA, 13 nt, Human adenovirus D
uaccuucgagcug

SEQ ID NO: 3929784 - RNA, 14 nt, Human adenovirus D
uacgugcccuucca

SEQ ID NO: 3929785 - RNA, 15 nt, Human adenovirus D
uacgugcccuuccac

SEQ ID NO: 3929786 - RNA, 22 nt, Human adenovirus D
uacuuuuaaugaagaagcagau

SEQ ID NO: 3929787 - RNA, 23 nt, Human adenovirus D
uagaaacagauccugcugcucca

SEQ ID NO: 3929788 - RNA, 15 nt, Human adenovirus D
uagaagugacaauuu

SEQ ID NO: 3929789 - RNA, 19 nt, Human adenovirus D
uagacaaagagcacagcag

SEQ ID NO: 3929790 - RNA, 21 nt, Human adenovirus D
uagacaaagagcacagcagua

SEQ ID NO: 3929791 - RNA, 15 nt, Human adenovirus D
uagacauggccagca

SEQ ID NO: 3929792 - RNA, 13 nt, Human adenovirus D
uagagcggccagc

SEQ ID NO: 3929793 - RNA, 20 nt, Human adenovirus D
uagagggcguuggagagaag

SEQ ID NO: 3929794 - RNA, 15 nt, Human adenovirus D
uagcacggggcaguu

SEQ ID NO: 3929795 - RNA, 19 nt, Human adenovirus D
uagcacguuucgucaggca

SEQ ID NO: 3929796 - RNA, 18 nt, Human adenovirus D
uagcagcccuguggacgc

SEQ ID NO: 3929797 - RNA, 16 nt, Human adenovirus D
uaggggacgugagcgc

SEQ ID NO: 3929798 - RNA, 19 nt, Human adenovirus D
uagguucuucacccagcaa

SEQ ID NO: 3929799 - RNA, 16 nt, Human adenovirus D
uaguaaagaaacagaa

SEQ ID NO: 3929800 - RNA, 19 nt, Human adenovirus D
uagucaucacccagcaguc

SEQ ID NO: 3929801 - RNA, 13 nt, Human adenovirus D
uaguccagcagag

SEQ ID NO: 3929802 - RNA, 22 nt, Human adenovirus D
uagugggcguggcuaaggugac

SEQ ID NO: 3929803 - RNA, 16 nt, Human adenovirus D
uaguuguucagcagca

SEQ ID NO: 3929804 - RNA, 13 nt, Human adenovirus D
uaucauucagagg

SEQ ID NO: 3929805 - RNA, 15 nt, Human adenovirus D
uauggccuggagcag

SEQ ID NO: 3929806 - RNA, 18 nt, Human adenovirus D
uauggugaucagccauga

SEQ ID NO: 3929807 - RNA, 17 nt, Human adenovirus D
uauuacuaggcccagca

SEQ ID NO: 3929808 - RNA, 15 nt, Human adenovirus D
uauuagaugacaaaa

SEQ ID NO: 3929809 - RNA, 16 nt, Human adenovirus D
ucaaaacucacuuugg

SEQ ID NO: 3929810 - RNA, 22 nt, Human adenovirus D
ucaaagaccagaacuuccagca

SEQ ID NO: 3929811 - RNA, 16 nt, Human adenovirus D
ucaaaguaaaaaaccg

SEQ ID NO: 3929812 - RNA, 21 nt, Human adenovirus D
ucaacagcugggacuugccgc

SEQ ID NO: 3929813 - RNA, 22 nt, Human adenovirus D
ucaacaucacauucaaaaaccg

SEQ ID NO: 3929814 - RNA, 15 nt, Human adenovirus D
ucaaccccuucaacc

SEQ ID NO: 3929815 - RNA, 17 nt, Human adenovirus D
ucaaccuccaggccaac

SEQ ID NO: 3929816 - RNA, 20 nt, Human adenovirus D
ucaacguuucucggccaauc

SEQ ID NO: 3929817 - RNA, 17 nt, Human adenovirus D
ucaaguuugacagcaga

SEQ ID NO: 3929818 - RNA, 22 nt, Human adenovirus D
ucacacuacacagcuagacacc

SEQ ID NO: 3929819 - RNA, 14 nt, Human adenovirus D
ucacagucuggugg

SEQ ID NO: 3929820 - RNA, 18 nt, Human adenovirus D
ucacaguuauaccaccuc

SEQ ID NO: 3929821 - RNA, 20 nt, Human adenovirus D
ucacauuaaaggcuggcccu

SEQ ID NO: 3929822 - RNA, 12 nt, Human adenovirus D
ucaccaaggcca

SEQ ID NO: 3929823 - RNA, 20 nt, Human adenovirus D
ucaccauguuauucagcagc

SEQ ID NO: 3929824 - RNA, 21 nt, Human adenovirus D
ucaccauguuauucagcagcc

SEQ ID NO: 3929825 - RNA, 18 nt, Human adenovirus D
ucacccggacguggugcu

SEQ ID NO: 3929826 - RNA, 19 nt, Human adenovirus D
ucaccgagccucccaggag

SEQ ID NO: 3929827 - RNA, 23 nt, Human adenovirus D
ucaccuaugagaugccccagcag

SEQ ID NO: 3929828 - RNA, 16 nt, Human adenovirus D
ucaccuuccugcagcu

SEQ ID NO: 3929829 - RNA, 17 nt, Human adenovirus D
ucaccuuccugcagcuc

SEQ ID NO: 3929830 - RNA, 15 nt, Human adenovirus D
ucacucuggccgugg

SEQ ID NO: 3929831 - RNA, 17 nt, Human adenovirus D
ucacucuggccgugggc

SEQ ID NO: 3929832 - RNA, 20 nt, Human adenovirus D
ucacucuggccgugggcgac

SEQ ID NO: 3929833 - RNA, 17 nt, Human adenovirus D
ucacucuuuccagcagc

SEQ ID NO: 3929834 - RNA, 18 nt, Human adenovirus D
ucacucuuuccagcagca

SEQ ID NO: 3929835 - RNA, 15 nt, Human adenovirus D
ucacuugccgccugc

SEQ ID NO: 3929836 - RNA, 16 nt, Human adenovirus D
ucagagugcaccagcc

SEQ ID NO: 3929837 - RNA, 13 nt, Human adenovirus D
ucagcacugcaaa

SEQ ID NO: 3929838 - RNA, 17 nt, Human adenovirus D
ucagcagucucugccgc

SEQ ID NO: 3929839 - RNA, 15 nt, Human adenovirus D
ucagccauagcucag

SEQ ID NO: 3929840 - RNA, 20 nt, Human adenovirus D
ucagcuaaucaugccccaca

SEQ ID NO: 3929841 - RNA, 18 nt, Human adenovirus D
ucaggcgcaaccaggagg

SEQ ID NO: 3929842 - RNA, 19 nt, Human adenovirus D
ucaggcgcaaccaggagga

SEQ ID NO: 3929843 - RNA, 13 nt, Human adenovirus D
ucagggugcucca

SEQ ID NO: 3929844 - RNA, 14 nt, Human adenovirus D
ucaucacccagcag

SEQ ID NO: 3929845 - RNA, 19 nt, Human adenovirus D
ucaucgcgccacuggccac

SEQ ID NO: 3929846 - RNA, 18 nt, Human adenovirus D
ucaucguugugcgccgcg

SEQ ID NO: 3929847 - RNA, 23 nt, Human adenovirus D
ucaucguugugcgccgcgcuggg

SEQ ID NO: 3929848 - RNA, 17 nt, Human adenovirus D
ucaugaacacacugccc

SEQ ID NO: 3929849 - RNA, 19 nt, Human adenovirus D
ucaugccacgaacagccac

SEQ ID NO: 3929850 - RNA, 18 nt, Human adenovirus D
ucauggaggcccacaaag

SEQ ID NO: 3929851 - RNA, 20 nt, Human adenovirus D
ucauggccaacagccacaug

SEQ ID NO: 3929852 - RNA, 21 nt, Human adenovirus D
ucauggccaacagccacauga

SEQ ID NO: 3929853 - RNA, 18 nt, Human adenovirus D
ucauugacggcgggcuga

SEQ ID NO: 3929854 - RNA, 20 nt, Human adenovirus D
uccaaaauggcuuacauguc

SEQ ID NO: 3929855 - RNA, 14 nt, Human adenovirus D
uccaacguggagcu

SEQ ID NO: 3929856 - RNA, 17 nt, Human adenovirus D
uccaacucuuaaaucau

SEQ ID NO: 3929857 - RNA, 18 nt, Human adenovirus D
uccaaggccaucugccac

SEQ ID NO: 3929858 - RNA, 17 nt, Human adenovirus D
uccacagaucagacaua

SEQ ID NO: 3929859 - RNA, 22 nt, Human adenovirus D
uccaccacccacgcccgcucca

SEQ ID NO: 3929860 - RNA, 15 nt, Human adenovirus D
uccaccugcggggcg

SEQ ID NO: 3929861 - RNA, 16 nt, Human adenovirus D
uccacgcauugcauga

SEQ ID NO: 3929862 - RNA, 18 nt, Human adenovirus D
uccacgccaagacaaagg

SEQ ID NO: 3929863 - RNA, 12 nt, Human adenovirus D
uccacugcuccu

SEQ ID NO: 3929864 - RNA, 21 nt, Human adenovirus D
uccagcagcaggguacccacu

SEQ ID NO: 3929865 - RNA, 22 nt, Human adenovirus D
uccagcagcaggguacccacug

SEQ ID NO: 3929866 - RNA, 15 nt, Human adenovirus D
uccagcccagggcgc

SEQ ID NO: 3929867 - RNA, 14 nt, Human adenovirus D
uccagcuggccggc

SEQ ID NO: 3929868 - RNA, 14 nt, Human adenovirus D
uccaguaggaacca

SEQ ID NO: 3929869 - RNA, 17 nt, Human adenovirus D
uccaguaggaaccagca

SEQ ID NO: 3929870 - RNA, 17 nt, Human adenovirus D
uccaucgauuucaucaa

SEQ ID NO: 3929871 - RNA, 24 nt, Human adenovirus D
uccaucgugcgcgaccugggcugc

SEQ ID NO: 3929872 - RNA, 16 nt, Human adenovirus D
uccaugaucuuuauga

SEQ ID NO: 3929873 - RNA, 19 nt, Human adenovirus D
uccaugcgaauuccccuca

SEQ ID NO: 3929874 - RNA, 15 nt, Human adenovirus D
ucccacagggcacug

SEQ ID NO: 3929875 - RNA, 19 nt, Human adenovirus D
ucccacagugcccccucca

SEQ ID NO: 3929876 - RNA, 16 nt, Human adenovirus D
ucccacgccgagccug

SEQ ID NO: 3929877 - RNA, 17 nt, Human adenovirus D
ucccaggcuuucaucuc

SEQ ID NO: 3929878 - RNA, 12 nt, Human adenovirus D
uccccccugggg

SEQ ID NO: 3929879 - RNA, 18 nt, Human adenovirus D
uccccccuuugucuccuc

SEQ ID NO: 3929880 - RNA, 16 nt, Human adenovirus D
uccccgcccugcugga

SEQ ID NO: 3929881 - RNA, 15 nt, Human adenovirus D
ucccgacgaggccgg

SEQ ID NO: 3929882 - RNA, 20 nt, Human adenovirus D
ucccgcccgacacugcaggg

SEQ ID NO: 3929883 - RNA, 15 nt, Human adenovirus D
ucccgccgcaggaga

SEQ ID NO: 3929884 - RNA, 13 nt, Human adenovirus D
ucccgcucccagc

SEQ ID NO: 3929885 - RNA, 23 nt, Human adenovirus D
ucccggaggaggggggccaccuc

SEQ ID NO: 3929886 - RNA, 13 nt, Human adenovirus D
ucccucccucggc

SEQ ID NO: 3929887 - RNA, 19 nt, Human adenovirus D
ucccucccucggcucgggu

SEQ ID NO: 3929888 - RNA, 13 nt, Human adenovirus D
uccgcaccgcucc

SEQ ID NO: 3929889 - RNA, 22 nt, Human adenovirus D
uccgcagcuacaccucccucac

SEQ ID NO: 3929890 - RNA, 18 nt, Human adenovirus D
uccgcagugggcgcagac

SEQ ID NO: 3929891 - RNA, 22 nt, Human adenovirus D
uccgcggccacuuccgcgcucc

SEQ ID NO: 3929892 - RNA, 20 nt, Human adenovirus D
uccgguugugcagcccccuc

SEQ ID NO: 3929893 - RNA, 20 nt, Human adenovirus D
uccugaaccacacggccagc

SEQ ID NO: 3929894 - RNA, 16 nt, Human adenovirus D
uccugaagaacaucca

SEQ ID NO: 3929895 - RNA, 16 nt, Human adenovirus D
uccugcacgcagcagc

SEQ ID NO: 3929896 - RNA, 13 nt, Human adenovirus D
uccugccugggaa

SEQ ID NO: 3929897 - RNA, 18 nt, Human adenovirus D
uccuggacgggagcaauc

SEQ ID NO: 3929898 - RNA, 14 nt, Human adenovirus D
uccuggucacccuc

SEQ ID NO: 3929899 - RNA, 15 nt, Human adenovirus D
uccuggucugcaacc

SEQ ID NO: 3929900 - RNA, 19 nt, Human adenovirus D
uccuggugguacagcacag

SEQ ID NO: 3929901 - RNA, 22 nt, Human adenovirus D
uccugucacucaaacuggcuga

SEQ ID NO: 3929902 - RNA, 20 nt, Human adenovirus D
uccuucaacgacuaccucuc

SEQ ID NO: 3929903 - RNA, 22 nt, Human adenovirus D
ucgaagauucuggagaaguucc

SEQ ID NO: 3929904 - RNA, 23 nt, Human adenovirus D
ucgacagcgucaaccucuacgcc

SEQ ID NO: 3929905 - RNA, 21 nt, Human adenovirus D
ucgacggggaaggcuacaacg

SEQ ID NO: 3929906 - RNA, 19 nt, Human adenovirus D
ucgagccgaacgagcagac

SEQ ID NO: 3929907 - RNA, 15 nt, Human adenovirus D
ucgaggacggagagg

SEQ ID NO: 3929908 - RNA, 17 nt, Human adenovirus D
ucgcaagcgcccagagc

SEQ ID NO: 3929909 - RNA, 24 nt, Human adenovirus D
ucgcacucgacgagccaggugagc

SEQ ID NO: 3929910 - RNA, 13 nt, Human adenovirus D
ucgccgagcccga

SEQ ID NO: 3929911 - RNA, 15 nt, Human adenovirus D
ucgccgcgcaggggc

SEQ ID NO: 3929912 - RNA, 18 nt, Human adenovirus D
ucgccgucuacucccagc

SEQ ID NO: 3929913 - RNA, 16 nt, Human adenovirus D
ucgccucggaccuggc

SEQ ID NO: 3929914 - RNA, 18 nt, Human adenovirus D
ucgcgcaacugggccgcu

SEQ ID NO: 3929915 - RNA, 17 nt, Human adenovirus D
ucgcgcaggaggccauc

SEQ ID NO: 3929916 - RNA, 13 nt, Human adenovirus D
ucgcgcaggccgc

SEQ ID NO: 3929917 - RNA, 17 nt, Human adenovirus D
ucgcugccgcuggacga

SEQ ID NO: 3929918 - RNA, 14 nt, Human adenovirus D
ucgcuggcugcugg

SEQ ID NO: 3929919 - RNA, 16 nt, Human adenovirus D
ucggaaaacaggaugg

SEQ ID NO: 3929920 - RNA, 16 nt, Human adenovirus D
ucggagggggggauca

SEQ ID NO: 3929921 - RNA, 18 nt, Human adenovirus D
ucggaguaccugagccgc

SEQ ID NO: 3929922 - RNA, 19 nt, Human adenovirus D
ucggccgaggaggagcgca

SEQ ID NO: 3929923 - RNA, 19 nt, Human adenovirus D
ucggcgcuuggugggcaga

SEQ ID NO: 3929924 - RNA, 17 nt, Human adenovirus D
ucggcucgacgcuccgg

SEQ ID NO: 3929925 - RNA, 15 nt, Human adenovirus D
ucggggcauugcagg

SEQ ID NO: 3929926 - RNA, 15 nt, Human adenovirus D
ucgguacccuccucc

SEQ ID NO: 3929927 - RNA, 16 nt, Human adenovirus D
ucguacuucugccagc

SEQ ID NO: 3929928 - RNA, 17 nt, Human adenovirus D
ucguacuucugccagca

SEQ ID NO: 3929929 - RNA, 14 nt, Human adenovirus D
uuacucuaaaugca

SEQ ID NO: 3929930 - RNA, 12 nt, Human adenovirus D
uuaucugcuggg

SEQ ID NO: 3929931 - RNA, 17 nt, Human adenovirus D
uucaaaacucacuuugg

SEQ ID NO: 3929932 - RNA, 18 nt, Human adenovirus D
uucaauaagguucugccc

SEQ ID NO: 3929933 - RNA, 12 nt, Human adenovirus D
uucacagagagc

SEQ ID NO: 3929934 - RNA, 14 nt, Human adenovirus D
uucagauccccacc

SEQ ID NO: 3929935 - RNA, 19 nt, Human adenovirus D
uucagccauagcucagccc

SEQ ID NO: 3929936 - RNA, 13 nt, Human adenovirus D
uuccagcccaggg

SEQ ID NO: 3929937 - RNA, 19 nt, Human adenovirus D
uuccaggagaucacuagcg

SEQ ID NO: 3929938 - RNA, 21 nt, Human adenovirus D
uuccccucaucacaucagcca

SEQ ID NO: 3929939 - RNA, 17 nt, Human adenovirus D
uuccgcaaggaugucaa

SEQ ID NO: 3929940 - RNA, 19 nt, Human adenovirus D
uuccguuugugccuccgcg

SEQ ID NO: 3929941 - RNA, 11 nt, Human adenovirus D
uuccucugugg

SEQ ID NO: 3929942 - RNA, 16 nt, Human adenovirus D
uucgaguacgaggcca

SEQ ID NO: 3929943 - RNA, 16 nt, Human adenovirus D
uucgcagaaccaugaa

SEQ ID NO: 3929944 - RNA, 13 nt, Human adenovirus D
uucgcugcugccg

SEQ ID NO: 3929945 - RNA, 16 nt, Human adenovirus D
uucuacagccagcagc

SEQ ID NO: 3929946 - RNA, 19 nt, Human adenovirus D
uucucaucucgcccagcaa

SEQ ID NO: 3929947 - RNA, 16 nt, Human adenovirus D
uucugggucaccuugg

SEQ ID NO: 3929948 - RNA, 16 nt, Human adenovirus D
uucuuuggcuuuugug

SEQ ID NO: 3929949 - RNA, 15 nt, Human adenovirus D
uugaaaucugaaagu

SEQ ID NO: 3929950 - RNA, 13 nt, Human adenovirus D
uugaagauucugg

SEQ ID NO: 3929951 - RNA, 13 nt, Human adenovirus D
uugaauugcaaau

SEQ ID NO: 3929952 - RNA, 14 nt, Human adenovirus D
uugacauccuggau

SEQ ID NO: 3929953 - RNA, 22 nt, Human adenovirus D
uugacuuccggguucccacguu

SEQ ID NO: 3929954 - RNA, 19 nt, Human adenovirus D
uugagacucauccugcugg

SEQ ID NO: 3929955 - RNA, 15 nt, Human adenovirus D
uugagagagaggaag

SEQ ID NO: 3929956 - RNA, 21 nt, Human adenovirus D
uugaugcgcuucuuaccucgc

SEQ ID NO: 3929957 - RNA, 22 nt, Human adenovirus D
uugcaugccuucgugcacuggc

SEQ ID NO: 3929958 - RNA, 21 nt, Human adenovirus D
uugcugacgggggugcccaac

SEQ ID NO: 3929959 - RNA, 23 nt, Human adenovirus D
uuggaggaagaaaugaggcaggc

SEQ ID NO: 3929960 - RNA, 20 nt, Human adenovirus D
uuggcagccgagccggcgcg

SEQ ID NO: 3929961 - RNA, 14 nt, Human adenovirus D
uugggaagaacugg

SEQ ID NO: 3929962 - RNA, 15 nt, Human adenovirus D
uugucuucccucuca

SEQ ID NO: 3929963 - RNA, 14 nt, Human adenovirus D
uuuacaugcacugg

SEQ ID NO: 3929964 - RNA, 19 nt, Human adenovirus D
uuuagguguugcaugaugg

SEQ ID NO: 3929965 - RNA, 15 nt, Human adenovirus D
uuuauggcugcugga

SEQ ID NO: 3929966 - RNA, 14 nt, Human adenovirus D
uuucacagcuugcg

SEQ ID NO: 3929967 - RNA, 21 nt, Human adenovirus D
uuucgugacuugacuuccggg

SEQ ID NO: 3929968 - RNA, 23 nt, Human adenovirus D
uuucuacgggugaguugguggcc

SEQ ID NO: 3929969 - RNA, 13 nt, Human adenovirus D
uuucuccacaccu

SEQ ID NO: 3929970 - RNA, 12 nt, Human adenovirus D
uuucuucuccca

SEQ ID NO: 3929971 - RNA, 22 nt, Human adenovirus D
uuugacaacccgccugccagga

SEQ ID NO: 3929972 - RNA, 20 nt, Human adenovirus D
uuuuaggagacuuucaucca

SEQ ID NO: 3929973 - RNA, 21 nt, Human adenovirus D
uuuuugaggaugcaucaucca

SEQ ID NO: 3929974 - RNA, 13 nt, Human adenovirus E
aaaaccagcagcu

SEQ ID NO: 3929975 - RNA, 13 nt, Human adenovirus E
aaaaucagaccca

SEQ ID NO: 3929976 - RNA, 13 nt, Human adenovirus E
aaaauccuccagg

SEQ ID NO: 3929977 - RNA, 16 nt, Human adenovirus E
aaacugccgucauuuc

SEQ ID NO: 3929978 - RNA, 23 nt, Human adenovirus E
aaagaagacgauaaacucacuuu

SEQ ID NO: 3929979 - RNA, 20 nt, Human adenovirus E
aaagcccccgaucccuccag

SEQ ID NO: 3929980 - RNA, 20 nt, Human adenovirus E
aaagcgggaggguucucuaa

SEQ ID NO: 3929981 - RNA, 12 nt, Human adenovirus E
aaauacuggggg

SEQ ID NO: 3929982 - RNA, 12 nt, Human adenovirus E
aaauccacagcg

SEQ ID NO: 3929983 - RNA, 23 nt, Human adenovirus E
aaaugaugcaaaacuaacacuuu

SEQ ID NO: 3929984 - RNA, 20 nt, Human adenovirus E
aaaugugguagucaaauacu

SEQ ID NO: 3929985 - RNA, 21 nt, Human adenovirus E
aacaacagcccccuccacagc

SEQ ID NO: 3929986 - RNA, 18 nt, Human adenovirus E
aacaguccauaguucaac

SEQ ID NO: 3929987 - RNA, 23 nt, Human adenovirus E
aacccacauuacacagacaacca

SEQ ID NO: 3929988 - RNA, 18 nt, Human adenovirus E
aaccccaccacccagacc

SEQ ID NO: 3929989 - RNA, 15 nt, Human adenovirus E
aacccgggagcugag

SEQ ID NO: 3929990 - RNA, 21 nt, Human adenovirus E
aacccguucgcucaccugcgc

SEQ ID NO: 3929991 - RNA, 14 nt, Human adenovirus E
aacccuucccaccc

SEQ ID NO: 3929992 - RNA, 14 nt, Human adenovirus E
aaccugacacacca

SEQ ID NO: 3929993 - RNA, 22 nt, Human adenovirus E
aaccugacacaccaccacagca

SEQ ID NO: 3929994 - RNA, 20 nt, Human adenovirus E
aaccugagccaggcuuucaa

SEQ ID NO: 3929995 - RNA, 19 nt, Human adenovirus E
aacgagggcguggcugccc

SEQ ID NO: 3929996 - RNA, 20 nt, Human adenovirus E
aacuacccgguggugggcgc

SEQ ID NO: 3929997 - RNA, 22 nt, Human adenovirus E
aacucaccccggggcuguggac

SEQ ID NO: 3929998 - RNA, 16 nt, Human adenovirus E
aagaggcagcagcagc

SEQ ID NO: 3929999 - RNA, 21 nt, Human adenovirus E
aagagggcgaggggcuggcgc

SEQ ID NO: 3930000 - RNA, 15 nt, Human adenovirus E
aagaguuccaggcgg

SEQ ID NO: 3930001 - RNA, 14 nt, Human adenovirus E
aagaugagccgcug

SEQ ID NO: 3930002 - RNA, 19 nt, Human adenovirus E
aagauguugaagugggcgu

SEQ ID NO: 3930003 - RNA, 14 nt, Human adenovirus E
aagcaacugcagcc

SEQ ID NO: 3930004 - RNA, 13 nt, Human adenovirus E
aagcagcagcagc

SEQ ID NO: 3930005 - RNA, 13 nt, Human adenovirus E
aagccacagaagu

SEQ ID NO: 3930006 - RNA, 12 nt, Human adenovirus E
aagccacccuga

SEQ ID NO: 3930007 - RNA, 19 nt, Human adenovirus E
aagcccccgaucccuccag

SEQ ID NO: 3930008 - RNA, 15 nt, Human adenovirus E
aagccuccacgcgca

SEQ ID NO: 3930009 - RNA, 18 nt, Human adenovirus E
aagccugguggacaagau

SEQ ID NO: 3930010 - RNA, 13 nt, Human adenovirus E
aagcgccagccca

SEQ ID NO: 3930011 - RNA, 20 nt, Human adenovirus E
aagcggccacagugcucgca

SEQ ID NO: 3930012 - RNA, 13 nt, Human adenovirus E
aagcgugggccug

SEQ ID NO: 3930013 - RNA, 13 nt, Human adenovirus E
aaguaccucaccu

SEQ ID NO: 3930014 - RNA, 23 nt, Human adenovirus E
aagucuauguuggcacagcacag

SEQ ID NO: 3930015 - RNA, 16 nt, Human adenovirus E
aaguggagcugccgcc

SEQ ID NO: 3930016 - RNA, 23 nt, Human adenovirus E
aauacucgcagaaaaugaugcaa

SEQ ID NO: 3930017 - RNA, 21 nt, Human adenovirus E
aaucaucugcauguucauuuu

SEQ ID NO: 3930018 - RNA, 18 nt, Human adenovirus E
aauccaagccagccauga

SEQ ID NO: 3930019 - RNA, 22 nt, Human adenovirus E
aaucccaacaaaugccagcuga

SEQ ID NO: 3930020 - RNA, 20 nt, Human adenovirus E
aaucccauccgcccaaggcc

SEQ ID NO: 3930021 - RNA, 14 nt, Human adenovirus E
aaucuucucuucuc

SEQ ID NO: 3930022 - RNA, 12 nt, Human adenovirus E
aaugccaccuca

SEQ ID NO: 3930023 - RNA, 21 nt, Human adenovirus E
aauuacuuggcgguggggcgg

SEQ ID NO: 3930024 - RNA, 13 nt, Human adenovirus E
aauuauauaugca

SEQ ID NO: 3930025 - RNA, 20 nt, Human adenovirus E
aauuugaagauggagccaua

SEQ ID NO: 3930026 - RNA, 14 nt, Human adenovirus E
aauuuuuaagaaaa

SEQ ID NO: 3930027 - RNA, 11 nt, Human adenovirus E
acaaaaaugaa

SEQ ID NO: 3930028 - RNA, 13 nt, Human adenovirus E
acaaaaaugaaca

SEQ ID NO: 3930029 - RNA, 16 nt, Human adenovirus E
acaaagccucagcguc

SEQ ID NO: 3930030 - RNA, 15 nt, Human adenovirus E
acaacaagcauggag

SEQ ID NO: 3930031 - RNA, 20 nt, Human adenovirus E
acaaccacaaaaacuacacc

SEQ ID NO: 3930032 - RNA, 15 nt, Human adenovirus E
acaacgcgcugcugg

SEQ ID NO: 3930033 - RNA, 23 nt, Human adenovirus E
acaccaccuggacaaaauaccac

SEQ ID NO: 3930034 - RNA, 18 nt, Human adenovirus E
acaccgccuaccgcagcu

SEQ ID NO: 3930035 - RNA, 20 nt, Human adenovirus E
acaccuggaccacugccgcc

SEQ ID NO: 3930036 - RNA, 13 nt, Human adenovirus E
acaccuggcagac

SEQ ID NO: 3930037 - RNA, 15 nt, Human adenovirus E
acacggccaccaagg

SEQ ID NO: 3930038 - RNA, 18 nt, Human adenovirus E
acacgguuuccggggcgg

SEQ ID NO: 3930039 - RNA, 16 nt, Human adenovirus E
acagcaaccucaggca

SEQ ID NO: 3930040 - RNA, 16 nt, Human adenovirus E
acagcacucaggcaga

SEQ ID NO: 3930041 - RNA, 18 nt, Human adenovirus E
acagccagagcaggaagc

SEQ ID NO: 3930042 - RNA, 15 nt, Human adenovirus E
acagccgccuggacc

SEQ ID NO: 3930043 - RNA, 22 nt, Human adenovirus E
acagcucgugcgagggggcgag

SEQ ID NO: 3930044 - RNA, 15 nt, Human adenovirus E
acagcugaggauugu

SEQ ID NO: 3930045 - RNA, 15 nt, Human adenovirus E
acaggcagcaaagcc

SEQ ID NO: 3930046 - RNA, 22 nt, Human adenovirus E
gaaccugacacaccaccacagc

SEQ ID NO: 3930047 - RNA, 19 nt, Human adenovirus E
gaaccugccccccaaaguc

SEQ ID NO: 3930048 - RNA, 14 nt, Human adenovirus E
gaacgcucugcaag

SEQ ID NO: 3930049 - RNA, 16 nt, Human adenovirus E
gaacucuucgcggucc

SEQ ID NO: 3930050 - RNA, 19 nt, Human adenovirus E
gaacucuucgcgguccuuc

SEQ ID NO: 3930051 - RNA, 19 nt, Human adenovirus E
gaacugcugcccgacggcc

SEQ ID NO: 3930052 - RNA, 14 nt, Human adenovirus E
gaacuugcagggcc

SEQ ID NO: 3930053 - RNA, 15 nt, Human adenovirus E
gaacuugcagggccu

SEQ ID NO: 3930054 - RNA, 14 nt, Human adenovirus E
gaagaaucgccagg

SEQ ID NO: 3930055 - RNA, 21 nt, Human adenovirus E
gaagacgaggaggaggcagag

SEQ ID NO: 3930056 - RNA, 15 nt, Human adenovirus E
gaagacgcgcgccgg

SEQ ID NO: 3930057 - RNA, 18 nt, Human adenovirus E
gaagacgcgcgccgggcg

SEQ ID NO: 3930058 - RNA, 14 nt, Human adenovirus E
gaagacguggucag

SEQ ID NO: 3930059 - RNA, 20 nt, Human adenovirus E
gaagagccuuucggugcgag

SEQ ID NO: 3930060 - RNA, 16 nt, Human adenovirus E
gaagcaguaguacaga

SEQ ID NO: 3930061 - RNA, 17 nt, Human adenovirus E
gaagcgcucgauggucu

SEQ ID NO: 3930062 - RNA, 15 nt, Human adenovirus E
gaagcgugggccugu

SEQ ID NO: 3930063 - RNA, 16 nt, Human adenovirus E
gaagcguucagggagg

SEQ ID NO: 3930064 - RNA, 16 nt, Human adenovirus E
gaagcugaaaguggag

SEQ ID NO: 3930065 - RNA, 19 nt, Human adenovirus E
gaagcugaaaguggagcug

SEQ ID NO: 3930066 - RNA, 16 nt, Human adenovirus E
gaagggcgugcgcucc

SEQ ID NO: 3930067 - RNA, 20 nt, Human adenovirus E
gaagggcgugcgcuccugga

SEQ ID NO: 3930068 - RNA, 16 nt, Human adenovirus E
gaaggguaugcuuucg

SEQ ID NO: 3930069 - RNA, 15 nt, Human adenovirus E
gaaguccagagaucc

SEQ ID NO: 3930070 - RNA, 20 nt, Human adenovirus E
gaauccugcccgccaccugc

SEQ ID NO: 3930071 - RNA, 15 nt, Human adenovirus E
gaaucgcggacggcc

SEQ ID NO: 3930072 - RNA, 20 nt, Human adenovirus E
gaaucgcggacggcccuuga

SEQ ID NO: 3930073 - RNA, 14 nt, Human adenovirus E
gaaugccgcggugc

SEQ ID NO: 3930074 - RNA, 18 nt, Human adenovirus E
gacagaaaaucgcccagg

SEQ ID NO: 3930075 - RNA, 15 nt, Human adenovirus E
gacagaugugggacg

SEQ ID NO: 3930076 - RNA, 14 nt, Human adenovirus E
gacagcacucaggc

SEQ ID NO: 3930077 - RNA, 13 nt, Human adenovirus E
gacagcggcagca

SEQ ID NO: 3930078 - RNA, 16 nt, Human adenovirus E
gacaggcagcggggac

SEQ ID NO: 3930079 - RNA, 20 nt, Human adenovirus E
gacaugcuuuuggucuccac

SEQ ID NO: 3930080 - RNA, 14 nt, Human adenovirus E
gaccaccguccccc

SEQ ID NO: 3930081 - RNA, 16 nt, Human adenovirus E
gaccaggagcugaugc

SEQ ID NO: 3930082 - RNA, 17 nt, Human adenovirus E
gaccccauagccagccg

SEQ ID NO: 3930083 - RNA, 22 nt, Human adenovirus E
gacccccggucccccacccagu

SEQ ID NO: 3930084 - RNA, 14 nt, Human adenovirus E
gacccgagcgggag

SEQ ID NO: 3930085 - RNA, 20 nt, Human adenovirus E
gacccggacgugcagcccga

SEQ ID NO: 3930086 - RNA, 18 nt, Human adenovirus E
gacccugccaucacaccu

SEQ ID NO: 3930087 - RNA, 15 nt, Human adenovirus E
gaccggggccgggac

SEQ ID NO: 3930088 - RNA, 21 nt, Human adenovirus E
gaccguacuacuuccgcgaga

SEQ ID NO: 3930089 - RNA, 14 nt, Human adenovirus E
gaccuaccaggaga

SEQ ID NO: 3930090 - RNA, 14 nt, Human adenovirus E
gaccucggcacuca

SEQ ID NO: 3930091 - RNA, 15 nt, Human adenovirus E
gaccugggcggcgag

SEQ ID NO: 3930092 - RNA, 22 nt, Human adenovirus E
gaccuggugaacauucugcaga

SEQ ID NO: 3930093 - RNA, 20 nt, Human adenovirus E
gaccuuccgcgagugccccc

SEQ ID NO: 3930094 - RNA, 19 nt, Human adenovirus E
gacgcgcgccgggcggcag

SEQ ID NO: 3930095 - RNA, 21 nt, Human adenovirus E
gacgcgcgccgggcggcaggg

SEQ ID NO: 3930096 - RNA, 23 nt, Human adenovirus E
gacggcccuugacguggggcagu

SEQ ID NO: 3930097 - RNA, 15 nt, Human adenovirus E
gacguagaggggcuc

SEQ ID NO: 3930098 - RNA, 20 nt, Human adenovirus E
gacguagaggggcuccucga

SEQ ID NO: 3930099 - RNA, 15 nt, Human adenovirus E
gacguaugcgcagga

SEQ ID NO: 3930100 - RNA, 22 nt, Human adenovirus E
gacgucagcggcgagggccugc

SEQ ID NO: 3930101 - RNA, 13 nt, Human adenovirus E
gacucccucagca

SEQ ID NO: 3930102 - RNA, 21 nt, Human adenovirus E
gacucccucagcaugaugccc

SEQ ID NO: 3930103 - RNA, 15 nt, Human adenovirus E
gacuccguggccugg

SEQ ID NO: 3930104 - RNA, 15 nt, Human adenovirus E
gacuccguggcucug

SEQ ID NO: 3930105 - RNA, 18 nt, Human adenovirus E
gacuccguggcucugccu

SEQ ID NO: 3930106 - RNA, 17 nt, Human adenovirus E
gacucugacgcuccugg

SEQ ID NO: 3930107 - RNA, 17 nt, Human adenovirus E
gacuucacccccacgga

SEQ ID NO: 3930108 - RNA, 19 nt, Human adenovirus E
gagaacagcagucaggcag

SEQ ID NO: 3930109 - RNA, 15 nt, Human adenovirus E
gagaagccccugggg

SEQ ID NO: 3930110 - RNA, 13 nt, Human adenovirus E
gagacagcugccg

SEQ ID NO: 3930111 - RNA, 16 nt, Human adenovirus E
gagacccgagcgggag

SEQ ID NO: 3930112 - RNA, 15 nt, Human adenovirus E
gagacgcccaggccg

SEQ ID NO: 3930113 - RNA, 23 nt, Human adenovirus E
gagacgcugcggagucaggucag

SEQ ID NO: 3930114 - RNA, 13 nt, Human adenovirus E
gagagcaugagca

SEQ ID NO: 3930115 - RNA, 16 nt, Human adenovirus E
gagagccgccucagca

SEQ ID NO: 3930116 - RNA, 16 nt, Human adenovirus E
gagaugaaacccuccg

SEQ ID NO: 3930117 - RNA, 17 nt, Human adenovirus E
gagcagaccuaccagga

SEQ ID NO: 3930118 - RNA, 15 nt, Human adenovirus E
gagcagcagcacaca

SEQ ID NO: 3930119 - RNA, 16 nt, Human adenovirus E
gagcaggaagcagaga

SEQ ID NO: 3930120 - RNA, 14 nt, Human adenovirus E
gagccaaagcaugu

SEQ ID NO: 3930121 - RNA, 20 nt, Human adenovirus E
gagccacaccacagcuaccu

SEQ ID NO: 3930122 - RNA, 13 nt, Human adenovirus E
gagccaggugagg

SEQ ID NO: 3930123 - RNA, 18 nt, Human adenovirus E
gagccaggugaggucggg

SEQ ID NO: 3930124 - RNA, 22 nt, Human adenovirus E
gagccgcgcccugggccaggac

SEQ ID NO: 3930125 - RNA, 16 nt, Human adenovirus E
gagccggcggcggcgc

SEQ ID NO: 3930126 - RNA, 22 nt, Human adenovirus E
gagccuuguugcgcagggccag

SEQ ID NO: 3930127 - RNA, 13 nt, Human adenovirus E
gagcgaccaggag

SEQ ID NO: 3930128 - RNA, 15 nt, Human adenovirus E
gagcgaccaggagcu

SEQ ID NO: 3930129 - RNA, 13 nt, Human adenovirus E
gagcgcauggucu

SEQ ID NO: 3930130 - RNA, 23 nt, Human adenovirus E
gagcgccucggccgcguggccuu

SEQ ID NO: 3930131 - RNA, 23 nt, Human adenovirus E
gagcgcggucauggaccaggugc

SEQ ID NO: 3930132 - RNA, 23 nt, Human adenovirus E
gagcgcucgcgguggggcggcca

SEQ ID NO: 3930133 - RNA, 13 nt, Human adenovirus E
gagcgugaugcag

SEQ ID NO: 3930134 - RNA, 17 nt, Human adenovirus E
gagcgugaugcagcagg

SEQ ID NO: 3930135 - RNA, 15 nt, Human adenovirus E
gagcucagccgcgcc

SEQ ID NO: 3930136 - RNA, 20 nt, Human adenovirus E
gagcuccucguaggugagcu

SEQ ID NO: 3930137 - RNA, 22 nt, Human adenovirus E
gagcucugcaagcuccugcaga

SEQ ID NO: 3930138 - RNA, 16 nt, Human adenovirus E
gagcugcccgaggagc

SEQ ID NO: 3930139 - RNA, 15 nt, Human adenovirus E
gagcuguaccugagu

SEQ ID NO: 3930140 - RNA, 15 nt, Human adenovirus E
gagcuugggggcgag

SEQ ID NO: 3930141 - RNA, 13 nt, Human adenovirus E
gaggaagacuggg

SEQ ID NO: 3930142 - RNA, 18 nt, Human adenovirus E
gaggaagacugggacagc

SEQ ID NO: 3930143 - RNA, 20 nt, Human adenovirus E
gaggaagacugggacagcac

SEQ ID NO: 3930144 - RNA, 15 nt, Human adenovirus E
gaggaagacugggag

SEQ ID NO: 3930145 - RNA, 16 nt, Human adenovirus E
gaggaagacugggaga

SEQ ID NO: 3930146 - RNA, 23 nt, Human adenovirus E
gaggacgcgcucaucaagcaucu

SEQ ID NO: 3930147 - RNA, 14 nt, Human adenovirus E
gaggagagcaugag

SEQ ID NO: 3930148 - RNA, 13 nt, Human adenovirus E
gaggccagcaccc

SEQ ID NO: 3930149 - RNA, 18 nt, Human adenovirus E
gaggccaucggccaggcg

SEQ ID NO: 3930150 - RNA, 15 nt, Human adenovirus E
gagggaagaacagga

SEQ ID NO: 3930151 - RNA, 16 nt, Human adenovirus E
gagggcguggcugccc

SEQ ID NO: 3930152 - RNA, 14 nt, Human adenovirus E
gagggucuccugga

SEQ ID NO: 3930153 - RNA, 15 nt, Human adenovirus E
gagggucugggcagc

SEQ ID NO: 3930154 - RNA, 13 nt, Human adenovirus E
gagggugcugccg

SEQ ID NO: 3930155 - RNA, 18 nt, Human adenovirus E
gagguaaauccaagccag

SEQ ID NO: 3930156 - RNA, 16 nt, Human adenovirus E
gaggucaaggugcggc

SEQ ID NO: 3930157 - RNA, 15 nt, Human adenovirus E
gagucgcggaugaag

SEQ ID NO: 3930158 - RNA, 13 nt, Human adenovirus E
gaguucgcccccc

SEQ ID NO: 3930159 - RNA, 21 nt, Human adenovirus E
gaguucgccccccggcggcgc

SEQ ID NO: 3930160 - RNA, 12 nt, Human adenovirus E
gaguuuggaaga

SEQ ID NO: 3930161 - RNA, 22 nt, Human adenovirus E
gauaaaccgaaguccuccccag

SEQ ID NO: 3930162 - RNA, 20 nt, Human adenovirus E
gauacaccaagaacagccag

SEQ ID NO: 3930163 - RNA, 20 nt, Human adenovirus E
gcucacccgcaguugucugu

SEQ ID NO: 3930164 - RNA, 20 nt, Human adenovirus E
gcucaccgccacgccccgca

SEQ ID NO: 3930165 - RNA, 21 nt, Human adenovirus E
gcucaucaagcaucuggcccg

SEQ ID NO: 3930166 - RNA, 15 nt, Human adenovirus E
gcuccacgguggccg

SEQ ID NO: 3930167 - RNA, 12 nt, Human adenovirus E
gcuccagcucca

SEQ ID NO: 3930168 - RNA, 15 nt, Human adenovirus E
gcucccuggggcgcc

SEQ ID NO: 3930169 - RNA, 12 nt, Human adenovirus E
gcuccgcuugcc

SEQ ID NO: 3930170 - RNA, 20 nt, Human adenovirus E
gcuccgcuugccguccuucu

SEQ ID NO: 3930171 - RNA, 22 nt, Human adenovirus E
gcucgacuccguggccuggagg

SEQ ID NO: 3930172 - RNA, 16 nt, Human adenovirus E
gcucgcaacgcugcac

SEQ ID NO: 3930173 - RNA, 21 nt, Human adenovirus E
gcucggcuucgacaccuggac

SEQ ID NO: 3930174 - RNA, 22 nt, Human adenovirus E
gcucugcaagcuccugcagaag

SEQ ID NO: 3930175 - RNA, 19 nt, Human adenovirus E
gcucugguacugcaggccc

SEQ ID NO: 3930176 - RNA, 21 nt, Human adenovirus E
gcugaaaguggagcugccgcc

SEQ ID NO: 3930177 - RNA, 14 nt, Human adenovirus E
gcugaccaaccugg

SEQ ID NO: 3930178 - RNA, 16 nt, Human adenovirus E
gcugacguccugcagg

SEQ ID NO: 3930179 - RNA, 17 nt, Human adenovirus E
gcugagcgaccaggagc

SEQ ID NO: 3930180 - RNA, 19 nt, Human adenovirus E
gcugaucguguucgcgacc

SEQ ID NO: 3930181 - RNA, 15 nt, Human adenovirus E
gcugauggaaguggc

SEQ ID NO: 3930182 - RNA, 15 nt, Human adenovirus E
gcugcagagccagcc

SEQ ID NO: 3930183 - RNA, 24 nt, Human adenovirus E
gcugcccgacaugaugcaagaccc

SEQ ID NO: 3930184 - RNA, 18 nt, Human adenovirus E
gcugccgaccgcggcgcc

SEQ ID NO: 3930185 - RNA, 22 nt, Human adenovirus E
gcugccgcggcggugcccgagg

SEQ ID NO: 3930186 - RNA, 14 nt, Human adenovirus E
gcugccgcuguccg

SEQ ID NO: 3930187 - RNA, 22 nt, Human adenovirus E
gcugcuggagcgcguggcccgc

SEQ ID NO: 3930188 - RNA, 16 nt, Human adenovirus E
gcugcugguggccccc

SEQ ID NO: 3930189 - RNA, 14 nt, Human adenovirus E
gcuggaccacggca

SEQ ID NO: 3930190 - RNA, 23 nt, Human adenovirus E
gcuggaggccaucgugcagaacc

SEQ ID NO: 3930191 - RNA, 18 nt, Human adenovirus E
gcuggcagagccccuucc

SEQ ID NO: 3930192 - RNA, 22 nt, Human adenovirus E
gcuggccuuggaagagggcgag

SEQ ID NO: 3930193 - RNA, 19 nt, Human adenovirus E
gcuggcgggcggcgccacc

SEQ ID NO: 3930194 - RNA, 21 nt, Human adenovirus E
gcuggcgggcggcgccacccu

SEQ ID NO: 3930195 - RNA, 13 nt, Human adenovirus E
gcuggcggugcuc

SEQ ID NO: 3930196 - RNA, 19 nt, Human adenovirus E
gcugggacuugccgcagcc

SEQ ID NO: 3930197 - RNA, 19 nt, Human adenovirus E
gcugggucugcgaccugac

SEQ ID NO: 3930198 - RNA, 14 nt, Human adenovirus E
  misc_feature (5)..(5): n is a, c, g, or u
gcugnugagcgaga

SEQ ID NO: 3930199 - RNA, 18 nt, Human adenovirus E
gcuguuccugguggugca

SEQ ID NO: 3930200 - RNA, 14 nt, Human adenovirus E
gcuugcaggccugc

SEQ ID NO: 3930201 - RNA, 22 nt, Human adenovirus E
gcuugccauucgcgcacggcca

SEQ ID NO: 3930202 - RNA, 21 nt, Human adenovirus E
gcuugccguccuucucgguga

SEQ ID NO: 3930203 - RNA, 22 nt, Human adenovirus E
gcuuuaccgacaaaaaucagac

SEQ ID NO: 3930204 - RNA, 20 nt, Human adenovirus E
ggaacgagaccgagcuccag

SEQ ID NO: 3930205 - RNA, 23 nt, Human adenovirus E
ggaacucuugcaggacagcgaac

SEQ ID NO: 3930206 - RNA, 13 nt, Human adenovirus E
ggaagaagaaagu

SEQ ID NO: 3930207 - RNA, 15 nt, Human adenovirus E
ggaagaagcagaaga

SEQ ID NO: 3930208 - RNA, 19 nt, Human adenovirus E
ggaagaaggaaggcagcga

SEQ ID NO: 3930209 - RNA, 21 nt, Human adenovirus E
ggaagacguaugcgcaggagc

SEQ ID NO: 3930210 - RNA, 15 nt, Human adenovirus E
ggaagacugggagaa

SEQ ID NO: 3930211 - RNA, 13 nt, Human adenovirus E
ggaaucuucucuu

SEQ ID NO: 3930212 - RNA, 23 nt, Human adenovirus E
ggaauggcuguugaugugaugga

SEQ ID NO: 3930213 - RNA, 20 nt, Human adenovirus E
ggaauuucagugggaagugg

SEQ ID NO: 3930214 - RNA, 14 nt, Human adenovirus E
ggacagcacucagg

SEQ ID NO: 3930215 - RNA, 22 nt, Human adenovirus E
ggacgacccgggcaaccuggaa

SEQ ID NO: 3930216 - RNA, 13 nt, Human adenovirus E
ggacgagcugacg

SEQ ID NO: 3930217 - RNA, 16 nt, Human adenovirus E
ggacgauguggacagc

SEQ ID NO: 3930218 - RNA, 12 nt, Human adenovirus E
ggacgugcagcc

SEQ ID NO: 3930219 - RNA, 23 nt, Human adenovirus E
ggacuccgcgcaaggaccugagc

SEQ ID NO: 3930220 - RNA, 14 nt, Human adenovirus E
ggacugggcggugc

SEQ ID NO: 3930221 - RNA, 18 nt, Human adenovirus E
ggagaaagcaagcagcac

SEQ ID NO: 3930222 - RNA, 16 nt, Human adenovirus E
ggagaaggaggagagc

SEQ ID NO: 3930223 - RNA, 20 nt, Human adenovirus E
ggagagacagcugccguccu

SEQ ID NO: 3930224 - RNA, 14 nt, Human adenovirus E
ggagauagcauaga

SEQ ID NO: 3930225 - RNA, 19 nt, Human adenovirus E
ggagaugacugacccacug

SEQ ID NO: 3930226 - RNA, 13 nt, Human adenovirus E
ggagauggaggaa

SEQ ID NO: 3930227 - RNA, 15 nt, Human adenovirus E
ggagauggaggaaga

SEQ ID NO: 3930228 - RNA, 17 nt, Human adenovirus E
ggagcccgaggagaugc

SEQ ID NO: 3930229 - RNA, 19 nt, Human adenovirus E
ggagcuaccagccccagau

SEQ ID NO: 3930230 - RNA, 17 nt, Human adenovirus E
ggagcuccuggagcgag

SEQ ID NO: 3930231 - RNA, 20 nt, Human adenovirus E
ggaggaagacugggagaaca

SEQ ID NO: 3930232 - RNA, 16 nt, Human adenovirus E
ggaggagacugauggc

SEQ ID NO: 3930233 - RNA, 20 nt, Human adenovirus E
ggaggagcucagccgcgccu

SEQ ID NO: 3930234 - RNA, 11 nt, Human adenovirus E
ggaggcagagg

SEQ ID NO: 3930235 - RNA, 20 nt, Human adenovirus E
ggagggcgaguaccuggaag

SEQ ID NO: 3930236 - RNA, 14 nt, Human adenovirus E
ggaggugugcguga

SEQ ID NO: 3930237 - RNA, 18 nt, Human adenovirus E
ggaggugugcgugagggc

SEQ ID NO: 3930238 - RNA, 22 nt, Human adenovirus E
ggaguauggcaccagacgaugg

SEQ ID NO: 3930239 - RNA, 21 nt, Human adenovirus E
ggaucaucugggagcugaaca

SEQ ID NO: 3930240 - RNA, 16 nt, Human adenovirus E
ggaugcacgugcugca

SEQ ID NO: 3930241 - RNA, 15 nt, Human adenovirus E
ggaugcagcagcuga

SEQ ID NO: 3930242 - RNA, 16 nt, Human adenovirus E
ggcaccgcagcuugcc

SEQ ID NO: 3930243 - RNA, 21 nt, Human adenovirus E
ggcaccggagcacccccgcca

SEQ ID NO: 3930244 - RNA, 16 nt, Human adenovirus E
ggcacgacaggcagcg

SEQ ID NO: 3930245 - RNA, 18 nt, Human adenovirus E
ggcacgauucugaccugc

SEQ ID NO: 3930246 - RNA, 15 nt, Human adenovirus E
ggcagaacgugcugc

SEQ ID NO: 3930247 - RNA, 16 nt, Human adenovirus E
ggcagcccagccgccg

SEQ ID NO: 3930248 - RNA, 20 nt, Human adenovirus E
ggcagcggccgaggcggcug

SEQ ID NO: 3930249 - RNA, 15 nt, Human adenovirus E
ggcagcggggacaga

SEQ ID NO: 3930250 - RNA, 21 nt, Human adenovirus E
ggcaggccacggggucuccgg

SEQ ID NO: 3930251 - RNA, 15 nt, Human adenovirus E
ggcagugguggcggg

SEQ ID NO: 3930252 - RNA, 13 nt, Human adenovirus E
ggcaucagcugga

SEQ ID NO: 3930253 - RNA, 16 nt, Human adenovirus E
ggcaucucgauccagc

SEQ ID NO: 3930254 - RNA, 21 nt, Human adenovirus E
ggcaucucgauccagcagacc

SEQ ID NO: 3930255 - RNA, 14 nt, Human adenovirus E
ggccaaccaggccg

SEQ ID NO: 3930256 - RNA, 20 nt, Human adenovirus E
ggccagaucguccagggcag

SEQ ID NO: 3930257 - RNA, 19 nt, Human adenovirus E
ggccaggcgcacguggacg

SEQ ID NO: 3930258 - RNA, 13 nt, Human adenovirus E
ggccaucggccag

SEQ ID NO: 3930259 - RNA, 21 nt, Human adenovirus E
ggccauguucagggcggccag

SEQ ID NO: 3930260 - RNA, 17 nt, Human adenovirus E
ggcccggaugcaggggc

SEQ ID NO: 3930261 - RNA, 16 nt, Human adenovirus E
ggcccggcaggccacc

SEQ ID NO: 3930262 - RNA, 22 nt, Human adenovirus E
ggcccgguuguugaugaccugg

SEQ ID NO: 3930263 - RNA, 12 nt, Human adenovirus E
ggcccucagcau

SEQ ID NO: 3930264 - RNA, 13 nt, Human adenovirus E
ggccgaccgcgau

SEQ ID NO: 3930265 - RNA, 17 nt, Human adenovirus E
ggccgagcugucggccu

SEQ ID NO: 3930266 - RNA, 17 nt, Human adenovirus E
ggccgcgaacgcucugc

SEQ ID NO: 3930267 - RNA, 16 nt, Human adenovirus E
ggccgcggccaaccug

SEQ ID NO: 3930268 - RNA, 18 nt, Human adenovirus E
ggccgucuacucgcagca

SEQ ID NO: 3930269 - RNA, 17 nt, Human adenovirus E
ggccugcacccucaucu

SEQ ID NO: 3930270 - RNA, 18 nt, Human adenovirus E
ggccugcgucaucaccca

SEQ ID NO: 3930271 - RNA, 20 nt, Human adenovirus E
ggccugcgucaucacccagg

SEQ ID NO: 3930272 - RNA, 22 nt, Human adenovirus E
ggccugcucgagugccacugcc

SEQ ID NO: 3930273 - RNA, 22 nt, Human adenovirus E
ggccugguguacaacgcgcugc

SEQ ID NO: 3930274 - RNA, 14 nt, Human adenovirus E
ggccuuggaggcgg

SEQ ID NO: 3930275 - RNA, 18 nt, Human adenovirus E
ggcgagggccugcucgag

SEQ ID NO: 3930276 - RNA, 24 nt, Human adenovirus E
ggcgaguuugcuuacggcaagcgc

SEQ ID NO: 3930277 - RNA, 17 nt, Human adenovirus E
ggcgcaaacccgggagc

SEQ ID NO: 3930278 - RNA, 20 nt, Human adenovirus E
ggcgccuacggaggggcgga

SEQ ID NO: 3930279 - RNA, 20 nt, Human adenovirus E
ggcgccuucaauuggagcag

SEQ ID NO: 3930280 - RNA, 12 nt, Human adenovirus E
ggcgcgcaggcc

SEQ ID NO: 3930281 - RNA, 15 nt, Human adenovirus E
ggcgcgcaggccgga

SEQ ID NO: 3930282 - RNA, 12 nt, Human adenovirus E
ggcgcggccagc

SEQ ID NO: 3930283 - RNA, 13 nt, Human adenovirus E
ggcgcggccagcc

SEQ ID NO: 3930284 - RNA, 13 nt, Human adenovirus E
ggcgcgggcggaa

SEQ ID NO: 3930285 - RNA, 20 nt, Human adenovirus E
ggcgcgugcaguggcgcggg

SEQ ID NO: 3930286 - RNA, 17 nt, Human adenovirus E
ggcgcuaaucaccgcua

SEQ ID NO: 3930287 - RNA, 13 nt, Human adenovirus E
ggcgcugcagagc

SEQ ID NO: 3930288 - RNA, 19 nt, Human adenovirus E
ggcgcugcagagccagccg

SEQ ID NO: 3930289 - RNA, 20 nt, Human adenovirus E
ggcgcuguccggccgcgagg

SEQ ID NO: 3930290 - RNA, 23 nt, Human adenovirus E
ggcggagaugccuuucaagagcc

SEQ ID NO: 3930291 - RNA, 11 nt, Human adenovirus E
ggcggccagcu

SEQ ID NO: 3930292 - RNA, 22 nt, Human adenovirus E
ggcggcgaagacgcgcgccggg

SEQ ID NO: 3930293 - RNA, 16 nt, Human adenovirus E
ggcggcgcugcagagc

SEQ ID NO: 3930294 - RNA, 14 nt, Human adenovirus E
ggcggcggcggcga

SEQ ID NO: 3930295 - RNA, 14 nt, Human adenovirus E
ggcgggcggcgcca

SEQ ID NO: 3930296 - RNA, 15 nt, Human adenovirus E
ggcguacaugccgca

SEQ ID NO: 3930297 - RNA, 19 nt, Human adenovirus E
ggcgugccccagggcaugg

SEQ ID NO: 3930298 - RNA, 16 nt, Human adenovirus E
ggcgugcgcuccugga

SEQ ID NO: 3930299 - RNA, 18 nt, Human adenovirus E
  misc_feature (4)..(4): n is a, c, g, or u
ggcnugggcgugcagacc

SEQ ID NO: 3930300 - RNA, 20 nt, Human adenovirus E
ggcucgacuccguggccugg

SEQ ID NO: 3930301 - RNA, 14 nt, Human adenovirus E
ggcugacguccugc

SEQ ID NO: 3930302 - RNA, 20 nt, Human adenovirus E
ggcugcaaacuuccuccaca

SEQ ID NO: 3930303 - RNA, 12 nt, Human adenovirus E
ggcuggagccgc

SEQ ID NO: 3930304 - RNA, 16 nt, Human adenovirus E
ggcuggagccgcagcu

SEQ ID NO: 3930305 - RNA, 12 nt, Human adenovirus E
ggcuggcagagc

SEQ ID NO: 3930306 - RNA, 17 nt, Human adenovirus E
ggcuggcggggaacggg

SEQ ID NO: 3930307 - RNA, 16 nt, Human adenovirus E
ggcuguggaccucggc

SEQ ID NO: 3930308 - RNA, 23 nt, Human adenovirus E
ggcuuuaccgacaaaaaucagac

SEQ ID NO: 3930309 - RNA, 23 nt, Human adenovirus E
ggcuuucaagaacuugcagggcc

SEQ ID NO: 3930310 - RNA, 13 nt, Human adenovirus E
ggcuuugagcucg

SEQ ID NO: 3930311 - RNA, 21 nt, Human adenovirus E
gggacagaugugggacgauga

SEQ ID NO: 3930312 - RNA, 16 nt, Human adenovirus E
gggaccugcuggaggc

SEQ ID NO: 3930313 - RNA, 19 nt, Human adenovirus E
gggaccugcuggaggccau

SEQ ID NO: 3930314 - RNA, 14 nt, Human adenovirus E
gggacgcagggcca

SEQ ID NO: 3930315 - RNA, 21 nt, Human adenovirus E
gggagcugcggcgcggccugg

SEQ ID NO: 3930316 - RNA, 12 nt, Human adenovirus E
gggaggcgcugc

SEQ ID NO: 3930317 - RNA, 22 nt, Human adenovirus E
gggaggcuuccugcccgcgcug

SEQ ID NO: 3930318 - RNA, 15 nt, Human adenovirus E
gggaguugcgcgccg

SEQ ID NO: 3930319 - RNA, 21 nt, Human adenovirus E
gggauggguaagcgcggaggc

SEQ ID NO: 3930320 - RNA, 16 nt, Human adenovirus E
gggcacgauucugacc

SEQ ID NO: 3930321 - RNA, 15 nt, Human adenovirus E
gggcagaagcacaca

SEQ ID NO: 3930322 - RNA, 23 nt, Human adenovirus E
  misc_feature (6)..(6): n is a, c, g, or u
gggcancggcggcgcgcgguuga

SEQ ID NO: 3930323 - RNA, 20 nt, Human adenovirus E
gggcaucaacgggguggugg

SEQ ID NO: 3930324 - RNA, 20 nt, Human adenovirus E
gggcaugagcccgucccggg

SEQ ID NO: 3930325 - RNA, 13 nt, Human adenovirus E
gggccacccccag

SEQ ID NO: 3930326 - RNA, 14 nt, Human adenovirus E
gggccacgagccgg

SEQ ID NO: 3930327 - RNA, 16 nt, Human adenovirus E
gggcccagguuggugc

SEQ ID NO: 3930328 - RNA, 16 nt, Human adenovirus E
gggcccggaugcaggg

SEQ ID NO: 3930329 - RNA, 18 nt, Human adenovirus E
gggcccggaugcaggggc

SEQ ID NO: 3930330 - RNA, 22 nt, Human adenovirus E
gggcccgugggcggcggccugg

SEQ ID NO: 3930331 - RNA, 17 nt, Human adenovirus E
gggccugcgcgcgccca

SEQ ID NO: 3930332 - RNA, 22 nt, Human adenovirus E
gggccuuggaggcggcggcagg

SEQ ID NO: 3930333 - RNA, 20 nt, Human adenovirus E
gggcgaaagugucccugacc

SEQ ID NO: 3930334 - RNA, 16 nt, Human adenovirus E
gggcgagaucgagggc

SEQ ID NO: 3930335 - RNA, 20 nt, Human adenovirus E
gggcgaggaagacggacucg

SEQ ID NO: 3930336 - RNA, 19 nt, Human adenovirus E
gggcggcagaacggggugc

SEQ ID NO: 3930337 - RNA, 12 nt, Human adenovirus E
gggcggcagcgg

SEQ ID NO: 3930338 - RNA, 21 nt, Human adenovirus E
gggcggccgccaugaacucug

SEQ ID NO: 3930339 - RNA, 18 nt, Human adenovirus E
gggcgugccccagggcau

SEQ ID NO: 3930340 - RNA, 17 nt, Human adenovirus E
gggcuggcgcgccuggg

SEQ ID NO: 3930341 - RNA, 21 nt, Human adenovirus E
ggggaacccguccugaucugc

SEQ ID NO: 3930342 - RNA, 14 nt, Human adenovirus E
ggggaacgggaugc

SEQ ID NO: 3930343 - RNA, 19 nt, Human adenovirus E
ggggaacucuugcaggaca

SEQ ID NO: 3930344 - RNA, 13 nt, Human adenovirus E
ggggacgagcugc

SEQ ID NO: 3930345 - RNA, 15 nt, Human adenovirus E
ggggagaugagcugg

SEQ ID NO: 3930346 - RNA, 16 nt, Human adenovirus E
ggggagaugaggugca

SEQ ID NO: 3930347 - RNA, 14 nt, Human adenovirus E
ggggaucagccccg

SEQ ID NO: 3930348 - RNA, 22 nt, Human adenovirus E
ggggaugaugauauucuggagc

SEQ ID NO: 3930349 - RNA, 18 nt, Human adenovirus E
ggggcagaacgugcugca

SEQ ID NO: 3930350 - RNA, 14 nt, Human adenovirus E
ggggcaguccgacc

SEQ ID NO: 3930351 - RNA, 20 nt, Human adenovirus E
ggggccacgagccggggcag

SEQ ID NO: 3930352 - RNA, 15 nt, Human adenovirus E
ggggcgaggaagacg

SEQ ID NO: 3930353 - RNA, 13 nt, Human adenovirus E
ggggcggccagcu

SEQ ID NO: 3930354 - RNA, 13 nt, Human adenovirus E
ggggcgggggaga

SEQ ID NO: 3930355 - RNA, 22 nt, Human adenovirus E
ggggggucggcaucgaugguga

SEQ ID NO: 3930356 - RNA, 21 nt, Human adenovirus E
ggggugcgcucccggcggcgc

SEQ ID NO: 3930357 - RNA, 22 nt, Human adenovirus E
ggguaaaucguucucuccagca

SEQ ID NO: 3930358 - RNA, 12 nt, Human adenovirus E
gggucuccugga

SEQ ID NO: 3930359 - RNA, 17 nt, Human adenovirus E
gggugacaaagagcugu

SEQ ID NO: 3930360 - RNA, 20 nt, Human adenovirus E
gggugcgcucccggcggcgc

SEQ ID NO: 3930361 - RNA, 17 nt, Human adenovirus E
gggugcuucacgcucgc

SEQ ID NO: 3930362 - RNA, 19 nt, Human adenovirus E
gguaaaucguucucuccag

SEQ ID NO: 3930363 - RNA, 20 nt, Human adenovirus E
gguacacgggguugcagcac

SEQ ID NO: 3930364 - RNA, 20 nt, Human adenovirus E
ggucaucuugcaggucugcc

SEQ ID NO: 3930365 - RNA, 16 nt, Human adenovirus E
ggucccggcgcccgcc

SEQ ID NO: 3930366 - RNA, 12 nt, Human adenovirus E
gguccuggguga

SEQ ID NO: 3930367 - RNA, 21 nt, Human adenovirus E
ggucgcugagcccgugcugcu

SEQ ID NO: 3930368 - RNA, 17 nt, Human adenovirus E
ggucucccgcaagaccc

SEQ ID NO: 3930369 - RNA, 19 nt, Human adenovirus E
ggucucggcauggcccgcg

SEQ ID NO: 3930370 - RNA, 19 nt, Human adenovirus E
ggugaaggggugcgcgccg

SEQ ID NO: 3930371 - RNA, 16 nt, Human adenovirus E
ggugaggucgggcugg

SEQ ID NO: 3930372 - RNA, 18 nt, Human adenovirus E
ggugauaucuuccagaua

SEQ ID NO: 3930373 - RNA, 17 nt, Human adenovirus E
ggugauccuccaccaga

SEQ ID NO: 3930374 - RNA, 22 nt, Human adenovirus E
ggugccccucagcguggaggag

SEQ ID NO: 3930375 - RNA, 23 nt, Human adenovirus E
ggugcccucgcgcuccaacccca

SEQ ID NO: 3930376 - RNA, 15 nt, Human adenovirus E
ggugcgggggucccc

SEQ ID NO: 3930377 - RNA, 14 nt, Human adenovirus E
ggugcguuccagca

SEQ ID NO: 3930378 - RNA, 19 nt, Human adenovirus E
gguggcacgacaggcagcg

SEQ ID NO: 3930379 - RNA, 17 nt, Human adenovirus E
ggugggguagcagcgcc

SEQ ID NO: 3930380 - RNA, 11 nt, Human adenovirus E
ggugugccccg

SEQ ID NO: 3930381 - RNA, 22 nt, Human adenovirus E
gguuuaaaauuugaagauggag

SEQ ID NO: 3930382 - RNA, 14 nt, Human adenovirus E
guaccagauccuca

SEQ ID NO: 3930383 - RNA, 16 nt, Human adenovirus E
guacggcgcggccagc

SEQ ID NO: 3930384 - RNA, 18 nt, Human adenovirus E
guacgugcaacacagaac

SEQ ID NO: 3930385 - RNA, 16 nt, Human adenovirus E
guagaggugggcuugg

SEQ ID NO: 3930386 - RNA, 20 nt, Human adenovirus E
guagcuccauugcagggccu

SEQ ID NO: 3930387 - RNA, 20 nt, Human adenovirus E
guauacaugaauggagaugu

SEQ ID NO: 3930388 - RNA, 20 nt, Human adenovirus E
guauccggggaguccagcgc

SEQ ID NO: 3930389 - RNA, 19 nt, Human adenovirus E
gucaaaaccauaucccagg

SEQ ID NO: 3930390 - RNA, 23 nt, Human adenovirus E
gucaaaaccauaucccagggcac

SEQ ID NO: 3930391 - RNA, 18 nt, Human adenovirus E
gucaagcugcugcucagg

SEQ ID NO: 3930392 - RNA, 16 nt, Human adenovirus E
gucaccuccacagccc

SEQ ID NO: 3930393 - RNA, 23 nt, Human adenovirus E
gucagcgacgagcagcuggcccg

SEQ ID NO: 3930394 - RNA, 13 nt, Human adenovirus E
gucaggcagagga

SEQ ID NO: 3930395 - RNA, 19 nt, Human adenovirus E
aggagauggugggccuuug

SEQ ID NO: 3930396 - RNA, 20 nt, Human adenovirus E
  misc_feature (11)..(11): n is a, c, g, or u
aggagccguanagggcguug

SEQ ID NO: 3930397 - RNA, 13 nt, Human adenovirus E
aggagcgcgggcu

SEQ ID NO: 3930398 - RNA, 13 nt, Human adenovirus E
aggaggagcuggc

SEQ ID NO: 3930399 - RNA, 22 nt, Human adenovirus E
aggagggacuugagggcguaga

SEQ ID NO: 3930400 - RNA, 20 nt, Human adenovirus E
aggauagcaagaacaggagc

SEQ ID NO: 3930401 - RNA, 20 nt, Human adenovirus E
aggaucuugcccgcgcgggg

SEQ ID NO: 3930402 - RNA, 14 nt, Human adenovirus E
aggaugcgagccga

SEQ ID NO: 3930403 - RNA, 22 nt, Human adenovirus E
aggcaauuuuuaagaaaaucaa

SEQ ID NO: 3930404 - RNA, 17 nt, Human adenovirus E
aggccacaauacaugcc

SEQ ID NO: 3930405 - RNA, 17 nt, Human adenovirus E
aggccacgugggacggg

SEQ ID NO: 3930406 - RNA, 12 nt, Human adenovirus E
aggccagcaccc

SEQ ID NO: 3930407 - RNA, 16 nt, Human adenovirus E
aggccaucggccaggc

SEQ ID NO: 3930408 - RNA, 22 nt, Human adenovirus E
aggccguccugacuuuggagag

SEQ ID NO: 3930409 - RNA, 23 nt, Human adenovirus E
aggccgucuacucgcagcagcug

SEQ ID NO: 3930410 - RNA, 22 nt, Human adenovirus E
aggcggcagugguggcggggga

SEQ ID NO: 3930411 - RNA, 15 nt, Human adenovirus E
aggcggcggcaggac

SEQ ID NO: 3930412 - RNA, 17 nt, Human adenovirus E
aggcggucccagagcuc

SEQ ID NO: 3930413 - RNA, 17 nt, Human adenovirus E
aggcguacaugccgcag

SEQ ID NO: 3930414 - RNA, 11 nt, Human adenovirus E
aggcugagcuc

SEQ ID NO: 3930415 - RNA, 21 nt, Human adenovirus E
agggauaagcugaaagagcag

SEQ ID NO: 3930416 - RNA, 17 nt, Human adenovirus E
agggcgaguaccuggaa

SEQ ID NO: 3930417 - RNA, 13 nt, Human adenovirus E
agggcgcgcggga

SEQ ID NO: 3930418 - RNA, 14 nt, Human adenovirus E
agggcggccagacg

SEQ ID NO: 3930419 - RNA, 17 nt, Human adenovirus E
agggcguuggagaggag

SEQ ID NO: 3930420 - RNA, 18 nt, Human adenovirus E
agggcguuggagaggagc

SEQ ID NO: 3930421 - RNA, 15 nt, Human adenovirus E
agggggccaccccca

SEQ ID NO: 3930422 - RNA, 18 nt, Human adenovirus E
agggggcgauccuggccc

SEQ ID NO: 3930423 - RNA, 21 nt, Human adenovirus E
aggguaucgcaaucaggcagc

SEQ ID NO: 3930424 - RNA, 14 nt, Human adenovirus E
agggucugggcagc

SEQ ID NO: 3930425 - RNA, 18 nt, Human adenovirus E
agggucuuguugcuagug

SEQ ID NO: 3930426 - RNA, 16 nt, Human adenovirus E
agggugcugagggacg

SEQ ID NO: 3930427 - RNA, 23 nt, Human adenovirus E
agguccagcgaaggguaugcuuu

SEQ ID NO: 3930428 - RNA, 13 nt, Human adenovirus E
aggucgaggagaa

SEQ ID NO: 3930429 - RNA, 17 nt, Human adenovirus E
agguggacgaggagggc

SEQ ID NO: 3930430 - RNA, 19 nt, Human adenovirus E
agguuggugcgacugggcu

SEQ ID NO: 3930431 - RNA, 19 nt, Human adenovirus E
aguacgugcaacacagaac

SEQ ID NO: 3930432 - RNA, 22 nt, Human adenovirus E
aguagucgagggucuccuggau

SEQ ID NO: 3930433 - RNA, 11 nt, Human adenovirus E
aguccccagag

SEQ ID NO: 3930434 - RNA, 20 nt, Human adenovirus E
  misc_feature (8)..(8): n is a, c, g, or u
aguccugnugagcggcccug

SEQ ID NO: 3930435 - RNA, 17 nt, Human adenovirus E
agucgggggcaggagca

SEQ ID NO: 3930436 - RNA, 21 nt, Human adenovirus E
agucuaaaaauacccgccaaa

SEQ ID NO: 3930437 - RNA, 16 nt, Human adenovirus E
agucucauugccguca

SEQ ID NO: 3930438 - RNA, 12 nt, Human adenovirus E
agucuggaggaa

SEQ ID NO: 3930439 - RNA, 17 nt, Human adenovirus E
agucuggaggaagacga

SEQ ID NO: 3930440 - RNA, 18 nt, Human adenovirus E
agugccacugccgcugca

SEQ ID NO: 3930441 - RNA, 11 nt, Human adenovirus E
aguuccuccac

SEQ ID NO: 3930442 - RNA, 19 nt, Human adenovirus E
aguucgccccccggcggcg

SEQ ID NO: 3930443 - RNA, 14 nt, Human adenovirus E
aguucguggaggag

SEQ ID NO: 3930444 - RNA, 14 nt, Human adenovirus E
aguugcagaggcgc

SEQ ID NO: 3930445 - RNA, 14 nt, Human adenovirus E
aguuggcuuucagg

SEQ ID NO: 3930446 - RNA, 13 nt, Human adenovirus E
aguuuuacaggau

SEQ ID NO: 3930447 - RNA, 12 nt, Human adenovirus E
auaaaguucaag

SEQ ID NO: 3930448 - RNA, 21 nt, Human adenovirus E
auacagcucgugcgagggggc

SEQ ID NO: 3930449 - RNA, 12 nt, Human adenovirus E
auaccagcagcc

SEQ ID NO: 3930450 - RNA, 15 nt, Human adenovirus E
auacuuuuaucuaug

SEQ ID NO: 3930451 - RNA, 17 nt, Human adenovirus E
auagcacucaacccacc

SEQ ID NO: 3930452 - RNA, 14 nt, Human adenovirus E
auauucugcuccug

SEQ ID NO: 3930453 - RNA, 13 nt, Human adenovirus E
auauucuggagca

SEQ ID NO: 3930454 - RNA, 16 nt, Human adenovirus E
aucacaccuuccaccu

SEQ ID NO: 3930455 - RNA, 14 nt, Human adenovirus E
aucaccagcuggcc

SEQ ID NO: 3930456 - RNA, 16 nt, Human adenovirus E
aucacccucaagcugg

SEQ ID NO: 3930457 - RNA, 14 nt, Human adenovirus E
aucaccgagcccga

SEQ ID NO: 3930458 - RNA, 13 nt, Human adenovirus E
aucagacccacug

SEQ ID NO: 3930459 - RNA, 13 nt, Human adenovirus E
aucagcgccccgc

SEQ ID NO: 3930460 - RNA, 21 nt, Human adenovirus E
auccacagcggcggcagcagg

SEQ ID NO: 3930461 - RNA, 17 nt, Human adenovirus E
auccacggccagggcgg

SEQ ID NO: 3930462 - RNA, 21 nt, Human adenovirus E
auccaucgagauugaccuggg

SEQ ID NO: 3930463 - RNA, 22 nt, Human adenovirus E
auccaugguggcgcugaacgcc

SEQ ID NO: 3930464 - RNA, 15 nt, Human adenovirus E
auccccagauaauuu

SEQ ID NO: 3930465 - RNA, 18 nt, Human adenovirus E
auccgcccaaggccgagc

SEQ ID NO: 3930466 - RNA, 21 nt, Human adenovirus E
auccucagguaaaucaagugg

SEQ ID NO: 3930467 - RNA, 19 nt, Human adenovirus E
aucgagauugaccugggcu

SEQ ID NO: 3930468 - RNA, 15 nt, Human adenovirus E
aucgccaaccucgcc

SEQ ID NO: 3930469 - RNA, 16 nt, Human adenovirus E
aucgcccaggcaauuu

SEQ ID NO: 3930470 - RNA, 23 nt, Human adenovirus E
aucgcgcgcgaggaggugacccu

SEQ ID NO: 3930471 - RNA, 19 nt, Human adenovirus E
aucgcuuacagccugugca

SEQ ID NO: 3930472 - RNA, 15 nt, Human adenovirus E
aucucuccucgcuuu

SEQ ID NO: 3930473 - RNA, 16 nt, Human adenovirus E
aucugcccccaccgcc

SEQ ID NO: 3930474 - RNA, 16 nt, Human adenovirus E
aucuggcccggcaggc

SEQ ID NO: 3930475 - RNA, 16 nt, Human adenovirus E
aucugggagcugaaca

SEQ ID NO: 3930476 - RNA, 19 nt, Human adenovirus E
aucugggccuggucggcgu

SEQ ID NO: 3930477 - RNA, 22 nt, Human adenovirus E
aucuguagaaaaaacaaaaaug

SEQ ID NO: 3930478 - RNA, 10 nt, Human adenovirus E
augaacauua

SEQ ID NO: 3930479 - RNA, 16 nt, Human adenovirus E
augaagauccuaggcc

SEQ ID NO: 3930480 - RNA, 19 nt, Human adenovirus E
augaaguaaaugcaagcgg

SEQ ID NO: 3930481 - RNA, 19 nt, Human adenovirus E
augaccaucgaccugauga

SEQ ID NO: 3930482 - RNA, 15 nt, Human adenovirus E
augagcaccacagcg

SEQ ID NO: 3930483 - RNA, 18 nt, Human adenovirus E
augauccagcggcggagc

SEQ ID NO: 3930484 - RNA, 15 nt, Human adenovirus E
augauugaaaaccau

SEQ ID NO: 3930485 - RNA, 21 nt, Human adenovirus E
augcaagacccggucaccuuc

SEQ ID NO: 3930486 - RNA, 21 nt, Human adenovirus E
gugccccucagcguggaggag

SEQ ID NO: 3930487 - RNA, 20 nt, Human adenovirus E
gugcccgaggcccuggccac

SEQ ID NO: 3930488 - RNA, 23 nt, Human adenovirus E
gugcccucgcgcuccaaccccac

SEQ ID NO: 3930489 - RNA, 14 nt, Human adenovirus E
gugccugcgccgcu

SEQ ID NO: 3930490 - RNA, 18 nt, Human adenovirus E
gugcggugagcgccagca

SEQ ID NO: 3930491 - RNA, 15 nt, Human adenovirus E
gugcguuccagcaug

SEQ ID NO: 3930492 - RNA, 20 nt, Human adenovirus E
gugcugaaaacaccaccugg

SEQ ID NO: 3930493 - RNA, 14 nt, Human adenovirus E
guggaagaagcagc

SEQ ID NO: 3930494 - RNA, 20 nt, Human adenovirus E
guggaagaaggaaggcagcg

SEQ ID NO: 3930495 - RNA, 16 nt, Human adenovirus E
guggaauuugagcugc

SEQ ID NO: 3930496 - RNA, 23 nt, Human adenovirus E
guggacaacaccugauccaucac

SEQ ID NO: 3930497 - RNA, 17 nt, Human adenovirus E
guggagaacaaggccau

SEQ ID NO: 3930498 - RNA, 20 nt, Human adenovirus E
guggagccacugcuaccugc

SEQ ID NO: 3930499 - RNA, 20 nt, Human adenovirus E
guggcagcagugucuggagg

SEQ ID NO: 3930500 - RNA, 18 nt, Human adenovirus E
guggccagaucguccagg

SEQ ID NO: 3930501 - RNA, 16 nt, Human adenovirus E
guggcggugcaggccu

SEQ ID NO: 3930502 - RNA, 15 nt, Human adenovirus E
gugggaccugcugga

SEQ ID NO: 3930503 - RNA, 17 nt, Human adenovirus E
gugggaccugcuggagg

SEQ ID NO: 3930504 - RNA, 21 nt, Human adenovirus E
gugggaccugcuggaggccau

SEQ ID NO: 3930505 - RNA, 17 nt, Human adenovirus E
  misc_feature (8)..(8): n is a, c, g, or u
gugggcancggcggcgc

SEQ ID NO: 3930506 - RNA, 16 nt, Human adenovirus E
gugggcggcggccugg

SEQ ID NO: 3930507 - RNA, 15 nt, Human adenovirus E
gugggcguggggcag

SEQ ID NO: 3930508 - RNA, 19 nt, Human adenovirus E
gugguccugggugagguca

SEQ ID NO: 3930509 - RNA, 20 nt, Human adenovirus E
guguacaacgcgcugcugga

SEQ ID NO: 3930510 - RNA, 20 nt, Human adenovirus E
guuaccacuaugcagcucac

SEQ ID NO: 3930511 - RNA, 20 nt, Human adenovirus E
guuauuuuaaugaaucagau

SEQ ID NO: 3930512 - RNA, 11 nt, Human adenovirus E
guucagccgcc

SEQ ID NO: 3930513 - RNA, 19 nt, Human adenovirus E
guuccagacgcggcuguag

SEQ ID NO: 3930514 - RNA, 20 nt, Human adenovirus E
guuccaggcggucccagagc

SEQ ID NO: 3930515 - RNA, 19 nt, Human adenovirus E
guucgcucaccugcgcccc

SEQ ID NO: 3930516 - RNA, 15 nt, Human adenovirus E
guucucuccagcacc

SEQ ID NO: 3930517 - RNA, 16 nt, Human adenovirus E
guugaagugggcgugg

SEQ ID NO: 3930518 - RNA, 20 nt, Human adenovirus E
guugcagggcgcccagcagg

SEQ ID NO: 3930519 - RNA, 13 nt, Human adenovirus E
augcagcagcuga

SEQ ID NO: 3930520 - RNA, 14 nt, Human adenovirus E
augcagccccggau

SEQ ID NO: 3930521 - RNA, 18 nt, Human adenovirus E
augcauagucugcagcgg

SEQ ID NO: 3930522 - RNA, 20 nt, Human adenovirus E
augcauagucugcagcgggc

SEQ ID NO: 3930523 - RNA, 16 nt, Human adenovirus E
augccaccucagcuca

SEQ ID NO: 3930524 - RNA, 22 nt, Human adenovirus E
augccagcugaguuuucagccc

SEQ ID NO: 3930525 - RNA, 14 nt, Human adenovirus E
augcuacccacgug

SEQ ID NO: 3930526 - RNA, 18 nt, Human adenovirus E
augcuuacccaauccaag

SEQ ID NO: 3930527 - RNA, 13 nt, Human adenovirus E
auggaacuacagc

SEQ ID NO: 3930528 - RNA, 16 nt, Human adenovirus E
auggaacuacagcagg

SEQ ID NO: 3930529 - RNA, 18 nt, Human adenovirus E
auggcagcaaggcgugga

SEQ ID NO: 3930530 - RNA, 20 nt, Human adenovirus E
auggcaugcgaguuggagga

SEQ ID NO: 3930531 - RNA, 23 nt, Human adenovirus E
auggcaugcgaguuggaggagau

SEQ ID NO: 3930532 - RNA, 23 nt, Human adenovirus E
auggcggcggcggcgaugcagcc

SEQ ID NO: 3930533 - RNA, 16 nt, Human adenovirus E
augggcaccuggagcg

SEQ ID NO: 3930534 - RNA, 18 nt, Human adenovirus E
augggcauuuuggagagg

SEQ ID NO: 3930535 - RNA, 18 nt, Human adenovirus E
ccgguccuuccagggucg

SEQ ID NO: 3930536 - RNA, 14 nt, Human adenovirus E
ccggugacacacuc

SEQ ID NO: 3930537 - RNA, 17 nt, Human adenovirus E
ccggugccgcccaggac

SEQ ID NO: 3930538 - RNA, 19 nt, Human adenovirus E
ccguccucuucccacuccc

SEQ ID NO: 3930539 - RNA, 15 nt, Human adenovirus E
ccgucggccaugggc

SEQ ID NO: 3930540 - RNA, 20 nt, Human adenovirus E
ccgugagcggggcuggacag

SEQ ID NO: 3930541 - RNA, 21 nt, Human adenovirus E
ccgugcggugagcgccagcag

SEQ ID NO: 3930542 - RNA, 11 nt, Human adenovirus E
ccguggagcug

SEQ ID NO: 3930543 - RNA, 17 nt, Human adenovirus E
ccguggagcuggagugc

SEQ ID NO: 3930544 - RNA, 23 nt, Human adenovirus E
ccguggucagcgacgagcagcug

SEQ ID NO: 3930545 - RNA, 20 nt, Human adenovirus E
ccguuucuucuugggcggcu

SEQ ID NO: 3930546 - RNA, 22 nt, Human adenovirus E
ccuauuccuaaaguuagcuuua

SEQ ID NO: 3930547 - RNA, 13 nt, Human adenovirus E
ccucaaaugcuac

SEQ ID NO: 3930548 - RNA, 20 nt, Human adenovirus E
ccucauuuuccccgagcgcc

SEQ ID NO: 3930549 - RNA, 13 nt, Human adenovirus E
ccuccaccugagc

SEQ ID NO: 3930550 - RNA, 22 nt, Human adenovirus E
ccuccacuuccucuucuuccuc

SEQ ID NO: 3930551 - RNA, 15 nt, Human adenovirus E
ccucgacccccagac

SEQ ID NO: 3930552 - RNA, 15 nt, Human adenovirus E
ccucggaccuggccg

SEQ ID NO: 3930553 - RNA, 22 nt, Human adenovirus E
ccucggacgauuggacccaggc

SEQ ID NO: 3930554 - RNA, 18 nt, Human adenovirus E
cgccggcggcggucucgg

SEQ ID NO: 3930555 - RNA, 20 nt, Human adenovirus E
cgccguugucaaccacugcg

SEQ ID NO: 3930556 - RNA, 13 nt, Human adenovirus E
cgccucuggguga

SEQ ID NO: 3930557 - RNA, 24 nt, Human adenovirus E
cgccucugggugaaggccacggga

SEQ ID NO: 3930558 - RNA, 18 nt, Human adenovirus E
cgccugcugggccuuggc

SEQ ID NO: 3930559 - RNA, 21 nt, Human adenovirus E
cgccuggccaacuaccuggcc

SEQ ID NO: 3930560 - RNA, 22 nt, Human adenovirus E
cgccuggccaacuaccuggccu

SEQ ID NO: 3930561 - RNA, 17 nt, Human adenovirus E
cgccuuccucagcaccc

SEQ ID NO: 3930562 - RNA, 21 nt, Human adenovirus E
cgcgacggugucgagccugcu

SEQ ID NO: 3930563 - RNA, 23 nt, Human adenovirus E
cgcgacugcgucuaccucuaccu

SEQ ID NO: 3930564 - RNA, 17 nt, Human adenovirus E
cgcgaguucucgcucac

SEQ ID NO: 3930565 - RNA, 21 nt, Human adenovirus E
cgcgaucccugagcuccuccc

SEQ ID NO: 3930566 - RNA, 16 nt, Human adenovirus E
cgcgcaucuccaggug

SEQ ID NO: 3930567 - RNA, 18 nt, Human adenovirus E
cgcgcaucuccagguggc

SEQ ID NO: 3930568 - RNA, 14 nt, Human adenovirus E
cgcgcccgcgcuug

SEQ ID NO: 3930569 - RNA, 16 nt, Human adenovirus E
cgcgcccugggccagg

SEQ ID NO: 3930570 - RNA, 20 nt, Human adenovirus E
cgcgcgcaacaugguagccc

SEQ ID NO: 3930571 - RNA, 20 nt, Human adenovirus E
cgcgcgcgaggaggugaccc

SEQ ID NO: 3930572 - RNA, 20 nt, Human adenovirus E
cgcgcgggaguugcgguaca

SEQ ID NO: 3930573 - RNA, 14 nt, Human adenovirus E
cgcgcuccacggug

SEQ ID NO: 3930574 - RNA, 18 nt, Human adenovirus E
cgcgcucccuggggcgcc

SEQ ID NO: 3930575 - RNA, 12 nt, Human adenovirus E
cgcgcuggugga

SEQ ID NO: 3930576 - RNA, 13 nt, Human adenovirus E
cgcggccacggcg

SEQ ID NO: 3930577 - RNA, 22 nt, Human adenovirus E
aaugcgcgugcacgaagcccug

SEQ ID NO: 3930578 - RNA, 19 nt, Human adenovirus E
aauuccuccugucccucaa

SEQ ID NO: 3930579 - RNA, 15 nt, Human adenovirus E
aauuuuuagccauag

SEQ ID NO: 3930580 - RNA, 19 nt, Human adenovirus E
acaaaauaaaauaaaguuc

SEQ ID NO: 3930581 - RNA, 14 nt, Human adenovirus E
acaaguacugcgcg

SEQ ID NO: 3930582 - RNA, 16 nt, Human adenovirus E
acaaguuucuccacca

SEQ ID NO: 3930583 - RNA, 13 nt, Human adenovirus E
acaauaucuuuga

SEQ ID NO: 3930584 - RNA, 18 nt, Human adenovirus E
acacacagaucaaaccgc

SEQ ID NO: 3930585 - RNA, 18 nt, Human adenovirus E
acacauacaaagccucag

SEQ ID NO: 3930586 - RNA, 14 nt, Human adenovirus E
acaccaccacagca

SEQ ID NO: 3930587 - RNA, 13 nt, Human adenovirus E
acacgcuccagcc

SEQ ID NO: 3930588 - RNA, 17 nt, Human adenovirus E
acacuaaaaaaauacug

SEQ ID NO: 3930589 - RNA, 16 nt, Human adenovirus E
  misc_feature (7)..(7): n is a, c, g, or u
acacucnugcaccauc

SEQ ID NO: 3930590 - RNA, 17 nt, Human adenovirus E
acagcacucaggcagag

SEQ ID NO: 3930591 - RNA, 13 nt, Human adenovirus E
acagcagccccag

SEQ ID NO: 3930592 - RNA, 20 nt, Human adenovirus E
acagcagucaggcagaggag

SEQ ID NO: 3930593 - RNA, 15 nt, Human adenovirus E
acagcgcccuggucg

SEQ ID NO: 3930594 - RNA, 19 nt, Human adenovirus E
acagcuaccuccagugccu

SEQ ID NO: 3930595 - RNA, 22 nt, Human adenovirus E
acagcuaccuccagugccuucu

SEQ ID NO: 3930596 - RNA, 18 nt, Human adenovirus E
acaguuuuacaggauucg

SEQ ID NO: 3930597 - RNA, 14 nt, Human adenovirus E
acauaaagcuuacc

SEQ ID NO: 3930598 - RNA, 17 nt, Human adenovirus E
acauccgcgacugcguc

SEQ ID NO: 3930599 - RNA, 15 nt, Human adenovirus E
accaagaacagccag

SEQ ID NO: 3930600 - RNA, 20 nt, Human adenovirus E
accaagaacggggaaaucac

SEQ ID NO: 3930601 - RNA, 22 nt, Human adenovirus E
accaaggccauggcgaccagcg

SEQ ID NO: 3930602 - RNA, 13 nt, Human adenovirus E
accaccggcggcg

SEQ ID NO: 3930603 - RNA, 17 nt, Human adenovirus E
accagaacgaccacagc

SEQ ID NO: 3930604 - RNA, 14 nt, Human adenovirus E
accagauccucagg

SEQ ID NO: 3930605 - RNA, 19 nt, Human adenovirus E
accaggccgugcagcggca

SEQ ID NO: 3930606 - RNA, 17 nt, Human adenovirus E
accaggugcucaucaag

SEQ ID NO: 3930607 - RNA, 19 nt, Human adenovirus E
accaucgucaaggaugcgc

SEQ ID NO: 3930608 - RNA, 22 nt, Human adenovirus E
accaucgucaaggaugcgcugc

SEQ ID NO: 3930609 - RNA, 15 nt, Human adenovirus E
accaucuccgcuccg

SEQ ID NO: 3930610 - RNA, 19 nt, Human adenovirus E
accaugaagauccuaggcc

SEQ ID NO: 3930611 - RNA, 19 nt, Human adenovirus E
accccauuacuggcaccgu

SEQ ID NO: 3930612 - RNA, 15 nt, Human adenovirus E
acccccacggaggcc

SEQ ID NO: 3930613 - RNA, 21 nt, Human adenovirus E
acccccacggaggccagcacc

SEQ ID NO: 3930614 - RNA, 15 nt, Human adenovirus E
accccguacgugccc

SEQ ID NO: 3930615 - RNA, 18 nt, Human adenovirus E
accccgucaccaccaaga

SEQ ID NO: 3930616 - RNA, 17 nt, Human adenovirus E
acccuagugagcugcgg

SEQ ID NO: 3930617 - RNA, 16 nt, Human adenovirus E
acccugaaagugcuga

SEQ ID NO: 3930618 - RNA, 14 nt, Human adenovirus E
acccugccgcugcg

SEQ ID NO: 3930619 - RNA, 19 nt, Human adenovirus E
accgaaagagggugcugag

SEQ ID NO: 3930620 - RNA, 15 nt, Human adenovirus E
accgaggaggagcgc

SEQ ID NO: 3930621 - RNA, 13 nt, Human adenovirus E
accgaggugcccc

SEQ ID NO: 3930622 - RNA, 20 nt, Human adenovirus E
accgcagcagaggaggcagc

SEQ ID NO: 3930623 - RNA, 20 nt, Human adenovirus E
accgcagcuugcccucggcc

SEQ ID NO: 3930624 - RNA, 23 nt, Human adenovirus E
accgccaaaaaucagacaugcau

SEQ ID NO: 3930625 - RNA, 22 nt, Human adenovirus E
accgcccagaucccgccugggg

SEQ ID NO: 3930626 - RNA, 14 nt, Human adenovirus E
accgccgcggccgc

SEQ ID NO: 3930627 - RNA, 18 nt, Human adenovirus E
accgccucggaccuggcc

SEQ ID NO: 3930628 - RNA, 22 nt, Human adenovirus E
accgccucggaccuggccgacc

SEQ ID NO: 3930629 - RNA, 14 nt, Human adenovirus E
accgcucccuggcc

SEQ ID NO: 3930630 - RNA, 18 nt, Human adenovirus E
accgguaagaaggagcgg

SEQ ID NO: 3930631 - RNA, 18 nt, Human adenovirus E
accgucaccuccacagcc

SEQ ID NO: 3930632 - RNA, 16 nt, Human adenovirus E
accgucguccucggcg

SEQ ID NO: 3930633 - RNA, 17 nt, Human adenovirus E
accuccaccaacgccac

SEQ ID NO: 3930634 - RNA, 12 nt, Human adenovirus E
accuccacccac

SEQ ID NO: 3930635 - RNA, 22 nt, Human adenovirus E
accucccgguaccacaucaccc

SEQ ID NO: 3930636 - RNA, 16 nt, Human adenovirus E
accucccuugcuguuc

SEQ ID NO: 3930637 - RNA, 17 nt, Human adenovirus E
accucgacccccagacc

SEQ ID NO: 3930638 - RNA, 14 nt, Human adenovirus E
accucgcccugcuc

SEQ ID NO: 3930639 - RNA, 20 nt, Human adenovirus E
accucgccgcgcaggggcuc

SEQ ID NO: 3930640 - RNA, 14 nt, Human adenovirus E
accucugccacacc

SEQ ID NO: 3930641 - RNA, 23 nt, Human adenovirus E
accugaucccgaauaccacagcg

SEQ ID NO: 3930642 - RNA, 15 nt, Human adenovirus E
accugcaucugcugc

SEQ ID NO: 3930643 - RNA, 15 nt, Human adenovirus E
accugcgccaccacc

SEQ ID NO: 3930644 - RNA, 18 nt, Human adenovirus E
accugcugcgccuggcca

SEQ ID NO: 3930645 - RNA, 17 nt, Human adenovirus E
accuggcagacgggcau

SEQ ID NO: 3930646 - RNA, 13 nt, Human adenovirus E
acgacaggcagcg

SEQ ID NO: 3930647 - RNA, 16 nt, Human adenovirus E
acgagaagcagcagca

SEQ ID NO: 3930648 - RNA, 11 nt, Human adenovirus E
acgagcugacg

SEQ ID NO: 3930649 - RNA, 14 nt, Human adenovirus E
acgaggaccaaucc

SEQ ID NO: 3930650 - RNA, 14 nt, Human adenovirus E
acgcacuaccacca

SEQ ID NO: 3930651 - RNA, 21 nt, Human adenovirus E
acgcacuaccaccacuacagc

SEQ ID NO: 3930652 - RNA, 23 nt, Human adenovirus E
acgcccgcggagcacgaggagga

SEQ ID NO: 3930653 - RNA, 18 nt, Human adenovirus E
acgcccguccucggcgcu

SEQ ID NO: 3930654 - RNA, 17 nt, Human adenovirus E
acgccuagaaugaccac

SEQ ID NO: 3930655 - RNA, 14 nt, Human adenovirus E
acgccugcugggcc

SEQ ID NO: 3930656 - RNA, 12 nt, Human adenovirus E
acgcgcacuucc

SEQ ID NO: 3930657 - RNA, 14 nt, Human adenovirus E
acgcgcacuuccuc

SEQ ID NO: 3930658 - RNA, 20 nt, Human adenovirus E
acgcgcccgcgcuugcuggg

SEQ ID NO: 3930659 - RNA, 15 nt, Human adenovirus E
acgcucugcaaggag

SEQ ID NO: 3930660 - RNA, 16 nt, Human adenovirus E
acggaucccuggaugc

SEQ ID NO: 3930661 - RNA, 15 nt, Human adenovirus E
acggcaagcgcagcc

SEQ ID NO: 3930662 - RNA, 12 nt, Human adenovirus E
acggcccucagc

SEQ ID NO: 3930663 - RNA, 19 nt, Human adenovirus E
acggccuuguaggcgcagc

SEQ ID NO: 3930664 - RNA, 16 nt, Human adenovirus E
acggugccggcggaga

SEQ ID NO: 3930665 - RNA, 17 nt, Human adenovirus E
acguacucgcgcgccac

SEQ ID NO: 3930666 - RNA, 22 nt, Human adenovirus E
acgucagcggcgagggccugcu

SEQ ID NO: 3930667 - RNA, 18 nt, Human adenovirus E
acgucgagguccucggcg

SEQ ID NO: 3930668 - RNA, 21 nt, Human adenovirus E
acgucuacaaggcccugggca

SEQ ID NO: 3930669 - RNA, 22 nt, Human adenovirus E
acgugagccgcgcccugggcca

SEQ ID NO: 3930670 - RNA, 18 nt, Human adenovirus E
acgugcccaagcagaacc

SEQ ID NO: 3930671 - RNA, 22 nt, Human adenovirus E
acgugcccccgcgguaccuggc

SEQ ID NO: 3930672 - RNA, 18 nt, Human adenovirus E
acgugccccggggccagg

SEQ ID NO: 3930673 - RNA, 19 nt, Human adenovirus E
acgugccccggggccagga

SEQ ID NO: 3930674 - RNA, 20 nt, Human adenovirus E
acgugccccggggccaggag

SEQ ID NO: 3930675 - RNA, 22 nt, Human adenovirus E
acgugccccggggccaggagga

SEQ ID NO: 3930676 - RNA, 12 nt, Human adenovirus E
acgugcucuuug

SEQ ID NO: 3930677 - RNA, 11 nt, Human adenovirus E
acgugcuggag

SEQ ID NO: 3930678 - RNA, 20 nt, Human adenovirus E
acguggccgcggccaaccug

SEQ ID NO: 3930679 - RNA, 17 nt, Human adenovirus E
acuaccaccacuacagc

SEQ ID NO: 3930680 - RNA, 16 nt, Human adenovirus E
acuaccgucaccucca

SEQ ID NO: 3930681 - RNA, 23 nt, Human adenovirus E
acuacuuccgcgagacgcccagg

SEQ ID NO: 3930682 - RNA, 19 nt, Human adenovirus E
acuaggacguccagagcgc

SEQ ID NO: 3930683 - RNA, 13 nt, Human adenovirus E
acucacaccacac

SEQ ID NO: 3930684 - RNA, 19 nt, Human adenovirus E
acucaccccggggcugugg

SEQ ID NO: 3930685 - RNA, 15 nt, Human adenovirus E
acucaggcagaggag

SEQ ID NO: 3930686 - RNA, 18 nt, Human adenovirus E
acucagguguccagcugg

SEQ ID NO: 3930687 - RNA, 20 nt, Human adenovirus E
acucccucagcaugaugccc

SEQ ID NO: 3930688 - RNA, 14 nt, Human adenovirus E
acuccguggcucug

SEQ ID NO: 3930689 - RNA, 19 nt, Human adenovirus E
acucgcagaaaaugaugca

SEQ ID NO: 3930690 - RNA, 13 nt, Human adenovirus E
acucgcagcagcu

SEQ ID NO: 3930691 - RNA, 17 nt, Human adenovirus E
acucgcgccugcugcug

SEQ ID NO: 3930692 - RNA, 22 nt, Human adenovirus E
acucggacgugaucgaggacgu

SEQ ID NO: 3930693 - RNA, 20 nt, Human adenovirus E
acucuuucauauccucuccg

SEQ ID NO: 3930694 - RNA, 23 nt, Human adenovirus E
cuucagcgcgcgcugcccguucu

SEQ ID NO: 3930695 - RNA, 13 nt, Human adenovirus E
cuuccagcaaagc

SEQ ID NO: 3930696 - RNA, 13 nt, Human adenovirus E
cuucccccaggau

SEQ ID NO: 3930697 - RNA, 21 nt, Human adenovirus E
cuuccccgagaaccagauccu

SEQ ID NO: 3930698 - RNA, 15 nt, Human adenovirus E
cuuccguggcggugc

SEQ ID NO: 3930699 - RNA, 17 nt, Human adenovirus E
cuucgcggugcccgagg

SEQ ID NO: 3930700 - RNA, 19 nt, Human adenovirus E
cuucggaucuucagccagc

SEQ ID NO: 3930701 - RNA, 18 nt, Human adenovirus E
cuucugccucgauggugg

SEQ ID NO: 3930702 - RNA, 17 nt, Human adenovirus E
cuugcagggccuguggg

SEQ ID NO: 3930703 - RNA, 21 nt, Human adenovirus E
cuugcugaaaaagggccgcgg

SEQ ID NO: 3930704 - RNA, 17 nt, Human adenovirus E
cuuggaagagggcgagg

SEQ ID NO: 3930705 - RNA, 14 nt, Human adenovirus E
cuuggcaguacagu

SEQ ID NO: 3930706 - RNA, 17 nt, Human adenovirus E
cuuguugcgcagggcca

SEQ ID NO: 3930707 - RNA, 16 nt, Human adenovirus E
cuuuaccgacaaaaau

SEQ ID NO: 3930708 - RNA, 18 nt, Human adenovirus E
cuuuagguuuuggaucag

SEQ ID NO: 3930709 - RNA, 17 nt, Human adenovirus E
cuuucauauccucuccg

SEQ ID NO: 3930710 - RNA, 18 nt, Human adenovirus E
cuuucauauccucuccga

SEQ ID NO: 3930711 - RNA, 14 nt, Human adenovirus E
cuuucauuuuugcg

SEQ ID NO: 3930712 - RNA, 15 nt, Human adenovirus E
cuuugacaguacagg

SEQ ID NO: 3930713 - RNA, 13 nt, Human adenovirus E
cuuugacuuuggu

SEQ ID NO: 3930714 - RNA, 22 nt, Human adenovirus E
cuuuggaagauguugaaguggg

SEQ ID NO: 3930715 - RNA, 20 nt, Human adenovirus E
cuuuugguucucugcuaccu

SEQ ID NO: 3930716 - RNA, 15 nt, Human adenovirus E
gaaaccgaaaguaag

SEQ ID NO: 3930717 - RNA, 15 nt, Human adenovirus E
gaacaacaagcaugg

SEQ ID NO: 3930718 - RNA, 19 nt, Human adenovirus E
gaacagcagucaggcagag

SEQ ID NO: 3930719 - RNA, 15 nt, Human adenovirus E
gaacagccagagcag

SEQ ID NO: 3930720 - RNA, 17 nt, Human adenovirus E
gaaccccaccacccaga

SEQ ID NO: 3930721 - RNA, 14 nt, Human adenovirus E
gaacgccugcuggg

SEQ ID NO: 3930722 - RNA, 17 nt, Human adenovirus E
gaacgccugcugggccu

SEQ ID NO: 3930723 - RNA, 23 nt, Human adenovirus E
gaacuccauggcuugcagggucc

SEQ ID NO: 3930724 - RNA, 22 nt, Human adenovirus E
gaacucuguggaaacaauaaca

SEQ ID NO: 3930725 - RNA, 13 nt, Human adenovirus E
gaacucuugcagg

SEQ ID NO: 3930726 - RNA, 18 nt, Human adenovirus E
gaacugguacuuggccag

SEQ ID NO: 3930727 - RNA, 19 nt, Human adenovirus E
gaagacugggacagcacuc

SEQ ID NO: 3930728 - RNA, 22 nt, Human adenovirus E
gaagaggaucuugcccgcgcgg

SEQ ID NO: 3930729 - RNA, 16 nt, Human adenovirus E
gaagcaacugcagccg

SEQ ID NO: 3930730 - RNA, 14 nt, Human adenovirus E
gaagcaagcuccag

SEQ ID NO: 3930731 - RNA, 18 nt, Human adenovirus E
gaagcagagaaugagcag

SEQ ID NO: 3930732 - RNA, 12 nt, Human adenovirus E
gaagcagcagca

SEQ ID NO: 3930733 - RNA, 17 nt, Human adenovirus E
gaagcagcagcagcaga

SEQ ID NO: 3930734 - RNA, 13 nt, Human adenovirus E
gaagcguucaggg

SEQ ID NO: 3930735 - RNA, 17 nt, Human adenovirus E
gaaggagaacaucgugg

SEQ ID NO: 3930736 - RNA, 12 nt, Human adenovirus E
gaaggggggcag

SEQ ID NO: 3930737 - RNA, 20 nt, Human adenovirus E
gaaggugcggggguccccgu

SEQ ID NO: 3930738 - RNA, 14 nt, Human adenovirus E
gaaguccgugcgcu

SEQ ID NO: 3930739 - RNA, 22 nt, Human adenovirus E
gaaugagcagagucaggcuggg

SEQ ID NO: 3930740 - RNA, 19 nt, Human adenovirus E
gacaaaaaucagacccacu

SEQ ID NO: 3930741 - RNA, 12 nt, Human adenovirus E
gacaacccacau

SEQ ID NO: 3930742 - RNA, 16 nt, Human adenovirus E
gacaagcuggaacacu

SEQ ID NO: 3930743 - RNA, 16 nt, Human adenovirus E
gacacaccaccacagc

SEQ ID NO: 3930744 - RNA, 14 nt, Human adenovirus E
gacagaugugggac

SEQ ID NO: 3930745 - RNA, 18 nt, Human adenovirus E
gacagcacucaggcagag

SEQ ID NO: 3930746 - RNA, 15 nt, Human adenovirus E
gacaucggcaccagc

SEQ ID NO: 3930747 - RNA, 17 nt, Human adenovirus E
gacaugcaucccagcug

SEQ ID NO: 3930748 - RNA, 19 nt, Human adenovirus E
gacaugcaucccagcugga

SEQ ID NO: 3930749 - RNA, 15 nt, Human adenovirus E
gaccaccguggugca

SEQ ID NO: 3930750 - RNA, 19 nt, Human adenovirus E
gaccacggcaaccccacgc

SEQ ID NO: 3930751 - RNA, 14 nt, Human adenovirus E
gaccaggagcugau

SEQ ID NO: 3930752 - RNA, 14 nt, Human adenovirus E
gaccaggugcucau

SEQ ID NO: 3930753 - RNA, 14 nt, Human adenovirus E
gacccggugccgcc

SEQ ID NO: 3930754 - RNA, 19 nt, Human adenovirus E
gacccugaaagugcugacc

SEQ ID NO: 3930755 - RNA, 12 nt, Human adenovirus E
gacccugggccu

SEQ ID NO: 3930756 - RNA, 19 nt, Human adenovirus E
gaccgagcuccagcuccag

SEQ ID NO: 3930757 - RNA, 16 nt, Human adenovirus E
gaccgccgcggccgcc

SEQ ID NO: 3930758 - RNA, 21 nt, Human adenovirus E
gaccgccgcggccgccgugag

SEQ ID NO: 3930759 - RNA, 21 nt, Human adenovirus E
gaccuaccaggagaucaccca

SEQ ID NO: 3930760 - RNA, 22 nt, Human adenovirus E
gaccuaccaggagaucacccac

SEQ ID NO: 3930761 - RNA, 14 nt, Human adenovirus E
gaccucggcgcgag

SEQ ID NO: 3930762 - RNA, 21 nt, Human adenovirus E
gaccugcacuggcagcccagc

SEQ ID NO: 3930763 - RNA, 19 nt, Human adenovirus E
gaccuggccaaccaggccg

SEQ ID NO: 3930764 - RNA, 13 nt, Human adenovirus E
gacgagcgcacca

SEQ ID NO: 3930765 - RNA, 22 nt, Human adenovirus E
gacgauccccgggcgucgcagg

SEQ ID NO: 3930766 - RNA, 15 nt, Human adenovirus E
gacgauguggacagc

SEQ ID NO: 3930767 - RNA, 16 nt, Human adenovirus E
gacgauguggacagca

SEQ ID NO: 3930768 - RNA, 16 nt, Human adenovirus E
gacgccaucagcgagu

SEQ ID NO: 3930769 - RNA, 23 nt, Human adenovirus E
gacgcccuuuucaaccugggucc

SEQ ID NO: 3930770 - RNA, 14 nt, Human adenovirus E
gacggaucccugga

SEQ ID NO: 3930771 - RNA, 13 nt, Human adenovirus E
gacggaugagcuc

SEQ ID NO: 3930772 - RNA, 22 nt, Human adenovirus E
gacggcccuugacguggggcag

SEQ ID NO: 3930773 - RNA, 16 nt, Human adenovirus E
gacggugucgagccug

SEQ ID NO: 3930774 - RNA, 19 nt, Human adenovirus E
gacggugucgagccugcug

SEQ ID NO: 3930775 - RNA, 16 nt, Human adenovirus E
gacguccuggaucuga

SEQ ID NO: 3930776 - RNA, 23 nt, Human adenovirus E
gacguggggcaguuucuugagcu

SEQ ID NO: 3930777 - RNA, 17 nt, Human adenovirus E
gacuccguggccuggag

SEQ ID NO: 3930778 - RNA, 19 nt, Human adenovirus E
gacuccguggccuggaggc

SEQ ID NO: 3930779 - RNA, 21 nt, Human adenovirus E
gacuuggcggauggcuggcag

SEQ ID NO: 3930780 - RNA, 14 nt, Human adenovirus E
gacuugggugggag

SEQ ID NO: 3930781 - RNA, 18 nt, Human adenovirus E
gagaaccgccuggggcag

SEQ ID NO: 3930782 - RNA, 16 nt, Human adenovirus E
gagaagcuggcggcca

SEQ ID NO: 3930783 - RNA, 15 nt, Human adenovirus E
gagaaggauagcaag

SEQ ID NO: 3930784 - RNA, 17 nt, Human adenovirus E
gagaccgagcuccagcu

SEQ ID NO: 3930785 - RNA, 18 nt, Human adenovirus E
gagagacguucccggugg

SEQ ID NO: 3930786 - RNA, 11 nt, Human adenovirus E
gagagccacac

SEQ ID NO: 3930787 - RNA, 18 nt, Human adenovirus E
gagagcgugaugcagcag

SEQ ID NO: 3930788 - RNA, 18 nt, Human adenovirus E
gagaucgagggcgagcuc

SEQ ID NO: 3930789 - RNA, 15 nt, Human adenovirus E
gagauggugggccuu

SEQ ID NO: 3930790 - RNA, 20 nt, Human adenovirus E
gagcaucguggugcaggagc

SEQ ID NO: 3930791 - RNA, 14 nt, Human adenovirus E
gagccacaccacag

SEQ ID NO: 3930792 - RNA, 16 nt, Human adenovirus E
gagccacaccacagcu

SEQ ID NO: 3930793 - RNA, 19 nt, Human adenovirus E
gagcccgcgcgggaggcag

SEQ ID NO: 3930794 - RNA, 22 nt, Human adenovirus E
gagcccgugcugcucgagcgcc

SEQ ID NO: 3930795 - RNA, 14 nt, Human adenovirus E
gagccgccucagca

SEQ ID NO: 3930796 - RNA, 20 nt, Human adenovirus E
gagccgcgcccugggccagg

SEQ ID NO: 3930797 - RNA, 13 nt, Human adenovirus E
gagccgcuggaag

SEQ ID NO: 3930798 - RNA, 14 nt, Human adenovirus E
gagcgaccaggagc

SEQ ID NO: 3930799 - RNA, 16 nt, Human adenovirus E
gagcgaccaggagcug

SEQ ID NO: 3930800 - RNA, 18 nt, Human adenovirus E
gagcgcggucauggacca

SEQ ID NO: 3930801 - RNA, 19 nt, Human adenovirus E
gagcgcggucauggaccag

SEQ ID NO: 3930802 - RNA, 20 nt, Human adenovirus E
gagcgcucgcgguggggcgg

SEQ ID NO: 3930803 - RNA, 23 nt, Human adenovirus E
gagcucgugucuccgcuggguga

SEQ ID NO: 3930804 - RNA, 17 nt, Human adenovirus E
gaggacagccugcaaga

SEQ ID NO: 3930805 - RNA, 15 nt, Human adenovirus E
gaggagaaccugcac

SEQ ID NO: 3930806 - RNA, 22 nt, Human adenovirus E
gaggaggugacccugggccuga

SEQ ID NO: 3930807 - RNA, 14 nt, Human adenovirus E
gaggaugcagcagc

SEQ ID NO: 3930808 - RNA, 16 nt, Human adenovirus E
gaggaugcagcagcug

SEQ ID NO: 3930809 - RNA, 19 nt, Human adenovirus E
gaggaugcagcagcugaag

SEQ ID NO: 3930810 - RNA, 16 nt, Human adenovirus E
gaggauuguccucggu

SEQ ID NO: 3930811 - RNA, 19 nt, Human adenovirus E
acugccgcugcaaccucug

SEQ ID NO: 3930812 - RNA, 14 nt, Human adenovirus E
acugcuaccugcug

SEQ ID NO: 3930813 - RNA, 21 nt, Human adenovirus E
acugggacagcacucaggcag

SEQ ID NO: 3930814 - RNA, 20 nt, Human adenovirus E
acugggagaacagcagucag

SEQ ID NO: 3930815 - RNA, 23 nt, Human adenovirus E
acugucuuccggaucgcugucca

SEQ ID NO: 3930816 - RNA, 24 nt, Human adenovirus E
acugucuuccggaucgcuguccac

SEQ ID NO: 3930817 - RNA, 21 nt, Human adenovirus E
acuucaaccccuucuccggcu

SEQ ID NO: 3930818 - RNA, 22 nt, Human adenovirus E
acuuccucaaacgcccaaaacu

SEQ ID NO: 3930819 - RNA, 20 nt, Human adenovirus E
acuuccucuucuuccuccuc

SEQ ID NO: 3930820 - RNA, 22 nt, Human adenovirus E
  misc_feature (8)..(8): n is a, c, g, or u
acuugcangaguuuuuccaggg

SEQ ID NO: 3930821 - RNA, 18 nt, Human adenovirus E
acuugcuguagcagaacc

SEQ ID NO: 3930822 - RNA, 13 nt, Human adenovirus E
acuuuuuccaccc

SEQ ID NO: 3930823 - RNA, 14 nt, Human adenovirus E
agaacagccagagc

SEQ ID NO: 3930824 - RNA, 16 nt, Human adenovirus E
agaagaggcagcagca

SEQ ID NO: 3930825 - RNA, 14 nt, Human adenovirus E
agaagcagcagcag

SEQ ID NO: 3930826 - RNA, 16 nt, Human adenovirus E
agaagcgugggccugu

SEQ ID NO: 3930827 - RNA, 23 nt, Human adenovirus E
agaagcugaaaguggagcugccg

SEQ ID NO: 3930828 - RNA, 21 nt, Human adenovirus E
agaagggcgugcgcuccugga

SEQ ID NO: 3930829 - RNA, 23 nt, Human adenovirus E
agacagcugccguccucccggag

SEQ ID NO: 3930830 - RNA, 14 nt, Human adenovirus E
agacaggagcggcg

SEQ ID NO: 3930831 - RNA, 18 nt, Human adenovirus E
agacaugcaagagaugga

SEQ ID NO: 3930832 - RNA, 16 nt, Human adenovirus E
agaccaaccuggaccg

SEQ ID NO: 3930833 - RNA, 11 nt, Human adenovirus E
agaccgagccc

SEQ ID NO: 3930834 - RNA, 17 nt, Human adenovirus E
agaccgagcuccagcuc

SEQ ID NO: 3930835 - RNA, 15 nt, Human adenovirus E
agaccuaccaggaga

SEQ ID NO: 3930836 - RNA, 18 nt, Human adenovirus E
agagacagcugccguccu

SEQ ID NO: 3930837 - RNA, 22 nt, Human adenovirus E
agagacagcugccguccucccg

SEQ ID NO: 3930838 - RNA, 12 nt, Human adenovirus E
agagcggcgcaa

SEQ ID NO: 3930839 - RNA, 14 nt, Human adenovirus E
agagcgugaugcag

SEQ ID NO: 3930840 - RNA, 23 nt, Human adenovirus E
agagcucgcgcagagcgcccucc

SEQ ID NO: 3930841 - RNA, 13 nt, Human adenovirus E
agaggcagcagca

SEQ ID NO: 3930842 - RNA, 20 nt, Human adenovirus E
agagucgggggcaggagcag

SEQ ID NO: 3930843 - RNA, 14 nt, Human adenovirus E
agauauuugcaauu

SEQ ID NO: 3930844 - RNA, 24 nt, Human adenovirus E
agaucaaaccgcagcagaggaggc

SEQ ID NO: 3930845 - RNA, 16 nt, Human adenovirus E
agauccuaggccuuuu

SEQ ID NO: 3930846 - RNA, 20 nt, Human adenovirus E
agauccucagguaaaucaag

SEQ ID NO: 3930847 - RNA, 14 nt, Human adenovirus E
agauggaggaagac

SEQ ID NO: 3930848 - RNA, 14 nt, Human adenovirus E
agauguacggaggc

SEQ ID NO: 3930849 - RNA, 18 nt, Human adenovirus E
agcaaaguuagccuugca

SEQ ID NO: 3930850 - RNA, 11 nt, Human adenovirus E
agcaaggagga

SEQ ID NO: 3930851 - RNA, 23 nt, Human adenovirus E
agcacagggacgauccccgggcg

SEQ ID NO: 3930852 - RNA, 20 nt, Human adenovirus E
agcagaaaaccagcagcuag

SEQ ID NO: 3930853 - RNA, 17 nt, Human adenovirus E
agcagagaaugagcaga

SEQ ID NO: 3930854 - RNA, 23 nt, Human adenovirus E
agcagauugacaagcggaauauc

SEQ ID NO: 3930855 - RNA, 22 nt, Human adenovirus E
agcagcagaaaaagaccagcag

SEQ ID NO: 3930856 - RNA, 13 nt, Human adenovirus E
agcagcgagcugg

SEQ ID NO: 3930857 - RNA, 22 nt, Human adenovirus E
agcagcuagaaaauccacagcg

SEQ ID NO: 3930858 - RNA, 15 nt, Human adenovirus E
agcagucccacugcu

SEQ ID NO: 3930859 - RNA, 21 nt, Human adenovirus E
agcagugucuggaggagcaga

SEQ ID NO: 3930860 - RNA, 15 nt, Human adenovirus E
agcaucaucugggcc

SEQ ID NO: 3930861 - RNA, 23 nt, Human adenovirus E
agcaucuggcccggcaggccacc

SEQ ID NO: 3930862 - RNA, 18 nt, Human adenovirus E
agcaugagcaccacagcg

SEQ ID NO: 3930863 - RNA, 23 nt, Human adenovirus E
agcaugaugcccacggcccucag

SEQ ID NO: 3930864 - RNA, 22 nt, Human adenovirus E
agcaugguuaguuagcugaucu

SEQ ID NO: 3930865 - RNA, 17 nt, Human adenovirus E
agccagcguccgauccu

SEQ ID NO: 3930866 - RNA, 21 nt, Human adenovirus E
agcccacggccgccagcuccu

SEQ ID NO: 3930867 - RNA, 14 nt, Human adenovirus E
agcccagcaccagc

SEQ ID NO: 3930868 - RNA, 23 nt, Human adenovirus E
agcccaugaucaagcccagcacc

SEQ ID NO: 3930869 - RNA, 18 nt, Human adenovirus E
agcccgccaacgugcccc

SEQ ID NO: 3930870 - RNA, 23 nt, Human adenovirus E
agcccggggaccccgagugguac

SEQ ID NO: 3930871 - RNA, 18 nt, Human adenovirus E
agcccggguccaggccag

SEQ ID NO: 3930872 - RNA, 16 nt, Human adenovirus E
agcccgucccgggggu

SEQ ID NO: 3930873 - RNA, 14 nt, Human adenovirus E
agccgccuccaccc

SEQ ID NO: 3930874 - RNA, 13 nt, Human adenovirus E
agccgccuggacc

SEQ ID NO: 3930875 - RNA, 16 nt, Human adenovirus E
agccgcgcccugggcc

SEQ ID NO: 3930876 - RNA, 23 nt, Human adenovirus E
agccgguggagaaggauagcaag

SEQ ID NO: 3930877 - RNA, 23 nt, Human adenovirus E
agccguuccgcaccgaaggaaga

SEQ ID NO: 3930878 - RNA, 14 nt, Human adenovirus E
agccuaggccacaa

SEQ ID NO: 3930879 - RNA, 21 nt, Human adenovirus E
agccuuguugcgcagggccag

SEQ ID NO: 3930880 - RNA, 17 nt, Human adenovirus E
agccuuuagacagcagc

SEQ ID NO: 3930881 - RNA, 22 nt, Human adenovirus E
agcgaaccccgcagaacagggc

SEQ ID NO: 3930882 - RNA, 18 nt, Human adenovirus E
agcgaagagaccccgggu

SEQ ID NO: 3930883 - RNA, 19 nt, Human adenovirus E
agcgaucccauuugagcug

SEQ ID NO: 3930884 - RNA, 14 nt, Human adenovirus E
agcgccagcaggcg

SEQ ID NO: 3930885 - RNA, 14 nt, Human adenovirus E
agcgccgcagcagu

SEQ ID NO: 3930886 - RNA, 16 nt, Human adenovirus E
agcgccucggccgcgu

SEQ ID NO: 3930887 - RNA, 17 nt, Human adenovirus E
agcgccucggccgcgug

SEQ ID NO: 3930888 - RNA, 22 nt, Human adenovirus E
agcgcgagcgguuccaccgcga

SEQ ID NO: 3930889 - RNA, 21 nt, Human adenovirus E
agcgcgcgucgcccaucuccg

SEQ ID NO: 3930890 - RNA, 21 nt, Human adenovirus E
agcgcgggucucggucuccuc

SEQ ID NO: 3930891 - RNA, 21 nt, Human adenovirus E
agcgcggucauggaccaggug

SEQ ID NO: 3930892 - RNA, 19 nt, Human adenovirus E
agcgcucgcgguggggcgg

SEQ ID NO: 3930893 - RNA, 21 nt, Human adenovirus E
agcgcucgcgguggggcggcc

SEQ ID NO: 3930894 - RNA, 15 nt, Human adenovirus E
agcgcucuaguuuuu

SEQ ID NO: 3930895 - RNA, 14 nt, Human adenovirus E
agcggccaucgcca

SEQ ID NO: 3930896 - RNA, 15 nt, Human adenovirus E
agcuaccuccagugc

SEQ ID NO: 3930897 - RNA, 20 nt, Human adenovirus E
agcuaccuccagugccuucu

SEQ ID NO: 3930898 - RNA, 22 nt, Human adenovirus E
agcuaccuccagugccuucucu

SEQ ID NO: 3930899 - RNA, 13 nt, Human adenovirus E
agcuccagcucca

SEQ ID NO: 3930900 - RNA, 18 nt, Human adenovirus E
agcucggcgaugguggcg

SEQ ID NO: 3930901 - RNA, 21 nt, Human adenovirus E
agcucugcaagcuccugcaga

SEQ ID NO: 3930902 - RNA, 14 nt, Human adenovirus E
agcugaaaguggag

SEQ ID NO: 3930903 - RNA, 22 nt, Human adenovirus E
agcugaaguaugaaugggugga

SEQ ID NO: 3930904 - RNA, 19 nt, Human adenovirus E
agcugagcgaccaggagcu

SEQ ID NO: 3930905 - RNA, 16 nt, Human adenovirus E
agcugcccgaggagca

SEQ ID NO: 3930906 - RNA, 19 nt, Human adenovirus E
agcugcccgaggagcaccc

SEQ ID NO: 3930907 - RNA, 13 nt, Human adenovirus E
agcuggcagugcg

SEQ ID NO: 3930908 - RNA, 21 nt, Human adenovirus E
agcuguuccugguggugcagc

SEQ ID NO: 3930909 - RNA, 21 nt, Human adenovirus E
  misc_feature (5)..(5): n is a, c, g, or u
agcunuuccaacccuuccucc

SEQ ID NO: 3930910 - RNA, 14 nt, Human adenovirus E
agcuuaccuuugga

SEQ ID NO: 3930911 - RNA, 12 nt, Human adenovirus E
agcuucuucaac

SEQ ID NO: 3930912 - RNA, 16 nt, Human adenovirus E
agcuugcccucggccu

SEQ ID NO: 3930913 - RNA, 12 nt, Human adenovirus E
cggcgcgugcag

SEQ ID NO: 3930914 - RNA, 17 nt, Human adenovirus E
cggcgcgugcaguggcg

SEQ ID NO: 3930915 - RNA, 19 nt, Human adenovirus E
cggcgcuucugcccccgcc

SEQ ID NO: 3930916 - RNA, 14 nt, Human adenovirus E
cggcggccugggca

SEQ ID NO: 3930917 - RNA, 21 nt, Human adenovirus E
cggcggcgaagacgcgcgccg

SEQ ID NO: 3930918 - RNA, 14 nt, Human adenovirus E
cggcggcgaugcag

SEQ ID NO: 3930919 - RNA, 15 nt, Human adenovirus E
cggcggcggcgaugc

SEQ ID NO: 3930920 - RNA, 18 nt, Human adenovirus E
cggcgggcgcagcagcgc

SEQ ID NO: 3930921 - RNA, 14 nt, Human adenovirus E
cggcggugacuagg

SEQ ID NO: 3930922 - RNA, 16 nt, Human adenovirus E
cggcuccccgcgcacc

SEQ ID NO: 3930923 - RNA, 16 nt, Human adenovirus E
cggcucggggcccgga

SEQ ID NO: 3930924 - RNA, 16 nt, Human adenovirus E
cgggacgcagggccau

SEQ ID NO: 3930925 - RNA, 16 nt, Human adenovirus E
cgggcaaccuggaagc

SEQ ID NO: 3930926 - RNA, 23 nt, Human adenovirus E
cgggcacucccgcaucugcaccu

SEQ ID NO: 3930927 - RNA, 22 nt, Human adenovirus E
cgggccuuggaggcggcggcag

SEQ ID NO: 3930928 - RNA, 12 nt, Human adenovirus E
cgggcggcaggg

SEQ ID NO: 3930929 - RNA, 14 nt, Human adenovirus E
cgggcggcaggggc

SEQ ID NO: 3930930 - RNA, 21 nt, Human adenovirus E
cggggaguccagcgcgugacc

SEQ ID NO: 3930931 - RNA, 14 nt, Human adenovirus E
cggggcagcgccgc

SEQ ID NO: 3930932 - RNA, 12 nt, Human adenovirus E
cgggggcggugc

SEQ ID NO: 3930933 - RNA, 16 nt, Human adenovirus E
cggggucgcugagccc

SEQ ID NO: 3930934 - RNA, 14 nt, Human adenovirus E
cggggugcuggaga

SEQ ID NO: 3930935 - RNA, 23 nt, Human adenovirus E
cgggguggacuucaccgagagcc

SEQ ID NO: 3930936 - RNA, 20 nt, Human adenovirus E
cgggugcuucacgcucgcca

SEQ ID NO: 3930937 - RNA, 14 nt, Human adenovirus E
cggucauguggaug

SEQ ID NO: 3930938 - RNA, 19 nt, Human adenovirus E
cggucgcccgucucucagc

SEQ ID NO: 3930939 - RNA, 22 nt, Human adenovirus E
cggugaggagcucaaccccggc

SEQ ID NO: 3930940 - RNA, 14 nt, Human adenovirus E
cggugaugcucucc

SEQ ID NO: 3930941 - RNA, 14 nt, Human adenovirus E
cggugcccgaggcc

SEQ ID NO: 3930942 - RNA, 17 nt, Human adenovirus E
cggugccgcccaggacu

SEQ ID NO: 3930943 - RNA, 20 nt, Human adenovirus E
cggugcugacggcuccccgc

SEQ ID NO: 3930944 - RNA, 23 nt, Human adenovirus E
cgguggugucgcaucaggccccg

SEQ ID NO: 3930945 - RNA, 22 nt, Human adenovirus E
cggugugccccgguucgaggcc

SEQ ID NO: 3930946 - RNA, 20 nt, Human adenovirus E
cgguguucuuuuaacagaac

SEQ ID NO: 3930947 - RNA, 13 nt, Human adenovirus E
cgguuccaccgcg

SEQ ID NO: 3930948 - RNA, 17 nt, Human adenovirus E
cgguuguaccuggugga

SEQ ID NO: 3930949 - RNA, 21 nt, Human adenovirus E
cguagaggaaccccgcccacu

SEQ ID NO: 3930950 - RNA, 13 nt, Human adenovirus E
cguaggccugggc

SEQ ID NO: 3930951 - RNA, 14 nt, Human adenovirus E
cguaguugagcgcc

SEQ ID NO: 3930952 - RNA, 18 nt, Human adenovirus E
cgucaagcugcugcucag

SEQ ID NO: 3930953 - RNA, 12 nt, Human adenovirus E
cgucacccgccc

SEQ ID NO: 3930954 - RNA, 15 nt, Human adenovirus E
acagggcaggcgcug

SEQ ID NO: 3930955 - RNA, 23 nt, Human adenovirus E
acaguagaugggacgagaccgga

SEQ ID NO: 3930956 - RNA, 13 nt, Human adenovirus E
acaguauccgcag

SEQ ID NO: 3930957 - RNA, 18 nt, Human adenovirus E
acaguauccgcagcagcg

SEQ ID NO: 3930958 - RNA, 22 nt, Human adenovirus E
acaguuagucucuccacuuaca

SEQ ID NO: 3930959 - RNA, 15 nt, Human adenovirus E
acauccagaaacaag

SEQ ID NO: 3930960 - RNA, 16 nt, Human adenovirus E
acauguggagcuacca

SEQ ID NO: 3930961 - RNA, 18 nt, Human adenovirus E
accacaauuacucacacc

SEQ ID NO: 3930962 - RNA, 14 nt, Human adenovirus E
accacacacacaga

SEQ ID NO: 3930963 - RNA, 16 nt, Human adenovirus E
accaccacagcaaccu

SEQ ID NO: 3930964 - RNA, 14 nt, Human adenovirus E
accaccacuacagc

SEQ ID NO: 3930965 - RNA, 14 nt, Human adenovirus E
accacuacagcagc

SEQ ID NO: 3930966 - RNA, 18 nt, Human adenovirus E
accacucgccgcucgccg

SEQ ID NO: 3930967 - RNA, 13 nt, Human adenovirus E
accacuucacucc

SEQ ID NO: 3930968 - RNA, 16 nt, Human adenovirus E
accagcaagccgcuga

SEQ ID NO: 3930969 - RNA, 22 nt, Human adenovirus E
accagcaccauggaggugcaga

SEQ ID NO: 3930970 - RNA, 13 nt, Human adenovirus E
accaggagcugau

SEQ ID NO: 3930971 - RNA, 15 nt, Human adenovirus E
accaggccgugcagc

SEQ ID NO: 3930972 - RNA, 19 nt, Human adenovirus E
accaguuccgccaggaggc

SEQ ID NO: 3930973 - RNA, 13 nt, Human adenovirus E
accaugcagcuga

SEQ ID NO: 3930974 - RNA, 22 nt, Human adenovirus E
accauuaccaccgucagugaaa

SEQ ID NO: 3930975 - RNA, 21 nt, Human adenovirus E
acccacgugagccgcgcccug

SEQ ID NO: 3930976 - RNA, 22 nt, Human adenovirus E
acccagccagaugaugcaauuu

SEQ ID NO: 3930977 - RNA, 21 nt, Human adenovirus E
acccagcccgccaacgugccc

SEQ ID NO: 3930978 - RNA, 12 nt, Human adenovirus E
accccacccagu

SEQ ID NO: 3930979 - RNA, 15 nt, Human adenovirus E
accccacgccgagcc

SEQ ID NO: 3930980 - RNA, 14 nt, Human adenovirus E
acccccaguaccgc

SEQ ID NO: 3930981 - RNA, 23 nt, Human adenovirus E
acccccgccaugcgcgcggcgcg

SEQ ID NO: 3930982 - RNA, 13 nt, Human adenovirus E
accccugccgccc

SEQ ID NO: 3930983 - RNA, 15 nt, Human adenovirus E
acccgagcaucgcca

SEQ ID NO: 3930984 - RNA, 17 nt, Human adenovirus E
acccgcucucugcucaa

SEQ ID NO: 3930985 - RNA, 14 nt, Human adenovirus E
acccggacgugcag

SEQ ID NO: 3930986 - RNA, 17 nt, Human adenovirus E
acccggacgugcagccc

SEQ ID NO: 3930987 - RNA, 21 nt, Human adenovirus E
acccggcgcuaccugcucuuc

SEQ ID NO: 3930988 - RNA, 15 nt, Human adenovirus E
acccucaucuccuuu

SEQ ID NO: 3930989 - RNA, 13 nt, Human adenovirus E
accgagcccauga

SEQ ID NO: 3930990 - RNA, 19 nt, Human adenovirus E
accgagggggagagcuacu

SEQ ID NO: 3930991 - RNA, 19 nt, Human adenovirus E
accgcaccgaggugccccu

SEQ ID NO: 3930992 - RNA, 19 nt, Human adenovirus E
accgcagcuugcccucggc

SEQ ID NO: 3930993 - RNA, 19 nt, Human adenovirus E
accgccccgccgcccagcc

SEQ ID NO: 3930994 - RNA, 14 nt, Human adenovirus E
accgccgacgagaa

SEQ ID NO: 3930995 - RNA, 23 nt, Human adenovirus E
accgccgacgagaagcagcagca

SEQ ID NO: 3930996 - RNA, 19 nt, Human adenovirus E
accgccucggaccuggccg

SEQ ID NO: 3930997 - RNA, 19 nt, Human adenovirus E
accgcgaguccaaccuggg

SEQ ID NO: 3930998 - RNA, 11 nt, Human adenovirus E
accgcggcgcc

SEQ ID NO: 3930999 - RNA, 15 nt, Human adenovirus E
accggggccgggacc

SEQ ID NO: 3931000 - RNA, 19 nt, Human adenovirus E
accgugaaccugagccagg

SEQ ID NO: 3931001 - RNA, 13 nt, Human adenovirus E
accguggugcaga

SEQ ID NO: 3931002 - RNA, 17 nt, Human adenovirus E
accucauuuuccccgag

SEQ ID NO: 3931003 - RNA, 12 nt, Human adenovirus E
accuccacagcc

SEQ ID NO: 3931004 - RNA, 16 nt, Human adenovirus E
accucgacccccagac

SEQ ID NO: 3931005 - RNA, 19 nt, Human adenovirus E
accucugccacaccuggca

SEQ ID NO: 3931006 - RNA, 18 nt, Human adenovirus E
accugaaagagcucugca

SEQ ID NO: 3931007 - RNA, 19 nt, Human adenovirus E
accugcacuaccucuucag

SEQ ID NO: 3931008 - RNA, 17 nt, Human adenovirus E
accugcaucugcugcug

SEQ ID NO: 3931009 - RNA, 14 nt, Human adenovirus E
accugcggggcgau

SEQ ID NO: 3931010 - RNA, 18 nt, Human adenovirus E
accuggaagccacccuga

SEQ ID NO: 3931011 - RNA, 12 nt, Human adenovirus E
accuggccaacc

SEQ ID NO: 3931012 - RNA, 17 nt, Human adenovirus E
accuggccaaccaggcc

SEQ ID NO: 3931013 - RNA, 22 nt, Human adenovirus E
accugggauccaugguggcgcu

SEQ ID NO: 3931014 - RNA, 22 nt, Human adenovirus E
accuguuaccacuaugcagcuc

SEQ ID NO: 3931015 - RNA, 21 nt, Human adenovirus E
accuguucagagacaggagcg

SEQ ID NO: 3931016 - RNA, 23 nt, Human adenovirus E
acgaaggcgcgcaggccggagcu

SEQ ID NO: 3931017 - RNA, 16 nt, Human adenovirus E
acgacccgcaaccccg

SEQ ID NO: 3931018 - RNA, 16 nt, Human adenovirus E
acgagcagcuggcccg

SEQ ID NO: 3931019 - RNA, 19 nt, Human adenovirus E
acgauauguggccccccac

SEQ ID NO: 3931020 - RNA, 15 nt, Human adenovirus E
acgauuggacccagg

SEQ ID NO: 3931021 - RNA, 21 nt, Human adenovirus E
acgcacgagaagguccuggcc

SEQ ID NO: 3931022 - RNA, 16 nt, Human adenovirus E
acgcccguccucggcg

SEQ ID NO: 3931023 - RNA, 19 nt, Human adenovirus E
acgcccuuuucaaccuggg

SEQ ID NO: 3931024 - RNA, 12 nt, Human adenovirus E
acgccgcaccgc

SEQ ID NO: 3931025 - RNA, 18 nt, Human adenovirus E
acgccugcugggccuugg

SEQ ID NO: 3931026 - RNA, 19 nt, Human adenovirus E
acgccugcugggccuuggc

SEQ ID NO: 3931027 - RNA, 20 nt, Human adenovirus E
acgccugcugggccuuggcu

SEQ ID NO: 3931028 - RNA, 14 nt, Human adenovirus E
acgcugcccacgua

SEQ ID NO: 3931029 - RNA, 15 nt, Human adenovirus E
acggaacugcugccc

SEQ ID NO: 3931030 - RNA, 17 nt, Human adenovirus E
acggacagcggcagcau

SEQ ID NO: 3931031 - RNA, 14 nt, Human adenovirus E
acggaggccagcac

SEQ ID NO: 3931032 - RNA, 22 nt, Human adenovirus E
acggcgcagcuguuccuggugg

SEQ ID NO: 3931033 - RNA, 21 nt, Human adenovirus E
acggcgcggccagccugcuga

SEQ ID NO: 3931034 - RNA, 19 nt, Human adenovirus E
acggcguacgagcagaccg

SEQ ID NO: 3931035 - RNA, 17 nt, Human adenovirus E
acgggcagcccuuuggu

SEQ ID NO: 3931036 - RNA, 19 nt, Human adenovirus E
acggggugguggaccuggc

SEQ ID NO: 3931037 - RNA, 15 nt, Human adenovirus E
acgucaccugcggcg

SEQ ID NO: 3931038 - RNA, 19 nt, Human adenovirus E
acgucagcggcgagggccu

SEQ ID NO: 3931039 - RNA, 14 nt, Human adenovirus E
acgucguggugguc

SEQ ID NO: 3931040 - RNA, 21 nt, Human adenovirus E
acgugagccgcgcccugggcc

SEQ ID NO: 3931041 - RNA, 18 nt, Human adenovirus E
acgugcgcgaggccgugg

SEQ ID NO: 3931042 - RNA, 18 nt, Human adenovirus E
acgugcucuuugccuuca

SEQ ID NO: 3931043 - RNA, 18 nt, Human adenovirus E
acguggacgagcagaccu

SEQ ID NO: 3931044 - RNA, 14 nt, Human adenovirus E
acuacaaugcucag

SEQ ID NO: 3931045 - RNA, 19 nt, Human adenovirus E
acuacaaugcucagucuca

SEQ ID NO: 3931046 - RNA, 14 nt, Human adenovirus E
acucaaaaaaauac

SEQ ID NO: 3931047 - RNA, 14 nt, Human adenovirus E
acucaagggucugu

SEQ ID NO: 3931048 - RNA, 18 nt, Human adenovirus E
acucagccaucgccaacc

SEQ ID NO: 3931049 - RNA, 12 nt, Human adenovirus E
acuccaccucca

SEQ ID NO: 3931050 - RNA, 22 nt, Human adenovirus E
acuccaccuccacccaccacaa

SEQ ID NO: 3931051 - RNA, 16 nt, Human adenovirus E
acuccccuccugcaca

SEQ ID NO: 3931052 - RNA, 14 nt, Human adenovirus E
acuccccugaagca

SEQ ID NO: 3931053 - RNA, 19 nt, Human adenovirus E
acuccuagccccguccucu

SEQ ID NO: 3931054 - RNA, 12 nt, Human adenovirus E
acuccuccucca

SEQ ID NO: 3931055 - RNA, 14 nt, Human adenovirus E
acucgcagcagcug

SEQ ID NO: 3931056 - RNA, 15 nt, Human adenovirus E
acucgccagaggcgc

SEQ ID NO: 3931057 - RNA, 18 nt, Human adenovirus E
acucucaacuccucgggg

SEQ ID NO: 3931058 - RNA, 15 nt, Human adenovirus E
acugaaagucaagaa

SEQ ID NO: 3931059 - RNA, 21 nt, Human adenovirus E
acugaacgacaagcuggaaca

SEQ ID NO: 3931060 - RNA, 20 nt, Human adenovirus E
acugcuaguaccaaugagca

SEQ ID NO: 3931061 - RNA, 21 nt, Human adenovirus E
acugguagguguagagggugc

SEQ ID NO: 3931062 - RNA, 22 nt, Human adenovirus E
acuucaaccccuucuccggcuc

SEQ ID NO: 3931063 - RNA, 17 nt, Human adenovirus E
acuucaucagcgcccug

SEQ ID NO: 3931064 - RNA, 14 nt, Human adenovirus E
acuuccaagaagag

SEQ ID NO: 3931065 - RNA, 13 nt, Human adenovirus E
acuucgugccgcu

SEQ ID NO: 3931066 - RNA, 15 nt, Human adenovirus E
acuucucggugcuga

SEQ ID NO: 3931067 - RNA, 17 nt, Human adenovirus E
acuuggccagccacuug

SEQ ID NO: 3931068 - RNA, 18 nt, Human adenovirus E
acuuugagcugcccgagg

SEQ ID NO: 3931069 - RNA, 14 nt, Human adenovirus E
agaaagcaagcagc

SEQ ID NO: 3931070 - RNA, 16 nt, Human adenovirus E
agaaagcaagcagcac

SEQ ID NO: 3931071 - RNA, 15 nt, Human adenovirus E
aggcuggagccgcag

SEQ ID NO: 3931072 - RNA, 22 nt, Human adenovirus E
agggcccagcgaaggcgagggu

SEQ ID NO: 3931073 - RNA, 22 nt, Human adenovirus E
agggccgcuggcuccuggaccu

SEQ ID NO: 3931074 - RNA, 20 nt, Human adenovirus E
agggcgaguaccuggaagac

SEQ ID NO: 3931075 - RNA, 14 nt, Human adenovirus E
aggggacgagcugc

SEQ ID NO: 3931076 - RNA, 19 nt, Human adenovirus E
agggggcgauccuggccca

SEQ ID NO: 3931077 - RNA, 18 nt, Human adenovirus E
agggggucaucuugcagg

SEQ ID NO: 3931078 - RNA, 20 nt, Human adenovirus E
aggguucucuaauuccucaa

SEQ ID NO: 3931079 - RNA, 13 nt, Human adenovirus E
agguacaugggca

SEQ ID NO: 3931080 - RNA, 23 nt, Human adenovirus E
  misc_feature (14)..(14): n is a, c, g, or u
aggucagugggcancggcggcgc

SEQ ID NO: 3931081 - RNA, 18 nt, Human adenovirus E
aggucgaggagaaccugc

SEQ ID NO: 3931082 - RNA, 13 nt, Human adenovirus E
aggugaggaagag

SEQ ID NO: 3931083 - RNA, 14 nt, Human adenovirus E
aggugaggaagagc

SEQ ID NO: 3931084 - RNA, 16 nt, Human adenovirus E
agguuguucaacaguc

SEQ ID NO: 3931085 - RNA, 17 nt, Human adenovirus E
agucgaagaccccggcg

SEQ ID NO: 3931086 - RNA, 15 nt, Human adenovirus E
agucgcugccgccgc

SEQ ID NO: 3931087 - RNA, 15 nt, Human adenovirus E
agucgguccacagcu

SEQ ID NO: 3931088 - RNA, 19 nt, Human adenovirus E
agucugcagcgggcccuga

SEQ ID NO: 3931089 - RNA, 15 nt, Human adenovirus E
agucuggaggaagac

SEQ ID NO: 3931090 - RNA, 12 nt, Human adenovirus E
agugccacugcc

SEQ ID NO: 3931091 - RNA, 23 nt, Human adenovirus E
agugcgucucgggacccugccau

SEQ ID NO: 3931092 - RNA, 13 nt, Human adenovirus E
agugcucaggugu

SEQ ID NO: 3931093 - RNA, 20 nt, Human adenovirus E
aguggccagaucguccaggg

SEQ ID NO: 3931094 - RNA, 16 nt, Human adenovirus E
aguggcgcggcugcuc

SEQ ID NO: 3931095 - RNA, 23 nt, Human adenovirus E
aguguuuuauugauucaacaguu

SEQ ID NO: 3931096 - RNA, 17 nt, Human adenovirus E
aguucauguacagcaac

SEQ ID NO: 3931097 - RNA, 21 nt, Human adenovirus E
aguucgugagguaaauccaag

SEQ ID NO: 3931098 - RNA, 18 nt, Human adenovirus E
aguuugcuuacggcaagc

SEQ ID NO: 3931099 - RNA, 22 nt, Human adenovirus E
aguuuggaagcaguaguacaga

SEQ ID NO: 3931100 - RNA, 15 nt, Human adenovirus E
auaacuguaaguacu

SEQ ID NO: 3931101 - RNA, 22 nt, Human adenovirus E
auacccgccaaauaaucacaca

SEQ ID NO: 3931102 - RNA, 19 nt, Human adenovirus E
auacgcgcacuuccucaaa

SEQ ID NO: 3931103 - RNA, 20 nt, Human adenovirus E
auacucaccaaggccauggc

SEQ ID NO: 3931104 - RNA, 14 nt, Human adenovirus E
auauaccaaugcug

SEQ ID NO: 3931105 - RNA, 19 nt, Human adenovirus E
aucacacacgcccagcaca

SEQ ID NO: 3931106 - RNA, 18 nt, Human adenovirus E
aucagacaugcaucccag

SEQ ID NO: 3931107 - RNA, 15 nt, Human adenovirus E
aucagacccacugcu

SEQ ID NO: 3931108 - RNA, 19 nt, Human adenovirus E
aucagcaucaucugggccu

SEQ ID NO: 3931109 - RNA, 17 nt, Human adenovirus E
aucagcgccccgcaucc

SEQ ID NO: 3931110 - RNA, 19 nt, Human adenovirus E
aucaugccugauggcucug

SEQ ID NO: 3931111 - RNA, 14 nt, Human adenovirus E
aucauugagcaccc

SEQ ID NO: 3931112 - RNA, 23 nt, Human adenovirus E
auccaucgagauugaccugggcu

SEQ ID NO: 3931113 - RNA, 14 nt, Human adenovirus E
aucccgcuggacca

SEQ ID NO: 3931114 - RNA, 19 nt, Human adenovirus E
auccgcagcagcgagcugg

SEQ ID NO: 3931115 - RNA, 23 nt, Human adenovirus E
auccgcagcagcgagcugggcag

SEQ ID NO: 3931116 - RNA, 23 nt, Human adenovirus E
auccugcccgccaccugcuccgc

SEQ ID NO: 3931117 - RNA, 13 nt, Human adenovirus E
aucgcccaagaau

SEQ ID NO: 3931118 - RNA, 20 nt, Human adenovirus E
aucucuucuacuuccuccuc

SEQ ID NO: 3931119 - RNA, 13 nt, Human adenovirus E
aucugccuccucc

SEQ ID NO: 3931120 - RNA, 16 nt, Human adenovirus E
aucuguugagcuggga

SEQ ID NO: 3931121 - RNA, 16 nt, Human adenovirus E
aucuucucuucucuuu

SEQ ID NO: 3931122 - RNA, 15 nt, Human adenovirus E
augacagcaacagua

SEQ ID NO: 3931123 - RNA, 15 nt, Human adenovirus E
augacugacccacug

SEQ ID NO: 3931124 - RNA, 11 nt, Human adenovirus E
augagcugggc

SEQ ID NO: 3931125 - RNA, 22 nt, Human adenovirus E
augauucgacaagaugaauaca

SEQ ID NO: 3931126 - RNA, 15 nt, Human adenovirus E
augcaagagauggag

SEQ ID NO: 3931127 - RNA, 12 nt, Human adenovirus E
augcagcagcug

SEQ ID NO: 3931128 - RNA, 16 nt, Human adenovirus E
augcagcugauggugc

SEQ ID NO: 3931129 - RNA, 17 nt, Human adenovirus E
augcccacggcccucag

SEQ ID NO: 3931130 - RNA, 14 nt, Human adenovirus E
augccccgaggaaa

SEQ ID NO: 3931131 - RNA, 22 nt, Human adenovirus E
augcugacgagcccgcgcggga

SEQ ID NO: 3931132 - RNA, 17 nt, Human adenovirus E
auggaggaagacuggga

SEQ ID NO: 3931133 - RNA, 13 nt, Human adenovirus E
auggcgaccagcg

SEQ ID NO: 3931134 - RNA, 13 nt, Human adenovirus E
augggccuggccg

SEQ ID NO: 3931135 - RNA, 16 nt, Human adenovirus E
augggcgcggaccugc

SEQ ID NO: 3931136 - RNA, 14 nt, Human adenovirus E
augguacugaucug

SEQ ID NO: 3931137 - RNA, 19 nt, Human adenovirus E
auguccaccugcggggcga

SEQ ID NO: 3931138 - RNA, 21 nt, Human adenovirus E
augucguagacguagaggggc

SEQ ID NO: 3931139 - RNA, 13 nt, Human adenovirus E
augugacacuggu

SEQ ID NO: 3931140 - RNA, 16 nt, Human adenovirus E
augugucccagcggcg

SEQ ID NO: 3931141 - RNA, 23 nt, Human adenovirus E
auguuuucugccaacaccacuuc

SEQ ID NO: 3931142 - RNA, 17 nt, Human adenovirus E
auuaccucugcucuaug

SEQ ID NO: 3931143 - RNA, 17 nt, Human adenovirus E
auuacuccccuccugca

SEQ ID NO: 3931144 - RNA, 16 nt, Human adenovirus E
auuagggcaagccaca

SEQ ID NO: 3931145 - RNA, 19 nt, Human adenovirus E
auuccuaaaguuagcuuua

SEQ ID NO: 3931146 - RNA, 22 nt, Human adenovirus E
auucuacacuaaaaaaauacug

SEQ ID NO: 3931147 - RNA, 14 nt, Human adenovirus E
auucugcagagcau

SEQ ID NO: 3931148 - RNA, 21 nt, Human adenovirus E
auugaaagcaacauaagcugg

SEQ ID NO: 3931149 - RNA, 22 nt, Human adenovirus E
auugaacuaugauuccuagaca

SEQ ID NO: 3931150 - RNA, 17 nt, Human adenovirus E
auuuuaaugaaucagau

SEQ ID NO: 3931151 - RNA, 17 nt, Human adenovirus E
caaaaaguuugagguau

SEQ ID NO: 3931152 - RNA, 13 nt, Human adenovirus E
caaacgcccaaaa

SEQ ID NO: 3931153 - RNA, 15 nt, Human adenovirus E
caaacuaaccuccac

SEQ ID NO: 3931154 - RNA, 20 nt, Human adenovirus E
caaacucaugauggccgugg

SEQ ID NO: 3931155 - RNA, 13 nt, Human adenovirus E
caaagagcugucc

SEQ ID NO: 3931156 - RNA, 14 nt, Human adenovirus E
caaagagcuguccg

SEQ ID NO: 3931157 - RNA, 17 nt, Human adenovirus E
caaagcauguugcaaaa

SEQ ID NO: 3931158 - RNA, 23 nt, Human adenovirus E
caacaaaagaaaaauccuccagg

SEQ ID NO: 3931159 - RNA, 14 nt, Human adenovirus E
caacacgcuccagc

SEQ ID NO: 3931160 - RNA, 19 nt, Human adenovirus E
caacagcccccuccacagc

SEQ ID NO: 3931161 - RNA, 14 nt, Human adenovirus E
caacagcugaggau

SEQ ID NO: 3931162 - RNA, 14 nt, Human adenovirus E
caaccaaccucugg

SEQ ID NO: 3931163 - RNA, 19 nt, Human adenovirus E
caacccuuccuccccggga

SEQ ID NO: 3931164 - RNA, 22 nt, Human adenovirus E
caaccgcaacucguaccugggc

SEQ ID NO: 3931165 - RNA, 17 nt, Human adenovirus E
caaccuggaagccaccc

SEQ ID NO: 3931166 - RNA, 19 nt, Human adenovirus E
caaccuggaagccacccug

SEQ ID NO: 3931167 - RNA, 12 nt, Human adenovirus E
caacggccugcc

SEQ ID NO: 3931168 - RNA, 19 nt, Human adenovirus E
caacgugcagaccaaccug

SEQ ID NO: 3931169 - RNA, 20 nt, Human adenovirus E
caacgugcagaccaaccugg

SEQ ID NO: 3931170 - RNA, 19 nt, Human adenovirus E
caacgugccccggggccag

SEQ ID NO: 3931171 - RNA, 22 nt, Human adenovirus E
caacguggagcugaccaaccug

SEQ ID NO: 3931172 - RNA, 16 nt, Human adenovirus E
caagaagaggcagcag

SEQ ID NO: 3931173 - RNA, 17 nt, Human adenovirus E
caagaagaggcagcagc

SEQ ID NO: 3931174 - RNA, 15 nt, Human adenovirus E
caagaagcugaaagu

SEQ ID NO: 3931175 - RNA, 22 nt, Human adenovirus E
caagagcuucuucaacgagcag

SEQ ID NO: 3931176 - RNA, 23 nt, Human adenovirus E
caagcagaaccuguucagagaca

SEQ ID NO: 3931177 - RNA, 12 nt, Human adenovirus E
caagcauggaga

SEQ ID NO: 3931178 - RNA, 11 nt, Human adenovirus E
caagcgccgca

SEQ ID NO: 3931179 - RNA, 15 nt, Human adenovirus E
caagcgccgcagcag

SEQ ID NO: 3931180 - RNA, 17 nt, Human adenovirus E
caagcuggaacacuuac

SEQ ID NO: 3931181 - RNA, 14 nt, Human adenovirus E
caaggagaaggagg

SEQ ID NO: 3931182 - RNA, 14 nt, Human adenovirus E
caaggaggaugcag

SEQ ID NO: 3931183 - RNA, 21 nt, Human adenovirus E
caaggaggaugcagcagcuga

SEQ ID NO: 3931184 - RNA, 16 nt, Human adenovirus E
caaggcguggaacagc

SEQ ID NO: 3931185 - RNA, 15 nt, Human adenovirus E
caagggucuguggac

SEQ ID NO: 3931186 - RNA, 18 nt, Human adenovirus E
caaguacggcgcggccag

SEQ ID NO: 3931187 - RNA, 19 nt, Human adenovirus E
caaguccuggcgggggcac

SEQ ID NO: 3931188 - RNA, 15 nt, Human adenovirus E
cagccgaaacucauc

SEQ ID NO: 3931189 - RNA, 22 nt, Human adenovirus E
cagccgccuggacccggugccg

SEQ ID NO: 3931190 - RNA, 15 nt, Human adenovirus E
cagccgcggccaggg

SEQ ID NO: 3931191 - RNA, 13 nt, Human adenovirus E
cagccguuccgca

SEQ ID NO: 3931192 - RNA, 20 nt, Human adenovirus E
cagcgaaccccgcagaacag

SEQ ID NO: 3931193 - RNA, 15 nt, Human adenovirus E
cagcgacgagcagcu

SEQ ID NO: 3931194 - RNA, 17 nt, Human adenovirus E
cagcgccggcaggaccc

SEQ ID NO: 3931195 - RNA, 14 nt, Human adenovirus E
cagcgccuccaaac

SEQ ID NO: 3931196 - RNA, 12 nt, Human adenovirus E
cagcggcagcau

SEQ ID NO: 3931197 - RNA, 12 nt, Human adenovirus E
cagcggcggcag

SEQ ID NO: 3931198 - RNA, 13 nt, Human adenovirus E
cagcggcggcagc

SEQ ID NO: 3931199 - RNA, 21 nt, Human adenovirus E
cagcggcucgacuccguggcc

SEQ ID NO: 3931200 - RNA, 22 nt, Human adenovirus E
cagcggcuugaguccgucggcc

SEQ ID NO: 3931201 - RNA, 18 nt, Human adenovirus E
cagcggggugucggggaa

SEQ ID NO: 3931202 - RNA, 12 nt, Human adenovirus E
cagcgugguggc

SEQ ID NO: 3931203 - RNA, 22 nt, Human adenovirus E
cagcugaagcaacugcagccgu

SEQ ID NO: 3931204 - RNA, 21 nt, Human adenovirus E
cagcugcaccacgcugcgccc

SEQ ID NO: 3931205 - RNA, 22 nt, Human adenovirus E
cagcugccguccucccggagga

SEQ ID NO: 3931206 - RNA, 20 nt, Human adenovirus E
cagcuggccuuggaagaggg

SEQ ID NO: 3931207 - RNA, 23 nt, Human adenovirus E
cagcugggacuugccgcagccgg

SEQ ID NO: 3931208 - RNA, 17 nt, Human adenovirus E
caggaaauuccccagcc

SEQ ID NO: 3931209 - RNA, 14 nt, Human adenovirus E
caggaacugaaagu

SEQ ID NO: 3931210 - RNA, 13 nt, Human adenovirus E
caggaccaccagc

SEQ ID NO: 3931211 - RNA, 19 nt, Human adenovirus E
caggacccgguagaggugg

SEQ ID NO: 3931212 - RNA, 16 nt, Human adenovirus E
caggacuacuccaccc

SEQ ID NO: 3931213 - RNA, 17 nt, Human adenovirus E
caggagcgcgggcugcc

SEQ ID NO: 3931214 - RNA, 20 nt, Human adenovirus E
caggagcgcgggcugccgcu

SEQ ID NO: 3931215 - RNA, 23 nt, Human adenovirus E
caggcagaggaggaggagaugga

SEQ ID NO: 3931216 - RNA, 13 nt, Human adenovirus E
caggcagcaaagc

SEQ ID NO: 3931217 - RNA, 12 nt, Human adenovirus E
caggcagcaccg

SEQ ID NO: 3931218 - RNA, 16 nt, Human adenovirus E
caggccccgcagcagu

SEQ ID NO: 3931219 - RNA, 21 nt, Human adenovirus E
caggccucucagcgccacuga

SEQ ID NO: 3931220 - RNA, 16 nt, Human adenovirus E
caggcgauggcggcgg

SEQ ID NO: 3931221 - RNA, 23 nt, Human adenovirus E
caggcgcacgggacgcagggcca

SEQ ID NO: 3931222 - RNA, 10 nt, Human adenovirus E
caggcggcag

SEQ ID NO: 3931223 - RNA, 20 nt, Human adenovirus E
caggcggcgcgagcugagcg

SEQ ID NO: 3931224 - RNA, 13 nt, Human adenovirus E
caggcggucccag

SEQ ID NO: 3931225 - RNA, 16 nt, Human adenovirus E
caggcuggagccgcag

SEQ ID NO: 3931226 - RNA, 19 nt, Human adenovirus E
caggcugggcugggacccc

SEQ ID NO: 3931227 - RNA, 18 nt, Human adenovirus E
caggcuuugagcucggag

SEQ ID NO: 3931228 - RNA, 21 nt, Human adenovirus E
caggcuuugagcucggagggg

SEQ ID NO: 3931229 - RNA, 19 nt, Human adenovirus E
cagggacucccucagcaug

SEQ ID NO: 3931230 - RNA, 15 nt, Human adenovirus E
cagggaggcgcugcu

SEQ ID NO: 3931231 - RNA, 17 nt, Human adenovirus E
cagggccagcaccgccc

SEQ ID NO: 3931232 - RNA, 20 nt, Human adenovirus E
cagggccauguucagggcgg

SEQ ID NO: 3931233 - RNA, 14 nt, Human adenovirus E
cagggcggccagac

SEQ ID NO: 3931234 - RNA, 16 nt, Human adenovirus E
caggggguccagcaug

SEQ ID NO: 3931235 - RNA, 23 nt, Human adenovirus E
caggguauaaagcggcuggugau

SEQ ID NO: 3931236 - RNA, 21 nt, Human adenovirus E
caggguaucgcaaucaggcag

SEQ ID NO: 3931237 - RNA, 20 nt, Human adenovirus E
caggugcugccgaccgcggc

SEQ ID NO: 3931238 - RNA, 18 nt, Human adenovirus E
cagguucuacgaggacca

SEQ ID NO: 3931239 - RNA, 14 nt, Human adenovirus E
caguaguacagaaa

SEQ ID NO: 3931240 - RNA, 16 nt, Human adenovirus E
cagucaggcagaggag

SEQ ID NO: 3931241 - RNA, 16 nt, Human adenovirus E
caguccuuucccgagc

SEQ ID NO: 3931242 - RNA, 18 nt, Human adenovirus E
cagucuggaggaagacga

SEQ ID NO: 3931243 - RNA, 14 nt, Human adenovirus E
cagugucuggagga

SEQ ID NO: 3931244 - RNA, 18 nt, Human adenovirus E
caguuacaccugcccugg

SEQ ID NO: 3931245 - RNA, 16 nt, Human adenovirus E
caguuagucucuccac

SEQ ID NO: 3931246 - RNA, 17 nt, Human adenovirus E
caguuagucucuccacu

SEQ ID NO: 3931247 - RNA, 18 nt, Human adenovirus E
caguuauuuuuccuccac

SEQ ID NO: 3931248 - RNA, 12 nt, Human adenovirus E
cauacuccaccu

SEQ ID NO: 3931249 - RNA, 15 nt, Human adenovirus E
cauagcaaccaacau

SEQ ID NO: 3931250 - RNA, 20 nt, Human adenovirus E
cauagcuuaccgagcagcag

SEQ ID NO: 3931251 - RNA, 21 nt, Human adenovirus E
cauagcuuaccgagcagcagc

SEQ ID NO: 3931252 - RNA, 16 nt, Human adenovirus E
cauaggaccaccagga

SEQ ID NO: 3931253 - RNA, 21 nt, Human adenovirus E
cauagucugcagcgggcccug

SEQ ID NO: 3931254 - RNA, 15 nt, Human adenovirus E
cauagucugccugcu

SEQ ID NO: 3931255 - RNA, 21 nt, Human adenovirus E
cauaguugugguccuggguga

SEQ ID NO: 3931256 - RNA, 18 nt, Human adenovirus E
caucagucgucuggugcg

SEQ ID NO: 3931257 - RNA, 18 nt, Human adenovirus E
cauccccgcgcuccugga

SEQ ID NO: 3931258 - RNA, 14 nt, Human adenovirus E
cauccccggguaca

SEQ ID NO: 3931259 - RNA, 21 nt, Human adenovirus E
caucccuucgagaucagguuc

SEQ ID NO: 3931260 - RNA, 22 nt, Human adenovirus E
cauccuggccguguugcucuac

SEQ ID NO: 3931261 - RNA, 17 nt, Human adenovirus E
caucguaggugaggaag

SEQ ID NO: 3931262 - RNA, 18 nt, Human adenovirus E
caugaucaagcccagcac

SEQ ID NO: 3931263 - RNA, 20 nt, Human adenovirus E
caugaucaagcccagcacca

SEQ ID NO: 3931264 - RNA, 21 nt, Human adenovirus E
caugauggccgugguccuggu

SEQ ID NO: 3931265 - RNA, 18 nt, Human adenovirus E
caugcaacuuggaaggga

SEQ ID NO: 3931266 - RNA, 16 nt, Human adenovirus E
caugcaucccagcugg

SEQ ID NO: 3931267 - RNA, 22 nt, Human adenovirus E
caugcaucucuucagcacucuc

SEQ ID NO: 3931268 - RNA, 16 nt, Human adenovirus E
caugcugacgagcccg

SEQ ID NO: 3931269 - RNA, 18 nt, Human adenovirus E
cauggaauacaccacccu

SEQ ID NO: 3931270 - RNA, 14 nt, Human adenovirus E
cauggagacucagc

SEQ ID NO: 3931271 - RNA, 23 nt, Human adenovirus E
cauggaggugcagacggaucccu

SEQ ID NO: 3931272 - RNA, 20 nt, Human adenovirus E
cauggcccgcgggcagggac

SEQ ID NO: 3931273 - RNA, 19 nt, Human adenovirus E
caugggcgcggaccugcac

SEQ ID NO: 3931274 - RNA, 21 nt, Human adenovirus E
cauguccaccugcggggcgau

SEQ ID NO: 3931275 - RNA, 16 nt, Human adenovirus E
caugucccccucgucc

SEQ ID NO: 3931276 - RNA, 19 nt, Human adenovirus E
cauguggagcuaccagccc

SEQ ID NO: 3931277 - RNA, 21 nt, Human adenovirus E
cauguggagcuaccagcccca

SEQ ID NO: 3931278 - RNA, 15 nt, Human adenovirus E
cauguuuucugccaa

SEQ ID NO: 3931279 - RNA, 22 nt, Human adenovirus E
  misc_feature (13)..(13): n is a, c, g, or u
cauuaaaucagcnuaccaccac

SEQ ID NO: 3931280 - RNA, 19 nt, Human adenovirus E
cauuacuaccgucaccucc

SEQ ID NO: 3931281 - RNA, 12 nt, Human adenovirus E
cauuggugaugg

SEQ ID NO: 3931282 - RNA, 17 nt, Human adenovirus E
cauugucaaugccaccu

SEQ ID NO: 3931283 - RNA, 22 nt, Human adenovirus E
cauuucccuuaacauggaucac

SEQ ID NO: 3931284 - RNA, 13 nt, Human adenovirus E
ccaaaaaucagac

SEQ ID NO: 3931285 - RNA, 15 nt, Human adenovirus E
ccaaaagauccccgu

SEQ ID NO: 3931286 - RNA, 18 nt, Human adenovirus E
ccaaacuaaccuccacca

SEQ ID NO: 3931287 - RNA, 18 nt, Human adenovirus E
ccaaagucaugagcgcgg

SEQ ID NO: 3931288 - RNA, 16 nt, Human adenovirus E
ccaacccuccaggaua

SEQ ID NO: 3931289 - RNA, 21 nt, Human adenovirus E
ccaacgaggcuuuccaucccg

SEQ ID NO: 3931290 - RNA, 17 nt, Human adenovirus E
ccaacgccauccugaau

SEQ ID NO: 3931291 - RNA, 15 nt, Human adenovirus E
ccaacgcuccacgca

SEQ ID NO: 3931292 - RNA, 15 nt, Human adenovirus E
ccaacgugcagacca

SEQ ID NO: 3931293 - RNA, 19 nt, Human adenovirus E
ccaagaauucuugcugaaa

SEQ ID NO: 3931294 - RNA, 15 nt, Human adenovirus E
ccaagcgccagccca

SEQ ID NO: 3931295 - RNA, 16 nt, Human adenovirus E
ccaagcgccagcccaa

SEQ ID NO: 3931296 - RNA, 22 nt, Human adenovirus E
ccaaggccgccgccccucucag

SEQ ID NO: 3931297 - RNA, 23 nt, Human adenovirus E
ccaaggccgccgccccucucagu

SEQ ID NO: 3931298 - RNA, 17 nt, Human adenovirus E
ccacaauuacucacacc

SEQ ID NO: 3931299 - RNA, 13 nt, Human adenovirus E
ccacacagacaac

SEQ ID NO: 3931300 - RNA, 15 nt, Human adenovirus E
ccacagaaguuucau

SEQ ID NO: 3931301 - RNA, 20 nt, Human adenovirus E
ccacagcaacuuccugacca

SEQ ID NO: 3931302 - RNA, 22 nt, Human adenovirus E
ccacagcgacccaugcuccccg

SEQ ID NO: 3931303 - RNA, 16 nt, Human adenovirus E
ccacagcgcgcacccg

SEQ ID NO: 3931304 - RNA, 14 nt, Human adenovirus E
ccgauccuggucga

SEQ ID NO: 3931305 - RNA, 19 nt, Human adenovirus E
ccgcaacucguaccugggc

SEQ ID NO: 3931306 - RNA, 11 nt, Human adenovirus E
ccgcaccugcc

SEQ ID NO: 3931307 - RNA, 18 nt, Human adenovirus E
ccgcauccccaaauucaa

SEQ ID NO: 3931308 - RNA, 22 nt, Human adenovirus E
ccgcaucugcaccucacagcuc

SEQ ID NO: 3931309 - RNA, 13 nt, Human adenovirus E
ccgccccgccgcc

SEQ ID NO: 3931310 - RNA, 16 nt, Human adenovirus E
ccgccgccgcuccguc

SEQ ID NO: 3931311 - RNA, 15 nt, Human adenovirus E
ccgccgcgcaucucc

SEQ ID NO: 3931312 - RNA, 14 nt, Human adenovirus E
ccgccgcuguggag

SEQ ID NO: 3931313 - RNA, 20 nt, Human adenovirus E
ccgccgugagcggggcugga

SEQ ID NO: 3931314 - RNA, 18 nt, Human adenovirus E
ccgccuccacccaucauc

SEQ ID NO: 3931315 - RNA, 16 nt, Human adenovirus E
ccgcgccgcagugggc

SEQ ID NO: 3931316 - RNA, 15 nt, Human adenovirus E
ccgcgcugcccucgg

SEQ ID NO: 3931317 - RNA, 21 nt, Human adenovirus E
ccgcguaauuggcccgccgcc

SEQ ID NO: 3931318 - RNA, 15 nt, Human adenovirus E
ccgcucccuggccug

SEQ ID NO: 3931319 - RNA, 15 nt, Human adenovirus E
ccgcucucugcucaa

SEQ ID NO: 3931320 - RNA, 11 nt, Human adenovirus E
ccgcuguggag

SEQ ID NO: 3931321 - RNA, 14 nt, Human adenovirus E
ccggacgugcagcc

SEQ ID NO: 3931322 - RNA, 16 nt, Human adenovirus E
ccggaugcaggggcgg

SEQ ID NO: 3931323 - RNA, 17 nt, Human adenovirus E
ccggcgcgacuacaucc

SEQ ID NO: 3931324 - RNA, 19 nt, Human adenovirus E
ccggcgcgcuccacggugg

SEQ ID NO: 3931325 - RNA, 16 nt, Human adenovirus E
ccggcggcgcgugcag

SEQ ID NO: 3931326 - RNA, 22 nt, Human adenovirus E
ccggcgucgugcacgcagcagc

SEQ ID NO: 3931327 - RNA, 17 nt, Human adenovirus E
ccgggcggcaggggcgg

SEQ ID NO: 3931328 - RNA, 16 nt, Human adenovirus E
ccgggcuaccgcggca

SEQ ID NO: 3931329 - RNA, 17 nt, Human adenovirus E
ccgucaccuccacagcc

SEQ ID NO: 3931330 - RNA, 13 nt, Human adenovirus E
ccgucgccgcacc

SEQ ID NO: 3931331 - RNA, 13 nt, Human adenovirus E
ccgugcagcagau

SEQ ID NO: 3931332 - RNA, 21 nt, Human adenovirus E
ccguguugcucuacuacaucu

SEQ ID NO: 3931333 - RNA, 22 nt, Human adenovirus E
ccguucaugggcaccuggagcg

SEQ ID NO: 3931334 - RNA, 19 nt, Human adenovirus E
ccguugggcagggagaggg

SEQ ID NO: 3931335 - RNA, 14 nt, Human adenovirus E
ccuaccgcagcugg

SEQ ID NO: 3931336 - RNA, 14 nt, Human adenovirus E
ccuagccgccucca

SEQ ID NO: 3931337 - RNA, 16 nt, Human adenovirus E
ccucaagcccgugacc

SEQ ID NO: 3931338 - RNA, 22 nt, Human adenovirus E
ccucaagcccgugaccuugcag

SEQ ID NO: 3931339 - RNA, 15 nt, Human adenovirus E
ccucagcguggagga

SEQ ID NO: 3931340 - RNA, 19 nt, Human adenovirus E
ccucagggcccggcccacg

SEQ ID NO: 3931341 - RNA, 16 nt, Human adenovirus E
ccuccaccaacgccac

SEQ ID NO: 3931342 - RNA, 15 nt, Human adenovirus E
ccuccacccucccag

SEQ ID NO: 3931343 - RNA, 17 nt, Human adenovirus E
ccuccacuaacaucucu

SEQ ID NO: 3931344 - RNA, 15 nt, Human adenovirus E
ccuccagaacacgcu

SEQ ID NO: 3931345 - RNA, 14 nt, Human adenovirus E
ccucccggaggagg

SEQ ID NO: 3931346 - RNA, 22 nt, Human adenovirus E
ccuccucaggcggcaguggugg

SEQ ID NO: 3931347 - RNA, 22 nt, Human adenovirus E
ccucggccgcguggccuuuggc

SEQ ID NO: 3931348 - RNA, 20 nt, Human adenovirus E
ccucguagaggaaccccgcc

SEQ ID NO: 3931349 - RNA, 12 nt, Human adenovirus E
ccucuauguuua

SEQ ID NO: 3931350 - RNA, 16 nt, Human adenovirus E
ccucugccacaccugg

SEQ ID NO: 3931351 - RNA, 17 nt, Human adenovirus E
ccucuucucgccgcgcg

SEQ ID NO: 3931352 - RNA, 17 nt, Human adenovirus E
ccugacacaccaccaca

SEQ ID NO: 3931353 - RNA, 21 nt, Human adenovirus E
ccugacacaccaccacagcaa

SEQ ID NO: 3931354 - RNA, 16 nt, Human adenovirus E
ccugacuuuggagagu

SEQ ID NO: 3931355 - RNA, 19 nt, Human adenovirus E
ccugagcuccucccucagc

SEQ ID NO: 3931356 - RNA, 20 nt, Human adenovirus E
ccugaguuccuuugacgagg

SEQ ID NO: 3931357 - RNA, 15 nt, Human adenovirus E
ccugcacuggcagcc

SEQ ID NO: 3931358 - RNA, 17 nt, Human adenovirus E
ccugcacuggcagccca

SEQ ID NO: 3931359 - RNA, 14 nt, Human adenovirus E
ccugcaugccaacc

SEQ ID NO: 3931360 - RNA, 15 nt, Human adenovirus E
ccugcgcaaggucga

SEQ ID NO: 3931361 - RNA, 20 nt, Human adenovirus E
ccugcgcaaggucgaggaga

SEQ ID NO: 3931362 - RNA, 11 nt, Human adenovirus E
ccugcgccgcu

SEQ ID NO: 3931363 - RNA, 17 nt, Human adenovirus E
ccugcucgagugccacu

SEQ ID NO: 3931364 - RNA, 15 nt, Human adenovirus E
ccugcugcgccuggc

SEQ ID NO: 3931365 - RNA, 15 nt, Human adenovirus E
ccuggaagacugaug

SEQ ID NO: 3931366 - RNA, 14 nt, Human adenovirus E
ccuggaccacugcc

SEQ ID NO: 3931367 - RNA, 19 nt, Human adenovirus E
ccuggacuaauggaagcua

SEQ ID NO: 3931368 - RNA, 22 nt, Human adenovirus E
ccuggcgccuacggaggggcgg

SEQ ID NO: 3931369 - RNA, 20 nt, Human adenovirus E
ccuggcuccgcgacacggca

SEQ ID NO: 3931370 - RNA, 17 nt, Human adenovirus E
ccuggcugacguccugc

SEQ ID NO: 3931371 - RNA, 16 nt, Human adenovirus E
ccugggcggcgagcac

SEQ ID NO: 3931372 - RNA, 13 nt, Human adenovirus E
ccuggggcgcccu

SEQ ID NO: 3931373 - RNA, 14 nt, Human adenovirus E
ccugguccgggcgc

SEQ ID NO: 3931374 - RNA, 17 nt, Human adenovirus E
ccuggucgaguuggaag

SEQ ID NO: 3931375 - RNA, 22 nt, Human adenovirus E
ccuggucggcguucauccccgg

SEQ ID NO: 3931376 - RNA, 20 nt, Human adenovirus E
ccuguccacccgcucucugc

SEQ ID NO: 3931377 - RNA, 22 nt, Human adenovirus E
ccugugggacgauguggacagc

SEQ ID NO: 3931378 - RNA, 21 nt, Human adenovirus E
ccuuagcuuugacaguacagg

SEQ ID NO: 3931379 - RNA, 16 nt, Human adenovirus E
ccuuccaggaaggcuu

SEQ ID NO: 3931380 - RNA, 20 nt, Human adenovirus E
ccuuccucagcacccagccc

SEQ ID NO: 3931381 - RNA, 13 nt, Human adenovirus E
ccuucgccuccua

SEQ ID NO: 3931382 - RNA, 15 nt, Human adenovirus E
ccuucgucucuucag

SEQ ID NO: 3931383 - RNA, 16 nt, Human adenovirus E
ccuuucaagagccccu

SEQ ID NO: 3931384 - RNA, 17 nt, Human adenovirus E
cgaacuccauggcuugc

SEQ ID NO: 3931385 - RNA, 16 nt, Human adenovirus E
cgaagcguucagggag

SEQ ID NO: 3931386 - RNA, 20 nt, Human adenovirus E
cgacaaaaaucagacccacu

SEQ ID NO: 3931387 - RNA, 18 nt, Human adenovirus E
cgacaggaugcaccgugc

SEQ ID NO: 3931388 - RNA, 18 nt, Human adenovirus E
cgaccucauuuuccccga

SEQ ID NO: 3931389 - RNA, 18 nt, Human adenovirus E
cgacgagcgcaccaccgc

SEQ ID NO: 3931390 - RNA, 18 nt, Human adenovirus E
cgacgagcucggcgguga

SEQ ID NO: 3931391 - RNA, 20 nt, Human adenovirus E
cgacgugaucgaccaggugg

SEQ ID NO: 3931392 - RNA, 16 nt, Human adenovirus E
cgagaaccgccugggg

SEQ ID NO: 3931393 - RNA, 14 nt, Human adenovirus E
cgagaagcagcagc

SEQ ID NO: 3931394 - RNA, 16 nt, Human adenovirus E
cgagacgaugggcagg

SEQ ID NO: 3931395 - RNA, 17 nt, Human adenovirus E
cgagacgaugggcaggc

SEQ ID NO: 3931396 - RNA, 16 nt, Human adenovirus E
cgagagcgugaugcag

SEQ ID NO: 3931397 - RNA, 18 nt, Human adenovirus E
cgagagcgugaugcagca

SEQ ID NO: 3931398 - RNA, 19 nt, Human adenovirus E
cgagcagaaggggggcagg

SEQ ID NO: 3931399 - RNA, 12 nt, Human adenovirus E
cgagcaggccgu

SEQ ID NO: 3931400 - RNA, 21 nt, Human adenovirus E
cgagcaguuauuuuuccucca

SEQ ID NO: 3931401 - RNA, 15 nt, Human adenovirus E
cgagccggggcagcg

SEQ ID NO: 3931402 - RNA, 16 nt, Human adenovirus E
cgagcgcaccaccgcc

SEQ ID NO: 3931403 - RNA, 16 nt, Human adenovirus E
cgagcgccccuugugg

SEQ ID NO: 3931404 - RNA, 18 nt, Human adenovirus E
cgagcgcgagcaaggaca

SEQ ID NO: 3931405 - RNA, 14 nt, Human adenovirus E
cgagcugggcagga

SEQ ID NO: 3931406 - RNA, 17 nt, Human adenovirus E
cgaggaauuucaguggg

SEQ ID NO: 3931407 - RNA, 20 nt, Human adenovirus E
cgaggacgagggcaugcaag

SEQ ID NO: 3931408 - RNA, 13 nt, Human adenovirus E
cgaggaggaggca

SEQ ID NO: 3931409 - RNA, 16 nt, Human adenovirus E
cgaggaggaggcagag

SEQ ID NO: 3931410 - RNA, 21 nt, Human adenovirus E
cgaggaggauguccaagcgca

SEQ ID NO: 3931411 - RNA, 14 nt, Human adenovirus E
cgaggcauacgugc

SEQ ID NO: 3931412 - RNA, 17 nt, Human adenovirus E
cgaggccaucggccagg

SEQ ID NO: 3931413 - RNA, 18 nt, Human adenovirus E
cgaggccaucggccaggc

SEQ ID NO: 3931414 - RNA, 16 nt, Human adenovirus E
cgaggcccuggccacc

SEQ ID NO: 3931415 - RNA, 16 nt, Human adenovirus E
cgagggcaugcaagac

SEQ ID NO: 3931416 - RNA, 18 nt, Human adenovirus E
cgagggggcgaggagccc

SEQ ID NO: 3931417 - RNA, 18 nt, Human adenovirus E
cgaggugccccagagcga

SEQ ID NO: 3931418 - RNA, 15 nt, Human adenovirus E
cgaguaccuggaaga

SEQ ID NO: 3931419 - RNA, 18 nt, Human adenovirus E
cgaguucgccccccggcg

SEQ ID NO: 3931420 - RNA, 21 nt, Human adenovirus E
cgaguugaaccucuucucgcc

SEQ ID NO: 3931421 - RNA, 13 nt, Human adenovirus E
ucucuucagcacu

SEQ ID NO: 3931422 - RNA, 19 nt, Human adenovirus E
ucugccuucccaugguggg

SEQ ID NO: 3931423 - RNA, 20 nt, Human adenovirus E
ucugggugaucuuggcccgg

SEQ ID NO: 3931424 - RNA, 14 nt, Human adenovirus E
ucuucgagggggaa

SEQ ID NO: 3931425 - RNA, 13 nt, Human adenovirus E
ucuuugaggagga

SEQ ID NO: 3931426 - RNA, 18 nt, Human adenovirus E
ugaacauuaaaccaugcu

SEQ ID NO: 3931427 - RNA, 21 nt, Human adenovirus E
ugaacauucugcagagcaucg

SEQ ID NO: 3931428 - RNA, 15 nt, Human adenovirus E
ugaaccugagccagg

SEQ ID NO: 3931429 - RNA, 17 nt, Human adenovirus E
ugaacgccugcugggcc

SEQ ID NO: 3931430 - RNA, 23 nt, Human adenovirus E
ugaagacgccgccgcgcaucucc

SEQ ID NO: 3931431 - RNA, 17 nt, Human adenovirus E
ugaagaugccgggcagg

SEQ ID NO: 3931432 - RNA, 22 nt, Human adenovirus E
ugaagcccacggccgccagcuc

SEQ ID NO: 3931433 - RNA, 17 nt, Human adenovirus E
ugacacuacagaaacug

SEQ ID NO: 3931434 - RNA, 20 nt, Human adenovirus E
ugacccugggccugaugcac

SEQ ID NO: 3931435 - RNA, 14 nt, Human adenovirus E
ugacggcgcagcug

SEQ ID NO: 3931436 - RNA, 15 nt, Human adenovirus E
ugacugacccacugg

SEQ ID NO: 3931437 - RNA, 16 nt, Human adenovirus E
ugagcaaagagauucc

SEQ ID NO: 3931438 - RNA, 18 nt, Human adenovirus E
ugagcagagucaggcugg

SEQ ID NO: 3931439 - RNA, 19 nt, Human adenovirus E
ugagcagagucaggcuggg

SEQ ID NO: 3931440 - RNA, 15 nt, Human adenovirus E
ugagcccgucccggg

SEQ ID NO: 3931441 - RNA, 18 nt, Human adenovirus E
ugagccgcgcccugggcc

SEQ ID NO: 3931442 - RNA, 20 nt, Human adenovirus E
ugagccgcgcccugggccag

SEQ ID NO: 3931443 - RNA, 15 nt, Human adenovirus E
ugagcgaccaggagc

SEQ ID NO: 3931444 - RNA, 23 nt, Human adenovirus E
ugagcgaccaggagcugaugcau

SEQ ID NO: 3931445 - RNA, 16 nt, Human adenovirus E
ugaggccgagccacag

SEQ ID NO: 3931446 - RNA, 17 nt, Human adenovirus E
ugagggagagacagcug

SEQ ID NO: 3931447 - RNA, 11 nt, Human adenovirus E
ugauccuccac

SEQ ID NO: 3931448 - RNA, 21 nt, Human adenovirus E
ugaugucauacuugagcuguc

SEQ ID NO: 3931449 - RNA, 16 nt, Human adenovirus E
ugauuuaccccugcuu

SEQ ID NO: 3931450 - RNA, 20 nt, Human adenovirus E
ugcaacacagaaccaccagg

SEQ ID NO: 3931451 - RNA, 21 nt, Human adenovirus E
ugcaacacagaaccaccaggu

SEQ ID NO: 3931452 - RNA, 20 nt, Human adenovirus E
ugcacaauaucuuugaggag

SEQ ID NO: 3931453 - RNA, 12 nt, Human adenovirus E
ugcaccucacag

SEQ ID NO: 3931454 - RNA, 14 nt, Human adenovirus E
ugcaccucacagcu

SEQ ID NO: 3931455 - RNA, 21 nt, Human adenovirus E
ugcacgagaaccgccuggggc

SEQ ID NO: 3931456 - RNA, 14 nt, Human adenovirus E
ugcacuaccucuuc

SEQ ID NO: 3931457 - RNA, 15 nt, Human adenovirus E
ugcagcaggcgaugg

SEQ ID NO: 3931458 - RNA, 20 nt, Human adenovirus E
ugcagcgaagagaccccggg

SEQ ID NO: 3931459 - RNA, 18 nt, Human adenovirus E
ugcaggagcgcgggcugc

SEQ ID NO: 3931460 - RNA, 23 nt, Human adenovirus E
ugcauagucugcagcgggcccug

SEQ ID NO: 3931461 - RNA, 22 nt, Human adenovirus E
ugcaucucgugcuguacuacgu

SEQ ID NO: 3931462 - RNA, 15 nt, Human adenovirus E
ugcaucuuggccugg

SEQ ID NO: 3931463 - RNA, 18 nt, Human adenovirus E
ugccaacccuucccaccc

SEQ ID NO: 3931464 - RNA, 22 nt, Human adenovirus E
  misc_feature (9)..(9): n is a, c, g, or u
ugccaaccnuacuuuuuccacc

SEQ ID NO: 3931465 - RNA, 14 nt, Human adenovirus E
ugccagccccgauu

SEQ ID NO: 3931466 - RNA, 20 nt, Human adenovirus E
ugccagcugaguuuucagcc

SEQ ID NO: 3931467 - RNA, 19 nt, Human adenovirus E
ugccaucacaccuuccacc

SEQ ID NO: 3931468 - RNA, 20 nt, Human adenovirus E
ugccaucacaccuuccaccu

SEQ ID NO: 3931469 - RNA, 19 nt, Human adenovirus E
ugcccaacgugaacgaguu

SEQ ID NO: 3931470 - RNA, 19 nt, Human adenovirus E
ugcccaagcagaaccuguu

SEQ ID NO: 3931471 - RNA, 19 nt, Human adenovirus E
ugcccccgccccagcagca

SEQ ID NO: 3931472 - RNA, 15 nt, Human adenovirus E
ugccccggggccagg

SEQ ID NO: 3931473 - RNA, 21 nt, Human adenovirus E
ugccccuacgucuacaaggcc

SEQ ID NO: 3931474 - RNA, 15 nt, Human adenovirus E
ugcccgaggcccugg

SEQ ID NO: 3931475 - RNA, 20 nt, Human adenovirus E
ugcccgucuacuccaagagc

SEQ ID NO: 3931476 - RNA, 21 nt, Human adenovirus E
ugcccucggacuucgugccgc

SEQ ID NO: 3931477 - RNA, 18 nt, Human adenovirus E
ugcccucggccucggugc

SEQ ID NO: 3931478 - RNA, 17 nt, Human adenovirus E
ugcccuucgcccuagcc

SEQ ID NO: 3931479 - RNA, 21 nt, Human adenovirus E
ugccugaacgccugcugggcc

SEQ ID NO: 3931480 - RNA, 18 nt, Human adenovirus E
ugcgcaacggccugcccg

SEQ ID NO: 3931481 - RNA, 12 nt, Human adenovirus E
ugcgcagggagg

SEQ ID NO: 3931482 - RNA, 13 nt, Human adenovirus E
ugcgccaggccug

SEQ ID NO: 3931483 - RNA, 14 nt, Human adenovirus E
ugcgccaggccugc

SEQ ID NO: 3931484 - RNA, 16 nt, Human adenovirus E
ugcgccgcuucuucgc

SEQ ID NO: 3931485 - RNA, 21 nt, Human adenovirus E
ugcgcuccuggacgcugcuca

SEQ ID NO: 3931486 - RNA, 14 nt, Human adenovirus E
ugcggaugaagcac

SEQ ID NO: 3931487 - RNA, 18 nt, Human adenovirus E
ugcggcgcggccuggacc

SEQ ID NO: 3931488 - RNA, 19 nt, Human adenovirus E
ugcggcgguacaccucgcc

SEQ ID NO: 3931489 - RNA, 15 nt, Human adenovirus E
ugcgggcggcgcugc

SEQ ID NO: 3931490 - RNA, 17 nt, Human adenovirus E
ugcggggggagaugagg

SEQ ID NO: 3931491 - RNA, 23 nt, Human adenovirus E
ugcgucucgggacccugccauca

SEQ ID NO: 3931492 - RNA, 21 nt, Human adenovirus E
ugcuacagaaagcacagacug

SEQ ID NO: 3931493 - RNA, 17 nt, Human adenovirus E
ugcuaccuauaccuccc

SEQ ID NO: 3931494 - RNA, 18 nt, Human adenovirus E
ugcuagaugcaacaacaa

SEQ ID NO: 3931495 - RNA, 15 nt, Human adenovirus E
ugcuaguccccagag

SEQ ID NO: 3931496 - RNA, 18 nt, Human adenovirus E
ugcucaggggguccgggu

SEQ ID NO: 3931497 - RNA, 14 nt, Human adenovirus E
ugcucgagugccac

SEQ ID NO: 3931498 - RNA, 18 nt, Human adenovirus E
ugcucgggcaucagcugg

SEQ ID NO: 3931499 - RNA, 16 nt, Human adenovirus E
ugcucuauacgggcaa

SEQ ID NO: 3931500 - RNA, 13 nt, Human adenovirus E
ugcucuuugccuu

SEQ ID NO: 3931501 - RNA, 17 nt, Human adenovirus E
ugcugcacgagcuguac

SEQ ID NO: 3931502 - RNA, 14 nt, Human adenovirus E
ugcuguaggauuca

SEQ ID NO: 3931503 - RNA, 15 nt, Human adenovirus E
uggaacagcaccaca

SEQ ID NO: 3931504 - RNA, 21 nt, Human adenovirus E
uggaagagggcgaggggcugg

SEQ ID NO: 3931505 - RNA, 24 nt, Human adenovirus E
uggaaggcgacaacgcgcggcugg

SEQ ID NO: 3931506 - RNA, 22 nt, Human adenovirus E
uggaauacaccacccucucccc

SEQ ID NO: 3931507 - RNA, 19 nt, Human adenovirus E
uggacaacaccugauccau

SEQ ID NO: 3931508 - RNA, 22 nt, Human adenovirus E
uggaccacggcaaccccacgcc

SEQ ID NO: 3931509 - RNA, 21 nt, Human adenovirus E
uggacguuuagagccucggga

SEQ ID NO: 3931510 - RNA, 23 nt, Human adenovirus E
uggacuacuugcaucgggcggcc

SEQ ID NO: 3931511 - RNA, 12 nt, Human adenovirus E
uggacugaggau

SEQ ID NO: 3931512 - RNA, 22 nt, Human adenovirus E
uggagaguucguccucgcagcc

SEQ ID NO: 3931513 - RNA, 15 nt, Human adenovirus E
uggagccacugcuac

SEQ ID NO: 3931514 - RNA, 16 nt, Human adenovirus E
uggagcuaccagcccc

SEQ ID NO: 3931515 - RNA, 18 nt, Human adenovirus E
uggaggaauggcuguuga

SEQ ID NO: 3931516 - RNA, 17 nt, Human adenovirus E
uggaucuggccuuagcu

SEQ ID NO: 3931517 - RNA, 15 nt, Human adenovirus E
uggaucuuuuccagg

SEQ ID NO: 3931518 - RNA, 13 nt, Human adenovirus E
uggcagcccagcc

SEQ ID NO: 3931519 - RNA, 20 nt, Human adenovirus E
uggcaugcgaguuggaggag

SEQ ID NO: 3931520 - RNA, 18 nt, Human adenovirus E
uggccaacuaccuggccu

SEQ ID NO: 3931521 - RNA, 16 nt, Human adenovirus E
uggccagaucguccag

SEQ ID NO: 3931522 - RNA, 19 nt, Human adenovirus E
uggccgccggugccgccca

SEQ ID NO: 3931523 - RNA, 19 nt, Human adenovirus E
uggccuuggaagagggcga

SEQ ID NO: 3931524 - RNA, 22 nt, Human adenovirus E
uggcggcgauguugagcugcac

SEQ ID NO: 3931525 - RNA, 23 nt, Human adenovirus E
uggcggcggcggcgaugcagccc

SEQ ID NO: 3931526 - RNA, 22 nt, Human adenovirus E
uggcuuccagcaaagccuccac

SEQ ID NO: 3931527 - RNA, 19 nt, Human adenovirus E
ugggcauagucgcgccgcg

SEQ ID NO: 3931528 - RNA, 20 nt, Human adenovirus E
ugggccuguuccugaugcag

SEQ ID NO: 3931529 - RNA, 17 nt, Human adenovirus E
ugggccuuuggaagaug

SEQ ID NO: 3931530 - RNA, 19 nt, Human adenovirus E
ugggcgugcagaccgugga

SEQ ID NO: 3931531 - RNA, 14 nt, Human adenovirus E
uggggaagaacugg

SEQ ID NO: 3931532 - RNA, 21 nt, Human adenovirus E
uggggcaguuucuugagcucc

SEQ ID NO: 3931533 - RNA, 13 nt, Human adenovirus E
uggggcggccagc

SEQ ID NO: 3931534 - RNA, 17 nt, Human adenovirus E
ugggugcgcgacgccgc

SEQ ID NO: 3931535 - RNA, 18 nt, Human adenovirus E
uggucagcgacgagcagc

SEQ ID NO: 3931536 - RNA, 16 nt, Human adenovirus E
uggucuccaugagcuc

SEQ ID NO: 3931537 - RNA, 19 nt, Human adenovirus E
cagcggaaugccgcggugc

SEQ ID NO: 3931538 - RNA, 16 nt, Human adenovirus E
cagcguggaggagcuc

SEQ ID NO: 3931539 - RNA, 18 nt, Human adenovirus E
cagcguggaggagcucag

SEQ ID NO: 3931540 - RNA, 13 nt, Human adenovirus E
cagcucaacagcu

SEQ ID NO: 3931541 - RNA, 17 nt, Human adenovirus E
cagcuggcccgguggcu

SEQ ID NO: 3931542 - RNA, 16 nt, Human adenovirus E
cagcuguuccuggugg

SEQ ID NO: 3931543 - RNA, 16 nt, Human adenovirus E
cagcuugcccucggcc

SEQ ID NO: 3931544 - RNA, 17 nt, Human adenovirus E
cagcuugcccucggccu

SEQ ID NO: 3931545 - RNA, 13 nt, Human adenovirus E
caggaagcagaga

SEQ ID NO: 3931546 - RNA, 20 nt, Human adenovirus E
caggacccgguagagguggg

SEQ ID NO: 3931547 - RNA, 22 nt, Human adenovirus E
caggagcgcgggcugccgcugu

SEQ ID NO: 3931548 - RNA, 20 nt, Human adenovirus E
caggagcggcgaggagcccg

SEQ ID NO: 3931549 - RNA, 15 nt, Human adenovirus E
caggaggcgcucucc

SEQ ID NO: 3931550 - RNA, 14 nt, Human adenovirus E
caggauucgagcag

SEQ ID NO: 3931551 - RNA, 21 nt, Human adenovirus E
caggcacacgcacuaccacca

SEQ ID NO: 3931552 - RNA, 13 nt, Human adenovirus E
caggcagaggagg

SEQ ID NO: 3931553 - RNA, 16 nt, Human adenovirus E
caggcagcggggacag

SEQ ID NO: 3931554 - RNA, 16 nt, Human adenovirus E
caggccgaaguccagc

SEQ ID NO: 3931555 - RNA, 14 nt, Human adenovirus E
caggccgugcagcg

SEQ ID NO: 3931556 - RNA, 16 nt, Human adenovirus E
caggcucauccggcug

SEQ ID NO: 3931557 - RNA, 22 nt, Human adenovirus E
caggcuuucaagaacuugcagg

SEQ ID NO: 3931558 - RNA, 10 nt, Human adenovirus E
cagggagaua

SEQ ID NO: 3931559 - RNA, 22 nt, Human adenovirus E
cagggagaugaaacccuccggg

SEQ ID NO: 3931560 - RNA, 15 nt, Human adenovirus E
cagggauaggagcuc

SEQ ID NO: 3931561 - RNA, 20 nt, Human adenovirus E
cagggauaggagcuccugga

SEQ ID NO: 3931562 - RNA, 21 nt, Human adenovirus E
cagggcaauccucgcacagaa

SEQ ID NO: 3931563 - RNA, 16 nt, Human adenovirus E
cagggcaugggauggg

SEQ ID NO: 3931564 - RNA, 17 nt, Human adenovirus E
cagggcaugggaugggu

SEQ ID NO: 3931565 - RNA, 13 nt, Human adenovirus E
cagggccagcacc

SEQ ID NO: 3931566 - RNA, 16 nt, Human adenovirus E
cagggcccggcccacg

SEQ ID NO: 3931567 - RNA, 15 nt, Human adenovirus E
cagggcgcccagcag

SEQ ID NO: 3931568 - RNA, 15 nt, Human adenovirus E
cagggcuugcagacc

SEQ ID NO: 3931569 - RNA, 16 nt, Human adenovirus E
caggggcgcagggcau

SEQ ID NO: 3931570 - RNA, 14 nt, Human adenovirus E
caggucaucgcgcc

SEQ ID NO: 3931571 - RNA, 21 nt, Human adenovirus E
caggugcugccgaccgcggcg

SEQ ID NO: 3931572 - RNA, 15 nt, Human adenovirus E
cagguggacugagga

SEQ ID NO: 3931573 - RNA, 19 nt, Human adenovirus E
caguacgcgcucagcaccg

SEQ ID NO: 3931574 - RNA, 12 nt, Human adenovirus E
caguaguacaga

SEQ ID NO: 3931575 - RNA, 16 nt, Human adenovirus E
caguaguacagaaaca

SEQ ID NO: 3931576 - RNA, 18 nt, Human adenovirus E
caguauccgcagcagcga

SEQ ID NO: 3931577 - RNA, 20 nt, Human adenovirus E
caguauccggggaguccagc

SEQ ID NO: 3931578 - RNA, 13 nt, Human adenovirus E
cagucucuggagc

SEQ ID NO: 3931579 - RNA, 19 nt, Human adenovirus E
cagucuggaggaagacgag

SEQ ID NO: 3931580 - RNA, 14 nt, Human adenovirus E
caguggcagcggcc

SEQ ID NO: 3931581 - RNA, 14 nt, Human adenovirus E
caguuacaccugcc

SEQ ID NO: 3931582 - RNA, 22 nt, Human adenovirus E
caguuauuuuuccuccacccuc

SEQ ID NO: 3931583 - RNA, 15 nt, Human adenovirus E
caguuuuuccaacaa

SEQ ID NO: 3931584 - RNA, 16 nt, Human adenovirus E
cauagcaggggcgcag

SEQ ID NO: 3931585 - RNA, 14 nt, Human adenovirus E
cauauccucuccga

SEQ ID NO: 3931586 - RNA, 18 nt, Human adenovirus E
caucaacgggguggugga

SEQ ID NO: 3931587 - RNA, 13 nt, Human adenovirus E
caucaggccccgc

SEQ ID NO: 3931588 - RNA, 18 nt, Human adenovirus E
caucaggccccgcagcag

SEQ ID NO: 3931589 - RNA, 17 nt, Human adenovirus E
caucagggccgggugcu

SEQ ID NO: 3931590 - RNA, 21 nt, Human adenovirus E
cauccccgcgcuccuggaugu

SEQ ID NO: 3931591 - RNA, 16 nt, Human adenovirus E
cauccgcccaaggccg

SEQ ID NO: 3931592 - RNA, 19 nt, Human adenovirus E
cauccuggccguguugcuc

SEQ ID NO: 3931593 - RNA, 14 nt, Human adenovirus E
caucgaccugauga

SEQ ID NO: 3931594 - RNA, 20 nt, Human adenovirus E
caucgagauugaccugggcu

SEQ ID NO: 3931595 - RNA, 17 nt, Human adenovirus E
caucggcacucuccagu

SEQ ID NO: 3931596 - RNA, 12 nt, Human adenovirus E
caucggccaggc

SEQ ID NO: 3931597 - RNA, 14 nt, Human adenovirus E
caucgugcagaacc

SEQ ID NO: 3931598 - RNA, 17 nt, Human adenovirus E
caucguggugcaggagc

SEQ ID NO: 3931599 - RNA, 13 nt, Human adenovirus E
caucuccaacacg

SEQ ID NO: 3931600 - RNA, 20 nt, Human adenovirus E
caucucuucuacuuccuccu

SEQ ID NO: 3931601 - RNA, 14 nt, Human adenovirus E
caucuuccagcaga

SEQ ID NO: 3931602 - RNA, 19 nt, Human adenovirus E
caugagcgcggucauggac

SEQ ID NO: 3931603 - RNA, 23 nt, Human adenovirus E
caugauuggcauuauuguugcug

SEQ ID NO: 3931604 - RNA, 17 nt, Human adenovirus E
caugccgcagaugucgu

SEQ ID NO: 3931605 - RNA, 17 nt, Human adenovirus E
caugcgcaugacccuga

SEQ ID NO: 3931606 - RNA, 20 nt, Human adenovirus E
caugcggaucucgcucaggu

SEQ ID NO: 3931607 - RNA, 19 nt, Human adenovirus E
cauggaauacaccacccuc

SEQ ID NO: 3931608 - RNA, 17 nt, Human adenovirus E
cauggaccaggugcuca

SEQ ID NO: 3931609 - RNA, 19 nt, Human adenovirus E
cauggcuugcagggucccg

SEQ ID NO: 3931610 - RNA, 17 nt, Human adenovirus E
caugguggcgcugaacg

SEQ ID NO: 3931611 - RNA, 16 nt, Human adenovirus E
caugguggucaggguc

SEQ ID NO: 3931612 - RNA, 18 nt, Human adenovirus E
cauguacgaggaucugga

SEQ ID NO: 3931613 - RNA, 17 nt, Human adenovirus E
cauguagaacugguuga

SEQ ID NO: 3931614 - RNA, 18 nt, Human adenovirus E
cauguggagcuaccagcc

SEQ ID NO: 3931615 - RNA, 22 nt, Human adenovirus E
cauguggcgguucaccaccucc

SEQ ID NO: 3931616 - RNA, 16 nt, Human adenovirus E
cauuacacagacaacc

SEQ ID NO: 3931617 - RNA, 19 nt, Human adenovirus E
cauuaccacacagacaacc

SEQ ID NO: 3931618 - RNA, 15 nt, Human adenovirus E
  misc_feature (6)..(6): n is a, c, g, or u
cauuanuccagcaga

SEQ ID NO: 3931619 - RNA, 16 nt, Human adenovirus E
cauuugagcuggaggg

SEQ ID NO: 3931620 - RNA, 14 nt, Human adenovirus E
ccaacaaaugccag

SEQ ID NO: 3931621 - RNA, 13 nt, Human adenovirus E
ccaaccgcacccg

SEQ ID NO: 3931622 - RNA, 19 nt, Human adenovirus E
ccaaccgcacccgcgccga

SEQ ID NO: 3931623 - RNA, 13 nt, Human adenovirus E
ccaacgugcagac

SEQ ID NO: 3931624 - RNA, 20 nt, Human adenovirus E
ccaacgugcagaccaaccug

SEQ ID NO: 3931625 - RNA, 14 nt, Human adenovirus E
ccaacguggagcug

SEQ ID NO: 3931626 - RNA, 15 nt, Human adenovirus E
ccaacguggagcuga

SEQ ID NO: 3931627 - RNA, 23 nt, Human adenovirus E
ccaacguggagcugaccaaccug

SEQ ID NO: 3931628 - RNA, 20 nt, Human adenovirus E
ccaagaacagccagagcagg

SEQ ID NO: 3931629 - RNA, 17 nt, Human adenovirus E
ccaagaagaggcagcag

SEQ ID NO: 3931630 - RNA, 15 nt, Human adenovirus E
ccaaggccgagcugu

SEQ ID NO: 3931631 - RNA, 21 nt, Human adenovirus E
ccaaugacggguuccuguggg

SEQ ID NO: 3931632 - RNA, 22 nt, Human adenovirus E
ccaauugcaagccauccagaaa

SEQ ID NO: 3931633 - RNA, 15 nt, Human adenovirus E
ccacaccacagcuac

SEQ ID NO: 3931634 - RNA, 18 nt, Human adenovirus E
ccacagaaguuucauggu

SEQ ID NO: 3931635 - RNA, 15 nt, Human adenovirus E
ccacagcaaccucag

SEQ ID NO: 3931636 - RNA, 21 nt, Human adenovirus E
ccacagcaaccucaggcacac

SEQ ID NO: 3931637 - RNA, 17 nt, Human adenovirus E
ccacagggccagcaccg

SEQ ID NO: 3931638 - RNA, 20 nt, Human adenovirus E
ccaccacagcaaccucaggc

SEQ ID NO: 3931639 - RNA, 20 nt, Human adenovirus E
ccaccacuacagccuaggcc

SEQ ID NO: 3931640 - RNA, 16 nt, Human adenovirus E
ccaccccacccaguga

SEQ ID NO: 3931641 - RNA, 13 nt, Human adenovirus E
ccaccccugccgc

SEQ ID NO: 3931642 - RNA, 14 nt, Human adenovirus E
ccacccuccaccgc

SEQ ID NO: 3931643 - RNA, 15 nt, Human adenovirus E
ccacccucgcucugg

SEQ ID NO: 3931644 - RNA, 21 nt, Human adenovirus E
ccaccgcgaguccaaccuggg

SEQ ID NO: 3931645 - RNA, 16 nt, Human adenovirus E
ccaccguggugcagaa

SEQ ID NO: 3931646 - RNA, 13 nt, Human adenovirus E
ccaccucagcuca

SEQ ID NO: 3931647 - RNA, 14 nt, Human adenovirus E
ccaccucagcucaa

SEQ ID NO: 3931648 - RNA, 22 nt, Human adenovirus E
ccaccugggcgagguugagcuc

SEQ ID NO: 3931649 - RNA, 20 nt, Human adenovirus E
ccacgccccgcaaucaccuc

SEQ ID NO: 3931650 - RNA, 19 nt, Human adenovirus E
ccacgcgcacauccagaaa

SEQ ID NO: 3931651 - RNA, 22 nt, Human adenovirus E
ccacggcaaccccacgccgagc

SEQ ID NO: 3931652 - RNA, 15 nt, Human adenovirus E
ccacggccagggcgg

SEQ ID NO: 3931653 - RNA, 14 nt, Human adenovirus E
ccacggcccucagc

SEQ ID NO: 3931654 - RNA, 17 nt, Human adenovirus E
ccacgguggcuuccagc

SEQ ID NO: 3931655 - RNA, 19 nt, Human adenovirus E
ccacgguggcuuccagcaa

SEQ ID NO: 3931656 - RNA, 13 nt, Human adenovirus E
cggcagugguggc

SEQ ID NO: 3931657 - RNA, 14 nt, Human adenovirus E
cggcaucucgcuga

SEQ ID NO: 3931658 - RNA, 21 nt, Human adenovirus E
cggcauggcccgcgggcaggg

SEQ ID NO: 3931659 - RNA, 23 nt, Human adenovirus E
cggcauugcuuccguggcggugc

SEQ ID NO: 3931660 - RNA, 20 nt, Human adenovirus E
cggcauugucggugugcuuu

SEQ ID NO: 3931661 - RNA, 18 nt, Human adenovirus E
cggccaucgccagcaugu

SEQ ID NO: 3931662 - RNA, 17 nt, Human adenovirus E
cggcccugcggugguga

SEQ ID NO: 3931663 - RNA, 17 nt, Human adenovirus E
cggccuuguaggcgcag

SEQ ID NO: 3931664 - RNA, 16 nt, Human adenovirus E
cggcgacgaggccggc

SEQ ID NO: 3931665 - RNA, 18 nt, Human adenovirus E
cggcgacuaccuccaccu

SEQ ID NO: 3931666 - RNA, 14 nt, Human adenovirus E
cggcgaggagcccg

SEQ ID NO: 3931667 - RNA, 19 nt, Human adenovirus E
cggcgagggccugcucgag

SEQ ID NO: 3931668 - RNA, 14 nt, Human adenovirus E
cggcgaugcagccc

SEQ ID NO: 3931669 - RNA, 18 nt, Human adenovirus E
cggcgauguugagcugca

SEQ ID NO: 3931670 - RNA, 22 nt, Human adenovirus E
cggcgcgagcugagcgaccagg

SEQ ID NO: 3931671 - RNA, 14 nt, Human adenovirus E
cggcgcugcagagc

SEQ ID NO: 3931672 - RNA, 12 nt, Human adenovirus E
cggcggagauga

SEQ ID NO: 3931673 - RNA, 15 nt, Human adenovirus E
cggcggcagcaggug

SEQ ID NO: 3931674 - RNA, 13 nt, Human adenovirus E
cggcggccugggc

SEQ ID NO: 3931675 - RNA, 17 nt, Human adenovirus E
cggcggcgaugcagccc

SEQ ID NO: 3931676 - RNA, 15 nt, Human adenovirus E
cggcggcggcagcgg

SEQ ID NO: 3931677 - RNA, 19 nt, Human adenovirus E
cggcggugcccgaggccgc

SEQ ID NO: 3931678 - RNA, 14 nt, Human adenovirus E
cggcucccccggcc

SEQ ID NO: 3931679 - RNA, 23 nt, Human adenovirus E
cggcucucggccauccuggaggc

SEQ ID NO: 3931680 - RNA, 14 nt, Human adenovirus E
cggcuucccccagg

SEQ ID NO: 3931681 - RNA, 16 nt, Human adenovirus E
cgggacccugccgcug

SEQ ID NO: 3931682 - RNA, 23 nt, Human adenovirus E
cgggacccugccgcugcgcagca

SEQ ID NO: 3931683 - RNA, 15 nt, Human adenovirus E
cgggcaucagcugga

SEQ ID NO: 3931684 - RNA, 15 nt, Human adenovirus E
cgggcgcgcaugacc

SEQ ID NO: 3931685 - RNA, 20 nt, Human adenovirus E
cgggcggcgcugcagagcca

SEQ ID NO: 3931686 - RNA, 15 nt, Human adenovirus E
cucaggcggcagugg

SEQ ID NO: 3931687 - RNA, 21 nt, Human adenovirus E
cucaggcuccucugauaagca

SEQ ID NO: 3931688 - RNA, 16 nt, Human adenovirus E
cucagguugucaguuu

SEQ ID NO: 3931689 - RNA, 22 nt, Human adenovirus E
cucaugcaucucuucagcacuc

SEQ ID NO: 3931690 - RNA, 17 nt, Human adenovirus E
cuccaacguggagcuga

SEQ ID NO: 3931691 - RNA, 19 nt, Human adenovirus E
cuccaagagcuucuucaac

SEQ ID NO: 3931692 - RNA, 14 nt, Human adenovirus E
cuccacccucccag

SEQ ID NO: 3931693 - RNA, 17 nt, Human adenovirus E
cuccacgagccagguga

SEQ ID NO: 3931694 - RNA, 23 nt, Human adenovirus E
cuccacgcaacaccccgugcgcg

SEQ ID NO: 3931695 - RNA, 22 nt, Human adenovirus E
cuccacgucgagguccucggcg

SEQ ID NO: 3931696 - RNA, 17 nt, Human adenovirus E
cuccacguuccacacag

SEQ ID NO: 3931697 - RNA, 22 nt, Human adenovirus E
  misc_feature (9)..(9): n is a, c, g, or u
cuccagcunuuccaacccuucc

SEQ ID NO: 3931698 - RNA, 20 nt, Human adenovirus E
cuccagugccuucucuagca

SEQ ID NO: 3931699 - RNA, 15 nt, Human adenovirus E
cuccauugcagggcc

SEQ ID NO: 3931700 - RNA, 16 nt, Human adenovirus E
cucccccggccacuac

SEQ ID NO: 3931701 - RNA, 15 nt, Human adenovirus E
cucccgccugaaccu

SEQ ID NO: 3931702 - RNA, 14 nt, Human adenovirus E
cucccggaggaggg

SEQ ID NO: 3931703 - RNA, 21 nt, Human adenovirus E
cuccgagacgaaagcccgggu

SEQ ID NO: 3931704 - RNA, 18 nt, Human adenovirus E
cuccgaggagggcaagcc

SEQ ID NO: 3931705 - RNA, 24 nt, Human adenovirus E
cuccggcucccccggccacuaccc

SEQ ID NO: 3931706 - RNA, 17 nt, Human adenovirus E
cuccgggcacucccgca

SEQ ID NO: 3931707 - RNA, 14 nt, Human adenovirus E
cuccugcacaggca

SEQ ID NO: 3931708 - RNA, 17 nt, Human adenovirus E
cuccugcacaggcagca

SEQ ID NO: 3931709 - RNA, 13 nt, Human adenovirus E
cuccuggaccugg

SEQ ID NO: 3931710 - RNA, 20 nt, Human adenovirus E
cuccugguccugugaugugu

SEQ ID NO: 3931711 - RNA, 14 nt, Human adenovirus E
cuccuuacgugccc

SEQ ID NO: 3931712 - RNA, 17 nt, Human adenovirus E
cucgacucccaccugcu

SEQ ID NO: 3931713 - RNA, 19 nt, Human adenovirus E
cucgagugccacugccgcu

SEQ ID NO: 3931714 - RNA, 20 nt, Human adenovirus E
cucgaucaugugcuccuucu

SEQ ID NO: 3931715 - RNA, 18 nt, Human adenovirus E
cucgccaucugcccccac

SEQ ID NO: 3931716 - RNA, 19 nt, Human adenovirus E
cucgccgcgcgugcccccc

SEQ ID NO: 3931717 - RNA, 21 nt, Human adenovirus E
cucgcgcagagcgcccuccac

SEQ ID NO: 3931718 - RNA, 14 nt, Human adenovirus E
cucgcgcuucugcu

SEQ ID NO: 3931719 - RNA, 21 nt, Human adenovirus E
cucgcgguggggcggccagcu

SEQ ID NO: 3931720 - RNA, 19 nt, Human adenovirus E
cuguggggcgugcaggccc

SEQ ID NO: 3931721 - RNA, 14 nt, Human adenovirus E
cugugucugaaccc

SEQ ID NO: 3931722 - RNA, 15 nt, Human adenovirus E
cuguuccugaugcag

SEQ ID NO: 3931723 - RNA, 15 nt, Human adenovirus E
cuuaacauggaucac

SEQ ID NO: 3931724 - RNA, 21 nt, Human adenovirus E
cuuaaccgccccgccgcccag

SEQ ID NO: 3931725 - RNA, 15 nt, Human adenovirus E
cuuaccauugucaau

SEQ ID NO: 3931726 - RNA, 14 nt, Human adenovirus E
cuuaccgagcagca

SEQ ID NO: 3931727 - RNA, 18 nt, Human adenovirus E
cuuagcgcuagcagccgc

SEQ ID NO: 3931728 - RNA, 21 nt, Human adenovirus E
cuuaucaccuucuuccaguuc

SEQ ID NO: 3931729 - RNA, 16 nt, Human adenovirus E
cuucacccccacggag

SEQ ID NO: 3931730 - RNA, 21 nt, Human adenovirus E
cuucacccccacggaggccag

SEQ ID NO: 3931731 - RNA, 15 nt, Human adenovirus E
cuucacgccucguca

SEQ ID NO: 3931732 - RNA, 19 nt, Human adenovirus E
cuucacgccucgucaggcc

SEQ ID NO: 3931733 - RNA, 18 nt, Human adenovirus E
cuuccagauaacuggaca

SEQ ID NO: 3931734 - RNA, 20 nt, Human adenovirus E
cuuccagauaacuggacaga

SEQ ID NO: 3931735 - RNA, 23 nt, Human adenovirus E
cuuccagauaacuggacagaaaa

SEQ ID NO: 3931736 - RNA, 16 nt, Human adenovirus E
cuuccauucggggaag

SEQ ID NO: 3931737 - RNA, 15 nt, Human adenovirus E
cuucccccaggaugc

SEQ ID NO: 3931738 - RNA, 19 nt, Human adenovirus E
cuuccgcgagacgcccagg

SEQ ID NO: 3931739 - RNA, 17 nt, Human adenovirus E
cuuccguggcggugcag

SEQ ID NO: 3931740 - RNA, 19 nt, Human adenovirus E
cuucgagggucugggcagc

SEQ ID NO: 3931741 - RNA, 19 nt, Human adenovirus E
cuucgcgauguugaugugu

SEQ ID NO: 3931742 - RNA, 18 nt, Human adenovirus E
cuucggaucuucagccag

SEQ ID NO: 3931743 - RNA, 17 nt, Human adenovirus E
cuucucccaggccgaga

SEQ ID NO: 3931744 - RNA, 14 nt, Human adenovirus E
cuucuuccuccucc

SEQ ID NO: 3931745 - RNA, 13 nt, Human adenovirus E
cuugagcuguccc

SEQ ID NO: 3931746 - RNA, 19 nt, Human adenovirus E
cuugcacgagaaccgccug

SEQ ID NO: 3931747 - RNA, 23 nt, Human adenovirus E
cuugccauucgcgcacggccagc

SEQ ID NO: 3931748 - RNA, 24 nt, Human adenovirus E
cuugcgcaaguucgugcccgagga

SEQ ID NO: 3931749 - RNA, 22 nt, Human adenovirus E
cuugcugcuauagaaggcuuua

SEQ ID NO: 3931750 - RNA, 16 nt, Human adenovirus E
cuugggggcgaggaag

SEQ ID NO: 3931751 - RNA, 22 nt, Human adenovirus E
cuuuagacagcagccccaggcc

SEQ ID NO: 3931752 - RNA, 16 nt, Human adenovirus E
cuuucauauccucucc

SEQ ID NO: 3931753 - RNA, 13 nt, Human adenovirus E
cuuugaggaggag

SEQ ID NO: 3931754 - RNA, 21 nt, Human adenovirus E
cuuuggaagauguugaagugg

SEQ ID NO: 3931755 - RNA, 18 nt, Human adenovirus E
cuuuugguucucugcuac

SEQ ID NO: 3931756 - RNA, 17 nt, Human adenovirus E
gaaaaauccuccaggug

SEQ ID NO: 3931757 - RNA, 13 nt, Human adenovirus E
gaaaauaacagcc

SEQ ID NO: 3931758 - RNA, 20 nt, Human adenovirus E
gaaacagguguugaugaugc

SEQ ID NO: 3931759 - RNA, 14 nt, Human adenovirus E
gaaagagcagaacu

SEQ ID NO: 3931760 - RNA, 17 nt, Human adenovirus E
gagaugcaauugaaagc

SEQ ID NO: 3931761 - RNA, 21 nt, Human adenovirus E
gagaugcgcgcggcccgguuc

SEQ ID NO: 3931762 - RNA, 14 nt, Human adenovirus E
gagauugaccuggg

SEQ ID NO: 3931763 - RNA, 13 nt, Human adenovirus E
gagcaaggacaga

SEQ ID NO: 3931764 - RNA, 17 nt, Human adenovirus E
gagcagaccgugaagga

SEQ ID NO: 3931765 - RNA, 14 nt, Human adenovirus E
gagcagaccuacca

SEQ ID NO: 3931766 - RNA, 13 nt, Human adenovirus E
gagcagcagcaca

SEQ ID NO: 3931767 - RNA, 21 nt, Human adenovirus E
gagcagucucuggagcgggcu

SEQ ID NO: 3931768 - RNA, 20 nt, Human adenovirus E
gagcauugccaaaugcaaga

SEQ ID NO: 3931769 - RNA, 16 nt, Human adenovirus E
gagcccaacccgcgcc

SEQ ID NO: 3931770 - RNA, 15 nt, Human adenovirus E
gagccccgggcccag

SEQ ID NO: 3931771 - RNA, 24 nt, Human adenovirus E
gagcccgaggagaugcgcgcggcc

SEQ ID NO: 3931772 - RNA, 15 nt, Human adenovirus E
gagcccgcgcgggag

SEQ ID NO: 3931773 - RNA, 23 nt, Human adenovirus E
gagccgccucagcaaccugcugg

SEQ ID NO: 3931774 - RNA, 21 nt, Human adenovirus E
gagccgcgcccugggccagga

SEQ ID NO: 3931775 - RNA, 21 nt, Human adenovirus E
gagccuuguugcgcagggcca

SEQ ID NO: 3931776 - RNA, 19 nt, Human adenovirus E
gagcgccagcaggcggcgc

SEQ ID NO: 3931777 - RNA, 15 nt, Human adenovirus E
gagcgcgggcugccg

SEQ ID NO: 3931778 - RNA, 16 nt, Human adenovirus E
gagcuccagcuccagu

SEQ ID NO: 3931779 - RNA, 16 nt, Human adenovirus E
gagcucgacgagccgg

SEQ ID NO: 3931780 - RNA, 17 nt, Human adenovirus E
gagcugcccgaaggcaa

SEQ ID NO: 3931781 - RNA, 19 nt, Human adenovirus E
gagcuggagugccugcgcc

SEQ ID NO: 3931782 - RNA, 21 nt, Human adenovirus E
gagcuugggggcgaggaagac

SEQ ID NO: 3931783 - RNA, 23 nt, Human adenovirus E
gagcuugggggcgaggaagacgg

SEQ ID NO: 3931784 - RNA, 20 nt, Human adenovirus E
gaggaacaacaagcauggag

SEQ ID NO: 3931785 - RNA, 19 nt, Human adenovirus E
gaggaaccccgcccacucc

SEQ ID NO: 3931786 - RNA, 14 nt, Human adenovirus E
gaggagguggaaga

SEQ ID NO: 3931787 - RNA, 17 nt, Human adenovirus E
gaggccaucggccaggc

SEQ ID NO: 3931788 - RNA, 15 nt, Human adenovirus E
gaggccgagccacag

SEQ ID NO: 3931789 - RNA, 14 nt, Human adenovirus E
gaggcgcgcgcagu

SEQ ID NO: 3931790 - RNA, 15 nt, Human adenovirus E
gaggggcggaacagc

SEQ ID NO: 3931791 - RNA, 14 nt, Human adenovirus E
gagggucugggcag

SEQ ID NO: 3931792 - RNA, 18 nt, Human adenovirus E
gagggucugggcagcgac

SEQ ID NO: 3931793 - RNA, 17 nt, Human adenovirus E
gagggugccggacuggg

SEQ ID NO: 3931794 - RNA, 15 nt, Human adenovirus E
gaggucaggggcgau

SEQ ID NO: 3931795 - RNA, 20 nt, Human adenovirus E
gagguccacacugguggcca

SEQ ID NO: 3931796 - RNA, 19 nt, Human adenovirus E
gaguacuucaaaaugaaga

SEQ ID NO: 3931797 - RNA, 17 nt, Human adenovirus E
gaguccaaccugggauc

SEQ ID NO: 3931798 - RNA, 24 nt, Human adenovirus E
gaguuaaucuuaccauugucaaug

SEQ ID NO: 3931799 - RNA, 13 nt, Human adenovirus E
gaguuuuuccagg

SEQ ID NO: 3931800 - RNA, 21 nt, Human adenovirus E
gauacucaccaaggccauggc

SEQ ID NO: 3931801 - RNA, 21 nt, Human adenovirus E
gauaucgccuccuuggaagag

SEQ ID NO: 3931802 - RNA, 17 nt, Human adenovirus E
gauauucugcuccuggu

SEQ ID NO: 3931803 - RNA, 21 nt, Human adenovirus E
gaucagcaucaucugggccug

SEQ ID NO: 3931804 - RNA, 15 nt, Human adenovirus E
gaucccgaauaccac

SEQ ID NO: 3931805 - RNA, 18 nt, Human adenovirus E
ucggcgcuguccggccgc

SEQ ID NO: 3931806 - RNA, 16 nt, Human adenovirus E
ucgggcaucagcugga

SEQ ID NO: 3931807 - RNA, 12 nt, Human adenovirus E
ucgggcggccgc

SEQ ID NO: 3931808 - RNA, 13 nt, Human adenovirus E
ucgggggcagagg

SEQ ID NO: 3931809 - RNA, 15 nt, Human adenovirus E
ucgggggcaggagca

SEQ ID NO: 3931810 - RNA, 21 nt, Human adenovirus E
ucggugaagaagaccccgcag

SEQ ID NO: 3931811 - RNA, 11 nt, Human adenovirus E
ucguaccuggg

SEQ ID NO: 3931812 - RNA, 21 nt, Human adenovirus E
ucguacgagagcgugaugcag

SEQ ID NO: 3931813 - RNA, 19 nt, Human adenovirus E
ucguccacauccaggaagg

SEQ ID NO: 3931814 - RNA, 21 nt, Human adenovirus E
ucguggaugcucuauacgggc

SEQ ID NO: 3931815 - RNA, 21 nt, Human adenovirus E
ucuaaccggcggagaugacug

SEQ ID NO: 3931816 - RNA, 20 nt, Human adenovirus E
ucuacacuaaaaaaauacug

SEQ ID NO: 3931817 - RNA, 14 nt, Human adenovirus E
ucuaccucgacccc

SEQ ID NO: 3931818 - RNA, 13 nt, Human adenovirus E
ucuaccucugcca

SEQ ID NO: 3931819 - RNA, 20 nt, Human adenovirus E
ucuccaccauuaaauauacu

SEQ ID NO: 3931820 - RNA, 19 nt, Human adenovirus E
ucuccaguucguggaggag

SEQ ID NO: 3931821 - RNA, 21 nt, Human adenovirus E
ucuccuucagcgcgcgcugcc

SEQ ID NO: 3931822 - RNA, 23 nt, Human adenovirus E
ucucgauccagcagaccuccucg

SEQ ID NO: 3931823 - RNA, 16 nt, Human adenovirus E
ucucgcucgccacauc

SEQ ID NO: 3931824 - RNA, 21 nt, Human adenovirus E
ucucugcucaauauauagccc

SEQ ID NO: 3931825 - RNA, 17 nt, Human adenovirus E
ucugauaccaggucucu

SEQ ID NO: 3931826 - RNA, 16 nt, Human adenovirus E
ucugcaagcuccugca

SEQ ID NO: 3931827 - RNA, 11 nt, Human adenovirus E
ucugccuccuc

SEQ ID NO: 3931828 - RNA, 14 nt, Human adenovirus E
ucuggaagaagcag

SEQ ID NO: 3931829 - RNA, 21 nt, Human adenovirus E
ucuggaggaagacgaggagga

SEQ ID NO: 3931830 - RNA, 22 nt, Human adenovirus E
ucuggaggaagacgaggaggag

SEQ ID NO: 3931831 - RNA, 18 nt, Human adenovirus E
ucugggugaucuuggccc

SEQ ID NO: 3931832 - RNA, 12 nt, Human adenovirus E
ucuuccuccucc

SEQ ID NO: 3931833 - RNA, 22 nt, Human adenovirus E
ucuucuccaucgcuuacagccu

SEQ ID NO: 3931834 - RNA, 14 nt, Human adenovirus E
ugaaacccuccggg

SEQ ID NO: 3931835 - RNA, 24 nt, Human adenovirus E
ugaacaagucuauguuggcacagc

SEQ ID NO: 3931836 - RNA, 17 nt, Human adenovirus E
ugaaccugacacaccac

SEQ ID NO: 3931837 - RNA, 17 nt, Human adenovirus E
ugaaccugagccaggcu

SEQ ID NO: 3931838 - RNA, 17 nt, Human adenovirus E
ugaagcaacugcagccg

SEQ ID NO: 3931839 - RNA, 18 nt, Human adenovirus E
ugaaggaggaaagaaagc

SEQ ID NO: 3931840 - RNA, 16 nt, Human adenovirus E
ugaauccccacuggcu

SEQ ID NO: 3931841 - RNA, 19 nt, Human adenovirus E
ugacacuacagaaacugaa

SEQ ID NO: 3931842 - RNA, 14 nt, Human adenovirus E
ugacagcaacagua

SEQ ID NO: 3931843 - RNA, 21 nt, Human adenovirus E
uggcgacgagcucggcgguga

SEQ ID NO: 3931844 - RNA, 18 nt, Human adenovirus E
uggcgaugugcucgguga

SEQ ID NO: 3931845 - RNA, 16 nt, Human adenovirus E
uggcggauggcuggca

SEQ ID NO: 3931846 - RNA, 21 nt, Human adenovirus E
uggcggcgauguugagcugca

SEQ ID NO: 3931847 - RNA, 17 nt, Human adenovirus E
uggcgguggggcggcag

SEQ ID NO: 3931848 - RNA, 17 nt, Human adenovirus E
uggcuccuggaccuggu

SEQ ID NO: 3931849 - RNA, 22 nt, Human adenovirus E
ugggacagcacucaggcagagg

SEQ ID NO: 3931850 - RNA, 12 nt, Human adenovirus E
ugggcagggaga

SEQ ID NO: 3931851 - RNA, 14 nt, Human adenovirus E
ugggcccgugggcg

SEQ ID NO: 3931852 - RNA, 15 nt, Human adenovirus E
ugggcgugcagaccg

SEQ ID NO: 3931853 - RNA, 17 nt, Human adenovirus E
ugggcguguggcagcag

SEQ ID NO: 3931854 - RNA, 23 nt, Human adenovirus E
uggggccguagaugaccccgaug

SEQ ID NO: 3931855 - RNA, 22 nt, Human adenovirus E
ugguaguugagggagagacagc

SEQ ID NO: 3931856 - RNA, 19 nt, Human adenovirus E
uggucagcgacgagcagcu

SEQ ID NO: 3931857 - RNA, 22 nt, Human adenovirus E
uggucgaaaaccgcucccgauc

SEQ ID NO: 3931858 - RNA, 13 nt, Human adenovirus E
uggucgcugcccg

SEQ ID NO: 3931859 - RNA, 13 nt, Human adenovirus E
uggugaaggagga

SEQ ID NO: 3931860 - RNA, 19 nt, Human adenovirus E
uggugaccguggagcugga

SEQ ID NO: 3931861 - RNA, 22 nt, Human adenovirus E
ugguggacaagaugagccgcug

SEQ ID NO: 3931862 - RNA, 16 nt, Human adenovirus E
ugguggcgaaggagcc

SEQ ID NO: 3931863 - RNA, 18 nt, Human adenovirus E
uggugggccuuuggaaga

SEQ ID NO: 3931864 - RNA, 13 nt, Human adenovirus E
uguaccccgguuc

SEQ ID NO: 3931865 - RNA, 18 nt, Human adenovirus E
uguaccgcgaggccaucg

SEQ ID NO: 3931866 - RNA, 22 nt, Human adenovirus E
uguauuauggaacuacagcagg

SEQ ID NO: 3931867 - RNA, 21 nt, Human adenovirus E
uguccacccgcucucugcuca

SEQ ID NO: 3931868 - RNA, 19 nt, Human adenovirus E
ugucucuucgggggcagag

SEQ ID NO: 3931869 - RNA, 13 nt, Human adenovirus E
uguggagccacug

SEQ ID NO: 3931870 - RNA, 21 nt, Human adenovirus E
uguggagccacugcuaccugc

SEQ ID NO: 3931871 - RNA, 18 nt, Human adenovirus E
uguggagcuaccagcccc

SEQ ID NO: 3931872 - RNA, 19 nt, Human adenovirus E
uguuaccacuaugcagcuc

SEQ ID NO: 3931873 - RNA, 23 nt, Human adenovirus E
uguuacugaggggggcaauguga

SEQ ID NO: 3931874 - RNA, 23 nt, Human adenovirus E
uuaacagaacauucuacacuaaa

SEQ ID NO: 3931875 - RNA, 19 nt, Human adenovirus E
uuaacaucacuagagacua

SEQ ID NO: 3931876 - RNA, 18 nt, Human adenovirus E
uuaagaaaaucaacaaaa

SEQ ID NO: 3931877 - RNA, 12 nt, Human adenovirus E
uuaccucugcuc

SEQ ID NO: 3931878 - RNA, 16 nt, Human adenovirus E
uuacuacggccccugg

SEQ ID NO: 3931879 - RNA, 12 nt, Human adenovirus E
uuauacauguga

SEQ ID NO: 3931880 - RNA, 16 nt, Human adenovirus E
uucaagaacuugcagg

SEQ ID NO: 3931881 - RNA, 12 nt, Human adenovirus E
uucaccaccugc

SEQ ID NO: 3931882 - RNA, 12 nt, Human adenovirus E
uucccccaggau

SEQ ID NO: 3931883 - RNA, 16 nt, Human adenovirus E
uuccgcgcucccuggg

SEQ ID NO: 3931884 - RNA, 13 nt, Human adenovirus E
uuccggagcagcu

SEQ ID NO: 3931885 - RNA, 13 nt, Human adenovirus E
uuccuccacccuc

SEQ ID NO: 3931886 - RNA, 12 nt, Human adenovirus E
uuccugaugcag

SEQ ID NO: 3931887 - RNA, 19 nt, Human adenovirus E
  misc_feature (6)..(6): n is a, c, g, or u
uuccunuacaccaaucagu

SEQ ID NO: 3931888 - RNA, 13 nt, Human adenovirus E
uucucuccagcac

SEQ ID NO: 3931889 - RNA, 22 nt, Human adenovirus E
uucugacaaugaggacguuacu

SEQ ID NO: 3931890 - RNA, 16 nt, Human adenovirus E
uucuuaucugccuccu

SEQ ID NO: 3931891 - RNA, 13 nt, Human adenovirus E
uucuuccuccucc

SEQ ID NO: 3931892 - RNA, 17 nt, Human adenovirus E
uugaucuccaccgcgcc

SEQ ID NO: 3931893 - RNA, 14 nt, Human adenovirus E
uugcaagcgccgca

SEQ ID NO: 3931894 - RNA, 16 nt, Human adenovirus E
uugcagggccuguggg

SEQ ID NO: 3931895 - RNA, 13 nt, Human adenovirus E
uugcgcgagcaga

SEQ ID NO: 3931896 - RNA, 14 nt, Human adenovirus E
uuggcauuguuuuu

SEQ ID NO: 3931897 - RNA, 15 nt, Human adenovirus E
uuggcgcggaggaag

SEQ ID NO: 3931898 - RNA, 15 nt, Human adenovirus E
uuggggcaccucggc

SEQ ID NO: 3931899 - RNA, 17 nt, Human adenovirus E
uuguugcgcagggccag

SEQ ID NO: 3931900 - RNA, 19 nt, Human adenovirus E
uuuaccgacaaaaaucaga

SEQ ID NO: 3931901 - RNA, 14 nt, Human adenovirus E
uuuccuccacccuc

SEQ ID NO: 3931902 - RNA, 9 nt, Human adenovirus E
uuugccaga

SEQ ID NO: 3931903 - RNA, 16 nt, Human adenovirus E
uuugguucucugcuac

SEQ ID NO: 3931904 - RNA, 18 nt, Human adenovirus E
uuuucauuuuuccagccu

SEQ ID NO: 3931905 - RNA, 13 nt, Human adenovirus E
uuuuccuccaccc

SEQ ID NO: 3931906 - RNA, 15 nt, Human adenovirus E
aaaaacgucacccgc

SEQ ID NO: 3931907 - RNA, 14 nt, Human adenovirus E
aaaauaacagccag

SEQ ID NO: 3931908 - RNA, 12 nt, Human adenovirus E
aaaauccacagc

SEQ ID NO: 3931909 - RNA, 13 nt, Human adenovirus E
aaaccagcagcua

SEQ ID NO: 3931910 - RNA, 15 nt, Human adenovirus E
aaacugucaaauacu

SEQ ID NO: 3931911 - RNA, 21 nt, Human adenovirus E
aaagcccccgaucccuccagg

SEQ ID NO: 3931912 - RNA, 21 nt, Human adenovirus E
aaaucacccucaagcugggag

SEQ ID NO: 3931913 - RNA, 21 nt, Human adenovirus E
aaaucguucucuccagcacca

SEQ ID NO: 3931914 - RNA, 15 nt, Human adenovirus E
aacaacaagcaugga

SEQ ID NO: 3931915 - RNA, 19 nt, Human adenovirus E
aacacaaaauaaaauaaag

SEQ ID NO: 3931916 - RNA, 15 nt, Human adenovirus E
aacacgacuuucaaa

SEQ ID NO: 3931917 - RNA, 17 nt, Human adenovirus E
aacacuguaucccaccc

SEQ ID NO: 3931918 - RNA, 19 nt, Human adenovirus E
aacagcagucaggcagagg

SEQ ID NO: 3931919 - RNA, 12 nt, Human adenovirus E
aacagccagagc

SEQ ID NO: 3931920 - RNA, 13 nt, Human adenovirus E
aacaggaagaacc

SEQ ID NO: 3931921 - RNA, 17 nt, Human adenovirus E
aacagguggguaaaucg

SEQ ID NO: 3931922 - RNA, 19 nt, Human adenovirus E
aacaguauccgcagcagcg

SEQ ID NO: 3931923 - RNA, 13 nt, Human adenovirus E
aaccagcagcuag

SEQ ID NO: 3931924 - RNA, 20 nt, Human adenovirus E
aaccaugaagauccuaggcc

SEQ ID NO: 3931925 - RNA, 20 nt, Human adenovirus E
aacccaccccacccagugag

SEQ ID NO: 3931926 - RNA, 12 nt, Human adenovirus E
aacccccagcug

SEQ ID NO: 3931927 - RNA, 11 nt, Human adenovirus E
accugcuggag

SEQ ID NO: 3931928 - RNA, 13 nt, Human adenovirus E
accuggaccacug

SEQ ID NO: 3931929 - RNA, 22 nt, Human adenovirus E
accuggccuaccacucggacgu

SEQ ID NO: 3931930 - RNA, 12 nt, Human adenovirus E
accugggcggcg

SEQ ID NO: 3931931 - RNA, 18 nt, Human adenovirus E
accugugggaccugcugg

SEQ ID NO: 3931932 - RNA, 19 nt, Human adenovirus E
accugugggaccugcugga

SEQ ID NO: 3931933 - RNA, 16 nt, Human adenovirus E
accuguucagagacag

SEQ ID NO: 3931934 - RNA, 17 nt, Human adenovirus E
accuucuuccaguucau

SEQ ID NO: 3931935 - RNA, 19 nt, Human adenovirus E
acgaagcccugcaggaagc

SEQ ID NO: 3931936 - RNA, 12 nt, Human adenovirus E
acgacagcagcg

SEQ ID NO: 3931937 - RNA, 13 nt, Human adenovirus E
acgagaagcagca

SEQ ID NO: 3931938 - RNA, 20 nt, Human adenovirus E
acgagcagaccuaccaggag

SEQ ID NO: 3931939 - RNA, 14 nt, Human adenovirus E
acgagcagcuggcc

SEQ ID NO: 3931940 - RNA, 21 nt, Human adenovirus E
acgagccggggcagcgccgcc

SEQ ID NO: 3931941 - RNA, 13 nt, Human adenovirus E
acgaggaggaggc

SEQ ID NO: 3931942 - RNA, 17 nt, Human adenovirus E
acgaggaggaggcagag

SEQ ID NO: 3931943 - RNA, 14 nt, Human adenovirus E
acgauccccgggcg

SEQ ID NO: 3931944 - RNA, 18 nt, Human adenovirus E
acgauguggacagcagcg

SEQ ID NO: 3931945 - RNA, 22 nt, Human adenovirus E
acgcacgagaagguccuggcca

SEQ ID NO: 3931946 - RNA, 15 nt, Human adenovirus E
acgcacgucuucaac

SEQ ID NO: 3931947 - RNA, 23 nt, Human adenovirus E
acgcacuaccaccacuacagccu

SEQ ID NO: 3931948 - RNA, 20 nt, Human adenovirus E
acgccuaugagaaaagcaag

SEQ ID NO: 3931949 - RNA, 19 nt, Human adenovirus E
acgcgcccgcgcuugcugg

SEQ ID NO: 3931950 - RNA, 24 nt, Human adenovirus E
acgcgcucagcaccgaggaggagc

SEQ ID NO: 3931951 - RNA, 14 nt, Human adenovirus E
acgcgcugguggag

SEQ ID NO: 3931952 - RNA, 13 nt, Human adenovirus E
acgcggagacccu

SEQ ID NO: 3931953 - RNA, 20 nt, Human adenovirus E
acgcgucaaguuagcaacua

SEQ ID NO: 3931954 - RNA, 11 nt, Human adenovirus E
acggaggccag

SEQ ID NO: 3931955 - RNA, 15 nt, Human adenovirus E
acggcccucagcauc

SEQ ID NO: 3931956 - RNA, 16 nt, Human adenovirus E
acggcccugcgguggu

SEQ ID NO: 3931957 - RNA, 19 nt, Human adenovirus E
acggcgacuaccuccaccu

SEQ ID NO: 3931958 - RNA, 17 nt, Human adenovirus E
acgggacgcagggccau

SEQ ID NO: 3931959 - RNA, 23 nt, Human adenovirus E
acggggaucagccccgcgcgcgc

SEQ ID NO: 3931960 - RNA, 14 nt, Human adenovirus E
acggggugcuggag

SEQ ID NO: 3931961 - RNA, 17 nt, Human adenovirus E
acggucaacuccuccuc

SEQ ID NO: 3931962 - RNA, 19 nt, Human adenovirus E
acgucaccugcggcgugga

SEQ ID NO: 3931963 - RNA, 12 nt, Human adenovirus E
acgugagccgcg

SEQ ID NO: 3931964 - RNA, 12 nt, Human adenovirus E
acgugcagacca

SEQ ID NO: 3931965 - RNA, 17 nt, Human adenovirus E
acgugcagaccaaccug

SEQ ID NO: 3931966 - RNA, 19 nt, Human adenovirus E
acgugcagaccaaccugga

SEQ ID NO: 3931967 - RNA, 23 nt, Human adenovirus E
acgugccccggggccaggaggac

SEQ ID NO: 3931968 - RNA, 14 nt, Human adenovirus E
acguggagcugacc

SEQ ID NO: 3931969 - RNA, 18 nt, Human adenovirus E
acguggccgcggccaacc

SEQ ID NO: 3931970 - RNA, 22 nt, Human adenovirus E
acguggccgcggccaaccuggu

SEQ ID NO: 3931971 - RNA, 22 nt, Human adenovirus E
acguggccgucguaccagaucc

SEQ ID NO: 3931972 - RNA, 14 nt, Human adenovirus E
acuaccuccaccug

SEQ ID NO: 3931973 - RNA, 18 nt, Human adenovirus E
acuaccuccaccugagcg

SEQ ID NO: 3931974 - RNA, 16 nt, Human adenovirus E
acuaccuggccuacca

SEQ ID NO: 3931975 - RNA, 22 nt, Human adenovirus E
acuaggaacuucaggcugggcu

SEQ ID NO: 3931976 - RNA, 22 nt, Human adenovirus E
acuaugaggccgagccacagcg

SEQ ID NO: 3931977 - RNA, 17 nt, Human adenovirus E
acucagguguccagcug

SEQ ID NO: 3931978 - RNA, 23 nt, Human adenovirus E
acucaucgcgggaaggaugcuac

SEQ ID NO: 3931979 - RNA, 19 nt, Human adenovirus E
acuccccuccugcacaggc

SEQ ID NO: 3931980 - RNA, 13 nt, Human adenovirus E
acuccguggccug

SEQ ID NO: 3931981 - RNA, 15 nt, Human adenovirus E
acuccguggccugga

SEQ ID NO: 3931982 - RNA, 22 nt, Human adenovirus E
acuccuagaacagucagcgcuc

SEQ ID NO: 3931983 - RNA, 16 nt, Human adenovirus E
acucgcagaaaaugau

SEQ ID NO: 3931984 - RNA, 15 nt, Human adenovirus E
acucguaccugggcu

SEQ ID NO: 3931985 - RNA, 13 nt, Human adenovirus E
acugacgccagac

SEQ ID NO: 3931986 - RNA, 17 nt, Human adenovirus E
acugacgccagacgccg

SEQ ID NO: 3931987 - RNA, 15 nt, Human adenovirus E
acugccgcugcaacc

SEQ ID NO: 3931988 - RNA, 22 nt, Human adenovirus E
acugcgucuaccucuaccucug

SEQ ID NO: 3931989 - RNA, 18 nt, Human adenovirus E
acugcuaccugcugcgcc

SEQ ID NO: 3931990 - RNA, 19 nt, Human adenovirus E
acugcucgaucuccuccuc

SEQ ID NO: 3931991 - RNA, 16 nt, Human adenovirus E
acuuccagccacgacc

SEQ ID NO: 3931992 - RNA, 20 nt, Human adenovirus E
acuuccgcgcucccuggggc

SEQ ID NO: 3931993 - RNA, 16 nt, Human adenovirus E
acuuccuccgcggccg

SEQ ID NO: 3931994 - RNA, 19 nt, Human adenovirus E
acuucuuccagaccagucg

SEQ ID NO: 3931995 - RNA, 13 nt, Human adenovirus E
acuuggcgguggg

SEQ ID NO: 3931996 - RNA, 21 nt, Human adenovirus E
acuuggcgguggggcggcaga

SEQ ID NO: 3931997 - RNA, 17 nt, Human adenovirus E
agaacagccagagcagg

SEQ ID NO: 3931998 - RNA, 20 nt, Human adenovirus E
agaaccuguucagagacagg

SEQ ID NO: 3931999 - RNA, 23 nt, Human adenovirus E
agaacuuacauugugcauggaca

SEQ ID NO: 3932000 - RNA, 15 nt, Human adenovirus E
agaagccccuggggg

SEQ ID NO: 3932001 - RNA, 11 nt, Human adenovirus E
agaagcuggcg

SEQ ID NO: 3932002 - RNA, 16 nt, Human adenovirus E
agacagcagccccagg

SEQ ID NO: 3932003 - RNA, 23 nt, Human adenovirus E
agaccagcagaaaaccagcagcu

SEQ ID NO: 3932004 - RNA, 15 nt, Human adenovirus E
agacccgagcgggag

SEQ ID NO: 3932005 - RNA, 14 nt, Human adenovirus E
agacccggcaccac

SEQ ID NO: 3932006 - RNA, 23 nt, Human adenovirus E
agaccgacuuuaugggccggucc

SEQ ID NO: 3932007 - RNA, 16 nt, Human adenovirus E
agaccggugaggagcu

SEQ ID NO: 3932008 - RNA, 17 nt, Human adenovirus E
agaccgucguccucggc

SEQ ID NO: 3932009 - RNA, 19 nt, Human adenovirus E
agacgaaggcgcgcaggcc

SEQ ID NO: 3932010 - RNA, 19 nt, Human adenovirus E
agacgcgcgccgggcggca

SEQ ID NO: 3932011 - RNA, 17 nt, Human adenovirus E
agacgcgcggccacggc

SEQ ID NO: 3932012 - RNA, 18 nt, Human adenovirus E
agagcaucguggugcagg

SEQ ID NO: 3932013 - RNA, 11 nt, Human adenovirus E
agagccacacc

SEQ ID NO: 3932014 - RNA, 17 nt, Human adenovirus E
agagccacaccacagcu

SEQ ID NO: 3932015 - RNA, 13 nt, Human adenovirus E
agagccggcggcg

SEQ ID NO: 3932016 - RNA, 19 nt, Human adenovirus E
agagcucugcaagcuccug

SEQ ID NO: 3932017 - RNA, 22 nt, Human adenovirus E
agagcuucuucaacgagcaggc

SEQ ID NO: 3932018 - RNA, 14 nt, Human adenovirus E
agaggcagcagcag

SEQ ID NO: 3932019 - RNA, 20 nt, Human adenovirus E
agaggcggaggcgacgggcu

SEQ ID NO: 3932020 - RNA, 13 nt, Human adenovirus E
agaggugggcuug

SEQ ID NO: 3932021 - RNA, 19 nt, Human adenovirus E
agaguguaccgccgcggcc

SEQ ID NO: 3932022 - RNA, 15 nt, Human adenovirus E
agaguuuggaagagc

SEQ ID NO: 3932023 - RNA, 22 nt, Human adenovirus E
agaguuuggaagagcggcgcaa

SEQ ID NO: 3932024 - RNA, 15 nt, Human adenovirus E
agaucaacagccgcc

SEQ ID NO: 3932025 - RNA, 14 nt, Human adenovirus E
agaucacccugcuc

SEQ ID NO: 3932026 - RNA, 13 nt, Human adenovirus E
agauccucaggua

SEQ ID NO: 3932027 - RNA, 15 nt, Human adenovirus E
agcaccgccccgccc

SEQ ID NO: 3932028 - RNA, 13 nt, Human adenovirus E
agcacgaggagga

SEQ ID NO: 3932029 - RNA, 18 nt, Human adenovirus E
agcacgaggaggagcugg

SEQ ID NO: 3932030 - RNA, 21 nt, Human adenovirus E
agcacgaggaggagcuggcag

SEQ ID NO: 3932031 - RNA, 15 nt, Human adenovirus E
agcagaagcgugggc

SEQ ID NO: 3932032 - RNA, 13 nt, Human adenovirus E
agcagcagcacac

SEQ ID NO: 3932033 - RNA, 18 nt, Human adenovirus E
agcagccccaggccaacc

SEQ ID NO: 3932034 - RNA, 17 nt, Human adenovirus E
agcaggaagcagagaau

SEQ ID NO: 3932035 - RNA, 14 nt, Human adenovirus E
agcaggcggcgcga

SEQ ID NO: 3932036 - RNA, 17 nt, Human adenovirus E
agcaggggcgcagggca

SEQ ID NO: 3932037 - RNA, 14 nt, Human adenovirus E
agcaguaguacaga

SEQ ID NO: 3932038 - RNA, 17 nt, Human adenovirus E
agcagucaggcagagga

SEQ ID NO: 3932039 - RNA, 21 nt, Human adenovirus E
agcaguggcagcggccgaggc

SEQ ID NO: 3932040 - RNA, 17 nt, Human adenovirus E
agcaguuugggcagcgg

SEQ ID NO: 3932041 - RNA, 14 nt, Human adenovirus E
agcaucuggcccgg

SEQ ID NO: 3932042 - RNA, 22 nt, Human adenovirus E
agcaucuggcccggcaggccac

SEQ ID NO: 3932043 - RNA, 17 nt, Human adenovirus E
agcaugaugcccacggc

SEQ ID NO: 3932044 - RNA, 18 nt, Human adenovirus E
agcauugccaaaugcaag

SEQ ID NO: 3932045 - RNA, 18 nt, Human adenovirus E
agccacugcuaccugcug

SEQ ID NO: 3932046 - RNA, 14 nt, Human adenovirus E
agccagaugaugca

SEQ ID NO: 3932047 - RNA, 19 nt, Human adenovirus E
agcccaauggcaccugcga

SEQ ID NO: 3932048 - RNA, 20 nt, Human adenovirus E
agcccaucauguacgccagc

SEQ ID NO: 3932049 - RNA, 20 nt, Human adenovirus E
agcccaugaucaagcccagc

SEQ ID NO: 3932050 - RNA, 12 nt, Human adenovirus E
agccccaggcca

SEQ ID NO: 3932051 - RNA, 13 nt, Human adenovirus E
agccccaggccaa

SEQ ID NO: 3932052 - RNA, 23 nt, Human adenovirus E
agccccccugcucccagagcugg

SEQ ID NO: 3932053 - RNA, 23 nt, Human adenovirus E
agcccgaggucaaggugcggccc

SEQ ID NO: 3932054 - RNA, 23 nt, Human adenovirus E
agcccgcgcccgcccagucgcag

SEQ ID NO: 3932055 - RNA, 24 nt, Human adenovirus E
agcccgcgcgggaggcagguccag

SEQ ID NO: 3932056 - RNA, 15 nt, Human adenovirus E
agcccuuccaggaag

SEQ ID NO: 3932057 - RNA, 14 nt, Human adenovirus E
agccgaaacucauc

SEQ ID NO: 3932058 - RNA, 14 nt, Human adenovirus E
agccgcggccaggg

SEQ ID NO: 3932059 - RNA, 16 nt, Human adenovirus E
agccggcggcggcgca

SEQ ID NO: 3932060 - RNA, 22 nt, Human adenovirus E
agccggcggcggcgcaucgccc

SEQ ID NO: 3932061 - RNA, 23 nt, Human adenovirus E
agccguugauguuguggcccacg

SEQ ID NO: 3932062 - RNA, 17 nt, Human adenovirus E
agccuacaacuauggcg

SEQ ID NO: 3932063 - RNA, 15 nt, Human adenovirus E
agccugcugaugccc

SEQ ID NO: 3932064 - RNA, 18 nt, Human adenovirus E
agccuuguugcgcagggc

SEQ ID NO: 3932065 - RNA, 19 nt, Human adenovirus E
agccuuuagacagcagccc

SEQ ID NO: 3932066 - RNA, 18 nt, Human adenovirus E
agcgaacggguugggcug

SEQ ID NO: 3932067 - RNA, 15 nt, Human adenovirus E
agcgacgagcagcug

SEQ ID NO: 3932068 - RNA, 12 nt, Human adenovirus E
agcgcauccugc

SEQ ID NO: 3932069 - RNA, 15 nt, Human adenovirus E
agcgccgcagcagug

SEQ ID NO: 3932070 - RNA, 14 nt, Human adenovirus E
agcggcccugccaa

SEQ ID NO: 3932071 - RNA, 24 nt, Human adenovirus E
agcggcucgacuccguggccugga

SEQ ID NO: 3932072 - RNA, 23 nt, Human adenovirus E
agcggcuggugauccggggcaga

SEQ ID NO: 3932073 - RNA, 14 nt, Human adenovirus E
agcggggcuggaca

SEQ ID NO: 3932074 - RNA, 17 nt, Human adenovirus E
agcgggggggaggacgc

SEQ ID NO: 3932075 - RNA, 22 nt, Human adenovirus E
agcguguucuccccccgaccgg

SEQ ID NO: 3932076 - RNA, 17 nt, Human adenovirus E
agcuaccagccccagau

SEQ ID NO: 3932077 - RNA, 17 nt, Human adenovirus E
agcuccagcuccagugu

SEQ ID NO: 3932078 - RNA, 21 nt, Human adenovirus E
agcuccaguguaagccccaca

SEQ ID NO: 3932079 - RNA, 17 nt, Human adenovirus E
agcuccucccucagcaa

SEQ ID NO: 3932080 - RNA, 19 nt, Human adenovirus E
agcucugcaagcuccugca

SEQ ID NO: 3932081 - RNA, 17 nt, Human adenovirus E
agcugauggugcccaag

SEQ ID NO: 3932082 - RNA, 19 nt, Human adenovirus E
agcugcggcgcggccugga

SEQ ID NO: 3932083 - RNA, 16 nt, Human adenovirus E
agcuggaucaugauca

SEQ ID NO: 3932084 - RNA, 12 nt, Human adenovirus E
agcugucggccu

SEQ ID NO: 3932085 - RNA, 19 nt, Human adenovirus E
agcuugcccucggccucgg

SEQ ID NO: 3932086 - RNA, 19 nt, Human adenovirus E
aggaagacugggacagcac

SEQ ID NO: 3932087 - RNA, 21 nt, Human adenovirus E
aggaaucuucucuucucuuuu

SEQ ID NO: 3932088 - RNA, 12 nt, Human adenovirus E
aggacgagggca

SEQ ID NO: 3932089 - RNA, 17 nt, Human adenovirus E
aggagcuccuggagcga

SEQ ID NO: 3932090 - RNA, 14 nt, Human adenovirus E
aggagcugaugcau

SEQ ID NO: 3932091 - RNA, 15 nt, Human adenovirus E
aggaggcagaggagg

SEQ ID NO: 3932092 - RNA, 18 nt, Human adenovirus E
aggaggcagaggaggagg

SEQ ID NO: 3932093 - RNA, 24 nt, Human adenovirus E
aggaggcgcucuccccccagggau

SEQ ID NO: 3932094 - RNA, 16 nt, Human adenovirus E
aggagguggaagaagc

SEQ ID NO: 3932095 - RNA, 13 nt, Human adenovirus E
aggauuuggagga

SEQ ID NO: 3932096 - RNA, 15 nt, Human adenovirus E
aggcaccgcagcuug

SEQ ID NO: 3932097 - RNA, 17 nt, Human adenovirus E
aggcagcgaccgacgcc

SEQ ID NO: 3932098 - RNA, 13 nt, Human adenovirus E
aggccgugcagcg

SEQ ID NO: 3932099 - RNA, 14 nt, Human adenovirus E
aggccgugcagcgg

SEQ ID NO: 3932100 - RNA, 20 nt, Human adenovirus E
aggccguggcccagcgcgag

SEQ ID NO: 3932101 - RNA, 14 nt, Human adenovirus E
aggccugggcggcc

SEQ ID NO: 3932102 - RNA, 17 nt, Human adenovirus E
aggcgauggcggcggcg

SEQ ID NO: 3932103 - RNA, 18 nt, Human adenovirus E
aggcgcgcaggccggagc

SEQ ID NO: 3932104 - RNA, 22 nt, Human adenovirus E
aggcgcgcgcagucguggaugc

SEQ ID NO: 3932105 - RNA, 18 nt, Human adenovirus E
aggcgcucuccccccagg

SEQ ID NO: 3932106 - RNA, 17 nt, Human adenovirus E
aggcguccgcgccgcag

SEQ ID NO: 3932107 - RNA, 14 nt, Human adenovirus E
agggacucccucag

SEQ ID NO: 3932108 - RNA, 15 nt, Human adenovirus E
agggacucccucagc

SEQ ID NO: 3932109 - RNA, 14 nt, Human adenovirus E
agggacugaggggc

SEQ ID NO: 3932110 - RNA, 16 nt, Human adenovirus E
agggagagacagcugc

SEQ ID NO: 3932111 - RNA, 19 nt, Human adenovirus E
agggcgagaucgagggcga

SEQ ID NO: 3932112 - RNA, 16 nt, Human adenovirus E
agggcgaguaccugga

SEQ ID NO: 3932113 - RNA, 21 nt, Human adenovirus E
agggcgugcgcuccuggacgc

SEQ ID NO: 3932114 - RNA, 15 nt, Human adenovirus E
agggcguuggagagg

SEQ ID NO: 3932115 - RNA, 15 nt, Human adenovirus E
agggcuugcagaccg

SEQ ID NO: 3932116 - RNA, 14 nt, Human adenovirus E
aggggcggaacagc

SEQ ID NO: 3932117 - RNA, 16 nt, Human adenovirus E
aggggggcaaugugac

SEQ ID NO: 3932118 - RNA, 17 nt, Human adenovirus E
agggucucaaagcuccg

SEQ ID NO: 3932119 - RNA, 21 nt, Human adenovirus E
agguacacauacaaagccuca

SEQ ID NO: 3932120 - RNA, 16 nt, Human adenovirus E
aggugacccugggccu

SEQ ID NO: 3932121 - RNA, 18 nt, Human adenovirus E
aggugacccugggccuga

SEQ ID NO: 3932122 - RNA, 22 nt, Human adenovirus E
aggugccccucagcguggagga

SEQ ID NO: 3932123 - RNA, 18 nt, Human adenovirus E
aggugcggcccaucaagc

SEQ ID NO: 3932124 - RNA, 22 nt, Human adenovirus E
agguggaagaagcagccgccgc

SEQ ID NO: 3932125 - RNA, 21 nt, Human adenovirus E
agguggacccggacgugcagc

SEQ ID NO: 3932126 - RNA, 15 nt, Human adenovirus E
agguguagagggugc

SEQ ID NO: 3932127 - RNA, 20 nt, Human adenovirus E
agguuuaaaauuugaagaug

SEQ ID NO: 3932128 - RNA, 22 nt, Human adenovirus E
aguaauaacaccgguuggggcc

SEQ ID NO: 3932129 - RNA, 14 nt, Human adenovirus E
aguacaggagccau

SEQ ID NO: 3932130 - RNA, 20 nt, Human adenovirus E
aguacaguuagucucuccac

SEQ ID NO: 3932131 - RNA, 16 nt, Human adenovirus E
gaucccugagcuccuc

SEQ ID NO: 3932132 - RNA, 12 nt, Human adenovirus E
gauccgcaccgg

SEQ ID NO: 3932133 - RNA, 16 nt, Human adenovirus E
gaucuccuccucuuga

SEQ ID NO: 3932134 - RNA, 22 nt, Human adenovirus E
gaugaggugcaucuuggccugg

SEQ ID NO: 3932135 - RNA, 21 nt, Human adenovirus E
gaugauauucuggagcaggcg

SEQ ID NO: 3932136 - RNA, 11 nt, Human adenovirus E
gaugaugcuga

SEQ ID NO: 3932137 - RNA, 14 nt, Human adenovirus E
gaugcaccuguggg

SEQ ID NO: 3932138 - RNA, 17 nt, Human adenovirus E
gaugcagcccccgcugg

SEQ ID NO: 3932139 - RNA, 15 nt, Human adenovirus E
gaugccgggcaggag

SEQ ID NO: 3932140 - RNA, 13 nt, Human adenovirus E
gaugcgcgcggcc

SEQ ID NO: 3932141 - RNA, 22 nt, Human adenovirus E
gauggacuacuugcaucgggcg

SEQ ID NO: 3932142 - RNA, 12 nt, Human adenovirus E
gaugggacgaga

SEQ ID NO: 3932143 - RNA, 18 nt, Human adenovirus E
gauugaaaaccaucacag

SEQ ID NO: 3932144 - RNA, 15 nt, Human adenovirus E
gcaaacccgggagcu

SEQ ID NO: 3932145 - RNA, 21 nt, Human adenovirus E
gcaacauccccgcgcuccugg

SEQ ID NO: 3932146 - RNA, 13 nt, Human adenovirus E
gcaaccccacgcc

SEQ ID NO: 3932147 - RNA, 21 nt, Human adenovirus E
gcaacucguaccugggcuacc

SEQ ID NO: 3932148 - RNA, 15 nt, Human adenovirus E
gcaagagauggagga

SEQ ID NO: 3932149 - RNA, 16 nt, Human adenovirus E
gcaagagauggaggaa

SEQ ID NO: 3932150 - RNA, 20 nt, Human adenovirus E
gcaagccgcugacggcgcag

SEQ ID NO: 3932151 - RNA, 22 nt, Human adenovirus E
gcaagcggugcguuccagcaug

SEQ ID NO: 3932152 - RNA, 14 nt, Human adenovirus E
gcaagcuccugcag

SEQ ID NO: 3932153 - RNA, 23 nt, Human adenovirus E
gcaaggucgaggagaaccugcac

SEQ ID NO: 3932154 - RNA, 17 nt, Human adenovirus E
gcaagucuacuggucgc

SEQ ID NO: 3932155 - RNA, 17 nt, Human adenovirus E
gcaaucaggcagcaccg

SEQ ID NO: 3932156 - RNA, 16 nt, Human adenovirus E
gcaauugaccaugagu

SEQ ID NO: 3932157 - RNA, 18 nt, Human adenovirus E
gcacaaaauucucaggug

SEQ ID NO: 3932158 - RNA, 12 nt, Human adenovirus E
gcacacagcuca

SEQ ID NO: 3932159 - RNA, 15 nt, Human adenovirus E
gcacagcacaggcau

SEQ ID NO: 3932160 - RNA, 16 nt, Human adenovirus E
gcaccaacgugcagac

SEQ ID NO: 3932161 - RNA, 19 nt, Human adenovirus E
gcaccauggaggugcagac

SEQ ID NO: 3932162 - RNA, 18 nt, Human adenovirus E
gcacccgccccccucgca

SEQ ID NO: 3932163 - RNA, 22 nt, Human adenovirus E
gcacccggcgucgugcacgcag

SEQ ID NO: 3932164 - RNA, 19 nt, Human adenovirus E
gcacccgugcagccacagc

SEQ ID NO: 3932165 - RNA, 13 nt, Human adenovirus E
gcacccucagggc

SEQ ID NO: 3932166 - RNA, 17 nt, Human adenovirus E
gcaccgccccgcccgcc

SEQ ID NO: 3932167 - RNA, 20 nt, Human adenovirus E
gcaccgcucccuggccugca

SEQ ID NO: 3932168 - RNA, 21 nt, Human adenovirus E
gcaccgggugauccuccacca

SEQ ID NO: 3932169 - RNA, 13 nt, Human adenovirus E
gcacgacaggcag

SEQ ID NO: 3932170 - RNA, 15 nt, Human adenovirus E
gcacgaggaggagcu

SEQ ID NO: 3932171 - RNA, 23 nt, Human adenovirus E
gcacggauaccaucuccgcuccg

SEQ ID NO: 3932172 - RNA, 14 nt, Human adenovirus E
gcacggccagcgcg

SEQ ID NO: 3932173 - RNA, 18 nt, Human adenovirus E
gcacgggacgcagggcca

SEQ ID NO: 3932174 - RNA, 14 nt, Human adenovirus E
gcacuaccucuuca

SEQ ID NO: 3932175 - RNA, 18 nt, Human adenovirus E
gcacuccauauaccaaug

SEQ ID NO: 3932176 - RNA, 18 nt, Human adenovirus E
gcacucccgcaucugcac

SEQ ID NO: 3932177 - RNA, 19 nt, Human adenovirus E
gcacucucaacuccucggg

SEQ ID NO: 3932178 - RNA, 18 nt, Human adenovirus E
gcagaaggggggcagggg

SEQ ID NO: 3932179 - RNA, 18 nt, Human adenovirus E
gcagacaacgcaccgacc

SEQ ID NO: 3932180 - RNA, 14 nt, Human adenovirus E
gcagaccaaccugg

SEQ ID NO: 3932181 - RNA, 21 nt, Human adenovirus E
gcagaccgugaaccugagcca

SEQ ID NO: 3932182 - RNA, 14 nt, Human adenovirus E
gcagagaaugagca

SEQ ID NO: 3932183 - RNA, 21 nt, Human adenovirus E
gcagaggaggaggagauggag

SEQ ID NO: 3932184 - RNA, 20 nt, Human adenovirus E
gcagcaaaguuagccuugca

SEQ ID NO: 3932185 - RNA, 13 nt, Human adenovirus E
gcagcagcacaca

SEQ ID NO: 3932186 - RNA, 16 nt, Human adenovirus E
gcagcaggugcugccg

SEQ ID NO: 3932187 - RNA, 18 nt, Human adenovirus E
gcagcagguggacugagg

SEQ ID NO: 3932188 - RNA, 24 nt, Human adenovirus E
gcagcaguauccggggaguccagc

SEQ ID NO: 3932189 - RNA, 18 nt, Human adenovirus E
gcagcagugucuggagga

SEQ ID NO: 3932190 - RNA, 17 nt, Human adenovirus E
gcagccccaggccaacc

SEQ ID NO: 3932191 - RNA, 16 nt, Human adenovirus E
gcagccccgcucgggu

SEQ ID NO: 3932192 - RNA, 17 nt, Human adenovirus E
gcagccguagcuaccgc

SEQ ID NO: 3932193 - RNA, 15 nt, Human adenovirus E
gcagcgaagagaccc

SEQ ID NO: 3932194 - RNA, 17 nt, Human adenovirus E
gcagcgggcccugaccg

SEQ ID NO: 3932195 - RNA, 17 nt, Human adenovirus E
gcagcguguuggacuug

SEQ ID NO: 3932196 - RNA, 19 nt, Human adenovirus E
gcccaggacuacuccaccc

SEQ ID NO: 3932197 - RNA, 22 nt, Human adenovirus E
gcccaggccgaaguccagcuga

SEQ ID NO: 3932198 - RNA, 21 nt, Human adenovirus E
gcccagucggcgagauggggg

SEQ ID NO: 3932199 - RNA, 21 nt, Human adenovirus E
gcccaucauguacgccagcaa

SEQ ID NO: 3932200 - RNA, 20 nt, Human adenovirus E
gcccauggaaacgcagaccg

SEQ ID NO: 3932201 - RNA, 21 nt, Human adenovirus E
gccccaguacgcgcucagcac

SEQ ID NO: 3932202 - RNA, 21 nt, Human adenovirus E
  misc_feature (8)..(8): n is a, c, g, or u
gccccaunuagcagucccacu

SEQ ID NO: 3932203 - RNA, 13 nt, Human adenovirus E
gcccccgccccag

SEQ ID NO: 3932204 - RNA, 19 nt, Human adenovirus E
gccccgcccgccaugcagc

SEQ ID NO: 3932205 - RNA, 21 nt, Human adenovirus E
gccccgccgcccagccccgcc

SEQ ID NO: 3932206 - RNA, 19 nt, Human adenovirus E
gccccguccucuucccacu

SEQ ID NO: 3932207 - RNA, 22 nt, Human adenovirus E
gccccgucguuuccaagacccc

SEQ ID NO: 3932208 - RNA, 20 nt, Human adenovirus E
gccccuacgucuacaaggcc

SEQ ID NO: 3932209 - RNA, 19 nt, Human adenovirus E
gccccucagcguggaggag

SEQ ID NO: 3932210 - RNA, 14 nt, Human adenovirus E
gccccucguccauc

SEQ ID NO: 3932211 - RNA, 15 nt, Human adenovirus E
gccccuuguggaaga

SEQ ID NO: 3932212 - RNA, 14 nt, Human adenovirus E
gcccgaggaagcaa

SEQ ID NO: 3932213 - RNA, 15 nt, Human adenovirus E
gcccgaggacuacca

SEQ ID NO: 3932214 - RNA, 16 nt, Human adenovirus E
gcccgaggcccuggcc

SEQ ID NO: 3932215 - RNA, 16 nt, Human adenovirus E
gcccgccaccugcucc

SEQ ID NO: 3932216 - RNA, 23 nt, Human adenovirus E
gcccgcggagcacgaggaggagc

SEQ ID NO: 3932217 - RNA, 14 nt, Human adenovirus E
gcccggcaggccac

SEQ ID NO: 3932218 - RNA, 17 nt, Human adenovirus E
gcccggcaggccaccau

SEQ ID NO: 3932219 - RNA, 20 nt, Human adenovirus E
gcccggcgagcgcuccggca

SEQ ID NO: 3932220 - RNA, 13 nt, Human adenovirus E
gcccggcgcgacu

SEQ ID NO: 3932221 - RNA, 18 nt, Human adenovirus E
gcccgugcugcucgagcg

SEQ ID NO: 3932222 - RNA, 13 nt, Human adenovirus E
gcccguggaggau

SEQ ID NO: 3932223 - RNA, 19 nt, Human adenovirus E
gcccuagccgccuccaccc

SEQ ID NO: 3932224 - RNA, 15 nt, Human adenovirus E
gcccugggccaggac

SEQ ID NO: 3932225 - RNA, 17 nt, Human adenovirus E
gcccuugcgcgagcaga

SEQ ID NO: 3932226 - RNA, 22 nt, Human adenovirus E
gccgaaaaagaaaaacagccau

SEQ ID NO: 3932227 - RNA, 18 nt, Human adenovirus E
gccgagcugucggccugc

SEQ ID NO: 3932228 - RNA, 13 nt, Human adenovirus E
gccgaggcucucu

SEQ ID NO: 3932229 - RNA, 22 nt, Human adenovirus E
gccgaucccugcuugcauuuca

SEQ ID NO: 3932230 - RNA, 20 nt, Human adenovirus E
gccgccagaccgucguccuc

SEQ ID NO: 3932231 - RNA, 17 nt, Human adenovirus E
gccgccagcuccuccuc

SEQ ID NO: 3932232 - RNA, 17 nt, Human adenovirus E
gccgcccagccccgcca

SEQ ID NO: 3932233 - RNA, 15 nt, Human adenovirus E
gccgccgccagaccg

SEQ ID NO: 3932234 - RNA, 17 nt, Human adenovirus E
gccgccgggccuuggag

SEQ ID NO: 3932235 - RNA, 14 nt, Human adenovirus E
gccgcgcccugggc

SEQ ID NO: 3932236 - RNA, 18 nt, Human adenovirus E
gccgcgcgcgcgcuacca

SEQ ID NO: 3932237 - RNA, 13 nt, Human adenovirus E
gccgcgcgcgggu

SEQ ID NO: 3932238 - RNA, 18 nt, Human adenovirus E
gccgcggcggugcccgag

SEQ ID NO: 3932239 - RNA, 15 nt, Human adenovirus E
gccgcgguccuccuc

SEQ ID NO: 3932240 - RNA, 18 nt, Human adenovirus E
gccgcugacggcgcagcu

SEQ ID NO: 3932241 - RNA, 18 nt, Human adenovirus E
gccgggcggcaggggcgg

SEQ ID NO: 3932242 - RNA, 16 nt, Human adenovirus E
gccggggcagcgccgc

SEQ ID NO: 3932243 - RNA, 17 nt, Human adenovirus E
gccggggcagcgccgcc

SEQ ID NO: 3932244 - RNA, 22 nt, Human adenovirus E
gccgggguucuacacgggcgag

SEQ ID NO: 3932245 - RNA, 18 nt, Human adenovirus E
gccgguauacaagcccau

SEQ ID NO: 3932246 - RNA, 21 nt, Human adenovirus E
gccgucaucgacagcguggug

SEQ ID NO: 3932247 - RNA, 14 nt, Human adenovirus E
gccgugagcggggc

SEQ ID NO: 3932248 - RNA, 22 nt, Human adenovirus E
gccgugagcggggcuggacaga

SEQ ID NO: 3932249 - RNA, 20 nt, Human adenovirus E
gccuccaaacguuccauggc

SEQ ID NO: 3932250 - RNA, 13 nt, Human adenovirus E
gccuccacccauc

SEQ ID NO: 3932251 - RNA, 22 nt, Human adenovirus E
gccucgacucccaccugcuucg

SEQ ID NO: 3932252 - RNA, 17 nt, Human adenovirus E
gccucgcugaacuacca

SEQ ID NO: 3932253 - RNA, 14 nt, Human adenovirus E
gccucggaccuggc

SEQ ID NO: 3932254 - RNA, 16 nt, Human adenovirus E
gccugcgucaucaccc

SEQ ID NO: 3932255 - RNA, 16 nt, Human adenovirus E
ggacgcucgcgaggca

SEQ ID NO: 3932256 - RNA, 23 nt, Human adenovirus E
ggacggcccuugacguggggcag

SEQ ID NO: 3932257 - RNA, 16 nt, Human adenovirus E
ggacucgggggcguag

SEQ ID NO: 3932258 - RNA, 22 nt, Human adenovirus E
ggacugggggacaaagguaccc

SEQ ID NO: 3932259 - RNA, 13 nt, Human adenovirus E
ggagaaccugcac

SEQ ID NO: 3932260 - RNA, 19 nt, Human adenovirus E
ggagaaccugcacuaccuc

SEQ ID NO: 3932261 - RNA, 17 nt, Human adenovirus E
ggagacgcgcggccacg

SEQ ID NO: 3932262 - RNA, 16 nt, Human adenovirus E
ggagagacagcugccg

SEQ ID NO: 3932263 - RNA, 18 nt, Human adenovirus E
ggagaugacugacccacu

SEQ ID NO: 3932264 - RNA, 23 nt, Human adenovirus E
ggagcacgaggaggagcuggcag

SEQ ID NO: 3932265 - RNA, 12 nt, Human adenovirus E
ggagcagcuggg

SEQ ID NO: 3932266 - RNA, 20 nt, Human adenovirus E
ggagccccgggcccagguug

SEQ ID NO: 3932267 - RNA, 22 nt, Human adenovirus E
ggagccuuguugcgcagggcca

SEQ ID NO: 3932268 - RNA, 16 nt, Human adenovirus E
ggagcuaccagcccca

SEQ ID NO: 3932269 - RNA, 14 nt, Human adenovirus E
ggagcugaggaacc

SEQ ID NO: 3932270 - RNA, 14 nt, Human adenovirus E
ggagcuggcagugc

SEQ ID NO: 3932271 - RNA, 13 nt, Human adenovirus E
ggaggaagacugg

SEQ ID NO: 3932272 - RNA, 14 nt, Human adenovirus E
ggaggagcagaacc

SEQ ID NO: 3932273 - RNA, 14 nt, Human adenovirus E
ggaggagcucagcc

SEQ ID NO: 3932274 - RNA, 14 nt, Human adenovirus E
ggaggaggcagagg

SEQ ID NO: 3932275 - RNA, 21 nt, Human adenovirus E
ggaggccagcacccagaccau

SEQ ID NO: 3932276 - RNA, 17 nt, Human adenovirus E
ggaggccaucgugcaga

SEQ ID NO: 3932277 - RNA, 14 nt, Human adenovirus E
ggaggcgcucgcca

SEQ ID NO: 3932278 - RNA, 13 nt, Human adenovirus E
ggagggaagaaca

SEQ ID NO: 3932279 - RNA, 13 nt, Human adenovirus E
ggagggugccgga

SEQ ID NO: 3932280 - RNA, 15 nt, Human adenovirus E
ggauaggagcuccug

SEQ ID NO: 3932281 - RNA, 22 nt, Human adenovirus E
ggauccaugguggcgcugaacg

SEQ ID NO: 3932282 - RNA, 18 nt, Human adenovirus E
ggaucgcuguccacgagc

SEQ ID NO: 3932283 - RNA, 11 nt, Human adenovirus E
ggaucuucagc

SEQ ID NO: 3932284 - RNA, 18 nt, Human adenovirus E
ggaucuucagccagcguc

SEQ ID NO: 3932285 - RNA, 20 nt, Human adenovirus E
ggaugauccugcggaaccac

SEQ ID NO: 3932286 - RNA, 19 nt, Human adenovirus E
ggaugcaggggcggcaggg

SEQ ID NO: 3932287 - RNA, 15 nt, Human adenovirus E
ggaugcaugcggggg

SEQ ID NO: 3932288 - RNA, 19 nt, Human adenovirus E
ggaugcgucgccaccacca

SEQ ID NO: 3932289 - RNA, 16 nt, Human adenovirus E
ggcaacauccccgcgc

SEQ ID NO: 3932290 - RNA, 23 nt, Human adenovirus E
ggcaacauccccgcgcuccugga

SEQ ID NO: 3932291 - RNA, 13 nt, Human adenovirus E
ggcacagcacagg

SEQ ID NO: 3932292 - RNA, 14 nt, Human adenovirus E
ggcacagcacaggc

SEQ ID NO: 3932293 - RNA, 14 nt, Human adenovirus E
ggcagaggaggaca

SEQ ID NO: 3932294 - RNA, 16 nt, Human adenovirus E
ggcagaugcgccccca

SEQ ID NO: 3932295 - RNA, 16 nt, Human adenovirus E
ggcagcaccgggugau

SEQ ID NO: 3932296 - RNA, 23 nt, Human adenovirus E
ggcagcaccgggugauccuccac

SEQ ID NO: 3932297 - RNA, 20 nt, Human adenovirus E
ggcagcagguggacugagga

SEQ ID NO: 3932298 - RNA, 22 nt, Human adenovirus E
ggcaggacccggagacgcgcgg

SEQ ID NO: 3932299 - RNA, 14 nt, Human adenovirus E
ggcaugaccucggc

SEQ ID NO: 3932300 - RNA, 23 nt, Human adenovirus E
ggcauuaccccuacacaugauca

SEQ ID NO: 3932301 - RNA, 16 nt, Human adenovirus E
ggccaacuaccuggcc

SEQ ID NO: 3932302 - RNA, 17 nt, Human adenovirus E
ggccaccuaccacaucu

SEQ ID NO: 3932303 - RNA, 14 nt, Human adenovirus E
ggccacgagccggg

SEQ ID NO: 3932304 - RNA, 23 nt, Human adenovirus E
ggccagacccagccagaugaugc

SEQ ID NO: 3932305 - RNA, 18 nt, Human adenovirus E
ggccagaucguccagggc

SEQ ID NO: 3932306 - RNA, 13 nt, Human adenovirus E
ggccaggcgcacg

SEQ ID NO: 3932307 - RNA, 15 nt, Human adenovirus E
ggccauccuggaggc

SEQ ID NO: 3932308 - RNA, 16 nt, Human adenovirus E
ggccaucgccagcaug

SEQ ID NO: 3932309 - RNA, 16 nt, Human adenovirus E
ggccaucgugcagaac

SEQ ID NO: 3932310 - RNA, 16 nt, Human adenovirus E
ggccauggcgaccagc

SEQ ID NO: 3932311 - RNA, 13 nt, Human adenovirus E
ggcccuggccacc

SEQ ID NO: 3932312 - RNA, 19 nt, Human adenovirus E
ggcccuugacguggggcag

SEQ ID NO: 3932313 - RNA, 21 nt, Human adenovirus E
ggccgccgugagcggggcugg

SEQ ID NO: 3932314 - RNA, 22 nt, Human adenovirus E
ggccgcgcaccucugacccugc

SEQ ID NO: 3932315 - RNA, 23 nt, Human adenovirus E
ggccgucccagacaugcaagaga

SEQ ID NO: 3932316 - RNA, 17 nt, Human adenovirus E
gcaccucugacccugcc

SEQ ID NO: 3932317 - RNA, 16 nt, Human adenovirus E
gcaccugugggaccug

SEQ ID NO: 3932318 - RNA, 19 nt, Human adenovirus E
gcaccuucgaguugcaagg

SEQ ID NO: 3932319 - RNA, 17 nt, Human adenovirus E
  misc_feature (8)..(8): n is a, c, g, or u
gcacgaangaggccacg

SEQ ID NO: 3932320 - RNA, 16 nt, Human adenovirus E
gcacgaggaggagcug

SEQ ID NO: 3932321 - RNA, 20 nt, Human adenovirus E
gcacgaggaggagcuggcag

SEQ ID NO: 3932322 - RNA, 12 nt, Human adenovirus E
gcacggauacca

SEQ ID NO: 3932323 - RNA, 24 nt, Human adenovirus E
gcacguacucgcgcgccacgcacu

SEQ ID NO: 3932324 - RNA, 21 nt, Human adenovirus E
gcacgugcauguucucgcgca

SEQ ID NO: 3932325 - RNA, 19 nt, Human adenovirus E
gcacucaacccaccccacc

SEQ ID NO: 3932326 - RNA, 15 nt, Human adenovirus E
gcacucaggcagagg

SEQ ID NO: 3932327 - RNA, 13 nt, Human adenovirus E
gcacucccaguuc

SEQ ID NO: 3932328 - RNA, 21 nt, Human adenovirus E
gcacucccgcaucugcaccuc

SEQ ID NO: 3932329 - RNA, 16 nt, Human adenovirus E
gcacuggcagcccagc

SEQ ID NO: 3932330 - RNA, 17 nt, Human adenovirus E
gcagaaaaccagcagcu

SEQ ID NO: 3932331 - RNA, 14 nt, Human adenovirus E
gcagaaccuggucc

SEQ ID NO: 3932332 - RNA, 16 nt, Human adenovirus E
gcagaccgagcccaug

SEQ ID NO: 3932333 - RNA, 17 nt, Human adenovirus E
gcagaccuaccaggaga

SEQ ID NO: 3932334 - RNA, 18 nt, Human adenovirus E
gcagagcgcccuccaccg

SEQ ID NO: 3932335 - RNA, 13 nt, Human adenovirus E
gcagaggaggagg

SEQ ID NO: 3932336 - RNA, 23 nt, Human adenovirus E
gcagaggaggaggagauggagga

SEQ ID NO: 3932337 - RNA, 20 nt, Human adenovirus E
gcagagucgggggcaggagc

SEQ ID NO: 3932338 - RNA, 21 nt, Human adenovirus E
gcagagucgggggcaggagca

SEQ ID NO: 3932339 - RNA, 20 nt, Human adenovirus E
gcagaucaauggcccucaca

SEQ ID NO: 3932340 - RNA, 23 nt, Human adenovirus E
gcagcaaagcccccgaucccucc

SEQ ID NO: 3932341 - RNA, 12 nt, Human adenovirus E
gcagcaacuucc

SEQ ID NO: 3932342 - RNA, 19 nt, Human adenovirus E
gcagcagaaaaagaccagc

SEQ ID NO: 3932343 - RNA, 19 nt, Human adenovirus E
  misc_feature (10)..(10): n is a, c, g, or u
gcagcagccnuucuccacg

SEQ ID NO: 3932344 - RNA, 14 nt, Human adenovirus E
gcagcagugucugg

SEQ ID NO: 3932345 - RNA, 19 nt, Human adenovirus E
gcagcagugucuggaggag

SEQ ID NO: 3932346 - RNA, 19 nt, Human adenovirus E
gcagccacagcgcgcaccc

SEQ ID NO: 3932347 - RNA, 24 nt, Human adenovirus E
gcagccaggguccgguccuuccag

SEQ ID NO: 3932348 - RNA, 15 nt, Human adenovirus E
gcagccccaggccaa

SEQ ID NO: 3932349 - RNA, 20 nt, Human adenovirus E
gcagccccccugcucccaga

SEQ ID NO: 3932350 - RNA, 17 nt, Human adenovirus E
  misc_feature (7)..(7): n is a, c, g, or u
gcagccnuucuccacgg

SEQ ID NO: 3932351 - RNA, 20 nt, Human adenovirus E
gcagcgacgagacucgggcc

SEQ ID NO: 3932352 - RNA, 13 nt, Human adenovirus E
gcagcgagcuggg

SEQ ID NO: 3932353 - RNA, 19 nt, Human adenovirus E
gcagcggccaucgccagca

SEQ ID NO: 3932354 - RNA, 20 nt, Human adenovirus E
gcagcggccaucgccagcau

SEQ ID NO: 3932355 - RNA, 19 nt, Human adenovirus E
gcagcggccgaggcggcug

SEQ ID NO: 3932356 - RNA, 17 nt, Human adenovirus E
gcagcguccgcgucagg

SEQ ID NO: 3932357 - RNA, 18 nt, Human adenovirus E
gcagcguccgcgucaggg

SEQ ID NO: 3932358 - RNA, 23 nt, Human adenovirus E
gcagcguguucuccccccgaccg

SEQ ID NO: 3932359 - RNA, 16 nt, Human adenovirus E
gcaggccccggcgggc

SEQ ID NO: 3932360 - RNA, 13 nt, Human adenovirus E
gcaggccggagcu

SEQ ID NO: 3932361 - RNA, 21 nt, Human adenovirus E
gcaggccggagcuguccaggg

SEQ ID NO: 3932362 - RNA, 19 nt, Human adenovirus E
gcaggcggcgcgagcugag

SEQ ID NO: 3932363 - RNA, 17 nt, Human adenovirus E
gcagggccaggcgcacg

SEQ ID NO: 3932364 - RNA, 19 nt, Human adenovirus E
gcagggccuguggggcgug

SEQ ID NO: 3932365 - RNA, 16 nt, Human adenovirus E
gcagggcgcccagcag

SEQ ID NO: 3932366 - RNA, 13 nt, Human adenovirus E
gcaggggcggcuc

SEQ ID NO: 3932367 - RNA, 19 nt, Human adenovirus E
gcagggugaugagguccac

SEQ ID NO: 3932368 - RNA, 22 nt, Human adenovirus E
gcagguccagaccucggcgcga

SEQ ID NO: 3932369 - RNA, 15 nt, Human adenovirus E
gcagguggacugagg

SEQ ID NO: 3932370 - RNA, 19 nt, Human adenovirus E
gcagucauaaucaucugca

SEQ ID NO: 3932371 - RNA, 16 nt, Human adenovirus E
gcagugucuggaggag

SEQ ID NO: 3932372 - RNA, 18 nt, Human adenovirus E
gcagugucuggaggagca

SEQ ID NO: 3932373 - RNA, 18 nt, Human adenovirus E
gcaguuagcgcucuaguu

SEQ ID NO: 3932374 - RNA, 19 nt, Human adenovirus E
gcaucaggccccgcagcag

SEQ ID NO: 3932375 - RNA, 15 nt, Human adenovirus E
gcaucaucugggccu

SEQ ID NO: 3932376 - RNA, 14 nt, Human adenovirus E
gcaucugcaccuca

SEQ ID NO: 3932377 - RNA, 16 nt, Human adenovirus E
gcaugaccucggcacu

SEQ ID NO: 3932378 - RNA, 19 nt, Human adenovirus E
gcaugagcaccacagcgcc

SEQ ID NO: 3932379 - RNA, 13 nt, Human adenovirus E
gcaugcaauggca

SEQ ID NO: 3932380 - RNA, 15 nt, Human adenovirus E
gcauggucucgguga

SEQ ID NO: 3932381 - RNA, 21 nt, Human adenovirus E
gggagggggccugcgucgccg

SEQ ID NO: 3932382 - RNA, 18 nt, Human adenovirus E
gggauaggagcuccugga

SEQ ID NO: 3932383 - RNA, 22 nt, Human adenovirus E
gggaucagcaguuugggcagcg

SEQ ID NO: 3932384 - RNA, 23 nt, Human adenovirus E
gggaucagcaguuugggcagcgg

SEQ ID NO: 3932385 - RNA, 13 nt, Human adenovirus E
gggcaccuggagc

SEQ ID NO: 3932386 - RNA, 18 nt, Human adenovirus E
gggcacgcacccgggcuu

SEQ ID NO: 3932387 - RNA, 19 nt, Human adenovirus E
gggcagaacgugcugcaca

SEQ ID NO: 3932388 - RNA, 21 nt, Human adenovirus E
gggcaucaacgggguggugga

SEQ ID NO: 3932389 - RNA, 20 nt, Human adenovirus E
gggcauucgcaagaggcagc

SEQ ID NO: 3932390 - RNA, 21 nt, Human adenovirus E
gggccacgagccggggcagcg

SEQ ID NO: 3932391 - RNA, 23 nt, Human adenovirus E
gggcccggaugcaggggcggcag

SEQ ID NO: 3932392 - RNA, 13 nt, Human adenovirus E
gggccgggaccga

SEQ ID NO: 3932393 - RNA, 15 nt, Human adenovirus E
gggccgguccucgag

SEQ ID NO: 3932394 - RNA, 20 nt, Human adenovirus E
gggccuguggggcgugcagg

SEQ ID NO: 3932395 - RNA, 17 nt, Human adenovirus E
gggcgagguugagcucc

SEQ ID NO: 3932396 - RNA, 20 nt, Human adenovirus E
gggcggccuugcgcagggag

SEQ ID NO: 3932397 - RNA, 15 nt, Human adenovirus E
gggcggcggccuggg

SEQ ID NO: 3932398 - RNA, 22 nt, Human adenovirus E
gggcgucgcagggggccacgag

SEQ ID NO: 3932399 - RNA, 18 nt, Human adenovirus E
gggcgucgucgccggagc

SEQ ID NO: 3932400 - RNA, 13 nt, Human adenovirus E
gggcguggggcag

SEQ ID NO: 3932401 - RNA, 21 nt, Human adenovirus E
gggcguuggagaggagcuugg

SEQ ID NO: 3932402 - RNA, 22 nt, Human adenovirus E
gggcugccgcuguccgagaagc

SEQ ID NO: 3932403 - RNA, 18 nt, Human adenovirus E
ggggaacccguccugauc

SEQ ID NO: 3932404 - RNA, 16 nt, Human adenovirus E
ggggaagacgugguca

SEQ ID NO: 3932405 - RNA, 22 nt, Human adenovirus E
ggggaucagcaguuugggcagc

SEQ ID NO: 3932406 - RNA, 17 nt, Human adenovirus E
ggggcaccucggcccgg

SEQ ID NO: 3932407 - RNA, 16 nt, Human adenovirus E
ggggcagaggcggagg

SEQ ID NO: 3932408 - RNA, 23 nt, Human adenovirus E
ggggcccggaugcaggggcggca

SEQ ID NO: 3932409 - RNA, 22 nt, Human adenovirus E
ggggccgggaccgagggggaga

SEQ ID NO: 3932410 - RNA, 16 nt, Human adenovirus E
ggggcgauccuggccc

SEQ ID NO: 3932411 - RNA, 18 nt, Human adenovirus E
ggggcgauccuggcccaa

SEQ ID NO: 3932412 - RNA, 14 nt, Human adenovirus E
ggggcgcagggcau

SEQ ID NO: 3932413 - RNA, 14 nt, Human adenovirus E
ggggcggcagaacg

SEQ ID NO: 3932414 - RNA, 16 nt, Human adenovirus E
gggggcagggggucca

SEQ ID NO: 3932415 - RNA, 16 nt, Human adenovirus E
gggucccgcucgacca

SEQ ID NO: 3932416 - RNA, 14 nt, Human adenovirus E
gggucggagagcga

SEQ ID NO: 3932417 - RNA, 19 nt, Human adenovirus E
gggucuaccucgaccccca

SEQ ID NO: 3932418 - RNA, 18 nt, Human adenovirus E
ggguuggcgcggaggaag

SEQ ID NO: 3932419 - RNA, 13 nt, Human adenovirus E
gguacaugggcau

SEQ ID NO: 3932420 - RNA, 13 nt, Human adenovirus E
gguacuuggccag

SEQ ID NO: 3932421 - RNA, 20 nt, Human adenovirus E
gguagcuccauugcagggcc

SEQ ID NO: 3932422 - RNA, 20 nt, Human adenovirus E
gguaucgcaaucaggcagca

SEQ ID NO: 3932423 - RNA, 14 nt, Human adenovirus E
gguauugcuauuuu

SEQ ID NO: 3932424 - RNA, 20 nt, Human adenovirus E
ggucacggcguacgagcaga

SEQ ID NO: 3932425 - RNA, 15 nt, Human adenovirus E
ggucccggccggggg

SEQ ID NO: 3932426 - RNA, 19 nt, Human adenovirus E
gguccucggcguuggccau

SEQ ID NO: 3932427 - RNA, 14 nt, Human adenovirus E
gguccugggugagg

SEQ ID NO: 3932428 - RNA, 15 nt, Human adenovirus E
ggucgagcugaccca

SEQ ID NO: 3932429 - RNA, 22 nt, Human adenovirus E
ggucgcagaagaucccgcccca

SEQ ID NO: 3932430 - RNA, 14 nt, Human adenovirus E
ggucucgccgcgcc

SEQ ID NO: 3932431 - RNA, 15 nt, Human adenovirus E
ggucugcgaccugac

SEQ ID NO: 3932432 - RNA, 15 nt, Human adenovirus E
ggucuucgcggugcc

SEQ ID NO: 3932433 - RNA, 19 nt, Human adenovirus E
ggucuucgcggugcccgag

SEQ ID NO: 3932434 - RNA, 20 nt, Human adenovirus E
ggugaacauucugcagagca

SEQ ID NO: 3932435 - RNA, 20 nt, Human adenovirus E
ggugauaucuuccagauaac

SEQ ID NO: 3932436 - RNA, 13 nt, Human adenovirus E
ggugaugaggucc

SEQ ID NO: 3932437 - RNA, 14 nt, Human adenovirus E
ggugcccaagcgcc

SEQ ID NO: 3932438 - RNA, 20 nt, Human adenovirus E
ggugcccgaggcccuggcca

SEQ ID NO: 3932439 - RNA, 16 nt, Human adenovirus E
ggugccggcggagaug

SEQ ID NO: 3932440 - RNA, 16 nt, Human adenovirus E
ggugggcgccgagcuc

SEQ ID NO: 3932441 - RNA, 22 nt, Human adenovirus E
ggugggcuuggauguugaggua

SEQ ID NO: 3932442 - RNA, 15 nt, Human adenovirus E
gguguccagcuggcg

SEQ ID NO: 3932443 - RNA, 12 nt, Human adenovirus E
ggugugcuuucg

SEQ ID NO: 3932444 - RNA, 16 nt, Human adenovirus E
gguucaccugcagcag

SEQ ID NO: 3932445 - RNA, 15 nt, Human adenovirus E
gguuccaccgcgagu

SEQ ID NO: 3932446 - RNA, 13 nt, Human adenovirus E
gguuccuguggga

SEQ ID NO: 3932447 - RNA, 13 nt, Human adenovirus E
augguggcgcagc

SEQ ID NO: 3932448 - RNA, 23 nt, Human adenovirus E
augugaauguuacugaggggggc

SEQ ID NO: 3932449 - RNA, 15 nt, Human adenovirus E
augugauggaaguag

SEQ ID NO: 3932450 - RNA, 20 nt, Human adenovirus E
augugcuccuucuggaucau

SEQ ID NO: 3932451 - RNA, 12 nt, Human adenovirus E
auuacacagaca

SEQ ID NO: 3932452 - RNA, 15 nt, Human adenovirus E
auuaccacacagaca

SEQ ID NO: 3932453 - RNA, 21 nt, Human adenovirus E
auuagcagucauaaucaucug

SEQ ID NO: 3932454 - RNA, 16 nt, Human adenovirus E
auuauggaacuacagc

SEQ ID NO: 3932455 - RNA, 22 nt, Human adenovirus E
auucaaacaccucauuugcaua

SEQ ID NO: 3932456 - RNA, 16 nt, Human adenovirus E
auucgcaagaggcagc

SEQ ID NO: 3932457 - RNA, 12 nt, Human adenovirus E
auucucaggugc

SEQ ID NO: 3932458 - RNA, 17 nt, Human adenovirus E
auucuggagcaggcggc

SEQ ID NO: 3932459 - RNA, 13 nt, Human adenovirus E
auucuggccugca

SEQ ID NO: 3932460 - RNA, 12 nt, Human adenovirus E
auugacaagcgg

SEQ ID NO: 3932461 - RNA, 16 nt, Human adenovirus E
auuguuuuuugcaauc

SEQ ID NO: 3932462 - RNA, 13 nt, Human adenovirus E
auuuacacuggca

SEQ ID NO: 3932463 - RNA, 14 nt, Human adenovirus E
auuuggaggaagac

SEQ ID NO: 3932464 - RNA, 15 nt, Human adenovirus E
auuuggaggaagacu

SEQ ID NO: 3932465 - RNA, 19 nt, Human adenovirus E
auuuggaggaagacuggga

SEQ ID NO: 3932466 - RNA, 18 nt, Human adenovirus E
auuuuccccgagcgccuc

SEQ ID NO: 3932467 - RNA, 21 nt, Human adenovirus E
auuuuugccaugcgucaaaug

SEQ ID NO: 3932468 - RNA, 15 nt, Human adenovirus E
caaaauucucaggug

SEQ ID NO: 3932469 - RNA, 22 nt, Human adenovirus E
caaagucuaaaaauacccgcca

SEQ ID NO: 3932470 - RNA, 16 nt, Human adenovirus E
caacaaaugccagcug

SEQ ID NO: 3932471 - RNA, 15 nt, Human adenovirus E
caacaacagccaccu

SEQ ID NO: 3932472 - RNA, 16 nt, Human adenovirus E
caacagcaccaacgug

SEQ ID NO: 3932473 - RNA, 12 nt, Human adenovirus E
caacagccgccu

SEQ ID NO: 3932474 - RNA, 13 nt, Human adenovirus E
caacaggagaugc

SEQ ID NO: 3932475 - RNA, 20 nt, Human adenovirus E
caacauccccgcgcuccugg

SEQ ID NO: 3932476 - RNA, 14 nt, Human adenovirus E
caaccaaacuaacc

SEQ ID NO: 3932477 - RNA, 13 nt, Human adenovirus E
caaccacaaaaac

SEQ ID NO: 3932478 - RNA, 21 nt, Human adenovirus E
caaccaccccugccgcccugg

SEQ ID NO: 3932479 - RNA, 16 nt, Human adenovirus E
caaccaggccgugcag

SEQ ID NO: 3932480 - RNA, 17 nt, Human adenovirus E
caaccaggccgugcagc

SEQ ID NO: 3932481 - RNA, 17 nt, Human adenovirus E
caacccacauuacacag

SEQ ID NO: 3932482 - RNA, 17 nt, Human adenovirus E
caaccgcacccgcgccg

SEQ ID NO: 3932483 - RNA, 22 nt, Human adenovirus E
caaccuggaagccacccugaac

SEQ ID NO: 3932484 - RNA, 17 nt, Human adenovirus E
caacucguaccugggcu

SEQ ID NO: 3932485 - RNA, 13 nt, Human adenovirus E
caacuuccugacc

SEQ ID NO: 3932486 - RNA, 14 nt, Human adenovirus E
caacuuggaaggga

SEQ ID NO: 3932487 - RNA, 20 nt, Human adenovirus E
caagaacagccagagcagga

SEQ ID NO: 3932488 - RNA, 18 nt, Human adenovirus E
caagaagaggcagcagca

SEQ ID NO: 3932489 - RNA, 13 nt, Human adenovirus E
caagcagcacgga

SEQ ID NO: 3932490 - RNA, 14 nt, Human adenovirus E
caagccacaguaca

SEQ ID NO: 3932491 - RNA, 13 nt, Human adenovirus E
caagccgcugacg

SEQ ID NO: 3932492 - RNA, 16 nt, Human adenovirus E
caagcggccacagugc

SEQ ID NO: 3932493 - RNA, 19 nt, Human adenovirus E
caagcggugcguuccagca

SEQ ID NO: 3932494 - RNA, 16 nt, Human adenovirus E
caagcuccugcagaag

SEQ ID NO: 3932495 - RNA, 12 nt, Human adenovirus E
caaggaggaugc

SEQ ID NO: 3932496 - RNA, 19 nt, Human adenovirus E
caaggaugcgcugcucgac

SEQ ID NO: 3932497 - RNA, 12 nt, Human adenovirus E
caaggccauccg

SEQ ID NO: 3932498 - RNA, 22 nt, Human adenovirus E
caagggcccagcgaaggcgagg

SEQ ID NO: 3932499 - RNA, 13 nt, Human adenovirus E
caaguccagcaaa

SEQ ID NO: 3932500 - RNA, 22 nt, Human adenovirus E
caagucuauguuggcacagcac

SEQ ID NO: 3932501 - RNA, 19 nt, Human adenovirus E
caaguggugcccccuccag

SEQ ID NO: 3932502 - RNA, 21 nt, Human adenovirus E
caaguggugcccccuccagaa

SEQ ID NO: 3932503 - RNA, 23 nt, Human adenovirus E
caauaaggcacuacaaugcucag

SEQ ID NO: 3932504 - RNA, 15 nt, Human adenovirus E
caauauauagcccag

SEQ ID NO: 3932505 - RNA, 14 nt, Human adenovirus E
caaucaggcagcac

SEQ ID NO: 3932506 - RNA, 16 nt, Human adenovirus E
caaucaggcagcaccg

SEQ ID NO: 3932507 - RNA, 22 nt, Human adenovirus E
caaucucgguaucguugacggc

SEQ ID NO: 3932508 - RNA, 15 nt, Human adenovirus E
caaugguacugaucu

SEQ ID NO: 3932509 - RNA, 22 nt, Human adenovirus E
caauuacucacaccacacacac

SEQ ID NO: 3932510 - RNA, 18 nt, Human adenovirus E
caauuauauaugcaaugg

SEQ ID NO: 3932511 - RNA, 21 nt, Human adenovirus E
cacacauugaaagguccagaa

SEQ ID NO: 3932512 - RNA, 13 nt, Human adenovirus E
cacaccaccacag

SEQ ID NO: 3932513 - RNA, 14 nt, Human adenovirus E
cacacgcacuacca

SEQ ID NO: 3932514 - RNA, 17 nt, Human adenovirus E
cacacugguggccaccu

SEQ ID NO: 3932515 - RNA, 14 nt, Human adenovirus E
cacagaaccaccag

SEQ ID NO: 3932516 - RNA, 15 nt, Human adenovirus E
cacagaaccaccagg

SEQ ID NO: 3932517 - RNA, 19 nt, Human adenovirus E
cacagcaacuuccugacca

SEQ ID NO: 3932518 - RNA, 13 nt, Human adenovirus E
cacagccggcgcu

SEQ ID NO: 3932519 - RNA, 15 nt, Human adenovirus E
cacagggcaggcgcu

SEQ ID NO: 3932520 - RNA, 16 nt, Human adenovirus E
cacagggccagcaccg

SEQ ID NO: 3932521 - RNA, 17 nt, Human adenovirus E
cacauacaaagccucag

SEQ ID NO: 3932522 - RNA, 16 nt, Human adenovirus E
caccaacccuccagga

SEQ ID NO: 3932523 - RNA, 17 nt, Human adenovirus E
caccaagaacagccaga

SEQ ID NO: 3932524 - RNA, 18 nt, Human adenovirus E
caccacccuccaccgcaa

SEQ ID NO: 3932525 - RNA, 13 nt, Human adenovirus E
caccaucgucaag

SEQ ID NO: 3932526 - RNA, 14 nt, Human adenovirus E
caccaugcagcuga

SEQ ID NO: 3932527 - RNA, 18 nt, Human adenovirus E
cacccagucauagcaggg

SEQ ID NO: 3932528 - RNA, 19 nt, Human adenovirus E
cacccccacggaggccagc

SEQ ID NO: 3932529 - RNA, 21 nt, Human adenovirus E
cacccgguuguaccuggugga

SEQ ID NO: 3932530 - RNA, 15 nt, Human adenovirus E
cacccucgcucuggu

SEQ ID NO: 3932531 - RNA, 14 nt, Human adenovirus E
caccgcucccuggc

SEQ ID NO: 3932532 - RNA, 16 nt, Human adenovirus E
caccggcggcggcgcg

SEQ ID NO: 3932533 - RNA, 20 nt, Human adenovirus E
caccgggugauccuccacca

SEQ ID NO: 3932534 - RNA, 23 nt, Human adenovirus E
caccggugugcgcgugcccgugc

SEQ ID NO: 3932535 - RNA, 14 nt, Human adenovirus E
caccgugcggugag

SEQ ID NO: 3932536 - RNA, 17 nt, Human adenovirus E
caccuccgacgcggccg

SEQ ID NO: 3932537 - RNA, 19 nt, Human adenovirus E
caccucgcuuacgcacguc

SEQ ID NO: 3932538 - RNA, 13 nt, Human adenovirus E
caccugcagcaga

SEQ ID NO: 3932539 - RNA, 17 nt, Human adenovirus E
cacgaagcccugcagga

SEQ ID NO: 3932540 - RNA, 12 nt, Human adenovirus E
cacgaggaggag

SEQ ID NO: 3932541 - RNA, 23 nt, Human adenovirus E
cacgccgagccucaagcccguga

SEQ ID NO: 3932542 - RNA, 16 nt, Human adenovirus E
cacgccgcaccgcucc

SEQ ID NO: 3932543 - RNA, 22 nt, Human adenovirus E
cacggccaccaaggccgccgcc

SEQ ID NO: 3932544 - RNA, 15 nt, Human adenovirus E
cacggcggcggcagc

SEQ ID NO: 3932545 - RNA, 18 nt, Human adenovirus E
cacgucuucaaccgcuuc

SEQ ID NO: 3932546 - RNA, 20 nt, Human adenovirus E
cacgugagccgcgcccuggg

SEQ ID NO: 3932547 - RNA, 16 nt, Human adenovirus E
cacgugcugcacgagc

SEQ ID NO: 3932548 - RNA, 15 nt, Human adenovirus E
cacguggccgcggcc

SEQ ID NO: 3932549 - RNA, 12 nt, Human adenovirus E
cacuacccggac

SEQ ID NO: 3932550 - RNA, 22 nt, Human adenovirus E
cacuccauauaccaaugcugua

SEQ ID NO: 3932551 - RNA, 15 nt, Human adenovirus E
cagugacagaggauu

SEQ ID NO: 3932552 - RNA, 20 nt, Human adenovirus E
caguuauuuuuccuccaccc

SEQ ID NO: 3932553 - RNA, 14 nt, Human adenovirus E
caguuccgccagga

SEQ ID NO: 3932554 - RNA, 16 nt, Human adenovirus E
caguuccgccaggagg

SEQ ID NO: 3932555 - RNA, 20 nt, Human adenovirus E
caguugcuuucggacauuuu

SEQ ID NO: 3932556 - RNA, 19 nt, Human adenovirus E
caguuuuuccaacaacacc

SEQ ID NO: 3932557 - RNA, 19 nt, Human adenovirus E
cauaaucaucugcauguuc

SEQ ID NO: 3932558 - RNA, 15 nt, Human adenovirus E
cauacaaagccucag

SEQ ID NO: 3932559 - RNA, 20 nt, Human adenovirus E
cauaguucaacacgcuccag

SEQ ID NO: 3932560 - RNA, 15 nt, Human adenovirus E
caucaggccccgcag

SEQ ID NO: 3932561 - RNA, 17 nt, Human adenovirus E
caucaggccccgcagca

SEQ ID NO: 3932562 - RNA, 22 nt, Human adenovirus E
caucauaguugugguccugggu

SEQ ID NO: 3932563 - RNA, 15 nt, Human adenovirus E
caucaugccugaugg

SEQ ID NO: 3932564 - RNA, 18 nt, Human adenovirus E
caucauguacgccagcaa

SEQ ID NO: 3932565 - RNA, 21 nt, Human adenovirus E
cauccagaaacaagacaauag

SEQ ID NO: 3932566 - RNA, 18 nt, Human adenovirus E
cauccccaaauucaaaca

SEQ ID NO: 3932567 - RNA, 22 nt, Human adenovirus E
cauccgcggcgacgaggccggc

SEQ ID NO: 3932568 - RNA, 13 nt, Human adenovirus E
caucgccgcggcg

SEQ ID NO: 3932569 - RNA, 17 nt, Human adenovirus E
caucgccucgcugaacu

SEQ ID NO: 3932570 - RNA, 13 nt, Human adenovirus E
caucggcaccagc

SEQ ID NO: 3932571 - RNA, 15 nt, Human adenovirus E
caucguugaagagga

SEQ ID NO: 3932572 - RNA, 17 nt, Human adenovirus E
caucuccgcuccggguc

SEQ ID NO: 3932573 - RNA, 14 nt, Human adenovirus E
caucugcauguuca

SEQ ID NO: 3932574 - RNA, 19 nt, Human adenovirus E
caucuggcccggcaggcca

SEQ ID NO: 3932575 - RNA, 15 nt, Human adenovirus E
caugcaagagaugga

SEQ ID NO: 3932576 - RNA, 19 nt, Human adenovirus E
caugcaucucuucagcacu

SEQ ID NO: 3932577 - RNA, 17 nt, Human adenovirus E
caugcccaacgugaacg

SEQ ID NO: 3932578 - RNA, 17 nt, Human adenovirus E
caugcccgccucguucc

SEQ ID NO: 3932579 - RNA, 16 nt, Human adenovirus E
caugcggggggagaug

SEQ ID NO: 3932580 - RNA, 20 nt, Human adenovirus E
caugcggggggagaugaggu

SEQ ID NO: 3932581 - RNA, 17 nt, Human adenovirus E
caugcuuggucuugcgg

SEQ ID NO: 3932582 - RNA, 17 nt, Human adenovirus E
cauggaauacaccaccc

SEQ ID NO: 3932583 - RNA, 22 nt, Human adenovirus E
cauggaauacaccacccucucc

SEQ ID NO: 3932584 - RNA, 15 nt, Human adenovirus E
cauggagacucagcc

SEQ ID NO: 3932585 - RNA, 18 nt, Human adenovirus E
cauggagacucagccauc

SEQ ID NO: 3932586 - RNA, 13 nt, Human adenovirus E
cauggcgaccagc

SEQ ID NO: 3932587 - RNA, 17 nt, Human adenovirus E
cauggcuugcagggucc

SEQ ID NO: 3932588 - RNA, 18 nt, Human adenovirus E
caugguggucccgugcag

SEQ ID NO: 3932589 - RNA, 19 nt, Human adenovirus E
caugguggucccgugcagg

SEQ ID NO: 3932590 - RNA, 18 nt, Human adenovirus E
cauguucagggcggccag

SEQ ID NO: 3932591 - RNA, 17 nt, Human adenovirus E
cauguuuucugccaaca

SEQ ID NO: 3932592 - RNA, 19 nt, Human adenovirus E
cauguuuucugccaacacc

SEQ ID NO: 3932593 - RNA, 13 nt, Human adenovirus E
cauuaccacacag

SEQ ID NO: 3932594 - RNA, 15 nt, Human adenovirus E
cauuaccucugcucu

SEQ ID NO: 3932595 - RNA, 19 nt, Human adenovirus E
cauucggggaagacguggu

SEQ ID NO: 3932596 - RNA, 14 nt, Human adenovirus E
cauucuacacuaaa

SEQ ID NO: 3932597 - RNA, 14 nt, Human adenovirus E
cauucugcagagca

SEQ ID NO: 3932598 - RNA, 13 nt, Human adenovirus E
cauucuggccugc

SEQ ID NO: 3932599 - RNA, 23 nt, Human adenovirus E
cauugccaaaugcaagacugcua

SEQ ID NO: 3932600 - RNA, 22 nt, Human adenovirus E
cauugucaaugccaccucagcu

SEQ ID NO: 3932601 - RNA, 19 nt, Human adenovirus E
cauuucgcguacccggcuc

SEQ ID NO: 3932602 - RNA, 15 nt, Human adenovirus E
cauuuuuccagccuu

SEQ ID NO: 3932603 - RNA, 23 nt, Human adenovirus E
ccaaaaaucagacaugcauccca

SEQ ID NO: 3932604 - RNA, 15 nt, Human adenovirus E
ccaacgcgcaccgca

SEQ ID NO: 3932605 - RNA, 22 nt, Human adenovirus E
ccaacgugccccggggccagga

SEQ ID NO: 3932606 - RNA, 20 nt, Human adenovirus E
ccaacuucaucagcgcccug

SEQ ID NO: 3932607 - RNA, 14 nt, Human adenovirus E
ccaagaacagccag

SEQ ID NO: 3932608 - RNA, 18 nt, Human adenovirus E
ccaagaagaggcagcagc

SEQ ID NO: 3932609 - RNA, 18 nt, Human adenovirus E
ccaagagaagccccuggg

SEQ ID NO: 3932610 - RNA, 14 nt, Human adenovirus E
ccaagagccggcgg

SEQ ID NO: 3932611 - RNA, 19 nt, Human adenovirus E
ccacaagaaguaccucacc

SEQ ID NO: 3932612 - RNA, 14 nt, Human adenovirus E
ccacagcgacccau

SEQ ID NO: 3932613 - RNA, 14 nt, Human adenovirus E
ccacagcgcccugg

SEQ ID NO: 3932614 - RNA, 18 nt, Human adenovirus E
ccacagcgucgcuccccg

SEQ ID NO: 3932615 - RNA, 15 nt, Human adenovirus E
ccacagggccagcac

SEQ ID NO: 3932616 - RNA, 17 nt, Human adenovirus E
ccaccacuacagcagca

SEQ ID NO: 3932617 - RNA, 20 nt, Human adenovirus E
ccacccucuccccccgcaca

SEQ ID NO: 3932618 - RNA, 21 nt, Human adenovirus E
ccacccugugucgucaccgcc

SEQ ID NO: 3932619 - RNA, 14 nt, Human adenovirus E
ccaccguggugcag

SEQ ID NO: 3932620 - RNA, 15 nt, Human adenovirus E
ccaccucgccgcgca

SEQ ID NO: 3932621 - RNA, 21 nt, Human adenovirus E
ccacgccgggcuaccgcggca

SEQ ID NO: 3932622 - RNA, 14 nt, Human adenovirus E
ccacgcgcacaucc

SEQ ID NO: 3932623 - RNA, 18 nt, Human adenovirus E
ccacggaggccagcaccc

SEQ ID NO: 3932624 - RNA, 15 nt, Human adenovirus E
ccacggcccucagca

SEQ ID NO: 3932625 - RNA, 14 nt, Human adenovirus E
ccacgugagccgcg

SEQ ID NO: 3932626 - RNA, 16 nt, Human adenovirus E
ccacgugcgcacccug

SEQ ID NO: 3932627 - RNA, 21 nt, Human adenovirus E
ccacugcuaccugcugcgccu

SEQ ID NO: 3932628 - RNA, 22 nt, Human adenovirus E
ccacuuccucuucuuccuccuc

SEQ ID NO: 3932629 - RNA, 17 nt, Human adenovirus E
ccagaaaaagccacaga

SEQ ID NO: 3932630 - RNA, 19 nt, Human adenovirus E
ccagaaaaagccacagaag

SEQ ID NO: 3932631 - RNA, 16 nt, Human adenovirus E
ccagaguuuggaagag

SEQ ID NO: 3932632 - RNA, 13 nt, Human adenovirus E
ccagaugaugcaa

SEQ ID NO: 3932633 - RNA, 23 nt, Human adenovirus E
ccagcagagucgggggcaggagc

SEQ ID NO: 3932634 - RNA, 9 nt, Human adenovirus E
ccagcagca

SEQ ID NO: 3932635 - RNA, 20 nt, Human adenovirus E
ccagcagcaacuuccagcca

SEQ ID NO: 3932636 - RNA, 18 nt, Human adenovirus E
ccagcagccgccgccgca

SEQ ID NO: 3932637 - RNA, 21 nt, Human adenovirus E
ccagcaggcggcgcgagcuga

SEQ ID NO: 3932638 - RNA, 21 nt, Human adenovirus E
ccagcucgucugggguccgag

SEQ ID NO: 3932639 - RNA, 21 nt, Human adenovirus E
ccagcuggaucaugaucauug

SEQ ID NO: 3932640 - RNA, 18 nt, Human adenovirus E
ccaggacuacuccacccg

SEQ ID NO: 3932641 - RNA, 17 nt, Human adenovirus E
ccaggaggcgcucuccc

SEQ ID NO: 3932642 - RNA, 18 nt, Human adenovirus E
ccaggauacggaggcggg

SEQ ID NO: 3932643 - RNA, 12 nt, Human adenovirus E
ccaggcaggcca

SEQ ID NO: 3932644 - RNA, 20 nt, Human adenovirus E
ccaggccgaaguccagcuga

SEQ ID NO: 3932645 - RNA, 18 nt, Human adenovirus E
ccaggccgugcagcggca

SEQ ID NO: 3932646 - RNA, 19 nt, Human adenovirus E
ccaggccgugcagcggcag

SEQ ID NO: 3932647 - RNA, 17 nt, Human adenovirus E
ccagggacucccucagc

SEQ ID NO: 3932648 - RNA, 16 nt, Human adenovirus E
ccagggauaggagcuc

SEQ ID NO: 3932649 - RNA, 22 nt, Human adenovirus E
ccagggauaggagcuccuggag

SEQ ID NO: 3932650 - RNA, 11 nt, Human adenovirus E
ccaggugcuca

SEQ ID NO: 3932651 - RNA, 17 nt, Human adenovirus E
ccauacuccaccuccac

SEQ ID NO: 3932652 - RNA, 12 nt, Human adenovirus E
ccauagccagcc

SEQ ID NO: 3932653 - RNA, 19 nt, Human adenovirus E
ccauccagaaaucccgcca

SEQ ID NO: 3932654 - RNA, 13 nt, Human adenovirus E
ccaucgccagcau

SEQ ID NO: 3932655 - RNA, 15 nt, Human adenovirus E
ccucggcgcuguccg

SEQ ID NO: 3932656 - RNA, 21 nt, Human adenovirus E
ccucggcguuggccaucccga

SEQ ID NO: 3932657 - RNA, 20 nt, Human adenovirus E
ccucguuucgcggguuggga

SEQ ID NO: 3932658 - RNA, 14 nt, Human adenovirus E
ccucuaccucugcc

SEQ ID NO: 3932659 - RNA, 19 nt, Human adenovirus E
ccucuccccccgcacagcc

SEQ ID NO: 3932660 - RNA, 16 nt, Human adenovirus E
ccucugacccugccgc

SEQ ID NO: 3932661 - RNA, 22 nt, Human adenovirus E
ccucugggugaaggccacggga

SEQ ID NO: 3932662 - RNA, 19 nt, Human adenovirus E
ccucuucuuccuccuccac

SEQ ID NO: 3932663 - RNA, 15 nt, Human adenovirus E
ccugaccaccguggu

SEQ ID NO: 3932664 - RNA, 18 nt, Human adenovirus E
ccugaccggggccgggac

SEQ ID NO: 3932665 - RNA, 20 nt, Human adenovirus E
ccugcacaggcagcaaagcc

SEQ ID NO: 3932666 - RNA, 14 nt, Human adenovirus E
ccugcacuggcagc

SEQ ID NO: 3932667 - RNA, 21 nt, Human adenovirus E
ccugcacuggcagcccagccg

SEQ ID NO: 3932668 - RNA, 11 nt, Human adenovirus E
ccugcaucucg

SEQ ID NO: 3932669 - RNA, 15 nt, Human adenovirus E
ccugccgcgcgcgcg

SEQ ID NO: 3932670 - RNA, 19 nt, Human adenovirus E
ccugccgcugcgcagcagu

SEQ ID NO: 3932671 - RNA, 14 nt, Human adenovirus E
ccugcgccgcuucu

SEQ ID NO: 3932672 - RNA, 18 nt, Human adenovirus E
ccugcggaaccacagggc

SEQ ID NO: 3932673 - RNA, 20 nt, Human adenovirus E
ccugcggaaccacagggcca

SEQ ID NO: 3932674 - RNA, 20 nt, Human adenovirus E
ccugcguuacgugcagcaga

SEQ ID NO: 3932675 - RNA, 18 nt, Human adenovirus E
ccugcuccgcgcugcccu

SEQ ID NO: 3932676 - RNA, 19 nt, Human adenovirus E
ccugcucgagugccacugc

SEQ ID NO: 3932677 - RNA, 22 nt, Human adenovirus E
ccugcucgagugccacugccgc

SEQ ID NO: 3932678 - RNA, 17 nt, Human adenovirus E
ccugcugcgccuggcca

SEQ ID NO: 3932679 - RNA, 12 nt, Human adenovirus E
ccugcugggccu

SEQ ID NO: 3932680 - RNA, 18 nt, Human adenovirus E
ccugcuugcaggccugcg

SEQ ID NO: 3932681 - RNA, 17 nt, Human adenovirus E
ccuggacaaaauaccac

SEQ ID NO: 3932682 - RNA, 22 nt, Human adenovirus E
ccuggaugucgacgccuaugag

SEQ ID NO: 3932683 - RNA, 20 nt, Human adenovirus E
ccuggcagacgggcaugggc

SEQ ID NO: 3932684 - RNA, 12 nt, Human adenovirus E
ccugggccagga

SEQ ID NO: 3932685 - RNA, 16 nt, Human adenovirus E
ccugggccugaugcac

SEQ ID NO: 3932686 - RNA, 23 nt, Human adenovirus E
ccugggccugaugcaccuguggg

SEQ ID NO: 3932687 - RNA, 15 nt, Human adenovirus E
ccuggucgagcgcga

SEQ ID NO: 3932688 - RNA, 21 nt, Human adenovirus E
ccuggugaccguggagcugga

SEQ ID NO: 3932689 - RNA, 23 nt, Human adenovirus E
ccugguguacaacgcgcugcugg

SEQ ID NO: 3932690 - RNA, 18 nt, Human adenovirus E
ccugugggaccugcugga

SEQ ID NO: 3932691 - RNA, 22 nt, Human adenovirus E
ccuguucagagacaggagcggc

SEQ ID NO: 3932692 - RNA, 14 nt, Human adenovirus E
ccuuacgugccccc

SEQ ID NO: 3932693 - RNA, 22 nt, Human adenovirus E
ccuuccgcgagugccccccgcc

SEQ ID NO: 3932694 - RNA, 20 nt, Human adenovirus E
ccuucgcccuagccgccucc

SEQ ID NO: 3932695 - RNA, 21 nt, Human adenovirus E
ccuuggaagagggcgaggggc

SEQ ID NO: 3932696 - RNA, 19 nt, Human adenovirus E
ccuuguacgauaccacccg

SEQ ID NO: 3932697 - RNA, 20 nt, Human adenovirus E
cgaacgggaucggccggugg

SEQ ID NO: 3932698 - RNA, 20 nt, Human adenovirus E
cgaaggaccccauccaggug

SEQ ID NO: 3932699 - RNA, 15 nt, Human adenovirus E
cgaaguccuccccag

SEQ ID NO: 3932700 - RNA, 13 nt, Human adenovirus E
cgacaccuggacc

SEQ ID NO: 3932701 - RNA, 14 nt, Human adenovirus E
cgacagcguggugg

SEQ ID NO: 3932702 - RNA, 22 nt, Human adenovirus E
cgaccaccguggaaugggccag

SEQ ID NO: 3932703 - RNA, 22 nt, Human adenovirus E
cgacccccggucccccacccag

SEQ ID NO: 3932704 - RNA, 19 nt, Human adenovirus E
cgacccgggcaaccuggaa

SEQ ID NO: 3932705 - RNA, 14 nt, Human adenovirus E
cgacucccaccugc

SEQ ID NO: 3932706 - RNA, 18 nt, Human adenovirus E
cgagcaaggacagacccu

SEQ ID NO: 3932707 - RNA, 19 nt, Human adenovirus E
cgagcagcuggcccggugg

SEQ ID NO: 3932708 - RNA, 17 nt, Human adenovirus E
cgagcccaacccgcgcc

SEQ ID NO: 3932709 - RNA, 14 nt, Human adenovirus E
cgagcggugugccg

SEQ ID NO: 3932710 - RNA, 18 nt, Human adenovirus E
cgaggacgucagcggcga

SEQ ID NO: 3932711 - RNA, 19 nt, Human adenovirus E
cgaggagccccgggcccag

SEQ ID NO: 3932712 - RNA, 20 nt, Human adenovirus E
cgaggaggaggcagaggagg

SEQ ID NO: 3932713 - RNA, 18 nt, Human adenovirus E
cgaggccguggcccagcg

SEQ ID NO: 3932714 - RNA, 23 nt, Human adenovirus E
cgaggcggacgagcugacgggga

SEQ ID NO: 3932715 - RNA, 16 nt, Human adenovirus E
cgaguccaaccuggga

SEQ ID NO: 3932716 - RNA, 12 nt, Human adenovirus E
cgauaaacucac

SEQ ID NO: 3932717 - RNA, 19 nt, Human adenovirus E
cgauauugucuugcugccc

SEQ ID NO: 3932718 - RNA, 21 nt, Human adenovirus E
cgaucaugugcuccuucugga

SEQ ID NO: 3932719 - RNA, 13 nt, Human adenovirus E
cgaucccuccagg

SEQ ID NO: 3932720 - RNA, 17 nt, Human adenovirus E
cgaugaaguaaaugcaa

SEQ ID NO: 3932721 - RNA, 22 nt, Human adenovirus E
cgaugcagcccccgcuggaggc

SEQ ID NO: 3932722 - RNA, 22 nt, Human adenovirus E
cgcaaggucgaggagaaccugc

SEQ ID NO: 3932723 - RNA, 12 nt, Human adenovirus E
cgcaccaccgcc

SEQ ID NO: 3932724 - RNA, 21 nt, Human adenovirus E
cgcaccaguuccgccaggagg

SEQ ID NO: 3932725 - RNA, 24 nt, Human adenovirus E
cgcaccgaggugccccucagcgug

SEQ ID NO: 3932726 - RNA, 22 nt, Human adenovirus E
cgcaccgcucccuggccugcaa

SEQ ID NO: 3932727 - RNA, 19 nt, Human adenovirus E
cgcacgggacgcagggcca

SEQ ID NO: 3932728 - RNA, 16 nt, Human adenovirus E
cgcacggucgagcuga

SEQ ID NO: 3932729 - RNA, 20 nt, Human adenovirus E
cgcacguagucauacagcuc

SEQ ID NO: 3932730 - RNA, 18 nt, Human adenovirus E
cgcacguggacgagcaga

SEQ ID NO: 3932731 - RNA, 19 nt, Human adenovirus E
cgcagcagaggaggcagca

SEQ ID NO: 3932732 - RNA, 22 nt, Human adenovirus E
cgcagcagcugcgcgccuucac

SEQ ID NO: 3932733 - RNA, 17 nt, Human adenovirus E
cgcaggcgggacagagg

SEQ ID NO: 3932734 - RNA, 15 nt, Human adenovirus E
cgcagugcaggggga

SEQ ID NO: 3932735 - RNA, 15 nt, Human adenovirus E
cgcagugggcgcaga

SEQ ID NO: 3932736 - RNA, 11 nt, Human adenovirus E
cgccaccaccc

SEQ ID NO: 3932737 - RNA, 15 nt, Human adenovirus E
cgccagacgccgcac

SEQ ID NO: 3932738 - RNA, 15 nt, Human adenovirus E
cgccagggcuugcag

SEQ ID NO: 3932739 - RNA, 17 nt, Human adenovirus E
cgccaucgucuccugcu

SEQ ID NO: 3932740 - RNA, 10 nt, Human adenovirus E
cgcccagccc

SEQ ID NO: 3932741 - RNA, 22 nt, Human adenovirus E
cgcccaggacuacuccacccgc

SEQ ID NO: 3932742 - RNA, 12 nt, Human adenovirus E
cgccccagcagc

SEQ ID NO: 3932743 - RNA, 19 nt, Human adenovirus E
cgcccguaaacgccggugg

SEQ ID NO: 3932744 - RNA, 19 nt, Human adenovirus E
cgcccuuuucaaccugggu

SEQ ID NO: 3932745 - RNA, 16 nt, Human adenovirus E
cgccgacgacagcagc

SEQ ID NO: 3932746 - RNA, 23 nt, Human adenovirus E
cgccgagacggucaacuccuccu

SEQ ID NO: 3932747 - RNA, 14 nt, Human adenovirus E
cgccgcccuggugu

SEQ ID NO: 3932748 - RNA, 21 nt, Human adenovirus E
cgccgcucgccgucgccgcac

SEQ ID NO: 3932749 - RNA, 14 nt, Human adenovirus E
cgccggcaggaccc

SEQ ID NO: 3932750 - RNA, 20 nt, Human adenovirus E
gaucccauuugagcuggagg

SEQ ID NO: 3932751 - RNA, 18 nt, Human adenovirus E
gaucccgaauaccacagc

SEQ ID NO: 3932752 - RNA, 15 nt, Human adenovirus E
gauccuccaccagag

SEQ ID NO: 3932753 - RNA, 18 nt, Human adenovirus E
gauccugcggaaccacag

SEQ ID NO: 3932754 - RNA, 23 nt, Human adenovirus E
gauccugcggaaccacagggcca

SEQ ID NO: 3932755 - RNA, 24 nt, Human adenovirus E
gauccugcggaaccacagggccag

SEQ ID NO: 3932756 - RNA, 17 nt, Human adenovirus E
gaucguccagggcagcu

SEQ ID NO: 3932757 - RNA, 17 nt, Human adenovirus E
gaucgugaacauucugg

SEQ ID NO: 3932758 - RNA, 20 nt, Human adenovirus E
gaucucgucgaagccguuga

SEQ ID NO: 3932759 - RNA, 20 nt, Human adenovirus E
gaucugacgccucuggguga

SEQ ID NO: 3932760 - RNA, 15 nt, Human adenovirus E
gaugacugacccacu

SEQ ID NO: 3932761 - RNA, 15 nt, Human adenovirus E
gaugaggcgugcgua

SEQ ID NO: 3932762 - RNA, 20 nt, Human adenovirus E
gaugaugucauacuugagcu

SEQ ID NO: 3932763 - RNA, 22 nt, Human adenovirus E
gaugcaccugugggaccugcug

SEQ ID NO: 3932764 - RNA, 19 nt, Human adenovirus E
gaugcaggggcggcagggg

SEQ ID NO: 3932765 - RNA, 17 nt, Human adenovirus E
gaugccgggcaggaggu

SEQ ID NO: 3932766 - RNA, 17 nt, Human adenovirus E
gaugccuuucaagagcc

SEQ ID NO: 3932767 - RNA, 15 nt, Human adenovirus E
gauggaaguggccag

SEQ ID NO: 3932768 - RNA, 17 nt, Human adenovirus E
gauggcaccucucgccc

SEQ ID NO: 3932769 - RNA, 16 nt, Human adenovirus E
gauggccacgggcagc

SEQ ID NO: 3932770 - RNA, 23 nt, Human adenovirus E
gauggcggcggcggcgaugcagc

SEQ ID NO: 3932771 - RNA, 14 nt, Human adenovirus E
gauggcuggcagag

SEQ ID NO: 3932772 - RNA, 18 nt, Human adenovirus E
gauguacagguggcagau

SEQ ID NO: 3932773 - RNA, 13 nt, Human adenovirus E
gauguugaagugg

SEQ ID NO: 3932774 - RNA, 18 nt, Human adenovirus E
gauguuggagauggcgag

SEQ ID NO: 3932775 - RNA, 19 nt, Human adenovirus E
gauucccacggagcccaug

SEQ ID NO: 3932776 - RNA, 23 nt, Human adenovirus E
gcaaacacaugucccccucgucc

SEQ ID NO: 3932777 - RNA, 19 nt, Human adenovirus E
gcaaccuggaagccacccu

SEQ ID NO: 3932778 - RNA, 17 nt, Human adenovirus E
gcaacucguaccugggc

SEQ ID NO: 3932779 - RNA, 16 nt, Human adenovirus E
gcaagacagucuggag

SEQ ID NO: 3932780 - RNA, 15 nt, Human adenovirus E
gcaagaggcagcccu

SEQ ID NO: 3932781 - RNA, 15 nt, Human adenovirus E
gcaagaguuccaggc

SEQ ID NO: 3932782 - RNA, 14 nt, Human adenovirus E
gcaagcagcacgga

SEQ ID NO: 3932783 - RNA, 17 nt, Human adenovirus E
gcaagccacaguacaga

SEQ ID NO: 3932784 - RNA, 14 nt, Human adenovirus E
gcaagcgcagccgu

SEQ ID NO: 3932785 - RNA, 21 nt, Human adenovirus E
gcaaggcguggaacagcacca

SEQ ID NO: 3932786 - RNA, 13 nt, Human adenovirus E
gcaagggcccagc

SEQ ID NO: 3932787 - RNA, 15 nt, Human adenovirus E
gcaaucaggcagcac

SEQ ID NO: 3932788 - RNA, 18 nt, Human adenovirus E
gcaauccucgcacagaac

SEQ ID NO: 3932789 - RNA, 12 nt, Human adenovirus E
gcacagcacagg

SEQ ID NO: 3932790 - RNA, 18 nt, Human adenovirus E
gcacaggcagcaaagccc

SEQ ID NO: 3932791 - RNA, 17 nt, Human adenovirus E
gcaccaacccuccagga

SEQ ID NO: 3932792 - RNA, 18 nt, Human adenovirus E
gcaccaacgugcagacca

SEQ ID NO: 3932793 - RNA, 19 nt, Human adenovirus E
gcaccacagggcaggcgcu

SEQ ID NO: 3932794 - RNA, 21 nt, Human adenovirus E
gcaccaccgccucggaccugg

SEQ ID NO: 3932795 - RNA, 19 nt, Human adenovirus E
gcacccuuguacgauacca

SEQ ID NO: 3932796 - RNA, 23 nt, Human adenovirus E
gcacccuuguacgauaccacccg

SEQ ID NO: 3932797 - RNA, 18 nt, Human adenovirus E
gcaccgcucccuggccug

SEQ ID NO: 3932798 - RNA, 13 nt, Human adenovirus E
gcaccggagcacc

SEQ ID NO: 3932799 - RNA, 16 nt, Human adenovirus E
gcgccgggcggcaggg

SEQ ID NO: 3932800 - RNA, 19 nt, Human adenovirus E
gcgcgccgguacgcccgcg

SEQ ID NO: 3932801 - RNA, 15 nt, Human adenovirus E
gcgcugcccucggac

SEQ ID NO: 3932802 - RNA, 13 nt, Human adenovirus E
gcggaaccacagg

SEQ ID NO: 3932803 - RNA, 22 nt, Human adenovirus E
gcggaaccacagggccagcacc

SEQ ID NO: 3932804 - RNA, 13 nt, Human adenovirus E
gcggaugaagcac

SEQ ID NO: 3932805 - RNA, 21 nt, Human adenovirus E
gcggccacggcggcggcagcg

SEQ ID NO: 3932806 - RNA, 23 nt, Human adenovirus E
gcggccagccugcugaugcccaa

SEQ ID NO: 3932807 - RNA, 20 nt, Human adenovirus E
gcggccagcugaaaaccauc

SEQ ID NO: 3932808 - RNA, 21 nt, Human adenovirus E
  misc_feature (9)..(9): n is a, c, g, or u
gcggccgancgccugggcgag

SEQ ID NO: 3932809 - RNA, 15 nt, Human adenovirus E
gcggccgccaugaac

SEQ ID NO: 3932810 - RNA, 15 nt, Human adenovirus E
gcggccgccgugagc

SEQ ID NO: 3932811 - RNA, 15 nt, Human adenovirus E
gcggcgaugcagccc

SEQ ID NO: 3932812 - RNA, 14 nt, Human adenovirus E
gcggcgcacgggca

SEQ ID NO: 3932813 - RNA, 17 nt, Human adenovirus E
gcggcgcgagcugagcg

SEQ ID NO: 3932814 - RNA, 23 nt, Human adenovirus E
gcggcgcgagcugagcgaccagg

SEQ ID NO: 3932815 - RNA, 16 nt, Human adenovirus E
gcggcgcgccaucagc

SEQ ID NO: 3932816 - RNA, 14 nt, Human adenovirus E
gcggcgcugcagag

SEQ ID NO: 3932817 - RNA, 12 nt, Human adenovirus E
gcggcggcagca

SEQ ID NO: 3932818 - RNA, 19 nt, Human adenovirus E
gcggcgguacaccucgccc

SEQ ID NO: 3932819 - RNA, 18 nt, Human adenovirus E
gcgggacgcggcugaucg

SEQ ID NO: 3932820 - RNA, 14 nt, Human adenovirus E
gcggggcgggagcu

SEQ ID NO: 3932821 - RNA, 13 nt, Human adenovirus E
gcgggggagauga

SEQ ID NO: 3932822 - RNA, 20 nt, Human adenovirus E
gcggggggagaugaggugca

SEQ ID NO: 3932823 - RNA, 22 nt, Human adenovirus E
gcgggguuucuucuugggcggc

SEQ ID NO: 3932824 - RNA, 19 nt, Human adenovirus E
gcgguacaccucgcccugc

SEQ ID NO: 3932825 - RNA, 14 nt, Human adenovirus E
gcggucauggacca

SEQ ID NO: 3932826 - RNA, 18 nt, Human adenovirus E
gcgguggggcggccagcu

SEQ ID NO: 3932827 - RNA, 20 nt, Human adenovirus E
gcgucgcagggggccacgag

SEQ ID NO: 3932828 - RNA, 19 nt, Human adenovirus E
gcgucguuguuggccagcu

SEQ ID NO: 3932829 - RNA, 20 nt, Human adenovirus E
gcgucuaccucuaccucugc

SEQ ID NO: 3932830 - RNA, 23 nt, Human adenovirus E
gcgugcacgaagcccugcaggaa

SEQ ID NO: 3932831 - RNA, 22 nt, Human adenovirus E
gcguggccuuuggcgcggagcu

SEQ ID NO: 3932832 - RNA, 13 nt, Human adenovirus E
gcuaccuccagug

SEQ ID NO: 3932833 - RNA, 15 nt, Human adenovirus E
gcuaccugcucuucc

SEQ ID NO: 3932834 - RNA, 17 nt, Human adenovirus E
gcucacuaccaauaaca

SEQ ID NO: 3932835 - RNA, 19 nt, Human adenovirus E
gcuccacgcaacaccccgu

SEQ ID NO: 3932836 - RNA, 20 nt, Human adenovirus E
gcuccacgguggccgcgaag

SEQ ID NO: 3932837 - RNA, 14 nt, Human adenovirus E
gcucccuggggcgc

SEQ ID NO: 3932838 - RNA, 16 nt, Human adenovirus E
gcuccgcgacacggca

SEQ ID NO: 3932839 - RNA, 14 nt, Human adenovirus E
gcuccucccucagc

SEQ ID NO: 3932840 - RNA, 15 nt, Human adenovirus E
gcuccucccucagca

SEQ ID NO: 3932841 - RNA, 15 nt, Human adenovirus E
gcuccuccucggccu

SEQ ID NO: 3932842 - RNA, 23 nt, Human adenovirus E
gcuccugcagaagaacucaaggg

SEQ ID NO: 3932843 - RNA, 12 nt, Human adenovirus E
gcuccugguccu

SEQ ID NO: 3932844 - RNA, 20 nt, Human adenovirus E
gcuccugguucaccugcagc

SEQ ID NO: 3932845 - RNA, 21 nt, Human adenovirus E
gcuccugguucaccugcagca

SEQ ID NO: 3932846 - RNA, 22 nt, Human adenovirus E
gcucgagugccacugccgcugc

SEQ ID NO: 3932847 - RNA, 20 nt, Human adenovirus E
gcucgcaacgcugcacggga

SEQ ID NO: 3932848 - RNA, 14 nt, Human adenovirus E
gcucgccucgggca

SEQ ID NO: 3932849 - RNA, 22 nt, Human adenovirus E
gcucgcgcagagcgcccuccac

SEQ ID NO: 3932850 - RNA, 23 nt, Human adenovirus E
gcucgucugccguagucuggaga

SEQ ID NO: 3932851 - RNA, 15 nt, Human adenovirus E
gcucugaaccugccc

SEQ ID NO: 3932852 - RNA, 21 nt, Human adenovirus E
gcucugcaaggagaaggagga

SEQ ID NO: 3932853 - RNA, 23 nt, Human adenovirus E
gcugaacgccuuccucagcaccc

SEQ ID NO: 3932854 - RNA, 23 nt, Human adenovirus E
gcugacaguaugauuuuuuacaa

SEQ ID NO: 3932855 - RNA, 17 nt, Human adenovirus E
gcugaccaaccuggucu

SEQ ID NO: 3932856 - RNA, 19 nt, Human adenovirus E
gcugacggggaucagcccc

SEQ ID NO: 3932857 - RNA, 15 nt, Human adenovirus E
gcugacguccugcag

SEQ ID NO: 3932858 - RNA, 18 nt, Human adenovirus E
gcugcaccacgcugcgcc

SEQ ID NO: 3932859 - RNA, 15 nt, Human adenovirus E
gcugcugcugguggc

SEQ ID NO: 3932860 - RNA, 18 nt, Human adenovirus E
gcuggagcgcguggcccg

SEQ ID NO: 3932861 - RNA, 18 nt, Human adenovirus E
gcuggagugccugcgccg

SEQ ID NO: 3932862 - RNA, 23 nt, Human adenovirus E
gcuggagugccugcgccgcuucu

SEQ ID NO: 3932863 - RNA, 15 nt, Human adenovirus E
gcuggcgcgcacgua

SEQ ID NO: 3932864 - RNA, 16 nt, Human adenovirus E
gcugggcgaagaggag

SEQ ID NO: 3932865 - RNA, 21 nt, Human adenovirus E
gcuggguccuaaugcuagucc

SEQ ID NO: 3932866 - RNA, 19 nt, Human adenovirus E
gcuguaguggugugcaugu

SEQ ID NO: 3932867 - RNA, 20 nt, Human adenovirus E
gcuguggagccacugcuacc

SEQ ID NO: 3932868 - RNA, 19 nt, Human adenovirus E
gcuguugaugugauggaag

SEQ ID NO: 3932869 - RNA, 21 nt, Human adenovirus E
gcuuaccgagcagcagcacac

SEQ ID NO: 3932870 - RNA, 12 nt, Human adenovirus E
gcuucaggcgcc

SEQ ID NO: 3932871 - RNA, 22 nt, Human adenovirus E
gcuucuucaacgagcaggccgu

SEQ ID NO: 3932872 - RNA, 19 nt, Human adenovirus E
gcuugcauuucaaucccaa

SEQ ID NO: 3932873 - RNA, 16 nt, Human adenovirus E
ggaaagguuggggcac

SEQ ID NO: 3932874 - RNA, 20 nt, Human adenovirus E
ggaaccacagggccagcacc

SEQ ID NO: 3932875 - RNA, 19 nt, Human adenovirus E
ggaacucuugcaggacagc

SEQ ID NO: 3932876 - RNA, 15 nt, Human adenovirus E
ggaagacgugcugga

SEQ ID NO: 3932877 - RNA, 15 nt, Human adenovirus E
ggaagagcggcgcaa

SEQ ID NO: 3932878 - RNA, 21 nt, Human adenovirus E
ggaagcagagaaugagcagag

SEQ ID NO: 3932879 - RNA, 17 nt, Human adenovirus E
ggaagcuauguuggagc

SEQ ID NO: 3932880 - RNA, 23 nt, Human adenovirus E
ggaaugggccagacccagccaga

SEQ ID NO: 3932881 - RNA, 20 nt, Human adenovirus E
ggacaagauaaacaccgccu

SEQ ID NO: 3932882 - RNA, 14 nt, Human adenovirus E
ggacagauguggga

SEQ ID NO: 3932883 - RNA, 14 nt, Human adenovirus E
ggaccaccagcacg

SEQ ID NO: 3932884 - RNA, 21 nt, Human adenovirus E
ggaccacggcaaccccacgcc

SEQ ID NO: 3932885 - RNA, 16 nt, Human adenovirus E
ggaccccauccaggug

SEQ ID NO: 3932886 - RNA, 17 nt, Human adenovirus E
ggaccccgugaccgagc

SEQ ID NO: 3932887 - RNA, 14 nt, Human adenovirus E
ggacccgugaguuu

SEQ ID NO: 3932888 - RNA, 13 nt, Human adenovirus E
ggaccugcuggag

SEQ ID NO: 3932889 - RNA, 17 nt, Human adenovirus E
ggacgaugaggacuccg

SEQ ID NO: 3932890 - RNA, 20 nt, Human adenovirus E
ggacguccagagcgcaguag

SEQ ID NO: 3932891 - RNA, 21 nt, Human adenovirus E
ggacuacuucuuccagaccag

SEQ ID NO: 3932892 - RNA, 19 nt, Human adenovirus E
ggacuccguggcucugccu

SEQ ID NO: 3932893 - RNA, 15 nt, Human adenovirus E
ggacugaggggcgug

SEQ ID NO: 3932894 - RNA, 21 nt, Human adenovirus E
ggagaaagcaagcagcacgga

SEQ ID NO: 3932895 - RNA, 23 nt, Human adenovirus E
ggagaacagcagucaggcagagg

SEQ ID NO: 3932896 - RNA, 13 nt, Human adenovirus E
ggagacucagcca

SEQ ID NO: 3932897 - RNA, 15 nt, Human adenovirus E
ggagagcaugagcac

SEQ ID NO: 3932898 - RNA, 16 nt, Human adenovirus E
ggagaucuuccuucac

SEQ ID NO: 3932899 - RNA, 19 nt, Human adenovirus E
ggagaugcggcccaugagc

SEQ ID NO: 3932900 - RNA, 21 nt, Human adenovirus E
ggagcacgaggaggagcuggc

SEQ ID NO: 3932901 - RNA, 12 nt, Human adenovirus E
ggagccacugcu

SEQ ID NO: 3932902 - RNA, 22 nt, Human adenovirus E
ggagcgacaucggcaccagcca

SEQ ID NO: 3932903 - RNA, 15 nt, Human adenovirus E
ggagcggcgaggagc

SEQ ID NO: 3932904 - RNA, 16 nt, Human adenovirus E
ggagcucagccgcgcc

SEQ ID NO: 3932905 - RNA, 17 nt, Human adenovirus E
ggagcuggagugccugc

SEQ ID NO: 3932906 - RNA, 13 nt, Human adenovirus E
ggagcuggcagug

SEQ ID NO: 3932907 - RNA, 13 nt, Human adenovirus E
ggaggagcuggca

SEQ ID NO: 3932908 - RNA, 16 nt, Human adenovirus E
ggaggagguggaagaa

SEQ ID NO: 3932909 - RNA, 13 nt, Human adenovirus E
ggaggaugcagca

SEQ ID NO: 3932910 - RNA, 23 nt, Human adenovirus E
ggaggcagaggaggagguggaag

SEQ ID NO: 3932911 - RNA, 20 nt, Human adenovirus E
ggaggccaucgugcagaacc

SEQ ID NO: 3932912 - RNA, 13 nt, Human adenovirus E
ggaggucgggguc

SEQ ID NO: 3932913 - RNA, 18 nt, Human adenovirus E
ggagucaggucagugggc

SEQ ID NO: 3932914 - RNA, 22 nt, Human adenovirus E
ggagucgguccacagcuuccgc

SEQ ID NO: 3932915 - RNA, 21 nt, Human adenovirus E
uccagcuggcgggcggcgcca

SEQ ID NO: 3932916 - RNA, 21 nt, Human adenovirus E
  misc_feature (8)..(8): n is a, c, g, or u
uccagcunuuccaacccuucc

SEQ ID NO: 3932917 - RNA, 19 nt, Human adenovirus E
uccagggacucccucagca

SEQ ID NO: 3932918 - RNA, 14 nt, Human adenovirus E
uccagggcuccccg

SEQ ID NO: 3932919 - RNA, 18 nt, Human adenovirus E
uccaguguaagccccaca

SEQ ID NO: 3932920 - RNA, 21 nt, Human adenovirus E
uccauguuuucugccaacacc

SEQ ID NO: 3932921 - RNA, 16 nt, Human adenovirus E
ucccauacuccaccuc

SEQ ID NO: 3932922 - RNA, 21 nt, Human adenovirus E
ucccgcaucugcaccucacag

SEQ ID NO: 3932923 - RNA, 14 nt, Human adenovirus E
ucccgccugaaccu

SEQ ID NO: 3932924 - RNA, 20 nt, Human adenovirus E
uccgaccgagucgcggauga

SEQ ID NO: 3932925 - RNA, 19 nt, Human adenovirus E
uccgccgacgacagcagcg

SEQ ID NO: 3932926 - RNA, 13 nt, Human adenovirus E
uccgcgcccaccg

SEQ ID NO: 3932927 - RNA, 14 nt, Human adenovirus E
uccgcuccacgcgu

SEQ ID NO: 3932928 - RNA, 15 nt, Human adenovirus E
uccggaauccugccc

SEQ ID NO: 3932929 - RNA, 13 nt, Human adenovirus E
uccggagcagcug

SEQ ID NO: 3932930 - RNA, 22 nt, Human adenovirus E
uccgggucucggcauggcccgc

SEQ ID NO: 3932931 - RNA, 11 nt, Human adenovirus E
uccuccuccag

SEQ ID NO: 3932932 - RNA, 13 nt, Human adenovirus E
uccucgcagcccc

SEQ ID NO: 3932933 - RNA, 12 nt, Human adenovirus E
uccugcacaggc

SEQ ID NO: 3932934 - RNA, 16 nt, Human adenovirus E
uccugcccgccaccug

SEQ ID NO: 3932935 - RNA, 19 nt, Human adenovirus E
uccugcggaaccacagggc

SEQ ID NO: 3932936 - RNA, 15 nt, Human adenovirus E
uccugcguuacgugc

SEQ ID NO: 3932937 - RNA, 21 nt, Human adenovirus E
uccuuacaaguuucuccacca

SEQ ID NO: 3932938 - RNA, 15 nt, Human adenovirus E
uccuuugacgaggaa

SEQ ID NO: 3932939 - RNA, 23 nt, Human adenovirus E
ucgaaggcgggcaugaccucggc

SEQ ID NO: 3932940 - RNA, 19 nt, Human adenovirus E
ucgacaagaugaauacacc

SEQ ID NO: 3932941 - RNA, 13 nt, Human adenovirus E
ccgcucucugcuc

SEQ ID NO: 3932942 - RNA, 13 nt, Human adenovirus E
ccgcugaacgaag

SEQ ID NO: 3932943 - RNA, 15 nt, Human adenovirus E
ccgcuguggagccac

SEQ ID NO: 3932944 - RNA, 23 nt, Human adenovirus E
ccggaauccugcccgccaccugc

SEQ ID NO: 3932945 - RNA, 23 nt, Human adenovirus E
ccggagacgcgcggccacggcgg

SEQ ID NO: 3932946 - RNA, 13 nt, Human adenovirus E
ccggagcagcugg

SEQ ID NO: 3932947 - RNA, 15 nt, Human adenovirus E
ccggaucgcugucca

SEQ ID NO: 3932948 - RNA, 20 nt, Human adenovirus E
ccggaucgcuguccacgagc

SEQ ID NO: 3932949 - RNA, 15 nt, Human adenovirus E
ccggaugcaggggcg

SEQ ID NO: 3932950 - RNA, 19 nt, Human adenovirus E
ccggcauuaacuccucgga

SEQ ID NO: 3932951 - RNA, 18 nt, Human adenovirus E
ccggcggcgcacgggcag

SEQ ID NO: 3932952 - RNA, 17 nt, Human adenovirus E
ccggcgggcugcaaacu

SEQ ID NO: 3932953 - RNA, 15 nt, Human adenovirus E
ccgggcccagguugg

SEQ ID NO: 3932954 - RNA, 18 nt, Human adenovirus E
  misc_feature (7)..(7): n is a, c, g, or u
ccgggcnugggcgugcag

SEQ ID NO: 3932955 - RNA, 18 nt, Human adenovirus E
ccgggcuaccgcggcacg

SEQ ID NO: 3932956 - RNA, 13 nt, Human adenovirus E
ccggggaguccag

SEQ ID NO: 3932957 - RNA, 22 nt, Human adenovirus E
ccggggcagaagcacacagcuc

SEQ ID NO: 3932958 - RNA, 18 nt, Human adenovirus E
ccgggugauccuccacca

SEQ ID NO: 3932959 - RNA, 13 nt, Human adenovirus E
ccggucaccuucc

SEQ ID NO: 3932960 - RNA, 20 nt, Human adenovirus E
ccggucccccacccaguccc

SEQ ID NO: 3932961 - RNA, 21 nt, Human adenovirus E
ccgguggcacgacaggcagcg

SEQ ID NO: 3932962 - RNA, 19 nt, Human adenovirus E
ccgucaccuccacagcccc

SEQ ID NO: 3932963 - RNA, 14 nt, Human adenovirus E
ccguccucccggag

SEQ ID NO: 3932964 - RNA, 18 nt, Human adenovirus E
ccgugaccuugcagcagg

SEQ ID NO: 3932965 - RNA, 23 nt, Human adenovirus E
ccgugcggugagcgccagcaggc

SEQ ID NO: 3932966 - RNA, 11 nt, Human adenovirus E
ccguggcucug

SEQ ID NO: 3932967 - RNA, 14 nt, Human adenovirus E
ccuagaaugaccac

SEQ ID NO: 3932968 - RNA, 13 nt, Human adenovirus E
ccuagccgccucc

SEQ ID NO: 3932969 - RNA, 16 nt, Human adenovirus E
ccuagccgccuccacc

SEQ ID NO: 3932970 - RNA, 16 nt, Human adenovirus E
ccucaagcugggagag

SEQ ID NO: 3932971 - RNA, 20 nt, Human adenovirus E
ccucacagaucugcaucucc

SEQ ID NO: 3932972 - RNA, 19 nt, Human adenovirus E
ccucagcaugaugcccacg

SEQ ID NO: 3932973 - RNA, 21 nt, Human adenovirus E
ccucaggcggcagugguggcg

SEQ ID NO: 3932974 - RNA, 21 nt, Human adenovirus E
ccucauuuuccccgagcgccu

SEQ ID NO: 3932975 - RNA, 19 nt, Human adenovirus E
ccuccagugccuucucuag

SEQ ID NO: 3932976 - RNA, 15 nt, Human adenovirus E
ccuccgggcacuccc

SEQ ID NO: 3932977 - RNA, 14 nt, Human adenovirus E
ccuccugcacaggc

SEQ ID NO: 3932978 - RNA, 17 nt, Human adenovirus E
ccucgacccccagaccg

SEQ ID NO: 3932979 - RNA, 12 nt, Human adenovirus E
ccucgcagcccc

SEQ ID NO: 3932980 - RNA, 22 nt, Human adenovirus E
ccucgcucugguggccaacgcc

SEQ ID NO: 3932981 - RNA, 23 nt, Human adenovirus E
ccucgcucugguggccaacgcca

SEQ ID NO: 3932982 - RNA, 21 nt, Human adenovirus E
ccucggacgucaccugcggcg

SEQ ID NO: 3932983 - RNA, 16 nt, Human adenovirus E
ccucggcgggggagaa

SEQ ID NO: 3932984 - RNA, 19 nt, Human adenovirus E
ccucgggggucaaaaccau

SEQ ID NO: 3932985 - RNA, 18 nt, Human adenovirus E
ccucguaaaaguccacgg

SEQ ID NO: 3932986 - RNA, 20 nt, Human adenovirus E
ccucgucaggccguccugac

SEQ ID NO: 3932987 - RNA, 17 nt, Human adenovirus E
ccucugcacgccgcacc

SEQ ID NO: 3932988 - RNA, 13 nt, Human adenovirus E
ccugacacaccac

SEQ ID NO: 3932989 - RNA, 15 nt, Human adenovirus E
ccugauaucgccucc

SEQ ID NO: 3932990 - RNA, 22 nt, Human adenovirus E
ccugaucccgaauaccacagcg

SEQ ID NO: 3932991 - RNA, 15 nt, Human adenovirus E
ccugcccgccaccug

SEQ ID NO: 3932992 - RNA, 20 nt, Human adenovirus E
ccugcgucaucacccagggg

SEQ ID NO: 3932993 - RNA, 16 nt, Human adenovirus E
ccugcucuuccaccgc

SEQ ID NO: 3932994 - RNA, 16 nt, Human adenovirus E
ccugcugcgccuggcc

SEQ ID NO: 3932995 - RNA, 16 nt, Human adenovirus E
ccugcuggaggccauc

SEQ ID NO: 3932996 - RNA, 16 nt, Human adenovirus E
ccuggaagccacccug

SEQ ID NO: 3932997 - RNA, 17 nt, Human adenovirus E
ccuggaccgaaagaggg

SEQ ID NO: 3932998 - RNA, 18 nt, Human adenovirus E
ccuggagcgacaucggca

SEQ ID NO: 3932999 - RNA, 21 nt, Human adenovirus E
ccuggaggccguggugcccuc

SEQ ID NO: 3933000 - RNA, 23 nt, Human adenovirus E
ccuggaugccaucggcuccuagu

SEQ ID NO: 3933001 - RNA, 23 nt, Human adenovirus E
ccuggccaaccaggccgugcagc

SEQ ID NO: 3933002 - RNA, 14 nt, Human adenovirus E
ccuggccaccuacc

SEQ ID NO: 3933003 - RNA, 19 nt, Human adenovirus E
ccuggccaccuaccacauc

SEQ ID NO: 3933004 - RNA, 14 nt, Human adenovirus E
ccuggcgccuacgg

SEQ ID NO: 3933005 - RNA, 19 nt, Human adenovirus E
ccugggcauagucgcgccg

SEQ ID NO: 3933006 - RNA, 20 nt, Human adenovirus E
ccuggggcagaacgugcugc

SEQ ID NO: 3933007 - RNA, 16 nt, Human adenovirus E
ccuggugaccguggag

SEQ ID NO: 3933008 - RNA, 17 nt, Human adenovirus E
ccugugggaccugcugg

SEQ ID NO: 3933009 - RNA, 16 nt, Human adenovirus E
ccuguggggcgugcag

SEQ ID NO: 3933010 - RNA, 17 nt, Human adenovirus E
ccuuagcuuugacagua

SEQ ID NO: 3933011 - RNA, 14 nt, Human adenovirus E
ccuucaccaccugc

SEQ ID NO: 3933012 - RNA, 20 nt, Human adenovirus E
ccuuccaggaaggcuuccag

SEQ ID NO: 3933013 - RNA, 18 nt, Human adenovirus E
ccuucccaccccacucug

SEQ ID NO: 3933014 - RNA, 22 nt, Human adenovirus E
ccuucuccggcucccccggcca

SEQ ID NO: 3933015 - RNA, 22 nt, Human adenovirus E
ccuuuagacagcagccccaggc

SEQ ID NO: 3933016 - RNA, 19 nt, Human adenovirus E
cgaagccuuuagacagcag

SEQ ID NO: 3933017 - RNA, 18 nt, Human adenovirus E
cgacaacgcgcggcuggc

SEQ ID NO: 3933018 - RNA, 20 nt, Human adenovirus E
cgacaauuacuuggcggugg

SEQ ID NO: 3933019 - RNA, 19 nt, Human adenovirus E
cgacaggaugcaccgugcg

SEQ ID NO: 3933020 - RNA, 19 nt, Human adenovirus E
aaaacgucacccgccccgc

SEQ ID NO: 3933021 - RNA, 13 nt, Human adenovirus E
aaaagcuuaucca

SEQ ID NO: 3933022 - RNA, 17 nt, Human adenovirus E
aaacaagaagcugaaag

SEQ ID NO: 3933023 - RNA, 18 nt, Human adenovirus E
aaaccauaucccagggca

SEQ ID NO: 3933024 - RNA, 22 nt, Human adenovirus E
aaagcaaggaggaugcagcagc

SEQ ID NO: 3933025 - RNA, 22 nt, Human adenovirus E
aaagcgcccgaggaagcaauaa

SEQ ID NO: 3933026 - RNA, 23 nt, Human adenovirus E
aaauuccucaaaugcuaccgcca

SEQ ID NO: 3933027 - RNA, 12 nt, Human adenovirus E
aaauuuuugcuu

SEQ ID NO: 3933028 - RNA, 20 nt, Human adenovirus E
aacaccgccuaccgcagcug

SEQ ID NO: 3933029 - RNA, 18 nt, Human adenovirus E
aacagcccccuccacagc

SEQ ID NO: 3933030 - RNA, 15 nt, Human adenovirus E
aacaggagcuacaac

SEQ ID NO: 3933031 - RNA, 15 nt, Human adenovirus E
aacaguauccgcagc

SEQ ID NO: 3933032 - RNA, 18 nt, Human adenovirus E
aacccaccacgccuagaa

SEQ ID NO: 3933033 - RNA, 17 nt, Human adenovirus E
aaccccaccagcaagcc

SEQ ID NO: 3933034 - RNA, 14 nt, Human adenovirus E
aacccuuccucccc

SEQ ID NO: 3933035 - RNA, 10 nt, Human adenovirus E
aacucuugca

SEQ ID NO: 3933036 - RNA, 21 nt, Human adenovirus E
aacuguaaguacucuuucaua

SEQ ID NO: 3933037 - RNA, 18 nt, Human adenovirus E
aagacagucuggaggaag

SEQ ID NO: 3933038 - RNA, 12 nt, Human adenovirus E
aagacaguucau

SEQ ID NO: 3933039 - RNA, 20 nt, Human adenovirus E
aagacgaggaggaggcagag

SEQ ID NO: 3933040 - RNA, 17 nt, Human adenovirus E
aagagauggaggaaucc

SEQ ID NO: 3933041 - RNA, 16 nt, Human adenovirus E
aagauauuugcaauug

SEQ ID NO: 3933042 - RNA, 20 nt, Human adenovirus E
aagaucuccaacguggagcu

SEQ ID NO: 3933043 - RNA, 20 nt, Human adenovirus E
aagaucuucgagggucuggg

SEQ ID NO: 3933044 - RNA, 12 nt, Human adenovirus E
aagcaacauaag

SEQ ID NO: 3933045 - RNA, 16 nt, Human adenovirus E
aagccagccaugauaa

SEQ ID NO: 3933046 - RNA, 14 nt, Human adenovirus E
aagcccggguccag

SEQ ID NO: 3933047 - RNA, 23 nt, Human adenovirus E
aagccuccacgcgcacauccaga

SEQ ID NO: 3933048 - RNA, 20 nt, Human adenovirus E
aagcguucagggaggcgcug

SEQ ID NO: 3933049 - RNA, 19 nt, Human adenovirus E
aagcuauguuggagcaaca

SEQ ID NO: 3933050 - RNA, 16 nt, Human adenovirus E
aaggaggaaagaaagc

SEQ ID NO: 3933051 - RNA, 19 nt, Human adenovirus E
aaggccgccgccccucuca

SEQ ID NO: 3933052 - RNA, 15 nt, Human adenovirus E
aagggccgcgggguc

SEQ ID NO: 3933053 - RNA, 13 nt, Human adenovirus E
aagguccuggcca

SEQ ID NO: 3933054 - RNA, 18 nt, Human adenovirus E
aaguccuggcgggggcac

SEQ ID NO: 3933055 - RNA, 19 nt, Human adenovirus E
aaguugaaaaacugggagu

SEQ ID NO: 3933056 - RNA, 14 nt, Human adenovirus E
aauaacauuuuugc

SEQ ID NO: 3933057 - RNA, 17 nt, Human adenovirus E
aauaauacuuucauuuu

SEQ ID NO: 3933058 - RNA, 12 nt, Human adenovirus E
aauaccaccuca

SEQ ID NO: 3933059 - RNA, 13 nt, Human adenovirus E
aaucucuccucgc

SEQ ID NO: 3933060 - RNA, 19 nt, Human adenovirus E
aaucuucauuuuaucuucu

SEQ ID NO: 3933061 - RNA, 16 nt, Human adenovirus E
ccgccaccugcuccgc

SEQ ID NO: 3933062 - RNA, 11 nt, Human adenovirus E
ccgccagaccg

SEQ ID NO: 3933063 - RNA, 13 nt, Human adenovirus E
ccgccagcuccuc

SEQ ID NO: 3933064 - RNA, 22 nt, Human adenovirus E
ccgccccuaacggucgcccguc

SEQ ID NO: 3933065 - RNA, 14 nt, Human adenovirus E
ccgcccguggagga

SEQ ID NO: 3933066 - RNA, 13 nt, Human adenovirus E
ccgcccuggugcg

SEQ ID NO: 3933067 - RNA, 12 nt, Human adenovirus E
ccgccgccagac

SEQ ID NO: 3933068 - RNA, 15 nt, Human adenovirus E
ccgccgcccagcccc

SEQ ID NO: 3933069 - RNA, 21 nt, Human adenovirus E
ccgccgcgcaucuccaggugg

SEQ ID NO: 3933070 - RNA, 16 nt, Human adenovirus E
ccgccgugagcggggc

SEQ ID NO: 3933071 - RNA, 15 nt, Human adenovirus E
ccgccuaccgcagcu

SEQ ID NO: 3933072 - RNA, 16 nt, Human adenovirus E
ccgccucggaccuggc

SEQ ID NO: 3933073 - RNA, 13 nt, Human adenovirus E
ccgcgaggccauc

SEQ ID NO: 3933074 - RNA, 13 nt, Human adenovirus E
ccgcgcaccucug

SEQ ID NO: 3933075 - RNA, 23 nt, Human adenovirus E
ccgcgccaaccgcacccgcgccg

SEQ ID NO: 3933076 - RNA, 15 nt, Human adenovirus E
ccgcgcccugggcca

SEQ ID NO: 3933077 - RNA, 14 nt, Human adenovirus E
ccgcgcgugcagau

SEQ ID NO: 3933078 - RNA, 16 nt, Human adenovirus E
ccgcgcuugcugggcg

SEQ ID NO: 3933079 - RNA, 15 nt, Human adenovirus E
ccgcggccaaccugg

SEQ ID NO: 3933080 - RNA, 12 nt, Human adenovirus E
ccgcggugcucc

SEQ ID NO: 3933081 - RNA, 17 nt, Human adenovirus E
ccgcuacaacagcacca

SEQ ID NO: 3933082 - RNA, 14 nt, Human adenovirus E
ccgcucccuggccu

SEQ ID NO: 3933083 - RNA, 16 nt, Human adenovirus E
ccgcuggaccacggca

SEQ ID NO: 3933084 - RNA, 19 nt, Human adenovirus E
ccggagaaaacuggcguga

SEQ ID NO: 3933085 - RNA, 15 nt, Human adenovirus E
ccggagcagcuggga

SEQ ID NO: 3933086 - RNA, 13 nt, Human adenovirus E
ccggaugcagggg

SEQ ID NO: 3933087 - RNA, 16 nt, Human adenovirus E
ccggcgcgacccucgu

SEQ ID NO: 3933088 - RNA, 16 nt, Human adenovirus E
ccggcggcgcacgggc

SEQ ID NO: 3933089 - RNA, 19 nt, Human adenovirus E
ccggggccaggaggacuac

SEQ ID NO: 3933090 - RNA, 17 nt, Human adenovirus E
ccggggcgggggagaug

SEQ ID NO: 3933091 - RNA, 15 nt, Human adenovirus E
ccggguccaggccag

SEQ ID NO: 3933092 - RNA, 20 nt, Human adenovirus E
ccggguccagggacucccuc

SEQ ID NO: 3933093 - RNA, 16 nt, Human adenovirus E
ccgggugauccuccac

SEQ ID NO: 3933094 - RNA, 13 nt, Human adenovirus E
ccggucucgauca

SEQ ID NO: 3933095 - RNA, 18 nt, Human adenovirus E
ccgguuguaccuggugga

SEQ ID NO: 3933096 - RNA, 13 nt, Human adenovirus E
ccgucaccuccac

SEQ ID NO: 3933097 - RNA, 16 nt, Human adenovirus E
ccgucacggugaaggg

SEQ ID NO: 3933098 - RNA, 22 nt, Human adenovirus E
ccgucgcgaccuuucugaaucu

SEQ ID NO: 3933099 - RNA, 17 nt, Human adenovirus E
ccgugaaggaggagagc

SEQ ID NO: 3933100 - RNA, 18 nt, Human adenovirus E
ccguggaaugggccagac

SEQ ID NO: 3933101 - RNA, 21 nt, Human adenovirus E
ccguggaaugggccagaccca

SEQ ID NO: 3933102 - RNA, 15 nt, Human adenovirus E
ccguugggcagggag

SEQ ID NO: 3933103 - RNA, 16 nt, Human adenovirus E
ccuacuuugagcugcc

SEQ ID NO: 3933104 - RNA, 19 nt, Human adenovirus E
ccucaaaggccgcgugcgg

SEQ ID NO: 3933105 - RNA, 14 nt, Human adenovirus E
ccucaagcccguga

SEQ ID NO: 3933106 - RNA, 10 nt, Human adenovirus E
ccucacagcg

SEQ ID NO: 3933107 - RNA, 12 nt, Human adenovirus E
ccucacaugacc

SEQ ID NO: 3933108 - RNA, 12 nt, Human adenovirus E
ccucagcaauaa

SEQ ID NO: 3933109 - RNA, 14 nt, Human adenovirus E
ccucagcacccagc

SEQ ID NO: 3933110 - RNA, 21 nt, Human adenovirus E
ccucagcaugaugcccacggc

SEQ ID NO: 3933111 - RNA, 19 nt, Human adenovirus E
ccucagcguggaggagcuc

SEQ ID NO: 3933112 - RNA, 15 nt, Human adenovirus E
ccucauuuuccccga

SEQ ID NO: 3933113 - RNA, 14 nt, Human adenovirus E
ccuccaccaacgcc

SEQ ID NO: 3933114 - RNA, 15 nt, Human adenovirus E
ccuccuuggaagagg

SEQ ID NO: 3933115 - RNA, 14 nt, Human adenovirus E
ccucgacucccacc

SEQ ID NO: 3933116 - RNA, 22 nt, Human adenovirus E
ccucgcgcucgaaggcccccgg

SEQ ID NO: 3933117 - RNA, 21 nt, Human adenovirus E
ccucuaccgaggucaggggcg

SEQ ID NO: 3933118 - RNA, 15 nt, Human adenovirus E
ccucugcacgccgca

SEQ ID NO: 3933119 - RNA, 20 nt, Human adenovirus E
ccucugggugaaggccacgg

SEQ ID NO: 3933120 - RNA, 21 nt, Human adenovirus E
ccucugguugaacaugcagcc

SEQ ID NO: 3933121 - RNA, 12 nt, Human adenovirus E
ccucuucuuggu

SEQ ID NO: 3933122 - RNA, 18 nt, Human adenovirus E
ccugaacgccugcugggc

SEQ ID NO: 3933123 - RNA, 18 nt, Human adenovirus E
ccugaucccgaauaccac

SEQ ID NO: 3933124 - RNA, 13 nt, Human adenovirus E
ccugauggcucug

SEQ ID NO: 3933125 - RNA, 20 nt, Human adenovirus E
ccugcaagacagucuggagg

SEQ ID NO: 3933126 - RNA, 12 nt, Human adenovirus E
ccugcacaggca

SEQ ID NO: 3933127 - RNA, 17 nt, Human adenovirus E
ccugcccgccaccugcu

SEQ ID NO: 3933128 - RNA, 15 nt, Human adenovirus E
ccugccgcgccaacc

SEQ ID NO: 3933129 - RNA, 15 nt, Human adenovirus E
ccugccgcugcgcag

SEQ ID NO: 3933130 - RNA, 21 nt, Human adenovirus E
ccugcgcaaggucgaggagaa

SEQ ID NO: 3933131 - RNA, 20 nt, Human adenovirus E
ccugcucgagugccacugcc

SEQ ID NO: 3933132 - RNA, 21 nt, Human adenovirus E
ccugcucgggcaucagcugga

SEQ ID NO: 3933133 - RNA, 16 nt, Human adenovirus E
ccugcucguccucacu

SEQ ID NO: 3933134 - RNA, 17 nt, Human adenovirus E
ccugcuuaucaccuucu

SEQ ID NO: 3933135 - RNA, 20 nt, Human adenovirus E
ccuggccaacuaccuggccu

SEQ ID NO: 3933136 - RNA, 16 nt, Human adenovirus E
ccuggccguguugcuc

SEQ ID NO: 3933137 - RNA, 20 nt, Human adenovirus E
ccuggcgccuacggaggggc

SEQ ID NO: 3933138 - RNA, 23 nt, Human adenovirus E
ccugggcuaugugacgcccgcgg

SEQ ID NO: 3933139 - RNA, 22 nt, Human adenovirus E
ccugguccgggcgcugcacacc

SEQ ID NO: 3933140 - RNA, 22 nt, Human adenovirus E
ccuggugaacauucugcagagc

SEQ ID NO: 3933141 - RNA, 20 nt, Human adenovirus E
ccuggugaccguggagcugg

SEQ ID NO: 3933142 - RNA, 18 nt, Human adenovirus E
ccugucuuucguccucgc

SEQ ID NO: 3933143 - RNA, 15 nt, Human adenovirus E
ccugugggaccugcu

SEQ ID NO: 3933144 - RNA, 21 nt, Human adenovirus E
ccugugggaccugcuggaggc

SEQ ID NO: 3933145 - RNA, 21 nt, Human adenovirus E
ccugugucgucaccgccccgc

SEQ ID NO: 3933146 - RNA, 15 nt, Human adenovirus E
ccuuccucagcaccc

SEQ ID NO: 3933147 - RNA, 17 nt, Human adenovirus E
ccuucucuagcaccgcc

SEQ ID NO: 3933148 - RNA, 15 nt, Human adenovirus E
ccuuggcaguacagu

SEQ ID NO: 3933149 - RNA, 16 nt, Human adenovirus E
ccuuguaggcgcagca

SEQ ID NO: 3933150 - RNA, 20 nt, Human adenovirus E
cgaaaaagaaaaacagccau

SEQ ID NO: 3933151 - RNA, 15 nt, Human adenovirus E
cgaacucgcgccugc

SEQ ID NO: 3933152 - RNA, 13 nt, Human adenovirus E
cgaagaccccggc

SEQ ID NO: 3933153 - RNA, 17 nt, Human adenovirus E
cgaaggguaugcuuucg

SEQ ID NO: 3933154 - RNA, 14 nt, Human adenovirus E
cgaaguccagcuga

SEQ ID NO: 3933155 - RNA, 15 nt, Human adenovirus E
cgacaaaaaucagac

SEQ ID NO: 3933156 - RNA, 14 nt, Human adenovirus E
cgaccaggagcuga

SEQ ID NO: 3933157 - RNA, 13 nt, Human adenovirus E
cgacgagcagcug

SEQ ID NO: 3933158 - RNA, 15 nt, Human adenovirus E
cgacgagcagcuggc

SEQ ID NO: 3933159 - RNA, 14 nt, Human adenovirus E
cgacgagcgcacca

SEQ ID NO: 3933160 - RNA, 22 nt, Human adenovirus E
cgacgcggagacccugcgcaag

SEQ ID NO: 3933161 - RNA, 15 nt, Human adenovirus E
cgacucccaccugcu

SEQ ID NO: 3933162 - RNA, 23 nt, Human adenovirus E
cgacugggcuuuucggcgcggua

SEQ ID NO: 3933163 - RNA, 13 nt, Human adenovirus E
cgagaagcagcag

SEQ ID NO: 3933164 - RNA, 15 nt, Human adenovirus E
cgagaagcagcagca

SEQ ID NO: 3933165 - RNA, 17 nt, Human adenovirus E
cgagaagcagcagcagc

SEQ ID NO: 3933166 - RNA, 16 nt, Human adenovirus E
cgagaccgagcuccag

SEQ ID NO: 3933167 - RNA, 14 nt, Human adenovirus E
cgagauccacggga

SEQ ID NO: 3933168 - RNA, 16 nt, Human adenovirus E
cgagcccgagggccgc

SEQ ID NO: 3933169 - RNA, 16 nt, Human adenovirus E
cgagccggggcagcgc

SEQ ID NO: 3933170 - RNA, 16 nt, Human adenovirus E
cgagccugcugacgcc

SEQ ID NO: 3933171 - RNA, 23 nt, Human adenovirus E
gcagcugaagcaacugcagccgu

SEQ ID NO: 3933172 - RNA, 18 nt, Human adenovirus E
gcagcuguuccugguggu

SEQ ID NO: 3933173 - RNA, 21 nt, Human adenovirus E
gcagcuugccauucgcgcacg

SEQ ID NO: 3933174 - RNA, 20 nt, Human adenovirus E
gcaggagggggccaccccca

SEQ ID NO: 3933175 - RNA, 20 nt, Human adenovirus E
gcaggcaccgcagcuugccc

SEQ ID NO: 3933176 - RNA, 18 nt, Human adenovirus E
gcagggcaugguguugca

SEQ ID NO: 3933177 - RNA, 13 nt, Human adenovirus E
gcagggggccacg

SEQ ID NO: 3933178 - RNA, 22 nt, Human adenovirus E
gcaguagucgagggucuccugg

SEQ ID NO: 3933179 - RNA, 23 nt, Human adenovirus E
gcaguagucgagggucuccugga

SEQ ID NO: 3933180 - RNA, 15 nt, Human adenovirus E
gcagucaggcagagg

SEQ ID NO: 3933181 - RNA, 21 nt, Human adenovirus E
gcagucaggcagaggaggagg

SEQ ID NO: 3933182 - RNA, 21 nt, Human adenovirus E
gcagucauaaucaucugcaug

SEQ ID NO: 3933183 - RNA, 13 nt, Human adenovirus E
gcagucccacugc

SEQ ID NO: 3933184 - RNA, 14 nt, Human adenovirus E
gcagucccacugcu

SEQ ID NO: 3933185 - RNA, 15 nt, Human adenovirus E
gcagucucuggagcg

SEQ ID NO: 3933186 - RNA, 13 nt, Human adenovirus E
gcagugcucaggu

SEQ ID NO: 3933187 - RNA, 13 nt, Human adenovirus E
gcagugggcgcag

SEQ ID NO: 3933188 - RNA, 17 nt, Human adenovirus E
gcauagauggcacucca

SEQ ID NO: 3933189 - RNA, 17 nt, Human adenovirus E
gcaucgcccggcggcac

SEQ ID NO: 3933190 - RNA, 15 nt, Human adenovirus E
gcaucucccaggcuu

SEQ ID NO: 3933191 - RNA, 17 nt, Human adenovirus E
gcaucuggcccggcagg

SEQ ID NO: 3933192 - RNA, 15 nt, Human adenovirus E
gcaucuuggccugga

SEQ ID NO: 3933193 - RNA, 23 nt, Human adenovirus E
gcaucuuggccuggaucuugaga

SEQ ID NO: 3933194 - RNA, 18 nt, Human adenovirus E
gcaugaccaccugggcga

SEQ ID NO: 3933195 - RNA, 16 nt, Human adenovirus E
gcaugagcaccacagc

SEQ ID NO: 3933196 - RNA, 20 nt, Human adenovirus E
gcaugagcaccacagcgccc

SEQ ID NO: 3933197 - RNA, 15 nt, Human adenovirus E
gcaugcgaguuggag

SEQ ID NO: 3933198 - RNA, 19 nt, Human adenovirus E
gcaugcgaguuggaggaga

SEQ ID NO: 3933199 - RNA, 21 nt, Human adenovirus E
gcaugguguacuaugccuucu

SEQ ID NO: 3933200 - RNA, 21 nt, Human adenovirus E
gcauguucauuuuugcuugcu

SEQ ID NO: 3933201 - RNA, 19 nt, Human adenovirus E
gcauuaccacacagacaac

SEQ ID NO: 3933202 - RNA, 20 nt, Human adenovirus E
gcauuaccccuacacaugau

SEQ ID NO: 3933203 - RNA, 20 nt, Human adenovirus E
gcauuauuguugcuguagug

SEQ ID NO: 3933204 - RNA, 23 nt, Human adenovirus E
gcauucguuacucggagcuggca

SEQ ID NO: 3933205 - RNA, 14 nt, Human adenovirus E
gccaaaaaucagac

SEQ ID NO: 3933206 - RNA, 23 nt, Human adenovirus E
gccaaccaggccgugcagcggca

SEQ ID NO: 3933207 - RNA, 23 nt, Human adenovirus E
gccaaccggcucucggccauccu

SEQ ID NO: 3933208 - RNA, 23 nt, Human adenovirus E
gccaacgcuccacgcaacacccc

SEQ ID NO: 3933209 - RNA, 14 nt, Human adenovirus E
gccaccacccccag

SEQ ID NO: 3933210 - RNA, 12 nt, Human adenovirus E
gccaccucagcu

SEQ ID NO: 3933211 - RNA, 13 nt, Human adenovirus E
gccagacgcgcgg

SEQ ID NO: 3933212 - RNA, 15 nt, Human adenovirus E
gccagaucguccagg

SEQ ID NO: 3933213 - RNA, 19 nt, Human adenovirus E
gccagaucguccagggcag

SEQ ID NO: 3933214 - RNA, 24 nt, Human adenovirus E
gccagcccaauggcaccugcgagc

SEQ ID NO: 3933215 - RNA, 13 nt, Human adenovirus E
gccagccgacuuc

SEQ ID NO: 3933216 - RNA, 15 nt, Human adenovirus E
gccagcgccggcagg

SEQ ID NO: 3933217 - RNA, 18 nt, Human adenovirus E
gccagcgccggcaggacc

SEQ ID NO: 3933218 - RNA, 15 nt, Human adenovirus E
gccaggacgacccgg

SEQ ID NO: 3933219 - RNA, 19 nt, Human adenovirus E
gccaggccugcaagaucuc

SEQ ID NO: 3933220 - RNA, 20 nt, Human adenovirus E
gccaggcgcacguggacgag

SEQ ID NO: 3933221 - RNA, 18 nt, Human adenovirus E
gccagggcuugcagaccg

SEQ ID NO: 3933222 - RNA, 20 nt, Human adenovirus E
gccaucacaccuuccaccug

SEQ ID NO: 3933223 - RNA, 16 nt, Human adenovirus E
gccaucgccaaccucg

SEQ ID NO: 3933224 - RNA, 12 nt, Human adenovirus E
gccugcugcugc

SEQ ID NO: 3933225 - RNA, 18 nt, Human adenovirus E
gccuggccaacuaccugg

SEQ ID NO: 3933226 - RNA, 23 nt, Human adenovirus E
gccugggcggccuugcgcaggga

SEQ ID NO: 3933227 - RNA, 20 nt, Human adenovirus E
gccuuuagacagcagcccca

SEQ ID NO: 3933228 - RNA, 21 nt, Human adenovirus E
gcgaaagugucccugaccaug

SEQ ID NO: 3933229 - RNA, 16 nt, Human adenovirus E
gcgaacgcucugcaag

SEQ ID NO: 3933230 - RNA, 15 nt, Human adenovirus E
gcgaccaggagcuga

SEQ ID NO: 3933231 - RNA, 15 nt, Human adenovirus E
gcgagacgcccaggc

SEQ ID NO: 3933232 - RNA, 18 nt, Human adenovirus E
gcgaguuggaggagaugg

SEQ ID NO: 3933233 - RNA, 16 nt, Human adenovirus E
gcgaugcagcccccgc

SEQ ID NO: 3933234 - RNA, 18 nt, Human adenovirus E
gcgcaagagucagagaaa

SEQ ID NO: 3933235 - RNA, 15 nt, Human adenovirus E
gcgcacauccagaaa

SEQ ID NO: 3933236 - RNA, 17 nt, Human adenovirus E
gcgcacccgccccccuc

SEQ ID NO: 3933237 - RNA, 22 nt, Human adenovirus E
gcgcacguggacgagcagaccu

SEQ ID NO: 3933238 - RNA, 18 nt, Human adenovirus E
gcgcacguggccgcggcc

SEQ ID NO: 3933239 - RNA, 14 nt, Human adenovirus E
gcgcaggccggagc

SEQ ID NO: 3933240 - RNA, 19 nt, Human adenovirus E
gcgcagggaggugugcgug

SEQ ID NO: 3933241 - RNA, 14 nt, Human adenovirus E
gcgccaccaccccc

SEQ ID NO: 3933242 - RNA, 12 nt, Human adenovirus E
gcgccagcaggc

SEQ ID NO: 3933243 - RNA, 13 nt, Human adenovirus E
gcgccaggccugc

SEQ ID NO: 3933244 - RNA, 14 nt, Human adenovirus E
gcgccauugguggc

SEQ ID NO: 3933245 - RNA, 16 nt, Human adenovirus E
gcgcccccaccacccu

SEQ ID NO: 3933246 - RNA, 18 nt, Human adenovirus E
gcgcccgcgcuugcuggg

SEQ ID NO: 3933247 - RNA, 16 nt, Human adenovirus E
gcgcccuccaccggca

SEQ ID NO: 3933248 - RNA, 15 nt, Human adenovirus E
gcgccggcaggaccc

SEQ ID NO: 3933249 - RNA, 14 nt, Human adenovirus E
gcgcgaggagguga

SEQ ID NO: 3933250 - RNA, 14 nt, Human adenovirus E
gcgcgcgcccagca

SEQ ID NO: 3933251 - RNA, 12 nt, Human adenovirus E
gcgcgcuaccac

SEQ ID NO: 3933252 - RNA, 14 nt, Human adenovirus E
gcgcggccagccug

SEQ ID NO: 3933253 - RNA, 22 nt, Human adenovirus E
gcgcgggugauggucucccgca

SEQ ID NO: 3933254 - RNA, 22 nt, Human adenovirus E
gcgcggucauggaccaggugcu

SEQ ID NO: 3933255 - RNA, 11 nt, Human adenovirus E
gcgcuccugga

SEQ ID NO: 3933256 - RNA, 14 nt, Human adenovirus E
gcgcugcagagcca

SEQ ID NO: 3933257 - RNA, 15 nt, Human adenovirus E
gcgcugcagagccag

SEQ ID NO: 3933258 - RNA, 15 nt, Human adenovirus E
gcgcugcucgaccgc

SEQ ID NO: 3933259 - RNA, 18 nt, Human adenovirus E
gcgcuguccggccgcgag

SEQ ID NO: 3933260 - RNA, 12 nt, Human adenovirus E
gcggaacagcau

SEQ ID NO: 3933261 - RNA, 20 nt, Human adenovirus E
gcggaccugcacuggcagcc

SEQ ID NO: 3933262 - RNA, 22 nt, Human adenovirus E
gcggagacccugcgcaaggucg

SEQ ID NO: 3933263 - RNA, 14 nt, Human adenovirus E
gcggcagcggccau

SEQ ID NO: 3933264 - RNA, 14 nt, Human adenovirus E
gcggccagacgcgc

SEQ ID NO: 3933265 - RNA, 12 nt, Human adenovirus E
gcggccagcuga

SEQ ID NO: 3933266 - RNA, 13 nt, Human adenovirus E
gcggcccaugagc

SEQ ID NO: 3933267 - RNA, 13 nt, Human adenovirus E
gcggccuggaccg

SEQ ID NO: 3933268 - RNA, 14 nt, Human adenovirus E
gcggccuugcgcag

SEQ ID NO: 3933269 - RNA, 16 nt, Human adenovirus E
gcggcgcacgggcaga

SEQ ID NO: 3933270 - RNA, 13 nt, Human adenovirus E
gcggcggcagcag

SEQ ID NO: 3933271 - RNA, 15 nt, Human adenovirus E
gcggcggcgcgccau

SEQ ID NO: 3933272 - RNA, 21 nt, Human adenovirus E
gcggcucgacuccguggccug

SEQ ID NO: 3933273 - RNA, 14 nt, Human adenovirus E
gcggcuggggcgac

SEQ ID NO: 3933274 - RNA, 22 nt, Human adenovirus E
gcggcuggugauccggggcaga

SEQ ID NO: 3933275 - RNA, 19 nt, Human adenovirus E
gcgggcacuuccgcgcucc

SEQ ID NO: 3933276 - RNA, 18 nt, Human adenovirus E
gcgggcaugaccucggca

SEQ ID NO: 3933277 - RNA, 15 nt, Human adenovirus E
gcgggcggcgccacc

SEQ ID NO: 3933278 - RNA, 14 nt, Human adenovirus E
gcggggggagauga

SEQ ID NO: 3933279 - RNA, 21 nt, Human adenovirus E
gcgguacaccucgcccugcuc

SEQ ID NO: 3933280 - RNA, 18 nt, Human adenovirus E
gcggucauaccagcagcc

SEQ ID NO: 3933281 - RNA, 14 nt, Human adenovirus E
gcggugcaggccuc

SEQ ID NO: 3933282 - RNA, 24 nt, Human adenovirus E
gcggugcccgaggcccuggccacc

SEQ ID NO: 3933283 - RNA, 20 nt, Human adenovirus E
gcgugccccagggcauggga

SEQ ID NO: 3933284 - RNA, 15 nt, Human adenovirus E
gcguggaggagcuca

SEQ ID NO: 3933285 - RNA, 15 nt, Human adenovirus E
gcuacaacagcacca

SEQ ID NO: 3933286 - RNA, 15 nt, Human adenovirus E
gcuaccuccagugcc

SEQ ID NO: 3933287 - RNA, 15 nt, Human adenovirus E
gcuaccugcugcgcc

SEQ ID NO: 3933288 - RNA, 20 nt, Human adenovirus E
gcuauguuggagcaacauuu

SEQ ID NO: 3933289 - RNA, 12 nt, Human adenovirus E
gcucaacagcug

SEQ ID NO: 3933290 - RNA, 11 nt, Human adenovirus E
gcucagccgcg

SEQ ID NO: 3933291 - RNA, 17 nt, Human adenovirus E
gcuccauugcagggccu

SEQ ID NO: 3933292 - RNA, 13 nt, Human adenovirus E
gcucccucgguga

SEQ ID NO: 3933293 - RNA, 15 nt, Human adenovirus E
gcucccuggccugca

SEQ ID NO: 3933294 - RNA, 17 nt, Human adenovirus E
gcucccuggccugcaac

SEQ ID NO: 3933295 - RNA, 21 nt, Human adenovirus E
gcuccgcgacacggcacgcgg

SEQ ID NO: 3933296 - RNA, 18 nt, Human adenovirus E
gcuccggaauccugcccg

SEQ ID NO: 3933297 - RNA, 20 nt, Human adenovirus E
gcuccggaauccugcccgcc

SEQ ID NO: 3933298 - RNA, 16 nt, Human adenovirus E
gcucgaccacacagua

SEQ ID NO: 3933299 - RNA, 21 nt, Human adenovirus E
gcucgcgguggggcggccagc

SEQ ID NO: 3933300 - RNA, 14 nt, Human adenovirus E
gcucggggcccgga

SEQ ID NO: 3933301 - RNA, 20 nt, Human adenovirus E
gcucguagggacugaggggc

SEQ ID NO: 3933302 - RNA, 19 nt, Human adenovirus E
gcucucacagaucacggga

SEQ ID NO: 3933303 - RNA, 16 nt, Human adenovirus E
gcucugaaccugcccc

SEQ ID NO: 3933304 - RNA, 20 nt, Human adenovirus E
gcucugcaagcuccugcaga

SEQ ID NO: 3933305 - RNA, 23 nt, Human adenovirus E
gcucugcaaggagaaggaggaga

SEQ ID NO: 3933306 - RNA, 18 nt, Human adenovirus E
gcugacguccugcaggac

SEQ ID NO: 3933307 - RNA, 19 nt, Human adenovirus E
gcugacguccugcaggacc

SEQ ID NO: 3933308 - RNA, 14 nt, Human adenovirus E
gcugcacaccaccc

SEQ ID NO: 3933309 - RNA, 18 nt, Human adenovirus E
gcugcccgaggagcaccc

SEQ ID NO: 3933310 - RNA, 19 nt, Human adenovirus E
gcugcgcaacggccugccc

SEQ ID NO: 3933311 - RNA, 14 nt, Human adenovirus E
gcugcggcgcggcc

SEQ ID NO: 3933312 - RNA, 15 nt, Human adenovirus E
gcugcugcugcuggu

SEQ ID NO: 3933313 - RNA, 22 nt, Human adenovirus E
gcuggcgggcggcgccacccug

SEQ ID NO: 3933314 - RNA, 14 nt, Human adenovirus E
gcuggcggugcuca

SEQ ID NO: 3933315 - RNA, 15 nt, Human adenovirus E
gcuggcggugcucaa

SEQ ID NO: 3933316 - RNA, 23 nt, Human adenovirus E
gcuggggcgacgggggcggugcc

SEQ ID NO: 3933317 - RNA, 19 nt, Human adenovirus E
gcugguggcgguguugcuu

SEQ ID NO: 3933318 - RNA, 13 nt, Human adenovirus E
gcuguaguggugu

SEQ ID NO: 3933319 - RNA, 19 nt, Human adenovirus E
gcuguccacgagcgccagc

SEQ ID NO: 3933320 - RNA, 17 nt, Human adenovirus E
gcuguccaggguccuga

SEQ ID NO: 3933321 - RNA, 21 nt, Human adenovirus E
gcuguucguacuuaguggugc

SEQ ID NO: 3933322 - RNA, 17 nt, Human adenovirus E
gcuuaaaaccuauggca

SEQ ID NO: 3933323 - RNA, 21 nt, Human adenovirus E
gcuuacggcaagcgcagccgu

SEQ ID NO: 3933324 - RNA, 20 nt, Human adenovirus E
gcuucacgcucgccagcacc

SEQ ID NO: 3933325 - RNA, 21 nt, Human adenovirus E
gcuuccgcgucaguugcaggg

SEQ ID NO: 3933326 - RNA, 18 nt, Human adenovirus E
gcuucuucaacgagcagg

SEQ ID NO: 3933327 - RNA, 14 nt, Human adenovirus E
gcuugcccucggcc

SEQ ID NO: 3933328 - RNA, 21 nt, Human adenovirus E
gcuugcccucggccucggugc

SEQ ID NO: 3933329 - RNA, 22 nt, Human adenovirus E
ggaagacgaggaggaggcagag

SEQ ID NO: 3933330 - RNA, 23 nt, Human adenovirus E
ggaaguggccagaucguccaggg

SEQ ID NO: 3933331 - RNA, 16 nt, Human adenovirus E
ggaauggcuguugaug

SEQ ID NO: 3933332 - RNA, 16 nt, Human adenovirus E
ggacaaaaaggaagaa

SEQ ID NO: 3933333 - RNA, 18 nt, Human adenovirus E
ggacagaggagggacuug

SEQ ID NO: 3933334 - RNA, 15 nt, Human adenovirus E
ggacagccugcaaga

SEQ ID NO: 3933335 - RNA, 14 nt, Human adenovirus E
ggacagcggcagca

SEQ ID NO: 3933336 - RNA, 20 nt, Human adenovirus E
ggaccugcacuggcagccca

SEQ ID NO: 3933337 - RNA, 22 nt, Human adenovirus E
ggaccugcacuggcagcccagc

SEQ ID NO: 3933338 - RNA, 23 nt, Human adenovirus E
ggacgacccgggcaaccuggaag

SEQ ID NO: 3933339 - RNA, 17 nt, Human adenovirus E
ggacgauuggacccagg

SEQ ID NO: 3933340 - RNA, 22 nt, Human adenovirus E
ggacgccgaggcucucuucaac

SEQ ID NO: 3933341 - RNA, 22 nt, Human adenovirus E
gguucugggugaucuuggcccg

SEQ ID NO: 3933342 - RNA, 16 nt, Human adenovirus E
gguugcaaucgcagug

SEQ ID NO: 3933343 - RNA, 19 nt, Human adenovirus E
guacaugggcaucuugcac

SEQ ID NO: 3933344 - RNA, 18 nt, Human adenovirus E
guaccaguccgggccgga

SEQ ID NO: 3933345 - RNA, 20 nt, Human adenovirus E
guaccccaccaugcagcuga

SEQ ID NO: 3933346 - RNA, 13 nt, Human adenovirus E
guaccucaccugg

SEQ ID NO: 3933347 - RNA, 14 nt, Human adenovirus E
guaccucaccuggc

SEQ ID NO: 3933348 - RNA, 15 nt, Human adenovirus E
guacggaggcgcucg

SEQ ID NO: 3933349 - RNA, 19 nt, Human adenovirus E
guacucuucgagggggaac

SEQ ID NO: 3933350 - RNA, 16 nt, Human adenovirus E
guagacguagaggggc

SEQ ID NO: 3933351 - RNA, 18 nt, Human adenovirus E
guagagcuugggggcgag

SEQ ID NO: 3933352 - RNA, 23 nt, Human adenovirus E
guaggcguccgcgccgcaguggg

SEQ ID NO: 3933353 - RNA, 13 nt, Human adenovirus E
guaggugagcucg

SEQ ID NO: 3933354 - RNA, 15 nt, Human adenovirus E
guaggugggguagca

SEQ ID NO: 3933355 - RNA, 19 nt, Human adenovirus E
guagucaaauacuggccac

SEQ ID NO: 3933356 - RNA, 13 nt, Human adenovirus E
guagucuggagaa

SEQ ID NO: 3933357 - RNA, 14 nt, Human adenovirus E
gucaaauacuggcc

SEQ ID NO: 3933358 - RNA, 16 nt, Human adenovirus E
gucaagcugcugcuca

SEQ ID NO: 3933359 - RNA, 17 nt, Human adenovirus E
gucaagcugcugcucag

SEQ ID NO: 3933360 - RNA, 18 nt, Human adenovirus E
gucaaugccaccucagcu

SEQ ID NO: 3933361 - RNA, 18 nt, Human adenovirus E
gucacggcguacgagcag

SEQ ID NO: 3933362 - RNA, 19 nt, Human adenovirus E
gucagcgacgagcagcugg

SEQ ID NO: 3933363 - RNA, 20 nt, Human adenovirus E
gucagcgacgagcagcuggc

SEQ ID NO: 3933364 - RNA, 16 nt, Human adenovirus E
gucaggcagaggagga

SEQ ID NO: 3933365 - RNA, 17 nt, Human adenovirus E
gucaggcagaggaggag

SEQ ID NO: 3933366 - RNA, 12 nt, Human adenovirus E
gucaggcugggc

SEQ ID NO: 3933367 - RNA, 13 nt, Human adenovirus E
gucaggcugggcu

SEQ ID NO: 3933368 - RNA, 19 nt, Human adenovirus E
gucauggaccaggugcuca

SEQ ID NO: 3933369 - RNA, 17 nt, Human adenovirus E
guccaccuuuuccaggg

SEQ ID NO: 3933370 - RNA, 20 nt, Human adenovirus E
guccacugucgagagccaca

SEQ ID NO: 3933371 - RNA, 20 nt, Human adenovirus E
guccauaguucaacacgcuc

SEQ ID NO: 3933372 - RNA, 22 nt, Human adenovirus E
guccccggugcugacggcuccc

SEQ ID NO: 3933373 - RNA, 15 nt, Human adenovirus E
gucccggcgcccgcc

SEQ ID NO: 3933374 - RNA, 15 nt, Human adenovirus E
gucccgucgaccccc

SEQ ID NO: 3933375 - RNA, 18 nt, Human adenovirus E
guccgcgucagggugguc

SEQ ID NO: 3933376 - RNA, 22 nt, Human adenovirus E
guccucccggaggaggggggcc

SEQ ID NO: 3933377 - RNA, 15 nt, Human adenovirus E
guccucgcagccccg

SEQ ID NO: 3933378 - RNA, 15 nt, Human adenovirus E
gucgccgcaccgccg

SEQ ID NO: 3933379 - RNA, 13 nt, Human adenovirus E
gucggggaaggag

SEQ ID NO: 3933380 - RNA, 13 nt, Human adenovirus E
gucgggggcagga

SEQ ID NO: 3933381 - RNA, 20 nt, Human adenovirus E
gucgggggcaggagcaggaa

SEQ ID NO: 3933382 - RNA, 12 nt, Human adenovirus E
gucuaccucgac

SEQ ID NO: 3933383 - RNA, 15 nt, Human adenovirus E
gucucaaagcuccgc

SEQ ID NO: 3933384 - RNA, 23 nt, Human adenovirus E
gucuccgcggccggcgcgcucca

SEQ ID NO: 3933385 - RNA, 16 nt, Human adenovirus E
gucucuucagauggau

SEQ ID NO: 3933386 - RNA, 12 nt, Human adenovirus E
gucuggaggagc

SEQ ID NO: 3933387 - RNA, 18 nt, Human adenovirus E
gucugggcagcgacgaga

SEQ ID NO: 3933388 - RNA, 17 nt, Human adenovirus E
gugaacauucugcagag

SEQ ID NO: 3933389 - RNA, 17 nt, Human adenovirus E
ggccguggcccagcgcg

SEQ ID NO: 3933390 - RNA, 22 nt, Human adenovirus E
ggccucuguuaaauuuuugcuu

SEQ ID NO: 3933391 - RNA, 16 nt, Human adenovirus E
ggccugaugcaccugu

SEQ ID NO: 3933392 - RNA, 14 nt, Human adenovirus E
ggccugggcggccu

SEQ ID NO: 3933393 - RNA, 12 nt, Human adenovirus E
ggccuuggaaga

SEQ ID NO: 3933394 - RNA, 18 nt, Human adenovirus E
ggccuuguaggcgcagca

SEQ ID NO: 3933395 - RNA, 17 nt, Human adenovirus E
ggcgacuaccuccaccu

SEQ ID NO: 3933396 - RNA, 15 nt, Human adenovirus E
ggcgagguugagcuc

SEQ ID NO: 3933397 - RNA, 12 nt, Human adenovirus E
ggcgauccuggc

SEQ ID NO: 3933398 - RNA, 15 nt, Human adenovirus E
ggcgauccuggccca

SEQ ID NO: 3933399 - RNA, 12 nt, Human adenovirus E
ggcgaugcagcc

SEQ ID NO: 3933400 - RNA, 17 nt, Human adenovirus E
ggcgaugcagcccccgc

SEQ ID NO: 3933401 - RNA, 14 nt, Human adenovirus E
ggcgauggagcgca

SEQ ID NO: 3933402 - RNA, 20 nt, Human adenovirus E
ggcgcacguggacgagcaga

SEQ ID NO: 3933403 - RNA, 21 nt, Human adenovirus E
ggcgcagggcaugguguugca

SEQ ID NO: 3933404 - RNA, 23 nt, Human adenovirus E
ggcgcaucgcccggcggcaccgg

SEQ ID NO: 3933405 - RNA, 18 nt, Human adenovirus E
ggcgccagcgccggcagg

SEQ ID NO: 3933406 - RNA, 20 nt, Human adenovirus E
ggcgcgagcgggucggagag

SEQ ID NO: 3933407 - RNA, 16 nt, Human adenovirus E
ggcgcgcaggccggag

SEQ ID NO: 3933408 - RNA, 18 nt, Human adenovirus E
ggcgcugcagagccagcc

SEQ ID NO: 3933409 - RNA, 19 nt, Human adenovirus E
ggcgcuguccggccgcgag

SEQ ID NO: 3933410 - RNA, 14 nt, Human adenovirus E
ggcggacgagcuga

SEQ ID NO: 3933411 - RNA, 15 nt, Human adenovirus E
ggcggacgcgcgccg

SEQ ID NO: 3933412 - RNA, 18 nt, Human adenovirus E
ggcggauggcuggcagag

SEQ ID NO: 3933413 - RNA, 11 nt, Human adenovirus E
ggcggcagcag

SEQ ID NO: 3933414 - RNA, 22 nt, Human adenovirus E
ggcggcgcaucgcccggcggca

SEQ ID NO: 3933415 - RNA, 17 nt, Human adenovirus E
ggcggcgcgugcagugg

SEQ ID NO: 3933416 - RNA, 14 nt, Human adenovirus E
ggcggcggcagcgg

SEQ ID NO: 3933417 - RNA, 14 nt, Human adenovirus E
ggcggcucggggcc

SEQ ID NO: 3933418 - RNA, 12 nt, Human adenovirus E
ggcggcuggggc

SEQ ID NO: 3933419 - RNA, 15 nt, Human adenovirus E
ggcgggagcugcggc

SEQ ID NO: 3933420 - RNA, 20 nt, Human adenovirus E
ggcgggagcugcggcgcggc

SEQ ID NO: 3933421 - RNA, 13 nt, Human adenovirus E
ggcgggcggcgcc

SEQ ID NO: 3933422 - RNA, 15 nt, Human adenovirus E
ggcgguggggcggca

SEQ ID NO: 3933423 - RNA, 13 nt, Human adenovirus E
ggcgugcagaccg

SEQ ID NO: 3933424 - RNA, 21 nt, Human adenovirus E
ggcgugccccagggcauggga

SEQ ID NO: 3933425 - RNA, 22 nt, Human adenovirus E
  misc_feature (10)..(10): n is a, c, g, or u
ggcucauuanuccagcagaggc

SEQ ID NO: 3933426 - RNA, 20 nt, Human adenovirus E
ggcucucggccauccuggag

SEQ ID NO: 3933427 - RNA, 16 nt, Human adenovirus E
ggcucugaaccugccc

SEQ ID NO: 3933428 - RNA, 19 nt, Human adenovirus E
ggcugaaaccgaaaguaag

SEQ ID NO: 3933429 - RNA, 14 nt, Human adenovirus E
ggcugacgcugcgc

SEQ ID NO: 3933430 - RNA, 19 nt, Human adenovirus E
ggcugacguccugcaggac

SEQ ID NO: 3933431 - RNA, 19 nt, Human adenovirus E
ggcugcaaacuuccuccac

SEQ ID NO: 3933432 - RNA, 13 nt, Human adenovirus E
ggcuggcagagcc

SEQ ID NO: 3933433 - RNA, 15 nt, Human adenovirus E
ggcuggcgcgccugg

SEQ ID NO: 3933434 - RNA, 15 nt, Human adenovirus E
ggcuggcggugcuca

SEQ ID NO: 3933435 - RNA, 12 nt, Human adenovirus E
ggcuggggcgac

SEQ ID NO: 3933436 - RNA, 23 nt, Human adenovirus E
gggaagacguggucagcucgucg

SEQ ID NO: 3933437 - RNA, 22 nt, Human adenovirus E
gggaagaucacccuagugagcu

SEQ ID NO: 3933438 - RNA, 22 nt, Human adenovirus E
gggacagcacucaggcagagga

SEQ ID NO: 3933439 - RNA, 20 nt, Human adenovirus E
gggaccccgugaccgagcug

SEQ ID NO: 3933440 - RNA, 15 nt, Human adenovirus E
gggagaugagcuggg

SEQ ID NO: 3933441 - RNA, 17 nt, Human adenovirus E
gggaggcuuccugcccg

SEQ ID NO: 3933442 - RNA, 18 nt, Human adenovirus E
  misc_feature (6)..(6): n is a, c, g, or u
cgggcnugggcgugcaga

SEQ ID NO: 3933443 - RNA, 18 nt, Human adenovirus E
cgggcuaccgcggcacgc

SEQ ID NO: 3933444 - RNA, 23 nt, Human adenovirus E
cggggaucagcaguuugggcagc

SEQ ID NO: 3933445 - RNA, 19 nt, Human adenovirus E
cgggggagaugagcugggc

SEQ ID NO: 3933446 - RNA, 18 nt, Human adenovirus E
cgggggcaggagcaggaa

SEQ ID NO: 3933447 - RNA, 14 nt, Human adenovirus E
cgggggucccggcc

SEQ ID NO: 3933448 - RNA, 11 nt, Human adenovirus E
cgggguugggc

SEQ ID NO: 3933449 - RNA, 17 nt, Human adenovirus E
cgggugauccuccacca

SEQ ID NO: 3933450 - RNA, 19 nt, Human adenovirus E
cgggugcuucacgcucgcc

SEQ ID NO: 3933451 - RNA, 14 nt, Human adenovirus E
cggguuccuguggg

SEQ ID NO: 3933452 - RNA, 14 nt, Human adenovirus E
cggucaccuuccgc

SEQ ID NO: 3933453 - RNA, 14 nt, Human adenovirus E
cgguccuuccaggg

SEQ ID NO: 3933454 - RNA, 13 nt, Human adenovirus E
cggucgcagaaga

SEQ ID NO: 3933455 - RNA, 24 nt, Human adenovirus E
cggucgcccgucucucagccaauc

SEQ ID NO: 3933456 - RNA, 22 nt, Human adenovirus E
cggucuucgcggugcccgaggc

SEQ ID NO: 3933457 - RNA, 18 nt, Human adenovirus E
cggugcaggccucucagc

SEQ ID NO: 3933458 - RNA, 21 nt, Human adenovirus E
cggugcccgaggcccuggcca

SEQ ID NO: 3933459 - RNA, 17 nt, Human adenovirus E
cgguggcacgacaggca

SEQ ID NO: 3933460 - RNA, 22 nt, Human adenovirus E
cggugugccgcgguccuccucg

SEQ ID NO: 3933461 - RNA, 14 nt, Human adenovirus E
cgguguugcuuucg

SEQ ID NO: 3933462 - RNA, 19 nt, Human adenovirus E
cguaagcagugcucaggug

SEQ ID NO: 3933463 - RNA, 13 nt, Human adenovirus E
cguaccagauccu

SEQ ID NO: 3933464 - RNA, 16 nt, Human adenovirus E
cguaggugagcucguc

SEQ ID NO: 3933465 - RNA, 20 nt, Human adenovirus E
cguaugcgcaggagcacagg

SEQ ID NO: 3933466 - RNA, 15 nt, Human adenovirus E
cgucaagcugcugcu

SEQ ID NO: 3933467 - RNA, 18 nt, Human adenovirus E
cgucaaggaugcgcugcu

SEQ ID NO: 3933468 - RNA, 14 nt, Human adenovirus E
cgucaccugcggcg

SEQ ID NO: 3933469 - RNA, 14 nt, Human adenovirus E
cgucaucaaaacac

SEQ ID NO: 3933470 - RNA, 13 nt, Human adenovirus E
cgucccuggcucc

SEQ ID NO: 3933471 - RNA, 22 nt, Human adenovirus E
cguccggcauuaacuccucgga

SEQ ID NO: 3933472 - RNA, 18 nt, Human adenovirus E
cguccguguggcagcccg

SEQ ID NO: 3933473 - RNA, 15 nt, Human adenovirus E
cguccucggcgcugu

SEQ ID NO: 3933474 - RNA, 19 nt, Human adenovirus E
cguccucucgagccgcacc

SEQ ID NO: 3933475 - RNA, 21 nt, Human adenovirus E
cgucuggugcggcgggcgcag

SEQ ID NO: 3933476 - RNA, 17 nt, Human adenovirus E
cgugaaccugagccagg

SEQ ID NO: 3933477 - RNA, 14 nt, Human adenovirus E
cgugcacgcagcag

SEQ ID NO: 3933478 - RNA, 13 nt, Human adenovirus E
cgugcagcagaag

SEQ ID NO: 3933479 - RNA, 15 nt, Human adenovirus E
cgugccccagggcau

SEQ ID NO: 3933480 - RNA, 17 nt, Human adenovirus E
cgugccccggggccagg

SEQ ID NO: 3933481 - RNA, 18 nt, Human adenovirus E
cgugccccggggccagga

SEQ ID NO: 3933482 - RNA, 13 nt, Human adenovirus E
cgugcgcuccugg

SEQ ID NO: 3933483 - RNA, 17 nt, Human adenovirus E
cgugcgcuccuggacgc

SEQ ID NO: 3933484 - RNA, 19 nt, Human adenovirus E
cgugcugcacaccacccug

SEQ ID NO: 3933485 - RNA, 15 nt, Human adenovirus E
cguggaacagcacca

SEQ ID NO: 3933486 - RNA, 20 nt, Human adenovirus E
cguggaggauuuggaggaag

SEQ ID NO: 3933487 - RNA, 14 nt, Human adenovirus E
cgugggcggcggcc

SEQ ID NO: 3933488 - RNA, 19 nt, Human adenovirus E
cgugggcggcggccugggc

SEQ ID NO: 3933489 - RNA, 14 nt, Human adenovirus E
cgugguccugguga

SEQ ID NO: 3933490 - RNA, 18 nt, Human adenovirus E
cguggucuucuccaucgc

SEQ ID NO: 3933491 - RNA, 19 nt, Human adenovirus E
cguguucuccccccgaccg

SEQ ID NO: 3933492 - RNA, 15 nt, Human adenovirus E
cguuacgugcagcag

SEQ ID NO: 3933493 - RNA, 16 nt, Human adenovirus E
cguuacgugcagcaga

SEQ ID NO: 3933494 - RNA, 21 nt, Human adenovirus E
cguuccugcucucacagauca

SEQ ID NO: 3933495 - RNA, 21 nt, Human adenovirus E
cguugauguuguggcccacga

SEQ ID NO: 3933496 - RNA, 23 nt, Human adenovirus E
cguugauguuguggcccacgaug

SEQ ID NO: 3933497 - RNA, 12 nt, Human adenovirus E
cuaaagauggaa

SEQ ID NO: 3933498 - RNA, 14 nt, Human adenovirus E
cuaacucuuauacc

SEQ ID NO: 3933499 - RNA, 20 nt, Human adenovirus E
cuacaagaccccguacgugc

SEQ ID NO: 3933500 - RNA, 17 nt, Human adenovirus E
cuacaaugcucagucuc

SEQ ID NO: 3933501 - RNA, 19 nt, Human adenovirus E
cuacacgggcgaguacgac

SEQ ID NO: 3933502 - RNA, 23 nt, Human adenovirus E
cuacacugacguaaaggccaaag

SEQ ID NO: 3933503 - RNA, 15 nt, Human adenovirus E
cuacagaaagcacag

SEQ ID NO: 3933504 - RNA, 16 nt, Human adenovirus E
cuacagaaagcacaga

SEQ ID NO: 3933505 - RNA, 15 nt, Human adenovirus E
cuacagccuaggcca

SEQ ID NO: 3933506 - RNA, 19 nt, Human adenovirus E
cuaccgaggucaggggcga

SEQ ID NO: 3933507 - RNA, 13 nt, Human adenovirus E
cuaccgucaccuc

SEQ ID NO: 3933508 - RNA, 13 nt, Human adenovirus E
cuaccuccagugc

SEQ ID NO: 3933509 - RNA, 20 nt, Human adenovirus E
cuaccucuaccucugccaca

SEQ ID NO: 3933510 - RNA, 15 nt, Human adenovirus E
cuaccucugccacac

SEQ ID NO: 3933511 - RNA, 23 nt, Human adenovirus E
cuacgcgcugcauccuuccauca

SEQ ID NO: 3933512 - RNA, 16 nt, Human adenovirus E
cuacugaacucugugg

SEQ ID NO: 3933513 - RNA, 16 nt, Human adenovirus E
cuacuggucgcugccc

SEQ ID NO: 3933514 - RNA, 18 nt, Human adenovirus E
cuacuuccaagaagaggc

SEQ ID NO: 3933515 - RNA, 18 nt, Human adenovirus E
cuacuugcaucgggcggc

SEQ ID NO: 3933516 - RNA, 22 nt, Human adenovirus E
cuaucucuuccucuucuugguc

SEQ ID NO: 3933517 - RNA, 22 nt, Human adenovirus E
cuauucuuaucugccuccucca

SEQ ID NO: 3933518 - RNA, 17 nt, Human adenovirus E
cucaacccaccccaccc

SEQ ID NO: 3933519 - RNA, 22 nt, Human adenovirus E
cucacagaucacgggacccugc

SEQ ID NO: 3933520 - RNA, 18 nt, Human adenovirus E
cucacagcucaacagcug

SEQ ID NO: 3933521 - RNA, 13 nt, Human adenovirus E
cucaccaaggcca

SEQ ID NO: 3933522 - RNA, 15 nt, Human adenovirus E
cucaccgccacgccc

SEQ ID NO: 3933523 - RNA, 16 nt, Human adenovirus E
cucacuaccaauaaca

SEQ ID NO: 3933524 - RNA, 19 nt, Human adenovirus E
cucagcaucagucgucugg

SEQ ID NO: 3933525 - RNA, 17 nt, Human adenovirus E
cucaggcagaggaggac

SEQ ID NO: 3933526 - RNA, 14 nt, Human adenovirus E
cucgcuguccuggc

SEQ ID NO: 3933527 - RNA, 14 nt, Human adenovirus E
cucgggacccugcc

SEQ ID NO: 3933528 - RNA, 15 nt, Human adenovirus E
cucggucuccucaca

SEQ ID NO: 3933529 - RNA, 16 nt, Human adenovirus E
cucggugauccgcacc

SEQ ID NO: 3933530 - RNA, 18 nt, Human adenovirus E
cucguacccguggaucau

SEQ ID NO: 3933531 - RNA, 13 nt, Human adenovirus E
cucuagcaccgcc

SEQ ID NO: 3933532 - RNA, 23 nt, Human adenovirus E
cucuaugccaucuuccagcagag

SEQ ID NO: 3933533 - RNA, 14 nt, Human adenovirus E
cucuauguuuaauu

SEQ ID NO: 3933534 - RNA, 18 nt, Human adenovirus E
cucucaucaaguuucaau

SEQ ID NO: 3933535 - RNA, 21 nt, Human adenovirus E
cucuccaguucguggaggagu

SEQ ID NO: 3933536 - RNA, 13 nt, Human adenovirus E
cucugaaccugcc

SEQ ID NO: 3933537 - RNA, 13 nt, Human adenovirus E
cucugacccugcc

SEQ ID NO: 3933538 - RNA, 16 nt, Human adenovirus E
cucugacgcuccuggu

SEQ ID NO: 3933539 - RNA, 16 nt, Human adenovirus E
cucugccacaccuggc

SEQ ID NO: 3933540 - RNA, 17 nt, Human adenovirus E
cucuugcaggacagcga

SEQ ID NO: 3933541 - RNA, 13 nt, Human adenovirus E
cugaaacucaccc

SEQ ID NO: 3933542 - RNA, 16 nt, Human adenovirus E
cugaaagagcucugca

SEQ ID NO: 3933543 - RNA, 18 nt, Human adenovirus E
cugaaagagcucugcaag

SEQ ID NO: 3933544 - RNA, 20 nt, Human adenovirus E
cugaaccugacacaccacca

SEQ ID NO: 3933545 - RNA, 22 nt, Human adenovirus E
cugaagcccacggccgccagcu

SEQ ID NO: 3933546 - RNA, 15 nt, Human adenovirus E
cugacacaccaccac

SEQ ID NO: 3933547 - RNA, 16 nt, Human adenovirus E
cugaccaaccuggucu

SEQ ID NO: 3933548 - RNA, 12 nt, Human adenovirus E
cugacccacugg

SEQ ID NO: 3933549 - RNA, 14 nt, Human adenovirus E
cugacccacuggcc

SEQ ID NO: 3933550 - RNA, 22 nt, Human adenovirus E
cugaccggggccgggaccgagg

SEQ ID NO: 3933551 - RNA, 16 nt, Human adenovirus E
cugacggcgcagcugu

SEQ ID NO: 3933552 - RNA, 15 nt, Human adenovirus E
cugacgucgcccagc

SEQ ID NO: 3933553 - RNA, 22 nt, Human adenovirus E
cugagcuccucccucagcaaua

SEQ ID NO: 3933554 - RNA, 16 nt, Human adenovirus E
cugcacaccacccugc

SEQ ID NO: 3933555 - RNA, 23 nt, Human adenovirus E
cugcagagcaucguggugcagga

SEQ ID NO: 3933556 - RNA, 13 nt, Human adenovirus E
cugcagcgggccc

SEQ ID NO: 3933557 - RNA, 20 nt, Human adenovirus E
cugcagcgggcccugaccgg

SEQ ID NO: 3933558 - RNA, 22 nt, Human adenovirus E
cugcagcgggcccugaccgggg

SEQ ID NO: 3933559 - RNA, 22 nt, Human adenovirus E
cugcaggaagcggcccaucaug

SEQ ID NO: 3933560 - RNA, 19 nt, Human adenovirus E
cugcaggaccacaugcuug

SEQ ID NO: 3933561 - RNA, 23 nt, Human adenovirus E
cugcaggccccggcgggcugcaa

SEQ ID NO: 3933562 - RNA, 19 nt, Human adenovirus E
cugcccccgccccagcagc

SEQ ID NO: 3933563 - RNA, 22 nt, Human adenovirus E
cugcccgacaugaugcaagacc

SEQ ID NO: 3933564 - RNA, 23 nt, Human adenovirus E
cugcccgacuuuaugagccaaag

SEQ ID NO: 3933565 - RNA, 21 nt, Human adenovirus E
cugcccguucucgcucgccac

SEQ ID NO: 3933566 - RNA, 15 nt, Human adenovirus E
cugccgcccuggugc

SEQ ID NO: 3933567 - RNA, 16 nt, Human adenovirus E
cugccguagucuggag

SEQ ID NO: 3933568 - RNA, 21 nt, Human adenovirus E
cugccguagucuggagaagaa

SEQ ID NO: 3933569 - RNA, 18 nt, Human adenovirus E
cugccuuggcaguacagu

SEQ ID NO: 3933570 - RNA, 15 nt, Human adenovirus E
cugcgagcccaaccc

SEQ ID NO: 3933571 - RNA, 20 nt, Human adenovirus E
cugcgccaccacccccagua

SEQ ID NO: 3933572 - RNA, 21 nt, Human adenovirus E
cugcgcccccguaucgggcgc

SEQ ID NO: 3933573 - RNA, 23 nt, Human adenovirus E
cugcuaccugcugcgccuggcca

SEQ ID NO: 3933574 - RNA, 17 nt, Human adenovirus E
cugcucccagagcugga

SEQ ID NO: 3933575 - RNA, 17 nt, Human adenovirus E
cugcucgaucuccuccu

SEQ ID NO: 3933576 - RNA, 21 nt, Human adenovirus E
cugcugaauaucaccgagccc

SEQ ID NO: 3933577 - RNA, 16 nt, Human adenovirus E
cugcugcgccuggcca

SEQ ID NO: 3933578 - RNA, 21 nt, Human adenovirus E
cugcugggccuuggcucccuc

SEQ ID NO: 3933579 - RNA, 15 nt, Human adenovirus E
cugcuucgcucggga

SEQ ID NO: 3933580 - RNA, 14 nt, Human adenovirus E
cuggagaugaugcu

SEQ ID NO: 3933581 - RNA, 16 nt, Human adenovirus E
cuggagcgcguggccc

SEQ ID NO: 3933582 - RNA, 23 nt, Human adenovirus E
cuggaggccaucgugcagaaccc

SEQ ID NO: 3933583 - RNA, 14 nt, Human adenovirus E
cuggaucuccugcc

SEQ ID NO: 3933584 - RNA, 18 nt, Human adenovirus E
cuggaugccaucggcucc

SEQ ID NO: 3933585 - RNA, 21 nt, Human adenovirus E
cuggcagcccagccgccgggc

SEQ ID NO: 3933586 - RNA, 19 nt, Human adenovirus E
cuggcccaauugcaagcca

SEQ ID NO: 3933587 - RNA, 15 nt, Human adenovirus E
cuggccuaccacucg

SEQ ID NO: 3933588 - RNA, 15 nt, Human adenovirus E
cuggcgccuacggag

SEQ ID NO: 3933589 - RNA, 15 nt, Human adenovirus E
cuggcgggggcacaa

SEQ ID NO: 3933590 - RNA, 17 nt, Human adenovirus E
cuggcuccuggaccugg

SEQ ID NO: 3933591 - RNA, 23 nt, Human adenovirus E
cuggcugacguccugcaggacca

SEQ ID NO: 3933592 - RNA, 13 nt, Human adenovirus E
cugggcagcgacg

SEQ ID NO: 3933593 - RNA, 15 nt, Human adenovirus E
cuggggcgacggggg

SEQ ID NO: 3933594 - RNA, 21 nt, Human adenovirus E
cuggggguauaggcagggaga

SEQ ID NO: 3933595 - RNA, 22 nt, Human adenovirus E
cugggguucauguugugcagga

SEQ ID NO: 3933596 - RNA, 18 nt, Human adenovirus E
cugggugaaggccacggg

SEQ ID NO: 3933597 - RNA, 19 nt, Human adenovirus E
cugguacuuggccagccac

SEQ ID NO: 3933598 - RNA, 19 nt, Human adenovirus E
cugguccgggcgcugcaca

SEQ ID NO: 3933599 - RNA, 19 nt, Human adenovirus E
cugguggcgguguugcuuu

SEQ ID NO: 3933600 - RNA, 13 nt, Human adenovirus E
cuguaucccaccc

SEQ ID NO: 3933601 - RNA, 15 nt, Human adenovirus E
cuguggaccucggcc

SEQ ID NO: 3933602 - RNA, 20 nt, Human adenovirus E
cugugggaccugcuggaggc

SEQ ID NO: 3933603 - RNA, 23 nt, Human adenovirus E
cugugggacgauguggacagcag

SEQ ID NO: 3933604 - RNA, 18 nt, Human adenovirus E
gugacaaagagcuguccg

SEQ ID NO: 3933605 - RNA, 15 nt, Human adenovirus E
gugaccguggagcug

SEQ ID NO: 3933606 - RNA, 23 nt, Human adenovirus E
gugacggcgcgcccguccucgcg

SEQ ID NO: 3933607 - RNA, 14 nt, Human adenovirus E
gugagcucgucggg

SEQ ID NO: 3933608 - RNA, 20 nt, Human adenovirus E
gugagcucgucggggucgcu

SEQ ID NO: 3933609 - RNA, 13 nt, Human adenovirus E
gugcaacacagaa

SEQ ID NO: 3933610 - RNA, 19 nt, Human adenovirus E
gugcacgaagcccugcagg

SEQ ID NO: 3933611 - RNA, 21 nt, Human adenovirus E
gugcaggagcgcgggcugccg

SEQ ID NO: 3933612 - RNA, 16 nt, Human adenovirus E
gugcaucuuggccugg

SEQ ID NO: 3933613 - RNA, 23 nt, Human adenovirus E
gugcccauagacaaggaggugaa

SEQ ID NO: 3933614 - RNA, 13 nt, Human adenovirus E
gugcccccuccag

SEQ ID NO: 3933615 - RNA, 13 nt, Human adenovirus E
gugccgcgguccu

SEQ ID NO: 3933616 - RNA, 17 nt, Human adenovirus E
gugccggacugggggac

SEQ ID NO: 3933617 - RNA, 16 nt, Human adenovirus E
gugcgacugggcuuuu

SEQ ID NO: 3933618 - RNA, 16 nt, Human adenovirus E
gugcgcgccgggcugg

SEQ ID NO: 3933619 - RNA, 20 nt, Human adenovirus E
gugcgcgccgggcugggcgc

SEQ ID NO: 3933620 - RNA, 17 nt, Human adenovirus E
gugcgcgugcgcgggca

SEQ ID NO: 3933621 - RNA, 20 nt, Human adenovirus E
gugcgcuucuuguaggcggg

SEQ ID NO: 3933622 - RNA, 19 nt, Human adenovirus E
gugcugccgcggcggugcc

SEQ ID NO: 3933623 - RNA, 19 nt, Human adenovirus E
guggaaaauaacagccagg

SEQ ID NO: 3933624 - RNA, 17 nt, Human adenovirus E
guggaagaagcagccgc

SEQ ID NO: 3933625 - RNA, 21 nt, Human adenovirus E
guggacguuuagagccucggg

SEQ ID NO: 3933626 - RNA, 14 nt, Human adenovirus E
guggagccacugcu

SEQ ID NO: 3933627 - RNA, 20 nt, Human adenovirus E
guggaggauuuggaggaaga

SEQ ID NO: 3933628 - RNA, 20 nt, Human adenovirus E
guggagucguggcgccugca

SEQ ID NO: 3933629 - RNA, 12 nt, Human adenovirus E
guggaucuuuuc

SEQ ID NO: 3933630 - RNA, 17 nt, Human adenovirus E
guggaucuuuuccagga

SEQ ID NO: 3933631 - RNA, 16 nt, Human adenovirus E
guggcagcggccgagg

SEQ ID NO: 3933632 - RNA, 17 nt, Human adenovirus E
guggcagcggccgaggc

SEQ ID NO: 3933633 - RNA, 22 nt, Human adenovirus E
guggccaccucgccgcgcaggg

SEQ ID NO: 3933634 - RNA, 18 nt, Human adenovirus E
guggcccccuucacggac

SEQ ID NO: 3933635 - RNA, 14 nt, Human adenovirus E
guggcgaaggagcc

SEQ ID NO: 3933636 - RNA, 23 nt, Human adenovirus E
gugggcguaggagucuugcagcu

SEQ ID NO: 3933637 - RNA, 14 nt, Human adenovirus E
gugggcguggggca

SEQ ID NO: 3933638 - RNA, 16 nt, Human adenovirus E
gugggcguggggcagu

SEQ ID NO: 3933639 - RNA, 12 nt, Human adenovirus E
guggugcaggag

SEQ ID NO: 3933640 - RNA, 19 nt, Human adenovirus E
guguaccaguccgggccgg

SEQ ID NO: 3933641 - RNA, 13 nt, Human adenovirus E
gugucgagccugc

SEQ ID NO: 3933642 - RNA, 19 nt, Human adenovirus E
guguuguaaaucacccagu

SEQ ID NO: 3933643 - RNA, 16 nt, Human adenovirus E
guuagaguuuggaagc

SEQ ID NO: 3933644 - RNA, 15 nt, Human adenovirus E
guucagggcggccag

SEQ ID NO: 3933645 - RNA, 22 nt, Human adenovirus E
guuccgcaccgaaggaagaggc

SEQ ID NO: 3933646 - RNA, 14 nt, Human adenovirus E
guucgugcccgagg

SEQ ID NO: 3933647 - RNA, 14 nt, Human adenovirus E
guucuacacgggcg

SEQ ID NO: 3933648 - RNA, 11 nt, Human adenovirus E
guugcagaggc

SEQ ID NO: 3933649 - RNA, 15 nt, Human adenovirus E
guuggcacagcacag

SEQ ID NO: 3933650 - RNA, 20 nt, Human adenovirus E
guuggcacagcacaggcaua

SEQ ID NO: 3933651 - RNA, 18 nt, Human adenovirus E
guuuaaaauuugaagaug

SEQ ID NO: 3933652 - RNA, 14 nt, Human adenovirus E
uaaaaguccacggc

SEQ ID NO: 3933653 - RNA, 21 nt, Human adenovirus E
uaacgagcgccccuuguggaa

SEQ ID NO: 3933654 - RNA, 14 nt, Human adenovirus E
uaaguacucuuuca

SEQ ID NO: 3933655 - RNA, 19 nt, Human adenovirus E
uaaugagaaaauuacuauu

SEQ ID NO: 3933656 - RNA, 15 nt, Human adenovirus E
uaauuacuccccucc

SEQ ID NO: 3933657 - RNA, 14 nt, Human adenovirus E
uacaaaucuguuga

SEQ ID NO: 3933658 - RNA, 19 nt, Human adenovirus E
  misc_feature (8)..(8): n is a, c, g, or u
uacacucnugcaccauccc

SEQ ID NO: 3933659 - RNA, 16 nt, Human adenovirus E
uaccaccacuacagcc

SEQ ID NO: 3933660 - RNA, 22 nt, Human adenovirus E
uaccaggaaauuccccagccca

SEQ ID NO: 3933661 - RNA, 23 nt, Human adenovirus E
uaccgcgaggccaucggccaggc

SEQ ID NO: 3933662 - RNA, 20 nt, Human adenovirus E
uaccucugcucuaugcaauu

SEQ ID NO: 3933663 - RNA, 19 nt, Human adenovirus E
uacgagagcgugaugcagc

SEQ ID NO: 3933664 - RNA, 18 nt, Human adenovirus E
uacgcccgcgccaagagc

SEQ ID NO: 3933665 - RNA, 12 nt, Human adenovirus E
uacggcgcggcc

SEQ ID NO: 3933666 - RNA, 16 nt, Human adenovirus E
uagaaagccuggugga

SEQ ID NO: 3933667 - RNA, 19 nt, Human adenovirus E
uagacagcagccccaggcc

SEQ ID NO: 3933668 - RNA, 15 nt, Human adenovirus E
uagaggaaccccgcc

SEQ ID NO: 3933669 - RNA, 18 nt, Human adenovirus E
uagcuuaccgagcagcag

SEQ ID NO: 3933670 - RNA, 15 nt, Human adenovirus E
uaggacguccagagc

SEQ ID NO: 3933671 - RNA, 15 nt, Human adenovirus E
uagguuuuggaucag

SEQ ID NO: 3933672 - RNA, 19 nt, Human adenovirus E
uagucgagggucuccugga

SEQ ID NO: 3933673 - RNA, 20 nt, Human adenovirus E
uagucgagggucuccuggau

SEQ ID NO: 3933674 - RNA, 17 nt, Human adenovirus E
uauaccuucucauacau

SEQ ID NO: 3933675 - RNA, 15 nt, Human adenovirus E
ucaucaaguuucaau

SEQ ID NO: 3933676 - RNA, 20 nt, Human adenovirus E
ucauccuggccguguugcuc

SEQ ID NO: 3933677 - RNA, 16 nt, Human adenovirus E
ucaucugcauguucau

SEQ ID NO: 3933678 - RNA, 18 nt, Human adenovirus E
ucaugggcaccuggagcg

SEQ ID NO: 3933679 - RNA, 16 nt, Human adenovirus E
ucaugguauuguuauu

SEQ ID NO: 3933680 - RNA, 13 nt, Human adenovirus E
ucauguacagcaa

SEQ ID NO: 3933681 - RNA, 19 nt, Human adenovirus E
uccaacguggagcugacca

SEQ ID NO: 3933682 - RNA, 19 nt, Human adenovirus E
uccaagaagaggcagcagc

SEQ ID NO: 3933683 - RNA, 22 nt, Human adenovirus E
uccaagaccccauagccagccg

SEQ ID NO: 3933684 - RNA, 12 nt, Human adenovirus E
uccaagccagcc

SEQ ID NO: 3933685 - RNA, 20 nt, Human adenovirus E
uccacacugguggccaccuc

SEQ ID NO: 3933686 - RNA, 18 nt, Human adenovirus E
uccacagcggcggcagca

SEQ ID NO: 3933687 - RNA, 14 nt, Human adenovirus E
uccacccucccagg

SEQ ID NO: 3933688 - RNA, 15 nt, Human adenovirus E
uccaccugcggggcg

SEQ ID NO: 3933689 - RNA, 19 nt, Human adenovirus E
uccacugucgagagccaca

SEQ ID NO: 3933690 - RNA, 14 nt, Human adenovirus E
uccagcaccaggca

SEQ ID NO: 3933691 - RNA, 15 nt, Human adenovirus E
uccagcgcagccagg

SEQ ID NO: 3933692 - RNA, 14 nt, Human adenovirus E
uccaguucguggag

SEQ ID NO: 3933693 - RNA, 18 nt, Human adenovirus E
uccaucauccccacgccg

SEQ ID NO: 3933694 - RNA, 17 nt, Human adenovirus E
uccaucccgcuggacca

SEQ ID NO: 3933695 - RNA, 14 nt, Human adenovirus E
ucccaacaaaugcc

SEQ ID NO: 3933696 - RNA, 15 nt, Human adenovirus E
ucccaacaaaugcca

SEQ ID NO: 3933697 - RNA, 17 nt, Human adenovirus E
ucccagacaugcaagag

SEQ ID NO: 3933698 - RNA, 13 nt, Human adenovirus E
ucccaggacaugg

SEQ ID NO: 3933699 - RNA, 11 nt, Human adenovirus E
ucccagggcac

SEQ ID NO: 3933700 - RNA, 17 nt, Human adenovirus E
uccccgucuccugccgc

SEQ ID NO: 3933701 - RNA, 19 nt, Human adenovirus E
ucccgugcaggcaccgcag

SEQ ID NO: 3933702 - RNA, 15 nt, Human adenovirus E
ucccuggccugcaac

SEQ ID NO: 3933703 - RNA, 21 nt, Human adenovirus E
ucccuggccugcaacccccag

SEQ ID NO: 3933704 - RNA, 13 nt, Human adenovirus E
uccgagaagcugg

SEQ ID NO: 3933705 - RNA, 17 nt, Human adenovirus E
uccgccgacgacagcag

SEQ ID NO: 3933706 - RNA, 19 nt, Human adenovirus E
uccggccgcgagggugcug

SEQ ID NO: 3933707 - RNA, 18 nt, Human adenovirus E
uccgggcacucccgcauc

SEQ ID NO: 3933708 - RNA, 12 nt, Human adenovirus E
uccggggcagaa

SEQ ID NO: 3933709 - RNA, 13 nt, Human adenovirus E
uccgucaagcugc

SEQ ID NO: 3933710 - RNA, 15 nt, Human adenovirus E
uccuagaacagucag

SEQ ID NO: 3933711 - RNA, 21 nt, Human adenovirus E
uccucaauaucacgaaaucau

SEQ ID NO: 3933712 - RNA, 21 nt, Human adenovirus E
uccuccaagucugugccaccc

SEQ ID NO: 3933713 - RNA, 15 nt, Human adenovirus E
uccuccagaagacgg

SEQ ID NO: 3933714 - RNA, 16 nt, Human adenovirus E
uccucccggaggaggg

SEQ ID NO: 3933715 - RNA, 14 nt, Human adenovirus E
uccucccucagcaa

SEQ ID NO: 3933716 - RNA, 20 nt, Human adenovirus E
uccuccgcggccggccauug

SEQ ID NO: 3933717 - RNA, 22 nt, Human adenovirus E
uccugcggaaccacagggccag

SEQ ID NO: 3933718 - RNA, 19 nt, Human adenovirus E
uccugcguuacgugcagca

SEQ ID NO: 3933719 - RNA, 22 nt, Human adenovirus E
uccugcguuacgugcagcagaa

SEQ ID NO: 3933720 - RNA, 23 nt, Human adenovirus E
uccuggccguguugcucuacuac

SEQ ID NO: 3933721 - RNA, 20 nt, Human adenovirus E
uccugguucaccugcagcag

SEQ ID NO: 3933722 - RNA, 22 nt, Human adenovirus E
uccugguucaccugcagcagau

SEQ ID NO: 3933723 - RNA, 20 nt, Human adenovirus E
uccugugggacgauguggac

SEQ ID NO: 3933724 - RNA, 13 nt, Human adenovirus E
uccuucucgguga

SEQ ID NO: 3933725 - RNA, 18 nt, Human adenovirus E
ucgaaggcgggcaugacc

SEQ ID NO: 3933726 - RNA, 18 nt, Human adenovirus E
ucgaaucaggcuggagcc

SEQ ID NO: 3933727 - RNA, 15 nt, Human adenovirus E
ucgacaccuggacca

SEQ ID NO: 3933728 - RNA, 17 nt, Human adenovirus E
ucgacgagcgcaccacc

SEQ ID NO: 3933729 - RNA, 14 nt, Human adenovirus E
ucgacgccaucagc

SEQ ID NO: 3933730 - RNA, 18 nt, Human adenovirus E
ucgacuccguggccugga

SEQ ID NO: 3933731 - RNA, 21 nt, Human adenovirus E
ucgagcaguuauuuuuccucc

SEQ ID NO: 3933732 - RNA, 21 nt, Human adenovirus E
ucgaggacgucagcggcgagg

SEQ ID NO: 3933733 - RNA, 19 nt, Human adenovirus E
ucgagggucuccuggauga

SEQ ID NO: 3933734 - RNA, 16 nt, Human adenovirus E
ucgagggucugggcag

SEQ ID NO: 3933735 - RNA, 17 nt, Human adenovirus E
ucgagggucugggcagc

SEQ ID NO: 3933736 - RNA, 19 nt, Human adenovirus E
ucgagggucugggcagcga

SEQ ID NO: 3933737 - RNA, 13 nt, Human adenovirus E
ucgagugccacug

SEQ ID NO: 3933738 - RNA, 15 nt, Human adenovirus E
ucgaucuccuccucu

SEQ ID NO: 3933739 - RNA, 23 nt, Human adenovirus E
ucgauggugaagaugccgggcag

SEQ ID NO: 3933740 - RNA, 15 nt, Human adenovirus E
ucgauuccucgggaa

SEQ ID NO: 3933741 - RNA, 23 nt, Human adenovirus E
ucgauuccucgggaaaacucauc

SEQ ID NO: 3933742 - RNA, 16 nt, Human adenovirus E
ucgcccaucuccgagg

SEQ ID NO: 3933743 - RNA, 15 nt, Human adenovirus E
ucgcccgucucucag

SEQ ID NO: 3933744 - RNA, 20 nt, Human adenovirus E
ucgcccugcucgggcaucag

SEQ ID NO: 3933745 - RNA, 21 nt, Human adenovirus E
ucgcccugcucgggcaucagc

SEQ ID NO: 3933746 - RNA, 22 nt, Human adenovirus E
ucgcgccugcugcugcugcugg

SEQ ID NO: 3933747 - RNA, 19 nt, Human adenovirus E
ucgcguucccauuacgggc

SEQ ID NO: 3933748 - RNA, 22 nt, Human adenovirus E
ucgcuguugagacccgagcggg

SEQ ID NO: 3933749 - RNA, 18 nt, Human adenovirus E
ucggaucuucagccagcg

SEQ ID NO: 3933750 - RNA, 12 nt, Human adenovirus E
ucggccaugggc

SEQ ID NO: 3933751 - RNA, 18 nt, Human adenovirus E
ugacaguacaggagccau

SEQ ID NO: 3933752 - RNA, 13 nt, Human adenovirus E
ugaccacaaccac

SEQ ID NO: 3933753 - RNA, 18 nt, Human adenovirus E
ugaccaccguggugcaga

SEQ ID NO: 3933754 - RNA, 16 nt, Human adenovirus E
ugaccagcaugaaggg

SEQ ID NO: 3933755 - RNA, 12 nt, Human adenovirus E
ugacccugggcc

SEQ ID NO: 3933756 - RNA, 13 nt, Human adenovirus E
ugacccugggccu

SEQ ID NO: 3933757 - RNA, 13 nt, Human adenovirus E
ugacgcuccuggu

SEQ ID NO: 3933758 - RNA, 17 nt, Human adenovirus E
ugacggguuccuguggg

SEQ ID NO: 3933759 - RNA, 23 nt, Human adenovirus E
ugacggguuccugugggacgaug

SEQ ID NO: 3933760 - RNA, 13 nt, Human adenovirus E
ugacggugccggc

SEQ ID NO: 3933761 - RNA, 14 nt, Human adenovirus E
ugacugacccacug

SEQ ID NO: 3933762 - RNA, 22 nt, Human adenovirus E
ugagccgcgcccugggccagga

SEQ ID NO: 3933763 - RNA, 16 nt, Human adenovirus E
ugagcgacgaucuggg

SEQ ID NO: 3933764 - RNA, 14 nt, Human adenovirus E
ugagcggggcugga

SEQ ID NO: 3933765 - RNA, 19 nt, Human adenovirus E
ugagggagagacagcugcc

SEQ ID NO: 3933766 - RNA, 15 nt, Human adenovirus E
ugagguacaugggca

SEQ ID NO: 3933767 - RNA, 18 nt, Human adenovirus E
ugagguacaugggcauga

SEQ ID NO: 3933768 - RNA, 14 nt, Human adenovirus E
ugaucaccagcugg

SEQ ID NO: 3933769 - RNA, 22 nt, Human adenovirus E
ugaugcaaaacuaacacuuugc

SEQ ID NO: 3933770 - RNA, 12 nt, Human adenovirus E
ugauggacaugc

SEQ ID NO: 3933771 - RNA, 20 nt, Human adenovirus E
ugcaacaacaacagccaccu

SEQ ID NO: 3933772 - RNA, 22 nt, Human adenovirus E
ugcaacuuuuuuuuggaggccg

SEQ ID NO: 3933773 - RNA, 22 nt, Human adenovirus E
ugcaagacccggucaccuuccg

SEQ ID NO: 3933774 - RNA, 13 nt, Human adenovirus E
ugcaagcgccgca

SEQ ID NO: 3933775 - RNA, 14 nt, Human adenovirus E
ugcacaccaacaug

SEQ ID NO: 3933776 - RNA, 15 nt, Human adenovirus E
ugcacccgugcagcc

SEQ ID NO: 3933777 - RNA, 22 nt, Human adenovirus E
ugcacgagaaccgccuggggca

SEQ ID NO: 3933778 - RNA, 18 nt, Human adenovirus E
ugcacgccgcaccgcucc

SEQ ID NO: 3933779 - RNA, 13 nt, Human adenovirus E
ugcagcaggcgau

SEQ ID NO: 3933780 - RNA, 11 nt, Human adenovirus E
ugcagcccccg

SEQ ID NO: 3933781 - RNA, 15 nt, Human adenovirus E
ugcagcucacuacca

SEQ ID NO: 3933782 - RNA, 22 nt, Human adenovirus E
ugcaggacagcgaaccccgcag

SEQ ID NO: 3933783 - RNA, 17 nt, Human adenovirus E
ugcaggagcgcgggcug

SEQ ID NO: 3933784 - RNA, 21 nt, Human adenovirus E
ugcaggagcgcgggcugccgc

SEQ ID NO: 3933785 - RNA, 18 nt, Human adenovirus E
ugcaggccucucagcgcc

SEQ ID NO: 3933786 - RNA, 19 nt, Human adenovirus E
ugcaggccugcgggggcaa

SEQ ID NO: 3933787 - RNA, 23 nt, Human adenovirus E
ugcagggccuguggggcgugcag

SEQ ID NO: 3933788 - RNA, 17 nt, Human adenovirus E
ugcagggcgcccagcag

SEQ ID NO: 3933789 - RNA, 18 nt, Human adenovirus E
ugcaggggcggcaggggc

SEQ ID NO: 3933790 - RNA, 15 nt, Human adenovirus E
ugcagggggaucagc

SEQ ID NO: 3933791 - RNA, 15 nt, Human adenovirus E
ugcaguggcgcgggc

SEQ ID NO: 3933792 - RNA, 13 nt, Human adenovirus E
ugcaucucccagg

SEQ ID NO: 3933793 - RNA, 16 nt, Human adenovirus E
ugcaucucuucagcac

SEQ ID NO: 3933794 - RNA, 14 nt, Human adenovirus E
ugcaucugcugcug

SEQ ID NO: 3933795 - RNA, 10 nt, Human adenovirus E
ugccagcuga

SEQ ID NO: 3933796 - RNA, 15 nt, Human adenovirus E
ugccauucgcgcacg

SEQ ID NO: 3933797 - RNA, 20 nt, Human adenovirus E
ugccauucgcgcacggccag

SEQ ID NO: 3933798 - RNA, 13 nt, Human adenovirus E
ugccccagagcga

SEQ ID NO: 3933799 - RNA, 16 nt, Human adenovirus E
ugcccgaggacuacca

SEQ ID NO: 3933800 - RNA, 15 nt, Human adenovirus E
ugcccgcgcggggca

SEQ ID NO: 3933801 - RNA, 19 nt, Human adenovirus E
ugcccuucaucaacccccc

SEQ ID NO: 3933802 - RNA, 19 nt, Human adenovirus E
ugcccuucgcccuagccgc

SEQ ID NO: 3933803 - RNA, 22 nt, Human adenovirus E
ugccgaaaaagaaaaacagcca

SEQ ID NO: 3933804 - RNA, 14 nt, Human adenovirus E
ugccgcccaggacu

SEQ ID NO: 3933805 - RNA, 16 nt, Human adenovirus E
ugccgcugaccuuccg

SEQ ID NO: 3933806 - RNA, 21 nt, Human adenovirus E
ugccgcuguccgagaagcugg

SEQ ID NO: 3933807 - RNA, 20 nt, Human adenovirus E
ugccugagcauucacaugcu

SEQ ID NO: 3933808 - RNA, 19 nt, Human adenovirus E
ugccugauggcucugauca

SEQ ID NO: 3933809 - RNA, 13 nt, Human adenovirus E
ugccugcgccgcu

SEQ ID NO: 3933810 - RNA, 13 nt, Human adenovirus E
ugccuucugcuac

SEQ ID NO: 3933811 - RNA, 17 nt, Human adenovirus E
ugccuuggcaguacagu

SEQ ID NO: 3933812 - RNA, 18 nt, Human adenovirus E
ugcgagccgauggggaag

SEQ ID NO: 3933813 - RNA, 19 nt, Human adenovirus E
ugcgagccgauggggaaga

SEQ ID NO: 3933814 - RNA, 22 nt, Human adenovirus E
ugcgagggggcgaggagccccg

SEQ ID NO: 3933815 - RNA, 17 nt, Human adenovirus E
ugcgccaccacccccag

SEQ ID NO: 3933816 - RNA, 14 nt, Human adenovirus E
ugcgcgccgggcug

SEQ ID NO: 3933817 - RNA, 15 nt, Human adenovirus E
ugcgcgugcgcgggc

SEQ ID NO: 3933818 - RNA, 17 nt, Human adenovirus E
ugcggcccaugagcugc

SEQ ID NO: 3933819 - RNA, 12 nt, Human adenovirus E
ugcggcgggcgc

SEQ ID NO: 3933820 - RNA, 21 nt, Human adenovirus E
ugcgguacacgggguugcagc

SEQ ID NO: 3933821 - RNA, 19 nt, Human adenovirus E
ugcgguggugaaggaggaa

SEQ ID NO: 3933822 - RNA, 19 nt, Human adenovirus E
ugcgucucgggacccugcc

SEQ ID NO: 3933823 - RNA, 13 nt, Human adenovirus E
ugcguuccagcau

SEQ ID NO: 3933824 - RNA, 20 nt, Human adenovirus E
ugcuaccgccaaaaaucaga

SEQ ID NO: 3933825 - RNA, 16 nt, Human adenovirus E
ugcuccgcgcugcccu

SEQ ID NO: 3933826 - RNA, 23 nt, Human adenovirus E
ugcuccugguucaccugcagcag

SEQ ID NO: 3933827 - RNA, 18 nt, Human adenovirus E
ugcucgaucuccuccucu

SEQ ID NO: 3933828 - RNA, 17 nt, Human adenovirus E
ugcugaaaaagggccgc

SEQ ID NO: 3933829 - RNA, 17 nt, Human adenovirus E
ugcuggagcgcguggcc

SEQ ID NO: 3933830 - RNA, 13 nt, Human adenovirus E
uggaaacauaaag

SEQ ID NO: 3933831 - RNA, 22 nt, Human adenovirus E
uggaagagggcgaggggcuggc

SEQ ID NO: 3933832 - RNA, 17 nt, Human adenovirus E
agucauaaucaucugca

SEQ ID NO: 3933833 - RNA, 18 nt, Human adenovirus E
agucauucagccggugga

SEQ ID NO: 3933834 - RNA, 21 nt, Human adenovirus E
  misc_feature (8)..(8): n is a, c, g, or u
aguccugnugagcggcccugc

SEQ ID NO: 3933835 - RNA, 20 nt, Human adenovirus E
agucucaaguccagcaaagc

SEQ ID NO: 3933836 - RNA, 17 nt, Human adenovirus E
agugcugacccugagcg

SEQ ID NO: 3933837 - RNA, 21 nt, Human adenovirus E
aguggcauuuuugaugugggc

SEQ ID NO: 3933838 - RNA, 13 nt, Human adenovirus E
agugucuggagga

SEQ ID NO: 3933839 - RNA, 14 nt, Human adenovirus E
aguucaaggcgcgg

SEQ ID NO: 3933840 - RNA, 17 nt, Human adenovirus E
aguugagcgugguggcg

SEQ ID NO: 3933841 - RNA, 15 nt, Human adenovirus E
aguuucaauguggau

SEQ ID NO: 3933842 - RNA, 23 nt, Human adenovirus E
auaaucacacacgcccagcacac

SEQ ID NO: 3933843 - RNA, 22 nt, Human adenovirus E
auaauuuucauuuuuccagccu

SEQ ID NO: 3933844 - RNA, 17 nt, Human adenovirus E
auacaccacccucuccc

SEQ ID NO: 3933845 - RNA, 23 nt, Human adenovirus E
auacagcucgugcgagggggcga

SEQ ID NO: 3933846 - RNA, 22 nt, Human adenovirus E
auaucgccuccuuggaagaggu

SEQ ID NO: 3933847 - RNA, 13 nt, Human adenovirus E
auaugcucaugca

SEQ ID NO: 3933848 - RNA, 20 nt, Human adenovirus E
auauuaacgcgcacaaaaag

SEQ ID NO: 3933849 - RNA, 20 nt, Human adenovirus E
aucaaaacacgacuuucaaa

SEQ ID NO: 3933850 - RNA, 22 nt, Human adenovirus E
aucaaguggugcccccuccaga

SEQ ID NO: 3933851 - RNA, 22 nt, Human adenovirus E
aucacccagucauagcaggggc

SEQ ID NO: 3933852 - RNA, 12 nt, Human adenovirus E
aucacgguuauc

SEQ ID NO: 3933853 - RNA, 23 nt, Human adenovirus E
aucacuauucuuaucugccuccu

SEQ ID NO: 3933854 - RNA, 13 nt, Human adenovirus E
aucaucggcaccu

SEQ ID NO: 3933855 - RNA, 16 nt, Human adenovirus E
auccccgcgcuccugg

SEQ ID NO: 3933856 - RNA, 18 nt, Human adenovirus E
auccccgucuccugccgc

SEQ ID NO: 3933857 - RNA, 22 nt, Human adenovirus E
aucccugagcuccucccucagc

SEQ ID NO: 3933858 - RNA, 13 nt, Human adenovirus E
auccuccaccaga

SEQ ID NO: 3933859 - RNA, 23 nt, Human adenovirus E
auccuggaggccguggugcccuc

SEQ ID NO: 3933860 - RNA, 14 nt, Human adenovirus E
aucgccaaccucgc

SEQ ID NO: 3933861 - RNA, 19 nt, Human adenovirus E
aucgccuccuuggaagagg

SEQ ID NO: 3933862 - RNA, 17 nt, Human adenovirus E
aucguggugcaggagcg

SEQ ID NO: 3933863 - RNA, 16 nt, Human adenovirus E
aucguucucuccagca

SEQ ID NO: 3933864 - RNA, 18 nt, Human adenovirus E
aucuccaacguggagcug

SEQ ID NO: 3933865 - RNA, 15 nt, Human adenovirus E
aucucgcucaggucg

SEQ ID NO: 3933866 - RNA, 16 nt, Human adenovirus E
aucucgucgaagccgu

SEQ ID NO: 3933867 - RNA, 13 nt, Human adenovirus E
aucugggccuggu

SEQ ID NO: 3933868 - RNA, 15 nt, Human adenovirus E
augaccaccugggcg

SEQ ID NO: 3933869 - RNA, 16 nt, Human adenovirus E
augaccaucgaccuga

SEQ ID NO: 3933870 - RNA, 19 nt, Human adenovirus E
augaggccgagccacagcg

SEQ ID NO: 3933871 - RNA, 16 nt, Human adenovirus E
augauauucuggagca

SEQ ID NO: 3933872 - RNA, 23 nt, Human adenovirus E
augauauucuggagcaggcggcc

SEQ ID NO: 3933873 - RNA, 19 nt, Human adenovirus E
augaugauauucuggagca

SEQ ID NO: 3933874 - RNA, 23 nt, Human adenovirus E
augcaagcggugcguuccagcau

SEQ ID NO: 3933875 - RNA, 12 nt, Human adenovirus E
augcaggagggg

SEQ ID NO: 3933876 - RNA, 17 nt, Human adenovirus E
augcaggagggggccac

SEQ ID NO: 3933877 - RNA, 14 nt, Human adenovirus E
augcaggggcggca

SEQ ID NO: 3933878 - RNA, 13 nt, Human adenovirus E
augcgcaggagca

SEQ ID NO: 3933879 - RNA, 21 nt, Human adenovirus E
augcggaugaagcacaaaauu

SEQ ID NO: 3933880 - RNA, 18 nt, Human adenovirus E
augcgggcggcgcugcag

SEQ ID NO: 3933881 - RNA, 17 nt, Human adenovirus E
augcgucgccaccacca

SEQ ID NO: 3933882 - RNA, 19 nt, Human adenovirus E
auggacucugacgcuccug

SEQ ID NO: 3933883 - RNA, 23 nt, Human adenovirus E
auggaggugcagacggaucccug

SEQ ID NO: 3933884 - RNA, 22 nt, Human adenovirus E
auggcuggcagagccccuuccg

SEQ ID NO: 3933885 - RNA, 16 nt, Human adenovirus E
augggacgagaccgga

SEQ ID NO: 3933886 - RNA, 13 nt, Human adenovirus E
augggcaccugga

SEQ ID NO: 3933887 - RNA, 17 nt, Human adenovirus E
augggcgcggaccugca

SEQ ID NO: 3933888 - RNA, 21 nt, Human adenovirus E
augggcgcggaccugcacugg

SEQ ID NO: 3933889 - RNA, 19 nt, Human adenovirus E
augguagaauucaaggaca

SEQ ID NO: 3933890 - RNA, 18 nt, Human adenovirus E
auggugaagaugccgggc

SEQ ID NO: 3933891 - RNA, 23 nt, Human adenovirus E
auggugaccgacgugcgcgaggc

SEQ ID NO: 3933892 - RNA, 19 nt, Human adenovirus E
augguguacuaugccuucu

SEQ ID NO: 3933893 - RNA, 23 nt, Human adenovirus E
auuaccucugcucuaugcaauuc

SEQ ID NO: 3933894 - RNA, 18 nt, Human adenovirus E
auucccacggagcccaug

SEQ ID NO: 3933895 - RNA, 12 nt, Human adenovirus E
auuccccagccc

SEQ ID NO: 3933896 - RNA, 23 nt, Human adenovirus E
auucuggccugcacccucaucuc

SEQ ID NO: 3933897 - RNA, 17 nt, Human adenovirus E
auucuuaucugccuccu

SEQ ID NO: 3933898 - RNA, 13 nt, Human adenovirus E
auugaccugggcu

SEQ ID NO: 3933899 - RNA, 23 nt, Human adenovirus E
auugcuauuuuggaucugacacu

SEQ ID NO: 3933900 - RNA, 18 nt, Human adenovirus E
auugucggugugcuuucg

SEQ ID NO: 3933901 - RNA, 19 nt, Human adenovirus E
auuucaaucccaacaaaug

SEQ ID NO: 3933902 - RNA, 21 nt, Human adenovirus E
auuucaccaacgccauccuga

SEQ ID NO: 3933903 - RNA, 21 nt, Human adenovirus E
caaaagaaaaauccuccaggu

SEQ ID NO: 3933904 - RNA, 17 nt, Human adenovirus E
caaacuaaccuccacca

SEQ ID NO: 3933905 - RNA, 17 nt, Human adenovirus E
caaacugucaaauacuc

SEQ ID NO: 3933906 - RNA, 14 nt, Human adenovirus E
caaauaaucacaca

SEQ ID NO: 3933907 - RNA, 18 nt, Human adenovirus E
caaaucuguugagcuggg

SEQ ID NO: 3933908 - RNA, 17 nt, Human adenovirus E
caacaaaugccagcuga

SEQ ID NO: 3933909 - RNA, 16 nt, Human adenovirus E
caacaucuccuucacc

SEQ ID NO: 3933910 - RNA, 15 nt, Human adenovirus E
caaccaccccugccg

SEQ ID NO: 3933911 - RNA, 18 nt, Human adenovirus E
caaccaccccugccgccc

SEQ ID NO: 3933912 - RNA, 20 nt, Human adenovirus E
caaccacgugcgcacccuga

SEQ ID NO: 3933913 - RNA, 14 nt, Human adenovirus E
caacgaugaaguaa

SEQ ID NO: 3933914 - RNA, 15 nt, Human adenovirus E
caacuccuccuccag

SEQ ID NO: 3933915 - RNA, 15 nt, Human adenovirus E
caacucguaccuggg

SEQ ID NO: 3933916 - RNA, 16 nt, Human adenovirus E
caacucguaccugggc

SEQ ID NO: 3933917 - RNA, 19 nt, Human adenovirus E
caagaauucuugcugaaaa

SEQ ID NO: 3933918 - RNA, 15 nt, Human adenovirus E
caagacccccaaugg

SEQ ID NO: 3933919 - RNA, 14 nt, Human adenovirus E
caagagauggagga

SEQ ID NO: 3933920 - RNA, 12 nt, Human adenovirus E
caagaugagccg

SEQ ID NO: 3933921 - RNA, 20 nt, Human adenovirus E
caagaugagccgcuggaaga

SEQ ID NO: 3933922 - RNA, 13 nt, Human adenovirus E
caagcccagcacc

SEQ ID NO: 3933923 - RNA, 14 nt, Human adenovirus E
caagcccagcacca

SEQ ID NO: 3933924 - RNA, 21 nt, Human adenovirus E
caagcccgugaccuugcagca

SEQ ID NO: 3933925 - RNA, 16 nt, Human adenovirus E
caagcgccgcagcagu

SEQ ID NO: 3933926 - RNA, 20 nt, Human adenovirus E
caagcgccgcagcaguggca

SEQ ID NO: 3933927 - RNA, 17 nt, Human adenovirus E
caagcuccugcagaaga

SEQ ID NO: 3933928 - RNA, 14 nt, Human adenovirus E
caagcugcugcuca

SEQ ID NO: 3933929 - RNA, 17 nt, Human adenovirus E
caagcugcugcucaggg

SEQ ID NO: 3933930 - RNA, 19 nt, Human adenovirus E
caaggagaaggaggagagc

SEQ ID NO: 3933931 - RNA, 12 nt, Human adenovirus E
caaggaggugaa

SEQ ID NO: 3933932 - RNA, 23 nt, Human adenovirus E
caaggccauccgcggcgacgagg

SEQ ID NO: 3933933 - RNA, 18 nt, Human adenovirus E
caaggccauggcgaccag

SEQ ID NO: 3933934 - RNA, 21 nt, Human adenovirus E
caaggccgagcugucggccug

SEQ ID NO: 3933935 - RNA, 22 nt, Human adenovirus E
caaggggggucugaaacucacc

SEQ ID NO: 3933936 - RNA, 22 nt, Human adenovirus E
caaggugcggcccaucaagcag

SEQ ID NO: 3933937 - RNA, 20 nt, Human adenovirus E
caaguacggcgcggccagcc

SEQ ID NO: 3933938 - RNA, 21 nt, Human adenovirus E
caaguccuggcgggggcacaa

SEQ ID NO: 3933939 - RNA, 21 nt, Human adenovirus E
caagucuacuggucgcugccc

SEQ ID NO: 3933940 - RNA, 19 nt, Human adenovirus E
caagucuauguuggcacag

SEQ ID NO: 3933941 - RNA, 14 nt, Human adenovirus E
caaguuccggagca

SEQ ID NO: 3933942 - RNA, 15 nt, Human adenovirus E
caaucaggcagcacc

SEQ ID NO: 3933943 - RNA, 14 nt, Human adenovirus E
caauggcaccugcg

SEQ ID NO: 3933944 - RNA, 14 nt, Human adenovirus E
cacaaaauucucag

SEQ ID NO: 3933945 - RNA, 22 nt, Human adenovirus E
cacaauuacucacaccacacac

SEQ ID NO: 3933946 - RNA, 14 nt, Human adenovirus E
cacacacgcccagc

SEQ ID NO: 3933947 - RNA, 12 nt, Human adenovirus E
cacaccuggcag

SEQ ID NO: 3933948 - RNA, 16 nt, Human adenovirus E
cacacgcccagcacac

SEQ ID NO: 3933949 - RNA, 15 nt, Human adenovirus E
cacagccuugaacau

SEQ ID NO: 3933950 - RNA, 17 nt, Human adenovirus E
cacagcgcccuggucga

SEQ ID NO: 3933951 - RNA, 22 nt, Human adenovirus E
cacagcggcggcagcaggugga

SEQ ID NO: 3933952 - RNA, 19 nt, Human adenovirus E
cacaggcauaugcucaugc

SEQ ID NO: 3933953 - RNA, 15 nt, Human adenovirus E
cacagggccagcacc

SEQ ID NO: 3933954 - RNA, 23 nt, Human adenovirus E
cacaugcuuggucuugcgggguu

SEQ ID NO: 3933955 - RNA, 16 nt, Human adenovirus E
caccaacgccaccguc

SEQ ID NO: 3933956 - RNA, 16 nt, Human adenovirus E
caccaacgccauccug

SEQ ID NO: 3933957 - RNA, 21 nt, Human adenovirus E
caccaacgugcagaccaaccu

SEQ ID NO: 3933958 - RNA, 22 nt, Human adenovirus E
caccaaggccgccgccccucuc

SEQ ID NO: 3933959 - RNA, 15 nt, Human adenovirus E
caccaaucagucccg

SEQ ID NO: 3933960 - RNA, 15 nt, Human adenovirus E
caccacagcaaccuc

SEQ ID NO: 3933961 - RNA, 14 nt, Human adenovirus E
caccacagcgcccu

SEQ ID NO: 3933962 - RNA, 19 nt, Human adenovirus E
caccacagcuaccuccagu

SEQ ID NO: 3933963 - RNA, 21 nt, Human adenovirus E
caccacagcuaccuccagugc

SEQ ID NO: 3933964 - RNA, 12 nt, Human adenovirus E
caccacccagac

SEQ ID NO: 3933965 - RNA, 17 nt, Human adenovirus E
caccaccugcaucugcu

SEQ ID NO: 3933966 - RNA, 20 nt, Human adenovirus E
caccaccugcaucugcugcu

SEQ ID NO: 3933967 - RNA, 19 nt, Human adenovirus E
caccacgcugcgcccccag

SEQ ID NO: 3933968 - RNA, 17 nt, Human adenovirus E
caccagcggguccaccu

SEQ ID NO: 3933969 - RNA, 18 nt, Human adenovirus E
caccauggaggugcagac

SEQ ID NO: 3933970 - RNA, 13 nt, Human adenovirus E
cacccacgugagc

SEQ ID NO: 3933971 - RNA, 12 nt, Human adenovirus E
cacccucgcucu

SEQ ID NO: 3933972 - RNA, 18 nt, Human adenovirus E
caccgcgaguccaaccug

SEQ ID NO: 3933973 - RNA, 20 nt, Human adenovirus E
caccgcgaguccaaccuggg

SEQ ID NO: 3933974 - RNA, 20 nt, Human adenovirus E
caccgguuggggccugcgcg

SEQ ID NO: 3933975 - RNA, 22 nt, Human adenovirus E
caccguaagcagugcucaggug

SEQ ID NO: 3933976 - RNA, 23 nt, Human adenovirus E
caccgugcggugagcgccagcag

SEQ ID NO: 3933977 - RNA, 15 nt, Human adenovirus E
caccucacagcucaa

SEQ ID NO: 3933978 - RNA, 20 nt, Human adenovirus E
caccugaucccgaauaccac

SEQ ID NO: 3933979 - RNA, 18 nt, Human adenovirus E
caccugcgagcccaaccc

SEQ ID NO: 3933980 - RNA, 16 nt, Human adenovirus E
caccuggaccacugcc

SEQ ID NO: 3933981 - RNA, 22 nt, Human adenovirus E
caccuggaccacugccgccgcu

SEQ ID NO: 3933982 - RNA, 15 nt, Human adenovirus E
cacgaagcccugcag

SEQ ID NO: 3933983 - RNA, 16 nt, Human adenovirus E
cacgaagcccugcagg

SEQ ID NO: 3933984 - RNA, 18 nt, Human adenovirus E
cacgagaaccgccugggg

SEQ ID NO: 3933985 - RNA, 16 nt, Human adenovirus E
cacgaggaggagcugg

SEQ ID NO: 3933986 - RNA, 22 nt, Human adenovirus E
cacgcccagcacacgcccagaa

SEQ ID NO: 3933987 - RNA, 21 nt, Human adenovirus E
cacgccccgcaaucaccucaa

SEQ ID NO: 3933988 - RNA, 22 nt, Human adenovirus E
cacgcgcccgcgcuugcugggc

SEQ ID NO: 3933989 - RNA, 17 nt, Human adenovirus E
cacgcggggcgggagcu

SEQ ID NO: 3933990 - RNA, 13 nt, Human adenovirus E
cacgcuccagccg

SEQ ID NO: 3933991 - RNA, 16 nt, Human adenovirus E
cacggacagcggcagc

SEQ ID NO: 3933992 - RNA, 16 nt, Human adenovirus E
cacggcaaccccacgc

SEQ ID NO: 3933993 - RNA, 14 nt, Human adenovirus E
cacgggguugcagc

SEQ ID NO: 3933994 - RNA, 17 nt, Human adenovirus E
cacgguggcuuccagca

SEQ ID NO: 3933995 - RNA, 19 nt, Human adenovirus E
cacgugcgcacccugaucg

SEQ ID NO: 3933996 - RNA, 13 nt, Human adenovirus E
cacucaggcagag

SEQ ID NO: 3933997 - RNA, 18 nt, Human adenovirus E
cacucaggcagaggagga

SEQ ID NO: 3933998 - RNA, 23 nt, Human adenovirus E
cacuccgagacgaaagcccgggu

SEQ ID NO: 3933999 - RNA, 23 nt, Human adenovirus E
cacucucucagaccgugcagcag

SEQ ID NO: 3934000 - RNA, 14 nt, Human adenovirus E
cacuggcagcccag

SEQ ID NO: 3934001 - RNA, 23 nt, Human adenovirus E
cacuuagcauuaccacacagaca

SEQ ID NO: 3934002 - RNA, 19 nt, Human adenovirus E
cacuuccgcgcucccuggg

SEQ ID NO: 3934003 - RNA, 15 nt, Human adenovirus E
cagaaaaugaugcaa

SEQ ID NO: 3934004 - RNA, 22 nt, Human adenovirus E
cagaaccugaaagagcucugca

SEQ ID NO: 3934005 - RNA, 17 nt, Human adenovirus E
cagaacggggugcugga

SEQ ID NO: 3934006 - RNA, 15 nt, Human adenovirus E
cagaacgugcugcac

SEQ ID NO: 3934007 - RNA, 18 nt, Human adenovirus E
cagaagcacacagcucaa

SEQ ID NO: 3934008 - RNA, 17 nt, Human adenovirus E
cagaccagucgccaggg

SEQ ID NO: 3934009 - RNA, 16 nt, Human adenovirus E
cagaccgagcccauga

SEQ ID NO: 3934010 - RNA, 16 nt, Human adenovirus E
cagaccgugcagcaga

SEQ ID NO: 3934011 - RNA, 16 nt, Human adenovirus E
cagaccuaccaggaga

SEQ ID NO: 3934012 - RNA, 19 nt, Human adenovirus E
cagaccucggcgcgagcgg

SEQ ID NO: 3934013 - RNA, 19 nt, Human adenovirus E
cagacggaucccuggaugc

SEQ ID NO: 3934014 - RNA, 20 nt, Human adenovirus E
cagagaaugagcagagucag

SEQ ID NO: 3934015 - RNA, 16 nt, Human adenovirus E
cagagacaggagcggc

SEQ ID NO: 3934016 - RNA, 20 nt, Human adenovirus E
cagagcaucguggugcagga

SEQ ID NO: 3934017 - RNA, 11 nt, Human adenovirus E
cagagccagcc

SEQ ID NO: 3934018 - RNA, 22 nt, Human adenovirus E
cagaggaggacagccugcaaga

SEQ ID NO: 3934019 - RNA, 19 nt, Human adenovirus E
cagaggaggaggagaugga

SEQ ID NO: 3934020 - RNA, 18 nt, Human adenovirus E
cagaggagggacuugagg

SEQ ID NO: 3934021 - RNA, 21 nt, Human adenovirus E
cagaggcgcucuaucucccgc

SEQ ID NO: 3934022 - RNA, 15 nt, Human adenovirus E
cagagguugccagcu

SEQ ID NO: 3934023 - RNA, 22 nt, Human adenovirus E
cagauaaaccgaaguccucccc

SEQ ID NO: 3934024 - RNA, 14 nt, Human adenovirus E
cagauccucaggua

SEQ ID NO: 3934025 - RNA, 16 nt, Human adenovirus E
cagaucguccagggca

SEQ ID NO: 3934026 - RNA, 16 nt, Human adenovirus E
cagaugaaaagggacg

SEQ ID NO: 3934027 - RNA, 15 nt, Human adenovirus E
cagaugcgcccccac

SEQ ID NO: 3934028 - RNA, 15 nt, Human adenovirus E
cagcaaagccuccac

SEQ ID NO: 3934029 - RNA, 14 nt, Human adenovirus E
cagcaaccugcugg

SEQ ID NO: 3934030 - RNA, 15 nt, Human adenovirus E
cagcaaccugcuggg

SEQ ID NO: 3934031 - RNA, 20 nt, Human adenovirus E
cagcaacuuccagccacgac

SEQ ID NO: 3934032 - RNA, 23 nt, Human adenovirus E
cagcaaggcguggaacagcacca

SEQ ID NO: 3934033 - RNA, 14 nt, Human adenovirus E
cagcacacaacagg

SEQ ID NO: 3934034 - RNA, 18 nt, Human adenovirus E
cagcaccaggcaggccac

SEQ ID NO: 3934035 - RNA, 12 nt, Human adenovirus E
cagcacccagac

SEQ ID NO: 3934036 - RNA, 14 nt, Human adenovirus E
cagcacccagcccg

SEQ ID NO: 3934037 - RNA, 17 nt, Human adenovirus E
cagcaccgaggaggagc

SEQ ID NO: 3934038 - RNA, 15 nt, Human adenovirus E
cagcacucaggcaga

SEQ ID NO: 3934039 - RNA, 23 nt, Human adenovirus E
cagcagagucgggggcaggagca

SEQ ID NO: 3934040 - RNA, 21 nt, Human adenovirus E
cagcagcacacaacaggcgca

SEQ ID NO: 3934041 - RNA, 22 nt, Human adenovirus E
cagcagcacacaacaggcgcaa

SEQ ID NO: 3934042 - RNA, 16 nt, Human adenovirus E
cagcagccccaggcca

SEQ ID NO: 3934043 - RNA, 16 nt, Human adenovirus E
cagcagcgagcugggc

SEQ ID NO: 3934044 - RNA, 14 nt, Human adenovirus E
cagcagucaggcag

SEQ ID NO: 3934045 - RNA, 17 nt, Human adenovirus E
cagcagucaggcagagg

SEQ ID NO: 3934046 - RNA, 18 nt, Human adenovirus E
cagcagucaggcagagga

SEQ ID NO: 3934047 - RNA, 20 nt, Human adenovirus E
cagcagucgcugccgccgcc

SEQ ID NO: 3934048 - RNA, 17 nt, Human adenovirus E
cagcagugucuggagga

SEQ ID NO: 3934049 - RNA, 21 nt, Human adenovirus E
cagcagugucuggaggagcag

SEQ ID NO: 3934050 - RNA, 22 nt, Human adenovirus E
cagcaucaucugggccuggucg

SEQ ID NO: 3934051 - RNA, 20 nt, Human adenovirus E
cagccaacugaacgggggcg

SEQ ID NO: 3934052 - RNA, 21 nt, Human adenovirus E
cagccacagcgcgcacccggu

SEQ ID NO: 3934053 - RNA, 14 nt, Human adenovirus E
cagccagagcagga

SEQ ID NO: 3934054 - RNA, 16 nt, Human adenovirus E
cagcccaauggcaccu

SEQ ID NO: 3934055 - RNA, 19 nt, Human adenovirus E
cagcccccuccacagccgg

SEQ ID NO: 3934056 - RNA, 14 nt, Human adenovirus E
cagccccgccaccu

SEQ ID NO: 3934057 - RNA, 22 nt, Human adenovirus E
cagcccgauggcaaucggugcg

SEQ ID NO: 3934058 - RNA, 15 nt, Human adenovirus E
cagcccgccaacgug

SEQ ID NO: 3934059 - RNA, 12 nt, Human adenovirus E
cagccgccgcca

SEQ ID NO: 3934060 - RNA, 15 nt, Human adenovirus E
cagccggagccgcuu

SEQ ID NO: 3934061 - RNA, 22 nt, Human adenovirus E
cagcgaucccauuugagcugga

SEQ ID NO: 3934062 - RNA, 21 nt, Human adenovirus E
cagcgcacucucgaggacgcc

SEQ ID NO: 3934063 - RNA, 15 nt, Human adenovirus E
cagcgcagccagggu

SEQ ID NO: 3934064 - RNA, 14 nt, Human adenovirus E
cagcgcccuggucg

SEQ ID NO: 3934065 - RNA, 21 nt, Human adenovirus E
cagcgcccuggucgaguugga

SEQ ID NO: 3934066 - RNA, 21 nt, Human adenovirus E
cagcgccggcaggacccggag

SEQ ID NO: 3934067 - RNA, 12 nt, Human adenovirus E
cagcgcgagcgg

SEQ ID NO: 3934068 - RNA, 17 nt, Human adenovirus E
agaacggggugcuggag

SEQ ID NO: 3934069 - RNA, 20 nt, Human adenovirus E
agaaggccgaucccugcuug

SEQ ID NO: 3934070 - RNA, 17 nt, Human adenovirus E
agaccgugaaccugagc

SEQ ID NO: 3934071 - RNA, 16 nt, Human adenovirus E
agaccgugcagcagau

SEQ ID NO: 3934072 - RNA, 18 nt, Human adenovirus E
agacgccgcaccugcccc

SEQ ID NO: 3934073 - RNA, 21 nt, Human adenovirus E
agacgcgcggccacggcggcg

SEQ ID NO: 3934074 - RNA, 18 nt, Human adenovirus E
agacguaugcgcaggagc

SEQ ID NO: 3934075 - RNA, 23 nt, Human adenovirus E
agacugauggccacgggcagccc

SEQ ID NO: 3934076 - RNA, 13 nt, Human adenovirus E
agagacaggagcg

SEQ ID NO: 3934077 - RNA, 13 nt, Human adenovirus E
agagcgacaucgg

SEQ ID NO: 3934078 - RNA, 16 nt, Human adenovirus E
agagcgcccuccaccg

SEQ ID NO: 3934079 - RNA, 20 nt, Human adenovirus E
agagcgugaugcagcaggcg

SEQ ID NO: 3934080 - RNA, 18 nt, Human adenovirus E
agagggcgaggggcuggc

SEQ ID NO: 3934081 - RNA, 15 nt, Human adenovirus E
agagguucccaagau

SEQ ID NO: 3934082 - RNA, 22 nt, Human adenovirus E
agaucuucgagggucugggcag

SEQ ID NO: 3934083 - RNA, 16 nt, Human adenovirus E
agaugccgggcaggag

SEQ ID NO: 3934084 - RNA, 14 nt, Human adenovirus E
agauggagccauag

SEQ ID NO: 3934085 - RNA, 17 nt, Human adenovirus E
agauggauuccaagaga

SEQ ID NO: 3934086 - RNA, 15 nt, Human adenovirus E
agauggcaccucucg

SEQ ID NO: 3934087 - RNA, 14 nt, Human adenovirus E
agauguugaagugg

SEQ ID NO: 3934088 - RNA, 15 nt, Human adenovirus E
agcaagcagcacgga

SEQ ID NO: 3934089 - RNA, 14 nt, Human adenovirus E
agcaagcuccagcu

SEQ ID NO: 3934090 - RNA, 24 nt, Human adenovirus E
agcacaggcauaugcucaugcauc

SEQ ID NO: 3934091 - RNA, 17 nt, Human adenovirus E
agcaccaggcaggccac

SEQ ID NO: 3934092 - RNA, 18 nt, Human adenovirus E
agcacccucagggcccgg

SEQ ID NO: 3934093 - RNA, 14 nt, Human adenovirus E
agcaccgaggagga

SEQ ID NO: 3934094 - RNA, 17 nt, Human adenovirus E
agcaccgggugauccuc

SEQ ID NO: 3934095 - RNA, 19 nt, Human adenovirus E
  misc_feature (9)..(9): n is a, c, g, or u
agcacgaangaggccacgu

SEQ ID NO: 3934096 - RNA, 13 nt, Human adenovirus E
agcacucaggcag

SEQ ID NO: 3934097 - RNA, 19 nt, Human adenovirus E
agcagaaaaagaccagcag

SEQ ID NO: 3934098 - RNA, 17 nt, Human adenovirus E
agcagaaaaccagcagc

SEQ ID NO: 3934099 - RNA, 18 nt, Human adenovirus E
agcagaagcgugggccug

SEQ ID NO: 3934100 - RNA, 19 nt, Human adenovirus E
agcagagguugccagcucg

SEQ ID NO: 3934101 - RNA, 19 nt, Human adenovirus E
agcagaucuagggccucag

SEQ ID NO: 3934102 - RNA, 23 nt, Human adenovirus E
agcagcaacuuccagccacgacc

SEQ ID NO: 3934103 - RNA, 22 nt, Human adenovirus E
agcagcacggauaccaucuccg

SEQ ID NO: 3934104 - RNA, 11 nt, Human adenovirus E
agcagccgccg

SEQ ID NO: 3934105 - RNA, 14 nt, Human adenovirus E
agcagccgccgcca

SEQ ID NO: 3934106 - RNA, 13 nt, Human adenovirus E
agcagccgcggcc

SEQ ID NO: 3934107 - RNA, 14 nt, Human adenovirus E
agcagcuggcccgg

SEQ ID NO: 3934108 - RNA, 15 nt, Human adenovirus E
agcagcuggcccggu

SEQ ID NO: 3934109 - RNA, 14 nt, Human adenovirus E
agcaggggcgcagg

SEQ ID NO: 3934110 - RNA, 17 nt, Human adenovirus E
agcaggucgggcgcgga

SEQ ID NO: 3934111 - RNA, 20 nt, Human adenovirus E
agcagucaggcagaggagga

SEQ ID NO: 3934112 - RNA, 18 nt, Human adenovirus E
agcagugucuggaggagc

SEQ ID NO: 3934113 - RNA, 19 nt, Human adenovirus E
agcaucaucugggccuggu

SEQ ID NO: 3934114 - RNA, 14 nt, Human adenovirus E
agccacaguacaga

SEQ ID NO: 3934115 - RNA, 14 nt, Human adenovirus E
agccacucucucag

SEQ ID NO: 3934116 - RNA, 15 nt, Human adenovirus E
agccagaugaugcaa

SEQ ID NO: 3934117 - RNA, 18 nt, Human adenovirus E
agccagccaugauaaaga

SEQ ID NO: 3934118 - RNA, 18 nt, Human adenovirus E
agcccacggccgccagcu

SEQ ID NO: 3934119 - RNA, 19 nt, Human adenovirus E
agcccacggccgccagcuc

SEQ ID NO: 3934120 - RNA, 20 nt, Human adenovirus E
agcccccgcuggaggcuccu

SEQ ID NO: 3934121 - RNA, 17 nt, Human adenovirus E
agcccgagggccgcugg

SEQ ID NO: 3934122 - RNA, 19 nt, Human adenovirus E
agcccgccaacgugccccg

SEQ ID NO: 3934123 - RNA, 22 nt, Human adenovirus E
agcccgugcugcucgagcgccc

SEQ ID NO: 3934124 - RNA, 18 nt, Human adenovirus E
agccgccgggccuuggag

SEQ ID NO: 3934125 - RNA, 20 nt, Human adenovirus E
agccgcgcccugggccagga

SEQ ID NO: 3934126 - RNA, 18 nt, Human adenovirus E
agccuccacgcgcacauc

SEQ ID NO: 3934127 - RNA, 18 nt, Human adenovirus E
agccuggcgaacaggugg

SEQ ID NO: 3934128 - RNA, 19 nt, Human adenovirus E
agccuuguugcgcagggcc

SEQ ID NO: 3934129 - RNA, 14 nt, Human adenovirus E
agccuuuagacagc

SEQ ID NO: 3934130 - RNA, 16 nt, Human adenovirus E
agcgcaugcggaucuc

SEQ ID NO: 3934131 - RNA, 16 nt, Human adenovirus E
agcgccacugagacac

SEQ ID NO: 3934132 - RNA, 16 nt, Human adenovirus E
agcgccgcgcucgaca

SEQ ID NO: 3934133 - RNA, 19 nt, Human adenovirus E
agcgcgcgucgcccaucuc

SEQ ID NO: 3934134 - RNA, 23 nt, Human adenovirus E
agcgcuagcagccgcggccaggg

SEQ ID NO: 3934135 - RNA, 14 nt, Human adenovirus E
agcgcucaccgcca

SEQ ID NO: 3934136 - RNA, 15 nt, Human adenovirus E
agcgcucgcgguggg

SEQ ID NO: 3934137 - RNA, 21 nt, Human adenovirus E
agcggcacccgcgcgugcaga

SEQ ID NO: 3934138 - RNA, 17 nt, Human adenovirus E
agcggcgagggccugcu

SEQ ID NO: 3934139 - RNA, 14 nt, Human adenovirus E
agcggcggcggaga

SEQ ID NO: 3934140 - RNA, 21 nt, Human adenovirus E
agcggcucgacuccguggccu

SEQ ID NO: 3934141 - RNA, 22 nt, Human adenovirus E
agcggcucgacuccguggccug

SEQ ID NO: 3934142 - RNA, 12 nt, Human adenovirus E
agcggggcugga

SEQ ID NO: 3934143 - RNA, 21 nt, Human adenovirus E
agcgguguccggggcugcuag

SEQ ID NO: 3934144 - RNA, 15 nt, Human adenovirus E
agcucaaccccggcu

SEQ ID NO: 3934145 - RNA, 15 nt, Human adenovirus E
agcucagccgcgccu

SEQ ID NO: 3934146 - RNA, 17 nt, Human adenovirus E
agcucugcaagcuccug

SEQ ID NO: 3934147 - RNA, 19 nt, Human adenovirus E
agcucuucgcugggucugc

SEQ ID NO: 3934148 - RNA, 18 nt, Human adenovirus E
agcugaccuagcucggcu

SEQ ID NO: 3934149 - RNA, 18 nt, Human adenovirus E
agcugauggugcccaagc

SEQ ID NO: 3934150 - RNA, 20 nt, Human adenovirus E
agcugccgcccguggaggau

SEQ ID NO: 3934151 - RNA, 16 nt, Human adenovirus E
agcugcugcucagggg

SEQ ID NO: 3934152 - RNA, 15 nt, Human adenovirus E
agcuggagggcgaga

SEQ ID NO: 3934153 - RNA, 13 nt, Human adenovirus E
agcuggagugccu

SEQ ID NO: 3934154 - RNA, 14 nt, Human adenovirus E
agcuggccuuggaa

SEQ ID NO: 3934155 - RNA, 22 nt, Human adenovirus E
agcuugccauucgcgcacggcc

SEQ ID NO: 3934156 - RNA, 12 nt, Human adenovirus E
agcuugguggcg

SEQ ID NO: 3934157 - RNA, 14 nt, Human adenovirus E
aggaagagaugcuc

SEQ ID NO: 3934158 - RNA, 17 nt, Human adenovirus E
aggacccggagacgcgc

SEQ ID NO: 3934159 - RNA, 17 nt, Human adenovirus E
aggacgucagcggcgag

SEQ ID NO: 3934160 - RNA, 21 nt, Human adenovirus E
aggacgucagcggcgagggcc

SEQ ID NO: 3934161 - RNA, 14 nt, Human adenovirus E
aggagaaccugcac

SEQ ID NO: 3934162 - RNA, 16 nt, Human adenovirus E
aggagaugcgcgcggc

SEQ ID NO: 3934163 - RNA, 14 nt, Human adenovirus E
aggagauggaggaa

SEQ ID NO: 3934164 - RNA, 17 nt, Human adenovirus E
aggagcacccucagggc

SEQ ID NO: 3934165 - RNA, 16 nt, Human adenovirus E
aggagcagaaccugaa

SEQ ID NO: 3934166 - RNA, 22 nt, Human adenovirus E
  misc_feature (11)..(11): n is a, c, g, or u
aggagccguanagggcguugga

SEQ ID NO: 3934167 - RNA, 17 nt, Human adenovirus E
aggagcucaaccccggc

SEQ ID NO: 3934168 - RNA, 14 nt, Human adenovirus E
aggagcuggcagug

SEQ ID NO: 3934169 - RNA, 23 nt, Human adenovirus E
aggaggagauggaggaagacugg

SEQ ID NO: 3934170 - RNA, 14 nt, Human adenovirus E
aggaugagcugaag

SEQ ID NO: 3934171 - RNA, 18 nt, Human adenovirus E
aggaugcagcagcugaag

SEQ ID NO: 3934172 - RNA, 22 nt, Human adenovirus E
aggcacacgcacuaccaccacu

SEQ ID NO: 3934173 - RNA, 23 nt, Human adenovirus E
aggcacuacaaugcucagucuca

SEQ ID NO: 3934174 - RNA, 17 nt, Human adenovirus E
aggccaucggccaggcg

SEQ ID NO: 3934175 - RNA, 22 nt, Human adenovirus E
aggccaucgugcagaaccccac

SEQ ID NO: 3934176 - RNA, 12 nt, Human adenovirus E
aggcccuggcca

SEQ ID NO: 3934177 - RNA, 19 nt, Human adenovirus E
aggccgaaguccagcugac

SEQ ID NO: 3934178 - RNA, 14 nt, Human adenovirus E
aggccgagccacag

SEQ ID NO: 3934179 - RNA, 10 nt, Human adenovirus E
aggccgccgc

SEQ ID NO: 3934180 - RNA, 19 nt, Human adenovirus E
aggccgccgccccucucag

SEQ ID NO: 3934181 - RNA, 20 nt, Human adenovirus E
aggcgaggguucagccgcca

SEQ ID NO: 3934182 - RNA, 21 nt, Human adenovirus E
aggcgcucgccaacgcuccac

SEQ ID NO: 3934183 - RNA, 21 nt, Human adenovirus E
aggcguccgcccuugcgcgag

SEQ ID NO: 3934184 - RNA, 14 nt, Human adenovirus E
aggcguggaacagc

SEQ ID NO: 3934185 - RNA, 15 nt, Human adenovirus E
caaguuccggagcag

SEQ ID NO: 3934186 - RNA, 16 nt, Human adenovirus E
caaguuucuccaccau

SEQ ID NO: 3934187 - RNA, 13 nt, Human adenovirus E
caauaacaaaaaa

SEQ ID NO: 3934188 - RNA, 20 nt, Human adenovirus E
caaucccauccgcccaaggc

SEQ ID NO: 3934189 - RNA, 22 nt, Human adenovirus E
caaugccaccucagcucaaaau

SEQ ID NO: 3934190 - RNA, 22 nt, Human adenovirus E
caaugguacugaugacagcaac

SEQ ID NO: 3934191 - RNA, 17 nt, Human adenovirus E
cacaauuacucacacca

SEQ ID NO: 3934192 - RNA, 14 nt, Human adenovirus E
cacaccaccacagc

SEQ ID NO: 3934193 - RNA, 18 nt, Human adenovirus E
cacacgcacuaccaccac

SEQ ID NO: 3934194 - RNA, 12 nt, Human adenovirus E
cacacugguggc

SEQ ID NO: 3934195 - RNA, 13 nt, Human adenovirus E
cacagacugaacg

SEQ ID NO: 3934196 - RNA, 19 nt, Human adenovirus E
cacagaucaaaccgcagca

SEQ ID NO: 3934197 - RNA, 20 nt, Human adenovirus E
cacagaucugcaucucccag

SEQ ID NO: 3934198 - RNA, 24 nt, Human adenovirus E
cacagcaaccucaggcacacgcac

SEQ ID NO: 3934199 - RNA, 12 nt, Human adenovirus E
cacagcacaggc

SEQ ID NO: 3934200 - RNA, 14 nt, Human adenovirus E
cacagcacaggcau

SEQ ID NO: 3934201 - RNA, 15 nt, Human adenovirus E
cacaucguaggugag

SEQ ID NO: 3934202 - RNA, 15 nt, Human adenovirus E
caccaacgccauccu

SEQ ID NO: 3934203 - RNA, 17 nt, Human adenovirus E
caccaacgugcagacca

SEQ ID NO: 3934204 - RNA, 22 nt, Human adenovirus E
caccaacuucaucagcgcccug

SEQ ID NO: 3934205 - RNA, 18 nt, Human adenovirus E
caccaagaacagccagag

SEQ ID NO: 3934206 - RNA, 19 nt, Human adenovirus E
caccaagaacagccagagc

SEQ ID NO: 3934207 - RNA, 20 nt, Human adenovirus E
caccaaggccgccgccccuc

SEQ ID NO: 3934208 - RNA, 21 nt, Human adenovirus E
caccacgcugcgcccccagcg

SEQ ID NO: 3934209 - RNA, 13 nt, Human adenovirus E
caccacuacagca

SEQ ID NO: 3934210 - RNA, 16 nt, Human adenovirus E
caccacuacagcagca

SEQ ID NO: 3934211 - RNA, 19 nt, Human adenovirus E
caccagcaagccgcugacg

SEQ ID NO: 3934212 - RNA, 14 nt, Human adenovirus E
caccaggcaggcca

SEQ ID NO: 3934213 - RNA, 12 nt, Human adenovirus E
caccaucaucuu

SEQ ID NO: 3934214 - RNA, 14 nt, Human adenovirus E
cacccaucaucaug

SEQ ID NO: 3934215 - RNA, 18 nt, Human adenovirus E
cacccccacggaggccag

SEQ ID NO: 3934216 - RNA, 12 nt, Human adenovirus E
cacccgccccgc

SEQ ID NO: 3934217 - RNA, 17 nt, Human adenovirus E
cacccgugcagccacag

SEQ ID NO: 3934218 - RNA, 23 nt, Human adenovirus E
cacccucugguugaacaugcagc

SEQ ID NO: 3934219 - RNA, 19 nt, Human adenovirus E
cacccugcaugccaacccu

SEQ ID NO: 3934220 - RNA, 15 nt, Human adenovirus E
caccgagagccgccu

SEQ ID NO: 3934221 - RNA, 23 nt, Human adenovirus E
caccgcuaucgugugccugagca

SEQ ID NO: 3934222 - RNA, 22 nt, Human adenovirus E
caccggcauucuuaagcacacc

SEQ ID NO: 3934223 - RNA, 21 nt, Human adenovirus E
caccguggaaugggccagacc

SEQ ID NO: 3934224 - RNA, 16 nt, Human adenovirus E
caccuccacagccccu

SEQ ID NO: 3934225 - RNA, 14 nt, Human adenovirus E
caccucgcccugcu

SEQ ID NO: 3934226 - RNA, 18 nt, Human adenovirus E
caccucgcuuacgcacgu

SEQ ID NO: 3934227 - RNA, 21 nt, Human adenovirus E
caccugauccaucaccaaacu

SEQ ID NO: 3934228 - RNA, 17 nt, Human adenovirus E
caccugcaucugcugcu

SEQ ID NO: 3934229 - RNA, 19 nt, Human adenovirus E
caccugcuccgcgcugccc

SEQ ID NO: 3934230 - RNA, 22 nt, Human adenovirus E
caccuggacaaaauaccaccuc

SEQ ID NO: 3934231 - RNA, 16 nt, Human adenovirus E
cacgaccgccgcggcc

SEQ ID NO: 3934232 - RNA, 22 nt, Human adenovirus E
cacgagaaccgccuggggcaga

SEQ ID NO: 3934233 - RNA, 17 nt, Human adenovirus E
cacgaggaggagcuggc

SEQ ID NO: 3934234 - RNA, 13 nt, Human adenovirus E
cacgcccagcaca

SEQ ID NO: 3934235 - RNA, 14 nt, Human adenovirus E
cacgccgcaccgcu

SEQ ID NO: 3934236 - RNA, 23 nt, Human adenovirus E
cacgccuagaaugaccacaacca

SEQ ID NO: 3934237 - RNA, 14 nt, Human adenovirus E
cacgcucgccagca

SEQ ID NO: 3934238 - RNA, 19 nt, Human adenovirus E
cacggauaccaucuccgcu

SEQ ID NO: 3934239 - RNA, 14 nt, Human adenovirus E
cacggcccucagca

SEQ ID NO: 3934240 - RNA, 23 nt, Human adenovirus E
cacgguggcuuccagcaaagccu

SEQ ID NO: 3934241 - RNA, 20 nt, Human adenovirus E
cacuaccaccacuacagccu

SEQ ID NO: 3934242 - RNA, 15 nt, Human adenovirus E
cacucaacccacccc

SEQ ID NO: 3934243 - RNA, 19 nt, Human adenovirus E
cacuccccucuucccagcu

SEQ ID NO: 3934244 - RNA, 17 nt, Human adenovirus E
cacugcuaccugcugcg

SEQ ID NO: 3934245 - RNA, 17 nt, Human adenovirus E
cacuggcucccgccgcc

SEQ ID NO: 3934246 - RNA, 17 nt, Human adenovirus E
cacuguaucccacccug

SEQ ID NO: 3934247 - RNA, 21 nt, Human adenovirus E
cacuuagcauuaccacacaga

SEQ ID NO: 3934248 - RNA, 17 nt, Human adenovirus E
cacuucacuccccucuu

SEQ ID NO: 3934249 - RNA, 17 nt, Human adenovirus E
cagaaaaagccacagaa

SEQ ID NO: 3934250 - RNA, 12 nt, Human adenovirus E
cagaacagggca

SEQ ID NO: 3934251 - RNA, 17 nt, Human adenovirus E
cagaaccccaccagcaa

SEQ ID NO: 3934252 - RNA, 18 nt, Human adenovirus E
cagaaccugaaagagcuc

SEQ ID NO: 3934253 - RNA, 21 nt, Human adenovirus E
cagaaccuguucagagacagg

SEQ ID NO: 3934254 - RNA, 15 nt, Human adenovirus E
cagaacgaccacagc

SEQ ID NO: 3934255 - RNA, 19 nt, Human adenovirus E
cagaacgugcugcacacca

SEQ ID NO: 3934256 - RNA, 14 nt, Human adenovirus E
cagaacuuccagca

SEQ ID NO: 3934257 - RNA, 21 nt, Human adenovirus E
cagaagagcggcggugggaau

SEQ ID NO: 3934258 - RNA, 18 nt, Human adenovirus E
cagaagcaagcuccagcu

SEQ ID NO: 3934259 - RNA, 17 nt, Human adenovirus E
cagaaggggggcagggg

SEQ ID NO: 3934260 - RNA, 23 nt, Human adenovirus E
  misc_feature (7)..(7): n is a, c, g, or u
cagaagnuggaagacgugcugga

SEQ ID NO: 3934261 - RNA, 20 nt, Human adenovirus E
cagaccgugaaggaggagag

SEQ ID NO: 3934262 - RNA, 22 nt, Human adenovirus E
cagacgcgcggcuucaggcgcc

SEQ ID NO: 3934263 - RNA, 20 nt, Human adenovirus E
cagacggcggcaugcaaugg

SEQ ID NO: 3934264 - RNA, 12 nt, Human adenovirus E
cagacggucccg

SEQ ID NO: 3934265 - RNA, 14 nt, Human adenovirus E
cagagacaggagcg

SEQ ID NO: 3934266 - RNA, 15 nt, Human adenovirus E
cagagacaggagcgg

SEQ ID NO: 3934267 - RNA, 20 nt, Human adenovirus E
cagagauccacggccagggc

SEQ ID NO: 3934268 - RNA, 15 nt, Human adenovirus E
cagagcaggaagcag

SEQ ID NO: 3934269 - RNA, 16 nt, Human adenovirus E
cagagcaucguggugc

SEQ ID NO: 3934270 - RNA, 15 nt, Human adenovirus E
cagagccccuuccgc

SEQ ID NO: 3934271 - RNA, 16 nt, Human adenovirus E
cagagcucggugaugu

SEQ ID NO: 3934272 - RNA, 11 nt, Human adenovirus E
cagagcuggaa

SEQ ID NO: 3934273 - RNA, 15 nt, Human adenovirus E
cagaggaggacagcc

SEQ ID NO: 3934274 - RNA, 21 nt, Human adenovirus E
cagagguugccagcucgucug

SEQ ID NO: 3934275 - RNA, 22 nt, Human adenovirus E
cagagucgggggcaggagcagg

SEQ ID NO: 3934276 - RNA, 16 nt, Human adenovirus E
cagaugcggcgguaca

SEQ ID NO: 3934277 - RNA, 16 nt, Human adenovirus E
cagaugggccuggccg

SEQ ID NO: 3934278 - RNA, 17 nt, Human adenovirus E
cagaugggccuggccgc

SEQ ID NO: 3934279 - RNA, 20 nt, Human adenovirus E
cagaugugggacgaugagga

SEQ ID NO: 3934280 - RNA, 22 nt, Human adenovirus E
cagcaacuuccugaccaccgug

SEQ ID NO: 3934281 - RNA, 15 nt, Human adenovirus E
cagcaaggcguggaa

SEQ ID NO: 3934282 - RNA, 11 nt, Human adenovirus E
cagcacaggca

SEQ ID NO: 3934283 - RNA, 19 nt, Human adenovirus E
cagcaccauggaggugcag

SEQ ID NO: 3934284 - RNA, 14 nt, Human adenovirus E
cagcaccgccccgc

SEQ ID NO: 3934285 - RNA, 20 nt, Human adenovirus E
cagcaccgccccgcccgcca

SEQ ID NO: 3934286 - RNA, 14 nt, Human adenovirus E
cagcacucaggcag

SEQ ID NO: 3934287 - RNA, 18 nt, Human adenovirus E
cagcacucaggcagagga

SEQ ID NO: 3934288 - RNA, 19 nt, Human adenovirus E
cagcacucucaacuccucg

SEQ ID NO: 3934289 - RNA, 18 nt, Human adenovirus E
cagcagaaaaccagcagc

SEQ ID NO: 3934290 - RNA, 20 nt, Human adenovirus E
cagcagaaaaccagcagcua

SEQ ID NO: 3934291 - RNA, 19 nt, Human adenovirus E
cagcagagucgggggcagg

SEQ ID NO: 3934292 - RNA, 22 nt, Human adenovirus E
cagcagcugaagcaacugcagc

SEQ ID NO: 3934293 - RNA, 15 nt, Human adenovirus E
cagcaguggcagcgg

SEQ ID NO: 3934294 - RNA, 22 nt, Human adenovirus E
cagcagugucuggaggagcaga

SEQ ID NO: 3934295 - RNA, 17 nt, Human adenovirus E
cagcaguuugggcagcg

SEQ ID NO: 3934296 - RNA, 21 nt, Human adenovirus E
cagcaugucccgcccgcggcg

SEQ ID NO: 3934297 - RNA, 14 nt, Human adenovirus E
cagccaccuccuga

SEQ ID NO: 3934298 - RNA, 17 nt, Human adenovirus E
cagccagagcaggaagc

SEQ ID NO: 3934299 - RNA, 17 nt, Human adenovirus E
cagccaucgccaaccuc

SEQ ID NO: 3934300 - RNA, 13 nt, Human adenovirus E
cagccccggauga

SEQ ID NO: 3934301 - RNA, 19 nt, Human adenovirus E
ccacagcuaccuccagugc

SEQ ID NO: 3934302 - RNA, 12 nt, Human adenovirus E
ccacaguacaga

SEQ ID NO: 3934303 - RNA, 16 nt, Human adenovirus E
ccacaucacccucugg

SEQ ID NO: 3934304 - RNA, 23 nt, Human adenovirus E
ccaccacagcaaccucaggcaca

SEQ ID NO: 3934305 - RNA, 18 nt, Human adenovirus E
ccaccacccccaguaccg

SEQ ID NO: 3934306 - RNA, 15 nt, Human adenovirus E
ccaccaugcagcuga

SEQ ID NO: 3934307 - RNA, 23 nt, Human adenovirus E
ccacccgcagaagcaagcuccag

SEQ ID NO: 3934308 - RNA, 13 nt, Human adenovirus E
ccacccucccagg

SEQ ID NO: 3934309 - RNA, 16 nt, Human adenovirus E
ccaccuaccacaucuu

SEQ ID NO: 3934310 - RNA, 12 nt, Human adenovirus E
ccaccuccugau

SEQ ID NO: 3934311 - RNA, 12 nt, Human adenovirus E
ccaccugcaucu

SEQ ID NO: 3934312 - RNA, 22 nt, Human adenovirus E
ccacgagcgccagcuguugggg

SEQ ID NO: 3934313 - RNA, 22 nt, Human adenovirus E
ccacgcggggcgggagcugcgg

SEQ ID NO: 3934314 - RNA, 12 nt, Human adenovirus E
ccacggagccca

SEQ ID NO: 3934315 - RNA, 16 nt, Human adenovirus E
ccacggcccucagcau

SEQ ID NO: 3934316 - RNA, 17 nt, Human adenovirus E
ccacggcccucagcauc

SEQ ID NO: 3934317 - RNA, 14 nt, Human adenovirus E
ccacggcggcggca

SEQ ID NO: 3934318 - RNA, 18 nt, Human adenovirus E
ccacgguggcuuccagca

SEQ ID NO: 3934319 - RNA, 19 nt, Human adenovirus E
ccacgugagccgcgcccug

SEQ ID NO: 3934320 - RNA, 20 nt, Human adenovirus E
ccacgugcgcacccugaucg

SEQ ID NO: 3934321 - RNA, 15 nt, Human adenovirus E
ccacuaugcagcuca

SEQ ID NO: 3934322 - RNA, 16 nt, Human adenovirus E
ccacuaugcagcucac

SEQ ID NO: 3934323 - RNA, 22 nt, Human adenovirus E
ccacugccgcugcaaccucugc

SEQ ID NO: 3934324 - RNA, 19 nt, Human adenovirus E
ccacugucgagagccacac

SEQ ID NO: 3934325 - RNA, 14 nt, Human adenovirus E
ccagacgccgcacc

SEQ ID NO: 3934326 - RNA, 14 nt, Human adenovirus E
ccagacgcgcggcu

SEQ ID NO: 3934327 - RNA, 18 nt, Human adenovirus E
ccagacgcgcggcuucag

SEQ ID NO: 3934328 - RNA, 21 nt, Human adenovirus E
ccagaucauguacgaggaucu

SEQ ID NO: 3934329 - RNA, 16 nt, Human adenovirus E
ccagcaccagcaccau

SEQ ID NO: 3934330 - RNA, 18 nt, Human adenovirus E
ccagcagcaacuuccagc

SEQ ID NO: 3934331 - RNA, 23 nt, Human adenovirus E
ccagcaggcggcgcgagcugagc

SEQ ID NO: 3934332 - RNA, 18 nt, Human adenovirus E
ccagcccacgaccguacu

SEQ ID NO: 3934333 - RNA, 17 nt, Human adenovirus E
ccagccgccgggccuug

SEQ ID NO: 3934334 - RNA, 14 nt, Human adenovirus E
ccagcugcaccacg

SEQ ID NO: 3934335 - RNA, 23 nt, Human adenovirus E
ccaggacauggaauacaccaccc

SEQ ID NO: 3934336 - RNA, 19 nt, Human adenovirus E
ccaggcggucccagagcuc

SEQ ID NO: 3934337 - RNA, 16 nt, Human adenovirus E
ccagggcgcgcgggag

SEQ ID NO: 3934338 - RNA, 21 nt, Human adenovirus E
ccagggggcgauccuggccca

SEQ ID NO: 3934339 - RNA, 21 nt, Human adenovirus E
ccagggucucaaagcuccgcu

SEQ ID NO: 3934340 - RNA, 12 nt, Human adenovirus E
ccaggucucugu

SEQ ID NO: 3934341 - RNA, 16 nt, Human adenovirus E
ccaguaauaacaccgg

SEQ ID NO: 3934342 - RNA, 22 nt, Human adenovirus E
ccaguaauaacaccgguugggg

SEQ ID NO: 3934343 - RNA, 18 nt, Human adenovirus E
ccauacuccaccuccacc

SEQ ID NO: 3934344 - RNA, 16 nt, Human adenovirus E
ccauagccagccgacu

SEQ ID NO: 3934345 - RNA, 22 nt, Human adenovirus E
ccauagcuuaccgagcagcagc

SEQ ID NO: 3934346 - RNA, 16 nt, Human adenovirus E
ccauaggaccaccagg

SEQ ID NO: 3934347 - RNA, 15 nt, Human adenovirus E
ccaucauccccacgc

SEQ ID NO: 3934348 - RNA, 22 nt, Human adenovirus E
ccaucccgaagggggucaucuu

SEQ ID NO: 3934349 - RNA, 22 nt, Human adenovirus E
ccauccuggaggccguggugcc

SEQ ID NO: 3934350 - RNA, 13 nt, Human adenovirus E
ccaucggccaggc

SEQ ID NO: 3934351 - RNA, 22 nt, Human adenovirus E
ccaucgugaacgcgcuggugga

SEQ ID NO: 3934352 - RNA, 11 nt, Human adenovirus E
ccaugaacucu

SEQ ID NO: 3934353 - RNA, 22 nt, Human adenovirus E
ccaugcgcgcggcgcggagccu

SEQ ID NO: 3934354 - RNA, 19 nt, Human adenovirus E
ccauggaaacgcagaccga

SEQ ID NO: 3934355 - RNA, 22 nt, Human adenovirus E
ccauuuaaacuuucgccagcuu

SEQ ID NO: 3934356 - RNA, 19 nt, Human adenovirus E
cccaacaaaugccagcuga

SEQ ID NO: 3934357 - RNA, 21 nt, Human adenovirus E
cccaauggggugacagugaca

SEQ ID NO: 3934358 - RNA, 17 nt, Human adenovirus E
cccaccccacccaguga

SEQ ID NO: 3934359 - RNA, 17 nt, Human adenovirus E
cccacggccgccagcuc

SEQ ID NO: 3934360 - RNA, 13 nt, Human adenovirus E
cccacuccccuga

SEQ ID NO: 3934361 - RNA, 12 nt, Human adenovirus E
cccagagcugga

SEQ ID NO: 3934362 - RNA, 21 nt, Human adenovirus E
cccagaucaucggcaccuucg

SEQ ID NO: 3934363 - RNA, 12 nt, Human adenovirus E
cccagcaccagc

SEQ ID NO: 3934364 - RNA, 19 nt, Human adenovirus E
cccagccccgccaccuccg

SEQ ID NO: 3934365 - RNA, 19 nt, Human adenovirus E
cccagcgaaggcgaggguu

SEQ ID NO: 3934366 - RNA, 14 nt, Human adenovirus E
cccagcgccgcgcu

SEQ ID NO: 3934367 - RNA, 11 nt, Human adenovirus E
cccaggccaug

SEQ ID NO: 3934368 - RNA, 17 nt, Human adenovirus E
cccagggauaggagcuc

SEQ ID NO: 3934369 - RNA, 20 nt, Human adenovirus E
cccagucauagcaggggcgc

SEQ ID NO: 3934370 - RNA, 15 nt, Human adenovirus E
cccauccgcccaagg

SEQ ID NO: 3934371 - RNA, 19 nt, Human adenovirus E
cccaucuccgaggacgagg

SEQ ID NO: 3934372 - RNA, 19 nt, Human adenovirus E
ccccagaugggccuggccg

SEQ ID NO: 3934373 - RNA, 14 nt, Human adenovirus E
ccccauagccagcc

SEQ ID NO: 3934374 - RNA, 13 nt, Human adenovirus E
cccccacccaguc

SEQ ID NO: 3934375 - RNA, 11 nt, Human adenovirus E
ccccgccgccc

SEQ ID NO: 3934376 - RNA, 22 nt, Human adenovirus E
  misc_feature (9)..(9): n is a, c, g, or u
ccccgggcnugggcgugcagac

SEQ ID NO: 3934377 - RNA, 14 nt, Human adenovirus E
ccccggggccagga

SEQ ID NO: 3934378 - RNA, 14 nt, Human adenovirus E
ccccuacacaugau

SEQ ID NO: 3934379 - RNA, 14 nt, Human adenovirus E
cccgaauaccacag

SEQ ID NO: 3934380 - RNA, 15 nt, Human adenovirus E
cccgaauaccacagc

SEQ ID NO: 3934381 - RNA, 20 nt, Human adenovirus E
cccgccaaauaaucacacac

SEQ ID NO: 3934382 - RNA, 15 nt, Human adenovirus E
cccgccccagcagca

SEQ ID NO: 3934383 - RNA, 23 nt, Human adenovirus E
cccgccugaaccugacacaccac

SEQ ID NO: 3934384 - RNA, 17 nt, Human adenovirus E
cccgcgaugcgggcggc

SEQ ID NO: 3934385 - RNA, 23 nt, Human adenovirus E
cccgcgcgcgcgcacguggccgc

SEQ ID NO: 3934386 - RNA, 15 nt, Human adenovirus E
cccgcguucugcgcg

SEQ ID NO: 3934387 - RNA, 16 nt, Human adenovirus E
cccgcuacaacagcac

SEQ ID NO: 3934388 - RNA, 21 nt, Human adenovirus E
cccggagacgcgcggccacgg

SEQ ID NO: 3934389 - RNA, 17 nt, Human adenovirus E
cccggcaggccaccauc

SEQ ID NO: 3934390 - RNA, 15 nt, Human adenovirus E
cccggccacuacccg

SEQ ID NO: 3934391 - RNA, 18 nt, Human adenovirus E
cccgggcaaccuggaagc

SEQ ID NO: 3934392 - RNA, 18 nt, Human adenovirus E
cccgggcccagguuggug

SEQ ID NO: 3934393 - RNA, 18 nt, Human adenovirus E
cccgguuccacgcggggc

SEQ ID NO: 3934394 - RNA, 19 nt, Human adenovirus E
cccgguuguaccuggugga

SEQ ID NO: 3934395 - RNA, 13 nt, Human adenovirus E
cccgucuccugcc

SEQ ID NO: 3934396 - RNA, 15 nt, Human adenovirus E
cccgucucucagcca

SEQ ID NO: 3934397 - RNA, 18 nt, Human adenovirus E
cccgugaggcgcgcgcag

SEQ ID NO: 3934398 - RNA, 13 nt, Human adenovirus E
cccgugcagccac

SEQ ID NO: 3934399 - RNA, 12 nt, Human adenovirus E
cccuagccgccu

SEQ ID NO: 3934400 - RNA, 18 nt, Human adenovirus E
cccuccugcacaggcagc

SEQ ID NO: 3934401 - RNA, 17 nt, Human adenovirus E
cccugaagcaaacagac

SEQ ID NO: 3934402 - RNA, 23 nt, Human adenovirus E
cccugccaucacaccuuccaccu

SEQ ID NO: 3934403 - RNA, 18 nt, Human adenovirus E
cccugccgcgcgcgcgcu

SEQ ID NO: 3934404 - RNA, 23 nt, Human adenovirus E
cccugcgacuggccgaccccguc

SEQ ID NO: 3934405 - RNA, 16 nt, Human adenovirus E
cccugcgcggggaggc

SEQ ID NO: 3934406 - RNA, 13 nt, Human adenovirus E
cccuggccaccua

SEQ ID NO: 3934407 - RNA, 22 nt, Human adenovirus E
cccugggcauagucgcgccgcg

SEQ ID NO: 3934408 - RNA, 14 nt, Human adenovirus E
cccugggccugaug

SEQ ID NO: 3934409 - RNA, 21 nt, Human adenovirus E
ccgaagccuuuagacagcagc

SEQ ID NO: 3934410 - RNA, 13 nt, Human adenovirus E
ccgagcagcagca

SEQ ID NO: 3934411 - RNA, 14 nt, Human adenovirus E
ccgagcagcagcac

SEQ ID NO: 3934412 - RNA, 11 nt, Human adenovirus E
ccgagccacag

SEQ ID NO: 3934413 - RNA, 15 nt, Human adenovirus E
ccgagccacagcgac

SEQ ID NO: 3934414 - RNA, 17 nt, Human adenovirus E
ccgagcugucggccugc

SEQ ID NO: 3934415 - RNA, 18 nt, Human adenovirus E
ccgagcugucggccugcg

SEQ ID NO: 3934416 - RNA, 17 nt, Human adenovirus E
ccgaggacgagggcaug

SEQ ID NO: 3934417 - RNA, 20 nt, Human adenovirus E
ccgagucgcggaugaagugg

SEQ ID NO: 3934418 - RNA, 15 nt, Human adenovirus E
cgaugugcucgguga

SEQ ID NO: 3934419 - RNA, 23 nt, Human adenovirus E
cgcaacucguaccugggcuaccu

SEQ ID NO: 3934420 - RNA, 14 nt, Human adenovirus E
cgcaagaccaccac

SEQ ID NO: 3934421 - RNA, 21 nt, Human adenovirus E
cgcaagaggcagcccuuccag

SEQ ID NO: 3934422 - RNA, 16 nt, Human adenovirus E
cgcaaucaggcagcac

SEQ ID NO: 3934423 - RNA, 18 nt, Human adenovirus E
cgcaaucaggcagcaccg

SEQ ID NO: 3934424 - RNA, 22 nt, Human adenovirus E
cgcacguggccgcggccaaccu

SEQ ID NO: 3934425 - RNA, 23 nt, Human adenovirus E
cgcacguggccgcggccaaccug

SEQ ID NO: 3934426 - RNA, 17 nt, Human adenovirus E
cgcagcagcgagcuggg

SEQ ID NO: 3934427 - RNA, 21 nt, Human adenovirus E
cgcagcagcgagcugggcagg

SEQ ID NO: 3934428 - RNA, 13 nt, Human adenovirus E
cgcagggcauggu

SEQ ID NO: 3934429 - RNA, 16 nt, Human adenovirus E
cgcagggccaggcgca

SEQ ID NO: 3934430 - RNA, 17 nt, Human adenovirus E
cgcagggggccacgagc

SEQ ID NO: 3934431 - RNA, 23 nt, Human adenovirus E
cgcauccugcguuacgugcagca

SEQ ID NO: 3934432 - RNA, 15 nt, Human adenovirus E
cgcauggucucggug

SEQ ID NO: 3934433 - RNA, 19 nt, Human adenovirus E
cgccagacgccgcaccugc

SEQ ID NO: 3934434 - RNA, 21 nt, Human adenovirus E
cgccagcccaauggcaccugc

SEQ ID NO: 3934435 - RNA, 14 nt, Human adenovirus E
cgccaggccugcaa

SEQ ID NO: 3934436 - RNA, 13 nt, Human adenovirus E
cgccauugguggc

SEQ ID NO: 3934437 - RNA, 18 nt, Human adenovirus E
cgcccagguuuuccaugc

SEQ ID NO: 3934438 - RNA, 14 nt, Human adenovirus E
cgccccgcucaggg

SEQ ID NO: 3934439 - RNA, 17 nt, Human adenovirus E
cgcccgcccgcgcccac

SEQ ID NO: 3934440 - RNA, 20 nt, Human adenovirus E
cgcccggcggcaccggagca

SEQ ID NO: 3934441 - RNA, 17 nt, Human adenovirus E
cgccgaacacucgugcu

SEQ ID NO: 3934442 - RNA, 17 nt, Human adenovirus E
cgccgcaccgcucccug

SEQ ID NO: 3934443 - RNA, 12 nt, Human adenovirus E
cgccgcagcagu

SEQ ID NO: 3934444 - RNA, 15 nt, Human adenovirus E
cgccgccgcuccguc

SEQ ID NO: 3934445 - RNA, 14 nt, Human adenovirus E
cgccgcgcaggggc

SEQ ID NO: 3934446 - RNA, 20 nt, Human adenovirus E
cgccgcgcgugccccccaag

SEQ ID NO: 3934447 - RNA, 20 nt, Human adenovirus E
cgccgcuguggagccacugc

SEQ ID NO: 3934448 - RNA, 13 nt, Human adenovirus E
cgccggugccgcc

SEQ ID NO: 3934449 - RNA, 22 nt, Human adenovirus E
cgccgguggcacgacaggcagc

SEQ ID NO: 3934450 - RNA, 21 nt, Human adenovirus E
cgccucagcaaccugcugggc

SEQ ID NO: 3934451 - RNA, 22 nt, Human adenovirus E
cgccugcugcugcugcuggugg

SEQ ID NO: 3934452 - RNA, 11 nt, Human adenovirus E
cgccuggccaa

SEQ ID NO: 3934453 - RNA, 13 nt, Human adenovirus E
cgccuggggcaga

SEQ ID NO: 3934454 - RNA, 22 nt, Human adenovirus E
cgcgaggccaucggccaggcgc

SEQ ID NO: 3934455 - RNA, 15 nt, Human adenovirus E
cgcgaguccaaccug

SEQ ID NO: 3934456 - RNA, 20 nt, Human adenovirus E
cgcgaguucgccccccggcg

SEQ ID NO: 3934457 - RNA, 21 nt, Human adenovirus E
cgcgcagagcgcccuccaccg

SEQ ID NO: 3934458 - RNA, 17 nt, Human adenovirus E
cgcgcccugggccagga

SEQ ID NO: 3934459 - RNA, 15 nt, Human adenovirus E
cgcgccugcugcugc

SEQ ID NO: 3934460 - RNA, 16 nt, Human adenovirus E
cgcgcgaggaggugac

SEQ ID NO: 3934461 - RNA, 13 nt, Human adenovirus E
cgcgcgcugcccg

SEQ ID NO: 3934462 - RNA, 21 nt, Human adenovirus E
cgcgcucagcaccgaggagga

SEQ ID NO: 3934463 - RNA, 16 nt, Human adenovirus E
cgcgcuccacgguggc

SEQ ID NO: 3934464 - RNA, 15 nt, Human adenovirus E
cgcgcucccuggggc

SEQ ID NO: 3934465 - RNA, 21 nt, Human adenovirus E
cgcgcucgaaggcccccggga

SEQ ID NO: 3934466 - RNA, 14 nt, Human adenovirus E
cgcggagacccugc

SEQ ID NO: 3934467 - RNA, 19 nt, Human adenovirus E
cgcggagauggcaccucuc

SEQ ID NO: 3934468 - RNA, 13 nt, Human adenovirus E
cgcggcgacgagg

SEQ ID NO: 3934469 - RNA, 15 nt, Human adenovirus E
cgcggcgacgaggcc

SEQ ID NO: 3934470 - RNA, 23 nt, Human adenovirus E
cgcggcuucaggcgccagcgccg

SEQ ID NO: 3934471 - RNA, 13 nt, Human adenovirus E
cgcggggcgggag

SEQ ID NO: 3934472 - RNA, 20 nt, Human adenovirus E
cgcggggcgggagcugcggc

SEQ ID NO: 3934473 - RNA, 20 nt, Human adenovirus E
cgcgguagcgguccaucagc

SEQ ID NO: 3934474 - RNA, 18 nt, Human adenovirus E
cgcggucauaccagcagc

SEQ ID NO: 3934475 - RNA, 16 nt, Human adenovirus E
cgcggucauggaccag

SEQ ID NO: 3934476 - RNA, 17 nt, Human adenovirus E
cgcggucauggaccagg

SEQ ID NO: 3934477 - RNA, 16 nt, Human adenovirus E
cgcggugcccgaggcc

SEQ ID NO: 3934478 - RNA, 20 nt, Human adenovirus E
cgcgguggggcggccagcug

SEQ ID NO: 3934479 - RNA, 17 nt, Human adenovirus E
cgcgguugagaaggaac

SEQ ID NO: 3934480 - RNA, 15 nt, Human adenovirus E
cgcgucaguugcagg

SEQ ID NO: 3934481 - RNA, 20 nt, Human adenovirus E
cgcgucaguugcagggcgcc

SEQ ID NO: 3934482 - RNA, 22 nt, Human adenovirus E
cgcgucguuguuggccagcugc

SEQ ID NO: 3934483 - RNA, 22 nt, Human adenovirus E
cgcuagcagccgcggccagggg

SEQ ID NO: 3934484 - RNA, 19 nt, Human adenovirus E
cgcucaggucgcugcagua

SEQ ID NO: 3934485 - RNA, 16 nt, Human adenovirus E
cgcucccggcggcgcu

SEQ ID NO: 3934486 - RNA, 16 nt, Human adenovirus E
cgcucgcgguggggcg

SEQ ID NO: 3934487 - RNA, 21 nt, Human adenovirus E
cgcucgcgguggggcggccag

SEQ ID NO: 3934488 - RNA, 17 nt, Human adenovirus E
cgcugacggcgcagcug

SEQ ID NO: 3934489 - RNA, 15 nt, Human adenovirus E
cgcugcaaccucugc

SEQ ID NO: 3934490 - RNA, 12 nt, Human adenovirus E
cgcugcacggga

SEQ ID NO: 3934491 - RNA, 22 nt, Human adenovirus E
cgcugcccguucucgcucgcca

SEQ ID NO: 3934492 - RNA, 15 nt, Human adenovirus E
cgcugcucaccaccu

SEQ ID NO: 3934493 - RNA, 14 nt, Human adenovirus E
cgcugcuggagcgc

SEQ ID NO: 3934494 - RNA, 15 nt, Human adenovirus E
cgcuggcuccuggac

SEQ ID NO: 3934495 - RNA, 23 nt, Human adenovirus E
cgcuguccgagaagcuggcggcc

SEQ ID NO: 3934496 - RNA, 17 nt, Human adenovirus E
cggaauccugcccgcca

SEQ ID NO: 3934497 - RNA, 19 nt, Human adenovirus E
cggacgauuggacccaggc

SEQ ID NO: 3934498 - RNA, 21 nt, Human adenovirus E
cggacuacuucuuccagacca

SEQ ID NO: 3934499 - RNA, 15 nt, Human adenovirus E
cggagcacccccgcc

SEQ ID NO: 3934500 - RNA, 20 nt, Human adenovirus E
cggaggaaggaaguccagag

SEQ ID NO: 3934501 - RNA, 12 nt, Human adenovirus E
cggaggccagca

SEQ ID NO: 3934502 - RNA, 18 nt, Human adenovirus E
cggaggccagcacccaga

SEQ ID NO: 3934503 - RNA, 20 nt, Human adenovirus E
cggaggcgacgggcucucgc

SEQ ID NO: 3934504 - RNA, 16 nt, Human adenovirus E
cggauaccaucuccgc

SEQ ID NO: 3934505 - RNA, 15 nt, Human adenovirus E
cggauggcuggcaga

SEQ ID NO: 3934506 - RNA, 17 nt, Human adenovirus E
cggauggcuggcagagc

SEQ ID NO: 3934507 - RNA, 19 nt, Human adenovirus E
cggauggcuggcagagccc

SEQ ID NO: 3934508 - RNA, 24 nt, Human adenovirus E
cggcagaacggggugcuggagagc

SEQ ID NO: 3934509 - RNA, 20 nt, Human adenovirus E
cggcagcggccaucgccagc

SEQ ID NO: 3934510 - RNA, 12 nt, Human adenovirus E
cggcagcggcgg

SEQ ID NO: 3934511 - RNA, 19 nt, Human adenovirus E
cggccagccugcugaugcc

SEQ ID NO: 3934512 - RNA, 17 nt, Human adenovirus E
cggccauccuggaggcc

SEQ ID NO: 3934513 - RNA, 21 nt, Human adenovirus E
cggccauuuuuucggggguga

SEQ ID NO: 3934514 - RNA, 20 nt, Human adenovirus E
cggcccaucaagcagguggc

SEQ ID NO: 3934515 - RNA, 17 nt, Human adenovirus E
cggcccaugagcugcga

SEQ ID NO: 3934516 - RNA, 13 nt, Human adenovirus E
cggcccucagcau

SEQ ID NO: 3934517 - RNA, 14 nt, Human adenovirus E
cggcccucagcauc

SEQ ID NO: 3934518 - RNA, 16 nt, Human adenovirus E
cggccgaggcggcuga

SEQ ID NO: 3934519 - RNA, 15 nt, Human adenovirus E
cggcgcacgggcaga

SEQ ID NO: 3934520 - RNA, 21 nt, Human adenovirus E
cggcgcgcuccuuggcggcga

SEQ ID NO: 3934521 - RNA, 13 nt, Human adenovirus E
cggcggcagcagg

SEQ ID NO: 3934522 - RNA, 12 nt, Human adenovirus E
cggcggccuggg

SEQ ID NO: 3934523 - RNA, 16 nt, Human adenovirus E
cggcggcgaugcagcc

SEQ ID NO: 3934524 - RNA, 15 nt, Human adenovirus E
cggcgggcgcagcag

SEQ ID NO: 3934525 - RNA, 22 nt, Human adenovirus E
cggcgguacaccucgcccugcu

SEQ ID NO: 3934526 - RNA, 16 nt, Human adenovirus E
cggcgucgugcacgca

SEQ ID NO: 3934527 - RNA, 21 nt, Human adenovirus E
cggcgucgugcacgcagcagc

SEQ ID NO: 3934528 - RNA, 15 nt, Human adenovirus E
cggcuucccccagga

SEQ ID NO: 3934529 - RNA, 20 nt, Human adenovirus E
cggcuucgacaccuggacca

SEQ ID NO: 3934530 - RNA, 20 nt, Human adenovirus E
cgggacccugccgcugcgca

SEQ ID NO: 3934531 - RNA, 15 nt, Human adenovirus E
cgggaguuccuccac

SEQ ID NO: 3934532 - RNA, 21 nt, Human adenovirus E
cgggauagaaagccuggugga

SEQ ID NO: 3934533 - RNA, 19 nt, Human adenovirus E
cgggaugcgucgccaccac

SEQ ID NO: 3934534 - RNA, 14 nt, Human adenovirus E
uauguggcccccca

SEQ ID NO: 3934535 - RNA, 16 nt, Human adenovirus E
uauguuggagcaacau

SEQ ID NO: 3934536 - RNA, 12 nt, Human adenovirus E
uauuugcaauug

SEQ ID NO: 3934537 - RNA, 13 nt, Human adenovirus E
ucaaccccggcuu

SEQ ID NO: 3934538 - RNA, 18 nt, Human adenovirus E
ucaaccccuucuccggcu

SEQ ID NO: 3934539 - RNA, 15 nt, Human adenovirus E
ucaagcccagcacca

SEQ ID NO: 3934540 - RNA, 13 nt, Human adenovirus E
ucaaguccagcaa

SEQ ID NO: 3934541 - RNA, 18 nt, Human adenovirus E
ucacaccacacacacaga

SEQ ID NO: 3934542 - RNA, 22 nt, Human adenovirus E
ucaccaaacugucaaauacucg

SEQ ID NO: 3934543 - RNA, 23 nt, Human adenovirus E
ucaccaaggccauggcgaccagc

SEQ ID NO: 3934544 - RNA, 19 nt, Human adenovirus E
ucaccacuacuaucucuuc

SEQ ID NO: 3934545 - RNA, 16 nt, Human adenovirus E
ucacccgccccgcccc

SEQ ID NO: 3934546 - RNA, 15 nt, Human adenovirus E
ucaccgagagccgcc

SEQ ID NO: 3934547 - RNA, 20 nt, Human adenovirus E
ucaccgagagccgccucagc

SEQ ID NO: 3934548 - RNA, 19 nt, Human adenovirus E
ucaccgccccgcucagggu

SEQ ID NO: 3934549 - RNA, 13 nt, Human adenovirus E
ucaccuccacagc

SEQ ID NO: 3934550 - RNA, 18 nt, Human adenovirus E
ucacggacagcggcagca

SEQ ID NO: 3934551 - RNA, 20 nt, Human adenovirus E
ucagacccacugcugaaccu

SEQ ID NO: 3934552 - RNA, 15 nt, Human adenovirus E
ucagaccgugcagca

SEQ ID NO: 3934553 - RNA, 20 nt, Human adenovirus E
ucagauguaucuacugaacu

SEQ ID NO: 3934554 - RNA, 16 nt, Human adenovirus E
ucagcaaccugcuggg

SEQ ID NO: 3934555 - RNA, 16 nt, Human adenovirus E
ucagcaguuugggcag

SEQ ID NO: 3934556 - RNA, 21 nt, Human adenovirus E
ucagccaaucagcgccccgca

SEQ ID NO: 3934557 - RNA, 20 nt, Human adenovirus E
ucagcgacgagcagcuggcc

SEQ ID NO: 3934558 - RNA, 19 nt, Human adenovirus E
ucaggcagaggaggacagc

SEQ ID NO: 3934559 - RNA, 16 nt, Human adenovirus E
ucaggcagaggaggag

SEQ ID NO: 3934560 - RNA, 13 nt, Human adenovirus E
ucaggcagcaccg

SEQ ID NO: 3934561 - RNA, 18 nt, Human adenovirus E
ucaggccccgcagcaguc

SEQ ID NO: 3934562 - RNA, 13 nt, Human adenovirus E
ucaggcgccagcg

SEQ ID NO: 3934563 - RNA, 13 nt, Human adenovirus E
ucaggcuccucug

SEQ ID NO: 3934564 - RNA, 23 nt, Human adenovirus E
ucaggcugggcucgagcaugacg

SEQ ID NO: 3934565 - RNA, 19 nt, Human adenovirus E
ucagucucaaguccagcaa

SEQ ID NO: 3934566 - RNA, 20 nt, Human adenovirus E
ucauaccagcagccgccgcc

SEQ ID NO: 3934567 - RNA, 22 nt, Human adenovirus E
ucauccaugaugauggcgaugg

SEQ ID NO: 3934568 - RNA, 19 nt, Human adenovirus E
ucauccucgaacgcuccgg

SEQ ID NO: 3934569 - RNA, 14 nt, Human adenovirus E
ucaucugggccugg

SEQ ID NO: 3934570 - RNA, 14 nt, Human adenovirus E
ucauguacagcaac

SEQ ID NO: 3934571 - RNA, 22 nt, Human adenovirus E
ucauuuguuggcauuaccccua

SEQ ID NO: 3934572 - RNA, 16 nt, Human adenovirus E
uccaagacaguucauu

SEQ ID NO: 3934573 - RNA, 18 nt, Human adenovirus E
uccaagauauucugcucc

SEQ ID NO: 3934574 - RNA, 18 nt, Human adenovirus E
uccaccaacgccaccguc

SEQ ID NO: 3934575 - RNA, 13 nt, Human adenovirus E
uccacccaccaca

SEQ ID NO: 3934576 - RNA, 15 nt, Human adenovirus E
uccaccuuuuccagg

SEQ ID NO: 3934577 - RNA, 16 nt, Human adenovirus E
uccaccuuuuccaggg

SEQ ID NO: 3934578 - RNA, 15 nt, Human adenovirus E
uccacgagccaggug

SEQ ID NO: 3934579 - RNA, 17 nt, Human adenovirus E
uccacgcgcacauccag

SEQ ID NO: 3934580 - RNA, 19 nt, Human adenovirus E
uccacgcggggcgggagcu

SEQ ID NO: 3934581 - RNA, 19 nt, Human adenovirus E
uccacgguggcuuccagca

SEQ ID NO: 3934582 - RNA, 16 nt, Human adenovirus E
uccacguuccacacag

SEQ ID NO: 3934583 - RNA, 17 nt, Human adenovirus E
uccacuaacaucucuuc

SEQ ID NO: 3934584 - RNA, 18 nt, Human adenovirus E
uccagaaaaagccacaga

SEQ ID NO: 3934585 - RNA, 20 nt, Human adenovirus E
uccagauaacuggacagaaa

SEQ ID NO: 3934586 - RNA, 11 nt, Human adenovirus E
uccaggccagc

SEQ ID NO: 3934587 - RNA, 17 nt, Human adenovirus E
uccaucauccccacgcc

SEQ ID NO: 3934588 - RNA, 19 nt, Human adenovirus E
ucccagcggcgaggaggau

SEQ ID NO: 3934589 - RNA, 15 nt, Human adenovirus E
ucccauacuccaccu

SEQ ID NO: 3934590 - RNA, 16 nt, Human adenovirus E
uccccgcgcuccugga

SEQ ID NO: 3934591 - RNA, 16 nt, Human adenovirus E
uccccgucuccugccg

SEQ ID NO: 3934592 - RNA, 15 nt, Human adenovirus E
uccccgugccagcga

SEQ ID NO: 3934593 - RNA, 15 nt, Human adenovirus E
uccccuccugcacag

SEQ ID NO: 3934594 - RNA, 14 nt, Human adenovirus E
ucccgcaucugcac

SEQ ID NO: 3934595 - RNA, 18 nt, Human adenovirus E
ucccgccccaguacgcgc

SEQ ID NO: 3934596 - RNA, 17 nt, Human adenovirus E
ucccggcgcccgccuac

SEQ ID NO: 3934597 - RNA, 17 nt, Human adenovirus E
ucccggcggcgcucuga

SEQ ID NO: 3934598 - RNA, 13 nt, Human adenovirus E
uccgaggacgagg

SEQ ID NO: 3934599 - RNA, 21 nt, Human adenovirus E
uccgaggacgagggcaugcaa

SEQ ID NO: 3934600 - RNA, 15 nt, Human adenovirus E
uccgaggccacgcgg

SEQ ID NO: 3934601 - RNA, 18 nt, Human adenovirus E
uccgccgacgacagcagc

SEQ ID NO: 3934602 - RNA, 19 nt, Human adenovirus E
uccgcgacacggcacgcgg

SEQ ID NO: 3934603 - RNA, 21 nt, Human adenovirus E
uccgcguaauuggcccgccgc

SEQ ID NO: 3934604 - RNA, 22 nt, Human adenovirus E
uccgcguaauuggcccgccgcc

SEQ ID NO: 3934605 - RNA, 15 nt, Human adenovirus E
uccggcaccgcuucc

SEQ ID NO: 3934606 - RNA, 20 nt, Human adenovirus E
uccggggcagaagcacacag

SEQ ID NO: 3934607 - RNA, 14 nt, Human adenovirus E
uccgguccuuccag

SEQ ID NO: 3934608 - RNA, 13 nt, Human adenovirus E
uccucccucagca

SEQ ID NO: 3934609 - RNA, 18 nt, Human adenovirus E
uccucucgagccgcaccu

SEQ ID NO: 3934610 - RNA, 13 nt, Human adenovirus E
uccucuucuuggu

SEQ ID NO: 3934611 - RNA, 14 nt, Human adenovirus E
uccugcccgccacc

SEQ ID NO: 3934612 - RNA, 21 nt, Human adenovirus E
uccuggcugacguccugcagg

SEQ ID NO: 3934613 - RNA, 18 nt, Human adenovirus E
uccugguucaccugcagc

SEQ ID NO: 3934614 - RNA, 15 nt, Human adenovirus E
ucgacgagcgcacca

SEQ ID NO: 3934615 - RNA, 22 nt, Human adenovirus E
ucgacuccguggccuggaggcu

SEQ ID NO: 3934616 - RNA, 20 nt, Human adenovirus E
ucgagagccacaccacagcu

SEQ ID NO: 3934617 - RNA, 23 nt, Human adenovirus E
ucgagcaguuauuuuuccuccac

SEQ ID NO: 3934618 - RNA, 17 nt, Human adenovirus E
ucgagcugacccauuuc

SEQ ID NO: 3934619 - RNA, 17 nt, Human adenovirus E
ucgagggucuccuggau

SEQ ID NO: 3934620 - RNA, 17 nt, Human adenovirus E
ucgcaaucaggcagcac

SEQ ID NO: 3934621 - RNA, 18 nt, Human adenovirus E
ucgcagaaaaugaugcaa

SEQ ID NO: 3934622 - RNA, 20 nt, Human adenovirus E
ucgcagccccgcucgggugg

SEQ ID NO: 3934623 - RNA, 22 nt, Human adenovirus E
ucgcaucaggccccgcagcagu

SEQ ID NO: 3934624 - RNA, 17 nt, Human adenovirus E
ucgccagggcuugcaga

SEQ ID NO: 3934625 - RNA, 20 nt, Human adenovirus E
ucgcccggcggcaccggagc

SEQ ID NO: 3934626 - RNA, 17 nt, Human adenovirus E
ucgcccuagccgccucc

SEQ ID NO: 3934627 - RNA, 19 nt, Human adenovirus E
ucgccgcgcgugcccccca

SEQ ID NO: 3934628 - RNA, 20 nt, Human adenovirus E
ucgcgcaccaguuccgccag

SEQ ID NO: 3934629 - RNA, 20 nt, Human adenovirus E
ucgcgcuccaaccccacgca

SEQ ID NO: 3934630 - RNA, 19 nt, Human adenovirus E
ucgcggcgaacgagccggc

SEQ ID NO: 3934631 - RNA, 15 nt, Human adenovirus E
ucgcgguccuuccag

SEQ ID NO: 3934632 - RNA, 17 nt, Human adenovirus E
ucgcuauucgccccaga

SEQ ID NO: 3934633 - RNA, 21 nt, Human adenovirus E
ucgcuuacgcacgucuucaac

SEQ ID NO: 3934634 - RNA, 18 nt, Human adenovirus E
ucggacuucgugccgcug

SEQ ID NO: 3934635 - RNA, 17 nt, Human adenovirus E
ucgggucggucagggag

SEQ ID NO: 3934636 - RNA, 19 nt, Human adenovirus E
ucgucaaggaugcgcugcu

SEQ ID NO: 3934637 - RNA, 12 nt, Human adenovirus E
ucgucaggccgu

SEQ ID NO: 3934638 - RNA, 13 nt, Human adenovirus E
ucguccagggcag

SEQ ID NO: 3934639 - RNA, 16 nt, Human adenovirus E
ucguucucuccagcac

SEQ ID NO: 3934640 - RNA, 15 nt, Human adenovirus E
ucguuguuggccagc

SEQ ID NO: 3934641 - RNA, 14 nt, Human adenovirus E
ucuaccucugccac

SEQ ID NO: 3934642 - RNA, 20 nt, Human adenovirus E
ucuaccucugccacaccugg

SEQ ID NO: 3934643 - RNA, 13 nt, Human adenovirus E
ucuacgaggacca

SEQ ID NO: 3934644 - RNA, 17 nt, Human adenovirus E
ucucagccaaucagcgc

SEQ ID NO: 3934645 - RNA, 20 nt, Human adenovirus E
ucucagccaaucagcgcccc

SEQ ID NO: 3934646 - RNA, 16 nt, Human adenovirus E
ucucaucaaguuucaa

SEQ ID NO: 3934647 - RNA, 19 nt, Human adenovirus E
ucuccaucgcuuacagccu

SEQ ID NO: 3934648 - RNA, 13 nt, Human adenovirus E
ucuccccccgcac

SEQ ID NO: 3934649 - RNA, 14 nt, Human adenovirus E
ucuccgcuccgggu

SEQ ID NO: 3934650 - RNA, 13 nt, Human adenovirus E
ucucuccagcacc

SEQ ID NO: 3934651 - RNA, 21 nt, Human adenovirus E
uggugaagaugccgggcagga

SEQ ID NO: 3934652 - RNA, 15 nt, Human adenovirus E
uggugaaggaggaaa

SEQ ID NO: 3934653 - RNA, 15 nt, Human adenovirus E
uggugcccaagcgcc

SEQ ID NO: 3934654 - RNA, 20 nt, Human adenovirus E
ugguguacuaugccuucugc

SEQ ID NO: 3934655 - RNA, 14 nt, Human adenovirus E
ugucaguguaucua

SEQ ID NO: 3934656 - RNA, 20 nt, Human adenovirus E
ugucccaugguggcgcagcu

SEQ ID NO: 3934657 - RNA, 21 nt, Human adenovirus E
ugucccuuuuguuuccacagc

SEQ ID NO: 3934658 - RNA, 15 nt, Human adenovirus E
ugucgagccugcuga

SEQ ID NO: 3934659 - RNA, 21 nt, Human adenovirus E
ugucuuucguccucgcugucc

SEQ ID NO: 3934660 - RNA, 13 nt, Human adenovirus E
uguggacagcagc

SEQ ID NO: 3934661 - RNA, 15 nt, Human adenovirus E
ugugggaccugcugg

SEQ ID NO: 3934662 - RNA, 19 nt, Human adenovirus E
uguggggcgugcaggcccc

SEQ ID NO: 3934663 - RNA, 18 nt, Human adenovirus E
ugugguagucaaauacug

SEQ ID NO: 3934664 - RNA, 18 nt, Human adenovirus E
uguucagagacaggagcg

SEQ ID NO: 3934665 - RNA, 17 nt, Human adenovirus E
uguuccugguggugcag

SEQ ID NO: 3934666 - RNA, 16 nt, Human adenovirus E
uuaccgagcagcagca

SEQ ID NO: 3934667 - RNA, 22 nt, Human adenovirus E
  misc_feature (7)..(7): n is a, c, g, or u
uuagaancggcggcgaagacgc

SEQ ID NO: 3934668 - RNA, 19 nt, Human adenovirus E
uuagcuuugacaguacagg

SEQ ID NO: 3934669 - RNA, 22 nt, Human adenovirus E
uuagggcaagccacaguacaga

SEQ ID NO: 3934670 - RNA, 21 nt, Human adenovirus E
uucacuccccucuucccagcu

SEQ ID NO: 3934671 - RNA, 16 nt, Human adenovirus E
uucaugaccagcauga

SEQ ID NO: 3934672 - RNA, 15 nt, Human adenovirus E
uucauggaaugagua

SEQ ID NO: 3934673 - RNA, 22 nt, Human adenovirus E
uuccaccugaucccgaauacca

SEQ ID NO: 3934674 - RNA, 13 nt, Human adenovirus E
uuccagcaaagcc

SEQ ID NO: 3934675 - RNA, 13 nt, Human adenovirus E
uucccacuccccu

SEQ ID NO: 3934676 - RNA, 22 nt, Human adenovirus E
uucgcccuagccgccuccaccc

SEQ ID NO: 3934677 - RNA, 18 nt, Human adenovirus E
uucguccucgcagccccg

SEQ ID NO: 3934678 - RNA, 16 nt, Human adenovirus E
uucgugagguaaaucc

SEQ ID NO: 3934679 - RNA, 21 nt, Human adenovirus E
uucuacacuaaaaaaauacug

SEQ ID NO: 3934680 - RNA, 16 nt, Human adenovirus E
uucuacuuccuccuca

SEQ ID NO: 3934681 - RNA, 18 nt, Human adenovirus E
uucuagaaacgaggagga

SEQ ID NO: 3934682 - RNA, 19 nt, Human adenovirus E
uucuaucauuaccucugcu

SEQ ID NO: 3934683 - RNA, 16 nt, Human adenovirus E
uucuccuagggaggaa

SEQ ID NO: 3934684 - RNA, 19 nt, Human adenovirus E
uucugggugaucuuggccc

SEQ ID NO: 3934685 - RNA, 15 nt, Human adenovirus E
uugaauuuuaauuuu

SEQ ID NO: 3934686 - RNA, 23 nt, Human adenovirus E
uugacggccuuguaggcgcagca

SEQ ID NO: 3934687 - RNA, 19 nt, Human adenovirus E
uugagcugcccgaggagca

SEQ ID NO: 3934688 - RNA, 16 nt, Human adenovirus E
uugccgaaggacccca

SEQ ID NO: 3934689 - RNA, 18 nt, Human adenovirus E
uugcgcagggccaggcgc

SEQ ID NO: 3934690 - RNA, 19 nt, Human adenovirus E
uuggaagcaguaguacaga

SEQ ID NO: 3934691 - RNA, 17 nt, Human adenovirus E
uuggacccaggccaugc

SEQ ID NO: 3934692 - RNA, 22 nt, Human adenovirus E
uuggcgauguuaccgcccagau

SEQ ID NO: 3934693 - RNA, 12 nt, Human adenovirus E
uuucccacccuc

SEQ ID NO: 3934694 - RNA, 17 nt, Human adenovirus E
uuugccuucaccaccug

SEQ ID NO: 3934695 - RNA, 15 nt, Human adenovirus E
uuuggaggaagacug

SEQ ID NO: 3934696 - RNA, 23 nt, Human adenovirus E
uuuuaaugaaucagauguaucua

SEQ ID NO: 3934697 - RNA, 11 nt, Human adenovirus E
uuuugaugcaa

SEQ ID NO: 3934698 - RNA, 21 nt, Human adenovirus E
cgggcacgauucugaccugcc

SEQ ID NO: 3934699 - RNA, 19 nt, Human adenovirus E
cgggcacucccgcaucugc

SEQ ID NO: 3934700 - RNA, 21 nt, Human adenovirus E
cgggcacuuccgcgcucccug

SEQ ID NO: 3934701 - RNA, 22 nt, Human adenovirus E
cgggcccugaccggggccggga

SEQ ID NO: 3934702 - RNA, 13 nt, Human adenovirus E
cgggcgcagcagc

SEQ ID NO: 3934703 - RNA, 13 nt, Human adenovirus E
cgggcggcgcugc

SEQ ID NO: 3934704 - RNA, 19 nt, Human adenovirus E
cgggcggcgcugcagagcc

SEQ ID NO: 3934705 - RNA, 22 nt, Human adenovirus E
  misc_feature (6)..(6): n is a, c, g, or u
cgggcnugggcgugcagaccgu

SEQ ID NO: 3934706 - RNA, 14 nt, Human adenovirus E
cgggcuaccgcggc

SEQ ID NO: 3934707 - RNA, 13 nt, Human adenovirus E
cggggaucagccc

SEQ ID NO: 3934708 - RNA, 12 nt, Human adenovirus E
cggggcagaagc

SEQ ID NO: 3934709 - RNA, 15 nt, Human adenovirus E
cggggcgggagcugc

SEQ ID NO: 3934710 - RNA, 18 nt, Human adenovirus E
cgggggagaugagcuggg

SEQ ID NO: 3934711 - RNA, 23 nt, Human adenovirus E
cgggggugcgcucccggcggcgc

SEQ ID NO: 3934712 - RNA, 16 nt, Human adenovirus E
cggggguucaagcgcg

SEQ ID NO: 3934713 - RNA, 13 nt, Human adenovirus E
cgggguugcagca

SEQ ID NO: 3934714 - RNA, 17 nt, Human adenovirus E
cgggguuucuucuuggg

SEQ ID NO: 3934715 - RNA, 19 nt, Human adenovirus E
cgggugauccuccaccaga

SEQ ID NO: 3934716 - RNA, 17 nt, Human adenovirus E
cggucaacuccuccucc

SEQ ID NO: 3934717 - RNA, 16 nt, Human adenovirus E
cggucauaccagcagc

SEQ ID NO: 3934718 - RNA, 15 nt, Human adenovirus E
cggucguccccggag

SEQ ID NO: 3934719 - RNA, 19 nt, Human adenovirus E
cggugagcgccagcaggcg

SEQ ID NO: 3934720 - RNA, 21 nt, Human adenovirus E
cggugagcgccagcaggcggc

SEQ ID NO: 3934721 - RNA, 15 nt, Human adenovirus E
cggugccgcccagga

SEQ ID NO: 3934722 - RNA, 18 nt, Human adenovirus E
cggugccgcccaggacua

SEQ ID NO: 3934723 - RNA, 16 nt, Human adenovirus E
cgguggcuuccagcaa

SEQ ID NO: 3934724 - RNA, 21 nt, Human adenovirus E
cgguggggccguagaugaccc

SEQ ID NO: 3934725 - RNA, 13 nt, Human adenovirus E
cgguggggcggcc

SEQ ID NO: 3934726 - RNA, 18 nt, Human adenovirus E
cggugucgagccugcuga

SEQ ID NO: 3934727 - RNA, 22 nt, Human adenovirus E
cguagaccgacuuuaugggccg

SEQ ID NO: 3934728 - RNA, 23 nt, Human adenovirus E
cguaugcgcaggagcacagggac

SEQ ID NO: 3934729 - RNA, 17 nt, Human adenovirus E
cgucaaggaugcgcugc

SEQ ID NO: 3934730 - RNA, 13 nt, Human adenovirus E
cgucccgggggug

SEQ ID NO: 3934731 - RNA, 19 nt, Human adenovirus E
cguccucgcuguccuggcu

SEQ ID NO: 3934732 - RNA, 15 nt, Human adenovirus E
cgucgugcacgcagc

SEQ ID NO: 3934733 - RNA, 19 nt, Human adenovirus E
cgucucgagauccacggga

SEQ ID NO: 3934734 - RNA, 18 nt, Human adenovirus E
cgugaacgcgcuggugga

SEQ ID NO: 3934735 - RNA, 16 nt, Human adenovirus E
cgugaccuugcagcag

SEQ ID NO: 3934736 - RNA, 20 nt, Human adenovirus E
cgugaccuugcagcaggugc

SEQ ID NO: 3934737 - RNA, 16 nt, Human adenovirus E
cgugagccgcgcccug

SEQ ID NO: 3934738 - RNA, 17 nt, Human adenovirus E
cgugcaacacagaacca

SEQ ID NO: 3934739 - RNA, 13 nt, Human adenovirus E
cgugcgcgaggcc

SEQ ID NO: 3934740 - RNA, 20 nt, Human adenovirus E
cgugcgcgaggccguggccc

SEQ ID NO: 3934741 - RNA, 13 nt, Human adenovirus E
cgugcggugagcg

SEQ ID NO: 3934742 - RNA, 20 nt, Human adenovirus E
cgugcggugagcgccagcag

SEQ ID NO: 3934743 - RNA, 12 nt, Human adenovirus E
cguggagcugga

SEQ ID NO: 3934744 - RNA, 20 nt, Human adenovirus E
cgugggcggcggccugggca

SEQ ID NO: 3934745 - RNA, 14 nt, Human adenovirus E
cguucucuccagca

SEQ ID NO: 3934746 - RNA, 17 nt, Human adenovirus E
cguucucuccagcacca

SEQ ID NO: 3934747 - RNA, 17 nt, Human adenovirus E
cguugcggugugccccg

SEQ ID NO: 3934748 - RNA, 12 nt, Human adenovirus E
cuacaagacccc

SEQ ID NO: 3934749 - RNA, 12 nt, Human adenovirus E
cuaccacccaca

SEQ ID NO: 3934750 - RNA, 14 nt, Human adenovirus E
cuaccagccccaga

SEQ ID NO: 3934751 - RNA, 16 nt, Human adenovirus E
cuaccucgacccccag

SEQ ID NO: 3934752 - RNA, 14 nt, Human adenovirus E
cuaccucugccaca

SEQ ID NO: 3934753 - RNA, 22 nt, Human adenovirus E
cuacggcaucucgauccagcag

SEQ ID NO: 3934754 - RNA, 20 nt, Human adenovirus E
cuacuacuuccaagaagagg

SEQ ID NO: 3934755 - RNA, 18 nt, Human adenovirus E
cuagcagccgcggccagg

SEQ ID NO: 3934756 - RNA, 21 nt, Human adenovirus E
cuagcauguagaacugguuga

SEQ ID NO: 3934757 - RNA, 14 nt, Human adenovirus E
cuagccgccuccac

SEQ ID NO: 3934758 - RNA, 15 nt, Human adenovirus E
cuaggacguccagag

SEQ ID NO: 3934759 - RNA, 22 nt, Human adenovirus E
cuaggacguccagagcgcagua

SEQ ID NO: 3934760 - RNA, 16 nt, Human adenovirus E
cucagcaaccugcugg

SEQ ID NO: 3934761 - RNA, 19 nt, Human adenovirus E
cucagccaucgccaaccuc

SEQ ID NO: 3934762 - RNA, 15 nt, Human adenovirus E
cucagccgcgccuac

SEQ ID NO: 3934763 - RNA, 16 nt, Human adenovirus E
cucagguguccagcug

SEQ ID NO: 3934764 - RNA, 17 nt, Human adenovirus E
cucagguguccagcugg

SEQ ID NO: 3934765 - RNA, 20 nt, Human adenovirus E
cucaucaagcaucuggcccg

SEQ ID NO: 3934766 - RNA, 15 nt, Human adenovirus E
cucaucaaguuucaa

SEQ ID NO: 3934767 - RNA, 20 nt, Human adenovirus E
  misc_feature (8)..(8): n is a, c, g, or u
cucauuanuccagcagaggc

SEQ ID NO: 3934768 - RNA, 18 nt, Human adenovirus E
cuccaacguggagcugac

SEQ ID NO: 3934769 - RNA, 21 nt, Human adenovirus E
cuccaagucugugccacccuc

SEQ ID NO: 3934770 - RNA, 14 nt, Human adenovirus E
cuccaccaacgcca

SEQ ID NO: 3934771 - RNA, 16 nt, Human adenovirus E
cuccaccuccacccac

SEQ ID NO: 3934772 - RNA, 18 nt, Human adenovirus E
  misc_feature (9)..(9): n is a, c, g, or u
cuccagcunuuccaaccc

SEQ ID NO: 3934773 - RNA, 18 nt, Human adenovirus E
cuccaguucguggaggag

SEQ ID NO: 3934774 - RNA, 17 nt, Human adenovirus E
cuccaucgcuuacagcc

SEQ ID NO: 3934775 - RNA, 22 nt, Human adenovirus E
cucccgguaccacaucacccuc

SEQ ID NO: 3934776 - RNA, 12 nt, Human adenovirus E
cucccucgguga

SEQ ID NO: 3934777 - RNA, 15 nt, Human adenovirus E
cucccucguacgaga

SEQ ID NO: 3934778 - RNA, 14 nt, Human adenovirus E
cucccuggggcgcc

SEQ ID NO: 3934779 - RNA, 20 nt, Human adenovirus E
cuccgacgcggccgucccag

SEQ ID NO: 3934780 - RNA, 19 nt, Human adenovirus E
cuccgcgacacggcacgcg

SEQ ID NO: 3934781 - RNA, 19 nt, Human adenovirus E
cuccgcuugccguccuucu

SEQ ID NO: 3934782 - RNA, 23 nt, Human adenovirus E
cuccggcaccgcuuccaagcgcu

SEQ ID NO: 3934783 - RNA, 17 nt, Human adenovirus E
cuccguggccuggaggc

SEQ ID NO: 3934784 - RNA, 21 nt, Human adenovirus E
cuccuagaacagucagcgcuc

SEQ ID NO: 3934785 - RNA, 13 nt, Human adenovirus E
cuccucccucagc

SEQ ID NO: 3934786 - RNA, 19 nt, Human adenovirus E
cuccugccgcgccaaccgc

SEQ ID NO: 3934787 - RNA, 19 nt, Human adenovirus E
cuccugcuugcaggccugc

SEQ ID NO: 3934788 - RNA, 17 nt, Human adenovirus E
cuccuggaccuggugaa

SEQ ID NO: 3934789 - RNA, 17 nt, Human adenovirus E
cuccuucagcgcgcgcu

SEQ ID NO: 3934790 - RNA, 16 nt, Human adenovirus E
cucgagugccacugcc

SEQ ID NO: 3934791 - RNA, 15 nt, Human adenovirus E
cucgcacuccacgag

SEQ ID NO: 3934792 - RNA, 14 nt, Human adenovirus E
cucgcagcagcugc

SEQ ID NO: 3934793 - RNA, 14 nt, Human adenovirus E
cucgccgcucgccg

SEQ ID NO: 3934794 - RNA, 20 nt, Human adenovirus E
cucgcgaggcauacgugccc

SEQ ID NO: 3934795 - RNA, 23 nt, Human adenovirus E
cucgcgccugcugcugcugcugg

SEQ ID NO: 3934796 - RNA, 23 nt, Human adenovirus E
cucgcgguggggcggccagcuga

SEQ ID NO: 3934797 - RNA, 17 nt, Human adenovirus E
cucgcguccguguggca

SEQ ID NO: 3934798 - RNA, 14 nt, Human adenovirus E
cucgcucugguggc

SEQ ID NO: 3934799 - RNA, 20 nt, Human adenovirus E
cucggacgauuggacccagg

SEQ ID NO: 3934800 - RNA, 22 nt, Human adenovirus E
cucggacgauuggacccaggcc

SEQ ID NO: 3934801 - RNA, 20 nt, Human adenovirus E
cucggccauccuggaggccg

SEQ ID NO: 3934802 - RNA, 17 nt, Human adenovirus E
cucggcgaugguggcgc

SEQ ID NO: 3934803 - RNA, 16 nt, Human adenovirus E
cucgggaucgcgggcg

SEQ ID NO: 3934804 - RNA, 21 nt, Human adenovirus E
cucgggucggucagggagaug

SEQ ID NO: 3934805 - RNA, 19 nt, Human adenovirus E
cucguaaaaguccacggcg

SEQ ID NO: 3934806 - RNA, 15 nt, Human adenovirus E
cucguaccugggcua

SEQ ID NO: 3934807 - RNA, 21 nt, Human adenovirus E
cucgucugccguagucuggag

SEQ ID NO: 3934808 - RNA, 13 nt, Human adenovirus E
cucucgaggacgc

SEQ ID NO: 3934809 - RNA, 15 nt, Human adenovirus E
cucugacgcuccugg

SEQ ID NO: 3934810 - RNA, 22 nt, Human adenovirus E
cucugcacgccgcaccgcuccc

SEQ ID NO: 3934811 - RNA, 21 nt, Human adenovirus E
cucugggugaaggccacggga

SEQ ID NO: 3934812 - RNA, 18 nt, Human adenovirus E
cucugguacugcaggccc

SEQ ID NO: 3934813 - RNA, 17 nt, Human adenovirus E
cucuucagcacucucaa

SEQ ID NO: 3934814 - RNA, 12 nt, Human adenovirus E
gauacgggugau

SEQ ID NO: 3934815 - RNA, 14 nt, Human adenovirus E
gauaggagcuccug

SEQ ID NO: 3934816 - RNA, 16 nt, Human adenovirus E
gauaggagcuccugga

SEQ ID NO: 3934817 - RNA, 15 nt, Human adenovirus E
gaucaccagcuggcc

SEQ ID NO: 3934818 - RNA, 20 nt, Human adenovirus E
gaucagcaucaucugggccu

SEQ ID NO: 3934819 - RNA, 14 nt, Human adenovirus E
gauccacggccagg

SEQ ID NO: 3934820 - RNA, 16 nt, Human adenovirus E
gauccacgggaucuga

SEQ ID NO: 3934821 - RNA, 18 nt, Human adenovirus E
gauccagcagaccuccuc

SEQ ID NO: 3934822 - RNA, 17 nt, Human adenovirus E
gaucccgccccaguacg

SEQ ID NO: 3934823 - RNA, 17 nt, Human adenovirus E
gaucgaccagguggugg

SEQ ID NO: 3934824 - RNA, 20 nt, Human adenovirus E
gaucgaggacgucagcggcg

SEQ ID NO: 3934825 - RNA, 20 nt, Human adenovirus E
gaucggguuggucauccugg

SEQ ID NO: 3934826 - RNA, 14 nt, Human adenovirus E
gaucucgcucaggu

SEQ ID NO: 3934827 - RNA, 16 nt, Human adenovirus E
gaucugacacuacaga

SEQ ID NO: 3934828 - RNA, 15 nt, Human adenovirus E
gaugcaccuguggga

SEQ ID NO: 3934829 - RNA, 13 nt, Human adenovirus E
gaugcagcaggcg

SEQ ID NO: 3934830 - RNA, 12 nt, Human adenovirus E
gaugcaggggcg

SEQ ID NO: 3934831 - RNA, 17 nt, Human adenovirus E
gaugcccacggcccuca

SEQ ID NO: 3934832 - RNA, 14 nt, Human adenovirus E
gaugccgggcagga

SEQ ID NO: 3934833 - RNA, 23 nt, Human adenovirus E
gaugcgcugcucgaccgcaccga

SEQ ID NO: 3934834 - RNA, 22 nt, Human adenovirus E
gaugcggcccaugagcugcgag

SEQ ID NO: 3934835 - RNA, 14 nt, Human adenovirus E
gauggccacgggca

SEQ ID NO: 3934836 - RNA, 20 nt, Human adenovirus E
gauggugaagaugccgggca

SEQ ID NO: 3934837 - RNA, 20 nt, Human adenovirus E
gauuccaagagaagccccug

SEQ ID NO: 3934838 - RNA, 23 nt, Human adenovirus E
gauucccgaaccccaccacccag

SEQ ID NO: 3934839 - RNA, 23 nt, Human adenovirus E
gauuucgaggcggacgagcugac

SEQ ID NO: 3934840 - RNA, 15 nt, Human adenovirus E
gcaacaacagccccc

SEQ ID NO: 3934841 - RNA, 15 nt, Human adenovirus E
gcaaccaccccugcc

SEQ ID NO: 3934842 - RNA, 13 nt, Human adenovirus E
gcaaccugcuggg

SEQ ID NO: 3934843 - RNA, 14 nt, Human adenovirus E
gcaacgcugcacgg

SEQ ID NO: 3934844 - RNA, 15 nt, Human adenovirus E
gcaacuuccugacca

SEQ ID NO: 3934845 - RNA, 17 nt, Human adenovirus E
gcaagacagucuggagg

SEQ ID NO: 3934846 - RNA, 18 nt, Human adenovirus E
gcaagaccaccacucgcc

SEQ ID NO: 3934847 - RNA, 15 nt, Human adenovirus E
gcaagcgccgcagca

SEQ ID NO: 3934848 - RNA, 13 nt, Human adenovirus E
gcaagcuccugca

SEQ ID NO: 3934849 - RNA, 20 nt, Human adenovirus E
gcaaggaggaugcagcagcu

SEQ ID NO: 3934850 - RNA, 16 nt, Human adenovirus E
gcacaaaauucucagg

SEQ ID NO: 3934851 - RNA, 11 nt, Human adenovirus E
gcacaggcagc

SEQ ID NO: 3934852 - RNA, 21 nt, Human adenovirus E
gcaccauggaggugcagacgg

SEQ ID NO: 3934853 - RNA, 13 nt, Human adenovirus E
gcacccgcccccc

SEQ ID NO: 3934854 - RNA, 19 nt, Human adenovirus E
gcacccggugcacucccag

SEQ ID NO: 3934855 - RNA, 23 nt, Human adenovirus E
gcaccucggcccgguuguugaug

SEQ ID NO: 3934856 - RNA, 21 nt, Human adenovirus E
gcaccugugggaccugcugga

SEQ ID NO: 3934857 - RNA, 15 nt, Human adenovirus E
gcacgaagcccugca

SEQ ID NO: 3934858 - RNA, 16 nt, Human adenovirus E
gcacgaagcccugcag

SEQ ID NO: 3934859 - RNA, 16 nt, Human adenovirus E
gcacgacaggcagcgg

SEQ ID NO: 3934860 - RNA, 12 nt, Human adenovirus E
gcacggccagcg

SEQ ID NO: 3934861 - RNA, 17 nt, Human adenovirus E
gcacguggacgagcaga

SEQ ID NO: 3934862 - RNA, 24 nt, Human adenovirus E
gcacguggacgagcagaccuacca

SEQ ID NO: 3934863 - RNA, 14 nt, Human adenovirus E
gcagaacagggcaa

SEQ ID NO: 3934864 - RNA, 17 nt, Human adenovirus E
gcagaccaaccuggacc

SEQ ID NO: 3934865 - RNA, 18 nt, Human adenovirus E
gcagagcaucguggugca

SEQ ID NO: 3934866 - RNA, 14 nt, Human adenovirus E
gcagcacuggaaca

SEQ ID NO: 3934867 - RNA, 20 nt, Human adenovirus E
gcagcagaaaaagaccagca

SEQ ID NO: 3934868 - RNA, 22 nt, Human adenovirus E
gcagcagaggaggcagcaaagu

SEQ ID NO: 3934869 - RNA, 14 nt, Human adenovirus E
gcagccccaggcca

SEQ ID NO: 3934870 - RNA, 16 nt, Human adenovirus E
gcagccccggaugauc

SEQ ID NO: 3934871 - RNA, 13 nt, Human adenovirus E
gcagcgggcccug

SEQ ID NO: 3934872 - RNA, 18 nt, Human adenovirus E
gcagcugaagcaacugca

SEQ ID NO: 3934873 - RNA, 14 nt, Human adenovirus E
gcagcugggacuug

SEQ ID NO: 3934874 - RNA, 17 nt, Human adenovirus E
gcaggaccaccagcacg

SEQ ID NO: 3934875 - RNA, 18 nt, Human adenovirus E
gcagggccaggcgcacgg

SEQ ID NO: 3934876 - RNA, 14 nt, Human adenovirus E
gcagggccuguggg

SEQ ID NO: 3934877 - RNA, 16 nt, Human adenovirus E
gcagggccuguggggc

SEQ ID NO: 3934878 - RNA, 14 nt, Human adenovirus E
gcagggcgcccagc

SEQ ID NO: 3934879 - RNA, 12 nt, Human adenovirus E
gcaggggcgcag

SEQ ID NO: 3934880 - RNA, 16 nt, Human adenovirus E
gcaggggcgcagggca

SEQ ID NO: 3934881 - RNA, 16 nt, Human adenovirus E
gcaggggguccagcau

SEQ ID NO: 3934882 - RNA, 20 nt, Human adenovirus E
gcagguccagaccucggcgc

SEQ ID NO: 3934883 - RNA, 23 nt, Human adenovirus E
gcagguccagaccucggcgcgag

SEQ ID NO: 3934884 - RNA, 18 nt, Human adenovirus E
gcagucauaaucaucugc

SEQ ID NO: 3934885 - RNA, 14 nt, Human adenovirus E
gcagugggcgcaga

SEQ ID NO: 3934886 - RNA, 21 nt, Human adenovirus E
gcaguuauuuuuccuccaccc

SEQ ID NO: 3934887 - RNA, 16 nt, Human adenovirus E
gcauagucugccugcu

SEQ ID NO: 3934888 - RNA, 13 nt, Human adenovirus E
gcaucagcuggaa

SEQ ID NO: 3934889 - RNA, 17 nt, Human adenovirus E
gcaucaucugggccugg

SEQ ID NO: 3934890 - RNA, 14 nt, Human adenovirus E
gcaucccagcugga

SEQ ID NO: 3934891 - RNA, 22 nt, Human adenovirus E
  misc_feature (8)..(8): n is a, c, g, or u
gcaucgcnuaccugcgccacca

SEQ ID NO: 3934892 - RNA, 19 nt, Human adenovirus E
gcaucguggugcaggagcg

SEQ ID NO: 3934893 - RNA, 18 nt, Human adenovirus E
gcaucucgauccagcaga

SEQ ID NO: 3934894 - RNA, 13 nt, Human adenovirus E
gcaucugcugcug

SEQ ID NO: 3934895 - RNA, 14 nt, Human adenovirus E
gcaucugcugcugu

SEQ ID NO: 3934896 - RNA, 20 nt, Human adenovirus E
gcaugaauuggcucagcgcc

SEQ ID NO: 3934897 - RNA, 21 nt, Human adenovirus E
gcaugcggaucucgcucaggu

SEQ ID NO: 3934898 - RNA, 14 nt, Human adenovirus E
gcaugcggggggag

SEQ ID NO: 3934899 - RNA, 17 nt, Human adenovirus E
gcaugcuggcuagaccc

SEQ ID NO: 3934900 - RNA, 21 nt, Human adenovirus E
gcaugucccgcccgcggcgag

SEQ ID NO: 3934901 - RNA, 18 nt, Human adenovirus E
gcauguucauuuuugcuu

SEQ ID NO: 3934902 - RNA, 21 nt, Human adenovirus E
gcauguugaucaucgccuugu

SEQ ID NO: 3934903 - RNA, 18 nt, Human adenovirus E
gcauucuuaagcacaccc

SEQ ID NO: 3934904 - RNA, 19 nt, Human adenovirus E
gccaaccggcucucggcca

SEQ ID NO: 3934905 - RNA, 16 nt, Human adenovirus E
gccaacgccaguccag

SEQ ID NO: 3934906 - RNA, 20 nt, Human adenovirus E
gccaacgugccccggggcca

SEQ ID NO: 3934907 - RNA, 13 nt, Human adenovirus E
gccacaccacagc

SEQ ID NO: 3934908 - RNA, 16 nt, Human adenovirus E
gccacaccuggcagac

SEQ ID NO: 3934909 - RNA, 14 nt, Human adenovirus E
gccacucucucaga

SEQ ID NO: 3934910 - RNA, 16 nt, Human adenovirus E
gccagacccagccaga

SEQ ID NO: 3934911 - RNA, 20 nt, Human adenovirus E
gccagagcaggaagcagaga

SEQ ID NO: 3934912 - RNA, 12 nt, Human adenovirus E
gccagaugaugc

SEQ ID NO: 3934913 - RNA, 14 nt, Human adenovirus E
gccagaugaugcaa

SEQ ID NO: 3934914 - RNA, 17 nt, Human adenovirus E
gccagcacccagaccau

SEQ ID NO: 3934915 - RNA, 18 nt, Human adenovirus E
gccagcuccuccucggcc

SEQ ID NO: 3934916 - RNA, 21 nt, Human adenovirus E
gccagcugaguuuucagcccg

SEQ ID NO: 3934917 - RNA, 15 nt, Human adenovirus E
gccaggccugcaaga

SEQ ID NO: 3934918 - RNA, 12 nt, Human adenovirus E
gccaggcgcacg

SEQ ID NO: 3934919 - RNA, 21 nt, Human adenovirus E
gccaggcgcacgggacgcagg

SEQ ID NO: 3934920 - RNA, 16 nt, Human adenovirus E
gccaggguccgguccu

SEQ ID NO: 3934921 - RNA, 22 nt, Human adenovirus E
gccaucacaccuuccaccugau

SEQ ID NO: 3934922 - RNA, 18 nt, Human adenovirus E
gccauguucagggcggcc

SEQ ID NO: 3934923 - RNA, 17 nt, Human adenovirus E
gcccacggcccucagca

SEQ ID NO: 3934924 - RNA, 15 nt, Human adenovirus E
gcccacuccgagacg

SEQ ID NO: 3934925 - RNA, 21 nt, Human adenovirus E
gcccacuuagcauuaccacac

SEQ ID NO: 3934926 - RNA, 22 nt, Human adenovirus E
gcccagcaagauguacggaggc

SEQ ID NO: 3934927 - RNA, 20 nt, Human adenovirus E
gcccagcacacgcccagaaa

SEQ ID NO: 3934928 - RNA, 14 nt, Human adenovirus E
gcccagcaccagca

SEQ ID NO: 3934929 - RNA, 20 nt, Human adenovirus E
gcccagccccgccaccuccg

SEQ ID NO: 3934930 - RNA, 19 nt, Human adenovirus E
gcccaugagcugcgagaag

SEQ ID NO: 3934931 - RNA, 17 nt, Human adenovirus E
gucauggaccaggugcu

SEQ ID NO: 3934932 - RNA, 20 nt, Human adenovirus E
guccacacugguggccaccu

SEQ ID NO: 3934933 - RNA, 20 nt, Human adenovirus E
guccaccuuuuccaggguau

SEQ ID NO: 3934934 - RNA, 20 nt, Human adenovirus E
guccagagauccacggccag

SEQ ID NO: 3934935 - RNA, 16 nt, Human adenovirus E
guccagcuggcgggcg

SEQ ID NO: 3934936 - RNA, 20 nt, Human adenovirus E
guccccagaguuuggaagag

SEQ ID NO: 3934937 - RNA, 17 nt, Human adenovirus E
gucccccacccaguccc

SEQ ID NO: 3934938 - RNA, 19 nt, Human adenovirus E
gucccccgaguuguccugg

SEQ ID NO: 3934939 - RNA, 18 nt, Human adenovirus E
guccggguggaugaugac

SEQ ID NO: 3934940 - RNA, 22 nt, Human adenovirus E
guccgguccuuccagggucgca

SEQ ID NO: 3934941 - RNA, 14 nt, Human adenovirus E
guccucgcggggcc

SEQ ID NO: 3934942 - RNA, 17 nt, Human adenovirus E
guccuggcgggggcaca

SEQ ID NO: 3934943 - RNA, 23 nt, Human adenovirus E
gucgagggucuccuggaugaugu

SEQ ID NO: 3934944 - RNA, 16 nt, Human adenovirus E
gucgaugggcucgccu

SEQ ID NO: 3934945 - RNA, 12 nt, Human adenovirus E
gucgccagggcu

SEQ ID NO: 3934946 - RNA, 13 nt, Human adenovirus E
gucgcccagcgcc

SEQ ID NO: 3934947 - RNA, 15 nt, Human adenovirus E
gucggccaugggcau

SEQ ID NO: 3934948 - RNA, 12 nt, Human adenovirus E
gucgggggcagg

SEQ ID NO: 3934949 - RNA, 15 nt, Human adenovirus E
gucguccccggagag

SEQ ID NO: 3934950 - RNA, 12 nt, Human adenovirus E
gucuaccucuac

SEQ ID NO: 3934951 - RNA, 20 nt, Human adenovirus E
gucuaccucuaccucugcca

SEQ ID NO: 3934952 - RNA, 18 nt, Human adenovirus E
gucuccacguuccacaca

SEQ ID NO: 3934953 - RNA, 19 nt, Human adenovirus E
gucucggugacggcgcgcc

SEQ ID NO: 3934954 - RNA, 14 nt, Human adenovirus E
gucucuucagaugg

SEQ ID NO: 3934955 - RNA, 23 nt, Human adenovirus E
gucugcccgcaggcgggacagag

SEQ ID NO: 3934956 - RNA, 14 nt, Human adenovirus E
gucugccugcuuau

SEQ ID NO: 3934957 - RNA, 17 nt, Human adenovirus E
gucugcgaccugacgga

SEQ ID NO: 3934958 - RNA, 21 nt, Human adenovirus E
gugaacgaguucauguacagc

SEQ ID NO: 3934959 - RNA, 14 nt, Human adenovirus E
gugaagaugccggg

SEQ ID NO: 3934960 - RNA, 20 nt, Human adenovirus E
gugaaggggugcgcgccggg

SEQ ID NO: 3934961 - RNA, 16 nt, Human adenovirus E
gugacccugggccuga

SEQ ID NO: 3934962 - RNA, 16 nt, Human adenovirus E
gugaccgaggugcccc

SEQ ID NO: 3934963 - RNA, 18 nt, Human adenovirus E
gugaccguggagcuggag

SEQ ID NO: 3934964 - RNA, 17 nt, Human adenovirus E
gugagcucgucgggguc

SEQ ID NO: 3934965 - RNA, 13 nt, Human adenovirus E
gugaucgaggacg

SEQ ID NO: 3934966 - RNA, 23 nt, Human adenovirus E
gugcaaccggugcugagacccgg

SEQ ID NO: 3934967 - RNA, 20 nt, Human adenovirus E
gugcagcagaagcgugggcc

SEQ ID NO: 3934968 - RNA, 21 nt, Human adenovirus E
gugcaggcaccgcagcuugcc

SEQ ID NO: 3934969 - RNA, 13 nt, Human adenovirus E
gugcauggacagg

SEQ ID NO: 3934970 - RNA, 14 nt, Human adenovirus E
gugcccgaggccgc

SEQ ID NO: 3934971 - RNA, 18 nt, Human adenovirus E
gugcccgugcgcacccgc

SEQ ID NO: 3934972 - RNA, 24 nt, Human adenovirus E
gugcggcgggcgcagcagcgcaug

SEQ ID NO: 3934973 - RNA, 15 nt, Human adenovirus E
gugcugacccugagc

SEQ ID NO: 3934974 - RNA, 17 nt, Human adenovirus E
gugcugcacaccacccu

SEQ ID NO: 3934975 - RNA, 18 nt, Human adenovirus E
gugcugcacaccacccug

SEQ ID NO: 3934976 - RNA, 19 nt, Human adenovirus E
guggaccucgauuccucgg

SEQ ID NO: 3934977 - RNA, 11 nt, Human adenovirus E
guggacgccgu

SEQ ID NO: 3934978 - RNA, 14 nt, Human adenovirus E
guggagcuggagug

SEQ ID NO: 3934979 - RNA, 21 nt, Human adenovirus E
guggcacgacaggcagcgggg

SEQ ID NO: 3934980 - RNA, 19 nt, Human adenovirus E
guggccagaucguccaggg

SEQ ID NO: 3934981 - RNA, 14 nt, Human adenovirus E
guggcggugcaggc

SEQ ID NO: 3934982 - RNA, 18 nt, Human adenovirus E
gugucgagccugcugacg

SEQ ID NO: 3934983 - RNA, 11 nt, Human adenovirus E
guguugaaauu

SEQ ID NO: 3934984 - RNA, 20 nt, Human adenovirus E
guguugcacaauaucuuuga

SEQ ID NO: 3934985 - RNA, 21 nt, Human adenovirus E
guuacugacgccagacgccgc

SEQ ID NO: 3934986 - RNA, 18 nt, Human adenovirus E
guuauuuuuccuccaccc

SEQ ID NO: 3934987 - RNA, 14 nt, Human adenovirus E
guucagggaggcgc

SEQ ID NO: 3934988 - RNA, 20 nt, Human adenovirus E
guucagggaggcgcugcuga

SEQ ID NO: 3934989 - RNA, 21 nt, Human adenovirus E
guucaucaauaaacugaugga

SEQ ID NO: 3934990 - RNA, 13 nt, Human adenovirus E
guucauuuuugcu

SEQ ID NO: 3934991 - RNA, 20 nt, Human adenovirus E
guucauuuuugcuugcugcu

SEQ ID NO: 3934992 - RNA, 16 nt, Human adenovirus E
guuccggagcagcugg

SEQ ID NO: 3934993 - RNA, 16 nt, Human adenovirus E
guuccugaugcaggag

SEQ ID NO: 3934994 - RNA, 23 nt, Human adenovirus E
guuccugugggacgauguggaca

SEQ ID NO: 3934995 - RNA, 14 nt, Human adenovirus E
guucuacgaggacc

SEQ ID NO: 3934996 - RNA, 19 nt, Human adenovirus E
guucuuuuaacagaacauu

SEQ ID NO: 3934997 - RNA, 21 nt, Human adenovirus E
guugagggagagacagcugcc

SEQ ID NO: 3934998 - RNA, 20 nt, Human adenovirus E
guugaugaccugggcggcga

SEQ ID NO: 3934999 - RNA, 19 nt, Human adenovirus E
guugauuuuaacacagagu

SEQ ID NO: 3935000 - RNA, 18 nt, Human adenovirus E
guugcagggcgcccagca

SEQ ID NO: 3935001 - RNA, 19 nt, Human adenovirus E
guuggacuugggugggagu

SEQ ID NO: 3935002 - RNA, 23 nt, Human adenovirus E
guuggguuucggugacggcgggg

SEQ ID NO: 3935003 - RNA, 18 nt, Human adenovirus E
guugucgagcuugguggc

SEQ ID NO: 3935004 - RNA, 12 nt, Human adenovirus E
guuguuggccag

SEQ ID NO: 3935005 - RNA, 17 nt, Human adenovirus E
uaaacuuucgccagcuu

SEQ ID NO: 3935006 - RNA, 16 nt, Human adenovirus E
uaaccgccccgccgcc

SEQ ID NO: 3935007 - RNA, 21 nt, Human adenovirus E
uaaccgccccgccgcccagcc

SEQ ID NO: 3935008 - RNA, 22 nt, Human adenovirus E
uaaccggcggagaugacugacc

SEQ ID NO: 3935009 - RNA, 17 nt, Human adenovirus E
uaaccuguccacccgcu

SEQ ID NO: 3935010 - RNA, 21 nt, Human adenovirus E
uacacauacaaagccucagcg

SEQ ID NO: 3935011 - RNA, 16 nt, Human adenovirus E
uacacaugaucagcgg

SEQ ID NO: 3935012 - RNA, 13 nt, Human adenovirus E
uacaccaacuuca

SEQ ID NO: 3935013 - RNA, 18 nt, Human adenovirus E
uacacccccggaacauug

SEQ ID NO: 3935014 - RNA, 13 nt, Human adenovirus E
uacaccuguuacc

SEQ ID NO: 3935015 - RNA, 18 nt, Human adenovirus E
uaccacaucacccucugg

SEQ ID NO: 3935016 - RNA, 22 nt, Human adenovirus E
uaccagauccucagguaaauca

SEQ ID NO: 3935017 - RNA, 22 nt, Human adenovirus E
uaccgcggucauaccagcagcc

SEQ ID NO: 3935018 - RNA, 11 nt, Human adenovirus E
uaccuccaccu

SEQ ID NO: 3935019 - RNA, 17 nt, Human adenovirus E
uaccucugccacaccug

SEQ ID NO: 3935020 - RNA, 21 nt, Human adenovirus E
uaccucugccacaccuggcag

SEQ ID NO: 3935021 - RNA, 15 nt, Human adenovirus E
uaccugcgccaccac

SEQ ID NO: 3935022 - RNA, 20 nt, Human adenovirus E
uaccugcugcgccuggccaa

SEQ ID NO: 3935023 - RNA, 20 nt, Human adenovirus E
uaccuggcgccuacggaggg

SEQ ID NO: 3935024 - RNA, 23 nt, Human adenovirus E
uacgcacgucuucaaccgcuucc

SEQ ID NO: 3935025 - RNA, 21 nt, Human adenovirus E
uacucacaccacacacacaga

SEQ ID NO: 3935026 - RNA, 14 nt, Human adenovirus E
uacugaucugauac

SEQ ID NO: 3935027 - RNA, 15 nt, Human adenovirus E
uacugaucugauacu

SEQ ID NO: 3935028 - RNA, 22 nt, Human adenovirus E
uacuggccacugugucagucuu

SEQ ID NO: 3935029 - RNA, 16 nt, Human adenovirus E
uacuucuuccagacca

SEQ ID NO: 3935030 - RNA, 20 nt, Human adenovirus E
uacuugcuguagcagaaccu

SEQ ID NO: 3935031 - RNA, 16 nt, Human adenovirus E
uagagcuugggggcga

SEQ ID NO: 3935032 - RNA, 17 nt, Human adenovirus E
uagcaagaacaggagcu

SEQ ID NO: 3935033 - RNA, 16 nt, Human adenovirus E
uagcauguagaacugg

SEQ ID NO: 3935034 - RNA, 16 nt, Human adenovirus E
uagcauuaccacacag

SEQ ID NO: 3935035 - RNA, 17 nt, Human adenovirus E
uagcauuaccacacaga

SEQ ID NO: 3935036 - RNA, 21 nt, Human adenovirus E
uagccgccuccacccaucauc

SEQ ID NO: 3935037 - RNA, 14 nt, Human adenovirus E
uagcuaccgccucu

SEQ ID NO: 3935038 - RNA, 19 nt, Human adenovirus E
uagcucggcuucgacaccu

SEQ ID NO: 3935039 - RNA, 16 nt, Human adenovirus E
uagcugaagcccacgg

SEQ ID NO: 3935040 - RNA, 20 nt, Human adenovirus E
uagcuuuauuaaagauguga

SEQ ID NO: 3935041 - RNA, 14 nt, Human adenovirus E
uagucauacagcuc

SEQ ID NO: 3935042 - RNA, 19 nt, Human adenovirus E
uaucaugcaacuuggaagg

SEQ ID NO: 3935043 - RNA, 15 nt, Human adenovirus E
uaucuuugaggagga

SEQ ID NO: 3935044 - RNA, 19 nt, Human adenovirus E
uaugaggccgagccacagc

SEQ ID NO: 3935045 - RNA, 22 nt, Human adenovirus E
uaugccaucuuccagcagaguc

SEQ ID NO: 3935046 - RNA, 14 nt, Human adenovirus E
uaugcgcaggagca

SEQ ID NO: 3935047 - RNA, 24 nt, Human adenovirus E
gacggccuuguaggcgcagcagcc

SEQ ID NO: 3935048 - RNA, 14 nt, Human adenovirus E
gacggcgacuaccu

SEQ ID NO: 3935049 - RNA, 12 nt, Human adenovirus E
gacggcggccug

SEQ ID NO: 3935050 - RNA, 19 nt, Human adenovirus E
gacgggcucucgccgccgc

SEQ ID NO: 3935051 - RNA, 16 nt, Human adenovirus E
gacggguuccuguggg

SEQ ID NO: 3935052 - RNA, 19 nt, Human adenovirus E
gacguaugcgcaggagcac

SEQ ID NO: 3935053 - RNA, 14 nt, Human adenovirus E
gacguccagagcgc

SEQ ID NO: 3935054 - RNA, 14 nt, Human adenovirus E
gacuaccuccaccu

SEQ ID NO: 3935055 - RNA, 13 nt, Human adenovirus E
gacucccaccugc

SEQ ID NO: 3935056 - RNA, 20 nt, Human adenovirus E
gacuccgcgcaaggaccuga

SEQ ID NO: 3935057 - RNA, 13 nt, Human adenovirus E
gacugggcggugc

SEQ ID NO: 3935058 - RNA, 12 nt, Human adenovirus E
gagaaaagcaag

SEQ ID NO: 3935059 - RNA, 22 nt, Human adenovirus E
gagaaccgccuggggcagaacg

SEQ ID NO: 3935060 - RNA, 15 nt, Human adenovirus E
gagaccgagcuccag

SEQ ID NO: 3935061 - RNA, 13 nt, Human adenovirus E
gagacgaugggca

SEQ ID NO: 3935062 - RNA, 14 nt, Human adenovirus E
gagacgaugggcag

SEQ ID NO: 3935063 - RNA, 20 nt, Human adenovirus E
gagaguuucaugaccagcau

SEQ ID NO: 3935064 - RNA, 13 nt, Human adenovirus E
gagauccacggcc

SEQ ID NO: 3935065 - RNA, 19 nt, Human adenovirus E
gagaugcggcccaugagcu

SEQ ID NO: 3935066 - RNA, 13 nt, Human adenovirus E
gagauggaggaag

SEQ ID NO: 3935067 - RNA, 14 nt, Human adenovirus E
gagcacgaggagga

SEQ ID NO: 3935068 - RNA, 19 nt, Human adenovirus E
gagcagaccuaccaggaga

SEQ ID NO: 3935069 - RNA, 20 nt, Human adenovirus E
gagcaugacggcgacuaccu

SEQ ID NO: 3935070 - RNA, 18 nt, Human adenovirus E
gagcaugagcaccacagc

SEQ ID NO: 3935071 - RNA, 20 nt, Human adenovirus E
gagcauuacucucaucaagu

SEQ ID NO: 3935072 - RNA, 15 nt, Human adenovirus E
gagccacaccacagc

SEQ ID NO: 3935073 - RNA, 15 nt, Human adenovirus E
gagccacugcuaccu

SEQ ID NO: 3935074 - RNA, 13 nt, Human adenovirus E
gagcccgagggcc

SEQ ID NO: 3935075 - RNA, 18 nt, Human adenovirus E
gagccgcgcccugggcca

SEQ ID NO: 3935076 - RNA, 23 nt, Human adenovirus E
gagccggcgcaaacccgggagcu

SEQ ID NO: 3935077 - RNA, 17 nt, Human adenovirus E
gagccggucguccccgg

SEQ ID NO: 3935078 - RNA, 13 nt, Human adenovirus E
gagcgcauccugc

SEQ ID NO: 3935079 - RNA, 15 nt, Human adenovirus E
gagcgccagcaggcg

SEQ ID NO: 3935080 - RNA, 15 nt, Human adenovirus E
gagcgcgagcaagga

SEQ ID NO: 3935081 - RNA, 19 nt, Human adenovirus E
gagcucggagggggggauc

SEQ ID NO: 3935082 - RNA, 22 nt, Human adenovirus E
gagcucuaaccuguccacccgc

SEQ ID NO: 3935083 - RNA, 17 nt, Human adenovirus E
gagcucugcaagcuccu

SEQ ID NO: 3935084 - RNA, 16 nt, Human adenovirus E
gagcugcggcgcggcc

SEQ ID NO: 3935085 - RNA, 24 nt, Human adenovirus E
gagcuugggggcgaggaagacgga

SEQ ID NO: 3935086 - RNA, 16 nt, Human adenovirus E
gaggaagacugggaca

SEQ ID NO: 3935087 - RNA, 13 nt, Human adenovirus E
gaggacccaccgc

SEQ ID NO: 3935088 - RNA, 21 nt, Human adenovirus E
gaggacuacaccaacuucauc

SEQ ID NO: 3935089 - RNA, 19 nt, Human adenovirus E
gaggagacugauggccacg

SEQ ID NO: 3935090 - RNA, 13 nt, Human adenovirus E
gaggagcccgagg

SEQ ID NO: 3935091 - RNA, 22 nt, Human adenovirus E
gaggagcucaaccccggcuucc

SEQ ID NO: 3935092 - RNA, 23 nt, Human adenovirus E
gaggagcucagccgcgccuacga

SEQ ID NO: 3935093 - RNA, 16 nt, Human adenovirus E
gaggagcuggcagugc

SEQ ID NO: 3935094 - RNA, 12 nt, Human adenovirus E
gaggaggagcug

SEQ ID NO: 3935095 - RNA, 17 nt, Human adenovirus E
gaggaggaggcagagga

SEQ ID NO: 3935096 - RNA, 16 nt, Human adenovirus E
gaggaggggggccacc

SEQ ID NO: 3935097 - RNA, 20 nt, Human adenovirus E
gaggaucgcggcgaacgagc

SEQ ID NO: 3935098 - RNA, 16 nt, Human adenovirus E
gaggcagguccagacc

SEQ ID NO: 3935099 - RNA, 12 nt, Human adenovirus E
gaggccagcacc

SEQ ID NO: 3935100 - RNA, 16 nt, Human adenovirus E
gaggccagcacccaga

SEQ ID NO: 3935101 - RNA, 15 nt, Human adenovirus E
gaggccaucggccag

SEQ ID NO: 3935102 - RNA, 16 nt, Human adenovirus E
gaggccaucgugcaga

SEQ ID NO: 3935103 - RNA, 14 nt, Human adenovirus E
gaggccgagccaca

SEQ ID NO: 3935104 - RNA, 19 nt, Human adenovirus E
gaggcguacaugccgcaga

SEQ ID NO: 3935105 - RNA, 15 nt, Human adenovirus E
gaggguucagccgcc

SEQ ID NO: 3935106 - RNA, 18 nt, Human adenovirus E
gagguacaugggcaugag

SEQ ID NO: 3935107 - RNA, 13 nt, Human adenovirus E
gaguaccuggaag

SEQ ID NO: 3935108 - RNA, 14 nt, Human adenovirus E
gaguauggcaccag

SEQ ID NO: 3935109 - RNA, 13 nt, Human adenovirus E
gaguccagcgcgu

SEQ ID NO: 3935110 - RNA, 19 nt, Human adenovirus E
gagucgcggaugaaguggg

SEQ ID NO: 3935111 - RNA, 13 nt, Human adenovirus E
gagucgggggcag

SEQ ID NO: 3935112 - RNA, 16 nt, Human adenovirus E
gaguuggaggagaugg

SEQ ID NO: 3935113 - RNA, 23 nt, Human adenovirus E
gauaccacccgguuguaccuggu

SEQ ID NO: 3935114 - RNA, 15 nt, Human adenovirus E
gauauucuggagcag

SEQ ID NO: 3935115 - RNA, 20 nt, Human adenovirus E
gaucaucgccuugugcaugg

SEQ ID NO: 3935116 - RNA, 12 nt, Human adenovirus E
gauccagcggcg

SEQ ID NO: 3935117 - RNA, 17 nt, Human adenovirus E
gccgccgcgcaucucca

SEQ ID NO: 3935118 - RNA, 19 nt, Human adenovirus E
gccgccgcgcaucuccagg

SEQ ID NO: 3935119 - RNA, 13 nt, Human adenovirus E
gccgccuccaccc

SEQ ID NO: 3935120 - RNA, 20 nt, Human adenovirus E
gccgcgcccugggccaggac

SEQ ID NO: 3935121 - RNA, 16 nt, Human adenovirus E
gccgcggccaaccugg

SEQ ID NO: 3935122 - RNA, 13 nt, Human adenovirus E
gccgcggccgccg

SEQ ID NO: 3935123 - RNA, 12 nt, Human adenovirus E
gccgcggugcuc

SEQ ID NO: 3935124 - RNA, 23 nt, Human adenovirus E
gccgcuccgucaagcugcugcuc

SEQ ID NO: 3935125 - RNA, 13 nt, Human adenovirus E
gccgcuggcuccu

SEQ ID NO: 3935126 - RNA, 16 nt, Human adenovirus E
gccgcuggcuccugga

SEQ ID NO: 3935127 - RNA, 20 nt, Human adenovirus E
gccgcuggcuccuggaccug

SEQ ID NO: 3935128 - RNA, 15 nt, Human adenovirus E
gccgcuuccgcugcu

SEQ ID NO: 3935129 - RNA, 23 nt, Human adenovirus E
gccggacuacuucuuccagacca

SEQ ID NO: 3935130 - RNA, 17 nt, Human adenovirus E
gccggagcggcacccgc

SEQ ID NO: 3935131 - RNA, 14 nt, Human adenovirus E
gccggcgcuucugc

SEQ ID NO: 3935132 - RNA, 20 nt, Human adenovirus E
gccggcgcuucugcccccgc

SEQ ID NO: 3935133 - RNA, 18 nt, Human adenovirus E
gccggcgucgcauggucu

SEQ ID NO: 3935134 - RNA, 18 nt, Human adenovirus E
gccguccucccggaggag

SEQ ID NO: 3935135 - RNA, 13 nt, Human adenovirus E
gccguggcccagc

SEQ ID NO: 3935136 - RNA, 18 nt, Human adenovirus E
gccucaggagugaugaag

SEQ ID NO: 3935137 - RNA, 20 nt, Human adenovirus E
gccucaggagugaugaagau

SEQ ID NO: 3935138 - RNA, 19 nt, Human adenovirus E
gccucaggcugacgcugcg

SEQ ID NO: 3935139 - RNA, 16 nt, Human adenovirus E
gccuccuuggaagagg

SEQ ID NO: 3935140 - RNA, 15 nt, Human adenovirus E
gccucggaccuggcc

SEQ ID NO: 3935141 - RNA, 17 nt, Human adenovirus E
gccucgugcucgggggu

SEQ ID NO: 3935142 - RNA, 19 nt, Human adenovirus E
gccucugggugaaggccac

SEQ ID NO: 3935143 - RNA, 22 nt, Human adenovirus E
gccucuguuaaauuuuugcuuu

SEQ ID NO: 3935144 - RNA, 22 nt, Human adenovirus E
gccugcaagacagucuggagga

SEQ ID NO: 3935145 - RNA, 19 nt, Human adenovirus E
gccugcugacgccgaacuc

SEQ ID NO: 3935146 - RNA, 18 nt, Human adenovirus E
gccugcugggccuuggcu

SEQ ID NO: 3935147 - RNA, 23 nt, Human adenovirus E
gccuggaccgaaagagggugcug

SEQ ID NO: 3935148 - RNA, 14 nt, Human adenovirus E
gccuggcccucuuc

SEQ ID NO: 3935149 - RNA, 20 nt, Human adenovirus E
gccuggccgccggugccgcc

SEQ ID NO: 3935150 - RNA, 23 nt, Human adenovirus E
gccugguggacaagaugagccgc

SEQ ID NO: 3935151 - RNA, 19 nt, Human adenovirus E
gccuguuccugaugcagga

SEQ ID NO: 3935152 - RNA, 22 nt, Human adenovirus E
gccuuagcuuugacaguacagg

SEQ ID NO: 3935153 - RNA, 20 nt, Human adenovirus E
gccuucaccaccugcaucug

SEQ ID NO: 3935154 - RNA, 16 nt, Human adenovirus E
gccuuggcaguacagu

SEQ ID NO: 3935155 - RNA, 19 nt, Human adenovirus E
gccuuguaggcgcagcagc

SEQ ID NO: 3935156 - RNA, 19 nt, Human adenovirus E
gccuuugugcccgcccagg

SEQ ID NO: 3935157 - RNA, 14 nt, Human adenovirus E
gcgaacgcucugca

SEQ ID NO: 3935158 - RNA, 15 nt, Human adenovirus E
gcgaacuccauggcu

SEQ ID NO: 3935159 - RNA, 13 nt, Human adenovirus E
gcgagacgcccag

SEQ ID NO: 3935160 - RNA, 15 nt, Human adenovirus E
gcgagcaaggacaga

SEQ ID NO: 3935161 - RNA, 19 nt, Human adenovirus E
gcgagcagaaggggggcag

SEQ ID NO: 3935162 - RNA, 21 nt, Human adenovirus E
gcgagcugagcgaccaggagc

SEQ ID NO: 3935163 - RNA, 22 nt, Human adenovirus E
gcgaggccaucggccaggcgca

SEQ ID NO: 3935164 - RNA, 13 nt, Human adenovirus E
gcgagggggcgag

SEQ ID NO: 3935165 - RNA, 13 nt, Human adenovirus E
gcgagggugcgcu

SEQ ID NO: 3935166 - RNA, 15 nt, Human adenovirus E
gcgagggugcugccg

SEQ ID NO: 3935167 - RNA, 14 nt, Human adenovirus E
gcgaguaccuggaa

SEQ ID NO: 3935168 - RNA, 16 nt, Human adenovirus E
gcgaugcgggcggcgc

SEQ ID NO: 3935169 - RNA, 17 nt, Human adenovirus E
gcgaugcgggcggcgcu

SEQ ID NO: 3935170 - RNA, 16 nt, Human adenovirus E
gcgauggcggcggcgg

SEQ ID NO: 3935171 - RNA, 22 nt, Human adenovirus E
gcgaugggcccgugggcggcgg

SEQ ID NO: 3935172 - RNA, 19 nt, Human adenovirus E
gcgauguugagcugcacgu

SEQ ID NO: 3935173 - RNA, 23 nt, Human adenovirus E
gcgcaaacccgggagcugaggaa

SEQ ID NO: 3935174 - RNA, 15 nt, Human adenovirus E
gcgccaucagcaagc

SEQ ID NO: 3935175 - RNA, 16 nt, Human adenovirus E
gcgcccgccuaccuga

SEQ ID NO: 3935176 - RNA, 23 nt, Human adenovirus E
gcgccgcagcaguggcagcggcc

SEQ ID NO: 3935177 - RNA, 19 nt, Human adenovirus E
gcgccgcagugggcgcaga

SEQ ID NO: 3935178 - RNA, 14 nt, Human adenovirus E
ggauacggaggcgg

SEQ ID NO: 3935179 - RNA, 19 nt, Human adenovirus E
ggaucagcaguuugggcag

SEQ ID NO: 3935180 - RNA, 15 nt, Human adenovirus E
ggaucagcaucaucu

SEQ ID NO: 3935181 - RNA, 18 nt, Human adenovirus E
ggaucagcaucaucuggg

SEQ ID NO: 3935182 - RNA, 12 nt, Human adenovirus E
ggaucagccccg

SEQ ID NO: 3935183 - RNA, 18 nt, Human adenovirus E
ggaucugaaaaccgcuga

SEQ ID NO: 3935184 - RNA, 11 nt, Human adenovirus E
ggaugagcucg

SEQ ID NO: 3935185 - RNA, 21 nt, Human adenovirus E
ggaugaugauauucuggagca

SEQ ID NO: 3935186 - RNA, 24 nt, Human adenovirus E
ggaugcaugcggggggagaugagg

SEQ ID NO: 3935187 - RNA, 13 nt, Human adenovirus E
ggauggcuggcag

SEQ ID NO: 3935188 - RNA, 17 nt, Human adenovirus E
ggauggcuggcagagcc

SEQ ID NO: 3935189 - RNA, 17 nt, Human adenovirus E
ggaugucaaauuccucc

SEQ ID NO: 3935190 - RNA, 19 nt, Human adenovirus E
ggcaauccucgcacagaac

SEQ ID NO: 3935191 - RNA, 19 nt, Human adenovirus E
ggcaccggagcacccccgc

SEQ ID NO: 3935192 - RNA, 14 nt, Human adenovirus E
ggcacgacaggcag

SEQ ID NO: 3935193 - RNA, 23 nt, Human adenovirus E
ggcacggggaacucuugcaggac

SEQ ID NO: 3935194 - RNA, 17 nt, Human adenovirus E
ggcagaacgugcugcac

SEQ ID NO: 3935195 - RNA, 20 nt, Human adenovirus E
ggcagaggaggacagccugc

SEQ ID NO: 3935196 - RNA, 17 nt, Human adenovirus E
ggcagaggaggaggaga

SEQ ID NO: 3935197 - RNA, 19 nt, Human adenovirus E
ggcagcagugucuggagga

SEQ ID NO: 3935198 - RNA, 22 nt, Human adenovirus E
ggcagcagugucuggaggagca

SEQ ID NO: 3935199 - RNA, 21 nt, Human adenovirus E
ggcagggauacaaguccuggc

SEQ ID NO: 3935200 - RNA, 23 nt, Human adenovirus E
ggcagggauacaaguccuggcgg

SEQ ID NO: 3935201 - RNA, 19 nt, Human adenovirus E
ggcagugguggcgggggag

SEQ ID NO: 3935202 - RNA, 23 nt, Human adenovirus E
ggcauacgugcccaagcagaacc

SEQ ID NO: 3935203 - RNA, 22 nt, Human adenovirus E
ggcauucuuaagcacacccuca

SEQ ID NO: 3935204 - RNA, 18 nt, Human adenovirus E
ggcauugucggugugcuu

SEQ ID NO: 3935205 - RNA, 16 nt, Human adenovirus E
ggcauuguuuuuugca

SEQ ID NO: 3935206 - RNA, 22 nt, Human adenovirus E
ggccaccucgccgcgcaggggc

SEQ ID NO: 3935207 - RNA, 20 nt, Human adenovirus E
ggccacgagccggggcagcg

SEQ ID NO: 3935208 - RNA, 21 nt, Human adenovirus E
ggccagaucguccagggcagc

SEQ ID NO: 3935209 - RNA, 22 nt, Human adenovirus E
ggccagaucguccagggcagcu

SEQ ID NO: 3935210 - RNA, 15 nt, Human adenovirus E
ggccagcugcaccac

SEQ ID NO: 3935211 - RNA, 19 nt, Human adenovirus E
ggccaggacgacccgggca

SEQ ID NO: 3935212 - RNA, 13 nt, Human adenovirus E
ggccauccuggag

SEQ ID NO: 3935213 - RNA, 23 nt, Human adenovirus E
ggccccgcagcagucgcugccgc

SEQ ID NO: 3935214 - RNA, 20 nt, Human adenovirus E
ggcccgcuacaacagcacca

SEQ ID NO: 3935215 - RNA, 22 nt, Human adenovirus E
ggcccggaugcaggggcggcag

SEQ ID NO: 3935216 - RNA, 15 nt, Human adenovirus E
ggcccggcaggccac

SEQ ID NO: 3935217 - RNA, 20 nt, Human adenovirus E
ggccgaccccgucaccacca

SEQ ID NO: 3935218 - RNA, 13 nt, Human adenovirus E
ggccgaccucauu

SEQ ID NO: 3935219 - RNA, 19 nt, Human adenovirus E
ggccgagcugucggccugc

SEQ ID NO: 3935220 - RNA, 16 nt, Human adenovirus E
ggccgccagcuccucc

SEQ ID NO: 3935221 - RNA, 15 nt, Human adenovirus E
ggccgccggugccgc

SEQ ID NO: 3935222 - RNA, 19 nt, Human adenovirus E
ggccgccgugagcggggcu

SEQ ID NO: 3935223 - RNA, 18 nt, Human adenovirus E
ggccgcuggcuccuggac

SEQ ID NO: 3935224 - RNA, 17 nt, Human adenovirus E
ggccggagcuguccagg

SEQ ID NO: 3935225 - RNA, 21 nt, Human adenovirus E
ggccugaugcaccugugggac

SEQ ID NO: 3935226 - RNA, 15 nt, Human adenovirus E
ggccugcaaccccca

SEQ ID NO: 3935227 - RNA, 17 nt, Human adenovirus E
ggccugcaacccccagc

SEQ ID NO: 3935228 - RNA, 18 nt, Human adenovirus E
ggccugcgcgcgcccagc

SEQ ID NO: 3935229 - RNA, 21 nt, Human adenovirus E
ggccugcgcgcgcccagcaag

SEQ ID NO: 3935230 - RNA, 21 nt, Human adenovirus E
ggccugcgucgccggcggcgc

SEQ ID NO: 3935231 - RNA, 23 nt, Human adenovirus E
ggccuguuccugaugcaggaggg

SEQ ID NO: 3935232 - RNA, 19 nt, Human adenovirus E
ggccuuggaggcggcggca

SEQ ID NO: 3935233 - RNA, 17 nt, Human adenovirus E
ggcgaagacgcgcgccg

SEQ ID NO: 3935234 - RNA, 20 nt, Human adenovirus E
ggcgagaucgagggcgagcu

SEQ ID NO: 3935235 - RNA, 13 nt, Human adenovirus E
ggcgagggccugc

SEQ ID NO: 3935236 - RNA, 17 nt, Human adenovirus E
ggcgaguaccuggaaga

SEQ ID NO: 3935237 - RNA, 14 nt, Human adenovirus E
ggcgauccccggca

SEQ ID NO: 3935238 - RNA, 22 nt, Human adenovirus E
ggcgcaaguacggcgcggccag

SEQ ID NO: 3935239 - RNA, 20 nt, Human adenovirus E
ggcgcacgggacgcagggcc

SEQ ID NO: 3935240 - RNA, 22 nt, Human adenovirus E
ggcgcccugcgcgucggccagg

SEQ ID NO: 3935241 - RNA, 21 nt, Human adenovirus E
ggcgcgacuacauccgcgacu

SEQ ID NO: 3935242 - RNA, 15 nt, Human adenovirus E
ggcgcggaggaagga

SEQ ID NO: 3935243 - RNA, 17 nt, Human adenovirus E
ggcgcugcagagccagc

SEQ ID NO: 3935244 - RNA, 22 nt, Human adenovirus E
ggcggcagaacggggugcugga

SEQ ID NO: 3935245 - RNA, 20 nt, Human adenovirus E
ggcggccuugcgcagggagg

SEQ ID NO: 3935246 - RNA, 17 nt, Human adenovirus E
ggcggcgauguugagcu

SEQ ID NO: 3935247 - RNA, 17 nt, Human adenovirus E
ggcgggggagaugagcu

SEQ ID NO: 3935248 - RNA, 22 nt, Human adenovirus E
ggcgggggagaugagcugggcc

SEQ ID NO: 3935249 - RNA, 19 nt, Human adenovirus E
ggcgugcgcuccuggacgc

SEQ ID NO: 3935250 - RNA, 17 nt, Human adenovirus E
ggcuaccgcggcacgcg

SEQ ID NO: 3935251 - RNA, 21 nt, Human adenovirus E
ggcuccgcgacacggcacgcg

SEQ ID NO: 3935252 - RNA, 15 nt, Human adenovirus E
ggcuccuggaccugg

SEQ ID NO: 3935253 - RNA, 23 nt, Human adenovirus E
ggcucgucugccguagucuggag

SEQ ID NO: 3935254 - RNA, 17 nt, Human adenovirus E
ggcucugaaccugcccc

SEQ ID NO: 3935255 - RNA, 13 nt, Human adenovirus E
ggcuggagccgca

SEQ ID NO: 3935256 - RNA, 15 nt, Human adenovirus E
ggcuggggcgacggg

SEQ ID NO: 3935257 - RNA, 21 nt, Human adenovirus E
ggcuggucgaaaaccgcuccc

SEQ ID NO: 3935258 - RNA, 16 nt, Human adenovirus E
gggacucccucagcau

SEQ ID NO: 3935259 - RNA, 20 nt, Human adenovirus E
gggagcugcggcgcggccug

SEQ ID NO: 3935260 - RNA, 10 nt, Human adenovirus E
gggaggaaca

SEQ ID NO: 3935261 - RNA, 16 nt, Human adenovirus E
gggauagaaagccugg

SEQ ID NO: 3935262 - RNA, 19 nt, Human adenovirus E
gggauccaugguggcgcug

SEQ ID NO: 3935263 - RNA, 22 nt, Human adenovirus E
gggcagacggucgaugaagcgc

SEQ ID NO: 3935264 - RNA, 15 nt, Human adenovirus E
gggcaggaggucggg

SEQ ID NO: 3935265 - RNA, 22 nt, Human adenovirus E
gggcauaaaguugcgagugaug

SEQ ID NO: 3935266 - RNA, 22 nt, Human adenovirus E
gggcaugggcguguggcagcag

SEQ ID NO: 3935267 - RNA, 12 nt, Human adenovirus E
gggccaccccca

SEQ ID NO: 3935268 - RNA, 16 nt, Human adenovirus E
gggccacgagccgggg

SEQ ID NO: 3935269 - RNA, 17 nt, Human adenovirus E
gggccagacccagccag

SEQ ID NO: 3935270 - RNA, 18 nt, Human adenovirus E
gggccagacccagccaga

SEQ ID NO: 3935271 - RNA, 15 nt, Human adenovirus E
gggccauguucaggg

SEQ ID NO: 3935272 - RNA, 16 nt, Human adenovirus E
gggccucgugcucggg

SEQ ID NO: 3935273 - RNA, 12 nt, Human adenovirus E
gggccugugggg

SEQ ID NO: 3935274 - RNA, 13 nt, Human adenovirus E
gggcgcagggcau

SEQ ID NO: 3935275 - RNA, 14 nt, Human adenovirus E
gggcgcccagcagg

SEQ ID NO: 3935276 - RNA, 13 nt, Human adenovirus E
gggcgcggaccug

SEQ ID NO: 3935277 - RNA, 20 nt, Human adenovirus E
gggcggcgcugcagagccag

SEQ ID NO: 3935278 - RNA, 15 nt, Human adenovirus E
gggcguagagcuugg

SEQ ID NO: 3935279 - RNA, 16 nt, Human adenovirus E
gggcguagagcuuggg

SEQ ID NO: 3935280 - RNA, 20 nt, Human adenovirus E
gggcguccagcgcagccagg

SEQ ID NO: 3935281 - RNA, 21 nt, Human adenovirus E
gggcguccagcgcagccaggg

SEQ ID NO: 3935282 - RNA, 14 nt, Human adenovirus E
gggcgucgucgccg

SEQ ID NO: 3935283 - RNA, 17 nt, Human adenovirus E
gggcgucgucgccggag

SEQ ID NO: 3935284 - RNA, 16 nt, Human adenovirus E
gggcgugccccagggc

SEQ ID NO: 3935285 - RNA, 14 nt, Human adenovirus E
gggcuaacucuuau

SEQ ID NO: 3935286 - RNA, 19 nt, Human adenovirus E
gggcucucgccgccgcgac

SEQ ID NO: 3935287 - RNA, 16 nt, Human adenovirus E
gggcuggcgcgccugg

SEQ ID NO: 3935288 - RNA, 14 nt, Human adenovirus E
ggggaacccguccu

SEQ ID NO: 3935289 - RNA, 22 nt, Human adenovirus E
ggggaacccguccugaucugca

SEQ ID NO: 3935290 - RNA, 15 nt, Human adenovirus E
ggggacgagcugcuu

SEQ ID NO: 3935291 - RNA, 20 nt, Human adenovirus E
ggggcaguuucuugagcucc

SEQ ID NO: 3935292 - RNA, 23 nt, Human adenovirus E
ggggccacgagccggggcagcgc

SEQ ID NO: 3935293 - RNA, 23 nt, Human adenovirus E
cccagucauagcaggggcgcagg

SEQ ID NO: 3935294 - RNA, 14 nt, Human adenovirus E
cccauagccagccg

SEQ ID NO: 3935295 - RNA, 19 nt, Human adenovirus E
cccaugaucaagcccagca

SEQ ID NO: 3935296 - RNA, 20 nt, Human adenovirus E
cccaugaucaagcccagcac

SEQ ID NO: 3935297 - RNA, 19 nt, Human adenovirus E
cccaugguggcgcagcuga

SEQ ID NO: 3935298 - RNA, 23 nt, Human adenovirus E
cccauggugggcacgcacccggg

SEQ ID NO: 3935299 - RNA, 17 nt, Human adenovirus E
ccccaccaugcagcuga

SEQ ID NO: 3935300 - RNA, 16 nt, Human adenovirus E
ccccaggaugccccga

SEQ ID NO: 3935301 - RNA, 23 nt, Human adenovirus E
ccccagggauaggagcuccugga

SEQ ID NO: 3935302 - RNA, 20 nt, Human adenovirus E
cccccaaagucaugagcgcg

SEQ ID NO: 3935303 - RNA, 17 nt, Human adenovirus E
cccccagcgguucuggg

SEQ ID NO: 3935304 - RNA, 12 nt, Human adenovirus E
cccccggaacau

SEQ ID NO: 3935305 - RNA, 18 nt, Human adenovirus E
cccccgggaguuccucca

SEQ ID NO: 3935306 - RNA, 13 nt, Human adenovirus E
ccccgcuggaggc

SEQ ID NO: 3935307 - RNA, 18 nt, Human adenovirus E
  misc_feature (6)..(6): n is a, c, g, or u
ccccgnuacuaacaacca

SEQ ID NO: 3935308 - RNA, 21 nt, Human adenovirus E
ccccuccagaacacgcugccc

SEQ ID NO: 3935309 - RNA, 13 nt, Human adenovirus E
cccgaggaagcaa

SEQ ID NO: 3935310 - RNA, 13 nt, Human adenovirus E
cccgagggccgcu

SEQ ID NO: 3935311 - RNA, 15 nt, Human adenovirus E
cccgagggccgcugg

SEQ ID NO: 3935312 - RNA, 22 nt, Human adenovirus E
cccgaugaccggcugcaggugg

SEQ ID NO: 3935313 - RNA, 23 nt, Human adenovirus E
cccgcaucugcaccucacagcuc

SEQ ID NO: 3935314 - RNA, 17 nt, Human adenovirus E
cccgccaacgugccccg

SEQ ID NO: 3935315 - RNA, 23 nt, Human adenovirus E
cccgccaacgugccccggggcca

SEQ ID NO: 3935316 - RNA, 19 nt, Human adenovirus E
cccgccccaguacgcgcuc

SEQ ID NO: 3935317 - RNA, 22 nt, Human adenovirus E
cccgccgcuguggagccacugc

SEQ ID NO: 3935318 - RNA, 20 nt, Human adenovirus E
cccgccucguuccagacgcg

SEQ ID NO: 3935319 - RNA, 14 nt, Human adenovirus E
cccgcgcuccugga

SEQ ID NO: 3935320 - RNA, 18 nt, Human adenovirus E
cccgcgcugauccccauc

SEQ ID NO: 3935321 - RNA, 16 nt, Human adenovirus E
cccgcgcuugcugggc

SEQ ID NO: 3935322 - RNA, 15 nt, Human adenovirus E
cccgcuggaccacgg

SEQ ID NO: 3935323 - RNA, 13 nt, Human adenovirus E
cccggaugcaggg

SEQ ID NO: 3935324 - RNA, 15 nt, Human adenovirus E
cccggcaggccacca

SEQ ID NO: 3935325 - RNA, 17 nt, Human adenovirus E
cccggcggcaccggagc

SEQ ID NO: 3935326 - RNA, 12 nt, Human adenovirus E
cccggcggcgcg

SEQ ID NO: 3935327 - RNA, 23 nt, Human adenovirus E
cccgggaguuccuccacuuccuc

SEQ ID NO: 3935328 - RNA, 19 nt, Human adenovirus E
  misc_feature (8)..(8): n is a, c, g, or u
cccgggcnugggcgugcag

SEQ ID NO: 3935329 - RNA, 16 nt, Human adenovirus E
cccguccucgcggggc

SEQ ID NO: 3935330 - RNA, 22 nt, Human adenovirus E
cccguccucuucccacuccccu

SEQ ID NO: 3935331 - RNA, 14 nt, Human adenovirus E
cccucaaaggccgc

SEQ ID NO: 3935332 - RNA, 20 nt, Human adenovirus E
cccucagcguggaggagcuc

SEQ ID NO: 3935333 - RNA, 20 nt, Human adenovirus E
cccucggacuucgugccgcu

SEQ ID NO: 3935334 - RNA, 17 nt, Human adenovirus E
cccucuaugccaucuuc

SEQ ID NO: 3935335 - RNA, 17 nt, Human adenovirus E
cccucuucccagcucug

SEQ ID NO: 3935336 - RNA, 16 nt, Human adenovirus E
cccugaaagugcugac

SEQ ID NO: 3935337 - RNA, 22 nt, Human adenovirus E
cccugaaagugcugacccugag

SEQ ID NO: 3935338 - RNA, 12 nt, Human adenovirus E
cccuggccugca

SEQ ID NO: 3935339 - RNA, 18 nt, Human adenovirus E
cccugugucgucaccgcc

SEQ ID NO: 3935340 - RNA, 23 nt, Human adenovirus E
ccgaaggcaacuucucggugacc

SEQ ID NO: 3935341 - RNA, 17 nt, Human adenovirus E
ccgaccgggugcuaacg

SEQ ID NO: 3935342 - RNA, 15 nt, Human adenovirus E
ccgacgacagcagcg

SEQ ID NO: 3935343 - RNA, 18 nt, Human adenovirus E
ccgacgagaagcagcagc

SEQ ID NO: 3935344 - RNA, 14 nt, Human adenovirus E
ccgacggcgcgccg

SEQ ID NO: 3935345 - RNA, 15 nt, Human adenovirus E
ccgagaagcuggcgg

SEQ ID NO: 3935346 - RNA, 16 nt, Human adenovirus E
ccgagcagcagcacac

SEQ ID NO: 3935347 - RNA, 13 nt, Human adenovirus E
ccgagcuccagcu

SEQ ID NO: 3935348 - RNA, 13 nt, Human adenovirus E
ccgaggagggcaa

SEQ ID NO: 3935349 - RNA, 14 nt, Human adenovirus E
ccgaggagggcaag

SEQ ID NO: 3935350 - RNA, 16 nt, Human adenovirus E
ccgaggcccuggccac

SEQ ID NO: 3935351 - RNA, 13 nt, Human adenovirus E
ccgaggugcccca

SEQ ID NO: 3935352 - RNA, 13 nt, Human adenovirus E
ccgaggugccccu

SEQ ID NO: 3935353 - RNA, 17 nt, Human adenovirus E
ccgauguagguggggua

SEQ ID NO: 3935354 - RNA, 13 nt, Human adenovirus E
ccgcaacgacagg

SEQ ID NO: 3935355 - RNA, 17 nt, Human adenovirus E
ccgcaagaccaccacuc

SEQ ID NO: 3935356 - RNA, 15 nt, Human adenovirus E
ccgcaccgccgcugc

SEQ ID NO: 3935357 - RNA, 19 nt, Human adenovirus E
ccgcagcaguggcagcggc

SEQ ID NO: 3935358 - RNA, 17 nt, Human adenovirus E
ccgcagcuugcccucgg

SEQ ID NO: 3935359 - RNA, 22 nt, Human adenovirus E
ccgcaguugucuguaucacaag

SEQ ID NO: 3935360 - RNA, 17 nt, Human adenovirus E
  misc_feature (6)..(6): n is a, c, g, or u
ccgcancgugaagacgc

SEQ ID NO: 3935361 - RNA, 17 nt, Human adenovirus E
ccgcaucugcaccucac

SEQ ID NO: 3935362 - RNA, 12 nt, Human adenovirus E
ccgccaccugcu

SEQ ID NO: 3935363 - RNA, 13 nt, Human adenovirus E
ccgcccgcccgcg

SEQ ID NO: 3935364 - RNA, 13 nt, Human adenovirus E
ccgccgcaagacc

SEQ ID NO: 3935365 - RNA, 14 nt, Human adenovirus E
ccgccgcccagccc

SEQ ID NO: 3935366 - RNA, 14 nt, Human adenovirus E
ccgccgcggccgcc

SEQ ID NO: 3935367 - RNA, 11 nt, Human adenovirus E
ccgccgcggcg

SEQ ID NO: 3935368 - RNA, 21 nt, Human adenovirus E
ccgccgcuguggagccacugc

SEQ ID NO: 3935369 - RNA, 19 nt, Human adenovirus E
ccgccggugccgcccagga

SEQ ID NO: 3935370 - RNA, 22 nt, Human adenovirus E
ccgccuaccugauaucgccucc

SEQ ID NO: 3935371 - RNA, 18 nt, Human adenovirus E
ccgccucggaccuggccg

SEQ ID NO: 3935372 - RNA, 21 nt, Human adenovirus E
ccgccuggggcagaacgugcu

SEQ ID NO: 3935373 - RNA, 14 nt, Human adenovirus E
ccgccuucgcguuc

SEQ ID NO: 3935374 - RNA, 15 nt, Human adenovirus E
ccgcgaguccaaccu

SEQ ID NO: 3935375 - RNA, 13 nt, Human adenovirus E
ccgcgcccaccga

SEQ ID NO: 3935376 - RNA, 19 nt, Human adenovirus E
ccgcgcccugggccaggac

SEQ ID NO: 3935377 - RNA, 17 nt, Human adenovirus E
ccgcgccuacgaguuga

SEQ ID NO: 3935378 - RNA, 14 nt, Human adenovirus E
ccgcgcgugccccc

SEQ ID NO: 3935379 - RNA, 17 nt, Human adenovirus E
ccgcgcuugcugggcga

SEQ ID NO: 3935380 - RNA, 19 nt, Human adenovirus E
ccgcggagcacgaggagga

SEQ ID NO: 3935381 - RNA, 22 nt, Human adenovirus E
ccgcggccggcgcgcuccacgg

SEQ ID NO: 3935382 - RNA, 17 nt, Human adenovirus E
ccgcgguaccuggcgcc

SEQ ID NO: 3935383 - RNA, 14 nt, Human adenovirus E
ccgcggugcuccuc

SEQ ID NO: 3935384 - RNA, 12 nt, Human adenovirus E
ccggagcagcug

SEQ ID NO: 3935385 - RNA, 13 nt, Human adenovirus E
ccggagcugucca

SEQ ID NO: 3935386 - RNA, 19 nt, Human adenovirus E
ccggaucuuucccacccuc

SEQ ID NO: 3935387 - RNA, 19 nt, Human adenovirus E
ccggcauugcuuccguggc

SEQ ID NO: 3935388 - RNA, 22 nt, Human adenovirus E
ccggcgcaaacccgggagcuga

SEQ ID NO: 3935389 - RNA, 17 nt, Human adenovirus E
ccggcggcgcucugacu

SEQ ID NO: 3935390 - RNA, 16 nt, Human adenovirus E
ccggcucccccggcca

SEQ ID NO: 3935391 - RNA, 18 nt, Human adenovirus E
ccggcucccccggccacu

SEQ ID NO: 3935392 - RNA, 20 nt, Human adenovirus E
ccgggccuuggaggcggcgg

SEQ ID NO: 3935393 - RNA, 12 nt, Human adenovirus E
cucccaggacau

SEQ ID NO: 3935394 - RNA, 22 nt, Human adenovirus E
cucccaggacauggaauacacc

SEQ ID NO: 3935395 - RNA, 13 nt, Human adenovirus E
cuccccccaggga

SEQ ID NO: 3935396 - RNA, 17 nt, Human adenovirus E
cuccccgggaccuauca

SEQ ID NO: 3935397 - RNA, 21 nt, Human adenovirus E
cuccccucuucccagcucugg

SEQ ID NO: 3935398 - RNA, 23 nt, Human adenovirus E
cucccgccugaaccugacacacc

SEQ ID NO: 3935399 - RNA, 12 nt, Human adenovirus E
cucccucagcau

SEQ ID NO: 3935400 - RNA, 13 nt, Human adenovirus E
cucccuggccugc

SEQ ID NO: 3935401 - RNA, 14 nt, Human adenovirus E
cuccggcaccgcuu

SEQ ID NO: 3935402 - RNA, 17 nt, Human adenovirus E
cuccgucaagcugcugc

SEQ ID NO: 3935403 - RNA, 20 nt, Human adenovirus E
cuccucaggcggcaguggug

SEQ ID NO: 3935404 - RNA, 13 nt, Human adenovirus E
cuccuccucggcc

SEQ ID NO: 3935405 - RNA, 16 nt, Human adenovirus E
cuccugcacaggcagc

SEQ ID NO: 3935406 - RNA, 22 nt, Human adenovirus E
cuccugccgcgccaaccgcacc

SEQ ID NO: 3935407 - RNA, 21 nt, Human adenovirus E
cuccuucagcgcgcgcugccc

SEQ ID NO: 3935408 - RNA, 20 nt, Human adenovirus E
cucgaccgcaccgaggugcc

SEQ ID NO: 3935409 - RNA, 16 nt, Human adenovirus E
cucgacucccaccugc

SEQ ID NO: 3935410 - RNA, 18 nt, Human adenovirus E
cucgacuccguggccugg

SEQ ID NO: 3935411 - RNA, 20 nt, Human adenovirus E
cucgcacuccacgagccagg

SEQ ID NO: 3935412 - RNA, 15 nt, Human adenovirus E
cucgcgccugcugcu

SEQ ID NO: 3935413 - RNA, 17 nt, Human adenovirus E
cucgcgguggggcggcc

SEQ ID NO: 3935414 - RNA, 16 nt, Human adenovirus E
cucggacgucaccugc

SEQ ID NO: 3935415 - RNA, 17 nt, Human adenovirus E
cucggacuucgugccgc

SEQ ID NO: 3935416 - RNA, 17 nt, Human adenovirus E
cucggcauggcccgcgg

SEQ ID NO: 3935417 - RNA, 23 nt, Human adenovirus E
cucggccauccuggaggccgugg

SEQ ID NO: 3935418 - RNA, 15 nt, Human adenovirus E
cucgggaucucgccg

SEQ ID NO: 3935419 - RNA, 21 nt, Human adenovirus E
cucgggccgcgaacgcucugc

SEQ ID NO: 3935420 - RNA, 22 nt, Human adenovirus E
cucguacgagagcgugaugcag

SEQ ID NO: 3935421 - RNA, 20 nt, Human adenovirus E
cucgugcgagggggcgagga

SEQ ID NO: 3935422 - RNA, 15 nt, Human adenovirus E
cucuacggcaucucg

SEQ ID NO: 3935423 - RNA, 16 nt, Human adenovirus E
cucuauguuuaauuuu

SEQ ID NO: 3935424 - RNA, 20 nt, Human adenovirus E
cucucagaccgugcagcaga

SEQ ID NO: 3935425 - RNA, 17 nt, Human adenovirus E
cucucagcgccacugag

SEQ ID NO: 3935426 - RNA, 12 nt, Human adenovirus E
cucucgccgccg

SEQ ID NO: 3935427 - RNA, 13 nt, Human adenovirus E
cucugccacaccu

SEQ ID NO: 3935428 - RNA, 18 nt, Human adenovirus E
cucugccacaccuggcag

SEQ ID NO: 3935429 - RNA, 19 nt, Human adenovirus E
cucuguggaaacaauaaca

SEQ ID NO: 3935430 - RNA, 18 nt, Human adenovirus E
cucuucgggggcagaggc

SEQ ID NO: 3935431 - RNA, 16 nt, Human adenovirus E
cucuucugccucgaug

SEQ ID NO: 3935432 - RNA, 17 nt, Human adenovirus E
cucuucuuccuccucca

SEQ ID NO: 3935433 - RNA, 19 nt, Human adenovirus E
cucuuugccuucaccaccu

SEQ ID NO: 3935434 - RNA, 21 nt, Human adenovirus E
cucuuugccuucaccaccugc

SEQ ID NO: 3935435 - RNA, 15 nt, Human adenovirus E
cugaaaguggagcug

SEQ ID NO: 3935436 - RNA, 16 nt, Human adenovirus E
cugaaccugacacacc

SEQ ID NO: 3935437 - RNA, 15 nt, Human adenovirus E
cugaaccugcccccc

SEQ ID NO: 3935438 - RNA, 21 nt, Human adenovirus E
cugaaccugccccccaaaguc

SEQ ID NO: 3935439 - RNA, 14 nt, Human adenovirus E
cugaacgaaggcuu

SEQ ID NO: 3935440 - RNA, 19 nt, Human adenovirus E
cugaauaucaccgagcccg

SEQ ID NO: 3935441 - RNA, 18 nt, Human adenovirus E
cugaaucuaauacuacca

SEQ ID NO: 3935442 - RNA, 17 nt, Human adenovirus E
cugaccaccguggugca

SEQ ID NO: 3935443 - RNA, 13 nt, Human adenovirus E
cugacgcuccugg

SEQ ID NO: 3935444 - RNA, 22 nt, Human adenovirus E
cugaggggcgugccccagggca

SEQ ID NO: 3935445 - RNA, 20 nt, Human adenovirus E
cugaucugauacuccucaau

SEQ ID NO: 3935446 - RNA, 16 nt, Human adenovirus E
cugcaaacuuccucca

SEQ ID NO: 3935447 - RNA, 22 nt, Human adenovirus E
cugcaagacagucuggaggaag

SEQ ID NO: 3935448 - RNA, 21 nt, Human adenovirus E
cugcaaggagaaggaggagag

SEQ ID NO: 3935449 - RNA, 15 nt, Human adenovirus E
cugcacaccacccug

SEQ ID NO: 3935450 - RNA, 15 nt, Human adenovirus E
cugcacaggcagcaa

SEQ ID NO: 3935451 - RNA, 18 nt, Human adenovirus E
cugcacuaccucuucagg

SEQ ID NO: 3935452 - RNA, 14 nt, Human adenovirus E
cugcacuggcagcc

SEQ ID NO: 3935453 - RNA, 16 nt, Human adenovirus E
cugcacuggcagccca

SEQ ID NO: 3935454 - RNA, 18 nt, Human adenovirus E
cugcacuggcagcccagc

SEQ ID NO: 3935455 - RNA, 20 nt, Human adenovirus E
cugcacuggcagcccagccg

SEQ ID NO: 3935456 - RNA, 21 nt, Human adenovirus E
cugcaggccccggcgggcugc

SEQ ID NO: 3935457 - RNA, 22 nt, Human adenovirus E
cugcaggugguaguugagggag

SEQ ID NO: 3935458 - RNA, 16 nt, Human adenovirus E
cugccacaccuggcag

SEQ ID NO: 3935459 - RNA, 14 nt, Human adenovirus E
cugcccgccaccug

SEQ ID NO: 3935460 - RNA, 19 nt, Human adenovirus E
cugccgcugcgcagcagua

SEQ ID NO: 3935461 - RNA, 17 nt, Human adenovirus E
cugcgacuggccgaccc

SEQ ID NO: 3935462 - RNA, 20 nt, Human adenovirus E
cugcgagcccaacccgcgcc

SEQ ID NO: 3935463 - RNA, 16 nt, Human adenovirus E
cugcgcaacggccugc

SEQ ID NO: 3935464 - RNA, 16 nt, Human adenovirus E
cugcgcgucggccagg

SEQ ID NO: 3935465 - RNA, 18 nt, Human adenovirus E
cugcguuacgugcagcag

SEQ ID NO: 3935466 - RNA, 22 nt, Human adenovirus E
cugcuaccugcugcgccuggcc

SEQ ID NO: 3935467 - RNA, 18 nt, Human adenovirus E
cugcucgaucuccuccuc

SEQ ID NO: 3935468 - RNA, 17 nt, Human adenovirus E
cugcucgggcaucagcu

SEQ ID NO: 3935469 - RNA, 22 nt, Human adenovirus E
cugcugaauaucaccgagcccg

SEQ ID NO: 3935470 - RNA, 14 nt, Human adenovirus E
cugcugcugcuggu

SEQ ID NO: 3935471 - RNA, 22 nt, Human adenovirus E
cugcugcugguggcccccuuca

SEQ ID NO: 3935472 - RNA, 16 nt, Human adenovirus E
cugcuggaggccaucg

SEQ ID NO: 3935473 - RNA, 13 nt, Human adenovirus E
cugcugguggccc

SEQ ID NO: 3935474 - RNA, 19 nt, Human adenovirus E
cugcuguuagugcuccccc

SEQ ID NO: 3935475 - RNA, 14 nt, Human adenovirus E
cugcuugcauuuca

SEQ ID NO: 3935476 - RNA, 11 nt, Human adenovirus E
cuggacagaaa

SEQ ID NO: 3935477 - RNA, 17 nt, Human adenovirus E
cuggaccacugccgccg

SEQ ID NO: 3935478 - RNA, 20 nt, Human adenovirus E
cuggagaagaaucgccaggg

SEQ ID NO: 3935479 - RNA, 15 nt, Human adenovirus E
cuggagcgacaucgg

SEQ ID NO: 3935480 - RNA, 22 nt, Human adenovirus E
cuggagcgacaucggcaccagc

SEQ ID NO: 3935481 - RNA, 19 nt, Human adenovirus E
cuggagcgcguggcccgcu

SEQ ID NO: 3935482 - RNA, 15 nt, Human adenovirus E
cuggaggagcagaac

SEQ ID NO: 3935483 - RNA, 14 nt, Human adenovirus E
cuggccaccuacca

SEQ ID NO: 3935484 - RNA, 23 nt, Human adenovirus E
cuggccgaccccgucaccaccaa

SEQ ID NO: 3935485 - RNA, 16 nt, Human adenovirus E
cuggccguguugcucu

SEQ ID NO: 3935486 - RNA, 21 nt, Human adenovirus E
cuggcgggcggcgccacccug

SEQ ID NO: 3935487 - RNA, 17 nt, Human adenovirus E
cuggcugacguccugca

SEQ ID NO: 3935488 - RNA, 20 nt, Human adenovirus E
cuggcugacguccugcagga

SEQ ID NO: 3935489 - RNA, 18 nt, Human adenovirus E
cugggacagcacucaggc

SEQ ID NO: 3935490 - RNA, 19 nt, Human adenovirus E
cugggauccaugguggcgc

SEQ ID NO: 3935491 - RNA, 16 nt, Human adenovirus E
cugggcauucgcaaga

SEQ ID NO: 3935492 - RNA, 19 nt, Human adenovirus E
cugggcgagguugagcucc

SEQ ID NO: 3935493 - RNA, 20 nt, Human adenovirus E
cuggggguguugucccugcg

SEQ ID NO: 3935494 - RNA, 20 nt, Human adenovirus E
cugggugacaaagagcuguc

SEQ ID NO: 3935495 - RNA, 14 nt, Human adenovirus E
cugguacugcgccc

SEQ ID NO: 3935496 - RNA, 23 nt, Human adenovirus E
cuggugcggcgggcgcagcagcg

SEQ ID NO: 3935497 - RNA, 19 nt, Human adenovirus E
cugguugguggcgcacccg

SEQ ID NO: 3935498 - RNA, 16 nt, Human adenovirus E
cuguaguggugugcau

SEQ ID NO: 3935499 - RNA, 15 nt, Human adenovirus E
cuguaucccacccug

SEQ ID NO: 3935500 - RNA, 18 nt, Human adenovirus E
cuguaucccacccugcau

SEQ ID NO: 3935501 - RNA, 13 nt, Human adenovirus E
cugucggccugcg

SEQ ID NO: 3935502 - RNA, 16 nt, Human adenovirus E
cugugucgucaccgcc

SEQ ID NO: 3935503 - RNA, 18 nt, Human adenovirus E
cuguuccugaugcaggag

SEQ ID NO: 3935504 - RNA, 17 nt, Human adenovirus E
cuuaccgagcagcagca

SEQ ID NO: 3935505 - RNA, 20 nt, Human adenovirus E
cuuagcauuaccacacagac

SEQ ID NO: 3935506 - RNA, 21 nt, Human adenovirus E
cuuaguggugcuguguugcug

SEQ ID NO: 3935507 - RNA, 14 nt, Human adenovirus E
cuucacccccacgg

SEQ ID NO: 3935508 - RNA, 16 nt, Human adenovirus E
cuucagcgcgcgcugc

SEQ ID NO: 3935509 - RNA, 19 nt, Human adenovirus E
cccgucuccugccgcgcca

SEQ ID NO: 3935510 - RNA, 21 nt, Human adenovirus E
cccgugcgcgugcgcgggcac

SEQ ID NO: 3935511 - RNA, 15 nt, Human adenovirus E
cccucagggcccggc

SEQ ID NO: 3935512 - RNA, 16 nt, Human adenovirus E
cccucuccccccgcac

SEQ ID NO: 3935513 - RNA, 21 nt, Human adenovirus E
cccugcgguggugaaggagga

SEQ ID NO: 3935514 - RNA, 15 nt, Human adenovirus E
cccugcucccagagc

SEQ ID NO: 3935515 - RNA, 13 nt, Human adenovirus E
cccugggccagga

SEQ ID NO: 3935516 - RNA, 21 nt, Human adenovirus E
cccugggccaggacgacccgg

SEQ ID NO: 3935517 - RNA, 19 nt, Human adenovirus E
ccgaacucgcgccugcugc

SEQ ID NO: 3935518 - RNA, 19 nt, Human adenovirus E
ccgaaggaagaggcggugu

SEQ ID NO: 3935519 - RNA, 22 nt, Human adenovirus E
ccgaagggggucaucuugcagg

SEQ ID NO: 3935520 - RNA, 23 nt, Human adenovirus E
ccgacaaaaaucagacccacugc

SEQ ID NO: 3935521 - RNA, 20 nt, Human adenovirus E
ccgagcuccagcuccagugu

SEQ ID NO: 3935522 - RNA, 21 nt, Human adenovirus E
ccgaggaagaaaaccgcgccg

SEQ ID NO: 3935523 - RNA, 17 nt, Human adenovirus E
ccgcacccgcgccgacg

SEQ ID NO: 3935524 - RNA, 15 nt, Human adenovirus E
ccgcaccgaggugcc

SEQ ID NO: 3935525 - RNA, 16 nt, Human adenovirus E
ccgcagaacagggcaa

SEQ ID NO: 3935526 - RNA, 21 nt, Human adenovirus E
ccgcagaagcaagcuccagcu

SEQ ID NO: 3935527 - RNA, 16 nt, Human adenovirus E
ccgcagcaguggcagc

SEQ ID NO: 3935528 - RNA, 23 nt, Human adenovirus E
ccgcagcuugcccucggccucgg

SEQ ID NO: 3935529 - RNA, 22 nt, Human adenovirus E
ccgcauccccaaauucaaacac

SEQ ID NO: 3935530 - RNA, 21 nt, Human adenovirus E
ccgcaucugcaccucacagcu

SEQ ID NO: 3935531 - RNA, 16 nt, Human adenovirus E
ccgccaacgugccccg

SEQ ID NO: 3935532 - RNA, 18 nt, Human adenovirus E
ccgccaugaacucugacu

SEQ ID NO: 3935533 - RNA, 16 nt, Human adenovirus E
ccgcccaaggccgagc

SEQ ID NO: 3935534 - RNA, 12 nt, Human adenovirus E
ccgccuccaccc

SEQ ID NO: 3935535 - RNA, 16 nt, Human adenovirus E
ccgcgagggugcugcc

SEQ ID NO: 3935536 - RNA, 14 nt, Human adenovirus E
ccgcgagugccccc

SEQ ID NO: 3935537 - RNA, 20 nt, Human adenovirus E
ccgcgaucccugagcuccuc

SEQ ID NO: 3935538 - RNA, 15 nt, Human adenovirus E
ccgcgcgcgcgcuac

SEQ ID NO: 3935539 - RNA, 13 nt, Human adenovirus E
ccgcgcuccugga

SEQ ID NO: 3935540 - RNA, 16 nt, Human adenovirus E
ccgcggcacgcgcuuc

SEQ ID NO: 3935541 - RNA, 16 nt, Human adenovirus E
ccgcggcgccgcgccg

SEQ ID NO: 3935542 - RNA, 22 nt, Human adenovirus E
ccgcguaauuggcccgccgccc

SEQ ID NO: 3935543 - RNA, 14 nt, Human adenovirus E
ccgcgucagggugg

SEQ ID NO: 3935544 - RNA, 14 nt, Human adenovirus E
acugaauuuuuguc

SEQ ID NO: 3935545 - RNA, 13 nt, Human adenovirus E
acugaugacagca

SEQ ID NO: 3935546 - RNA, 16 nt, Human adenovirus E
acgcaguagaaggugc

SEQ ID NO: 3935547 - RNA, 18 nt, Human adenovirus E
acgccaucgucuccugcu

SEQ ID NO: 3935548 - RNA, 15 nt, Human adenovirus E
acgcccgcgccaaga

SEQ ID NO: 3935549 - RNA, 20 nt, Human adenovirus E
acgcccuuuucaaccugggu

SEQ ID NO: 3935550 - RNA, 21 nt, Human adenovirus E
acgcccuuuucaaccuggguc

SEQ ID NO: 3935551 - RNA, 23 nt, Human adenovirus E
acgccgcaccgcucccuggccug

SEQ ID NO: 3935552 - RNA, 19 nt, Human adenovirus E
acgccuuacauguggagcu

SEQ ID NO: 3935553 - RNA, 23 nt, Human adenovirus E
acgccuuacauguggagcuacca

SEQ ID NO: 3935554 - RNA, 16 nt, Human adenovirus E
acgcgcacuuccucaa

SEQ ID NO: 3935555 - RNA, 22 nt, Human adenovirus E
acgcgcccgcgcuugcugggcg

SEQ ID NO: 3935556 - RNA, 21 nt, Human adenovirus E
acgcgcucagcaccgaggagg

SEQ ID NO: 3935557 - RNA, 14 nt, Human adenovirus E
acgcgcucaucaag

SEQ ID NO: 3935558 - RNA, 14 nt, Human adenovirus E
acgcgcugcuggag

SEQ ID NO: 3935559 - RNA, 18 nt, Human adenovirus E
acgcuccugguccuguga

SEQ ID NO: 3935560 - RNA, 14 nt, Human adenovirus E
acggcuccccgcgc

SEQ ID NO: 3935561 - RNA, 15 nt, Human adenovirus E
acgggacgcagggcc

SEQ ID NO: 3935562 - RNA, 16 nt, Human adenovirus E
acgggacgcagggcca

SEQ ID NO: 3935563 - RNA, 21 nt, Human adenovirus E
acgggauagaaagccuggugg

SEQ ID NO: 3935564 - RNA, 20 nt, Human adenovirus E
acgggaugcacgugcugcac

SEQ ID NO: 3935565 - RNA, 22 nt, Human adenovirus E
  misc_feature (8)..(8): n is a, c, g, or u
acgggganggcguaggccuggg

SEQ ID NO: 3935566 - RNA, 22 nt, Human adenovirus E
acgggugaaugacauccgcgcc

SEQ ID NO: 3935567 - RNA, 22 nt, Human adenovirus E
acggguucgugcgccaggccug

SEQ ID NO: 3935568 - RNA, 14 nt, Human adenovirus E
acggucauguggau

SEQ ID NO: 3935569 - RNA, 15 nt, Human adenovirus E
acggucgagcugacc

SEQ ID NO: 3935570 - RNA, 22 nt, Human adenovirus E
acgucaccugcggcguggagca

SEQ ID NO: 3935571 - RNA, 12 nt, Human adenovirus E
acguccugcagg

SEQ ID NO: 3935572 - RNA, 21 nt, Human adenovirus E
acgugcccauagacaaggagg

SEQ ID NO: 3935573 - RNA, 22 nt, Human adenovirus E
acguggagcugaccaaccuggu

SEQ ID NO: 3935574 - RNA, 15 nt, Human adenovirus E
acuacagccuaggcc

SEQ ID NO: 3935575 - RNA, 17 nt, Human adenovirus E
acuaccucuucaggcac

SEQ ID NO: 3935576 - RNA, 13 nt, Human adenovirus E
acuaccuggccua

SEQ ID NO: 3935577 - RNA, 20 nt, Human adenovirus E
acuaggaacuucaggcuggg

SEQ ID NO: 3935578 - RNA, 12 nt, Human adenovirus E
acuaugccuucu

SEQ ID NO: 3935579 - RNA, 15 nt, Human adenovirus E
acucaccccggggcu

SEQ ID NO: 3935580 - RNA, 16 nt, Human adenovirus E
acucaggcagaggagg

SEQ ID NO: 3935581 - RNA, 16 nt, Human adenovirus E
acucagguguccagcu

SEQ ID NO: 3935582 - RNA, 21 nt, Human adenovirus E
acuccccucuucccagcucug

SEQ ID NO: 3935583 - RNA, 23 nt, Human adenovirus E
acuccccucuucccagcucuggu

SEQ ID NO: 3935584 - RNA, 15 nt, Human adenovirus E
acucgcagcagcugc

SEQ ID NO: 3935585 - RNA, 20 nt, Human adenovirus E
acugacguaaaggccaaagu

SEQ ID NO: 3935586 - RNA, 19 nt, Human adenovirus E
acugacuuccuccgcggcc

SEQ ID NO: 3935587 - RNA, 23 nt, Human adenovirus E
acugaggggcgugccccagggca

SEQ ID NO: 3935588 - RNA, 21 nt, Human adenovirus E
acugccgcugcaaccucugca

SEQ ID NO: 3935589 - RNA, 15 nt, Human adenovirus E
acuggaucuuugugc

SEQ ID NO: 3935590 - RNA, 22 nt, Human adenovirus E
acuggcagcccagccgccgggc

SEQ ID NO: 3935591 - RNA, 20 nt, Human adenovirus E
acugggcuuuucggcgcggu

SEQ ID NO: 3935592 - RNA, 13 nt, Human adenovirus E
acuucaaaaugaa

SEQ ID NO: 3935593 - RNA, 18 nt, Human adenovirus E
acuuccucaaacgcccaa

SEQ ID NO: 3935594 - RNA, 20 nt, Human adenovirus E
acuuccuccgcggccggcca

SEQ ID NO: 3935595 - RNA, 20 nt, Human adenovirus E
acuucucgcgcuucugcugu

SEQ ID NO: 3935596 - RNA, 13 nt, Human adenovirus E
acuugccgcagcc

SEQ ID NO: 3935597 - RNA, 16 nt, Human adenovirus E
acuuggccagccacuu

SEQ ID NO: 3935598 - RNA, 19 nt, Human adenovirus E
agaacagcagucaggcaga

SEQ ID NO: 3935599 - RNA, 18 nt, Human adenovirus E
agaacaggagcuacaacg

SEQ ID NO: 3935600 - RNA, 15 nt, Human adenovirus E
agaagcaagcuccag

SEQ ID NO: 3935601 - RNA, 14 nt, Human adenovirus E
agaagcgugggccu

SEQ ID NO: 3935602 - RNA, 14 nt, Human adenovirus E
agacaguucauuug

SEQ ID NO: 3935603 - RNA, 19 nt, Human adenovirus E
agacaugcaucccagcugg

SEQ ID NO: 3935604 - RNA, 16 nt, Human adenovirus E
agaccgugaaggagga

SEQ ID NO: 3935605 - RNA, 20 nt, Human adenovirus E
agacgaggaggaggcagagg

SEQ ID NO: 3935606 - RNA, 15 nt, Human adenovirus E
agacgaugggcaggc

SEQ ID NO: 3935607 - RNA, 15 nt, Human adenovirus E
agacuccgaggaggg

SEQ ID NO: 3935608 - RNA, 16 nt, Human adenovirus E
agacucgggccgcgaa

SEQ ID NO: 3935609 - RNA, 16 nt, Human adenovirus E
agacugauggccacgg

SEQ ID NO: 3935610 - RNA, 15 nt, Human adenovirus E
agagcaugagcacca

SEQ ID NO: 3935611 - RNA, 19 nt, Human adenovirus E
agagcgugaugcagcaggc

SEQ ID NO: 3935612 - RNA, 18 nt, Human adenovirus E
agagcuguccgugucccc

SEQ ID NO: 3935613 - RNA, 19 nt, Human adenovirus E
agaucaaaccgcagcagag

SEQ ID NO: 3935614 - RNA, 18 nt, Human adenovirus E
agaucuagggccucagga

SEQ ID NO: 3935615 - RNA, 14 nt, Human adenovirus E
agaucuucgagggu

SEQ ID NO: 3935616 - RNA, 21 nt, Human adenovirus E
agaugcaauugaaagcaacau

SEQ ID NO: 3935617 - RNA, 17 nt, Human adenovirus E
agauggcgagggggagc

SEQ ID NO: 3935618 - RNA, 18 nt, Human adenovirus E
agauggugggccuuugga

SEQ ID NO: 3935619 - RNA, 15 nt, Human adenovirus E
agcaaagcccccgau

SEQ ID NO: 3935620 - RNA, 23 nt, Human adenovirus E
agcaacaaguucaaggcgcgggu

SEQ ID NO: 3935621 - RNA, 11 nt, Human adenovirus E
agcaagcagca

SEQ ID NO: 3935622 - RNA, 15 nt, Human adenovirus E
agcaccacagggcag

SEQ ID NO: 3935623 - RNA, 13 nt, Human adenovirus E
agcaccaggcagg

SEQ ID NO: 3935624 - RNA, 23 nt, Human adenovirus E
  misc_feature (9)..(9): n is a, c, g, or u
agcacgaangaggccacguggga

SEQ ID NO: 3935625 - RNA, 16 nt, Human adenovirus E
agcacucaacccaccc

SEQ ID NO: 3935626 - RNA, 12 nt, Human adenovirus E
agcagaaggggg

SEQ ID NO: 3935627 - RNA, 21 nt, Human adenovirus E
agcagaccgugaaggaggaga

SEQ ID NO: 3935628 - RNA, 21 nt, Human adenovirus E
agcagcagagguugccagcuc

SEQ ID NO: 3935629 - RNA, 14 nt, Human adenovirus E
agcagccccaggcc

SEQ ID NO: 3935630 - RNA, 16 nt, Human adenovirus E
agcagcgagcugggca

SEQ ID NO: 3935631 - RNA, 21 nt, Human adenovirus E
agcagguggacugaggaucgc

SEQ ID NO: 3935632 - RNA, 14 nt, Human adenovirus E
agcagugcucaggu

SEQ ID NO: 3935633 - RNA, 13 nt, Human adenovirus E
agcaugaagggga

SEQ ID NO: 3935634 - RNA, 13 nt, Human adenovirus E
agcaugagcacca

SEQ ID NO: 3935635 - RNA, 14 nt, Human adenovirus E
agcauuaccacaca

SEQ ID NO: 3935636 - RNA, 20 nt, Human adenovirus E
agccacagcgacccaugcuc

SEQ ID NO: 3935637 - RNA, 19 nt, Human adenovirus E
agccacgaccgccgcggcc

SEQ ID NO: 3935638 - RNA, 17 nt, Human adenovirus E
agccacugcuaccugcu

SEQ ID NO: 3935639 - RNA, 15 nt, Human adenovirus E
agccagagcaggaag

SEQ ID NO: 3935640 - RNA, 18 nt, Human adenovirus E
agccauagcaaccaacau

SEQ ID NO: 3935641 - RNA, 16 nt, Human adenovirus E
agcccaacccgcgccu

SEQ ID NO: 3935642 - RNA, 15 nt, Human adenovirus E
agcccacggccgcca

SEQ ID NO: 3935643 - RNA, 22 nt, Human adenovirus E
agcccacggccgccagcuccuc

SEQ ID NO: 3935644 - RNA, 15 nt, Human adenovirus E
agcccagcaccagca

SEQ ID NO: 3935645 - RNA, 15 nt, Human adenovirus E
agccccgggcccagg

SEQ ID NO: 3935646 - RNA, 21 nt, Human adenovirus E
agccccguccucuucccacuc

SEQ ID NO: 3935647 - RNA, 12 nt, Human adenovirus E
agcccgaggaga

SEQ ID NO: 3935648 - RNA, 22 nt, Human adenovirus E
agcccgcgcgggaggcaggucc

SEQ ID NO: 3935649 - RNA, 21 nt, Human adenovirus E
agcccgugaccuugcagcagg

SEQ ID NO: 3935650 - RNA, 15 nt, Human adenovirus E
agcccugcaggaagc

SEQ ID NO: 3935651 - RNA, 16 nt, Human adenovirus E
agccgccuggacccgg

SEQ ID NO: 3935652 - RNA, 21 nt, Human adenovirus E
agccgcgcccugggccaggac

SEQ ID NO: 3935653 - RNA, 17 nt, Human adenovirus E
agccgcugacggcgcag

SEQ ID NO: 3935654 - RNA, 22 nt, Human adenovirus E
agccggcgcaaacccgggagcu

SEQ ID NO: 3935655 - RNA, 20 nt, Human adenovirus E
agcgacaucggcaccagcca

SEQ ID NO: 3935656 - RNA, 19 nt, Human adenovirus E
agcgaccaggagcugaugc

SEQ ID NO: 3935657 - RNA, 18 nt, Human adenovirus E
agcgacgaucugggggug

SEQ ID NO: 3935658 - RNA, 15 nt, Human adenovirus E
agcgcaccaccgccu

SEQ ID NO: 3935659 - RNA, 22 nt, Human adenovirus E
agcgcaugcggaucucgcucag

SEQ ID NO: 3935660 - RNA, 15 nt, Human adenovirus E
agcgcauggucuggu

SEQ ID NO: 3935661 - RNA, 18 nt, Human adenovirus E
agcgcccagucggcgaga

SEQ ID NO: 3935662 - RNA, 16 nt, Human adenovirus E
agcgccgcagcagugg

SEQ ID NO: 3935663 - RNA, 13 nt, Human adenovirus E
agcgccggcagga

SEQ ID NO: 3935664 - RNA, 19 nt, Human adenovirus E
agcgccggcaggacccgga

SEQ ID NO: 3935665 - RNA, 14 nt, Human adenovirus E
agcgcgcgcugccc

SEQ ID NO: 3935666 - RNA, 13 nt, Human adenovirus E
agcgcguggcccg

SEQ ID NO: 3935667 - RNA, 17 nt, Human adenovirus E
agcgcuagcagccgcgg

SEQ ID NO: 3935668 - RNA, 21 nt, Human adenovirus E
agcggccgaccgcgauggcuc

SEQ ID NO: 3935669 - RNA, 17 nt, Human adenovirus E
agcggugugccgcgguc

SEQ ID NO: 3935670 - RNA, 23 nt, Human adenovirus E
agcggugugccgcgguccuccuc

SEQ ID NO: 3935671 - RNA, 19 nt, Human adenovirus E
agcuagaaaauccacagcg

SEQ ID NO: 3935672 - RNA, 14 nt, Human adenovirus E
agcuccucccucag

SEQ ID NO: 3935673 - RNA, 15 nt, Human adenovirus E
agcucgacgagccgg

SEQ ID NO: 3935674 - RNA, 17 nt, Human adenovirus E
agcucgcgguugagaag

SEQ ID NO: 3935675 - RNA, 17 nt, Human adenovirus E
agcugaaaguggagcug

SEQ ID NO: 3935676 - RNA, 18 nt, Human adenovirus E
agcugaaguaugaauggg

SEQ ID NO: 3935677 - RNA, 14 nt, Human adenovirus E
agcugaccaaccug

SEQ ID NO: 3935678 - RNA, 22 nt, Human adenovirus E
agcugccguccucccggaggag

SEQ ID NO: 3935679 - RNA, 15 nt, Human adenovirus E
agcugucggccugcg

SEQ ID NO: 3935680 - RNA, 21 nt, Human adenovirus E
agcuuaccgagcagcagcaca

SEQ ID NO: 3935681 - RNA, 22 nt, Human adenovirus E
agcuugcccuucucgcugaaca

SEQ ID NO: 3935682 - RNA, 22 nt, Human adenovirus E
agcuugggggcgaggaagacgg

SEQ ID NO: 3935683 - RNA, 16 nt, Human adenovirus E
aggaacuggugcuuga

SEQ ID NO: 3935684 - RNA, 22 nt, Human adenovirus E
aggaagacugggagaacagcag

SEQ ID NO: 3935685 - RNA, 12 nt, Human adenovirus E
aggaaggcagcg

SEQ ID NO: 3935686 - RNA, 15 nt, Human adenovirus E
aggacaaaaaggaag

SEQ ID NO: 3935687 - RNA, 16 nt, Human adenovirus E
aggacaaaaaggaaga

SEQ ID NO: 3935688 - RNA, 14 nt, Human adenovirus E
aggacagccugcaa

SEQ ID NO: 3935689 - RNA, 15 nt, Human adenovirus E
aggacccggagacgc

SEQ ID NO: 3935690 - RNA, 14 nt, Human adenovirus E
aggacgccgaggcu

SEQ ID NO: 3935691 - RNA, 20 nt, Human adenovirus E
aggacuccgccgacgacagc

SEQ ID NO: 3935692 - RNA, 12 nt, Human adenovirus E
gaggcagcagca

SEQ ID NO: 3935693 - RNA, 17 nt, Human adenovirus E
gaggcagcagcagcaga

SEQ ID NO: 3935694 - RNA, 19 nt, Human adenovirus E
gaggcagcagcagcagaaa

SEQ ID NO: 3935695 - RNA, 14 nt, Human adenovirus E
gaggcccggcgcga

SEQ ID NO: 3935696 - RNA, 13 nt, Human adenovirus E
gaggcccuggcca

SEQ ID NO: 3935697 - RNA, 13 nt, Human adenovirus E
gaggcgcugcuga

SEQ ID NO: 3935698 - RNA, 17 nt, Human adenovirus E
gagggccgcuggcuccu

SEQ ID NO: 3935699 - RNA, 21 nt, Human adenovirus E
gagggcgagaucgagggcgag

SEQ ID NO: 3935700 - RNA, 16 nt, Human adenovirus E
gagggcgaguaccugg

SEQ ID NO: 3935701 - RNA, 17 nt, Human adenovirus E
gagggucugggcagcga

SEQ ID NO: 3935702 - RNA, 22 nt, Human adenovirus E
gagggugcugaaaacaccaccu

SEQ ID NO: 3935703 - RNA, 19 nt, Human adenovirus E
gagggugcugagggacgag

SEQ ID NO: 3935704 - RNA, 22 nt, Human adenovirus E
gagggugcugccgcggcggugc

SEQ ID NO: 3935705 - RNA, 21 nt, Human adenovirus E
gagguacaugggcaugagccc

SEQ ID NO: 3935706 - RNA, 23 nt, Human adenovirus E
gagguaguugagcgugguggcga

SEQ ID NO: 3935707 - RNA, 18 nt, Human adenovirus E
gaggugacccugggccug

SEQ ID NO: 3935708 - RNA, 12 nt, Human adenovirus E
gagucagagaaa

SEQ ID NO: 3935709 - RNA, 15 nt, Human adenovirus E
gagucugaaucuuua

SEQ ID NO: 3935710 - RNA, 12 nt, Human adenovirus E
gagugaugaaga

SEQ ID NO: 3935711 - RNA, 14 nt, Human adenovirus E
gaguuuggaagcag

SEQ ID NO: 3935712 - RNA, 19 nt, Human adenovirus E
gaucaaauuauacacugaa

SEQ ID NO: 3935713 - RNA, 14 nt, Human adenovirus E
gaucagccccgcgc

SEQ ID NO: 3935714 - RNA, 23 nt, Human adenovirus E
gaucagccccgcgcgcgcgcacg

SEQ ID NO: 3935715 - RNA, 17 nt, Human adenovirus E
gaucccauacuccaccu

SEQ ID NO: 3935716 - RNA, 19 nt, Human adenovirus E
gaucccauacuccaccucc

SEQ ID NO: 3935717 - RNA, 19 nt, Human adenovirus E
gaucccauuugagcuggag

SEQ ID NO: 3935718 - RNA, 22 nt, Human adenovirus E
gauccccgucuccugccgcgcc

SEQ ID NO: 3935719 - RNA, 18 nt, Human adenovirus E
gaucccgcgaugcgggcg

SEQ ID NO: 3935720 - RNA, 13 nt, Human adenovirus E
gaucccuccaggu

SEQ ID NO: 3935721 - RNA, 17 nt, Human adenovirus E
gaucccugagcuccucc

SEQ ID NO: 3935722 - RNA, 15 nt, Human adenovirus E
gaucccugcuugcau

SEQ ID NO: 3935723 - RNA, 22 nt, Human adenovirus E
gaucgcggcgaacgagccggcg

SEQ ID NO: 3935724 - RNA, 15 nt, Human adenovirus E
gaucuccaccgcgcc

SEQ ID NO: 3935725 - RNA, 16 nt, Human adenovirus E
gaucucuugcacgucc

SEQ ID NO: 3935726 - RNA, 13 nt, Human adenovirus E
gaugaagugggcg

SEQ ID NO: 3935727 - RNA, 14 nt, Human adenovirus E
gaugaccugggcgg

SEQ ID NO: 3935728 - RNA, 23 nt, Human adenovirus E
gaugaugauauucuggagcaggc

SEQ ID NO: 3935729 - RNA, 22 nt, Human adenovirus E
gaugcauagucugcagcgggcc

SEQ ID NO: 3935730 - RNA, 17 nt, Human adenovirus E
gauggccacgggcagcc

SEQ ID NO: 3935731 - RNA, 14 nt, Human adenovirus E
gauggugaagaugc

SEQ ID NO: 3935732 - RNA, 23 nt, Human adenovirus E
gauggugaagaugccgggcagga

SEQ ID NO: 3935733 - RNA, 10 nt, Human adenovirus E
gauggugguc

SEQ ID NO: 3935734 - RNA, 19 nt, Human adenovirus E
gauguacagguggcagaug

SEQ ID NO: 3935735 - RNA, 14 nt, Human adenovirus E
gaugugcucgguga

SEQ ID NO: 3935736 - RNA, 16 nt, Human adenovirus E
gauguggacagcagcg

SEQ ID NO: 3935737 - RNA, 21 nt, Human adenovirus E
gauuccucgggaaaacucauc

SEQ ID NO: 3935738 - RNA, 22 nt, Human adenovirus E
gcaaaacuaacacuuugcuuga

SEQ ID NO: 3935739 - RNA, 18 nt, Human adenovirus E
gcaaacccgggagcugag

SEQ ID NO: 3935740 - RNA, 23 nt, Human adenovirus E
gcaaagcccccgaucccuccagg

SEQ ID NO: 3935741 - RNA, 16 nt, Human adenovirus E
gcaacaacagcccccu

SEQ ID NO: 3935742 - RNA, 15 nt, Human adenovirus E
gcaacauccccgcgc

SEQ ID NO: 3935743 - RNA, 18 nt, Human adenovirus E
gcaaccaacauuggaaau

SEQ ID NO: 3935744 - RNA, 15 nt, Human adenovirus E
gcaacggccugcccg

SEQ ID NO: 3935745 - RNA, 14 nt, Human adenovirus E
gcaagaccaccacu

SEQ ID NO: 3935746 - RNA, 13 nt, Human adenovirus E
aaaaauacccgcc

SEQ ID NO: 3935747 - RNA, 20 nt, Human adenovirus E
aaaagcgcccgaggaagcaa

SEQ ID NO: 3935748 - RNA, 13 nt, Human adenovirus E
aaaauuugaagau

SEQ ID NO: 3935749 - RNA, 13 nt, Human adenovirus E
aaacacgacuuuc

SEQ ID NO: 3935750 - RNA, 17 nt, Human adenovirus E
aaacagguguugaugau

SEQ ID NO: 3935751 - RNA, 20 nt, Human adenovirus E
aaacccuccgggcacucccg

SEQ ID NO: 3935752 - RNA, 16 nt, Human adenovirus E
aaagcuccgcuugccg

SEQ ID NO: 3935753 - RNA, 14 nt, Human adenovirus E
aaagguuggggcac

SEQ ID NO: 3935754 - RNA, 15 nt, Human adenovirus E
aaaucagacccacug

SEQ ID NO: 3935755 - RNA, 23 nt, Human adenovirus E
aacaagucuauguuggcacagca

SEQ ID NO: 3935756 - RNA, 19 nt, Human adenovirus E
aacauucuggccugcaccc

SEQ ID NO: 3935757 - RNA, 15 nt, Human adenovirus E
aaccaucacagagag

SEQ ID NO: 3935758 - RNA, 14 nt, Human adenovirus E
aacccaccacgccu

SEQ ID NO: 3935759 - RNA, 19 nt, Human adenovirus E
aaccggugcugagacccgg

SEQ ID NO: 3935760 - RNA, 17 nt, Human adenovirus E
aaccuauggcagcaagg

SEQ ID NO: 3935761 - RNA, 21 nt, Human adenovirus E
aaccugacacaccaccacagc

SEQ ID NO: 3935762 - RNA, 23 nt, Human adenovirus E
aaccugggauccaugguggcgcu

SEQ ID NO: 3935763 - RNA, 16 nt, Human adenovirus E
aacgccugcugggccu

SEQ ID NO: 3935764 - RNA, 13 nt, Human adenovirus E
aacgcgcuggugg

SEQ ID NO: 3935765 - RNA, 21 nt, Human adenovirus E
aacgcuccggaauccugcccg

SEQ ID NO: 3935766 - RNA, 13 nt, Human adenovirus E
aacggccugcccg

SEQ ID NO: 3935767 - RNA, 20 nt, Human adenovirus E
aacucuuauaccuucucaua

SEQ ID NO: 3935768 - RNA, 15 nt, Human adenovirus E
aacuuuuaauccaaa

SEQ ID NO: 3935769 - RNA, 20 nt, Human adenovirus E
aagaagcugaaaguggagcu

SEQ ID NO: 3935770 - RNA, 17 nt, Human adenovirus E
aagagucagagaaaggc

SEQ ID NO: 3935771 - RNA, 15 nt, Human adenovirus E
aagcaaguuccggag

SEQ ID NO: 3935772 - RNA, 22 nt, Human adenovirus E
aagcagccgccgccagaccguc

SEQ ID NO: 3935773 - RNA, 19 nt, Human adenovirus E
aagccuuuagacagcagcc
